United States Patent Application Publication US 2020/0163878 A1 - sequence listing, part 22

SEQ ID NO: 78168 - RNA, 1410 nt, Artificial Sequence
  derived and/or modified CDS sequence (opt1) from neuraminidase__InfluenzaA__AAX11618
augaaccccaaccagaagaucaucaccaucggcagcgugucccugaccaucgccacgaucugcuuccucaugcagaucgccauccuggucaccaccgugacccugcacuucaagcagcacgagugcaacagcccgcccaacaaccaggugaugcucugcgagcccacgaucaucgagcgcaacaucaccgagaucgucuaccugaccaacaccacgaucgagaaggagaucugccccaagcuggcggaguaccggaacugguccaagccgcagugcaacaucaccggguucgcccccuucagcaaggacaacuccauccgccucagcgccggcggggacaucugggugacccgggagcccuacguguccugcgaccccgacaagugcuaccaguucgcccugggccaggggaccacgcugaacaacggccacagcaacgacaccguccacgaccgcaccccguaccggacccuccugaugaacgagcugggcgugcccuuccaccucgggacgcgccaggugugcaucgccugguccagcuccagcugccacgacggcaaggcguggcugcacgucugcgugaccggggacgacaagaacgccaccgccuccuucaucuacaacggccggcugguggacagcaucggguccuggagcaagaagauccuccgcacccaggaguccgagugcgucugcaucaacggcacgugcaccguggugaugaccgacggcagcgccuccgggaaggcggacaccaagauccuguucaucgaggagggcaagaucguccacaucagcgcccugagcggguccgcccagcacguggaggagugcagcugcuacccccgguaccccggcgugcgcugcgucugccgggacaacuggaagggcuccaaccgcccgaucguggacaucaacgugaaggacuacagcaucgucuccagcuacgugugcuccgggcucgugggcgacacgccccggaagaacgacagcuccagcuccagccacugccuggaccccaacaacgaggagggcgggcacggggucaagggcugggccuucgacgacggcaacgacguguggauggggcgcaccaucuccgagaagcugcggagcggcuacgagaccuucaaggucaucgaggggugguccaagcccaacagcaagcuccagaucaaccgccaggugaucguggagcggggcaaccgcuccggguacagcggcaucuucuccgucgagggcaagagcugcaucaaccggugcuucuacguggagcugauccgcgggcggaaggaggagaccgaggugugguggacgagcaacuccaucgucguguucugcggcaccagcgggaccuacggcaccggguccuggccggacggcgccgacaucaaccugaugcccaucuga

SEQ ID NO: 78169 - RNA, 1410 nt, Artificial Sequence
  derived and/or modified CDS sequence (opt1) from neuraminidase__InfluenzaA__AAX12744
augaaccccaaccagaagaucaucaccaucggcagcgugucccugaccaucgccacgaucugcuuccucaugcagaucgccauccuggucaccaccgugacccugcacuucaagcagcacgagugcaacagcccgcccaacaaccaggugaugcucugcgagcccacgaucaucgagcgcaacaucaccgagaucgucuaccugaccaacaccacgaucgagaaggagaucugccccaagcuggcggaguaccggaacugguccaagccgcagugcaacaucaccggguucgcccccuucagcaaggacaacuccauccgccucagcgccggcggggacaucugggugacccgggagcccuacguguccugcgaccccgacaagugcuaccaguucgcccugggccaggggaccacgcugaacaacggccacagcaacgacaccguccacgaccgcaccccguaccggacccuccugaugaacgagcugggcgugcccuuccaccucgggacgcgccaggugugcaucgccugguccagcuccagcugccacgacggcaaggcguggcugcacgucugcgugaccggggacgacaagaacgccaccgccuccuucaucuacaacggccggcugguggacagcaucggguccuggagcaagaagauccuccgcacccaggaguccgagugcgucugcaucaacggcacgugcaccguggugaugaccgacggcagcgccuccgggaaggcggacaccaagauccuguucaucgaggagggcaagaucguccacaucagcacgcugagcggguccgcccagcacguggaggagugcagcugcuacccccgguaccccggcgugcgcugcgucugccgggacaacuggaagggcuccaaccgcccgaucguggacaucaacgugaaggacuacagcaucgucuccagcuacgugugcuccgggcucgugggcgacacgccccggaagaacgacagcuucuccagcucccacugccuggaccccaacaacgaggagggcgggcacggggucaagggcugggccuucgacgacggcaacgacguguggauggggcgcaccaucagcgagaagcugcgguccggcuacgagaccuucaaggucaucgagggguggagcaagcccaacuccaagcuccagaucaaccgccaggugaucguggagcggggcaaccgcagcggguacuccggcaucuucagcgucgagggcaaguccugcaucaaccggugcuucuacguggagcugauccgcgggcggaaggaggagaccgaggugugguggaccagcaacagcaucgucguguucugcggcaccuccgggaccuacggcacggggagcuggccggacggcgccgacaucaaccugaugcccaucuga

SEQ ID NO: 78170 - RNA, 1410 nt, Artificial Sequence; identical to SEQ ID NO: 78161
  derived and/or modified CDS sequence (opt1) from neuraminidase__InfluenzaA__AAX12754

SEQ ID NO: 78171 - RNA, 1410 nt, Artificial Sequence
  derived and/or modified CDS sequence (opt1) from neuraminidase__InfluenzaA__AAX12774
augaaccccaaccagaagaucaucaccaucggcagcgugucccugaccaucgccacgaucugcuuccucaugcagaucgccauccuggucaccaccgugacccugcacuucaagcaguacgagugcaacagcccgcccaacaaccaggugaugcucugcgagcccgcgaucaucgagcgcaacaucacggagaucgucuaccugaccaacaccaccaucgagaaggagaucugccccaagcuggccgaguaccggaacugguccaagccgcagugcaacaucacgggguucgcccccuucagcaaggacaacuccauccgccucagcgccggcggggacaucugggugacccgggagcccuacguguccugcgaccccgacaagugcuaccaguucgcccugggccaggggaccacccugaacaacggccacagcaacgacacgguccacgaccgcaccccguaccggacccuccugaugaacgagcugggcgugcccuuccaccucgggacccgccaggugugcaucgcgugguccagcuccagcugccacgacggcaaggccuggcugcacgucugcgugacgggggacgacaagaacgccaccgccuccuucaucuacaacggccggcugguggacagcaucggguccuggagcaagaagauccuccgcacccaggaguccgagugcgucugcaucaacgggaccugcacgguggugaugaccgacggcagcgcguccgggaaggccgacaccaagauccuguucaucgaggagggcaagaucgucaacaucagcacccugagcggguccgcccagcacguggaggagugcagcugcuacccccgguaccccggcgugcgcugcgucugccgggacaacuggaagggcuccaaccgcccgaucguggacaucaacgugaaggacuacagcaucgucuccagcuacgugugcuccgggcucgugggcgacacgccccggaagaacgacagcuucuccagcucccacugccuggaccccaacaacgaggagggcggccacggggucaagggcugggccuucgacgacggcaacgacguguggauggggcgcaccaucagcgagaagcugcgguccggcuacgagaccuucaaggucaucgagggguggagcaagcccaacuccaagcuccagaucaaccgccaggugaucguggagcggggcaaccgcagcggguacuccggcaucuucagcgucgagggcaaguccugcaucaaccggugcuucuacguggagcugauccgcgggcggaaggaggagaccgaggugugguggacgagcaacagcaucgucguguucugcggcaccuccgggaccuacggcaccgggagcuggccggacggcgccgacaucaaccugaugcccaucuga

SEQ ID NO: 78172 - RNA, 1410 nt, Artificial Sequence
  derived and/or modified CDS sequence (opt1) from neuraminidase__InfluenzaA__AAX12804
augaaccccaaccagaagaucaucaccaucggcagcgugucccugaccaucgccacgaucugcuuccucaugcagaucgccauccuggucaccaccgugacccugcacuucaagcaguacgagugcaacagcccgcccaacaaccaggugaugcucugcgagcccacgaucaucgagcgcaacaucaccgagaucgucuaccugaccaacaccacgaucgagaaggagaucugccccaagcuggcggaguaccggaacugguccaagccgcagugcaacaucaccggguucgcccccuucagcaaggacaacuccauccgccucagcgccggcggggacaucugggugacccgggagcccuacguguccugcgaccccgacaagugcuaccaguucgcccugggccaggggaccacgcugaacaacggccacagcaacgacaccguccacgaccgcaccccguaccggacccuccugaugaacgagcugggcgugcccuuccaccucgggacgcgccaggugugcaucgccugguccagcuccagcugccacgacggcaaggcguggcugcacgucugcgugaccggggacgacgagaacgccaccgccuccuucaucuacaacggccggcugguggacagcaucggguccuggagcaagaagauccuccgcacccaggaguccgagugcgucugcaucaacggcacgugcaccguggugaugaccgacggcagcgccuccgggaaggcggacaccaagauccuguucaucgaggagggcaagaucguccacaucagcacgcugagcggguccgcccagcacguggaggagugcagcugcuacccccgguaccccggcgugcgcugcgucugccgggacaacuggaagggcuccaaccgcccgaucguggacaucaacgugaaggacuacagcaucgucuccagcuacgugugcuccgggcucgugggcgacacgccccggaagaacgacaacuucagcuccagccacugccuggaccccaacaacgaggagggcgggcacggggucaagggcugggccuucgacgacggcaacgacguguggauggggcgcaccaucuccgagaagcugcggagcggcuacgagaccuucaaggucaucgaggggugguccaagcccaacagcaagcuccagaccaaccgccaggugaucguggagcggggcaaccgcuccggguacagcggcaucuucuccgucgagggcaagagcugcaucaaccggugcuucuacguggagcugauccgcgggcggaaggaggagaccgaggugugguggaccuccaacagcaucgucguguucugcggcaccagcgggacguacggcaccggguccuggccggacggcgccgacaucaaccugaugcccaucuga

SEQ ID NO: 78173 - RNA, 1410 nt, Artificial Sequence
  derived and/or modified CDS sequence (opt1) from neuraminidase__InfluenzaA__AAX12814
augaaccccaaccagaagaucaucaccaucggcagcgugucccugaccaucgccacgaucugcuuccucaugcagaucgccauccuggucaccaccgugacccugcacuucaagcaguacgagugcaacagcccgcccaacaaccaggugaugcucugcgagcccgcgaucaucgagcgcaacaucacggagaucgucuaccugaccaacaccaccaucgagaaggagaucugccccaagcuggccgaguaccggaacugguccaagccgcagugcaacaucacgggguucgcccccuucagcaaggacaacuccauccgccucagcgccggcggggacaucugggugacccgggagcccuacguguccugcgaccccgacaagugcuaccaguucgcccugggccaggggaccacccugaacaacggccacagcaacgacacgguccacgaccgcaccccguaccggacccuccugaugaacgagcugggcgugcccuuccaccucgggacccgccaggugugcaucgcgugguccagcuccagcugccacgacggcaaggccuggcugcacgucugcgugacgggggacgacgagaacgccaccgccuccuucaucuacaacggccggcugguggacagcaucggguccuggagcaagaagauccuccgcacccaggaguccgagugcgucugcaucaacgggaccugcacgguggugaugaccgacggcagcgcguccgggaaggccgacaccaagauccuguucaucgaggagggcaagaucgucaacaucagcacccugagcggguccgcccagcacguggaggagugcagcugcuacccccgguaccccggcgugcgcugcgucugccgggacaacuggaagggcuccaaccgcccgaucguggacaucaacgugaaggacuacagcaucgucuccagcuacgugugcuccgggcucgugggcgacacgccccggaagaacgacagcuucuccagcucccacugccuggaccccaacaacgaggagggcggccacggggucaagggcugggccuucgacgacggcaacgacguguggauggggcgcaccaucagcgagaagcugcgguccggcuacgagaccuucaaggucaucgagggguggagcaagcccaacuccaagcuccagaucaaccgccaggugaucguggagcggggcaaccgcagcggguacuccggcaucuucagcgucgagggcaaguccugcaucaaccggugcuucuacguggagcugauccgcgggcggaaggaggagaccgaggugugguggacgagcaacagcaucgucguguucugcggcaccuccgggaccuacggcaccgggagcuggccggacggcgccgacaucaaccugaugcccaucuga

SEQ ID NO: 78174 - RNA, 1410 nt, Artificial Sequence
  derived and/or modified CDS sequence (opt1) from neuraminidase__InfluenzaA__AAX34064
augaaccccaaccagaagaucaucaccaucggcagcgugucccugaccaucgccacgaucugcuuccucaugcagaucgccauccuggucaccaccgugacccugcacuucaagcagcacgagugcaacagcccgcccaacaaccaggugaugcucugcgagcccacgaucaucgagcgcaacaucaccgagaucgucuaccugaccaacaccacgaucgagcgggagaucugccccaagcuggcggaguaccgcaacugguccaagccgcagugcaacaucaccggguucgcccccuucagcaaggacaacuccauccggcucagcgccggcggggacaucugggugacccgcgagcccuacguguccugcgaccccgacaagugcuaccaguucgcccugggccaggggaccacgcugaacaacggccacagcaacgacaccguccacgaccggaccccguaccgcacccuccugaugaacgagcugggcgugcccuuccaccucgggacgcgccaggugugcaucgccugguccagcuccagcugccacgacggcaaggcguggcugcacgucugcgugaccggggacgacaagaacgccaccgccuccuucaucuacaacggccggcugguggacagcaucggguccuggagcaagaagauccuccggacccaggaguccgagugcgucugcaucaacggcacgugcaccguggugaugaccgacggcagcgccuccgggaaggcggacaccaagauccuguucaucgaggagggcaagaucguccacaucagcacgcugagcggguccgcccagcacguggaggagugcagcugcuacccccgcuaccccggcgugcggugcgucugccgcgacaacuggaagggcuccaaccggccgaucguggacaucaacgugaaggacuacagcaucgucuccagcuacgugugcuccgggcucgugggcgacacgccccgcaagaacgacagcuccagcuccagccacugccuggaccccaacaacgaggagggcgggcacggggucaagggcugggccuucgacgacggcaacgacguguggauggggcggaccaucuccgagaagcugcgcagcggcuacgagaccuucaaggucaucgaggggugguccaagcccaacagcaagcuccagaucaaccgccaggugaucguggagcggggcaaccgguccggguacagcggcaucuucuccgucgagggcaagagcugcaucaaccgcugcuucuacguggagcugauccgggggcgcaaggaggagaccgaggugugguggaccagcaacuccaucgucguguucugcggcaccagcgggaccuacggcacgggguccuggccggacggcgccgacaucaaccugaugcccaucuga

SEQ ID NO: 78175 - RNA, 1410 nt, Artificial Sequence
  derived and/or modified CDS sequence (opt1) from neuraminidase__InfluenzaA__AAX35824
augaaccccaaccagaagaucaucaccaucggcagcgugucccugaccaucgccacgaucugcuuccucaugcagaucgccauccuggucaccaccgugacccugcacuucaagcaguacgagugcaacagcccgcccaacaaccaggugaugcucugcgagcccacgaucaucgagcgcaacaucaccgagaucgucuaccuggcgaacaccaccaucgagaaggagaucugccccaagcuggccgaguaccggaacugguccaagccgcagugcaacaucacgggguucgcccccuucagcaaggacaacuccauccgccucagcgccggcggggacaucugggugacccgggagcccuacguguccugcgaccccgacaagugcuaccaguucgcccugggccaggggaccacccugaacaacggccacagcaacgacacgguccacgaccgcaccccguaccggacccuccugaugaacgagcugggcgugcccuuccaccucgggacccgccaggugugcaucgcgugguccagcuccagcugccacgacggcaaggccuggcugcacgucugcgugacgggggacgacaagaacgccaccgccuccuucaucuacaacggccggcugguggacagcaucggguccuggagcaagaagauccuccgcacccaggaguccgagugcgucugcaucaacgggaccugcacgguggugaugaccgacggcagcgcguccgggaaggccgacaccaagauccuguucaucgaggagggcaagaucauccacaucagcacccugagcggguccgcccagcacgucgaggagugcagcugcuacccccgguaccccggcgugcgcugcgugugccgggacaacuggaagggcuccaaccgcccgaucgucgacaucaacgugaaggacuacagcaucguguccagcuacgucugcuccgggcucgugggcgacacgccccggaagaacgacagcuccagcuccagccacugccuggaccccaacaacgaggagggcggccacggggugaagggcugggccuucgacgacggcaacgacgucuggauggggcgcaccaucuccgagaagcugcggagcggcuacgagaccuucaaggugaucgaggggugguccaagcccaacagcaagcuccagaucaaccgccaggucaucguggagcggggcaaccgcuccggguacagcggcaucuucuccguggagggcaagagcugcaucaaccggugcuucuacgucgagcugauccgcgggcggaaggaggagaccgaggugugguggacgagcaacuccaucguggucuucugcggcaccagcgggaccuacggcaccggguccuggccggacggcgccgacaucaaccugaugcccaucuga

SEQ ID NO: 78176 - RNA, 1410 nt, Artificial Sequence; identical to SEQ ID NO: 78159
  derived and/or modified CDS sequence (opt1) from neuraminidase__InfluenzaA__AAX35834

SEQ ID NO: 78177 - RNA, 1410 nt, Artificial Sequence
  derived and/or modified CDS sequence (opt1) from neuraminidase__InfluenzaA__AAX35844
augaaccccaaccagaagaucaucaccaucggcagcgugucccugaccaucgccacgaucugcuuccucaugcagaucgccauccuggucaccaccgugacccugcacuucaagcaguacgagugcaacagcccgcccaacaaccaggugaugcucugcgagcccacgaucaucgagcgcaacaucaccgagaucgucuaccugaccaacaccacgaucgagaaggagaucugccccaagcuggcggaguaccggaacugguccaagccgcagugcaacaucaccggguucgcccccuucagcaaggacaacuccauccgccucagcgccggcggggacaucugggugacccgggagcccuacguguccugcgaccccgacaagugcuaccaguucgcccugggccaggggaccacgcugaacaacggccacagcaacgacaccguccacgaccgcaccccguaccggacccuccugaugaacgagcugggcgugcccuuccaccucgggacgcgccaggugugcaucgccugguccagcuccagcugccacgacggcaaggcguggcugcacgucugcgugaccggggacgacgagaacgccaccgccuccuucaucuacaacggccggcugguggacagcaucggguccuggagcaagaagauccuccgcacccaggaguccgagugcgucugcaucaacggcacgugcaccguggugaugaccgacggcagcgccuccgggaaggcggacaccaagauccuguucaucgaggagggcaagaucguccacaucagcacgcugagcggguccgcccagcacguggaggagugcagcugcuacccccgguaccccggcgugcgcugcgucugccgggacaacuggaagggcuccaaccgcccgaucguggacaucaacgugaaggacuacagcaucgucuccagcuacgugugcuccgggcucgugggcgacacgccccggaagaacgacagcuucuccaacagccacugccuggaccccaacaacgaggagggcgggcacggggucaagggcugggccuucgacgacggcaacgacguguggauggggcgcaccaucuccgagaagcugcggagcggcuacgagaccuucaaggucaucgaggggugguucaagcccaacuccaagcuccagaucaaccgccaggugaucguggagcggggcaaccgcagcggguacuccggcaucuucagcgucgagggcaaguccugcaucaaccggugcuucuacguggagcugauccgcgggcggaaggaggagaccgaggugugguggaccagcaacuccaucgucguguucugcggcaccagcgggaccuacggcacggggagcuggccggacggcgccgacaucaaccugaugcccaucuga

SEQ ID NO: 78178 - RNA, 1410 nt, Artificial Sequence
  derived and/or modified CDS sequence (opt1) from neuraminidase__InfluenzaA__AAX35854
augaaccccaaccagaagaucaucaccaucggcagcgugucccugaccaucgccacgaucugcuuccucaugcagaucgccauccuggucaccaccgugacccugcacuucaagcaguacgagugcaacagcccgcccaacaaccaggugaugcucugcgagcccacgaucaucgagcgcaacaucaccgagaucgucuaccugaccaacaccacgaucgagaaggagaucugccccaagcuggcggaguaccggaacugguccaagccgcagugcaacaucaccggguucgcccccuucagcaaggacaacuccauccgccucagcgccggcggggacaucugggugacccgggagcccuacguguccugcgaccccgacaagugcuaccaguucgcccugggccaggggaccacgcugaacaacggccacagcaacgacaccguccacgaccgcaccccguaccggacccuccugaugaacgagcugggcgugcccuuccaccucgggacgcgccaggugugcaucgccugguccagcuccagcugccacgacggcaaggcguggcugcacgucugcgugaccggggacgacgagaacgccaccgccuccuucaucuacaacggccggcugguggacagcaucggguccuggagcaagaagauccuccgcacccaggaguccgagugcgucugcaucaacggcacgugcaccguggugaugaccgacggcagcgccuccgggaaggcggacaccaagauccuguucaucgaggagggcaagaucguccacaucagcacgcugagcggguccgcccagcacguggaggagugcagcugcuacccccgguaccccggcgugcgcugcgucugccgggacaacuggaagggcuccaaccgcccgaucguggacaucaacgugaaggacuacagcaucgucuccagcuacgugugcuccgggcucgugggcgacacgccccggaagaacgacagcuucuccagcucccacugccuggaccccaacaacgaggagggcgggcacggggucaagggcugggccuucgacgacggcaacgacguguggauggggcgcaccaucagcgagaagcugcgguccggcuacgagaccuucaaggucaucgagggguggagcaagcccaacuccaagcuccagaucaaccgccaggugaucguggagcggggcaaccgcagcggguacuccggcaucuucagcgucgagggcaaguccugcaucaaccggugcuucuacguggagcugauccgcgggcggaaggaggagaccgaggugugguggaccagcaacagcaucgucguguucugcggcaccuccgggaccuacggcacggggagcuggccggacggcgccgacaucaaccugaugcccaucuga

SEQ ID NO: 78179 - RNA, 1410 nt, Artificial Sequence
  derived and/or modified CDS sequence (opt1) from neuraminidase__InfluenzaA__AAX35864
augaaccccaaccagaagaucaucaccaucggcagcgugucccugaccaucgccacgaucugcuuccucaugcagaucgccauccuggucaccaccgugacccugcacuucaagcaguacgagugcaacagcccgcccaacaaccaggugaugcucugcgagcccgcgaucaucgagcgcaacaucacggagaucgucuaccugaccaacaccaccaucgagaaggagaucugccccaagcuggccgaguaccggaacugguccaagccgcagugcaacaucacgggguucgcccccuucagcaaggacaacuccauccgccucagcgccggcggggacaucugggugacccgggagcccuacguguccugcgaccccgacaagugcuaccaguucgcccugggccaggggaccacccugaacaacggccacagcaacgacacgguccacgaccgcaccccguaccggacccuccugaugaacgagcugggcgugcccuuccaccucgggacccgccaggugugcaucgcgugguccagcuccagcugccacgacggcaaggccuggcugcacgucugcgugacgggggacgacgagaacgccaccgccuccuucaucuacaacggccggcugguggacagcaucggguccuggagcaagaacauccuccgcacccaggaguccgagugcgucugcaucaacgggaccugcacgguggugaugaccgacggcagcgcguccgggaaggccgacaccaagauccuguucaucgaggagggcaagaucgucaacaucagcacccugagcggguccgcccagcacguggaggagugcagcugcuacccccgguaccccggcgugcgcugcgucugccgggacaacuggaagggcuccaaccgcccgaucguggacaucaacgugaaggacuacagcaucgucuccagcuacgugugcuccgggcucgugggcgacacgccccggaagaacgacagcuucuccagcucccacugccuggaccccaacaacgaggagggcggccacggggucaagggcugggccuucgacgacggcaacgacguguggauggggcgcaccaucagcgagaagcugcgguccggcuacgagaccuucaaggucaucgagggguggagcaagcccaacuccaagcuccagaucaaccgccaggugaucguggagcggggcaaccgcagcggguacuccggcaucuucagcgucgagggcaaguccugcaucaaccggugcuucuacguggagcugauccgcgggcggaaggaggagaccgaggugugguggacgagcaacagcaucgucguguucugcggcaccuccgggaccuacggcaccgggagcuggccggacggcgccgacaucaaccugaugcccaucuga

SEQ ID NO: 78180 - RNA, 1410 nt, Artificial Sequence
  derived and/or modified CDS sequence (opt1) from neuraminidase__InfluenzaA__AAX47538
augaaccccaaccagaagaucaucaccaucggcagcgugucccugaccaucgccacgaucugcuuccucaugcagaucgccauccuggucaccaccgugacccugcacuucaagcaguacgagugcaacagcccgcccaacaaccaggugaugcucugcgagcccgcgaucaucgagcgcaacaucacggagaucgucuaccugaccaacaccaccaucgaggaggagaucugccccaagcuggccgaguaccggaacugguccaagccgcagugcaacaucacgggguucgcccccuucagcaaggacaacuccauccgccucagcgccggcggggacaucugggugacccgggagcccuacguguccugcgaccccgacaagugcuaccaguucgcccugggccaggggaccacccugaacaacggccacagcaacgacacgguccacgaccgcaccccguaccggacccuccugaugaacgagcugggcgugcccuuccaccucgggacccgccaggugugcaucgcgugguccagcuccagcugccacgacggcaaggccuggcugcacgucugcgugacgggggacgacaagaacgccaccgccuccuucaucuacaacggccggcugguggacagcaucggguccuggagcaagaagauccuccgcacccaggaguccgagugcgucugcaucaacgggaccugcacgguggugaugaccgacggcagcgcguccgggaaggccgacaccaagauccuguucaucgaggagggcaagaucgucaacaucagcacccugagcggguccgcccagcacguggaggagugcagcugcuacccccgguaccccggcgugcgcugcgucugccgggacaacuggaagggcuccaaccgcccgaucguggacaucaacgugaaggacuacagcaucgucuccagcuacgugugcuccgggcucgugggcgacacgccccggaagaacgacagcuucuccagcucccacugccuggaccccaacaacgaggagggcggccacggggucaagggcugggccuucgacgacggcaacgacguguggauggggcgcaccaucagcgagaagcugcgguccggcuacgagaccuucaaggucaucgagggguggagcaagcccaacuccaagcuccagaucaaccgccaggugaucguggagcggggcaaccgcagcggguacuccggcaucuucagcgucgagggcaaguccugcaucaaccggugcuucuacguggagcugauccgcgggcggaaggaggagaccgaggugugguggacgagcaacagcaucgucguguucugcggcaccuccgggaccuacggcaccgggagcuggccggacggcgccgacaucaaccugaugcccaucuga

SEQ ID NO: 78181 - RNA, 1410 nt, Artificial Sequence; identical to SEQ ID NO: 78159
  derived and/or modified CDS sequence (opt1) from neuraminidase__InfluenzaA__AAX56383

SEQ ID NO: 78182 - RNA, 1410 nt, Artificial Sequence
  derived and/or modified CDS sequence (opt1) from neuraminidase__InfluenzaA__AAX56393
augaaccccaaccagaagaucaucaccaucggcagcgugucccugaccaucgccacgaucugcuuccucaugcagaucgccauccuggucaccaccgugacccugcacuucaagcagcacgagugcaacagcccgcccaacaaccaggugaugcucugcgagcccacgaucaucgagcgcaacaucaccgagaucgucuaccugaccaacaccacgaucgagaaggagaucugccccaagcuggcggaguaccggaacugguccaagccgcagugcaacaucaccggguucgcccccuucagcaaggacaacuccauccgccucagcgccggcggggacaucugggugacccgggagcccuacguguccugcgaccccgacaagugcuaccaguucgcccugggcaaggggaccacgcugaacaacggccacagcaacaacaccguccacgaccgcaccccguaccggacccuccugaugaacgagcugggcgugcccuuccaccucgggacgcgccaggugugcaucgccugguccagcuccagcugccacgacggcaaggcguggcugcacgucugcgugaccggggacgacaagaacgccaccgccuccuucaucuacaacggccggcugguggacagcaucggguccuggagcaagaagauccuccgcacccaggaguccgagugcgucugcaucaacggcacgugcaccguggugaugaccgacggcagcgccuccgggaaggcggacaccaagauccuguucaucgaggagggcaagaucguccacaucagcacgcugagcggguccgcccagcacguggaggagugcagcugcuacccccgguaccccggcgugcgcugcgucugccgggacaacuggaagggcuccaaccgcccgaucguggacaucaacgugaaggacuacagcaucgucuccagcuacgugugcuccgggcucgugggcgacacgccccggaagaacgacagcuucuccagcucccacugccuggaccccaacaacgaggagggcgggcacggggucaagggcugggccuucgacgacggcaacgacguguggauggggcgcaccaucagcgagaagcugcgguccggcuacgagaccuucaaggucaucgagggguggagcaagcccaacuccaagcuccagaucaaccgccaggugaucguggagcggggcaaccgcagcggguacuccggcaucuucagcgucgagggcaaguccugcaucaaccggugcuucuacguggagcugauccgcgggcggaaggaggagaccgaggugugguggaccagcaacagcaucgucguguucugcggcaccuccgggaccuacggcacggggagcuggccggacggcgccgacaucaaccugaugcccaucuga

SEQ ID NO: 78183 - RNA, 1410 nt, Artificial Sequence; identical to SEQ ID NO: 78159
  derived and/or modified CDS sequence (opt1) from neuraminidase__InfluenzaA__AAX56413

SEQ ID NO: 78184 - RNA, 1410 nt, Artificial Sequence; identical to SEQ ID NO: 78161
  derived and/or modified CDS sequence (opt1) from neuraminidase__InfluenzaA__AAX56423

SEQ ID NO: 78185 - RNA, 1410 nt, Artificial Sequence; identical to SEQ ID NO: 78159
  derived and/or modified CDS sequence (opt1) from neuraminidase__InfluenzaA__AAX56433

SEQ ID NO: 78186 - RNA, 1410 nt, Artificial Sequence; identical to SEQ ID NO: 78178
  derived and/or modified CDS sequence (opt1) from neuraminidase__InfluenzaA__AAX56443

SEQ ID NO: 78187 - RNA, 1410 nt, Artificial Sequence
  derived and/or modified CDS sequence (opt1) from neuraminidase__InfluenzaA__AAX56473
augaaccccaaccagaagaucaucaccaucggcagcgugucccugaccaucgccacgaucugcuuccucaugcagaucgccauccuggucaccaccgugacccugcacuucaagcaguacgagugcaacagcccgcccaacaaccaggugaugcucugcgagcccacgaucaucgagcgcaacaucaccgagaucgucuaccugaccaacaccacgaucgagaaggagaucugccccaagcuggcggaguaccggaacugguccaagccgcagugcaacaucaccggguucgcccccuucagcaaggacaacuccauccgccucagcgccggcggggacaucugggugacccgggagcccuacguguccugcgaccccgacaagugcuaccaguucgcccugggccaggggaccacgcugaacaacggccacagcaacgacaccguccacgaccgcaccccguaccggacccuccugaugaacgagcugggcgugcccuuccaccucgggacgcgccaggugugcaucgccugguccagcuccagcugccacgacggcaaggcguggcugcacgucugcgugaccggggacgacgagaacgccaccgccuccuucaucuacaacggccggcugguggacagcaucggguccuggagcaagaagauccuccgcacccaggaguccgagugcgucugcaucaacggcacgugcaccguggugaugaccgacggcagcgccuccgggaaggcggacaccaagauccuguucaucgaggagggcaagaucguccacaucagcacgcugagcggguccgcccagcacguggaggagugcagcugcuacccccgguaccccggcgugcgcugcgucugccgggacaacuggaagggcuccaaccgcccgaucguggacaucaacgugaaggacuacagcaucgucuccagcuacgugugcuccgggcucgugggcgacacgccccggaagaacgacagcuucuccagcucccacugccuggaccccaacaacgaggagggcgggcacggggucaagggcugggccuucgacgacggcaacgacguguggauggggcgcaccaucagcgagaagcugcgguccggcuacgagaccuucaaggucaucgagggguggagcaagcccaacuccaagcuccagaucaaccgccaggugaucguggagcggggcaaccgcagcggguacuccggcaucuucagcgucgagggcaagaacugcaucaaccggugcuucuacguggagcugauccgcgggcggaaggaggagaccgaggugugguggaccuccaacagcaucgucguguucugcggcaccagcgggaccuacggcacgggguccuggccggacggcgccgacaucaaccugaugcccaucuga

SEQ ID NO: 78188 - RNA, 1410 nt, Artificial Sequence
  derived and/or modified CDS sequence (opt1) from neuraminidase__InfluenzaA__AAX56483
augaaccccaaccagaagaucaucaccaucggcagcgugucccugaccaucgccacgaucugcuuccucaugcagaucgccauccuggucaccaccgugacccugcacuucaagcaguacgagugcgacagcccgcccaacaaccaggugaugcucugcgagcccacgaucaucgagcgcaacaucaccgagaucgucuaccugaccaacaccacgaucgagaaggagaucugccccaagcuggcggaguaccggaacugguccaagccgcagugcaacaucaccggguucgcccccuucagcaaggacaacuccauccgccucagcgccggcggggacaucugggugacccgggagcccuacguguccugcgaccccgacaagugcuaccaguucgcccugggccaggggaccacgcugaacaacggccacagcaacgacaccguccacgaccgcaccccguaccggacccuccugaugaacgagcugggcgugcccuuccaccucgggacgcgccaggugugcaucgccugguccagcuccagcugccacgacggcaaggcguggcugcacgucugcgugaccggggacgacgagaacgccaccgccuccuucaucuacaacggccggcugguggacagcaucggguccuggagcaagaagauccuccgcacccaggaguccgagugcgucugcaucaacggcacgugcaccguggugaugaccgacggcagcgccuccgggaaggcggacaccaagauccuguucaucgaggagggcaagaucguccacaucagcacgcugagcggguccgcccagcacguggaggagugcagcugcuacccccgguaccccggcgugcgcugcgucugccgggacaacuggaagggcuccaaccgcccgaucguggacaucaacgugaaggacuacagcaucgucuccagcuacgugugcuccgggcucgugggcgacacgccccggaagaacgacagcuucuccagcucccacugccuggaccccaacaacgaggagggcgggcacggggucaagggcugggccuucgacgacggcaacgacguguggauggggcgcaccaucagcgagaagcugcgguccggcuacgagaccuucaaggucaucgagggguggagcaagcccaacuccaagcuccagaucaaccgccaggugaucguggagcggggcaaccgcagcggguacuccggcaucuucagcgucgagggcaaguccugcaucaaccggugcuucuacguggagcugauccgcgggcggaaggaggagaccgaggugugguggaccagcaacagcaucgucguguucugcggcaccuccgggaccuacggcacggggagcuggccggacggcgccgacaucaaccugaugcccaucuga

SEQ ID NO: 78189 - RNA, 1410 nt, Artificial Sequence; identical to SEQ ID NO: 78188
  derived and/or modified CDS sequence (opt1) from neuraminidase__InfluenzaA__AAX56503

SEQ ID NO: 78190 - RNA, 1410 nt, Artificial Sequence
  derived and/or modified CDS sequence (opt1) from neuraminidase__InfluenzaA__AAX56513
augaaccccaaccagaagaucaucaccaucggcagcgugucccugaccaucgccacgaucugcuuccucaugcagaucgccauccuggucaccaccgugacccugcacuucaagcaguacgagugcaacagcccgcccaacaaccaggugaugcucugcgagcccacgaucaucgagcgcaacaucaccgagaucgucuaccugaccaacaccacgaucgagaaggagaucugccccaagcuggcggaguaccggaacugguccaagccgcagugcaacaucaccggguucgcccccuucagcaaggacaacuccauccgccucagcgccggcggggacaucugggugacccgggagcccuacguguccugcgaccccgacaagugcuaccaguucgcccugggccaggggaccacgcugaacaacggccacagcaacgacaccguccacgaccgcaccccguaccggacccuccugaugaacgagcugggcgugcccuuccaccucgggacgcgccaggugugcaucgccugguccagcuccagcugccacgacggcaaggcguggcugcacgucugcgugaccggggacgacgagaacgccaccgccuccuucaucuacaacggccggcugguggacagcaucggguccuggagcaagaagauccuccgcacccaggaguccgagugcgucugcaucaacggcacgugcaccguggugaugaccgacggcagcgccuccgggaaggcggacaccaagauccuguucaucgaggagggcaagaucguccacaucagcacgcugagcggguccgcccagcacguggaggagugcagcugcuacccccgguaccccggcgugcgcugcgucugccgggacaacuggaagggcuccaaccgcccgaucguggacaucaacgugaaggacuacagcaucgucuccagcuacgugugcuccgggcucgugggcgacacgccccggaagaacgacagcuucuccagcucccacugccuggaccccaacaacgaggagggcgggcacggggucaagggcugggccuucgacgacggcaacgacguguggauggggcgcaccaucagcgagaagcugcgguccggcuacgagaccuucaaggucaucgagggguggagcaagcccaacuccaagcuccagaccaaccgccaggugaucguggagcggggcaaccgcagcggguacuccggcaucuucagcgucgagggcaaguccugcaucaaccggugcuucuacguggagcugauccgcgggcggaaggaggagaccgaggugugguggaccagcaacagcaucgucguguucugcggcaccuccgggacguacggcaccgggagcuggccggacggcgccgacaucaaccugaugcccaucuga

SEQ ID NO: 78191 - RNA, 1413 nt, Artificial Sequence
  derived and/or modified CDS sequence (opt1) from neuraminidase__InfluenzaA__AAX56533
augaaccccaaccagaagaucaucaccaucggcagcaucuccguggccaucgggaucaucagccugauccuccagaucggcaacaucaucuccaucugggccagccacuccauccagaccgggagccagaacuacacgggcaucugcaaccagcgcaucaucaccuacgagaaccggaccugggucaaccagaccuacgugaacaucaacaacacgaacguggucgcggggaaggacaagaccuccaugacccuggccggcaacagcucccugugcccgauccgcggcugggccaucuacaccaaggacaacagcauccggaucggguccaagggcgacguguucgugauccgcgagcccuucaucagcugcucccaccucgagugccggacguucuuccugacccagggggcccugcucaacgacaagcacagcaacggcaccaucaaggaccgcucccccuuccgggcccugaugagcugcccccugggggaggcgccgucccccuacaacagccgcuucgaguccgucgccuggagcgccagcgccugccacgacggccucggcuggcugaccaucgggaucuccggccccgacaacggggcgguggccgugcugaaguacaacggcaucaucacggagaccaucaagagcuggaagaagcagauccuccggacccaggaguccgagugcgucugcgugaacggcagcugcuucaccaucaugacggacgggcccuccaaccgcgccgccagcuaccggaucuucaagaucgagaagggccgcgugaccaaguccaucgagcuggacgccccgaacuaccacuacgaggagugcagcugcuaccccgacaccgggaccgucaugugcgugugccgggacaacuggcacggcuccaaccgccccugggugagcuucaaccagaaccuggacuaccagaucggguacaucugcuccggcgucuucggcgacaacccccggccgaaggacggggagggcagcugcaaccccgugacgguggacggggcggacggcgucaagggguucuccuaccgcuacggcaacggcguguggaucgggcggaccaagagcaaccgccuccggaagggcuucgagaugaucugggaccccaacggguggaccgacaccgacuccgacuucagcaugaagcaggacguggucgccaugaacgacugguccggcuacagcggguccuucgugcagcaccccgagcugacgggccuggacugcaugcgcccgugcuucuggguggagcucguccggggccugccccgcgagaacaccaccaucuggaccagcgggagcuccaucagcuucugcggcgugaacuccgagacggccaacuggagcuggcccgacggggccgagcugcccuucaccaucgacaaguga

SEQ ID NO: 78192 - RNA, 1410 nt, Artificial Sequence
  derived and/or modified CDS sequence (opt1) from neuraminidase__InfluenzaA__AAX56543
augaaccccaaccagaagaucaucaccaucggcagcgugucccugaccaucgccacgaucugcuuccucaugcagaucgccauccuggucaccaccgugacccugcacuucaagcaguacgagugcaacagcccgcccaacaaccaggugaugcucugcgagcccacgaucaucgagcgcaacaucaccgagaucgucuaccugaccaacaccacgaucgagaaggagaucugccccaagcuggcggaguaccggaacugguccaagccgcagugcaacaucaccggguucgcccccuucagcaaggacaacuccauccgccucagcgccuccggcgacaucugggugacccgggagcccuacgugagcugcgaccccgacaagugcuaccaguucgcccuggggcagggcaccacgcugaacaacgggcacuccaacgacaccguccacgaccgcaccccguaccggacccuccugaugaacgagcugggcgugcccuuccaccucggcacgaagcaggucugcaucgccuggagcuccagcuccugccacgacgggaaggcguggcugcacgugugcgugaccggcgacgacgagaacgccaccgccagcuucaucuacaacgggcgccugguggacuccaucggcagcugguccaagaagauccuccggacccaggagagcgagugcgucugcaucaacgggacgugcaccguggugaugaccgacggcuccgccagcggcaaggcggacaccaagauccuguucaucgaggaggggaagaucguccacacgagcucccugagcggcuccgcccagcacguggaggagugcagcugcuacccccgcuaccccggggugcggugcgucugccgcgacaacuggaagggcuccaaccggccgaucguggacaucaacgugaaggacuacagcaucgucuccagcuacgugugcuccggccucgugggggacacgccccgcaagaacgacagcuccagcuccagccacugccuggaccccaacaacgaggagggcgggcacggcgucaaggggugggccuucgacgacggcaacgacguguggaugggccggaccaucuccgaggagcugcgcagcggguacgagaccuucaaggucaucgagggcugguccaagcccaacagcaagcuccagaucaaccgccaggugaucguggaccgggggaaccgguccggcuacagcgggaucuucagcgucgagggcaaguccugcaucaaccgcugcuucuacguggagcugauccggggccgcaagcaggagaccgaggugcuguggaccagcaacuccaucgucguguucugcgggaccagcggcaccuacgggacgggcuccuggccggacggggccgacaucaaccucaugcccaucuga

SEQ ID NO: 78193 - RNA, 1410 nt, Artificial Sequence; identical to SEQ ID NO: 78085
  derived and/or modified CDS sequence (opt1) from neuraminidase__InfluenzaA__AAX56553

SEQ ID NO: 78194 - RNA, 1410 nt, Artificial Sequence
  derived and/or modified CDS sequence (opt1) from neuraminidase__InfluenzaA__AAX56563
augaaccccaaccagaagaucaucaccaucggcagcgugucccugaccaucgccgccaucugcuuccucaugcagaucgcgauccuggucacgaccgugacccugcacuucaagcagcacgagugcaacagcccgcccaacaaccaggugaugcucugcgagcccaccaucaucgagcgcaacaucacggagaucgucuaccugaccaacaccaccaucgagaaggagaucugccccaagcuggccgaguaccggaacugguccaagccgcagugcaacaucacgggguucgcccccuucagcaaggacaacuccauccgccucagcgccggcggggacaucugggugacccgggagcccuacguguccugcgaccccgacaagugcuaccaguucgcccugggccaggggaccacccugaacaacggccacagcaacgacacgguccacgaccgcaccccguaccggacccuccugaugaacgagcugggcgugcccuuccaccucgggacccgccaggugugcaucgcgugguccagcuccagcugccacgacggcaaggccuggcugcacgucugcgugacgggggacgacaagaacgccaccgccuccuucaucuacaacggccggcugguggacagcaucggguccuggagcaagaagauccuccgcacccaggaguccgagugcgucugcaucaacgggaccugcacgguggugaugaccgacggcagcgcguccgggaaggccgacaccaagauccuguucaucgaggagggcaagaucguccacaucagcgcccugagcggguccgcccagcacguggaggagugcagcugcuacccccgguaccccggcgugcgcugcgucugccgggacaacuggaagggcuccaaccgcccgaucguggacaucaacgugaaggacuacagcaucgucuccagcuacgugugcuccgggcucgugggcgacacgccccggaagaacgacagcuucuccagcucccacugccuggaccccaacaacgaggagggcggccacggggucaagggcugggccuucgacgacggcaacgacguguggauggggcgcaccaucagcgagaagcugcgguccggcuacgagaccuucaaggucaucgagggguggagcaagcccaacuccaagcuccagaucaaccgccaggugaucguggagcgggacaaccgcagcggcuacuccgggaucuucagcgucgagggcaaguccugcaucaaccggugcuucuacguggagcugauccgcggccggaaggaggagaccgaggugugguggaccagcaacagcaucgucguguucugcgggacguccggcaccuacgggaccggcagcuggccggacggggcggacaucaaccugaugcccaucuga

SEQ ID NO: 78195 - RNA, 1410 nt, Artificial Sequence
  derived and/or modified CDS sequence (opt1) from neuraminidase__InfluenzaA__AAX56573
augaaccccaaccagaagaucaucaccaucggcagcgugucccugaccaucgccacgaucugcuuccucaugcagaucgccauccuggucaccaccgugacccugcacuucaagcaguacgagugcaacagcccgcccaacaaccaggugaugcucugcgagcccgcgaucaucgagcgcaacaucacggagaucgucuaccugaccaacaccaccaucgagaaggagaucugccccaagcuggccgaguaccggaacugguccaagccgcagugcaacaucacgggguucgcccccuucagcaaggacaacuccauccgccucagcgccggcggggacaucugggugacccgggagcccuacguguccugcgaccccgacaagugcuaccaguucgcccugggccaggggaccacccugaacaacggccacagcaacgacacgguccacgaccgcaccccguaccggacccuccugaugaacgagcugggcgugcccuuccaccucgggacccgccaggugugcaucgcgugguccagcuccagcugccacgacggcaaggccuggcugcacgucugcgugacgggggacgacgagaacgccaccgccuccuucaucuacaacggccggcugguggacagcaucggguccuggagcaagaagauccuccgcacccaggaguccgagugcgucugcaucaacgggaccugcacgguggugaugaccgacggcagcgcguccgggaaggccgacaccaagauccuguucaucgaggagggcaagaucguccacaucagcacccugagcggguccgcccagcacguggaggagugcagcugcuacccccgguaccccggcgugcgcugcgucugccgggacaacuggaagggcuccaaccgcccgaucguggacaucaacgugaaggacuacagcaucgucuccagcuacgugugcuccgggcucgugggcgacacgccccggaagaacgacagcuucuccagcucccacugccuggaccccaacaacgaggagggcggccacggggucaagggcugggccuucgacgacggcaacgacguguggauggggcgcaccaucagcgagaagcugcgguccggcuacgagaccuucaaggucaucgagggguggagcaagcccaacuccaagcuccagaucaaccgccaggugaucguggagcggggcaaccgcagcggguacuccggcaucuucagcgucgagggcaaguccugcaucaaccggugcuucuacguggagcugauccgcgggcggaaggaggagaccgaggugugguggacgagcaacagcaucgucguguucugcggcaccuccgggaccuacggcaccgggagcuggccggacggcgccgacaucaaccugaugcccaucuga

SEQ ID NO: 78196 - RNA, 1410 nt, Artificial Sequence
  derived and/or modified CDS sequence (opt1) from neuraminidase__InfluenzaA__AAX56583
augaaccccaaccagaagaucaucaccaucggcagcgugucccugaccaucgccacgaucugcuuccucaugcagaucgccauccuggucaccaccgugacccugcacuucaagcaguacgagugcaacagcccgcccaacaaccaggugaugcucugcgagcccacgaucaucgagcgcaacaucaccgagaucgucuaccugaccaacaccacgaucgagaaggagaucugccccaagcuggcggaguaccggaacugguccaagccgcagugcaacaucaccggguucgcccccuucagcaaggacaacuccauccgccucagcgccggcggggacaucugggugacccgggagcccuacguguccugcgaccccgacaagugcuaccaguucgcccugggccaggggaccacgcugaacaacggccacagcaacgacaccguccacgaccgcaccccguaccggacccuccugaugaacgagcugggcgugcccuuccaccucgggacgcgccaggugugcaucgccugguccagcuccagcugccacgacggcaaggcguggcugcacgucugcgugaccggggacgacgagaacgccaccgccuccuucaucuacaacggccggcugguggacagcaucggguccuggagcaagaagauccuccgcacccaggaguccgagugcgucugcaucaacggcacgugcaccguggugaugaccgacggcagcgccuccgggaaggcggacaccaagauccuguucaucgaggagggcaagaucguccacaucagcacgcugagcggguccgcccagcacguggaggagugcagcugcuacccccgguaccccggcgugcgcugcgucugccgggaccacuggaagggcuccaaccgcccgaucguggacaucaacgugaaggacuacagcaucgucuccagcuacgugugcuccgggcucgugggcgacacgccccggaagaacgacagcuucuccagcucccacugccuggaccccaacaacgaggagggcgggcacggggucaagggcugggccuucgacgacggcaacgacguguggauggggcgcaccaucagcgagaagcugcgguccggcuacgagaccuucaaggucaucgagggguggagcaagcccaacuccaagcuccagaccaaccgccaggugaucguggagcggggcaaccgcagcggguacuccggcaucuucagcgucgagggcaaguccugcaucaaccggugcuucuacguggagcugauccgcgggcggaaggaggagaccgaggugugguggaccagcaacagcaucgucguguucugcggcaccuccgggacguacggcaccgggagcuggccggacggcgccgacaucaaccugaugcccaucuga

SEQ ID NO: 78197 - RNA, 1410 nt, Artificial Sequence
  derived and/or modified CDS sequence (opt1) from neuraminidase__InfluenzaA__AAX56593
augaaccccaaccagaagaucaucaccaucggcagcgugucccugaccaucgccacgaucugcuuccucaugcagaucgccauccuggucaccaccgugacccugcacuucaagcaguacgagugcaacagcccgcccaacaaccaggugaugcucugcgagcccgcgaucaucgagcgcaacaucacggagaucgucuaccugaccaacaccaccaucgagaaggagaucugccccaagcuggccgaguaccggaacugguccaagccgcagugcaacaucacgggguucgcccccuucagcaaggacaacuccauccgccucagcgccggcggggacaucugggugacccgggagcccuacguguccugcgaccccgacaagugcuaccaguucgcccugggccaggggaccacccugaacaacggccacagcaacgacacgguccacgaccgcaccccguaccggacccuccugaugaacgagcugggcgugcccuuccaccucgggacccgccaggugugcaucgcgugguccagcuccagcugccacgacggcaaggccuggcugcacgucugcgugacgggggacgacgagaacgccaccgccuccuucaucuacaacggccggcugguggacagcaucggguccuggagcaagaagauccuccgcacccaggaguccgagugcgucugcaucaacgggaccugcacgguggugaugaccgacggcagcgcguccgggaaggccgacaccaagauccuguucaucgaggagggcaagaucgucaacaucagcacccugagcggguccgcccagcacguggaggagugcagcugcuacccccgguaccccggcgugcgcugcgucugccgggacaacuggaagggcuccaaccgcccgaucguggacaucaacgugaaggacuacagcaucgucuccagcuacgugugcuccgggcucgugggcgacacgccccggaagaacgacagcuucuccagcucccacugccuggaccccaacaacgaggagggcggccacggggucaagggcugggccuucgacgacggcaacgacguguggauggggcgcaccaucagcgagaaguuccgguccggcuacgagaccuucaaggucaucgagggguggagcaagcccaacuccaagcugcagaucaaccgccaggugaucguggagcggggcaaccgcagcggguacuccggcaucuucagcgucgagggcaaguccugcaucaaccggugcuucuacguggagcucauccgcgggcggaaggaggagaccgaggugugguggacgagcaacagcaucgucguguucugcggcaccuccgggaccuacggcaccgggagcuggccggacggcgccgacaucaaccugaugcccaucuga

SEQ ID NO: 78198 - RNA, 1410 nt, Artificial Sequence
  derived and/or modified CDS sequence (opt1) from neuraminidase__InfluenzaA__AAX56603
augaaccccaaccagaagaucaucaccaucggcagcgugucccugaccaucgccgccaucugcuuccucaugcagaucgcgauccuggucacgaccgugacccugcacuucaagcagcacgagugcaacagcccgcccaacaaccaggugaugcucugcgagcccaccaucaucgagcgcaacaucacggagaucgucuaccugaccaacaccaccaucgagaaggagaucugccccaagcuggccgaguaccggaacugguccaagccgcagugcaacaucacgggguucgcccccuucagcaaggacaacuccauccgccucagcgccggcggggacaucugggugacccgggagcccuacguguccugcgaccccgacaagugcuaccaguucgcccugggccaggggaccacccugaacaacggccacagcaacgacacggcgcacgaccgcaccccguaccggacccuccugaugaacgagcugggcguccccuuccaccucgggacccgccaggugugcaucgccugguccagcuccagcugccacgacggcaaggccuggcugcacgugugcgucacgggggacgacaagaacgccaccgcguccuucaucuacaacggccggcugguggacagcaucggguccuggagcaagaagauccuccgcacccaggaguccgagugcgugugcaucaacgggaccugcacggucgugaugaccgacggcagcgccuccgggaaggccgacaccaagauccuguucaucgaggagggcaagaucgugcacaucagcacccugagcggguccgcccagcacgucgaggagugcagcugcuacccccgguaccccggcgugcgcugcgugugccgggacaacuggaagggcuccaaccgcccgaucgucgacaucaacgugaaggacuacagcaucguguccagcuacgucugcuccgggcucgugggcgacacgccccggaagaacgacagcuucuccagcucccacugccuggaccccaacaacgaggagggcggccacggggugaagggcugggccuucgacgacggcaacgacgucuggauggggcgcaccaucagcgagaagcugcgguccggcuacgagaccuucaaggugaucgagggguggagcaagcccaacuccaagcuccagaucaaccgccaggucaucguggagcggggcaaccgcagcggguacuccggcaucuucagcguggagggcaaguccugcaucaaccggugcuucuacgucgagcugauccgcgggcggaaggaggagaccgaggugugguggacgagcaacagcaucguggucuucugcggcaccuccgggaccuacggcaccgggagcuggccggacggcgcggacaucaaccugaugcccaucuga

SEQ ID NO: 78199 - RNA, 1410 nt, Artificial Sequence; identical to SEQ ID NO: 78169
  derived and/or modified CDS sequence (opt1) from neuraminidase__InfluenzaA__AAX57647

SEQ ID NO: 78200 - RNA, 1410 nt, Artificial Sequence; identical to SEQ ID NO: 78159
  derived and/or modified CDS sequence (opt1) from neuraminidase__InfluenzaA__AAX57657

SEQ ID NO: 78201 - RNA, 1410 nt, Artificial Sequence; identical to SEQ ID NO: 78197
  derived and/or modified CDS sequence (opt1) from neuraminidase__InfluenzaA__AAX57667

SEQ ID NO: 78202 - RNA, 1410 nt, Artificial Sequence; identical to SEQ ID NO: 78178
  derived and/or modified CDS sequence (opt1) from neuraminidase__InfluenzaA__AAX57677

SEQ ID NO: 78203 - RNA, 1410 nt, Artificial Sequence
  derived and/or modified CDS sequence (opt1) from neuraminidase__InfluenzaA__AAX57687
augaaccccaaccagaagaucaucaccaucggcagcgugucccugaccaucgccacgaucugcuuccucaugcagaucgccauccuggucaccaccgugacccugcacuucaagcaguacgagugcaacagcccgcccaacaaccaggugaugcucugcgagcccgcgaucaucgagcgcaacaucacggagaucgucuaccugaccaacaccaccaucgagaaggagaucugccccaagcuggccgaguaccggaacugguccaagccgcagugcaacaucacgggguucgcccccuucagcaaggacaacuccauccgccucagcgccggcggggacaucugggugacccgggagcccuacguguccugcgaccccgacaagugcuaccaguucgcccugggccaggggaccacccugaacaacggccacagcaacgacacgguccacgaccgcaccccguaccggacccuccugaugaacgagcugggcgugcccuuccaccucgggacccgccaggugugcaucgcgugguccagcuccagcugccacgacggcaaggccuggcugcacgucugcgugacgggggacgacgagaacgccaccgccuccuucaucuacgacggccggcugguggacagcaucggguccuggagcaagaagauccuccgcacccaggaguccgagugcgucugcaucaacgggaccugcacgguggugaugaccgacggcagcgcguccgggaaggccgacaccaagauccuguucaucgaggagggcaagaucgucaacaucagcacccugagcggguccgcccagcacguggaggagugcagcugcuacccccgguaccccggcgugcgcugcgucugccgggacaacuggaagggcuccaaccgcccgaucguggacaucaacgugaaggacuacagcaucgucuccagcuacgugugcuccgggcucgugggcgacacgccccggaagaacgacagcuucuccagcucccacugccuggaccccaacaacgaggagggcggccacggggucaagggcugggccuucgacgacggcaacgacguguggauggggcgcaccaucagcgagaagcugcgguccggcuacgagaccuucaaggucaucgagggguggagcaagcccaacuccaagcuccagaucaaccgccaggugaucguggagcggggcaaccgcagcggguacuccggcaucuucagcgucgagggcaaguccugcaucaaccggugcuucuacguggagcugauccgcgggcggaaggaggagaccgaggugugguggacgagcaacagcaucgucguguucugcggcaccuccgggaccuacggcaccgggagcuggccggacggcgccgacaucaaccugaugcccaucuga

SEQ ID NO: 78204 - RNA, 1410 nt, Artificial Sequence
  derived and/or modified CDS sequence (opt1) from neuraminidase__InfluenzaA__AAX57697
augaaccccaaccagaagaucaucaccaucggcagcgugucccugaccaucgccacgaucugcuuccucaugcagaucgccauccuggucaccaccgugacccugcacuucaagcaguacgagugcaacagcccgcccaacaaccaggugaugcucugcgagcccacgaucaucgagcgcaacaucaccgagaucgucuaccugaccaacaccacgaucgagaaggagaucugccccaagcuggcggaguaccggaacugguccaagccgcagugcaacaucaccggguucgcccccuucagcaaggacaacuccauccgccucagcgccggcggggacaucugggugacccgggagcccuacguguccugcgaccccgacaagugcuaccaguucgcccugggccaggggaccacgcugaacaacggccacagcaacgacaccguccacgaccgcaccccguaccggacccuccugaugaacgagcugggcgugcccuuccaccucgggacgcgccaggugugcaucgccugguccagcuccagcugccacgacggcaaggcguggcugcacgucugcgugaccggggacgacgagaacgccaccgccuccuucaucuacaacggccggcugguggacagcaucggguccuggagcaagaagauccuccgcacccaggaguccgagugcgucugcaucaacggcacgugcaccguggugaugaccgacggcagcgccuccgggaaggcggacaccaagauccuguucaucgaggagggcaagaucguccacaucagcacgcugagcggguccgcccagcacguggaggagugcagcugcuacccccgguaccccggcgugcgcugcgucugccgggacaacuggaagggcuccaaccgcccgaucguggacaucaacgugaaggaccacagcaucgucuccagcuacgugugcuccgggcucgugggcgacacgccccggaagaacgacagcuucuccagcucccacugccuggaccccaacaacgaggagggcgggcacggggucaagggcugggccuucgacgacggcaacgacguguggauggggcgcaccaucagcgagaagcugcgguccggcuacgagaccuucaaggucaucgagggguggagcaagcccaacuccaagcuccagaucaaccgccaggugaucguggagcggggcaaccgcagcggguacuccggcaucuucagcgucgagggcaaguccugcaucaaccggugcuucuacguggagcugauccgcgggcggaaggaggagaccgaggugugguggaccagcaacagcaucgucguguucugcggcaccuccgggaccuacggcacggggagcuggccggacggcgccgacaucaaccugaugcccaucuga

SEQ ID NO: 78205 - RNA, 1410 nt, Artificial Sequence
  derived and/or modified CDS sequence (opt1) from neuraminidase__InfluenzaA__AAX57707
augaaccccaaccagaagaucaucaccaucggcagcgugucccugaccaucgccgccaucugcuuccucaugcagaucgcgauccuggucacgaccgugacccugcacuucaagcagcacgagugcaacagcccgcccaacaaccaggugaugcucugcgagcccaccaucaucgagcgcaacaucacggagaucgucuaccugaccaacaccaccaucgagaaggagaucugccccaagcuggccgaguaccggaacugguccaagccgcagugcaacaucacgggguucgcccccuucagcaaggacaacuccauccgccucagcgccggcggggacaucugggugacccgggagcccuacguguccugcgaccccgacaagugcuaccaguucgcccugggccaggggaccacccugaacaacggccacagcaacgacacgguccacgaccgcaccccguaccggacccuccugaugaacgagcugggcgugcccuuccaccucgggacccgccaggugugcaucgcgugguccagcuccagcugccacgacggcaaggccuggcugcacgucugcgugacgggggacgacaagaacgccaccgccuccuucaucuacaacggccggcugguggacagcaucggguccuggagcaagaagauccuccgcacccaggaguccgagugcgucugcaucaacgggaccugcacgguggugaugaccgacggcagcgcguccgggaaggccgacaccaagauccuguucaucgaggagggcaagaucguccacaucagcacccugagcggguccgcccagcacguggaggagugcagcugcuacccccgguaccccggcgugcgcugcgucugccgggacaacuggaagggcuccaaccgcccgaucguggacaucaacgugaaggacuacagcaucgucuccagcuacgugugcuccgggcucgugggcgacacgccccggaagaacgaccgcuucagcuccagccacugccuggaccccaacaacgaggagggcggccacggggucaagggcugggccuucgacgacggcaacgacguguggauggggcggaccaucuccgagaagcugcgcagcggcuacgagaccuucaaggucaucgaggggugguccaagcccaacagcaagcuccagaucaaccgccaggugaucguggagcggggcaaccgguccggguacagcggcaucuucuccgucgagggcaagagcugcaucaaccgcugcuucuacguggagcugauccgggggcgcaaggaggagaccgaggugugguggacguccaacagcaucgucguguucugcggcaccagcgggaccuacggcaccggguccuggccggacggcgccgacaucaaccugaugcccaucuga

SEQ ID NO: 78206 - RNA, 1410 nt, Artificial Sequence; identical to SEQ ID NO: 78178
  derived and/or modified CDS sequence (opt1) from neuraminidase__InfluenzaA__AAX57717

SEQ ID NO: 78207 - RNA, 1410 nt, Artificial Sequence; identical to SEQ ID NO: 78197
  derived and/or modified CDS sequence (opt1) from neuraminidase__InfluenzaA__AAX57726

SEQ ID NO: 78208 - RNA, 1410 nt, Artificial Sequence; identical to SEQ ID NO: 78197
  derived and/or modified CDS sequence (opt1) from neuraminidase__InfluenzaA__AAX57737

SEQ ID NO: 78209 - RNA, 1410 nt, Artificial Sequence; identical to SEQ ID NO: 78085
  derived and/or modified CDS sequence (opt1) from neuraminidase__InfluenzaA__AAX57747

SEQ ID NO: 78210 - RNA, 1410 nt, Artificial Sequence; identical to SEQ ID NO: 78085
  derived and/or modified CDS sequence (opt1) from neuraminidase__InfluenzaA__AAX57757

SEQ ID NO: 78211 - RNA, 1410 nt, Artificial Sequence
  derived and/or modified CDS sequence (opt1) from neuraminidase__InfluenzaA__AAX57767
augaaccccaaccagaagaucaucaccaucggcagcgugucccugaccaucgccacgaucugcuuccucaugcagaucgccauccuggucaccaccgugacccugcacuucaagcaguacgagugcaacccgccgcccaacaaccaggugaugcucugcgagcccacgaucaucgagcgcaacaucaccgagaucgucuaccugaccaacaccacgaucgagaaggagaucugccccaagcuggcggaguaccggaacuggagcaagccccagugcaacaucaccggguucgcccccuucuccaaggacaacagcauccgccucuccgccggcggggacaucugggugacccgggagcccuacgugagcugcgacccggacaagugcuaccaguucgcccugggccaggggaccacgcugaacaacggccacuccaacgacaccguccacgaccgcacccccuaccggacccuccugaugaacgagcugggcgugcccuuccaccucgggacgaagcaggucugcaucgccuggagcuccagcuccugccacgacggcaaggcguggcugcacgugugcgugaccggggacgacgagaacgccaccgccagcuucaucuacaacggccgccugguggacuccaucgggagcugguccaagaagauccuccggacccaggagagcgagugcgucugcaucaacggcacgugcaccguggugaugaccgacggcuccgccagcgggaaggcggacaccaagauccuguucaucgaggagggcaagaucguccacacgucccugcucagcgggagcgcccagcacguggaggagugcuccugcuacccccgcuacccgggcgugcggugcgucugccgcgacaacuggaagggcagcaaccggcccaucguggacaucaacgugaaggacuacuccaucgucagcuccuacgugugcagcgggcuggugggcgacacgccccgcaagaacgacuccagcuccagcucccacugccuggaccccaacaacgaggagggcgggcacggggucaagggcugggccuucgacgacggcaacgacguguggauggggcggaccaucagcgagaagcuccgcuccggcuacgagaccuucaaggucaucgagggguggagcaagccgaacuccaagcugcagaucaaccgccaggugaucguggaccggggcaaccggagcggguacuccggcaucuucagcgucgagggcaaguccugcaucaaccgcugcuucuacguggagcugauccgggggcgcaagcaggagaccgaggugcucuggaccagcaacagcaucgucguguucugcggcaccuccgggaccuacggcacggggagcuggcccgacggcgccgacaucaaccugaugcccaucuga

SEQ ID NO: 78212 - RNA, 1410 nt, Artificial Sequence
  derived and/or modified CDS sequence (opt1) from neuraminidase__InfluenzaA__AAX57777
augaaccccaaccagaagaucaucaccaucggcagcgugucccugaucaucgccaccaucugcuuccucaugcagaucgccauccuggucacgaccgugacccugcacuucaagcaguacgagugcaacagcccgcccaacaaccaggugaugcucugcgagcccaccaucaucgagcgcaacaucacggagaucgucuaccugaccaacaccaccaucgagaaggagaucugccccaagcuggcggaguaccggaacugguccaagccgcagugcaacaucacgggguucgcccccuucagcaaggacaacuccauccgccucagcgccggcggggacaucugggugacccgggagcccuacguguccugcgaccccgacaagugcuaccaguucgcccugggccaggggaccacccugaacaacggccacagcaacgacacgguccacgaccgcaccccguaccggacccuccugaugaacgagcugggcgugcccuuccaccucgggaccaagcaggucugcaucgccugguccagcuccagcugccacgacggcaaggcguggcugcacgugugcgugacgggggacgacgagaacgccaccgccuccuucaucuacaacggccgccugguggacagcaucggguccuggagcaagaagauccuccggacccaggaguccgagugcgucugcaucaacgggaccugcacgguggugaugaccgacggcagcgccuccgggaaggcggacaccaagauccuguucaucgaggagggcaagaucguccacaccagcagccuguccgggagcgcccagcacguggaggagugcuccugcuacccccgcuaccccggcgugcggugcgucugccgcgacaacuggaagggcagcaaccggccgaucguggacaucaacgugaaggacuacuccaucgucagcuccuacgugugcagcgggcucgugggcgacacgccccgcaagaacgacuccagcuccagcucccacugccuggaccccaacaacgaggagggcggccacggggucaagggcugggccuucgacgacggcaacgacguguggauggggcggaccaucagcgagaagcugcgcuccggcuacgagaccuucaaggucaucgagggguggagcaagcccaacuccaagcuccagaucaaccgccaggugaucguggaccggggcaaccggagcggguacuccggcaucuucagcgucgagggcaagagcugcaucaaccgcugcuucuacguggagcugauccgggggcgcaagcaggagaccgaggugcuguggacguccaacagcaucgucguguucugcggcaccuccgggaccuacggcaccgggagcuggccggacggcgccgacaucaaccucaugcccaucuga

SEQ ID NO: 78213 - RNA, 1410 nt, Artificial Sequence
  derived and/or modified CDS sequence (opt1) from neuraminidase__InfluenzaA__AAX57787
augaaccccaaccagaagaucaucaccaucggcagcgugucccugaccaucgccacgaucugcuuccucaugcagaucgccauccuggucaccaccgugacccugcacuucaagcaguacgagugcaacagcccgcccaacaaccaggugaugcucugcgagcccgcgaucaucgagcgcaacaucacggagaucgucuaccugaccaacaccaccaucgagaaggagaucugccccaagcuggccgaguaccggaacugguccaagccgcagugcaacaucacgggguucgcccccuucagcaaggacaacuccauccgccucagcgccggcggggacaucugggugacccgggagcccuacguguccugcgaccccgacaagugcuaccaguucgcccugggccaggggaccacccugaacaacggccacagcaacgacacgguccacgaccgcaccccguaccggacccuccugaugaacgagcugggcgugcccuuccaccucgggacccgccaggugugcaucgcgugguccagcuccagcugccacgacggcaaggccuggcugcacgucugcgugacgggggacgacgagaacgccaccgccuccuucaucuacaacggccggcugguggacagcaucggguccuggagcaagaagauccuccgcacccaggaguccgagugcgucugcaucaacgggaccugcacgguggugaugaccgacggcagcgcguccgggaaggccaacaccaagauccuguucaucgaggagggcaagaucgucaacaucagcacccugagcggguccgcccagcacguggaggagugcagcugcuacccccgguaccccggcgugcgcugcgucugccgggacaacuggaagggcuccaaccgcccgaucguggacaucaacgugaaggacuacagcaucgucuccagcuacgugugcuccgggcucgugggcgacacgccccggaagaacgacagcuucuccagcucccacugccuggaccccaacaacgaggagggcggccacggggucaagggcugggccuucgacgacggcaacgacguguggauggggcgcaccaucagcgagaaguuccgguccggcuacgagaccuucaaggucaucgagggguggagcaagcccaacuccaagcugcagaucaaccgccaggugaucguggagcggggcaaccgcagcggguacuccggcaucuucagcgucgagggcaaguccugcaucaaccggugcuucuacguggagcucauccgcgggcggaaggaggagaccgaggugugguggacgagcaacagcaucgucguguucugcggcaccuccgggaccuacggcaccgggagcuggccggacggcgccgacaucaaccugaugcccaucuga

SEQ ID NO: 78214 - RNA, 1410 nt, Artificial Sequence; identical to SEQ ID NO: 78085
  derived and/or modified CDS sequence (opt1) from neuraminidase__InfluenzaA__AAX57797

SEQ ID NO: 78215 - RNA, 1410 nt, Artificial Sequence; identical to SEQ ID NO: 78085
  derived and/or modified CDS sequence (opt1) from neuraminidase__InfluenzaA__AAX57807

SEQ ID NO: 78216 - RNA, 1410 nt, Artificial Sequence
  derived and/or modified CDS sequence (opt1) from neuraminidase__InfluenzaA__AAX57817
augaaccccaaccagaagaucaucaccaucggcagcgugucccugaccaucgccacgaucugcuuccucaugcagaucgccauccuggucaccaccgugacccugcacuucaagcaguacgagugcaacagcccgcccaacaaccaggugaugcucugcgagcccacgaucaucgagcgcaacaucaccgagaucgucuaccugaccaacaccacgaucgagaaggagaucugccccaagcuggcggaguaccggaacugguccaagccgcagugcaacaucaccggguucgcccccuucagcaaggacaacuccauccgccucagcgccggcggggacaucugggugacccgggagcccuacguguccugcgaccccgacaagugcuaccaguucgcccugggccaggggaccacgcugaacaacggccacagcaacgacaccguccacgaccgcaccccguaccggacccuccugaugaacgagcugggcgugcccuuccaccucgggacgaagcaggucugcaucgccugguccagcuccagcugccacgacggcaaggcguggcugcacgugugcgugaccggggacgacgagaacgccaccgccuccuucaucuacaacggccgccugguggacagcaucuccagcugguccaagaagauccuccggacccaggagagcgagugcgucugcaucaacgggacgugcaccguggugaugaccgacggcuccgccagcggcaaggcggacaccaagauccuguucaucgaggaggggaagaucguccacacgagcucccugagcggcuccgcccagcacguggaggagugcagcugcuacccccgcuaccccggggugcggugcgucugccgcgacaacuggaagggcuccaaccggccgaucguggacaucaacgugaaggacuacagcaucgucuccagcuacgugugcuccggccucgugggggacacgccccgcaagaacgacagcuccagcuccagccacugccuggaccccaacaacgaggagggcgggcacggcgucaaggggugggccuucgacgacggcaacgacguguggaugggccggaccaucuccgagaagcugcgcagcggguacgagaccuucaaggucaucgagggcugguccaagcccaacagcaagcuccagaucaaccgccaggugaucguggaccgggggaaccgguccggcuacagcgggaucuucagcgucgagggcaaguccugcaucaaccgcugcuucuacguggagcugauccggggccgcaagcaggagaccgaggugcuguggaccagcaacuccaucgucguguucugcgggaccagcggcaccuacgggacgggcuccuggccggacggggccgacaucaaccucaugcccaucuga

SEQ ID NO: 78217 - RNA, 1410 nt, Artificial Sequence; identical to SEQ ID NO: 78085
  derived and/or modified CDS sequence (opt1) from neuraminidase__InfluenzaA__AAX57837

SEQ ID NO: 78218 - RNA, 1410 nt, Artificial Sequence
  derived and/or modified CDS sequence (opt1) from neuraminidase__InfluenzaA__AAX57847
augaaccccaaccagaagaucaucaccaucggcagcgugucccugaccaucgccacgaucugcuuccucaugcagaucgccauccuggucaccaccgugacccugcacuucaagcaguacgagugcaacagcccgcccaacaaccaggugaugcucugcgagcccacgaucaucgagcgcaacaucaccgagaucgucuaccugaccaacaccacgaucgagaaggagaucugccccaagcuggcggaguaccggaacugguccaagccgcagugcaacaucaccggguucgcccccuucagcaaggacaacuccauccgccucagcgccggcggggacaucugggugacccgggagcccuacguguccugcgaccccgacaagugcuaccaguucgcccugggccaggggaccacgcugaacaacggccacagcaacgacaccguccacgaccgcaccccguaccggacccuccugaugaacgagcugggcgugcccuuccaccucgggacgaagcaggucugcaucgccugguccagcuccagcugccacgacggcaaggcguggcugcacgugugcgugaccggggacgacgagaacgccaccgccuccuucaucuacaacggccgccugguggacagcaucggguccuggagcaagaagauccuccggacccaggaguccgagugcgucugcaucaacggcacgugcaccguggugaugaccgacggcagcgccuccgggaaggcggacaccaagauccuguucaucgaggagggcaagaucguccacacgagccugcucagcggguccgcccagcacguggaggagugcagcugcuacccccgcuaccccggcgugcggugcgucugccgcgacaacuggaagggcuccaaccggccgaucguggacaucaacgugaaggacuacagcaucgucuccagcuacgugugcuccgggcuggugggcgacacgccccgcaagaacgacagcuccagcuccagccacugccuggaccccaacaacgaggagggcgggcacggggucaagggcugggccuucgacgacggcaacgacguguggauggggcggaccaucuccgagaagcuccgcagcggcuacgagaccuucaaggucaucgaggggugguccaagcccaacagcaagcugcagaucaaccgccaggugaucguggaccggggcaaccgguccggguacagcggcaucuucuccgucgagagcaagagcugcaucaaccgcugcuucuacguggagcugauccggggccgcaagcaggagaccgaggugcucuggaccuccaacagcaucgucguguucugcgggaccuccggcaccuacgggacgggcagcuggccggacggggccgacaucaaccugaugcccaucuga

SEQ ID NO: 78219 - RNA, 1410 nt, Artificial Sequence
  derived and/or modified CDS sequence (opt1) from neuraminidase__InfluenzaA__AAX57857
augaaccccaaccagaagaucaucaccaucggcagcgugucccugaccaucgccacgaucugcuuccucaugcagaucgccauccuggucaccaccgugacccugcacuucaagcaguacgagugcaacagcccgcccaacaaccaggugaugcucugcgagcccacgaccaucgagcgcaacaucaccgagaucgucuaccugaccaacacgaccaucgagaaggagaucugccccaagcuggcggaguaccggaacugguccaagccgcagugcaacaucaccggguucgcccccuucagcaaggacaacuccauccgccucagcgccggcggggacaucugggugacccgggagcccuacguguccugcgaccccgacaagugcuaccaguucgcccugggccaggggacgacccugaacaacggccacagcaacgacaccguccacgaccgcaccccguaccggacgcuccugaugaacgagcugggcgugcccuuccaccucgggaccaagcaggucugcaucgccugguccagcuccagcugccacgacggcaaggcguggcugcacgugugcgugaccggggacgacgagaacgccaccgccuccuucaucuacaacggccgccugguggacagcaucggguccuggagcaagaagauccuccggacgcaggaguccgagugcgucugcaucaacgggaccugcaccguggugaugaccgacggcagcgccuccgggaaggcggacacgaagauccuguucaucgaggagggcaagaucguccacaccagcagccuguccgggagcgcccagcacguggaggagugcuccugcuacccccgcuaccccggcgugcggugcgucugccgcgacaacuggaagggcagcaaccggccgaucguggacaucaacgugaaggacuacuccaucgucagcuccuacgugugcagcgggcucgugggcgacacgccccgcaagaacgacuccagcuccagcucccacugccuggaccccaacaacgaggagggcggccacggggucaagggcugggccuucgacgacggcaacgacguguggauggggcggaccaucagcgagaagcugcgcuccggcuacgagaccuucaaggucaucgagggguggagcaagcccaacuccaagcuccagaucaaccgccaggugaucguggaccggggcaaccggagcggguacuccggcaucuucagcgucgagggcaagagcugcaucaaccgcugcuucuacguggagcugauccgggggcgcaagcaggagaccgaggugcuguggaccuccaacagcaucgucguguucugcggcaccuccgggacguacggcaccgggagcuggccggacggcgccgacaucaaccucaugcccaucuga

SEQ ID NO: 78220 - RNA, 1410 nt, Artificial Sequence; identical to SEQ ID NO: 78085
  derived and/or modified CDS sequence (opt1) from neuraminidase__InfluenzaA__AAX57867

SEQ ID NO: 78221 - RNA, 1410 nt, Artificial Sequence
  derived and/or modified CDS sequence (opt1) from neuraminidase__InfluenzaA__AAX57877
augaaccccaaccagaagaucaucaccaucggcagcgugucccugaccaucgccacgaucugcuuccucaugcagaucgccauccuggucaccaccgugacccugcacuucaagcaguacgagugcaacagcccgcccaacaaccaggugaugcucugcgagcccacgaucaucgagcgcaacaucaccgagaucgucuaccugaccaacaccacgaucgagaaggagaucugccccaagcuggcggaguaccggaacugguccaagccgcagugcaacaucaccggguucgcccccuucagcaaggacaacuccauccgccucagcgccggcggggacaucugggugacccgggagcccuacguguccugcgaccccgacaagugcuaccaguucgcccugggccaggggaccacgcugaacaacggccacagcaacgacaccguccacgaccgcaccccguaccggacccuccugaugaacgagcugggcgugcccuuccaccucgggacgaagcaggucugcaucgccugguccagcuccagcugccacgacggcaaggcguggcugcacgugugcgugaccggggacgacgagaacgccaccgccuccuucaucuacaacggccgccugguggacagcaucggguccuggagcaagaagauccuccggacccaggaguccgagugcgucugcaucaacggcacgugcaccguggugaugaccgacggcagcgccuccgggaaggcggacaccaagauccuguucaucgaggagggcaagaucguccacacgagcagccuguccgggagcgcccagcacguggaggagugcuccugcuacccccgcuaccccggcgugcggugcgucugccgcgacaacuggaagggcagcaaccggccgaucguggacaucaacgugaaggacuacuccaucgucagcuccuacgugugcagcgggcucgugggcgacacgccccgcaagaacgacuccagcuccagcucccacugccuggaccccaacaacgaggagggcgggcacggggucaagggcugggccuucgacgacggcaacgacguguggauggggcggaccaucagcgagaagcugcgcuccggcuacgagaccuucaaggucaucgagggguggagcaagcccaacuccaagcuccagaucaaccgccaggugaucguggaccggggcaaccggagcggguacuccggcaucuucagcgucgagggcaagagcugcaucaaccgcugcuucuacguggagcugauccgggggcgcaagcaggagaccgaggugcuguggaccuccaacagcaucgucguguucugcggcaccuccgggaccuacggcacggggagcuggccggacggcgccgacaucaaccucaugcacaucuga

SEQ ID NO: 78222 - RNA, 1410 nt, Artificial Sequence; identical to SEQ ID NO: 78085
  derived and/or modified CDS sequence (opt1) from neuraminidase__InfluenzaA__AAX57887

SEQ ID NO: 78223 - RNA, 1410 nt, Artificial Sequence
  derived and/or modified CDS sequence (opt1) from neuraminidase__InfluenzaA__AAX57897
augaaccccaaccagaagaucaucaccaucggcagcgugucccugaccaucgccacgaucugcuuccucaugcagaucgccauccuggucaccaccgugacccugcacuucaagcaguacgagugcaacagcccgcccaacaaccaggugaugcucugcgagcccacgaucaucgagcgcaacaucaccgagaucgucuaccugaccaacaccacgaucgagaaggagaucugccccaagcuggcggaguaccggaacugguccaagccgcagugcaacaucaccggguucgcccccuucagcaaggacaacuccauccgccucagcgccggcggggacaucugggugacccgggagcccuacguguccugcgaccccgacaagugcuaccaguucgcccugggccaggggaccacgcugaacaacggccacagcaacgacaccguccacgaccgcaccccguaccggacccuccugaugaacgagcugggcgugcccuuccaccucgggacgaagcaggucugcaucgccugguccagcuccagcugccacgacggcaaggcguggcugcacgugugcgugaccggggacgacgagaacgccaccgccuccuucaucuacaacggccgccugguggacagcaucggguccuggagcaagaagauccuccggacccaggaguccgagugcgucugcaucaacggcacgugcaccguggugaugaccgacggcagcgccuccgggaaggcggacaccaagauccuguucaucgaggagggcaagaucguccacacgagcagccuguccgggagcgcccagcacguggaggagugcuccugcuacccccgcuaccccggcgugcggugcgucugccgcgacaacuggaagggcagcaaccggccgaucguggacaucaacgugaaggacuacuccaucgucagcuccuacgugugcagcgggcucgugggcgacacgccccgcaagaacgacuccagcuccagcucccacugccuggaccccaacaacgaggagggcgggcacggggucaagggcugggccuucgacagcggcaacgacguguggauggggcggaccaucuccgagaagcugcgcagcggcuacgagaccuucaaggucaucgaggggugguccaagcccaacagcaagcuccagaucaaccgccaggugaucguggaccggggcaaccgguccggguacagcggcaucuucagcgucgagggcaaguccugcaucaaccgcugcuucuacguggagcugauccgggggcgcaagcaggagaccgaggugcuguggaccagcaacuccaucgucguguucugcggcaccagcgggaccuacggcacgggguccuggccggacggcgccgacaucaaccucaugcccaucuga

SEQ ID NO: 78224 - RNA, 1410 nt, Artificial Sequence
  derived and/or modified CDS sequence (opt1) from neuraminidase__InfluenzaA__AAX57907
augaaccccaaccagaagaucaucaccaucggcagcgugucccugaccaucgccacgaucugcuuccucaugcagaucgccauccuggucaccaccgugacccugcacuucaagcaguacgagugcaacagcccgcccaacaaccaggugaugcucugcgagcccacgaucaucgagcgcaacaucaccgagaucgucuaccugaccaacaccacgaucgagaaggagaucugccccaagcuggcggaguaccggaacugguccaagccgcagugcaacaucaccggguucgcccccuucagcaaggacaacuccauccgccucagcgccggcggggacaucugggugacccgggagcccuacguguccugcgaccccgacaagugcuaccaguucgcccugggccaggggaccacgcugaacaacggccacagcaacgacaccguccacgaccgcaccccguaccggacccuccugaugaacgagcugggcgugcccuuccaccucgggacgaagcaggucugcaucgccugguccagcuccagcugccacgacggcaaggcguggcugcacgugugcgugaccggggacgacgagaacgccaccgccuccuucaucuacaacggccgccugguggacagcaucggguccuggagcaagaagauccuccggacccaggaguccgagugcgucugcaucaacggcacgugcaccguggugaugaccgacggcagcgccuccgggaaggcggacaccaagauccuguucaucgaggagggcaagaucguccacacgagcagccuguccgggagcgcccagcacguggaggagugcuccugcuacccccgcuaccccggcgugcggugcgucugccgcgacaacuggaagggcagcaaccggccgaucguggacaucaacgugaaggacuacuccaucgucagcuccuacgugugcagcgggcucgugggcgacacgccccgcaagaacgacuccagcuccagcucccacugccuggaccccaacaacgaggagggcgggcacggggucaagggcugggccuucgacgacggcaacgacguguggauggggcggaccaucagcgagaagcugcgcuccggcuacgagaccuucaaggucaucgagggguggagcaagcccaacuccaagcuccagaugaaccgccaggugaucguggaccggggcaaccggagcggguacuccggcaucuucagcgucgagggcaagagcugcaucaaccgcugcuucuacguggagcugauccgggggcgcaagcaggagaccgaggugcuguggaccuccaacagcaucgucguguucugcggcaccuccgggaccuacggcacggggagcuggccggacggcgccgacaucaaccucaugcccaucuga

SEQ ID NO: 78225 - RNA, 1410 nt, Artificial Sequence; identical to SEQ ID NO: 78085
  derived and/or modified CDS sequence (opt1) from neuraminidase__InfluenzaA__AAX57917

SEQ ID NO: 78226 - RNA, 1410 nt, Artificial Sequence; identical to SEQ ID NO: 78085
  derived and/or modified CDS sequence (opt1) from neuraminidase__InfluenzaA__AAX57927

SEQ ID NO: 78227 - RNA, 1410 nt, Artificial Sequence
  derived and/or modified CDS sequence (opt1) from neuraminidase__InfluenzaA__AAX57937
augaaccccaaccagaagaucaucaccaucggcagcgugucccugaccaucgccacgaucugcuuccucaugcagaucgccauccuggucaccaccgugacccugcacuucaagcaguacgagugcaacagcccgcccaacaaccaggugaugcucugcgagcccacgaucaucgagcgcaacaucaccgagauggucuaccugaccaacaccacgaucgagaaggagaucugccccaagcuggcggaguaccggaacugguccaagccgcagugcaacaucaccggguucgcccccuucagcaaggacaacuccauccgccucagcgccggcggggacaucugggugacccgggagcccuacguguccugcgaccccgacaagugcuaccaguucgcccugggccaggggaccacgcugaacaacggccacagcaacgacaccguccacgaccgcaccccguaccggacccuccugaugaacgagcugggcgugcccuuccaccucgggacgaagcaggucugcaucgccugguccagcuccagcugccacgacggcaaggcguggcugcacgugugcgugaccggggacgacgagaacgccaccgccuccuucaucuacaacggccgccugguggacagcaucggguccuggagcaagaagauccuccggacccaggaguccgagugcgucugcaucaacggcacgugcaccguggugaugaccgacggcagcgccuccgggaaggcggacaccaagauccuguucaucgaggagggcaagaucguccacacgagccugcucagcggguccgcccagcacguggaggagugcagcugcuacccccgcuaccccggcgugcggugcgucugccgcgacaacuggaagggcuccaaccggccgaucguggacaucaacgugaaggacuacagcaucgucuccagcuacgugugcuccgggcuggugggcgacacgccccgcaagaacgacagcuccagcuccagccacugccuggaccccaacaacgaggagggcgggcacggggucaagggcugggccuucgacgacggcaacgacguguggauggggcggaccaucuccgagaagcuccgcagcggcuacgagaccuucaaggucaucgaggggugguccaagcccaacagcaagcugcagaucaaccgccaggugaucguggaccggggcaaccgguccggguacagcggcaucuucuccgucgagggcaagagcugcaucaaccgcugcuucuacguggagcugauccgggggcgcaagcaggagaccgaggugcucuggaccagcaacuccaucgucguguucugcggcaccagcgggaccuacggcacgggguccuggccggacggcgccgacaucaaccugaugcggaucuga

SEQ ID NO: 78228 - RNA, 1410 nt, Artificial Sequence
  derived and/or modified CDS sequence (opt1) from neuraminidase__InfluenzaA__AAX57947
augaaccccaaccagaagaucaucaccaucggcagcgugucccugaccaucgccacgaucugcuuccucaugcagaucgccauccuggucaccaccgugacccugcacuucaagcaguacgagugcaacagcccgcccaacaaccaggugaugcucugcgagcccacgaucaucgagcgcaacaucaccgagaucgucuaccugaccaacaccacgaucgagaaggagaucugccccaagcuggcggaguaccggaacugguccaagccgcagugcaacaucaccggguucgcccccuucagcaaggacaacuccauccgccucagcgccggcggggacaucugggugacccgggagcccuacguguccugcgaccccgacaagugcuaccaguucgcccugggccaggggaccacgcugaacaacggccacagcaacgacaccguccacgaccgcaccccguaccggacccuccugaugaacgagcugggcgugcccuuccaccucgggacgcgccaggugugcaucgccugguccagcuccagcugccacgacggcaaggcguggcugcacgucugcgugaccggggacgacgagaacgccaccgccuccuucaucuacaacggccggcugguggacagcaucggguccuggagccgcaagauccuccggacccaggaguccgagugcgucugcaucaacggcacgugcaccguggugaugaccgacggcagcgccuccgggaaggcggacaccaagauccuguucaucgaggagggcaagaucguccacaucagcacgcugagcggguccgcccagcacguggaggagugcagcugcuacccccgcuaccccggcgugcggugcgucugccgcgacaacuggaagggcuccaaccggccgaucguggacaucaacgugaaggacuacagcaucgccuccagcuacaugugcuccgggcucgucggcgacacgccccgcaagaacgacagcuucuccagcucccacugccuggaccccaacaacgaggagggcgggcacggggugaagggcugggccuucgacgacggcaacgacguguggauggggcggaccaucagcgagaagcugcgcuccggcuacgagaccuucaaggucaucgagggguggagcaagcccaacuccaagcuccagaucaaccgccaggugaucgucgagcggggcaaccggagcggguacuccggcaucuucagcguggagggcaaguccugcaucaaccgcugcuucuacguggagcugauccgggggcgcaaggaggagaccgaggucugguggaccagcaacagcaucgugguguucugcggcaccuccgggaccuacggcacggggagcuggccggacggcgccgacaucaaccugaugcccaucuga

SEQ ID NO: 78229 - RNA, 1410 nt, Artificial Sequence; identical to SEQ ID NO: 78169
  derived and/or modified CDS sequence (opt1) from neuraminidase__InfluenzaA__AAX76626

SEQ ID NO: 78230 - RNA, 1410 nt, Artificial Sequence
  derived and/or modified CDS sequence (opt1) from neuraminidase__InfluenzaA__AAX76646
augaaccccaaccagaagaucaucaccaucggcagcgugucccugaccaucgccacgaucugcuuccucaugcagaucgccauccuggucaccaccgugacccugcacuucaagcagcacgagugcaacagcccgcccaacaaccaggugaugcucugcgagcccacgaucaucgagcgcaacaucaccgagaucgucuaccugaccaacaccacgaucgagaaggagaucugccccaagcuggcggaguaccggaacugguccaagccgcagugcaacaucaccggguucgcccccuucagcaaggacaacuccauccgccucagcgccggcggggacaucugggugacccgggagcccuacguguccugcgaccccgacaagugcuaccaguucgcccugggccaggggaccacgcugaacaacggccacagcaacaacaccguccacgaccgcaccccguaccggacccuccugaugaacgagcugggcgugcccuuccaccucgggacgcgccaggugugcaucgccugguccagcuccggcugccacgacgggaaggcguggcugcacgucugcgugaccggcgacgacaagaacgccaccgccagcuucaucuacaacgggcggcugguggacuccaucggcagcugguccaagaagauccuccgcacccaggagagcgagugcgucugcaucaacggcacgugcaccguggugaugaccgacggguccgccagcggcaaggcggacaccaagauccuguucaucgaggaggggaagaucguccacaucuccacgcugagcggcagcgcccagcacguggaggagugcuccugcuacccccgguaccccggcgugcgcugcgucugccgggacaacuggaaggggagcaaccgcccgaucguggacaucaacgugaaggacuacuccaucgucagcuccuacgugugcagcggccucgugggggacacgccccggaagaacgacuccuucagcuccagccacugccuggaccccaacaacgaggagggcgggcacggcgucaagggcugggccuucgacgacgggaacgacguguggaugggccgcaccaucuccgagaagcugcggagcggguacgagaccuucaaggucaucgagggcugguccaagcccaacagcaagcuccagaucaaccgccaggugaucguggagcgggggaaccgcuccggcuacagcggcaucuucuccgucgagggcaagagcugcaucaaccggugcuucuacguggagcugauccgcgggcggaaggaggagaccgaggugugguggaccuccaacagcaucgucguguucugcgggaccagcggcaccuacgggacgggcuccuggccggacggcgccgacaucaaccugaugcccaucuga

SEQ ID NO: 78231 - RNA, 1410 nt, Artificial Sequence; identical to SEQ ID NO: 78159
  derived and/or modified CDS sequence (opt1) from neuraminidase__InfluenzaA__AAX76656

SEQ ID NO: 78232 - RNA, 1410 nt, Artificial Sequence; identical to SEQ ID NO: 78204
  derived and/or modified CDS sequence (opt1) from neuraminidase__InfluenzaA__AAX76666

SEQ ID NO: 78233 - RNA, 1410 nt, Artificial Sequence; identical to SEQ ID NO: 78085
  derived and/or modified CDS sequence (opt1) from neuraminidase__InfluenzaA__AAX76696

SEQ ID NO: 78234 - RNA, 1410 nt, Artificial Sequence
  derived and/or modified CDS sequence (opt1) from neuraminidase__InfluenzaA__AAX76736
augaaccccaaccagaagaucaucaccaucggcagcgugucccugaccaucgccacgaucugcuuccucaugcagaucgccauccuggucaccaccgugacccugcacuucaagcaguacgagugcaacagcccgcccaacaaccaggugaugcucugcgagcccacgaucaucgagcgcaacaucaccgagaucgucuaccugaccaacaccacgaucgagaaggagaucugccccaagcuguccgaguaccggaacuggagcaagccgcagugcaacaucaccggguucgcgcccuucuccaaggacaacagcauccgccucuccgccggcggggacaucugggugacccgggagcccuacgugagcugcgaccccgacaagugcuaccaguucgcccugggccaggggaccacgcugaacaacggccacuccaacgacaccguccacgaccgcaccccguaccggacccuccugaugaacgagcugggcgugcccuuccaccucgggacgaagcaggucugcaucgccuggagcuccagcuccugccacgacggcaaggccuggcugcacgugugcgugaccggggacgacgagaacgcgaccgccagcuucaucuacaacggccgccugguggacuccaucgggagcugguccaagaagauccuccggacccaggagagcgagugcgucugcaucaacggcacgugcaccguggugaugaccgacggcuccgccagcgggaaggccgacaccaagauccuguucaucgaggagggcaagaucguccacaucagcacgcugucccgcagcgcgcagcacguggaggagugcuccugcuacccccgguaccccggggugcgcugcgucugccgggacaacuggaagggcagcaaccgcccgaucguggacaucaacgugaaggaccacuccaucgucagcuccuacgugugcagcggccucgugggggacacgccccggaagaacgacuccuucagcuccagccacugccuggaccccaacaacgaggagggcgggcacggcgucaaggggugggccuucgacgacggcaacgacguguggaugggccgcaccaucuccgagaagcugcggagcggguacgagaccuucaaggucaucgagggcugguccaagcccaacagcaagcuccagaucaaccgccaggugaucguggagcgggggaaccgcuccggcuacagcgggaucuucuccgucgagggcaagagcugcaucaaccggugcuucuacguggagcugauccgcggccggaaggaggagaccgaggugugguggaccagcaacuccaucgucguguucugcgggaccagcggcaccuacgggacgggcuccuggccggacggggccgacaucaaccugaugcccaucuga

SEQ ID NO: 78235 - RNA, 1410 nt, Artificial Sequence
  derived and/or modified CDS sequence (opt1) from neuraminidase__InfluenzaA__AAX76766
augaaccccaaccagaagaucaucaccaucggcagcgugucccugaccaucgccacgaucugcuuccucaugcagaucgccauccuggucaccaccgugacccugcacuucaagcagcacgagugcaacagcccgcccaacaaccaggugaugcucugcgagcccacgaucaucgagcgcaacaucaccgagaucgucuaccugaccaacaccacgaucgagaaggagaucugccccaagcuggcggaguaccggaacugguccaagccgcagugcaacaucaccggguucgcccccuucagcaaggacaacuccauccgccucagcgugggcggggacaucugggugacccgggagcccuacgucuccugcgaccccgacaagugcuaccaguucgcccugggccaggggaccacgcugaacaacggccacagcaacgacaccgugcacgaccgcaccccguaccggacccuccugaugaacgagcugggcgugcccuuccaccucgggacgcgccaggucugcaucgccugguccagcuccagcugccacgacggcaaggccuggcugcacgugugcgugaccggggacgacaagaacgcgaccgccuccuucaucuacaacggccggcuggucgacagcaucggguccuggagcaagaagauccuccgcacccaggaguccgagugcgugugcaucaacggcacgugcaccguggucaugaccgacggcagcgccuccgggaaggccgacaccaagauccuguucaucgaggagggcaagaucgugcacaucagcacgcugagcggguccgcgcagcacguggaggagugcagcugcuacccccgguaccccggcguccgcugcgugugccgggacaacuggaagggcuccaaccgcccgaucguggacaucaacgucaaggacuacagcaucguguccagcuacgugugcuccgggcucgucggcgacacgccccggaagaacgacagcuucuccagcucccacugccuggaccccaacaacgaggagggcgggcacggggugaagggcugggccuucgacgacggcaacgacgucuggauggggcgcaccaucagcgagaagcugcgguccggcuacgagaccuucaaggugaucgagggguggagcaagcccaacuccaagcuccagaucaaccgccaggugaucgucgagcggggcaaccgcagcggguacuccggcaucuucagcguggagggcaaguccugcaucaaccggugcuucuacguggagcugauccgcgggcggaaggaggagaccgaggucugguggaccagcaacagcaucgugguguucugcggcaccuccgggaccuacggcacggggagcuggccggacggcgccgacaucaaccugaugcccaucuga

SEQ ID NO: 78236 - RNA, 1410 nt, Artificial Sequence; identical to SEQ ID NO: 78161
  derived and/or modified CDS sequence (opt1) from neuraminidase__InfluenzaA__AAY18089

SEQ ID NO: 78237 - RNA, 1410 nt, Artificial Sequence
  derived and/or modified CDS sequence (opt1) from neuraminidase__InfluenzaA__AAY18099
augaaccccaaccagaagaucaucaccaucggcagcgugucccugaccaucgccacgaucugcuuccucaugcagaucgccauccuggucaccaccgugacccugcacuucaagcagcacgagugcaacagcccgcccaacaaccaggugaugcucugcgagcccacgaucaucgagcgcaacaucaccgagaucgucuaccugaccaacaccacgaucgagaaggagaucugccccaagcuggcggaguaccggaacugguccaagccgcagugcaacaucaccggguucgcccccuucagcaaggacaacuccauccgccucagcgccggcggggacaucugggugacccgggagcccuacguguccugcgaccccgacaagugcuaccaguucgcccugggccaggggaccacgcugaacaacggccacagcaacaacaccguccacgaccgcaccccguaccggacccuccugaugaacgagcugggcgugcccuuccaccucgggacgcgccaggugugcaucgccugguccagcuccagcugccacgacggcaaggcguggcugcacgucugcgugaccggggacgacaagaacgccaccgccuccuucaucuacaacggccggcugguggacagcaucggguccuggagcaagaagauccuccgcacccaggaguccgagugcgucugcaucaacggcacgugcaccguggugaugaccgacggcagcgccuccgggaaggcggacaccaagauccuguucgucgaggagggcaagaucgugcacaucagcacgcugagcggguccgcccagcacguggaggagugcagcugcuacccccgguaccccggcguccgcugcgugugccgggacaacuggaagggcuccaaccgcccgaucguggacaucaacgucaaggacuacagcaucguguccagcuacgugugcuccgggcucgucggcgacacgccccggaagaacgacagcuucuccagcucccacugccuggaccccaacaacgaggagggcgggcacggggugaagggcugggccuucgacgacggcaacgacgucuggauggggcgcaccaucagcgagaagcugcgguccggcuacgagaccuucaaggugaucgagggguggagcaagcccaacuccaagcuccagaucaaccgccaggugaucgucgagcggggcaaccgcagcggguacuccggcaucuucagcguggagggcaaguccugcaucaaccggugcuucuacguggagcugauccgcgggcggaaggaggagaccgaggucugguggaccagcaacagcaucgugguguucugcggcaccuccgggaccuacggcacggggagcuggccggacggcgccgacaucaaccugaugcccaucuga

SEQ ID NO: 78238 - RNA, 1410 nt, Artificial Sequence
  derived and/or modified CDS sequence (opt1) from neuraminidase__InfluenzaA__AAY18109
augaaccccaaccagaagaucaucaccaucggcagcgugucccugaccaucgccacgaucugcuuccucaugcagaucgccauccuggucaccacccugacccuccacuucaagcaguacgagugcaacagcccgcccaacaaccaggugaugcugugcgagcccgcgaucaucgagcgcaacaucacggagaucguguaccugaccaacaccaccaucgagaaggagaagugccccaagcucgccgaguaccggaacugguccaagccgcagugcaacaucacgggguucgcccccuucagcaaggacaacuccauccgccugagcgccggcggggacaucugggucacccgggagcccuacguguccugcgaccccgacaagugcuaccaguucgcccugggccaggggaccacccucaacaacggccacagcaacgacacggugcacgaccgcaccccguaccggacccugcugaugaacgagcucggcguccccuuccaccuggggacccgccaggugugcaucgcgugguccagcuccagcugccacgacggcaaggccuggcugcacgugugcgucacgggggacgacgagaacgccaccgccuccuucaucuacaacggccggcucguggacagcaucggguccuggagcaagaagauccugcgcacccaggaguccgagugcgugugcaucaacgggaccugcacggucgugaugaccgacggcagcgcguccgggaaggccgacaccaagauccuguucaucgaggagggcaagaucgugaacaucagcacccucagcggguccgcccagcacgucgaggagugcagcugcuacccccgguaccccggcgugcgcugcgugugccgggacaacuggaagggcuccaaccgcccgaucgucgacaucaacgugaaggacuacagcaucguguccagcuacgucugcuccgggcuggugggcgacacgccccggaagaacgacagcuucuccagcucccacugccuggaccccaacaacgaggagggcggccacggggugaagggcugggccuucgacgacggcaacgacgucuggauggggcgcaccaucagcgagaagcuccgguccggcuacgagaccuucaaggugaucgagggguggagcaagcccaacuccaagcugcagaucaaccgccaggucaucguggagcggggcaaccgcagcggguacuccggcaucuucagcguggagggcaaguccugcaucaaccggugcuucuacgucgagcugauccgcgggcggaaggaggagaccgaggugugguggacgagcaacagcaucguggucuucugcggcaccuccgggaccuacggcaccgggagcuggccggacggcgccgacaucaaccucaugcccaucuga

SEQ ID NO: 78239 - RNA, 1410 nt, Artificial Sequence; identical to SEQ ID NO: 78197
  derived and/or modified CDS sequence (opt1) from neuraminidase__InfluenzaA__AAY18119

SEQ ID NO: 78240 - RNA, 1410 nt, Artificial Sequence
  derived and/or modified CDS sequence (opt1) from neuraminidase__InfluenzaA__AAY18129
augaaccccaaccagaagaucaucaccaucggcagcgugucccugaccaucgccacgaucugcuuccucaugcagaucaccauccuggucaccaccgugacgcugcacuucaagcaguacgagugcaacagcccgcccaacaaccaggugaugcucugcgagcccaccaucaucgagcgcaacaucaccgagaucgucuaccugaccaacacgaccaucgagaaggagaucugccccaagcuggccgaguaccggaacugguccaagccgcagugcaacaucaccggguucgcgcccuucagcaaggacaacuccauccgccucagcgccggcggggacaucugggugacccgggagcccuacguguccugcgaccccgacaagugcuaccaguucgcccugggccaggggacgacccugaacaacggccacagcaacgacaccguccacgaccgcaccccguaccggacgcuccugaugaacgagcugggcgugcccuuccaccucgggacccgccaggugugcaucgccugguccagcuccagcugccacgacggcaaggccuggcugcacgucugcgugaccggggacgacaagaacgcgaccgccuccuucaucuacaacggccggcugguggacagcaucggguccuggagcaagaagauccuccgcacgcaggaguccgagugcgucugcaucaacgggaccugcaccguggugaugaccgacggcagcgccuccgggaaggccgacacgaagauccuguucaucgaggagggcaagaucauccacaucagcacccugagcggguccgcgcagcacgucgaggagugcagcugcuacccccgguaccccggcgugcgcugcgugugccgggacaacuggaagggcuccaaccgcccgaucgucgacaucaacgugaaggacuacagcaucguguccagcuacgucugcuccgggcucgugggcgacacgccccggaagaacgacagcuccagcuccagccacugccuggaccccaacaacgaggagggcggccacggggugaagggcugggccuucgacgacggcaacgacgucuggauggggcgcaccaucuccgagaagcugcggagcggcuacgagaccuucaaggugaucgaggggugguccaagagcaacuccaagcuccagaucaaccgccaggucaucguggagcggggcaaccgcagcggguacuccggcaucuucagcguggagggcaagagcugcaucaaccggugcuucuacgucgagcugauccgcgggcggaaggaggagaccgaggugugguggaccuccaacagcaucguggucuucugcggcaccuccgggacguacggcaccgggagcuggcccgacggcgccgacaucaaccugaugccgaucuga

SEQ ID NO: 78241 - RNA, 1410 nt, Artificial Sequence
  derived and/or modified CDS sequence (opt1) from neuraminidase__InfluenzaA__AAY18139
augaaccccaaccagaagaucaucaccaucggcagcgugucccugaccaucgccacgaucugcuuccucaugcagaucgccauccuggucaccaccgugacccugcacuucaagcagcacgagugcaacagcccgcccaacaaccaggugaugcucugcgagcccacgaucaucgagcgcaacaucaccgagaucgucuaccugaccaacaccacgaucgagcgggagaucugccccaagcuggcggaguaccgcaacugguccaagccgcagugcaacaucaccggguucgcccccuucagcaaggacaacuccauccggcucagcgccggcggggacaucugggugacccgcgagcccuacguguccugcgaccccgacaagugcuaccaguucgcccugggccaggggaccacgcugaacaaccggcacagcaacgacaccguccacgaccgcaccccguaccggacccuccugaugaacgagcugggcgugcccuuccaccucggcacgcgccaggugugcaucgccugguccagcuccagcugccacgacgggaaggcguggcugcacgucugcgugaccggcgacgacaagaacgccaccgccuccuucaucuacaacgggcggcugguggacagcaucggcuccuggagcaagaagauccuccgcacccaggaguccgagugcgucugcaucaacgggacgugcaccguggugaugaccgacggcagcgccuccggcaaggcggacaccaagauccuguucaucgaggaggggaagaucguccacaucagcacgcugagcggcuccgcccagcacguggaggagugcagcugcuacccccgguaccccggggugcgcugcgucugccgggacaacuggaagggcuccaaccgcccgaucguggacaucaacgugaaggacuacagcaucgucuccagcuacgugugcuccggccucgugggggacacgccccggaagaacgacagcuccagcuccagccacugccuggaccccaacaacgaggagggcgggcacggcgucaaggggugggccuucgacgacggcaacgacguguggaugggccgcaccaucuccgagaagcugcggagcggguacgagaccuucaaggucaucgagggcugguccaagcccaacagcaagcuccagaucaaccgccaggugaucguggagcgggggaaccgcuccggcuacagcgggaucuucuccgucgagggcaagagcugcaucaaccggugcuucuacguggagcugauccgcggccgcaaggaggagaccgaggugugguggaccagcaacuccaucgucguguucugcgggaccagcggcaccuacgggacgggcuccuggccggacggggccgacaucaaccugaugcccaucuga

SEQ ID NO: 78242 - RNA, 1410 nt, Artificial Sequence
  derived and/or modified CDS sequence (opt1) from neuraminidase__InfluenzaA__AAY18149
augaaccccaaccagaagaucaucaccaucggcagcgugucccugaccaucgccacgaucugcuuccucaugcagaucgccauccuggucaccaccgugacccugcacuucaagcagcacgagugcaacagcccgcccaacaaccaggugaugcucugcgagcccacgaucaucgagcgcaacaucaccgagaucgucuaccugaccaacaccacgaucgagaaggagaucugccccaagcuggcggaguaccggaacugguccaagccgcagugcaacaucaccggguucgcccccuucagcaaggacaacuccauccgccucagcgccggcggggacaucugggugacccgggagcccuacguguccugcgaccccgacaagugcuaccaguucgcccugggccaggggaccacgcugaacaacggccacagcaacgacaccguccacgaccgcaccccguaccggacccuccugaugaacgagcugggcgugcccuuccaccucgggacgcgccaggugugcaucgccugguccagcuccagcugccacgacggcaaggcguggcugcacgucugcgugaccggggacgacaagaacgccaccgccuccuucaucuacaacggccggcugguggacagcaucggguccuggagcaagaagauccuccgcacccaggaguccgagugcgucugcaucaacggcacgugcaccguggugaugaccgacggcagcgccuccgggaaggcggacaccaagauccuguucaucgaggagggcaagaucguccacaucagcacgcugagcggguccgcccagcacguggaggagugcagcugcuacccccgguaccccggcgugcgcugcgucugccgggacaacuggaagggcuccaaccgcccgaccguggacaucaacgugaaggacuacagcaucgucuccagcuacgugugcuccgggcucgugggcgacacgccccggaagaacgacagcuccagcuccagccacugccuggaccccaacaacgaggagggcgggcacggggucaagggcugggccuucgacgacggcaacgacguguggauggggcgcaccaucuccgagaagcugcggagcggcuacgagaccuucaaggucaucgaggggugguccaagcccaacagcaagcuccagaucaaccgccaggugaucguggagcggggcaaccgcuccggguacagcggcaucuucuccgucgagggcaagagcugcaucaaccggugcuucuacguggagcugauccgcgggcggaaggaggagaccgaggugugguggaccagcaacuccaucgucguguucugcggcaccagcgggacguacggcaccggguccuggccggacggcgccgacaucaaccugaugcccaucuga

SEQ ID NO: 78243 - RNA, 1410 nt, Artificial Sequence
  derived and/or modified CDS sequence (opt1) from neuraminidase__InfluenzaA__AAY18159
augaaccccaaccagaagaucaucaccaucggcagcgugucccugaucaucgccaccaucugcuuccucaugcagaucgccauccuggucacgaccgugacccugcacuucaagcaguacgagugcaacagcccgcccaacaaccaggugaugcucugcgagcccaccaucaucgagcgcaacaucacggagaucgucuaccugaccaacaccaccaucgagaaggagaucugccccaagcuggcggaguaccggaacugguccaagccgcagugcaacaucacgggguucgcccccuucagcaaggacaacuccauccgccucagcgccggcggggacaucugggugacccgggagcccuacguguccugcgaccccgacaagugcuaccaguucgcccugggccaggggaccacccugaacaacggccacagcaacgacacgguccacgaccgcaccccguaccggacccuccugaugaacgagcugggcgugcccuuccaccucgggaccaagcaggucugcaucgccugguccagcuccagcugccacgacggcaaggcguggcugcacgugugcgugacgggggacgacgagaacgccaccgccuccuucaucuacaacggccgccugguggacagcaucggguccuggagcaagaagauccuccggacccaggaguccgagugcgucugcaucaacgggaccugcacgguggugaugaccgacggcagcgccuccgggaaggcggacaccaagauccuguucaucgaggagggcaagaucguccacaccagcagccuguccgggagcgcccagcacguggaggagugcuccugcuacccccgcuaccccggcgugcggugcgucugccgcgacaacuggaagggcagcaaccggccgaucguggacaucaacgugaaggacuacuccaucgucagcuccuacgugugcagcgggcucgugggcgacacgccccgcaagaacgacuccagcuccagcucccacugccuggaccccaacaacgaggagggcggccacggggucaagggcugggccuucgacgacggcaacgacguguggauggggcggaccaucagcgagaagcugcgcuccggcuacgagaccuucaaggucaucgagggguggagcaagcccaacuccaagcuccagaucaaccgccaggugaucguggaccggggcaaccggagcggguacuccggcaucuucagcgucgagggcaagaacugcaucaaccgcugcuucuacguggagcugauccgggggcgcaagcaggagaccgaggugcuguggacgagcaacuccaucgucguguucugcggcaccagcgggaccuacggcaccggguccuggccggacggcgccgacaucaaccucaugcccaucuga

SEQ ID NO: 78244 - RNA, 1410 nt, Artificial Sequence; identical to SEQ ID NO: 78085
  derived and/or modified CDS sequence (opt1) from neuraminidase__InfluenzaA__AAY18179

SEQ ID NO: 78245 - RNA, 1410 nt, Artificial Sequence; identical to SEQ ID NO: 78085
  derived and/or modified CDS sequence (opt1) from neuraminidase__InfluenzaA__AAY18189

SEQ ID NO: 78246 - RNA, 1410 nt, Artificial Sequence
  derived and/or modified CDS sequence (opt1) from neuraminidase__InfluenzaA__AAY18199
augaaccccaaccagaagaucaucaccaucggcagcgugucccugaccaucagcacgaucugcuucuucaugcagaucgccauccucaucaccaccgucacccugcacuucaagcaguacgaguucaacuccccgcccaacaaccaggugaugcugugcgagcccacgaucaucgagcgcaacaucaccgagaucguguaccucaccaacaccacgaucgagaaggagaucugccccaagcuggccgaguaccggaacuggagcaagccgcagugcaacaucaccggguucgcgcccuucuccaaggacaacagcauccgccuguccgccggcggggacaucugggucacccgggagcccuacgugagcugcgaccccgacaagugcuaccaguucgcccucggccaggggaccacgcugaacaacgugcacuccaacgacaccguccacgaccgcaccccguaccggacccugcucaugaacgagcugggcgugcccuuccaccugggcacgaagcaggucugcaucgccuggagcuccagcuccugccacgacgggaaggccuggcuccacgugugcgugaccggcgacgacgagaacgcgaccgccagcuucaucuacaacgggcgccugguggacuccaucgucagcugguccaagaagauccugcggacccaggagagcgagugcgugugcaucaacggcacgugcaccguggucaugaccgacggguccgccagcggcaaggccgacaccaagauccucuucaucgaggagggcaagaucgugcacacgagcacccuguccgggagcgcgcagcacguggaggagugcuccugcuacccccgcuaccccggcguccggugcgugugccgcgacaacuggaaggggagcaaccggccgaucguggacaucaacaucaaggacuacuccaucgucagcuccuacgugugcagcggccuggugggcgacacgccccgcaagaacgacuccagcuccagcucccacugccucgaccccaacaacgaggagggcgggcagggggucaagggcugggccuucgacgacgggaacgacguguggaugggccggaccaucagcgagaagcugcacuccggcuacgagaccuucaaggucaucgagggguggagcaaccccaacuccaagcugcagaucaaccgccaggugaucguggaccggggcaaccgcagcggguacuccggcaucuucagcgucgagggcaagagcugcaucaaccggugcuucuacguggagcucauccgcgggcggaagcaggagaccgaggugcuguggaccuccaacagcaucgucguguucugcggcaccuccgggacguacggcaccgggagcuggccggacggcgccgacaucaaccugaugcccaucuga

SEQ ID NO: 78247 - RNA, 1410 nt, Artificial Sequence; identical to SEQ ID NO: 78188
  derived and/or modified CDS sequence (opt1) from neuraminidase__InfluenzaA__AAY18588

SEQ ID NO: 78248 - RNA, 1410 nt, Artificial Sequence; identical to SEQ ID NO: 78169
  derived and/or modified CDS sequence (opt1) from neuraminidase__InfluenzaA__AAY18614

SEQ ID NO: 78249 - RNA, 1410 nt, Artificial Sequence
  derived and/or modified CDS sequence (opt1) from neuraminidase__InfluenzaA__AAY27846
augaaccccaaccagaagaucaucaccaucggcagcgugucccugaccaucgccgccaucugcuuccucaugcagaucgcgauccuggucacgaccgugacccugcacuucaagcagcacgagugcaacagcccgcccaacaaccaggugaugcucugcgagcccaccaucaucgagcgcaacaucacggagaucgucuaccugaccaacaccaccaucgagaaggagaucugccccaagcuggccgaguaccggaacugguccaagccgcagugcaacaucacgggguucgcccccuucagcaaggacaacuccauccgccucagcgccggcggggacaucugggugacccgggagcccuacguguccugcgaccccgacaagugcuaccaguucgcccugggccaggggaccacccugaacaacggccacagcaacgacacgguccacgaccgcaccccguaccggacccuccugaugaacgagcugggcgugcccuuccaccucgggacccgccaggugugcaucgcgugguccagcuccagcugccacgacggcaaggccuggcugcacgucugcgugacgggggacgacaagaacgccaccgccuccuucaucuacaacggccggcugguggacagcaucggguccuggagcaagaagauccuccgcacccaggaguccgagugcgucugcaucaacgggaccugcacgguggugaugaccgacggcagcgcguccgggaaggccgacaccaagauccuguucaucgaggagggcaagaucguccacaucagcacccugagcggguccgcccagcacguggaggagugcagcugcuacccccgguaccccggcgugcgcugcgucugccgggacaacuggaagggcuccaaccgcccgaucguggacaucaacgugaaggacuacagcaucgucuccagcuacgugugcuccgggcucgugggcgacacgccccggaagaacgacagcuucuccagcucccacugccuggaccccaacaacgaggagggcggccacggggucaagggcugggccuucgacgacggcaacgacguguggauggggcgcaccaucagcgagaagcugcgguccggcuacgagaccuucaaggucaucgagggguggagcaagcccaacuccaagcuccagaucaaccgccaggugaucguggagcggggcaaccgcagcggguacuccggcaucuucagcgucgagggcaaguccugcaucaaccggugcuucuacguggagcugauccgcgggcggaaggaggagaccgaggugugguggacgagcaacagcaucgucguguucugcggcaccuccgggaccuacggcaccgggagcuggccggacggcgccgacaucaaccugaugcccaucuga

SEQ ID NO: 78250 - RNA, 1410 nt, Artificial Sequence
  derived and/or modified CDS sequence (opt1) from neuraminidase__InfluenzaA__AAY27856
augaaccccaaccagaagaucaucaccaucggcagcgugucccugaccaucgccacgaucugcuuccucaugcagaucgccauccuggucaccaccgugacccugcacuucaagcagcacgagugcaacagcccgcccaacaaccaggugaugcucugcgagcccacgaucaucgagcgcaacaucaccgagaucgucuaccugaccaacaccacgaucgagaaggagaucugccccaagcuggcggaguaccggaacugguccaagccgcagugcaacaucaccggguucgcccccuucagcaaggacaacuccauccgccucagcgccggcggggacaucugggugacccgggagcccuacguguccugcgaccccggcaagugcuaccaguucgcccuggggcagggcaccacgcugaacaacggccacagcaacgacaccguccacgaccgcaccccguaccggacccuccugaugaacgagcugggggugcccuuccaccucggcacgcgccaggugugcaucgccugguccagcuccagcugccacgacgggaaggcguggcugcacgucugcgugaccggcgacgacaagaacgccaccgccuccuucaucuacaacgggcggcugguggacagcaucggcuccuggagcaagaagauccuccgcacccaggaguccgagugcgucugcaucaacggcacgugcaccguggugaugaccgacgggagcgccuccggcaaggcggacaccaagauccuguucaucgaggaggggaagaucguccacaucagcacgcugagcggcuccgcccagcacguggaggagugcagcugcuacccccgguaccccggcgugcgcugcgucugccgggacaacuggaagggguccaaccgcccgaucguggacaucaacgugaaggacuacagcaucgucuccagcuacgugugcuccggccucgugggggacacgccccggaagaacgacagcuccagcuccagccacugccuggaccccaacaacgaggagggcgggcacggcgucaagggcugggccuucgacgacgggaacgacguguggaugggccgcaccaucuccgagaagcugcggagcggguacgagaccuucaaggucaucgagggcugguccaagcccaacagcaagcuccagaucaaccgccaggugaucguggagcgggggaaccgcuccggcuacagcggcaucuucuccgucgagggcaagagcugcaucaaccggugcuucuacguggagcugauccgcgggcggaaggaggagaccgaggugugguggaccagcaacuccaucgucguguucugcgggaccagcggcaccuacgggacgggcuccuggccggacggcgccgacaucaaccugaugcccaucuga

SEQ ID NO: 78251 - RNA, 1410 nt, Artificial Sequence; identical to SEQ ID NO: 78161
  derived and/or modified CDS sequence (opt1) from neuraminidase__InfluenzaA__AAY27866

SEQ ID NO: 78252 - RNA, 1410 nt, Artificial Sequence
  derived and/or modified CDS sequence (opt1) from neuraminidase__InfluenzaA__AAY27962
augaaccccaaccagaagaucaucaccaucggcagcgugucccugaccaucgccacgaucugcuuccucaugcagaucgccauccuggucaccaccgugacccugcacuucaagcaguacgagugcaacagcccgcccaacaaccaggugaugcucugcgagcccacgaucaucgagcgcaacaucaccgagaucgucuaccugaccaacaccacgaucgagaaggagaucugccccaagcuggcggaguaccggaacugguccaagccgcagugcaacaucaccggguucgcccccuucagcaaggacaacuccauccgccucagcgccggcggggacaucugggugacccgggagcccuacguguccugcgaccccgacaagugcuaccaguucgcccugggccaggggaccacgcugaacaacggccacagcaacgacaccguccacgaccgcaccccguaccggacccuccugaugaacgagcugggcgugcccuuccaccucgggacgcgccaggugugcaucgccugguccagcuccagcugccacgacggcaaggcguggcugcacgucugcgugaccggggacgacgagaacgccaccgccuccuucaucuacaacggccggcugguggacagcaucggguccuggagcaagaagauccuccgcacccaggaguccgagugcgucugcaucaacggcacgugcaccguggugaugaccgacggcagcgccuccgggaaggcggacaccaagauccuguucaucgaggagggcaagaucguccacaucagcacgcugagcggguccgcccagcacguggaggagugcagcugcuacccccgguaccccggcgugcgcugcgucugccgggacaacuggaagggcuccaaccgcccgaucguggacaucaacgugaaggacuacagcaucgucuccagcuacgugugcuccgggcucgugggcgacacgccccggaagaacgacagcuucuccagcucccacugccuggaccccaacaacgaggagggcgggcacggggucaagggcugggccuucgacgacggcaacaacguguggauggggcgcaccaucagcgagaagcugcgguccggcuacgagaccuucaaggucaucgagggguggagcaagcccaacuccaagcuccagaccaaccgccaggugaucguggagcggggcaaccgcagcggguacuccggcaucuucagcgucgagggcaaguccugcaucaaccggugcuucuacguggagcugauccgcgggcggaaggaggagaccgaggugugguggaccagcaacagcaucgucguguucugcggcaccuccgggacguacggcaccgggagcuggccggacggcgccgacaucaaccugaugcccaucuga

SEQ ID NO: 78253 - RNA, 1410 nt, Artificial Sequence
  derived and/or modified CDS sequence (opt1) from neuraminidase__InfluenzaA__AAY27997
augaaccccaaccagaagaucaucaccaucggcagcgugucccugaccaucgccacgaucugcuuccucaugcagaucgccauccuggucaccaccgugacccugcacuucaagcagcacgagugcaacagcccgcccaacaaccaggugaugcucugcgagcccacgaucaucgagcgcaacaucaccgagaucgucuaccugaccaacaccacgaucgagaaggagaucugccccaagcuggcggaguaccggaacugguccaagccgcagugcaacaucaccggguucgcccccuucagcaaggacaacuccauccgccucagcgccggcggggacaucugggugacccgggagcccuacguguccugcgaccccgacaagugcuaccaguucgcccugggccaggggaccacgcugaacaacggccacagcaacaacaccguccacgaccgcaccccguaccggacccuccugaugaacgagaugggcgugcccuuccaccuggggacgcgccaggugugcaucgccugguccagcuccagcugccacgacggcaaggcguggcuccacgucugcgugaccggggacgacaagaacgccaccgccuccuucaucuacaacggccggcugguggacagcaucggguccuggagcaagaagauccugcgcacccaggaguccgagugcgucugcaucaacggcacgugcaccguggugaugaccgacggcagcgccuccgggaaggcggacaccaagauccucuucaucgaggagggcaagaucguccacaucagcacgcugagcggguccgcccagcacguggaggagugcagcugcuacccccgguaccccggcgugcgcugcgucugccgggacaacuggaagggcuccaaccgcccgaucguggacaucaacgugaaggacuacagcaucgucuccagcuacgugugcuccgggcuggugggcgacacgccccggaagaacgacagcuucuccagcucccacugccucgaccccaacaacgaggagggcgggcacggggucaagggcugggccuucgacgacggcaacgacguguggauggggcgcaccaucagcgagaagcugcgguccggcuacgagaccuucaaggucaucgagggguggagcaagcccaacuccaagcugcagaucaaccgccaggugaucguggagcggggcaaccgcagcggguacuccggcaucuucagcgucgagggcaaguccugcaucaaccggugcuucuacguggagcucauccgcgggcggaaggaggagaccgaggugugguggaccagcaacagcaucgucguguucugcggcaccuccgggaccuacggcacggggagcuggccggacggcgccgacaucaaccugaugcccaucuga

SEQ ID NO: 78254 - RNA, 1410 nt, Artificial Sequence; identical to SEQ ID NO: 78159
  derived and/or modified CDS sequence (opt1) from neuraminidase__InfluenzaA__AAY28007

SEQ ID NO: 78255 - RNA, 1410 nt, Artificial Sequence; identical to SEQ ID NO: 78204
  derived and/or modified CDS sequence (opt1) from neuraminidase__InfluenzaA__AAY28017

SEQ ID NO: 78256 - RNA, 1410 nt, Artificial Sequence; identical to SEQ ID NO: 78159
  derived and/or modified CDS sequence (opt1) from neuraminidase__InfluenzaA__AAY28268

SEQ ID NO: 78257 - RNA, 1410 nt, Artificial Sequence
  derived and/or modified CDS sequence (opt1) from neuraminidase__InfluenzaA__AAY28278
augaaccccaaccagaagaucaucaccaucggcagcgugucccugaccaucgccacgaucugcuuccucaugcagaucgccauccuggucaccaccgugacccugcacuucaagcaguacgagugcaacagcccgcccaacaaccaggugaugcucugcgagcccacgaucaucgagcgcaacaucaccgagaucgucuaccugaccaacaccacgaucgagaaggagaucugccccaagcuggcggaguaccggaacugguccaagccgcagugcaagaucaccggguucgcccccuucagcaaggacaacuccauccgccucagcgccggcggggacaucugggugacccgggagcccuacguguccugcgaccccgacaagugcuaccaguucgcccugggccaggggaccacgcugaacaaccgccacagcaacgacaccguccacgaccggaccccguaccgcacccuccugaugaacgagcugggcgugcccuuccaccucggcacgaagcaggucugcaucgccugguccagcuccagcugccacgacgggaaggcguggcugcacgugugcgugaccggccacgacgagaacgccaccgccuccuucaucuacgacgggcggcugguggacagcaucggcuccuggagcaagaagauccuccgcacccaggaguccgagugcgucugcaucaacgggacgugcaccguggugaugaccgacggcagcgccuccggccgggcggacaccaagauccuguucaucgaggaggggaagaucguccacacgagcaagcugagcggcuccgcccagcacguggaggagugcagcugcuacccccgcuaccccggggugcggugcgucugccgcgacaacuggaagggcuccaaccggccgaucguggacaucaacgugaaggacuacagcaucgucuccagcuacgugugcuccggccucgugggggacacgccccgcaagaacgacagcuccagcuccagccacugccuggaccccaacaacgaggagggcgggcacggcgucaaggggugggccuucgacgacggcaacgacguguggaugggccggaccaucuccgagaagucccgcagcggguacgagaccuucaaggucaucgagggcuggagcaagcccaacuccaagcugcagaucaaccgccaggugaucguggagcgggggaaccggagcggcuacuccgggaucuucagcgucgagggcaagagcugcaucaaccgcugcuucuacguggagcucauccggggccgcaagccggagaccgaggugugguggaccuccaacagcaucgucguguucugcgggaccuccggcaccuacgggacgggcagcuggcccgacggggccgacaucaaccugaugcccaucuga

SEQ ID NO: 78258 - RNA, 1410 nt, Artificial Sequence; identical to SEQ ID NO: 78173
  derived and/or modified CDS sequence (opt1) from neuraminidase__InfluenzaA__AAY28288

SEQ ID NO: 78259 - RNA, 1410 nt, Artificial Sequence
  derived and/or modified CDS sequence (opt1) from neuraminidase__InfluenzaA__AAY28298
augaaccccaaccagaagaucaucaccaucggcagcgugucccugaccaucgccacgaucugcuuccucaugcagaucgccauccuggucaccaccgugacccugcacuucaagcagcacgagugcaacagcccgcccaacaaccaggugaugcucugcgagcccacgaucaucgagcgcaacaucaccgagaucgucuaccugaccaacaccacgaucgagaaggagaucugccccaagcuggcggaguaccggaacugguccaagccgcagugcaacaucaccggguucgcccccuucagcaaggacaacuccauccgccucagcgccggcggggacaucugggugacccgggagcccuacguguccugcgaccccgacaagugcuaccaguucgcccugggccaggggaccacgcugaacaacggccacagcaacgacaccguccacgaccgcaccccguaccggacccuccugaugaacgagcugggcgugcccuuccaccucgggacgcgccaggugugcaucgccugguccagcuccagcugccacgacggcaaggcguggcugcacgucugcgugaccggggacgacaagaacgccaccgccuccuucaucuacaacggccggcugguggacagcaucggguccuggagcaagaagauccuccgcacccaggaguccgagugcgucugcaucaacggcacgugcaccguggugaugaccgacggcagcgccuccgggaaggcggacaccaagauccuguucaucgaggagggcaagaucguccacaucagcacgcugagcggguccgcccagcacguggaggagugcagcugcuacccccgguaccccggcgugcgcugcgucugccgggacaacuggaagggcuccaaccgcccgaucguggacaucaacgugaaggacuacagcaucgucuccagcuacgugugcuccgggcucgugggcgacacgccccggaagaacgacagcuccagcuccagccacugccuggaccccaacaacgaggagggcgggcacggggucaagggcugggccuucgacgacggcaacgacguguggauggggcgcaccaucuccgagaagcugcggagcggcuacgagaccuucaaggucaucgagggguggucccgccccaacagcaagcuccagaucaaccgccaggugaucguggagcggggcaaccgguccggguacagcggcaucuucuccgucgagggcaagagcugcaucaaccgcugcuucuacguggagcugauccgggggcgcaaggaggagaccgaggugugguggaccagcaacuccaucgucguguucugcggcaccagcgggaccuacggcacgggguccuggccggacggcgccgacaucaaccugaugcccaucuga

SEQ ID NO: 78260 - RNA, 1410 nt, Artificial Sequence; identical to SEQ ID NO: 78190
  derived and/or modified CDS sequence (opt1) from neuraminidase__InfluenzaA__AAY28308

SEQ ID NO: 78261 - RNA, 1410 nt, Artificial Sequence
  derived and/or modified CDS sequence (opt1) from neuraminidase__InfluenzaA__AAY28318
augaaccccaaccagaagaucaucaccaucggcagcgugucccugaccaucgccacgaucugcuuccucaugcagaucgccauccuggucaccaccgugacccugcacuucaagcaguacgagugcaacagcccgcccaacaaccaggugaugcucugcgagcccacgaucaucgagcgcaacaucaccgagaucgucuaccugaccaacaccacgaucgagaaggagaucugccccaagcuggcggaguaccggaacugguccaagccgcagugcaacaucaccggguucgcccccuucagcaaggacaacuccauccgccucagcgccggcggggacaucugggugacccgggagcccuacguguccugcgaccccgacaagugcuaccaguucgcccugggccaggggaccacgcugaacaacggccacagcaacgacaccguccacgaccgcaccccguaccggacccuccugaugaacgagcugggcgugcccuuccaccucgggacgcgccaggugugcaucgccugguccagcuccagcugccacgacggcaaggcguggcugcacgucugcgugaccggggacgacgagaacgccaccgccuccuucaucuacaacggccggcugguggacagcaucggguccuggagcaagaagauccuccgcacccaggaguccgagugcgucugcaucaacggcacgugcgccguggugaugaccgacggcagcgcguccgggaaggccgacaccaagauccuguucaucgaggagggcaagaucguccacaucagcacccugagcggguccgcccagcacguggaggagugcagcugcuacccccgguaccccggcgugcgcugcgucugccgggacaacuggaagggcuccaaccgcccgaucguggacaucaacgugaaggacuacagcaucgucuccagcuacgugugcuccgggcucgugggcgacacgccccggaagaacgacagcuucuccagcucccacugccuggaccccaacaacgaggagggcgggcacggggucaagggcugggccuucgacgacggcaacgacguguggauggggcgcaccaucagcgagaagcugcgguccggcuacgagaccuucaaggucaucgagggguggagcaagcccaacuccaagcuccagaccaaccgccaggugaucguggagcggggcaaccgcagcggguacuccggcaucuucagcgucgagggcaaguccugcaucaaccggugcuucuacguggagcugauccgcgggcggaaggaggagacggaggugugguggaccagcaacagcaucgucguguucugcggcaccuccgggaccuacggcacggggagcuggccggacggcgccgacaucaaccugaugcccaucuga

SEQ ID NO: 78262 - RNA, 1410 nt, Artificial Sequence
  derived and/or modified CDS sequence (opt1) from neuraminidase__InfluenzaA__AAY28338
augaaccccaaccagaagaucaucaccaucggcagcgugucccugaccaucgccacgaucugcuuccucaugcagaucgccauccuggucaccaccgugacccugcacuucaagcaguacgagugcaacagcccgcccaacaaccaggugaugcucugcgagcccgcgaucaucgagcgcaacaucacggagaucgucuaccugaccaacaccaccaucgagaaggagauccggcccaagcuggccgaguaccgcaacugguccaagccgcagugcaacaucacgggguucgcccccuucagcaaggacaacuccauccggcucagcgccggcggggacaucugggugacccgcgagcccuacguguccugcgaccccgacaagugcuaccaguucgcccugggccaggggaccacccugaacaacggccacagcaacgacacgguccacgaccggaccccguaccgcacccuccugaugaacgagcugggcgugcccuuccaccucgggacccgccaggugugcaucgcgugguccagcuccagcugccacgacggcaaggccuggcugcacgucugcgugacgggggacgacgagaacgccaccgccuccuucaucuacaacggccggcugguggacagcaucggguccuggagcaagaagauccuccggacccaggaguccgagugcgucugcaucaacgggaccugcacgguggugaugaccgacggcagcgcguccgggaaggccgacaccaagauccuguucaucgaggagggcaagaucgucaacaucagcacccugagcggguccgcccagcacguggaggagugcagcugcuacccccgcuaccccggcgugcggugcgucugccgcgacaacuggaagggcuccaaccggccgaucguggacaucaacgugaaggacuacagcaucgucuccagcuacgugugcuccgggcucgugggcgacacgccccgcaagaacgacagcuucuccagcucccacugccuggaccccaacaacgaggagggcggccacggggucaagggcugggccuucgacgacggcaacgacguguggauggggcggaccaucagcgagaagcugcgcuccggcuacgagaccuucaaggucaucgagggguggagcaagcccaacuccaagcuccagaucaaccgccaggugaucguggagcggggcaaccggagcggguacuccggcaucuucagcgucgagggcaaguccugcaucaaccgcugcuucuacguggagcugauccgggggcgcaaggaggagaccgaggugugguggacgagcaacagcaucgucguguucugcggcaccuccgggaccuacggcaccgggagcuggccggacggcgccgacaucaaccugaugcccaucuga

SEQ ID NO: 78263 - RNA, 1410 nt, Artificial Sequence; identical to SEQ ID NO: 78169
  derived and/or modified CDS sequence (opt1) from neuraminidase__InfluenzaA__AAY28348

SEQ ID NO: 78264 - RNA, 1410 nt, Artificial Sequence; identical to SEQ ID NO: 78085
  derived and/or modified CDS sequence (opt1) from neuraminidase__InfluenzaA__AAY28358

SEQ ID NO: 78265 - RNA, 1410 nt, Artificial Sequence; identical to SEQ ID NO: 78169
  derived and/or modified CDS sequence (opt1) from neuraminidase__InfluenzaA__AAY28388

SEQ ID NO: 78266 - RNA, 1410 nt, Artificial Sequence; identical to SEQ ID NO: 78174
  derived and/or modified CDS sequence (opt1) from neuraminidase__InfluenzaA__AAY28398

SEQ ID NO: 78267 - RNA, 1410 nt, Artificial Sequence; identical to SEQ ID NO: 78188
  derived and/or modified CDS sequence (opt1) from neuraminidase__InfluenzaA__AAY28408

SEQ ID NO: 78268 - RNA, 1410 nt, Artificial Sequence; identical to SEQ ID NO: 78161
  derived and/or modified CDS sequence (opt1) from neuraminidase__InfluenzaA__AAY28505

SEQ ID NO: 78269 - RNA, 1410 nt, Artificial Sequence
  derived and/or modified CDS sequence (opt1) from neuraminidase__InfluenzaA__AAY28524
augaaccccaaccagaagaucaucaccaucggcagcgugucccugaccaucgccacgaucugcuuccucaugcagaucgccauccuggucaccaccgugacccugcacuucaagcagcacgagugcaacagcccgcccaacaaccaggugaugcucugcgagcccacgaucaucgagcgcaacaucaccgagaucgucuaccugaccaacaccacgaucgagaaggagaucugccccaagcuggcggaguaccggaacugguccaagccgcagugcaacaucaccggguucgcccccuucagcaaggacaacuccauccgccucagcgccggcggggacaucugggugacccgggagcccuacguguccugcgaccccgacaagugcuaccaguucgcccugggccaggggaccacgcugaacaacggccacagcaacuacaccguccacgaccgcaccccguaccggacccuccugaugaacgagcugggcgugcccuuccaccucgggacgcgccaggugugcaucgccugguccagcuccagcugccacgacggcaaggcguggcugcacgucugcgugaccggggacgacaagaacgccaccgccuccuucaucuacaacggccggcugguggacagcaucggguccuggagcaagaagauccuccgcacccaggaguccgagugcgucugcaucaacggcacgugcaccguggugaugaccgacggcagcgccuccgggaaggcggacaccaagauccuguucaucgaggagggcaagaucguccacaucagcacgcugagcggguccgcccagcacguggaggagugcagcugcuacccccgguaccccggcgugcgcugcgucugccgggacaacuggaagggcuccaaccgcccgaucguggacaucaacgugaaggacuacagcaucgucuccagcuacgugugcuccgggcucgugggcgacacgccccggaagaacgacagcuccagcuccagccacugccuggaccccaacaacgaggagggcgggcacggggucaagggcugggccuucgacgacggcaacgacguguggauggggcgcaccaucuccgagaagcugcggagcggcuacgagaccuucaaggucaucgaggggugguccaagcccaacagcaagcuccagaucaaccgccaggugaucguggagcggggcaaccgcuccggguacagcggcaucuucuccgucgagggcaagagcugcaucaaccggugcuucuacguggagcugauccgcgggcggaaggaggagaccgaggugugguggaccagcaacuccaucgucguguucugcggcaccagcgggaccuacggcacgggguccuggccggacggcgccgacaucaaccugaugcccaucuga

SEQ ID NO: 78270 - RNA, 1410 nt, Artificial Sequence; identical to SEQ ID NO: 78159
  derived and/or modified CDS sequence (opt1) from neuraminidase__InfluenzaA__AAY28534

SEQ ID NO: 78271 - RNA, 1410 nt, Artificial Sequence
  derived and/or modified CDS sequence (opt1) from neuraminidase__InfluenzaA__AAY28544
augaaccccaaccagaagaucaucaccaucggcagcgugucccugaccaucgccacgaucugcuuccucaugcagaucgccauccuggucaccaccgugacccugcacuucaagcagcacgagugcaacagcccgcccaacaaccaggugaugcucugcgagcccacgaucaucgagcgcaacaucaccgagaucgucuaccugaccaacaccacgaucgagaaggagaucugccccaagcuggcggaguaccggaacugguccaagccgcagugcaacaucaccggguucgcccccuucagcaaggacaacuccauccgccucagcgccggcggggacaucugggugacccgggagcccuacguguccugcgaccccaacaagugcuaccaguucgcccugggccaggggaccacgcugaacaacggccacagcaacgacaccguccacgaccgcaccccguaccggacccuccugaugaacgagcugggcgugcccuuccaccucgggacgcgccaggugugcaucgccugguccagcuccagcugccacgacggcaaggcguggcugcacgucugcgugaccggggacgacaagaacgccaccgccuccuucaucuacaacggccggcugguggacagcaucggguccuggagcaagaagauccuccgcacccaggaguccgagugcgucugcaucaacggcacgugcaccguggugaugaccgacggcagcgccuccgggaaggcggacaccaagauccuguucaucgaggagggcaagaucguccacaucagcacgcugagcggguccgcccagcacguggaggagugcagcugcuacccccgguaccccggcgugcgcugcgucugccgggacaacuggaagggcuccaaccgcccgaucguggacaucaacgugaaggacuacagcaucgucuccagcuacgugugcuccgggcucgugggcgacacgccccggaagaacgacagcuucuccagcucccacugccuggaccccaacaacgaggagggcgggcacggggucaagggcugggccuucgacgacggcaacgacguguggauggggcgcaccaucagcgagaagcugcgguccggcuacgagaccuucaaggucaucgagggguggagcaagcccaacuccaagcuccagaucaaccgccaggugaucguggagcggggcaaccgcagcggguacuccggcaucuucagcgucgagggcaaguccugcaucaaccggugcuucuacguggagcugauccgcgggcggaaggaggagaccgaggugugguggaccagcaacagcaucgucguguucugcggcaccuccgggaccuacggcacggggagcuggccggacggcgccgacaucaaccugaugcccaucuga

SEQ ID NO: 78272 - RNA, 1410 nt, Artificial Sequence; identical to SEQ ID NO: 78085
  derived and/or modified CDS sequence (opt1) from neuraminidase__InfluenzaA__AAY28554

SEQ ID NO: 78273 - RNA, 1410 nt, Artificial Sequence
  derived and/or modified CDS sequence (opt1) from neuraminidase__InfluenzaA__AAY28564
augaaccccaaccagaagaucaucaccaucggcagcgugucccugaccaucgccacgaucugcuuccucaugcagaucgccauccuggucaccaccgugacccugcacuucaagcagcacgagugcaacagcccgcccaacaaccaggugaugcucugcgagcccacgaucaucgagcgcaacaucaccgagaucgucuaccugaccaacaccacgaucgagaaggagaucugccccaagcuggcggaguaccggaacugguccaagccgcagugcaacaucaccggguucgcccccuucagcaaggacaacuccauccgccucagcgccggcggggacaucugggugacccgggagcccuacguguccugcgaccccgacaagugcuaccaguucgcccugggccaggggaccacgcugaacaacggccacagcaacgacaccguccacgaccgcaccccguaccggacccuccugaugaacgagcugggcgugcccuuccaccucgggacgcgccaggugugcaucgccugguccagcuccagcugccacgacggcaaggcguggcugcacgucugcgugaccggggacgacaagaacgccaccgccuccuucaucuacaacggccggcugguggacagcaucggguccuggagcaagaagauccuccgcacccaggaguccgagugcgucugcaucaacggcacgugcaccguggugaugaccgacggcagcgccuccgggaaggcggacaccaagauccuguucaucgaggagggcaagaucguccacaucagcacgcugagcggguccgcccagcacguggaggagugcagcugcuacccccgguaccccggcgugcgcugcgucugccgggacaacuggaagggcuccaaccgcccgaucguggacaucaacgugaaggacuacagcaucgucuccagcuacgugugcuccgggcucgugggcgacacgccccggaagaacgacagcuccagcuccagccacugccuggaccccaacaacgaggagggcgggcacggggucaagggcugggccuucgacgacggcaacgacguguggauggggcgcaccaucuccgagaagcugcggagcggcuacgagaccuucaaggucaucgagggguggucccgccccaacagcaagcuccagaucaaccgccaggugaucguggagcggggcaaccgguccggguacagcggcaucuucuccgucgagagcaagagcugcaucaaccgcugcuucuacguggagcugauccggggccgcaaggaggagaccgaggugugguggaccuccaacagcaucgucguguucugcgggaccuccggcaccuacgggacgggcagcuggccggacggggccgacaucaaccugaugcccaucuga

SEQ ID NO: 78274 - RNA, 1410 nt, Artificial Sequence; identical to SEQ ID NO: 78159
  derived and/or modified CDS sequence (opt1) from neuraminidase__InfluenzaA__AAY28574

SEQ ID NO: 78275 - RNA, 1410 nt, Artificial Sequence; identical to SEQ ID NO: 78173
  derived and/or modified CDS sequence (opt1) from neuraminidase__InfluenzaA__AAY28584

SEQ ID NO: 78276 - RNA, 1410 nt, Artificial Sequence; identical to SEQ ID NO: 78085
  derived and/or modified CDS sequence (opt1) from neuraminidase__InfluenzaA__AAY28594

SEQ ID NO: 78277 - RNA, 1410 nt, Artificial Sequence
  derived and/or modified CDS sequence (opt1) from neuraminidase__InfluenzaA__AAY28611
augaaccccaaccagaagaucaucaccaucggcagcgugucccugaccaucgccacgaucugcuuccucaugcagaucgccauccuggucaccaccgugacccugcacuucaagcaguacgagugcaacagcccgcccaacaaccaggugaugcucugcgagcccacgaucaucgagcgcaacaucaccgagaucgucuaccugaccaacaccacgaucgagaaggagaucugccccaagcuggcggaguaccggaacugguccaagccgcagugcaacaucaccggguucgcccccuucagcaaggacaacuccauccgccucagcgccggcggggacaucugggugacccgggagcccuacguguccugcgaccccgacaagugcuaccaguucgcccugggccaggggaccacgcugaacaacggccacagcaacgacaccguccacgaccgcaccccguaccggacccuccugaugaacgagcugggcgugcccuuccaccucgggacgaagcaggucugcaucgccugguccagcuccagcugccacgacggcaaggcguggcugcacgugugcgugaccggggacgacgagaacgccaccgccuccuucaucuacaacggccgccugguggacagcaucggguccuggagcaagaagauccuccggacccaggaguccgagugcgucugcaucaacggcacgugcaccguggugaugaccgacggcagcgccuccgggaaggcggacaccaagauccuguucaucgaggagggcaagaucguccacacgagcagccuguccgggagcgcccagcacguggaggagugcuccugcuacccccgcuaccccggcgugcggugcgucugccgcgacaacuggaagggcagcaaccggccgaucguggacaucaacgugaaggacuacuccaucgucagcuccuacgugugcagcgggcucgugggcgacacgccccgcaagaacgacuccagcuccagcucccacugccuggaccccaacaacgaggagggcgggcacggggucaagggcugggccuucgacgacggcaacgacguguggauggggcggaccaucagcgagaagcugcgcuccggcuacgagaccuucaaggucaucgagggguggagcaagcccaacuccaagcuccagaucaaccgccaggugaucguggaccggggcaaccggagcggguacuccggcaucuucagcgucgagggcaagagcugcaucaaccgcugcuucuacguggagcugauccgggggcgcaagcaggagaccgaggugcuguggaccuccaacagcaucgucguguucugcggcaccuccgggaccuacggcacggggagcuggccggacggcgccgacaucaaccucaugcccaucuga

SEQ ID NO: 78278 - RNA, 1410 nt, Artificial Sequence; identical to SEQ ID NO: 78190
  derived and/or modified CDS sequence (opt1) from neuraminidase__InfluenzaA__AAY28651

SEQ ID NO: 78279 - RNA, 1410 nt, Artificial Sequence
  derived and/or modified CDS sequence (opt1) from neuraminidase__InfluenzaA__AAY44613
augaaccccaaccagaagaucaucaccaucggcagcgugucccugaccaucgccacgaucugcuuccucaugcagaucgccauccuggucaccaccgugacccugcacuucaagcagcacgagugcaacagcccgcccaacaaccaggugaugcucugcgagcccacgaucaucgagcgcaacaucaccgagaucgucuaccugaccaacaccacgaucgagaaggagaucugccccaagaucgcggaguaccggaacugguccaagccgcagugcaacaucaccggguucgcccccuucagcaaggacaacuccauccgccugagcgccggcggggacaucugggugacccgggagcccuacguguccugcgaccccgacaagugcuaccaguucgcccucggccaggggaccacgcugaacaacggccacagcaacgacaccguccacgaccgcaccccguaccggacccugcucaugaacgagcugggcgugcccuuccaccuggggacgcgccaggugugcaucgccugguccagcuccagcugccacgacggcaaggcguggcuccacgucugcgugaccggggacgacaagaacgccaccgccuccuucaucuacaacggccggcugguggacagcaucggguccuggagcaagaagauccugcgcacccaggaguccgagugcgucugcaucaacggcacgugcaccguggugaugaccgacggcagcgccuccgggaaggcggacaccaagauccucuucaucgaggagggcaagaucguccacaucagcacgcugagcggguccgcccagcacguggaggagugcagcugcuacccccgguaccccggcgugcgcugcgucugccgggacaacuggaagggcuccaaccgcccgaucguggacaucaacgugaaggacuacagcaucgucuccagcuacgugugcuccgggcuggugggcgacacgccccggaagaacgacagcuccagcuccagccacugccucgaccccaacaacgaggagggcgggcacggggucaagggcugggccuucgacgacggcaacgacguguggauggggcgcaccaucuccgagaagcugcggagcggcuacgagaccuucaaggucaucgaggggugguccaagcccaacagcaagcugcagaucaaccgccaggugaucguggagcggggcaaccgcuccggguacagcggcaucuucuccgucgagggcaagagcugcaucaaccggugcuucuacguggagcucauccgcgggcggaaggaggagaccgaggugugguggaccagcaacuccaucgucguguucugcggcaccagcgggaccuacggcacgggguccuggccggacggcgccgacaucaaccugaugcccaucuga

SEQ ID NO: 78280 - RNA, 1410 nt, Artificial Sequence; identical to SEQ ID NO: 78173
  derived and/or modified CDS sequence (opt1) from neuraminidase__InfluenzaA__AAY44624

SEQ ID NO: 78281 - RNA, 1410 nt, Artificial Sequence; identical to SEQ ID NO: 78195
  derived and/or modified CDS sequence (opt1) from neuraminidase__InfluenzaA__AAY44634

SEQ ID NO: 78282 - RNA, 1410 nt, Artificial Sequence; identical to SEQ ID NO: 78188
  derived and/or modified CDS sequence (opt1) from neuraminidase__InfluenzaA__AAY44644

SEQ ID NO: 78283 - RNA, 1410 nt, Artificial Sequence
  derived and/or modified CDS sequence (opt1) from neuraminidase__InfluenzaA__AAY44654
augaaccccaaccagaagaucaucaccaucggcagcgugucccugaccaucgccacgaucugcuuccucaugcagaucgccauccuggucaccaccgugacccugcacuucaagcaguacgagugcaacagcccgcccaacaaccaggugaugcucugcgagcccacgaucaucgagcgcaacaucaccgagaucgucuaccugaccaacaccacgaucgagaaggagaucugccccaagcuggcggaguaccggaacugguccaagccgcagugcaacaucaccggguucgcccccuucagcaaggacaacuccauccgccucagcgccggcggggacaucugggugacccgggagcccuacguguccugcgaccccgacaagugcuaccaguucgcccugggccaggggaccacgcugaacaacggccacagcaacgacaccguccacgaccgcaccccguaccggacccuccugaugaacgagcugggcgugcccuuccaccucgggacgaagcaggucugcaucgccugguccagcuccagcugccacgacggcaaggcguggcugcacgugugcgugaccggggacgacgagaacgccaccgccuccuucaucuacaacggccgccugguggacagcaucggguccuggagcaagaagauccuccggacccaggaguccgagugcgucugcaucaacggcacgugcaccguggugaugaccgacggcagcgccuccgggaaggcggacaccaagauccuguucaucgaggagggcaagaucguccacacgagcagccuguccgggagcgcccagcacguggaggagugcuccugcuacccccgcuaccccggcgugcggugcgucugccgcgacaacuggaagggcagcaaccggccgaucguggacaucaacgugaaggacuacuccaucgucagcuccuacgugugcagcgggcucgugggcgacacgccccgcaagaacgacuccagcuccagcucccacugccuggaccccaacaacgaggagggcgggcacggggucaagggcugggccuucgacgacggcaacgacguguggauggggcggaccaucagcgagaagcugcgcuccggcuacgagaccuucaaggucaucgagggguggagcaagcccaacuccaagcuccagauccaccgccaggugaucguggaccggggcaaccggagcggguacuccggcaucuucagcgucgagggcaagagcugcaucaaccgcugcuucuacguggagcugauccgggggcgcaagcaggagaccgaggugcuguggaccuccaacagcaucgucguguucugcggcaccuccgggaccuacggcacggggagcuggccggacggcgccgacaucaaccucaugcccaucuga

SEQ ID NO: 78284 - RNA, 1410 nt, Artificial Sequence
  derived and/or modified CDS sequence (opt1) from neuraminidase__InfluenzaA__AAY44758
augaaccccaaccagaagaucaucaccaucggcagcgugucccugaccaucgccacgaucugcuuccucaugcagaucgccauccuggucaccaccgugacccugcacuucaagcaguacgagugcaacagcccguccaacaaccaggugaugcucugcgagcccacgaucaucgagcgcaacaucaccgagaucgucuaccugaccaacaccacgaucgagaaggagaucugccccaagcuggcggaguaccggaacuggagcaagccccagugcaagaucaccggguucgccccguucuccaaggacaacagcauccgccucuccgccggcggggacaucugggugacccgggagcccuacgugagcugcgaccccgacaagugcuaccaguucgcccugggccaggggaccacgcugaacaaccgccacuccaacgacaccguccacgaccggacccccuaccgcacccuccugaugaacgagcugggcgugccguuccaccucggcacgaagcaggucugcaucgccuggagcuccagcuccugccacgacgggaaggcguggcugcacgugugcgugaccggccacgacgagaacgccaccgccagcuucaucuacgacgggcggcugguggacuccaucggcagcugguccaagaagauccuccgcacccaggagagcgagugcgucugcaucaacgggacgugcaccguggugaugaccgacggcuccgccagcggccgggcggacaccaagauccuguucaucgaggaggggaagaucguccacacgagcaagcuguccggcagcgcccagcacguggaggagugcuccugcuacccccgcuaccccggggugcggugcgucugccgcgacaacuggaagggcagcaaccggcccaucguggacaucaacgugaaggacuacuccaucgucagcuccuacgugugcagcggccucgugggggacaccccgcgcaagaacgacuccagcuccagcucccacugccuggaccccaacaacgaggagggcgggcacggcgucaaggggugggccuucgacgacggcaacgacguguggaugggccggaccaucagcgagaagucccgcagcggguacgagaccuucaaggucaucgagggcugguccaagcccaacagcaagcugcagaucaaccgccaggugaucguggagcgggggaaccgguccggcuacagcgggaucuucagcgucgagggcaaguccugcaucaaccgcugcuucuacguggagcucauccggggccgcaagcccgagacggaggugugguggaccagcaacuccaucgucguguucugcgggaccagcggcaccuacgggacgggcuccuggccggacggggccgacaucaaccugaugcccaucuga

SEQ ID NO: 78285 - RNA, 1410 nt, Artificial Sequence; identical to SEQ ID NO: 78085
  derived and/or modified CDS sequence (opt1) from neuraminidase__InfluenzaA__AAY44778

SEQ ID NO: 78286 - RNA, 1410 nt, Artificial Sequence
  derived and/or modified CDS sequence (opt1) from neuraminidase__InfluenzaA__AAY44788
augaaccccaaccagaagaucaucaccaucggcagcgugucccugaccaucgccacgaucugcuuccucaugcagaucgccauccuggucaccaccgugacccugcacuucaagcaguacgagugcaacagcccgcccaacaaccaggugaugcucugcgagcccacgaucaucgagcgcaacaucaccgagaucgucuaccugaccaacaccacgaucgagaaggagaucugccccaagcuggcggaguaccggaacugguccaagccgcagugcaacaucaccggguucgcccccuucagcaaggacaacuccauccgccucagcgccggcggggacaucugggugacccgggagcccuacguguccugcgaccccgacaagugcuaccaguucgcccugggccaggggaccacgcugaacaacggccacagcaacgacaccguccacgaccgcaccccguaccggacccuccugaugaacgagcugggcgugcccuuccaccucgggacgaagcaggucugcaucgccugguccagcuccagcugccacgacggcaaggcguggcugcacgugugcgugaccggggacgacgagaacgccaccgccuccuucaucuacaacggccgccugguggacagcaucggguccuggagcaagaagauccuccggacccaggaguccgagugcgucugcaucaacggcacgugcaccguggugaugaccgacggcagcgccuccgggaaggcggacaccaagauccuguucaucgaggagggcaagaucguccacacgagccugcucagcggguccgcccagcacguggaggagugcagcugcuacccccgcuaccccggcgugcggugcgucugccgcgacaacuggaagggcuccaaccggccgaucguggacaucaacgugaaggacuacagcaucgucuccagcuacgugugcuccgggcuggugggcgacacgccccgcaagaacgacagcuccagcuccagccacugccuggaccccaacaacgaggagggcgggcacggggucaagggcugggccuucgacgacggcaacgacguguggauggggcggaccaucuccgagaagcuccgcagcggcuacgagaucuucaaggucaucgaggggugguccaagcccaacagcaagcugcagaucaaccgccaggugaucguggaccggggcaaccgguccggguacagcggcaucuucuccgucgagggcaagagcugcaucaaccgcugcuucuacguggagcugauccgggggcgcaagcaggagaccgaggugcucuggaccagcaacuccaucgucguguucugcggcaccagcgggaccuacggcaccggguccuggccggacggcgccgacaucaaccugaugcccaucuga

SEQ ID NO: 78287 - RNA, 1410 nt, Artificial Sequence; identical to SEQ ID NO: 78161
  derived and/or modified CDS sequence (opt1) from neuraminidase__InfluenzaA__AAY44909

SEQ ID NO: 78288 - RNA, 1410 nt, Artificial Sequence; identical to SEQ ID NO: 78188
  derived and/or modified CDS sequence (opt1) from neuraminidase__InfluenzaA__AAY45649

SEQ ID NO: 78289 - RNA, 1410 nt, Artificial Sequence
  derived and/or modified CDS sequence (opt1) from neuraminidase__InfluenzaA__AAY46374
augaaccccaaccagaagaucaucaccaucggcagcgugucccugaccaucgccacgaucugcuuccucaugcagaucgccauccuggucaccaccgugacccugcacuucaagcaguacgagugcaacagcccgcccaacaaccaggugaugcucugcgagcccacgaucaucgagcgcaacaucaccgagaucgucuaccugaccaacaccacgaucgagaaggagaucugccccaagcuggcggaguaccggaacugguccaagccgcagugcaagaucaccggguucgcccccuucagcaaggacaacuccauccgccucagcgccggcggggacaucugggugacccgggagcccuacguguccugcgaccccuacaagugcuaccaguucgcccugggccaggggaccacgcugaacaaccgccacagcaacgacaccguccacgaccggaccccguaccgcacccuccugaugaacgagcugggcgugcccuuccaccucggcacgaagcaggucugcaucgccugguccagcuccagcugccacgacgggaaggcguggcugcacgugugcgugaccggccacgacgagaacgccaccgccuccuucaucuacgacgggcggcugguggacagcaucggcuccuggagcaagaagauccuccgcacccaggaguccgagugcgucugcaucaacgggacgugcaccguggugaugaccgacggcagcgccuccggccgggcggacaccaagauccuguucaucgaggaggggaagaucguccacacgagcaagcugagcggcuccgcccagcacguggaggagugcagcugcuacccccgcuaccccggggugcggugcgucugccgcgacaacuggaagggcuccaaccggccgaucguggacaucaacgugaaggacuacagcaucgucuccagcuacgugugcuccggccucgugggggacacgccccgcaagaacgacagcuccagcuccagccacugccuggaccccaacaacgaggagggcgggcacggcgucaaggggugggccuucgacgacggcaacgacguguggaugggccggaccaucuccgagaagucccgcagcggguacgagaccuucaaggucaucgagggcuggagcaagcccaacuccaagcugcagaucaaccgccaggugaucguggagcgggggaacaugagcggcuacuccgggaucuucagcgucgagggcaagagcugcaucaaccggugcuucuacguggagcucauccgcggccggaagcaggagaccgaggugugguggaccuccaacagcaucgucguguucugcgggaccuccggcaccuacgggacgggcagcuggccggacggggccgacaucaaccugaugcccaucuga

SEQ ID NO: 78290 - RNA, 1410 nt, Artificial Sequence
  derived and/or modified CDS sequence (opt1) from neuraminidase__InfluenzaA__AAY46384
augaaccccaaccagaagaucaucaccaucggcagcgugucccugaccaucgccacgaucugcuuccucaugcagaucgccauccuggucaccaccgugacccugcacuucaagcagcacgagugcaacagcccgcccaacaaccaggugaugcucugcgagcccacgaucaucgagcgcaacaucaccgagaucgucuaccugaccaacaccacgaucgagaaggagaucugccccaagcuggcggaguaccggaacugguccaagccgcagugcaacaucaccggguucgcccccuucagcaaggacaacuccauccgccucagcgccggcggggacaucugggugacccgggagcccuacguguccugcgaccccgacaagugcuaccaguucgcccugggccaggggaccacgcugaacaacggccacagcaacgacgccguccacgaccgcaccccguaccggacccuccugaugaacgagcugggcgugcccuuccaccucgggacccgccaggugugcaucgcgugguccagcuccagcugccacgacggcaaggccuggcugcacgucugcgugacgggggacgacaagaacgccaccgccuccuucaucuacaacggccggcugguggacagcaucggguccuggagcaagaagauccuccgcacccaggaguccgagugcgucugcaucaacgggaccugcacgguggugaugaccgacggcagcgcguccgggaaggccgacaccaagauccuguucaucgaggagggcaagaucguccacaucagcacccugagcggguccgcccagcacguggaggagugcagcugcuacccccgguaccccggcgugcgcugcgucugccgggacaacuggaagggcuccaaccgcccgaucguggacaucaacgugaaggacuacagcaucgucuccagcuacgugugcuccgggcucgugggcgacacgccccggaagaacgacagcuucuccagcucccacugccuggaccccaacaacgaggagggcggccacggggucaagggcugggccuucgacgacggcaacgacguguggauggggcgcaccaucagcgagaagcugcgguccggcuacgagaccuucaaggucaucgagggguggagcaagcccaacuccaagcuccagaucaaccgccaggugaucguggagcggggcaaccgcagcggguacuccggcaucuucagcgucgagggcaaguccugcaucaaccggugcuucuacguggagcugauccgcgggcggaaggaggagaccgaggugugguggacgagcaacagcaucgucguguucugcggcaccuccgggaccuacggcaccgggagcuggccggacggcgccgacaucaaccugaugcccaucuga

SEQ ID NO: 78291 - RNA, 1410 nt, Artificial Sequence
  derived and/or modified CDS sequence (opt1) from neuraminidase__InfluenzaA__AAY46394
augaaccccaaccagaagaucaucaccaucggcagcgugucccugaccaucgccacgaucugcuuccucaugcagaucgccauccugaucaccaccgucacccugcacuucaagcaguacgagugcaacagcccgcccaacaaccaggugaugcucugcgagcccacgaucaucgagcgcaacaucaccgagaucguguaccugaccaacaccacgaucgagaaggagaucugccccaagcuggcggaguaccggaacugguccaagccgcagugcaacaucaccggguucgcccccuucagcaaggacaacuccauccgccucagcgccggcggggacaucugggucacccgggagcccuacguguccugcgaccccgacaagugcuaccaguucgcccugggccaggggaccacgcugaacaacggccacagcaacgacaccgugcacgaccgcaccccguaccggacccuccugaugaacgagcugggcguccccuuccaccucgggacgaagcaggucugcaucgccugguccagcuccagcugccacgacggcaaggcguggcugcacgugugcgugaccggggacgacgagaacgccaccgccuccuucaucuacaacggccgccugguggacagcaucggguccuggagcaagaagauccuccggacccaggaguccgagugcgugugcaucaacggcacgugcaccgucgugaugaccgacggcagcgccuccgggaaggcggacaccaagauccuguucaucgaggagggcaagaucgugcacacgagcagccuguccgggagcgcccagcacgucgaggagugcuccugcuacccccgcuaccccggcgugcggugcgugugccgcgacaacuggaagggcagcaaccggccgaucgucgacaucaacgugaaggacuacuccaucgugagcuccuacgucugcagcgggcucgugggcgacacgccccgcaagaacgacuccagcuccagcucccacugccuggaccccaacaacgaggagggcgggcacggggugaagggcugggccuucgacgacggcaacgacgucuggauggggcggaccaucagcgagaagcugcgcuccggcuacgagaccuucaaggugaucgagggguggagcaagcccaacuccaagcuccagaucaaccggcaggucaucguggaccgcggcaaccggagcggguacuccggcaucuucagcguggagggcaagagcugcaucaaccgcugcuucuacgucgagcugauccgggggcgcaagcaggagaccgaggugcuguggaccuccaacagcaucguggucuucugcggcaccuccgggaccuacggcacggggagcuggccggacggcgccgacaucgaccucaugcccaucuga

SEQ ID NO: 78292 - RNA, 1410 nt, Artificial Sequence
  derived and/or modified CDS sequence (opt1) from neuraminidase__InfluenzaA__AAY46419
augaaccccaaccagaagaucaucaccaucggcagcgugucccugaccaucgccacgaucugcuuccucaugcagaucgccauccuggucaccaccgugacccugcacuucaagcaguacgagugcaacagccucccgaacaaccaggugaugcugugcgagcccacgauccuggagcgcaacaucaccgagaucgucuaccucaccaacaccacgaucgagaaggagaucugccccaagcuggcggaguaccggaacugguccaagccccagugcaagaucaccggguucgccccguucagcaaggacaacuccauccgccugagcgccggcggggacaucugggugacccgggagcccuacguguccugcgaccccgacaagugcuaccaguucgcccucggccaggggaccacgcugaacaaccgccacagcaacgacaccguccacgaccggacccccuaccgcacccugcucaugaacgagcugggcgugccguuccaccugggcacgaagcaggucugcaucgccugguccagcuccagcugccacgacgggaaggcguggcuccacgugugcgugaccggccacaacgagaacgccaccgccuccuucaucuacgggggccggcugguggacagcaucggguccuggagcaagaagauccugcgcacccaggaguccgagugcgucugcaucaacggcacgugcaccguggugaugaccgacggcagcgccuccgggcgggcggacaccaagauccucuucaucgaggagggcaagaucauccacaucagccagcugagcggguccgcccagcacgucgaggagugcagcugcuacccccgcuaccccggcgugcggugcgugugccgcgacaacuggaagggcuccaaccggcccaucgucgacaucaacgugaaggacuacagcaucguguccagcuacgucugcuccgggcuggugggcgacacgccgcgcaagaacgacagcuccagcuccagccacugccucaaccccaacaacgaggagggcgggcacggggugaagggcugggccuucgacgacggcaacgacgucuggauggggcggaccaucuccgagaaguuccgcagcggcuacgagaccuucaaggugaucgaggggugguccaagcccaacagcaagcugcagaucaaccggcaggucaucguggaccgcgacaaccgguccggcuacagcgggaucuucuccguggagggcaagagcugcaucaaccgcugcuucuacgucgagcugauccggggccgcaagcaggagaccgaggugugguggacgagcaacuccaucguggucuucugcgggaccagcggcaccuacgggaccggcuccuggcccgacggggccgacaucaaccucaugccgaucuga

SEQ ID NO: 78293 - RNA, 1410 nt, Artificial Sequence
  derived and/or modified CDS sequence (opt1) from neuraminidase__InfluenzaA__AAY47016
augaaccccaaccagaagaucaucaccaucggcagcgugucccugaccaucgccacgaucugcuuccucaugcagaucgccauccuggucaccaccgugacccugcacuucaagcaguacgagugcaacagcccgcccaacaaccaggugaugcucugcgagcccacgaucaucgagcgcaacaucaccgagaucgucuaccugaccaacaccacgaucgagaaggagaucugccccaagcuggcggaguaccggaacugguccaagccgcagugcaacaucaccggguucgcccccuucagcaaggacaacuccauccgccucagcgccggcggggacaucugggugacccgggagcccuacguguccugcgaccccgacaagugcuaccaguucgcccugggccaggggaccacgcugaacaacggccacagcaacgacaccguccacgaccgcaccccguaccggacccuccugaugaacgagcugggcgugcccuuccaccucgggacgcgccaggugugcaucgccugguccagcuccagcugccacgacggcaaggcguggcugcacgucugcgugaccggggacgacgagaacgccaccgccuccuucaucuacaacggccggcugguggacagcaucggguccuggagcaagaagauccuccgcacccaggaguccgagugcgucugcaucaacggcacgugcaccguggugaugaccgacggcagcgccuccgggaaggcggacaccaagauccuguucaucgaggagggcaagaucguccacaucagcacgcugagcgggaacgcccagcacguggaggagugcuccugcuacccccgguaccccggcgugcgcugcgucugccgggacaacuggaagggcagcaaccgcccgaucguggacaucaacgugaaggacuacuccaucgucagcuccuacgugugcagcgggcucgugggcgacacgccccggaagaacgacuccuucagcuccagccacugccuggaccccaacuccgaggagggcgggcacggggucaagggcugggccuucgacgacggcaacgacguguggauggggcgcaccaucagcgagaagcugcgguccggcuacgagaccuucaaggucaucgagggguggagcaagcccaacuccaagcuccagaucaaccgccaggugaucguggagcggggcaaccgcagcggguacuccggcaucuucagcgucgagggcaaguccugcaucaaccggugcuucuacguggagcugauccgcgggcggaaggaggagaccgaggugugguggaccagcaacagcaucgucguguucugcggcaccuccgggaccuacggcacggggagcuggccggacggcgccgacaucaaccugaugcccaucuga

SEQ ID NO: 78294 - RNA, 1410 nt, Artificial Sequence
  derived and/or modified CDS sequence (opt1) from neuraminidase__InfluenzaA__AAY47055
augaaccccaaccagaagaucaucaccaucggcagcgugucccugaccaucgccacgaucugcuuccucaugcagaucgccauccuggucaccaccgugacccugcacuucaagcaguacgagugcaacagcccgcccaacaaccaggugaugcucugcgagcccacgaucaucgagcgcaacaucaccgagaucgucuaccugaccaacaccacgaucgagaaggagaucugccccaagcuggcggaguaccggaacugguccaagccgcagugcaacaucaccggguucgcccccuucagcaaggacaacuccauccgccucagcgccggcggggacaucugggugacccgggagcccuacguguccugcgaccccgacaagugcuaccaguucgcccugggccaggggaccacgcugaacaacggccacagcaacgacaccguccacgaccgcaccccguaccggacccuccugaugaacgagcugggcgugcccuuccaccucgggacgaagcaggucugcaucgccugguccagcuccagcugccacgacggcaaggcguggcugcacgugugcgugaccggggacgacgagaacgccaccgccuccuucaucuacaacggccgccugguggacagcaucggguccuggagcaagaagauccuccggacccaggaguccgagugcgucugcaucaacggcacgugcaccguggugaugaccgacggcagcgccuccgggaaggcggacaccaagauccuguucaucgaggagggcaagaucguccacacgagccugcucagcggguccgcccagcacguggaggagugcagcugcuacccccgcuaccccggcgugcggugcgucugccgcgacaacuggaagggcuccaaccggccgaucguggacaucaacgugaaggacuacagcaucgucuccagcuacgugugcuccgggcuggugggcgacacgccccgcaagaacgacagcuccagcuccagccacugccuggaccccaacaacgaggagggcgggcacggggucaagggcugggccuucgacgacggcaacgacguguggauggggcggaccaucuccgagaagcuccgcagcggcuacgagaccuucaaggucaucgaggggugguccaagcccaacagcaagcugcagaucaaccgccaggugaucguggaccggggcaaccgguccggguacagcggcaucuucuccgucgagggcaagagcugcaucaaccgcugcuucuacguggagcugauccgggggcgcaagcaggagaccgaggugcucuggaccagcaacuccaucgucguguucugcggcaccagcgggaccuacggcacgggguccuggccggacggcgccgacaucaaccuguuccccaucuga

SEQ ID NO: 78295 - RNA, 1410 nt, Artificial Sequence
  derived and/or modified CDS sequence (opt1) from neuraminidase__InfluenzaA__AAY47078
augaaccccaaccagaagaucaucaccaucggcagcgugucccugaccaucgccacgaucugcuuccucaugcagaucgccauccuggucaccaccgugacccugcacuucaagcaguacgagugcaacagcccgcccaacaaccaggugaugcucugcgagcccacgaucaucgagcgcaacaucaccgagaucgucuaccugaccaacaccacgaucgagaaggagaucugccccaagcuggcggaguaccggaacugguccaagccgcagugcaacaucaccggguucgcccccuucagcaaggacaacuccauccgccucagcgccggcggggacaucugggugacccgggagcccuacguguccugcgaccacgacaagugcuaccaguucgcccugggccaggggaccacgcugaacaacggccacagcaacgacaccguccacgaccgcacccccuaccggacccuccugaugaacgagcugggcgugccguuccaccucgggacgaagcaggucugcaucgccugguccagcuccagcugccacgacggcaaggcguggcugcacgugugcgugaccggggacgacgagaacgccaccgccuccuucaucuacaacggccgccugguggacagcaucggguccuggagcaagaagauccuccggacccaggaguccgagugcgucugcaucaacggcacgugcaccguggugaugaccgacggcagcgccuccgggaaggcggacaccaagauccuguucaucgaggagggcaagaucguccacaucagcacgcugagcggguccgcccagcacguggaggagugcagcugcuacccccgcuaccccggcgugcggugcgucugccgcgacaacuggaagggcuccaaccggcccaucguggacaucaacgugaaggacuacagcaucgucuccagcuacgugugcuccgggcucgugggcgacaccccgcgcaagaacgacagcuucuccagcucccacugccuggaccccaacaacgaggagggcgggcacggggucaagggcugggccuucgacgacggcaacgacguguggauggggcggaccaucagcgagaagcugcgcuccggcuacgagaccuucaaggucaucgagggguggagcaagcccaacuccaagcuccagaucaaccgccaggugaucguggagcggggcaaccggagcggguacuccggcaucuucagcgucgagggcaaguccugcaucaaccgcugcuucuacguggagcugauccgggggcgcaaggaggagacggaggugugguggaccagcaacagcaucgucguguucugcggcaccuccgggaccuacggcacggggagcuggcccgacggcgccgacaucaaccugaugccgaucuga

SEQ ID NO: 78296 - RNA, 1410 nt, Artificial Sequence
  derived and/or modified CDS sequence (opt1) from neuraminidase__InfluenzaA__AAY47088
augaaccccaaccagaagaucaucaccaucggcagcgugucccugaccaucagcacgaucugcuucuucaugcagaucgccauccucaucaccaccgucacccugcacuucaagcaguacgaguucaacuccccgcccaacaaccaggugaugcugugcgagcccacgaucaucgagcgcaacaucaccgagaucguguaccucaccaacaccacgaucgagaaggagaucugccccaagcuggccgaguaccggaacuggagcaagccgcagugcaacaucaccggguucgcgcccuucuccaaggacaacagcauccgccuguccgccggcggggacaucugggucacccgggagcccuacgugagcugcgaccccgacaagugcuaccaguucgcccucggccaggggaccacgcugaacaacgugcacuccaacgacaccguccacgaccgcaccccguaccggacccugcucaugaacgagcugggcgugcccuuccaccugggcacgaagcaggucugcaucgccuggagcuccagcuccugccacgacgggaaggccuggcuccacgugugcgugaccggcgacgacgagaacgcgaccgccagcuucaucuacaacgggcgccugguggacuccaucgucagcugguccaagaagauccugcggacccaggagagcgagugcgugugcaucaacggcacgugcaccguggucaugaccgacggguccgccagcggcaaggccgacaccaagauccucuucaucgaggagggcaagaucgugcacacgagcacccuguccgggagcgcgcagcacguggaggagugcuccugcuacccccgcuaccccggcguccggugcgugugccgcgacaacuggaaggggagcaaccggccgaucguggacaucaacaucaaggaccacuccaucgucagcuccuacgugugcagcggccuggugggcgacacgccccgcaagaacgacuccagcuccagcucccacugccucgaccccaacaacgaggagggcgggcacggggucaagggcugggccuucgacgacgggaacgacguguggaugggccggaccaucagcgagaagcugcgcuccggcuacgagaccuucaaggucaucgagggguggagcaaccccaacuccaagcugcagaucaaccgccaggugaucguggaccggggcaaccggagcggguacuccggcaucuucagcgucgagggcaagagcugcaucaaccgcugcuucuacguggagcucauccgggggcgcaagcaggagaccgaggugcuguggaccuccaacagcaucgucguguucugcggcaccuccgggacguacggcaccgggagcuggccggacggcgccgacaucaaccugaugcccaucuga

SEQ ID NO: 78297 - RNA, 1410 nt, Artificial Sequence; identical to SEQ ID NO: 78161
  derived and/or modified CDS sequence (opt1) from neuraminidase__InfluenzaA__AAY58319

SEQ ID NO: 78298 - RNA, 1392 nt, Artificial Sequence
  derived and/or modified CDS sequence (opt1) from neuraminidase__InfluenzaA__AAY59038
augaaccccaaccagaagaucaucaccaucggcagcgugucccugaccaucgccacgaucugcuuccucaugcagaucgccauccuggucaccaccgugacccugcacuucaagcaguacgagugcaacagcccgcccaacaaccaggugaugcucugcgagcccacgaucaucgagcgcaacaucaccgagaucgucuaccugaccaacaccacgaucgagaaggagaucugccccaagcuggcggaguaccggaacugguccaagccgcagugcaacaucaccggguucgcccccuucagcaaggacaacuccauccgccucagcgccggcggggacaucugggugacccgggagcccuacguguccugcgaccccgacaagugcuaccaguucgcccugggccaggggaccacgaacgacaccguccacgaccgcaccccguaccggacccugcucaugaacgagcugggcgugcccuuccaccugggcacgaagcaggucugcaucgccuggagcuccagcuccugccacgacgggaaggcguggcuccacgugugcgugaccggcgacgacgagaacgccaccgccagcuucaucuacaacgggcgccugguggacuccaucggcagcugguccaagaagauccugcggacccaggagagcgagugcgucugcaucaacgggacgugcaccguggugaugaccgacggcuccgccagcggcaaggcggacaccaagauccucuucaucgaggaggggaagaucguccacacgagcccccuguccggcagcgcccagcacguggaggagugcuccugcuacccccgcuacccgggggugcggugcgucugccgcgacaacuggaagggcagcaaccggcccaucguggacaucaacgugaaggacuacuccaucgucagcuccuacgugugcagcggccuggugggggacacgccccgcaagaacgacuccagcuccagcucccacugccucgaccccaacaacgaggagggcgggcacggcgucaaggggugggccuucgacgacggcaacgacguguggaugggccggaccaucagcgagaagcugcgcuccggguacgagaccuucaaggucaucgagggcuggagcaagccgaacuccaagcugcagaucaaccgccaggugaucguggaccgggggaaccggagcggcuacuccgggaucuucagcgucgagggcaaguccugcaucaaccgcugcuucuacguggagcucauccggggccgcaagcaggagaccgaggugcuguggaccagcaacagcaucgucguguucugcgggaccuccggcaccuacgggacgggcagcuggcccgacggggccgacaucaaccugaugcccaucuga

SEQ ID NO: 78299 - RNA, 1410 nt, Artificial Sequence
  derived and/or modified CDS sequence (opt1) from neuraminidase__InfluenzaA__AAY64195
augaaccccaaccagaagaucaucaccaucggcagcgugucccugaccaucgccacgaucugcuuccucaugcagaucgccauccuggucaccaccgugacccugcacuucaagcaguacgagugcaacagccucccgaacaaccaggugaugcugugcgagcccacgaucaucgagcgcaacaucaccgagaucgucuaccugaccaacaccacgaucgagaaggagaucugccccaagcucgcggaguaccggaacugguccaagccccagugcaagaucaccggguucgccccguucagcaaggacaacuccauccgccugagcgccggcggggacaucugggugacccgggagcccuacguguccugcgaccccgacaagugcuaccaguucgcccugggccaggggaccacgcucaacaaccgccacagcaacgacaccguccacgaccggacccccuaccgcacccugcugaugaacgagcucggcgugccguuccaccugggcacgaagcaggucugcaucgccugguccagcuccagcugccacgacgggaaggcguggcugcacgugugcgugaccggccacgacgagaacgccaccgccuccuucaucuacgacgggcggcucguggacagcaucggcuccuggagcaagaagauccugcgcacccaggaguccgagugcgucugcaucaacgggacgugcaccguggugaugaccgacggcagcgccuccggccgggcggacaccaagauccuguucaucgaggaggggaagaucauccacaucagccagcucagcggcuccgcccagcacgucgaggagugcagcugcuacccccgcuaccccggggugcggugcgugugccgcgacaacuggaagggcuccaaccggcccaucgucgacaucaacgugaaggacuacagcaucguguccagcuacgucugcuccggccuggugggggacacgccgcgcaagaacgacagcuccagcuccagccacugccugaaccccaacaacgaggagggcgggcacggcgugaaggggugggccuucgacgacggcaacgacgucuggaugggccggaccaucuccgagaaguuccgcagcggguacgagaccuucaaggugaucgagggcugguccaagcccaacagcaagcuccagaucaaccggcaggucaucguggaccgcgacaaccgguccggguacagcggcaucuucuccguggagggcaagagcugcaucaaccgcugcuucuacgucgagcugauccgggggcgcaagcaggaggccgaggugugguggaccagcaacuccaucguggucuucugcggcacgagcgggaccuacggcaccggguccuggcccgacggcgccgacaucaaccugaugccgaucuga

SEQ ID NO: 78300 - RNA, 1410 nt, Artificial Sequence; identical to SEQ ID NO: 78159
  derived and/or modified CDS sequence (opt1) from neuraminidase__InfluenzaA__AAY64205

SEQ ID NO: 78301 - RNA, 1410 nt, Artificial Sequence; identical to SEQ ID NO: 78085
  derived and/or modified CDS sequence (opt1) from neuraminidase__InfluenzaA__AAY64215

SEQ ID NO: 78302 - RNA, 1410 nt, Artificial Sequence
  derived and/or modified CDS sequence (opt1) from neuraminidase__InfluenzaA__AAY64225
augaaccccaaccagaagaucaucaccaucggcagcgugucccugaccaucgccacgaucugcuuccucaugcagaucaccauccuggucaccaccgugacgcugcacuucaagcaguacgagugcaacccgccgcccaacaaccaggugaugcucugcgagcccaccaucaucgagcgcaacaucaccgagaucgucuaccugaccaacacgaccaucgagaaggagaucugccccaagcuggccgaguaccggaacuggagcaagccccagugcaacaucaccggguucgcgcccuucuccaaggacaacagcauccgccucuccgccggcggggacaucugggugacccgggagcccuacgugagcugcgacccggacaagugcuaccaguucgcccugggccaggggacgacccugaacaacggccacuccaacgacaccguccacgaccgcacccccuaccggacgcuccugaugaacgagcugggcgugcccuuccaccucgggacccgccaggugugcaucgccuggagcuccagcuccugccacgacggcaaggccuggcugcacgucugcgugaccggggacgacgagaacgcgaccgccagcuucaucuacaacggccggcugguggacuccaucgggagcugguccaagaagauccuccgcacgcaggagagcgagugcgucugcaucaacgggaccugcaccguggugaugaccgacggcuccgccagcgggaaggccgacacgaagauccuguucaucgaggagggcaagaucguccacaucuccacccugagcgggagcgcgcagcacguggaggagugcuccugcuacccccgguacccgggcgugcgcugcgucugccgggacaacuggaagggcagcaaccgccccaucguggacaucaacgugaaggacuacuccaucgucagcuccuacgugugcagcgggcucgugggcgacacgccccggaagaacgacuccuucagcuccagccacugccuggaccccaacaacgaggagggcggccacggggucaagggcugggccuucgacgacggcaacgacguguggauggggcgcaccaucuccgagaagcugcggagcggcuacgagaccuucaaggucaucgaggggugguccaagccgaacagcaagcuccagaucaaccgccaggugaucguggagcggggcaaccgcuccggguacagcggcaucuucuccgucgagggcaagagcugcaucaaccggugcuucuacguggagcugauccgcgggcggaaggaggagaacgaggugugguggaccuccaacagcaucgucguguucugcggcaccagcgggaccuacggcacgggguccuggcccgacggcgccgacaucaaccugaugcccaucuga

SEQ ID NO: 78303 - RNA, 1410 nt, Artificial Sequence
  derived and/or modified CDS sequence (opt1) from neuraminidase__InfluenzaA__AAY64245
augaaccccaaccagaagaucaucaccaucggcagcgugucccugaccaucgccacgaucugcuuccucaugcagaucgccauccuggucaccaccgugacccugcacuucaagcaguacgagugcaacagccucccgaacaaccaggugaugcugugcgagcccacgauccuggagcgcaacaucaccgagaucgucuaccucaccaacaccacgaucgagaaggagaucugccccaagcuggcggaguaccggaacugguccaagccccagugcaagaucaccggguucgccccguucagcaaggacaacuccauccgccugagcgccggcggggacaucugggugacccgggagcccuacguguccugcgaccccgacaagugcuaccaguucgcccucggccaggggaccacgcugaacaaccgccacagcaacgacaccguccacgaccggacccccuaccgcacccugcucaugaacgagcugggcgugccguuccaccugggcacgaagcaggucugcaucgccugguccagcuccagcugccacgacgggaaggcguggcuccacgugugcgugaccggccacgacgagaacgccaccgccuccuucaucuacgggggccggcugguggacagcaucggguccuggagcaagaagauccugcgcacccaggaguccgagugcgucugcaucaacggcacgugcaccguggugaugaccgacggcagcgccuccgggcgggcggacaccaagauccucuucaucgaggagggcaagaucauccacaucagccagcugagcggguccgcccagcacgucgaggagugcagcugcuacccccgcuaccccggcgugcggugcgugugccgcgacaacuggaagggcuccaaccggcccaucgucgacaucaacgugaaggacuacagcaucguguccagcuacgucugcuccgggcuggugggcgacacgccgcgcaagaacgacagcuccagcuccagccacugccucaaccccaacaacgaggagggcgggcacggggugaagggcugggccuucgacgacggcaacgacgucuggauggggcggaccaucuccgagaaguuccgcagcggcuacgagaccuucaaggugaucgaggggugguccaagcccaacagcaagcugcagaucaaccggcaggucaucguggaccgcgacaaccgguccggcuacagcgggaucuucuccguggagggcaagagcugcaucaaccgcugcuucuacgucgagcugauccggggccgcaagcaggagaccgaggugugguggacgagcaacuccaucguggucuucugcgggaccagcggcaccuacgggaccggcuccuggcccgacggggccgacaucaaccucaugccgaucuga

SEQ ID NO: 78304 - RNA, 1410 nt, Artificial Sequence; identical to SEQ ID NO: 78085
  derived and/or modified CDS sequence (opt1) from neuraminidase__InfluenzaA__AAY64255

SEQ ID NO: 78305 - RNA, 1410 nt, Artificial Sequence; identical to SEQ ID NO: 78303
  derived and/or modified CDS sequence (opt1) from neuraminidase__InfluenzaA__AAY64265

SEQ ID NO: 78306 - RNA, 1410 nt, Artificial Sequence; identical to SEQ ID NO: 78303
  derived and/or modified CDS sequence (opt1) from neuraminidase__InfluenzaA__AAY64285

SEQ ID NO: 78307 - RNA, 1410 nt, Artificial Sequence
  derived and/or modified CDS sequence (opt1) from neuraminidase__InfluenzaA__AAY64295
augaaccccaaccagaagaucaucaccaucggcagcgugucccugaccaucgccacgaucugcuuccucaugcagaucgccauccuggucaccaccgugacccugcacuucaagcaguacgagugcaacagcccgcccaacaaccaggugaugcucugcgagcccacgaucaucgagcgcaacaucaccgagaucgucuaccugaccaacaccacgaucgagaaggagaucugccccaagcuguccgaguaccggaacuggagcaagccgcagugcaacaucaccggguucgcgcccuucuccaaggacaacagcauccgccucuccgccggcggggacaucugggugacccgggagcccuacgugagcugcgaccccgacaagugcuaccaguucgcccugggccaggggaccacgcugaacaacggccacuccaacgacaccguccacgaccgcaccccguaccggacccuccugaugaacgagcugggcgugcccuuccaccucgggacgaagcaggucugcaucgccuggagcuccagcuccugccacgacggcaaggccuggcugcacgugugcgugaccggggacgacgagaacgcgaccgccagcuucaucuacaacggccgccugguggacuccaucgggagcugguccaagaagauccuccggacccaggagagcgagugcgucugcaucaacggcacgugcaccguggugaugaccgacggcuccgccagcgggaaggccgacaccaagauccuguucaucgaggagggcaagaucguccacaucagcacgcuguccgggagcgcgcagcacguggaggagugcuccugcuacccccgcuaccccggcgugcggugcgucugccgcgacaacuggaagggcagcaaccggccgaucguggacaucaacgugaaggaccacuccaucgucagcuccuacgugugcagcgggcucgugggcgacacgccccgcaagaacgacuccuucagcuccagccacugccuggaccccaacaacgaggagggcgggcacggggucaagggcugggccuucgacgacggcaacgacguguggauggggcggaccaucuccgagaagcugcgcagcggcuacgagaccuucaaggucaucgaggggugguccaagcccaacagcaagcuccagaucaaccgccaggugaucguggagcggggcaaccgguccggguacagcggcaucuucuccgucgagggcaagagcugcaucaaccgcugcuucuacguggagcugauccgggggcgcaaggaggagaccgaggugugguggaccagcaacuccaucgucguguucugcggcaccagcgggaccuacggcacgggguccuggccggacggcgccgacaucaaccugaugcccaucuga

SEQ ID NO: 78308 - RNA, 1410 nt, Artificial Sequence
  derived and/or modified CDS sequence (opt1) from neuraminidase__InfluenzaA__AAY64305
augaaccccaaccagaagaucaucaccaucggcagcgugucccugaccaucgccacgaucugcuuccucaugcagaucgccauccuggucaccaccgugacccugcacuucaagcaguacgagugcaacagcccgcccaacaaccaggugaugcucugcgagcccacgaucaucgagcgcaacaucaccgagaucgucuaccugaccaacaccacgaucgagaaggagaucugccccaagcuggcggaguaccggaacugguccaagccgcagugcaagaucaccggguucgcccccuucagcaaggacaacuccauccgccucagcgccggcggggacaucugggugacccgggagcccuacguguccugcgaccccgacaagugcuaccaguucgcccugggccaggggaccacgcugaacaaccgccacagcaacgacaccguccacgaccggaccccguaccgcacccuccugaugaacgagcugggcgugcccuuccaccucggcacgaagcaggucugcaucgccugguccagcuccagcugccacgacgggaaggcguggcugcacgugugcgugaccggccacgacgagaacgccaccgccuccuucaucuacgacgggcggcugguggacagcaucggcuccuggagcaagaagauccuccgcacccaggaguccgagugcgucugcaucaacgggacgugcaccguggugaugaccgacggcagcgccuccggccgggcggacaccaagauccuguucaucgaggaggggaagaucguccacacgagcaagcugagcggcuccgcccagcacguggaggagugcagcugcuacccccgcuaccccggggugcggugcgucugccgcgacaacuggaagggcuccaaccggccgaucguggacaucaacgugaaggacuacagcaucgucuccagcuacgugugcuccggccucgugggggacacgccccgcaagaacgacagcuccagcuccagccacugccuggaccccaacaacgaggagggcgggcacggcgucaaggggugggccuucgacgacggcaacgacguguggaugggccggaccaucuccgagaagucccgcagcggguacgagaccuucaaggucaucgagggcuggagcaagcccaacuccaagcugcagaucaaccgccaggugaucguggagcgggggaacaugagcggcuacuccgggaucuucagcgucgagggcaagagcugcaucaaccggugcuucuacguggagcucauccgcggccggaagcaggagaccgaggugugguggaccuccaacagcaucgucguguucugcgggaccuccggcaccuacgggacgggcagcuggccggacggggccgacaucaaccugaugcccaucuga

SEQ ID NO: 78309 - RNA, 1410 nt, Artificial Sequence; identical to SEQ ID NO: 78159
  derived and/or modified CDS sequence (opt1) from neuraminidase__InfluenzaA__AAY64335

SEQ ID NO: 78310 - RNA, 1410 nt, Artificial Sequence; identical to SEQ ID NO: 78174
  derived and/or modified CDS sequence (opt1) from neuraminidase__InfluenzaA__AAY64365

SEQ ID NO: 78311 - RNA, 1410 nt, Artificial Sequence
  derived and/or modified CDS sequence (opt1) from neuraminidase__InfluenzaA__AAY64385
augaaccccaaccagaagaucaucaccaucggcagcgugucccugaccaucgccacgaucugcuuccucaugcagaucgccauccuggucaccaccgugacccugcacuucaagcaguacgagugcaacagccucccgaacaaccaggugaugcugugcgagcccacgauccuggagcgcaacaucaccgagaucgucuaccucaccaacaccacgaucgagaaggagaucugccccaagcuggcggaguaccggaacugguccaagccccagugcaagaucaccggguucgccccguucagcaaggacaacuccauccgccugagcgccggcggggacaucugggugacccgggagcccuacguguccugcgaccccgacaagugcuaccaguucgcccucggccaggggaccacgcugaacaaccgccacagcaacgacaccguccacgaccggacccccuaccgcacccugcucaugaacgagcugggcgugccguuccaccugggcacgaagcaggucugcaucgccugguccagcuccagcugccacgacgggaaggcguggcuccacgugugcgugaccggccacgacgagaacgccaccgccuccuucaucuacgggggccggcugguggacagcaucggguccuggagcaagaagauccugcgcacccaggaguccgagugcgucugcaucaacggcacgugcaccguggugaugaccgacggcagcgccuccgggcgggcggacaccaagauccucuucaucgaggagggcaagaucauccacaucagccagcugagcggguccgcccagcacgucgaggagugcagcugcuacccccgcuaccccggcgugcggugcgugugccgcgacaacuggaagggcuccaaccggcccaucgucgacaucaacgugaaggacuacagcaucguguccagcuacgucugcuccgggcuggugggcgacacgccgcgcaagaacgacagcuccagcuccagccacugccucaaccccaacaacgaggagggcgggcacggggugaagggcugggccuucgacgacggcaacgacgucuggauggggcggaccaucuccgagaagucccgcagcggcuacgagaccuucaaggugaucgagggguggagcaagcccaacuccaagcugcagaucaaccggcaggucaucguggaccgcgacaaccggagcggcuacuccgggaucuucagcguggagggcaagagcugcaucaaccgcugcuucuacgucgagcugauccggggccgcaagcaggagaccgaggugugguggacguccaacagcaucguggucuucugcgggaccuccggcaccuacgggaccggcagcuggcccgacggggccgacaucaaccucaugccgaucuga

SEQ ID NO: 78312 - RNA, 1410 nt, Artificial Sequence
  derived and/or modified CDS sequence (opt1) from neuraminidase__InfluenzaA__AAY64395
augaaccccaaccagaagaucaucaccaucggcagcgugucccugaucaucagcaccaucugcuucuucaugcagaucgccauccucaucacgaccgucacccugcacuucaagcaguacgaguucaacuccccgcccaacaaccaggugaugcugugcgagcccaccaucaucgagcgcaacaucacggagaucguguaccucaccaacaccaccaucgagaaggagaucugccccaagcuggccgaguaccggaacuggagcaagccgcagugcgacaucacgggguucgcgcccuucuccaaggacaacagcauccgccuguccgccggcggggacaucugggucacccgggagcccuacgugagcugcgaccccgacaagugcuaccaguucgcccucggccaggggaccacccugaacaacgugcacuccaacgacacgguccacgaccgcaccccguaccggacccugcucaugaacgagcugggcgugcccuuccaccugggcaccaagcaggucugcaucgccuggagcuccagcuccugccacgacgggaaggccuggcuccacgugugcgugacgggcgacgacgagaacgcgaccgccagcuucaucuacaacgggcgccugguggacuccaucgucagcugguccaagaagauccugcggacccaggagagcgagugcgugugcaucaacgggaccugcacgguggucaugaccgacggguccgccagcggcaaggccgacaccaagauccucuucaucaaggagggcaagaucgugcacaccagcacgcuguccgggagcgcgcagcacguggaggagugcuccugcuacccccgcuaccccggcguccggugcgugugccgcgacaacuggaaggggagcaaccggccgaucguggacaucaacaucaaggacuacuccaucgucagcuccuacgugugcagcggccuggugggcgacacgccccgcaagaacgacuccagcuccagcucccacugccucgaccccaacaacgaggagggcggccacggggucaagggcugggccuucgacgacgggaacgacguguggaugggccggaccaucagcgagaagcugcgcuccggcuacgagaccuucaaggucaucgagggguggagcaacuccaacagcaagcugcagaucaaccgccaggugaucguggaccggggcaaccgguccggguacagcggcaucuucagcgucgaggggaaguccugcaucaaccgcugcuucuacguggagcucauccggggccgcaaggaggagaccgaggugcuguggaccagcaacuccaucgucguguucugcggcaccagcgggaccuacggcacgggguccuggcccgacggcgccgacaucaaccugaugccgaucuga

SEQ ID NO: 78313 - RNA, 1410 nt, Artificial Sequence; identical to SEQ ID NO: 78308
  derived and/or modified CDS sequence (opt1) from neuraminidase__InfluenzaA__AAY64405

SEQ ID NO: 78314 - RNA, 1410 nt, Artificial Sequence; identical to SEQ ID NO: 78303
  derived and/or modified CDS sequence (opt1) from neuraminidase__InfluenzaA__AAY98040

SEQ ID NO: 78315 - RNA, 1410 nt, Artificial Sequence; identical to SEQ ID NO: 78303
  derived and/or modified CDS sequence (opt1) from neuraminidase__InfluenzaA__AAY98050

SEQ ID NO: 78316 - RNA, 1410 nt, Artificial Sequence; identical to SEQ ID NO: 78195
  derived and/or modified CDS sequence (opt1) from neuraminidase__InfluenzaA__AAY98060

SEQ ID NO: 78317 - RNA, 1410 nt, Artificial Sequence
  derived and/or modified CDS sequence (opt1) from neuraminidase__InfluenzaA__AAY98070
augaaccccaaccagaagaucaucaccaucggcagcgugucccugaccaucgccacgaucugcuuccucaugcagaucgccauccuggucaccaccgugacccugcacuucaagcaguacgagugcaacagcccgcccaacaaccaggugaugcucugcgagcccacgaucaucgagcgcaacaucaccgagaucgucuaccugaccaacaccacgaucgagaaggagaucugccccaagcuggcggaguaccggaacugguccaagccgcagugcaacaucaccggguucgcccccuucagcaaggacaacuccauccgccucagcgccggcggggacaucugggugacccgggagcccuacguguccugcgaccccgacaagugcuaccaguucgcccugggccaggggaccacgcugaacaacggccacagcaacgacaccguccacgaccgcaccccguaccggacccuccugaugaacgagcugggcgugcccuuccaccucgggacgcgccaggugugcaucgccugguccagcuccagcugccacgacggcaaggcguggcugcacgucugcgugaccggggacgacgagaacgccaccgccuccuucaucuacaacggccggcugguggacagcaucggguccuggagcaagaagauccuccgcacccaggaguccgagugcgucugcaucaacggcacgugcaccguggugaugaccgacggcagcgccuccgggaaggcggacaccaagauccuguucaucgaggagggcaagaucguccacaucagcacgcugagcggguccgcccagcacguggaggagugcagcugcuacccccgguaccccggcgugcgcugcgucugccgggacaacuggaagggcuccaaccgcccgaucguggacaucaacgugaaggaccacagcaucgucuccagcuacgugugcuccgggcucgugggcgacacgccccggaagaacgacagcuucuccagcucccacugccuggaccccaacaacgaggagggcgggcacggggucaagggcugggccuucgacgacggcaacgacguguggauggggcgcaccaucagcgagaagcugcgguccggcuacgagaucuucaaggucaucgagggguggagcaagcccaacuccaagcuccagaucaaccgccaggugaucguggagcggggcaaccgcagcggguacuccggcaucuucagcgucgagggcaaguccugcaucaaccggugcuucuacguggagcugauccgcgggcggaaggaggagaccgaggugugguggaccagcaacagcaucgucguguucugcggcaccuccgggaccuacggcaccgggagcuggccggacggcgccgacaucaaccugaugcccaucuga

SEQ ID NO: 78318 - RNA, 1410 nt, Artificial Sequence; identical to SEQ ID NO: 78203
  derived and/or modified CDS sequence (opt1) from neuraminidase__InfluenzaA__AAY98080

SEQ ID NO: 78319 - RNA, 1410 nt, Artificial Sequence
  derived and/or modified CDS sequence (opt1) from neuraminidase__InfluenzaA__AAY98090
augaaccccaaccagaagaucaucaccaucggcagcgugucccugaccaucgccacgaucugcuuccucaugcagaucgccauccuggucaccaccgugacccugcacuucaagcaguacgagugcaacagccucccgaacaaccaggugaugcugugcgagcccacgaucaucgagcgcaacaucaccgagaucgucuaccugaccaacaccacgaucgagaaggagaucugccccaagcucgcggaguaccggaacugguccaagccccagugcaagaucaccggguucgccccguucagcaaggacaacuccauccgccugagcgccggcggggacaucugggugacccgggagcccuacguguccugcgaccccgacaagugcuaccaguucgcccugggccaggggaccacgcucaacaaccgccacagcaacgacaccguccacgaccggacccccuaccgcacccugcugaugaacgagcucggcgugccguuccaccugggcacgaagcaggucugcaucgccugguccagcuccagcugccacgacgggaaggcguggcugcacgugugcgugaccggccacgacgagaacgccaccgccuccuucaucuacgacgggcggcucguggacagcaucggcuccuggagcaagaagauccugcgcacccaggaguccgagugcgucugcaucaacgggacgugcaccguggugaugaccgacggcagcgccuccggcaaggcggacaccaagauccuguucaucgaggaggggaagaucauccacaucagccagcucagcggcuccgcccagcacgucgaggagugcagcugcuacccccgguaccccggggugcgcugcgugugccgggacaacuggaagggcuccaaccgccccaucgucgacaucaacgugaaggacuacagcaucguguccagcuacgucugcuccggccuggugggggacacgccgcggaagaacgacagcuccagcuccagccacugccugaaccccaacaacgaggagggcgggcacggcgugaaggggugggccuucgacgacggcaacgacgucuggaugggccgcaccaucuccgagaaguuccggagcggguacgagaccuucaaggugaucgagggcugguccaagcccaacagcaagcuccagaucaaccgccaggucaucguggaccgggacaaccgcuccggguacagcggcaucuucuccguggagggcaagagcugcaucaaccggugcuucuacgucgagcugauccgcgggcggaagcaggagaccgaggugugguggacgagcaacuccaucguggucuucugcggcaccagcgggaccuacggcaccggguccuggcccgacggcgccgacaucaaccugaugccgaucuga

SEQ ID NO: 78320 - RNA, 1410 nt, Artificial Sequence; identical to SEQ ID NO: 78303
  derived and/or modified CDS sequence (opt1) from neuraminidase__InfluenzaA__AAY98100

SEQ ID NO: 78321 - RNA, 1410 nt, Artificial Sequence; identical to SEQ ID NO: 78303
  derived and/or modified CDS sequence (opt1) from neuraminidase__InfluenzaA__AAY98110

SEQ ID NO: 78322 - RNA, 1410 nt, Artificial Sequence; identical to SEQ ID NO: 78303
  derived and/or modified CDS sequence (opt1) from neuraminidase__InfluenzaA__AAY98120

SEQ ID NO: 78323 - RNA, 1410 nt, Artificial Sequence; identical to SEQ ID NO: 78303
  derived and/or modified CDS sequence (opt1) from neuraminidase__InfluenzaA__AAY98130

SEQ ID NO: 78324 - RNA, 1410 nt, Artificial Sequence; identical to SEQ ID NO: 78303
  derived and/or modified CDS sequence (opt1) from neuraminidase__InfluenzaA__AAY98150

SEQ ID NO: 78325 - RNA, 1410 nt, Artificial Sequence
  derived and/or modified CDS sequence (opt1) from neuraminidase__InfluenzaA__AAY98160
augaaccccaaccagaagaucaucaccaucggcagcgugucccugaccaucgccacgaucugcuuccucaugcagaucgccauccuggucaccaccgugacccugcacuucaagcaguacgagugcaacagccucccgaacaaccaggugaugcugugcgagcccacgauccuggagcgcaacaucaccgagaucgucuaccucaccaacaccacgaucgagaaggagaucugccccaagcuggcggaguaccggaacugguccaagccccagugcaagaucaccggguucgccccguucagcaaggacaacuccauccgccugagcgccggcggggacaucugggugacccgggagcccuacguguccugcgaccccgacaagugcuaccaguucgcccucggccaggggaccacgcugaacaaccgccacagcaacgacaccguccacgaccggacccccuaccgcacccugcucaugaacgagcugggcgugccguuccaccugggcacgaagcaggucugcaucgccugguccagcuccagcugccacgacgggaaggcguggcuccacgugugcgugaccggccacgacgagaacgccaccgccuccuucaucuacgggggccggcugguggacagcaucggguccuggagcaagaagauccugcgcacccaggaguccgagugcgucugcaucaacggcacgugcaccguggugaugaccgacggcagcgccuccgggcgggcggacaccaagauccucuucaucgaggagggcaagaucauccacaucagccagcugagcgggaacgcccagcacgucgaggagugcuccugcuacccccgcuaccccggcgugcggugcgugugccgcgacaacuggaagggcagcaaccggcccaucgucgacaucaacgugaaggacuacuccaucgugagcuccuacgucugcagcgggcuggugggcgacacgccgcgcaagaacgacuccagcuccagcuccaacugccucaaccccaacaacgaggagggcgggcacggggugaagggcugggccuucgacgacggcaacgacgucuggauggggcggaccaucagcgagaaguuccgcuccggcuacgagaccuucaaggugaucgagggguggagcaagcccaacuccaagcugcagaucaaccggcaggucaucguggaccgcgacaaccggagcggcuacuccgggaucuucagcguggagggcaaguccugcaucaaccgcugcuucuacgucgagcugauccggggccgcaagcaggagaccgaggugugguggacgagcaacagcaucguggucuucugcgggaccuccggcaccuacgggaccggcagcuggcccgacggggccgacaucaaccucaugccgaucuga

SEQ ID NO: 78326 - RNA, 1410 nt, Artificial Sequence; identical to SEQ ID NO: 78303
  derived and/or modified CDS sequence (opt1) from neuraminidase__InfluenzaA__AAY98170

SEQ ID NO: 78327 - RNA, 1410 nt, Artificial Sequence; identical to SEQ ID NO: 78303
  derived and/or modified CDS sequence (opt1) from neuraminidase__InfluenzaA__AAY98180

SEQ ID NO: 78328 - RNA, 1410 nt, Artificial Sequence; identical to SEQ ID NO: 78303
  derived and/or modified CDS sequence (opt1) from neuraminidase__InfluenzaA__AAY98200

SEQ ID NO: 78329 - RNA, 1410 nt, Artificial Sequence; identical to SEQ ID NO: 78303
  derived and/or modified CDS sequence (opt1) from neuraminidase__InfluenzaA__AAY98210

SEQ ID NO: 78330 - RNA, 1410 nt, Artificial Sequence; identical to SEQ ID NO: 78308
  derived and/or modified CDS sequence (opt1) from neuraminidase__InfluenzaA__AAY98220

SEQ ID NO: 78331 - RNA, 1410 nt, Artificial Sequence; identical to SEQ ID NO: 78303
  derived and/or modified CDS sequence (opt1) from neuraminidase__InfluenzaA__AAY98230

SEQ ID NO: 78332 - RNA, 1410 nt, Artificial Sequence
  derived and/or modified CDS sequence (opt1) from neuraminidase__InfluenzaA__AAY98250
augaaccccaaccagaagaucaucaccaucggcagcgugucccugaccaucgccacgaucugcuuccucaugcagaucgccauccuggucaccaccgugacccugcacuucaagcaguacgagugcaacagccucccgaacaaccaggugaugcugugcgagcccacgauccuggagcgcaacaucaccgagaucgucuaccucaccaacaccacgaucgagaaggagaucugccccaagcuggcggaguaccggaacugguccaagccccagugcaagaucaccggguucgccccguucagcaaggacaacuccauccgccugagcgccggcggggacaucugggugacccgggagcccuacguguccugcgaccccgacaagugcuaccaguucgcccucggccaggggaccacgcugaacaaccgccacagcaacgacaccguccacgaccggacccccuaccgcacccugcucaugaacgagcugggcgugccguuccaccugggcacgaagcaggucugcaucgccugguccagcuccagcugccacgacgggaaggcguggcuccacgugugcgugaccggccacgacgagaacgccaccgccuccuucaucuacgggggccggcugguggacagcaucggguccuggagcaagaagauccugcgcacccaggaguccgagugcgucugcaucaacggcacgugcaccguggugaugaccgacggcagcgccuccgggcgggcggacaccaagauccucuucaucgaggagggcaagaucauccacaucagccagcugagcggguccgcccagcacgucgaggagugcagcugcuacccccgcuaccccggcgugcggugcgugugccgcgacaacuggaagggcuccaaccggcccaucgucgacaucaacgugaaggacuacagcaucguguccagcuacgucugcuccgggcuggugggcgacacgccgcgcaagaacgacagcuccagcuccagccacugccucaaccccaacaacgaggagggcgggcacggggugaagggcugggccuucgacgacggcaacgacgucuggauggggcggaccaucuccgagaaguuccgcagcggcuacgagaccuucaaggugaucgaggggugguccaagcccaacagcaagcugcagaucaaccggcaggucaucguggaccgcgacaaccgguccggcuacagcgggaucuucuccguggaggacaagagcugcaucaaccgcugcuucuacgucgagcugauccggggccgcaagcaggagaccgaggugugguggacgagcaacuccaucguggucuucugcggcaccagcgggaccuacggcaccggguccuggcccgacggcgccgacaucaaccucaugccgaucuga

SEQ ID NO: 78333 - RNA, 1410 nt, Artificial Sequence; identical to SEQ ID NO: 78303
  derived and/or modified CDS sequence (opt1) from neuraminidase__InfluenzaA__AAY98322

SEQ ID NO: 78334 - RNA, 1410 nt, Artificial Sequence; identical to SEQ ID NO: 78308
  derived and/or modified CDS sequence (opt1) from neuraminidase__InfluenzaA__AAY98332

SEQ ID NO: 78335 - RNA, 1410 nt, Artificial Sequence; identical to SEQ ID NO: 78303
  derived and/or modified CDS sequence (opt1) from neuraminidase__InfluenzaA__AAY98342

SEQ ID NO: 78336 - RNA, 1410 nt, Artificial Sequence; identical to SEQ ID NO: 78303
  derived and/or modified CDS sequence (opt1) from neuraminidase__InfluenzaA__AAY98359

SEQ ID NO: 78337 - RNA, 1410 nt, Artificial Sequence; identical to SEQ ID NO: 78308
  derived and/or modified CDS sequence (opt1) from neuraminidase__InfluenzaA__AAY98369

SEQ ID NO: 78338 - RNA, 1410 nt, Artificial Sequence
  derived and/or modified CDS sequence (opt1) from neuraminidase__InfluenzaA__AAY98379
augaaccccaaccagaagaucaucaccaucggcagcgugucccugaccaucgccacgaucugcuuccucaugcagaucgccauccuggucaccaccgugacccugcacuucaagcaguacgagugcaacagccucccgaacaaccaggugaugcugugcgagcccacgaucaucgagcgcaacaucaccgagaucgucuaccugaccaacaccacgaucgagaaggagaucugccccaagcucgcggaguaccggaacugguccaagccccagugcaagaucaccggguucgccccguucagcaaggacaacuccauccgccugagcgccggcggggacaucugggugacccgggagcccuacguguccugcgaccccgacaagugcuaccaguucgcccugggccaggggaccacgcucaacaaccgccacagcaacgacaccguccacgaccggacccccuaccgcacccugcugaugaacgagcucggcgugccguuccaccugggcacgaagcaggucugcaucgccugguccagcuccagcugccacgacgggaaggcguggcugcacgugugcgugaccggccacgacgagaacgccaccgccuccuucaucuacgggggccggcucguggacagcaucggguccuggagcaagaagauccugcgcacccaggaguccgagugcgucugcaucaacggcacgugcaccguggugaugaccgacggcagcgccuccgggcgggcggacaccaagauccuguucaucgaggagggcaagaucauccacaucagccagcucagcggguccgcccagcacgucgaggagugcagcugcuacccccgcuaccccggcgugcggugcgugugccgcgacaacuggaagggcuccaaccggcccaucgucgacaucaacgugaaggacuacagcaucguguccagcuacgucugcuccgggcuggugggcgacacgccgcgcaagaacgacagcuccagcuccagccacugccugaaccccaacaacgaggagggcgggcacggggugaagggcugggccuucgacgacggcaacgacgucuggauggggcggaccaucuccgagaaguuccgcagcggcuacgagaccuucaaggugaucgaggggugguccaagcccaacagcaagcuccagaucaaccggcaggucaucguggaccgcaacaaccgguccggcuacagcgggaucuucuccguggagggcaagagcugcaucaaccgcugcuucuacgucgagcugauccggggccgcaagcaggagaccgaggugugguggacgagcaacuccaucguggucuucugcgggaccagcggcaccuacgggaccggcuccuggcccgacggggccgacaucaaccugaugccgaucuga

SEQ ID NO: 78339 - RNA, 1410 nt, Artificial Sequence
  derived and/or modified CDS sequence (opt1) from neuraminidase__InfluenzaA__AAY98389
augaaccccaaccagaagaucaucaccaucggcagcgugucccugaccaucgccacgaucugcuuccucaugcagaucgccauccuggucaccaccgugacccugcacuucaagcaguacgagugcaacagccucccgaacaaccaggugaugcugugcgagcccacgaucaucgagcgcaacaucaccgagaucgucuaccugaccaacaccacgaucgagaaggagaucugccccaagcucgcggaguaccggaacugguccaagccccagugcaagaucaccggguucgccccguucagcaaggacaacuccauccgccugagcgccggcggggacaucugggugacccgggagcccuacguguccugcgaccccgacaagugcuaccaguucgcccugggccaggggaccacgcucaacaaccgccacagcaacgacaccguccacgaccggacccccuaccgcacccugcugaugaacgagcucggcgugccguuccaccugggcacgaagcaggucugcaucgccugguccagcuccagcugccacgacgggaaggcguggcugcacgugugcgugaccggccacgacgagaacgccaccgccuccuucaucuacgggggccggcucguggacagcaucggguccuggagcaagaagauccugcgcacccaggaguccgagugcgucugcaucaacggcacgugcaccguggugaugaccgacggcagcgccuccgggcgggcggacaccaagauccuguucaucgaggagggcaagaucauccacaucagccagcucagcggguccgcccagcacgucgaggagugcagcugcuacccccgcuaccccggcgugcggugcgugugccgcgacaacuggaagggcuccaaccggcccaucgucgacaucaacgugaaggacuacagcaucguguccagcuacgucugcuccgggcuggugggcgacacgccgcgcaagaacgacagcuccagcuccagccacugccugaaccccaacaacgaggagggcgggcacggggugaagggcugggccuucgacgacggcaacgacgucuggauggggcggaccaucuccgagaaguuccgcagcggcuacgagaccuucaaggugaucgaggggugguccaagcccaacagcaagcuccagaucaaccggcaggucaucguggaccgcgacaaccgguccggcuacagcgggaucuucuccguggagggcaagagcugcaucaaccgcugcuucuacgucgagcugauccggggccgcaagcaggagaccgaggugugguggacgagcaacuccaucguggucuucugcgggaccagcggcaccuacgggaccggcuccuggcccgacggggccgacaucaaccugaugccgaucuga

SEQ ID NO: 78340 - RNA, 1410 nt, Artificial Sequence; identical to SEQ ID NO: 78303
  derived and/or modified CDS sequence (opt1) from neuraminidase__InfluenzaA__AAY98399

SEQ ID NO: 78341 - RNA, 1410 nt, Artificial Sequence; identical to SEQ ID NO: 78303
  derived and/or modified CDS sequence (opt1) from neuraminidase__InfluenzaA__AAY98409

SEQ ID NO: 78342 - RNA, 1410 nt, Artificial Sequence; identical to SEQ ID NO: 78303
  derived and/or modified CDS sequence (opt1) from neuraminidase__InfluenzaA__AAY98773

SEQ ID NO: 78343 - RNA, 1410 nt, Artificial Sequence
  derived and/or modified CDS sequence (opt1) from neuraminidase__InfluenzaA__AAZ32955
augaaccccaaccagaagaucaucaccaucggcagcgugucccugaccaucagcacgaucugcuucuucaugcagaucgccauccucaucaccaccgucacccugcacuucaagcaguacgaguucaacuccccgcccaacaaccaggugaugcugugcgagcccacgaucaucgagcgcaacaucaccgagaucguguaccucaccaacaccacgaucgagaaggagaucugccccaagcuggccgaguaccggaacuggagcaagccgcagugcaacaucaccggguucgcgcccuucuccaaggacaacagcauccgccuguccgccggcggggacaucugggucacccgggagcccuacgugagcugcgaccccgacaagugcuaccaguucgcccucggccaggggaccacgcugaacaacgugcacuccaacgacaucguccacgagcgcaccccguaccggacccugcucaugaacgagcugggcgugcccuuccaccugggcaccaagcaggucugcaucgccuggagcuccagcuccugccacgacgggaaggccuggcuccacgugugcgugacgggcgacgacgagaacgcgaccgccagcuucaucuacaacgggcgccugguggacuccaucgucagcugguccaagaagauccugcggacccaggagagcgagugcgugugcaucaacgggaccugcacgguggucaugaccgacggguccgccagcggcaaggccgacaccaagauccucuucaucgaggagggcaagaucgugcacaccagcacgcuguccgggagcgcgcagcacguggaggagugcuccugcuacccccgcuaccccggcguccggugcgugugccgcgacaacuggaaggggagcaaccggccgaucguggacaucaacaucaaggacuacuccaucgucagcuccuacgugugcagcggccuggugggcgacacgccccgcaagaacgacuccagcuccagcucccacugccucgaccccaacaacgaggagggcggccacggggucaagggcugggccuucgacgacgggaacgacguguggaugggccggaccaucagcgagaagcugcgcuccggcuacgagaccuucaaggucaucgagggguggagcaaccccaacuccaagcugcagaucaaccgccaggugaucguggaccggggcaaccggagcggguacuccggcaucuucagcgucgagggcaagagcugcaucaaccgcugcuucuacguggagcucauccgggggcgcaagcaggagaccgaggugcuguggaccuccaacagcaucgucguguucugcggcaccuccgggaccuacggcacggggagcuggccggacggcgccgacaucaaccugaugcccaucuga

SEQ ID NO: 78344 - RNA, 1344 nt, Artificial Sequence
  derived and/or modified CDS sequence (opt1) from neuraminidase__InfluenzaA__AAZ32957
augaaccccaaccagaagaucaucaccaucggcagcgugucccugaccaucagcacgaucugcuucuucaugcagaucgccauccucaucaccaccgucacccugaucgagcgcaacaucacggagaucguguaccugaccaacaccaccaucgagaaggagaucugcccgaagcucgccgaguaccggaacugguccaagccccagugcaacaucacgggguucgcgcccuucagcaaggacaacuccauccgccugagcgccggcggggacaucugggugacccgggagcccuacgucuccugcgacccggacaagugcuaccaguucgcccugggccaggggaccacccucaacaacgugcacagcaacgacacggugcacgaccgcacccccuaccggacccugcugaugaacgagcucggcguccccuuccaccugggcaccaagcaggucugcaucgccugguccagcuccagcugccacgacgggaaggccuggcugcacgugugcgugacgggcgacgacgagaacgcgaccgccuccuucaucuacaacgggcgccucguggacagcaucguguccuggagcaagaagauccugcggacccaggaguccgagugcgucugcaucaacgggaccugcacgguggugaugaccgacgggaacgccagcggcaaggccgacaccaagauccuguucaucgaggagggcaagaucguccacaccuccacgcucagcgggagcgcgcagcacguggaggagugcuccugcuacccccgcuacccgggcgugcggugcgucugccgcgacaacuggaaggggagcaaccggcccaucguggacaucaacaucaaggacuacuccaucgugagcuccuacgucugcagcggccuggugggcgacacgccccgcaagaacgacuccagcuccagcucccacugccuggaccccaacaacgaggagggcggccacggggugaagggcugggccuucgacgacgggaacgacgucuggaugggccggaccaucagcgagaagcuccgcuccggcuacgagaccuucaaggugaucgagggguggagcaacccgaacuccaagcugcagaucaaccggcaggucaucguggaccgcggcaaccggagcggguacuccggcaucuucagcguggaggggaaguccugcaucaaccgcugcuucuacgucgagcugauccggggccgcaagcaggagaccgaggugcucuggaccagcaacagcaucguggucuucugcggcaccuccgggaccuacggcacggggagcuggcccgacggcgccgacaucaaccugaugcccaucuga

SEQ ID NO: 78345 - RNA, 1344 nt, Artificial Sequence; identical to SEQ ID NO: 78344
  derived and/or modified CDS sequence (opt1) from neuraminidase__InfluenzaA__AAZ32958

SEQ ID NO: 78346 - RNA, 1344 nt, Artificial Sequence; identical to SEQ ID NO: 78344
  derived and/or modified CDS sequence (opt1) from neuraminidase__InfluenzaA__AAZ32959

SEQ ID NO: 78347 - RNA, 1410 nt, Artificial Sequence; identical to SEQ ID NO: 78308
  derived and/or modified CDS sequence (opt1) from neuraminidase__InfluenzaA__AAZ38465

SEQ ID NO: 78348 - RNA, 1410 nt, Artificial Sequence; identical to SEQ ID NO: 78308
  derived and/or modified CDS sequence (opt1) from neuraminidase__InfluenzaA__AAZ38476

SEQ ID NO: 78349 - RNA, 1410 nt, Artificial Sequence
  derived and/or modified CDS sequence (opt1) from neuraminidase__InfluenzaA__AAZ38487
augaaccccaaccagaagaucaucaccaucggcagcgugucccugaccaucgccacgaucugcuuccucaugcagaucgccauccuggucaccaccgugacccugcacuucaagcaguacgagugcaacagccucccgaacaaccaggugaugcugugcgagcccacgauccuggagcgcaacaucaccgagaucgucuaccucaccaacaccacgaucgagaaggagaucugccccaagcuggcggaguaccggaacugguccaagccccagugcaagaucaccggguucgccccguucagcaaggacaacuccauccgccugagcgccggcggggacaucugggugacccgggagcccuacguguccugcgaccccgacaagugcuaccaguucgcccucggccaggggaccacgcugaacaaccgccacagcaacgacaccguccacgaccggacccccuaccgcacccugcucaugaacgagcugggcgugccguuccaccugggcacgaagcaggucugcaucgccugguccagcuccagcugccacgacgggaaggcguggcuccacgugugcgugaccggccacgacgagaacgccaccgccuccuucaucuacgggggccggcugguggacagcaucggguccuggagcaagaagauccugcgcacccaggaguccgagugcgucugcaucaacggcacgugcaccguggugaugaccgacggcagcgccuccgggcgggcggacaccaagauccucuucaucgaggagggcaagaucauccacaucagccagcugagcggguccgcccagcacgucgaggagugcagcugcuacccccgcuaccccggcgugcggugcgugugccgcgacaacuggaagggcuccaaccggcccaucgucgacaucaacgugaaggacuacagcaucguguccagcuacgucugcuccgggcuggugggcgacacgccgcgcaagaacgacagcuccagcuccagcaacugccucaaccccaacaacgaggagggcgggcacggggugaagggcugggccuucgacgacggcaacgacgucuggauggggcggaccaucuccgagaaguuccgcagcggcuacgagaccuucaaggugaucgaggggugguccaagcccaacagcaagcugcagaucaaccggcaggucaucguggaccgcgacaaccgguccggcuacagcgggaucuucuccguggagggcaagagcugcaucaaccgcugcuucuacgucgagcugauccggggccgcaagcaggagaccgaggugugguggacgagcaacuccaucguggucuucugcgggaccagcggcaccuacgggaccggcuccuggcccgacggggccgacaucaaccucaugccgaucuga

SEQ ID NO: 78350 - RNA, 1410 nt, Artificial Sequence
  derived and/or modified CDS sequence (opt1) from neuraminidase__InfluenzaA__AAZ38509
augaaccccaaccagaagaucaucaccaucggcagcgugucccugaccaucagcacgaucugcuucuucaugcagaucgccauccucaucaccaccgucacccugcacuucaagcaguacgaguucaacuccccgcccaacaaccaggugaugcugugcgagcccacgaucaucgagcgcaacaucaccgagaucguguaccucaccaacaccacgaucgagaaggagaucugccccaagcuggccgaguaccggaacuggagcaagccgcagugcgacaucaccggguucgcgcccuucuccaaggacaacagcauccgccuguccgccggcggggacaucugggucacccgggagcccuacgugagcugcgaccccgacaagugcuaccaguucgcccucggccaggggaccacgcugaacaacgugcacuccaacgacaccguccacgaccgcaccccguaccggacccugcucaugaacgagcugggcgugcccuuccaccugggcacgaagcaggucugcaucgccuggagcuccagcuccugccacgacgggaaggccuggcuccacgugugcgugaccggcgacgacaagaacgcgaccgccagcuucaucuacaacgggcgccugguggacuccaucgucagcugguccaaggagauccugcggacccaggagagcgagugcgugugcaucaacggcacgugcaccguggucaugaccgacggguccgccagcggcaaggccgacaccaagauccucuucaucgaggagggcaagaucgugcacacgagcacccuguccgggagcgcgcagcacguggaggagugcuccugcuacccccgcuaccccggcguccggugcgugugccgcgacaacuggaaggggagcaaccggccgaucguggacaucaacaucaaggacuacuccaucgucagcuccuacgugugcagcggccuggugggcgacacgccccgcaagaacgacuccagcuccagcucccacugccucgaccccaacaacgaggagggcgggcacggggucaagggcugggccuucgacgacgggaacgacguguggaugggccggaccaucagcgagaagcugcgcuccggcuacgagaccuucaaggucaucgagggguggagcaacuccaacagcaagcugcagaucaaccgccaggugaucguggaccggggcaaccgguccggguacagcggcaucuucagcgucgaggggaaguccugcaucaaccgcugcuucuacguggagcucauccggggccgcaaggaggagaccgaggugcuguggaccagcaacuccaucgucguguucugcggcaccagcgggacguacggcaccggguccuggcccgacggcgccgacaucaaccugaugccgaucuga

SEQ ID NO: 78351 - RNA, 1410 nt, Artificial Sequence
  derived and/or modified CDS sequence (opt1) from neuraminidase__InfluenzaA__AAZ38586
augaaccccaaccagaagaucaucaccaucggcagcgugucccugaccaucagcacgaucugcuucuucaugcagaucgccauccucaucaccaccgucacccugcacuucaagcaguacgaguucaacuccccgcccaacaaccaggugaugcugugcgagcccacgaucaucgagcgcaacaucaccgagaucguguaccucaccaacaccacgaucgagaaggagaucugccccaagcuggccgaguaccggaacuggagcaagccgcagugcgacaucaccggguucgcgcccuucuccaaggacaacagcauccgccuguccgccggcggggacaucugggucacccgggagcccuacgugagcugcgaccccgacaagugcuaccaguucgcccucggccaggggaccacgcugaacaacgugcacuccaacgacaccguccacgaccgcaccccguaccggacccugcucaugaacgagcugggcgugcccuuccaccugggcacgaagcaggucugcaucgccuggagcuccagcuccugccacgacgggaaggccuggcuccacgugugcgugaccggcgacgacaagaacgcgaccgccagcuucaucuacaacgggcgccugguggacuccaucgucagcugguccaaggagauccugcggacccaggagagcgagugcgugugcaucaacggcacgugcaccguggucaugaccgacggguccgccagcggcaaggccgacaccaagauccucuucaucgaggagggcaagaucgugcacacgagcacccuguccgggagcgcgcagcacguggaggagugcuccugcuacccccgcuaccccggcguccggugcgugugccgcgacaacuggaaggggagcaaccggccgaucguggacaucaacaucaaggacuacuccaucgucagcuccuacgugugcagcggccuggugggcgacacgccccgcaagaacgacuccagcuccagcucccacugccucgaccccaacaacgaggagggcgggcacggggucaagggcugggccuucgacgacgggaacgacguguggaugggccggaccaucagcgagaagcugcgcuccggcuacgagaccuucaaggucaucgagggguggagcaaccccaacuccaagcugcagaucaaccgccaggugaucguggaccggggcaaccggagcggguacuccggcaucuucagcgucgagggcaagagcugcaucaaccgcugcuucuacguggagcucauccgggggcgcaaggaggagaccgaggugcuguggaccuccaacagcaucgucguguucugcggcaccuccgggacguacggcaccgggagcuggccggacggcgccgacaucaaccugaugcccaucuga

SEQ ID NO: 78352 - RNA, 1410 nt, Artificial Sequence; identical to SEQ ID NO: 78351
  derived and/or modified CDS sequence (opt1) from neuraminidase__InfluenzaA__AAZ38597

SEQ ID NO: 78353 - RNA, 1410 nt, Artificial Sequence
  derived and/or modified CDS sequence (opt1) from neuraminidase__InfluenzaA__AAZ38608
augaaccccaaccagaagaucaucaccaucggcagcgugucccugaccaucagcacgaucugcuucuucaugcagaucgccauccucaucaccaccgucacccugcacuucaagcaguacgaguucaacuccccgcccaacaaccaggugaugcugugcgagcccacgaucaucgagcgcaacaucaccgagaucguguaccucaccaacaccacgaucgagaaggagaugugccccaagcuggccgaguaccggaacuggagcaagccgcagugcgacaucaccggguucgcgcccuucuccaaggacaacagcauccgccuguccgccggcggggacaucugggucacccgggagcccuacgugagcugcgaccccgacaagugcuaccaguucgcccucggccaggggaccacgcugaacaacgugcacuccaacgacaccguccacgaccgcaccccguaccggacccugcucaugaacgagcugggcgugcccuuccaccugggcacgaagcaggucugcaucgccuggagcuccagcuccugccacgacgggaaggccuggcuccacgugugcgugaccggcgacgacaagaacgcgaccgccagcuucaucuacaacgggcgccugguggacuccaucgucagcugguccaagaagauccugcggacccaggagagcgagugcgugugcaucaacggcacgugcaccguggucaugaccgacggguccgccagcggcaaggccgacaccaagauccucuucaucgaggagggcaagaucauccacacgagcacccuguccgggagcgcgcagcacguggaggagugcuccugcuacccccgcuaccccggcgugcggugcgucugccgcgacaacuggaaggggagcaaccggccgaucguggacaucaacaucaaggacuacuccaucgugagcuccuacgucugcagcggccuggugggcgacacgccccgcaagaacgacuccagcuccagcucccacugccucgaccccaacaacgaggagggcgggcacggggugaagggcugggccuucgacgacgggaacgacgucuggaugggccggaccaucagcgagaagcugcgcuccggcuacgagaccuucaaggugaucgagggguggagcaagcccaacuccaagcugcagaucaaccggcaggucaucguggaccgcggcaaccggagcggguacuccggcaucuucagcguggagggcaagagcugcaucaaccgcugcuucuacgucgagcucauccgggggcgcaaggaggagaccgaggugcuguggaccuccaacagcaucguggucuucugcggcaccuccgggacguacggcaccgggagcuggccggacggcgccgacaccaaccugaugcccaucuga

SEQ ID NO: 78354 - RNA, 1410 nt, Artificial Sequence
  derived and/or modified CDS sequence (opt1) from neuraminidase__InfluenzaA__AAZ38619
augaaccccaaccagaagaucaucaccaucggcagcgugucccugaccaucagcacgaucugcuucuucaugcagaucgccauccucaucaccaccgucacccugcacuucaagcaguacgaguucaacuccccgcccaacaaccaggugaugcugugcgagcccacgaucaucgagcgcaacaucaccgagaucguguaccucaccaacaccacgaucgagaaggagaugugccccaagcuggccgaguaccggaacuggagcaagccgcagugcgacaucaccggguucgcgcccuucuccaaggacaacagcauccgccuguccgccggcggggacaucugggucacccgggagcccuacgugagcugcgaccccgacaagugcuaccaguucgcccucggccaggggaccacgcugaacaacgugcacuccaacgacaccguccacgaccgcaccccguaccggacccugcucaugaacgagcugggcgugcccuuccaccugggcacgaagcaggucugcaucgccuggagcuccagcuccugccacgacgggaaggccuggcuccacgugugcgugaccggcgacgacaagaacgcgaccgccagcuucaucuacaacgggcgccugguggacuccaucgucagcugguccaagaagauccugcggacccaggagagcgagugcgugugcaucaacggcacgugcaccguggucaugaccgacggguccgccagcggcaaggccgacaccaagauccucuucaucgaggagggcaagaucauccacacgagcacccuguccgggagcgcgcagcacguggaggagugcuccugcuacccccgcuaccccggcgugcggugcgucugccgcgacaacuggaaggggagcaaccggccgaucguggacaucaacaucaaggacuacuccaucgugagcuccuacgucugcagcggccuggugggcgacacgccccgcaagaacgacuccagcuccagcucccacugccucgaccccaacaacgaggagggcgggcacggggugaagggcugggccuucgacgacgggaacgacgucuggaugggccggaccaucagcgagaagcugcgcuccggcuacgagaccuucaaggugaucgagggguggagcaagcccaacuccaagcugcagaucaaccggcaggucaucguggaccgcggcaaccggagcggguacuccggcaucuucagcguggagggcaagagcugcaucaaccgcugcuucuacgucgagcucauccgggggcgcaaggaggagaccgaggugcuguggaccuccaacagcaucguggucuucugcggcaccuccgggacguacggcaccgggagcuggccggacggcgccgacaucaaccugaugcccaucuga

SEQ ID NO: 78355 - RNA, 1410 nt, Artificial Sequence; identical to SEQ ID NO: 78351
  derived and/or modified CDS sequence (opt1) from neuraminidase__InfluenzaA__AAZ38641

SEQ ID NO: 78356 - RNA, 1410 nt, Artificial Sequence; identical to SEQ ID NO: 78351
  derived and/or modified CDS sequence (opt1) from neuraminidase__InfluenzaA__AAZ38653

SEQ ID NO: 78357 - RNA, 1410 nt, Artificial Sequence; identical to SEQ ID NO: 78142
  derived and/or modified CDS sequence (opt1) from neuraminidase__InfluenzaA__AAZ43386

SEQ ID NO: 78358 - RNA, 1410 nt, Artificial Sequence
  derived and/or modified CDS sequence (opt1) from neuraminidase__InfluenzaA__AAZ43397
augaaccccaaccagaagaucaucaccaucggcagcgugucccugaccaucgccacgaucugcuuccucaugcagaucgccauccuggucaccaccgugacccugcacuucaagcagcacgagugcaacagcccgcccaacaaccaggugaugcucugcgagcccacgaucaucgagcgcaacaucaccgagaucgucuaccugaccaacaccacgaucgagcgggagaucugccccaagcuggcggaguaccgcaacugguccaagccgcagugcaacaucaccggguucgcccccuucagcaaggacaacuccauccggcucagcgccggcggggacaucugggugacccgcgagcccuacguguccugcgaccccgacaagugcuaccaguucgcccugggccaggggaccacgcugaacaacggccacagcaacgacaccguccacgaccggaccccguaccgcacccuccugaugaacgagcugggcgugcccuuccaccucgggacgcgccaggugugcaucgccugguccagcuccagcugccacgacggcaaggcguggcugcacgucugcgugaccggggacgacaagaacgccaccgccuccuucaucuacaacggccggcugguggacagcaucggguccuggagcaagaagauccuccggacccaggaguccgagugcgucugcaucaacggcacgugcaccguggugaugaccgacggcagcgccuccgggaaggcggacaccaagauccuguucaucgaggagggcaagaucguccacaucagcacgcugagcggguccgcccagcacguggaggagugcagcugcuacccccgcuaccccggcgugcggugcgucugccgcgacaacuggaagggcuccaaccggccgaucguggacaucaacgugaaggacuacagcaucgucuccagcuacgugugcuccgggcucgugggcgacacgccccgcaagaacgacagcuccagcuccagccacugccuggaccccaacaacgaggagggcgggcacggggucaagggcugggccuucgacgacggcaacgacguguggauggggcggaccaucuccgagaagcugcgcagcggcuacgagaccuucaaggucaucgaggggugguccaagcccaacagcaagcuccagaccaaccgccaggugaucguggagcggggcaaccgguccggguacagcggcaucuucuccgucgagggcaagagcugcaucaaccgcugcuucuacguggagcugauccgggggcgcaaggaggagaccgaggugugguggaccagcaacuccaucgucguguucugcggcaccagcgggacguacggcaccggguccuggccggacggcgccgacaucaaccugaugcccaucuga

SEQ ID NO: 78359 - RNA, 1410 nt, Artificial Sequence
  derived and/or modified CDS sequence (opt1) from neuraminidase__InfluenzaA__AAZ43408
augaaccccaaccagaagaucaucaccaucggcagcgugucccugaccaucgccacgaucugcuuccucaugcagaucgccauccuggucaccaccgugacccugcacuucaagcaguacgagugcaacagcccgcccaacaaccaggugaugcucugcgagcccacgaugaucgagcgcaacaucaccgagaucgucuaccugaccaacaccacgaucgagaaggagaucugccccaagcuggcggaguaccggaacugguccaagccgcagugcaacaucaccggguucgcccccuucagcaaggacaacuccauccgccucagcgccggcggggacaucugggugacccgggagcccuacguguccugcgaccccgacaagugcuaccaguucgcccugggccaggggaccacgcugaacaacggccacagcaacgacaccguccacgaccgcaccccguaccggacccuccugaugaacgagcugggcgugcccuuccaccucgggacgaagcaggucugcaucgccugguccagcuccagcugccacgacggcaaggcguggcugcacgugugcgugaccggggacgacgagaacgccaccgccuccuucaucuacaacggccgccugguggacagcaucggguccuggagcaagaagauccuccggacccaggaguccgagugcgucugcaucaacggcacgugcaccguggugaugaccgacggcagcgccuccgggaaggcggacaccaagauccuguucaucgaggagggcaagaucguccacacgagcagccuguccgggagcgcccagcacguggaggagugcuccugcuacccccgcuaccccggcgugcggugcgucugccgcgacaacuggaagggcagcaaccggccgaucguggacaucaacgugaaggacuacuccaucgucagcuccuacgugugcagcgggcucgugggcgacacgccccgcaagaacgacuccagcuccagcucccacugccuggaccccaacaacgaggagggcgggcacggggucaagggcugggccuucgacgacggcaacgacguguggauggggcggaccaucagcgagaagcugcgcuccggcuacgagaccuucaaggucaucgagggguggagcaagcccaacuccaagcuccagaucaaccgccaggugaucguggaccggggcaaccggagcggguacuccggcaucuucagcgucgagagcaaguccugcaucaaccgcugcuucuacguggagcugauccggggccgcaagcaggagaccgaggugcuguggaccagcaacuccaucgucguguucugcgggaccagcggcaccuacgggacgggcuccuggccggacggggccgacaucaaccucaugcccaucuga

SEQ ID NO: 78360 - RNA, 1410 nt, Artificial Sequence
  derived and/or modified CDS sequence (opt1) from neuraminidase__InfluenzaA__AAZ74355
augaaccccaaccagaagaucaucaccaucggcagcgugucccugaccaucgccacgaucugcuuccucaugcagaucgccauccuggucaccaccgugacccugcacuucaagcagcacgagugcaacagcccgcccaacaaccaggcgaugcccugcgagcccgccaucaucgagcgcaacacgaccgagaccguguaccucaccaacacgaccaucgagaaggagaucugcccgaagcuggccgaguaccggaacugguccaagccccagugcaacaucaccggguucgcccccuucagcaaggacaacuccauccgccugagcgccggcggggacaucugggucacccgggagcccuacguguccugcgacccggacaagugcuaccaguucgcgcucggccaggggacgacccugaacaacggccacagcaacgacaccgugcacgaccgcacccccuaccggacgcugcucaugaacgagcugggcguccccuuccaccuggggacccgccaggugugcaucgccugguccagcuccagcugccacgacggcaaggccuggcuccacgugugcgucaccggggacgacgagaacgccaccgcguccuucaucuacaacggccggcugguggacagcaucggguccuggagcaagaagauccugcgcacgcaggaguccgagugcgugugcaucaacgggaccugcaccgucgugaugaccgacggcagcgccuccgggaaggccgacacgaagauccucuucaucgaggagggcaagaucgugcacaucagcacccugagcggguccgcccagcacgucgaggagugcagcugcuacccccgguacccgggcgugcgcugcgugugccgggacaacuggaagggcuccaaccgccccaucgucgacaucaacgugaaggacuacagcaucguguccagcuacgucugcuccgggcuggugggcgacacgccccggaagaacgacagcuucuccagcucccacugccucgaccccaacaacgaggagggcggccacggggugaagggcugggccuucgacgacggcaacgacgucuggauggggcgcaccaucagcgagaagcugcgguccggcuacgagaccuucaaggugaucgagggguggagcaagccgaacuccaagcugcagaucaaccgccaggucaucguggagcggggcaaccgcagcggguacuccggcaucuucagcguggagggcaaguccugcaucaaccggugcuucuacgucgagcucauccgcgggcggaaggaggagaccgaggugugguggaccagcaacagcaucguggucuucugcggcaccuccgggacguacggcaccgggagcuggcccgacggcgcggacaucaaccugaugcccaucuga

SEQ ID NO: 78361 - RNA, 1410 nt, Artificial Sequence
  derived and/or modified CDS sequence (opt1) from neuraminidase__InfluenzaA__AAZ74366
augaaccccaaccagaagaucaucaccaucggcagcgugucccugaccaucgccacgaucugcuuccucaugcagaucgccauccuggucaccaccgugacccugcacuucaagcaguacgagugcaacagccucccgaacaaccaggugaugcugugcgagcccacgaucaucgagcgcaacaucaccgagaucgucuaccugaccaacaccacgaucgagaaggagaucugccccaagcucgcggaguaccggaacugguccaagccccagugcaagaucaccggguucgccccguucagcaaggacaacuccauccgccugagcgccggcggggacaucugggugacccgggagcccuacguguccugcgaccccgacaagugcuaccaguucgcccugggccaggggaccacgcucaacaaccgccacagcaacgacaccguccacgaccggacccccuaccgcacccugcugaugaacgagcucggcgugccguuccaccugggcacgaagcaggucugcaucgccugguccagcuccagcugccacgacgggaaggcguggcugcacgugugcgugaccggccacgacgagaacgccaccgccuccuucaucuacgacgggcggcucguggacagcaucggcuccuggagcaagaagauccugcgcacccaggaguccgagugcgucugcaucaacgggacgugcaccguggugaugaccgacggcagcgccuccggcaaggcggacaccaagauccuguucaucgaggaggggaagaucauccacaucagccagcucagcggcuccgcccagcacgucgaggagugcagcugcuacccccgguaccccggggugcgcugcgugugccgggacaacuggaagggcuccaaccgccccaucgucgacaucaacgugaaggacuacagcaucguguccagcuacgucugcuccggccuggugggggacacgccgcggaagaacgacagcuccagcuccagccacugccugaaccccaacaacgaggagggcgggcacggcgugaaggggugggccuucgacgacggcaacgacgucuggaugggccgcaccaucuccgagaaguuccggagcggguacgagaccuucaaggugaucgagggcugguccaagcccaacagcaagcuccagaucaaccgccaggucaucguggacaaggacaaccgguccggguacagcggcaucuucuccguggagggcaagagcugcaucaaccgcugcuucuacgucgagcugauccgggggcgcaagcaggagaccgaggugugguggacgagcaacuccaucguggucuucugcggcaccagcgggaccuacggcaccggguccuggcccgacggcgccgacaucaaccugaugccgaucuga

SEQ ID NO: 78362 - RNA, 1410 nt, Artificial Sequence
  derived and/or modified CDS sequence (opt1) from neuraminidase__InfluenzaA__AAZ74377
augaaccccaaccagaagaucaucaccaucggcagcgugucccugaccaucgccacgaucugcuuccucacccagaucgccauccuggucaccaccgugacgcugcacuucaagcaguacgagugcaacagcccgcccaacaaccaggugaugcucugcgagcccaccaucaucgagcgcaacaucaccgagaucgucuaccugaccaacacgaccaucgagaaggagaucugccccaagcuggcggaguaccggaacugguccaagccgcagugcaacaucaccggguucgcccccuucagcaaggacaacuccauccgccucagcgccggcggggacaucugggugacccgggagcccuacguguccugcgaccccgacaagugcuaccaguucgcccugggccaggggacgacccugaacaacggccacagcaacgacaccguccacgaccgcaccccguaccggacgcuccugaugaacgagcugggcgugcccuuccaccucgggaccaagcaggucugcaucgccugguccagcuccagcugccacgacggcaaggcguggcugcacgugugcgugaccggggacgacaagaacgccaccgccuccuucaucuacaacggccgccugguggacagcaucggguccuggagcaagaagauccuccggacgcaggaguccgagugcgucugcaucaacgggaccugcaccguggugaugaccgacggcagcgccuccgggaaggcggacacgaagauccuguucaucgaggagggcaagaucguccacaccagccugcucagcggguccgcccagcacguggaggagugcagcugcuacccccgcuaccccggcgugcggugcgucugccgcgacaacuggaagggcuccaaccggccgaucguggacaucaacgugaaggacuacagcaucgucuccagcuacgugugcuccgggcuggugggcgacacgccccgcaagaacgacagcuccagcuccagccacugccuggaccccaacaacgaggagggcggccacggggucaagggcugggccuucgacgacggcaacgacguguggauggggcggaccauccgcgagaagcuccgguccggcuacgagaccuucaaggucaucgagggguggagcaagcccaacuccaagcugcagaucaaccgccaggugaucguggaccgggacaaccgcagcggcuacuccgggaucuucagcgucgagggcaaguccugcaucaaccggugcuucuacguggagcugauccgcggccggaaccaggagaccgaggugcucuggaccagcaacagcaucgucguguucugcgggaccuccggcacguacgggaccggcagcuggccggacggggccgacaucaaccugaugcccaucuga

SEQ ID NO: 78363 - RNA, 1410 nt, Artificial Sequence
  derived and/or modified CDS sequence (opt1) from neuraminidase__InfluenzaA__AAZ74400
augaaccccaaccagaagaucaucaccaucggcagcgugucccugaccaucgccacgaucugcuuccucaugcagaucgccauccuggucaccaccgugacccugcacuucaagcaguacgagugcaacagcccgcccaacaaccaggugaugcucugcgagcccacgaucaucgagcgcaacaucaccgagaucgucuaccugaccaacaccacgaucgagaaggagaucugccccaagcuggcggaguaccggaacugguccaagccgcagugcaagaucaccggguucgcccccuucagcaaggacaacuccauccgccucagcgccggcggggacaucugggugacccgggagcccuacguguccugcgaccccgacaagugcuaccaguucgcccugggccaggggaccacgcugaacaaccgccacagcaacgacaccguccacgaccggaccccguaccgcacccuccugaugaacgagcugggcgugcccuuccaccucggcacgaagcaggucugcaucgccugguccagcuccagcugccacgacgggaaggcguggcugcacgugugcgugaccggccacgacgagaacgccaccgccucccugaucuacgacgggcggcucguggacagcaucggcuccuggagcaagaagauccugcgcacccaggaguccgagugcgucugcaucaacgggacgugcaccguggugaugaccgacggcagcgccuccggccgggcggacaccaagauccuguucaucgaggaggggaagaucguccacacgagcaagcucagcggcuccgcccagcacguggaggagugcagcugcuacccccgcuaccccggggugcggugcgucugccgcgacaacuggaagggcuccaaccggccgaucguggacaucaacgugaaggacuacagcaucgucuccagcuacgugugcuccggccuggugggggacacgccccgcaagaacgacagcuccagcuccagccacugccuggaccccaacaacgaggagggcgggcacggcgucaaggggugggccuucgacgacggcaacgacguguggaugggccggaccaucuccgagaagucccgcagcggguacgagaccuucaaggucaucgagggcuggagcaagcccaacuccaagcuccagaucaaccgccaggugaucguggagcgggggaacaugagcggcuacuccgggaucuucagcgucgagggcaagagcugcaucaaccggugcuucuacguggagcugauccgcggccggaagcaggagaccgaggugugguggaccuccaacagcaucgucguguucugcgggaccuccggcaccuacgggacgggcagcuggccggacggggccgacaucaaccugaugcccaucuga

SEQ ID NO: 78364 - RNA, 1410 nt, Artificial Sequence; identical to SEQ ID NO: 78303
  derived and/or modified CDS sequence (opt1) from neuraminidase__InfluenzaA__AAZ74411

SEQ ID NO: 78365 - RNA, 1410 nt, Artificial Sequence
  derived and/or modified CDS sequence (opt1) from neuraminidase__InfluenzaA__AAZ74422
augaaccccaaccagaagaucaucaccaucggcagcgugucccugaccaucagcacgaucugcuucuucaugcagaucgccauccucaucaccaccgucacccugcacuucaagcaguacgaguucaacuccccgcccaacaaccaggugaugcugugcgagcccacgaucaucgagcgcaacaucaccgagaucguguaccucaccaacaccacgaucgagaaggagaucugccccaagccggccgaguaccggaacuggagcaagccccagugcgacaucaccggguucgcgcccuucuccaaggacaacagcauccgccuguccgccggcggggacaucugggucacccgggagcccuacgugagcugcgacccggacaagugcuaccaguucgcccugggccaggggaccacgcucaacaacgugcacuccaacgacaccguccacgaccgcacccccuaccggacccugcugaugaacgagcucggcgugcccuuccaccugggcacgaagcaggucugcaucgccuggagcuccagcuccugccacgacgggaaggccuggcugcacgugugcgugaccggcgacgacaagaacgcgaccgccagcuucaucuacaacgggcgccucguggacuccaucgucagcugguccaaggagauccugcggacccaggagagcgagugcgugugcaucaacggcacgugcgccguggucaugaccgacggguccgccagcggcaaggcggacaccaagauccuguucaucgaggagggcaagaucgugcacaccagcaagcucuccgggagcgcccagcacguggaggagugcuccugcuacccccgcuacccgggcauccggugcgucugccgcgacaacuggaaggggagcaaccggcccaucguggacaucaacaucaaggacuacuccaucgugagcuccuacgucugcagcggccuggugggcgacacgccccgcaagaacgacuccagcuccagcucccacugccuggaccccaacaacgaggagggcgggcacggggugaagggcugggccuucgacgacgggaacgacgucuggaugggccggaccaucagcgagaagcuccgcuccggcuacgagaccuucaaggugaucgagggguggagcaacccgaacuccaagcugcagaucaaccggcaggucaucguggaccgcggcaaccggagcggguacuccggcaucuucagcguggagggcaagagcugcaucaaccgcugcuucuacgucgagcugauccgggggcgcaaggaggagaccgaggugcucuggacguccaacagcaucguggucuucugcggcaccuccgggaccuacggcaccgggagcuggcccgacggcgccgacaucaaccugaugcccaucuga

SEQ ID NO: 78366 - RNA, 1410 nt, Artificial Sequence; identical to SEQ ID NO: 78351
  derived and/or modified CDS sequence (opt1) from neuraminidase__InfluenzaA__AAZ74444

SEQ ID NO: 78367 - RNA, 1410 nt, Artificial Sequence
  derived and/or modified CDS sequence (opt1) from neuraminidase__InfluenzaA__AAZ74455
augaaccccaaccagaagaucaucaccaucggcagcgugucccugaccaucagcacgaucugcuucuucaugcagaucgccauccucaucaccaccgucacccugcacuucaagcaguacgaguucaacuccccgcccaacaaccaggugaugcugugcgagcccacgaucaucgagcgcaacaucaccgagaucguguaccucaccaacaccacgaucgagaaggagaucugccccaagcuggccgaguaccggaacuggagcaagccgcagugcgacaucaccggguucgcgcccuucuccaaggacaacagcauccgccuguccgccggcggggacaucugggucacccgggagcccuacgugagcugcgaccccgacaagugcuaccaguucgcccucggccaggggaccacgcugaacaacgugcacuccaacgacaccguccacgaccgcaccccguaccggacccugcucaugaacgagcugggcgugcccuuccaccugggcacgaagcaggucugcaucgccuggagcuccagcuccugccacgacgggaaggccuggcuccacgugugcgugaccggcgacgacaagaacgcgaccgccagcuucaucuacaacgggcgccugguggacuccaucgucagcugguccaaggacauccugcggacccaggagagcgagugcgugugcaucaacggcacgugcaccguggucaugaccgacggguccgccagcggcaaggccgacaccaagauccucuucaucgaggagggcaagaucgugcacacgagcacccuguccgggagcgcgcagcacguggaggagugcuccugcuacccccgcuaccccggcguccggugcgugugccgcgacaacuggaaggggagcaaccggccgaucguggacaucaacaucaaggacuacuccaucgucagcuccuacgugugcagcggccuggugggcgacacgccccgcaagaacgacuccagcuccagcucccacugccucgaccccaacaacgaggagggcgggcacggggucaagggcugggccuucgacgacgggaacgacguguggaugggccggaccaucagcgagaagcugcgccugggcuacgagaccuucaaggucaucgaggggugguccaaccccaacagcaagcuccagaucaaccgccaggugaucguggagcggggcaaccgguccggguacagcggcaucuucuccgucgagggcaagagcugcaucaaccgcugcuucuacguggagcugauccgggggcgcaaggaggagaccgaggugcuguggaccagcaacuccaucgucguguucugcggcaccagcgggacguacggcaccggguccuggccggacggcgccgacaucaaccucaugcccaucuga

SEQ ID NO: 78368 - RNA, 1410 nt, Artificial Sequence; identical to SEQ ID NO: 78351
  derived and/or modified CDS sequence (opt1) from neuraminidase__InfluenzaA__AAZ74477

SEQ ID NO: 78369 - RNA, 1410 nt, Artificial Sequence; identical to SEQ ID NO: 78367
  derived and/or modified CDS sequence (opt1) from neuraminidase__InfluenzaA__AAZ74488

SEQ ID NO: 78370 - RNA, 1410 nt, Artificial Sequence
  derived and/or modified CDS sequence (opt1) from neuraminidase__InfluenzaA__AAZ74499
augaaccccaaccagaagaucaucaccaucggcagcgugucccugaccaucagcacgaucugcuucuucaugcagaucgccauccucaucaccaccgucacccugcacuucaagcaguacgaguucaacuccccgcccaacaaccaggugaugcugugcgagcccacgaucaucgagcgcaacaucaccgagaucguguaccucaccaacaccacgaucgagaaggagaucugccccaagcuggccgaguaccggaacuggagcaagccgcagugcgacaucaccggguucgcgcccuucuccaaggacaacagcauccgccuguccgccggcggggacaucugggucacccgggagcccuacgugagcugcgaccccgacaagugcuaccaguucgcccucggccaggggaccacgcugaacaacgugcacuccaacgacaccguccacgaccgcaccccguaccggacccugcucaugaacgagcugggcgugcccuuccaccugggcacgaagcaggucugcaucgccuggagcuccagcuccugccacgacgggaaggccuggcuccacgugugcgugaccggcgacgacaagaacgcgaccgccagcuucaucuacaacgggcgccugguggacuccaucgucagcugguccaaggagauccugcggacccaggagagcgagugcgugugcaucaacggcacgugcgccguggucaugaccgacggguccgccagcggcaaggcggacaccaagauccucuucaucgaggagggcaagaucgugcacaccagcaagcuguccgggagcgcccagcacguggaggagugcuccugcuacccccgcuaccccggcauccggugcgucugccgcgacaacuggaaggggagcaaccggccgaucguggacaucaacaucaaggacuacuccaucgugagcuccuacgucugcagcggccuggugggcgacacgccccgcaagaacgacuccagcuccagcucccacugccucgaccccaacaacgaggagggcgggcacggggugaagggcugggccuucgacgacgggaacgacgucuggaugggccggaccaucagcgagaagcugcgcuccggcuacgagaccuucaaggugaucgagggguggagcaaccccaacuccaagcugcagaucaaccggcaggucaucguggaccgcggcaaccggagcggguacuccggcaucuucagcguggagggcaagagcugcaucaaccgcugcuucuacgucgagcucauccgggggcgcaaggaggagaccgaggugcuguggacguccaacagcaucguggucuucugcggcaccuccgggaccuacggcaccgggagcuggccggacggcgccgacaucaaccugaugcccaucuga

SEQ ID NO: 78371 - RNA, 1410 nt, Artificial Sequence; identical to SEQ ID NO: 78367
  derived and/or modified CDS sequence (opt1) from neuraminidase__InfluenzaA__AAZ74510

SEQ ID NO: 78372 - RNA, 1410 nt, Artificial Sequence; identical to SEQ ID NO: 78370
  derived and/or modified CDS sequence (opt1) from neuraminidase__InfluenzaA__AAZ74521

SEQ ID NO: 78373 - RNA, 1410 nt, Artificial Sequence
  derived and/or modified CDS sequence (opt1) from neuraminidase__InfluenzaA__AAZ74532
augaaccccaaccagaagaucaucaccaucggcagcgugucccugaccaucagcacgaucugcuucuucaugcagaucgccauccucaucaccaccgucacccugcacuucaagcaguacgaguucaacuccccgcccaacaaccaggugaugcugugcgagcccacgaucaucgagcgcaacaucaccgagaucguguaccucaccaacaccacgaucgagaaggagaucugccccaagcuggccgaguaccggaacuggagcaagccgcagugcgacaucaccggguucgcgcccuucuccaaggacaacagcauccgccuguccgccggcggggacaucugggucacccgggagcccuacgugagcugcgaccccgacaagugcuaccaguucgcccucggccaggggaccacgcugaacaacgugcacuccaacgacaccguccacgaccgcaccccguaccggacccugcucaugaacgagcugggcgugcccuuccaccugggcacgaagcaggucugcaucgccuggagcuccagcuccugccacgacgggaaggccuggcuccacgugugcgugaccggcgacgacaagaacgcgaccgccagcuucaucuacaacgggcgccugguggacuccaucgucagcugguccaaggacauccugcggacccaggagagcgagugcgugugcaucaacggcacgugcaccguggucaugaccgacggguccgccagcggcaaggccgacaccaagauccucuucaucgaggagggcaagaucgugcacacgagcacccuguccgggaacgcgcagcacguggaggagugcagcugcuacccccgcuaccccggcguccggugcgugugccgcgacaacuggaagggguccaaccggccgaucguggacaucaacaucaaggacuacagcaucgucuccagcuacgugugcuccggccuggugggcgacacgccccgcaagaacgacagcuccagcuccagccacugccucgaccccaacaacgaggagggcgggcacggggucaagggcugggccuucgacgacgggaacgacguguggaugggccggaccaucuccgagaagcugcgccugggcuacgagaccuucaaggucaucgagggguggagcaaccccaacuccaagcuccagaucaaccgccaggugaucguggagcggggcaaccggagcggguacuccggcaucuucagcgucgaggggaaguccugcaucaaccgcugcuucuacguggagcugauccggggccgcaaggaggagaccgaggugcuguggaccagcaacagcaucgucguguucugcggcaccuccgggacguacggcaccgggagcuggccggacggcgccaacaucaaccucaugcccaucuga

SEQ ID NO: 78374 - RNA, 1410 nt, Artificial Sequence; identical to SEQ ID NO: 78351
  derived and/or modified CDS sequence (opt1) from neuraminidase__InfluenzaA__AAZ74543

SEQ ID NO: 78375 - RNA, 1410 nt, Artificial Sequence; identical to SEQ ID NO: 78303
  derived and/or modified CDS sequence (opt1) from neuraminidase__InfluenzaA__AAZ74565

SEQ ID NO: 78376 - RNA, 1410 nt, Artificial Sequence; identical to SEQ ID NO: 78351
  derived and/or modified CDS sequence (opt1) from neuraminidase__InfluenzaA__AAZ74598

SEQ ID NO: 78377 - RNA, 1410 nt, Artificial Sequence
  derived and/or modified CDS sequence (opt1) from neuraminidase__InfluenzaA__AAZ74609
augaaccccaaccagaagaucaucaccaucggcagcgugucccugaccaucgccacgaucugcuuccucaugcagaucgccauccuggucaccaccgugacccugcacuucaagcaguacgagugcaacagcccgcccaacaaccaggugaugcucugcgagcccaucaucaucgagcgcaacaucacggagaucgucuaccugaccaacaccaccaucgagaaggagaucugccccaagcuggcggaguaccggaacugguccaagccgcagugcaagaucacgggguucgcccccuucagcaaggacaacuccauccgccucagcgccggcggggacaucugggugacccgggagcccuacguguccugcgaccccgacaagugcuaccaguucgcccugggccaggggaccacccugaacaaccgccacagcaacgacacgguccacgaccggaccccguaccgcacccuccugaugaacgagcugggcgugcccuuccaccucggcaccaagcaggucugcaucgccugguccagcuccagcugccacgacgggaaggcguggcugcacgugugcgugacgggccacgacgagaacgccaccgccuccuucaucuacgacgggcggcugguggacagcaucuccagcugguccaagaacauccuccgcacccaggagagcgagugcgucugcaucaacgggaccugcacgguggugaugaccgacggguccgccagcgagcgggcggacaccaagauccuguucaucgaggagggcaagaucguccacaucagcccccuguccggcagcgcccagcacguggaggagugcuccugcuacccccgcuacccgggggugcggugcgucugccgcgacaacuggaagggcagcaaccggcccaucguggacaucaacgugaaggacuacuccaucgucagcuccuacgugugcagcgggcucgugggcgacacgccccgcaagaacgacuccagcuccagcuccuacugccugaaccccaacaacgaggagggcgggcacggcgucaaggggugggccuucgacgacggcaacgacguguggauggggcggaccaucagcgagaagcugcgcuccggcuacgagaccuucaaggucaucggcggguggagcaagccgaacuccaagcuccagaucaaccgccaggugaucguggaccggggcaaccggagcggguacuccggcaucuucagcgucgagggcaagagcugcgugaaccgcugcuucuacguggagcugauccggggccgcaagcaggagaccgaggucugguggaccuccaacagcaucgugguguucugcggcacguccgggaccuacggcaccgggagcuggcccgacggcgccgacaucaaccugaugcccaucuga

SEQ ID NO: 78378 - RNA, 1410 nt, Artificial Sequence; identical to SEQ ID NO: 78085
  derived and/or modified CDS sequence (opt1) from neuraminidase__InfluenzaA__AAZ74620

SEQ ID NO: 78379 - RNA, 1410 nt, Artificial Sequence; identical to SEQ ID NO: 78197
  derived and/or modified CDS sequence (opt1) from neuraminidase__InfluenzaA__AAZ79508

SEQ ID NO: 78380 - RNA, 1410 nt, Artificial Sequence
  derived and/or modified CDS sequence (opt1) from neuraminidase__InfluenzaA__AAZ79519
augaaccccaaccagaagaucaucaccaucggcagcgugucccugaccaucgccacgaucugcuuccucaugcagaucgccauccuggucaccaccgugacccugcacuucaagcaguacgagugcaacagcccgcccaacaaccaggugaugcucugcgagcccacgauccuggagcgcaacaucaccgagaucgucuaccugaccaacaccacgaucgagaaggagaucugccccaagcucgcggaguaccggaacugguccaagccgcagugcaagaucaccggguucgcccccuucagcaaggacaacuccauccgccugagcgccggcggggacaucugggugacccgggagcccuacguguccugcgaccccgacaagugcuaccaguucgcccugggccaggggaccacgcucaacaaccgccacagcaacgacaccguccacgaccggaccccguaccgcacccugcugaugaacgagcucggcgugcccuuccaccugggcacgaagcaggucugcaucgccugguccagcuccagcugccacgacgggaaggcguggcugcacgugugcgugaccggccacgacaagaacgccaccgccuccuucaucuacgggggccggcucguggacagcaucggguccuggagcaagaagauccugcgcacccaggaguccgagugcgucugcaucaacggcacgugcaccguggugaugaccgacggcagcgccuccgggcgggcggacaccaagauccuguucaucgaggagggcaagaucauccacaucagccagcucagcggguccgcccagcacgucgaggagugcagcugcuacccccgcuaccccggcgugcggugcgugugccgcgacaacuggaagggcuccaaccggccgaucgucgacaucaacgugaaggacuacagcaucguguccagcuacgucugcuccgggcuggugggcgacacgccccgcaagaacgacagcuccagcuccagccacugccugaaccccaacaacgaggagggcgggcacggggugaagggcugggccuucgacgacggcaacgacgucuggauggggcggaccaucuccgagaaguuccgcagcggcuacgagaccuucaaggugaucgagggguggucccggcccaacagcaagcuccagaucaaccgccaggucaucguggaccgggacaaccgcuccggcuacagcgggaucuucuccguggagggcaagagcugcaucaaccggugcuucuacgucgagcugauccgcggccgcaagcaggagaccgaggugugguggacgagcaacuccaucguggucuucugcgggaccagcggcaccuacgggaccggcuccuggccggacggggccgacaucaaccugaugcccaucuga

SEQ ID NO: 78381 - RNA, 1410 nt, Artificial Sequence; identical to SEQ ID NO: 78161
  derived and/or modified CDS sequence (opt1) from neuraminidase__InfluenzaA__AAZ79530

SEQ ID NO: 78382 - RNA, 1410 nt, Artificial Sequence
  derived and/or modified CDS sequence (opt1) from neuraminidase__InfluenzaA__AAZ79552
augaaccccaaccagaagaucaucaccaucggcagcgugucccugaccaucgccacgaucugcuuccucaugcagaucgccauccuggucaccaccgugacccugcacuucaagcaguacgagugcaacagcccgcccaacaaccaggugaugcucugcgagcccacgaucaucgagcgcaacaucaccgagaucgucuaccugaccaacaccacgaucgagaaggagaucugccccaagcuggcggaguaccggaacugguccaagccgcagugcaacaucaccggguucgcccccuucagcaaggacaacuccauccgccucagcgccggcggggacaucugggugacccgggagcccuacguguccugcgaccccgacaagugcuaccaguucgcccugggccaggggaccacgcugaacaacggccacagcaacgacaccguccacgaccgcaccccgcaccggacccuccugaugaacgagcugggcgugcccuuccaccucgggacgaagcaggucugcaucgccugguccagcuccagcugccacgacggcaaggcguggcugcacgugugcgugaccggggacgacaagaacgccaccgccuccuucaucuacaacggccgccugguggacagcaucggguccuggagcaagaagauccuccggacccaggaguccgagugcgucugcaucaacggcacgugcaccguggugaugaccgacggcagcgccuccgggaaggcggacaccaagauccuguucaucgaggagggcaagaucguccacacgagccugcucagcggguccgcccagcacguggaggagugcagcugcuacccccgcuaccccggcgugcggugcgucugccgcgacaacuggaagggcuccaaccggccgaucguggacaucaacgugaaggacuacagcaucgucuccagcuacgugugcuccgggcuggugggcgacacgccccgcaagaacgacagcuccagcuccagccacugccuggaccccaacaacgaggagggcgggcacggggucaagggcugggccuucgacgacggcaacgacguguggauggggcggaccaucuccgagaagcuccgcagcggcuacgagaccuucaaggucaucgaggggugguccaagcccaacagcaagcugcagaucaaccgccaggugaucguggaccgggacaaccgguccggcuacagcgggaucuucuccgucgagggcaagagcugcaucaaccgcugcuucuacguggagcugauccggggccgcaaccaggagaccgaggugcucuggaccagcaacuccaucgucguguucugcgggaccagcggcaccuacgggacgggcuccuggccggacggggccgacaucaaccugaugcccaucuga

SEQ ID NO: 78383 - RNA, 1410 nt, Artificial Sequence; identical to SEQ ID NO: 78303
  derived and/or modified CDS sequence (opt1) from neuraminidase__InfluenzaA__AAZ79563

SEQ ID NO: 78384 - RNA, 1410 nt, Artificial Sequence; identical to SEQ ID NO: 78303
  derived and/or modified CDS sequence (opt1) from neuraminidase__InfluenzaA__AAZ79574

SEQ ID NO: 78385 - RNA, 1410 nt, Artificial Sequence; identical to SEQ ID NO: 78303
  derived and/or modified CDS sequence (opt1) from neuraminidase__InfluenzaA__AAZ79585

SEQ ID NO: 78386 - RNA, 1410 nt, Artificial Sequence; identical to SEQ ID NO: 78370
  derived and/or modified CDS sequence (opt1) from neuraminidase__InfluenzaA__AAZ79618

SEQ ID NO: 78387 - RNA, 1410 nt, Artificial Sequence; identical to SEQ ID NO: 78351
  derived and/or modified CDS sequence (opt1) from neuraminidase__InfluenzaA__AAZ79633

SEQ ID NO: 78388 - RNA, 1410 nt, Artificial Sequence; identical to SEQ ID NO: 78370
  derived and/or modified CDS sequence (opt1) from neuraminidase__InfluenzaA__AAZ79945

SEQ ID NO: 78389 - RNA, 1410 nt, Artificial Sequence; identical to SEQ ID NO: 78367
  derived and/or modified CDS sequence (opt1) from neuraminidase__InfluenzaA__AAZ79966

SEQ ID NO: 78390 - RNA, 1410 nt, Artificial Sequence; identical to SEQ ID NO: 78351
  derived and/or modified CDS sequence (opt1) from neuraminidase__InfluenzaA__AAZ79977

SEQ ID NO: 78391 - RNA, 1410 nt, Artificial Sequence; identical to SEQ ID NO: 78351
  derived and/or modified CDS sequence (opt1) from neuraminidase__InfluenzaA__AAZ79988

SEQ ID NO: 78392 - RNA, 1410 nt, Artificial Sequence
  derived and/or modified CDS sequence (opt1) from neuraminidase__InfluenzaA__AAZ79999
augaaccccaaccagaagaucaucaccaucggcagcgugucccugaccaucagcacgaucugcuucuucaugcagaucgccauccucaucaccaccgucacccugcacuucaagcaguacgaguucaacuccccgcccaacaaccagaugaugcugugcgagcccacgaucaucgagcgcaacaucaccgagaucguguaccucaccaacaccacgaucgagaaggagaucugccccaagcuggccgaguaccggaacuggagcaagccgcagugcgacaucaccggguucgcgcccuucuccaaggacaacagcauccgccuguccgccggcggggacaucugggugacccgggagcccuacgucagcugcgaccccgacaagugcuaccaguucgcccucggccaggggaccacgcugaacaacgugcacuccaacgacaccgugcacgaccgcaccccguaccggacccugcucaugaacgagcugggcguccccuuccaccugggcacgaagcaggucugcaucgccuggagcuccagcuccugccacgacgggaaggccuggcuccacgugugcgugaccggcgacgacaagaacgcgaccgccagcuucaucuacaacgggcgccugguggacuccaucgugagcugguccaaggacauccugcggacccaggagagcgagugcgucugcaucaacggcacgugcaccguggugaugaccgacggguccgccagcggcaaggccgacaccaagauccucuucaucgaggagggcaagaucguccacacgagcacccuguccgggagcgcgcagcacguggaggagugcuccugcuacccccgcuaccccggcgugcggugcgucugccgcgacaacuggaaggggagcaaccggccgaucguggacaucaacaucaaggacuacuccaucgugagcuccuacgucugcagcggccuggugggcgacacgccccgcaagaacgacuccagcuccagcucccacugccucgaccccaacaacgaggagggcgggcacggggugaagggcugggccuucgacgacgggaacgacgucuggaugggccggaccaucagcgagaagcugcgccugggcuacgagaccuucaaggugaucgaggggugguccaaccccaacagcaagcuccagaucaaccggcaggucaucguggagcgcggcaaccgguccggguacagcggcaucuucuccguggagggcaagagcugcaucaaccgcugcuucuacgucgagcugauccgggggcgcaaggaggagaccgaggugcuguggaccagcaacuccaucguggucuucugcggcaccagcgggacguacggcaccggguccuggccggacggcgccgacaucaaccucaugcccaucuga

SEQ ID NO: 78393 - RNA, 1410 nt, Artificial Sequence; identical to SEQ ID NO: 78139
  derived and/or modified CDS sequence (opt1) from neuraminidase__InfluenzaA__AAZ80010

SEQ ID NO: 78394 - RNA, 1410 nt, Artificial Sequence
  derived and/or modified CDS sequence (opt1) from neuraminidase__InfluenzaA__AAZ80021
augaaccccaaccagaagaucaucaccaucggcagcgugucccugaccaucagcacgaucugcuucuucaugcagaucgccauccucaucaccaccgucacccugcacuucaagcaguacgaguucaacuccccgcccaacaaccaggugaugcugugcgagcccacgaucaucgagcgcaacaucaccgagaucguguaccucaccaacaccacgaucgagaaggagaucugccccaagcuggccgaguaccggaacuggagcaagccgcagugcgacaucaccggguucgcgcccuucuccaaggacaacagcauccgccuguccgccggcggggacaucugggucacccgggagcccuacgugagcugcgaccccgacaagugcuaccaguucgcccucggccaggggaccacgcugaacaacgugcacuccaacgacaccguccgcgaccggaccccguaccgcacccugcucaugaacgagcugggcgugcccuuccaccugggcacgaagcaggucugcaucgccuggagcuccagcuccugccacgacgggaaggccuggcuccacgugugcgugaccggcgacgacaagaacgcgaccgccagcuucaucuacaacgggcggcugguggacuccaucgucagcugguccaaggagauccugcgcacccaggagagcgagugcgugugcaucaacggcacgugcgccguggucaugaccgacggguccgccagcggcaaggcggacaccaagauccucuucaucgaggagggcaagaucgugcacaccagcaagcuguccgggagcgcccagcacguggaggagugcuccugcuacccccgguaccccggcauccgcugcgucugccgggacaacuggaaggggagcaaccgcccgaucguggacaucaacaucaaggacuacuccaucgugagcuccuacgucugcagcggccuggugggcgacacgccccggaagaacgacuccagcuccagcucccacugccucgaccccaacaacgaggagggcgggcacggggugaagggcugggccuucgacgacgggaacgacgucuggaugggccgcaccaucagcgagaagcugcgguccggcuacgagaccuucaaggugaucgagggguggagcaaccccaacuccaagcugcagaucaaccgccaggucaucguggaccggggcaaccgcagcggguacuccggcaucuucagcguggagggcaagagcugcaucaaccggugcuucuacgucgagcucauccgcgggcggaaggaggagaccgaggugcuguggacguccaacagcaucguggucuucugcggcaccuccgggaccuacggcaccgggagcuggccggacggcgccgacaucaaccugaugcccaucuga

SEQ ID NO: 78395 - RNA, 1410 nt, Artificial Sequence
  derived and/or modified CDS sequence (opt1) from neuraminidase__InfluenzaA__AAZ83245
augaaccccaaccagaagaucaucaccaucggcagcgugucccugaccaucagcacgaucugcuucuucaugcagaucgccauccucaucaccaccgucacccugcacuucaagcaguacgaguucaacccgccgcccaacaaccaggugaugcugugcgagcccacgaucaucgagcgcaacaucaccgagaucguguaccucaccaacaccacgaucgagaaggagaucugccccaagcuggccgaguaccggaacugguccaagccccagugcaacaucaccggguucgcgcccuucagcaaggacaacuccauccgccugagcgccggcggggacaucugggucacccgggagcccuacguguccugcgacccggacaagugcuaccaguucgcccucggccaggggaccacgcugaacaacgugcacagcaacgacaccguccacgaccgcacccccuaccggacccugcucaugaacgagcugggcgugcccuuccaccugggcacgaagcaggucugcaucgccugguccagcuccagcugccacgacgggaaggccuggcuccacgugugcgugaccggcgacgacgagaacgcgaccgccuccuucaucuacaacgggcgccugguggacagcaucgucuccuggagcaagaagauccugcggacccaggaguccgagugcgugugcaucaacggcacgugcaccguggucaugaccgacgggagcgccuccggcaaggccgacaccaagauccucuucaucgaggagggcaagaucgugcacacgagcacccugagcggguccgcgcagcacguggaggagugcagcugcuacccccgcuacccgggcguccggugcgugugccgcgacaacuggaagggguccaaccggcccaucguggacaucaacaucaaggacuacagcaucgucuccagcuacgugugcuccggccuggugggcgacacgccccgcaagaacgacagcuccagcuccagccacugccucgaccccaacaacgaggagggcgggcacggggucaagggcugggccuucgacgacgggaacgacguguggaugggccggaccaucuccgagaagcugcgcagcggcuacgagaccuucaaggucaucgaggggugguccaacccgaacagcaagcugcagaucaaccgccaggugaucguggaccgggacaaccgguccggcuacagcgggaucuucuccgucgagggcaagagcugcaucaaccgcugcuucuacguggagcucauccgggggcgcaaccaggagaccgaggugcuguggaccagcaacuccaucgucguguucugcggcaccagcggcacguacgggaccggcuccuggcccgacggggccgacaucaaccugaugcccaucuga

SEQ ID NO: 78396 - RNA, 1413 nt, Artificial Sequence
  derived and/or modified CDS sequence (opt1) from neuraminidase__InfluenzaA__AAZ83256
augaaccccaaccagaagaucaucaccaucggcagcaucuccaucgccaucgggaucaucagccugaugcuccagaucggcaacaucaucuccaucugggccagccacuccauccagaccgggagccagaaccacacgggcaucugcaaccagcgcaucaucaccuacgagaacuccaccugggugaaccacaccuacgucaacaucaacaacacgaacgugguggcggggaaggacaagaccagcgucacccuggccggcaacuccagccugugcuccaucagcggcugggccaucuacaccaaggacaacuccauccggaucgggagcaagggcgacguguucgugauccgcgagccguucaucuccugcagccaccucgagugccggacguucuuccugacccagggggcccugcucaacgacaagcacuccaacggcaccgucaaggaccgcagccccuaccgggcccugauguccugcccccugggggaggcgcccagcccguacaacagcaaguucgaguccguggccuggagcgccuccgccugccacgacggcaugggcuggcucaccaucgggaucagcggccccgacaacggggcgguggccguccugaaguacaacggcaucaucacggagaccaucaaguccuggaagaagcgcauccugcggacccaggagagcgagugcgugugcgugaacggcuccugcuucaccaucaugacggacgggcccagcaacggcgccgccuccuacaagaucuucaagaucgagaaggggaaggucaccaagagcaucgagcucaacgcccccaacuuccacuacgaggagugcuccugcuacccggacaccggcaccgugaugugcgugugccgcgacaacuggcacgggagcaaccggcccugggucuccuucaaccagaaccuggacuaccagaucggcuacaucugcagcggcguguucggggacaacccccgccccaaggacggcaagggguccugcaacccggugacggucgacggcgcggacggggugaagggcuucagcuacaaguacggcaacgggguguggaucggccggaccaaguccaaccgccugcggaagggguucgagaugaucugggaccccaacggcuggaccgacaccgacagcgacuucuccgucaagcaggacgugguggccaucacggacuggagcggguacagcggcuccuucguccagcaccccgagcucaccggccuggacugcauccgccccugcuucuggguggagcugguccgggggcucccgcgcgagaacaccaccaucuggacgagcggcuccagcaucuccuucugcgggaucgacagcgacaccgccaacugguccuggcccgacggcgccgagcugcccuucaccaucgacaaguga

SEQ ID NO: 78397 - RNA, 1410 nt, Artificial Sequence; identical to SEQ ID NO: 78303
  derived and/or modified CDS sequence (opt1) from neuraminidase__InfluenzaA__AAZ83269

SEQ ID NO: 78398 - RNA, 1410 nt, Artificial Sequence; identical to SEQ ID NO: 78303
  derived and/or modified CDS sequence (opt1) from neuraminidase__InfluenzaA__AAZ83280

SEQ ID NO: 78399 - RNA, 1410 nt, Artificial Sequence; identical to SEQ ID NO: 78277
  derived and/or modified CDS sequence (opt1) from neuraminidase__InfluenzaA__AAZ83291

SEQ ID NO: 78400 - RNA, 1413 nt, Artificial Sequence
  derived and/or modified CDS sequence (opt1) from neuraminidase__InfluenzaA__AAZ83302
augaaccccaaccagaagaucaucaccaucggcagcaucuccaucgccaucgggaucaucagccugaugcuccagaucggcaacaucaucuccaucugggccagccacuccauccagaccgggagccagaaccacacgggcgugugcaaccagcgcaucaucaccuacgagaacuccaccugggucaaccacaccuacgugaacaucaacaacacgaacgugaucgcggggaaggacaaggccagcgucacccuggccggcaacuccagccugugcuccaucagcggcugggccaucuacaccaaggacaacuccauccggaucgggagcaagggcgacguguucgugauccgcgagccguucaucuccugcagccacuccgagugccggaccuucuuccucacgcagggggcccugcugaacgacaagcacagcaacggcaccgucaaggaccgcucccccuaccgggcgcucaugagcugcccccugggggaggcccccagcccguacaacuccaaguucgagagcguggccugguccgccagcgcgugccacgacggcaugggcuggcugaccaucgggaucuccggccccgacaacggggccguggccguccucaaguacaacggcaucaucaccgagacgaucaagagcuggaagaagcagauccugcgcacccaggaguccgagugcgugugcgugaacggcagcugcuucaccaucaugaccgacgggcccuccaacggcgccgccagcuacaagaucuucaagaucgagaaggggaaggucacgaaguccaucgagcugaacgcgcccaacuuccacuacgaggagugcagcugcuacccggacaccggcaccgugaugugcgugugccgggacaacuggcacggguccaaccgccccugggucagcuucaaccagaaccucgacuaccagaucggcuacaucugcuccggcguguucggggacaacccccggcccaaggacggcgaggggagcugcaacccggugaccgucgacggcgccaacggggugaagggcuucuccuacaaguacggcaacgggguguggaucggccgcaccaagagcaaccggcugcgcaagggguucgagaugaucugggaccccaacggcuggacggacaccgacuccgacuucagcgucaagcaggacgugguggccaucaccgacuggagcggguacuccggcagcuucguccagcaccccgagcugacgggccucgacugcauccggcccugcuucuggguggagcugguccgcgggcugccgaaggagaacaccaccaucuggaccuccggcagcuccaucagcuucugcggggugaacuccgacacggccaacuggagcuggcccgacggcgccgagcuccccuucaccaucgacaaguga

SEQ ID NO: 78401 - RNA, 1410 nt, Artificial Sequence
  derived and/or modified CDS sequence (opt1) from neuraminidase__InfluenzaA__AAZ83315
augaaccccaaccagaagaucaucaccaucggcagcgugucccugaccaucgccacgaucugcuuccucaugcagaucgccauccuggucaccaccgugacccugcacuucaagcaguacgagugcaacagccucccgaacaaccaggugaugcugugcgagcccacgaucaucgagcgcaacaucaccgagaucgucuaccugaccaacaccacgaucgagaaggagaucugccccaagcucgcggaguaccggaacugguccaagccccagugcaagaucaccggguucgccccguucagcaaggacaacuccauccgccugagcgccggcggggacaucugggugacccgggagcccuacguguccugcgaccccgacaagugcuaccaguucgcccugggccaggggaccacgcucaacaaccgccacagcaacgacaccguccacgaccggacccccuaccgcacccugcugaugaacgagcucggcgugccguuccaccugggcacgaagcaggucugcaucgccugguccagcuccagcugccacgacgggaaggcguggcugcacgugugcgugaccggccacgacgagaacgccaccgccuccuucaucuacgacgggcggcucguggacagcaucggcuccuggagcaagaagauccugcgcacccaggaguccgagugcgucugcaucaacgggacgugcaccguggugaugaccgacggcagcgccuccggccgggcgaacaccaagauccuguucaucgaggaggggaagaucauccacaucagccagcucagcggcuccgcccagcacgucgaggagugcagcugcuacccccgcuaccccggggugcggugcgugugccgcgacaacuggaagggcuccaaccggcccaucgucgacaucaacgugaaggacuacagcaucgccuccagcuacgugugcuccggccuggucggggacacgccgcgcaagaacgacagcuccagcuccagccacugccugaaccccaacaacgaggagggcgggcacggcgugaaggggugggccuucgacgacggcaacgacguguggaugggccggaccaucuccgagaaguuccgcagcggguacgagaccuucaaggucaucgagggcugguccaagcccaacagcaagcuccagaucaaccgccaggugaucgucgaccgggacaaccgguccggguacagcggcaucuucuccguggagggcaagagcugcaucaaccgcugcuucuacguggagcugauccgggggcgcaagcaggagaccgaggucugguggacgagcaacuccaucgugguguucugcggcaccagcgggaccuacggcaccggguccuggcccgacggcgccgacaucaaccugaugccgaucuga

SEQ ID NO: 78402 - RNA, 1410 nt, Artificial Sequence
  derived and/or modified CDS sequence (opt1) from neuraminidase__InfluenzaA__AAZ83326
augaaccccaaccagaagaucaucaccaucggcagcgugucccugaccaucgccacgaucugcuuccucaugcagaucgccauccuggucaccaccgugacccugcacuucaagcaguacgagugcgacagccucccgaacaaccaggugaugcugugcgagcccacgaucaucgagcgcaacaucaccgagaucgucuaccugaccaacaccacgaucgagaaggagaucugccccaagcucgcggaguaccggaacugguccaagccccagugcaagaucaccggguucgccccguucagcaaggacaacuccauccgccugagcgccggcggggacaucugggugacccgggagcccuacguguccugcgaccccgacaagugcuaccaguucgcccugggccaggggaccacgcucaacaaccgccacagcaacgacaccguccacgaccggacccccuaccgcacccugcugaugaacgagcucggcgugccguuccaccugggcacgaagcaggucugcaucgccugguccagcuccagcugccacgacgggaaggcguggcugcacgugugcgugaccggccacgacgagaacgccaccgccuccuucaucuacgacgggcggcucguggacagcaucggcuccuggagcaagaagauccugcgcacccaggaguccgagugcgucugcaucaacgggacgugcaccguggugaugaccgacggcagcgccuccggccgggcggacaccaagauccuguucaucgaggaggggaagaucauccacaucagccagcucagcggcuccgcccagcacgucgaggagugcagcugcuacccccgcuaccccggggugcggugcgugugccgcgacaacuggaagggcuccaaccggcccaucgucgacaucaacgugaaggacuacagcaucguguccagcuacgucugcuccggccuggugggggacacgccgcgcaagaacgacagcuccagcuccagccacugccugaaccccaacaacgaggagggcgggcacggcgugaaggggugggccuucgacgacggcaacgacgucuggaugggccggaccaucuccgagaaguuccgcagcggguacgagaccuucaaggugaucgagggcugguccaagcccaacagcaagcuccagaucaaccggcaggucaucguggaccgcgacaaccgguccggguacagcggcaucuucuccguggagggcaagagcugcaucaaccgcugcuucuacgucgagcugauccgggggcgcaagcaggagaccgaggugugguggacgagcaacuccaucguggucuucugcggcaccagcgggaccuacggcaccggguccuggcccgacggcgccgacaucaaccugaugccgaucuga

SEQ ID NO: 78403 - RNA, 1410 nt, Artificial Sequence
  derived and/or modified CDS sequence (opt1) from neuraminidase__InfluenzaA__AAZ83374
augaaccccaaccagaagaucaucaccaucggcagcgugucccugaccaucagcacgaucugcuucuucaugcagaucgccauccucaucaccaccgucacccugcacuucaagcaguacgaguucaacuccccgcccaacaaccaggugaugcugugcgagcccacgaucaucgagcgcaacaucaccgagaucguguaccucaccaacaccacgaucgagaaggagaucugccccaagcuggccgaguaccggaacuggagcaagccgcagugcgacaucaccggguucgcgcccuucuccaaggacaacagcauccgccuguccgccggcggggacaucugggucacccgggagcccuacgugagcugcgaccccgacaagugcuaccaguucgcccucggccaggggaccacgcugaacaacgugcacuccaacgacaccguccacgaccgcaccccguaccggacccugcucaugaacgagcugggcgugcccuuccaccugggcacgaagcaggucugcaucgccuggagcuccagcuccugccacgacgggaaggccuggcuccacgugugcgugaccggcgacgacaagaacgcgaccgccagcuucaucuacaacgggcgccugguggacuccaucgucagcugguccaaggagauccugcggacccaggagagcgagugcgugugcaucaacggcacgugcaccguggucaugaccgacggguccgccagcggcaaggccgacaccaagauccucuucaucgaggagggcaagaucgugcacacgagcacccuguccgggagcgcgcagcacguggaggagugcuccugcuacccccgcuaccccggcguccggugcgugugccgcgacaacuggaaggggagcaaccggccgaucguggacaucaacaucaaggacuacuccaucgucagcuccuacgugugcagcggccuggugggcgacacgccccgcaagaacgacuccagcuccagcucccacugccucgaccccaacaacgaggagggcgggcacggggucaagggcugggccuucgacgacgggaacgacguguggaugggccggaccaucagcgagaagcugcgcaccggcuacgagaccuucaaggucaucgaggggugguccaaccccaacagcaagcugcagaucaaccgccaggugaucguggaccggggcaaccgguccggguacagcggcaucuucuccgucgagggcaagagcugcaucaaccgcugcuucuacguggagcucauccgggggcgcaaggaggagaccgaggugcuguggaccagcaacuccaucgucguguucugcggcacgagcgggaccuacggcaccggguccuggccggacggcgccgacaucaaccugaugcccaucuga

SEQ ID NO: 78404 - RNA, 1410 nt, Artificial Sequence; identical to SEQ ID NO: 78370
  derived and/or modified CDS sequence (opt1) from neuraminidase__InfluenzaA__AAZ83385

SEQ ID NO: 78405 - RNA, 1413 nt, Artificial Sequence
  derived and/or modified CDS sequence (opt1) from neuraminidase__InfluenzaA__AAZ85129
augaacaccaaccagaagaucaucaccaucggcagcaucuccaucgccaucgggaucaucagccugaugcuccagaucggcaacaucaucuccaucugggccagccacuccauccagacggggagccagaaccacaccggcgugugcaaccagcgcaucaucaccuacgagaacuccaccugggucaaccacacguacgugaacaucaacaacaccaacgugaucgcggggaaggacaagaccagcgucacccuggccggcaacuccagccugugcuccaucagcggcugggccaucuacacgaaggacaacuccauccggaucgggagcaagggcgacguguucgugauccgcgagcccuucaucuccugcagccaccucgagugccggaccuucuuccugacccagggggcccugcucaacgacaagcacuccaacggcaccgucaaggaccgcagcccguaccgggcccugauguccugcccccugggggaggcgcccagccccuacaacagcaaguucgaguccguggccuggagcgccuccgccugccacgacggcaugggcuggcucacgaucgggaucagcggcccggacaacggggcgguggccguccugaaguacaacggcaucaucaccgagaccaucaaguccuggaagaagcagauccugcgcacccaggagagcgagugcgugugcgugaacggcuccugcuucacgaucaugaccgacgggcccagcaacggcgccgccuccuacaagaucuucaagaucgagaaggggaaggucaccaagagcaucgagcucaacgcccccaacuuccacuacgaggagugcuccugcuaccccgacaccggcacggugaugugcgugugccgggacaacuggcacgggagcaaccgcccgugggucuccuucaaccagaaccuggacuaccagaucggcuacaucugcagcggcguguucggggacaacccccggcccaaggacggcgagggguccugcaaccccgugaccgucgacggcgcgaacggggugaagggcuucagcuacaaguacggcaacgggguguggaucggccgcaccaaguccaaccggcugcgcaagggguucgagaugaucugggacccgaacggcuggaccgacacggacagcgacuucuccgucaagcaggacgugguggccaucaccgacuggagcggguacagcggcuccuucguccagcaccccgagcucaccggccuggacugcauccggcccugcuucuggguggagcugguccgcgggcuccccaaggagaacaccacgaucuggaccagcggcuccagcaucuccuucugcggggugaacagcgacaccgccaacugguccuggccggacggcgccgagcugcccuucaccaucgacaaguga

SEQ ID NO: 78406 - RNA, 1410 nt, Artificial Sequence
  derived and/or modified CDS sequence (opt1) from neuraminidase__InfluenzaA__ABA06513
augaaccccaaccagaagaucaucaccaucggcagcgugucccugaccaucgccacgaucugcuuccucacccagaucgccauccuggucaccaccgugacgcugcacuucaagcaguacgagugcaacagcccgcccaacaaccaggugaugcucugcgagcccaccaucaucgagcgcaacaucaccgagaucgucuaccugaccaacacgaccaucgagaaggagaucugccccaagcuggcggaguaccggaacugguccaagccgcagugcaacaucaccggguucgcccccuucagcaaggacaacuccauccgccucagcgccggcggggacaucugggugacccgggagcccuacguguccugcgaccccgacaagugcuaccaguucgcccugggccaggggacgacccugaacaacggccacagcaacgacaccguccacgaccgcaccccguaccggacgcuccugaugaacgagcugggcgugcccuuccaccucgggaccaagcaggucugcaucgccugguccagcuccagcugccacgacggcaaggcguggcugcacgugugcgugaccggggacgacaagaacgccaccgccuccuucaucuacaacggccgccugguggacagcaucggguccuggagcaagaagauccuccggacgcaggaguccgagugcgucugcaucaacgggaccugcaccguggugaugaccgacggcagcgccuccgggaaggcggacacgaagauccuguucaucgaggagggcaagaucguccacaccagccugcucagcggguccgcccagcacguggaggagugcagcugcuacccccgcuaccccggcgugcggugcgucugccgcgacaacuggaagggcuccaaccggccgaucguggacaucaacgugaaggacuacagcaucgucuccagcuacgugugcuccgggcuggugggcgacacgccccgcaagaacgacagcuccagcuccagccacugccuggaccccaacaacgaggagggcggccacggggucaagggcugggccuucgacgacggcaacgacguguggauggggcggaccaucuccgagaagcuccgcagcggcuacgagaccuucaaggucaucgaggggugguccaagcccaacagcaagcugcagaucaaccgccaggugaucguggaccgggacaaccgguccggcuacagcgggaucuucuccgucgagggcaagagcugcaucaaccgcugcuucuacguggagcugauccggggccgcaaccaggagaccgaggugcucuggaccagcaacuccaucgucguguucugcgggaccagcggcacguacgggaccggcuccuggccggacggggccgacaucaaccugaugcccaucuga

SEQ ID NO: 78407 - RNA, 1410 nt, Artificial Sequence; identical to SEQ ID NO: 78406
  derived and/or modified CDS sequence (opt1) from neuraminidase__InfluenzaA__ABA06545

SEQ ID NO: 78408 - RNA, 1413 nt, Artificial Sequence
  derived and/or modified CDS sequence (opt1) from neuraminidase__InfluenzaA__ABA08478
augaacaccaaccagaagaucaucaccaucggcagcaucuccaucgccaucgggaucaucagccugaugcuccagaucggcaacaucaucuccaucugggccagccacuccauccagacggggagccagaaccacaccggcaucugcaaccagcgcaucaucaccuacgagaacuccaccugggugaaccacacguacgucaacaucaacaacaccaacgugguggcggggaaggacaagaccagcgucacccuggccggcaacuccagccugugcuccaucagcggcugggccaucuacacgaaggacaacuccauccggaucgggagcaagggcgacguguucgugauccgcgagcccuucaucuccugcagccaccucgagugccggaccuucuuccugacccagggggcccugcucaacgacaagcacuccaacggcaccgucaaggaccgcagcccguaccgggcccugauguccugcccccugggggaggcgcccagccccuacaacagcaaguucgaguccguggccuggagcgccuccgccugccacgacggcaugggcuggcucacgaucgggaucagcggcccggacaacggggcgguggccguccugaaguacaacggcaucaucaccgagaccaucaaguccuggaagaagcgcauccugcggacccaggagagcgagugcgugugcgugaacggcuccugcuucacgaucaugaccgacgggcccagcaacggcgccgccuccuacaagaucuucaagaucgagaaggggaaggucaccaagagcaucgagcucaacgcccccaacuuccacuacgaggagugcuccugcuaccccgacaccggcacggugaugugcgugugccgcgacaacuggcacgggagcaaccggccgugggucuccuucaaccagaaccuggacuaccagaucggcuacaucugcagcggcguguucggggacaacccccgccccaaggacggcaagggguccugcaaccccgugaccgucgacggcgcggacggggugaagggcuucagcuacaaguacggcaacgggguguggaucggccggaccaaguccaaccgccugcggaagggguucgagaugaucugggacccgaacggcuggaccgacacggacagcgacuucuccgucaagcaggacgugguggccaucaccgacuggagcggguacagcggcuccuucguccagcaccccgagcucaccggccuggacugcauccgccccugcuucuggguggagcugguccgggggcucccccgcgagaacaccacgaucuggaccagcggcuccagcaucuccuucugcgggguggacagcgacaccgccaacugguccuggccggacggcgccgagcugcccuucaccaucgacaaguga

SEQ ID NO: 78409 - RNA, 1410 nt, Artificial Sequence; identical to SEQ ID NO: 78406
  derived and/or modified CDS sequence (opt1) from neuraminidase__InfluenzaA__ABA08511

SEQ ID NO: 78410 - RNA, 1413 nt, Artificial Sequence
  derived and/or modified CDS sequence (opt1) from neuraminidase__InfluenzaA__ABA12699
augaaccccaaccagaagaucaucaccaucggcagcaucuccaucgccaucgggaucaucagccugaugcuccagaucggcaacaucaucuccaucugggccagccacuccauccagaccgggagccagaaccacacgggcaucugcaaccagcgcaucaucaccuacgagaacuccaccugggugaaccacaccuacgucaacaucaacaacacgaacgugguggcggggaaggacaagaccagcgucacccuggccggcaacuccagccugugcuccaucagcggcugggccaucuacaccaaggacaacuccauccggaucgggagcaagggcgacguguucgugauccgcgagccguucaucuccugcagccaccucgagugccggacguucuuccugacccagggggcccugcucaacgacaagcacuccaacggcaccgucaaggaccgcagccccuaccgggcccugauguccugcccccugggggaggcgcccagcccguacaacagcaaguucgaguccguggccuggagcgccuccgccugccacgacggcaugggcuggcucaccaucgggaucagcggccccgacaacggggcgguggccguccugaaguacaacggcaucaucacggagaccaucaaguccuggaagaagcgcauccugcggacccaggagagcgagugcgugugcgugaacggcuccugcuucaccaucaugacggacgggcccagcaacggcgccgccuccuacaagaucuucaagaucgagaaggggaaggucaccaagagcaucgagcucaacgcccccaacuuccacuacgaggagugcuccugcuacccggacaccggcaccgugaugugcgugugccgcgacaacuggcacgggagcaaccggcccugggucuccuucaaccagaaccuggacuaccagaucggcuacaucugcagcggcguguucggggacaacccccgccccaaggacggcaagggguccugcaacccggugacggucgacggcgcggacggggugaagggcuucagcuacaaguacggcaacgggguguggaucggccggaccaaguccaaccgccugcggaagggguucgagaugaucugggaccccaacggcuggaccgacaccgacagcgacuucuccgucaagcaggacgugguggccaucacggacuggagcggguacagcggcuccuucguccagcaccccgagcucaccggccuggacugcauccgccccugcuucuggguggagcugguccgggggcucccgcgcgagaacaccaccaucuggacgagcggcuccagcaucuccuucugcgggguggacagcgacaccgccaacugguccuggcccgacggcgccgagcugcccuucaccaucgacaaguga

SEQ ID NO: 78411 - RNA, 1413 nt, Artificial Sequence; identical to SEQ ID NO: 78410
  derived and/or modified CDS sequence (opt1) from neuraminidase__InfluenzaA__ABA12710

SEQ ID NO: 78412 - RNA, 1413 nt, Artificial Sequence
  derived and/or modified CDS sequence (opt1) from neuraminidase__InfluenzaA__ABA12721
augaaccccaaccagaagaucaucaccaucggcagcaucuccaucgccaucgggaucaucagccugaugcuccagaucggcaacaucaucuccaucugggccagccacuccauccagaccgggagccagaaccacacgggcgugugcaaccagcgcaucaucaccuacgagaacuccaccugggucaaccacaccuacgugaacaucaacaacacgaacgugaucgcggggaaggacaagaccagcgucacccuggccggcaacuccagccugugcuccaucagcggcugggccaucuacaccaaggacaacuccauccggaucgggagcaagggcgacguguucgugauccgcgagccguucaucuccugcagccaccucgagugccggacguucuuccugacccagggggcccugcucaacgacaagcacuccaacggcaccgucaaggaccgcagccccuaccgggcccugauguccugcccccugggggaggcgcccagcccguacaacagcaaguucgaguccguggccuggagcgccuccgccugccacgacggcaugggcuggcucaccaucgggaucagcggccccgacaacggggcgguggccguccugaaguacaacggcaucaucacggagaccaucaaguccuggaagaagcagauccugcgcacccaggagagcgagugcgugugcgugaacggcuccugcuucaccaucaugacggacgggcccagcaacggcgccgccuccuacaagaucuucaagaucgggaagggcaaggucaccaagagcaucgagcucaacgcccccaacuuccacuacgaggagugcuccugcuacccggacaccgggaccgugaugugcgugugccgggacaacuggcacggcagcaaccgccccugggucuccuucaaccagaaccuggacuaccagaucggcuacaucugcagcgggguguucggcgacaacccccggccccgcgacggggagggcuccugcaacccggugacggucgacggggcgaacggcgugaagggcuucagcuacaaguacgggaacggcguguggaucgggcggaccaaguccaaccgccugcggaagggcuucgagaugaucugggaccccaacggguggaccgacaccgacagcgacuucuccgucaagcaggacgugguggccaucacggacuggagcggcuacagcggcuccuucguccagcaccccgagcucaccgggcuggacugcauccgccccugcuucuggguggagcugguccggggccucccgcgcgagaacaccaccaucuggacgagcggguccagcaucuccuucugcggcgugaacagcgacaccgccaacugguccuggcccgacggcgccgagcugcccuucaccaucgacaaguga

SEQ ID NO: 78413 - RNA, 1413 nt, Artificial Sequence; identical to SEQ ID NO: 78410
  derived and/or modified CDS sequence (opt1) from neuraminidase__InfluenzaA__ABA12732

SEQ ID NO: 78414 - RNA, 1410 nt, Artificial Sequence; identical to SEQ ID NO: 78351
  derived and/or modified CDS sequence (opt1) from neuraminidase__InfluenzaA__ABA12743

SEQ ID NO: 78415 - RNA, 1410 nt, Artificial Sequence; identical to SEQ ID NO: 78367
  derived and/or modified CDS sequence (opt1) from neuraminidase__InfluenzaA__ABA12754

SEQ ID NO: 78416 - RNA, 1410 nt, Artificial Sequence; identical to SEQ ID NO: 78370
  derived and/or modified CDS sequence (opt1) from neuraminidase__InfluenzaA__ABA12765

SEQ ID NO: 78417 - RNA, 1410 nt, Artificial Sequence; identical to SEQ ID NO: 78142
  derived and/or modified CDS sequence (opt1) from neuraminidase__InfluenzaA__ABA12776

SEQ ID NO: 78418 - RNA, 1410 nt, Artificial Sequence; identical to SEQ ID NO: 78351
  derived and/or modified CDS sequence (opt1) from neuraminidase__InfluenzaA__ABA12786

SEQ ID NO: 78419 - RNA, 1410 nt, Artificial Sequence; identical to SEQ ID NO: 78370
  derived and/or modified CDS sequence (opt1) from neuraminidase__InfluenzaA__ABA18029

SEQ ID NO: 78420 - RNA, 1413 nt, Artificial Sequence
  derived and/or modified CDS sequence (opt1) from neuraminidase__InfluenzaA__ABA18040
augaaccccaaccagaagaucaucaccaucggcagcaucuccaucgccaucgggaucaucagccugaugcuccagaucggcaacaucaucuccaucugggccagccacuccauccagaccgggagccagaaccacacgggcgugugcaaccagcgcaucaucaccuacgagaacuccaccugggucaaccacaccuacgugaacaucaacaacacgaacgugaucgcggggaaggacaagaccagcgucacccuggccggcaacuccagccugugcuccaucagcggcugggccaucuacaccaaggacaacuccauccggaucgggagcaagggcgacguguucgugauccgcgagccguucaucuccugcagccaccucgagugccggacguucuuccugacccagggggcccugcucaacgacaagcacuccaacggcaccgucaaggaccgcagccccuaccgggcccugauguccugcccccugggggaggcgcccagcccguacaacagcaaguucgaguccguggccuggagcgccuccgccugccacgacggcaugggcuggcucaccaucgggaucagcggccccgacaacggggcgguggccguccugaaguacaacggcaucaucacggagaccaucaaguccuggaagaagcagauccugcgcacccaggagagcgagugcgugugcgugaacggcuccugcuucaccaucaugacggacgggcccagcaacggcgccgccuccuacaagaucuucaagaucgagaaggggaaggucaccaagagcaucgagcucaacgcccccaacuuccacuacgaggagugcuccugcuacccggacaccggcaccgugaugugcgugugccgggacaacuggcacgggagcaaccgccccugggucuccuucaaccagaaccuggacuaccagaucggcuacaucugcagcggcguguucggggacaacccccggcccaaggacggcgagggguccugcaacccggugacggucgacggcgcgaacggggugaagggcuucagcuacaaguacggcaacgggguguggaucggccgcaccaaguccaaccggcugcgcaagggguucgagaugaucugggaccccaacggcuggaccgacaccgacagcgacuucuccgucaagcaggacgugguggccaucacggacuggagcggguacagcggcuccuucguccagcaccccgagcucaccggccuggacugcauccggcccugcuucuggguggagcugguccgcgggcucccgaaggagaacaccaccaucuggacgagcggcuccagcaucuccuucugcggggugaacagcgacaccgccaacugguccuggcccgacggcgccgagcugcccuucaccaucgacaaguga

SEQ ID NO: 78421 - RNA, 1410 nt, Artificial Sequence
  derived and/or modified CDS sequence (opt1) from neuraminidase__InfluenzaA__ABA18126
augaaccccaaccagaagaucaucaccaucggcagcgugucccugaccaucgccacgaucugcuuccucaugcagaucgccauccuggucaccaccgugacccugcacuucaagcaguacgagugcaacagcccgcccaacaaccaggugaugcucugcgagcccacgaucaucgagcgcaacaucaccgagaucgucuaccugaccaacaccacgaucgagaaggagaucugccccaagcuggcggaguaccggaacugguccaagccgcagugcaacaucaccggguucgcccccuucagcaaggacaacuccauccgccucagcgccggcggggacaucugggugacccgggagcccuacguguccugcgaccccgacaagugcuaccaguucgcccugggccaggggaccacgcugaacaacggccacagcaacgacaccguccacgaccgcaccccguaccggacccuccugaugaacgagcugggcgugcccuuccaccucgggacgaagcaggucugcaucgccugguccagcuccagcugccacgacggcaaggcguggcugcacgugugcgugaccggggacgacgagaacgccaccgccuccuucaucuacaacggccgccugguggacagcaucggguccuggagcaagaagauccuccggacccaggaguccgagugcgucugcaucaacggcacgugcaccguggugaugaccgacggcagcgccuccgggaaggcggacaccaagauccuguucaucgaggagggcaagaucguccacaucagcacgcugagcggguccgcccagcacguggaggagugcagcugcuacccccgcuaccccggcgugcggugcgucugccgcgacaacuggaagggcuccaaccggccgaucguggacaucaacgugaaggacuacagcaucgucuccagcuacgugugcuccgggcucgugggcgacacgccccgcaagaacgacagcuucuccagcucccacugccuggaccccaacaacgaggagggcgggcacggggucaagggcugggccuucgacgacggcaacgacauguggauggggcggaccaucagcgagaagcugcgcuccggcuacgagaccuucaaggugaucgagggguggagcaagcccaacuccaagcuccagaucaaccggcaggucaucguggagcgcggcaaccggagcggguacuccggcaucuucagcguggagggcaaguccugcaucaaccgcugcuucuacgucgagcugauccgggggcgcaaggaggagaccgaggugugguggaccagcaacagcaucguggucuucugcggcaccuccgggaccuacggcacggggagcuggccggacggcgccgacaucaaccugaugcccaucuga

SEQ ID NO: 78422 - RNA, 1413 nt, Artificial Sequence; identical to SEQ ID NO: 78410
  derived and/or modified CDS sequence (opt1) from neuraminidase__InfluenzaA__ABA18148

SEQ ID NO: 78423 - RNA, 1410 nt, Artificial Sequence
  derived and/or modified CDS sequence (opt1) from neuraminidase__InfluenzaA__ABA18159
augaaccccaaccagaagaucaucaccaucggcagcgugucccugaccaucagcacgaucugcuucuucaugcagaucgccauccucaucaccaccgucacccugcacuucaagcaguacgaguucaacuccccgcccaacaaccaggugaugcugugcgagcccacgaucaucgagcgcaacaucaccgagaucguguaccucaccaacaccacgaucgagaaggagaucugccccaagcuggccgaguaccggaacuggagcaagccgcagugcgacaucaccggguucgcgcccuucuccaaggacaacagcauccgccuguccgccggcggggacaucugggucacccgggagcccuacgugagcugcgaccccgacaagugcuaccaguucgcccucggccaggggaccacgcugaacaacgugcacuccaacgacaccguccacgaccgcaccccguaccggacccugcucaugaacgagcugggcgugcccuuccaccugggcacgaagcaggucugcaucgccuggagcuccagcuccugccacgacgggaaggccuggcuccacgugugcgugaccggcgacgacaagaacgcgaccgccagcuucaucuacaacgggcgccugguggacuccaucgucagcugguccaaggagauccugcggacccaggagagcgagugcgugugcaucaacggcacgugcgccguggucaugaccgacggguccgccagcggcaaggcggacaccaagauccucuucaucgaggagggcaagaucgugcacaccagcaagcuguccgggagcgcccagcacguggaggagugcuccugcuacccccgcuaccccggcauccggugcgucugccgcgacaacuggaaggggagcaaccggccgaucguggacgugaacaucaaggacuacuccaucgucagcuccuacgugugcagcggccuggugggcgacacgccccgcaagaacgacuccagcuccagcucccacugccucgaccccaacaacgaggagggcgggcacggggucaagggcugggccuucgacgacgggaacgacguguggaugggccggaccaucagcgagaagcugcgcuccggcuacgagaccuucaaggucaucgagggguggagcaaccccaacuccaagcugcagaucaaccgccaggugaucguggaccggggcaaccggagcggguacuccggcaucuucagcgucgagggcaagagcugcaucaaccgcugcuucuacguggagcucauccgggggcgcaaggaggagaccgaggugcuguggacguccaacagcaucgucguguucugcggcaccuccgggaccuacggcaccgggagcuggccggacggcgccgacaucaaccugaugcccaucuga

SEQ ID NO: 78424 - RNA, 1410 nt, Artificial Sequence; identical to SEQ ID NO: 78351
  derived and/or modified CDS sequence (opt1) from neuraminidase__InfluenzaA__ABA26703

SEQ ID NO: 78425 - RNA, 1410 nt, Artificial Sequence; identical to SEQ ID NO: 78351
  derived and/or modified CDS sequence (opt1) from neuraminidase__InfluenzaA__ABA26714

SEQ ID NO: 78426 - RNA, 1410 nt, Artificial Sequence; identical to SEQ ID NO: 78351
  derived and/or modified CDS sequence (opt1) from neuraminidase__InfluenzaA__ABA26736

SEQ ID NO: 78427 - RNA, 1410 nt, Artificial Sequence; identical to SEQ ID NO: 78351
  derived and/or modified CDS sequence (opt1) from neuraminidase__InfluenzaA__ABA26747

SEQ ID NO: 78428 - RNA, 1410 nt, Artificial Sequence; identical to SEQ ID NO: 78351
  derived and/or modified CDS sequence (opt1) from neuraminidase__InfluenzaA__ABA26758

SEQ ID NO: 78429 - RNA, 1410 nt, Artificial Sequence; identical to SEQ ID NO: 78351
  derived and/or modified CDS sequence (opt1) from neuraminidase__InfluenzaA__ABA26769

SEQ ID NO: 78430 - RNA, 1410 nt, Artificial Sequence; identical to SEQ ID NO: 78351
  derived and/or modified CDS sequence (opt1) from neuraminidase__InfluenzaA__ABA26780

SEQ ID NO: 78431 - RNA, 1410 nt, Artificial Sequence; identical to SEQ ID NO: 78351
  derived and/or modified CDS sequence (opt1) from neuraminidase__InfluenzaA__ABA26791

SEQ ID NO: 78432 - RNA, 1410 nt, Artificial Sequence; identical to SEQ ID NO: 78351
  derived and/or modified CDS sequence (opt1) from neuraminidase__InfluenzaA__ABA26802

SEQ ID NO: 78433 - RNA, 1413 nt, Artificial Sequence
  derived and/or modified CDS sequence (opt1) from neuraminidase__InfluenzaA__ABA42250
augaaccccaaccagaagaucaucaccaucggcagcaucuccaucgccaucgggaucaucagccugaugcuccagaucggcaacaucaucuccaucugggccagccacuccauccagaccgggagccagaaccacacgggcaucugcaaccagcgcaucaucaccuacgagaacuccaccugggugaaccacaccuacgucaacaucaacaacacgaacgugguggcggggaaggacaagaccagcgucacccuggccggcaacuccagccugugcuccaucagcggcugggccaucuacaccaaggacaacuccauccggaucgggagcaagggcgacguguucgugauccgcgagccguucaucuccugcagccaccucgagugccggacguucuuccugacccagggggcccugcucaacgacaagcacuccaacggcaccgucaaggaccgcagccccuaccgggcccugauguccugcccccugggggaggcgcccagcccguacaacagcaaguucgaguccguggccuggagcgccuccgccugccacgacggcaugggcuggcucaccaucgggaucagcggccccgacaacggggcgguggccguccugaaguacaacggcaucaucacggagaccaucaaguccuggaagaagcgcauccugcggacccaggagagcgagugcgugugcgugaacggcuccugcuucaccaucaugacggacgggcccagcaacggcgccgccuccuacaagaucuucaagaucgagaaggggaaggucaccaagagcaucgagcucaacgcccccaacuuccacuacgaggagugcuccugcuacccggacaccggcaccgugaugugcgugugccgcgacaacuggcacgggagcaaccggcccugggucuccuucaaccagaaccuggacuaccagaucggcuacaucugcagcggcguguucggggacaacccccgccccaaggacggcaagggguccugcaacccggugacggucgacggcgcggacggggugaagggcuucagcuacaaguacggcgacgggguguggaucggccggaccaaguccaaccgccugcggaagggguucgagaugaucugggaccccaacggcuggaccgacaccgacagcgacuucuccgucaagcaggacgugguggccaucacggacuggagcggguacagcggcuccuucguccagcaccccgagcucaccggccuggacugcauccgccccugcuucuggguggagcugguccgggggcucccgcgcgagaacaccaccaucuggacgagcggcuccagcaucuccuucugcgggguggacagcgacaccgccaacugguccuggcccgacggcgccgagcugcccuucaccaucgacaaguga

SEQ ID NO: 78434 - RNA, 1413 nt, Artificial Sequence; identical to SEQ ID NO: 78420
  derived and/or modified CDS sequence (opt1) from neuraminidase__InfluenzaA__ABA42261

SEQ ID NO: 78435 - RNA, 1410 nt, Artificial Sequence
  derived and/or modified CDS sequence (opt1) from neuraminidase__InfluenzaA__ABA42272
augaaccccaaccagaagaucaucaccaucggcagcgugucccugaccaucagcacgaucugcuucuucaugcagaucgccauccucaucaccaccgucacccugcacuucaagcaguacgaguucaacuccccgcccaacaaccaggugaugcugugcgagcccacgaucaucgagcgcaacaucaccgagaucguguaccucaccaacaccacgaucgagaaggagaucugccccaagcuggccgaguaccggaacuggagcaagccgcagugcgacaucaccggguucgcgcccuucuccaaggacaacagcauccgccuguccgccggcggggacaucugggucacccgggagcccuacgugagcugcgaccccgacaagugcuaccaguucgcccucggccaggggaccacgcugaacaacgugcacuccaacgacaccguccacgaccgcaccccguaccggacccugcucaugaacgagcugggcgugcccuuccaccugggcacgaagcaggucugcaucgccuggagcuccagcuccugccacgacgggaaggccuggcuccacgugugcgugaccggcgacgacaagaacgcgaccgccagcuucaucuacaacgggcgccugguggacuccaucgucagcugguccaaggacauccugcggacccaggagagcgagugcgugugcaucaacggcacgugcaccguggucaugaccgacggguccgccagcggcaaggccgacaccaagauccucuucaucgaggagggcaagaucgugcacacgagcacccuguccgggagcgcgcagcacguggaggagugcuccugcuacccccgcuaccccggcguccggugcgugugccgcgacaacuggaaggggagcaaccggccgaucguggacaucaacaucaaggacuacuccaucgucagcuccuacgugugcagcggccuggugggcgacacgccccgcaagaacgacuccagcuccagcucccacugccucgaccccaacaacgaggagggcgggcacggggucaagggcugggccuucgacgacgggaacgacguguggaugggccggaccaucaacgagaagcugcgccugggcuacgagaccuucaaggucaucgagggguggagcaaccccaacuccaagcuccagaucaaccgccaggugaucguggagcggggcaaccggagcggguacuccggcaucuucagcgucgaggggaaguccugcaucaaccgcugcuucuacguggagcugauccggggccgcaaggaggagaccgaggugcuguggaccagcaacagcaucgucguguucugcggcaccuccgggacguacggcaccgggagcuggccggacggcgccgacaucaaccucaugcccaucuga

SEQ ID NO: 78436 - RNA, 1410 nt, Artificial Sequence; identical to SEQ ID NO: 78351
  derived and/or modified CDS sequence (opt1) from neuraminidase__InfluenzaA__ABA42294

SEQ ID NO: 78437 - RNA, 1410 nt, Artificial Sequence; identical to SEQ ID NO: 78178
  derived and/or modified CDS sequence (opt1) from neuraminidase__InfluenzaA__ABA42305

SEQ ID NO: 78438 - RNA, 1410 nt, Artificial Sequence; identical to SEQ ID NO: 78188
  derived and/or modified CDS sequence (opt1) from neuraminidase__InfluenzaA__ABA42316

SEQ ID NO: 78439 - RNA, 1413 nt, Artificial Sequence
  derived and/or modified CDS sequence (opt1) from neuraminidase__InfluenzaA__ABA42327
augaaccccaaccagaagaucaucaccaucggcagcaucuccaucgccaucgggaucaucagccugaugcuccagaucggcaacaucaucuccaucugggccagccacuccauccagaccgggagccagaaccacacgggcaucugcaaccagcgcaucaucaccuacgagaacuccaccugggugaaccacaccuacgucaacaucaacaacacgaacgugguggcggggaaggacaagaccagcgucacccuggccggcaacuccagccugugcuccaucagcggcugggccaucuacaccaaggacaacuccauccggaucgggagcaagggcgacguguucgugauccgcgagccguucaucuccugcagccaccucgagugccggacguucuuccugacccagggggcccugcucaacgacaagcacuccaacggcaccgucaaggaccgcagccccuaccgggcccugauguccugcccccugggggaggcgcccagcccguacaacagcaaguucgaguccguggccuggagcgccuccgccugccacgacggcaugggcuggcucaccaucgggaucagcggccccgacaacggggcgguggccguccugaaguacaacggcaucaucacggagaccaucaaguccuggaagaagcgcauccugcggacccaggagagcgagugcgugugcgugaacggcuccugcuucaccaucaugacggacgggcccagcaacggcgccgccuccuacaagaucuucaagaucgagaaggggaaggucaccaagagcaucgagcucaacgcccccaacuuccacuacgaggagugcuccugcuacccggacaccggcaccgugaugugcgugugccgcgacaacuggcacgggagcaaccggcccugggucuccuucaaccagaaccuggacuaccagaucggcuacaucugcagcggcguguucggggacaacccccgccccaaggacggcgagggguccugcaacccggugacggucgacggcgcggacggggugaagggcuucagcuacaaguacggcaacgggguguggaucggccggaccaaguccaaccgccugcggaagggguucgagaugaucugggaccccaacggcuggaccgacaccgacagcgacuucuccgucaagcaggacgugguggccaucacggacuggagcggguacagcggcuccuucguccagcaccccgagcucaccggccuggacugcauccgccccugcuucuggguggagcugguccgggggcucccgcgcgagaacaccaccaucuggacgagcggcuccagcaucuccuucugcggggugaacagcgacaccgccaacugguccuggcccgacggcgccgagcugcccuucaccaucgacaaguga

SEQ ID NO: 78440 - RNA, 1410 nt, Artificial Sequence; identical to SEQ ID NO: 78173
  derived and/or modified CDS sequence (opt1) from neuraminidase__InfluenzaA__ABA42338

SEQ ID NO: 78441 - RNA, 1410 nt, Artificial Sequence
  derived and/or modified CDS sequence (opt1) from neuraminidase__InfluenzaA__ABA42349
augaaccccaaccagaagaucaucaccaucggcagcgugucccugaccaucgccacgaucugcuuccucaugcagaucgccauccuggucaccaccgugacccugcacuucaagcaguacgagugcgacagcccgcccaacaaccaggugaugcucugcgagcccacgaucaucgagcgcaacaucaccgagaucgucuaccugaccaacaccacgaucgagaaggagaucugccccaagcuggcggaguaccggaacugguccaagccgcagugcaacaucaccggguucgcccccuucagcaaggacaacuccauccgccucagcgccggcggggacaucugggugacccgggagcccuacguguccugcgaccccgacaagugcuaccaguucgcccugggccaggggaccacgcugaacaacggccacagcaacgacaccguccacgaccgcaccccguaccggacccuccugaugaacgagcugggcgugcccuuccaccucgggacgcgccaggugugcaucgccugguccagcuccagcugccacgacggcaaggcguggcugcacgucugcgugaccggggacgacgagaacgccaccgccuccuucaucuacaacggcaagcugguggacagcaucggguccuggagcaagaagauccuccggacccaggaguccgagugcgucugcaucaacggcacgugcaccguggugaugaccgacggcagcgccuccgggaaggcggacaccaagauccuguucaucgaggagggcaagaucguccacaucagcacgcugagcggguccgcccagcacguggaggagugcagcugcuacccccgcuaccccggcgugcggugcgucugccgcgacaacuggaagggcuccaaccggccgaucguggacaucaacgugaaggacuacagcaucgucuccagcuacgugugcuccgggcucgugggcgacacgccccgcaagaacgacagcuucuccagcucccacugccuggaccccaacaacgaggagggcgggcacggggucaagggcugggccuucgacgacggcaacgacguguggauggggcggaccaucagcgagaagcugcgcuccggcuacgagaccuucaaggucaucgagggguggagcaagcccaacuccaagcuccagaucaaccgccaggugaucguggagcggggcaaccggagcggguacuccggcaucuucagcgucgagggcaaguccugcaucaaccgcugcuucuacguggagcugauccgggggcgcaaggaggagaccgaggugugguggaccagcaacagcaucgucguguucugcggcaccuccgggaccuacggcacggggagcuggccggacggcgccgacaucaaccugaugcccaucuga

SEQ ID NO: 78442 - RNA, 1410 nt, Artificial Sequence; identical to SEQ ID NO: 78178
  derived and/or modified CDS sequence (opt1) from neuraminidase__InfluenzaA__ABA42360

SEQ ID NO: 78443 - RNA, 1410 nt, Artificial Sequence; identical to SEQ ID NO: 78173
  derived and/or modified CDS sequence (opt1) from neuraminidase__InfluenzaA__ABA42371

SEQ ID NO: 78444 - RNA, 1410 nt, Artificial Sequence; identical to SEQ ID NO: 78188
  derived and/or modified CDS sequence (opt1) from neuraminidase__InfluenzaA__ABA42382

SEQ ID NO: 78445 - RNA, 1410 nt, Artificial Sequence; identical to SEQ ID NO: 78173
  derived and/or modified CDS sequence (opt1) from neuraminidase__InfluenzaA__ABA42393

SEQ ID NO: 78446 - RNA, 1410 nt, Artificial Sequence
  derived and/or modified CDS sequence (opt1) from neuraminidase__InfluenzaA__ABA42404
augaaccccaaccagaagaucaucaccaucggcagcgugucccugaccaucgccacgaucugcuuccucaugcagaucgccauccuggucaccaccgugacccugcacuucaagcaguacgagugcaacagcccgcccaacaaccaggugaugcucugcgagcccgcgaucaucgagcgcaacaucacggagaucgucuaccugaccaacaccaccaucgagaaggagaucugccccaagcuggccgaguaccggaacugguccaagccgcagugcaacaucacgggguucgcccccuucagcaaggacaacuccauccgccucagcgccggcggggacaucugggugacccgggagcccuacguguccugcgaccccgacaagugcuaccaguucgcccugggccaggggaccacccugaacaacggccacagcaacgacacgguccacgaccgcaccccguaccggacccuccugaugaacgagcugggcgugcccuuccaccucgggacccgccaggugugcaucgcgugguccagcuccagcugccacgacggcaaggccuggcugcacgucugcgugacgggggacgacgagaacgccaccgccuccuucaucuacaacggccggcugguggacagcaucggguccuggagcaagaagauccuccgcacccaggaguccgagugcgucugcaucaacgggaccugcacgguggugaugaccgacggcagcgcguccgggaaggccgacaccaagauccuguucaucgaggagggcaagaucgucaacaucagcacccugcccgggagcgcccagcacguggaggagugcuccugcuacccccgguacccgggcgugcgcugcgucugccgggacaacuggaagggcagcaaccgccccaucguggacaucaacgugaaggacuacuccaucgucagcuccuacgugugcagcgggcucgugggcgacacgccccggaagaacgacuccuucagcuccagccacugccuggaccccaacaacgaggagggcggccacggggucaagggcugggccuucgacgacggcaacgacguguggauggggcgcaccaucuccgagaagcugcggagcggcuacgagaccuucaaggucaucgaggggugguccaagccgaacagcaagcuccagaucaaccgccaggugaucguggagcggggcaaccgcuccggguacagcggcaucuucuccgucgagggcaagagcugcaucaaccggugcuucuacguggagcugauccgcgggcggaaggaggagaccgaggugugguggacguccaacagcaucgucguguucugcggcaccagcgggaccuacggcaccggguccuggcccgacggcgccgacaucaaccugaugcccaucuga

SEQ ID NO: 78447 - RNA, 1410 nt, Artificial Sequence; identical to SEQ ID NO: 78188
  derived and/or modified CDS sequence (opt1) from neuraminidase__InfluenzaA__ABA42415

SEQ ID NO: 78448 - RNA, 1410 nt, Artificial Sequence; identical to SEQ ID NO: 78195
  derived and/or modified CDS sequence (opt1) from neuraminidase__InfluenzaA__ABA42446

SEQ ID NO: 78449 - RNA, 1410 nt, Artificial Sequence
  derived and/or modified CDS sequence (opt1) from neuraminidase__InfluenzaA__ABA42457
augaaccccaaccagaagaucaucaccaucggcagcgugucccugaccaucgccacgaucugcuuccucaugcagaucgccauccuggucaccaccgugacccugcacuucaagcaguacgagugcaacagcccgcccaacaaccaggugaugcucugcgagcccacgaucaucgagcgcaacaucaccgagaucgucuaccugaccaacaccacgaucgagaaggagaucugccccaagcuggcggaguaccggaacugguccaagccgcagugcaacaucaccggguucgcccccuucagcaaggacaacuccauccgccucagcgccggcggggacaucugggugacccgggagcccuacguguccugcgaccccgacaagugcuaccaguucgcccugggccaggggaccacgcugaacaacggccacagcaacgacaccguccacgaccgcaccccguaccggacccuccugaugaacgagcugggcgugcccuuccaccucgggacgcgccaggugugcaucgccugguccagcuccagcugccacgacggcaaggcguggcugcacgucugcgugaccggggacgacgagaacgccaccgccuccuucaucuacaacggccggcugguggacagcaucggguccuggagcaagaagauccuccgcacccaggaguccgagugcgucugcaucaacggcacgugcaccguggugaugaccgacggcagcgccuccgggaaggcggacaccaagauccuguucaucgaggagggcaagaucguccacaucagcacgcugagcggguccgcccagcacguggaggagugcagcugcuacccccgguaccccggcgugcgcugcgucugccgggacaacuggaagggcuccaaccgcccgaucguggacaucaacgugaaggacuacagcaucgucuccagcuacgugugcuccgggcucgugggcgacacgccccggaagaacgacagcuucuccagcucccacugccuggaccccaacaacgaggagggcgggcacggggucaagggcugggccuucgacgacggcaacgacguguggauggggcgcaccaucagcgagaagcugcgguccggcuacgagaccuucaaggucaucgagggguggagcaagcccaacuccaagcuccagaucaaccgccaggugaucguggagcggggcaaccgcagcggguacuccggcaucuucagcgucgaguccaagagcugcaucaaccggugcuucuacguggagcugauccgcggccggaaggaggagaccgaggugugguggaccagcaacuccaucgucguguucugcgggaccagcggcaccuacgggacgggcuccuggccggacggggccgacaucaaccugaugcccaucuga

SEQ ID NO: 78450 - RNA, 1410 nt, Artificial Sequence; identical to SEQ ID NO: 78195
  derived and/or modified CDS sequence (opt1) from neuraminidase__InfluenzaA__ABA42468

SEQ ID NO: 78451 - RNA, 1410 nt, Artificial Sequence
  derived and/or modified CDS sequence (opt1) from neuraminidase__InfluenzaA__ABA42479
augaaccccaaccagaagaucaucaccaucggcagcgugucccugaccaucgccacgaucugcuuccucaugcagaucgccauccuggucaccaccgugacccugcacuucaagcaguacgagugcgacagcccgcccaacaaccaggugaugcucugcgagcccacgaucaucgagcgcaacaucaccgagaucgucuaccugaccaacaccacgaucgagaaggagaucugccccaagcuggcggaguaccggaacugguccaagccgcagugcaacaucaccggguucgcccccuucagcaaggacaacuccauccgccucagcgccggcggggacaucugggugacccgggagcccuacguguccugcgaccccgacaagugcuaccaguucgcccugggccaggggaccacgcugaacaacggccacagcaacgacaccguccacgaccgcaccccguaccggacccuccugaugaacgagcugggcgugcccuuccaccucgggacgcgccaggugugcaucgccugguccagcuccagcugccacgacggcaaggcguggcugcacgucugcgugaccggggacgacgagaacgccaccgccuccuucaucuacaacggccggcugguggacagcaucggguccuggagcaagaagauccuccgcacccaggaguccgagugcgucugcaucaacggcacgugcaccguggugaugaccgacggcagcgccuccgggaaggcggacaccaagauccuguucaucgaggagggcaagaucguccacaucagcacgcugagcggguccgcccagcacguggaggagugcagcugcuacccccgguaccccggcgugcgcugcgucugccgggacaacuggaagggcuccaaccgcccgaucguggacaucaacgugaaggacuacagcaucgucuccagcuacgugugcuccgggcucgugggcgacacgccccggaagaacgacagcuucuccagcucccacugccuggaccccaacaacgaggacgggggccacggggucaagggcugggccuucgacgacggcaacgacguguggauggggcgcaccaucagcgagaagcugcgguccggcuacgagaccuucaaggucaucgagggguggagcaagcccaacuccaagcuccagaucaaccgccaggugaucguggagcggggcaaccgcagcggguacuccggcaucuucagcgucgagggcaaguccugcaucaaccggugcuucuacguggagcugauccgcgggcggaaggaggagaccgaggugugguggaccagcaacagcaucgucguguucugcggcaccuccgggaccuacggcacggggagcuggccggacggcgccgacaucaaccugaugcccaucuga

SEQ ID NO: 78452 - RNA, 1410 nt, Artificial Sequence
  derived and/or modified CDS sequence (opt1) from neuraminidase__InfluenzaA__ABA42490
augaaccccaaccagaagaucaucaccaucggcagcgugucccugaccaucgccacgaucugcuuccucaugcagaucgccauccuggucaccaccgugacccugcacuucaagcaguacgagugcaacagcccgcccaacaaccaggugaugcucugcgagcccacgaucaucgagcgcaacaucaccgagaucgucuaccugaccaacaccacgaucgagaaggagaucugccccaagcuggcggaguaccggaacugguccaagccgcagugcaacaucaccggguucgcccccuucagcaaggacaacuccauccgccucagcgccggcggggacaucugggugacccgggagcccuacguguccugcgaccccgacaagugcuaccaguucgcccugggccaggggaccacgcugaacaacggccacagcaacgacaccguccacgaccgcaccccguaccggacccuccugaugaacgagcugggcgugcccuuccaccucgggacgcgccaggugugcaucgccugguccagcuccagcugccacgacggcaaggcguggcugcacgucugcgugaccggggacgacgagaacgccaccgccuccuucaucuacaacggccggcugguggacagcaucggguccuggagcaagaagauccuccgcacccaggaguccgagugcgucugcaucaacggcacgugcaccguggugaugaccgacggcagcgccuccgggaaggcggacaccaagauccuguucaucgaggagggcaagaucguccacaucagcaagcugagcggguccgcccagcacguggaggagugcagcugcuacccccgguaccccggcgugcgcugcgucugccgggacaacuggaagggcuccaaccgcccgaucguggacaucaacgugaaggacuacagcaucgucuccagcuacgugugcuccgggcucgugggcgacacgccccggaagaacgacagcuucuccagcucccacugccuggaccccaacaacgaggagggcgggcacggggucaagggcugggccuucgacgacggcaacgacguguggauggggcgcaccaucagcgagaagcugcgguccggcuacgagaccuucaaggucaucaagggguggagcaagcccaacuccaagcuccagaucaaccgccaggugaucguggagcggggcaaccgcagcggguacuccggcaucuucagcgucgagggcaaguccugcaucaaccggugcuucuacguggagcugauccgcgggcggaaggaggagaccgaggugugguggacgagcaacagcaucgucguguucugcggcaccuccgggaccuacggcaccgggagcuggccggacggcgccgacaucaaccugaugcccaucuga

SEQ ID NO: 78453 - RNA, 1410 nt, Artificial Sequence; identical to SEQ ID NO: 78195
  derived and/or modified CDS sequence (opt1) from neuraminidase__InfluenzaA__ABA42501

SEQ ID NO: 78454 - RNA, 1410 nt, Artificial Sequence
  derived and/or modified CDS sequence (opt1) from neuraminidase__InfluenzaA__ABA42512
augaaccccaaccagaagaucaucaccaucggcagcgugucccugaccaucgccacgaucugcuuccucaugcagaucgccauccuggucaccaccgugacccugcacuucaagcaguacgagugcaacagcccgcccaacaaccaggugaugcucugcgagcccacgaucaucgagcgcaacaucaccgagaucgucuaccccaccaacaccacgaucgagaaggagaucugcccgaagcuggcggaguaccggaacugguccaagccccagugcaacaucaccggguucgcccccuucagcaaggacaacuccauccgccugagcgccggcggggacaucugggugacccgggagcccuacguguccugcgacccggacaagugcuaccaguucgcccucggccaggggaccacgcugaacaacggccacagcaacgacaccguccacgaccgcacccccuaccggacccugcucaugaacgagcugggcgugcccuuccaccuggggacgaagcaggucugcaucgccugguccagcuccagcugccacgacggcaaggcguggcuccacgugugcgugaccggggacgacgagaacgccaccgccuccuucaucuacaacggccgccugguggacagcaucggguccuggagcaagaagauccugcggacccaggaguccgagugcgucugcaucaacggcacgugcaccguggugaugaccgacggcagcgccuccgggaaggcggacaccaagauccucuucaucgaggagggcaagaucguccacacgagcagccuguccgggagcgcccagcacguggaggagugcuccugcuacccccgcuacccgggcgugcggugcgucugccgcgacaacuggaagggcagcaaccggcccaucguggacaucaacgugaaggacuacuccaucgucagcuccuacgugugcagcgggcuggugggcgacacgccccgcaagaacgacuccagcuccagcucccacugccucgaccccaacaacgaggagggcgggcacggggucaagggcugggccuucgacgacggcaacgacguguggauggggcggaccaucagcgagaagcugcgcuccggcuacgagaccuucaaggucaucgagggguggagcaagccgaacuccaagcugcagaucaaccgccaggugaucguggaccggggcaaccggagcggguacuccggcaucuucagcgucgagggcaagagcugcaucaaccgcugcuucuacguggagcucauccgggggcgcaagcaggagaccgaggugcuguggaccuccaacagcaucgucguguucugcggcaccuccgggaccuacggcacggggagcuggcccgacggcgccgacaucaaccugaugcccaucuga

SEQ ID NO: 78455 - RNA, 1410 nt, Artificial Sequence; identical to SEQ ID NO: 78085
  derived and/or modified CDS sequence (opt1) from neuraminidase__InfluenzaA__ABA42523

SEQ ID NO: 78456 - RNA, 1410 nt, Artificial Sequence; identical to SEQ ID NO: 78085
  derived and/or modified CDS sequence (opt1) from neuraminidase__InfluenzaA__ABA42534

SEQ ID NO: 78457 - RNA, 1410 nt, Artificial Sequence; identical to SEQ ID NO: 78277
  derived and/or modified CDS sequence (opt1) from neuraminidase__InfluenzaA__ABA42545

SEQ ID NO: 78458 - RNA, 1410 nt, Artificial Sequence
  derived and/or modified CDS sequence (opt1) from neuraminidase__InfluenzaA__ABA42556
augaaccccaaccagaagaucaucaccaucggcagcgugucccugaccaucgccacgaucugcuuccucaugcagaucgccauccuggucaccaccgugacccugcacuucaagcaguacgagugcaacagcccgcccaacaaccaggugaugcucugcgagcccacgaucaucgagcgcaacaucaccgagaucgucuaccugaccaacaccacgaucgagaaggagaucugccccaagcuggcggaguaccggaacugguccaagccgcagugcaacaucaccggguucgcccccuucagcaaggacaacuccauccgccucagcgccggcggggacaucugggugacccgggagcccuacguguccugcgaccccgacaagugcuaccaguucgcccugggccaggggaccacgcugaacaacggccacagcaacgacaccguccacgaccgcaccccguaccggacccuccugaugaacgagcugggcgugcccuuccaccucgggacgaagcaggucugcaucgccugguccagcuccagcugccacgacggcaaggcguggcugcacgugugcgugaccggggacgacgagaacgccaccgccuccuucaucuacaacggccgccugguggacagcaucggguccuggagcaagaagauccuccggacccaggaguccgagugcgucugcaucaacggcacgugcaccguggugaugaccgacggcagcgccuccgggaaggcggacaccaagauccuguucaucgaggagggcaagaucguccacacgagccugcucagcggguccgcccagcacguggaggagugcagcugcuacccccgcuaccccggcgugcggugcgucugccgcgacaacuggaagggcuccaaccggccgaucguggacaucaacgugaaggacuacagcaucgucuccagcuacgugugcuccgggcuggugggcgacacgccccgcaagaacgacagcuccagcuccagccacugccuggaccccaacaacgaggagggcgggcacggggucaagggcugggccuucgacgacggcaacgacguguggauggggcggaccaucuccgagaagcuccgcagcggcuacgagaccuucaaggucaucgaggggugguccaagcccaacagcaagcugcagaucaaccgccaggugaucguggaccggggcaaccgguccggguacagcggcaucuucuccgucgagggcaagagcugcaucaaccgcugcuucuacguggagcugauccgggggcgcaagcaggaggccgaggugcucuggaccagcaacuccaucgucguguucugcggcaccagcgggaccuacggcaccggguccuggccggacggcgccgacaucaaccugaugcccaucuga

SEQ ID NO: 78459 - RNA, 1410 nt, Artificial Sequence; identical to SEQ ID NO: 78085
  derived and/or modified CDS sequence (opt1) from neuraminidase__InfluenzaA__ABA42567

SEQ ID NO: 78460 - RNA, 1410 nt, Artificial Sequence
  derived and/or modified CDS sequence (opt1) from neuraminidase__InfluenzaA__ABA42931
augaaccccaaccagaagaucaucaccaucggcagcgugucccugaccaucgccacgaucugcagccucaugcagaucgccauccuggucaccaccgugacccugcacuucaagcaguacgagugcaacuccccgcccaacaaccaggugaugcucugcgagcccacgaucaucgagcgcaacaucaccgagaucgucuaccugaccaacaccacgaucgagaaggagaucugccccaagcuggcggaguaccggaacuggagcaagccgcagugcaacaucaccggguucgcccccuucuccaaggacaacagcauccgccucuccgccggcggggacaucugggugacccgggagcccuacgugagcugcgaccccgacaagugcuaccaguucgcccugggccaggggaccacgcugaacaacggccacuccaacgacaccguccacgaccgcaccccguaccggacccuccugaugaacgagcugggcgugcccuuccaccucgggacgaagcaggucugcaucgccuggagcuccagcuccugccacgacggcaaggcguggcugcacgugugcgugaccggggacgacgagaacgccaccgccagcuucaucuacaacggccgccugguggacuccaucgggagcugguccaagaagauccuccggacccaggagagcgagugcgucugcaucaacggcacgugcaccguggugaugaccgacggcuccgccagcgggaaggcggacaccaagauccuguucaucgaggagggcaagaucguccacacgagccugcucuccgggagcgcccagcacguggaggagugcuccugcuacccccgcuaccccggcgugcggugcgucugccgcgacaacuggaagggcagcaaccggccgaucguggacaucaacgugaaggacuacuccaucgucagcuccuacgugugcagcgggcuggugggcgacacgccccgcaagaacgacuccagcuccagcucccacugccuggaccccaacaacgaggagggcgggcacggggucaagggcugggccuucgacgacggcaacgacguguggauggggcggaccaucagcgagaagcuccgcuccggcuacgagaccuucaaggucaucgagggguggagcaagcccaacuccaagcugcagaucaaccgccaggugaucguggaccggggcaaccggagcggguacuccggcaucuucagcgucgagggcaagagcugcaucaaccgcugcuucuacguggagcugauccgggggcgcaagcaggagaccgaggugcucuggaccuccaacagcaucgucguguucugcggcaccuccgggaccuacggcacggggagcuggccggacggcgccgacaucaaccugaugcccaucuga

SEQ ID NO: 78461 - RNA, 1410 nt, Artificial Sequence; identical to SEQ ID NO: 78085
  derived and/or modified CDS sequence (opt1) from neuraminidase__InfluenzaA__ABA42942

SEQ ID NO: 78462 - RNA, 1410 nt, Artificial Sequence; identical to SEQ ID NO: 78085
  derived and/or modified CDS sequence (opt1) from neuraminidase__InfluenzaA__ABA42981

SEQ ID NO: 78463 - RNA, 1410 nt, Artificial Sequence; identical to SEQ ID NO: 78173
  derived and/or modified CDS sequence (opt1) from neuraminidase__InfluenzaA__ABA42992

SEQ ID NO: 78464 - RNA, 1413 nt, Artificial Sequence
  derived and/or modified CDS sequence (opt1) from neuraminidase__InfluenzaA__ABA43192
augaaccccaaccagaagaucaucaccaucggcagcaucuccaucgccaucgggaucaucagccugaugcuccagaucggcaacaucaucuccaucugggccagccacuccauccagaccgggagccagaaccacacgggcgugugcaaccagcgcaucaucaccuacgagaacuccaccugggucaaccacaccuacgugaacaucaacaacacgaacgugaucgcggggaaggacaagaccagcgucauccuggccggcaacuccagccugugcuccaucagcggcugggccaucuacaccaaggacaacuccauccggaucgggagcaagggcgacguguucgugauccgcgagccguucaucuccugcagccaccucgagugccggaccuucuuccugacgcagggggcccugcucaacgacaagcacuccaacggcaccgucaaggaccgcagccccuaccgggcccugauguccugcccccugggggaggcgcccagcccguacaacagcaaguucgaguccguggccuggagcgccuccgccugccacgacggcaugggcuggcucaccaucgggaucagcggccccgacaacggggcgguggccguccugaaguacaacggcaucaucaccgagacgaucaaguccuggaagaagcagauccugcgcacccaggagagcgagugcgugugcgugaacggcuccugcuucaccaucaugaccgacgggcccagcaacggcgccgccuccuacaagaucuucaagaucgagaaggggaaggucaccaagagcaucgagcucaacgcccccaacuuccacuacgaggagugcuccugcuacccggacacgggcaccgugaugugcgugugccgggacaacuggcacgggagcaaccgccccugggucuccuucaaccagaaccuggacuaccagaucggcuacaucugcagcggcguguucggggacaacccccggcccaaggacggcgagggguccugcaacccggugaccgucgacggcgcgaacggggugaagggcuucagcuacaaguacggcaacgggguguggaucggccgcacgaaguccaaccggcugcgcaagggguucgagaugaucugggaccccaacggcuggaccgacaccgacagcgacuucuccgucaagcaggacguggugagcaucaccgacuggagcggguacuccggcagcuucguccagcaccccgagcucacgggccuggacugcauccggcccugcuucuggguggagcugguccgcgggcucccgaaggagaacaccaccaucuggaccuccggcagcuccaucagcuucugcggggugaacuccgacacggccaacuggagcuggcccgacggcgccgagcugcccuucaccaucgacaaguga

SEQ ID NO: 78465 - RNA, 1410 nt, Artificial Sequence; identical to SEQ ID NO: 78370
  derived and/or modified CDS sequence (opt1) from neuraminidase__InfluenzaA__ABA43203

SEQ ID NO: 78466 - RNA, 1410 nt, Artificial Sequence
  derived and/or modified CDS sequence (opt1) from neuraminidase__InfluenzaA__ABA43339
augaaccccaaccagaagaucaucaccaucggcagcgugucccugagcaucgccaccaucugcuuccucaugcagaucgccauccuggucacgaccgugacccugcacuucaagcaguacgagugcuccagcccgcccaacaaccaggugaugcccugcgagcccaccaucaucgagcgcaacaucacggagaucgucuaccucaccaacaccaccaucgagaaggagaucugcccgaagcugguggaguaccggaacugguccaagccccagugcaagaucacgggguucgcgcccuucagcaaggacaacuccauccgccugagcgccggcggggacaucugggugacccgggagcccuacgucuccugcgacccgggcaagugcuaccaguucgcccucgggcagggcaccacccugaacaaccgccacagcaacgacacggugcacgaccggacccccuaccgcacccugcucaugaacgagcugggcgugcccuuccaccuggggaccaagcaggucugcauggccugguccagcuccagcugccacgacggcaaggccuggcuccacgugugcgugacggggcacgacgagaacgcgaccgccuccuucaucuacgacggccggcuggucgacagcaucggguccuggagcaagaacauccugcgcacccaggaguccgagugcgugugcaucaacgggaccugcacgguggucaugaccgacggcagcgccagcgagcgggccgacaccaagauccucuucaucgaggagggcaagaucgugcacaucagcccccuguccggcuccgcgcagcacguggaggagugcagcugcuacccgcgcuaccccgggguccggugcgugugccgcgacaacuggaagggcuccaaccggcccaucguggacaucaacgucaaggacuacagcaucguguccagcuacgugugcuccggccuggucggggacacgccccgcaagaacgaccggagcuccagcuccuacugccgcaacccgaacaacgagaagggcagccacggggugaagggcugggccuucgacgacgggaacgacgucuggaugggccggaccaucggcgaggagcuccgcuccggguacgagaccuucaaggugaucggcggguggagcacccccaacuccaagcugcagaucaaccgccaggugaucgucgacagcggcaaccgguccggguacagcggcaucuucagcguggagggcaaguccugcaucaaccggugcuucuacguggagcugauccgcgggcgcaagcaggagacccgggucugguggacgagcaacuccaucgugguguucugcggcaccagcgggaccuacggcaccggguccuggcccgacggcgccgacaucaaccucaugcccaucuga

SEQ ID NO: 78467 - RNA, 1410 nt, Artificial Sequence
  derived and/or modified CDS sequence (opt1) from neuraminidase__InfluenzaA__ABA54916
augaaccccaaccagaagaucaucaccaccggcagcaucugcauggugaucgggauggucucccugaugcuccagaucggcaacaucaucagcaucugggugucccacagcauccagacggggacccagcaccgcgccgagccgugcaaccgguccaucaucaacuacgagaacaacaccugggugaaccagaccuacgucaagaucagcaacacgaacuuccugaccgagaaggccguggcguccgugcgccuggucggcaacagcucccucugccccaucagcgggugggccguguacuccaaggacaacagcauccggaucggcuccaagggcgacguguucgucauccgcgagcccuucaucagcugcucccaccuggagugccggaccuucuuccugacccagggggcccuccugaacgacaagcacagcaacggcacggugaaggaccgcucccccuaccggacccugaugagcugcccggugggggaggcccccucccccuacaacagccgcuucgagagcgucgccugguccgcgagcgccugccacgacggcaccuccuggcucaccaucgggaucagcggccccgacaacggcgccguggccgugcugaaguacaacgggaucaucacggacaccaucaaguccuggcggaacaacauccugcgcgcgcaggagagcgagugcgccugcgucaacggcuccugcuucaccgugaugaccgacgggccgagcaacggccaggccuccuacaagaucuucaagaucgagaagggcaagguggucaagagcguggagcucaacgcccccaacuaccacuacgaggagugcuccugcuaccccgacgccggggagaucacgugcgugugccgggacaacuggcacggcagcaaccgccccugggucuccuucaaccagaaccuggaguaccagaucggguacaucugcagcggcguguucggggacaacccgcggcccaacgacggcaccggcuccugcgggcccgugagccccaacggcgcguacggggucaagggcuucuccuucaaguacgggaacggcguguggaucggccgcaccaagagcaccaacucccggagcggguucgagaugaucugggacccgaacggcuggacggggaccgacagcaacuucuccgucaagcaggacaucguggccaucaccgacuggagcggcuacuccgggagcuucgugcagcaccccgagcugaccggccucgacugcauccgccccugcuucugggucgagcugauccggggccgccccaaggaguccacgaucuggaccagcggguccagcaucuccuucugcggcgugaacagcgacaccguggggugguccuggccggacggcgccgagcugcccuucaccaucgacaaguga

SEQ ID NO: 78468 - RNA, 1413 nt, Artificial Sequence
  derived and/or modified CDS sequence (opt1) from neuraminidase__InfluenzaA__ABA87048
augaaccccaaccagaagaucaucaccaucggcagcaucuccaucgccaucgggaucaucagccugaugcuccagaucggcaacaucaucuccaucugggccagccacuccauccagaccgggagccagaaccacacgggcgugugcaaccagcgcaucaucaccuacgagaacuccaccugggucaaccacaccuacgugaacaucaacaacacgaacgugaucgcggggaaggacaagaccagcgucacccuggccggcaacuccagccugugcuccaucagcggcugggccaucuacaccaaggacaacuccauccggaucgggagcaagggcgacguguucgugauccgcgagccguucaucuccugcagccaccucgagugccggacguucuuccugacccagggggcccugcucaacgacaagcacuccaacggcaccgucaaggaccgcagccccuaccgggcccugauguccugcccccugggggaggcgcccagcccguacaacagcaaguucgaguccguggccuggagcgccuccgccugccacgacggcaugggcuggcucaccaucgggaucagcggccccgacaacggggcgguggccguccugaaguacaacggcaucaucacggagaccaucaaguccuggaagaagcagauccugcgcacccaggagagcgagugcgugugcgugaacggcuccugcuucaccaucaugacggacgggcccagcaaccgggccgccuccuacaagaucuucaagaucgagaagggcaaggucaccaagagcguggagcucaacgcccccaacuuccacuacgaggagugcuccugcuacccggacaccgggaccgugaugugcgucugccgcgacaacuggcacggcagcaaccggcccuggguguccuucaaccagaaccuggacuaccagaucggguacaucugcagcggcguguucggcgacaacccccgccccaaggacggggagggcuccugcaacccggucacgguggacggggcgaacggcgugaagggguucagcuacaaguacggcaacggcgucuggaucgggcggaccaaguccaaccgccugcggaagggcuucgagaugaucugggaccccaacggguggaccgacaccgacagcgacuucuccgugaagcaggacguggucgccaucacggacuggagcggcuacagcggguccuucgugcagcaccccgagcucaccggccuggacugcauccgccccugcuucugggucgagcuggugcggggccucccgaaggagaacaccaccaucuggacgagcggguccagcaucuccuucugcggcgugaacagcgacaccgccaacugguccuggcccgacggggccgagcugcccuucaccaucgacaaguga

SEQ ID NO: 78469 - RNA, 1413 nt, Artificial Sequence
  derived and/or modified CDS sequence (opt1) from neuraminidase__InfluenzaA__ABA87060
augaaccccaaccagaagaucaucaccaucggcagcaucuccaucgccaucgggaucaucagccugaugcuccagaucggcaacaucaucuccaucugggccagccacuccauccagaccgggagccagaaccacacgggcaucugcaaccagcgcaucaucaccuacgagaacuccaccugggugaaccacaccuacgucaacaucaacaacacgaacgugguggcggggaaggacaagaccagcgucacccuggccggcaacuccagccugugcuccaucagcggcugggccaucuacaccaaggacaacuccauccggaucgggagcaagggcgacguguucgugauccgcgagccguucaucuccugcagccaccucgagugccggacguucuuccugacccagggggcccugcucaacgacaagcacuccaacggcaccgucaaggaccgcagccccuaccgggcccugauguccugcccccugggggaggcgcccagcccguacaacagcaaguucgaguccguggccuggagcgccuccgccugccacgacggcaugggcuggcucaccaucgggaucagcggccccgacaacggggcgguggccguccugaaguacaacggcaucaucacggagaccaucaaguccuggaagaagcgcauccugcggacccaggagagcgagugcgugugcgugaacggcuccugcuucaccaucaugacggacgggcccagcaacggcaccgccuccuacaagaucuucaagaucgagaaggggaaggucaccaagagcaucgagcucaacgcccccaacuuccacuacgaggagugcuccugcuacccggacaccggcacggugaugugcgugugccgcgacaacuggcacgggagcaaccggcccugggucuccuucaaccagaaccuggacuaccagaucggcuacaucugcagcggcguguucggggacaacccccgccccaaggacggcaagggguccugcagcccggugaccgucgacggcgccgacggggugaagggcuucuccuacaaguacggcaacgggguguggaucggccggaccaagagcaaccgccugcggaagggguucgagaugaucugggaccccaacggcuggaccgacacggacuccgacuucagcgucaagcaggacgugguggcgaucaccgacuggagcggguacuccggcagcuucguccagcaccccgagcucaccggccuggacugcauccgccccugcuucuggguggagcugguccgggggcucccgcgcgagaacaccacgaucuggaccuccggcagcuccaucagcuucugcgggguggacuccgacaccgccaacuggagcuggcccgacggcgccgagcugcccuucaccaucgacaaguga

SEQ ID NO: 78470 - RNA, 1413 nt, Artificial Sequence
  derived and/or modified CDS sequence (opt1) from neuraminidase__InfluenzaA__ABA87083
augaaccccaaccagaagaucaucaccaucggcagcaucuccaucgccaucgggaucaucagccugaugcuccagaucggcaacaucaucuccaucugggccagccacuccauccagaccgggagccagaaccacacgggcaucugcaaccagaagaucaucaccuacaagaacuccaccugggugaaccacaccuacgucaacaucaacaacacgaacgugguggcggggaaggacaagaccagcgucacccuggccggcaacuccagccugugcuccaucagcggcugggccaucuacaccaaggacaacuccauccgcaucgggagcaagggcgacguguucgugauccgggagccguucaucuccugcagccaccucgagugccgcacguucuuccugacccagggggcccugcucaacgacaagcacuccaacggcaccgucaaggaccggagccccuaccgcgcccugauguccugcccccugggggaggcgcccagcccguacaacagcaaguucgaguccguggccuggagcgccuccgccugccacgacggcaugggcuggcucaccaucgggaucagcggccccgacaacggggcgguggccguccugaaguacaacggcaucaucacggagaccaucaaguccuggaagaagcggauccugcgcacccaggagagcgagugcgugugcgugaacggcuccugcuucaccaucaugacggacgggcccagcaacggcgccgccuccuacaagaucuucaagaucgagaaggggaaggucaccaagagcaucgagcucaacgcccccaacuuccacuacgaggagugcuccugcuacccggacaccggcaccgugaugugcgugugccgggacaacuggcacgggagcaaccgccccugggucuccuucaaccagaaccuggacuaccagaucggcuacaucugcagcggcguguucggggacaacccccggcccaaggacggcgagggguccugcaacccggugacggucgacggcgcggacggggugaagggcuucagcuacaaguacggcaacgggguguggaucggccgcaccaaguccaaccggcugcgcaagggguucgagaugaucugggaccccaacggcuggaccgacaccgacagcgucuucuccgugaagcaggacguggucgccaucacggacuggagcggguacagcggcuccuucgugcagcaccccgagcucaccggccuggacugcauccggcccugcuucugggucgagcuggugcgcgggcucccgcgggagaacaccaccaucuggacgagcggcuccagcaucuccuucugcggggugaacagcgacaccgccaacugguccuggcccgacggcgccgagcugcccuucaccaucgacaaguga

SEQ ID NO: 78471 - RNA, 1413 nt, Artificial Sequence
  derived and/or modified CDS sequence (opt1) from neuraminidase__InfluenzaA__ABA87234
augaacagcaaccagaagaucaucaccaucggcuccaucagcaucgccaucgggaucaucucccugaugcuccagaucggcaacaucaucagcaucugggccucccacagcauccagaccgggucccagaaccacacgggcgugugcaaccagcgcaucaucaccuacgagaacagcaccugggucaaccacaccuacgugaacaucaacaacacgaacgugaucgcggggaaggacaagaccuccgucacccuggccggcaacagcucccugugcagcaucuccggcugggccaucuacaccaaggacaacagcauccggaucggguccaagggcgacguguucgugauccgcgagcccuucaucagcugcucccaccucgagugccggacguucuuccugacccagggggcccugcucaacgacaagcacagcaacggcaccgucaaggaccgcuccccguaccgggcccugaugagcugcccccugggggaggcgcccagccccuacaacuccaaguucgagagcguggccugguccgccagcgccugccacgacggcaugggcuggcucaccaucgggaucuccggcccggacaacggggcgguggccguccugaaguacaacggcaucaucacggagaccaucaagagcuggaagaagcagauccugcgcacccaggaguccgagugcgugugcgugaacggcagcugcuucaccaucaugacggacgggcccuccaacggcgccgccagcuacaagaucuucaagaucgagaaggggaaggucaucaaguccaucgagcucaacgcccccaacuuccacuacgaggagugcagcugcuaccccgacaccggcaccgugaugugcgugugccgggacaacuggcacggguccaaccgcccgugggucagcuucaaccagaaccuggacuaccagaucggcuacaucugcuccggcguguucggggacaacccccggcccaaggacggcgaggggagcugcaaccccgugaccgucgacggcgcgaacggggugaagggcuucuccuacaaguacggcaacgggguguggaucggccgcaccaagagcaaccggcugcgcaagggguucgagaugaucugggacccgaacggcuggacggacaccgacuccgacuucagcgucaagcaggacgugguggccaucaccgacuggagcggguacuccggcagcuucguccagcaccccgagcucacgggccuggacugcauccggcccugcuucuggguggagcugguccgcgggcuccccaaggagaacaccaccaucuggaccuccggcagcuccaucagcuucugcggggugaacuccgacacggccaacuggagcuggccggacggcgccgagcugcccuucaccaucgacaaguga

SEQ ID NO: 78472 - RNA, 1410 nt, Artificial Sequence; identical to SEQ ID NO: 78406
  derived and/or modified CDS sequence (opt1) from neuraminidase__InfluenzaA__ABB02784

SEQ ID NO: 78473 - RNA, 1413 nt, Artificial Sequence; identical to SEQ ID NO: 78410
  derived and/or modified CDS sequence (opt1) from neuraminidase__InfluenzaA__ABB02795

SEQ ID NO: 78474 - RNA, 1413 nt, Artificial Sequence; identical to SEQ ID NO: 78410
  derived and/or modified CDS sequence (opt1) from neuraminidase__InfluenzaA__ABB02806

SEQ ID NO: 78475 - RNA, 1413 nt, Artificial Sequence
  derived and/or modified CDS sequence (opt1) from neuraminidase__InfluenzaA__ABB02817
augaaccccaaccagaagaucaucaccaucggcagcaucuccaucgccaucgggaucaucagccugaugcuccagaucggcaacaucaucuccaucugggccagccacuccauccagaccgggagccagaaccacacgggcgugugcaaccagcgcaucaucaccuacgagaacuccaccugggucaaccacaccuacgugaacaucaacaacacgaacgugaucgcggggaaggacaagaccagcgucacccuggccggcaacuccagccugugcuccaucagcggcugggccaucuacaccaaggacaacuccauccggaucgggagcaagggcgacguguucgugauccgcgagccguucaucuccugcagccaccucgagugccggacguucuuccugacccagggggcccugcucaacgacaagcacuccaacggcaccgucaaggaccgcagccccuaccgggcccugauguccugcccccugggggaggcgcccagcccguacaacagcaaguucgaguccguggccuggagcgccuccgccugccacgacggcaugggcuggcucaccaucgggaucagcggccccgacaacggggcgguggccguccugaaguacaacggcaucaucacggagaccaucaaguccuggaagaagcagauccugcgcacccaggagagcgagugcgugugcgugaacggcuccugcuucaccaucaugacggacgggcccagcaacggcgccgccuccuacaagaucuucaagaucgagaaggggaaggucaccaagagcguggagcucaacgcccccaacuuccacuacgaggagugcuccugcuacccggacaccggcaccgugaugugcgucugccgggacaacuggcacgggagcaaccgccccuggguguccuucaaccagaaccuggacuaccagaucggcuacaucugcagcggcguguucggggacaacccccggcccaaggacggcgagggguccugcaacccggucacgguggacggcgcgaacggggugaagggcuucagcuacaaguacggcaacggggucuggaucggccgcaccaaguccaaccggcugcgcaagggguucgagaugaucugggaccccaacggcuggaccgacaccgacagcgacuucuccgugaagcaggacguggucgccaucacggacuggagcggguacagcggcuccuucgugcagcaccccgagcucaccggccuggacugcauccggcccugcuucugggucgagcuggugcgcgggcucccgaaggagaacaccaccaucuggacgagcggcuccagcaucuccuucugcggggugaacagcgacaccgccaacugguccuggcccgacggcgccgagcugcccuucaccaucgacaaguga

SEQ ID NO: 78476 - RNA, 1413 nt, Artificial Sequence; identical to SEQ ID NO: 78475
  derived and/or modified CDS sequence (opt1) from neuraminidase__InfluenzaA__ABB02828

SEQ ID NO: 78477 - RNA, 1410 nt, Artificial Sequence
  derived and/or modified CDS sequence (opt1) from neuraminidase__InfluenzaA__ABB02839
augaaccccaaccagaagaucaucaccaucggcagcgugucccugaccaucagcacgaucugcuucuucaugcagaucgccauccucaucaccaccgucacccugcacuucaagcaguacgaguucaacuccccgcccaacaaccagguggugcugugcgagcccacgaucaucgagcgcaacaucaccgagaucgucuaccucaccaacaccacgaucgagaaggagaucugccccaagcuggccgaguaccggaacuggagcaagccgcagugcgacaucaccggguucgcgcccuucuccaaggacaacagcauccgccuguccgccggcggggacaucugggugacccgggagcccuacgugagcugcgaccccgacaagugcuaccaguucgcccucggccaggggaccacgcugaacaacguccacuccaacgacaccgugcacgaccgcaccccguaccggacccugcucaugaacgagcugggcgugcccuuccaccugggcacgaagcaggucugcaucgccuggagcuccagcuccugccacgacgggaaggccuggcuccacgugugcgugaccggcgacgacaagaacgcgaccgccagcuucaucuacaacgggcgccuggucgacuccaucgugagcugguccaaggagauccugcggacccaggagagcgagugcgugugcaucaacggcacgugcaccgucgugaugaccgacggguccgccagcggcaaggccgacaccaagauccucuucaucgaggagggcaagaucgugcacacgagcacccuguccgggagcgcgcagcacgucgaggagugcuccugcuacccccgcuaccccggcgugcggugcgugugccgcgacaacuggaaggggagcaaccggccgaucgucgacaucaacaucaaggacuacuccaucgugagcuccuacgugugcagcggccuggucggcgacacgccccgcaagaacgacuccagcuccagcucccacugccucgaccccaacaacgaggagggcgggcacggggugaagggcugggccuucgacgacgggaacgacgucuggaugggccggaccaucagcgagaagcugcgcuccggcuacgagaccuucaaggugaucgagggguggagcaaccccaacuccaagcugcagaucaaccgccaggugaucgucgaccggggcaaccggagcggguacuccggcaucuucagcguggagggcaagagcugcaucaaccgcugcuucuacguggagcucauccgggggcgcaaggaggagaccgagguccuguggaccuccaacagcaucgugguguucugcggcaccuccgggacguacggcaccgggagcuggccggacggcgccgacaucaaccugaugcccaucuga

SEQ ID NO: 78478 - RNA, 1410 nt, Artificial Sequence
  derived and/or modified CDS sequence (opt1) from neuraminidase__InfluenzaA__ABB02850
augaaccccaaccagaagaucaucaccaucggcagcgugucccugaccaucagcacgaucugcuucuucaugcagaucgccauccucaucaccaccgucacccugcacuucaagcaguacgaguucaacuccccgcccaacaaccaggugaugcugugcgagcccacgaucaucgagcgcaacaucaccgagaucguguaccucaccaacaccacgaucgagaaggagaucugccccaagccggccgaguaccggaacuggagcaagccccagugcgacaucaccggguucgcgcccuucuccaaggacaacagcauccgccuguccgccggcggggacaucugggucacccgggagcccuacgugagcugcgacccggacaagugcuaccaguucgcccugggccaggggaccacgcucaacaacgugcacuccaacgacaccguccacgaccgcacccccuaccggacccugcugaugaacgagcucggcgugcccuuccaccugggcacgaagcaggucugcaucgccuggagcuccagcuccugccacgacgggaaggccuggcugcacgugugcgugaccggcgacgacaagaacgcgaccgccagcuucaucuacaacgggcgccucguggacuccaucgucagcugguccaaggagauccugcggacccaggagagcgagugcgugugcaucaacggcacgugcgccguggucaucaccgacggguccgccagcggcaaggcggacaccaagauccuguucaucgaggagggcaagaucgugcacaccagcaagcucuccgggagcgcccagcacguggaggagugcuccugcuacccccgcuacccgggcauccggugcgucugccgcgacaacuggaaggggagcaaccggcccaucguggacaucaacaucaaggacuacuccaucgugagcuccuacgucugcagcggccuggugggcgacacgccccgcaagaacgacuccagcuccagcucccugugccucgaccccaacaacgaggagggcgggcacggggugaagggcugggccuucgacgacgggaacgacgucuggaugggccggaccaucagcgagaagcugcgcuccggcuacgagaccuucaaggugaucgagggguggagcaacccgaacuccaagcugcagaucaaccggcaggucaucguggaccgcggcaaccggagcggguacuccggcaucuucagcguggagggcaagagcugcaucaaccgcugcuucuacgucgagcucauccgggggcgcaaggaggagaccgaggugcuguggacguccaacagcaucguggucuucugcggcaccuccgggaccuacggcaccgggagcuggcccgacggcgccgacaucaaccugaugcccaucuga

SEQ ID NO: 78479 - RNA, 1410 nt, Artificial Sequence
  derived and/or modified CDS sequence (opt1) from neuraminidase__InfluenzaA__ABB02861
augaaccccaaccagaagaucaucaccaucggcagcgugucccugaccaucgccacgaucugcuuccucaugcagaucgccauccuggucaccaccgugacccugcacuucaagcaguacgagugcaacagcccgcccaacaaccaggugaugcucugcgagcccgcgaucaucgagcgcaacaucacggagaucgucuaccugaccaacaccaccaucgagaaggagaucugccccaagcuggccgaguaccggaacugguccaagccgcagugcaacaucacgggguucgcccccuucagcaaggacaacuccauccgccucagcgccggcggggacaucugggugacccgggagcccuacguguccugcgaccccgacaagugcuaccaguucgcccugggccaggggaccacccugaacaacggccacagcaacgacacgguccacgaccgcaccccguaccggacccuccugaugaacgagcugggcgugcccuuccaccucgggacccgccaggugugcaucgcgugguccagcuccagcugccacgacggcaaggccuggcugcacgucugcgugacgggggacgacgagaacgccaccgccuccuucaucuacgacggccggcugguggacagcaucggguccuggagcaagaagauccuccgcacccaggaguccgagugcgucugcaucaacgggaccugcacgguggugaugaccgacggcagcgcguccgggaaggccgacaccaagauccuguucaucgaggagggcaagaucgucaacaucagcacccugagcggguccgcccagcacguggaggagugcagcugcuacccccgguaccccggcgugcgcugcgucugccgggacaacuggaagggcuccaaccgcccgaucguggacaucaacgugaaggacuacagcaucgucuccagcuacgugugcuccgggcucgugggcgacacgccccggaagaacgacagcuucuccagcucccacugccuggaccccaacaacgaggagggcggccacggggucaagggcugggccuucgacgacggcaacgacguguggauggggcgcaccaucagcgagaagcugcgguccggcuacgagaccuucaaggucaucgagggguggagcaagcccaacuccaagcuccagaucaaccgccaggugaucguggagcggggcaaccgcagcggguacuccggcaucuucagcgucgagggcaaguccugcaucaaccggugcuucuacguggagcugauccgcgggcggaaggaggagaccgaggugugguggacgagcaacagcaucgucguguucugcggcaccuccgggaccuacggcaccgggagcuggccggacggcgccgacaucgaccugaugcccaucuga

SEQ ID NO: 78480 - RNA, 1410 nt, Artificial Sequence; identical to SEQ ID NO: 78277
  derived and/or modified CDS sequence (opt1) from neuraminidase__InfluenzaA__ABB02872

SEQ ID NO: 78481 - RNA, 1410 nt, Artificial Sequence; identical to SEQ ID NO: 78277
  derived and/or modified CDS sequence (opt1) from neuraminidase__InfluenzaA__ABB02883

SEQ ID NO: 78482 - RNA, 1410 nt, Artificial Sequence
  derived and/or modified CDS sequence (opt1) from neuraminidase__InfluenzaA__ABB02894
augaaccccaaccagaagaucaucaccaucggcagcgugucccugaccaucgccacgaucugcuuccucaugcagaucgccauccuggucaccaccgugacccugcacuucaagcaguacgagugcaacagcccgcccaacaaccaggugaugcucugcgagcccacgaucaucgagcgcaacaucaccgagauggucuaccugaccaacaccacgaucgagaaggagaucugccccaagcuggcggaguaccggaacugguccaagccgcagugcaacaucaccggguucgcccccuucagcaaggacaacuccauccgccucagcgccggcggggacaucugggugacccgggagcccuacguguccugcgaccccgacaagugcuaccaguucgcccugggccaggggaccacgcugaacaacggccacagcaacgacaccguccacgaccgcaccccguaccggacccuccugaugaacgagcugggcgugcccuuccaccucgggacgaagcaggucugcaucgccugguccagcuccagcugccacgacggcaaggcguggcugcacgugugcgugaccggggacgacgagaacgccaccgccuccuucaucuacaacggccgccugguggacagcaucggguccuggagcaagaagauccuccggacccaggaguccgagugcgucugcaucaacggcacgugcaccguggugaugaccgacggcagcgccuccgggaaggcggacaccaagauccuguucaucgaggagggcaagaucguccacacgagccugcucagcggguccgcccagcacguggaggagugcagcugcuacccccgcuaccccggcgugcggugcgucugccgcgacaacuggaagggcuccaaccggccgaucguggacaucaacgugaaggacuacagcaucgucuccagcuacgugugcuccgggcuggugggcgacacgccccgcaagaacgacagcuccagcuccagccacugccuggaccccaacaacgaggagggcgggcacggggucaagggcugggccuucgacgacggcaacgacguguggauggggcggaccaucuccgagaagcuccgcagcggcuacgagaccuucaaggucaucgaggggugguccaagcccaacagcaagcugcagaucaaccgccaggugaucguggaccggggcaaccgguccggguacagcggcaucuucuccgucgagggcaagagcugcaucaaccgcugcuucuacguggagcugauccgggggcgcaagcaggagaccgaggugcucuggaccagcaacuccaucgucguguucugcggcaccagcgggaccuacggcacgggguccuggccggacggcgccgacaucaaccugaugcccaucuga

SEQ ID NO: 78483 - RNA, 1410 nt, Artificial Sequence; identical to SEQ ID NO: 78085
  derived and/or modified CDS sequence (opt1) from neuraminidase__InfluenzaA__ABB02905

SEQ ID NO: 78484 - RNA, 1413 nt, Artificial Sequence
  derived and/or modified CDS sequence (opt1) from neuraminidase__InfluenzaA__ABB02916
augaaccccaaccagaagaucaucaccaucggcagcaucuccaucgccaucgggaucaucagccugaugcuccagaucggcaacaucaucuccaucugggccagccacuccauccagaccgggagccagaaccacacgggcgugugcaaccagcgcaucaucaccuacgagaacuccaccugggucaaccacaccuacgugaacaucaacaacacgaacgugaucgcggagaaggacaagaccagcgucacccuggccgggaacuccagccugugcuccaucagcggcugggccaucuacaccaaggacaacuccauccggaucggcagcaagggggacguguucgugauccgcgagccguucaucuccugcagccaccucgagugccggacguucuuccugacccagggcgcccugcucaacgacaagcacuccaacgggaccgucaaggaccgcagccccuaccgggcccugauguccugcccccugggcgaggcgcccagcccguacaacagcaaguucgaguccguggccuggagcgccuccgccugccacgacgggaugggcuggcucaccaucggcaucagcgggcccgacaacggcgcgguggccguccugaaguacaacgggaucaucacggagaccaucaaguccuggaagaagcagauccugcgcacccaggagagcgagugcgugugcgugaacggcuccugcuucaccaucaugacggacggccccagcaacggggccgccuccuacaagaucuucaagaucgagaagggcaaggucaccaagagcaucgagcucaacgcccccaacuuccacuacgaggagugcuccugcuacccggacaccgggaccgugaugugcgugugccgggacaacuggcacggcagcaaccgccccugggucuccuucaaccagaaccuggacuaccagaucggguacaucugcagcggcguguucggcgacaacccccggccccgcgacggggagggcuccugcaacccggugacggucgacggggcgaacggcgugaagggguucagcuacaaguacggcaacggcguguggaucgggcggaccaaguccaaccgccugcggaagggcuucgagaugaucugggaccccaacggguggaccgacaccgacagcgacuucuccgucaagcaggacgugguggccaucacggacuggagcggcuacagcggguccuucguccagcaccccgagcucaccggccuggacugcauccgccccugcuucuggguggagcugguccggggccucccgcgcgagaacaccaccaucuggacgagcggguccagcaucuccuucugcggcgugaacagcgacaccgccaacugguccuggcccgacggggccgagcugcccuucaccaucgacaaguga

SEQ ID NO: 78485 - RNA, 1413 nt, Artificial Sequence
  derived and/or modified CDS sequence (opt1) from neuraminidase__InfluenzaA__ABB02927
augaaccccaaccagaagaucaucaccaucggcagcaucuccaucgccaucgggaucaucagccugaugcuccagaucggcaacaucaucuccaucugggccagccacuccauccagaccgggagccagaaccacacgggcaucugcaaccagcgcaucaucaccuacgagaacuccaccugggugaaccacaccuacgucaacaucaacaacacgaacgugguggcggggaaggacaagaccagcgucacccuggccggcaacuccagccugugcuccaucagcggcugggccaucuacaccaaggacaacuccauccggaucgggagcaagggcgacguguucgugauccgcgagccguucaucuccugcagccaccucgagugccggacguucuuccugacccagggggcccugcucaacgacaagcacuccaacggcaccgucaaggaccgcagccccuaccgggcccugauguccugcccccugggggaggcgcccagcccguacaacagcaaguucgaguccguggccuggagcgccuccgccugccacgacggcaugggcuggcucaccaucgggaucagcggccccgacaacggggcgguggccguccugaaguacaacggcaucaucacggagaccaucaaguccuggaagaagcgcauccugcggacccaggagagcgagugcgugugcgugaacggcuccugcuucaccaucaugacggacgggcccagcaacggcgccgccuccuacaagaucuucaagaucgagaaggggaaggucaccaagagcaucgagcucaacgcccccaacuuccacuacgaggagugcuccugcuacccggacaccggcaccgugaugugcgugugccgcgacaacuggcacgggagcaaccggcccugggucuccuucaaccagaaccuggacuaccagaucggcuacaucugcagcggcguguucggggacaacccccgccccaaggacggcgagggguccugcaacccggugacggucgacggcgcggacggggugaagggcuucagcuacaaguacggcaacgggguguggaucggccggaccaaguccaacaagcugcgcaagggguucgagaugaucugggaccccaacggcuggaccgacaccgacagcgacuucuccgucaagcaggacgugguggccaucacggacuggagcggguacagcggcuccuucguccagcaccccgagcucaccggccuggacugcauccggcccugcuucuggguggagcugguccgcgggcucccgcgggagaacaccaccaucuggacgagcggcuccagcaucuccuucugcggggugaacagcgacaccgccaacugguccuggcccgacggcgccgagcugcccuucaccaucgacaaguga

SEQ ID NO: 78486 - RNA, 1413 nt, Artificial Sequence
  derived and/or modified CDS sequence (opt1) from neuraminidase__InfluenzaA__ABB02939
augaaccccaaccagaagaucaucaccaucggcagcaucuccaucgccaucgggaucaucagccugaugcuccagaucggcaacaucaucuccaucugggccagccacuccauccagaccgggagccagaaccacacgggcgugugcaaccagcgcaucaucaccuacgagaacuccaccuggaugaaccacaccuacgucaacaucaacaacacgaacgugaucgcggggaaggacaagaccagcgugacccuggccggcaacuccagccugugcuccaucagcggcugggccaucuacaccaaggacaacuccauccggaucgggagcaagggcgacgucuucgugauccgcgagccguucaucuccugcagccaccucgagugccggacguucuuccugacccagggggcccugcucaacgacaagcacuccaacggcaccgugaaggaccgcagccccuaccgggcccugauguccugcccccugggggaggcgcccagcccguacaacagcaaguucgaguccgucgccuggagcgccuccgccugccacgacggcaugggcuggcucaccaucgggaucagcggccccgacaacggggcgguggccgugcugaaguacaacggcaucaucacggagaccaucaaguccuggaagaagcagauccugcgcacccaggagagcgagugcgucugcgugaacggcuccugcuucaccaucaugacggacgggcccagcaacggcgccgccuccuacaagaucuucaagaucgagaaggggaaggugaccaagagcauggagcucaacgcccccaacuuccacuacgaggagugcuccugcuacccggacaccggcaccgucaugugcgugugccgggacaacuggcacgggagcaaccgccccuggguguccuucaaccagaaccuggacuaccagaucggcuacaucugcagcggcgucuucggggacaacccccggcccaaggacggcgagggguccugcaacccggugacgguggacggcgcgaacggggucaagggcuucagcuacaaguacggcaacgggguguggaucggccgcaccaaguccaaccggcugcgcaagggguucgagaugaucugggaccccaacggcuggaccgacaccgacagcgacuucuccgugaagcaggacgucguggccaucacggacuggagcggguacagcggcuccuucgugcagcaccccgagcucaccggccuggacugcauccggcccugcuucugggucgagcuggugcgcgggcucccgaaggagaacaccaccaucuggacgagcggcuccagcaucuccuucugcggggucaacagcgacaccgccaacugguccuggcccgacggcgccgagcugcccuucaccaucgacaaguga

SEQ ID NO: 78487 - RNA, 1410 nt, Artificial Sequence; identical to SEQ ID NO: 78402
  derived and/or modified CDS sequence (opt1) from neuraminidase__InfluenzaA__ABB02950

SEQ ID NO: 78488 - RNA, 1410 nt, Artificial Sequence; identical to SEQ ID NO: 78303
  derived and/or modified CDS sequence (opt1) from neuraminidase__InfluenzaA__ABB02961

SEQ ID NO: 78489 - RNA, 1410 nt, Artificial Sequence; identical to SEQ ID NO: 78303
  derived and/or modified CDS sequence (opt1) from neuraminidase__InfluenzaA__ABB02972

SEQ ID NO: 78490 - RNA, 1410 nt, Artificial Sequence; identical to SEQ ID NO: 78303
  derived and/or modified CDS sequence (opt1) from neuraminidase__InfluenzaA__ABB02983

SEQ ID NO: 78491 - RNA, 1410 nt, Artificial Sequence; identical to SEQ ID NO: 78303
  derived and/or modified CDS sequence (opt1) from neuraminidase__InfluenzaA__ABB02994

SEQ ID NO: 78492 - RNA, 1410 nt, Artificial Sequence; identical to SEQ ID NO: 78303
  derived and/or modified CDS sequence (opt1) from neuraminidase__InfluenzaA__ABB03005

SEQ ID NO: 78493 - RNA, 1410 nt, Artificial Sequence; identical to SEQ ID NO: 78308
  derived and/or modified CDS sequence (opt1) from neuraminidase__InfluenzaA__ABB03016

SEQ ID NO: 78494 - RNA, 1410 nt, Artificial Sequence; identical to SEQ ID NO: 78303
  derived and/or modified CDS sequence (opt1) from neuraminidase__InfluenzaA__ABB03027

SEQ ID NO: 78495 - RNA, 1410 nt, Artificial Sequence; identical to SEQ ID NO: 78308
  derived and/or modified CDS sequence (opt1) from neuraminidase__InfluenzaA__ABB03038

SEQ ID NO: 78496 - RNA, 1410 nt, Artificial Sequence; identical to SEQ ID NO: 78303
  derived and/or modified CDS sequence (opt1) from neuraminidase__InfluenzaA__ABB03049

SEQ ID NO: 78497 - RNA, 1410 nt, Artificial Sequence
  derived and/or modified CDS sequence (opt1) from neuraminidase__InfluenzaA__ABB03060
augaaccccaaccagaagaucaucaccaucggcagcgugucccugaccaucagcacgaucugcuucuucaugcagaucgccauccucaucaccaccgucacccugcacuucaagcaguacgaguucaacuccccgcccaacaaccaggugaugcugugcgagcccacgaucaucgagcgcaacaucaccgagaucguguaccucaccaacaccacgaucgagaaggagaucugccccaagcuggccgaguaccggaacuggagcaagccgcagugcgacaucaccggguucgcgcccuucuccaaggacaacagcauccgccuguccgccggcggggacaucugggucacccgggagcccuacgugagcugcgaccccgacaagugcuaccaguucgcccucggccaggggaccacgcugaacaacgugcacuccaacgacaccguccacgaccgcaccccguaccggacccugcucaugaacgagcugggcgugcccuuccaccugggcacgaagcaggucugcaucgccuggagcuccagcuccugccacgacgggaaggccuggcuccacgugugcgugaccggcgacgacaagaacgcgaccgccagcuucaucuacaacgggcgccugguggacuccaucgucagcugguccaaggagauccugcggacccaggagagcgagugcgugugcaucaacggcacgugcaccguggucaugaccgacggguccgccagcggcaaggccgacaccaagauccucuucaucgaggagggcaagaucgugcacacgagcacccuguccgggagcgcgcagcacguggaggagugcuccugcuacccccgcuaccccggcauccggugcgucugccgcgacaacuggaaggggagcaaccggccgaucguggacaucaacaucaaggacuacuccaucgugagcuccuacgucugcagcggccuggugggcgacacgccccgcaagaacgacuccagcuccagcucccacugccucgaccccaacaacgaggagggcgggcacggggugaagggcugggccuucgacgacgggaacgacgucuggaugggccggaccaucagcgagaagcugcgcuccggcuacgagaccuucaaggugaucgagggguggagcaaccccaacuccaagcugcagaucaaccggcaggucaucguggaccgcggcaaccggagcggguacuccggcaucuucagcguggagggcaagagcugcaucaaccgcugcuucuacgucgagcucauccgggggcgcaaggaggagaccgaggugcuguggaccuccaacagcaucguggucuucugcggcaccuccgggacguacggcaccgggagcuggccggacggcgccgacaucaaccugaugcccaucuga

SEQ ID NO: 78498 - RNA, 1410 nt, Artificial Sequence
  derived and/or modified CDS sequence (opt1) from neuraminidase__InfluenzaA__ABB03071
augaaccccaaccagaagaucaucaccaucggcagcgugucccugaccaucagcacgaucugcuucuucaugcagaucgccauccucaucaccaccgucacccugcacuucaagcaguacgaguucaacuccccgcccaacaaccaggugaugcugugcgagcccacgaucaucgagcgcaacaucaccgagaucguguaccucaccaacaccacgaucgagaaggagaucugccccaagcuggccgaguaccggaacuggagcaagccgcagugcgggaucaccggcuucgcgcccuucuccaaggacaacagcauccgccuguccgccgggggcgacaucugggucacccgggagcccuacgugagcugcgaccccgacaagugcuaccaguucgcccucgggcagggcaccacgcugaacaacgugcacuccaacgacaccguccacgaccgcaccccguaccggacccugcucaugaacgagcugggcgugcccuuccaccuggggacgaagcaggucugcaucgccuggagcuccagcuccugccacgacggcaaggccuggcuccacgugugcgugaccggggacgacaagaacgcgaccgccagcuucaucuacaacggccgccugguggacuccaucgucagcugguccaaggagauccugcggacccaggagagcgagugcgugugcaucaacgggacgugcaccguggucaugaccgacggcuccgccagcggcaaggccgacaccaagauccucuucaucgaggaggggaagaucgugcacacgagcacccuguccggcagcgcgcagcacguggaggagugcuccugcuacccccgcuaccccgggguccggugcgugugccgcgacaacuggaagggcagcaaccggccgaucguggacaucaacaucaaggacuacuccaucgucagcuccuacgugugcagcggccuggugggggacacgccccgcaagaacgacuccagcuccagcucccacugccucgaccccaacaacgaggagggcgggcacggcgucaaggggugggccuucgacgacggcaacgacguguggaugggccggaccaucagcgagaagcugcgcuccggguacgagaccuucaaggucaucgagggcuggagcaaccccaacuccaagcugcagaucaaccgccaggugaucguggacaaggggaaccggagcggcuacuccgggaucuucagcgucgagggcaagagcugcaucaaccggugcuucuacguggagcucauccgcggccggaaggaggagaccgaggugcuguggaccuccaacagcaucgucguguucugcgggaccuccggcacguacgggaccggcagcuggccggacggggccgacaucaaccugaugcccaucuga

SEQ ID NO: 78499 - RNA, 1410 nt, Artificial Sequence
  derived and/or modified CDS sequence (opt1) from neuraminidase__InfluenzaA__ABB03093
augaaccccaaccagaagaucaucaccaucggcagcgugucccugaccaucagcacgaucugcuucuucaugcagaucgccauccucaucaccaccgucacccugcacuucaagcaguacgaguucaacuccccgcccaacaaccaggugaugcugugcgagcccacgaucaucgagcgcaacaucaccgagaucguguaccucaccaacaccacgaucgagaaggagaucugccccaagcuggccgaguaccggaacuggagcaagccgcagugcgacaucaccggguucgcgcccuucuccaaggacaacagcauccgccuguccgccggcggggacaucugggucacccgggagcccuacgugagcugcgaccccgacaagugcuaccaguucgcccucggccaggggaccacgcugaacaacgugcacuccaacgacaccguccacgaccgcaccccguaccggacccugcucaugaacgagcugggcgugcccuuccaccugggcacgaagcaggucugcaucgccuggagcuccagcuccugccacgacgggaaggccuggcuccacgugugcgugaccggcgacgacaagaacgcgaccgccagcuucaucuacaacgggcgccugguggacuccaucgucagcugguccaaggagauccugcggacccaggagagcgagugcgugugcaucaacggcacgugcaccguggucaugaccgacggguccgccagcggcaaggccgacaccaagauccucuucaucgaggagggcaagaucgugcacacgagcacccuguccgggagcgcgcagcacaucgaggagugcuccugcuacccccgcuaccccggcgugcggugcgucugccgcgacaacuggaaggggagcaaccggccgaucguggacaucaacaucaaggacuacuccaucgugagcuccuacgucugcagcggccuggugggcgacacgccccgcaagaacgacuccagcuccagcucccacugccucgaccccaacaacgaggagggcgggcacggggugaagggcugggccuucgacgacgggaacgacgucuggaugggccggaccaucagcgagaagcugcgcuccggcuacgagaccuucaaggugaucgagggguggagcaaccccaacuccaagcugcagaucaaccggcaggucaucguggaccgcggcaaccggagcggguacuccggcaucuucagcguggagggcaagagcugcaucaaccgcugcuucuacgucgagcucauccgggggcgcaaggaggagaccgaggugcuguggaccuccaacagcaucguggucuucugcggcaccuccgggacguacggcaccgggagcuggccggacggcgccgacaucaaccugaugcccaucuga

SEQ ID NO: 78500 - RNA, 1410 nt, Artificial Sequence; identical to SEQ ID NO: 78406
  derived and/or modified CDS sequence (opt1) from neuraminidase__InfluenzaA__ABB03104

SEQ ID NO: 78501 - RNA, 1410 nt, Artificial Sequence
  derived and/or modified CDS sequence (opt1) from neuraminidase__InfluenzaA__ABB03115
augaaccccaaccagaagaucaucaccaucggcagcgugucccugaccaucagcacgaucugcuucuucaugcagaucgccauccucaucaccaccgucacccugcacuucaagcaguacgaguucaacuccccgcccaacaaccaggugaugcugugcgagcccacgaucaucgagcgcaacaucaccgagaucguguaccucaccaacaccacgaucgagaaggagaucugccccaagcuggccgaguaccggaacuggagcaagccgcagugcaacaucaccggguucgcgcccuucuccaaggacaacagcauccgccuguccgccggcggggacaucugggucacccgggagcccuacgugagcugcgaccccgacaagugcuaccaguucgcccucggccaggggaccacgcugaacaacgugcacuccaacgacaccguccacgaccgcaccccguaccggacccugcucaugaacgagcugggcgugcccuuccaccugggcacgaagcaggucugcaucgccuggagcuccagcuccugccacgacgggaaggccuggcuccacgugugcgugaccggcgacgacgagaacgcgaccgccagcuucaucuacaacgggcgccugguggacuccaucgucagcugguccaagaagauccugcggacccaggagagcgagugcgugugcaucaacggcacgugcaccguggucaugaccgacggguccgccagcggcaaggccgacaccaagauccucuucaucgaggagggcaagaucgugcacacgagcacccuguccgggagcgcgcagcacguggaggagugcuccugcuacccccgcuaccccggcguccggugcgugugccgcgacaacuggaaggggagcaaccggccgaucguggacaucaacaucaaggacuacuccaucgucagcuccuacgugugcagcggccuggugggcgacacgccccgcaagaacgacuccagcuccagcucccacugccucgaccccaacaacgaggagggcgggcacggggucaagggcugggccuucgacgacgggaacgacguguggaugggccggaccaucagcgagaagcugcgcuccggcuacgagaccuucaaggucaucgagggguggagcaaccccaacuccaagcugcagaucaaccgccaggugaucguggaccggggcaaccggagcggguacuccggcaucuucagcgucgagggcaagagcugcaucaaccgcugcuucuacguggagcucauccgggggcgcaagcaggagaacgaggugcuguggaccuccaacagcaucgucguguucugcggcaccuccgggaccuacggcacggggagcuggccggacggcgccgacaucaaccugaugcccaucuga

SEQ ID NO: 78502 - RNA, 1413 nt, Artificial Sequence; identical to SEQ ID NO: 78410
  derived and/or modified CDS sequence (opt1) from neuraminidase__InfluenzaA__ABB03126

SEQ ID NO: 78503 - RNA, 1413 nt, Artificial Sequence
  derived and/or modified CDS sequence (opt1) from neuraminidase__InfluenzaA__ABB03148
augaaccccaaccagaagaucaucaccaucggcagcaucuccaucgccaucgggaccaucagccugaugcuccagaucggcaacaucaucuccaucugggccagccacuccauccagacggggagccagaaccacaccggcaucugcaaccagcgcaucaucaccuacgagaacuccaccugggugaaccacacguacgucaacaucaacaacaccaacgugguggcggggaaggacaagaccagcgucacccuggccggcaacuccagccugugcuccaucagcggcugggccaucuacacgaaggacaacuccauccggaucgggagcaagggcgacguguucgugauccgcgagccguucaucuccugcagccaccucgagugccggaccuucuuccugacccagggggcccugcucaacgacaagcacuccaacggcaccgucaaggaccgcagccccuaccgggcccugauguccugcccccugggggaggcgcccagcccguacaacagcaaguucgaguccguggccuggagcgccuccgccugccacgacggcaugggcuggcucacgaucgggaucagcggccccgacaacggggcgguggccguccugaaguacaacggcaucaucaccgagaccaucaaguccuggaagaagcgcauccugcggacccaggagagcgagugcgugugcgugaacggcuccugcuucacgaucaugaccgacgggcccagcaacggcgccgccuccuacaagaucuucaagaucgagaaggggaaggucaccaagagcaucgagcucaacgcccccaacuuccacuacgaggagugcuccugcuacccggacaccggcacggugaugugcgugugccgcgacaacuggcacgggagcaaccggcccugggucuccuucaaccagaaccuggacuaccagaucggcuacaucugcagcggcguguucggggacaacccccgccccaaggacggcaagggguccugcaacccggugaccgucgacggcgcggacggggugaagggcuucagcuacaaguacggcaacgggguguggaucggccggaccaaguccaaccgccugcggaagggguucgagaugaucugggaccccaacggcuggaccgacacggacagcgacuucuccgucaagcaggacgugguggccaucaccgacuggagcggguacagcggcuccuucguccagcaccccgagcucaccggccuggacugcauccgccccugcuucuggguggagcugguccgggggcucccgcgcgagaacaccacgaucuggaccagcggcuccagcaucuccuucugcgggguggacagcgacaccgccaacugguccuggcccgacggcgccgagcugcccuucaccaucgacaaguga

SEQ ID NO: 78504 - RNA, 1410 nt, Artificial Sequence
  derived and/or modified CDS sequence (opt1) from neuraminidase__InfluenzaA__ABB04286
augaaccccaaccagaagaucaucaccaucggcagcgugucccugaccaucgccacgaucugcuuccucaugcagaucgccauccuggucaccaccgugacccugcacuucaagcaguacgagugcagcuccccgcccaacaaccaggugaugcccugcgagcccaucaucaucgagcgcaacaucacggagaucgucuaccucaccaacaccaccaucgagaaggagaucugcccgaagcugguggaguaccggaacuggagcaagccccagugcaagaucacgggguucgcgcccuucuccaaggacaacagcauccgccuguccgccggcggggacaucugggugacccgggagcccuacgucagcugcgacccgggcaagugcuaccaguucgcccucgggcagggcaccacccuggacaacaagcacuccaacgacacgauccacgaccgcacgccccaccggacccugcucaugaacgagcugggcgugcccuuccaccuggggacccgccaggugugcaucgccuggagcuccagcuccugccacgacggcaaggccuggcuccacgucugcgugaccggguacgacaagaacgcgaccgccagcuucaucuacgacggccggcugguggacuccaucgggagcugguccaagaacauccugcgcacccaggagagcgagugcgucugcaucaacgggaccugcacgguggugaugaccgacggcuccgccagcgagcgggccgacaccaagauccucuucaucgaggagggcaagaucguccacaucagcccccuguccggcagcgcgcagcacguggaggagugcuccugcuacccgcgcuaccccggggugcggugcgucugccgcgacaacuggaagggcagcaaccggcccgugguggacaucaacgucaaggacuacuccaucgugagcuccuacgugugcagcggccuggucggggacacgccccgcaagaacgaccgguccagcuccagcuacugccgcaacccgaacaacgagaagggcaaccacggggugaagggcugggccuucgacgacgggaacgacgucuggaugggccggaccaucuccgaggagagccgcuccggcuacgagaccuucaaggugaucgggggcuggagcacccccaacuccaagagccagaucaaccgccaggugaucgucgacuccgggaaccggagcggcuacagcgggaucuucuccguggagggcaagagcugcaucaaccggugcuucuacguggagcucauccgcggccgcgagcaggagacccgggucugguggacguccaacagcaucgugguguucugcgggaccuccggcaccuacgggaccggcagcuggcccgacggggccgacaucaaccugaugcccaucuga

SEQ ID NO: 78505 - RNA, 1410 nt, Artificial Sequence
  derived and/or modified CDS sequence (opt1) from neuraminidase__InfluenzaA__ABB04297
augaaccccaaccagaagaucaucaccaucggcagcgugucccugaccaucgccacgaucugcuuccucaugcagaucgccauccuggucaccaccgugacccugcacuucaagcaguacgagugcgacagcccggcgaacaaccaggugauccccugcgagcccaucacgaucgagcgcaacaucaccgagaucgucuaccucaccaacaccacgaucgagaaggagaucugccccaagcugguggaguaccggaacugguccaagccgcagugcaagaucaccggguucgcccccuucagcaaggacaacuccauccgccugagcgccggcggggacaucugggugacccgggagcccuacgucuccugcgaccccggcaagugcuaccaguucgcccucgggcagggcaccacgcuggacaacaagcacagcaacgacaccauccacgaccgcaccccgcaccggacccugcucaugaacgagcugggcgugcccuuccaccuggggacgcgccaggugugcaucgccugguccagcuccagcugccacgacggcaaggcguggcuccacgucugcgugaccggguacgacaagaacgccaccgccuccuucaucuacgacggccggcugguggacagcaucggguccuggagccagaacauccugcgcacccaggaguccgagugcgucugcaucaacggcacgugcaccguggugaugaccgacggcagcgccuccgggcgggcggacaccaagauccucuucaucgaggagggcaagaucguccacaucagcccccugagcggguccgcccagcacguggaggagugcagcugcuacccccgcuacccgggcgugcggugcaucugccgcgacaacuggaagggcuccaaccggcccgucguggacaucaacgugaaggacuacagcaucgacuccagcuacgucugcuccgggcuggugggcgacacgccccgcaacaacgaccggagcuccaacagcuacugccgcaaccccaacaacgagaaggggaaccacggcgugaaggggugggccuucgacgacggcaacgacgucuggaugggccggaccaucuccgaggacagccgcuccggguacgagaccuucaaggugaucggcggguggagcaccccgaacuccaagcuccagaucaaccggcaggucaucguggacagcgacaaccgcuccggcuacagcgggaucuucuccguggagggcaagagcugcaucaaccggugcuucuacgucgagcugauccgcggccgcgagcaggagacgcgggugugguggaccagcaacuccaucguggucuucugcgggaccagcggcaccuacgggacgggcuccuggcccgacggggccgacaucaaccugaugcccaucuga

SEQ ID NO: 78506 - RNA, 1410 nt, Artificial Sequence
  derived and/or modified CDS sequence (opt1) from neuraminidase__InfluenzaA__ABB04319
augaaccccaaccagaagaucaucaccaucggcagcgugucccugaccaucgccacgaucugcuuccucaugcagaucgccauccuggucaccaccgugacccugcacuucaagcaguacgagugcagcuccccgcccaacaaccaggugaugcccugcgagcccacgaucaucgagcgcaacaucaccgagaucgucuaccucaccaacaccacgaucgagaaggagaucugcccgaagcugguggaguaccggaacuggagcaagccccagugcaagaucaccggguucgcgcccuucuccaaggacaacagcauccgccuguccgccggcggggacaucugggugacccgggagcccuacgucagcugcgacccgggcaagugcuaccaguucgcccucgggcagggcaccacgcugaacaaccgccacuccaacgacaccgugcacgaccggacccccuaccgcacccugcucaugaacgagcugggcgugcccuuccaccuggggacgaagcaggucugcaucgccuggagcuccagcuccugccacgacggcaaggccuggcuccacgugugcgugaccgggcacgacaagaacgcgaccgccagcuucaucuacaacggccggcuggucgacuccaucgggagcugguccaagaacauccugcgcacccaggagagcgagugcgugugcaucaacggcacgugcaccguggucaugaccgacggcuccgccagcgagcgggccgacaccaagauccucuucaucgaggaggggaagaucgugcacaucagcccccuguccggcagcgcgcagcacguggaggagugcuccugcuacccgcgcuaccccgggguccggugcgugugccgcgacaacuggaagggcagcaaccggcccaucguggacaucaacgucaaggacuacuccaucgugagcuccuacgugugcagcggccuggucggggacacgccccgcaagaacgaccgguccagcuccagcuacugccagaacccgaacaacgagaagggcucccacggggugaagggcugggccuucgacgacgggaacgacgucuggaugggccgcaccaucggcgaggagcuccggagcggguacgagaccuucaaggugaucggcgggugguccacccccaacagcaagcugcagaucaaccgccaggugaucgucgacuccggcaaccggagcggguacuccggcaucuucagcguggagggcaagagcugcaucaaccgcugcuucuacguggagcugauccgggggcgcaagcaggagacgcgcgucugguggaccuccaacagcaucgugguguucugcggcaccuccgggaccuacggcacggggagcuggcccgacggcgccgacaucaaccucaugcccaucuga

SEQ ID NO: 78507 - RNA, 1410 nt, Artificial Sequence
  derived and/or modified CDS sequence (opt1) from neuraminidase__InfluenzaA__ABB04341
augaaccccaaccagaagaucaucaccaucggcagcgugucccugaccaucgccacgaucugcuuccucaugcagaucgccauccuggucaccaccgugacccugcacuucaagcaguacgagugcgacagcccggcgaacaaccaggugaugcccugcgagcccaucaucaucgagcgcaacaucacggagaucgucuaccucaccaacaccaccaucgagaaggagaucugccccaagcugguggaguaccggaacugguccaagccgcagugcaagaucacgggguucgcccccuucagcaaggacaacuccgugcgccugagcgccggcggggacaucugggucacccgggagcccuacguguccugcgaccccggcaagugcuaccaguucgcccucgggcagggcaccacccuggacaacaagcacagcaacgacacgauccacgaccgcaccccgcaccggacccugcucaugaacgagcugggcgugcccuuccaccuggggacccgccaggucugcaucgccugguccagcuccagcugccacgacggcaaggcguggcuccacgugugcgugacgggguacgacaagaacgccaccgccuccuucaucuacgacggccggcuggucgacagcaucggguccuggagccagaacauccugcgcacccaggaguccgagugcgugugcaucaacgggaccugcacgguggucaugaccgacggcagcgccuccggccgggcggacaccaagauccucuucaucgaggagggcaagaucgugcacaucagcccccugagcggguccgcccagcacguggaggagugcagcugcuacccccgcuacccgggcguccggugcaucugccgcgacaacuggaagggcuccaaccggcccgugguggacaucaacgucaaggacuacagcaucgacuccagcuacgugugcuccgggcuggugggcgacacgccccgcaagaacgaccggagcuccaacagcuacugccgcaaccccaacaacgagaaggggaaccacggcgucaaggggugggccuucgacgacggcaacgacguguggaugggccggaccaucuccgaggacagccgcuccggguacgagaccuucaaggucaucggcggguggagcaccccgaacuccaagcuccagaucaaccgccaggugaucguggacagcgacaaccgguccggcuacagcgggaucuucuccgucgagggcaagagcugcaucaaccggugcuucuacguggagcugauccgcggccgcgagcaggagacccgggugugguggacgagcaacuccaucgucguguucugcgggaccagcggcaccuacgggaccggcuccuggcccgacggggccgacaucaaccugaugcccaucuga

SEQ ID NO: 78508 - RNA, 1410 nt, Artificial Sequence
  derived and/or modified CDS sequence (opt1) from neuraminidase__InfluenzaA__ABB04352
augaaccccaaccagaagaucaucaccaucggcagcgugucccugaccaucgccacgaucugcuuccucaugcagaucgccauccuggucaccaccgugacccugcacuucaagcaguacgagugcagcuccccgcccaacaaccaggugaugcccugcgagcccaucaucaucgagcgcaacaucacggagaucgucuaccucaccaacaccaccaucgagaaggagaucugcccgaagcugguggaguaccggaacuggagcaagccccagugcaagaucacgggguucgcgcccuucuccaaggacaacagcauccgccuguccgccggcggggacaucugggugacccgggagcccuacgucagcugcgacccgggcaagugcuaccaguucgcccucgggcagggcaccacccugaacaacaagcacuccaacgacacggugcacgaccgcacccccuaccggacccugcucaugaacgagcugggcgugcccuuccaccuggggaccaagcaggucugcaucgccuggagcuccagcuccugccacgacggcaaggccuggcuccacgugugcgugacggggcacgacaagaacgcgaccgccagcuucaucuacgacggccgccuggucgacuccaucgggagcugguccaagaacauccugcggacccaggagagcgagugcgugugcaucaacgggaccugcacgguggucaugaccgacggcuccgccagcgagcgcgccgacaccaagauccucuucaucgaggagggcaagaucgugcacaucagcccccuguccggcagcgcgcagcacguggaggagugcuccugcuacccgcgguaccccgggguccgcugcgugugccgggacaacuggaagggcagcaaccgccccaucguggacaucaacgucaaggacuacuccaucgugagcuccuacgugugcagcggccuggucggggacacgccccggaagaacgaccgcuccagcuccagcuacugccggaacccgaacaacgagaagggcucccacggggugaagggcugggccuucgacgacgggaacgacgucuggaugggccgcaccaucggcgaggagcuccggagcggguacgagaccuucaaggugaucggcgggugguccacccccaacagcaagcugcagaucaaccgccaggugaucgucgacuccggcaaccggagcggguacuccggcaucuucagcguggagggcaagagcugcaucaaccgcugcuucuacguggagcugauccgggggcgcgagcaggagacccgcgucugguggacguccaacagcaucgugguguucugcggcaccuccgggaccuacggcaccgggagcuggcccgacggcgccgacaucaaccucaugcccaucuga

SEQ ID NO: 78509 - RNA, 1410 nt, Artificial Sequence
  derived and/or modified CDS sequence (opt1) from neuraminidase__InfluenzaA__ABB04374
augaaccccaaccagaagaucaucaccaucggcagcgugucccugaccaucgccacggucugcuuccucaugcagaucgccauccuggugaccaccgugacccugcacuucaagcaguacgagugcgacagcccggcgaacaaccaggucaugcccugcgagcccaucaucaucgagcgcaacaucacggagaucguguaccucaccaacaccaccaucgagaaggagaucugccccaagcugguggaguaccggaacugguccaagccgcagugcaagaucacgggguucgcccccuucagcaaggacaacuccauccgccugagcgccggcggggacaucugggucacccgggagcccuacguguccugcgaccccggcaagugcuaccaguucgcccucgggcagggcaccacccuggacaacaagcacagcaacgacacgauccacgaccgcaucccgcaccggacccugcucaugaacgagcugggcgugcccuuccaccuggggacccgccaggucugcaucgccugguccagcuccagcugccacgacggcaaggcguggcuccacgugugcgugaccggggacgacgagaacgccacggccuccuucaucuacgacggccggcuggucgacagcaucggguccuggagccagaacauccugcgcacccaggaguccgagugcgugugcaucaacgggaccugcaccguggucaugacggacggcagcgccuccggccgggcggacacccgcauccucuucaucgaggagggcaagaucgugcacaucagcccccugagcggguccgcccagcacguggaggagugcagcugcuacccccgguacccgggcguccgcugcaucugccgggacaacuggaagggcuccaaccgccccgugguggacaucaacgucaaggacuacagcaucgacucccgguacgugugcagcgggcuggugggcgacacgccccgcaacaacgacaaguccagcaacuccaacugccggaaccccaacaacgacaaggggaaccacggcgucaaggggugggccuucgacgacggcaacgacguguggaugggccgcaccaucagcaaggacucccggagcggguacgagaccuucaaggucaucggcgggugguccaccccgaacagcaagucccagaucaaccgccaggugaucguggacagcgacaaccgguccggcuacagcgggaucuucuccgucgagggcaagagcugcaucaaccgcugcuucuacguggagcucauccgcggccgggagcaggagaccaaggugugguggaccagcaacuccaucgucguguucugcgggacgagcggcaccuacgggaccggcuccuggcccgacggggccgacaucaaccugaugcccaucuga

SEQ ID NO: 78510 - RNA, 1410 nt, Artificial Sequence
  derived and/or modified CDS sequence (opt1) from neuraminidase__InfluenzaA__ABB04931
augaaccccaaccagaagaucaucaccaucggcagcgugucccugaccaucgccacgaucugcuuccucaugcagaucgccauccuggucaccaccgugacccugcacuucaagcaguacgagugcgacagcccggcgaacaaccaggugaugcccugcgagcccaucaucaucgagcgcaacaucacggagaucgucuaccucaccaacaccaccaucgagaaggagaucugccccaagcugguggaguaccggaacugguccaagccgcagugcaagaucacgggguucgcccccuucagcaaggacaacuccauccgccugagcgccggcggggacaucugggugacccgggagcccuacgucuccugcgaccccggcaagugcuaccaguucgcccucgggcagggcaccacccuggacaacaagcacagcaacgacacgauccacgaccgcaccccgcaccggacccugcucaugaacgagcugggcgugcccuuccaccuggggacccgccaggugugcaucgccugguccagcuccagcugccacgacggcaaggcguggcuccacgucugcgugacgggguacgacaagaacgccaccgccuccuucaucuacgacggccggcugguggacagcaucggguccuggagccagaacauccugcgcacccaggaguccgagugcgucugcaucaacgggaccugcacgguggugaugaccgacggcagcgccuccggccgggcggacaccaagauccucuucaucgaggagggcaagaucguccacaucagcccccugagcggguccgcccagcacguggaggagugcagcugcuacccccgcuacccgggcgugcggugcaucugccgcgacaacuggaagggcuccaaccggcccgucguggacaucaacgugaaggacuacagcaucgacuccagcuacgucugcuccgggcuggugggcgacacgccccgcaacaacgaccggagcuccagcuccuacugccgcaaccccaacaacgagaaggggaagcacggcgugaaggggugggccuucgacgacggcaacgacgucuggaugggccggaccaucagcgaggacucccgcagcggguacgagaccuucaaggugaucggcgggugguccaccccgaacagcaagcuccagaucaaccggcaggucaucguggacuccgacaaccgcagcggcuacuccgggaucuucagcguggagggcaagagcugcaucaaccggugcuucuacgucgagcugauccgcggccgcgagcaggagacccgggugugguggacguccaacagcaucguggucuucugcgggaccuccggcaccuacgggaccggcagcuggcccgacggggccgacaucaaccugaugcccaucuga

SEQ ID NO: 78511 - RNA, 1410 nt, Artificial Sequence
  derived and/or modified CDS sequence (opt1) from neuraminidase__InfluenzaA__ABB04942
augaaccccaaccagaagaucaucaccaucggcagcgugucccugaccaucgccacgaucugcuuccucaugcagaucgccauccuggucaccaccgugacccugcacuucaagcaguacgagugcagcuccccgcccaacaaccaggugaugcccugcgagcccaucaucaucgagcgcaacaucacggagaucgucuaccucaccaacaccaccaucgagaaggagaucugcccgaagcugguggaguaccggaacuggagcaagccccagugcaagaucacgggguucgcgcccuucuccaaggacaacagcauccgccuguccgccggcggggacaucugggugacccgggagcccuacgucagcugcgacccgggcaagugcuaccaguucgcccucgggcagggcaccacccugaacaacaagcacuccaacgacacgauccacgaccgcacccccuaccggacccugcucaugaacgagcugggcgugcccuuccaccuggggaccaagcaggucugcaucgccuggagcuccagcuccugccacgacggcaaggccuggcuccacgugugcgugacggggcacgacaagaacgcgaccgccagcuucaucuacgacggccgccugguggacuccaucgggagcugguccaagaacauccugcggacccaggagagcgagugcgucugcaucaacgggaccugcacgguggugaugaccgacggcuccgccagcgagcgcgccgacaccaagauccucuucaucgaggagggcaagaucguccacaucagcccccuguccggcagcgcgcagcacguggaggagugcuccugcuacccgcgguaccccggggugcgcugcgucugccgggacaacuggaagggcagcaaccgccccaucguggacaucaacgugaaggacuacuccaucgucagcuccuacgugugcagcggccuggugggggacacgccccggaagaacgaccgcuccagcuccagcuacugccggaacccgaacaacgagaagggcaaccacggggucaagggcugggccuucgacgacgggaacgacguguggaugggccgcaccaucggcgaggagcuccgguccggguacgagaccuucaaggucaucggcggguggagcacccccaacuccaagcugcagaucaaccgccaggugaucguggacagcgacaaccgguccggcuacagcgggaucuucuccgucgagggcaagagcugcaucaaccgcugcuucuacguggagcugauccggggccgcgagcaggagacccgcgugugguggacgagcaacuccaucgucguguucugcgggaccagcggcaccuacgggaccggcuccuggcccgacggggccgacaucaaccucaugcccaucuga

SEQ ID NO: 78512 - RNA, 1410 nt, Artificial Sequence; identical to SEQ ID NO: 78508
  derived and/or modified CDS sequence (opt1) from neuraminidase__InfluenzaA__ABB04953

SEQ ID NO: 78513 - RNA, 1410 nt, Artificial Sequence; identical to SEQ ID NO: 78406
  derived and/or modified CDS sequence (opt1) from neuraminidase__InfluenzaA__ABB04975

SEQ ID NO: 78514 - RNA, 1410 nt, Artificial Sequence; identical to SEQ ID NO: 78204
  derived and/or modified CDS sequence (opt1) from neuraminidase__InfluenzaA__ABB04986

SEQ ID NO: 78515 - RNA, 1410 nt, Artificial Sequence
  derived and/or modified CDS sequence (opt1) from neuraminidase__InfluenzaA__ABB04997
augaaccccaaccagaagaucaucaccaucggcagcgugucccugaccaucgccacgaucugcuuccucaugcagaucgccauccuggucaccaccgugacccugcacuucaagcaguacgagugcaacagcccgcccaacaaccaggugaugcucugcgagcccacgaucaucgagcgcaacaucaccgagaucguccaccugaccaacaccacgaucgagaaggagaucugccccaagcuggcggaguaccggaacugguccaagccgcagugcaacaucaccggguucgcccccuucagcaaggacaacuccauccgccucagcgccggcggggacaucugggugacccgggagcccuacguguccugcgaccccgacaagugcuaccaguucgcccugggccaggggaccacgcugaacaacggccacagcaacgacaccguccacgaccgcaccccguaccggacccuccugaugaacgagcugggcgugcccuuccaccucgggacgaagcaggucugcaucgccugguccagcuccagcugccacgacggcaaggcguggcugcacgugugcgugaccggggacgacgagaacgccaccgccuccuucaucuacaacggccgccugguggacagcaucggguccuggagcaagaagauccuccggacccaggaguccgagugcgucugcaucaacggcacgugcaccguggugaugaccgacggcagcgccuccgggaaggcggacaccaagauccuguucaucgaggagggcaagaucguccacacgagccugcucagcggguccgcccagcacguggaggagugcagcugcuacccccgcuaccccggcgugcggugcgucugccgcgacaacuggaagggcuccaaccggccgaucguggacaucaacgugaaggacuacagcaucgucuccagcuacgugugcuccgggcuggugggcgacacgccccgcaagaacgacagcuccagcuccagccacugccuggaccccaacaacgaggagggcgggcacggggucaagggcugggccuucgacgacggcaacgacguguggauggggcggaccaucuccgagaagcuccgcagcggcuacgagaccuucaaggucaucgaggggugguccaagcccaacagcaagcugcagaucaaccgccaggugaucguggaccggggcaaccgguccggguacagcggcaucuucuccgucgagggcaagagcugcaucaaccgcugcuucuacguggagcugauccgggggcgcaagcaggagaccgaggugcucuggaccagcaacuccaucgucguguucugcggcaccagcgggaccuacggcacgggguccuggccggacggcgccgacaucaaccugaagcccaucuga

SEQ ID NO: 78516 - RNA, 1410 nt, Artificial Sequence; identical to SEQ ID NO: 78277
  derived and/or modified CDS sequence (opt1) from neuraminidase__InfluenzaA__ABB05008

SEQ ID NO: 78517 - RNA, 1410 nt, Artificial Sequence; identical to SEQ ID NO: 78085
  derived and/or modified CDS sequence (opt1) from neuraminidase__InfluenzaA__ABB05186

SEQ ID NO: 78518 - RNA, 1410 nt, Artificial Sequence; identical to SEQ ID NO: 78277
  derived and/or modified CDS sequence (opt1) from neuraminidase__InfluenzaA__ABB05219

SEQ ID NO: 78519 - RNA, 1410 nt, Artificial Sequence
  derived and/or modified CDS sequence (opt1) from neuraminidase__InfluenzaA__ABB46395
augaaccccaaccagaagaucaucaccaucggcagcgugucccugaccaucgccacgaucugcuuccucaugcagaucgccauccuggucaccaccgugacccugcacuucaagcaguacgagugcgacagcccggcgaacaagcaggucaugcccugcgagcccaucaucaucgagcgcaacaucacggagaucguguaccucaccaacaccaccaucgagaaggagaucugccccaagcugguggaguaccggaacugguccaagccgcagugcaagaucacgggguucgcccccuucagcaaggacaacuccauccgccugagcgccggcggggacaucugggugacccgggagcccuacgucuccugcgaccccggcaagugcuaccaguucgcccucgggcagggcaccacccuggacaacaagcacagcaacgacacgauccacgaccgcaccccgcaccggacccugcucaugaacgagcugggcgugcccuuccaccuggggacccgccaggugugcaucgccugguccagcuccagcugccacgacggcaaggcguggcuccacgucugcgugacgggguacgacaagaacgccaccgccuccuucaucuacgacggccggcugguggacagcaucggguccuggagccagaacauccugcgcacccaggaguccgagugcgucugcaucaacgggaccugcacgguggugaugaccgacggcagcgccuccggccgggcggacaccaagauccucuucaucgaggagggcaagaucguccacaucagcccccugagcggguccgcccagcacguggaggagugcagcugcuacccccgcuacccgggcgugcggugcaucugccgcgacaacuggaagggcuccaaccggcccgucguggacaucaacgugaaggacuacagcaucgacuccagcuacgucugcuccgggcuggugggcgacacgccccgcaacaacgaccggagcuccagcuccuacugccgcaaccccaacaacgagaaggggacccacggcgugaaggggugggccuucgacgacggcaacgacgucuggaugggccggaccaucagcgaggacucccgcagcggguacgagaccuucaaggugaucggcgggugguccaccccgaacagcaagcuccagaucaaccggcaggucaucguggacuccgacaaccgcagcggcuacuccgggaucuucagcguggagggcaagagcugcaucaaccggugcuucuacgucgagcugauccgcggccgcgagcaggagacgcgggugugguggaccuccaacagcaucguggucuucugcgggaccuccggcaccuacgggacgggcagcuggcccgacggggccgacaucaaccugaugcccaucuga

SEQ ID NO: 78520 - RNA, 1410 nt, Artificial Sequence; identical to SEQ ID NO: 78064
  derived and/or modified CDS sequence (opt1) from neuraminidase__InfluenzaA__ABB46417

SEQ ID NO: 78521 - RNA, 1410 nt, Artificial Sequence
  derived and/or modified CDS sequence (opt1) from neuraminidase__InfluenzaA__ABB46428
augaaccccaaccagaagaucaucaccaucggcagcgugucccugaccaucgccacgaucugcuuccucaugcagaucgccauccuggucaccaccgugacccugcacuucaagcaguacgagugcaacagcccgcccaacaaccaggugaugcucugcgagcccacgaucaucgagcgcaacaucaccgagaucgucuaccugaccaacaccacgaucgagaaggagaucugccccaagcuggcggaguaccggaacugguccaagccgcagugcaacaucaccggguucgcccccuucagcaaggacaacuccauccgccucagcgccggcggggacaucugggugacccgggagcccuacguguccugcgaccccgacaagugcuaccaguucgcccugggccaggggaccacgcugaacaacggccacagcaacgacaccguccacgaccgcaccccguaccggacccuccugaugaacgagcugggcgugcccuuccaccucgggacgaagcaggucugcaucgccugguccagcuccagcugccacgacggcaaggcguggcugcacgugugcgugaccggggacgacgagaacgccaccgccuccuucaucuacaacggccgccugguggacagcaucggguccuggagcaagaagauccuccggacccaggaguccgagugcgucugcaucaacggcacgugcaccguggugaugaccgacggcagcgccuccgggaaggcggacaccaagauccuguucaucgaggagggcaagaucguccacaucagcccccugagcggguccgcccagcacguggaggagugcagcugcuacccccgcuacccgggcgugcggugcgucugccgcgacaacuggaagggcuccaaccggcccaucguggacaucaacgugaaggacuacagcaucgucuccagcuacgugugcuccgggcucgugggcgacacgccccgcaagaacgacagcuucuccagcucccacugccuggaccccaacaacgaggagggcgggcacggggucaagggcugggccuucgacgacggcaacgacguguggauggggcggaccaucagcgagaagcugcgcuccggcuacgagaccuucaaggucaucgagggguggagcaagccgaacuccaagcuccagaucaaccgccaggugaucguggaccggggcaaccggagcggguacuccggcaucuucagcgucgagggcaaguccugcaucaaccgcugcuucuacguggagcugauccgggggcgcaaggaggagaccgaggugugguggacgagcaacagcaucgucguguucugcggcaccuccgggaccuacggcaccgggagcuggcccgacggcgccgacaucaaccugaugcccaucuga

SEQ ID NO: 78522 - RNA, 1410 nt, Artificial Sequence
  derived and/or modified CDS sequence (opt1) from neuraminidase__InfluenzaA__ABB46439
augaaccccaaccagaagaucaucaccaucggcagcgugucccugaccaucagcacgaucugcuucuucaugcagaucgccauccucaucaccaccgucacccugcacuucaagcaguacgaguucaacuccccgcccaacaaccaggugaugcugugcgagcccacgaucaucgagcgcaacaucaccgagaucguguaccucaccaacaccacgaucgagaaggagaucugccccaagcuggccgaguaccggaacuggagcaagccgcagugcgacaucaccggguucgcgcccuucuccaaggacaacagcauccgccuguccgccggcggggacaucugggucacccgggagcccuacgugagcugcgaccccgacaagugcuaccaguucgcccucggccaggggaccacgcugaacaacgugcacuccaacgacaccguccacgaccgcaccccguaccggacccugcucaugaacgagcugggcgugcccuuccaccugggcacgaagcaggucugcaucgccuggagcuccagcuccugccacgacgggaaggccuggcuccacgugugcgugaccggcgacgacaagaacgcgaccgccagcuucaucuacaacgggcgccugguggacuccaucgucagcugguccaaggagauccugcggacccaggagagcgagugcgugugcaucaacggcgccugcacgguggucaugaccgacggguccgccagcggcaaggcggacaccaagauccucuucaucgaggagcgccggaucgugcacaccagcacgcuguccggcagcgcccagcacguggaggagugcuccugcuacccccgcuaccccgggguccggugcgugugccgcgacaacuggaagggcagcaaccggccgaucguggacaucaacaucaaggacuacuccaucgucagcuccuacgugugcagcgggcuggugggcgacacgccccgcaagaacgacuccagcuccagcuccaacugccucgaccccaacaacgaggagggcgggcacggcgucaaggggugggccuucgacgacggcaacgacguguggauggggcggaccaucagcgagaagcugcgcuccggcuacgagaccuucaaggucaucgagggcuggagcaaccccaacuccaagcugcagaucaaccgccaggugaucguggaccgggggaaccggagcggcuacuccgggaucuucagcgucgagggcaagagcugcaucaaccgcugcuucuacguggagcucauccgggggcgcaaggaggagaccgaggugcuguggaccuccaacagcaucgucguguucugcggcaccuccggcgccuacgggaccggcagcuggccggacggggccgacaucaaccugaugcccaucuga

SEQ ID NO: 78523 - RNA, 1410 nt, Artificial Sequence; identical to SEQ ID NO: 78370
  derived and/or modified CDS sequence (opt1) from neuraminidase__InfluenzaA__ABB46450

SEQ ID NO: 78524 - RNA, 1410 nt, Artificial Sequence; identical to SEQ ID NO: 78351
  derived and/or modified CDS sequence (opt1) from neuraminidase__InfluenzaA__ABB46461

SEQ ID NO: 78525 - RNA, 1410 nt, Artificial Sequence
  derived and/or modified CDS sequence (opt1) from neuraminidase__InfluenzaA__ABB46550
augaaccccaaccagaagaucaucaccaucggcagcgugucccugaccaucgccacgaucugcuuccucaugcagaucgccauccuggucaccaccgugacccugcacuucaagcaguacgagugcagcuccccgcccaacaaccaggugaugcccugcgagcccaucaucaucgagcgcaacaucacggagaucgucuaccucaccaacaccaccaucgagaaggagaucugcccgaagcugguggaguaccggaacuggagcaagccccagugcaagaucacgggguucgcgcccuucuccaaggacaacagcauccgccuguccgccggcggggacaucugggugacccgggagcccuacgucagcugcgacccgggcaagugcuaccaguucgcccucgggcagggcaccacccuggacaacaagcacuccaacgacacgauccacgaccgcacgccccaccggacccugcucaugaacgagcugggcgugcccuuccaccuggggacccgccaggugugcaucgccuggagcuccagcuccugccacgacggcaaggccuggcuccacgucugcgugaccggguacgacaagaacgcgaccgccagcuucaucuacgacggccggcugguggacuccaucgggagcugguccaagaacauccugcgcacccaggagagcgagugcgucugcgugaacgggaccugcacgguggucaugaccgacggcuccgccagcgagcgggccgacaccaagauccucuucaucgaggagggcaagaucgugcacaucagcccccuguccggcagcgcgcagcacguggaggagugcuccugcuacccgcgcuaccccgggguccggugcgugugccgcgacaacuggaagggcagcaaccggcccguggucgacaucaacgugaaggacuacuccaucgugagcuccuacgucugcagcggccuggugggggacacgccccgcaagaacgaccgguccagcuccagcuacugccgcaacccgaacaacgagaagggcaaccacggggucaagggcugggccuucgacgacgggaacgacguguggaugggccggaccaucuccgaggagagccgcuccggcuacgagaccuucaaggugaucgggggcuggagcacccccaacuccaagagccagaucaaccggcaggucaucguggacuccgggaaccgcagcggcuacagcgggaucuucuccguggagggcaagagcugcaucaaccggugcuucuacgucgagcucauccgcggccgcgagcaggagacccgggugugguggacguccaacagcaucguggucuucugcgggaccuccggcaccuacgggaccggcagcuggcccgacggggccgacaucaaccugaugcccaucuga

SEQ ID NO: 78526 - RNA, 1410 nt, Artificial Sequence
  derived and/or modified CDS sequence (opt1) from neuraminidase__InfluenzaA__ABB51955
augaaccccaaccagaagaucaucaccaucggcagcgugucccugaccaucagcacgaucugcuucuucaugcagaucgccauccucgucaccaccgugacccugcacuucaagcaguacgagugcaacuccccgcccaacaaccaggugaugcugugcgagcccacgaucaucgagcgcaacaucaccgagaucgucuaccucaccaacaccacgaucgagaaggagaucugccccaagcuggccgaguaccggaacuggagcaagccgcagugcaacaucaccggguucgcgcccuucuccaaggacaacagcauccgccuguccgccggcggggacaucugggugacccgggagcccuacgugagcugcgaccccgacaagugcuaccaguucgcccucggccaggggaccacgcugaacaacggccacuccaacgacaucguccacgaccgcaccccguaccggacccugcucaugaacgagcugggcgugcccuuccaccuggggaccaagcaggucugcaucgccuggagcuccagcuccugccacgacggcaaggccuggcuccacgugugcgugacgggggacgacgagaacgcgaccgccagcuucaucuacaacggccgccugguggacuccaucgggagcugguccaagaaguucuuccggacccaggagagcgagugcgucugcauccacgggaccugcacgguggugaugaccgacggcuccgccagccgcaaggccgacaccaagauccuguucaucgaggagggcaagaucguccacaccagcacgcucuccggcagcgcgcagcacguggaggagugcuccugcuacccccgguaccccggggugcgcugcgucugccgggacaacuggaagggcagcaaccgcccgaucguggacaucaacaucaaggacuacuccaucgugagcuccuacgucugcagcggccuggugggggacacgccccggaagaacgacuccagcuccagcucccacugccuggaccccaacaacgaggagggcgggcacggcgugaaggggugggccuucgacgacggcaacgacgucuggaugggccgcaccaucagcgagaagcuccgguccggguacgagaccuucaaggugaucgagggcuggagcaagcccaacuccaagcugcagaucaaccgccaggucaucguggaccgggggaaccgcagcggcuacuccgggaucuucagcguggagggcaagagcugcaucaaccggugcuucuacgucgagcugauccgcggccggaagcaggagaccgaggugcucuggaccuccaacagcaucguggucuucugcgggaccuccggcaccuacgggacgggcagcuggccggacggggccgacaucaaccugaugcccaucuga

SEQ ID NO: 78527 - RNA, 1413 nt, Artificial Sequence
  derived and/or modified CDS sequence (opt1) from neuraminidase__InfluenzaA__ABB51956
augaaccccaaccagaagaucaucaccaucggcagcaucuccaucgccaucgggaucaucagccugaugcuccagaucggcaacaucaucuccaucugggccagccacuccauccagaccgggagccagaaccacacgggcgugugcaaccagcgcaucaucaccuacgagaacuccaccugggucaaccacaccuacgugaacaucaacaacacgaacgugaucgcggggaaggacaagaccagcgucaccguggccggcaacuccagccugugcuccaucagcggcugggccaucuacaccaaggacaacuccauccggaucgggagcaagggcgacguguucgucauccgcgagccguucaucuccugcagccaccuggagugccggacguucuuccucacccagggggcccugcugaacgacaagcacuccaacggcaccgugaaggaccgcagccccuaccgggcccucauguccugcccccugggggaggcgcccagcccguacaacagcaaguucgaguccguggccuggagcgccuccgccugccacgacggcaugggcuggcugaccaucgggaucagcggccccgacaacggggcggucgccgugcucaaguacaacggcaucaucacggagaccaucaaguccuggaagaagcccauccugggcacccaggagagcgagugggugugcgucaacggguccugcuucaccaucaugacggacgaccccagcuacgaggccgccuccuacaagaucuucaagaucgagcgcgagcgggugaccaagagcaucgagcugaacgccccgaacuuccacuacgaggagugcuccugcuaccccgacaccggcaccgugaugugcgucugccgcgacaacuggcacgggagcaaccggcccuggguguccuucaaccagaaccucgacuaccagaucggcuacaucugcagcgggguguucggcgacaacccccgcccgaaggacggcgagggguccugcaaccccgucacgguggacggcgcgaacggggugaagggcuucagcuacaaguacgggaacggcgucuggaucggccggaccaaguccaaccgccugcggaagggguucgagaugaucugggaccccaacggcuggaccgacaccgacagcgacuucuccgugaagcaggacguggucgccaucacggacuggagcggguacagcggcuccuucgugcagcaccccgagcugaccgggcucgacugcauccgcccgugcuucugggucgagcuggugcggggccugcccaaggagaacaccaccaucuggacgagcggcuccagcaucuccuucugcggggugaacagcgacaccgccaacugguccuggcccgacggcgccgagcuccccuucaccaucgacaaguga

SEQ ID NO: 78528 - RNA, 1410 nt, Artificial Sequence
  derived and/or modified CDS sequence (opt1) from neuraminidase__InfluenzaA__ABB51957
augaaccccaaccagaagaucaucaccaucggcagcgugucccugaccaucgccacgaucugcuuccucaugcagaucgccauccuggucaccaccgugacccugcacuucaagcagcacgagugcaacagcccgcccaacaaccaggugaugcucugcgagcccacgaucaucgagcgcaacaucaccgagaucgucuaccugaccaacaccacgaucgagaaggagaucugccccaagcuggcggaguaccggaacugguccaagccgcagugcaacaucaccggguucgcccccuucagcaaggacaacuccauccgccucagcgccggcggggacaucugggugacccgggagcccuacguguccugcgaccccgacaagugcuaccaguucgcccugggccaggggaccacgcugaacaacggccacagcaacgacaccguccgcgaccggaccccguaccgcacccuccugaugaacgagcugggcgugcccuuccaccucgggacgcgccaggugugcaucgccugguccagcuccagcugccacgacggcaaggcguggcugcacgucugcgugaccggggacgacaagaacgccaccgccuccuucaucuacaacggccggcugguggacagcaucggguccuggagcaagaagaucuuccggacccagaaguucgagugcgucugcauccacuggacgugcaccguggugaugaccgacggcuccgccagcggcaaggcggacaccaagauccucuucaucgaggaggggaagaucguccacaucuccacgcugagcggcagcgcccagcacguggaggagugcuccugcuacccccgcuaccccggggugcggugcgucugccgcgacaacuggaagggcagcaaccggccgaucguggacaucaacgugaaggacuacuccaucgucagcuccuacgugugcagcggccuggugggggacacgccccgcaagaacgacuccuucagcuccagccacugccucgaccccaacaacgaggagggcgggcacggcgucaaggggugggccuucgacgacggcaacgacguguggaugggccggaccaucuccgagaagcugcgcagcggguacgagaccuucaaggucaucgagggcugguccaagcccaacagcaagcugcagaucaaccgccaggugaucguggagcgggggaaccgguccggcuacagcgggaucuucuccgucgagggcaagagcugcaucaaccgcugcuucuacguggagcucauccggggccgcaaggaggagaccgaggugugguggaccuccaacagcaucgucguguucugcgggaccagcggcaccuacgggacgggcuccuggccggacggggccgacaucaaccugaugcccaucuga

SEQ ID NO: 78529 - RNA, 1413 nt, Artificial Sequence
  derived and/or modified CDS sequence (opt1) from neuraminidase__InfluenzaA__ABB51958
augaaccccaaccagaagaucaucaccaucggcagcaucuccaucgccaucgggaucaucagccugaugcuccagaucggcaacaucaucuccaucugggccagccacuccauccagaccgggagccagaaccacacgggcgugugcaaccagcgcaucaucaccuacgagaacuccaccugggucaaccacaccuacgugagcaucaacaacacgaacgugaucgcggggaaggacaagaccuccgucacccuggccggcaacagcucccugugcccgauccggggcugggccaucuacaccaaggggaacagcauccgcaucggcuccaagggggacguguucgugauccgggagcccuucaucagcugcucccaccucgagugccgcacguucuuccugacccagggcgcccugcucaacgacaagcacagcaacgggaccgucaaggaccggucccccuaccgcgcccugaugagcugcccccugggcgaggcgccgucccccuacaacagcaaguucgagagcguggccugguccgccagcgccugccacgacggcaugggguggcucaccaucggcaucuccgggcccgacaacggcgcgguggccguccugaaguacaacggcaucaucacggagaccaucaagagcuggaagaagcagauccugcggacccaggaguccgagugcgugugcgugaacgggagcugcuucaccaucaugacggacggccccuccaacggggccgccagcuacaagaucuucaagaucgagaagggcaaggucaccaaguccaucgagcucaacgccccgaacuuccacuacgaggagugcagccgcuaccccgacaccgggaccgugaugugcgugugccgggacaacuggcacggcuccaaccgccccugggucagcuucaaccagaaccuggacuaccagaucggcuacaucugcuccgggguguucggcgacaacccccggccgaaggacggggagggcagcugcaaccccgugacggucgacggggcgaacggcgugaagggcuucuccuacaaguacgggaacggcguggggaucggccgcaccaucagcaaccggcugcgcaagggguucgagaugaucugggaccccaacggcuggaccgacaccgacuccgacuucagcgucaagcaggacgugguggccaucacggacugguccggcuacagcgggagcuucguccagcaccccgagcucaccggccuggacugcauccggccgugcuucuggguggagcugguccgcgggcuccccaaggagaacaccaccaucuggacguccggcagcuccaucagcuucugcggcgugaacuccgacaccgccaacuggagcuggcccgacggggccgagcugcccuucaccaucgacaaguga

SEQ ID NO: 78530 - RNA, 1410 nt, Artificial Sequence
  derived and/or modified CDS sequence (opt1) from neuraminidase__InfluenzaA__ABB51959
augaaccccaaccagaagaucaucaccaucggcagcgugucccugaccaucagcacgaucugcuucuucaugcagaucgccauccucaucaccaccgucacccugcacuucaagcaguacgaguucaacuccccgcccaacaaccaggugaugcugugcgagcccacgaucaucgagcgcaacaucaccgagaucguguaccucaccaacaccacgaucgagaaggagaucugccccaagcuggccgaguaccggaacuggagcaagccgcagugcgacaucaccggguucgcgcccuucuccaaggacaacagcauccgccuguccgccggcggggacaucugggucacccgggagcccuacgugagcugcgaccccgacaagugcuaccaguucgcccucggccaggggaccacgcugaacaacgugcacuccaacgacaccguccacggccgcaccccguaccggacccugcucaugaacgagcugggcgugcccuuccaccuggggacgaagcaggucugcaucgccuggagcuccagcuccugccacgacggcaaggccuggcuccacgugugcgugaccggggacgacaagaacgcgaccgccagcuucaucuacaacggccgccugguggacuccaucgucagcugguccaaggagauccugcggacccaggagagcgagugcgugugcaucaacgggacgugcaccguggucaugaccgacggcuccgccagcggcaaggccgacaccaagauccucuucaacgaggaggggaagaucgugcacacgagcacgugcuccggcagcgcgcagcacguggaggagugcuccugcuacagccgcuaccccgggguccggugcgugugccgcgacaacuggaagggcuccaaccggcccaucguggacaucaacaucaaggacuacagcaucgucuccagcuacgugugcuccggccuggugggggacaccccgcgcaagaacgacagcuccagcuccagccacugccuggaccccaacaacgaggagggcgggcacggcgucaaggggcgggccuucgacgacggcaacgacguguggaugggccgcaccaucuccgagaagcuccggagcggguacgagaccuucaaggucaucgagggcugguccaaccccaacagcaagcugcagaucaaccgccaggugaucguggaccgggggaaccgcuccggcuacagcgggaucuucagcgucgagggcaaguccugcaucaaccggugcuucuacguggagcugauccgcggccggaaggaggagaccgaggugcucuggaccagcaacuccaucgucguguucugcgggaccagcggcacguacgggaccggcuccuggcccgacggggccgacaucaaccugaugccgaucuga

SEQ ID NO: 78531 - RNA, 1413 nt, Artificial Sequence
  derived and/or modified CDS sequence (opt1) from neuraminidase__InfluenzaA__ABB51960
augaaccccaaccagaagaucaucaccaucggcagcaucuccaucgccaucgggaucaucagccugaugcuccagaucggcaacaucaucccgaucugggccucccacagcauccagaccgggucccagaaccacacgggcgugugcaaccagcgcaucaucaccuacgagaacagcaccugggucaaccacaccuacgugaacaucaacaacacgaacgugaucgcggggaaggacaagaccuccgucacccuggccggcaacagcucccugugcagcaucuccggcugggccaucuacaccaaggacaacagcauccggaucggguccaagggcgacguguucgugauccgcgagcccuucaucagcugcucccaccucgagugccggacguucuuccugacccagggggcccugcucaacgacaagcacagcaacggcaccgucaaggaccgcucccccuaccgggcccugaugagcugcccccugggggaggcgccgucccccuacaacagcgaguucgagagcguggccugguccgccagcgccugccacgacggcaugggcuggcucaccaucgggaucuccggccccgacaacggggcgguggccguccugaaguacaacggcaucaucacggagaccaucaagagcuggaagaagcagauccugcgcacccaggaguccgagugcgugugcgugaacggcagcugcuucaccaucaugacggacgggcccuccaacggcgccgccagcuacaagaucuucaagaucgagaaggggaagaucaccaaguccaucgagcucaacgccccgaacagccacuacgaggagugcuccugcuaccccgacaccggcaccgucaugugcgugugccgggacagcuggcacggguccaaccgccccugggugagcuucaaccagaaccuggacuaccagaucggcuacaucugcuccggcgucuucggggacaacccccggccgaaggacggcgaggggagcugcaaccccgugacgguggacggcgcgaacggggucaagggcuucuccuacgaguacggcaacggggacuggaucggccgcaccaagagcaaccggcugcgcaagggguucgagaugaucugggaccccgacggcuggaccgacaccaacuccgacuucagcgugaagcaggacguggucgccaucacggacuggagcggguacuccggcagcuucgugcagcaccccgagcucaccggccuggugugcauccggccgugcuucugggucgagcuggugcgcgggcuccccaaggagaacaccaccaucuggacguccggcagcuccaucagcuucugcggggucaacuccgacaccgccaacuggagcuggcccgacggcgccgagcugcccuucaccaucgacaaguga

SEQ ID NO: 78532 - RNA, 1410 nt, Artificial Sequence; identical to SEQ ID NO: 78367
  derived and/or modified CDS sequence (opt1) from neuraminidase__InfluenzaA__ABB53617

SEQ ID NO: 78533 - RNA, 1410 nt, Artificial Sequence
  derived and/or modified CDS sequence (opt1) from neuraminidase__InfluenzaA__ABB53721
augaaccccaaccagaagaucaucaccaucggcagcgugucccugaccaucagcacgaucugcuucuucaugcagaucgccauccucaucaccaccgucacccugcacuucaagcaguacgaguucaacuccccgcccaacaaccaggugaugcugugcgagcccacgaucaucgagcgcaacaucaccgagaucguguaccucaccaacaccacgaucgagaaggagaucugccccaagcuggccgaguaccggaacuggagcaagccgcagugcgacaucaccggguucgcgcccuucuccaaggacaacagcauccgccuguccagcggcggggacaucugggucacccgggagcccuacguguccugcgaccccgacaagugcuaccaguucgcccucggccaggggaccacgcugaacaacgugcacagcaacgacaccguccacgaccgcaccccguaccggacccugcucaugaacgagcugggcgugcccuuccaccugggcacgaagcaggucugcaucgccugguccagcuccagcugccacgacgggaaggccuggcuccacgugugcgugaccggcgacgacaagaacgccaccgcguccuucaucuacaacgggcgccugguggacagcaucgucuccuggagcaaggagauccugcggacccaggaguccgagugcgugugcaucaacggcacgugcaccguggucaugaccgacgggagcgccagcggcaaggccgacaccaagauccucuucaucgaggagggcaagaucgugcacacguccacccugagcggguccgcccagcacguggaggagugcagcugcuacccccgcuaccccggcguccggugcgugugccgcgacaacuggaagggguccaaccggccgaucguggacaucaacaucaaggacuacagcaucgucuccagcuacgugugcuccggccuggugggcgacacgccccgcaagaacgacagcuccagcuccagccacugccucgaccccaacaacgaggagggcgggcacggggucaagggcugggcguucgacgacgggaacgacguguggaugggccggaccaucuccgagaagcugcgcagcggcuacgagaccuucaaggucaucgaggggugguccaaccccaacagcaagcugcagaucaaccgccaggugaucguggaccggggcaaccgguccggguacagcggcaucuucagcgucgaggggaaguccugcaucaaccgcugcuucuacguggagcucauccggggccgcaaggaggagaccgaggugcuguggaccagcaacuccaucgucguguucugcggcaccagcgggacguacggcaccggguccuggccggacggcgccgacaucaaccugaugcccaucuga

SEQ ID NO: 78534 - RNA, 1410 nt, Artificial Sequence
  derived and/or modified CDS sequence (opt1) from neuraminidase__InfluenzaA__ABB53754
augaaccccaaccagaagaucaucaccaucggcagcgugucccugaccaucgccacgaucugcuuccucaugcagaucgccauccuggucaccaccgugacccugcacuucaagcaguacgagugcagcuccccgcccaacaaccaggugaugcccugcgagcccaucaucaucgagcgcaacaucacggagaucgucuaccucaccaacaccaccaucgagaaggagaucugcccgaagcugguggaguaccggaacuggagcaagccccagugcaagaucacgggguucgcgcccuucuccaaggacaacagcauccgccuguccgccggcggggacaucugggugacccgggagcccuacgucagcugcgacccgggcaagugcuaccaguucgcccucgggcagggcaccacccuggacaacaagcacuccaacgacacgauccacgaccgcacgccccaccggacccugcucaugaacgagcugggcgugcccuuccaccuggggacccgccaggugugcaucgccuggagcuccagcuccugccacgacggcaaggccuggcuccacgucugcgugaccggguacgacaagaacgcgaccgccagcuucaucuacgacggccggcugguggacuccaucgggagcugguccaagaacauccugcgcacccaggagagcgagugcgucugcaucaacgggaccugcacgguggugaugaccgacggcuccgccagcgagcgggccgacaccaagauccucuucaucgaggagggcaagaucguccacaucagcccccuguccggcagcgcgcagcacguggaggagugcuccugcuacccgcgcuaccccggggugcggugcgucugccgcgacaacuggaagggcagcaaccggcccgugguggacaucaacgucaaggacuacuccaucgugagcuccuacgugugcagcggccuggucggggacacgccccgcaagaacgaccgguccagcuccagcuacugccgcaacccgaacaacgagaagggcaaccacggggugaagggcugggccuucgacgacgggaacgacgucuggaugggccggaccaucuccgaggagagccgcuccggcuacgagaccuucaaggugaucgggggcuggagcacccccaacuccaagcuccagaucaaccgccaggugaucgucgacagcgacaaccgguccggguacagcggcaucuucagcguggaggggaaguccugcaucaaccggugcuucuacguggagcugauccgcggccgcgagcaggagacccgggucugguggacgagcaacuccaucgugguguucugcggcaccagcgggaccuacggcaccggguccuggcccgacggcgccgacaucaaccugaugcccaucuga

SEQ ID NO: 78535 - RNA, 1410 nt, Artificial Sequence; identical to SEQ ID NO: 78127
  derived and/or modified CDS sequence (opt1) from neuraminidase__InfluenzaA__ABB54517

SEQ ID NO: 78536 - RNA, 1410 nt, Artificial Sequence
  derived and/or modified CDS sequence (opt1) from neuraminidase__InfluenzaA__ABB59999
augaaccccaaccagaagaucaucaccaucggcagcgugucccugaccaucgccacgaucugcuuccucaugcagaucgccauccuggucaccaccgugacccugcacuucaagcaguacgagugcagcuccccgcccaacaaccaggugaugcucugcgagcccacgaucaucgagcgcaacaucaccgagaucgucuaccugaccaacaccacgaucgagaaggagaucugccccaagcuggcggaguaccggaacuggagcaagccgcagugcaagaucaccggguucgcccccuucuccaaggacaacagcauccgccucuccgccggcggggacaucugggugacccgggagcccuacgugagcugcgaccccgacaagugcuaccaguucgcccugggccaggggaccacgcugaacaaccgccacuccaacgacaccguccacgaccggaccccguaccgcacccuccugaugaacgagcugggcgugcccuuccaccucggcacgaagcaggucugcaucgccuggagcuccagcuccugccacgacgggaaggcguggcugcacgugugcgugaccggccacgacgagaacgccaccgccagcuucaucuacgacgggcggcugguggacuccaucggcagcugguccaagaagauccuccgcacccaggagagcgagugcgucugcaucaacgggacgugcaccguggugaugaccgacggcuccgccagcggccgggcggacaccaagauccuguucaucgaggaggggaagaucguccacaucagcccccuguccggcagcgcccagcacguggaggagugcuccugcuacccccgcuacccgggggugcggugcgucugccgcgacaacuggaagggcagcaaccggcccaucguggacaucaacaucaaggacuacuccaucgugagcuccuacgucugcagcggccucgugggggacacgccccgcaagaacgacuccagcuccagcucccacugccugaaccccaacaacgaggagggcgggcacggcgugaaggggugggccuucgacgacggcaacgacgucuggaugggccggaccaucagcgagaaguuccgcuccggguacgagaccuucaaggugaucgagggcuggagcaagccgaacuccaagcugcagaucaaccggcaggucaucguggaccgcgggaaccggagcggcuacuccgggaucuucagcguggagggcaagagcugcaucaaccgcugcuucuacgucgagcucauccggggccgcaagcaggagaccgaggugugguggacguccaacagcaucgugaccuucugcgggaccuccggcaccuacgggacgggcagcuggcccgacggggccgacaucaaccugaugcccaucuga

SEQ ID NO: 78537 - RNA, 1410 nt, Artificial Sequence
  derived and/or modified CDS sequence (opt1) from neuraminidase__InfluenzaA__ABB60010
augaaccccaaccagaagaucaucaccaucggcagcgugucccugaccaucgccacgaucugcuuccucaugcagaucgccauccuggucaccaccgugacccugcacuucaagcaguacgaguacagcuccccgcccaacaaccaggugaugcucugcgagcccacgaucaucgagcgcaacaucaccgagaucgucuaccugaccaacaccacgaucgagaaggagaucugccccaagcuggcggaguaccggaacuggagcaagccgcagugcaagaucaccggguucgcccccuucuccaaggacaacagcauccgccucuccgccggcggggacaucugggugacccgggagcccuacgugagcugcgaccccgacaagugcuaccaguucgcccugggccaggggaccacgcugaacaaccgccacuccaacgacaccguccacgaccggaccccguaccgcacccuccugaugaacgagcugggcgugcccuuccaccucggcacgaagcaggucugcaucgccuggagcuccagcuccugccacgacgggaaggcguggcugcacgugugcgugaccggccacgacgagaacgccaccgccagcuucaucuacgacgggcggcugguggacuccaucggcagcugguccaagaagauccuccgcacccaggagagcgagugcgucugcaucaacgggacgugcaccguggugaugaccgacggcuccgccagcggccgggcggacaccaagauccuguucaucgaggaggggaagaucguccacaucagcccccuguccggcagcgcccagcacguggaggagugcuccugcuacccccgcuacccgggggugcggugcgucugccgcgacaacuggaagggcagcaaccggcccaucguggacaucaacgugaaggacuacuccaucgucagccgcuacgugugcuccggccucgugggggacacgccccggaagaacgacagcuccagcuccagccacugccugaaccccaacaacgaggagggcgggcacggcgucaaggggugggccuucgacgacggcaacgacguguggaugggccgcaccaucuccgagaaguuccggagcggguacgagaccuucaaggucaucgagggcugguccaagccgaacagcaagcugcagaucaaccgccaggugaucguggaccgggggaaccgcuccggcuacagcgggaucuucuccgucgagggcaagagcugcaucaaccggugcuucuacguggagcucauccgcggccgcaagcaggagaccgaggugugguggacgagcaacuccaucgucguguucugcgggaccagcggcaccuacgggaccggcuccuggcccgacggggccgacaucaaccugaugcccaucuga

SEQ ID NO: 78538 - RNA, 1410 nt, Artificial Sequence
  derived and/or modified CDS sequence (opt1) from neuraminidase__InfluenzaA__ABB77867
augaaccccaaccagaagaucaucaccaucggcagcgugucccugaccaucgccacgaucugcuuccucaugcagaucgccauccuggucaccaccgugacccugcacuucaagcaguacgagugcaacagcccgcccaacaaccaggugaugcucugcgagcccacgaucaucgagcgcaacaucaccgagaucgucuaccugaccaacaccacgaucgagaaggagaucugccccaagcuggcggaguaccggaacugguccaagccgcagugcaagaucaccggguucgcccccuucagcaaggacaacuccauccgccucagcgccggcggggacaucugggugacccgggagcccuacguguccugcgaccccgacaagugcuaccaguucgcccugggccaggggaccacgcugaacaacggccacagcaacgacaccguccacgaccgcaccccguaccggacccuccugaugaacgagcugggcgugcccuuccaccucgggacgaagcaggucugcaucgccugguccagcuccagcugccacgacggcaaggcguggcugcacgugugcgugaccgggcacgacgagaacgccaccgccuccuucaucuacgacggccgccugguggacagcaucggguccuggagcaagaagauccuccggacccaggaguccgagugcgucugcaucaacggcacgugcaccguggugaugaccgacggcagcgccuccgggcgcgcggacaccaagauccuguucaucgaggagggcaagaucguccacaucagccagcugagcggguccgcccagcacguggaggagugcagcugcuacccccgguaccccggcgugcgcugcgucugccgggacaacuggaagggcuccaaccgcccgaucguggacaucaacgugaaggaccacagcaucgucuccagcuacgugugcuccgggcucgugggcgacacgccccggaagaacgacagcuccagcuccagccacugccugaaccccaacaacgaggagggcgggcacggggucaagggcugggccuucgacgacggcaacgacguguggauggggcgcaccaucuccgagaagcugcggagcggcuacgagaccuucaaggucaucgaggggugguccaagcccaacagcaagcuccagaucaaccgccaggugaucguggaccggggcaaccgcuccggguacagcggcaucuucuccgucgagggcaagagcugcaucaaccggugcuucuacguggagcugauccgcgggcggaagcaggagaccgaggugugguggacgagcaacuccaucgucguguucugcggcaccagcgggaccuacggcaccggguccuggccggacggcgccgacaucaaccugaugcccaucuga

SEQ ID NO: 78539 - RNA, 1410 nt, Artificial Sequence; identical to SEQ ID NO: 78538
  derived and/or modified CDS sequence (opt1) from neuraminidase__InfluenzaA__ABB79719

SEQ ID NO: 78540 - RNA, 1410 nt, Artificial Sequence
  derived and/or modified CDS sequence (opt1) from neuraminidase__InfluenzaA__ABB79734
augaaccccaaccagaagaucaucaccaucggcagcgugucccugacccucagcacgaucugcuucuucaugcagaucgccauccugaucaccaccgucacccugcacuucaagcaguacgaguucaacuccccgcccaacaaccaggugaugcucugcgagcccacgaucaucgagcgcaacaucaccgagaucguguaccugaccaacaccacgaucgagaaggagaucugccccaagcuggccgaguaccggaacuggagcaagccgcagugcgacaucaccggguucgcgcccuucuccaaggacaacagcauccgccucuccgccggcggggacaucugggucacccgggagcccuacgugagcugcgaccccgacaagugcuaccaguucgcccugggccaggggaccacgcugaacaacgugcacuccaacgacaccguccacgaccgcaccccguaccggacccuccugaugaacgagcugggcgugcccuuccaccucggcacgaagcaggucugcaucgccuggagcuccagcuccugccacgacgggaaggccuggcugcacgugugcgugaccggcgacgacaagaacgcgaccgccagcuucaucuacaacgggcgccugguggacuccaucgucagcugguccaagaagauccuccggacccaggagagcgagugcgugugcaucaacggcacgugcaccguggucaugaccgacggguccgccagcggcaaggccgacaccaagauccuguucaucgaggagggcaagaucgugcacacgagcacccuguccgggagcgcgcagcacguggaggagugcuccugcuacccccgcuaccccggcguccggugcgugugccgcgacaacuggaaggggagcaaccggccgaucguggacaucaacaucaaggacuacuccaucgucagcuccuacgugugcagcggccucgugggcgacacgccccgcaagaacgacuccagcuccagcucccacugccuggaccccaacaacgaggagggcgggcacggggucaagggcugggccuucgacgacgggaacgacguguggaugggccggaccaucagcgagaagcugcgcuccggcuacgagaccuucaaggucaucgagggguggagcaaccccaacuccaagcuccagaucaaccgccaggugaucguggaccggggcaaccggagcggguacuccggcaucuucagcgucgagggcaagagcugcaucaaccgcugcuucuacguggagcugauccgggggcgcaaggaggagaccgaggugcuguggaccuccaacagcaucgucguguucugcggcaccuccgggacguacggcaccgggagcuggccggacggcgccgacaucaaccucaugcccaucuga

SEQ ID NO: 78541 - RNA, 1410 nt, Artificial Sequence; identical to SEQ ID NO: 78511
  derived and/or modified CDS sequence (opt1) from neuraminidase__InfluenzaA__ABB79791

SEQ ID NO: 78542 - RNA, 1410 nt, Artificial Sequence
  derived and/or modified CDS sequence (opt1) from neuraminidase__InfluenzaA__ABB79802
augaaccccaaccagaagaucaucaccaucggcagcgugucccugaccaucgccacgaucugcuuccucaugcagaucgccauccuggucaccaccgugacccugcacuucaagcaguacgagugcagcuccccgcccaacaaccaggugaugcccugcgagcccaucaucaucgagcgcaacaucacggagaucgucuaccucaccaacaccaccaucgagaaggagaucugcccgaagcugguggaguaccggaacuggagcaagccccagugcaagaucacgggguucgcgcccuucuccaaggacaacagcauccgccuguccgccggcggggacaucugggugacccgggagcccuacgucagcugcgacccgggcaagugcuaccaguucgcccucgggcagggcaccacccugaacaacaagcacuccaacgacacgauccacgaccgcacccccuaccggacccugcucaugaacgagcugggcgugcccuuccaccuggggaccaagcaggucugcaucgccuggagcuccagcuccugccacgacggcaaggccuggcuccacgugugcgugacggggcacgacgagaacgcgaccgccagcuucaucuacgacggccgccugguggacuccaucgggagcugguccaagaacauccugcggacccaggagagcgagugcgucugcaucaacgggaccugcacgguggugaugaccgacggcuccgccagcgagcgcgccgacaccaagauccucuucaucgaggagggcaagaucguccacaucagcccccuguccggcagcgcgcagcacguggaggagugcuccugcuacccgcgguaccccggggugcgcugcgucugccgggacaacuggaagggcagcaaccgccccaucguggacaucaacgugaaggacuacuccaucgucagcuccuacgugugcagcggccuggugggggacacgccccggaagaacgaccgcuccagcuccagcuacugccggaacccgaacaacgagaagggcucccacggggucaagggcugggccuucgacgacgggaacgacguguggaugggccgcaccaucggcgaggagcuccggagcggguacgagaccuucaaggucaucggcgggugguccacccccaacagcaagcugcagaucaaccgccaggugaucguggacuccggcaaccggagcggguacuccggcaucuucagcgucgagggcaagagcugcaucaaccgcugcuucuacguggagcugauccgggggcgcgagcaggagacccgcgugugguggacguccaacagcaucgucguguucugcggcaccuccgggaccuacggcaccgggagcuggcccgacggcgccgacaucaaccucaugcccaucuga

SEQ ID NO: 78543 - RNA, 1410 nt, Artificial Sequence
  derived and/or modified CDS sequence (opt1) from neuraminidase__InfluenzaA__ABB79813
augaaccccaaccagaagaucaucaccaucggcagcgugucccugaccaucgccacgaucugcuuccucaugcagaucgccauccuggucaccaccgugacccugcacuucaagcaguacgagugcaacagcccgcccaacaaccaggugaugcucugcgagcccacgaucaucgagcgcaacaucaccgagaucgucuaccugaccaacaccacgaucgagaaggaggugugccccaagcuggcggaguaccggaacugguccaagccgcagugcaagaucaccggguucgcccccuucagcaaggacaacuccauccgccucagcgccggcggggacaucugggugacccgggagcccuacgucuccugcgaccccggcaagugcuaccaguucgcccuggggcagggcaccacgcugaacaaccgccacagcaacgacaccgugcacgaccggaccccguaccgcacccuccugaugaacgagcugggcgugcccuuccaccucgggacgaagcaggucugcaucgccugguccagcuccagcugccacgacggcaaggcguggcugcacgugugcgugaccgggcacgacgagaacgccaccgccuccuucaucuacgacggccggcuggucgacagcaucggguccuggagcaagaacauccuccgcacccaggaguccgagugcgugugcaucaacggcacgugcaccguggucaugaccgacggcagcgccuccgagcgggcggacaccaagauccuguucaucgaggaggggaagaucgugcacaucagcccccugagcggcuccgcccagcacguggaggagugcagcugcuacccccgcuacccggggguccggugcgugugccgcgacaacuggaagggcuccaaccggcccaucguggacaucaacgucaaggacuacagcaucguguccagcuacgugugcuccggccucgucggggacacgccccgcaagaacgacagcuccagcuccagcuacugccggaaccccaacaacgagaagggcucccacggggugaagggcugggccuucgacgacgggaacgacgucuggaugggccgcaccaucagcgaggagcugcgguccggcuacgagaccuucaaggugaucgggggcuggagcaagccgaacuccaagcugcagaucaaccgccaggugaucgucgaccgggggaaccgcagcggcuacuccgggaucuucagcguggagggcaagagcugcaucaaccggugcuucuacguggagcucauccgcggccgcaagcaggagaccgaggucugguggacguccaacagcaucgugguguucugcgggaccuccggcaccuacgggaccggcagcuggcccgacggggccgacaucaaccugaugcccaucuga

SEQ ID NO: 78544 - RNA, 1410 nt, Artificial Sequence; identical to SEQ ID NO: 78543
  derived and/or modified CDS sequence (opt1) from neuraminidase__InfluenzaA__ABB79960

SEQ ID NO: 78545 - RNA, 1410 nt, Artificial Sequence; identical to SEQ ID NO: 78543
  derived and/or modified CDS sequence (opt1) from neuraminidase__InfluenzaA__ABB79971

SEQ ID NO: 78546 - RNA, 1413 nt, Artificial Sequence
  derived and/or modified CDS sequence (opt1) from neuraminidase__InfluenzaA__ABB79982
augaacgccaaccagaagaucaucaccaucggcagcaucuccaucgccaucgggaucaucagccugaugcuccagaucggcaacaucaucuccaucugggcgagccacuccauccagaccgggagccagaaccacacgggcgugugcaaccagcgcaucaucaccuacgagaacuccaccugggucaaccacaccuacgugaacaucaacaacacgaacgugaucgccgggaaggacaagaccagcgucacccuggccggcaacuccagccugugcuccaucagcggcugggccaucuacaccaaggacaacuccauccggaucgggagcaagggcgacguguucgugauccgcgagcccuucaucuccugcagccaccucgagugccggacguucuuccugacccagggggcccugcucaacgacaagcacuccaacggcaccgucaaggaccgcagcccguaccgggcgcugauguccugcccccugggggaggcccccagccccuacaacagcaaguucgaguccguggccuggagcgccuccgcgugccacgacggcaugggcuggcucaccaucgggaucagcggcccggacaacggggccguggccguccugaaguacaacggcaucaucacggagaccaucaaguccuggaagaagcagauccugcgcacccaggagagcgagugcgugugcgugaacggcuccugcuucaccaucaugacggacgggcccagcaacggcgccgccuccuacaagaucuucaagaucgagaaggggaaggucaccaagagcaucgagcucaacgcgcccaacuuccacuacgaggagugcuccugcuaccccgacaccggcaccgugaugugcgugugccgggacaacuggcacgggagcaaccgcccgugggucuccuucaaccagaaccuggacuaccagaucggcuacaucugcagcggcguguucggggacaacccccggcccaaggacggcgagggguccugcaaccccgugacggucgacggcgccaacggggugaagggcuucagcuacaaguacggcaacgggguguggaucggccgcaccaaguccaaccggcugcgcaagggguucgagaugaucugggacccgaacggcuggaccgacaccgacagcgacuucuccgucaagcaggacgugguggccaucacggacuggagcggguacagcggcuccuucguccagcaccccgagcucaccggccuggacugcauccggcccugcuucuggguggagcugguccgcgggcuccccaaggagaacaccaccaucuggacgagcggcuccagcaucuccuucugcggggugaacagcgacaccgccaacugguccuggccggacggcgccgagcugcccuucaccaucgacaaguga

SEQ ID NO: 78547 - RNA, 1413 nt, Artificial Sequence; identical to SEQ ID NO: 78475
  derived and/or modified CDS sequence (opt1) from neuraminidase__InfluenzaA__ABB79993

SEQ ID NO: 78548 - RNA, 1410 nt, Artificial Sequence
  derived and/or modified CDS sequence (opt1) from neuraminidase__InfluenzaA__ABB80004
augaaccccaaccagaagaucaucaccaucggcagcgugucccugaccaucagcacgaucugcuucuucaugcagaucgccauccucaucaccaccgucacccugcacuucaagcaguacgaguucaacuccccgcccaacaaccaggugaugcugugcgagcccacgaucaucgagcgcaacaucaccgagaucguguaccucaccaacaccacgaucgagaaggagaucugccccaagcuggccgaguaccggaacuggagcaagccgcagugcgacaucaccggguucgcgcccuucuccaaggacaacagcauccgccuguccgccggcggggacaucugggucacccgggagcccuacgugagcugcgaccccgacaagugcuaccaguucgcccucggccaggggaccacgcugaacaacgugcacuccaacgacaccguccacgaccgcaccccguaccggacccugcucaugaacgagcugggcgugcccuuccaccugggcacgaagcaggucugcaucgccuggagcuccagcuccugccacgacgggaaggccuggcuccacgugugcgugaccggcgacgacaagaacgcgaccgccagcuucaucuacaacgggcgccugguggacuccaucgucagcugguccaaggagauccugcggacccaggagagcgagugcgugugcaucaacggcacgugcaccguggucaugaccgacggguccgccagcggcaaggccgacaccaagauccucuucaucgaggagggcaagaucgugcacacgagcacccuguccgggagcgcgcagcacguggaggagugcuccugcuacccccgcuaccccggcguccggugcgugugccgcgacaacuggaaggggagcaaccggccgaucguggacaucaacaucaaggacuacuccaccgucagcuccuacgugugcagcggccuggugggcgacacgccccgcaagaacgacuccagcuccagcucccacugccucgaccccaacaacgaggagggcgggcacggggucaagggcugggccuucgacgacgggaacgacguguggaugggccggaccaucagcgagaagcugcgcuccggcuacgagaccuucaaggucaucgagggguggagcaaccccaacuccaagcugcagaucaaccgccaggugaucguggaccggggcaaccggagcggguacuccggcaucuucagcgucgagggcaagagcugcaucaaccgcugcuucuacguggagcucauccgggggcgcaaggaggagaccgaggugcuguggaccuccaacagcaucgucguguucugcggcacguccgggaccuacggcaccgggagcuggccggacggcgccgacaucaaccugaugcccaucuga

SEQ ID NO: 78549 - RNA, 1410 nt, Artificial Sequence; identical to SEQ ID NO: 78533
  derived and/or modified CDS sequence (opt1) from neuraminidase__InfluenzaA__ABB80015

SEQ ID NO: 78550 - RNA, 1410 nt, Artificial Sequence
  derived and/or modified CDS sequence (opt1) from neuraminidase__InfluenzaA__ABB80037
augaaccccaaccagaagaucaucaccaucggcagcgugucccugaccaucgccacggucugcuuccucaugcagaucgccauccuggugaccaccgugacccugcacuucaagcaguacgagugcgacagcccggcgaacaaccaggucaugcccugcgagcccaucaucaucgagcgcaacaucacggagaucguguaccucaacaacaccaccaucgagaaggagaucugccccaagcugguggaguaccggaacugguccaagccgcagugcaagaucaccggguucgcccccuucagcaaggacaacuccauccgccugagcgccggcggggacaucugggucacgcgggagcccuacguguccugcgaccccggcaagugcuaccaguucgcccucgggcagggcaccacccuggacaacaagcacagcaacgacaccauccacgaccgcaucccgcaccggacgcugcucaugaacgagcugggcgugcccuuccaccuggggacccgccaggucugcaucgccugguccagcuccagcugccacgacggcaaggcguggcuccacgugugcgugaccggggacgacaagaacgccaccgccuccuucaucuacgacggccggcuggucgacagcaucggguccuggagccagaacauccugcgcacgcaggaguccgagugcgugugcaucaacgggaccugcaccguggucaugaccgacggcagcgccuccggccgggcggacacgcgcauccucuucaucgaggagggcaagaucgugcacaucagcccccugagcggguccgcccagcacguggaggagugcagcugcuacccccgguacccgggcguccgcugcaucugccgggacaacuggaagggcuccaaccgccccgugguggacaucaacgucgaggacuacagcaucgacuccagcuacgugugcuccgggcuggugggcgacacgccccggaacaacgaccgcagcuccaacagcaacugccggaaccccaacaacgagcgcgggaaccacggcgucaaggggugggccuucgacgacggcaacgacguguggaugggccggaccaucuccaaggaccuccgcagcggguacgagaccuucaaggucaucggcgggugguccaccccgaacagcaagucccagaucaaccgccaggugaucguggacagcgacaaccgguccggcuacagcgggaucuucuccgucgagggcaagagcugcaucaaccgcugcuucuacguggagcugauccggggccgcgagcaggagacccgggugugguggaccagcaacuccaucgucguguucugcgggaccagcggcacguacgggaccggcuccuggcccgacggggccgacaucaaccugaugcccaucuga

SEQ ID NO: 78551 - RNA, 1413 nt, Artificial Sequence
  derived and/or modified CDS sequence (opt1) from neuraminidase__InfluenzaA__ABB80048
augaaccccaaccagaagaucaucaccaucggcagcaucuccaucgccaucgggaucaucagccugaugcuccagaucggcaacaucaucuccaucugggccagccacuccauccagaccgggagccagaaccacacgggcgugugcaaccagcgcaucaucaccuacgagaacuccaccugggucaaccacaccuacgugaacaucaacaacacgaacgugaucgcggggaaggacaagaccagcgucacccuggccggcaacuccagccugugcuccaucagcggcugggccaucuacaccaaggacaacuccauccggaucgggagcaagggcgacguguucgugauccgcgagccguucaucuccugcagccaccucgagugccggacguucuuccugacccagggggcccugcucaacgacaagcacuccaacggcaccgucaaggaccgcagccccuaccgggcccugauguccugcccccugggggaggcgcccagcccguacaacagcaaguucgaguccguggccuggagcgccuccgccugccacgacggcaugggcuggcucaccaucgggaucagcggccccgacaacggggcgguggccguccugaaguacaacggcaucaucacggagaccaucaaguccuggaagaagcagauccugcgcacccaggagagcgagugcgugugcgugaacggcuccugcuucaccaucaugacggacgggcccagcaacggcgccgccuccuacaagaucuucaagaucgagaaggggaaggucaccaagagcguggagcucaacgcccccaacuuccacuacgaggagugcuccugcuacccggacaccggcaccgugaugugcgucugccgggacaacuggcacgggagcaaccgccccuggguguccuucaaccagaaccuggacuaccagaucggcuacaucugcagcggcguguucggggacaacccccggcccaaggacggcgagggguccugcaacccggucacgguggacggcgcgaacggggugaagggcuucagcuacaaguacggcaacggggucuggaucggccgcaccaaguccaaccggcugcgcaagggguucgagaugaucugggaccccaacggcuggaccgacaccgacagcgacuucuccgugaagcaggacguggucgccaucacggacuggagcggguacagcggcuccuucgugcagcaccccgagcucaccggccuggacugcauccggcccugcuucugggucgagcuggugcgcgggcucccgaaggagaacaccaccaucuggacgagcggcuccagcaucuccuucugcggggugaacggcgacaccgccaacuggagcuggcccgacggcgccgagcugcccuucaccaucgacaaguga

SEQ ID NO: 78552 - RNA, 1410 nt, Artificial Sequence
  derived and/or modified CDS sequence (opt1) from neuraminidase__InfluenzaA__ABB80084
augaaccccaaccagaagaucaucaccaucggcagcgugucccugaccaucgccacgaucugcuuccucaugcagaucgccauccuggucaccaccgugacccugcacuucaagcaguacgagugcaacagcccguccaacaaccaggugaugcucugcgagcccacgaucaucgagcgcaacaucaccgagaucgucuaccugaccaacaccacgaucgagaaggagaucugccccaagcuggcggaguaccggaacuggagcaagccccagugcaagaucaccggguucgccccguucuccaaggacaacagcauccgccucuccgccggcggggacaucugggugacccgggagcccuacgugagcugcgaccccgacaagugcuaccaguucgcccugggccaggggaccacgcugaacaacggccacuccaacgacaccguccacgaccgcacccccuaccggacccuccugaugaacgagcugggcgugccguuccaccucgggacgaagcaggucugcaucgccuggagcuccagcuccugccacgacggcaaggcguggcugcacgugugcgugaccgggcacgacgagaacgccaccgccagcuucaucuacgacggccgccugguggacuccaucgggagcugguccaagaagauccuccggacccaggagagcgagugcgucugcaucaacggcacgugcaccguggugaugaccgacggcuccgccagcgggcgcgcggacaccaagauccuguucaucgaggagggcaagaucguccacaucagccagcuguccgggagcgcccagcacguggaggagugcuccugcuacccccgguaccccggcgugcgcugcgucugccgggacaacuggaagggcagcaaccgccccaucguggacaucaacgugaaggaccacuccaucgucagcuccuacgugugcagcgggcucgugggcgacacgccgcggaagaacgacuccagcuccagcucccacugccugaaccccaacaacgaggagggcgggcacggggucaagggcugggccuucgacgacggcaacgacguguggauggggcgcaccaucagcgagaagcugcgguccggcuacgagaccuucaaggucaucgagggguggagcaagcccaacuccaagcuccagaucaaccgccaggugaucguggaccggggcaaccgcagcggguacuccggcaucuucagcgucgagggcaagagcugcaucaaccggugcuucuacguggagcugauccgcgggcggaagcaggagaccgaggugugguggacguccaacagcaucgucguguucugcggcaccuccgggaccuacggcaccgggagcuggcccgacggcgccgacaucaaccugaugccgaucuga

SEQ ID NO: 78553 - RNA, 1410 nt, Artificial Sequence; identical to SEQ ID NO: 78538
  derived and/or modified CDS sequence (opt1) from neuraminidase__InfluenzaA__ABB80095

SEQ ID NO: 78554 - RNA, 1410 nt, Artificial Sequence; identical to SEQ ID NO: 78538
  derived and/or modified CDS sequence (opt1) from neuraminidase__InfluenzaA__ABB80162

SEQ ID NO: 78555 - RNA, 1410 nt, Artificial Sequence; identical to SEQ ID NO: 78538
  derived and/or modified CDS sequence (opt1) from neuraminidase__InfluenzaA__ABB80199

SEQ ID NO: 78556 - RNA, 1410 nt, Artificial Sequence
  derived and/or modified CDS sequence (opt1) from neuraminidase__InfluenzaA__ABB80210
augaaccccaaccagaagaucaucaccaucggcagcgugucccugaccaucgccacgaucugcuuccucaugcagaucgccauccuggucaccaccgugacccugcacuucaagcaguacgagugcagcuccccgcccaacaaccaggugaugcucugcgagcccacgaucaucgagcgcaacaucaccgagaucgucuaccugaccaacaccacgaucgagaaggagaucugccccaagcuggcggaguaccggaacuggagcaagccgcagugcaagaucaccggguucgcccccuucuccaaggacaacagcauccgccucuccgccggcggggacaucugggugacccgggagcccuacgugagcugcgaccccgacaagugcuaccaguucgcccugggccaggggaccacgcugaacaaccgccacuccaacgacaccguccacgaccggaccccguaccgcacccuccugaugaacgagcugggcgugcccuuccaccucggcacgaagcaggucugcaucgccuggagcuccagcuccugccacgacgggaaggcguggcugcacgugugcgugaccggccacgacgagaacgccaccgccagcuucaucuacgacgggcggcugguggacuccaucggcagcugguccaagaagauccuccgcacccaggagagcgagugcgucugcaucaacgggacgugcaccguggugaugaccgacggcuccgccagcggccgggcggacaccaagauccuguucaucgaggaggggaagaucguccacaucagcccccuguccggcagcgcccagcacguggaggagugcuccugcuacccccgcuacccgggggugcggugcgucugccgcgacaacuggaagggcagcaaccggcccaucguggacaucaacgugaaggacuacuccaucgucagcuccuacgugugcagcggccucgugggggacacgccccgcaagaacgacuccagcuccagcucccacugccugaaccccaacaacgaggagggcgggcacggcgucaaggggugggccuucgacgacggcaacgacguguggaugggccggaccaucagcgagaaguuccgcuccggguacgagaccuucaaggucaucgagggcuggagcaagccgaacuccaagcugcagaucaaccgccaggugaucguggaccgggggaaccggagcggcuacuccgggaucuucagcgucgagggcaagagcugcaucaaccgcugcuucuacguggagcucauccggggccgcaagcaggagaccgaggugugguggacguccaacagcaucgucguguucugcgggaccuccggcaccuacgggaccggcagcuggcccgacggggccgacaucggccugaugcccaucuga

SEQ ID NO: 78557 - RNA, 1410 nt, Artificial Sequence
  derived and/or modified CDS sequence (opt1) from neuraminidase__InfluenzaA__ABB80232
augaaccccaaccagaagaucaucaccaucggcagcgugucccugaccaucgccacgaucugcuuccucaugcagaucgccauccuggucaccaccgugacccugcacuucaagcaguacgagugcaacagcccgcccaacaaccaggugaugcucugcgagcccacgaucaucgagcgcaacaucaccgagaucgucuaccugaccaacaccacgaucgagaaggagaucugccccaagcuggcggaguaccggaacugguccaagccgcagugcaagaucaccggguucgcccccuucagcaaggacaacuccauccgccucgccgccggcggggacaucugggugacccgggagcccuacgugagcugcgaccccgacaagugcuaccaguucgcccugggccaggggaccacgcugaacaaccgccacuccaacgacaccguccacgaccggaccccguaccgcacccuccugaugaacgagcugggcgugcccuuccaccucggcacgaagcaggucugcaucgcguggagcuccagcuccugccacgacgggaaggccuggcugcacgugugcgugaccggccacgacgagaacgccaccgccagcuucaucuacgacgggcggcugguggacuccaucggcagcugguccaagaagauccuccgcacccaggagagcgagugcgucugcaucaacgggacgugcaccguggugaugaccgacggcuccgcgagcggccgggccgacaccaagauccuguucaucgaggaggggaagaucguccacaucucccagcugagcggcagcgcccagcacguggaggagugcuccugcuacccccgcuaccccggggugcggugcgucugccgcgacaacuggaagggcagcaaccggccgaucguggacaucaacgugaaggacuacuccaucgucagcuccuacgugugcagcggccucgugggggacacgccccgcaagaacgacuccagcuccagcucccacugccugaaccccaacaacgaggagggcgggcacggcgucaaggggugggccuucgacgacggcgacgacguguggaugggccggaccaucagcgagaagcugcgcuccggguacgagaccuucaaggucaucgagggcuggagcaagcccaacuccaagcuccagaucaaccgccaggugaucguggaccgggggaaccggagcggcuacuccgggaucuucagcgucgagggcaaguccugcaucaaccgcugcuucuacguggagcugauccggggccgcaagcaggagaccgaggugugguggacgagcaacagcaucgucguguucugcgggaccuccggcaccuacgggaccggcagcuggccggacggggccgacaucaaccugaugcccaucuga

SEQ ID NO: 78558 - RNA, 1410 nt, Artificial Sequence
  derived and/or modified CDS sequence (opt1) from neuraminidase__InfluenzaA__ABB80243
augaaccccaaccagaagaucaucaccaucggcagcgugucccugaccaucgccacgaucugcuuccucaugcagaucgccauccuggucaccaccgugacccugcacuucaagcaguacgagugcaacagcccgcccaacaaccaggugaugcucugcgagcccacgaucaucgagcgcaacaucaccgagaucgucuaccugaccaacaccacgaucgagaaggagaucugccccaagcuggcggaguaccggaacugguccaagccgcagugcaagaucaccggguucgcccccuucagcaaggacaacuccauccgccucagcgccggcggggacaucugggugacccgggagcccuacguguccugcgaccccgacaagugcuaccaguucgcccugggccaggggaccacgcugaacaacggccacagcaacgacaccguccacgaccgcaccccguaccggacccuccugaugaacgagcugggcgugcccuuccaccucgggacgaagcaggucugcaucgccugguccagcuccagcugccacgacggcaaggcguggcugcacgugugcgugaccgggcacgacgagaacgccaccgccuccuucaucuacgacggccgccugguggacagcaucggguccuggagcaagaagauccuccggacccaggaguccgagugcgucugcaucaacggcacgugcaccguggugaugaccgacggcagcgccuccgggcgcgcggacaccaagauccuguucaucgaggagggcaagaucguccacaucagccagcugagcggguccgcccagcacguggaggagugcagcugcuacccccgguaccccggcgugcgcugcgucugccgggacaacuggaagggcuccaaccgcccgaucguggacaucaacgugaaggaccacagcaucgucuccagcuacgugugcuccgggcucgugggcgacacgccccggaagaacgacagcuccagcuccagccacugccugaaccccaacaacgaggagggcgggcacggggucaagggcugggccuucgacgacggcaacgacguguggauggggcgcaccaucuccgagaagcugcggagcggcuacgagaccuucaaggucaucgaggggugguccaagcccaacagcaagcuccagaucaaccgccaggugaucguggaccggggcaaccgcuccggguacagcggcaucuucuccgucgagggcaagagcugcaucaaccggugcuucuacguggagcugauccgcgggcggaagaaggagaacgaggugugguggaccagcaacuccaucgucguguucugcggcacgagcgggaccuacggcaccggguccuggccggacggcgccgacaucaaccugaugcccaucuga

SEQ ID NO: 78559 - RNA, 1410 nt, Artificial Sequence
  derived and/or modified CDS sequence (opt1) from neuraminidase__InfluenzaA__ABB80254
augaaccccaaccagaagaucaucaccaucggcagcgugucccugaccaucgccacgaucugcuuccucaugcagaucgccauccuggucaccaccgugacccugcacuucaagcaguacgagugcagcuccccgcccaacaaccaggugaugcucugcgagcccacgaucaucgagcgcaacaucaccgagaucgucuaccugaccaacaccacgaucgagaaggagaucugccccaagcuggcggaguaccggaacuggagcaagccgcagugcaagaucaccggguucgcccccuucuccaaggacaacagcauccgccucuccgccggcggggacaucugggugacccgggagcccuacgugagcugcggccccgacaagugcuaccaguucgcccuggggcagggcaccacgcugaacaaccgccacuccaacgacaccguccacgaccggaccccguaccgcacccuccugaugaacgagcugggcgugcccuuccaccucgggacgaagcaggucugcaucgccuggagcuccagcuccugccacgacggcaaggcguggcugcacgugugcgugaccgggcacgacgagaacgccaccgccagcuucaucuacgacggccggcugguggacuccaucgggagcugguccaagaagauccuccgcacccaggagagcgagugcgucugcaucaacggcaucugcacgguggugaugaccgacggcuccgccagcgggcgggcggacaccaagauccuguucaucgaggagggcaagaucguccacaucagcccccuguccgggagcgcccagcacguggaggagugcuccugcuacccccgcuacccgggcgugcggugcgucugccgcgacaacuggaagggcagcaaccggcccaucguggacaucaacgugaaggacuacuccaucgucagcuccuacgugugcagcgggcucgugggcgacacgccccgcaagaacgacuccagcuccagcucccacugccugaaccccaacaacgaggagggcgggcacggggucaagggcugggccuucgacgacggcaacgacguguggauggggcggaccaucagcgagaaguuccgcuccggcuacgagaccuucaaggucaucgagggguggagcaagccgaacuccaagcugcagaucaaccgccaggugaucguggaccggggcaaccggagcggguacuccggcaucuucagcgucgagggcaagagcugcaucaaccgcugcuucuacguggagcucauccgggggcgcaagcaggagaccgaggugugguggaccuccaacagcaucgucguguucugcggcacguccgggaccuacggcaccgggagcuggcccgacggcgccgacaucaaccugaugcccaucuga

SEQ ID NO: 78560 - RNA, 1410 nt, Artificial Sequence; identical to SEQ ID NO: 78151
  derived and/or modified CDS sequence (opt1) from neuraminidase__InfluenzaA__ABB80495

SEQ ID NO: 78561 - RNA, 1410 nt, Artificial Sequence; identical to SEQ ID NO: 78538
  derived and/or modified CDS sequence (opt1) from neuraminidase__InfluenzaA__ABB80506

SEQ ID NO: 78562 - RNA, 1410 nt, Artificial Sequence; identical to SEQ ID NO: 78538
  derived and/or modified CDS sequence (opt1) from neuraminidase__InfluenzaA__ABB80517

SEQ ID NO: 78563 - RNA, 1410 nt, Artificial Sequence; identical to SEQ ID NO: 78538
  derived and/or modified CDS sequence (opt1) from neuraminidase__InfluenzaA__ABB80532

SEQ ID NO: 78564 - RNA, 1410 nt, Artificial Sequence
  derived and/or modified CDS sequence (opt1) from neuraminidase__InfluenzaA__ABB80644
augaaccccaaccagaagaucaucaccaucggcagcgugucccugaccaucgccacgaucugcuuccucaugcagaucgccauccuggucaccaccgugacccugcacuucaagcaguacgagugcagcuccccgcccaacaaccaggugaugcucugcgagcccacgaucaucgagcgcaacaucaccgagaucgucuaccugaccaacaccacgaucgagaaggagaucugccccaagcuggcggaguaccggaacuggagcaagccgcagugcaagaucaccggguucgcccccuucuccaaggacaacagcauccgccucuccgccggcggggacaucugggugacccgggagcccuacgugagcugcgaccccgacaagugcuaccaguucgcccugggccaggggaccacgcugaacaaccgccacuccaacgacaccguccacgaccggaccccguaccgcacccuccugaugaacgagcugggcgugcccuuccaccucggcacgaagcaggucugcaucgccuggagcuccagcuccugccacgacgggaaggcguggcugcacgugugcgugaccggccacgacgagaacgccaccgccagcuucaucuacgacgggcggcugguggacuccaucggcagcugguccaacaagauccuccgcacccaggagagcgagugcgucugcaucaacgggacgugcaccguggugaugaccgacggcuccgccagcggccgggcggacaccaagauccuguucaucgaggaggggaagaucguccacaucagcccccuguccggcagcgcccagcacguggaggagugcuccugcuacccccgcuacccgggggugcggugcgucugccgcgacaacuggaagggcagcaaccggcccaucguggacaucaacgugaaggacuacuccaucgucagcuccuacgugugcagcggccucgugggggacacgccccgcaagaacgacuccagcuccagcucccacugccugaaccccaacaacgaggagggcgggcacggcgucaaggggugggccuucgacgacggcaacgacguguggaugggccggaccaucagcgagaaguuccgcuccggguacgagaccuucaaggucaucgagggcuggagcaagccgaacuccaagcugcagaucaaccgccaggugaucguggaccgggggaaccggagcggcuacuccgggaucuucagcgucgagggcaagagcugcaucaaccgcugcuucuacguggagcucauccggggccgcaagcaggagaccgaggugugguggacguccaacagcaucgucguguucugcgggaccuccggcaccuacgggaccggcagcuggcccgacggggccgacaucaaccugaugcccaucuga

SEQ ID NO: 78565 - RNA, 1410 nt, Artificial Sequence
  derived and/or modified CDS sequence (opt1) from neuraminidase__InfluenzaA__ABB80664
augaaccccaaccagaagaucaucaccaucggcagcgugucccugaccaucgccacgaucugcuuccucaugcagaucgccauccuggucaccaccgugacccugcacuucaagcaguacgagugcagcuccccgcccaacaaccaggugaugcucugcgagcccacgaucaucgagcgcaacaucaccgagaucgucuaccugaccaacaccacgaucgagaaggagaucugccccaagcuggcggaguaccggaacuggagcaagccgcagugcaagaucaccggguucgcccccuucuccaaggacaacagcauccgccucuccgccggcggggacaucugggugacccgggagcccuacgugagcugcgaccccgacaagugcuaccaguucgcccugggccaggggaccacgcugaacaaccgccacuccaacgacaccguccacgaccggaccccguaccgcacccuccugaugaacgagcugggcgugcccuuccaccucggcacgaagcaggucugcaucgccuggagcuccagcuccugccacgacgggaaggcguggcugcacgugugcgugaccggccacgacgagaacgccaccgccagcuucaucuacgacgggcggcugguggacuccaucggcagcugguccaagaagauccuccgcacccaggagagcgagugcgucugcaucaacgggacgugcaccguggugaugaccgacggcuccgccagcggccgggcggacaccaagguccuguucaucgaggaggggaagaucgugcacaucagcccccuguccggcagcgcccagcacguggaggagugcuccugcuacccccgcuacccggggguccggugcgugugccgcgacaacuggaagggcagcaaccggcccaucguggacaucaacgucaaggacuacuccaucgugagcuccuacgugugcagcggccucgucggggacacgccccgcaagaacgacuccagcuccagcucccacugccugaaccccaacaacgaggagggcgggcacggcgugaaggggugggccuucgacgacggcaacgacgucuggaugggccggaccaucagcgagaaguuccgcuccggguacgagaccuucaaggugaucgagggcuggagcaagccgaacuccaagcugcagaucaaccgccaggugaucgucgaccgggggaaccggagcggcuacuccgggaucuucagcguggagggcaagagcugcaucaaccgcugcuucuacguggagcucauccggggccgcaagcaggagaccgaggucugguggacguccaacagcaucgugguguucugcgggaccuccggcaccuacgggaccggcagcuggcccgacggggccgacaucaaccugaugcccaucuga

SEQ ID NO: 78566 - RNA, 1410 nt, Artificial Sequence
  derived and/or modified CDS sequence (opt1) from neuraminidase__InfluenzaA__ABB80675
augaaccccaaccagaagaucaucaccaucggcagcgugucccugaccaucgccacgaucugcuuccucaugcagaucgccauccuggucaccaccgugacccugcacuucaagcaguacgagugcaacagcccgcccaacaaccaggugaugcucugcgagcccacgaucaucgagcgcaacaucaccgagaucgucuaccugaccaacaccacgaucgagaaggagaucugccccaagcuggcggaguaccggaacugguccaagccgcagugcaagaucaccggguucgcccccuucagcaaggacaacuccauccgccucgccgccggcggggacaucugggugacccgggagcccuacgugagcugcgaccccgacaagugcuaccaguucgcccugggccaggggaccacgcugaacaaccgccacuccaacgacaccguccacgaccggaccccguaccgcacccuccugaugaacgagcugggcgugcccuuccaccucggcacgaagcaggucugcaucgcguggagcuccagcuccugccacgacgggaaggccuggcugcacgugugcgugaccggccacgacgagaacgccaccgccagcuucaucuacgacgggcggcugguggacuccaucggcagcugguccaagaagauccuccgcacccaggagagcgagugcgucugcaucaacgggacgugcaccguggugaugaccgacggcuccgcgagcggccgggccgacaccaagauccuguucaucgaggaggggaagaucguccacaucucccagcugagcggcagcgcccagcacguggaggagugcuccugcuacccccgcuaccccggggugcggugcgucugccgcgacaacuggaagggcagcaaccggccgaucguggacaucaacgugaaggacuacuccaucgucagcuccuacgugugcagcggccucgugggggacacgccccgcaagaacgacuccagcuccagcuccuacugccugaaccccaacaacgaggagggcgggcacggcgucaaggggugggccuucgacgacggcgacgacguguggaugggccggaccaucagcgagaagcugcgcuccggguacgagaccuucaaggucaucgagggcuggagcaagcccaacuccaagcuccagaucaaccgccaggugaucguggaccgggggaaccggagcggcuacuccgggaucuucagcgucgagggcaaguccugcaucaaccgcugcuucuacguggagcugauccggggccgcaagcaggagaccgaggugugguggacgagcaacagcaucgucguguucugcgggaccuccggcaccuacgggaccggcagcuggccggacggggccgacaucaaccugaugcccaucuga

SEQ ID NO: 78567 - RNA, 1410 nt, Artificial Sequence
  derived and/or modified CDS sequence (opt1) from neuraminidase__InfluenzaA__ABB80685
augaaccccaaccagaagaucaucaccaucggcagcgugucccugaccaucgccacgaucugcuuccucaugcagaucgccauccuggucaucaccgugacccugcacuucaagcaguacgagugcaacagcccgcccaacaaccaggugaugcucugcgagcccaccaucaucgagcgcaacaucacggagaucgucuaccugaccaacaccaccaucgagaaggagaucugccccaagcuggcggaguaccggaacugguccaagccgcagugcaagaucacgggguucgcccccuucagcaaggacaacuccauccgccucagcgccggcggggacaucugggugacccgggagcccuacguguccugcgaccccgacaagugcuaccaguucgcccugggccaggggaccacccugaacaacggccacagcaacgacacgguccacgaccgcaccccguaccggacccuccugaugaacgagcugggcgugcccuuccaccucgggaccaagcaggucugcaucgccugguccagcuccagcugccacgacggcaaggcguggcugcacgugugcgugacggggcacgacgagaacgccaccgccuccuucaucuacgacggccgccugguggacagcaucggguccuggagcaagaagauccuccggacccaggaguccgagugcgucugcaucaacgggaccugcacgguggugaugaccgacggcagcgccuccgggcgcgcggacaccaagauccuguucaucgaggagggcaagaucguccacaucagccagcugagcggguccgcccagcacguggaggagugcagcugcuacccccgguaccccggcgugcgcugcgucugccgggacaacuggaagggcuccaaccgcccgaucguggacaucaacgugaaggaccacagcaucgucuccagcuacgugugcuccgggcucgugggcgacacgccccggaagaacgacagcuccagcuccagccacugccugaaccccaacaacgaggagggcggccacggggucaagggcugggccuucgacgacggcaacgacguguggauggggcgcaccaucuccgagaagcugcggagcggcuacgagaccuucaaggucaucgaggggugguccaagcccaacagcaagcuccagaucaaccgccaggugaucguggaccggggcaaccgcuccggguacagcggcaucuucuccgucgagggcaagagcugcaucaaccggugcuucuacguggagcugauccgcgggcggaagcaggagaccgaggugugguggaccagcaacuccaucgucguguucugcggcacgagcgggaccuacggcaccggguccuggccggacggcgccgacaucaaccugaugcccaucuga

SEQ ID NO: 78568 - RNA, 1410 nt, Artificial Sequence; identical to SEQ ID NO: 78538
  derived and/or modified CDS sequence (opt1) from neuraminidase__InfluenzaA__ABB80696

SEQ ID NO: 78569 - RNA, 1410 nt, Artificial Sequence
  derived and/or modified CDS sequence (opt1) from neuraminidase__InfluenzaA__ABB80707
augaaccccaaccagaagaucaucaccaucggcagcgugucccugaccaucgccacgaucugcuuccucaugcagaucgccauccuggucaccaccgugacccugcacuucaagcaguacgagugcagcuccccgcccaacaaccaggugaugcucugcgagcccacgaucaucgagcgcaacaucaccgagaucgucuaccugaccaacaccacgaucgagaaggagaucugccccaagcuggcggaguaccggaacuggagcaagccgcagugcaagaucaccggguucgcccccuucuccaaggacaacagcauccgccucuccgccggcggggacaucugggugacccgggagcccuacgugagcugcggccccgacaagugcuaccaguucgcccuggggcagggcaccacgcugaacaaccgccacuccaacgacaccguccacgaccggaccccguaccgcacccuccugaugaacgagcugggcgugcccuuccaccucgggacgaagcaggucugcaucgccuggagcuccagcuccugccacgacggcaaggcguggcugcacgugugcgugaccgggcacgacgagaacgccaccgccagcuucaucuacgacggccggcugguggacuccaucgggagcugguccaagaagauccuccgcacccaggagagcgagugcgucugcaucaacggcacgugcaccguggugaugaccgacggcuccgccagcgggcgggcggacaccaagauccuguucaucgaggagggcaagaucguccacaucagcccccuguccgggagcgcccagcacguggaggagugcuccugcuacccccgcuacccgggcgugcggugcgucugccgcgacaacuggaagggcagcaaccggcccaucguggacaucaacgugaaggacuacuccaucgucagcuccuacgugugcagcgggcucgugggcgacacgccccgcaagaacgacuccagcuccagcucccacugccugaaccccaacaacgaggagggcgggcacggggucaagggcugggccuucgacgacggcaacgacguguggauggggcggaccaucagcgagaaguuccgcuccggcuacgagaccuucaaggucaucgagggguggagcaagccgaacuccaagcugcagaucaaccgccaggugaucguggaccggggcaaccggagcggguacuccggcaucuucagcgucgagggcaagagcugcaucaaccgcugcuucuacguggagcucauccgggggcgcaagcaggagaccgaggugugguggacguccaacagcaucgucguguucugcggcaccuccgggaccuacggcaccgggagcuggcccgacggcgccgacaucaaccugaugcccaucuga

SEQ ID NO: 78570 - RNA, 1410 nt, Artificial Sequence; identical to SEQ ID NO: 78538
  derived and/or modified CDS sequence (opt1) from neuraminidase__InfluenzaA__ABB80716

SEQ ID NO: 78571 - RNA, 1410 nt, Artificial Sequence
  derived and/or modified CDS sequence (opt1) from neuraminidase__InfluenzaA__ABB80725
augaaccccaaccagaagaucaucaccaucggcagcgugucccugaccaucgccacgaucugcuuccucaugcagaucgccauccuggucaccaccgugacccugcacuucaagcaguacgagugcagcuccccgcccaacaaccaggugaugcucugcgagcccacggucaucgagcgcaacaucaccgagaucguguaccugaccaacaccacgaucgagaaggagaucugccccaagcuggcggaguaccggaacuggagcaagccgcagugcaagaucaccggguucgcccccuucuccaaggacaacagcauccgccucuccgccggcggggacaucugggugacccgggagcccuacgucagcugcgaccccgacaagugcuaccaguucgcccugggccaggggaccacgcugaacaaccgccacuccaacgacaccgugcacgaccggaccccguaccgcacccuccugaugaacgagcugggcgugcccuuccaccucggcacgaagcaggucugcaucgccuggagcuccagcuccugccacgacgggaaggcguggcugcacgugugcgugaccggccacgacgagaacgccaccgccagcuucaucuacgacgggcggcuggucgacuccaucggcagcugguccaagaagauccuccgcacccaggagagcgagugcgugugcaucaacgggacgugcaccguggucaugaccgacggcuccgccagcggccgggcggacaccaagauccuguucaucgaggaggggaagaucgugcacaucagcccccuguccggcagcgcccagcacguggaggagugcuccugcuacccccgcuacccggggguccggugcgugugccgcgacaacuggaagggcagcaaccggcccaucguggacaucaacgucaaggacuacuccaucgugagcuccuacgugugcagcggccucgucggggacacgccccgcaagaacgacuccagcuccagcucccacugccugaaccccaacaacgaggagggcgggcacggcgugaaggggugggccuucgacgacggcaacgacgucuggaugggccggaccaucagcgagaaguuccgcuccggguacgagaccuucaaggugaucgagggcuggagcaagccgaacuccaagcugcagaucaaccgccaggugaucgucgaccgggggaaccggagcggcuacuccgggaucuucagcguggagggcaagagcugcaucaaccgcugcuucuacguggagcucauccggggccgcaagcaggagaccgaggucugguggacguccaacagcaucguggccuucugcgggaccuccggcaccuacgggaccggcagcuggcccgacggggccgacaucaaccugaugcccaucuga

SEQ ID NO: 78572 - RNA, 1410 nt, Artificial Sequence
  derived and/or modified CDS sequence (opt1) from neuraminidase__InfluenzaA__ABB80740
augaaccccaaccagaagaucaucaccaucggcagcgugucccugaccaucgccacgaucugcuuccucaugcagaucgccauccuggucaccaccgugacccugcacuucaagcaguacgagugcugcagcccgcccaacaaccaggugaugcucugcgagcccacgaucaucgagcgcaacaucaccgagaucgucuaccugaccaacaccacgaucgagaaggagaucugccccaagcuggcggaguaccggaacugguccaagccgcagugcaagaucaccggguucgcccccuucagcaaggacaacuccauccgccucagcgccggcggggacaucugggugacccgggagcccuacguguccugcgaccccgacaagugcuaccaguucgcccugggccaggggaccacgcugaacaaccgccacagcaacgacaccguccacgaccggaccccguaccgcacccuccugaugaacgagcugggcgugcccuuccaccucggcacgaagcaggucugcaucgccugguccagcuccagcugccacgacgggaaggcguggcugcacgugugcgugaccggccacgacgagaacgccaccgccuccuucaucuacgacgggcggcugguggacagcaucggcuccuggagcaagaagauccuccgcacccaggaguccgagugcgucugcaucaacgggacgugcaccguggugaugaccgacggcagcgccuccggccgggcggacaccaagauccuguucaucgaggaggggaagaucguccacaucagcccccugagcggcuccgcccagcacguggaggagugcagcugcuacccccgcuacccgggggugcggugcgucugccgcgacaacuggaagggcuccaaccggcccaucguggacaucaacgugaaggacuacagcaucgucuccagcuacgugugcuccggccucgugggggacacgccccgcaagaacgacagcuccagcuccagccacugccugaaccccaacaacgaggagggcgggcacggcgucaaggggugggccuucgacgacggcaacgacguguggaugggccggaccaucuccgagaaguuccgcagcggguacgagaccuucaaggucaucgagggcugguccaagccgaacagcaagcugcagaucaaccgccaggugaucguggaccgggggaaccgguccggcuacagcgggaucuucuccgucgagggcaagagcugcaucaaccgcugcuucuacguggagcucauccggggccgcaagcaggagaccgaggugugguggacgagcaacuccaucgucgccuucugcgggaccagcggcaccuacgggaccggcuccuggcccgacggggccgacaucaaccugaugcccaucuga

SEQ ID NO: 78573 - RNA, 1410 nt, Artificial Sequence; identical to SEQ ID NO: 78538
  derived and/or modified CDS sequence (opt1) from neuraminidase__InfluenzaA__ABB80751

SEQ ID NO: 78574 - RNA, 1410 nt, Artificial Sequence; identical to SEQ ID NO: 78257
  derived and/or modified CDS sequence (opt1) from neuraminidase__InfluenzaA__ABB82186

SEQ ID NO: 78575 - RNA, 1413 nt, Artificial Sequence; identical to SEQ ID NO: 78420
  derived and/or modified CDS sequence (opt1) from neuraminidase__InfluenzaA__ABB82197

SEQ ID NO: 78576 - RNA, 1413 nt, Artificial Sequence; identical to SEQ ID NO: 78410
  derived and/or modified CDS sequence (opt1) from neuraminidase__InfluenzaA__ABB82208

SEQ ID NO: 78577 - RNA, 1413 nt, Artificial Sequence
  derived and/or modified CDS sequence (opt1) from neuraminidase__InfluenzaA__ABB82219
augaaccccaaccagaagaucaucaccaucggcagcaucuccaucgccaucgggaucaucagccugaugcuccagaucggcaacaucaucuccaucugggccagccacuccauccagaccgggagccagaaccacacgggcaucugcaaccagcgcaucaucaccuacgagaacuccaccugggugaaccacaccuacgucaacaucaacaacacgaacgugaucgcggagaaggacaagaccagcgugacccuggccgggaacuccagccugugcuccaucagcggcugggccaucuacaccaaggacaacuccauccggaucggcagcaagggggacgucuucgugauccgcgagccguucaucuccugcagcaaccucgagugccggacguucuuccugacccagggcgcccugcucaacgacaagcacuccaacgggaccgugaaggaccgcagccccuaccgggcccugauguccugcccccugggcgaggcgcccagcccguacaacagcaaguucgaguccgucgccuggagcgccuccgccugccacgacgggaugggcuggcucaccaucggcaucagcgggcccgacaacggcgcgguggccgugcugaaguacaacgggaucaucacggagaccaucaaguccuggaagaagcgcauccugcggacccaggagagcgagugcgucugcgugaacggcuccugcuucaccaucaugacggacggccccagcaacggggccgccuccuacaagaucuucaagaucgagaagggcaaggugaccaagagcaucgagcucaacgcccccaacuuccacuacgaggagugcuccugcuacccggacaccgggaccgucaugugcgugugccgcgacaacuggcacggcagcaaccggcccuggguguccuucaaccagaaccuggacuaccagaucggguacaucugcagcggcgucuucggcgacaacccccgccccaaggacggggagggcuccugcaacccggugacgguggacggggcggacggcgucaagggguucagcuacaaguacggcaacggcguguggaucgggcggaccaaguccaaccgccugcggaagggcuucgagaugaucugggaccccaacggguggaccgacaccgacagcgacuucuccgugaagcaggacgucguggccaucacggacuggagcggcuacagcggguccuucgugcagcaccccgagcucaccggccuggacugcauccgccccugcuucugggucgagcuggugcggggccucccgcgcgagaacaccaccaucuggacgagcggguccagcaucuccuucugcggcgucaacagcgacgccgccgacugguccuggcccgacggggccgagcugcccuucaccaucgacaaguga

SEQ ID NO: 78578 - RNA, 1410 nt, Artificial Sequence
  derived and/or modified CDS sequence (opt1) from neuraminidase__InfluenzaA__ABB82230
augaaccccaaccagaagaucaucaccaucggcagcgugucccugaccaucgccacggucugcuuccucaugcagaucgccauccuggugaccaccgugacccugcacuucaagcaguacgagugcgacagcccggcgaacaaccaggucaugcccugcgagcccaucaucaucgagcgcaacaucacggagaucguguaccucaccaacaccaccaucgagaaggagaucugccccaagcugguggaguaccggaacugguccaagccgcagugcaagaucacgggguucgcccccuucagcaaggacaacuccauccgccugagcgccggcggggacaucugggucacccgggagcccuacguguccugcgaccccggcaagugcuaccaguucgcccucgggcagggcaccacccuggacaacaagcacagcaacgacacgauccacgaccgcaucccgcaccggacccugcucaugaacgagcugggcgugcccuuccaccuggggacccgccaggucugcaucgccugguccagcuccagcugccacgacggcaaggcguggcuccacgugugcgugaccggggacgacaagaacgccacggccuccuucaucuacgacggccggcuggucgacagcaucggguccuggagccagaacauccugcgcacccaggaguccgagugcgugugcaucaacgggaccugcaccguggucaugacggacggcagcgccuccggccgggcggacacccgcauccucuucaucgaggagggcaagaucgugcacaucagcccccugagcggguccgcccagcacguggaggagugcagcugcuacccccgguacccgggcguccgcugcaucugccgggacaacuggaagggcuccaaccgccccaucguggacaucaacgugaaggacuacagcaucgacucccgguacgucugcagcgggcuggugggcgacacgccccgcaacaacgaccgguccagcaacuccaacugccgcaaccccaacaacgacaaggggaaccacggcgugaaggggugggccuucgacgacggcaacgacgucuggaugggccggaccaucagcaaggacucccgcagcggguacgagaccuucaaggugaucggcgggugguccaccccgaacagcaagucccagaucaaccggcaggucaucguggacagcgacaaccgcuccggcuacagcgggaucuucuccguggagggcaagagcugcaucaaccgcugcuucuacgucgagcucauccggggccgcgagcaggagacccgggugugguggaccagcaacuccaucguggucuucugcgggacgagcggcaccuacgggaccggcuccuggcccgacggggccgacaucaaccugaugcccaucuga

SEQ ID NO: 78579 - RNA, 1410 nt, Artificial Sequence
  derived and/or modified CDS sequence (opt1) from neuraminidase__InfluenzaA__ABB83018
augaaccccaaccagaagaucaucaccaucggcagcgugucccugaccaucgccacgaucugcuuccucacccagaucgccauccuggucaccaccgugacgcugcacuucaagcaguacgggugcaacagcccgcccaacaaccaggugaugcucugcgagcccaccaucaucgagcgcaacaucaccgagaucgucuaccugaccaacacgaccaucgagaaggagaucugccccaagcuggcggaguaccggaacugguccaagccgcagugcaacaucaccggcuucgcccccuucagcaaggacaacuccauccgccucagcgccgggggcgacaucugggugacccgggagcccuacguguccugcgaccccgacaagugcuaccaguucgcccuggggcagggcacgacccugaacaacggccacagcaacgacaccguccacgaccgcaccccguaccggacgcuccugaugaacgagcugggggugcccuuccaccucggcaccaagcaggucugcaucgccugguccagcuccagcugccacgacgggaaggcguggcugcacgugugcgugaccggcgacgacaagaacgccaccgccuccuucaucuacaacgggcgccugguggacagcaucggcuccuggagcaagaagauccuccggacgcaggaguccgagugcgucugcaucaacgggaccugcaccguggugaugaccgacgggagcgccuccggcaaggcggacacgaagauccuguucaucgaggaggggaagaucguccacaccagccugcucagcggcuccgcccagcacguggaggagugcagcugcuacccccgcuaccccggcgugcggugcgucugccgcgacaacuggaagggguccaaccggccgaucguggacaucaacgugaaggacuacagcaucgucuccagcuacgugugcuccggccuggugggggacacgccccgcaagaacgacagcuccagcuccagccacugccuggaccccaacaacgaggagggcgggcacggcgucaagggcugggccuucgacgacgggaacgacguguggaugggccggaccaucuccgagaagcuccgcagcggguacgagaccuucaaggucaucgagggcugguccaagcccaacagcaagcugcagaucaaccgccaggugaucguggaccgggggaaccgguccggcuacagcggcaucuucuccgucgagggcaagagcugcaucaaccgcugcuucuacguggagcugauccggggccgcaaccaggagaccgaggugcucuggaccagcaacuccaucgucguguucugcgggaccagcggcacguacgggaccggcuccuggccggacggcgccgacaucaaccugaugcccaucuga

SEQ ID NO: 78580 - RNA, 1410 nt, Artificial Sequence; identical to SEQ ID NO: 78579
  derived and/or modified CDS sequence (opt1) from neuraminidase__InfluenzaA__ABB83029

SEQ ID NO: 78581 - RNA, 1410 nt, Artificial Sequence; identical to SEQ ID NO: 78406
  derived and/or modified CDS sequence (opt1) from neuraminidase__InfluenzaA__ABB83130

SEQ ID NO: 78582 - RNA, 1410 nt, Artificial Sequence
  derived and/or modified CDS sequence (opt1) from neuraminidase__InfluenzaA__ABB83141
augaaccccaaccagaagaucaucaccaucggcagcgugucccugaccaucgccacgaucugcuuccucagccagaucgccauccuggucaccaccgugacccugcacuucaagcaguacgagugcaacuccccgcccaacaaccaggugaugcucugcgagcccacgaucaucgagcgcaacaucaccgagaucgucuaccugaccaacaccacgaucgagaaggagaucugccccaagcuggcggaguaccggaacuggagcaagccgcagugcaacaucaccggguucgcccccuucuccaaggacaacagcauccgccucuccgccggcggggacaucugggugacccgggagcccuacgugagcugcgaccccgacaagugcuaccaguucgcccugggccaggggaccacgcugaacaacggccacuccaacgacaccguccacgaccgcaccccguaccggacccuccugaugaacgagcugggcgugcccuuccaccucgggacgaagcaggucugcaucgccuggagcuccagcuccugccacgacggcaaggcguggcugcacgugugcgugaccggggacgacaagaacgccaccgccagcuucaucuacaacggccgccugguggacuccaucgggagcugguccaagaagauccuccggacccaggagagcgagugcgucugcaucaacggcacgugcaccguggugaugaccgacggcuccgccagcgggaaggcggacaccaagauccuguucaucgaggagggcaagaucguccacacgagccugcucuccgggagcgcccagcacguggaggagugcuccugcuacccccgcuaccccggcgugcggugcgucugccgcgacaacuggaagggcagcaaccggccgaucguggacaucaacgugaaggacuacuccaucgucagcuccuacgugugcagcgggcuggugggcgacacgccccgcaagaacgacuccagcuccagcucccacugccuggaccccaacaacgaggagggcgggcacggggucaagggcugggccuucgacgacggcaacgacguguggauggggcggaccaucagcgagaagcuccgcuccggcuacgagaccuucaaggucaucgagggguggagcaagcccaacuccaagcugcagaucaaccgccaggugaucguggaccgggacaaccggagcggcuacuccgggaucuucagcgucgagggcaagagcugcaucaaccgcugcuucuacguggagcugauccggggccgcaaccaggagaccgaggugcucuggaccuccaacagcaucgucguguucugcgggaccuccggcaccuacgggacgggcagcuggccggacggggccgacaucaaccugaugcccaucuga

SEQ ID NO: 78583 - RNA, 1410 nt, Artificial Sequence
  derived and/or modified CDS sequence (opt1) from neuraminidase__InfluenzaA__ABB86876
augaacaccaaccagcgcaucaucaccaucggcacggugugccugaucgucgggaucaucagccuccugcugcagaucggcaacaucgugucccucuggaucagccacuccauccagaccgggggcaagaaccacagcgagaugugcaaccagaacgugaucaccuacgucaacaacaccugggugaaccggacguacgugaacaucuccaacaccaacaucgccaccguccaggacgugaccagcgugauccuggccgggaacuccagccugugcuccgucagcggcugggcgaucuacuccaaggacaacagcauccgcaucggcuccaagggggacaucuucgugauccgggagcccuucaucagcugcucccaccucgagugccgcacguucuuccugacccagggcgcccugcucaacgacaagcacagcaacgggaccgugaaggaccgguccccguaccgcacccugaugagcugccccaucggcgaggcccccucccccuacaacagccgguucgagagcgucgccugguccgccagcgcgugccacgacgggaugggcuggcugacgaucggcaucuccgggccggacaacggcgccguggccgugcucaaguacaacgggaucaucaccgacaccaucaagagcuggcgcaacaagauccugcggacccaggaguccgagugcgucugcaugaacggcagcugcuucacggugcugaccgacggccccuccaacgggcaggccagcuacaagaucuucaagguggagaagggcaagaucaucaaguccaucgagcucgacgcgcccaacuaccacuacgaggagugcagcugcuaccccgacaccgggaaggucaugugcgugugccgcgacaacuggcacgccuccaaccggccgugggugagcuucgaccagaaccuggacuaccagaucggcuacaucugcuccggggucuucggcgacaacccccgcagcaacgacggcaaggggaacugcggccccgugcuguccaacggggccaacggcgugaagggguucagcuuccgguacggcaacggcgucuggaucgggcgcaccaaguccaucaacagccgguccggcuucgagaugaucugggaccccaacggguggacgggcaccgacagcagcuucuccaugaagcaggacaucaucgcccucaccgacuggagcggguacuccggcagcuucgugcagcacccggagcugaccggcaugaacugcauccgccccugcuucugggucgagcugauccgggggcagcccaaggaguccacgaucugggccagcggcuccagcaucuccuucugcgggguggacagcgagaccaccuccuggagcuggcccgacggcgcggaccucccguucaccaucgacaaguga

SEQ ID NO: 78584 - RNA, 1410 nt, Artificial Sequence
  derived and/or modified CDS sequence (opt1) from neuraminidase__InfluenzaA__ABB86886
augaacaccaaccagcgcaucaucaccaucggcacggccugccuggccaucgggaucgugagccuccugcugcagaucggcaacaucgucucccucuggaucagccacuccauccagaccgaggagaagaaccacagcgagaccugcucccagaacuucaucacccacgagaacaacacgugggugaaccagaccuacaucaacaucagcaacaccaacaacguggucgggcagggcgugaccuccaucaugcuggcggggaacagcucccugugccccaucagcggcugggccaucuacuccaaggacaacagcauccggaucggcuccaagggggacaucuucgugauccgcgagccguucaucagcugcucccaccucgagugccggacguucuuccugacccagggcgcccugcucaacgacaagcacagcaacgggaccgucaaggaccgcucccccuaccggacccugaugagcugccccaucggcgaggcccccuccccguacaacagccgcuucgagagcguggccugguccgcgagcgccugccacgacgggaugggcuggcugacgaucggcaucuccgggcccgacaacggcgccguggccgucuucaaguacaacgggaucaucaccgacaccaucaagagcuggcggaacaagauccuccgcacccaggaguccgagugcgugugcaucaacggcagcugcuucacgaucaugaccgacggccccuccaacgggcaggcgagcuacaagaucuucaagauggagaagggcaagaucaucaaguccguggagcuggacgcccccaacuaccacuacgaggagagcuccugcuacccggacaccgggaaggucgugugcgugugccgggacaacuggcacgccagcaaccgccccugggucuccuucgaccagaaccuggacuaccagaucggcuacaucugcagcgggguguucggcgacaacccccgguccaacgacggcaaggggaacugcggccccgugcucagcaacggggccaacggcgucaaggagguguccuuccgcuacgggaacggcguguggaucggccggaccaagagcaucuccagccgcagcggguucgagaugaucugggacccgaacggcuggacggagaccgacuccagcuucuccaucaagcaggacaucaucgcccugaccgacuggagcggguacuccggcagcuucguccagcaccccgagcugaccgggaugaacugcaucaagcccugcuucuggguggagcucauccggggccagcccaaggaguccacgaucuggaccagcggcuccagcaucuccuucugcgggguggacagcgagaccgcguccuggagcuggccggacggcgccgaccugcccuucaccaucgacaaguga

SEQ ID NO: 78585 - RNA, 1410 nt, Artificial Sequence
  derived and/or modified CDS sequence (opt1) from neuraminidase__InfluenzaA__ABB86898
augaaccccaaccagaagaucaucaccaucggcagcgugucccugacccucgccacgaucugcuuccugaugcagaucgccauccuggucaccaccgugacccuccacuucaagcagcaggagugcaacagcccgcccaacaaccaggugaugcugugcgagcccacgaucaucgagcgcaacaucaccgagaucgucuaccugaccaacaccacgaucgagaaggagaucugccccaagcucgcggaguaccggaacugguccaagccgcagugcaacaucaccggguucgcccccuucagcaaggacaacuccauccgccugagcgccggcggggacaucugggugacccgggagcccuacguguccugcgaccccgacaagugcuaccaguucgcccugggccaggggaccacgcucaacaacggccacagcaacaacaccguccacgaccgcaccccguaccggacccugcugaugaacgagcucggcgugcccuuccaccuggggacgcgccaggugugcaucgccugguccagcuccagcugccacgacggcaaggcguggcugcacgucugcaucaccggggacgacaagaacgccaccgccuccuucaucuacaacggccggcucguggacagcaucggguccuggagcaagaagauccugcgcacccaggaguccgagugcgugugcaucaacggcacgugcaccgucgugaugaccgacggcagcgccuccgggaaggcggacaccaagauccuguucaucgaggagggcaagaucgugcacaucagcacgcucagcggguccgcccagcacgucgaggagugcagcugcuacccccgguaccccggcgugcgcugcgugugccgggacaacuggaagggcuccaaccgcccgaucgucgacaucaacgugaaggacuacagcaucguguccagcuacgucugcuccgggcuggugggcgacacgccccggaagaacgacagcuucuccagcucccacugccuggaccccaacaacgaggagggcgggcacggggugaagggcugggccuucgacgacggcaacgacgucuggauggggcgcaccaucagcgagaagcuccgguccggcuacgagaccuucaaggugaucgagggguggagcaagcccaacuccaagcugcagaucaaccgccaggucaucguggagcggggcagccgcuccggguacagcggcaucuucuccguggagggcaagagcugcaucaaccggugcuucuacgucgagcugauccgcgggcggaaggaggagaccaaggugugguggaccagcaacuccaucguggucuucugcggcaccagcgggaccuacggcacgggguccuggccggacggcgccgacaucaaccucaugcccaucuga

SEQ ID NO: 78586 - RNA, 1410 nt, Artificial Sequence
  derived and/or modified CDS sequence (opt1) from neuraminidase__InfluenzaA__ABB86906
augaacaccaaccagcgcaucaucaccaucggcacggugugccugaucgucgggaucaucagccuccugcugcagaucggcaacaucgugucccucuggaucagccacuccauccagaccgggggcaagaaccacagcgagaugugcaaccagaacgugaucaccuacgucaacaacaccugggugaaccggacguacgugaacaucuccaacaccaacaucgccaccguccaggacgugaccagcgugauccuggccgggaacuccagccugugcuccgucagcggcugggcgaucuacuccaaggacaacagcauccgcaucggcuccaagggggacaucuucgugauccgggagcccuucaucagcugcucccaccucgagugccgcacguucuuccugacccagggcgcccugcucaacgacaagcacagcaacgggaccgugaaggaccgguccccguaccgcacccugaugagcugccccaucggcgaggcccccucccccuacaacagccgguucgagagcgucgccugguccgccagcgcgugccacgacgggaugggcuggcugacgaucggcaucuccgggccggacaacggcgccguggccgugcucaaguacaacgggaucaucaccgacaccaucaagagcuggcgcaacaagauccugcggacccaggaguccgagugcgucugcaugaacggcagcugcuucacggugcugaccgacggccccuccaacgggcaggccagcuacgagaucuucaagguggagaagggcaagaucaucaaguccaucgagcucgacgcgcccaacuaccacuacgaggagugcagcugcuaccccgacaccgggaaggucaugugcgugugccgcgacaacuggcacgccuccaaccggccgugggugagcuucgaccagaaccugaacuaccagaucggcuacaucugcuccggggucuucggcgacaacccccgcagcaacgacggcaaggggaacugcggccccgugcuguccaacggggccaacggcgugaagggguucagcuuccgguacggcaacggcgucuggaucgggcgcaccaaguccaucagcucccggagcggcuucgagauggugugggaccccaacggguggacgggcaccgacagccgcuucuccaugaagcaggacaucaucgcccucaccgacuggagcggguacuccggcagcuucguccagcacccggagcugaccggcaugaacugcauccggcccugcuucuggguggagcugauccgcgggcagcccaaggaguccacgaucugggccagcggcuccagcaucuccuucugcggggugaacagcgagaccgcguccuggagcuggcccgacggcgccgaccucccguucaccaucgacaaguga

SEQ ID NO: 78587 - RNA, 1410 nt, Artificial Sequence
  derived and/or modified CDS sequence (opt1) from neuraminidase__InfluenzaA__ABB86916
augaaccccaaccagaagaucaucaccaucggcagcgugucccugaccaucgccacgaucugcuuccucacccagaucgccauccuggucaccaccgugacgcugcacuucaagcaguacgagugcaacagcccgcccaacaaccaggugaugcucugcgagcccaccaucaucgagcgcaacaucaccgagaucgucuaccugaccaacacgaccaucgagaaggagaucugccccaagcuggcggaguaccggaacugguccaagccgcagugcaacaucaccggguucgcccccuucagcaaggacaacuccauccgccucagcgccggcggggacaucugggugacccgggagcccuacguguccugcgaccccgacaagugcuaccaguucgcccugggccaggggacgacccugaacaacggccacagcaacgacaccguccacgaccgcaccccguaccggacgcuccugaugaacgagcugggcgugcccuuccaccucgggaccaagcaggucugcaucgccugguccagcuccagcugccacgacggcaaggcguggcugcacgugugcaucaccggggacgacaagaacgccaccgccuccuucaucuacaacggccgccugguggacagcaucuccagcugguccaagaagauccuccggacgcaggagagcgagugcgugugcaucaacgggaccugcaccgucgugaugaccgacggcuccgccagcggcaaggcggacacgaagauccuguucaucgaggaggggaagaucgugcacaccagccugcucuccggcagcgcccagcacgucgaggagugcuccugcuacccccgcuaccccggggugcggugcgugugccgcgacaacuggaagggcagcaaccggccgaucgucgacaucaacgugaaggacuacuccaucgugagcuccuacgucugcagcggccuggugggggacacgccccgcaagaacgacuccagcuccagcucccacugccuggaccccaacaacgaggagggcgggcacggcgugaaggggugggccuucgacgacggcaacgacgucuggaugggccggaccaucagcgagaagcuccgcuccggguacgagaccuucaaggugaucgagggcuggagcaagcccaacuccaagcugcagaucaaccggcaggucaucguggaccgcgacaaccggagcggguacuccggcaucuucagcguggagggcaagagcugcaucaaccgcugcuucuacgucgagcugauccgggggcgcaaccaggagaccgaggugcucuggaccuccaacagcaucguggucuucugcggcaccuccgggacguacggcaccgggagcuggccggacggcgccgacaucaaccugaugcccaucuga

SEQ ID NO: 78588 - RNA, 1410 nt, Artificial Sequence
  derived and/or modified CDS sequence (opt1) from neuraminidase__InfluenzaA__ABB86928
augaaccccaaccagaagaucaucaccaucggcagcgugucccugaccaucgccacgaucugcuuccucaugcagaucgccauccuggucaccaccgugacccugcacuucaagcaguacgagugcaacagcccgcccaacaaccaggugaugcucugcgagcccacgaucaucgagcgcaacaucaccgagaucgucuaccugaccaacaccacgaucgagaaggagaucugccccaagcuggcggaguaccggaacugguccaagccgcagugcaacaucaccggguucgcccccuucagcaaggacaacuccauccgccucagcgccggcggggacaucugggugacccgggagcccuacguguccugcgaccccgacaagugcuaccaguucgcccugggccaggggaccacgcugaacaacggccacagcaacgacaccguccacgaccgcaccccguaccggacccuccugaugaacgagcugggcgugcccuuccaccucgggacgcgccaggugugcaucgccugguccagcuccagcugccacgacggcaaggcguggcugcacgucugcaucaccggggacgacaagaacgccaccgccuccuucaucuacaacggccggcugguggacagcaucggguccuggagcaagaagauccuccgcacccaggaguccgagugcgugugcaucaacggcacgugcaccgucgugaugaccgacggcagcgccuccgggaaggcggacaccaagauccuguucaucgaggagggcaagaucgugcacaucagcacgcugagcggguccgcccagcacgucgaggagugcagcugcuacccccgguaccccggcgugcgcugcgugugccgggacaacuggaagggcuccaaccgcccgaucgucgacaucaacgugaaggacuacagcaucguguccagcuacgucugcuccgggcucgugggcgacacgccccggaagaacgacagcuucuccagcucccacugccugaaccccaacaacgaggagggcgggcacggggugaagggcugggccuucgacgacggcaacgacgucuggauggggcgcaccaucagcgagaagcugcgguccggcuacgagaccuucaaggugaucgagggguggagcaagcccaacuccaagcuccagaucaaccgccaggucaucguggagcggggcaaccgcagcggguacuccggcaucuucagcaucgagggcaaguccugcaucaaccggugcuucuacguggagcugauccgcgggcggaaggaggagaccaaggucugguggaccagcaacagcaucgugguguucugcggcaccuccgggaccuacggcacggggagcuggccggacggcgccgacaucaaccugaugcccaucuga

SEQ ID NO: 78589 - RNA, 1410 nt, Artificial Sequence
  derived and/or modified CDS sequence (opt1) from neuraminidase__InfluenzaA__ABB86936
augaacaccaaccagcgcaucaucaccaucggcacggugugccugaucgucgggaucaucagccuccugcugcagaucggcaacaucgugucccucuggaucaaccacagcauccagaccgaggggaagaaccacuccgagaugugcaaccagaacgugaucaccuacgucaacaacaccugggugaaccggacguacgugaacaucagcaacaccaacaucgccaccguccaggacgugaccuccgugauccuggccggcaacagcucccugugccccgucagcgggugggcgaucuacuccaaggacaacagcauccgcaucggcuccaagggcgacaucuucgugauccgggagccguucaucagcugcucccaccucgagugccgcacguucuuccugacccagggggcccugcucaacgacaagcacagcaacggcaccgugcgggaccgcucccccuaccggacccugaugagcugccccacgggggaggcccccuccccguacaacagccgcuucgaguccgucgccuggagcgccagcgcgugccacgacggcaugggguggcugaccaucggcaucuccggccccgacaacggggccguggccgugcucaaguacaacggcaucaucaccgacaccaucaagagcuggcggaacaagauccugcgcacgcaggaguccgagugcgucugcaugaacgggagcugcuucaccgugcugaccgacggccccuccaacggccaggccagcuacaagaucuucaagguggagaaggggaagaucaucaaguccaucgagcucgacgcgcccaacuaccacuacgaggagugcagcugcuacccggacaccggcaaggucaugugcgugugccgggacaacuggcacgccuccaaccgccccuggaucuacuucgaccagaaccuggacuaccagaucggguacaucugcagcggcguguucggggacaacccccgguccaacgacggcaagggcaacugcgggcccguccugagcaacggcgccaacggggugaagggcuucuccuuccgcuacgggaacggcguguggaucggccggaccaagagcaucaacucccgcagcggguucgagaugaucugggacccgaacggcuggacggggaccgacuccagcuucuccaugaagcaggacauccucgccaccacggacuggagcggcuacagcggguccuucguccagcaccccgagcugaccggcaugaacugcauccggcccugcuucuggguggagcugauccgcggccagcccaaggagagcaccaucugggccuccgggagcuccaucagcuucugcggcgucaacuccgagaccgcgaacuggagcuggccggacggggccgaccuccccuucacgaucgacaaguga

SEQ ID NO: 78590 - RNA, 1410 nt, Artificial Sequence
  derived and/or modified CDS sequence (opt1) from neuraminidase__InfluenzaA__ABB86947
augaacaccaaccagcgcaucaucaccaucggcacggugugccugaucgucgggaucaucagccuccugucccagaucggcaacaucgugagccuguggaucauccacuccauccagaccgggggcaagaaccacagcgagaugugcaaccagaacgugaucaccuacgucaacaacaccugggugaaccggacguacaucaacaucuccaacaccaacaucgccaccgugaaggacgucaccagcgugauccucgccgggaacuccagccugugccccguguccggcugggcgaucuacagcaaggacaacuccauccgcaucggcagcaagggggacaucuucgucauccgggagccguucaucuccugcagccaccuggagugccgcacguucuuccucacccagggcgcccugcugaacgacaagcacuccaacgggaccgugaaggaccggagccccuaccgcacccucauguccugccccaucggcgaggcccccagcccguacaacucccgguucgagagcguggccuggagcgccuccgcgugccacgacgggaugggcuggcugacgaucggcaucagcgggcccgacaacggcgccgucgccgugcugaaguacaacgggaucaucaccgacaccaucaaguccuggcgcaacaagauccuccggacccaggagagcgagugcgugugcaugaacggcuccugcuucacgguccugaccgacggccccagcaacgggcaggccuccuacaagaucuucaagguggagaagggcaagaucaucaagagcaucgagcuggacgcgcccaacuaccacuacgaggagugcuccugcuacccggacgccgggaaggugaugugcgucugccgcgacaacuggcacgccagcaaccggcccuggguguccuucgaccagaaccucgacuaccagaugggcuacaucugcagcgggguguucggcgacaacccccgcuccaacgacggcaaggggaacugcggccccguccugagcaacggggccaacggcgugaagggguucuccuuccgguacggcaacggcguguggaucgggcgcaccaagagcaucaacucccggagcggcuucgagaugaucugggacccgaacggguggaccggcacggacuccagcuucagcaugaagcaggacaucaucgcccugaccgacugguccggguacagcggcuccuucguccagcaccccgagcucaccggcaugaacugcauccgccccugcuucuggguggagcugauccgggggcagcccaaggagagcaccaucugggcguccggcagcuccaucagcuucugcggggucaacuccgagacggccagcugguccuggccggacggcgccgaccugcccuucaccaucgacaaguga

SEQ ID NO: 78591 - RNA, 1410 nt, Artificial Sequence
  derived and/or modified CDS sequence (opt1) from neuraminidase__InfluenzaA__ABB86957
augaacaccaaccagcgcaucaucaccgugggcacggucugccugaucguggggaucgugagccuccugcugcagaucggcaacaucgucucccucuggaucagccacuccauccagaccggggagaagaaccacagcgaggugugcaaccagaacaucaucaccuacgagaacaagaccugggugaaccagacguacgucaacaucuccaacaccaacaucgccgagggccagggggugaccagcaucaucauggccggcaacuccagccugugccccguguccggcugggcgaucuacagcaaggacaacuccauccggaucgggagcaagggcgacaucuucgucauccgcgagccguucaucuccugcagccaccuggagugccggaccuucuuccucacgcagggggcccugcugaacgaccgccacuccaacggcaccgugaaggaccggagccccuaccgcacccucauguccugccccaucggggaggcccccagcccguacaacucccgguucgagagcguggccuggagcgccuccgcgugccacgacggcaugggcuggcugaccaucgggaucagcggcuccgacaacgaggccgucgccgugcugaaguacaacgggaucaucacggacaccaucaagagcuggcgcaacaagauccuccggacccaggaguccgagugcgugugcaucaacggcagcugcuucaccaucaugacggacggccccuccaacgggcaggccagcuacaagaucuucaagauggagaagggcaagaucaucaaguccgucgagcuggaggcgcccaacuaccacuacgaggagugcagcugcuaccccgacaccgggaagguggugugcgucugccgcgacaacuggcacgccuccaaccggccgugggugagcuucaaccagaaccuggacuaccagaucggcuacaucugcuccgggguguucggcgacaacccccgcagcaacgacggcaaggggaacugcggccccguccccuccaacggggccaacggcgugaagggguucagcuuccgguacggcaacggcguguggaucgggcgcaccaaguccaucuucagccgguccggcuucgagaugaucugggacccgaacggguggaccgagacggacagcagcuucuccaucaagcaggacaucaucgcccucaccgacuggagcggcuacuccgggagcuucguccagcaccccgagcugaccggcaugaacugcauccgccccugcuucuggguggagcugauccggggccagcccaaggaguccaccaucuggacgagcggguccagcaucuccuucugcggcgucgacagcgagaccgccuccuggagcuggccggacggggcggaccuccccuucaccaucgacaaguga

SEQ ID NO: 78592 - RNA, 1410 nt, Artificial Sequence
  derived and/or modified CDS sequence (opt1) from neuraminidase__InfluenzaA__ABB96333
augaaccccaaccagaagaucaucaccaucggcagcgugucccugaccaucgccacgaucugcuuccucaugcagaucgccauccuggucaccaccgugacccugcacuucaagcaguacgacugcgacagcccggcgaacaaccaggugaugcccugcgagcccaucaucaucgagcgcaacaucacggagaucgucuaccucaccaacaccaccaucgagaaggagaucugccccaagcugguggaguaccggaacugguccaagccgcagugcaagaucacgggguucgcccccuucagcaaggacaacuccauccgccugagcgccggcggggacaucugggugacccgggagcccuacgucuccugcgaccccggcaagugcuaccaguucgcccucgggcagggcaccacccuggacaacaagcacagcaacgacacgauccacgaccgcaccccgcaccggacccugcucaugaacgagcugggcgugcccuuccaccuggggacccgccaggugugcaucgccugguccagcuccagcugccacgacggcaaggcguggcuccacgucugcgugacgggguacgacaagaacgccaccgccuccuucaucuacgacggccggcugguggacagcaucggguccuggagcaagaacauccugcgcacccaggaguccgagugcgucugcaucaacgggaccugcacgguggugaugaccgacggcagcgccuccgagcgggcggacaccaagauccucuucaucgaggaggggaagaucguccacaucagcccccugagcggcuccgcccagcacguggaggagugcagcugcuacccccgcuacccgggggugcggugcgucugccgcgacaacuggaagggcuccaaccggcccgugguggacaucaacgucaaggacuacagcaucgccuccagcuacgugugcuccggccuggugggggacacgccccgcaagaacgaccgguacagcuccagcuacugccgcaaccccaacaacgagaagggcaaccacggggucaagggcugggccuucgacgacgggaacgacguguggaugggccggaccaucuccgacgagagccgcuccggcuacgagaccuucaaggucaucgggggcuggagcaccccgaacuccaagcuccagaucaaccgccaggugaucguggacagcgacaaccgguccggguacagcggcaucuucuccgucgagggcaagagcugcaucaaccggugcuucuacguggagcugauccgcggccgcgagcaggagacccgggugugguggacgagcaacuccaucgucguguucugcggcaccagcgggaccuacggcaccggguccuggcccgacggcgccgacaucaaccugaugcccaucuga

SEQ ID NO: 78593 - RNA, 1410 nt, Artificial Sequence
  derived and/or modified CDS sequence (opt1) from neuraminidase__InfluenzaA__ABB96344
augaaccccaaccagaagaucaucaccaucggcagcgugucccugaccaucgccacgaucugcuuccucaugcagaucgccauccuggucaccaccgugacccugcacuucaagcaguacgagugcgacagcccggcgaacaaccaggugaugcccugcgagcccaucaucaucgagcgcaacaucacggagaucgucuaccucaccaacaccaccaucgagaaggagaucugccccaagcugguggaguaccggaacugguccaagccgcagugcaagaucacgggguucgcccccuucagcaaggacaacuccauccgccugagcgccggcggggacaucugggugacccgggagcccuacgucuccugcgaccccggccgcugcuaccaguucgcccucgggcagggcaccacccuggacaacaagcacagcaacgacacgauccacgaccggaccccgcaccgcacccugcucaugaacgagcugggcgugcccuuccaccuggggacccgccaggugugcaucgccugguccagcuccagcugccacgacggcaaggcguggcuccacgucugcgugacgggguacgacaagaacgccaccgccuccuucaucuacgacggccggcugguggacagcaucggguccuggagcaagaacauccugcggacccaggaguccgagugcgucugcaucaacgggaccugcacgguggugaugaccgacggcagcgccuccgagcgcgcggacaccaagguccucuucaucgaggaggggaagaucgugcacaucagcccccugagcggcuccgcccagcacguggaggagugcagcugcuacccccgguacccggggguccgcugcgugugccgggacaacuggaagggcuccaaccgccccguggucgacaucaacgugaaggacuacagcaucgccuccagcuacgugugcuccggccuggucggggacacgccccggaagaacgaccgcuacagcuccagcuacugccggaaccccaacaacgagaagggcaaccacggggugaagggcugggccuucgacgacgggaacgacgucuggaugggccgcaccaucuccgacgagagccgguccggcuacgagaccuucaaggugaucgggggcuggagcaccccgaacuccaagcuccagaucaaccgccaggugaucgucgacagcgacaaccgguccggguacagcggcaucuucuccguggagggcaagagcugcaucaaccgcugcuucuacguggagcugauccgcggccgggagcaggagacccgcgucugguggacgagcaacuccaucgugguguucugcggcaccagcgggaccuacggcaccggguccuggcccgacggcgccgacaucaaccugaugcccaucuga

SEQ ID NO: 78594 - RNA, 1410 nt, Artificial Sequence
  derived and/or modified CDS sequence (opt1) from neuraminidase__InfluenzaA__ABB96398
augaaccccaaccagaagaucaucaccaucggcagcgugucccugaccaucgccacgaucugcuuccucaugcagaucgccauccuggucaccaccgugacccugcacuucaagcaguacgagugcgacagcccggcgaacaaccaggugaugcccugcgagcccaucaucaucgagcgcaacaucacggagaucgucuaccucaccaacaccaccaucgagaaggagacgugccccaagcugguggaguaccggaacugguccaagccgcagugcaagaucaccggguucgcccccuucagcaaggacaacuccauccgccugagcgccggcggggacaucugggugacccgggagcccuacgucuccugcgaccccggcaagugcuaccaguucgcccucgggcagggcaccacgcuggacaacaagcacagcaacgacaccauccacgaccgcaccccguaccggacccugcucaugaacgagcugggcgugcccuuccaccuggggacgcgccaggugugcaucgccugguccagcuccagcugccacgacggcaaggcguggcuccacgucugcgugaccggguacgacaagaacgccaccgccuccuucaucuacgacggccggcugguggacagcaucggguccuggagcaagaacauccugcgcacccaggaguccgagugcgucugcaucaacggcacgugcaccguggugaugaccgacggcagcgccuccgagcgggcggacaccaagauccucuucaucgaggaggggaagaucguccacaucagcccccugagcggcuccgcccagcacguggaggagugcagcugcuacccccgcuacccgggggugcggugcgucugccgcgacaacuggaagggcuccaaccggcccgugguggacaucaacgucaaggacuacagcaucgccuccagcuacgugugcuccggccuggugggggacacgccccgcaagaacgaccggagcuccagcuccuacugccgcaaccccaacaacgagaagggcaaccacggggucaagggcugggccuucgacgacgggaacgacguguggaugggccggaccaucagcgaggagucccgcagcggcuacgagaccuucaaggucaucgggggcugguccaccccgaacagcaagcuccagaucaaccgccaggugaucguggacuccgacaaccggagcggguacuccggcaucuucagcgucgagggcaagagcugcaucaaccggugcuucuacguggagcugauccgcgggcgcgagcaggagacgcgggugugguggaccuccaacagcaucgucguguucugcggcaccuccgggaccuacggcacggggagcuggcccgacggcgccgacaucaaccugaugcccaucuga

SEQ ID NO: 78595 - RNA, 1410 nt, Artificial Sequence; identical to SEQ ID NO: 78406
  derived and/or modified CDS sequence (opt1) from neuraminidase__InfluenzaA__ABB96490

SEQ ID NO: 78596 - RNA, 1410 nt, Artificial Sequence
  derived and/or modified CDS sequence (opt1) from neuraminidase__InfluenzaA__ABB96501
augaaccccaaccagaagaucaucaccaucggcagcgugucccugaccaucgccacgaucugcuuccucaugcagaucgccauccuggucaccaccgugacccugcacuucaagcaguacgagugcagcuccccgcccaacaaccaggugaugcccugcgagcccaucaucaucgagcgcaacaucacggagaucgucuaccucaccaacaccaccaucgagaaggagaucugcccgaagcugguggaguaccggaacuggagcaagccccagugcaagaucacgggguucgcgcccuucuccaaggacaacagcauccgccuguccgccggcggggacaucugggugacccgggagcccuacgucagcugcgacccguccaagugcuaccaguucgcccucggccaggggaccacccuggacaacaagcacagcaacgacacgauccacgaccgcacgccccaccggacccugcucaugaacgagcugggcgugcccuuccaccugggcacccgccaggugugcaucgccugguccagcuccagcugccacgacgggaaggccuggcuccacgucugcgugaccggcuacgacaagaacgcgaccgccuccuucaucuacgacgggcggcugguggacagcaucggcuccuggagcaagaacauccugcgcacccaggaguccgagugcgucugcaucaacgggaccugcacgguggugaugaccgacggcagcgccagcgagcgggccgacaccaagauccucuucaucgaggagggcaagaucguccacaucagcccccuguccggguccgcgcagcacguggaggagugcagcugcuacccgcgcuaccccggcgugcggugcgucugccgcgacaacuggaagggguccaaccggcccgugguggacaucaacgucaaggacuacagcaucguguccagcuacgugugcuccggccuggucggcgacacgccccgcaagaacgaccggagcuccagcuccuacugccgcaacccgaacaacgagaaggggaaccacggcgugaaggggugggccuucgacgacggcaacgacgucuggauggggcggaccaucagcgaggagucccgcagcggcuacgagaccuucaaggugaucggcgggugguccacccccaacagcaagucccagaucaaccgccaggugaucgucgacagcggcaaccggagcggguacuccggcaucuucagcguggaggggaaguccugcaucaaccggugcuucuacguggagcucauccgcggccgcgagcaggagacccgggucugguggacgagcaacuccaucgugguguucugcggcaccagcgggaccuacggcaccggguccuggcccgacggcgccgacaucaaccugaugcccaucuga

SEQ ID NO: 78597 - RNA, 1410 nt, Artificial Sequence
  derived and/or modified CDS sequence (opt1) from neuraminidase__InfluenzaA__ABB96534
augaaccccaaccagaagaucaucaccaucggcagcgugucccugaccaucgccacgaucugcuuccucaugcagaucgccauccuggucaccaccgugacccugcacuucaagcaguacgagugcagcuccccgcccaacaaccaggugaugcucugcgagcccacgaucaucgagcgcaacaucaccgagaucgucuaccugaccaacaccacgaucgagaaggagaucugccccaagcuggcggaguaccggaacuggagcaagccgcagugcaagaucaccggguucgcccccuucuccaaggacaacagcauccgccucuccgccggcggggacaucugggugacccgggagcccuacgugagcugcgaccccgacaagugcuaccaguucgcccugggccaggggaccacgcugaacaaccgccacuccaacgacaccguccacgaccggaccccguaccgcacccuccugaugaacgagcugggcgugcccuuccaccucggcacgaagcaggucugcaucgccuggagcuccagcuccugccacgacgggaaggcguggcugcacgugugcgugaccggccacgacgagaacgccaccgccagcuucaucuacgacgggcggcugguggacuccaucggcagcugguccaagaagauccuccgcacccaggagagcgagugcgucugcaucaacgggacgugcaccguggugaugaccgacggcuccgccagcggccgggcggacaccaagauccuguucaucgaggaggggaagaucguccacaucagcccccuguccggcagcgcccagcacguggaggagugcuccugcuacccccgcuacccgggggugcggugcgucugccgcgacaacuggaagggcagcaaccggcccaucguggacaucaacgugaaggacuacuccaucgucagcuccuacgugugcagcggccucgugggggacacgccccgcaagaacgacuccagcuccagcucccacugccugaaccccaacaacgaggagggcgggcacggcgucaaggggugggccuucgacgacggcaacgacguguggaugggccggaccaucagcgagaaguuccgcuccggguacgagaccuucaaggucaucgagggcuggagcaagccgaacuccaagcugcagaucaaccgccaggugaucguggaccgggggaaccggagcggcuacuccgggaucuucagcgucgagggcaagagcugcaucaaccgcugcuucuacguggagcucauccggggccgcaagcaggagaccgaggugugguggacguccaacagcaucgucguguucugcgggaccuccggcaccuacgggaccggcagcuggcccgacggggccgacaucaaccugaugcccaucuga

SEQ ID NO: 78598 - RNA, 1410 nt, Artificial Sequence
  derived and/or modified CDS sequence (opt1) from neuraminidase__InfluenzaA__ABC02237
augaaccccaaccagaagaucaucaccaucggcagcgugucccugaccaucgccacgaucugcuuccucaugcagaucgccauccuggucaccaccgugacccugcacuucaagcaguacgagugcagcuccccgcccaacaaccaggugaugcucugcgagcccacgaucaucgagcgcaacaucaccgagaucgucuaccugaccaacaccacgaucgagaaggagaucugccccaagcuggcggaguaccggaacuggagcaagccgcagugcaagaucaccggguucgcccccuucuccaaggacaacagcauccgccucuccgccggcggggacaucugggugacccgggagcccuacgugagcugcgaccccgacaagugcuaccaguucgcccugggccaggggaccacgcugaacaaccgccacuccaacgacaccguccacgaccggaccccguaccgcacccuccugaugaacgagcugggcgugcccuuccaccucggcacgaagcaggucugcaucgccuggagcuccagcuccugccacgacgggaaggcguggcugcacgugugcgugaccggccacgacgagaacgccaccgccagcuucaucuacgacgggcggcugguggacuccaucggcagcugguccaagaagauccuccgcacccaggagagcgagugcgucugcaucaacgggacgugcaccguggugaugaccgacggcuccgccagcggccgggcggacaccaagauccuguucaucgaggaggggaagaucguccacaucagccagcuguccggcagcgcccagcacguggaggagugcuccugcuacccccgcuaccccggggugcggugcgucugccgcgacaacuggaagggcagcaaccggccgaucguggacaucaacaucaaggacuacuccaucgugagcuccuacgucugcagcggccucgugggggacacgccccgcaagaacgacuccagcuccagcucccacugccugaaccccaacaacgaggagggcgggcacggcgugaaggggugggccuucgacgacggcaacgacgucuggaugggccggaccaucagcgagaaguuccgcuccggguacgagaccuucaaggugaucgagggcuggagcaagcccaacuccaagcugcagaucaaccggcaggucaucguggaccgcgggaaccggagcggcuacuccgggaucuucagcguggagggcaagagcugcaucaaccgcugcuucuacgucgagcucauccggggccgcaagcaggagaccgaggugugguggacguccaacagcaucguggccuucugcgggaccuccggcaccuacgggaccggcagcuggccggacggggccgacaucaaccugaugcccaucuga

SEQ ID NO: 78599 - RNA, 1410 nt, Artificial Sequence
  derived and/or modified CDS sequence (opt1) from neuraminidase__InfluenzaA__ABC02258
augaaccccaaccagaagaucaucaccaucggcagcgugucccugaccaucgccacgaucugcuuccucaugcagaucgccauccuggucaccaccgugacccugcacuucaagcaguacgagugcgacagcccggcgaacaaccagaucaugcccugcgagcccacgaucaucgagcgcaacaucaccgagaucguguaccucaccaacaucaccaucgagaaggagaucugccccaagcuggucgaguaccggaacugguccaagccgcagugcaagaucacgggguucgcccccuucagcaaggacaacuccauccgccugagcgccggcggggacaucugggugacccgggagcccuacguguccugcgaccccagcaagugcuaccaguucgcccucggccaggggaccacccuggacaacaagcacuccaacgacacgauccacgaccgcaccccgcaccggacccugcucaugaacgagcugggcguccccuuccaccugggcacccgccaggugugcaucgccuggagcuccagcuccugccacgacgggaaggcguggcuccacgugugcgucacgggcuacgacaagaacgccaccgccagcuucaucuacgacgggcggcugguggacuccaucggcagcuggucccagaacauccugcgcacccaggagagcgagugcgugugcaucaacgggaccugcacggucgugaugaccgacggcuccgccagcggccgggcggacaccaagauccucuucaucgaggaggggaagaucgugcacaucagcccccuguccggcagcgcccagcacgucgaggagugcuccugcuacccccgcuacccgggggugcggugcaucugccgcgacaacuggaagggcagcaaccggcccguggucgacaucaacgugaaggacuacuccaucgacagcuccuacgugugcagcggccuggucggggacacgccccgcaagaacgaccgguccagcaacuccuacugccgcaaccccaacaacgagaagggcaaccacggggugaagggcugggccuucgacgacgggaacgacguguggaugggccggaccaucagcgaggacucccgcagcggcuacgagaccuucaaggucaucgggggcugguccaccccgaacagcaagcuccagaucaaccgccaggugaucgucgacuccgacaaccggagcggguacuccggcaucuucagcguggagggcaagagcugcaucaaccggugcuucuacguggagcugauccgcgggcgcgagcaggagacccgggucugguggacguccaacagcaucgugguguucugcggcaccuccgggaccuacggcgccgggagcuggcccgacggcgccgacaucaaccugaugcccaucuga

SEQ ID NO: 78600 - RNA, 1410 nt, Artificial Sequence
  derived and/or modified CDS sequence (opt1) from neuraminidase__InfluenzaA__ABC02269
augaaccccaaccagaagaucaucaccaucggcagcgugucccugaccaucgccacgaucugcuuccucaugcagaucgccauccuggucaccaccgugacccugcacuucaagcaguacgagugcgacagcccggcgaacaaccaggugaugcccugcgagcccaucaucaucgagcgcaacaucacggagaucgucuaccucaccaacaccaccaucgagaaggagaucugccccaagcugguggaguaccggaacugguccaagccgcagugcaagaucacgggguucgcccccuucagcaaggacaacuccauccgccugagcgccggcggggacaucugggugacccgggagcccuacgucuccugcgaccccggcaagugcuaccaguucgcccucgggcagggcaccacccuggacaacaagcacagcaacgacacgauccacgaccgcaccccgcaccggacccugcucaugaacgagcugggcgugcccuuccaccuggggacccgccaggugugcaucgccugguccagcuccagcugccacgacggcaaggcguggcuccacgucugcgugacgggguacgacaagaacgccaccgccuccuucaucuacgacggccggcugguggacagcaucggguccuggagccagaacauccugcgcacccaggaguccgagugcgucugcaucaacgggaccugcacgguggugaugaccgacggcagcgccuccggccgggcggacaccaagauccucuucaucgaggagggcaagaucguccacaccagcccccugagcggguccgcccagcacguggaggagugcagcugcuacccccgcuacccgggcgugcggugcaucugccgcgacaacuggaagggcuccaaccggcccgucguggacaucaacgugaaggacuacagcaucgacuccagcuacgucugcuccgggcuggugggcgacacgccccgcaacaacgaccggagcuccagcuccuacugccgcaaccccaacaacgagaaggggacccacggcgugaaggggugggccuucgacgacggcaacgacgucuggaugggccggaccaucagcgaggacucccgcagcggguacgagaccuucaaggugaucggcgggugguccacgccgaacagcaagcuccagaucaaccggcaggucaucguggacuccgacaaccgcagcggcuacuccgggaucuucagcguggagggcaagagcugcaucaaccggugcuucuacgucgagcugauccgcggccgcgagcaggagacccgggugugguggaccuccaacagcaucguggucuucugcgggaccuccggcacguacgggaccggcagcuggcccgacggggccgacaucaaccugaugcccaucuga

SEQ ID NO: 78601 - RNA, 1413 nt, Artificial Sequence
  derived and/or modified CDS sequence (opt1) from neuraminidase__InfluenzaA__ABC02280
augaaccccaaccagaagaucaucaccaucggcagcaucuccaucgccaucgggaucaucagccugaugcuccagaucggcaacaucaucuccaucugggccagccacuccauccagaccgggagccagaaccacacgggcgugugcaaccagcgcaucaucaccuacgagaacuccaccugggucaaccacaccuacgugaacaucaacaacacgaacgugaucgcggggaaggacaagaccagcgucacccuggccggcaacuccagccugugcuccaucagcggcugggccaucuacaccaaggacaacuccauccggaucgggagcaagggcgacguguucgugauccgcgagccguucaucuccugcagccaccucgagugccggacguucuuccugacccaggggucccugcucaacgacaagcacagcaacggcaccgucaaggaccgcucccccuaccgggcccugaugagcugcccccugggggaggcccccagcccguacaacuccaaguucgagagcguggcgugguccgccagcgccugccacgacggcaugggcuggcucaccaucgggaucuccggccccgacaacggggccguggcgguccugaaguacaacggcaucaucacggagaccaucaagagcuggaagaagcagauccugcgcacccaggaguccgagugcgugugcgugaacggcagcugcuucaccaucaugacggacgggcccuccaacggcgccgccagcuacaagaucuucaagaucgagaaggggaaggucaccaaguccaucgagcucaacgcccccaacuuccacuacgaggagugcagcugcuacccggacaccggcaccgugaugugcgugugccgggacaacuggcacggguccaaccgccccugggucagcuucaaccagaaccuggacuaccagaucggcuacaucugcuccggcguguucggggacaacccccggcccaaggacggcgaggggagcugcaacccggugacggucgacggcgccaacggggugaagggcuucuccuacaaguacggcaacgggguguggaucggccgcaccaagagcaaccggcugcgcaagggguucgagaugaucugggaccccaacggcuggaccgacaccgacuccgacuucagcgucaagcaggacgugguggcgaucacggacuggagcggguacuccggcagcuucguccagcaccccgagcucaccggccuggacugcauccggcccugcuucuggguggagcugguccgcgggcucccgaaggagaacaccaccaucuggacguccggcagcuccaucagcuucugcggggugaacuccgacaccgccaacuggagcuggcccgacggcgccgagcugcccuucaccaucgacaaguga

SEQ ID NO: 78602 - RNA, 1410 nt, Artificial Sequence; identical to SEQ ID NO: 78597
  derived and/or modified CDS sequence (opt1) from neuraminidase__InfluenzaA__ABC02302

SEQ ID NO: 78603 - RNA, 1410 nt, Artificial Sequence; identical to SEQ ID NO: 78594
  derived and/or modified CDS sequence (opt1) from neuraminidase__InfluenzaA__ABC02313

SEQ ID NO: 78604 - RNA, 1410 nt, Artificial Sequence; identical to SEQ ID NO: 78599
  derived and/or modified CDS sequence (opt1) from neuraminidase__InfluenzaA__ABC02324

SEQ ID NO: 78605 - RNA, 1410 nt, Artificial Sequence
  derived and/or modified CDS sequence (opt1) from neuraminidase__InfluenzaA__ABC02335
augaaccccaaccagaagaucaucaccaucggcagcgugucccugaccaucgccacgaucugcuuccucaugcagaucgccauccuggucaccaccgugacccugcacuucaagcaguacgagugcgacagcccggcgaacaaccaggugaugcccugcgagcccaucaucaucgagcgcaacaucacggagaucgucuaccucaccaacaccaccaucgagaaggagaucugccccaagcugguggaguaccggaacugguccaagccgcagugcaagaucacgggguucgcccccuucagcaaggacaacuccauccgccugagcgccggcggggacaucugggugacccgggagcccuacgucuccugcgaccccggcaagugcuaccaguucgcccucgggcagggcaccacccuggacaacaagcacagcaacgacacgauccacgaccgcaccccgcaccggacccugcucaugaacgagcugggcgugcccuuccaccuggggacccgccaggugugcaucgccugguccagcuccagcugccacgacggcaaggcguggcuccacgucugcgugacgggguacgacaagaacgccaccgccuccuucaucuacgacggccggcugguggacagcaucggguccuggagccagaacauccugcgcacccaggaguccgagugcgucugcaucaacgggaccugcacgguggugaugaccgacggcagcgccuccggccgggcggacaccaagauccucuucaucaaggagggcaagaucguccacaucagcccccugagcggguccgcccagcacguggaggagugcagcugcuacccccgcuacccgggcgugcggugcaucugccgcgacaacuggaagggcuccaaccggcccgucguggacaucaacgugaaggacuacagcaucgacuccagcuacgucugcuccgggcuggugggcgacacgccccgcaacaacgaccggagcuccaacagcuacugccgcaaccccaacaacgagaaggggaaccacggcgugaaggggugggccuucgacgacggcaacgacgucuggaugggccggaccaucuccgaggacagccgcuccggguacgagaccuucaaggugaucggcggguggagcaccccgaacuccaagcuccagaucaaccggcaggucaucguggacagcgacaaccgcuccggcuacagcgggaucuucuccguggagggcaagagcugcaucaaccggugcuucuacgucgagcugauccgcggccgcgagcaggagacccgggugugguggacgagcaacuccaucguggucuucugcgggaccagcggcaccuacgggaccggcuccuggcccgacggggccgacaucaaccugaugcccaucuga

SEQ ID NO: 78606 - RNA, 1410 nt, Artificial Sequence
  derived and/or modified CDS sequence (opt1) from neuraminidase__InfluenzaA__ABC39808
augaaccccaaccagaagaucaucaccaucggcagcgugucccugaccaucgccacgaucugcuuccucaugcagaucgccauccuggucaccaccgugacccugcacuucaagcaguacgagugcagcuccccgcccaacaaccaggugaugcccugcgagcccaucaucaucgagcgcaacaucacggagaucgucuaccucaccaacaccaccaucgagaaggagaucugcccgaagcugguggaguaccggaacuggagcaagccccagugcaagaucacgggguucgcgcccuucuccaaggacaacagcauccgccuguccgccggcggggacaucugggugacccgggagcccuacgucagcugcgacccguccaagugcuaccaguucgcccucggccaggggaccacccuggacaacaagcacagcaacgacacgauccacgaccgcacgccccaccggacccugcucaugaacgagcugggcgugcccuuccaccugggcacccgccaggugugcaucgccugguccagcuccagcugccacgacgggaaggccuggcuccacgucugcgugaccggcuacgacaagaacgcgaccgccuccuucaucuacgacgggcggcugguggacagcaucggcuccuggagcaagaacauccugcgcacccaggaguccgagugcgucugcaucaacgggaccugcacgguggugaugaccgacggcagcgccagcgagcgggccgacaccaagauccucuucaucgaggagggcaagaucguccacaucagcccccuguccggguccgcgcagcacguggaggagugcagcugcuacccgcgcuaccccggcgugcggugcgucugccgcgacaacuggaagggguccaaccggcccgugguggacaucaacgucaaggacuacagcaucguguccagcuacgugugcuccggccuggucggcgacacgccccgcaagaacgaccggagcuccagcuccuacugccgcaacccgaacaacgagaagggggaccacggcgugaaggggugggccuucgacgacggcaacgacgucuggauggggcggaccaucagcgaggagucccgcagcggcuacgagaccuucaaggugaucggcgggugguccacccccaacagcaagucccagaucaaccgccaggugaucgucgacagcggcaaccggagcggguacuccggcaucuucagcguggaggggaaguccugcaucaaccggugcuucuacguggagcucauccgcggccgcaagcaggagacccgggucugguggacgagcaacuccaucgugguguucugcggcaccagcgggaccuacggcaccggguccuggcccgacggcgccgacaucaaccugaugcccaucuga

SEQ ID NO: 78607 - RNA, 1410 nt, Artificial Sequence; identical to SEQ ID NO: 78406
  derived and/or modified CDS sequence (opt1) from neuraminidase__InfluenzaA__ABC40525

SEQ ID NO: 78608 - RNA, 1413 nt, Artificial Sequence
  derived and/or modified CDS sequence (opt1) from neuraminidase__InfluenzaA__ABC40536
augaaccccaaccagaagaucaucaccaucggcagcaucuccaucgccaucgggaucaucagccugaugcuccagaucggcaacaucaucuccaucugggccagccacuccauccagaccgggagccagaaccacacgggcgugugcaaccagcgcaucaucaccuacgagaacuccaccugggucaaccacaccuacgugaacaucaacaacacgaacgugaucgcggggaaggacaagaccagcgucacccuggccggcaacuccagccugugcuccaucagcggcugggccaucuacaccaaggacaacuccauccggaucgggagcaagggcgacguguucgugauccgcgagccguucaucuccugcagccaccucgagugccggacguucuuccugacccagggggcccugcucaacgacaagcacuccaacggcaccgucaaggaccgcagccccuaccgggcccugauguccugcccccugggggaggcgcccagcccguacaacagcaaguucgaguccguggccuggagcgccuccgccugccacgacggcaugggcuggcucaccaucgggaucagcggccccgacaacggggcgguggccguccugaaguacaacggcaucaucacggagaccaucaaguccuggaagaagcagauccugcgcacccaggagagcgagugcgugugcgugaacggcuccugcuucaccaucaugacggacgggcccagcaacggcgccgccuccuacaagaucuucaagaucgagaaggggaaggucaucaagagcaucgagcucaacgcccccaacuuccacuacgaggagugcuccugcuacccggacaccggcaccgugaugugcgugugccgggacaacuggcacgggagcaaccgccccugggucuccuucaaccagaaccuggacuaccagaucggcuacaucugcagcggcguguucggggacaacccccggcccaaggacggcgagggguccugcaacccggugaccgucgacggcgcgaacggggugaagggcuucagcuacaaguacggcaacgggguguggaucggccgcacgaaguccaaccggcugcgcaagggguucgagaugaucugggaccccaacggcuggaccgacaccgacagcgacuucuccgucaagcaggacgugguggccaucaccgacuggagcggguacagcggcuccuucguccagcaccccgagcucacgggccuggacugcauccggcccugcuucuggguggagcugguccgcgggcucccgaaggagaacaccaccaucuggaccagcggcuccagcaucuccuucugcggggugaacagcgacacggccaacugguccuggcccgacggcgccgagcugcccuucaccaucgacaaguga

SEQ ID NO: 78609 - RNA, 1410 nt, Artificial Sequence; identical to SEQ ID NO: 78600
  derived and/or modified CDS sequence (opt1) from neuraminidase__InfluenzaA__ABC40547

SEQ ID NO: 78610 - RNA, 1410 nt, Artificial Sequence
  derived and/or modified CDS sequence (opt1) from neuraminidase__InfluenzaA__ABC40558
augaaccccaaccagaagaucaucaccaucggcagcgugucccugaccaucgccacgaucugcuuccucaugcagaucgccauccuggucaccaccgugacccugcacuucaagcaguacgagugcagcuccccgcccaacaaccaggugaugcccugcgagcccaucaucaucgagcgcaacaucacggagaucgucuaccucaccaacaccaccaucgagaaggagaucugcccgaagcugguggaguaccggaacuggagcaagccccagugcaagaucacgggguucgcgcccuucuccaaggacaacagcauccgccuguccgccggcggggacaucugggugacccgggagcccuacgucagcugcgacccgggcaagugcuaccaguucgcccucgggcagggcaccacccuggacaacaagcacuccaacgacacgauccacgaccgcacccccuaccggacccugcucaugaacgagcugggcgugcccuuccaccuggggacccgccaggugugcaucgccuggagcuccagcuccugccacgacggcaaggccuggcuccacgucugcgugacggggcacgacaagaacgcgaccgccagcuucaucuacgacggccggcugguggacuccaucgggagcugguccaagagcauccugcgcacccaggaguccgagugcgucugcaucaacgggaccugcacgguggugaugaccgacggcagcgccagcgagcgggccgacaccaagauccucuucaucgaggagggcaagaucguccacaucagcccccuguccggcuccgcgcagcacguggaggagugcagcugcuacccgcgcuaccccggggugcggugcgucugccgcgacaacuggaagggcuccaaccggcccgugguggacaucaacgucaaggacuacagcaucguguccagcuacgugugcuccggccuggucggggacacgccccgcaagaacgaccggagcuccagcuccuacugccagaacccgaacaacgagaagggcaaccacggggugaagggcugggccuucgacgacgggaacgacgucuggaugggccgcaccaucagcgaggagucccggagcggcuacgagaccuucaaggugaucgggggcugguccacccccaacagcaagcuccagaucaaccgccaggugaucgucgacaucgacaaccgguccggguacagcggcaucuucagcguggaggggaaguccugcaucaaccgcugcuucuacguggagcugauccggggccgcgagcaggagacccgcgucugguggacgagcaacuccaucgugguguucugcggcaccagcgggaccuacggcaccggguccuggcccgacggcgccgacaucaaccugaugcccaucuga

SEQ ID NO: 78611 - RNA, 1410 nt, Artificial Sequence
  derived and/or modified CDS sequence (opt1) from neuraminidase__InfluenzaA__ABC40611
augaaccccaaccagaagaucaucaccaucggcagcaucucccugaccaucgccacgaucugcuuccucaugcagaucgccauccuggugaccaccgucacccugcacuucaagcaguacgagugcaacagccucccgaacaaccaggugaugcugugcgagcccacgaucaucgagcgcaacaucaccgagaucguguaccugaccaacaccacgaucgagaaggagaucugccccaagcucgcggaguaccggaacugguccaagccccagugcaagaucaccggguucgccccguucagcaaggacaacuccauccgccugagcgccggcggggacaucugggucacccgggagcccuacguguccugcgaccccgacaagugcuaccaguucgcccugggccaggggaccacgcucaacaaccgccacagcaacgacaccgugcacgaccggacccccuaccgcacccugcugaugaacgagcucggcgucccguuccaccugggcacgaagcaggucugcaucgccugguccagcuccagcugccacgacgggaaggcguggcugcacgugugcgugaccggccacgacgagaacgccaccgccuccuucaucuacgacgggcggcucguggacagcaucggcuccuggagcaagaagauccugcgcacccaggaguccgagugcgugugcaucaacgggacgugcaccgucgugaugaccgacggcagcgccuccggccgggcggacaccaagauccuguucaucgaggaggggaagaucauccacaucagccagcucagcggcuccgcccagcacguggaggagugcagcugcuacccccgcuaccccgggguccggugcgugugccgcgacaacuggaagggcuccaaccggcccaucguggacaucaacgucaaggacuacagcaucguguccagcuacgugugcuccggccuggucggggacacgccgcgcaagaacgacagcuccagcuccagccacugccugaaccccaacaacgaggagggcgggcacggcgugaaggggugggccuucgacgacggcaacgacguguggaugggccggaccaucuccgagaaguuccgcagcggguacgagaccuucaaggucaucgagggcugguccaagcccaacagcaagcuccagaucaaccgccaggugaucgucgaccgggacaaccgguccggguacagcggcaucuucuccguggagggcaagagcugcaucaaccgcugcuucuacguggagcugauccgggggcgcaagcaggagaccgaggucugguggacgagcaacuccaucgugguguucugcggcaccagcgggaccuacggcaccggguccuggcccgacggcgccgacaucaaccugaugccgaucuga

SEQ ID NO: 78612 - RNA, 1410 nt, Artificial Sequence
  derived and/or modified CDS sequence (opt1) from neuraminidase__InfluenzaA__ABC40622
augaaccccaaccagaagaucaucaccaucggcagcgugucccugaccaucgccacgaucugcuuccucaugcagaucgccauccuggucaccaccgugacccugcacuucaagcaguacgagugcgacagcccggcgaacaaccaggugaugcccugcgagcccaucaucaucgagcgcaacaucacggagaucgucuaccucaccaacaccaccaucgagaaggagaucugccccaagcugguggaguaccggaacugguccaagccgcagugcaagaucacgggguucgcccccuucagcaaggacaacuccauccgccugagcgccggcggggacaucugggugacccgggagcccuacgucuccugcgaccccggcaagugcuaccaguucgcccucgggcagggcaccacccuggacaacaagcacagcaacgacacgauccacgaccgcaccccgcaccggacccugcucaugaacgagcugggcgugcccuuccaccuggggacccgccaggugugcaucgccugguccagcuccagcugccacgacggcaaggcguggcuccacgucugcgugacgggguacgacaagaacgccaccgccuccuucaucuacgacggccggcugguggacagcaucggguccuggagccagaacauccugcgcacccaggaguccgagugcgucugcaucaacgggaccugcacgguggugaugaccgacggcaacgccagcggccgggcggacaccaagauccucuucaucgaggagggcaagaucguccacaucagcccccuguccgggagcgcccagcacguggaggagugcuccugcuacccccgcuacccgggcgugcggugcaucugccgcgacaacuggaagggcagcaaccggcccgucguggacaucaacgugaaggacuacuccaucgacagcuccuacgucugcagcgggcuggugggcgacacgccccgcaacaacgaccgguccagcaacuccuacugccgcaaccccaacaacgagaaggggaaccacggcgugaaggggugggccuucgacgacggcaacgacgucuggaugggccggaccaucagcgaggacucccgcagcggguacgagaccuucaaggugaucggcgggugguccaccccgaacagcaagcuccagaucaaccggcaggucaucguggacuccgacaaccgcagcggcuacuccgggaucuucagcguggagggcaaguccugcaucaaccggugcuucuacgucgagcugauccgcggccgcgagcaggagacccgggugugguggacgagcaacagcaucguggucuucugcgggaccuccggcaccuacgggaccggcagcuggcccgacggggccgacaucaaccugaugcccaucuga

SEQ ID NO: 78613 - RNA, 1410 nt, Artificial Sequence
  derived and/or modified CDS sequence (opt1) from neuraminidase__InfluenzaA__ABC40634
augaaccccaaccagaagaucaucaccaucggcagcgugucccugaccaucgccacgaucugcuuccucacccagaucgccauccuggucaccaccgugacgcugcacuucaagcaguacgagugcaacagcccgcccaacaaccaggugaugcucugcgagcccaccaucaucgagcgcaacaucaccgagaucgucuaccugaccaacacgaccaucgagaaggagaucugccccaagcuggcggaguaccggaacugguccaagccgcagugcaacaucaccggguucgcccccuucagcaaggacaacuccauccgccucagcgccggcggggacaucugggugacccgggagcccuacguguccugcgaccccgacaagugcuaccaguucgcccugggccaggggacgacccugaacaacggccacagcaacgacaccguccacgaccgcaccccguaccggacgcuccugaugaacgagcugggcgugcccuuccaccucgggaccaagcaggucugcaucgccugguccagcuccagcugccacgacggcaaggcguggcugcacgugugcgugaccggggacgacaagaacgccaccgccuccuucaucuacaacggccgccugguggacagcaucggguccuggagcaagaagauccuccggacgcaggaguccgagugcgucugcaucgacgggaccugcaccguggugaugaccgacggcagcgccuccgggaaggcggacacgaagauccuguucaucgaggagggcaagaucguccacaccagccugcucagcggguccgcccagcacguggaggagugcagcugcuacccccgcuaccccggcgugcggugcgucugccgcgacaacuggaagggcuccaaccggccgaucguggacaucaacgugaaggacuacagcaucgucuccagcuacgugugcuccgggcuggugggcgacacgccccgcaagaacgacagcuccagcuccagccacugccuggaccccaacaacgaggagggcggccacggggucaagggcugggccuucgacgacggcaacgacguguggauggggcggaccaucuccgagaagcuccgcagcggcuacgagaccuucaaggucaucgaggggugguccaagcccaacagcaagcugcagaucaaccgccaggugaucguggaccggggcaaccgguccggguacagcggcaucuucuccgucgagggcaagagcugcaucaaccgcugcuucuacguggagcugauccgggggcgcaaccaggagaccgaggugcucuggaccagcaacuccaucgucguguucugcggcaccagcgggacguacggcaccggguccuggccggacggcgccgacaucaaccugaugcccaucuga

SEQ ID NO: 78614 - RNA, 1410 nt, Artificial Sequence
  derived and/or modified CDS sequence (opt1) from neuraminidase__InfluenzaA__ABC40645
augaaccccaaccagaagaucaucaccaucggcagcgugucccugaccaucagcacgaucugcuucuucaugcagaucgccauccucaucaccaccgucacccugcacuucaagcaguacgaguucaacuccccgcccaacaaccaggugaugcugugcgagcccacgaucaucgagcgcaacaucaccgagaucguguaccucaccaacaccacgaucgagaaggagaucugccccaagcuggccgaguaccggaacuggagcaagccgcagugcaacaucaccggguucgcgcccuucuccaaggacaacagcauccgccuguccgccggcggggacaucugggucacccgggagcccuacgugagcugcgaccccgacaagugcuaccaguucgcccucggccaggggaccacgcugaacaacgugcacuccaacgacaccguccacgaccgcaccccguaccggacccugcucaugaacgagcugggcgugcccuuccaccugggcacgaagcaggucugcaucgccuggagcuccagcuccugccacgacgggaaggccuggcuccacgugugcgugaccggcgacgacgagaacgcgaccgccagcuucaucuacaacgggcgccugguggacuccgucgugagcugguccaagaagauccugcggacccaggagagcgagugcgugugcaucaacggcacgugcaccgucgugaugaccgacggguccgccagcggcaaggccgacaccaagauccucuucaucgaggagggcaagaucgugcacacgagcacccuguccgggagcgcgcagcacgucgaggagugcuccugcuacccccgcuaccccggcgugcggugcgugugccgcgacaacuggaaggggagcaaccggccgaucgucgacaucaacaucaaggacuacuccaucgugagcuccuacgugugcagcggccuggucggcgacacgccccgcaagaacgacuccagcuccagcucccacugccucgaccccaacaacgaggagggcgggcacggggugaagggcugggccuucgacgacgggaacgacgucuggaugggccggaccaucagcgagaagcugcgcuccggcuacgagaccuucaaggugaucgagggguggagcaaccccaacuccaagcugcagaucaaccgccaggugaucgucgaccggggcaaccggagcggguacuccggcaucuucagcguggagggcaagagcugcaucaaccgcugcuucuacguggagcucauccgggggcgcaagcaggagaccgagguccuguggaccuccaacagcaucgugguguucugcggcaccuccgggacguacggcaccgggagcuggccggacggcgccgacaucaaccugaugcccaucuga

SEQ ID NO: 78615 - RNA, 1410 nt, Artificial Sequence
  derived and/or modified CDS sequence (opt1) from neuraminidase__InfluenzaA__ABC41706
augaaccccaaccagaagaucaucaccaucggcagcgugucccugaccaucgccacgaucugcuuccucaugcagaucgccauccuggucaccaccgugacccugcacuucaagcagcacgagugcaacagcccgcccaacaaccaggugaugcucugcgagcccacgaucaucgagcgcaacaucaccgagaucgucuaccugaccaacaccacgaucgagaaggagaucugccccaagcugguggaguaccggaacugguccaagccgcagugcaacaucaccggguucgcgcccuucagcaaggacaacuccauccgccucagcgccggcggggacaucugggugacccgggagcccuacgucuccugcgaccccgacaagugcuaccaguucgcccugggccaggggaccacgcugaacaacggccacagcaacgacaccgugcacgaccgcaccccguaccggacccuccugaugaacgagcugggcgugcccuuccaccucgggacgcgccaggucugcaucgccugguccagcuccagcugccacgacggcaaggccuggcugcacgugugcgugaccggggacgacaagaacgcgaccgccuccuucaucuacaacggccggcuggucgacagcaucggguccuggagcaagaagauccuccgcacccaggaguccgagugcgugugcaucaacggcacgugcaccguggucaugaccgacggcagcgccuccgggaaggccgacaccaagauccuguucaucgaggagggcaagaucgugcacaucagcacgcugagcggguccgcgcagcacguggaggagugcagcugcuacccccgguaccccggcguccgcugcgugugccgggacaacuggaagggcuccaaccgcccgaucguggacaucaacgucaaggacuacagcaucguguccagcuacgugugcuccgggcucgucggcgacacgccccggaagaacgacagcuucuccagcucccacugccuggaccccaacaacgaggagggcgggcacggggugaagggcugggccuucgacgacggcaacgacgucuggauggggcgcaccaucagcgagaagcugcgguccggcuacgagaccuucaaggugaucgagggguggagcaagcccaacuccaagcuccagaucaaccgccaggugaucgucgagcggggcaaccgcagcggguacuccggcaucuucagcguggagggcaaguccugcaucaaccggugcuucuacguggagcugauccgcgggcggaaggaggagaccgaggucugguggaccagcaacagcaucgugguguucugcggcaccuccgggaccuacggcacggggagcuggccggacggcgccgacaucaaccugaugcccaucuga

SEQ ID NO: 78616 - RNA, 1413 nt, Artificial Sequence
  derived and/or modified CDS sequence (opt1) from neuraminidase__InfluenzaA__ABC41717
augaaccccaaccagaagaucaucaccaucggcagcaucuccaucgccaucgggaucaucagccugaugcuccagaucggcaacaucaucuccaucugggccagccacuccauccagaccgggagccagaaccacacgggcaucugcaaccagcgcaucaucaccuacgagaacuccaccugggugaaccacaccuacgucaacaucaacaacacgaacgugguggcggggaaggacaagaccagcgucacccuggccggcaacuccagccugugcuccaucagcggcugggccaucuacaccaaggacaacuccauccggaucgggagcaagggcgacguguucgugauccgcgagccguucaucuccugcagccaccucgagugccggacguucuuccugacccagggggcccugcucaacgacaagcacuccaacggcaccgucaaggaccgcagccccuaccgggcccugauguccugcccccugggggaggcgcccagcccguacaacagcaaguucgaguccguggccuggagcgccuccgccugccacgacggcaugggcuggcucaccaucgggaucagcggccccgacaacggggcgguggccguccugaaguacaacggcaucaucacggagaccaucaaguccuggaagaagcgcauccugcggacccaggagagcgagugcgugugcgugaacggcuccugcuucaccaucaugacggacgggcccagcaacggcgccgccuccuacaagaucuucaagaucgagaaggggaaggucaccaagagcaucgagcucaacgcccccaacuuccacuacgaggagugcuccugcuacccggacaccggcaccgugaugugcgugugccgcgacaacuggcacgggagcaaccggcccugggucuccuucaaccagaaccuggacuaccagaucggcuacaucugcagcggcguguucggggacaacccccgccccaaggacggcaagggguccugcaacccggugacggucgacggcgcggacggggugaagggcuucagcuacaaguacggcaacgggguguggaucggccggaccaaguccaaccgccugcggaagggguucgagaugaucugggaccccaacggcuggaccgacaccgacagcgacuucuccgucaagcaggacgugguggccgucacggacuggagcggguacagcggcuccuucgugcagcaccccgagcucaccggccuggacugcauccgccccugcuucugggucgagcuggugcgggggcucccgcgcgagaacaccaccaucuggacgagcggcuccagcaucuccuucugcgggguggacagcgacaccgccaacugguccuggcccgacggcgccgagcugcccuucaccaucgacaaguga

SEQ ID NO: 78617 - RNA, 1410 nt, Artificial Sequence
  derived and/or modified CDS sequence (opt1) from neuraminidase__InfluenzaA__ABC41728
augaaccccaaccagaagaucaucaccaucggcagcgugucccugaccaucgccacgaucugcuuccucaugcagaucgccauccuggucaccaccgugacccugcacuucaagcagcacgagugcaacagcccgcccaacaaccaggugaugcucugcgagcccacgaucaucgagcgcaacaucaccgagaucgucuaccugaccaacaccacgaucgagaaggagaucugccccaagcugguggaguaccggaacugguccaagccgcagugcaacaucaccggguucgcgcccuucagcaaggacaacuccauccgccucagcgccggcggggacaucugggugacccgggagcccuacgucuccugcgaccccgacaagugcuaccaguucgcccugggccaggggaccacgcugaacaacggccacagcaacgacaccgugcacgaccgcaccccguaccggacccuccugaugaacgagcugggcgugcccuuccaccucgggacgcgccaggucugcaucgccugguccagcuccagcugccacgacggcaaggccuggcugcacgugugcgugaccggggacgacaagaacgcgaccgccuccuucaucuacaacggccggcuggucgacagcaucggguccuggagcaagaacauccuccgcacccaggaguccgagugcgugugcaucaacggcacgugcaccguggucaugaccgacggcagcgccuccgggaaggccgacaccaagauccuguucaucgaggagggcaagaucgugcacaucagcacgcugagcggguccgcgcagcacguggaggagugcagcugcuacccccgguaccccggcguccgcugcgugugccgggacaacuggaagggcuccaaccgcccgaucguggacaucaacgucaaggacuacagcaucguguccagcuacgugugcuccgggcucgucggcgacacgccccggaagaacgacagcuucuccagcucccacugccuggaccccaacaacgaggagggcgggcacggggugaagggcugggccuucgacgacggcaacgacgucuggauggggcgcaccaucagcgagaagcugcgguccggcuacgagaccuucaaggugaucgagggguggagcaagcccaacuccaagcuccagaucaaccgccaggugaucgucgagcggggcaaccgcagcggguacuccggcaucuucagcguggagggcaaguccugcaucaaccggugcuucuacguggagcugauccgcgggcggaaggaggagaccgaggucugguggaccagcaacagcaucgugguguucugcggcaccuccgggaccuacggcacggggagcuggccggacggcgccgacaucaaccugaugcccaucuga

SEQ ID NO: 78618 - RNA, 1410 nt, Artificial Sequence; identical to SEQ ID NO: 78615
  derived and/or modified CDS sequence (opt1) from neuraminidase__InfluenzaA__ABC41742

SEQ ID NO: 78619 - RNA, 1410 nt, Artificial Sequence; identical to SEQ ID NO: 78615
  derived and/or modified CDS sequence (opt1) from neuraminidase__InfluenzaA__ABC41956

SEQ ID NO: 78620 - RNA, 1410 nt, Artificial Sequence; identical to SEQ ID NO: 78615
  derived and/or modified CDS sequence (opt1) from neuraminidase__InfluenzaA__ABC41967

SEQ ID NO: 78621 - RNA, 1410 nt, Artificial Sequence; identical to SEQ ID NO: 78615
  derived and/or modified CDS sequence (opt1) from neuraminidase__InfluenzaA__ABC42017

SEQ ID NO: 78622 - RNA, 1410 nt, Artificial Sequence; identical to SEQ ID NO: 78615
  derived and/or modified CDS sequence (opt1) from neuraminidase__InfluenzaA__ABC42117

SEQ ID NO: 78623 - RNA, 1410 nt, Artificial Sequence; identical to SEQ ID NO: 78615
  derived and/or modified CDS sequence (opt1) from neuraminidase__InfluenzaA__ABC42128

SEQ ID NO: 78624 - RNA, 1410 nt, Artificial Sequence; identical to SEQ ID NO: 78615
  derived and/or modified CDS sequence (opt1) from neuraminidase__InfluenzaA__ABC42139

SEQ ID NO: 78625 - RNA, 1410 nt, Artificial Sequence
  derived and/or modified CDS sequence (opt1) from neuraminidase__InfluenzaA__ABC42150
augaaccccaaccagaagaucaucaccaucggcagcgugucccugaccaucgccacgaucugcuuccucaugcagaucgccauccuggcgaccaccgucacccugcacuucaagcagcacgagugcaacagcccgcccaacaaccaggugaugcucugcgagcccacgaucaucgagcgcaacaucaccgagaucguguaccugaccaacaccacgaucgagaaggagaucugccccaagcuggucgaguaccggaacugguccaagccgcagugcaacaucaccggguucgcccccuucagcaaggacaacuccauccgccucagcgccggcggggacaucugggugacccgggagcccuacguguccugcgaccccgacaagugcuaccaguucgcccugggccaggggaccacgcugaacaacggccacagcaacgacaccguccacgaccgcaccccguaccggacccuccugaugaacgagcugggcgugcccuuccaccucgggacgcgccaggugugcaucgccugguccagcuccagcugccacgacggcaaggcguggcugcacgucugcgugaccggggacgacaagaacgccaccgccuccuucaucuacaacggccggcugguggacagcaucggguccuggagcaagaagauccuccgcacccaggaguccgagugcgucugcaucaacggcacgugcaccguggugaugaccgacggcagcgccuccgggaaggcggacaccaagauccuguucaucgaggagggcaagaucguccacaucagcacgcugagcggguccgcccagcacguggaggagugcagcugcuacccccgguaccccggcgugcgcugcgucugccgggacaacuggaagggcuccaaccgcccgaucguggacaucaacgugaaggacuacagcaucgucuccagcuacgugugcuccgggcucgugggcgacacgccccggaagaacgacagcuucuccagcucccacugccuggaccccaacaacgaggagggcgggcacggggucaagggcugggccuucgacgacggcaacgacguguggauggggcgcaccaucagcggcaagcugcgguccggguacgagaccuucaaggucaucgagggcuggagcaagcccaacuccaagcuccagaucaaccgccaggugaucguggagcgggggaaccgcagcggcuacuccggcaucuucagcgucgaggggaaguccugcaucaaccggugcuucuacguggagcugauccgcggccggaaggaggagaccgaggugugguggaccagcaacagcaucgucguguucugcgggaccuccggcaccuacgggacgggcagcuggccggacggcgccgacaucaaccugaugcccaucuga

SEQ ID NO: 78626 - RNA, 1410 nt, Artificial Sequence; identical to SEQ ID NO: 78615
  derived and/or modified CDS sequence (opt1) from neuraminidase__InfluenzaA__ABC42161

SEQ ID NO: 78627 - RNA, 1410 nt, Artificial Sequence
  derived and/or modified CDS sequence (opt1) from neuraminidase__InfluenzaA__ABC42172
augaaccccaaccagaagaucaucaccaucggcagcgugucccugaccaucgccacgaucugcagccucaugcagaucgccauccuggucaccaccgugacccugcacuucaagcagcacgagugcaacuccccgcccaacaaccaggugaugcucugcgagcccacgaucaucgagcgcaacaucaccgagaucgucuaccugaccaacaccacgaucgagaaggagaucugccccaagcugguggaguaccggaacuggagcaagccgcagugcaacaucaccggguucgcgcccuucuccaaggacaacagcauccgccucuccgccggcggggacaucugggugacccgggagcccuacgucagcugcgaccccgacaagugcuaccaguucgcccugggccaggggaccacgcugaacaacggccacuccaacgacaccgugcacgaccgcaccccguaccggacccuccugaugaacgagcugggcgugcccuuccaccucgggacgcgccaggucugcaucgccuggagcuccagcuccugccacgacggcaaggccuggcugcacgugugcgugaccggggacgacaagaacgcgaccgccagcuucaucuacaacggccggcuggucgacuccaucgggagcugguccaagaagauccuccgcacccaggagagcgagugcgugugcaucaacggcacgugcaccguggucaugaccgacggcuccgccagcgggaaggccgacaccaagauccuguucaucgaggagggcaagaucgugcacaucagcacgcuguccgggagcgcgcagcacguggaggagugcuccugcuacccccgguaccccggcguccgcugcgugugccgggacaacuggaagggcagcaaccgcccgaucguggacaucaacgucaaggacuacuccaucgugagcuccuacgugugcagcgggcucgucggcgacacgccccggaagaacgacuccuucagcuccagccacugccuggaccccaacaacgaggagggcgggcacggggugaagggcugggccuucgacgacggcaacgacgucuggauggggcgcaccaucuccgagaagcugcggagcggcuacgagaccuucaaggugaucgaggggugguccaagcccaacagcaagcuccagaucaaccgccaggugaucgucgagcggggcaaccgcuccggguacagcggcaucuucuccguggagggcaagagcugcaucaaccggugcuucuacguggagcugauccgcgggcggaaggaggagaccgaggucugguggaccagcaacuccaucgugguguucugcggcaccagcgggaccuacggcacgggguccuggccggacggcgccgacaucaaccugaugcccaucuga

SEQ ID NO: 78628 - RNA, 1410 nt, Artificial Sequence; identical to SEQ ID NO: 78615
  derived and/or modified CDS sequence (opt1) from neuraminidase__InfluenzaA__ABC42183

SEQ ID NO: 78629 - RNA, 1410 nt, Artificial Sequence; identical to SEQ ID NO: 78615
  derived and/or modified CDS sequence (opt1) from neuraminidase__InfluenzaA__ABC42195

SEQ ID NO: 78630 - RNA, 1410 nt, Artificial Sequence; identical to SEQ ID NO: 78615
  derived and/or modified CDS sequence (opt1) from neuraminidase__InfluenzaA__ABC42310

SEQ ID NO: 78631 - RNA, 1410 nt, Artificial Sequence; identical to SEQ ID NO: 78615
  derived and/or modified CDS sequence (opt1) from neuraminidase__InfluenzaA__ABC42321

SEQ ID NO: 78632 - RNA, 1410 nt, Artificial Sequence; identical to SEQ ID NO: 78615
  derived and/or modified CDS sequence (opt1) from neuraminidase__InfluenzaA__ABC42349

SEQ ID NO: 78633 - RNA, 1410 nt, Artificial Sequence; identical to SEQ ID NO: 78615
  derived and/or modified CDS sequence (opt1) from neuraminidase__InfluenzaA__ABC42464

SEQ ID NO: 78634 - RNA, 1410 nt, Artificial Sequence; identical to SEQ ID NO: 78615
  derived and/or modified CDS sequence (opt1) from neuraminidase__InfluenzaA__ABC42497

SEQ ID NO: 78635 - RNA, 1410 nt, Artificial Sequence; identical to SEQ ID NO: 78615
  derived and/or modified CDS sequence (opt1) from neuraminidase__InfluenzaA__ABC42508

SEQ ID NO: 78636 - RNA, 1410 nt, Artificial Sequence; identical to SEQ ID NO: 78615
  derived and/or modified CDS sequence (opt1) from neuraminidase__InfluenzaA__ABC42519

SEQ ID NO: 78637 - RNA, 1410 nt, Artificial Sequence; identical to SEQ ID NO: 78615
  derived and/or modified CDS sequence (opt1) from neuraminidase__InfluenzaA__ABC42530

SEQ ID NO: 78638 - RNA, 1410 nt, Artificial Sequence; identical to SEQ ID NO: 78615
  derived and/or modified CDS sequence (opt1) from neuraminidase__InfluenzaA__ABC42577

SEQ ID NO: 78639 - RNA, 1410 nt, Artificial Sequence; identical to SEQ ID NO: 78615
  derived and/or modified CDS sequence (opt1) from neuraminidase__InfluenzaA__ABC42588

SEQ ID NO: 78640 - RNA, 1410 nt, Artificial Sequence; identical to SEQ ID NO: 78351
  derived and/or modified CDS sequence (opt1) from neuraminidase__InfluenzaA__ABC42599

SEQ ID NO: 78641 - RNA, 1410 nt, Artificial Sequence; identical to SEQ ID NO: 78351
  derived and/or modified CDS sequence (opt1) from neuraminidase__InfluenzaA__ABC42610

SEQ ID NO: 78642 - RNA, 1410 nt, Artificial Sequence; identical to SEQ ID NO: 78351
  derived and/or modified CDS sequence (opt1) from neuraminidase__InfluenzaA__ABC42621

SEQ ID NO: 78643 - RNA, 1410 nt, Artificial Sequence; identical to SEQ ID NO: 78351
  derived and/or modified CDS sequence (opt1) from neuraminidase__InfluenzaA__ABC42632

SEQ ID NO: 78644 - RNA, 1410 nt, Artificial Sequence; identical to SEQ ID NO: 78351
  derived and/or modified CDS sequence (opt1) from neuraminidase__InfluenzaA__ABC42643

SEQ ID NO: 78645 - RNA, 1410 nt, Artificial Sequence; identical to SEQ ID NO: 78351
  derived and/or modified CDS sequence (opt1) from neuraminidase__InfluenzaA__ABC42654

SEQ ID NO: 78646 - RNA, 1410 nt, Artificial Sequence; identical to SEQ ID NO: 78351
  derived and/or modified CDS sequence (opt1) from neuraminidase__InfluenzaA__ABC42665

SEQ ID NO: 78647 - RNA, 1410 nt, Artificial Sequence; identical to SEQ ID NO: 78351
  derived and/or modified CDS sequence (opt1) from neuraminidase__InfluenzaA__ABC42676

SEQ ID NO: 78648 - RNA, 1410 nt, Artificial Sequence; identical to SEQ ID NO: 78351
  derived and/or modified CDS sequence (opt1) from neuraminidase__InfluenzaA__ABC42687

SEQ ID NO: 78649 - RNA, 1410 nt, Artificial Sequence; identical to SEQ ID NO: 78351
  derived and/or modified CDS sequence (opt1) from neuraminidase__InfluenzaA__ABC42698

SEQ ID NO: 78650 - RNA, 1410 nt, Artificial Sequence; identical to SEQ ID NO: 78351
  derived and/or modified CDS sequence (opt1) from neuraminidase__InfluenzaA__ABC42709

SEQ ID NO: 78651 - RNA, 1410 nt, Artificial Sequence; identical to SEQ ID NO: 78351
  derived and/or modified CDS sequence (opt1) from neuraminidase__InfluenzaA__ABC42720

SEQ ID NO: 78652 - RNA, 1410 nt, Artificial Sequence
  derived and/or modified CDS sequence (opt1) from neuraminidase__InfluenzaA__ABC42742
augaaccccaaccagaagaucaucaccaucggcagcgugucccugaccaucagcacgaucugcuucuucaugcagaucgccauccucaugaccaccgucacccugcacuucaagcaguacgaguucaacuccccgcccaacaaccaggugaugcugugcgagcccacgaucaucgagcgcaacaucaccgagaucguguaccucaccaacaccacgaucgagaaggagaucugccccaagcuggccgaguaccggaacuggagcaagccgcagugcgacaucaccggguucgcgcccuucuccaaggacaacagcauccgccuguccgccggcggggacaucugggucacccgggagcccuacgugagcugcgaccccgacaagugcuaccaguucgcccucggccaggggaccacgcugaacaacgugcacuccaacgacaccguccacgaccgcaccccguaccggacccugcucaugaacgagcugggcgugcccuuccaccugggcacgaagcaggucugcaucgccuggagcuccagcuccugccacgacgggaaggccuggcuccacgugugcgugaccggcgacgacaagaacgcgaccgccagcuucaucuacaacgggcgccugguggacuccaucgucagcugguccaaggagauccugcggacccaggagagcgagugcgugugcaucaacggcacgugcaccguggucaugaccgacggguccgccagcggcaaggccgacaccaagauccucuucaucgaggagggcaagaucgugcacacgagcacccuguccgggagcgcgcagcacguggaggagugcuccugcuacccccgcuaccccggcguccggugcgugugccgcgacaacuggaaggggagcaaccggccgaucguggacaucaacaucaaggacuacuccaucgucagcuccuacgugugcagcggccuggugggcgacacgccccgccggaacgacuccagcuccagcucccacugccucgaccccaacaacgaggagggcgggcacggggucaagggcugggccuucgacgacgggaacgacguguggaugggccgcaccaucagcgagaagcugcgguccggcuacgagaccuucaaggucaucgagggguggagcaaccccaacuccaagcugcagaucaaccgccaggugaucguggaccggggcaaccgcagcggguacuccggcaucuucagcgucgagggcaagagcugcaucaaccggugcuucuacguggagcucauccgcgggcggaaggaggagaccgaggugcuguggaccuccaacagcaucgucguguucugcggcaccuccgggacguacggcaccgggagcuggccggacggcgccgacaucaaccugaugcccaucuga

SEQ ID NO: 78653 - RNA, 1410 nt, Artificial Sequence; identical to SEQ ID NO: 78351
  derived and/or modified CDS sequence (opt1) from neuraminidase__InfluenzaA__ABC42764

SEQ ID NO: 78654 - RNA, 1410 nt, Artificial Sequence; identical to SEQ ID NO: 78351
  derived and/or modified CDS sequence (opt1) from neuraminidase__InfluenzaA__ABC42775

SEQ ID NO: 78655 - RNA, 1410 nt, Artificial Sequence; identical to SEQ ID NO: 78351
  derived and/or modified CDS sequence (opt1) from neuraminidase__InfluenzaA__ABC42786

SEQ ID NO: 78656 - RNA, 1410 nt, Artificial Sequence; identical to SEQ ID NO: 78351
  derived and/or modified CDS sequence (opt1) from neuraminidase__InfluenzaA__ABC42797

SEQ ID NO: 78657 - RNA, 1410 nt, Artificial Sequence; identical to SEQ ID NO: 78351
  derived and/or modified CDS sequence (opt1) from neuraminidase__InfluenzaA__ABC42808

SEQ ID NO: 78658 - RNA, 1410 nt, Artificial Sequence; identical to SEQ ID NO: 78351
  derived and/or modified CDS sequence (opt1) from neuraminidase__InfluenzaA__ABC42819

SEQ ID NO: 78659 - RNA, 1410 nt, Artificial Sequence
  derived and/or modified CDS sequence (opt1) from neuraminidase__InfluenzaA__ABC42841
augaaccccaaccagaagaucaucaccaucggcagcgugucccugaccaucagcacgaucugcuucuucaugcagaucgccauccucaucaccaccgucacccugcacuucaagcaguacgaguucaacuccccgcccaacaaccaggugaugcugugcgagcccacgaucaucgagcgcaacaucaccgagaucguguaccucaccaacaccacgaucgagaaggagaucugccccaagcuggccgaguaccggaacuggagcaagccgcagugcgacaucaccggguucgcgcccuucuccaaggacaacagcauccgccuguccgccggcggggacaucugggucacccgggagcccuacgugagcugcgaccccgacaagugcuaccaguucgcccucggccaggggaccacgcugaacaacgugcacuccaacgacaccguccacgaccgcaccccguaccggacccugcucaugaacgagcugggcgugcccuuccaccugggcacgaagcaggucugcaucgccuggagcuccagcuccugccacgacgggaaggccuggcuccacgugugcgugaccggcgacgacaagaacgcgaccgccagcuucaucuacaacgggcgccugguggacuccaucgucagcugguccaaggagauccugcggacccaggagagcgagugcgugugcaucaacggcacgugcaccguggucaugaccgacggguccgccagccgcaaggccgacaccaagauccucuucaucgaggagggcaagaucgugcacacgagcacccuguccggcagcgcgcagcacguggaggagugcuccugcuacccccgguaccccgggguccgcugcgugugccgggacaacuggaagggcagcaaccgcccgaucguggacaucaacaucaaggacuacuccaucgucagcuccuacgugugcagcgggcuggugggcgacacgccccggaagaacgacuccagcuccagcucccacugccucgaccccaacaacgaggagggcgggcacggcgucaaggggugggccuucgacgacggcaacgacguguggauggggcgcaccaucagcgagaagcugcgguccggcuacgagaccuucaaggucaucgagggcuggagcaaccccaacuccaagcugcagaucaaccgccaggugaucguggaccgggggaaccgcagcggcuacuccgggaucuucagcgucgagggcaagagcugcaucaaccggugcuucuacguggagcucauccgcgggcggaaggaggagaccgaggugcuguggaccuccaacagcaucgucguguucugcggcaccuccggcacguacgggaccggcagcuggccggacggggccgacaucaaccugaugcccaucuga

SEQ ID NO: 78660 - RNA, 1410 nt, Artificial Sequence; identical to SEQ ID NO: 78351
  derived and/or modified CDS sequence (opt1) from neuraminidase__InfluenzaA__ABC42852

SEQ ID NO: 78661 - RNA, 1410 nt, Artificial Sequence; identical to SEQ ID NO: 78351
  derived and/or modified CDS sequence (opt1) from neuraminidase__InfluenzaA__ABC42863

SEQ ID NO: 78662 - RNA, 1410 nt, Artificial Sequence; identical to SEQ ID NO: 78190
  derived and/or modified CDS sequence (opt1) from neuraminidase__InfluenzaA__ABC42874

SEQ ID NO: 78663 - RNA, 1410 nt, Artificial Sequence; identical to SEQ ID NO: 78190
  derived and/or modified CDS sequence (opt1) from neuraminidase__InfluenzaA__ABC42885

SEQ ID NO: 78664 - RNA, 1410 nt, Artificial Sequence; identical to SEQ ID NO: 78190
  derived and/or modified CDS sequence (opt1) from neuraminidase__InfluenzaA__ABC42896

SEQ ID NO: 78665 - RNA, 1410 nt, Artificial Sequence; identical to SEQ ID NO: 78615
  derived and/or modified CDS sequence (opt1) from neuraminidase__InfluenzaA__ABC42914

SEQ ID NO: 78666 - RNA, 1410 nt, Artificial Sequence; identical to SEQ ID NO: 78615
  derived and/or modified CDS sequence (opt1) from neuraminidase__InfluenzaA__ABC42932

SEQ ID NO: 78667 - RNA, 1410 nt, Artificial Sequence
  derived and/or modified CDS sequence (opt1) from neuraminidase__InfluenzaA__ABC42943
augaaccccaaccagaagaucaucaccaucggcagcgugucccugaccaucgccacgaucugcuuccucaugcagaucgccauccuggucaccaccgugacccugcacuucaagcagcacgagugcaacagcccgcccaacaaccaggugaugcucugcgagcccacgaucaucgagcgcaacaucaccgagaucgucuaccugaccaacaccacgaucgagaaggagaucugccccaagcuggugggguaccggaacugguccaagccgcagugcaacaucaccggcuucgcgcccuucagcaaggacaacuccauccgccucagcgccgggggcgacaucugggugacccgggagcccuacgucuccugcgaccccgacaagugcuaccaguucgcccuggggcagggcaccacgcugaacaacggccacagcaacgacaccgugcacgaccgcaccccguaccggacccuccugaugaacgagcugggggugcccuuccaccucggcacgcgccaggucugcaucgccugguccagcuccagcugccacgacgggaaggccuggcugcacgugugcgugaccggcgacgacaagaacgcgaccgccuccuucaucuacaacgggcggcuggucgacagcaucggcuccuggagcaagaagauccuccgcacccaggaguccgagugcgugugcaucaacggcacgugcaccguggucaugaccgacgggagcgccuccggcaaggccgacaccaagauccuguucaucgaggaggggaagaucgugcacaucagcacgcugagcggcuccgcgcagcacguggaggagugcagcugcuacccccgguaccccggcguccgcugcgugugccgggacaacuggaagggguccaaccgcccgaucguggacaucaacgucaaggacuacagcaucguguccagcuacgugugcuccggccucgucggggacacgccccggaagaacgacagcuucuccagcucccacugccuggaccccaacaacgaggagggcgggcacggcgugaagggcugggccuucgacgacgggaacgacgucuggaugggccgcaccaucagcgagaagcugcgguccggguacgagaccuucaaggugaucgagggcuggagcaagcccaacuccaagcuccagaucaaccgccaggugaucgucgagcgggggaaccgcagcggcuacuccggcaucuucagcguggaggggaaguccugcaucaaccggugcuucuacguggagcugauccgcggccggaaggaggagaccgaggucugguggaccagcaacagcaucgugguguucugcgggaccuccggcaccuacgggacgggcagcuggccggacggcgccgacaucaaccugaugcccaucuga

SEQ ID NO: 78668 - RNA, 1410 nt, Artificial Sequence; identical to SEQ ID NO: 78615
  derived and/or modified CDS sequence (opt1) from neuraminidase__InfluenzaA__ABC42954

SEQ ID NO: 78669 - RNA, 1410 nt, Artificial Sequence; identical to SEQ ID NO: 78615
  derived and/or modified CDS sequence (opt1) from neuraminidase__InfluenzaA__ABC42965

SEQ ID NO: 78670 - RNA, 1410 nt, Artificial Sequence
  derived and/or modified CDS sequence (opt1) from neuraminidase__InfluenzaA__ABC42976
augaaccccaaccagaagaucaucaccaucggcagcgugucccugaccaucgccacgaucugcuuccucaugcagaucgccauccuggucaccaccgugacccugcacuucaagcagcacgagugcaacagcccgcccaacaaccaggcgaugcucugcgagcccacgaucaucgagcgcaacaucaccgagaucguguaccugaccaacaccacgaucgagaaggagaucugccccaagcuggucgaguaccggaacugguccaagccgcagugcaacaucaccggguucgcccccuucagcaaggacaacuccauccgccucagcgccggcggggacaucugggugacccgggagcccuacguguccugcgaccccgacaagugcuaccaguucgcccugggccaggggaccacgcugaacaacggccacagcaacgacaccguccacgaccgcaccccguaccggacccuccugaugaacgagcugggcgugcccuuccaccucgggacgcgccaggugugcaucgccugguccagcuccagcugccacgacggcaaggcguggcugcacgucugcgugaccggggacgacaagaacgccaccgccuccuucaucuacaacggccggcugguggacagcaucggguccuggagcaagaagauccuccgcacccaggaguccgagugcgucugcaucaacggcacgugcaccguggugaugaccgacggcagcgccuccgggaaggcggacaccaagauccuguucaucgaggagggcaagaucguccacaucagcacgcugagcggguccgcccagcacguggaggagugcagcugcuacccccgguaccccggcgugcgcugcgucugccgggacaacuggaagggcuccaaccgcccgaucguggacaucaacgugaaggacuacagcaucgucuccagcuacgugugcuccgggcucgugggcgacacgccccggaagaacgacagcuucuccagcucccacugccuggaccccaacaacgaggagggcgggcacggggucaagggcugggccuucgacgacggcaacgacguguggauggggcgcaccaucagcgagaagcugcgguccggcuacgagaccuucaaggucaucgagggguggagcaagcccaacuccaagcuccagaucaaccgccaggugaucguggagcggggcaaccgcagcggguacuccggcaucuucagcgucgagggcaaguccugcaucaaccggugcuucuacguggagcugauccgcgggcggaaggaggagaccgaggugugguggaccagcaacagcaucgucguguucugcggcaccuccgggaccuacggcacggggagcuggccggacggcgccgacaucaaccugaugcccaucuga

SEQ ID NO: 78671 - RNA, 1410 nt, Artificial Sequence; identical to SEQ ID NO: 78615
  derived and/or modified CDS sequence (opt1) from neuraminidase__InfluenzaA__ABC42987

SEQ ID NO: 78672 - RNA, 1410 nt, Artificial Sequence; identical to SEQ ID NO: 78615
  derived and/or modified CDS sequence (opt1) from neuraminidase__InfluenzaA__ABC42998

SEQ ID NO: 78673 - RNA, 1410 nt, Artificial Sequence; identical to SEQ ID NO: 78615
  derived and/or modified CDS sequence (opt1) from neuraminidase__InfluenzaA__ABC43009

SEQ ID NO: 78674 - RNA, 1410 nt, Artificial Sequence; identical to SEQ ID NO: 78615
  derived and/or modified CDS sequence (opt1) from neuraminidase__InfluenzaA__ABC43020

SEQ ID NO: 78675 - RNA, 1410 nt, Artificial Sequence
  derived and/or modified CDS sequence (opt1) from neuraminidase__InfluenzaA__ABC43042
augaaccccaaccagaagaucaucaccaucggcagcgugucccugaccaucgccacgaucugcuuccucaugcagaucgccauccuggucaccaccgugacccugcacuucaagcagcacgagugcaacagcccgcccaacaaccaggugaugcucugcgagcccacgaucaucgagcgcaacaucaccgagaucgucuaccugaccaacaccacgaucgagaaggagaucugccccaagcugguggaguaccggaacugguccaagccgcagugcaacaucaccggguucgcgcccuucagcaaggacaacuccauccgccucagcgccggcggggacaucugggugacccgggagcccuacgucuccugcgaccccgacaagugcuaccaguucgcccugggccaggggaccacgcugaacaacggccacagcaacgacaccgugcacgaccgcaccccguaccggacccuccugaugaacgagcugggcgugcccuuccaccucgggacgcgccaggucugcaucgccugguccagcuccagcugccacgacggcaaggccuggcugcacgugugcgugaccggggacgacaagaacgcgaccgccuccuucaucuacaacggccggcuggucgacagcaucggguccuggagcaagaagauccuccgcacccaggaguccgagugcgugugcaucaacggcacgugcaccguggucaugaccgacggcagcgccuccgggaaggccgacaccaagauccuguucaucgaggagggcaagaucgugcacaucagcacgcugagcggguccgcgcagcacguggaggagugcagcugcuacccccgguaccccggcguccgcugcgugugccgggacaacuggaagggcuccaaccgcccgaucguggacaucaacgucaaggacuacagcaucguguccagcuacgugugcuccgggcucgucggcgacacgccccggaagaacgacagcuucuccagcucccacugccuggaccccaacaacgaggagggcgggcacggggugaagggcugggccuucgacgacggcaacgacgucuggauggggcgcaccaucagcgagaagcugcgguccggcuacgagaccuucaaggugaucgagggguggagcaagcccaacuccaagcuccagaucaaccgccaggugaucgucgagcggggcaaccgcagcggguacuccggcaucuucagcguggagggcaaguccugcaucaaccggugcuucuacguggagcugauccgcgggcggaaggaggagaccgaggucugguggaccagcaacagcaucgugguguucugcggcaccuccgggaccuacggcacggggagcuggccggacggcgccgacaucaaccugauguccaucuga

SEQ ID NO: 78676 - RNA, 1410 nt, Artificial Sequence; identical to SEQ ID NO: 78615
  derived and/or modified CDS sequence (opt1) from neuraminidase__InfluenzaA__ABC43053

SEQ ID NO: 78677 - RNA, 1410 nt, Artificial Sequence
  derived and/or modified CDS sequence (opt1) from neuraminidase__InfluenzaA__ABC43064
augaaccccaaccagaagaucaucaccaucggcagcgugucccugaccaucgccacgaucugcuuccucaugcagaucgccauccuggucaccaccgugacccugcacuucaagcagcacgagugcaacagcccgcccaacaaccaggugaugcucugcgagcccacgaucaucgagcgcaacaucaccgagaucgucuaccugaccaacaccacgaucgagaaggagaucugccccaagcugguggaguaccggaacugguccaagccgcagugcaacaucaccggguucgcgcccuucagcaaggacaacuccauccgccucagcgccggcggggacaucugggugacccgggagcccuacgucuccugcgaccccgacaagugcuaccaguucgcccugggccaggggaccacgcugaacaacggccacagcaacgacaccgugcacgaccgcaccccguaccggacccuccugaugaacgagcugggcgugcccuuccaccucgggacgcgccaggucugcaucgccugguccagcuccagcugccacgacggcaaggccuggcugcacgugugcgugaccggggacgacaagaacgcgaccgccuccuucaucuacaacggccggcuggucgacagcaucggguccuggagcaagaagauccuccgcacccaggaguccgagugcgugugcaucaacggcacgugcaccguggucaugaccgacggcagcgccuccgggaaggccgacaccaagauccuguucaucgaggagggcaagaucgugcacaucagcacgcugagcggguccgcgcagcacguggaggagugcagcugcuacccccgguaccccggcguccgcugcgugugccgggacaacuggaagggcuccaaccgcccgaucguggacaucaacgucaaggacuacagcaucguguccagcuacgugugcuccgggcucgucggcgacacgccccggaagaacgacagcuucuccagcucccacugccuggaccccaacaacgaggagggcgggcacggggugaagggcugggccuucgacgacggcaacgacgucuggauggggcgcaccaucagcgagaagcugcgguccggcuacgagaccuucaaggugaucgagggguggagcaagcccaacuccaagcuccagaucaaccgccaggugaucgucgagcggggcaaccgcagcggguacuccggcaucuucagcguggagggcaaguccugcaucaaccggugcuucuacguggagcugauccgcgggcggaaggagaagaccgaggucugguggaccagcaacagcaucgugguguucugcggcaccuccgggaccuacggcacggggagcuggccggacggcgccgacaucaaccugaugcccaucuga

SEQ ID NO: 78678 - RNA, 1410 nt, Artificial Sequence; identical to SEQ ID NO: 78615
  derived and/or modified CDS sequence (opt1) from neuraminidase__InfluenzaA__ABC43075

SEQ ID NO: 78679 - RNA, 1410 nt, Artificial Sequence
  derived and/or modified CDS sequence (opt1) from neuraminidase__InfluenzaA__ABC43086
augaaccccaaccagaagaucaucaccaucggcagcgugucccugaucaucgccaccaucugcuuccucaugcagaucgccauccuggucacgaccgugacccugcacuucaagcagcacgagugcaacagcccgcccaacaaccaggugaugcucugcgagcccaccaucaucgagcgcaacaucacggagaucgucuaccugaccaacaccaccaucgagaaggagaucugccccaagcugguggaguaccggaacugguccaagccgcagugcaacaucacgggguucgcgcccuucagcaaggacaacuccauccgccucagcgccggcggggacaucugggugacccgggagcccuacgucuccugcgaccccgacaagugcuaccaguucgcccugggccaggggaccacccugaacaacggccacagcaacgacacggugcacgaccgcaccccguaccggacccuccugaugaacgagcugggcgugcccuuccaccucgggacccgccaggucugcaucgccugguccagcuccagcugccacgacggcaaggccuggcugcacgugugcgugacgggggacgacaagaacgcgaccgccuccuucaucuacaacggccggcuggucgacagcaucggguccuggagcaagaagauccuccgcacccaggaguccgagugcgugugcaucaacgggaccugcacgguggucaugaccgacggcagcgccuccgggaaggccgacaccaagauccuguucaucgaggagggcaagaucgugcacaucagcacccugagcggguccgcgcagcacguggaggagugcagcugcuacccccgguaccccggcguccgcugcgugugccgggacaacuggaagggcuccaaccgcccgaucguggacaucaacgucaaggacuacagcaucguguccagcuacgugugcuccgggcucgucggcgacacgccccggaagaacgacagcuucuccagcucccacugccuggaccccaacaacgaggagggcggccacggggugaagggcugggccuucgacgacggcaacgacgucuggauggggcgcaccaucagcgagaagcugcgguccggcuacgagaccuucaaggugaucgagggguggagcaagcccaacuccaagcuccagaucaaccgccaggugaucgucgagcggggcaaccgcagcggguacuccggcaucuucagcguggagggcaaguccugcaucaaccggugcuucuacguggagcugauccgcgggcggaaggaggagaccgaggucugguggacgagcaacagcaucgugguguucugcggcaccuccgggaccuacggcaccgggagcuggccggacggcgccgacaucaaccugaugcccaucuga

SEQ ID NO: 78680 - RNA, 1410 nt, Artificial Sequence; identical to SEQ ID NO: 78615
  derived and/or modified CDS sequence (opt1) from neuraminidase__InfluenzaA__ABC43097

SEQ ID NO: 78681 - RNA, 1410 nt, Artificial Sequence; identical to SEQ ID NO: 78615
  derived and/or modified CDS sequence (opt1) from neuraminidase__InfluenzaA__ABC43108

SEQ ID NO: 78682 - RNA, 1410 nt, Artificial Sequence; identical to SEQ ID NO: 78615
  derived and/or modified CDS sequence (opt1) from neuraminidase__InfluenzaA__ABC43119

SEQ ID NO: 78683 - RNA, 1410 nt, Artificial Sequence; identical to SEQ ID NO: 78351
  derived and/or modified CDS sequence (opt1) from neuraminidase__InfluenzaA__ABC43130

SEQ ID NO: 78684 - RNA, 1410 nt, Artificial Sequence; identical to SEQ ID NO: 78351
  derived and/or modified CDS sequence (opt1) from neuraminidase__InfluenzaA__ABC43141

SEQ ID NO: 78685 - RNA, 1410 nt, Artificial Sequence; identical to SEQ ID NO: 78351
  derived and/or modified CDS sequence (opt1) from neuraminidase__InfluenzaA__ABC43152

SEQ ID NO: 78686 - RNA, 1410 nt, Artificial Sequence; identical to SEQ ID NO: 78351
  derived and/or modified CDS sequence (opt1) from neuraminidase__InfluenzaA__ABC43163

SEQ ID NO: 78687 - RNA, 1410 nt, Artificial Sequence; identical to SEQ ID NO: 78351
  derived and/or modified CDS sequence (opt1) from neuraminidase__InfluenzaA__ABC43174

SEQ ID NO: 78688 - RNA, 1410 nt, Artificial Sequence
  derived and/or modified CDS sequence (opt1) from neuraminidase__InfluenzaA__ABC43185
augaaccccaaccagaagaucaucaccaucggcagcgugucccugaccaucagcacgaucugcuucuucaugcagaucgccauccucaucaccaccgucacccugcacuucaagcaguacgaguucaacuccccgcccaacaaccaggugaugcugugcgagcccacgaucaucgagcgcaacaucaccgagaucguguaccucaccaacaccacgaucgagaaggagaucugccccaagcuggccgaguaccggaacuggagcaagccgcagugcgacaucaccggguucgcgcccuucuccaaggacaacagcauccgccuguccgccggcggggacaucugggucacccgggagcccuacgugagcugcgaccccgacaagugcuaccaguucgcccucggccaggggaccacgcugaacaacgugcacuccaacgacaccguccacgaccgcaccccguaccggacccugcucaugaacgagcugggcgugcccuuccaccugggcacgaagcaggucugcaucgccuggagcuccagcuccugccacgacgggaaggccuggcuccacgugugcgugaccggcgacgacaagaacgcgaccgccagcuucaucuacaacgggcgccugguggacuccaucgucagcugguccaaggagauccugcggacccaggagagcgagugcgugugcaucaacggcacgugcaccguggucaugaccgacggguccgccagcggcaaggccgacacccgcauccucuucaucgaggagggcaagaucgugcacacgagcacccuguccgggagcgcgcagcacguggaggagugcuccugcuacccccgguaccccggcguccgcugcgugugccgggacaacuggaaggggagcaaccgcccgaucguggacaucaacaucaaggacuacuccaucgucagcuccuacgugugcagcggccuggugggcgacacgccccggaagaacgacuccagcuccagcucccacugccucgaccccaacaacgaggagggcgggcacggggucaagggcugggccuucgacgacgggaacgacguguggaugggccgcaccaucagcgagaagcugcgguccggcuacgagaccuucaaggucaucgagggguggagcaaccccaacuccaagcugcagaucaaccgccaggugaucguggaccggggcaaccgcagcggguacuccggcaucuucagcgucgagggcaagagcugcaucaaccggugcuucuacguggagcucauccgcgggcggaaggaggagaccgaggugcuguggaccuccaacagcaucgucguguucugcggcaccuccgggacguacggcaccgggagcuggccggacggcgccgacaucaaccugaugcccaucuga

SEQ ID NO: 78689 - RNA, 1410 nt, Artificial Sequence; identical to SEQ ID NO: 78351
  derived and/or modified CDS sequence (opt1) from neuraminidase__InfluenzaA__ABC43478

SEQ ID NO: 78690 - RNA, 1410 nt, Artificial Sequence; identical to SEQ ID NO: 78351
  derived and/or modified CDS sequence (opt1) from neuraminidase__InfluenzaA__ABC43489

SEQ ID NO: 78691 - RNA, 1410 nt, Artificial Sequence; identical to SEQ ID NO: 78351
  derived and/or modified CDS sequence (opt1) from neuraminidase__InfluenzaA__ABC43500

SEQ ID NO: 78692 - RNA, 1410 nt, Artificial Sequence
  derived and/or modified CDS sequence (opt1) from neuraminidase__InfluenzaA__ABC43511
augaaccccaaccagaagaucaucaccaucggcagcgugucccugaccaucagcacgaucugcuucuucaugcagaucgccauccucaucaccaccgucacccugcacuucaagcaguacgaguucaacuccccgcccaacaaccaggugaugcugugcgagacgaccaucaucgagcgcaacaucaccgagaucguguaccucaccaacacgaccaucgagaaggagaucugccccaagcuggccgaguaccggaacuggagcaagccccagugcgacaucaccggguucgcgccguucuccaaggacaacagcauccgccuguccgccggcggggacaucugggucacccgggagcccuacgugagcugcgaccccgacaagugcuaccaguucgcccucggccaggggacgacccugaacaacgugcacuccaacgacaccguccacgaccgcacccccuaccggacgcugcucaugaacgagcugggcgugccguuccaccugggcaccaagcaggucugcaucgccuggagcuccagcuccugccacgacgggaaggccuggcuccacgugugcgugaccggcgacgacaagaacgcgaccgccagcuucaucuacaacgggcgccugguggacuccaucgucagcugguccaaggagauccugcggacgcaggagagcgagugcgugugcaucaacgggaccugcaccguggucaugaccgacggguccgccagcggcaaggccgacacgaagauccucuucaucgaggagggcaagaucgugcacaccagcacccuguccgggagcgcgcagcacguggaggagugcuccugcuacccccgcuaccccggcguccggugcgugugccgcgacaacuggaaggggagcaaccggcccaucguggacaucaacaucaaggacuacuccaucgucagcuccuacgugugcagcggccuggugggcgacaccccgcgcaagaacgacuccagcuccagcucccacugccucgaccccaacaacgaggagggcggccacggggucaagggcugggccuucgacgacgggaacgacguguggaugggccggacgaucagcgagaagcugcgcuccggcuacgagaccuucaaggucaucgagggguggagcaaccccaacuccaagcugcagaucaaccgccaggugaucguggaccggggcaaccggagcggguacuccggcaucuucagcgucgagggcaagagcugcaucaaccgcugcuucuacguggagcucauccgggggcgcaaggaggagaccgaggugcuguggaccuccaacagcaucgucguguucugcggcacguccgggaccuacggcaccgggagcuggcccgacggcgccgacaucaaccugaugccgaucuga

SEQ ID NO: 78693 - RNA, 1410 nt, Artificial Sequence; identical to SEQ ID NO: 78351
  derived and/or modified CDS sequence (opt1) from neuraminidase__InfluenzaA__ABC43522

SEQ ID NO: 78694 - RNA, 1410 nt, Artificial Sequence; identical to SEQ ID NO: 78351
  derived and/or modified CDS sequence (opt1) from neuraminidase__InfluenzaA__ABC43533

SEQ ID NO: 78695 - RNA, 1410 nt, Artificial Sequence; identical to SEQ ID NO: 78351
  derived and/or modified CDS sequence (opt1) from neuraminidase__InfluenzaA__ABC43544

SEQ ID NO: 78696 - RNA, 1410 nt, Artificial Sequence; identical to SEQ ID NO: 78351
  derived and/or modified CDS sequence (opt1) from neuraminidase__InfluenzaA__ABC43555

SEQ ID NO: 78697 - RNA, 1410 nt, Artificial Sequence; identical to SEQ ID NO: 78594
  derived and/or modified CDS sequence (opt1) from neuraminidase__InfluenzaA__ABC46557

SEQ ID NO: 78698 - RNA, 1410 nt, Artificial Sequence
  derived and/or modified CDS sequence (opt1) from neuraminidase__InfluenzaA__ABC46579
augaaccccaaccagaagaucaucaccaucggcagcgugucccugaccaucgccacgaucugcuuccucaugcagaucgccauccuggucaccaccgugacccugcacuucaagcaguacgagugcagcuccccgcccaacaaccaggugaugcccugcgagcccaucaucaucgagcgcaacaucacggagaucgucuaccucaccaacaccaccaucgagaaggagaucugcccgaagcugguggaguaccggaacuggagcaagccccagugcaagaucacgggguucgcgcccuucuccaaggacaacagcauccgccuguccgccggcggggacaucugggugacccgggagcccuacgucagcugcgacccgggcaagugcuaccaguucgcccucgggcagggcaccacccuggacaacaagcacuccaacgacacgauccacgaccgcacccccuaccggacccugcucaugaacgagcugggcgugcccuuccaccuggggacccgccaggugugcaucgccuggagcuccagcuccugccacgacggcaaggccuggcuccacgucugcgugacggggcacgacaagaacgcgaccgccagcuucaucuacgacggccggcugguggacuccaucgggagcugguccaagaacauccugcgcacccaggagagcgagugcgucugcaucaacgggaccugcacgguggugaugaccgacggcuccgccagcgagcgggccgacaccaagauccucuucaucgaggagggcaagaucguccacaucagcccccuguccggcagcgcgcagcacguggaggagugcuccugcuacccgcgcuaccccggggugcggugcgucugccgcgacaacuggaagggcagcaaccggcccgugguggacaucaacgucaaggacuacuccaucgugagcuccuacgugugcagcggccuggucggggacacgccccgcaagaacgaccgguccagcuccagcuacugccgcaacccgaacaacgagaagggcaaccacggggugaagggcugggccuucgacgacgggaacgacgucuggaugggccggaccaucuccgaggagagccgcuccggcuacgagaccuucaaggugaucgggggcuggagcacccccaacuccaagcuccagaucaaccgccaggugaucgucgacagcgacaaccgguccggguacagcggcaucuucagcguggaggggaaguccugcaucaaccggugcuucuacguggagcugauccgcggccgcgagcaggagacccgggucugguggacgagcaacuccaucgugguguucugcggcaccagcgggaccuacggcaccggguccuggcccgacggcgccgacaucaaccugaugcccaucuga

SEQ ID NO: 78699 - RNA, 1410 nt, Artificial Sequence; identical to SEQ ID NO: 78538
  derived and/or modified CDS sequence (opt1) from neuraminidase__InfluenzaA__ABC50170

SEQ ID NO: 78700 - RNA, 1410 nt, Artificial Sequence; identical to SEQ ID NO: 78538
  derived and/or modified CDS sequence (opt1) from neuraminidase__InfluenzaA__ABC50181

SEQ ID NO: 78701 - RNA, 1410 nt, Artificial Sequence; identical to SEQ ID NO: 78538
  derived and/or modified CDS sequence (opt1) from neuraminidase__InfluenzaA__ABC50192

SEQ ID NO: 78702 - RNA, 1410 nt, Artificial Sequence; identical to SEQ ID NO: 78190
  derived and/or modified CDS sequence (opt1) from neuraminidase__InfluenzaA__ABC50203

SEQ ID NO: 78703 - RNA, 1410 nt, Artificial Sequence
  derived and/or modified CDS sequence (opt1) from neuraminidase__InfluenzaA__ABC50214
augaaccccaaccagaagaucaucaccaucggcagcgugucccugaccaucgccacgaucugcuuccucaugcagaucgccauccuggucaccaccgugacccugcacuucaagcaguacgagugcaacagcccgcccaacaaccaggugaugcucugcgagcccacgaucaucgagcgcaacaucaccgagaucgucuaccugaccaacaccacgaucgagaaggagaucugccccaagcuggcggaguaccggaacugguccaagccgcagugcaacaucaccggguucgcccccuucagcaaggacaacuccauccgccucagcgccggcggggacaucugggugacccgggagcccuacguguccugcgaccccgacaagugcuaccaguucgcccugggccaggggaccacgcugaacaacggccacagcaacgacaccguccacgaccgcaccccguaccggacccuccugaugaacgagcugggcgugcccuuccaccucgggacgcgccaggugugcaucgccugguccagcuccagcugccacgacggcaaggcguggcugcacgucugcgugaccggggacgacgagaacgccaccgccuccuucaucuacaacggccggcugguggacagcaucggguccuggagcaagaagauccuccgcacccaggaguccgagugcgucugcaucaacggcacgugcaccguggugaugaccgacggcagcgccuccgggaaggcggacaccaagauccuguucaucgaggagggcaagaucguccacaucagcacgcugagcggguccgcccagcacguggaggagugcagcugcuacccccgguaccccggcgugcgcugcgucugccgggacaacuggaagggcuccaaccgcccgaucaucgacaucaacgugaaggacuacagcaucguguccagcuacgucugcuccgggcucgugggcgacacgccccggaagaacgacagcuucuccagcucccacugccuggaccccaacaacgaggagggcgggcacggggugaagggcugggccuucgacgacggcaacgacgucuggauggggcgcaccaucagcgagaagcugcgguccggcuacgagaccuucaaggugaucgagggguggagcaagcccaacccgaagcuccagaccaaccgccaggucaucguggagcggggcaaccgcuccggguacagcggcaucuucuccguggagggcaagagcugcaucaaccggugcuucuacgucgagcugauccgcgggcggaaggaggagaccgaggugugguggaccuccaacagcaucguggucuucugcggcaccagcgggacguacggcaccggguccuggcccgacggcgccgacaucaaccugaugcccaucuga

SEQ ID NO: 78704 - RNA, 1410 nt, Artificial Sequence; identical to SEQ ID NO: 78190
  derived and/or modified CDS sequence (opt1) from neuraminidase__InfluenzaA__ABC50225

SEQ ID NO: 78705 - RNA, 1410 nt, Artificial Sequence; identical to SEQ ID NO: 78190
  derived and/or modified CDS sequence (opt1) from neuraminidase__InfluenzaA__ABC50247

SEQ ID NO: 78706 - RNA, 1410 nt, Artificial Sequence
  derived and/or modified CDS sequence (opt1) from neuraminidase__InfluenzaA__ABC50258
augaaccccaaccagaagaucaucaccaucggcagcgugucccugaccaucgccacgaucugcuuccucaugcagaucgccauccuggucaccaccgugacccugcacuucaagcaguacgagugcaacagcccgcccaacaaccaggugaugcucugcgagcccacgaucaucgagcgcaacaucaccgagaucgucuaccugaccaacaccacgaucgagaaggagaucugccccaagcuggcggaguaccggaacugguccaagccgcagugcaacaucaccggguucgcccccuucagcaaggacaacuccauccgccucagcgccggcggggacaucugggugacccgggagcccuacguguccugcgaccccgacaagugcuaccaguucgcccugggccaggggaccacgcugaacaacggccacagcaacgacaccguccacgaccgcaccccguaccggacccuccugaugaacgagcugggcgugcccuuccaccucgggacgcgccaggugugcaucgccugguccagcuccagcugccacgacggcaaggcguggcugcacgucugcgugaccggggacgacgagaacgccaccgccuccuucaucuacaacggccggcugguggacagcaucggguccuggagcaagaagauccuccgcacccaggaguccgagugcgucugcaucaacggcacgugcaccguggugaugaccgacggcagcgccuccgggaaggcggacaccaagauccuguucaucgaggagggcaagaucguccacaucagcacgcugagcggguccgcccagcacguggaggagugcagcugcuacccccgguaccccggcgugcgcugcgucugccgggacaacuggaagggcuccaaccgcccgaucaucgacaucaacgugaaggacuacagcaucguguccagcuacgucugcuccgggcucgugggcgacacgccccggaagaacgacagcuucuccagcucccacugccuggaccccaacaacgaggagggcgggcacggggugaagggcugggccuucgacgacggcaacgacgucuggauggggcgcaccaucagcgagaagcugcgguccggcuacgagaccuucaaggugaucgagggguggagcaagcccaacuccaagcuccagaccaaccgccaggucaucguggagcggggcaaccgcagcggguacuccggcaucuucagcaucgagggcaaguccugcaucaaccggugcuucuacguggagcugauccgcgggcggaaggaggagaccgaggucugguggaccagcaacagcaucgugguguucugcggcaccuccgggacguacggcaccgggagcuggccggacggcgccgacaucaaccugaugcccaucuga

SEQ ID NO: 78707 - RNA, 1410 nt, Artificial Sequence; identical to SEQ ID NO: 78190
  derived and/or modified CDS sequence (opt1) from neuraminidase__InfluenzaA__ABC50280

SEQ ID NO: 78708 - RNA, 1410 nt, Artificial Sequence; identical to SEQ ID NO: 78190
  derived and/or modified CDS sequence (opt1) from neuraminidase__InfluenzaA__ABC50291

SEQ ID NO: 78709 - RNA, 1410 nt, Artificial Sequence
  derived and/or modified CDS sequence (opt1) from neuraminidase__InfluenzaA__ABC50302
augaaccccaaccagaagaucaucaccaucggcagcgugucccugaccaucgccacgaucugcuuccucaugcagaucgccauccugaucaccaccgucacccugcacuucaagcaguacgagugcaacagcccgcccaacaaccaggugaugcucugcgagcccacgaucaucgagcgcaacaucaccgagaucguguaccugaccaacaccacgaucgagaaggagaucugccccaagcuggcggaguaccggaacugguccaagccgcagugcaacaucaccggguucgcccccuucagcaaggacaacuccauccgccucagcgccggcggggacaucugggucacccgggagcccuacguguccugcgaccccgacaagugcuaccaguucgcccugggccaggggaccacgcugaacaacggccacagcaacgacaccgugcacgaccgcaccccguaccggacccuccugaugaacgagcugggcguccccuuccaccucgggacgcgccaggugugcaucgccugguccagcuccagcugccacgacggcaaggcguggcugcacgugugcgucaccggggacgacgagaacgccaccgccuccuucaucuacaacggccggcugguggacagcaucggguccuggagcaagaagauccuccgcacccaggaguccgagugcgugugcaucaacggcacgugcaccgucgugaugaccgacggcagcgccuccgggaaggcggacaccaagauccuguucaucgaggagggcaagaucgugcacaucagcacgcugagcggguccgcccagcacgucgaggagugcagcugcuacccccgguaccccggcgugcgcugcgugugccgggacaacuggaagggcuccaaccgcccgaucgucgacaucaacgugaaggacuacagcaucguguccagcuacgucugcuccgggcucgugggcgacacgccccggaagaacgacagcuucuccagcucccacugccuggaccccaacaacgaggagggcgggcacggggugaagggcugggccuucgacgacggcaacgacgucuggauggggcgcaccaucagcgagaagcugcgguccggcuacgagaccuucaaggugaucgagggguggagcaagcccaacuccaagcuccagaccaaccgccaggucaucguggagcggggcaaccgcagcggguacuccggcaucuucagcguggagggcaaguccugcaucaaccggugcuucuacgucgagcugauccgcgggcggaaggaggagaccgaggugugguggaccagcaacagcaucguggucuucugcggcaccuccgggacguacggcaccgggagcuggccggacggcgccgacaucaaccugaugcccaucuga

SEQ ID NO: 78710 - RNA, 1410 nt, Artificial Sequence
  derived and/or modified CDS sequence (opt1) from neuraminidase__InfluenzaA__ABC50313
augaaccccaaccagaagaucaucaccaucggcagcgugucccugaccaucgccacgaucugcuuccucaugcagaucgccauccuggucaccaccgugacccugcacuucaagcagcacgagugcaacagcccgcccaacaaccaggugaugcucugcgagcccacgaucaucgagcgcaacaucaccgagaucgucuaccugaccaacaccacgaucgagaaggagaucugccccaagcuggcggaguaccggaacugguccaagccgcagugcaacaucaccggguucgcccccuucagcaaggacaacuccauccgccucagcgccggcggggacaucugggugacccgggagcccuacguguccugcgaccccgacaagugcuaccaguucgcccugggccaggggaccacgcugaacaacggccacagcaacgacaccguccacgaccgcaccccguaccggacccuccugaugaacgagcugggcgugcccuuccaccucgggacgcgccaggugugcaucgccugguccagcuccagcugccacgacggcaaggcguggcugcacgucugcgugaccggggacgacgagaacgccaccgccuccuucaucuacaacggccggcugguggacagcaucggguccuggagcaagaagauccuccgcacccaggaguccgagugcgucugcaucaacggcacgugcaccguggugaugaccgacggcagcgccuccgggaaggcggacaccaagauccuguucaucgaggagggcaagaucguccacaucagcacgcugagcggguccgcccagcacguggaggagugcagcugcuacccccgguaccccggcgugcgcugcgucugccgggacaacuggaagggcuccaaccgcccgaucguggacaucaacgugaaggacuacagcaucgucuccagcuacgugugcuccgggcucgugggcgacacgccccggaagaacgacagcuucuccagcucccacugccuggaccccaacaacgaggagggcgggcacggggucaagggcugggccuucgacgacggcaacgacguguggauggggcgcaccaucagcgagaagcugcgguccggcuacgagaccuucaaggucaucgagggguggagcaagcccaacuccaagcuccagaccaaccgccaggugaucguggagcggggcaaccgcagcggguacuccggcaucuucagcgucgagggcaaguccugcaucaaccggugcuucuacguggagcugauccgcgggcggaaggaggagaccgaggugugguggaccagcaacagcaucgucguguucugcggcaccuccgggacguacggcaccgggagcuggccggacggcgccgacaucaaccugaugcccaucuga

SEQ ID NO: 78711 - RNA, 1410 nt, Artificial Sequence; identical to SEQ ID NO: 78190
  derived and/or modified CDS sequence (opt1) from neuraminidase__InfluenzaA__ABC50324

SEQ ID NO: 78712 - RNA, 1410 nt, Artificial Sequence; identical to SEQ ID NO: 78178
  derived and/or modified CDS sequence (opt1) from neuraminidase__InfluenzaA__ABC50335

SEQ ID NO: 78713 - RNA, 1410 nt, Artificial Sequence
  derived and/or modified CDS sequence (opt1) from neuraminidase__InfluenzaA__ABC50346
augaaccccaaccagaagaucaucaccaucggcagcgugucccugaccaucgccacgaucugcuuccucaugcagaucgccauccuggucaccaccgugacccugcacuucaagcaguacgagugcaacagcccgcccaacaaccaggugaugcucugcgagcccacgaucaucgagcgcaacaucaccgagaucgucuaccugaccaacaccacgaucgagaaggagaucugccccaagcuggcggaguaccggaacugguccaagccgcagugcaacaucaccggguucgcccccuucagcaaggacaacuccauccgccucagcgccggcggggacaucugggugacccgggagcccuacguguccugcgaccccgacaagugcuaccaguucgcccugggccaggggaccacgcugaacaacggccacagcaacgacaccguccacgaccgcaccccguaccggacccuccugaugaacgagcugggcgugcccuuccaccucgggacgcgccaggugugcaucgccugguccagcuccagcugccacgacggcaaggcguggcugcacgucugcgugaccggggacgacgagaacgccaccgccuccuucaucuacaacggccggcugguggacagcaucggguccuggagcaagaagauccuccgcacccaggaguccgagugcgucugcaucaacggcacgugcaccguggugaugaccgacggcagcgccuccgggaaggcggacaccaagauccuguucaucgaggagggcaagaucguccacaucagcacgcugagcggguccgcccagcacguggaggagugcagcugcuacccccgguaccccggcgugcgcugcgucugccgggacaacuggaagggcuccaaccgcccgaucaucgacaucaacgugaaggacuacagcaucguguccagcuacgucugcuccgggcucgugggcgacacgccccggaagaacgacagcuucuccagcucccacugccuggaccccaacaacgaggagggcgggcacggggugaagggcugggccuucgacgacggcaacgacgucuggauggggcgcaccaucagcgagaagcugcgguccggcuacgagaccuucaaggugaucgagggguggagcaagcccaacuccaagcuccagaccaaccgccaggucaucguggagcggggcaaccgcagcggguacuccggcaucuucagcguggagggcaaguccugcaucaaccggugcuucuacgucgagcugauccgcgggcggaaggaggagaccgaggugugguggaccagcaacagcaucguggucuucugcggcaccuccgggacguacggcaccgggagcuggccggacggcgccgacaucaaccugaugcccaucuga

SEQ ID NO: 78714 - RNA, 1410 nt, Artificial Sequence; identical to SEQ ID NO: 78190
  derived and/or modified CDS sequence (opt1) from neuraminidase__InfluenzaA__ABC50357

SEQ ID NO: 78715 - RNA, 1410 nt, Artificial Sequence; identical to SEQ ID NO: 78190
  derived and/or modified CDS sequence (opt1) from neuraminidase__InfluenzaA__ABC50368

SEQ ID NO: 78716 - RNA, 1410 nt, Artificial Sequence; identical to SEQ ID NO: 78190
  derived and/or modified CDS sequence (opt1) from neuraminidase__InfluenzaA__ABC50379

SEQ ID NO: 78717 - RNA, 1410 nt, Artificial Sequence; identical to SEQ ID NO: 78190
  derived and/or modified CDS sequence (opt1) from neuraminidase__InfluenzaA__ABC50390

SEQ ID NO: 78718 - RNA, 1410 nt, Artificial Sequence
  derived and/or modified CDS sequence (opt1) from neuraminidase__InfluenzaA__ABC50412
augaaccccaaccagaagaucaucaccaucggcagcgugucccugaccaucagcacgaucugcuucuucaugcagaucgccauccucaucaccaccgucacccugcacuucaagcaguacgaguucaacuccccgcccaacaaccaggugaugcugugcgagcccacgaucaucgagcgcaacaucaccgagaucguguaccucaccaacaccacgaucgagaaggagaucugccccaagcuggccgaguaccggaacuggagcaagccgcagugcgacaucaccggguucgcgcccuucuccaaggacaacagcauccgccuguccgccggcggggacaucugggucacccgggagcccuacgugagcugcgaccccgacaagugcuaccaguucgcccucggccaggggaccacgcugaacaacgugcacuccaacgacaccguccacgaccgcaccccguaccggacccugcucaugaacgagcugggcgugcccuuccaccugggcacgaagcaggucugcaucgccuggagcuccagcuccugccacgacgggaaggccuggcuccacgugugcgugaccggcgacgacaagaacgcgaccgccagcuucaucuacaacgggcgccugguggacuccaucgucagcugguccaaggagauccugcggacccaggagagcgagugcgugugcaucaacggcacgugcaccguggucaugaccgacggguccgccagcggcaaggccgacaccaagauccucuucaucgaggagggcaagaucgugcacacgagcacccuguccgggagcgcgcagcacguggaggagugcuccugcuacccccgcuaccccggcguccggugcgugugccgcgacaacuggaaggggagcaaccggccgaucguggacaucaacaucaaggacuacuccaucgucagcuccuacgugugcagcggccuggugggcgacacgccccgcaagaacgacuccagcuccagcucccacugccucgaccccaacaacgaggagggcgggcacggggucaagggcugggccuucgacgacgggaacgacguguggaugggccggaccaucagcgagaagcugcgccugggcuacgagaccuucaaggucaucgaggggugguccaaccccaacagcaagcuccagaucaaccgccaggugaucguggaccggggcaaccgguccggguacagcggcaucuucuccgucgagggcaagagcugcaucaaccgcugcuucuacguggagcugauccgggggcgcaaggaggagaccgaggugcuguggaccagcaacuccaucgucguguucugcggcaccagcgggacguacggcaccggguccuggccggacggcgccgacaucaaccucaugcccaucuga

SEQ ID NO: 78719 - RNA, 1410 nt, Artificial Sequence; identical to SEQ ID NO: 78718
  derived and/or modified CDS sequence (opt1) from neuraminidase__InfluenzaA__ABC50423

SEQ ID NO: 78720 - RNA, 1410 nt, Artificial Sequence; identical to SEQ ID NO: 78303
  derived and/or modified CDS sequence (opt1) from neuraminidase__InfluenzaA__ABC54671

SEQ ID NO: 78721 - RNA, 1410 nt, Artificial Sequence; identical to SEQ ID NO: 78435
  derived and/or modified CDS sequence (opt1) from neuraminidase__InfluenzaA__ABC54682

SEQ ID NO: 78722 - RNA, 1410 nt, Artificial Sequence; identical to SEQ ID NO: 78615
  derived and/or modified CDS sequence (opt1) from neuraminidase__InfluenzaA__ABC67322

SEQ ID NO: 78723 - RNA, 1410 nt, Artificial Sequence; identical to SEQ ID NO: 78190
  derived and/or modified CDS sequence (opt1) from neuraminidase__InfluenzaA__ABC67474

SEQ ID NO: 78724 - RNA, 1410 nt, Artificial Sequence; identical to SEQ ID NO: 78713
  derived and/or modified CDS sequence (opt1) from neuraminidase__InfluenzaA__ABC67546

SEQ ID NO: 78725 - RNA, 1410 nt, Artificial Sequence
  derived and/or modified CDS sequence (opt1) from neuraminidase__InfluenzaA__ABC67557
augaaccccaaccagaagaucaucaccaucggcagcgugucccugaccaucagcacgaucugcuucuucaugcagaucgccauccucgucaccaccgugacccugcacuucaagcaguacgaguucaacuccccgcccaacaaccaggugaugcugugcgagcccacgaucaucgagcgcaacaucaccgagaucgucuaccucaccaacaccacgaucgagaaggagaucugccccaagcuggccgaguaccggaacuggagcaagccgcagugcgacaucaccggguucgcgcccuucuccaaggacaacagcauccgccuguccgccggcggggacaucugggugacccgggagcccuacgugagcugcgaccccgacaagugcuaccaguucgcccucggccaggggaccacgcugaacaacguccacuccaacgacaccgugcacgaccgcaccccguaccggacccugcucaugaacgagcugggcgugcccuuccaccugggcacgaagcaggucugcaucgccuggagcuccagcuccugccacgacgggaaggccuggcuccacgugugcgugaccggcgacgacaagaacgcgaccgccagcuucaucuacaacgggcgccuggucgacuccaucgugagcugguccaagaagauccugcggacccaggagagcgagugcgugugcaucaacggcacgugcaccgucgugaugaccgacggguccgccagcggcaaggccgacaccaagauccucuucaucgaggagggcaagaucgugcacacgagcacccuguccgggagcgcgcagcacgucgaggagugcuccugcuacccccgcuaccccggcgugcggugcgugugccgcgacaacuggaaggggagcaaccggccgaucgucgacaucaacaucaaggacuacuccaucgugagcuccuacgugugcagcggccuggucggcgacacgccccgcaagaacgacuccagcuccagcucccacugccucgaccccaacaacgaggagggcgggcacggggugaagggcugggccuucgacgacgggaacgacgucuggaugggccggaccaucagcgagaagcugcgcuccggcuacgagaccuucaaggugaucgagggguggagcaaccccaacuccaagcugcagaucaaccgccaggugaucgucgaccggggcaaccggagcggguacuccggcaucuucagcguggagggcaagagcugcaucaaccgcugcuucuacguggagcucauccgggggcgcaaggaggagaccgagguccuguggaccuccaacagcaucgugguguucugcggcaccuccgggacguacggcaccgggagcuggccggacggcgccgacaucaaccugaugcccaucuga

SEQ ID NO: 78726 - RNA, 1410 nt, Artificial Sequence
  derived and/or modified CDS sequence (opt1) from neuraminidase__InfluenzaA__ABC67568
augaaccccaaccagaagaucaucaccaucggcagcgugucccugaccaucgccacgaucugcuuccucaugcagaucgccauccuggucaccaccgugacccugcacuucaagcaguacgagugcgacagcccggcgaacaaccaggugaugcccugcgagcccaucaucaucgagcgcaacaucacggagaucgucuaccucaccaacaccaccaucgagaaggagaucugccccaagcugguggaguaccggaacugguccaagccgcagugcaagaucacgggguucgcccccuucagcaaggacaacuccauccgccugagcgccggcggggacaucugggugacccgggagcccuacgucuccugcgaccccggcaagugcuaccaguucgcccucgggcagggcaccacccuggacaacaagcacagcaacgacacgauccacgaccgcaccccgcaccggacccugcucaugaacgagcugggcgugcccuuccaccuggggacccgccaggugugcaucgccugguccagcuccagcugccacgacggcaaggcguggcuccacgucugcgugacgggguacgacaagaacgccaccgccuccuucaucuacgacggccggcugguggacagcaucggguccuggagccagaacauccugcgcacccaggaguccgagugcgucugcaucaacgggaccugcacgguggugaugaccgacggcagcgccuccggccgggcggacaccaagauccucuucaucgaggagggcaagaucguccacaucagcccccugagcggguccgcccagcacguggaggagugcagcugcuacccccgcuacccgggcgugcggugcaucugccgcgacaacuggaagggcuccaaccggcccgucguggacaucaacgugaaggacuacagcaucgacuccagcuacgucugcuccgggcuggugggcgacacgccccgcaacaacgaccggagcuccaacagcuacugccgcaaccccaacaacgagaaggggaaccacggcgugaaggggugggccuucgacgacggcaacgacgucuggaugggccggaccaucuccgaggacagccgcuccggguacgagaccuucaaggugaucggcggguggagcaccccgaacuccaagcuccagaucaaccggcaggucaucguggacagcgacaaccgcuccggcuacagcgggaucuucuccguggagggcaagagcugcaucaaccggugcuucuacgucgagcugauccgcggccgcgagcaggagacccgggugugguggacgagcaacuccaucguggucuucugcgggaccagcggcaccuacgggaccggcuccuggcccgacggggccaacaucaaccugaugcccaucuga

SEQ ID NO: 78727 - RNA, 1410 nt, Artificial Sequence
  derived and/or modified CDS sequence (opt1) from neuraminidase__InfluenzaA__ABC67579
augaaccccaaccagaagaucaucaccaucggcagcgugucccugaccaucgccacgaucugcuuccucaugcagaucgccauccuggucaccaccgugacccugcacuucaagcaguacgagugcaacagcccgcccaacaaccaggugaugcucugcgagcccacgaucaucgagcgcaacaucaccgagaucgucuaccugaccaacaccacgaucgagaaggagaucugccccaagccggcggaguaccggaacugguccaagccccagugcaagaucaccggguucgcccccuucagcaaggacaacuccauccgccugagcgccggcggggacaucugggugacccgggagcccuacguguccugcgacccggacaagugcuaccaguucgcccucggccaggggaccacgcugaacaacggccacagcaacgacaccguccacgaccgcacccccuaccggacccugcucaugaacgagcugggcgugcccuuccaccuggggacgaagcaggucugcaucgccugguccagcuccagcugccacgacggcaaggcguggcuccacgugugcgugaccgggcacgacgagaacgccaccgccuccuucaucuacgacggccgccugguggacagcaucggguccuggagcaagaagauccugcggacccaggaguccgagugcgucugcaucaacggcacgugcaccguggugaugaccgacggcagcgccuccgggcgcgcggacaccaagauccucuucaucgaggagggcaagaucguccacaucagccagcugagcggguccgcccagcacguggaggagugcagcugcuacccccgguacccgggcgugcgcugcgucugccgggacaacuggaagggcuccaaccgccccaucguggacaucaacgugaaggaccacagcaucgucuccagcuacgugugcuccgggcuggugggcgacacgccccggaagaacgacagcuccagcuccagccacugccucaaccccaacaacgaggagggcgggcacggggucaagggcugggccuucgacgacggcaacgacguguggauggggcgcaccaucuccgagaagcugcggagcggcuacgagaccuucaaggucaucgaggggugguccaagccgaacagcaagcugcagaucaaccgccaggugaucguggaccggggcaaccgcuccggguacagcggcaucuucuccgucgagggcaagagcugcaucaaccggugcuucuacguggagcucauccgcgggcggaagcaggagaccgaggugugguggacgagcaacuccaucgucguguucugcggcaccagcgggaccuacggcaccggguccuggcccgacggcgccgacaucaaccugaugcccaucuga

SEQ ID NO: 78728 - RNA, 1410 nt, Artificial Sequence; identical to SEQ ID NO: 78351
  derived and/or modified CDS sequence (opt1) from neuraminidase__InfluenzaA__ABC67590

SEQ ID NO: 78729 - RNA, 1410 nt, Artificial Sequence; identical to SEQ ID NO: 78351
  derived and/or modified CDS sequence (opt1) from neuraminidase__InfluenzaA__ABC67601

SEQ ID NO: 78730 - RNA, 1410 nt, Artificial Sequence; identical to SEQ ID NO: 78190
  derived and/or modified CDS sequence (opt1) from neuraminidase__InfluenzaA__ABC67612

SEQ ID NO: 78731 - RNA, 1410 nt, Artificial Sequence; identical to SEQ ID NO: 78190
  derived and/or modified CDS sequence (opt1) from neuraminidase__InfluenzaA__ABC67623

SEQ ID NO: 78732 - RNA, 1410 nt, Artificial Sequence
  derived and/or modified CDS sequence (opt1) from neuraminidase__InfluenzaA__ABC67634
augaaccccaaccagaagaucaucaccaucggcagcgugucccugaccaucgccacgaucugcuuccucaugcagaucgccauccuggucaccaccgugacccugcacuucaagcaguacgagugcaacccgccgcccaacaaccaggugaugcucugcgagcccacgaucaucgagcgcaacaucaccgagaucgucuaccugaccaacaccacgaucgagaaggagaucugccccaagcuggcggaguaccggaacuggagcaagccccagugcaacaucaccggguucgcccccuucuccaaggacaacagcauccgccucuccgccggcggggacaucugggugacccgggagcccuacgugagcugcgacccggacaagugcuaccaguucgcccugggccaggggaccacgcugaacaacggccacuccaacgacaccguccacgaccgcacccccuaccggacccuccugaugaacgagcugggcgugcccuuccaccucgggacgcgccaggugugcaucgccuggagcuccagcuccugccacgacggcaaggcguggcugcacgucugcgugaccggggacgacgagaacgccaccgccagcuucaucuacaacggccggcugguggacuccaucgggagcugguccaagaagauccuccgcacccaggagagcgagugcgucugcaucaacggcacgugcaccguggugaugaccgacggcuccgccagcgggaaggcggacaccaagauccuguucaucgaggagggcaagaucguccacaucuccacgcugagcgggagcgcccagcacguggaggagugcuccugcuacccccgguacccgggcgugcgcugcgucugccgggacaacuggaagggcagcaaccgccccaucguggacaucaacgugaaggacuacuccaucgucagcuccuacgugugcagcgggcucgugggcgacacgccccggaagaacgacuccuucagcuccagccacugccuggaccccaacaacgaggagggcgggcacggggucaagggcugggccuucgacgacggcaacgacguguggauggggcgcaccaucuccgagaagcugcggagcggcuacgagaccuucaaggucaucgaggggugguccaagccgaacagcaagcuccagaccaaccgccaggugaucguggagcggggcaaccgcuccggguacagcggcaucuucuccgucgagggcaagagcugcaucaaccggugcuucuacguggagcugauccgcgggcggaaggaggagaccgaggugugguggaccuccaacagcaucgucguguucugcggcaccagcgggacguacggcaccggguccuggcccgacggcgccgacaucaaccugaugcccaucuga

SEQ ID NO: 78733 - RNA, 1410 nt, Artificial Sequence; identical to SEQ ID NO: 78190
  derived and/or modified CDS sequence (opt1) from neuraminidase__InfluenzaA__ABC67645

SEQ ID NO: 78734 - RNA, 1410 nt, Artificial Sequence; identical to SEQ ID NO: 78190
  derived and/or modified CDS sequence (opt1) from neuraminidase__InfluenzaA__ABC67656

SEQ ID NO: 78735 - RNA, 1410 nt, Artificial Sequence
  derived and/or modified CDS sequence (opt1) from neuraminidase__InfluenzaA__ABC67700
augaaccccaaccagaagaucaucaccaucggcagcgugucccugaccaucagcacgaucugcuucuucaugcagaucgccauccucaucaccaccgucacccugcacuucaagcaguacgaguucaacuccccgcccaacaaccaggugaugcugugcgagcccacgaucaucgagcgcaacaucaccgagaucguguaccucaccaacaccacgaucgagaaggagaucugccccaagcuggccgaguaccggaacuggagcaagccgcagugcaacaucaccggguucgcgcccuucuccaaggacaacagcauccgccuguccgccggcggggacaucugggucacccgggagcccuacgugagcugcgaccccgacaagugcuaccaguucgcccucggccaggggaccacgcugaacaacgugcacuccaacgacaccguccacgaccgcaccccguaccggacccugcucaugaacgagcugggcgugcccuuccaccugggcacgaagcaggucugcaucgccuggagcuccagcuccugccacgacgggaaggccuggcuccacgugugcgugaccggcgacgacaagaacgcgaccgccagcuucaucuacaacgggcgccugguggacuccaucgucagcugguccaaggagauccugcggacccaggagagcgagugcgugugcaucaacggcacgugcaccguggucaugaccgacggguccgccagcggcaaggccgacaccaagauccucuucaucgaggagggcaagaucgugcacacgagcacccuguccgggagcgcgcagcacguggaggagugcuccugcuacccccgcuaccccggcguccggugcgugugccgcgacaacuggaaggggagcaaccggccgaucguggacaucaacaucaaggacuacuccaucgucagcuccuacgugugcagcggccuggugggcgacacgccccgcaagaacgacuccagcuccagcucccacugccucgaccccaacaacgaggagggcgggcacggggucaagggcugggccuucgacgacgggaacgacguguggaugggccggaccaucagcgagaagcugcgcuccggcuacgagaccuucaaggucaucgagggguggagcaacuccaacagcaagcugcagaucaaccgccaggugaucguggaccggggcaaccgguccggguacagcggcaucuucagcgucgaggggaaguccugcaucaaccgcugcuucuacguggagcucauccggggccgcaaggaggagaccgaggugcuguggaccagcaacuccaucgucguguucugcggcaccagcgggacguacggcaccggguccuggcccgacggcgccgacaucaaccugaugccgaucuga

SEQ ID NO: 78736 - RNA, 1410 nt, Artificial Sequence
  derived and/or modified CDS sequence (opt1) from neuraminidase__InfluenzaA__ABC67711
augaaccccaaccagaagaucaucaccaucggcagcgugucccugaccaucagcacgaucugcuucuucaugcagaucgccauccucaucaccaccgucacccugcacuucaagcaguacgaguucaacuccccgcccaacaaccaggugaugcugugcgagcccacgaucaucgagcgcaacaucaccgagaucguguaccucaccaacaccacgaucgagaaggagaucugccccaagcuggccgaguaccggaacuggagcaagccgcagugcaacaucaccggguucgcgcccuucuccaaggacaacagcauccgccuguccgccggcggggacaucugggucacccgggagcccuacgugagcugcgaccccgacaagugcuaccaguucgcccucggccaggggaccacgcugaacaacgugcacuccaacgacaccguccacgaccgcaccccguaccggacccugcucaugaacgagcugggcgugcccuuccaccugggcacgaagcaggucugcaucgccuggagcuccagcuccugccacgacgggaaggccuggcuccacgugugcgugaccggcgacgacaagaacgcgaccgccagcuucaucuacaacgggcgccugguggacuccaucgucagcugguccaaggagauccugcggacccaggagagcgagugcgugugcaucaacggcacgugcaccguggucaugaccgacggguccgccagcggcaaggccgacaccaagauccucuucaucgaggagggcaagaucgugcacacgagcacccuguccgggagcgcgcagcacguggaggagugcuccugcuacccccgcuaccccggcguccggugcgugugccgcgacaacuggaaggggagcaaccggccgaucguggacaucaacaucaaggacuacuccaucgucagcuccuacgugugcagcggccuggugggcgacacgccccgcaagaacgacuccagcuccagcucccacugccucgaccccaacaacgaggagggcgggcacggggucaagggcugggccuucgacgacgggaacgacguguggaugggccggaccaucagcgagaagcugcgcuccggcuacgagaccuucaaggucaucgagggguggagcaaccccaacuccaagcugcagaucaaccgccaggugaucguggaccggggcaaccggagcggguacuccggcaucuucagcgucgagggcaagagcugcaucaaccgcugcuucuacguggagcucauccgggggcgcaaggaggagaccgaggugcuguggaccuccaacagcaucgucguguucugcggcaccuccgggacguacggcaccgggagcuggccggacggcgccgacaucaaccugaugcccaucuga

SEQ ID NO: 78737 - RNA, 1410 nt, Artificial Sequence
  derived and/or modified CDS sequence (opt1) from neuraminidase__InfluenzaA__ABC67736
augaaccccaaccagaagaucaucaccaucggcagcgugucccugaccaucagcacgaucugcuucuucaugcagaucgccauccucaucaccaccgucacccugcacuucaagcaguacgaguucaacuccccgcccaacaaccaggugaugcugugcgagcccacgaucaucgagcgcaacaucaccgagaucguguaccucaccaacaccacgaucgagaaggagaucugccccaagcuggccgaguaccggaacuggagcaagccgcagugcaacaucaccggguucgcgcccuucuccaaggacaacagcauccgccuguccgccggcggggacaucugggucacccgggagcccuacgugagcugcgaccccgacaagugcuaccaguucgcccucggccaggggaccacgcugaacaacgugcacuccaacgacaccguccacgaccgcaccccguaccggacccugcucaugaacgagcugggcgugcccuuccaccugggcacgaagcaggucugcguggccuggagcuccagcuccugccacgacgggaaggccuggcuccacgugugcgugaccggcgacgacaagaacgcgaccgccagcuucaucuacaacgggcgccuggucgacuccaucgugagcugguccaaggagauccugcggacccaggagagcgagugcgugugcaucaacggcacgugcaccgucgugaugaccgacggguccgccagcggcaaggccgacaccaagauccucuucaucgaggagggcaagaucgugcacacgagcacccuguccgggagcgcgcagcacgucgaggagugcuccugcuacccccgcuaccccggcgugcggugcgugugccgcgacaacuggaaggggagcaaccggccgaucgucgacaucaacaucaaggacuacuccaucgugagcuccuacgugugcagcggccuggucggcgacacgccccgcaagaacgacuccagcuccagcucccacugccucgaccccaacaacgaggagggcgggcacggggugaagggcugggccuucgacgacgggaacgacgucuggaugggccggaccaucagcgagaagcugcgcuccggcuacgagaccuucaaggugaucgagggguggagcaaccccaacuccaagcugcagaucaaccgccaggugaucgucgaccggggcaaccggagcggguacuccggcaucuucagcguggagggcaagagcugcaucaaccgcugcuucuacguggagcucauccgggggcgcaaggaggagaccgagguccuguggaccuccaacagcaucgugguguucugcggcaccuccgggacguacggcaccgggagcuggccggacggcgccgacaucaaccugaugcccaucuga

SEQ ID NO: 78738 - RNA, 1410 nt, Artificial Sequence
  derived and/or modified CDS sequence (opt1) from neuraminidase__InfluenzaA__ABC67809
augaaccccaaccagaagaucaucaccaucggcagcgugucccugaccaucagcacgaucugcuucuucaugcagaucgccauccucaucaccaccgucacccugcacuucaagcaguacgaguucaacuccccgcccaacaaccaggugaugcugugcgagcccacgaucaucgagcgcaacaucaccgagaucguguaccucaccaacaccacgaucgagaaggagaucugccccaagcuggccgaguaccggaacuggagcaagccgcagugcgacaucaccggguucgcgcccuucuccaaggacaacagcauccgccuguccgccggcggggacaucugggucacccgggagcccuacgugagcugcgaccccgacaagugcuaccaguucgcccucggccaggggaccacgcugaacaacgugcacuccaacgacaccguccacgaccgcaccccguaccggacccugcucaugaacgagcugggcgugcccuuccaccugggcacgaagcaggucugcaucgccuggagcuccagcuccugccacgacgggaaggccuggcuccacgugugcgugaccggcgacgacaagaacgcgaccgccagcuucaucuacaacgggcgccugguggacuccaucgucagcugguccaagaagauccugcggacccaggagagcgagugcgugugcaucaacggcacgugcaccguggucaugaccgacggguccgccagcggcaaggccgacaccaagauccucuucaucgaggagggcaagaucgugcacacgagcacccuguccgggagcgcgcagcacguggaggagugcuccugcuacccccgcuaccccggcguccggugcgugugccgcgacaacuggaaggggagcaaccggccgaucguggacaucaacaucaaggacuacuccaucgucagcuccuacgugugcagcggccuggugggcgacacgccccgcaagaacgacuccagcuccagcucccacugccucgaccccaacaacgaggagggcgggcacggggucaagggcugggccuucgacgacgggaacgacguguggaugggccggaccaucagcgagaagcugcgcuccggcuacgagaccuucaaggucaucgagggguggagcaaccccaacuccaagcugcagaucaaccgccaggugaucguggaccggggcaaccggagcggguacuccggcaucuucagcgucgagggcaagagcugcaucaaccgcugcuucuacguggagcucauccgggggcgcaaggaggagaccgaggugcuguggaccuccaacagcaucgucguguucugcggcaccuccgggacguacggcaccgggagcuggccggacggcgccgacaucaaccugaugcccaucuga

SEQ ID NO: 78739 - RNA, 1410 nt, Artificial Sequence; identical to SEQ ID NO: 78615
  derived and/or modified CDS sequence (opt1) from neuraminidase__InfluenzaA__ABC67820

SEQ ID NO: 78740 - RNA, 1410 nt, Artificial Sequence; identical to SEQ ID NO: 78594
  derived and/or modified CDS sequence (opt1) from neuraminidase__InfluenzaA__ABC67842

SEQ ID NO: 78741 - RNA, 1410 nt, Artificial Sequence; identical to SEQ ID NO: 78190
  derived and/or modified CDS sequence (opt1) from neuraminidase__InfluenzaA__ABC67853

SEQ ID NO: 78742 - RNA, 1410 nt, Artificial Sequence; identical to SEQ ID NO: 78594
  derived and/or modified CDS sequence (opt1) from neuraminidase__InfluenzaA__ABC67864

SEQ ID NO: 78743 - RNA, 1410 nt, Artificial Sequence; identical to SEQ ID NO: 78713
  derived and/or modified CDS sequence (opt1) from neuraminidase__InfluenzaA__ABC67886

SEQ ID NO: 78744 - RNA, 1410 nt, Artificial Sequence; identical to SEQ ID NO: 78190
  derived and/or modified CDS sequence (opt1) from neuraminidase__InfluenzaA__ABC67897

SEQ ID NO: 78745 - RNA, 1410 nt, Artificial Sequence; identical to SEQ ID NO: 78190
  derived and/or modified CDS sequence (opt1) from neuraminidase__InfluenzaA__ABC67970

SEQ ID NO: 78746 - RNA, 1410 nt, Artificial Sequence
  derived and/or modified CDS sequence (opt1) from neuraminidase__InfluenzaA__ABC67981
augaaccccaaccagaagaucaucaccaucggcagcgugucccugaccaucgccacgaucugcuuccucaugcagaucgccauccuggucaccaccgugacccugcacuucaagcaguacgagugcaacagcccgcccaacaaccaggugaugcucugcgagcccacgaucaucgagcgcaacaucaccgagaucgucuaccugaccaacaccacgaucgagaaggagaucugccccaagcuggcggaguaccggaacugguccaagccgcagugcaacaucaccggguucgcccccuucagcaaggacaacuccauccgccucagcgccggcggggacaucugggugacccgggagcccuacguguccugcgaccccgacaagugcuaccaguucgcccugggccaggggaccacgcugaacaacggccacagcaacgacaccguccacgaccgcaccccguaccggacccuccugaugaacgagcugggcgugcccuuccaccucgggacgcgccaggugugcaucgccugguccagcuccagcugccacgacggcaaggcguggcugcacgucugcgugaccggggacgacgagaacgccaccgccuccuucaucuacaacggccggcugguggacagcaucggguccuggagcaagaagauccuccgcacccaggaguccgagugcgucugcaucaacggcacgugcaccguggugaugaccgacggcagcgccuccgggaaggcggacaccaagauccuguucaucgaggagggcaagaucguccacaucagcacgcugagcggguccgcccagcacguggaggagugcagcugcuacccccaguaccccggcgugcggugcgucugccgcgacaacuggaagggcuccaaccggccgaucguggacaucaacgugaaggacuacagcaucgucuccagcuacgugugcuccgggcucgugggcgacacgccccgcaagaacgacagcuucuccagcucccacugccuggaccccaacaacgaggagggcgggcacggggucaagggcugggccuucgacgacggcaacgacguguggauggggcggaccaucagcgagaagcugcgcuccggcuacgagaccuucaaggucaucgagggguggagcaagcccaacuccaagcuccagaccaaccgccaggugaucguggagcggggcaaccggagcggguacuccggcaucuucagcgucgagggcaaguccugcaucaaccgcugcuucuacguggagcugauccgggggcgcaaggaggagaccgaggugugguggaccagcaacagcaucgucguguucugcggcaccuccgggacguacggcaccgggagcuggccggacggcgccgacaucaaccugaugcccaucuga

SEQ ID NO: 78747 - RNA, 1410 nt, Artificial Sequence
  derived and/or modified CDS sequence (opt1) from neuraminidase__InfluenzaA__ABC67992
augaaccccaaccagaagaucaucaccaucggcagcgugucccugaccaucgccacgaucugcuuccucaugcagaucgccauccuggucaccaccgugacccugcacuucaagcaguacgagugcaacagcccgcccaacaaccaggugaugcucugcgagcccacgaucaucgagcgcaacaucaccgagaucgucuaccugaccaacaccacgaucgagaaggagaucugccccaagcuggcggaguaccggaacugguccaagccgcagugcaacaucaccggguucgcccccuucagcaaggacaacuccauccgccucagcgccggcggggacaucugggugacccgggagcccuacguguccugcgaccccgacaagugcuaccaguucgcccugggccaggggaccacgcugaacaacggccacagcaacgacaccguccacgaccgcaccccguaccggacccuccugaugaacgagcugggcgugcccuuccaccucgggacgcgccaggugugcaucgccugguccagcuccagcugccacgacggcaaggcguggcugcacgucugcgugaccggggacgacgagaacgccaccgccuccuucaucuacaacggccggcugguggacagcaucggguccuggagcaagaagauccuccgcacccaggaguccgagugcgucugcaucaacggcacgugcaccguggugaugaccgacggcagcgccuccgggaaggcggacaccaagauccuguucaucgaggagggcaagaucguccacaucagcacgcugagcggguccgcccagcacguggaggagugcagcugcuacccccgguaccccggcgugcgcugcgucugccgggacaacuggaagggcuccaaccgcccgaucguggacaucaacgugaaggacuacagcaucgucuccagcuacgugugcuccgggcucgugggcgacacgccccggaagaacaacagcuucuccagcucccacugccuggaccccaacaacgaggagggcgggcacggggucaagggcugggccuucgacgacggcaacgacguguggauggggcgcaccaucagcgagaagcugcgguccggcuacgagaccuucaaggucaucgagggguggagcaagcccaacuccaagcuccagaccaaccgccaggugaucguggagcggggcaaccgcagcggguacuccggcaucuucagcgucgagggcaaguccugcaucaaccggugcuucuacguggagcugauccgcgggcggaaggaggagaucgaggugugguggaccagcaacagcaucgucguguucugcggcaccuccgggaccuacggcacggggagcuggccggacggcgccgacaucaaccugaugcccaucuga

SEQ ID NO: 78748 - RNA, 1410 nt, Artificial Sequence; identical to SEQ ID NO: 78713
  derived and/or modified CDS sequence (opt1) from neuraminidase__InfluenzaA__ABC68003

SEQ ID NO: 78749 - RNA, 1410 nt, Artificial Sequence
  derived and/or modified CDS sequence (opt1) from neuraminidase__InfluenzaA__ABC68052
augaaccccaaccagaagaucaucaccaucggcagcgugucccugaccaucgccacgaucugcuuccucaugcagaucgccauccuggucaccaccgugacccugcacuucaagcaguacgagugcaacagcccgcccaacaaccaggugaugcucugcgagcccacgaucaucgagcgcaacaucaccgagaucgucuaccugaccaacaccacgaucgagaaggagaucugccccaagcuggcggaguaccggaacugguccaagccgcagugcaacaucaccggguucgcccccuucagcaaggacaacuccauccgccucagcgccggcggggacaucugggugacccgggagcccuacguguccugcgaccccgacaagugcuaccaguucgcccugggccaggggaccacgcugaacaacggccacagcaacgacaccguccacgaccgcaccccguaccggacccuccugaugaacgagcugggcgugcccuuccaccucgggacgcgccaggugugcaucgccugguccagcuccagcugccacgacggcaaggcguggcugcacgucugcgugaccggggacgacgagaacgccaccgccuccuucaucuacaacggccggcugguggacagcaucggguccuggagcaagaagauccuccgcacccaggaguccgagugcgucugcaucaacggcacgugcaccguggugaugaucgacggcagcgccuccgggaaggcggacaccaagauccuguucaucgaggagggcaagaucguccacaucagcacccugagcggguccgcccagcacguggaggagugcagcugcuacccccgguaccccggcgugcgcugcgucugccgggacaacuggaagggcuccaaccgcccgaucguggacaucaacgugaaggacuacagcaucgucuccagcuacgugugcuccgggcucgugggcgacacgccccggaagaacgacagcuucuccagcucccacugccuggaccccaacaacgaggagggcgggcacggggucaagggcugggccuucgacgacggcaacgacguguggauggggcgcaccaucagcgagaagcugcgguccggcuacgagaccuucaaggucaucgagggguggagcaagcccaacuccaagcuccagaccaaccgccaggugaucguggagcggggcaaccgcagcggguacuccggcaucuucagcgucgagggcaaguccugcaucaaccggugcuucuacguggagcugauccgcgggcggaaggaggagacggaggugugguggaccagcaacagcaucgucguguucugcggcaccuccgggaccuacggcacggggagcuggccggacggcgccgacaucaaccugaugcccaucuga

SEQ ID NO: 78750 - RNA, 1410 nt, Artificial Sequence; identical to SEQ ID NO: 78190
  derived and/or modified CDS sequence (opt1) from neuraminidase__InfluenzaA__ABC68063

SEQ ID NO: 78751 - RNA, 1410 nt, Artificial Sequence; identical to SEQ ID NO: 78190
  derived and/or modified CDS sequence (opt1) from neuraminidase__InfluenzaA__ABC68074

SEQ ID NO: 78752 - RNA, 1410 nt, Artificial Sequence; identical to SEQ ID NO: 78736
  derived and/or modified CDS sequence (opt1) from neuraminidase__InfluenzaA__ABC68085

SEQ ID NO: 78753 - RNA, 1410 nt, Artificial Sequence
  derived and/or modified CDS sequence (opt1) from neuraminidase__InfluenzaA__ABC68096
augaaccccaaccagaagaucaucaccaucggcagcgugucccugaccaucgccacgaucugcuuccucaugcagaucgccauccuggucaccaccgugacccugcacuucaagcaguacgagugcaacagcccgcccaacaaccaggugaugcucugcgagcccacgaucaucgagcgcaacaucaccgagaucgucuaccugaccaacaccacgaucgagaaggagaucugccccaagcuggcggaguaccggaacugguccaagccgcagugcaacaucaccggguucgcccccuucagcaaggacaacuccauccgccucagcgccggcggggacaucugggugacccgggagcccuacguguccugcgaccccgacaagugcuaccaguucgcccugggccaggggaccacgcugaacaacggccacagcaacgacaccguccacgaccgcaccccguaccggacccuccugaugaacgagcugggcgugcccuuccaccucgggacgcgccaggugugcaucgccugguccagcuccagcugccacgacggcaaggcguggcugcacgucugcgugaccggggacgacgagaacgccaccgccuccuucaucuacaacggccggcugguggacagcaucggguccuggagcaagaagauccuccgcacccaggaguccgagugcgucugcaucaacggcacgugcaccguggugaugaccgacggcagcgccuccgggaaggcggacaccaagauccuguucaucgaggagggcaagaucguccacaucagcacgcugagcggguccgcccagcacguggaggagugcagcugcuacccccgguaccccggcgugcgcugcgucugccgggacaacuggaagggcuccaaccgcccgaucguggacaucaacgugaaggacuacagcaucgucuccagcuacgugugcuccgggcucgugggcgacacgccccggaagaacgacagcuucuccagcucccacugccuggaccccaacaacgaggagggcgggcacggggucaagggcugggccuucgacgacggcaacgacguguggauggggcgcaccaucagcgagaagcugcgguccggcuacgagaccuucaaggucaucgagggguggagcaagcccaacuccaagcuccacaucaaccgccaggugaucguggagcggggcaaccgcagcggguacuccggcaucuucagcgucgagggcaaguccugcaucaaccggugcuucuacguggagcugauccgcgggcggaaggaggagaccgaggugugguggaccagcaacagcaucgucguguucugcggcaccuccgggaccuacggcacggggagcuggccggacggcgccgacaucaaccugaugcccaucuga

SEQ ID NO: 78754 - RNA, 1410 nt, Artificial Sequence
  derived and/or modified CDS sequence (opt1) from neuraminidase__InfluenzaA__ABC68225
augaaccccaaccagaagaucaucaccaucggcagcgugucccugaccaucgccacgaucugcuuccucaugcagaucgccauccuggucaccaccgugacccugcacuucaagcaguacgagugcaacagcccgcccaacaaccaggugaugcucugcgagcccacgaucaucgagcgcaacaucaccgagaucgucuaccugaccaacaccacgaucgagaaggagaucugccccaagcuggcggaguaccggaacugguccaagccgcagugcaacaucaccggguucgcccccuucagcaaggacaacuccauccgccucagcgccggcggggacaucugggugacccgggagcccuacguguccugcgaccccgacaagugcuaccaguucgcccugggccaggggaccacgcugaacaacggccacagcaacgacaccguccacgaccgcaccccguaccggacccuccugaugaacgagcugggcgugcccuuccaccucgggacgaagcaggucugcaucgccugguccagcuccagcugccacgacggcaaggcguggcugcacgugugcgugaccggggacgacgagaacgccaccgccuccuucaucuacaacggccgccugguggacagcaucggguccuggagcaagaagauccuccggacccaggaguccgagugcgucugcaucaacggcacgugcaccguggugaugaccgacggcagcgccuccgggaaggcggacaccaagauccuguucaucgaggagggcaagaucguccacacgagcagccuguccgggagcgcccagcacguggaggagugcuccugcuacccccgcuaccccggcgugcggugcgucugccgcgacaacuggaagggcagcaaccggccgaucguggacaucaacgugaaggacuacuccaucgucagcuccuacgugugcagcgggcucgugggcgacacgccccgcaagaacgacuccagcuccagcucccacugccuggaccccaacaacgaggagggcgggcacggggucaagggcugggccuucgacgacggcaacgacguguggauggggcggaccaucagcgagaagcugcgcuccggcuacgagaccuucaaggucaucgagggguggagcaagcccaacuccaagcuccagaucaaccgccaggugaucguggaccggggcaaccggagcggguacuccggcaucuucagcgucgagagcaaguccugcaucaaccgcugcuucuacguggagcugauccggggccgcaagcaggagaccgaggugcuguggaccagcaacuccaucgucguguucugcgggaccagcggcaccuacgggacgggcuccuggccggacggggccgacaucaaccucaugcccaucuga

SEQ ID NO: 78755 - RNA, 1410 nt, Artificial Sequence; identical to SEQ ID NO: 78543
  derived and/or modified CDS sequence (opt1) from neuraminidase__InfluenzaA__ABC68236

SEQ ID NO: 78756 - RNA, 1350 nt, Artificial Sequence
  derived and/or modified CDS sequence (opt1) from neuraminidase__InfluenzaA__ABC72646
augaaccccaacaagaagaucaucaccaucggcagcaucugcauggugaccgggauggucucccugaugcuccagaucggcaaccugaucagcaucugggugucccacagcauccacacggggaaccagcagaaggccgagccgaucuccaacaccaacuuccugaccgagaaggccguggcgagcgucaagcucgccggcaacuccagccugugccccaucaacgggugggccguguacuccaaggacaacagcauccgcaucggcuccaagggcgacguguucgucauccgggagcccuucaucagcugcucccaccuggagugccgcaccuucuuccucacgcaggggagccugcugaacgacaagcacuccaacggcaccgugaaggaccggagcccccaccgcacccucauguccugcccggugggggaggcccccagccccuacaacucccgguucgagagcgucgccuggagcgcguccgccugccacgacggcaccagcuggcugacgaucgggaucuccggccccgacagcggcgccguggccgugcugaaguacaacgggaucaucaccgacaccaucaaguccuggcgcaacaacauccuccggacccaggagagcgagugcgcgugcgucaacggcuccugcuucacggugaugaccgacgggccgagcaacggccaggccucccacaagaucuucaagauggacaagggcaagguggucaagagcguggagcuggacgcccccaacuaccacuacgaggagugcuccugcuaccccgacgccggggagaucacgugcgugugccgcgacaacuggcacggcagcaaccggcccugggucuccuucaaccagaaccuggaguaccagaucggguacaucugcagcggcguguucggggacaccccgcgccccaacgacggcaccggcuccugcgggcccgugagcuccaacggcaccuacggggucaagggcuucagcuucaaguacgggaacggcguguggaucggccggaccaaguccaccaacagccgcagcggguucgagaugaucugggaccccaacggcuggacggagaccgacuccagcuucuccgugaagcaggacaucgucgccaucaccgacuggagcggguacuccggcagcuucgugcagcacccggagcucaccgggcuggacugcauccggcccugcuucugggucgagcugauccgcggccggcccaaggaguccacgaucuggaccagcggcuccagcaucuccuucugcggggugaacagcgacaccgugggcugguccuggcccgacggggcggagcucccguucaccaucgacaaguga

SEQ ID NO: 78757 - RNA, 1410 nt, Artificial Sequence; identical to SEQ ID NO: 78119
  derived and/or modified CDS sequence (opt1) from neuraminidase__InfluenzaA__ABC84392

SEQ ID NO: 78758 - RNA, 1410 nt, Artificial Sequence; identical to SEQ ID NO: 78533
  derived and/or modified CDS sequence (opt1) from neuraminidase__InfluenzaA__ABC84403

SEQ ID NO: 78759 - RNA, 1410 nt, Artificial Sequence; identical to SEQ ID NO: 78538
  derived and/or modified CDS sequence (opt1) from neuraminidase__InfluenzaA__ABC84414

SEQ ID NO: 78760 - RNA, 1410 nt, Artificial Sequence
  derived and/or modified CDS sequence (opt1) from neuraminidase__InfluenzaA__ABC84425
augaaccccaaccagaagaucaucaccaucggcagcgugucccugaccaucagcacgaucugcuucuucaugcagaucgccauccucaucaccaccgucacccugcacuucaagcaguacgaguucaacuccccgcccaacaaccaggugaugcugugcgagcccacgaucaucgagcgcaacaucaccgagaucguguaccucaccaacaccacgaucgagaaggagaucugccccaagcuggccgaguaccggaacuggagcaagccgcagugcgacaucaccggguucgcgcccuucuccaaggacaacagcauccgccuguccgccggcggggacaucugggucacccgggagcccuacgugagcugcgaccccgacaagugcuaccaguucgcccucggccaggggaccacgcugaacaacgugcacuccaacgacaccguccacgaccgcaccccguaccggacccugcucaugaacgagcugggcgugcccuuccaccugggcacgaagcaggucugcaucgccuggagcuccagcuccugccacgacgggaaggccuggcuccacgugugcgugaccggcgacgacaagaacgcgaccgccagcuucaucuacaacgggcgccugguggacuccaucgucagcugguccaaggagauccugcggacccaggagagcgagugcgugugcaucaacggcacgugcaccguggucaugaccgacggguccgccagcggcaaggccgacaccaagauccucuucaucgaggagggcaagaucgugcacacgagcacccuguccgggagcgcgcagcacguggaggagugcuccugcuacccccgcuaccccggcguccggugcgugugccgcgacaacuggaaggggagcaaccggccgaucguggacaucaacaucaaggacuacuccaucgucagcuccuacgugugcagcggccuggugggcgacacgccccgcaagaacgacuccagcuccagcucccacugccucgaccccaacaacgaggagggcgggcacggggucaagggcugggccuucgacgacgggaacgacguguggaugggccggaccaucagcgagaagcugcgcuccggcuacgagaccuucaaggucaucgagggguggagcaaccccaacuccaagcugcagaucaaccgccaggugaucguggaccggggcaaccggagcggguacuccggcaucuucagcgucgaggggaagaacugcaucaaccgcugcuucuacguggagcucauccggggccgcaaggaggagaccgaggugcuguggaccagcaacuccaucgucguguucugcggcaccagcgggacguacggcaccggguccuggccggacggcgccgacaucaaccugaugcccaucuga

SEQ ID NO: 78761 - RNA, 1410 nt, Artificial Sequence; identical to SEQ ID NO: 78351
  derived and/or modified CDS sequence (opt1) from neuraminidase__InfluenzaA__ABC84436

SEQ ID NO: 78762 - RNA, 1410 nt, Artificial Sequence
  derived and/or modified CDS sequence (opt1) from neuraminidase__InfluenzaA__ABC84447
augaaccccaaccagaagaucaucaccaucggcagcgugucccugaccaucgccacgaucugcuuccucaugcagaucgccauccuggucaccaccgugacccugcacuucaagcaguacgagugcaacagcccgcccaacaaccaggugaugcucugcgagcccacgaucaucgagcgcaacaucaccgagaucguccaccugaccaacaccacgaucgagaaggagaucugccccaagcuggcggaguaccggaacugguccaagccgcagugcaacaucaccggguucgcccccuucagcaaggacaacuccauccgccucagcgccggcggggacaucugggugacccgggagcccuacguguccugcgaccccgacaagugcuaccaguucgcccugggccaggggaccacgcugaacaacggccacagcaacgacaccguccacgaccgcaccccguaccggacccuccugaugaacgagcugggcgugcccuuccaccucgggacgcgccaggugugcaucgccugguccagcuccagcugccacgacggcaaggcguggcugcacgucugcgugaccggggacgacgagaacgccaccgccuccuucaucuacaacggccggcugguggacagcaucggguccuggagcaagaagauccuccgcacccaggaguccgagugcgucugcaucaacggcacgugcaccguggugaugaccgacggcagcgccuccgggaaggcggacaccaagauccuguucaucgaggagggcaagaucguccacaucagcacgcugagcggguccgcccagcacguggaggagugcagcugcuacccccgguaccccggcgugcgcugcgucugccgggacaacuggaagggcuccaaccgcccgaucguggacaucaacgugaaggacuacagcaucgucuccagcuacgugugcuccgggcucgugggcgacacgccccggaagaacgacagcuucuccagcucccacugccuggaccccaacaacgaggagggcgggcacggggucaagggcugggccuucgacgacggcaacgacguguggauggggcgcaccaucagcgagaagcugcgguccggcuacgagaccuucaaggucaucgagggguggagcaagcccaacuccaagcuccagaccaaccgccaggugaucguggagcggggcaaccgcagcggguacuccggcaucuucagcgucgagggcaaguccugcaucaaccggugcuucuacguggagcugauccgcgggcggaaggaggagaccgaggugugguggaccagcaacagcaucgucguguucugcggcaccuccgggacguacggcaccgggagcuggccggacggcgccgacaucaaccugaugcccaucuga

SEQ ID NO: 78763 - RNA, 1410 nt, Artificial Sequence; identical to SEQ ID NO: 78738
  derived and/or modified CDS sequence (opt1) from neuraminidase__InfluenzaA__ABC84501

SEQ ID NO: 78764 - RNA, 1410 nt, Artificial Sequence; identical to SEQ ID NO: 78738
  derived and/or modified CDS sequence (opt1) from neuraminidase__InfluenzaA__ABC84512

SEQ ID NO: 78765 - RNA, 1410 nt, Artificial Sequence
  derived and/or modified CDS sequence (opt1) from neuraminidase__InfluenzaA__ABC84523
augaaccccaaccagaagaucaucaccaucggcagcgugucccugaccaucagcacgaucugcuucuucaugcagaucgccauccucaucaccaccgucacccugcacuucaagcaguacgaguucaacuccccgcccaacaaccaggugaugcugugcgagcccacgaucaucgagcgcaacaucaccgagaucguguaccucaccaacaccacgaucgagaaggagaucugccccaagcuggccgaguaccggaacuggagcaagccgcagugcaacaucaccggguucgcgcccuucuccaaggacaacagcauccgccuguccgccggcggggacaucugggucacccgggagcccuacgugagcugcgaccccgacaagugcuaccaguucgcccucggccaggggaccacgcugaacaacgugcacuccaacgacaccguccacgaccgcaccccguaccggacccugcucaugaacgagcugggcgugcccuuccaccugggcacgaagcaggucugcaucgccuggagcuccagcuccugccacgacgggaaggccuggcuccacgugugcgugaccggcgacgacaagaacgcgaccgccagcuucaucuacaacgggcgccuggccgacuccaucgugagcugguccaaggagauccugcggacccaggagagcgagugcgucugcaucaacggcacgugcaccguggugaugaccgacggguccgccagcggcaaggcggacaccaagauccucuucaucgaggagggcaagaucguccacacgagcacccuguccgggagcgcccagcacguggaggagugcuccugcuacccccgcuaccccggcgugcggugcgucugccgcgacaacuggaaggggagcaaccggccgaucguggacaucaacaucaaggacuacuccaucgugagcuccuacgucugcagcggccuggugggcgacacgccccgcaagaacgacuccagcuccagcucccacugccucgaccccaacaacgaggagggcgggcacggggugaagggcugggccuucgacgacgggaacgacgucuggaugggccggaccaucagcgagaagcugcgcuccggcuacgagaccuucaaggugaucgagggguggagcaaccccaacuccaagcugcagaucaaccggcaggucaucguggaccgcggcaaccggagcggguacuccggcaucuucagcguggagggcaagagcugcaucaaccgcugcuucuacgucgagcucauccgggggcgcaaggaggagaccgaggugcuguggaccuccaacagcaucguggucuucugcggcaccuccgggacguacggcaccgggagcuggccggacggcgccgacaucaaccugaugcccaucuga

SEQ ID NO: 78766 - RNA, 1410 nt, Artificial Sequence
  derived and/or modified CDS sequence (opt1) from neuraminidase__InfluenzaA__ABC84545
augaaccccaaccagaagaucaucaccaucggcagcgugucccugaccaucgccacgaucugcuuccucaugcagaucgccauccuggucaccaccgugacccugcacuucaagcaguacgagugcgacagcccggcgaacaaccaggugaugcccugcgagcccaucaucaucgagcgcaacaucacggagaucgucuaccucaccaacaccaccaucgagaaggagaucugccccaagcugguggaguaccggaacugguccaagccgcagugcaagaucacgggguucgcccccuucagcaaggacaacuccauccgccugagcgccggcggggacaucugggugacccgggagcccuacgucuccugcgaccccggcaagugcuaccaguucgcccucgggcagggcaccacccuggacaacaagcacagcaacgacacgauccacgaccgcaccccgcaccggacccugcucaugaacgagcugggcgugcccuuccaccuggggacccgccaggugugcaucgccugguccagcuccagcugccacgacggcaaggcguggcuccacgucugcgugacgggguacgacaagaacgccaccgccuccuucaucuacgacggccggcugguggacagcaucggguccuggagccagaacauccugcgcacccaggaguccgagugcgucugcaucaacgggaccugcacgguggugaugaccgacggcagcgccuccggcagcgcggacaccaagauccucuucaucgaggagggcaagaucguccacaucagcccccuguccgggagcgcccagcacguggaggagugcuccugcuacccccgguacccgggcgugcgcugcaucugccgggacaacuggaagggcagcaaccgccccgucguggacaucaacgugaaggaccacuccaucgacagcuccuacgucugcagcgggcuggugggcgacacgccccggaacaacgaccgcuccagcaacuccuacugccggaaccccaacaacgagaaggggaaccacggcgugaaggggugggccuucgacgacggcaacgacgucuggaugggccgcaccaucagcgaggacucccggagcggguacgagaccuucaaggugaucggcgggugguccaccccgaacagcaagcuccagaucaaccgccaggucaucguggacuccgacaaccggagcggcuacuccgggaucuucagcguggagggcaagagcugcaucaaccgcugcuucuacgucgagcugauccggggccgcgagcaggagacccgcgugugguggacguccaacagcaucguggucuucugcgggaccuccggcaccuacgggaccggcagcuggcccgacggggccgacaucaaccugaugcccaucuga

SEQ ID NO: 78767 - RNA, 1410 nt, Artificial Sequence; identical to SEQ ID NO: 78754
  derived and/or modified CDS sequence (opt1) from neuraminidase__InfluenzaA__ABC84574

SEQ ID NO: 78768 - RNA, 1410 nt, Artificial Sequence; identical to SEQ ID NO: 78754
  derived and/or modified CDS sequence (opt1) from neuraminidase__InfluenzaA__ABC85757

SEQ ID NO: 78769 - RNA, 1410 nt, Artificial Sequence; identical to SEQ ID NO: 78765
  derived and/or modified CDS sequence (opt1) from neuraminidase__InfluenzaA__ABC85768

SEQ ID NO: 78770 - RNA, 1410 nt, Artificial Sequence; identical to SEQ ID NO: 78754
  derived and/or modified CDS sequence (opt1) from neuraminidase__InfluenzaA__ABC85779

SEQ ID NO: 78771 - RNA, 1410 nt, Artificial Sequence; identical to SEQ ID NO: 78754
  derived and/or modified CDS sequence (opt1) from neuraminidase__InfluenzaA__ABC85790

SEQ ID NO: 78772 - RNA, 1410 nt, Artificial Sequence; identical to SEQ ID NO: 78738
  derived and/or modified CDS sequence (opt1) from neuraminidase__InfluenzaA__ABC85801

SEQ ID NO: 78773 - RNA, 1410 nt, Artificial Sequence; identical to SEQ ID NO: 78738
  derived and/or modified CDS sequence (opt1) from neuraminidase__InfluenzaA__ABC85812

SEQ ID NO: 78774 - RNA, 1410 nt, Artificial Sequence; identical to SEQ ID NO: 78765
  derived and/or modified CDS sequence (opt1) from neuraminidase__InfluenzaA__ABC85823

SEQ ID NO: 78775 - RNA, 1410 nt, Artificial Sequence; identical to SEQ ID NO: 78737
  derived and/or modified CDS sequence (opt1) from neuraminidase__InfluenzaA__ABC85834

SEQ ID NO: 78776 - RNA, 1410 nt, Artificial Sequence; identical to SEQ ID NO: 78738
  derived and/or modified CDS sequence (opt1) from neuraminidase__InfluenzaA__ABC85845

SEQ ID NO: 78777 - RNA, 1410 nt, Artificial Sequence; identical to SEQ ID NO: 78765
  derived and/or modified CDS sequence (opt1) from neuraminidase__InfluenzaA__ABC85856

SEQ ID NO: 78778 - RNA, 1410 nt, Artificial Sequence; identical to SEQ ID NO: 78737
  derived and/or modified CDS sequence (opt1) from neuraminidase__InfluenzaA__ABC85867

SEQ ID NO: 78779 - RNA, 1410 nt, Artificial Sequence; identical to SEQ ID NO: 78736
  derived and/or modified CDS sequence (opt1) from neuraminidase__InfluenzaA__ABC85900

SEQ ID NO: 78780 - RNA, 1410 nt, Artificial Sequence
  derived and/or modified CDS sequence (opt1) from neuraminidase__InfluenzaA__ABC85911
augaaccccaaccagaagaucaucaccaucggcagcgugucccugaccaucgccacgaucugcuuccucaugcagaucgccauccuggucaccaccgugacccugcacuucaagcaguacgagugcaacagcccgcccaacaaccaggugaugcucugcgagcccacgaucaucgagcgcaacaucaccgagaucgucuaccugaccaacaccacgaucgagaaggagaucugccccaagcuggcggaguaccggaacugguccaagccgcagugcaacaucaccggguucgcccccuucagcaaggacaacuccauccgccucagcgccggcggggacaucugggugacccgggagcccuacguguccugcgaccccgacaagugcuaccaguucgcccugggccaggggaccacgcugaacaacggccacagcaacgacaccguccacgaccgcaccccguaccggacccuccugaugaacgagcugggcgugcccuuccaccucgggacgcgccaggugugcaucgccugguccagcuccagcugccacgacggcaaggcguggcugcacgucugcgugaccggggacgacgagaacgccaccgccuccuucaucuacaacggccggcugguggacagcaucggguccuggagcaagaagauccuccgcacccaggaguccgagugcgucugcaucaacggcacgugcaccguggugaugaccgacggcagcgccuccgggaaggcggacaccaagauccuguucaucgaggagggcaagaucguccacaucagcacgcugagcggguccgcccagcacguggaggagugcagcugcuacccccgguaccccggcgugcgcugcgucugccgggacaacuggaagggcuccaaccgcccgaucguggacaucaacgugaaggacuacagcaucgucuccagcuacgugugcuccgggcucgugggcgacacgccccggaagaacgacagcuucuccagcucccacugccuggaccccaacaacgaggagggcgggcacggggucaagggcugggccuucgacgacggcaacgacauguggauggggcgcaccaucagcgagaagcugcgguccggcuacgagaccuucaaggugaucgagggguggagcaagcccaacuccaagcuccagaccaaccgccaggucaucguggagcggggcaaccgcagcggguacuccggcaucuucagcguggagggcaaguccugcaucaaccggugcuucuacgucgagcugauccgcgggcggaaggaggagaccgaggugugguggaccagcaacagcaucguggucuucugcggcaccuccgggacguacggcaccgggagcuggccggacggcgccgacaucaaccugaugcccaucuga

SEQ ID NO: 78781 - RNA, 1410 nt, Artificial Sequence
  derived and/or modified CDS sequence (opt1) from neuraminidase__InfluenzaA__ABC85922
augaaccccaaccagaagaucaucaccaucggcagcgugucccugaccaucgccacgaucugcuuccucaugcagaucgccauccuggucaccaccgugacccugcacuucaagcaguacgagugcaacagcccgcccaacaaccaggugaugcucugcgagcccacgaccaucgagcgcaacaucaccgagaucgucuaccugaccaacacgaccaucgagaaggagaucugccccaagcuggcggaguaccggaacugguccaagccgcagugcaacaucaccggguucgcccccuucagcaaggacaacuccauccgccucagcgccggcggggacaucugggugacccgggagcccuacguguccugcgacagcgacaagugcuaccaguucgcccugggccaggggacgacccugaacaacggccacuccaacgacaccguccacgaccgcacccccuaccggacgcuccugaugaacgagcugggcgugccguuccaccucgggacccgccaggugugcaucgccuggagcuccagcuccugccacgacggcaaggcguggcugcacgucugcgugaccggggacgacgagaacgccaccgccagcuucaucuacaacggccggcugguggacuccaucgggagcugguccaagaagauccuccgcacgcaggagagcgagugcgucugcaucaacgggaccugcaccguggugaugaccgacggcuccgccagcgggaaggcggacacgaagauccuguucaucgaggagggcaagaucguccacaucagcacccuguccgggagcgcccagcacguggaggagugcuccugcuacccccgguaccccggcgugcgcugcgucugccgggacaacuggaagggcagcaaccgccccaucguggacaucaacgugaaggacuacuccaucgucagcuccuacgugugcagcgggcucgugggcgacaccccgcggaagaacgacuccuucagcuccagccacugccuggaccccaacaacgaggagggcggccacggggucaagggcugggccuucgacgacggcaacgacguguggauggggcgcaccaucuccgagaagcugcggagcggcuacgagacguucaaggucaucgaggggugguccaagcccaacagcaagcuccagaccaaccgccaggugaucguggagcggggcaaccgcuccggguacagcggcaucuucuccgucgagggcaagagcugcaucaaccggugcuucuacguggagcugauccgcgggcggaaggaggagaccgaggugugguggaccagcaacuccaucgucguguucugcggcacgagcgggaccuacggcaccggguccuggcccgacggcgccgacaucaaccugaugccgaucuga

SEQ ID NO: 78782 - RNA, 1410 nt, Artificial Sequence; identical to SEQ ID NO: 78190
  derived and/or modified CDS sequence (opt1) from neuraminidase__InfluenzaA__ABC85933

SEQ ID NO: 78783 - RNA, 1410 nt, Artificial Sequence
  derived and/or modified CDS sequence (opt1) from neuraminidase__InfluenzaA__ABC85955
augaaccccaaccagaagaucaucaccaucggcagcgugucccugaccaucgccacgaucugcuuccucaugcagaucgccauccuggucaccaccgugacccugcacuucaagcaguacgagugcaacagcccgcccaacaaccaggugaugcucugcgagcccacgaucaucgagcgcaacaucaccgagaucgucuaccugaccaacaccacgaucgagaaggagaucugccccaagcuggcggaguaccggaacugguccaagccgcagugcaacaucaccggguucgcccccuucagcaaggacaacuccauccgccucagcgccggcggggacaucugggugacccgggagcccuacguguccugcgaccccgacaagugcuaccaguucgcccugggccaggggaccacgcugaacaacggccacagcaacgacaccguccacgaccgcaccccguaccggacccuccugaugaacgagcugggcgugcccuuccaccucgggacgcgccaggugugcaucgccugguccagcuccagcugccacgacggcaaggcguggcugcacgucugcgugaccggggacgacgagaacgccaccgccuccuucaucuacaacggccggcugguggacagcaucggguccuggagcaagaagauccuccgcacccaggaguccgagugcgucugcaucaacggcacgugcaccguggugaugaccgacggcagcgccuccgggaaggcggacaccaagauccuguucaucgaggagggcaagaucguccacaucagcacgcugagcggguccgcccagcacguggaggagugcagcugcuacccccgguaccccggcgugcgcugcgucugccgggacaacuggaagggcuccaaccgcccgaucguggacaucaacgugaaggacuacagcaucgucuccagcuacgugugcuccgggcucgugggcgacacgccccggaagaacgacagcuucuccagcucccacugccuggaccccaacaacgaggagggcgggcacggggucaagggcugggccuucgacgacggcaacgacguguggauggggcgcaccaucagcgagaagcugcgguccggcuacgagaccuucaaggucaucgagggguggagcaagcccaacuccaagcuccagaccaaccgccaggugaucguggagcggggcaaccgcagcggguacuccggcaucuucagcgucgagggcaaguccugcaucaaccggugcuucuacguggagcugauccgcgggcggaaggaggagaccgaggugugguggaccagcaacagcaucgucguguucugcggcaccuccgggacguacggcaccgggagcuggccggacggcgccgacaucaaccgcaugcccaucuga

SEQ ID NO: 78784 - RNA, 1410 nt, Artificial Sequence; identical to SEQ ID NO: 78190
  derived and/or modified CDS sequence (opt1) from neuraminidase__InfluenzaA__ABC85966

SEQ ID NO: 78785 - RNA, 1410 nt, Artificial Sequence; identical to SEQ ID NO: 78190
  derived and/or modified CDS sequence (opt1) from neuraminidase__InfluenzaA__ABC85977

SEQ ID NO: 78786 - RNA, 1410 nt, Artificial Sequence
  derived and/or modified CDS sequence (opt1) from neuraminidase__InfluenzaA__ABC85988
augaaccccaaccagaagaucaucaccaucggcagcgugucccugaccaucgccacgaucugcuuccucaugcagaucgccauccuggucaccaccgugacccugcacuucaagcaguacgagugcaacagcccgcccaacaaccaggugaugcucugcgagcccacgaucaucgagcgcaacaucaccgagaucgucuaccugaccaacaccacgaucgagaaggggaucugccccaagcuggcggaguaccggaacugguccaagccgcagugcaacaucaccggcuucgcccccuucagcaaggacaacuccauccgccucagcgccgggggcgacaucugggugacccgggagcccuacguguccugcgaccccgacaagugcuaccaguucgcccuggggcagggcaccacgcugaacaacggccacagcaacgacaccguccacgaccgcaccccguaccggacccuccugaugaacgagcugggggugcccuuccaccucggcacgcgccaggugugcaucgccugguccagcuccagcugccacgacgggaaggcguggcugcacgucugcgugaccggcgacgacgagaacgccaccgccuccuucaucuacaacgggcggcugguggacagcaucggcuccuggagcaagaagauccuccgcacccaggaguccgagugcgucugcaucaacggcacgugcaccguggugaugaccgacgggagcgccuccggcaaggcggacaccaagauccuguucaucgaggaggggaagaucguccacaucagcacgcugagcggcuccgcccagcacguggaggagugcagcugcuacccccgguaccccggcgugcgcugcgucugccgggacaacuggaagggguccaaccgcccgaucguggacaucaacgugaaggacuacagcaucgucuccagcuacgugugcuccggccucgugggggacacgccccggaagaacgacagcuucuccagcucccacugccuggaccccaacaacgaggagggcgggcacggcgucaagggcugggccuucgacgacgggaacgacguguggaugggccgcaccaucagcgagaagcugcgguccggguacgagaccuucaaggucaucgagggcuggagcaagcccaacuccaagcuccagaccaaccgccaggugaucguggagcgggggaaccgcagcggcuacuccggcaucuucagcgucgaggggaaguccugcaucaaccggugcuucuacguggagcugauccgcggccggaaggaggagaccgaggugugguggaccagcaacagcaucgucguguucugcgggaccuccggcacguacgggaccggcagcuggccggacggcgccgacaucaaccugaugcccaucuga

SEQ ID NO: 78787 - RNA, 1410 nt, Artificial Sequence; identical to SEQ ID NO: 78351
  derived and/or modified CDS sequence (opt1) from neuraminidase__InfluenzaA__ABC85999

SEQ ID NO: 78788 - RNA, 1410 nt, Artificial Sequence; identical to SEQ ID NO: 78351
  derived and/or modified CDS sequence (opt1) from neuraminidase__InfluenzaA__ABC86010

SEQ ID NO: 78789 - RNA, 1410 nt, Artificial Sequence
  derived and/or modified CDS sequence (opt1) from neuraminidase__InfluenzaA__ABC86021
augaaccccaaccagaagaucaucaccaucggcagcgugucccugaccaucagcacgaucugcuucuucaugcagaucgccauccucaucaccaccgucacccugcacuucaagcaguacgaguucaacuccccgcccaacaaccaggugaugcugugcgagcccacgaucaucgagcgcaacaucaccgagaucguguaccucaccaacaccacgaucgagaaggagaucugccccaagcuggccgaguaccggaacuggagcaagccgcagugcgacaucaccggguucgcgcccuucuccaaggacaacagcauccgccuguccgccggcggggacaucugggucacccgggagcccuacgugagcugcgaccccgacaagugcuaccaguucgcccucggccaggggaccacgcugaacaacgugcacuccaacgacaccguccacgaccgcaccccguaccggacccugcucaugaacgagcugggcgugcccuuccaccugggcacgaagcaggucugcaucgccuggagcuccagcuccugccacgacgggaaggccuggcuccacgugugcgugaccggcgacgacaagaacgcgaccgccagcuucaucuacaacgggcgccugguggacuccaucgucagcugguccaaggagauccugcggacccaggagagcgagugcgugugcaucaacggcacgugcaccguggucaugaccgacggguccgccagcggcaaggccgacaccaagauccucuucaucgaggagggcaagaucgugcacacgagcacccuguccgggagcgcgcagcacguggaggagugcuccugcuacccccgcuaccccggcguccggugcgugugccgcgacaacuggaaggggagcaaccggccgaucguggacaucaacaucaaggacuacuccaucgucagcuccuacgugugcagcggccuggugggcgacacgccccgcaagaacgacuccagcuccagcucccacugccucgaccccaacaacgaggagggcgggcacggggucaagggcugggccuucgacgacgggaacgacguguggaugggccggaccaucagcgagaagcugcgcuccggcuacgagaccuucaaggucaucgagggguggagcaaccccaacuccaagcugcagaucaaccgccaggugaucguggaccggggcaaccggagcggguacuccggcaucuucagcgucgagggcaagagcugcaucaaccgcugcuucuacguggagcucauccgggggcgcaaggaggagaccgaggugcuguggaccuccaacagcaucgucguguucugcggcaccuccgggacguacggcaccgggagcuggccggacggcgccaacaucaaccugaugcccaucuga

SEQ ID NO: 78790 - RNA, 1410 nt, Artificial Sequence; identical to SEQ ID NO: 78615
  derived and/or modified CDS sequence (opt1) from neuraminidase__InfluenzaA__ABC86127

SEQ ID NO: 78791 - RNA, 1410 nt, Artificial Sequence; identical to SEQ ID NO: 78698
  derived and/or modified CDS sequence (opt1) from neuraminidase__InfluenzaA__ABC86140

SEQ ID NO: 78792 - RNA, 1410 nt, Artificial Sequence; identical to SEQ ID NO: 78508
  derived and/or modified CDS sequence (opt1) from neuraminidase__InfluenzaA__ABC86151

SEQ ID NO: 78793 - RNA, 1413 nt, Artificial Sequence
  derived and/or modified CDS sequence (opt1) from neuraminidase__InfluenzaA__ABC86240
augaaccccaaccagaagaucaucaccaucggcagcaucuccguggccaucgggaucaucagccugauccuccagaucggcaacaucaucuccaucugggccagccacuccauccagaccgggagccagaacuacacgggcaucugcaaccagaagaucaucaccuacgagaaccgcaccugggucaaccagaccuacgugaacaucaacaacacgaacguggucgcggggaaggacaagaccuccaugacccuggccggcaacagcucccugugcccgauccggggcugggccaucuacaccaaggacaacagcauccgcaucggguccaagggcgacguguucgugauccgggagcccuucaucagcugcucccaccucgagugccgcacguucuuccugacccagggggcccugcucaacgacaagcacagcaacggcaccaucaaggaccggucccccuuccgcgcccugaugagcugcccccugggggaggcgccgucccccuacaacagccgguucgaguccgucgccuggagcgccagcgccugccacgacggccucggcuggcugaccaucgggaucuccggccccgacaacggggcgguggccgugcugaaguacaacggcaucaucacggagaccaucaagagcuggaagaagcagauccuccgcacccaggaguccgagugcgucugcgugaacggcagcugcuucaccaucaugacggacgggcccuccaaccgggccgccagcuaccgcaucuucaagaucgagaagggccgggugaccaaguccaucgagcuggacgccccgaacuaccacuacgaggagugcagcugcuaccccgacaccgggaccgucaugugcgugugccgcgacaacuggcacggcuccaaccggcccugggugagcuucaaccagaaccuggacuaccagaucggguacaucugcuccggcgucuucggcgacaacccccgcccgaaggacggggagggcagcugcaaccccgugacgguggacggggcggacggcgucaagggguucuccuaccgguacggcaacggcguguggaucgggcgcaccaagagcaaccggcuccgcaagggcuucgagaugaucugggaccccaacggguggaccgacaccgacuccgacuucagcaugaagcaggacguggucgccaugacggacugguccggcuacagcggguccuucgugcagcaccccgagcugaccggccuggacugcaugcggccgugcuucuggguggagcucguccgcggccugccccgggagaacaccaccaucuggacgagcgggagcuccaucagcuucugcggcgugaacuccgagaccgccaacuggagcuggcccgacggggccgagcugcccuucaccaucgacaaguga

SEQ ID NO: 78794 - RNA, 1410 nt, Artificial Sequence
  derived and/or modified CDS sequence (opt1) from neuraminidase__InfluenzaA__ABC97377
augaaccccaaccagaagaucaucaccaucggcagcgugucccugaccaucgccacgaucugcuuccucaugcagaucgccauccuggucaccaccgugacccugcacuucaagcaguacgagugcgacagcccggcgaacaaccaggugaugcccugcgagcccaucaucaucgagcgcaacaucacggagaucgucuaccucaccaacaccaccaucgagaaggagaucugccccaagcugguggaguaccggaacugguccaagccgcagugcaagaucacgggguucgcccccuucagcaaggacaacuccauccgccugagcgccggcggggacaucugggugacccgggagcccuacgucuccugcgaccccggcaagugcuaccaguucgcccucgggcagggcaccacccuggacaacaagcacagcaacgacacgauccacgaccgcaccccgcaccggacccugcucaugaacgagcugggcgugcccuuccaccuggggacccgccaggugugcaucgccugguccagcuccagcugccacgacggcaaggcguggcuccacgucugcgugacgggguacgacaagaacgccaccgccuccuucaucuacgacggccggcugguggacagcaucggguccuggagccagaacauccugcgcacccaggaguccgagugcgucugcaucaacgggaccugcacgguggugaugaccgacggcagcgccuccggcagcgcggacaccaagauccucuucaucgaggagggcaagaucguccacaucagcccccuguccgggagcgcccagcacguggaggagugcuccugcuacccccgguacccgggcgugcgcugcaucugccgggacaacuggaagggcagcaaccgccccgucguggacaucaacgugaaggacuacuccaucgacagcuccuacgucugcagcgggcuggugggcgacacgccccggaacaacgaccgcuccagcaacuccuacugccggaaccccaacaacgagaaggggaaccacggcgugaaggggugggccuucgacgacggcaacgacgucuggaugggccgcaccaucagcgaggacucccggagcggguacgagaccuucaaggugaucggcgggugguccaccccgaacagcaagcuccagaucaaccgccaggucaucguggacuccgacaaccggagcggcuacuccgggaucuucagcguggagggcaagagcugcaucaaccgcugcuucuacgucgagcugauccggggccgcgagcaggagacccgcgugugguggacguccaacagcaucguggucuucugcgggaccuccggcaccuacgggaccggcagcuggcccgacggggccgacaucaaccugaugcccaucuga

SEQ ID NO: 78795 - RNA, 1410 nt, Artificial Sequence; identical to SEQ ID NO: 78161
  derived and/or modified CDS sequence (opt1) from neuraminidase__InfluenzaA__ABD15452

SEQ ID NO: 78796 - RNA, 1410 nt, Artificial Sequence; identical to SEQ ID NO: 78249
  derived and/or modified CDS sequence (opt1) from neuraminidase__InfluenzaA__ABD15463

SEQ ID NO: 78797 - RNA, 1410 nt, Artificial Sequence; identical to SEQ ID NO: 78169
  derived and/or modified CDS sequence (opt1) from neuraminidase__InfluenzaA__ABD15474

SEQ ID NO: 78798 - RNA, 1410 nt, Artificial Sequence
  derived and/or modified CDS sequence (opt1) from neuraminidase__InfluenzaA__ABD15485
augaaccccaaccagaagaucaucaccaucggcagcgugucccugaccaucgccacgaucugcuuccucaugcagaucgccauccuggucaccaccgugacccugcacuucaagcagcacgagugcaacagcccgcccaacaaccaggugaugcucugcgagcccacgaucaucgagcgcaacaucaccgagaucgucuaccugaccaacaccacgaucgagaaggagaucugccccaagcuggcggaguaccggaacugguccaagccgcagugcaacaucaccggguucgcccccuucagcaaggacaacuccauccgccucagcgccggcggggacaucugggugacccgggagcccuacguguccugcgaccccgacaagugcuaccaguucgcccugggccaggggaccacgcugaacaacggccacagcaacgacaccguccacgaccgcaccccguaccggacccuccugaugaacgagcugggcgugcccuuccaccucgggacgcgccaggugugcaucgccugguccagcuccagcugccacgacggcaaggcguggcugcacgucugcgugaccggggacgacaagaacgccaccgccuccuucaucuacaacggccggcugguggacagcaucggguccuggagcaagaagauccuccgcacccaggaguccgagugcgucugcaucaacggcacgugcaccguggugaugaccgacggcagcgccuccgggaaggcggacaccaagauccuguucaucgaggagggcaagaucguccacaucagcacgcugagcggguccgcccagcacguggaggagugcagcugcuacccccgguaccccggcgugcgcugcgucugccgggacaacuggaagggcuccaaccgcccgaucguggacaucaacgugaaggacuacagcaucgucuccagcuacgugugcuccgggcucgugggcgacacgccccggaagaacgacagcuucuccagcucccacugccuggaccccaacaacgaggagggcgggcacggggucaagggcugggccuucgacgacggcaacgacguguggauggggcgcaccaucagcgagaagcugcgguccggcuacgagaccuucaaggucaucgagggguggagcaagcccaacuccaagcuccagaucaaccgccaggugaucguggagcggggcaaccgcagcggguacuccggcaucuucagcgucgagggcaaguccugcaucaaccggugcuucuacguggagcugauccgcgggcggaaggaggagaccgaggugugguggaccagcaacagcaucgucguguucugcggcaccuccgggaccuacggcacggggagcuggccggacggcgccaacaucaaccugaugcccaucuga

SEQ ID NO: 78799 - RNA, 1410 nt, Artificial Sequence; identical to SEQ ID NO: 78249
  derived and/or modified CDS sequence (opt1) from neuraminidase__InfluenzaA__ABD15496

SEQ ID NO: 78800 - RNA, 1410 nt, Artificial Sequence; identical to SEQ ID NO: 78169
  derived and/or modified CDS sequence (opt1) from neuraminidase__InfluenzaA__ABD15507

SEQ ID NO: 78801 - RNA, 1413 nt, Artificial Sequence
  derived and/or modified CDS sequence (opt1) from neuraminidase__InfluenzaA__ABD15518
augaaccccaaccagaagaucaucaccaucggcagcaucuccaucgccaucgggaucaucagccugaugcuccagaucggcaacaucaucuccaucugggccagccacuccauccagaccgggagccagaaccacacgggcaucugcaaccagcgcaucaucaccuacgagaacuccaccugggugaaccacaccuacgucaacaucaacaacacgaacgugguggcggggaaggacaagaccagcgucacccuggccggcaacuccagccugugcuccaucagcggcugggccaucuacaccaaggacaacuccauccggaucgggagcaagggcgacguguucgugauccgcgagccguucaucuccugcagccaccucgagugccggacguucuuccugacccagggggcccugcucaacgacaagcacuccaacggcaccgucaaggaccgcagccccuaccgggcccugauguccugcccccugggggaggcgcccagcccguacaacagcaaguucgaguccguggccuggagcgccuccgccugccacgacggcaugggcuggcucaccaucgggaucagcggccccgacaacggggcgguggccguccugaaguacaacggcaucaucacggagaccaucaaguccuggaagaagcgcauccugcggacccaggagagcgagugcgugugcgugaacggcuccugcuucaccaucaugacggacgggcccagcaacggcggggccuccuacaagaucuucaagaucgagaagggcaaggucaccaagagcaucgagcucaacgcccccaacuuccacuacgaggagugcuccugcuacccggacaccgggaccgugaugugcgugugccgcgacaacuggcacggcagcaaccggcccugggucuccuucaaccagaaccuggacuaccagaucggcuacaucugcagcgggguguucggcgacaacccccgccccaaggacgggaagggcuccugcaacccggugacggucgacggggccgacggcgugaagggcuucagcuacaaguacgggaacggcguguggaucgggcggaccaaguccaaccgccugcggaagggcuucgagaugaucugggaccccaacggguggaccgacaccgacagcgacuucuccgucaagcaggacgugguggcgaucacggacuggagcggcuacagcggcuccuucguccagcaccccgagcucaccgggcuggacugcauccgccccugcuucuggguggagcugguccggggccucccgcgcgagaacaccaccaucuggacgagcggguccagcaucuccuucugcggcguggacagcgacaccgccaacugguccuggcccgacggcgccgagcugcccuucaccaucgacaaguga

SEQ ID NO: 78802 - RNA, 1410 nt, Artificial Sequence; identical to SEQ ID NO: 78351
  derived and/or modified CDS sequence (opt1) from neuraminidase__InfluenzaA__ABD15529

SEQ ID NO: 78803 - RNA, 1410 nt, Artificial Sequence; identical to SEQ ID NO: 78538
  derived and/or modified CDS sequence (opt1) from neuraminidase__InfluenzaA__ABD15551

SEQ ID NO: 78804 - RNA, 1410 nt, Artificial Sequence
  derived and/or modified CDS sequence (opt1) from neuraminidase__InfluenzaA__ABD15562
augaaccccaaccagaagaucaucaccaucggcagcgugucccugaccaucgccacgaucugcuuccucaugcagaucgccauccuggucaccaccgugacccugcacuucaagcaguacgagugcagcuccccgcccaacaaccaggugaugcucugcgagcccacgaucaucgagcgcaacaucaccgagaucgucuaccugaccaacaccacgaucgagaaggagaucugccccaagcuggcggaguaccggaacuggagcaagccgcagugcaagaucaccggguucgcccccuucuccaaggacaacagcauccgccucuccgccggcggggacaucugggugacccgggagcccuacgugagcugcgaccccgacaagugcuaccaguucgcccugggccaggggaccacgcugaacaaccgccacuccaacgacaccguccacgaccggaccccguaccgcacccuccugaugaacgagcugggcgugcccuuccaccucggcacgaagcaggucugcaucgccuggagcuccagcuccugccacgacgggaaggcguggcugcacgugugcgugaccggccacgacgagaacgccaccgccagcuucaucuacgacgggcggcugguggacuccaucggcagcugguccaagaagauccuccgcacccaggagagcgagugcgucugcaucaacgggacgugcaccaucgugaugaccgacggcuccgccagcggccgggcggacaccaagauccuguucaucgaggaggggaagaucgugcacaucagcccccuguccggcagcgcccagcacgucgaggagugcuccugcuacccccgcuacccgggggugcggugcgugugccgcgacaacuggaagggcagcaaccggcccaucgucgacaucaacgugaaggacuacuccaucgugagcuccuacgucugcagcggccucgugggggacacgccccgcaagaacgacuccagcuccagcucccacugccugaaccccaacaacgaggagggcgggcacggcgugaaggggugggccuucgacgacggcaacgacgucuggaugggccggaccaucagcgagaaguuccgcuccggguacgagaccuucaaggugaucgagggcuggagcaagccgaacuccaagcugcagaucaaccggcaggucaucguggaccgcgggaaccggagcggcuacuccgggaucuucagcguggagggcaagagcugcaucaaccgcugcuucuacgucgagcucauccggggccgcaagcaggagaccgaggugugguggacguccaacagcaucguggucuucugcgggaccuccggcaccuacgggaccggcagcuggcccgacggggccgacaucaaccugaugcccaucuga

SEQ ID NO: 78805 - RNA, 1410 nt, Artificial Sequence
  derived and/or modified CDS sequence (opt1) from neuraminidase__InfluenzaA__ABD15573
augaaccccaaccagaagaucaucaccaucggcagcgugucccugaccaucgccacgaucugcuuccucaugcagaucgccauccuggucaccaccgugacccugcacuucaagcaguacgagugcaacagcccgcccaacaaccaggugaugcucugcgagcccacgaucaucgagcgcaacaucaccgagaucgucuaccugaccaacaccacgaucgagaaggagaucugccccaagcuggcggaguaccggaacugguccaagccgcagugcaagaucaccggguucgcccccuucagcaaggacaacuccauccgccucagcgccggcggggacaucugggugacccgggagcccuacguguccugcgaccccgacaagugcuaccaguucgcccugggccaggggaccacgcugaacaacggccacagcaacgacaccguccacgaccgcaccccguaccggacccuccugaugaacgagcugggcgugcccuuccaccucgggacgaagcaggucugcauggccugguccagcuccagcugccacgacggcaaggcguggcugcacgugugcgugaccgggcacgacgagaacgccaccgccuccuucaucuacgacggccgccugguggacagcaucggguccuggagcaagaagauccuccggacccaggaguccgagugcgucugcaucaacggcacgugcaccguggugaugaccgacggcagcgccuccgggcgcgcggacaccaagauccuguucaucgaggagggcaagaucguccacaucagccagcugagcggguccgcccagcacguggaggagugcagcugcuacccccgguaccccggcgugcgcugcgucugccgggacaacuggaagggcuccaaccgcccgaucguggacaucaacgugaaggaccacagcaucgucuccagcuacgugugcuccgggcucgugggcgacacgccccggaagaacgacagcuccagcuccagccacugccugaaccccaacaacgaggagggcgggcacggggucaagggcugggccuucgacgacggcaacgacguguggauggggcgcaccaucuccgagaagcugcggagcggcuacgagaccuucaaggucaucgaggggugguccaagcccaacagcaagcuccagaucaaccgccaggugaucguggaccggggcaaccgcuccggguacagcggcaucuucuccgucgagggcaagagcugcaucaaccggugcuucuacguggagcugauccgcgggcggaagcaggagaccgaggugugguggacgagcaacuccaucgucguguucugcggcaccagcgggaccuacggcaccggguccuggccggacggcgccgacaucaaccugaugcccaucuga

SEQ ID NO: 78806 - RNA, 1410 nt, Artificial Sequence
  derived and/or modified CDS sequence (opt1) from neuraminidase__InfluenzaA__ABD15584
augaaccccaaccagaagaucaucaccaucggcagcgugucccugaccaucgccacgaucugcuuccucaugcagaucgccauccuggucaccaccgugacccugcacuucaagcaguacgagugcagcuccccgcccaacaaccaggugaugcucugcgagcccacgaucaucgagcgcaacaucaccgagaucgucuaccugaccaacaccacgaucgagaaggagaucugccccaagcuggcggaguaccggaacuggagcaagccgcagugcaagaucaccggguucgcccccuucuccaaggacaacagcauccgccucuccgccggcggggacaucugggugacccgggagcccuacgugagcugcgaccccgacaagugcuaccaguucgcccugggccaggggaccacgcugaacaaccgccacuccaacgacaccguccacgaccggaccccguaccgcacccuccugaugaacgagcugggcgugcccuuccaccucggcacgaagcaggucugcaucgccuggagcuccagcuccugccacgacgggaaggcguggcugcacgugugcgugaccggccacgacgagaacgccaccgccagcuucaucuacgacgggcggcugguggacuccaucggcagcugguccaagaagauccuccgcacccaggagagcgagugcgucugcaucaacgggacgugcaccguggugaugaccgacggcuccgccagcggccgggcggacaccaagauccuguucaucgaggaggggaagaucguccacaucagcccccuguccggcagcgcccagcacguggaggagugcuccugcuacccccgcuacccgggggugcggugcgucugccgcgacaacuggaagggcagcaaccggcccaucguggacaucaacgugaaggacuacuccaucgucagcuccuacgugugcagcggccucgugggggacacgccccgcaagaacgacuccagcuccagcucccacugccugaaccccaacaacgaggagggcgggcacggcgucaaggggugggccuucgacgacgagaacgacguguggaugggccggaccaucagcgagaaguuccgcuccggcuacgagaccuucaaggucaucgagggguggagcaagccgaacuccaagcugcagaucaaccgccaggugaucguggaccggggcaaccggagcggguacuccggcaucuucagcgucgagggcaagagcugcaucaaccgcugcuucuacguggagcucauccgggggcgcaagcaggagaccgaggugugguggacguccaacagcaucaucgucuucugcggcaccuccgggaccuacggcaccgggagcuggcccgacggcgccgacaucaaccugaugcccaucuga

SEQ ID NO: 78807 - RNA, 1410 nt, Artificial Sequence; identical to SEQ ID NO: 78538
  derived and/or modified CDS sequence (opt1) from neuraminidase__InfluenzaA__ABD15595

SEQ ID NO: 78808 - RNA, 1410 nt, Artificial Sequence; identical to SEQ ID NO: 78538
  derived and/or modified CDS sequence (opt1) from neuraminidase__InfluenzaA__ABD15606

SEQ ID NO: 78809 - RNA, 1410 nt, Artificial Sequence; identical to SEQ ID NO: 78538
  derived and/or modified CDS sequence (opt1) from neuraminidase__InfluenzaA__ABD15617

SEQ ID NO: 78810 - RNA, 1410 nt, Artificial Sequence; identical to SEQ ID NO: 78597
  derived and/or modified CDS sequence (opt1) from neuraminidase__InfluenzaA__ABD15639

SEQ ID NO: 78811 - RNA, 1410 nt, Artificial Sequence; identical to SEQ ID NO: 78754
  derived and/or modified CDS sequence (opt1) from neuraminidase__InfluenzaA__ABD15650

SEQ ID NO: 78812 - RNA, 1410 nt, Artificial Sequence; identical to SEQ ID NO: 78277
  derived and/or modified CDS sequence (opt1) from neuraminidase__InfluenzaA__ABD15661

SEQ ID NO: 78813 - RNA, 1410 nt, Artificial Sequence; identical to SEQ ID NO: 78754
  derived and/or modified CDS sequence (opt1) from neuraminidase__InfluenzaA__ABD15683

SEQ ID NO: 78814 - RNA, 1410 nt, Artificial Sequence; identical to SEQ ID NO: 78277
  derived and/or modified CDS sequence (opt1) from neuraminidase__InfluenzaA__ABD15694

SEQ ID NO: 78815 - RNA, 1410 nt, Artificial Sequence; identical to SEQ ID NO: 78754
  derived and/or modified CDS sequence (opt1) from neuraminidase__InfluenzaA__ABD15705

SEQ ID NO: 78816 - RNA, 1410 nt, Artificial Sequence; identical to SEQ ID NO: 78754
  derived and/or modified CDS sequence (opt1) from neuraminidase__InfluenzaA__ABD15727

SEQ ID NO: 78817 - RNA, 1410 nt, Artificial Sequence
  derived and/or modified CDS sequence (opt1) from neuraminidase__InfluenzaA__ABD15749
augaaccccaaccagaagaucaucaccaucggcagcgugucccugaccaucgccacgaucugcuuccucaugcagaucgccguccuggugaccaccgugacccugcacuucaagcaguacgagugcaacagcccgcccaacaaccaggucaugcucugcgagcccacgaucaucgagcgcaacaucaccgagaucguguaccugaccaacaccacgaucgagaaggagaucugccccaagcuggcggaguaccggaacugguccaagccgcagugcaacaucaccggguucgcccccuucagcaaggacaacuccauccgccucagcgccggcggggacaucugggugacccgggagcccuacgucuccugcgaccccgacaagugcuaccaguucgcccugggccaggggaccacgcugaacaacggccacagcaacgacaccgugcacgaccgcaccccguaccggacccuccugaugaacgagcugggcgugcccuuccaccucgggacgaagcaggucugcaucgccugguccagcuccagcugccacgacggcaaggcguggcugcacgugugcgugaccggggacgacgagaacgccaccgccuccuucaucuacaacggccgccuggucgacagcaucggguccuggagcaagaagauccuccggacccaggaguccgagugcgugugcaucaacggcacgugcaccguggucaugaccgacggcagcgccuccgggaaggcggacaccaagauccuguucaucgaggagggcaagaucgugcacacgagccugcucagcggguccgcccagcacguggaggagugcagcugcuacccccgcuaccccggcguccggugcgugugccgcgacaacuggaagggcuccaaccggccgaucguggacaucaacgucaaggacuacagcaucguguccagcuacgugugcuccgggcuggucggcgacacgccccgcaagaacgacagcuccagcuccagccacugccuggaccccaacaacgaggagggcgggcacggggugaagggcugggccuucgacgacggcaacgacgucuggauggggcggaccaucuccgagaagcuccgcagcggcuacgagaccuucaaggugaucgaggggugguccaagcccaacagcaagcugcagaucaaccgccaggugaucgucgaccggggcaaccgguccggguacagcggcaucuucuccguggagggcaagagcugcaucaaccgcugcuucuacguggagcugauccgggggcgcaagcaggagaccgagguccucuggaccagcaacuccaucgugguguucugcggcaccagcgggaccuacggcacgggguccuggccggacggcgccgacaucaaccugaugcccaucuga

SEQ ID NO: 78818 - RNA, 1410 nt, Artificial Sequence; identical to SEQ ID NO: 78817
  derived and/or modified CDS sequence (opt1) from neuraminidase__InfluenzaA__ABD15760

SEQ ID NO: 78819 - RNA, 1410 nt, Artificial Sequence; identical to SEQ ID NO: 78754
  derived and/or modified CDS sequence (opt1) from neuraminidase__InfluenzaA__ABD15771

SEQ ID NO: 78820 - RNA, 1410 nt, Artificial Sequence; identical to SEQ ID NO: 78754
  derived and/or modified CDS sequence (opt1) from neuraminidase__InfluenzaA__ABD15782

SEQ ID NO: 78821 - RNA, 1410 nt, Artificial Sequence; identical to SEQ ID NO: 78754
  derived and/or modified CDS sequence (opt1) from neuraminidase__InfluenzaA__ABD15793

SEQ ID NO: 78822 - RNA, 1410 nt, Artificial Sequence; identical to SEQ ID NO: 78738
  derived and/or modified CDS sequence (opt1) from neuraminidase__InfluenzaA__ABD16306

SEQ ID NO: 78823 - RNA, 1410 nt, Artificial Sequence
  derived and/or modified CDS sequence (opt1) from neuraminidase__InfluenzaA__ABD16317
augaaccccaaccagaagaucaucaccaucggcagcgugucccugaccaucagcacgaucugcuucuucaugcagaucgccauccucaucaccaccgucacccugcacuucaagcaguacgaguucaacuccccgcccaacaaccaggugaugcugugcgagcccacgaucaucgagcgcaacaucaccgagaucguguaccucaccaacaccacgaucgagaaggagaucugccccaagcuggccgaguaccggaacuggagcaagccgcagugcaacaucaccggguucgcgcccuucuccaaggacaacagcauccgccuguccgccggcggggacaucugggucacccgggagcccuacgugagcugcgaccccgacaagugcuaccaguucgcccucggccaggggaccacgcugaacaacgugcacuccaacgacaccguccgcgaccggaccccguaccgcacccugcucaugaacgagcugggcgugcccuuccaccugggcacgaagcaggucugcaucgccuggagcuccagcuccugccacgacgggaaggccuggcuccacgugugcgugaccggcgacgacaagaacgcgaccgccagcuucaucuacaacgggcggcugguggacuccaucgucagcugguccaaggagauccugcgcacccaggagagcgagugcgugugcaucaacggcacgugcaccguggucaugaccgacggguccgccagcggcaaggccgacaccaagauccucuucaucgaggagggcaagaucgugcacacgagcacccuguccgggagcgcgcagcacguggaggagugcuccugcuacccccgguaccccggcguccgcugcgugugccgggacaacuggaaggggagcaaccgcccgaucguggacaucaacaucaaggacuacuccaucgucagcuccuacgugugcagcggccuggugggcgacacgccccggaagaacgacuccagcuccagcucccacugccucgaccccaacaacgaggagggcgggcacggggucaagggcugggccuucgacgacgggaacgacguguggaugggccgcaccaucagcgagaagcugcgguccggcuacgagaccuucaaggucaucgagggguggagcaaccccaacuccaagcugcagaucaaccgccaggugaucguggaccggggcaaccgcagcggguacuccggcaucuucagcgucgagggcaagagcugcaucaaccggugcuucuacguggagcucauccgcgggcggaaggaggagaccgaggugcuguggaccuccaacagcaucgucguguucugcggcaccuccgggacguacggcaccgggagcuggccggacggcgccgacaucaaccugaugcccaucuga

SEQ ID NO: 78824 - RNA, 1410 nt, Artificial Sequence; identical to SEQ ID NO: 78738
  derived and/or modified CDS sequence (opt1) from neuraminidase__InfluenzaA__ABD16328

SEQ ID NO: 78825 - RNA, 1410 nt, Artificial Sequence
  derived and/or modified CDS sequence (opt1) from neuraminidase__InfluenzaA__ABD16339
augaaccccaaccagaagaucaucaccaucggcagcgugucccugaccaucagcacgaucugcuucuucaugcagaucgccauccucaucaccaccgucacccugcacuucaagcaguacgaguucaacuccccgcccaacaaccaggugaugcugugcgagcccacgaucaucgagcgcaacaucaccgagaucguguaccucaccaacaccacgaucgagaaggagaucugccccaagcuggccgaguaccggaacuggagcaagccgcagugcgacaucaccggguucgcgcccuucuccaaggacaacagcauccgccuguccgccggcggggacaucugggucacccgggagcccuacgugagcugcgaccccgacaagugcuaccaguucgcccucggccaggggaccacgcugaacaacgugcacuccaacgacaccguccacgaccgcaccccguaccggacccugcucaugaacgagcugggcgugcccuuccaccugggcacgaagcaggucugcaucgccuggagcuccagcuccugccacgacgggaaggccuggcuccacgugugcgugaccggcgacgacaagaacgcgaccgccagcuucaucuacaacgggcgccugguggacuccaucgucagcugguccaagaagauccugcggacccaggagagcgagugcgugugcaucaacggcacgugcaccguggucaugaccgacggguccgccagcggcaaggccgacaccaagauccucuucaucgaggagggcaagaucgugcacacgagcacccuguccgggagcgcgcagcacguggaggagugcuccugcuacccccgcuaccccggcguccggugcgugugccgcgacaacuggaaggggagcaaccggccgaucguggacaucaacaucaaggacuacuccaucgucagcuccuacgugugcagcggccuggugggcgacacgccccgcaagaacgacuccagcuccagcgggcacugccucgaccccaacaacgaggagggcgggcacggcgucaaggggugggccuucgacgacggcaacgacguguggaugggccggaccaucuccgagaagcugcgcagcggguacgagaccuucaaggucaucgagggcugguccaaccccaacagcaagcugcagaucaaccgccaggugaucguggaccgggggaaccgguccggcuacagcgggaucuucuccgucgagggcaagagcugcaucaaccgcugcuucuacguggagcucauccggggccgcaaggaggagaccgaggugcuguggaccagcaacuccaucgucguguucugcgggaccagcggcacguacgggaccggcuccuggccggacggggccgacaucaaccugaugcccaucuga

SEQ ID NO: 78826 - RNA, 1410 nt, Artificial Sequence
  derived and/or modified CDS sequence (opt1) from neuraminidase__InfluenzaA__ABD16361
augaaccccaaccagaagaucaucaccaucggcagcgugucccugaccaucagcacgaucugcuucuucaugcagaucgccauccucaucaccaccgucacccugcacuucaagcaguacgaguucaacuccccgcccaacaaccaggugaugcugugcgagcccacgaucaucgagcgcaacaucaccgagaucguguaccucaccaacaccacgaucgagaaggagaucugccccaagcuggccgaguaccggaacuggagcaagccgcagugcgacaucaccggguucgcgcccuucuccaaggacaacagcauccgccuguccgccggcggggacaucugggucacccgggagcccuacgugagcugcgaccccgacaagugcuaccaguucgcccucggccaggggaccacgcugaacaacgugcacuccaacgacaccguccacgaccgcaccccguaccggacccugcucaugaacgagcugggcgugcccuuccaccugggcacgaagcaggucugcaucgccuggagcuccagcuccugccacgacgggaaggccuggcuccacgugugcgugaccggcgacgacaagaacgcgaccgccagcuucaucuacaacgggaagcugguggacuccaucgucagcugguccaagaagauccugcgcacccaggagagcgagugcgugugcaucaacggcacgugcaccguggucaugaccgacggguccgccagcggcaaggccgacaccaagauccucuucaucgaggagggcaagaucgugcacacgagcacccuguccgggagcgcgcagcacguggaggagugcuccugcuacccccgguaccccggcguccgcugcgugugccgggacaacuggaaggggagcaaccgcccgaucguggacaucaacaucaaggacuacuccaucgucagcuccuacgugugcagcggccuggugggcgacacgccccggaagaacgacuccagcuccagcucccacugccucgaccccaacaacgaggagggcgggcacggggucaagggcugggccuucgacgacgggaacgacguguggaugggccgcaccaucagcgagaagcugcgguccggcuacgagaccuucaaggucaucgagggguggagcaaccccaacuccaagcugcagaucaaccgccaggugaucguggaccggggcaaccgcagcggguacuccggcaucuucagcgucgagggcaagagcugcaucaaccggugcuucuacguggagcucauccgcgggcggaaggaggagaccgaggugcuguggaccuccaacagcaucgucguguucugcggcaccuccgggacguacggcaccgggagcuggccggacggcgccgacaucaaccugaugcccaucuga

SEQ ID NO: 78827 - RNA, 1410 nt, Artificial Sequence; identical to SEQ ID NO: 78738
  derived and/or modified CDS sequence (opt1) from neuraminidase__InfluenzaA__ABD16475

SEQ ID NO: 78828 - RNA, 1410 nt, Artificial Sequence; identical to SEQ ID NO: 78738
  derived and/or modified CDS sequence (opt1) from neuraminidase__InfluenzaA__ABD16486

SEQ ID NO: 78829 - RNA, 1410 nt, Artificial Sequence; identical to SEQ ID NO: 78765
  derived and/or modified CDS sequence (opt1) from neuraminidase__InfluenzaA__ABD16497

SEQ ID NO: 78830 - RNA, 1410 nt, Artificial Sequence; identical to SEQ ID NO: 78738
  derived and/or modified CDS sequence (opt1) from neuraminidase__InfluenzaA__ABD16508

SEQ ID NO: 78831 - RNA, 1410 nt, Artificial Sequence
  derived and/or modified CDS sequence (opt1) from neuraminidase__InfluenzaA__ABD16519
augaaccccaaccagaagaucaucaccaucggcagcgugucccugaccaucagcacgaucugcuucuucaugcagaucgccauccucaucaccaccgucacccugcacuucaagcaguacgaguucaacuccccgcccaacaaccaggugaugcugugcgagcccacgaucaucgagcgcaacaucaccgagaucguguaccucaccaacaccacgaucgagaaggagaucugccccaagcuggccgaguaccggaacuggagcaagccgcagugcgacaucaccggguucgcgcccuucuccaaggacaacagcauccgccuguccgccggcggggacaucugggucacccgggagcccuacgugagcugcgaccccgacaagugcuaccaguucgcccucggccaggggaccacgcugaacaacgugcacuccaacgacaccguccacgaccgcaccccguaccggacccugcucaugaacgagcugggcgugcccuuccaccugggcacgaagcaggucugcaucgccuggagcuccagcuccugccacgacgggaaggccuggcuccacgugugcgugaccggcgacgacaagaacgcgaccgccagcuucaucuacaacgggcgccugguggacuccaucgucagcugguccaaggacauccugcggacccaggagagcgagugcgugugcaucaacggcacgugcaccguggucaugaccgacggguccgccagcggcaaggccgacaccaagauccucuucaucgaggagggcaagaucgugcacacgagcacccuguccgggagcgcgcagcacguggaggagugcuccugcuacccccgcuaccccggcguccggugcgugugccgcgacaacuggaaggggagcaaccggccgaucguggacaucaacaucaaggacuacuccaucgucagcuccuacgugugcagcggccuggugggcgacacgccccgcaagaccgacuccagcuccagcucccacugccucgaccccaacaacgaggagggcgggcacggggucaagggcugggccuucgacgacgggaacgacguguggaugggccggaccaucagcgagaagcugcgccugggcuacgagaccuucaaggucaucgaggggugguccaaccccaacagcaagcuccagaucaaccgccaggugaucguggaccggggcaaccgguccggguacagcggcaucuucuccgucgagggcaagagcugcaucaaccgcugcuucuacguggagcugauccgggggcgcaaggaggagaccgaggugcuguggaccagcaacuccaucgucguguucugcggcacgagcgggaccuacggcaccggguccuggccggacggcgccgacaucaaccucaugcccaucuga

SEQ ID NO: 78832 - RNA, 1410 nt, Artificial Sequence
  derived and/or modified CDS sequence (opt1) from neuraminidase__InfluenzaA__ABD16530
augaaccccaaccagaagaucaucaccaucggcagcgugucccugaccaucgccacgaucugcuuccucaugcagaucgccauccuggucaccaccgugacccugcacuucaagcagcacgagugcaacagcccgcccaacaaccaggugaugcucugcgagcccacgaucaucgagcgcaacaucaccgagaucgucuaccugaccaacaccacgaucgagaaggagaucugccccaagcugguggaguaccggaacugguccaagccgcagugcaacaucaccggguucgcgcccuucagcaaggacaacuccauccgccucagcgccggcggggacaucugggugacccgggagcccuacgucuccugcgaccccgacaagugcuaccaguucgcccugggccaggggaccacgcugaacaacggccacagcaacgacaccgugcacgaccgcaccccguaccggacccuccugaugaacgagcugggcgugcccuuccaccucgggacgcgccaggucugcaucgccugguccagcuccagcugccacgacggcaaggccuggcugcacgugugcgugaccggggacgacaagaacgcgaccgccuccuucaucuacaacggccggcuggucgacagcaucggguccuggagcaagaagauccuccgcacccaggaguccgagugcgugugcaucaacggcacgugcaccguggucaugaccgacggcagcgccuccgggaaggccgacaccaagauccuguucaucgaggagggcaagaucgugcacaucagcacgcugagcggguccgcgcagcacguggaggagugcagcugcuacccccgguaccccggcguccgcugcgugugccgggacaacuggaagggcuccaaccgcccgaucguggacaucaacgucaaggacuacagcaucguguccagcuacgugugcuccgggcucgucggcgacacgccccggaagaacgacagcuucuccagcucccacugccuggaccccaacaacgaggagggcgggcacggggugaagggcugggccuucgacgacggcaacgacgucuggauggggcgcaccaucagcgagaagcugcgguccggcuacgagaccuucaaggugaucgagggguggagcaagcccaacuccaagcuccagaucaaccgccaggugaucgucgagcggggcaaccgcagcggguacuccggcaucuucagcguggagggcaagcggugcaucaaccgcugcuucuacguggagcugauccgggggcgcaaggaggagaccgaggucugguggaccuccaacagcaucgugguguucugcggcaccagcgggaccuacggcacgggguccuggccggacggcgccgacaucaaccugaugcccaucuga

SEQ ID NO: 78833 - RNA, 1410 nt, Artificial Sequence; identical to SEQ ID NO: 78615
  derived and/or modified CDS sequence (opt1) from neuraminidase__InfluenzaA__ABD16541

SEQ ID NO: 78834 - RNA, 1410 nt, Artificial Sequence; identical to SEQ ID NO: 78738
  derived and/or modified CDS sequence (opt1) from neuraminidase__InfluenzaA__ABD16552

SEQ ID NO: 78835 - RNA, 1410 nt, Artificial Sequence; identical to SEQ ID NO: 78737
  derived and/or modified CDS sequence (opt1) from neuraminidase__InfluenzaA__ABD16563

SEQ ID NO: 78836 - RNA, 1410 nt, Artificial Sequence
  derived and/or modified CDS sequence (opt1) from neuraminidase__InfluenzaA__ABD16574
augaaccccaaccagaagaucaucaccaucggcagcgugucccugaccaucgccacgaucugcuuccucaugcagaucgccauccuggucaccaccgugacccugcacuucaagcaguacgagugcagcuccccgcccaacaaccaggugaugcccugcgagcccacgaucaucgagcgcaacaucaccgagaucgucuaccucaccaacaccacgaucgagaaggagaucugcccgaagcugguggaguaccggaacuggagcaagccccagugcaagaucaccggguucgcgcccuucuccaaggacaacagcauccgccuguccgccggcggggacaucugggugacccgggagcccuacgucagcugcgacccgggcaagugcuaccaguucgcccucgggcagggcaccacgcugaacaaccgccacuccaacgacaccgugcacgaccggacccccuaccgcacccugcucaugaacgagcugggcgugcccuuccaccuggggacgaagcaggucugcaucgccuggagcuccagcuccugccacgacggcaaggccuggcuccacgugugcgugaccgggcacgacgagaacgcgaccgccagcuucaucuacgacggccggcuggucgacuccaucgggagcugguccaagaacauccugcgcacccaggagagcgagugcgugugcaucaacggcacgugcaccguggucaugaccgacggcuccgccagcgagcgggccgacaccaagauccucuucaucgaggaggggaagaucgugcacaucagcccccuguccggcagcgcgcagcacguggaggagugcuccugcuacccgcgcuaccccgggguccggugcgugugccgcgacaacuggaagggcagcaaccggcccaucguggacaucaacgucaaggacuacuccaucgugagcuccuacgugugcagcggccuggucggggacacgccccgcaagaacgaccgguccagcuccagcuacugccgcaacccgaacaacgagaagggcucccacggggugaagggcugggccuucgacgacgggaacgacgucuggaugggccggaccaucggcgaggagcuccgcagcggguacgagaccuucaaggugaucggcgggugguccacccccaacagcaagcugcagaucaaccgccaggugaucgucgacuccggcaaccggagcggguacuccggcaucuucagcguggagggcaagagcugcaucaaccggugcuucuacguggagcugauccgcgggcgcaagaaggagacgcgggucugguggaccuccaacagcaucgugguguucugcggcaccuccgggaccuacggcacggggagcuggcccgacggcgccgacaucaaccucaugcccaucuga

SEQ ID NO: 78837 - RNA, 1410 nt, Artificial Sequence
  derived and/or modified CDS sequence (opt1) from neuraminidase__InfluenzaA__ABD16585
augaaccccaaccagaagaucaucaccaucggcagcgugucccugaccaucgccacgaucugcuuccucaugcagaucgccauccuggucaccaccgugacccugcacuucaagcaguacgagugcagcuccccgcccaacaaccaggugaugcccugcgagcccacgaucaucgagcgcaacaucaccgagaucgucuaccucaccaacaccacgaucgagaaggagaucugcccgaagcugguggaguaccggaacuggagcaagccccagugcaagaucaccggguucgcgcccuucuccaaggacaacagcauccgccuguccgccggcggggacaucugggugacccgggagcccuacgucagcugcgacccgggcaagugcuaccaguucgcccucgggcagggcaccacgcugaacaaccgccacuccaacgacaccgugcacgaccggacccccuaccgcacccugcucaugaacgagcugggcgugcccuuccaccuggggacgaagcaggucugcaucgccuggagcuccagcuccugccacgacggcaaggccuggcuccacgugugcgugaccgggcacgacaagaacgcgaccgccagcuucaucuacgacggccggcuggucgacuccaucgggagcugguccaagaacauccugcgcacccaggagagcgagugcgugugcaucaacggcacgugcaccguggucaugaccgacggcuccgccagcgagcgggccgacaccaagauccucuucaucgaggaggggaagaucgugcacaucagcccccuguccggcagcgcgcagcacguggaggagugcuccugcuacccgcgcuaccccgggguccggugcgugugccgcgacaacuggaagggcagcaaccggcccaucguggacaucaacgucaaggacuacuccaucgugagcuccuacgugugcagcggccuggucggggacacgccccgcaagaacgaccgguccagcuccagcuacugccgcaacccgaacaacgagaagggcucccacggggugaagggcugggccuucgacgacgggaacgacgucuggaugggccggaccaucggcgaggagcuccgcagcggguacgagaccuucaaggugaucggcgggugguccacccccaacagcaagcugcagaucaaccgccaggugaucgucgacuccggcaaccggagcggguacuccggcaucuucagcguggagggcaagagcugcaucaaccggugcuucuacguggagcugauccgcgggcgcgagcaggagacgcgggucugguggaccuccaacagcaucgugguguucugcggcaccuccgggaccuacggcacggggagcuggcccgacggcgccgacaucaaccucaugcccaucuga

SEQ ID NO: 78838 - RNA, 1410 nt, Artificial Sequence
  derived and/or modified CDS sequence (opt1) from neuraminidase__InfluenzaA__ABD16721
augaaccccaaccagaagaucaucaccaucggcagcgugucccugaccaucgccacgaucugcuuccucaugcagaucgccauccuggucaccaccgugacccugcacuucaagcaguacgagugcagcuccccgcccaacaaccaggugaugcccugcgagcccaucaucaucgagcgcaacaucacgaagaucgucuaccucaccaacaccaccaucgagaaggagaucugcccgaagcugguggaguaccggaacuggagcaagccccagugcaagaucacgggguucgcgcccuucuccaaggacaacagcauccgccuguccgccggcggggacaucugggugacccgggagcccuacgucagcugcgacccgggcaagugcuaccaguucgcccucgggcagggcaccacccugaacaacaagcacuccaacgacacgauccacgaccgcacccccuaccggacccugcucaugaacgagcugggcgugcccuuccaccuggggaccaagcaggucugcaucgccuggagcuccagcuccugccacgacggcaaggccuggcuccacgugugcgugacggggcacgacaagaacgcgaccgccagcuucaucuacgacggccgccugguggacuccaucgggagcugguccaagaacauccugcggacccaggagagcgagugcgucugcaucaacgggaccugcacgguggugaugaccgacggcuccgccagcgagcgcgccgacaccaagauccucuucaucgaggagggcaagaucguccacaucagcccccuguccggcagcgcgcagcacguggaggagugcuccugcuacccgcgguaccccggggugcgcugcgucugccgggacaacuggaagggcagcaaccgccccaucguggacaucaacgugaaggacuacuccaucgucagcuccuacgugugcagcggccuggugggggacacgccccggaagaacgaccgcuccagcuccagcuacugccagaacccgaacaacgagaagggcaaccacggggucaagggcugggccuucgacgacgggaacgacguguggaugggccggaccaucggcgaggagcuccgcuccggguacgagaccuucaaggucaucggcggguggagcacccccaacuccaagcugcagaucaaccgccaggugaucguggacagcaagaaccgguccggcuacagcgggaucuucuccgucgagggcaagagcugcaucaaccggugcuucuacguggagcugauccgcggccgggagcaggagacccgcgugugguggacgagcaacuccaucgucguguucugcgggaccagcggcaccuacgggaccggcuccuggcccgacggggccgacaucaaccucaugcccaucuga

SEQ ID NO: 78839 - RNA, 1410 nt, Artificial Sequence; identical to SEQ ID NO: 78508
  derived and/or modified CDS sequence (opt1) from neuraminidase__InfluenzaA__ABD16732

SEQ ID NO: 78840 - RNA, 1410 nt, Artificial Sequence
  derived and/or modified CDS sequence (opt1) from neuraminidase__InfluenzaA__ABD16743
augaaccccaaccagaagaucaucaccaucggcagcgugucccugaccaucgccacgaucugcuuccucaugcagaucgccauccuggucaccaccgugacccugcacuucaagcaguacgagugcgacagcccggcgaacaaccaggugaugcccugcgagcccaucaucaucgagcgcaacaucacggagaucgucuaccucaccaacaccaccaucgagaaggagaucugccccaagcugguggaguaccggaacugguccaagccgcagugcaagaucacgggguucgcccccuucagcaaggacaacuccauccgccugagcgccggcggggacaucugggugacccgggagcccuacgucuccugcgaccccggcaagugcuaccaguucgcccucgggcagggcaccacccuggacaacaagcacagcaacgacacgauccacgaccgcaccccgcaccggacccugcucaugaacgagcugggcgugcccuuccaccuggggacccgccaggugugcaucgccugguccagcuccagcugccacgacggcaaggcguggcuccacgucugcgugacgggguacgacaagaacgccaccgccuccuucaucuacgacggccggcugguggacagcaucggguccuggagccagaacauccugcgcacccaggaguccgagugcgucugcaucaacgggaccugcacgguggugaugaccgacggcagcgccuccggccgggcggacaccaagauccucuucaucgaggagggcaagaucguccacaccagcccccugagcggguccgcccagcacguggaggagugcagcugcuacccccgcuacccgggcgugcggugcaucugccgcgacaacuggaagggcuccaaccggcccgucguggacaucaacgugaaggacuacagcaucgacuccagcuacgucugcuccgggcuggugggcgacacgccccgcaacaacgaccggagcuccagcuccuacugccgcaaccccaacaacgagaaggggacccacggcgugaaggggugggccuucgacgacggcaacgacgucuggaugggccggaccaucagcgaggacucccgcagcggguacgagaccuucaaggugaucggcgggugguccacgccgaacagcaagcuccagaugaaccggcaggucaucguggacuccgacaaccgcagcggcuacuccgggaucuucagcguggagggcaagagcugcaucaaccggugcuucuacgucgagcugauccgcggccgcgagcaggagacccgggugugguggaccuccaacagcaucguggucuucugcgggaccuccggcacguacgggaccggcagcuggcccgacggggccgacaucaaccugaugcccaucuga

SEQ ID NO: 78841 - RNA, 1410 nt, Artificial Sequence; identical to SEQ ID NO: 78600
  derived and/or modified CDS sequence (opt1) from neuraminidase__InfluenzaA__ABD16754

SEQ ID NO: 78842 - RNA, 1410 nt, Artificial Sequence; identical to SEQ ID NO: 78698
  derived and/or modified CDS sequence (opt1) from neuraminidase__InfluenzaA__ABD16765

SEQ ID NO: 78843 - RNA, 1410 nt, Artificial Sequence; identical to SEQ ID NO: 78142
  derived and/or modified CDS sequence (opt1) from neuraminidase__InfluenzaA__ABD17326

SEQ ID NO: 78844 - RNA, 1410 nt, Artificial Sequence
  derived and/or modified CDS sequence (opt1) from neuraminidase__InfluenzaA__ABD38137
augaaccccaaccagaagaucaucaccaucggcagcgugucccugaccaucgccacgaucugcuuccucaugcagaucgccauccuggucaccaccgugacccugcacuucaagcaguacgagugcaacagcccgcccaacaaccaggugaugcucugcgagcccacgaucaucgagcgcaacaucaccgagaucgucuaccugaccaacaccacgaucgagaaggagaucugccccaagcuggcggaguaccggaacugguccaagccgcagugcaacaucaccggguucgcccccuucagcaaggacaacuccauccgccucagcgccggcggggacaucugggugacccgggagcccuacguguccugcgaccccgacaagugcuaccaguucgcccugggccaggggaccacgcugaacaacggccacagcaacgacaccguccacgaccgcaccccguaccggacccuccugaugaacgagcugggcgugcccuuccaccucgggacgcgccaggugugcaucgccugguccagcuccagcugccacgacggcaaggcguggcugcacgucugcgugaccggggacgacgagaacgccaccgccuccuucaucuacaacggccggcugguggacagcaucggguccuggagcaagaagauccuccgcacccaggaguccgagugcgucugcaucaacggcacgugcaccguggugaugaccgacggcagcgccuccgggaaggcggacaccaagauccuguucaucgaggagggcaagaucguccacaucagcacgcugagcggguccgcccagcacguggaggagugcagcugcuacccccgguaccccggcgugcgcugcgucugccgggacaacuggaagggcuccaaccgcccgaucaucgacaucaacgugaaggacuacagcaucguguccagcuacgucugcuccgggcucgugggcgacacgccccggaagaacgacagcuucuccagcucccacugccuggaccccaacaacgaggagggcgggcacggggugaagggcugggccuucgacgacggcaacgacgucuggauggggcgcaccaucagcgagaagcugcgguccggcuacgagaccuucaaggugaucgagggguggagcaagcccaacuccaagcuccagaccaaccgccaggucaucguggagcggggcaaccgcagcggguacuccggcaucuucagcguggagggcaaguccugcaucaaccggugcuucuacgucgagcugauccgcgggcggaaggaggagccggaggugugguggaccagcaacagcaucguggucuucugcggcacccccgggaccuacggcacgggguccuggcccgacggcgccgacaucaaccugaugcccaucuga

SEQ ID NO: 78845 - RNA, 1413 nt, Artificial Sequence; identical to SEQ ID NO: 78410
  derived and/or modified CDS sequence (opt1) from neuraminidase__InfluenzaA__ABD60782

SEQ ID NO: 78846 - RNA, 1410 nt, Artificial Sequence
  derived and/or modified CDS sequence (opt1) from neuraminidase__InfluenzaA__ABD60793
augaaccccaaccagaagaucaucaccaucggcagcgugucccugaccaucgccacgaucugcuuccucaugcagaucgccauccuggucaccaccgugacccugcacuucaagcaguacgagugcgacagcccggugaacaaccaggucaugcccugcgagcccaucaucaucgagcgcaacaucacggagaucguguaccucaccaacaccaccaucgagaaggagaucugccccaagcugguggaguaccggaacugguccaagccgcagugcaagaucacgggguucgcgcccuucagcaaggacaacuccauccgccugagcgccggcggggacaucugggucacccgggagcccuacguguccugcgaccccggcaagugcuaccaguucgcccucgggcagggcaccacccuggacaacaagcacagcaacgacacgauccacgaccgcaccccgcaccggacccugcucaugaacgagcugggcgugcccuuccaccuggggacccgccaggucugcaucgccugguccagcuccagcugccacgacggcaaggccuggcuccacgugugcgugacgggguacgacaagaacgcgaccgccuccuucaucuacgacggccggcuggucgacagcaucguguccuggagccagaacauccugcgcacccaggaguccgagugcgugugcaucaacgggaccugcacggucgugaugaccgacggcagcgccuccgagcgggccgacaccaagauccucuucaucgaggagggcaagaucgugcacaucagcccccugagcggguccgcgcagcacgucgaggagugcagcugcuacccccgcuacccgggcgugcggugcaucugccgcgacaacuggaagggguccaaccggcccguggucgacaucaacgugaaggacuacagcaucgacuccagcuacgugugcuccggccuggucggcgacacgccccgcaacaacgaccggagcuccaacagcuacugccgcaaccccaacaacgagaaggggaaccacggcgugaaggggugggccuucgacgacggcaacgaccucuggauggggcggaccaucuccgaggacagccgcuccggcuacgagaccuucaaggucaucggcggguggagcaccccgaacuccaagcugcagaucaaccgccaggugaucguggacagcgacaaccgguccggcuacagcgggaucuucuccgucgagggcaagagcugcaucaaccggugcuucuacguggagcugauccgcgggcgcgagcaggagacccgggugugguggacgagcaacuccaucaucgucuucugcggcaccagcggcaccuacgggaccggcuccuggcccgacggggccgacaucaaccucaugcccaucuga

SEQ ID NO: 78847 - RNA, 1410 nt, Artificial Sequence; identical to SEQ ID NO: 78543
  derived and/or modified CDS sequence (opt1) from neuraminidase__InfluenzaA__ABD60804

SEQ ID NO: 78848 - RNA, 1410 nt, Artificial Sequence; identical to SEQ ID NO: 78736
  derived and/or modified CDS sequence (opt1) from neuraminidase__InfluenzaA__ABD60815

SEQ ID NO: 78849 - RNA, 1410 nt, Artificial Sequence; identical to SEQ ID NO: 78738
  derived and/or modified CDS sequence (opt1) from neuraminidase__InfluenzaA__ABD60826

SEQ ID NO: 78850 - RNA, 1410 nt, Artificial Sequence; identical to SEQ ID NO: 78817
  derived and/or modified CDS sequence (opt1) from neuraminidase__InfluenzaA__ABD60837

SEQ ID NO: 78851 - RNA, 1410 nt, Artificial Sequence
  derived and/or modified CDS sequence (opt1) from neuraminidase__InfluenzaA__ABD60848
augaaccccaaccagaagaucaucaccaucggcagcgugucccugaccaucgccacgaucugcuuccucaugcaggucgccauccuggugaccaccgugacccugcacuucaagcaguacgagugcaacagcccgcccaacaaccaggucaugcucugcgagcccacgaucaucgagcgcaacaucaccgagaucguguaccugaccaacaccacgaucgagaaggagaucugccccaagcuggcggaguaccggaacugguccaagccgcagugcaacaucaccggguucgcccccuucagcaaggacaacuccauccgccucagcgccggcggggacaucugggugacccgggagcccuacgucuccugcgaccccgacaagugcuaccaguucgcccugggccaggggaccacgcugaacaacggccacagcaacgacaccgugcacgaccgcaccccguaccggacccuccugaugaacgagcugggcgugcccuuccaccucgggacgaagcaggucugcaucgccugguccagcuccagcugccacgacggcaaggcguggcugcacgugugcgugaccggggacgacgagaacgccaccgccuccuucaucuacaacggccgccuggucgacagcaucggguccuggagcaagaagauccuccggacccaggaguccgagugcgugugcaucaacggcacgugcaccguggucaugaccgacggcagcgccuccgggaaggcggacaccaagauccuguucaucgaggagggcaagaucgugcacacgagccugcucagcggguccgcccagcacguggaggagugcagcugcuacccccgcuaccccggcguccggugcgugugccgcgacaacuggaagggcuccaaccggccgaucguggacaucaacgucaaggacuacagcaucguguccagcuacgugugcuccgggcuggucggcgacacgccccgcaagaacgacagcuccagcuccagccacugccuggaccccaacaacgaggagggcgggcacggggugaagggcugggccuucgacgacggcaacgacgucuggauggggcggaccaucuccgagaagcuccgcagcggcuacgagaccuucaaggugaucgaggggugguccaagcccaacagcaagcugcagaucaaccgccaggugaucgucgaccggggcaaccgguccggguacagcggcaucuucuccguggagggcaagagcugcaucaaccgcugcuucuacguggagcugauccgggggcgcaagcaggagaccgagguccucuggaccagcaacuccaucgugguguucugcggcaccagcgggaccuacggcacgggguccuggccggacggcgccgacaucaaccugaugcccaucuga

SEQ ID NO: 78852 - RNA, 1413 nt, Artificial Sequence
  derived and/or modified CDS sequence (opt1) from neuraminidase__InfluenzaA__ABD60881
augaaccccaaccagaagaucaucaccaucggcagcaucuccaucgccaucgggaucaucagccugaugcuccagaucggcaacaucaucuccaucugggccagccacuccauccagaccgggagccagaaccacacgggcaucugcaaccagcgcaucaucaccuacgagaacuccaccugggugaaccacaccuacgucaacaucaacaacacgaacgugguggcggggaaggacaagaccagcgucacccuggccggcaacuccagccugugcuccaucagcggcugggccaucuacaccaaggacaacuccauccggaucgggagcaagggcgacguguucgugauccgcgagccguucaucuccugcagccaccucgagugccggacguucuuccugacccagggggcccugcucaacgacaagcacuccaacggcaccgucaaggaccgcagccccuaccgggcccugauguccugcccccugggggaggcgcccagcccguacaacagcaaguucgaguccguggccuggagcgccuccgccugccacgacggcaugggcuggcucaccaucgggaucagcggccccgacaacggggcgguggccguccugaaguacaacggcaucaucacggagaccaucaaguccuggaagaagcgcauccugcggacccaggagagcgagugcgugugcgugaacggcuccugcuucaccaucaugacggacgggcccagcaacggcgccgccuccuacaagaucuucaagaucgagaaggggaaggucaccaagagcaucgagcucaacgcccccaacuuccacuacgaggagugcuccugcuacccggacaccggcaccgugaugugcgugugccgcgacaacuggcacgggagcaaccggcccugggucuccuucaaccagaaccuggacuaccagaucggcuacaucugcagcggcguguucggggacaacccccgccccaaggacggcgagggguccugcaacccggugacggucgacggcgcggacggggugaagggcuucagcuacaaguacggcaacgggguguggaucggccggaccaaguccaaccgccugcggaagggguucgagaugaucugggaccccaacggcuggaccgacaccgacagcaacuucuccgucaagcaggacgugguggccaucacggacuggagcggguacagcggcuccuucguccagcaccccgagcucaccggccuggacugcauccgccccugcuucuggguggagcugguccgggggcucccgcgcgagaacaccaccaucuggacgagcggcuccagcaucuccuucugcggggugaacagcgacaccgccaacugguccuggcccgacggcgccgagcugcccuucaccaucgacaaguga

SEQ ID NO: 78853 - RNA, 1413 nt, Artificial Sequence
  derived and/or modified CDS sequence (opt1) from neuraminidase__InfluenzaA__ABD60892
augaaccccaaccagaagaucaucaccaucggcagcaucuccaucgccaucgggaucaucagccugaugcuccagaucggcaacaucaucuccaucugggccagccacuccauccagaccgggagccagaaccacacgggcaucugcaaccagcgcgugaucaccuacgagaacuccaccugggucaaccacaccuacgugaacaucaacaacacgaacguggucgcggggaaggacaagaccagcgugacccuggccggcaacuccagccugugcuccaucagcggcugggccaucuacaccaaggacaacuccauccggaucgggagcaagggcgacguguucgucauccgcgagccguucaucuccugcagccaccucgagugccggacguucuuccugacccagggggcccugcucaacgacaagcacuccaacggcaccgugaaggaccgcagccccuaccgggcccugauguccugcccccugggggaggcgcccagcccguacaacagcaaguucgaguccguggccuggagcgccuccgccugccacgacggcaugggcuggcucaccaucgggaucagcggccccgacaacggggcggucgccgugcugaaguacaacggcaucaucacggagaccaucaaguccuggaagaagcgcauccugcggacccaggagagcgagugcgugugcgucaacggcuccugcuucaccaucaugacggacgggcccagcaacggcgccgccuccuacaagaucuucaagaucgagaaggggaaggugaccaagagcaucgagcucaacgcccccaacuuccacuacgaggagugcuccugcuacccggacaccggcaccgugaugugcgucugccgcgacaacuggcacgggagcaaccggcccuggguguccuucaaccagaaccuggacuaccagaucggcuacaucugcagcggcguguucggggacaacccccgccccaaggacggcgagggguccugcaacccggucacgguggacggcgcggacggggugaagggcuucagcuacaaguacggcaacggggucuggaucggccggaccaaguccaaccgccugcggaagggguucgagaugaucugggaccccaacggcuggaccgacaccgacagcaacuucuccgugaagcaggacguggucgccaucacggacuggagcggguacagcggcuccuucgugcagcaccccgagcucaccggccuggacugcauccgccccugcuucugggucgagcuggugcgggggcucccgcgcgagaacaccaccaucuggacgagcggcuccagcaucuccuucugcggggugaacagcgacaccgccaacugguccuggcccgacggcgccgagcugcccuucaccaucgacaaguga

SEQ ID NO: 78854 - RNA, 1413 nt, Artificial Sequence; identical to SEQ ID NO: 78852
  derived and/or modified CDS sequence (opt1) from neuraminidase__InfluenzaA__ABD60903

SEQ ID NO: 78855 - RNA, 1413 nt, Artificial Sequence; identical to SEQ ID NO: 78439
  derived and/or modified CDS sequence (opt1) from neuraminidase__InfluenzaA__ABD60914

SEQ ID NO: 78856 - RNA, 1410 nt, Artificial Sequence
  derived and/or modified CDS sequence (opt1) from neuraminidase__InfluenzaA__ABD60925
augaaccccaaccagaagaucaucaccaucggcagcgugucccugaccaucgccacgaucugcuuccucaugcagaucgccauccuggucaccaccgugacccugcacuucaagcagcacgagugcaacagcccgcccaacaaccaggugaugcucugcgagcccacgaucaucgagcgcaacaucaccgagaucgucuaccugaccaacaccacgaucgagaaggagaucugccccaagcuggcggaguaccggaacugguccaagccgcagugcaacaucaccggguucgcccccuucagcaaggacaacuccauccgccucagcgccggcggggacaucugggugacccgggagcccuacguguccugcgaccccgacaagugcuaccaguucgcccugggccaggggaccacgcugaacaacggccacagcaacgacaccguccacgaccgcaccccguaccggacccuccugaugaacgagcugggcgugcccuuccaccucgggacgcgccaggugugcaucgccugguccagcuccagcugccacgacggcaaggcguggcugcacgucugcgugaccggggacgacaagaacgccaccgccuccuucaucuacaacggccggcugguggacagcaucggguccuggagcaagaagauccuccgcacccaggaguccgagugcgucugcaucaacggcacgugcaccguggugaugaccgacggcagcgccuccgggaaggcggacaccaagauccuguucaucgaggagggcaagaucguccacaucagcacgcugagcggguccgcccagcacguggaggagugcagcugcuacccccgguaccccggcgugcgcugcgucugccgggacaacuggaagggcuccaaccgcccgaucguggacaucaacaucaaggacuacagcaucguguccagcuacgucugcuccgggcucgugggcgacacgccccggaagaacgacagcuucuccagcucccacugccuggaccccaacaacgaggagggcgggcacggggugaagggcugggccuucgacgacggcaacgacgucuggauggggcgcaccaucagcgagaagcugcgguccggcuacgagaccuucaaggugaucgagggguggagcaagcccaacuccaagcuccagaucaaccgccaggucaucguggagcggggcaaccgcagcggguacuccggcaucuucagcguggagggcaaguccugcaucaaccggugcuucuacgucgagcugauccgcgggcggaaggaggagaccgaggugugguggaccagcaacagcaucguggucuucugcggcaccuccgggaccuacggcacggggagcuggccggacggcgccgacaucaaccugaugcccaucuga

SEQ ID NO: 78857 - RNA, 1413 nt, Artificial Sequence
  derived and/or modified CDS sequence (opt1) from neuraminidase__InfluenzaA__ABD60947
augaaccccaaccagaagaucaucaccaucggcagcaucugcauggccaucgggaucaucucccugauccuccagaucggcaacaucaucagcaucugggugucccacagcauccagaccgggucccagaaccacacgggcaucugcaaccagcgcaucaucaccuacgagaacagcaccugggucaaccagaccuacgugaacaucuccaacacgaacguggucgccgggaaggacaccaccagcaugacccuggcgggcaacuccagccugugcccgauccggggcugggccaucuacuccaaggacaacagcauccgcaucggguccaagggcgacguguucgugauccgggagcccuucaucagcugcucccaccucgagugccgcacguucuuccugacccagggggcccugcucaacgacaagcacagcaacggcaccaucaaggaccggucccccuaccgcgcccugaugagcugccccaucggggaggccccgucccccuacaacagccgguucgagagcgucgcgugguccgccagcgccugccacgacggcaugggcuggcugaccaucgggaucuccggccccgacgacggggccguggcggugcucaaguacaacggcaucaucacggagaccaucaagagcuggcgcaagcagauccugcggacccaggaguccgagugcgucugcgugaacggcagcugcuucaccaucaugacggacgggcccuccgacggcccggccagcuaccgcaucuucaagaucgagaaggggaagaucaccaaguccaucgagcuggacgcccccaacagccacuacgaggagugcuccugcuaccccgacaccggcaccgugaugugcgucugccgggacaacuggcacgggagcaaccgccccuggguguccuucaaccagaaccucgacuaccagaucggcuacaucugcagcggcguguucggggacaacccgcggcccaaggacggcaagggguccugcgaccccgucaacguggacggcgccgacggggugaagggcuucagcuaccgcuacggcaacggggucuggaucggccggacgaaguccaacagcucccgcaagggguucgagaugaucugggaccccaacggcuggaccgacaccgacagcaacuuccuggugaagcaggacguggucgccaugaccgacuggagcggguacuccggcagcuucgugcagcacccggagcugacgggccucgacugcaugcggcccugcuucuggguggagcugauccgcgggcggccccgcgagaagaccaccaucuggaccuccggcagcuccaucagcuucugcggggucaacuccgacacggugaacuggagcuggcccgacggcgcggagcugccguucaccaucgacaaguga

SEQ ID NO: 78858 - RNA, 1410 nt, Artificial Sequence
  derived and/or modified CDS sequence (opt1) from neuraminidase__InfluenzaA__ABD61263
augaaccccaaccagaagaucaucaccaucggcagcgugucccugaccaucgccacgaucugcuuccucaugcagaucgccauccuggucaccaccgugacccugcacuucaagcagcacgagugcaacagcccgcccaacaaccaggugaugcucugcgagcccacgaucaucgagcgcaacaucaccgagaucgucuaccugaccaacaccacgaucgagaaggagaucugccccaagcuggcggaguaccggaacugguccaagccgcagugcaacaucaccggguucgcccccuucagcaaggacaacuccauccgccucagcgccggcggggacaucugggugacccgggagcccuacguguccugcgaccccgacaagugcuaccaguucgcccugggccaggggaccacgcugaacaacggccacagcaacgacaccguccacgaccgcaccccguaccggacccuccugaugaacgagcugggcgugcccuuccaccucgggacgcgccaggugugcaucgccugguccagcuccagcugccacgacggcaaggcguggcugcacgucugcgugaccggggacgacaagaacgccaccgccuccuucaucuacaacggccggcugguggacagcaucggguccuggagcaagaagauccuccgcacccaggaguccgagugcgucugcaucaacggcacgugcaccguggugaugaccgacggcagcgccuccgggaaggcggacaccaagauccuguucaucgaggagggcaagaucguccacaucagcacgcugagcggguccgcccagcacguggaggagugcagcugcuacccccgguaccccggcgugcgcugcgucugccgggacaacuggaagggcuccaaccgcccgaucguggacaucaacgugaaggacuacagcaucgucuccagcuacgugugcuccgggcucgugggcgacacgccccggaagaacgacagcuucuccagcucccacugccuggaccccaacaacgaggagggcgggcacgggaugaagggcugggccuucgacgacggcaacgacgucuggauggggcgcaccaucagcgagaagcugcgguccggcuacgagaccuucaaggugaucgagggguggagcaagcccaacuccaagcuccaggucaaccgccaggugaucguggagcggggcaaccgcagcggguacuccggcaucuucagcgucgagggcaaguccugcaucaaccggugcuucuacguggagcugauccgcgggcggaaggaggagaccgaggugugguggaccagcaacagcaucgucguguucugcggcaccuccgggaccuacggcacggggagcuggccggacggcgccgacaucaaccugaugcccaucuga

SEQ ID NO: 78859 - RNA, 1410 nt, Artificial Sequence; identical to SEQ ID NO: 78169
  derived and/or modified CDS sequence (opt1) from neuraminidase__InfluenzaA__ABD61274

SEQ ID NO: 78860 - RNA, 1410 nt, Artificial Sequence
  derived and/or modified CDS sequence (opt1) from neuraminidase__InfluenzaA__ABD61285
augaaccccaaccagaagaucaucaccaucggcagcgugucccugaccaucagcacgaucugcuucuucaugcagaucgccauccucaucaccaccgucacccugcacuucaagcaguacgaguucaacuccccgcccaacaaccaggugaugcugugcgagcccacgaucaucgagcgcaacaucaccgagaucguguaccucaccaacaccacgaucgagaaggagaucugccccaagcuggccgaguaccggaacuggagcaagccgcagugcgacaucaccggguucgcgcccuucuccaaggacaacagcauccgccuguccgccggcggggacaucugggucacccgggagcccuacgugagcugcgaccccgacaagugcuaccaguucgcccucggccaggggaccacgcugaacaacgugcacuccaacgacaccguccacgaccgcaccccguaccggacccugcucaugaacgagcugggcgugcccuuccaccugggcacgaagcaggucugcaucgccuggagcuccagcuccugccacgacgggaaggccuggcuccacgugugcgugaccggcgacgacaagaacgcgaccgccagcuucaucuacaacgggcgccugguggacuccaucgucagcugguccaaggagauccugcggacccaggagagcgagugcgugugcaucaacggcacgugcaccguggucaugaccgacgggaacgccuccggcaaggccgacaccaagauccucuucaucgaggagggcaagaucgugcacacgagcacccugagcggguccgcgcagcacguggaggagugcagcugcuacccccgcuaccccggcguccggugcgugugccgcgacaacuggaagggguccaaccggccgaucguggacaucaacaucaaggacuacagcaucgucuccagcuacgugugcuccggccuggugggcgacacgccccgcaagaacgacagcuccagcuccagccacugccucgaccccaacaacgaggagggcgggcacggggucaagggcugggccuucgacgacgggaacgacguguggaugggccggaccaucuccgagaagcugcgcagcggcuacgagaccuucaaggucaucgaggggugguccaaccccaacagcaagcugcagaucaaccgccaggugaucguggaccggggcaaccgguccggguacagcggcaucuucuccgucgagggcaagagcugcaucaaccgcugcuucuacguggagcucauccgggggcgcaaggaggagaccgaggugcuguggaccagcaacuccaucgucguguucugcggcaccagcgggacguacggcaccggguccuggccggacggcgccgacaucaaccugaugcccaucuga

SEQ ID NO: 78861 - RNA, 1410 nt, Artificial Sequence; identical to SEQ ID NO: 78615
  derived and/or modified CDS sequence (opt1) from neuraminidase__InfluenzaA__ABD61296

SEQ ID NO: 78862 - RNA, 1410 nt, Artificial Sequence; identical to SEQ ID NO: 78736
  derived and/or modified CDS sequence (opt1) from neuraminidase__InfluenzaA__ABD61307

SEQ ID NO: 78863 - RNA, 1410 nt, Artificial Sequence; identical to SEQ ID NO: 78754
  derived and/or modified CDS sequence (opt1) from neuraminidase__InfluenzaA__ABD61318

SEQ ID NO: 78864 - RNA, 1410 nt, Artificial Sequence; identical to SEQ ID NO: 78085
  derived and/or modified CDS sequence (opt1) from neuraminidase__InfluenzaA__ABD61340

SEQ ID NO: 78865 - RNA, 1410 nt, Artificial Sequence; identical to SEQ ID NO: 78085
  derived and/or modified CDS sequence (opt1) from neuraminidase__InfluenzaA__ABD61351

SEQ ID NO: 78866 - RNA, 1410 nt, Artificial Sequence
  derived and/or modified CDS sequence (opt1) from neuraminidase__InfluenzaA__ABD61362
augaaccccaaccagaagaucaucaccaucggcagcgugucccugaccaucgccacgaucugcuuccucaugcagaucgccauccuggucaccaccgugacccugcacuucaagcaguacgagugcaacagcccgcccaacaaccaggugaugcucugcgagcccacgaucaucgagcgcaacaucaccgagaucgucuaccugaccaacaccacgaucgagaaggaggugugccccaagcuggcggaguaccggaacugguccaagccgcagugcaacaucaccggguucgcccccuucagcaaggacaacuccauccgccucagcgccggcggggacaucugggugacccgggagcccuacgucuccugcgaccccgacaagugcuaccaguucgcccugggccaggggaccacgcugaacaacggccacagcaacgacaccgugcacgaccgcaccccguaccggacccuccugaugaacgagcugggcgugcccuuccaccucgggacgaagcaggucugcaucgccugguccagcuccagcugccacgacggcaaggcguggcugcacgugugcgugaccggggacgacgagaacgccaccgccuccuucaucuacaacggccgccuggucgacagcaucggguccuggagcaagaagauccuccggacccaggaguccgagugcgugugcaucaacggcacgugcaccguggucaugaccgacggcagcgccuccgggaaggcggacaccaagauccuguucaucgaggagggcaagaucgugcacacgagcagccuguccgggagcgcccagcacguggaggagugcuccugcuacccccgcuaccccggcguccggugcgugugccgcgacaacuggaagggcagcaaccggccgaucguggacaucaacgucaaggacuacuccaucgugagcuccuacgugugcagcgggcucgucggcgacacgccccgcaagaacgacuccagcuccagcucccacugccuggaccccaacaacgaggagggcgggcacggggugaagggcugggccuucgacgacggcaacgacgucuggauggggcggaccaucagcgagaagcugcgcuccggcuacgagaccuucaaggugaucgagggguggagcaagcccaacuccaagcuccagaucaaccgccaggugaucgucgaccggggcaaccggagcggguacuccggcaucuucagcguggagggcaagagcugcaucaaccgcugcuucuacguggagcugauccgggggcgcaagcaggagaccgagguccuguggaccuccaacagcaucgugguguucugcggcaccuccgggaccuacggcacggggagcuggccggacggcgccgacaucgaccucaugcccaucuga

SEQ ID NO: 78867 - RNA, 1410 nt, Artificial Sequence; identical to SEQ ID NO: 78817
  derived and/or modified CDS sequence (opt1) from neuraminidase__InfluenzaA__ABD61373

SEQ ID NO: 78868 - RNA, 1410 nt, Artificial Sequence
  derived and/or modified CDS sequence (opt1) from neuraminidase__InfluenzaA__ABD61384
augaaccccaaccagaagaucaucaccaucggcagcgugucccugaccaucgccacgaucugcuuccucaugcagaucgccauccuggucaccaccgugacccugcacuucaagcaguacgagugcaacagcccgcccaacaaccaggugaugcucugcgagcccacgaucaucgagcgcaacaucaccgagaucgucuaccugaccaacaccacgaucgagaaggagaucugccccaagcuggcggaguaccggaacugguccaagccgcagugcaacaucaccggguucgcccccuucagcaaggacaacuccauccgccucagcgccggcggggacaucugggugacccgggagcccuacguguccugcgaccccgacaagugcuaccaguucgcccugggccaggggaccacgcugaacaacggccacagcaacgacaccguccacgaccgcaccccguaccggacccuccugaugaacgagcugggcgugcccuuccaccucgggacgaagcaggucugcaucgccugguccagcuccagcugccacgacggcaaggcguggcugcacgugugcgugaccggggacgacgagaacgccaccgccuccuucaucuacaacggccgccugguggacagcaucggguccuggagcaagaagauccuccggacccaggaguccgagugcgucugcaucaacggcacgugcaccguggugaugaccgacggcagcgccuccgggaaggcggacaccaagauccuguucaucgaggagggcaagaucguccacacgagcagccuguccgggagcgcccagcacguggaggagugcuccugcuacccccgcuaccccggcgugcggugcgucugccgcgacaacuggaagggcagcaaccggccgaucguggacaucaacaucaaggacuacuccaucgugagcuccuacgucugcagcgggcucgugggcgacacgccccgcaagaacgacuccagcuccagcucccacugccuggaccccaacaacgaggagggcgggcacggggugaagggcugggccuucgacgacggcaacgacgucuggauggggcggaccaucagcgagaagcugcgcuccggcuacgagaccuucaaggugaucgagggguggagcaagcccaacuccaagcuccagaucaaccggcaggucaucguggaccgcggcaaccggagcggguacuccggcaucuucagcguggagagcaaguccugcaucaaccgcugcuucuacgucgagcugauccggggccgcaagcaggagaccgaggugcuguggaccagcaacuccaucguggucuucugcgggaccagcggcaccuacgggacgggcuccuggccggacggggccgacaucaaccucaugcccaucuga

SEQ ID NO: 78869 - RNA, 1410 nt, Artificial Sequence; identical to SEQ ID NO: 78754
  derived and/or modified CDS sequence (opt1) from neuraminidase__InfluenzaA__ABD61395

SEQ ID NO: 78870 - RNA, 1410 nt, Artificial Sequence; identical to SEQ ID NO: 78851
  derived and/or modified CDS sequence (opt1) from neuraminidase__InfluenzaA__ABD61406

SEQ ID NO: 78871 - RNA, 1413 nt, Artificial Sequence; identical to SEQ ID NO: 78852
  derived and/or modified CDS sequence (opt1) from neuraminidase__InfluenzaA__ABD61521

SEQ ID NO: 78872 - RNA, 1410 nt, Artificial Sequence
  derived and/or modified CDS sequence (opt1) from neuraminidase__InfluenzaA__ABD61532
augaaccccaaccagaagaucaucaccaucggcagcgugucccugaccaucgccacgaucugcuuccucaugcagaucgccauccuggucaccaccgugacccugcacuucaagcaguacgagugcagcuccccgcccaacaaccaggugaugcccugcgagcccaucaucaucgagcgcaacaucacggagaucgucuaccucaccaacaccaccaucgagaaggagaucugcccgaagcugguggaguaccggaacuggagcaagccccagugcaagaucacgggguucgcgcccuucuccaaggacaacagcauccgccuguccgccggcggggacaucugggugacccgggagcccuacgucagcugcgacccgggcaagugcuaccaguucgcccucgggcagggcaccacccugaacaacaagcacuccaacgacacgauccacgaccgcacccccuaccggacccugcucaugaacgagcugggcgugcccuuccaccuggggaccaagcaggucugcaucgccuggagcuccagcuccugccacgacggcaaggccuggcuccacgugugcgugacggggcacgacaagaacgcgaccgccagcuucaucuacgacggccgccugguggacuccaucgggagcugguccaagaacauccugcggacccaggagagcgagugcgucugcaucaacgggaccugcacgguggugaugaccgacggcuccgccagcgagcgcgccgacaccaagauccucuucaucgaggagggcaagaucguccacaucagcccccuguccggcagcgcgcagcacguggaggagugcuccugcuacccgcgguaccccggggugcgcugcgucugccgggacaacuggaagggcagcaaccgccccaucguggacaucaacgugaaggacuacuccaucgucagcuccuacgugugcagcggccuggugggggacacgccccggaagaacgaccgcuccagcuccagcuacugccggaacccgaacaacgagaagggcaaccacggggucaagggcugggccuucgacgacgggaacgacguguggaugggccgcaccaucggcgaggagcuccgguccggguacgagaccuucaaggucaucggcggguggagcacccccaacuccaagcugcagaucaaccgccaggugaucguggacagcgagaaccgguccggcuacagcgggaucuucuccgucgagggcaagagcugcaucaaccgcugcuucuacguggagcugauccggggccgcgagcaggagacccgcgugugguggacgagcaacuccaucgucguguucugcgggaccagcggcaccuacgggaccggcuccuggcccgacggggccgacaucagccucaugcccaucuga

SEQ ID NO: 78873 - RNA, 1413 nt, Artificial Sequence
  derived and/or modified CDS sequence (opt1) from neuraminidase__InfluenzaA__ABD61543
augaaccccaaccagaagaucaucaccaucggcagcaucuccaucgccaucgggaucaucagccugaugcuccagaucggcaacaucaucuccaucugggccagccacuccauccagaccgggagccagaaccacacgggcaucugcaaccagcgcaucaucaccuacgagaacuccaccugggugaaccacaccuacgucaacaucaacaacacgaacgugguggcggggaaggacaagaccagcgucacccuggccggcaacuccagccugugcuccaucagcggcugggccaucuacaccaaggacaacuccauccggaucgggagcaagggcgacguguucgugauccgcgagccguucaucuccugcagccaccucgagugccggacguucuuccugacccagggggcccugcucaacgacaagcacuccaacggcaccgucaaggaccgcagccccuaccgggcccugauguccugcccccugggggaggcgcccagcccguacaacagcaaguucgaguccguggccuggagcgccuccgccugccacgacggcaugggcuggcucaccaucgggaucagcggccccgacaacggggcgguggccguccugaaguacaacggcaucaucacggagaccaucaaguccuggaagaagcgcauccugcggacccaggagagcgagugcgugugcgugaacggcuccugcuucaccaucaugacggacgggcccagcaacggcgccgccuccuacaagaucuucaagaucgagaaggggaaggucaccaagagcaucgagcucaacgcccccaacuuccacuacgaggagugcuccugcuacccggacaccggcaccgugaugugcgugugccgcgacaacuggcacgggagcaaccggcccugggucuccuucaaccagaaccuggacuaccagaucggcuacaucugcagcggcguguucggggacaacccccgccccaaggacggcgagggguccugcaacccggugacggucgacggcgcggacggggugaagggcuucagcuacaaguacggcaacgggguguggaucggccggaccaaguccaaccgccugcggaagggguucgagaugaucugggaccccaacggcuggaccgacaccgacagcaacuucuccgucaagcaggacgugguggccaucacggacuggagcggguacagcggcaacuucguccagcaccccgagcucaccggccuggacugcauccgccccugcuucuggguggagcugguccgggggcucccgcgcgagaacaccaccaucuggacguccggcagcuccaucagcuucugcggggugaacuccgacaccgccaacuggagcuggcccgacggcgccgagcugcccuucaccaucgacaaguga

SEQ ID NO: 78874 - RNA, 1413 nt, Artificial Sequence; identical to SEQ ID NO: 78852
  derived and/or modified CDS sequence (opt1) from neuraminidase__InfluenzaA__ABD63066

SEQ ID NO: 78875 - RNA, 1410 nt, Artificial Sequence; identical to SEQ ID NO: 78277
  derived and/or modified CDS sequence (opt1) from neuraminidase__InfluenzaA__ABD77601

SEQ ID NO: 78876 - RNA, 1410 nt, Artificial Sequence
  derived and/or modified CDS sequence (opt1) from neuraminidase__InfluenzaA__ABD77612
augaaccccaaccagaagaucaucaccaucggcagcgugucccugaccaucgccacgaucugcuuccucaugcagaucgccauccuggucaccaccgugacccugcacuucaagcaguacgagugcaacagcccgcccaacaaccaggugaugcucugcgagcccacgaucaucgagcgcaacaucaccgagaucgucuaccugaccaacaccacgaucgagaaggagaugugccccaagcuggcggaguaccggaacuggcucaagccgcagugcaacaucaccggguucgcccccuucuccaaggacaacagcauccgccuguccgccggcggggacaucugggugacccgggagcccuacgugagcugcgaccccgacaagugcuaccaguucgcccugggccaggggaccacgcucaacaacggccacuccaacgacaccguccacgaccgcaccccguaccggacccugcugaugaacgagcucggcgugcccuuccaccuggggacgaagcaggucugcaucgccuggagcuccagcuccugccacgacggcaaggcguggcugcacgugugcgugaccggggacgacgagaacgccaccgccagcaucaucuacaacggccgccucguggacuccaucgggagcugguccaagaagauccugcggacccaggagagcgagugcgucugcaucaacggcacgugcaccguggugaugaccgacggcuccgccagcgggaaggcggacaccaagauccuguucaucaaggagggcaagaucguccacacguccagccucagcggguccgcccagcacguggaggagugcagcugcuacccccgcuaccccggcgugcggugcgucugccgcgacaacuggaagggcuccaaccggccgaucguggacaucaacgugaaggacuacagcaucgucuccagcuacgugugcuccgggcuggugggcgacacgccccgcaagaacgacagcuccagcuccagccacugccuggaccccaacaacgaggagggcgggcacggggucaagggcugggccuucgacgacggcaacgacguguggauggggcggaccaucuccgagaagcuccgcagcggcuacgagaccuucaaggucaucgaggggugguccaaggccaacagcaagcugcagaucaaccgccaggugaucguggaccggggcaaccgguccggguacagcggcaucuucuccgucgagagcaagagcugcaucaaccgcugcuucuacguggagcugauccggggccgcaagcaggagaccgaggugcucuggaccuccaacagcaucgucguguucugcgggaccuccggcaccuacgggacgggcagcuggcccgacggggccgacaucaaccugaugccgaucuga

SEQ ID NO: 78877 - RNA, 1410 nt, Artificial Sequence
  derived and/or modified CDS sequence (opt1) from neuraminidase__InfluenzaA__ABD77634
augaaccccaaccagaagaucaucaccaucggcagcgugucccugaccaucgccacgaucugcuuccucaugcagaucgccauccuggucaccaccgugacccugcacuucaagcaguacgagugcaacagcccgcccaacaaccaggugaugcucugcgagcccacgaucaucgagcgcaacaucaccgagaucgucuaccugaccaacaccacgaucgagaaggagaugugccccaagcuggcggaguaccggaacugguccaagccgcagugcaacaucaccggguucgcccccuucagcaaggacaacuccauccgccucagcgccggcggggacaucugggugacccgggagcccuacguguccugcgaccccgacaagugcuaccaguucgcccugggccaggggaccacgcugaacaacggccacagcaacgacaccguccacgaccgcaccccguaccggacccuccugaugaacgagcugggcgugcccuuccaccucgggacgaagcaggucugcaucgccugguccagcuccagcugccacgacggcaaggcguggcugcacgugugcgugaccggggacgacgagaacgccaccgccuccaucaucuacaacggccgccugguggacagcaucggguccuggagcaagaagauccuccggacccaggaguccgagugcgucugcaucaacggcacgugcaccguggugaugaccgacggcagcgccuccgggaaggcggacaccaagauccuguucaucaaggagggcaagaucguccacacgagcagccuguccgggagcgcccagcacguggaggagugcuccugcuacccccgcuaccccggcgugcggugcgucugccgcgacaacuggaagggcagcaaccggccgaucguggacaucaacgugaaggacuacuccaucgucagcuccuacgugugcagcgggcucgugggcgacacgccccgcaagaacgacuccagcuccagcucccacugccuggaccccaacaacgaggagggcgggcacggggucaagggcugggccuucgacgacggcaacgacguguggauggggcggaccaucagcgagaagcugcgcuccggcuacgagaccuucaaggucaucgagggguggagcaaggccaacuccaagcuccagaucaaccgccaggugaucguggaccggggcaaccggagcggguacuccggcaucuucagcgucgagagcaaguccugcaucaaccgcugcuucuacguggagcugauccggggccgcaagcaggagaccgaggugcuguggaccagcaacuccaucgucguguucugcgggaccagcggcaccuacgggacgggcuccuggcccgacggggccgacaucaaccucaugccgaucuga

SEQ ID NO: 78878 - RNA, 1410 nt, Artificial Sequence; identical to SEQ ID NO: 78877
  derived and/or modified CDS sequence (opt1) from neuraminidase__InfluenzaA__ABD77645

SEQ ID NO: 78879 - RNA, 1410 nt, Artificial Sequence; identical to SEQ ID NO: 78877
  derived and/or modified CDS sequence (opt1) from neuraminidase__InfluenzaA__ABD77656

SEQ ID NO: 78880 - RNA, 1410 nt, Artificial Sequence; identical to SEQ ID NO: 78150
  derived and/or modified CDS sequence (opt1) from neuraminidase__InfluenzaA__ABD77700

SEQ ID NO: 78881 - RNA, 1413 nt, Artificial Sequence; identical to SEQ ID NO: 78852
  derived and/or modified CDS sequence (opt1) from neuraminidase__InfluenzaA__ABD77722

SEQ ID NO: 78882 - RNA, 1413 nt, Artificial Sequence; identical to SEQ ID NO: 78852
  derived and/or modified CDS sequence (opt1) from neuraminidase__InfluenzaA__ABD77733

SEQ ID NO: 78883 - RNA, 1410 nt, Artificial Sequence
  derived and/or modified CDS sequence (opt1) from neuraminidase__InfluenzaA__ABD77744
augaaccccaaccagaagaucaucaccaucggcagcgugucccugaccaucgccacgaucugcuuccucaugcagaucgucauccuggugaccaccgugacccugcacuucaagcaguacgagugcaacagcccgcccaacaaccaggucaugcucugcgagcccacgaucaucgagcgcaacaucaccgagaucguguaccugaccaacaccacgaucgagaaggagaucugccccaagcuggccgaguaccggaacugguccaagccgcagugcaacaucaccggguucgcgcccuucagcaaggacaacuccauccgccucagcgccggcggggacaucugggugacccgggagcccuacgucuccugcgaccccgacaagugcuaccaguucgcccugggccaggggaccacgcugaacaacggccacagcaacgacaccgugcacgaccgcaccccguaccggacccuccugaugaacgagcugggcgugcccuuccaccucgggacgaagcaggucugcaucgccugguccagcuccagcugccacgacggcaaggccuggcugcacgugugcgugaccggggacgacgagaacgcgaccgccuccuucaucuacaacggccgccuggucgacagcaucggguccuggagcaagaagauccuccggacccaggaguccgagugcgugugcaucaacggcacgugcaccguggucaugaccgacggcagcgccuccgggaaggccgacaccaagauccuguucaucgaggagggcaagaucgugcacacgagccugcucagcggguccgcgcagcacguggaggagugcagcugcuacccccgcuaccccggcguccggugcgugugccgcgacaacuggaagggcuccaaccggccgaucguggacaucaacgucaaggacuacagcaucguguccagcuacgugugcuccgggcuggucggcgacacgccccgcaagaacgacagcuccagcuccagccacugccuggaccccaacaacgaggagggcgggcacggggugaagggcugggccuucgacgacggcaacgacgucuggauggggcggaccaucuccgagaagcuccgcagcggcuacgagaccuucaaggugaucgaggggugguccaagcccaacagcaagcugcagaucaaccgccaggugaucgucgaccggggcaaccgguccggguacagcggcaucuucuccguggagggcaagagcugcaucaaccgcugcuucuacguggagcugauccgggggcgcaagcaggagaccgagguccucuggaccagcaacuccaucgugguguucugcggcaccagcgggaccuacggcacgggguccuggccggacggcgccgacaucaaccugaugcccaucuga

SEQ ID NO: 78884 - RNA, 1410 nt, Artificial Sequence; identical to SEQ ID NO: 78877
  derived and/or modified CDS sequence (opt1) from neuraminidase__InfluenzaA__ABD77755

SEQ ID NO: 78885 - RNA, 1410 nt, Artificial Sequence; identical to SEQ ID NO: 78877
  derived and/or modified CDS sequence (opt1) from neuraminidase__InfluenzaA__ABD77766

SEQ ID NO: 78886 - RNA, 1410 nt, Artificial Sequence
  derived and/or modified CDS sequence (opt1) from neuraminidase__InfluenzaA__ABD77777
augaaccccaaccagaagaucaucaccaucggcagcgugucccugaccaucgccacgaucugcuuccucaugcagaucgucauccuggugaccaccgugacccugcacuucaagcaguacgagugcaacagcccgcccaacaaccaggucaugcccugcgagcccacgaucaucgagcgcaacaucaccgagaucguguaccucaccaacaccacgaucgagaaggagaucugcccgaagcuggccgaguaccggaacugguccaagccccagugcaacaucaccggguucgcgcccuucagcaaggacaacuccauccgccugagcgccggcggggacaucugggugacccgggagcccuacgucuccugcgacccggacaagugcuaccaguucgcccucggccaggggaccacgcugaacaacggccacagcaacgacaccgugcacgaccgcacccccuaccggacccugcucaugaacgagcugggcgugcccuuccaccuggggacgaagcaggucugcaucgccugguccagcuccagcugccacgacggcaaggccuggcuccacgugugcgugaccggggacgacgagaacgcgaccgccuccuucaucuacaacggccgccuggucgacagcaucggguccuggagcaagaagauccugcggacccaggaguccgagugcgugugcaucaacggcacgugcaccguggucaugaccgacggcagcgccuccgggaaggccgacaccaagauccucuucaucgaggagggcaagaucgugcacacgagccugcugagcggguccgcgcagcacguggaggagugcagcugcuacccccgcuacccgggcguccggugcgugugccgcgacaacuggaagggcuccaaccggcccaucguggacaucaacgucaaggacuacagcaucguguccagcuacgugugcuccgggcucgucggcgacacgccccgcaagaacgacagcuccagcuccagccacugccuggaccccaacaacgaggagggcgggcacggggugaagggcugggccuucgacgacggcaacgacgucuggauggggcggaccaucuccgagaagcugcgcagcggcuacgagaccuucaaggugaucgaggggugguccaagccgaacagcaagcuccagaucaaccgccaggugaucgucgaccggggcaaccgguccggguacagcggcaucuucuccguggagggcaagagcugcaucaaccgcugcuucuacguggagcugauccgggggcgcaagcaggagaccgagguccuguggaccagcaacuccaucgugguguucugcggcaccagcgggaccuacggcacgggguccuggcccgacggcgccgacaucaaccucaugcccaucuga

SEQ ID NO: 78887 - RNA, 1410 nt, Artificial Sequence; identical to SEQ ID NO: 78886
  derived and/or modified CDS sequence (opt1) from neuraminidase__InfluenzaA__ABD77788

SEQ ID NO: 78888 - RNA, 1362 nt, Artificial Sequence
  derived and/or modified CDS sequence (opt1) from neuraminidase__InfluenzaA__ABD77799
augaaccccaaccagaagaucaucaccaucggcagcaucugcaugguggucgggaucaucucccugauccuccagaucggcaacaucaucagcaucuggaucucccacagcauccagaccgggaaccagaaccacacgggcaucugcaaccaggggaucaucaccuacaacgugguggccggccaggacuccaccagcgucauccugaccggcaacuccagccugugcccgauccgcgggugggccauccacuccaaggacaacggcauccggaucgggagcaagggcgacguguucgugauccgcgagcccuucaucuccugcagccaccucgagugccggacguucuuccugacccagggggcgcugcucaacgacaagcacuccaacggcaccgucaaggaccgcagccccuaccgggcccugauguccugccccgugggcgaggccccgagccccuacaacucccgcuucgagagcguggccugguccgccagcgcgugccacgacgggaugggcuggcugaccaucgggaucagcggccccgacaacggcgccgucgccgugcucaaguacaacgggaucaucacggagaccaucaaguccuggcggaagaagauccugcgcacccaggagagcgagugcacgugcgugaacggcuccugcuucaccaucaugaccgacgggcccagcaacggccuggccuccuacaagaucuucaagaucgagaaggggaaggucaccaagagcaucgagcucaacgcgccgaacucccacuacgaggagugcagcugcuaccccgacaccggcaaggugaugugcgugugccgggacaacuggcacggcuccaaccgccccugggucagcuucgaccagaaccuggacuaccagaucggguacaucugcuccggcguguucggggacaacccccggccgaaggacggcacggggagcugcggccccguguccgccgacggcgccaacggggucaagggcuucagcuaccgcuacgggaacggcguguggaucgggcggaccaaguccgacagcucccgccacggcuucgagaugaucugggaccccaacggcuggaccgagaccgacagccgguucuccgugcgccaggacgucguggccaugacggaccggagcggguacagcggcuccuucgugcagcaccccgagcugaccgggcucgacugcaugcgcccgugcuucugggucgagcugauccggggccgccccgaggaggagaccaucuggaccagcggcuccaucaucagcuucugcggggugaacuccgacacggucgacuggagcuggcccgacggcgccgagcugcccuucaccaucgacaaguga

SEQ ID NO: 78889 - RNA, 1410 nt, Artificial Sequence
  derived and/or modified CDS sequence (opt1) from neuraminidase__InfluenzaA__ABD77810
augaaccccaaccagaagaucaucaccaucggcagcaucugcaugguggucgggaucaucucccugauccuccagaucggcaacaucgugagcaucuggaucucccacagcauccagaccgggaaccagaaccacacggggaccugcaaccaguccaucaucaccuacaagaacagcaccugggugaaccagacguacgucaacaucuccaacaccaacgugguggccggcaaggacaccaccagcgucauccuggccggcaacuccagccugugcccgauccgcggcugggcgaucuacuccaaggacaacggggugcggaucggcagcaagggggacguguucgucauccgcgagcccuucaucuccugcagccaccucgagugccggacguucuuccugacccagggcgcccugcucaacgacaagcacuccaacgggaccgugaaggaccgcagccccuaccgggcccugauguccugccccgugggcgaggccccgagccccuacaacucccgcuucgagagcgucgccuggagcgcguccgccugccacgacggcaugggguggcugaccaucggcaucagcgggcccgacgacggcgccguggccgugcucaaguacaacggcaucaucacggagaccaucaaguccuggcggaaggagauccugcgcacccaggagagcgagugcgucugcgugaacggguccugcuucaccaucaugacggacggccccagcgggggcccggcguccuacaagaucuucaagaucgagaaggggaaggugaccaagagcaucgagcuggacgcccccaacucccacuacgaggagugcagcugcuaccccgacaccuccaaggucaugugcgugugccgggacaacuggcacggcagcaaccgccccuggguguccuucgaccagaaccucgacuaccagaugggcuacaucugcagcggggucuucggcgacaacccgcggcccaaggacgggaagggcuccugcgggcccguguacguggacggcgccaacggcgucaagggguucagcuaccgcuacggcaacgggguguggaucggccggaccaaguccaacagcucccgccagggguucgagaugaucugggaccccaacggcuggacggagaccgacagcaacuucuucaccaagcaggacgucguggccgugaccgacuggagcggcuacuccgggagcuucguccagcacccggagcugacgggccuggacugcaugcggcccugcuucuggguggagcucauccgcgggcggcccaaggagaacaccaucuggaccuccggcagcuccaucagcuucugcggcgugaacuccgacaccgucgacuggagcuggcccgacggggccgagcugccguucacgaucgacaaguga

SEQ ID NO: 78890 - RNA, 1410 nt, Artificial Sequence
  derived and/or modified CDS sequence (opt1) from neuraminidase__InfluenzaA__ABD77832
augaaccccaaccagaagaucaucaccaucggcagcgugucccugaccaucgccacgaucugcuuccucaugcagaucgccauccuggucaccaccgugacccugcacuucaagcaguacgagugcaacagcccgcccaacaaccaggugaugcucugcgagcccacgaucaucgagcgcaacaucaccgagaucgucuaccugaccaacaccacgaucgagaaggagaucugccccaagcuggcggaguaccggaacugguccaagccgcagugcaagaucaccggguucgcccccuucagcaaggacaacuccauccgccucagcgccggcggggacaucugggugacccgggagcccuacguguccugcgaccccgacaagugcuaccaguucgcccugggccaggggaccacgcugaacaaccgccacagcaacgacaccguccacgaccggaccccguaccgcacccuccugaugaacgagcugggcgugcccuuccaccucggcacgaagcaggucugcaucgccugguccagcuccagcugccacgacgggaaggcguggcugcacgugugcgugaccggccacgacgagaacgccaccgccuccuucaucuacgggggccggcugguggacagcaucggguccuggagcaagaagauccuccgcacccaggaguccgagugcgucugcaucaacggcacgugcaccguggugaugaccgacggcagcgccuccgggcgggcggacaccaagauccuguucaucgaggagggcaagaucguccacaucagcccccugagcggguccgcccagcacguggaggagugcagcugcuacccccgcuacuccggcgugcggugcgucugccgcgacaacuggaagggcagcaaccggccgaucguggacaucaacgugaaggacuacuccaucgucagcuccuacgugugcagcgggcucgugggcgacacgccccgcaagaacgacuccagcuccagcucccacugccugaaccccaacaacgaggagggcgggcacggggucaagggcugggccuucgacgacggcaacgacguguggauggggcggaccaucagcgagaaguuccgcuccggcuacgagaccuucaaggucaucgggggcuggagcaagcccaacuccaagcugcagaucaaccgccaggugaucguggaccgggggaaccggagcggcuacuccggcaucuucagcgucgagggcaagagcugcaucaaccgcugcuucuacguggagcucauccgggggcgcaagcaggagaccgaggugugguggacguccaacagcaucgucguguucugcgggaccuccggcaccuacgggaccggcagcuggccggacggcgccgacaucaaccugaugcccaucuga

SEQ ID NO: 78891 - RNA, 1410 nt, Artificial Sequence
  derived and/or modified CDS sequence (opt1) from neuraminidase__InfluenzaA__ABD77876
augaaccccaaccagaagaucaucaccaucggcagcgugucccugaccaucgccacgaucugcuuccucaugcagaucgccauccuggucaccaccgugacccugcacuucaagcaguacgagugcaacagcccgcccaacaaccaggugaugcucugcgagcccacgaucaucgagcgcaacaucaccgagaucgucuaccugaccaacaccacgaucgagaaggagaucugccccaagcuggcggaguaccggaacugguccaagccgcagugcaagaucaccggguucgcccccuucagcaaggacaacuccauccgccucagcgccggcggggacaucugggugacccgggagcccuacguguccugcgaccccgacaagugcuaccaguucgcccugggccaggggaccacgcugaacaaccgccacagcaacgacaccguccacgaccggaccccguaccgcacccuccugaugaacgagcugggcgugcccuuccaccucggcacgaagcaggucugcaucgccugguccagcuccagcugccacgacgggaaggcguggcugcacgugugcgugaccggccacgacgagaacgccaccgccuccuucaucuacgacgggcggcugguggacagcaucggcuccuggagcaagaagauccuccgcacccaggaguccgagugcgucugcaucaacgggacgugcaccguggugaugaccgacggcagcgccuccggccgggcggacaccaagauccuguucaucgaggaggggaagaucguccacaucagcccccugagcggcuccgcccagcacguggaggagugcagcugcuacccccgcuacuccggggugcggugcgucugccgcgacaacuggaagggcagcaaccggccgaucguggacaucaacgugaaggacuacuccaucgucagcuccuacgugugcagcggccucgugggggacacgccccgcaagaacgacuccagcuccagcucccacugccugaaccccaacaacgaggagggcgggcacggcgucaaggggugggccuucgacgacggcaacgacguguggaugggccggaccaucagcgagaagcugcgcuccggguacgagaccuucaaggucaucgagggcuggagcaagcccaacuccaagcuccagaucaaccgccaggugaucguggaccgggggaaccggagcggcuacuccgggaucuucagcgucgagggcaagagcugcaucaaccgcugcuucuacguggagcugauccggggccgcaagcaggagaccgaggugugguggacguccaacagcaucgucguguucugcgggaccuccggcaccuacgggaccggcagcuggccggacggggccgacaucaaccugaugcccaucuga

SEQ ID NO: 78892 - RNA, 1410 nt, Artificial Sequence; identical to SEQ ID NO: 78150
  derived and/or modified CDS sequence (opt1) from neuraminidase__InfluenzaA__ABD77887

SEQ ID NO: 78893 - RNA, 1410 nt, Artificial Sequence
  derived and/or modified CDS sequence (opt1) from neuraminidase__InfluenzaA__ABD77898
augaaccccaaccagaagaucaucaccaucggcagcgugucccugaccaucgccacgaucugcuuccucaugcagaucgccauccuggucaccaccgugacccugcacuucaagcaguacgagugcaacagcccgcccaacaaccaggugaugcucugcgagcccacgaucaucgagcgcaacaucaccgagaucgucuaccugaccaacaccacgaucgagaaggagaucugccccaagcuggcggaguaccggaacugguccaagccgcagugcaagaucaccggguucgcccccuucagcaaggacaacuccauccgccucagcgccggcggggacaucugggugacccgggagcccuacguguccugcgaccccgacaagugcuaccaguucgcccugggccaggggaccacgcugaacaaccgccacagcaacgacaccguccacgaccggaccccguaccgcacccuccugaugaacgagcugggcgugcccuuccaccucggcacgaagcaggucugcaucgccugguccagcuccagcugccacgacgggaaggcguggcugcacgugugcgugaccggccacgacgagaacgccaccgccuccuucaucuacgacgggcggcugguggacagcaucggcuccuggagcaagaagauccuccgcacccaggaguccgagugcgucugcaucaacgggacgugcaccguggugaugaccgacggcagcgccuccggccgggcggacaccaagauccuguucaucgaggaggggaagaucauccacaucagcccccugagcggcuccgcccagcacgucgaggagugcagcugcuacccccgcuacccgggggugcggugcgugugccgcgacaacuggaagggcuccaaccggcccaucgucgacaucaacgugaaggacuacagcaucguguccagcuacgucugcuccggccucgugggggacacgccccgcaagaacgacagcuccagcuccagccacugccugaaccccaacaacgaggagggcgggcacggcgugaaggggugggccuucgacgacggcuccgacgucuggaugggccggaccaucagcgagaagcugcgcuccggguacgagaccuucaaggugaucgagggcuggagcaagccgaacuccaagcuccagaucaaccggcaggucaucguggaccgcgggaaccggagcggcuacuccgggaucuucagcguggagggcaagagcugcaucaaccgcugcuucuacgucgagcugauccggggccgcaagcaggagaccgaggugugguggacguccaacagcaucguggucuucugcgggaccuccggcaccuacgggaccggcagcuggcccgacggggccgacaucaaccugaugcccaucuga

SEQ ID NO: 78894 - RNA, 1410 nt, Artificial Sequence
  derived and/or modified CDS sequence (opt1) from neuraminidase__InfluenzaA__ABD77909
augaaccccaaccagaagaucaucaccaucggcagcgugucccugaccaucgccacgaucugcuuccucaugcagaucgccauccuggucaccaccgugacccugcacuucaagcaguacgagugcaacagcccgcccaacaaccaggugaugcucugcgagcccacgaucaucgagcgcaacaucaccgagaucgucuaccugaccaacaccacgaucgagaaggagaucugccccaagcuggcggaguaccggaacugguccaagccgcagugcaagaucaccggguucgcccccuucagcaaggacaacuccauccgccucagcgccggcggggacaucugggugacccgggagcccuacguguccugcgaccccgacaagugcuaccaguucgcccugggccaggggaccacgcugaacaaccgccacagcaacgacaccguccacgaccggaccccguaccgcacccuccugaugaacgagcugggcgugcccuuccaccucggcacgaagcaggucugcaucgccugguccagcuccagcugccacgacgggaaggcguggcugcacgugugcgugaccggccacgacgagaacgccaccgccuccuucaucuacgacgggcggcugguggacagcaucggcuccuggagcaagaagauccuccgcacccaggaguccgagugcgucugcaucaacgggacgugcaccguggugaugaccgacggcagcgccuccggccgggcggacaccaagauccuguucaucgaggaggggaagaucguccacaucagcccccugagcggcuccgcccagcacguggaggagugcagcugcuacccccgcuacccgggggugcggugcgucugccgcgacaacuggaagggcuccaaccggcccaucguggacaucaacgugaaggacuacagcaucgucuccagcuacgugugcuccggccucgugggggacacgccccgcaagaacgacagcuccagcuccagccacugccugaaccccaacaacgaggagggcgggcacggcgucaaggggugggccuucgacgacggcaacgacguguggaugggccggaccaucuccgagaagcugcgcagcggguacgagaccuucaaggucaucgagggcugguccaagccgaacagcaagcuccagaucaaccgccaggugaucguggaccgggggaacuccagcggcuacuccgggaucuucagcgucgagggcaagagcugcaucaaccggugcuucuacguggagcugauccgcggccggaagcaggagaccgaggugugguggacguccaacagcaucgucguguucugcgggaccuccggcaccuacgggaccggcagcuggcccgacggggccgacaucaaccugaugcccaucuga

SEQ ID NO: 78895 - RNA, 1413 nt, Artificial Sequence; identical to SEQ ID NO: 78852
  derived and/or modified CDS sequence (opt1) from neuraminidase__InfluenzaA__ABD77920

SEQ ID NO: 78896 - RNA, 1413 nt, Artificial Sequence; identical to SEQ ID NO: 78852
  derived and/or modified CDS sequence (opt1) from neuraminidase__InfluenzaA__ABD77931

SEQ ID NO: 78897 - RNA, 1413 nt, Artificial Sequence; identical to SEQ ID NO: 78852
  derived and/or modified CDS sequence (opt1) from neuraminidase__InfluenzaA__ABD77942

SEQ ID NO: 78898 - RNA, 1413 nt, Artificial Sequence
  derived and/or modified CDS sequence (opt1) from neuraminidase__InfluenzaA__ABD77953
augaaccccaaccagaagaucaucaccaucggcagcaucuccaucgccaucgggaucaucagccugaugcuccagaucggcaacaucaucuccaucugggccagccacuccauccagaccgggagccagaaccacacgggcaucugcaaccagcgcaucaucaccuacgagaacuccaccugggugaaccacaccuacgucaacaucaacaacacgaacgugguggcggggaaggacaagaccagcgucacccuggccggcaacuccagccugugcuccaucagcggcugggccaucuacaccaaggacaacuccauccggaucgggagcaagggcgacguguucgugauccgcgagccguucaucuccugcagccaccucgagugccggacguucuuccugacccagggggcccugcucaacgacaagcacuccaacggcaccgucaaggaccgcagccccuaccgggcccugauguccugcccccugggggaggcgcccagcccguacaacagcaaguucgaguccguggccuggagcgccuccgccugccacgacggcaugggcuggcucaccaucgggaucagcggccccgacaacggggcgguggccguccugaaguacaacggcaucaucacggagaccaucaaguccuggaagaagcgcauccugcggacccaggagagcgagugcgugugcgugaacggcuccugcuucaccaucaugacggacgggcccagcaacggcgccgccuccuacaagaucuucaagaucgagaaggggaaggucaccaagagcaucgagcucaacgcccccaacuuccacuacgaggagugcuccugcuacccggacaccggcaccgugaugugcgugugccgcgacaacuggcacgggagcaaccggcccugggucuccuucaaccagaaccuggacuaccagaucggcuacaucugcagcggcguguucggggacaacccccgccccaaggacggcgagggguccugcaacccggugacggucgacggcgcggacggggugaagggcuucagcuacaaguacggcaacgggguguggaucggccggaccaaguccaaccgccugcggaagggguucgagaugaucugggaccccaacggcuggaccgacaccgacagcaacuucuccgucaagcaggacgugguggccaucacggacuggagcggguacagcggcuccuucguccagcaccccgagcucaccggccuggacugcauccgccccugcuuccugguggagcucguccgggggcugccgcgcgagaacaccaccaucuggacgagcggcuccagcaucuccuucugcggggugaacagcgacaccgccaacugguccuggcccgacggcgccgagcugcccuucaccaucgacaaguga

SEQ ID NO: 78899 - RNA, 1413 nt, Artificial Sequence
  derived and/or modified CDS sequence (opt1) from neuraminidase__InfluenzaA__ABD77964
augaaccccaaccagaagaucaucaccaucggcagcaucuccaucgccaucgggaucaucagccugaugcuccagaucggcaacaucaucuccaucugggccagccacuccauccagacccgcagccagaaccacacggggaucugcaaccagcggaucaucaccuacgagaacuccaccugggugaaccacaccuacgucaacaucaacaacacgaacgugguggcgggcaaggacaagaccagcgucacccuggccgggaacuccagccugugcuccaucagcggcugggccaucuacaccaaggacaacuccauccgcaucggcagcaagggggacguguucgugauccgggagccguucaucuccugcagccaccucgagugccgcacguucuuccugacccagggcgcccugcucaacgacaagcacuccaacgggaccgucaaggaccggagccccuaccgcgcccugauguccugcccccugggcgaggcgcccagcccguacaacagcaaguucgaguccguggccuggagcgccuccgccugccacgacgggaugggcuggcucaccaucggcaucagcgggcccgacaacggcgcgguggccguccugaaguacaacgggaucaucacggagaccaucaaguccuggaagaagcggauccugcgcacccaggagagcgagugcgugugcgugaacggcuccugcuucaccaucaugacggacggccccagcaacggggccgccuccuacaagaucuucaagaucgagaagggcaaggucaccaagagcaucgagcucaacgcccccaacuuccacuacgaggagugcuccugcuacccggacaccgggaccgugaugugcgugugccgggacaacuggcacggcagcaaccgccccugggucuccuucaaccagaaccuggacuaccagaucggguacaucugcagcggcguguucggcgacaacccccggcccaaggacggggagggcuccugcaacccggugacggucgacggggcggacggcgugaagggguucagcuacaaguacggcaacggcguguggaucgggcgcaccaaguccaaccggcugcgcaagggcuucgagaugaucugggaccccaacggguggaccgacaccgacagcaacuucuccgucaagcaggacgugguggccaucacggacuggagcggcuacagcggguccuucguccagcaccccgagcucaccggccuggacugcauccggcccugcuucuggguggagcugguccgcggccucccgcgggagaacaccaccaucuggacgagcggguccagcaucuccuucugcggcgugaacagcgacaccgccaacugguccuggcccgacggggccgagcugcccuucaccaucgacaaguga

SEQ ID NO: 78900 - RNA, 1413 nt, Artificial Sequence; identical to SEQ ID NO: 78852
  derived and/or modified CDS sequence (opt1) from neuraminidase__InfluenzaA__ABD77975

SEQ ID NO: 78901 - RNA, 1413 nt, Artificial Sequence; identical to SEQ ID NO: 78852
  derived and/or modified CDS sequence (opt1) from neuraminidase__InfluenzaA__ABD77986

SEQ ID NO: 78902 - RNA, 1413 nt, Artificial Sequence
  derived and/or modified CDS sequence (opt1) from neuraminidase__InfluenzaA__ABD77997
augaaccccaaccagaagaucaucaccaucggcagcaucuccaucgccaucgggauccugagccucaugcugcagaucggcaacaucaucuccaucugggccagccacuccauccagaccgggagccagaaccacacgggcaucugcaaccagcgcaucaucaccuacgagaacuccaccugggugaaccacaccuacgucaacaucaacaacacgaacgugguggcggggaaggacaagaccagcgucacccuggccggcaacuccagccucugcuccaucagcggcugggccaucuacaccaaggacaacuccauccggaucgggagcaagggcgacguguucgugauccgcgagccguucaucuccugcagccaccuggagugccggacguucuuccugacccagggggcccuccugaacgacaagcacuccaacggcaccgucaaggaccgcagccccuaccgggcccugauguccugcccccucggggaggcgcccagcccguacaacagcaaguucgaguccguggccuggagcgccuccgccugccacgacggcaugggcuggcugaccaucgggaucagcggccccgacaacggggcgguggccguccugaaguacaacggcaucaucacggagaccaucaaguccuggaagaagcgcauccuccggacccaggagagcgagugcgugugcgugaacggcuccugcuucaccaucaugacggacgggcccagcaacggcgccgccuccuacaagaucuucaagaucgagaaggggaaggucaccaagagcaucgagcugaacgcccccaacuuccacuacgaggagugcuccugcuacccggacaccggcaccgugaugugcgugugccgcgacaacuggcacgggagcaaccggcccugggucuccuucaaccagaaccuggacuaccagaucggcuacaucugcagcggcguguucggggacaacccccgccccaaggacggcgagggguccugcaacccggugacggucgacggcgcggacggggugaagggcuucagcuacaaguacggcaacgggguguggaucggccggaccaaguccaaccgccuccggaagggguucgagaugaucugggaccccaacggcuggaccgacaccgacaacaacuucagcgucaagcaggacgugguggccaucacggacugguccggguacagcggcagcuucguccagcaccccgagcugaccggccuggacugcauccgccccugcuucuggguggagcucguccgggggcugccgcgcgagaacaccaccaucuggacguccggcagcuccaucagcuucugcggggugaacuccgacaccgccaacuggagcuggcccgacggcgccgagcugcccuucaccaucgacaaguga

SEQ ID NO: 78903 - RNA, 1413 nt, Artificial Sequence; identical to SEQ ID NO: 78852
  derived and/or modified CDS sequence (opt1) from neuraminidase__InfluenzaA__ABD78008

SEQ ID NO: 78904 - RNA, 1413 nt, Artificial Sequence; identical to SEQ ID NO: 78852
  derived and/or modified CDS sequence (opt1) from neuraminidase__InfluenzaA__ABD78019

SEQ ID NO: 78905 - RNA, 1413 nt, Artificial Sequence
  derived and/or modified CDS sequence (opt1) from neuraminidase__InfluenzaA__ABD78030
augaaccccaaccagaagaucaucaccaucggcagcaucuccaucgccaucgggaucaucagccugaugcuccagaucggcaacaucaucuccaucugggccagccacuccauccagaccgggagccagaaccacacgggcaucugcaaccagcgcaucaucaccuacgagaacuccaccugggugaaccacaccuacgucaacaucaacaacacgaacgugguggcggggaaggacaagaccagcgucacccuggccggcaacuccagccugugcuccaucagcggcugggccaucuacaccaaggacaacuccauccggaucgggagcaagggcgacguguucgugauccgcgagccguucaucuccugcagccaccucgagugccggacguucuuccugacccagggggcccugcucaacgacaagcacuccaaccgcaccgucaaggaccggagccccuaccgcgcccugauguccugcccccugggcgaggcgcccagcccguacaacagcaaguucgaguccguggccuggagcgccuccgccugccacgacgggaugggcuggcucaccaucggcaucagcgggcccgacaacggcgcgguggccguccugaaguacaacgggaucaucacggagaccaucaaguccuggaagaagcggauccugcgcacccaggagagcgagugcgugugcgugaacggcuccugcuucaccaucaugacggacggccccaacaacggggccgccagcuacaagaucuucaagaucgagaagggcaaggucaccaaguccaucgagcucaacgcccccaacuuccacuacgaggagugcagcugcuacccggacaccgggaccgugaugugcgugugccgggacaacuggcacggcuccaaccgccccugggucagcuucaaccagaaccuggacuaccagaucggguacaucugcuccggcguguucggcgacaacccccggcccaaggacggggagggcagcugcaacccggugacggucgacggggcggacggcgugaagggguucuccuacaaguacggcaacggcguguggaucgggcgcaccaagagcaaccggcugcgcaagggcuucgagaugaucugggaccccaacggguggaccgacaccgacuccaacuucagcgucaagcaggacgugguggccaucacggacugguccggcuacagcgggagcuucguccagcaccccgagcucaccggccuggacugcauccggcccugcuucuggguggagcugguccgcggccucccgcgggagaacaccaccaucuggacguccgggagcuccaucagcuucugcggcgugaacuccgacaccgccaacuggagcuggcccgacggggccgagcugcccuucaccaucgacaaguga

SEQ ID NO: 78906 - RNA, 1413 nt, Artificial Sequence
  derived and/or modified CDS sequence (opt1) from neuraminidase__InfluenzaA__ABD78041
augaaccccaaccagaagaucaucaccaucggcagcaucuccaucgccaucgggaucaucagccugaugcuccagaucggcaacaucaucuccaucugggccagccacuccauccagaccgggagccagaaccacacgggcaucugcaaccagcgcaucaucaccuacgagaacuccaccugggugaaccacaccuacgucaacaucaacaacacgaacgugguggcggggaaggacaagaccagcgucacccuggccggcaacuccagccugugcuccaucagcggcugggccaucuacaccaaggacaacuccauccggaucgggagcaagggcgacguguucgugauccgcgagccguucaucuccugcagccaccucgagugccggacguucuuccugacccagggggcccugcucaacgacaagcacuccaacggcaccgucaaggaccgcagccccuaccgggcccugauguccugcccccugggggaggcgcccagcccguacaacagcaaguucgaguccguggccuggagcgccuccgccugccacgacggcaugggcuggcucaccaucgggaucagcggccccgacaacggggcgguggccguccugaaguacaacggcaucaucacggagaccaucaaguccuggaagaagcgcauccugcggacccaggagagcgagugcgugugcgugaacggcuccugcuucaccaucaugacggacgggcccagcaacggcgccgccuccuacaagaucuucaagaucgagaaggggaaggucaccaagagcaucgagcucaacgcccccaacuuccacuacgaggagugcuccugcuacccggacaccagcaccgugaugugcgugugccgcgacaacuggcacggcuccaaccggcccugggucagcuucaaccagaaccuggacuaccagaucggguacaucugcuccggcguguucggcgacaacccccgccccaaggacggggagggcagcugcaacccggugacggucgacggggcggacggcgugaagggguucuccuacaaguacggcaacggcguguggaucgggcggaccaagagcaaccgccugcggaagggcuucgagaugaucugggaccccaacggguggaccgacaccgacuccaacuucagcgucaagcaggacgugguggccaucacggacuggagcggcuacuccgggagcuucguccagcaccccgagcucaccggccuggacugcauccgccccugcuucuggguggagcugguccggggccucccgcgcgagaacaccaccaucuggacguccgggagcuccaucagcuucugcggcgugaacuccgacaccgccaacuggagcuggcccgacggggccgagcugcccuucaccaucgacaaguga

SEQ ID NO: 78907 - RNA, 1410 nt, Artificial Sequence; identical to SEQ ID NO: 78886
  derived and/or modified CDS sequence (opt1) from neuraminidase__InfluenzaA__ABD78052

SEQ ID NO: 78908 - RNA, 1413 nt, Artificial Sequence; identical to SEQ ID NO: 78420
  derived and/or modified CDS sequence (opt1) from neuraminidase__InfluenzaA__ABD78063

SEQ ID NO: 78909 - RNA, 1413 nt, Artificial Sequence; identical to SEQ ID NO: 78420
  derived and/or modified CDS sequence (opt1) from neuraminidase__InfluenzaA__ABD78074

SEQ ID NO: 78910 - RNA, 1413 nt, Artificial Sequence; identical to SEQ ID NO: 78420
  derived and/or modified CDS sequence (opt1) from neuraminidase__InfluenzaA__ABD78085

SEQ ID NO: 78911 - RNA, 1413 nt, Artificial Sequence; identical to SEQ ID NO: 78420
  derived and/or modified CDS sequence (opt1) from neuraminidase__InfluenzaA__ABD78096

SEQ ID NO: 78912 - RNA, 1410 nt, Artificial Sequence
  derived and/or modified CDS sequence (opt1) from neuraminidase__InfluenzaA__ABD78118
augaaccccaaccagaagaucaucaccaucggcagcgugucccugaccaucgccacgaucugcuuccucaugcagaucgccauccuggucaccaccgugacccugcacuucaagcaguacgagugcaacagcccgcccaacaaccaggugaugcucugcgagcccacgaucaucgagcgcaacaucaccgagaucgucuaccugaccaacaccacgaucgagaaggagaugugccccaagcuggcggaguaccggaacugguccaagccgcagugcaagaucaccggguucgcccccuucagcaaggacaacuccauccgccucagcgccggcggggacaucugggugacccgggagcccuacguguccugcgaccccgacaagugcuaccaguucgcccugggccaggggaccacgcugaacaaccgccacagcaacgacaccguccacgaccggaccccguaccgcacccuccugaugaacgagcugggcgugcccuuccaccucggcacgaagcaggucugcaucgccugguccagcuccagcugccacgacgggaaggcguggcugcacgugugcgugaccggccacgacgagaacgccaccgccuccuucaucuacgacgggcggcugguggacagcaucggcuccuggagcaagaagauccuccgcacccaggaguccgagugcgucugcaucaacgggacgugcaccguggugaugaccgacggcagcgccuccggccgggcggacaccaagauccuguucaucgaggaggggaagaucguccacaucagcccccugagcggcuccgcccagcacguggaggagugcagcugcuacccccgcuacuccggggugcggugcgucugccgcgacaacuggaagggcagcaaccggccgaucguggacaucaacgugaaggacuacuccaucgucagcuccuacgugugcagcggccucgugggggacacgccccgcaagaacgacuccagcuccagcucccacugccugaaccccaacaacgaggagggcgggcacggcgucaaggggugggccuucgacgacggcaacgacguguggaugggccggaccaucagcgagaaguuccgcuccggguacgagaccuucaaggucaucggcggguggagcaagcccaacuccaagcugcagaucaaccgccaggugaucguggaccggggcaaccggagcggguacuccggcaucuucagcgucgagggcaagagcugcaucaaccgcugcuucuacguggagcucauccgggggcgcaagcaggagaccgaggugugguggacguccaacagcaucgucguguucugcggcaccuccgggaccuacggcaccgggagcuggccggacggcgccgacaucaaccugaugcccaucuga

SEQ ID NO: 78913 - RNA, 1410 nt, Artificial Sequence; identical to SEQ ID NO: 78912
  derived and/or modified CDS sequence (opt1) from neuraminidase__InfluenzaA__ABD78129

SEQ ID NO: 78914 - RNA, 1410 nt, Artificial Sequence; identical to SEQ ID NO: 78142
  derived and/or modified CDS sequence (opt1) from neuraminidase__InfluenzaA__ABD79035

SEQ ID NO: 78915 - RNA, 1353 nt, Artificial Sequence
  derived and/or modified CDS sequence (opt1) from neuraminidase__InfluenzaA__ABD79115
augaaccccaaccagaagaucaucaccaucggcagcaucugcaugguggucgggaucaucucccugaucuuccagaucggcaacaucgugagcaucuggaucucccacagcaucaccgggacgugcaaccgcuccaucuacgugaacaucagcaacaccaacgucguggccggcaaggacaccaccuccgugauccucgccgggaacagcucccugugcccgauccggggcugggcgaucuacagcaaggacaacggcguccgcaucggguccaagggcgacguguucgugauccgggagcccuucaucagcugcucccaccuggagugccgcacguucuuccucacccagggggcccugcugaacgacaagcacagcaacggcaccgucaaggaccggucccccuaccgcacccucaugagcugccccgugggggaggccccgucccccuacaacagccgguucgaguccguggccuggagcgccagcgcgugccacgacggcaugggcuggcugacgaucgggaucuccggccccgacgacggggccgucgccgugcugaaguacaacggcaucaucaccggcaccaucaagagcuggcgcaaggagauccuccggacccaggaguccgagugcgugugcgucaacgggagcugcuucacgaucaugaccgacggccccuccgggggcccggccagcuacaagaucuucaagaucgagaaggggaaggugaccaaguccaucgagcuggacgcgcccaacagccacuacgaggagugcuccugcuaccccgacaccagcaaggugaugugcgucugccgcgacaacuggcacggcuccaaccggcccugggugagcuucgaccagaaccuggacuaccagaugggcuacaucugcuccgggguguucggcgacaacccgcgccccaaggacgggaagggcagcugcgggcccgucuacguggacggcgccaacggcgugaagggguucuccuaccgguacggcaacggggucuggaucggccgcaccaagagcuccagcucccggcagggguucgagaugaucugggaccccaacggcuggacggagaccgacagcaacuucuucaugaagcaggacguggucgccgugaccgacuggagcggcuacuccgggagcuucgugcagcacccggagcucacgggccuggacugcaugcgccccugcuucugggucgagcugauccgggggcgccccaaggagaacaccaucuggaccuccggcagcuccaucagcuucugcggcgugaacuccgacaccguggacuggagcuggcccgacggggccgagcucccguucacgaucgacaaguga

SEQ ID NO: 78916 - RNA, 1410 nt, Artificial Sequence
  derived and/or modified CDS sequence (opt1) from neuraminidase__InfluenzaA__ABD79126
augaaccccaaccagaagaucaucaccaucggcagcgugucccugaccaucacgaccaucugcuuccucaugcagaucgccauccuggucaucaccgugacccugcacuucaagcagugcgagugcaacagcccgcccaacaaccaggugaugcucugcgagcccacgaucaucgagcgcaacaucaccgagaucgucuaccugaccaacaccacgaucgagaaggagaucugccccaagcuggccgaguaccggaacugguccaagccgcagugcaagaucaccggguucgcgcccuucagcaaggacaacuccauccgccucagcgccggcggggacaucugggugacccgggagcccuacguguccugcgaccccggcaagugcuaccaguucgcccuggggcagggcaccacgcugaacaaccgccacagcaacgacaccguccacgaccggaccccguaccgcacccuccugaugaacgagcugggcgugcccuuccaccucgggacgaagcaggucugcaucgccugguccagcuccagcugccacgacggcaaggccuggcugcacgugugcgugaccgggcacaacgagaacgcgaccgccuccuucaucuacgacggccggcugguggacagcaucggguccuggagcaagaacauccuccgcacccaggaguccgagugcgucugcaucaacggcacgugcaccguggugaugaccgacggcagcgccuccgggcgggccgacaccaagauccuguucaucgaggagggcaagaucguccacaucagcccccugagcggguccgcgcagcacguggaggagugcagcugcuacccccgcuacccgggcgugcggugcgucugccgcgacaacuggaagggcuccaaccggcccaucguggacaucaacgugaaggacuacagcaucgucuccagcuacgugugcuccgggcucgugggcgacacgccccgcaagaacgacagcuccagcuccagcuacugccuggaccccaacaacgaggagggcgggcacggggucaagggcugggccuucgacgacggcaacgacguguggauggggcggaccaucuccgagaagcugcgcagcggcuacgagaccuucaaggucaucgggggcugguccaagccgaacagcaagcuccagaucaaccgccaggugaucguggacaaggggaaccgguccggcuacagcggcaucuucuccgucgagggcaagagcugcaucaaccggugcuucuacguggagcugauccgcgggcggaagcaggagaccgaggugugguggacgagcaacuccaucgucguguucugcgggaccagcggcaccuacgggaccggcuccuggcccgacggcgccgacaucaaccugaugcccaucuga

SEQ ID NO: 78917 - RNA, 1410 nt, Artificial Sequence; identical to SEQ ID NO: 78916
  derived and/or modified CDS sequence (opt1) from neuraminidase__InfluenzaA__ABD79137

SEQ ID NO: 78918 - RNA, 1410 nt, Artificial Sequence; identical to SEQ ID NO: 78916
  derived and/or modified CDS sequence (opt1) from neuraminidase__InfluenzaA__ABD79148

SEQ ID NO: 78919 - RNA, 1410 nt, Artificial Sequence; identical to SEQ ID NO: 78916
  derived and/or modified CDS sequence (opt1) from neuraminidase__InfluenzaA__ABD79159

SEQ ID NO: 78920 - RNA, 1410 nt, Artificial Sequence
  derived and/or modified CDS sequence (opt1) from neuraminidase__InfluenzaA__ABD79170
augaaccccaaccagaagaucaucaccaucggcagcgugucccugaccaucacgaccaucugcuuccucaugcagaucgccauccuggucaucaccgugacccugcacuucaagcagugcgagugcaacagcccgcccaacaaccaggugaugcucugcgagcccacgaucaucgagcgcaacaucaccgagaucgucuaccugaccaacaccacgaucgagaaggagaucugccccaagcuggccgaguaccggaacugguccaagccgcagugcaagaucaccggguucgcgcccuucagcaaggacaacuccauccgccucagcgccggcggggacaucugggugacccgggagcccuacguguccugcgaccccggcaagugcuaccaguucgcccuggggcagggcaccacgcugaacaaccgccacagcaacaacaccguccacgaccggaccccguaccgcacccuccugaugaacgagcugggcgugcccuuccaccucgggacgaagcaggucugcaucgccugguccagcuccagcugccacgacggcaaggccuggcugcacgugugcgugaccgggcacaacgagaacgcgaccgccuccuucaucuacgacggccggcugguggacagcaucggguccuggagcaagaacauccuccgcacccaggaguccgagugcgucugcaucaacggcacgugcaccguggugaugaccgacggcagcgccuccgggcgggccgacaccaagauccuguucaucaaggagggcaagaucguccacgugagcccccugagcggguccgcgcagcacguggaggagugcagcugcuacccccgcuacccgggcguccggugcgugugccgcgacaacuggaagggcuccaaccggcccaucguggacaucaacgucaaggacuacagcaucguguccagcuacgugugcuccgggcucgucggcgacacgccccgcaagaacgacagcuccagcuccagcuacugccuggaccccaacaacgaggagggcgggcacggggugaagggcugggccuucgacgacggcaacgacgucuggauggggcggaccaucuccgagaagcugcgcagcggcuacgagaccuucaaggugaucgggggcugguccaagccgaacagcaagcuccagaucaaccgccaggugaucgucgacaaggggaaccgguccggcuacagcggcaucuucuccguggagggcaagagcugcaucaaccggugcuucuacguggagcugauccgcgggcggaagcaggagaccgaggucugguggacgagcaacuccaucgugguguucugcgggaccagcggcaccuacgggaccggcuccuggcccgacggcgccgacaucaaccugaugcccaucuga

SEQ ID NO: 78921 - RNA, 1410 nt, Artificial Sequence; identical to SEQ ID NO: 78916
  derived and/or modified CDS sequence (opt1) from neuraminidase__InfluenzaA__ABD79181

SEQ ID NO: 78922 - RNA, 1410 nt, Artificial Sequence; identical to SEQ ID NO: 78916
  derived and/or modified CDS sequence (opt1) from neuraminidase__InfluenzaA__ABD79192

SEQ ID NO: 78923 - RNA, 1410 nt, Artificial Sequence
  derived and/or modified CDS sequence (opt1) from neuraminidase__InfluenzaA__ABD79203
augaaccccaaccagaagaucaucaccaucggcagcgugucccugaccaucacgaccaucugcuuccucaugcagaucgccauccuggucaucaccgugacccugcacuucaagcagugcgagugcaacagcccgcccaacaaccaggugaugcucugcgagcccacgaucaucgagcgcaacaucaccgagaucgucuaccugaccaacaccacgaucgagaaggagaagugccccaagcuggccgaguaccggaacugguccaagccgcagugcaagaucaccggguucgcgcccuucagcaaggacaacuccauccgccucagcgccggcggggacaucugggugacccgggagcccuacguguccugcgaccccggcaagugcuaccaguucgcccuggggcagggcaccacgcugaacaaccgccacagcaacgacaccguccacgaccggaccccguaccgcacccuccugaugaacgagcugggcgugcccuuccaccucgggacgaagcaggucugcaucgccugguccagcuccagcugccacgacggcaaggccuggcugcacgugugcgugaccgggcacaacgagaacgcgaccgccuccuucaucuacgacggccggcugguggacagcaucggguccuggagcaagaacauccuccgcacccaggaguccgagugcgucugcaucaacggcacgugcaccguggugaugaccgacggcagcgccuccgggcgggccgacaccaagauccuguucaucgaggagggcaagaucguccacaucagcccccugagcggguccgcgcagcacguggaggagugcagcugcuacccccgcuacccgggcgugcggugcgucugccgcgacaacuggaagggcuccaaccggcccaucguggacaucaacaugaaggacuacagcaucguguccagcuacgucugcuccgggcucgugggcgacacgccccgcaagaacgacagcuccagcuccagcuacugccuggaccccaacaacgaggagggcgggcacggggugaagggcugggccuucgacgacggcaacgacgucuggauggggcggaccaucuccgagaagcugcgcagcggcuacgagaccuucaaggugaucgggggcugguccaagccgaacagcaagcuccagaucaaccggcaggucaucguggacaaggggaaccgcuccggcuacagcggcaucuucuccguggagggcaagagcugcaucaaccggugcuucuacgucgagcugauccgcgggcggaagcaggagaccgaggugugguggacgagcaacuccaucguggucuucugcgggaccagcggcaccuacgggaccggcuccuggcccgacggcgccgacaucaaccugaugcccaucuga

SEQ ID NO: 78924 - RNA, 1410 nt, Artificial Sequence; identical to SEQ ID NO: 78916
  derived and/or modified CDS sequence (opt1) from neuraminidase__InfluenzaA__ABD79214

SEQ ID NO: 78925 - RNA, 1410 nt, Artificial Sequence
  derived and/or modified CDS sequence (opt1) from neuraminidase__InfluenzaA__ABD79236
augaaccccaaccagaagaucaucaccaucggcagcgugucccugaccaucacgaccaucugcuuccucaugcagaucgccauccuggucaucaccgugacccugcacuucaagcagugcgagugcaacagcccgcccaacaaccaggugaugcucugcgagcccacgaucaucgagcgcaacaucaccgagaucgucuaccugaccaacaccacgaucgagaaggagaucugccccaagcuggccgaguaccggaacugguccaagccgcagugcaagaucaccggguucgcgcccuucagcaaggacaacuccauccgccucagcgccggcggggacaucugggugacccgggagcccuacguguccugcgaccccggcaagugcuaccaguucgcccuggggcagggcaccacgcugaacaaccgccacagcaacaacaccgcccacgaccggaccccguaccgcacccuccugaugaacgagcugggcguccccuuccaccucgggacgaagcaggucugcaucgccugguccagcuccagcugccacgacggcaaggcguggcugcacgugugcgugaccgggcacaacgagaacgccaccgccuccuucaucuacgacggccggcugguggacagcaucggguccuggagcaagaacauccuccgcacccaggaguccgagugcgugugcaucaacggcacgugcaccgucgugaugaccgacggcagcgccuccgggcgggcggacaccaagauccuguucaucaaggagggcaagaucgugcacaucagcccccugagcggguccgcccagcacgucgaggagugcagcugcuacccccgcuacccgggcgugcggugcgugugccgcgacaacuggaagggcuccaaccggcccaucgucgacaucaacgugaaggacuacagcaucguguccagcuacgucugcuccgggcucgugggcgacacgccccgcaagaacgacagcuccagcuccagcuacugccuggaccccaacaacgaggagggcgggcacggggugaagggcugggccuucgacgacggcaacgacgucuggauggggcggaccaucuccgagaagcugcgcagcggcuacgagaccuucaaggugaucgggggcugguccaagccgaacagcaagcuccagaucaaccggcaggucaucguggacaaggggaaccgcuccggcuacagcggcaucuucuccguggagggcaagagcugcaucaaccggugcuucuacgucgagcugauccgcgggcggaagcaggagaccgaggugugguggacgagcaacuccaucguggucuucugcgggaccagcggcaccuacgggaccggcuccuggcccgacggcgccgacaucaaccugaugcccaucuga

SEQ ID NO: 78926 - RNA, 1410 nt, Artificial Sequence
  derived and/or modified CDS sequence (opt1) from neuraminidase__InfluenzaA__ABD79247
augaaccccaaccagaagaucaucaccaucggcagcgugucccugaccaucacgaccaucugcuuccucaugcagaucgccauccuggucaucaccgugacccugcacuucaagcagugcgagugcaacccgccgcccaacaaccaggugaugcucugcgagcccacgaucaucgagcgcaacaucaccgagaucgucuaccugaccaacaccacgaucgagaaggagaucugccccaagcuggccgaguaccggaacuggagcaagccccagugcaagaucaccggguucgcgcccuucuccaaggacaacagcauccgccucuccgccggcggggacaucugggugacccgggagcccuacgugagcugcgacccgggcaagugcuaccaguucgcccuggggcagggcaccacgcugaacaaccgccacuccaacgacaccguccacgaccggacccccuaccgcacccuccugaugaacgagcugggcgugcccuuccaccucgggacgaagcaggucugcaucgccuggagcuccagcuccugccacgacggcaaggccuggcugcacgugugcgugaccgggcacaacgagaacgcgaccgccagcuucaucuacgacggccggcugguggacuccaucgggagcugguccaagaacauccuccgcacccaggagagcgagugcgucugcaucaacggcacgugcaccguggugaugaccgacggcuccgccagcgggcgggccgacaccaagauccuguucaucgaggagggcaagaucguccacaucagcccccuguccgggagcgcgcagcacguggaggagugcuccugcuacccgcgcuaccccggcgugcggugcgucugccgcgacaacuggaagggcagcaaccggcccaucguggacaucaacgugaaggacuacuccaucgucagcuccuacgugugcagcgggcucgugggcgacacgccccgcaagaacgacuccagcuccagcuccuacugccuggacccgaacaacgaggagggcgggcacggggucaagggcugggccuucgacgacggcaacgacguguggauggggcggaccaucagcgagaagcugcgcuccggcuacgagaccuucaaggucaugggcggguggagcaagcccaacuccaagcuccagaucaaccgccaggugaucguggaccgggggaaccggagcggcuacuccggcaucuucagcgucgaggggaaguccugcaucaaccgcugcuucuacguggagcugauccggggccgcaagcaggagaccgaggugugguggacgagcaacagcaucgucguguucugcgggaccuccggcaccuacgggaccggcagcuggcccgacggcgccgacaucaaccugaugcccaucuga

SEQ ID NO: 78927 - RNA, 1410 nt, Artificial Sequence; identical to SEQ ID NO: 78351
  derived and/or modified CDS sequence (opt1) from neuraminidase__InfluenzaA__ABD94737

SEQ ID NO: 78928 - RNA, 1410 nt, Artificial Sequence; identical to SEQ ID NO: 78736
  derived and/or modified CDS sequence (opt1) from neuraminidase__InfluenzaA__ABD94748

SEQ ID NO: 78929 - RNA, 1413 nt, Artificial Sequence; identical to SEQ ID NO: 78852
  derived and/or modified CDS sequence (opt1) from neuraminidase__InfluenzaA__ABD94759

SEQ ID NO: 78930 - RNA, 1410 nt, Artificial Sequence; identical to SEQ ID NO: 78085
  derived and/or modified CDS sequence (opt1) from neuraminidase__InfluenzaA__ABD94770

SEQ ID NO: 78931 - RNA, 1413 nt, Artificial Sequence; identical to SEQ ID NO: 78420
  derived and/or modified CDS sequence (opt1) from neuraminidase__InfluenzaA__ABD94792

SEQ ID NO: 78932 - RNA, 1413 nt, Artificial Sequence; identical to SEQ ID NO: 78420
  derived and/or modified CDS sequence (opt1) from neuraminidase__InfluenzaA__ABD94803

SEQ ID NO: 78933 - RNA, 1413 nt, Artificial Sequence; identical to SEQ ID NO: 78420
  derived and/or modified CDS sequence (opt1) from neuraminidase__InfluenzaA__ABD94814

SEQ ID NO: 78934 - RNA, 1410 nt, Artificial Sequence; identical to SEQ ID NO: 78597
  derived and/or modified CDS sequence (opt1) from neuraminidase__InfluenzaA__ABD94825

SEQ ID NO: 78935 - RNA, 1410 nt, Artificial Sequence
  derived and/or modified CDS sequence (opt1) from neuraminidase__InfluenzaA__ABD94847
augaaccccaaccagaagaucaucaccaucggcagcgugucccugaccaucgccacgaucugcuuccucaugcagaucgccauccuggucaccaccgugacccugcacuucaagcaguacgagugcaacagcccgcccaacaaccaggugaugcucugcgagcccaagaucaucgagcgcaacaucacggagaucgucuaccugaccaacaccaccaucgagaaggagaucugccccaagcuggcggaguaccggaacugguccaagccgcagugcaagaucacgggguucgcccccuucagcaaggacaacuccauccgccucagcgccggcggggacaucugggugacccgggagcccuacguguccugcgaccccgacaagugcuaccaguucgcccugggccaggggaccacccugaacaaccgccacagcaacgacacgguccacgaccggaccccguaccgcacccuccugaugaacgagcugggcgugcccuuccaccucggcaccaagcaggucugcaucgccugguccagcuccagcugccacgacgggaaggcguggcugcacgugugcgugacgggccacgacgagaacgccaccgccuccuucaucuacgacgggcggcugguggacagcaucggcuccuggagcaagaagauccuccgcacccaggaguccgagugcgucugcaucaacgggaccugcacgguggugaugaccgacggcagcgccuccggccgggcggucaccaagauccuguucaucgaggaggggaagaucgugcacaucagcccccugcucggcagcgcccagcacguggaggagugcuccugcuacccccgcuacccggggguccggugcgugugccgcgacaacuggaagggcagcaaccggcccaucguggacaucaacgucaaggacuacuccaucgugagcuccuacgugugcagcggccuggucggggacacgccccgcaagaacgacuccagcuccagcucccacugccugaaccccaacaacgaggagggcgggcacggcgugaaggggugggccuucgacgacggcaacgacgucuggaugggccggaccaucagcgagaagcuccgcuccggguacgagaccuucaaggugaucgagggcuggagcaagccgaacuccaagcugcagaucaaccgccaggugaucgucgaccgggggaaccggagcggcuacuccgggaucuucagcguggagggcaaguccugcaucaaccgcugcuucuacguggagcugauccggggccgcaagcaggagaccgaggucugguggaccagcaacagcaucgugguguucugcgggacguccggcaccuacgggaccggcagcuggcccgacggggccgacaucaaccucaugcccaucuga

SEQ ID NO: 78936 - RNA, 1410 nt, Artificial Sequence; identical to SEQ ID NO: 78150
  derived and/or modified CDS sequence (opt1) from neuraminidase__InfluenzaA__ABD94858

SEQ ID NO: 78937 - RNA, 1410 nt, Artificial Sequence; identical to SEQ ID NO: 78150
  derived and/or modified CDS sequence (opt1) from neuraminidase__InfluenzaA__ABD94880

SEQ ID NO: 78938 - RNA, 1410 nt, Artificial Sequence
  derived and/or modified CDS sequence (opt1) from neuraminidase__InfluenzaA__ABD94891
augaaccccaaccagaagaucaucaccaucggcagcgugucccugaccaucacgaccaucugcuuccucaugcagaucgccauccuggucaucaccgugacccugcacuucaagcagugcgagugcaacagcccgcccaacaaccaggugaugcucugcgagcccacgaucaucgagcgcaacaucaccgagaucgucuaccugaccaacaccacgaucgagaaggagaucugccccaagcuggccgaguaccggaacugguccaagccgcagugcaagaucaccggguucgcgcccuucagcaaggacaacuccauccgccucagcgccggcggggacaucugggugacccgggagcccuacguguccugcgaccccggcaagugcuaccaguucgcccuggggcagggcaccacgcugaacaaccgccacagcaacgacaccguccacgaccggaccccguaccgcacccuccugaugaacgagcugggcgugcccuuccaccucgggacgaagcaggucugcaucgccugguccagcuccagcugccacgacggcaaggccuggcugcacgugugcgugaccgggcacaacgagaacgcgaccgccuccuucaucuacgacggccggcugguggacagcaucggguccuggagcaagaacauccuccgcacccaggaguccgagugcgucugcaucaacggcacgugcaccguggugaugaccgacggcagcgccuccgggcgggccgacaccaagguccuguucaucgaggagggcaagaucgugcacaucagccagcugagcggguccgcgcagcacguggaggagugcagcugcuacccccgcuaccccggcguccggugcgugugccgcgacaacuggaagggcuccaaccggccgaucguggacaucaacgucaaggacuacagcaucguguccagcuacgugugcuccgggcucgucggcgacacgccccgcaagaacgacagcuccagcuccagcuacugccuggaccccaacaacgaggagggcgggcacggggugaagggcugggccuucgacgacggcaacgacgucuggauggggcggaccaucuccgagaagcugcgcagcggcuacgagaccuucaaggugaucgggggcugguccaagcccaacagcaagcuccagaucaaccgccaggugaucgucgaccgggggaaccgguccggcuacagcggcaucuucuccguggagggcaagagcugcaucaaccgcugcuucuacguggagcugauccgggggcgcaagcaggagaccgaggucugguggacgagcaacuccaucgugguguucugcgggaccagcggcaccuacgggaccggcuccuggccggacggcgccgacaucaaccugaugcccaucuga

SEQ ID NO: 78939 - RNA, 1410 nt, Artificial Sequence; identical to SEQ ID NO: 78916
  derived and/or modified CDS sequence (opt1) from neuraminidase__InfluenzaA__ABD94902

SEQ ID NO: 78940 - RNA, 1410 nt, Artificial Sequence
  derived and/or modified CDS sequence (opt1) from neuraminidase__InfluenzaA__ABD94924
augaaccccaaccagaagaucaucaccaucggcagcgugucccugaccaucgccacgaucugccuccugaugcagaucgccauccuggucaccaccgugacccuccacuucaagcaguacgagugcaacagcccgcccaacaaccaggugaugcugugcgagcccacgaucaucgagcgcaacaucaccgagaucgucuaccugaccaacaccacgaucgagaaggagaucugccccaagcucgcggaguaccggaacugguccaagccgcagugcaagaucaccggguucgcccccuucagcaaggacaacuccauccgccugagcgccggcggggacaucugggugacccgggagcccuacguguccugcgaccccgacaagugcuaccaguucgcccugggccaggggaccacgcucaacaaccgccacagcaacgacaccguccacgaccggaccccguaccgcacccugcugaugaacgagcucggcgugcccuuccaccugggcacgaagcaggucugcaucgccugguccagcuccagcugccacgacgggaaggcguggcugcacgugugcgugaccggccacgacgagaacgccaccgccuccuucaucuacgacgggcggcucguggacagcaucggcuccuggagcaagaagauccugcgcacccaggaguccgagugcgucugcaucaacgggacgugcaccguggugaugaccgacggcagcgccuccggccgggcggacaccaagauccuguucaucgaggaggggaagaucguccacaucagccagcuccugggcagcgcccagcacguggaggagugcuccugcuacccccgcuaccccggggugcggugcgucugccgcgacaacuggaagggcagcaaccggccgaucguggacaucaacgugaaggacuacuccaucgucagcuccuacgugugcagcggccuggugggggacacgccccgcaagaacgacuccagcuccagcucccacugccucaaccccaacaacgaggagggcgggcacggcgucaaggggugggccuucgacgacggcaacgacguguggaugggccggaccaucagcgagaagcugcgcuccggguacgagaccuucaaggucaucgagggcuggagcaagcccaacuccaagcugcagaucaaccgccaggugaucguggaccgggggaaccggagcggcuacuccgggaucuucagcgucgagggcaaguccugcaucaaccgcugcuucuacguggagcucauccggggccgcaagcaggagaccgaggugugguggacgagcaacagcaucgucguguucugcgggaccuccggcaccuacgggaccggcagcuggccggacggggccgacaucaaccugaugcccaucuga

SEQ ID NO: 78941 - RNA, 1410 nt, Artificial Sequence
  derived and/or modified CDS sequence (opt1) from neuraminidase__InfluenzaA__ABD94946
augaaccccaaccagaagaucaucaccaucggcagcgugucccugaccaucgccacgaucugcuuccucacccagaucgccauccuggucaccaccgugacgcugcacuucaagcaguacgagugcaacagcccgcccaacaaccaggugaugcucugcgagcccaccaucaucgagcgcaacaucaccgagaucgucuaccugaccaacacgaccaucgagaaggagaucugccccaagcuggcggaguaccggaacugguccaagccgcagugcaacaucaccggguucgcccccuucagcaaggacaacuccauccgccucagcgccggcggggacaucugggugacccgggagcccuacguguccugcgaccccgacaagugcuaccaguucgcccugggccaggggacgacccugaacaacggccacagcaacgacaccguccacgaccgcaccccguaccggacgcuccugaugaacgagcugggcgugcccuuccaccucgggaccaagcaggucugcaucgccugguccagcuccagcugccacgacggcaaggcguggcugcacgugugcgugaccggggacgacaagaacgccaccgccuccuucaucuacaacggccgccugguggacagcaucggguccuggagcaagaagauccuccggacgcaggaguccgagugcgucugcaucaacgggaccugcaccguggugaugaccgacggcagcgccuccgggaaggcggacacgaagauccuguucaucgaggagggcaagaucguccacaccagccugcucagcggguccgcccagcacguggaggagugcagcugcuacccccgcuaccccggcgugcggugcgucugccgcgacaacuggaagggcuccaaccggccgaucguggacaucaacgugaaggacuacagcaucgucuccagcuacgugugcuccgggcuggugggcgacacgccccgcaagaacgaccggagcuccagcucccacugccuggaccccaacaacgaggagggcggccacggggucaagggcugggccuucgacgacggcaacgacguguggauggggcgcaccaucagcgagaagcuccgguccggcuacgagaccuucaaggucaucgagggguggagcaagcccaacuccaagcugcagaucaaccgccaggugaucguggaccgggacaaccgcagcggcuacuccgggaucuucagcgucgagggcaaguccugcaucaaccggugcuucuacguggagcugauccgcggccggaaccaggagaccgaggugcucuggaccagcaacagcaucgucguguucugcgggaccuccggcacguacgggaccggcagcuggccggacggggccgacaucaaccugaugcccaucuga

SEQ ID NO: 78942 - RNA, 1410 nt, Artificial Sequence
  derived and/or modified CDS sequence (opt1) from neuraminidase__InfluenzaA__ABD94957
augaaccccaaccagaagaucaucaccaucggcagcgugucccugaccaucagcacgaucugcuucuucaugcagaucgccauccucaucaccaccgucacccugcacuucaagcaguacgaguucaacuccccgcccaacaaccaggugaugcugugcgagcccacgaucaucgagcgcaacaucaccgagaucguguaccucaccaacaccacgaucgagaaggagaucugccccaagcuggccgaguaccggaacuggagcaagccgcagugcgacaucaccggguucgcgcccuucuccaaggacaacagcauccgccuguccgccggcggggacaucugggucacccgggagcccuacgugagcugcgaccccgacaagugcuaccaguucgcccucggccaggggaccacgcugaacaacgugcacuccaacgacaccguccacgaccgcaccccguaccggacccugcucaugaacgagcugggcgugcccuuccaccugggcacgaagcaggucugcaucgccuggagcuccagcuccugccacgacgggaaggccuggcuccacgugugcgugaccggcgacgacaagaacgcgaccgccagcuucaucuacaacgggcgccugguggacuccaucgucagcugguccaagaagauccugcggacccaggagagcgagugcgugugcaucaacggcacgugcaccguggucaugaccgacggguccgccagcggcaaggccgacaccaagauccucuucaucgaggagggcaagaucgugcacacgagcacccuguccgggagcgcgcagcacguggaggagugcuccugcuacccccgcuaccccggcguccggugcgugugccgcgacaacuggaaggggagcaaccggccgaucguggacaucaacaucaaggacuacuccaucgucagcuccuacgugugcagcggccuggugggcgacacgccccgcaagaacgacuccagcuccagcucccacugccucgaccccaacaacgaggagggcgggcacggggucaagggcugggccuucgacgacgggaacgacguguggaugggccggaccaucagcgagaagcugcgcuccggcuacgagaccuucaaggucaucgagggguggagcaaccccaacuccaagcugcagaucaaccgccaggugaucguggaccggggcaaccggagcggguacuccggcaucuucagcgucgagagcaaguccugcaucaaccgcugcuucuacguggagcucauccgggggcgcaaggaggagaccgaggugcuguggaccagcaacuccaucgucguguucugcggcaccagcggcacguacgggaccggcuccuggccggacggggccgacaucaaccugaugcccaucuga

SEQ ID NO: 78943 - RNA, 1413 nt, Artificial Sequence; identical to SEQ ID NO: 78852
  derived and/or modified CDS sequence (opt1) from neuraminidase__InfluenzaA__ABD94968

SEQ ID NO: 78944 - RNA, 1413 nt, Artificial Sequence; identical to SEQ ID NO: 78852
  derived and/or modified CDS sequence (opt1) from neuraminidase__InfluenzaA__ABD94990

SEQ ID NO: 78945 - RNA, 1413 nt, Artificial Sequence
  derived and/or modified CDS sequence (opt1) from neuraminidase__InfluenzaA__ABD95001
augaaccccaaccagaagaucaucaccaucggcagcaucuccaucgccaucgggaucaucagccugaugcuccagaucggcaacaucaucuccaucugggccagccacuccauccagaccgggagccagaaccacacgggcaucugcaaccagcgcaucaucaccuacgagaacuccaccugggugaaccacaccuacgucaacauccacaacacgaacgugguggcggggaaggacaagaccagcgucacccuggccggcaacuccagccugugcuccaucagcggcugggccaucuacaccaaggacaacuccauccggaucgggagcaagggcgacguguucgugauccgcgagccguucaucuccugcagccaccucgagugccggacguucuuccugacccagggggcccugcucaacgacaagcacuccaacggcaccgucaaggaccgcagccccuaccgggcccugauguccugcccccugggggaggcgcccagcccguacaacagcaaguucgaguccguggccuggagcgccuccgccugccacgacggcaugggcuggcucaccaucgggaucagcggccccgacaacggggcgguggccguccugaaguacaacggcaucaucacggagaccaucaaguccuggaagaagcgcauccugcggacccaggagagcgagugcgugugcgugaacggcuccugcuucaccaucaugacggacgggcccagcaacggcgccgccuccuacaagaucuucaagaucgagaaggggaaggucaccaagagcaucgagcucaacgcccccaacuuccacuacgaggagugcuccugcuacccggacaccggcaccgugaugugcgugugccgcgacaacuggcacgggagcaaccggcccugggucuccuucaaccagaaccuggacuaccagaucggcuacaucugcagcggcguguucggggacaacccccgccccaaggacggcgagggguccugcaacccggugacggucgacggcgcggacggggugaagggcuucagcuacaaguacggcaacgggguguggaucggccggaccaaguccaaccgccugcggaagggguucgagaugaucugggaccccaacggcuggaccgacaccgacagcaacuucuccaugaagcaggacgucguggccaucacggacuggagcggguacagcggcuccuucgugcagcaccccgagcucaccggccuggacugcauccgccccugcuucugggucgagcuggugcgggggcucccgcgcgagaacaccaccaucuggacgagcggcuccagcaucuccuucugcggggucaacagcgacaccgccaacugguccuggcccgacggcgccgagcugcccuucaccaucgacaaguga

SEQ ID NO: 78946 - RNA, 1413 nt, Artificial Sequence
  derived and/or modified CDS sequence (opt1) from neuraminidase__InfluenzaA__ABD95012
augaaccccaaccagaagaucaucaccaucggcagcaucuccaucgccaucgggaucaucagccugaugcuccagaucggcaacaucaucuccaucugggccagccacuccauccagaccgggagccagaaccacacgggcaucugcaaccagcgcaucaucaccuacgagaacuccaccugggugaaccacaccuacgucaacaucaacaacacgaacgugguggcggggaaggacaagaccagcgucacccuggccggcaacuccagccugugcuccaucagcggcugggccaucuacaccaaggacaacuccauccggaucgggagcaagggcgacguguucgugauccgcgagccguucaucuccugcagccaccucgagugccggacguucuuccugacccagggggcccugcucaacgacaagcacuccaacggcaccgucaaggaccgcagccccuaccgggcccugauguccugcccccugggggaggcgcccagcccguacaacagcaaguucgaguccguggccuggagcgccuccgccugccacgacggcaugggcuggcucaccaucgggaucagcggccccgacaacggggcgguggccguccugaaguacaacggcaucaucacggagaccaucaaguccuggaagaagcgcauccugcggacccaggagagcgagugcgugugcgugaacggcuccugcuucaccaucaugacggacgggcccagcaacggcgccgccuccuacaagaucuucaagaucgagaaggggaaggucaccaagagcaucgagcucaacgcccccaacuuccacuacgaggagugcuccugcuacccggacaccggcaccgugaugugcgugugccgcgacaacuggcacgggagcaaccggcccugggucuccuucaaccagaaccuggacuaccagaucggcuacaucugcagcggcguguucggggacaacccccgccccaaggacggcgagggguccugcaacccggugacggucgacggcgcggacggggugaagggcuucagcuacaaguacggcaacgggguguggaucggccggaccaaguccaaccgccugcggaagggguucgagaugaucugggaccccaacggcuggaccaacaccgacagcaacuucuccgucaagcaggacgugguggccaucacggacuggagcggguacagcggcuccuucguccagcaccccgagcucaccggccuggacugcauccgccccugcuucuggguggagcugguccgggggcucccgcgcgagaacaccaccaucuggacgagcggcuccagcaucuccuucugcggggugaacagcgacaccgccaacugguccuggcccgacggcgccgagcugcccuucaccaucgacaaguga

SEQ ID NO: 78947 - RNA, 1413 nt, Artificial Sequence; identical to SEQ ID NO: 78852
  derived and/or modified CDS sequence (opt1) from neuraminidase__InfluenzaA__ABD95023

SEQ ID NO: 78948 - RNA, 1413 nt, Artificial Sequence
  derived and/or modified CDS sequence (opt1) from neuraminidase__InfluenzaA__ABD95034
augaaccccaaccagaagaucaucaccaucggcagcaucuccaucgccaucgggaucaucagccugaugcuccagaucggcaacaucaucuccaucugggccagccacuccauccagaccgggagccagaaccacacgggcaucugcaaccagcgcaucaucaccuacgagaacuccaccugggugaaccacaccuacgucaacaucaacaacacgaacgugguggcggggaaggacaagaccagcgucacccuggccggcaacuccagccugugcuccaucagcggcugggccaucuacaccaaggacaacuccauccggaucgggagcaagggcgacguguucgugauccgcgagccguucaucuccugcagccaccucgagugccggacguucuuccugacccagggggcccugcucaacgacaagcacuccaacggcaccgucaaggaccgcagccccuaccgggcccugauguccugcccccugggggaggcgcccagcccguacaacagcaaguucgaguccguggccuggagcgccuccgccugccacgacggcaugggcuggcucaccaucgggaucagcggccccgacaacggggcgguggccguccugaaguacaacggcaucaucacggagaccaucaaguccuggaagaagcgcauccugcggacccaggagagcgagugcgugugcgugaacggcuccugcuucaccaucaugacggacgggcccagcaacggcgccgccuccuacaagaucuucaagaucgagaaggggaaggucaccaagagcaucgagcucaacgcccccaacuuccacuacgaggagugcuccugcuacccggacaccggcaccgugaugugcgugugccgcgacaacuggcacgggagcaaccggcccugggucuccuucaaccagaaccuggacuaccagaucggcuacaucugcagcggcguguucggggacaacccccgccccaaggacggcgagggguccugcaacccggugacggucgacggcgcggacggggugaagggcuucagcuacaaguacggcaacgggguguggaucggccggaccaaguccaaccgccugcggaagggguucgagaugaucugggaccccaacggcuggaccgacaccgacagcaacuucuccgucaagcaggacgugguggccaucacggacuggagcggguacagcggcuccuucauccagcaccccgagcucaccggccuggacugcauccgccccugcuucugggucgagcuggugcgggggcucccgcgcgagaacaccaccaucuggacgagcggcuccagcaucuccuucugcggggucaacagcgacaccgccaacugguccuggcccgacggcgccgagcugcccuucaccaucgacaaguga

SEQ ID NO: 78949 - RNA, 1413 nt, Artificial Sequence
  derived and/or modified CDS sequence (opt1) from neuraminidase__InfluenzaA__ABD95056
augaaccccaaccagaagaucaucaccaucggcagcaucuccaucgccaucgggaucaucagccugaugcuccagaucggcaacaucaucuccaucugggccagccacuccauccagaccgggagccagaaccacacgggcgugugcaaccagcgcaucaucaccuacgagaacuccaccugggucaaccacaccuacgugaacaucaacaacacgaacgugaucgcggggaaggacaagaccagcgucacccuggccggcaacuccagccugugcuccaucagcggcugggccaucuacaccaaggacaacuccauccggaucgggagcaagggcgacguguucgugauccgcgagccguucaucuccugcagccaccucgagugccggacguucuuccugacccagggggcccugcucaacgacaagcacuccaacggcaccgucaaggaccgcagccccuaccgggcccugauguccugcccccugggggaggcgcccagcccguacaacagcaaguucgaguccguggccuggagcgccuccgccugccacgacggcaugggcuggcucaccaucgggaucagcggccccgacaacggggcgguggccguccugaaguacaacggcaucaucacggagaccaucaaguccuggaagaagcagauccugcgcacccaggagagcgagugcgugugcgugaacggcuccugcuucaccaucaugacggacgggcccagcaacggcgccgccuccuacaagaucuucaagaucgagaaggggaagaucaccaagagcaucgagcucaacgcccccaacuuccacuacgaggagugcuccugcuacccggacaccggcaccgucaugugcgugugccgggacaacuggcacgggagcaaccgccccuggguguccuucaaccagaaccuggacuaccagaucggcuacaucugcagcggcgucuucggggacaacccccggcccaaggacggcgagggguccugcaacccggugacgguggacggcgcgaacggggucaagggcuucagcuacaaguacggcaacgggguguggaucggccgcaccaaguccaaccggcugcgcaagggguucgagaugaucugggaccccaacggcuggaccgacaccgacagcgacuucuccgugaagcaggacgucguggccaucacggacuggagcggguacagcggcuccuucgugcagcaccccgagcucaccggccugaacugcauccggcccugcuucugggucgagcuggugcgcgggcucccgaaggagaacaccaccaucuggacgagcggcuccagcaucuccuucugcggggucaacagcgacaccgccaacugguccuggcccgacggcgccgagcugcccuucaccaucgacaaguga

SEQ ID NO: 78950 - RNA, 1413 nt, Artificial Sequence; identical to SEQ ID NO: 78420
  derived and/or modified CDS sequence (opt1) from neuraminidase__InfluenzaA__ABD95067

SEQ ID NO: 78951 - RNA, 1413 nt, Artificial Sequence; identical to SEQ ID NO: 78420
  derived and/or modified CDS sequence (opt1) from neuraminidase__InfluenzaA__ABD95078

SEQ ID NO: 78952 - RNA, 1413 nt, Artificial Sequence; identical to SEQ ID NO: 78949
  derived and/or modified CDS sequence (opt1) from neuraminidase__InfluenzaA__ABD95089

SEQ ID NO: 78953 - RNA, 1413 nt, Artificial Sequence; identical to SEQ ID NO: 78420
  derived and/or modified CDS sequence (opt1) from neuraminidase__InfluenzaA__ABD95100

SEQ ID NO: 78954 - RNA, 1413 nt, Artificial Sequence
  derived and/or modified CDS sequence (opt1) from neuraminidase__InfluenzaA__ABD95111
augaaccccaaccagaagaucaucaccaucggcagcaucuccaucgccaucgggaugaucagccugaugcuccagaucggcaacaucaucuccaucugggccagccacuccauccagaccgggagccagaaccacacgggcgugugcaaccagcgcaucaucaccuacgagaacuccaccugggucaaccacaccuacgugaacaucaacaacacgaacgugaucgcggggaaggacaagaccagcgucacccuggccggcaacuccagccugugcuccaucagcggcugggccaucuacaccaaggacaacuccauccggaucgggagcaagggcgacguguucgugauccgcgagccguucaucuccugcagccaccucgagugccggacguucuuccugacccagggggcccugcucaacgacaagcacuccaacggcaccgucaaggaccgcagccccuaccgggcccugauguccugcccccugggggaggcgcccagcccguacaacagcaaguucgaguccguggccuggagcgccuccgccugccacgacggcaugggcuggcucaccaucgggaucagcggccccgacaacggggcgguggccguccugaaguacaacggcaucaucacggagaccaucaaguccuggaagaagcagauccugcgcacccaggagagcgagugcgugugcgugaacggcuccugcuucaccaucaugacggacgggcccagcaacggcgccgccuccuacaagaucuucaagaucgagaaggggaaggucaccaagagcaucgagcucaacgcccccaacuuccacuacgaggagugcuccugcuacccggacaccggcaccgugaugugcgugugccgggacaacuggcacgggagcaaccgccccugggucuccuucaaccagaaccuggacuaccagaucggcuacaucugcagcggcguguucggggacaacccccggcccaaggacggcgagggguccugcaacccggugacggucgacggcgcgaacggggugaagggcuucagcuacaaguacggcaacgggguguggaucggccgcaccaaguccaaccggcugcgcaagggguucgagaugaucugggaccccaacggcuggaccgacaccgacagcgacuucuccgucaagcaggacgugguggccaucacggacuggagcggguacagcggcuccuucguccagcaccccgagcucaccggccuggacugcauccggcccugcuucuggguggagcugguccgcgggcucccgaaggagaacaccaccaucuggacgagcggcuccagcaucuccuucugcggggugaacagcgacaccgccaacugguccuggcccgacggcgccgagcugcccuucaccaucgacaaguga

SEQ ID NO: 78955 - RNA, 1413 nt, Artificial Sequence; identical to SEQ ID NO: 78954
  derived and/or modified CDS sequence (opt1) from neuraminidase__InfluenzaA__ABD95122

SEQ ID NO: 78956 - RNA, 1413 nt, Artificial Sequence; identical to SEQ ID NO: 78420
  derived and/or modified CDS sequence (opt1) from neuraminidase__InfluenzaA__ABD95144

SEQ ID NO: 78957 - RNA, 1413 nt, Artificial Sequence; identical to SEQ ID NO: 78420
  derived and/or modified CDS sequence (opt1) from neuraminidase__InfluenzaA__ABD95155

SEQ ID NO: 78958 - RNA, 1413 nt, Artificial Sequence
  derived and/or modified CDS sequence (opt1) from neuraminidase__InfluenzaA__ABD95166
augaaccccaaccagaagaucaucaccaucggcagcaucuccaucgccaucgggaugaucagccugaugcuccagaucggcaacaucaucuccaucugggccagccacuccauccagaccgggagccagaaccacacgggcgugugcaaccagcgcaucaucaccuacgagaacuccaccugggucaaccacaccuacgugaacaucaacaacacgaacgugaucgcggagaaggacaagaccagcgucacccuggccgggaacuccagccugugcuccaucagcggcugggccaucuacaccaaggacaacuccauccggaucggcagcaagggggacguguucgugauccgcgagccguucaucuccugcagccaccucgagugccggacguucuuccugacccagggcgcccugcucaacgacaagcacuccaacgggaccgucaaggaccgcagccccuaccgggcccugauguccugcccccugggcgaggcgcccagcccguacaacagcaaguucgaguccguggccuggagcgccuccgccugccacgacgggaugggcuggcucaccaucggcaucagcgggcccgacaacggcgcgguggccguccugaaguacaacgggaucaucacggagaccaucaaguccuggaagaagcagauccugcgcacccaggagagcgagugcgugugcgugaacggcuccugcuucaccaucaugacggacggccccagcaacggggccgccuccuacaagaucuucaagaucgagaagggcaaggucaccaagagcaucgagcucaacgcccccaacuuccacuacgaggagugcuccugcuacccggacaccgggaccgugaugugcgugugccgggacaacuggcacggcagcaaccgccccugggucuccuucaaccagaaccuggacuaccagaucggguacaucugcagcggcguguucggcgacaacccccggcccaaggacggggagggcuccugcaacccggugacggucgacggggcgaacggcgugaagggguucagcuacaaguacggcaacggcguguggaucgggcgcaccaaguccaaccggcugcgcaagggcuucgagaugaucugggaccccaacggguggaccgacaccgacagcgacuucuccgucaagcaggacgugguggccaucacggacuggagcggcuacagcggguccuucguccagcaccccgagcucaccggccuggacugcauccggcccugcuucuggguggagcugguccgcggccucccgaaggagaacaccaccaucuggacgagcggguccagcaucuccuucugcggcgugaacagcgacaccgccaacugguccuggcccgacggggccgagcugcccuucaccaucgacaaguga

SEQ ID NO: 78959 - RNA, 1413 nt, Artificial Sequence; identical to SEQ ID NO: 78949
  derived and/or modified CDS sequence (opt1) from neuraminidase__InfluenzaA__ABD95177

SEQ ID NO: 78960 - RNA, 1413 nt, Artificial Sequence
  derived and/or modified CDS sequence (opt1) from neuraminidase__InfluenzaA__ABD95188
augaaccccaaccagaagaucaucaccaucggcagcaucuccaccacgaucgggaucaucagccugaugcuccagaucggcaacaucaucuccaucugggccagccacuccauccagaccgggagccagaaccacaccggcgugugcaaccagcgcaucaucaccuacgagaacuccacgugggucaaccacaccuacgugaacaucaacaacaccaacgugaucgccgggaaggacaagaccagcgucacgcuggcgggcaacuccagccugugcuccaucagcggcugggccaucuacaccaaggacaacuccauccggaucgggagcaagggcgacguguucgugauccgcgagccguucaucuccugcagccaccucgagugccggaccuucuuccugacccagggggcccugcucaacgacaagcacuccaacggcacggucaaggaccgcagccccuaccgggcccugauguccugcccccugggggaggcccccagcccguacaacagcaaguucgaguccguggcguggagcgccuccgccugccacgacggcaugggcuggcucaccaucgggaucagcggccccgacaacggggccguggcgguccugaaguacaacggcaucaucaccgagaccaucaaguccuggaagaagcagauccugcgcacgcaggagagcgagugcgugugcgugaacggcuccugcuucaccaucaugaccgacgggcccagcaacggcgccgccuccuacaagaucuucaagaucgagaaggggaaggucaccaagagcaucgagcucaacgcccccaacuuccacuacgaggagugcuccugcuacccggacacgggcaccgugaugugcgugugccgggacaacuggcacgggagcaaccgccccugggucuccuucaaccagaaccuggacuaccagaucggcuacaucugcagcggcguguucggggacaacccccggcccaaggacggcgagggguccugcaacccggugaccgucgacggcgccaacggggugaagggcuucagcuacaaguacggcaacgggguguggaucggccgcaccaaguccaaccggcugcgcaagggguucgagaugaucugggaccccaacggcuggacggacaccgacagcgacuucuccgucaagcaggacgugguggcgaucaccgacuggagcggguacagcggcuccuucguccagcaccccgagcucaccggccuggacugcauccggcccugcuucuggguggagcugguccgcgggcucccgaaggagaacacgaccaucuggaccagcggcuccagcaucuccuucugcggggugaacagcgacaccgccaacugguccuggcccgacggcgccgagcugcccuucacgaucgacaaguga

SEQ ID NO: 78961 - RNA, 1413 nt, Artificial Sequence; identical to SEQ ID NO: 78949
  derived and/or modified CDS sequence (opt1) from neuraminidase__InfluenzaA__ABD95199

SEQ ID NO: 78962 - RNA, 1413 nt, Artificial Sequence; identical to SEQ ID NO: 78439
  derived and/or modified CDS sequence (opt1) from neuraminidase__InfluenzaA__ABD95210

SEQ ID NO: 78963 - RNA, 1413 nt, Artificial Sequence
  derived and/or modified CDS sequence (opt1) from neuraminidase__InfluenzaA__ABD95221
augaaccccaaccagaagaucaucaccaucggcagcaucuccaucgccaucgggaugaucagccugaugcuccagaucggcaacaucaucuccaucugggccagccacuccauccagaccgggagccagaaccacacgggcgugugcaaccagcgcaucaucaccuacgagaacuccaccugggucaaccacaccuacgugaacaucaacaacacgaacgugaucgcggggaaggacaagaccagcgucacccuggccggcaacuccagccugugcuccaucagcggcugggccaucuacaccaaggacaacuccauccggaucgggagcaagggcgacguguucgugauccgcgagccguucaucuccugcagccaccucgagugccggacguucuuccugacccagggggcccugcucaacgacaagcacuccaacggcaccgucaaggaccgcagccccuaccgggcccugauguccugcccccugggggaggcgcccagcccguacaacagcaaguucgaguccguggccuggagcgccuccgccugccacgacggcaugggcuggcucaccaucgggaucagcggccccgacaacggggcgguggccguccugaaguacaacggcaucaucacggagaccaucaaguccuggaagaagcagauccugcgcacccaggagagcgagugcgugugcgugaacggcuccugcuucaccaucaugacggacgggcccagcaacggcgccgccuccuacaagaucuucaagaucgagaaggggaaggucaccaagagcaucgagcucaacgcccccaacucccacuacgaggagugcagcugcuacccggacaccggcaccgugaugugcgugugccgggacaacuggcacggguccaaccgccccugggucagcuucaaccagaaccuggacuaccagaucggcuacaucugcuccggcguguucggggacaacccccggcccaaggacggcgaggggagcugcaacccggugacggucgacggcgcgaacggggugaagggcuucuccuacaaguacggcaacgggguguggaucggccgcaccaagagcaaccggcugcgcaagggguucgagaugaucugggaccccaacggcuggaccgacaccgacuccgacuucagcgucaagcaggacgugguggccaucacggacuggagcggguacuccggcagcuucguccagcaccccgagcucaccggccuggacugcauccggcccugcuucuggguggagcugguccgcgggcucccgaaggagaacaccaccaucuggacguccggcagcuccaucagcuucugcggggugaacuccgacaccgccaacuggagcuggcccgacggcgccgagcugcccuucaccaucgacaaguga

SEQ ID NO: 78964 - RNA, 1413 nt, Artificial Sequence; identical to SEQ ID NO: 78954
  derived and/or modified CDS sequence (opt1) from neuraminidase__InfluenzaA__ABD95232

SEQ ID NO: 78965 - RNA, 1413 nt, Artificial Sequence; identical to SEQ ID NO: 78420
  derived and/or modified CDS sequence (opt1) from neuraminidase__InfluenzaA__ABD95243

SEQ ID NO: 78966 - RNA, 1413 nt, Artificial Sequence; identical to SEQ ID NO: 78954
  derived and/or modified CDS sequence (opt1) from neuraminidase__InfluenzaA__ABD95254

SEQ ID NO: 78967 - RNA, 1413 nt, Artificial Sequence; identical to SEQ ID NO: 78439
  derived and/or modified CDS sequence (opt1) from neuraminidase__InfluenzaA__ABD95265

SEQ ID NO: 78968 - RNA, 1413 nt, Artificial Sequence; identical to SEQ ID NO: 78420
  derived and/or modified CDS sequence (opt1) from neuraminidase__InfluenzaA__ABD95276

SEQ ID NO: 78969 - RNA, 1413 nt, Artificial Sequence
  derived and/or modified CDS sequence (opt1) from neuraminidase__InfluenzaA__ABD95287
augaaccccaaccagaagaucaucaccaucggcagcaucuccguggccaucgggaucaucagccugaugcuccagaucggcaacaucaucuccaucugggccagccacuccauccagaccgggagccagaaccacacgggcgucugcaaccagcgcaucaucaccuacgagaacuccaccugggugaaccacaccuacgugaacaucaacaacacgaacgucaucgcggggaaggacaagaccagcgugacccuggccggcaacuccagccugugcuccaucagcggcugggccaucuacaccaaggacaacuccauccggaucgggagcaagggcgacguguucgucauccgcgagccguucaucuccugcagccaccucgagugccggacguucuuccugacccagggggcccugcucaacgacaagcacuccaacggcaccgugaaggaccgcagccccuaccgggcccugauguccugcccccugggggaggcgcccagcccguacaacagcaaguucgaguccguggccuggagcgccuccgccugccacgacggcaugggcuggcucaccaucgggaucagcggccccgacaacggggcggucgccgugcugaaguacaacggcaucaucacggagaccaucaaguccuggaagaagcagauccugcgcacccaggagagcgagugcgugugcgucaacggcuccugcuucaccaucaugacggacgggcccagcaacggcgccgccuccuacaagaucuucaagaucgagaaggggaaggugaccaagagcaucgagcucaacgcccccaacuuccacuacgaggagugcuccugcuacccggacaccggcaccgugaugugcgucugccgggacaacuggcacgggagcaaccgccccuggguguccuucaaccagaaccuggacuaccagaucggcuacaucugcagcggcguguucggggacaacccccggcccaaggacggcgagggguccugcaacccggucacgguggacggcgcgaacggggugaagggcuucagcuacaaguacggcaacggggucuggaucggccgcaccaaguccaaccggcugcgcaagggguucgagaugaucugggaccccaacggcuggaccgacaccgacagcgacuucuccgugaagcaggacguggucgccaucacggacuggagcggguacagcggcuccuucgugcagcaccccgagcucaccggccuggacugcauccggcccugcuucugggucgagcuggugcgcgggcucccgaaggagaacaccaccaucuggacgagcggcuccagcaucuccuucugcggggugaacagcgacaccgccaacugguccuggcccgacggcgccgagcugcccuucaccaucgacaaguga

SEQ ID NO: 78970 - RNA, 1413 nt, Artificial Sequence; identical to SEQ ID NO: 78420
  derived and/or modified CDS sequence (opt1) from neuraminidase__InfluenzaA__ABD95298

SEQ ID NO: 78971 - RNA, 1413 nt, Artificial Sequence
  derived and/or modified CDS sequence (opt1) from neuraminidase__InfluenzaA__ABD95309
augaaccccaaccagaagaucaucaccaucggcagcaucuccaucgccaucgggaugaucagccugaugcuccagaucggcaacaucaucuccaucugggccagccacuccauccagaccgggagccagaaccacacgggcgugugcaaccagcgcaucaucaccuacgagaacuccaccugggucaaccacaccuacgugaacaucaacaacacgaacgugaucgcggggaaggacaagaccagcgucacccuggccggcaacuccagccugugcuccaucagcggcugggccaucuacaccaaggacaacuccauccggaucgggagcaagggcgacguguucgugauccgcgagccguucaucuccugcagccaccucgagugccggacguucuuccugacccagggggcccugcucaacgacaagcacuccaacggcaccgucaaggaccgcagccccuaccgggcccugauguccugcccccugggggaggcgcccagcccguacaacagcaaguucgaguccguggccuggagcgccuccgccugccacgacggcaugggcuggcucaccaucgggaucagcggccccgacaacggggcgguggccguccugaaguacaacggcaucaucacggagaccaucaaguccuggaagaagcagauccugcgcacccaggagagcgagugcgugugcgugaacggcuccugcuucaccaucaugacggacgggcccagcaacggcgccgccuccuacaagaucuucaagaucgagaaggggaaggucaccaagagcaucgagcucaacgcccccaacuuccacuacgaggagugcuccugcuacccggacaccggcaccgugaugugcgugugccgggacaacuggcacgggagcaaccgccccugggucuccuucaaccagaaccuggacuaccagaucggcuacaucugcagcggcguguucggggacaacccccggcccaaggacggcgagggguccugcaacccggugacggucgacggcgcgaacggggugaagggcuucagcuacaaguacggcaacgggguguggaucggccgcaccaagugcaaccggcugcgcaagggguucgagaugaucugggaccccaacggcuggaccgacaccgacuccgacuucagcgucaagcaggacgugguggccaucacggacugguccggguacagcggcagcuucguccagcaccccgagcucaccggccuggacugcauccggcccugcuucuggguggagcugguccgcgggcucccgaaggagaacaccaccaucuggacguccggcagcuccaucagcuucugcggggugaacuccgacaccgccaacuggagcuggcccgacggcgccgagcugcccuucaccaucgacaaguga

SEQ ID NO: 78972 - RNA, 1413 nt, Artificial Sequence; identical to SEQ ID NO: 78420
  derived and/or modified CDS sequence (opt1) from neuraminidase__InfluenzaA__ABD95320

SEQ ID NO: 78973 - RNA, 1413 nt, Artificial Sequence; identical to SEQ ID NO: 78949
  derived and/or modified CDS sequence (opt1) from neuraminidase__InfluenzaA__ABD95331

SEQ ID NO: 78974 - RNA, 1413 nt, Artificial Sequence
  derived and/or modified CDS sequence (opt1) from neuraminidase__InfluenzaA__ABD95342
augaaccccaaccagaagaucaucaccaucggcagcaucugcauggccaucgggaucaucucccugauccuccagaucggcaacaucaucagcaucugggugucccacagcauccagaccgggucccagaaccacacgggcaucugcaaccagcgcaucaucaccuacgagaacagcaccugggucaaccagaccuacgugaacaucaacaacacgaacguggucgccgggaaggacaccaccuccgugacccuggcgggcaacagcucccugugcccggugcggggcugggccaucuacagcaaggacaacuccauccgcaucgggagcaagggcgacgucuucgugauccgggagcccuucaucuccugcagccaccucgagugccgcacguucuuccugacccagggggcccugcucaacgacaagcacuccaacggcaccgugaaggaccggagccccuaccgcgcccugauguccugccccaucggggaggccccgagccccuacaacucccgguucgagagcgucgcguggagcgccuccgccugccacgacggcaugggcuggcugaccaucgggaucagcggccccgacgacggggccguggcggugcucaaguacaacggcaucaucacggagaccaucaaguccuggcgcaagcggauccugcgcacccaggagagcgagugcgucugcaucaacggcuccugcuucaccaucaugacggacgggcccagcaacggcccggccuccuaccggaucuucaagaucgagaaggggaagaucaccaagagcaucgagcuggacgcccccaacucccacuacgaggagugcagcugcuaccccgacaccggcaccgugaugugcgugugccgcgacaacuggcacggguccaaccggcccugggucagcuucaaccagaaccucgacuaccagaucggcuacaucugcuccggcguguucggggacaacccgcgccccaaggacggcaaggggagcugcggccccgugacggucgacggggccgacggcgugaagggcuucuccuaccgguacgggaacggcguguggaucgggcgcaccaagagcaacuccagccggaagggcuucgagaugaucugggaccccaacggguggaccgacaccgacuccaacuuccuggucaagcaggacgugguggccaugacggacuggagcggcuacagcggcuccuucguccagcacccggagcugaccgggcucgacugcaugcgccccugcuucuggguggagcugauccggggccgcccccgggagaagaccaccaucuggacgagcggguccagcaucuccuucugcggcgucaacagcgacaccgugaacugguccuggcccgacggcgcggagcugccguucaccaucgacaaguga

SEQ ID NO: 78975 - RNA, 1413 nt, Artificial Sequence
  derived and/or modified CDS sequence (opt1) from neuraminidase__InfluenzaA__ABD95353
augaaccccaaccagaagaucaucaccaucggcagcaucugcauggccaucgggaucaucucccugauccuccagaucggcaacaucaucagcaucugggugucccacagcauccagaccgggucccagaaccacacgggcaucugcaaccagcgcaucaucaccuacgagaacagcaccugggucaaccagaccuacgugaacaucuccaacacgaacguggucgccgggaaggacaccaccagcaugacccuggcgggcaacuccagccugugcccgauccggggcugggccaucuacuccaaggacaacagcauccgcaucggguccaagggcgacguguucgugauccgggagcccuucaucagcugcucccaccucgagugccgcacguucuuccugacccagggggcccugcucaacgacaagcacagcaacggcaccgucaaggaccggucccccuaccgcgcccugaugagcugccccaucggggaggccccgucccccuacaacagccgguucgagagcguggcgugguccgccagcgccugccacgacggcaugggcuggcugaccaucgggaucuccggccccgacgacggggccguggcgguccucaaguacaacggcaucaucacggagaccaucaagagcuggcgcaagcagauccugcggacccaggaguccgagugcgugugcgugaacggcagcugcuucaccaucaugacggacgggcccuccgacggcccggccagcuaccgcaucuucaagaucgagaaggggaagaucaccaaguccaucgagcuggacgcccccaacagccacuacgaggagugcuccugcuaccccgacaccggcaccgucaugugcgugugccgggacaacuggcacgggagcaaccgccccuggguguccuucaaccagaaccucgacuaccagaucggcuacaucugcagcggcgucuucggggacaacccgcggcccaaggacggcaagggguccugcgaccccgugaacguggacggcgccgacggggucaagggcuucagcuaccgcuacggcaacgggguguggaucggccggacgaaguccaacagcucccgcaagggguucgagaugaucugggaccccaacggcuggaccgacaccgacagcaacuuccuggugaagcaggacgucguggccaugaccgacuggagcggguacuccggcagcuucgugcagcacccggagcugacgggccucgacugcaugcggcccugcuucugggucgagcugauccgcgggcggccccgcgagaagaccaccaucuggaccuccggcagcuccaucagcuucugcggggugaacuccgacacggucaacuggagcuggcccgacggcgcggagcugccguucaccaucgacaaguga

SEQ ID NO: 78976 - RNA, 1413 nt, Artificial Sequence; identical to SEQ ID NO: 78852
  derived and/or modified CDS sequence (opt1) from neuraminidase__InfluenzaA__ABE11660

SEQ ID NO: 78977 - RNA, 1413 nt, Artificial Sequence
  derived and/or modified CDS sequence (opt1) from neuraminidase__InfluenzaA__ABE11671
augaaccccaaccagaagaucaucaccaucggcagcaucuccaucgccaucgggaucaucagccugaugcuccagaucggcaacaucaucuccaucugggccagccacuccauccagaccgggagccagaaccacacgggcgugugcaaccagcgcaucaucaccuacgagaacuccaccugggucaaccacaccuacgugaacaucaacaacacgaacguggucgcggggaaggacaagaccagcgugacccuggccggcaacuccagccugugcuccaucagcggcugggccaucuacaccaaggacaacuccauccggaucgggagcaagggcgacguguucgucauccgcgagccguucaucuccugcagccaccucgagugccggacguucuuccugacccagggggcccugcucaacgacaagcacuccaacggcaccgugaaggaccgcagccccuaccgggcccugauguccugcccccugggggaggcgcccagcccguacaacagcaaguucgaguccguggccuggagcgccuccgccugccacgacggcaugggcuggcucaccaucgggaucagcggccccgacaacggggcggucgccgugcugaaguacaacggcaucaucacggagaccaucaaguccuggaagaagcagauccugcgcacccaggagagcgagugcgugugcgucaacggcuccugcuucaccaucaugacggacgggcccagcaacggcgccgccuccuacaagaucuucaagaucgagaaggggaaggugaacaagagcaucgagcucaacgcccccaacuuccacuacgaggagugcuccugcuacccggacaccggcaccgugaugugcgucugccgggacaacuggcacgggagcaaccgccccuggguguccuucaaccagaaccuggacuaccagaucggcuacaucugcagcggcguguucggggacaacccccggcccaaggacggcgagggguccugcaacccggucaccguggacggcgcgaacggggugaagggcuucagcuacaaguacggcaacggggucuggaucggccgcacgaaguccaaccggcugcgcaagggguucgagaugaucugggaccccaacggcuggaccgacaccgacagcgacuucuccgugaagcaggacguggucgccaucaccgacuggagcggguacagcggcuccuucgugcagcaccccgagcucacgggccuggacugcauccggcccugcuucugggucgagcuggugcgcgggcucccgcgggagaacaccaccaucuggaccagcggcuccagcaucuccuucugcggggugaacagcgacacggccaacugguccuggcccgacggcgccgagcugcccuucaccaucgacaaguga

SEQ ID NO: 78978 - RNA, 1413 nt, Artificial Sequence
  derived and/or modified CDS sequence (opt1) from neuraminidase__InfluenzaA__ABE11682
augaaccccaaccagaagaucaucaccaucggcagcaucuccaucgccaucgggaucaucagccugaugcuccagaucggcaacaucaucuccaucugggccagccacuccauccagaccgggagccagaaccacacgggcaucugcaaccagcgcaucaucaccuacgagaacuccaccugggugaaccacaccuacgucaacaucaacaacacgaacgugguggcgggggaggacaagaccagcgucacccuggccggcaacuccagccugugcuccaucagcggcugggccaucuacaccaaggacaacuccauccggaucgggagcaagggcgacguguucgugauccgcgagccguucaucuccugcagccaccucgagugccggacguucuuccugacccagggggcccugcucaacgacaagcacuccaacggcaccgucaaggaccgcagccccuaccgggcccugauguccugcccccugggggaggcgcccagcccguacaacagcaaguucgaguccguggccuggagcgccuccgccugccacgacggcaugggcuggcucaccaucgggaucagcggccccgacaacggggcgguggccguccugaaguacaacggcaucaucacggagaccaucaaguccuggaagaagcgcauccugcggacccaggagagcgagugcgugugcgugaacggcuccugcuucaccaucaugacggacgggcccagcaacggcgccgccuccuacaagaucuucaagaucgagaaggggaaggucaccaagagcaucgagcucaacgcccccaacuuccacuacgaggagugcuccugcuacccggacaccggcaccgugaugugcgugugccgcgacaacuggcacgggagcaaccggcccugggucuccuucaaccagaaccuggacuaccagaucggcuacaucugcagcggcguguucggggacaacccccgccccaaggacggcgagggguccugcaacccggugacggucgacggcgcggacggggugaagggcuucagcuacaaguacggcaacgggguguggaucggccggaccaaguccaaccgccugcggaagggguucgagaugaucugggaccccaacggcuggaccgacaccgacagcgacuucuccgucaagcaggacgugguggccaucacggacuggagcggguacagcggcuccuucguccagcaccccgagcucaccggccuggacugcauccgccccugcuucuggguggagcugguccgggggcucccgcgcgagaacaccaccaucuggacgagcggcuccagcaucuccuucugcggggugaacagcgacaccgccaacugguccuggcccgacggcgccgagcugcccuucaccaucgacaaguga

SEQ ID NO: 78979 - RNA, 1413 nt, Artificial Sequence; identical to SEQ ID NO: 78420
  derived and/or modified CDS sequence (opt1) from neuraminidase__InfluenzaA__ABE11693

SEQ ID NO: 78980 - RNA, 1413 nt, Artificial Sequence; identical to SEQ ID NO: 78420
  derived and/or modified CDS sequence (opt1) from neuraminidase__InfluenzaA__ABE11704

SEQ ID NO: 78981 - RNA, 1413 nt, Artificial Sequence; identical to SEQ ID NO: 78420
  derived and/or modified CDS sequence (opt1) from neuraminidase__InfluenzaA__ABE11715

SEQ ID NO: 78982 - RNA, 1413 nt, Artificial Sequence; identical to SEQ ID NO: 78949
  derived and/or modified CDS sequence (opt1) from neuraminidase__InfluenzaA__ABE11726

SEQ ID NO: 78983 - RNA, 1413 nt, Artificial Sequence; identical to SEQ ID NO: 78954
  derived and/or modified CDS sequence (opt1) from neuraminidase__InfluenzaA__ABE11737

SEQ ID NO: 78984 - RNA, 1413 nt, Artificial Sequence; identical to SEQ ID NO: 78420
  derived and/or modified CDS sequence (opt1) from neuraminidase__InfluenzaA__ABE11815

SEQ ID NO: 78985 - RNA, 1413 nt, Artificial Sequence; identical to SEQ ID NO: 78949
  derived and/or modified CDS sequence (opt1) from neuraminidase__InfluenzaA__ABE11826

SEQ ID NO: 78986 - RNA, 1413 nt, Artificial Sequence; identical to SEQ ID NO: 78949
  derived and/or modified CDS sequence (opt1) from neuraminidase__InfluenzaA__ABE11837

SEQ ID NO: 78987 - RNA, 1413 nt, Artificial Sequence; identical to SEQ ID NO: 78949
  derived and/or modified CDS sequence (opt1) from neuraminidase__InfluenzaA__ABE11848

SEQ ID NO: 78988 - RNA, 1413 nt, Artificial Sequence; identical to SEQ ID NO: 78954
  derived and/or modified CDS sequence (opt1) from neuraminidase__InfluenzaA__ABE11859

SEQ ID NO: 78989 - RNA, 1413 nt, Artificial Sequence
  derived and/or modified CDS sequence (opt1) from neuraminidase__InfluenzaA__ABE11903
augaaccccaaccagaagaucaucaccaucggcagcaucuccauggccaucgggaucaucagccugauccuccagaucggcaacaucaucuccaucugggccagccacuccauccagaccgggagccagaacuacacgggcaucugcaaccagcgcaucaucaccuacgagaacuccaccugggugaaccagaccuacgucaacaucaacaacacgaacgugguggcggggaaggacaagaccagcaugacccuggccggcaacuccagccugugcccgauccggggcugggccaucuacaccaaggacaacuccauccgcaucgggagcaagggcgacgucuucgugauccgggagcccuucaucuccugcagccaccucgagugccgcacguucuuccugacccagggggcccugcucaacgacaagcacuccaacggcaccgugaaggaccggagccccuaccgcgcccugauguccugcccccugggggaggcgccgagccccuacaacucccgguucgagagcgucgccuggagcgccuccgccugccacgacggccucggcuggcugaccaucgggaucagcggccccgacaacggggcgguggccgugcugaaguacaacggcaucaucacggagaccaucaaguccuggaagaagcagauccuccgcacccaggagagcgagugcgucugcgugaacggcuccugcuucaccaucaugacggacgggcccagcaacggcgccgccuccuaccggaucuucaagaucgagaaggggcgcgugaccaagagcaucgagcuggacgccccgaacuaccacuacgaggagugcuccugcuaccccgacaccggcaccgucaugugcgugugccgggacaacuggcacgggagcaaccgccccuggguguccuucaaccagaaccuggacuaccagaucggcuacaucugcagcggcgucuucggggacaacccccggccgaaggacggcgagggguccugcaaccccgugacgguggacggcgcggacggggucaagggcuucagcuaccgcuacggcaacgggguguggaucggccggaccaaguccaaccgccuccggaagggguucgagaugaucugggaccccaacggcuggaccgacaccgacagcgacuucuccaugaagcaggacguggucgccaugacggacuggagcggguacuccggcagcuucgugcagcaccccgagcugaccggccuggacugcaugcgcccgugcuucuggguggagcucguccgggggcugccccgcgagaacaccaccaucuggacgagcggcuccagcaucuccuucugcggggugaacagcgagaccgccaacugguccuggcccgacggcgccgagcugcccuucaccaucgacaaguga

SEQ ID NO: 78990 - RNA, 1413 nt, Artificial Sequence
  derived and/or modified CDS sequence (opt1) from neuraminidase__InfluenzaA__ABE11925
augaaccccaaccagaagaucaucaccaucggcagcaucuccaucgccaucgggaucaucagccugauccuccagaucggcaacaucaucuccaucugggccagccacuccauccagaccgggagccagaaccacacgggcaucugcaaccagcgcaucaucaccuacgagaacuccaccugggugaaccagaccuacgucaacaucaacaacacgaacgugguggcggggaaggacaagaccagcaugacccuggccggcaacuccagccugugcccgauccggggcugggccaucuacaccaaggacaacuccauccgcaucgggagcaagggcgacgucuucgugauccgggagcccuucaucuccugcagccaccucgagugccgcacguucuuccugacccagggggcccugcucaacgacaagcacuccaacggcaccgugaaggaccggagccccuaccgcgcccugauguccugcccccugggggaggcgccgagccccuacaacucccgguucgagagcgucgccuggagcgccuccgccugccacgacggccucggcuggcugaccaucgggaucagcggccccgacaacggggcgguggccgugcugaaguacaacggcaucaucacggagaccaucaaguccuggaagaagcgcauccuccggacccaggagagcgagugcgucugcaugaacggcuccugcuucaccaucaugacggacgggcccagcaacggcgccgccuccuaccgcaucuucaagaucgagaaggggaaggugaccaagagcaucgagcuggacgccccgaacuaccacuacgaggagugcuccugcuaccccgacaccggcaccgugaugugcgucugccgggacaacuggcacgggagcaaccgccccuggguguccuucaaccagaaccuggacuaccagaucggcuacaucugcagcggcguguucggggacaacccccggccgaaggacggcgagggguccugcaaccccgucacggcggacggcgccgacggggugaagggcuucagcuaccgcuacggcaacgggguguggaucggccggaccaaguccaaccgccuccggaagggguucgagaugaucugggaccccaacggcuggaccgacaccgacagcgacuucuccaugaagcaggacaucgucgccaugacggacuggagcggguacuccggcagcuucgugcagcaccccgagcugaccggccuggacugcaugcgcccgugcuucuggguggagcucguccgggggcugccccgcgagaacaccaccaucuggacgagcggcuccagcaucuccuucugcggggugaacagcgacaccgccaacugguccuggcccgacggcgccgagcugcccuucaccaucgacaaguga

SEQ ID NO: 78991 - RNA, 1413 nt, Artificial Sequence
  derived and/or modified CDS sequence (opt1) from neuraminidase__InfluenzaA__ABE11952
augaaccccaaccagaagaucaucaccaucggcagcaucuccauggccaucgggaucaucagccugauccuccagaucggcaacaucaucuccaucugggccagccacuccauccagaccgggagccagaacuacacgggcaucugcaaccagcgcaucaucaccuacgagaacuccaccugggugaaccagaccuacgucaacaucaacaacacgaacgugguggcggggaaggacaagaccagcaugacccuggccggcaacuccagccugugcccgauccggggcugggccaucuacaccaaggacaacuccauccgcaucgggagcaagggcgacgucuucgugauccgggagcccuucaucuccugcagccaccucgagugccgcacguucuuccugacccagggggcccugcucaacgacaagcacuccaacggcaccgugaaggaccggagccccuaccgcgcccugauguccugcccccugggggaggcgccgagccccuacaacucccgguucgagagcgucgccuggagcgccuccgccugccacgacggccucggcuggcugaccaucgggaucagcggccccgacaacggggcgguggccgugcugaaguacaacggcaucaucacggagaccaucaaguccuggaagaagcagauccuccgcacccaggagagcgagugcgucugcgugaacggcuccugcuucaccaucaugacggacgggcccagcaacggcgccgccuccuaccggaucuucaagaucgagaaggggcgcgugaccaagagcaucgagcuggacgccccgaacuaccacuacgaggagugcuccugcuaccccgacaccggcaccgucaugugcgugugccgggacaacuggcacgggagcaaccgccccuggguguccuucaaccagaaccuggacuaccagaucggcuacaucugcagcggcgucuucggggacaacccccggccgaaggacggcgagggguccugcaaccccgugacgguggacggcgcggacggggucaagggcuucagcuaccgcuacggcaacgggguguggaucggccggaccaaguccaaccgccuccggaagggguucgagaugaucugggaccccaacggcuggaccgacaccgacagcgacuucuccaugaagcaggacguggucgccaugacggacuggagcggguacuccggcagcuucgugcagcaccccgagcugaccggccuggacugcaugcgcccgugcuucuggguggagcucguccgggggcugccccgcgagaacaccaccaucuggacgagcggcuccagcaucuccuucugcggggugaacagcgagaccgccgacugguccuggcccgacggcgccgagcugcccuucaccaucgacaaguga

SEQ ID NO: 78992 - RNA, 1413 nt, Artificial Sequence
  derived and/or modified CDS sequence (opt1) from neuraminidase__InfluenzaA__ABE12035
augaaccccaaccagaagaucaucaccaucggcagcaucuccaucgccaucgggaucaucagccugauccuccagaucggcaacaucaucuccaucugggccagccacuccauccagaccgggagccagaaccacacgggcaucugcaaccagcgcaucaucaccuacgagaacuccaccugggugaaccagaccuacgucaacaucaacaacacgaacgugguggcggggaaggacaagaccagcaugacccuggccggcaacuccagccugugcccgauccggggcugggccaucuacaccaaggacaacuccauccgcaucgggagcaagggcgacgucuucgugauccgggagcccuucaucuccugcagccaccucgagugccgcacguucuuccugacccagggggcccugcucaacgacaagcacuccaacggcaccgugaaggaccggagccccuaccgcgcccugauguccugcccccugggggaggcgccgagccccuacaacucccgguucgagagcgucgccuggagcgccuccgccugccacgacggccucggcuggcugaccaucgggaucagcggccccgacaacggggcgguggccgugcugaaguacaacggcaucaucacggagaccaucaaguccuggaagaagcgcauccuccggacccaggagagcgagugcgucugcaugaacggcuccugcuucaccaucaugacggacgggcccagcaacggcgccgccuccuaccgcaucuucaagaucgagaaggggcgggugaccaagagcaucgagcuggacgccccgaacuaccacuacgaggagugcuccugcuaccccgacaccggcaccgugaugugcgucugccgcgacaacuggcacgggagcaaccggcccuggguguccuucaaccagaaccuggacuaccagaucggcuacaucugcagcggcguguucggggacaacccccgcccgaaggacggcgagggguccugcaaccccgucacgguggacggcgcggacggggugaagggcuucagcuaccgguacggcaacggggucuggaucggccgcaccaaguccaaccggcuccgcaagggguucgagaugaucugggaccccaacggcuggaccgacaccgacagcgacuucuccaugaagcaggacaucguggccaugacggacuggagcggguacuccggcagcuucgugcagcaccccgagcugaccggccuggacugcaugcggccgugcuucugggucgagcucgugcgcgggcugccccgggagaacaccaccaucuggacgagcggcuccagcaucuccuucugcggggugaacagcgacaccgccaacugguccuggcccgacggcgccgagcugcccuucaccaucgacaaguga

SEQ ID NO: 78993 - RNA, 1410 nt, Artificial Sequence; identical to SEQ ID NO: 78754
  derived and/or modified CDS sequence (opt1) from neuraminidase__InfluenzaA__ABE12094

SEQ ID NO: 78994 - RNA, 1410 nt, Artificial Sequence; identical to SEQ ID NO: 78886
  derived and/or modified CDS sequence (opt1) from neuraminidase__InfluenzaA__ABE12126

SEQ ID NO: 78995 - RNA, 1413 nt, Artificial Sequence; identical to SEQ ID NO: 78420
  derived and/or modified CDS sequence (opt1) from neuraminidase__InfluenzaA__ABE12263

SEQ ID NO: 78996 - RNA, 1410 nt, Artificial Sequence
  derived and/or modified CDS sequence (opt1) from neuraminidase__InfluenzaA__ABE12626
augaaccccaaccagaagaucaucaccaucggcagcgugucccugaccaucgccacgaucugcuuccucaugcagaucgccauccuggucaccaccgugacccugcacuucaagcaguacgagugcgacagcccggcgaacaaccaggugaugcccugcgagcccaucaucaucgagcgcaacaucacggagaucgucuaccucaccaacaccaccaucgagaaggagaucugccccaagcugguggaguaccggaagugguccaagccgcagugcaagaucacgggguucgcccccuucagcaaggacaacuccauccgccugagcgccggcggggacaucugggugacccgggagcccuacgucuccugcgaccccggcaagugcuaccaguucgcccucgggcagggcaccacccuggacaacaagcacagcaacgacacgauccacgaccgcaucccgcaccggacccugcucaugaacgagcugggcgugcccuuccaccuggggacccgccaggugugcaucgccugguccagcuccagcugccacgacggcaaggcguggcuccacgucugcgugaccggggacgacaagaacgccacggccuccuucaucuacgacggccggcugguggacagcaucggguccuggagccagaacauccugcgcacccaggaguccgagugcgucugcaucaacgggaccugcaccguggugaugacggacggcagcgccuccggccgggcggacacccgcauccucuucaucgaggagggcaagaucguccacaucagcccccugagcggguccgcccagcacguggaggagugcagcugcuacccccgguacccgggcgugcgcugcaucugccgggacaacuggaagggcuccaaccgccccgucguggacaucaacgugaaggacuacagcaucgacuccagcuacgucugcuccgggcuggugggcgacacgccccggaacaacgaccgcagcuccaacagcuacugccggaaccccaacaacgagcgcgggaaccacggcgugaaggggugggccuucgacgacggcaacgacgucuggaugggccggaccaucuccaaggacagccgcuccggguacgagaccuucaaggugaucggcggguggagcaccccgaacuccaagagccagaucaaccggcaggucaucguggacuccgacaaccgcagcggcuacuccgggaucuucagcguggagggcaagagcugcaucaaccgcugcuucuacgucgagcucauccggggccgcgagcaggagacccgggugugguggaccuccaacagcaucguggucuucugcgggacguccggcaccuacgggaccggcagcuggcccgacggggccgacaucaaccugaugcccaucuga

SEQ ID NO: 78997 - RNA, 1410 nt, Artificial Sequence
  derived and/or modified CDS sequence (opt1) from neuraminidase__InfluenzaA__ABE12650
augaaccccaaccagaagaucaucaccaucggcagcgugucccugaccaucgccacgaucugcuuccucaugcagaucgccauccuggucaccaccgugacccugcacuucaagcaguacgagugcaacagcccgcccaacaaccaggugaugcucugcgagcccacgaucaucgagcgcaacaucaccgagaucgucuaccugaccaacaccacgaucgagaaggagaucugccccaagcuggcggaguaccggaacugguccaagccgcagugcaagaucaccggguucgcccccuucagcaaggacaacuccauccgccucagcgccggcggggacaucugggugacccgggagcccuacguguccugcgaccccgacaagugcuaccaguucgcccugggccaggggaccacgcugaacaaccgccacagcaacgacaccguccacgaccggaccccguaccgcacccuccugaugaacgagcugggcgugcccuuccaccucggcacgaagcaggucugcaucgccugguccagcuccagcugccacgacgggaaggcguggcugcacgugugcgugaccggccacgacgagaacgccaccgccuccuucaucuacgacgggcggcugguggacagcaucggcuccuggagcaagaagauccuccgcacccaggaguccgagugcgucugcaucaacgggacgugcaccguggugaugaccgacggcagcgccuccggccgggcggacaccaagauccuguucaucaaggaggggaagaucguccacaucagcccccugcucggcagcgcccagcacguggaggagugcuccugcuacccccgcuacccgggggugcggugcgucugccgcgacaacuggaagggcagcaaccggcccaucguggacaucaacgugaaggacuacuccaucgucagcuccuacgugugcagcggccuggugggggacacgccccgcaagaacgacuccagcuccagcucccacugccugaaccccaacaacgaggagggcgggcacggcgucaaggggugggccuucgacgacggcaacgacguguggaugggccggaccaucagcgagaagcuccgcuccggguacgagaccuucaaggucaucgagggcuggagcaagccgaacuccaagcugcagaucaaccgccaggugaucguggaccgggggaaccggagcggcuacuccgggaucuucagcgucgagggcaaguccugcaucaaccgcugcuucuacguggagcugauccggggccgcaagcaggagaccgaggugugguggacgagcaacagcaucgucguguucugcgggaccuccggcaccuacgggaccggcagcuggcccgacggggccgacaucaaccucaugcccaucuga

SEQ ID NO: 78998 - RNA, 1410 nt, Artificial Sequence
  derived and/or modified CDS sequence (opt1) from neuraminidase__InfluenzaA__ABE13095
augaaccccaaccagaagaucaucaccaucggcagcgugucccugaccaucacgaccaucugcuuccucaugcagaucgccauccuggucaucaccgugacccugcacuucaagcagugcgagugcaacagcccgcccaacaaccaggugaugcucugcgagcccacgaucaucgagcgcaacaucaccgagaucgucuaccugaccaacaccacgaucgagaaggagaucugccccaagcuggccgaguaccggaacugguccaagccgcagugcaagaucaccggguucgcgcccuucagcaaggacaacuccauccgccucagcgccggcggggacaucugggugacccgggagcccuacguguccugcgaccccggcaagugcuaccaguucgcccuggggcagggcaccacgcugaacaaccgccacagcaacgacaccguccacgaccggaccccguaccgcacccuccugaugaacgagcugggcgugcccuuccaccucgggacgaagcaggucugcaucgccugguccagcuccagcugccacgacggcaaggccuggcugcacgugugcgugaccgggcacaacgagaacgcgaccgccuccuucaucuacgacggccggcugguggacagcaucggguccuggagcaagaacauccuccgcacccaggaguccgagugcgucugcaucaacggcacgugcaccguggugaugaccgacggcagcgccuccgggcgggccgacaccaagauccuguucaucgaggagggcaagaucguccacaucagcccccugagcggguccgcgcagcacguggaggagugcagcugcuacccccgcuacccgggcgugcggugcgucugccgcgacaacuggaagggcuccaaccggcccaucguggacaucaacgugaaggacuacagcaucgucuccagcuacgugugcuccgggcucgugggcgacacgccccgcaagaacgacgggagcuccagcuccuacugccuggaccccaacaacgaggagggcgggcacggcgucaagggcugggccuucgacgacgggaacgacguguggaugggccggaccaucagcgagaagcugcgcuccggguacgagaccuucaaggucaucggcggguggagcaagccgaacuccaagcuccagaucaaccgccaggugaucguggacaagggcaaccggagcggcuacuccgggaucuucagcgucgagggcaaguccugcaucaaccggugcuucuacguggagcugauccgcgggcggaagcaggagaccgaggugugguggacgagcaacagcaucgucguguucugcggcaccuccgggaccuacggcaccggcagcuggcccgacggggccgacaucaaccugaugcccaucuga

SEQ ID NO: 78999 - RNA, 1410 nt, Artificial Sequence; identical to SEQ ID NO: 78150
  derived and/or modified CDS sequence (opt1) from neuraminidase__InfluenzaA__ABE13332

SEQ ID NO: 79000 - RNA, 1410 nt, Artificial Sequence; identical to SEQ ID NO: 78150
  derived and/or modified CDS sequence (opt1) from neuraminidase__InfluenzaA__ABE13558

SEQ ID NO: 79001 - RNA, 1410 nt, Artificial Sequence
  derived and/or modified CDS sequence (opt1) from neuraminidase__InfluenzaA__ABE13642
augaaccccaaccagaagaucaucaccaucggcagcgugucccugaccaucgccacgaucugcuuccucaugcagaucgccauccuggucaccaccgugacccugcacuucaagcaguacgagugcaacagcccgcccaacaaccaggugaugcucugcgagcccacgaucaucgagcgcaacaucaccgagaucgucuaccugaccaacaccacgaucgagaaggagaucugccccaagcuggcggaguaccggaacugguccaagccgcagugcaagaucaccggguucgcccccuucagcaaggacaacuccauccgccucagcgccggcggggacaucugggugacccgggagcccuacguguccugcgaccccggcaagugcuaccaguucgcccuggggcagggcaccacgcugaacaaccgccacagcaacgacaccguccacgagcggaccccguaccgcacccuccugaugaacgagcugggcgugcccuuccaccucgggacgaagcaggucugcaucgccugguccagcuccagcugccacgacggcaaggcguggcugcacgugugcgugaccgggcacgacgagaacgccaccgccuccuucaucuacaacggccggcugguggacagcaucggguccuggagcaagaacauccuccgcacccaggaguccgagugcgucugcaucaacggcacgugcaccguggugaugaccgacggcagcgccuccgggcgggcggacaccaagauccuguucaucgaggagggcaagaucguccacaucagcccccugagcggguccgcccagcacguggaggagugcagcugcuacccccgcuacccgggcgugcggugcgucugccgcgacaacuggaagggcuccaaccggcccaucguggacaucaacgugaaggacuacagcaucgucuccagcuacgugugcuccgggcucgugggcgacacgccccgcaagaacgacagcuccagcuccagccacugccugaaccccaacaacgaggagggcgggcacggggucaagggcugggccuucgacgacggcaacgacguguggauggggcggaccaucuccgagaagcugcgcagcggcuacgagaccuucaaggucaucgggggcugguccaagccgaacagcaagcuccagaucaaccgccaggugaucguggaccgggggaaccgguccggcuacagcggcaucuucuccgucgagggcaagagcugcaucaaccgcugcuucuacguggagcugauccgggggcgcaagcaggagaccgaggugugguggacgagcaacuccaucgucguguucugcgggaccagcggcaccuacgggaccggcuccuggcccgacggcgccgacaucaaccugaugcccaucuga

SEQ ID NO: 79002 - RNA, 1410 nt, Artificial Sequence
  derived and/or modified CDS sequence (opt1) from neuraminidase__InfluenzaA__ABE13668
augaaccccaaccagaagaucaucaccaucggcagcgugucccugaccaucgccacgaucugcuuccucaugcagaucgccauccuggucaccaccgugacccugcacuucaagcaguacgagugcaacagcccgcccaacaaccaggugaugcucugcgagcccacgaucaucgagcgcaacaucaccgagaucgucuaccugaccaacaccacgaucgagaaggagaucugccccaagcuggcggaguaccggaacugguccaagccgcagugcaagaucaccggguucgcccccuucagcaaggacaacuccauccgccucagcgccggcggggacaucugggugacccgggagcccuacguguccugcgaccccggcaagugcuaccaguucgcccuggggcagggcaccacgcugaacaaccgccacagcaacgacaccguccacgaccggaccccguaccgcacccuccugaugaacgagcugggcgugcccuuccaccucgggacgaagcaggucugcaucgccugguccagcuccagcugccacgacggcaaggcguggcugcacgugugcgugaccgggcacgacgagaacgccaccgccuccuucaucuacgacggccggcugguggacagcaucggguccuggagcaagaacauccuccgcacccaggaguccgagugcgucugcaucaacggcacgugcaccguggugaugaccgacggcagcgccuccgggcgggcggacaccaagauccuguucaucgaggagggcaagaucguccacaucagcccccugagcggguccgcccagcacguggaggagugcagcugcuacccccgcuacccgggcgugcggugcgucugccgcgacaacuggaagggcuccaaccggcccaucguggacaucaacgugaaggacuacagcaucgucuccagcuacgugugcuccgggcucgugggcgacacgccccgcaagaacgacagcuccagcuccagccacugccugaaccccaacaacgaggagggcgggcacggggucaagggcugggccuucgacgacggcaacgacguguggauggggcggaccaucuccgagaagcugcgcagcggcuacgagaccuucaaggucaucgggggcugguccaagccgaacagcaagcuccagaucaaccgccaggugaucguggaccgggggaaccgguccggcuacagcggcaucuucuccgucgagggcaagagcugcaucaaccgcugcuucuacguggagcugauccgggggcgcaagcaggagaccgaggugugguggacgagcaacuccaucgucguguucugcgggaccagcggcaccuacgggaccggcuccuggcccgacggcgccgacaucaaccugaugcccaucuga

SEQ ID NO: 79003 - RNA, 1410 nt, Artificial Sequence
  derived and/or modified CDS sequence (opt1) from neuraminidase__InfluenzaA__ABE13836
augaaccccaaccagaagaucaucaccaucggcagcgugucccugaccaucgccacgaucugcuuccucaugcagaucgccauccuggucaccaccgugacccugcacuucaagcaguacgagugcaacagccucccgaacaaccaggugaugcugugcgagcccacgaucaucgagcgcaacaucaccgagaucgucuaccugaccaacaccacgaucgagaaggagaucugccccaagcucgcggaguaccggaacugguccaagccccagugcaagaucaccggguucgccccguucagcaaggacaacuccauccgccugagcgccggcggggacaucugggugacccgggagcccuacguguccugcgaccccggcaagugcuaccaguucgcccuggggcagggcaccacgcucaacaaccgccacagcaacgacaccguccacgaccggacccccuaccgcacccugcugaugaacgagcucggcgugccguuccaccuggggacgaagcaggucugcaucgccugguccagcuccagcugccacgacggcaaggcguggcugcacgugugcgugaccgggcacgacgagaacgccaccgccuccuucaucuacgacggccggcucguggacagcaucggguccuggagcaagaacauccugcgcacccaggaguccgagugcgucugcaucaacggcacgugcaccguggugaugaccgacggcagcgccuccgggcgggcggacaccaagauccuguucaucgaggagggcaagaucguccacaucagcccccucagcggguccgcccagcacguggaggagugcagcugcuacccccgcuaccccggcgugcggugcgucugccgcgacaacuggaagggcuccaaccggccgaucguggacaucaacgugaaggacuacagcaucgucuccagcuacgugugcuccgggcuggugggcgacacgccccgcaagaacgacagcuccagcuccagccacugccugaaccccaacaacgaggagggcgggcacggggucaagggcugggccuucgacgacggcaacgacguguggauggggcggaccaucuccgagaagcuccgcagcggcuacgagaccuucaaggucaucgggggcugguccaagcccaacagcaagcugcagaucaaccgccaggugaucguggaccgggggaaccgguccggcuacagcggcaucuucuccgucgagggcaagagcugcaucaaccgcugcuucuacguggagcugauccgggggcgcaagcaggagaccgaggugugguggacgagcaacuccaucgucguguucugcgggaccagcggcaccuacgggaccggcuccuggccggacggcgccgacaucaaccucaugcccaucuga

SEQ ID NO: 79004 - RNA, 1410 nt, Artificial Sequence
  derived and/or modified CDS sequence (opt1) from neuraminidase__InfluenzaA__ABE14033
augaaccccaaccagaagaucaucaccaucggcagcgugucccugaccaucgccacgaucugcuuccucaugcagaucgccauccuggucaccaccgugacccugcacuucaagcaguacgagugcaacagcccgcccaacaaccaggugaugcucugcgagcccacgaucaucgagcgcaacaucaccgagaucgucuaccugaccaacaccacgaucgagaaggagaucugccccaagcuggcggaguaccggaacugguccaagccgcagugcaagaucaccggguucgcccccuucagcaaggacaacuccauccgccucagcgccggcggggacaucugggugacccgggagcccuacguguccugcgaccccggcaagugcuaccaguucgcccuggggcagggcaccacgcugaacaaccgccacagcaacgacaccguccacgaccggaccccguaccgcacccuccugaugaacgagcugggcgugcccuuccaccucgggacgaagcaggucugcaucgccugguccagcuccagcugccacgacggcaaggcguggcugcacgugugcgugaccgggcacgacgagaacgccaccgccuccuucaucuacgacggccggcugguggacagcaucggguccuggagcaagaacauccuccgcacccaggaguccgagugcgucugcaucaacggcacgugcaccguggugaugaccgacggcagcgccuccgggcgggcggacaccaagauccuguucaucgaggagggcaagaucguccacaucagcccccugagcggguccgcccagcacguggaggagugcagcugcuacccccgcuacccgggcgugcggugcgucugccgcgacaacuggaagggcuccaaccggcccaucguggacaucaacgugaaggacuacagcaucgucuccagcuacgugugcuccgggcucgugggcgacacgccccgcaagaacgacagcuccagcuccagcuacugccugaaccccaacaacgaggagggcgggcacggggucaagggcugggccuucgacgacggcaacgacguguggauggggcggaccaucuccgagaagcugcgcagcggcuacgagaccuucaaggucaucgggggcugguccaagccgaacagcaagcuccagaucaaccgccaggugaucguggaccgggggaaccgguccggcuacagcggcaucuucuccgucgagggcaagagcugcaucaaccgcugcuucuacguggagcugauccgggggcgcaagcaggagaccgaggugugguggacgagcaacuccaucgucguguucugcgggaccagcggcaccuacgggaccggcuccuggcccgacggcgccgacaucaaccugaugcccaucuga

SEQ ID NO: 79005 - RNA, 1410 nt, Artificial Sequence
  derived and/or modified CDS sequence (opt1) from neuraminidase__InfluenzaA__ABE14055
augaaccccaaccagaagaucaucaccaucggcagcgugucccugaccaucgccacgaucugcuuccucaugcagaucgccauccuggucaccaccgugacccugcacuucaagcaguacgagugcaacagcccgcccaacaaccaggugaugcucugcgagcccacgaucaucgagcgcaacaucaccgagaucgucuaccugaccaacaccacgaucgagaaggagaucugccccaagcuggcggaguaccggaacugguccaagccgcagugcaagaucaccggguucgcccccuucagcaaggacaacuccauccgccucagcgccggcggggacaucugggugacccgggagcccuacguguccugcgaccccgacaagugcuaccaguucgcccugggccaggggaccacgcugaacaaccgccacagcaacgacaccguccacgaccggaccccguaccgcacccuccugaugaacgagcugggcgugcccuuccaccucggcacgaagcaggucugcaucgccugguccagcuccagcugccacgacgggaaggcguggcugcacgugugcgugaccggccacgacgagaacgccaccgccuccuucaucuacgacgggcggcugguggacagcaucuccagcugguccaagaacauccuccgcacccaggagagcgagugcgucugcaucaacggcacgugcaccguggugaugaccgacggguccagcagcggccgggccgacaccaagauccuguucaucgaggagggcaagaucguccacaucagcccccuguccggguccgcgcagcacguggaggagugcagcugcuacccccgcuacccgggcgugcggugcgucugccgcgacaacuggaagggguccaaccggcccaucguggacaucaacgugaaggacuacagcaucgucuccagcuacgugugcuccggccucgugggcgacacgccccgcaagaacgacagcuccagcuccagcuacugccugaaccccaacaacgaggagggcgggcacggggucaagggcugggccuucgacgacgggaacgacguguggaugggccggaccaucuccgagaagcugcgcagcggcuacgagaccuucaaggucaucgggggcugguccaagccgaacagcaagcuccagaucaaccgccaggugaucguggaccgggggaaccgguccggcuacagcgggaucuucagcgucgagggcaaguccugcgugaaccgcugcuucuacguggagcugauccggggccgcaagcaggagaccgaggucugguggacgagcaacuccaucgugguguucugcgggaccagcggcaccuacgggaccggcuccuggcccgacggggccgacaucaaccugaugcccaucuga

SEQ ID NO: 79006 - RNA, 1410 nt, Artificial Sequence
  derived and/or modified CDS sequence (opt1) from neuraminidase__InfluenzaA__ABE14857
augaaccccaaccagaagaucaucaccaucggcagcgugucccugaccaucgccacgaucugcuuccucaugcagaucgccauccuggucaccaccgugacccugcacuucaagcaguacgagugcaacagcccgcccaacaaccaggugaugcucugcgagcccacgaucaucgagcgcaacaccaccgagaucgucuaccugaccaacacgaccaucgagaaggagaucugccccaagcuggcggaguaccggaacugguccaagccgcagugcaagaucaccggguucgcccccuucagcaaggacaacuccauccgccucagcgccggcggggacaucugggugacccgggagcccuacguguccugcgaccccggcaagugcuaccaguucgcccuggggcagggcacgacccugaacaaccgccacagcaacgacaccguccacgaccggaccccguaccgcacgcuccugaugaacgagcugggcgugcccuuccaccucgggaccaagcaggucugcaucgccugguccagcuccagcugccacgacggcaaggcguggcugcacgugugcgugaccgggcacgacgagaacgccaccgccuccuucaucuacgacggccggcugguggacagcaucggguccuggagcaagaacauccuccgcacgcaggaguccgagugcgucugcaucaacgggaccugcaccguggugaugaccgacggcagcgccuccgggcgggcggacacgaagauccuguucaucgaggagggcaagaucguccacaucagcccccugagcggguccgcccagcacguggaggagugcagcugcuacccccgcuacccgggcgugcggugcgucugccgcgacaacuggaagggcuccaaccggcccaucguggacaucaacgugaaggacuacagcaucgucuccagcuacgugugcuccgggcucgugggcgacacgccccgcaagaacgacagcuccagcuccagcuacugccugaaccccaacaacgaggagggcggccacggggucaagggcugggccuucgacgacggcaacgacguguggauggggcggaccaucuccgagaagcugcgcagcggcuacgagaccuucaaggucaucgggggcugguccaagccgaacagcaagcuccagaucaaccgccaggugaucguggaccgggggaaccgguccggcuacagcggcaucuucuccgucgagggcaagagcugcaucaaccgcugcuucuacguggagcugauccgggggcgcaagcaggagaccgaggugugguggaccagcaacuccaucgucguguucugcgggaccagcggcaccuacgggacgggcuccuggcccgacggcgccgacaucaaccugaugcccaucuga

SEQ ID NO: 79007 - RNA, 1410 nt, Artificial Sequence; identical to SEQ ID NO: 79004
  derived and/or modified CDS sequence (opt1) from neuraminidase__InfluenzaA__ABE15594

SEQ ID NO: 79008 - RNA, 1413 nt, Artificial Sequence
  derived and/or modified CDS sequence (opt1) from neuraminidase__InfluenzaA__ABE26994
augaaccccaaccagaagaucaucaccaucggcagcaucuccaucgccaucgggaucaucagccugauccuccagaucggcaacaucaucuccaucugggccagccacuccauccagaccgggagccagaaccacacgggcaucugcaaccagcgcaucaucaccuacgagaacuccaccugggugaaccagaccuacgucaacaucaacaacacgaacgugguggcggggaaggacaagaccagcaugacccuggccggcaacuccagccugugcccgauccggggcugggccaucuacaccaaggacaacuccauccgcaucgggagcaagggcgacgucuucgugauccgggagcccuucaucuccugcagccaccucgagugccgcacguucuuccugacccagggggcccugcucaacgacaagcacuccaacggcaccgugaaggaccggagccccuaccgcgcccugauguccugcccccugggggaggcgccgagccccuacaacucccgguucgagagcgucgccuggagcgccuccgccugccacgacggccucggcuggcugaccaucgggaucagcggccccgacaacggggcgguggccgugcugaaguacaacggcaucaucacggagaccaucaaguccuggaagaagcgcauccuccggacccaggagagcgagugcgucugcaugaacggcuccugcuucaccaucaugacggacgggcccagcaacggcgccgccuccuaccgcaucuucaagaucgagaaggggcgggugaccaagagcaucgagcuggacgccccgaacuaccacuacgaggagugcuccugcuaccccgacaccggcaccgugaugugcgucugccgcgacaacuggcacagcuccaaccggcccugggugagcuucaaccagaaccuggacuaccagaucggguacaucugcuccggcguguucggcgacaacccccgcccgaaggacggggagggcagcugcaaccccgucacgguggacggggcggacggcgugaagggguucuccuaccgguacggcaacggcgucuggaucgggcgcaccaagagcaaccggcuccgcaagggcuucgagaugaucugggaccccaacggguggaccgacaccgacuccgacuucagcaugaagcaggacaucguggccaugacggacugguccggcuacagcgggagcuucgugcagcaccccgagcugaccggccuggacugcaugcggccgugcuucugggucgagcucgugcgcggccugccccgggagaacaccaccaucuggacguccgggagcuccaucagcuucugcggcgugaacuccgacaccgccaacuggagcuggcccgacggggccgagcugcccuucaccaucgacaaguga

SEQ ID NO: 79009 - RNA, 1350 nt, Artificial Sequence
  derived and/or modified CDS sequence (opt1) from neuraminidase__InfluenzaA__ABE97641
augaaccccaaccagaagaucaucaccaucggcagcaucugcauggugaucgggaucaucucccugaugcuccagaucggcaacaugaucagcaucugggucucccacagcauccagaccuggaaccagcaccaggccgaguccaucagcaacacgaacccgcugaccgagaaggccguggcguccgugacccuggccgggaacagcucccucugccccauccgcggcugggccguccacagcaaggacaacuccauccggaucgggagcaagggcgacguguucgugauccgcgagcccuucaucuccugcagccaccuggagugccggaccuucuuccugacgcagggcgcccuccugaacgacaagcacuccaacgggaccgucaaggaccgcagcccccaccggacccugauguccugcccggugggcgaggcccccagccccuacaacucccgcuucgagagcguggcguggagcgccuccgccugccacgacgggaccagcuggcucacgaucggcaucuccgggcccgacaacggcgccgucgcggugcugaaguacaacggcaucaucaccgacaccaucaagagcuggcggaacaacauccugcgcacccaggaguccgagugcgccugcgugaacgggagcugcuucacggucaugaccgacggcccguccaacgggcaggccagcuacaagaucuucaagauggagaagggcaagguggugaaguccgucgagcucgacgcccccaacuaccacuacgaggagugcagcugcuaccccgacgccggcgagaucacgugcgugugccgggacaacuggcacggguccaaccgccccuggaucagcuucaaccagaaccuggaguaccagaucggcuacaucugcuccgggguguucggcgacaacccgcggcccaacgacgggaccggcagcugcggccccaugucccccaacggggcguacggcgucaagggguucagcuucaaguacggcaacgggguguggaucggccgcaccaaguccaccaacagccgguccggcuucgagaugaucugggacccgaacggguggaucggcaccgacagcagcuucuccgugaagcaggacaucgucgccaucaccgacuggagcggguacuccggcagcuucgugcagcaccccgagcugacggggcucgacugcauccgccccugcuucuggguggagcugauccggggccgccccaaggaguccaccaucuggaccagcggcuccagcaucuccuucugcggggucaacagcgacaucguguccuggagcuggccggacggcgccgagcugcccuucaccaucgacaaguga

SEQ ID NO: 79010 - RNA, 1350 nt, Artificial Sequence
  derived and/or modified CDS sequence (opt1) from neuraminidase__InfluenzaA__ABE97642
augaaccccaaccagaagaucaucaccaucggcagcaucugcauggugaucgggauggucucccugaugcuccagaucggcaacaugaucagcaucuggcugucccacagcauccagaccgggaaccagcaccaggccgaguccaucagcaacaacaaccugcucacggagaacgccguggcguccgugacccuggccggcaacagcucccugugcccgauccgcgggugggccguccacagcaaggacaacuccauccggaucggcagcaagggcgacguguucgugauccgcgagcccuucaucuccugcagccaccucgagugccggaccuucuuccugacccagggggcccugcucaacgacaagcacuccaacggcacggucaaggaccgcagcccccaccggacccugauguccugccccgugggggaggccccgagccccuacaacucccgcuucgagagcguggcguggagcgccuccgccugccacgacggcaucagcuggcugaccaucgggaucuccggccccgacaacggcgccgucgcggugcucaaguacaacgggaucaucaccgacacgaucaagagcuggcggaacaacauccugcgcacccaggaguccgagugcgccugcgugaacggcagcugcuucaccgucaugaccgacgggcccuccaacggccaggccagcuacaagaucuucaagauggagaagggcaagguggugaaguccgucgagcuggacgccccgaacuaccacuacgaggagugcagcugcuaccccgacgccggggagaucacgugcgugugccgggacaacuggcacggcuccaaccgccccugggugagcuucaaccagaaccucgaguaccagaucggguacaucugcuccggcgucuucggggacaacccccggccgaacgacggcaccggcagcugcgggcccaugucccccaacggcgcguacggggugaagggcuucagcuucaaguacgggaacggcguguggaucggccgcaccaaguccaccaacagccgguccggguucgagaugaucugggaccccaacggcuggacggggaccgacagcagcuucuccgucaagcaggacaucguggccaucaccgacuggagcggcuacuccgggagcuucgugcagcacccggagcugaccggccuggacugcauccgccccugcuucugggucgagcucauccggggccgccccaaggaguccacgaucuggaccagcggguccagcaucuccuucugcggcgugaacggggacaccgucagcugguccuggcccgacggcgccgagcugccguucaucaucgacaaguga

SEQ ID NO: 79011 - RNA, 1350 nt, Artificial Sequence
  derived and/or modified CDS sequence (opt1) from neuraminidase__InfluenzaA__ABE97644
augaaccccaaccagaagaucaucaccaucggcagcaucugcauggugaucgggaucgucucccugaugcuccagaucggcaacaugaucagcaucugggugucccacagcauccagaccgggaaccagcaccaggccgaguccaucagcaacacgaacccgcugaccgagaaggccguggcguccgucacccuggccggcaacagcucccucugccccauccgcgggugggccgugcacagcaaggacaacaacauccggaucggcuccaagggcgacguguucgucauccgcgagcccuucaucagcugcucccaccuggagugccggaccuucuuccugacgcagggggcccuccugaacgacaagcacagcaacggcaccgugaaggaccgcagcccccaccggacccugauguccugcccggugggggaggcccccucccccuacaacagccgcuucgaguccgucgcguggagcgccagcgccugccacgacggcaccuccuggcucacgaucgggaucagcggccccgacaacggcgccguggcggugcugaaguacaacgggaucaucaccgacaccaucaaguccuggcggaacaacauccugcgcacccaggagagcgagugcgccugcgucaacggcuccugcuucacggugaugaccgacgggccgagcaacggccaggccuccuacaagaucuucaagauggagaagggcaagguggucaagagcguggagcucgacgcccccaacuaccacuacgaggagugcuccugcuaccccgacgccggggagaucacgugcgugugccgggacaacuggcacggcagcaaccgccccugggucuccuucaaccagaaccuggaguaccagaucggguacaucugcagcggcguguucggggacaacccgcggcccaacgacggcaccggcuccugcgggcccaugagccccaacggcgcguacggggugaagggcuucuccuucaaguacgggaacggcgucuggaucggccgcaccaagagcaccaacucccggagcggguucgagaugaucugggacccgaacggcuggaccgggaccgacuccagcuucagcgugaagcaggacaucguggcccugacggacugguccggcuacagcggguccuucguccagcaccccgagcucaccggccuggacugcauccgccccugcuucuggguggagcugauccggggccgccccaaggagagcaccaucuggaccuccgggagcuccaucagcuucugcggcgucaacuccgacacggugagcugguccuggccggacggggccgagcuccccuucaccaucgacaaguga

SEQ ID NO: 79012 - RNA, 1350 nt, Artificial Sequence
  derived and/or modified CDS sequence (opt1) from neuraminidase__InfluenzaA__ABE97645
augaaccccaaccagaagaucaucaccaucggcagcaucugcauggugaucgggaccgucucccugaugcuccagaucggcaacaugaucagcaucugggugucccacagcauccagacggggaaccagcaccaggccgagccgaccuccagcaccaacccccugaccgagaaggccguggcguccgucacgcuggccggcaacagcucccucugccccauccgcgggugggccauccacagcaaggacaacuccauccggaucggcagcaagggcgacguguucgugauccgcgagcccuucaucuccugcagccaccuggagugccggaccuucuuccugacccagggggcccuccugaacgacaagcacuccaacggcaccgucaaggaccgcagcccgcaccggacgcugauguccugccccgugggggaggcccccagccccuacaacucccgcuucgagagcguggcguggagcgccuccgccugccacgacggcaccagcuggcucaccaucgggaucuccggcccggacaacggcgccgucgcggugcugaaguacaacgggaucaucaccgacacgaucaagagcuggcggaacaacauccugcgcacccaggaguccgagugcgccugcgugaacggcagcugcuucaccgucaugaccgacgggcccuccaacggccaggccagcuacaagaucuucaagauggagaagggcaagguggugaaguccgucgagcucgacgcccccaacuaccacuacgaggagugcagcugcuaccccgacgccggggagaucacgugcgugugccgggacaacuggcacggcuccaaccgcccgugggugagcuucaaccagaaccuggaguaccagaucggguacaucugcuccggcgucuucggggacaacccccggcccaacgacggcaccggcagcugcgggcccauguccccgaacggcgcguacggggugaagggcuucgccuucaaguacgggaacggcguguggaucggccgcaccaagagcaccaacucccggagcggguucgagaugaucugggaccccaacggcuggacggggcccgacuccagcuucagcgucaagcaggacaucguggccaucaccgacugguccggcuacagcggguccuucgugcagcaccccgagcugaccggccucgacugcauccgcccgugcuucugggucgagcugauccggggccgccccaaggagagcaccaucuggacguccgggagcuccaucagcuucugcggcgugaacuccgacaccgucagcugguccuggcccgacggggccgagcugcccuucaccaucgacaaguga

SEQ ID NO: 79013 - RNA, 1350 nt, Artificial Sequence
  derived and/or modified CDS sequence (opt1) from neuraminidase__InfluenzaA__ABE97646
augaaccccaaccagaagaucaucaccaucggcagcaucugcauggugaucgggaucgucucccugaugcuccagaucggcaacaugaucagcaucugggugucccacagcauccagaccgagaaccagcaccaggccgaguccaucagcaacacgaacccgcccaccgagaaggccguggcguccgucacccuggccgggaacagcucccugugccccauccgcggcugggccgugcacagcaaggacaacuccauccggaucgggagcaagggcgacguguucgucauccgcgagcccuucaucuccugcagccaccucgagugccggaccuucuuccugacgcagggcgcccugcucaacgacaagcacuccaacgggaccgugaaggaccgcagcccgcaccggacccugauguccugccccgugggcgaggcccccagccccuacaacucccgcuucgagagcgucgcguggagcgccuccgccugccacgacgggaccagcuggcugacgaucggcaucuccgggccggacaacggcgccguggcggugcucaaguacaacggcaucaucaccgacaccaucaagagcuggcggaacaacacccugcgcacgcaggaguccgagugcgccugcgucaacgggagcugcuucaccgugaugaccgacggccccuccaacgggcaggccagcuacaagaucuucaagauggagaagggcaagguggucaaguccguggagcuggacgcccccaacuaccacuacgaggagugcagcugcuaccccgacgccggcgagaucacgugcgugugccgggacaacuggcacggguccaaccgcccgugggucagcuucaaccagaaccucgaguaccagaucggcuacaucugcuccgggguguucggcgacaacccccggcccaacgacgggaccggcagcugcggccccauguccccgaacggggcguacggcgugaagggguucagcuucaaguacggcaacggggucuggaucggccgcaccaaguccaccaacagccgguccggcuucgagaugaucugggaccccaacggguggaccggcacggacagcagcuucuccgugaagcaggacaucgugagcaucaccgacugguccggguacagcggcuccuucguccagcaccccgagcugaccgggcuggacugcauccgccccugcuucuggguggagcucauccggggccgcccgaaggagagcaccaucuggacguccggcagcuccaucagcuucugcggggucaacuccgacaccgugagcugguccuggcccgacggcgccgagcugcccuucaccaucgacaaguga

SEQ ID NO: 79014 - RNA, 1350 nt, Artificial Sequence
  derived and/or modified CDS sequence (opt1) from neuraminidase__InfluenzaA__ABE97647
augaaccccaaccagaagaucaucaccaucggcagcaucugcauggugaucgggaucgucucccugaugcuccagaucggcaacaugaucagcaucugggugucccacagcauccagaccgggaaccagcaccgcgccgaguccaucagcaacacgaacccgcugaccgagaaggccguggcguccgucacccuggccggcaacagcucccucugccccauccgggggugggccgugcacagcaaggacaacaacauccgcaucggcuccaagggcgacguguucgucauccgggagcccuucaucagcugcucccaccuggagugccgcaccuucuuccugacgcagggggcccuccugaacgacaagcacagcaacggcaccgugaaggaccggagcccccaccgcacccugauguccugcccggugggggaggcccccucccccuacaacagccgguucgaguccgucgcguggagcgccagcgccugccacgacggcaccuccuggcucacgaucgggaucagcggccccgacaacggcgccguggcggugcugaaguacaacgggaucaucaccgacaccaucaaguccuggcgcaacaacauccugcggacccaggagagcgagugcgccugcgucaacggcuccugcuucacggugaugaccgacgggccgagcaacggccaggccuccuacaagaucuucaagauggagaagggcaagguggucaagagcguggagcucgacgcccccaacuaccacuacgaggagugcuccugcuaccccgacgccggggagaucacgugcgugugccgcgacaacuggcacggcagcaaccggcccugggucuccuucaaccagaaccuggaguaccagaucggguacaucugcagcggcguguucggggacaacccgcgccccaacgacggcaccggcuccugcgggcccaugagccccaacggcgcguacggggugaagggcuucuccuucaaguacgggaacggcgucuggaucggccggaccaagagcaccaacucccgcagcggguucgagaugaucugggacccgaacggcuggaccgggaccgacuccagcuucagcgugaagcaggacaucguggccaucacggacugguccggcuacagcggguccuucguccagcaccccgagcugaccggccucgacugcauccggcccugcuucuggguggagcugauccgcggccggcccaaggagagcaccaucuggaccuccgggagcuccaucagcuucugcggcgucaacuccgacacggugagcugguccuggccggacggggccgagcugcccuucaccaucgacaaguga

SEQ ID NO: 79015 - RNA, 1350 nt, Artificial Sequence
  derived and/or modified CDS sequence (opt1) from neuraminidase__InfluenzaA__ABE97649
augaaccccaaccagaagaucaucaccaucggcagcaucugcauggugaucgggaucgucucccugaugcuccagaucggcaacaugaucagcaucugggugucccacagcauccagaccgggaaccagcaccaggccgaguccaucagcaacacgaacccgcugaccgagaaggccguggcguccgucacccuggccggcaacagcucccucugccccauccgcgggugggccgugcacagcaaggacaacuccauccggaucggcagcaagggcgacguguucgucauccgcgagcccuucaucuccugcagccaccuggagugccggaccuucuuccugacgcagggggcccuccugaacgacaagcacuccaacggcaccgugaaggaccgcagcccccaccggacccugauguccugcccggugggggaggcccccagccccuacaacucccgcuucgagagcgucgcguggagcgccuccgccugccacgacggcaccagcuggcucacgaucgggaucuccggccccgacaacggcgccguggcggugcugaaguacaacgggaucaucaccgacaccaucaagagcuggcggaacaacauccugcgcacccaggaguccgagugcgccugcgucaacggcagcugcuucacggugaugaccgacgggccguccaacggccaggccagcuacaagaucuucaagauggagaagggcaagguggucaaguccguggagcucgacgcccccaacuaccacuacgaggagugcagcugcuaccccgacgccggggagaucacgugcgugugccgggacaacuggcacggcuccaaccgccccugggucagcuucaaccagaaccuggaguaccagaucggguacaucugcuccggcguguucggggacaacccgcggcccaacgacggcaccggcagcugcgggcccaugucccccaacggcgcguacggggugaagggcuucagcuucaaguacgggaacggcgucuggaucggccgcaccaaguccaccaacagccgguccggguucgagaugaucugggacccgaacggcuggaccgggaccgacagcagcuucuccgugaagcaggacaucguggccaucacggacuggagcggcuacuccgggagcuucguccagcaccccgagcugaccggccucgacugcauccgccccugcuucuggguggagcugauccggggccgccccaaggaguccaccaucuggaccagcggguccagcaucuccuucugcggcgucaacagcgacacgguguccuggagcuggccggacggggccgagcugcccuucaccaucgacaaguga

SEQ ID NO: 79016 - RNA, 1350 nt, Artificial Sequence; identical to SEQ ID NO: 79015
  derived and/or modified CDS sequence (opt1) from neuraminidase__InfluenzaA__ABE97651

SEQ ID NO: 79017 - RNA, 1350 nt, Artificial Sequence; identical to SEQ ID NO: 79015
  derived and/or modified CDS sequence (opt1) from neuraminidase__InfluenzaA__ABE97653

SEQ ID NO: 79018 - RNA, 1350 nt, Artificial Sequence; identical to SEQ ID NO: 79015
  derived and/or modified CDS sequence (opt1) from neuraminidase__InfluenzaA__ABE97654

SEQ ID NO: 79019 - RNA, 1350 nt, Artificial Sequence
  derived and/or modified CDS sequence (opt1) from neuraminidase__InfluenzaA__ABE97655
augaaccccaaccagaagaucaucaccaucggcagcaucugcauggccaucgggaucgugucccugaugcuccagaucggcaacaugaucagcaucugggucucccacagcauccagaccgggaaccagcaccaggccgaguccacgagcaacaccaacccgcugaccgagaaggcgguggccuccgugacccuggccggcaacagcucccucugccccauccgcgggugggccauccacagcaaggacaacuccauccggaucggcagcaagggcgacgucuucgugauccgcgagcccuucaucuccugcagccaccuggagugccggacguucuuccugacccagggggcccuccugaacgacaagcacuccaacggcaccgugaaggaccgcagcccccaccggacccugauguccugcccggucggggaggcgcccagccccuacaacucccgcuucgagagcguggccuggagcgccuccgccugccacgacggcacgagcuggcucaccaucgggaucuccggccccgacaacggcgcgguggccguccugaaguacaacgggaucaucaccgacaccaucaagagcuggcggaacaacauccugcgcacgcaggaguccgagugcgccugcgugaacggcagcugcuucaccgugaugaccgacgggccguccaacggccaggccagcuacaagaucuucaagauggagaagggcaaggucgugaaguccguggagcucgacgcccccaacuaccacuacgaggagugcagcugcuaccccgacgcgggggagaucacgugcgucugccgggacaacuggcacggcuccaaccgccccugggugagcuucaaccagaaccuggaguaccagaucggguacaucugcuccggcguguucggggacaacccgcggcccaacgacggcaccggcagcugcgggcccaugucccccaacggcgccuacggggucaagggcuucgccuucaaguacgggaacggcguguggaucggccgcaccaagagcaccaacucccggagcggguucgagaugaucugggacccgaacggcuggaccgggcccgacuccagcuucagcgugaagcaggacaucgucgccaucacggacugguccggcuacagcggguccuucgugcagcaccccgagcugaccggccucgacugcauccgccccugcuucuggguggagcugauccggggccgcccgaaggagagcaccaucuggaccuccgggagcuccaucagcuucugcggcgucaacuccgacacggugagcugguccuggcccgacggggccgagcugcccuucaccaucgacaaguga

SEQ ID NO: 79020 - RNA, 1350 nt, Artificial Sequence
  derived and/or modified CDS sequence (opt1) from neuraminidase__InfluenzaA__ABE97657
augaaccccaaccagaagaucaucaccaucggcagcaucugcauggugaucgggaccgucucccuggugcuccagaucggcaacaugaucagcaucugggugucccacagcauccagacggggaaccagcaccaggccgaguccaucagcaacaccaacccgcugaccgagaaggccgucgcguccgugacccuggccggcaacagcucccucugccccauccgcgggugggccgugcacagcaaggacaacuccauccggaucggcagcaagggcgacgucuucgugauccgcgagcccuucaucuccugcagccaccuggagugccggacguucuuccugacccagggggcccuccugaacgacaagcacuccaacggcaccgugaaggaccgcagcccccaccggacccugauguccugcccggucggggaggcccccagccccuacaacucccgcuucgagagcguggcguggagcgccuccgccugccacgacggcacgagcuggcucaccaucgggaucuccggccccgacaacggcgccguggcgguccugaaguacaacgggaucaucaccgacaccaucaagagcuggcgggacaacauccugcgcacgcaggaguccgagugcgccugcgugaacggcagcugcuucaccgugaugaccgacgggccguccaacggccaggccagcuacaagaucuucaagauggagaagggcaaggucgugaaguccguggagcucgacgcccccaacuaccacuacgaggagugcagcugcuaccccgacgccggggagaucacgugcgucugccgggacaacuggcacggcuccaaccgccccugggugagcuucaaccagaaccuggaguaccagaucggguacaucugcuccggcguguucggggacaacccgcggcccaacgacggcaccggcagcugcgggcccauguccagcaacggcgcguacggggucaagggcuucuccuucaaguacgggaacggcguguggaucggccgcaccaagagcaccaacucccggagcggguucgagaugaucugggaccccaacggcuggaccgggacggacagcuccuucagcgugaagcaggacaucgucgccaucaccgacugguccggcuacagcggguccuucgugcagcacccggagcugaccggccucgacugcauccgccccugcuucugggucgagcugauccggggccgccccaaggagagcaccaucuggacguccgggagcuccaucagcuucugcggcgugaacuccgacaccgugagcugguccuggcccgacggggccgagcugccguucaccaucgacaaguga

SEQ ID NO: 79021 - RNA, 1350 nt, Artificial Sequence
  derived and/or modified CDS sequence (opt1) from neuraminidase__InfluenzaA__ABE97658
augaaccccaaccagaagaucaucaccaucggcagcaucugcauggugaucgggaccaucucccugaugcuccagaucggcaacaugaucagcaucugggucucccacagcauccagacggggaaccagcaccagaccgaguccaucagcaacaccaacccgcugaccgagaaggccguggccuccgugacgcuggcgggcaacagcucccucugcagcauccgcgggugggccguccacuccaaggacaacagcauccggaucggcuccaagggcgacguguucgugauccgcgagcccuucaucagcugcucccaccuggagugccggaccuucuuccugacccagggggcccuccugaacgacaagcacagcaacggcaccgucaaggaccgcagcccccaccggacgcugaugagcugccccgugggggaggccccgucccccuacaacagccgcuucgagagcguggccugguccgcgagcgccugccacgacggcaccuccuggcucaccaucgggaucagcggccccgacaacggcgccgucgccgugcugaaguacaacgggaucaucaccgacacgaucaaguccuggcgggacaacauccugcgcacccaggagagcgagugcgcgugcgugaacggcuccugcuucaccgucaugaccgacgggcccagcaacggccaggccuccuacaagaucuucaagauggagaagggcaagguggugaaguccgucgagcucgacgccccgaacuaccacuacgaggagugcuccugcuaccccgacgccggggagaucacgugcgugugccgggacaacuggcacggcagcaaccgccccuggguguccuucaaccagaaccuggaguaccagaucggguacaucugcagcggcgucuucggggacaacccccggccgaacgacggcaccggcuccugcgggcccaugagcuccaacggcgcccacggggugaagggcuucagcuucaaguacgggaacggcguguggaucggccgcaccaaguccaccaacagccggagcggguucgagaugaucugggaccccaacggcuggacggggaccgacuccagcuucuccgucaagcaggacaucguggcgaucaccgacuggagcggcuacuccgggagcuucgugcagcaccccgagcugaccggccucgacugcauccgcccgugcuucugggucgagcugauccggggccgccccaaggaguccacgaucuggaccagcggguccagcaucuccuucugcggcgugaacagcgacaccgucuccuggagcuggcccgacggggccgagcugcccuucaccaucgacaaguga

SEQ ID NO: 79022 - RNA, 1350 nt, Artificial Sequence
  derived and/or modified CDS sequence (opt1) from neuraminidase__InfluenzaA__ABE97659
augaaccccaaccagaagaucaucaccaucggcagcaucugcauggugaucgggaucgucucccugaugcuccagaucggcaacaugaucagcaucugggugucccacagcauccagaccgggaaccagcaccaggccgaguccaucagcaacacgaacccgcugaccgagaaggccguggcguccgucacccuggccggcaacagcucccucugccccauccgcgggugggccgugcacagcaaggacaacuccauccggaucggcagcaagggcgacguguucgucauccgcgagcccuucaucuccugcagccaccuggagugccggaccuucuuccugacgcagggggcccuccugaacgacaagcacuccaacgagaccgugaaggaccgcagcccccaccggacccugauguccugcccggugggcgaggcccccagccccuacaacucccgcuucgagagcgucgcguggagcgccuccgccugccacgacgggaccagcuggcucacgaucggcaucuccgggcccgacaacggcgccguggcggugcugaaguacaacggcaucaucaccgacaccaucaagagcuggcgggacaacauccugcgcacccaggaguccgagugcgccugcgucaacgggagcugcuucacggugaugaccgacggcccguccaacgggcaggccagcuacaagaucuucaagauggagaagggcaagguggucaaguccguggagcucgacgcccccaacuaccacuacgaggagugcagcugcuaccccgacgccggcgagaucacgugcgugugccgggacaacuggcacggguccaaccgccccugggucagcuucaaccagaaccuggaguaccagaucggcuacaucugcuccgggguguucggcgacaacccgcggcccaacgacgggaccggcagcugcggccccauguccagcaacggggcguacggcgugaagggguucuccuucaaguacggcaacggggucuggaucggccgcaccaagagcaccaacucccggagcggcuucgagaugaucugggaccccaacggguggaccggcaccgacagcuccuucagcgugaagcaggacaucguggccaucacggacugguccggguacagcggcuccuucguccagcacccggagcugaccgggcucgacugcauccgccccugcuucuggguggagcugauccggggccgccccaaggagagcaccaucuggaccuccggcagcuccaucagcuucugcggggucaacuccgacacggugagcugguccuggcccgacggcgccgagcugccguucaccaucgacaaguga

SEQ ID NO: 79023 - RNA, 1350 nt, Artificial Sequence
  derived and/or modified CDS sequence (opt1) from neuraminidase__InfluenzaA__ABE97660
augaaccccaaccagaagaucaucaccaucggcagcaucugcauggugaucgggaccaucucccugaugcuccagaucggcaacaugaucagcaucugggucucccacagcauccagacggggaaccagcaccaggccgaguccaucagcaacaccaacccgcugaccgagaaggccguggcguccgugacccuggccggcaacagcucccucugccccauccgcgggugggccguccacagcaaggacaacuccauccggaucggcagcaagggcgacguguucgugauccgcgagcccuucaucuccugcagccaccuggagugccggacguucuuccugacccagggggcccuccugaacgacaagcacuccaacggcaccgucaaggaccgcagcccccaccggacccugauguccugcccggugggggaggcccccagccccuacaacucccgcuucgagagcguggcguggagcgccuccgccugccacgacggcacgagcuggcucaccaucgggaucuccggccccgacaacggcgccgucgcggugcugaaguacaacgggaucaucaccgacaccaucaagagcuggcgggacaacauccugcgcacgcaggaguccgagugcgccugcgugaacggcagcugcuucaccgucaugaccgacgggccguccaacggccaggccagcuacaagaucuucaagauggagaagggcaagguggugaaguccgucgagcucgacgcccccaacuaccacuacgaggagugcagcugcuaccccgacgccggggagaucacgugcgugugccgggacaacuggcacggcuccaaccgccccugggugagcuucaaccagaaccuggaguaccagaucggguacaucugcuccggcgucuucggggacaacccgcggcccaacgacggcaccggcagcugcgggcccauguccagcaacggcgcgcacggggugaagggcuucuccuucaaguacgggaacggcguguggaucggccgcaccaagagcaccaacucccggagcggguucgagaugaucugggaccccaacggcuggaccgggacggacagcuccuucagcgucaagcaggacaucguggccaucaccgacugguccggcuacagcggguccuucgugcagcacccggagcugaccggccucgacugcauccgccccugcuucugggucgagcugauccggggccgccccaaggagagcaccaucuggacguccgggagcuccaucagcuucugcggcgugaacuccgacaccgucagcugguccuggcccgacggggccgagcugccguucaccaucgacaaguga

SEQ ID NO: 79024 - RNA, 1350 nt, Artificial Sequence
  derived and/or modified CDS sequence (opt1) from neuraminidase__InfluenzaA__ABE97661
augaaccccaaccagaagaucaucaccaucggcagcaucugcauggugaucgggaccaucucccugaugcuccagaucggcaacaugaucagcaucugggucucccacagcauccagacggggaaccagcaccagaccgaguccaucagcaacaccaacccgcugaccgagaaggccguggccuccgugacgcuggcgggcaacagcucccucugccccauccgcgggugggccguccacagcaaggacaacuccauccggaucggcagcaagggcgacguguucgugauccgcgagcccuucaucuccugcagccaccuggagugccggaccuucuuccugacccagggggcccuccugaacgacaagcacuccaacggcaccgucaaggaccgcagcccccaccggacgcugauguccugcccggugggggaggcccccagccccuacaacucccgcuucgagagcguggccuggagcgcguccgccugccacgacggcaccagcuggcucaccaucgggaucuccggccccgacaacggcgccgucgccgugcugaaguacaacgggaucaucaccgacacgaucaagagcuggcgggacaacauccugcgcacccaggaguccgagugcgcgugcgugaacggcagcugcuucaccgucaugaccgacgggccguccaacggccaggccagcuacaagaucuucaagauggagaagggcaagguggugaaguccgucgagcucgacgcccccaacuaccacuacgaggagugcagcugcuaccccgacgccggggagaucacgugcgugugccgggacaacuggcacggcuccaaccgccccugggugagcuucaaccagaaccuggaguaccagaucggguacaucugcuccggcgucuucggggacaacccgcggcccaacgacggcaccggcagcugcgggcccauguccagcaacggcgcccacggggugaagggcuucuccuucaaguacgggaacggcguguggaucggccgcaccaagagcaccaacucccggagcggguucgagaugaucugggaccccaacggcuggacggggaccgacagcuccuucagcgucaagcaggacaucguggcgaccaccgacugguccggcuacagcggguccuucgugcagcacccggagcugacgggccucgacugcauccgccccugcuucugggucgagcugauccggggccgccccaaggagagcaccguguggaccuccgggagcuccaucagcuucugcggcgucaacuccgacaccgugagcugguccuggcccgacggggccgagcugccguucacgaucgacaaguga

SEQ ID NO: 79025 - RNA, 1350 nt, Artificial Sequence
  derived and/or modified CDS sequence (opt1) from neuraminidase__InfluenzaA__ABE97662
augaaccccaaccagaagaucaucaccaucggcagcaucugcauggugaucgggaucgucucccugaugcuccagaucggcaacaugaucagcaucugggugucccacagcauccagaccgggaaccagcaccaggccgaguccaucagcaacacgaacccgcugaccgagaaggccguggcguccgucacccuggccggcaacagcucccucugccccauccgcgggugggccgugcacagcaaggacaacuccauccggaucggcagcaagggcgacguguucgucauccgcgagcccuucaucuccugcagccaccuggagugccggaccuucuuccugacgcagggggcccuccugaacgacaagcacuccaacggcaccgugaaggaccgcagcccccaccggacccugauguccugcccggugggggaggcccccagccccuacaacucccgcuucgagagcgucgcguggagcgccuccgccugccacgacggcaccagcuggcucacgaucgggaucuccggccccgacaacggcgccguggcggugcugaaguacaacgggaucaucaccgacaccaucaagagcuggcggaacaacauccugcgcacccaggaguccgagugcgccugcgucaacggcagcugcuucacggugaugaccgacgggccguccaacggccaggccagcuacaagaucuucaagaugcggaagggcaagguggucaaguccguggagcucgacgcccccaacuaccacuacgaggagugcagcugcuaccccgacgccggggagaucacgugcgugugccgcgacaacuggcacggcuccaaccggcccugggucagcuucaaccagaaccuggaguaccagaucggguacaucugcuccggcguguucggggacaacccgcgccccaacgacggcaccggcagcugcgggcccaugucccccaacggcgcguacggggugaagggcuucagcuucaaguacgggaacggcgucuggaucggccggaccaaguccaccaacagccgcuccggguucgagaugaucugggacccgaacggcuggaccgggaccgacagcagcuucuccgugaagcaggacaucguggccaucacggacuggagcggcuacuccgggagcuucguccagcaccccgagcugaccggccucgacugcauccggcccugcuucuggguggagcugauccgcggccggcccaaggaguccaccaucuggaccagcggguccagcaucuccuucugcggcgucaacagcgacacgguguccuggagcuggccggacggggccgagcugcccuucaccaucgacaaguga

SEQ ID NO: 79026 - RNA, 1350 nt, Artificial Sequence
  derived and/or modified CDS sequence (opt1) from neuraminidase__InfluenzaA__ABE97663
augaaccccaaccagaagaucaucaccaucggcagcaucugcauggugaccgggaucgucucccugaugcuccagaucggcaacaugaucagcaucugggugucccacagcauccacacggggaaccagcaccaggccgagccgaucuccaacaccaacuuccugaccgagaaggccguggcgagcgucaagcuggccggcaacuccagccucugccccaucaacgggugggccguguacuccaaggacaacagcauccgcaucggcuccaagggcgacguguucgucauccgggagcccuucaucagcugcucccaccuggagugccgcaccuucuuccugacgcagggggcccuccugaacgacaagcacagcaacggcaccgugaaggaccggagcccccaccgcacccugauguccugcccggugggggaggcccccucccccuacaacagccgguucgaguccgucgcguggagcgccagcgccugccacgacggcaccuccuggcucacgaucgggaucagcggccccgacaacggcgccguggcggugcugaaguacaacgggaucaucaccgacaccaucaaguccuggcgcaacaacauccugcggacccaggagagcgagugcgccugcgucaacggcuccugcuucacggugaugaccgacgggccgagcaacggccaggccucccacaagaucuucaagauggagaagggcaagguggucaagagcguggagcucgacgcccccaacuaccacuacgaggagugcuccugcuaccccgacgccggggagaucacgugcgugugccgcgacaacuggcacggcagcaaccggcccugggucuccuucaaccagaaccuggaguaccagaucggguacaucugcagcggcguguucggggacaacccgcgccccaacgacggcaccggcuccugcgggcccgugagcuccaacggcgcguacggggucaagggcuucagcuuccgguacgggaacggcguguggaucggccgcaccaaguccaccaacagccgguccggguucgagaugaucugggaccccaacggcuggaccgagaccgacagcagcuucuccgugaagcaggacaucgucgccaucacggacuggagcggguacuccggcagcuucgugcagcacccggagcugaccgggcucgacugcauccgccccugcuucugggucgagcugauccggggccgccccaaggaguccaccaucuggaccagcggcuccagcaucuccuucugcggggugaacagcgacacggugggcugguccuggcccgacggggccgagcugccguucaccaucgacaaguga

SEQ ID NO: 79027 - RNA, 1350 nt, Artificial Sequence
  derived and/or modified CDS sequence (opt1) from neuraminidase__InfluenzaA__ABE97665
augaaccccaaccagaagaucaucaccaucggcagcaucugcauggugaccgggaucgucucccugaugcuccaggugggcaacaugaucagcaucugggugucccacagcauccacacggggaaccagcaccaggccgagccgaucuccaacaccaacuuccugaccgagaaggccgucgcgagcgugaagcuggccggcaacuccagccucugccccaucaacgggugggccguguacuccaaggacaacagcauccgcaucggcuccaagggcgacgucuucgugauccgggagcccuucaucagcugcucccaccuggagugccgcaccuucuuccugacgcacggggcccuccugaacgacaagcacagcaacggcaccgugaaggaccggagcccccaccgcacccugaugagcugcccggucggggaggcccccucccccuacaacagccgguucgaguccguggcguggagcgccagcgccugccacgacggcaccuccuggcucacgaucgggaucagcggccccgacaacggcgccguggcgguccugaaguacaacgggaucaucaccgacaccaucaaguccuggcgcaacaacauccugcggacccaggagagcgagugcgccugcgugaacggcuccugcuucacggugaugaccgacgggccgagcaacggccaggccucccacaagaucuucaagauggagaagggcaaggucgugaaguccguggagcucgacgcccccaacuaccacuacgaggagugcuccugcuaccccgacgccggggagaucacgugcgucugccgcgacaacuggcacggcagcaaccggcccuggguguccuucaaccagaaccuggaguaccagaucggguacaucugcagcggcguguucggggacaacccgcgccccaacgacggcaccggcuccugcgggcccgucagcuccaacggcgcguacggggugaagggcuucagcuucaaguacgggaacggcguguggaucggccggaccaaguccaccaacagccgcuccggguucgagaugaucugggaccccaacggcuggaccgagaccgacagcagcuucuccgucaagcaggacaucguggccaucacggacuggagcggguacuccggcagcuucguccagcacccggagcugaccgggcucgacugcauccggcccugcuucuggguggagcugauccgcggccggcccaaggaguccaccaucuggaccagcggcuccagcaucuccuucugcggggugaacagcgacacggucggcugguccuggcccgacggggccgagcugccguucaccaucgacaaguga

SEQ ID NO: 79028 - RNA, 1350 nt, Artificial Sequence
  derived and/or modified CDS sequence (opt1) from neuraminidase__InfluenzaA__ABE97666
augaaccccaaccagaagaucaucaccaucggcagcaucugcauggugaccgggaucgucucccugaugcuccagaucggcaacaugaucagcaucugggugucccacagcauccacacggggaaccagcaccaguccgagccgaucagcaacaccaacuuccugaccgagaaggccguggccuccgucaagcuggcgggcaacagcccccucugccccaucaacgggugggccguguacuccaaggacaacagcauccgcaucggcuccaagggcgacguguucgucauccgggagcccuucaucagcugcucccaccuggagugccgcaccuucuuccugacgcagggggcccuccugaacgacaagcacagcaacggcaccgugaaggaccgguccccgcaccgcacccugaugagcugccccgugggggaggcccccucccccuacaacagccgguucgaguccgucgccuggagcgcgagcgccugccacgacggcaccuccuggcucacgaucgggaucagcggcccggacaacggcgccguggccgugcugaaguacaacgggaucaucaccgacaccaucaaguccuggcgcaacaacauccugcggacccaggagagcgagugcgcgugcgucaacggcuccugcuucacggugaugaccgacgggcccagcaacggccaggccucccacaagaucuucaagauggagaagggcaagguggucaagagcguggagcucgacgcccccaacuaccacuacgaggagugcuccugcuaccccgacgccggggagaucacgugcgugugccgcgacaacuggcacggcagcaaccggccgugggucuccuucaaccagaaccuggaguaccagaucggguacaucugcagcggcguguucggggacagcccccgccccaacgacggcaccggcuccugcgggcccguguccagcaacggcgccuacggggucaagggcuucuccuucaaguacgggaacggcguguggaucggccggaccaagagcaccaacucccgcagcggguucgagaugaucugggacccgaacggcuggaccgagaccgacagcuccuucagcgugaagcaggacaucgucgcgaucacggacugguccggguacagcggcuccuucgugcagcaccccgagcugaccgggcucgacugcauccggcccugcuucugggucgagcugauccgcggccggcccaaggagagcaccaucuggaccuccggcagcuccaucagcuucugcggggugaacuccgacacggugggcuggagcuggccggacggggccgagcugcccuucaccaucgacaaguga

SEQ ID NO: 79029 - RNA, 1350 nt, Artificial Sequence
  derived and/or modified CDS sequence (opt1) from neuraminidase__InfluenzaA__ABE97667
augaaccccaaccagaagaucaucaccaucggcagcaucugcauggugaccgggaucgucucccugaugcuccagaucggcaacaugaucagcaucugggggucccacagcauccacacgggcaaccagcaccaguccgagccgaucagcaacaccaacuuccugaccgagaaggccguggccuccgugaagcuggcggggaacagcucccucugccccaucaacggcugggccgucuacagcaaggacaacuccauccgcaucggcagcaagggggacguguucgugauccgggagcccuucaucuccugcagccaccuggagugccgcaccuucuuccugacgcagggcgcccuccugaacgacaagcacuccaacgggaccgucaaggaccggagcccccaccgcacccugauguccugcccggugggcgaggcccccagccccuacaacucccgguucgagagcguggccuggagcgcguccgccugccacgacgggaccagcuggcucacgaucggcaucuccggccccgacaacggggccgucgccguggugaaguacaacggcaucaucaccgacaccaucaagagcuggcgcaacaacauccugcggacccaggaguccgagugcgcgugcgucaacgggagcugcuucacggugaugaccgacggcccguccaacggccaggccagccacaagaucuucaagauggagaaggggaagguggucaaguccguggagcuggacgcccccaacuaccacuacgaggagugcagcugcuaccccgacgccggcaagaucacgugcgugugccgcgacaacuggcacggguccaaccggcccugggucagcuucaaccagaaccucgaguaccagaucggcuacaucugcuccgggguguucggcgacaacccgcgccccaacgacggcaccgggagcugcggccccguguccagcaacggggccuacggcgucaagggguucuccuucaaguacggcaacggcguguggaucgggcggaccaagagcaccaacucccgcagcggcuucgagaugaucugggaccccaacggguggaccgagaccgacagcuccuucagcgugaagcaggacaucgucgcgaucacggacugguccggcuacagcggguccuucgugcagcacccggagcugaccggccuggacugcauccggcccugcuucugggucgagcucauccgcggccggcccaaggagagcaccaucuggaccuccgggagcuccaucagcuucugcggcgugaacuccgacaucgugggguggagcuggcccgacggcgccgagcugccguucacgaucgacaaguga

SEQ ID NO: 79030 - RNA, 1350 nt, Artificial Sequence
  derived and/or modified CDS sequence (opt1) from neuraminidase__InfluenzaA__ABE97669
augaaccccaaccagaagaucaucaccaucggcagcaucugcauggugaccgggaucgucucccugaugcuccagaucggcaacaugaucagcaucugggugucccacagcauccacacggggaaccagcaccaguccgagccgaucagcaacaccaacuuccugaccgagaaggccguggccuccgucaagcuggcgggcaacagcucccucugccccaucaacgggugggccguguacagcaaggacaacuccauccgcaucggcagcaagggcgacguguucgucauccgggagcccuucaucuccugcagccaccuggagugccgcaccuucuuccugacgcagggggcccuccugaacgacaagcacuccaacggcaccgugaaggaccggagcccccaccgcacccugauguccugcccggugggggaggcccccagccccuacaacucccgguucgagagcgucgccuggagcgcguccgccugccacgacggcaccagcuggcucacgaucgggaucuccggccccgacaacggcgccguggccguggucaaguacaacgggaucaucaccgacaccaucaagagcuggcgcaacaacauccugcggacccaggaguccgagugcgcgugcgugaacggcagcugcuucacggugaugaccgacgggccguccaacggccaggccagccacaagaucuucaagauggagaagggcaaggucgugaaguccguggagcuggacgcccccaacuaccacuacgaggagugcagcugcuaccccgacgccggggagaucacgugcgucugccgcgacaacuggcacggcuccaaccggcccugggugagcuucaaccagaaccucgaguaccagaucggguacaucugcuccggcguguucggggacaacccgcgccccaacgacggcaccggcagcugcgggcccgucuccagcaacggcgccuacggggugaagggcuucuccuucaaguacgggaacggcguguggaucggccggaccaagagcaccaacucccgcagcggguucgagaugaucugggaccccaacggcuggaccgagaccgacagcuccuucagcgucaagcaggacaucguggcgaucacggacugguccggguacagcggcuccuucguccagcacccggagcugaccgggcuggacugcauccggcccugcuucuggguggagcucauccgcggccggcccaaggagagcaccaucuggaccuccggcagcuccaucagcuucugcggggugaacuccgacacggucggcuggagcuggcccgacggggccgagcugccguucaccaucgacaaguga

SEQ ID NO: 79031 - RNA, 1350 nt, Artificial Sequence
  derived and/or modified CDS sequence (opt1) from neuraminidase__InfluenzaA__ABE97670
augaaccccaaccagaagaucaucaccaucggcagcaucugcauggugaccgggaucgucucccugaugcuccagaucggcaacaugaucagcaucugggugucccacagcauccacacggggaaccagcaccaguccgagccgaucagcaacaccaacuuccugaccgagaaggccguggccuccgucaagcuggcgggcaacagcucccucugccccaucaacgggugggccguguacagcaaggacaacuccauccgcaucggcagcaagggcgacguguucgucauccgggagcccuucaucuccugcagccaccuggagugccgcaccuucuuccugacgcagggggcccuccugaacgacaagcacuccaacggcaccgugaaggaccggagcccccaccgcacccugauguccugcccggugggggaggcccccagccccuacaacucccgguucgagagcgucgccuggagcgcguccgccugccacgacggcaccagcuggcucacgaucgggaucuccggccccgacaacggcgccguggccguggucaaguacaacgggaucaucaccgacaccaucaagagcuggcgcaacaacauccugcggacccaggaguccgagugcgcgugcgugaacggcagcugcuucacggugaugaccgacgggccguccaacggccaggccagccacaagaucuucaagauggagaagggcaaggucgugaaguccguggagcuggacacccccaacuaccacuacgaggagugcagcugcuaccccgacgccggggagaucacgugcgucugccgcgacaacuggcacggcuccaaccggcccugggugagcuucaaccagaaccucgaguaccagaucggguacaucugcuccggcguguucggggacaacccgcgccccaacgacggcaccggcagcugcgggcccgucuccagcaacggcgccuacggggugaagggcuucuccuucaaguacgggaacggcguguggaucggccggaccaagagcaccaacucccgcagcggguucgagaugaucugggaccccaacggcuggaccgagacggacagcuccuucagcgucaagcaggacaucguggccaucaccgacugguccggguacagcggcuccuucguccagcacccggagcugaccgggcuggacugcauccggcccugcuucuggguggagcucauccgcggccggcccaaggagagcaccaucuggacguccggcagcuccaucagcuucugcggggugaacuccgacaccgucggcuggagcuggcccgacggggcggagcugccguucaccaucgacaaguga

SEQ ID NO: 79032 - RNA, 1350 nt, Artificial Sequence
  derived and/or modified CDS sequence (opt1) from neuraminidase__InfluenzaA__ABE97671
augaaccccaaccagaagaucaucaccaucggcagcaucugcauggugaccgggaucgucucccugaugcuccagaucggcaacaugaucagcaucugggugucccacagcauccacacggggaaccagcaccaggccgagccgaucuccaacaccaacuuccugaccgagaaggccguggcgagcgucaagcuggccggcaacuccagccucugccccaucaacgggugggccguguacuccaaggacaacagcauccgcaucggcuccaagggcgacguguucgucauccgggagcccuucaucagcugcucccaccuggagugccgcaccuucuuccugacgcagggggcccuccugaacgacaagcacagcaacggcaccgugaaggaccggagcccccaccgcacccugauguccugcccggugggggaggcccccucccccuacaacagccgguucgaguccgucgcguggagcgccagcgccugccacgacggcaccuccuggcucacgaucgggaucagcggccccgacaacggcgccguggcggugcugaaguacaacgggaucaucaccgacaccaucaaguccuggcgcaacaacauccugcggacccaggagagcgagugcgccugcgucaacggcuccugcuucacggugaugaccgacgggccgagcaacggccaggccucccacaagaucuucaagauggagaagggcaagguggucaagagcguggagcucgacgcccccaacuaccacuacgaggagugcuccugcuaccccgacgccggggagaucacgugcgugugccgcgacaacuggcacggcagcaaccggcccugggucuccuucaaccagaaccuggaguaccagaucggguacaucugcagcggcguguucggggacaacccgcgccccaacgacggcaccggcuccugcgggcccgugagcuccaacggcgcguacggggucaagggcuucagcuucaaguacgggaacggcguguggaucggccggaccaaguccaccaacagccgcuccggguucgagaugaucugggaccccaacggcuggaccgagaccgacagcagcuucuccgugaagcaggacaucgucgccaucacggacuggagcggguacuccggcagcuucgugcagcacccggagcugaccgggcucgacugcauccggcccugcuucugggucgagcugauccgcggccggcccaaggaguccaccaucuggaccagcggcuccagcaucuccuucugcggggugaacagcgacacggugggcugguccuggcccgacggggccgagcugccguucaccaucgacaaguga

SEQ ID NO: 79033 - RNA, 1350 nt, Artificial Sequence
  derived and/or modified CDS sequence (opt1) from neuraminidase__InfluenzaA__ABE97672
augaaccccaaccagaagaucaucaccaucggcagcaucugcauggugaccgggaucgucucccugaugcuccagaucggcaacaugaucagcaucugggugucccacagcauccacacggggaaccagcaccaggccgagccgaucuccaacaccaacuuccugaccgagaaggcccuggcgagcgugaagcucgccggcaacuccagccugugccccaucaacgggugggccgucuacuccaaggacaacagcauccgcaucggcuccaagggcgacguguucgugauccgggagcccuucaucagcugcucccaccuggagugccgcaccuucuuccucacgcagggggcccugcugaacgacaagcacagcaacggcaccgucaaggaccggagcccccaccgcacccucaugagcugcccggugggggaggcccccucccccuacaacagccgguucgaguccguggcguggagcgccagcgccugccacgacggcaccuccuggcugacgaucgggaucagcggccccgacaacggcgccgucgcggugcugaaguacaacgggaucaucaccgacaccaucaaguccuggcgcaacaacauccuccggacccaggagagcgagugcgccugcgugaacggcuccugcuucacggucaugaccgacgggccgagcaacggccaggccucccacaagaucuucaagauggagaagggcaagguggugaaguccgucgagcuggacgcccccaacuaccacuacgaggagugcuccugcuaccccgacgccggggagaucacgugcgugugccgcgacaacuggcacggcagcaaccggcccuggguguccuucaaccagaaccuggaguaccagaucggguacaucugcagcggcgucuucggggacaacccgcgccccaacgacggcaccggcuccugcgggcccgugagcuccaacggcgcguacggggugaagggcuucagcuucaaguacgggaacggcgucuggaucggccggaccaaguccaccaacagccgcuccggguucgagaugaucugggaccccaacggcuggaccgagaccgacagcagcuucuccgugaagcaggacaucguggccaucacggacuggagcggguacuccggcagcuucguccagcacccggagcucaccgggcuggacugcauccggcccugcuucuggguggagcugauccgcggccggcccaaggaguccaccaucuggaccagcggcuccagcaucuccuucugcggggucaacagcgacacggugggcugguccuggcccgacggggccgagcucccguucaccaucgacaaguga

SEQ ID NO: 79034 - RNA, 1350 nt, Artificial Sequence
  derived and/or modified CDS sequence (opt1) from neuraminidase__InfluenzaA__ABE97675
augaaccccaaccagaagaucaucaccaucggcagcaucugcauggugaccgggaucgucucccugaugcuccaggugggcaacaugaucagcaucugggugucccacagcauccacacggggaaccagcaccaggccgagccgaucuccaacaccaacuuccugaucgagaaggccgucgcgagcgugaagcuggccggcaacuccagccucugccccaucaacgggugggccguguacuccaaggacaacagcauccgcaucggcuccaagggcgacgucuucgugauccgggagcccuucaucagcugcucccaccuggagugccgcaccuucuuccugacccagggggcccuccugaacgacaagcacagcaacggcacggugaaggaccggagcccccaccgcacccugaugagcugcccggucggggaggcccccucccccuacaacagccgguucgaguccguggcguggagcgccagcgccugccacgacggcaccuccuggcucaccaucgggaucagcggccccgacaacggcgccguggcgguccugaaguacaacgggaucaucacggacaccaucaaguccuggcgcaacaacauccugcggacccaggagagcgagugcgccugcgugaacggcuccugcuucaccgugaugacggacgggccgagcaacggccaggccucccacaagaucuucaagaucgagaagggcaaggucgugaaguccguggagcucgacgcccccaacuaccacuacgaggagugcuccugcuaccccgacgccggggagaucacgugcgucugccgcgacaacuggcacggcagcaaccggcccuggguguccuucaaccagaaccuggaguaccagaucggguacaucugcagcggcguguucggggacaacccgcgccccaacgacggcaccggcuccugcgggcccgucagcuccaacggcgcguacggggugaagggcuucagcuucaaguacgggaacggcguguggaucggccggaccaaguccaccaacagccgcuccggguucgagaugaucugggaccccaacggcuggagcgagaccgacagcuccuucagcgucaagcaggacaucguggccaucaccgacugguccggguacagcggcuccuucguccagcacccggagcugaccgggcucgacugcauccggcccugcuucuggguggagcugauccgcggccggcccaaggagagcacgaucuggaccuccggcagcuccaucagcuucugcggggugaacuccgacaccgucggcuggagcuggcccgacggggccgagcugccguucaccaucgacaaguga

SEQ ID NO: 79035 - RNA, 1350 nt, Artificial Sequence
  derived and/or modified CDS sequence (opt1) from neuraminidase__InfluenzaA__ABE97676
augaaccccaaccagaagaucaucaccaucggcagcaucugcauggugaccgggaucgucucccugaugcuccagaucggcaacaugaucagcaucugggugucccacagcauccacacggggaaccagcaccaggccgagccgaucuccaacaccaacuuccugaccgagaaggccguggcgagcgucaagcuggccggcaacuccagccucugccccaucaacgggugggccguguacuccaaggacaacagcauccgcaucggcuccaagggcgacguguucgucauccgggagcccuucaucagcugcucccaccuggagugccgcaccuucuuccugacgcagggggcccuccugaacgacaagcacagcaacggcaccgugaaggaccggagcccccaccgcacccugauguccugcccggugggggaggcccccucccccuacaacagccgguucgaguccgucgcguggagcgccagcgccugccacgacggcaccuccuggcucacgaucgggaucagcggccccgacaacggcgccguggcggugcugaaguacaacgggaucaucaccgacaccaucaaguccuggcgcaacaacauccugcggacccaggagagcgagugcgccugcgucaacggcuccugcuucacggugaugaccgacgggccgagcaacggccaggccucccacaagaucuucaagauggagaagggcaagguggucaagagcguggagcucgacgcccccaacuaccacuacgaggagugcuccugcuaccccgacgccggggagaucacgugcgugugccgcgacaacuggcacggcagcaaccggcccugggucuccuucaaccagaaccuggaguaccagaucggguacaucugcagcggcguguucggggacaacccgcgccccaacgacggcaccggcuccugcgggcccgugagcuccaacggcgcguacggggucaagggcuucagcuucaaguacgggaacggcguguggaucggccggaccaaguccaccaacagccgcuccggguucgagaugaucugggaccccaacggcuggaccgagaccgacagcagcuucuccgugaagcaggacaucgucgccaucaacgacuggagcggguacuccggcagcuucgugcagcacccggagcugacggggcucgacugcauccggcccugcuucugggucgagcugauccgcggccggcccaaggaguccaccaucuggaccagcggcuccagcaucuccuucugcggggugaacagcgacaccgugggcugguccuggcccgacggggccgagcugccguucacgaucgacaaguga

SEQ ID NO: 79036 - RNA, 1350 nt, Artificial Sequence
  derived and/or modified CDS sequence (opt1) from neuraminidase__InfluenzaA__ABE97677
augaaccccaaccagaagaucaucaccaucggcagcaucugcauggugaccgggaucgucucccugaugcuccagaucggcaacaucaucagcaucugggugcgccacuccauccacacggggaaccagcaccagagcgagccgaucuccaacaccaacuuccugaccgagaaggccguggccagcgucaagcuggcgggcaacuccagccucugccccaucaacgggugggccguguacuccaaggacaacagcauccggaucggcuccaagggcgacguguucgucauccgcgagcccuucaucagcugcucccaccuggagugccggaccuucuuccugacgcagggggcccuccugaacgacaagcacagcaacggcaccgugaaggaccgcagcccccaccggacccugaugagcugcccggugggggaggcccccucccccuacaacagccgcuucgaguccgucgccuggagcgcgagcgccugccacgacggcaccuccuggcucacgaucgggaucagcggccccgacaacggcgccguggccguggucaaguacaacgggaucaucaccgacaccaucaaguccuggcggaacaacauccugcgcacccaggagagcgagugcgcgugcgugaacggcuccugcuucacggugaugaccgacgggccgagcaacggccaggccucccacaagaucuucaagauggagaagggcaaggucgugaaguccguggagcuggacgcccccaacuaccacuacgaggagugcuccugcuaccccgacgccggggagaucacgugcgucugccgggacaacuggcacggcagcaaccgccccuggguguccuucaaccagaaccucgaguaccagaucggguacaucugcagcggcguguucggggacaacccgcggcccaacgacggcaccggcuccugcgggcccgucagcuccaacggcgccuacggggugaagggcuucagcuucaaguacgggaacggcguguggaucggccgcaccaaguccaccaacagccgguccggguucgagaugaucugggaccccaacggcuggaccgagaccgacagcagcuucuccgucaagcaggacaucguggcgaucacggacuggagcggguacuccggcagcuucguccagcacccggagcugaccgggcuggacugcauccgccccugcuucuggguggagcucauccggggccgccccaaggaguccaccaucuggaccagcggcuccagcaucuccuucugcggggugaacagcgacacggucggcugguccuggcccgacggggccgagcugccguucaccaucgacaaguga

SEQ ID NO: 79037 - RNA, 1350 nt, Artificial Sequence
  derived and/or modified CDS sequence (opt1) from neuraminidase__InfluenzaA__ABE97679
augaaccccaaccagaagaucaucaccaucggcagcaucugcauggugaccgggaucgucucccugaugcuccagaucggcaacaugaucagcaucugggugcgccacuccauccacacggggaaccagcaccagagcgagccgaucuccaacaccaacuuccugaccgagaaggccguggccagcgucaagcuggcgggcaacuccagccucugccccaucaacgggugggccguguacuccaaggacaacagcauccggaucggcuccaagggcgacguguucgucauccgcgagcccuucaucagcugcucccaccuggagugccggaccuucuuccugacgcagggggcccuccugaacgacaagcacagcaacggcaccgugaaggaccgcagcccccaccggacccugaugagcugcccggugggggaggcccccucccccuacaacagccgcuucgaguccgucgccuggagcgcgagcgccugccacgacggcaccuccuggcucacgaucgggaucagcggccccgacaacggcgccguggccguggucaaguacaacgggaucaucaccgacaccaucaaguccuggcggaacaacauccugcgcacccaggagagcgagugcgcgugcgugaacggcuccugcuucacggugaugaccgacgggccgagcaacggccaggccucccacaagaucuucaagauggagaagggcaaggucgugaaguccguggagcuggacgcccccaacuaccacuacgaggagugcuccugcuaccccgacgccggggagaucacgugcgucugccgggacaacuggcacggcagcaaccgccccuggguguccuucaaccagaaccucgaguaccagaucggguacaucugcagcggcguguucggggacaacccgcggcccaacgacggcaccggcuccugcgggcccgucagcuccaacggcgccuacggggugaagggcuucagcuucaaguacgggaacggcguguggaucggccgcaccaaguccaccaacagccgguccggguucgagaugaucugggaccccaacggcuggaccgagaccgacagcagcuucuccgucaagcaggacaucguggcgaucacggacuggagcggguacuccggcagcuucguccagcacccggagcugaccgggcuggacugcauccgccccugcuucuggguggagcucauccggggccgccccaaggaguccaccaucuggaccagcggcuccagcaucuccuucugcggggugaacagcgacacggucggcugguccuggcccgacggggccgagcugccguucaccaucgacaaguga

SEQ ID NO: 79038 - RNA, 1350 nt, Artificial Sequence; identical to SEQ ID NO: 79030
  derived and/or modified CDS sequence (opt1) from neuraminidase__InfluenzaA__ABE97680

SEQ ID NO: 79039 - RNA, 1350 nt, Artificial Sequence; identical to SEQ ID NO: 79030
  derived and/or modified CDS sequence (opt1) from neuraminidase__InfluenzaA__ABE97681

SEQ ID NO: 79040 - RNA, 1350 nt, Artificial Sequence; identical to SEQ ID NO: 79030
  derived and/or modified CDS sequence (opt1) from neuraminidase__InfluenzaA__ABE97682

SEQ ID NO: 79041 - RNA, 1350 nt, Artificial Sequence
  derived and/or modified CDS sequence (opt1) from neuraminidase__InfluenzaA__ABE97684
augaaccccaaccagaagaucaucaccaucggcagcaucugcauggugaccgggaucgucucccugaugcuccagaucggcaacaugaucagcaucugggugucccacagcauccacacggggaaccagcaccaggccgagccgaucuccaacaccaacuuccugaccgagaaggccguggcgagcgucaagcuggccggcaacuccagccucugccccaucaacgggugggccguguacuccaaggacaacagcauccgcaucggcuccaagggcgacguguucgucauccgggagcccuucaucagcugcucccaccuggagugccgcaccuucuuccugacgcagggggcccuccugaacgacaagcacagcaacggcaccgugaaggaccggagcccccaccgcacccugauguccugcccggugggggaggcccccucccccuacaacagccgguucgaguccgucgcguggagcgccagcgccugccacgacggcaccuccuggcucacgaucgggaucagcggccccgacaacggcgccguggcggugcugaaguacaacgggaucaucaccgacaccaucaaguccuggcgcaacaacauccugcggacccaggagagcgagugcgccugcgucaacggcuccugcuucacggugaugaccgacgggccgagcaacggccaggccucccacaagaucuucaagauggagaagggcaagguggucaagagcguggagcucgacgcccccaacuaccacuacgaggagugcuccugcuaccccgacgccggggagaucacgugcgugugccgcgacaacuggcacggcagcaaccggcccugggucuccuucaaccagaaccuggaguaccagaucggguacaucugcagcggcguguucggggacaacccgcgccccaacgacggcaccggcuccugcgggcccgugagcuccaacggcgcguacggggucaagggcuucagcuucaaguacgggaacggcguguggaucggccggaccaaguccaccaacagccgcuccggguucgagaugaucugggaccccaacggcuggaccgagaccgacagcagcuucuccgugaagcaggacaucgucgccaucacggacuggagcggguacuccggcagcuucgugcagcacccggagcugaccgggcucgacugcauccggcccugcuucugggucgagcugauccgcggccggcccaaggaguccaccaucuggaccagcggcuccagcaucuccuucugcggggugaacagcggcacgguggggugguccuggcccgacggcgccgagcugccguucaccaucgacaaguga

SEQ ID NO: 79042 - RNA, 1350 nt, Artificial Sequence
  derived and/or modified CDS sequence (opt1) from neuraminidase__InfluenzaA__ABE97685
augaaccccaaccagaagaucaucaccaucggcagcaucugcauggugaccgggaucgucucccugaugcuccagaucggcaacaugaucagcaucugggugucccacagcauccacacggggaaccagcaccaggccgagccgaucuccaacaccaacuuccugaccgagaaggccguggcgagcgucaagcuggccggcaacuccagccucugccccaucaacgggugggccguguacuccaaggacaacagcauccgcaucggcuccaagggcgacguguucgucauccgggagcccuucaucagcugcucccaccuggagugccgcaccuucuuccugacgcagggggcccuccugaacgacaagcacagcaacggcaccgugaaggaccggagcccccaccgcacccugauguccugcccggugggggaggcccccucccccuacaacagccgguucgaguccgucgcguggagcgccagcgccugccacgacggcaccuccuggcucacgaucgggaucagcggccccgacaacggcgccguggcggugcugaaguacaacgggaucaucaccgacaccaucaaguccuggcgcaacaacauccugcggacccaggagagcgagugcgccugcgucaacggcuccugcuucacggugaugaccgacgggccgagcaacggccaggccucccacaagaucuucaagauggagaagggcaagguggucaagagcguggagcucgacgcccccaacuaccacuacgaggagugcuccugcuaccccgacgccggggagaucacgugcgugugccgcgacaacuggcacggcagcaaccggcccugggucuccuucaaccagaaccuggaguaccagaucggguacaucugcagcggcguguucggggacaacccgcgccccaacgacggcaccggcuccugcgggcccgugagcuccaacggcgcguacggggucaagggcuucagcuucaaguacgggaacggcguguggaucggccggaccaaguccaccaacagccgcuccggguucgagaugaucugggaccccaacggcuggaccgagaccgacagcagcuucuccgugaagcaggacaucgucgccaucacggacuggagcggguacuccggcagcuucgugcagcacccggagcugaccgggcucgacugcauccggcccugcuucugggucgagcugauccgcggccggcccaaggaguccaccaucuggaccagcggcuccagcaucuccuucugcggggugaacagcgacacgggcgggugguccuggcccgacggcgccgagcugccguucaccaucgacaaguga

SEQ ID NO: 79043 - RNA, 1350 nt, Artificial Sequence; identical to SEQ ID NO: 79032
  derived and/or modified CDS sequence (opt1) from neuraminidase__InfluenzaA__ABE97686

SEQ ID NO: 79044 - RNA, 1350 nt, Artificial Sequence
  derived and/or modified CDS sequence (opt1) from neuraminidase__InfluenzaA__ABE97687
augaaccccaaccagaagaucaucaccaucggcagcaucugcauggugaccgggaucgucucccugaugcuccaggugggcaacaugaucagcaucugggugucccacagcauccacacggggaaccagcaccaggccgagccgaucuccaacaccaacuuccugaccgagaaggccgucgcgagcgugaagcuggccggcaacuccagccucugccccaucaacgggugggccguguacuccaaggacaacagcauccgcaucggcuccaagggcgacgucuucgugauccgggagcccuucaucagcugcucccaccuggagugccgcaccuucuuccugacgcagggggcccuccugaacgacaagcacagcaacggcaccgugaaggaccggagcccccaccgcacccugaugagcugcccggucggggaggcccccucccccuacaacagccgguucgaguccguggcguggagcgccagcgccugccacgacggcaccuccuggcucacgaucgggaucagcggccccgacaacggcgccguggcgguccugaaguacaacgggaucaucaccgacaccaucaaguccuggcgcaacaacauccugcggacccaggagagcgagugcgccugcgugaacggcuccugcuucacggugaugaccgacgggccgagcaacggccaggccucccacaagaucuucaagauggagaagggcaaggucgugaaguccguggagcucgacgcccccaacuaccacuacgaggagugcuccugcuaccccgacgccggggagaucacgugcgucugccgcgacaacuggcacggcagcaaccggcccuggguguccuucaaccagaaccuggaguaccagaucggguacaucugcagcggcguguucggggacaacccgcgccccaacgacggcaccggcuccugcgggcccgucagcuccaacggcgcguacggggugaagggcuucagcuucaaguacgggaacggcguguggaucggccggaccaaguccaccaacagccgcuccggguucgagaugaucugggaccccaacggcuggaccgagaccgacagcagcuucuccgucaagcaggacaucguggccaucacggacuggagcggguacuccggcagcuucguccagcacccggagcugaccgggcucgacugcauccggcccugcuucuggguggagcugauccgcggccggcccaaggaguccaccaucuggaccagcggcuccagcaucuccuucugcggggugaacagcgacacggucggcugguccuggcccgacggggccgagcugccguucaccaucgacaaguga

SEQ ID NO: 79045 - RNA, 1350 nt, Artificial Sequence
  derived and/or modified CDS sequence (opt1) from neuraminidase__InfluenzaA__ABE97688
augaaccccaaccagaagaucaucaccaucggcagcaucugcauggugaccgggaucgucucccugaugcuccaggugggcaacaugaucagcaucugggugucccacagcauccacacggggaaccagcaccaggccgagccgaucuccaacaccaacuuccugaccgagaaggccgucgcgagcgugaagcuggccggcaacuccagccucugccccaucaacgggugggccguguacuccaaggacaacagcauccgcaucggcuccaagggcgacgucuucgugauccgggagcccuucaucagcugcucccaccuggagugccgcaccuucuuccugacgcagggggcccuccugaacgacaagcacagcaacggcaccgugaaggaccggagcccccaccgcacccugauguccugcccggucggggaggcccccucccccuacaacagccgguucgaguccguggcguggagcgccagcgccugccacgacggcaccuccuggcucacgaucgggaucagcggccccgacaacggcgccguggcgguccugaaguacaacgggaucaucaccgacaccaucaaguccuggcgcaacaacauccugcggacccaggagagcgagugcgccugcgugaacggcuccugcuucacggugaugaccgacgggccgagcaacggccaggccucccacaagaucuucaagauggagaagggcaaggucaucaagagcguggagcucgacgcccccaacuaccacuacgaggagugcuccugcuaccccgacgccggggagaucacgugcgugugccgcgacaacuggcacggcagcaaccggcccugggucuccuucaaccagaaccuggaguaccagaucggguacaucugcagcggcguguucggggacaacccgcgccccaacgacggcaccggcuccugcgggcccgugagcuccaacggcgcguacggggucaagggcuucagcuucaaguacgggaacggcgugugggugggccggaccaaguccaccaacagccgcuccggguucgagaugaucugggaccccaacggcuggaccgagaccgacagcagcuucuccgucaagcaggacaucguggccaucacggacuggagcggguacuccggcagcuucguccagcacccggagcugaccgggcucgacugcauccggcccugcuucuggguggagcugauccgcggccggcccaaggaguccaccaucuggaccagcggcuccagcaucuccuucugcggggugaacagcgacacggucggcugguccuggcccgacggggccgagcugccguucaucaucgacaaguga

SEQ ID NO: 79046 - RNA, 1350 nt, Artificial Sequence
  derived and/or modified CDS sequence (opt1) from neuraminidase__InfluenzaA__ABE97690
augaaccccaaccagaagaucaucaccaucggcagcaucugcauggugaccgggaucgucucccugaugcuccaggugggcaacaugaucagcaucugggugucccacagcauccacacggggaaccagcaccaggccgagccgaucuccaacaccaacuuccugaccgagaaggccgucgcgagcgugaagcuggccggcaacuccagccucugccccaucaacgggugggccguguacuccaaggacaacagcauccgcaucggcuccaagggcgacgucuucgugauccgggagcccuucaucagcugcucccaccuggagugccgcaccuucuuccugacgcagggggcccuccugaacgacaagcacagcaacggcaccgugaaggaccggagcccccaccgcucccugauguccugcccggucggggaggcccccagccccuacaacucccgguucgagagcguggcguggagcgccuccgccugccacgacggcaccagcuggcucaccaucgggaucuccggccccgacaacggcgccguggcgguccugaaguacaacgggaucaucacggacaccaucaagagcuggcgcaacaacauccugcggacccaggaguccgagugcgccugcgugaacggcagcugcuucaccgugaugacggacgggccguccaacggccaggccagccacaagaucuucaagaugaagaagggcaaggucgugaaguccguggagcucgacgcccccaacuaccacuacgaggagugcagcugcuaccccgacgccggggagaucacgugcgucugccgcgacaacuggcacggcuccaaccggcccugggugagcuucaaccagaaccuggaguaccagaucggguacaucugcuccggcguguucggggacaacccgcgccccaacgacggcaccggcagcugcgggcccgucuccagcaacggcgcguacggggugaagggcuucuccuucaaguacgggaacggcguguggaucggccggaccaagagcaccaacucccgcagcggguucgagaugaucugggaccccaacggcuggaccgagaccgacagcuccuucagcgucaagcaggacaucguggccaucaccgacugguccggguacagcggcuccuucguccagcacccggagcugacggggcucgacugcauccggcccugcuucuggguggagcugauccgcggccggcccaaggagagcaccaucuggaccuccggcagcuccaucagcuucugcggggugaacuccgacaccgucggcuggagcuggcccgacggggccgagcugccguucacgaucgacaaguga

SEQ ID NO: 79047 - RNA, 1350 nt, Artificial Sequence
  derived and/or modified CDS sequence (opt1) from neuraminidase__InfluenzaA__ABE97691
augaaccccaaccagaagaucaucaccaucggcagcaucugcauggugaccgggaucgucucccugaugcuccaggugggcaacaugaucagcaucugggugucccacagcauccacacggggaaccagcaccaggccgagccgaucuccaacaccaacuuccugaccgagaaggccgucgcgagcgugaagcuggccggcaacuccagccucugccccaucaacgggugggccguguacuccaaggacaacagcauccgcaucggcuccaagggcgacgucuucgugaagcgggagcccugcaucagcugcucccaccugaagugccgcaccuucuuccugacgcagggggcccuccugaacgacaagcacagcaacggcaccgugaaggaccggagcccccaccgcacccugaugagcugcccggucggggaggcccccucccccuacaacagccgguucgaguccguggcguggagcgccagcgccugccacgacggcaccuccuggcucacgaucgggaucagcggccccgacaacggcgccguggcgguccugaaguacaacgggaucaucaccgacaccaucaaguccuggcgcaacaacauccugcggacccaggagagcgagugcgccugcgugaacggcuccugcuucacggugaugaccgacgggccgagcaacggccaggccucccacaagaucuucaagauggagaagggcaaggucgugaaguccguggagcucgacgcccccaacuaccacuacgaggagugcuccugcuaccccgacgccggggagaucacgugcgucugccgcgacaacuggcacggcagcaaccggcccuggguguccuucaaccagaaccuggaguaccagaucggguacaucugcagcggcguguucggggacaacccgcgccccaacgacggcaccggcuccugcgggcccgucagcuccaacggcgcguacggggugaagggcuucagcuucaaguacgggaacggcguguggaucggccggaccaaguccaccaacagccgcuccggguucgagaugaucugggaccccaacggcuggaccgagaccgacagcagcuucuccgucaagcaggacaucguggccaucacggacuggagcggguacuccggcagcuucguccagcacccggagcugaccgggcucgacugcauccggcccugcuucuggguggagcugauccgcggccggcccaaggaguccaccaucuggaccagcggcuccagcaucuccuucugcggggugaacagcgacacggucggcugguccuggcccgacggggccgagcugccguucaccaucgacaaguga

SEQ ID NO: 79048 - RNA, 1350 nt, Artificial Sequence
  derived and/or modified CDS sequence (opt1) from neuraminidase__InfluenzaA__ABE97694
augaaccccaaccagaagaucaugaccaucggcagcaucugcauggugaccgggaucgucucccugaugcuccaggugggcaacaugaucagcaucugggugucccacagcauccacacggggaaccagcaccaggccgagccgaucuccaacaccaacuuccugaccgagaaggccgucgacagcgugaagcuggcgggcaacuccagccucugccccaucaacgggugggccguguacuccaaggacaacagcauccgcaucggcuccaagggcgacgucuucgugauccgggagcccagcguguccugcagccaccuggagugccgcaccuucuuccugacgcagggggcccuccugaacgacaagcacuccaacggcaccgucaaggaccggagcccccaccgcacccugauguccugcccggugggggaggcccccagccccuacaacucccgguucgagagcguggccuggagcgcguccgccugccacgacggcaccagcuggcucacgaucgggaucuccggccccgacaacggcgccgucgccgugcugaaguacaacgggaucaucaccgacaccaucaagagcuggcgcaacaacauccugcggacccaggaguccgagugcgcgugcgugaacggcagcugcuucacggucaugaccgacgggccguccaacggccaggccagccacaagaucuucaagauggagaagggcaagguggugaaguccgucgagcucgacgcccccaacuaccacuacgaggagugcagcugcuaccccgacgccggggagaucacgugcgugugccgcgacaacuggcacggcuccaaccggcccugggugagcuucaaccagaaccuggaguaccagaucggguacaucugcuccggcgucuucggggacaacccgcgccccaacgacggcaccggcagcugcgggcccguguccagcaacggcgccuacggggugaagggcuucuccuucaaguacgggaacggcgucuggaucggccggaccaagagcaccaacucccgcagcggguucgagaugaucugggaccccaacggcuggaccgagaccgacagcuccuucagcgugaagcaggacgucguggcgaucacggacugguccggguacagcggcuccuucgugcagcacccggagcugaccgggcucgacugcauccggcccugcuucugggucgagcugauccgcggccggcccaaggagagcaccaucuggaccuccggcagcuccaucagcuucugcggggugaacuccgacacggugggcuggagcuggcccgacggggccgagcugccguucaccaucgacaaguga

SEQ ID NO: 79049 - RNA, 1350 nt, Artificial Sequence
  derived and/or modified CDS sequence (opt1) from neuraminidase__InfluenzaA__ABE97696
augaaccccaaccagaagaucaucaccaucggcagcaucugcauggugaccgggaucgucucccugaugcuccaggugggcaacaugaucagcaucugggugucccacagcauccacacggggaaccagcaccaggccgagccgaucuccaacaccaacuuccugaccgagaaggccgucgcgagcgugaagcuggccggcaacuccagccucugccccaucaacgggugggccguguacuccaaggacaacagcauccgcaucggcuccaagggcgacgucuucgugauccgggagcccuucaucagcugcucccaccuggagugccgcaccuucuuccugacgcagggggcccuccugaacgacaagcacagcaacggcuccgugaaggaccggagcccccaccgcacccugauguccugcagcgucggggaggccccgucccccuacaacagccgguucgagagcguggcgugguccgccagcgccugccacgacggcaccuccuggcucaccaucgggaucagcggccccgacaacggcgccguggcgguccugaaguacaacgggaucaucacggacaccaucaaguccuggcgcaacaacauccugcggacccaggagagcgagugcgccugcgugaacggcuccugcuucaccgugaugacggacgggcccagcaacggccaggccucccacaagaucuucaagauggagaagggcaaggucgucaagagcguggagcucgacgccccgaacuaccacuacgaggagugcuccugcuaccccgacgccggggagaucacgugcgugugccgcgacaacuggcacggcagcaaccggcccuggguguccuucaaccagaaccuggaguaccagaucggguacaucugcagcggcguguucggggacaacccccgcccgaacgacggcaccggcuccugcgggcccgucagcuccaacggcgcguacggggugaagggcuucagcuucaaguacgggaacggcguguggaucggccggaccaaguccaccaacagccgcagcggguucgagaugaucugggaccccaacggcuggaccgagaccgacuccagcuucuccgucaagcaggacaucguggccaucaccgacuggagcggguacuccggcagcuucguccagcaccccgagcugacggggcucgacugcauccggccgugcuucuggguggagcugauccgcggccggcccaaggaguccaccaucuggaccagcggcuccagcaucuccuucugcggggugaacagcgacaccgucggcugguccuggcccgacggggccgagcugcccuucacgaucgacaaguga

SEQ ID NO: 79050 - RNA, 1350 nt, Artificial Sequence
  derived and/or modified CDS sequence (opt1) from neuraminidase__InfluenzaA__ABE97697
augaaccccaaccagaagaucaucaccaucggcagcaucugcauggugaccgggaucgucucccugaugcuccaggugggcaacaugaucagcaucugggugucccacagcauccacacggggaaccagcaccaggccgagccgaucuccaacaccaacuuccugaacgagaaggccgucgcgagcgugaagcuggccggcaacuccagccucugccccaucaacgggugggccguguacuccaaggacaacagcauccgcaucggcuccaagggcgacgucuucgugauccgggagcccuucaucagcugcucccaccuggagugccgcaccuucuuccugacccagggggcccuccugaacgacaagcacagcaacggcacggugaaggaccggagcccccaccgcacccugaugagcugcccggucggggaggcccccucccccuacaacagccgguucgaguccguggcguggagcgccagcgccugccacgacggcaccuccuggcucaccaucgggaucagcggccccgacaacggcgccguggcgguccugaaguacaacgggaucaucacggacaccaucaaguccuggcgcaacaacauccugcggacccaggagagcgagugcgccugcgugaacggcuccugcuucaccgugaugacggacgggccgagcaacggccaggccucccacaagaucuucaagauggagaagggcaaggucgugaaguccguggagcucgacgcccccaacuaccacuacgaggagugcuccugcuaccccgacgccggggagaucacgugcgucugccgcgacaacuggcacggcagcaaccggcccuggguguccuucaaccagaaccuggaguaccagaucggguacaucugcagcggcguguucggggacaacccgcgccccaacgacgagaccggcuccugcggccccgucagcuccaacggggcguacggcgugaagggguucagcuucaaguacggcaacgggguguggaucggccggaccaaguccaccaacagccgcuccggcuucgagaugaucugggaccccaacggguggaccgagaccgacagcagcuucuccgucaagcaggacaucguggccaucaccgacuggagcggcuacuccgggagcuucguccagcacccggagcugacgggccucgacugcauccggcccugcuucuggguggagcugauccgcgggcggcccaaggaguccaccaucuggaccagcggcuccagcaucuccuucugcggcgugaacagcgacaccgucgggugguccuggcccgacggcgccgagcugccguucacgaucgacaaguga

SEQ ID NO: 79051 - RNA, 1350 nt, Artificial Sequence
  derived and/or modified CDS sequence (opt1) from neuraminidase__InfluenzaA__ABE97702
augaaccccaaccagaagaucaucaccaucggcagcaucugcauggugaccgggaucgucucccugaugcuccaggugggcaacaugaucagcaucugggugucccacagcauccacacggggaaccagcaccaggccgagccgaucuccaacaccaacuuccugaccgagaaggccgucgcgagcgugaagcuggccggcaacuccagccucugccccaucaacgggugggccguguacuccaaggacaacagcauccgcaucggcuccaagggcgacgucuucgugauccgggagcccuucaucagcugcucccaccuggagugccgcaccuucuuccugacgcagggggcccuccugaacgacaagcacagcaacggcaccgugaaggaccggagcccccaccgcacccugaugagcugcccggucggggaggcccccucccccuacaacagccgguucgaguccguggcguggagcgccagcgccugccacgacggcaccuccuggcucacgaucgggaucagcggccccgacaacggcgccguggcgguccugaaguacaacgggaucaucaccgacaccaucaaguccuggcgcaacaacauccugcggacccaggagagcgagugcgccugcgugaacggcuccugcuucacggugaugaccgacgggccgagcaacggccaggccucccacaagaucuucaagauggagaagggcaaggucgugaaguccguggagcucgacgcccccuacuaccacuacgaggagugcuccugcuaccccgacgccggggagaucacgugcgucugccgcgacaacuggcacggcagcaaccggcccuggguguccuucaaccagaaccuggaguaccagaucggguacaucugcagcggcguguucggggacaacccgcgccccaacgacggcaccggcuccugcgggcccgucagcuccaacggcgcguacggggugaagggcuucagcuucaaguacgggaacggcguguggaucggccggaccaaguccaccaacagccgcuccggguucgagaugaucugggaccccaacggcuggaccgagaccgacagcagcuucuccgucaagcaggacaucgugagcaucacggacugguccggguacagcggcuccuucguccagcacccggagcugaccgggcucgacugcauccggcccugcuucuggguggagcugauccgcggccggcccaaggagagcaccaucuggaccuccggcagcuccaucagcuucugcggggugaacuccgacacggucggcuggagcuggcccgacggggccgagcugccguucaccaccgacaaguga

SEQ ID NO: 79052 - RNA, 1350 nt, Artificial Sequence; identical to SEQ ID NO: 79044
  derived and/or modified CDS sequence (opt1) from neuraminidase__InfluenzaA__ABE97703

SEQ ID NO: 79053 - RNA, 1350 nt, Artificial Sequence; identical to SEQ ID NO: 79044
  derived and/or modified CDS sequence (opt1) from neuraminidase__InfluenzaA__ABE97705

SEQ ID NO: 79054 - RNA, 1350 nt, Artificial Sequence
  derived and/or modified CDS sequence (opt1) from neuraminidase__InfluenzaA__ABE97706
augaaccccaaccagaagaucaucaccaucggcagcaucugcauggugaccgggaucgucucccugaugcuccaggugggcaacaugaucagccugugggugucccacagcauccacacggggaaccagcaccaggccgagccgaucuccaacaccaacuuccugaccgagcgcgccgucgcgagcgugaagcucgccggcaacuccagccugugccccaucaacgggugggccguguacuccaaggacaacagcauccggaucggcuccaagggcgacgucuucgugauccgcgagcccuucaucagcugcucccaccuggagugccggaccuucuuccucacgcagggggcccugcugaacgacaagcacagcaacggcaccgugaaggaccgcagcccccaccggacccucaugagcugcccggucggggaggcccccucccccuacaacagccgcuucgaguccguggcguggagcgccagcgccugccacgacggcaccuccuggcugacgaucgggaucagcggccccgacaacggcgccguggcgguccugaaguacaacgggaucaucaccgacaccaucaaguccuggcggaacaacauccuccgcacccaggagagcgagugcgccugcgugaacggcuccugcuucacggugaugaccgacgggccgagcaacggccaggccucccacaagaucuucaagauggagaagggcaaggucgugaaguccguggagcuggacgcccccaacuaccacuacgaggagugcuccugcuaccccgacgccggggagaucacgugcgucugccgggacaacuggcacggcagcaaccgccccuggguguccuucaaccagaaccuggaguaccagaucggguacaucugcagcggcguguucggggacaacccgcggcccaacgacggcaccggcuccugcgggcccgucagcuccaacggcgcguacggggugaagggcuucagcuucaaguacgggaacggcguguggaucggccgcaccaaguccaccagcucccggagcggguucgagaugaucugggaccccaacggcuggaccgagaccgacagcuccuucagcgucaagcaggacaucguggccaucacggacugguccggguacagcggcuccuucguccagcacccggagcucaccgggcuggacugcauccgccccugcuucuggguggagcugauccggggccgccccaaggagagcaccaucugggccuccggcagcuccaucagcuucugcggggugaacuccgacaccgucggcuggagcuggcccgacggggccgagcucccguucacgaucgacaaguga

SEQ ID NO: 79055 - RNA, 1350 nt, Artificial Sequence
  derived and/or modified CDS sequence (opt1) from neuraminidase__InfluenzaA__ABE97707
augaaccccaaccagaagaucaucaccaucggcagcaucugcauggugaccgggaucgucucccugaugcuccaggugggcaacaugaucagcaucugggugucccacagcauccacacggggaaccagcaccaggccgagccgaucuccaacaccaacuuccugaccgagaaggccgucgcgagcgugaagcuggccggcaacuccagccucugccccaucaaggggugggccguguacuccaaggacaacagcauccgcaucggcuccaagggcgacgucuucgugauccgggagcccuucaucagcugcucccaccuggagugccgcaccuucuuccugacgcagggggcccuccugaacgacaagcacagcaacggcaccgugaaggaccggagcccccaccgcacccugaugagcugcccggucggggaggcccccucccccuacaacagccgguucgaguccguggcguggagcgccagcgccugccacgacggcaccuccuggcucacgaucgggaucagcggccccgacaacggcgccguggcgguccugaaguacaacgggaucaucaccgacaccaucaaguccuggcgcaacaacauccugcggacccaggagagcgagugcgccugcgugaacggcuccugcuucacggugaugaccgacgggccgagcaacggccaggccucccacaagaucuucaagauggagaagggcaaggucgugaaguccguggagcucgacgcccccaacuaccacuacgaggagugcuccugcuaccccgacgccggggagaucacgugcgucugccgcgacaacuggcacggcagcaaccggcccuggguguccuucaaccagaaccuggaguaccagaucggguacaucugcagcggcguguucggggacaacccgcgccccaacgacggcaccggcuccugcgggcccgucagcuccaacggcgcguacggggugaagggcuucagcuucaaguacgggaacggcguguggaucggccggaccaaguccaccaacagccgcuccggguucgagaugaucugggaccccaacggcuggaccgagaccgacagcagcuucuccgucaagcaggacaucguggccaucacggacuggagcggguacuccggcagcuucguccagcacccggagcugaccgggcucgacugcauccggcccugcuucuggguggagcugauccgcggccggcccaaggaguccaccaucuggaccagcggcuccagcaucuccuucugcggggugaacagcgacacggucggcugguccuggcccgacggggccgagcugccguucaccaucgacaaguga

SEQ ID NO: 79056 - RNA, 1350 nt, Artificial Sequence
  derived and/or modified CDS sequence (opt1) from neuraminidase__InfluenzaA__ABE97708
augaaccccaaccagaagaucaucaccaucggcagcaucugcauggugaccgggaucgucucccugaugcuccaggugggcaacaugaucagcaucugggugucccacagcauccacacggggaaccagcaccaggccgagccgaucuccaacaccaacuuccugaccgagaaggccgucgcgagcgugaagcuggccggcaacuccagccucugccccaucaacgggugggccguguacuccaaggacaacagcauccgcaucggcuccaagggcgacgucuucgugauccgggagcccuucaucagcugcucccaccuggagugccgcaccuucuuccugacgcacggggcccuccugaacgacaagcacagcaacggcaccgugaaggaccggagcccccaccgcacccugaugagcugcccggucggggaggcccccucccccuacaacagccgguucgaguccguggcguggagcgccagcgccugccacgacggcaccuccuggcucacgaucgggaucagcggccccgacaacggcgccguggcgguccugaaguacaacgggaucaucaccgacaccaucaaguccuggcgcaacaacauccugcggacccaggagagcgagugcgccugcgugaacggcuccugcuucacggugaugaccgacgggccgagcaacggccaggccucccacaagaucuucaagaugaagaagggcaaggucgugaaguccguggagcucgacgcccccaacuaccacuacgaggagugcuccugcuaccccgacgccggggagaucacgugcgucugccgcgacaacuggcacggcagcaaccggcccuggguguccuucaaccagaaccuggaguaccagaucggguacaucugcagcggcguguucggggacaacccgcgccccaacgacggcaccggcuccugcgggcccgucagcuccaacggcgcguacggggugaagggcuucagcuucaaguacgggaacggcguguggaucggccggaccaaguccaccaacagccgcuccggguucgagaugaucugggaccccaacggcuggaccgagaccgacagcagcuucuccgucaagcaggacaucguggccaucacggacuggagcggguacuccggcagcuucguccagcacccggagcugaccgggcucgacugcauccggcccugcuucuggguggagcugauccgcggccggcccaaggaguccaccaucuggaccagcggcuccagcaucuccuucugcggggugaacagcgacacggucggcugguccuggcccgacggggccgagcugccguucaccaucgacaaguga

SEQ ID NO: 79057 - RNA, 1350 nt, Artificial Sequence
  derived and/or modified CDS sequence (opt1) from neuraminidase__InfluenzaA__ABE97710
augaaccccaaccagaagaucaucaccaucggcagcaucugcauggugaccgggaucgucucccugaugcuccaggugggcaacaugaucagcaucugggugucccacagcauccacacggggaaccagcaccaggccgagccgaucuccaacaccaacuuccugaccgagaaggccgucgcgagcgugaagcuggccggcaacuccagccucugccccaucaacgggugggccguguacuccaaggacaacagcauccgcaucggcuccaagggcgacgucuucgugauccgggagcccuucaucagcugcucccaccuggagugccgcaccuucuuccugacgcagggggcccuccugaacgacaagcacagcaacggcaccgugaaggaccggagcccccaccgcacccugaugagcugcccggucggggaggcccccucccccuacaacagccgguucgaguccguggcguggagcgccagcgccugccacgacggcaccuccuggcucacgaucgggaucagcggccccgacaacggcgccguggcgguccugaaguacaacgggaucaucaccgacaccaucaaguccuggcgcaacaacauccugcggacccaggagagcgagugcgccugcgugaacggcuccugcuucacggugaugaccgacgggccgagcaacggccaggccucccacaagaucuucaagauggagaagggcaaggucgugaaguccguggagcucaacgcccccaacuaccacuacgaggagugcuccugcuaccccgacgccggggagaucacgugcgucugccgcgacaacuggcacggcagcaaccggcccuggguguccuucaaccagaaccuggaguaccagaucggguacaucugcagcggcguguucggggacaacccgcgccccaacgacggcaccggcuccugcgggcccgucagcuccaacggcgcguacggggugaagggcuucagcuucaaguacgggaacggcguguggaucggccggaccaaguccaccaacagccgcuccggguucgagaugaucugggaccccaacggcuggaccgagaccgacagcagcuucucccugaagcaggacaucgucgccaucacggacuggagcggguacuccggcagcuucgugcagcacccggagcucaccgggcuggacugcauccggcccugcuucugggucgagcugauccgcggccggcccaaggaguccaccaucuggaccagcggcuccagcaucuccuucugcggggugaacagcgacacggugggcugguccuggcccgacggggccgagcucccguucaccaucgacaaguga

SEQ ID NO: 79058 - RNA, 1350 nt, Artificial Sequence
  derived and/or modified CDS sequence (opt1) from neuraminidase__InfluenzaA__ABE97711
augaaccccaaccagaagaucaucaccaucggcagcaucugcauggugaccgggaucgucucccugaugcuccaggugggcaacaugaucagcaucugggugucccacagcauccacacggggaaccagcaccaggccgagccgaucuccaacaccaacuuccugaccgagaaggccgucgcgagcgugaagcuggccggcaacuccagccucugccccaucaacgggugggccguguacuccaaggacaacagcauccgcaucggcuccaagggcgacgucuucgugauccgggagcccuucaucagcugcucccaccuggagugccgcaccuucuuccugacgcagggggcccuccugaacgacaagcacagcaacggcaccgugaaggaccggagcccccaccgcacccugaugagcugcccggucggggaggcccccucccccuacaacagccgguucgaguccguggcguggagcgccagcgccugccacgacggcaccuccuggcucacgaucgggaucagcggccccgacaacggcgccguggcgguccugaaguacaacgggaucaucaccgacaccaucaaguccuggcgcaacaacauccugcggacccaggagagcgagugcgccugcgugaacggcuccugcuucacggugaugaccgacgggccgagcgacggccaggccucccacaagaucuucaagauggagaagggcaaggucgugaaguccguggagcucgacgcccccaacuaccacuacgaggagugcuccugcuaccccgacgccggggagaucacgugcgucugccgcgacaacuggcacggcagcaaccggcccuggguguccuucaaccagaaccuggaguaccagaucggguacaucugcagcggcguguucggggacaacccgcgccccaacgacggcaccggcuccugcgggcccgucagcuccaacggcgcguacggggugaagggcuucagcuucaaguacgggaacggcguguggaucggccggaccaaguccaccaacagccgcuccggguucgagauggucugggaccccaacggcuggaccgagaccgacagcagcuucuccgugaagcaggacaucgucgccaucacggacuggagcggguacuccggcagcuucgugcagcacccggagcugaccgggcucgacugcauccggcccugcuucuggguggagcugauccgcggccggcccaaggaguccaccaucuggaccagcggcuccagcaucuccuucugcggggucaacagcgacacggugggcugguccuggcccgacggggccgagcugccguucaccaucgacaaguga

SEQ ID NO: 79059 - RNA, 1350 nt, Artificial Sequence; identical to SEQ ID NO: 79044
  derived and/or modified CDS sequence (opt1) from neuraminidase__InfluenzaA__ABE97712

SEQ ID NO: 79060 - RNA, 1350 nt, Artificial Sequence; identical to SEQ ID NO: 79044
  derived and/or modified CDS sequence (opt1) from neuraminidase__InfluenzaA__ABE97713

SEQ ID NO: 79061 - RNA, 1350 nt, Artificial Sequence; identical to SEQ ID NO: 79044
  derived and/or modified CDS sequence (opt1) from neuraminidase__InfluenzaA__ABE97715

SEQ ID NO: 79062 - RNA, 1350 nt, Artificial Sequence
  derived and/or modified CDS sequence (opt1) from neuraminidase__InfluenzaA__ABE97717
augaaccccaaccagaagaucaucaccaucggcagcaucugcauggugaccgggaucgucaaccugaugcuccaggugggcaacaugaucuccaucugggugagccacuccauccacacggggaaccagcaccaggccgagccgaucagcaacaccaacuuccugaccgagaaggccgucgcguccgugaagcuggccggcaacagcucccucugccccaucaacgggugggccguguacagcaaggacaacuccauccgcaucggcagcaagggcgacgucuucgugauccgggagcccuucaucuccugcagccaccuggagugccgcaccuucuuccugacgcagggggcccuccugaacgacaagcacuccaacggcaccgugaaggaccggagcccccaccgcacccugauguccugcccggucggggaggcccccagccccuacaacucccgguucgagagcguggcgugguccgccagcgccugccacgacggcaccagcuggcucacgaucgggaucuccggccccgacaacggcgccguggcgguccugaaguacaacgggaucaucaccgacaccaucaagagcuggcgcaacaacauccugcggacccaggaguccgagugcgccugcgugaacggcagcugcuucacggugaugaccgacgggccguccaacggccaggccagccacaagaucuucaagauggagaagggcaaggucgugaaguccguggagcucgacgcccccaacuaccacuacgaggagugcagcugcuaccccgacgccggggagaucacgugcgucugccgcgacaacuggcacggcuccaaccggcccugggugagcuucaaccagaaccuggaguaccagaucggguacaucugcuccggcguguucggggacaacccgcgccccaacgacggcaccggcagcugcgggcccguccccuccaacggcgcguacggggugaagggcuucagcuucaaguacgggaacggcguguggaucggccggaccaaguccaccaacagccgcuccggguucgagaugaucugggacccgaacggcuggaccgagaccgacagcuccuucagcgucaagcaggacaucguggccaucacggacuggagcggguacuccggcagcuucguccagcaccccgagcugaccgggcucgacugcauccggcccugcuucuggguggagcugauccgcggccggcccaaggaguccaccaucuggaccagcggcuccagcaucuccuucugcggggugaacagcgacacggucggcugguccuggccggacggggccgagcugcccuucaccaucgacaaguga

SEQ ID NO: 79063 - RNA, 1350 nt, Artificial Sequence
  derived and/or modified CDS sequence (opt1) from neuraminidase__InfluenzaA__ABE97718
augaaccccaaccagaagaucaucaccaucggcagcaucugcauggugaccgggaucgucucccugaugcuccaggugggcaacaugaucagcaucugggugucccacagcauccacacggggaaccagcaccaggccgagccgaucuccaacaccaacuuccugaccgagaaggccgucgcgagcgugaagcuggccggcaacuccagccucugccccaucaacgggugggccguguacuccaaggacaacagcauccgcaucggcuccaagggcgacgucuucgugauccgggagcccuucaucagcugcucccaccuggagugccgcaccuucuuccugacgcagggggcccuccugaacgacaagcacagcaacggcaccgugaaggaccggagcccccaccgcacccugaugagcugcccggucggggaggcccccucccccuacaacagccgguucgaguccguggcguggagcgccagcgccugccacgacggcaccuccuggcucacgaucgggaucagcggccccgacaacggcgccguggcgguccugaaguacaacgggaucaucaccgacaccaucaaguccuggcgcaacaacauccugcggacccaggagagcgagugcgccugcgugaacggcuccugcuucacggugaugaccgacgggccgagcaacggccaggccucccacaagaucuucaagauggagaagggcaaggucgugaaguccguggagcucgacgcccccaacuaccacuacgaggagugcuccugcuaccccgacgccggggagaucacgugcgucugccgcgacaacuggcacggcagcaaccggcccuggguguccuucaaccagaaccuggaguaccagaucggguacaucugcagcggcguguucggggacaacccgcgccccaacgacggcaccggcuccugcgggcccgucagcuccaacggcgcguacggggugaagggcuucagcuucaaguacgggaacggcguguggaucggccggaccaaguccaccaacagccgcuccggguucgagaugaucugggaccccaacggcuggaccgagaccgacagcagcuucuccgucaagcaggacaucguggccaucacggacuggagcggguacuccggcagcuucguccagcacccggagcugaccgggcucgacugcauccggcccugcuucuggguggagcugauccgcggccggcccaaggaguccaccaucuggaccagcggcuccagcaucuccuucugcgggguggacagcgacacggucggcugguccuggcccgacggggccgagcugccguucaccaucgacaaguga

SEQ ID NO: 79064 - RNA, 1350 nt, Artificial Sequence
  derived and/or modified CDS sequence (opt1) from neuraminidase__InfluenzaA__ABE97719
augaaccccaaccagaagaucaucaccaucggcagcaucugcauggugaccgggaucgucucccugaugcuccaggugggcaacaugaucagcaucugggugucccacagcauccacacggggaaccagcaccaggccgagccgaucuccaacaccaacuuccugaccgagaaggccgucgcgagcgugaagcuggccggcaacuccagccucugccccaucaacgggugggccguguacuccaaggacaacagcauccgcaucggcuccaagggcgacgucuucgugauccgggagcccuucaucagcugcucccaccuggagugccgcaccuucuuccugacgcagggggcccuccugaacgacaagcacagcaacggcaccgugaaggaccggagcccccaccgcacccugaugagcugcccggucggggaggcccccucccccuacaacagccgguucgaguccguggcguggagcgccagcgccugccacgacggcaccuccuggcucacgaucgggaucagcggccccgacaacggcgccguggcgguccugaaguacaacgggaucaucaccgacaccaucaaguccuggcgcaacaacauccugcggacccaggagagcgagugcgccugcgugaacggcuccugcuucacggugaugaccgacgggccgagcaacggccaggccucccacaagaucuucaagaugaagaagggcaaggucgugaaguccguggagcucgacgcccccaacuaccacuacgaggagugcuccugcuaccccgacgccggggagaucacgugcgucugccgcgacaacuggcacggcagcaaccggcccuggguguccuucaaccagaaccuggaguaccagaucggguacaucugcagcggcguguucggggacaacccgcgccccaacgacggcaccggcuccugcgggcccgucagcuccaacggcgcguacggggugaagggcuucagcuucaaguacgggaacggcguguggaucggccggaccaaguccaccaacagccgcuccggguucgagaugaucugggaccccaacggcuggaccgagaccgacagcagcuucuccgucaagcaggacaucguggccaucacggacuggagcggguacuccggcagcuucguccagcacccggagcugaccgggcucgacugcauccggcccugcuucuggguggagcugauccgcggccggcccaaggaguccaccaucuggaccagcggcuccagcaucuccuucugcggggugaacagcgacacggucggcugguccuggcccgacggggccgagcugccguucaccaucgacaaguga

SEQ ID NO: 79065 - RNA, 1350 nt, Artificial Sequence
  derived and/or modified CDS sequence (opt1) from neuraminidase__InfluenzaA__ABE97720
augaaccccaaccagaagaucaucaccaucggcagcaucugcauggugaccgggaucgucucccugaugcuccaggugggcaacaugaucagcaucugggugucccacagcauccacacggggaaccagcaccaggccgagccgaucuccaacgccaacuuccugaccgagaaggcggucgccagcgugaagcuggccggcaacuccagccucugccccaucaacgggugggccguguacuccaaggacaacagcauccgcaucggcuccaagggcgacgucuucgugauccgggagcccuucaucagcugcucccaccuggagugccgcaccuucuuccugacccagggggcccuccugaacgacaagcacagcaacggcacggugaaggaccggagcccccaccgcacccugaugagcugcccggucggggaggcgcccucccccuacaacagccgguucgaguccguggccuggagcgccagcgccugccacgacggcaccuccuggcucaccaucgggaucagcggccccgacaacggcgcgguggccguccugaaguacaacgggaucaucacggacaccaucaaguccuggcgcaacaacauccugcggacccaggagagcgagugcgccugcgugaacggcuccugcuucaccgugaugacggacgggccgagcaacggccaggccucccacaagaucuucaagauggagaagggcaaggucgugaaguccguggagcucgacgcccccaacuaccacuacgaggagugcuccugcuaccccgacgcgggggagaucacgugcgucugccgcgacaacuggcacggcagcaaccggcccuggguguccuucaaccagaaccuggaguaccagaucggguacaucugcagcggcguguucggggacaccccgcgccccaacgacggcaccggcuccugcgggcccgucagcuccaacggcgccuacggggugaagggcuucagcuucaaguacgggaacggcguguggaucggccggaccaaguccaccaacagccgcuccggguucgagaugaucugggaccccaacggcuggaccgagaccgacagcagcuucuccgucaagcaggacaucguggccaucacggacuggagcggguacuccggcagcuucguccagcacccggagcugaccgggcucgacugcauccggcccugcuucuggguggagcugauccgcggccggcccaaggaguccaccaucuggaccagcggcuccagcaucuccuucugcggggugaacagcgacacggucggcugguccuggcccgacggggccgagcugccguucaccaucgacaaguga

SEQ ID NO: 79066 - RNA, 1410 nt, Artificial Sequence; identical to SEQ ID NO: 78837
  derived and/or modified CDS sequence (opt1) from neuraminidase__InfluenzaA__ABF47553

SEQ ID NO: 79067 - RNA, 1413 nt, Artificial Sequence; identical to SEQ ID NO: 78420
  derived and/or modified CDS sequence (opt1) from neuraminidase__InfluenzaA__ABF47564

SEQ ID NO: 79068 - RNA, 1413 nt, Artificial Sequence
  derived and/or modified CDS sequence (opt1) from neuraminidase__InfluenzaA__ABF47575
augaaccccaaccagaagaucaucaccaucggcagcaucuccaucgccaucgggaucaucagccugaugcuccagaucggcaacaucaucuccaucugggccagccacuccauccagaccgggagccagaaccacacgggcgugugcaaccagcgcaucaucaccuacgagaacuccaccugggucaaccacaccuacgugaacaucaacaacacgaacgugaucgcggggaaggacaagaccagcgucgcccuggccggcaacuccagccugugcuccaucagcggcugggccaucuacaccaaggacaacuccauccggaucgggagcaagggcgacguguucgugauccgcgagccguucaucuccugcagccacuucgagugccggaccuucuuccucacgcagggggcccugcugaacgacaagcacuccaacggcaccgucaaggaccgcagccccuaccgggcgcucauguccugcccccugggggaggcccccagcccguacaacagcaaguucgaguccguggccuggagcgccuccgcgugccacgacggcaugggcuggcugaccaucgggaucagcggccccgacaacggggccguggccguccucaaguacaacggcaucaucaccgagacgaucaaguccuggaagaagcagauccugcgcacccaggagagcgagugcgugugcgugaacggcuccugcuucaccaucaugaccgacgggcccagcaacggcgccgccuccuacaagaucuucaagaucgagaaggggaaggucaccaagagcaucgagcugaacgcgcccaacuuccacuacgaggagugcuccugcuacccggacacgggcaccgugaugugcgugugccgggacaacuggcacgggagcaaccgccccugggucuccuucaaccagaaccucgacuaccagaucggcuacaucugcagcggcguguucggggacaacccccggcccaaggacggcgagggguccugcaacccggugaccgucgacggcgccaacggggugaagggcuucagcuacaaguacggcaacgggguguggaucggccgcacgaaguccaaccggcugcgcaagggguucgagaugaucugggaccccaacggcuggaccgacaccgacagcgacuucuccgucaagcaggacgugguggccaucaccgacuggagcggguacagcggcuccuucguccagcaccccgagcugacgggccucgacugcauccggcccugcuucuggguggagcugguccgcgggcugccgaaggagaacaccaccaucuggaccagcggcuccagcaucuccuucugcggggugaacagcgacacggccaacugguccuggcccgacggcgccgagcuccccuucaccaucgacaaguga

SEQ ID NO: 79069 - RNA, 1413 nt, Artificial Sequence; identical to SEQ ID NO: 78420
  derived and/or modified CDS sequence (opt1) from neuraminidase__InfluenzaA__ABF47586

SEQ ID NO: 79070 - RNA, 1410 nt, Artificial Sequence; identical to SEQ ID NO: 78150
  derived and/or modified CDS sequence (opt1) from neuraminidase__InfluenzaA__ABF47597

SEQ ID NO: 79071 - RNA, 1413 nt, Artificial Sequence; identical to SEQ ID NO: 78992
  derived and/or modified CDS sequence (opt1) from neuraminidase__InfluenzaA__ABF47608

SEQ ID NO: 79072 - RNA, 1410 nt, Artificial Sequence
  derived and/or modified CDS sequence (opt1) from neuraminidase__InfluenzaA__ABF47619
augaaccccaaccagaagaucaucaccaucggcagcgugucccugaccaucgccacgaucugcuuccucaugcagaucgccauccuggucaccaccgugacccugcacuucaagcaguacgagugcaacagcccgcccaacaaccaggugaugcucugcgagcccacgaucaucgagcgcaacaucaccgagaucgucuaccugaccaacaccacgaucgagaaggagaucugccccaagcuggcggaguaccggaacugguccaagccgcagugcaagaucaccggguucgcccccuucagcaaggacaacuccauccgccucagcgccggcggggacaucugggugacccgggagcccuacguguccugcgaccccggcaagugcuaccaguucgcccuggggcagggcaccacgcugaacaaccgccacagcaacgacaccguccacgaccggaccccguaccgcacccuccugaugaacgagcugggcgugcccuuccaccucgggacgaagcaggucugcaucgccugguccagcuccagcugccacgacggcaaggcguggcugcacgugugcgugaccgggcacgacgagaacgccaccgccuccuucaucuacgacggccggcugguggacagcaucggguccuggagcaagaacauccuccgcacccaggaguccgagugcgucugcaucaacggcacgugcaccguggugaugaccgacggcagcgccuccgggcgggcggacaccaagauccuguucaucgaggagggcaagaucguccacaucagcccccugagcggguccgcccagcacguggaggagugcagcugcuacccccgcuacccgggcgugcggugcgucugccgcgacaacuggaagggcuccaaccggcccaucguggacaucaacgugaaggacuacagcaucgucuccagcuacgugugcuccgggcucgugggcgacacgccccgcaagaacgacagcgccuccagcucccacugccugaaccccaacaacgaggagggcgggcacggggucaagggcugggccuucgacgacggcaacgacguguggauggggcggaccaucagcgagaagcugcgcuccggcuacgagaccuucaaggucaucgggggcuggagcaagccgaacuccaagcuccagaucaaccgccaggugaucguggaccgggggaaccggagcggcuacuccggcaucuucagcgucgaggggaaguccugcaucaaccgcugcuucuacguggagcugauccggggccgcaagcaggagaccgaggugugguggacgagcaacagcaucgucguguucugcgggaccuccggcaccuacgggaccggcagcuggcccgacggcgccgacaucaaccugaugcccaucuga

SEQ ID NO: 79073 - RNA, 1413 nt, Artificial Sequence
  derived and/or modified CDS sequence (opt1) from neuraminidase__InfluenzaA__ABF47630
augaaccccaaccagaagaucaucaccaucggcagcaucuccaucgccaucgggaucaucagccugauccuccagaucggcaacaucaucuccaucugggccagccacuccauccagaccgggagccagaaccacacgggcaucugcaaccagcgcaucaucaccuacgagaacuccaccugggugaaccagaccuacgucaacaucaacaacacgaacgugguggcggggaaggacaagaccagcauggcccuggccggcaacuccagccugugcccgauccggggcugggccaucuacaccaaggacaacuccauccgcaucgggagcaagggcgacgucuucgugauccgggagcccuucaucuccugcagccaccucgagugccgcaccuucuuccugacgcagggggcccugcucaacgacaagcacuccaacggcaccgugaaggaccggagccccuaccgcgcgcugauguccugcccccugggggaggccccgagccccuacaacucccgguucgagagcgucgccuggagcgccuccgcgugccacgacggccucggcuggcugaccaucgggaucagcggccccgacaacggggccguggccgugcugaaguacaacggcaucaucaccgagacgaucaaguccuggaagaagcgcauccuccggacccaggagagcgagugcgucugcaugaacggcuccugcuucaccaucaugaccgacgggcccagcaacggcgccgccuccuaccgcaucuucaagaucgagaaggggcgggugaccaagagcaucgagcuggacgcgccgaacuaccacuacgaggagugcuccugcuaccccgacacgggcaccgugaugugcgucugccgcgacaacuggcacgggagcaaccggcccuggguguccuucaaccagaaccuggacuaccagaucggcuacaucugcagcggcguguucggggacaacccccgcccgaaggacggcgagggguccugcaaccccgucaccguggacggcgccgacggggugaagggcuucagcuaccgguacggcaacggggucuggaucggccgcacgaaguccaaccggcuccgcaagggguucgagaugaucugggaccccaacggcuggaccgacaccgacagcgacuucuccaugaagcaggacaucguggccaugaccgacuggagcggguacuccggcagcuucgugcagcaccccgagcugacgggccuggacugcaugcggccgugcuucugggucgagcucgugcgcgggcugccccgggagaacaccaccaucuggaccagcggcuccagcaucuccuucugcggggugaacagcgacacggccaacugguccuggcccgacggcgccgagcugcccuucaccaucgacaaguga

SEQ ID NO: 79074 - RNA, 1413 nt, Artificial Sequence
  derived and/or modified CDS sequence (opt1) from neuraminidase__InfluenzaA__ABF47652
augaaccccaaccagaagaucaucaccaucggcagcaucuccaucgccaucgggaucaucagccugauccuccagaucggcaacaucaucuccaucugggccagccacuccauccagaccgggagccagaaccacacgggcaucugcaaccagcgcaucaucaccuacgagaacuccaccugggugaaccagaccuacgucaacaucaacaacacgaacgugguggcggggaaggacaagaccagcaugacccuggccggcaacuccagccugugcccgauccggggcugggccaucuacaccaaggacaacuccauccgcaucgggagcaagggcgacgucuucgugauccgggagcccuucaucuccugcagccaccucgagugccgcacguucuuccugacccagggggcccugcucaacgacaagcacuccaacggcaccgugaaggaccggagccccuaccgcgcccugauguccugcccccugggggaggcgccgagccccuacaacucccgguucgagagcgucgccuggagcgccuccgccugccacgacggccucggcuggcugaccaucgggaucagcggccccgacaacggggcgguggccgugcugaaguacaacggcaucaucacggagaccaucaaguccuggaagaagcgcauccuccggacccaggagagcgagugcgucugcaugaacggcuccugcuucaccaucaugacggacgggcccagcaacggcgccgccuccuaccgcaucuucaagaucgagaaggggcgggugaccaagagcaucgagcuggacgccccgaacuaccacuacgaggagugcuccugcuaccccaacaccggcaccgugaugugcgucugccgcgacaacuggcacgggagcaaccggcccuggguguccuucaaccagaaccuggacuaccagaucggcuacaucugcagcggcguguucggggacaacccccgcccgaaggacggcgagggguccugcaaccccgucacgguggacggcgcggacggggugaagggcuucagcuaccgguacggcaacggggucuggaucggccgcaccaaguccaaccggcuccgcaagggguucgagaugaucugggaccccaacggcuggaccgacaccgacagcgacuucuccaugaagcaggacaucguggccaugacggacuggagcggguacuccggcagcuucgugcagcaccccgagcugaccggccuggacugcaugcggccgugcuucugggucgagcucgugcgcgggcugccccgggagaacaccaccaucuggacgagcggcuccagcaucuccuucugcggggugaacagcgacaccgccaacugguccuggcccgacggcgccgagcugcccuucaccaucgacaaguga

SEQ ID NO: 79075 - RNA, 1413 nt, Artificial Sequence; identical to SEQ ID NO: 78992
  derived and/or modified CDS sequence (opt1) from neuraminidase__InfluenzaA__ABF47663

SEQ ID NO: 79076 - RNA, 1413 nt, Artificial Sequence
  derived and/or modified CDS sequence (opt1) from neuraminidase__InfluenzaA__ABF47674
augaaccccaaccagaagaucaucaccaucggcagcaucuccaucgccaucgggaucaucagccugaugcuccagaucggcaacaucaucuccaucugggccagccacuccauccagaccgggagccagaaccacacgggcgugugcauccagcgcaucaucaccuacgagaacuccaccugggucaaccacaccuacgugaacaucaacaacacgaacgugaucgcggggaaggacaagaccagcgucacccuggccggcaacuccagccugugcuccaucagcggcugggccaucuacaccaaggacaacuccauccggaucgggagcaagggcgacguguucgugauccgcgagccguucaucuccugcagccaccucgagugccggacguucuuccugacccagggggcccugcucaacgacaagcacuccaacggcaccgucaaggaccgcagccccuaccgggcccugauguccugcccccugggggaggcgcccagcccguacaacagcaaguucgaguccguggccuggagcgccuccgccugccacgacggcaugggcuggcucaccaucgggaucagcggccccgacaacggggcgguggccguccugaaguacaacggcaucaucacggagaccaucaaguccuggaagaagcagauccugcgcacccaggagagcgagugcgugugcgugaacggcuccugcuucaccaucaugacggacgggcccagcaacggcgccgccuccuacaagaucuucaagaucgagaaggggaaggucaccaagagcaucgagcucaacgcccccaacuuccacuacgaggagugcuccugcuacccggacaccggcaccgugaugugcgugugccgggacaacuggcacgggagcaaccgccccugggucuccuucaaccagaaccuggacuaccagaucggcuacaucugcagcggcguguucggggacaacccccggcccaaggacggcgagggguccugcaacccggugacggucgacggcgcgaacggggugaagggcuucagcuacaaguacggcaacgggguguggaucggccgcaccaaguccaaccggcugcgcaagggguucgagaugaucugggaccccaacggcuggaccgacaccgacagcgacuucuccgucaagcaggacgugguggccaucacggacuggagcggguacagcggcuccuucguccagcaccccgagcucaccggccuggacugcauccggcccugcuucuggguggagcugguccgcgggcucccgaaggagaacaccaccaucuggacgagcggcuccagcaucuccuucugcggggugaacagcgacaccgccaacugguccuggcccgacggcgccgagcugcccuucaccaucgacaaguga

SEQ ID NO: 79077 - RNA, 1413 nt, Artificial Sequence; identical to SEQ ID NO: 78975
  derived and/or modified CDS sequence (opt1) from neuraminidase__InfluenzaA__ABF47696

SEQ ID NO: 79078 - RNA, 1413 nt, Artificial Sequence
  derived and/or modified CDS sequence (opt1) from neuraminidase__InfluenzaA__ABF47707
augaaccccaaccagaagaucaucaccaucggcagcaucugcauggccaucgggaucaucucccugauccuccagaucggcaacaucaucagcaucugggugucccacagcauccagaccgggucccagaaccacacgggcaucugcaaccagcgcaucaucaccuacgagaacagcaccugggucaaccagaccuacgugaacaucuccaacacgaacguggucgccgggaagggcaccaccagcaugacccuggcgggcaacuccagccugugcccgauccgggggugggccaucuacuccaaggacaacagcauccgcaucggcuccaagggggacguguucgugauccgggagcccuucaucagcugcucccaccucgagugccgcacguucuuccugacccagggcgcccugcucaacgacaagcacagcaacgggaccgucaaggaccggucccccuaccgcgcccugaugagcugccccaucggcgaggccccgucccccuacaacagccgguucgagagcguggcgugguccgccagcgccugccacgacggcaugggguggcugaccaucggcaucuccgggcccgacgacggcgccguggcgguccucaaguacaacggcaucaucacggagaccaucaagagcuggcgcaagcagauccugcggacccaggaguccgagugcgugugcgugaacgggagcugcuucaccaucaugacggacggccccuccgacgggccggccagcuaccgcaucuucaagaucgagaagggcaagaucaccaaguccaucgagcuggacgcccccaacagccacuacgaggagugcuccugcuaccccgacaccgggaccgucaugugcgugugccgggacaacuggcacggcagcaaccgccccuggguguccuucaaccagaaccucgacuaccagaucggcuacaucugcagcggggucuucggcgacaacccgcggcccaaggacgggaagggcuccugcgaccccgugaacguggacggggccgacggcgucaagggcuucagcuaccgcuacgggaacggcguguggaucgggcggacgaaguccaacagcucccgcaagggcuucgagaugaucugggaccccaacggguggaccgacaccgacagcaacuuccuggugaagcaggacgucguggccaugaccgacuggagcggcuacuccggcagcuucgugcagcacccggagcugacggggcucgacugcaugcggcccugcuucugggucgagcugauccgcggccggccccgcgagaagaccaccaucuggaccuccgggagcuccaucagcuucugcggcgugaacuccgacacggucaacuggagcuggcccgacggcgcggagcugccguucaccaucgacaaguga

SEQ ID NO: 79079 - RNA, 1413 nt, Artificial Sequence; identical to SEQ ID NO: 78975
  derived and/or modified CDS sequence (opt1) from neuraminidase__InfluenzaA__ABF47718

SEQ ID NO: 79080 - RNA, 1413 nt, Artificial Sequence; identical to SEQ ID NO: 78975
  derived and/or modified CDS sequence (opt1) from neuraminidase__InfluenzaA__ABF47729

SEQ ID NO: 79081 - RNA, 1413 nt, Artificial Sequence; identical to SEQ ID NO: 78975
  derived and/or modified CDS sequence (opt1) from neuraminidase__InfluenzaA__ABF47740

SEQ ID NO: 79082 - RNA, 1413 nt, Artificial Sequence
  derived and/or modified CDS sequence (opt1) from neuraminidase__InfluenzaA__ABF47751
augaaccccaaccagaagaucaucaccaucggcagcaucugcauggccaucgggaucaucucccugauccuccagaucggcaacaucaucagcaucugggugucccacagcauccagaccgggucccagaaccacacgggcaucugcaaccagcgcaucaucaccuacgagaacagcaccugggucaaccagaccuacgugaacaucaacaacacgaacguggucgccgggaaggacaccaccuccgugacccuggcgggcaacagcucccugugcccgauccggggcugggccaucuacagcaaggacaacuccauccgcaucgggagcaagggcgacguguucgucauccgggagcccuucaucuccugcagccaccucgagugccgcacguucuuccugacccagggggcccugcucaacgacaagcacuccaacggcaccgugaaggaccggagccccuaccgcgcccugauguccugccccaucggggaggccccgagccccuacaacucccgguucgagagcguggcguggagcgccuccgccugccacgacggcaugggcuggcugaccaucgggaucagcggccccgacgacggggccgucgcggugcucaaguacaacggcaucaucacggagaccaucaaguccuggcgcaagcggauccugcgcacccaggagagcgagugcgugugcgucaacggcuccugcuucaccaucaugacggacgggcccagcaacggcccggccuccuaccggaucuucaagaucgagaaggggaagaucaccaagagcaucgagcuggacgcccccaacucccacuacgaggagugcagcugcuaccccgacaccggcaccgugaugugcgugugccgcgacaacuggcacggguccaaccggcccugggucagcuucaaccagaaccucgacuaccagaucggcuacaucugcuccggcguguucggggacaacccgcgccccaaggacggcaaggggagcugcgaccccgugacggucgacggcgccgacggggugaagggcuucuccuaccgguacggcaacgggguguggaucggccgcaccaagagcaacuccagccggaagggguucgagaugaucugggaccccaacggcuggaccgacaccgacuccaacuuccuggucaagcaggacgugguggccaugacggacuggagcggguacagcggcuccuucguccagcacccggagcugaccggccucgacugcaugcgccccugcuucuggguggagcugauccgggggcgcccccgggagaagaccaccaucuggacgagcggcuccagcaucuccuucugcggggucaacagcgacaccgcgaacugguccuggcccgacggcgccgagcugccguucaccaucgacaaguga

SEQ ID NO: 79083 - RNA, 1413 nt, Artificial Sequence
  derived and/or modified CDS sequence (opt1) from neuraminidase__InfluenzaA__ABF47773
augaaccccaaccagaagaucaucaccaucggcagcaucugcaugaccaucgggaucaucucccugauccuccagaucggcaacaucaucagcaucugggugucccacagcauccagacggggucccagaaccacaccggcaucugcaaccagcgcaucaucaccuacgagaacagcaccugggucaaccagacguacgugaacaucaacaacaccaacguggucgccgggaaggacaccaccuccgugacgcuggccggcaacagcucccugugcccgauccggggcugggcgaucuacagcaaggacaacuccauccgcaucgggagcaagggcgacguguucgucauccgggagcccuucaucuccugcagccaccucgagugccgcaccuucuuccugacccagggggcccugcucaacgacaagcacuccaacggcaccgugaaggaccggagccccuaccgcgcccugauguccugccccaucggggaggccccgagccccuacaacucccgguucgagagcguggccuggagcgcguccgccugccacgacggcaugggcuggcugacgaucgggaucagcggccccgacgacggggccgucgccgugcucaaguacaacggcaucaucaccgagaccaucaaguccuggcgcaagcggauccugcgcacccaggagagcgagugcgugugcgucaacggcuccugcuucacgaucaugaccgacgggcccagcaacggcccggcguccuaccggaucuucaagaucgagaaggggaagaucaccaagagcaucgagcuggacgcccccaacucccacuacgaggagugcagcugcuaccccgacaccggcacggugaugugcgugugccgcgacaacuggcacggguccaaccggcccugggucagcuucaaccagaaccucgacuaccagaucggcuacaucugcuccggcguguucggggacaacccgcgccccaaggacggcaaggggagcugcgaccccgugaccgucgacggcgccgacggggugaagggcuucuccuaccgguacggcaacgggguguggaucggccgcaccaagagcaacuccagccggaagggguucgagaugaucugggaccccaacggcuggaccgacacggacuccaacuuccuggucaagcaggacgugguggccaugaccgacuggagcggguacagcggcuccuucguccagcacccggagcugaccggccucgacugcaugcgccccugcuucuggguggagcugauccgggggcgcccccgggagaagaccacgaucuggaccagcggcuccagcaucuccuucugcggggucaacagcgacaccgccaacugguccuggcccgacggcgcggagcugccguucaccaucgacaaguga

SEQ ID NO: 79084 - RNA, 1413 nt, Artificial Sequence; identical to SEQ ID NO: 79083
  derived and/or modified CDS sequence (opt1) from neuraminidase__InfluenzaA__ABF47784

SEQ ID NO: 79085 - RNA, 1413 nt, Artificial Sequence; identical to SEQ ID NO: 79083
  derived and/or modified CDS sequence (opt1) from neuraminidase__InfluenzaA__ABF47795

SEQ ID NO: 79086 - RNA, 1413 nt, Artificial Sequence; identical to SEQ ID NO: 79083
  derived and/or modified CDS sequence (opt1) from neuraminidase__InfluenzaA__ABF47806

SEQ ID NO: 79087 - RNA, 1413 nt, Artificial Sequence; identical to SEQ ID NO: 79083
  derived and/or modified CDS sequence (opt1) from neuraminidase__InfluenzaA__ABF47817

SEQ ID NO: 79088 - RNA, 1413 nt, Artificial Sequence; identical to SEQ ID NO: 79083
  derived and/or modified CDS sequence (opt1) from neuraminidase__InfluenzaA__ABF47839

SEQ ID NO: 79089 - RNA, 1413 nt, Artificial Sequence; identical to SEQ ID NO: 79083
  derived and/or modified CDS sequence (opt1) from neuraminidase__InfluenzaA__ABF47850

SEQ ID NO: 79090 - RNA, 1413 nt, Artificial Sequence; identical to SEQ ID NO: 78852
  derived and/or modified CDS sequence (opt1) from neuraminidase__InfluenzaA__ABF47872

SEQ ID NO: 79091 - RNA, 1413 nt, Artificial Sequence; identical to SEQ ID NO: 78852
  derived and/or modified CDS sequence (opt1) from neuraminidase__InfluenzaA__ABF47883

SEQ ID NO: 79092 - RNA, 1413 nt, Artificial Sequence; identical to SEQ ID NO: 78852
  derived and/or modified CDS sequence (opt1) from neuraminidase__InfluenzaA__ABF47894

SEQ ID NO: 79093 - RNA, 1410 nt, Artificial Sequence; identical to SEQ ID NO: 78868
  derived and/or modified CDS sequence (opt1) from neuraminidase__InfluenzaA__ABF47905

SEQ ID NO: 79094 - RNA, 1362 nt, Artificial Sequence
  derived and/or modified CDS sequence (opt1) from neuraminidase__InfluenzaA__ABF47958
augaaccccaaccagaagaucaucaccaucggcagcaucugcaugguggucgggaucaucucccugauccuccagaucggcaacaucaucagcaucuggaucucccacagcauccagaccgggaaccagaaccacacgggcaucugcaaccagggguccaucaccuacaaggugguggccggccaggacagcaccuccgucauccugaccggcaacagcucccugugcccgauccgcgggugggccauccacagcaaggacaacggcauccggaucggguccaagggcgacguguucgugauccgcgagcccuucaucagcugcucccaccucgagugccggacguucuuccugacccagggggcgcugcucaacgacaagcacagccgcggcaccuucaaggaccggucccccuaccgcgcccugaugagcugccccgucggcgaggccccgucccccuacaacagccgguucgaguccguggccuggagcgccagcgcgugccacgacgggaugggcuggcugaccaucgggaucuccggccccgacgacggcgccguggccguccucaaguacaacgggaucaucacggagaccaucaagagcuggcgcaagaacauccugcggacccaggaguccgagugcacgugcgugaacggcagcugcuucaccaucaugaccgacgggcccuccgacggccuggccagcuacaagaucuucaagaucgagaaggggaaggugaccaaguccaucgagcucaacgcgccgaacagccacuacgaggagugcuccugcuaccccgacaccggcaaggucaugugcgugugccgcgacaacuggcacggcagcaaccggcccuggguguccuucgaccagaaccuggacuacaagaucggguacaucugcagcggcgucuucggggacaacccccgcccgaaggacggcacgggguccugcggccccgugagcgccgacggcgccaacggggugaagggcuucuccuacaaguacgggaacggcgucuggaucgggcggaccaagagcgacuccagccgccacggcuucgagaugaucugggaccccaacggcuggaccgagaccgacucccgguucagcaugcgccaggacgugguggccaugacggaccggagcggguacuccggcagcuucguccagcaccccgagcugaccgggcucgacugcaugcgcccgugcuucuggguggagcugauccggggccugcccgaggaggacgccaucuggaccuccggcagcaucaucuccuucugcggggugaacagcgacaccgucgacugguccuggcccgacggcgcggagcuccccuucacgaucgacaaguga

SEQ ID NO: 79095 - RNA, 1350 nt, Artificial Sequence
  derived and/or modified CDS sequence (opt1) from neuraminidase__InfluenzaA__ABF56651
augaaccccaaccagaagaucaucaccaucggcagcaucugcauggugaccgggaucgucucccugaugcuccaggugggcaacaugaucagcaucugggugucccacagcauccacacggggucccagcaccaggccgagccgaucagcaacaccaacuuccugaccgagaaggccgucgcguccgugaagcuggccggcaacagcucccucugccccaucaacgggugggccguguacagcaaggacaacuccauccgcaucggcagcaagggcgacgucuucgugauccgggagcccuucaucuccugcagccaccuggagugccgcaccuucuuccugacgcagggggcccuccugaacgacaagcacuccaacggcaccgugaaggaccggagcccccaccgcacccugauguccugcccggucggggaggcccccagccccuacaacucccgguucgagagcguggcguggagcgccuccgccugccacgacggcaccagcuggcucacgaucgggaucuccggccccgacaacggcgccguggcgguccugaaguacaacgggaucaucaccgacaccaucaagagcuggcgcaacaacauccugcggacccaggaguccgagugcgccugcgugaacggcagcugcuucacggugaugaccgacgggccguccaacggccaggccagccacaagaucuucaagauggagaagggcaaggucgugaaguccguggagcucgacgcccccaacuaccacuacgaggagugcagcugcuaccccgacgccggggagaucacgugcgucugccgcgacaacuggcacggcuccaaccggcccugggugagcuucaaccagaaccuggaguaccagaucggguacaucugcuccggcguguucggggacaacccgcgccccaacgacggcaccggcagcugcgggcccgucuccagcaacggcgcguacggggugaagggcuucuccuucaaguacgggaacggcguguggaucggccggaccaagagcaccaacucccgcagcggguucgagaugaucugggaccccaacggcuggaccgagaccgacagcuccuucagcgucaagcaggacaucguggccaucacggacugguccggguacagcggcuccuucguccagcacccggagcugaccgggcucgacugcauccggcccugcuucuggguggagcugauccgcggccggcccaaggagagcaccaucuggaccuccggcagcuccaucagcuucugcggggugaacuccgacacggucggcuggagcuggcccgacggggccgagcugccguucaccaucgacaaguga

SEQ ID NO: 79096 - RNA, 1410 nt, Artificial Sequence; identical to SEQ ID NO: 78851
  derived and/or modified CDS sequence (opt1) from neuraminidase__InfluenzaA__ABF82654

SEQ ID NO: 79097 - RNA, 1413 nt, Artificial Sequence; identical to SEQ ID NO: 78420
  derived and/or modified CDS sequence (opt1) from neuraminidase__InfluenzaA__ABF82665

SEQ ID NO: 79098 - RNA, 1413 nt, Artificial Sequence; identical to SEQ ID NO: 78420
  derived and/or modified CDS sequence (opt1) from neuraminidase__InfluenzaA__ABF82676

SEQ ID NO: 79099 - RNA, 1413 nt, Artificial Sequence
  derived and/or modified CDS sequence (opt1) from neuraminidase__InfluenzaA__ABF82687
augaaccccaaccagaagaucaucaccaucggcagcaucuccaucgccaucgggaucaucagccugaugcuccagaucggcaacaucaucuccaucugggccagccacuccauccagaccgggagccagaaccacacgggcgugugcaaccagcgcaucaucaccuacgagaacuccaccugggucaaccacaccuacgugaacaucaacaacacgaacgugaucgcggggaaggacaagaccagcgucacccuggccggcaacuccagccugugcuccaucagcggcugggccaucuacaccaaggacaacuccauccggaucgggagcaagggcgacguguucgugauccgcgagccguucaucuccugcagccaccucgagugccggacguucuuccugacccagggggcccugcucaacgacaagcacuccaacggcaccgucaaggaccgcagccccuaccgggcccugauguccugcccccugggggaggcgcccagcccguacaacagcaaguucgaguccguggccuggagcgccuccgccugccacgacggcaugggcuggcucaccaucgggaucagcggccccgacaacggggcgguggccguccugaaguacaacggcaucaucacggagaccaucaaguccuggaagaagcagauccugcgcacccaggagagcgagugcgugugcgugaacggcuccugcuucaccaucaugacggacgggcccagcaacggcgccgccuccuacaagaucuucaagaucgagaaggggaagaccaccaagagcaucgagcucaacgcccccaacuuccacuacgaggagugcuccugcuacccggacaccggcacggucaugugcgugugccgggacaacuggcacgggagcaaccgccccuggguguccuucaaccagaaccuggacuaccagaucggcuacaucugcagcggcgucuucggggacaacccccggcccaaggacggcgagggguccugcaacccggugaccguggacggcgcgaacggggucaagggcuucagcuacaaguacggcaacgggguguggaucggccgcaccaaguccaaccggcugcgcaagggguucgagaugaucugggaccccaacggcuggaccgacacggacagcgacuucuccgugaagcaggacgucguggccaucaccgacuggagcggguacagcggcuccuucgugcagcaccccgagcucaccggccugaacugcauccggcccugcuucugggucgagcuggugcgcgggcucccgaaggagaacaccacgaucuggaccagcggcuccagcaucuccuucugcggggucaacagcgacaccgccaacugguccuggcccgacggcgccgagcugcccuucaccaucgacaaguga

SEQ ID NO: 79100 - RNA, 1410 nt, Artificial Sequence
  derived and/or modified CDS sequence (opt1) from neuraminidase__InfluenzaA__ABF82698
augaaccccaaccagaagaucaucaccaucggcagcgugucccugaccaucacgaccaucugcuuccucaugcagaucgccauccuggucaucaccgugacccugcacuucaagcagugcgagugcaacagcccgcccaacaaccaggugaugcucugcgagcccacgaucaucgagcgcaacaucaccgagaucgucuaccugaccaacaccacgaucgagaaggagaucugccccaagcuggccgaguaccggaacugguccaagccgcagugcaagaucaccggguucgcgcccuucagcaaggacaacuccauccgccucagcgccggcggggacaucugggugacccgggagcccuacguguccugcgaccccggcaagugcuaccaguucgcccuggggcagggcaccacgcugaacaaccgccacagcaacgacaccguccacgaccggaccccguaccgcacccuccugaugaacgagcugggcgugcccuuccaccucgggacgaagcaggucugcaucgccugguccagcuccagcugccacgacggcaaggccuggcugcacgugugcgugaccgggcacaacgagaacgcgaccgccuccuucaucuacgacggccggcugguggacagcaucggguccuggagcaagaacauccuccgcacccaggaguccgagugcgucugcaucaacggcacgugcaccguggugaugaccgacggcagcgccuccgggcgggccgacaccaagauccuguucaucgaggagggcaagaucguccacaucagcccccugagcggguccgcgcagcacguggaggagugcagcugcuacccccgcuacccgggcgugcggugcgucugccgcgacaacuggaagggcuccaaccggcccaucguggacaucaacgugaaggacuacagcaucgucuccagcuacgugugcuccgggcucgugggcgacacgccccgcaagaacgacagcuccagcuccagcuacugccuggaccccaacaacgaggagggcgggcacggggucaagggcugggccuucgacgacggcaacgacguguggauggggcggaccaucuccgagaagcugcgcagcggcuacgagaccuucaaggucaucgggggcugguccaagccgaacagcaagcuccagaucaaccgccaggugaucguggacaaggggaaccgguccggcuacagcggcaucuucuccgucgagggcaagagcugcaccaaccggugcuucuacguggagcugauccgcgggcggaagcaggagacggaggugugguggaccagcaacuccaucgucguguucugcgggaccagcggcaccuacgggacgggcuccuggcccgacggcgccgacaucaaccugaugcccaucuga

SEQ ID NO: 79101 - RNA, 1410 nt, Artificial Sequence; identical to SEQ ID NO: 78150
  derived and/or modified CDS sequence (opt1) from neuraminidase__InfluenzaA__ABF82709

SEQ ID NO: 79102 - RNA, 1413 nt, Artificial Sequence; identical to SEQ ID NO: 78439
  derived and/or modified CDS sequence (opt1) from neuraminidase__InfluenzaA__ABF82822

SEQ ID NO: 79103 - RNA, 1413 nt, Artificial Sequence; identical to SEQ ID NO: 78420
  derived and/or modified CDS sequence (opt1) from neuraminidase__InfluenzaA__ABF82833

SEQ ID NO: 79104 - RNA, 1413 nt, Artificial Sequence; identical to SEQ ID NO: 78420
  derived and/or modified CDS sequence (opt1) from neuraminidase__InfluenzaA__ABF82844

SEQ ID NO: 79105 - RNA, 1413 nt, Artificial Sequence
  derived and/or modified CDS sequence (opt1) from neuraminidase__InfluenzaA__ABF82855
augaaccccaaccagaagaucaucaccaucggcagcaucuccaucgccaucgggaucaucagccugaugcuccagaucggcaacaucaucuccaucugggccagccacuccauccagaucgggagccagaaccacaccggcgugugcaaccagcgcaucaucacguacgagaacuccaccugggucaaccacaccuacgugaacaucaacaacaccaacgugaucgcggggaaggacaagacgagcgucacccuggccggcaacuccagccugugcuccaucagcggcugggccaucuacaccaaggacaacuccauccggaucgggagcaagggcgacguguucgugauccgcgagccguucaucuccugcagccaccucgagugccggaccuucuuccugacgcagggggcccugcucaacgacaagcacuccaacggcaccgucaaggaccgcagccccuaccgggcccugauguccugcccccugggggaggcgcccagcccguacaacagcaaguucgaguccguggccuggagcgccuccgccugccacgacggcaugggcuggcucaccaucgggaucagcggccccgacaacggggcgguggccguccugaaguacaacggcaucaucaccgagacgaucaaguccuggaagaagcagauccugcgcacccaggagagcgagugcgugugcgugaacggcuccugcuucaccaucaugaccgacgggcccagcaacggcgccgccuccuacaagaucuucaagaucgagaaggggaaggucaccaagagcaucgagcucaacgcccccaacuuccacuacgaggagugcuccugcuacccggacacgggcaccgugaugugcgugugccgggacaacuggcacgggagcaaccgccccugggucuccuucaaccagaaccuggacuaccagaucggcuacaucugcagcggcguguucggggacaacccccggcccaaggacggcgagggguccugcaacccggugaccgucgacggcgcgaacggggugaagggcuucagcuacaaguacggcaacgggguguggaucggccgcacgaaguccaaccggcugcgcaagggguucgagaugaucugggaccccaacggcuggaccgacaccgacagcgacuucuccgucaagcaggacgugguggccaucaccgacuggagcggguacagcggcuccuucguccagcaccccgagcucacgggccuggacugcauccggcccugcuucuggguggagcugguccgcgggcucccgaaggagaacaccaccaucuggaccagcggcuccagcaucuccuucugcggggugaacagcgacacggccaacugguccuggcccgacggcgccgagcugcccuucaccaucgacaaguga

SEQ ID NO: 79106 - RNA, 1413 nt, Artificial Sequence; identical to SEQ ID NO: 78420
  derived and/or modified CDS sequence (opt1) from neuraminidase__InfluenzaA__ABF82866

SEQ ID NO: 79107 - RNA, 1413 nt, Artificial Sequence; identical to SEQ ID NO: 78954
  derived and/or modified CDS sequence (opt1) from neuraminidase__InfluenzaA__ABF82888

SEQ ID NO: 79108 - RNA, 1413 nt, Artificial Sequence; identical to SEQ ID NO: 78420
  derived and/or modified CDS sequence (opt1) from neuraminidase__InfluenzaA__ABF82910

SEQ ID NO: 79109 - RNA, 1413 nt, Artificial Sequence; identical to SEQ ID NO: 78420
  derived and/or modified CDS sequence (opt1) from neuraminidase__InfluenzaA__ABF82921

SEQ ID NO: 79110 - RNA, 1413 nt, Artificial Sequence; identical to SEQ ID NO: 78420
  derived and/or modified CDS sequence (opt1) from neuraminidase__InfluenzaA__ABF82932

SEQ ID NO: 79111 - RNA, 1413 nt, Artificial Sequence; identical to SEQ ID NO: 78420
  derived and/or modified CDS sequence (opt1) from neuraminidase__InfluenzaA__ABF82943

SEQ ID NO: 79112 - RNA, 1350 nt, Artificial Sequence
  derived and/or modified CDS sequence (opt1) from neuraminidase__InfluenzaA__ABG20474
augaaccccaaccagaagaucaucaccaucggcagcaucugcauggugaucgggaucgucucccugaugcuccagaucggcaacaugaucagcaucugggugucccacagcauccagaccgggaaccagcgccaggccgagccgaucuccaacacgaaguuccugaccgagaaggccguggcgagcgucacccuggccggcaacuccagccucugccccaucuccgggugggccguguacagcaaggacaacuccauccggaucggcagccgcggcgacguguucgucauccgggagcccuucaucuccugcagccaccuggagugccgcaccuucuuccugacgcagggggcccuccugaacgacaagcacuccaacggcaccgugaaggaccggagccccuaccgcacccugauguccugcccggugggggaggcccccagccccuacaacucccgguucgagagcgucgcguggagcgccuccgccugccacgacggcaccagcuggcucacgaucgggaucuccggccccgacaacggcgccguggcggugcugaaguacaacgggaucaucaccgacaccaucaagagcuggcgcaacaacguccugcggacccaggaguccgagugcgccugcgugaacggcagcugcuucacggugaugaccgacgggccguccaacggccaggccagcuacaagaucuucaagauggagaagggcaaggucgugaaguccguggagcucgacgcccccaacuaccacuacgaggagugcagcugcuaccccgacgccggggagaucacgugcgucugccgcgacaacuggcacggcuccaaccggcccugggugagcuucaaccagaaccuggaguaccagaucggguacaucugcuccggcguguucggggacaacccgcgccccaacgacggcaccggcagcugcgggcccgucucccccaacggcgcguacggggugaagggcuucagcuucaaguacgggaacggcguguggaucggccggaccaaguccaccaacagccgcuccggguucgagaugaucugggacccgaacggcuggaccgggaccgacagcaacuucagcgucaagcaggacaucguggccaucacggacugguccggcuacagcggguccuucguccagcaccccgagcugaccggccucgacugcauccggcccugcuucuggguggagcugauccgcggccggcccaaggagagcaccaucuggaccuccgggagcuccaucuucuucugcggcgugaacagcgacacggucuccuggagcuggccggacggggccgagcugcccuucaccaucgacaaguga

SEQ ID NO: 79113 - RNA, 1410 nt, Artificial Sequence; identical to SEQ ID NO: 78150
  derived and/or modified CDS sequence (opt1) from neuraminidase__InfluenzaA__ABG26761

SEQ ID NO: 79114 - RNA, 1410 nt, Artificial Sequence
  derived and/or modified CDS sequence (opt1) from neuraminidase__InfluenzaA__ABG26772
augaaccccaaccagaagaucaucaccaucggcagcgugucccugaccaucgccacgaucugcuuccucaugcagaucgccauccuggucaccaccgugacccugcacuucaagcaguacgagugcaacagcccgcccaacaaccaggugaugcucugcgagcccacgaucaucgagcgcaacaucaccgagaucgucuaccugaccaacaccacgaucgagaaggagaucugccccaagcuggcggaguaccggaacugguccaagccgcagugcaagaucaccggguucgcccccuucagcaaggacaacuccauccgccucagcgccggcggggacaucugggugacccgggagcccuacguguccugcgaccccgacaagugcuaccaguucgcccugggccaggggaccacgcugaacaaccgccacagcaacgacaccguccacgaccggaccccguaccgcacccuccugaugaacgagcugggcgugcccuuccaccucggcacgaagcaggucugcaucgccugguccagcuccagcugccacgacgggaaggcguggcugcacgugugcgugaccggccacgacgagaacgccaccgccuccuucaucuacgacgggcggcugguggacagcaucggcuccuggagcaagaagauccuccgcacccaggaguccgagugcgucugcaucaacgggacgugcaccguggugaugaccgacggcagcgccuccggccgggcggacaccaagauccuguucaucaaggaggggaagaucguccacaucagcccccugagcggcuccgcccagcacguggaggagugcagcugcuacccccgcuacccgggggugcggugcgucugccgcgacaacuggaagggcuccaaccggcccaucguggacaucaacgugaaggacuacagcaucgucuccagcuacgugugcuccggccucgugggggacacgccccgcaagaacgacagcuccagcuccagccacugccugaaccccaacaacgaggagggcgggcacggcgucaaggggugggccuucgacgacggcaacgacguguggaugggccggaccaucuccgagaagcugcgcagcggguacgagaccuucaaggucaucgagggcugguccaagccgaacagcaagcuccagaucaaccgccaggugaucguggaccgggggaaccgguccggcuacagcgggaucuucuccgucgagggcaagagcugcaucaaccgcugcuucuacguggagcugauccggggccgcaagcaggagaccgaggugugguggacgagcaacuccaucgucguguucugcgggaccagcggcaccuacgggaccggcuccuggcccgacggggccgacaucaaccugaugcccaucuga

SEQ ID NO: 79115 - RNA, 1413 nt, Artificial Sequence
  derived and/or modified CDS sequence (opt1) from neuraminidase__InfluenzaA__ABG26783
augaaccccaaccagaagaucaucaccaucggcagcaucuccaucgccaucgggaucaucagccugauccuccagaucggcaacaucaucuccaucugggccagccacuccauccagaccgggagccagaaccacacgggcaucugcaaccagcgcaucaucaccuacgagaacuccaccugggugaaccagaccuacgucaacaucaacaacacgaacgugguggcggggaaggacaagaccagcaugacccuggccggcaacuccagccugugcccgauccggggcugggccaucuacaccaaggacaacuccauccgcaucgggagcaagggcgacgucuucgugauccgggagcccuucaucuccugcagccaccucgagugccgcacguucuuccugacccagggggcccugcucaacgacaagcacuccaacggcaccgugaaggaccggagccccuaccgcgcccugauguccugcccccugggggaggcgccgagccccuacaacucccgguucgagagcgucgccuggagcgccuccgccugccacgacggccucggcuggcugaccaucgggaucagcggccccgacaacggggcgguggccgugcugaaguacaacggcaucaucacggagaccaucaaguccuggaagaagcgcauccuccggacccaggagagcgagugcgucugcaugaacggcuccugcuucaccaucaugacggacgggcccagcaacggcgccgccuccuaccgcaucuucaagaucgagaaggggcgggugaccaagagcaucgagcuggacgccccgaacuaccacuacgaggagugcuccugcuaccccaacaccggcaccgugaugugcgucugccgcgacaacuggcacgggagcaaccggcccuggguguccuucaaccagaaccuggacuaccagaucggcuacaucugcagcggcguguucggggacaacccccgcccgaaggacggcgagggguccugcaaccccgucacgguggacggcgcggacggggugaagggcuucagcuaccgguacggcaacggggucuggaucggccgcaccaaguccaaccggcuccgcaagggguucgagaugaucugggaccccaacggcuggaccgacaccgacagcgacuucuccaugaagcaggacaucguggccaugacggacuggagcggguacuccggcagcuucgugcagcaccccgagcugaccggccuggacugcauccggccgugcuucugggucgagcucgugcgcgggcugccccgggagaacaccaccaucuggacgagcggcuccagcaucuccuucugcggggugaacagcgacaccgccaacugguccuggcccgacggcgccgagcugcccuucaccaucgacaaguga

SEQ ID NO: 79116 - RNA, 1413 nt, Artificial Sequence; identical to SEQ ID NO: 78992
  derived and/or modified CDS sequence (opt1) from neuraminidase__InfluenzaA__ABG26794

SEQ ID NO: 79117 - RNA, 1410 nt, Artificial Sequence
  derived and/or modified CDS sequence (opt1) from neuraminidase__InfluenzaA__ABG26805
augaaccccaaccagaagaucaucaccaucggcagcgugucccugaccaucgccacgaucugcuuccucacccagaucgccauccuggucaccaccgugacgcugcacuucaagcaguacgagugcagcuccccgcccaacaaccaggugaugcccugcgagcccaucaucaucgagcgcaacaucaccgagaucgucuaccucaccaacaccacgaucgagaaggagaucugcccgaagcugguggaguaccggaacuggagcaagccccagugcaagaucaccggguucgcgcccuucuccaaggacaacagcauccgccuguccgccggcggggacaucugggugacccgggagcccuacgucagcugcgacccgggcaagugcuaccaguucgcccucgggcagggcaccacgcugaacaacaagcacuccaacgacaccauccacgaccgcacccccuaccggacccugcucaugaacgagcugggcgugcccuuccaccuggggacgaagcaggucugcaucgccuggagcuccagcuccugccacgacggcaaggccuggcuccacgugugcaucaccgggcacgacaagaacgcgaccgccagcuucaucuacgacggccgccugguggacuccaucgggagcugguccaagaacauccugcggacccaggagagcgagugcgugugcaucaacggcacgugcaccgucgugaugaccgacggcuccgccagcgagcgcgccgacaccaagauccucuucaucgaggaggggaagaucgugcacaucagcccccuguccggcagcgcgcagcacgucgaggagugcuccugcuacccgcgguaccccggggugcgcugcgugugccgggacaacuggaagggcagcaaccgccccaucgucgacaucaacgugaaggacuacuccaucgugagcuccuacgucugcagcggccuggugggggacacgccccggaagaacgaccgcuccagcuccagcuacugccggaacccgaacaacgagaagggcaaccacggggugaagggcugggccuucgacgacgggaacgacgucuggaugggccgcaccaucggcgaggagcuccgguccggguacgagaccuucaaggugaucggcggguggagcacccccaacuccaagcugcagaucaaccgccagaucaucgucgacagcggcaaccgguccggguacagcggcaucuucuccguggagggcaagagcugcaucaaccgcugcuucuacguggagcugauccgggggcgcgagcaggagacgcgcgucugguggaccagcaacuccaucgugguguucugcggcaccagcgggaccuacggcacgggguccuggcccgacggcgccgacaucaaccucaugcccaucuga

SEQ ID NO: 79118 - RNA, 1413 nt, Artificial Sequence; identical to SEQ ID NO: 78975
  derived and/or modified CDS sequence (opt1) from neuraminidase__InfluenzaA__ABG26816

SEQ ID NO: 79119 - RNA, 1413 nt, Artificial Sequence; identical to SEQ ID NO: 79083
  derived and/or modified CDS sequence (opt1) from neuraminidase__InfluenzaA__ABG26827

SEQ ID NO: 79120 - RNA, 1413 nt, Artificial Sequence; identical to SEQ ID NO: 79083
  derived and/or modified CDS sequence (opt1) from neuraminidase__InfluenzaA__ABG26838

SEQ ID NO: 79121 - RNA, 1410 nt, Artificial Sequence
  derived and/or modified CDS sequence (opt1) from neuraminidase__InfluenzaA__ABG26860
augaaccccaaccagaagaucaucaccaucggcagcgugucccugaccaucgccacgaucugcuuccucaugcagaucgccauccuggucaccaccgugacccugcacuucaagcaguacgagugcaacagcccgcccaacaaccaggugaugcucugcgagcccacgaucaucgagcgcaacaucaccgagaucgucuaccugaccaacaccacgaucgagaaggagaucugccccaagcuggcggaguaccggaacugguccaagccgcagugcaagaucaccggguucgcccccuucagcaaggacaacuccauccgccucagcgccggcggggacaucugggugacccgggagcccuacguguccugcgaccccggcaagugcuaccaguucgcccuggggcagggcaccacgcugaacaaccgccacagcaacgacaccguccacgaccggaccccguaccgcacccuccugaugaacgagcugggcgugcccuuccaccucgggacgaagcaggucugcaucgccugguccagcuccagcugccacgacggcaaggcguggcugcacgugugcgugaccgggcacgacgagaacgccaccgccuccuucaucuacgacggccggcugguggacagcaucggguccuggagcaagaacauccuccgcacccaggaguccgagugcgucugcaucaacggcacgugcaccguggugaugaccgacggcagcgccuccgaccgggcggacaccaagauccuguucaucgaggaggggaagaucguccacaucagcccccugagcggcuccgcccagcacguggaggagugcagcugcuacccccgcuacccgggggugcggugcgucugccgcgacaacuggaagggcuccaaccggcccaucaucgacaucaacgugaaggacuacagcaucguguccagcuacgucugcuccggccucgugggggacacgccccgcaagaacgacagcuccagcuccagcuacugcuggaaccccaacaacgagaagggcgggcacggcgugaaggggugggccuucgacgacggcaacgacgucuggaugggccggaccaucuccgaggagagccgcuccggguacgagaccuucaaggugaucggcggguggagcaagccgaacuccaagcugcagaucaaccggcaggucaucguggaccgcggcaaccggagcggguacuccggcaucuucagcguggagggcaagagcugcaucaaccgcugcuucuacgucgagcugauccgggggcgcaagcaggagaccgaggugugguggacguccaacagcaucguggucuucugcggcaccuccgggaccuacggcaccgggagcuggcccgacggcgccgacaucaaccucaugcccaucuga

SEQ ID NO: 79122 - RNA, 1410 nt, Artificial Sequence
  derived and/or modified CDS sequence (opt1) from neuraminidase__InfluenzaA__ABG26871
augaaccccaaccagaagaucaucaccaucggcagcgugucccugaccaucgccacgaucugcuuccucaugcagaucgccauccuggucaccaccgugacccugcacuucaagcaguacgagugcaacagcccgcccuacaaccagaucaugcucugcgagcccacgaucaucgagcgcaacaucaccgagaucguguaccugaccaacaccacgaucgagaaggagaucugccccaagcuggcggaguaccggaacugguccaagccgcagugcaagaucaccggguucgcccccuucagcaaggacaacuccauccgccucagcgccggcggggacaucugggucacccgggagcccuacguguccugcgaccccggcaagugcuaccaguucgcccuggggcagggcaccacgcugaacaaccgccacagcaacgacaccgugcacgaccggaccccguaccgcacccuccugaugaacgagcugggcguccccuuccaccucgggacgaagcaggucugcaucgccugguccagcuccagcugccacgacggcaaggcguggcugcacgugugcgugaccgggcacgacgagaacgccaccgccuccuucaucuacgacggccggcugguggacagcaucggguccuggagcaagaacauccuccgcacccaggaguccgagugcgugugcaucaacggcacgugcaccgucgugaugaccgacggcagcgccuccgaccgggcggacaccaagauccuguucaucgaggaggggaagaucgugcacaucagcccccugagcggcuccgcccagcacgucgaggagugcagcugcuacccccgcuacccgggggugcggugcgugugccgcgacaacuggaagggcuccaaccggcccaucgucgacaucaacgugaaggacuacagcaucguguccagcuacgucugcuccggccucgugggggacacgccccgcaagaacgacagcuccagcuccagcuacugcuggaaccccaacaacgagaagggcgggcacggcgugaaggggugggccuucgacgacggcaacgacgucuggaugggccggaccaucuccgaggagagccgcuccggguacgagaccuucaaggugaucggcggguggagcaagccgaacuccaagcugcagaucaaccggcaggucaucguggaccgcggcaaccggagcggguacuccggcaucuucagcguggagggcaagagcugcaucaaccgcugcuucuacgucgagcugauccgggggcgcaagcaggagaccgaggugugguggacguccaacagcaucguggucuucugcggcaccuccgggaccuacggcaccgggagcuggcccgacggcgccgacaucaaccucaugcccaucuga

SEQ ID NO: 79123 - RNA, 1410 nt, Artificial Sequence
  derived and/or modified CDS sequence (opt1) from neuraminidase__InfluenzaA__ABG26893
augaaccccaaccagaagaucaucaccaucggcagcaucucccugaccaucgccacgaucugcuuccucaugcagaucgccauccuggugaccaccgucacccugcacuucaagcaguacgagugcaacagcccgcccaacaaccaggugaugcucugcgagcccacgaucaucgagcgcaacaucaccgagaucguguaccugaccaacaccacgaucgagaaggagaucugccccaagcuggcggaguaccggaacugguccaagccgcagugcaagaucaccggguucgcccccuucagcaaggacaacuccauccgccucagcgccggcggggacaucugggucacccgggagcccuacguguccugcgaccccggcaagugcuaccaguucgcccuggggcagggcaccacgcugaacaaccgccacagcaacgacaccgugcacgaccggaccccguaccgcacccuccugaugaacgagcugggcguccccuuccaccucgggacgaagcaggucugcaucgccugguccagcuccagcugccacgacggcaaggcguggcugcacgugugcgugaccgggcacgacgagaacgccaccgccuccuucaucuacgacggccggcugguggacagcaucggguccuggagcaagaacauccuccgcacccaggaguccgagugcgugugcaucaacggcacgugcaccgucgugaugaccgacggcagcgccuccgaccgggcggacaccaagauccuguucaucgaggaggggaagaucgugcacaucagcccccugagcggcuccgcccagcacgucgaggagugcagcugcuacccccgcuacccgggggugcggugcgugugccgcgacaacuggaagggcuccaaccggcccaucgucgacaucaacgugaaggacuacagcaucguguccagcuacgucugcuccggccucgugggggacacgccccgcaagaacgacagcuccagcuccagcuacugcuggaaccccaacaacgagaagggcgggcacggcgugaaggggugggccuucgacgacggcaacgacgucuggaugggccggaccaucuccgaggagagccgcuccggguacgagaccuucaaggugaucggcggguggagcaagccgaacuccaagcugcagaucaaccggcaggucaucguggaccgcggcaaccggagcggguacuccggcaucuucagcguggagggcaagagcugcaucaaccgcugcuucuacgucgagcugauccgggggcgcaagcaggagaccgaggugugguggacguccaacagcaucguggucuucugcggcaccuccgggaccuacggcaccgggagcuggcccgacggcgccgacaucaaccucaugcccaucuga

SEQ ID NO: 79124 - RNA, 1410 nt, Artificial Sequence
  derived and/or modified CDS sequence (opt1) from neuraminidase__InfluenzaA__ABG26915
augaaccccaaccagaagaucaucaccaucggcagcgugucccugaccaucgccacgaucugcuuccucaugcagaucgccauccuggucaccaccgugacccugcacuucaagcaguacgagugcaacagcccgcccaacaaccaggugaugcucugcgagcccacgaucaucgagcgcaacaucaccgagaucgucuaccugaccaacaccacgaucgagaaggagaucugccccaagcuggcggaguaccggaacugguccaagccgcagugcaagaucaccggguucgcccccuucagcaaggacaacuccauccgccucagcgccggcggggacaucugggugacccgggagcccuacguguccugcgaccccggcaagugcuaccaguucgcccuggggcagggcaccacgcugaacaaccgccacagcaacgacaccguccacgaccggaccccguaccgcacccuccugaugaacgagcugggcgugcccuuccaccucgggacgaagcaggucugcaucgccugguccagcuccagcugccacgacggcaaggcguggcugcacgugugcgugaccgggcacgacgagaacgccaccgccuccuucaucuacgacggccggcugguggacagcaucuccagcugguccaagaacauccuccgcacccaggagagcgagugcgucugcaucaacgggacgugcaccguggugaugaccgacggcuccgccagcgagcgggcggacaccaagauccuguucaucgaggagggcaagaucguccacaucagcccccuguccgggagcgcccagcacguggaggagugcuccugcuacccccgcuacccgggcgugcggugcgucugccgcgacaacuggaaggggagcaaccggcccaucguggacaucaacgugaaggacuacuccaucgucagcuccuacgugugcagcggccucgugggcgacacgccccgcaagaacgacuccagcuccagcuccuacugccugaaccccaacaacgaggagggcgggcacggggucaagggcugggccuucgacgacgggaacgacguguggaugggccggaccaucagcgagaagcugcgcuccggcuacgagaccuucaaggucaucgggggcuggagcaagccgaacuccaagcuccagaucaaccgccaggugaucguggaccgggggaaccggagcggcuacuccgggaucuucagcgucgagggcaagagcugcgugaaccgcugcuucuacguggagcugauccggggccgcaagcaggagaccgaggucugguggacguccaacagcaucgugguguucugcgggaccuccggcaccuacgggaccggcagcuggcccgacggggccgacaucaaccugaugcccaucuga

SEQ ID NO: 79125 - RNA, 1410 nt, Artificial Sequence
  derived and/or modified CDS sequence (opt1) from neuraminidase__InfluenzaA__ABG26937
augaaccccaaccagaagaucaucaccaucggcagcgugucccugaccaucgccacgaucugcuuccucaugcagaucgccauccuggucaccaccgugacccugcacuucaagcaguacgagugcaacagcccgcccuccaaccaggugaugcucugcgagcccacgaucaucgagcgcaacaucaccgagaucgucuaccugaccaacaccacgaucgagaaggagaucugccccaagcuggcggaguaccggaacuggagcaagccgcagugcaagaucaccggguucgcccccuucuccaaggacaacagcauccgccucuccgccggcggggacaucugggugacccgggagcccuacgugagcugcgaccccggcaagugcuaccaguucgcccuggggcagggcaccacgcugaacaaccgccacuccaacgacaccguccacgaccggaccccguaccgcacccuccugaugaacgagcugggcgugcccuuccaccucgggacgaagcaggucugcaucgccuggagcuccagcuccugccacgacggcaaggcguggcugcacgugugcgugaccgggcacgacgagaacgccaccgccagcuucaucuacgacggccggcugguggacuccaucgggagcugguccaagaacauccuccgcacccaggagagcgagugcgucugcaucaacggcacgugcaccguggugaugaccgacggcuccgccagcgagcgggcggacaccaagauccuguucaucgaggaggggaagaucguccacaucagcccccuguccggcagcgcccagcacguggaggagugcuccugcuacccccgcuacccgggggugcggugcgucugccgcgacaacuggaagggcagcaaccggcccaucguggacaucaacgugaaggacuacuccaucgucagcuccuacgugugcagcggccucgugggggacacgccccgcaagaacgacuccagcuccagcuccuacugccggaaccccaacaacgagaagggcagccacggggucaagggcugggccuucgacgacgggaacgacguguggaugggccgcaccaucuccgaggagcugcggagcggcuacgagaccuucaaggucaucgggggcugguccaagccgaacagcaagcugcagaucaaccgccaggugaucguggaccgggggaaccgcuccggcuacagcgggaucuucagcgucgagggcaaguccugcaucaaccggugcuucuacguggagcucauccgcggccgcaagcaggagaccgaggugugguggacgagcaacuccaucgucguguucugcgggaccagcggcaccuacgggaccggcuccuggcccgacggggccgacaucaaccugaugcccaucuga

SEQ ID NO: 79126 - RNA, 1413 nt, Artificial Sequence; identical to SEQ ID NO: 78420
  derived and/or modified CDS sequence (opt1) from neuraminidase__InfluenzaA__ABG26948

SEQ ID NO: 79127 - RNA, 1410 nt, Artificial Sequence; identical to SEQ ID NO: 78190
  derived and/or modified CDS sequence (opt1) from neuraminidase__InfluenzaA__ABG26959

SEQ ID NO: 79128 - RNA, 1413 nt, Artificial Sequence
  derived and/or modified CDS sequence (opt1) from neuraminidase__InfluenzaA__ABG37123
augaaccccaaccagaagaucaucaccaucggcagcaucuccaucaccaucgggaucaucagccugaugcuccagaucggcaacaucaucuccaucugggccagccacuccauccagacggggagccagaaccacaccggcgugugcaaccagcgcaucaucaccuacgagaacuccaccugggucaaccacacguacgugaacaucaacaacaccaacgugaucgccgggaaggacaagaccagcgucacccuggcgggcaacuccagccugugcuccaucagcggcugggccaucuacacgaaggacaacuccauccggaucgggagcaagggcgacguguucgugauccgcgagccguucaucuccugcagccaccucgagugccggaccuucuuccugacccagggggcccugcucaacgacaagcacuccaacggcaccgucaaggaccgcagccccuaccgggcccugauguccugcccccugggggaggcccccagcccguacaacagcaaguucgaguccguggcguggagcgccuccgccugccacgacggcaugggcuggcucacgaucgggaucagcggccccgacaacggggccguggcgguccugaaguacaacggcaucaucaccgagaccaucaaguccuggaagaagcagauccugcgcacccaggagagcgagugcgugugcgugaacggcuccugcuucacgaucaugaccgacgggcccagcaacggcgccgccuccuacaagaucuucaagaucgagaaggggaaggucaccaagagcaucgagcucaacgcccccaacuuccacuacgaggagugcuccugcuacccggacaccggcacggugaugugcgugugccgggacaacuggcacgggagcaaccgccccugggucuccuucaaccagaaccuggacuaccagaucggcuacaucugcagcggcguguucggggacaacccccggcccaaggacggcgagggguccugcaacccggugaccgucgacggcgccaacggggugaagggcuucagcuacaaguacggcaacgggguguggaucggccgcaccaaguccaaccggcugcgcaagggguucgagaugaucugggaccccaacggcuggaccgacacggacagcgacuucuccgucaagcaggacgugguggcgaucaccgacuggagcggguacagcggcuccuucguccagcaccccgagcucaccggccuggacugcauccggcccugcuucuggguggagcugguccgcgggcucccgaaggagaacaccacgaucuggaccagcggcuccagcaucuccuucugcggggugaacagcgacaccgccaacugguccuggcccgacggcgccgagcugcccuucaccaucgacaaguga

SEQ ID NO: 79129 - RNA, 1410 nt, Artificial Sequence
  derived and/or modified CDS sequence (opt1) from neuraminidase__InfluenzaA__ABG37134
augaaccccaaccagaagaucaucaccaucggcagcgugucccugaccaucgccacgaucugcuuccucaugcagaucgccauccuggucaccaccgugacccugcacuucaagcaguacgagugcaacagcccgcccaacaaccaggugaugcucugcgagcccacgaucaucgagcgcaacaucaccgagaucgucuaccugaccaacaccacgaucgagaaggagaucugccccaagcuggcggaguaccggaacugguccaagccgcagugcaagaucaccggguucgcccccuucagcaaggacaacuccauccgccucagcgccggcggggacaucugggugacccgggagcccuacguguccugcgaccccgacaagugcuaccaguucgcccugggccaggggaccacgcugaacaaccgccacagcaacgacaccguccacgaccggaccccguaccgcacccuccugaugaacgagcugggcgugcccuuccaccucggcacgaagcaggucugcaucgccugguccagcuccagcugccacgacgggaaggcguggcugcacgugugcgugaccggccacgacgagaacgccaccgccuccuucaucuacgacgggcggcugguggacagcaucggcuccuggagcaagaagauccuccgcacccaggaguccgagugcgucugcaucaacgggacgugcaccguggugaugaccgacggcagcgccuccggccgggcggacaccaagauccuguucaucgaggaggggaagaucguccacaucagccagcugcucggcagcgcccagcacguggaggagugcuccugcuacccccgcuaccccggggugcggugcgucugccgcgacaacuggaagggcagcaaccggccgaucguggacaucaacgugaaggacuacuccaucgucagcuccuacgugugcagcggccuggugggggacacgccccgcaagaacgacuccagcuccagcucccacugccugaaccccaacaacgaggagggcgggcacggcgucaaggggugggccuucgacgacggcaacgacguguggaugggccggaccaucagcgagaagcuccgcuccggguacgagaccuucaaggucaucgagggcuggagcaagcccaacuccaagcugcagaucaaccgccaggugaucguggaccgggggaaccggagcggcuacuccgggaucuucagcgucgagggcaaguccugcaucaaccgcugcuucuacguggagcugauccggggccgcaagcaggagaccgaggugugguggacgagcaacagcaucgucguguucugcgggaccuccggcaccuacgggaccggcagcuggccggacggggccgacaucaaccucaugcccaucuga

SEQ ID NO: 79130 - RNA, 1410 nt, Artificial Sequence; identical to SEQ ID NO: 78150
  derived and/or modified CDS sequence (opt1) from neuraminidase__InfluenzaA__ABG37145

SEQ ID NO: 79131 - RNA, 1410 nt, Artificial Sequence
  derived and/or modified CDS sequence (opt1) from neuraminidase__InfluenzaA__ABG37156
augaaccccaaccagaagaucaucaccaucggcagcgugucccugaccaucgccacgaucugcuuccucaugcagaucgccauccuggucaccaccgugacccugcacuucaagcaguacgagugcaacagcccgcccaacaaccaggugaugcucugcgagcccacgaucaucgagcgcaacaucaccgagaucgucuaccugaccaacaccacgaucgagaaggagaucugccccaagcuggcggaguaccggaacugguccaagccgcagugcaagaucaccggguucgcccccuucagcaaggacaacuccauccgccucagcgccggcggggacaucugggugacccgggagcccuacguguccugcgaccccggcaagugcuaccaguucgcccuggggcagggcaccacgcugaacaaccgccacagcaacgacaccguccacgaccggaccccguaccgcacccuccugaugaacgagcugggcgugcccuuccaccucgggacgaagcaggucugcaucgccugguccagcuccagcugccacgacggcaaggcguggcugcacgugugcgugaccgggcacgacgagaacgccaccgccuccuucaucuacgacggccggcugguggacagcaucggguccuggagcaagaacauccuccgcacccaggaguccgagugcgucugcaucaacggcacgugcaccguggugaugaccgacggcagcgccuccgggcgggcggacaccaagauccuguucaucgaggagggcaagaucguccacaucagcccccugagcggguccgcccagcacguggaggagugcagcugcuacccccgcuacccgggcgugcggugcgucugccgcgacaacuggaagggcuccaaccggcccaucguggacaucaacgugaaggacuacagcaucgucuccaacuacgugugcagcgggcucgugggcgacacgccccgcaagaacgacuccagcuccagcucccacugccugaaccccaacaacgaggagggcgggcacggggucaagggcugggccuucgacgacggcaacgacguguggauggggcggaccaucagcgagaagcugcgcuccggcuacgagaccuucaaggucaucgggggcuggagcaagccgaacuccaagcuccagaucaaccgccaggugaucguggaccgggggaaccggagcggcuacuccggcaucuucagcgucgaggggaaguccugcaucaaccgcugcuucuacguggagcugauccggggccgcaagcaggagaccgaggugugguggacgagcaacagcaucgucguguucugcgggaccuccggcaccuacgggaccggcagcuggcccgacggcgccgacaucaaccugaugcccaucuga

SEQ ID NO: 79132 - RNA, 1410 nt, Artificial Sequence
  derived and/or modified CDS sequence (opt1) from neuraminidase__InfluenzaA__ABG37167
augaaccccaaccagaagaucaucaccaucggcagcgugucccugaccaucgccacgaucugcuuccucaugcagaucgccauccuggucaccaccgugacccugcacuucaagcaguacgagugcaacagcccgcccaacaaccaggugaugcucugcgagcccacgaucaucgagcgcaacaucaccgagaucgucuaccugaccaacaccacgaucgagaaggagaucugccccaagcuggcggaguaccggaacugguccaagccgcagugcaagaucaccggguucgcccccuucagcaaggacaacuccauccgccucagcgccggcggggacaucugggugacccgggagcccuacguguccugcgaccccgacaagugcuaccaguucgcccugggccaggggaccacgcugaacaaccgccacagcaacgacaccguccacgaccggaccccguaccgcacccuccugaugaacgagcugggcgugcccuuccaccucggcacgaagcaggucugcaucgccugguccagcuccagcugccacgacgggaaggcguggcugcacgugugcgugaccggccacgacgagaacgccaccgccuccuucaucuacgacgggcggcugguggacagcaucuccagcugguccaagaacauccuccgcacccaggagagcgagugcgucugcaucaacggcacgugcaccguggugaugaccgacggguccgccagcggccgggcggacaccaagauccuguucaucgaggagggcaagaucguccacaucagcccccuguccgggagcgcccagcacguggaggagugcuccugcuacccccgcuacccgggcgugcggugcgucugccgcgacaacuggaaggggagcaaccggcccaucguggacaucaacgugaaggacuacuccaucgucagcuccuacgugugcagcggccucgugggcgacacgccccgcaagaacgacuccagcuccagcuccuacugccugaaccccaacaacgaggagggcgggcacggggucaagggcugggccuucgacgacgggaacgacguguggaugggccggaccaucagcgagaagcugcgcuccggcuacgagaccuucaaggucaucgggggcuggagcaagccgaacuccaagcuccagaucaaccgccaggugaucguggaccgggggaaccggagcggcuacuccgggaucuucagcgucgagggcaagagcugcgugaaccgcugcuucuacguggagcugauccggggccgcaagcaggagaccgaggucugguggacguccaacagcaucgugguguucugcgggaccuccggcaccuacgggaccggcagcuggcccgacggggccgacaucaaccugaugcccaucuga

SEQ ID NO: 79133 - RNA, 1410 nt, Artificial Sequence
  derived and/or modified CDS sequence (opt1) from neuraminidase__InfluenzaA__ABG37189
augaaccccaaccagaagaucaucaccaucggcagcgugucccugaccaucgccacgaucugcuuccucaugcagaucgccauccuggucaccaccgugacccugcacuucaagcaguacgagugcaacagcccgcccaacaaccaggugcuccugugcgagcccacgaucaucgagcgcaacaucaccgagaucgucuaccugaccaacaccacgaucgagaaggagaucugccccaagcucgcggaguaccggaacugguccaagccgcagugcaagaucaccggguucgcccccuucagcaaggacaacuccauccgccugagcgccggcggggacaucugggugacccgggagcccuacguguccugcgaccccggcaagugcuaccaguucgcccuggggcagggcaccacgcucaacaaccgccacagcaacgacaccguccacgaccggaccccguaccgcacccugcugaugaacgagcucggcgugcccuuccaccuggggacgaagcaggucugcaucgccugguccagcuccagcugccacgacggcaaggcguggcugcacgugugcgugaccgggcacgacgagaacgccaccgccuccuucaucuacgacggccggcucguggacagcaucggguccuggagcaagaacauccugcgcacccaggaguccgagugcgucugcaucaacggcacgugcaccguggugaugaccgacggcagcgccuccgggcgggcggacaccaagauccuguucaucgaggagggcaagaucguccacaucagcagccucuccgggagcgcccagcacguggaggagugcuccugcuacccccgcuaccccggcgugcggugcgucugccgcgacaacuggaagggcagcaaccggccgaucguggacaucaacgugaaggacuacuccaucgucagcuccuacgugugcagcgggcuggugggcgacacgccccgcaagaacgacuccagcuccagcucccacugccugaaccccaacaacgaggagggcgggcacggggucaagggcugggccuucgacgacggcaacgacguguggauggggcggaccaucagcgagaagcuccgcuccggcuacgagaccuucaaggucaucgggggcuggagcaagcccaacuccaagcugcagaucaaccgccaggugaucguggaccgggggaaccggagcggcuacuccggcaucuucagcgucgagggcaagagcugcaucaaccgcugcuucuacguggagcugauccgggggcgcaagcaggagaccgaggugugguggacguccaacagcaucgucguguucugcgggaccuccggcaccuacgggaccggcagcuggccggacggcgccgacaucaaccucaugcccaucuga

SEQ ID NO: 79134 - RNA, 1410 nt, Artificial Sequence
  derived and/or modified CDS sequence (opt1) from neuraminidase__InfluenzaA__ABG37200
augaaccccaaccagaagaucaucaccaucggcagcgugucccugaccaucgccacgaucugcuuccucaugcagaucgccauccuggucaccaccgugacccugcacuucaagcaguacgagugcaacagcccgcccaacaaccaggugaugcucugcgagcccacgaucaucgagcgcaacaucaccgagaucgucuaccugaccaacaccacgaucgagaaggagaucugccccaagcuggcggaguaccggaacugguccaagccgcagugcaagaucaccggguucgcccccuucagcaaggacaacuccauccgccucagcgccggcggggacaucugggugacccgggagcccuacguguccugcgacagcggcaagugcuaccaguucgcccuggggcagggcaccacgcugaacaaccgccacuccaacgacaccguccacgaccggacccccuaccgcacccuccugaugaacgagcugggcgugccguuccaccucgggacgaagcaggucugcaucgccuggagcuccagcuccugccacgacggcaaggcguggcugcacgugugcgugaccgggcacgacgagaacgccaccgccagcuucaucuacgacggccggcugguggacuccaucgggagcugguccaagaacauccuccgcacccaggagagcgagugcgucugcaucaacggcacgugcaccguggugaugaccgacggcuccgccagcgggcgggcggacaccaagauccuguucaucgaggagggcaagaucguccacaucagcacgcuguccgggagcgcccagcacguggaggagugcuccugcuacccccgcuaccccggcgugcggugcgucugccgcgacaacuggaagggcagcaaccggcccaucguggacaucaacgugaaggacuacuccaucgucagcuccuacgugugcagcgggcucgugggcgacaccccgcgcaagaacgacuccagcuccagcucccacugccugaaccccaacaacgaggagggcgggcacggggucaagggcugggccuucgacgacggcaacgacguguggauggggcggaccaucagcgagaagcugcgcuccggcuacgagaccuucaaggucaucgggggcuggagcaagcccaacuccaagcuccagaucaaccgccaggugaucguggaccgggggaaccggagcggcuacuccggcaucuucagcgucgagggcaagagcugcaucaaccgcugcuucuacguggagcugauccgggggcgcaagcaggagacggaggugugguggaccuccaacagcaucgucguguucugcgggaccuccggcaccuacgggacgggcagcuggcccgacggcgccgacaucaaccugaugccgaucuga

SEQ ID NO: 79135 - RNA, 1410 nt, Artificial Sequence
  derived and/or modified CDS sequence (opt1) from neuraminidase__InfluenzaA__ABG37211
augaaccccaaccagaagaucaucaccaucggcagcgugucccugaccaucgccacgaucugcuuccucacccagaucgccauccuggucaccaccgugacgcugcacuucaagcaguacgagugcagcuccccgcccaacaaccaggugaugcccugcgagcccaucaucaucgagcgcaacaucaccgagaucgucuaccucaccaacaccacgaucgagaaggagaucugcccgaagcugguggaguaccggaacuggagcaagccccagugcaagaucaccggguucgcgcccuucuccaaggacaacagcauccgccuguccgccggcggggacaucugggugacccgggagcccuacgucagcugcgacccgggcaagugcuaccaguucgcccucgggcagggcaccacgcugaacaacaagcacuccaacgacaccauccacgaccgcacccccuaccggacccugcucaugaacgagcugggcgugcccuuccaccuggggacgaagcaggucugcaucgccuggagcuccagcuccugccacgacggcaaggccuggcuccacgugugcaucaccgggcacgacaagaacgcgaccgccagcuucaucuacgacggccgccugguggacuccaucgggagcugguccaagaacauccugcggacccaggagagcgagugcgugugcaucaacggcacgugcaccgucgugaugaccgacggcuccgccagcgagcgcgccgacaccaagauccucuucaucgaggaggggaagaucgugcacaucagcccccuguccggcagcgcgcagcacgucgaggagugcuccugcuacccgcgguaccccggggugcgcugcgugugccgggacaacuggaagggcagcaaccgccccaucgucgacaucaacgugaaggacuacuccaucgugagcuccuacgucugcagcggccuggugggggacacgccccggaagaacgaccgcuccagcuccagcuacugccggaacccgaacaacgagaagggcaaccacggggugaagggcugggccuucgacgacgggaacgacgucuggaugggccgcaccaucggcgaggagcuccgguccggguacgagaccuucaaggugaucggcggguggagcacccccaacuccaagcugcagaucaaccgccaggucaucguggacagcggcaaccgguccggguacagcggcaucuucuccguggagggcaagagcugcaucaaccgcugcuucuacgucgagcugauccgggggcgcgagcaggagacgcgcgugugguggaccagcaacuccaucguggucuucugcggcaccagcgggaccuacggcacgggguccuggcccgacggcgccgacaucaaccucaugcccaucuga

SEQ ID NO: 79136 - RNA, 1410 nt, Artificial Sequence
  derived and/or modified CDS sequence (opt1) from neuraminidase__InfluenzaA__ABG37233
augaaccccaaccagaagaucaucaccaucggcagcgugucccugaccaucgccacgaucugcuuccucaugcagaucgccauccuggucaccaccgugacccugcacuucaagcaguacgagugcaacagcccgcccuccaaccaggcgaugcucugcgagcccacgaucaucgagcgcaacaucaccgagaucguguaccugaccaacaccacgaucgagaaggagaucugccccaagcuggccgaguaccggaacuggagcaagccgcagugcaagaucaccggguucgcccccuucuccaaggacaacagcauccgccucuccgccggcggggacaucugggucacccgggagcccuacgugagcugcgaccccggcaagugcuaccaguucgcccuggggcagggcaccacgaucaacaaccgccacuccaacgacaccgugcacgaccggaccccguaccgcacccugcucaugaacgagcugggcguccccuuccaccuggggacgaagcaggucugcaucgcguggagcuccagcuccugccacgacggcaaggccuggcuccacgugugcgugaccgggcacgacgagaacgccaccgccagcuucaucuacgacggccggcugguggacuccaucgggagcugguccaagaacauccugcgcacccaggagagcgagugcgugugcaucaacggcacgugcaccgucgugaugaccgacggcuccgcgagcgggcgggccgacaccaagauccucuucaucgaggagggcaagaucgugcacaucagcccccuguccgggagcgcccagcacgucgaggagugcuccugcuacccccgcuacccgggcgugcggugcgugugccgcgacaacuggaagggcagcaaccggcccaucgucgacaucaacgugaaggacuacuccaucgugagcuccuacgucugcagcgggcuggugggcgacacgccccgcaagaacgacuccagcuccaacagcuacugccggaaccccaacaacgagaaggggucccacggcgugaaggggugggccuucgacgacggcaacgacgucuggaugggccgcaccaucagcgccgagucccggagcggguacgagaccuucaaggugaucggcgggugguccaagccgaacagcaagcuccagaucaaccgccaggucaucguggaccggggcaaccgcuccggguacagcggcaucuucagcguggagggcaaguccugcaucaaccggugcuucuacgucgagcugauccgcgggcgcaagcaggagaccgaggugugguggacgagcaacuccaucguggucuucugcggcaccagcgggaccuacggcaccggguccuggcccgacggcgcggacaucaaccugaugcccaucuga

SEQ ID NO: 79137 - RNA, 1410 nt, Artificial Sequence
  derived and/or modified CDS sequence (opt1) from neuraminidase__InfluenzaA__ABG37244
augaaccccaaccagaagaucaucaccaucggcagcgugucccugaccaucgccacgaucugcuuccucaugcagaucgccauccuggucaccaccgugacccugcacuucaagcaguacgagugcaacagcccgcccaacaaccaggugaugcucugcgagcccacgaucaucgagcgcaacaucaccgagaucgucuaccugaccaacaccacgaucgagaaggagaucugccccaagcuggcggaguaccggaacugguccaagccgcagugcaagaucaccggguucgcccccuucagcaaggacaacuccauccgccucagcgccggcggggacaucugggugacccgggagcccuacguguccugcgaccccggcaagugcuaccaguucgcccuggggcagggcaccacgcugaacaaccgccacagcaacgacaccguccacgaccggaccccguaccgcacccuccugaugaacgagcugggcgugcccuuccaccucgggacgaagcaggucugcaucgccugguccagcuccagcugccacgacggcaaggcguggcugcacgugugcgugaccgggcacgacgagaacgccaccgccuccuucaucuacgacggccggcugguggacagcaucggguccuggagcaagaacauccuccgcacccaggaguccgagugcgucugcaucaacggcacgugcaccguggugaugaccgacggcagcgccuccgaccgggcggacaccaagauccuguucaucgaggaggggaagaucguccacaucagcccccugagcggcuccgcccagcacguggaggagugcagcugcuacccccgcuacccgggggugcggugcgucugccgcgacaacuggaagggcuccaaccggcccaucguggacaucaacgugaaggacuacagcaucgucuccagcuacgugugcuccggccucgugggggacacgccccgcaagaacgacagcuccagcuccagcuacugcuggaaccccaacaacgagaagggcgggcacggcgucaaggggugggccuucgacgacggcaacgacguguggaugggccggaccaucuccgaggagagccgcuccggguacgagaccuucaaggucaucggcggguggagcaagccgaacuccaagcugcagaucaaccgccaggugaucguggaccggggcaaccggagcggguacuccggcaucuucagcgucgagggcaagagcugcaucaaccgcugcuucuacguggagcugauccgggggcgcaagcaggagaccgaggugugguggacguccaacagcaucgucguguucugcggcaccuccgggaccuacggcaccgggagcuggcccgacggcgccgacaucaaccucaugcccaucuga

SEQ ID NO: 79138 - RNA, 1410 nt, Artificial Sequence; identical to SEQ ID NO: 79137
  derived and/or modified CDS sequence (opt1) from neuraminidase__InfluenzaA__ABG37255

SEQ ID NO: 79139 - RNA, 1410 nt, Artificial Sequence; identical to SEQ ID NO: 79124
  derived and/or modified CDS sequence (opt1) from neuraminidase__InfluenzaA__ABG37266

SEQ ID NO: 79140 - RNA, 1410 nt, Artificial Sequence; identical to SEQ ID NO: 79137
  derived and/or modified CDS sequence (opt1) from neuraminidase__InfluenzaA__ABG37277

SEQ ID NO: 79141 - RNA, 1410 nt, Artificial Sequence; identical to SEQ ID NO: 79137
  derived and/or modified CDS sequence (opt1) from neuraminidase__InfluenzaA__ABG37288

SEQ ID NO: 79142 - RNA, 1410 nt, Artificial Sequence; identical to SEQ ID NO: 79137
  derived and/or modified CDS sequence (opt1) from neuraminidase__InfluenzaA__ABG37310

SEQ ID NO: 79143 - RNA, 1410 nt, Artificial Sequence; identical to SEQ ID NO: 79124
  derived and/or modified CDS sequence (opt1) from neuraminidase__InfluenzaA__ABG37321

SEQ ID NO: 79144 - RNA, 1410 nt, Artificial Sequence
  derived and/or modified CDS sequence (opt1) from neuraminidase__InfluenzaA__ABG37332
augaaccccaaccagaagaucaucaccaucggcagcgugucccugaccaucgccacgaucugcuuccucaugcagaucgccauccuggucaccaccgugacccugcacuucaagcagcacgagugcaacagcccgcccaacaaccaggugaugcucugcgagcccacgaucaucgagcgcaacaucaccgagaucguccaccugaccaacaccacgaucgagaaggagaucugccccaagcuggcggaguaccggaacugguccaagccgcagugcaagaucaccggguucgcccccuucagcaaggacaacuccauccgccucagcgccggcggggacaucugggugacccgggagcccuacguguccugcgaccccggcaagugcuaccaguucgcccuggggcagggcaccacgcugaacaaccgccacagcaacgacaccguccacgaccggaccccguaccgcacccuccugaugaacgagcugggcgugcccuuccaccucgggacgaagcaggucugcaucgccugguccagcuccagcugccacgacggcaaggcguggcugcacgugugcgugaccgggcacgacgagaacgccaccgccuccuucaucuacgacggccggcugguggacagcaucggguccuggagcaagaacauccuccgcacccaggaguccgagugcgucugcaucaacggcacgugcaccguggugaugaccgacggcagcgccuccgaccgggcggacaccaagauccuguucaucgaggaggggaagaucguccacaucagcccccugagcggcggggcccagcacguggaggagugcuccugcuacccccgcuacccgggcgugcggugcgucugccgcgacaacuggaagggcagcaaccggcccaucguggacaucaacgugaaggacuacuccaucgucagcuccuacgugugcagcgggcucgugggcgacacgccccgcaagaacgacuccagcuccagcuccuacugcuggaaccccaacaacgagaagggcgggcacggggucaagggcugggccuucgacgacggcaacgacguguggauggggcggaccaucagcgaggagucccgcagcggcuacgagaccuucaaggucaucgggggcugguccaagccgaacagcaagcugcagaucaaccgccaggugaucguggaccgggggaaccgguccggcuacagcggcaucuucuccgucgagggcaagagcugcaucaaccgcugcuucuacguggagcugauccgggggcgcaagcaggagaccgaggugugguggacgagcaacuccaucgucguguucugcgggaccagcggcaccuacgggaccggcuccuggcccgacggcgccgacaucaaccucaugcccaucuga

SEQ ID NO: 79145 - RNA, 1410 nt, Artificial Sequence
  derived and/or modified CDS sequence (opt1) from neuraminidase__InfluenzaA__ABG37343
augaaccccaaccagaagaucaucaccaucggcagcgugucccugaccaucgccacgaucugcuuccucaugcagaucgccauccuggucaccaccgugacccugcacuucaagcaguacgagugcaacagcccgcccaacaaccaggugaugcucugcgagcccacgaucaucgagcgcaacaucaccgagaucgucuaccugaccaacaccacgaucgagaaggagaucugccccaagcuggcggaguaccggaacugguccaagccgcagugcaagaucaccggguucgcccccuucagcaaggacaacuccauccgccucagcgccggcggggacaucugggugacccgggagcccuacguguccugcgaccccggcaagugcuaccaguucgcccuggggcagggcaccacgcugaacaaccgccacagcaacgacaccguccacgaccggaccccguaccgcacccuccugaugaacgagcugggcgugcccuuccaccucgggacgaagcaggucugcaucgccugguccagcuccagcugccacgacggcaaggcguggcugcacgugugcgugaccgggcacgacgagaacgccaccgccuccuucaucuacgacggccggcugguggacagcaucggguccuggagcaagaacauccuccgcacccaggaguccgagugcgucugcaucaacggcacgugcaccguggugaugaccgacggcagcgccuccgaccgggcggacaccaagauccuguucaucgaggaggggaagaucguccacaucagcccccugagcggcuccgcccagcacguggaggagugcagcugcuacccccgcuacccgggggugcggugcgucugccgcgacaacuggaagggcuccaaccggcccaucguggacaucaacgugaagaacuacagcaucgucuccagcuacgugugcuccggccucgugggggacacgccccgcaagaacgacagcuccagcuccagcuacugcuggaaccccaacaacgagaagggcgggcacggcgucaaggggugggccuucgacgacggcaacgacguguggaugggccggaccaucuccgaggagagccgcuccggguacgagaccuucaaggucaucggcggguggagcaagccgaacuccaagcugcagaucaaccgccaggugaucguggaccggggcaaccggagcggguacuccggcaucuucagcgucgagggcaagagcugcaucaaccgcugcuucuacguggagcugauccgggggcgcaagcaggagaccgaggugugguggacguccaacagcaucgucguguucugcggcaccuccgggaccuacggcaccgggagcuggcccgacggcgccgacaucaaccucaugcccaucuga

SEQ ID NO: 79146 - RNA, 1410 nt, Artificial Sequence; identical to SEQ ID NO: 79125
  derived and/or modified CDS sequence (opt1) from neuraminidase__InfluenzaA__ABG37354

SEQ ID NO: 79147 - RNA, 1413 nt, Artificial Sequence; identical to SEQ ID NO: 78852
  derived and/or modified CDS sequence (opt1) from neuraminidase__InfluenzaA__ABG37365

SEQ ID NO: 79148 - RNA, 1413 nt, Artificial Sequence; identical to SEQ ID NO: 78954
  derived and/or modified CDS sequence (opt1) from neuraminidase__InfluenzaA__ABG37387

SEQ ID NO: 79149 - RNA, 1413 nt, Artificial Sequence
  derived and/or modified CDS sequence (opt1) from neuraminidase__InfluenzaA__ABG37398
augaaccccaaccagaagaucaucaccaucggcagcaucuccaucgccaucgggaucaucagccugaugcuccagaucggcaacaucaucuccaucugggccagccacuccauccagaccgggagccagaaccacacgggcgugugcaaccagcgcaucaucaccuacgagaacaacaccugggucaaccacaccuacgugaacaucaacaacacgaacgugaucgcggggaaggacaagaccuccgucacccuggccggcaacagcucccugugcagcaucuccggcugggccaucuacaccaaggacaacagcauccggaucggguccaagggcgacguguucgugauccgcgagccguucaucagcugcucccaccucgagugccggacguucuuccugacccagggggcccugcucaacgacaagcacagcaacggcaccgucaaggaccgcucccccuaccgggcccugaugagcugcccccugggggaggcgcccuccccguacaacagcaaguucgagagcguggccugguccgccagcgccugccacgacggcaugggcuggcucaccaucgggaucuccggccccgacaacggggcgguggccguccugaaguacaacggcaucaucacggagaccaucaagagcuggaagaagcagauccugcgcacccaggaguccgagugcgugugcgugaacggcagcugcuucaccaucaugacggacgggcccuccaacggcgccgccagcuacaagaucuucaagaucgagaaggggaaggucaccaaguccaucgagcucaacgcccccaacuuccacuacgaggagugcagcugcuacccggacaccggcaccgugaugugcgugugccgggacaacuggcacggguccaaccgccccugggucagcuucaaccagaaccuggacuaccagaucggcuacaucugcuccggcguguucggggacaacccccggcccaaggacggcgaggggagcugcaacccggugacggucgacggcgcgaacggggugaagggcuucuccuacaaguacggcaacgggguguggaucggccgcaccaagagcaaccggcugcgcaagggguucgagaugaucugggaccccaacggcuggaccgacaccgacuccgacuucagcgucaagcaggacgugguggccaucacggacugguccggguacagcggcagcuucguccagcaccccgagcucaccggccuggacugcauccggcccugcuucuggguggagcugguccgcgggcucccgaaggagaacaccaccaucuggacguccggcagcuccaucagcuucugcggggugaacuccgacaccgccaacuggagcuggcccgacggcgccgagcugcccuucaccaucgacaaguga

SEQ ID NO: 79150 - RNA, 1410 nt, Artificial Sequence
  derived and/or modified CDS sequence (opt1) from neuraminidase__InfluenzaA__ABG37409
augaaccccaaccagaagaucaucaccaucggcagcgugucccugaccaucgccacgaucugcuuccucaugcagaucgucauccuggugaccaccgugacccugcacuucaagcaguacgagugcaacagcccgcccaacaaccaggucaugcccugcgagcccacgaucaucgagcgcaacaucaccgagaucguguaccucaccaacaccacgaucgagaaggagaucugcccgaagcuggccgaguaccggaacugguccaagccccagugcaacaucaccggguucgcgcccuucagcaaggacaacuccauccgccugagcgccggcggggacaucugggugacccgggagcccuacgucuccugcgacccggacaagugcuaccaguucgcccucggccaggggaccacgcugaacaacggccacagcaacgacaccgugcacgaccgcacccccuaccggacccugcucaugaacgagcugggcgugcccuuccaccuggggacgaagcaggucugcaucgccugguccagcuccagcugccacgacggcaaggccuggcuccacgugugcgugaccggggacgacgagaacgcgaccgccuccuucaucuacaacggccgccuggucgacagcaucggguccuggagcaagaagauccugcggacccaggaguccgagugcgugugcaucaacggcacgugcaccguggucaugaccgacggcagcgccuccgggaaggccgacaccaagauccucuucaucgaggagggcaagaucgugcacacgagccugcugagcggguccgcgcagcacguggaggagugcagcugcuacccccgcuacccgggcguccggugcgugugccgcgacaacuggaagggcuccaaccggcccaucguggacaucaacgucaaggacuacagcaucguguccagcuacgugugcuccgggcucgucggcgacacgccccgcaagaacgacagcuccagcuccagccacugccuggaccccaacaacgaggagggcgggcacggggugaagggcugggccuucgacgaccggaacgacgucuggaugggccgcaccaucuccgagaagcugcggagcggguacgagaccuucaaggugaucgagggcugguccaagccgaacagcaagcuccagaucaaccgccaggugaucgucgaccgggggaaccgcuccggcuacagcgggaucuucuccguggagggcaagagcugcaucaaccggugcuucuacguggagcugauccgcggccggaagcaggagaccgagguccuguggaccagcaacuccaucgugguguucugcgggaccagcggcaccuacgggacgggcuccuggcccgacggggccgacaucaaccucaugcccaucuga

SEQ ID NO: 79151 - RNA, 1410 nt, Artificial Sequence
  derived and/or modified CDS sequence (opt1) from neuraminidase__InfluenzaA__ABG37442
augaaccccaaccagaagaucaucaccaucggcagcgugucccugaccaucgccacgaucugcuuccucaugcagaucgccauccuggucaccaccgugacccugcacuucaagcaguucgagugcaacagcccgcccaacaaccaggugaugcucugcgagcccacgaucaucgaggggaacaucaccgagaucgucuaccugaccaacaccacgaucgagaaggagaucugccccaagcuggcggaguaccgcaacugguccaagccgcagugcaacaucaccggcuucgcccccuucagcaaggacaacuccauccggcucagcgccgggggcgacaucugggugacccgcgagcccuacguguccugcgaccccgacaagugcuaccaguucgcccuggggcagggcaccacgcugaacaacggccacagcaacgacaccguccacgaccggaccccguaccgcacccuccugaugaacgagcugggggugcccuuccaccucggcacgcgccaggugugcaucgccugguccagcuccagcugccacgacgggaaggcguggcugcacgucugcgugaccggcgacgacgagaacgccaccgccuccuucaucuacaacgggcggcugguggacagcaucggcuccuggagcaagaagauccuccggacccaggaguccgagugcgucugcaucaacggcacgugcaccguggugaugaccgacgggagcgccuccggcaaggcggacaccaagauccuguucaucgaggaggggaagaucguccacaucagcacgcugagcggcuccgcccagcacguggaggagugcagcugcuacccccgcuaccccggcgugcggugcgucugccgcgacaacuggaagggguccaaccggccgaucguggacaucaacgugaaggacuacagcaucgucuccagcuacgugugcuccggccucgugggggacacgccccgcaagaacgacagcuucuccagcucccacugccuggaccccaacaacgaggagggcgggcacggcgucaagggcugggccuucgacgacgggaacgacguguggaugggccggaccaucagcgagaagcugcgcuccggguacgagaccuucaaggucaucgagggcuggagcaagcccaacuccaagcuccagaccaaccgccaggugaucguggagcgggggaaccggagcggcuacuccggcaucuucagcgucgaggggaaguccugcaucaaccgcugcuucuacguggagcugauccggggccgcaaggaggagaccgaggugugguggaccagcaacagcaucgucguguucugcgggaccuccggcacguacgggaccggcagcuggccggacggcgccgacaucaaccugaugcccaucuga

SEQ ID NO: 79152 - RNA, 1410 nt, Artificial Sequence; identical to SEQ ID NO: 78178
  derived and/or modified CDS sequence (opt1) from neuraminidase__InfluenzaA__ABG37453

SEQ ID NO: 79153 - RNA, 1410 nt, Artificial Sequence; identical to SEQ ID NO: 78190
  derived and/or modified CDS sequence (opt1) from neuraminidase__InfluenzaA__ABG37464

SEQ ID NO: 79154 - RNA, 1410 nt, Artificial Sequence
  derived and/or modified CDS sequence (opt1) from neuraminidase__InfluenzaA__ABG37475
augaaccccaaccagaagaucaucaccaucggcagcgugucccugaccaucgccacgaucugcuuccucaugcagaucgccauccuggucaccaccgugacccugcacuucaagcaguacgagugcaacagcccgcccaacaaccaggugaugcucugcgagcccacgaucaucgagcgcaacaucaccgagaucgucuaccugaccaacaccacgaucgagaaggagaucugccccaagcuggcggaguaccggaacugguccaagccgcagugcaacaucaccggguucgcccccuucagcaaggacaacuccauccgccucagcgccggcggggacaucugggugacccgggagcccuacguguccugcgaccccgacaagugcuaccaguucgcccugggccaggggaccacgcugaacaacggccacagcaacgacaccguccacgaccgcaccccguaccggacccuccugaugaacgagcugggcgugcccuuccaccucgggacgcgccaggugugcaucgccugguccagcuccagcugccacgacggcaaggcguggcugcacgucugcgugaccggggacgacgagaacgccaccgccuccuucaucuacaacggccggcugguggacagcaucggguccuggagcaagaagauccuccgcacccaggaguccgagugcgucugcaucaacggcacgugcaccguggugaugaccgacggcagcgccuccgggaaggcggacaccaagauccuguucaucgaggagggcaagaucguccacaucagcacgcugagcggguccgcccagcacguggaggagugcagcugcuacccccgguaccccggcgugcgcugcgucugccgggacaacuggaagggcuccaaccgcccgaucguggacaucaacgugaaggacuacagcaucgucuccagcuacgugugcuccgggcucgugggcgacacgccccggaagaacgacagcuucuccagcucccacugccuggaccccaacaacgaggagggcgggcacggggucaagggcugggccuucgacgacggcaacgacguguggauggggcgcaccaucagcgagaagcugcgguccggcuacgagaccuucaaggucaucgagggguggagcaagcccaacuccaagcuccagaucaaccgccaggugaucguggagcggggcgaccgcagcggguacuccggcaucuucagcgucgagggcaaguccugcaucaaccggugcuucuacguggagcugauccgcgggcggaaggaggagaccgaggugcuguggaccagcaacagcaucgucguguucugcggcaccuccgggaccuacggcacggggagcuggccggacggcgccgacaucaaccucaugcccaucuga

SEQ ID NO: 79155 - RNA, 1410 nt, Artificial Sequence
  derived and/or modified CDS sequence (opt1) from neuraminidase__InfluenzaA__ABG37486
augaaccccaaccagaagaucaucaccaucggcagcgugucccugaccaucgccacgaucugcuuccucaugcagaucgccauccuggucaccaccgugacccugcacuucaagcaguacgagugcaacagcccgcccaacaaccaggugaugcucugcgagcccacgaucaucgagcgcaacaucaccgagaucgucuaccugaccaacaccacgaucgagaaggagaucugccccaagcuggcggaguaccggaacugguccaagccgcagugcaaccucaccggguucgcccccuucagcaaggacaacuccauccgccugagcgccggcggggacaucugggugacccgggagcccuacguguccugcgaccccgacaagugcuaccaguucgcccugggccaggggaccacgcucaacaacggccacagcaacgacaccguccacgaccgcaccccguaccggacccugcugaugaacgagcucggcgugcccuuccaccuggggacgcgccaggugugcaucgccugguccagcuccagcugccacgacggcaaggcguggcugcacgucugcgugaccggggacgacgagaacgccaccgccuccuucaucuacaacggccggcucguggacagcaucggguccuggagcaagaagauccugcgcacccaggaguccgagugcgucugcaucaacggcacgugcaccguggugaugaccgacggcagcgccuccgggaaggcggacaccaagauccuguucaucgaggagggcaagaucguccacaucagcacgcucagcggguccgcccagcacguggaggagugcagcugcuacccccgguaccccggcgugcgcugcgucugccgggacaacuggaagggcuccaaccgcccgaucguggacaucaacgugaaggacuacagcaucgucuccagcuacgugugcuccgggcuggugggcgacacgccccggaagaacgacagcuucuccagcucccacugccuggaccccaacaacgaggagggcgggcacggggucaagggcugggccuucgacgacggcaacgacguguggauggggcgcaccaucagcgagaagcuccgguccggcuacgagaccuucaaggucaucgagggguggagcaagcccaacuccaagcugcagaccaaccgccaggugaucguggagcggggcaaccgcagcggguacuccggcaucuucagcgucgagggcaaguccugcaucaaccggugcuucuacguggagcugauccgcgggcggaaggaggagaccgaggugugguggaccagcaacagcaucgucguguucugcggcaccuccgggacguacggcaccgggagcuggccggacggcgccgacaucaaccucaugcccaucuga

SEQ ID NO: 79156 - RNA, 1410 nt, Artificial Sequence
  derived and/or modified CDS sequence (opt1) from neuraminidase__InfluenzaA__ABG37497
augaaccccaaccagaagaucaucaccaucggcagcgugucccugaccaucgccacgaucugcuuccucaugcagaucgccauccuggucaccaccgugacccugcacuucaagcaguacgagugcaacagcccgcccaacaaccaggugaugcucugcgagcccacgaucaucgagcgcaacaucaccgagaucgucuaccugaccaacaccacgaucgagaaggagaucugccccaagcuggcggaguaccggaacugguccaagccgcagugcaacaucaccggguucgcccccuucagcaaggacaacuccauccgccucagcgccggcggggacaucugggugacccgggagcccuacguguccugcgaccccgacaagugcuaccaguucgcccugggccaggggaccacgcugaacaacggccacagcaacgacaccguccacgaccgcaccccguaccggacccuccugaugaacgagcugggcgugcccuuccaccucgggacgcgccaggugugcaucgccugguccagcuccagcugccacgacggcaaggcguggcugcacgucugcgugaccggggacgacgagaacgccaccgccuccuucaucuacaacggccggcugguggacagcaucggguccuggagcaagaagauccuccgcacccaggaguccgagugcgucugcaucaacggcacgugcaccguggugaugaccgacggcagcgccuccgggaaggcggacaccaagaucaucuucaucgaggagggcaagaucguccacaucagcacgcugagcggguccgcccagcacguggaggagugcagcugcuacccccgguaccccggcgugcgcugcgucugccgggacaacuggaagggcuccaaccgcccgaucguggacaucaacgugaaggacuacagcaucgucuccagcuacgugugcuccgggcuggugggcgacacgccccggaagaacgacagcuucuccagcucccacugccucgaccccaacaacgaggagggcgggcacggggucaagggcugggccuucgacgacggcaacgacguguggauggggcgcaccaucagcgagaagcugcgguccggcuacgagaccuucaaggucaucgagggguggagcaagcccaacuccaagcugcagaccaaccgccaggugaucguggagcggggcaaccgcagcggguacuccggcaucuucagcgucgagggcaaguccugcaucaaccggugcuucuacguggagcucauccgcgggcggaaggaggagaccgaggugugguggaccagcaacagcaucgucguguucugcggcaccuccgggacguacggcaccgggagcuggccggacggcgccgacaucaaccugaugcccaucuga

SEQ ID NO: 79157 - RNA, 1410 nt, Artificial Sequence; identical to SEQ ID NO: 78204
  derived and/or modified CDS sequence (opt1) from neuraminidase__InfluenzaA__ABG37508

SEQ ID NO: 79158 - RNA, 1410 nt, Artificial Sequence; identical to SEQ ID NO: 78615
  derived and/or modified CDS sequence (opt1) from neuraminidase__InfluenzaA__ABG37519

SEQ ID NO: 79159 - RNA, 1410 nt, Artificial Sequence; identical to SEQ ID NO: 78615
  derived and/or modified CDS sequence (opt1) from neuraminidase__InfluenzaA__ABG37530

SEQ ID NO: 79160 - RNA, 1410 nt, Artificial Sequence; identical to SEQ ID NO: 78615
  derived and/or modified CDS sequence (opt1) from neuraminidase__InfluenzaA__ABG37541

SEQ ID NO: 79161 - RNA, 1410 nt, Artificial Sequence; identical to SEQ ID NO: 78615
  derived and/or modified CDS sequence (opt1) from neuraminidase__InfluenzaA__ABG37552

SEQ ID NO: 79162 - RNA, 1410 nt, Artificial Sequence; identical to SEQ ID NO: 78615
  derived and/or modified CDS sequence (opt1) from neuraminidase__InfluenzaA__ABG37563

SEQ ID NO: 79163 - RNA, 1410 nt, Artificial Sequence; identical to SEQ ID NO: 78615
  derived and/or modified CDS sequence (opt1) from neuraminidase__InfluenzaA__ABG37585

SEQ ID NO: 79164 - RNA, 1410 nt, Artificial Sequence; identical to SEQ ID NO: 78615
  derived and/or modified CDS sequence (opt1) from neuraminidase__InfluenzaA__ABG37596

SEQ ID NO: 79165 - RNA, 1410 nt, Artificial Sequence; identical to SEQ ID NO: 78615
  derived and/or modified CDS sequence (opt1) from neuraminidase__InfluenzaA__ABG37607

SEQ ID NO: 79166 - RNA, 1410 nt, Artificial Sequence; identical to SEQ ID NO: 78615
  derived and/or modified CDS sequence (opt1) from neuraminidase__InfluenzaA__ABG37618

SEQ ID NO: 79167 - RNA, 1413 nt, Artificial Sequence; identical to SEQ ID NO: 78852
  derived and/or modified CDS sequence (opt1) from neuraminidase__InfluenzaA__ABG47810

SEQ ID NO: 79168 - RNA, 1413 nt, Artificial Sequence
  derived and/or modified CDS sequence (opt1) from neuraminidase__InfluenzaA__ABG47832
augaaccccaaccagaagaucaucaccaucggcagcaucuccaucgccaucgggaucaucagccugauccuccaggugggcaacaucaucuccaucugggccagccacuccauccagaccgggagccagaaccacacgggcaucugcaaccagcgcaucaucaccuacgagaacuccaccugggucaaccagaccuacgugaacaucaacaacacgaacguggucgcggggaaggacaagaccagcaugacccuggccggcaacuccagccugugcccgauccggggcugggccaucuacaccaaggacaacuccauccgcaucgggagcaagggcgacguguucgugauccgggagcccuucaucuccugcagccaccucgagugccgcacguucuuccugacccagggggcccugcucaacgacaagcacuccaacggcaccgucaaggaccggagccccuaccgcgcccugauguccugcccccugggggaggcgccgagccccuacaacucccgguucgagagcguggccuggagcgccuccgccugccacgacggccucggcuggcugaccaucgggaucagcggccccgacaacggggcgguggccguccugaaguacaacggcaucaucacggagaccaucaaguccuggaagaagcgcauccuccggacccaggagagcgagugcgugugcaugaacggcuccugcuucaccaucaugacggacgggcccagcaacggcgccgccuccuaccgcaucuucaagaucgagaaggggcgggugaccaagagcaucgagcuggacgccccgaacuaccacuacgaggagugcuccugcuaccccaacaccggcaccgucaugugcgugugccgcgacaacuggcacgggagcaaccggcccuggguguccuucaaccagaaccuggacuaccagaucggcuacaucugcagcggcgucuucggggacaacccccgcccgaaggacggcgagggguccugcaaccccgugacgguggacggcgcggacggggucaagggcuucagcuaccgguacggcaacgggguguggaucggccgcaccaaguccaaccggcuccgcaagggguucgagaugaucugggaccccaacggcuggaccgacaccgacagcgacuucuccaugaagcaggacaucguggccaugacggacuggagcggguacuccggcagcuucguccagcaccccgagcugaccggccuggacugcaugcggccgugcuucuggguggagcucgugcgcgggcugccccgggagaacaccaccaucuggacgagcggcuccagcaucuccuucugcggggucaacagcgacaccgccaacugguccuggcccgacggcgccgagcugcccuucaccaucgacaaguga

SEQ ID NO: 79169 - RNA, 1413 nt, Artificial Sequence; identical to SEQ ID NO: 78992
  derived and/or modified CDS sequence (opt1) from neuraminidase__InfluenzaA__ABG47843

SEQ ID NO: 79170 - RNA, 1410 nt, Artificial Sequence
  derived and/or modified CDS sequence (opt1) from neuraminidase__InfluenzaA__ABG47865
augaaccccaaccagaagaucaucaccaucggcagcgugucccugaccaucgccacgaucugcuuccucaugcagaucgccauccuggucaucaccgugacccugcacuucaagcaguacgagugcaacagcccgcccaacaaccaggugaugcucugcgagcccaccaucaucgagcgcaacaucacggagaucgucuaccugaccaacaccaccaucgagaaggagaucugccccaagcuggcggaguaccggaacugguccaagccgcagugcaagaucacgggguucgcccccuucagcaaggacaacuccauccgccucagcgccggcggggacaucugggugacccgggagcccuacguguccugcgaccccgacaagugcuaccaguucgcccugggccaggggaccacccugaacaaccgccacagcaacgacacgguccacgaccggaccccguaccgcacccuccugaugaacgagcugggcgugcccuuccaccucggcaccaagcaggucugcaucgccugguccagcuccagcugccacgacgggaaggcguggcugcacgugugcgugacgggccacgacgagaacgccaccgccuccuucaucuacgacgggcggcugguggacagcaucggcuccuggagcaagaagauccuccgcacccaggaguccgagugcgucugcaucaacgggaccugcacgguggugaugaccgacggcagcgccuccggccgggcggacaccaagauccuguucaucgaggaggggaagaucguccacaucagcccccugagcggcuccgcccagcacguggaggagugcagcugcuacccccgcuacuccggggugcggugcgucugccgcgacaacuggaagggcagcaaccggccgaucguggacaucaacgugaaggacuacuccaucgucagcuccuacgugugcagcggccucgugggggacacgccccgcaagaacgacuccagcuccagcucccacugccugaaccccaacaacgaggagggcgggcacggcgucaaggggugggccuucgacgacggcaacgacguguggaugggccggaccaucagcgagaagcugcgcuccggguacgagaccuucaaggucaucggcggguggagcaagcccaacuccaagcuccagaucaaccgccaggugaucguggaccggggcaaccggagcggguacuccggcaucuucagcgucgagggcaagagcugcaucaaccgcugcuucuacguggagcugauccgggggcgcaagcaggagaccgaggugugguggaccuccaacagcaucgucguguucugcggcacguccgggaccuacggcaccgggagcuggccggacggcgccgacaucaaccugaugcccaucuga

SEQ ID NO: 79171 - RNA, 1410 nt, Artificial Sequence; identical to SEQ ID NO: 79137
  derived and/or modified CDS sequence (opt1) from neuraminidase__InfluenzaA__ABG47876

SEQ ID NO: 79172 - RNA, 1410 nt, Artificial Sequence; identical to SEQ ID NO: 79137
  derived and/or modified CDS sequence (opt1) from neuraminidase__InfluenzaA__ABG47887

SEQ ID NO: 79173 - RNA, 1410 nt, Artificial Sequence; identical to SEQ ID NO: 79124
  derived and/or modified CDS sequence (opt1) from neuraminidase__InfluenzaA__ABG47898

SEQ ID NO: 79174 - RNA, 1410 nt, Artificial Sequence; identical to SEQ ID NO: 79137
  derived and/or modified CDS sequence (opt1) from neuraminidase__InfluenzaA__ABG47909

SEQ ID NO: 79175 - RNA, 1410 nt, Artificial Sequence; identical to SEQ ID NO: 79125
  derived and/or modified CDS sequence (opt1) from neuraminidase__InfluenzaA__ABG47920

SEQ ID NO: 79176 - RNA, 1410 nt, Artificial Sequence; identical to SEQ ID NO: 79125
  derived and/or modified CDS sequence (opt1) from neuraminidase__InfluenzaA__ABG47931

SEQ ID NO: 79177 - RNA, 1410 nt, Artificial Sequence; identical to SEQ ID NO: 79125
  derived and/or modified CDS sequence (opt1) from neuraminidase__InfluenzaA__ABG47942

SEQ ID NO: 79178 - RNA, 1410 nt, Artificial Sequence
  derived and/or modified CDS sequence (opt1) from neuraminidase__InfluenzaA__ABG47953
augaaccccaaccagaagaucaucaccaucggcagcgugucccugaccaucgccacgaucugcuuccucaugcagaucgccauccuggucaccaccgugacccugcacuucaagcaguacgagugcaacagcccgcccuccaaccaggugaugcucugcgagcccacgaucaucgagcgcaacaucaccgagaucgucuaccugaccaacaccacgaucgagaaggagaucugccccaagcuggcggaguaccggaacuggagcaagccgcagugcaagaucaccggguucgcccccuucuccaaggacaacagcauccgccucuccgccggcggggacaucugggugacccgggagcccuacgugagcugcgaccccggcaagugcuaccaguucgcccuggggcagggcaccacgcugaacaaccgccacuccaacgacaccguccacgaccggaccccguaccgcacccuccugaugaacgagcugggcgugcccuuccaccucgggacgaagcaggucugcaucgccuggagcuccagcuccugccacgacggcaaggcguggcugcacgugugcgugaccgggcacgacgagaacgccaccgccagcuucaucuacgacggccggcugguggacuccaucgggagcugguccaagaacauccuccgcacccaggagagcgagugcgucugcaucaacggcacgugcaccguggugaugaccgacggcuccgccagcgagcgggcggacaccaagauccuguucaucgaggaggggaagaucguccacaucagcccccuguccggcagcgcccagcacguggaggagugcuccugcuacccccgcuacccgggggugcggugcgucugccgcgacaacuggaagggcagcaaccggcccaucguggacaucaacgugaaggacuacuccaucgucagcuccuacgugugcagcggccucgugggggacacgccccgcaagaacgacuccagcuccagcuccuacugccggaaccccaacaacgagaagggcagccacggggucaagggcugggccuucgacgacgggaacgacguguggaugggccgcaccaucuccgaggagcugcggagcggcuacgagaccuucaaggucaucgggggcugguccaagccgaacagcaagcugcagaucaaccgccaggugaucguggaccgggggaaccgcuccggcuacagcgggaucuucagcgucgagggcaaguccugcaucaaccggugcuucuacguggagcucauccgcggccgcaagcaggagaccgaggugugguggacgagcaacuccaucgucguguucugcgggaccagcggcaccuacgggaccggcuccuggcccgacggggccaacaucaaccugaugcccaucuga

SEQ ID NO: 79179 - RNA, 1410 nt, Artificial Sequence
  derived and/or modified CDS sequence (opt1) from neuraminidase__InfluenzaA__ABG47964
augaaccccaaccagaagaucaucaccaucggcagcgugucccugaccaucgccacgaucugcuuccucaugcagaucgccauccuggucaccaccgugacccugcacuucaagcaguacgagugcaacagcccgcccaacaaccaggugaugcucugcgagcccacgaucaucgagcgcaacaucaccgagaucgucuaccugaccaacaccacgaucgagaaggagaucugccccaagcuggcggaguaccggaacugguccaagccgcagugcaagaucaccggguucgcccccuucagcaaggacaacuccauccgccucagcgccggcggggacaucugggugacccgggagcccuacguguccugcgaccccggcaagugcuaccaguucgcccuggggcagggcaccacgcugaacaaccgccacagcaacgacaccguccacgaccggaccccguaccgcacccuccugaugaacgagcugggcgugcccuuccaccucgggacgaagcaggucugcaucgccugguccagcuccagcugccacgacggcaaggcguggcugcacgugugcgugaccgggcacgacgagaacgccaccgccuccuucaucuacgacggccggcugguggacagcaucggguccuggagcaagaacauccuccgcacccaggaguccgagugcgucugcaucaacggcacgugcaccguggugaugaccgacggcagcgccuccgagcgggcggacaccaagauccuguucaucgaggaggggaagaucguccacaucagcccccugagcggcuccgcccagcacguggaggagugcagcugcuacccccgcuacccgggggugcggugcgucugccgcgacaacuggaagggcuccaaccggcccaucguggacaucaacgugaaggacuacagcaucgucuccagcuacgugugcuccggccucgugggggacacgccccgcaagaacgacagcuccagcuccagcuacugccagaaccccaacaacgagaagggcucccacggggucaagggcugggccuucgacgacgggaacgacguguggaugggccggaccaucagcgaggagcugcgcuccggcuacgagaccuucaaggucaucgggggcuggagcaagccgaacuccaagcugcagaucaaccgccaggugaucguggaccgggggaaccggagcggcuacuccgggaucuucagcgucgagggcaagagcugcaucaaccgcugcuucuacguggagcucauccggggccgcaagcaggagaccgaggugugguggacguccaacagcaucgucguguucugcgggaccuccggcaccuacgggaccggcagcuggcccgacggggccgacaucaaccugaugcccaucuga

SEQ ID NO: 79180 - RNA, 1410 nt, Artificial Sequence
  derived and/or modified CDS sequence (opt1) from neuraminidase__InfluenzaA__ABG47975
augaaccccaaccagaagaucaucaccaucggcagcgugucccugaccaucgccacgaucugcuuccucaugcagaucgccauccuggucaccaccgugacccugcacuucaagcaguacgagugcaacagcccgcccuccaaccaggugaugcucugcgagcccacgaucaucgagcgcaacaucaccgagaucgucuaccugaccaacaccacgaucgagaaggagaucugccccaagcuggcggaguaccggaacuggagcaagccgcagugcaagaucaccggguucgcccccuucuccaaggacaacagcauccgccucuccgccggcggggacaucugggugacccgggagcccuacgugagcugcgaccccggcaagugcuaccaguucgcccuggggcagggcaccacgcugaacaaccgccacuccaacgacaccguccacgaccggaccccguaccgcacccuccugaugaacgagcugggcgugcccuuccaccucgggacgaagcaggucugcaucgccuggagcuccagcuccugccacgacggcaaggcguggcugcacgugugcgugaccgggcacgacgagaacgccaccgccagcuucaucuacgacggccggcugguggacuccaucgggagcugguccaagaacauccuccgcacccaggagagcgagugcgucugcaucaacggcacgugcaccguggugaugaccgacggcuccgccagcgagcgggcggacaccaagauccuguucaucgaggaggggaagaucguccacaucagcccccuguccggcagcgcccagcacguggaggagugcuccugcuacccccgcuacccgggggugcggugcgucugccgcgacaacuggaagggcagcaaccggcccaucguggacaucaacgugaaggacuacuccaucgucagcuccuacgugugcagcggccucgugggggacacgccccgcaagaacgacuccagcuccagcuccuacugccgggaccccaacaacgagcgcggcagccacggggucaagggcugggccuucgacgacgggaacgacguguggaugggccggaccaucuccgaggagcugcgcagcggcuacgagaccuucaaggucaucgggggcugguccaagccgaacagcaagcugcagaucaaccgccaggugaucguggaccgggggaaccgguccggcuacagcgggaucuucagcgucgagggcaaguccugcaucaaccgcugcuucuacguggagcucauccgcggccggaagcaggagaccgaggugugguggacgagcaacuccaucgucguguucugcgggaccagcggcaccuacgggaccggcuccuggcccgacggggccgacaucaaccugaugcccaucuga

SEQ ID NO: 79181 - RNA, 1410 nt, Artificial Sequence
  derived and/or modified CDS sequence (opt1) from neuraminidase__InfluenzaA__ABG47986
augaaccccaaccagaagaucaucaccaucggcagcgugucccugaccaucgccacgaucugcuuccucaugcagaucgccauccuggucaccaccgugacccugcacuucaagcaguacgagugcaacagcccgcccuccaaccaggugaugcucugcgagcccacgaucaucgagcgcaacaucaccgagaucgucuaccugaccaacaccacgaucgagaaggagaucugccccaagcuggcggaguaccggaacuggagcaagccgcagugcaagaucaccggguucgcccccuucuccaaggacaacagcauccgccucuccgccggcggggacaucugggugacccgggagcccuacgugagcugcgaccccggcaagugcuaccaguucgcccuggggcagggcaccacgcugaacaaccgccacuccaacgacaccguccacgaccggaccccguaccgcacccuccugaugaacgagcugggcgugcccuuccaccucgggacgaagcaggucugcaucgccuggagcuccagcuccugccacgacggcaaggcguggcugcacgugugcgugaccgggcacgacgagaacgccaccgccagcuucaucuacgacggccggcugguggacuccaucgggagcugguccaagaacauccuccgcacccaggagagcgagugcgucugcaucaacggcacgugcaccguggugaugaccgacggcuccgccagcgagcgggcggacaccaagauccuguucaucgaggaggggaagaucguccacaucagcccccuguccggcagcgcccagcacguggaggagugcuccugcuacccccgcuacccgggggugcggugcgucugccgcgacaacuggaagggcagcaaccggcccaucguggacaucaacgugaaggacuacuccaucgucagcuccuacgugugcagcggccucgugggggacacgccccgcaagaacgacuccagcuccagcuccuacugccggaagcccaacaacgagaagggcagccacggggucaagggcugggccuucgacgacgggaacgacguguggaugggccgcaccaucuccgaggagcugcggagcggcuacgagaccuucaaggucaucgggggcugguccaagccgaacagcaagcugcagaucaaccgccaggugaucguggaccgggggaaccgcuccggcuacagcgggaucuucagcgucgagggcaaguccugcaucaaccggugcuucuacguggagcucauccgcggccgcaagcaggagaccgaggugugguggacgagcaacuccaucgucguguucugcgggaccagcggcaccuacgggaccggcuccuggcccgacggggccgacaucaaccugaugcccaucuga

SEQ ID NO: 79182 - RNA, 1410 nt, Artificial Sequence; identical to SEQ ID NO: 79125
  derived and/or modified CDS sequence (opt1) from neuraminidase__InfluenzaA__ABG47997

SEQ ID NO: 79183 - RNA, 1410 nt, Artificial Sequence
  derived and/or modified CDS sequence (opt1) from neuraminidase__InfluenzaA__ABG48008
augaaccccaaccagaagaucaucaccaucggcagcgugucccugaccaucgccacgaucugcuuccucaugcagaucgccauccuggucaccaccgugacccugcacuucaagcaguacgagugcaacagcccgcccuccaaccaggugaugcucugcgagcccacgaucaucgagcgcaacaucaccgagaucgucuaccugaccaacaccacgaucgagaaggagaucugccccaagcuggcggaguaccggaacuggagcaagccgcagugcaagaucaccggguucgcccccuucuccaaggacaacagcauccgccucuccgccggcggggacaucugggugacccgggagcccuacgugagcugcgaccccggcaagugcuaccaguucgcccuggggcagggcaccacgcugaacaaccgccacuccaacgacaccguccacgaccggaccccguaccgcacccuccugaugaacgagcugggcgugcccuuccaccucgggacgaagcaggucugcaucgccuggagcuccagcuccugccacgacggcaaggcguggcugcacgugugcgugaccgggcacgacgagaacgccaccgccagcuucaucuacgacggccggcugguggacuccaucgggagcugguccaagaacauccuccgcacccaggagagcgagugcgucugcaucaacggcacgugcaccguggugaugaccgacggcuccgccagcgagcgggcggacaccaagauccuguucaucgaggaggggaagaucguccacaucagcccccuguccggcagcgcccagcacguggaggagugcuccugcuacccccgcuacccgggggugcggugcgucugccgcgacaacuggaagggcagcaaccggcccaucguggacaucaacgugaaggacuacuccaucgucagcuccuacgugugcagcggccucgugggggacacgccccgccggaacgacuccagcuccagcuccuacugccgcaagcccaacaacgagaagggcagccacggggucaagggcugggccuucgacgacgggaacgacguguggaugggccggaccaucuccgaggagcugcgcagcggcuacgagaccuucaaggucaucgggggcugguccaagccgaacagcaagcugcagaucaaccgccaggugaucguggaccgggggaaccgguccggcuacagcgggaucuucagcgucgagggcaaguccugcaucaaccgcugcuucuacguggagcucauccgcggccggaagcaggagaccgaggugugguggacgagcaacuccaucgucguguucugcgggaccagcggcaccuacgggaccggcuccuggcccgacggggccgacaucaaccugaugcccaucuga

SEQ ID NO: 79184 - RNA, 1410 nt, Artificial Sequence
  derived and/or modified CDS sequence (opt1) from neuraminidase__InfluenzaA__ABG48019
augaaccccaaccagaagaucaucaccaucggcagcgugucccugaccaucgccacgaucugcuuccucaugcagaucgccauccuggucaccaccgugacccugcacuucaagcaguacgagugcaacagcccgcccuccaaccaggugaugcucugcgagcccacgaucaucgagcgcaacaucaccgagaucgucuaccugaccaacaccacgaucgagaaggagaucugccccaagcuggcggaguaccggaacuggagcaagccgcagugcaagaucaccggguucgcccccuucuccaaggacaacagcauccgccucuccgccggcggggacaucugggugacccgggagcccuacgugagcugcgaccccggcaagugcuaccaguucgcccuggggcagggcaccacgcugaacaaccgccacuccaacgacaccguccacgaccggaccccguaccgcacccuccugaugaacgagcugggcgugcccuuccaccucgggacgaagcaggucugcaucgccuggagcuccagcuccugccacgacggcaaggcguggcugcacgugugcgugaccgggcacgacgagaacgccaccgccagcuucaucuacgacggccggcugguggacuccaucgggagcugguccaagaacauccuccgcacccaggagagcgagugcgucugcaucaacggcacgugcaccguggugaugaccgacggcuccgccagcgagcgggcggacaccaagauccuguucaucgaggaggggaagaucguccacaucagcccccuguccggcagcgcccagcacguggaggagugcuccugcuacccccgcuacccgggggugcggugcgccugccgcgacaacuggaagggcagcaaccggcccaucgucgacaucaacgugaaggacuacuccaucgugagcuccuacgucugcagcggccucgugggggacacgccccgcaagaacgacuccagcuccagcuccuacugccggaaccccaacaacgagaagggcagccacggggugaagggcugggccuucgacgacgggaacgacgucuggaugggccgcaccaucuccgaggagcugcggagcggcuacgagaccuucaaggugaucgggggcugguccaagccgaacagcaagcugcagaucaaccgccaggucaucguggaccgggacaaccgcuccggguacagcggcaucuucagcguggaggggaaguccugcaucaaccggugcuucuacgucgagcucauccgcggccgcaagcaggagaccgaggugugguggacgagcaacuccaucguggucuucugcggcaccagcgggaccuacggcaccggguccuggcccgacggcgccgacaucaaccugaugcccaucuga

SEQ ID NO: 79185 - RNA, 1410 nt, Artificial Sequence; identical to SEQ ID NO: 79125
  derived and/or modified CDS sequence (opt1) from neuraminidase__InfluenzaA__ABG48030

SEQ ID NO: 79186 - RNA, 1410 nt, Artificial Sequence; identical to SEQ ID NO: 79125
  derived and/or modified CDS sequence (opt1) from neuraminidase__InfluenzaA__ABG48041

SEQ ID NO: 79187 - RNA, 1413 nt, Artificial Sequence; identical to SEQ ID NO: 78852
  derived and/or modified CDS sequence (opt1) from neuraminidase__InfluenzaA__ABG48052

SEQ ID NO: 79188 - RNA, 1410 nt, Artificial Sequence; identical to SEQ ID NO: 78754
  derived and/or modified CDS sequence (opt1) from neuraminidase__InfluenzaA__ABG48063

SEQ ID NO: 79189 - RNA, 1410 nt, Artificial Sequence; identical to SEQ ID NO: 78877
  derived and/or modified CDS sequence (opt1) from neuraminidase__InfluenzaA__ABG48074

SEQ ID NO: 79190 - RNA, 1410 nt, Artificial Sequence; identical to SEQ ID NO: 78178
  derived and/or modified CDS sequence (opt1) from neuraminidase__InfluenzaA__ABG48085

SEQ ID NO: 79191 - RNA, 1410 nt, Artificial Sequence
  derived and/or modified CDS sequence (opt1) from neuraminidase__InfluenzaA__ABG48107
augaaccccaaccagaagaucaucaccaucggcagcgugucccugaccaucgccacgaucugcuuccucaugcagaucgccauccuggucaccaccgugacccugcacuucaagcaguacgagugcaacagcccgcccaacaaccaggugaugcucugcgagcccacgaucaucgagcgcaacaucaccgagaucgucuaccugaccaacaccacgaucgagaaggagaucugccccaagcuggcggaguaccggaacugguccaagccgcagugcaacaucaccggguucgcccccuucagcaaggacaacuccauccgccucagcgccggcggggacaucugggugacccgggagcccuacguguccugcgaccccgacaagugcuaccaguucgcccugggccaggggaccacgcugaacaacggccacagcaacgacaccguccacgaccgcaccccguaccggacccuccugaugaacgagcugggcgugcccuuccaccucgggacgcgccaggugugcaucgccugguccagcuccagcugccacgacggcaaggcguggcugcacgucugcgugaccggggacgacgagaacgccaccgccuccuucaucuacaacggccggcugguggacagcaucggguccuggagcaagaagacccuccgcacgcaggaguccgagugcgucugcaucaacgggaccugcaccguggugaugaccgacggcagcgccuccgggaaggcggacacgaagauccuguucaucgaggagggcaagaucguccacaucagcacccugagcggguccgcccagcacguggaggagugcagcugcuacccccgguaccccggcgugcgcugcgucugccgggacaacuggaagggcuccaaccgcccgaucguggacaucaacgugaaggacuacagcaucgucuccagcuacgugugcuccgggcucgugggcgacacgccccggaagaacgacagcuucuccagcucccacugccuggaccccaacaacgaggagggcggccacggggucaagggcugggccuucgacgacggcaacgacguguggauggggcgcaccaucagcgagaagcugcgguccggcuacgagaccuucaaggucaucgagggguggagcaagcccaacuccaagcuccagaucaaccgccaggugaucguggagcggggcaaccgcagcggguacuccggcaucuucagcgucgagggcaaguccugcaucaaccggugcuucuacguggagcugauccgcgggcggaaggaggagaccgaggugugguggaccagcaacagcaucgucguguucugcggcaccuccgggacguacggcaccgggagcuggccggacggcgccgacaucaaccugaugcccaucuga

SEQ ID NO: 79192 - RNA, 1410 nt, Artificial Sequence; identical to SEQ ID NO: 78190
  derived and/or modified CDS sequence (opt1) from neuraminidase__InfluenzaA__ABG48118

SEQ ID NO: 79193 - RNA, 1410 nt, Artificial Sequence; identical to SEQ ID NO: 78190
  derived and/or modified CDS sequence (opt1) from neuraminidase__InfluenzaA__ABG48129

SEQ ID NO: 79194 - RNA, 1410 nt, Artificial Sequence; identical to SEQ ID NO: 78178
  derived and/or modified CDS sequence (opt1) from neuraminidase__InfluenzaA__ABG48140

SEQ ID NO: 79195 - RNA, 1410 nt, Artificial Sequence; identical to SEQ ID NO: 78190
  derived and/or modified CDS sequence (opt1) from neuraminidase__InfluenzaA__ABG48151

SEQ ID NO: 79196 - RNA, 1410 nt, Artificial Sequence; identical to SEQ ID NO: 78178
  derived and/or modified CDS sequence (opt1) from neuraminidase__InfluenzaA__ABG48173

SEQ ID NO: 79197 - RNA, 1410 nt, Artificial Sequence; identical to SEQ ID NO: 78190
  derived and/or modified CDS sequence (opt1) from neuraminidase__InfluenzaA__ABG48184

SEQ ID NO: 79198 - RNA, 1410 nt, Artificial Sequence
  derived and/or modified CDS sequence (opt1) from neuraminidase__InfluenzaA__ABG48195
augaaccccaaccagaagaucaucaccaucggcagcgugucccugaccaucgccacgaucugcuuccucaugcagaucgccauccuggucaccaccgugacccugcacuucaagcaguacgagugcaacagcccgcccaacaaccaggugaugcucugcgagcccacgaucaucgagcgcaacaucaccgagaucgucuaccugaccaacaccacgaucgagaaggagaucugccccaagcuggcggaguaccggaacugguccaagccgcagugcaacaucaccggguucgcccccuucagcaaggacaacuccauccgccucagcgccggcggggacaucugggugacccgggagcccuacguguccugcgaccccgacaagugcuaccaguucgcccugggccaggggaccacgcugaacaacggccacagcaacgacaccguccacgaccgcaccccguaccggacccuccugaugaacgagcugggcgugcccuuccaccucgggacgcgccaggugugcaucgccugguccagcuccagcugccacgacggcaaggcguggcugcacgucugcgugaccggggacgacgagaacgccaccgccuccuucaucuacaacggccggcugguggacagcaucggguccuggagcaagaagauccuccgcacccaggaguccgagugcgucugcaucaacggcacgugcaccguggugaugaccgacggcagcgccuccgggaaggcggacaccaagauccuguucaucgaggagggcaagaucguccacaucagcacgcugagcggguccgcccagcacguggaggagugcagcugcuacccccgguaccccggcgugcgcugcgucugccgggacaacuggaagggcuccaaccgcccgaucguggacaucaacgugaaggacuacagcaucgucuccagcuacgugugcuccgggcucgugggcgacacgccccggaagaacgacagcuucuccagcucccacugcaucgaccccaacaacgaggagggcgggcacggggucaagggcugggccuucgacgacggcaacgacguguggauggggcgcaccaucagcgagaagcugcgguccggcuacgagaccuucaaggucaucgagggguggagcaagcccaacuccaagcugcagaccaaccgccaggugaucguggagcggggcaaccgcagcggguacuccggcaucuucagcgucgagggcaaguccugcaucaaccggugcuucuacguggagcucauccgcgggcggaaggaggagaccgaggugugguggaccagcaacagcaucgucguguucugcggcaccuccgggacguacggcaccgggagcuggccggacggcgccgacaucaaccugaugcccaucuga

SEQ ID NO: 79199 - RNA, 1410 nt, Artificial Sequence
  derived and/or modified CDS sequence (opt1) from neuraminidase__InfluenzaA__ABG48206
augaaccccaaccagaagaucaucaccaucggcagcgugucccugaccaucgccacgaucugcuuccucaugcagaucgccauccuggucaccaccgugacccugcacuucaagcagcacgagugcaacagcccgcccaacaaccaggugaugcucugcgagcccacgaucaucgagcgcaacaucaccgagaucgucuaccugaccaacaccacgaucgagaaggagaucugccccaagcugguggaguaccggaacugguccaagccgcagugcaacaucaccggguucgcgcccuucagcaaggacaacuccauccgccucagcgccggcggggacaucugggugacccgggagcccuacgucuccugcgaccccgacaagugcuaccaguucgcccugggccaggggaccacgcugaacaacggccacagcaacgacaccgugcacgaccgcaccccguaccggacccuccugaugaacgagcugggcgugcccuuccaccucgggacgcgccaggucugcaucgccugguccagcuccagcugccacgacggcaaggccuggcugcacgugugcgugaccggggacgacaagaacgcgaccgccuccuucaucuacaacggccggcuggucgacagcaucggguccuggagcaagaagauccuccgcacccaggaguccgagugcgugugcaucaacggcacgugcaccguggucaugaccgacggcagcgccuccgggaaggccgacaccaagauccuguucaucgaggagggcaagaucgugcacaucagcacgcugagcggguccgcgcagcacguggaggagugcagcugcuacccccgguaccccggcguccgcugcgugugccgggacaacuggaagggcuccaaccgcccgaucguggacaucaacgucaaggacuacagcaucguguccagcuacgugugcuccgggcucgucggcgacacgccccggaagaacgacagcuucuccagcucccacugccuggaccccaacaacgaggagggcgggcacggggugaagggcugggccuucgacgacggcaacgacgucuggauggggcgcaccaucaacgagaagcugcggagcggcuacgagaccuucaaggugaucgaggggugguccaagcccaacagcaagcuccagaucaaccgccaggugaucgucgagcggggcaaccgcuccggguacagcggcaucuucuccguggagggcaagagcugcaucaaccggugcuucuacguggagcugauccgcgggcggaaggaggagaccgaggucugguggaccuccaacagcaucgugguguucugcggcaccagcgggaccuacggcacgggguccuggccggacggcgccgacaucaaccugaugcccaucuga

SEQ ID NO: 79200 - RNA, 1410 nt, Artificial Sequence; identical to SEQ ID NO: 78615
  derived and/or modified CDS sequence (opt1) from neuraminidase__InfluenzaA__ABG48217

SEQ ID NO: 79201 - RNA, 1410 nt, Artificial Sequence; identical to SEQ ID NO: 78615
  derived and/or modified CDS sequence (opt1) from neuraminidase__InfluenzaA__ABG48228

SEQ ID NO: 79202 - RNA, 1410 nt, Artificial Sequence; identical to SEQ ID NO: 79199
  derived and/or modified CDS sequence (opt1) from neuraminidase__InfluenzaA__ABG48239

SEQ ID NO: 79203 - RNA, 1410 nt, Artificial Sequence; identical to SEQ ID NO: 78615
  derived and/or modified CDS sequence (opt1) from neuraminidase__InfluenzaA__ABG48250

SEQ ID NO: 79204 - RNA, 1410 nt, Artificial Sequence
  derived and/or modified CDS sequence (opt1) from neuraminidase__InfluenzaA__ABG48272
augaaccccaaccagaagaucaucaccaucggcagcgugucccugaccaucagcacgaucugcuucuucaugcagaucgccauccucaucaccaccgucacccugcacuucaagcaguacgaguucaacuccccgcccaacaaccaggugaugcugugcgagcccacgaucaucgagcgcaacaucaccgagaucguguaccucaccaacaccacgaucgagaaggagaucugccccaagcuggccgaguaccggaacuggagcaagccgcagugcgacaucaccggguucgcgcccuucuccaaggacaacagcauccgccuguccgccggcggggacaucugggucacccgggagcccuacgugagcugcgaccccgacaagugcuaccaguucgcccucggccaggggaccacgcugaacaacgugcacuccaacgacaccguccacgaccgcaccccguaccggacccugcucaugaacgagcugggcgugcccuuccaccugggcacgaagcaggucugcaucgccuggagcuccagcuccugccacgacgggaaggccuggcuccacgugugcgugaccggcgacgacaagaacgcgaccgccagcuucaucuacaacgggcgccugguggacuccaucgucagcugguccaagaagauccugcggacccaggagagcgagugcgugugcaucaacggcacgugcaccguggucaugaccgacggguccgccagcggcaaggccgacaccaagauccucuucaucgaggagggcaagaucgugcacacgagcacccuguccgggagcgcgcagcacguggaggagugcuccugcuacccccgcuaccccggcguccggugcgugugccgcgacaacuggaaggggagcaaccggccgaucguggacaucaacaucaaggacuacuccaucgucagcuccuacgugugcagcggccuggugggcgacacgccccgcaagaacgacuccagcuccagcucccacugccucgaccccaacaacgaggagggcgggcacggggucaagggcugggccuucgacgacgggaacgacguguggaugggccggaccaucagcgagaagucccgcagcggcuacgagaccuucaaggucaucgaggggugguccaaccccaacagcaagcugcagaucaaccgccaggugaucguggaccggggcaaccgguccggguacagcggcaucuucagcgucgaggggaaguccugcaucaaccgcugcuucuacguggagcugauccggggccgcaaggaggagaccgaggugcucuggaccagcaacuccaucgucguguucugcggcaccagcgggacguacggcaccggguccuggccggacggcgccgacaucaaccugaugcccaucuga

SEQ ID NO: 79205 - RNA, 1410 nt, Artificial Sequence
  derived and/or modified CDS sequence (opt1) from neuraminidase__InfluenzaA__ABG48294
augaaccccaaccagaagaucaucaccaucggcagcgugucccugaccaucgccacgaucugcuuccucaugcagaucgccauccuggucaccaccgugacccugcacuucaagcaguacgagugcagcuccccgcccaacaaccaggugauccccugccagcccacgaucaucgagcgcaacaucaccgagaucgucuaccucaccaacaccacgaucgagaaggagaucugcccgaagcugguggaguaccggaacuggagcaagccccagugcaagaucaccggguucgcgcccuucuccaaggacaacagcauccgccuguccgccggcggggacaucugggugacccgggagcccuacgucagcugcgacccgggcaagugcuaccaguucgcccucgggcagggcaccacgcugaacaaccgccacuccaacgacaccgugcacgaccggacccccuaccgcacccugcucaugaacgagcugggcgugcccuuccaccuggggacgaagcaggucugcaucgccuggagcuccagcuccugccacgacggcaaggccuggcuccacgugugcgugaccgggcacgacgagaacgcgaccgccagcuucaucuacgacggccggcuggucgacuccaucgggagcuggucccgcaacauccugcggacccaggagagcgagugcgugugcaucaacggcacgugcaccguggucaugaccgacggcuccgccagcgagcgcgccgacaccaagauccucuucaucgaggaggggaagguggugcacaucagcccccuguccggcagcgcgcagcacgucgaggagugcuccugcuacccgcgguaccccggggugcgcugcgugugccgggacaacuggaagggcagcaaccgccccaucgucgacaucaacgugaaggacuacuccaucaucagcuccuacgugugcagcggccuggucggggacacgccccggcgcaacgacuccagcuccagcuccuacugccagaacccgaacaacgagaagggcagccacggggugaagggcugggccuucgacgacgggaacgacgucuggaugggccggaccaucuccgaggagcuccgcagcggcuacgagaccuucaaggugaucgggggcugguccacccccaacagcaagcugcagaucaaccgccaggugaucgucgacuccgggaaccggagcggcuacagcgggaucuucuccguggagggcaagagcugcaucaaccggugcuucuacguggagcugauccgcggccgcaagcaggagacgaaggucugguggaccuccaacagcaucgugguguucugcgggaccuccggcaccuacgggacgggcagcuggcccgacggggccgacaucgaccucaugcccaucuga

SEQ ID NO: 79206 - RNA, 1410 nt, Artificial Sequence
  derived and/or modified CDS sequence (opt1) from neuraminidase__InfluenzaA__ABG48305
augaaccccaaccagaagaucaucaucaucggcagcgugucccugaccaucgccaccaucugcuuccucaugcagaucgccauccuggucacgaccgugacccugcacuucaagcaguacgagugcaacagcccgcccaacaaccaggugaugcucugcgagcccaccaucaucgagcgcaacaucacggagaucgucuaccugaccaacaccaccaucgagaaggagaucugccccaagcuggcggaguaccggaacugguccaagccgcagugcaagaucacgggguucgcccccuucagcaaggacaacuccauccgccucagcgccggcggggacaucugggugacccgggagcccuacguguccugcgaccccggcaagugcuaccaguucgcccuggggcagggcaccacccugaacaaccgccacagcaacgacacgguccacgaccggaccccguaccgcacccuccugaugaacgagcugggcgugcccuuccaccucgggaccaagcaggucugcaucgccugguccagcuccagcugccacgacggcaaggcguggcugcacgugugcgugacggggcacgacgagaacgccaccgccuccuucaucuacgacggccggcugguggacagcaucggguccuggagcaagaacauccuccgcacccaggaguccgagugcgucugcaucaacgggaccugcacgguggugaugaccgacggcagcgccuccgagcgggcggacaccaagauccuguucaucgaggagggcaagaucguccacaucagcccccugagcggcuccgcccagcacguggaggagugcagcugcuacccccgcuacccgggggugcggugcgucugccgcgacaacuggaagggcuccaaccggcccaucguggacaucaacgugaaggacuacagcaucgucuccagcuacgugugcuccggccucgugggggacacgccccgcaagaacgacagcuccagcuccagcuacugccggaaccccaacaacgagaagggcucccacggggucaagggcugggccuucgacgacgggaacgacguguggaugggccgcaccaucagcgaggagcugcgguccggcuacgagaccuucaaggucaucgggggcuggagcaagccgaacuccaagcugcagaucaaccgccaggugaucguggaccgggggaaccgcagcggcuacuccgggaucuucagcgucgagggcaagagcugcaucaaccggugcuucuacguggagcucauccgcggccgcaagcaggagaccgaggugugguggaccuccaacagcaucgucguguucugcgggacguccggcaccuacgggaccggcagcuggcccgacggggccgacaucaaccugaugcccaucuga

SEQ ID NO: 79207 - RNA, 1410 nt, Artificial Sequence
  derived and/or modified CDS sequence (opt1) from neuraminidase__InfluenzaA__ABG48316
augaaccccaaccagaagaucaucaccaucggcagcgugucccugaccgucgccacgaucugcuuccucaugcagaucgccauccuggugaccaccgugacccugcacuucaagcaguacgagugcaacagcccgcccaacaaccaggucaugcucugcgagcccacgaucaucgagcgcaacaucaccgagaucguguaccugaccaacaccacgaucgagaaggagaucugccccaagcuggcggaguaccggaacugguccaagccgcagugcaagaucaccggguucgcccccuucagcaaggacaacuccauccgccucagcgccggcggggacaucugggugacccgggagcccuacgucuccugcgaccccggcaagugcuaccaguucgcccuggggcagggcaccacgcugaacaaccgccacagcaacgacaccgugcacgaccggaccccguaccgcacccuccugaugaacgagcugggcgugcccuuccaccucgggacgaagcaggucugcaucgccugguccagcuccagcugccacgacggcaaggcguggcugcacgugugcgugaccgggcacgacgagaacgccaccgccuccuucaucuacgacggccggcuggucgacagcaucggguccuggagcaagaacauccuccgcacccaggaguccgagugcgugugcaucaacggcacgugcaccguggucaugaccgacggcagcgccuccgagcgggcggacaccaagauccuguucaucgaggaggggaagaucgugcacaucagcccccugagcggcuccgcccagcacguggaggagugcagcugcuacccccgcuacccggggguccggugcgugugccgcgacaacuggaagggcuccaaccggcccaucguggacaucaacgucaaggacuacagcaucguguccagcuacgugugcuccggccucgucggggacacgccccgcaagaacgacagcuccagcuccagcuacugccggaaccccaacaacgagaagggcucccacggggugaagggcugggccuucgacgacgggaacgacgucuggaugggccgcaccaucagcgaggagcugcgguccggcuacgagaccuucaaggugaucgggggcuggagcaagccgaacuccaagcugcagaucaaccgccaggugaucgucgagcgggggaaccgcagcggcuacuccgggaucuucagcguggagggcaagagcugcaucaaccggugcuucuacguggagcucauccgcggccgcaagcaggagaccgaggucugguggacguccaacagcaucgugguguucugcgggaccuccggcaccuacgggaccggcagcuggcccgacggggccgacaucaaccugaugcccaucuga

SEQ ID NO: 79208 - RNA, 1410 nt, Artificial Sequence
  derived and/or modified CDS sequence (opt1) from neuraminidase__InfluenzaA__ABG48327
augaaccccaaccagaagaucaucaccaucggcagcgugucccugaccaucgccacgaucugcuuccucaugcagaucgccauccuggucaccaccgugacccugcacuucaagcaguacgagugcaacagcccgcccaacaaccaggugaugcucugcgagcccacgaucaucgagcgcaacaucaccgagaucgucuaccugaccaacaccacgaucgagaaggagaucugccccaagcuggcggaguaccggaacugguccaagccgcagugcaagaucaccggguucgcccccuucagcaaggacaacuccauccgccucagcgccggcggggacaucugggugacccgggagcccuacguguccugcgaccccggcaagugcuaccaguucgcccuggggcagggcaccacgcugaacaaccgccacagcaacgacaccguccacgaccggaccccguaccgcacccuccugaugaacgagcugggcgugcccuuccaccucgggacgaagcaggucugcaucgccugguccagcuccagcugccacgacggcaaggcguggcugcacgugugcgugaccgggcacgacgagaacgccaccgccuccuucaucuacgacggccggcugguggacagcaucggguccuggagcaagaacauccuccgcacccaggaguccgagugcgucugcaucaacggcacgugcaccguggugaugaccgacggcagcgccuccgagcgggcggacaccaagauccuguucaucgaggaggggaagaucguccacaucagcccccugagcggcuccgcccagcacguggaggagugcagcugcuacccccgcuacccgggggugcggugcgucugccgcgacaacuggaagggcuccaaccggcccaucguggacaucaacgugaaggacuacagcaucgucuccagcuacgugugcuccggccucgugggggacacgccccgcaagaacgacagcuccagcuccagcuacugccggaaccccaacaacgagaagggcucccgcggggucaagggcugggccuucgacgacgggaacgacguguggaugggccggaccaucagcgaggagcugcgcuccggcuacgagaccuucaaggucaucgggggcuggagcaagccgaacuccaagcugcagaucaaccgccaggugaucguggaccgggggaaccggagcggcuacuccgggaucuucagcgucgagggcaagagcugcaucaaccgcugcuucuacguggagcucauccgcggccggaagcaggagaccgaggugugguggacguccaacagcaucgucguguucugcgggaccuccggcaccuacgggaccggcagcuggcccgacggggccgacaucaaccugaugcccaucuga

SEQ ID NO: 79209 - RNA, 1410 nt, Artificial Sequence
  derived and/or modified CDS sequence (opt1) from neuraminidase__InfluenzaA__ABG48338
augaaccccaaccagaagaucaucaccaucggcagcgugucccugaccaucgccacgaucugcuuccucaugcagaucgccauccuggucaccaccgugacccugcacuucaagcaguacgagugcaacagcccgcccaacaaccaggugaugcucugcgagcccacgaucaucgagcgcaacaucaccgagaucgucuaccugaccaacaccacgaucgagaaggagaucugccccaagcuggcggaguaccggaacugguccaagccgcagugcaagaucaccggguucgcccccuucagcaaggacaacuccauccgccucagcgccggcggggacaucugggugacccgggagcccuacguguccugcgaccccggcaagugcuaccaguucgcccuggggcagggcaccacgcugaacaaccgccacagcaacgacaccguccacgaccggaccccguaccgcacccuccugaugaacgagcugggcgugcccuuccaccucgggacgaagcaggucugcaucgccugguccagcuccagcugccacgacggcaaggcguggcugcacgugugcgugaccgggcacgacgagaacgccaccgccuccuucaucuacgacggccggcugguggacagcaucggguccuggagcaagaacauccuccgcacccaggaguccgagugcgucugcaucaacggcacgugcaccguggugaugaccgacggcagcgccuccgagcgggcggacaccaagauccuguucaucgaggaggggaagaucguccacaucagcccccugagcggcuccgcccagcacguggaggagugcagcugcuacccccgcuacccgggggugcggugcgucugccgcgacaacuggaagggcuccaaccggcccaucguggacaucaacgugaaggacuacagcaucgucuccagcuacgugugcuccggccucgugggggacacgccccgcaagaacgacagcuccagcuccagcuacugccggaaccccaacaacgagaagggcucccacggggucaagggcugggccuucgacgacgggaacgacguguggaugggccgcaccaucagcgaggagcugcgguccggcuacgagaccuucaaggucaucgggggcuggagcaagccgaacuccaagcugcagaucaaccgccaggugaucguggaccgggggaaccgcagcggcuacuccgggaucuucagcgucgagggcaagagcugcaucaaccggugcuucuacguggagcucauccgcggccgcaagcaggagaccgaggugugguggacguccaacagcaucgucguguucugcgggaccuccggcaccuacgggaccggcagcuggcccgacggggccgacaucaaccugaugcccaucuga

SEQ ID NO: 79210 - RNA, 1410 nt, Artificial Sequence; identical to SEQ ID NO: 79209
  derived and/or modified CDS sequence (opt1) from neuraminidase__InfluenzaA__ABG48349

SEQ ID NO: 79211 - RNA, 1410 nt, Artificial Sequence
  derived and/or modified CDS sequence (opt1) from neuraminidase__InfluenzaA__ABG48360
augaaccccaaccagaagaucaucaccaucggcagcgugucccugaccaucgccacgaucugcuuccucaugcagaucgccauccuggucaccaccgugacccugcacuucaagcaguacgagugcaacagcccgcccaacaaccaggugaugcucugcgagcccacgaucaucgagcgcaacaucaccgagaucgucuaccugaccaacaccacgaucgagaaggagaucugccccaagcuggcggaguaccggaacugguccaagccgcagugcaagaucaccggguucgcccccuucagcaaggacaacuccauccgccucagcgccggcggggacaucugggugacccgggagcccuacguguccugcgaccccggcaagugcuaccaguucgcccuggggcagggcaccacgcugaacaaccgccacagcaacgacaccguccacgaccggaccccguaccgcacccuccugauguccgagcugggcgugcccuuccaccucgggacgaagcaggucugcaucgccuggagcuccagcuccugccacgacggcaaggcguggcugcacgugugcgugaccgggcacgacgagaacgccaccgccagcuucaucuacgacggcaagcugguggacuccaucgggagcugguccaagaacauccuccggacccaggagagcgagugcgucugcaucaacggcacgugcaccguggugaugaccgacggcuccgccagcgagcgcgcggacaccaagauccuguucaucgaggaggggaagaucguccacaucagcccccuguccggcagcgcccagcacguggaggagugcuccugcuacccccgguacccgggggugcgcugcgucugccgggacaacuggaagggcagcaaccgccccaucguggacaucaacgugaaggaccacuccaucgucagcuccuacgugugcagcggccucgugggggacacgccccggaagaacgacuccagcuccagcuccuacugccgcaaccccaacaacgagaagggcagccacggggucaagggcugggccuucgacgacgggaacgacguguggaugggccggaccaucuccgaggagcugcgcagcggcuacgagaccuucaaggucaucgggggcugguccaagccgaacagcaagcugcagaucaaccgccaggugaucguggaccgggggaaccgguccggcuacagcgggaucuucagcgucgagggcaaguccugcaucaaccgcugcuucuacguggagcucauccggggccgcaagcaggagaccgaggugugguggacgagcaacuccaucgucguguucugcgggaccagcggcaccuacgggaccggcuccuggcccgacggggccgacaucaaccugaugcccaucuga

SEQ ID NO: 79212 - RNA, 1410 nt, Artificial Sequence; identical to SEQ ID NO: 79209
  derived and/or modified CDS sequence (opt1) from neuraminidase__InfluenzaA__ABG48371

SEQ ID NO: 79213 - RNA, 1410 nt, Artificial Sequence
  derived and/or modified CDS sequence (opt1) from neuraminidase__InfluenzaA__ABG67138
augaaccccaaccagaagaucaucaccaucggcagcgugucccugaccaucgccacgaucugcuuccucacccagaucgccauccuggucaccaccgugacgcugcacuucaagcaguacgagugcaacagcccgcccuccaaccaggugaugcucugcgagcccaccaccaucgagcgcaacaucaccgagaucgucuaccugacgaacaccaccaucgagaaggagaucugccccaagcuggcggaguaccggaacuggagcaagccgcagugcaagaucaccggguucgcccccuucuccaaggacaacagcauccgccucuccgccggcggggacaucugggugacgcgggagcccuacgugagcugcgaccccgacaagugcuaccaguucgcccugggccaggggaccacccugaacaaccgccacuccaacgacaccguccacgaccggacgccguaccgcacccuccugaugaacgagcugggcgugcccuuccaccucggcaccaagcaggucugcaucgccuggagcuccagcuccugccacgacgggaaggcguggcugcacgugugcgugaccggccacgacgagaacgccacggccagcuucaucuacgacgggcggcugguggacuccaucggcagcugguccaagaagauccuccgcacccaggagagcgagugcgucugcaucaacgggaccugcaccguggugaugacggacggcuccgccagcggccgggcggacaccaagauccuguucaucgaggaggggaagaucguccacaucagcccccuguccggcagcgcccagcacguggaggagugcuccugcuacccccgcuacccgggggugcggugcgucugccgcgacaacuggaagggcagcaaccggcccaucguggacaucaacgugaaggacuacuccaucgucagcuccuacgugugcagcggccucgugggggacacgccccgcaagaacgacuccagcuccagcucccacugccugaaccccaacaacgaggagggcgggcacggcgucaaggggugggccuucgacgacggcaacgacguguggaugggccggaccaucagcgagaagcugcgcuccggguacgagaccuucaaggucaucgagggcuggagcaagccgaacuccaagcuccagaucaaccgccaggugaucguggaccgggggaaccggagcggcuacuccgggaucuucagcgucgagggcaagagcugcaucaaccgcugcuucuacguggagcugauccggggccgcaagcaggagaccgaggugugguggaccuccaacagcaucgucguguucugcgggaccuccggcacguacgggaccggcagcuggcccgacggggccgacaucaaccugaugcccaucuga

SEQ ID NO: 79214 - RNA, 1410 nt, Artificial Sequence; identical to SEQ ID NO: 78150
  derived and/or modified CDS sequence (opt1) from neuraminidase__InfluenzaA__ABG67149

SEQ ID NO: 79215 - RNA, 1410 nt, Artificial Sequence
  derived and/or modified CDS sequence (opt1) from neuraminidase__InfluenzaA__ABG67160
augaaccccaaccagaagaucaucaccaucggcagcgugucccugaccaucgccacgaucugcuuccucaugcagaucgccauccuggucaccaccgugacccugcacuucaagcaguacgagugcaacagcccgcccaacaaccaggugaugcucugcgagcccacgaucaucgagcgcaacaucaccgagaucgucuaccugaccaacaccacgaucgagaaggagaucugccccaagcuggcggaguaccgguccuggagcaagccgcagugcaagaucaccggguucgcccccuucuccaaggacaacagcauccgccucuccgccggcggggacaucugggugacccgggagcccuacgugagcugcgaccccggcaagugcuaccaguucgcccuggggcagggcaccacgcugaacaaccgccacuccaacgacaccguccacgaccggaccccguaccgcacccuccugaugaacgagcugggcgugcccuuccaccucgggacgaagcaggucugcaucgccuggagcuccagcuccugccacgacggcaaggcguggcugcacgugugcgugaccgggcacgacgagaacgccaccgccagcuucaucuacgacggccggcugguggacuccaucgggagcugguccaagaacauccuccgcacccaggagagcgagugcgucugcgugaacggcacgugcaccguggucaugaccgacggcuccgccagcgagcgggcggacaccaagauccuguucaucgaggaggggaagaucgugcacaucagcccccuguccggcagcgcccagcacguggaggagugcuccugcuacccccgcuacccggggguccggugcgugugccgcgacaacuggaagggcagcaaccggcccaucguggacaucaacgucaaggacuacuccaucgugagcuccuacgugugcagcggccucgucggggacacgccccgcaagaacgacuccagcuccagcuccuacugcuggaaccccaacaacgagaagggcgggcacggcgugaaggggugggccuucgacgacggcaacgacgucuggaugggccggaccaucagcgaggagcugcgcuccggguacgagaccuucaaggugaucggcggguggagcaagccgaacuccaagcugcagaucaaccgccaggugaucgucgaccggggcaaccggagcggguacuccggcaucuucagcguggagggcaagagcugcaucaaccgcugcuucuacguggagcucauccgggggcgcaagcaggagaccgaggucugguggacguccaacagcaucgugguguucugcggcaccuccgggaccuacggcaccgggagcuggcccgacggcgccgacaucaaccugaugcccaucuga

SEQ ID NO: 79216 - RNA, 1410 nt, Artificial Sequence
  derived and/or modified CDS sequence (opt1) from neuraminidase__InfluenzaA__ABG67171
augaaccccaaccagaagaucaucaccaucggcagcgugucccugaccaucgccacgaucugcuuccucaugcagaucgccauccuggucaccaccgugacccugcacuucaagcaguacgagugcaacagcccgcccaacaaccaggugaugcucugcgagcccacgaucaucgagcgcaacaucaccgagaucgucuaccugaccaacaccacgaucgagaaggagaucugccccaagcuggcggaguaccggaacugguccaagccgcagugcaagaucaccggguucgcccccuucagcaaggacaacuccauccgccucagcgccggcggggacaucugggugacccgggagcccuacguguccugcgaccccggcaagugcuaccaguucgcccuggggcagggcaccacgcugaacaaccgccacagcaacgacaccguccacgaccggaccccguaccgcacccuccugaugaacgagcugggcgugcccuuccaccucgggacgaagcaggucugcaucgccugguccagcuccagcugccacgacggcaaggcguggcugcacgugugcgugaccgggcacgacaagaacgccaccgccuccuucaucuacgacggccggcugguggacagcaucggguccuggagcaagaacauccuccgcacccaggaguccgagugcgucugcaucaacggcacgugcaccguggugaugaccgacggcagcgccuccgaccgggcggacaccaagauccuguucaucgaggaggggaagaucguccacaucagcccccugagcggcuccgcccagcacguggaggagugcagcugcuacccccgcuacccgggggugcggugcgucugccgcgacaacuggaagggcuccaaccggcccaucguggacaucaacgugaaggacuacagcaucgucuccagcuacgugugcuccggccucgugggggacacgccccgcaagaacgacagcuccagcuccagcuacugcuggaaccccaacaacgagaagggcgggcacggcgucaaggggugggccuucgacgacggcaacgacguguggaugggccggaccaucuccgaggagagccgcuccggguacgagaccuucaaggucaucggcggguggagcaagccgaacuccaagcugcagaucaaccgccaggugaucguggaccggggcaaccggagcggguacuccggcaucuucagcgucgagggcaagagcugcaucaaccgcugcuucuacguggagcugauccgggggcgcaagcaggagaccgaggugugguggacguccaacagcaucgucguguucugcggcaccuccgggaccuacggcaccgggagcuggcccgacggcgccgacaucaaccucaugcccaucuga

SEQ ID NO: 79217 - RNA, 1410 nt, Artificial Sequence; identical to SEQ ID NO: 79137
  derived and/or modified CDS sequence (opt1) from neuraminidase__InfluenzaA__ABG67182

SEQ ID NO: 79218 - RNA, 1410 nt, Artificial Sequence
  derived and/or modified CDS sequence (opt1) from neuraminidase__InfluenzaA__ABG67193
augaaccccaaccagaagaucaucaccaucggcagcgugucccugaccaucgccacgaucugcuuccucaugcagaucgccauccuggucaccaccgugacccugcacuucaagcaguacgagugcaacagcccgcccaacaaccaggugaugcucugcgagcccacgaccaucgagcgcaacaucaccgagaucgucuaccugaccaacacgaccaucgagaaggagaucugccccaagcuggcggaguaccggaacugguccaagccgcagugcaagaucaccggguucgcccccuucagcaaggacaacuccauccgccucagcgccggcggggacaucugggugacccgggagcccuacguguccugcgaccccggcaagugcuaccaguucgcccuggggcagggcacgacccugaacaaccgccacagcaacgacaccguccacgaccggaccccguaccgcacgcuccugaugaacgagcugggcgugcccuuccaccucgggaccaagcaggucugcaucgccugguccagcuccagcugccacgacggcaaggcguggcugcacgugugcgugaccgggcacgacgagaacgccaccgccuccuucaucuacgacggccggcugguggacagcaucggguccuggagcaagaacauccuccgcacgcaggaguccgagugcgucugcaucaacgggaccugcaccguggugaugaccgacggcagcgccuccgaccgggcggacacgaagauccuguucaucgaggagggcaagaucguccacaucagcccccugagcggcuccgcccagcacguggaggagugcagcugcuacccccgcuacccgggggugcggugcgucugccgcgacaacuggaagggcuccaaccggcccaucguggacaucaacgugaagaacuacagcaucgucuccagcuacgugugcuccggccucgugggggacacgccccgcaagaacgacagcuccagcuccagcuacugcuggaaccccaacaacgagaagggcgggcacggcgucaaggggugggccuucgacgacggcaacgacguguggaugggccggaccaucuccgaggagagccgcuccggguacgagaccuucaaggucaucggcggguggagcaagccgaacuccaagcugcagaucaaccgccaggugaucguggaccggggcaaccggagcggguacuccggcaucuucagcgucgagggcaagagcugcaucaaccgcugcuucuacguggagcugauccgggggcgcaagcaggagaccgaggugugguggaccuccaacagcaucgucguguucugcggcaccuccgggaccuacggcacggggagcuggcccgacggcgccgacaucaaccucaugcccaucuga

SEQ ID NO: 79219 - RNA, 1410 nt, Artificial Sequence; identical to SEQ ID NO: 79137
  derived and/or modified CDS sequence (opt1) from neuraminidase__InfluenzaA__ABG67204

SEQ ID NO: 79220 - RNA, 1410 nt, Artificial Sequence
  derived and/or modified CDS sequence (opt1) from neuraminidase__InfluenzaA__ABG67215
augaaccccaaccagaagaucaucaccaucggcagcgugucccugaccaucgccacgaucugcuuccucaugcagaucgccauccuggucaccaccgugacccugcacuucaagcaguacgagugcaacagcccgcccuccaaccaggugaugcucugcgagcccacgaucaucgagcgcaacaucaccgagaucgucuaccugaccaacaccacgaucgagaaggagaucugccccaagcuggcggaguaccggaacuggagcaagccgcagugcaagaucaccggguucgcccccuucuccaaggacaacagcauccgccucuccgccggcggggacaucugggugacccgggagcccuacgugagcugcggccccgggaagugcuaccaguucgcccugggccagggcaccacgcugaacaaccgccacuccaacgacaccguccacgaccggaccccguaccgcacccuccugaugaacgagcugggggugcccuuccaccucggcacgaagcaggucugcaucgccuggagcuccagcuccugccacgacgggaaggcguggcugcacgugugcgugaccggccacgacgagaacgccaccgccagcuucaucuacgacgggcggcugguggacuccaucggcagcugguccaagaacauccuccgcacccaggagagcgagugcgucugcaucaacggcacgugcaccguggugaugaccgacggguccgccagcgagcgggcggacaccaagauccuguucaucgaggagggcaagaucguccacaucagcccccuguccgggagcgcccagcacguggaggagugcuccugcuacccccgcuacccgggcgugcggugcgucugccgcgacaacuggaagggcagcaaccggcccaucguggacaucaacgugaaggacuacuccaucgucagcuccuacgugugcagcgggcucgugggcgacacgccccgcaagaacgacuccagcuccagcuccuacugccggaaccccaacaacgagaaggggagccacggcgucaaggggugggccuucgacgacggcaacgacguguggaugggccgcaccaucuccgaggagcugcggagcggguacgagaccuucaaggucaucggcgggugguccaagccgaacagcaagcugcagaucaaccgccaggugaucguggaccggggcaaccgcuccggguacagcggcaucuucagcgucgagggcaaguccugcaucaaccggugcuucuacguggagcucauccgcgggcgcaagcaggagaccgaggugugguggacgagcaacuccaucgucguguucugcggcaccagcgggaccuacggcaccggguccuggcccgacggcgccgacaucaaccugaugcccaucuga

SEQ ID NO: 79221 - RNA, 1410 nt, Artificial Sequence; identical to SEQ ID NO: 79125
  derived and/or modified CDS sequence (opt1) from neuraminidase__InfluenzaA__ABG67226

SEQ ID NO: 79222 - RNA, 1410 nt, Artificial Sequence; identical to SEQ ID NO: 79125
  derived and/or modified CDS sequence (opt1) from neuraminidase__InfluenzaA__ABG67248

SEQ ID NO: 79223 - RNA, 1413 nt, Artificial Sequence; identical to SEQ ID NO: 78852
  derived and/or modified CDS sequence (opt1) from neuraminidase__InfluenzaA__ABG67480

SEQ ID NO: 79224 - RNA, 1413 nt, Artificial Sequence; identical to SEQ ID NO: 78420
  derived and/or modified CDS sequence (opt1) from neuraminidase__InfluenzaA__ABG67494

SEQ ID NO: 79225 - RNA, 1410 nt, Artificial Sequence; identical to SEQ ID NO: 78178
  derived and/or modified CDS sequence (opt1) from neuraminidase__InfluenzaA__ABG67505

SEQ ID NO: 79226 - RNA, 1410 nt, Artificial Sequence; identical to SEQ ID NO: 78178
  derived and/or modified CDS sequence (opt1) from neuraminidase__InfluenzaA__ABG67516

SEQ ID NO: 79227 - RNA, 1410 nt, Artificial Sequence; identical to SEQ ID NO: 79191
  derived and/or modified CDS sequence (opt1) from neuraminidase__InfluenzaA__ABG67527

SEQ ID NO: 79228 - RNA, 1410 nt, Artificial Sequence
  derived and/or modified CDS sequence (opt1) from neuraminidase__InfluenzaA__ABG67538
augaaccccaaccagaagaucaucaccaucggcagcgugucccugaccaucgccacgaucugcuuccucaugcagaucgccauccuggucaccaccgugacccugcacuucaagcaguacgagugcaacagcccgcccaacaaccaggugaugcucugcgagcccacgaccaucgagcgcaacaccaccgagaucgucuaccugacgaacaccaccaucgagaaggagaucugccccaagcuggcggaguaccggaacugguccaagccgcagugcaacaucaccggguucgcccccuucagcaaggacaacuccauccgccucagcgccggcggggacaucugggugacgcgggagcccuacguguccugcgaccccgacaagugcuaccaguucgcccugggccaggggaccacccugaacaacggccacagcaacgacaccguccacgaccgcacgccguaccggacccuccugaugaacgagcugggcgugcccuuccaccucgggacccgccaggugugcaucgccugguccagcuccagcugccacgacggcaaggcguggcugcacgucugcgugaccggggacgacgagaacgccacggccuccuucaucuacaacggccggcugguggacagcaucggguccuggagcaagaagauccuccgcacccaggaguccgagugcgucugcaucaacgggaccugcaccguggugaugacggacggcagcgccuccgggaaggcggacaccaagauccuguucaucgaggagggcaagaucguccacaucagcacccugagcggguccgcccagcacguggaggagugcagcugcuacccccgguaccccggcgugcgcugcgucugccgggacaacuggaagggcuccaaccgcccgaucaucgacaucaacgugaaggacuacagcaucguguccagcuacgucugcuccgggcucgugggcgacacgccccggaagaacgacagcuucuccagcucccacugccuggaccccaacaacgaggagggcggccacggggugaagggcugggccuucgacgacggcaacgacgucuggauggggcgcaccaucagcgagaagcugcgguccggcuacgagaccuucaaggugaucgagggguggagcaagcccaacuccaagcuccagaccaaccgccaggucaucguggagcggggcaaccgcagcggguacuccggcaucuucagcguggagggcaaguccugcaucaaccggugcuucuacgucgagcugauccgcgggcggaaggaggagaccgaggugugguggacgagcaacagcaucguggucuucugcggcaccuccgggaccuacggcaccgggagcuggccggacggcgccgacaucaaccugaugcccaucuga

SEQ ID NO: 79229 - RNA, 1410 nt, Artificial Sequence
  derived and/or modified CDS sequence (opt1) from neuraminidase__InfluenzaA__ABG67549
augaaccccaaccagaagaucaucaccaucggcagcgugucccugaccaucgccacgaucugcuuccucaugcagaucgccauccuggucaccaccgugacccugcacuucaagcagcacgagugcaacagcccgcccaacaaccaggugaugcucugcgagcccacgaucaucgagcgcaacaucaccgagaucgucuaccugaccaacaccacgaucgagaaggagaucugccccaagcugguggaguaccggaacugguccaagccgcagugcaacaucaccggguucgcgcccuucagcaaggacaacuccauccgccucagcgccggcggggacaucugggugacccgggagcccuacgucuccugcgaccccgacaagugcuaccaguucgcccugggccaggggaccacgcugaacaacggccacagcaacgacaccgugcacgaccgcaccccguaccggacccuccugaugaacgagcugggcgugcccuuccaccucgggacgcgccaggucugcaucgccugguccagcuccagcugccacgacggcaaggccuggcugcacgugugcgugaccggggacgacaagaacgcgaccgccuccuucaucuacaacggccggcuggucgacagcaucggguccuggagcaagaagauccuccgcacccaggaguccgagugcgugugcaucaacggcacgugcaccguggucaugaccgacggcagcgccuccgggaaggccgacaccaagauccuguucaucgaggagggcaagaucgugcacaucagcacgcugagcggguccgcgcagcacguggaggagugcagcugcuacccccgguaccccggcguccgcugcgugugccgggacaacuggaagggcuccaaccgcccgaucguggacaucaacgucaaggacuacagcaucguguccagcuacgugugcuccgggcucgucggcgacacgccccggaagaacgacagcuucuccagcucccacugccuggaccccaacaacgaggagggcgggcacggggugaagggcugggccuucgacgacggcaacgacgucuggauggggcgcaccaucagcgagaagcugcgguccggcuacgagaccuucaaggugaucgagggguggagcaagcccaacuccaagcuccagaucaaccgccaggugaucgucgagcggggcaaccgcagcggguacuccggcaucuucagcguggagggcaaguccugcaucaaccggugcuucuacguggagcugauccgcgggcggaaggaggagaacgaggucugguggaccagcaacagcaucgugguguucugcggcaccuccgggaccuacggcaccgggagcuggccggacggcgccgacaucaaccugaugcccaucuga

SEQ ID NO: 79230 - RNA, 1410 nt, Artificial Sequence; identical to SEQ ID NO: 78615
  derived and/or modified CDS sequence (opt1) from neuraminidase__InfluenzaA__ABG67560

SEQ ID NO: 79231 - RNA, 1410 nt, Artificial Sequence; identical to SEQ ID NO: 78615
  derived and/or modified CDS sequence (opt1) from neuraminidase__InfluenzaA__ABG67571

SEQ ID NO: 79232 - RNA, 1410 nt, Artificial Sequence
  derived and/or modified CDS sequence (opt1) from neuraminidase__InfluenzaA__ABG67582
augaaccccaaccagaagaucaucaccaucggcagcgugucccugaccaucgccacgaucugcuuccucaugcagaucgccauccuggucaccaccgugacccugcacuucaagcagcacgagugcaacagcccgcccaacaaccaggugaugcucugcgagcccacgaucaucgagcgcaacaucaccgagaucgucuaccugaccaacaccacgaucgagaaggagaucugccccaagcugguggaguaccggaacugguccaagccgcagugcaacaucaccggguucgcgcccuucagcaaggacaacuccauccgccucagcgccggcggggacaucugggugacccgggagcccuacgucuccugcgaccccgacaagugcuaccaguucgcccugggccaggggaccacgcugaacaacggccacagcaacgacaccgugcacgaccgcaccccguaccggacccuccugaugaacgagcugggcgugcccuuccaccucgggacgcgccaggucugcaucgccugguccagcuccagcugccacgacggcaaggccuggcugcacgugugcgugaccggggacgacaagaacgcgaccgccuccuucaucuacaacggccggcuggucgacagcaucggguccuggagcaagaagauccuccgcacccaggaguccgagugcgugugcaucaacggcacgugcaccguggucaugaccgacggcagcgccuccgggaaggccgacaccaagauccuguucaucgaggagggcaagaucgugcacaucagcacgcugagcggguccgcgaagcacguggaggagugcagcugcuacccccgguaccccggcguccgcugcgugugccgggacaacuggaagggcuccaaccgcccgaucguggacaucaacgucaaggacuacagcaucguguccagcuacgugugcuccgggcucgucggcgacacgccccggaagaacgacagcuucuccagcucccacugccuggaccccaacaacgaggagggcgggcacggggugaagggcugggccuucgacgacggcaacgacgucuggauggggcgcaccaucagcgagaagcugcgguccggcuacgagaccuucaaggugaucgagggguggagcaagcccaacuccaagcuccagaucaaccgccaggugaucgucgagcggggcaaccgcagcggguacuccggcaucuucagcguggagggcaaguccugcaucaaccggugcuucuacguggagcugauccgcgggcggaaggaggagaccgaggucugguggaccagcaacagcaucgugguguucugcggcaccuccgggaccuacggcacggggagcuggccggacggcgccgacaucaaccugaugcccaucuga

SEQ ID NO: 79233 - RNA, 1410 nt, Artificial Sequence; identical to SEQ ID NO: 79199
  derived and/or modified CDS sequence (opt1) from neuraminidase__InfluenzaA__ABG67593

SEQ ID NO: 79234 - RNA, 1410 nt, Artificial Sequence; identical to SEQ ID NO: 78615
  derived and/or modified CDS sequence (opt1) from neuraminidase__InfluenzaA__ABG67604

SEQ ID NO: 79235 - RNA, 1410 nt, Artificial Sequence; identical to SEQ ID NO: 78615
  derived and/or modified CDS sequence (opt1) from neuraminidase__InfluenzaA__ABG67615

SEQ ID NO: 79236 - RNA, 1410 nt, Artificial Sequence; identical to SEQ ID NO: 78615
  derived and/or modified CDS sequence (opt1) from neuraminidase__InfluenzaA__ABG67626

SEQ ID NO: 79237 - RNA, 1410 nt, Artificial Sequence; identical to SEQ ID NO: 78615
  derived and/or modified CDS sequence (opt1) from neuraminidase__InfluenzaA__ABG67637

SEQ ID NO: 79238 - RNA, 1410 nt, Artificial Sequence; identical to SEQ ID NO: 78615
  derived and/or modified CDS sequence (opt1) from neuraminidase__InfluenzaA__ABG67648

SEQ ID NO: 79239 - RNA, 1410 nt, Artificial Sequence
  derived and/or modified CDS sequence (opt1) from neuraminidase__InfluenzaA__ABG67659
augaaccccaaccagaagaucaucaccaucggcagcgugucccugaccaucgccacgaucugcuuccucaugcagaucgccauccuggucaccaccgugacccugcacuucaagcagcacgagugcaacagcccgcccaacaaccaggugaugcucugcgagcccacgaucaucgagcgcaacaucaccgagaucgucuaccugaccaacaccacgaucgagaaggagaucugccccaagcugguggaguaccggaacugguccaagccgcagugcaacaucaccggguucgcgcccuucagccgcgacaacuccauccggcucagcgccggcggggacaucugggugacccgcgagcccuacgucuccugcgaccccgacaagugcuaccaguucgcccugggccaggggaccacgcugaacaacggccacagcaacgacaccgugcacgaccggaccccguaccgcacccuccugaugaacgagcugggcgugcccuuccaccucgggacgcggcaggucugcaucgccugguccagcuccagcugccacgacggcaaggccuggcugcacgugugcgugaccggggacgacaagaacgcgaccgccuccuucaucuacaacggccgccuggucgacagcaucggguccuggagcaagaagauccuccggacccaggaguccgagugcgugugcaucaacggcacgugcaccguggucaugaccgacggcagcgccuccgggaaggccgacaccaagauccuguucaucgaggagggcaagaucgugcacaucagcacgcugagcggguccgcgcagcacguggaggagugcagcugcuacccccgcuaccccggcguccggugcgugugccgcgacaacuggaagggcuccaaccggccgaucguggacaucaacgucaaggacuacagcaucguguccagcuacgugugcuccgggcucgucggcgacacgccccgcaagaacgacagcuucuccagcucccacugccuggaccccaacaacgaggagggcgggcacggggugaagggcugggccuucgacgacggcaacgacgucuggauggggcggaccaucagcgagaagcugcgcuccggcuacgagaccuucaaggugaucgagggguggagcaagcccaacuccaagcuccagaucaaccgccaggugaucgucgagcggggcaaccggagcggguacuccggcaucuucagcguggagggcaaguccugcaucaaccgcugcuucuacguggagcugauccgggggcgcaaggaggagaccgaggucugguggaccagcaacagcaucgugguguucugcggcaccuccgggaccuacggcacggggagcuggccggacggcgccgacaucaaccugaugcccaucuga

SEQ ID NO: 79240 - RNA, 1410 nt, Artificial Sequence
  derived and/or modified CDS sequence (opt1) from neuraminidase__InfluenzaA__ABG67670
augaaccccaaccagaagaucaucaccaucggcagcgugucccugaccaucgccacgaucugcuuccucaugcagaucgccauccugaucaccaccgucacccugcacuucaagcaguacgagugcaacagcccgcccaacaaccaggugaugcucugcgagcccacgaucaucgagcgcaacaucaccgagaucguguaccugaccaacaccacgaucgagaaggagaucugccccaagcuggcggaguaccggaacugguccaagccgcagugcaagaucaccggguucgcccccuucagcaaggacaacuccauccgccucagcgccggcggggacaucugggucacccgggagcccuacguguccugcgaccccggcaagugcuaccaguucgcccuggggcagggcaccacgcugaacaaccgccacagcaacgacaccgugcacgaccggaccccguaccgcacccuccugaugaacgagcugggcguccccuuccaccucgggacgaagcaggucugcaucgccugguccagcuccagcugccacgacggcaaggcguggcugcacgugugcgugaccgggcacgacgagaacgccaccgccuccuucaucuacgacggccggcugguggacagcaucggguccuggagcaagaacauccuccgcacccaggaguccgagugcgugugcaucaacggcacgugcaccgucgugaugaccgacggcagcgccuccgggcgggcggacaccaagauccuguucaucgaggagggcaagaucgugcacaucagcccccugagcggguccgcccagcacgucgaggagugcagcugcuacccccgcuacccgggcgugcggugcgugugccgcgacaacuggaagggcuccaaccggcccaucgucgacaucaacgugaaggacuacagcaucguguccagcuacgucugcuccgggcucgugggcgacacgccccgcaagaacgacagcuccagcuccagccacugccugaaccccaacaacgaggagggcgggcacggggugaagggcugggccuucgacgacggcaacgacgucuggauggggcggaccaucuccgagaagcugcgcagcggcuacgagaccuucaaggugaucgggggcugguccaagccgaacagcaagcuccagaucaaccggcaggucaucguggaccgcgggaaccgguccggcuacagcggcaucuucuccguggagggcaagagcugcaucaaccgcugcuucuacgucgagcugauccgggggcgcaagcaggagaccgaggugugguggacgagcaacuccaucguggucuucugcgggaccagcggcaccuacgggaccggcuccuggcccgacggcgccgacaucaaccugaugcccaucuga

SEQ ID NO: 79241 - RNA, 1410 nt, Artificial Sequence; identical to SEQ ID NO: 78754
  derived and/or modified CDS sequence (opt1) from neuraminidase__InfluenzaA__ABG79944

SEQ ID NO: 79242 - RNA, 1413 nt, Artificial Sequence; identical to SEQ ID NO: 79083
  derived and/or modified CDS sequence (opt1) from neuraminidase__InfluenzaA__ABG79955

SEQ ID NO: 79243 - RNA, 1410 nt, Artificial Sequence
  derived and/or modified CDS sequence (opt1) from neuraminidase__InfluenzaA__ABG79966
augaaccccaaccagaagaucaucaccaucggcagcgugucccugaccaucgccacgaucugcuuccucaugcagaucgccauccuggucaccaccgugacccugcacuucaagcaguacgagugcaacagcccgcccuccaaccaggugaugcucugcgagcccacgaucaucgagcgcaacaucaccgagaucgucuaccugaccaacaccacgaucgagaaggagaucugccccaagcuggcggaguaccggaacuggagcaagccgcagugcaagaucaccggguucgcccccuucuccaaggacaacagcauccgccucuccgccggcggggacaucugggugacccgggagcccuacgugagcugcgaccccggcaagugcuaccaguucgcccuggggcagggcaccacgcugaacaaccgccacuccaacgacaccguccacgaccggaccccguaccgcacccuccugaugaacgagcugggcgugcccuuccaccucgggacgaagcaggucugcaucgccuggagcuccagcuccugccacgacggcaaggcguggcugcacgugugcgugaccgggcacgacgagaacgccaccgccagcuucaucuacgacggccggcugguggacuccaucgggagcugguccaagaacauccuccgcacccaggagagcgagugcgucugcaucaacggcacgugcaccguggugaugaccgacggcuccgccagcgagcgggcggacaccaagauccuguucaucgaggaggggaagaucguccacaucagcccccuguccggcagcgcccagcacguggaggagugcuccugcuacccccgcuacccgggggugcggugcgucugccgcgacaacuggaagggcagcaaccggcccaucguggacaucaacgugaaggacuacuccaucgucagcuccuacgugugcagcggccucgugggggacacgccccgcaagaacgacuccagcuccagcuccuacugccagaaccccaacaacgagaagggcagccacggggucaagggcugggccuucgacgacgggaacgacguguggaugggccggaccaucuccgaggagcugcgcagcggcuacgagaccuucaaggucaucgggggcugguccaagccgaacagcaagcugcagaucaaccgccaggugaucguggaccgggggaaccgguccggcuacagcgggaucuucagcgucgagggcaaguccugcaucaaccgcugcuucuacguggagcucauccggggccgcaagcaggagaccgaggugugguggacgagcaacuccaucgucguguucugcgggaccagcggcaccuacgggaccggcuccuggcccgacggggccgacaucaaccugaugcccaucuga

SEQ ID NO: 79244 - RNA, 1410 nt, Artificial Sequence
  derived and/or modified CDS sequence (opt1) from neuraminidase__InfluenzaA__ABG79977
augaaccccaaccagaagaucaucaccaucggcagcgugucccugaccaucgccacgaucugcuuccucaugcagaucgccauccuggucaccaccgugacccugcacuucaagcaguacgagugcaacagcccgcccaacaaccaggcgaugcucugcgagcccacgaucaucgagcgcaacaucaccgagaucguguaccugaccaacaccacgaucgagaaggagaucugccccaagcuggccgaguaccggaacugguccaagccgcagugcaagaucaccggguucgcccccuucagcaaggacaacuccauccgccucagcgccggcggggacaucugggucacccgggagcccuacguguccugcgaccccggcaagugcuaccaguucgcccuggggcagggcaccacgcugaacaaccgccacagcaacgacaccgugcacgaccggaccccguaccgcacccuccugaugaacgagcugggcguccccuuccaccucgggacgaagcaggucugcaucgcgugguccagcuccagcugccacgacggcaaggccuggcugcacgugugcgugaccgggcacgacgagaacgccaccgccuccuucaucuacgacggccggcugguggacagcaucggguccuggagcaagaacauccuccgcacccaggaguccgagugcgugugcaucaacggcacgugcaccgucgugaugaccgacggcagcgcguccgaccgggccgacaccaagauccuguucaucgaggaggggaagaucgugcacaucagcccccugagcggcuccgcccagcacgucgaggagugcagcugcuacccccgcuacccgggggugcggugcgugugccgcgacaacuggaagggcuccaaccggcccaucgucgacaucaacgugaaggacuacagcaucguguccagcuacgucugcuccggccucgugggggacacgccccgcaagaacgacagcuccagcuccagcuacugcuggaaccccaacaacgagaagggcgggcacggcgugaaggggugggccuucgacgacggcaacgacgucuggaugggccggaccaucuccgaggagagccgcuccggguacgagaccuucaaggugaucggcggguggagcaagccgaacuccaagcugcagaucaaccggcaggucaucguggaccgcggcaaccggagcggguacuccggcaucuucagcguggagggcaagagcugcaucaaccgcugcuucuacgucgagcugauccgggggcgcaagcaggagaccgaggugugguggacguccaacagcaucguggucuucugcggcaccuccgggaccuacggcaccgggagcuggcccgacggcgccgacaucaaccucaugcccaucuga

SEQ ID NO: 79245 - RNA, 1410 nt, Artificial Sequence; identical to SEQ ID NO: 79137
  derived and/or modified CDS sequence (opt1) from neuraminidase__InfluenzaA__ABG79988

SEQ ID NO: 79246 - RNA, 1410 nt, Artificial Sequence; identical to SEQ ID NO: 79137
  derived and/or modified CDS sequence (opt1) from neuraminidase__InfluenzaA__ABG79999

SEQ ID NO: 79247 - RNA, 1410 nt, Artificial Sequence
  derived and/or modified CDS sequence (opt1) from neuraminidase__InfluenzaA__ABG80010
augaaccccaaccagaagaucaucaccaucggcagcgugucccugaccaucgccacgaucugcuuccucaugcagaucgccauccuggucaccaccgugacccugcacuucaagcaguacgagugcaacagcccgcccaacaaccaggugaugcucugcgagcccacgaucaucgagcgcaacaucaccgagaucgucuaccugaccaacaccacgaucgagaaggagaucugccccaagcuggcggaguaccggaacugguccaagccgcagugcaagaucaccggguucgcccccuucagcaaggacaacuccauccgccucagcgccggcggggacaucugggugacccgggagcccuacguguccugcgaccccggcaagugcuaccaguucgcccuggggaagggcaccacgcugaacaaccgccacagcaacgacaccguccacgaccggaccccguaccgcacccuccugaugaacgagcugggcgugcccuuccaccucgggacgaagcaggucugcaucgccugguccagcuccagcugccacgacggcaaggcguggcugcacgugugcgugaccgggcacgacgagaacgccaccgccuccuucaucuacgacggccggcugguggacagcaucggguccuggagcaagaacauccuccgcacccaggaguccgagugcgucugcaucaacggcacgugcaccguggugaugaccgacggcagcgccuccgaccgggcggacaccaagauccuguucaucgaggaggggaagaucguccacaucagcccccugagcggcuccgcccagcacguggaggagugcagcugcuacccccgcuacccgggggugcggugcgucugccgcgacaacuggaagggcuccaaccggcccaucguggacaucaacgugaaggacuacagcaucgucuccagcuacgugugcuccggccucgugggggacacgccccgcaagaacgacagcuccagcuccagcuacugcuggaaccccaacaacgagaagggcgggcacggcgucaaggggugggccuucgacgacggcaacgacguguggaugggccggaccaucuccgaggagagccgcuccggguacgagaccuucaaggucaucggcggguggagcaagccgaacuccaagcugcagaucaaccgccaggugaucguggaccggggcaaccggagcggguacuccggcaucuucagcgucgagggcaagagcugcaucaaccgcugcuucuacguggagcugauccgggggcgcaagcaggagaccgaggugugguggacguccaacagcaucgucguguucugcggcaccuccgggaccuacggcaccgggagcuggcccgacggcgccgacaucaaccucaugcccaucuga

SEQ ID NO: 79248 - RNA, 1410 nt, Artificial Sequence; identical to SEQ ID NO: 79137
  derived and/or modified CDS sequence (opt1) from neuraminidase__InfluenzaA__ABG80021

SEQ ID NO: 79249 - RNA, 1410 nt, Artificial Sequence
  derived and/or modified CDS sequence (opt1) from neuraminidase__InfluenzaA__ABG80032
augaaccccaaccagaagaucaucaccaucggcagcgugucccugaccaucgccacgaucugcuuccucaugcagaucgccauccuggucaccaccgugacccugcacuucaagcaguacgagugcaacagcccgcccaacaaccaggugaugcucugcgagcccacgaucaucgagcgcaacaucaccgagaucgucuaccugaccaacaccacgaucgagaaggagaucugccccaagcuggcggaguaccggaacugguccaagccgcagugcaagaucaccggguucgcccccuucagcaaggacaacuccauccgccucagcgccggcggggacaucugggugacccgggagcccuacguguccugcgaccccggcaagugcuaccaguucgcccuggggcagggcaccacgcugaacaaccgccacagcaacgacaccguccacgaccggaccccguaccgcacccuccugaugaacgagcugggcgugcccuuccaccucgggacgaagcaggucugcaucgccugguccagcuccagcugccacgacggcaaggcguggcugcacgugugcgugaccgggcacgacgagaacgccaccgccuccaucaucuacgacggccggcugguggacagcaucuccagcugguccaagaacauccuccgcacccaggagagcgagugcgucugcaucaacgggacgugcaccguggugaugaccgacggcuccgccagcgagcgggcggacaccaagauccuguucaucgaggagggcaagaucguccacaucagcccccuguccgggagcgcccagcacguggaggagugcuccugcuacccccgcuacccgggcgugcggugcgucugccgcgacaacuggaaggggagcaaccggcccaucguggacaucaacgugaaggacuacuccaucgucagcuccuacgugugcagcggccucgugggcgacacgccccgcaagaacgacuccagcuccagcuccuacugccugaaccccaacaacgaggagggcgggcacggggucaagggcugggccuucgacgacgggaacgacguguggaugggccggaccaucagcgagaagcugcgcuccggcuacgagaccuucaaggucaucgggggcuggagcaagccgaacuccaagcuccagaucaaccgccaggugaucguggaccgggggaaccggagcggcuacuccgggaucuucagcgucgagggcaagagcugcgugaaccgcugcuucuacguggagcugauccggggccgcaagcaggagaccgaggucugguggacguccaacagcaucgugguguucugcgggaccuccggcaccuacgggaccggcagcuggcccgacggggccgacaucaaccugaugcccaucuga

SEQ ID NO: 79250 - RNA, 1410 nt, Artificial Sequence; identical to SEQ ID NO: 79124
  derived and/or modified CDS sequence (opt1) from neuraminidase__InfluenzaA__ABG80043

SEQ ID NO: 79251 - RNA, 1410 nt, Artificial Sequence; identical to SEQ ID NO: 79137
  derived and/or modified CDS sequence (opt1) from neuraminidase__InfluenzaA__ABG80054

SEQ ID NO: 79252 - RNA, 1410 nt, Artificial Sequence; identical to SEQ ID NO: 79124
  derived and/or modified CDS sequence (opt1) from neuraminidase__InfluenzaA__ABG80065

SEQ ID NO: 79253 - RNA, 1410 nt, Artificial Sequence
  derived and/or modified CDS sequence (opt1) from neuraminidase__InfluenzaA__ABG80076
augaaccccaaccagaagaucaucaccaucggcagcgugucccugaccaucgccacgaucugcuuccucaugcagaucgccauccuggucaccaccgugacccugcacuucaagcaguacgagugcaacagcccgcccaacaaccaggugaugcucugcgagcccacgaucaucgagcgcaacaucaccgagaucgucuaccugaccaacaccacgaucgagaaggagaucugccccaagcuggcggaguaccggaacugguccaagccgcagugcaagaucaccggguucgcccccuucagcaaggacaacuccauccgccucagcgccggcggggacaucugggugacccgggagcccuacguguccugcgaccccggcaagugcuaccaguucgcccuggggcagggcaccacgcugaacaaccgccacagcaacgacaccguccacgaccggaccccguaccgcacccuccugaugaacgagcugggcgugcccuuccaccucgggacgaagcaggucugcaucgccugguccagcuccagcugccacgacggcaaggcguggcugcacgugugcgugaccgggcacgacgagaacgccaccgccuccuucaucuacgacggccggcugguggacagcaucggguccuggagcaagaacauccuccgcacccaggaguccgagugcgucugcaucaacggcacgugcaccguggugaugaccgacggcagcgccuccgagcgggcggacaccaagauccuguucaucgaggaggggaagaucguccacaucagcccccugagcggcuccgcccagcacguggaggagugcagcugcuacccccgcuacccgggggugcggugcgucugccgcgacaacuggaagggcuccaaccggcccaucguggacaucaacgugaaggacuacagcaucgucuccagcuacgugugcuccggccucgugggggacacgccccgcaagaacgacagcuccagcuccagcuacugccggaaccccaacaacgagaagggcucccacggggucaagggcugggccuucgacgacgggaacgacguguggaugggccgcaccaucagcgaggagcugcgguccggcuacgagaccuucaaggucaucgggggcuggagcaagccgaacuccaagcugcagaucaaccgccaggugaucguggaccgggggaaccgcagcggcuacuccgggaucuucagcgucgagggcaagaacugcaucaaccggugcuucuacguggagcucauccgcggccgcaagcaggagaccgaggugugguggacgagcaacuccaucgucguguucugcgggaccagcggcaccuacgggaccggcuccuggcccgacggggccgacaucaaccugaugcccaucuga

SEQ ID NO: 79254 - RNA, 1410 nt, Artificial Sequence
  derived and/or modified CDS sequence (opt1) from neuraminidase__InfluenzaA__ABG80087
augaaccccaaccagaagaucaucaccaucggcagcgugucccugaccaucgccacgaucugcuuccucaugcagaucgccguccuggugaccaccgugacccugcacuucaagcaguacgagugcaacagcccgcccuccaaccaggucaugcucugcgagcccacgaucaucgagcgcaacaucaccgagaucguguaccugaccaacaccacgaucgagaaggagaucugccccaagcuggcggaguaccggaacuggagcaagccgcagugcaagaucaccggguucgcccccuucuccaaggacaacagcauccgccucuccgccggcggggacaucugggugacccgggagcccuacgucagcugcgaccccggcaagugcuaccaguucgcccuggggcagggcaccacgcugaacaaccgccacuccaacgacaccgugcacgaccggaccccguaccgcacccuccugaugaacgagcugggcgugcccuuccaccucgggacgaagcaggucugcauggccuggagcuccagcuccugccacgacggcaaggcguggcugcacgugugcgugaccgggcacgacgagaacgccaccgccagcuucaucuacgacggccggcuggucgacuccaucgggagcugguccaagaacauccuccgcacccaggagagcgagugcgugugcaucaacggcacgugcaccguggucaugaccgacggcuccgccagcgagcgggcggacaccaagauccuguucaucgaggaggggaagaucgugcacaucagcccccuguccggcagcgcccagcacguggaggagugcuccugcuacccccgcuacccggggguccggugcgugugccgcgacaacuggaagggcagcaaccggcccaucguggacaucaacgucaaggacuacuccaucgugagcuccuacgugugcagcggccucgucggggacacgccccgcaagaacgacuccagcuccagcuccuacugccggaaccccaacaacgagaagggcagccacggggugaagggcugggccuucgacgacgggaacgacgucuggaugggccgcaccaucuccgaggagcugcggagcggcuacgagaccuucaaggugaucgggggcugguccaagccgaacagcaagcugcagaucaaccgccaggugaucgucgaccgggggaaccgcuccggcuacagcgggaucuucagcguggagggcaaguccugcaucaaccggugcuucuacguggagcucauccgcggccgcaagcaggagaccgaggucugguggacgagcaacuccaucgugguguucugcgggaccagcggcaccuacgggaccggcuccuggcccgacggggccgacaucaaccugaugcccaucuga

SEQ ID NO: 79255 - RNA, 1410 nt, Artificial Sequence; identical to SEQ ID NO: 79181
  derived and/or modified CDS sequence (opt1) from neuraminidase__InfluenzaA__ABG80098

SEQ ID NO: 79256 - RNA, 1410 nt, Artificial Sequence; identical to SEQ ID NO: 79125
  derived and/or modified CDS sequence (opt1) from neuraminidase__InfluenzaA__ABG80109

SEQ ID NO: 79257 - RNA, 1410 nt, Artificial Sequence
  derived and/or modified CDS sequence (opt1) from neuraminidase__InfluenzaA__ABG80120
augaaccccaaccagaagaucaucaccaucggcagcgugucccugaccaucgccacgaucugcuuccucaugcagaucgccauccuggucaccaccgugacccugcacuucaagcaguacgagugcaacagcccgcccuccaaccaggugaugcucugcgagcccacgaucaucgagcgcaacaucaccgagaucgucuaccugaccaacaccacgaucgagaaggagaucugccccaagcuggcggaguaccggaacuggagcaagccgcagugcaagaucaccggguucgcccccuucuccaaggacaacagcauccgccucuccgccggcggggacaucugggugacccgggagcccuacgugagcugcgaccccggcaagugcuaccaguucgcccuggggcagggcaccacgcugaacaaccgccacuccaacgacaccguccacgaccggaccccguaccgcacccuccugaugaacgagcugggcgugcccuuccaccucgggacgaagcaggucugcaucgccuggagcuccagcuccugccacgacggcaaggcguggcugcacgugugcgugaccgggcacgacgagaacgccaccgccagcuucaucuacgacggccggcugguggacuccaucgggagcugguccaagaacauccuccgcacccaggagagcgagugcaucugcaucaacggcacgugcaccgucgugaugaccgacggcuccgccagcgagcgggcggacaccaagauccuguucaucgaggaggggaagaucgugcacaucagcccccuguccggcagcgcccagcacgucgaggagugcuccugcuacccccgcuacccgggggugcggugcgugugccgcgacaacuggaagggcagcaaccggcccaucgucgacaucaacgugaaggacuacuccaucgugagcuccuacgucugcagcggccucgugggggacacgccccgcaagaacgacuccagcuccagcuccuacugccggaaccccaacaacgagaagggcagccacggggugaagggcugggccuucgacgacgggaacgacgucuggaugggccgcaccaucuccgaggagcugcggagcggcuacgagaccuucaaggugaucgggggcugguccaagccgaacagcaagcugcagaucaaccgccaggucaucguggaccgggggaaccgcuccggcuacagcgggaucuucagcguggagggcaaguccugcaucaaccggugcuucuacgucgagcucauccgcggccgcaagcaggagaccgaggugugguggacgagcaacuccaucguggucuucugcgggaccagcggcaccuacgggaccggcuccuggcccgacggggccgacaucaaccugaugcccaucuga

SEQ ID NO: 79258 - RNA, 1410 nt, Artificial Sequence
  derived and/or modified CDS sequence (opt1) from neuraminidase__InfluenzaA__ABG80131
augaaccccaaccagaagaucaucaccaucggcagcgugucccugaccaucgccacgaucugcuuccucaugcagaucgccaucauggucaccaccgugacccugcacuucaagcaguacgagugcaacagcccgcccuccaaccaggugaugcugugcgagcccacgaucaucgagcgcaacaucaccgagaucgucuaccucaccaacaccacgaucgagaaggagaucugccccaagcuggcggaguaccggaacuggagcaagccgcagugcaagaucaccggguucgcccccuucuccaaggacaacagcauccgccuguccgccggcggggacaucugggugacccgggagcccuacgugagcugcgaccccggcaagugcuaccaguucgcccucgggcagggcaccacgcugaacaaccgccacuccaacgacaccguccacgaccggaccccguaccgcacccugcucaugaacgagcugggcgugcccuuccaccuggggacgaagcaggucugcaucgccuggagcuccagcuccugccacgacggcaaggcguggcuccacgugugcgugaccgggcacgacgagaacgccaccgccagcuucaucuacgacggccggcugguggacuccaucgggagcugguccaagaacauccugcgcacccaggagagcgagugcgucugcaucaacggcacgugcaccguggugaugaccgacggcuccgccagcgagcgggcggacaccaagauccucuucaucgaggaggggaagaucguccacaucagcccccuguccggcagcgcccagcacguggaggagugcuccugcuacccccgcuacccgggggugcggugcgucugccgcgacaacuggaagggcagcaaccggcccaucguggacaucaacgugaaggacuacuccaucgucagcuccuacgugugcagcggccuggugggggacacgccccgcaagaacgacuccagcuccagcuccuacugccggaaccccaacaacgagaagggcagccacggggucaagggcugggccuucgacgacgggaacgacguguggaugggccgcaccaucuccgaggagcuccggagcggcuacgagaccuucaaggucaucgggggcugguccaagccgaacagcaagcugcagaucaaccgccaggugaucguggaccgggggaaccgcuccggcuacagcgggaucuucagcgucgagggcaaguccugcaucaaccggugcuucuacguggagcugauccgcggccgcaagcaggagaccgaggugugguggacgagcaacuccaucgucguguucugcgggaccagcggcaccuacgggaccggcuccuggcccgacggggccgacaucaaccucaugcccaucuga

SEQ ID NO: 79259 - RNA, 1410 nt, Artificial Sequence; identical to SEQ ID NO: 79125
  derived and/or modified CDS sequence (opt1) from neuraminidase__InfluenzaA__ABG80142

SEQ ID NO: 79260 - RNA, 1410 nt, Artificial Sequence; identical to SEQ ID NO: 79181
  derived and/or modified CDS sequence (opt1) from neuraminidase__InfluenzaA__ABG80153

SEQ ID NO: 79261 - RNA, 1410 nt, Artificial Sequence; identical to SEQ ID NO: 79125
  derived and/or modified CDS sequence (opt1) from neuraminidase__InfluenzaA__ABG80164

SEQ ID NO: 79262 - RNA, 1413 nt, Artificial Sequence; identical to SEQ ID NO: 78852
  derived and/or modified CDS sequence (opt1) from neuraminidase__InfluenzaA__ABG80186

SEQ ID NO: 79263 - RNA, 1410 nt, Artificial Sequence; identical to SEQ ID NO: 78085
  derived and/or modified CDS sequence (opt1) from neuraminidase__InfluenzaA__ABG80197

SEQ ID NO: 79264 - RNA, 1410 nt, Artificial Sequence; identical to SEQ ID NO: 78277
  derived and/or modified CDS sequence (opt1) from neuraminidase__InfluenzaA__ABG80219

SEQ ID NO: 79265 - RNA, 1410 nt, Artificial Sequence
  derived and/or modified CDS sequence (opt1) from neuraminidase__InfluenzaA__ABG80230
augaaccccaaccagaagaucaucaccaucggcagcgugucccugaccaucgccacgaucugcuuccucaugcagaucgccauccuggucaccaccgugacccugcacuucaagcaguacgagugcaacagcccgcccaacaaccaggugaugcucugcgagcccacgaucaucgagcgcaacaucaccgagaucgucuaccugaccaacaccacgaucgagaaggagaucugccccaagcuggcggaguaccggaacugguccaagccgcagugcaacaucaccggguucgcccccuucagcaaggacaacuccauccgccucagcgccggcggggacaucugggugacccgggagcccuacguguccugcgaccccgacaagugcuaccaguucgcccugggccaggggaccacgcugaacaacggccacagcaacgacaccguccacgaccgcaccccguaccggacccuccugaugaacgagcugggcgugcccuuccaccucgggacgcgccaggugugcaucgccugguccagcuccagcugccacgacggcaaggcguggcugcacgucugcgugaccggggacgacgagaacgccaccgccuccuucaucuacaacggccggcugguggacagcaucggguccuggagcaagaacauccuccgcacccaggaguccgagugcgucugcaucaacggcacgugcaccguggugaugaccgacggcagcgccuccgggaaggcggacaccaagauccuguucaucgaggagggcaagaucguccacaucagcacgcugagcgaguccgcccagcacguggaggagugcagcugcuacccccgguaccccggggugcgcugcgucugccgggacaacuggaagggcuccaaccgcccgaucguggacaucaacgugaaggacuacagcaucgucuccagcuacgugugcuccggccucgugggggacacgccccggaagaacgacagcuucuccagcucccacugccuggaccccaacaacgaggagggcgggcacggcgucaaggggugggccuucgacgacggcaacgacguguggaugggccgcaccaucagcgagaagcugcgguccggguacgagaccuucaaggucaucgagggcuggagcaagcccaacuccaagcuccagaccaaccgccaggugaucguggagcgggggaaccgcagcggcuacuccgggaucuucagcgucgagggcaaguccugcaucaaccggugcuucuacguggagcugauccgcggccggaaggaggagaccgaggugugguggaccagcaacagcaucgucguguucugcgggaccuccggcacguacgggaccggcagcuggccggacggggccgacaucaaccugaugcccaucuga

SEQ ID NO: 79266 - RNA, 1410 nt, Artificial Sequence; identical to SEQ ID NO: 78615
  derived and/or modified CDS sequence (opt1) from neuraminidase__InfluenzaA__ABG80241

SEQ ID NO: 79267 - RNA, 1410 nt, Artificial Sequence; identical to SEQ ID NO: 78615
  derived and/or modified CDS sequence (opt1) from neuraminidase__InfluenzaA__ABG80252

SEQ ID NO: 79268 - RNA, 1410 nt, Artificial Sequence; identical to SEQ ID NO: 79199
  derived and/or modified CDS sequence (opt1) from neuraminidase__InfluenzaA__ABG80263

SEQ ID NO: 79269 - RNA, 1410 nt, Artificial Sequence; identical to SEQ ID NO: 78760
  derived and/or modified CDS sequence (opt1) from neuraminidase__InfluenzaA__ABG80274

SEQ ID NO: 79270 - RNA, 1410 nt, Artificial Sequence; identical to SEQ ID NO: 78351
  derived and/or modified CDS sequence (opt1) from neuraminidase__InfluenzaA__ABG80285

SEQ ID NO: 79271 - RNA, 1410 nt, Artificial Sequence; identical to SEQ ID NO: 78351
  derived and/or modified CDS sequence (opt1) from neuraminidase__InfluenzaA__ABG80296

SEQ ID NO: 79272 - RNA, 1410 nt, Artificial Sequence; identical to SEQ ID NO: 78351
  derived and/or modified CDS sequence (opt1) from neuraminidase__InfluenzaA__ABG80307

SEQ ID NO: 79273 - RNA, 1410 nt, Artificial Sequence; identical to SEQ ID NO: 78738
  derived and/or modified CDS sequence (opt1) from neuraminidase__InfluenzaA__ABG80318

SEQ ID NO: 79274 - RNA, 1410 nt, Artificial Sequence; identical to SEQ ID NO: 78351
  derived and/or modified CDS sequence (opt1) from neuraminidase__InfluenzaA__ABG80329

SEQ ID NO: 79275 - RNA, 1410 nt, Artificial Sequence; identical to SEQ ID NO: 78351
  derived and/or modified CDS sequence (opt1) from neuraminidase__InfluenzaA__ABG80340

SEQ ID NO: 79276 - RNA, 1410 nt, Artificial Sequence; identical to SEQ ID NO: 79209
  derived and/or modified CDS sequence (opt1) from neuraminidase__InfluenzaA__ABG80351

SEQ ID NO: 79277 - RNA, 1410 nt, Artificial Sequence
  derived and/or modified CDS sequence (opt1) from neuraminidase__InfluenzaA__ABG80373
augaaccccaaccagaagaucaucaccaucggcagcgugucccugaccaucgccacgaucugcuuccucaugcagaucgccauccuggucaccaccgugacccugcacuucaagcaguacgagugcaacagcccgcccaacaaccaggugaugcucugcgagcccacgaucaucgagcgcaacaucaccgagaucgucuaccugaccaacaccacgaucgagaaggagaucugccccaagcuggcggaguaccggaacugguccaagccgcagugcaagaucaccggguucgcccccuucagcaaggacaacuccauccgccucagcgccggcggggacaucugggugacccgggagcccuacguguccugcgaccccggcaagugcuaccaguucgcccuggggcagggcaccacgcugaacaaccgccacagcaacgacaccguccacgaccggaccccguaccgcacccuccugaugaacgagcugggcgugcccuuccaccucgggacgaagcaggucugcaucgccugguccagcuccagcugccacgacggcaaggcguggcugcacgugugcgugaccgggcacgacgagaacgccaccgccuccuucaucuacgacggccggcugguggacagcaucggguccuggagcaagaacauccuccgcacccaggaguccgagugcgucugcaucaacggcacgugcaccguggugaugaccgacggcagcgccuccgagcgggcggacaccaagauccuguucaucgaggaggggaagaucguccacaucagcccccugagcggcuccgcccagcacguggaggagugcagcugcuacccccgcuacccgggggugcggugcgucugccgcgacaacuggaagggcuccaaccggcccaucguggacaucaacgugaaggaccacagcaucgucuccagcuacgugugcuccggccucgugggggacacgccccgcaagaacgacagcuccagcuccagcuacugccggaaccccaacaacgagaagggcucccacggggucaagggcugggccuucgacgacgggaacgacguguggaugggccgcaccaucagcgaggagcugcgguccggcuacgagaccuucaaggucaucgggggcuggagcaagccgaacuccaagcugcagaucaaccgccaggugaucguggaccgggggaaccgcagcggcuacuccgggaucuucagcgucgagggcaagagcugcaucaaccggugcuucuacguggagcucauccgcggccgcaagcaggagaccgaggugugguggacguccaacagcaucgucguguucugcgggaccuccggcaccuacgggaccggcagcuggcccgacggggccgacaucaaccugaugcccaucuga

SEQ ID NO: 79278 - RNA, 1410 nt, Artificial Sequence; identical to SEQ ID NO: 79277
  derived and/or modified CDS sequence (opt1) from neuraminidase__InfluenzaA__ABG80384

SEQ ID NO: 79279 - RNA, 1410 nt, Artificial Sequence
  derived and/or modified CDS sequence (opt1) from neuraminidase__InfluenzaA__ABG80395
augaaccccaaccagaagaucaucaccaucggcagcgugucccugaccaucgccacgaucugcuuccucaugcagaucgccauccuggucaccaccgugacccugcacuucaagcaguacgagugcaacagcccgcccaacaaccaggugaugcucugcgagcccacgaucaucgagcgcaacaucaccgagaucgucuaccugaccaacaccacgaucgagaaggagaucugccccaagcuggcggaguaccggaacugguccaagccgcagugcaagaucaccggguucgcccccuucagcaaggacaacuccauccgccucagcgccggcggggacaucugggugacccgggagcccuacguguccugcgaccccggcaagugcuaccaguucgcccuggggcagggcaccacgcugaacaaccgccacagcaacgacaccguccacgaccggaccccguaccgcacccuccugaugaacgagcugggcgugcccuuccaccucgggacgaagcaggucugcaucgccugguccagcuccagcugccacgacggcaaggcguggcugcacgugugcgugaccgggcacgacgagaacgccaccgccuccuucaucuacgacggccggcugguggacagcaucggguccuggagcaagaacauccuccgcacccaggaguccgagugcgucugcaucaacggcacgugcaccguggugaugaccgacggcagcgccuccaagcgggcggacaccaagauccuguucaucgaggaggggaagaucguccacaucagcccccugagcggcuccgcccagcacguggaggagugcagcugcuacccccgcuacccgggggugcggugcgucugccgcgacaacuggaagggcuccaaccggcccaucguggacaucaacgugaaggacuacagcaucgucuccagcuacgugugcuccggccucgugggggacacgccccgcaagaacgacagcuccagcuccagcuacugccggaaccccaacaacgagaagggcucccacggggucaagggcugggccuucgacgacgggaacgacguguggaugggccgcaccaucagcgaggagcugcgguccggcuacgagaccuucaaggucaucgggggcuggagcaagccgaacuccaagcugcagaucaaccgccaggugaucguggaccgggggaacaugagcggcuacuccgggaucuucagcgucgagggcaagagcugcaucaaccgcugcuucuacguggagcucauccggggccgcaagcaggagaccgaggugugguggacguccaacagcaucgucguguucugcgggaccuccggcaccuacgggaccggcagcuggcccgacggggccgacaucaaccugaugcccaucuga

SEQ ID NO: 79280 - RNA, 1410 nt, Artificial Sequence; identical to SEQ ID NO: 79209
  derived and/or modified CDS sequence (opt1) from neuraminidase__InfluenzaA__ABG80406

SEQ ID NO: 79281 - RNA, 1410 nt, Artificial Sequence; identical to SEQ ID NO: 79209
  derived and/or modified CDS sequence (opt1) from neuraminidase__InfluenzaA__ABG80417

SEQ ID NO: 79282 - RNA, 1410 nt, Artificial Sequence; identical to SEQ ID NO: 79209
  derived and/or modified CDS sequence (opt1) from neuraminidase__InfluenzaA__ABG80428

SEQ ID NO: 79283 - RNA, 1410 nt, Artificial Sequence; identical to SEQ ID NO: 78150
  derived and/or modified CDS sequence (opt1) from neuraminidase__InfluenzaA__ABG88292

SEQ ID NO: 79284 - RNA, 1413 nt, Artificial Sequence; identical to SEQ ID NO: 79074
  derived and/or modified CDS sequence (opt1) from neuraminidase__InfluenzaA__ABG88314

SEQ ID NO: 79285 - RNA, 1413 nt, Artificial Sequence
  derived and/or modified CDS sequence (opt1) from neuraminidase__InfluenzaA__ABG88325
augaaccccaaccagaagaucaucaccaucggcagcaccuccaucgccaucgggaucaucagccugauccuccagaucggcaacaucaucuccaucugggccagccacuccauccagacggggagccagaaccacaccggcaucugcaaccagcgcaucaucaccuacgagaacuccaccugggugaaccagacguacgucaacaucaacaacaccagcgugguggcggggaaggacaagaccuccaugacccuggccggcaacagcucccugugcccgauccggggcugggccaucuacacgaaggacaacagcauccgcaucggguccaagggcgacgucuucgugauccgggagcccuucaucagcugcucccaccucgagugccgcaccuucuuccugacccagggggcccugcucaacgacaagcacagcaacggcaccgugaaggaccggucccccuaccgcgcccugaugagcugcccccugggggaggcgccgucccccuacaacagccgguucgagagcgucgccugguccgccagcgccugccacgacggccucggcuggcugacgaucgggaucuccggccccgacaacggggcgguggccgugcugaaguacaacggcaucaucaccgagaccaucaagagcuggaagaagcgcauccuccggacccaggaguccgagugcgucugcaugaacggcagcugcuucacgaucaugaccgacgggcccuccaacggcgccgccagcuaccgcaucuucaagaucgagaaggggcgggugaccaaguccaucgagcuggacgccccgaacuaccacuacgaggagugcagcugcuaccccgacaccggcacggugaugugcgucugccgcgacaacuggcacggguccaaccggcccugggugagcuucaaccagaaccuggacuaccagaccggcuacaucugcuccggcguguucggggacaacccccgcccgaaggacggcgaggggagcugcaaccccgucaccgcggacggcgccgacggggugaagggcuucuccuaccgguacggcaacgggguguggaucggccgcaccaagagcaaccggcuccgcaagggguucgagaugaucugggaccccaacggcuggacggacaccgacuccgacuucagcaugaagcaggacaucgucgccaugaccgacugguccggguacagcggcagcuucgugcagcaccccgagcugaccggccuggacugcaugcggccgugcuucuggguggagcucguccgcgggcugccccgggagaacacgaccaucuggaccuccggcagcuccaucagcuucugcggggugaacuccgacaccgccaacuggagcuggcccgacggcgccgagcugcccuucacgaucgacaaguga

SEQ ID NO: 79286 - RNA, 1413 nt, Artificial Sequence
  derived and/or modified CDS sequence (opt1) from neuraminidase__InfluenzaA__ABG88336
augaaccccaaccagaagaucaucaccaucggcagcaucugcauggccaucgggaucaucucccugauccuccagaucggcaacaucaucagcaucugggugucccacagcauccagaccgggaaccagaaccacacgggcaucugcaaccagcgcaucaucaccuacgagaacuccaccugggucaaccagaccuacgugaacaucaacaacacgaacguggucgccgggaaggacaccaccagcgugacccuggcgggcaacuccagccugugcccggugcggggcugggccaucuacuccaaggacaacagcauccgcaucggguccaagggcgacgucuucgugauccgggagcccuucaucagcugcucccaccucgagugccgcacguucuuccugacccagggggcccugcucaacgacaagcacagcaacggcaccgugaaggaccggucccccuaccgcgcccugaugagcugccccaucggggaggccccgucccccuacaacagccgguucgaguccgucgcguggagcgccagcgccugccacgacggcaugggcuggcugaccaucgggaucuccggccccgacgacggggccguggcggugcucaaguacaacggcaucaucacggagaccaucaagagcuggcgcaagcggauccugcgcacccaggaguccgagugcgucugcgugaacggcagcugcuucaccaucaugacggacgggcccuccaacggcccggccagcuacaagaucuucaagaucgagaaggggaagaucaccaaguccaucgagcuggacgcccccaacagccacuacgaggagugcuccugcuaccccgacaccggcaccgugaugugcgucugccgggacaacuggcacgggagcaaccgccccuggguguccuucaaccagaaccucgacuaccagcugggcuacaucugcagcggcaucuucggggacaacccgcggcccaaggacggcaagggguccugcggccccgugacggucgacggggccgacggcgugaagggcuucagcuaccgcuacgggaacggcguguggaucgggcggaccaaguccaacagcucccgcaagggcuucgagaugaucugggaccccaacggguggaccgacaccgacagcaacuuccuggucaagcaggacgugguggccaugacggacugguccggcuacagcggcagcuucguccagcacccggagcucaccgggcuggacugcaugcggcccugcuucuggguggagcugauccgcggccggccccgcgagaccaccacgaucuggaccuccgggagcuccaucagcuucugcggcgucaacuccgacaccgugaacuggagcuggcccgacggcgcggagcucccguucaccaucgacaaguga

SEQ ID NO: 79287 - RNA, 1413 nt, Artificial Sequence
  derived and/or modified CDS sequence (opt1) from neuraminidase__InfluenzaA__ABG88347
augaaccccaaccagaagaucaucaccaucggcagcaucugcauggccaucgggaucaucggccugauccuccagaucgggaacaucaucuccaucugggugagccacuccauccagaccggcagccagaaccacacggggaucugcaaccagcgcaucaucaccuacgagaacuccaccugggucaaccagaccuacgugaacaucaacaacacgaacguggucgccggcaaggacaccaccagcgugacccuggcgggcaacuccagccugugcccggugcgggggugggccaucuacuccaaggacaacagcauccgcaucggcuccaagggggacgucuucgugauccgggagcccuucaucagcugcucccaccucgagugccgcacguucuuccugacccagggcgcccugcucaacgacaagcacagcaacgggaccgugaaggaccggucccccuaccgcgcccugaugagcugccccaucggcgaggccccgucccccuacaacagccgguucgaguccgucgcguggagcgccagcgccugccacgacggcaugggguggcugaccaucggcaucuccgggcccgacgacggcgccguggcggugcucaaguacaacggcaucaucacggagaccaucaagagcuggcgcaagcggauccugcgcacccaggaguccgagugcgucugcgugaacgggagcugcuucaccaucaugacggacggccccuccaacgggccggccagcuacaagaucuucaagaucgagaagggcaagaucaccaaguccaucgagcuggacgcccccaacagccacuacgaggagugcuccugcuaccccgacaccgggaccgugaugugcgucugccgggacaacuggcacggcagcaaccgccccuggguguccuucaaccagaaccucgacuaccagcugggcuacaucugcagcgggaucuucggcgacaacccgcggcccaaggacgggaagggcuccugcgggcccgugacggucgacggcgccgacggcgugaagggguucagcuaccgcuacggcaacgggguguggaucggccggaccaaguccaacagcucccgcaagggguucgagaugaucugggaccccaacggcuggaccgacaccgacagcaacuuccuggucaagcaggacgugguggccaugacggacugguccggcuacagcgggagcuucguccagcacccggagcucaccggccuggacugcaugcggcccugcuucuggguggagcugauccgcgggcggccccgcgagaccaccacgaucuggaccuccggcagcuccaucagcuucugcggcgucaacuccgacaccgugaacuggagcuggcccgacggggcggagcucccguucaccaucgacaaguga

SEQ ID NO: 79288 - RNA, 1410 nt, Artificial Sequence
  derived and/or modified CDS sequence (opt1) from neuraminidase__InfluenzaA__ABG88358
augaaccccaaccagaagaucaucaccaucggcagcgugucccugaccaucgccacgaucugcuuccucaugcagaucgccauccuggucaccaccgugacccugcacuucaagcaguacgagugcaacagcccgcccaacaaccaggugaugcucugcgagcccacgaucaucgagcgcaacaucaccgagaucgucuaccugaccaacaccacgaucgagaaggagaucugccccaagcuggcggaguaccggaacugguccaagccgcagugcaagaucaccggguucgcccccuucagcaaggacaacuccauccgccucagcgccggcggggacaucugggugacccgggagcccuacguguccugcgaccccggcaagugcuaccaguucgcccuggggcagggcaccacgcugaacaaccgccacagcaacgacaccguccacgaccggaccccguaccgcacccuccugaugaacgagcugggcgugcccuuccaccucgggacgaagcaggucugcaucgccugguccagcuccagcugccacgacggcaaggcguggcugcacgugugcgugaccgggcacgacaagaacgccaccgccuccuucaucuacgacggccggcugguggacagcaucggguccuggagcaagaacauccuccgcacccaggaguccgagugcgucugcaucaacggcacgugcaccguggugaugaccgacggcagcgccuccgaccgggcggacaccaagauccuguucaucgaggaggggaagaucguccacauccgcccccugagcggcagcgcccagcacguggaggagugcuccugcuacccccgguacccgggggugcgcugcgucugccgggacaacuggaagggcagcaaccgccccaucguggacaucaacgugaaggacuacuccaucgucagcuccuacgugugcagcggccucgugggggacacgccccggaagaacgacuccagcuccagcuccuacugcuggaaccccaacaacgagaagggcgggcacggcgucaaggggugggccuucgacgacggcaacgacguguggaugggccgcaccaucagcgaggagucccggagcggguacgagaccuucaaggucaucggcgggugguccaagccgaacagcaagcugcagaucaaccgccaggugaucguggaccggggcaaccgcuccggguacagcggcaucuucuccgucgagggcaagagcugcaucaaccggugcuucuacguggagcugauccgcgggcgcaagcaggagaccgaggugugguggacgagcaacuccaucgucguguucugcggcaccagcgggaccuacggcaccggguccuggcccgacggcgccgacaucaaccucaugcccaucuga

SEQ ID NO: 79289 - RNA, 1410 nt, Artificial Sequence; identical to SEQ ID NO: 79137
  derived and/or modified CDS sequence (opt1) from neuraminidase__InfluenzaA__ABG88369

SEQ ID NO: 79290 - RNA, 1410 nt, Artificial Sequence; identical to SEQ ID NO: 79137
  derived and/or modified CDS sequence (opt1) from neuraminidase__InfluenzaA__ABG88380

SEQ ID NO: 79291 - RNA, 1410 nt, Artificial Sequence; identical to SEQ ID NO: 79137
  derived and/or modified CDS sequence (opt1) from neuraminidase__InfluenzaA__ABG88391

SEQ ID NO: 79292 - RNA, 1410 nt, Artificial Sequence; identical to SEQ ID NO: 79124
  derived and/or modified CDS sequence (opt1) from neuraminidase__InfluenzaA__ABG88402

SEQ ID NO: 79293 - RNA, 1410 nt, Artificial Sequence; identical to SEQ ID NO: 79181
  derived and/or modified CDS sequence (opt1) from neuraminidase__InfluenzaA__ABG88413

SEQ ID NO: 79294 - RNA, 1410 nt, Artificial Sequence; identical to SEQ ID NO: 79125
  derived and/or modified CDS sequence (opt1) from neuraminidase__InfluenzaA__ABG88424

SEQ ID NO: 79295 - RNA, 1410 nt, Artificial Sequence; identical to SEQ ID NO: 79125
  derived and/or modified CDS sequence (opt1) from neuraminidase__InfluenzaA__ABG88435

SEQ ID NO: 79296 - RNA, 1410 nt, Artificial Sequence; identical to SEQ ID NO: 79125
  derived and/or modified CDS sequence (opt1) from neuraminidase__InfluenzaA__ABG88446

SEQ ID NO: 79297 - RNA, 1410 nt, Artificial Sequence
  derived and/or modified CDS sequence (opt1) from neuraminidase__InfluenzaA__ABG88457
augaaccccaaccagaagaucaucaccaucggcagcgugucccugaccacggccaccaucugcuuccucaugcagaucgccauccuggucaccaccgugacgcugcacuucaagcaguacgagugcaacagcccgcccaacaaccaggugaugcucugcgagcccaccaucaucgagcgcaacaucaccgagaucgucuaccugaccaacacgaccaucgagaaggagaucugccccaagcuggcggaguaccggaacugguccaagccgcagugcaagaucaccggguucgcccccuucagcaaggacaacuccauccgccucagcgccggcggggacaucugggugacccgggagcccuacguguccugcgaccccggcaagugcuaccaguucgcccuggggcagggcacgacccugaacaaccgccacagcaacgacaccguccacgaccggaccccguaccgcacgcuccugaugaacgagcugggcgugcccuuccaccucgggaccaagcaggucugcaucgccugguccagcuccagcugccacgacggcaaggcguggcugcacgugugcgugaccgggcacgacgagaacgccaccgccuccuucaucuacgacggccggcugguggacagcaucggguccuggagcaagaacauccuccgcacgcaggaguccgagugcgucugcaucaacgggaccugcaccguggugaugaccgacggcagcgccuccgagcgggcggacacgaagauccuguucaucaaggagggcaagaucguccacaucagcccccugagcggcuccgcccagcacguggaggagugcagcugcuacccccgcuacccgggggugcggugcgucugccgcgacaacuggaagggcuccaaccggcccaucguggacaucaacgugaaggacuacagcaucgucuccagcuacgugugcuccggccucgugggggacacgccccgcaagaacgacagcuccagcuccagcuacugccagaaccccaacaacgagaagggcucccacggggucaagggcugggccuucgacgacgggaacgacguguggaugggccggaccaucagcgaggagcugcgcuccggcuacgagaccuucaaggucaucgggggcuggagcaagccgaacuccaagcugcagaucaaccgccaggugaucguggaccgggggaaccggagcggcuacuccgggaucuucagcgucgagggcaagagcugcaucaaccgcugcuucuacguggagcucauccggggccgcaagcaggagaccgaggugugguggaccuccaacagcaucgucguguucugcgggaccuccggcaccuacgggacgggcagcuggcccgacggggccgacaucaaccugaugcccaucuga

SEQ ID NO: 79298 - RNA, 1410 nt, Artificial Sequence; identical to SEQ ID NO: 79125
  derived and/or modified CDS sequence (opt1) from neuraminidase__InfluenzaA__ABG88468

SEQ ID NO: 79299 - RNA, 1410 nt, Artificial Sequence; identical to SEQ ID NO: 79125
  derived and/or modified CDS sequence (opt1) from neuraminidase__InfluenzaA__ABG88479

SEQ ID NO: 79300 - RNA, 1410 nt, Artificial Sequence; identical to SEQ ID NO: 79125
  derived and/or modified CDS sequence (opt1) from neuraminidase__InfluenzaA__ABG88490

SEQ ID NO: 79301 - RNA, 1410 nt, Artificial Sequence; identical to SEQ ID NO: 79125
  derived and/or modified CDS sequence (opt1) from neuraminidase__InfluenzaA__ABG88501

SEQ ID NO: 79302 - RNA, 1410 nt, Artificial Sequence; identical to SEQ ID NO: 79125
  derived and/or modified CDS sequence (opt1) from neuraminidase__InfluenzaA__ABG88512

SEQ ID NO: 79303 - RNA, 1410 nt, Artificial Sequence; identical to SEQ ID NO: 79125
  derived and/or modified CDS sequence (opt1) from neuraminidase__InfluenzaA__ABG88523

SEQ ID NO: 79304 - RNA, 1410 nt, Artificial Sequence
  derived and/or modified CDS sequence (opt1) from neuraminidase__InfluenzaA__ABG88534
augaaccccaaccagaagaucaucaccaucggcagcgugucccugaccaucgccacgaucugcuuccucaugcagaucgccauccuggucaccaccgugacccugcacuucaagcaguacgagugcaacagcccgcccuccaaccaggugaugcucugcgagcccacgaucaucgagcgcaacaucaccgagaucgucuaccugaccaacaccacgaucgagaaggagaucugccccaagcuggcggaguaccggaacuggagcaagccgcagugcaagaucaccggguucgcccccuucuccaaggacaacagcauccgccucuccgccggcggggacaucugggugacccgggagcccuacgugagcugcgaccccggcaagugcuaccaguucgcccuggggcagggcaccacgcugaacaaccgccacuccaacgacaccguccacgaccggaccccguaccgcacccuccugaugaacgagcugggcgugcccuuccaccucgggacgaagcaggucugcaucgccuggagcuccagcuccugccacgacggcaaggcguggcugcacgugugcgugaccgggcacgacgagaacgccaccgccagcuucaucuacgacggccggcugguggacuccaucgggagcugguccaagaacauccuccgcacccaggagagcgagugcgucugcaucaacggcacgugcaccguggugaugaccgacggcuccgccagcgagcgggcggacaccaagauccuguucaucgaggaggggaagaucguccacaucagcccccuguccggcagcgcccagcacguggaggagugcuccugcuacccccgcuacccgggggugcggugcgucugccgcgacaacuggaagggcagcaaccggcccaucguggacaucaacgugaaggacuacuccaucgucagcuccuacgugugcagcggccucgugggggacacgccccgcaagaacgacuccagcuccagcuccuacugccggaaccccaacaacgagaagggcagccacggggucaagggcugggccuucgacgacgggaacgacguguggaugggccgcaccaucuccgaggagcugcggagcggcuacgagaccuucaaggucaucgggggcugguccaagccgaacagcaagcugcagaucaaccgccaggugaucguggaccgggggaaccgcuccggcuacagcgggaucuucagcgucgagaacaaguccugcaucaaccggugcuucuacguggagcucauccgcggccgcaagcaggagaccgaggugugguggacgagcaacuccaucgucguguucugcggcaccagcgggaccuacggcaccggguccuggcccgacggcgccgacaucaaccugaugcccaucuga

SEQ ID NO: 79305 - RNA, 1410 nt, Artificial Sequence; identical to SEQ ID NO: 78817
  derived and/or modified CDS sequence (opt1) from neuraminidase__InfluenzaA__ABG88567

SEQ ID NO: 79306 - RNA, 1410 nt, Artificial Sequence
  derived and/or modified CDS sequence (opt1) from neuraminidase__InfluenzaA__ABG88600
augaaccccaaccagaagaucaucaccaucggcagcgugucccugaccaucgccacgaucugcuuccucaugcagaucgccauccuggucaccaccgugacccugcacuucaagcaguacgagugcaacagcccgcccaacaaccaggugaugcucugcgagcccacgaucaucgagcgcaacaucaccgagaucgucuaccugaccaacaccacgaucgagaaggagaucugccccaagccggcggaguaccggaacugguccaagccccagugcaacaucaccggguucgcccccuucagcaaggacaacuccauccgccugagcgccggcggggacaucugggugacccgggagcccuacguguccugcgacccggacaagugcuaccaguucgcccucggccaggggaccacgcugaacaacggccacagcaacgacaccguccacgaccgcacccccuaccggacccugcucaugaacgagcugggcgugcccuuccaccuggggacgaagcaggucugcaucgccugguccagcuccagcugccacgacggcaaggcguggcuccacgugugcgugaccggggacgacgagaacgccaccgccuccuucaucuacaacggccgccugguggacagcaucggguccuggagcaagaagauccugcggacccaggaguccgagugcgucugcaucaacggcacgugcaccguggugaugaccgacggcagcgccuccgggaaggcggacaccaagauccucuucaucgaggagggcaagaucguccacacgagccugcugagcggguccgcccagcacguggaggagugcagcugcuacccccgcuacccgggcgugcggugcgucugccgcgacaacuggaagggcuccaaccggcccaucguggacaucaacgugaaggacuacagcaucgucuccagcuacgugugcuccgggcucgugggcgacacgccccgcaagaacgacagcuccagcuccagccacugccuggaccccaacaacgaggagggcgggcacggggucaagggcugggccuucgacgacggcaacgacguguggauggggcggaccaucuccgagaagcugcgcagcggcuacgagaccuucaaggucaucgaggggugguccaagccgaacagcaagcuccagaucaaccgccaggugaucguggaccggggcaaccgguccggguacagcggcaucuucuccgucgagggcaagagcugcaucaaccgcugcuucuacguggagcugauccgggggcgcaagcaggagaccgaggugcuguggaccagcaacuccaucgucguguucugcggcaccagcgggaccuacggcacgggguccuggcccgacggcgccgacaucaaccucaugcccaucuga

SEQ ID NO: 79307 - RNA, 1410 nt, Artificial Sequence; identical to SEQ ID NO: 78178
  derived and/or modified CDS sequence (opt1) from neuraminidase__InfluenzaA__ABG88611

SEQ ID NO: 79308 - RNA, 1410 nt, Artificial Sequence; identical to SEQ ID NO: 78190
  derived and/or modified CDS sequence (opt1) from neuraminidase__InfluenzaA__ABG88622

SEQ ID NO: 79309 - RNA, 1410 nt, Artificial Sequence; identical to SEQ ID NO: 78178
  derived and/or modified CDS sequence (opt1) from neuraminidase__InfluenzaA__ABG88633

SEQ ID NO: 79310 - RNA, 1410 nt, Artificial Sequence; identical to SEQ ID NO: 79229
  derived and/or modified CDS sequence (opt1) from neuraminidase__InfluenzaA__ABG88655

SEQ ID NO: 79311 - RNA, 1410 nt, Artificial Sequence; identical to SEQ ID NO: 79229
  derived and/or modified CDS sequence (opt1) from neuraminidase__InfluenzaA__ABG88666

SEQ ID NO: 79312 - RNA, 1410 nt, Artificial Sequence; identical to SEQ ID NO: 78615
  derived and/or modified CDS sequence (opt1) from neuraminidase__InfluenzaA__ABG88677

SEQ ID NO: 79313 - RNA, 1410 nt, Artificial Sequence; identical to SEQ ID NO: 79229
  derived and/or modified CDS sequence (opt1) from neuraminidase__InfluenzaA__ABG88688

SEQ ID NO: 79314 - RNA, 1410 nt, Artificial Sequence; identical to SEQ ID NO: 78615
  derived and/or modified CDS sequence (opt1) from neuraminidase__InfluenzaA__ABG88699

SEQ ID NO: 79315 - RNA, 1410 nt, Artificial Sequence; identical to SEQ ID NO: 78351
  derived and/or modified CDS sequence (opt1) from neuraminidase__InfluenzaA__ABG88710

SEQ ID NO: 79316 - RNA, 1410 nt, Artificial Sequence; identical to SEQ ID NO: 78351
  derived and/or modified CDS sequence (opt1) from neuraminidase__InfluenzaA__ABG88721

SEQ ID NO: 79317 - RNA, 1410 nt, Artificial Sequence
  derived and/or modified CDS sequence (opt1) from neuraminidase__InfluenzaA__ABG88732
augaaccccaaccagaagaucaucaccaucggcagcgugucccugaccaucgccacgaucugcuuccucaugcagaucgccauccuggucaccaccgugacccugcacuucaagcaguacgagugcaacagcccgcccaacaaccaggugaugcucugcgagcccacgaucaucgagcgcaacaucaccgagaucgucuaccugaccaacaccacgaucgagaaggagaucugccccaagcuggcggaguaccggaacugguccaagccgcagugcaagaucaccggguucgcccccuucagcaaggacaacuccauccgccucagcgccggcggggacaucugggugacccgggagcccuacguguccugcgaccccggcaagugcuaccaguucgcccuggggcagggcaccacgcugaacaaccgccacagcaacgacaccguccacgaccggaccccguaccgcacccuccugaugaacgagcugggcgugcccuuccaccucgggacgaagcaggucugcaucgccugguccagcuccagcugccacgacggcaaggcguggcugcacgugugcgugaccgggcacgacgagaacgccaccgccuccuucaucuacgacggccggcugguggacagcaucggguccuggagcaagaacauccuccgcacccaggaguccgagugcgucugcaucaacggcacgugcaccguggugaugaccgacggcagcgccuccgagcgggcggacaccaagauccuguucaucgaggaggggaagaucguccacaucagcccccugagcggcuccgcccagcacguggaggagugcagcugcuacccccgcuacccgggggugcggugcgucugccgcgacaacuggaagggcuccaaccggcccaucguggacaucaacgugaaggacuacagcaucgucuccagcuacgugugcuccggccucgugggggacacgccccgcaagaacgacagcuccagcuccagcuacugccggaaccccaacaacgagaagggcucccacggggucaagggcugggccuucgacgacgggaacgacguguggaugggccgcaccaucagcgaggagcugcgguccggcuacgagaccuucaaggucaucgggggcuggagcaagccgaacuccaagcugcagaucaaccgccaggugaucguggagcgggggaaccgcagcggcuacuccgggaucuucagcgucgagggcaagagcugcaucaaccggugcuucuacguggagcucauccgcggccgcaagcaggagaccgaggugugguggacguccaacagcaucgucguguucugcgggaccuccggcaccuacgggaccggcagcuggcccgacggggccgacaucaaccugaugcccaucuga

SEQ ID NO: 79318 - RNA, 1410 nt, Artificial Sequence; identical to SEQ ID NO: 79277
  derived and/or modified CDS sequence (opt1) from neuraminidase__InfluenzaA__ABG88743

SEQ ID NO: 79319 - RNA, 1410 nt, Artificial Sequence; identical to SEQ ID NO: 79277
  derived and/or modified CDS sequence (opt1) from neuraminidase__InfluenzaA__ABG88754

SEQ ID NO: 79320 - RNA, 1410 nt, Artificial Sequence; identical to SEQ ID NO: 78543
  derived and/or modified CDS sequence (opt1) from neuraminidase__InfluenzaA__ABG88765

SEQ ID NO: 79321 - RNA, 1410 nt, Artificial Sequence; identical to SEQ ID NO: 79209
  derived and/or modified CDS sequence (opt1) from neuraminidase__InfluenzaA__ABG88776

SEQ ID NO: 79322 - RNA, 1410 nt, Artificial Sequence; identical to SEQ ID NO: 79209
  derived and/or modified CDS sequence (opt1) from neuraminidase__InfluenzaA__ABG88787

SEQ ID NO: 79323 - RNA, 1410 nt, Artificial Sequence
  derived and/or modified CDS sequence (opt1) from neuraminidase__InfluenzaA__ABG88820
augaaccccaaccagaagaucaucaccaucggcagcgugucccugaccaucagcacgaucugcuucuucaugcagaucgccauccucaucaccaccgucacccugcacuucaagcaguacgaguucaacuccccgcccaacaaccaggugaugcugugcgagcccacgaucaucgagcgcaacaucaccgagaucguguaccucaccaacaccacgaucgagaaggagaagugccccaagcuggccgaguaccggaacuggagcaagccgcagugcaacaucaccggguucgcgcccuucuccaaggacaacagcauccgccuguccgccggcggggacaucugggucacccgggagcccuacgugagcugcgaccccgacaagugcuaccaguucgcccucggccaggggaccacgcugaacaacgugcacuccaacgacaccguccgcgaccggaccccguaccgcacccugcucaugaacgagcugggcgugcccuuccaccugggcacgaagcaggucugcaucgccuggagcuccagcuccugccacgacgggaaggccuggcuccacgugugcgugaccggcgacgacaagaacgcgaccgccagcuucaucuacaacgggcggcugguggacuccaucgucagcugguccaaggagauccugcgcacccaggagagcgagugcgugugcaucaacggcacgugcaccguggucaugaccgacggguccgccagcggcaaggccgacaccaagauccucuucaucgaggagggcaagaucgugcacacgagcacccuguccgggagcgcgcagcacguggaggagugcuccugcuacccccgguaccccggcguccgcugcgugugccgggacaacuggaaggggagcaaccgcccgaucguggacaucaacaucaaggacuacuccaucgucagcuccuacgugugcagcggccuggugggcgacacgccccggaagaacgacuccagcuccagcucccacugccucgaccccaacaacgaggagggcgggcacggggucaagggcugggccuucgacgacgggaacgacguguggaugggccgcaccaucagcgagaagcugcggcugggcuacgagaccuucaaggucaucgaggggugguccaaccccaacagcaagcuccagaccaaccgccaggugaucguggaccggggcaaccgcuccggguacagcggcaucuucuccgucgagggcaagagcugcaucaaccggugcuucuacguggagcugauccgcgggcggaaggaggagaccgaggugcuguggaccagcaacuccaucgucguguucugcggcacgagcgggaccuacggcaccggguccuggccggacggcgccgacaucaaccucaugcccaucuga

SEQ ID NO: 79324 - RNA, 1350 nt, Artificial Sequence
  derived and/or modified CDS sequence (opt1) from neuraminidase__InfluenzaA__ABI16506
augaaccccaaccagaagaucaucaccaucggcagcaucugcauggugaucgggaucgucucccugaugcuccagaucggcaacauggugagccugugggugucccacagcauccagaccgggaaccagcaccaggucgagccgaucuccaacacgaacuuccugaccgagaaggccguggccagcgugacccucgcgggcaacuccagccugugccccauccgcgggugggccguccacuccaaggacaacagcauccggaucggcuccaagggcgacguguucgugauccgcgagcccuucaucagcugcucccaccuggagugccggaccuucuuccucacgcagggggcccugcugaacgacaagcacagcaacggcaccgucaaggaccgcagcccccaccggacccucauguccugcccggugggggaggcccccucccccuacaacagccgcuucgaguccguggccuggagcgcgagcgccugccacgacggcaccuccuggcugacgaucgggaucagcggccccgacaacggcgccgucgccgugcugaaguacaacgggaugaucaccgacaccaucaaguccuggcggaacaacauccuccgcacccaggagagcgagugcgugugcgucaacggcuccugcuucacggugaugaccgacgggccgagcaacggccaggcguccuacaagaucuucaagauggagaagggcaagguggucaagagcguggagcuggacgcccccaacuaccacuacgaggagugcuccugcuaccccgacgccggggagaucacgugcgugugccgggacaacuggcacggcagcaaccgccccugggucuccuucaaccagaaccuggaguaccagaucggguacaucugcagcggcguguucggggacaacccgcggcccaacgacggcaccggcuccugcgggcccgugagccccaacggcgccuacggggucaagggcuucuccuucaaguacgggaacggcguguggaucggccgcaccaagagcccguccagccgguccggguucgagaugaucugggaccccaacggcuggaccgagaccgacagcagcuucuccgucaagcaggacaucguggccaucaccgacuggagcggguacuccggcagcuucgugcagcaccccgagcucacggggcuggacugcauccgccccugcuucugggucgagcugauccggggccgcccgaaggaguccaccaucuggaccagcggcuccagcaucuccuucugcggggugaacagcgacaccguguccuggagcuggcccgacggcgcggagcuccccuucacgaucgacaaguga

SEQ ID NO: 79325 - RNA, 1413 nt, Artificial Sequence; identical to SEQ ID NO: 78989
  derived and/or modified CDS sequence (opt1) from neuraminidase__InfluenzaA__ABI20840

SEQ ID NO: 79326 - RNA, 1413 nt, Artificial Sequence
  derived and/or modified CDS sequence (opt1) from neuraminidase__InfluenzaA__ABI20862
augaaccccaaccagaagaucaucaccaucggcagcaucugcaugaccaucgggaucaucucccugauccuccagaucggcaacaucaucagcaucugggugucccacagcauccagacggggucccagaaccacaccggcaucugcaaccagcgcaucaucaccuacgagaacagcaccugggucaaccagacguacgugaacaucaacaacaccaacguggucgccgggaaggacaccaccuccgugacgcuggccggcaacagcucccugugcccgauccggggcugggcgaucuacagcaaggacaacuccauccgcaucgggagcaagggcgacguguucgucauccgggagcccuucaucuccugcagccaccucgagugccgcaccuucuuccugacccagggggcccugcucaacgacaagcacuccaacggcaccgugaaggaccggagccccuaccgcgcccugauguccugccccaucggggaggccccgagccccuacaacucccgguucgagagcguggccuggagcgcguccgccugccacgacggcaugggcuggcugacgaucgggaucagcggccccgacgacggggccgucgccgugcucaaguacaacggcaucaucaccgagaccaucaaguccuggcgcaagcggauccugcgcacccaggagagcgagugcgugugcgucaacggcuccugcuucacgaucaugaccgacgggcccagcaacggcccggcguccuaccggaucuucaagaucgagaaggggaagaucaccaagagcaucgagcuggacgcccccaacucccacuacgaggagugcagcugcuaccccgacaccggcacggugaugugcgugugccgcgacaacuggcacggguccaaccggcccugggucagcuucaaccagaaccucgacuaccagaccggcuacaucugcuccggcguguucggggacaacccgcgccccaaggacggcaaggggagcugcgaccccgugaccgucgacggcgccgacggggugaagggcuucuccuaccgguacggcaacgggguguggaucggccgcaccaagagcaacuccagccggaagggguucgagaugaucugggaccccaacggcuggacggacaccgacuccaacuuccuggucaagcaggacgugguggccaugaccgacuggagcggguacagcggcuccuucguccagcacccggagcugaccggccucgacugcaugcgccccugcuucuggguggagcugauccgggggcgcccccgggagaagacgaccaucuggaccagcggcuccagcaucuccuucugcggggucaacagcgacaccgccaacugguccuggcccgacggcgcggagcugccguucacgaucgacaaguga

SEQ ID NO: 79327 - RNA, 1413 nt, Artificial Sequence
  derived and/or modified CDS sequence (opt1) from neuraminidase__InfluenzaA__ABI20873
augaaccccaaccagaagaucaucaccaucggcagcaucuccauggccaucgggaucaucagccugacccuccagaucggcaacaucaucuccaucugggccagccacuccauccagacggggagccagaaccacaccggcaucugcaaccagcgcaucaucaccuacgagaacuccaccugggugaaccagacguacgucaacaucaacaacaccaacgugguggcggagaaggacaagaccagcgucacccuggccgggaacuccagccugugcccgauccggggcugggccaucuacacgaaggacaacuccauccgcaucggcagcaagggggacguguucgugauccgggagcccuucaucuccugcagccaccucgagugccgcaccuucuuccugacccagggcgcccugcucaacgacaagcacuccaacgggaccgucaaggaccggagccccuaccgcgcccugauguccugcccccugggcgaggcgccgagccccuacaacucccgguucgagagcguggccuggagcgccacggccugccacgacgggaucggcuggcucaccaucggcaucuccgggcccgacaacggcgcgguggccguccugaaguacaacggggugaucaccgagaccaucaagagcuggaagaagcagauccugcgcacgcaggaguccgagugcgugugcgucaacggcagcugcuucaccaucaugaccgacggccccuccaacggggccgccagcuaccggaucuucaagaucgagaagggcaagaucaccaaguccaucgagcucgacgccccgaacuuccacuacgaggagugcagcugcuaccccgacacggggaccgugaugugcgugugccgcgacaacuggcacggcuccaaccggcccugggucagcuucaaccagaaccuggacuaccagaucggguacaucugcuccggcguguucggcgacaacccccgcccgaaggacggggagggcagcugcaaccccgugaccgucgacggggcggacggcgugaagggguucuccuaccgguacggcaacggcguguggaucgggcgcaccaagagcaaccggcugcgcaagggcuucgagaucaucugggaccccaacggguggacggacaccgacuccgacuucagcgucaagcaggacgugguggccaugaccgacugguccggcuacagcggguccuucguccagcaccccgagcucaccggccuggacugcaugcggccgugcuucuggguggagcugguccgcggccucccccgggagaacgccacgaucuggaccagcgggagcuccaucagcuucugcggcgugaacuccgacaccgccaacuggagcuggcccgacggggccgagcugcccuucaccaucgacaaguga

SEQ ID NO: 79328 - RNA, 1410 nt, Artificial Sequence; identical to SEQ ID NO: 79124
  derived and/or modified CDS sequence (opt1) from neuraminidase__InfluenzaA__ABI20895

SEQ ID NO: 79329 - RNA, 1410 nt, Artificial Sequence; identical to SEQ ID NO: 79137
  derived and/or modified CDS sequence (opt1) from neuraminidase__InfluenzaA__ABI20906

SEQ ID NO: 79330 - RNA, 1410 nt, Artificial Sequence; identical to SEQ ID NO: 79125
  derived and/or modified CDS sequence (opt1) from neuraminidase__InfluenzaA__ABI20928

SEQ ID NO: 79331 - RNA, 1410 nt, Artificial Sequence; identical to SEQ ID NO: 79125
  derived and/or modified CDS sequence (opt1) from neuraminidase__InfluenzaA__ABI20939

SEQ ID NO: 79332 - RNA, 1410 nt, Artificial Sequence; identical to SEQ ID NO: 79125
  derived and/or modified CDS sequence (opt1) from neuraminidase__InfluenzaA__ABI20950

SEQ ID NO: 79333 - RNA, 1410 nt, Artificial Sequence; identical to SEQ ID NO: 79125
  derived and/or modified CDS sequence (opt1) from neuraminidase__InfluenzaA__ABI20961

SEQ ID NO: 79334 - RNA, 1410 nt, Artificial Sequence; identical to SEQ ID NO: 78851
  derived and/or modified CDS sequence (opt1) from neuraminidase__InfluenzaA__ABI20983

SEQ ID NO: 79335 - RNA, 1410 nt, Artificial Sequence
  derived and/or modified CDS sequence (opt1) from neuraminidase__InfluenzaA__ABI20994
augaaccccaaccagaagaucaucaccaucggcagcgugucccugaccaucgccacgaucugcuuccucaugcagaucgccauccuggucaccaccgugacccugcacuucaagcaguacgagugcaacagcccgcccaacaaccaggugaugcucugcgagcccacgaucaucgagcgcaacaucaccgagaucgucuaccugaccaacaccacgaucgagaaggagaucugccccaagcuggcggaguaccggaacugguccaagccgcagugcaacaucaccggguucgcccccuucagcaaggacaacuccauccgccucagcgccggcggggacaucugggugacccgggagcccuacguguccugcgaccccgacaagugcuaccaguucgcccugggccaggggaccacgcugaacaacggccacagcaacgacaccguccacaaccgcaccccguaccggacccuccugaugaacgagcugggcgugcccuuccaccucgggacgaagcaggucugcaucgccugguccagcuccagcugccacgacggcaaggcguggcugcacgugugcgugaccggggacgacgagaacgccaccgccuccuucaucuacaacggccgccugguggacagcaucggguccuggagcaagaagauccuccggacccaggaguccgagugcgucugcaucaacggcacgugcaccguggugaugaccgacggcagcgccuccgggaaggcggacaccaagauccuguucaucgaggagggcaagaucguccacacgagcagccuguccgggagcgcccagcacguggaggagugcuccugcuacccccgcuaccccggcgugcggugcgucugccgcgacaacuggaagggcagcaaccggccgaucguggacaucaacgugaaggacuacuccaucgucagcuccuacgugugcagcgggcucgugggcgacacgccccgcaagaacgacuccagcuccagcucccacugccuggaccccaacaacgaggagggcgggcacggggucaagggcugggccuucgacgacggcaacgacguguggauggggcggaccaucagcgagaagcugcgcuccggcuacgagaccuucaaggucaucgagggguggagcaagcccaacuccaagcuccagaucaaccgccaggugaucguggaccggggcaaccggagcggguacuccggcaucuucagcgucgagagcaaguccugcaucaaccgcugcuucuacguggagcugauccggggccgcaagcaggagaccgaggugcuguggaccagcaacuccaucgucguguucugcgggaccagcggcaccuacgggacgggcuccuggccggacggggccgacaucaaccucaugcccaucuga

SEQ ID NO: 79336 - RNA, 1410 nt, Artificial Sequence
  derived and/or modified CDS sequence (opt1) from neuraminidase__InfluenzaA__ABI21005
augaaccccaaccagaagaucaucaccaucggcagcgugucccugaccaucgccacgaucugcuuccucaugcagaucgccguccuggugaccaccgugacccugcacuucaagcaguacgagugcaacagcccgcccaacaaccaggucaugcucugcgagcccacgaucaucgagcgcaacaucaccgagaucguguaccugaccaacaccacgaucgagaaggagaucugccccaagcuggcggaguaccggaacugguccaagccgcagugcaacaucaccggguucgcccccuucagcaaggacaacuccauccgccucagcgccggcggggacaucugggugacccgggagcccuacgucuccugcgaccccgacaagugcuaccaguucgcccugggccaggggaccacgcugaacaacggccacagcaacgacaccgugcacgaccgcaccccguaccggacccuccugaugaacgagcugggcgugcccuuccaccucgggacgaagcaggucugcaucgccugguccagcuccagcugccacgacggcaaggcguggcugcacgugugcgugaccggggacgacgagaacgccaccgccuccuucaucuacaacggccgccuggccgacagcaucggguccuggagcaagaagauccuccggacccaggaguccgagugcgucugcaucaacggcacgugcaccguggugaugaccgacggcagcgcguccgggaaggccgacaccaagauccuguucaucgaggagggcaagaucguccacacgagccugcucagcggguccgcccagcacguggaggagugcagcugcuacccccgcuaccccggcgugcggugcgucugccgcgacaacuggaagggcuccaaccggccgaucguggacaucaacgugaaggacuacagcaucgucuccagcuacgugugcuccgggcuggugggcgacacgccccgcaagaacgacagcuccagcuccagccacugccuggaccccaacaacgaggagggcgggcacggggucaagggcugggccuucgacgacggcaacgacguguggauggggcggaccaucuccgagaagcuccgcagcggcuacgagaccuucaaggucaucgaggggugguccaagcccaacagcaagcugcagaucaaccgccaggugaucguggaccggggcaaccgguccggguacagcggcaucuucuccgucgagggcaagagcugcaucaaccgcugcuucuacguggagcugauccgggggcgcaagcaggagaccgaggugcucuggaccagcaacuccaucgucguguucugcggcaccagcgggaccuacggcacgggguccuggccggacggcgccgacaucaaccugaugcccaucuga

SEQ ID NO: 79337 - RNA, 1410 nt, Artificial Sequence; identical to SEQ ID NO: 78178
  derived and/or modified CDS sequence (opt1) from neuraminidase__InfluenzaA__ABI21016

SEQ ID NO: 79338 - RNA, 1410 nt, Artificial Sequence
  derived and/or modified CDS sequence (opt1) from neuraminidase__InfluenzaA__ABI21027
augaaccccaaccagcgcaucaucaccaucggcagcgugucccugaccaucgccacgaucugcuuccucaugcagaucgccauccuggucaccaccgugacccugcacuucaagcaguacgagugcaacagcccgcccaacaaccaggugaugcucugcgagcccacgaucaucgagcggaacaucaccgagaucgucuaccugaccaacaccacgaucgagaaggagaucugccccaagcuggcggaguaccgcaacugguccaagccgcagugcaacaucaccggguucgcccccuucagcaaggacaacuccauccggcucagcgccggcggggacaucugggugacccgcgagcccuacguguccugcgaccccgacaagugcuaccaguucgcccugggccaggggaccacgcugaacaacggccacagcaacgacaccguccacgaccggaccccguaccgcacccuccugaugaacgagcugggcgugcccuuccaccucgggacgcgccaggugugcaucgccugguccagcuccagcugccacgacggcaaggcguggcugcacgucugcgugaccggggacgacgagaacgccaccgccuccuucaucuacaacggccggcugguggacagcaucggguccuggagcaagaagauccuccggacccaggaguccgagugcgucugcaucaacggcacgugcaccguggugaugaccgacggcagcgccuccgggaaggcggacaccaagauccuguucaucgaggagggcaagaucguccacaucagcacgcugagcggguccgcccagcacguggaggagugcagcugcuacccccgcuaccccggcgugcggugcgucugccgcgacaacuggaagggcuccaaccggccgaucguggacaucaacgugaaggacuacagcaucgucuccagcuacgugugcuccgggcucgugggcgacacgccccgcaagaacgacagcuucuccagcucccacugccuggaccccaacaacgaggagggcgggcacggggucaagggcugggccuucgacgacggcaacgacguguggauggggcggaccaucagcgagaagcugcgcuccggcuacgagaccuucaaggucaucgagggguggagcaagcccaacuccaagcuccagaccaaccgccaggugaucguggagcggggcaaccggagcggguacuccggcaucuucagcgucgagggcaaguccugcaucaaccgcugcuucuacguggagcugauccgggggcgcaaggaggagaccgaggugugguggaccagcaacagcaucgucguguucugcggcaccccggggacguacggcaccggguccuggcccgacggcgccgacaucaaccugaugcccaucuga

SEQ ID NO: 79339 - RNA, 1410 nt, Artificial Sequence; identical to SEQ ID NO: 78615
  derived and/or modified CDS sequence (opt1) from neuraminidase__InfluenzaA__ABI21038

SEQ ID NO: 79340 - RNA, 1410 nt, Artificial Sequence
  derived and/or modified CDS sequence (opt1) from neuraminidase__InfluenzaA__ABI21049
augaaccccaaccagaagaucaucaccaucggcagcgugucccugaccaucgccacgaucugcuuccucaugcagaucgccauccuggucaccaccgugacccugcacuucaagcagcacgagugcaacagcccgcccaacaaccaggugaugcucugcgagcccacgaucaucgagcgcaacaucaccgagaucgucuaccugaccaacaccacgaucgagaaggagaucugccccaagcugguggaguaccggaacugguccaagccgcagugcaacaucaccggguucgcgcccuucagcaaggacaacuccauccgccucagcgccggcggggacaucugggugacccgggagcccuacgucuccugcgaccccgacaagugcuaccaguucgcccugggccaggggaccacgcugaacaacggccacagcaacgacaccgugcacgaccgcaccccguaccggacccuccugaugaacgagcugggcgugcccuuccaccucgggacgcgccaggucugcaucgccugguccagcuccagcugccacgacggcaaggccuggcugcacgugugcgugaccggggacgacaagaacgcgaccgccuccuucaucuacaacggccggcuggucgacagcaucggguccuggagcaagaagauccuccgcacccaggaguccgagugcgugugcaucaacggcacgugcaccguggucaugaccgacggcagcgccuccgggaaggccgacaccaagauccuguucaucgaggagggcaagaucgugcacaucagcacgcugagcggguccgcgcagcacguggaggagugcagcugcuacccccgguaccccggcguccgcugcgugugccgggacaacuggaagggcuccaaccgcccgaucguggacaucaacgucaaggacuacagcaucguguccggguacgugugcagcggccucgucggggacacgccccggaagaacgacuccuucagcuccagccacugccuggaccccaacaacgaggagggcgggcacggcgugaagggcugggccuucgacgacgggaacgacgucuggaugggccgcaccaucuccgagaagcugcggagcggguacgagaccuucaaggugaucgagggcugguccaagcccaacagcaagcuccagaucaaccgccaggugaucgucgagcgggggaaccgcuccggcuacagcggcaucuucuccguggagggcaagagcugcaucaaccggugcuucuacguggagcugauccgcgggcggaaggaggagaccgaggucugguggaccuccaacagcaucgugguguucugcgggaccagcggcaccuacgggacgggcuccuggccggacggcgccgacaucaaccugaugcccaucuga

SEQ ID NO: 79341 - RNA, 1410 nt, Artificial Sequence
  derived and/or modified CDS sequence (opt1) from neuraminidase__InfluenzaA__ABI21060
augaaccccaaccagaagaucaucaccaucggcagcgugucccugaccaucgccacgaucugcuuccucaugcagaucgccauccuggucaccaccgugacccugcacuucaagcagcacgagugcaacagcccgcccaacaaccaggugaugcucugcgagcccacgaucaucgagcgcaacaucaccgagaucgucuaccugaccaacaccacgaucgagaaggagaucugccccaagccgguggaguaccggaacugguccaagccccagugcaacaucaccggguucgcgcccuucagcaaggacaacuccauccgccugagcgccggcggggacaucugggugacccgggagcccuacgucuccugcgacccggacaagugcuaccaguucgcccucggccaggggaccacgcugaacaacggccacagcaacgacaccgugcacgaccgcacccccuaccggacccugcucaugaacgagcugggcgugcccuuccaccuggggacgcgccaggucugcaucgccugguccagcuccagcugccacgacggcaaggccuggcuccacgugugcgugaccggggacgacaagaacgcgaccgccuccuucaucuacaacggccggcuggucgacagcaucggguccuggagcaagaagauccugcgcacccaggaguccgagugcgugugcaucaacggcacgugcaccguggucaugaccgacggcagcgccuccgggaaggccgacaccaagauccucuucaucgaggagggcaagaucgugcacaucagcacgcugagcggguccgcgcagcacguggaggagugcagcugcuacccccgguacccgggcguccgcugcgugugccgggacaacuggaagggcuccaaccgccccaucguggacaucaacgucaaggacuacagcaucguguccagcuacgugugcuccgggcuggucggcgacacgccccggaagaacgacagcuucuccagcucccacugccucgaccccaacaacgaggagggcgggcacggggugaagggcugggccuucgacgacggcaacgacgucuggauggggcgcaccaucagcgagaagcugcgguccggcuacgagaccuucaaggugaucgagggguggagcaagccgaacuccaagcugcagaucaaccgccaggugaucgucgagcggggcaaccgcagcggguacuccggcaucuucagcguggagggcaaguccugcaucaaccggugcuucuacguggagcucauccgcgggcggaaggaggagaccgaggucugguggaccagcaacagcaucgugguguucugcggcaccuccgggaccuacggcacggggagcuggcccgacggcgccgacaucaaccugaugcccaucuga

SEQ ID NO: 79342 - RNA, 1410 nt, Artificial Sequence
  derived and/or modified CDS sequence (opt1) from neuraminidase__InfluenzaA__ABI21071
augaaccccaaccagaagaucaucaccaucggcagcgugucccugaccaucagcacgaucugcuucuucaugcagaucgccauccucaucaccaccgucacccugcacuucaagcaguacgaguucaacuccccgcccaacaaccaggugaugcugugcgagcccacgaucaucgagcgcaacaucaccgagaucguguaccucaccaacaccacgaucgagaaggagaucugccccaagcuggccgaguaccggaacuggagcaagccgcagugcgacaucaccggguucgcgcccuucuccaaggacaacagcauccgccuguccgccggcggggacaucugggucacccgggagcccuacgugagcugcgaccccgacaagugcuaccaguucgcccucggccaggggaccacgcugaacaacgugcacuccaacgacaccguccacgaccgcaccccguaccggacccugcucaugagcgagcugggcgugcccuuccaccugggcacgaagcaggucugcaucgccugguccagcuccagcugccacgacgggaaggccuggcuccacgugugcgugaccggcgacgacaagaacgcgaccgccuccuucaucuacaacgggcgccugguggacagcaucgucuccuggagcaaggagauccugcggacccaggaguccgagugcgugugcaucaacggcacgugcaccguggucaugaccgacgggagcgccagcggcaaggccgacaccaagauccucuucaucgaggagggcaagaucgugcacacguccacccugagcggguccgcgcagcacguggaggagugcagcugcuacccccgcuaccccggcguccggugcgugugccgcgacaacuggaagggguccaaccggccgaucguggacaucaacaucaaggacuacagcaucgucuccagcuacgugugcuccggccuggugggcgacacgccccgcaagaacgacagcuccagcuccagccacugccucgaccccaacaacgaggagggcgggcacggggucaagggcugggccuucgacgacgggaacgacguguggaugggccggaccaucuccgagaagcugcgcagcggcuacgagaccuucaaggucaucgaggggugguccaaccccaacagcaagcugcagaucaaccgccaggugaucguggaccggggcaaccgguccggguacagcggcaucuucagcgucgaggggaaguccugcaucaaccgcugcuucuacguggagcucauccggggccgcaaggaggagaccgaggugcuguggaccagcaacuccaucgucguguucugcggcaccagcgggacguacggcaccggguccuggccggacggcgccgacaucaaccugaugcccaucuga

SEQ ID NO: 79343 - RNA, 1410 nt, Artificial Sequence
  derived and/or modified CDS sequence (opt1) from neuraminidase__InfluenzaA__ABI21082
augaaccccaaccagaagaucaucaccaucggcagcgugucccugaccaucagcacgaucugcuucuucaugcagaucgccacccucaucaccaccgucacgcugcacuucaagcaguacgaguucaacuccccgcccaacaaccaggugaugcugugcgagcccaccaucaucgagcgcaacaucaccgagaucguguaccucaccaacacgaccaucgagaaggagaucugccccaagcuggccgaguaccggaacuggagcaagccgcagugcgacaucaccggguucgcgcccuucuccaaggacaacagcauccgccuguccgccggcggggacaucugggucacccgggagcccuacgugagcugcgaccccgacaagugcuaccaguucgcccucggccaggggacgacccugaacaacgugcacuccaacgacaccguccacgaccgcaccccguaccggacgcugcucaugaacgagcugggcgugcccuuccaccugggcaccaagcaggucugcaucgccuggagcuccagcuccugccacgacgggaaggccuggcuccacgugugcgugaccggcgacgacaagaacgcgaccgccagcuucaucuacaacgggcgccugguggacuccaucgucagcugguccaaggagauccugcggacgcaggagagcgagugcgugugcaucaacgggaccugcaccguggucaugaccgacggguccgccagcggcaaggccgacacgaagauccucuucaucgaggagggcaagaucgugcacaccagcacccuguccgggagcgcgcagcacguggaggagugcuccugcuacccccgcuaccccggcguccggugcgugugccgcgacaacuggaaggggagcaaccggccgaucguggacaucaacaucaaggacuacuccaucgucagcuccuacgugugcagcggccuggugggcgacacgccccgcaagaacgacuccagcuccagcucccacugccucgaccccaacaacgaggagggcggccacggggucaagggcugggccuucgacgacgggaacgacguguggaugggccggaccaucagcgagaagcugcgcuccggcuacgagaccuucaaggucaucgagggguggagcaaccccaacuccaagcugcagaucaaccgccaggugaucguggaccggggcaaccggagcggguacuccggcaucuucagcgucgagggcaagagcugcaucaaccgcugcuucuacguggagcucauccgggggcgcaaggaggagaccgaggugcuguggaccuccaacagcaucgucguguucugcggcacguccgggaccuacggcaccgggagcuggccggacggcgccgacaucaaccugaugcccaucuga

SEQ ID NO: 79344 - RNA, 1410 nt, Artificial Sequence; identical to SEQ ID NO: 78760
  derived and/or modified CDS sequence (opt1) from neuraminidase__InfluenzaA__ABI21093

SEQ ID NO: 79345 - RNA, 1410 nt, Artificial Sequence
  derived and/or modified CDS sequence (opt1) from neuraminidase__InfluenzaA__ABI21104
augaaccccaaccagaagaucaucaccaucggcagcgugucccugaccaucagcacgaucugcuucuucaugcagaucgccauccucaucaccaccgucacccugcacuucaagcaguacgaguucaacuccccgcccaacaaccaggugaugcugugcgagcccacgaucaucgagcgcaacaucaccgagaucguguaccucgccaacaccaccaucgagaaggagaucugccccaagcuggcggaguaccggaacuggagcaagccgcagugcgacaucacgggguucgcccccuucuccaaggacaacagcauccgccuguccgccggcggggacaucugggucacccgggagcccuacgugagcugcgaccccgacaagugcuaccaguucgcccucggccaggggaccacccugaacaacgugcacuccaacgacacgguccacgaccgcaccccguaccggacccugcucaugaacgagcugggcgugcccuuccaccugggcaccaagcaggucugcaucgccuggagcuccagcuccugccacgacgggaaggcguggcuccacgugugcgugacgggcgacgacaagaacgccaccgccagcuucaucuacaacgggcgccugguggacuccaucgucagcugguccaaggagauccugcggacccaggagagcgagugcgugugcaucaacgggaccugcacgguggucaugaccgacggguccgccagcggcaaggcggacaccaagauccucuucaucgaggagggcaagaucgugcacaccagcacgcuguccgggagcgcccagcacguggaggagugcuccugcuacccccgcuaccccggcguccggugcgugugccgcgacaacuggaaggggagcaaccggccgaucguggacaucaacaucaaggacuacuccaucgucagcuccuacgugugcagcggccuggugggcgacacgccccgcaagaacgacuccagcuccagcucccacugccucgaccccaacaacgaggagggcggccacggggucaagggcugggccuucgacgacgggaacgacguguggaugggccggaccaucagcgagaagcugcgcuccggcuacgagaccuucaaggucaucgagggguggagcaaccccaacuccaagcugcagaucaaccgccaggugaucguggaccggggcaaccggagcggguacuccggcaucuucagcgucgaggggaagaacugcaucaaccgcugcuucuacguggagcucauccggggccgcaaggaggagaccgaggugcuguggaccagcaacuccaucgucguguucugcggcaccagcgggaccuacggcacgggguccuggccggacggcgccgacaucaaccugaugcccaucuga

SEQ ID NO: 79346 - RNA, 1410 nt, Artificial Sequence; identical to SEQ ID NO: 78351
  derived and/or modified CDS sequence (opt1) from neuraminidase__InfluenzaA__ABI21115

SEQ ID NO: 79347 - RNA, 1410 nt, Artificial Sequence; identical to SEQ ID NO: 78351
  derived and/or modified CDS sequence (opt1) from neuraminidase__InfluenzaA__ABI21126

SEQ ID NO: 79348 - RNA, 1410 nt, Artificial Sequence; identical to SEQ ID NO: 78760
  derived and/or modified CDS sequence (opt1) from neuraminidase__InfluenzaA__ABI21137

SEQ ID NO: 79349 - RNA, 1410 nt, Artificial Sequence; identical to SEQ ID NO: 78351
  derived and/or modified CDS sequence (opt1) from neuraminidase__InfluenzaA__ABI21148

SEQ ID NO: 79350 - RNA, 1410 nt, Artificial Sequence
  derived and/or modified CDS sequence (opt1) from neuraminidase__InfluenzaA__ABI21159
augaaccccaaccagaagaucaucaccaucggcagcgugucccugaccaucagcacgaucugcuucuucaugcagaucgccauccucaucaccaccgucacccugcacuucaagcaguacgaguucaacuccccgcccaacaaccaggugaugcugugcgagcccacgaucaucgagcgcaacaucaccgagaucguguaccucaccaacaccacgaucgagaaggagaucugccccaagcuggccgaguaccggaacuggagcaagccgcagugcgacaucaccggguucgcgcccuucuccaaggacaacagcauccgccuguccgccggcggggacaucugggucacccgggagcccuacgugagcugcgaccccgacaagugcuaccaguucgcccucggccaggggaccacgcugaacaacgugcacuccaacgacaccguccacgaccgcaccccguaccggacccugcucaugaacgagcugggcgugcccuuccaccugggcacgaagcaggucugcaucgccuggagcuccagcuccugccacgacgggaaggccuggcuccacgugugcgugaccggcgacgacaagaacgcgaccgccagcuucaucuacaacgggcgccugguggacuccaucgucagcugguccaaggagauccugcggacccaggagagcgagugcgugugcaucaacggcacgugcaccguggucaugaccgacggguccgccagcggcaaggccgacaccaagauccucuucaucgaggagggcaagaucgugcacacgagcacccuguccgggagcgcgcagcacguggaggagugcuccugcuacccccgcuaccccggcguccggugcgugugccgcgacaacuggaaggggagcaaccggccgaucguggacaucaacaucaaggacuacuccaucgucagcggcuacgugugcuccggccuggugggggacacgccccgcaagaacgacagcuccagcuccagccacugccucgaccccaacaacgaggagggcgggcacggcgucaaggggugggccuucgacgacggcaacgacguguggaugggccggaccaucuccgagaagcugcgcagcggguacgagaccuucaaggucaucgagggcugguccaaccccaacagcaagcugcagaucaaccgccaggugaucguggaccgggggaaccgguccggcuacagcgggaucuucuccgucgagggcaagagcugcaucaaccgcugcuucuacguggagcucauccggggccgcaaggaggagaccgaggugcuguggaccagcaacuccaucgucguguucugcgggaccagcggcacguacgggaccggcuccuggccggacggggccgacaucaaccugaugcccaucuga

SEQ ID NO: 79351 - RNA, 1410 nt, Artificial Sequence; identical to SEQ ID NO: 78351
  derived and/or modified CDS sequence (opt1) from neuraminidase__InfluenzaA__ABI21170

SEQ ID NO: 79352 - RNA, 1410 nt, Artificial Sequence; identical to SEQ ID NO: 78351
  derived and/or modified CDS sequence (opt1) from neuraminidase__InfluenzaA__ABI21181

SEQ ID NO: 79353 - RNA, 1413 nt, Artificial Sequence
  derived and/or modified CDS sequence (opt1) from neuraminidase__InfluenzaA__ABI21192
augaaccccaaccagaagaucaucaccaucggcagcaucuccaucgccaucgggaucaucagccugaugcuccagaucggcaacaucaucuccaucugggccagccacuccauccagaccgggagccagaaccacacggggaccugcaaccagcgcaucaucaccuacgagaacuccaccugggugaaccacacguacgucaacaucaacaacaccaacgugguggcgggcaaggacaagaccagcgucacccuggccggcaacuccagccugugcuccaucagcggcugggccaucuacacgaaggacaacuccauccggaucgggagcaagggcgacguguucgugauccgcgagccguucaucuccugcagccaccucgagugccggaccuucuuccugacccagggggcccugcucaacgacaagcacuccaacggcaccgucaaggaccgcagccccuaccgggcccugauguccugcccccugggggaggcgcccagcccguacaacagcaaguucgaguccguggccuggagcgccuccgccugccacgacggcaugggcuggcucacgaucgggaucagcggccccgacaacggggcgguggccguccugaaguacaacggcaucaucaccgagaccaucaaguccuggcgcaagcggauccugcgcacccaggagagcgagugcgugugcgugaacggcuccugcuucacgaucaugaccgacgggcccagcaacggcgccgccuccuacaagaucuucaagaucgagaaggggaaggucaccaagagcaucgagcucaacgcccccaacuuccacuacgaggagugcuccugcuacccggacaccggcacggugaugugcgugugccgggacaacuggcacgggagcaaccgccccugggucuccuucaaccagaaccuggacuaccagaucggcuacaucugcagcggcguguucggggacaacccccggcccaaggacggcaagggguccugcaacccggugaccgucgacggcgcggacggggugaagggcuucagcuacaaguacggcaacgggguguggaucggccgcaccaaguccaaccggcugcgcaagggguucgagaugaucugggaccccaacggcuggaccgacacggacagcgacuucuccgucaagcaggacgugguggccaucaccgacuggagcggguacagcggcuccuucguccagcaccccgagcucaccggccuggacugcauccggcccugcuucuggguggagcugguccgcgggcucccgcgggagaacaccacgaucuggaccagcggcuccagcaucuccuucugcgggguggacagcgacaccgccaacugguccuggcccgacggcgccgagcugcccuucaucaucgacaaguga

SEQ ID NO: 79354 - RNA, 1413 nt, Artificial Sequence; identical to SEQ ID NO: 78410
  derived and/or modified CDS sequence (opt1) from neuraminidase__InfluenzaA__ABI21203

SEQ ID NO: 79355 - RNA, 1413 nt, Artificial Sequence
  derived and/or modified CDS sequence (opt1) from neuraminidase__InfluenzaA__ABI21214
augaaccccaaccagaagaucaucaccaucggcagcaucuccaucgccaucgggaucaucagccugaugcuccagaucggcaacaucaucuccaucugggccagccacuccauccagaccgggagccagaaccacacgggcaucugcaaccagcgcaucaucaccuacgagaacuccaccugggugaaccacaccuacgucaacaucaacaacacgaacgugguggcggggaaggacaucaccagcgucacccuggccggcaacuccagccugugcuccaucagcggcugggccaucuacaccaaggacaacuccauccggaucgggagcaagggcgacguguucgugauccgcgagccguucaucuccugcagccaccucgagugccggacguucuuccugacccagggggcccugcucaacgacaagcacuccaacggcaccgucaaggaccgcagccccuaccgggcccugauguccugcccccugggggaggcgcccagcccguacaacagcaaguucgaguccguggccuggagcgccuccgccugccacgacggcaugggcuggcucaccaucgggaucagcggccccgacaacggggcgguggccguccugaaguacaacggcaucaucacggagaccaucaaguccuggaagaagcgcauccugcggacccaggagagcgagugcgugugcgugaacggcuccugcuucaccaucaugacggacgggcccagcaacggcgccgccuccuacaagaucuucaagaucgagaaggggaaggucaccaagagcaucgagcucaacgcccccaacuuccacuacgaggagugcuccugcuacccggacaccggcaccgugaugugcgugugccgcgacaacuggcacgggagcaaccggcccugggucuccuucaaccagaaccuggacuaccagaucggcuacaucugcagcggcguguucggggacaacccccgccccaaggacggcaagggguccugcaacccggugacggucgacggcgcggacggggugaagggcuucagcuacaaguacggcaacgggguguggaucggccggaccaaguccaaccgccugcggaagggguucgagaugaucugggaccccaacggcuggaccgacaccgacagcgacuucuccgucaagcaggacgugguggccaucacggacuggagcggguacagcggcuccuucguccagcaccccgagcucaccggccuggacugcauccgccccugcuucuggguggagcugguccgggggcucccgcgcgagaacaccaccaucuggacgagcggcuccagcaucuccuucugcgggguggacagcgacaccgccaacugguccuggcccgacggcgccgagcugcccuucaccaucgacaaguga

SEQ ID NO: 79356 - RNA, 1410 nt, Artificial Sequence
  derived and/or modified CDS sequence (opt1) from neuraminidase__InfluenzaA__ABI21247
augaaccccaaccagaagaucaucaccaucggcagcgugucccugaccaucgccacgaucugcuuccucaugcagaucgccauccuggucaccaccgugacccugcacuucaagcaguacgagugcaacagcccgcccaacaaccaggugaugcucugcgagcccacgaucaucgagcgcaacaucaccgagaucgucuaccugaccaacaccacgaucgagaaggagaagugccccaagcuggcggaguaccggaacugguccaagccgcagugcaagaucaccggguucgcccccuucagcaaggacaacuccauccgccucagcgccggcggggacaucugggugacccgggagcccuacguguccugcgaccccggcaagugcuaccaguucgcccuggggcagggcaccacgcugaacaaccgccacagcaacgacaccguccacgaccggaccccguaccgcacccuccugaugaacgagcugggcgugcccuuccaccucgggacgaagcaggucugcaucgccugguccagcuccagcugccacgacggcaaggcguggcugcacgugugcgugaccgggcacgacgagaacgccaccgccuccuucaucuacgacggccggcugguggacagcaucggguccuggagcaagaacauccuccgcacccaggaguccgagugcgucugcaucaacggcacgugcaccguggugaugaccgacggcagcgccuccgagcgggcggacaccaagauccuguucaucgaggaggggaagaucguccacaucagcccccugagcggcuccgcccagcacguggaggagugcagcugcuacccccgcuacccgggggugcggugcgucugccgcgacaacuggaagggcuccaaccggcccaucguggacaucaacgugaaggaccacagcaucgucuccagcuacgugugcuccggccucgugggggacacgccccgcaagaacgacagcuccagcuccagcuacugccggaaccccaacaacgagaagggcucccacgggaugaagggcugggccuucgacgacgggaacgacgucuggaugggccgcaccaucagcgaggagcugcgguccggcuacgagaccuucaaggugaucgggggcuggagcaagccgaacuccaagcugcagaucaaccgccaggucaucguggaccgggggaaccgcagcggcuacuccgggaucuucagcguggagggcaagagcugcaucaaccggugcuucuacgucgagcucauccgcggccgcaagcaggagaccgaggugugguggacguccaacagcaucguggucuucugcgggaccuccggcaccuacgggaccggcagcuggcccgacggggccgacaucaaccugaugcccaucuga

SEQ ID NO: 79357 - RNA, 1410 nt, Artificial Sequence; identical to SEQ ID NO: 79277
  derived and/or modified CDS sequence (opt1) from neuraminidase__InfluenzaA__ABI21258

SEQ ID NO: 79358 - RNA, 1410 nt, Artificial Sequence; identical to SEQ ID NO: 79277
  derived and/or modified CDS sequence (opt1) from neuraminidase__InfluenzaA__ABI21269

SEQ ID NO: 79359 - RNA, 1410 nt, Artificial Sequence; identical to SEQ ID NO: 79277
  derived and/or modified CDS sequence (opt1) from neuraminidase__InfluenzaA__ABI21280

SEQ ID NO: 79360 - RNA, 1410 nt, Artificial Sequence; identical to SEQ ID NO: 79209
  derived and/or modified CDS sequence (opt1) from neuraminidase__InfluenzaA__ABI21302

SEQ ID NO: 79361 - RNA, 1410 nt, Artificial Sequence; identical to SEQ ID NO: 79209
  derived and/or modified CDS sequence (opt1) from neuraminidase__InfluenzaA__ABI21313

SEQ ID NO: 79362 - RNA, 1410 nt, Artificial Sequence; identical to SEQ ID NO: 79209
  derived and/or modified CDS sequence (opt1) from neuraminidase__InfluenzaA__ABI21324

SEQ ID NO: 79363 - RNA, 1410 nt, Artificial Sequence; identical to SEQ ID NO: 79209
  derived and/or modified CDS sequence (opt1) from neuraminidase__InfluenzaA__ABI21335

SEQ ID NO: 79364 - RNA, 1410 nt, Artificial Sequence; identical to SEQ ID NO: 79277
  derived and/or modified CDS sequence (opt1) from neuraminidase__InfluenzaA__ABI21346

SEQ ID NO: 79365 - RNA, 1410 nt, Artificial Sequence
  derived and/or modified CDS sequence (opt1) from neuraminidase__InfluenzaA__ABI21357
augaaccccaaccagaagaucaucaccaucggcagcgugucccugaccaucgccacgaucugcuuccucaugcagaucgccauccuggucaccaccgugacccugcacuucaagcaguacgagugcaacagcccgcccaacaaccaggugaugcucugcgagcccacgaucaucgagcgcaacaucaccgagaucgucuaccugaccaacaccacgaucgagaaggagaucugccccaagcuggcggaguaccggaacugguccaagccgcagugcaagaucaccggguucgcccccuucagcaaggacaacuccauccgccucagcgccggcggggacaucugggugacccgggagcccuacguguccugcgaccccggcaagugcuaccaguucgcccuggggcagggcaccacgcugaacaaccgccacagcaacgacaccguccacgaccggaccccguaccgcacccuccugaugaacgagcugggcgugcccuuccaccucgggacgaagcaggucugcaucgccugguccagcuccagcugccacgacggcaaggcguggcugcacgugugcgugaccgggcacgacgagaacgccaccgccuccuucaucuacgacggccggcugguggacagcaucggguccuggagcaagaacauccuccgcacccaggaguccgagugcgucugcaucaacggcacgugcaccguggugaugaccgacggcagcgccuccgagcgggcggacaccaagauccuguucaucgaggaggggaagaucguccacaucagcccccugagcggcuccgcccagcacguggaggagugcagcugcuacccccgcuacccgggggugcggugcgucugccgcgacaacuggaagggcuccaaccggcccaucguggacaucaacgugaagaacuacagcaucgucuccagcuacgugugcuccggccucgugggggacacgccccgcaagaacgacagcuccagcuccagcuacugccggaaccccaacaacgagaagggcucccacggggucaagggcugggccuucgacgacgggaacgacguguggaugggccgcaccaucagcgaggagcugcgguccggcuacgagaccuucaaggucaucgggggcuggagcaagccgaacuccaagcugcagaucaaccgccaggugaucguggaccgggggaaccgcagcggcuacuccgggaucuucagcgucgagggcaagagcugcaucaaccggugcuucuacguggagcucauccgcggccgcaagcaggaggccgaggugugguggaccuccaacagcaucgucguguucugcgggacguccggcaccuacgggaccggcagcuggcccgacggggccgacaucaaccugaugcccaucuga

SEQ ID NO: 79366 - RNA, 1410 nt, Artificial Sequence; identical to SEQ ID NO: 79209
  derived and/or modified CDS sequence (opt1) from neuraminidase__InfluenzaA__ABI21368

SEQ ID NO: 79367 - RNA, 1410 nt, Artificial Sequence; identical to SEQ ID NO: 79209
  derived and/or modified CDS sequence (opt1) from neuraminidase__InfluenzaA__ABI21379

SEQ ID NO: 79368 - RNA, 1410 nt, Artificial Sequence; identical to SEQ ID NO: 79209
  derived and/or modified CDS sequence (opt1) from neuraminidase__InfluenzaA__ABI21390

SEQ ID NO: 79369 - RNA, 1410 nt, Artificial Sequence; identical to SEQ ID NO: 79277
  derived and/or modified CDS sequence (opt1) from neuraminidase__InfluenzaA__ABI21401

SEQ ID NO: 79370 - RNA, 1410 nt, Artificial Sequence
  derived and/or modified CDS sequence (opt1) from neuraminidase__InfluenzaA__ABI21412
augaaccccaaccagaagaucaucaccaucggcagcgugucccugaccaucgccacgaucugcuuccucaugcagaucgccauccuggucaccaccgugacccugcacuucaagcaguacgagugcaacccgccgcccaacaaccaggugaugcucugcgagcccacgaucaucgagcgcaacaucaccgagaucgucuaccugaccaacaccacgaucgagaaggagaucugccccaagcuggcggaguaccggaacuggagcaagccccagugcaagaucaccggguucgcccccuucuccaaggacaacagcauccgccucuccgccggcggggacaucugggugacccgggagcccuacgugagcugcgacccgggcaagugcuaccaguucgcccuggggcagggcaccacgcugaacaaccgccacuccaacgacaccguccacgaccggacccccuaccgcacccuccugaugaacgagcugggcgugcccuuccaccucgggacgaagcaggucugcaucgccuggagcuccagcuccugccacgacggcaaggcguggcugcacgugugcgugaccgggcacgacgagaacgccaccgccagcuucaucuacgacggccggcugguggacuccaucgggagcugguccaagaacauccuccgcacccaggagagcgagugcgucugcaucaacggcacgugcaccguggugaugaccgacggcuccgccagcgagcgggcggacaccaagauccuguucaucgaggaggggaagaucguccacaucagcccccuguccggcagcgcccagcacguggaggagugcuccugcuacccgcgcuaccccggggugcggugcgucugccgcgacaacuggaagggcagcaaccggcccaucguggacaucaacgugaaggacuacuccaucgucagcuccuacgugugcagcggccucgugggggacacgccccgcaagaacgacuccagcuccagcuccuacugccggaacccgaacaacgagaagggcagccacggggucaagggcugggccuucgacgacgggaacgacguguggaugggccgcaccaucuccgaggagcugcggagcggcuacgagaccuucaaggucaucgggggcugguccaagcccaacagcaagcugcagaucaaccgccaggugaucguggaccgggggaaccgcuccggcuacagcgggaucuucuccgucgagggcaagagcugcaucaaccggugcuucuacguggagcucauccgcggccgcaagcaggagaccgaggugugguggacgagcaacuccaucgucguguucugcgggaccagcggcaccuacgggaccggcuccuggcccgacggggccgacaucaaccugaugcccaucuga

SEQ ID NO: 79371 - RNA, 1410 nt, Artificial Sequence; identical to SEQ ID NO: 78543
  derived and/or modified CDS sequence (opt1) from neuraminidase__InfluenzaA__ABI21423

SEQ ID NO: 79372 - RNA, 1410 nt, Artificial Sequence; identical to SEQ ID NO: 79209
  derived and/or modified CDS sequence (opt1) from neuraminidase__InfluenzaA__ABI21434

SEQ ID NO: 79373 - RNA, 1410 nt, Artificial Sequence; identical to SEQ ID NO: 79277
  derived and/or modified CDS sequence (opt1) from neuraminidase__InfluenzaA__ABI21445

SEQ ID NO: 79374 - RNA, 1410 nt, Artificial Sequence; identical to SEQ ID NO: 79277
  derived and/or modified CDS sequence (opt1) from neuraminidase__InfluenzaA__ABI21456

SEQ ID NO: 79375 - RNA, 1410 nt, Artificial Sequence; identical to SEQ ID NO: 79370
  derived and/or modified CDS sequence (opt1) from neuraminidase__InfluenzaA__ABI21467

SEQ ID NO: 79376 - RNA, 1410 nt, Artificial Sequence; identical to SEQ ID NO: 79277
  derived and/or modified CDS sequence (opt1) from neuraminidase__InfluenzaA__ABI21478

SEQ ID NO: 79377 - RNA, 1410 nt, Artificial Sequence; identical to SEQ ID NO: 79277
  derived and/or modified CDS sequence (opt1) from neuraminidase__InfluenzaA__ABI21489

SEQ ID NO: 79378 - RNA, 1410 nt, Artificial Sequence; identical to SEQ ID NO: 79277
  derived and/or modified CDS sequence (opt1) from neuraminidase__InfluenzaA__ABI21500

SEQ ID NO: 79379 - RNA, 1410 nt, Artificial Sequence
  derived and/or modified CDS sequence (opt1) from neuraminidase__InfluenzaA__ABI21511
augaaccccaaccagaagaucaucaccaucggcagcgugucccugaccaucgccacgaucugcuuccucaugcagaucgccauccuggucaccaccgugacccugcacuucaagcaguacgagugcaacagcccgcccaacaaccaggugaugcucugcgagcccgcgaucaucgagcgcaacaucacggagaucgucuaccugaccaacaccaccaucgagaaggagaugugccccaagcuggccgaguaccggaacugguccaagccgcagugcaacaucacgggguucgcccccuucagcaaggacaacuccauccgccucagcgccggcggggacaucugggugacccgggagcccuacguguccugcgaccccgacaagugcuaccaguucgcccugggccaggggaccacccugaacaacggccacagcaacgacacgguccacgaccgcaccccguaccggacccuccugaugaacgagcugggcgugcccuuccaccucgggacccgccaggugugcaucgcgugguccagcuccagcugccacgacggcaaggccuggcugcacgucugcgugacgggggacgacgagaacgccaccgccuccuucaucuacgacggccggcugguggacagcaucggguccuggagcaagaagauccuccgcacccaggaguccgagugcgucugcaucaacgggaccugcacgguggugaugaccgacggcagcgcguccgggaaggccgacaccaagauccuguucaucgaggagggcaagaucgucaacaucagcacccugagcggguccgcccagcacguggaggagugcagcugcuacccccgguaccccggcgugcgcugcgucugccgggacaacuggaagggcuccaaccgcccgaucguggacaucaacgugaaggacuacagcaucgucuccagcuacgugugcuccgggcucgugggcgacacgccccggaagaacgacagcuucuccagcucccacugccuggaccccaacaacgaggagggcggccacggggucaagggcugggccuucgacgacggcaacgacguguggauggggcgcaccaucagcgagaagcugcgguccggcuacgagaccuucaaggucaucgagggguggagcaagcccaacuccaagcuccagaucaaccgccaggugaucguggagcggggcaaccgcagcggguacuccggcaucuucagcgucgagggcaaguccugcaucaaccggugcuucuacguggagcugauccgcgggcggaaggaggagaccgaggugugguggacgagcaacagcaucgucguguucugcggcaccuccgggaccuacggcaccgggagcuggccggacggcgccgacaucaaccugaugcccaucuga

SEQ ID NO: 79380 - RNA, 1413 nt, Artificial Sequence
  derived and/or modified CDS sequence (opt1) from neuraminidase__InfluenzaA__ABI21533
augaaccccaaccagaagaucaucaccaucggcagcaucuccaucgccaucgggaucaucagccugaugcuccagaucggcaacaucaucuccaucugggccagccacuccauccagaccgggagccagaaccacacgggcaucugcaaccagcgcaucaucaccuacgagaacuccaccugggugaaccacaccuacgucaacaucaacaacacgaacgugguggcggggaaggacaagaccagcgucacccuggccggcaacuccagccugugcuccaucagcggcugggccaucuacaccaaggacaacuccauccggaucgggagcaagggcgacguguucgugaugcgcgagccguucaucuccugcagccaccucgagugccggacguucuuccugacccagggggcccugcucaacgacaagcacuccaacggcaccgucaaggaccgcagccccuaccgggcccugauguccugcccccugggggaggcgcccagcccguacaacagcaaguucgaguccguggccuggagcgccuccgccugccacgacggcaugggcuggcucaccaucgggaucagcggccccgacaacggggcgguggccguccugaaguacaacggcaucaucacggagaccaucaaguccuggaagaagcgcauccugcggacccaggagagcgagugcgugugcgugaacggcuccugcuucaccaucaugacggacgggcccagcaacggcgccgccuccuacaagaucuucaagaucgagaaggggaaggucaucaagagcaucgagcucaacgcccccaacucccacuacgaggagugcagcugcuacccggacaccggcaccgugaugugcgugugccgcgacaacuggcacggguccaaccggcccugggucagcuucaaccagaaccuggacuaccagaucggcuacaucugcuccggcguguucggggacaacccccgccccaaggacggcgaggggagcugcaacccggugaccgucgacggcgcggacggggugaagggcuucuccuacaaguacggcaacgggguguggaucggccggaccaagagcaaccgccugcggaagggguucgagaugaucugggaccccaacggcuggacggacaccgacuccgacuucagcgucaagcaggacgugguggccaucaccgacuggagcggguacuccggcagcuucguccagcaccccgagcucacgggccuggacugcauccgccccugcuucuggguggagcugguccgggggcgcccgcgggagaacaccaccaucuggaccuccggcagcuccaucagcuucugcggggugaacuccgacacggccaacuggagcuggcccgacggcgccgagcuccccuucaccaucgacaaguga

SEQ ID NO: 79381 - RNA, 1413 nt, Artificial Sequence; identical to SEQ ID NO: 79380
  derived and/or modified CDS sequence (opt1) from neuraminidase__InfluenzaA__ABI21544

SEQ ID NO: 79382 - RNA, 1413 nt, Artificial Sequence; identical to SEQ ID NO: 79380
  derived and/or modified CDS sequence (opt1) from neuraminidase__InfluenzaA__ABI21555

SEQ ID NO: 79383 - RNA, 1413 nt, Artificial Sequence; identical to SEQ ID NO: 79380
  derived and/or modified CDS sequence (opt1) from neuraminidase__InfluenzaA__ABI21566

SEQ ID NO: 79384 - RNA, 1413 nt, Artificial Sequence; identical to SEQ ID NO: 79380
  derived and/or modified CDS sequence (opt1) from neuraminidase__InfluenzaA__ABI21577

SEQ ID NO: 79385 - RNA, 1413 nt, Artificial Sequence
  derived and/or modified CDS sequence (opt1) from neuraminidase__InfluenzaA__ABI22112
augaaccccaaccagaagaucaucaccaucggcagcaucuccaucgccaucgggaucaucagccugaugcuccagaucggcaacaucaucuccaucugggccagccacuccauccagaccgggagccagaaccacacgggcaucugcaaccagcgcaucaucaccuacgagaacuccaccugggugaaccacaccuacgucaacaucaacaacacgaacgugguggcggggaaggacaagaccagcgucacccuggccggcaacuccagccugugcuccaucagcggcugggccaucuacaccaaggacaacuccauccggaucgggagcaagggcgacguguucgugauccgcgagccguucaucuccugcagccaccucgagugccggacguucuuccugacccagggggcccugcucaacgacaagcacuccaacggcaccgucaaggaccgcagccccuaccgggcccugauguccugcccccugggggaggcgcccagcccguacaacagcaaguucgaguccguggccuggagcgccuccgccugccacgacggcaugggcuggcucaccaucgggaucagcggccccgacaacggggcgguggccguccugaaguacaacgagaucaucacggagaccaucaaguccuggaagaagcgcauccugcggacccaggagagcgagugcgugugcgugaacggcuccugcuucaccaucaugacggacggccccagcaacggggccgccuccuacaagaucuucaagaucgagaagggcaaggucaccaagagcaucgagcucaacgcccccaacuuccacuacgaggagugcuccugcuacccggacaccgggaccgugaugugcgugugccgcgacaacuggcacggcagcaaccggcccugggucuccuucaaccagaaccuggacuaccagaucggguacaucugcagcggcguguucggcgacaacccccgccccaaggacgggaagggcuccugcaacccggugacggucgacggggcggacggcgugaagggguucagcuacaaguacggcaacggcguguggaucgggcggaccaaguccaaccgccugcggaagggcuucgagaugaucugggaccccaacggguggaccgacaccgacagcgacuucuccgucaagcaggacgugguggccaucacggacuggagcggcuacagcggguccuucguccagcaccccgagcucaccggccuggacugcauccgccccugcuucuggguggagcugguccggggccucccgcgcgagaacaccaccaucuggacgagcggguccagcaucuccuucugcggcguggacagcgacaccgccaacugguccuggcccgacggggccgagcugcccuucaccaucgacaaguga

SEQ ID NO: 79386 - RNA, 1410 nt, Artificial Sequence
  derived and/or modified CDS sequence (opt1) from neuraminidase__InfluenzaA__ABI22162
augaaccccaaccagaagaucaucaccaucggcagcgugucccugaccaucagcacgaucugcuucuucaugcagaucgccauccucaucaccaccgucacccugcacuucaagcaguacgaguucaacuccccgcccaacaaccaggugaugcugugcgagcccacgaucaucgagcgcaacaucaccgagaucguguaccucaccaacaccacgaucgagaaggagaucugccccaagcuggccgaguaccggaacuggagcaagccgcagugcaacaucaccggguucgcgcccuucuccaaggacaacagcauccgccuguccgccggcggggacaucugggucacccgggagcccuacgugagcugcgaccccgacaagugcuaccaguucgcccucggccaggggaccacgcugaacaacgugcacuccaacgacaccguccacgaccgcaccccguaccggacccugcucaugaacgagcugggcgugcccuuccaccugggcacgaagcaggucugcaucgccuggagcuccagcuccugccacgacgggaaggccuggcuccacgugugcgugaccggcgacgacaagaacgcgaccgccagcuucaucuacaacgggcgccugguggacuccaucgucagcugguccaaggagauccugcggacccaggagagcgagugcgugugcaucaacggcacgugcaccguggucaugaccgacggguccgccagcggcaaggccgacaccaagauccucuucaucgaggagggcaagaucgugcacacgagcacccuguccgggagcgcgcagcacguggaggagugcuccugcuacccccgcuaccccggcguccggugcgugugccgcgacaacuggaaggggagcaaccggccgaucguggacaucaacaucaaggacuacuccaucgucagcuccuacgugugcagcggccuggugggcgacacgccccgcaagaacgacuccagcuccagcucccacugccucgaccccaacaacgaggagggcgggcacggggucaagggcugggccuucgacgacgggaacgacguguggaugggccggaccaucagcgagaagcugcgcuccggcuacgagaccuucaaggucaucgagggguggagcaaccccaacuccaagcugcagaccaaccgccaggugaucguggaccggggcaaccggagcggguacuccggcaucuucagcgucgagggcaagagcugcaucaaccgcugcuucuacguggagcucauccgggggcgcaaggaggagaccgaggugcuguggaccuccaacagcaucgucguguucugcggcacguccgggaccuacggcaccgggagcuggccggacggcgccgacaucgaccugaugcccaucuga

SEQ ID NO: 79387 - RNA, 1350 nt, Artificial Sequence
  derived and/or modified CDS sequence (opt1) from neuraminidase__InfluenzaA__ABI23981
augaaccccaaccagaagaucaucaccaucggcagcaucugcauggugaucgggaucgucucccugaugcuccagaucggcaacaugaucagcaucugggugucccacagcauccagaccgggaaccagcgccaggccgaguccaucagcaacacgaaguuccugaccgagaaggccguggcguccgucacccuggccggcaacagcucccucugcccgaucagcgggugggccguguacuccaaggacaacagcauccggaucggcucccgcggcgacguguucgucauccgggagcccuucaucagcugcucccaccuggagugccgcaccuucuuccugacgcagggggcccuccugaacgacaagcacagcaacggcaccgugaaggaccggucccccuaccgcacccugaugagcucccccgugggggaggccccgagccccuacaacagccgguucgaguccgucgcguggagcgccuccgccugccacgacggcaccagcuggcucacgaucgggaucuccggccccgacaacggcgccguggcggugcugaaguacaacgggaucaucaccgacaccaucaagagcuggcgcaacaacauccugcggacccaggaguccgagugcgccugcgucaacggcagcugcuucacggugaugaccgacgggcccuccaacggccaggccagcuacaagaucuucaagauggagaagggcaagguggucaaguccguggagcucgacgccccgaacuaccacuacgaggagugcagcugcuaccccgacgccggggagaucacgugcgugugccgcgacaacuggcacggcuccaaccggcccugggucagcuucaaccagaaccuggaguaccagaucggguacaucugcuccggcguguucggggacaacccccgcccgaacgacggcaccggcagcugcgggcccgugucccugaacggcgcguacggggucaagggcuucagcuucaaguacgggaacggcguguggaucggccggaccaaguccaccaacagccgcagcggguucgagaugaucugggaccccaacggcuggaccgggaccgacuccagcuucuccgugaagcaggacaucgucgccaucacggacuggagcggcuacuccgggagcuucgugcagcaccccgagcucaccggccuggacugcauccggccgugcuucugggucgagcugauccgcggccggcccaaggaguccaccaucuggaccagcggguccagcaucuccuucugcggcgugaacagcgacacgguguccuggagcuggcccgacggggccgagcuccccuucaccaucgacaaguga

SEQ ID NO: 79388 - RNA, 1410 nt, Artificial Sequence; identical to SEQ ID NO: 78351
  derived and/or modified CDS sequence (opt1) from neuraminidase__InfluenzaA__ABI26649

SEQ ID NO: 79389 - RNA, 1413 nt, Artificial Sequence; identical to SEQ ID NO: 79074
  derived and/or modified CDS sequence (opt1) from neuraminidase__InfluenzaA__ABI30370

SEQ ID NO: 79390 - RNA, 1410 nt, Artificial Sequence; identical to SEQ ID NO: 79125
  derived and/or modified CDS sequence (opt1) from neuraminidase__InfluenzaA__ABI30392

SEQ ID NO: 79391 - RNA, 1410 nt, Artificial Sequence; identical to SEQ ID NO: 78754
  derived and/or modified CDS sequence (opt1) from neuraminidase__InfluenzaA__ABI30403

SEQ ID NO: 79392 - RNA, 1410 nt, Artificial Sequence; identical to SEQ ID NO: 78754
  derived and/or modified CDS sequence (opt1) from neuraminidase__InfluenzaA__ABI30414

SEQ ID NO: 79393 - RNA, 1410 nt, Artificial Sequence; identical to SEQ ID NO: 78351
  derived and/or modified CDS sequence (opt1) from neuraminidase__InfluenzaA__ABI30425

SEQ ID NO: 79394 - RNA, 1410 nt, Artificial Sequence; identical to SEQ ID NO: 78351
  derived and/or modified CDS sequence (opt1) from neuraminidase__InfluenzaA__ABI30436

SEQ ID NO: 79395 - RNA, 1410 nt, Artificial Sequence; identical to SEQ ID NO: 78351
  derived and/or modified CDS sequence (opt1) from neuraminidase__InfluenzaA__ABI30447

SEQ ID NO: 79396 - RNA, 1410 nt, Artificial Sequence; identical to SEQ ID NO: 78351
  derived and/or modified CDS sequence (opt1) from neuraminidase__InfluenzaA__ABI30458

SEQ ID NO: 79397 - RNA, 1410 nt, Artificial Sequence; identical to SEQ ID NO: 78351
  derived and/or modified CDS sequence (opt1) from neuraminidase__InfluenzaA__ABI30469

SEQ ID NO: 79398 - RNA, 1410 nt, Artificial Sequence; identical to SEQ ID NO: 78351
  derived and/or modified CDS sequence (opt1) from neuraminidase__InfluenzaA__ABI30480

SEQ ID NO: 79399 - RNA, 1410 nt, Artificial Sequence
  derived and/or modified CDS sequence (opt1) from neuraminidase__InfluenzaA__ABI30491
augaaccccaaccagaagaucaucaccaucggcagcgugucccugaccaucagcacgaucugcuucuucaugcagaucgccauccucaucaccaccgucacccugcacuucaagcaguacgaguucaacuccccgcccaacaaccaggugaugcugugcgagcccacgaucaucgagcgcaacaucaccaagaucguguaccucaccaacaccacgaucgagaaggagaucugccccaagcuggccgaguaccggaacuggagcaagccgcagugcgacaucaccggguucgcgcccuucuccaaggacaacagcauccgccuguccgccggcggggacaucugggucacccgggagcccuacgugagcugcgaccccgacaagugcuaccaguucgcccucggccaggggaccacgcugaacaacgugcacuccaacgacaccguccacgaccgcaccccguaccggacccugcucaugaacgagcugggcgugcccuuccaccugggcacgaagcaggucugcaucgccuggagcuccagcuccugccacgacgggaaggccuggcuccacgugugcgugaccggcgacgacaagaacgcgaccgccagcuucaucuacaacgggcgccugguggacuccaucgucagcugguccaaggagauccugcggacccaggagagcgagugcgugugcaucaacggcacgugcaccguggucaugaccgacggguccgccagcggcaaggccgacaccaagauccucuucaucgaggagggcaagaucgugcacacgagcacccuguccgggagcgcgcagcacguggaggagugcuccugcuacccccgcuaccccggcguccggugcgugugccgcgacaacuggaaggggagcaaccggccgaucguggacaucaacaucaaggacuacuccaucgucagcuccuacgugugcagcggccuggugggcgacacgccccgcaagaacgacuccagcuccagcucccacugccucgaccccaacaacgaggagggcgggcacggggucaagggcugggccuucgacgacgggaacgacguguggaugggccggaccaucagcgagaagcugcgcuccggcuacgagaccuucaaggucaucgagggguggagcaaccccaacuccaagcugcagaucaaccgccaggugaucguggaccggggcaaccggagcggguacuccggcaucuucagcgucgagggcaagagcugcaucaaccgcugcuucuacguggagcucauccgggggcgcaaggaggagaccgaggugcuguggaccuccaacagcaucgucguguucugcggcaccuccgggacguacggcaccgggagcuggccggacggcgccgacaucaaccugaugcccaucuga

SEQ ID NO: 79400 - RNA, 1410 nt, Artificial Sequence; identical to SEQ ID NO: 78351
  derived and/or modified CDS sequence (opt1) from neuraminidase__InfluenzaA__ABI30502

SEQ ID NO: 79401 - RNA, 1410 nt, Artificial Sequence
  derived and/or modified CDS sequence (opt1) from neuraminidase__InfluenzaA__ABI30513
augaaccccaaccagaagaucaucaccaucggcagcgugucccugaccaucagcacgaucugcuucuucaugcagaucgccauccucaucaccaccgucacccugcacuucaagcaguacgaguucaacuccccgcccaacaaccaggugaugcugugcgagcccacgaucaucgagcgcaacaucaccgagaucguguaccucaccaacaccacgaucgagaaggagaucugccccaagcuggccgaguaccggaacuggagcaagccgcagugcgacaucaccggguucgcgcccuucuccaaggacaacagcauccgccuguccgccggcggggacaucugggucacccgggagcccuacgugagcugcgaccccgacaagugcuaccaguucgcccucggccaggggaccacgcugaacaacgugcacuccaacgacaccguccacgaccgcaccccguaccggacccugcucaugaacgagcugggcgugcccuuccaccugggcacgaagcaggucugcaucgccuggagcuccagcuccugccacgacgggaaggccuggcuccacgugugcgugaccggcgacgacaagaacgcgaccgccagcuucaucuacaacgggcgccugguggacuccaucgucagcugguccaaggagauccugcggacccaggagagcgagugcgugugcaucaacggcacgugcaccguggucaugaccgacggguccgccagcggcaaggccgacaccaagauccucuucaucgaggagggcaagaucgugcacacgagcacccuguccgggagcgcgcagcacguggaggagugcuccugcuacccccgcuaccccggcguccggugcgugugccgcgacaacuggaaggggagcaaccggccgaucguggacaucaacaucaaggacuacuccaucgucagcuccuacgugugcagcggccuggugggcgacacgccccgcaagaacgacuccagcuccagcucccacugccucgaccccaacaacgaggagggcgggcacggggucaagggcugggccuucgacgacgggaacgacguguggaugggccggaccaucagcgagaagcugcgcuccggcuacgagaccuucaaggucaucgagggguggagcaaccccaacuccaagcugcagaccaaccgccaggugaucguggaccggggcaaccggagcggguacuccggcaucuucagcgucgagggcaagagcugcaucaaccgcugcuucuacguggagcucauccgggggcgcaaggaggagaccgaggugcuguggaccuccaacagcaucgucguguucugcggcacguccgggaccuacggcaccgggagcuggccggacggcgccgacaucaaccugaugcccaucuga

SEQ ID NO: 79402 - RNA, 1410 nt, Artificial Sequence; identical to SEQ ID NO: 78351
  derived and/or modified CDS sequence (opt1) from neuraminidase__InfluenzaA__ABI30524

SEQ ID NO: 79403 - RNA, 1410 nt, Artificial Sequence; identical to SEQ ID NO: 78351
  derived and/or modified CDS sequence (opt1) from neuraminidase__InfluenzaA__ABI30535

SEQ ID NO: 79404 - RNA, 1410 nt, Artificial Sequence
  derived and/or modified CDS sequence (opt1) from neuraminidase__InfluenzaA__ABI30546
augaaccccaaccagaagaucaucaccaucggcagcgugucccugaccaucagcacgaucugcuucuucaugcagaucgccauccucaucaccaccgucacccugcacuucaagcaguacgaguucaacuccccgcccaacaaccaggugaugcugugcgagcccacgaucaucgagcgcaacaucaccgagaucguguaccucaccaacaccacgaucgagaaggagaucugccccaagcuggccgaguaccggaacuggagcaagccgcagugcgacaucaccggguucgcgcccuucuccaaggacaacagcauccgccuguccgccggcggggacaucugggucacccgggagcccuacgugagcugcgaccccgacaagugcuaccaguucgcccucggccaggggaccacgcugaacaaccugcacuccaacgacaccgugcacgaccgcaccccguaccggacccuccugaugagcgagcugggcguccccuuccaccucggcacgaagcaggucugcaucgccugguccagcuccagcugccacgacgggaaggccuggaugcacgugugcgugaccggcgacgacaagaacgcgaccgccuccuucaucuacaacgggcgccugguggacagcaucguguccuggagcaaggagauccugcggacccaggaguccgagugcgucugcaucaacggcacgugcaccguggugaugaccgacgggagcgccagcggcaaggccgacaccaagauccucuucaucgaggagggcaagaucguccacacguccacccugagcggguccgcgcagcacguggaggagugcagcugcuacccccgcuaccccggcgugcggugcgucugccgcgacaacuggaagggguccaaccggccgaucguggacaucaacaucaaggacuacagcaucguguccagcuacgucugcuccggccuggugggcgacacgccccgcaagaacgacagcuccagcuccagccacugccucgaccccaacaacgaggagggcgggcacggggugaagggcugggccuucgacgacgggaacgacgucuggaugggccggaccaucuccgagaagcugcgcagcggcuacgagaccuucaaggugaucgaggggugguccaaccccaacagcaagcugcagaucaaccggcaggucaucguggaccgcggcaaccgguccggguacagcggcaucuucagcguggaggggaagaacugcaucaaccgcugcuucuacgucgagcucauccggggccgcaaggaggagaccgaggugcuguggaccuccaacagcaucguggucuucugcggcaccuccgggacguacggcaccgggagcuggccggacggcgccgacaucaaccugaugcccaucuga

SEQ ID NO: 79405 - RNA, 1410 nt, Artificial Sequence; identical to SEQ ID NO: 78351
  derived and/or modified CDS sequence (opt1) from neuraminidase__InfluenzaA__ABI30557

SEQ ID NO: 79406 - RNA, 1410 nt, Artificial Sequence; identical to SEQ ID NO: 78738
  derived and/or modified CDS sequence (opt1) from neuraminidase__InfluenzaA__ABI30579

SEQ ID NO: 79407 - RNA, 1410 nt, Artificial Sequence
  derived and/or modified CDS sequence (opt1) from neuraminidase__InfluenzaA__ABI30590
augaaccccaaccagaagaucaucaccaucggcagcgugucccugaccaucagcacgaucugcuucuucaugcagaucgccauccucaucaccaccgucacccugcacuucaagcaguacgaguucaacuccccgcccaacaaccaggugaugcugugcgagcccacgaucaucgagcgcaacaucaccgagaucguguaccucaccaacaccacgaucgagaaggagaucugccccaagcuggccgaguaccggaacuggagcaagccgcagugcgacaucaccggguucgcgcccuucuccaaggacaacagcauccgccuguccgccggcggggacaucugggucacccgggagcccuacgugagcugcgaccccgacaagugcuaccaguucgcccucggccaggggaccacgcugaacaacgugcacuccaacgacaccguccacgaccgcaccccguaccggacccugcucaugaacgagcugggcgugcccuuccaccugggcacgaagcaggucugcaucgccuggagcuccagcuccugccacgacgggaaggccuggcuccacgugugcgugaccggcgacgacaagaacgcgaccgccagcuucaucuacaacgggcgccugguggacuccaucgucagcugguccaagaagauccugcggacccaggagagcgagugcgugugcaucaacggcacgugcaccguggucaugaccgacggguccgccagcggcaaggccgacaccaagauccucuucaucgaggagggcaagaucgugcacacgagcacccuguccgggagcgcgcagcacguggaggagugcuccugcuacccccgcuaccccggcguccggugcgugugccgcgacaacuggaaggggagcaaccggccgaucguggacaucaacaucaaggacuacuccaucgucagcuccuacgugugcagcggccuggugggcgacacgccccgcaagaacgacuccagcuccagcucccacugccucgaccccaacaacgaggagggcgggcacggggucaagggcugggccuucgacgacgggaacgacguguggaugggccggaccaucagcgagaagcugcgcuccggcuacgagaccuucaaggucaucgagggguggagcaaccccaacuccaagcugcagaucaaccgccaggugaucguggaccggggcaaccggagcggguacuccggcaucuucagcgucgaggggaagggcugcaucaaccgcugcuucuacguggagcucauccggggccgcaaggaggagaccgaggugcuguggaccagcaacuccaucgucguguucugcgggaccagcggcacguacgggaccggcuccuggccggacggggccgacaucaaccugaugcccaucuga

SEQ ID NO: 79408 - RNA, 1410 nt, Artificial Sequence; identical to SEQ ID NO: 78831
  derived and/or modified CDS sequence (opt1) from neuraminidase__InfluenzaA__ABI30601

SEQ ID NO: 79409 - RNA, 1410 nt, Artificial Sequence
  derived and/or modified CDS sequence (opt1) from neuraminidase__InfluenzaA__ABI30612
augaaccccaaccagaagaucaucaccaucggcagcgugucccugaccaucagcacgaucugcuucuucaugcagaucgccauccucaucaccaccgucacccugcacuucaagcaguacgaguucaacuccccgcccaacaaccaggugaugcugugcgagcccacgaucaucgagcgcaacaucaccgagaucguguaccucaccaacaccacgaucgagaaggagaucugccccaagcuggccgaguaccggaacuggagcaagccgcagugcaacaucaccggguucgcgcccuucuccaaggacaacagcauccgccuguccgccggcggggacaucugggucacccgggagcccuacgugagcugcgaccccgacaagugcuaccaguucgcccucggccaggggaccacgcugaacaacgugcacuccaacgacaccguccacgaccgcaccccguaccggacccugcucaugaacgagcugggcgugcccuuccaccugggcacgaagcaggucugcaucgccuggagcuccagcuccugccacgacgggaaggccuggcuccacgugugcgugaccggcgacgacaagaacgcgaccgccagcuucaucuacaacgggcgccugguggacuccaucgucagcugguccaaggagauccugcggacccaggagagcgagugcgugugcaucaacggcacgugcaccguggucaugaccgacggguccgccagcggcaaggccgacaccaagauccucuucaucgaggagggcaagaucauccacacgagcacccuguccgggagcgcgcagcacguggaggagugcuccugcuacccccgcuaccccggcgugcggugcgucugccgcgacaacuggaaggggagcaaccggccgaucguggacaucaacaucaaggacuacuccaucgugagcuccuacgucugcagcggccuggugggcgacacgccccgcaagaacgacuccagcuccagcucccacugccucgaccccaacaacgaggagggcgggcacggggugaagggcugggccuucgacgacgggaacgacgucuggaugggccggaccaucagcgagaagcugcgcuccggcuacgagaccuucaaggugaucgagggguggagcaaccccaacuccaagcugcagaucaaccggcaggucaucguggaccgcggcaaccggagcggguacuccggcaucuucagcguggagggcaagagcugcaucaaccgcugcuucuacgucgagcucauccgggggcgcaaggaggagaccgaggugcuguggaccuccaacagcaucguggucuucugcggcaccuccgggacguacggcaccgggagcuggccggacggcgccgacaucaaccugaugcccaucuga

SEQ ID NO: 79410 - RNA, 1410 nt, Artificial Sequence; identical to SEQ ID NO: 78831
  derived and/or modified CDS sequence (opt1) from neuraminidase__InfluenzaA__ABI30623

SEQ ID NO: 79411 - RNA, 1410 nt, Artificial Sequence
  derived and/or modified CDS sequence (opt1) from neuraminidase__InfluenzaA__ABI30736
augaaccccaaccagaagaucaucaccaucggcagcgugucccugaccaucagcacgaucugcuucuucaugcagaucgccauccucaucaccaccgucacccugcacuucaagcaguacgaguucaacuccccgcccaacaaccaggugaugcugugcgagcccacgaucaucgagcgcaacaucaccgagaucguguaccucaccaacaccacgaucgagaaggagaucugccccaagcuggccgaguaccggaacuggagcaagccgcagugcgacaucaccggguucgcgcccuucuccaaggacaacagcauccgccuguccgccggcggggacaucugggucacccgggagcccuacgugagcugcgaccccgacaagugcuaccaguucgcccucggccaggggaccacgcugaacaacgugcacuccaacgacaccguccacgaccgcaccccguaccggacccugcucaugaacgagcugggcgugcccuuccaccugggcacgaagcaggucugcaucgccuggagcuccagcuccugccacgacgggaaggccuggcuccacgugugcgugaccggcgacgacaagaacgcgaccgccagcuucaucuacaacgggcgccugguggacuccaucgucagcugguccaagaagauccugcggacccaggagagcgagugcgugugcaucaacggcacgugcaccguggucaugaccgacggguccgccagcggcaaggccgacaccaagauccucuucaucgaggagggcaagaucgugcacacgagcacccuguccgggagcgcgcagcacguggaggagugcuccugcuacccccgcuaccccggcguccggugcgugugccgcgacaacuggaaggggagcaaccggccgaucguggacaucaacaucaaggacuacuccgucgugagcuccuacgugugcagcggccuggucggcgacacgccccgcaagaacgacuccagcuccagcucccacugccucgaccccaacaacgaggagggcgggcacggggugaagggcugggccuucgacgacgggaacgacgucuggaugggccggaccaucagcgagaagcugcgcuccggcuacgagaccuucaaggugaucgagggguggagcaaccccaacuccaagcugcagaucaaccgccaggugaucgucgaccggggcaaccggagcggguacuccggcaucuucagcguggagggcaagagcugcaucaaccgcugcuucuacguggagcucauccgggggcgcaaggaggagaccgagguccuguggaccuccaacagcaucgugguguucugcggcaccuccgggacguacggcaccgggagcuggccggacggcgccgacaucaaccugaugcccaucuga

SEQ ID NO: 79412 - RNA, 1410 nt, Artificial Sequence
  derived and/or modified CDS sequence (opt1) from neuraminidase__InfluenzaA__ABI30758
augaaccccaaccagaagaucaucaccaucggcagcgugucccugaccaucagcacgaucugcuucuucaugcagaucgccauccucaucaccaccgucacccugcacuucaagcaguacgaguucaacuccccgcccaacaaccaggugaugcuguacgagcccacgaucaucgagcgcaacaucaccgagaucguguaccucaccaacaccacgaucgagaaggagaucugccccaagcuggccgaguaccggaacuggagcaagccgcagugcgacaucaccggguucgcgcccuucuccaaggacaacagcauccgccuguccgccggcggggacaucugggucacccgggagcccuacgugagcugcgaccccgacaagugcuaccaguucgcccucggccaggggaccacgcugaacaacgugcacuccaacgacaccguccacgaccgcaccccguaccggacccugcucaugaacgagcugggcgugcccuuccaccugggcacgaagcaggucugcaucgccuggagcuccagcuccugccacgacgggaaggccuggcuccacgugugcgugaccggcgacgacaagaacgcgaccgccagcuucaucuacaacgggcgccugguggacuccaucgucagcugguccaagaagauccugcggacccaggagagcgagugcgugugcaucaacggcacgugcaccguggucaugaccgacggguccgccagcggcaaggccgacaccaagauccucuucaucgaggagggcaagaucgugcacacgagcacccuguccgggagcgcgcagcacguggaggagugcuccugcuacccccgcuaccccggcguccggugcgugugccgcgacaacuggaaggggagcaaccggccgaucguggacaucaacaucaaggacuacuccaucgucagcuccuacgugugcagcggccuggugggcgacacgccccgcaagaacgacuccagcuccagcucccacugccucgaccccaacaacgaggagggcgggcacggggucaagggcugggccuucgacgacgggaacgacguguggaugggccggaccaucagcgagaagcugcgcuccggcuacgagaccuucaaggucaucgagggguggagcaaccccaacuccaagcugcagaucaaccgccaggugaucguggaccggggcaaccggagcggguacuccggcaucuucagcgucgagggcaagagcugcaucaaccgcugcuucuacguggagcucauccgggggcgcaaggaggagaccgaggugcuguggaccuccaacagcaucgucguguucugcggcaccuccgggacguacggcaccgggagcuggccggacggcgccgacaucaaccugaugcccaucuga

SEQ ID NO: 79413 - RNA, 1410 nt, Artificial Sequence; identical to SEQ ID NO: 78738
  derived and/or modified CDS sequence (opt1) from neuraminidase__InfluenzaA__ABI30769

SEQ ID NO: 79414 - RNA, 1410 nt, Artificial Sequence; identical to SEQ ID NO: 78738
  derived and/or modified CDS sequence (opt1) from neuraminidase__InfluenzaA__ABI30780

SEQ ID NO: 79415 - RNA, 1410 nt, Artificial Sequence; identical to SEQ ID NO: 78738
  derived and/or modified CDS sequence (opt1) from neuraminidase__InfluenzaA__ABI30791

SEQ ID NO: 79416 - RNA, 1410 nt, Artificial Sequence; identical to SEQ ID NO: 78738
  derived and/or modified CDS sequence (opt1) from neuraminidase__InfluenzaA__ABI30802

SEQ ID NO: 79417 - RNA, 1410 nt, Artificial Sequence; identical to SEQ ID NO: 78738
  derived and/or modified CDS sequence (opt1) from neuraminidase__InfluenzaA__ABI30813

SEQ ID NO: 79418 - RNA, 1410 nt, Artificial Sequence; identical to SEQ ID NO: 78738
  derived and/or modified CDS sequence (opt1) from neuraminidase__InfluenzaA__ABI30824

SEQ ID NO: 79419 - RNA, 1410 nt, Artificial Sequence; identical to SEQ ID NO: 78738
  derived and/or modified CDS sequence (opt1) from neuraminidase__InfluenzaA__ABI30835

SEQ ID NO: 79420 - RNA, 1410 nt, Artificial Sequence; identical to SEQ ID NO: 78738
  derived and/or modified CDS sequence (opt1) from neuraminidase__InfluenzaA__ABI30846

SEQ ID NO: 79421 - RNA, 1410 nt, Artificial Sequence; identical to SEQ ID NO: 79209
  derived and/or modified CDS sequence (opt1) from neuraminidase__InfluenzaA__ABI30857

SEQ ID NO: 79422 - RNA, 1410 nt, Artificial Sequence; identical to SEQ ID NO: 79209
  derived and/or modified CDS sequence (opt1) from neuraminidase__InfluenzaA__ABI30868

SEQ ID NO: 79423 - RNA, 1350 nt, Artificial Sequence
  derived and/or modified CDS sequence (opt1) from neuraminidase__InfluenzaA__ABI36157
augaaccccaaccagaagaucaucaccaucggcagcaucugcauggccaucgggaccgugucccugaugcuccagaucggcaacaugaucagcaucugggucucccacagcauccagacggggaaccagcaccaggccgaguccaucagcaacaccaacccgcugaccgagaaggcgguggccuccgugacccuggccggcaacagcucccucugccccauccgcgggugggccguccacagcaaggacaacuccauccggaucggcagcaagggcgacguguucgugauccgcgagcccuucaucuccugcagccacuccgagugccggacguucuuccugacccagggggcccugcucaacgacaagcacagcaacgagaccgucaaggaccgcagcccccaccggacccugaugagcugcccggugggcgaggcgcccucccccuacaacagccgcuucgagagcguggccugguccgccagcgccugccacgacgggacguccuggcugaccaucggcaucagcgggcccgacaacggcgcggucgccgugcucaaguacaacggcaucaucaccgacaccaucaaguccuggcggaacaacauccugcgcacgcaggagagcgagugcgccugcgugaacggguccugcuucaccgucaugaccgacggcccgagcaacgggcaggccuccuacaagaucuucaagauggagaagggcaagguggugaaguccgucgagcuggacgcccccaacuaccacuacgaggagugcuccugcuaccccgacgcgggcgagaucacgugcgugugccgggacaacuggcacgggagcaaccgccccuggguguccuucaaccagaaccucgaguaccagaucggcuacaucugcagcggggucuucggcgacaacccgcggcccaacgacgggaccggcuccugcggccccaugagcuccaacggggccuacggcgugaagggguucagcuucaaguacggcaacgggguguggaucggccgcaccaaguccaccaacagccggagcggcuucgagaugaucugggaccccaacggguggaccggcacggacuccagcuucuccgucaagcaggacaucguggccaucaccgacuggagcggguacuccggcagcuucgugcagcacccggagcugaccgggcuggacugcauccgccccugcuucugggucgagcucauccggggccgccccaaggaguccaccaucuggacgagcggcuccagcaucuccuucugcggggugaacagcgacaccgucuccuggagcuggcccgacggcgccgagcugccguucaccaucgacaaguga

SEQ ID NO: 79424 - RNA, 1350 nt, Artificial Sequence; identical to SEQ ID NO: 79423
  derived and/or modified CDS sequence (opt1) from neuraminidase__InfluenzaA__ABI36168

SEQ ID NO: 79425 - RNA, 1350 nt, Artificial Sequence; identical to SEQ ID NO: 79423
  derived and/or modified CDS sequence (opt1) from neuraminidase__InfluenzaA__ABI36179

SEQ ID NO: 79426 - RNA, 1350 nt, Artificial Sequence; identical to SEQ ID NO: 79423
  derived and/or modified CDS sequence (opt1) from neuraminidase__InfluenzaA__ABI36189

SEQ ID NO: 79427 - RNA, 1350 nt, Artificial Sequence
  derived and/or modified CDS sequence (opt1) from neuraminidase__InfluenzaA__ABI36278
augaaccccaaccagaagaucaucaccaucggcagcaucugcauggugaucgggaucgucucccugaugcuccagaucggcaacaugaucagcaucugggugucccacagcauccagaaggggaaccagcaccaggccgaguccaucagcaacaccaacccgcugacggagaaggccguggcguccgucacccuggccggcaacagcucccucugccccauccgcgggugggccgugcacagcaaggacaacaacauccggaucggcuccaagggcgacguguucgucauccgcgagcccuucaucagcugcucccaccuggagugccggaccuucuuccugacccagggggcccuccugaacgacaagcacagcaacggcacggugaaggaccgcagcccccaccggacccugauguccugcccggugggggaggcccccucccccuacaacagccgcuucgaguccgucgcguggagcgccagcgccugccacgacggcaccuccuggcucaccaucgggaucagcggccccgacaacgaggccguggcggugcugaaguacaacggcaucaucacggacaccaucaaguccuggcggaacaacauccugcgcacccaggagagcgagugcgccugcgucaacggguccugcuucaccgugaugacggacggcccgagcaacgggcaggccuccuacaagaucuucaagauggagaagggcaagguggucaagagcguggagcucgacgcccccaacuaccacuacgaggagugcuccugcuaccccgacgccggcgagaucacgugcgugugccgggacaacuggcacgggagcaaccgccccugggucuccuucaaccagaaccuggaguaccagaucggcuacaucugcagcgggguguucggcgacaacccgcggcccaacgacgggaccggcuccugcggccccaugagccccaacggggcguacggcgugaagggguucuccuucaaguacggcaacggggucuggaucggccgcaccaagagcaccaacucccggagcggcuucgagaugaucugggacccgaacggguggaccggcaccgacuccagcuucagcgugaagcaggacaucguggccaucaccgacugguccggguacagcggcuccuucguccagcaccccgagcugacggggcucgacugcauccgccccugcuucuggguggagcugauccggggccgccccaaggagagcaccaucuggaccuccggcagcuccaucagcuucugcggggucaacuccgacaccgugagcugguccuggccggacggcgccgagcugcccuucacgaucgacaaguga

SEQ ID NO: 79428 - RNA, 1350 nt, Artificial Sequence; identical to SEQ ID NO: 79427
  derived and/or modified CDS sequence (opt1) from neuraminidase__InfluenzaA__ABI36287

SEQ ID NO: 79429 - RNA, 1350 nt, Artificial Sequence; identical to SEQ ID NO: 79427
  derived and/or modified CDS sequence (opt1) from neuraminidase__InfluenzaA__ABI36298

SEQ ID NO: 79430 - RNA, 1350 nt, Artificial Sequence
  derived and/or modified CDS sequence (opt1) from neuraminidase__InfluenzaA__ABI36314
augaaccccaaccagaagaucaucaccaucggcagcaucugcauggugaucgggaucgucucccugaugcuccagaucggcaacaugaucagcaucugggugucccacagcauccagaccgggaaccagcaccaggccgaguccaucagcaacacgaacccgcugaccgagaaggccguggcguccgucacccuggccggcaacagcucccucugccccauccgcgggugggccgugcacagcaaggacaacaacauccggaucggcuccaagggcgacguguucgucauccgcgagcccuucaucagcugcucccaccuggagugccggaccuucuuccugacgcagggggcccuccugaacgacaagcacagcaacggcaccgugaaggaccgcagcccccaccggacccugauguccugcccggugggggaggcccccucccccuacaacagccgcuucgaguccgucgcguggagcgccagcgccugccacgacggcaacuccuggcucaccaucgggaucagcggccccgacaacgaggccguggcggugcugaaguacaacggcaucaucacggacaccaucaaguccuggcggaacaacauccugcgcacccaggagagcgagugcgccugcgucaacggguccugcuucaccgugaugacggacggcccgagcaacgggcaggccuccuacaagaucuucaagauggagaagggcaagguggucaagagcguggagcucgacgcccccaacuaccacuacgaggagugcuccugcuaccccgacgccggcgagaucacgugcgugugccgggacaacuggcacgggagcaaccgccccugggucuccuucaaccagaaccuggaguaccagaucggcuacaucugcagcgggguguucggcgacaacccgcggcccaacgacgggaccggcuccugcggccccaugagccccaacggggcguacggcgugaagggguucuccuucaaguacggcaacggggucuggaucggccgcaccaagagcaccaacucccggagcggcuucgagaugaucugggacccgaacggguggaccggcaccgacuccagcuucagcgugaagcaggacaucguggccaucaccgacugguccggguacagcggcuccuucguccagcaccccgagcugacggggcucgacugcauccgccccugcuucuggguggagcugauccggggccgccccaaggagagcaccaucuggaccuccggcagcuccaucagcuucugcggggucaacuccgacaccgugagcugguccuggccggacggcgccgagcugcccuucacgaucgacaaguga

SEQ ID NO: 79431 - RNA, 1350 nt, Artificial Sequence
  derived and/or modified CDS sequence (opt1) from neuraminidase__InfluenzaA__ABI36336
augaaccccaaccagaagaucaucaccaucggcagcaucugcauggugaucgggaucgucucccugaugcuccagaucggcaacaugaucagcaucugggugucccacagcgugcagaccgggaaccagcaccaggccgaguccaucagcaacacgaacccgcugaccgagaaggccgucgcguccgugacccuggccggcaacagcucccucugccccauccgcgggugggccgugcacagcaaggacaacaacauccggaucggcuccaagggcgacgucuucgugauccgcgagcccuucaucagcugcucccaccuggagugccggaccuucuuccugacgcagggggcccuccugaacgacaagcacagcaacggcaccgugaaggaccgcagcccccaccggacccugauguccugcccgcucggggaggcccccucccccuacaacagccgcuucgaguccgucagcuggagcgcguccgccugccacgacggcaccagcuggcugacgaucgggaucuccggccccgacaacgaggccguggccgugcugaaguacaacggcaucaucaccgacaccaucaagagcuggcggaacaacauccuccgcacccaggaguccgagugcgcgugcgucaacgggagcugcuucacggugaugaccgacggcccguccaacgggcaggccagcuacaagaucuucaagauggagaagggcaagguggucaaguccguggagcuggacgcccccaacuaccacuacgaggagugcagcugcuaccccgacgccggcgagaucacgugcgugugccgggacaacuggcacggguccaaccgccccugggucagcuucaaccagaaccuggaguaccagaucggcuacaucugcuccgggguguucggcgacaacccgcggcccaacgacgggaccggcagcugcggccccaugucccccaacggggccuacggcgugaagggguucagcuucaaguacggcaacggggucuggaucggccgcaccaaguccaccaacagccgguccggcuucgagaugaucugggacccgaacggguggaccggcaccgacagcagcuucuccgugaagcaggacaucguggcgaucacggacuggagcggguacuccggcagcuucguccagcaccccgagcucaccgggcuggacugcauccgccccugcuucuggguggagcugauccggggccgccccaaggaguccaccaucuggaccagcggcuccaucaucagcuucugcggggucaacuccgacacggugagcugguccuggccggacggcgccgagcuccccuucaccaucgacaaguga

SEQ ID NO: 79432 - RNA, 1350 nt, Artificial Sequence
  derived and/or modified CDS sequence (opt1) from neuraminidase__InfluenzaA__ABI36358
augaaccccaaccagaagaucaucaccaucggcagcaucugcauggugaucgggaucgucucccugaugcuccagaucggcaacaugaucagcaucugggugucccacagcgugcagaccgggaaccagcaccaggccgaguccaucagcaacacgaacccgcugaccgagaaggccgucgcguccgugacccuggccggcaacagcucccucugccccauccgcgggugggccgugcacagcaaggacaacaacauccggaucggcuccaagggcgacgucuucgugauccgcgagcccuucaucagcugcucccaccuggagugccggaccuucuuccugacgcagggggcccuccugaacgacaagcacagcaacggcaccgugaaggaccgcagcccccaccggacccugaugagcugcccggucggggaggcccccucccccuacaacagccgcuucgaguccguggcguggagcgccagcgccugccacgacggcaccuccuggcucacgaucgggaucagcggccccgacaacgaggccguggcgguccugaaguacaacggcaucaucaccgacaccaucaaguccuggcggaacaacauccugcgcacccaggagagcgagugcgccugcgugaacggguccugcuucacggugaugaccgacggcccgagcaacgggcaggccuccuacaagaucuucaagauggagaagggcaaggucgugaaguccguggagcucgacgcccccaacuaccacuacgaggagugcuccugcuaccccgacgccggcgagaucacgugcgucugccgggacaacuggcacgggagcaaccgccccuggguguccuucaaccagaaccuggaguaccagaucggcuacaucugcagcgggguguucggcgacaacccgcggcccaacgacgggaccggcuccugcggccccaugagccccaacggggcguacggcgucaagggguucuccuucaaguacggcaacgggguguggaucggccgcaccaagagcaccaacucccggagcggcuucgagaugaucugggacccgaacggguggaccggcaccgacuccagcuucagcgugaagcaggacaucgucgccaucacggacugguccggguacagcggcuccuucgugcagcaccccgagcugaccgggcucgacugcauccgccccugcuucugggucgagcugauccggggccgccccaaggagagcaccaucuggaccuccggcagcuccaucagcuucugcggggugaacuccgacacggugagcugguccuggccggacggcgccgagcugcccuucaccaucgacaaguga

SEQ ID NO: 79433 - RNA, 1350 nt, Artificial Sequence; identical to SEQ ID NO: 79423
  derived and/or modified CDS sequence (opt1) from neuraminidase__InfluenzaA__ABI36369

SEQ ID NO: 79434 - RNA, 1350 nt, Artificial Sequence
  derived and/or modified CDS sequence (opt1) from neuraminidase__InfluenzaA__ABI36391
augaaccccaaccagaagaucaucaccaucggcagcaucugcauggugaucgggaucgucucccugaugcuccagaucggcaacaugaucagcaucugggugucccacagcacccagaaggggaaccagcaccaggccgaguccaucagcaacacgaacccgcugaccgagaaggccguggcguccgucacccuggccggcaacagcucccucugccccauccgcgggugggccgugcacagcaaggacaacaacauccggaucggcuccaagggcgacguguucgucauccgcgagcccuucaucagcugcucccaccuggagugccggaccuucuuccugacgcagggggcccuccugaacgacaagcacagcaacggcaccgugaaggaccgcagcccccaccggacccugauguccugcccggugggggaggcccccucccccuacaacagccgcuucgaguccgucgcguggagcgccagcgccugccacgacggcaccuccuggcucacgaucgggaucagcggccccgacaacgaggccguggcggugcugaaguacaacggcaucaucaccgacaccaucaaguccuggcggaacaacauccugcgcacccaggagagcgagugcgccugcgucaacggguccugcuucacggugaugaccgacggcccgagcaacgggcaggccuccuacaagaucuucaagauggagaagggcaagguggucaagagcguggagcucgacgcccccaacuaccacuacgaggagugcuccugcuaccccgacgccggcgagaucacgugcgugugccgggacaacuggcacgggagcaaccgccccugggucuccuucaaccagaaccuggaguaccagaucggcuacaucugcagcgggaucuucggcgacaacccgcggcccaacgacgggaccggcuccugcggccccauguuccccaacggggcguacggcgugaagggguucagcuucaaguacggcaacgggguguggaucggccgcaccaaguccaccaacagccgguccggcuucgagaugaucugggacccgaacggguggaccggcaccgacagcuccuucagcgucaagcaggacaucguggccaucacggacuggagcggguacuccggcagcuucgugcagcaccccgagcugaccgggcucgacugcauccgccccugcuucugggucgagcugauccggggccgccccaaggaguccaccaucuggaccagcggcuccagcaucuccuucugcggggugaacagcgacacggucuccuggagcuggccggacggcgccgagcugcccuucaccaucgacaaguga

SEQ ID NO: 79435 - RNA, 1350 nt, Artificial Sequence; identical to SEQ ID NO: 79434
  derived and/or modified CDS sequence (opt1) from neuraminidase__InfluenzaA__ABI36402

SEQ ID NO: 79436 - RNA, 1350 nt, Artificial Sequence; identical to SEQ ID NO: 79423
  derived and/or modified CDS sequence (opt1) from neuraminidase__InfluenzaA__ABI36413

SEQ ID NO: 79437 - RNA, 1350 nt, Artificial Sequence
  derived and/or modified CDS sequence (opt1) from neuraminidase__InfluenzaA__ABI36446
augaaccccaaccagaagaucaucaccaucggcagcaucugcauggugaucgggaucgucucccugaugcuccagaucggcaacaugaucagcaucugggugucccacagcauccagaccgggaaccagcaccaggccgaguccaucagcaacacgaacccgcugaccgagaaggccguggcguccgucacccuggccggcaacagcucccucugccccauccgcgggugggccgugcacagcaaggacaacaacauccggaucggcuccaagggcgacguguucgucauccgcgagcccuucaucagcugcucccaccuggagugccggaccuucuuccugacgcagggggcccuccugaacgacaagcacagcaacggcaccgugaaggaccgcagcccccaccggacccugauguccugcccggugggggaggcccccucccccuacaacagccgcuucgaguccgucgcguggagcgccagcgccugccacgacggcaccuccuggcucacgaucgggaucagcggccccgacaacgaggccguggcggugcugaaguacaacggcaucaucaccgacaccaucaaguccuggcggaacaacauccugcgcacccaggagagcgagugcgccugcgucaacggguccugcuucacggugaugaccgacggcccgagcaacgggcaggccuccuacaagaucuucaagauggagaagggcaagguggucaagagcguggagcucgacgcccccaacuaccacuacgaggagugcuccugcuaccccgacgccggcgagaucacgugcgugugccgggacaacuggcacgggagcaaccgccccuggaucuccuucaaccagaaccuggaguaccagaucggcuacaucugcagcggggucuucggcgacaacccgcggcccaacgacgggaccggcuccugcggccccaugagccccaacggggcguacggcgugaagggguucuccuucaaguacggcaacgggguguggaucggccgcaccaagagcaccaacucccggagcggcuucgagaugaucugggacccgaacggguggaccggcaccgacuccagcuucagcgucaagcaggacaucguggccaucacggacugguccggguacagcggcuccuucgugcagcaccccgagcugaccgggcucgacugcauccgccccugcuucugggucgagcugauccggggccgccccaaggagagcaccaucuggaccuccggcagcuccaucagcuucugcggggugaacuccgacacggucagcugguccuggccggacggcgccgagcugcccuucaccaucgacaaguga

SEQ ID NO: 79438 - RNA, 1350 nt, Artificial Sequence; identical to SEQ ID NO: 79427
  derived and/or modified CDS sequence (opt1) from neuraminidase__InfluenzaA__ABI36457

SEQ ID NO: 79439 - RNA, 1350 nt, Artificial Sequence
  derived and/or modified CDS sequence (opt1) from neuraminidase__InfluenzaA__ABI36476
augaaccccaaccagaagaucaucaccaucggcagcaucugcauggugaucgggaucgucucccugaugcuccagaucggcaacaugaucagcaucugggugucccacagcacccagaaggggaaccagcaccaggccgaguccaucagcaacacgaacccgcugaccgagaaggccguggcguccgucacccuggccggcaacagcucccucugccccauccgcgggugggccgugcacagcaaggacaacaacauccggaucggcuccaagggcgacguguucgucauccgcgagcccuucaucagcugcucccaccuggagugccggaccuucuuccugacgcagggggcccuccugaacgacaagcacagcaacggcaccgugaaggaccgcagcccccaccggacccugauguccugcccggugggggaggcccccucccccuacaacagccgcuucgaguccgucgcguggagcgccagcgccugccacgacggcaccuccuggcucacgaucgggaucagcggccccgacaacgaggccguggcggugcugaaguacaacggcaucaucaccgacaccaucaaguccuggcggaacaacauccugcgcacccaggagagcgagugcgccugcgucaacggguccugcuucacggugaugaccgacggcccgagcaacgggcaggccuccuacaagaucuucaagauggagaagggcaagguggucaagagcguggagcucgacgcccccaacuaccacuacgaggagugcuccugcuaccccgacgccggcgagaucacgugcgugugccgggacaacuggcacgggagcaaccgccccugggucuccuucaaccagaaccuggaguaccagaucggcuacaucugcagcgggguguucggcgacaacccgcggcccaacgacgggaccggcuccugcggccccaugagccccaacggggcguacggcgugaagggguucuccuucaaguacggcaacggggucuggaucggccgcaccaagagcaccaacucccggagcggcuucgagaugaucugggacccgaacggguggaccggcaccgacuccagcuucagcgugaagcaggacaucguggccaucacggacugguccggguacagcggcuccuucguccagcaccccgagcugaccgggcucgacugcauccgccccugcuucuggguggagcugauccggggccgccccaaggagagcaccaucuggaccuccggcagcuccaucagcuucugcggggucaacuccgacacggugagcugguccuggccggacggcgccgagcugcccuucaccaucgacaaguga

SEQ ID NO: 79440 - RNA, 1350 nt, Artificial Sequence
  derived and/or modified CDS sequence (opt1) from neuraminidase__InfluenzaA__ABI49409
augaaccccaaccgcaagaucaucaccaucggcagcaucugcauggugaucgggauggucucccugaugcuccagaucggcaacaugaucagcaucugggugucccacagcauccagaccgggaaccagcaccaggccgaguccaucagcaacacgaacccgcugaccgagaaggccguggcguccgucacccuggccggcaacagcucccucugccccauccgggggugggccgugcacagcaaggacaacaacauccgcaucggcuccaagggcgacguguucgucauccgggagcccuucaucagcugcucccaccuggagugccgcaccuucuuccugacgcagggggcccuccugaacgacaagcacagcaacggcaccgugaaggaccggagcccccaccgcacccugauguccugcccggugggggaggcccccucccccuacaacagccgguucgaguccgucgcguggagcgccagcgccugccacgacggcaccuccuggcucacgaucgggaucagcggccccgacaacgaggccguggcggugcugaaguacaacggcaucaucaccgacaccaucaaguccuggcgcaacaacauccugcggacccaggagagcgagugcgccugcgucaacggguccugcuucacggugaugaccgacggcccgagcaacgggcaggccuccuacaagaucuucaagauggagaagggcaagguggucaagagcguggagcucguggcccccaacuaccacuacgaggagugcuccugcuaccccgacgccggcgagaucacgugcgucugccgcgacaacuggcacgggagcaaccggcccuggguguccuucaaccagaaccuggaguaccagaucggcuacaucugcagcgggguguucggcgacaacccgcgccccaacgacgggaccggcuccugcggccccaugagccccaacggggcguacggcgucaagggguucuccuucaaguacggcaacgggguguggaucggccggaccaagagcaccaacucccgcagcggcuucgagaugaucugggacccgaacggguggaccggcaccgacuccagcuucagcgugaagcaggacaucgucgccaucacggacugguccggguacagcggcuccuucgugcagcaccccgagcugaccgggcucgacugcauccggcccugcuucugggucgagcugauccgcggccggcccaaggagagcaccaucuggaccuccggcagcuccaucagcuucugcggggugaacuccgacacggccagcugguccuggccggacggcgccgagcugcccuucaccaucgacaaguga

SEQ ID NO: 79441 - RNA, 1350 nt, Artificial Sequence
  derived and/or modified CDS sequence (opt1) from neuraminidase__InfluenzaA__ABI49417
augaaccccaaccagaagaucaucaccaucggcagcaucugcauggugaucgggaucgucucccugaugcuccagaucggcaacaugaucagcaucugggugucccacagcauccagaccgggaaccagcaccaggccgaguccaucagcaacacgaacccgcugaccgagaaggccguggcguccgucacccuggccggcaacagcucccucugccccauccgcgggugggccgugcacagcaaggacaacaacauccggaucggcuccaagggcgacguguucgucauccgcgagcccuucaucagcugcucccaccuggagugccggaccuucuuccugacgcgcggggcccuccugaacgacaagcacagcaacggcaccgugaaggaccggagcccccaccgcacccugauguccugcccggugggggaggcccccucccccuacaacagccgguucgaguccgucgcguggagcgccagcgccugccacgacggcaccuccuggcucacgaucgggaucagcggccccgacaacgaggccguggcggugcugaaguacaacggcaucaucaccgacaccaucaaguccuggcgcaacaacauccugcggacccaggagagcgagugcgccugcgucaacggguccugcuucacggugaugaccgacggcccgagcaacgggcaggccuccuacaagaucuucaagauggagaagggcaagguggucaagagcguggagcucgacgcccccaacuaccacuacgaggagugcuccugcuaccccgacgccggcgagaucacgugcgugugccgcgacaacuggcacgggagcaaccggcccugggucuccuucaaccagaaccuggaguaccagaucggcuacaucugcagcgggguguucggcgacaacccgcgccccaacgacgggaccggcuccugcggccccaugagccccaacggggcguacggcgugaagggguucuccuucaaguacggcaacggggucuggaucggccggaccaagagcaccaacucccgcagcggcuucgagaugaucugggacccgaacggguggaccggcaccgacuccagcuucagcgugaagcaggacaucguggccaucacggacugguccggguacagcggcuccuucguccagcaccccgagcugaccgggcucgacugcauccggcccugcuucuggguggagcugauccgcggccagcccaaggagagcaccaucuggaccuccggcagcuccaucagcuucugcggggucaacuccgacacggugagcugguccuggccggacggcgccgagcugcccuucaccaucgacaaguga

SEQ ID NO: 79442 - RNA, 1410 nt, Artificial Sequence
  derived and/or modified CDS sequence (opt1) from neuraminidase__InfluenzaA__ABI84962
augaaccccaaccagaagaucaucaccaucggcagcgugucccugaccaucgccacggucugcuuccucaugcagaucgccauccuggcgaccaccgugacccugcacuucaagcagcacgagugcgacagcccggccuccaaccaggugaugcccugcgagcccaucaucaucgagcgcaacaucacggagaucgucuaccucaacaacaccaccaucgagaaggagaucugccccgaggugguggaguaccggaacuggagcaagccgcagugccagaucaccggguucgcccccuucuccaaggacaacagcauccgccuguccgccggcggggacaucugggucacgcgggagcccuacgugagcugcgaccccggcaagugcuaccaguucgcccuggggcagggcaccacccucgacaacaagcacuccaacggcaccauccacgaccgcaucccgcaccggacgcugcugaugaacgagcucggggugcccuuccaccugggcaccaagcaggucugcguggcguggagcuccagcuccugccacgacgggaaggccuggcugcacgugugcgucaccggcgacgaccgcaacgccaccgccagcuucaucuacgacgggcggcucguggacuccaucggcagcuggucccagaacauccugcgcacgcaggagagcgagugcgugugcaucaacgggaccugcaccgucgugaugaccgacggcuccgcgagcggccgggccgacacgcgcauccuguucaucaaggaggggaagaucgugcacaucagcccccucuccggcagcgcccagcacaucgaggagugcuccugcuacccccgguacccggacguccgcugcaucugccgggacaacuggaagggcagcaaccgccccgugaucgacaucaacauggaggacuacuccaucgacagcuccuacgugugcagcgggcuggucggcgacacgccccggaacgacgacuccagcuccaacagcaacugccgcgaccccaacaacgagcgggggaacccgggcgugaaggggugggccuucgacaacggcgacgacguguggaugggccgcaccaucuccaaggacagccgguccggguacgagaccuucaaggucaucggcggguggagcacccccaacuccaagagccaggugaaccgccaggucaucguggacaacaacaacugguccggcuacagcgggaucuucagcguggagggcaaguccugcaucaaccggugcuucuacgucgagcugauccgcggccgcccccaggagacccgggugugguggaccagcaacuccaucguggucuucugcgggaccagcggcacguacgggaccggcuccuggcccgacggggccaacaucaacuucaugccgaucuga

SEQ ID NO: 79443 - RNA, 1410 nt, Artificial Sequence
  derived and/or modified CDS sequence (opt1) from neuraminidase__InfluenzaA__ABI85003
augaaccccaaccagaagaucaucaccaucggcguggucaacaccacgcugagcaccaucgcccuccugaucggggugggcaaccugguguucaacaccgucauccacgagaagaucggggaccaccagaucgugacccacccgacgaucaugacccccgaggugcccaacugcuccgacaccaucaucaccuacaacaacacggucaucaacaacaucaccaccaccaucaucacggaggccgagcgccccuucaagagcccgcucccccugugccccuuccggggcuucuuccccuuccacaaggacaacgcgauccgccugggggagaacaaggacgugaucgugacccgggagccguacgucuccugcgacaacgacaacugcuggagcuucgcccucgcccagggcgcccugcugggcaccaagcacuccaacgggaccaucaaggaccgcacgcccuaccggagccucauccgcuuccccaucggcaccgcccccgugcuggggaacuacaaggagaucugcaucgcgugguccagcuccagcugcuucgacggcaaggaguggaugcacgugugcaugaccgggaacgacaacgacgccuccgcccagaucaucuacggcggccggaugaccgacagcaucaaguccuggcgcaaggacauccugcggacgcaggagagcgagugccagugcaucgacgggaccugcgucguggccgugaccgacggcccggcggccaacuccgccgaccaccgcgucuacuggauccgggaggggcgcaucaucaaguacgagaacgugcccaagaccaagauccagcaccucgaggagugcagcugcuacguggacaucgacgucuacugcaucugccgggacaacuggaagggcuccaaccgccccuggaugcggaucaacaacgagacgauccuggagaccggcuacgugugcagcaaguuccacuccgacacgccccgcccggccgaccccagcaucaugagcugcgacucccccagcaacgugaacgggggccccggggucaagggcuucggguucaaggccggcaacgacguguggcugggccggaccguguccaccagcgggcgcuccggcuucgagaucaucaaggucaccgagggguggaucaacagcccgaaccacgugaaguccaucacccagacccucgucagcaacaacgacugguccggcuacagcggguccuucaucgugaaggcgaaggacugcuuccagcccugcuucuacguggagcugauccggggccgccccaacaagaacgacgacgucagcuggacguccaacagcaucgugaccuucugcggccuggacaacgagcccggguccggcaacuggccggacgggagcaacaucggcuucaugcccaaguga

SEQ ID NO: 79444 - RNA, 1410 nt, Artificial Sequence; identical to SEQ ID NO: 79114
  derived and/or modified CDS sequence (opt1) from neuraminidase__InfluenzaA__ABI92294

SEQ ID NO: 79445 - RNA, 1413 nt, Artificial Sequence
  derived and/or modified CDS sequence (opt1) from neuraminidase__InfluenzaA__ABI92305
augaaccccaaccagaagaucaucaccaucggcagcaucugcauggccaucgggaucaucucccugauccuccagaucggcaacaucaucagcaucugggugucccaccugauccagaccgggagccagaaccacacgggcaucugcaaccagcgcaucaucaccuacgagaacuccaccugggucaaccagaccuacgugaacaucaacaacacgaacguggucgccgggaaggacaccaccagcgugacccuggcgggcaacuccagccucugcccggugcggggcugggccaucuacuccaaggacaacagcauccgcaucggguccaagggcgacgucuucgugauccgggagcccuucaucagcugcucccaccuggagugccgcacguucuuccugacccagggggcccuccugaacgacaagcacagcaacggcaccgugaaggaccggucccccuaccgcgcccugaugagcugccccaucggggaggccccgucccccuacaacagccgguucgaguccgucgcguggagcgccagcgccugccacgacggcaugggcuggcucaccaucgggaucuccggccccgacgacggggccguggcggugcugaaguacaacggcaucaucacggagaccaucaagagcuggcgcaagcggauccugcgcacccaggaguccgagugcgucugcaucaacggcagcugcuucaccaucaugacggacgggcccuccaacggcccggccagcuaccggaucuucaagaucgagaaggggaagaucaccaaguccaucgagcucgacgcccccaacagccacuacgaggagugcuccugcuaccccgacaccggcaccgugaugugcgugugccgcgacaacuggcacgggagcaaccggcccugggucuccuucaaccagaaccuggacuaccagaucggcuacaucugcagcggcguguucggggacaacccgcgccccaaggacggcaagggguccugcggccccgugacggucgacggggccgacggcgugaagggcuucagcuaccgguacgggaacggcguguggaucgggcgcaccaaguccaacagcucccggaagggcuucgagaugaucugggaccccaacggguggaccgacaccgacagcaacuuccuggucaagcaggacgugguggccaugacggacugguccggcuacagcggcagcuucguccagcacccggagcucaccgggcuggacugcaugcgccccugcuucuggguggagcugauccggggccgcccccgggagaagaccaccaucuggacguccgggagcuccaucagcuucugcggcgucaacuccgacaccgugaacuggagcuggcccgacggcgcggagcucccguucaccaucgacaaguga

SEQ ID NO: 79446 - RNA, 1413 nt, Artificial Sequence
  derived and/or modified CDS sequence (opt1) from neuraminidase__InfluenzaA__ABI92316
augaaccccaaccagaagaucaucaccaucggcagcaucuccaucgccaucggggugaucagccugauccuccagaucggcaacaucaucuccaucugggccagccacuccauccagaccgggagccagaaccacacgggcaucugcaaccagcgcaucaucaccuacgagaacuccaccugggucaaccagaccuacgugaacaucaacaacacgaacguggucgcggggaaggacaagaccagcaugacccuggccggcaacuccagccugugcccgauccggggcugggccaucuacaccaaggacaacuccauccgcaucgggagcaagggcgacguguucgugauccgggagcccuucaucuccugcagccaccucgagugccgcacguucuuccugacccagggggcccugcucaacgacaagcacuccaacggcaccgucaaggaccggagccccuaccgcgcccugauguccugcccccugggggaggcgccgagccccuacaacucccgguucgagagcguggccuggagcgccuccgccugccacgacggccucggcuggcugaccaucgggaucagcggccccgacaacggggcgguggccguccugaaguacaacggcaucaucacggagaccaucaaguccuggaagaagcgcauccuccggacccaggagagcgagugcgugugcgugaacggcuccugcuucaccaucaugacggacgggcccagcaacggcgccgccuccuaccgcaucuucaagaucgagaaggggcgggucaccaagagcaucgagcuggacgccccgaacuaccacuacgaggagugcuccugcuaccccgacaccggcaccgugaugugcgugugccgcgacaacuggcacgggagcaaccggcccugggucuccuucaaccagaaccuggacuaccagaucggcuacaucugcagcggcguguucggggacaacccccgcccgaaggacggcgagggguccugcaaccccgugacggucgacggcgcggacggggugaagggcuucagcuaccgguacggcaacgggguguggaucggccgcaccaaguccaaccggcuccgcaagggguucgagaugaucugggaccccaacggcuggaccgacaccgacagcgacuucuccaugaagcaggacaucgucgccaugacggacuggagcggguacuccggcagcuucgugcagcaccccgagcugaccggccuggacugcaugcggccgugcuucuggguggagcucguccgcgggcugccccgggagaacaccaccaucuggacgagcggcuccagcaucuccuucugcggggugaacagcgacaccgccaacugguccuggcccgacggcgccgagcugcccuucaccaucgacaaguga

SEQ ID NO: 79447 - RNA, 1410 nt, Artificial Sequence; identical to SEQ ID NO: 79125
  derived and/or modified CDS sequence (opt1) from neuraminidase__InfluenzaA__ABI92327

SEQ ID NO: 79448 - RNA, 1410 nt, Artificial Sequence
  derived and/or modified CDS sequence (opt1) from neuraminidase__InfluenzaA__ABI92338
augaaccccaaccagaagaucaucaccaucggcagcgugucccugaccaucgccacgaucugcuuccucaugcagaucgccauccuggucaccaccgugacccugcacuucaagcaguacgagugcaacagcccgcccaacaaccaggugaugcucugcgagcccgcgaucaucgagcgcaacaucacggagaucgucuaccugaccaacaccaccaucgagaaggagaucugccccaagcuggccgaguaccggaacugguccaagccgcagugcaacaucacgggguucgcccccuucagcaaggacaacuccauccgccucagcgccggcggggacaucugggugacccgggagcccuacguguccugcgaccccgacaagugcuaccaguucgcccugggccaggggaccacccugaacaacggccacagcaacgacacgguccacgaccgcaccccguaccggacccuccugaugaacgagcugggcgugcccuuccaccucgggacccgccaggugugcaucgcgugguccagcuccagcugccacgacggcaaggccuggcugcacgucugcgugacgggggacgacgagaacgccaccgccuccuucaucuacaacggccggcugguggacagcaucggguccuggagcaagaagauccuccgcacccaggaguccgagugcgucugcaucaacgggaccugcacgguggugaugaccgacggcagcgcguccgggaaggccgacaccaagauccuguucaucgaggagggcaagaucgucaacaucagcacccugagcggguccgcccagcacguggaggagugcagcugcuacccccgguaccccggcgugcgcugcgucugccgggacaacuggaagggcuccaaccgcccgaucaucgacaucaacgugaaggacuacagcaucguguccagcuacgucugcuccgggcucgugggcgacacgccccggaagaacgacagcuucuccagcucccacugccuggaccccaacaacgaggagggcggccacggggugaagggcugggccuucgacgacggcaacgacgucuggauggggcgcaccaucagcgagaagcugcgguccggcuacgagaccuucaaggugaucgagggguggagcaagcccaacuccaagcuccagaucaaccgccaggucaucguggagcggggcaaccgcagcggguacuccggcaucuucagcguggagggcaaguccugcaucaaccggugcuucuacgucgagcugauccgcgggcggaaggaggagaccgaggugugguggacgagcaacagcaucguggucuucugcggcaccuccgggaccuacggcaccgggagcuggccggacggcgccgacaucaaccugaugcccaucuga

SEQ ID NO: 79449 - RNA, 1410 nt, Artificial Sequence
  derived and/or modified CDS sequence (opt1) from neuraminidase__InfluenzaA__ABI92349
augaaccccaaccagaagaucaucaccaucggcagcgugucccugaccaucgccacgaucugcuuccucaugcagaucgccauccuggucaccaccgugacccugcacuucaagcaguacgagugcaacagcccgcccaacaaccaggugaugcucugcgagcccacgaucaucgagcgcaacaucaccgagaucgucuaccugaccaacaccacgaucgagaaggagaucugccccaagcuggcgaaguaccggaacugguccaagccgcagugcaacaucaccggguucgcccccuucagcaaggacaacuccauccgccucagcgccggcggggacaucugggugacccgggagcccuacguguccugcgaccccgacaagugcuaccaguucgcccugggccaggggaccacgcugaacaacggccacagcaacgacaccguccacgaccgcaccccguaccggacccuccugaugaacgagcugggcgugcccuuccaccucgggacgcgccaggugugcaucgccugguccagcuccagcugccacgacggcaaggcguggcugcacgucugcgugaccggggacgacgagaacgccaccgccuccuucaucuacaacggccggcugguggacagcaucggguccuggagcaagaagauccuccgcacccaggaguccgagugcgucugcaucaacggcacgugcaccguggugaugaccgacggcagcgccuccgggaaggcggacaccaagauccuguucaucgaggagggcaagaucguccacaucagcacgcugagcggguccgcccagcacguggaggagugcagcugcuacccccgguaccccggcgugcgcugcgucugccgggacaacuggaagggcuccaaccgcccgaucguggacaucaacgugaaggacuacagcaucgucuccagcuacgugugcuccgggcucgugggcgacacgccccggaagaacgacagcuucuccagcucccacugccuggaccccaacaacgaggagggcgggcacggggucaagggcugggccuucgacgacggcaacgacguguggaucgggcgcaccaucagcgagaagcugcgguccggcuacgagaccuucaaggucaucgagggguggagcaagcccaacuccaagcuccagaccaaccgccaggugaucguggagcggggcaaccgcagcggguacuccggcaucuucagcgucgagggcaaguccugcaucaaccggugcuucuacguggagcugauccgcgggcggaaggaggagaccgaggugugguggaccagcaacagcaucgucguguucugcggcaccuccgggacguacggcaccgggagcuggccggacggcgccgacaucaaccugaugcccaucuga

SEQ ID NO: 79450 - RNA, 1410 nt, Artificial Sequence; identical to SEQ ID NO: 78351
  derived and/or modified CDS sequence (opt1) from neuraminidase__InfluenzaA__ABI92360

SEQ ID NO: 79451 - RNA, 1410 nt, Artificial Sequence; identical to SEQ ID NO: 78351
  derived and/or modified CDS sequence (opt1) from neuraminidase__InfluenzaA__ABI92371

SEQ ID NO: 79452 - RNA, 1413 nt, Artificial Sequence; identical to SEQ ID NO: 78410
  derived and/or modified CDS sequence (opt1) from neuraminidase__InfluenzaA__ABI92382

SEQ ID NO: 79453 - RNA, 1410 nt, Artificial Sequence; identical to SEQ ID NO: 78738
  derived and/or modified CDS sequence (opt1) from neuraminidase__InfluenzaA__ABI92393

SEQ ID NO: 79454 - RNA, 1410 nt, Artificial Sequence; identical to SEQ ID NO: 78351
  derived and/or modified CDS sequence (opt1) from neuraminidase__InfluenzaA__ABI92404

SEQ ID NO: 79455 - RNA, 1410 nt, Artificial Sequence
  derived and/or modified CDS sequence (opt1) from neuraminidase__InfluenzaA__ABI92415
augaaccccaaccagaagaucaucaccaucggcagcgugucccugaccaucagcacgaucugcuucuucaugcagaucgccauccucaucaccaccgucacccugcacuucaagcaguacgaguucaacuccccgcccaacaaccaggugaugcugugcgagcccacgaucaucgagcgcaacaucaccgagaucguguaccucaccaacaccacgaucgagaaggagaucugccccaagcuggccgaguaccggaacuggagcaagccgcagugcgacaucaccggguucgcgcccuucuccaaggacaacagcauccgccuguccgccggcggggacaucugggucacccgggagcccuacgugagcugcgaccccgacaagugcuaccaguucgcccucggccaggggaccacgcugaacaacgugcacuccaacgacaccguccacgaccgcaccccguaccggacccugcucaugaacgagcugggcgugcccuuccaccugggcacgaagcaggucugcaucgccuggagcuccagcuccugccacgacgggaaggccuggcuccacgugugcgugaccggcgacgacaagaacgcgaccgccagcuucaucuacaacgggcgccugguggacuccaucgucagcugguccaagaagauccugcggacccaggagagcgagugcgugugcaucaacggcacgugcaccguggucaugaccgacggguccgccagcggcaaggccgacaccaagauccucuucaucgaggagggcaagaucgugcacacgagcacccuguccgggagcgcgcagcacguggaggagugcuccugcuacccccgcuaccccggcguccggugcgugugccgcgacaacuggaaggggagcaaccggccgaucguggacaucaacaucaaggacuacuccaucgucagcuccuacgugugcagcggccuggugggcgacacgccccgcaagaacgacuccagcuccagcucccacugccucgaccccaacaacgaggagggcgggcacggggucaagggcugggccuucgacgacgggaacgacguguggaugggccggaccaucagcgagaagcugcgcuccggcuacgagaccuucaaggucaucgagggguggagcaaccccaacuccaagcugcagaucaaccgccaggugaucguggaccggggcaaccggagcggguacuccggcaucuucagcgucgagggcaagagcugcaucaaccgcugcuucuacguggagcucauccgggggcgcaaggaggagaccgaggugcuguggaccuccaacagcaucgucguguucugcggcaccuccgggacguacggcaccgggagcuggccggacggcgccgacaucaacuucaugcccaucuga

SEQ ID NO: 79456 - RNA, 1410 nt, Artificial Sequence; identical to SEQ ID NO: 78738
  derived and/or modified CDS sequence (opt1) from neuraminidase__InfluenzaA__ABI92426

SEQ ID NO: 79457 - RNA, 1410 nt, Artificial Sequence; identical to SEQ ID NO: 78738
  derived and/or modified CDS sequence (opt1) from neuraminidase__InfluenzaA__ABI92437

SEQ ID NO: 79458 - RNA, 1410 nt, Artificial Sequence; identical to SEQ ID NO: 78738
  derived and/or modified CDS sequence (opt1) from neuraminidase__InfluenzaA__ABI92448

SEQ ID NO: 79459 - RNA, 1410 nt, Artificial Sequence; identical to SEQ ID NO: 78738
  derived and/or modified CDS sequence (opt1) from neuraminidase__InfluenzaA__ABI92459

SEQ ID NO: 79460 - RNA, 1410 nt, Artificial Sequence
  derived and/or modified CDS sequence (opt1) from neuraminidase__InfluenzaA__ABI92470
augaaccccaaccagaagaucaucaccaucggcagcgugucccugaccaucgccacgaucugcuuccucaugcagaucgccauccuggucaccaccgugacccugcacuucaagcaguacgagugcaacagcccgcccaacaaccaggugaugcucugcgagcccacgaucaucgagcgcaacaucaccgagaucgucuaccugaccaacaccacgaucgagaaggagaucugccccaagcuggcggaguaccggaacugguccaagccgcagugcaacaucaccggguucgcccccuucagcaaggacaacuccauccgccucagcgccggcggggacaucugggugacccgggagcccuacguguccugcgaccccgacaagugcuaccaguucgcccugggccaggggaccacgcugaacaacggccacagcaacgacaccguccacgaccgcaccccguaccggacccuccugaugaacgagcugggcgugcccuuccaccucgggacgaagcaggucugcaucgccugguccagcuccagcugccacgacggcaaggcguggcugcacgugugcgugaccggggacgacgagaacgccaccgccuccuucaucuacaacggccgccugguggacagcaucggguccuggagcaagaagauccuccggacccaggaguccgagugcgucugcaucaacggcacgugcaccguggugaugaccgacggcagcgccuccgagaaggcggacaccaagauccuguucaucgaggaggggaagaucguccacacgagcagccuguccggcagcgcccagcacguggaggagugcuccugcuacccccgcuaccccggggugcggugcgucugccgcgacaacuggaagggcagcaaccggccgaucguggacaucaacgugaaggacuacuccaucgucagcuccuacgugugcagcggccucgugggggacacgccccgcaagaacgacuccagcuccagcucccacugccuggaccccaacaacgaggagggcgggcacggcgucaaggggugggccuucgacgacggcaacgacguguggaugggccggaccaucagcgagaagcugcgcuccggguacgagaccuucaaggucaucgagggcuggagcaagcccaacuccaagcuccagaucaaccgccaggugaucguggaccgggggaaccggagcggcuacuccgggaucuucagcgucgagagcaaguccugcaucaaccgcugcuucuacguggagcugauccggggccgcaagcaggagaccgaggugcuguggaccagcaacuccaucgucguguucugcggcaccagcgggaccuacggcacgggguccuggccggacggcgccgacaucaaccucaugcccaucuga

SEQ ID NO: 79461 - RNA, 1410 nt, Artificial Sequence; identical to SEQ ID NO: 78754
  derived and/or modified CDS sequence (opt1) from neuraminidase__InfluenzaA__ABI92481

SEQ ID NO: 79462 - RNA, 1410 nt, Artificial Sequence; identical to SEQ ID NO: 78754
  derived and/or modified CDS sequence (opt1) from neuraminidase__InfluenzaA__ABI92492

SEQ ID NO: 79463 - RNA, 1410 nt, Artificial Sequence
  derived and/or modified CDS sequence (opt1) from neuraminidase__InfluenzaA__ABI92503
augaaccccaaccagaagaucaucaccaucggcagcgugucccugaccaucgccacgaucugcuuccucaugcagaucgccauccuggucaccaccgugacccugcacuucaagcaguacgagugcaacagcccgcccaacaaccaggugaugcucugcgagcccacgaucaucgagcgcaacaucaccgagaucgucuaccugaccaacaccacgaucgagaaggagaucugccccaagcuggaggaguaccggaacugguccaagccgcagugcaacaucaccggguucgcgcccuucagcaaggacaacuccauccgccucagcgccggcggggacaucugggugacccgggagcccuacguguccugcgaccccgacaagugcuaccaguucgcccugggccaggggaccacgcugaacaacggccacagcaacgacaccguccacgaccgcaccccguaccggacccuccugaugaacgagcugggcgugcccuuccaccucgggacgaagcaggucugcaucgccugguccagcuccagcugccacgacggcaaggccuggcugcacgugugcgugaccggggacgacgagaacgcgaccgccuccuucaucuacaacggccgccugguggacagcaucggguccuggagcaagaagauccuccggacccaggaguccgagugcgucugcaucaacggcacgugcaccguggugaugaccgacggcagcgccuccgggaaggccgacaccaagauccuguucaucgaggagggcaagaucguccacacgagcagccuguccgggagcgcgcagcacguggaggagugcuccugcuacccccgcuaccccggcgugcggugcgucugccgcgacaacuggaagggcagcaaccggccgaucguggacaucaacgugaaggacuacuccaucgucagcuccuacgugugcagcgggcucgugggcgacacgccccgcaagaacgacuccagcuccagcucccacugccuggaccccaacaacgaggagggcgggcacggggucaagggcugggccuucgacgacggcaacgacguguggauggggcggaccaucagcgagaagcugcgcuccggcuacgagaccuucaaggucaucgagggguggagcaagcccaacuccaagcuccagaucaaccgccaggugaucguggaccggggcaaccggagcggguacuccggcaucuucagcgucgagagcaaguccugcaucaaccgcugcuucuacguggagcugauccggggccgcaagcaggagaccgaggugcuguggaccagcaacuccaucgucguguucugcgggaccagcggcaccuacgggacgggcuccuggccggacggggccgacaucaaccucaugcccaucuga

SEQ ID NO: 79464 - RNA, 1410 nt, Artificial Sequence
  derived and/or modified CDS sequence (opt1) from neuraminidase__InfluenzaA__ABI92514
augaaccccaaccagaagaucaucaccaucggcagcgugucccugaccaucgccacgaucugcuuccucguccagaucgccauccuggugaccaccgugacccugcacuucaagcaguacgagugcaacagcccgcccaacaaccaggucaugcucugcgagcccacgaucaucgagcgcaacaucaccgagaucguguaccugaccaacaccacgaucgagaaggagaucugccccaagcuggcggaguaccggaacugguccaagccgcagugcaagaucaccggguucgcccccuucagcaaggacaacuccauccgccucagcgccggcggggacaucugggugacccgggagcccuacgucuccugcgaccccgacaagugcuaccaguucgcccugggccaggggaccacgcugaacaaccgccacagcaacgacaccgugcacgaccggaccccguaccgcacccuccugaugaacgagcugggcgugcccuuccaccucggcacgaagcaggucugcaucgccugguccagcuccagcugccacgacgggaaggcguggcugcacgugugcgugaccggcgacgacgagaacgccaccgccuccuucaucuacgacgggcggcuggucgacagcaucggcuccuggagcaagaagauccuccgcacccaggaguccgagugcgugugcaucaacgggacgugcaccguggucaugaccgacggcagcgccuccggccgggcggacaccaagauccuguucaucgaggaggggaagaucgugcacacgagcaagcugagcggcuccgcccagcacguggaggagugcagcugcuacccccgcuaccccgggguccggugcgugugccgcgacaacuggaagggcuccaaccggccgaucguggacaucaacgucaaggacuacagcaucguguccagcuacgugugcuccggccucgucggggacacgccccgcaagaacgacagcuccagcuccagccacugccuggaccccaacaacgaggagggcgggcacggcgugaaggggugggccuucgacgacggcgacgacgucuggaugggccggaccaucuccgagaagucccgcagcggguacgagaccuucaaggugaucgagggcuggagcaagcccaacuccaagcugcagaucaaccgccaggugaucgucgagcgggggaacaugagcggcuacuccgggaucuucagcguggagggcaagagcugcaucaaccggugcuucuacguggagcucauccgcggccggaagcaggagaccgaggucugguggaccuccaacagcaucgugguguucugcgggaccuccggcaccuacgggacgggcagcuggccggacggggccgacaucaaccugaugcccaucuga

SEQ ID NO: 79465 - RNA, 1410 nt, Artificial Sequence
  derived and/or modified CDS sequence (opt1) from neuraminidase__InfluenzaA__ABI92525
augaaccccaaccagaagaucaucaccaucggcagcgugucccugaccaucgccacgaucugcuuccucaugcagaucgccauccuggucaccaccgugacccugcacuucaagcaguacgagugcaacagcccgcccaacaaccaggugaugcucugcgagcccacgaucaucgagcgcaacaucaccgagaucgucuaccugaccaacaccacgaucgagaaggagaucugccccaagcuggcggaguaccggaacugguccaagccgcagugcaacaucaccggguucgcccccuucagcaaggacaacuccauccgccucagcgccggcggggacaucugggugacccgggagcccuacguguccugcgaccccgacaagugcuaccaguucgcccugggccaggggaccacgcugaacaacggccacagcaacgacaccguccacgaccgcaccccguaccggacccuccugaugaacgagcugggcgugcccuuccaccucgggacgaagcaggucugcaucgccugguccagcuccagcugccacgacggcaaggcguggcugcacgugugcgugaccggggacgacgagaacgccaccgccuccuucaucuacaacggccgccugguggacagcaucggguccuggagcaagaagauccuccggacccaggaguccgagugcgucugcaucaacggcacgugcaccguggugaugaccgacggcagcgccuccgggaaggcggacaccaagauccuguucaucgaggagggcaagaucguccacaucagcacgcugagcggguccgcccagcacguggaggagugcagcugcuacccccgcuaccccggcgugcggugcgucugccgcgacaacuggaagggcuccaaccggccgaucguggacaucaacgugaaggacuacagcaucgucuccagcuacgugugcuccgggcucgugggcgacacgccccgcaagaacgacagcuucuccagcucccacugccuggaccccaacaacgaggagggcgggcacggggucaagggcugggccuucgacgacggcaacgacguguggauggggcggaccaucagcgagaagcugcgcuccggcuacgagaccuucaaggucaucgagggguggagcaagcccaacuccaagcuccagaucaaccgccaggugaucguggagcggggcaaccggagcggguacuccggcaucuucagcgucgagggcaaguccugcaucaaccgcugcuucuacguggagcugauccgggggcgcaaggaggagaccgaggugugguggaccagcaacagcaucgucguguucugcggcaccuccgggaccuacggcacggggagcuggccggacggcgccgacaucaaccugaugcccaucuga

SEQ ID NO: 79466 - RNA, 1410 nt, Artificial Sequence
  derived and/or modified CDS sequence (opt1) from neuraminidase__InfluenzaA__ABI92536
augaaccccaaccagaagaucaucaccaucggcagcgugucccugaccaucgccacgaucugcuuccucaugcagaucgccauccuggucaccaccgugacccugcacuucaagcaguacgagugcaacagcccgcccaacaaccaggugaugcucugcgagcccacgaucaucgagcgcaacaucaccgagaucgucuaccugaccaacaccacgaucgagaaggagaagugccccaagcuggcggaguaccggaacugguccaagccgcagugcaacaucaccggguucgcccccuucagcaaggacaacuccauccgccucagcgccggcggggacaucugggugacccgggagcccuacguguccugcgaccccgacaagugcuaccaguucgcccugggccaggggaccacgcugaacaacggccacagcaacgacaccguccacgaccgcaccccguaccggacccuccugaugaacgagcugggcgugcccuuccaccucgggacgcgccaggugugcaucgccugguccagcuccagcugccacgacggcaaggcguggcugcacgucugcgugaccggggacgacgagaacgccaccgccuccuucaucuacaacggccggcugguggacagcaucggguccuggagcaagaagauccuccgcacccaggaguccgagugcgucugcaucaacggcacgugcaccguggugaugaccgacggcagcgccuccgggaaggcggacaccaagauccuguucaucgaggagggcaagaucguccacaucagcacgcugagcggguccgcccagcacguggaggagugcagcugcuacccccgguaccccggcgugcgcugcgucugccgggacaacuggaagggcuccaaccgcccgaucguggacaucaacgugaaggacuacagcaucgucuccagcuacgugugcuccgggcucgugggcgacacgccccggaagaacgacagcuucuccagcucccacugccuggaccccaacaacgaggagggcgggcacggggucaagggcugggccuucgacgacggcaacgacguguggauggggcgcaccaucagcgagaagcugcgguccggcuacgagaccuucaaggucaucgagggguggagcaagcccaacuccaagcuccagaucaaccgccaggugaucguggagcggggcaaccgcagcggguacuccggcaucuucagcgucgagggcaaguccugcaucaaccggugcuucuacguggagcugauccgcgggcggaaggaggagaccgaggugugguggaccagcaacagcaucgucguguucugcggcaccuccgggaccuacggcgccgggagcuggccggacggcgccgacaucaaccugaugcccaucuga

SEQ ID NO: 79467 - RNA, 1410 nt, Artificial Sequence
  derived and/or modified CDS sequence (opt1) from neuraminidase__InfluenzaA__ABI92547
augaaccccaaccagaagaucaucaccaucggcagcgugucccugaccaucgccacgaucugcuuccucaugcagaucgccauccuggucaccaccgugacccugcacuucaagcaguacgagugcaacagcccgcccaacaaccaggugaugcucugcgagcccacgaucaucgagcgcaacaucaccgagaucgucuaccugaccaacaccacgaucgagaaggagaugugccccaagcuggcggaguaccggaacugguccaagccgcagugcaacaucaccggguucgcccccuucagcaaggacaacuccauccgccucagcgccggcggggacaucugggugacccgggagcccuacguguccugcgaccccgacaagugcuaccaguucgcccugggccaggggaccacgcugaacaacggccacagcaacgacaccguccacgaccgcaccccguaccggacccuccugaugaacgagcugggcgugcccuuccaccucgggacgcgccaggugugcaucgccugguccagcuccagcugccacgacggcaaggcguggcugcacgucugcgugaccggggacgacgagaacgccaccgccuccuucaucuacaacggccggcugguggacagcaucggguccuggagcaagaagauccuccgcacccaggaguccgagugcgucugcaucaacggcacgugcaccguggugaugaccgacggcagcgccuccgggaaggcggacaccaagauccuguucaucgaggagggcaagaucguccacaucagcacgcugagcggguccgcccagcacguggaggagugcagcugcuacccccgguaccccggcgugcgcugcgucugccgggacaacuggaagggcuccaaccgcccgaucguggacaucaacgugaaggacuacagcaucgucuccagcuacgugugcuccgggcucgugggcgacacgccccggaagaacgacagcuucuccagcucccacugccuggaccccaacaacgaggagggcgggcacggggucaagggcugggccuucgacgacggcaacgacguguggauggggcgcaccaucagcgagaagcugcgguccggcuacgagaccuucaaggucaucgagggguggagcaagcccaacuccaagcuccagaucaaccgccaggugaucguggagcggggcaaccgcagcggguacuccggcaucuucagcgucgagggcaaguccugcaucaaccggugcuucuacguggagcugauccgcgggcggaaggaggagaccgaggugugguggaccagcaacagcaucgucguguucugcggcaccuccgggaccuacggcgccgggagcuggccggacggcgccgacaucaaccugaugcccaucuga

SEQ ID NO: 79468 - RNA, 1410 nt, Artificial Sequence
  derived and/or modified CDS sequence (opt1) from neuraminidase__InfluenzaA__ABI92558
augaaccccaaccagaagaucaucaccaucggcagcgugucccugaccaucgccacgaucugcuuccucaugcagaucgccauccuggucaccaccgugacccugcacuucaagcaguacgagugcaacagcccgcccaacaaccaggugaugcucugcgagcccacgaucaucgagcgcaacaucaccgagaucgucuaccugaccaacaccacgaucgagaaggagaucugccccaagcuggcggaguaccggaacuggucccgcccgcagugcaacaucaccggguucgcccccuucagcaaggacaacuccauccggcucagcgccggcggggacaucugggugacccgcgagcccuacguguccugcgaccccgacaagugcuaccaguucgcccugggccaggggaccacgcugaacaacggccacagcaacgacaccguccacgaccggaccccguaccgcacccuccugaugaacgagcugggcgugcccuuccaccucgggacgcgccaggugugcaucgccugguccagcuccagcugccacgacggcaaggcguggcugcacgucugcgugaccggggacgacgagaacgccaccgccuccuucaucuacaacggccggcugguggacagcaucggguccuggagcaagaagauccuccggacccaggaguccgagugcgucugcaucaacggcacgugcaccguggugaugaccgacggcagcgccuccgggaaggcggacaccaagauccuguucaucgaggagggcaagaucguccacaucagcacgcugagcggguccgcccagcacguggaggagugcagcugcuacccccgcuaccccggcgugcggugcgucugccgcgacaacuggaagggcuccaaccggccgaucguggacaucaacgugaaggacuacagcaucgucuccagcuacgugugcuccgggcucgugggcgacacgccccgcaagaacgacagcuucuccagcucccacugccuggaccccaacaacgaggagggcgggcacggggucaagggcugggccuucgacgacggcaacgacguguggauggggcggaccaucagcgagaagcugcgcuccggcuacgagaccuucaaggucaucgagggguggagcaagcccaacuccaagcuccagaucaaccgccaggugaucguggagcggggcaaccggagcggguacuccggcaucuucagcgucgagggcaaguccugcaucaaccgcugcuucuacguggagcugauccgggggcgcaaggaggagaccgaggugugguggaccagcaacagcaucgucguguucugcggcaccuccgggaccuacggcacggggagcuggccggacggcgccgacaucaaccugaugcccaucuga

SEQ ID NO: 79469 - RNA, 1410 nt, Artificial Sequence
  derived and/or modified CDS sequence (opt1) from neuraminidase__InfluenzaA__ABI92569
augaaccccaaccagaagaucaucaccaucggcagcgugucccugaccaucgccacgaucugcuuccucaugcagaucgccauccuggucaccaccgugacccugcacuucaagcaguacgagugcaacagcccgcccaacaaccaggugaugcucugcgagcccacgaucaucgagcgcaacaucaccgagaucgucuaccugaccaacaccacgaucgagaaggagaucugccccaagcuggcggaguaccggaacugguccaagccgcagugcaacaucaccggguucgcccccuucagcaaggacaacuccauccgccucagcgccggcggggacaucugggugacccgggagcccuacguguccugcgaccccgacaagugcuaccaguucgcccugggccaggggaccacgcugaacaacggccacagcaacgacaccguccacgaccgcaccccguaccggacccuccugaugaacgagcugggcgugcccuuccaccucgggacgcgccaggugugcaucgccugguccagcuccagcugccacgacggcaaggcguggcugcacgucugcgugaccggggacgacgagaacgccaccgccuccuucaucuacaacggcaagcugguggacagcaucggguccuggagcaagaagauccuccggacccaggaguccgagugcgucugcaucaacggcacgugcgccguggugaugaccgacggcagcgcguccgggaaggccgacaccaagauccuguucaucgaggagggcaagaucguccacaucagcacccugagcggguccgcccagcacguggaggagugcagcugcuacccccgcuaccccggcgugcggugcgucugccgcgacaacuggaagggcuccaaccggccgaucguggacaucaacgugaaggacuacagcaucgucuccagcuacgugugcuccgggcucgugggcgacacgccccgcaagaacgacagcuucuccagcucccacugccuggaccccaacaacgaggagggcgggcacggggucaagggcugggccuucgacgacggcaacgacguguggauggggcggaccaucagcgagaagcugcgcuccggcuacgagaccuucaaggucaucgagggguggagcaagcccaacuccaagcuccagaccaaccgccaggugaucguggagcggggcaaccggagcggguacuccggcaucuucagcgucgagggcaaguccugcaucaaccgcugcuucuacguggagcugauccgggggcgcaaggaggagacggaggugugguggaccagcaacagcaucgucguguucugcggcaccuccgggaccuacggcacggggagcuggccggacggcgccgacaucaaccugaugcccaucuga

SEQ ID NO: 79470 - RNA, 1410 nt, Artificial Sequence
  derived and/or modified CDS sequence (opt1) from neuraminidase__InfluenzaA__ABI92580
augaaccccaaccagaagaucaucaccaucggcagcgugucccugaccaucgccacgaucugcuuccucaugcagaucgccauccuggucaccaccgugacccugcacuucaagcaguacgagugcaacagcccgcccaacaacaaggugaugcucugcgagcccacgaucaucgagcgcaacaucaccgagaucgucuaccugaccaacaccacgaucgagaaggagaucugccccaagcuggcggaguaccggaacugguccaagccgcagugcaacaucaccggguucgcccccuucagcaaggacaacuccauccgccucagcgccggcggggacaucugggugacccgggagcccuacguguccugcgaccccgacaagugcuaccaguucgcccugggccaggggaccacgcugaacaacggccacagcaacgacaccguccacgaccgcaccccguaccggacccuccugaugaacgagcugggcgugcccuuccaccucgggacgcgccaggugugcaucgccugguccagcuccagcugccacgacggcaaggcguggcugcacgucugcgugaccggggacgacgagaacgccaccgccuccuucaucuacaacggccggcugguggacagcaucggguccuggagcaagaagauccuccgcacccaggaguccgagugcgucugcaucaacggcacgugcaccguggugaugaccgacggcagcgccuccgggaaggcggacaccaagauccuguucaucgaggagggcaagaucguccacaucagcacgcugagcggguccgcccagcacguggaggagugcagcugcuacccccgguaccccggcgugcgcugcgucugccgggacaacuggaagggcuccaaccgcccgaucguggacaucaacgugaaggacuacagcaucgucuccagcuacgugugcuccgggcucgugggcgacacgccccggaagaacgacagcuucuccagcucccacugccuggaccccaacaacgaggagggcgggcacggggucaagggcugggccuucgacgacggcaacgacguguggauggggcgcaccaucagcgagaagcugcgguccggcuacgagaccuucaaggucaucgagggguggagcaagcccaacuccaagcuccagaucaaccgccaggugaucguggagcggggcaaccgcagcggguacuccggcaucuucagcgucgagggcaaggggugcaucaaccggugcuucuacguggagcugauccgcggccggaaggaggagaccgaggugugguggaccuccaacagcaucgucguguucugcgggaccagcggcaccuacgggacgggcuccuggccggacggcgccgacaucaaccugaugcccaucuga

SEQ ID NO: 79471 - RNA, 1410 nt, Artificial Sequence
  derived and/or modified CDS sequence (opt1) from neuraminidase__InfluenzaA__ABI92591
augaaccccaaccagaagaucaucaccaucggcagcgugucccugaccaucgccacgaucugcuuccucaugcagaucgccauccuggucaccaccgugacccugcacuucaagcaguacgagugcaacagcccgcccaacaaccaggugaugcucugcgagcccacgaucaucgagcgcaacaucaccgagaucgucuaccugaccaacaccacgaucgagaaggagaucugccccaagcuggcggaguaccggaacugguccaagccgcagugcaacaucaccggguucgcccccuucagcaaggacaacuccauccgccucagcgccggcggggacaucugggugacccgggagcccuacguguccugcgaccccgacaagugcuaccaguucgcccugggccaggggaccacgcugaacaacggccacagcaacgacaccguccacgaccgcaccccguaccggacccuccugaugaacgagcugggcgugcccuuccaccuccgcacgcgccaggugugcaucgccugguccagcuccagcugccacgacgggaaggcguggcugcacgucugcgugaccggcgacgacgagaacgccaccgccuccuucaucuacaacgggcggcugguggacagcaucggcuccuggagcaagaagauccuccggacccaggaguccgagugcgucugcaucaacgggacgugcaccguggugaugaccgacggcagcgccuccggcaaggcggacaccaagauccuguucaucgaggaggggaagaucguccacaucagcacgcugagcggcuccgcccagcacguggaggagugcagcugcuacccccgcuaccccggggugcggugcgucugccgcgacaacuggaagggcuccaaccggccgaucguggacaucaacgugaaggacuacagcaucgucuccagcuacgugugcuccggccucgugggggacacgccccgcaagaacgacagccuguccagcucccacugccuggaccccaacaacgaggagggcgggcacggcgucaaggggugggccuucgacgacggcaacgacguguggaugggccggaccaucagcgagaagcuccgcuccggguacgagaccuucaaggucaucgagggcuggagcaagcccaacuccaagcugcagaucaaccgccaggugaucguggagcgggggaaccggagcggcuacuccgggaucuucagcgucgagggcaagggcugcaucaaccgcugcuucuacguggagcugauccgggggcgcaaggaggagaccgaggugugguggaccuccaacagcaucgucguguucugcggcaccagcgggaccuacggcacgggguccuggccggacggcgccgacaucaaccucaugcccaucuga

SEQ ID NO: 79472 - RNA, 1410 nt, Artificial Sequence
  derived and/or modified CDS sequence (opt1) from neuraminidase__InfluenzaA__ABI92602
augaaccccaaccagaagaucaucaccaucggcagcgugucccugaccaucgccacgaucugcuuccucaugcagaucgccauccuggucaccaccgugacccugcacuucaagcaguacgagugcaacagcccgcccaacaaccaggugaugcucugcgagcccacgaucaucgagcgcaacaucaccgagaucgucuaccugaccaacaccacgaucgagaaggagaucugccccaagcuggcggaguaccggaacugguccaagccgcagugcaacaucaccggguucgcccccuucagcaaggacaacuccauccgccucagcgccggcggggacaucugggugacccgggagcccuacguguccugcgaccccgacaagugcuaccaguucgcccugggccaggggaccacgcugaacaacggccacagcaacgacaccguccacgaccgcaccccguaccggacccuccugaugaacgagcugggcgugcccuuccaccucgggacgcgccaggugugcaucgccugguccagcuccagcugccacgacggcaaggcguggcugcacgucugcgugaccggggacgacgagaacgccaccgccucccugaucuacaacggccggcucguggacagcaucggguccuggagcaagaagauccugcgcacccaggaguccgagugcgucugcaucaacggcacgugcaccguggugaugaccgacggcagcgccuccgggaaggcggacaccaagauccuguucaucgaggagggcaagaucguccacaucagcacgcucagcggguccgcccagcacguggaggagugcagcugcuacccccgguaccccggcgugcgcugcgucugccgggacaacuggaagggcuccaaccgcccgaucguggacaucaacgugaaggacuacagcaucgucuccagcuacgugugcuccgggcuggugggcgacacgccccggaagaacgacagcuucuccagcucccacugccuggaccccaacaacgaggagggcgggcacggggucaagggcugggccuucgacgacggcaacgacguguggauggggcgcaccaucagcgagaagcuccgguccggcuacgagaccuucaaggucaucgagggguggagcaagcccaacuccaagcuccaggugaaccgccaggugaucgucgagcggggcaaccgcagcggguacuccggcaucuucagcguggagggcaaguccugcaucaaccggugcuucuacguggagcugauccgcgggcggaaggaggagaccgaggucugguggaccagcaacagcaucgugguguucugcggcaccuccgggaccuacggcacggggagcuggccggacggcgccgacaucaaccugaugcccaucuga

SEQ ID NO: 79473 - RNA, 1410 nt, Artificial Sequence
  derived and/or modified CDS sequence (opt1) from neuraminidase__InfluenzaA__ABI92613
augaaccccaaccagaagaucaucaccaucggcagcgugucccugaccaucgccacgaucugcuuccucaugcagaucgccauccuggucaccaccgugacccugcacuucaagcaguacgagugcaacagcccgcccaacaaccaggugaugcucugcgagcccacgaucaucgagcgcaacaucaccgagaucgucuaccugaccaacaccacgaucgagaaggagaucugccccaagcuggcggaguaccggaacugguccaagccgcagugcaacaucaccggguucgcccccuucagcaaggacaacuccauccgccucagcgccggcggggacaucugggugacccgggagcccuacguguccugcgaccccgacaagugcuaccaguucgcccugggccaggggaccacgcugaacaacggccacagcaacgacaccguccacgaccgcaccccguaccggacccuccugaugaacgagcugggcgugcccuuccaccucgggacgcgccaggugugcaucgccugguccagcuccagcugccacgacggcaaggcguggcugcacgucugcgugaccggggacaacgagaacgccaccgccuccuucaucuacaacggcaagcugguggacagcaucggguccuggagcaagaagauccuccggacccaggaguccgagugcgucugcaucaacggcacgugcgccguggugaugaccgacggcagcgcguccgggaaggccgacaccaagauccuguucaucgaggagggcaagaucguccacaucagcacccugagcggguccgcccagcacguggaggagugcagcugcuacccccgcuaccccggcgugcggugcgucugccgcgacaacuggaagggcuccaaccggccgaucguggacaucaacgugaaggacuacagcaucgucuccagcuacgugugcuccgggcucgugggcgacacgccccgcaagaacgacagcuucuccagcucccacugccuggaccccaacaacgaggagggcgggcacggggucaagggcugggccuucgacgacggcaacgacguguggauggggcggaccaucagcgagaagcugcgcuccggcuacgagaccuucaaggucaucgagggguggagcaagcccaacuccaagcuccagaccaaccgccaggugaucguggagcggggcaaccggagcggguacuccggcaucuucagcgucgagggcaaguccugcaucaaccgcugcuucuacguggagcugauccgggggcgcaaggaggagacggaggugugguggaccagcaacagcaucgucguguucugcggcaccuccgggaccuacggcacggggagcuggccggacggcgccgacaucaaccugaugcccaucuga

SEQ ID NO: 79474 - RNA, 1410 nt, Artificial Sequence
  derived and/or modified CDS sequence (opt1) from neuraminidase__InfluenzaA__ABI92624
augaaccccaaccagaagaucaucaccaucggcagcgugucccugaccaucgccacgaucugcuuccucaugcagaucgccauccuggucaccaccgugacccugcacuucaagcaguacgagugcaacagcccgcccaacaaccaggugaugcucugcgagcccacgaucaucgagcgcaacaucaccgagaucgucuaccugaccaacaccacgaucgagaaggagaucugccccaagcuggcggaguaccggaacugguccaagccgcagugcaacaucaccggguucgcccccuucagcaaggacaacuccauccgccucagcgccggcggggacaucugggugauccgggagcccuacguguccugcgaccccgacaagugcuaccaguucgcccugggccaggggaccacccugaacaacggccacagcaacgacacgguccacgaccgcaccccguaccggacccuccugaugaacgagcugggcgugcccuuccaccucgggacccgccaggugugcaucgccugguccagcuccagcugccacgacggcaaggcguggcugcacgucugcgugacgggggacgacgagaacgccaccgccuccuucaucuacaacggccggcugguggacagcaucggguccuggagcaagaagauccuccgcacccaggaguccgagugcgucugcaucaacgggaccugcacgguggugaugaccgacggcagcgccuccgggaaggcggacaccaagauccuguucaucgaggagggcaagaucguccacaucagcacccugagcggguccgcccagcacguggaggagugcagcugcuacccccgguaccccggcgugcgcugcgucugccgggacaacuggaagggcuccaaccgcccgaucguggacaucaacgugaaggaccacagcaucgucuccagcuacgugugcuccgggcucgugggcgacacgccccggaagaacgacagcuucuccagcucccacugccuggaccccaacaacgaggagggcggccacggggucaagggcugggccuucgacgacggcaacgacguguggauggggcgcaccaucagcgagaagcugcgguccggcuacgagaccuucaaggucaucgagggguggagcaagcccaacuccaagcuccagaucaaccgccaggugaucguggagcggggcaaccgcagcggguacuccggcaucuucagcgucgagggcaaguccugcaucaaccggugcuucuacguggagcugauccgcgggcggaaggaggagaccgaggugugguggacgagcaacagcaucgucguguucugcggcaccuccgggaccuacggcaccgggagcuggccggacggcgccgacaucaaccugaugcccaucuga

SEQ ID NO: 79475 - RNA, 1410 nt, Artificial Sequence
  derived and/or modified CDS sequence (opt1) from neuraminidase__InfluenzaA__ABI92635
augaaccccaaccagaagaucaucaccaucggcagcgugucccugaccaucgccacgaucugcuuccucaugcagaucgccauccuggucaccaccgugacccugcacuucaagcaguacgagugcaacccgccgcccaacaaccaggugaugcucugcgagcccacgaucaucgagcgcaacaucaccgagaucgucuaccugaccaacaccacgaucgagaaggagaucugccccaagcuggcggaguaccggaacuggagcaagccccagugcaaccucaccggguucgcccccuucuccaaggacaacagcauccgccuguccgccggcggggacaucugggugacccgggagcccuacgugagcugcgacccggacaagugcuaccaguucgcccugggccaggggaccacgcucaacaacggccacuccaacgacaccguccacgaccgcacccccuaccggacccugcugaugaacgagcucggcgugcccuuccaccuggggacgcgccaggugugcaucgccuggagcuccagcuccugccacgacggcaaggcguggcugcacgucugcgugaccggggacgacgagaacgccaccgccagcuucaucuacaacggccggcucguggacuccaucgggagcugguccaagaagauccugcgcacccaggagagcgagugcgucugcaucaacggcacgugcaccguggugaugaccgacggcuccgccagcgggaaggcggacaccaagaucaucuucaucgaggagggcaagaucguccacacguccacccugagcgggagcgcccagcacguggaggagugcuccugcuacccccgguacccgggcgugcgcugcgucugccgggacaacuggaagggcagcaaccgccccaucguggacaucaacgugaaggacuacuccaucgucagcuccuacgugugcagcgggcucgugggcgacacgccccggaagaacgacuccuucagcuccagccacugccuggaccccaacaacgaggagggcgggcacggggucaagggcugggccuucgacgacggcaacgacguguggauggggcgcaccaucuccgagaagcugcggagcggcuacgagaccuucaaggucaucgaggggugguccaagccgaacagcaagcuccagaccaaccgccaggugaucguggagcggggcaaccgcuccggguacagcggcaucuucuccgucgagggcaagagcugcaucaaccggugcuucuacguggagcugauccgcgggcggaaggaggagaccgaggugugguggaccuccaacagcaucgucguguucugcggcacgagcgggaccuacggcaccggguccuggcccgacggcgccgacaucaaccugaugcccaucuga

SEQ ID NO: 79476 - RNA, 1410 nt, Artificial Sequence; identical to SEQ ID NO: 78169
  derived and/or modified CDS sequence (opt1) from neuraminidase__InfluenzaA__ABI92646

SEQ ID NO: 79477 - RNA, 1410 nt, Artificial Sequence; identical to SEQ ID NO: 78169
  derived and/or modified CDS sequence (opt1) from neuraminidase__InfluenzaA__ABI92657

SEQ ID NO: 79478 - RNA, 1410 nt, Artificial Sequence
  derived and/or modified CDS sequence (opt1) from neuraminidase__InfluenzaA__ABI92668
augaaccccaaccagaagaucaucaccaucggcagcgugucccugaccaucgccacgaucugcuuccucaugcagaucgccauccuggucaccaccgugacccugcacuucaagcagcacgagugcaacagcccgcccaacaaccaggugaugcucugcgagcccacgaucaucgagcgcaacaucaccgagaucgucuaccugaccaacaccacgaucgagaaggagaucugccccaagcuggcggaguaccggaacugguccaagccgcagugcaacaucaccggguucgcccccuucagcaaggacaacuccauccgccucagcgccggcggggacaucugggugacccgggagcccuacguguccugcggccccgacaagugcuaccaguucgcccuggggcagggcaccacgcugaacaacggccacagcaacgacaccguccacgaccgcaccccguaccggacccuccugaugaacgagcugggggugcccuuccaccucggcacgcgccaggugugcaucgccugguccagcuccagcugccacgacgggaaggcguggcugcacgucugcgugaccggcgacgacaagaacgccaccgccuccuucaucuacaacgggcggcugguggacagcaucggcuccuggagcaagaagauccuccgcacccaggaguccgagugcgucugcaucaacggcacgugcaccguggugaugaccgacgggagcgccuccggcaaggcggacaccaagauccuguucaucgaggaggggaagaucguccacaucagcacgcugagcggcuccgcccagcacguggaggagugcagcugcuacccccgguaccccggcgugcgcugcgucugccgggacaacuggaagggguccaaccgcccgaucguggacaucaacgugaaggacuacagcaucgucuccagcuacgugugcuccggccucgugggggacacgccccggaagaacgacagcuucuccagcucccacugccuggaccccaacaacgaggagggcgggcacggcgucaagggcugggccuucgacgacgggaacgacguguggaugggccgcaccaucagcgagaagcugcgguccggguacgagaccuucaaggucaucgagggcuggagcaagcccaacuccaagcuccagaucaaccgccaggugaucguggagcgggggaaccgcagcggcuacuccggcaucuucagcgucgaggggaaguccugcaucaaccggugcuucuacguggagcugauccgcggccggaaggaggagaccgaggugugguggaccagcaacagcaucgucguguucugcgggaccuccggcaccuacgggacgggcagcuggccggacggcgccgacaucaaccugaugcccaucuga

SEQ ID NO: 79479 - RNA, 1410 nt, Artificial Sequence; identical to SEQ ID NO: 78615
  derived and/or modified CDS sequence (opt1) from neuraminidase__InfluenzaA__ABI92679

SEQ ID NO: 79480 - RNA, 1410 nt, Artificial Sequence; identical to SEQ ID NO: 78169
  derived and/or modified CDS sequence (opt1) from neuraminidase__InfluenzaA__ABI92701

SEQ ID NO: 79481 - RNA, 1410 nt, Artificial Sequence
  derived and/or modified CDS sequence (opt1) from neuraminidase__InfluenzaA__ABI92712
augaaccccaaccagaagaucaucaccaucggcagcgugucccugaccaucgccacgaucugcuuccucaugcagaucgccauccuggucaccaccgugacccugcacuucaagcagcacgagugcaacagcccgcccaacaaccaggcgaugcucugcgagcccacgaccaccgagcgcaacaccacggagaucguguaccugaccaacaccaccaucgagaaggagaucugccccaagcuggucgaguaccggaacugguccaagccgcagugcaacaucacgggguucgcccccuucagcaaggacaacuccauccgccucagcgccggcggggacaucugggugacccgggagcccuacguguccugcgaccccgacaagugcuaccaguucgcccugggccaggggaccacccugaacaacggccacagcaacgacacgguccacgaccgcaccccguaccggacccuccugaugaacgagcugggcgugcccuuccaccucgggacccgccaggugugcaucgccugguccagcuccagcugccacgacggcaaggcguggcugcacgucugcgugacgggggacgacaagaacgccaccgccuccuucaucuacaacggccggcugguggacagcaucggguccuggagcaagaagauccuccgcacccaggaguccgagugcgucugcaucaacgggaccugcacgguggugaugaccgacggcagcgccuccgggaaggcggacaccaagauccuguucaucgaggagggcaagaucguccacaucagcacccugagcggguccgcccagcacguggaggagugcagcugcuacccccgguaccccggcgugcgcugcgucugccgggacaacuggaagggcuccaaccgcccgaucguggacaucaacgugaaggacuacagcaucgucuccagcuacgugugcuccgggcucgugggcgacacgccccggaagaacgacagcuucuccagcucccacugccuggaccccaacaacgaggagggcggccacggggucaagggcugggccuucgacgacggcaacgacguguggauggggcgcaccaucagcgagaagcugcgguccggcuacgagaccuucaaggucaucgagggguggagcaagcccaacuccaagcuccagaucaaccgccaggugaucguggagcggggcaaccgcagcggguacuccggcaucuucagcgucgagggcaaguccugcaucaaccggugcuucuacguggagcugauccgcgggcggaaggaggagaccgaggugugguggacgagcaacagcaucgucguguucugcggcaccuccgggaccuacggcaccgggagcuggccggacggcgccgacaucaaccugaugcccaucuga

SEQ ID NO: 79482 - RNA, 1410 nt, Artificial Sequence
  derived and/or modified CDS sequence (opt1) from neuraminidase__InfluenzaA__ABI92723
augaaccccaaccagaagaucaucaccaucggcagcgugucccugaccaucgccacgaucugcuuccucaugcagaucgccauccuggucaccaccgugacccugcacuucaagcagcacgagugcaacagcccgcccaacaaccaggugaugcucugcgagcccacgaucaucgagcgcaacaucaccgagaucgucuaccugaccaacaccacgaucgagaaggagaucugccccaagcugguggaguaccggaacugguccaagccgcagugcaacaucaccggguucgcgcccuucagcaaggacaacuccauccgccucagcgccggcggggacaucugggugacccgggagcccuacgucuccugcgaccccgacaagugcuaccaguucgcccugggccaggggaccacgcugaacaacggccacagcaacgacaccgugcacgaccgcaccccguaccggacccuccugaugaacgagcugggcgugcccuuccaccucgggacgaagcaggucugcaucgccugguccagcuccagcugccacgacggcaaggccuggcugcacgugugcgugaccggggacgacaagaacgcgaccgccuccuucaucuacaacggccgccuggucgacagcaucggguccuggagcaagaagauccuccggacccaggaguccgagugcgugugcaucaacggcacgugcaccguggucaugaccgacggcagcgccuccgggaaggccgacaccaagauccuguucaucgaggagggcaagaucgugcacaucagcacgcugagcggguccgcgcagcacguggaggagugcagcugcuacccccgcuaccccggcguccggugcgugugccgcgacaacuggaagggcuccaaccggccgaucguggacaucaacgucaaggacuacagcaucguguccagcuacgugugcuccgggcucgucggcgacacgccccgcaagaacgacagcuucuccagcucccacugccuggaccccaacaacgaggagggcgggcacggggugaagggcugggccuucgacgacggcaacgacgucuggauggggcggaccaucagcgagaagcugcgcuccggcuacgagaccuucaaggugaucgagggguggagcaagcccaacuccaagcuccagaucaaccgccaggugaucgucgagcggggcaaccggagcggguacuccggcaucuucagcguggagggcaaguccugcaucaaccgcugcuucuacguggagcugauccgggggcgcaaggaggagaccgaggucugguggaccagcaacagcaucgugguguucugcggcaccuccgggaccuacggcacggggagcuggccggacggcgccgacaucaaccugaugcccaucuga

SEQ ID NO: 79483 - RNA, 1410 nt, Artificial Sequence; identical to SEQ ID NO: 78169
  derived and/or modified CDS sequence (opt1) from neuraminidase__InfluenzaA__ABI92734

SEQ ID NO: 79484 - RNA, 1410 nt, Artificial Sequence; identical to SEQ ID NO: 78615
  derived and/or modified CDS sequence (opt1) from neuraminidase__InfluenzaA__ABI92745

SEQ ID NO: 79485 - RNA, 1410 nt, Artificial Sequence
  derived and/or modified CDS sequence (opt1) from neuraminidase__InfluenzaA__ABI92756
augaaccccaaccagaagaucaucaccaucggcagcgugucccugaccaucgccacgaucugcuuccucaugcagaucgccauccuggucaccaccgugacccugcacuucaagcagcacgagugcaacagcccgcccaacaaccaggugauccucugcgagcccacgaucaucgagcgcaacaucaccgagaucgucuaccugaccaacaccacgaucgagaaggagaucugccccaagcuggcggaguaccggaacugguccaagccgcagugcaacaucaccggguucgcccccuucagcaaggacaacuccauccgccucagcgccggcggggacaucugggugacccgggagcccuacguguccugcgaccccgacaagugcuaccaguucgcccugggccaggggaccacgcugaacaacggccacagcaacgacaccguccacgaccgcaccccguaccggacccuccugaugaacgagcugggcgugcccuuccaccucgggacgcgccaggugugcaucgccugguccagcuccagcugccacgacggcaaggcguggcugcacgucugcgugaccggggacgacaagaacgccaccgccuccuucaucuacaacggccggcugguggacagcaucggguccuggagcaagaagauccuccgcacccaggaguccgagugcgucugcaucaacggcacgugcaccguggugaugaccgacggcagcgccuccgggaaggcggacaccaagauccuguucaucgaggagggcaagaucguccacaucagcacgcugagcggguccgcccagcacguggaggagugcagcugcuacccccgguaccccggcgugcgcugcgucugccgggacaacuggaagggcuccaaccgcccgaucguggacaucaacgugaaggacuacagcaucgucuccagcuacgugugcuccgggcucgugggcgacacgccccggaagaacgacagcuucuccagcucccacugccuggaccccaacaacgaggagggcgggcacggggucaagggcugggccuucgacgacggcaacgacguguggauggggcgcaccaucagcgagaagcugcgguccggcuacgagaccuucaaggucaucgagggguggagcaagcccaacuccaagcuccagaucaaccgccaggugaucguggagcggggcaaccgcagcggguacuccggcaucuucagcgucgagggcaaguccugcaucaaccggugcuucuacguggagcugauccgcgggcggaaggaggagaccgaggugugguggaccagcaacagcaucgucguguucugcggcaccuccgggaccuacggcacggggagcuggccggacggcgccgacaucaaccugaugcccaucuga

SEQ ID NO: 79486 - RNA, 1410 nt, Artificial Sequence
  derived and/or modified CDS sequence (opt1) from neuraminidase__InfluenzaA__ABI92767
augaaccccaaccagaagaucaucaccaucggcagcgugucccugaccaucgccacgaucugcuuccucaugcagaucgccauccuggucaccaccgugacccugcacuucaagcagcacgagugcaacagcccgcccaacaaccaggugaugcucugcgagcccacgaucaucgagcgcaacaucaccgagaucgucuaccugaccaacaccacgaucgagaaggagaucugccccaagcuggcggaguaccggaacugguccaagccgcagugcaacaucaccggguucgcccccuucagcaaggacaacuccauccgccucagcgccggcggggacaucugggugacccgggagcccuacguguccugcgaccccgacaagugcuaccaguucgcccugggccaggggaccacgcugaacaacggccacagcaacgacaccguccacgaccgcaccccguaccggacccuccugaugaacgagcugggcgugcccuuccaccucgggacgcgccaggugugcaucgccugguccagcuccagcugccacgacggcaaggcguggcugcacgucugcgugaccggggacgacaagaacgccaccgccuccuucaucuacaacggccggcugguggacagcaucggguccuggagcaagaagauccuccgcacccaggaguccgagugcgucugcaucaacggcacgugcaccguggugaugaccgacggcagcgccuccgggaaggcggacaccaagauccuguucaucgaggagggcaagaucguccacaucagcacgcugagcggguccgcccagcacguggaggagugcagcugcuacccccgguaccccggcgugcgcugcgucugccgggacaacuggaagggcuccaaccgcccgaucguggacaucaacgugaaggacuacagcaucgucuccagcuacgugugcuccgggcucgugggcgacacgccccggaagaacgacagcuucuccagcucccacugccuggaccccaacaacgaggagggcgggcacggggucaagggcugggccuucgacgacggcaacgacguguggauggggcgcaccaucagcgagaagcugcgguccggcuacgagaccuucaaggucaucgagggguggagcaagcccaacuccaagcuccagaucaaccgccaggugaucguggagcggggcaaccgcagcggguacuccggcaucuucagcgucgagggcaaguccugcaucaaccggugcuucuacguggagcugauccgcgggcggaaggagaagaccgaggugugguggaccagcaacagcaucgucguguucugcggcaccuccgggaccuacggcacggggagcuggccggacggcgccgacaucaaccugaugcccaucuga

SEQ ID NO: 79487 - RNA, 1410 nt, Artificial Sequence; identical to SEQ ID NO: 78169
  derived and/or modified CDS sequence (opt1) from neuraminidase__InfluenzaA__ABI92778

SEQ ID NO: 79488 - RNA, 1410 nt, Artificial Sequence; identical to SEQ ID NO: 78351
  derived and/or modified CDS sequence (opt1) from neuraminidase__InfluenzaA__ABI92789

SEQ ID NO: 79489 - RNA, 1410 nt, Artificial Sequence; identical to SEQ ID NO: 78351
  derived and/or modified CDS sequence (opt1) from neuraminidase__InfluenzaA__ABI92800

SEQ ID NO: 79490 - RNA, 1410 nt, Artificial Sequence; identical to SEQ ID NO: 78351
  derived and/or modified CDS sequence (opt1) from neuraminidase__InfluenzaA__ABI92811

SEQ ID NO: 79491 - RNA, 1410 nt, Artificial Sequence; identical to SEQ ID NO: 78351
  derived and/or modified CDS sequence (opt1) from neuraminidase__InfluenzaA__ABI92822

SEQ ID NO: 79492 - RNA, 1410 nt, Artificial Sequence; identical to SEQ ID NO: 78351
  derived and/or modified CDS sequence (opt1) from neuraminidase__InfluenzaA__ABI92844

SEQ ID NO: 79493 - RNA, 1410 nt, Artificial Sequence; identical to SEQ ID NO: 78351
  derived and/or modified CDS sequence (opt1) from neuraminidase__InfluenzaA__ABI92855

SEQ ID NO: 79494 - RNA, 1410 nt, Artificial Sequence
  derived and/or modified CDS sequence (opt1) from neuraminidase__InfluenzaA__ABI92866
augaaccccaaccagaagaucaucaccaucggcagcgccucccugaccaucgccacgaucugcuuccucauccagaucgcgauccuggugaccaccgucacccugcacuucaagcagcacgagugcaacagccucccgaacaaccaggugaugcugugcgagcccacgaucaucgagcgcaacaucaccgagaucguguaccugaccaacaccacgaucgagaaggagaucugccccaagcucgccgaguaccggaacugguccaagccccagugcaacaucaccggguucgccccguucagcaaggacaacuccauccgccugagcgccggcggggacaucugggucacccgggagcccuacguguccugcgaccccgacaagugcuaccaguucgcccugggccaggggaccacgcucaacaacggccacagcaacgacaccgugcacgaccgcacccccuaccggacccugcugaugaacgagcucggcgucccguuccaccuggggacgcgccaggugugcaucgcgugguccagcuccagcugccacgacggcaaggccuggcugcacgugugcgucaccggggacgacaagaacgccaccgccuccuucaucuacaacggccggcucguggacagcaucuccagcugguccaagaagauccugcgcacccaggagagcgagugcgugugcaucaacgggacgugcaccgucgugaugaccgacggcuccgcgagcggcaaggccgacaccaagauccuguucaucgaggaggggaagaucauccacaucagcacgcucuccggcagcgcccagcacguggaggagugcuccugcuacccccgguaccccgggguccgcugcgugugccgggacaacuggaagggcagcaaccgccccaucguggacaucaacgucaaggacuacuccaucgugagcuccuacgugugcagcggccuggucggggacaccccgcggaagaacgacuccuucagcuccagccacugccuggaccccaacaacgaggagggcgggcacggcgugaaggggugggccuucgacgacggcaacgacguguggaugggccgcaccaucuccgagaagcuccggagcggguacgagaccuucaaggucaucgagggcugguccaaccccaacagcaagcugcagaucaaccgccaggugaucgucgagcgggggaaccgcuccggcuacagcgggaucuucuccguggagggcaagagcugcaucaaccggugcuucuacguggagcugauccgcggccggaaggaggagacggaggucugguggaccagcaacuccaucgugguguucugcgggaccagcggcaccuacgggacgggcuccuggcccgacggggccgacaucaaccucaugccgaucuga

SEQ ID NO: 79495 - RNA, 1410 nt, Artificial Sequence; identical to SEQ ID NO: 78351
  derived and/or modified CDS sequence (opt1) from neuraminidase__InfluenzaA__ABI92877

SEQ ID NO: 79496 - RNA, 1410 nt, Artificial Sequence; identical to SEQ ID NO: 78351
  derived and/or modified CDS sequence (opt1) from neuraminidase__InfluenzaA__ABI92888

SEQ ID NO: 79497 - RNA, 1410 nt, Artificial Sequence; identical to SEQ ID NO: 78351
  derived and/or modified CDS sequence (opt1) from neuraminidase__InfluenzaA__ABI92899

SEQ ID NO: 79498 - RNA, 1410 nt, Artificial Sequence; identical to SEQ ID NO: 78351
  derived and/or modified CDS sequence (opt1) from neuraminidase__InfluenzaA__ABI92910

SEQ ID NO: 79499 - RNA, 1410 nt, Artificial Sequence; identical to SEQ ID NO: 78351
  derived and/or modified CDS sequence (opt1) from neuraminidase__InfluenzaA__ABI92921

SEQ ID NO: 79500 - RNA, 1410 nt, Artificial Sequence; identical to SEQ ID NO: 78351
  derived and/or modified CDS sequence (opt1) from neuraminidase__InfluenzaA__ABI92932

SEQ ID NO: 79501 - RNA, 1410 nt, Artificial Sequence; identical to SEQ ID NO: 78738
  derived and/or modified CDS sequence (opt1) from neuraminidase__InfluenzaA__ABI92943

SEQ ID NO: 79502 - RNA, 1410 nt, Artificial Sequence; identical to SEQ ID NO: 78738
  derived and/or modified CDS sequence (opt1) from neuraminidase__InfluenzaA__ABI92954

SEQ ID NO: 79503 - RNA, 1410 nt, Artificial Sequence
  derived and/or modified CDS sequence (opt1) from neuraminidase__InfluenzaA__ABI92965
augaaccccaaccagaagaucaucaccaucggcagcgugucccugaccaucagcacgaucugcuucuucaugcagaucgccauccucaucaccaccgucacccugcacuucaagcaguacgaguucaacuccccgcccaacaaccaggugaugcugugcgagcccacgaucaucgagcgcaacaucaccgagaucguguaccucaccaacaccacgaucgagaaggagaucugccccaagcuggccgaguaccggaacuggagcaagccgcagugcgacaucaccggguucgcgcccuucuccaaggacaacagcauccgccuguccgccggcggggacaucugggucacccgggagcccuacgugagcugcgaccccgacaagugcuaccaguucgcccucggccaggggaccacgcugaacaacgugcacuccaacgacaccguccacgaccgcaccccguaccggacccugcucaugaacgagcugggcgugcccuuccaccugggcacgaagcaggucugcaucgccuggagcuccagcuccugccacgacgggaaggccuggcuccacgugugcgugaccggcgacgacaagaacgcgaccgccagcuucaucuacaacgggcgccugguggacuccaucgucagcugguccaagaagauccugcggacccaggagagcgagugcgugugcaucaacggcacgugcaccguggucaugaccgacggguccgccagcggcaaggccgacaccaagauccucuucaucgaggagggcaagaucgugcacacgagcacccuguccgggagcgcgcagcacguggaggagugcuccugcuacccccgcuaccccggcguccggugcgugugccgcgacaacuggaaggggagcaaccggccgaucguggacaucaacaucaaggacuacuccaucgucagcuccuacgugugcagcggccuggugggcgacacgccccgcaagaacgaccgguccagcuccagccacugccucgaccccaacaacgaggagggcgggcacggggucaagggcugggccuucgacgacgggaacgacguguggaugggccgcaccaucuccgagaagcugcggagcggcuacgagaccuucaaggucaucgaggggugguccaaccccaacagcaagcugcagaucaaccgccaggugaucguggaccggggcaaccgcuccggguacagcggcaucuucuccgucgagggcaagagcugcaucaaccggugcuucuacguggagcucauccgcgggcggaaggaggagaccgaggugcuguggaccagcaacuccaucgucguguucugcggcaccagcgggacguacggcaccggguccuggccggacggcgccgacaucaaccugaugcccaucuga

SEQ ID NO: 79504 - RNA, 1410 nt, Artificial Sequence; identical to SEQ ID NO: 78738
  derived and/or modified CDS sequence (opt1) from neuraminidase__InfluenzaA__ABI92976

SEQ ID NO: 79505 - RNA, 1410 nt, Artificial Sequence; identical to SEQ ID NO: 78738
  derived and/or modified CDS sequence (opt1) from neuraminidase__InfluenzaA__ABI92987

SEQ ID NO: 79506 - RNA, 1410 nt, Artificial Sequence; identical to SEQ ID NO: 78738
  derived and/or modified CDS sequence (opt1) from neuraminidase__InfluenzaA__ABI92998

SEQ ID NO: 79507 - RNA, 1410 nt, Artificial Sequence; identical to SEQ ID NO: 78942
  derived and/or modified CDS sequence (opt1) from neuraminidase__InfluenzaA__ABI93009

SEQ ID NO: 79508 - RNA, 1410 nt, Artificial Sequence; identical to SEQ ID NO: 78738
  derived and/or modified CDS sequence (opt1) from neuraminidase__InfluenzaA__ABI93020

SEQ ID NO: 79509 - RNA, 1413 nt, Artificial Sequence; identical to SEQ ID NO: 79380
  derived and/or modified CDS sequence (opt1) from neuraminidase__InfluenzaA__ABI93031

SEQ ID NO: 79510 - RNA, 1410 nt, Artificial Sequence; identical to SEQ ID NO: 79135
  derived and/or modified CDS sequence (opt1) from neuraminidase__InfluenzaA__ABI93042

SEQ ID NO: 79511 - RNA, 1410 nt, Artificial Sequence; identical to SEQ ID NO: 78308
  derived and/or modified CDS sequence (opt1) from neuraminidase__InfluenzaA__ABI93053

SEQ ID NO: 79512 - RNA, 1410 nt, Artificial Sequence
  derived and/or modified CDS sequence (opt1) from neuraminidase__InfluenzaA__ABI93064
augaaccccaaccagaagaucaucaccaucggcagcgugucccugaccaucgccacgaucugcuuccucaugcagaucgccauccuggucaccaccgugacccugcacuucaagcaguacgagugcaacagcccgcccaacaaccaggugaugcucugcgagcccacgaucaucgagcgcaacaucaccgagaucgucuaccugaccaacaccacgaucgagaaggagaucugccccaagcuggcggaguaccggaacugguccaagccgcagugcaagaucaccggguucgcccccuucagcaaggacaacuccauccgccucagcgccggcggggacaucugggugacccgggagcccuacguguccugcgaccccgacaagugcuaccaguucgcccugggccaggggaccacgcugaacaaccgccacagcaacgacaccguccacgaccggaccccguaccgcacccuccugaugaacgagcugggcgugcccuuccaccucggcacgaagcaggucugcaucgccugguccagcuccagcugccacgacgggaaggcguggcugcacgugugcgugaccggccacgacgagaacgccaccgccuccuucaucuacgacgggcggcugguggacagcaucggcuccuggagcaagaagauccuccgcacccaggaguccgagugcgucugcaucaacgggacgugcaccguggugaugaccgacggcagcgccuccggccgggcggacaccaagauccuguucaucgaggaggggaagaucguccacacgagcaagcugagcggcuccgcccagcacguggaggagugcagcugcuacccccgcuaccccggggugcggugcgucugccgcgacaacuggaagggcuccaaccggccgaucguggacaucaacgugaaggacuacagcaucgucuccagcuacgugugcuccggccucgugggggacacgccccgcaagaacgacagcuccagcuccagccacugccuggaccccaacaacgaggagggcgggcacggcgucaaggggugggccuucgacgacggcaacgacguguggaugggccggaccaucuccgagaagucccgcagcggguacgagaccuucaaggucaucgagggcuggagcaagcccaacuccaagcugcagaucaaccgccaggugaucguggagcgggggaaccggagcggcuacuccgggaucuucagcgucgagggcaagagcugcaucaaccgcugcuucuacguggagcucauccggggccgcaagcaggagaccgaggugugguggaccuccaacagcaucgucguguucugcgggaccuccggcaccuacgggacgggcagcuggccggacggggccgacaucaaccugaugcccaucuga

SEQ ID NO: 79513 - RNA, 1410 nt, Artificial Sequence; identical to SEQ ID NO: 78754
  derived and/or modified CDS sequence (opt1) from neuraminidase__InfluenzaA__ABI93075

SEQ ID NO: 79514 - RNA, 1410 nt, Artificial Sequence; identical to SEQ ID NO: 78754
  derived and/or modified CDS sequence (opt1) from neuraminidase__InfluenzaA__ABI93086

SEQ ID NO: 79515 - RNA, 1410 nt, Artificial Sequence; identical to SEQ ID NO: 78754
  derived and/or modified CDS sequence (opt1) from neuraminidase__InfluenzaA__ABI93097

SEQ ID NO: 79516 - RNA, 1410 nt, Artificial Sequence
  derived and/or modified CDS sequence (opt1) from neuraminidase__InfluenzaA__ABI93108
augaaccccaaccagaagaucaucaccaucggcagcgugucccugaccaucgccacgaucugcuuccucaugcagaucgccauccuggucaccaccgugacccugcacuucaagcaguacgagugcaacagcccgcccaacaaccaggugaugcucugcgagcccacgaucaucgagcgcaacaucaccgagaucgucuaccugaccaacaccacgaucgagaaggagaucugccccaagcuggcggaguaccggaacugguccaagccgcagugcaacaucaccggguucgcccccuucagcaaggacaacuccauccgccucagcgccggcggggacaucugggugacccgggagcccuacguguccugcgaccccgacaagugcuaccaguucgcccugggccaggggaccacgcugaacaacggccacagcaacgacaccguccacgaccgcaccccguaccggacccuccugaugaacgagcugggcgugcccuuccaccucgggacgaagcaggucugcaucgccugguccagcuccagcugccacgacggcaaggcguggcugcacgugugcgugaccggggacgacgagaacgccaccgccuccuucaucuacaacggccgccugguggacagcaucggguccuggagcaagaagauccuccggacccaggaguccgagugcgucugcaucaacggcacgugcaccguggugaugaccgacggcagcgccuccgggaaggcggacaccaagauccuguucaucgaggagggcaagaucguccacacgagcagccuguccgggagcgcccagcacguggaggagugcuccugcuacccccgcuaccccggcgugcggugcgucugccgcgacaacuggaagggcagcaaccggccgaucguggacaucaacgugaacgacuacuccaucgucagcuccuacgugugcagcgggcucgugggcgacacgccccgcaagaacgacuccagcuccagcucccacugccuggaccccaacaacgaggagggcgggcacggggucaagggcugggccuucgacgacggcaacgacguguggauggggcggaccaucagcgagaagcugcgcuccggcuacgagaccuucaaggucaucgagggguggagcaagcccaacuccaagcuccagaucaaccgccaggugaucguggaccggggcaaccggagcggguacuccggcaucuucagcgucgagagcaaguccugcaucaaccgcugcuucuacguggagcugauccggggccgcaagcaggagaccgaggugcuguggaccagcaacuccaucgucguguucugcgggaccagcggcaccuacgggacgggcuccuggccggacggggccgacaucaaccucaugcccaucuga

SEQ ID NO: 79517 - RNA, 1410 nt, Artificial Sequence
  derived and/or modified CDS sequence (opt1) from neuraminidase__InfluenzaA__ABI93119
augaaccccaaccagaagaucaucaccaucggcagcgugucccugaccaucgccacgaucugcuuccucaugcagaucgccauccuggucaccaccgugacccugcacuucaagcaguacgagugcaacagcccgcccaacaaccaggugaugcucugcgagcccacgaucaucgagcgcaacaucaccgagaucgucuaccugaccaacaccacgaucgagaaggagaucugccccaagcuggcggaguaccggaacugguccaagccgcagugcaacaucaccggguucgcccccuucagcaaggacaacuccauccgccucagcgccggcggggacaucugggugacccgggagcccuacguguccugcgaccccgacaagugcuaccaguucgcccugggccaggggaccacgcugaacaacggccacagcaacgacaccguccacgaccgcaccccguaccggacccuccugaugaacgagcugggcgugcccuuccaccucgggacgaagcaggucugcaucgccugguccagcuccagcugccacgacggcaaggcguggcugcacgugugcgugaccggggacgacgagaacgccaccgccuccuucaucuacaacggccgccugguggacagcaucggguccuggagcaagaagauccuccggacccaggaguccgagugcgucugcaucaacggcacgugcaccguggugaugaccgacggcagcgccuccgggaaggcggacaccaagauccuguucaucgaggagggcaagaucguccacacgagcagccuguccgggagcgcccagcacguggaggagugcuccugcuacccccgcuaccccggcgugcggugcgucugccgcgacaacuggaagggcagcaaccggccgaucguggacaucaacgugaaggacuacuccaucgucagcuccuacgugugcagcgggcucgugggcgacacgccccgcaagaacgacaacuccagcuccagccacugccuggaccccaacaacgaggagggcgggcacggggucaagggcugggccuucgacgacggcaacgacguguggauggggcggaccaucuccgagaagcugcgcagcggcuacgagaccuucaaggucaucgaggggugguccaagcccaacagcaagcuccagaucaaccgccaggugaucguggaccgguccaaccggagcggcuacuccgggaucuucagcgucgagagcaaguccugcaucaaccgcugcuucuacguggagcugauccggggccgcaagcaggagaccgaggugcuguggaccagcaacuccaucgucguguucugcggcaccagcgggaccuacggcacgggguccuggccggacggcgccgacaucaaccucaugcccaucuga

SEQ ID NO: 79518 - RNA, 1416 nt, Artificial Sequence
  derived and/or modified CDS sequence (opt1) from neuraminidase__InfluenzaA__ABI94584
augaaccccaaccagaagcuguucgcccucagcggcguggccaucgcgcuguccguccugaaccuccugaucgggaucagcaacgugggccugaacgugucccuccaccugaaggagaaggggccgaagcaggaggagaaccugaccugcaccacgaucaaccagaacaacaccaccgucguggagaacaccuacgugaacaacacgaccaucaucaccaagggcaccgaccucaagacgcccagcuaccugcugcucaacaagucccugugcaacgucgagggguggguggugaucgccaaggacaacgccguccgcuucggcgagagcgagcagaucaucgugacccgggagcccuacguguccugcgaccccaccggcugcaagauguacgcccugcaccaggggaccacgauccgcaacaagcacagcaacggcaccauccacgaccggaccgccuuccgcgggcucaucuccaccccgcugggcacgccgcccaccgucagcaacuccgacuucaugugcgugggguggagcuccacgaccugccacgacggcaucgcgcggaugaccaucugcauccagggcaacaacgacaacgccaccgccaccguguacuacaaccgccggcugaccacgaccaucaagaccugggcccgcaacauccuccggacccaggagagcgagugcgucugccacaacgggacgugcgcgguggugaugaccgacggcuccgccagcucccaggccuacaccaaggucauguacuuccacaaggggcugguggugaaggaggaggagcugcgcggcagcgcccggcacaucgaggagugcuccugcuacggccacaaccagaaggugaccugcgucugccgcgacaacuggcagggggccaaccggcccaucaucgagaucgacaugagcacgcucgagcacaccagccgcuacgugugcaccggcauccugaccgacacgucccggcccggggacaagagcuccggcgacugcagcaaccccaucaccgggucccccggcguccccggcgugaagggguucggcuuccugaacggggacaacaccuggcucggccgcaccaucagcccgcggucccgcagcggguucgagaugcugaagauccccaacgcgggcaccgaccccaacucccggaucgccgagcgccaggagaucgucgacaacaacaacuggagcggcuacuccgggagcuucaucgacuacuggaacgacaacuccgagugcuacaaccccugcuucuacguggagcugauccggggccgcccggaggaggccaaguacguguggugggccagcaacucccucaucgcccugugcgggagccccuuccccgucggcuccgggagcuuccccgacggcgcgcagauccaguacuucuccuga

SEQ ID NO: 79519 - RNA, 1413 nt, Artificial Sequence; identical to SEQ ID NO: 78852
  derived and/or modified CDS sequence (opt1) from neuraminidase__InfluenzaA__ABI95220

SEQ ID NO: 79520 - RNA, 1410 nt, Artificial Sequence
  derived and/or modified CDS sequence (opt1) from neuraminidase__InfluenzaA__ABI95242
augaaccccaaccagaagaucaucaccaucggcagcgugucccugaccaucagcacgaucugcuucuucaugcagaucgccauccucaucaccaccgucacccugcacuucaagcaguacgaguucaacuccccgcccaacaaccaggugaugcugugcgagcccacgaucaucgagcgcaacaucaccgagaucguguaccucaccaacaccacgaucgagaaggagaucugccccaagcuggccgaguaccggaacuggagcaagccgcagugcgacaucaccggguucgcgcccuucuccaaggacaacagcauccgccuguccgccggcggggacaucugggucacccgggagcccuacgugagcugcgaccccgacaagugcuaccaguucgcccucggccaggggaccacgcugaacaacgugcacuccaacgacaccguccacggccgcaccccguaccggacccugcucaugaacgagcugggcgugcccuuccaccuggggacgaagcaggucugcaucgccuggagcuccagcuccugccacgacggcaaggccuggcuccacgugugcgugaccggggacgacaagaacgcgaccgccagcuucaucuacaacggccgccugguggacuccaucgucagcugguccaaggagauccugcggacccaggagagcgagugcgugugcaucaacgggacgugcaccguggucaugaccgacggcuccgccagcggcgaggccgacaccaagauccucuucaucgaggaggggaagaucgugcacacgagcacccuguccggcagcgcgcagcacguggaggagugcuccugcuacccccgcuaccccgggguccggugcgugugccgcgacaacuggaagggcagcaaccggccgaucguggacaucaacaucaaggacuacuccaucgucagcuccuacgugugcagcggccuggugggggacacgccccgcaagaacgacuccagcuccagcucccacugccucgaccccaacaacgaggagggcgggcacggcgucaaggggugggccuucgacgacggcaacgacguguggaugggccggaccaucagcgagaagcugcgcuccggguacgagaccuucaaggucaucgagggcuggagcaaccccaacuccaagcugcagaucaaccgccaggugaucguggaccgggggaaccggagcggcuacuccgggaucuucagcgucgagggcaagagcugcaucaaccgcugcuucuacguggagcucauccggggccgcaaggaggagaccgaggugcuguggaccuccaacagcaucgucguguucugcgggaccuccggcacguacgggaccggcagcuggccggacggggccgacaucaaccugaugcccaucuga

SEQ ID NO: 79521 - RNA, 1413 nt, Artificial Sequence
  derived and/or modified CDS sequence (opt1) from neuraminidase__InfluenzaA__ABI95253
augaaccccaaccagaagaucaucaccaucggcagcaucuccaucgccaucgggaucaucagcaucaugcugcagaucggcaacaucaucuccaucugggccagccacuccauccagaccgggagccagaaccacacgggcaucugcaaccagcgcaucaucaccuacgagaacuccaccugggugaaccacaccuacgucaacaucaacaacacgaacgugguggcggggaaggacaagaccagcgucacccucgccggcaacuccagccugugcuccaucagcggcugggccaucuacaccaaggacaacuccauccggaucgggagcaagggcgacguguucgugauccgcgagccguucaucuccugcagccaccuggagugccggacguucuuccucacccagggggcccugcugaacgacaagcacuccaacggcaccgucaaggaccgcagccccuaccgggcccucauguccugcccccugggggaggcgcccagcccguacaacagcaaguucgaguccguggccuggagcgccuccgccugccacgacggcaugggcuggcugaccaucgggaucagcggccccgacaacggggcgguggccguccucaaguacaacggcaucaucacggagaccaucaaguccuggaagaagcgcauccugcggacccaggagagcgagugcgugugcgugaacggcuccugcuucaccaucaugacggacgggcccagcgacggcgccgccuccuacaagaucuucaagaucgagaaggggaaggucaccaagagcaucgagcugaacgcccccaacucccacuacgaggagugcagcugcuacccggacaccggcaccgugaugugcgugugccgcgacaacuggcacggguccaaccggcccugggucagcuucaaccagaaccucgacuaccagaucggcuacaucugcuccggcguguucggggacaacccccgccccaaggacggcgaggggagcugcaacccggugacggucgacggcgcggacggggugaagggcuucuccuacaaguacggcaacgggguguggaucggccggaccaagagcaaccgccugcggaagggguucgagaugaucugggaccccaacggcuggaccgacaccgacuccgacuucagcgucaagcaggacgugguggccaucacggacuggagcggguacuccggcagcuucguccagcaccccgagcugaccggccucgacugcauccgccccugcuucuggguggagcugguccgggggcgcccgcgggagaacaccaccaucuggacguccggcagcuccaucagcuucugcggggugaacuccgacaccgccaacuggagcuggcccgacggcgccgagcugcccuucaccaucgacaaguga

SEQ ID NO: 79522 - RNA, 1413 nt, Artificial Sequence; identical to SEQ ID NO: 79380
  derived and/or modified CDS sequence (opt1) from neuraminidase__InfluenzaA__ABI95264

SEQ ID NO: 79523 - RNA, 1413 nt, Artificial Sequence; identical to SEQ ID NO: 79380
  derived and/or modified CDS sequence (opt1) from neuraminidase__InfluenzaA__ABI95275

SEQ ID NO: 79524 - RNA, 1413 nt, Artificial Sequence; identical to SEQ ID NO: 79380
  derived and/or modified CDS sequence (opt1) from neuraminidase__InfluenzaA__ABI95286

SEQ ID NO: 79525 - RNA, 1413 nt, Artificial Sequence
  derived and/or modified CDS sequence (opt1) from neuraminidase__InfluenzaA__ABI95297
augaaccccaaccagaagaucaucaccaucggcagcaucuccaucgccaucgggaucaucagccugaugcuccagaucggcaacaucaucuccaucugggccagccacuccauccagaccgggagccagaaccacacgggcgugugcaaccagcgcaucaucaccuacgagaacuccaccugggucaaccacaccuacgugaacaucaacaacacgaacgugaucgcggggaaggacaagaccagcgucacccuggccggcaacuccagccugugcuccaucagcggcugggccaucuacaccaaggacaacuccauccggaucgggagcaagggcgacguguucgugauccgcgagccguucaucuccugcagccaccucgagugccggacguucuuccugacccagggggcccugcucaacgacaagcacuccaacggcaccgucaagaaccgcagccccuaccgggcccugauguccugcccccugggggaggcgcccagcccguacaacagcaaguucgaguccguggccuggagcgccuccgccugccacgacggcaugggcuggcucaccaucgggaucagcggccccgacaacggggcgguggccguccugaaguacaacggcaucaucacggagaccaucaaguccuggaagaagcagauccugcgcacccaggagagcgagugcgugugcgugaacggcuccugcuucaccaucaugacggacgggcccagcaacggcgccgccuccuacaagaucuucaagaucgagaaggggaaggucaccaagagcaucgagcucaacgcccccaacuuccacuacgaggagugcuccugcuacccggacaccggcaccgugaugugcgugugccgggacaacuggcacgggagcaaccgccccugggucuccuucaaccagaaccuggacuaccagaucggcuacaucugcagcggcguguucggggacaacccccggcccaaggacggcgagggguccugcaacccggugacggucgacggcgcgaacggggugaagggcuucagcuacaaguacggcaacgggguguggaucggccgcaccaaguccaaccggcugcgcaagggguucgagaugaucugggaccccaacggcuggaccgacaccgacagcgacuucuccgucaagcaggacgugguggccaucacggacuggagcggguacagcggcuccuucguccagcaccccgagcucaccggccuggacugcauccggcccugcuucuggguggagcugguccgcgggcucccgaaggagaacaccaccaucuggacgagcggcuccagcaucuccuucugcggggugaacagcgacaccgccaacugguccuggcccgacggcgccgagcugcccuucaccaucgacaaguga

SEQ ID NO: 79526 - RNA, 1410 nt, Artificial Sequence; identical to SEQ ID NO: 78754
  derived and/or modified CDS sequence (opt1) from neuraminidase__InfluenzaA__ABI95308

SEQ ID NO: 79527 - RNA, 1413 nt, Artificial Sequence; identical to SEQ ID NO: 78410
  derived and/or modified CDS sequence (opt1) from neuraminidase__InfluenzaA__ABI96131

SEQ ID NO: 79528 - RNA, 1413 nt, Artificial Sequence; identical to SEQ ID NO: 78410
  derived and/or modified CDS sequence (opt1) from neuraminidase__InfluenzaA__ABI96133

SEQ ID NO: 79529 - RNA, 1413 nt, Artificial Sequence; identical to SEQ ID NO: 78410
  derived and/or modified CDS sequence (opt1) from neuraminidase__InfluenzaA__ABI96136

SEQ ID NO: 79530 - RNA, 1410 nt, Artificial Sequence
  derived and/or modified CDS sequence (opt1) from neuraminidase__InfluenzaA__ABJ09110
augaaccccaaccagaagaucaucaccaucggcagcgugucccugaccaucgccacgaucugcuuccucaugcagaucgccauccuggucaccaccgugacccugcacuucaagcaguacgagugcaacagcccgcccaacaaccaggugaugcucugcgagcccacgaucaucgagcgcaacaucaccgagaucgucuaccugaccaacaccacgaucgagaaggagaucugccccaagcuggcggaguaccggaacugguccaagccgcagugcaacaucaccggguucgcccccuucagcaaggacaacuccauccgccucagcgccggcggggacaucugggugacccgggagcccuacguguccugcgaccccgacaagugcuaccaguucgcccugggccaggggaccacgcugaacaacggccacagcaacgacaccguccacgaccgcaccccguaccggacccuccugaugaacgagcugggcgugcccuuccaccucgggacgaagcaggucugcaucgccugguccagcuccagcugccacgacggcaaggcguggcugcacgugugcgugaccggggacgacgagaacgccaccgccuccuucaucuacaacggccgccugguggacagcaucggguccuggagcaagaagauccuccggacccaggaguccgagugcgucugcaucaacggcacgugcaccguggugaugaccgacggcagcgccuccgggaaggcggacaccaagauccuguucaucgaggagggcaagaucauccacacgagcagccuguccgggagcgcccagcacgucgaggagugcuccugcuacccccgcuaccccggcgugcggugcgugugccgcgacaacuggaagggcagcaaccggccgaucgucgacaucaacgugaaggacuacuccaucgugagcuccuacgucugcagcgggcucgugggcgacacgccccgcaagaacgacuccagcuccagcucccacugccuggaccccaacaacgaggagggcgggcacggggugaagggcugggccuucgacgacggcaacgacgucuggauggggcggaccaucagcgagaagcugcgcuccggcuacgagaccuucaaggugaucgagggguggagcaagcccaacuccaagcuccagaucaaccggcaggucaucguggaccgcggcaaccggagcggguacuccggcaucuucagcguggagagcaaguccugcaucaaccgcugcuucuacgucgagcugauccggggccgcaagcaggagaccgaggugcuguggaccagcaacuccaucguggucuucugcgggaccagcggcaccuacgggacgggcuccuggccggacggggccgacaucaaccucaugcccaucuga

SEQ ID NO: 79531 - RNA, 1410 nt, Artificial Sequence; identical to SEQ ID NO: 79125
  derived and/or modified CDS sequence (opt1) from neuraminidase__InfluenzaA__ABJ09143

SEQ ID NO: 79532 - RNA, 1413 nt, Artificial Sequence; identical to SEQ ID NO: 78949
  derived and/or modified CDS sequence (opt1) from neuraminidase__InfluenzaA__ABJ09154

SEQ ID NO: 79533 - RNA, 1410 nt, Artificial Sequence; identical to SEQ ID NO: 78351
  derived and/or modified CDS sequence (opt1) from neuraminidase__InfluenzaA__ABJ09165

SEQ ID NO: 79534 - RNA, 1410 nt, Artificial Sequence; identical to SEQ ID NO: 78351
  derived and/or modified CDS sequence (opt1) from neuraminidase__InfluenzaA__ABJ09176

SEQ ID NO: 79535 - RNA, 1410 nt, Artificial Sequence; identical to SEQ ID NO: 78738
  derived and/or modified CDS sequence (opt1) from neuraminidase__InfluenzaA__ABJ09198

SEQ ID NO: 79536 - RNA, 1410 nt, Artificial Sequence; identical to SEQ ID NO: 78738
  derived and/or modified CDS sequence (opt1) from neuraminidase__InfluenzaA__ABJ09209

SEQ ID NO: 79537 - RNA, 1410 nt, Artificial Sequence
  derived and/or modified CDS sequence (opt1) from neuraminidase__InfluenzaA__ABJ09220
augaaccccaaccagaagaucaucaccaucggcagcgugucccugaccaucgccacgaucugcuuccucaugcagaucgccauccuggucaccaccgugacccugcacuucaagcaguacgagugcaacagcccgcccaacaaccaggugaugcucugcgagcccacgaucaucgagcgcaacaucaccgagaucgucuaccugaccaacaccacgaucgagaaggagaucugccccaagcuggcgaaguaccggaacugguccaagccgcagugcaagaucaccggguucgcccccuucagcaaggacaacuccauccgccucagcgccggcggggacaucugggugacccgggagcccuacguguccugcgaccccggcaagugcuaccaguucgcccuggggcgcggcaccacgcugaacaaccggcacagcaacgacaccguccacgaccgcaccccguaccggacccuccugaugaacgagcugggcgugcccuuccaccucgggacgaagcaggucugcaucgccugguccagcuccagcugccacgacggcaaggcguggcugcacgugugcgugaccgggcacgacgagaacgccaccgccuccuucaucuacgacggccgccugguggacagcaucggguccuggagcaagaacauccuccggacccaggaguccgagugcgucugcaucaacggcacgugcaccguggugaugaccgacggcagcgccuccgagcgcgcggacaccaagauccuguucaucgaggaggggaagaucguccacaucagcccccugagcggcuccgcccagcacguggaggagugcagcugcuacccccgguacccgggggugcgcugcgucugccgggacaacuggaagggcuccaaccgccccaucguggacaucaacgugaaggacuacagcaucgucuccagcuacgugugcuccggccucgugggggacacgccccggaagaacgacagcuccagcuccagcuacugccgcaaccccaacaacgagaagggcucccacggggucaagggcugggccuucgacgacgggaacgacguguggaugggccggaccaucagcgaggagcugcgcuccggcuacgagaccuucaaggucaucgggggcuggagcaagccgaacuccaagcugcagaucaaccgccaggugaucguggaccgggggaaccggagcggcuacuccgggaucuucagcgucgagggcaagagcugcaucaaccgcugcuucuacguggagcucauccgcggccggaagcaggagaccgaggugugguggacguccaacagcaucgucguguucugcgggaccuccggcaccuacgggaccggcagcuggcccgacggggccgacaucaaccugaugcccaucuga

SEQ ID NO: 79538 - RNA, 1410 nt, Artificial Sequence; identical to SEQ ID NO: 78754
  derived and/or modified CDS sequence (opt1) from neuraminidase__InfluenzaA__ABJ09231

SEQ ID NO: 79539 - RNA, 1410 nt, Artificial Sequence; identical to SEQ ID NO: 78754
  derived and/or modified CDS sequence (opt1) from neuraminidase__InfluenzaA__ABJ09242

SEQ ID NO: 79540 - RNA, 1410 nt, Artificial Sequence; identical to SEQ ID NO: 78308
  derived and/or modified CDS sequence (opt1) from neuraminidase__InfluenzaA__ABJ09253

SEQ ID NO: 79541 - RNA, 1410 nt, Artificial Sequence
  derived and/or modified CDS sequence (opt1) from neuraminidase__InfluenzaA__ABJ09264
augaaccccaaccagaagaucaucaccaucggcagcgugucccugaccaucgccacgaucugcuuccucaugcagaucgccauccuggucaccaccgugacccugcacuucaagcaguacgagugcaacagcccgcccaacaaccaggugaugcucugcgagcccacgaucaucgagcgcaacaucaccgagaucgucuacaugaccaacaccacgaucgagaaggagaucugccccaagcuggcggaguaccggaacugguccaagccgcagugcaacaucaccggguucgcccccuucagcaaggacaacuccauccgccugagcgccggcggggacaucugggugacccgggagcccuacguguccugcgaccccgacaagugcuaccaguucgcccucggccaggggaccacgcugaacaaccgccacagcaacgacaccguccacgaccggaccccguaccgcacccugcucaugaacgagcugggcgugcccuuccaccugggcacgaagcaggucugcaucgccugguccagcuccagcugccacgacgggaaggcguggcuccacgugugcgugaccggccacgacgagaacgccaccgccuccuucaucuacaacgggcggcugguggacagcaucggcuccuggagcaagaagauccugcgcacccaggaguccgagugcgucugcaucaacgggacgugcaccguggugaugaccgacggcagcgccuccggcaaggcggacaccaagauccucuucaucgaggaggggaagaucguccacaucagcccccugagcggcuccgcccagcacguggaggagugcagcugcuacccccgguacccgggggugcgcugcgucugccgggacaacuggaagggcuccaaccgccccaucguggacaucaacgugaaggacuacagcaucgucuccagcuacgugugcuccggccuggugggggacacgccccggaagaacgacagcuccagcuccagccacugccucaaccccaacaacgaggagggcgggcacggcgucaaggggugggccuucgacgacggcaacgacguguggaugggccgcaccaucuccgagaagcugcggagcggguacgagaccuucaaggucaucgagggcugguccaagccgaacagcaagcugcagaucaaccgccaggugaucguggaccgggggaacuccagcggcuacuccgggaucuucagcgucgagggcaagagcugcaucaaccgcugcuucuacguggagcucauccggggccgcaagcaggagaccgaggugugguggacguccaacagcaucgucgugcugugcgggaccuccggcaccuacgggaccggcagcuggcccgacggggccgacaucaaccugaugcccaucuga

SEQ ID NO: 79542 - RNA, 1410 nt, Artificial Sequence
  derived and/or modified CDS sequence (opt1) from neuraminidase__InfluenzaA__ABJ09286
augaaccccaaccagaagaucaucaccaucggcagcgugucccugaccaucgccacgaucugcuuccucaugcagaucgccauccuggucaccaccgugacccugcacuucaagcaguacgagugcaacagcccgcccaacaaccaggugaugcucugcgagcccacgaucaucgagcgcaacaucaccgagaucgucuaccugaccaacaccacgaucgagaaggagaucugccccaagcuggcggaguaccggaacugguccaagccgcagugcaacaucaccggguucgcccccuucagcaaggacaacuccauccgccucagcgccggcggggacaucugggugacccgggagcccuacguguccugcgaccccgacaagugcuaccaguucgcccugggccaggggaccacgcugaacaacggccacagcaacgacaccguccacgaccgcaccccguaccggacccuccugaugaacgagcugggcgugcccuuccaccucgggacgaagcaggucugcaucgccugguccagcuccagcugccacgacggcaaggcguggcugcacgugugcgugaccggggacgacgagaacgccaccgccuccuucaucuacaacggccgccugguggacagcaucggguccuggagcaagaagauccuccggacccaggaguccgagugcgucugcaucaacggcacgugcaccguggugaugaccgacggcagcgccuccgggaaggcggacaccaagauccuguucaucgaggagggcaagaucguccacacgagcccccugagcggguccgcccagcacguggaggagugcagcugcuacccccgcuacccgggcgugcggugcgucugccgcgacaacuggaagggcuccaaccggcccaucguggacaucaacgugaaggacuacagcaucgucuccagcuacgugugcuccgggcucgugggcgacacgccccgcaagaacgacagcuccagcuccagccacugccuggaccccaacaacgaggagggcgggcacggggucaagggcugggccuucgacgacggcaacgacguguggauggggcggaccaucuccgagaagcugcgcagcggcuacgagaccuucaaggucaucgaggggugguccaagccgaacagcaagcuccagaucaacaagcaggucaucguggaccggggcaaccgcuccggguacagcggcaucuucuccguggagggcaagagcugcaucaaccggugcuucuacguggagcugauccgcgggcggaagcaggagaccgaggugcuguggaccagcaacuccaucgucguguucugcggcaccagcgggaccuacggcacgggguccuggcccgacggcgccgacaucaaccucaugcccaucuga

SEQ ID NO: 79543 - RNA, 1410 nt, Artificial Sequence; identical to SEQ ID NO: 78308
  derived and/or modified CDS sequence (opt1) from neuraminidase__InfluenzaA__ABJ09308

SEQ ID NO: 79544 - RNA, 1410 nt, Artificial Sequence; identical to SEQ ID NO: 79512
  derived and/or modified CDS sequence (opt1) from neuraminidase__InfluenzaA__ABJ09319

SEQ ID NO: 79545 - RNA, 1413 nt, Artificial Sequence; identical to SEQ ID NO: 78977
  derived and/or modified CDS sequence (opt1) from neuraminidase__InfluenzaA__ABJ09330

SEQ ID NO: 79546 - RNA, 1410 nt, Artificial Sequence
  derived and/or modified CDS sequence (opt1) from neuraminidase__InfluenzaA__ABJ09341
augaaccccaaccagaagaucaucaccaucggcagcgugucccugaccaucgccacgaucugcuuccucaugcagaucgccauccuggucaccaccgugacccugcacuucaagcaguacgagugcaacagcccgcccaacaaccaggugaugcucugcgagcccacgaucaucgagcgcaacaucaccgagaucgucuaccugaccaacaccacgaucgagaaggagaucugccccaagcuggcggaguaccggaacugguccaagccgcagugcaacaucaccggguucgcccccuucagcaaggacaacuccauccgccucagcgccggcggggacaucugggugacccgggagcccuacguguccugcgaccccgacaagugcuaccaguucgcccugggccaggggaccacgcugaacaacggccacagcaacgacaccguccacgaccgcaccccguaccggacccuccugaugaacgagcugggcgugcccuuccaccucgggacgaagcaggucugcaucgccugguccagcuccagcugccacgacggcaaggcguggcugcacgugugcgugaccggggacgacgagaacgccaccgccuccuucaucuacaacggccgccugguggacagcaucggguccuggagcaagaagauccuccggacccaggaguccgagugcgucugcaucaacggcacgugcaccguggugaugaccgacggcagcgccuccgggaaggcggacaccaagauccuguucaucgaggagggcaagaucguccacacgagcagccugcucggguccgcccagcacguggaggagugcagcugcuacccccgcuaccccggcgugcggugcgucugccgcgacaacuggaagggcuccaaccggccgaucguggacaucaacgugaaggacuacagcaucgucuccagcuacgugugcuccgggcuggugggcgacacgccccgcaagaacgacagcuccagcuccagccacugccuggaccccaacaacgaggagggcgggcacggggucaagggcugggccuucgacgacggcaacgacguguggauggggcggaccaucuccgagaagcuccgcagcggcuacgagaccuucaaggucaucgaggggugguccaagcccaacagcaagcugcagaucaaccgccaggugaucguggaccggggcaaccgguccggguacagcggcaucuucuccgucgagagcaagagcugcaucaaccgcugcuucuacguggagcugauccggggccgcaagcaggagaccgaggugcucuggaccuccaacagcaucgucguguucugcgggaccuccggcaccuacgggacgggcagcuggccggacggggccgacaucaaccugaugcccaucuga

SEQ ID NO: 79547 - RNA, 1410 nt, Artificial Sequence
  derived and/or modified CDS sequence (opt1) from neuraminidase__InfluenzaA__ABJ09352
augaaccccaaccagaagaucaucaccaucggcagcgugucccugaccaucgccacgaucugcuuccucaugcagaucgccauccuggucaccaccgugacccugcacuucaagcaguacgagugcaacagcccgcccaacaaccaggugaugcucugcgagcccacgaucaucgagcgcaacaucaccgagaucgucuaccugaccaacaccacgaucgagaaggagaucugccccaagcuggcggaguaccggaacugguccaagccgcagugcaacaucaccggguucgcccccuucagcaaggacaacuccauccgccucagcgccggcggggacaucugggugacccgggagcccuacguguccugcgaccccgacaagugcuaccaguucgcccugggccaggggaccacgcugaacaacggccacagcaacgacaccguccacggccgcaccccguaccggacccuccugaugaacgagcugggggugcccuuccaccucggcacgaagcaggucugcaucgccugguccagcuccagcugccacgacgggaaggcguggcugcacgugugcgugaccggcgacgacgagaacgccaccgccuccuucaucuacaacgggcgccugguggacagcaucggcuccuggagcaagaagauccuccggacccaggaguccgagugcgucugcaucaacggcacgugcaccguggugaugaccgacgggagcgccuccggcaaggcggacaccaagauccuguucaucgaggaggggaagaucguccacacgagcagccuguccggcagcgcccagcacguggaggagugcuccugcuacccccgcuaccccggcgugcggugcgucugccgcgacaacuggaaggggagcaaccggccgaucguggacaucaacgugaaggacuacuccaucgucagcuccuacgugugcagcggccucgugggggacacgccccgcaagaacgacuccagcuccagcucccacugccuggaccccaacaacgaggagggcgggcacggcgucaagggcugggccuucgacgacgggaacgacguguggaugggccggaccaucagcgagaagcugcgcuccggguacgagaccuucaaggucaucgagggcuggagcaagcccaacuccaagcuccagaucaaccgccaggugaucguggaccgggggaaccggagcggcuacuccggcaucuucagcgucgagagcaaguccugcaucaaccgcugcuucuacguggagcugauccgggggcgcaagcaggagaccgaggugcuguggaccagcaacuccaucgucguguucugcggcaccagcgggaccuacggcacgggguccuggccggacggcgccgacaucaaccucaugcccaucuga

SEQ ID NO: 79548 - RNA, 1407 nt, Artificial Sequence
  derived and/or modified CDS sequence (opt1) from neuraminidase__InfluenzaA__ABJ09374
augauccagagcaagaucaucaccaucggcuccgugagccugaccaucuccacgaucugcuucuucaugcagaucgccauccucaucaccaccgucacccugcacuucaagcaguacgaguucaacagcccgcccaacaaccaggugaugcugugcgagcccacgaucaucgagcgcaacaucaccgagaucguguaccucaccaacaccacgaucgagaaggagaucugccccaagcuggccgaguaccggaacugguccaagccccagugcgacaucaccggguucgcgccguucagcaaggacaacuccauccgccugagcgccggcggggacaucugggucacccgggagcccuacguguccugcgaccccgacaagugcuaccaguucgcccucggccaggggaccacgcugaacaacgugcacagcaacgacaccguccacgaccgcacccccuaccggacccugcucaugaacgagcugggcgugccguuccaccugggcacgaagcaggucugcaucgccugguccagcuccagcugccacgacgggaaggccuggcuccacgugugcgugaccggcgacgacaagaacgcgaccgccuccuucaucuacaacgggcgccugguggacagcaucgucuccuggagcaagaagauccugcggacccaggaguccgagugcgugugcaucaacggcacgugcaccguggucaugaccgacgggagcgccagcggcaaggccgacaccaagauccucuucaucgaggagggcaagaucgugcacacguccacccugagcggguccgcgcagcacguggaggagugcagcugcuacccccgcuaccccggcguccggugcgugugccgcgacaacuggaagggguccaaccggcccaucguggacaucaacaucaaggacuacagcaucgucuccagcuacgugugcuccggccuggugggcgacaccccgcgcaagaacgacagcuccagcuccagccacugccucgaccccaacaacgaggagggcgggcacggggucaagggcugggccuucgacgacgggaacgacguguggaugggccggaccaucuccgagaagcugcgcagcggcuacgagacguucaaggucaucgaggggugguccaaccccaacagcaagcugcagaucaaccgccaggugaucguggaccggggcaaccgguccggguacagcggcaucuucagcgucgaggggaaguccugcaucaaccgcugcuucuacguggagcucauccggggcaagaaggaggagaccgaggugcuguggaccagcaacuccaucgucguguucugcggcaccagcgggacguacggcaccggguccuggcccgacggcgccgacaucaaccugaugccgaucuga

SEQ ID NO: 79549 - RNA, 1410 nt, Artificial Sequence; identical to SEQ ID NO: 78738
  derived and/or modified CDS sequence (opt1) from neuraminidase__InfluenzaA__ABJ09385

SEQ ID NO: 79550 - RNA, 1410 nt, Artificial Sequence; identical to SEQ ID NO: 78277
  derived and/or modified CDS sequence (opt1) from neuraminidase__InfluenzaA__ABJ16590

SEQ ID NO: 79551 - RNA, 1410 nt, Artificial Sequence; identical to SEQ ID NO: 79542
  derived and/or modified CDS sequence (opt1) from neuraminidase__InfluenzaA__ABJ16601

SEQ ID NO: 79552 - RNA, 1413 nt, Artificial Sequence
  derived and/or modified CDS sequence (opt1) from neuraminidase__InfluenzaA__ABJ16612
augaaccccaaccagaagaucaucaccaucggcagcaucuccaucgccaucgggaucaucagccugaugcuccagaucggcaacaucaucuccaucugggccagccacuccauccagaccgggagccagaaccacacgggcgugugcaaccagcgcaucaucaccuacgagaacuccaccugggucaaccacaccuacgugaacaucaacaacacgaacguggucgcggggaaggacaagaccagcgugacccuggccggcaacuccagccugugcuccaucagcggcugggccaucuacaccaaggacaacuccauccggaucgggagcaagggcgacguguucgucauccgcgagccguucaucuccugcagccaccucgagugccggacguucuuccugacccagggggcccugcucaacgacaagcacuccaacggcaccgugaaggaccgcagccccuaccgggcccugauguccugcccccugggggaggcgcccagcccguacaacagcaaguucgaguccguggccuggagcgccuccgccugccacgacggcaugggcuggcucaccgucgggaucagcggccccgacaacggggcgguggccgugcugaaguacaacggcaucaucacggagaccaucaaguccuggaagaagcgcauccugcggacccaggagagcgagugcgucugcgugaacggcuccugcuucaccaucaugacggacgggcccagcaacggcgccgccuccuacaagaucuucaagaucgagaaggggaaggugaccaagagcaucgagcucaacgcccccaacuuccacuacgaggagugcuccugcuacccggacaccggcaccgucaugugcgugugccgcgacaacuggcacgggagcaaccggcccuggguguccuucaaccagaaccuggacuaccagaucggcuacaucugcagcggcgucuucggggacaacccccgccccaaggacggcgagggguccugcaacccggugacgguggacggcgcggacggggucaagggcuucagcuacaaguacggcaacgggguguggaucggccggaccaaguccaaccgccugcggaagggguucgagaugaucugggaccccaacggcuggaccgacaccgacagcgacuucuccgugaagcaggacgucguggccaucacggacuggagcggguacagcggcuccuucguccagcaccccgagcucaccggccuggacugcauccgccccugcuucuggguggagcuggugcgggggcucccgcgcgagaacaccaccaucuggacgagcggcuccagcaucuccuucugcggggucaacagcgacaccgccaacugguccuggcccgacggcgccgagcugcccuucaccaucgacaaguga

SEQ ID NO: 79553 - RNA, 1410 nt, Artificial Sequence; identical to SEQ ID NO: 79542
  derived and/or modified CDS sequence (opt1) from neuraminidase__InfluenzaA__ABJ16623

SEQ ID NO: 79554 - RNA, 1410 nt, Artificial Sequence
  derived and/or modified CDS sequence (opt1) from neuraminidase__InfluenzaA__ABJ16634
augaaccccaaccagaagaucaucaccaucggcagcgugucccugaccaucagcacgaucugcuucuucaugcagaucgccauccucaucaccaccgucacccugcacuucaagcaguacgaguucaacuccccgcccaacaaccaggugaugcugugcgagcccacgaucaucgagcgcaacaucaccgagaucguguaccucaccaacaucaccaucgagaaggagaucugccccaagcuggccgaguaccggaacuggagcaagccgcagugcgacaucacgggguucgcgcccuucuccaaggacaacagcauccgccuguccgccggcggggacaucugggucacccgggagcccuacgugagcugcgaccccgacaagugcuaccaguucgcccucggccaggggaccacccugaacaacgugcacuccaacgacacgguccacgaccgcaccccguaccggacccugcucaugaacgagcugggcgugcccuuccaccugggcaccaagcaggucugcaucgccuggagcuccagcuccugccacgacgggaaggccuggcuccacgugugcgugacgggcgacgacaagaacgcgaccgccagcuucaucuacaacgggcgccugguggacuccaucgucagcugguccaagaagauccugcggacccaggagagcgagugcgugugcaucaacgggaccugcacgguggucaugaccgacggguccgccagcggcaaggccgacaccaagauccucuucaucgaggagggcaagaucgugcacaccagcacgcuguccgggagcgcgcagcacguggaggagugcuccugcuacccccgcuaccccggcguccggugcgugugccgcgacaacuggaaggggagcaaccggccgaucguggacaucaacaucaaggacuacuccaucgucagcuccuacgugugcagcggccuggugggcgacacgccccgcaagaacgacuccagcuccagcucccacugccucgaccccaacaacgaggagggcggccacggggucaagggcugggccuucgacgacgggaacgacguguggaugggccggaccaucagcgagaagcugcgcuccggcuacgagaccuucaaggucaucgagggguggagcaaccccaacuccaagcugcagaucaaccgccaggugaucguggaccggggcaaccggagcggguacuccggcaucuucagcgucgagggcaagagcugcaucaaccgcugcuucuacguggagcucauccgggggcgcaaggaggagaccgaggugcuguggaccuccaacagcaucgucguguucugcggcaccuccgggaccuacggcacggggagcuggccggacggcgccgacaucaaccugaugcccaucuga

SEQ ID NO: 79555 - RNA, 1413 nt, Artificial Sequence; identical to SEQ ID NO: 78410
  derived and/or modified CDS sequence (opt1) from neuraminidase__InfluenzaA__ABJ16656

SEQ ID NO: 79556 - RNA, 1413 nt, Artificial Sequence; identical to SEQ ID NO: 78410
  derived and/or modified CDS sequence (opt1) from neuraminidase__InfluenzaA__ABJ16667

SEQ ID NO: 79557 - RNA, 1413 nt, Artificial Sequence
  derived and/or modified CDS sequence (opt1) from neuraminidase__InfluenzaA__ABJ16678
augaaccccaaccagaagaucaucaccaucggcagcaucuccaucgccaucgggaucaucagccugaugcuccagaucggcaacaucaucuccaucugggccagccacuccauccagaccgggagccagaaccacacgggcaucugcaaccagcgcaucaucaccuacgagaacuccaccugggugaaccacaccuacgucaacaucaacaacacgaacgugguggcggggaaggacaagaccagcgucacccuggccggcaacuccagccugugcuccaucagcggcugggccaucuacaccaaggacaacuccauccggaucgggagcaagggcgacguguucgugauccgcgagccguucaucuccugcagccaccucgagugccggacguucuuccugacccagggggcccugcucaacgacaagcacuccaacggcaccgucaaggaccgcagccccuaccgggcccugauguccugcccccugggggaggcgcccagcccguacaacagcaaguucgaguccguggccuggagcgccuccgccugccacgacggcaugggcuggcucaccaucgggaucagcggccccgacaacggggcgguggccguccugaaguacaacggcaucaucacggagaccaucaaguccuggaagaagcgcauccugcggacccaggagagcgagugcgugugcgugaacggcuccugcuucaccaucaugacggacgggcccagcaacggcgccgccuccuacaagaucuucaagaucgagaaggggaaggucaccaagagcaucgagcucaacgcccccaacuuccacuacgaggagugcuccugcuacccggacaccggcaccgugaugugcgugugccgcgacaacuggcacgggagcaaccggcccugggucuccuucaaccagaaccuggacuaccagaucggcuacaucugcagcggcguguucggggacaacccccgccccaaggacggcaagggguccugcaacccggugacggucgacggcgcggacggggugaagggcuucagcuacaaguacggcaacgggguguggaucggccggaccaaguccaaccgccugcggaagggguucgagaugaucugggaccccaacggcuggaccgacaccgacagcgacuuccucgucaagcaggacgugguggccaucacggacugguccggguacagcggcagcuucguccagcaccccgagcugaccggccuggacugcauccgccccugcuucuggguggagcucguccgggggcugccgcgcgagaacaccaccaucuggacguccggcagcuccaucagcuucugcgggguggacuccgacaccgccaacuggagcuggcccgacggcgccgagcugcccuucaccaucgacaaguga

SEQ ID NO: 79558 - RNA, 1413 nt, Artificial Sequence; identical to SEQ ID NO: 78410
  derived and/or modified CDS sequence (opt1) from neuraminidase__InfluenzaA__ABJ16689

SEQ ID NO: 79559 - RNA, 1410 nt, Artificial Sequence
  derived and/or modified CDS sequence (opt1) from neuraminidase__InfluenzaA__ABJ16700
augaaccccaaccagaagaucaucaccaucggcagcgugucccugaccaucgccacgaucugcuuccucaugcagaucgccauccuggucaccaccgugacccugcacuucaagcaguacgagugcaacagcccgcccaacaaccaggugaugcucugcgagcccacgaucaucgagcgcaacaucaccgagaucgucuaccugaccaacaccacgaucgagaaggagaucugccccaagcuggcggaguaccggaacugguccaagccgcagugcaacaucaccggguucgcccccuucagcaaggacaacuccauccgccucagcgccggcggggacaucugggugacccgggagcccuacguguccugcgaccccgacaagugcuaccaguucgcccugggccaggggaccacgcugaacaacggccacagcaacgacaccguccacgaccgcaccccguaccggacccuccugaugaacgagcugggcgugcccuuccaccucgggacgaagcaggucugcaucgccugguccagcuccagcugccacgacggcaaggcguggcugcacgugugcgugaccggggacgacgagaacgccaccgccuccuucaucuacaacggccgccugguggacagcaucggguccuggagcaagaagauccuccggacccaggaguccgagugcgucugcaucaacggcacgugcaccguggugaugaccgacggcagcgccuccgggaaggcggacaccaagauccuguucaucgaggagggcaagaucguccacacgagcagccuguccgggagcgcccagcacguggaggagugcuccugcuacccccgcuaccccggcgugcggugcgucugccgcgacaacuggaagggcagcaaccggccgaucguggacaucaacgugaaggacuacuccaucgucagcuccuacgugugcagcgggcucgugggcgacacgccccgcaagaacgacuccagcuccagcucccacugccuggaccccaacaacgaggagggcgggcacggggucaagggcugggccuucgacgacggcaacgacguguggauggggcggaccaucagcgagaagcugcgcuccggcuacgagaccuucaaggucaucgagggguggagcaagcccaacuccaagcuccagaucaaccgccaggugaucguggaccggggcaaccggagcggguacuccggcaucuucagcgucgagagcaaguccugcaucaaccgcugcuucuacguggagcugauccggggcaagaagcaggagaccgaggugcuguggaccagcaacuccaucgucguguucugcgggaccagcggcaccuacgggacgggcuccuggccggacggggccgacaucaaccucaugcccaucuga

SEQ ID NO: 79560 - RNA, 1410 nt, Artificial Sequence
  derived and/or modified CDS sequence (opt1) from neuraminidase__InfluenzaA__ABJ16711
augaaccccaaccagaagaucaucaccaucggcagcgugucccugaccaucgccacgaucugcuuccucaugcagaucgccauccuggucaccaccgugacccugcacuucaagcaguacgagugcaacagcccgcccaacaaccaggugaugcucugcgagcccacgaucaucgagcgcaacaucaccgagaucgucuaccugaccaacaccacgaucgagaaggagaucugccccaagcuggcggaguaccggaacugguccaagccgcagugcaacaucaccggguucgcccccuucagcaaggacaacuccauccgccucagcgccggcggggacaucugggugacccgggagcccuacguguccugcgaccccgacaagugcuaccaguucgcccugggccaggggaccacgcugaacaacggccacagcaacgacaccguccacgaccgcaccccguaccggacccuccugaugaacgagcugggcgugcccuuccaccucgggacgaagcaggucugcaucgccugguccagcuccagcugccacgacggcaaggcguggcugcacgugugcgugaccggggacgacgagaacgccaccgccuccuucaucuacaacggccgccugguggacagcaucggguccuggagcaagaagauccuccggacccaggaguccgagugcgucugcaucaacggcacgugcaccguggugaugaccgacggcagcgccuccgggaaggcggacaccaagauccuguucaucgaggagggcaagaucguccacacgagcagccuguccgggagcgcccagcacguggaggagugcuccugcuacccccgcuaccccggcgugcggugcgucugccgcgacaacuggaagggcagcaaccggccgaucguggacaucaacaucaaggacuacuccaucgugagcuccuacgucugcagcgggcucgugggcgacacgccccgcaagaacgacuccagcuccagcucccacugccuggaccccaacaacgaggagggcgggcacggggugaagggcugggccuucgacgacggcaacgacgccuggauggggcggaccaucagcgagaagcugcgcuccggcuacgagaccuucaaggucaucgagggguggagcaaguccaacagcaagcuccagaucaaccgccaggugaucgucgaccggggcaaccgguccggguacagcggcaucuucagcguggagggcaaguccugcaucaaccgcugcuucuacguggagcugauccgggggcgcaagcaggagaccgagguccuguggaccagcaacuccaucgugguguucugcggcaccagcgggaccuacggcacgggguccuggcccgacggcgccgacaucaaccucaugccgaucuga

SEQ ID NO: 79561 - RNA, 1413 nt, Artificial Sequence
  derived and/or modified CDS sequence (opt1) from neuraminidase__InfluenzaA__ABJ16733
augaaccccaaccagaagaucaucaccaucggcagcaucuccguggccaucgggaucaucaaccugauccuccagaucggcaacaucaucagcaucugggccucccacagcauccagaccgggucccagaacuacacgggcaucugcaaccagcgcaucaucaccuacgagaaccggaccugggucaaccagaccuacgugaacaucaacaacacgaacguggucgcggggaaggacaagaccagcaugacccuggccggcaacuccagccugugcccgauccgcggcugggccaucuacaccaaggacaacuccauccggaucgggagcaagggcgacaucuucgugauccgcgagcccuucaucuccugcagccaccucgagugccggacguucuuccugacccagggggcccugcucaacgacaagcacuccaacggcaccaucaaggaccgcagccccuuccgggcccugauguccugcccccugggggaggcgccgagccccuacaacucccgcuucgagagcguggccugguccgccagcgccugccacgacggccucggcuggcugaccaucgggaucagcggccccgacaacggggcggucgccgugcugaaguacaacggcaucaucacggagaccaucaaguccuggaagaagcagauccuccggacccaggagagcgagugcgugugcgucaacggcuccugcuucaccaucaugacggacgggcccagcaaccgcgccgccuccuaccggaucuucaagaucgagaagggccgcgugaccaagagcaucgagcuggacgccccgaacuaccacuacgaggagugcuccugcuaccccgacaccgggaccgugaugugcgucugccgggacaacuggcacggcagcaaccgccccuggguguccuucaaccagaaccuggacuaccagaucggguacaucugcagcggcguguucggcgacaacccccggccgaaggacggggagggcuccugcaaccccgucacgguggacggggcggacggcgugaagggguucagcuaccgcuacggcaacggcgucuggaucgggcggaccaaguccaaccgccuccggaagggcuucgagaugaucugggaccccaacggguggaccgacaccgacagcgacuucuccaugaagcaggacgugguggccaugacggacuggagcggcuacuccgggagcuucguccagcaccccgagcugaccggccuggacugcaugcgcccgugcuucuggguggagcucgugcggggccugccccgcgagaacaccaccaucuggacguccgggagcagcaucuccuucugcggcgucaacagcgagaccgccaacugguccuggcccgacggggccgagcugcccuucaccaucgacaaguga

SEQ ID NO: 79562 - RNA, 1410 nt, Artificial Sequence; identical to SEQ ID NO: 78754
  derived and/or modified CDS sequence (opt1) from neuraminidase__InfluenzaA__ABJ16744

SEQ ID NO: 79563 - RNA, 1410 nt, Artificial Sequence; identical to SEQ ID NO: 78754
  derived and/or modified CDS sequence (opt1) from neuraminidase__InfluenzaA__ABJ16755

SEQ ID NO: 79564 - RNA, 1410 nt, Artificial Sequence; identical to SEQ ID NO: 78754
  derived and/or modified CDS sequence (opt1) from neuraminidase__InfluenzaA__ABJ16766

SEQ ID NO: 79565 - RNA, 1410 nt, Artificial Sequence
  derived and/or modified CDS sequence (opt1) from neuraminidase__InfluenzaA__ABJ16777
augaaccccaaccagaagaucaucaccaucggcagcgugucccugaccaucgccacgaucugcuuccucaugcagaucgccauccuggucaccaccgugacccugcacuucaagcaguacgagugcaacagcccgcccaacaaccaggugaugcucugcgagcccacgaucaucgagcgcaacaucaccgagaucgucuaccugaccaacaccacgaucgagaaggagaucugccccaagcuggcggaguaccggaacugguccaagccgcagugcaacaucaccggguucgcccccuucagcaaggacaacuccauccgccucagcgccggcggggacaucugggugacccgggagcccuacguguccugcgaccccgacaagugcuaccaguucgcccugggccaggggaccacgcugaacaacggccacagcaacgacaccguccacgaccgcaccccguaccggacccuccugaugaacgagcugggcgugcccuuccaccucgggacgaagcaggucugcaucgccugguccagcuccagcugccacgacggcaaggcguggcugcacgugugcgugaccggggacgacgagaacgccaccgccuccuucaucuacaacggccgccugguggacagcaucggguccuggagcaagaagauccuccggacccaggaguccgagugcgucugcaucaacggcacgugcaccguggugaugaccgacggcagcgccuccgggaaggcggacaccaagauccuguucaucgaggagggcaagaucguccacacgagcagccuguccgggagcgcccagcacguggaggagugcuccugcuacccccgcuaccccggcgugcggugcgucugccgcgacaacuggaagggcagcaaccggccgaucguggacaucaacaucaaggacuacuccaucgugagcuccuacgucugcagcgggcucgugggcgacacgccccgcaagaacgacuccagcuccagcucccacugccuggaccccaacaacgaggagggcgggcacggggugaagggcugggccuucgacgacggcaacgacgucuggauggggcggaccaucagcgagaagcugcgcuccggcuacgagaccuucaaggugaucgagggguggagcaagcccaacuccaagcuccagaucaaccggcaggucaucguggaccgcggcaaccggagcggguacuccggcaucuucagcguggagggcaagagcugcaucaaccgcugcuucuacgucgagcugauccgggggcgcaagcaggagaccgaggugcuguggaccuccaacagcaucguggucuucugcggcaccuccgggaccuacggcacggggagcuggccggacggcgccgacaucaaccucaugcccaucuga

SEQ ID NO: 79566 - RNA, 1410 nt, Artificial Sequence; identical to SEQ ID NO: 78754
  derived and/or modified CDS sequence (opt1) from neuraminidase__InfluenzaA__ABJ16788

SEQ ID NO: 79567 - RNA, 1413 nt, Artificial Sequence; identical to SEQ ID NO: 78992
  derived and/or modified CDS sequence (opt1) from neuraminidase__InfluenzaA__ABJ53441

SEQ ID NO: 79568 - RNA, 1413 nt, Artificial Sequence
  derived and/or modified CDS sequence (opt1) from neuraminidase__InfluenzaA__ABJ53452
augaaccccaaccagaagaucaucaccaucggcagcaucuccaucgccaucgggaucaucagccugaugcuccagaucggcaacaucaucuccaucugggccagccacuccauccagaccgggagccagaaccacacgggcaucugcaaccagcgcaucaucaccuacgagaacuccaccugggugaaccacaccuacgucaacaucaacaacacgaacgugaucgcggggaaggacaagaccagcgugacccuggccggcaacuccagccugugcuccaucagcggcugggccaucuacaccaaggacaacuccauccggaucgggagcaagggcgacgucuucgugauccgcgagccguucaucuccugcagccaccucgagugccggacguucuuccugacccagggggcccugcucaacgacaagcacuccaacggcaccgugaaggaccgcagccccuaccgggcccugauguccugcccccugggggaggcgcccagcccguacaacagcaaguucgaguccgucgccuggagcgccuccgccugccacgacggcaugggcuggcucaccaucgggaucagcggccccgacaacggggcgguggccgugcugaaguacaacggcaucaucacggagaccaucaaguccuggaagaagcgcauccugcggacccaggagagcgagugcgucugcgugaacggcuccugcuucaccaucaugacggacgggcccagcaacggcgccgccuccuacaagaucuucaagaucgagaaggggaaggugaccaagagcaucgagcucaacgcccccaacuuccacuacgaggagugcuccugcuacccggacaccggcaccgucaugugcgugugccgcgacaacuggcacgggagcaaccggcccuggguguccuucaaccagaaccuggacuaccagaucggcuacaucugcagcggcgucuucggggacaacccccgccccaaggacggcgagggguccugcaacccggugacgguggacggcgcggacggggucaagggcuucagcuacaaguacggcaacgggguguggaucggccggaccaaguccaaccgccugcggaagggguucgagaugaucugggaccccaacggcuggaccgacaccgacagcaacuucuccgugaagcaggacgucguggccaucacggacuggagcggguacagcggcuccuucgugcagcaccccgagcucaccggccuggacugcauccgccccugcuucugggucgagcuggugcgggggcucccgcgcgagaacaccaccaucuggacgagcggcuccagcaucuccuucugcggggucaacagcgacaccgccaacugguccuggcccgacggcgccgagcugcccuucaccaucgacaaguga

SEQ ID NO: 79569 - RNA, 1410 nt, Artificial Sequence; identical to SEQ ID NO: 78736
  derived and/or modified CDS sequence (opt1) from neuraminidase__InfluenzaA__ABJ53463

SEQ ID NO: 79570 - RNA, 1410 nt, Artificial Sequence; identical to SEQ ID NO: 78736
  derived and/or modified CDS sequence (opt1) from neuraminidase__InfluenzaA__ABJ53474

SEQ ID NO: 79571 - RNA, 1410 nt, Artificial Sequence
  derived and/or modified CDS sequence (opt1) from neuraminidase__InfluenzaA__ABJ53485
augaaccccaaccagaagaucaucaccaucggcagcgugucccugaccaucagcacgaucugcuucuucaugcagaucgccauccucaucaccaccgucacccugcacuucaagcaguacgaguucaacuccccgcccaacaaccaggugaugcugugcgagcccacgaucaucgagcgcaacaucaccgagaucguguaccucaccaacaccacgaucgagaaggagaucugccccaagcuggccgaguaccggaacuggagcaagccgcagugcaacaucaccggguucgcgcccuucuccaaggacaacagcauccgccuguccgccggcggggacaucugggucacccgggagcccuacgugagcugcgaccccgacaagugcuaccaguucgcccucggccaggggaccacgcugaacaacgugcacuccaacgacaccguccacgaccgcaccccguaccggacccugcucaugaacgagcugggcgugcccuuccaccugggcacgaagcaggucugcaucgccuggagcuccagcuccugccacgacgggaaggccuggcuccacgugugcgugaccggcgacgacaagaacgcgaccgccagcuucaucuacaacgggcgccugguggacuccaucgucagcugguccaaggagauccugcggacccaggagagcgagugcgugugcaucaacggcacgugcaccguggucaugaccgacggguccgccagcggcaaggccgacaccaagauccucuucaucgaggagggcaagaucgugcacacgagcacccuguccgggagcgcgcagcacguggaggagugcuccugcuacccccgcuaccccggcguccggugcgugugccgcgacaacuggaaggggagcaaccggccgaucguggacaucaacaucaaggacuacuccaucgucagcuccuacgugugcagcggccuggugggcgacacgccccgcaagaacgacuccagcuccagcucccacugccucgaccccaacaacgaggagggcgggcacggggucaagggcugggccuucgacgacgggaacgacguguggaugggccggaccaucagcgagaagcugcgccugggcuacgagaccuucaaggucaucgaggggugguccaacagcaacuccaagcuccagaccaaccgccaggugaucguggaccggggcaaccggagcggguacuccggcaucuucagcgucgagggcaagagcugcaucaaccgcugcuucuacguggagcugauccgggggcgcaaggaggagaccgaggugcuguggaccuccaacagcaucgucguguucugcggcacguccgggaccuacggcaccgggagcuggcccgacggcgccgacaucaaccucaugccgaucuga

SEQ ID NO: 79572 - RNA, 1413 nt, Artificial Sequence; identical to SEQ ID NO: 79380
  derived and/or modified CDS sequence (opt1) from neuraminidase__InfluenzaA__ABJ53496

SEQ ID NO: 79573 - RNA, 1413 nt, Artificial Sequence; identical to SEQ ID NO: 79380
  derived and/or modified CDS sequence (opt1) from neuraminidase__InfluenzaA__ABJ53507

SEQ ID NO: 79574 - RNA, 1413 nt, Artificial Sequence
  derived and/or modified CDS sequence (opt1) from neuraminidase__InfluenzaA__ABJ53518
augaaccccaaccagaagaucaucaccaucggcagcaucuccguggccaucgggaucaucaaccugauccuccagaucggcaacaucaucagcaucugggccucccacagcauccagaccgggucccagaacuacacgggcaucugcaaccagcgcaucaucaccuacgagaaccggaccugggucaaccagaccuacgugaacaucaacaacacgaacguggucgcggggaaggacaagaccagcaugacccuggccggcaaccugucccucugcccgauccgcggcugggccaucuacaccaaggacaacagcauccggaucggguccaagggcgacguguucgugauccgcgagcccuucaucagcugcucccaccuggagugccggacguucuuccugacccagggggcccuccugaacgacaagcacagcaacggcaccaucaaggaccgcucccccuuccgggcccugaugagcugcccccucggggaggcgccgucccccuacaacagccgcuucgaguccgucgccuggagcgccuccgccugccacgacggccugggcuggcugaccaucgggaucagcggccccgacaacggggcgguggccgugcucaaguacaacggcaucaucacggagaccaucaagagcuggaagaagcagauccugcggacccaggaguccgagugcgucugcgugaacggcagcugcuucaccaucaugacggacgggcccuccaaccgcgccgccagcuaccggaucuucaagaucgagaagggccgcgugaccaaguccaucgagcuggacgccccgaacuaccacuacgaggagugcagcugcuaccccgacaccgggaccgucaugugcgugugccgggacaacuggcacggcuccaaccgccccugggugagcuucaaccagaaccucgacuaccagaucggguacaucugcuccggcgucuucggcgacaacccccggccgaaggacggggagggcagcugcaaccccgugacgguggacggggcggacggcgucaagggguucuccuaccgcuacggcaacggcguguggaucgggcggaccaagagcaaccgccugcggaagggcuucgagaugaucugggaccccaacggguggaccgacaccgacuccgacuucagcaugaagcaggacguggucgccaugacggacugguccggcuacagcggguccuucgugcagcaccccgagcugaccggccucgacugcaugcgcccgugcuucuggguggagcugguccggggccugccccgcgagaacaccaccaucuggacgagcggguccagcaucagcuucugcggcgugaacuccgagaccgccaacuggagcuggcccgacggggccgagcuccccuucaccaucgacaaguga

SEQ ID NO: 79575 - RNA, 1410 nt, Artificial Sequence; identical to SEQ ID NO: 78178
  derived and/or modified CDS sequence (opt1) from neuraminidase__InfluenzaA__ABK39965

SEQ ID NO: 79576 - RNA, 1410 nt, Artificial Sequence
  derived and/or modified CDS sequence (opt1) from neuraminidase__InfluenzaA__ABK39976
augaaccccaaccagaagaucaucaccaucggcagcgugucccugaccaucagcacgaccugcuucuucaugcagaucgccauccucaucaccaccgucacgcugcacuucaagcaguacgaguucaacuccccgcccaacaaccaggugaugcugugcgagcccaccaucaucgagcgcaacaucaccgagaucguguaccucaccaacacgaccaucgagaaggagaucugccccaagcuggccgaguaccggaacuggagcaagccgcagugcaacaucaccggguucgcgcccuucuccaaggacaacagcauccgccuguccgccggcggggacaucugggucacccgggagcccuacgugagcugcgaccccgacaagugcuaccaguucgcccucggccaggggacgacccugaacaacgugcacuccaacgacaccguccacgaccgcaccccguaccggacgcugcucaugaacgagcugggcgugcccuuccaccugggcaccaagcaggucugcaucgccuggagcuccagcuccugccacgacgggaaggccuggcuccacgugugcgugaccggcgacgacaagaacgcgaccgccagcuucaucuacaacgggcgccugguggacuccaucgucagcugguccaaggagauccugcggacgcaggagagcgagugcgugugcaucaacgggaccugcgccguggucaugaccgacggguccgccagcggcaaggcggacaccaagauccucuucaucgaggagggcaagaucgugcacacgagcacccuguccgggagcgcccagcacguggaggagugcuccugcuacccccgcuaccccggcguccggugcgugugccgcgacaacuggaaggggagcaaccggccgaucguggacaucaacaucaaggacuacuccaucgucagcuccuacgugugcagcggccuggugggcgacacgccccgcaagaacgacuccagcuccagcucccacugccucgaccccaacaacgaggagggcggccacggggucaagggcugggccuucgacgacgggaacgacguguggaugggccggaccaucagcgagaagcugcgcuccggcuacgagaccuucaaggucaucgagggguggagcaaccccaacuccaagcugcagaucaaccgccaggugaucguggaccggggcaaccggagcggguacuccggcaucuucagcgucgagggcaagagcugcaucaaccgcugcuucuacguggagcucauccgggggcgcaaggaggagaccgaggugcuguggaccuccaacagcaucgucguguucugcggcaccuccgggacguacggcaccgggagcuggccggacggcgccgacaucaaccugaugcccaucuga

SEQ ID NO: 79577 - RNA, 1410 nt, Artificial Sequence; identical to SEQ ID NO: 78736
  derived and/or modified CDS sequence (opt1) from neuraminidase__InfluenzaA__ABK39987

SEQ ID NO: 79578 - RNA, 1410 nt, Artificial Sequence; identical to SEQ ID NO: 78406
  derived and/or modified CDS sequence (opt1) from neuraminidase__InfluenzaA__ABK39998

SEQ ID NO: 79579 - RNA, 1410 nt, Artificial Sequence; identical to SEQ ID NO: 78351
  derived and/or modified CDS sequence (opt1) from neuraminidase__InfluenzaA__ABK40020

SEQ ID NO: 79580 - RNA, 1413 nt, Artificial Sequence
  derived and/or modified CDS sequence (opt1) from neuraminidase__InfluenzaA__ABK40031
augaaccccaaccagaagaucaucaccaucggcagcaucuccguggccaucgggaucaucaaccugauccuccagaucggcaacaucaucagcaucugggccucccacagcauccagaccgggucccagaacuacacgggcaucugcaaccagcgcaucaucaccuacgagaaccggaccugggucaaccagaccuacgugaacaucaacaacacgaacguggucgcggggaaggacaagaccagcaugacccuggccggcaacuccagccugugcccgauccgcggcugggccaucuacaccaaggacaacuccauccggaucgggagcaagggcgacguguucgugauccgcgagcccuucaucuccugcagccaccucgagugccggacguucuuccugacccagggggcccugcucaacgacaagcacuccaacggcaccaucaaggaccgcagccccuuccgggcccugauguccugcccccugggggaggcgccgagccccuacaacucccgcuucgagagcgucgccugguccgccagcgccugccacgacggccucggcuggcugaccaucgggaucagcggccccgacaacggggcgguggccgugcugaaguacaacggcaucaucacggagaccaucaaguccuggaagaagcagauccuccggacccaggagagcgagugcgucugcgugaacggcuccugcuucaccaucaugacggacgggcccagcaaccgcgccgccuccuaccggaucuucaagaucgagaagggccgcgugaccaagagcaucgagcuggacgccccgaacuaccacuacgaggagugcuccugcuaccccgacaccgggaccgucaugugcgugugccgggacaacuggcacggcagcaaccgccccuggguguccuucaaccagaaccuggacuaccagaucggguacaucugcagcggcgucuucggcgacaacccccggccgaaggacggggagggcuccugcaaccccgugacgguggacggggcggacggcgucaagggguucagcuaccgcuacggcaacggcguguggaucgggcggaccaaguccaaccgccuccggaagggcuucgagaugaucugggaccccaacggguggaccgacaccgacagcgacuucuccaugaagcaggacguggucgccaugacggacuggagcggcuacuccgggagcuucgugcagcaccccgagcugaccggccuggacugcaugcgcccgugcuucuggguggagcucguccggggccugccccgcgagaacaccaccaucuggacguccgggagcagcaucuccuucugcggcgugaacagcgagaccgccaacugguccuggcccgacggggccgagcugcccuucaccaucgacaaguga

SEQ ID NO: 79581 - RNA, 1413 nt, Artificial Sequence; identical to SEQ ID NO: 79580
  derived and/or modified CDS sequence (opt1) from neuraminidase__InfluenzaA__ABK40042

SEQ ID NO: 79582 - RNA, 1413 nt, Artificial Sequence; identical to SEQ ID NO: 79580
  derived and/or modified CDS sequence (opt1) from neuraminidase__InfluenzaA__ABK40053

SEQ ID NO: 79583 - RNA, 1410 nt, Artificial Sequence; identical to SEQ ID NO: 78754
  derived and/or modified CDS sequence (opt1) from neuraminidase__InfluenzaA__ABK40064

SEQ ID NO: 79584 - RNA, 1410 nt, Artificial Sequence; identical to SEQ ID NO: 78754
  derived and/or modified CDS sequence (opt1) from neuraminidase__InfluenzaA__ABK40078

SEQ ID NO: 79585 - RNA, 1413 nt, Artificial Sequence; identical to SEQ ID NO: 79083
  derived and/or modified CDS sequence (opt1) from neuraminidase__InfluenzaA__ABK40513

SEQ ID NO: 79586 - RNA, 1413 nt, Artificial Sequence; identical to SEQ ID NO: 79083
  derived and/or modified CDS sequence (opt1) from neuraminidase__InfluenzaA__ABK40538

SEQ ID NO: 79587 - RNA, 1413 nt, Artificial Sequence
  derived and/or modified CDS sequence (opt1) from neuraminidase__InfluenzaA__ABK40549
augaaccccaaccagaagaucaucaccaucggcagcaucugcaugaccaucgggaucaucucccugauccuccagaucggcaacaucaucagcaucugggugucccacagcauccagacggggucccagaaccacaccggcaucugcaaccagcgcaucaucaccuacgagaacagcaccugggucaaccagacguacgugaacaucaacaacaccaacguggucgccgggaaggacaccaccuccgugacgcuggccggcaacagcucccugugcccgauccggggcugggcgaucuacagcaaggacaacuccauccgcaucgggagcaagggcgacguguucgucauccgggagcccuucaucuccugcagccaccucgagugccgcaccuucuuccugacccagggggcccugcucaacgacaagcacuccaacggcaccgugaaggaccggagccccuaccgcgcccugauguccugccccaucggggaggccccgagccccuacaacucccgguucgagagcguggccuggagcgcguccgccugccacgacggcaugggcuggcugacgaucgggaucagcggccccgacgacggggccgucgccgugcucaaguacaacggcaucaucaccgagaccaucaaguccuggcgcaagcggauccugcgcacccaggagagcgagugcgugugcgucaacggcuccugcuucacgaucaugaccgacgggcccagcaacggcccggcguccuaccggaucuucaagaucgagaaggggaagaucaccaagagcaucgagcuggacgcccccaacucccacuacgaggagugcagcugcuaccccgacaccggcacggugaugugcgugugccgcgacaacuggcacggguccaaccggcccugggucagcuucaaccagaaccucgacuacaagaucggcuacaucugcuccggcguguucggggacaacccgcgccccaaggacggcaaggggagcugcgaccccgugaccgucgacggcgccgacggggugaagggcuucuccuaccgguacggcaacgggguguggaucggccgcaccaagagcaacuccagccggaagggguucgagaugaucugggaccccaacggcuggaccgacacggacuccaacuuccuggucaagcaggacgugguggccaugaccgacuggagcggguacagcggcuccuucguccagcacccggagcugaccggccucgacugcaugcgccccugcuucuggguggagcugauccgggggcgcccccgggagaagaccacgaucuggaccagcggcuccagcaucuccuucugcggggucaacagcgacaccgccaacugguccuggcccgacggcgcggagcugccguucaccaucgacaaguga

SEQ ID NO: 79588 - RNA, 1413 nt, Artificial Sequence; identical to SEQ ID NO: 79083
  derived and/or modified CDS sequence (opt1) from neuraminidase__InfluenzaA__ABK40560

SEQ ID NO: 79589 - RNA, 1413 nt, Artificial Sequence; identical to SEQ ID NO: 79083
  derived and/or modified CDS sequence (opt1) from neuraminidase__InfluenzaA__ABK40571

SEQ ID NO: 79590 - RNA, 1413 nt, Artificial Sequence; identical to SEQ ID NO: 79083
  derived and/or modified CDS sequence (opt1) from neuraminidase__InfluenzaA__ABK40582

SEQ ID NO: 79591 - RNA, 1413 nt, Artificial Sequence
  derived and/or modified CDS sequence (opt1) from neuraminidase__InfluenzaA__ABK40593
augaaccccaaccagaagaucaucaccaucggcagcaucugcaugaccaucgggaucaucucccugauccuccagaucggcaacaucaucagcaucugggugucccacagcauccagacggggucccagaaccacaccggcaucugcaaccagcgcaucaucaccuacgagaacagcaccugggucaaccagacguacgugaacaucaacaacaccaacguggucgccgggaaggacaccaccuccgugacgcuggccggcaacagcucccugugcccgauccggggcugggcgaucuacagcaaggacaacuccauccgcaucgggagcaagggcgacguguucgucauccgggagcccuucaucuccugcagccaccucgagugccgcaccuucuuccugacccagggggcccugcucaacgacaagcacuccaacggcaccgugaaggaccggagccccuaccgcgcccugauguccugccccaucggggaggccccgagccccuacaacucccgguucgagagcguggccuggagcgcguccgccugccacgacggcaugggcuggcugacgaucgggaucagcggccccgacgacggggccgucgccgugcucaaguacaacggcaucaucaccgagaccaucaaguccuggcgcaagcggauccugcgcacccaggagagcgagugcgugugcgucaacggcuccugcuucacgaucaugaccgacgggcccagcaacggcccggcgucccaccggaucuucaagaucgagaaggggaagaucaccaagagcaucgagcuggacgcccccaacucccacuacgaggagugcagcugcuaccccgacaccggcacggugaugugcgugugccgcgacaacuggcacggguccaaccggcccugggucagcuucaaccagaaccucgacuacaagaucggcuacaucugcuccggcguguucggggacaacccgcgccccaaggacggcaaggggagcugcgaccccgugaccgucgacggcgccgacggggugaagggcuucuccuaccgguacggcaacgggguguggaucggccgcaccaagagcaacuccagccggaagggguucgagaugaucugggaccccaacggcuggaccgacacggacuccaacuuccuggucaagcaggacgugguggccaugaccgacuggagcggguacagcggcuccuucguccagcacccggagcugaccggccucgacugcaugcgccccugcuucuggguggagcugauccgggggcgcccccgggagaagaccacgaucuggaccagcggcuccagcaucuccuucugcggggucaacagcgacaccgccaacugguccuggcccgacggcgcggagcugccguucaccaucgacaaguga

SEQ ID NO: 79592 - RNA, 1413 nt, Artificial Sequence; identical to SEQ ID NO: 79083
  derived and/or modified CDS sequence (opt1) from neuraminidase__InfluenzaA__ABK40604

SEQ ID NO: 79593 - RNA, 1410 nt, Artificial Sequence; identical to SEQ ID NO: 78754
  derived and/or modified CDS sequence (opt1) from neuraminidase__InfluenzaA__ABK40615

SEQ ID NO: 79594 - RNA, 1410 nt, Artificial Sequence; identical to SEQ ID NO: 78085
  derived and/or modified CDS sequence (opt1) from neuraminidase__InfluenzaA__ABK40626

SEQ ID NO: 79595 - RNA, 1410 nt, Artificial Sequence
  derived and/or modified CDS sequence (opt1) from neuraminidase__InfluenzaA__ABK40648
augaaccccaaccagaagaucaucaccaucggcagcgugucccugaccaucgccacgaucugcuuccucaugcagaucgccauccuggucaccaccgugacccugcacuucaagcaguacgagugcaacagcccgcccaacaaccaggugaugcucugcgagcccacgaucaucgagcgcaacaucaccgagaucgucuaccugaccaacaccacgaucgagaaggagaucugccccaagcuggcggaguaccggaacugguccaagccgcagugcaagaucaccggguucgcccccuucagcaaggacaacuccauccgccucagcgccggcggggacaucugggugacccgggagcccuacguguccugcgaccccggcaagugcuaccaguucgcccuggggcagggcaccacgcugaacaaccgccacagcaacgacaccguccacgaccggaccccguaccgcacccuccugaugaacgagcugggcauccccuuccaccucgggacgaagcaggucugcaucgccugguccagcuccagcugccacgacggcaaggcguggcugcacgugugcgugaccgggcacgacgagaacgccaccgccuccuucaucuacgacggccggcugguggacagcaucggguccuggagcaagaacauccuccgcacccaggaguccgagugcgugugcaucaacggcacgugcaccgucgugaugaccgacggcagcgccuccgaccgggcggacaccaagauccuguucaucgaggaggggaagaucgugcacaucagcccccugagcggcuccgcccagcacgucgaggagugcagcugcuacccccgcuacccgggggugcggugcgugugccgcgacaacuggaagggcuccaaccggcccaucgucgacaucaacgugaaggacuacagcaucguguccagcuacgucugcuccggccucgugggggacacgccccgcaagaacgacagcuccagcuccagcuacugcuggaaccccaacaacgagaagggcgggcacggcgugaaggggugggccuucgacgacggcaacgacgucuggaugggccggaccaucuccgaggagagccgcuccggguacgagaccuucaaggugaucggcggguggagcaagccgaacuccaagcugcagaucaaccggcaggucaucguggaccgcggcaaccggagcggguacuccggcaucuucagcguggagggcaagagcugcaucaaccgcugcuucuacgucgagcugauccgggggcgcaagcaggagaccgaggugugguggacguccaacagcaucguggucuucugcggcaccuccgggaccuacggcaccgggagcuggcccgacggcgccgacaucaaccucaugcccaucuga

SEQ ID NO: 79596 - RNA, 1410 nt, Artificial Sequence; identical to SEQ ID NO: 79137
  derived and/or modified CDS sequence (opt1) from neuraminidase__InfluenzaA__ABK40659

SEQ ID NO: 79597 - RNA, 1410 nt, Artificial Sequence; identical to SEQ ID NO: 79125
  derived and/or modified CDS sequence (opt1) from neuraminidase__InfluenzaA__ABK40681

SEQ ID NO: 79598 - RNA, 1413 nt, Artificial Sequence
  derived and/or modified CDS sequence (opt1) from neuraminidase__InfluenzaA__ABK40692
augaaccccaaccagaagaucaucaccaucggcagcaucuccaucgccaucgggaucaucagccugaugcuccagaucggcaacaucaucuccaucugggccagccacuccauccagaccgggagccagaaccacacgggcaucugcaaccagcgcaucaucaccuacgagaacuccaccugggugaaccacaccuacgucaacaucaacaacacgaacgugguggcggggaaggacaagaccagcgucacccuggccggcaacuccagccugugcuccaucagcggcugggccaucuacaccaaggacaacuccauccggaucgggagcaagggcgacguguucgugauccgcgagccguucaucuccugcagccaccucgagugccggacguucuuccugacccagggggcccugcucaacgacaagcacuccaacggcaccgucaaggaccgcagccccuaccgggcccugauguccugcccccugggggaggcgcccagcccguacaacagcaaguucgaguccguggccuggagcgccuccgccugccacgacggcaugggcuggcucaccaucgggaucagcggccccgacaacggggcgguggccguccugaaguacaacggcaucaucacggagaccaucaaguccugggagaagcgcauccugcggacccaggagagcgagugcgugugcgugaacggcuccugcuucaccaucaugacggacgggcccagcaacggcgccgccuccuacaagaucuucaagaucgagaaggggaaggucaccaagagcguggagcucaacgcccccaacuuccacuacgaggagugcuccugcuacccggacaccggcaccgugaugugcgucugccgcgacaacuggcacgggagcaaccggcccuggguguccuucaaccagaaccuggacuaccagaucggcuacaucugcagcggcguguucggggacaacccccgccccaaggacggcaagggguccugcaacccggucacgguggacggcgcggacggggugaagggcuucagcuacaaguacggcaacggggucuggaucggccggaccaaguccaaccgccugcggaagggguucgagaugaucugggaccccaacggcuggaccgacaccgacagcgacuucuccgugaagcaggacguggucgccaucacggacuggagcggguacagcggcuccuucgugcagcaccccgagcucaccggccuggacugcauccgccccugcuucugggucgagcuggugcgggggcucccgcgcgagaacaccaccaucuggacgagcggcuccagcaucuccuucugcgggguggacagcgacaccgccaacugguccuggcccgacggcgccgagcugcccuucaccaucgacaaguga

SEQ ID NO: 79599 - RNA, 1410 nt, Artificial Sequence; identical to SEQ ID NO: 78754
  derived and/or modified CDS sequence (opt1) from neuraminidase__InfluenzaA__ABK40703

SEQ ID NO: 79600 - RNA, 1410 nt, Artificial Sequence; identical to SEQ ID NO: 78754
  derived and/or modified CDS sequence (opt1) from neuraminidase__InfluenzaA__ABK40714

SEQ ID NO: 79601 - RNA, 1410 nt, Artificial Sequence; identical to SEQ ID NO: 78754
  derived and/or modified CDS sequence (opt1) from neuraminidase__InfluenzaA__ABK40725

SEQ ID NO: 79602 - RNA, 1410 nt, Artificial Sequence; identical to SEQ ID NO: 78754
  derived and/or modified CDS sequence (opt1) from neuraminidase__InfluenzaA__ABK40736

SEQ ID NO: 79603 - RNA, 1410 nt, Artificial Sequence; identical to SEQ ID NO: 79469
  derived and/or modified CDS sequence (opt1) from neuraminidase__InfluenzaA__ABK40747

SEQ ID NO: 79604 - RNA, 1413 nt, Artificial Sequence; identical to SEQ ID NO: 78975
  derived and/or modified CDS sequence (opt1) from neuraminidase__InfluenzaA__ABK79951

SEQ ID NO: 79605 - RNA, 1413 nt, Artificial Sequence; identical to SEQ ID NO: 79580
  derived and/or modified CDS sequence (opt1) from neuraminidase__InfluenzaA__ABK79973

SEQ ID NO: 79606 - RNA, 1410 nt, Artificial Sequence; identical to SEQ ID NO: 78754
  derived and/or modified CDS sequence (opt1) from neuraminidase__InfluenzaA__ABK79984

SEQ ID NO: 79607 - RNA, 1410 nt, Artificial Sequence; identical to SEQ ID NO: 78754
  derived and/or modified CDS sequence (opt1) from neuraminidase__InfluenzaA__ABK79995

SEQ ID NO: 79608 - RNA, 1413 nt, Artificial Sequence; identical to SEQ ID NO: 79083
  derived and/or modified CDS sequence (opt1) from neuraminidase__InfluenzaA__ABK80028

SEQ ID NO: 79609 - RNA, 1413 nt, Artificial Sequence; identical to SEQ ID NO: 79083
  derived and/or modified CDS sequence (opt1) from neuraminidase__InfluenzaA__ABK80039

SEQ ID NO: 79610 - RNA, 1413 nt, Artificial Sequence; identical to SEQ ID NO: 79083
  derived and/or modified CDS sequence (opt1) from neuraminidase__InfluenzaA__ABK80050

SEQ ID NO: 79611 - RNA, 1410 nt, Artificial Sequence
  derived and/or modified CDS sequence (opt1) from neuraminidase__InfluenzaA__ABK80061
augaaccccaaccagaagaucaucaccaucggcagcgugucccugaccaucgccacgaucugcuuccucaugcagaucgccauccuggucaccaccgugacccugcacuucaagcaguacgagugcaacagcccgcccaacaaccaggugaugcucugcgagcccacgaucaucgagcgcaacaucaccgagaucgucuaccugaccaacaccacgaucgagaaggagaucugccccaagcuggcggaguaccggaacugguccaagccgcagugcaacaucaccggguucgcccccuucagcaaggacaacuccauccgccucagcgccggcggggacaucugggugacccgggagcccuacguguccugcgaccccgacaagugcuaccaguucgcccugggccaggggaccacgcugaacaacggccacagcaacgacaccguccacgaccgcaccccguaccggacccuccugaugaacgagcugggcgugcccuuccaccucgggacgaagcaggucugcaucgccugguccagcuccagcugccacgacggcaaggcguggcugcacgugugcgugaccggggacgacgagaacgccaccgccuccuucaucuacaacggccgccugguggacagcaucggguccuggagcaagaagauccuccggacccaggaguccgagugcgucugcaucaacggcacgugcaccguggugaugaccgacggcagcgccuccgggaaggcggacaccaagauccuguucaucgaggagggcaagaucguccacacgagcagccuguccgggagcgcccagcacguggaggagugcuccugcuacccccgcuaccccggcgugcggugcgucugccgcgacaacuggaagggcagcaaccggccgaucguggacaucaacgugaaggacuacuccaucgucagcuccuacgugugcagcgggcucgugggcgacacgccccgcaagaacgacuccagcuccagcucccacugccuggaccccaacaacgaggagggcgggcacggggucaagggcugggccuucgacgacggcaacgacguguggauggggcggaccaucagcgagaagucccgcagcggcuacgagaccuucaaggucaucgaggggugguccaagcccaacagcaagcugcagaucaaccgccaggugaucguggaccggggcaaccgguccggguacagcggcaucuucagcgucgagggcaaguccugcaucaaccgcugcuucuacguggagcucauccgggggcgcaagcaggagaccgaggugcuguggaccagcaacuccaucgucguguucugcggcaccagcgggaccuacggcacgggguccuggccggacggcgccgacaucaaccugaugcccaucuga

SEQ ID NO: 79612 - RNA, 1410 nt, Artificial Sequence; identical to SEQ ID NO: 78085
  derived and/or modified CDS sequence (opt1) from neuraminidase__InfluenzaA__ABK80072

SEQ ID NO: 79613 - RNA, 1410 nt, Artificial Sequence
  derived and/or modified CDS sequence (opt1) from neuraminidase__InfluenzaA__ABK80083
augaaccccaaccagaagaucaucaccaucggcagcgugucccugaccaucgccacgaucugcuuccucaugcagaucgccauccuggucaccaccgugacccugcacuucaagcaguacgagugcagcuccccgcccaacaaccaggugaugcucugcgagcccacgaucaucgagcgcaacaucaccgagaucgucuaccugaccaacaccacgaucgagaaggagaucugccccaagcuggcggaguaccggaacuggagcaagccgcagugcaacaucaccggguucgcccccuucuccaaggacaacagcauccgccucuccgccggcggggacaucugggugacccgggagcccuacgugagcugcgaccccgacaagugcuaccaguucgcccugggccaggggaccacgcugaacaacggccacuccaacgacaccguccacgaccgcaccccguaccggacccuccugaugaacgagcugggcgugcccuuccaccucgggacgaagcaggucugcaucgccuggagcuccagcuccugccacgacggcaaggcguggcugcacgugugcgugaccggggacgacgagaacgccaccgccagcuucaucuacaacggccgccugguggacuccaucgggagcugguccaagaagauccuccggacccaggagagcgagugcgucugcaucaacggcacgugcaccguggugaugaccgacggcuccgccagcgggaaggcggacaccaagauccuguucaucgaggagggcaagaucguccacacgagccugcucuccgggagcgcccagcacguggaggagugcuccugcuacccccgcuaccccggcgugcggugcgucugccgcgacaacuggaagggcagcaaccggccgaucguggacaucaacgugaaggacuacuccaucgucagcuccuacgugugcagcgggcuggugggcgacacgccccgcaagaacgacuccagcuccagcucccacugccuggaccccaacaacgaggagggcgggcacggggucaagggcugggccuucgacgacggcaacgacguguggauggggcggaccaucagcgagaagcuccgcuccggcuacgagaccuucaaggucaucgagggguggagcaagcccaacuccaagcugcagaucaaccgccaggugaucguggaccggggcaaccggagcggguacuccggcaucuucagcgucgagggcaagagcugcaucaaccgcugcuucuacguggagcugauccgggggcgcaagcaggagaccgaggugcucuggaccuccaacagcaucgucguguucugcggcaccuccgggaccuacggcacggggagcuggccggacggcgccgacaucaaccugaugcccaucuga

SEQ ID NO: 79614 - RNA, 1410 nt, Artificial Sequence
  derived and/or modified CDS sequence (opt1) from neuraminidase__InfluenzaA__ABK80094
augaaccccaaccagaagaucaucaccaucggcagcgugucccugaucaucgccaccaucugcuuccucaugcagaucgccauccuggucacgaccgugacccugcacuucaagcaguacgagugcaacagcccgcccaacaaccaggugaugcucugcgagcccaccaucaucgagcgcaacaucacggagaucgucuaccugaccaacaccaccaucgagaaggagaucugccccaagcuggcggaguaccggaacugguccaagccgcagugcaacaucacgggguucgcccccuucagcaaggacaacuccauccgccucagcgccggcggggacaucugggugacccgggagcccuacguguccugcgaccccgacaagugcuaccaguucgcccugggccaggggaccacccugaacaacggccacagcaacgacacgguccacgaccgcaccccguaccggacccuccugaugaacgagcugggcgugcccuuccaccucgggaccaagcaggucugcaucgccugguccagcuccagcugccacgacggcaaggcguggcugcacgugugcgugacgggggacgacgagaacgccaccgccuccuucaucuacaacggccgccugguggacagcaucggguccuggagcaagaagauccuccggacccaggaguccgagugcgucugcaucaacgggaccugcacgguggugaugaccgacggcagcgccuccgggaaggcggacaccaagauccuguucaucgaggagggcaagaucguccacaccagcagccuguccgggagcgcccagcacguggaggagugcuccugcuacccccgcuaccccggcgugcggugcgucugccgcgacaacuggaagggcagcaaccggccgaucguggacaucaacgugaaggacuacuccaucgucagcuccuacgugugcagcgggcucgugggcgacacgccccgcaagaacgacuccagcuccagcucccacugccuggaccccaacaacgaggagggcggccacggggucaagggcugggccuucgacgacggcaacgacguguggauggggcggaccaucagcgagaagcugcgcuccggcuacgagaccuucaaggucaucgagggguggagcaagcccaacuccaagcuccagaucaaccgccaggugaucguggaccggggcaaccggagcggguacuccggcaucuucagcgucgagagcaaguccugcaucaaccgcugcuucuacguggagcugauccggggccgcaagcaggagaccgaggugcuguggacgagcaacuccaucgucguguucugcgggaccagcggcaccuacgggaccggcuccuggccggacggggccgacaucaaccucaugcccaucuga

SEQ ID NO: 79615 - RNA, 1410 nt, Artificial Sequence; identical to SEQ ID NO: 78754
  derived and/or modified CDS sequence (opt1) from neuraminidase__InfluenzaA__ABK80105

SEQ ID NO: 79616 - RNA, 1410 nt, Artificial Sequence
  derived and/or modified CDS sequence (opt1) from neuraminidase__InfluenzaA__ABK80138
augaaccccaaccagaagaucaucaccaucggcagcgugucccugaccaucgccacgaucugcuuccucaugcagaccgccauccuggucaccaccgugacgcugcacuucaagcaguacgagugcaacagcccgcccaacaaccaggugaugcucugcgagcccaccaucaucgagcgcaacaucaccgagaucgucuaccugaccaacacgaccaucgagaaggagaucugccccaagcuggcggaguaccggaacugguccaagccgcagugcaacaucaccggguucgcccccuucagcaaggacaacuccauccgccucagcgccggcggggacaucugggugacccgggagcccuacguguccugcgaccccgacaagugcuaccaguucgcccugggccaggggacgacccugaacaacggccacagcaacgacaccguccacgaccgcaccccguaccggacgcuccugaugaacgagcugggcgugcccuuccaccucgggacccgccaggugugcaucgccugguccagcuccagcugccacgacggcaaggcguggcugcacgucugcgugaccggggacgacgagaacgccaccgccuccuucaucuacaacggccggcugguggacagcaucggguccuggagcaagaagauccuccgcacgcaggaguccgagugcgucugcaucaacgggaccugcaccguggugaugaccgacggcagcgccuccgggaaggcggacacgaagauccuguucaucgaggagggcaagaucguccacaucagcacccugagcggguccgcccagcacguggaggagugcagcugcuacccccgguaccccggcgugcgcugcgucugccgggacaacuggaagggcuccaaccgcccgaucguggacaucaacgugaaggacuacagcaucgucuccagcuacgugugcuccgggcucgugggcgacacgccccggaagaacgacagcuucuccagcucccacugccuggaccccaacaacgaggagggcggccacggggucaagggcugggccuucgacgacggcaacgacguguggauggggcgcaccaucagcgagaagcugcgguccggcuacgagaccuucaaggucaucgagggguggagcaagcccaacuccaagcuccagaucaaccgccaggugaucguggagcggggcaaccgcagcggguacuccggcaucuucagcgucgagggcaaguccugcaucaaccggugcuucuacguggagcugauccgcgggcggaaggaggagaccgaggugugguggaccagcaacagcaucgucguguucugcggcaccuccgggacguacggcaccgggagcuggccggacggcgccgacaucaaccugaugcccaucuga

SEQ ID NO: 79617 - RNA, 1410 nt, Artificial Sequence
  derived and/or modified CDS sequence (opt1) from neuraminidase__InfluenzaA__ABK80149
augaaccccaaccagaagaucaucaccaucggcagcgugucccugaccaucgccacgaucugcuuccucaugcagaucgccauccuggucaccaccgugacccugcacuucaagcaguacgagugcaacagcccgcccaacaaccaggcgaugcucuacgagcccacgaucaucgagcgcaacaucaccgagaucguguaccugaccaacaccacgaucgagaaggagaucugccccaagcuggccgaguaccggaacugguccaagccgcagugcaacaucaccggguucgcccccuucagcaaggacaacuccauccgccucagcgccggcggggacaucugggucacccgggagcccuacguguccugcgaccccgacaagugcuaccaguucgcccugggccaggggaccacgcugaacaacggccacagcaacgacaccgugcacgaccgcaccccguaccggacccuccugaugaacgagcugggcguccccuuccaccucgggacgcgccaggugugcaucgcgugguccagcuccagcugccacgacggcaaggccuggcugcacgugugcgucaccggggacgacgagaacgccaccgccuccuucaucuacaacggccggcugguggacagcaucggguccuggagcaagaagauccuccgcacccaggaguccgagugcgugugcaucaacggcacgugcaccgucgugaugaccgacggcagcgcguccgggaaggccgacaccaagauccuguucaucgaggagggcaagaucgugcacaucagcacgcugagcggguccgcccagcacgucgaggagugcagcugcuacccccgguaccccggcgugcgcugcgugugccgggacaacuggaagggcuccaaccgcccgaucgucgacaucaacgugaaggacuacagcaucguguccagcuacgucugcuccgggcucgugggcgacacgccccggaagaacgacagcuucuccagcucccacugccuggaccccaacaacgaggagggcgggcacggggugaagggcugggccuucgacgacggcaacgacgucuggauggggcgcaccaucagcgagaagcugcgguccggcuacgagaccuucaaggugaucgagggguggagcaagcccaacuccaagcuccagaucaaccgccaggucaucguggagcggggcaaccgcagcggguacuccggcaucuucagcguggagggcaaguccugcaucaaccggugcuucuacgucgagcugauccgcgggcggaaggaggagaccgaggugugguggaccagcaacagcaucguggucuucugcggcaccuccgggaccuacggcacggggagcuggccggacggcgccgacaucaaccugaugcccaucuga

SEQ ID NO: 79618 - RNA, 1410 nt, Artificial Sequence; identical to SEQ ID NO: 79617
  derived and/or modified CDS sequence (opt1) from neuraminidase__InfluenzaA__ABK80160

SEQ ID NO: 79619 - RNA, 1410 nt, Artificial Sequence
  derived and/or modified CDS sequence (opt1) from neuraminidase__InfluenzaA__ABK80171
augaaccccaaccagaagaucaucaccaucggcagcgugucccugaccaucgccacgaucugcuuccucaugcagaucgccauccuggucaccaccgugacccugcacuucaagcaguacgagugcaacccgccgcccaacaaccaggugaugcucugcgagcccacgaucaucgagcgcaacaucaccgagaucgucuaccugaccaacaccacgaucgagaaggagaucugccccaagcuggcggaguaccggaacuggagcaagccccagugcaacaucaccggguucgcccccuucuccaaggacaacagcauccgccucuccgccggcggggacaucugggugacccgggagcccuacgugagcugcgacccggacaagugcuaccaguucgcccugggccaggggaccacgcugaacaacggccacuccaacgacaccguccacgaccgcacccccuaccggacccuccugaugaacgagcugggcgugcccuuccaccucgggacgcgccaggugugcaucgccuggagcuccagcuccugccacgacggcaaggcguggcugcacgucugcgugaccggggacgacgagaacgccaccgccagcuucaucuacaacggccggcugguggacuccaucgggagcugguccaagaagauccuccgcacccaggagagcgagugcgucugcaucaacggcacgugcaccguggugaugaccgacggcuccgccagcgggaaggcggacaccaagauccuguucaucgaggagggcaagaucguccacaucuccacgcugagcgggagcgcccagcacguggaggagugcuccugcuacccccgguacccgggcgugcgcugcgucugccgggacaacuggaagggcagcaaccgccccaucguggacaucaacgugaaggacuacuccaucuucagcuccuacgucugcagcgggcucgugggcgacacgccccggaagaacgacuccuucagcuccagccacugccuggaccccaacaacgaggagggcgggcacggggugaagggcugggccuucgacgacggcaacgacgucuggauggggcgcaccaucuccgagaagcugcggagcggcuacgagaccuucaaggugaucgaggggugguccaagccgaacagcaagcuccagaccaaccgccaggucaucguggagcggggcaaccgcuccggguacagcggcaucuucuccguggagggcaagagcugcaucaaccggugcuucuacgucgagcugauccgcgggcggaaggaggagaccgaggugugguggaccuccaacagcaucguggucuucugcggcaccagcgggacguacggcaccggguccuggcccgacggcgccgacaucaaccugaugcccaucuga

SEQ ID NO: 79620 - RNA, 1410 nt, Artificial Sequence
  derived and/or modified CDS sequence (opt1) from neuraminidase__InfluenzaA__ABK80182
augaaccccaaccagaagaucaucaccaucggcagcgugucccugaccaucgccacgaucugcuuccucaugcagaucgccauccuggucaccaccgugacccugcacuucaagcaguacgagugcaacagcccgcccaacaaccaggugaugcucugcgagcccacgaucaucgagcgcaacaucaccgagaucgucuaccugaccaacaccacgaucgagaaggagaucugccccaagcuggcggaguaccggaacugguccaagccgcagugcaacaucaccggguucgcccccuucagcaaggacaacuccauccgccucagcgccggcggggacaucugggugacccgggagcccuacguguccugcgaccccgacaagugcuaccaguucgcccugggccaggggaccacgcugaacaacggccacagcaacgacaccguccacgaccgcaccccguaccggacccuccugaugaacgagcugggcgugcccuuccaccucgggacgcgccaggugugcaucgccugguccagcuccagcugccacgacggcaaggcguggcugcacgucugcgugaccggggacgacaagaacgccaccgccuccuucaucuacaacggcaagcugguggacagcaucggguccuggagcaagaagauccuccggacccaggaguccgagugcgucugcaucaacggcacgugcgccguggugaugaccgacggcagcgcguccgggaaggccgacaccaagauccuguucaucgaggagggcaagaucguccacaucagcacccugagcggguccgcccagcacguggaggagugcagcugcuacccccgcuaccccggcgugcggugcgucugccgcgacaacuggaagggcuccaaccggccgaucguggacaucaacgugaaggacuacagcaucgucuccagcuacgugugcuccgggcucgugggcgacacgccccgcaagaacgacagcuucuccagcucccacugccuggaccccaacaacgaggagggcgggcacggggucaagggcugggccuucgacgacggcaacgacguguggauggggcggaccaucagcgagaagcugcgcuccggcuacgagaccuucaaggucaucgagggguggagcaagcccaacuccaagcuccagaccaaccgccaggugaucguggagcggggcaaccggagcggguacuccggcaucuucagcgucgagggcaaguccugcaucaaccgcugcuucuacguggagcugauccgggggcgcaaggaggagacggaggugugguggaccagcaacagcaucgucguguucugcggcaccuccgggaccuacggcacggggagcuggccggacggcgccgacaucaaccugaugcccaucuga

SEQ ID NO: 79621 - RNA, 1410 nt, Artificial Sequence
  derived and/or modified CDS sequence (opt1) from neuraminidase__InfluenzaA__ABK80193
augaaccccaaccagaagaucaucaccaucggcagcgugucccugaccaucgccacgaucugcuuccucaugcagaucgccauccuggucaccaccgugacccugcacuucaagcaguacgagugcaacagcccgcccaacaaccaggugaugcucugcgagcccacgaucaucgagcgcaacaucaccgagaucgucuaccugaccaacaccacgaucgagaaggagaucugccccaagcuggcggaguaccggaacugguccaagccgcagugcaacaucaccggguucgcccccuucagcaaggacaacuccauccgccucagcgccggcggggacaucugggugacccgggagcccuacguguccugcgaccccgacaagugcuaccaguucgcccugggccaggggaccacgcugaacaacggccacagcaacgacaccguccacgaccgcaccccguaccggacccuccugaugaacgagcugggcgugcccuuccaccucgggacgcgccaggugugcaucgccugguccagcuccagcugccacgacggcaaggcguggcugcacgucugcgugaccggggacgacgagaacgccaccgccuccuucaucuacaacggccggcugguggacagcaucggguccuggagcaagaagauccuccgcacccaggaguccgagugcgucugcaucaacggcacgugcaccguggugaugaccgacggcagcgccuccgggaaggcggacaccaagauccuguucaucgaggagggcaagaucguccacaucagcacgcugagcggguccgcccagcacguggaggagugcagcugcuacccccgguaccccggcgugcgcugcgucugccgggacaacuggaagggcuccaaccgcccgaucguggacaucaacgugaaggacuacagcaucgucuccagcuacgugugcuccgggcucgugggcgacacgccccggaagaacgacagcuucuccagcucccacugccuggaccccaacaacgaggagggcgggcacggggucaagggcugggccuucgacgacggcaacgacguguggauggggcgcaccaucggcgagaagcugcggagcggguacgagaccuucaaggucaucgagggcugguccaagcccaacagcaagcuccagaccaaccgccaggugaucguggagcgggggaaccgcuccggcuacagcggcaucuucuccgucgagggcaagagcugcaucaaccggugcuucuacguggagcugauccgcgggcggaaggaggagaccgaggugugguggaccuccaacagcaucgucguguucugcgggaccagcggcacguacgggaccggcuccuggccggacggcgccgacaucaaccugaugcccaucuga

SEQ ID NO: 79622 - RNA, 1410 nt, Artificial Sequence
  derived and/or modified CDS sequence (opt1) from neuraminidase__InfluenzaA__ABK80204
augaaccccaaccagaagaucaucaccaucggcagcgugucccugaccaucgccacgaucugcuuccucaugcagaucgccauccuggucaccaccgugacccugcacuucaagcaguacgagugcaacagcccgcccaacaaccaggugaugcucugcgagcccacgaucaucgagcgcaacaucaccgagaucgucuaccugaccaacaccacgaucgagaaggagaucugccccaagcuggcggaguaccggaacugguccaagccgcagugcaacaucaccggguucgcccccuucagcaaggacaacuccauccgccucagcgccggcggggacaucugggugacccgggagcccuacguguccugcgaccccgacaagugcuaccaguucgcccugggccaggggaccacgcugaacaacggccacagcaacgacaccguccacgaccgcaccccguaccggacccuccugaugaacgagcugggcgugcccuuccaccucgggacgcgccaggugugcaucgccugguccagcuccagcugccacgacggcaaggcguggcugcacgucugcgugaccggggacgacgagaacgccaccgccuccuucaucuacaacggcaagcugguggacagcaucggguccuggagcaagaagauccuccggacccaggaguccgagugcgucugcaucaacggcacgugcgccguggugaugaccgacggcagcgcguccgggaaggccgacaccaagauccuguucaucgaggagggcaagaucguccacaucagcacccugagcggguccgcccagcacguggaggagugcagcugcuacccccgcuaccccggcgugcggugcgucugccgcgacaacuggaagggcuccaaccggccgaucguggacaucaacgugaaggacuacagcaucgucuccagcuacgugugcuccgggcucgugggcgacacgccccgcaagaacgacagcuucuccagcucccacugccuggaccccaacaacgaggagggcgggcacggggucaagggcugggccuucgacgacggcaacgacgccuggauggggcggaccaucagcgagaagcugcgcuccggcuacgagaccuucaaggugaucgagggguggagcaagcccaacuccaagcuccagaccaaccggcaggucaucguggagcgcggcaaccggagcggguacuccggcaucuucagcguggagggcaaguccugcaucaaccgcugcuucuacgucgagcugauccgggggcgcaaggaggagacggaggugugguggaccagcaacagcaucguggucuucugcggcaccuccgggaccuacggcacggggagcuggccggacggcgcggacaucaaccugaugcccaucuga

SEQ ID NO: 79623 - RNA, 1410 nt, Artificial Sequence; identical to SEQ ID NO: 78615
  derived and/or modified CDS sequence (opt1) from neuraminidase__InfluenzaA__ABK80215

SEQ ID NO: 79624 - RNA, 1410 nt, Artificial Sequence; identical to SEQ ID NO: 78615
  derived and/or modified CDS sequence (opt1) from neuraminidase__InfluenzaA__ABK80226

SEQ ID NO: 79625 - RNA, 1410 nt, Artificial Sequence
  derived and/or modified CDS sequence (opt1) from neuraminidase__InfluenzaA__ABK80237
augaaccccaaccagaagaucaucaccaucggcagcgugucccugaccaucgccacgaucugcuuccucaugcagaucgccauccuggucaccaccgugacccugcacuucaagcagcacgagugcaacagcccgcccaacaaccaggugaugcucugcgagcccacgaucaucgagcgcaacaucaccgagaucgucuaccugaccaacaccacgaucgagaaggagaucugccccaagcugguggaguaccggaacugguccaagccgcagugcaacaucaccggguucgcgcccuucagcaaggacaacuccauccgccucagcgccggcggggacaucugggugacccgggagcccuacgucuccugcgaccccgacaagugcuaccaguucgcccugggccaggggaccacgcugaacaacggccacagcaacgacaccgugcacgaccgcaccccguaccggacccuccugaugaacgagcugggcgugcccuuccaccucgggacgcgccaggucugcaucgccugguccagcuccagcugccacgacggcaaggccuggcugcacgugugcgugaccggggacgacaagaacgcgaccgccuccuucaucuacaacggccggcuggucgacagcaucggguccuggagcaagaagauccuccgcacccaggaguccgagugcgugugcaucaacggcacgugcaccguggucaugaccgacggcagcgccuccgggaaggccgacaccaagauccuguucaucgaggagggcaagaucgugcacaucagcacgcugagcggguccgcgcagcacguggaggagugcagcugcuacccccgguaccccggcguccgcugcgugugccgggacaacuggaagggcuccaaccgcccgaucguggacaucaacgucaaggacuacagcaucguguccagcuacgugugcuccgggcucgucggcgacacgccccggaagaccgacagcuucuccagcucccacugccuggaccccaacaacgaggagggcgggcacggggugaagggcugggccuucgacgacggcaacgacgucuggauggggcgcaccaucagcgagaagcugcgguccggcuacgagaccuucaaggugaucgagggguggagcaagcccaacuccaagcuccagaucaaccgccaggugaucgucgagcggggcaaccgcagcggguacuccggcaucuucagcguggagggcaaguccugcaucaaccggugcuucuacguggagcugauccgcgggcggaaggaggagaccgaggucugguggaccagcaacagcaucgugguguucugcggcaccuccgggacguacggcaccgggagcuggccggacggcgccgacaucaaccugaugcccaucuga

SEQ ID NO: 79626 - RNA, 1410 nt, Artificial Sequence
  derived and/or modified CDS sequence (opt1) from neuraminidase__InfluenzaA__ABK80259
augaaccccaaccagaagaucaucaccaucggcagcgccucccugaccaucgccacgaucugcuuccucauccagaucgcgauccuggugaccaccgucacccugcacuucaagcagcacgagugcaacagcccgcccaacaaccaggugaugcucugcgagcccacgaucaucgagcgcaacaucaccgagaucguguaccugaccaacaccacgaucgagaaggagaucugccccaagcuggccgaguaccggaacugguccaagccgcagugcaacaucaccggguucgcccccuucagcaaggacaacuccauccgccucagcgccggcggggacaucugggucacccgggagcccuacguguccugcgaccccgacaagugcuaccaguucgcccugggccaggggaccacgcugaacaacggccacagcaacgacaccgugcacgaccgcaccccguaccggacccuccugaugaacgagcugggcguccccuuccaccucgggacgcgccaggugugcaucgcgugguccagcuccagcugccacgacggcaaggccuggcugcacgugugcgucaccggggacgacaagaacgccaccgccuccuucaucuacaacggccggcugguggacagcaucuccagcugguccaagaagauccuccgcacccaggagagcgagugcgugugcaucaacgggacgugcaccgucgugaugaccgacggcuccgcgagcggcaaggccgacaccaagauccuguucaucgaggaggggaagaucauccacaucagcacgcuguccggcagcgcccagcacguggaggagugcuccugcuacccccgguaccccgggguccgcugcgugugccgggacaacuggaagggcagcaaccgcccgaucguggacaucaacgucaaggacuacuccaucgugagcuccuacgugugcagcggccucgucggggacacgccccggaagaacgacuccuucagcuccagccacugccuggaccccaacaacgaggagggcgggcacggcgugaaggggugggccuucgacgacggcaacgacguguggaugggccgcaccaucuccgagaagcugcggagcggguacgagaccuucaaggucaucgagggcugguccaaccccaacagcaagcuccagaucaaccgccaggugaucgucgagcgggggaaccgcuccggcuacagcgggaucuucuccguggagggcaagagcugcaucaaccggugcuucuacguggagcugauccgcggccggaaggaggagaccgaggucugguggaccagcaacuccaucgugguguucugcgggaccagcggcaccuacgggacgggcuccuggccggacggggccgacaucaaccugaugcccaucuga

SEQ ID NO: 79627 - RNA, 1410 nt, Artificial Sequence; identical to SEQ ID NO: 78351
  derived and/or modified CDS sequence (opt1) from neuraminidase__InfluenzaA__ABK80270

SEQ ID NO: 79628 - RNA, 1410 nt, Artificial Sequence; identical to SEQ ID NO: 78738
  derived and/or modified CDS sequence (opt1) from neuraminidase__InfluenzaA__ABK80281

SEQ ID NO: 79629 - RNA, 1410 nt, Artificial Sequence
  derived and/or modified CDS sequence (opt1) from neuraminidase__InfluenzaA__ABK80292
augaaccccaaccagaagaucaucaccaucggcagcgugucccugaccaucagcacgaucugcuucuucaugcagaucgccauccucaucaccaccgucacccugcacuucaagcaguacgaguucaacuccccgcccaacaaccaggugaugcugugcgagcccacgaucaucgagcgcaacaucaccgagaucguguaccucaccaacaccacgaucgagaaggagaucugccccaagcuggccgaguaccggaacuggagcaagccgcagugcaacaucaccggguucgcgcccuucuccaaggacaacagcauccgccuguccgccggcggggacaucugggucacccgggagcccuacgugagcugcgaccccgacaagugcuaccaguucgcccucggccaggggaccacgcugaacaacgugcacuccaacgacaccguccacgaccgcaccccguaccggacccugcucaugaacgagcugggcgugcccuuccaccugggcacgaagcaggucugcaucgccuggagcuccagcuccugccacgacgggaaggccuggcuccacgugugcgugaccggcgacgacaagaacgcgaccgccagcuucaucuacaacgggcgccugguggacuccaucgucagcugguccaaggagauccugcggacccaggagagcgagugcgugugcaucaacggcacgugcaccguggucaugaccgacggguccgccagcggcaaggccgacaccaagauccucuucaucgaggagggcaagaucauccacacgagcacccuguccgggagcgcgcagcacguggaggagugcuccugcuacccccgcuaccccggcgugcggugcgucugccgcgacaacuggaaggggagcaaccggccgaucguggacaucaacaucaaggacuacuccaucgugagcuccuacgucugcagcggccuggugggcgacacgccccgcaagaacgacuccagcuccagcucccacugccucgaccccaacaacgaggagggcgggcacggggugaagggcugggccuucgacgacgggaacgacgucuggaugggccggaccaucagcgagaagcugcgcuccggcuacgagaccuucaaggugaucgagggguggagcaaccccaacuccaagcugcagaucaaccggcaggucaucguggaccgcagcaaccgguccggcuacagcgggaucuucagcguggagggcaaguccugcaucaaccgcugcuucuacgucgagcucauccgggggcgcaaggaggagaccgaggugcuguggaccagcaacuccaucguggucuucugcggcaccagcggcacguacgggaccggcuccuggccggacggggccgacaucaaccugaugcccaucuga

SEQ ID NO: 79630 - RNA, 1410 nt, Artificial Sequence
  derived and/or modified CDS sequence (opt1) from neuraminidase__InfluenzaA__ABK80303
augaaccccaaccagaagaucaucaccaucggcagcgugucccugaccaucgccacgaucugcuuccucaugcagaucgccauccuggucaccaccgugacccugcacuucaagcaguacgagugcaacagcccgcccaacaaccaggugaugcucuacgagcccacgaucaucgagcgcaacaucaccgagaucgucuaccugaccaacaccacgaucgagaaggagaucugccccaagcuggcggaguaccggaacugguccaagccgcagugcaacaucaccggguucgcccccuucagcaaggacaacuccauccgccucagcgccggcggggacaucugggugacccgggagcccuacguguccugcgaccccgacaagugcuaccaguucgcccugggccaggggaccacgcugaacaacggccacagcaacgacaccguccacgaccgcaccccguaccggacccuccugaugaacgagcugggcgugcccuuccaccucgggacgcgccaggugugcaucgccugguccagcuccagcugccacgacggcaaggcguggcugcacgucugcgugaccggggacgacgagaacgccaccgccuccuucaucuacaacggccggcugguggacagcaucggguccuggagcaagaagauccuccgcacccaggaguccgagugcgucugcaucaacggcacgugcaccguggugaugaccgacggcaacgccagcgggaaggcggacaccaagauccuguucaucgaggagggcaagaucguccacaucuccacgcugagcgggagcgcccagcacguggaggagugcuccugcuacccccgguaccccggcgugcgcugcgucugccgggacaacuggaagggcagcaaccgcccgaucguggacaucaacgugaaggacuacuccaucgucagcuccuacgugugcagcgggcucgugggcgacacgccccggaagaacgacuccuucagcuccagccacugccuggaccccaacaacgaggagggcgggcacggggucaagggcugggccuucgacgacggcaacgacguguggauggggcgcaccaucuccgagaagcugcggagcggcuacgagaccuucaaggucaucgaggggugguccaagcccaacagcaagcuccagaucaaccgccaggugaucguggagcggggcaaccgcuccggguacagcggcaucuucuccgucgagggcaagagcugcaucaaccggugcuucuacguggagcugauccgcgggcggaaggaggagaccgaggugugguggaccuccaacagcaucgucguguucugcggcaccagcgggaccuacggcacgggguccuggccggacggcgccgacaucaaccugaugcccaucuga

SEQ ID NO: 79631 - RNA, 1410 nt, Artificial Sequence
  derived and/or modified CDS sequence (opt1) from neuraminidase__InfluenzaA__ABK80314
augaaccccaaccagaagaucaucaccaucggcagcgugucccugaccaucgccacgaucugcuuccucaugcagaucgccauccuggucaccaccgugacccugcacuucaagcaguacgagugcgacagcccgcccaacaaccaggugaugcucuacgagcccacgaucaucgagcgcaacaucaccgagaucgucuaccugaccaacaccacgaucgagaaggagaucugccccaagcuggcggaguaccggaacugguccaagccgcagugcaacaucaccggguucgcccccuucagcaaggacaacuccauccgccucagcgccggcggggacaucugggugacccgggagcccuacguguccugcgaccccgacaagugcuaccaguucgcccugggccaggggaccacgcugaacaacggccacagcaacgacaccguccacgaccgcaccccguaccggacccuccugaugaacgagcugggcgugcccuuccaccucgggacgcgccaggugugcaucgccugguccagcuccagcugccacgacggcaaggcguggcugcacgucugcgugaccggggacgacgagaacgccaccgccuccuucaucuacaacggccggcugguggacagcaucggguccuggagcaagaagauccuccgcacccaggaguccgagugcgucugcaucaacggcacgugcaccguggugaugaccgacggcagcgccuccgggaaggcggacaccaagauccuguucaucgaggagggcaagaucguccacaucagcacgcugagcggguccgcccagcacguggaggagugcagcugcuacccccgguaccccggcgugcgcugcgucugccgggacaacuggaagggcuccaaccgcccgaucguggacaucaacgugaaggacuacagcaucgucuccagcuacgugugcuccgggcucgugggcgacacgccccggaagaacgacagcuucuccagcucccacugccuggaccccaacaacgaggagggcgggcacggggucaagggcugggccuucgacgacggcaacgacguguggauggggcgcaccaucagcgagaagcugcgguccggcuacgagaccuucaaggucaucgagggguggagcaagcccaacuccaagcuccagaucaaccgccaggugaucguggagcggggcaaccgcagcggguacuccggcaucuucagcgucgagggcaaguccugcaucaaccggugcuucuacguggagcugauccgcgggcggaaggaggagaccgaggugugguggaccagcaacagcaucgucguguucugcggcaccuccgggaccuacggcacggggagcuggccggacggcgccgacaucaaccugaugcccaucuga

SEQ ID NO: 79632 - RNA, 1350 nt, Artificial Sequence
  derived and/or modified CDS sequence (opt1) from neuraminidase__InfluenzaA__ABL07021
augaaccccaaccagaagaucaucaccaucggcagcaucugcauggugaucgggaucgucucccugaugcuccagaucggcaacaugaucagcaucugggugucccacagcauccagaaggggaaccagcaccaggccgaguccaucagcaacaccaacccgcugacggagaaggccguggcguccaucacccuggccggcaacagcucccucugccccauccgcgggugggccguccacagcaaggacaacaacauccggaucggcuccaagggcgacguguucgugauccgcgagcccuucaucagcugcucccaccuggagugccggaccuucuuccugacccagggggcccuccugaacgacaagcacagcaacggcacggucaaggaccgcagcccccaccggacccugaugagcugcccggugggggaggcccccucccccuacaacagccgcuucgaguccguggcguggagcgccagcgccugccacgacggcaccuccuggcucaccaucgggaucagcggccccgacaacgaggccgucgcggugcugaaguacaacggcaucaucacggacaccaucaaguccuggcggaacaacauccugcgcacccaggagagcgagugcgccugcgugaacggguccugcuucaccgucaugacggacggcccgagcaacgggcaggccuccuacaagaucuucaagaugaagaagggcaagguggugaaguccgucgagcucgacgcccccaacuaccacuacgaggagugcuccugcuaccccgacgccggcgagaucacgugcgugugccgggacaacuggcacgggagcaaccgccccuggguguccuucaaccagaaccuggaguaccagaucggcuacaucugcagcggggucuucggcgacaacccgcggcccaacgacgggaccggcuccugcggccccaugagccccaacggggcguacggcgugaagggguucuccuucaaguacggcaacgggguguggaucggccgcaccaagagcaccaacucccggagcggcuucgagaugaucugggacccgaacggguggaccggcaccgacuccagcuucagcgucaagcaggacaucguggccaucaccgacugguccggguacagcggcuccuucgugcagcaccccgagcugacggggcucgacugcauccgccccugcuucugggucgagcugauccggggccgccccaaggagagcaccaucuggaccuccggcagcuccaucagcuucugcggggugaacuccgacaccgucagcugguccuggccggacggcgccgagcugcccuucacgaucgacaaguga

SEQ ID NO: 79633 - RNA, 1350 nt, Artificial Sequence
  derived and/or modified CDS sequence (opt1) from neuraminidase__InfluenzaA__ABL07032
augaaccccaaccagaagaucaucaccaucggcagcaucugcauggugaucgggaucgucucccugaugcuccagaucggcaacauggugagcaccugggugucccacagcauccagacggggaaccaguaccaggccgaguccaucagcaacaccaacccgcugaccgagaaggccgucgcguccgugacccuggccggcaacagcucccucugccccauccgcgggugggccgugcacagcaaggacaacaacauccggaucggcuccaagggcgacgucuucgugauccgcgagcccuucaucagcugcucccaccuggagugccggacguucuuccugacccagggggcccuccugaacgacaagcacagcaacggcaccgugaaggaccgcagcccccaccggacccugaugagcugcccggucggggaggcccccucccccuacaacagccgcuucgaguccguggcguggagcgccagcgccugccacgacggcacguccuggcucaccaucgggaucagcggccccgacaacgaggccguggcgguccugaaguacaacggcaucaucaccgacaccaucaaguccuggcggaacaacauccugcgcacgcaggagagcgagugcgccugcgugaacggguccugcuucaccgugaugaccgacggcccgagcaacgggcaggccuccuacaagaucuucaagauggagaagggcaaggucgugaaguccguggagcucgacgcccccaacuaccacuacgaggagugcuccugcuaccccgacgccggcgagaucacgugcgucugccgggacaacuggcacgggagcaaccgccccuggguguccuucaaccagaaccuggaguaccagaucggcuacaucugcagcgggguguucggcgacaacccgcggcccaacgacgggaccggcuccugcggccccaugagccccaacggggcguacggcgucaagggguucuccuucaaguacggcaacgggguguggaucggccgcaccaagagcaccaacucccggagcggcuucgagaugaucugggacccgaacggguggaccggcacggacuccagcuucagcgugaagcaggacaucgucgccaucaccgacugguccggguacagcggcuccuucgugcagcaccccgagcugaccgggcucgacugcauccgccccugcuucugggucgagcugauccggggccgccccaaggagagcaccaucuggacguccggcagcuccaucagcuucugcggggugaacuccgacaccgugagcugguccuggccggacggcgccgagcugcccuucaccaucgacaaguga

SEQ ID NO: 79634 - RNA, 1350 nt, Artificial Sequence
  derived and/or modified CDS sequence (opt1) from neuraminidase__InfluenzaA__ABL31746
augaaccccaaccagaagaucaucaccaucggcagcaucugcauggugaucgggaucgucucccugaugcuccagaucggcaacaugaucagcaucugggugucccacagcauccagaccgggaaccagcaccaggccgaguccaucagcaacacgaacccgcugaccgagaaggccguggcguccgucacccuggccggcaacagcucccucugccccauccgcgggugggccgugcacagcaaggacaacaacauccggaucggcuccaagggcgacguguucgucauccgcgagcccuucaucagcugcucccaccuggagugccggaccuucuuccugacgcagggggcccuccugaacgacaagcacagcaacggcaccgugaaggaccgcagcccccaccggacccugauguccugcccggugggggaggcccccucccccuacaacagccgcuucgaguccgucgcguggagcgccagcgccugccacgacggcaacuccuggcucaccaucgggaucagcggccccgacaacgaggccguggcggugcugaaguacaacggcaucaucacggacaccaucaaguccuggcggaagaacauccugcgcacccaggagagcgagugcgccugcgucaacggguccugcuucaccgugaugacggacggcccgagcaacgggcaggccuccuacaagaucuucaagauggagaagggcaagguggucaagagcguggagcucgacgcccccaacuaccacuacgaggagugcuccugcuaccccgacgccggcgagaucacgugcgugugccgggacaacuggcacgggagcaaccgccccugggucuccuucaaccagaaccuggaguaccagaucggcuacaucugcagcgggguguucggcgacaacccgcggcccaacgacgggaccggcuccugcggccccaugagccccaacggggcguacggcgugaagggguucuccuucaaguacggcaacggggucuggaucggccgcaccaagagcaccaacucccggagcggcuucgagaugaucugggacccgaacggguggaccggcaccgacuccagcuucagcgugaagcaggacaucguggccaucaccgacugguccggguacagcggcuccuucguccagcaccccgagcugacggggcucgacugcauccgccccugcuucuggguggagcugauccggggccgccccaaggagagcaccaucuggaccuccggcagcuccaucagcuucugcggggucaacuccgacaccgugagcugguccuggccggacggcgccgagcugcccuucacgaucgacaaguga

SEQ ID NO: 79635 - RNA, 1350 nt, Artificial Sequence
  derived and/or modified CDS sequence (opt1) from neuraminidase__InfluenzaA__ABL31757
augaaccccaaccagaagaucaucaccaucggcagcaucugcauggugaucgggaucgucucccugaugcuccagaucggcaacaugaucagcaucugggugucccacagcauccagaccgggaaccagcaccaggccgaguccaucagcaacacgaacccgcugaccgagaaggccguggcguccgucacccuggccggcaacagcucccucugccccauccgcgggugggccgugcacagcaaggacaacaacauccggaucggcuccaagggcgacguguucgucauccgcgagcccuucaucagcugcucccaccuggagugccggaccuucuuccugacgcagggggcccuccugaacgacaagcacagcaacggcaccgugaaggaccgcagcccccaccggacccugauguccugcccggugggggaggcccccucccccuacaacagccgcuucgaguccgucgcguggagcgccagcgccugccacgacggcaccuccuggcucacgaucgggaucagcggccccgacaacgaggccguggcggugcugaaguacaacggcaucaucaccgacaccaucaaguccuggcggaacaacauccugcgcacccaggagagcgagugcgccugcgucaacggguccugcuucacggugaugaccgacggcccgagcaacgggcaggccuccuacaagaucuucaagauggagaagggcaagguggucaagagcguggagcucgacgcccccaacuaccacuacgaggagugcuccugcuaccccgacgccggcgagaucacgugcgugugccgggacaacuggcacgggagcaaccgccccugggucuccuucaaccagaaccuggaguaccagaucggcuacaucugcagcgggguguucggcgacaacccgcggcccaacgacgggaccggcuccugcggccccaugagccccaacggggcguacggcgugaagggguucuccuucaaguacggcaacggggucuggaucggccgcaccaagagcaccaacucccggagcggcuucgagaugaucugggacccgaacggguggaccggcaccgacuccagcuucagcgugaagcaggacaucguggccaucacggacugguccggguacagcggcuccuucguccagcaccccgagcugaccgggcucgacugcauccgccccugcuucuggguggagcugauccggggccgccccaaggagagcaccaucuggaccuccggcagcuccaucagcuucugcggggucaacuccgacacggugagcugguccuggccggacggcgccgagcugcccuucaccaucgacaaguga

SEQ ID NO: 79636 - RNA, 1350 nt, Artificial Sequence; identical to SEQ ID NO: 79635
  derived and/or modified CDS sequence (opt1) from neuraminidase__InfluenzaA__ABL31768

SEQ ID NO: 79637 - RNA, 1410 nt, Artificial Sequence; identical to SEQ ID NO: 78615
  derived and/or modified CDS sequence (opt1) from neuraminidase__InfluenzaA__ABL67168

SEQ ID NO: 79638 - RNA, 1410 nt, Artificial Sequence; identical to SEQ ID NO: 78754
  derived and/or modified CDS sequence (opt1) from neuraminidase__InfluenzaA__ABL67179

SEQ ID NO: 79639 - RNA, 1413 nt, Artificial Sequence; identical to SEQ ID NO: 79580
  derived and/or modified CDS sequence (opt1) from neuraminidase__InfluenzaA__ABL67190

SEQ ID NO: 79640 - RNA, 1410 nt, Artificial Sequence
  derived and/or modified CDS sequence (opt1) from neuraminidase__InfluenzaA__ABL67201
augaaccccaaccagaagaucaucaccaucagcuccgugagccugaccaucuccacgaucugcuucuucaugcagaucgccauccucaucaccaccgucacccugcacuucaagcaguacgaguucaacagcccgcccaacaaccaggugaugcugugcgagcccacgaucaucgagcgcaacaucaccgagaucguguaccucaccaacaccacgaucgagaaggagaucugccccaagcuggccgaguaccggaacugguccaagccgcagugcgacaucaccggcuucgcgcccuucagcaaggacaacuccauccgccugagcgccgggggcgacaucugggucacccgggagcccuacguguccugcgaccccgacaagugcuaccaguucgcccucgggcagggcaccacgcugaacaacgugcacagcaacgacaccguccacgaccgcaccccguaccggacccugcucaugaacgagcugggggugcccuuccaccugggcacgaagcaggucugcaucgccugguccagcuccagcugccacgacggcaaggccuggcuccacgugugcgugaccggggacgacaagaacgcgaccgccuccuucaucuacaacggccgccugguggacagcaucgucuccuggagcaagaagauccugcggacccaggaguccgagugcgugugcaucaacgggacgugcaccguggucaugaccgacggcagcgccagcgggaaggccgacaccaagauccucuucaucgaggagggcaagaucgugcacacguccacccugagcggcuccgcgcagcacguggaggagugcagcugcuacccccgcuaccccgggguccggugcgugugccgcgacaacuggaagggcuccaaccggccgaucguggacaucaacaucaaggacuacagcaucgucuccagcuacgugugcuccgggcuggugggcgacacgccccgcaagaacgacagcuccagcuccagccacugccucgaccccaacaacgaggagggcgggcacggcgucaaggggugggccuucgacgacggcaacgacguguggauggggcggaccaucuccgagaagcugcgcagcggcuacgagaccuucaaggucaucgagggcugguccaaccccaacagcaagcugcagaucaaccgccaggugaucguggaccgggggaaccgguccggcuacagcgggaucuucagcgucgagggcaaguccugcaucaaccgcugcuucuacguggagcucauccgggggcgcaaggaggagaccgaggugcuguggaccagcaacuccaucgucguguucugcggcaccagcggcacguacgggaccggcuccuggccggacggggccgacaucaaccugaugcccaucuga

SEQ ID NO: 79641 - RNA, 1413 nt, Artificial Sequence; identical to SEQ ID NO: 79580
  derived and/or modified CDS sequence (opt1) from neuraminidase__InfluenzaA__ABL67212

SEQ ID NO: 79642 - RNA, 1413 nt, Artificial Sequence; identical to SEQ ID NO: 79083
  derived and/or modified CDS sequence (opt1) from neuraminidase__InfluenzaA__ABL67256

SEQ ID NO: 79643 - RNA, 1413 nt, Artificial Sequence; identical to SEQ ID NO: 79083
  derived and/or modified CDS sequence (opt1) from neuraminidase__InfluenzaA__ABL67267

SEQ ID NO: 79644 - RNA, 1410 nt, Artificial Sequence; identical to SEQ ID NO: 78085
  derived and/or modified CDS sequence (opt1) from neuraminidase__InfluenzaA__ABL67278

SEQ ID NO: 79645 - RNA, 1410 nt, Artificial Sequence
  derived and/or modified CDS sequence (opt1) from neuraminidase__InfluenzaA__ABL67289
augaaccccaaccagaagaucaucaccaucggcagcgugucccugaccaucgccacgaucugcuuccucaugcagaucgccauccuggucaccaccgugacccugcacuucaagcaguacgagugcaacagcccgcccaacaaccaggugaugcucuacgagcccacgaucaucgagcgcaacaucaccgagaucgucuaccugaccaacaccacgaucgagaaggagaucugccccaagcuggcggaguaccggaacugguccaagccgcagugcaacaucaccggguucgcccccuucagcaaggacaacuccauccgccucagcgccggcggggacaucugggugacccgggagcccuacguguccugcgaccccgacaagugcuaccaguucgcccugggccaggggaccacgcugaacaacggccacagcaacgacaccguccacgaccgcaccccguaccggacccuccugaugaacgagcugggcgugcccuuccaccucgggacgcgccaggugugcaucgccugguccagcuccagcugccacgacggcaaggcguggcugcacgucugcgugaccggggacgacgagaacgccaccgccuccuucaucuacaacggccggcugguggacagcaucggguccuggagcaagaagauccuccgcacccaggaguccgagugcgucugcaucaacggcacgugcaccguggugaugaccgacggcagcgccuccgggaaggcggacaccaagauccuguucaucgaggagggcaagaucguccacaucagcacgcugagcggguccgcccagcacguggaggagugcagcugcuacccccgguaccccggcgugcgcugcgucugccgggacaacuggaagggcuccaaccgcccgaucguggacaucaacgugaaggacuacagcaucgucuccagcuacgugugcuccgggcucgugggcgacacgccccggaagaacgacagcuucuccagcucccacugccuggaccccaacaacgaggagggcgggcacggggucaagggcugggccuucgacgacggcaacgacguguggauggggcgcaccaucagcgagaagcugcgguccggcuacgagaccuucaaggucaucgagggguggagcaagcccaacuccaagcuccagaucaaccgccaggugaucguggagcggggcaaccgcagcggguacuccggcaucuucagcgucgagggcaaguccugcaucaaccggugcuucuacguggagcugauccgcgggcggaaggaggagaccgaggugugguggaccagcaacagcaucgucguguucugcggcaccuccgggaccuacggcacggggagcuggccggacggcgccgacaucaaccugaugcccaucuga

SEQ ID NO: 79646 - RNA, 1410 nt, Artificial Sequence
  derived and/or modified CDS sequence (opt1) from neuraminidase__InfluenzaA__ABL67300
augaaccccaaccagaagaucaucaccaucggcagcgugucccugaccaucgccacgaucugcuuccucaugcagaucgccauccuggucaccaccgugacccugcacuucaagcaguacgagugcaacagcccgcccaacaaccaggugaugcucugcgagcccacgaucaucgagcgcaacaucaccgagaucgucuaccugaccaacaccacgaucgagaaggagaucugccccaagcuggcggaguaccggaacugguccaagccgcagugcaacaucaccggguucgcccccuucagcaaggacaacuccauccgccucagcgccggcggggacaucugggugacccgggagcccuacguguccugcgaccccgacaagugcuaccaguucgcccugggccaggggaccacgcugaacaacggccacagcaacgacaccguccacgaccgcaccccguaccggacccuccugaugaacgagcugggcgugcccuuccaccucgggacgcgccaggugugcaucgccugguccagcuccagcugccacgacggcaaggcguggcugcacgucugcgugaccggggacgacgagaacgccaccgccuccuucaucuacaacggccggcugguggacagcaucggguccuggagcaagaacauccuccgcacccaggaguccgagugcgucugcaucaacggcacgugcaccguggugaugaccgacggcagcgccuccgggaaggcggacaccaagauccuguucaucgaggagggcaagaucguccacaucagcacgcugagcggguccgcccagcacguggaggagugcagcugcuacccccgguaccccggcgugcgcugcgucugccgggacaacuggaagggcuccaaccgcccgaucguggacaucaacgugaaggaccacagcaucgucuccagcuacgugugcuccgggcucgugggcgacacgccccggaagaacgacagcuucuccagcucccacugccuggaccccaacaacgaggagggcgggcacggggucaagggcugggccuucgacgacggcaacgacguguggauggggcgcaccaucagcgagaagcugcgguccggcuacgagaccuucaaggucaucgagggguggagcaagcccaacuccaagcuccagaucaaccgccaggugaucguggagcggggcaaccgcagcggguacuccggcaucuucagcgucgagggcaaguccugcaucaaccggugcuucuacguggagcugauccgcgggcggaaggaggagaccgaggugugguggaccagcaacagcaucgucguguucugcggcaccuccgggaccuacggcacggggagcuggccggacggcgccgacaucaaccugaugcccaucuga

SEQ ID NO: 79647 - RNA, 1410 nt, Artificial Sequence; identical to SEQ ID NO: 78204
  derived and/or modified CDS sequence (opt1) from neuraminidase__InfluenzaA__ABL67311

SEQ ID NO: 79648 - RNA, 1410 nt, Artificial Sequence
  derived and/or modified CDS sequence (opt1) from neuraminidase__InfluenzaA__ABL67322
augaaccccaaccagaagaucaucaccaucggcagcgugucccugaccaucgccacgaucugcuuccucaugcagaucgccauccuggucaccaccgugacccugcacuucaagcaguacgagugcaacccgccgcccaacaaccaggugaugcucugcgagcccacgaucaucgagcgcaacaucaccgagaucgucuaccugaccaacaccacgaucgagaaggagaucugccccaagcuggcggaguaccggaacuggagcaagccccagugcaacaucaccggguucgcccccuucuccaaggacaacagcauccgccucuccgccggcggggacaucugggugacccgggagcccuacgugagcugcgacccggacaagugcuaccaguucgcccugggccaggggaccacgcugaacaacggccacuccaacgacaccguccacgaccgcacccccuaccggacccuccugaugaacgagcugggcgugcccuuccaccucgggacgcgccaggugugcaucgccuggagcuccagcuccugccacgacggcaaggcguggcugcacgucugcgugaccggggacgacgagaacgccaccgccagcuucaucuacaacggccggcugguggacuccaucgggagcugguccaagaagauccuccgcacccaggagagcgagugcgucugcaucaacggcacgugcaccguggugaugaccgacggcuccgccagcgggaaggcggacaccaagauccuguucaucgaggagggcaagaucguccacacguccacccugagcgggagcgcccagcacguggaggagugcuccugcuacccccgguacccgggcgugcgcugcgucugccgggacaacuggaagggcagcaaccgccccaucguggacaucaacgugaaggacuacuccaucgucagcuccuacgugugcagcgggcucgugggcgacacgccccggaagaacgacuccuucagcuccagccacugccuggaccccaacaacgaggagggcgggcacggggucaagggcugggccuucgacgacggcaacgacguguggauggggcgcaccaucuccgagaagcugcggagcggcuacgagaccuucaaggucaucgaggggugguccaagccgaacagcaagcuccagaccaaccgccaggugaucguggagcggggcaaccgcuccggguacagcggcaucuucuccgucgagggcaagagcugcaucaaccggugcuucuacguggagcugauccgcgggcggaaggaggagaccgaggugugguggaccuccaacagcaucgucguguucugcggcacgagcgggaccuacggcaccggguccuggcccgacggcgccgacaucaaccugaugcccaucuga

SEQ ID NO: 79649 - RNA, 1410 nt, Artificial Sequence
  derived and/or modified CDS sequence (opt1) from neuraminidase__InfluenzaA__ABL67333
augaaccccaaccagaagaucaucaccaucggcagcgugucccugaccaucgccacgaucugcuuccucaugcagaucgccauccuggucaucaccgugacccugcacuucaagcaguacgagugcaacagcccgcccaacaaccaggugaugcucugcgagcccaccaucaucgagcgcaacaucacggagaucgucuaccugaccaacaccaccaucgagaaggagaucugccccaagcuggcggaguaccggaacugguccaagccgcagugcaacaucacgggguucgcccccuucagcaaggacaacuccauccgccucagcgccggcggggacaucugggugacccgggagcccuacguguccugcgaccccgacaagugcuaccaguucgcccugggccaggggaccacccugaacaacggccacagcaacgacacgguccacgaccgcaccccguaccggacccuccugaugaacgagcugggcgugcccuuccaccucgggacccgccaggugugcaucgccugguccagcuccagcugccacgacggcaaggcguggcugcacgucugcgugacgggggacgacgagaacgccaccgccuccuucaucuacaacggcaagcugguggacagcaucggguccuggagcaagaagauccuccggacccaggaguccgagugcgucugcaucaacgggaccugcgccguggugaugacggacggcagcgcguccgggaaggccgacaccaagauccuguucaucgaggagggcaagaucguccacaucagcacccugagcggguccgcccagcacguggaggagugcagcugcuacccccgcuaccccggcgugcggugcgucugccgcgacaacuggaagggcuccaaccggccgaucguggacaucaacgugaaggacuacagcaucgucuccagcuacgugugcuccgggcucgugggcgacacgccccgcaagaacgacagcuucuccagcucccacugccuggaccccaacaacgaggagggcggccacggggucaagggcugggccuucgacgacggcaacgacguguggauggggcggaccaucagcgagaagcugcgcuccggcuacgagaccuucaaggucaucgagggguggagcaagcccaacuccaagcuccagaccaaccgccaggugaucguggagcggggcaaccggagcggguacuccggcaucuucagcgucgagggcaaguccugcaucaaccgcugcuucuacguggagcugauccgggggcgcaaggaggagaccgaggugugguggacgagcaacagcaucgucguguucugcggcaccuccgggaccuacggcaccgggagcuggccggacggcgccgacaucaaccugaugcccaucuga

SEQ ID NO: 79650 - RNA, 1410 nt, Artificial Sequence; identical to SEQ ID NO: 78615
  derived and/or modified CDS sequence (opt1) from neuraminidase__InfluenzaA__ABL67344

SEQ ID NO: 79651 - RNA, 1410 nt, Artificial Sequence
  derived and/or modified CDS sequence (opt1) from neuraminidase__InfluenzaA__ABL67355
augaaccccaaccagaagaucaucaccaucggcagcgugucccugaccaucgccacgaucugcuuccucaugcagaucgccauccuggucaccaccgugacccugcacuucaagcagcacgagugcaacagcccgcccaacaaccaggugaugcucugcgagcccacgaucaucgagcgcaacaucaccgagaucgucuaccugaccaacaccacgaucgagaaggagaucugccccaagcugguggaguaccggaacugguccaagccgcagugcaacaucaccggguucgcgcccuucagcaaggacaacuccauccgccucagcgccggcggggacaucugggugacccgggagcccuacgucuccugcgaccccgagaagugcuaccaguucgcccugggccaggggaccacgcugaacaacggccacagcaacgacaccgugcacgaccgcaccccguaccggacccuccugaugaacgagcugggcgugcccuuccaccucgggacgaagcaggucugcaucgccugguccagcuccagcugccacgacggcaaggccuggcugcacgugugcgugaccggggacgacaagaacgcgaccgccuccuucaucuacaacggccgccuggucgacagcaucggguccuggagcaagaagauccuccggacccaggaguccgagugcgugugcaucaacggcacgugcaccguggucaugaccgacggcagcgccuccgggaaggccgacaccaagauccuguucaucgaggagggcaagaucgugcacaucagcacgcugagcggguccgcgcagcacguggaggagugcagcugcuacccccgcuaccccggcguccggugcgugugccgcgacaacuggaagggcuccaaccggccgaucguggacaucaacgucaaggacuacagcaucguguccagcuacgugugcuccgggcucgucggcgacacgccccgcaagaacgacagcuucuccagcucccacugccuggaccccaacaacgaggagggcgggcacggggugaagggcugggccuucgacgacggcaacgacgucuggauggggcggaccaucagcgagaagcugcgcuccggcuacgagaccuucaaggugaucgagggguggagcaagcccaacuccaagcuccagaucaaccgccaggugaucgucgagcggggcaaccggagcggguacuccggcaucuucagcguggagggcaaguccugcaucaaccgcugcuucuacguggagcugauccgggggcgcaaggaggagaccgaggucugguggaccagcaacagcaucgugguguucugcggcaccuccgggaccuacggcacggggagcuggccggacggcgccgacaucaaccugaugcccaucuga

SEQ ID NO: 79652 - RNA, 1410 nt, Artificial Sequence
  derived and/or modified CDS sequence (opt1) from neuraminidase__InfluenzaA__ABL67366
augaaccccaaccagaagaucaucaccaucggcagcgugucccugaccaucgccacgaucugcuuccucaugcagaucgccauccuggucaccaccgugacccugcacuucaagcagcacgagugcaacagcccgcccaacaaccaggugaugcucugcgagcccacgaucaucgagcgcaacaucaccgagaucgucuaccugaccaacaccacgaucgagaaggagaucugccccaagcuggcggaguaccggaacugguccaagccgcagugcaacaucaccggguucgcccccuucagcaaggacaacuccauccgccucagcgccggcggggacaucugggugacccgggagcccuacguguccugcgaccccgacaagugcuaccaguucgcccugggccaggggaccacgcugaacaacggccacagcaacgacaccguccacgaccgcaccccguaccggacccuccugaugaacgagcugggcgugcccuuccaccucgggacgcgccaggugugcaucgccugguccagcuccagcugccacgacggcaaggcguggcugcacgucugcgugaccggggacgacaagaacgccaccgccuccuucaucuacaacggccggcugguggacagcaucggguccuggagcaagaagauccuccgcacccaggaguccgagugcgucugcaucaacggcacgugcaccguggugaugaccgacggcagcgccuccgggaaggcggacacccggauccuguucaucgaggagggcaagaucguccacaucagcacgcugagcggguccgcccagcacguggaggagugcagcugcuacccccgcuaccccggcgugcggugcgucugccgcgacaacuggaagggcuccaaccggccgaucguggacaucaacgugaaggacuacagcaucgucuccagcuacgugugcuccgggcucgugggcgacacgccccgcaagaacgacagcuucuccagcucccacugccuggaccccaacaacgaggagggcgggcacggggucaagggcugggccuucgacgacggcaacgacguguggauggggcggaccaucagcgagaagcugcgcuccggcuacgagaccuucaaggucaucgagggguggagcaagcccaacuccaagcuccagaucaaccgccaggugaucguggagcggggcaaccggagcggguacuccggcaucuucagcgucgagggcaaguccugcaucaaccgcugcuucuacguggagcugauccgggggcgcaaggaggagaccgaggugugguggaccagcaacagcaucgucguguucugcggcaccuccgggaccuacggcacggggagcuggccggacggcgccgacaucaaccugaugcccaucuga

SEQ ID NO: 79653 - RNA, 1410 nt, Artificial Sequence
  derived and/or modified CDS sequence (opt1) from neuraminidase__InfluenzaA__ABL67377
augaaccccaaccagaagaucaucaccaucggcagcgccucccugaccaucgccaucaucugcuuccucauccagaucgcgauccuggugacgaccgucacccugcacuucaagcagcacgagugcaacagcccgcccaacaaccaggugaugcucugcgagcccaccaucaucgagcgcaacaucacggagaucguguaccugaccaacaccaccaucgagaaggagaucugccccaagcuggccgaguaccggaacugguccaagccgcagugcaacaucacgggguucgcccccuucagcaaggacaacuccauccgccucagcgccggcggggacaucugggucacccgggagcccuacguguccugcgaccccgacaagugcuaccaguucgcccugggccaggggaccacccugaacaacggccacagcaacgacacggugcacgaccgcaccccguaccggacccuccugaugaacgagcugggcguccccuuccaccucgggacccgccaggugugcaucgcgugguccagcuccagcugccacgacggcaaggccuggcugcacgugugcgucacgggggacgacaagaacgccaccgccuccuucaucuacaacggccggcugguggacagcaucuccagcugguccaagaagauccuccgcacccaggagagcgagugcgugugcaucaacgggaccugcacggucgugaugaccgacggcuccgcgagcggcaaggccgacaccaagauccuguucaucgaggaggggaagaucauccacaucagcacccuguccggcagcgcccagcacguggaggagugcuccugcuacccccgguaccccgggguccgcugcgugugccgggacaacuggaagggcagcaaccgcccgaucguggacaucaacgucaaggacuacuccaucgugagcuccuacgugugcagcggccucgucggggacacgccccggaagaacgacuccuucagcuccagccacugccuggaccccaacaacgaggagggcgggcacggcgugaaggggugggccuucgacgacggcaacgacguguggaugggccgcaccaucuccgagaagcugcggagcggguacgagaccuucaaggucaucgagggcugguccaaccccaacagcaagcuccagaucaaccgccaggugaucgucgagcgggggaaccgcuccggcuacagcgggaucuucuccguggagggcaagagcugcaucaaccggugcuucuacguggagcugauccgcggccggaaggaggagaccgaggucugguggacgagcaacuccaucgugguguucugcgggaccagcggcaccuacgggaccggcuccuggccggacggggccgaccugaaccucaugcccaucuga

SEQ ID NO: 79654 - RNA, 1410 nt, Artificial Sequence; identical to SEQ ID NO: 78351
  derived and/or modified CDS sequence (opt1) from neuraminidase__InfluenzaA__ABL67388

SEQ ID NO: 79655 - RNA, 1410 nt, Artificial Sequence; identical to SEQ ID NO: 78351
  derived and/or modified CDS sequence (opt1) from neuraminidase__InfluenzaA__ABL67399

SEQ ID NO: 79656 - RNA, 1410 nt, Artificial Sequence; identical to SEQ ID NO: 78736
  derived and/or modified CDS sequence (opt1) from neuraminidase__InfluenzaA__ABL67410

SEQ ID NO: 79657 - RNA, 1410 nt, Artificial Sequence
  derived and/or modified CDS sequence (opt1) from neuraminidase__InfluenzaA__ABL67421
augaaccccaaccagaagaucaucaccaucggcagcaucucccugaccaucagcacgaucugcuucuucaugcagaucgccauccucaucaccaccgugacccugcacuucaagcaguacgaguucaacuccccgcccaacaaccaggucaugcugugcgagcccacgaucaucgagcgcaacaucaccgagaucguguaccucaccaacaccacgaucgagaaggagaucugccccaagcuggccgaguaccggaacuggagcaagccgcagugcaacaucaccggguucgcgcccuucuccaaggacaacagcauccgccuguccgccggcggggacaucugggugacccgggagcccuacgucagcugcgaccccgacaagugcuaccaguucgcccucggccaggggaccacgcugaacaacgugcacuccaacgacaccgugcacgaccgcaccccguaccggacccugcucaugaacgagcugggcguccccuuccaccugggcacgaagcaggucugcaucgccuggagcuccagcuccugccacgacgggaaggccuggcuccacgugugcgugaccggcgacgacaagaacgcgaccgccagcuucaucuacaacgggcgccugguggacuccaucgugagcugguccaaggagauccugcggacccaggagagcgagugcgucugcaucaacggcacgugcaccguggugaugaccgacggguccgccagcggcaaggccgacaccaagauccucuucaucgaggagggcaagaucguccacacgagcacccuguccgggagcgcgcagcacguggaggagugcuccugcuacccccgcuaccccggcgugcggugcgucugccgcgacaacuggaaggggagcaaccggccgaucguggacaucaacaucaaggacuacuccaucgugagcuccuacgucugcagcggccuggugggcgacacgccccgcaagaacgacuccagcuccagcucccacugccucgaccccaacaacgaggagggcgggcacggggugaagggcugggccuucgacgacgggaacgacgucuggaugggccggaccaucagcgagaagcugcgcuccggcuacgagaccuucaaggugaucgagggguggagcaaccccaacuccaagcugcagaucaaccggcaggucaucguggaccgcggcaaccggagcggguacuccggcaucuucagcguggagggcaagagcugcaucaaccgcugcuucuacgucgagcucauccgggggcgcaaggaggagaccgaggugcuguggaccuccaacagcaucguggucuucugcggcaccuccgggacguacggcaccgggagcuggccggacggcgccgacaucaaccugaugcccaucuga

SEQ ID NO: 79658 - RNA, 1350 nt, Artificial Sequence
  derived and/or modified CDS sequence (opt1) from neuraminidase__InfluenzaA__ABL67772
augaaccccaacaagaagaucaucaccaucggcagcaucugcauggugaccgggauggucucccugaugcuccagaucggcaaccugaucagcaucugggugucccacagcauccacacggggaaccagcacaaggccgagccgaucuccaacaccaacuuccugaccgagaaggccguggcgagcgucaagcucgccggcaacuccagccugugccccaucaacgggugggccguguacuccaaggacaacagcauccgcaucggcuccaagggcgacguguucgucauccgggagcccuucaucagcugcucccaccuggagugccgcaccuucuuccucacgcagggggcccugcugaacgacaagcacagcaacggcaccgugaaggaccggagcccccaccgcacccucauguccugcccggugggggaggcccccucccccuacaacagccgguucgaguccgucgcguggagcgccagcgccugccacgacggcaccuccuggcugacgaucgggaucagcggccccgacaacggcgccguggcggugcugaaguacaacgggaucaucaccgacaccaucaaguccuggcgcaacaacauccuccggacccaggagagcgagugcgccugcgucaacggcuccugcuucacggugaugaccgacgggccgagcaacggccaggccucccacaagaucuucaagauggagaagggcaagguggucaagagcguggagcuggacgcccccaacuaccacuacgaggagugcuccugcuaccccgacgccggggagaucacgugcgugugccgcgacaacuggcacggcagcaaccggcccugggucuccuucaaccagaaccugaaguaccagaucggguacaucugcagcggcguguucggggacaacccgcgccccaacgacggcaccggcuccugcgggcccgugagcuccaacggcgcguacggggucaagggcuucagcuucaaguacgggaacggcguguggaucggccggaccaaguccaccaacagccgcuccggguucgagaugaucugggaccccaacggcuggaccgagaccgacagcagcuucuccgugaagcaggacaucgucgccaucacggacuggagcggguacuccggcagcuucgugcagcacccggagcucaccgggcuggacugcauccggcccugcuucugggucgagcugauccgcggccggcccaaggaguccaccaucuggaccagcggcuccagcaucuccuucugcggggugaacagcgacacggugggcugguccuggcccgacggggccgagcucccguucaccaucgacaaguga

SEQ ID NO: 79659 - RNA, 1350 nt, Artificial Sequence
  derived and/or modified CDS sequence (opt1) from neuraminidase__InfluenzaA__ABL67783
augaaccccaacaagaagaucaucaccaucggcagcaucugcauggugaccgggauggucucccugaugcuccagaucggcaaccugaucagcaucugggugucccacagcauccacacggggaaccagcacaaggccgagccgaucuccaacaccaacuuccugaccgagaaggccguggcgagcgucaagcucgccggcaacuccagccugugccccaucaacgggugggccguguacuccaaggacaacagcauccgcaucggcuccaagggcgacguguucgucauccgggagcccuucaucagcugcucccaccuggagugccgcaccuucuuccucacgcagggggcccugcugaacgacaagcacagcaacggcaccgugaaggaccggagcccccaccgcacccucauguccugcccggugggggaggcccccucccccuacaacagccgguucgaguccgucgcguggagcgccagcgccugccacgacggcaccuccuggcugacgaucgggaucagcggccccgacuccggcgccguggcggugcugaaguacaacgggaucaucaccgacaccaucaagagcuggcgcaacaacauccuccggacccaggaguccgagugcgccugcgucaacggcagcugcuucacggugaugaccgacgggccguccaacggccaggccagccacaagaucuucaagauggagaagggcaagguggucaaguccguggagcuggacgcccccaacuaccacuacgaggagugcagcugcuaccccgacgccggggagaucacgugcgugugccgcgacaacuggcacggcuccaaccggcccugggucagcuucaaccagaaccuggaguaccagaucggguacaucugcuccggcguguucggggacaacccgcgccccaacgacggcaccggcagcugcgggcccguguccagcaacggcgcguacggggucaagggcuucuccuucaaguacgggaacggcguguggaucggccggaccaagagcaccaacucccgcagcggguucgagaugaucugggaccccaacggcuggaccgagaccgacagcuccuucagcgugaagcaggacaucgucgccaucacggacugguccggguacagcggcuccuucgugcagcacccggagcucaccgggcuggacugcauccggcccugcuucugggucgagcugauccgcggccggcccaaggagagcaccaucuggaccuccggcagcuccaucagcuucugcggggugaacuccgacacggugggcuggagcuggcccgacggggccgagcucccguucaccaucgacaaguga

SEQ ID NO: 79660 - RNA, 1350 nt, Artificial Sequence
  derived and/or modified CDS sequence (opt1) from neuraminidase__InfluenzaA__ABL67796
augaaccccaacaagaagaucaucaccaucggcagcaucugcauggugaccgggauggucucccugaugcuccagaucggcaaccugaucagcaucugggugucccacagcauccacacggggaaccagcacaaggccgagccgaucuccaacaccaacuuccugaccgagaaggccguggcgagcgucaagcucgccggcaacuccagccugugccccaucaacgggugggccguguacuccaaggacaacagcauccgcaucggcuccaagggcgacguguucgucauccgggagcccuucaucagcugcucccaccuggagugccgcaccuucuuccucacgcagggggcccugcugaacgacaagcacagcaacggcaccgugaaggaccggagcccccaccgcacccucauguccugcccggugggggaggcccccucccccuacaacagccgguucgaguccgucgcguggagcgccagcgccugccacgacggcaccuccuggcugacgaucgggaucagcggccccgacaacggcgccguggcggugcugaaguacaacgggaucaucaccgacaccaucaaguccuggcgcaacaacauccuccggacccaggagagcgagugcgccugcgucaacggcuccugcuucacggugaugaccgacgggccgagcaacggccaggccucccacaagaucuucaagauggagaagggcaagguggucaagagcguggagcuggacgcccccaacuaccacuacgaggagugcuccugcuaccccgacgccggggagaucacgugcgugugccgcgacaacuggcacggcagcaaccggcccugggucuccuucaaccagaaccuggaguaccagaucggguacaucugcagcggcguguucggggacaacccgcgccccaacgacggcaccggcuccugcgggcccgugagcuacaacggcgcguacggggucaagggcuucuccuucaaguacgggaacggcguguggaucggccggaccaagagcaccaacucccgcagcggguucgagaugaucugggaccccaacggcuggaccgagaccgacuccagcuucagcgugaagcaggacaucgucgccaucacggacugguccggguacagcggcuccuucgugcagcacccggagcucaccgggcuggacugcauccggcccugcuucugggucgagcugauccgcggccggcccaaggagagcaccaucuggaccuccggcagcuccaucagcuucugcggggugaacuccgacacggugggcuggagcuggcccgacggggccgagcucccguucaccaucgacaaguga

SEQ ID NO: 79661 - RNA, 1350 nt, Artificial Sequence
  derived and/or modified CDS sequence (opt1) from neuraminidase__InfluenzaA__ABL67807
augaaccccaacaagaagaucaucaccaucggcagcaucugcauggugaccgggauggucucccugaugcuccagaucggcaaccugaucagcaucugggugucccacagcauccacacggggaaccagcacaaggccgagccgaucuccaacaccaaccugcucaccgagaaggccguggcgagcgucaagcuggccggcaacuccagccugugccccaucgacgggugggccguguacuccaaggacaacagcauccgcaucggcuccaagggcgacguguucgucgugcgggagcccuucaucagcugcucccaccucgagugccgcaccuucuuccugacgcagggggcccugcucaacgacaagcacagcaacggcaccgugaaggaccggagcccccaccgcacccugaugagcugcccggucggggaggcccccucccccuacaacagccgguucgaguccguggcguggagcgccagcgccugccacgacggcaccuccuggcugacgaucgggaucagcggccccgacaacggcgccguggcgguccucaaguacaacgggaucaucaccgacaccaucaaguccuggcgcaacaacauccugcggacccaggagagcgagugcgccugcgugaacggcuccugcuucacggugaugaccgacgggccgagcaacggccaggccucccacaagaucuucaagauggagaagggcaaggucgugaaguccguggagcuggacgcccccaacuaccacuacgaggagugcuccugcuaccccgacgccggggagaucacgugcgucugccgcgacaacuggcacggcagcaaccggcccuggguguccuucaaccagaaccucgaguaccagaucggguacaucugcagcggcguguucggggacaacccgcgccccaacgacggcgcgggcuccugcgggcccgucagcuccaacggcgccuacggggugaagggcuucagcuucaaguacgggaacggcguguggaucggccggaccaaguccaccaacagccgcuccggguucgagaugaucugggaccccaacggcuggaccgagaccgacagcagcuucuccgucaagcaggacaucguggccaucaccgacuggagcggguacuccggcagcuucguccagcacccggagcugacggggcuggacugcauccggcccugcuucuggguggagcucauccgcggccggcccaaggaguccaccaucuggaccagcggcuccagcaucuccuucugcggggugaacagcgacaccgucggcugguccuggcccgacggggccgagcugccguucacgaucgacaaguga

SEQ ID NO: 79662 - RNA, 1350 nt, Artificial Sequence
  derived and/or modified CDS sequence (opt1) from neuraminidase__InfluenzaA__ABL67818
augaaccccaacaagaagaucaucaccaucggcagcaucugcauggugaccgggauggucucccugaugcuccagaucggcaaccugaucagcaucugggugucccacagcauccacacggggaaccagcacaaggccgagccgaucuccaacaccaaccugcucaccgagaaggccguggcgagcgucaagcuggccggcaacuccagccugugccccaucgacgggugggccguguacuccaaggacaacagcauccgcaucggcuccaagggcgacguguucgucgugcgggagcccuucaucagcugcucccaccucgagugccgcaccuucuuccugacgcagggggcccugcucaacgacaagcacagcaacggcaccgugaaggaccggagcccccaccgcacccugauguccugcccggucggggaggcccccucccccuacaacagccgguucgaguccguggcguggagcgccagcgccugccacgacggcaccuccuggcugacgaucgggaucagcggccccgacaacggcgccguggcgguccucaaguacaacgggaucaucaccgacaccaucaaguccuggcgcaacaacauccugcggacccaggagagcgagugcgccugcgugaacggcuacugcuucacggugaugaccgacgggccguccaacggccaggccagccacaagaucuucaagauggagaagggcaaggucgugaaguccguggagcuggacgcccccaacuaccacuacgaggagugcagcugcuaccccgacgccggggagaucacgugcgucugccgcgacaacuggcacggcuccaaccggcccugggugagcuucaaccagaaccucgaguaccagaucggguacaucugcuccggcguguucggggacaacccgcgccccaacgacggcgcgggcagcugcgggcccgucuccagcaacggcgccuacggggugaagggcuucuccuucaaguacgggaacggcguguggaucggccggaccaagagcaccaacucccgcagcggguucgagaugaucugggaccccaacggcuggaccgagaccgacuccagcuucagcgucaagcaggacaucguggccaucaccgacugguccggguacagcggcuccuucguccagcacccggagcugacggggcuggacugcauccggcccugcuucuggguggagcucauccgcggccggcccaaggagagcaccaucuggaccuccggcagcuccaucagcuucugcggggugaacuccgacaccgucggcuggagcuggcccgacggggccgagcugccguucacgaucgacaaguga

SEQ ID NO: 79663 - RNA, 1350 nt, Artificial Sequence
  derived and/or modified CDS sequence (opt1) from neuraminidase__InfluenzaA__ABL67829
augaaccccaacaagaagaucaucaccaucggcagcaucugcauggugaccgggauggucucccugaugcuccagaucggcaaccugaucagcaucugggugucccacagcauccacacggggaaccagcacaaggccgagccgaucuccaacaccaaccugcucaccgagaaggccguggcgagcgucaagcuggccggcaacuccagccugugccccaucaacgggugggccguguacuccaaggacaacagcauccgcaucggcuccaagggcgacguguucgucgugcgggagcccuucaucagcugcucccaccucgagugccgcaccuucuuccugacgcagggggcccugcucaacgacaagcacagcaacggcaccgugaaggaccggagcccccaccgcacccugauguccugcccggucggggaggcccccucccccuacaacagccgguucgaguccguggcguggagcgccagcgccugccacgacggcaccuccuggcugacgaucgggaucagcggccccgacaacggcgccguggcgguccucaaguacaacgggaucaucaccgacaccaucaaguccuggcgcaacaacauccugcggacccaggagagcgagugcgccugcgugaacggcuucugcuucacggugaugaccgacgggccguccaacggccaggccagccacaagaucuucaagauggagaagggcaaggucgugaaguccguggagcuggacgcccccaacuaccacuacgaggagugcagcugcuaccccgacgccggggagaucacgugcgucugccgcgacaacuggcacggcuccaaccggcccugggugagcuucaaccagaaccucgaguaccagaucggguacaucugcuccggcguguucggggacaacccgcgccccaacgacggcgcgggcagcugcgggcccgucgccuccaacggcgccuacggggugaagggcuucagcuucaaguacgggaacggcguguggaucggccggaccaaguccaccaacagccgcuccggguucgagaugaucugggaccccaacggcuggaccgagaccgacagcuccuucagcgucaagcaggacaucguggccaucaccgacuggagcggguacuccggcagcuucguccagcacccggagcugacggggcuggacugcauccggcccugcuucuggguggagcucauccgcggccggcccaaggaguccaccaucuggaccagcggcuccagcaucuccuucugcggggugaacagcgacaccgucggcugguccuggcccgacggggccgagcugccguucacgaucgacaaguga

SEQ ID NO: 79664 - RNA, 1410 nt, Artificial Sequence; identical to SEQ ID NO: 78736
  derived and/or modified CDS sequence (opt1) from neuraminidase__InfluenzaA__ABM22018

SEQ ID NO: 79665 - RNA, 1413 nt, Artificial Sequence; identical to SEQ ID NO: 79580
  derived and/or modified CDS sequence (opt1) from neuraminidase__InfluenzaA__ABM22029

SEQ ID NO: 79666 - RNA, 1410 nt, Artificial Sequence; identical to SEQ ID NO: 78738
  derived and/or modified CDS sequence (opt1) from neuraminidase__InfluenzaA__ABM22040

SEQ ID NO: 79667 - RNA, 1410 nt, Artificial Sequence; identical to SEQ ID NO: 79645
  derived and/or modified CDS sequence (opt1) from neuraminidase__InfluenzaA__ABM22062

SEQ ID NO: 79668 - RNA, 1410 nt, Artificial Sequence
  derived and/or modified CDS sequence (opt1) from neuraminidase__InfluenzaA__ABM22073
augaaccccaaccagaagaucaucaccaucggcagcgugucccugaccaucgccacgaucugcuuccucaugcagaucgccauccuggucaccaccgugacccugcacuucaagcaguacgagugcaacagcccgcccaacaaccaggugaugcucugcgagcccacgaucaucgagcgcaacaucaccgagaucgucuaccugaccaacaccacgaucgagaaggagaucugccccaagcuggcggaguaccggaacugguccaagccgcagugcaacaucaccggguucgcccccuucagcaaggacaacuccauccgccucagcgccggcggggacaucugggugacccgggagcccuacguguccugcgaccccgacaagugcuaccaguucgcccugggccaggggaccacgcugaacaacggccacagcaacgacaccguccacgaccgcaccccguaccggacccuccugaugaacgagcugggcgugcccuucaaccucgggacgcgccaggugugcaucgccugguccagcuccagcugccacgacggcaaggcguggcugcacgucugcgugaccggggacgacgagaacgccaccgccuccuucaucuacaacggcaagcugguggacagcaucggguccuggagcaagaagauccuccggacccaggaguccgagugcgucugcaucaacggcacgugcgccguggugaugaccgacggcagcgcguccgggaaggccgacaccaagauccuguucaucgaggagggcaagaucguccacaucagcacccugagcggguccgcccagcacguggaggagugcagcugcuacccccgcuaccccggcgugcggugcgucugccgcgacaacuggaagggcuccaaccggccgaucguggacaucaacgugaaggacuacagcaucgucuccagcuacgugugcuccgggcucgugggcgacacgccccgcaagaacgacagcuucuccagcucccacugccuggaccccaacaacgaggagggcgggcacggggucaagggcugggccuucgacgacggcaacgacguguggauggggcggaccaucagcgagaagcugcgcuccggcuacgagaccuucaaggucaucgagggguggagcaagcccaacuccaagcuccagaccaaccgccaggugaucguggagcggggcaaccggagcggguacuccggcaucuucagcgucgagggcaaguccugcaucaaccgcugcuucuacguggagcugauccgggggcgcaaggaggagacggaggugugguggaccagcaacagcaucgucguguucugcggcaccuccgggaccuacggcacggggagcuggccggacggcgccgacaucaaccugaugcccaucuga

SEQ ID NO: 79669 - RNA, 1410 nt, Artificial Sequence; identical to SEQ ID NO: 78615
  derived and/or modified CDS sequence (opt1) from neuraminidase__InfluenzaA__ABM22084

SEQ ID NO: 79670 - RNA, 1410 nt, Artificial Sequence
  derived and/or modified CDS sequence (opt1) from neuraminidase__InfluenzaA__ABM22095
augaaccccaaccagaagaucaucaccaucggcagcgugucccugaccaucgccacgaucugcuuccucaugcagaucgccauccuggucaccaccgugacccugcacuucaagcagcacgagugcaacagcccgcccaacaaccaggcgaugcucugcgagcccacgaucaucgagcgcaacaucaccgagaucgugcaccugaccaacaccacgaucgagaaggagaucugccccaagcuggucgaguaccggaacugguccaagccgcagugcaacaucaccggguucgcccccuucagcaaggacaacuccauccgccucagcgccggcggggacaucugggugacccgggagcccuacguguccugcgaccccgacaagugcuaccaguucgcccugggccaggggaccacgcugaacaacggccacagcaacgacaccguccacgaccgcaccccguaccggacccuccugaugaacgagcugggcgugcccuuccaccucgggacgcgccaggugugcaucgccugguccagcuccagcugccacgacggcaaggcguggcugcacgucugcgugaccggggacgacaagaacgccaccgccuccuucaucuacaacggccggcugguggacagcaucggguccuggagcaagaagauccuccgcacccaggaguccgagugcgucugcaucaacggcacgugcaccguggugaugaccgacggcagcgccuccgggaaggcggacaccaagauccuguucaucgaggagggcaagaucguccacaucagcacgcugagcggguccgcccagcacguggaggagugcagcugcuacccccgguaccccggcgugcgcugcgucugccgggacaacuggaagggcuccaaccgcccgaucguggacaucaacgugaaggacuacagcaucgucuccagcuacgugugcuccgggcucgugggcgacacgccccggaagaacgacagcuucuccagcucccacugccuggaccccaacaacgaggagggcgggcacggggucaagggcugggccuucgacgacggcaacgacguguggauggggcgcaccaucagcgagaagcugcgguccggcuacgagaccuucaaggucaucgagggguggagcaagcccaacuccaagcuccagaucaaccgccaggugaucguggagcggggcaaccgcagcggguacuccggcaucuucagcgucgagggcaaguccugcaucaaccggugcuucuacguggagcugauccgcgggcggaaggaggagaccgaggugugguggaccagcaacagcaucgucguguucugcggcaccuccgggaccuacggcacggggagcuggccggacggcgccgacaucaaccugaugcccaucuga

SEQ ID NO: 79671 - RNA, 1410 nt, Artificial Sequence; identical to SEQ ID NO: 78615
  derived and/or modified CDS sequence (opt1) from neuraminidase__InfluenzaA__ABM22106

SEQ ID NO: 79672 - RNA, 1410 nt, Artificial Sequence; identical to SEQ ID NO: 78615
  derived and/or modified CDS sequence (opt1) from neuraminidase__InfluenzaA__ABM22117

SEQ ID NO: 79673 - RNA, 1410 nt, Artificial Sequence; identical to SEQ ID NO: 79626
  derived and/or modified CDS sequence (opt1) from neuraminidase__InfluenzaA__ABM22128

SEQ ID NO: 79674 - RNA, 1410 nt, Artificial Sequence
  derived and/or modified CDS sequence (opt1) from neuraminidase__InfluenzaA__ABM22139
augaaccccaaccagaagaucaucaccaucggcagcgugucccugaccaucagcacgaucugcuucuucaugcagaucgccauccucaucaccaccgucacccugcacuucaagcaguacgaguucaacuccccgcccaacaaccaggugaugcugugcgagcccacgaucaucgagcgcaacaucaccgagaucguguaccucaccaacaccacgaucgagaaggagaucugccccaagcuggccgaguaccggaacuggagcaagccgcagugcaacaucaccggguucgcgcccuucuccaaggacaacagcauccgccuguccgccggcggggacaucugggucacccgggagcccuacgugagcugcgaccccgacaagugcuaccaguucgcccucggccaggggaccacgcugaacaacgugcacuccaacgacaccguccacgaccgcaccccguaccggacccugcucaugaacgagcugggcgugcccuuccaccugggcacgaagcaggucugcaucgccuggagcuccagcuccugccacgacgggaaggccuggcuccacgugugcgugaccggcgacgacaagaacgcgaccgccagcuucaucuacaacgggcgccugguggacuccaucgucagcugguccaaggagauccugcggacccaggagagcgagugcgugugcaucaacggcacgugcaccguggucaugaccgacggguccgccagcgagaaggccgacaccaagauccucuucaucgaggagggcaagaucgugcacacgagcacccuguccggcagcgcgcagcacguggaggagugcuccugcuacccccgcuaccccgggguccggugcgugugccgcgacaacuggaagggcagcaaccggccgaucguggacaucaacaucaaggacuacuccaucgucagcuccuacgugugcagcgggcuggugggcgacacgccccgcaagaacgacuccagcuccagcucccacugccucgaccccaacaacgaggagggcgggcacggcgucaaggggugggccuucgacgacggcaacgacguguggauggggcggaccaucagcgagaagcugcgcuccggcuacgagaccuucaaggucaucgagggcuggagcaaccccaacuccaagcugcagaucaaccgccaggugaucguggaccgggggaaccggagcggcuacuccgggaucuucagcgucgagggcaagagcugcaucaaccgcugcuucuacguggagcucauccgggggcgcaaggaggagaccgaggugcuguggaccuccaacagcaucgucguguucugcggcaccuccggcacguacgggaccggcagcuggccggacggggccgacaucaaccugaugcccaucuga

SEQ ID NO: 79675 - RNA, 1410 nt, Artificial Sequence
  derived and/or modified CDS sequence (opt1) from neuraminidase__InfluenzaA__ABM22150
augaaccccaaccagaagaucaucaccaucggcagcgugucccugaccaucagcacgaucugcuucuucaugcagaucgccauccucaucaccaccgucacccugcacuucaagcaguacgaguucaacucccugccgaacaaccaggugaugcucugcgagcccacgaucaucgagcgcaacaucaccgagaucguguaccugaccaacaccacgaucgagaaggagaucugccccgagcuggccgaguaccggaacuggagcaagccccagugcgacaucaccggguucgcgccguucuccaaggacaacagcauccgccucuccgccggcggggacaucugggucacccgggagcccuacgugagcugcgaccccgacaagugcuaccaguucgcccugggccaggggaccacgcugaacaacgugcacuccaacgacaccguccacgaccgcacccccuaccggacccuccugaugaacgagcugggcgugccguuccaccucggcacgaagcaggucugcaucgccuggagcuccagcuccugccacgacgggaaggccuggcugcacgugugcgugaccggcgacgacaagaacgcgaccgccagcuucaucuacaacgggcgccugguggacuccaucgucagcugguccaagaagauccuccggacccaggagagcgagugcgugugcaucaacggcacgugcaccguggucaugaccgacggguccgccagcggcaaggccgacaccaagauccuguucaucgaggagggcaagaucgugcacacgagcacccuguccgggagcgcgcagcacguggaggagugcuccugcuacccccgcuaccccggcguccggugcgugugccgcgacaacuggaaggggagcaaccggcccaucguggacaucaacaucaaggacuacuccaucgucagcuccuacgugugcagcggccucgugggcgacaccccgcgcaagaacgacuccagcuccagcucccacugccuggaccccaacaacgaggagggcgggcacggggucaagggcugggccuucgacgacgggaacgacguguggaugggccggaccaucagcgagaagcugcgcuccggcuacgagacguucaaggucaucgagggguggagcaaccccaacuccaagcuccagaucaaccgccaggugaucguggaccggggcaaccggagcggguacuccggcaucuucagcgucgagggcaagagcugcaucaaccgcugcuucuacguggagcugauccgggggcgcaaggaggagaccgaggugcuguggaccuccaacagcaucgucguguucugcggcaccuccgggacguacggcaccgggagcuggcccgacggcgccgacaucaaccucaugccgaucuga

SEQ ID NO: 79676 - RNA, 1413 nt, Artificial Sequence; identical to SEQ ID NO: 79083
  derived and/or modified CDS sequence (opt1) from neuraminidase__InfluenzaA__ABM22161

SEQ ID NO: 79677 - RNA, 1413 nt, Artificial Sequence; identical to SEQ ID NO: 79083
  derived and/or modified CDS sequence (opt1) from neuraminidase__InfluenzaA__ABM22172

SEQ ID NO: 79678 - RNA, 1413 nt, Artificial Sequence; identical to SEQ ID NO: 79083
  derived and/or modified CDS sequence (opt1) from neuraminidase__InfluenzaA__ABM22183

SEQ ID NO: 79679 - RNA, 1413 nt, Artificial Sequence; identical to SEQ ID NO: 79083
  derived and/or modified CDS sequence (opt1) from neuraminidase__InfluenzaA__ABM22194

SEQ ID NO: 79680 - RNA, 1413 nt, Artificial Sequence; identical to SEQ ID NO: 79083
  derived and/or modified CDS sequence (opt1) from neuraminidase__InfluenzaA__ABM22205

SEQ ID NO: 79681 - RNA, 1413 nt, Artificial Sequence; identical to SEQ ID NO: 79083
  derived and/or modified CDS sequence (opt1) from neuraminidase__InfluenzaA__ABM22216

SEQ ID NO: 79682 - RNA, 1413 nt, Artificial Sequence; identical to SEQ ID NO: 79083
  derived and/or modified CDS sequence (opt1) from neuraminidase__InfluenzaA__ABM22227

SEQ ID NO: 79683 - RNA, 1413 nt, Artificial Sequence; identical to SEQ ID NO: 79083
  derived and/or modified CDS sequence (opt1) from neuraminidase__InfluenzaA__ABM22238

SEQ ID NO: 79684 - RNA, 1413 nt, Artificial Sequence
  derived and/or modified CDS sequence (opt1) from neuraminidase__InfluenzaA__ABM22271
augaaccccaaccagaagaucaucaccaucggcagcaucuccaucgugaucgggaucaucagccugauccuccagaucggcaacaucaucuccaucugggccagccacuccauccagaccgggagccagaaccacacgggcaucugcaaccagcgcaucaucaccuacgagaacuccaccugggucaaccagaccuacgugaacaucaacaacacgaacguggucgccgggaaggacaagaccagcaugacccuggcgggcaacuccagccugugcccgauccggggcugggccaucuacaccaaggacaacuccauccgcaucgggagcaagggcgacguguucgugauccgggagcccuucaucuccugcagccaccucgagugccgcacguucuuccugacccagggggcccugcucaacgacaagcacuccaacggcaccgucaaggaccggagccccuaccgcgcccugauguccugcccccugggggaggccccgagccccuacaacucccgguucgagagcguggcguggagcgccuccgccugccacgacggccucggcuggcugaccaucgggaucagcggccccgacaacggggccguggcgguccugaaguacaacggcaucaucacggagaccaucaaguccuggaagaagcgcauccuccggacccaggagagcgagugcgugugcaugaacggcuccugcuucaccaucaugacggacgggcccagcaacggcgccgccuccuaccgcaucuucaagaucgagaaggggcgggugaccaagagcaucgagcugggcgccccgaacuaccacuacgaggagugcuccugcuaccccgacaccgggaccgucaugugcgugugccgcgacaacuggcacggcagcaaccggcccuggguguccuucaaccagaaccuggacuaccagaucggcuacaucugcagcggggucuucggcgacaacccccgcccgaaggacggggagggcuccugcaaccccgugacgguggacggggccgacggcgucaagggcuucagcuaccgguacgggaacggcguguggaucgggcgcaccaaguccaaccggcuccgcaagggcuucgagaugaucugggaccccaacggguggaccgacaccgacagcgacuucuccaugaagcaggacaucguggcgaugacggacuggagcggcuacuccggcagcuucguccagcaccccgagcugaccgggcuggacugcaugcggccgugcuucuggguggagcucgugcgcggccugccccgggagaacaccaccaucuggacgagcggguccagcaucuccuucugcggcgucaacagcgacaccgccaacugguccuggcccgacggcgccgagcugcccuucaccaucgacaaguga

SEQ ID NO: 79685 - RNA, 1413 nt, Artificial Sequence; identical to SEQ ID NO: 78992
  derived and/or modified CDS sequence (opt1) from neuraminidase__InfluenzaA__ABM22282

SEQ ID NO: 79686 - RNA, 1410 nt, Artificial Sequence; identical to SEQ ID NO: 78367
  derived and/or modified CDS sequence (opt1) from neuraminidase__InfluenzaA__ABM22304

SEQ ID NO: 79687 - RNA, 1410 nt, Artificial Sequence; identical to SEQ ID NO: 78367
  derived and/or modified CDS sequence (opt1) from neuraminidase__InfluenzaA__ABM22315

SEQ ID NO: 79688 - RNA, 1410 nt, Artificial Sequence; identical to SEQ ID NO: 78367
  derived and/or modified CDS sequence (opt1) from neuraminidase__InfluenzaA__ABM22326

SEQ ID NO: 79689 - RNA, 1410 nt, Artificial Sequence; identical to SEQ ID NO: 78367
  derived and/or modified CDS sequence (opt1) from neuraminidase__InfluenzaA__ABM22337

SEQ ID NO: 79690 - RNA, 1410 nt, Artificial Sequence; identical to SEQ ID NO: 78370
  derived and/or modified CDS sequence (opt1) from neuraminidase__InfluenzaA__ABM22348

SEQ ID NO: 79691 - RNA, 1410 nt, Artificial Sequence; identical to SEQ ID NO: 78370
  derived and/or modified CDS sequence (opt1) from neuraminidase__InfluenzaA__ABM22359

SEQ ID NO: 79692 - RNA, 1410 nt, Artificial Sequence; identical to SEQ ID NO: 78370
  derived and/or modified CDS sequence (opt1) from neuraminidase__InfluenzaA__ABM22370

SEQ ID NO: 79693 - RNA, 1413 nt, Artificial Sequence; identical to SEQ ID NO: 78949
  derived and/or modified CDS sequence (opt1) from neuraminidase__InfluenzaA__ABM66867

SEQ ID NO: 79694 - RNA, 1413 nt, Artificial Sequence; identical to SEQ ID NO: 79083
  derived and/or modified CDS sequence (opt1) from neuraminidase__InfluenzaA__ABM66900

SEQ ID NO: 79695 - RNA, 1413 nt, Artificial Sequence; identical to SEQ ID NO: 79083
  derived and/or modified CDS sequence (opt1) from neuraminidase__InfluenzaA__ABM66911

SEQ ID NO: 79696 - RNA, 1410 nt, Artificial Sequence; identical to SEQ ID NO: 78370
  derived and/or modified CDS sequence (opt1) from neuraminidase__InfluenzaA__ABM66922

SEQ ID NO: 79697 - RNA, 1410 nt, Artificial Sequence; identical to SEQ ID NO: 78370
  derived and/or modified CDS sequence (opt1) from neuraminidase__InfluenzaA__ABM66933

SEQ ID NO: 79698 - RNA, 1410 nt, Artificial Sequence; identical to SEQ ID NO: 78370
  derived and/or modified CDS sequence (opt1) from neuraminidase__InfluenzaA__ABM66944

SEQ ID NO: 79699 - RNA, 1410 nt, Artificial Sequence; identical to SEQ ID NO: 78370
  derived and/or modified CDS sequence (opt1) from neuraminidase__InfluenzaA__ABM66955

SEQ ID NO: 79700 - RNA, 1410 nt, Artificial Sequence; identical to SEQ ID NO: 78370
  derived and/or modified CDS sequence (opt1) from neuraminidase__InfluenzaA__ABM66966

SEQ ID NO: 79701 - RNA, 1410 nt, Artificial Sequence; identical to SEQ ID NO: 78370
  derived and/or modified CDS sequence (opt1) from neuraminidase__InfluenzaA__ABM66977

SEQ ID NO: 79702 - RNA, 1410 nt, Artificial Sequence; identical to SEQ ID NO: 78370
  derived and/or modified CDS sequence (opt1) from neuraminidase__InfluenzaA__ABM66988

SEQ ID NO: 79703 - RNA, 1410 nt, Artificial Sequence; identical to SEQ ID NO: 78370
  derived and/or modified CDS sequence (opt1) from neuraminidase__InfluenzaA__ABM66999

SEQ ID NO: 79704 - RNA, 1410 nt, Artificial Sequence; identical to SEQ ID NO: 78370
  derived and/or modified CDS sequence (opt1) from neuraminidase__InfluenzaA__ABM67010

SEQ ID NO: 79705 - RNA, 1410 nt, Artificial Sequence; identical to SEQ ID NO: 78370
  derived and/or modified CDS sequence (opt1) from neuraminidase__InfluenzaA__ABM67021

SEQ ID NO: 79706 - RNA, 1413 nt, Artificial Sequence
  derived and/or modified CDS sequence (opt1) from neuraminidase__InfluenzaA__ABM67054
augaaccccaaccagaagaucaucaccaucggcagcaucuccaucgccaucgggaccaucagccugaugcuccagaucggcaacaugaucuccaucugggccagccacuccauccagacggggagccagaaccacaccggcaucugcaaccagcgcaucaucaccuacgagaacuccaccugggugaaccacacguacgucaacaucaacaacaccaacgugguggcggggaaggacaagaccagcgucacccuggccggcaacuccagccugugcuccaucagcggcugggccaucuacacgaaggacaacuccauccggaucgggagcaagggcgacguguucgugauccgcgagccguucaucuccugcagccaccucgagugccggaccuucuuccugacccagggggcccugcucaacgacaagcacuccaacggcaccgucaaggaccgcagccccuaccgggcccugauguccugcccccugggggaggcgcccagcccguacaacagcaaguucgaguccguggccuggagcgccuccgccugccacgacggcaugggcuggcucacgaucgggaucagcggccccgacaacggggcgguggccguccugaaguacaacggcaucaucaccgagaccaucaaguccuggaagaagcgcauccugcggacccaggagagcgagugcgugugcgugaacggcuccugcuucacgaucaugaccgacgggcccagcaacggcgccgccuccuacaagaucuucaagaucgagaaggggaaggucaccaagagcaucgagcucaacgcccccaacuuccacuacgaggagugcuccugcuacccggacaccggcacggugaugugcgugugccgcgacaacuggcacgggagcaaccggcccugggucuccuucaaccagaaccuggacuaccagaucggcuacaucugcagcggcguguucggggacaacccccgccccaaggacggcaagggguccugcaacccggugaccgucgacggcgcggacggggugaagggcuucagcuacaaguacggcaacgggguguggaucggccggaccaaguccaaccgccugcggaagggguucgagaugaucugggaccccaacggcuggaccgacacggacagcgacuucuccgucaagcaggacgugguggccaucaccgacuggagcggguacagcggcuccuucguccagcaccccgagcucaccggccuggacugcauccgccccugcuucuggguggagcugguccgggggcucccgcgcgagaacaccacgaucuggaccagcggcuccagcaucuccuucugcgggguggacagcgacaccgccaacugguccuggcccgacggcgccgagcugcccuucaccaucgacaaguga

SEQ ID NO: 79707 - RNA, 1350 nt, Artificial Sequence
  derived and/or modified CDS sequence (opt1) from neuraminidase__InfluenzaA__ABM68048
augaaccccaaccagaagaucaucaccaucggcagcaucugcauggugaucgggaucgucucccugaugcuccagaucggcaacaucaucagcaucuggaucucccacagcauccagaccgggaaccagugccaggccggcccgaucuccaacacgaaguuccugaccgagaaggccguggcgagcgugacccuggccgggaacuccagccucugccccaucuccggcugggccgucuacagcaaggacaacuccauccgcaucggcagccgcggggacguguucgugauccgggaguccuucaucagcugcucccaccuggagugccggaccuucuuccugacgcagggcgcccuccugaacgacaagcacagcaacgggaccgucaaggaccgcagcccccaccggacccugaugagcugccccgugggcgaggccccgucccccuacaacagccgcuucgagagcguggcgugguccgccagcgccugccacgacgggaccuccuggcucacgaucggcaucagcggccccgacaacggggccgucgcggugcugaaguacaacggcaucaucaccgacaccaucaaguccuggcggaacaacauccugcgcacccaggagagcgagugcgccugcgugaacggguccugcuucacggucaugaccgacggccccagcaacggccaggccuccuacaagaucuucaagauggagaaggggaagguggugaaguccgucgagcucgacgccccgaacuaccacuacgaggagugcuccugcuaccccgacgccggcgagaucacgugcgugugccgggacagcuggcacggguccaaccgccccugggugagcuucaaccagaaccuggaguaccagaucggcuacaucugcuccggggucuucggcgacaacccccggccgaacgacggcaccgggagcugcggccccgugucccccaacggggcguacggcgugaagggguucagcuucaaguacggcaacggcgucuggaucgggcgcaccaaguccaccaacagccggagcggcuucgagaugaucugggaccccaacggguggaccggcaccgacuccagcuucuccgugaagcaggacaucguggccaucacggacuggagcggguacuccggcagcuucguccagcacccggagcugaccggccucgacugcauccgccccugcuucuggguggagcugauccgggggcgccccaaggaguccaccaucuggaccagcggcuccagcaucuccuucugcggggucaacagcgacacgguguccuggagcuggcccgacggcgccgagcugccguucaccaucgacaaguga

SEQ ID NO: 79708 - RNA, 1350 nt, Artificial Sequence
  derived and/or modified CDS sequence (opt1) from neuraminidase__InfluenzaA__ABM68049
augaaccccaaccagaagaucaucaccaucggcagcaucugcauggugaucgggaucgucucccugaugcuccagaucggcaacaucaucagcaucuggaucucccacagcauccagaccgggaaccagugccaggccgagccgaucuccaacacgaaguuccugaccgagaaggccguggcgagcgugacccuggccggcaacuccagccucugccccaucuccgggugggccgucuacagcaaggacaacuccauccgcaucggcagccggggcgacguguucgugauccgcgagcccuucaucuccugcagccaccuggagugccggaccuucuuccugacgcagggggcccuccugaacgacaagcacuccaacggcaccgucaaggaccgcagcccccaccggacccugauguccugcccggugggggaggcccccagccccuacaacucccgcuucgagagcguggcguggagcgccuccgccugccacgacggcaccagcuggcucacgaucgggaucuccggccccgacaacggcgccgucgcggugcugaaguacaacgggaucaucaccgacaccaucaagagcuggcggaacaacauccugcgcacccaggaguccgagugcgccugcgugaacggcagcugcuucacggucaugaccgacgggccguccagcggccaggccuccuacaagaucuucaagauggagaagggcaagguggucaagagcguggagcucgacgcccccaacuaccacuacgaggagugcuccugcuaccccgacgccggggagaucacgugcgugugccgggacagcuggcacggcuccaaccgccccugggugagcuucaaccagaaccuggaguaccagaucggguacaucugcuccggcgucuucggggacaacccgcggcccaacgacggcaccggcagcugcgggcccgugucccccaacggcgcguacggggugaagggcuucagcuucaaguacgggaacggcgucuggaucggccgcaccaaguccaccaacagccggagcggguucgagaugaucugggacccgaacggcuggaccgggaccgacuccagcuucuccgugaagcaggacaucguggccaucacggacuggagcggcuacuccgggagcuucguccagcaccccgagcugaccggccucgacugcauccgccccugcuucuggguggagcugauccggggccgccccaaggaguccaccaucuggaccagcggguccagcaucuccuucugcggcgucaacagcgacacgguguccuggagcuggccggacggggccgagcugcccuucaccaucgacaaguga

SEQ ID NO: 79709 - RNA, 1350 nt, Artificial Sequence
  derived and/or modified CDS sequence (opt1) from neuraminidase__InfluenzaA__ABM90436
augaaccccaaccagaagaucaucaccaucggcagcaucugcauggugaucgggaucgucucccugaugcuccagaucggcaacaugaucagcaucugggugucccacagcauccagaaggggaaccagcaccaggccgaguccaucagcaacaccaacccgcugacggagaaggccguggcguccgucacccuggccggcaacagcucccucugccccauccgcgggugggccgugcacagcaaggacaacaacauccggaucggcuccaagggcgacguguucgucauccgcgagcccuucaucagcugcucccaccuggagugccggaccuucuuccugacccagggggcccuccugaacgacaagcacagcaacggcacggugaaggaccgcagcccccaccggacccugauguccugcccggugggggaggcccccucccccuacaacagccgcuucgaguccgucgcguggagcgccagcgccugccacgacggcaccuccuggcucaccaucgggaucagcggccccgacaacgaggccguggcggugcugaaguacaacggcaucaucacggacaccaucaaguccuggcggaacaacauccugcgcacccaggagagcgagugcgccugcgucaacggguccugcuucaccgugaugacggacggcccgagcaacgggcaggccuccuacaagaucuucaagaugaagaagggcaagguggucaagagcguggagcucgacgcccccaacuaccacuacgaggagugcuccugcuaccccgacgccggcgagaucacgugcgugugccgggacaacuggcacgggagcaaccgccccugggucuccuucaaccagaaccuggaguaccagaucggcuacaucugcagcgggguguucggcgacaacccgcggcccaacgacgggaccggcuccugcggccccaugagccccaacggggcguacggcgugaagggguucuccuucaaguacggcaacggggucuggaucggccgcaccaagagcaccaacucccggagcggcuucgagaugaucugggacccgaacggguggaccggcaccgacuccagcuucagcgugaagcaggacaucguggccaucaccgacugguccggguacagcggcuccuucguccagcaccccgagcugacggggcucgacugcauccgccccugcuucuggguggagcugauccggggccgccccaaggagagcaccaucuggaccuccggcagcuccaucagcuucugcggggucaacuccgacaccgugagcugguccuggccggacggcgccgagcugcccuucacgaucgacaaguga

SEQ ID NO: 79710 - RNA, 1350 nt, Artificial Sequence; identical to SEQ ID NO: 79709
  derived and/or modified CDS sequence (opt1) from neuraminidase__InfluenzaA__ABM90447

SEQ ID NO: 79711 - RNA, 1350 nt, Artificial Sequence; identical to SEQ ID NO: 79709
  derived and/or modified CDS sequence (opt1) from neuraminidase__InfluenzaA__ABM90458

SEQ ID NO: 79712 - RNA, 1350 nt, Artificial Sequence; identical to SEQ ID NO: 79709
  derived and/or modified CDS sequence (opt1) from neuraminidase__InfluenzaA__ABM90469

SEQ ID NO: 79713 - RNA, 1350 nt, Artificial Sequence
  derived and/or modified CDS sequence (opt1) from neuraminidase__InfluenzaA__ABM90491
augaaccccaaccagaagaucaucaccaucggcagcaucugcauggugaucgggaucgucucccugaugcuccagaucggcaacaugaucagcaucugggugucccacagcauccagaaggggaaccagcaccaggccgaguccaucagcaacaccaacccgcugacggagaaggccguggcguccgucacccuggccggcaacagcucccucugccccauccgcgggugggccgugcacagcaaggacaacaacauccggaucggcuccaagggcgacguguucgucauccgcgagcccuucaucagcugcucccaccuggagugccggaccuucuuccugacccagggggcccuccugaacgacaagcacagcaacggcacggugaaggaccgcagcccccaccggacccugauguccugcccggugggggaggcccccucccccuacaacagccgcuucgaguccgucgcguggagcgccagcgccugccacgacggcaccuccuggcucaccaucgggaucagcggccccgacaacgaggccguggcggugcugaaguacaacggcaucaucacggacaccaucaaguccuggcggaacaacauccugcgcacccaggagagcgagugcgccugcgucaacggguccugcuucaccgugaugacggacggcccgagcaacgggcaggccuccuacaagaucuucaagaugaagaagggcaaggugaucaagagcgucgagcucgacgccaccaacuaccacuacgaggagugcuccugcuaccccgacgccggcgagaucacgugcgugugccgggacaacuggcacgggagcaaccgccccuggguguccuucaaccagaaccuggaguaccagaucggcuacaucugcagcggggucuucggcgacaacccccggccgaacgacgggaccggcuccugcggccccaugagccccaacggggcguacggcgugaagggguucuccuucaaguacggcaacgggguguggaucggccgcaccaagagcaccaacucccggagcggcuucgagaugaucugggaccccaacggguggaccggcaccgacuccagcuucagcgucaagcaggacaucguggccaucacggacugguccggguacagcggcuccuucgugcagcacccggagcugaccgggcucgacugcauccgccccugcuucugggucgagcugauccggggccgccccaaggagagcaccaucuggaccuccggcagcuccaucagcuucugcggggugaacuccgacacggucagcugguccuggcccgacggcgccgagcugccguucaccaucgacaaguga

SEQ ID NO: 79714 - RNA, 1350 nt, Artificial Sequence; identical to SEQ ID NO: 79713
  derived and/or modified CDS sequence (opt1) from neuraminidase__InfluenzaA__ABM90502

SEQ ID NO: 79715 - RNA, 1350 nt, Artificial Sequence
  derived and/or modified CDS sequence (opt1) from neuraminidase__InfluenzaA__ABM90524
augaaccccaaccagaagaucaucaccaucggcagcaucugcauggugaucgggaucgucucccugaugcuccagaucggcaacaugaucagcaucugggugucccacagcauccagaccgggaaccagcaccaggccgaguccaucagcaacacgaacccgcugaccgagaaggccguggucuccgugacccuggcgggcaacagcucccucugccccauccgcgggugggccgugcacagcaaggacaacaacauccggaucggcuccaagggcgacgucuucgugauccgcgagcccuucaucagcugcucccaccuggagugccggaccuucuuccugacgcagggggcccuccugaacgacaagcacagcaacggcaccgugaaggaccgcagcccccaccggacccugaugagcugcccggucggggaggcccccucccccuacaacagccgcuucgaguccguggccuggagcgcgagcgccugccacgacggcaccuccuggcucacgaucgggaucagcggccccgacaacgaggccguggccguccugaaguacaacggcaucaucaccgacaccaucaaguccuggcggaacaacauccugcgcacccaggagagcgagugcgcgugcgugaacggguccugcuucacggugaugaccgacggcccgagcaacgggcaggccuccuacaagaucuucaagauggagaagggcaaggucgugaaguccguggagcucgacgcccccaacuaccacuacgaggagugcuccugcuaccccgacgccggcgagaucacgugcgucugccgggacaacuggcacgggagcaaccgccccuggguguccuucaaccagaaccuggaguaccagaucggcuacaucugcagcgggguguucggcgacaacccgcggcccaacgacgggaccggcuccugcggccccaugagccccaacggggccuacggcgucaagggguucuccuucaaguacggcaacgggguguggaucggccgcaccaagagcaccaacucccggagcggcuucgagaugaucugggacccgaacggguggaccggcaccgacuccagcuucagcgugaagcaggacaucgucgcgaucacggacugguccggguacagcggcuccuucgugcagcaccccgagcugaccgggcucgacugcauccgccccugcuucugggucgagcugauccggggccgccccaaggagagcaccaucuggaccuccggcagcuccaucagcuucugcggggugaacuccgacacggugagcugguccuggccggacggcgccgagcugcccuucaccaucgacaaguga

SEQ ID NO: 79716 - RNA, 1350 nt, Artificial Sequence; identical to SEQ ID NO: 79715
  derived and/or modified CDS sequence (opt1) from neuraminidase__InfluenzaA__ABM90535

SEQ ID NO: 79717 - RNA, 1350 nt, Artificial Sequence; identical to SEQ ID NO: 79715
  derived and/or modified CDS sequence (opt1) from neuraminidase__InfluenzaA__ABM90546

SEQ ID NO: 79718 - RNA, 1413 nt, Artificial Sequence
  derived and/or modified CDS sequence (opt1) from neuraminidase__InfluenzaA__ABN50759
augaaccccaaccagaagaucaucaccaucggcagcaucugcauggccaucgggaucaucucccugauccuccagaucggcaacaucaucagcaucugggugucccacagcauccagaccgggucccagaaccacacgggcaucugcaaccagcgcaucaucaccuacgagaacagcaccugggucaaccagaccuacgugaacaucuccaacacgaacguggucgccgggaaggacaccaccagcaugacccuggcgggcaacuccagccugugcccgauccggggcugggccaucuacuccaaggacaacagcauccgcaucggguccaagggcgacguguucgugauccgggagcccuucaucagcugcucccaccucgagugccgcacguucuuccugacccagggggcccugcucaacgacaagcacagcaacggcaccgucaaggaccggucccccuaccgcgcccugaugagcugccccaucggggaggccccgucccccuacaacagccgguucgagagcguggcgugguccgccagcgccugccacgacggcaugggcuggcugaccaucgggaucuccggccccgacgacggggccguggcgguccucaaguacaacggcaucaucacggagaccaucaagagcuggcgcaagcagauccugcggacccaggaguccgagugcgugugcgugaacggcagcugcuucaccaucaugacggacgggcccuccgacggccaggccagcuaccgcaucuucaagaucgagaaggggaagaucaccaaguccaucgagcuggacgccccgaacagccacuacgaggagugcuccugcuaccccgacaccggcaccgucaugugcgugugccgggacaacuggcacgggagcaaccgccccuggguguccuucaaccagaaccucgacuaccagaucggcuacaucugcagcggcgucuucggggacaacccccggccgaaggacggcaagggguccugcgaccccgugaacguggacggcgccgacggggucaagggcuucagcuaccgcuacggcaacgggguguggaucggccggacgaaguccaacagcucccgcaagggguucgagaugaucugggaccccaacggcuggaccgacaccgacagcaacuuccuggugaagcaggacgucguggccaugaccgacuggagcggguacuccggcagcuucgugcagcaccccgagcugacgggccucgacugcauccggccgugcuucugggucgagcugauccgcgggcggccccgcgagaagaccaccaucuggaccuccggcagcuccaucagcuucugcggggugaacuccgacacggucaacuggagcuggcccgacggcgcggagcugcccuucaccaucgacaaguga

SEQ ID NO: 79719 - RNA, 1410 nt, Artificial Sequence
  derived and/or modified CDS sequence (opt1) from neuraminidase__InfluenzaA__ABN50770
augaaccccaaccagaagaucaucaccaucggcagcgugucccugaccaucagcacgaucugcuucuucaugcagaucgccauccucaucaccaccgucacccugcacuucaagcaguacgaguucaacuccccgcccaacaaccaggugaugcugugcgagcccacgaucaucgagcgcaacaucaccgagaucguguaccucaccaacaccacgaucgagaaggagaucugccccaagcuggccgaguaccggaacuggagcaagccgcagugcgacaucaccggguucgcgcccuucuccaaggacaacagcauccgccuguccgccggcggggacaucugggucacccgggagcccuacgugagcugcgaccccgacaagugcuaccaguucgcccucggccaggggaccacgcugaacaacgugcacuccaacgacaccguccacgaccgcaccccguaccggacccugcucaugaacgagcugggcgugcccuuccaccugggcacgaagcaggucugcaucgccuggagcuccagcuccugccacgacgggaaggccuggcuccacgugugcgugaccggcgacgacaagaacgcgaccgccagcuucaucuacaacgggcgccugguggacuccgucgugagcugguccaagaagauccugcggacccaggagagcgagugcgugugcaucaacggcacgugcaccgucgugaugaccgacggguccgccagcggcaaggccgacaccaagauccucuucaucgaggagggcaagaucgugcacacgagcacccuguccgggagcgcgcagcacgucgaggagugcuccugcuacccccgcuaccccggcgugcggugcgugugccgcgacaacuggaaggggagcaaccggccgaucgucgacaucaacaucaaggacuacuccaucgugagcuccuacgugugcagcggccuggucggcgacacgccccgcaagaacgacuccagcuccagcucccacugccucgaccccaacaacgaggagggcgggcacggggugaagggcugggccuucgacgacgggaacgacgucuggaugggccggaccaucagcgagaagcugcgcuccggcuacgagaccuucaaggugaucgagggguggagcaaccccaacuccaagcugcagaucaaccgccaggugaucgucgaccggggcaaccggagcggguacuccggcaucuucagcguggagggcaagagcugcaucaaccgcugcuucuacguggagcucauccgggggcgcaaggaggagaccgagguccuguggaccuccaacagcaucgugguguucugcggcaccuccgggacguacggcaccgggagcuggccggacggcgccgacaucaaccugaugcccaucuga

SEQ ID NO: 79720 - RNA, 1413 nt, Artificial Sequence
  derived and/or modified CDS sequence (opt1) from neuraminidase__InfluenzaA__ABN50903
augaaccccaaccagaagaucaucaccaucggcagcaucugcauggccaucgggaucaucucccugauccuccagaucggcaacaucaucagcaucugggugucccacagcauccagaccgggucccagaaccacacgggcaucugcaaccagcgcaucaucaccuacgagaacagcaccugggucaaccagaccuacgugaacaucaacaacacgaacguggucgccgggaaggacaccaccuccgugacccuggcgggcaacagcucccugugcccggugcggggcugggccaucuacagcaaggacaacuccauccgcaucgggagcaagggcgacgucuucgugauccgggagcccuucaucuccugcagccaccucgagugccgcacguucuuccugacccagggggcccugcucaacgacaagcacuccaacggcaccgugaaggaccggagccccuaccgcgcccugauguccugccccaucggggaggccccgagccccuacaacucccgguucgagagcgucgcguggagcgccuccgccugccacgacggcaugggcuggcugaccaucgggaucagcggccccgacgacggggccguggcggugcucaaguacaacggcaucaucacggagaccaucaaguccuggcgcaagcggauccugcgcacccaggagagcgagugcgucugcgugaacggcuccugcuucaccaucaugacggacgggcccagcaacggcccggccuccuaccggaucuucaagaucgagaaggggaagaucaccaagagcaucgagcuggacgcccccaacucccacuacgaggagugcagcugcuaccccgacaccggcaccgugaugugcgucugccgcgacaacuggcacggguccaaccggcccugggugagcuucaaccagaaccucgacuaccagaucggcuacaucugcuccggcguguucggggacaacccgcgccccaaggacggcaaggggagcugcggccccgucacgguggacggggccgacggcgugaagggcuucuccuaccgguacgggaacggcgucuggaucgggcgcaccaagagcaacuccagccggaagggcuucgagaugaucugggaccccaacggguggaccgacaccgacuccaacuuccuggugaagcaggacguggucgccaugacggacuggagcggcuacagcggcuccuucauccagcacccggagcugaccgggcucgacugcaugcgccccugcuucuggguggagcugauccggggccgcccccgggagaagaccaccaucuggacgagcggguccagcaucuccuucugcggcgucaacagcgacaccgugaacugguccuggcccgacggcgcggagcugccguucaccaucgacaaguga

SEQ ID NO: 79721 - RNA, 1413 nt, Artificial Sequence; identical to SEQ ID NO: 79083
  derived and/or modified CDS sequence (opt1) from neuraminidase__InfluenzaA__ABN50920

SEQ ID NO: 79722 - RNA, 1413 nt, Artificial Sequence
  derived and/or modified CDS sequence (opt1) from neuraminidase__InfluenzaA__ABN50931
augaaccccaaccagaagaucaucaccaucggcagcaucugcauggccaucgggaucaucucccugauccuccagaucggcaacaucgugagcaucuggaucucccacagcauccagaccgggucccagaacuacacgggcaucugcaaccagcgcaucaucaccuacgagaacagcaccugggucaaccagaccuacgugaacaucaacaacacgaacguggucgccgggcaggacaccaccuccguggcgcuggccggcaacagcucccugugcccgaucagcggcugggccaucuacuccaaggacaacagcauccggaucggguccaagggcgacguguucgucauccgcgagcccuucaucagcugcucccaccucgagugccggaccuucuuccugacgcagggggcccugcucaacgacaagcacagcaacggcaccgugaaggaccgcucccccuaccgggcccugaugagcugccccaucggggaggcgccgucccccuacaacagccgcuucgagagcguggccugguccgccagcgccugccacgacggcaugggcuggcugaccaucgggaucuccggccccgacgacggggcggucgccgugcucaaguacaacggcaucaucaccgagacgaucaagagcuggcggaagcgcauccugcggacccaggaguccgagugcgugugcgucaacggcagcugcuucaccaucaugaccgacgggcccaacaacggcccggccuccuacaagaucuucaagaucgagaaggggaagaucaccaagagcaucgagcuggacgcccccaacucccacuacgaggagugcagcugcuaccccgacgccggcacggugaugugcgugugccgcgacaacuggcacggguccaaccggcccugggucagcuucaaccagaaccucgacuaccagaucggcuacaucugcuccggcguguucggggacaacccgcgccccaaggacggcaaggggagcugcggccccgugaccgucgacggggcggacggcgugaagggcuucuccuaccgguacgggaacggcguguggaucgggcgcaccaagagcaacuccagccggcgcggcuucgagaugaucugggaccccaacggguggacggacaccgacuccaaguuccuggucaagcaggacgugguggccaucaccgacuggagcggcuacagcggcuccuucguccagcacccggagcugaccgggcucgacugcaugcggcccugcuucuggguggagcugauccgcggccggccccgcgagaacacgaccaucuggaccagcggguccagcaucuccuucugcggcgucaacggcgacaccgccaacuggagcuggcccgacggggccgagcugccguucacgaucgacaaguga

SEQ ID NO: 79723 - RNA, 1413 nt, Artificial Sequence
  derived and/or modified CDS sequence (opt1) from neuraminidase__InfluenzaA__ABN50943
augaaccccaaccagaagaucaucaccaucggcagcaucugcauggccaucgggaucaucucccugauccuccagaucggcaacaucgugagcaucuggaucucccacagcauccagaccgggucccagaacuacacgggcaucugcaaccagcgcaucaucaccuacgagaacagcaccugggucaaccagaccuacgugaacaucaacaacacgaacguggucgccgggcaggacaccaccuccguggcgcuggccggcaacagcucccugugcccgaucagcggcugggccaucuacuccaaggacaacagcauccggaucggguccaagggcgacguguucgucauccgcgagcccuucaucagcugcucccaccucgagugccggaccuucuuccugacgcagggggcccugcucaacgacaagcacagcaacggcaccgugaaggaccgcucccccuaccgggcccugaugagcugccccaucggggaggcgccgucccccuacaacagccgcuucgagagcguggccugguccgccagcgccugccacgacggcaugggcuggcugaccaucgggaucuccggccccgacgacggggcggucgccgugcucaaguacaacggcaucaucaccgagacgaucaagagcuggcggaagcgcauccugcggacccaggaguccgagugcgugugcgucaacggcagcugcuucaccaucaugaccgacgggcccaacaacggcccggccuccuacaagaucuucaagaucgagaaggggaagaucaccaagagcaucgagcuggacgcccccaacucccacuacgaggagugcagcugcuaccccgacgccggcacggugaugugcgugugccgcgacaacuggcacggguccaaccggcccugggucagcuucaaccagaaccucgacuaccagaucggcuacaucugcuccggcguguucggggacaacccgcgccccaaggacggcaaggggagcugcggccccgugaccgucgacggggcggacggcgugaagggcuucuccuaccgguacgggaacggcguguggaucgggcgcaccaagagcaacuccagccggcgcggcuucgagaugaucugggaccccaacggguggacggacaccgacuccaaguuccuggucaagcaggacgugguggccaugaccgacuggagcggcuacagcggcuccuucguccagcacccggagcugaccgggcucgacugcaugcggcccugcuucuggguggagcugauccgcggccggccccgcgagaacacgaccaucuggaccagcggguccagcaucuccuucugcggcgucaacggcgacaccgccaacuggagcuggcccgacggggccgagcugccguucacgaucgacaaguga

SEQ ID NO: 79724 - RNA, 1413 nt, Artificial Sequence; identical to SEQ ID NO: 78992
  derived and/or modified CDS sequence (opt1) from neuraminidase__InfluenzaA__ABN50954

SEQ ID NO: 79725 - RNA, 1413 nt, Artificial Sequence; identical to SEQ ID NO: 78992
  derived and/or modified CDS sequence (opt1) from neuraminidase__InfluenzaA__ABN50965

SEQ ID NO: 79726 - RNA, 1413 nt, Artificial Sequence; identical to SEQ ID NO: 78992
  derived and/or modified CDS sequence (opt1) from neuraminidase__InfluenzaA__ABN50976

SEQ ID NO: 79727 - RNA, 1410 nt, Artificial Sequence; identical to SEQ ID NO: 78367
  derived and/or modified CDS sequence (opt1) from neuraminidase__InfluenzaA__ABN50987

SEQ ID NO: 79728 - RNA, 1410 nt, Artificial Sequence; identical to SEQ ID NO: 78370
  derived and/or modified CDS sequence (opt1) from neuraminidase__InfluenzaA__ABN50998

SEQ ID NO: 79729 - RNA, 1410 nt, Artificial Sequence
  derived and/or modified CDS sequence (opt1) from neuraminidase__InfluenzaA__ABN51013
augaaccccaaccagaagaucaucaccaucggcagcgugucccugaccaucagcacgaucugcuucuucaugcagaucgccauccucaucaccaccgucacccugcacuucaagcaguacgaguucaacuccccgcccaacaaccaggugaugcugugcgagcccacgaucaucgagcgcaacaucaccgagaucguguaccucaccaacaccacgaucgagaaggagaucugccccaagcuggccgaguaccggaacuggagcaagccgcagugcaacaucaccggguucgcgcccuucuccaaggacaacagcauccgccuguccgccggcggggacaucugggucacccgggagcccuacgugagcugcgaccccgacaagugcuaccaguucgcccucggccaggggaccacgcugaacaacgugcacuccaacgacaccguccacgaccgcaccccguaccggacccugcucaugaacgagcugggcgugcccuuccaccugggcacgaagcaggucugcaucgccuggagcuccagcuccugccacgacgggaaggccuggcuccacgugugcgugaccggcgacgacaagaacgcgaccgccagcuucaucuacaacgggcgccugguggacuccaucgucagcugguccaaggagauccugcggacccaggagagcgagugcgugugcaucaacggcacgugcaccguggucaugaccgacggguccgccagcggcaaggccgacaccaagauccucuucaucgaggagggcaagaucgugcacacgagcacccuguccgggagcgcgcagcacguggaggagugcuccugcuacccccgcuaccccggcguccggugcgugugccgcgacaacuggaaggggagcaaccggccgaucguggacaucaacaucaaggacuacuccaucgucagcuccuacgugugcagcggccuggugggcgacacgccccgcaagaacgacuccagcuccagcucccucugccuggaccccaacaacgaggagggcgggcacggggucaagggcugggccuucgacgacgggaacgacguguggaugggccggaccaucagcgagaagcugcgcuccggcuacgagaccuucaaggucaucgagggguggagcaaccccaacuccaagcuccagaucaaccgccaggugaucguggaccggggcaaccggagcggguacuccggcaucuucagcgucgagggcaagagcugcaucaaccgcugcuucuacguggagcugauccgggggcgcaaggaggagaccgaggugcuguggaccuccaacagcaucgucguguucugcggcaccuccgggacguacggcaccgggagcuggccggacggcgccgacaucaaccucaugcccaucuga

SEQ ID NO: 79730 - RNA, 1410 nt, Artificial Sequence
  derived and/or modified CDS sequence (opt1) from neuraminidase__InfluenzaA__ABN51024
augaaccccaaccagaagaucaucaccaucggcagcgugucccugaccgucagcacgaucugcuucuucaugcagaucgccauccucaucaccaccgugacccugcacuucaagcaguacgaguucaacuccccgcccaacaaccaggugaugcugugcgagcccacgaucaucgagcgcaacaucaccgagaucgucuaccucaccaacaccacgaucgagaaggagaucugccccaagcuggccgaguaccggaacuggagcaagccgcagugcaacaucaccggguucgcgcccuucuccaaggacaacagcauccgccuguccgccggcggggacaucugggugacccgggagcccuacgugagcugcgaccccgacaagugcuaccaguucgcccucggccaggggaccacgcugaacaacguccacuccaacgacaccgugcacgaccgcaccccguaccggacccugcucaugaacgagcugggcgugcccuuccaccugggcacgaagcaggucugcaucgccuggagcuccagcuccugccacgacgggaaggccuggcuccacgugugcgugaccggcgacgacaagaacgcgaccgccagcuucaucuacaacgggcgccuggucgacuccaucgugagcugguccaaggagauccugcggacccaggagagcgagugcgugugcaucaacggcacgugcaccgucgugaugaccgacggguccgccagcggcaaggccgacaccaagauccucuucaucgaggagggcaagaucgugcacacgagcacccuguccgggagcgcgcagcacgucgaggagugcuccugcuacccccgcuaccccggcgugcggugcgugugccgcgacaacuggaaggggagcaaccggccgaucgucgacaucaacaucaaggacuacuccaucgugagcuccuacgugugcagcggccuggucggcgacacgccccgcaagaacgacuccagcuccagcucccacugccucgaccccaacaacgaggagggcgggcacggggugaagggcugggccuucgacgacgggaacgacgucuggaugggccggaccaucagcgagaagcugcgcuccggcuacgagaccuucaaggugaucgagggguggagcaaccccaacuccaagcugcagaccaaccgccaggugaucgucgaccggggcaaccggagcggguacuccggcaucuucagcguggagggcaagagcugcaucaaccgcugcuucuacguggagcucauccgggggcgcaaggaggagaccgagguccuguggaccuccaacagcaucgugguguucugcggcacguccgggaccuacggcaccgggagcuggccggacggcgccgacaucaaccugaugcccaucuga

SEQ ID NO: 79731 - RNA, 1410 nt, Artificial Sequence
  derived and/or modified CDS sequence (opt1) from neuraminidase__InfluenzaA__ABN51035
augaaccccaaccagaagaucaucaccaucggcagcgugucccugaccaucagcacgaucugcuucuucaugcagaucgccauccucaucaccaccgucacccugcacuucaagcaguacgaguucaacuccccgcccaacaaccaggugaugcugugcgagcccacgaucaucgagcgcaacaucaccgagaucguguaccucaccaacaccacgaucgagaaggagaucugccccaagcuggccgaguaccggaacuggagcaagccgcagugcgacaucaccggguucgcgcccuucuccaaggacaacagcauccgccuguccgccggcggggacaucugggucacccgggagcccuacgugagcugcgaccccgacaagugcuaccaguucgcccucggccaggggaccacgcugaacaacgugcacuccaacgacaccguccacgaccgcaccccguaccggacccugcucaugaacgagcugggcgugcccuuccaccugggcacgaagcaggucugcaucgccuggagcuccagcuccugccacgacgggaaggccuggcuccacgugugcgugaccggcgacgacaagaacgcgaccgccagcuucaucuacaacgggcgccugguggacuccgucgugagcugguccaaggacauccugcggacccaggagagcgagugcgugugcaucaacggcacgugcaccgucgugaugaccgacggguccgccagcggcaaggccgacaccaagauccucuucaucgaggagggcaagaucgugcacacgagcacccuguccgggagcgcgcagcacgucgaggagugcuccugcuacccccgcuaccccggcgugcggugcgugugccgcgacaacuggaaggggagcaaccggccgaucgucgacaucaacaucaagaacuacuccaucgugagcuccuacgugugcagcggccuggucggcgacacgccccgcaagaccgacuccagcuccagcucccacugccucgaccccaacaacgaggagggcgggcacggggugaagggcugggccuucgacgacgggaacgacgucuggaugggccggaccaucagcgagaagcugcgccugggcuacgagaccuucaaggugaucgaggggugguccaaccccaacagcaagcuccagaucaaccgccaggugaucgucgaccggggcaaccgguccggguacagcggcaucuucuccguggagggcaagagcugcaucaaccgcugcuucuacguggagcugauccgggggcgcaaggaggagaccgagguccuguggaccagcaacuccaucgugguguucugcggcacgagcgggaccuacggcaccggguccuggccggacggcgccgacaucaaccucaugcccaucuga

SEQ ID NO: 79732 - RNA, 1410 nt, Artificial Sequence; identical to SEQ ID NO: 79731
  derived and/or modified CDS sequence (opt1) from neuraminidase__InfluenzaA__ABN51046

SEQ ID NO: 79733 - RNA, 1413 nt, Artificial Sequence
  derived and/or modified CDS sequence (opt1) from neuraminidase__InfluenzaA__ABN51069
augaaccccaaccagaagaucaucaccaucggcagcaucuccaucgccaucgggaucaucagccugauccuccagaucggcaacaucaucuccaucugggccagccacuccauccagaccgggagccagaaccacacgggcaucugcaaccagcgcaucaucaccuacgagaacuccaccugggugaaccagaccuacgucaacaucaacaacacgaacgugguggcggggaaggacaagaccagcaugacccuggccggcaacuccagccugugcccgauccggggcugggccaucuacaccaaggacaacuccauccgcaucgggagcaagggcgacgucuucgugauccgggagcccuucaucuccugcagccaccucgagugccgcacguucuuccugacccagggggcccugcucaacgacaagcacuccaacggcaccgugaaggaccggagccccuaccgcgcccugauguccugcccccugggggaggcgccgagccccuacaacucccgguucgagagcgucgccuggagcgccuccgccugccacgacggccucggcuggcugaccaucgggaucagcggccccgacaacggggcgguggccgugcugaaguacaacggcaucaucacggagaccaucaaguccuggaagaagcgcauccuccggacccaggagagcgagugcgucugcaugaacggcuccugcuucaccaucaugacggacgggcccagcaacggcgccgccuccuaccgcaucuucaagaucgagaaggggcgggugaccaagagcaucgagcuggacgccccgaacuaccacuacgaggagugcuccugcuaccccgacaccggcaccgugaugugcgucugccgcgacaacuggcacgggagcaaccggcccuggguguccuucaaccagaaccuggacuaccagaucggcuacaucugcagcggcguguucggggacaacccccgcccgaaggacggcgagggguccugcaaccccgucacgguggacggcgcggacggggugaagggcuucagcuaccgguacggcaacggggucuggaucggccgcaccaaguccaaccggcuccgcaagggguucgagauggugugggaccccaacggcuggaccgacaccgacagcgacuucuccaugaagcaggacaucguggccaugacggacuggagcggguacuccggcagcuucguccagcaccccgagcugaccggccuggacugcaugcggccgugcuucuggguggagcucgugcgcgggcugccccgggagaacaccaccaucuggacgagcggcuccagcaucuccuucugcggggucaacagcgacaccgccaacugguccuggcccgacggcgccgagcugcccuucaccaucgacaaguga

SEQ ID NO: 79734 - RNA, 1413 nt, Artificial Sequence
  derived and/or modified CDS sequence (opt1) from neuraminidase__InfluenzaA__ABN51080
augaaccccaaccagaagaucaucaccaucggcagcaucuccaucgccaucgggaucaucagccugaugcuccagaucggcaacaucaucuccaucugggccagccacuccauccagaccgggagccagaaccacacgggcgugugcaaccagcgcaucaucaccuacgagaacuccaccugggucaaccacaccuacgugaacaucaacaacacgaacgugaucgcggagaaggacaagaccagcgucacccuggccgggaacuccagccugugcuccaucagcggcugggccaucuacaccaaggacaacuccauccggaucggcagcaagggggacguguucgugauccgcgagccguucaucuccugcagccaccucgagugccggacguucuuccugacccagggcgcccugcucaacgacaagcacuccaacgggaccgucaaggaccgcagccccuaccgggcccugauguccugcccccugggcgaggcgcccagcccguacaacagcaaguucgaguccguggccuggagcgccuccgccugccacgacgggaugggcuggcucaccaucggcaucagcgggcccgacaacggcgcgguggccguccugaaguacaacgggaucaucacggagaccaucaaguccuggaagaagcagauccugcgcacccaggagagcgagugcgugugcgugaacggcuccugcuucaccaucaugacggacggccccagcaacggggccgccuccuacaagaucuucaagaucgagaagggcaaggucaccaagagcguggagcucaacgcccccaacuuccacuacgaggagugcuccugcuacccggacaccgggaccgugaugugcgucugccgggacaacuggcacggcagcaaccgccccuggguguccuucaaccagaaccuggacuaccagaucggguacaucugcagcggcguguucggcgacaacccccggcccaaggacggggagggcuccugcaacccggucacgguggacggggcgaacggcgugaagggguucagcuacaaguacggcaacggcgucuggaucgggcgcaccaaguccaaccggcugcgcaagggcuucgagaugaucugggaccccaacggguggaccgacaccgacagcgacuucuccgugaagcaggacguggucgccaucacggacuggagcggcuacagcggguccuucgugcagcaccccgagcucaccggccuggacugcauccggcccugcuucugggucgagcuggugcgcggccucccgaaggagaacaccaccaucuggacgagcggguccagcaucuccuucugcggcgugaacagcgacaccgccaacugguccuggcccgacggggccgagcugcccuucaccaucgacaaguga

SEQ ID NO: 79735 - RNA, 1413 nt, Artificial Sequence; identical to SEQ ID NO: 78410
  derived and/or modified CDS sequence (opt1) from neuraminidase__InfluenzaA__ABN51091

SEQ ID NO: 79736 - RNA, 1410 nt, Artificial Sequence; identical to SEQ ID NO: 78119
  derived and/or modified CDS sequence (opt1) from neuraminidase__InfluenzaA__ABN51102

SEQ ID NO: 79737 - RNA, 1410 nt, Artificial Sequence; identical to SEQ ID NO: 78127
  derived and/or modified CDS sequence (opt1) from neuraminidase__InfluenzaA__ABN51113

SEQ ID NO: 79738 - RNA, 1410 nt, Artificial Sequence
  derived and/or modified CDS sequence (opt1) from neuraminidase__InfluenzaA__ABN51124
augaaccccaaccagaagaucaucaccaucggcagcgugucccugaccaucgccacggucugcuuccucaugcagaucgccauccuggugaccaccgugacccugcacuucaagcaguacgagugcgacagcccggcguccaaccaggucaugcccugcgagcccaucaucaucgagcgcaacaucacggagaucguguaccucaacaacaccaccaucgagaaggagaucugccccaagguggucgaguaccggaacuggagcaagccgcagugccagaucaccggguucgcccccuucuccaaggacaacagcauccgccuguccgccggcggggacaucugggugacgcgggagcccuacgugagcugcgaccccggcaagugcuaccaguucgcccuggggcagggcaccacccucgacaacaagcacuccaacgacaccauccacgaccgcgucccgcaccggacgcugcugaugaacgagcucggcgugcccuuccaccuggggacccgccaggugugcaucgccuggagcuccagcuccugccacgacggcaaggcguggcugcacgucugcaucaccggggacgacaagaacgccaccgccagcuucaucuacgacggccggcucguggacuccaucgggagcuggucccagaacauccugcgcacgcaggagagcgagugcgugugcaucaacgggaccugcaccgucgugaugaccgacggcuccgccagcggccgggcggacacgcgcauccuguucaucgaggagggcaagaucgugcacaucagcccccucuccgggagcgcccagcacgucgaggagugcuccugcuacccccgguacccgggcgugcgcugcaucugccgggacaacuggaagggcagcaaccgccccguggucgacaucaacauggaggacuacuccaucgacagcuccuacgugugcagcgggcuggugggcgacacgccccggaacgacgaccgcuccagcaacuccaacugccggaaccccaacaacgagcgcgggaaccagggcgucaaggggugggccuucgacaacggcgacgacguguggaugggccggaccaucagcaaggaccugcgcuccggguacgagaccuucaaggucaucggcggguggagcaccccgaacuccaagagccagaucaaccgccaggugaucguggacuccgacaaccggagcggcuacuccgggaucuucagcgucgagggcaagagcugcaucaaccgcugcuucuacguggagcucauccggggccgcaagcaggagacccgggugugguggaccuccaacagcaucgucguguucugcgggaccuccggcacguacgggaccggcagcuggcccgacggggccaacaucaacuucaugcccaucuga

SEQ ID NO: 79739 - RNA, 1410 nt, Artificial Sequence; identical to SEQ ID NO: 78127
  derived and/or modified CDS sequence (opt1) from neuraminidase__InfluenzaA__ABN51135

SEQ ID NO: 79740 - RNA, 1413 nt, Artificial Sequence; identical to SEQ ID NO: 78420
  derived and/or modified CDS sequence (opt1) from neuraminidase__InfluenzaA__ABN51146

SEQ ID NO: 79741 - RNA, 1410 nt, Artificial Sequence
  derived and/or modified CDS sequence (opt1) from neuraminidase__InfluenzaA__ABN51157
augaaccccaaccagaagaucaucaccaucggcagcgugucccugaccaucgccacgaucugcuuccucaugcagaucgccauccuggucaccaccgugacccugcacuucaagcaguacgagugcaacagcccgcccaacaaccaggugaugcucugcgagcccacgaucaucgagcgcaacaucaccgagaucgucuaccugaccaacaccacgaucgagaaggagaucugccccaagcuggcggaguaccggaacugguccaagccgcagugcaacaucaccggguucgcccccuucagcaaggacaacuccauccgccucagcgccggcggggacaucugggugacccgggagcccuacguguccugcgaccccgacaagugcuaccaguucgcccugggccaggggaccacgcugaacaacggccacagcaacgacaccguccacgaccgcaccccguaccggacccuccugaugaacgagcugggcgugcccuuccaccucgggacgcgccaggugugcaucgccugguccagcuccagcugccacgacggcaaggcguggcugcacgucugcgugaccggggacgacgagaacgccaccgccuccuucaucuacaacggccggcugguggacagcaucggguccuggagcaagaagauccuccgcacccaggaguccgagugcgucugcaucaacggcacgugcaccguggugaugaccgacggcagcgccuccgggaaggcggagaccaagauccuguucaucgaggagggcaagaucguccacaucagcacgcugagcggguccgcccagcacguggaggagugcagcugcuacccccgguaccccggcgugcgcugcgucugccgggacaacuggaagggcuccaaccgcccgaucguggacaucaacgugaaggacuacagcaucgucuccagcuacgugugcuccgggcucgugggcgacacgccccggaagaacgacagcuucuccagcucccacugccuggaccccaacaacgaggagggcgggcacggggucaagggcugggccuucgacgacggcaacgacguguggauggggcgcaccaucagcgagaagcugcgguccggcuacgagaccuucaaggucaucgagggguggagcaagcccaacuccaagcuccagaccaaccgccaggugaucguggagcggggcaaccgcagcggguacuccggcaucuucagcgucgagggcaaguccugcaucaaccggugcuucuacguggagcugauccgcgggcggaaggaggagaccgaggugugguggaccagcaacagcaucgucguguucugcggcaccuccgggacguacggcaccgggagcuggccggacggcgccgacaucaaccugaugcccaucuga

SEQ ID NO: 79742 - RNA, 1410 nt, Artificial Sequence; identical to SEQ ID NO: 79730
  derived and/or modified CDS sequence (opt1) from neuraminidase__InfluenzaA__ABN59393

SEQ ID NO: 79743 - RNA, 1365 nt, Artificial Sequence
  derived and/or modified CDS sequence (opt1) from neuraminidase__InfluenzaA__ABN59415
augaaccccaaccagaagaucaucaccaucggcagcaucugccugguggucgggcucaucucccugauccugcagaucggcaacaucaucagcaucuggaucucccacagcauccagaccgggucccagaaccacacgggcaucugcaaccagaacaucaucaccuacaagaacagcaccugggugaaggacaccacguccgugauccucaccgggaacagcucccugugcccgauccgcggcugggccaucuacagcaaggacaacuccauccggaucggcagcaagggggacgucuucgugauccgcgagcccuucaucuccugcagccaccuggagugccggaccuucuuccucacccagggcgcccugcugaacgacaagcacuccagcgggacggugaaggaccgcucccccuaccgggcgcucaugagcugccccgucggcgaggccccgucccccuacaacagccgcuucgagagcguggccugguccgccagcgccugccacgacgggaugggcuggcugaccaucggcaucuccgggcccgacaacggcgcgguggccguccugaaguacaacgggaucaucaccgagaccaucaagagcuggcggaagaagauccuccgcacgcaggaguccgagugcgccugcgugaacggcagcugcuucaccaucaugaccgacggccccuccgacgggcuggccagcuacaagaucuucaagaucgagaagggcaaggugaccaaguccaucgagcugaacgcgccgaacagccacuacgaggagugcuccugcuaccccgacacggggaaggucaugugcgugugccgggacaacuggcacggcagcaaccgccccuggguguccuucgaccagaaccucgacuaccagaucggguacaucugcagcggcgucuucggcgacaacccccggccggaggacgggaccggcuccugcgggcccguguacguggacggcgccaacggggucaagggcuucagcuaccgcuacggcaacgggguguggaucggccggaccaagucccacagcucccgccacggguucgagaugaucugggaccccaacggcuggaccgagacggacagcaaguucagcgugcggcaggacgucguggccaugaccgacugguccggguacagcggcuccuucgugcagcaccccgagcugaccggccuggacugcaugcgcccgugcuucugggucgagcucauccgggggcgccccaaggagaagaccaucuggacgagcgccuccagcaucuccuucugcggcgugaacagcgacaccgucgacugguccuggcccgacggggccgagcugcccuucagcaucgacaaguga

SEQ ID NO: 79744 - RNA, 1413 nt, Artificial Sequence; identical to SEQ ID NO: 78975
  derived and/or modified CDS sequence (opt1) from neuraminidase__InfluenzaA__ABN59426

SEQ ID NO: 79745 - RNA, 1410 nt, Artificial Sequence; identical to SEQ ID NO: 78277
  derived and/or modified CDS sequence (opt1) from neuraminidase__InfluenzaA__ABO32659

SEQ ID NO: 79746 - RNA, 1410 nt, Artificial Sequence
  derived and/or modified CDS sequence (opt1) from neuraminidase__InfluenzaA__ABO32670
augaaccccaaccagaagaucaucaccaucggcagcgugucccugaccaucagcacgaucugcuucuucaugcagaucgccauccucgucaccaccgugacccugcacuucaagcaguacgagugcaacuccccgcccaacaaccaggugaugcugugcgagcccacgaucaucgagcgcaacaucaccgagaucgucuaccucaccaacaccacgaucgagaaggagaucugccccaagcuggccgaguaccggaacuggagcaagccgcagugcaacaucaccggguucgcgcccuucuccaaggacaacagcauccgccuguccgccggcggggacaucugggugacccgggagcccuacgugagcugcgaccccgacaagugcuaccaguucgcccucggccaggggaccacgcugaacaacggccacuccaacgacaccguccacgaccgcaccccguaccggacccugcucaugaacgagcugggcgugcccuuccacauggggacgaagcaggucugcaucgccuggagcuccagcuccugccacgacggcaaggccuggcugcacgugugcgugaccggggacgacgagaacgcgaccgccagcuucaucuacaacggccgccucguggacuccaucgggagcugguccaagaagauccugcggacccaggagagcgagugcgucugcaucaacggcacgugcaccguggugaugaccgacggcuccgccagcgggaaggccgacaccaagauccuguucaucgaggagggcaagaucguccacacgagcacccucuccgggagcgcgcagcacguggaggagugcuccugcuacccccgcuaccccggcgugcggugcgucugccgcgacaacuggaagggcagcaaccggccgaucguggacaucaacaucaaggacuacuccaucgugagcuccuacgucugcagcgggcuggugggcgacacgccccgcaagaacgacuccagcuccagcucccacugccuggaccccaacaacgaggagggcgggcacggggugaagggcugggccuucgacgacggcaacgacgucuggauggggcggaccaucagcgagaagcuccgcuccggcuacgagaccuucaaggugaucgagggguggagcaagcccaacuccaagcugcagaucaaccggcaggucaucguggaccgcggcaaccggagcggguacuccggcaucuucagcguggagggcaagagcugcaucaaccgcugcuucuacgucgagcugauccgggggcgcaagcaggagaccgaggugcucuggaccuccaacagcaucguggucuucugcggcaccuccgggacguacggcaccgggagcuggccggacggcgccgacaucaaccugaugcccaucuga

SEQ ID NO: 79747 - RNA, 1413 nt, Artificial Sequence; identical to SEQ ID NO: 79598
  derived and/or modified CDS sequence (opt1) from neuraminidase__InfluenzaA__ABO32681

SEQ ID NO: 79748 - RNA, 1410 nt, Artificial Sequence
  derived and/or modified CDS sequence (opt1) from neuraminidase__InfluenzaA__ABO32695
augaaccccaaccagaagaucaucaccaucggcagcgugucccugaccaucagcacgaucugcuucuucaugcagaucgccauccucaucaccaccgucacccugcacuucaagcaguacgaguucaacuccccgcccaacaaccaggugaugcugugcgagcccacgaucaucgagcgcaacaucaccgagaucguguaccucaccaacaccacgaucgagaaggagaucugccccaagcuggccgaguaccggaacuggagcaagccgcagugcaacaucaccggguucgcgcccuucuccaaggacaacagcauccgccuguccgccggcggggacaucugggucacccgggagcccuacgugagcugcgaccccgacaagugcuaccaguucgcccucggccaggggaccacgcugaacaacgugcacuccaacgacaccguccacgaccgcaccccguaccggacccugcucaugaacgagcugggcgugcccuuccaccugggcacgaagcaggucugcaucgccuggagcuccagcuccugccacgacgggaaggccuggcuccacgugugcgugaccggcgacgacaagaacgcgaccgccagcuucaucuacaacgggcgccugguggacuccaucgucagcugguccaaggagauccugcggacccaggagagcgagugcgugugcaucaacggcacgugcaccguggucaugaccgacggguccgccagcggcaaggccgacaccaagauccucuucaucgaggagggcaagaucgugcacacgagcacccuguccgggagcgcgcagcacguggaggagugcuccugcuacccccgcuaccccggcguccggugcgugugccgcgacaacuggaaggggagcaaccggccgaucguggacaucaacaucaaggacuacuccaucgucagcuccuacgugugcagcggccuggugggcgacacgccccgcaagaacgacuccagcuccagcucccacugcagcgaccccaacaacgaggagggcgggcacggggucaagggcugggccuucgacgacgggaacgacguguggaugggccggaccaucuccgagaagcuccgcagcggcuacgagaccuucaaggucaucgaggggugguccaaccccaacagcaagcugcagaucaaccgccaggugaucguggaccggggcaaccgguccggguacagcggcaucuucagcgucgaggggaaguccugcaucaaccgcugcuucuacguggagcugauccggggccgcaaggaggagaccgaggugcucuggaccagcaacuccaucgucguguucugcggcaccagcgggacguacggcaccggguccuggccggacggcgccgacaucaaccugaugcccaucuga

SEQ ID NO: 79749 - RNA, 1410 nt, Artificial Sequence; identical to SEQ ID NO: 78754
  derived and/or modified CDS sequence (opt1) from neuraminidase__InfluenzaA__ABO32754

SEQ ID NO: 79750 - RNA, 1410 nt, Artificial Sequence; identical to SEQ ID NO: 78754
  derived and/or modified CDS sequence (opt1) from neuraminidase__InfluenzaA__ABO32765

SEQ ID NO: 79751 - RNA, 1410 nt, Artificial Sequence; identical to SEQ ID NO: 79626
  derived and/or modified CDS sequence (opt1) from neuraminidase__InfluenzaA__ABO32778

SEQ ID NO: 79752 - RNA, 1410 nt, Artificial Sequence
  derived and/or modified CDS sequence (opt1) from neuraminidase__InfluenzaA__ABO32793
augaaccccaaccagaagaucaucaccaucggcagcgugucccugaccaucagcacgaucugcuucuucaugcagaucgucauccucaucaccaccgugacccugcacuucaagcaguacgaguucaacuccccgcccaacaaccaggugaugcugugcgagcccacgaucaucgagcgcaacaucaccgagaucgucuaccucaccaacaccacgaucgagaaggagaucugccccaagcuggccgaguaccggaacuggagcaagccgcagugcgacaucaccggguucgcccccuucuccaaggacaacagcauccgccuguccgcgggcggggacaucugggugacccgggagcccuacgugagcugcgaccccgacaagugcuaccaguucgcccucggccaggggaccacgcugaacaacguccacuccaacgacaccgugcacgaccgcaccccguaccggacccugcucaugaacgagcugggcgugcccuuccaccugggcacgaagcaggucugcaucgccuggagcuccagcuccugccacgacgggaaggccuggcuccacgugugcgugaccggcgacgacaagaacgccaccgcgagcuucaucuacaacgggcgccuggucgacuccaucgugagcugguccaaggagauccugcggacccaggagagcgagugcgugugcaucaacggcacgugcaccgucgugaugaccgacggguccgccagcggcaagaccgacacgaagauccucuucaucgaggagggcaagaucgugcacaccagcacccuguccgggagcgcccagcacgucgaggagugcuccugcuacccccgcuaccccggcgugcggugcgugugccgcgacaacuggaaggggagcaaccggccgaucgucgacaucaacaucaaggacuacuccaucgugagcuccuacgugugcagcggccuggucggcgacacgccccgcaagaacgacuccagcuccagcucccacugccucgaccccaacaacgaggagggcgggcacggggugaagggcugggccuucgacgacgggaacgacgucuggaugggccggaccaucagcgagaagcugcgcuccggcuacgagaccuucaaggugaucgagggguggagcaaccccaacuccaagcugcagaucaaccgccaggugaucgucgaccggggcaaccggagcggguacuccggcaucuucagcguggagggcaagagcugcaucaaccgcugcuucuacguggagcucauccgggggcgcaaggaggagaccgagguccuguggaccuccaacagcaucgugguguucugcggcacguccgggaccuacggcaccgggagcuggccggacggcgcggacaucaaccugaugcccaucuga

SEQ ID NO: 79753 - RNA, 1410 nt, Artificial Sequence; identical to SEQ ID NO: 78351
  derived and/or modified CDS sequence (opt1) from neuraminidase__InfluenzaA__ABO32806

SEQ ID NO: 79754 - RNA, 1410 nt, Artificial Sequence; identical to SEQ ID NO: 78738
  derived and/or modified CDS sequence (opt1) from neuraminidase__InfluenzaA__ABO32819

SEQ ID NO: 79755 - RNA, 1410 nt, Artificial Sequence; identical to SEQ ID NO: 78370
  derived and/or modified CDS sequence (opt1) from neuraminidase__InfluenzaA__ABO32830

SEQ ID NO: 79756 - RNA, 1410 nt, Artificial Sequence; identical to SEQ ID NO: 78736
  derived and/or modified CDS sequence (opt1) from neuraminidase__InfluenzaA__ABO32841

SEQ ID NO: 79757 - RNA, 1410 nt, Artificial Sequence; identical to SEQ ID NO: 78736
  derived and/or modified CDS sequence (opt1) from neuraminidase__InfluenzaA__ABO32852

SEQ ID NO: 79758 - RNA, 1410 nt, Artificial Sequence; identical to SEQ ID NO: 78736
  derived and/or modified CDS sequence (opt1) from neuraminidase__InfluenzaA__ABO32863

SEQ ID NO: 79759 - RNA, 1410 nt, Artificial Sequence; identical to SEQ ID NO: 79730
  derived and/or modified CDS sequence (opt1) from neuraminidase__InfluenzaA__ABO32874

SEQ ID NO: 79760 - RNA, 1410 nt, Artificial Sequence; identical to SEQ ID NO: 79730
  derived and/or modified CDS sequence (opt1) from neuraminidase__InfluenzaA__ABO32885

SEQ ID NO: 79761 - RNA, 1410 nt, Artificial Sequence; identical to SEQ ID NO: 79731
  derived and/or modified CDS sequence (opt1) from neuraminidase__InfluenzaA__ABO32896

SEQ ID NO: 79762 - RNA, 1410 nt, Artificial Sequence; identical to SEQ ID NO: 79731
  derived and/or modified CDS sequence (opt1) from neuraminidase__InfluenzaA__ABO32907

SEQ ID NO: 79763 - RNA, 1410 nt, Artificial Sequence
  derived and/or modified CDS sequence (opt1) from neuraminidase__InfluenzaA__ABO32918
augaaccccaaccagaagaucaucaccaucggcagcgugucccugaccaucagcacgaucugcuucuucaugcagaucgccauccucaucaccaccgucacccugcacuucaagcaguacgaguucaacuccccgcccaacaaccaggugaugcugugcgagcccacgaucaucgagcgcaacaucaccgagaucguguaccucaccaacaccacgaucgagaaggagaccugccccaagcuggccgaguaccggaacuggagcaagccgcagugcaacaucaccggguucgcgcccuucuccaaggacaacagcauccgccuguccgccggcggggacaucugggucacccgggagcccuacgugagcugcgaccccgacaagugcuaccaguucgcccucggccaggggacgacccugaacaacgugcacuccaacgacaccguccacgaccgcaccccguaccggacgcugcucaugaacgagcugggcgugcccuuccaccugggcaccaagcaggucugcaucgccuggagcuccagcuccugccacgacgggaaggccuggcuccacgugugcgugaccggcgacgacaagaacgcgaccgccagcuucaucuacaacgggcgccugguggacuccaucgucagcugguccaaggagauccugcggacgcaggagagcgagugcgugugcaucaacgggaccugcaccguggucaugaccgacggguccgccagcggcaaggccgacacgaagauccucuucaucgaggagggcaagaucgugcacaccagcacccuguccgggagcgcgcagcacguggaggagugcuccugcuacccccgcuaccccggcguccggugcgugugccgcgacaacuggaaggggagcaaccggccgaucguggacaucaacaucaaggacuacuccaucgucagcuccuacgugugcagcggccuggugggcgacacgccccgcaagaacgacuccagcuccagcucccacugccucgaccccaacaacgaggagggcggccacggggucaagggcugggccuucgacgacgggaacgacguguggaugggccggaccaucagcgagaagcugcgcuccggcuacgagaccuucaaggucaucgagggguggagcaacuccaacagcaagcugcagaccaaccgccaggugaucguggaccggggcaaccgguccggguacagcggcaucuucagcgucgaggggaaguccugcaucaaccgcugcuucuacguggagcucauccggggccgcaaggaggagaccgaggugcuguggacgagcaacuccaucgucguguucugcggcaccagcgggaccuacggcaccggguccuggcccgacggcgccgacaucaaccugaugccgaucuga

SEQ ID NO: 79764 - RNA, 1410 nt, Artificial Sequence; identical to SEQ ID NO: 79763
  derived and/or modified CDS sequence (opt1) from neuraminidase__InfluenzaA__ABO32929

SEQ ID NO: 79765 - RNA, 1410 nt, Artificial Sequence; identical to SEQ ID NO: 79763
  derived and/or modified CDS sequence (opt1) from neuraminidase__InfluenzaA__ABO32940

SEQ ID NO: 79766 - RNA, 1413 nt, Artificial Sequence
  derived and/or modified CDS sequence (opt1) from neuraminidase__InfluenzaA__ABO32951
augaaccccaaccagaagaucaucaccaucggcagcaucuccaucgccaucgggaucaucagccugaugcuccagaucggcaacaucaucuccaucugggccagccacuccauccagaccgggagccagaaccacacgggcgugugcaaccagcgcaucaucaccuacgagaacuccaccugggucaaccacaccuacgugaacaucaacaacacgaacgugaucgcggggaaggacaagaccagcgucacccuggccggcaacuccagccugugcuccaucagcggcugggccaucuacaccaaggacaacuccauccggaucgggagcaagggcgacguguucgugauccgcgagccguucaucuccugcagccaccucgagugccggacguucuuccugacccagggggcccugcucaacgacaagcacuccaacggcaccgucaaggaccgcagccccuaccgggcccugauguccugcccccugggggaggcgcccagcccguacaacagcaaguucgaguccguggccuggagcgccuccgccugccacgacggcaugggcuggcucaccaucgggaucagcggccccgacaacggggcgguggccguccugaaguacaacggcaucaucacggagaccaucaaguccuggaagaagcagauccugcgcacccaggagagcgagugcgugugcgugaacggcuccugcuucaccaucaugacggacgggcccagcaacggcgccgccuccuacaagaucuucaagaucgagaaggggaaggucaccaagagcaucgagcucaacgcccccaacuuccacuacgaggagugcuccugcuacccggacaccggcaccgugaugugcgugugccgggacaacuggcacgggagcaaccgccccugggucuccuucaaccagaaccuggacuaccagaucggcuacaucugcagcggcguguucggggacaacccccggcccaaggacggcgagggguccugcaacccggugacggucgacggcgcgaacggggugaagggcuucagcuacaaguacggcaacgggguguggaucggccgcaccaaguccaaccggcugcgcaagggguucgagaugaucugggaccccaacggcuggaccgacaccgacagcgacuucuccgucaagcaggacgugguggccaucacggacuggagcggguacagcggcuccuucguccagcaccccgagcucaccggccuggacugcauccggcccugcuucuggguggagcugguccgcgggcucccgcgggagaacaccaccaucuggacgagcggcuccagcaucuccuucugcggggugaacagcgacaccgccaacugguccuggcccgacggcgccgagcugcccuucaccaucgacaaguga

SEQ ID NO: 79767 - RNA, 1413 nt, Artificial Sequence
  derived and/or modified CDS sequence (opt1) from neuraminidase__InfluenzaA__ABO32962
augaaccccaaccagaagaucaucaccaucggcagcaucuccaucgccaucgggaucaucagccugaugcuccagaucggcaacaucaucuccaucugggccagccacuccauccagaccgggagcaagaaccacacgggcgugugcaaccagcgcaucaucaccuacgagaacuccaccugggucaaccacaccuacgugaacaucaacaacacgaacguggucgcggggaaggacaagaccagcgugacccuggccggcaacuccagccugugcuccaucagcggcugggccaucuacaccaaggacaacuccauccggaucgggagcaagggcgacguguucgucauccgcgagccguucaucuccugcagccaccucgagugccggacguucuuccugacccagggggcccugcucaacgacaagcacuccaacggcaccgugaaggaccgcagccccuaccgggcccugauguccugcccccugggggaggcgcccagcccguacaacagcaaguucgaguccguggccuggagcgccaacgccugccacgacggcaugggcuggcucaccaucgggaucuccggccccgacaacggggcggucgccgugcugaaguacaacggcaucaucacggagaccaucaagagcuggaagaagcagauccugcgcacccaggaguccgagugcgugugcgucaacggcagcugcuucaccaucaugacggacgggcccuccaacggcgccgccagcuacaagaucuucaagaucaagaaggggaaggugaccaaguccaucgagcucaacgcccccaacuuccacuacgaggagugcagcugcuacccggacaccggcaccgugaugugcgucugccgggacaacuggcacggguccaaccgccccugggugagcuucaaccagaaccuggacuaccagaucggcuacaucugcuccggcguguucggggacaacccccggcccaaggacggcgaggggagcugcaacccggucacgguggacggcgcgaacggggugaagggcuucuccuacaaguacggcaacggggucuggaucggccgcaccaagagcaaccggcugcgcaagggguucgagaugaucugggaccccaacggcuggaccgacaccgacuccgacuucagcgugcggcaggacguggucgccaucacggacugguccggguacagcggcagcuucgugcagcaccccgagcucaccggccuggacugcauccgccccugcuucugggucgagcuggugcgggggcucccgcgcgagaacaccaccaucuggacguccggcagcuccaucagcuucugcggggugaacuccgacaccgccaacuggagcuggcccgacggcgccgagcugcccuucaccaucgacaaguga

SEQ ID NO: 79768 - RNA, 1413 nt, Artificial Sequence; identical to SEQ ID NO: 78410
  derived and/or modified CDS sequence (opt1) from neuraminidase__InfluenzaA__ABO32973

SEQ ID NO: 79769 - RNA, 1413 nt, Artificial Sequence; identical to SEQ ID NO: 78975
  derived and/or modified CDS sequence (opt1) from neuraminidase__InfluenzaA__ABO32984

SEQ ID NO: 79770 - RNA, 1413 nt, Artificial Sequence; identical to SEQ ID NO: 78975
  derived and/or modified CDS sequence (opt1) from neuraminidase__InfluenzaA__ABO32995

SEQ ID NO: 79771 - RNA, 1413 nt, Artificial Sequence
  derived and/or modified CDS sequence (opt1) from neuraminidase__InfluenzaA__ABO33009
augaaccccaaccagaagaucaucaccaucggcagcaucugcauggccaucgggaugaucucccugauccuccagaucggcaacaucaucagcaucugggugucccacagcauccagaccgggucccagaaccacacgggcaucugcaaccagcgcaucaucaccuacgagaacagcaccugggucaaccagaccuacgugaacaucuccaacacgaacguggucgccgggaaggacaccaccagcaugacccuggcgggcaacuccagccugugcccgauccggggcugggccaucuacuccaaggacaacagcauccgcaucggguccaagggcgacguguucgugauccgggagcccuucaucagcugcucccaccucgagugccgcacguucuuccugacccagggggcccugcucaacgacaagcacagcaacggcaccgucaaggaccggucccccuaccgcgcccugaugagcugccccaucggggaggccccgucccccuacaacagccgguucgagagcguggcgugguccgccagcgccugccacgacggcaugggcuggcugaccaucgggaucuccggccccgacgacggggccguggcgguccucaaguacaacggcaucaucacggagaccaucaagagcuggcgcaagcagauccugcggacccaggaguccgagugcgugugcgugaacggcagcugcuucaccaucaugacggacgggcccuccgacggcccggccagcuaccgcaucuucaagaucgagaaggggaagaucaccaaguccaucgagcuggacgcccccaacagccacuacgaggagugcuccugcuaccccgacaccggcaccgucaugugcgugugccgggacaacuggcacgggagcaaccgccccuggguguccuucaaccagaaccucgacuaccagaucggcuacaucugcagcggcgucuucggggacaacccgcggcccaaggacggcaagggguccugcgaccccgugaacguggacggcgccgacggggucaagggcuucagcuaccgcuacggcaacgggguguggaucggccggacgaaguccaacagcucccgcaagggguucgagaugaucugggaccccaacggcuggaccgacaccgacagcaacuuccuggugaagcaggacgucguggccaugaccgacuggagcggguacuccggcagcuucgugcagcacccggagcugacgggccucgacugcaugcggcccugcuucugggucgagcugauccgcgggcggccccgcgagaagaccaccaucuggaccuccggcagcuccaucagcuucugcggggugaacuccgacacggucaacuggagcuggcccgacggcgcggagcugccguucaccaucgacaaguga

SEQ ID NO: 79772 - RNA, 1410 nt, Artificial Sequence; identical to SEQ ID NO: 79542
  derived and/or modified CDS sequence (opt1) from neuraminidase__InfluenzaA__ABO33039

SEQ ID NO: 79773 - RNA, 1410 nt, Artificial Sequence
  derived and/or modified CDS sequence (opt1) from neuraminidase__InfluenzaA__ABO33050
augaaccccaaccagaagaucaucaccaucggcagcgugucccugaccaucgccacgaucugcuuccucaugcagaucgccauccuggucaccaccgugacccugcacuucaagcaguacgagugcaacagcccgcccaacaaccaggugaugcucugcgagcccacgaucaucgagcgcaacaucaccgagaucgucuaccugaccaacaccacgaucgagaaggagaucugccccaagcuggcggaguaccggaacugguccaagccgcagugcaacaucaccggguucgcccccuucagcaaggacaacuccauccgccucagcgccggcggggacaucugggugacccgggagcccuacguguccugcgaccccgacaagugcuaccaguucgcccugggccaggggaccacgcugaacaacggccacagcaacgacaccguccacgaccgcaccccguaccggacccuccugaugaacgagcugggcgugcccuuccaccucgggacgaagcaggucugcaucgccugguccagcuccagcugccacgacggcaaggcguggcugcacgugugcgugaccggggacgacgagaacgccaccgccuccuucaucuacaacggccgccugguggacagcaucggguccuggagcaagaagauccuccggacccaggaguccgagugcgucugcaucaacggcacgugcaccguggugaugaccgacggcagcgccuccgggaaggcggacaccaagauccuguucaucgaggagggcaagaucguccacacgagcccccugagcggguccgcccagcacguggaggagugcagcugcuacccccgcuacccgggcgugcggugcgucugccgcgacaacuggaagggcuccaaccggcccaucguggacaucaacgugaaggacuacagcaucgucuccagcuacgugugcuccgggcucgugggcgacacgccccgcaagaacgacagcuccagcuccagccacugccuggaccccaacaacgaggagggcgggcacggggucaagggcugggccuucgacgacggcaacgacguguggauggggcggaccaucuccgagaagcugcgcagcggcuacgagaccuucaaggucaucgaggggugguccaagccgaacagcaagcuccagaucaaccgccaggugaucguggaccggggcaaccgguccggguacagcggcaucuucuccgucgagggcaagagcugcaucaaccgcugcuucuacguggagcugauccgggggcgcaagcaggagaccgaggugcuguggaccagcaacuccaucgucguguucugcggcaccagcgggaccuacggcacgggguccuggcccgacggcgccgacaucaaccucaugcccaucuga

SEQ ID NO: 79774 - RNA, 1410 nt, Artificial Sequence; identical to SEQ ID NO: 78754
  derived and/or modified CDS sequence (opt1) from neuraminidase__InfluenzaA__ABO33061

SEQ ID NO: 79775 - RNA, 1410 nt, Artificial Sequence
  derived and/or modified CDS sequence (opt1) from neuraminidase__InfluenzaA__ABO33072
augaaccccaaccagaagaucaucaccaucggcagcgugucccugaccaucgccacgaucugcuuccucaugcagaucgccauccuggucaccaccgugacccugcacuucaagcaguacgagugcgggagcccggcgaacaaccaggugaugcccugcgagcccaucaucaucgagcgcaacaucacggagaucgucuaccucaccaacaccaccaucgagaaggagaucugccccaagcugguggaguaccggaacugguccaagccgcagugcaagaucacgggcuucgcccccuucagcaaggacaacuccauccgccugagcgccgggggcgacaucugggugacccgggagcccuacgucuccugcgaccccgggaagugcuaccaguucgcccucggccagggcaccacccuggacaacaagcacagcaacgacacgauccacgaccgcaccccgcaccggacccugcucaugaacgagcugggggugcccuuccaccugggcacccgccaggugugcaucgccugguccagcuccagcugccacgacgggaaggcguggcuccacgucugcgugacgggcuacgacaagaacgccaccgccuccuucaucuacgacgggcggcugguggacagcaucggcuccuggagcaagaacauccugcgcacccaggaguccgagugcgucugcaucaacgggaccugcacgguggugaugaccgacggcagcgccuccgagcgggcggacaccaagauccucuucaucgaggagggcaagaucguccacaucagcccccugagcggguccgcccagcacguggaggagugcagcugcuacccccgcuacccgggcgugcggugcgucugccgcgacaacuggaagggcuccaaccggcccgugguggacaucaacgucaaggacuacagcaucguguccagcuacgugugcuccgggcuggucggcgacacgccccgcaagaacgaccggagcuccagcuccuacugccgcaaccccaacaacgagaaggggaaccacggcgugaaggggugggccuucgacgacggcaacgacgucuggaugggccggaccaucagcgaggagucccgcagcggguacgagaccuucaaggugaucggcgggugguccaccccgaacagcaagcuccagaucaaccgccaggugaucgucgacuccgacaaccggagcggcuacuccgggaucuucagcguggagggcaagagcugcaucaaccggugcuucuacguggagcugauccgcggccgcgagcaggagacccgggucugguggacguccaacagcaucgugguguucugcgggaccuccggcaccuacgggaccggcagcuggcccgacggggccgacaucaaccugaugcccaucuga

SEQ ID NO: 79776 - RNA, 1413 nt, Artificial Sequence; identical to SEQ ID NO: 79083
  derived and/or modified CDS sequence (opt1) from neuraminidase__InfluenzaA__ABO37991

SEQ ID NO: 79777 - RNA, 1413 nt, Artificial Sequence
  derived and/or modified CDS sequence (opt1) from neuraminidase__InfluenzaA__ABO38013
augaaccccaaccagaagaucaucaccaucggcagcaucuccaucgccaucgggaucaucagccugauccuccagaucggcaacaucaucuccaucugggccagccacuccauccagaccgggagccagaaccacacgggcaucugcaaccagcgcaucaucaccuacgagaacuccaccugggugaaccagaccuacgucaacaucaacaacacgaacgugguggcggggaaggacaagaccagcaugacccuggccggcaacuccagccugugcccgauccggggcugggccaucuacaccaaggacaacuccauccgcaucgggagcaagggcgacgucuucgugauccgggagcccuucaucuccugcagccaccucgagugccgcacguucuuccugacccagggggcccugcucaacgacaagcacuccaacggcaccgugaaggaccggagccccuaccgcgcccugauguccugcccccugggggaggcgccgagccccuacaacucccgguucgagagcgucgccuggagcgccuccgccugccacgacggccucggcuggcugaccaucgggaucagcggccccgacaacggggcgguggccgugcugaaguacaacggcaucaucacggagaccaucaaguccuggaagaagcgcauccuccggacccaggagagcgagugcgucugcaugaacggcuccugcuucaccaucaugacggacgggcccagcaacggcgccgccuccuaccgcaucuucaagaucgagaaggggcgggugaccaagagcaucgagcuggacgccccgaacuaccacuacgaggagugcuccugcuaccccgacaccggcaccgugaugugcgucugccgcgacaacuggcacgggagcaaccggcccuggguguccuucaaccagaaccuggacuaccagaucggcuacaucugcagcggcguguucggggacaacccccgcccgaaggacggcgagggguccugcaaccccgucacgguggacggcgcggacggggugaagggcuucagcuaccgguacggcaacggggucuggaucggccgcaccaaguccaaccggcuccgcaagggguacgagaugaucugggaccccaacggcuggaccgacaccgacagcgacuucuccaugaagcaggacaucguggccaugacggacuggagcggguacuccggcagcuucgugcagcaccccgagcugaccggccuggacugcaugcggccgugcuucugggucgagcucgugcgcgggcugccccgggagaacaccaccaucuggacgagcggcuccagcaucuccuucugcggggugaacagcgacaccgccaacugguccuggcccgacggcgccgagcugcccuucaccaucgacaaguga

SEQ ID NO: 79778 - RNA, 1413 nt, Artificial Sequence
  derived and/or modified CDS sequence (opt1) from neuraminidase__InfluenzaA__ABO38024
augaaccccaaccagaagaucaucaccaucggcagcaucuccaucgccaucgggaucaucagccugaugcuccagaucggcaacaucaucuccaucugggccagccacuccauccagaccgggagccagaaccacacgggcaucugcaaccagcgcaucaucaccuacgagaacaacaccugggugaaccacaccuacgucaacaucaacaacacgaacaucguggcggggaaggacaagaccuccgugacccuggccggcaacagcucccugugcagcaucuccggcugggccaucuacaccaaggacaacagcauccggaucggguccaagggcgacgucuucgugauccgcgagccguucaucagcugcucccaccucgagugccggacguucuuccugacccagggggcccugcucaacgacaagcacagcaacggcaccgugaaggaccgcucccccuaccgggcccugaugagcugcccccugggggaggcgcccuccccguacaacagcaaguucgagagcgucgccugguccgccagcgccugccacgacggcaugggcuggcucaccaucgggaucuccggccccgacaacggggcgguggccgugcugaaguacaacggcaucaucacggagaccaucaagagcuggaagaagcgcauccugcggacccaggaguccgagugcgucugcgugaacggcagcugcuucaccaucaugacggacgggcccuccaacggcgccgccagcuacaagaucuucaagaucgagaaggggaaggugaccaaguccaucgagcucaacgcccccaacuuccacuacgaggagugcagcugcuacccggacaccggcaccgucaugugcgugugccgcgacaacuggcacggguccaaccggcccugggugagcuucaaccagaaccuggacuaccagaucggcuacaucugcuccggcgucuucggggacaacccccgccccaaggacggcgaggggagcugcaacccggugacgguggacggcgcggacggggucaagggcuucuccuacaaguacggcaacgggguguggaucggccggaccaagagcaaccgccugcggaagggguucgagauggugugggaccccaacggcuggaccgacaccgacuccgacuucagcgucaagcaggacgugguggccaucacggacugguccggguacagcggcagcuucguccagcaccccgagcucaccggccuggacugcauccgccccugcuucuggguggagcugguccgggggcucccgcgcgagaacaccaccaucuggacguccggcagcuccaucagcuucugcggggugaacuccgacaccgccaacuggagcuggcccgacggcgccgagcugcccuucaccaucgacaaguga

SEQ ID NO: 79779 - RNA, 1413 nt, Artificial Sequence
  derived and/or modified CDS sequence (opt1) from neuraminidase__InfluenzaA__ABO38035
augaaccccaaccagaagaucaucaccaucggcagcaucuccaucgccaucgggaucaucagccugaugcuccagaucggcaacaucaucuccaucugggccagccacuccauccagaccgggagccagaaccacacggggaccugcaaccagcgcaucaucaccuacgagaacuccaccugggugaaccacacguacgucaacaucaacaacaccaacgugguggcgggcaaggacaagaccagcgucacccuggccggcaacuccagccugugcuccaucagcggcugggccaucuacacgaaggacaacuccauccggaucgggagcaagggcgacguguucgugauccgcgagccguucaucuccugcagccaccucgagugccggaccuucuuccugacccagggggcccugcucaacgacaagcacuccaacggcaccgucaaggaccgcagccccuaccgggcccugauguccugcccccugggggaggcgcccagcccguacaacagcaaguucgaguccguggccuggagcgccuccgccugccacgacggcaugggcuggcucacgaucgggaucagcggccccgacaacggggcgguggccguccugaaguacaacggcaucaucaccgagaccaucaaguccuggaagaagcgcauccugcggacccaggagagcgagugcgugugcgugaacggcuccugcuucacgaucaugaccgacgggcccagcaacggcgccgccuccuacaagaucuucaagaucgagaaggggaaggucaccaagagcaucgagcucaacgcccccaacuuccacuacgaggagugcuccugcuacccggacaccggcacggugaugugcgugugccgcgacaacuggcacgggagcaaccggcccugggucuccuucaaccagaaccuggacuaccagaucggcuacaucugcagcggcguguucggggacaacccccgccccaaggacggcgagggguccugcaacccggugaccgucgacggcgcggacggggugaagggcuucagcuacaaguacggcaacgggguguggaucggccggaccaaguccaaccgccugcggaagggguucgaggucaucugggaccccaacggcuggaccgacacggacagcgacuucuccgugaagcaggacguggucgccaucaccgacuggagcggguacagcggcuccuucgugcagcaccccgagcucaccggccuggacugcauccgccccugcuucugggucgagcuggugcgggggaugccgcgcgagaacaccacgaucuggaccagcggcuccagcaucuccuucugcggggugaacagcgacaccgccaacugguccuggcccgacggcgccgagcuccccuucaccaucgacaaguga

SEQ ID NO: 79780 - RNA, 1413 nt, Artificial Sequence; identical to SEQ ID NO: 78420
  derived and/or modified CDS sequence (opt1) from neuraminidase__InfluenzaA__ABO38046

SEQ ID NO: 79781 - RNA, 1413 nt, Artificial Sequence; identical to SEQ ID NO: 78975
  derived and/or modified CDS sequence (opt1) from neuraminidase__InfluenzaA__ABO38068

SEQ ID NO: 79782 - RNA, 1410 nt, Artificial Sequence; identical to SEQ ID NO: 78351
  derived and/or modified CDS sequence (opt1) from neuraminidase__InfluenzaA__ABO38079

SEQ ID NO: 79783 - RNA, 1410 nt, Artificial Sequence
  derived and/or modified CDS sequence (opt1) from neuraminidase__InfluenzaA__ABO38090
augaaccccaaccagaagaucaucaccaucggcagcgugucccugaccaucgccacgaucugcuuccucaugcagaucgccauccuggucaccaccgugacccugcacuucaagcaguacgagugcaacagcccgcccaacaaccaggugaugcucugcgagcccacgaucaucgagcgcaacaucaccgagaucgucuaccugaccaacaccacgaucgagaaggagaucugccccaagcuggcggaguaccggaacugguccaagccgcagugcaacaucaccggguucgcccccuucagcaaggacaacuccauccgccucagcgccggcggggacaucugggugacccgggagcccuacguguccugcgaccccgacaagugcuaccaguucgcccugggccaggggaccacgcugaacaacggccacagcaacgacaccguccacgagcgcaccccguaccggacccuccugaugaacgagcugggcgugcccuuccaccucgggacgaagcaggucugcaucgccugguccagcuccagcugccacgacggcaaggcguggcugcacgugugcgugaccggggacgacgagaacgccaccgccuccuucaucuacaacggccgccugguggacagcaucggguccuggagcaagaagauccuccggacccaggaguccgagugcgucugcaucaacggcacgugcaccguggugaugaccgacggcagcgccuccgggaaggcggacaccaagauccuguucaucgaggagggcaagaucguccacacgagccugcucagcggguccgcccagcacguggaggagugcagcugcuacccccgcuaccccggcgugcggugcgucugccgcgacaacuggaagggcuccaaccggccgaucguggacaucaacgugaaggacuacagcaucgucuccagcuacgugugcuccgggcuggugggcgacacgccccgcaagaacgacagcuccagcuccagccacugccuggaccccaacaacgaggagggcgggcacggggucaagggcugggccuucgacgacggcaacgacguguggauggggcggaccaucuccgagaagcuccgcagcggcuacgagaccuucaaggucaucgaggggugguccaagcccaacagcaagcugcagaucaaccgccaggugaucguggaccggggcaaccgguccggguacagcggcaucuucuccgucgagggcaagagcugcaucaaccgcugcuucuacguggagcugauccgggggcgcaagcaggagaccgaggugcucuggaccagcaacuccaucgucguguucugcggcaccagcgggaccuacggcacgggguccuggccggacggcgccgacaucaaccugaugcccaucuga

SEQ ID NO: 79784 - RNA, 1410 nt, Artificial Sequence
  derived and/or modified CDS sequence (opt1) from neuraminidase__InfluenzaA__ABO38101
augaaccccaaccagaagaucaucaccaucggcagcgugucccugaccaucgccacggucugcuuccucaugcagaucgccauccuggcgaccaccgugacccugcacuucaagcagcacgagugcgacagcccggccuccaaccaggugaugcccugcgagcccaucaucaucgagcgcaacaucacggagaucgucuaccucaacaacaccaccaucgagaaggagaucugccccgaggugguggaguaccggaacuggagcaagccgcagugccagaucaccggguucgcccccuucuccaaggacaacagcauccgccuguccgccggcggggacaucugggucacgcgggagcccuacgugagcugcgaccccggcaagugcuaccaguucgcccuggggcagggcaccacccucgacaacaagcacuccaacggcaccauccacgaccgcaucccgcaccggacgcugcugaugaacgagcucggggugcccuuccaccugggcaccaagcaggucugcguggcguggagcuccagcuccugccacgacgggaaggccuggcugcacgugugcgucaccggcgacgaccgcaacgccaccgccagcuucaucuacgacgggcggcucguggacuccaucggcagcuggucccagaacauccugcgcacgcaggagagcgagugcgugugcaucaacgggaccugcaccgucgugaugaccgacggcuccgcgagcggccgggccgacacgcgcauccuguucaucaaggaggggaagaucgugcacaucagcccccucuccggcagcgcccagcacaucgaggagugcuccugcuacccccgguacccggacguccgcugcaucugccgggacaacuggaagggcagcaaccgccccgugaucgacaucaacauggaggacuacuccaucgacagcuccuacgugugcagcgggcuggucggcgacacgccccggaacgacgacuccagcuccaacagcaacugccgcgaccccaacaacgagcgggggaacccgggcgugaaggggugggccuucgacaacggcgacgacguguggaugggccgcaccaucaacaaggacucccggagcggguacgagaccuucaaggucaucggcgggugguccacccccaacagcaagucccaggugaaccgccaggucaucguggacaacaacaacuggagcggcuacuccgggaucuucagcguggagggcaagagcugcaucaaccggugcuucuacgucgagcugauccgcggccgcccccaggagacccgggugugguggaccuccaacagcaucguggucuucugcgggaccuccggcacguacgggaccggcagcuggcccgacggggccaacaucaacuucaugccgaucuga

SEQ ID NO: 79785 - RNA, 1410 nt, Artificial Sequence
  derived and/or modified CDS sequence (opt1) from neuraminidase__InfluenzaA__ABO38233
augaaccccaaccagaagaucaucaccaucggcagcgugucccugaccaucgccacgaucugcuuccucaugcagaucgccauccuggucaccaccgugacccugcacuucaagcaguacgagugcgacagcccggcgaacaaccaggugaugcccugcgagcccaucaucaucgagcgcaacaucacggagaucgucuaccucaccaacaccaccaucgagaaggagaucugccccaagcugguggaguaccggaacugguccaagccgcagugcaagaucacgggguucgcccccuucagcaaggacaacuccauccgccugagcgccggcggggacaucugggugacccgggagcccuacgucuccugcgaccccggcaagugcuaccaguucgcccucgggcagggcaccacccuggacaacaagcacagcaacgacacgauccacgaccgcaccccgcaccggacccugcucaugaacgagcugggcgugcccuuccaccuggggacccgccaggugugcaucgccugguccagcuccagcugccacgacggcaaggcguggcuccacgucugcgugacgggguacgacaagaacgccaccgccuccuucaucuacgacggccggcugguggacagcaucggguccuggagcaagaacauccugcgcacccaggaguccgagugcgucugcaucaacgggaccugcacgguggugaugaccgacggcagcgccuccgagcgggcggacaccaagauccucuucaucgaggaggggaagaucguccacaucagcccccugagcggcuccgcccagcacguggaggagugcagcugcuacccccgcuacccgggggugcggugcgucugccgcgacaacuggaagggcuccaaccggcccgugguggacaucaacgucaaggacuacagcaucgccuccagcuacgugugcuccggccuggugggggacacgccccgcaagaacgaccgguacagcuccagcuacugccgcaaccccaacaacgagaagggcaaccacggggucaagggcugggccuucgacgacgggaacgacguguggaugggccggaccaucuccgacgagagccgcuccggcuacgagaccuucaaggucaucgggggcuggagcaccccgaacuccaagcuccagaucaaccgccaggugaucguggacagcgacaaccgguccggguacagcggcaucuucuccgucgagggcaagagcugcaucaaccggugcuucuacguggagcugauccgcggccgcgagcaggagacccgggugugguggacgagcaacuccaucgucguguucugcggcaccagcgggaccuacggcaccggguccuggcccgacggcgccgacaucaaccugaugcccaucuga

SEQ ID NO: 79786 - RNA, 1410 nt, Artificial Sequence; identical to SEQ ID NO: 79135
  derived and/or modified CDS sequence (opt1) from neuraminidase__InfluenzaA__ABO38244

SEQ ID NO: 79787 - RNA, 1410 nt, Artificial Sequence; identical to SEQ ID NO: 78351
  derived and/or modified CDS sequence (opt1) from neuraminidase__InfluenzaA__ABO38255

SEQ ID NO: 79788 - RNA, 1410 nt, Artificial Sequence; identical to SEQ ID NO: 78736
  derived and/or modified CDS sequence (opt1) from neuraminidase__InfluenzaA__ABO38277

SEQ ID NO: 79789 - RNA, 1410 nt, Artificial Sequence; identical to SEQ ID NO: 79763
  derived and/or modified CDS sequence (opt1) from neuraminidase__InfluenzaA__ABO38288

SEQ ID NO: 79790 - RNA, 1410 nt, Artificial Sequence
  derived and/or modified CDS sequence (opt1) from neuraminidase__InfluenzaA__ABO38299
augaaccccaaccagaagaucaucaccaucggcagcgugucccugaccaucgccacggucugcuucaucaugcagaucgccauccucgcgaccaccgugacccugcacuucaagcagcacgagugcgacagcccggccuccaaccaggugaugcccugcgagcccaucaucaucgagcgcaacaucacggagaucgucuaccugaacaacaccaccaucgagaaggagaucugccccgaggccguggaguaccggaacuggagcaagccgcagugccagaucaccggguucgcccccuucuccaaggacaacagcauccgccucuccgccggcggggacaucugggugacgcgggagcccuacgucagcugcgaccccggcaagugcuaccaguucgcgcuggggcagggcaccacccuggacaacaagcacuccaacggcaccauccacgaccgcaucccgcaccggacgcuccugaugaacgagcugggggugcccuuccaccucggcaccaagcaggucugcguggccuggagcuccagcuccugccacgacgggaaggccuggcugcacgugugcgugaccggcgacgaccgcaacgccaccgcgagcuucaucuacgacgggcggcuggucgacuccaucggcagcuggucccagaacauccuccgcacgcaggagagcgagugcgugugcaucaacgggaccugcaccguggucaugaccgacggcuccgccagcggccgggccgacacgcgcauccuguucaucaaggaggggaagaucgugcacaucagcccccuguccggcagcgcccagcacguggaggagugcuccugcuacccccgguacccggacguccgcugcacgugccgggacaacuggaagggcagcaaccgccccgugaucgacaucaacauggaggacuacuccaucgacagcuccuacgugugcagcgggcucgucggcgacacgccccggaacgacgacuccagcuccaacagcaacugccgcgaccccaacaacgagcgggggaacccgggcgugaaggggugggccuucgacaacggcgacgacguguggaugggccgcaccaucaacaaggacucccggagcggguacgagaccuucaaggucaucggcgggugguccacccccaacagcaagucccaggugaaccgccaggucaucguggacaacaacaacuggagcggcuacuccgggaucuucagcguggagggcaagagcugcaucaaccggugcuucuacgucgagcugauccgcggccgcccccaggagacccgggugugguggaccuccaacagcaucguggucuucugcgggaccuccggcaccuacgggaccggcagcuggcccgacggggcgaacaucaacuucaugccgaucuga

SEQ ID NO: 79791 - RNA, 1410 nt, Artificial Sequence
  derived and/or modified CDS sequence (opt1) from neuraminidase__InfluenzaA__ABO38310
augaaccccaaccagaagaucaucaccaucggcagcgugucccugaccaucgccacggucugcuuccucaugcagaucgccauccuggcgaccaccgugacccugcacuucaagcagcacgagugcgacagcccgacguccaaccaggugaugcccugcgagcccaucaucaucgagcgcaacaucaccgagaucgucuaccucaacaacaccaccaucgagaaggagaucugccccgaggugguggaguaccggaacuggagcaagccgcagugccagaucacgggguucgcccccuucuccaaggacaacagcauccgccuguccgccggcggggacaucugggucacccgggagcccuacgugagcugcgaccccggcaagugcuaccaguucgcccuggggcagggcaccacccucgacaacaagcacuccaacggcacgauccacgaccgcaucccgcaccggacccugcugaugaacgagcucggggugcccuuccaccugggcaccaagcaggucugcguggccuggagcuccagcuccugccacgacgggaaggcguggcugcacgugugcgucaccggcgacgaccgcaacgccacggccagcuucaucuacgacgggcggcucguggacuccaucggcagcuggucccagaacauccugcgcacccaggagagcgagugcgugugcaucaacgggaccugcaccgucgugaugacggacggcuccgccagcggccgggcggacacccgcauccuguucaucaaggaggggaagaucgugcacaucagcccccucuccggcagcgcccagcacaucgaggagugcuccugcuacccccgguacccggacguccgcugcaucugccgggacaacuggaagggcagcaaccgccccgugaucgacaucaacauggaggacuacuccaucgacagcuccuacgugugcagcgggcuggucggcgacacgccccggaacggggacuccagcuccaacagcaacugccgcgaccccaacaacgagcggggcaacccgggggugaagggcugggccuucgacaacggcgacgacguguggauggggcgcaccaucaacaaggagucccggagcggcuacgagaccuucaaggucaucgggggcugguccacccccaacagcaagucccaggugaaccgccaggucaucguggacaacaacaacuggagcggguacuccggcaucuucagcguggagggcaagagcugcaucaaccggugcuucuacgucgagcugauccgcgggcgcccccaggagacccgggugugguggaccuccaacagcaucguggucuucugcggcacguccgggaccuacggcaccgggagcuggcccgacggcgccaacaucaacuucaugccgaucuga

SEQ ID NO: 79792 - RNA, 1413 nt, Artificial Sequence; identical to SEQ ID NO: 78954
  derived and/or modified CDS sequence (opt1) from neuraminidase__InfluenzaA__ABO38332

SEQ ID NO: 79793 - RNA, 1413 nt, Artificial Sequence
  derived and/or modified CDS sequence (opt1) from neuraminidase__InfluenzaA__ABO38343
augaaccccaaccagaagaucaucaccaucggcagcaucugcaugaccaucgggaucaucucccugauccuccagaucggcaacaucaucagcaucugggugucccacagcauccagacggggucccagaaccacaccggcaucugcaaccagcgcaucaucaccuacgagaacagcaccugggucaaccagacguacgugaacaucaacaacaccaacguggucgccgggaaggacaccaccuccgugacgcuggccggcaacagcucccugugcccgauccggggcugggcgaucuacagcaaggacaacuccauccgcaucgggagcaagggcgacguguucgucauccgggagcccuucaucuccugcagccaccucgagugccgcaccuucuuccugacccagggggcccugcucaacgacaagcacuccaacggcaccgugaaggaccggagccccuaccgcgcccugauguccugccccaucggggaggccccgagccccuacaacucccgguucgagagcguggccuggagcgcguccgccugccacgacggcaugggcuggcugacgaucgggaucagcggccccgacgacggggccgucgccgugcucaaguacaacggcaucaucaccgagaccaucaaguccuggcgcaagcggauccugcgcacccaggagagcgagugcgugugcgucaacggcuccugcuucacgaucaugaccgacgggcccagcaacggcccggcguccuaccggaucuucaagaucgagaaggggaagaucaccaagagcaucgagcuggacgcccccaacucccacuacgaggagugcagcugcuaccccgacaccggcacggugaugugcgugugccgcgacaacuggcacggguccaaccggcccugggucagcuucaaccagaaccucgacuaccagaucggcuacaucugcuccggcguguucggggacaacccgcgccccaaggacggcaaggggagcugcgaccccgugaccgucgacggcgccgacggggugaagggcuucuccuaccgguacggcaacgggguguggaucggccgcaccaagagcaacuccagccggaagggguucgagaugaucugggaccccaacggcuggaccgacacggacuccaacuuccuggucaagcaggacgugguggccaugaccgacuggagcggguacagcggcuccuucguccagcacccggagcugaccggccucgacugcaugcgccccugcuucuggguggagcugguccgggggcgcccccgggagggcaccacgguguggaccagcggguccagcaucuccuucugcggcgugaacagcgacaccgccaacugguccuggcccgacggcgcggagcugccguucaccaucgacaaguga

SEQ ID NO: 79794 - RNA, 1410 nt, Artificial Sequence
  derived and/or modified CDS sequence (opt1) from neuraminidase__InfluenzaA__ABO38354
augaaccccaaccagaagaucaucaccaucggcagcaucugcaugguggucgggaucaucucccugauccuccagaucggcaacaucaucagcaucuggaucucccacagcauccagaccgggucccagaaccacacgggcaucugcaaccagaacaucaucaccuacaagaacagcaccugggugaaccagaccuacgugaacaucuccaacacgaacgucguggccgggcaggacaccaccagcgugauccugaccggcaacuccagccugugcccgauccgcggcugggccaucuacuccaaggacaacagcauccggaucggguccaagggcgacgucuucgugauccgcgagcccuucaucagcugcucccaccucgagugccggacguucuuccugacccagggggcgcugcucaacgaccgccacagcaacggcaccgugaaggaccggucccccuaccgcgcccugaugagcugccccgucggggaggccccgucccccuacaacagccgguucgagagcguggccugguccgccagcgcgugccacgacggcaugggcuggcugaccaucgggaucuccggccccgacaacggggccguggccguccucaaguacaacggcaucaucacggagaccaucaagagcuggcgcaagaagauccugcggacccaggaguccgagugcgccugcgugaacggcagcugcuucaccaucaugacggacgggcccuccaacggccuggcgagcuacaagaucuucaagaucgagaaggggaaggugaccaaguccaucgagcucaacgccccgaacagccacuacgaggagugcuccugcuaccccgacaccggcaaggucaugugcgugugccgcgacaacuggcacgggagcaaccggcccuggguguccuucgaccagaaccuggacuaccagaucggcuacaucugcagcggcgucuucggggacaacccccgcccgaaggacggcaccggguccugcggccccguguacguggacggggccaacggcgucaagggcuucagcuaccgguacgggaacggcguguggaucgggcgcacgaaguccaacagcucccggcacggcuucgagaugaucugggaccccaacggguggaccgagaccgacagcaaguucagcgugcgccaggacgucguggccaugaccgacugguccggcuacagcggcuccuucguccagcaccccgagcugacggggcucgacugcaugcggccgugcuucuggguggagcugauccgcggccggcccaaggagaacaccaucuggaccagcggguccagcaucuccuucugcggcgugaacagcgacaccgucgacugguccuggcccgacggcgccgagcugcccuucacgaucgacaaguga

SEQ ID NO: 79795 - RNA, 1413 nt, Artificial Sequence
  derived and/or modified CDS sequence (opt1) from neuraminidase__InfluenzaA__ABO38365
augaaccccaaccagaagaucaucaccaucggcagcaucugcauggccaucgggaucaucucccugauccuccagaugggcaacaucaucagcaucugggugucccacagcauccagaccgggucccagaaccacacgggcaucugcaaccagcgcaucaucaccuacgagaacagcaccugggucaaccagaccuacgugaacaucaacaacacgaacguggucgccgggaaggacaccaccuccgugacccuggcgggcaacagcucccugugcccgauccggggcugggccaucuacagcaaggacaacuccauccgcaucgggagcaagggcgacguguucgucauccgggagcccuucaucuccugcagccaccucgagugccgcacguucuuccugacccagggggcccugcucaacgacaagcacuccaacggcaccgugaaggaccggagccccuaccgcgcccugauguccugccccaucggggaggccccgagccccuacaacucccgguucgagagcguggcguggagcgccuccgccugccacgacggcaugggcuggcugaccaucgggaucagcggccccgacgacggggccgucgcggugcucaaguacaacggcaucaucacggagaccaucaaguccuggcgcaagcggauccugcgcacccaggagagcgagugcgugugcgucaacggcuccugcuucaccaucaugacggacgggcccagcaacggcccggccuccuaccggaucuucaagaucgagaaggggaagaucaccaagagcaucgagcuggacgcccccaacucccacuacgaggagugcagcugcuaccccgacaccggcaccgugaugugcgugugccgcgacaacuggcacggguccaaccggcccugggucagcuucaaccagaaccucgacuaccagaucggcuacaucugcuccggcguguucggggacaacccgcgccccaaggacggcaaggggagcugcgaccccgugacggucgacggcgccgacggggugaagggcuucuccuaccgguacggcaacgggguguggaucggccgcaccaagagcaacuccagccggaagggguucgagaugaucugggaccccaacggcuggaccgacaccgacuccaacuuccuggucaagcaggacgugguggccaugacggacuggagcggguacagcggcuccuucguccagcacccggagcugaccggccucgacugcaugcgccccugcuucuggguggagcugauccgggggcgcccccgggagaagaccaccaucuggacgagcggcuccagcaucuccuucugcggggucaacagcgacaccgcgaacugguccuggcccgacggcgccgagcugccguucaccaucgacaaguga

SEQ ID NO: 79796 - RNA, 1410 nt, Artificial Sequence
  derived and/or modified CDS sequence (opt1) from neuraminidase__InfluenzaA__ABO38376
augaaccccaaccagaagaucaucaccaucggcagcaucugcaugguggucgggaucaucucccugauccuccagaucggcaacaucaucagcaucuggaucucccacagcauccagaccgggucccagaaccacacggggaccugcaaccagagcaucaucaccuacaagaacuccaccugggugaaccagacguacgugaacaucagcaacaccaacgucguggccggcaaggacaccaccuccgugauccuggccggcaacagcucccugugcccgauccgcggcugggcgaucuacagcaaggacaacgggguccggaucggcuccaagggggacguguucgugauccgcgagcccuucaucagcugcucccaccucgagugccggacguucuuccugacccagggcgcccugcucaacgacaagcacagcaacgggaccgucaaggaccgcucccccuaccgggcccugaugagcugccccgugggcgaggccccgucccccuacaacagccgcuucgagagcguggccugguccgcgagcgccugccacgacggcaugggguggcugaccaucggcaucuccgggcccgacgacggcgccgucgccgugcucaaguacaacggcaucaucacggagaccaucaagagcuggcggaaggagauccugcgcacccaggaguccgagugcgcgugcgugaacgggagcugcuucaccaucaugacggacggccccuccgggggcccggccagcuacaagaucuucaagaucgagaaggggaaggucaccaaguccaucgagcuggacgcccccaacagccacuacgaggagugcuccugcuaccccgacaccggcaaggugaugugcgugugccgggacaacuggcacggcagcaaccgccccugggucuccuucgaccagaaccucgacuaccagaugggguacaucugcagcggcguguucggggacaacccgcggcccaaggacggcaaggggaacugcggccccguguacgucgacggcgccaacggggugaagggcuucuccuaccgcuacgggaacggcguguggaucgggcggaccaagagcaacuccagccgccagggcuucgagaugaucugggaccccaacggcuggacggagaccgacuccaacuucuucgucaagcaggacguggucgccgugaccgacuggagcggguacagcggcuccuucgugcagcacccggagcugaccgggcuggacugcaugcggcccugcuucugggucgagcucauccgcggccggcccaaggagaagacgaucuggaccagcggcuccagcaucuccuucugcggggugaacagcgacaccguggacugguccuggcccgacggcgcggagcugccguucaccaucgacaaguga

SEQ ID NO: 79797 - RNA, 1410 nt, Artificial Sequence
  derived and/or modified CDS sequence (opt1) from neuraminidase__InfluenzaA__ABO38387
augaaccccaaccagaagaucaucaccaucggcagcaucugcaugguggucgggaucaucucccugauccuccagaucggcaacaucaucagcaucuggaucucccacagcauccagaccgggucccagaaccacacgggcaucugcaaccagagcaucaucaccuacaagaacuccaccugggugaaccagaccuacgugaacaucagcaacacgaacgucguggccgggcaggacaccaccuccgugauccugaccggcaacagcucccugugcccgauccgcggcugggccaucuacagcaaggacaacgggauccggaucggcuccaagggggacgucuucgugauccgcgagcccuucaucagcugcucccaccucgagugccggacguucuuccugacccagggcgcgcugcucaacgacaagcacagcaacgggaccgugaaggaccgcucccccuaccgggcccugaugagcugccccgucggcgaggccccgucccccuacaacagccgcuucgagagcguggccugguccgccagcgcgugccacgacggcaugggguggcugaccaucggcaucuccgggcccgacaacgaggccguggccguccucaaguacaacggcaucaucacggagaccaucaagagcuggcggaagaagauccugcgcacccaggaguccgagugcgccugcgugaacggcagcugcuucaccaucaugacggacgggcccuccgacggccuggcgagcuacaagaucuucaagaucgagaaggggaaggugaccaaguccaucgagcucaacgccccgaacagccacuacgaggagugcuccugcuaccccgacaccggcaaggucaugugcgugugccgggacaacuggcacgggagcaaccgccccuggguguccuucgaccagaaccuggacuaccagaucggcuacaucugcagcggcgucuucggggacaacccccggccgaaggacggcaccggguccugcggccccguguacguggacggggccaacggcgucaagggcuucagcuaccgcuacgggaacggcguguggaucgggcggacgaaguccaccagcucccgccacggcuucgagaugaucugggaccccaacggguggaccgagaccgacagcaaguucagcgugcggcaggacgucguggccaugacggacugguccggcuacagcggcuccuucguccagcaccccgagcugaccgggcucgacugcaugcgcccgugcuucuggguggagcugauccggggccagcccaaggagaagaccaucuggaccagcggguccagcaucuccuucugcggcgugaacagcgacacggucgacugguccuggcccgacggcgccgagcugcccuucaccaucgacaaguga

SEQ ID NO: 79798 - RNA, 1413 nt, Artificial Sequence
  derived and/or modified CDS sequence (opt1) from neuraminidase__InfluenzaA__ABO38398
augaaccccaaccagaagaucaucaccaucggcagcaucugcauggccaucgggaucaucucccugauccuccagaucggcaacaucgugagcaucuggaucucccacagcauccagaccgggucccagaacuacacgggcaucugcaaccagcgcaucaucaccuacgagaacagcaccugggucaaccagaccuacgugaacaucaacaacacgaacguggucgccgggcaggacaccaccuccguggcgcuggccggcaacagcucccugugcccgaucagcggcugggccaucuacuccaaggacaacagcauccggaucggguccaagggcgacguguucgucauccgcgagcccuucaucagcugcucccaccucgagugccggaacuucuuccugacccagggggcccugcucaacgacaagcacagcaacggcacggugaaggaccgcucccccuaccgggcccugaugagcugccccaucggggaggcgccgucccccuacaacagccgcuucgagagcguggccugguccgccagcgccugccacgacggcaugggcuggcugaccaucgggaucuccggccccgacgacggggcggucgccgugcucaaguacaacggcaucaucaccgagaccaucaagagcuggcggaagcgcauccugcggacgcaggaguccgagugcgugugcgucaacggcagcugcuucaccaucaugaccgacgggcccaacaacggcccggccuccuacaagaucuucaagaucgagaaggggaagaucaccaagagcaucgagcuggacgcccccaacucccacuacgaggagugcagcugcuaccccgacgccggcacggugaugugcgugugccgcgacaacuggcacggguccaaccggcccugggucagcuucaaccagaaccucgacuaccagaucggcuacaucugcuccggcguguucggggacaacccgcgccccaaggacggcaaggggagcugcgaccccgugaccgucgacggcgcggacggggugaagggcuucuccuaccgguacggcaacgggguguggaucggccgcaccaagagcaacuccagccggcgcggguucgagaugaucugggaccccaacggcuggaccgacacggacuccaaguuccuggucaagcaggacgugguggccaugaccgacuggagcggguacagcggcuccuucguccagcacccggagcugaccggccucgacugcaugcggcccugcuucuggguggagcugauccgcgggcggccccgcgagaacaccacgaucuggaccagcggcuccagcaucuccuucugcggggucaacggcgacaccgccaacuggagcuggcccgacggcgccgagcugccguucaccaucgacaaguga

SEQ ID NO: 79799 - RNA, 1410 nt, Artificial Sequence; identical to SEQ ID NO: 78277
  derived and/or modified CDS sequence (opt1) from neuraminidase__InfluenzaA__ABO38420

SEQ ID NO: 79800 - RNA, 1410 nt, Artificial Sequence
  derived and/or modified CDS sequence (opt1) from neuraminidase__InfluenzaA__ABO38715
augaaccccaaccagaagaucaucaccaucggcagcgugucccugaccaucgccacggucugcuuccucaugcagaucgccauccuggugaccaccgugacccugcacuucaagcagcacgagugcgacagcccggcguccaaccaggucaugcccugcgagcccaucaucaucgagcgcaacaucacggagaucguguaccucaacaacaccaccaucgagaaggagaccugccccaagguggucgaguaccggagcugguccaagccgcagugcaagaucacgggguucgcccccuucagcaaggacaacuccauccgccugagcgccggcggggacaucugggugacccgggagcccuacguguccugcgaccccggcaagugcuaccaguucgcccuggggcagggcaccacccucgacaacaagcacagcaacgacacgauccacgaccgcaucccgcaccggacccugcugaugaacgagcucggcguccccuuccaccuggggacccgccaggugugcaucgccugguccagcuccagcugccacgacggcaaggcguggcugcacgugugcgucaccggggacgacaagaacgccacggccuccuucaucuacgacggccggcucguggacagcaucggguccuggagccagaacauccugcgcacccaggaguccgagugcgugugcaucaacgggaccugcaccgucgugaugacggacggcagcgccagcggccgggcggacacccgcauccuguucaucgaggagggcaagaucgugcacaucagcccccucuccggguccgcccagcacgucgaggagugcagcugcuacccccgguacccggacgugcgcugcaucugccgggacaacuggaagggcuccaaccgccccaucguggacaucaacauggaggacuacagcaucgacuccagcuacgucugcuccggccuggugggggacacgccccggaacgacgaccgcagcuccaacagcaacugccggaaccccaacaacgagcgcggcaaccagggggugaagggcugggccuucgacaacggggacgacgucuggaugggccggaccaucuccaaggaccugcgcagcggcuacgagaccuucaaggugaucgggggcugguccaccccgaacagcaagucccagaucaaccggcaggucaucguggacagcgacaaccgcuccggguacagcggcaucuucagcguggaggggaaguccugcaucaaccgcugcuucuacgucgagcucauccggggccgcaagcaggagacccgggugugguggaccagcaacuccaucguggucuucugcggcacgagcgggaccuacggcaccggguccuggcccgacggcgccaacaucaacuucaugcccaucuga

SEQ ID NO: 79801 - RNA, 1410 nt, Artificial Sequence; identical to SEQ ID NO: 79800
  derived and/or modified CDS sequence (opt1) from neuraminidase__InfluenzaA__ABO38726

SEQ ID NO: 79802 - RNA, 1413 nt, Artificial Sequence
  derived and/or modified CDS sequence (opt1) from neuraminidase__InfluenzaA__ABO44049
augaaccccaaccagaagaucaucaccaucggcagcaucuccaucgccaucgggaucaucagccugaugcuccagaucggcaacaucaucuccaucugggccagccacuccauccagaccgggagccagaaccacacgggcaucugcaaccagcgcaucaucaccuacgagaacuccaccugggugaaccacaccuacgucaacaucaacaacacgaacgugguggcggggaaggacaagaccagcgucacccuggccggcaacuccagccugugcuccaucagcggcugggccaucuacaccaaggacaacuccauccggaucgggagcaagggcgacguguucgugauccgcgagccguucaucuccugcagccaccucgagugccggacguucuuccugacccagggggcccugcucaacgacaagcacuccaacggcaccgucaaggaccgcagccccuaccgggcccugauguccugcccccugggggaggcgcccagcccguacaacagcaaguucgaguccguggccuggagcgccuccgccugccacgacggcaugggcuggcucaccaucgggaucagcggccccgacaacggggcgguggccguccugaaguacaacggcaucaucacggagaccaucaaguccuggaagaagcgcauccugcggacccaggagagcgagugcgugugcgugaacggcuccugcuucaccaucaugacggacgggcccagcaacggcgccgccuccuacaagaucuucaagaucgagaaggggaaggucaccaagagcaucgagcucaacgcccccaacuuccacuacgaggagugcuccugcuacccggacaccggcaccgugaucugcgugugccgcgacaacuggcacgggagcaaccggcccugggucuccuucaaccagaaccuggacuaccagaucggcuacaucugcagcggcguguucggggacaacccccgccccaaggacggcgagggguccugcaacccggugacggucgacggcgcggacggggugaagggcuucagcuacaaguacggcaacgggguguggaucggccggaccaaguccaaccgccugcggaagggguucgagaugaucugggaccccaacggcuggaccgacaccgacagcaacuucuccgucaagcaggacgugguggccaucacggacuggagcggguacagcggcuccuucguccagcaccccgagcucaccggccuggacugcauccgccccugcuucuggguggagcugguccgggggcucccgcgcgagaacaccaccaucuggacgagcggcuccagcaucuccuucugcggggugaacagcgacaccgccaacugguccuggcccgacggcgccgagcugcccuucaccaucgacaaguga

SEQ ID NO: 79803 - RNA, 1410 nt, Artificial Sequence
  derived and/or modified CDS sequence (opt1) from neuraminidase__InfluenzaA__ABO44060
augaaccccaaccagaagaucaucaccaucggcagcgugucccugaccaucgccacggucugcuuccucaugcagaucgccauccuggugaccaccgugacccugcacuucaagcagcacgagugcgacagcccggcguccaaccaggucaugcccugcgagcccaucaucaucgagcgcaacaucacggagaucguguaccucaacaacaccaccaucgagaaggagaucugccccaagguggucgaguaccggaacuggagcaagccgcagugcaagaucaccggguucgcccccuucuccaaggacaacagcauccgccuguccgccggcggggacaucugggugacgcgggagcccuacgugagcugcgaccccggcaagugcuaccaguucgcccuggggcagggcaccacccucgacaacaagcacuccaacgacaccauccacgaccgcaucccgcaccggacgcugcugaugaacgagcucggcguccccuuccaccuggggacccgccaggugugcaucgccuggagcuccagcuccugccacgacggcaaggcguggcugcacgugugcgucaccggggacgacaagaacgccaccgccagcuucaucuacgacggccggcucguggacuccaucgggagcuggucccagaacauccugcgcacgcaggagagcgagugcgugugcaucaacgggaccugcaccgucgugaugaccgacggcuccgccagcgggcgggcggacacgaagauccuguucaucgaggagggcaagaucgugcacaucagcccccucuccgggagcgcccagcacgucgaggagugcuccugcuacccccgcuacccggacgugcggugcaucugccgcgacaacuggaagggcagcaaccggcccguggucgacaucaacauggaggacuacuccaucgacagcuccuacgugugcagcggccuggugggggacacgccccgcaacgacgaccgguccagcaacuccaacugccgcaaccccaacaacgagcggggcaaccagggggucaagggcugggccuucgacaacggggacgacguguggaugggccgcaccaucagcaaggaccugcgguccggcuacgagaccuucaaggucaucgggggcuggagcaccccgaacuccaagagccagaucaaccgccaggugaucguggacuccgacaaccggagcggguacuccggcaucuucagcgucgagggcaagagcugcaucaaccgcugcuucuacguggagcucauccgcggccggaagcaggagacccgcgugugguggaccuccaacagcaucgucguguucugcggcaccuccgggacguacggcaccgggagcuggcccgacggcgccaacaucaaccugaugcccaucuga

SEQ ID NO: 79804 - RNA, 1410 nt, Artificial Sequence
  derived and/or modified CDS sequence (opt1) from neuraminidase__InfluenzaA__ABO44071
augaaccccaaccagaagaucaucaccaucggcuucguguuccugaccaucgccacggucugcuuccucaugcagaucgccauccuggugaccaccgugacccugcacuucaagcaguacgagugcgacagcccggcguccaaccaggucaugcccugcgagcccaucaucaucgagcgcaacaucacggagaucguguaccucaacaacaccaccaucgagaaggagaucugccccaagguggucgaguaccggaacuggagcaagccgcagugccagaucaccggguucgcccccuucuccaaggacaacagcauccgccuguccgccggcggggacaucugggugacgcgggagcccuacgugagcugcgaccacggcaagugcuaccaguucgcccuggggcagggcaccacccucgacaacaagcacuccaacgacaccauccacgaccgcaucccccaccggacgcugcugaugaacgagcucggcgucccguuccaccuggggacccgccaggugugcaucgccuggagcuccagcuccugccacgacggcaaggcguggcugcacgugugcaucaccggggacgacaagaacgccaccgccagcuucaucuacgacggccggcucgucgacuccaucgggagcuggucccagaacauccugcgcacgcaggagagcgagugcgugugcaucaacgggaccugcaccguggucaugaccgacggcuccgccagcggccgggcggacacgcgcauccuguucaucgaggagggcaagaucgugcacaucagcccccucuccgggagcgcccagcacguggaggagugcuccugcuacccccgguaccccggcguccgcugcaucugccgggacaacuggaagggcagcaaccgcccggugguggacaucaacauggaggacuacuccaucgacagcuccuacgucugcagcgggcuggugggcgacacgccccggaacgacgaccgcuccagcaacuccaacugcaagaaccccaacaacgagcgggggaaccagggcgugaaggggugggccuucgacaacggcgacgacgucuggaugggccgcaccaucagcaaggaccugcgguccggguacgagaccuucaaggugaucggcggguggagcacccccaacuccaagagccagaucaaccgccaggucaucguggacuccgacaaccggagcggcuacuccgggaucuucagcguggagggcaaguccugcaucaaccgcugcuucuacgucgagcucauccgcggccggaagcaggagacccgcgugugguggaccagcaacagcaucguggucuucugcgggaccuccggcacguacgggaccggcagcuggccggacggggccaacaucaacuucaugcccaucuga

SEQ ID NO: 79805 - RNA, 1410 nt, Artificial Sequence; identical to SEQ ID NO: 78370
  derived and/or modified CDS sequence (opt1) from neuraminidase__InfluenzaA__ABO44082

SEQ ID NO: 79806 - RNA, 1410 nt, Artificial Sequence
  derived and/or modified CDS sequence (opt1) from neuraminidase__InfluenzaA__ABO44093
augaaccccaaccagaagaucaucaccaucggcagcgugucccugaccaucgccacggucugcuuccucaugcagaucgccauccuggcgaccaccgugacccugcacuucaagcagcacgagugcgacagcccggccuccaaccaggugaugcccugcgagcccaucaucaucgagcgcaacaucacggagaucgucuaccucaacaacaccaccaucgagaaggagaucugccccgaggugguggaguaccggaacuggagcaagccgcagugccagaucaccggguucgcccccuucuccaaggacaacagcauccgccuguccgccggcggggacaucugggucacgcgggagcccuacgugagcugcgaccccggcaagugcuaccaguucgcccuggggcagggcaccacccucgacaacaagcacuccaacggcaccauccacgaccgcaucccgcaccggacgcugcugaugaacgagcucggggugcccuuccaccugggcaccaagcaggucugcguggcguggagcuccagcuccugccacgacgggaaggccuggcugcacgugugcgucaccggcgacgaccgcaacgccaccgccagcuucaucuacgacgggcggcucguggacuccaucggcagcuggucccagaacauccugcgcacgcaggagagcgagugcgugugcaucaacgggaccugcaccgucgugaugaccgacggcuccgcgagcggccgggccgacacgcgcauccuguucaucaaggaggggaagaucgugcacaucagcccccucuccggcagcgcccagcacaucgaggagugcuccugcuacccccgguacccggacguccgcugcaucugccgggacaacuggaagggcagcaaccgccccgugcuggacaucuccauggaggacuacagcaucgacuccagcuacgugugcuccgggcuggucggcgacacgccccggaacgacgacagcuccagcaacuccaacugccgcgaccccaacaacgagcgggggaacccgggcgugaaggggugggccuucgacaacggcgacgacguguggaugggccgcaccaucagcaaggaccuccgguccggguacgagaccuucaaggucaucggcggguggagcacccccaacuccaagagccaggugaaccgccaggucaucguggacaacaacaacugguccggcuacagcgggaucuucagcguggagggcaaguccugcaucaaccggugcuucuacgucgagcugauccgcggccgcagccaggagacccgggugugguggaccuccaacagcaucguggucuucugcgggaccuccggcacguacgggaccggcagcuggcccgacggggccaacaucaacuucaugcccaucuga

SEQ ID NO: 79807 - RNA, 1410 nt, Artificial Sequence
  derived and/or modified CDS sequence (opt1) from neuraminidase__InfluenzaA__ABO44104
augaaccccaaccagaagaucaucaccaucggcagcgccucccugaccaucgccacggugugcuuccucaugcagaucgcgauccuggucaccaccgugacccugcacuucaagcagcacgagugcgacagcccggccuccaaccaggugaugcccugcgagcccaucaucaucgagcgcaacaucacggagaucgucuaccucaacaacaccaccaucgagaaggagaucugccccaaggugguggaguaccggaacuggagcaagccgcagugcaagaucaccggguucgcccccuucuccaaggacaacagcauccgccuguccgccggcggggacaucugggucacgcgggagcccuacgugagcugcgaccccggcaagugcuaccaguucgcccuggggcagggcaccacccucgacaacaagcacuccaacgacaccauccacgaccgcaucccgcaccggacgcugcugaugaacgagcucggcgugcccuuccaccuggggacccgccaggucugcaucgcguggagcuccagcuccugccacgacggcaaggccuggcugcacgugugcgugaccggggacgacaagaacgccaccgccagcuucaucuacgacggccggcucgucgacuccaucgggagcuggucccagaacauccugcgcacgcaggagagcgagugcgugugcaucaacgggaccugcaccguggucaugaccgacggcuccgcgagcgggcgggccgacacgcgcauccuguucaucgaggagggcaagaucgugcacaucagcccccucuccgggagcgcccagcacguggaggagugcuccugcuacccccgguacccggacguccgcugcaucugccgggacaacuggaagggcagcaaccgccccgugguggacaucaacauggaggacuacuccaucgacagcuccuacgucugcagcggccuggugggggacacgccccggaacgacgaccgcuccagcaacuccaacugccggaaccccaacaacgagaagggcaaccagggggugaagggcugggccuucgacaacggggacgacgucuggaugggccgcaccaucagcaaggaccugcgguccggcuacgagaccuucaaggugaucgggggcuggagcaccccgaacuccaagagccagaucaaccgccaggucaucguggacuccgacaaccggagcggguacuccggcaucuucagcguggagggcaagagcugcaucaaccgcugcuucuacgucgagcucauccgcggccggaagcaggagacccgcgugugguggaccuccaacagcaucguggucuucugcggcaccuccgggacguacggcaccgggagcuggcccgacggcgccaacaucaaccugaugcccaucuga

SEQ ID NO: 79808 - RNA, 1413 nt, Artificial Sequence
  derived and/or modified CDS sequence (opt1) from neuraminidase__InfluenzaA__ABO44126
augaaccccaaccagaagaucaucaccaucggcagcaucugcauggccaucgggaucaucucccugauccuccagaucggcaacaucgugagcaucuggaucucccacagcauccagaccgggucccagaacuacacgggcaucugcaaccagcgcaucaucaccuacgagaacagcaccugggucaaccagaccuacgugaacaucaacaacacgaacguggucgccgggcaggacaccaccuccguggcgcuggccggcaacagcucccugugcccgaucagcggcugggccaucuacuccaaggacaacagcauccggaucggguccaagggcgacguguucgucauccgcgagcccuucaucagcugcucccaccucgagugccggaccuucuuccugacgcagggggcccugcucaacgacaagcacagcaacggcaccgugaaggaccgcucccccuaccgggcccugaugagcugccccaucggggaggcgccgucccccuacaacagccgcuucgagagcguggccugguccgccagcgccugccacgacggcaugggcuggcugaccaucgggaucuccggccccgacgacggggcggucgccgugcucaaguacaacggcaucaucaccgagacgaucaagagcuggcggaagcgcauccugcggacccaggaguccgagugcgugugcgucaacggcagcugcuucaccaucaugaccgacgggcccaacaacggcccggccuccuacaagaucuucaagaucgagaaggggaagaucaccaagagcaucgagcugaacgcccccaacucccacuacgaggagugcagcugcuaccccgacgccggcacggugaugugcgugugccgcgacaacuggcacggguccaaccggcccugggucagcuucaaccagaaccucgacuaccagaucggcuacaucugcuccggcguguucggggacaacccgcgccccaaggacggcaaggggagcugcggccccgugaccgucgacggggcggacggcgugaagggcuucuccuaccgguacgggaacggcguguggaucgggcgcaccaagagcaacuccagccggcgcggcuucgagaugaucugggaccccaacggguggacggacaccgacuccaaguuccuggucaagcaggacgugguggccaucaccgacuggagcggcuacagcggcuccuucguccagcacccggagcugaccgggcucgacugcaugcggcccugcuucuggguggagcugauccgcggccggccccgcgagaacacgaccaucuggaccagcggguccagcaucuccuucugcggcgucaacggcgacaccgccaacuggagcuggcccgacggggccgagcugccguucacgaucgacaaguga

SEQ ID NO: 79809 - RNA, 1413 nt, Artificial Sequence
  derived and/or modified CDS sequence (opt1) from neuraminidase__InfluenzaA__ABO52228
augaaccccaaccagaagaucaucaccaucggcagcaucuccaucgccaucgggaucaucagccugauccuccagaucggcaacaucaucuccaucugggccagccacuccauccagaccgggagccagaaccacacgggcaucugcaaccagcgcaucaucaccuacgagaacuccaccugggugaaccagaccuacgucaacaucaacaacacgaacgugguggcggggaaggacaagaccagcaugacccuggccggcaacuccagccugugcccgauccggggcugggccaucuacaccaaggacaacuccauccgcaucgggagcaagggcgacgucuucgugauccgggagcccuucaucuccugcagccaccucgagugccgcacguucuuccugacccagggggcccugcucaacgacaagcacuccaacggcaccgugaaggaccggagccccuaccgcgcccugauguccugcccccugggggaggcgccgagccccuacaacuccaaguucgagagcgucgccuggagcgccuccgccugccacgacggccucggcuggcugaccaucgggaucagcggccccgacaacggggcgguggccgugcugaaguacaacggcaucaucacggagaccaucaaguccuggaagaagcggauccuccgcacccaggagagcgagugcgucugcaugaacggcuccugcuucaccaucaugacggacgggcccagcaacggcgccgccuccuaccggaucuucaagaucgagaaggggcgcgugaccaagagcaucgagcuggacgccccgaacuaccacuacgaggagugcuccugcuaccccgacaccggcaccgugaugugcgucugccgggacaacuggcacgggagcaaccgccccuggguguccuucaaccagaaccuggacuaccagaucggcuacaucugcagcggcguguucggggacaacccccggccgaaggacggcgagggguccugcaaccccgucacgguggacggcgcggacggggugaagggcuucagcuaccgcuacggcaacggggucuggaucggccggaccaaguccaaccgccuccggaagggguucgagaugaucugggaccccaacggcuggaccgacaccgacagcgacuucuccaugaagcaggacaucguggccaugacggacuggagcggguacuccggcagcuucgugcagcaccccgagcugaccggccuggacugcaugcgcccgugcuucugggucgagcucgugcgggggcugccccgcgagaacaccaccaucuggacgagcggcuccagcaucuccuucugcggggugaacagcgacaccgccaacugguccuggcccgacggcgccgagcugcccuucaccaucgacaaguga

SEQ ID NO: 79810 - RNA, 1410 nt, Artificial Sequence
  derived and/or modified CDS sequence (opt1) from neuraminidase__InfluenzaA__ABO52239
augaaccccaaccagaagaucaucaccaucggcagcgugucccugaccaucgccacggucugcuucaucaugcagaucgccauccucgcgaccaccgugacccugcacuucaagcagcacgagugcgacagcccggccuccaaccaggugaugcccugcgagcccaucaucaucgagcgcaacaucacggagaucgucuaccugaacaacaccaccaucgagaaggagaucugccccgaggccguggaguaccggaacuggagcaagccgcagugccagaucaccggguucgcccccuucuccaaggacaacagcauccgccucuccgccggcggggacaucugggugacgcgggagcccuacgucagcugcgaccccggcaagugcuaccaguucgcgcuggggcagggcaccacccuggacaacaagcacuccaacggcaccauccacgaccgcaucccgcaccggacgcuccugaugaacgagcugggggugcccuuccaccucggcaccaagcaggucugcguggccuggagcuccagcuccugccacgacgggaaggccuggcugcacgugugcgugaccggcgacgacaagaacgccaccgcgagcuucaucuacgacgggcgccuggucgacuccaucggcagcuggucccagaacauccuccggacgcaggagagcgagugcgugugcaucaacgggaccugcaccguggucaugaccgacggcuccgccagcggccgcgccgacacgcggauccuguucaucaaggaggggaagaucgugcacaucagcccccuguccggcagcgcccagcacguggaggagugcuccugcuacccccgcuacccggacguccggugcaucugccgcgacaacuggaagggcagcaaccggcccgugaucgacaucaacauggaggacuacuccaucgacagcuccuacgugugcagcgggcucgucggcgacacgccccgcaacgacgacuccagcuccaacagcaacugccgggaccccaacaacgagcgcgggaacccgggcgugaaggggugggccuucgacaacggcgacgacguguggaugggccggaccaucaacaaggacucccgcagcggguacgagaccuucaaggucaucggcgggugguccacccccaacagcaagucccaggugaaccggcaggucaucguggacaacaacaacuggagcggcuacuccgggaucuucagcguggagggcaagagcugcaucaaccgcugcuucuacgucgagcugauccggggccgcccccaggagacccgcgugugguggaccuccaacagcaucguggucuucugcgggaccuccggcacguacgggaccggcagcuggcccgacggggcgaacaucaacuucaugccgaucuga

SEQ ID NO: 79811 - RNA, 1410 nt, Artificial Sequence; identical to SEQ ID NO: 79807
  derived and/or modified CDS sequence (opt1) from neuraminidase__InfluenzaA__ABO52250

SEQ ID NO: 79812 - RNA, 1413 nt, Artificial Sequence
  derived and/or modified CDS sequence (opt1) from neuraminidase__InfluenzaA__ABO52261
augaaccccaaccagaagaucaucaccaucggcagcaucugcauggccaucgggaucaucucccugauccuccagaucggcaacaucaucagcaucugggugucccacagcauccagaccgggucccagaaccacacgggcaucugcaaccagcgcaucaucaccuacgagaacagcaccugggucaaccagaccuacgugaacaucaacaacacgaacguggucgccgggaaggacaccaccuccgugacccuggcgggcaacagcucccugugcccgauccggggcugggccaucuacagcaaggacaacuccauccgcaucgggagcaagggcgacguguucgucauccgggagcccuucaucuccugcagccaccucgagugccgcacguucuuccugacccagggggcccugcucaacgacaagcacuccaacggcaccgugaaggaccggagccccuaccgcgcccugauguccugccccaucggggaggccccgagccccuacaacucccgguucgagagcguggcguggagcgccuccgccugccacgacggcaugggcuggcugaccaucgggaucagcggccccgacgacggggccgucgcggugcucaaguacaacggcaucaucacggagaccaucaaguccuggcgcaagcggauccugcgcacccaggagagcgagugcgugugcgucaacggcuccugcuucaccaucaugacggacgggcccagcaacggcccggccuccuaccggaucuucaagaucgagaaggggaagaucaccaagagcaucgagcuggacgcccccaacucccacuacgaggagugcagcugcuaccccgacaccggcaccgugaugugcgugugccgcgacaacuggcacggguccaaccggcccugggucagcuucaaccagaaccucgacuaccagaucggcuacaucugcuccggcguguucggggacaacccgcgccccaaggacggcaaggggagcugcgaccccgugacggucgacggcgccgacggggugaagggcuucuccuaccgguacggcaacgggguguggaucggccgcaccaagagcaacuccagccggaagggguucgagaugaucugggaccccgacggcuggaccgacaccgacuccaacuuccuggucaagcaggacgugguggccaugacggacuggagcggguacagcggcuccuucguccagcacccggagcugaccggccucgacugcauccgccccugcuucuggguggagcugauccgggggcgcccccgggagaagaccaccaucuggacgagcggcuccagcaucuccuucugcggggucaacagcgacaccgugaacugguccuggcccgacggcgcggagcugccguucaccaucgacaaguga

SEQ ID NO: 79813 - RNA, 1413 nt, Artificial Sequence
  derived and/or modified CDS sequence (opt1) from neuraminidase__InfluenzaA__ABO52283
augaaccccaaccagaagaucaucaccaucggcagcaucugcaugaccaucgggacgaucucccugauccuccagaucggcaacaucaucagcaucuggaucucccacagcauccagaccgggucccagaaccacaccggcaucugcaaccagcgcaucaucaccuacgagaacaacacgugggugaaccagaccuacgucaacaucagcaacaccaacgugguggccgggaaggacaccacguccaugauccuggccggcaacagcucccugugcccgauccggggcugggcgaucuacagcaaggacaacuccauccgcaucgggagcaagggcgacgucuucgugauccgggagcccuucaucuccugcagccaccucgagugccgcaccuucuuccugacccagggggcccugcucaacgacaagcacuccaacggcaccgugaaggaccggagccccuaccgcgcccugauguccugccccaucggggaggccccgagccccuacaacucccgguucgagagcgucgccuggagcgcguccgccugccacgacggcaugggcuggcugacgaucgggaucagcggccccgacgacggggccguggccgugcucaaguacaacggcaucaucaccgagaucaucaaguccuggcgcaagcagauccugcggacccaggagagcgagugcgucugcgugaacggcuccugcuucaccaucaugacggacgggcccagcgacggcccggcguccuaccgcaucuucaagaucgagaaggggaagaucaccaagagcaucgagcuggacgcccccaacucccacuacgaggagugcagcugcuaccccgacaccggcaaggugaugugcgucugccgggacaacuggcacggguccaaccgccccugggugagcuucaaccagaaccucgacuaccagaucggcuacaucugcuccggcguguucggggacaacccgcggcccaaggacggcaaggggagcugcgaccccgucaacguggacggcgccgacggggugaagggcuucuccuaccgcuacggcgacggggucuggaucggccggaccaagagcaacuccagccgcaagggguucgagaugaucugggaccccaacggcuggacggacaccgacgacaacuuccuggugaagcaggacguggucgccaugaccgacugguccggguacagcggcagcuucgugcagcacccggagcugaccggccucgacugcaugcggcccugcuucuggguggagcugauccgcgggcggccccgcgagaagacgaccaucuggaccuccggcagcuccaucagcuucugcggggucaacuccgacaccgugaacuggagcuggcccgacggcgccgagcugccguucacgaucgacauguga

SEQ ID NO: 79814 - RNA, 1410 nt, Artificial Sequence; identical to SEQ ID NO: 79542
  derived and/or modified CDS sequence (opt1) from neuraminidase__InfluenzaA__ABO52294

SEQ ID NO: 79815 - RNA, 1410 nt, Artificial Sequence
  derived and/or modified CDS sequence (opt1) from neuraminidase__InfluenzaA__ABO52316
augaaccccaaccagaagaucaucaccaucggcagcgugucccugaccaucgccacgaucugcuuccucaugcagaucgccauccuggucaccaccgugacccugcacuucaagcaguacgagugcgacagcccggcgaacaaccagaucaugcccugcgagcccacgaucaucgagcgcaacaucaccgagaucguguaccucaccaacaucaccaucgagaaggagaucugccccaagcuggucgaguaccggaacugguccaagccgcagugcaagaucacgggguucgcccccuucagcaaggacaacuccauccgccugagcgccggcggggacaucugggugacccgggagcccuacguguccugcgaccccagccgcugcuaccaguucgcccucggccaggggaccacccuggacaacaagcacuccaacgacacgauccacgaccggaccccgcaccgcacccugcucaugaacgagcugggcguccccuuccaccugggcacccgccaggugugcaucgccuggagcuccagcuccugccacgacgggaaggcguggcuccacgugugcgucacgggcuacgacaagaacgccaccgccagcuucaucuacgacgggcggcugguggacuccaucggcagcuggucccagaacauccugcggacccaggagagcgagugcgugugcaucaacgggaccugcacggucgugaugaccgacggcuccgccagcggccgcgcggacaccaagauccucuucaucgaggaggggaagaucgugcacaucagcccccuguccggcagcgcccagcacgucgaggagugcuccugcuacccccgguacccgggggugcgcugcaucugccgggacaacuggaagggcagcaaccgccccguggucgacaucaacgugaaggacuacuccaucgacagcuccuacgugugcagcggccuggucggggacacgccccggaagaacgaccgcuccagcaacuccuacugccggaaccccaacaacgagaagggcaaccacggggugaagggcugggccuucgacgacgggaacgacguguggaugggccgcaccaucagcgaggacucccggagcggcuacgagaccuucaaggucaucgggggcugguccaccccgaacagcaagcuccagaucaaccgccaggugaucgucgacuccgacaaccggagcggguacuccggcaucuucagcguggagggcaagagcugcaucaaccgcugcuucuacguggagcugauccgcgggcgggagcaggagacccgcgucugguggacguccaacagcaucgugguguucugcggcaccuccgggaccuacggcgccgggagcuggcccgacggcgccgacaucaaccugaugcccaucuga

SEQ ID NO: 79816 - RNA, 1410 nt, Artificial Sequence; identical to SEQ ID NO: 78138
  derived and/or modified CDS sequence (opt1) from neuraminidase__InfluenzaA__ABO52327

SEQ ID NO: 79817 - RNA, 1410 nt, Artificial Sequence
  derived and/or modified CDS sequence (opt1) from neuraminidase__InfluenzaA__ABO52338
augaaccccaaccagaagaucaucaccaucggcagcgugucccugaccaucgccacgaucugcuuccucaugcagaucgccauccuggucaccaccgugacccugcacuucaagcaguacgagugcgacagcccggcgaacaaccaggugaugcccugcgagcccaucaucaucgagcgcaacaucacggagaucgucuaccucaccaacaccaccaucgagaaggagaucugccccaagcugguggaguaccggaacugguccaagccgcagugcaagaucacgggguucgcccccuucagcaaggacaacuccauccgccugagcgccggcggggacaucugggugacccgggagcccuacgucuccugcgaccccggcaagugcuaccaguucgcccucgggcagggcaccacccuggacaacaagcacagcaacgacacgauccacgaccgcaccccgcaccggacccugcucaugaacgagcugggcgugcccuuccaccuggggacccgccaggugugcaucgccugguccagcuccagcugccacgacggcaaggcguggcuccacgucugcgugacgggguacgacaagaacgccaccgccuccuucaucuacgacggccggcugguggacagcaucggguccuggagcaagaacauccugcgcacccaggaguccgagugcgucugcaucaacgggaccugcacgguggugaugaccgacggcagcgccuccggccgggcggacaccaagauccucuucaucgaggagggcaagaucguccacaucagcccccugagcggguccgcccagcacguggaggagugcagcugcuacccccgcuacccgggcgugcggugcaucugccgcgacaacuggaagggcuccaaccggcccgucguggacaucaacgugaaggacuacagcaucgacuccagcuacgucugcuccgggcuggugggcgacacgccccgcaacaacgaccggagcuccagcuccuacugccgcaaccccaacaacgagaaggggaaccacggcgugaaggggugggccuucgacgacggcaacgacgucuggaugggccggaccaucagcgaggacucccgcagcggguacgagaccuucaaggugaucggcgggugguccaccccgaacagcaagcuccagaucaaccggcaggucaucguggacuccgacaaccgcagcggcuacuccgggaucuucagcguggagggcaagagcugcaucaaccggugcuucuacgucgagcugauccgcggccgcgagcaggagacccgggugugguggacguccaacagcaucguggucuucugcgggaccuccggcaccuacgggaccggcagcuggcccgacggggccgacaucaaccugaugcccaucuga

SEQ ID NO: 79818 - RNA, 1410 nt, Artificial Sequence
  derived and/or modified CDS sequence (opt1) from neuraminidase__InfluenzaA__ABO52349
augaaccccaaccagaagaucaucaccaucggcagcgugucccugaccaucgccacgaucugcuuccucaugcagaucgccauccuggucaccaccgugacccugcacuucaagcaguacgagugcgacagcccggcgaacaaccaggugaugcccugcgagcccaucaucaucgagcgcaacgucacggagaucguguaccucaccaacaccaccaucgagaaggagaucugccccaagcugguggaguaccggaacugguccaagccgcagugcaagaucacgggguucgcccccuucagcaaggacaacuccauccgccugagcgccggcggggacaucugggucacccgggagcccuacguguccugcgaccccggcaagugcuaccaguucgcccucgggcagggcaccacccuggacaacaagcacagcaacgacacgauccacgaccgcaccccguaccggacccugcucaugaacgagcugggcgugcccuuccaccuggggacccgccaggucugcaucgccugguccagcuccagcugccacgacggcaaggcguggcuccacgugugcgugacgggguacgacaagaacgccaccgccuccuucaucuacgacggccggcuggucgacagcaucggguccuggagcaagaacauccugcgcacccaggaguccgagugcgugugcaucaacgggaccugcacgguggucaugaccgacggcagcgccuccgagcgggcggacaccaagauccucuucaucgaggaggggaagaucauccacaucagcccccugagcggcuccgcccagcacguggaggagugcagcugcuacccccgcuacccgggggugcggugcaucugccgcgacaacuggaagggcuccaaccggcccgucguggacaucaacaugcgcgacuacagcaucguguccagcuacgucugcuccggccuggugggggacacgccccggaagaacgaccgcagcuccagcuccuacugccggaaccccaacaacgagaagggcaaccacggggugaagggcugggccuucgacgacgggaacgacgucuggaugggccgcaccaucagcgaggagucccggagcggcuacgagaccuucaaggugaucgggggcugguccaccccgaacagcaagcuccagaucaaccgccaggucaucguggacuccaacaaccggagcggguacuccggcaucuucagcguggagggcaagagcugcaucaaccgcugcuucuacgucgagcugauccgcggccgggagcaggagacccgcgugugguggacguccaacagcaucguggucuucugcggcaccuccgggaccuacggcaccgggagcuggcccgacggcgccgacaucaaccugaugcccaucuga

SEQ ID NO: 79819 - RNA, 1410 nt, Artificial Sequence
  derived and/or modified CDS sequence (opt1) from neuraminidase__InfluenzaA__ABO52360
augaaccccaaccagaagaucaucaccaucggcagcgugucccugaccaucgccacggucugcuuccucaugcagaucgccauccuggugaccaccgugacccugcacuucaagcaguacgagugcgacagcccggcguccaaccaggucaugcccugcgagcccaucaucaucgagcgcaacaucacggagaucguguaccucaacaacaccaccaucgagaaggagaucugccccaagguggucgaguaccggaacuggagcaagccgcagugccagaucaccggguucgcccccuucuccaaggacaacagcauccgccuguccgccggcggggacaucugggugacgcgggagcccuacgugagcugcgaccacggcaagugcuaccaguucgcccuggggcagggcaccacccucgacaacaagcacuccaacgacaccauccacgaccgcaucccccaccggacgcugcugaugaacgagcucggcgucccguuccaccuggggacccgccaggugugcaucgccuggagcuccagcuccugccacgacggcaaggcguggcugcacgugugcaucaccggggacgacaagaacgccaccgccagcuucaucuacgacggccggcucgucgacuccaucgggagcuggucccagaacauccugcgcacgcaggagagcgagugcgugugcaucaacgggaccugcaccguggucaugaccgacggcuccgccagcggccgggcggacacgcgcauccuguucaucgaggagggcaagaucgugcacaucagcccccucuccgggagcgcccagcacguggaggagugcuccugcuacccccgguaccccggcguccgcugcaucugccgggacaacuggaagggcagcaaccgcccggugguggacaucaacauggaggacuacuccaucgacagcuccuacgucugcagcgggcuggugggcgacacgccccggaacgacgaccgcuccagcaacuccaacugccggaaccccaacaacgagcgcgggaaccagggcgugaaggggugggccuucgacaacggcaacgacgucuggaugggccggaccaucagcaaggaccugcgcuccggguacgagaccuucaaggugaucggcggguggagcacccccaacuccaagagccagaucaaccggcaggucaucguggacuccgacaaccgcagcggcuacuccgggaucuucagcguggagggcaagagcugcaucaaccgcugcuucuacgucgagcucauccggggccgcaagcaggagacccgggugugguggaccuccaacagcaucguggucuucugcgggaccuccggcacguacgggaccggcagcuggccggacggggccaacaucaacuucaugcccaucuga

SEQ ID NO: 79820 - RNA, 1410 nt, Artificial Sequence
  derived and/or modified CDS sequence (opt1) from neuraminidase__InfluenzaA__ABO52371
augaaccccaaccagaagaucaucaccaucggcagcgugucccugaccaucgccacggucugcuuccucaugcagaucgccauccuggugaccaccgugacccugcacuuccgccaguacgagugcgacagcccggcgaacaaccaggucaugcccugcgagcccaucaucaucgagcggaacaucacggagaucguguaccucaacaacaccaccaucgagaaggagaucugccccaagcugguggaguaccgcaacugguccaagccgcagugcaagaucaccggguucgcccccuucagcaaggacaacuccauccggcugagcgccggcggggacaucugggucacgcgcgagcccuacguguccugcgaccccggcaagugcuaccaguucgcccucgggcagggcaccacccuggacaacaagcacagcaacgacaccauccacgaccggaucccgcaccgcacgcugcucaugaacgagcugggcgugcccuuccaccuggggacccggcaggucugcaucgccugguccagcuccagcugccacgacggcaaggcguggcuccacgugugcgugaccggggacgacaagaacgccaccgccuccuucaucuacgacggcaagcuggucgacagcaucggguccuggagccagaacauccugcgcacgcaggaguccgagugcgugugcaucaacgggaccugcaccguggucaugaccgacggcagcgccuccggccgggcggacacgcgcauccucuucaucgaggagggcaagaucgugcacaucagcccccugagcggguccgcccagcacguggaggagugcagcugcuacccccgguacccgggcguccgcugcaucugccgggacaacuggaagggcuccaaccgccccgugguggacaucaacgucgaggacuacagcaucgacuccagcuacgugugcuccgggcuggugggcgacacgccccggaacaacgaccgcagcgggaacuccaacugccggaaccccaacaacgagcgcggcaaccacggggucaagggcugggccuucgacgacggcaacgacguguggauggggcggaccaucaacaaggaccuccgcagcggcuacgagaccuucaaggucaucgggggcugguccaccccgaacagcaagucccagaucaaccgccaggugaucguggacagcgacaaccgguccggguacagcggcaucuucuccgucgagggcaagagcugcaucaaccgcugcuucuacguggagcugauccgggggcgcgagcaggagacccgggugugguggaccuccaacagcaucgucguguucugcggcaccagcgggacguacggcaccggguccuggcccgacggcgccgacaucaaccugaugcccaucuga

SEQ ID NO: 79821 - RNA, 1413 nt, Artificial Sequence
  derived and/or modified CDS sequence (opt1) from neuraminidase__InfluenzaA__ABO52800
augaaccccaaccagaagaucaucaccaucggcagcaucugcaugaccaucgggaucaucucccugauccuccagaucggcaacaucaucagcaucugggugucccacagcauccagacggggucccagaaccacaccggcaucugcaaccagcgcaucaucaccuacgagaacagcaccugggucaaccagacguacgugaacaucaacaacaccaacguggucgccgggaaggacaccaccuccgugacgcuggccggcaacagcucccugugcccgauccggggcugggcgaucuacagcaaggacaacuccauccgcaucgggagcaagggcgacguguucgucauccgggagcccuucaucuccugcagccaccucgagugccgcaccuucuuccugacccagggggcccugcucaacgacaagcacuccaacggcaccgugaaggaccggagccccuaccgcgcccugauguccugccccaucggggaggccccgagccccuacaacucccgguucgagagcguggccuggagcgcguccgccugccacgacggcaugggcuggcugacgaucgggaucagcggccccgacgacggggccgucgccgugcucaaguacaacggcaucaucaccgagaccaucaaguccuggcgcaagcggauccugcgcacccaggagagcgagugcgugugcgucaacggcuccugcuucacgaucaugaccgacgggcccagcaacggcccggcguccuaccggaucuucaagaucgagaaggggaagaucaccaagagcaucgagcuggacgcccccaacucccacuacgaggagugcagcugcuaccccgacaccggcacggugaugugcgugugccgcgacaacuggcacggguccaaccggcccugggucagcuucaaccagaaccucgacuaccagaucggcuacaucugcuccggcguguucggggacaacccgcgccccaaggacggcaaggggagcugcgaccccgugaccgucgacggcgccgacggggugaagggcuucuccuaccgguacggcaacgggguguggaucggccgcaccaagagcaacuccagccggaagggguucgagaugaucugggaccccaacggcuggaccgacacggacuccaacuuccuggucaagcaggacgugguggccaugaccgacuggagcggguacagcggcuccuucguccagcacccggagcugaccggccucgacugcaugcgccccugcuucuggguggagcugauccgggggcgcccccgggagcgcaccacgaucuggaccagcggcuccagcaucuccuucugcggggucaacagcgacaccgccaacugguccuggcccgacggcgcggagcugccguucaccaucgacaaguga

SEQ ID NO: 79822 - RNA, 1413 nt, Artificial Sequence; identical to SEQ ID NO: 78852
  derived and/or modified CDS sequence (opt1) from neuraminidase__InfluenzaA__ABP49220

SEQ ID NO: 79823 - RNA, 1413 nt, Artificial Sequence
  derived and/or modified CDS sequence (opt1) from neuraminidase__InfluenzaA__ABP49319
augaaccccaaccagaagaucaucaccaucggcagcaucugcauggccaucgggaucaucucccugauccuccagaucggcaacaucaucagcaucugggugucccacagcauccagaccgggucccagaaccacacgggcaucugcaaccagcgcaucaucaccuacgagaacaacaccugggucaaccagaccuacgugaacaucagcaacacgaacguggucgccgggaaggacaccaccuccaugauccuggcgggcaacagcucccugugcccgauccggggcugggccaucuacagcaaggacaacuccauccgcaucgggagcaagggcgacguguucgugauccgggagcccuucaucuccugcagccaccucgagugccgcaccuucuuccugacgcagggggcccugcucaacgacaagcacuccaacggcaccgucaaggaccggagccccuaccgcgcccugauguccugccccaucggggaggccccgagccccuacaacucccgguucgagagcguggcguggagcgccuccgccugccacgacggcaugggcuggcugaccaucgggaucagcggccccgacgacggggccguggcgguccucaaguacaacggcaucaucaccgagacgaucaaguccuggcgcaagcagauccugcggacccaggagagcgagugcgugugcgugaacggcuccugcuucaccaucaugaccgacgggcccagcgacggcccggccuccuaccgcaucuucaagaucgagaaggggaagaucaccaagagcaucgagcuggacgcccccaacucccacuacgaggagugcagcugcuaccccgacacgggcaaggucaugugcgugugccgggacaacuggcacggguccaaccgccccugggugagcuucaaccagaaccucgacuaccagaucggcuacaucugcuccggcgucuucggggacaacccgcggcccaaggacggcaaggggagcugcgaccccgugaacguggacggcgccgacggggucaagggcuucuccuaccgcuacggcaacgggguguggaucggccggaccaagagcaacuccagccgcaagggguucgagaugaucugggaccccaacggcuggaccgacacggacgggaacuuccuggugaagcaggacgucguggccaugaccgacugguccggcuacagcggcagcuucgugcagcacccggagcugaccgggcucgacugcaugcggcccugcuucugggucgagcugauccgcggccggccccgcgagaagaccacgaucuggaccuccgggagcuccaucagcuucugcggcgugaacuccgacaccgucaacuggagcuggcccgacggcgcggagcugccguucaccaucgacaaguga

SEQ ID NO: 79824 - RNA, 1410 nt, Artificial Sequence
  derived and/or modified CDS sequence (opt1) from neuraminidase__InfluenzaA__ABP49330
augaaccccaaccagaagaucaucaccaucggcagcaucugcaugguggucgggaucaucucccugauccuccagaucggcaacaucaucagcaucuggaucucccacagcauccagaccgggucccagaaccacacgggcaucugcaaccagagcaucaucaccuacaagaacuccaccugggugaaccagaccuacgugaacaucagcaacacgaacgucguggccgggaagggcaccaccccggugauccuggccggcaacuccagccugugccccauccgcgggugggcgaucuacuccaaggacaacggcauccggaucgggagcaagggcgacgucuucgugauccgcgagcccuucaucuccugcagccaccucgagugccggaccuucuuccugacgcagggggcccugcucaacgacaagcacuccaacggcaccgugaaggaccgcagccccuaccgggcccugauguccugcccggucggcgaggcccccagccccuacaacucccgcuucgagagcguggccuggagcgcgugcgccugccacgacgggaugggcuggcugaccaucgggaucuccggccccgacgacgaggccguggccguccucaaguacaacggcaucaucaccgagacgaucaagagcuggcggaagaagauccugcgcacccaggaguccgagugcgugugcgugaacgggagcugcuucaccaucaugaccgacggcccguccgacgggcccgcgagcuacaagaucuucaagaucgagaagggcaaggucacgaaguccaucgagcuggacgcccccaacagccacuacgaggagugcuccugcuaccccgacaccgggaaggugaugugcgugugccgggacaacuggcacggcagcaaccgcccgugggucuccuucgaccagaaccucgacuaccagaucggcuacaucugcagcgggguguucggcgacaacccccggcccaaggacgggaagggcuccugcgggcccguguacgucgacggcgccaacggcgugaagggguucagcuaccgcuacggcaacgggguguggaucggccggaucaaguccaacagcucccgccagggguucgagaugaucugggacccgaacggcuggaccgagaccgacagcuccuucuucgucaagcaggacguggucgccaugacggacuggagcggcuacagcggguccuucgugcagcaccccgagcugaccggccuggacugcaugcggcccugcuucuggguggagcucauccgcgggcggcccaaggagaagaccaucuggaccagcggcuccagcaucuccuucugcggcgucaacagcgacacgguggacugguccuggccggacggggccgagcugcccuucaccaucgacaaguga

SEQ ID NO: 79825 - RNA, 1413 nt, Artificial Sequence
  derived and/or modified CDS sequence (opt1) from neuraminidase__InfluenzaA__ABP49352
augaaccccaaccagaagaucaucaccaucggcagcaucugcaugaccaucgggaucaucucccugauccuccagaucggcaacaucaucagcaucugggugucccacagcauccagacggggucccagaaccacaccggcaucugcaaccagcgcaucaucaccuacgagaacagcaccugggucaaccagacguacgugaacaucaacaacaccaacguggucgccgggaaggacaccaccuccguggcccuggcgggcaacagcucccugugcccgauccggggcugggccaucuacagcaaggacaacuccauccgcaucgggagcaagggcgacguguucgucauccgggagcccuucaucuccugcagccaccucgagugccgcacguucuuccugacccagggggcccugcucaacgacaagcacuccaacggcaccgugaaggaccggagccccuaccgcgcccugauguccugccccaucggggaggccccgagccccuacaacucccgguucgagagcguggcguggagcgccuccgccugccacgacggcaugggcuggcugaccaucgggaucagcggccccgacgacggggccgucgcggugcucaaguacaacggcaucaucacggagaccaucaaguccuggcgcaagcggauccugcgcacccaggagagcgagugcgugugcgucaacggcuccugcuucaccaucaugacggacgggcccagcgacggcccggccuccuaccggaucuucaagaucgagaaggggaagaucaccaagagcaucgagcuggacgcccccaacucccacuacgaggagugcagcugcuaccccgacaccggcaccgugaugugcgugugccgcgacaacuggcacggguccaaccggcccugggucagcuucaaccagaaccucgacuaccagaucggcuacaucugcuccggcguguucggggacaacccgcgccccaaggacggcaaggggagcugcggccccgugacggucgacggggccgacggcgugaagggcuucuccuacaaguacgggaacggcguguggaucgggcggaccaagagcaacuccagccgcaagggcuucgagaugaucugggaccccaacggguggaccgacaccgacuccaacuuccuggucaagcaggacgugguggccaugacggacuggagcggcuacagcggcuccuucguccagcacccggagcugaccgggcucgacugcaugcggcccugcuucuggguggagcugauccgcggccggccccgcgagcggaccaccaucuggacgagcggguccagcaucuccuucugcggcgucgacagcgacaccgcgaacugguccuggcccgacggcgccgagcugccguucaccaucgacaaguga

SEQ ID NO: 79826 - RNA, 1413 nt, Artificial Sequence; identical to SEQ ID NO: 79722
  derived and/or modified CDS sequence (opt1) from neuraminidase__InfluenzaA__ABP49363

SEQ ID NO: 79827 - RNA, 1410 nt, Artificial Sequence; identical to SEQ ID NO: 78754
  derived and/or modified CDS sequence (opt1) from neuraminidase__InfluenzaA__ABP49374

SEQ ID NO: 79828 - RNA, 1413 nt, Artificial Sequence
  derived and/or modified CDS sequence (opt1) from neuraminidase__InfluenzaA__ABP49385
augaaccccaaccagaagaucaucaccaucggcagcaucuccguggccaucgggaucaucaaccugacccuccagaucggcaacaucaucagcaucugggccucccacagcauccagacggggucccagaacuacaccggcaucugcaaccagcgcaucaucaccuacgagaaccggaccugggucaaccagacguacgugaacaucaacaacaccaacguggucgcggggaaggacaagaccagcaugacccuggccggcaacuccagccugugcccgauccgcggcugggccaucuacacgaaggacaacuccauccggaucgggagcaagggcgacguguucgugauccgcgagcccuucaucuccugcagccaccucgagugccggaccuucuuccugacccagggggcccugcucaacgacaagcacuccaacggcaccaucaaggaccgcagccccuuccgggcccugauguccugcccccugggggaggcgccgagccccuacaacucccgcuucgagagcgucgccugguccgccagcgccugccacgacggccucggcuggcugacgaucgggaucagcggccccgacaacggggcgguggccgugcugaaguacaacggcaucaucaccgagaccaucaaguccuggaagaagcagauccuccggacccaggagagcgagugcgucugcgugaacggcuccugcuucacgaucaugaccgacgggcccagcaaccgcgccgccuccuaccggaucuucaagaucgagaagggccgcgugaccaagagcaucgagcuggacgccccgaacuaccacuacgaggagugcuccugcuaccccgacaccgggacggucaugugcgugugccgggacaacuggcacggcagcaaccgccccuggguguccuucaaccagaaccuggacuaccagaucggguacaucugcagcggcgucuucggcgacaacccccggccgaaggacggggagggcuccugcaaccccgugaccguggacggggcggacggcgucaagggguucagcuaccgcuacggcaacggcguguggaucgggcggaccaaguccaaccgccuccggaagggcuucgagaugaucugggaccccaacggguggaccgacacggacagcgacuucuccaugaagcaggacguggucgccaugaccgacuggagcggcuacuccgggagcuucgugcagcaccccgagcugaccggccuggacugcaugcgcccgugcuucuggguggagcucguccggggccugccccgcgagaacaccacgaucuggaccuccgggagcagcaucuccuucugcggcgugaacagcgagaccgccaacugguccuggcccgacggggccgagcugcccuucaccaucgacaaguga

SEQ ID NO: 79829 - RNA, 1413 nt, Artificial Sequence; identical to SEQ ID NO: 78410
  derived and/or modified CDS sequence (opt1) from neuraminidase__InfluenzaA__ABP49396

SEQ ID NO: 79830 - RNA, 1410 nt, Artificial Sequence
  derived and/or modified CDS sequence (opt1) from neuraminidase__InfluenzaA__ABP49407
augaaccccaaccagaagaucaucaccaucggcagcgugucccugaccaucagcacgaucugcuucuucaugcagaucgccauccucaucaccaccgucacccugcacuucaagcaguacgaguucaacuccccgcccaacaaccaggugaugcugugcgagcccacgaucaucgagcgcaacaucaccgagaucguguaccucaccaacaccacgaucgagaaggagaucugccccaagcuggccgaguaccggaacuggagcaagccgcagugcgacaucaccggguucgcgcccuucuccaaggacaacagcauccgccuguccgccggcggggacaucugggucacccgggagcccuacgugagcugcgaccccgacaagugcuaccaguucgcccucggccaggggaccacgcugaacaacgugcacuccaacgacaccguccacgaccgcaccccguaccggacccugcucaugagcgagcugggcgugcccuuccaccugggcacgaagcaggucugcaucgccugguccagcuccagcugccacgacgggaaggccuggcuccacgugugcgugaccggcgacgacaagaacgcgaccgccuccuucaucuacaacgggcgccugguggacagcaucgucuccuggagcaaggagauccugcggacccaggaguccgagugcgugugcaucaacggcacgugcaccguggucaugaccgacgggagcgccagcggcaaggccgacaccaagauccucuucaucgaggagggcaagaucgugcacacguccacccugagcggguccgcgcagcacguggaggagugcagcugcuacccccgcuaccccggcguccggugcgugugccgcgacaacuggaagggguccaaccggccgaucguggacaucaacaucaaggacuacagcaucgucuccagcuacgugugcuccggccuggugggcgacacgccccgcaagaacgacagcuccagcuccagccacugccucgaccccaacaacgaggagggcgggcacggggucaagggcugggccuucgacgacgggaacgacguguggaugggccggaccaucuccgagaagcugcgcagcggcuacgagaccuucaaggucaucgaggggugguccaaccccaacagcaagcugcagaucaaccgccaggugaucguggaccggggcaaccgguccggguacagcggcaucuucagcgucgaggggaagaucugcaucaaccgcugcuucuacguggagcucauccggggccgcaaggaggagaccgaggugcuguggaccuccaacagcaucgucguguucugcggcaccuccgggacguacggcaccgggagcuggccggacggcgccgacaucaaccugaugcccaucuga

SEQ ID NO: 79831 - RNA, 1410 nt, Artificial Sequence; identical to SEQ ID NO: 78754
  derived and/or modified CDS sequence (opt1) from neuraminidase__InfluenzaA__ABP49418

SEQ ID NO: 79832 - RNA, 1410 nt, Artificial Sequence; identical to SEQ ID NO: 78754
  derived and/or modified CDS sequence (opt1) from neuraminidase__InfluenzaA__ABP49429

SEQ ID NO: 79833 - RNA, 1410 nt, Artificial Sequence
  derived and/or modified CDS sequence (opt1) from neuraminidase__InfluenzaA__ABP49440
augaaccccaaccagaagaucaucaccaucggcagcgugucccugaccaucgccacggucugcuuccucauccagaucgccauccuggcgaccaccgugacccugcacuucaagcagcacgagugcgacagcccggccuccaaccaggugaugcccugcgagcccaucaucaucgagcgcaacaucacggagaucgucuaccucaacaacaccaccaucgagaaggagaucugccccgaggugguggaguaccggaacuggagcaagccgcagugccagaucaccggguucgcccccuucuccaaggacaacagcauccgccuguccgccggcggggacaucugggucacgcgggagcccuacgugagcugcgaccccggcaagugcuaccaguucgcccuggggcagggcaccacccucgacaacaagcacuccaacggcaccauccacgaccgcaucccgcaccggacgcugcugaugaacgagcucggggugcccuuccaccugggcaccaagcaggucugcguggcguggagcuccagcuccugccacgacgggaaggccuggcugcacgugugcgucaccggcgacgaccgcaacgccaccgccagcuucaucuacgacgggcggcucguggacuccaucggcagcuggucccagaacauccugcgcacgcaggagagcgagugcgugugcaucaacgggaccugcaccgucgugaugaccgacggcuccgcgagcggccgggccgacacgcgcauccuguucaucaaggaggggaagaucgugcacaucagcccccucuccggcagcgcccagcacaucgaggagugcuccugcuacccccgguacccggacguccgcugcaucugccgggacaacuggaagggcagcaaccgccccgugaucgacaucaacauggaggacuacuccaucgacagcuccuacgugugcagcgggcuggucggcgacacgccccggaacgacgacuccagcuccaacagcaacugccgcgaccccaacaacgagcgggggaacccgggcgugaaggggugggccuucgacaacggcgacgacguguggaugggccgcaccaucuccaaggacagccgguccggguacgagaccuucaaggucaucggcggguggagcacccccaacuccaagagccaggccaaccgccaggugaucgucgacaagaacaacugguccggcuacagcgggaucuucagcguggagggcaaguccugcaucaaccggugcuucuacguggagcugauccgcggccgcccccaggagacccgggucugguggaccagcaacuccaucgugguguucugcgggaccagcggcacguacgggaccggcuccuggcccgacggggcgaacaucaacuucaugccgaucuga

SEQ ID NO: 79834 - RNA, 1413 nt, Artificial Sequence; identical to SEQ ID NO: 78975
  derived and/or modified CDS sequence (opt1) from neuraminidase__InfluenzaA__ABP49451

SEQ ID NO: 79835 - RNA, 1410 nt, Artificial Sequence
  derived and/or modified CDS sequence (opt1) from neuraminidase__InfluenzaA__ABP49462
augaaccccaaccagaagaucaucaccaucggcagcgugucccugaccaucgccacggucugcuucaucaugcagaucgccauccucgcgaccaccgugacccugcacuucaagcagcacgagugcgacagcccggccuccaaccaggugaugcccugcgagcccaucaucaucgagcgcaacaucacggagaucgucuaccugaacaacaccaccaucgagaaggagaucugccccgaggccguggaguaccggaacuggagcaagccgcagugccagaucaccggguucgcccccuucuccaaggacaacagcauccgccucuccgccggcggggacaucugggugacgcgggagcccuacgucagcugcgaccccggcaagugcuaccaguucgcgcuggggcagggcaccacccuggacaacaagcacuccaacggcaccauccacgaccgcaucccgcaccggacgcuccugaugaacgagcugggggugcccuuccaccucggcaccaagcaggucugcguggccuggagcuccagcuccugccacgacgggaaggccuggcugcacgugugcgugaccggcgacgaccgcaacgccaccgcgagcuucaucuacgacgggcggcuggucgacuccaucggcagcuggucccagaacauccuccgcacgcaggagagcgagugcgugugcaucaacgggaccugcaccguggucaugaccgacggcuccgccagcggccgggccgacacgcgcauccuguucaucaaggaggggaagaucgugcacaucagcccccuguccggcagcgcccagcacaucgaggagugcuccugcuacccccgguacccggacgugcgcugcaucugccgggacaacuggaagggcagcaaccgccccgucaucgacaucaacauggaggacuacuccaucgacagcuccuacgugugcagcgggcucgugggcgacacgccccggaacgacgacuccagcuccaacagcaacugccgcgaccccaacaacgagcgggggaacccgggcgucaaggggugggccuucgacaacggcgacgacguguggaugggccgcaccaucaacaaggacucccggagcggguacgagaccuucaaggugaucggcgggugguccacccccaacagcaagucccaggucaaccgccaggugaucgucgacaacaacaacuggagcggcuacuccgggaucuucagcguggagggcaagagcugcaucaaccggugcuucuacguggagcugauccgcggccgcccccaggagacccgggucugguggaccuccaacagcaucgugguguucugcgggaccuccggcacguacgggaccggcagcuggcccgacggggcgaacaucaacuucaugccgaucuga

SEQ ID NO: 79836 - RNA, 1410 nt, Artificial Sequence; identical to SEQ ID NO: 79784
  derived and/or modified CDS sequence (opt1) from neuraminidase__InfluenzaA__ABP49473

SEQ ID NO: 79837 - RNA, 1410 nt, Artificial Sequence
  derived and/or modified CDS sequence (opt1) from neuraminidase__InfluenzaA__ABP49495
augaaccccaaccagaagaucaucaccaucggcagcgugucccugaccaucgccacgaucugcuuccucaugcagaucgccauccuggucaccaccgugacccugcacuucaagcaguacgagugcgacagcccggcgaacaaccaggugaugcccugcgagcccaucaucaucgagcgcaacaucacggagaucgucuaccucaccaacaccaccaucgagaaggagaucugccccaagcugguggaguaccggaacugguccaagccgcagugcaagaucacgggguucgcccccuucagcaaggacaacuccauccgccugagcgccggcggggacaucugggugacccgggagcccuacgucuccugcgaccccggcaagugcuaccaguucgcccucgggcagggcaccacccuggacaacaagcacagcaacgacacgauccacgaccgcaccccgcaccggacccugcucaugaacgagcugggcgugcccuuccaccuggggacccgccaggugugcaucgccugguccagcuccagcugccacgacggcaaggcguggcuccacgucugcgugacgggguacgacaagaacgccaccgccuccuucaucuacgacggccggcugguggacagcaucggguccuggagccagaacauccugcgcacccaggaguccgagugcgucugcaucaacgggaccugcacgguggugaugaccgacggcagcgccuccggccgggcggacaccaagauccucuucaucgaggagggcaagaucguccacaccagcccccugagcggguccgcccagcacguggaggagugcagcugcuacccccgcuacccgggcgugcggugcaucugccgcgacaacuggcggggcuccaaccgccccgucguggacaucaacgugaaggacuacagcaucgacuccagcuacgucugcuccgggcuggugggcgacacgccccggaacaacgaccgcagcuccagcuccuacugccggaaccccaacaacgagaaggggacccacggcgugaaggggugggccuucgacgacggcaacgacgucuggaugggccgcaccaucagcgaggacucccggagcggguacgagaccuucaaggugaucggcgggugguccacgccgaacagcaagcuccagaucaaccgccaggucaucguggacuccgacaaccggagcggcuacuccgggaucuucagcguggagggcaagagcugcaucaaccgcugcuucuacgucgagcugauccgcggccgggagcaggagacccgcgugugguggaccuccaacagcaucguggucuucugcgggaccuccggcacguacgggaccggcagcuggcccgacggggccgacaucaaccugaugcccaucuga

SEQ ID NO: 79838 - RNA, 1410 nt, Artificial Sequence; identical to SEQ ID NO: 78127
  derived and/or modified CDS sequence (opt1) from neuraminidase__InfluenzaA__ABP49506

SEQ ID NO: 79839 - RNA, 1410 nt, Artificial Sequence; identical to SEQ ID NO: 78119
  derived and/or modified CDS sequence (opt1) from neuraminidase__InfluenzaA__ABP49517

SEQ ID NO: 79840 - RNA, 1413 nt, Artificial Sequence
  derived and/or modified CDS sequence (opt1) from neuraminidase__InfluenzaA__ABQ01314
augaaccccaaccagaagaucaucaccaucggcagcaucugcauggccaucgggaccaucucccugauccuccagaucggcaacaucaucagcaucugggugucccacagcauccagacggggucccagaaccacaccggcaucugcaaccagcgcaucaucaccuacgagaacaacaccugggucaaccagacguacgugaacaucagcaacaccaacguggucgccgggaaggacaccaccuccaugauccuggcgggcaacagcucccugugcccgauccggggcugggccaucuacagcaaggacaacuccauccgcaucgggagcaagggcgacguguucgugauccgggagcccuucaucuccugcagccaccucgagugccgcacguucuuccugacccagggggcccugcucaacgacaagcacuccaacggcaccgucaaggaccggagccccuaccgcgcccugauguccugccccaucggggaggccccgagccccuacaacucccgguucgagagcguggcguggagcgccuccgccugccacgacggcaugggcuggcugaccaucgggaucagcggccccgacgacggggccguggcgguccucaaguacaacggcaucaucacggagaucaucaaguccuggcgcaagcagauccugcggacccaggagagcgagugcgugugcgugaacggcuccugcuucaccaucaugaccgacgggcccagcgacggcccggccuccuaccgcaucuucaagaucgagaaggggaagaucaccaagagcaucgagcuggacgcccccaacucccacuacgaggagugcagcugcuaccccgacacgggcaaggucaugugcgugugccgggacaacuggcacggguccaaccgccccugggugagcuucaaccagaaccucgacuaccagaucggcuacaucugcuccggcgucuucggggacaacccgcggcccaaggacggcaaggggagcugcgaccccgugaacguggacggcgccgacggggucaagggcuucuccuaccgcuacggcaacgggguguggaucggccggaccaagagcaacuccagccgcaagggguucgagaugaucugggaccccaacggcuggaccgacacggacgggaacuuccuggugaagcaggacgucguggccaugaccgacugguccggcuacagcggcagcuucgugcagcacccggagcugaccgggcucgacugcaugcggcccugcuucugggucgagcugauccgcggccggccccgcgagaagaccacgaucuggaccuccgggagcuccaucagcuucugcggcgugaacuccgacaccgucaacuggagcuggcccgacggcgcggagcugccguucaccaucgacaaguga

SEQ ID NO: 79841 - RNA, 1413 nt, Artificial Sequence
  derived and/or modified CDS sequence (opt1) from neuraminidase__InfluenzaA__ABQ01325
augaaccccaaccagaagaucaucaccaucggcagcaucugcauggccaucgggaucaucucccugauccuccagaucggcaacaucaucagcaucugggugucccacagcauccagaccgggucccagaaccacacgggcaucugcaaccagcgcaucaucaccuacgagaacagcaccugggucaaccagaccuacgugaacaucuccaacacgaacguggucgccgggaaggacaccaccagcaugacccuggcgggcaacuccagccugugcccgauccggggcugggccaucuacuccaaggacaacagcauccgcaucggguccaagggcgacguguucgugauccgggagcccuucaucagcugcucccaccucgagugccgcacguucuuccugacccagggggcccugcucaacgacaagcacagcaacggcaccgucaaggaccggucccccuaccgcgcccugaugagcugccccaucggggaggccccgucccccuacaacagccgguucgagagcguggcgugguccgccagcgccugccacgacggcaugggcuggcugaccaucgggaucuccggccccgacgacggggccguggcgguccucaaguacaacggcaucaucacggagaccaucaagagcuggcgcaagcagauccugcggacccaggaguccgagugcgugugcgugaacggcagcugcuucaccaucaugacggacgggcccuccgacggccaggccagcuaccgcaucuucaagaucgagaaggggaagaucaccaaguccaucgagcuggacgccccgaacagccacuacgaggagugcuccugcuaccccgacaccggcaccgucaugugcgugugccgggacaacuggcacgggagcaaccgccccuggguguccuucaaccagaaccucgacuaccagaucggcuacaucugcagcggcgucuucggggacaacccccggccgaaggacggcaagggguccugcgaccccgugaacguggacggcgccgacggggucaagggcuucagcuaccgcuacggcaacgggguguggaucggccggacgaaguccaacagcucccgcaagggguucgagaugaucugggaccccaacggcuggaccgacaccgacagcaacuuccuggugaagcaggacgucguggccaugaccgacuggagcggguacuccggcagcuucgugcagcaccccgagcugacgggccucgacugcaugcggccgugcuucugggucgagcugauccgcgggcggccccgcgagaagaccaccaucuggaccuccggcagcuccaucagcuucugcggggugaacuccgacacggucaacuggagcuggcccgacggcgcggagcugcccuucaccaucgacaaguga

SEQ ID NO: 79842 - RNA, 1410 nt, Artificial Sequence; identical to SEQ ID NO: 78754
  derived and/or modified CDS sequence (opt1) from neuraminidase__InfluenzaA__ABQ01336

SEQ ID NO: 79843 - RNA, 1410 nt, Artificial Sequence; identical to SEQ ID NO: 78754
  derived and/or modified CDS sequence (opt1) from neuraminidase__InfluenzaA__ABQ01347

SEQ ID NO: 79844 - RNA, 1410 nt, Artificial Sequence
  derived and/or modified CDS sequence (opt1) from neuraminidase__InfluenzaA__ABQ01358
augaaccccaaccagaagaucaucaccaucggcagcgugucccugaccaucgccacggucugcuuccucaugcagaucgccauccuggcgaccaccgugacccugcacuucaagcagcacgagugcaacagcccggccuccaaccaggugaugcccugcgagcccaucaucaucgagcgcaacaucacggagaucgucuaccucaacaacaccaccaucgagaaggagaucugccccgaggugguggaguaccggaacuggagcaagccgcagugccagaucaccggguucgcccccuucuccaaggacaacagcauccgccuguccgccggcggggacaucugggucacgcgggagcccuacgugagcugcgaccccggcaagugcuaccaguucgcccuggggcagggcaccacccucgacaacaagcacuccaacggcaccauccacgaccgcaucccgcaccggacgcugcugaugaacgagcucggggugcccuuccaccugggcaccaagcaggucugcguggcguggagcuccagcuccugccacgacgggaaggccuggcugcacgugugcgucaccggcgacgaccgcaacgccaccgccagcuucaucuacgacgggcggcucgaggacuccaucggcagcuggucccagaacauccugcgcacgcaggagagcgagugcgugugcaucaacgggaccugcaccguggucaugaccgacggcaacgcguccggccgggccgacacgcgcauccuguucaucaaggaggggaagaucgugcacaucagcccccucagcggcuccgcccagcacaucgaggagugcagcugcuacccccgguacccggacgugcgcugcaucugccgggacaacuggaagggcuccaaccgccccguccuggacaucagcauggaggacuacuccaucgacagcuccuacgugugcagcgggcuggugggcgacacgccccggaacgacgacuccagcuccaacagcaacugccgcgaccccaacaacgagcgggggaacccgggcgucaaggggugggccuucgacaacggcgacgacguguggaugggccgcaccaucuccaaggaccuccggagcggguacgagaccuucaaggugaucggcgggugguccacccccaacagcaagucccaggucaaccgccaggugaucgucgacaacaacaacuggagcggcuacuccgggaucuucagcguggagggcaagagcugcaucaaccggugcuucuacguggagcugauccgcggccgcucccaggagacccgggucugguggaccagcaacuccaucgugguguucugcgggaccagcggcacguacgggaccggcuccuggcccgacggggccaacaucaacuucaugcccaucuga

SEQ ID NO: 79845 - RNA, 1410 nt, Artificial Sequence
  derived and/or modified CDS sequence (opt1) from neuraminidase__InfluenzaA__ABQ01369
augaaccccaaccagaagaucaucaccaucggcagcgugucccugaccaucgccacgaucugcuucgucaugcagaucgccauccucgugaccaccgugacccugcacuucaagcaguacgagugcgacagcccggcgaacaaccaggucaugcccugcgagcccaucaucaucgagcgcaacaucacggagaucguguaccugaccaacaccaccaucgagaaggagaucugccccaagcucguggaguaccggaacugguccaagccgcagugcaagaucacgggguucgcccccuucagcaaggacaacuccauccgccugagcgccggcggggacaucugggucacccgggagcccuacguguccugcgaccccggcaagugcuaccaguucgcccuggggcagggcaccacccucgacaacaagcacagcaacgacacgauccacgaccgcaccccgcaccggacccugcugaugaacgagcucggcgugcccuuccaccuggggacccgccaggucugcaucgccugguccagcuccagcugccacgacggcaaggcguggcugcacgugugcgugacgggguacgacaagaacgccaccgccuccuucaucuacgacggccggcucgucgacagcaucggguccuggagccagaacauccugcgcacccaggaguccgagugcgugugcaucaacgggaccugcacgguggucaugaccgacggcagcgccuccggccgggcggacaccaagauccuguucaucgaggagggcaagaucgugcacaccagcccccucagcggguccgcccagcacguggaggagugcagcugcuacccccgcuacccgggcguccggugcaucugccgcgacaacuggaagggcuccaaccggcccgugguggacaucaacgucaaggacuacagcaucgacuccagcuacgugugcuccgggcuggugggcgacacgccccgcaagaacgaccggagcuccagcuccuacugccgcaaccccaacaacgagaaggggacccacggcgucaaggggugggccuucgacgacggcaacgacguguggaugggccggaccaucagcgaggacucccgcagcggguacgagaccuucaaggucaucggcgggugguccacgccgaacagcaagcugcagaucaaccgccaggugaucguggacuccgacaaccggagcggcuacuccgggaucuucagcgucgagggcaagagcugcaucaaccggugcuucuacguggagcucauccgcggccgcgagcaggagacccgggugugguggaccuccaacagcaucgucguguucugcgggaccuccggcacguacgggaccggcagcuggcccgacggggccgacaucaaccugaugcccaucuga

SEQ ID NO: 79846 - RNA, 1410 nt, Artificial Sequence
  derived and/or modified CDS sequence (opt1) from neuraminidase__InfluenzaA__ABQ44386
augaaccccaaccagaagaucaucaccaucggcagcgugucccugaccaucgccacgaucugcuuccucaugcagaucgccauccuggucaccaccgugacccugcacuucaagcaguacgagugcaacagcccgcccaacaaccaggugaugcucugcgagcccacgaucaucgagcgcaacaucaccgagaucgucuaccugaccaacaccacgaucgagaaggagaucugccccaagcuggcggaguaccggaacugguccaagccgcagugcaacaucaccggguucgcccccuucagcaaggacaacuccauccgccucagcgccggcggggacaucugggugacccgggagcccuacguguccugcgaccccgacaagugcuaccaguucgcccugggccaggggaccacgcugaacaacggccacagcaacgacaccguccacgaccgcaccccguaccggacccuccugaugaacgagcugggcgugcccuuccaccucgggacgaagcaggucugcaucgccugguccagcuccagcugccacgacggcaaggcguggcugcacgugugcgugaccggggacgacgagaacgccaccgccuccuucaucuacaacggccgccugguggacagcaucggguccuggagcaagaagauccuccggacccaggaguccgagugcgucugcaucaacggcacgugcaccguggugaugaccgacggcagcgccuccgggaaggcggacaccaagauccuguucaucgaggagggcaagaucguccacacgagcagccuguccgggagcgcccagcacguggaggagugcuccugcuacccccgcuaccccggcgugcggugcgucugccgcgacaacuggaagggcagcaaccggccgaucguggacaucaacgugaaggacuacuccaucgucagcuccuacgugugcagcgggcucgugggcgacacgccccgcaagaacgacuccagcuccagcucccacugccuggaccccaacaacgaggagggcgggcacggggucaagggcugggccuucgacgacggcaacgacguguggauggggcggaccaucagcgagaagcugcgcuccggcuacgagaccuucaaggucaucgagggguggagcaagcccaacuccaagcuccagaucaaccgccaggugaucguggaccggggcaaccggagcggguacuccggcaucuucagcgucgagagcaaguccugcaucaaccgcugcuucuacguggagcugauccggggccgcaagcaggagaacgaggugcuguggaccagcaacuccaucgucguguucugcgggaccagcggcaccuacgggaccggcuccuggccggacggggccgacaucaaccucaugcccaucuga

SEQ ID NO: 79847 - RNA, 1410 nt, Artificial Sequence; identical to SEQ ID NO: 78738
  derived and/or modified CDS sequence (opt1) from neuraminidase__InfluenzaA__ABQ44408

SEQ ID NO: 79848 - RNA, 1413 nt, Artificial Sequence
  derived and/or modified CDS sequence (opt1) from neuraminidase__InfluenzaA__ABQ44419
augaaccccaaccagaagaucaucaccaucggcagcaucugcauggccaucgggaucaucucccugauccuccagaucggcaacaucgugagcaucuggaucucccacagcauccagaacgggucccagaacuacaccggcaucugcaaccagcgcaucaucacguacgagaacagcaccugggucaaccagaccuacgugaacaucaacaacaccaacguggucgccgggcaggacacgaccuccguggcgcuggccggcaacagcucccugugcccgaucagcggcugggccaucuacuccaaggacaacagcauccggaucggguccaagggcgacguguucgucauccgcgagcccuucaucagcugcucccaccucgagugccggaccuucuuccugacccagggggcccugcucaacgacaagcacagcaacggcacggugaaggaccgcucccccuaccgggcccugaugagcugccccaucggggaggcgccgucccccuacaacagccgcuucgagagcguggccugguccgccagcgccugccacgacggcaugggcuggcugaccaucgggaucuccggccccgacgacggggcggucgccgugcucaaguacaacggcaucaucaccgagaccaucaagagcuggcggaagcgcauccugcggacgcaggaguccgagugcgugugcgucaacggcagcugcuucaccaucaugaccgacgggcccaacaacggcccggccuccuacaagaucuucaagaucgagaaggggaagaucaccaagagcaucgagcuggacgcccccaacucccacuacgaggagugcagcugcuaccccgacgccggcacggugaugugcgugugccgcgacaacuggcacggguccaaccggcccugggucagcuucaaccagaaccucgacuaccagaucggcuacaucugcuccggcguguucggggacaacccgcgccccaaggacggcaaggggagcugcggccccgugaccgucgacggggcggacggcgugaagggcuucuccuaccgguacgggaacggcguguggaucgggcgcaccaagagcaacuccagccggcgcggcuucgagaugaucugggaccccaacggguggaccgacacggacuccaaguuccuggucaagcaggacgugguggccaugaccgacuggagcggcuacagcggcuccuucguccagcacccggagcugaccgggcucgacugcaugcggcccugcuucuggguggagcugauccgcggccggccccgcgagaacaccacgaucuggaccagcggguccagcaucuccuucugcggcgucaacggcgacaccgccaacuggagcuggcccgacggggccgagcugccguucaccaucgacaaguga

SEQ ID NO: 79849 - RNA, 1410 nt, Artificial Sequence; identical to SEQ ID NO: 78370
  derived and/or modified CDS sequence (opt1) from neuraminidase__InfluenzaA__ABQ44430

SEQ ID NO: 79850 - RNA, 1410 nt, Artificial Sequence; identical to SEQ ID NO: 79800
  derived and/or modified CDS sequence (opt1) from neuraminidase__InfluenzaA__ABQ44441

SEQ ID NO: 79851 - RNA, 1410 nt, Artificial Sequence; identical to SEQ ID NO: 79784
  derived and/or modified CDS sequence (opt1) from neuraminidase__InfluenzaA__ABQ44463

SEQ ID NO: 79852 - RNA, 1413 nt, Artificial Sequence
  derived and/or modified CDS sequence (opt1) from neuraminidase__InfluenzaA__ABQ44474
augaaccccaaccagaagaucaucaccaucggcagcaucugcaugaccaucgggacgaucucccugauccuccagaucggcaacaucaucagcaucugggugucccacagcauccagaccgggucccagaaccacaccggcaucugcaaccagcgcaucaucaccuacgagaacaacacgugggucaaccagaccuacgugaacaucagcaacaccaacguggucgccgggaaggacaccacguccaugauccuggccggcaacagcucccugugcccgauccggggcugggcgaucuacagcaaggacaacuccauccgcaucgggagcaagggcgacguguucgugauccgggagcccuucaucuccugcagccaccucgagugccgcaccuucuuccugacccagggggcccugcucaacgacaagcacuccaacggcaccgucaaggaccggagccccuaccgcgcccugauguccugccccaucggggaggccccgagccccuacaacucccgguucgagagcguggccuggagcgcguccgccugccacgacggcaugggcuggcugacgaucgggaucagcggccccgacgacggggccguggccguccucaaguacaacggcaucaucaccgagaucaucaaguccuggcgcaagcagauccugcggacccaggagagcgagugcgugugcgugaacggcuccugcuucaccaucaugacggacgggcccagcgacggcccggcguccuaccgcaucuucaagaucgagaaggggaagaucaccaagagcaucgagcuggacgcccccaacucccacuacgaggagugcagcugcuaccccgacaccggcaaggucaugugcgugugccgggacaacuggcacggguccaaccgccccugggugagcuucaaccagaaccucgacuaccagaucggcuacaucugcuccggcgucuucggggacaacccgcggcccaaggacggcaaggggagcugcgaccccgugaacguggacggcgccgacggggucaagggcuucuccuaccgcuacggcaacgggguguggaucggccggaccaagagcaacuccagccgcaagggguucgagaugaucugggaccccaacggcuggacggacaccgacgggaacuuccuggugaagcaggacgucguggccaugaccgacugguccggcuacagcggcagcuucgugcagcacccggagcugaccgggcucgacugcaugcggcccugcuucugggucgagcugauccgcggccggccccgcgagaagacgaccaucuggaccuccgggagcuccaucagcuucugcggcgugaacuccgacaccgucaacuggagcuggcccgacggcgccgagcugccguucacgaucgacaaguga

SEQ ID NO: 79853 - RNA, 1410 nt, Artificial Sequence; identical to SEQ ID NO: 78119
  derived and/or modified CDS sequence (opt1) from neuraminidase__InfluenzaA__ABR15800

SEQ ID NO: 79854 - RNA, 1413 nt, Artificial Sequence; identical to SEQ ID NO: 79840
  derived and/or modified CDS sequence (opt1) from neuraminidase__InfluenzaA__ABR15811

SEQ ID NO: 79855 - RNA, 1413 nt, Artificial Sequence; identical to SEQ ID NO: 78852
  derived and/or modified CDS sequence (opt1) from neuraminidase__InfluenzaA__ABR15910

SEQ ID NO: 79856 - RNA, 1410 nt, Artificial Sequence; identical to SEQ ID NO: 78178
  derived and/or modified CDS sequence (opt1) from neuraminidase__InfluenzaA__ABR15932

SEQ ID NO: 79857 - RNA, 1410 nt, Artificial Sequence
  derived and/or modified CDS sequence (opt1) from neuraminidase__InfluenzaA__ABR15943
augaaccccaaccagaagaucaucaccaucggcagcgugucccugaccaucgccacgaucugcuuccucaugcagaucgccauccuggucaccaccgugacccugcacuuccgccaguacgagugcaacagcccgcccaacaaccaggugaugcucugcgagcccacgaucaucgagcggaacaucaccgagaucgucuaccugaccaacaccacgaucgagaaggagaucugccccaagcuggcggaguaccgcaacugguccaagccgcagugcaacaucaccggguucgcccccuucagcaaggacaacuccauccggcucagcgccggcggggacaucugggugacccgcgagcccuacguguccugcgaccccgacaagugcuaccaguucgcccugggccaggggaccacgcugaacaacggccacagcaacgacaccguccacgaccggaccccguaccgcacccuccugaugaacgagcugggcgugcccuuccaccucgggacgcgccaggugugcaucgccugguccagcuccagcugccacgacggcaaggcguggcugcacgucugcgugaccggggacgacgagaacgccaccgccuccuucaucuacaacggccggcugguggacagcaucggguccuggagcaagaagauccuccggacccaggaguccgagugcgucugcaucaacggcacgugcaccguggugaugaccgacggcagcgccuccgggaaggcggacaccaagauccuguucaucgaggagggcaagaucguccacaucagcacgcugagcggguccgcccagcacguggaggagugcagcugcuacccccgcuaccccggcgugcggugcgucugccgcgacaacuggaagggcuccaaccggccgaucguggacaucaacgugaaggacuacagcaucgucuccagcuacgugugcuccgggcucgugggcgacacgccccgcaagaacgacagcuucuccagcucccacugccuggaccccaacaacgaggagggcgggcacggggucaagggcugggccuucgacgacggcaacgacguguggauggggcggaccaucagcgagaagcugcgcuccggcuacgagaccuucaaggucaucgagggguggagcaagcccaacuccaagcuccagaccaaccgccaggugaucguggagcggggcaaccggagcggguacuccggcaucuucagcgucgagggcaaguccugcaucaaccgcugcuucuacguggagcugauccgggggcgcaaggaggagaccgaggugugguggaccagcaacagcaucgucguguucugcggcaccuccgggacguacggcaccgggagcuggccggacggcgccgacaucaaccugaugcccaucuga

SEQ ID NO: 79858 - RNA, 1410 nt, Artificial Sequence
  derived and/or modified CDS sequence (opt1) from neuraminidase__InfluenzaA__ABR15954
augaaccccaaccagaagaucaucaccaucggcagcgugucccugaccaucgccacgaucugcuuccucaugcagaucgccauccuggucaccaccgugacccugcacuucaagcaguacgagugcaacagcccgcccaacaaccaggugaugcucugcgagcccacgaucaucgagcgcaacaucaccgagaucgucuaccugaccaacaccacgaucgagaaggagaucugccccaagcuggcggaguaccggaacugguccaagccgcagugcaacaucaccggguucgcccccuucagcaaggacaacuccauccgccucagcgccggcggggacaucugggugacccgggagcccuacguguccugcgaccccgacaagugcuaccaguucgcccugggccaggggaccacgcugaacaacggccacagcaacgacaccguccacgaccgcaccccguaccggacccuccugaugaacgagcugggcgugcccuuccaccucgggacgcgccaggugugcaucgccugguccagcuccagcugccacgacggcaaggcguggcugcacgucugcgugaccggggacgacgagaacgccaccgccuccuucaucuacaacggccggcugguggacagcaucggguccuggagcaagaagauccuccgcacccaggaguccgagugcgucugcaucaacggcacgugcaccguggugaugaccgacggcagcgccuccgggaaggcggacaccaagauccuguucaucgaggagggcaagaucguccacaucagcacgcugagcggguccgcccagcacguggaggagugcagcugcuacccccgguaccccggcgugcgcugcgucugccgggacaacuggaagggcuccaaccgcccgaucguggacaucaacgugaaggacuacagcaucgucuccagcuacgugugcuccgggcucgugggcgacacgccccggaagaacaacagcuucuccagcucccacugccuggaccccaacaacgaggagggcgggcacggggucaagggcugggccuucgacgacggcaacgacguguggauggggcgcaccaucagcgagaagcugcgguccggcuacgagaccuucaaggucaucgagggguggagcaagcccaacuccaagcuccagaccaaccgccaggugaucguggagcggggcaaccgcagcggguacuccggcaucuucagcgucgagggcaaguccugcaucaaccggugcuucuacguggagcugauccgcgggcggaaggaggagaccgaggugugguggaccagcaacagcaucgucguguucugcggcaccuccgggacguacggcaccgggagcuggccggacggcgccgacaucaaccugaugcccaucuga

SEQ ID NO: 79859 - RNA, 1410 nt, Artificial Sequence; identical to SEQ ID NO: 78178
  derived and/or modified CDS sequence (opt1) from neuraminidase__InfluenzaA__ABR15965

SEQ ID NO: 79860 - RNA, 1410 nt, Artificial Sequence
  derived and/or modified CDS sequence (opt1) from neuraminidase__InfluenzaA__ABR22243
augaaccccaaccagaagaucaucaccaucggcagcgugucccugaccaucgccacgaucugcuuccucaugcagaucgccauccuggucaccaccgugacccugcacuucaagcaguacgagugcaacagcccgcccaacaaccaggugaugcucugcgagcccacgaucaucgagcgcaacaucaccgagaucgucuaccugaccaacaccacgaucgagaaggagaucugccccaagcuggcggaguaccggaacugguccaagccgcagugcaacaucaccggguucgcccccuucagcaaggacaacuccauccgccucagcgccggcggggacaucugggugacccgggagcccuacguguccugcgaccccgacaagugcuaccaguucgcccugggccaggggaccacgcugaacaacggccacagcaacgacaccguccacgaccgcaccccguaccggacccuccugaugaacgagcugggcgugcccuuccaccucgggacgaagcaggucugcaucgccugguccagcuccagcugccacgacggcaaggcguggcugcacgugugcgugaccggggacgacgagaacgccaccgccuccuucaucuacaacggccgccugguggacagcaucggguccuggagcaagaagauccuccggacccaggaguccgagugcgucugcaucaacggcacgugcaccguggugaugaccgacggcagcgccuccgggaaggcggacaccaagauccuguucaucgaggagggcaagaucguccacacgagcccccugagcggguccgcccagcacguggaggagugcagcugcuacccccgcuacccgggcgugcggugcgucugccgcgacaacuggaagggcuccaaccggcccaucguggacaucaacgugaaggacuacagcaucgucuccagcuacgugugcuccgggcucgugggcgacacgccccgcaagaccgacagcuccagcuccagccacugccuggaccccaacaacgaggagggcgggcacggggucaagggcugggccuucgacgacggcaacgacguguggauggggcggaccaucuccgagaagucccgcagcggcuacgagaccuucaaggucaucgagggguggagcaagccgaacuccaagcugcagaucaaccgccaggugaucguggaccggggcaaccggagcggguacuccggcaucuucagcgucgagggcaagagcugcaucaaccgcugcuucuacguggagcucauccgggggcgcaagcaggagaccgaggugcuguggaccuccaacagcaucgucguguucugcggcaccuccgggacguacggcaccgggagcuggcccgacggcgccgaccugaaccucaugcccaucuga

SEQ ID NO: 79861 - RNA, 1410 nt, Artificial Sequence; identical to SEQ ID NO: 78754
  derived and/or modified CDS sequence (opt1) from neuraminidase__InfluenzaA__ABR28518

SEQ ID NO: 79862 - RNA, 1410 nt, Artificial Sequence; identical to SEQ ID NO: 78600
  derived and/or modified CDS sequence (opt1) from neuraminidase__InfluenzaA__ABR28595

SEQ ID NO: 79863 - RNA, 1413 nt, Artificial Sequence
  derived and/or modified CDS sequence (opt1) from neuraminidase__InfluenzaA__ABR28771
augaaccccaaccagaagaucaucaccaucggcagcaucuccaucgccaucgggaucaucagccugaugcuccagaucggcaacaucaucuccaucugggccagccacuccauccagaccgggagccagaaccacacgggcaucugcaaccagcgcaucaucaccuacgagaacuccaccugggugaaccacaccuacgucaacaucaacaacacgaacgugguggcggggaaggacaagaccagcgucacccuggccggcaacuccagccugugcuccaucagcggcugggccaucuacaccaaggacaacuccauccggaucgggagcaagggcgacguguucgugauccgcgagccguucaucuccugcagccaccucgagugccggacguucuuccugacccagggggcccugcucaacgacaagcacuccaacggcaccgucaaggaccgcagccccuaccgggcccugauguccugcccccugggggaggcgcccagcccguacaacagcaaguucgaguccguggccuggagcgccuccgccugccacgacggcaugggcuggcucaccaucgggaucagcggccccgacaacggggcgguggccguccugaaguacaacggcaucaucacggagaccaucaaguccuggaagaagcgcauccugcggacccaggagagcgagugcgugugcgugaacggcuccugcuucaccaucaugacggacgggcccagcaacggcgccgccuccuacaagaucuucaagaucgagaaggggaaggucaccaagagccgcgagcucaacgcccccaacuuccacuacgaggagugcuccugcuacccggacaccggcaccgugaugugcgugugccgggacaacuggcacgggagcaaccgccccugggucuccuucaaccagaaccuggacuaccagaucggcuacaucugcagcggcguguucggggacaacccccggcccaaggacggcgagggguccugcaacccggugacggucgacggcgcggacggggugaagggcuucagcuacaaguacggcaacgggguguggaucggccgcaccaaguccaaccggcugcgcaagggguucgagaugaucugggaccccaacggcuggaccgacaccgacagcaacuucuccgucaagcaggacgugguggccaucacggacuggagcggguacagcggcuccuucguccagcaccccgagcucaccggccuggacugcauccggcccugcuucuggguggagcugguccgcgggcucccgcgggagaacaccaccaucuggacgagcggcuccagcaucuccuucugcggggugaacagcgacaccgccaacugguccuggcccgacggcgccgagcugcccuucaccaucgacaaguga

SEQ ID NO: 79864 - RNA, 1413 nt, Artificial Sequence
  derived and/or modified CDS sequence (opt1) from neuraminidase__InfluenzaA__ABR28782
augaaccccaaccagaagaucaucaccaucggcagcaucuccaucgccaucgggauccugagccucaugcugcagaucggcaacaucaucuccaucugggccagccacuccauccagaccgggagccagaaccacacgggcaucugcaaccagcgcaucaucaccuacgagaacuccaccugggugaaccacaccuacgucaacaucaacaacacgaacgugguggcggggaaggacaagaccagcgucacccuggccggcaacuccagccucugcuccaucagcggcugggccaucuacaccaaggacaacuccauccggaucgggagcaagggcgacguguucgugauccgcgagccguucaucuccugcagccaccuggagugccggacguucuuccugacccagggggcccuccugaacgacaagcacuccaacggcaccgucaaggaccgcagccccuaccgggcccugauguccugcccccucggggaggcgcccagcccguacaacagcaaguucgaguccguggccuggagcgccuccgccugccacgacggcaugggcuggcugaccaucgggaucagcggccccgacaacggggcgguggccguccugaaguacaacggcaucaucacggagaccaucaaguccuggaagaagcgcauccuccggacccaggagagcgagugcgugugcgugaacggcuccugcuucaccaucaugacggacgggcccagcaacggcgccgccuccuacaagaucuucaagaucgagaaggggaaggucaccaagagcaucgagcugaacgcccccaacuuccacuacgaggagugcuccugcuacccggacaccggcaccgugaugugcgugugccgcgacaacuggcacgggagcaaccggcccugggucuccuucaaccagaaccuggacuaccagaucggcuacaucugcagcggcguguucggggacaacccccgccccaaggacggcgagggguccugcaacccggugacggucgacggcgcggacggggugaagggcuucagcuacaaguacggcaacgggguguggaucggccggaccaaguccaaccgccuccggaagggguucgagaugaucugggaccccaacggcuggaccgacaccgacagcaacuucuccgucaagcaggacgugguggccaucacggacuggagcggguacagcggcuccuucguccagcaccccgagcugaccggccuggacugcauccgccccugcuucuggguggagcucguccgggggcugccgcgcgagaacaccaccaucuggacgagcggcuccagcaucuccuucugcggggugaacagcgacaccgccaacugguccuggcccgacggcgccgagcugcccuucaccaucgacaaguga

SEQ ID NO: 79865 - RNA, 1410 nt, Artificial Sequence; identical to SEQ ID NO: 78868
  derived and/or modified CDS sequence (opt1) from neuraminidase__InfluenzaA__ABR28793

SEQ ID NO: 79866 - RNA, 1413 nt, Artificial Sequence; identical to SEQ ID NO: 78852
  derived and/or modified CDS sequence (opt1) from neuraminidase__InfluenzaA__ABR28804

SEQ ID NO: 79867 - RNA, 1410 nt, Artificial Sequence; identical to SEQ ID NO: 78754
  derived and/or modified CDS sequence (opt1) from neuraminidase__InfluenzaA__ABR28815

SEQ ID NO: 79868 - RNA, 1410 nt, Artificial Sequence; identical to SEQ ID NO: 78178
  derived and/or modified CDS sequence (opt1) from neuraminidase__InfluenzaA__ABR28826

SEQ ID NO: 79869 - RNA, 1413 nt, Artificial Sequence; identical to SEQ ID NO: 78420
  derived and/or modified CDS sequence (opt1) from neuraminidase__InfluenzaA__ABR28837

SEQ ID NO: 79870 - RNA, 1413 nt, Artificial Sequence
  derived and/or modified CDS sequence (opt1) from neuraminidase__InfluenzaA__ABR28848
augaaccccaaccagaagaucaucaccaucggcagcaucuccaucgccaucgggaucaucagccugaugcuccagaucggcaacaucaucuccaucugggccagccacuccauccagaccgggagccagaaccacacgggcgugugcaaccagcgcaucaucaccuacgagaacuccaccugggucaaccacaccuacgugaacaucaacaacacgaacgugaucgucgggaaggacaagaccagcgugacccuggcgggcaacuccagccugugcuccaucagcggcugggccaucuacaccaaggacaacuccauccggaucgggagcaagggcgacguguucgucauccgcgagccguucaucuccugcagccaccucgagugccggacguucuuccugacccagggggcccugcucaacgacaagcacuccaacggcaccgugaaggaccgcagccccuaccgggcccugauguccugcccccugggggaggcccccagcccguacaacagcaaguucgaguccguggcguggagcgccuccgccugccacgacggcaugggcuggcucaccaucgggaucagcggccccgacaacggggccgucgcggugcugaaguacaacggcaucaucacggagaccaucaaguccuggaagaagcagauccugcgcacccaggagagcgagugcgugugcgucaacggcuccugcuucaccaucaugacggacgggcccagcaacggcgccgccuccuacaagaucuucaagaucgagaaggggaagaucaccaagagcaucgagcucaacgcccccaacuuccacuacgaggagugcuccugcuacccggacaccggcaccgugaugugcgugugccgggacaacuggcacgggagcaaccgccccugggucuccuucaaccagaaccuggacuaccagaucggcuacaucugcagcggcguguucggggacaacccccggcccaaggacggcgagggguccugcaacccggugacggucgacggcgccaacggggugaagggcuucagcuacaaguacggcaacgggguguggaucggccgcaccaaguccaaccggcugcgcaagggguucgagauggucugggaccccaacggcuggaccgacaccgacagcgacuucuccgugaagcaggacguggucgcgaucacggacuggagcggguacagcggcuccuucgugcagcaccccgagcucaccggccugaacugcauccggcccugcuucugggucgagcuggugcgcgggcucccgaaggagaacaccaccaucuggacgagcggcuccagcaucuccuucugcggggugaacagcgacaccgccaacugguccuggcccgacggcgccgagcugcccuucaccaucgacaaguga

SEQ ID NO: 79871 - RNA, 1410 nt, Artificial Sequence
  derived and/or modified CDS sequence (opt1) from neuraminidase__InfluenzaA__ABR28859
augaaccccaaccagaagaucaucaccaucggcagcgugucccugaccaucgccacgaucugcuuccucaugcagaucgccauccuggucaccaccgugacccugcacuucaagcaguacgagugcaacagcccgcccaacaaccaggugaugcucugcgagcccacgaucaucgagcgcaacaucaccgagaucgucuaccugaccaacaccacgaucgagaaggagaucugccccaagcuggcggaguaccggaacugguccaagccgcagugcaacaucaccggguucgcccccuucagcaaggacaacuccauccgccucagcgccggcggggacaucugggugacccgggagcccuacguguccugcgaccccgacaagugcuaccaguucgcccugggccaggggaccacgcugaacaacggccacagcaacgacaccguccacggccgcaccccguaccggacccuccugaugaacgagcugggggugcccuuccaccucggcacgcgccaggugugcaucgccugguccagcuccagcugccacgacgggaaggcguggcugcacgucugcgugaccggcgacgacgagaacgccaccgccuccuucaucuacaacgggcggcugguggacagcaucggcuccuggagcaagaagauccuccgcacccaggaguccgagugcgucugcaucaacggcacgugcaccguggugaugaccgacgggagcgccuccggcaaggcggacaccaagauccuguucaucgaggaggggaagaucguccacaucagcacgcugagcggcuccgcccagcacguggaggagugcagcugcuacccccgguaccccggcgugcgcugcgucugccgggacaacuggaagggguccaaccgcccgaucguggacaucaacgugaaggacuacagcaucgucuccagcuacgugugcuccggccucgugggggacacgccccggaagaacgacagcuucuccagcucccacugccuggaccccaacaacgaggagggcgggcacggcgucaagggcugggccuucgacgacgggaacgacguguggaugggccgcaccaucagcgagaagcugcgguccggguacgagaccuucaaggucaucgagggcuggagcaagcccaacuccaagcuccagaucaaccgccaggugaucguggagcgggggaaccgcagcggcuacuccggcaucuucagcgucgaggggaaguccugcaucaaccggugcuucuacguggagcugauccgcggccggaaggaggagaccgaggugugguggaccagcaacagcaucgucguguucugcgggaccuccggcaccuacgggacgggcagcuggccggacggcgccgacaucaaccugaugcccaucuga

SEQ ID NO: 79872 - RNA, 1410 nt, Artificial Sequence
  derived and/or modified CDS sequence (opt1) from neuraminidase__InfluenzaA__ABR28870
augaaccccaaccagaagaucaucaccaucggcagcgugucccugaccaucgccacgaucugcuuccucaugcagaucgccauccuggucaccaccgugacccugcacuucaagcaguacgagugcaacagcccgcccaacaaccaggugaugcucugcgagcccacgaucaucgagcgcaacaucaccgagaccgucuaccugaccaacacgaccaucgagaaggagaucugccccaagcuggcggaguaccggaacugguccaagccgcagugcaacaucaccggguucgcccccuucagcaaggacaacuccauccgccucagcgccggcggggacaucugggugacccgggagcccuacguguccugcgaccccgacaagugcuaccaguucgcccugggccaggggacgacccugaacaacggccacagcaacgacaccguccacgaccgcaccccguaccggacgcuccugaugaacgagcugggcgugcccuuccaccucgggacccgccaggugugcaucgccugguccagcuccagcugccacgacggcaaggcguggcugcacgucugcgugaccggggacgacgagaacgccaccgccuccuucaucuacaacggccggcugguggacagcaucggguccuggagcaagaagauccuccgcacgcaggaguccgagugcgucugcaucaacgggaccugcaccguggugaugaccgacggcagcgccuccgggaaggcggacacgaagauccuguucaucgaggagggcaagaucguccacaucagcacccugagcggguccgcccagcacguggaggagugcagcugcuacccccgguaccccggcgugcgcugcgucugccgggacaacuggaagggcuccaaccgcccgaucguggacaucaacgugaaggacuacagcaucgucuccagcuacgugugcuccgggcucgugggcgacacgccccggaagaacgacagcuucuccagcucccacugccuggaccccaacaacgaggagggcggccacggggucaagggcugggccuucgacgacggcaacgacguguggauggggcgcaccaucagcgagaagcugcgguccggcuacgagaccuucaaggucaucgagggguggagcaagcccaacuccaagcuccagaucaaccgccaggugaucguggagcggggcaaccgcagcggguacuccggcaucuucagcgucgagggcaaguccugcaucaaccggugcuucuacguggagcugauccgcgggcggaaggaggagaccgaggugugguggaccagcaacagcaucgucguguucugcggcaccuccgggacguacggcaccgggagcuggccggacggcgccgacaucaaccugaugcccaucuga

SEQ ID NO: 79873 - RNA, 1410 nt, Artificial Sequence
  derived and/or modified CDS sequence (opt1) from neuraminidase__InfluenzaA__ABR28881
augaaccccaaccagaagaucaucaccaucggcagcgugucccugaccaucgccacggucugcuuccucaugcagaucgccauccuggugaccaccgugacccugcacuucaagcaguacgagugcaacagcccgcccaacaaccaggucaugcucugcgagcccacgaucaucgagcgcaacaucaccgagaucguguaccugaccaacaccacgaucgagaaggagaucugccccaagcuggcggaguaccggaacugguccaagccgcagugcaacaucaccggguucgcccccuucagcaaggacaacuccauccgccucagcgccggcggggacaucugggugacccgggagcccuacgucuccugcgaccccgacaagugcuaccaguucgcccugggccaggggaccacgcugaacaacggccacagcaacgacaccgugcacgaccgcaccccguaccggacccuccugaugaacgagcugggcgugcccuuccaccucgggacgcgccaggucugcaucgccugguccagcuccagcugccacgacggcaaggcguggcugcacgugugcgugaccggggacgacgagaacgccaccgccuccuucaucuacaacggccggcuggucgacagcaucggguccuggagcaagaagauccuccgcacccaggaguccgagugcgugugcaucaacggcacgugcaccguggucaugaccgacggcagcgccuccgggaaggcggacaccaagauccuguucaucgaggagggcaagaucgugcacaucagcacgcugagcggguccgcccagcacguggaggagugcagcugcuacccccgguaccccggcguccgcugcgugugccgggacaacuggaagggcuccaaccgcccgaucguggacaucaacgucaaggacuacagcaucguguccagcuacgugugcuccgggcucgucggcgacacgccccggaagaacgacagcuucuccagcucccacugccuggaccccaacaacgaggagggcgggcacggggugaagggcugggccuucgacgacggcaacgacgucuggauggggcgcaccaucagcgagaagcugcgguccggcuacgagaccuucaaggugaucgagggguggagcaagcccaacuccaagcuccagaccaaccgccaggugaucgucgagcggggcaaccgcagcggguacuccggcaucuucagcguggagggcaaguccugcaucaaccggugcuucuacguggagcugauccgcgggcggaaggaggagaccgaggucugguggaccagcaacagcaucgugguguucugcggcaccuccgggacguacggcaccgggagcuggccggacggcgccgacaucaaccugaugcccaucuga

SEQ ID NO: 79874 - RNA, 1410 nt, Artificial Sequence; identical to SEQ ID NO: 78738
  derived and/or modified CDS sequence (opt1) from neuraminidase__InfluenzaA__ABR28892

SEQ ID NO: 79875 - RNA, 1413 nt, Artificial Sequence; identical to SEQ ID NO: 78410
  derived and/or modified CDS sequence (opt1) from neuraminidase__InfluenzaA__ABR28903

SEQ ID NO: 79876 - RNA, 1410 nt, Artificial Sequence
  derived and/or modified CDS sequence (opt1) from neuraminidase__InfluenzaA__ABR28925
augaaccccaaccagaagaucaucaccaucggcagcgugucccugaccaucagcacgaucugcuucuucaugcagaucgccauccucaucaccaccgucacccugcacuucaagcaguacgaguucaacuccccgcccaacaaccaggugaugcugugcgagcccacgaucaucgagcgcaacaucaccgagaucguguaccucaccaacaccacgaucgagaaggagaucugccccaagcuggccgaguaccggaacuggagcaagccgcagugcgacaucaccggguucgcgcccuucuccaaggacaacagcauccgccuguccgccggcggggacaucugggucacccgggagcccuacgugagcugcgaccccgacaagugcuaccaguucgcccucggccaggggaccacgcugaacaacgugcacuccaacgacaccguccacgaccgcaccccguaccggacccugcucaugaacgagcugggcgugcccuuccaccugggcacgaagcaggucugcaucgccuggagcuccagcuccugccacgacgggaaggccuggcuccacgugugcgugaccggcgacgacaagaacgcgaccgccagcuucaucuacaacgggcgccugguggacuccaucgucagcugguccaaggaggugcugcggacccaggagagcgagugcgugugcaucaacggcacgugcaccgucgugaugaccgacggguccgccagcggcaaggccgacaccaagauccucuucaucgaggagggcaagaucgugcacacgagcacccuguccgggagcgcgcagcacgucgaggagugcuccugcuacccccgcuaccccggcgugcggugcgugugccgcgacaacuggaaggggagcaaccggccgaucgucgacaucaacaucaaggacuacuccaucgugagcuccuacgugugcagcggccuggucggcgacacgccccgcaagaacgacuccagcuccagcucccacugccucgaccccaacaacgaggagggcgggcacggggugaagggcugggccuucgacgacgggaacgacgucuggaugggccggaccaucagcgagaagcugcgcuccggcuacgagaccuucaaggugaucgagggguggagcaaccccaacuccaagcugcagaucaaccgccaggugaucgucgaccggggcaaccggagcggguacuccggcaucuucagcguggagggcaagagcugcaucaaccgcugcuucuacguggagcucauccgggggcgcaaggaggagaccgagguccuguggaccuccaacagcaucgugguguucugcggcaccuccgggacguacggcaccgggagcuggccggacggcgccgacaucaaccugaugcccaucuga

SEQ ID NO: 79877 - RNA, 1410 nt, Artificial Sequence
  derived and/or modified CDS sequence (opt1) from neuraminidase__InfluenzaA__ABR88082
auggaccccaaccagaagaucaucaccaucggcagcgugucccugaccaucagcacgaucugcuucuucaugcagaccgccauccucaucaccaccgucacgcugcacuucaagcaguacgaguucaacuccccgcccaacaaccaggugaugcugugcgagcccaccaucaucgagcgcaacaucaccgagaucguguaccucaccaacacgaucaucgagaaggagaucugccccaagcuggccgaguaccggaacuggagcaagccgcagugcgacaucaccggguucgcgcccuucuccaaggacaacagcauccgccuguccgccggcggggacaucugggucacccgggagcccuacgugagcugcgaccccgacaagugcuaccaguucgcccucggccaggggaccacgcugaacaacgugcacuccaacgacaccguccacgaccgcaccccguaccggacccugcucaugaacgagcugggcgugcccuuccaccugggcacgaagcaggucugcaucgccuggagcuccagcuccugccacgacgggaaggccuggcuccacgugugcgugaccggcgacgacaagaacgcgaccgccagcuucaucuacaacgggcgccugguggacuccgucgugagcugguccaaggacauccugcggacccaggagagcgagugcgugugcaucaacggcacgugcaccgucgugaugaccgacggguccgccagcggcaaggccgacaccaagauccucuucaucgaggagggcaagaucgugcacacgagcacccuguccgggagcgcgcagcacgucgaggagugcuccugcuacccccgcuaccccggcgugcggugcgugugccgcgacaacuggaaggggagcaaccggccgaucgucgacaucaacaucaagaacuacuccaucgugagcuccuacgugugcagcggccuggucggcgacacgccccgcaagaccgacuccagcuccagcucccacugccucgaccccaacaacgaggagggcgggcacggggugaagggcugggccuucgacgacgggaacgacgucuggaugggccggaccaucagcgagaagcugcgccugggcuacgagaccuucaaggugaucgaggggugguccaaccccaacagcaagcuccagaucaaccgccaggugaucgucgaccggggcaaccgguccggguacagcggcaucuucuccguggagggcaagagcugcaucaaccgcugcuucuacguggagcugauccgggggcgcaaggaggagaccgagguccuguggaccagcaacuccaucgugguguucugcggcacgagcgggaccuacggcaccggguccuggccggacggcgccgacaucaaccucaugcccaucuga

SEQ ID NO: 79878 - RNA, 1413 nt, Artificial Sequence
  derived and/or modified CDS sequence (opt1) from neuraminidase__InfluenzaA__ABS00324
augaaccccaaccagaagaucaucaccaucggcagcaucugcauggccaucgggaucaucucccugauccuccagaucggcaacaucgugagcaucuggaucucccacagcauccagaccgggucccagaacuacacgggcaucugcaaccagcgcaucaucaccuacgagaacagcaccugggucaaccagaccuacgugaacaucaacaacacgaacguggucgccgggcaggacaccaccuccguggcgcuggccggcaacagcucccugugcccgaucagcggcugggccaucuacuccaaggacaacagcauccggaucggguccaagggcgacguguucgucauccgcgagcccuucaucagcugcucccaccucgagugccggaccuucuuccugacgcagggggcccugcucaacgacaagcacagcaacggcaccgugaaggaccgcucccccuaccgggcccugaugagcugccccaucggggaggcgccgucccccuacaacagccgcuucgagagcguggccugguccgccagcgccugccacgacggcaugggcuggcugaccaucgggaucuccggccccgacgacggggcggucgccgugcucaaguacaacggcaucaucaccgagacgaucaagagcuggcggaagcgcauccugcggacccaggaguccgagugcgugugcgucaacggcagcugcuucaccaucaugaccgacgggcccaacaacggcccggccuccuacaagaucuucaagaucgagaaggggaagaucaccaagagcaucgagcuggacgcccccaacucccacuacgaggagugcagcugcuaccccgacgccggcacggugaugugcgugugccgcgacaacuggcggggguccaaccgccccugggucagcuucaaccagucccucgacuaccagaucggcuacaucugcagcggcguguucggggacaacccgcggcccaaggacggcaagggguccugcgaccccgugaccgucgacggcgcggacggggugaagggcuucagcuaccgcuacggcaacgggguguggaucggccggaccaaguccaacagcucccgccggggguucgagaugaucugggaccccaacggcuggacggacaccgacagcaaguuccuggucaagcaggacgugguggccaugaccgacuggagcggguacuccggcagcuucguccagcacccggagcugaccggccucgacugcaugcgccccugcuucuggguggagcugauccgggggcgcccccgggagaacacgaccaucuggaccuccggcagcuccaucagcuucugcggggucaacggcgacaccgccaacugguccuggcccgacggcagcgagcugccguucacgaucgacaaguga

SEQ ID NO: 79879 - RNA, 1410 nt, Artificial Sequence; identical to SEQ ID NO: 78138
  derived and/or modified CDS sequence (opt1) from neuraminidase__InfluenzaA__ABS49902

SEQ ID NO: 79880 - RNA, 1410 nt, Artificial Sequence
  derived and/or modified CDS sequence (opt1) from neuraminidase__InfluenzaA__ABS49913
augaaccccaaccagaagaucaucaccaucggcagcgugucccugaccaucgccacggucugcuuccucaugcagaucgccauccuggugaccaccgugacccugcacuuccgccaguacgagugcgacagcccgacgaacaaccaggucaugcccugcgagcccaucaucaucgagcggaacaucaccgagaucguguaccucaacaacaccaccaucgagaaggagaucugccccaagcugguggaguaccgcaacugguccaagccgcagugcaagaucacgggguucgcgcccuucagcaaggacaacuccauccggcugagcgccggcggggacaucugggucacccgcgagcccuacguguccugcgaccccggcaagugcuaccaguucgcccucgggcagggcaccacccuggacaacaagcacagcaacgacacgauccacgaccggaucccgcaccgcacccugcucaugaacgagcugggcgugcccuuccaccuggggacccggcaggucugcaucgccugguccagcuccagcugccacgacggcaaggccuggcuccacgugugcgugaccggggacgacaagaacgcgacggccuccuucaucuacgacggccgccuggucgacagcaucggguccuggagccagaacauccugcggacccaggaguccgagugcgugugcaucaacgggaccugcaccguggucaugacggacggcagcgccuccggccgcgccgacacccggauccucuucaucgaggagggcaagaucgugcacaucagcccccugagcggguccgcgcagcacguggaggagugcagcugcuacccccgcuacccgggcguccggugcaucugccgcgacaacuggaagggcuccaaccggcccgugguggacaucaacgucgaggacuacagcaucgacuccagcuacgugugcuccgggcuggugggcgacacgccccgcaacaacgaccggagcuccaacagcaacugccgcaaccccaacaacgagcgggggaaccacggcgucaaggggugggccuucgacgacggcaacgacguguggaugggccgcaccaucuccaaggaccuccggagcggguacgagaccuucaaggucaucggcgggugguccaccccgaacagcaagucccagaucaaccgccaggugaucguggacagcgacaaccgcuccggcuacagcgggaucuucuccgucgagggcaagagcugcaucaaccggugcuucuacguggagcugauccgcggccgggagcaggagacccgcgugugguggaccagcaacuccaucgucguguucugcgggacgagcggcaccuacgggaccggcuccuggcccgacggggccgacaucaaccugaugcccaucuga

SEQ ID NO: 79881 - RNA, 1410 nt, Artificial Sequence; identical to SEQ ID NO: 78868
  derived and/or modified CDS sequence (opt1) from neuraminidase__InfluenzaA__ABS49968

SEQ ID NO: 79882 - RNA, 1413 nt, Artificial Sequence; identical to SEQ ID NO: 79864
  derived and/or modified CDS sequence (opt1) from neuraminidase__InfluenzaA__ABS49979

SEQ ID NO: 79883 - RNA, 1413 nt, Artificial Sequence
  derived and/or modified CDS sequence (opt1) from neuraminidase__InfluenzaA__ABS49990
augaaccccaaccagaagaucaucaccaucggcagcaucuccaucgccaucgggaucaucagccugaugcuccagaucggcaacaucaucuccaucugggccagccacuccauccagaccgggagccagaaccacacgggcaucugcaaccagcgcaucaucaccuacgagaacuccaccugggugaaccacaccuacgucaacaucaacaacacgaacgugguggcggggaaggacaagaccagcgucauccuggccggcaacuccagccugugcuccaucagcggcugggccaucuacaccaaggacaacuccauccggaucgggagcaagggcgacguguucgugauccgcgagccguucaucuccugcagccaccucgagugccggaccuucuuccugacgcagggggcccugcucaacgacaagcacuccaacggcaccgucaaggaccgcagccccuaccgggcccugauguccugcccccugggggaggcgcccagcccguacaacagcaaguucgaguccguggccuggagcgccuccgccugccacgacggcaugggcuggcucaccaucgggaucagcggccccgacaacggggcgguggccguccugaaguacaacggcaucaucaccgagacgaucaaguccuggaagaagcgcauccugcggacccaggagagcgagugcgugugcgugaacggcuccugcuucaccaucaugaccgacgggcccagcaacggcgccgccuccuacaagaucuucaagaucgagaaggggaaggucaccaagagcaucgagcucaacgcccccaacuuccacuacgaggagugcuccugcuacccggacacgggcaccgugaugugcgugugccgcgacaacuggcacgggagcaaccggcccugggucuccuucaaccagaaccuggacuaccagaucggcuacaucugcagcggcguguucggggacaacccccgccccaaggacggcgagggguccugcaacccggugaccgucgacggcgcggacggggugaagggcuucagcuacaaguacggcaacgggguguggaucggccggacgaaguccaaccgccugcggaagggguucgagaugaucugggaccccaacggcuggaccgacaccgacagcaacuucuccgucaagcaggacgugguggccaucaccgacuggagcggguacagcggcuccuucguccagcaccccgagcucacgggccuggacugcauccgccccugcuucuggguggagcugguccgggggcucccgcgcgagaacaccaccaucuggaccagcggcuccagcaucuccuucugcggggugaacagcgacacggccaacugguccuggcccgacggcgccgagcugcccuucaccaucgacaaguga

SEQ ID NO: 79884 - RNA, 1410 nt, Artificial Sequence; identical to SEQ ID NO: 78754
  derived and/or modified CDS sequence (opt1) from neuraminidase__InfluenzaA__ABS50001

SEQ ID NO: 79885 - RNA, 1410 nt, Artificial Sequence; identical to SEQ ID NO: 78754
  derived and/or modified CDS sequence (opt1) from neuraminidase__InfluenzaA__ABS50012

SEQ ID NO: 79886 - RNA, 1410 nt, Artificial Sequence
  derived and/or modified CDS sequence (opt1) from neuraminidase__InfluenzaA__ABS50023
augaaccccaaccagaagaucaucaccaucggcagcgugucccugaccaucgccacgaucugcuuccucaugcagaucgccguccuggugaccaccgugacccugcacuucaagcaguacgagugcaacccgccgcccaacaaccaggucaugcucugcgagcccacgaucaucgagcgcaacaucaccgagaucguguaccugaccaacaccacgaucgagaaggagaucugccccaagcuggcggaguaccggaacuggagcaagccccagugcaacaucaccggguucgcccccuucuccaaggacaacagcauccgccucuccgccggcggggacaucugggugacccgggagcccuacgucagcugcgacccggacaagugcuaccaguucgcccugggccaggggaccacgcugaacaacggccacuccaacgacaucgugcacgaccgcacccccuaccggacccuccugaugaacgagcugggcgugcccuuccaccucgggaccaagcaggucugcaucgccuggagcuccagcuccugccacgacggcaaggcguggcugcacgugugcgugacgggggacgacgagaacgccaccgccagcuucaucuacaacggccgccuggucgacuccaucgggagcugguccaagaagauccuccggacccaggagagcgagugcgugugcaucaacgggaccugcacgguggucaugaccgacggcuccgccagcgggaaggcggacaccaagauccuguucaucgaggagggcaagaucgugcacaccucccugcucagcgggagcgcccagcacguggaggagugcuccugcuacccccgcuacccgggcguccggugcgugugccgcgacaacuggaagggcagcaaccggcccaucguggacaucaacgucaaggacuacuccaucgugagcuccuacgugugcagcgggcuggucggcgacacgccccgcaagaacgacuccagcuccagcucccacugccuggaccccaacaacgaggagggcggccacggggugaagggcugggccuucgacgacggcaacgacgucuggauggggcggaccaucagcgagaagcuccgcuccggcuacgagaccuucaaggugaucgagggguggagcaagccgaacuccaagcugcagaucaaccgccaggugaucgucgaccggggcaaccggagcggguacuccggcaucuucagcguggagggcaaguccugcaucaaccgcugcuucuacguggagcugauccgggggcgcaagcaggagaccgagguccucuggacgagcaacagcaucgugguguucugcggcaccuccgggaccuacggcaccgggagcuggcccgacggcgccgacaucaaccugaugcccaucuga

SEQ ID NO: 79887 - RNA, 1410 nt, Artificial Sequence; identical to SEQ ID NO: 78754
  derived and/or modified CDS sequence (opt1) from neuraminidase__InfluenzaA__ABS50034

SEQ ID NO: 79888 - RNA, 1410 nt, Artificial Sequence
  derived and/or modified CDS sequence (opt1) from neuraminidase__InfluenzaA__ABS50045
augaaccccaaccagaagaucaucaccaucggcagcgugucccugaccaucgccacgaucugcuuccucaugcagaccgccauccuggucaccaccgugacgcugcacuucaagcaguacgagugcaacagcccgcccaacaaccaggugaugcucugcgagcccaccaucaucgagcgcaacaucaccgagaucgucuaccugaccaacacgaccaucgagaaggagaucugccccaagcuggcggaguaccggaacugguccaagccgcagugcaacaucaccggguucgcccccuucagcaaggacaacuccauccgccucagcgccggcggggacaucugggugacccgggagcccuacguguccugcgaccccgacaagugcuaccaguucgcccugggccaggggacgacccugaacaacggccacagcaacgacaccauccacgaccgcaccccguaccggacgcuccugaugaacgagcugggcguccccuuccaccucgggacccgccaggugugcaucgccugguccagcuccagcugccacgacggcaaggcguggcugcacgugugcgucaccggggacgacgagaacgccaccgccuccuucaucuacaacggccggcugguggacagcaucggguccuggagcaagaagauccuccgcacgcaggaguccgagugcgugugcaucaacgggaccugcaccgucgugaugaccgacggcagcgccuccgggaaggcggacacgaagauccuguucaucgaggagggcaagaucgugcacaucagcacccugagcggguccgcccagcacgucgaggagugcagcugcuacccccgguaccccggcgugcgcugcgugugccgggacaacuggaagggcuccaaccgcccgaucgucgacaucaacgugaaggacuacagcaucguguccagcuacgucugcuccgggcucgugggcgacacgccccggaagaacgacagcuucuccagcucccacugccuggaccccaacaacgaggagggcggccacggggugaagggcugggccuucgacgacggcaacgacgucuggauggggcgcaccaucagcgagaagcugcgguccggcuacgagaccuucaaggugaucgagggguggagcaagcccaacuccaagcuccagaucaaccgccaggucaucguggagcggggcaaccgcagcggguacuccggcaucuucagcguggagggcaaguccugcaucaaccggugcuucuacgucgagcugauccgcgggcggaaggaggagaccgaggugugguggaccagcaacagcaucguggucuucugcggcaccuccgggacguacggcaccgggagcuggccggacggcgccgacaucaaccugaugcccaucuga

SEQ ID NO: 79889 - RNA, 1410 nt, Artificial Sequence; identical to SEQ ID NO: 78178
  derived and/or modified CDS sequence (opt1) from neuraminidase__InfluenzaA__ABS50056

SEQ ID NO: 79890 - RNA, 1410 nt, Artificial Sequence; identical to SEQ ID NO: 78204
  derived and/or modified CDS sequence (opt1) from neuraminidase__InfluenzaA__ABS50067

SEQ ID NO: 79891 - RNA, 1410 nt, Artificial Sequence; identical to SEQ ID NO: 78738
  derived and/or modified CDS sequence (opt1) from neuraminidase__InfluenzaA__ABS50078

SEQ ID NO: 79892 - RNA, 1413 nt, Artificial Sequence
  derived and/or modified CDS sequence (opt1) from neuraminidase__InfluenzaA__ABS71644
augaagcccaaccagaagaucaucaccaucggcagcaucuccaucgccaucgggaucaucagccugauccuccagaucggcaacaucaucuccaucugggccagccacuccauccagaccgagagccagaaccacacggggaucugcaaccagcgcaucaucaccuacgagaacuccaccugggugaacaacaccuacgucaacaucaacaacacgaacgugguggcggagaaggacaagaccagcgucacccuggccggcaacuccagccugugcuccaucagcgggugggccaucuacaccaaggacaacuccauccggaucggcagcaagggcgacguguucgugauccgcgagccguucaucuccugcagccaccucgagugccggacguucuuccugacccagggggcccugcucaacgacaagcacuccaacggcaccgucaaggaccgcagccccuaccgggcccugauguccugcccccugggggaggcgcccagcccguacaacagccgcuucgaguccguggccuggagcgccuccgccugccacgacggcaugggguggcucaccaucggcaucagcggccccgacaacggggcgguggccguccugaaguacaacggcaucaucacggagaccaucaaguccuggaagaagcggauccugcgcacccaggagagcgagugcgugugcaugaacggguccugcuucaccaucaugacggacggccccagcaacggcgccgccuccuacaagaucuucaagaucgagaaggggaaggugaccaagaccauggagcucaacgcccccaacuuccacuacgaggagugcagcugcuacccggacaccggcacggucaugugcgugugccgggacaacuggcacggguccaaccgccccugggugagcuucaaccagaaccuggacuaccagaucggcuacaucugcuccggggucuucggcgacaacccccggcccaaggacggcgaggggagcugcaacccggugaccguggacggcgcggacggggucaagggcuucuccuacaaguacgggaacggcguguggaugggccgcaccaagagcaaccggcugcgcaagggguucgagaugaucugggaccccaacggcuggaccaacacggacuccgacuucagcgugaagcaggacgucguggccaucaccgacugguccggguacagcggcagcuucgugcagcaccccgagcucaccgggcuggacugcauccggcccugcuucugggucgagcuggugcgcggccucccgcgggagaacaccacgaucuggaccuccggcagcuccaucagcuucugcggggucaacuccggcaccgccaacuggagcuggcccgacggggccgagcugcccuucaccaucgacaaguga

SEQ ID NO: 79893 - RNA, 1413 nt, Artificial Sequence
  derived and/or modified CDS sequence (opt1) from neuraminidase__InfluenzaA__ABS71646
augaaccccaaccagaagaucaucaccaucggcagcaucuccaucgccaucgggaucaucagccugauccuccagaucggcaacaucaucuccaucugggccagccacuccauccagaccgagagccagaaccacacggggaucugcaaccagcgcaucaucaccuacgagaacuccaccugggugaacaacaccuacgucaacaucaacaacacgaacgugguggcggagaaggacaagaccagcgucacccuggccggcaacuccagccugugcuccaucagcgggugggccaucuacaccaaggacaacuccauccggaucggcagcaagggcgacguguucgugauccgcgagccguucaucuccugcagccaccucgagugccggacguucuuccugacccagggggcccugcucaacgacaagcacuccaacggcaccgucaaggaccgcagccccuaccgggcccugauguccugcccccugggggaggcgcccagcccguacaacagccgcuucgaguccguggccuggagcgccuccgccugccacgacggcaugggguggcucaccaucggcaucagcggccccgacaacggggcgguggccguccugaaguacaacggcaucaucacggagaccaucaaguccuggaagaagcggauccugcgcacccaggagagcgagugcgugugcaugaacggguccugcuucaccaucaugacggacggccccagcaacggcgccgccuccuacaagaucuucaagaucgagaaggggaaggugaccaagaccauggagcucaacgcccccaacuuccacuacgaggagugcagcugcuacccggacaccggcacggucaugugcgugugccgggacaacuggcacggguccaaccgccccugggugagcuucaaccagaaccuggacuaccagaucggcuacaucugcuccggggucuucggcgacaacccccggcccaaggacggcgaggggagcugcaacccggugaccguggacggcgcggacggggucaagggcuucuccuacaaguacgggaacggcguguggaugggccgcaccaagagcaaccggcugcgcaagggguucgagaugaucugggaccccaacggcuggaccaacacggacuccgacuucagcgugaagcaggacgucguggccaucaccgacugguccggguacagcggcagcuucgugcagcaccccgagcucaccgggcuggacugcauccggcccugcuucugggucgagcuggugcgcggccucccgcgggagaacaccacgaucuggaccuccggcagcuccaucagcuucugcggggucaacuccggcaccgccaacuggagcuggcccgacggggccgagcugcccuucaccaucgacaaguga

SEQ ID NO: 79894 - RNA, 1413 nt, Artificial Sequence
  derived and/or modified CDS sequence (opt1) from neuraminidase__InfluenzaA__ABS71647
augaaccccaaccagaagaucaucaccaucggcagcaucuccaucgccaucgggaucaucagccugauccuccagaucggcaacaucaucuccaucugggccagccacuccauccagaccgagagccagaaccacacggggaucugcaaccagcgcaucaucaccuacgagaacuccaccugggugaacaacaccuacgucaacaucaacaacacgaacgugguggcggagaaggacaagaccagcgucacccuggccggcaacuccagccugugcuccaucagcgggugggccaucuacaccaaggacaacuccauccggaucggcagcaagggcgacguguucgugauccgcgagccguucaucuccugcagccaccucgagugccggacguucuuccugacccagggggcccugcucaacgacaagcacuccaacggcaccgucaaggaccgcagccccuaccgggcccugauguccugcccccugggggaggcgcccagcccguacaacagccgcuucgaguccguggccuggagcgccuccgccugccacgacggcaugggguggcucaccaucggcaucagcggccccgacaacggggcgguggccguccugaaguacaacggcaucaucacggagaccaucaaguccuggcggaagcgcauccugcggacccaggagagcgagugcgugugcaugaacggguccugcuucaccaucaugacggacggccccagcaacggcgccgccuccuacaagaucuucaagaucgagaaggggaaggugaccaagaccauggagcucaacgcccccaacuuccacuacgaggagugcagcugcuacccggacaccggcacggucaugugcgugugccgcgacaacuggcacggguccaaccggcccugggugagcuucaaccagaaccuggacuaccagaucggcuacaucugcuccggggucuucggcgacaacccccgccccaaggacggcgaggggagcugcaacccggugaccguggacggcgcggacggggucaagggcuucuccuacaaguacgggaacggcguguggaugggccggaccaagagcaaccgccugcggaagggguucgagaugaucugggaccccaacggcuggaccaacacggacuccgacuucagcgugaagcaggacgucguggccaucaccgacugguccggguacagcggcagcuucgugcagcaccccgagcucaccgggcuggacugcauccgccccugcuucugggucgagcuggugcggggccucccgcgcgagaacaccacgaucuggaccuccggcagcuccaucagcuucugcggggucaacuccggcgccgccaacuggagcuggcccgacggggccgagcugcccuucaccaucgacaaguga

SEQ ID NO: 79895 - RNA, 1413 nt, Artificial Sequence
  derived and/or modified CDS sequence (opt1) from neuraminidase__InfluenzaA__ABS71648
augaaccccaaccagaagaucaucaccaucggcagcaucuccaucgccaucgggaucaucagccugauccuccagaucggcaacaucaucuccaucugggccagccacuccauccagaccgggaaccagaaccacacgggcaucugcaaccagcgcaucaucaccuacgagaacagcaccugggugaacaacaccuacgucaacaucaacaacacgaacgugguggcggagaaggacaagaccuccgucacccuggccgggaacagcucccugugcagcaucuccggcugggccaucuacaccaaggacaacagcauccggaucggcuccaagggggacguguucgugauccgcgagccguucaucagcugcucccaccucgagugccggacguucuuccugacccagggcgcccugcucaacgacaagcacagcaacgggaccgucaaggaccgcucccccuaccgggcccugaugagcugcccccugggcgaggcgcccuccccguacaacagccgcuucgagagcguggccugguccgccagcgccugccacgacgggaugggcuggcucaccaucggcaucuccgggcccgacaacggcgcgguggccguccugaaguacaacgggaucaucacggagaccaucaagagcuggaagaagcggauccugcgcacccaggaguccgagugcgugugcaugaacggcagcugcuucaccaucaugacggacggccccuccaacggggccgccagcuacaagaucuucaagaucgagaagggcaaggugaccaagaccaucgagcucaacgcccccaacuuccacuacgaggagugcuccugcuacccggacaccgggacggucaugugcgugugccgggacaacuggcacggcagcaaccgccccuggguguccuucaaccagaaccuggacuaccagaucggguacaucugcagcggcgucuucggcgacaacccccggcccaaggacggggagggcuccugcaacccggugaccguggacggggcggacggcgucaagggguucagcuacaaguacggcaacggcguguggaucgggcgcaccaaguccaaccggcugcgcaagggcuucgagaugaucugggaccccaacggguggaccaacacggacagcgacuucuccgugaagcaggacgucguggccaucaccgacuggagcggcuacuccgggagcuucgugcagcaccccgagcucaccggccuggacugcauccggcccugcuucugggucgagcuggugcgcggccucccgaaggagaacaccacgaucuggaccagcggguccagcaucuccuucugcggcgucaacagcgggaccgccaacugguccuggcccgacggcgccgagcugcccuucaccaucgacaaguga

SEQ ID NO: 79896 - RNA, 1413 nt, Artificial Sequence
  derived and/or modified CDS sequence (opt1) from neuraminidase__InfluenzaA__ABS71649
augaaccccaaccagaagaucaucaccaucggcagcaucuccaucgccaucgggaucaucagccugaugcuccagaucggcaacaucaucuccaucugggccagccacuccauccagaccgggagccagaaccacacgggcaucugcaaccagcgcaucaucaccuacgagaacuccaccugggugaaccacaccuacgucaacaucaacaacacgaacgugguggcggagaaggacaagaccagcgucacccuggccgggaacuccagccugugcuccaucagcggcugggccaucuacaccaaggacaacuccauccggaucggcagcaagggggacguguucgugauccgcgagccguucaucuccugcagccaccucgagugccggacguucuuccugacccagggcgcccugcucaacgacaagcacuccaacgggaccgucaaggaccgcagccccuaccgggcccugauguccugcccccugggcgaggcgcccagcccguacaacagcaaguucgaguccguggccuggagcgccuccgccugccacgacgggaugggcuggcucaccaucggcaucagcgggcccgacaacggcgcgguggccguccugaaguacaacgggaucaucacgggcaccaucaaguccuggaagaagcagauccugcgcacccaggagagcgagugcgugugcaugaacggcuccugcuucaccaucaugacggacgggcccagcaaccgggccgccuccuacaagaucuucaagaucgagaagggcaaggugaccaagagcaucgagcucaacgcccccaacuuccacuacgaggagugcuccugcuacccggacaccgggaucgucaugugcgugugccgcgacaacuggcacggcagcaaccggcccuggguguccuucaaccagaaccuggacuaccagaucggguacaucugcagcggcgucuucggcgacaacccccgccccaaggacggggagggcuccugcaacccggugaccguggacggggcggacggcgucaagggguucagcuacaaguacgacaacggcguguggaucggccggacgaaguccaaccgccugcggaagggguucgagaugaucugggaccccaacggcuggaccaacaccgacagcgacuucuccgugaagcaggacgucguggccaucaccgacuggagcggguacagcggcuccuucgugcagcaccccgagcucacggggcuggacugcauccgccccugcuucugggucgagcuggugcggggccucccgcgcgagaacaccaccaucuggaccagcggcuccagcaucuccuucugcggggucaacagcgacacggccaacugguccuggcccgacggcgccgagcugcccuucaccaucgacaaguga

SEQ ID NO: 79897 - RNA, 1413 nt, Artificial Sequence
  derived and/or modified CDS sequence (opt1) from neuraminidase__InfluenzaA__ABS71651
augaaccccaaccagaagaucaucaccaucggcagcaucuccaucgccaucgggaucaucagccugaugcuccagaucggcaacaucaucuccaucugggccagccacuccauccagaccgggagccagaaccacacgggcaucugcaaccagcgcaucaucaccuacgagaacaacaccugggugaaccacaccuacgucaacaucaacaacacgaacgugguggcggggaaggacaagaccuccgucacccuggccggcaacagcucccugugcagcguguccggcugggccaucuacaccaaggacaacagcauccggaucggguccaagggcgacguguucgucauccgcgagccguucaucagcugcucccaccucgagugccggacguucuuccugacccagggggcccugcucaacgacaagcacagcaacggcaccgugaaggaccgcucccccuaccgggcccugaugagcugcccccugggggaggcgcccuccccguacaacagcaaguucgagagcguggccugguccgccagcgccugccacgacggcaugggcuggcucaccaucgggaucuccggccccgacaacggggcggucgccgugcugaaguacaacggcaucaucacgggcaccaucaagagcuggaagaagcgcauccugcggacccaggaguccgagugcgugugcaugaacgggagcugcuucaccaucaugacggacggccccuccaacggggccgccagcuacaagaucuucaagaucgagaagggcaaggucaccaaguccaucgagcucaacgcccccagcuuccacuacgaggagugcuccugcuacccggacaccgggaccgugaugugcgugugccgcgacaacuggcacggcagcaaccggcccugggucuccuucaaccagaaccuggacuaccagaucggcuacaucugcagcgggguguucggcgacaacccccgccccaaggacggggagggcuccugcaacccggugacggucgacggggcggacggcgugaagggcuucagcuacaaguacgggaacggcguguggcuggggcggaccaaguccaaccgccuccggaagggcuucgagaugaucugggaccccaacggguggaccaacaccgacagcgacuucuccgucaagcaggacgugguggccaucacggacuggagcggcuacagcggcuccuucguccagcaccccgagcugaccgggcuggacugcauccgccccugcuucuggguggagcucguccggggccugccgcgcgagaacaccaccaucuggacgagcggguccagcaucuccuucugcggcgugaacagcaacaccgccaacugguccuggcccgacggcgccgagcugcccuucaccaucgacaaguga

SEQ ID NO: 79898 - RNA, 1413 nt, Artificial Sequence
  derived and/or modified CDS sequence (opt1) from neuraminidase__InfluenzaA__ABS71652
augaaccccaaccagaagaucaucaccaucggcagcaucuccaucgccaucgggaucaucagccugaugcuccagaucggcaacaucaucuccaucugggccagccacuccauccagaccgggagccagaaccacacgggcaucugcaaccagcgcaucaucaccuacgagaacaacaccugggugaaccacaccuacgucaacaucaacaacacgaacgugguggcggggaaggacaagaccuccgucacccuggccggcaacagcucccugugcagcguguccggcugggccaucuacaccaaggacaacagcauccggaucggguccaagggcgacguguucgucauccgcgagccguucaucagcugcucccaccucgagugccggacguucuuccugacccagggggcccugcucaacgacaagcacagcaacggcaccgugaaggaccgcucccccuaccgggcccugaugagcugcccccugggggaggcgcccuccccguacaacagcaaguucgagagcguggccugguccgccagcgccugccacgacggcaugggcuggcucaccaucgggaucuccggccccgacaacggggcggucgccgugcugaaguacaacggcaucaucacggagaccaucaagagcuggaagaagcgcauccugcggacccaggaguccgagugcgugugcaugaacggcagcugcuucaccaucaugacggacgggcccuccaacggcgccgccagcuacaagaucuucaagaucgagaaggggaaggucaccaaguccaucgagcucaacgcccccagcuuccacuacgaggagugcuccugcuacccggacaccggcaccgugaugugcgugugccgcgacaacuggcacgggagcaaccggcccugggucuccuucaaccagaaccuggacuaccagaucggcuacaucugcagcggcguguucggggacaacccccgccccaaggacggcgagggguccugcaacccggugacggucgacggcgcggacggggugaagggcuucagcuacaaguacggcaacgggguguggaucggccggaccaaguccaaccgccugcggaagggguucgagaugaucugggaccccaacggcuggaccaacaccgacagcgacuucuccgucaagcaggacgugguggccaucacggacuggagcggguacagcggcuccuucguccagcaccccgagcucaccggccuggacugcauccgccccugcuucuggguggagcugguccgggggcucccgcgcgagaacaccaccaucuggacgagcggcuccagcaucuccuucugcggggugaacagcaacaccgccaacugguccuggcccgacggcgccgagcugcccuucaccaucgacaaguga

SEQ ID NO: 79899 - RNA, 1413 nt, Artificial Sequence
  derived and/or modified CDS sequence (opt1) from neuraminidase__InfluenzaA__ABS71653
augaaccccaaccagaagaucaucaccaucggcagcaucuccaucgccaucgggaucaucagccugaugcuccagaucggcaacaucaucuccaucugggccagccacuccauccagaccgggagccagaaccacacgggcaucugcaaccagcgcaucaucaccuacgagaacuccaccugggugaaccacaccuacgucaacaucaacaacacgaacgugguggcggggaaggacaagaccagcgucacccuggccggcaacuccagccugugcuccaucagcggcugggccaucuacaccaaggacaacuccauccggaucgggagcaagggcgacguguucgugauccgcgagccguucaucuccugcagccaccucgagugccggacguucuuccugacccagggggcccugcucaacgacaagcacuccaacggcaccgucaaggaccgcagccccuaccgggcccugaugaucugcccccugggggaggcgcccuccccguacaacagcaaguucgagagcguggccugguccgccagcgccugccacgacggcaugggcuggcucaccaucgggaucuccggccccgacaacggggcgguggccguccugaaguacaacggcaucaucacggagaccaucaagagcuggaagaagcgcauccugcggacccaggaguccgagugcgugugcgugaacggcagcugcuucaccaucaugacggacgggcccuccaacggcgccgccagcuacaagaucuucaagaucgagaaggggaaggucaccaagucccgcgagcucaacgcccccaacuuccacuacgaggagugcagcugcuacccggacaucggcaccgugaugugcgugugccgggacaacuggcacggguccaaccgccccugggucagcuucaaccagaaccuggacuaccagaucggcuacaucugcuccggcguguucggggacaacccccggcccaaggacggcaaggggagcugcaacccggugaccgcggacggcgccgacggggucaagggcuucuccuacaaguacggcaacgggguguggaucggccgcaccaagagcaaccggcugcgcaagggguucgagaugaucugggaccccaacggcuggacggacaccgacuccgacuucagcgugaagcaggacgucguggccaucaccgacugguccggguacagcggcagcuucgugcagcaccccgagcucacgggccuggacugcauccggcccugcuucugggucgagcuggugcgcgggcucccgcgggagaacaccaccaucuggaccuccggcagcuccaucagcuucugcggggucgacuccgacacggccaacuggagcuggcccgacggcgccgagcugcccuucaccaucgacaaguga

SEQ ID NO: 79900 - RNA, 1410 nt, Artificial Sequence
  derived and/or modified CDS sequence (opt1) from neuraminidase__InfluenzaA__ABS71655
augaaccccaucaagaagaucaucaccaucggcagcgugucccugaccaucagcacgaucugcuucuucaugcagaucgccauccucaucaccaccgucacccugcacuucaagcaguacgaguucaacuccccgcccaacaaccaggugaugcugugcgagcccacgaucaucgagcgcaacaucaccgagaucguguaccucaccaacaccacgaucgagaaggagaucugccccaagcuggccgaguaccggaacuggagcaagccgcagugcaacaucaccggguucgcgcccuucuccaaggacaacagcauccgccuguccgccggcggggacaucugggucacccgggagcccuacgugagcugcgaccccgacaagugcuaccaguucgcccucggccaggggaccacgcugaacaacgugcacuccaacgacaccguccacgaccgcaccccguaccggacccugcucaugaacgagcugggcgugcccuuccaccugggcacgaagcaggucugcaucgccuggagcuccagcuccugccacgacgggaaggccuggcuccacgugugcgugaccggcgacgacaagaacgcgaccgccagcuucaucuacaacgggcgccugguggacuccaucgucagcugguccaaggagauccugcggacccaggagagcgagugcgugugcaucaacggcacgugcaccguggucaugaccgacggguccgccagcggcaaggccgacaccaagauccucuucaucgaggagggcaagaucgugcacacgagcacccuguccgggagcgcgcagcacguggaggagugcuccugcuacccccgcuaccccggcguccggugcgugugccgcgacaacuggaaggggagcaaccggccgaucguggacaucaacaucaaggacuacuccaucgucagcuccuacgugugcagcggccuggugggcgacacgccccgcaagaacgacuccagcuccagcucccacugccucgaccccaacaacgaggagggcgggcacggggucaagggcugggccuucgacgacgggaacgacguguggaugggccggaccaucagcgagaagcugcgcuccggcuacgagaccuucaaggucaucgagggguggagcaaccccaacuccaagcugcagaucaaccgccaggugaucguggaccggggcaaccggagcggguacuccggcaucuucagcgucgagggcaagagcugcaucaaccgcugcuucuacguggagcucauccgggggcgcaaggaggagaccgaggugcuguggaccuccaacagcaucgucguguucugcggcaccuccgggacguacggcaccgggagcuggccggacggcgccgacaucaaccugaugcccaucuga

SEQ ID NO: 79901 - RNA, 1410 nt, Artificial Sequence
  derived and/or modified CDS sequence (opt1) from neuraminidase__InfluenzaA__ABS71657
augaaccccaaccagaagaucaucaccaucggcagcgugucccugaccaucagcacgaucugcuucuucaugcagaucgccauccucaucaccaccgucacccugcacuucaagcaguacgaguucuccagcccgcccaacaaccaggugaugcugugcgagcccacgaucaucgagcgcaacaucaccgagaucguguaccucaccaacaccacgaucgagaaggagaucugccccaagcuggccgaguaccggaacugguccaagccgcagugcgacaucaccggguucgcgcccuucagcaaggacaacuccauccgccugagcgccggcggggacaucugggucacccgggagcccuacguguccugcgaccccgacaagugcuaccaguucgcccucggccaggggaccacgcugaacaacgugcacagcaacgacaccguccacgaccgcaccccguaccggacccugcucaugaacgagcugggcgugcccuuccaccugggcacgaagcaggucugcaucgccugguccagcuccagcugccacgacgggaaggccuggcuccacgugugcgugaccggcgacgacaagaacgcgaccgccuccuucaucuacaacgggcgccugguggacagcaucgucuccuggagcaaggagauccugcggacccaggaguccgagugcgugugcaucaacggcacgugcaccguggucaugaccgacgggagcgccagcggcaaggccgacaccaagauccucuucaucgaggagggcaagaucgugcacacguccacccugagcggguccgcgcagcacguggaggagugcagcugcuacccccgcuaccccggcguccggugcgugugccgcgacaacuggaagggguccaaccggccgaucguggacaucaacaucaaggacuacagcaucgucucccgcuacgugugcagcggccuggugggcgacacgccccggaagaacgacuccagcuccagcucccacugccucgaccccaacaacgaggagggcgggcacggggucaagggcugggccuucgacgacgggaacgacgccuggaugggccgcaccaucagcgagaagucccggagcggcuacgagaccuucaaggugaucgaggggugguccaaccccaacagcaagcugcagaucaaccgccaggucaucguggaccggggcaaccgcuccggguacagcggcaucuucagcguggaggggaaguccugcaucaaccggugcuucuacgucgagcugauccgcggccggaaggaggagaccgaggugcucuggaccagcaacuccaucguggucuucugcggcaccagcgggacguacggcaccggguccuggccggacggcgccgacaucaaccugaugcccaucuga

SEQ ID NO: 79902 - RNA, 1410 nt, Artificial Sequence
  derived and/or modified CDS sequence (opt1) from neuraminidase__InfluenzaA__ABS71659
augaaccccaucaagaagaucaucaccaucggcagcgugucccugaccaucagcacgaucugcuucuucaugcagaucgccauccucaucaccaccgucacccugcacuucaagcaguacgaguucuccagcccgcccaacaaccaggugaugcugugcgagcccacgaucaucgagcgcaacaucaccgagaucguguaccucaccaacaccacgaucgagaaggagaucugccccaagcuggccgaguaccggaacugguccaagccgcagugcgacaucaccggguucgcgcccuucagcaaggacaacuccauccgccugagcgccggcggggacaucugggucacccgggagcccuacguguccugcgaccccgacaagugcuaccaguucgcccucggccaggggaccacgcugaacaacgugcacagcaacgacaccguccacgaccgcaccccguaccggacccugcucaugaacgagcugggcgugcccuuccaccugggcacgaagcaggucugcaucgccugguccagcuccagcugccacgacgggaaggccuggcuccacgugugcgugaccggcgacgacaagaacgcgaccgccuccuucaucuacaacgggcgccugguggacagcaucgucuccuggagcaaggagauccugcggacccaggaguccgagugcgugugcaucaacggcacgugcaccguggucaugaccgacgggagcgccagcggcaaggccgacaccaagauccucuucaucgaggagggcaagaucgugcacacguccacccugagcggguccgcgcagcacguggaggagugcagcugcuacccccgcuaccccggcguccggugcgugugccgcgacaacuggaagggguccaaccggccgaucguggacaucaacaucaaggacuacagcaucgucucccgcuacgugugcagcggccuggugggcgacacgccccggaagaacgacuccagcuccagcucccacugccucgaccccaacaacgaggagggcgggcacggggucaagggcugggccuucgacgacgggaacgacguguggaugggccgcaccaucggcgagaagucccggagcggguacgagaccuucaaggucaucgagggcuggagcaaccccaacuccaagcugcagaucaaccgccaggugaucguggaccgggggaaccgcagcggcuacuccgggaucuucagcgucgagggcaagagcugcaucaaccggugcuucuacguggagcugauccgcggccggaaggaggagaccgaggugcucuggaccuccaacagcaucgucguguucugcgggaccuccggcacguacgggaccggcagcuggccggacggggccgacaucaaccacaugcccaucuga

SEQ ID NO: 79903 - RNA, 1410 nt, Artificial Sequence
  derived and/or modified CDS sequence (opt1) from neuraminidase__InfluenzaA__ABS71660
augaaccccaucaagaagaucaucaccaucggcagcgugucccugaccaucagcacgaucugcuucuucaugcagaucgccauccucaucaccaccgucacccugcacuucaagcaguacgaguucuccagcccgcccaacaaccaggugaugcugugcgagcccacgaucaucgagcgcaacaucaccgagaucguguaccucaccaacaccacgaucgagaaggagaucugccccaagcuggccgaguaccggaacugguccaagccgcagugcgacaucaccggguucgcgcccuucagcaaggacaacuccauccgccugagcgccggcggggacaucugggucacccgggagcccuacguguccugcgaccccgacaagugcuaccaguucgcccucggccaggggaccacgcugaacaacgugcacagcaacgacaccguccacgaccgcaccccguaccggacccugcucaugaacgagcugggcgugcccuuccaccugggcacgaagcaggucugcaucgccugguccagcuccagcugccacgacgggaaggccuggcuccacgugugcgugaccggcgacgacaagaacgcgaccgccuccuucaucuacaacgggcgccugguggacagcaucgucuccuggagcaaggagauccugcggacccaggaguccgagugcgugugcaucaacggcacgugcaccguggucaugaccgacgggagcgccagcggcaaggccgacaccaagauccucuucaucgaggagggcaagaucgugcacacguccacccugagcggguccgcgcagcacguggaggagugcagcugcuacccccgcuaccccggcguccggugcgugugccgcgacaacuggaagggguccaaccggccgaucguggacaucaacaucaaggacuacagcaucgucucccgcuacgugugcagcggccuggugggcgacacgccccggaagaacgacuccagcuccagcucccacugccucgaccccaacaacgaggagggcgggcacggggucaagggcugggccuucgacgacgggaacgacguguggaugggccgcaccaucagcgagaagucccggagcggcuacgagaccuucaaggucaucgaggggugguccaaccccaacagcaagcugcagaucaaccgccaggugaucguggaccggggcaaccgcuccggguacagcggcaucuucagcgucgaggggaaguccugcaucaaccggugcuucuacguggagcugauccgcggccggaaggaggagaccgaggugcucuggaccagcaacuccaucgucguguucugcggcaccagcgggacguacggcaccggguccuggccggacggcgccgacaucaaccugaugcccaucuga

SEQ ID NO: 79904 - RNA, 1410 nt, Artificial Sequence
  derived and/or modified CDS sequence (opt1) from neuraminidase__InfluenzaA__ABS71661
auguaccccaucaagaagaucaucaccaucggcagcgugucccugaccaucagcacgaucugcuucuucaugcagaucgccauccucaucaccaccgucacccugcacuucaagcaguacgaguucuccagcccgcccaacaaccaggugaugcugugcgagcccacgaucaucgagcgcaacaucaccgagaucguguaccucaccaacaccacgaucgagaaggagaucugccccaagcuggccgaguaccggaacugguccaagccgcagugcgacaucaccggguucgcgcccuucagcaaggacaacuccauccgccugagcgccggcggggacaucugggucacccgggagcccuacguguccugcgaccccgacaagugcuaccaguucgcccucggccaggggaccacgcugaacaacgugcacagcaacgacaccguccacgaccgcaccccguaccggacccugcucaugaacgagcugggcgugcccuuccaccugggcacgaagcaggucugcaucgccugguccagcuccagcugccacgacgggaaggccuggcuccacgugugcgugaccggcgacgacaagaacgcgaccgccuccuucaucuacaacgggcgccugguggacagcaucgucuccuggagcaaggagauccugcggacccaggaguccgagugcgugugcaucaacggcacgugcaccguggucaugaccgacgggagcgccagcggcaaggccgacaccaagauccucuucaucgaggagggcaagaucgugcacacguccacccugagcggguccgcgcagcacguggaggagugcagcugcuacccccgcuaccccggcguccggugcgugugccgcgacaacuggaagggguccaaccggccgaucguggacaucaacaucaaggacuacagcaucgucucccgcuacgugugcagcggccuggugggcgacacgccccggaagaacgacuccagcuccagcucccacugccucgaccccaacaacgaggagggcgggcacggggucaagggcugggccuucgacgacgggaacgacguguggaugggccgcaccaucagcgagaagucccggagcggcuacgagaccuucaaggucaucgaggggugguccaaccccaacagcaagcugcagaucaaccgccaggugaucguggaccggggcaaccgcuccggguacagcggcaucuucagcgucgaggggaaguccugcaucaaccggugcuucuacguggagcugauccgcggccggaaggaggagaccgaggugcucuggaccagcaacuccaucgucguguucugcggcaccagcgggacguacggcaccggguccuggccggacggcgccgacaucaaccugaugcccaucuga

SEQ ID NO: 79905 - RNA, 1410 nt, Artificial Sequence
  derived and/or modified CDS sequence (opt1) from neuraminidase__InfluenzaA__ABS71662
augaaccccaucaagaagaucaucaccaucggcagcgugucccugaccaucagcacgaucugcuucuucaugcagaucgccauccucaucaccaccgucacccugcacuucaagcaguacgaguucaacuccccgcccaacaaccaggugaugcugugcgagcccacgaucaucgagcgcaacaucaccgagaucguguaccucaccaacaccacgaucgagaaggagaucugccccaagcuggccgaguaccggaacuggagcaagccgcagugcgacaucaccggguucgcgcccuucuccaaggacaacagcauccgccuguccgccggcggggacaucugggucacccgggagcccuacgugagcugcgaccccgacaagugcuaccaguucgcccucggccaggggaccacgcugaacaacgugcacuccaacgacaccguccgcgaccggaccccguaccgcacccugcucaugaacgagcugggcgugcccuuccaccugggcacgaagcaggucugcaucgccuggagcuccagcuccugccacgacgggaaggccuggcuccacgugugcaucaccggcgacgacaagaacgcgaccgccagcuucaucuacaacgggcggcugguggacuccaucgugagcugguccaaggagauccugcgcacccaggagagcgagugcgucugcaucaacggcacgugcaccguggugaugaccgacggguccgccagcggcaaggccgacaccaagauccucuucaucgaggagggcaagaucguccacacgagcacccuguccgggagcgcgcagcacguggaggagugcuccugcuacccccgguaccccggcgugcgcugcgucugccgggacaacuggaaggggagcaaccgcccgaucguggacaucaacaucaaggaccacuccaucgugagcuccuacgucugcagcggccuggugggcgacacgccccggaagaacgacuccagcuccagcucccacugccucgaccccaacaacgaggagggcgggcacggggugaagggcugggccuucgacgacgggaacgacgucuggaugggccgcaccaucagcgagaagucccggcugggcuacgagaccuucaaggugaucgagggguggagcaaccccaacuccaagcugcagaucaaccgccaggucaucguggaccggggcaaccgcagcggguacuccggcaucuucagcguggagggcaagagcugcaucaaccggugcuucuacgucgagcucauccgcgggcggaaggaggagaccgaggugcuguggaccuccaacagcaucguggucuucugcggcaccuccgggacguacggcaccgggagcuggccggacggcgccgacaucaaccugaugcccaucuga

SEQ ID NO: 79906 - RNA, 1410 nt, Artificial Sequence
  derived and/or modified CDS sequence (opt1) from neuraminidase__InfluenzaA__ABS71663
auguaccccaucaagaagaucaucaccaucggcagcgugucccugaccaucagcacgaucugcuucuucaugcagaucgccauccucaucaccaccgucacccugcacuucaagcaguacgaguucaacuccccgcccaacaaccaggugaugcugugcgagcccacgaucaucgagcgcaacaucaccgagaucguguaccucaccaacaccacgaucgagaaggagaucugccccaagcuggccgaguaccggaacuggagcaagccgcagugcgacaucaccggguucgcgcccuucuccaaggacaacagcauccgccuguccgccggcggggacaucugggucacccgggagcccuacgugagcugcgaccccgacaagugcuaccaguucgcccucggccaggggaccacgcugaacaacgugcacuccaacgacaccguccgcgaccggaccccguaccgcacccugcucaugaacgagcugggcgugcccuuccaccugggcacgaagcaggucugcaucgccuggagcuccagcuccugccacgacgggaaggccuggcuccacgugugcaucaccggcgacgaccagaacgcgaccgccagcuucaucuacaacgggcggcugguggacuccaucgugagcugguccaaggagauccugcgcacccaggagagcgagugcgucugcaucaacggcacgugcaccguggugaugaccgacggguccgccagcggcaaggccgacaccaagauccucuucaucgaggagggcaagaucguccacacgagcacccuguccgggagcgcgcagcacguggaggagugcuccugcuacccccgguaccccggcgugcgcugcgucugccgggacaacuggaaggggagcaaccgcccgaucguggacaucaacaucaaggaccacuccaucgugagcuccuacgucugcagcggccuggugggcgacacgccccggaagaacgacuccagcuccagcucccacugccucgaccccaacaacgaggagggcgggcacggggugaagggcugggccuucgacgacgggaacgacgucuggaugggccgcaccaucagcgagaagucccggcugggcuacgagaccuucaaggugaucgagggguggagcaaccccaacuccaagcugcagaugaaccgccaggucaucguggaccggggcaaccgcagcggguacuccggcaucuucagcguggagggcaagagcugcaucaaccggugcuucuacgucgagcucauccgcgggcggaaggaggagaccgaggugcuguggaccuccaacagcaucguggucuucugcggcaccuccgggacguacggcaccgggagcuggccggacggcgccgacaucaaccugaugcccaucuga

SEQ ID NO: 79907 - RNA, 1410 nt, Artificial Sequence
  derived and/or modified CDS sequence (opt1) from neuraminidase__InfluenzaA__ABU40956
augaaccccaaccagaagaucaucaccaucggcagcgugucccugaccaucagcacgaucugcuucuucaugcagaucgccauccucaucaccaccgucacccugcacuucaagcaguacgaguucaacuccccgcccaacaaccaggugaugcugugcgagcccacgaucaucgagcgcaacaucaccgagaucguguaccucaccaacaccacgaucgagaaggagaucugccccaagcuggccgaguaccggaacuggagcaagccgcagugcgacaucaccggguucgcgcccuucuccaaggacaacagcauccgccuguccgccggcggggacaucugggucacccgggagcccuacgugagcugcgaccccgacaacugcuaccaguucgcccucggccaggggaccacgcugaacaacgugcacuccaacgacaccguccgcgaccggaccccguaccgcacccugcucaugaacgagcugggcgugcccuuccaccugggcacgaagcaggucugcaucgccuggagcuccagcuccugccacgacgggaaggccuggcuccacgugugcaucaccggcgacgacaagaacgcgaccgccagcuucaucuacaacgggcggcugguggacuccaucgugagcugguccaaggagauccugcgcacccaggagagcgagugcgucugcaucaacggcacgugcaccguggugaugaccgacggguccgccagcggcaaggccgacaccaagauccucuucaucgaggagggcaagaucguccacacgagcacccuguccgggagcgcgcagcacguggaggagugcuccugcuacccccgguaccccggcgugcgcugcgucugccgggacaacuggaaggggagcaaccgcccgaucaucgacaucaacaucaaggaccacuccaucgugagcuccuacgugugcagcggccuggucggcgacacgccccggaagaacgacuccagcuccagcucccacugccucgaccccaacaacgaggagggcgggcacggggugaagggcugggccuucgacgacgggaacgacguguggaugggccgcaccaucagcgagaagucccggcugggcuacgagaccuucaaggucaucgagggguggagcaaccccaaguccaagcugcagaucaaccgccaggugaucgucgaccggggcaaccgcagcggguacuccggcaucuucagcguggagggcaagagcugcaucaaccggugcuucuacguggagcucauccgcgggcggaaggaggagaccgagguccuguggaccuccaacagcaucgugguguucugcggcaccuccgggacguacggcaccgggagcuggccggacggcgccgacaucaaccugaugcccaucuga

SEQ ID NO: 79908 - RNA, 1410 nt, Artificial Sequence
  derived and/or modified CDS sequence (opt1) from neuraminidase__InfluenzaA__ABU50651
augaaccccaaccagaagaucaucaccaucggcagcgugucccugaccaucagcacgaucugcuucuucaugcagaucgccauccucaucaccaccgucacccugcacuucaagcaguacgaguucaacuccccgcccaacaaccaggugaugcugugcgagcccacgaucaucgagcgcaacaucaccgagaucguguaccucaccaacaccacgaucgagaaggagaucugccccaagcuggccgaguaccggaacuggagcaagccgcagugcgacaucaccggguucgcgcccuucuccaaggacaacagcauccgccuguccgccggcggggacaucugggucacccgggagcccuacgugagcugcgaccccgacaagugcuaccaguucgcccucggccaggggaccacgcugaacaacgugcacuccaacgacaccguccgcgaccggaccccguaccgcacccugcucaugaacgagcugggcgugcccuuccaccugggcacgaagcaggucugcaucgccuggagcuccagcuccugccacgacgggaaggccuggcuccacgugugcaucaccggcgacgacaagaacgcgaccgccagcuucaucuacaacgggcggcugguggacuccaucgugagcugguccaaggagauccugcgcacccaggagagcgagugcgucugcaucaacggcacgugcaccguggugaugaccgacggguccgccagcggcaaggccgacaccaagauccucuucaucgaggagggcaagaucguccacacgagcacccuguccgggagcgcgcagcacguggaggagugcuccugcuacccccgguaccccggcgugcgcugcgucugccgggacaacuggaaggggagcaaccgcccgaucguggacaucaacaucaaggaccacuccaucgugagcuccuacgucugcagcggccuggugggcgacacgccccggaagaacgacuccagcuccagcucccacugccucgaccccaacaacgaggagggcgggcacggggugaagggcugggccuucgacgacgggaacgacgucuggaugggccgcaccaucagcgagaagucccggcugggcuacgagaccuucaaggugaucgagggguggagcaaccccaaguccaagcugcagaucaaccgccaggucaucguggaccggggcaaccgcagcggguacuccggcaucuucagcguggagggcaagagcugcaucaaccggugcuucuacgucgagcucauccgcgggcggaaggaggagaccgaggugcuguggaccuccaacagcaucguggucuucugcggcaccuccgggacguacggcaccgggagcuggccggacggcgccgacaucaaccugaugcccaucuga

SEQ ID NO: 79909 - RNA, 1410 nt, Artificial Sequence
  derived and/or modified CDS sequence (opt1) from neuraminidase__InfluenzaA__ABU80180
augaaccccaaccagaagaucaucaccaucggcagcgugucccugaccaucgccacgaucugcuuccucaugcagaucgccauccuggucaccaccgugacccugcacuucaagcaguacgagugcaacagcuucccgaacaaccaggugaugcucugcgagcccacgaucaucgagcgcaacaucaccgagaucgucuaccugaccaacaccacgaucgagaaggagaucugccccaagcuggcggaguaccggaacugguccaagccccagugcaacaucaccggguucgccccguucagcaaggacaacuccauccgccucagcgccggcggggacaucugggugacccgggagcccuacguguccugcgaccccgacaagugcuaccaguucgcccugggccaggggaccacgcugaacaacggccacagcaacgacaccguccacgaccgcacccccuaccggacccuccugaugaacgagcugggcgugccguuccaccucgggacgaagcaggucugcaucgccugguccagcuccagcugccacgacggcaaggcguggcugcacgugugcgugaccggggacgacgagaacgccaccgccuccuucaucuacaacggccgccugguggacagcaucggguccuggagcaagaagauccuccggacccaggaguccgagugcgucugcaucaacggcacgugcaccguggugaugaccgacggcagcgccuccgggaaggcggacaccaagauccuguucaucgaggagggcaagaucguccacacgagcagccuguccgggagcgcccagcacguggaggagugcuccugcuacccccgcuaccccggcgugcggugcgucugccgcgacaacuggaagggcagcaaccggcccaucguggacaucaacgugaaggacuacuccaucgucagcuccuacgugugcagcgggcucgugggcgacaccccgcgcaagaacgacuccagcuccagcucccacugccuggaccccaacaacgaggagggcgggcacggggucaagggcugggccuucgacgacggcaacgacguguggauggggcggaccaucagcgagaagcugcgcuccggcuacgagaccuucaaggucaucgagggguggagcaagcccaacuccaagcuccagaucaaccgccaggugaucguggaccggggcaaccggagcggguacuccggcaucuucagcgucgagggcaagagcugcaucaaccgcugcuucuacguggagcugauccgggggcgcaagcaggagacggaggugcuguggaccuccaacagcaucgucguguucugcggcaccuccgggaccuacggcacggggagcuggcccgacggcgccgacaucaaccucaugccgaucuga

SEQ ID NO: 79910 - RNA, 1413 nt, Artificial Sequence; identical to SEQ ID NO: 78852
  derived and/or modified CDS sequence (opt1) from neuraminidase__InfluenzaA__ABU80301

SEQ ID NO: 79911 - RNA, 1413 nt, Artificial Sequence
  derived and/or modified CDS sequence (opt1) from neuraminidase__InfluenzaA__ABU80312
augaacaccaaccagaagaucaucaccaucggcagcaucuccaucgccaucgggaucaucagccugaugcuccagaucggcaacaucaucuccaucugggccagccacuccauccagacggggagccagaaccacaccggcaucugcaaccagcgcaucaucaccuacgagaacuccaccugggugaaccacacguacgucaacaucaacaacaccaacgugguggcggggaaggacaagaccagcgucacccuggccggcaacuccagccugugcuccaucagcggcugggccaucuacacgaaggacaacuccauccggaucgggagcaagggcgacguguucgugaugcgcgagcccuucaucuccugcagccaccucgagugccggaccuucuuccugacccagggggcccugcucaacgacaagcacuccaacggcaccgucaaggaccgcagcccguaccgggcccugauguccugcccccugggggaggcgcccagccccuacaacagcaaguucgaguccguggccuggagcgccuccgccugccacgacggcaugggcuggcucacgaucgggaucagcggcccggacaacggggcgguggccguccugaaguacaacggcaucaucaccgagaccaucaaguccuggaagaagcgcauccugcggacccaggagagcgagugcgugugcgugaacggcuccugcuucacgaucaugaccgacgggcccagcaacggcgccgccuccuacaagaucuucaagaucgagaaggggaaggucaccaagagcaucgagcucaacgcccccaacuuccacuacgaggagugcuccugcuaccccgacaccggcacggugaugugcgugugccgcgacaacuggcacgggagcaaccggccgugggucuccuucaaccagaaccuggacuaccagaucggcuacaucugcagcggcguguucggggacaacccccgccccaaggacggcgagggguccugcaaccccgugaccgucgacggcgcggacggggugaagggcuucagcuacaaguacggcaacgggguguggaucggccggaccaaguccaaccgccugcggaagggguucgagaugaucugggacccgaacggcuggaccgacacggacagcaacuucuccgucaagcaggacgugguggccaucaccgacuggagcggguacagcggcuccuucguccagcaccccgagcucaccggccuggacugcauccgccccugcuucuggguggagcugguccgggggcucccccgcgagaacaccacgaucuggaccagcggcuccagcaucuccuucugcggggugaacagcgacaccgccaacugguccuggccggacggcgccgagcugcccuucaccaucgacaaguga

SEQ ID NO: 79912 - RNA, 1410 nt, Artificial Sequence; identical to SEQ ID NO: 78754
  derived and/or modified CDS sequence (opt1) from neuraminidase__InfluenzaA__ABU80323

SEQ ID NO: 79913 - RNA, 1410 nt, Artificial Sequence
  derived and/or modified CDS sequence (opt1) from neuraminidase__InfluenzaA__ABU80334
augaaccccaaccagaagaucaucaccaucggcagcgugucccugaccaucgccacgaucugcuuccucaugcagaucgccauccuggucaccaccgugacccugcacuucaagcaguacgagugcaacagcccgcccaacaaccaggugaugcucugcgagcccacgaucaucgagcgcaacaucaccgagaucgucuaccugaccaacaccacgaucgagaaggagaucugccccaagcuggcggaguaccggaacugguccaagccgcagugcaacaucaccggguucgcccccuucagcaaggacaacuccauccgccucagcgccggcggggacaucugggugacccgggagcccuacguguccugcgaccccgacaagugcuaccaguucgcccugggccaggggaccacgcugaacaacggccacagcaacgacaccguccacgaccgcaccccguaccggacccuccugaugaacgagcugggcgugcccuuccaccucgggacgcgccaggugugcaucgccugguccagcuccagcugccacgacggcaaggcguggcugcacgucugcgugaccggggacgacgagaacgccaccgccuccuucaucuacaacggccggcugguggacagcaucggguccuggagcaagaagacccuccgcacgcaggaguccgagugcgucugcaucaacgggaccugcaccguggugaugaccgacggcagcgccuccgggaaggcggacacgaagauccuguucaucgaggagggcaagaucauccacaucagcacccugagcggguccgcccagcacgucgaggagugcagcugcuacccccgguaccccggcgugcgcugcgugugccgggacaacuggaagggcuccaaccgcccgaucgucgacaucaacgugaaggacuacagcaucguguccagcuacgucugcuccgggcucgugggcgacacgccccggaagaacgacagcuucuccagcucccacugccuggaccccaacaacgaggagggcggccacggggugaagggcugggccuucgacgacggcaacgacgucuggauggggcgcaccaucagcgagaagcugcgguccggcuacgagaccuucaaggugaucgagggguggagcaagcccaacuccaagcuccagaucaaccgccaggucaucguggagcggggcaaccgcagcggguacuccggcaucuucagcguggagggcaaguccugcaucaaccggugcuucuacgucgagcugauccgcgggcggaaggaggagaccgaggugugguggaccagcaacagcaucguggucuucugcggcaccuccgggacguacggcaccgggagcuggccggacggcgccgacaucaaccugaugcccaucuga

SEQ ID NO: 79914 - RNA, 1410 nt, Artificial Sequence; identical to SEQ ID NO: 78178
  derived and/or modified CDS sequence (opt1) from neuraminidase__InfluenzaA__ABU92762

SEQ ID NO: 79915 - RNA, 1410 nt, Artificial Sequence
  derived and/or modified CDS sequence (opt1) from neuraminidase__InfluenzaA__ABU92764
augaaccccaaccagaagaucaucaccaucggcagcgugucccugaccaucgccacgaucugcuuccucaugcagaucgccauccuggucaccaccgugacccugcacuucaagcaguacgagugcaacagcccgcccaacaaccaggugaugcucugcgagcccacgaucauggagcgcaacaucaccgagaucgucuaccugaccaacaccacgaucgagaaggagaucugccccaagcuggcggaguaccggaacugguccaagccgcagugcaacgugaccggguucgcccccuucagcaaggacaacuccauccgccucagcgccggcggggacaucugggugacccgggagcccuacgucuccugcgaccccgacaagugcuaccaguucgcccugggccaggggaccacgcugaacaacggccacagcaacgacaccgugcacgaccgcaccccguaccggacccuccugaugaacgagcugggcgugcccuuccaccucgggacgcgccaggucugcaucgccugguccagcuccagcugccacgacggcaaggcguggcugcacgugugcgugaccggggacgacgagaacgccaccgccuccuucaucuacaacggccggcuggucgacagcaucggguccuggagcaagaagauccuccgcacccaggaguccgagugcgugugcaucaacggcacgugcaccguggucaugaccgacggcagcgccuccgggaaggcggacaccaagauccuguucaucgaggagggcaagaucgugcacaucagcacgcugagcggguccgcccagcacguggaggagugcagcugcuacccccgguaccccggcguccgcugcgugugccgggacaacuggaagggcuccaaccgcccgaucguggacaucaacgucaaggacuacagcaucguguccagcuacgugugcuccgggcucgucggcgacacgccccggaagaacgacagcuucuccagcucccacugccuggaccccaacaacgaggagggcgggcacggggugaagggcugggccuucgacgacggcaacgacgucuggauggggcgcaccaucagcgagaagcugcgguccggcuacgagaccuucaaggugaucgagggguggagcaagcccaacuccaagcuccagaucaaccgccaggugaucgucgagcggggcaaccgcagcggguacuccggcaucuucagcguggagggcaaguccugcaucaaccggugcuucuacguggagcugauccgcgggaagaaggaggagaccgaggucugguggaccagcaacagcaucgugguguucugcggcaccuccgggaccuacggcacggggagcuggccggacggcgccgacaucaaccugaugcccaucuga

SEQ ID NO: 79916 - RNA, 1410 nt, Artificial Sequence; identical to SEQ ID NO: 78178
  derived and/or modified CDS sequence (opt1) from neuraminidase__InfluenzaA__ABU92765

SEQ ID NO: 79917 - RNA, 1410 nt, Artificial Sequence; identical to SEQ ID NO: 78178
  derived and/or modified CDS sequence (opt1) from neuraminidase__InfluenzaA__ABU92766

SEQ ID NO: 79918 - RNA, 1410 nt, Artificial Sequence; identical to SEQ ID NO: 78178
  derived and/or modified CDS sequence (opt1) from neuraminidase__InfluenzaA__ABU92767

SEQ ID NO: 79919 - RNA, 1410 nt, Artificial Sequence; identical to SEQ ID NO: 78178
  derived and/or modified CDS sequence (opt1) from neuraminidase__InfluenzaA__ABU92768

SEQ ID NO: 79920 - RNA, 1410 nt, Artificial Sequence; identical to SEQ ID NO: 78085
  derived and/or modified CDS sequence (opt1) from neuraminidase__InfluenzaA__ABU92769

SEQ ID NO: 79921 - RNA, 1410 nt, Artificial Sequence; identical to SEQ ID NO: 78277
  derived and/or modified CDS sequence (opt1) from neuraminidase__InfluenzaA__ABU92770

SEQ ID NO: 79922 - RNA, 1410 nt, Artificial Sequence
  derived and/or modified CDS sequence (opt1) from neuraminidase__InfluenzaA__ABU92771
augaaccccaaccagaagaucaucaccaucggcagcgugucccugaccaucgccacgaucugcuuccucaugcagaucgccauccuggucaccaccgugacccugcacuucaagcaguacgagugcaacagcccgcccaacaaccaggugaugcucugcgagcccacgaucaucgagcgcaacaucaccgagaucgucuaccugaccaacaccacgaucgagaaggagaucugccccaagcuggcggaguaccggaacugguccaagccgcagugcaacaucaccggguucgcccccuucagcaaggacaacuccauccgccucagcgccggcggggacaucugggugacccgggagcccuacguguccugcgaccccaacaagugcuaccaguucgcccugggccaggggaccacgcugaacaacggccacagcaacgacaccguccacgaccgcaccccguaccggacccuccugaugaacgagcugggcgugcccuuccaccucgggacgaagcaggucugcaucgccugguccagcuccagcugccacgacggcaaggcguggcugcacgugugcgugaccggggacgacgagaacgccaccgccuccuucaucuacaacggccgccugguggacagcaucggguccuggagcaagaagauccuccggacccaggaguccgagugcgucugcaucaacggcacgugcaccguggugaugaccgacggcagcgccuccgggaaggcggacaccaagauccuguucaucgaggagggcaagaucguccacacgagccugcucagcggguccgcccagcacguggaggagugcagcugcuacccccgcuaccccggcgugcggugcgucugccgcgacaacuggaagggcuccaaccggccgaucguggacaucaacgugaaggacuacagcaucgucuccagcuacgugugcuccgggcuggugggcgacacgccccgcaagaacgacagcuccagcuccagccacugccuggaccccaacaacgaggagggcgggcacggggucaagggcugggccuucgacgacggcaacgacguguggauggggcggaccaucuccgagaagcuccgcagcggcuacgagaccuucaaggucaucgaggggugguccaagcccaacagcaagcugcagaucaaccgccaggugaucguggaccggggcaaccgguccggguacagcggcaucuucuccgucgagggcaagagcugcaucaaccgcugcuucuacguggagcugauccgggggcgcaagcaggagaccgaggugcucuggaccagcaacuccaucgucguguucugcggcaccagcgggaccuacggcacgggguccuggccggacggcgccgacaucaaccugaugcccaucuga

SEQ ID NO: 79923 - RNA, 1410 nt, Artificial Sequence
  derived and/or modified CDS sequence (opt1) from neuraminidase__InfluenzaA__ABU92772
augaaccccaaccagaagaucaucaccaucggcagcgugucccugaccaucgccacgaucugcuuccucaugcagaucgccauccuggucaccaccgugacccugcacuucaagcaguacgagugcaacagcccgcccaacaaccaggugaugcucugcgagcccacgaucaucgagcgcaacaucaccgagaucgucuaccugaccaacaccacgaucgagaaggagaucugccccaagcuggcggaguaccggaacugguccaagccgcagugcaacaucaccggguucgcccccuucagcaaggacaacuccauccgccucagcgccggcggggacaucugggugacccgggagcccuacguguccugcgaccccgacaagugcuaccaguucgcccugggccaggggaccacgcugaacaacggccacagcaacgacaccguccacgaccgcaccccguaccggacccuccugaugaacgagcugggcgugcccuuccaccucgggacgcgccaggugugcaucgccugguccagcuccagcugccacgacggcaaggcguggcugcacgucugcgugaccggggacgacgagaacgccaccgccuccuucaucuacaacggccggcugguggacagcaucggguccuggagcaagaacauccuccgcacccaggaguccgagugcgucugcaucaacggcacgugcaccguggugaugaccgacggcagcgccuccgggaaggcggacaccaagauccuguucaucgaggagggcaagaucguccacaucagcacgcugagcggguccgcccagcacguggaggagugcagcugcuacccccgguaccccggcgugcgcugcgucugccgggacaacuggaagggcuccaaccgcccgaucguggacaucaacgugaaggacuacagcaucgucuccagcuacgugugcuccgggcucgugggcgacacgccccggaagaacgacagcuucuccagcucccacugccuggaccccaacaacgaggagggcgggcacggggucaagggcugggccuucgacgacggcaacgacguguggauggggcgcaccaucagcgagaagcugcgguccggcuacgagaccuucaaggucaucgagggguggagcaagcccaacuccaagcuccagaucaaccgccaggugaucguggagcggggcaaccgcagcggguacuccggcaucuucagcgucgagggcaaguccugcaucaaccggugcuucuacguggagcugauccgcgggcggaaggaggagaccgaggugugguggaccagcaacagcaucgucguguucugcggcaccuccgggaccuacggcacggggagcuggccggacggcgccgacaucaaccugaugcccaucuga

SEQ ID NO: 79924 - RNA, 1410 nt, Artificial Sequence
  derived and/or modified CDS sequence (opt1) from neuraminidase__InfluenzaA__ABU92773
augaaccccaaccagaagaucaucaccaucggcagcgugucccugaccaucgccacgaucugcuuccucaugcagaucgccauccuggucaccaccgugacccugcacuucaagcaguacgagugcaacagcccgcccaacaaccaggugaugcucugcgagcccacgaucaucgagcgcaacaucaccgagaccgucuaccugaccaacacgaccaucgagaaggagaucugccccaagcuggcggaguaccggaacugguccaagccgcagugcaacaucaccggguucgcccccuucagcaaggacaacuccauccgccucagcgccggcggggacaucugggugacccgggagcccuacguguccugcgaccccgacaagugcuaccaguucgcccugggccaggggacgacccugaacaacggccacagcaacgacaccguccacgaccgcaccccguaccggacgcuccugaugaacgagcugggcgugcccuuccaccucgggacccgccaggugugcaucgccugguccagcuccagcugccacgacggcaaggcguggcugcacgucugcgugaccggggacgacgagaacgccaccgccuccuucaucuacaacggccggcugguggacagcaucggguccuggagcaagaagauccuccgcacgcaggaguccgagugcgucugcaucaacgggaccugcaccguggugaugaccgacggcagcgccuccgggaaggcggacacgaagauccuguucaucgaggagggcaagaucguccacaucagcacccugagcggguccgcccagcacguggaggagugcagcugcuacccccgguaccccggcgugcgcugcgucugccgggacaacuggaagggcuccaaccgcccgaucguggacaucaacgugaaggacuacagcaucgucuccagcuacgugugcuccgggcucgugggcgacacgccccggaagaacgacagcuucuccagcucccacugccuggaccccaacaacgaggagggcggccacggggucaagggcugggccuucgacgacggcaacgacguguggauggggcgcaccaucagcgagaagcugcgguccggcuacgagaccuucaaggucaucgagggguggagcaagcccaacuccaagcuccagaccaaccgccaggugaucguggagcggggcaaccgcagcggguacuccggcaucuucagcgucgagggcaaguccugcaucaaccggugcuucuacguggagcugauccgcgggcggaaggaggagaccgaggugugguggaccagcaacagcaucgucguguucugcggcacguccgggaccuacggcaccgggagcuggccggacggcgccgacaucaaccugaugcccaucuga

SEQ ID NO: 79925 - RNA, 1410 nt, Artificial Sequence
  derived and/or modified CDS sequence (opt1) from neuraminidase__InfluenzaA__ABU92774
augaaccccaaccgcaagaucaucaccaucggcagcgugucccugaccaucgccacgaucugcuuccucaugcagaucgccauccuggucaccaccgugacccugcacuucaagcaguacgagugcaacagcccgcccaacaaccaggugaugcucugcgagcccacgaucaucgagcggaacaucaccgagaccgucuaccugaccaacacgaccaucgagaaggagaucugccccaagcuggcggaguaccgcaacugguccaagccgcagugcaacaucaccggguucgcccccuucagcaaggacaacuccauccggcucagcgccggcggggacaucugggugacccgcgagcccuacguguccugcgaccccgacaagugcuaccaguucgcccugggccaggggacgacccugaacaacggccacagcaacgacaccguccacgaccggaccccguaccgcacgcuccugaugaacgagcugggcgugcccuuccaccucgggacccgccaggugugcaucgccugguccagcuccagcugccacgacggcaaggcguggcugcacgucugcgugaccggggacgacgagaacgccaccgccuccuucaucuacaacggccggcugguggacagcaucggguccuggagcaagaagauccuccggacgcaggaguccgagugcgucugcaucaacgggaccugcaccguggugaugaccgacggcagcgccuccgggaaggcggacacgaagauccuguucaucgaggagggcaagaucguccacaucagcacccugagcggguccgcccagcacguggaggagugcagcugcuacccccgcuaccccggcgugcggugcgucugccgcgacaacuggaagggcuccaaccggccgaucguggacaucaacgugaaggacuacagcaucgucuccagcuacgugugcuccgggcucgugggcgacacgccccgcaagaacgacagcuucuccagcucccacugccuggaccccaacaacgaggagggcggccacggggucaagggcugggccuucgacgacggcaacgacguguggauggggcggaccaucagcgagaagcugcgcuccggcuacgagaccuucaaggucaucgagggguggagcaagcccaacuccaagcuccagaccaaccgccaggugaucguggagcggggcaaccggagcggguacuccggcaucuucagcgucgagggcaaguccugcaucaaccgcugcuucuacguggagcugauccgggggcgcaaggaggagaccgaggugugguggaccagcaacagcaucgucguguucugcggcacguccgggaccuacggcaccgggagcuggccggacggcgccgacaucaaccugaugcccaucuga

SEQ ID NO: 79926 - RNA, 1410 nt, Artificial Sequence
  derived and/or modified CDS sequence (opt1) from neuraminidase__InfluenzaA__ABU92775
augaaccccaaccagaagaucaucaccaucggcagcgugucccugaccaucgccacgaucugcuuccucaugcagaucgccauccuggucaccaccgugacccugcacuucaagcaguacgagugcaacagcccgcccaacaaccaggugaugcucugcgagcccacgaucaucgagcgcaacaucaccgagaucgucuaccugaccaacaccacgaucgagaaggagaucugccccaagcuggcggaguaccggaacugguccaagccgcagugcaacaucaccggguucgcccccuucagcaaggacaacuccauccgccucagcgccggcggggacaucugggugacccgggagcccuacguguccugcgaccccgacaagugcuaccaguucgcccugggccaggggaccacgcugaacaacggccacagcaacgacaccguccacgaccgcaccccguaccggacccuccugaugaacgagcugggcgugcccuuccaccucgggacgcgccaggugugcaucgccugguccagcuccagcugccacgacggcaaggcguggcugcacgucugcgugaccggggacgacaagaacgccaccgccuccuucaucuacaacggccggcugguggacagcaucggguccuggagcaagaagauccuccgcacccaggaguccgagugcgucugcaucaacggcacgugcaccguggugaugaccgacggcagcgccuccgggaaggcggacaccaagauccuguucaucgaggagggcaagaucguccacaucagcacgcugagcggguccgcccagcacguggaggagugcagcugcuacccccgguaccccggcgugcgcugcgucugccgggacaacuggaagggcuccaaccgcccgaucguggacaucaacgugaaggacuacagcaucgucuccagcuacgugugcuccgggcucgugggcgacacgccccggaagaacgacagcuucuccagcucccacugccuggaccccaacaacgaggagggcgggcacggggucaagggcugggccuucgacgacggcaacgacguguggauggggcgcaccaucagcgagaagcugcgguccggcuacgagaccuucaaggucaucgagggguggagcaagcccaacuccaagcuccagaucaaccgccaggugaucguggagcggggcaaccgcagcggguacuccggcaucuucagcgucgagggcaaguccugcaucaaccggugcuucuacguggagcugauccgcgggcggaaggaggagaccgaggugugguggaccagcaacagcaucgucguguucugcggcaccuccgggaccuacggcacggggagcuggccggacggcgccgacaucaaccugaugcccaucuga

SEQ ID NO: 79927 - RNA, 1410 nt, Artificial Sequence; identical to SEQ ID NO: 78351
  derived and/or modified CDS sequence (opt1) from neuraminidase__InfluenzaA__ABU92777

SEQ ID NO: 79928 - RNA, 1410 nt, Artificial Sequence
  derived and/or modified CDS sequence (opt1) from neuraminidase__InfluenzaA__ABU92778
augaaccccaaccagaagaucaucaccaucggcagcgugucccugaccaucagcacgaucugcuucuucaugcagaucgccauccucaucaccaccgucacccugcacuucaagcaguacgaguucaacuccccgcccaacaaccaggugaugcugugcgagcccacgaucaucgagcgcaacaucaccgagaucguguaccucaccaacaccacgaucgagaaggaggucugccccaagcuggccgaguaccggaacuggagcaagccgcagugcaacaucaccggguucgcgcccuucuccaaggacaacagcauccgccuguccgccggcggggacaucugggugacccgggagcccuacgugagcugcgaccccgacaagugcuaccaguucgcccucggccaggggaccacgcugaacaacguccacuccaacgacaccgugcacgaccgcaccccguaccggacccugcucaugaacgagcugggcgugcccuuccaccugggcacgaagcaggucugcaucgccuggagcuccagcuccugccacgacgggaaggccuggcuccacgugugcgugaccggcgacgacaagaacgcgaccgccagcuucaucuacaacgggcgccuggucgacuccaucgugagcugguccaaggagauccugcggacccaggagagcgagugcgugugcaucaacggcacgugcaccgucgugaugaccgacggguccgccagcggcaaggccgacaccaagauccucuucaucgaggagggcaagaucgugcacacgagcacccuguccgggagcgcgcagcacgucgaggagugcuccugcuacccccgcuaccccggcgugcggugcgugugccgcgacaacuggaaggggagcaaccggccgaucgucgacaucaacaucaaggacuacuccaucgugagcuccuacgugugcagcggccuggucggcgacacgccccgcaagaacgacuccagcuccagcucccacugccucgaccccaacaacgaggagggcgggcacggggugaagggcugggccuucgacgacgggaacgacgucuggaugggccggaccaucagcgagaagcugcgcuccggcuacgagaccuucaaggugaucgagggguggagcaaccccaacuccaagcugcagaucaaccgccaggugaucgucgaccggggcaaccggagcggguacuccggcaucuucagcguggagggcaagagcugcaucaaccgcugcuucuacguggagcucauccgggggcgcaaggaggagaccgagguccuguggaccuccaacagcaucgugguguucugcggcaccuccgggacguacggcaccgggagcuggccggacggcgccgacaucaaccugaugcccaucuga

SEQ ID NO: 79929 - RNA, 1410 nt, Artificial Sequence; identical to SEQ ID NO: 78249
  derived and/or modified CDS sequence (opt1) from neuraminidase__InfluenzaA__ABU92779

SEQ ID NO: 79930 - RNA, 1410 nt, Artificial Sequence; identical to SEQ ID NO: 78249
  derived and/or modified CDS sequence (opt1) from neuraminidase__InfluenzaA__ABU92780

SEQ ID NO: 79931 - RNA, 1410 nt, Artificial Sequence; identical to SEQ ID NO: 78249
  derived and/or modified CDS sequence (opt1) from neuraminidase__InfluenzaA__ABU92781

SEQ ID NO: 79932 - RNA, 1410 nt, Artificial Sequence
  derived and/or modified CDS sequence (opt1) from neuraminidase__InfluenzaA__ABU92782
augaaccccaaccagaagaucaucaccaucggcagcgugucccugaccaucgccgccaucugcuuccucaugcagaucgcgauccuggucacgaccgugacccugcacuucaagcagcacgagugcaacagcccgcccaacaaccaggugaugcucugcgagcccaccaucaucgagcgcaacaucacggagaucgucuaccugaccaacaccaccaucgagaaggagaucugccccaagcuggccgaguaccggaacugguccaagccgcagugcaacaucacgggguucgcccccuucagcaaggacaacuccauccgccucagcgccggcggggacaucugggugacccgggagcccuacguguccugcgaccccgacaagugcuaccaguucgcccugggccaggggaccacccugaacaacggccacagcaacgacacgguccacgaccgcaccccguaccggacccuccugaugaacgagcugggcgugcccuuccaccucgggacccgccaggugugcaucgcgugguccagcuccagcugccacgacggcaaggccuggcugcacgucugcgugacgggggacgacaagaacgccaccgccuccuucaucuacaacggccggcugguggacagcaucggguccuggagcaagaagauccuccgcacccaggaguccgagugcgucugcaucaacgggaccugcacgguggugaugaccgacggcagcgcguccgggaaggccgacaccaagauccuguucaucgaggagggcaagaucguccacaucagcacccugagcggguccgcccagcacguggaggagugcagcugcuacccccgguaccccggcgugcgcugcgucugccgggacaacuggaagggcuccaaccgcccgaucguggacaucaacgugaaggacuacagcaucgucuccagcuacgugugcuccgggcucgugggcgacacgccccggaagaacgacagcuucuccagcucccacugccuggaccccaacaacgaggagggcggccacggggucaagggcugggccuucgacgacggcaacgacguguggauggggcgcaccaucagcgagaagcugcgguccggcuacgagaccuucaaggucaucgagggguggagcaagcccaacuccaagcuccagaucaaccgccaggugaucguggagcggggcaaccgcagcggguacuccggcaucuucagcgucgagggcaaguccugcaucaaccggugcuucuacguggagcugauccgcgggcggcgcgaggagaccgaggugugguggacgagcaacagcaucgucguguucugcggcaccuccgggaccuacggcaccgggagcuggccggacggcgccgacaucaaccugaugcccaucuga

SEQ ID NO: 79933 - RNA, 1410 nt, Artificial Sequence; identical to SEQ ID NO: 78249
  derived and/or modified CDS sequence (opt1) from neuraminidase__InfluenzaA__ABU92783

SEQ ID NO: 79934 - RNA, 1410 nt, Artificial Sequence; identical to SEQ ID NO: 78249
  derived and/or modified CDS sequence (opt1) from neuraminidase__InfluenzaA__ABU92784

SEQ ID NO: 79935 - RNA, 1410 nt, Artificial Sequence; identical to SEQ ID NO: 78249
  derived and/or modified CDS sequence (opt1) from neuraminidase__InfluenzaA__ABU92785

SEQ ID NO: 79936 - RNA, 1410 nt, Artificial Sequence; identical to SEQ ID NO: 78249
  derived and/or modified CDS sequence (opt1) from neuraminidase__InfluenzaA__ABU92786

SEQ ID NO: 79937 - RNA, 1410 nt, Artificial Sequence
  derived and/or modified CDS sequence (opt1) from neuraminidase__InfluenzaA__ABU92787
augaaccccaaccagaagaucaucaccaucggcagcgugucccugaccaucgccgccaucugcuuccucaugcagaucgcgauccuggucacgaccgugacccugcacuucaagcagcacgagugcaacagcccgcccaacaaccaggugaugcucugcgagcccaccaucaucgagcgcaacaucacggagaucgucuaccugaccaacaccaccaucgagaaggagaucugccccaagcuggccgaguaccggaacugguccaagccgcagugcaacaucacgggguucgcccccuucagcaaggacaacuccauccgccucagcgccggcggggacaucugggugacccgggagcccuacguguccugcgaccccgacaagugcuaccaguucgcccugggccaggggaccacccugaacaacggccacagcaacgacacgguccacgaccgcaccccguaccggacccuccugaugaacgagcugggcgugcccuuccaccucgggacccgccaggugugcaucgcgugguccagcuccagcugccacgacggcaaggccuggcugcacgucugcgugacgggggacgacaagaacgccaccgccuccuucaucuacaacggccggcugguggacagcaucggguccuggagcaagaagauccuccgcacccaggaguccgagugcgucugcaucaacgggaccugcacgguggugaugaccgacggcagcgcguccgggaaggccgacaccaagauccuguucaucgaggagggcaagaucguccacaucagcacccugagcggguccgcccagcacguggaggagugcagcugcuacccccggcaccccggcgugcgcugcgucugccgggacaacuggaagggcuccaaccgcccgaucguggacaucaacgugaaggacuacagcaucgucuccagcuacgugugcuccgggcucgugggcgacacgccccggaagaacgacagcuucuccagcucccacugccuggaccccaacaacgaggagggcggccacggggucaagggcugggccuucgacgacggcaacgacguguggauggggcgcaccaucagcgagaagcugcgguccggcuacgagaccuucaaggucaucgagggguggagcaagcccaacuccaagcuccagaucaaccgccaggugaucguggagcggggcaaccgcagcggguacuccggcaucuucagcgucgagggcaaguccugcaucaaccggugcuucuacguggagcugauccgcgggcggaaggaggagaccgaggugugguggacgagcaacagcaucgucguguucugcggcaccuccgggaccuacggcaccgggagcuggccggacggcgccgacaucaaccugaugcccaucuga

SEQ ID NO: 79938 - RNA, 1410 nt, Artificial Sequence
  derived and/or modified CDS sequence (opt1) from neuraminidase__InfluenzaA__ABU92789
augaaccccaaccagaagaucaucaccaucggcagcgugucccugaccaucagcacgaucugcuucuucaugcagaucgccauccucaucaccaccgucacccugcacuucaagcaguacgaguucaacccgccgcccaacaaccaggugaugcugugcgagcccacgaucaucgagcgcaacaucaccgagaucguguaccucaccaacaccacgaucgagaaggagaucugccccaagcuggccgaguaccggaacugguccaagccccagugcagcaucaccggguucgcgcccuucuccaaggacaacagcauccgccuguccgccggcggggacaucugggucacccgggagcccuacgugagcugcgacccggacaagugcuaccaguucgcccucggccaggggaccacgcugaacaacgugcacuccaacgacaccguccacgaccgcacccccuaccggacccugcucaugaacgagcugggcgugcccuuccaccugggcacgaagcaggucugcaucgccuggagcuccagcuccugccacgacgggaaggccuggcuccacgugugcgugaccggcgacgacaagaacgcgaccgccagcuucaucuacaacgggcgccugguggacuccaucgucagcugguccaaggagauccugcggacccaggagagcgagugcgugugcaucaacggcacgugcaccguggucaugaccgacggguccgccagcggcaaggccgacaccaagauccucuucaucgaggagggcaagaucgugcacacgagcacccuguccgggagcgcgcagcacguggaggagugcuccugcuacccccgcuacccgggcguccggugcgugugccgcgacaacuggaaggggagcaaccggcccaucguggacaucaacaucaaggacuacuccaucgucagcuccuacgugugcagcggccuggugggcgacacgccccgcaagaacgacuccagcuccagcucccacugccucgaccccaacaacgaggagggcgggcacggggucaagggcugggccuucgacgacgggaacgacguguggaugggccggaccaucagcgagaagucccgcagcggcuacgagaccuucaaggucaucgaggggugguccaacccgaacagcaagcugcagaucaaccgccaggugaucguggaccggggcaaccgguccggguacagcggcaucuucagcgucgaggggaaguccugcaucaaccgcugcuucuacguggagcugauccggggccgcaaggaggagaccgaggugcucuggaccagcaacuccaucgucguguucugcggcaccagcgggacguacggcaccggguccuggcccgacggcgccgacaucaaccugaugcccaucuga

SEQ ID NO: 79939 - RNA, 1410 nt, Artificial Sequence; identical to SEQ ID NO: 78351
  derived and/or modified CDS sequence (opt1) from neuraminidase__InfluenzaA__ABU92790

SEQ ID NO: 79940 - RNA, 1410 nt, Artificial Sequence
  derived and/or modified CDS sequence (opt1) from neuraminidase__InfluenzaA__ABU92791
augaaccccaaccagaagaucaucaccaucggcagcgugucccugaccaucagcacgaucugcuucuucaugcagaucgccauccucaucaccaccgucacccugcacuucaagcaguacgaguucaacuccccgcccaacaaccaggugaugcugugcgagcccacgaucaucgagcgcaacaucaccgagaucguguaccucaccaacaccacgaucgagaaggagaucugccccaagcuggccgaguaccggaacuggagcaagccgcagugcgacaucaccggguucgcgcccuucuccaaggacaacagcauccgccuguccgccggcggggacaucugggucacccgggagcccuacgugagcugcgaccccgacaagugcuaccaguucgcccucggccaggggaccacgcugaacaacgugcacuccaacgacaccguccacgaccgcaccccguaccggacccugcucaugaacgagcugggcgugcccuuccaccugggcacgaagcaggucugcaucgccuggagcuccagcuccugccacgacgggaaggccuggcuccacgugugcgugaccggcgacgacaagaacgcgaccgccagcuucaucuacaacgggcgccugguggacuccaucgucagcugguccaagaagauccugcggacccaggagagcgagugcgugugcaucaacggcacgugcaccguggucaugaccgacggguccgccagcggcaaggccgacaccaagauccucuucaucgaggagggcaagaucgugcacacgagcacccuguccgggagcgcgcagcacguggaggagugcuccugcuacccccgcuaccccggcguccggugcgugugccgcgacaacuggaaggggagcaaccggccgaucguggacaucaacaucaaggacuacuccaccgucagcuccuacgugugcagcggccuggugggcgacacgccccgcaagaacgacuccagcuccagcucccacugccucgaccccaacaacgaggagggcgggcacggggucaagggcugggccuucgacgacgggaacgacguguggaugggccggaccaucagcgagaagcugcgcuccggcuacgagaccuucaaggucaucgagggguggagcaaccccaacuccaagcugcagaucaaccgccaggugaucguggaccggggcaaccggagcggguacuccggcaucuucagcgucgagggcaagagcugcaucaaccgcugcuucuacguggagcucauccgggggcgcaaggaggagaccgaggugcuguggaccuccaacagcaucgucguguucugcggcacguccgggaccuacggcaccgggagcuggccggacggcgccgacaucaaccugaugcccaucuga

SEQ ID NO: 79941 - RNA, 1410 nt, Artificial Sequence
  derived and/or modified CDS sequence (opt1) from neuraminidase__InfluenzaA__ABU92792
augaaccccaaccagaagaucaucaccaucggcagcgugucccugaccaucagcacgaucugcuucuucaugcagaucgccauccucaucaccaccgucacccugcacuucaagcaguacguguucaacuccccgcccaacaaccaggugaugcugugcgagcccacgaucaucgagcgcaacaucaccgagaucgucuaccucaccaacaccacgaucgagaaggagaucugccccaagcuggccgaguaccggaacuggagcaagccgcagugcgacaucaccggguucgcgcccuucuccaaggacaacagcauccgccuguccgccggcggggacaucugggugacccgggagcccuacgugagcugcgaccccgacaagugcuaccaguucgcccucggccaggggaccacgcugaacaacguccacuccaacgacaccgugcacgaccgcaccccguaccggacccugcucaugaacgagcugggcgugcccuuccaccugggcacgaagcaggucugcaucgccuggagcuccagcuccugccacgacgggaaggccuggcuccacgugugcgugaccggcgacgacaagaacgcgaccgccagcuucaucuacaacgggcgccuggucgacuccguggugagcugguccaaggacauccugcggacccaggagagcgagugcgucugcaucaacggcacgugcaccguggugaugaccgacggguccgccagcggcaaggccgacaccaagauccucuucaucgaggagggcaagaucguccacacgagcacccuguccgggagcgcgcagcacguggaggagugcuccugcuacccccgcuaccccggcgugcggugcgucugccgcgacaacuggaaggggagcaaccggccgaucguggacaucaacaucaagaacuacuccaucgugagcuccuacgucugcagcggccuggugggcgacacgccccgcaagaccgacuccagcuccagcucccacugccucgaccccaacaacgaggagggcgggcacggggucaagggcugggccuucgacgacgggaacgacguguggaugggccggaccaucagcgagaagcugcgccugggcuacgagaccuucaaggugaucgaggggugguccaaccccaacagcaagcuccagaucaaccggcaggucaucguggaccgcggcaaccgguccggguacagcggcaucuucuccguggagggcaagagcugcaucaaccgcugcuucuacgucgagcugauccgggggcgcaaggaggagaccgaggugcuguggaccagcaacuccaucguggucuucugcggcacgagcgggaccuacggcaccggguccuggccggacggcgccgacaucaaccucaugcccaucuga

SEQ ID NO: 79942 - RNA, 1410 nt, Artificial Sequence; identical to SEQ ID NO: 78831
  derived and/or modified CDS sequence (opt1) from neuraminidase__InfluenzaA__ABU92793

SEQ ID NO: 79943 - RNA, 1410 nt, Artificial Sequence; identical to SEQ ID NO: 79938
  derived and/or modified CDS sequence (opt1) from neuraminidase__InfluenzaA__ABU92794

SEQ ID NO: 79944 - RNA, 1410 nt, Artificial Sequence; identical to SEQ ID NO: 78249
  derived and/or modified CDS sequence (opt1) from neuraminidase__InfluenzaA__ABU92795

SEQ ID NO: 79945 - RNA, 1410 nt, Artificial Sequence; identical to SEQ ID NO: 78249
  derived and/or modified CDS sequence (opt1) from neuraminidase__InfluenzaA__ABU92796

SEQ ID NO: 79946 - RNA, 1410 nt, Artificial Sequence
  derived and/or modified CDS sequence (opt1) from neuraminidase__InfluenzaA__ABU92797
augaaccccaaccagaagaucaucaccaucggcagcgugucccugaccaucgccgccaucugcuuccucaugcagaucgcgauccuggucacgaccgugacccugcacuucaagcagcacgagugcaacagcccgcccaacaaccaggugaugcucugcgagcccaccaucaucgagcgcaacaucacggagaucgucuaccugaccaacaccaccaucgagaaggagaucugccccaagcuggccgaguaccggaacugguccaagccgcagugcaacaucacgggguucgcccccuucagcaaggacaacuccauccgccucagcgccggcggggacaucugggugacccgggagcccuacguguccugcgaccccgacaagugcuaccaguucgcccugggccaggggaccacccugaacaacggccacagcaacgacacgguccacgaccgcaccccguaccggacccuccugaugaacgagcugggcgugcccuuccaccucgggacccgccaggugugcaucgcgugguccagcuccagcugccacgacggcaaggccuggcugcacgucugcgugacgggggacgacaagaacgccaccgccuccuucaucuacaacggccggcugguggacagcaucggguccuggagcaagcgcauccuccggacccaggaguccgagugcgucugcaucaacgggaccugcacgguggugaugaccgacggcagcgcguccgggaaggccgacaccaagauccuguucaucgaggagggcaagaucguccacaucagcacccugagcggguccgcccagcacguggaggagugcagcugcuacccccgcuaccccggcgugcggugcgucugccgcgacaacuggaagggcuccaaccggccgaucguggacaucaacgugaaggacuacagcaucgucuccagcuacgugugcuccgggcucgugggcgacacgccccgcaagaacgacagcuucuccagcucccacugccuggaccccaacaacgaggagggcggccacggggucaagggcugggccuucgacgacggcaacgacguguggauggggcggaccaucaacgagaagcugcgcagcggcuacgagaccuucaaggucaucgaggggugguccaagcccaacagcaagcuccagaucaaccgccaggugaucguggagcggggcaaccgguccggguacagcggcaucuucuccgucgagggcaagagcugcaucaaccgcugcuucuacguggagcugauccgggggcgcaaggaggagaccgaggugugguggacguccaacagcaucgucguguucugcggcaccagcgggaccuacggcaccggguccuggccggacggcgccgacaucaaccugaugcccaucuga

SEQ ID NO: 79947 - RNA, 1410 nt, Artificial Sequence; identical to SEQ ID NO: 78249
  derived and/or modified CDS sequence (opt1) from neuraminidase__InfluenzaA__ABU92798

SEQ ID NO: 79948 - RNA, 1410 nt, Artificial Sequence; identical to SEQ ID NO: 78249
  derived and/or modified CDS sequence (opt1) from neuraminidase__InfluenzaA__ABU92799

SEQ ID NO: 79949 - RNA, 1410 nt, Artificial Sequence; identical to SEQ ID NO: 78249
  derived and/or modified CDS sequence (opt1) from neuraminidase__InfluenzaA__ABU92800

SEQ ID NO: 79950 - RNA, 1410 nt, Artificial Sequence
  derived and/or modified CDS sequence (opt1) from neuraminidase__InfluenzaA__ABU92801
augaaccccaaccagaagaucaucaccaucggcagcgugucccugaccaucgccgccaucugcuuccucaugcagaucgcgauccuggucacgaccgugacccugcacuucaagcagcacgagugcaacagcccgcccaacaaccaggugaugcucugcgagcccaccaucaucgagcgcaacaucacggagaucguccaccugaccaacaccaccaucgagaaggagaucugccccaagcuggccgaguaccggaacugguccaagccgcagugcaacaucacgggguucgcccccuucagcaaggacaacuccauccgccucagcgccggcggggacaucugggugacccgggagcccuacguguccugcgaccccgacaagugcuaccaguucgcccugggccaggggaccacccugaacaacggccacagcaacgacacgguccacgaccgcaccccguaccggacccuccugaugaacgagcugggcgugcccuuccaccucgggacccgccaggugugcaucgcgugguccagcuccagcugccacgacggcaaggccuggcugcacgucugcgugacgggggacgacaagaacgccaccgccuccuucaucuacaacggccggcugguggacagcaucggguccuggagcaagaagauccuccgcacccaggaguccgagugcgucugcaucaacgggaccugcacgguggugaugaccgacggcagcgcguccgggaaggccgacaccaagauccuguucaucgaggagggcaagaucguccacaucagcacccugagcggguccgcccagcacguggaggagugcagcugcuacccccgguaccccggcgugcgcugcgucugccgggacaacuggaagggcuccaaccgcccgaucguggacaucaacgugaaggacuacagcaucgucuccagcuacgugugcuccgggcucgugggcgacacgccccggaagaacgacagcuucuccagcucccacugccuggaccccaacaacgaggagggcggccacggggucaagggcugggccuucgacgacggcaacgacguguggauggggcgcaccaucagcgagaagcugcgguccggcuacgagaccuucaaggucaucgagggguggagcaagcccaacuccaagcuccagaucaaccgccaggugaucguggagcggggcaaccgcagcggguacuccggcaucuucagcgucgagggcaaguccugcaucaaccggugcuucuacguggagcugauccgcgggcggaaggaggagaccgaggugugguggacgagcaacagcaucgucguguucugcggcaccuccgggaccuacggcaccgggagcuggccggacggcgccgacaucaaccugaugcccaucuga

SEQ ID NO: 79951 - RNA, 1410 nt, Artificial Sequence; identical to SEQ ID NO: 78249
  derived and/or modified CDS sequence (opt1) from neuraminidase__InfluenzaA__ABU92802

SEQ ID NO: 79952 - RNA, 1410 nt, Artificial Sequence; identical to SEQ ID NO: 78249
  derived and/or modified CDS sequence (opt1) from neuraminidase__InfluenzaA__ABU92804

SEQ ID NO: 79953 - RNA, 1410 nt, Artificial Sequence
  derived and/or modified CDS sequence (opt1) from neuraminidase__InfluenzaA__ABU92805
augaaccccaaccagaagaucaucaccaucggcagcgugucccugaccaucagcacgaucugcuucuucaugcagaucgccauccucaucaccaccgucacccugcacuucaagcaguacgaguucaacuccccgcccaacaaccaggugaugcugugcgagcccacgaucaucgagcgcaacaucaccgagaucguguaccucaccaacaccacgaucgagaaggagaucugccccaagcuggccgaguaccggaacuggagcaagccgcagugcaacaucaccggguucgcgcccuucuccaaggacaacagcauccgccuguccgccggcggggacaucugggucacccgggagcccuacgugagcugcgaccccgacaagugcuaccaguucgcccucggccaggggaccacgcugaacaacgugcacuccaacgacaccguccacgaccgcaccccguaccggacccugcucaugaacgagcugggcgugcccuuccaccugggcacgaagcaggucugcaucgccuggagcuccagcuccugccacgacgggaaggccuggcuccacgugugcgugaccggcgacgacgagaacgcgaccgccagcuucaucuacaacgggcgccugguggacuccaucgucagcugguccaagaagauccugcggacccaggagagcgagugcgugugcaucaacggcacgugcaccguggucaugaccgacggguccgccagcggcaaggccgacaccaagauccucuucaucgaggagggcaagaucgugcacacgagcacccuguccgggagcgcgcagcacguggaggagugcuccugcuacccccgcuaccccggcguccggugcgugugccgcgacaacuggaaggggagcaaccggccgaucguggacaucaacaucaaggacuacuccaucgucagcuccuacgugugcagcggccuggugggcgacacgccccgcaagaacgacuccagcuccagcucccacugccucgaccccaacaacgaggagggcgggcacggggucaagggcugggccuucgacgacgggaacgacguguggaugggccggaccaucagcgagaagcugcgcuccggcuacgagaccuucaaggucaucgagggguggagcaaccccaacuccaagcugcagaucaaccgccaggugaucguggaccggggcaaccggagcggguacuccggcaucuucagcgucgagggcaagagcugcaucaaccgcugcuucuacguggagcucauccgggggcgcaagcaggagaccgaggugcuguggaccuccaacagcaucgucguguucugcggcaccuccgggacguacggcaccgggagcuggccggacggcgccgacaucaaccugaugcccaucuga

SEQ ID NO: 79954 - RNA, 1410 nt, Artificial Sequence; identical to SEQ ID NO: 79953
  derived and/or modified CDS sequence (opt1) from neuraminidase__InfluenzaA__ABU92806

SEQ ID NO: 79955 - RNA, 1410 nt, Artificial Sequence
  derived and/or modified CDS sequence (opt1) from neuraminidase__InfluenzaA__ABU92808
augaaccccaaccagaagaucaucaccaucggcagcgugucccugaccaucgccacgaucugcuuccucaugcagaucaccauccuggucaccaccgugacgcugcacuucaagcaguacgagugcaacagcccgcccaacaaccaggugaugcucugcgagcccaccaucaucgagcgcaacaucaccgagaucgucuaccugaccaacacgaccaucgagaaggagaucugccccaagcuggccgaguaccggaacugguccaagccgcagugcaacaucaccggguucgcgcccuucagcaaggacaacuccauccgccucagcgccggcggggacaucugggugacccgggagcccuacguguccugcgaccccgacaagugcuaccaguucgcccugggccaggggacgacccugaacaacggccacagcaacgacaccguccacgaccgcaccccguaccggacgcuccugaugaacgagcugggcgugcccuuccaccucgggacccgccaggugugcaucgccugguccagcuccagcugccacgacggcaaggccuggcugcacgucugcgugaccggggacgacaagaacgcgaccgccuccuucaucuacaacggccggcugguggacagcaucggguccuggagcaagaagauccuccgcacgcaggaguccgagugcgucugcaucaacgggaccugcaccguggugaugaccgacggcagcgccuccgggaaggccgacacgaagauccuguucaucgaggagggcaagaucauccacaucagcacccugagcggguccgcgcagcacgucgaggagugcagcugcuacccccgguaccccggcgugcgcugcgugugccgggacaacuggaagggcuccaaccgcccgaucgucgacaucaacgugaaggacuacagcaucguguccagcuacgucugcuccgggcucgugggcgacacgccccggaagaacgacagcuccagcuccagccacugccuggaccccaacaacgaggagggcggccacggggugaagggcugggccuucgacgacggcaacgacgucuggauggggcgcaccaucuccgagaagcugcggagcggcuacgagaccuucaaggugaucgaggggugguccaagcccaacagcaagcuccagaucaaccgccaggucaucguggagcggggcaaccgcuccggguacagcggcaucuucuccguggagggcaagagcugcaucaaccggugcuucuacgucgagcugauccgcgggcggaaggaggagaccgaggugugguggaccagcaacuccaucguggucuucugcggcaccagcgggacguacggcaccggguccuggccggacggcgccgacaucaaccugaugcccaucuga

SEQ ID NO: 79956 - RNA, 1410 nt, Artificial Sequence
  derived and/or modified CDS sequence (opt1) from neuraminidase__InfluenzaA__ABU92809
augaaccccaaccagaagaucaucaccaucggcagcgugucccugaccaucagcacgaucugcuucuucaugcagaucgccauccucaucaccaccgucacccugcacuucaagcaguacgaguucaacuccccgcccaacaaccaggugaugcugugcgagcccacgaucaucgagcgcaacaucaccgagaucguguaccucaccaacaccacgaucgagaaggagaucugccccaagcuggccgaguaccggaacuggagcaagccgcagugcaacaucaccggguucgcgcccuucuccaaggacaacagcauccgccuguccgccggcggggacaucugggucacccgggagcccuacgugagcugcgaccccgacaagugcuaccaguucgcccucggccaggggaccacgcugaacaacgugcacuccaacgacaccguccacgaccgcaccccguaccggacccugcucaugaacgagcugggcgugcccuuccaccugggcacgaagcaggucugcaucgccuggagcuccagcuccugccacgacgggaaggccuggcuccacgugugcgugaccggcgacgacaagaacgcgaccgccagcuucaucuacaacgggcgccugguggacuccaucgucagcugguccaaggagauccugcggacccaggagagcgagugcgugugcaucaacggcacgugcaccguggucaugaccgacggguccgccagcggcaaggccgacaccaagauccucuucaucgaggagggcaagaucgugcacacgagcacccuguccgggagcgcgcagcacguggaggagugcuccugcuacccccgcuaccccggcguccggugcgugugccgcgacaacuggaaggggagcaaccggccgaucguggacaucaacaucaaggacuacuccaucgucagcuccuacgugugcagcggccuggugggcgacacgccccgcaagaacgacuccagcuccagcgggcacugccucgaccccaacaacgaggagggcgggcacggcgucaaggggugggccuucgacgacggcaacgacguguggaugggccggaccaucuccgagaagcugcgcagcggguacgagaccuucaaggucaucgagggcugguccaaccccaacagcaagcugcagaucaaccgccaggugaucguggaccgggggaaccgguccggcuacagcgggaucuucuccgucgagggcaagagcugcaucaaccgcugcuucuacguggagcucauccggggccgcaaggaggagaccgacgugcuguggaccagcaacuccaucgucguguucugcgggaccagcggcacguacgggaccggcuccuggccggacggggccgacaucaaccugaugcccaucuga

SEQ ID NO: 79957 - RNA, 1410 nt, Artificial Sequence
  derived and/or modified CDS sequence (opt1) from neuraminidase__InfluenzaA__ABU92810
augaaccccaaccagaagaucaucaccaucggcagcgugucccugaccaucgccgccaucugcuuccucaugcagaucgcgauccuggucacgaccgugacccugcacuucaagcagcacgagugcaacagcccgcccaacaaccaggugaugcucugcgagcccaccaucaucgagcgcaacaucacggagaucgucuaccugaccaacaccaccaucgagaaggagaucugccccaagcuggccgaguaccggaacugguccaagccgcagugcaacaucacgggguucgcccccuucagcaaggacaacuccauccgccucagcgccggcggggacaucugggugacccgggagcccuacguguccugcgaccccgacaagugcuaccaguucgcccugggccaggggaccacccugaacaacggccacagcaacgacacgguccacgaccgcaccccguaccggacccuccugaugaacgagcugggcgugcccuuccaccucgggacccgccaggugugcaucgcgugguccagcuccagcugccacgacggcaaggccuggcugcacgucugcgugacgggggacgacaagaacgccaccgccuccuucaucuacaacggccggcugguggacagcaucggguccuggagcaagaagauccuccgcacccaggaguccgagugcgucugcaucaacgggaccugcacgguggugaugaccgacggcagcgcguccgggaaggccgacaccaagauccuguucaucgaggagggcaagaucguccacaucagcacccugagcggguccgcccagcacguggaggagugcagcugcuacccccgguaccccggcgugcgcugcgucugccgggacaacuggaagggcuccaaccgcccgaucguggacaucaacgugaaggacuacagcaucgucuccagcuacgugugcuccgggcucgugggcgacacgccccggaagaacgacagcuucuccagcucccacugccuggaccccaacaacgaggagggcggccacggggucaagggcugggccuucgacgacggcaacgacguguggauggggcgcaccaucagcgagaagcugcgguccggcuacgagaccuucaaggucaucgagggguggagcaagcccaacuccaagcuccagaucaaccgccaggugaucguggagggcgggaaccggagcggcuacuccggcaucuucagcgucgaggggaaguccugcaucaaccgcugcuucuacguggagcugauccggggccgcaaggaggagaccgaggugugguggacgagcaacagcaucgucguguucugcgggaccuccggcaccuacgggaccggcagcuggccggacggcgccgacaucaaccugaugcccaucuga

SEQ ID NO: 79958 - RNA, 1410 nt, Artificial Sequence
  derived and/or modified CDS sequence (opt1) from neuraminidase__InfluenzaA__ABU92811
augaaccccaaccagaagaucaucaccaucggcagcgugucccugaccaucgccgccaucugcuuccucaugcagaucgcgauccuggucacgaccgugacccugcacuucaagcagcacgagugcaacagcccgcccaacaaccaggugaugcucugcgagcccaccaugaucgagcgcaacaucacggagaucgucuaccugaccaacaccaccaucgagaaggagaucugccccaagcuggccgaguaccggaacugguccaagccgcagugcaacaucacgggguucgcccccuucagcaaggacaacuccauccgccucagcgccgugggcgacaucugggugacccgggagcccuacgucuccugcgaccccgacaagugcuaccaguucgcccuggggcagggcaccacccugaacaacgggcacagcaacgacacggugcacgaccgcaccccguaccggacccuccugaugaacgagcugggcgugcccuuccaccucggcacccgccaggucugcaucgcgugguccagcuccagcugccacgacgggaaggccuggcugcacgugugcgugacgggcgacgacaagaacgccaccgccuccuucaucuacaacgggcggcuggucgacagcaucggcuccuggagcaagaagauccuccgcacccaggaguccgagugcgugugcaucaacgggaccugcacgguggucaugaccgacggcagcgcguccggcaaggccgacaccaagauccuguucaucgaggaggggaagaucgugcacaucagcacccugagcggcuccgcccagcacguggaggagugcagcugcuacccccgguaccccgggguccgcugcgugugccgggacaacuggaagggcuccaaccgcccgaucguggacaucaacgucaaggacuacagcaucguguccagcuacgugugcuccggccucgucggggacacgccccggaagaacgacagcuucuccagcucccacugccuggaccccaacaacgaggagggcgggcacggcgugaaggggugggccuucgacgacggcaacgacgucuggaugggccgcaccaucagcgagaagcugcgguccggguacgagaccuucaaggugaucgagggcuggagcaagcccaacuccaagcuccagaucaaccgccaggugaucgucgagcgggggaaccgcagcggcuacuccgggaucuucagcguggagggcaaguccugcaucaaccggugcuucuacguggagcugauccgcggccggaaggaggagaccgaggucugguggacgagcaacagcaucgugguguucugcgggaccuccggcaccuacgggaccggcagcuggccggacggggccgacaucaaccugaugcccaucuga

SEQ ID NO: 79959 - RNA, 1410 nt, Artificial Sequence; identical to SEQ ID NO: 78249
  derived and/or modified CDS sequence (opt1) from neuraminidase__InfluenzaA__ABU92814

SEQ ID NO: 79960 - RNA, 1410 nt, Artificial Sequence; identical to SEQ ID NO: 78738
  derived and/or modified CDS sequence (opt1) from neuraminidase__InfluenzaA__ABU92815

SEQ ID NO: 79961 - RNA, 1410 nt, Artificial Sequence; identical to SEQ ID NO: 78249
  derived and/or modified CDS sequence (opt1) from neuraminidase__InfluenzaA__ABU92816

SEQ ID NO: 79962 - RNA, 1410 nt, Artificial Sequence
  derived and/or modified CDS sequence (opt1) from neuraminidase__InfluenzaA__ABU92817
augaaccccaaccagaagaucaucaccaucggcagcgugucccugaccaucgccgccaucugcuuccucaugcagaucgcgauccuggucacgaccgugacccugcacuucaagcagcacgagugcaacagcccgcccaacaaccaggugaugcucugcgagcccaccaucaucgagcgcaacaucacggagaucgucuaccugaccaacaccaccaucgagaaggagaucugccccaagcuggccgaguaccggaacugguccaagccgcagugcaacaucacgggguucgcccccuucagcaaggacaacuccauccgccucagcgccggcggggacaucugggugacccgggagcccuacguguccugcgaccccgacaagugcuaccaguucgcccugggccaggggaccacccugaacaacggccacagcaacgacacgguccacgaccgcaccccguaccggacccuccugaugaacgagcugggcgugcccuuccaccucgggacccgccaggugugcaucgcgugguccagcuccagcugccacgacggcaaggccuggcugcacgucugcgugacgggggacgacaagaacgccaccgccuccuucaucuacaacggccggcugguggacagcaucggguccuggagcaagaagauccuccgcacccaggaguccgagugcgucugcaucaacgggaccugcacgguggugaugaccgacggcagcgcguccgggaaggccgacaccaagauccuguucaucgaggagggcaagaucguccacaucagcacccugagcggguccgcccagcacguggaggagugcagcugcuacccccgguaccccggcgugcgcugcgucugccgggacaacuggaagggcuccaaccgcccgaucguggacaucaacgugaaggacuacagcaucgucuccagcuacgugugcuccgggcucgugggcgacacgccccggaagaacgacagcuucuccagcucccacugccuggaccccaacaacgaggagggcggccacggggucaagggcugggccuucgacgacggcaacgacguguggauggggcgcaccaucagcgagaagcugcgguccggcuacgagaccuucaaggucaucgagggguggagcaagcccaacuccaagcuccagaucaaccgccaggugaucguggagcggggcaaccgcagcggguacuccggcaucuucagcgucgaguccaagagcugcaucaaccggugcuucuacguggagcugauccgcggccggaaggaggagaccgaggugugguggacgagcaacuccaucgucguguucugcgggaccagcggcaccuacgggaccggcuccuggccggacggggccgacaucaaccugaugcccaucuga

SEQ ID NO: 79963 - RNA, 1410 nt, Artificial Sequence; identical to SEQ ID NO: 78249
  derived and/or modified CDS sequence (opt1) from neuraminidase__InfluenzaA__ABU92818

SEQ ID NO: 79964 - RNA, 1410 nt, Artificial Sequence; identical to SEQ ID NO: 78249
  derived and/or modified CDS sequence (opt1) from neuraminidase__InfluenzaA__ABU92819

SEQ ID NO: 79965 - RNA, 1410 nt, Artificial Sequence; identical to SEQ ID NO: 78249
  derived and/or modified CDS sequence (opt1) from neuraminidase__InfluenzaA__ABU92821

SEQ ID NO: 79966 - RNA, 1410 nt, Artificial Sequence; identical to SEQ ID NO: 78249
  derived and/or modified CDS sequence (opt1) from neuraminidase__InfluenzaA__ABU92822

SEQ ID NO: 79967 - RNA, 1410 nt, Artificial Sequence; identical to SEQ ID NO: 78161
  derived and/or modified CDS sequence (opt1) from neuraminidase__InfluenzaA__ABU92823

SEQ ID NO: 79968 - RNA, 1410 nt, Artificial Sequence
  derived and/or modified CDS sequence (opt1) from neuraminidase__InfluenzaA__ABU92824
augaaccccaaccagaagaucaucaccaucggcagcgugucccugaccaucgccgccaucugcuuccucaugcagaucgcgauccuggucacgaccgugacccugcacuucaagcagcacgagugcaacagcccgcccaacaaccaggugaugcucugcgagcccaccaucaucgagcgcaacaucacggagaucgucuaccugaccaacaccaccaucgagaaggagaucugccccaagcuggccgaguaccggaacugguccaagccgcagugcaacaucacgggguucgcccccuucagcaaggacaacuccauccgccucagcgccggcggggacaucugggugacccgggagcccuacguguccugcgaccccgacaagugcuaccaguucgcccugggccaggggaccacccugaacaacggccacagcaacgacacgguccacgaccgcaccccguaccggacccuccugaugaacgagcugggcgugcccuuccaccucgggacccgccaggugugcaucgcgugguccagcuccagcugccacgacggcaaggccuggcugcacgucugcgugacgggggacgacaagaacgccaccgccuccuucaucuacaacggccggcugguggacagcaucggguccuggagcaagaagauccuccgcacccaggaguccgagugcgucugcaucaacgggaccugcacgguggugaugaccgacggcagcgcguccgggaaggccgacaccaagauccuguucaucgaggagggcaagaucguccacaucagcacccugagcggguccgcccagcacguggaggagugcagcugcuacccccgguaccccggcgugcgcugcgucugccgggacaacuggaagggcuccaaccgcccgaucguggacaucaacgugaaggacuacagcaucgucuccagcuacgugugcuccgggcucgugggcgacacgccccggcgcaacgacagcuucuccagcucccacugccuggaccccaacaacgaggagggcggccacggggucaagggcugggccuucgacgacggcaacgacguguggauggggcggaccaucagcgagaagcugcgcuccggcuacgagaccuucaaggucaucgagggguggagcaagcccaacuccaagcuccagaucaaccgccaggugaucguggagcggggcaaccggagcggguacuccggcaucuucagcgucgagggcaaguccugcaucaaccgcugcuucuacguggagcugauccgggggcgcaaggaggagaccgaggugugguggacgagcaacagcaucgucguguucugcggcaccuccgggaccuacggcaccgggagcuggccggacggcgccgacaucaaccugaugcccaucuga

SEQ ID NO: 79969 - RNA, 1410 nt, Artificial Sequence
  derived and/or modified CDS sequence (opt1) from neuraminidase__InfluenzaA__ABU92825
augaaccccaaccagaagaucaucaccaucggcagcgugucccugaccaucagcacgaucugcuucuucaugcagaucgccauccucaucaccaccgucacccugcacuucaagcaguacgaguucaacuccccgcccaacaaccaggugaugcugugcgagcccacgaucaucgagcgcaacaucaccgagaucguguaccucaccaacaccacgaucgagaaggagaucugccccaagcuggccgaguaccggaacuggagcaagccgcagugcgacaucaccggguucgcgcccuucuccaaggacaacagcauccgccuguccgccggcggggacaucugggucacccgggagcccuacgugagcugcgaccccaacaagugcuaccaguucgcccucggccaggggaccacgcugaacaacgugcacuccaacgacaccguccacgaccgcaccccguaccggacccugcucaugaacgagcugggcgugcccuuccaccugggcacgaagcaggucugcaucgccuggagcuccagcuccugccacgacgggaaggccuggcuccacgugugcgugaccggcgacgacaagaacgcgaccgccagcuucaucuacaacgggcgccugguggacuccaucgucagcugguccaagaagauccugcggacccaggagagcgagugcgugugcaucaacggcacgugcaccguggucaugaccgacggguccgccagcggcaaggccgacaccaagauccucuucaucgaggagggcaagaucgugcacacgagcacccuguccgggagcgcgcagcacguggaggagugcuccugcuacccccgcuaccccggcguccggugcgugugccgcgacaacuggaaggggagcaaccggccgaucguggacaucaacaucaaggacuacuccaucgucagcuccuacgugugcagcggccuggugggcgacacgccccgcaagaacgacuccagcuccagcucccacugccucgaccccaacaacgaggagggcgggcacggggucaagggcugggccuucgacgacgggaacgacguguggaugggccggaccaucagcgagaagucccgcagcggcuacgagaccuucaaggucaucgaggggugguccaaccccaacagcaagcugcagaucaaccgccaggugaucguggaccggggcaaccgguccggguacagcggcaucuucagcgucgaggggaaguccugcaucaaccgcugcuucuacguggagcugauccggggccgcaaggaggagaccgaggugcucuggaccagcaacuccaucgucguguucugcggcaccagcgggacguacggcaccggguccuggccggacggcgccgacaucaaccugaugcccaucuga

SEQ ID NO: 79970 - RNA, 1410 nt, Artificial Sequence; identical to SEQ ID NO: 79969
  derived and/or modified CDS sequence (opt1) from neuraminidase__InfluenzaA__ABU92826

SEQ ID NO: 79971 - RNA, 1410 nt, Artificial Sequence; identical to SEQ ID NO: 78249
  derived and/or modified CDS sequence (opt1) from neuraminidase__InfluenzaA__ABU92827

SEQ ID NO: 79972 - RNA, 1410 nt, Artificial Sequence; identical to SEQ ID NO: 78249
  derived and/or modified CDS sequence (opt1) from neuraminidase__InfluenzaA__ABU92828

SEQ ID NO: 79973 - RNA, 1410 nt, Artificial Sequence; identical to SEQ ID NO: 78738
  derived and/or modified CDS sequence (opt1) from neuraminidase__InfluenzaA__ABU92829

SEQ ID NO: 79974 - RNA, 1410 nt, Artificial Sequence
  derived and/or modified CDS sequence (opt1) from neuraminidase__InfluenzaA__ABU92830
augaaccccaaccagaagaucaucaccaucggcagcgugucccugaccaucgccgccaucugcuuccucaugcagaucgcgauccuggucacgaccgugacccugcacuucaagcagcacgagugcaacagcccgcccaacaaccaggugaugcucugcgagcccaccaucaucgagcgcaacaucacggagaucgucuaccugaccaacaccaccaucgagaaggagaucugccccaagcuggccgaguaccggaacugguccaagccgcagugcaacaucacgggguucgcccccuucagcaaggacaacuccauccgccucagcgccggcggggacaucugggugacccgggagcccuacguguccugcgaccccgacaagugcuaccaguucgcccugggccaggggaccacccugaacaacggccacagcaacgacacgguccacgaccgcaccccguaccggacccuccugaugaacgagcugggcgugcccuuccaccucgggacccgccaggugugcaucgcgugguccagcuccagcugccacgacggcaaggccuggcugcacgucugcgugacgggggacgacaagaacgccaccgccuccuucaucuacaacggccggcugguggacagcaucggguccuggagcaagaagauccuccgcacccaggaguccgagugcgucugcaucaacgggaccugcacgguggugaugaccgacggcagcgcguccgggaaggccgacaccaagauccuguucaucgaggagggcaagaucguccacaucagcacccugagcggguccgcccagcacguggaggagugcagcugcuacccccgguaccccggcgugcgcugcgucugccgggacaacuggaagggcuccaaccgcccgaucguggacaucaacgugaaggacuacagcaucgucuccagcuacgugugcuccgggcucgugggcgacacgccccggaagaacgacagcuucuccagcucccgcugccuggaccccaacaacgaggagggcggccacggggucaagggcugggccuucgacgacggcaacgacguguggauggggcggaccaucagcgagaagcugcgcuccggcuacgagaccuucaaggucaucgagggguggagcaagcccaacuccaagcuccagaucaaccgccaggugaucguggagcggggcaaccggagcggguacuccggcaucuucagcgucgagggcaaguccugcaucaaccgcugcuucuacguggagcugauccgggggcgcaaggaggagaccgaggugugguggacgagcaacagcaucgucguguucugcggcaccuccgggaccuacggcaccgggagcuggccggacggcgccgacaucaaccugaugcccaucuga

SEQ ID NO: 79975 - RNA, 1410 nt, Artificial Sequence; identical to SEQ ID NO: 78249
  derived and/or modified CDS sequence (opt1) from neuraminidase__InfluenzaA__ABU92831

SEQ ID NO: 79976 - RNA, 1410 nt, Artificial Sequence; identical to SEQ ID NO: 78249
  derived and/or modified CDS sequence (opt1) from neuraminidase__InfluenzaA__ABU92832

SEQ ID NO: 79977 - RNA, 1410 nt, Artificial Sequence; identical to SEQ ID NO: 78249
  derived and/or modified CDS sequence (opt1) from neuraminidase__InfluenzaA__ABU92833

SEQ ID NO: 79978 - RNA, 1410 nt, Artificial Sequence
  derived and/or modified CDS sequence (opt1) from neuraminidase__InfluenzaA__ABU92834
augaaccccaaccagaagaucaucaccaucggcagcgugucccugaccaucgccgccaucugcuuccucaugcacaucgcgauccuggucacgaccgugacccugcacuucaagcagcacgagugcaacagcccgcccaacaaccaggugaugcucugcgagcccaccaucaucgagcgcaacaucacggagaucgucuaccugaccaacaccaccaucgagaaggagaucugccccaagcuggccgaguaccggaacugguccaagccgcagugcaacaucacgggguucgcccccuucagcaaggacaacuccauccgccucagcgccggcggggacaucugggugacccgggagcccuacguguccugcgaccccgacaagugcuaccaguucgcccugggccaggggaccacccugaacaacggccacagcaacgacacgguccacgaccgcaccccguaccggacccuccugaugaacgagcugggcgugcccuuccaccucgggacccgccaggugugcaucgcgugguccagcuccagcugccacgacggcaaggccuggcugcacgucugcgugacgggggacgacgagaacgccaccgccuccuucaucuacaacggccggcugguggacagcaucggguccuggagcaagaagauccuccgcacccaggaguccgagugcgucugcaucaacgggaccugcacgguggugaugaccgacggcagcgcguccgggaaggccgacaccaagauccuguucaucgaggagggcaagaucguccacaucagcacccugagcggguccgcccagcacguggaggagugcagcugcuacccccgguaccccggcgugcgcugcgucugccgggacaacuggaagggcuccaaccgcccgaucguggacaucaacgugaaggacuacagcaucgucuccagcuacgugugcuccgggcucgugggcgacacgccccggaagaacgacagcuucuccagcucccacugccuggaccccaacaacgaggagggcggccacggggucaagggcugggccuucgacgacggcaacgacguguggauggggcgcaccaucagcgagaagcugcgguccggcuacgagaccuucaaggucaucgagggguggagcaagcccaacuccaagcuccagaucaaccgccaggugaucguggagcggggcaaccgcagcggguacuccggcaucuucagcgucgagggcaaguccugcaucaaccggugcuucuacguggagcugauccgcgggcggaaggaggagaccgaggugugguggacgagcaacagcaucgucguguucugcggcaccuccgggaccuacggcaccgggagcuggccggacggcgccgacaucucccugaugcccaucuga

SEQ ID NO: 79979 - RNA, 1410 nt, Artificial Sequence; identical to SEQ ID NO: 78249
  derived and/or modified CDS sequence (opt1) from neuraminidase__InfluenzaA__ABU92835

SEQ ID NO: 79980 - RNA, 1410 nt, Artificial Sequence; identical to SEQ ID NO: 78249
  derived and/or modified CDS sequence (opt1) from neuraminidase__InfluenzaA__ABU92836

SEQ ID NO: 79981 - RNA, 1410 nt, Artificial Sequence
  derived and/or modified CDS sequence (opt1) from neuraminidase__InfluenzaA__ABU92837
augaaccccaaccagaagaucaucaccaucggcagcgugucccugaccaucagcacgaucugcuucuucaugcagaucgccauccucaucaccaccgucacccugcacuucaagcaguacgaguucaacuccccgcccaacaaccaggugaugcugugcgagcccacgaucaucgagcgcaacaucaccgagaucguguaccucaccaacaccacgaucgagaaggagaucugccccaagcuggccgaguaccggaacuggagcaagccgcagugcgacaucaccggguucgcgcccuucuccaaggacaacagcauccgccuguccgccggcggggacaucugggucacccgggagcccuacgugagcugcgaccccgacaagugcuaccaguucgcccucggccaggggaccacgcugaacaacgugcacuccaacgacaccguccacgaccgcaccccguaccggacccugcucaugaacgagcugggcgugcccuuccaccugggcacgaagcaggucugcaucgccuggagcuccagcuccugccacgacgggaaggccuggcuccacgugugcgugaccggcgacgacaagaacgcgaccgccagcuucaucuacaacgggcgccugguggacuccaucgucagcugguccaagaagauccugcggacccaggagagcgagugcgugugcaucaacggcacgugcaccguggucaugaccgacggguccgccagcggcaaggccgacaccaagauccucuucaucgaggagggcaagaucgugcacacgagcacccuguccgggagcgcgcagcacguggaggagugcuccugcuacccccgcuaccccggcguccggugcgugugccgcgacaacuggaaggggagcaaccggccgaucguggacaucaacaucaaggacuacuccaucgccagcuccuacgucugcagcggccuggugggcgacacgccccgcaagaacgacuccagcuccagcucccacugccucgaccccaacaacgaggagggcgggcacggggugaagggcugggccuucgacgacgggaacgacgucuggaugggccggaccaucagcgagaagcugcgcuccggcuacgagaccuucaaggugaucgagggguggagcaaccccaacuccaagcugcagaucaaccggcaggucaucguggaccgcggcaaccggagcggguacuccggcaucuucagcguggagggcaagagcugcgucaaccgcugcuucuacguggagcucauccgggggcgcaaggaggagaccgaggugcuguggaccuccaacagcaucgucguguucugcggcaccuccgggacguacggcaccgggagcuggccggacggcgccgacaucaaccugaugcccaucuga

SEQ ID NO: 79982 - RNA, 1410 nt, Artificial Sequence; identical to SEQ ID NO: 78249
  derived and/or modified CDS sequence (opt1) from neuraminidase__InfluenzaA__ABU92838

SEQ ID NO: 79983 - RNA, 1410 nt, Artificial Sequence; identical to SEQ ID NO: 78085
  derived and/or modified CDS sequence (opt1) from neuraminidase__InfluenzaA__ABU92839

SEQ ID NO: 79984 - RNA, 1410 nt, Artificial Sequence
  derived and/or modified CDS sequence (opt1) from neuraminidase__InfluenzaA__ABU92840
augaaccccaaccagaagaucaucaccaucggcagcgugucccugaccaucgccacgaucugcuuccucaugcagaucgccauccuggucaccaccgugacccugcacuucaagcaguacgagugcaacagcccgcccaacaaccaggugaugcucugcgagcccacgaucaucgagcgcaacaucaccgagaucgucuaccugaccaacaccacgaucgagaaggagaucugccccaagcuggcggaguaccggaacugguccaagccgcagugcaacaucaccggguucgcccccuucagcaaggacaacuccauccgccucagcgccggcggggacaucugggugacccgggagcccuacguguccugcgaccccgacaagugcuaccaguucgcccugggccaggggaccacgcugaacaacggccacagcaacgacaccguccacgaccgcaccccguaccggacccuccugaugaacgagcugggcgugcccuuccaccucgggacgaagcaggucugcaucgccugguccagcuccagcugccacgacggcaaggcguggcugcacgugugcgugaccggggacgacgagaacgccaccgccuccuucaucuacaacggccgccugguggacagcaucggguccuggagcaagaagauccuccggacccaggaguccgagugcgucugcaucaacggcacgugcaccguggugaugaccgacggcagcgccuccgggaaggcggacaccaagauccuguucaucgaggagggcaagaucguccacaucagccugcucagcggguccgcccagcacguggaggagugcagcugcuacccccgcuaccccggcgugcggugcgucugccgcgacaacuggaagggcuccaaccggccgaucguggacaucaacgugaaggacuacagcaucgucuccagcuacgugugcuccgggcuggugggcgacacgccccgcaagaacgacagcuccagcuccagccacugccuggaccccaacaacgaggagggcgggcacggggucaagggcugggccuucgacgacggcaacgacguguggauggggcggaccaucuccgagaagcuccgcagcggcuacgagaccuucaaggucaucgaggggugguccaagcccaacagcaagcugcagaucaaccgccaggugaucguggaccgggacaaccgguccggcuacagcgggaucuucuccgucgagggcaagagcugcaucaaccgcugcuucuacguggagcugauccggggccgcaagcaggagaccgaggugcucuggacgagcaacuccaucgucguguucugcgggaccagcggcaccuacgggaccggcuccuggccggacggggccgacaucaaccugaugcccaucuga

SEQ ID NO: 79985 - RNA, 1410 nt, Artificial Sequence
  derived and/or modified CDS sequence (opt1) from neuraminidase__InfluenzaA__ABU92841
augaaccccaaccagaagaucaucaccaucggcagcgugucccugaccaucgccacgaucugcuuccucaugcagaucgccauccuggucaccaccgugacccugcacuucaagcaguacgagugcaacagcccgcccaacaaccaggugaugcucugcgagcccacgaucaucgagcgcaacaucaccgagaucgucuaccugaccaacaccacgaucgagaaggagaucugccccaagcuggcggaguaccggaacugguccaagccgcagugcaacaucaccggguucgcccccuucagcaaggacaacuccauccgccucagcgccggcggggacaucugggugacccgggagcccuacguguccugcgaccccgacaagugcuaccaguucgcccugggccaggggaccacgcugaacaacggccacagcaacgacaccguccacgaccgcaccccguaccggacccuccugaugaacgagcugggcgugcccuuccaccucgggacgaagcaggucugcaucgccugguccagcuccagcugccacgacggcaaggcguggcugcacgugugcgugaccggggacgacgagaacgccaccgccuccuucaucuacaacggccgccugguggacagcaucggguccuggagcaagaagauccuccggacccaggaguccgagugcgucugcaucaacggcacgugcaccguggugaugaccgacggcagcgccuccgggaaggcggacaccaagauccuguucaucgaggagggcaagaucguccacacgagccugcucagcggguccgcccagcacguggaggagugcagcugcuacccccgcuaccccggcgugcggugcgucugccgcgacaacuggaagggcuccaaccggccgaucguggacaucaacgugaaggacuacagcaucgucuccagcuacgugugcuccgggcuggugggcgacacgccccgcaagaacgacagcuccagcuccagccacugccuggaccccaacaacgaggagggcgggcacggggucaagggcugggccuucgacgacggcaacgacguguggauggggcggaccaucuccgagaagcuccgcagcggcuacgagaccuucaaggucaucgaggggugguccaagcccaacagcaagcugcagaucaaccgccaggugaucguggaccgggacaaccgguccggcuacagcgggaucuucuccgucgagggcaagagcugcaucaaccgcugcuucuacguggagcugauccggggccgcaagcaggagaccgaggugcucuggaccagcaacuccaucgucguguucugcgggaccagcggcaccuacgggacgggcuccuggccggacggggccgacaucaaccugaugcccaucuga

SEQ ID NO: 79986 - RNA, 1410 nt, Artificial Sequence
  derived and/or modified CDS sequence (opt1) from neuraminidase__InfluenzaA__ABU92842
augaaccccaaccagaagaucaucaccaucggcagcgugucccugaccaucgccacgaucugcuuccucaugcagaucgccauccuggucaccaccgugacccugcacuucaagcaguacgacugcaacagcccgcccaacaaccaggugaugcucugcgagcccacgaucaucgagcgcaacaucaccgagaucgucuaccugaccaacaccacgaucgagaaggagaucugccccaagcuggcggaguaccggaacugguccaagccgcagugcaacaucaccggguucgcccccuucagcaaggacaacuccauccgccucagcgccggcggggacaucugggugacccgggagcccuacguguccugcgaccccgacaagugcuaccaguucgcccugggccaggggaccacgcugaacaacggccacagcaacgacaccguccacgaccgcaccccguaccggacccuccugaugaacgagcugggcgugcccuuccaccucgggacgaagcaggucugcaucgccugguccagcuccagcugccacgacggcaaggcguggcugcacgugugcgugaccggggacgacgagaacgccaccgccuccuucaucuacaacggccgccugguggacagcaucggguccuggagcaagaagauccuccggacccaggaguccgagugcgucugcaucaacggcacgugcaccguggugaugaccgacggcagcgccuccgggaaggcggacaccaagauccuguucaucgaggagggcaagaucguccacacgagccugcucagcggguccgcccagcacguggaggagugcagcugcuacccccgcuaccccggcgugcggugcgucugccgcgacaacuggaagggcuccaaccggccgaucguggacaucaacgugaaggacuacagcaucgucuccagcuacgugugcuccgggcuggugggcgacacgccccgcaagaacgacagcuccagcuccagccacugccuggaccccaacaacgaggagggcgggcacggggucaagggcugggccuucgacgacggcaacgacguguggauggggcggaccaucuccgagaagcuccgcagcggcuacgagaccuucaaggucaucgaggggugguccaagcccaacagcaagcugcagaucaaccgccaggugaucguggaccggggcaaccgguccggguacagcggcaucuucuccgucgagggcaagagcugcaucaaccgcugcuucuacguggagcugauccgggggcgcaagcaggagaccgaggugcucuggaccagcaacuccaucgucguguucugcggcaccagcgggaccuacggcacgggguccuggccggacggcgccgacaucaaccugaugcccaucuga

SEQ ID NO: 79987 - RNA, 1410 nt, Artificial Sequence; identical to SEQ ID NO: 78085
  derived and/or modified CDS sequence (opt1) from neuraminidase__InfluenzaA__ABU92843

SEQ ID NO: 79988 - RNA, 1410 nt, Artificial Sequence; identical to SEQ ID NO: 79773
  derived and/or modified CDS sequence (opt1) from neuraminidase__InfluenzaA__ABU92844

SEQ ID NO: 79989 - RNA, 1410 nt, Artificial Sequence; identical to SEQ ID NO: 78085
  derived and/or modified CDS sequence (opt1) from neuraminidase__InfluenzaA__ABU92845

SEQ ID NO: 79990 - RNA, 1410 nt, Artificial Sequence; identical to SEQ ID NO: 78085
  derived and/or modified CDS sequence (opt1) from neuraminidase__InfluenzaA__ABU92846

SEQ ID NO: 79991 - RNA, 1410 nt, Artificial Sequence; identical to SEQ ID NO: 78085
  derived and/or modified CDS sequence (opt1) from neuraminidase__InfluenzaA__ABU92847

SEQ ID NO: 79992 - RNA, 1410 nt, Artificial Sequence; identical to SEQ ID NO: 78085
  derived and/or modified CDS sequence (opt1) from neuraminidase__InfluenzaA__ABU92848

SEQ ID NO: 79993 - RNA, 1410 nt, Artificial Sequence; identical to SEQ ID NO: 78738
  derived and/or modified CDS sequence (opt1) from neuraminidase__InfluenzaA__ABU92849

SEQ ID NO: 79994 - RNA, 1410 nt, Artificial Sequence
  derived and/or modified CDS sequence (opt1) from neuraminidase__InfluenzaA__ABU92850
augaaccccaaccagaagaucaucaccaucggcagcgugucccugaccaucagcacgaucugcuucuucaugcagaucgccauccucaucaccaccgucacccugcacuucaagcaguacgaguucaacuccccgcccaacaaccaggugaugcugugcgagcccacgaucaucgagcgcaacaucaccgagaucguguaccucaccaacaccacgaucgagaaggagaucugccccaagcuggucgaguaccggaacuggagcaagccgcagugcgacaucaccggguucgcccccuucuccaaggacaacagcauccgccuguccgcgggcggggacaucugggugacccgggagcccuacgugagcugcgaccccgacaagugcuaccaguucgcccucggccaggggaccacgcugaacaacguccacuccaacgacaccgugcacgaccgcaccccguaccggacccugcucaugacggagcugggcgugcccuuccaccugggcaccaagcaggucugcaucgccuggagcuccagcuccugccacgacgggaaggccuggcuccacgugugcgugaccggcgacgacaagaacgccaccgcgagcuucaucuacaacgggcgccuggucgacuccaucgugagcugguccaagaagauccugcggacgcaggagagcgagugcgugugcaucaacgggaccugcaccgucgugaugaccgacggguccgccagcggcaaggccgacacgaagauccucuucaucgaggagggcaagaucgugcacaccagcacccuguccgggagcgcccagcacgucgaggagugcuccugcuacccccgcuaccccggcgugcggugcgugugccgcgacaacuggaaggggagcaaccggccgaucgucgacaucaacaucaaggacuacuccaucgugagcuccuacgugugcagcggccuggucggcgacacgccccgcaagaacgacuccagcuccagcucccacugccucgaccccaacaacgaggagggcggccacggggugaagggcugggcguucgacgacgggaacgacgucuggaugggccggaccaucagcgagaagcugcgcuccggcuacgagaccuucaaggugaucgagggguggagcaaccccaacuccaagcugcagaucaaccgccaggugaucgucgaccggggcaaccggagcggguacuccggcaucuucagcguggagggcaagagcugcaucaaccgcugcuucuacguggagcucauccgggggcgcaaggaggagaacgagguccuguggaccuccaacagcaucgugguguucugcggcaccuccgggacguacggcaccgggagcuggccggacggcgccgacaucaaccugaugcccaucuga

SEQ ID NO: 79995 - RNA, 1410 nt, Artificial Sequence
  derived and/or modified CDS sequence (opt1) from neuraminidase__InfluenzaA__ABU92851
augaaccccaaccagaagaucaucaccaucggcagcgugucccugaccaucagcacgaucugcuucuucaugcagaucgccauccucaucaccaccgucacccugcacuucaagcaguacgaguucaacuccccgcccaacaaccaggugaugcugugcgagcccacgaucaucgagcgcaacaucaccgagaucguguaccucaccaacaccacgaucgagaaggagaucugccccaagcuggccgaguaccggaacuggagcaagccgcagugcuccaucaccggguucgcgcccuucagcaaggacaacuccauccgccugagcgccggcggggacaucugggucacccgggagcccuacguguccugcgaccccgacaagugcuaccaguucgcccucggccaggggaccacgcugaacaacgugcacagcaacgacaccguccacgaccgcaccccguaccggacccugcucaugaacgagcugggcgugcccuuccaccugggcacgaagcaggucugcaucgccugguccagcuccagcugccacgacgggaaggccuggcuccacgugugcgugaccggcgacgacaagaacgcgaccgccuccuucaucuacaacgggcgccugguggacagcaucgucuccuggagcaaggagauccugcggacccaggaguccgagugcgugugcaucaacggcacgugcaccguggucaugaccgacgggagcgccagcggcaaggccgacaccaagauccucuucaucgaggagggcaagaucgugcacacguccacccugagcggguccgcgcagcacguggaggagugcagcugcuacccccgcuaccccggcguccggugcgugugccgcgacaacuggaagggguccaaccggccgaucguggacaucaacaucaaggacuacagcaucgucuccagcuacgugugcuccggccuggugggcgacacgccccgcaaggacgacagcuccagcuccagccacugccucgaccccaacaacgaggagggcgggcacggggucaagggcugggccuucgacgacgggaacgacguguggaugggccggaccaucuccgagaagucccgcagcggcuacgagaccuucaaggucaucgagggguggagcaaccccaacuccaagcugcagaucaaccgccaggugaucguggaccggggcaaccggagcggguacagcggcaucuucuccgucgagggcaagagcugcaucaaccgcugcuucuacguggagcugauccgggggcgcaaggaggagaccgaggugcucuggaccuccaacagcaucgucguguucugcggcaccuccgggacguacggcaccgggagcuggccggacggcgccgacaucaaccugaugcccaucuga

SEQ ID NO: 79996 - RNA, 1410 nt, Artificial Sequence; identical to SEQ ID NO: 78249
  derived and/or modified CDS sequence (opt1) from neuraminidase__InfluenzaA__ABU92852

SEQ ID NO: 79997 - RNA, 1410 nt, Artificial Sequence
  derived and/or modified CDS sequence (opt1) from neuraminidase__InfluenzaA__ABU92853
augaaccccaaccagaagaucaucaccaucggcagcgugucccugaccaucgccgccaucugcuuccucaugcagaucgcgauccuggucacgaccgugacccugcacuucaagcagcacgagugcaacagcccgcccaagaaccaggugaugcucugcgagcccaccaucaucgagcgcaacaucacggagaucgucuacaugaccaacaccaccaucgagaaggagaucugccccaagcuggccgaguaccggaacugguccaagccgcagugcaacaucacgggguucgcccccuucagcaaggacaacuccauccgccugagcgccggcggggacaucugggugacccgggagcccuacguguccugcgaccccgacaagugcuaccaguucgcccucggccaggggaccacccugaacaacggccacagcaacgacacgguccacgaccgcaccccguaccggacccugcucaugaacgagcugggcgugcccuuccaccuggggacccgccaggugugcaucgcgugguccagcuccagcugccacgacggcaaggccuggcuccacgucugcgugacgggggacgacaagaacgccaccgccuccuucaucuacaacggccggcugguggacagcaucgucuccuggagcaagaagauccugcgcacccaggaguccgagugcgugugcaucaacgggaccugcacgguggucaugaccgacggcagcgcguccggcaaggccgacaccaagauccucuucaucgaggaggggaagaucgugcacaucagcacccugagcggcuccgcccagcacguggaggagugcagcugcuacccccgguaccccgggguccgcugcgugugccgggacaacuggaagggcuccaaccgcccgaucguggacaucaacgucaaggacuacagcaucguguccagcuacgugugcuccggccuggucggggacacgccccggaagaacgacagcuucuccagcucccacugccucgaccccaacaacgaggagggcgggcacggcgugaaggggugggccuucgacgacggcaacgacgucuggaugggccgcaccaucagcgagaagcugcgguccggguacgagaccuucaaggugaucgagggcuggagcaagcccaacuccaagcugcagaucaaccgccaggugaucgucgagcgggggaaccgcagcggcuacuccgggaucuucagcguggagggcaaguccugcaucaaccggugcuucuacguggagcucauccgcggccggaaggaggagaccgaggucugguggacgagcaacagcaucgugguguucugcgggaccuccggcaccuacgggaccggcagcuggccggacggggccgacaucaaccugaugcccaucuga

SEQ ID NO: 79998 - RNA, 1410 nt, Artificial Sequence; identical to SEQ ID NO: 78249
  derived and/or modified CDS sequence (opt1) from neuraminidase__InfluenzaA__ABU92854

SEQ ID NO: 79999 - RNA, 1410 nt, Artificial Sequence
  derived and/or modified CDS sequence (opt1) from neuraminidase__InfluenzaA__ABU92855
augaaccccaaccagaagaucaucaccaucggcagcgugucccugaccaucgccgccaucugcuuccucaugcagaucgcgauccuggucacgaccgugacccugcacuucaagcagcacgagugcaacagcccgcccaacaaccaggugaugcucugcgagcccaccaucaucgagcgcaacaucacggagaucgucuaccugaccaacaccaccaucgagaaggagaucugccccaagcuggccgaguaccggaacugguccaagccgcagugcaacaucacgggguucgcccccuucagcaaggacaacuccauccgccucagcgccggcggggacaucugggugacccgggagcccuacguguccugcgaccccgacaagugcuaccaguucgcccugggccaggggaccacccugaacaacggccacagcaacgacacgguccacgaccgcaccccguaccggacccuccugaugaacgagcugggcgugcccuuccaccucgggacccgccaggugugcaucgcgugguccagcuccagcugccacgacggcaaggccuggcugcacgucugcgugacgggggacgacaagaacgccaccgccuccuucaucuacaacggccggcugguggacagcaucggguccuggagcaagaagauccuccgcacccaggaguccgagugcgucugcaucaacgggaccugcacgguggugaugaccgacggcagcgcguccgggaaggccgacaccaagauccuguucaucgaggagggcaagaucguccacaucagcacccugagcggguccgcccagcacguggaggagugcagcugcuacccccgguaccccggcgugcgcugcgucugccgggacaacuggaagggcuccaaccgcccgaucguggacaucaacgugaaggacuacagcaucgucuccagcuacgugugcuccgggcucgugggcgacacgccccggaagaacgacagcuucuccagcucccacugccuggaccccaacaacgaggagggcggccacggggucaagggcugggccuucgacgacggcaacgacguguggauggggcgcaccaucagcgagaagcugcgguccggcuacgagaccuucaaggucaucgagggguggagcaagcccaacuccaagcuccagaucaaccgccaggugaucaucgagcggggcaaccgcagcggguacuccggcaucuucagcguggagggcaaguccugcaucaaccggugcuucuacgucgagcugauccgcgggcggaaggaggagaccgaggugugguggacgagcaacagcaucguggucuucugcggcaccuccgggaccuacggcaccgggagcuggccggacggcgccgacaucaaccugaugcccaucuga

SEQ ID NO: 80000 - RNA, 1410 nt, Artificial Sequence; identical to SEQ ID NO: 78169
  derived and/or modified CDS sequence (opt1) from neuraminidase__InfluenzaA__ABU92856

SEQ ID NO: 80001 - RNA, 1410 nt, Artificial Sequence; identical to SEQ ID NO: 78249
  derived and/or modified CDS sequence (opt1) from neuraminidase__InfluenzaA__ABU92857

SEQ ID NO: 80002 - RNA, 1410 nt, Artificial Sequence
  derived and/or modified CDS sequence (opt1) from neuraminidase__InfluenzaA__ABU92858
augaaccccaaccagaagaucaucaccaucggcagcgugucccugaccaucagcacgaucugcuucuucaugcagaucgccauccucaucaccaccgucacccugcacuucaagcaguacgaguucaacuccccgcccaacaaccaggugauccugugcgagcccacgaucaucgagcgcaacaucaccgagaucguguaccucaccaacaccacgaucgagaaggagaucugccccaagcuggccgaguaccggaacuggagcaagccgcagugcgacaucaccggguucgcgcccuucuccaaggacaacagcauccgccuguccgccggcggggacaucugggucacccgggagcccuacgugagcugcgaccccgacaagugcuaccaguucgcccucggccaggggaccacgcugaacaacgugcacuccaacgacaccguccacgaccgcaccccguaccggacccugcucaugaacgagcugggcgugcccuuccaccugggcacgaagcaggucugcaucgccuggagcuccagcuccugccacgacgggaaggccuggcuccacgugugcgugaccggcgacgacaagaacgcgaccgccagcuucaucuacaacgggcgccugguggacuccaucgucagcugguccaagaagauccugcggacccaggagagcgagugcgugugcaucaacggcacgugcaccguggucaugaccgacggguccgccagcggcaaggccgacaccaagauccucuucaucgaggagggcaagaucgugcacacgagcacccuguccgggagcgcgcagcacguggaggagugcuccugcuacccccgcuaccccggcguccggugcgugugccgcgacaacuggaaggggagcaaccggccgaucguggacaucaacaucaaggacuacuccaucgucagcuccuacgugugcagcggccuggugggcgacacgccccgcaagaacgacuccagcuccagcucccacugccucgaccccaacaacgaggagggcgggcacggggucaagggcugggccuucgacgacgggaacgacguguggaugggccggaccaucagcgagaagcugcgcuccggcuacgagaccuucaaggucaucgagggguggagcaaccccaacuccaagcugcagaucaaccgccaggugaucguggaccggggcaaccggagcggguacuccggcaucuucagcgucgagggcaagagcugcaucaaccgcugcuucuacguggagcucauccgggggcgcaaggaggagaccgaggugcuguggaccuccaacagcaucgucguguucugcggcaccuccgggacguacggcaccgggagcuggccggacggcgccgacaucaaccugaugcccaucuga

SEQ ID NO: 80003 - RNA, 1410 nt, Artificial Sequence
  derived and/or modified CDS sequence (opt1) from neuraminidase__InfluenzaA__ABU92859
augaaccccaaccagaagaucaucaccaucggcagcgugucccugaccaucgccgccaucugcuuccucaugcagaucgcgauccuggucacgaccgugacccugcacuucaagcagcacgagugcaacagcccgcccaacaaccaggugaugcucugcgagcccaccaucaucgagcgcaacaucacggagaucgucuaccugaccaacaccaccaucgagaaggagaucugccccaagcuggccggguaccggaacugguccaagccgcagugcaacaucacgggcuucgcccccuucagcaaggacaacuccauccgccucagcgccgggggcgacaucugggugacccgggagcccuacguguccugcgaccccgacaagugcuaccaguucgcccuggggcagggcaccacccugaacaacggccacagcaacgacacgguccacgaccgcaccccguaccggacccuccugaugaacgagcugggggugcccuuccaccucggcacccgccaggugugcaucgcgugguccagcuccagcugccacgacgggaaggccuggcugcacgucugcgugacgggcgacgacaagaacgccaccgccuccuucaucuacaacgggcggcugguggacagcaucggcuccuggagcaagaagauccuccgcacccaggaguccgagugcgucugcaucaacgggaccugcacgguggugaugaccgacggcagcgcguccggcaaggccgacaccaagauccuguucaucgaggaggggaagaucguccacaucagcacccugagcggcuccgcccagcacguggaggagugcagcugcuacccccgguaccccggcgugcgcugcgucugccgggacaacuggaagggguccaaccgcccgaucguggacaucaacgugaaggacuacagcaucgucuccagcuacgugugcuccggccucgugggggacacgccccggaagaacgacagcuucuccagcucccacugccuggaccccaacaacgaggagggcgggcacggcgucaagggcugggccuucgacgacgggaacgacguguggaugggccgcaccaucagcgagaagcugcgguccggguacgagaccuucaaggucaucgagggcuggagcaagcccaacuccaagcuccagaucaaccgccaggugaucguggagcgggggaaccgcagcggcuacuccggcaucuucagcgucgaggggaaguccugcaucaaccggugcuucuacguggagcugauccgcggccggaaggaggagaccgaggugugguggacgagcaacagcaucgucguguucugcgggaccuccggcaccuacgggaccggcagcuggccggacggcgccgacaucaaccugaugcccaucuga

SEQ ID NO: 80004 - RNA, 1410 nt, Artificial Sequence
  derived and/or modified CDS sequence (opt1) from neuraminidase__InfluenzaA__ABU92860
augaaccccaaccagaagaucaucaccaucggcagcgugucccugaccaucgccgccaucugcuuccucaugcagaucgcgauccuggucacgaccgugacccugcacuucaagcagcacgagugcaacagcccgcccaacaaccaggugaugcucugcgagcccaccaucaucgagcgcaacaucacggagaucgucuaccugaccaacaccaccaucgagaaggagaucugccccaagcuggccgaguaccggaacugguccaagccgcagugcaacaucacgggguucgcccccuucagcaaggacaacuccauccgccucagcgccggcggggacaucugggugacccgggagcccuacguguccugcgaccccgacaagugcuaccaguucgcccugggccaggggaccacccugaacaacggccacagcaacgacacgguccacgaccgcaccccguaccggacccuccugaugaacgagcugggcgugcccuuccaccucgggacccgccaggugugcaucgcgugguccagcuccagcugccacgacggcaaggccuggcugcacgucugcgugacgggggacgacaagaacgccaccgccuccuucaucuacaacggccggcugguggacagcaucggguccugguacaagaagauccuccgcacccaggagagcgagugcgucugcaucaacgggaccugcacgguggugaugaccgacggcuccgcgagcgggaaggccgacaccaagauccuguucaucgaggagggcaagaucguccacaucuccacccugagcgggagcgcccagcacguggaggagugcuccugcuacccccgguaccccggcgugcgcugcgucugccgggacaacuggaagggcagcaaccgcccgaucguggacaucaacgugaaggacuacuccaucaucagcuccuacgucugcagcgggcucgugggcgacacgccccggaagaacgacuccuucagcuccagccacugccuggaccccaacaacgaggagggcggccacggggugaagggcugggccuucgacgacggcaacgacgucuggauggggcgcaccaucuccgagaagcugcggagcggcuacgagaccuucaaggugaucgaggggugguccaagcccaacagcaagcuccagaucaaccgccaggucaucguggagcggggcaaccgcuccggguacagcggcaucuucuccguggagggcaagagcugcaucaaccggugcuucuacgucgagcugauccgcgggcggaaggaggagaccgaggugugguggacguccaacagcaucguggucuucugcggcaccagcgggaccuacggcaccggguccuggccggacggcgccgacaucaaccugaugcccaucuga

SEQ ID NO: 80005 - RNA, 1410 nt, Artificial Sequence
  derived and/or modified CDS sequence (opt1) from neuraminidase__InfluenzaA__ABU92861
augaaccccaaccagaagaucaucaccaucggcagcgugucccugaccaucgccgccaucugcuuccucaugcagaucgcgauccuggucacgaccgugacccugcacuucaagcagcacgagugcaacagcccgcccaacaaccaggugaugcucugcgagcccaccaucaucgagcgcaacaucacggagaucgucuaccugaccaacaccaccaucgagaaggagaucugccccaagcuggccgaguaccggaacugguccaagccgcagugcaacaucacgggguucgcccccuucagcaaggacaacuccauccgccucagcgccggcggggacaucugggugacccgggagcccuacguguccugcgaccccgacaagugcuaccaguucgcccugggccaggggaccacccugaacaacggccacagcaacgacacgguccacgaccgcaccccguaccggacccuccugaugaacgagcugggcgugcccuuccaccucgggacccgccaggugugcauggcgugguccagcuccagcugccacgacggcaaggccuggcugcacgucugcgugacgggggacgacaagaacgccaccgccuccuucaucuacaacggccggcugguggacagcaucggguccuggagcaagaagauccuccgcacccaggaguccgagugcgucugcaucaacgggaccugcacgguggugaugaccgacggcagcgcguccgggaaggccgacaccaagauccuguucaucgaggagggcaagaucguccacaucagcacccugagcggguccgcccagcacguggaggagugcagcugcuacccccgguaccccggcgugcgcugcgucugccgggacaacuggaagggcuccaaccgcccgaucguggacaucaacgugaaggacuacagcaucgucuccagcuacgugugcuccgggcucgugggcgacacgccccggaagaacgacagcuucuccagcucccacugccuggaccccaacaacgaggagggcggccacggggucaagggcugggccuucgacgacggcaacgacguguggauggggcgcaccaucagcgagaagcugcgguccggcuacgagaccuucaaggucaucgagggguggagcaagcccaacuccaagcuccagaucaaccgccaggugaucguggagcggggcaaccgcagcggguacuccggcaucuucagcgucgagggcaaguccugcaucaaccggugcuucuacguggagcugauccgcgggcggaaggaggagaccgaggugugguggacgagcaacagcaucgucguguucugcggcaccuccgggaccuacggcaccgggagcuggccggacggcgccgacaucaaccugaugcccaucuga

SEQ ID NO: 80006 - RNA, 1410 nt, Artificial Sequence
  derived and/or modified CDS sequence (opt1) from neuraminidase__InfluenzaA__ABU92862
augaaccccaaccagaagaucaucaccaucggcagcgugucccugaccaucgccgccaucugcuuccucaugcagaucgcgauccuggucacgaccgugacccugcacuucaagcagcacgagugcaacagcccgcccaacaaccaggugaugcucugcgagcccaccaucaucgagcgcaacaucacggagaucgucuaccugaccaacaccaccaucgagaaggagaucugccccaagcuggccgaguaccggaacugguccaagccgcagugcaacaucacgggguucgcccccuucagccgcgacaacuccauccggcucagcgccggcggggacaucugggugacccgcgagcccuacguguccugcgaccccgacaagugcuaccaguucgcccugggccaggggaccacccugaacaacggccacagcaacgacacgguccacgaccggaccccguaccgcacccuccugaugaacgagcugggcgugcccuuccaccucgggacccgccaggugugcaucgcgugguccagcuccagcugccacgacggcaaggccuggcugcacgucugcgugacgggggacgacaagaacgccaccgccuccuucaucuacaacggccggcugguggacagcaucggguccuggagcaagaagauccuccggacccaggaguccgagugcgucugcaucaacgggaccugcacgguggugaugaccgacggcagcgcguccgggaaggccgacaccaagauccuguucaucgaggagggcaagaucguccacaucagcacccugagcggguccgcccagcacguggaggagugcagcugcuacccccgcuaccccggcgugcggugcgucugccgcgacaacuggaagggcuccaaccggccgaucguggacaucaacgugaaggacuacagcaucgucuccagcuacgugugcuccgggcucgugggcgacacgccccgcaagaacgacagcuucuccagcucccacugccuggaccccaacaacgaggagggcggccacggggucaagggcugggccuucgacgacggcaacgacguguggauggggcggaccaucagcgagaagcugcgcuccggcuacgagaccuucaaggucaucgagggguggagcaagcccaacuccaagcuccagaucaaccgccaggugaucguggagcggggcaaccggagcggguacuccggcaucuucagcgucgagggcaaguccugcaucaaccgcugcuucuacguggagcugauccgggggcgcaaggaggagaccgaggugugguggacgagcaacagcaucgucguguucugcggcaccuccgggaccuacggcaccgggagcuggccggacggcgccgacaucaaccugaugcccaucuga

SEQ ID NO: 80007 - RNA, 1410 nt, Artificial Sequence; identical to SEQ ID NO: 78249
  derived and/or modified CDS sequence (opt1) from neuraminidase__InfluenzaA__ABU92863

SEQ ID NO: 80008 - RNA, 1410 nt, Artificial Sequence
  derived and/or modified CDS sequence (opt1) from neuraminidase__InfluenzaA__ABU92865
augaaccccaaccagaagaucaucaccaucggcagcgugucccugaccaucagcacgaucugcuucuucaugcagaucgccauccucaucaccaccgucacccugcacuucaagcaguacgaguucaacuccccgcccaacaaccaggugaugcugugcgagcccacgaucaucgagcgcaacaucaccgagaucguguaccucaccaacaccacgaucgagaaggagaucugccccaagcuggccgaguaccggaacuggagcaagccgcagugcgacaucaccggguucgcgcccuucuccaaggacaacagcauccgccuguccgccggcggggacaucugggucacccgggagcccuacgugagcugcgaccucgacaagugcuaccaguucgcccugggccaggggaccacgcugaacaacgugcacuccaacgacaccguccacgaccgcacccccuaccggacccuccugaugaacgagcugggcgugccguuccaccucggcacgaagcaggucugcaucgccuggagcuccagcuccugccacgacgggaaggccuggcugcacgugugcgugaccggcgacgacaagaacgcgaccgccagcuucaucuacaacgggcgccugguggacuccaucgucagcugguccaagaagauccuccggacccaggagagcgagugcgugugcaucaacggcacgugcaccguggucaugaccgacggguccgccagcggcaaggccgacaccaagauccuguucaucgaggagggcaagaucgugcacacgagcacccuguccgggagcgcgcagcacguggaggagugcuccugcuacccccgcuaccccggcguccggugcgugugccgcgacaacuggaaggggagcaaccggcccaucguggacaucaacaucaaggacuacuccaucgucagcuccuacgugugcagcggccucgugggcgacaccccgcgcaagaacgacuccagcuccagcucccacugccuggaccccaacaacgaggagggcgggcacggggucaagggcugggccuucgacgacgggaacgacguguggaugggccggaccaucagcgagaagcugcgcuccggcuacgagacguucaaggucaucgagggguggagcaaccccaacuccaagcuccagaucaaccgccaggugaucguggaccggggcaaccggagcggguacuccggcaucuucagcgucgagggcaagagcugcaucaaccgcugcuucuacguggagcugauccgggggcgcaaggaggagaccgaggugcuguggaccuccaacagcaucgucguguucugcggcaccuccgggacguacggcaccgggagcuggcccgacggcgccgacaucaaccucaugccgaucuga

SEQ ID NO: 80009 - RNA, 1410 nt, Artificial Sequence
  derived and/or modified CDS sequence (opt1) from neuraminidase__InfluenzaA__ABU92866
augaaccccaaccagaagaucaucaccaucggcagcgugucccugaccaucagcacgaucugcuucuucaugcagaucgccauccucaucaccaccgucacccugcacuucaagcaguacgaguucaacuccccgcccaacaaccaggugaugcugugcgagcccacgaucaucgagcgcaacaucaccgagaucguguaccucaccaacaccacgaucgagaaggaggucugccccaagcuggccgaguaccggaacuggagcaagccgcagugcgacaucaccggguucgcgcccuucuccaaggacaacagcauccgccuguccgccggcggggacaucugggugacccgggagcccuacgugagcugcgaccccgacaagugcuaccaguucgcccucggccaggggaccacgcugaacaacguccacuccaacgacaccgugcacgaccgcaccccguaccggacccugcucaugaacgagcugggcgugcccuuccaccugggcacgaagcaggucugcaucgccuggagcuccagcuccugccacgacgggaaggccuggcuccacgugugcgugaccggcgacgacaagaacgcgaccgccagcuucaucuacaacgggcgccuggucgacuccaucgugagcugguccaaggagauccugcggacccaggagagcgagugcgugugcaucaacggcacgugcaccgucgugaugaccgacggguccgccagcggcaaggccgacaccaagauccucuucaucgaggagggcaagaucgugcacacgagcacccuguccgggagcgcgcagcacgucgaggagugcuccugcuacccccgcuaccccggcgugcggugcgugugccgcgacaacuggaaggggagcaaccggccgaucgucgacaucaacaucaaggacuacuccaucgugagcuccuacgugugcagcggccuggucggcgacacgccccgcaagaacgacuccagcuccaacagccacugccucgaccccaacaacgaggagggcgggcacggggugaagggcugggccuucgacgacgggaacgacgucuggaugggccggaccaucuccgagaagcugcgcagcggcuacgagaccuucaaggugaucgaggggugguccaaccccaacagcaagcugcagaucaaccgccaggugaucgucgaccggggcaaccgguccggguacagcggcaucuucuccguggagggcaagagcugcaucaaccgcugcuucuacguggagcucauccgggggcgcaaggaggagaccgagguccuguggaccagcaacuccaucgugguguucugcggcaccagcgggacguacggcaccggguccuggccggacggcgccgacaucaaccugaugcccaucuga

SEQ ID NO: 80010 - RNA, 1410 nt, Artificial Sequence; identical to SEQ ID NO: 78831
  derived and/or modified CDS sequence (opt1) from neuraminidase__InfluenzaA__ABU92867

SEQ ID NO: 80011 - RNA, 1410 nt, Artificial Sequence; identical to SEQ ID NO: 79938
  derived and/or modified CDS sequence (opt1) from neuraminidase__InfluenzaA__ABU92868

SEQ ID NO: 80012 - RNA, 1410 nt, Artificial Sequence; identical to SEQ ID NO: 78718
  derived and/or modified CDS sequence (opt1) from neuraminidase__InfluenzaA__ABU92869

SEQ ID NO: 80013 - RNA, 1410 nt, Artificial Sequence; identical to SEQ ID NO: 79908
  derived and/or modified CDS sequence (opt1) from neuraminidase__InfluenzaA__ABU92870

SEQ ID NO: 80014 - RNA, 1410 nt, Artificial Sequence
  derived and/or modified CDS sequence (opt1) from neuraminidase__InfluenzaA__ABU92872
augaaccccaaccagaagaucaucaccaucggcagcgugucccugaccaucgccgccaucugcuuccucaugcagaucgcgauccuggucacgaccgugacccugcacuucaagcagcacgagugcaacagcccgcccaacaaccaggugaugcucugcgagcccaccaucaucgagcgcaacaucacggagaucgucuaccugaccaacaccaccaucgagaaggagaucugccccaagcuggccgaguaccggaacugguccaagccgcagugcaacaucacgggguucgcccccuucagcaaggacaacuccauccgccucagcgccggcggggacaucugggugacccgggagcccuacguguccugcgaccccgacaagugcuaccaguucgcccugggccaggggaccacccugaacaacggccacagcaacgacacgguccacgaccgcaccccguaccggacccuccugaugaacgagcugggcgugcccuuccaccucgggacccgccaggugugcaucgcgugguccagcuccagcugccacgacggcaaggccuggcugcacgucugcgugacgggggacgacaagaacgccaccgccuccuucaucuacaacggccggcugguggacagcaucggguccuggagcaagaagauccuccgcacccaggaguccgagugcgucugcaucaacgggaccugcacgguggugaugaccgacggcagcgcguccgggaaggccgacaccaagauccuguucaucgaggagggcaagaucguccacaucagcacccugagcggguccgcccagcacguggaggagugcagcugcuacccccgguaccccggcgugcgcugcgucugccgggacaacuggaagggcuccaaccgcccgaucguggacaucaacgugaaggacuacaacaucgucagcuccuacgugugcagcgggcucgugggcgacacgccccggaagaacgacuccuucagcuccagccacugccuggaccccaacaacgaggagggcggccacggggucaagggcugggccuucgacgacggcaacgacguguggauggggcgcaccaucuccgagaagcugcggagcggcuacgagaccuucaaggucaucgaggggugguccaagcccaacagcaagcuccagaucaaccgccaggugaucguggagcggggcaaccgcuccggguacagcggcaucuucuccgucgagggcaagagcugcaucaaccggugcuucuacguggagcugauccgcgggcggaaggaggagaccgaggugugguggacguccaacagcaucgucguguucugcggcaccagcgggaccuacggcaccggguccuggccggacggcgccgacaucaaccugaugcccaucuga

SEQ ID NO: 80015 - RNA, 1410 nt, Artificial Sequence
  derived and/or modified CDS sequence (opt1) from neuraminidase__InfluenzaA__ABU92873
augaaccccaaccagaagaucaucaccaucggcagcgugucccugaccaucagcacgaucugcuucuucaugcagaucgccauccucaucaccaccgucacccugcacuucaagcaguacgaguucaacuccccgcccaacaaccaggugaugcugugcgagcccacgaucaucgagcgcaacaucaccgagaucguguaccucaccaacaccacgaucgagaaggagaucugccccaagcuggccgaguaccggaacuggagcaagccgcagugcaacaucaccggguucgcgcccuucuccaaggacaacagcauccgccuguccgccggcggggacaucugggucacccgggagcccuacgugagcugcgaccccgacaagugcuaccaguucgcccucggccaggggaccacgcugaacaacgugcacuccaacgacaccguccacgaccgcaccccguaccggacccugcucaugaacgagcugggcgugcccuuccaccugggcacgaagcaggucugcaucgccuggagcuccagcuccugccacgacgggaaggccuggcuccacgugugcgugaccggcgacgacgagaacgcgaccgccagcuucaucuacaacgggcgccugguggacuccaucgucagcugguccaagaagauccugcggacccaggagagcgagugcgugugcaucaacggcacgugcaccguggucaugaccgacggguccgccagcggcaaggccgacaccaagauccucuucaucgaggagggcaagaucgugcacacgagcacccuguccgggagcgcgcagcacguggaggagugcuccugcuacccccgcuaccccggcguccggugcgugugccgcgacaacuggaaggggagcaaccggccgaucguggacaucaacaucaaggacuacuccaucgucagcuccuacgugugcagcggccuggugggcgacacgccccgcaagaacgacuccagcuccagcucccacugccucgaccccaacaacgaggagggcgggcacggggucaagggcugggccuucgacgacgggaacgacguguggaugggccggaccaucagcgagaagcugcgcuccggcuacgagaccuucaaggucaucgagggguggagcaaccccaacuccaagcugcagaucaaccgccaggugaucguggaccggggcaaccggagcggguacuccggcaucuucagcgucgagggcaagagcugcaucaaccgcugcuucuacguggagcucauccgggggcgcaagcaggagaccgaggugcuguggaccuccaacagcaucgucguguucugcggcaccuccgggacguacggcaccgggagcuggccggacggcgccgacaucaacaucaugcccaucuga

SEQ ID NO: 80016 - RNA, 1410 nt, Artificial Sequence; identical to SEQ ID NO: 79953
  derived and/or modified CDS sequence (opt1) from neuraminidase__InfluenzaA__ABU92874

SEQ ID NO: 80017 - RNA, 1410 nt, Artificial Sequence; identical to SEQ ID NO: 78249
  derived and/or modified CDS sequence (opt1) from neuraminidase__InfluenzaA__ABU92875

SEQ ID NO: 80018 - RNA, 1410 nt, Artificial Sequence; identical to SEQ ID NO: 78249
  derived and/or modified CDS sequence (opt1) from neuraminidase__InfluenzaA__ABU92876

SEQ ID NO: 80019 - RNA, 1410 nt, Artificial Sequence; identical to SEQ ID NO: 78169
  derived and/or modified CDS sequence (opt1) from neuraminidase__InfluenzaA__ABU92877

SEQ ID NO: 80020 - RNA, 1410 nt, Artificial Sequence; identical to SEQ ID NO: 78249
  derived and/or modified CDS sequence (opt1) from neuraminidase__InfluenzaA__ABU92878

SEQ ID NO: 80021 - RNA, 1410 nt, Artificial Sequence
  derived and/or modified CDS sequence (opt1) from neuraminidase__InfluenzaA__ABU92879
augaaccccaaccagaagaucaucaccaucggcagcgugucccugaccaucgccacgaucugcuuccucaugcagaucgccauccuggucaccaccgugacccugcacuucaagcagcacgagugcaacagcccgcccaacaaccaggugaugcucugcgagcccacgaucaucgagcgcaacaucaccgagaucgucuaccugaccaacaccacgaucgagaaggagaucugccccaagcuggcggaguaccggaacugguccaagccgcagugcaacaucaccggguucgcccccuucagcaaggacaacuccauccgccucagcgccggcggggacaucugggugacccgggagcccuacguguccugcgaccccgacaagugcuaccaguucgcccugggccaggggaccacgcugaacaacggccacagcaacgacaccguccacgaccgcaccccguaccggacccuccugaugaacgagcugggcgugcccuuccaccucgggacgcgccaggugugcaucgccugguccagcuccagcugccacgacggcaaggcguggcugcacgucugcgugaccggggacgacaagaacgccaccgccuccuucaucuacaacggccggcugguggacagcaucggguccuggagcaagaagauccuccgcacccaggaguccgagugcgucugcaucaacggcacgugcaccguggugaugaccgacggcagcgccuccgggaaggcggacaccaagauccuguucaucgaggagggcaagaucguccacaucagcacgcugagcggguccgcccagcacguggaggagugcagcugcuacccccgguaccccggcgugcgcugcgucugccgggacaacuggaagggcuccaaccgcccgaucguggacaucaacgugaaggacuacagcaucgucuccagcuacgugugcuccgggcucgugggcgacacgccccggaagaacgacagcuucuccagcucccacugccuggaccccaacaacgaggagggcgggcacggggucaagggcugggccuucgacgacggcaacgacguguggauggggcgcaccaucagcgagaagcugcgguccggcuacgagaccuucaaggucaucgagggguggagcaagcccaacuccaagcuccagaucaaccgccaggugaucguggagcggggcaaccgcagcggguacuccggcaucuucagcgucgagggcaaguccugcaucaaccggugcuucuacguggagcugauccgcgggcggaagggcgagaccgaggugugguggaccagcaacagcaucgucguguucugcgggaccuccggcaccuacgggacgggcagcuggccggacggcgccgacaucaaccugaugcccaucuga

SEQ ID NO: 80022 - RNA, 1410 nt, Artificial Sequence; identical to SEQ ID NO: 80014
  derived and/or modified CDS sequence (opt1) from neuraminidase__InfluenzaA__ABU92880

SEQ ID NO: 80023 - RNA, 1410 nt, Artificial Sequence; identical to SEQ ID NO: 78249
  derived and/or modified CDS sequence (opt1) from neuraminidase__InfluenzaA__ABU92881

SEQ ID NO: 80024 - RNA, 1410 nt, Artificial Sequence; identical to SEQ ID NO: 78249
  derived and/or modified CDS sequence (opt1) from neuraminidase__InfluenzaA__ABU92882

SEQ ID NO: 80025 - RNA, 1410 nt, Artificial Sequence
  derived and/or modified CDS sequence (opt1) from neuraminidase__InfluenzaA__ABU92883
augaaccccaaccagaagaucaucaccaucggcagcgugucccugaccaucgccgccaucugcuuccucaugcagaucgcgauccuggucacgaccgugacccugcacuucaagcagcacgagugcaacagcccgcccaagaaccaggugaugcucugcgagcccaccaucaucgagcgcaacaucacggagaucgucuaccugaccaacaccaccaucgagaaggagaucugccccaagcuggccgaguaccggaacugguccaagccgcagugcaacaucacgggguucgcccccuucagcaaggacaacuccauccgccucagcgccggcggggacaucugggugacccgggagcccuacguguccugcgaccccgacaagugcuaccaguucgcccugggccaggggaccacccugaacaacggccacagcaacgacacgguccacgaccgcaccccguaccggacccuccugaugaacgagcugggcgugcccuuccaccucgggacccgccaggugugcaucgcgugguccagcuccagcugccacgacggcaaggccuggcugcacgucugcgugacgggggacgacaagaacgccaccgccuccuucaucuacaacggccggcugguggacagcaucgucuccuggagcaagaagauccuccgcacccaggaguccgagugcgugugcaucaacgggaccugcacgguggucaugaccgacggcagcgcguccggcaaggccgacaccaagauccuguucaucgaggaggggaagaucgugcacaucagcacccugagcggcuccgcccagcacguggaggagugcagcugcuacccccgguaccccgggguccgcugcgugugccgggacaacuggaagggcuccaaccgcccgaucguggacaucaacgucaaggacuacagcaucguguccagcuacgugugcuccggccucgucggggacacgccccggaagaacgacagcuucuccagcucccacugccuggaccccaacaacgaggagggcgggcacggcgugaaggggugggccuucgacgacggcaacgacgucuggaugggccgcaccaucagcgagaagcugcgguccggguacgagaccuucaaggugaucgagggcuggagcaagcccaacuccaagcuccagaucaaccgccaggugaucgucgagcgggggaaccgcagcggcuacuccgggaucuucagcguggagggcaaguccugcaucaaccggugcuucuacguggagcugauccgcggccggaaggaggagaccgaggucugguggacgagcaacagcaucgugguguucugcgggaccuccggcaccuacgggaccggcagcuggccggacggggccgacaucaaccugaugcccaucuga

SEQ ID NO: 80026 - RNA, 1410 nt, Artificial Sequence; identical to SEQ ID NO: 78249
  derived and/or modified CDS sequence (opt1) from neuraminidase__InfluenzaA__ABU92884

SEQ ID NO: 80027 - RNA, 1410 nt, Artificial Sequence; identical to SEQ ID NO: 78249
  derived and/or modified CDS sequence (opt1) from neuraminidase__InfluenzaA__ABU92885

SEQ ID NO: 80028 - RNA, 1410 nt, Artificial Sequence; identical to SEQ ID NO: 78738
  derived and/or modified CDS sequence (opt1) from neuraminidase__InfluenzaA__ABU92886

SEQ ID NO: 80029 - RNA, 1410 nt, Artificial Sequence; identical to SEQ ID NO: 78249
  derived and/or modified CDS sequence (opt1) from neuraminidase__InfluenzaA__ABU92887

SEQ ID NO: 80030 - RNA, 1410 nt, Artificial Sequence
  derived and/or modified CDS sequence (opt1) from neuraminidase__InfluenzaA__ABU92888
augaaccccaaccagaagaucaucaccaucggcagcgugucccugaccaucagcacgaucugcuucuucaugcagaucgccauccucaucaccaccgucacccugcacuucaagcaguacgaguucaacuccccgcccaacaaccaggugaugcugugcgagcccacgaucaucgagcgcaacaucaccgagaucguguaccucaccaacaccacgaucgagaaggagaucugccccaagcuggccgaguaccggaacuggagcaagccgcagugcaacaucaccggguucgcgcccuucuccaaggacaacagcauccgccuguccgccggcggggacaucugggucacccgggagcccuacgugagcugcgaccccgacaagugcuaccaguucgcccucggccaggggaccacgcugaacaacgugcacuccaacgacaccguccacgaccgcaccccguaccggacccugcucaugaacgagcugggcgugcccuuccaccugggcacgaagcaggucugcaucgccuggagcuccagcuccugccacgacgggaaggccuggcuccacgugugcgugaccggcgacgacgagaacgcgaccgccagcuucaucuacaacgggcgccugguggacuccaucgucagcugguccaagaagauccugcggacccaggagagcgagugcgugugcaucaacggcacgugcaccguggucaugaccgacggguccgccagcggcaaggccgacaccaagauccucuucaucgaggagggcaagaucgugcacacgagcacccuguccgggagcgcgcagcacguggaggagugcuccugcuacccccgcuaccccggcguccggugcgugugccgcgacaacuggaaggggagcaaccggccgaucguggacaucaacaucaaggacuacuccaucaucagcuccuacgucugcagcggccuggugggcgacacgccccgcaagaacgacuccagcuccagcucccacugccucgaccccaacaacgaggagggcgggcacggggugaagggcugggccuucgacgacgggaacgacgucuggaugggccggaccaucagcgagaagcugcgcuccggcuacgagaccuucaagguggucgagggguggagcaaccccaacuccaagcugcagaucaaccgccaggugaucguggaccgggacaaccggagcggcuacuccgggaucuucagcgucgagggcaagagcugcaucaaccgcugcuucuacguggagcucauccgggggcgcaaccaggagaccgaggugcuguggaccuccaacagcaucgucguguucugcggcaccuccggcacguacgggaccggcagcuggccggacggggccgacaucaaccugaugcccaucuga

SEQ ID NO: 80031 - RNA, 1410 nt, Artificial Sequence; identical to SEQ ID NO: 79953
  derived and/or modified CDS sequence (opt1) from neuraminidase__InfluenzaA__ABU92889

SEQ ID NO: 80032 - RNA, 1410 nt, Artificial Sequence
  derived and/or modified CDS sequence (opt1) from neuraminidase__InfluenzaA__ABU92890
augaaccccaaccagaagaucaucaccaucggcagcgugucccugaccaucgccgccaucugcuuccucaugcagaucgcgauccuggucacgaccgugacccugcacuucaagcagcacgagugcaacagcccgcccaacaaccaggugaugcucugcgagcccaccaucaucgagcgcaacaucacggagaucgucuaccugaccaacaccaccaucgagaaggagaucugccccaagcuggccgaguaccggaacugguccaagccgcagugcaacaucacgggguucgcccccuucagcaaggacaacuccauccgccucagcgccggcggggacaucugggugacccgggagcccuacguguccugcgaccccgacaagugcuaccaguucgcccugggccaggggaccacccugaacaacggccacagcaacgacacgguccacgaccgcaccccguaccggacccuccugaugaacgagcugggcgugcccuuccaccucgggacccgccaggugugcaucgcgugguccagcuccagcugccacgacggcaaggccuggcugcacgucugcgugacgggggacgacaagaacgccaccgccuccuucaucuacaacggccggcugguggacagcaucggguccuggagcaagaagauccuccgcacccaggaguccgagugcgucugcaucaacgggaccugcacgguggugaugaccgacggcagcgcguccgggaaggccgacaccaagauccuguucaucgaggagggcaagaucguccacaucagcacccugagcggguccgcccagcacguggaggagugcagcugcuacccccgguaccccggcgugcgcugcgucugccgggacaacuggaagggcuccaaccgcccgaucguggacaucaacgugaaggacuacagcaucgucuccagcuacgugugcuccgggcucgugggcgacacgccccggaagaacgacagcuucuccagcucccacugccuggaccccaacaacgaggagggcggccacggggucaagggcugggccuucgacgacggcaacgacguguggauggggcgcaccaucagcgagaagcugcgguccggcuacgagaccuucaaggucaucgagggguggagcaagcccaacuccaagcuccagaucaaccgccaggugaucguggagcggggcaaccgcagcggguacuccggcaucuucagcgucgagggcaaguccugcaucaaccggugcuucuacguggagcuggugcgcgggcggaaggaggagaccgaggucugguggacgagcaacagcaucgugguguucugcggcaccuccgggaccuacggcaccgggagcuggccggacggcgccgacaucaaccugaugcccaucuga

SEQ ID NO: 80033 - RNA, 1410 nt, Artificial Sequence; identical to SEQ ID NO: 79969
  derived and/or modified CDS sequence (opt1) from neuraminidase__InfluenzaA__ABU92891

SEQ ID NO: 80034 - RNA, 1410 nt, Artificial Sequence
  derived and/or modified CDS sequence (opt1) from neuraminidase__InfluenzaA__ABU92892
augaaccccaaccagaagaucaucaccaucggcagcgugucccugaccaucagcacgaucugcuucuucaugcagaucgccauccucaucaccaccgucacccugcacuucaagcaguacgaguucaacuccccgcccaacaaccaggugaugcugugcgagcccacgaucaucgagcgcaacaucaccgagaucguguaccucaccaacaccacgaucgagaaggagaucugccccaagcuggccgaguaccggaacuggagcaagccgcagugcgacaucaccggguucgcgcccuucuccaaggacaacagcauccgccuguccgccggcgggaacaucugggucacccgggagcccuacgugagcugcgaccccgacaagugcuaccaguucgcccucggccaggggaccacgcugaacaacgugcacuccaacgacaccguccacgaccgcaccccguaccggacccugcucaugaacgagcugggcgugcccuuccaccugggcacgaagcaggucugcaucgccuggagcuccagcuccugccacgacgggaaggccuggcuccacgugugcgugaccggcgacgacaagaacgcgaccgccagcuucaucuacaacgggcgccugguggacuccaucgucagcugguccaagaagauccugcggacccaggagagcgagugcgugugcaucaacggcacgugcaccguggucaugaccgacggguccgccagcggcaaggccgacaccaagauccucuucaucgaggagggcaagaucgugcacacgagcacccuguccgggagcgcgcagcacguggaggagugcuccugcuacccccgcuaccccggcguccggugcgugugccgcgacaacuggaaggggagcaaccggccgaucguggacaucaacaucaaggacuacuccaucgucagcuccuacgugugcagcggccuggugggcgacacgccccgcaagaacgacuccagcuccagcucccacugccucgaccccaacaacgaggagggcgggcacggggucaagggcugggccuucgacgacgggaacgacguguggaugggccggaccaucagcgagaagcugcgcuccggcuacgagaccuucaaggucaucgagggguggagcaaccccaacuccaagcugcagaucaaccgccaggugaucguggaccggggcaaccggagcggguacuccggcaucuucagcgucgagggcaagagcugcaucaaccgcugcuucuacguggagcucauccgggggcgcaaggaggagaccgaggugcuguggaccuccaacagcaucgucguguucugcggcaccuccgggacguacggcaccgggagcuggccggacggcgccgacaucaaccugaugcccaucuga

SEQ ID NO: 80035 - RNA, 1410 nt, Artificial Sequence; identical to SEQ ID NO: 78831
  derived and/or modified CDS sequence (opt1) from neuraminidase__InfluenzaA__ABU92893

SEQ ID NO: 80036 - RNA, 1410 nt, Artificial Sequence
  derived and/or modified CDS sequence (opt1) from neuraminidase__InfluenzaA__ABU92895
augaaccccaaccagaagaucaucaccgugggcagcgucucccugaccaucagcacgaucugcuucuucaugcagaucgccauccucaucaccaccgugacccugcacuucaagcaguacgaguucaacuccccgcccaacaaccaggugaugcugugcgagcccacgaucaucgagcgcaacaucaccgagaucgucuaccucaccaacaccacgaucgagaaggagaucugccccaagcuggccgaguaccggaacuggagcaagccgcagugcgacaucaccggguucgcgcccuucuccaaggacaacagcauccgccuguccgccggcggggacaucugggugacccgggagcccuacgugagcugcgaccccgacaagugcuaccaguucgcccucggccaggggaccacgcugaacaacguccacuccaacgacaccgugcacgaccgcaccccguaccggacccugcucaugaacgagcugggcgugcccuuccaccugggcacgaagcaggucugcaucgccuggagcuccagcuccugccacgacgggaaggccuggcuccacgugugcgugaccggcgacgacaagaacgcgaccgccagcuucaucuacaacgggcgccuggucgacuccaucgugagcugguccaaggagauccugcggacccaggagagcgagugcgugugcaucaacggcacgugcaccgucgugaugaccgacggguccgccagcggcaaggccgacaccaagauccucuucaucgaggagggcaagaucgugcacacgagcacccuguccgggagcgcgcagcacgucgaggagugcuccugcuacccccgcuaccccggcgugcggugcgugugccgcgacaacuggaaggggagcaaccggccgaucgucgacaucaacaucaaggacuacuccaucgccagcuccuacgugugcagcggccuggugggcgacacgccccgcaagaacgacuccagcuccagcucccacugccucgaccccaacaacgaggagggcgggcacggggucaagggcugggccuucgacgacgggaacgacguguggaugggccggaccaucagcgagaagcugcgcuccggcuacgagaccuucaaggucaucgagggguggagcaaccccaacuccaagcugcagaucaaccgccaggugaucguggaccggggcaaccggagcggguacuccggcaucuucagcgucgagggcaagagcugcaucaaccgcugcuucuacguggagcucauccgggggcgcaaggaggagaccgaggugcuguggaccuccaacagcaucgucguguucugcggcaccuccgggacguacggcaccgggagcuggccggacggcgccgacaucaaccugaugcccaucuga

SEQ ID NO: 80037 - RNA, 1410 nt, Artificial Sequence
  derived and/or modified CDS sequence (opt1) from neuraminidase__InfluenzaA__ABU92896
augaaccccaaccagaagaucaucaccaucggcagcgugucccugaccaucagcacgaucugcuucuucaugcagaucgccauccucaucaccaccgucacccugcacuucaagcaguacgaguucaacuccccgcccaacaaccaggugaugcugugcgagcccacgaucaucgagcgcaacaucaccgagaucguguaccucaccaacaccacgaucgagaaggagaucugccccaagcuggccgaguaccggaacuggagcaagccgcagugcgacaucaccggguucgcgcccuucuccaaggacaacagcauccgccuguccgccggcggggacaucugggucacccgggagcccuacgugagcugcgaccccgacaagugcuaccaguucgcccucggccaggggaccacgcugaacaacgugcacuccaacgacaccguccgcgaccggaccccguaccgcacccugcucaugaacgagcugggcgugcccuuccaccugggcacgaagcaggucugcaucgccuggagcuccagcuccugccacgacgggaaggccuggcuccacgugugcaucaccggcaacgacaagaacgcgaccgccagcuucaucuacaacgggcggcugguggacuccaucgugagcugguccaaggagauccugcgcacccaggagagcgagugcgucugcaucaacggcacgugcaccguggugaugaccgacggguccgccagcggcaaggccgacaccaagauccucuucaucgaggagggcaagaucguccacacgagcacccuguccgggagcgcgcagcacguggaggagugcuccugcuacccccgguaccccggcgugcgcugcgucugccgggacaacuggaaggggagcaaccgcccgaucguggacaucaacaucaaggaccacuccaucgugagcuccuacgucugcagcggccuggugggcgacacgccccggaagaacgacuccagcuccagcucccacugccucgaccccaacaacgaggagggcgggcacggggugaagggcugggccuucgacgaccgcaacgacgucuggauggggcggaccaucagcgagaagucccgccugggcuacgagaccuucaaggugaucgagggcuggagcaaccccaacuccaagcugcagaucaaccggcaggucaucguggaccgcgggaaccggagcggcuacuccgggaucuucagcguggagggcaagagcugcaucaaccgcugcuucuacgucgagcucauccgggggcgcaaggaggagaccgaggugcuguggaccuccaacagcaucguggucuucugcggcaccuccggcacguacgggaccggcagcuggccggacggggccgacaucaaccugaugcccaucuga

SEQ ID NO: 80038 - RNA, 1410 nt, Artificial Sequence
  derived and/or modified CDS sequence (opt1) from neuraminidase__InfluenzaA__ABU92897
augaaccccaaccagaagaucaucaccaucggcagcgugucccugaccaucagcacgaucugcuucuucaugcagaucgccauccucaucaccaccgucacccugcacuucaagcaguacgagcugaacuccccgcccaacaaccaggugaugcucugcgagcccacgaucaucgagcgcaacaucaccgagaucguguaccugaccaacaccacgaucgagaaggagaucugccccaagcuggccgaguaccggaacuggagcaagccgcagugcaacaucaccggguucgcgcccuucuccaaggacaacagcauccgccucuccgccggcggggacaucugggucacccgggagcccuacgugagcugcgaccccgacaagugcuaccaguucgcccugggccaggggaccacgcugaacaacgugcacuccaacgacaccguccacgaccgcaccccguaccggacccuccugaugaacgagcugggcgugcccuuccaccucggcacgaagcaggucugcaucgccuggagcuccagcuccugccacgacgggaaggccuggcugcacgugugcgugaccggcgacgacaagaacgcgaccgccagcuucaucuacaacgggcgccugguggacuccaucgucagcugguccaaggagauccuccggacccaggagagcgagugcgugugcaucaacggcacgugcaccguggucaugaccgacggguccgccagcggcaaggccgacaccaagauccuguucaucgaggagggcaagaucgugcacacgagcacccuguccgggagcgcgcagcacguggaggagugcuccugcuacccccgcuaccccggcguccggugcgugugccgcgacaacuggaaggggagcaaccggccgaucguggacaucaacaucaaggacuacuccaucgucagcuccuacgugugcagcggccucgugggcgacacgccccgcaagaacgacuccagcuccagcucccacugccuggaccccaacaacgaggagggcgggcacggggucaagggcugggccuucgacgacgggaacgacguguggaugggccggaccaucagcgagaagucccgcagcggcuacgagaccuucaaggucaucgaggggugguccaaccccaacagcaagcugcagaucaaccgccaggugaucguggaccggggcaaccgguccggguacagcggcaucuucagcgucgaggggaaguccugcaucaaccgcugcuucuacguggagcucauccggggccgcaaggaggagaccgaggugcuguggaccagcaacuccaucgucguguucugcggcaccagcgggacguacggcaccggguccuggccggacggcgccgacaucaaccugaugcccaucuga

SEQ ID NO: 80039 - RNA, 1410 nt, Artificial Sequence
  derived and/or modified CDS sequence (opt1) from neuraminidase__InfluenzaA__ABU92898
augaaccccaaccagaagaucaucaccaucggcagcgugucccugaccaucagcacgaucugcuucuucaugcagaucgccauccucaucaccaccgucacccugcacuucaagcaguacgaguucaacuccccgcccaacaaccaggugaugcugugcgagcccacgaucaucgagcgcaacaucaccgagaucguguaccucaccaacaccacgaucgagaaggagaucugccccaagcuggccgaguaccggaacuggagcaagccgcagugcgacaucaccggguucgcgcccuucuccaaggacaacagcauccgccuguccgccggcggggacaucugggucacccgggagcccuacgugagcugcgaccccgacaagugcuaccaguucgcccucggccaggggaccacgcugaacaacgugcacuccaacgacaccguccacgaccgcaccccguaccggacccugcucaugaacgagcugggcgugcccuuccaccugggcacgaagcaggucugcaucgccuggagcuccagcuccugccacgacgggaaggccuggcuccacgugugcgugaccggcgacgacaagaacgcgaccgccagcuucaucuacaacgggcgccugguggacuccgucgugagcugguccaaggacauccugcggacccaggagagcgagugcgugugcaucaacggcacgugcaccgucgugaugaccgacggguccgccagcggcaaggccgacaccaagauccucuucaucgaggagggcaagaucgugcacacgagcacccuguccgggagcgcgcagcacgucgaggagugcuccugcuacccccgcuaccccggcgugcggugcgugugccgcgacaacuggaaggggagcaaccggccgaucgucgacaucaacaucaagaacuacuccaucgugagcuccuacgugugcagcggccuggucggcgacacgccccgcaagaccgacuccagcuccagcucccacugccucgaccccaacaacgaggagggcgggcacggggugaagggcugggccuucgacgacgggaacgacgucuggaugggccggaccaucagcgagaagcugcgccugggcuacgagaccuucaaggugaucgaggggugguccaaccccaacagcaagcuccagaucaaccgccaggugaucgucgaccggggcaaccggaccggguacuccggcaucuucagcguggaggggaaguccugcaucaaccgcugcuucuacguggagcugauccggggccgcaaggaggagaccgagguccuguggacgagcaacagcaucgugguguucugcggcaccuccgggaccuacggcaccgggagcuggccggacggcgccgacaucaaccucaugcccaucuga

SEQ ID NO: 80040 - RNA, 1410 nt, Artificial Sequence; identical to SEQ ID NO: 78249
  derived and/or modified CDS sequence (opt1) from neuraminidase__InfluenzaA__ABU92899

SEQ ID NO: 80041 - RNA, 1410 nt, Artificial Sequence
  derived and/or modified CDS sequence (opt1) from neuraminidase__InfluenzaA__ABU92900
augaaccccaaccagaagaucaucaccaucggcagcgugucccugaccaucgccgccaucugcuuccucaugcagaucgcgauccuggucacgaccgugacccugcacuucaagcagcacgagugcaacccgccgcccaacaaccaggugaugcucugcgagcccaccaucaucgagcgcaacaucacggagaucgucuaccugaccaacaccaccaucgagaaggagaucugccccaagcuggccgaguaccggaacuggagcaagccccagugcaacaucacgggguucgcccccuucuccaaggacaacagcauccgccucuccgccggcggggacaucugggugacccgggagcccuacgugagcugcgacccggacaagugcuaccaguucgcccugggccaggggaccacccugaacaacggccacuccaacgacacgguccacgaccgcacccccuaccggacccuccugaugaacgagcugggcgugcccuuccaccucgggacccgccaggugugcaucgcguggagcuccagcuccugccacgacggcaaggccuggcugcacgucugcgugacgggggacgacaagaacgccaccgccagcuucaucuacaacggccggcugguggacuccaucgggagcugguccaagaagauccuccgcacccaggagagcgagugcgucugcaucaacgggaccugcacgguggugaugaccgacggcuccgcgagcgggaaggccgacaccaagauccuguucaucgaggagggcaagaucguccacaucuccacccugagcgggagcgcccagcacguggaggagugcuccugcuacccccgguacccgggcgugcgcugcgucugccgggacaacuggaagggcagcaaccgccccaucguggacaucaacgugaaggacuacuccaucgucagcuccuacgugugcagcgggcucgugggcgacacgccccggaagaacgacuccuucagcuccagccacugccuggaccccaacaacgaggagggcggccacggggucaagggcugggccuucgacgacggcaacgacguguggauggggcgcaccaucuccgagaagcugcggagcggcuacgagaccuucaaggucaucgaggggugguccaagccgaacagcaagcuccagaucaaccgccaggugaucguggagcggggcaaccgcuccggguacagcggcaucuucuccgucgagggcaagagcugcaucaaccggugcuucuacguggagcugauccgcgggcggaaggaggagaccgaggugugguggacguccaacagcaucgucguguucugcggcaccagcgggaccuacggcaccggguccuggcccgacggcgccgacaucaaccugaugcccaucuga

SEQ ID NO: 80042 - RNA, 1410 nt, Artificial Sequence
  derived and/or modified CDS sequence (opt1) from neuraminidase__InfluenzaA__ABU92901
augaaccccaaccagaagaucaucaccaucggcagcgugucccugaccaucgccgccaucugcuuccucaugcagaucgcgauccuggucacgaccgugacccugcacuucaagcagcacgagugcaacagcccgcccaacaaccaggugaugcucugcgagcccaccaucaucgagcgcaacaucacggagaucgucuaccugaccaacaccaccaucgagaaggagaucugccccaagcuggccgaguaccggaacugguccaagccgcagugcaacaucacgggguucgcccccuucagcaaggacaacuccauccgccucagcgccggcggggacaucugggugacccgggagcccuacguguccugcgaccccgacaagugcuaccaguucgcccugggccaggggaccacccugaacaacggccacagcaacgacacgguccacgaccgcaccccguaccggacccuccugaugaacgagcugggcgugcccuuccaccucgggacccgccaggugugcaucgcgugguccagcuccagcugccacgacggcaaggccuggcugcacgucugcgugacgggggacgacaagaacgccaccgccuccuucaucuacaacggccggcugguggacagcaucuccagcugguccaagaagauccuccgcacccaggagagcgagugcgucugcaucaacgggaccugcacgguggugaugaccgacggcuccgcgagcggcaaggccgacaccaagauccuguucaucgaggaggggaagaucguccacaucagcacccuguccggcagcgcccagcacguggaggagugcuccugcuacccccgguaccccggggugcgcugcgucugccgggacaacuggaagggcagcaaccgcccgaucguggacaucaacgugaaggacuacuccaucgucagcuccuacgugugcagcggccucgugggggacacgccccggaagaacgacuccuucagcuccagccacugccuggaccccaacaacgaggagggcgggcacggcgucaaggggugggccuucgacgacggcaacgacguguggaugggccgcaccaucuccgagaagcugcggagcggguacgagaccuucaaggucaucgagggcugguccaagcccaacagcaagcuccagaucaaccgccaggugaucguggagcgggggaaccgcuccggcuacagcgggaucuucuccgucgagggcaagagcugcaucaaccggugcuucuacguggagcugauccgcggccggaaggaggagaccgaggugugguggacgagcaacuccaucgucguguucugcgggaccagcggcaccuacgggaccggcuccuggccggacggggccgacaucaaccugaugcccaucuga

SEQ ID NO: 80043 - RNA, 1410 nt, Artificial Sequence; identical to SEQ ID NO: 78249
  derived and/or modified CDS sequence (opt1) from neuraminidase__InfluenzaA__ABU92902

SEQ ID NO: 80044 - RNA, 1410 nt, Artificial Sequence; identical to SEQ ID NO: 78249
  derived and/or modified CDS sequence (opt1) from neuraminidase__InfluenzaA__ABU92903

SEQ ID NO: 80045 - RNA, 1410 nt, Artificial Sequence; identical to SEQ ID NO: 79204
  derived and/or modified CDS sequence (opt1) from neuraminidase__InfluenzaA__ABU92904

SEQ ID NO: 80046 - RNA, 1410 nt, Artificial Sequence; identical to SEQ ID NO: 78249
  derived and/or modified CDS sequence (opt1) from neuraminidase__InfluenzaA__ABU92905

SEQ ID NO: 80047 - RNA, 1410 nt, Artificial Sequence
  derived and/or modified CDS sequence (opt1) from neuraminidase__InfluenzaA__ABU92906
augaaccccaaccagaagaucaucaccaucggcagcgugucccugaccaucgccgccaucugcuuccucaugcagaucgcgauccuggucacgaccgugacccugcacuucaagcagcacgagugcaacagcccgcccaacaaccaggugaugcucugcgagcccaccaucaucgagcgcaacaucacggagaucgucuaccugaccaacaccaccaucgagaaggagaucugccccaagcuggccgaguaccggaacugguccaagccgcagugcaacaucacgggguucgcccccuucagcaaggacaacuccauccgccucagcgccggcggggacaucugggugacccgggagcccuacguguccugcgaccccgacaagugcuaccaguucgcccugggccaggggaccacccugaacaacggccacagcaacgacacgguccacgaccgcaccccguaccggacccuccugaugaacgagcugggcgugcccuuccaccucgggacccgccaggugugcaucgcgugguccagcuccagcugccacgacggcaaggccuggcugcacgucugcgugacgggggacgacaagaacgccaccgccuccuucaucuacaacggccggcugguggacagcaucggguccuggagcaagaagauccuccgcacccaggaguccgagugcgucugcaucaacgggaccugcacgguggugaugaccgacggcagcgcguccgggaaggccgacaccaagauccuguucaucgaggagggcaagaucguccacaucagcacccugagcggguccgcccagcacguggaggagugcagcugcuacccccgguaccccggcgugcgcugcgucugccgggacaacuggaagggcuccaaccgcccgaucguggacaucaacgugaaggacuacagcaucgucuccagcuacgugugcuccgggcucgugggcgacacgccccggaagaacgacagcuucuccagcucccacugccuggaccccaacaacgaggagggcggccacggggucaagggcugggccuucgacgacggcaacgacguguggauggggcgcaccaucagcgagaagcugcgguccggcuacgagaccuucaaggucaucgagggguggagcaagcccaacuccaagcuccagaucaaccgccaggugaucguggagcggggcaaccgcagcggguacuccggcaucuucagcgucgagggcaaguccugcaucaaccggugcuucuacguggagcugauccgcgggcggaaggaggagaccgaggugugguggacgagcaacagcaucgucguguucugcggcaccuccgggaccuacggcaccgggagcuggccggacggcgccgacaucaagcugaugcccaucuga

SEQ ID NO: 80048 - RNA, 1410 nt, Artificial Sequence
  derived and/or modified CDS sequence (opt1) from neuraminidase__InfluenzaA__ABU92907
augaaccccaaccagaagaucaucaccaucggcagcaucucccugaccaucgccgccaucugcuuccucaugcagaucgcgauccuggugacgaccgucacccugcacuucaagcagcacgagugcaacagcccgcccaacaaccaggugaugcucugcgagcccaccaucaucgagcgcaacaucacggagaucguguaccugaccaacaccaccaucgagaaggagaucugccccaagcuggccgaguaccggaacugguccaagccgcagugcaacaucacgggguucgcccccuucagcaaggacaacuccauccgccucagcgccggcggggacaucugggucacccgggagcccuacguguccugcgaccccgacaagugcuaccaguucgcccugggccaggggaccacccugaacaacggccacagcaacgacacggugcacgaccgcaccccguaccggacccuccugaugaacgagcugggcguccccuuccaccucgggacccgccaggugugcaucgcgugguccagcuccagcugccacgacggcaaggccuggcugcacgugugcgucacgggggacgacaagaacgccaccgccuccuucaucuacaacggccggcugguggacagcaucggguccuggagcaagaagauccuccgcacccaggaguccgagugcgugugcaucaacgggaccugcacggucgugaugaccgacggcagcgcguccgggaaggccgacaccaagauccuguucaucgaggagggcaagaucgugcacaucagcacccugagcggguccgcccagcacgucgaggagugcagcugcuacccccgguaccccggcgugcgcugcgugugccgggacaacuggaagggcuccaaccgcccgaucgucgacaucaacgugaaggacuacagcaucguguccagcuacgucugcuccgggcucgugggcgacacgccccggaagaacgacagcuucuccagcucccacugccuggaccccaacaacgaggagggcggccacggggugaagggcugggccuucgacgacggcaacgacgucuggauggggcgcaccaucagcgagaagcugcgguccggcuacgagaccuucaaggugaucgagggguggagcaagcccaacuccaagcuccagaucaaccgccaggucaucguggagcggggcaaccgcagcggguacuccggcaucuucagcguggagggcaaguccugcaucaaccggugcuucuacgucgagcugauccgcgggcggaaggaggagaccgaggugugguggacgagcaacagcaucguggucuucugcggcaccuccgggaccuacggcaccgggagcuggccggacggcgccgacaucaaccugaugcccaucuga

SEQ ID NO: 80049 - RNA, 1410 nt, Artificial Sequence; identical to SEQ ID NO: 78249
  derived and/or modified CDS sequence (opt1) from neuraminidase__InfluenzaA__ABU92908

SEQ ID NO: 80050 - RNA, 1410 nt, Artificial Sequence; identical to SEQ ID NO: 78249
  derived and/or modified CDS sequence (opt1) from neuraminidase__InfluenzaA__ABU92909

SEQ ID NO: 80051 - RNA, 1410 nt, Artificial Sequence
  derived and/or modified CDS sequence (opt1) from neuraminidase__InfluenzaA__ABU92910
augaaccccaaccagaagaucaucaccaucggcagcgugucccugaccaucgccacgaucugcuuccucacccagaucgccauccugaucaccaccgucacgcugcacuucaagcaguacgagugcaacagcccgcccaacaaccaggugaugcucugcgagcccaccaucaucgagcgcaacaucaccgagaucguguaccugaccaacacgaccaucgagaaggagaucugccccaagcuggcggaguaccggaacugguccaagccgcagugcaacaucaccggguucgcccccuucagcaaggacaacuccauccgccucagcgccggcggggacaucugggucacccgggagcccuacguguccugcgaccccgacaagugcuaccaguucgcccugggccaggggacgacccugaacaacggccacagcaacgacaccgugcacgaccgcaccccguaccggacgcuccugaugaacgagcugggcguccccuuccaccucgggaccaagcaggucugcaucgccugguccagcuccagcugccacgacggcaaggcguggcugcacgugugcgugaccggggacgacaagaacgccaccgccuccuucaucuacaacggccgccugguggacagcaucggguccuggagcaagaagauccuccggacgcaggaguccgagugcgugugcaucaacgggaccugcaccgucgugaugaccgacggcagcgccuccgggaaggcggacacgaagauccuguucaucgaggagggcaagaucgugcacaccagccugcucagcggguccgcccagcacgucgaggagugcagcugcuacccccgcuaccccggcgugcggugcgugugccgcgacaacuggaagggcuccaaccggccgaucgucgacaucaacgugcgcgacuacagcaucguguccagcuacgucugcuccgggcuggugggcgacacgccccggaagaacgacagcuccagcuccagccacugccuggaccccaacaacgaggagggcggccacggggugaagggcugggccuucgacgacggcaacgacgucuggauggggcgcaccaucuccgagaagcuccggagcggcuacgagaccuucaaggugaucgaggggugguccaagcccaacagcaagcugcagaucaaccgccaggucaucguggacaagggcaaccgguccggguacagcggcaucuucuccguggagggcaagagcugcaucaaccgcugcuucuacgucgagcugauccgggggcgcaaccaggagaccgaggugcucuggaccagcaacuccaucguggucuucugcggcaccagcgggacguacggcaccggguccuggccggacggcgccgacaucaaccugaugcccaucuga

SEQ ID NO: 80052 - RNA, 1410 nt, Artificial Sequence
  derived and/or modified CDS sequence (opt1) from neuraminidase__InfluenzaA__ABU92911
augaaccccaaccagaagaucaucaccaucggcagcgugucccugaccaucgccacgaucugcuuccucacccagaucgccauccuggucaccaccgugacgcugcacuucaagcaguacgagugcaacagcccgcccaacaaccaggugaugcucugcgagcccaccaucaucgagcgcaacaucaccgagaucgucuaccugaccaacacgaccaucgagaaggagaucugccccaagcaggcggaguaccggaacugguccaagccgcagugcaacaucaccggguucgcccccuucagcaaggacaacuccauccgccugagcgccggcggggacaucugggugacccgggagcccuacguguccugcgaccccgacaagugcuaccaguucgcccucggccaggggacgacccugaacaacggccacagcaacgacaccguccacgaccgcaccccguaccggacgcugcucaugaacgagcugggcgugcccuuccaccuggggaccaagcaggucugcaucgccugguccagcuccagcugccacgacggcaaggcguggcuccacgugugcgugaccggggacgacaagaacgccaccgccuccuucaucuacaacggccgccugguggacagcaucggguccuggagcaagaagauccugcggacgcaggaguccgagugcgucugcaucaacgggaccugcaccguggugaugaccgacggcagcgccuccgggaaggcggacacgaagauccucuucaucaaggagggcaagaucguccacaccagccugcugagcggguccgcccagcacguggaggagugcagcugcuacccccgcuaccccggcgugcggugcgucugccgcgacaacuggaagggcuccaaccggccgaucguggacaucaacgugaaggacuacagcaucgucuccagcuacgugugcuccgggcucgugggcgacacgccccgcaagaacgacagcuccagcuccagccacugccuggaccccaacaacgaggagggcggccacggggucaagggcugggccuucgacgacggcaacgacguguggauggggcggaccaucuccgagaagcugcgcagcggcuacgagaccuucaaggucaucgaggggugguccaagcccaacagcaagcuccagaucaaccgccaggugaucguggaccgggacaaccgguccggcuacagcgggaucuucuccgucgagggcaagagcugcaucaaccgcugcuucuacguggagcugauccggggccgcaaccaggagaccgaggugcuguggaccagcaacuccaucgucguguucugcgggaccagcggcacguacgggaccggcuccuggccggacggggccgacaucaaccucaugcccaucuga

SEQ ID NO: 80053 - RNA, 1410 nt, Artificial Sequence
  derived and/or modified CDS sequence (opt1) from neuraminidase__InfluenzaA__ABU92913
augaaccccaaccagaagaucaucaccaucggcagcgugucccugaccaucgccacgaucugcuuccucacccagaucgccauccuggucaccaccgugacgcugcacuucaagcaguacgagugcaacagcccgcccaacaaccaggugaugcucugcgagcccaccaucaucgagcgcaacaucaccgagaucgucuaccugaccaacacgaccaucgagaaggagaucugccccaagcuggcggaguaccggaacugguccaagccgcagugcaacaucaccggguucgcccccuucagcaaggacaacuccauccgccucagcgccggcggggacaucugggugacccgggagcccuacguguccugcgaccccgacaagugcuaccaguucgcccugggccaggggacgacccugaacaacggccacagcaacgacaccguccacgaccgcaccccguaccggacgcuccugaugaacgagcugggcgugcccuuccaccucgggaccaagcaggucugcaucgccugguccagcuccagcugccacgacggcaaggcguggcugcacgugugcgugaccggggacgacaagaacgccaccgccuccuucaucuacaacggccgccugguggacagcaucggguccuggagcaagaagauccuccggacgcaggaguccgagugcgucugcaucaacgggaccugcaccguggugaugaccgacggcagcgccuccgggaaggcggacacgaagauccuguucaucaaggagggcaagaucguccacaccagccugcucagcggguccgcccagcacguggaggagugcagcugcuacccccgcuaccccggcgugcggugcgucugccgcgacaacuggaagggcuccaaccggccgaucguggacaucaacgugaaggacuacagcaucgucuccagcuacgugugcuccgggcuggugggcgacacgccccgcaagaacgacagcuccagcuccagccacugccuggaccccaacaacgaggagggcggccacggggucaagggcugggccuucgacgacggcaacgacguguggauggggcggaccaucuccgagaagcuccgcagcggcuacgagaccuucaaggucaucgaggggugguccaagcccaacagcaagcugcagaucaaccgccaggugaucguggaccgggacaaccgguccggcuacagcgggaucuucuccgucgagggcaagagcugcaucaaccgcugcuucuacguggagcugauccggggccgcaaccaggagaccgaggugcucuggaccagcaacuccaucgucguguucugcgggaccagcggcacguacgggaccggcuccuggccggacggggccgacaucaaccugaugcccaucuga

SEQ ID NO: 80054 - RNA, 1413 nt, Artificial Sequence
  derived and/or modified CDS sequence (opt1) from neuraminidase__InfluenzaA__ABV29560
augaaccccaaccagaagaucaucaccaucggcagcaucuccaucgccaucgggaucaucagccugaugcuccagaucggcaacaucaucuccaucugggccagccacuccauccagaccgggagccagaaccacacgggcaucugcaaccagcgcaucaucaccuacgagaacuccaccugggugaaccacaccuacgucagcaucaacaacacgaacgugguggcggggaaggacaagaccuccgucacccuggccggcaacagcucccugugcagcaucuccggcugggccaucuacaccaaggacaacagcauccggaucggguccaagggcgacguguucgugauccgcgagccguucaucagcugcucccaccucgagugccggacguucuuccugacccagggggcccugcucaacgacaagcacagcaacggcaccgucaaggaccgcucccccuaccgggcccugaugagcugcccccugggggaggcgcccagcccguacaacuccaaguucgagagcguggccugguccgccagcgccugccacgacggcaugggcuggcucaccaucgggaucuccggccccgacaacggggcgguggccguccugaaguacaacggcaucaucacggagaccaucaagagcuggaagaagcgcauccugcggacccaggaguccgagugcgugugcgugaacggcagcugcuucaccaucaugacggacgggcccuccaacggcgccgccagcuacaagaucuucaagaucgagaaggggaaggucaccaaguccaucgagcucaacgcccccaacuuccacuacgaggagugcagcugcuacccggacaccggcaccgugaugugcgugugccgcgacaacuggcacggguccaaccggcccugggucagcuucaaccagaaccuggacuaccagaucggcuacaucugcuccggcguguucggggacaacccccgccccaaggacggcaaggggagcugcaacccggugacggucgacggcgcggacggggugaagggcuucuccuacaaguacggcaacgggguguggaucggccggaccaagagcaaccgccugcggaagggguucgagaugaucugggaccccaacggcuggaccgacaccgacuccgacuucagcgucaagcaggacgugguggccaucacggacuggagcggguacuccggcagcuucguccagcaccccgagcucaccggccuggacugcauccgccccugcuucuggguggagcugguccgggggcucccgcgcgagaacaccaccaucuggacguccggcagcuccaucagcuucugcgggguggacuccgacaccgccaacuggagcuggcccgacggcgccgagcugcccuucaccaucgacaaguga

SEQ ID NO: 80055 - RNA, 1413 nt, Artificial Sequence; identical to SEQ ID NO: 80054
  derived and/or modified CDS sequence (opt1) from neuraminidase__InfluenzaA__ABV29571

SEQ ID NO: 80056 - RNA, 1413 nt, Artificial Sequence; identical to SEQ ID NO: 80054
  derived and/or modified CDS sequence (opt1) from neuraminidase__InfluenzaA__ABV29582

SEQ ID NO: 80057 - RNA, 1413 nt, Artificial Sequence; identical to SEQ ID NO: 80054
  derived and/or modified CDS sequence (opt1) from neuraminidase__InfluenzaA__ABV29615

SEQ ID NO: 80058 - RNA, 1413 nt, Artificial Sequence
  derived and/or modified CDS sequence (opt1) from neuraminidase__InfluenzaA__ABV29637
augaaccccaaccagaagaucaucaccaucggcagcaucuccaucgccaucgggaucaucagccugaugcuccagaucggcaacaucaucuccaucugggccagccacuccauccagaccgggagccagaaccacacgggcaucugcaaccagcgcaucaucaccuacgagaacuccaccugggugaaccacaccuacgucaacaucaacaacacgaacgugguggcggggaaggacaagaccagcgucacccuggccggcaacuccagccugugcuccaucagcggcugggccaucuacaccaaggacaacuccauccggaucgggagcaagggcgacguguucgugauccgcgagccguucaucuccugcagccaccucgagugccggacguucuuccugacccagggggcccugcucaacgacaagcacuccaacggcaccgucaaggaccgcagccccuaccgggcccugauguccugcccccugggggaggcgcccagcccguacaacagcaaguucgaguccguggccuggagcgccuccgccugccacgacggcaugggcuggcucaccaucgggaucagcggccccgacaacggggcgguggccguccugaaguacaacggcaucaucacggagaccaucaaguccuggaagaagcgcauccugcggacccaggagagcgagugcgugugcgugaacggcuccugcuucaccaucaugacggacgggcccagcaacggcaccgccuccuacaagaucuucaagaucgagaaggggaaggucaccaagagcaucgagcucaacgcccccaacuuccacuacgaggagugcuccugcuacccggacaccggcacggugaugugcgugugccgcgacaacuggcacgggagcaaccggcccugggucuccuucaaccagaaccuggacuaccaggugggcuacaucugcagcggcguguucggggacaacccccgccccaaggacggcaagggguccugcaacccgaugaccgucgacggcgccgacggggugaagggcuucagcuacaaguacggcaacgggguguggaucggccggaccaaguccaacaagcugcgcaagggguucgagaugaucugggaccccaacggcuggaccgacacggacagcgacuucuccgucaagcaggacgugguggcgaucagcgacuggagcggguacuccggcagcuucguccagcaccccgagcucaccggccuggacugcauccggcccugcuucuggguggagcugguccgcgggcucccgcgggagaacaccaccaucuggacguccggcagcuccaucagcuucugcgggguggacuccgacaccgccaacuggagcuggcccgacggcgccgagcugcccuucaccaucgacaaguga

SEQ ID NO: 80059 - RNA, 1413 nt, Artificial Sequence; identical to SEQ ID NO: 80054
  derived and/or modified CDS sequence (opt1) from neuraminidase__InfluenzaA__ABV29648

SEQ ID NO: 80060 - RNA, 1413 nt, Artificial Sequence; identical to SEQ ID NO: 80054
  derived and/or modified CDS sequence (opt1) from neuraminidase__InfluenzaA__ABV29659

SEQ ID NO: 80061 - RNA, 1413 nt, Artificial Sequence; identical to SEQ ID NO: 80054
  derived and/or modified CDS sequence (opt1) from neuraminidase__InfluenzaA__ABV29670

SEQ ID NO: 80062 - RNA, 1413 nt, Artificial Sequence
  derived and/or modified CDS sequence (opt1) from neuraminidase__InfluenzaA__ABV29681
augaaccccaaccagaagaucaucaccaucggcagcaucuccaucgccaucgggaucaucagccugaugcuccagaucggcaacaucaucuccaucugggccagccacuccauccagaccgggagccagaaccacacgggcaucugcaaccagcgcaucaucaccuacgagaacuccaccugggugaaccacaccuacgucagcaucaacaacacgaacgugguggcggggaaggacaagaccuccgucacccuggccggcaacagcucccugugcagcaucuccggcugggccaucuacaccaaggacaacagcauccggaucggguccaagggcgacguguucgugauccgcgagccguucaucagcugcucccaccucgagugccggacguucuuccugacccagggggcccugcucaacgacaagcacagcaacggcaccgucaaggaccgcucccccuaccgggcccugaugagcugcccccugggggaggcgcccagcccguacaacuccaaguucgagagcguggccugguccgccagcgccugccacgacggcaugggcuggcucaccaucgggaucuccggccccgacaacggggcgguggccguccugaaguacaacggcaucaucacggagaccaucaagagcuggaagaagcgcauccugcggacccaggaguccgagugcgugugcgugaacggcagcugcuucaccaucaugacggacgggcccuccaacggcgccgccagcuacaagaucuucaagaucgagaaggggaaggucaccaaguccaucgagcucaacgcccccaacuuccacuacgaggagugcagcugcuacccggacaccggcaccgugaugugcgugugccgcgacaacuggcacggguccaaccggcccugggucagcuucaaccagaaccuggacuaccagaucggcuacaucugcuccggcguguucggggacaacccccgccccaaggacggcaaggggagcugcaacccggugacggucgacggcgcggacggggugaagggcuucuccuacaaguacggcaacgggguguggaucggccggaccaagagcaaccgccugcggaagggguucgagaugaucugggaccccaacggcuggaccgacaccgacuccgacuucagcgucaagcaggacgugguggccaucacggacuggagcggguacuccggcagcuucguccagcaccccgagcucaccggccuggacugcauccgccccugcuucuggguggagcugguccgggggcucccgcgcgagaacaccaccaucuggacguccggcagcuccaucagcuucugcgggaucgacuccgacaccgccaacuggagcuggcccgacggcgccgagcugcccuucaccaucgacaaguga

SEQ ID NO: 80063 - RNA, 1413 nt, Artificial Sequence; identical to SEQ ID NO: 80054
  derived and/or modified CDS sequence (opt1) from neuraminidase__InfluenzaA__ABV29692

SEQ ID NO: 80064 - RNA, 1413 nt, Artificial Sequence; identical to SEQ ID NO: 80054
  derived and/or modified CDS sequence (opt1) from neuraminidase__InfluenzaA__ABV29703

SEQ ID NO: 80065 - RNA, 1410 nt, Artificial Sequence
  derived and/or modified CDS sequence (opt1) from neuraminidase__InfluenzaA__ABV29714
augaaccccaaccagaagaucaucaccaucggcagcgugucccugaccaucagcacgaucugcuucuucaugcagaucgccauccucaucaccaccgucacccugcacuucaagcaguacgaguucaacuccccgcccaacaaccaggugaugcugugcgagcccacgaucaucgagcgcaacaucaccgagaucguguaccucaccaacaccacgaucgagaaggagaucugccccaagcuggccgaguaccggaacuggagcaagccgcagugcgacaucaccggguucgcgcccuucuccaaggacaacagcauccgccuguccgccggcggggacaucugggucacccgggagcccuacgugagcugcgaccccgacaagugcuaccaguucgcccucggccaggggaccacgcugaacaacgugcacuccaacgacaccguccgcgaccggaccccguaccgcacccugcucaugaacgagcugggcgugcccuuccaccugggcacgaagcaggucugcaucgccuggagcuccagcuccugccacgacgggaaggccuggcuccacgugugcaucaccggcgacgacaagaacgcgaccgccagcuucaucuacaacgggcggcugguggacuccaucgugagcugguccaaggagauccugcgcacccaggagagcgagugcgucugcaucaacggcacgugcaccguggugaugaccgacggguccgccagcggcgaggccgacaccaagauccucuucaucgaggagggcaagaucguccacacgagcacccuguccgggagcgcgcagcacguggaggagugcuccugcuacccccgguaccccggcgugcgcugcgucugccgggacaacuggaaggggagcaaccgcccgaucguggacaucaacaucaaggaccacuccaucgugagcuccuacgucugcagcggccuggugggcgacacgccccggaagaacgacuccagcuccagcucccacugccucgaccccaacaacgaggagggcgggcacggggugaagggcugggccuucgacgacgggaacgacgucuggaugggccgcaccaucagcgagaagucccggcugggcuacgagaccuucaaggugaucgagggguggagcaaccccaaguccaagcugcagaucaaccgccaggucaucguggaccggggcaaccgcagcggguacuccggcaucuucagcguggagggcaagagcugcaucaaccggugcuucuacgucgagcucauccgcgggcggaaggaggagaccgaggugcuguggaccuccaacagcaucguggucuucugcggcaccuccgggacguacggcaccgggagcuggccggacggcgccgacaucaaccugaugcccaucuga

SEQ ID NO: 80066 - RNA, 1410 nt, Artificial Sequence
  derived and/or modified CDS sequence (opt1) from neuraminidase__InfluenzaA__ABV29725
augaaccccaaccagaagaucaucaccaucggcagcgugucccugaccaucagcacgaucugcuucuucaugcagaccgccauccucaucaccaccgucacgcugcacuucaagcaguacgaguucaacuccccgcccaacaaccaggggaugcugugcgagcccaccaucaucgagcgcaacaucaccgagaucguguaccucaccaacacgaccaucgagaaggagaucugccccaagcuggccgaguaccggaacuggagcaagccgcagugcgacaucaccggcuucgcgcccuucuccaaggacaacagcauccgccuguccgccgggggcgacaucugggugacccgggagcccuacgucagcugcgaccccgacaagugcuaccaguucgcccucgggcagggcacgacccugaacaacgugcacuccaacgacaccgugcgcgaccggaccccguaccgcacgcugcucaugaacgagcugggcguccccuuccaccuggggaccaagcaggucugcaucgccuggagcuccagcuccugccacgacggcaaggccuggcuccacgugugcaucaccggggacgacaagaacgcgaccgccagcuucaucuacaacggccggcugguggacuccaucgugagcugguccaaggagauccugcgcacgcaggagagcgagugcgugugcaucaacgggaccugcaccgucgugaugaccgacggcuccgccagcggcaaggccgacacgaagauccucuucaucgaggaggggaagaucgugcacaccagcacccuguccggcagcgcgcagcacgucgaggagugcuccugcuucccccgguaccccggggugcgcugcgugugccgggacaacuggaagggcagcaaccgcccgaucgucgacaucaacaucaaggaccacuccaucgugagcuccuacgugugcagcggccuggucggggacacgccccggaagaacgacuccagcuccagcucccacugccucgaccccaacaacgaggagggcgggcacggcgugaaggggugggccuucgacgacggcaacgacguguggaugggccgcaccaucagcgagaagucccggcugggguacgagaccuucaaggucaucgagggcuggagcaaccccaaguccaagcugcagaucaaccgccaggugaucgucgaccgggggaaccgcagcggcuacuccgggaucuucagcguggagggcaagagcugcaucaaccggugcuucuacguggagcucauccgcggccggaaggaggagaccgagguccuguggaccuccaacagcaucgugguguucugcgggacguccggcaccuacgggaccggcagcuggccggacggggccgacaucaaccugaugcccaucuga

SEQ ID NO: 80067 - RNA, 1413 nt, Artificial Sequence
  derived and/or modified CDS sequence (opt1) from neuraminidase__InfluenzaA__ABV29736
augaaccccaaccagaagaucaucaccaucggcagcaucuccaucgccaucgggaucaucagccugaugcuccagaucggcaacaucaucuccaucugggccagccacuccauccagaccgggagccagaaccacacgggcaucugcaaccagcgcaucaucaccuacgagaacuccaccugggugaaccacaccuacgucaacaucaacaacacgaacguggugaccgggaaggacaagaccagcgucacccuggcgggcaacuccagccugugcuccaucagcggcugggccaucuacacgaaggacaacuccauccggaucgggagcaagggcgacguguucgugauccgcgagccguucaucuccugcagccaccucgagugccggaccuucuuccugacccagggggcccugcucaacgacaagcacuccaacggcaccgucaaggaccgcagccccuaccgggcccugauguccugcccccugggggaggcccccagcccguacaacagcaaguucgaguccguggcguggagcgccuccgccugccacgacggcaugggcuggcucacgaucgggaucagcggccccgacaacggggccguggcgguccugaaguacaacggcaucaucaccgagaccaucaaguccuggaagaagcgcauccugcggacccaggagagcgagugcgugugcgugaacggcuccugcuucacgaucaugaccgacgggcccagcgacggcgccgccuccuacaagaucuucaagaucgagaaggggaaggucaccaagagcaucgagcucaacgcccccaacuuccacuacgaggagugcuccugcuacccggacaccggcacggugaugugcgugugccgcgacaacuggcacgggagcaaccggcccugggucuccuucaaccagaaccuggacuaccagaucggcuacaucugcagcggcguguucggggacaacccccgccccaaggacggcaagggguccugcaacccggugaccgucgacggcgccgacggggugaagggcuucagcuacaaguacggcaacgggguguggaucggccggaccaaguccaacaagcugcgcaagggguucgagaugaucugggaccccaacggcuggaccgacacggacaacgacuucagcgucaagcaggacgugguggcgaucaccgacugguccggguacagcggcagcuucguccagcaccccgagcucaccggccuggacugcauccggcccugcuucuggguggagcugguccgcgggcucccgcgggagaacaccacgaucuggaccuccggcagcuccaucagcuucugcgggguggacuccgacaccgccaacuggagcuggcccgacggcgccgagcugcccuucaccaucgacaaguga

SEQ ID NO: 80068 - RNA, 1413 nt, Artificial Sequence
  derived and/or modified CDS sequence (opt1) from neuraminidase__InfluenzaA__ABV29747
augaaccccaaccagaagaucaucaccaucggcagcaucuccaucgccaucgggaucaucagccugaugcuccagaucggcaacaucaucuccaucugggccagccacuccauccagaccgggagccagaaccacacgggcaucugcaaccagcgcaucaucaccuacgagaacuccaccugggugaaccacaccuacgucagcaucaacaacacgaacgugguggcggggaaggacaagaccuccgucacccuggccggcaacagcucccugugcagcaucuccggcugggccaucuacaccaaggacaacagcauccggaucggguccaagggcgacguguucgugauccgcgagccguucaucagcugcucccaccucgagugccggacguucuuccugacccagggggcccugcucaacgacaagcacagcaacggcaccgucaaggaccgcucccccuaccgggcccugaugagcugcccccugggggaggcgcccagcccguacaacuccaaguucgagagcguggccugguccgccagcgccugccacgacggcaugggcuggcucaccaucgggaucuccggccccgacaacggggcgguggccguccugaaguacaacggcaucaucacggagaccaucaagagcuggaagaagcgcauccugcggacccaggaguccgagugcgugugcgugaacggcagcugcuucaccaucaugacggacgggcccuccaacggcgccgccagcuacaagaucuucaagaucgagaaggggaaggucaccaaguccaucgagcucaacgcccccaacuuccacuacgaggagugcagcugcuacccggacaccggcaccgugaugugcgugugccgcgacaacuggcacggguccaaccggcccugggucagcuucaaccagaaccuggacuaccagaucggcuacaucugcuccggcguguucggggacaacccccgccccaaggacggcaaggggagcugcaacccggugacggucgacggcgcggacggggugaagggcuucuccuacaaguacggcaacgggguguggaucggccggaccaagagcaaccgccugcggaagggguucgagaugaucugggaccccaacggcuggaccgacaccgacuccgacuucagcguccgccaggacgugguggccaucacggacuggagcggguacuccggcagcuucguccagcaccccgagcucaccggccuggacugcauccggcccugcuucuggguggagcugguccgcgggcucccgcgggagaacaccaccaucuggacguccggcagcuccaucagcuucugcgggguggacuccgacaccgccaacuggagcuggcccgacggcgccgagcugcccuucaccaucgacaaguga

SEQ ID NO: 80069 - RNA, 1413 nt, Artificial Sequence; identical to SEQ ID NO: 80054
  derived and/or modified CDS sequence (opt1) from neuraminidase__InfluenzaA__ABV29769

SEQ ID NO: 80070 - RNA, 1413 nt, Artificial Sequence
  derived and/or modified CDS sequence (opt1) from neuraminidase__InfluenzaA__ABV29780
augaaccccaaccagaagaucaucaccaucggcagcaucuccaucgccaucgggaucaucagccugaugcuccagaucggcaacaucaucuccaucugggccagccacuccauccagaccgggagccagaaccacacgggcaucugcaaccagcgcaucaucaccuacgagaacuccaccugggugaaccacaccuacgucaacaucaacaacacgaacguggugaccgggaaggacaagaccagcgucacccuggcgggcaacuccagccugugcuccaucagcggcugggccaucuacacgaaggacaacuccauccggaucgggagcaagggcgacguguucgugauccgcgagccguucaucuccugcagccaccucgagugccggaccuucuuccugacccagggggcccugcucaacgacaagcacuccaacggcaccgucaaggaccgcagccccuaccgggcccugauguccugcccccugggggaggcccccagcccguacaacagcaaguucgaguccguggcguggagcgccuccgccugccacgacggcaugggcuggcucacgaucgggaucagcggccccgacaacggggccguggcgguccugaaguacaacggcaucaucaccgagaccaucaaguccuggaagaagcgcauccugcggacccaggagagcgagugcgugugcgugaacggcuccugcuucacgaucaugaccgacgggcccagcgacggcgccgccuccuacaagaucuucaagaucgagaaggggaaggucaccaagagcaucgagcucaacgcccccaacuuccacuacgaggagugcuccugcuacccggacaccggcacggugaugugcgugugccgcgacaacuggcacgggagcaaccggcccugggucuccuucaaccagaaccuggacuaccagaucggcuacaucugcagcggcguguucggggacaacccccgccccaaggacggcaagggguccugcaacccggugaccgucgacggcgccgacggggugaagggcuucagcuacaaguacggcaacgggguguggaucggccggaccaaguccagcaagcugcgcaagggguucgagaugaucugggaccccaacggcuggaccgacacggacaacgacuucuccgucaagcaggacgugguggcgaucaccgacuggagcggguacagcggcuccuucguccagcaccccgagcucaccggccuggacugcauccggcccugcuucuggguggagcugguccgcgggcucccgcgggagaacaccacgaucuggaccagcggcuccagcaucuccuucugcgggguggacagcgacaccgccaacugguccuggcccgacggcgccgagcugcccuucaccaucgacaaguga

SEQ ID NO: 80071 - RNA, 1413 nt, Artificial Sequence; identical to SEQ ID NO: 80054
  derived and/or modified CDS sequence (opt1) from neuraminidase__InfluenzaA__ABV29791

SEQ ID NO: 80072 - RNA, 1413 nt, Artificial Sequence; identical to SEQ ID NO: 80054
  derived and/or modified CDS sequence (opt1) from neuraminidase__InfluenzaA__ABV29802

SEQ ID NO: 80073 - RNA, 1410 nt, Artificial Sequence; identical to SEQ ID NO: 79908
  derived and/or modified CDS sequence (opt1) from neuraminidase__InfluenzaA__ABV29824

SEQ ID NO: 80074 - RNA, 1413 nt, Artificial Sequence; identical to SEQ ID NO: 80054
  derived and/or modified CDS sequence (opt1) from neuraminidase__InfluenzaA__ABV29835

SEQ ID NO: 80075 - RNA, 1413 nt, Artificial Sequence
  derived and/or modified CDS sequence (opt1) from neuraminidase__InfluenzaA__ABV29846
augaaccccaaccagaagaucaucaccaucggcagcaucuccaucgccaucgggaucaucagccugaugcuccagaucggcaacaucaucuccaucugggccagccacuccauccagaucgggagccagaaccacaccggcaucugcaaccagcgcaucaucacguacgagaacuccaccugggugaaccacaccuacgucaacaucaacaacaccaacgugguggcggggaaggacaagacgagcgucacccuggccggcaacuccagccugugcuccaucagcggcugggccaucuacaccaaggacaacuccauccggaucgggagcaagggcgacguguucgugauccgcgagccguucaucuccugcagccaccucgagugccggaccuucuuccugacgcagggggcccugcucaacgacaagcacuccaacggcaccgucaaggaccgcagccccuaccgggcccugauguccugcccccugggggaggcgcccagcccguacaacagcaaguucgaguccguggccuggagcgccuccgccugccacgacggcaugggcuggcucaccaucgggaucagcggccccgacaacggggcgguggccguccugaaguacaacggcaucaucaccgagacgaucaaguccuggaagaagcgcauccugcggacccaggagagcgagugcgugugcgugaacggcuccugcuucaccaucaugaccgacgggcccagcaacggcgccgccuccuacaagaucuucaagaucgagaaggggaaggucaccaagagcaucgagcucaacgcccccaacuuccacuacgaggagugcuccugcuacccggacacgggcaccgugaugugcgugugccgcgacaacuggcacgggagcaaccggcccugggucuccuucaaccagaaccuggacuaccaggugggcuacaucugcagcggcguguucggggacaacccccgccccaaggacggcaagggguccugcaacccgaugaccgucgacggcgcggacggggugaagggcuucagcuacaaguacggcaacgggguguggaucggccggacgaaguccaacaagcugcgcaagggguucgagaugaucugggaccccaacggcuggaccgacaccgacagcgacuucuccgucaagcaggacgugguggccaucaccgacuggagcggguacagcggcuccuucguccagcaccccgagcucacgggccuggacugcauccggcccugcuucuggguggagcugguccgcgggcucccgcgggagaacaccaccaucuggaccagcggcuccagcaucuccuucugcgggguggacagcgacacggccaacugguccuggcccgacggcgccgagcugcccuucaccaucgacaaguga

SEQ ID NO: 80076 - RNA, 1413 nt, Artificial Sequence
  derived and/or modified CDS sequence (opt1) from neuraminidase__InfluenzaA__ABV29879
augaaccccaaccagaagaucaucaccaucggcagcaucuccaucgccaucgggaucaucagccugaugcuccagaucggcaacaucaucuccaucugggccagccacuccauccagaccgggagccagaaccacacgggcaucugcaaccagcgcaucaucaccuacgagaacuccaccugggugaaccacaccuacgucagcaucaacaacacgaacgugguggcggggaaggacaagaccuccgucacccuggccggcaacagcucccugugcagcaucuccggcugggccaucuacaccaaggacaacagcauccggaucggguccaagggcgacguguucaucauccgcgagccguucaucagcugcucccaccucgagugccggacguucuuccugacccagggggcccugcucaacgacaagcacagcaacggcaccgugaaggaccgcucccccuaccgggcccugaugagcugcccccugggggaggcgcccagcccguacaacuccaaguucgagagcgucgccugguccgccagcgccugccacgacggcaugggcuggcucaccaucgggaucuccggccccgacaacggggcgguggccgugcugaaguacaacggcaucaucacggagaccaucaagagcuggaagaagcgcauccugcggacccaggaguccgagugcgucugcgugaacggcagcugcuucaccaucaugacggacgggcccuccaacggcgccgccagcuacaagaucuucaagaucgagaaggggaaggugaccaaguccaucgagcucaacgcccccaacuuccacuacgaggagugcagcugcuacccggacaccggcaccgucaugugcgugugccgcgacaacuggcacggguccaaccggcccugggugagcuucaaccagaaccuggacuaccagaucggcuacaucugcuccggcgucuucggggacaacccccgccccaaggacggcaaggggagcugcaacccggugacgguggacggcgcggacggggucaagggcuucuccuacaaguacggcaacgggguguggaucggccggaccaagagcaaccgccugcggaagggguucgagaugaucugggaccccaacggcuggaccgacaccgacuccgacuucagcgugaagcaggacgucguggccaucacggacuggagcggguacuccggcagcuucgugcagcaccccgagcucaccggccuggacugcauccgccccugcuucugggucgagcuggugcgggggcucccgcgcgagaacaccaccaucuggacguccggcagcuccaucagcuucugcggggucgacuccgacaccgccaacuggagcuggcccgacggcgccgagcugcccuucaccaucgacaaguga

SEQ ID NO: 80077 - RNA, 1413 nt, Artificial Sequence; identical to SEQ ID NO: 80054
  derived and/or modified CDS sequence (opt1) from neuraminidase__InfluenzaA__ABV29890

SEQ ID NO: 80078 - RNA, 1410 nt, Artificial Sequence; identical to SEQ ID NO: 79908
  derived and/or modified CDS sequence (opt1) from neuraminidase__InfluenzaA__ABV29901

SEQ ID NO: 80079 - RNA, 1410 nt, Artificial Sequence
  derived and/or modified CDS sequence (opt1) from neuraminidase__InfluenzaA__ABV29912
augaaccccaaccagaagaucaucaccaucggcagcgugucccugaccaucagcacgaucugcuucuucaugcagaucgccauccucaucaccaccgucacccugcacuucaagcaguacgaguucaacuccccgcccaacaaccaggugaugcugugcgagcccacgaucaucgagcgcaacaucaccgagaucguguaccucaccaacaccacgaucgagaaggagaucugccccaagcuggccgaguaccggaacuggagcaagccgcagugcgacaucaccggguucgcgcccuucuccaaggacaacagcauccgccuguccgccggcggggacaucugggucacccgggagcccuacgugagcugcgaccccgacaagugcuaccaguucgcccucggccaggggaccacgcugaacaacgugcacuccaacgacaccguccacgaccgcaccccguaccggacccugcucaugaacgagcugggcgugcccuuccaccugggcacgaagcaggucugcaucgccuggagcuccagcuccugccacgacgggaaggccuggcuccacgugugcgugaccggcgacgacaagaacgcgaccgccagcuucaucuacaacgggcgccugguggacuccaucgucagcugguccaaggacauccugcggacccaggagagcgagugcaucugcaucaacggcacgugcaccguggugaugaccgacggguccgccagcggcaaggccgacaccaagauccucuucaucgaggagggcaagaucguccacacgagcacccuguccgggagcgcgcagcacguggaggagugcuccugcuacccccgcuaccccggcgugcggugcgucugccgcgacaacuggaaggggagcaaccggccgaucguggacaucaacaucaaggacuacuccaucgugagcuccuacgucugcagcggccuggugggcgacacgccccgcaagaacgacuccagcuccagcucccacugccucgaccccaacaacgaggagggcgggcacggggugaagggcugggccuucgacgacgggaacgacgucuggaugggccggaccaucagcgagaagcugcgccugggcuacgagaccuucaaggugaucgaggggugguccaaccccaacagcaagcuccagaucaaccggcaggucaucguggacaagggcaaccgcuccggguacagcggcaucuucuccguggagggcaagagcugcaucaaccggugcuucuacgucgagcugauccgcgggcggaaggaggagaccgaggugcuguggaccagcaacuccaucguggucuucugcggcaccagcgggacguacggcaccggguccuggccggacggcgccgacaucaaccucaugcccaucuga

SEQ ID NO: 80080 - RNA, 1413 nt, Artificial Sequence
  derived and/or modified CDS sequence (opt1) from neuraminidase__InfluenzaA__ABV29923
augaaccccaaccagaagaucaucaccaucggcagcaucuccaucgccaucgggaucaucagccugaugcuccagaucggcaacaucaucuccaucugggccagccacuccauccagaccgggagccagaaccacacgggcaucugcaaccagcgcaucaucaccuacgagaacuccaccugggugaaccacaccuacgucaacaucaacaacacgaacgugguggcggggaaggacaagaccagcgucacccuggccggcaacuccagccugugcuccaucagcggcugggccaucuacaccaaggacaacuccauccggaucgggagcaagggcgacguguucgugauccgcgagccguucaucuccugcagccaccucgagugccggacguucuuccugacccagggggcccugcucaacgacaagcacuccaacggcaccgucaaggaccgcagccccuaccgggcccugauguccugcccccugggggaggcgcccagcccguacaacagcaaguucgaguccguggccuggagcgccuccgccugccacgacggcaugggcuggcucaccaucgggaucagcggccccgacaacggggcgguggccguccugaaguacaacggcaucaucacggagaccaucaaguccuggaagaagcgcauccugcggacccaggagagcgagugcgugugcgugaacggcuccugcuucaccaucaugacggacgggcccagcaacggcgccgccuccuacaagaucuucaagaucgagaaggggaaggucaccaagagcaucgagcucaacgcccccaacuuccacuacgaggagugcuccugcuacccggacaccggcaccgugaugugcgugugccgcgacaacuggcacgggagcaaccggcccugggucuccuucaaccagaaccuggacuaccaggugggcuacaucugcagcggcguguucggggacaacccccgccccaaggacggcaagggguccugcaacccgaugacggucgacggcgcggacggggugaagggcuucagcuacaaguacggcaacgggguguggaucggccggaccaaguccaacaagcugcgcaagggguucgagaugaucugggaccccaacggcuggaccgacaccgacagcgacuucuccgucaagcaggacgugguggccaucacggacuggagcggguacagcggcuccuucguccagcaccccgagcucaccggccuggacugcauccggcccugcuucuggguggagcugguccgcgggcucccgcgggagaacgccaccaucuggaccagcggcuccagcaucuccuucugcgggguggacagcgacacggccaacugguccuggcccgacggcgccgagcugcccuucaccaucgacaaguga

SEQ ID NO: 80081 - RNA, 1410 nt, Artificial Sequence
  derived and/or modified CDS sequence (opt1) from neuraminidase__InfluenzaA__ABV29934
augaaccccaaccagaagaucaucaccaucggcagcgugucccugaccaucagcacgaucugcuucuucaugcagaucgccauccucaucaccaccgucacccugcacuucaagcaguacgaguucaacuccccgcccaacaaccaggugaugcugugcgagcccacgaucaucgagcgcaacaucaccgagaucguguaccucaccaacaccacgaucgagaaggagaucugccccaagcuggccgaguaccggaacuggagcaagccgcagugcgacaucaccggguucgcgcccuucuccaaggacaacagcauccgccuguccgccggcggggacaucugggucacccgggagcccuacgugagcugcgaccccgacaagugcuaccaguucgcccucggccaggggaccacgcugaacaacgugcacuccaacgacaccguccgcgaccggaccccguaccgcacccugcucaugaacgagcugggcgugcccuuccaccugggcacgaagcaggucugcaucgccuggagcuccagcuccugccacgacgggaaggccuggcuccacgugugcaucaccggcgacgacaagaacgcgaccgccagcuucaucuacaacgggcggcugguggacuccaucgugagcugguccaaggagauccugcgcacccaggagagcgagugcgucugcaucaacggcacgugcaccguggugaugaccgacggguccgccagcggcaaggccgacaccaagauccucuucaucgaggagggcaagaucguccacacgagcacccuguccgggagcgcgcagcacguggaggagugcuccugcuacccccgguaccccggcgugcgcugcgucugccgggacaacuggaaggggagcaaccgcccgaucguggacaucaacaucaaggaccacuccaucgugagcuccuacgucugcagcggccuggugggcgacacgccccggaagaacgacuccagcuccagcucccacugccucgaccccaacaacgaggagggcgggcacggggugaagggcugggccuucgacgacgggaacgacgucuggaugggccgcaccaucagcgagaagucccggcugggcuacgagaccuucaaggugaucgagggguggagcaaccccaaguccaagcugcagaucaaccgccaggucaucguggaccggggcaaccgcaccggguacagcggcaucuucuccguggagggcaagagcugcaucaaccggugcuucuacgucgagcucauccgcgggcggaaggaggagaccgaggugcuguggaccagcaacuccaucguggucuucugcggcacgagcgggaccuacggcaccggguccuggccggacggcgccgacaucaaccugaugcccaucuga

SEQ ID NO: 80082 - RNA, 1413 nt, Artificial Sequence; identical to SEQ ID NO: 80067
  derived and/or modified CDS sequence (opt1) from neuraminidase__InfluenzaA__ABV29945

SEQ ID NO: 80083 - RNA, 1413 nt, Artificial Sequence
  derived and/or modified CDS sequence (opt1) from neuraminidase__InfluenzaA__ABV29956
augaaccccaaccagaagaucaucaccaucggcagcaucuccaucgccaucgggaucaucagccugaugcuccagaucggcaacaucaucuccaucugggccagccacuccauccagaccgggagccagaaccacacgggcaucugcaaccagcgcaucaucaccuacgagaacuccaccugggugaaccacaccuacgucagcaucaacaacacgaacgugguggcggggaaggacaagaccuccgucacccuggccggcaacagcucccugugcagcaucuccggcugggccaucuacaccaaggacaacagcauccggaucggguccaagggcgacguguucgugauccgcgagccguucaucagcugcucccaccucgagugccggacguucuuccugacccagggggcccugcucaacgacaagcacagcaacggcaccgucaaggaccgcucccccuaccgggcccugaugagcugcccccugggggaggcgcccagcccguacaacuccaaguucgagagcguggccugguccgccagcgccugccacgacggcaugggcuggcucaccaucgggaucuccggccccgacaacggggcgguggccguccugaaguacaagggcaucaucacggagaccaucaagagcuggaagaagcgcauccugcggacccaggaguccgagugcgugugcgugaacggcagcugcuucaccaucaugacggacgggcccuccaacggcgccgccagcuacaagaucuucaagaucgagaaggggaaggucaccaaguccaucgagcucaacgcccccaacuuccacuacgaggagugcagcugcuacccggacaccggcaccgugaugugcgugugccgcgacaacuggcacggguccaaccggcccugggucagcuucaaccagaaccuggacuaccagaucggcuacaucugcuccggcguguucggggacaacccccgccccaaggacggcaaggggagcugcaacccggugacggucgacggcgcggacggggugaagggcuucuccuacaaguacggcaacgggguguggaucggccggaccaagagcaaccgccugcggaagggguucgagaugaucugggaccccaacggcuggaccgacaccgacuccgacuucagcgucaagcaggacgugguggccaucacggacuggagcggguacuccggcagcuucguccagcaccccgagcucaccggccuggacugcauccgccccugcuucuggguggagcugguccgggggcucccgcgcgagaacaccaccaucuggacguccggcagcuccaucagcuucugcgggguggacuccgacaccgccaacuggagcuggcccgacggcgccgagcugcccuucaccaucgacaaguga

SEQ ID NO: 80084 - RNA, 1413 nt, Artificial Sequence
  derived and/or modified CDS sequence (opt1) from neuraminidase__InfluenzaA__ABV29989
augaaccccaaccagaagaucaucaccaucggcagcaucuccaucgccaucgggaucaucagccugaugcuccagaucggcaacaucaucuccaucugggccagccacuccauccagaccgggagccagaaccacacgggcaucugcaaccagcgcaucaucaccuacgagaacuccaccugggugaaccacaccuacgucagcaucaacaacacgaacgugguggcggggaaggacaagaccuccgucacccuggccggcaacagcucccugugcagcaucuccggcugggccaucuacaccaaggacaacagcauccggaucggguccaagggcgacguguucgugaugcgcgagccguucaucagcugcucccaccucgagugccggacguucuuccugacccagggggcccugcucaacgacaagcacagcaacggcaccgucaaggaccgcucccccuaccgggcccugaugagcugcccccugggggaggcgcccagcccguacaacuccaaguucgagagcguggccugguccgccagcgccugccacgacggcaugggcuggcucaccaucgggaucuccggccccgacaacggggcgguggccguccugaaguacaacggcaucaucacggagaccaucaagagcuggaagaagcgcauccugcggacccaggaguccgagugcgugugcgugaacggcagcugcuucaccaucaugacggacgggcccuccaacggcgccgccagcuacaagaucuucaagaucgagaaggggaaggucaccaaguccaucgagcucaacgcccccaacuuccacuacgaggagugcagcugcuacccggacaccggcaccgugaugugcgugugccgcgacaacuggcacggguccaaccggcccugggucagcuucaaccagaaccuggacuaccagaucggcuacaucugcuccggcguguucggggacaacccccgccccaaggacggcaaggggagcugcaacccggugacggucgacggcgcggacggggugaagggcuucuccuacaaguacggcaacgggguguggaucggccggaccaagagcaaccgccugcggaagggguucgagaugaucugggaccccaacggcuggaccgacaccgacuccgacuucagcgucaagcaggacgugguggccaucacggacuggagcggguacuccggcagcuucguccagcaccccgagcucaccggccuggacugcauccgccccugcuucuggguggagcugguccgggggcucccgcgcgagaacaccaccaucuggacguccggcagcuccaucagcuucugcgggguggacuccgacaccgccaacuggagcuggcccgacggcgccgagcugcccuucaccaucgacaaguga

SEQ ID NO: 80085 - RNA, 1413 nt, Artificial Sequence; identical to SEQ ID NO: 80054
  derived and/or modified CDS sequence (opt1) from neuraminidase__InfluenzaA__ABV30000

SEQ ID NO: 80086 - RNA, 1413 nt, Artificial Sequence; identical to SEQ ID NO: 80054
  derived and/or modified CDS sequence (opt1) from neuraminidase__InfluenzaA__ABV30011

SEQ ID NO: 80087 - RNA, 1413 nt, Artificial Sequence; identical to SEQ ID NO: 80054
  derived and/or modified CDS sequence (opt1) from neuraminidase__InfluenzaA__ABV30022

SEQ ID NO: 80088 - RNA, 1413 nt, Artificial Sequence
  derived and/or modified CDS sequence (opt1) from neuraminidase__InfluenzaA__ABV30044
augaaccccaaccagaagaucaucaccaucggcagcaucuccaucgccaucgggaucaucagccugaugcuccagaucggcaacaucaucuccaucugggccagccacuccauccagaccgggagccagaaccacacgggcaucugcaaccagcgcaucaucaccuacgagaacuccaccugggugaaccacaccuacgucaacaucaacaacacgaacgugguggcggggaaggacaagaccagcggcacccuggccggcaacuccagccugugcuccaucagcgggugggccaucuacaccaaggacaacuccauccggaucggcagcaagggggacgucuucgugauccgcgagccguucaucuccugcagccaccucgagugccggacguucuuccugacccagggcgcccugcucaacgacaagcacuccaacgggaccgugaaggaccgcagccccuaccgggcccugauguccugcccccugggcgaggcgcccagcccguacaacagcaaguucgaguccgucgccuggagcgccuccgccugccacgacggcaugggguggcucaccaucggcaucagcgggcccgacaacggcgcgguggccgugcugaaguacaacggcaucaucacggagaccaucaaguccuggaagaagcgcauccugcggacccaggagagcgagugcgucugcgugaacggguccugcuucaccaucaugacggacggccccagcaacggggccgccuccuacaagaucuucaagaucgagaagggcaaggugaccaagagcaucgagcucaacgcccccaacuuccacuacgaggagugcuccugcuacccggacaccgggaccgucaugugcgugugccgcgacaacuggcacggcagcaaccggcccuggguguccuucaaccagaaccuggacuaccaggucggcuacaucugcagcgggguguucggcgacaacccccgccccaaggacgggaagggcuccugcaacccgaugacgguggacggggcggacggcgucaagggcuucagcuacaaguacgggaacggcguguggaucgggcggaccaaguccaacaagcugcgcaagggcuucgagaugaucugggaccccaacggguggaccgacaccgacagcgacuucuccgugaagcaggacgucguggccaucacggacuggagcggcuacagcggcuccuucgugcagcaccccgagcucaccgggcuggacugcauccggcccugcuucugggucgagcuggugcgcggccucccgcgggagaacaccaccaucuggacgagcggguccagcaucuccuucugcggcgucgacagcgacaccgccaacugguccuggcccgacggcgccgagcugcccuucaccaucgacaaguga

SEQ ID NO: 80089 - RNA, 1413 nt, Artificial Sequence
  derived and/or modified CDS sequence (opt1) from neuraminidase__InfluenzaA__ABV30055
augaaccccaaccagaagaucaucaccaucggcagcaucuccaucgccaucgggaucaucagccugaugcuccagaucggcaacaucaucuccaucugggccagccacuccauccagaccgggagccagaaccacacgggcaucugcaaccagcgcaucaucaccuacgagaacuccaccugggugaaccacaccuacgucaacaucaacaacacgaacgugguggcggggaaggacaagaccagcgucacccuggccggcaacuccagccugugcuccaucagcggcugggccaucuacaccaaggacaacuccauccggaucgggagcaagggcgacguguucgugauccgcgagccguucaucuccugcagccaccucgagugccggacguucuuccugacccagggggcccugcucaacgacaagcacuccaacggcaccgucaaggaccgcagccccuaccgggcccugauguccugcccccugggggaggcgcccagcccguacaacagcaaguucgaguccguggccuggagcgccuccgccugccacgacggcaugggcuggcucaccaucgggaucagcggccccgacaacggggcgguggccguccugaaguacaacggcaucaucacggagaccaucaaguccuggaagaagcgcauccugcggacccaggagagcgagugcgugugcgugaacggcuccugcuucaccaucaugacggacgggcccagcaacggcgccgccuccuacaagaucuucaagaucgagaaggggaaggucaccaagagcaucgagcucaacgcccccaacuuccacuacgaggagugcuccugcuacccggacaccggcaccgugaugugcgugugccgcgacaacuggcacgggagcaaccggcccugggucuccuucaaccagaaccuggacuaccaggugggcuacaucugcagcggcguguucggggacaacccccgccccaaggacggcaagggguccugcaacccgaugacggucgacggcgcggacggggugaagggcuucagcuacaaguacggcaacgggguguggaucggccggaccaaguccaacaagcugcgcaagggguucgagaugaucugggaccccaacggcuggaccgacaccgacagcgacuucuccgucaagcaggacgugguggccaucacggacuggagcggguacagcggcuccuucguccagcaccccgagcucaccggccuggacugcauccggcccugcuucuggguggagcugguccgcgggcucccgcgggagaacaccaccaucuggacgagcggcuccagcaucuccuucugcgggguggacagcgacaccgccaacugguccuggcccgacggcgccgagcugcccuucaccaucgacaaguga

SEQ ID NO: 80090 - RNA, 1410 nt, Artificial Sequence
  derived and/or modified CDS sequence (opt1) from neuraminidase__InfluenzaA__ABV30077
augaaccccaaccagaagaucaucaccaucggcagcgugucccugaccaucagcacgaucugcuucuucaugcagaccgccauccucaucaccaccgucacgcugcacuucaagcaguacgaguucaacuccccgcccaacaaccaggugaugcugugcgagcccaccaucaucgagcgcaacaucaccgagaucguguaccucaccaacacgaccaucgagaaggagaucugccccaagcuggccgaguaccggaacuggagcaagccgcagugcgacaucaccggguucgcgcccuucuccaaggacaacagcauccgccuguccgccggcggggacaucugggucacccgggagcccuacgugagcugcgaccccgacaagugcuaccaguucgcccucggccaggggacgacccugaacaacgugcacuccaacgacaccguccgcgaccggaccccguaccgcacgcugcucaugaacgagcugggcgugcccuuccaccugggcaccaagcaggucugcaucgccuggagcuccagcuccugccacgacgggaaggccuggcuccacgugugcaucaccggcgacgacaagaacgcgaccgccagcuucaucuacaacgggcggcugguggacuccaucgugagcugguccaaggagauccugcgcacgcaggagagcgagugcgucugcaucaacgggaccugcaccguggugaugaccgacggguccgccagcggcaaggccgacacgaagauccucuucaucgaggagggcaagaucguccacaccagcacccuguccgggagcgcgcagcacguggaggagugcuccugcuacccccgguaccccggcgugcgcugcgucugccgggacaacuggaaggggagcaaccgcccgaucguggacaucaacaucaaggaccacuccaucgugagcuccuacgucugcagcggccuggugggcgacacgccccggaagaacgacuccagcuccagcucccacugccucgaccccaacaacgaggagggcggccacggggugaagggcugggccuucgacgacgggaacgacgucuggaugggccgcaccaucagcgagaagucccggcugggcuacgagaccuucaaggugaucgagggguggagcaaccccaaguccaagcugcagaucaaccgccaggucaucguggaccggggcaaccgcagcggguacuccggcaucuucagcguggagggcaagagcugcaucaaccggugcuucuacgucgagcucauccgcgggcggaaggaggagaccgaggugcuguggaccuccaacagcaucguggucuucugcggcacguccgggaccuacggcaccgggagcuggccggacggcgccgacaucaaccugaugcccaucuga

SEQ ID NO: 80091 - RNA, 1413 nt, Artificial Sequence; identical to SEQ ID NO: 80054
  derived and/or modified CDS sequence (opt1) from neuraminidase__InfluenzaA__ABV30088

SEQ ID NO: 80092 - RNA, 1413 nt, Artificial Sequence; identical to SEQ ID NO: 80054
  derived and/or modified CDS sequence (opt1) from neuraminidase__InfluenzaA__ABV30099

SEQ ID NO: 80093 - RNA, 1413 nt, Artificial Sequence
  derived and/or modified CDS sequence (opt1) from neuraminidase__InfluenzaA__ABV30110
augaaccccaaccagaagaucaucaccaucggcagcaucuccaucgccaucgggaucaucagccugaugcuccagaucggcaacaucaucuccaucugggccagccacuccauccagaccgggagccagaaccacacgggcaucugcaaccagcgcaucaucaccuacgagaacuccaccugggugaaccacaccuacgucagcaucaacaacacgaacgugguggcggggaaggacaagaccuccgucacccuggccggcaacagcucccugugcagcaucuccggcugggccaucuacaccaaggacaacagcauccggaucggguccaagggcgacguguucgugauccgcgagccguucaucagcugcucccaccucgagugccggacguucuuccugacccagggggcccugcucaacgacaagcacagcaacggcaccgucaaggaccgcucccccuaccgggcccugaugagcugcccccugggggaggcgcccagcccguacaacuccaaguucgagagcguggccugguccgccagcgccugccacgacggcaugggcuggcucaccaucgggaucuccggccccgacaacggggcgguggccguccugaaguacaacggcaucaucacgggcaccaucaagagcuggaagaagcgcauccugcggacccaggaguccgagugcgugugcgugaacgggagcugcuucaccaucaugacggacggccccuccaacggggccgccagcuacaagaucuucaagaucgagaagggcaaggucaccaaguccaucgagcucaacgcccccaacuuccacuacgaggagugcagcugcuacccggacaccgggaccgugaugugcgugugccgcgacaacuggcacggcuccaaccggcccugggucagcuucaaccagaaccuggacuaccagaucggcuacaucugcuccgggguguucggcgacaacccccgccccaaggacgggaagggcagcugcaacccggugacggucgacggggcggacggcgugaagggcuucuccuacaaguacgggaacggcguguggaucgggcggaccaagagcaaccgccugcggaagggcuucgagaugaucugggaccccaacggguggaccgacaccgacuccgacuucagcgucaagcaggacgugguggccaucacggacuggagcggcuacuccggcagcuucguccagcaccccgagcucaccgggcuggacugcauccgccccugcuucuggguggagcugguccggggccucccgcgcgagaacaccaccaucuggacguccgggagcuccaucagcuucugcggcguggacuccgacaccgccaacuggagcuggcccgacggcgccgagcugcccuucaccaucgacaaguga

SEQ ID NO: 80094 - RNA, 1413 nt, Artificial Sequence; identical to SEQ ID NO: 80054
  derived and/or modified CDS sequence (opt1) from neuraminidase__InfluenzaA__ABV30132

SEQ ID NO: 80095 - RNA, 1413 nt, Artificial Sequence
  derived and/or modified CDS sequence (opt1) from neuraminidase__InfluenzaA__ABV30143
augaaccccaaccagaagaucaucaccaucggcagcaucuccaucgccaucgggaucaucagccugaugcuccagaucggcaacaucaucuccaucugggccagccacuccauccagaccgggagccagaaccacacgggcaucugcaaccagcgcaucaucaccuacgagaacuccaccugggugaaccacaccuacgucaacaucaacaacacgaacgugguggcggggaaggacaagaccagcgucacccuggccggcaacuccagccugugcuccaucagcggcugggccaucuacaccaaggacaacuccauccggaucgggagcaagggcgacguguucgugauccgcgagccguucaucuccugcagccaccucgagugccggacguucuuccugacccagggggcccugcucaacgacaagcacuccaacggcaccgucaaggaccgcagccccuaccgggcccugauguccugcccccugggggaggcgcccagcccguacaacagcaaguucgaguccguggccuggagcgccuccgccugccacgacggcaugggcuggcucaccaucgggaucagcggccccgacaacggggcgguggccguccugaaguacaacggcaucaucacggagaccaucaaguccuggaagaagcgcauccugcggacccaggagagcgagugcgugugcgugaacggcuccugcuucaccaucaugacggacgggcccagcaacggcgccgccuccuacaagaucuucaagaucgagaaggggaaggucaccaagagcaucgagcucaacgcccccaacuuccacuacgaggagugcuccugcuacccggacaccggcaccgugaugugcgugugccgcgacaacuggcacgggagcaaccggcccugggucuccuucaaccagaaccuggacuaccagaucggcuacaucugcagcggcguguucggggacaacccccgccccaaggacggcaagggguccugcaacccggugacggucgacggcgcggacggggugaagggcuucagcuacaaguacggcaacgggguguggaucggccggaccaaguccaaccgccugcggaagggguucgagaugaucugggaccccaacggcuggaccaacaccgacagcgacuucuccgucaagcaggacgugguggccaucacggacuggagcggguacagcggcuccuucguccagcaccccgagcucaccggccuggacugcauccgccccugcuucuggguggagcugguccgggggcucccgcgcgagaacaccaccaucuggacgagcggcuccagcaucuccuucugcgggguggacagcgacaccgccaacugguccuggcccgacggcgccgagcugcccuucaccaucgacaaguga

SEQ ID NO: 80096 - RNA, 1413 nt, Artificial Sequence; identical to SEQ ID NO: 80080
  derived and/or modified CDS sequence (opt1) from neuraminidase__InfluenzaA__ABV30154

SEQ ID NO: 80097 - RNA, 1413 nt, Artificial Sequence
  derived and/or modified CDS sequence (opt1) from neuraminidase__InfluenzaA__ABV30165
augaaccccaaccagaagaucaucaccaucggcagcaucuccaucgccaucgggaucaucagccugaugcuccagaucggcaacaucaucuccaucugggccagccacuccauccagaccgggagccagaaccacacgggcaucugcaaccagcgcaucaucaccuacgagaacuccaccugggugaaccacaccuacgucagcaucaacaacacgaacgugguggcggggaaggacaagaccuccgucacccuggccggcaaccugagccucugcuccaucagcggcugggccaucuacaccaaggacaacuccauccggaucgggagcaagggcgacguguucgugauccgcgagccguucaucuccugcagccaccuggagugccggacguucuuccugacccagggggcccuccugaacgacaagcacuccaacggcaccgucaaggaccgcagccccuaccgggcccugauguccugcccccucggggaggcgcccagcccguacaacagcaaguucgaguccguggccuggagcgccuccgccugccacgacggcaugggcuggcugaccaucgggaucagcggccccgacaacggggcgguggccguccugaaguacaacggcaucaucacggagaccaucaaguccuggaagaagcgcauccuccggacccaggagagcgagugcgugugcgugaacggcuccugcuucaccaucaugacggacgggcccagcaacggcgccgccuccuacaagaucuucaagaucgagaaggggaaggucaccaagagcaucgagcugaacgcccccaacuuccacuacgaggagugcuccugcuacccggacaccggcaccgugaugugcgugugccgcgacaacuggcacgggagcaaccggcccugggucuccuucaaccagaaccuggacuaccagaucggcuacaucugcagcggcguguucggggacaacccccgccccaaggacggcaagggguccugcaacccggugacggucgacggcgcggacggggugaagggcuucagcuacaaguacggcaacgggguguggaucggccggaccaaguccaaccgccuccggaagggguucgagaugaucugggaccccaacggcuggaccgacaccgacagcgacuucuccgucaagcaggacgugguggccaucacggacuggagcggguacagcggcuccuucguccagcaccccgagcugaccggccuggacugcauccgccccugcuucuggguggagcucguccgggggcugccgcgcgagaacaccaccaucuggacgagcggcuccagcaucuccuucugcgggguggacagcgacaccgccaacugguccuggcccgacggcgccgagcugcccuucaccaucgacaaguga

SEQ ID NO: 80098 - RNA, 1413 nt, Artificial Sequence; identical to SEQ ID NO: 80054
  derived and/or modified CDS sequence (opt1) from neuraminidase__InfluenzaA__ABV30187

SEQ ID NO: 80099 - RNA, 1413 nt, Artificial Sequence; identical to SEQ ID NO: 80054
  derived and/or modified CDS sequence (opt1) from neuraminidase__InfluenzaA__ABV30198

SEQ ID NO: 80100 - RNA, 1410 nt, Artificial Sequence; identical to SEQ ID NO: 79908
  derived and/or modified CDS sequence (opt1) from neuraminidase__InfluenzaA__ABV30209

SEQ ID NO: 80101 - RNA, 1410 nt, Artificial Sequence; identical to SEQ ID NO: 80090
  derived and/or modified CDS sequence (opt1) from neuraminidase__InfluenzaA__ABV30220

SEQ ID NO: 80102 - RNA, 1410 nt, Artificial Sequence; identical to SEQ ID NO: 80090
  derived and/or modified CDS sequence (opt1) from neuraminidase__InfluenzaA__ABV30231

SEQ ID NO: 80103 - RNA, 1410 nt, Artificial Sequence
  derived and/or modified CDS sequence (opt1) from neuraminidase__InfluenzaA__ABV30264
augaaccccaaccagaagaucaucaccaucggcagcgugucccugaccaucagcacgaucugcuucuucaugcagaucgccauccucaucaccaccgucacccugcacuucaagcaguacgaguucuccagcccgcccaacaaccaggugaugcugugcgagcccacgaucaucgagcgcaacaucaccgagguggucuaccucaccaacaccacgaucgagaaggagaucugccccaagcuggccgaguaccggaacugguccaagccgcagugcgacaucaccggguucgcgcccuucagcaaggacaacuccauccgccugagcgccggcggggacaucugggugacccgggagcccuacguguccugcgaccccgacaagugcuaccaguucgcccucggccaggggaccacgcugaacaacguccacagcaacgacaccgugcacgaccgcaccccguaccggacccugcucaugaacgagcugggcgugcccuuccaccugggcacgaagcaggucugcaucgccugguccagcuccagcugccacgacgggaaggccuggcuccacgugugcgugaccggcgacgacaagaacgcgaccgccuccuucaucuacaacgggcgccuggucgacagcaucguguccuggagcaaggagauccugcggacccaggaguccgagugcgugugcaucaacggcacgugcaccgucgugaugaccgacgggagcgccagcggcaaggccgacaccaagauccucuucaucgaggagggcaagaucgugcacacguccacccugagcggguccgcgcagcacgucgaggagugcagcugcuacccccgcuaccccggcgugcggugcgugugccgcgacaacuggaagggguccaaccggccgaucgucgacaucaacaucaaggacuacagcaucgugucccgcuacgugugcagcggccuggucggcgacacgccccggaagaacgacuccagcuccagcucccacugccucgaccccaacaacgaggagggcgggcacggggugaagggcugggccuucgacgacgggaacgacgucuggaugggccgcaccaucagcgagaagucccggagcggcuacgagaccuucaaggugaucgaggggugguccaaccccaacagcaagcugcagaucaaccgccaggugaucgucgaccggggcaaccgcuccggguacagcggcaucuucagcguggaggggaaguccugcaucaaccggugcuucuacguggagcugauccgcggccggaaggaggagaccgagguccucuggaccagcaacuccaucgugguguucugcggcaccagcgggacguacggcaccggguccuggccggacggcgccgacaucaaccugaugcccaucuga

SEQ ID NO: 80104 - RNA, 1410 nt, Artificial Sequence
  derived and/or modified CDS sequence (opt1) from neuraminidase__InfluenzaA__ABV30275
augaaccccaaccagaagaucaucaccaucggcagcgugucccugaccaucagcacgaucugcuucuucaugcagaccgccauccucaucaccaccgucacgcugcacuucaagcaguacgaguucaacuccaccccgaacaaccaggugaugcugugcgagcccaccaucaucgagcgcaacaucaccgagaucguguaccucacgaacaccaccaucgagaaggagaucugccccaagcuggccgaguaccggaacuggagcaagccccagugcgacaucaccggguucgcgccguucuccaaggacaacagcauccgccuguccgccggcggggacaucugggucacgcgggagcccuacgugagcugcgaccccgacaagugcuaccaguucgcccucggccaggggaccacccugaacaacgugcacuccaacgacaccguccgcgaccggacgcccuaccgcacccugcucaugaacgagcugggcgugccguuccaccugggcaccaagcaggucugcaucgccuggagcuccagcuccugccacgacgggaaggccuggcuccacgugugcaucaccggcgacgacaagaacgcgacggccagcuucaucuacaacgggcggcugguggacuccaucgugagcugguccaaggagauccugcgcacccaggagagcgagugcgucugcaucaacgggaccugcaccguggugaugacggacggguccgccagcggcaaggccgacaccaagauccucuucaucgaggagggcaagaucguccacaccagcacccuguccgggagcgcgcagcacguggaggagugcuccugcuacccccgguaccccggcgugcgcugcgucugccgggacaacuggaaggggagcaaccgccccaucguggacaucaacaucaaggaccacuccaucgugagcuccuacgucugcagcggccuggugggcgacacgccgcggaagaacgacuccagcuccagcucccacugccucgaccccaacaacgaggagggcggccacggggugaagggcugggccuucgacgacgggaacgacgucuggaugggccgcaccaucagcgagaagucccggcugggcuacgagaccuucaaggugaucgagggguggagcaaccccaaguccaagcugcagaucaaccgccaggucaucguggaccggggcaaccgcagcggguacuccggcaucuucagcguggagggcaagagcugcaucaaccggugcuucuacgucgagcucauccgcgggcggaaggaggagaccgaggugcuguggacguccaacagcaucguggucuucugcggcaccuccgggaccuacggcaccgggagcuggcccgacggcgccgacaucaaccugaugccgaucuga

SEQ ID NO: 80105 - RNA, 1413 nt, Artificial Sequence; identical to SEQ ID NO: 80095
  derived and/or modified CDS sequence (opt1) from neuraminidase__InfluenzaA__ABV30297

SEQ ID NO: 80106 - RNA, 1413 nt, Artificial Sequence
  derived and/or modified CDS sequence (opt1) from neuraminidase__InfluenzaA__ABV30308
augaaccccaaccagaagaucaucaccaucggcagcaucuccaucgccaucgggaucaucagccugaugcuccagaucggcaacaucaucuccaucugggccagccacuccauccagaccgggagccagaaccacacgggcaucugcaaccagcgcaucaucaccuacgagaacuccaccugggugaaccacaccuacgucagcaucaacaacacgaacgugguggcggggaaggacaagaccuccgucacccuggccggcaacagcucccugugcagcaucuccggcugggccaucuacaccaaggacaacagcauccggaucggguccaagggcgacguguucgugauccgcgagccguucaucagcugcucccaccucgagugccggacguucuuccugacccagggggcccugcucaacgacaagcacagcaacggcaccgucaaggaccgcucccccuaccgggcccugaugagcugcccccugggggaggcgcccagcccguacaacuccaaguucgagagcguggccugguccgccagcgccugccacgacggcaugggcuggcucaccaucgggaucuccggccccgacaacggggcgguggccguccugaaguacaacggcaucaucacggagaccaucaagagcuggaagaagcgcauccugcggacccaggaguccgagugcgugugccucaacggcagcugcuucaccaucaugacggacgggcccuccaacggcgccgccagcuacaagaucuucaagaucgagaaggggaaggugaccaaguccaucgagcugaacgcccccaacuuccacuacgaggagugcagcugcuacccggacaccggcaccgucaugugcgugugccgcgacaacuggcacggguccaaccggcccugggugagcuucaaccagaaccuggacuaccagaucggcuacaucugcuccggcgucuucggggacaacccccgccccaaggacggcaaggggagcugcaacccggugacgguggacggcgcggacggggucaagggcuucuccuacaaguacggcaacgggguguggaucggccggaccaagagcaaccgccuccggaagggguucgagaugaucugggaccccaacggcuggaccgacaccgacuccgacuucagcgugaagcaggacgucguggccaucacggacuggagcggguacuccggcagcuucgugcagcaccccgagcugaccggccuggacugcauccgccccugcuucugggucgagcucgugcgggggcugccgcgcgagaacaccaccaucuggacguccggcagcuccaucagcuucugcggggucgacuccgacaccgccaacuggagcuggcccgacggcgccgagcugcccuucaccaucgacaaguga

SEQ ID NO: 80107 - RNA, 1413 nt, Artificial Sequence
  derived and/or modified CDS sequence (opt1) from neuraminidase__InfluenzaA__ABV30319
augaaccccaaccagaagaucaucaccaucggcagcaucuccaucgccaucgggaucaucagccugaugcuccagaucggcaacaucguguccaucugggccagccacuccauccagaccgggagccagaaccacacgggcaucugcaaccagcgcaucaucaccuacgagaacuccaccugggucaaccacaccuacgugagcaucaacaacacgaacguggucgcggggaaggacaagaccuccgugacccuggccggcaacagcucccugugcagcaucuccggcugggccaucuacaccaaggacaacagcauccggaucggguccaagggcgacguguucgucauccgcgagccguucaucagcugcucccaccucgagugccggacguucuuccugacccagggggcccugcucaacgacaagcacagcaacggcaccgugaaggaccgcucccccuaccgggcccugaugagcugcccccugggggaggcgcccagcccguacaacuccaaguucgagagcguggccugguccgccagcgccugccacgacggcaugggcuggcucaccaucgggaucuccggccccgacaacggggcggucgccgugcugaaguacaacggcaucaucacggagaccaucaagagcuggaagaagcgcauccugcggacccaggaguccgagugcgugugcgucaacggcagcugcuucaccaucaugacggacgggcccuccaacggcgccgccagcuacaagaucuucaagaucgagaaggggaaggugaccaaguccaucgagcucaacgcccccaacuuccacuacgaggagugcagcugcuacccggacaccggcaccgugaugugcgucugccgcgacaacuggcacggguccaaccggcccugggugagcuucaaccagaaccuggacuaccagaucggcuacaucugcuccggcguguucggggacaacccccgccccaaggacggcaaggggagcugcaacccggucacgguggacggcgcggacggggugaagggcuucuccuacaaguacggcaacggggucuggaucggccggaccaagagcaaccgccugcggaagggguucgagaugaucugggaccccaacggcuggaccgacaccgacuccgacuucagcgugaagcaggacguggucgccaucacggacuggagcggguacuccggcagcuucgugcagcaccccgagcucaccggccuggacugcauccgccccugcuucugggucgagcuggugcgggggcucccgcgcgagaacaccaccaucuggacguccggcagcuccaucagcuucugcgggguggacuccgacaccgccaacuggagcuggcccgacggcgccgagcugcccuucaccaucgacaaguga

SEQ ID NO: 80108 - RNA, 1413 nt, Artificial Sequence; identical to SEQ ID NO: 80095
  derived and/or modified CDS sequence (opt1) from neuraminidase__InfluenzaA__ABV30330

SEQ ID NO: 80109 - RNA, 1413 nt, Artificial Sequence; identical to SEQ ID NO: 80054
  derived and/or modified CDS sequence (opt1) from neuraminidase__InfluenzaA__ABV30341

SEQ ID NO: 80110 - RNA, 1413 nt, Artificial Sequence; identical to SEQ ID NO: 80054
  derived and/or modified CDS sequence (opt1) from neuraminidase__InfluenzaA__ABV30363

SEQ ID NO: 80111 - RNA, 1413 nt, Artificial Sequence; identical to SEQ ID NO: 80054
  derived and/or modified CDS sequence (opt1) from neuraminidase__InfluenzaA__ABV30374

SEQ ID NO: 80112 - RNA, 1410 nt, Artificial Sequence
  derived and/or modified CDS sequence (opt1) from neuraminidase__InfluenzaA__ABV30385
augaaccccaaccagaagaucaucaccaucggcagcgugucccugaccaucagcacgaucugcuucuucaugcagaucgccauccucaucaccaccgucacccugcacuucaagcaguacgaguucuccccgccgcccaacaaccaggugaugcugugcgagcccacgaucaucgagcgcaacaucaccgagaucguguaccucaccaacaccacgaucgagaaggagaucugccccaagcuggccgaguaccggaacuggagcaagccccagugcgacaucaccggguucgcgcccuucuccaaggacaacagcauccgccuguccgccggcggggacaucugggucacccgggagcccuacgugagcugcgacccggacaagugcuaccaguucgcccucggccaggggaccacgcugaacaacgugcacuccaacgacaccguccacgaccgcacccccuaccggacccugcucaugaacgagcugggcgugcccuuccaccugggcacgaagcaggucugcaucgccuggagcuccagcuccugccacgacgggaaggccuggcuccacgugugcgugaccggcgacgacaagaacgcgaccgccagcuucaucuacaacgggcgccugguggacuccaucgucagcugguccaaggagauccugcggacccaggagagcgagugcgugugcaucaacggcacgugcaccguggucaugaccgacggguccgccagcggcaaggccgacaccaagauccucuucaucgaggagggcaagaucgugcacacgagcacccuguccgggagcgcgcagcacguggaggagugcuccugcuacccccgcuacccgggcguccggugcgugugccgcgacaacuggaaggggagcaaccggcccaucguggacaucaacaucaaggacuacuccaucgucagccgcuacgugugcuccggccuggugggcgacacgccccggaagaacgacagcuccagcuccagccacugccucgaccccaacaacgaggagggcgggcacggggucaagggcugggccuucgacgacgggaacgacguguggaugggccgcaccaucuccgagaagucccggagcggcuacgagaccuucaaggucaucgagggguggagcaacccgaacuccaagcugcagaucaaccgccaggugaucguggaccggggcaaccgcagcggguacuccggcaucuucagcgucgagggcaagagcugcaucaaccggugcuucuacguggagcugauccgcgggcggaaggaggagaccgaggugcucuggaccuccaacagcaucgucguguucugcggcaccuccgggacguacggcaccgggagcuggcccgacggcgccgacaucaaccugaugcccaucuga

SEQ ID NO: 80113 - RNA, 1410 nt, Artificial Sequence
  derived and/or modified CDS sequence (opt1) from neuraminidase__InfluenzaA__ABV30396
augaaccccaaccagaagaucaucaccaucggcagcgugucccugaccaucagcacgaucugcuucuucaugcagaucgccauccucaucaccaccgucacccugcacuucaagcaguacgaguucaacuccagcccgaacaaccaggugaugcugugcgagcccacgaucaucgagcgcaacaucaccgagaucguguaccucaccaacaccacgaucgagaaggagaucugccccaagcuguccgaguaccggaacuggagcaagccccagugcaacaucaccggguucgccccguucuccaaggacaacagcauccgccuguccgcgggcggggacaucugggucacccgggagcccuacgugagcugcgaccccgacaagugcuaccaguucgcccucggccaggggaccacgcugaacaacgugcacuccaacgacaccguccacgaccgcacccccuaccggacccugcucaugaacgagcugggcgugccguuccaccugggcacgaagcaggucugcaucgccuggagcuccagcuccugccacgacgggaaggccuggcuccacgugugcgugaccggcgacgacaagaacgccaccgcgagcuucaucuacaacgggcgccugguggacuccaucgucagcugguccaaggagauccugcggacccaggagagcgagugcgugugcaucaacggcacgugcaccguggucaugaccgacgggagcgccuccggcaaggccgacaccaagauccucuucaucgaggagggcaagaucgugcacacgagcacccuguccgggagcgcccagcacguggaggagugcuccugcuacccccgcuaccccggcguccggugcgugugccgcgacaacuggaaggggagcaaccggcccaucguggacaucaacaucaaggacuacuccaucgucagcuccuacgugugcagcggccuggugggcgacaccccgcgcaagaacgacuccagcuccagcucccacugccucgaccccaacaacgaggagggcgggcacggggucaagggcugggcguucgacgacgggaacgacguguggaugggccggaccaucagcgagaagcugcgcuccggcuacgagacguucaaggucaucgagggguggagcaaccccaacuccaagcugcagaucaaccgccaggugaucguggaccggggcaaccggagcggguacagcggcaucuucuccgucgagggcaagagcugcaucaaccgcugcuucuacguggagcucauccgggggcgcaaggaggagaacgaggugcuguggaccuccaacagcaucgucguguucugcggcaccuccgggaccuacggcacggggagcuggcccgacggcgccgacaucaaccugaugccgaucuga

SEQ ID NO: 80114 - RNA, 1410 nt, Artificial Sequence
  derived and/or modified CDS sequence (opt1) from neuraminidase__InfluenzaA__ABV30407
augaaccccaaccagaagaucaucaccaucggcagcgugucccugaccaucagcacgaucugcuucuucaugcagaucgccauccucaucaccaccgucacccugcacuucaagcaguacgaguucaacuccccgcccaacaaccaggugaugcugugcgagcccacgaucaucgagcgcaacaucaccgagaucguguaccucaccaacaccacgaucgagaaggagaucugccccaagcuggccgaguaccggaacuggagcaagccgcagugcgacaucaccggguucgcgcccuucuccaaggacaacagcauccgccuguccgccggcggggacaucugggucacccgggagcccuacgugagcugcgaccccgacaagugcuaccaguucgcccucggccaggggaccacgcugaacaacgugcacuccaacgacaccguccgcgaccggaccccguaccgcacccugcucaugaacgagcugggcgugcccuuccaccugggcacgaagcaggucugcaucgccuggagcuccagcuccugccacgacgggaaggccuggcuccacgugugcaucaccggcgacgacaagaacgcgaccgccagcuucaucuacaacgggcggcugguggacuccaucgugagcugguccaaggagauccugcgcacccaggagagcgagugcgucugcaucaacggcacgugcaccguggugaugaccgacggguccgccagcggcaaggccgacaccaagauccucuucaucgaggagggcaagaucguccacacgagcacccuguccgggagcgcgcagcacguggaggagugcuccugcuacccccgguaccccggcgugcgcugcgucugccgggacaacuggaaggggagcaaccgcccgaucguggacaucaacaucaaggaccacuccaucgugagcuccuacgucugcagcggccuggugggcgacacgccccggaagaacgacuccagcuccagcgggcacugccucgaccccaacaacgaggagggcgggcacggcgugaaggggugggccuucgacgacggcaacgacgucuggaugggccgcaccaucuccgagaagucccggcugggguacgagaccuucaaggugaucgagggcuggagcaaccccaagagcaagcugcagaucaaccgccaggucaucguggaccgggggaaccgcuccggcuacagcgggaucuucuccguggagggcaagagcugcaucaaccggugcuucuacgucgagcucauccgcggccggaaggaggagaccgaggugcuguggaccagcaacuccaucguggucuucugcgggaccagcggcacguacgggaccggcuccuggccggacggggccgacaucaaccugaugcccaucuga

SEQ ID NO: 80115 - RNA, 1410 nt, Artificial Sequence
  derived and/or modified CDS sequence (opt1) from neuraminidase__InfluenzaA__ABV30418
augaaccccaaccagaagaucaucaccaucggcagcgugucccugaccaucagcacgaucugcuucuucaugcagaucgccauccucaucaccaccgucacccugcacuucaagcaguacgaguucuccagccugccgaacaaccaggugaugcucugcgagcccacgaucaucgagcgcaacaucaccgagaucguguaccugaccaacaccacgaucgagaaggagaucugccccaagcuggccgaguaccggaacugguccaagccccagugcgacaucaccggguucgcgccguucagcaaggacaacuccauccgccucagcgccggcggggacaucugggucacccgggagcccuacguguccugcgaccccgacaagugcuaccaguucgcccugggccaggggaccacgcugaacaacgugcacagcaacgacaccguccacgaccgcacccccuaccggacccuccugaugaacgagcugggcgugccguuccaccucggcacgaagcaggucugcaucgccugguccagcuccagcugccacgacgggaaggccuggcugcacgugugcgugaccggcgacgacaagaacgcgaccgccuccuucaucuacaacgggcgccugguggacagcaucgucuccuggagcaaggagauccuccggacccaggaguccgagugcgugugcaucaacggcacgugcaccguggucaugaccgacgggagcgccagcggcaaggccgacaccaagauccuguucaucgaggagggcaagaucgugcacacguccacccugagcggguccgcgcagcacguggaggagugcagcugcuacccccgcuaccccggcguccggugcgugugccgcgacaacuggaagggguccaaccggcccaucguggacaucaacaucaaggacuacagcaucgucucccgcuacgugugcagcggccucgugggcgacaccccgcggaagaacgacuccagcuccagcucccacugccuggaccccaacaacgaggagggcgggcacggggucaagggcugggccuucgacgacgggaacgacguguggaugggccgcaccaucagcgagaagucccggagcggcuacgagacguucaaggucaucgaggggugguccaaccccaacagcaagcugcagaucaaccgccaggugaucguggaccggggcaaccgcuccggguacagcggcaucuucagcgucgaggggaaguccugcaucaaccggugcuucuacguggagcucauccgcggccggcgcgaggagaccgaggugcuguggaccagcaacuccaucgucguguucugcggcaccagcgggacguacggcaccggguccuggcccgacggcgccgacaucaaccugaugccgaucuga

SEQ ID NO: 80116 - RNA, 1410 nt, Artificial Sequence; identical to SEQ ID NO: 80081
  derived and/or modified CDS sequence (opt1) from neuraminidase__InfluenzaA__ABV30429

SEQ ID NO: 80117 - RNA, 1410 nt, Artificial Sequence; identical to SEQ ID NO: 80081
  derived and/or modified CDS sequence (opt1) from neuraminidase__InfluenzaA__ABV30440

SEQ ID NO: 80118 - RNA, 1410 nt, Artificial Sequence; identical to SEQ ID NO: 80081
  derived and/or modified CDS sequence (opt1) from neuraminidase__InfluenzaA__ABV30451

SEQ ID NO: 80119 - RNA, 1413 nt, Artificial Sequence; identical to SEQ ID NO: 80054
  derived and/or modified CDS sequence (opt1) from neuraminidase__InfluenzaA__ABV30462

SEQ ID NO: 80120 - RNA, 1410 nt, Artificial Sequence; identical to SEQ ID NO: 80081
  derived and/or modified CDS sequence (opt1) from neuraminidase__InfluenzaA__ABV30473

SEQ ID NO: 80121 - RNA, 1410 nt, Artificial Sequence
  derived and/or modified CDS sequence (opt1) from neuraminidase__InfluenzaA__ABV30484
augaaccccaaccagaagaucaucaccaucggcagcgugucccugaccaucagcacgaucugcuucuucaugcagaucgccauccucaucaccaccgucacccugcacuucaagcaguacgaguucaacuccccgcccaacaaccaggugaugcugugcgagcccacgaucaucgagcgcaacaucaccgagaucguguaccucaccaacaccacgaucgagaaggagaucugccccaagcuggccgaguaccggaacuggagcaagccgcagugcgacaucaccggguucgcgcccuucuccaaggacaacagcauccgccuguccgccggcggggacaucugggucacccgggagcccuacgugagcugcgaccccgacaagugcuaccaguucgcccucggccaggggaccacgcugaacaacgugcacuccaacgacaccguccacgaccgcaccccguaccggacccugcucaugaacgagcugggcgugcccuuccaccugggcacgaagcaggucugcaucgccuggagcuccagcuccugccacgacgggaaggccuggcuccacgugugcgugaccggcgacgacaagaacgcgaccgccagcuucaucuacaacgggcgccugguggacuccaucgucagcugguccaaggagauccugcggacccaggagagcgagugcgugugcaucaacggcacgugcaccguggucaugaccgacggguccgccagcggcaaggccgacaccaagauccucuucaucgaggagggcaagaucgugcacacgagcacccuguccgggagcgcgcagcacguggaggagugcuccugcuacccccgcuaccccggcguccggugcgugugccgcgacaacuggaaggggagcaaccggccgaucguggacaucaacaucaaggacuacuccaucgucagccgcuacgugugcuccggccuggugggcgacacgccccggaagaacgacagcuccagcaacucccacugccucgaccccaacaacgaggagggcgggcacggggucaagggcugggccuucgacgacgggaacgacguguggaugggccgcaccaucagcgagaagucccggagcggcuacgagaccuucaaggucaucgaggggugguccaaccccaacagcaagcugcagaucaaccgccaggugaucguggaccggggcaaccgcuccggguacagcggcaucuucuccgucgagggcaagagcugcaucaaccggugcuucuacguggagcugauccgcgggcggaaggaggagaccgaggugcucuggaccagcaacuccaucgucguguucugcggcaccagcgggacguacggcaccggguccuggccggacggcgccgacaucaaccugaugcccaucuga

SEQ ID NO: 80122 - RNA, 1413 nt, Artificial Sequence; identical to SEQ ID NO: 80093
  derived and/or modified CDS sequence (opt1) from neuraminidase__InfluenzaA__ABV30495

SEQ ID NO: 80123 - RNA, 1413 nt, Artificial Sequence; identical to SEQ ID NO: 80054
  derived and/or modified CDS sequence (opt1) from neuraminidase__InfluenzaA__ABV30506

SEQ ID NO: 80124 - RNA, 1410 nt, Artificial Sequence; identical to SEQ ID NO: 80090
  derived and/or modified CDS sequence (opt1) from neuraminidase__InfluenzaA__ABV30517

SEQ ID NO: 80125 - RNA, 1413 nt, Artificial Sequence
  derived and/or modified CDS sequence (opt1) from neuraminidase__InfluenzaA__ABV30528
augaacagcaaccagaagaucaucaccaucggcuccaucagcaucgccaucgggaucaucucccugaugcuccagaucggcaacaucaucagcaugugggccucccacagcauccagaccgggucccagaaccacacgggcaucugcaaccagcgcaucaucaccuacgagaacagcaccugggugaaccacaccuacgucaacaucaacaacacgaacgugguggcggggaaggacaagaccuccgucacccuggccggcaacagcucccugugcagcaucuccggcugggccaucuacaccaaggacaacagcauccggaucggguccaagggcgacguguucgugauccgcgagcccuucaucagcugcucccaccucgagugccggacguucuuccugacccagggggcccugcucaacgacaagcacagcaacggcaccgucaaggaccgcuccccguaccgggcccugaugagcugcccccugggggaggcgcccagccccuacaacuccaaguucgagagcguggccugguccgccagcgccugccacgacggcaugggcuggcucaccaucgggaucuccggcccggacaacggggcgguggccguccugaaguacaacggcaucaucacggagaccaucaagagcuggaagaagcgcauccugcggacccaggaguccgagugcgugugcgugaacggcagcugcuucaccaucaugacggacgggcccuccaacggcgccgccagcuacaagaucuucaagaucgagaaggggaaggucaccaaguccaucgagcucaacgcccccaacuuccacuacgaggagugcagcugcuaccccgacaccggcaccgugaugugcgugugccgcgacaacuggcacggguccaaccggccgugggucagcuucaaccagaaccuggacuaccaggugggcuacaucugcuccggcguguucggggacaacccccgccccaaggacggcaaggggagcugcaaccccaugacggucgacggcgcggacggggugaagggcuucuccuacaaguacggcaacgggguguggaucggccggaccaagagcaacaagcugcgcaagggguucgagaugaucugggacccgaacggcuggaccgacaccgacuccgacuucagcgucaagcaggacgugguggccaucacggacuggagcggguacuccggcagcuucguccagcaccccgagcucaccggccuggacugcauccggcccugcuucuggguggagcugguccgcgggcucccccgggagaacgccaccaucuggaccuccggcagcuccaucagcuucugcgggguggacuccgacacggccaacuggagcuggccggacggcgccgagcugcccuucaccaucgacaaguga

SEQ ID NO: 80126 - RNA, 1413 nt, Artificial Sequence; identical to SEQ ID NO: 80054
  derived and/or modified CDS sequence (opt1) from neuraminidase__InfluenzaA__ABV30539

SEQ ID NO: 80127 - RNA, 1413 nt, Artificial Sequence; identical to SEQ ID NO: 80054
  derived and/or modified CDS sequence (opt1) from neuraminidase__InfluenzaA__ABV30561

SEQ ID NO: 80128 - RNA, 1413 nt, Artificial Sequence; identical to SEQ ID NO: 80054
  derived and/or modified CDS sequence (opt1) from neuraminidase__InfluenzaA__ABV30572

SEQ ID NO: 80129 - RNA, 1413 nt, Artificial Sequence; identical to SEQ ID NO: 80054
  derived and/or modified CDS sequence (opt1) from neuraminidase__InfluenzaA__ABV30583

SEQ ID NO: 80130 - RNA, 1413 nt, Artificial Sequence; identical to SEQ ID NO: 80054
  derived and/or modified CDS sequence (opt1) from neuraminidase__InfluenzaA__ABV30594

SEQ ID NO: 80131 - RNA, 1413 nt, Artificial Sequence
  derived and/or modified CDS sequence (opt1) from neuraminidase__InfluenzaA__ABV30605
augaaccccaaccagaagaucaucaccaucggcagcaucuccaucgccaucgggaucaucagccugaugcuccagaucggcaacaucaucuccaucugggccagccacuccauccagaccgggagccagaaccacacgggcaucugcaaccagcgcaucaucaccuacgagaacuccaccugggugaaccacaccuacgucagcaucaacaacacgaacgugguggucgggaaggacaagaccuccgugacccuggcgggcaacagcucccugugcagcaucuccggcugggccaucuacaccaaggacaacagcauccggaucggguccaagggcgacguguucgucauccgcgagccguucaucagcugcucccaccucgagugccggacguucuuccugacccagggggcccugcucaacgacaagcacagcaacggcaccgugaaggaccgcucccccuaccgggcccugaugagcugcccccugggggaggcccccagcccguacaacuccaaguucgagagcguggcgugguccgccagcgccugccacgacggcaugggcuggcucaccaucgggaucuccggccccgacaacggggccgucgcggugcugaaguacaacggcaucaucacggagaccaucaagagcuggaagaagcgcauccugcggacccaggaguccgagugcgugugcgucaacggcagcugcuucaccaucaugacggacgggcccuccaacggcgccgccagcuacaagaucuucaagaucgagaaggggaaggugaccaaguccaucgagcucaacgcccccaacuuccacuacgaggagugcagcugcuacccggacaccggcaccgugaugugcgucugccgcgacaacuggcacggguccaaccggcccugggugagcuucaaccagaaccuggacuaccagaucggcuacaucugcuccggcguguucggggacaacccccgccccaaggacggcaaggggagcugcaacccggucacgguggacggcgccgacggggugaagggcuucuccuacaaguacggcaacggggucuggaucggccggaccaagagcaaccgccugcggaagggguucgagaugaucugggaccccaacggcuggaccgacaccgacuccgacuucagcgugaagcaggacguggucgcgaucacggacuggagcggguacuccggcagcuucgugcagcaccccgagcucaccggccuggacugcauccgccccugcuucugggucgagcuggugcgggggcucccgcgcgagaacaccaccaucuggacguccggcagcuccaucagcuucugcgggguggacuccgacaccgccaacuggagcuggcccgacggcgccgagcugcccuucaccaucgacaaguga

SEQ ID NO: 80132 - RNA, 1413 nt, Artificial Sequence; identical to SEQ ID NO: 80054
  derived and/or modified CDS sequence (opt1) from neuraminidase__InfluenzaA__ABV30616

SEQ ID NO: 80133 - RNA, 1413 nt, Artificial Sequence; identical to SEQ ID NO: 80054
  derived and/or modified CDS sequence (opt1) from neuraminidase__InfluenzaA__ABV30627

SEQ ID NO: 80134 - RNA, 1410 nt, Artificial Sequence
  derived and/or modified CDS sequence (opt1) from neuraminidase__InfluenzaA__ABV30649
augaaccccaaccagaagaucaucaccaucggcagcgugucccugaccaucagcacgaucugcuucuucaugcagaucgccauccucaucaccaccgucacccugcacuucaagcaguacgaguucaacuccccgcccaacaaccaggugaugcugugcgagcccacgaucaucgagcgcaacaucaccgagaucguguaccucaccaacaccacgaucgagaaggagaucugccccaagcuggccgaguaccggaacuggagcaagccgcagugcgacaucaccggguucgcgcccuucuccaaggacaacagcauccgccuguccgccggcggggacaucugggucacccgggagcccuacgugagcugcgaccccgacaagugcuaccaguucgcccucggccaggggaccacgcugaacaacgugcacuccaacgacaccguccgcgaccggaccccguaccgcacccugcucaugaacgagcugggcgugcccuuccaccugggcacgaagcaggucugcaucgccuggagcuccagcuccugccacgacgggaaggccuggcuccacgugugcaucaccggcgacgacaagaacgcgaccgccagcuucaucuacaacgggcggcugguggacuccaucgugagcugguccaaggagauccugcgcacccaggagagcgagugcgucugcaucaacggcacgugcaccguggugaugaccgacggguccgccagcggcaacgccgacaccaagauccucuucaucgaggagggcaagaucguccacacgagcacccuguccgggagcgcgcagcacguggaggagugcuccugcuacccccgguaccccggcgugcgcugcgucugccgggacaacuggaaggggagcaaccgcccgaucguggacaucaacaucaaggaccacuccaucgugagcuccuacgucugcagcggccuggugggcgacacgccccggaagaacgacuccagcuccagcucccacugccucgaccccaacaacgaggagggcgggcacggggugaagggcugggccuucgacgacgggaacgacgucuggaugggccgcaccaucagcgagaagucccggcugggcuacgagaccuucaaggugaucgagggguggagcaaccccaaguccaagcugcagaucaaccgccaggucaucguggaccggggcaaccgcagcggguacuccggcaucuucagcguggagggcaagagcugcaucaaccggugcuucuacgucgagcucauccgcgggcggaaggaggagaccgaggugcuguggaccuccaacagcaucguggucuucugcggcaccuccgggacguacggcaccgggagcuggccggacggcgccgacaucaaccugaugcccaucuga

SEQ ID NO: 80135 - RNA, 1410 nt, Artificial Sequence; identical to SEQ ID NO: 79908
  derived and/or modified CDS sequence (opt1) from neuraminidase__InfluenzaA__ABV30660

SEQ ID NO: 80136 - RNA, 1413 nt, Artificial Sequence
  derived and/or modified CDS sequence (opt1) from neuraminidase__InfluenzaA__ABV45852
augaaccccaaccagaagaucaucaccaucggcagcaucuccaucgccaucgggaucaucagccugaugcuccagaucggcaacaucaucuccaucugggccagccacuccauccagaccgggagccagaaccacacgggcaucugcaaccagcgcaucaucaccuacgagaacuccaccugggugaaccacaccuacgucaacaucaacaacacgaacgugguggcggggaaggacaagaccagcgucacccuggccggcaacuccagccugugcuccaucagcggcugggccaucuacaccaaggacaacuccauccggaucgggagcaagggcgacguguucgugauccgcgagccguucaucuccugcagccaccucgagugccggacguucuuccugacccagggggcccugcucaacgacaagcacuccaacggcaccgucaaggaccgcagccccuaccgggcccugauguccugcccccugggggaggcgcccagcccguacaacagcaaguucgaguccguggccuggagcgccuccgccugccacgacggcaugggcuggcucaccaucgggaucagcggccccgacaacggggcgguggccguccugaaguacaacggcaucaucacggagaccaucaaguccuggaagaagcgcauccugcggacccaggagagcgagugcgugugcgugaacggcuccugcuucaccaucaugacggacgggcccaacaacggcgccgccagcuacaagaucuucaagaucgagaaggggaaggucaccaaguccaucgagcucaacgcccccaacuuccacuacgaggagugcagcugcuacccggacaccggcaccgugaugugcgugugccgcgacaacuggcacggguccaaccggcccugggucagcuucaaccagaaccuggacuaccagaucggcuacaucugcuccggcguguucggggacaacccccgccccaaggacggcgaggggagcugcaacccggugacggucgacggcgcggacggggugaagggcuucuccuacaaguacggcaacgggguguggaucggccggaccaagagcaaccgccugcggaagggguucgagaugaucugggaccccaacggcuggaccgacaccgacuccaacuucagcgucaagcaggacgugguggccaucacggacugguccggguacagcggcagcuucguccagcaccccgagcucaccggccuggacugcauccgccccugcuucuggguggagcugguccgggggcucccgcgcgagaacaccaccaucuggacguccggcagcuccaucagcuucugcggggugaacuccgacaccgccaacuggagcuggcccgacggcgccgagcugcccuucaccaucgacaaguga

SEQ ID NO: 80137 - RNA, 1410 nt, Artificial Sequence; identical to SEQ ID NO: 79908
  derived and/or modified CDS sequence (opt1) from neuraminidase__InfluenzaA__ABV45863

SEQ ID NO: 80138 - RNA, 1413 nt, Artificial Sequence
  derived and/or modified CDS sequence (opt1) from neuraminidase__InfluenzaA__ABV45874
augaaccccaaccagaagaucaucaccaucggcagcaucuccaucgccaucgggaucaucagccugaugcuccagaucggcaacaucaucuccaucugggccagcuacuccauccagaccgggagccagaaccacacgggcaucugcaaccagcgcaucaucaccuacgagaacuccaccugggugaaccacaccuacgucagcaucaacaacacgaacgugguggcggggaaggacaagaccuccgucacccuggccggcaacagcucccugugcagcaucuccggcugggccaucuacaccaaggacaacagcauccggaucggguccaagggcgacguguucgugauccgcgagccguucaucagcugcucccaccucgagugccggacguucuuccugacccagggggcccugcucaacgacaagcacagcaacggcaccgucaaggaccgcucccccuaccgggcccugaugagcugcccccugggggaggcgcccagcccguacaacuccaaguucgagagcguggccugguccgccagcgccugccacgacggcaugggcuggcucaccaucgggaucuccggccccgacaacggggcgguggccguccugaaguacaacggcaucaucacggagaccaucaagagcuggaagaagcgcauccugcggacccaggaguccgagugcgugugcgugaacggcagcugcuucaccaucaugacggacgggcccuccaacggcgccgccagcuacaagaucuucaagaucgagaaggggaaggucaccaaguccaucgagcucaacgcccccaacuuccacuacgaggagugcagcugcuacccggacaccggcaccgugaugugcgugugccgcgacaacuggcacggguccaaccggcccugggucagcuucaaccagaaccuggacuaccagaucggcuacaucugcuccggcguguucggggacaacccccgccccaaggacggcaaggggagcugcaacccggugacggucgacggcgcggacggggugaagggcuucuccuacaaguacggcaacgggguguggaucggccggaccaagagcaaccgccugcggaagggguucgagaugaucugggaccccaacggcuggaccgacaccgacuccgacuucagcgucaagcaggacgugguggccaucacggacuggagcggguacuccggcagcuucguccagcaccccgagcucaccggccuggacugcauccgccccugcuucuggguggagcugguccgggggcucccgcgcgagaacaccaccaucuggacguccggcagcuccaucagcuucugcgggguggacuccgacaccgccaacuggagcuggcccgacggcgccgagcugcccuucaccaucgacaaguga

SEQ ID NO: 80139 - RNA, 1413 nt, Artificial Sequence; identical to SEQ ID NO: 80054
  derived and/or modified CDS sequence (opt1) from neuraminidase__InfluenzaA__ABV45885

SEQ ID NO: 80140 - RNA, 1413 nt, Artificial Sequence; identical to SEQ ID NO: 80067
  derived and/or modified CDS sequence (opt1) from neuraminidase__InfluenzaA__ABV45896

SEQ ID NO: 80141 - RNA, 1413 nt, Artificial Sequence; identical to SEQ ID NO: 80054
  derived and/or modified CDS sequence (opt1) from neuraminidase__InfluenzaA__ABV45918

SEQ ID NO: 80142 - RNA, 1413 nt, Artificial Sequence
  derived and/or modified CDS sequence (opt1) from neuraminidase__InfluenzaA__ABV45929
augaaccccaaccagaagaucaucaccaucggcagcaucuccaucgccaucgggaucaucagccugaugcuccagaucggcaacaucaucuccaugugggccagccacuccauccagaccgggagccagaaccacacgggcaucugcaaccagcgcaucaucaccuacgagaacuccaccugggugaaccacaccuacgucaacaucaacaacacgaacguggugaccgggaaggacaagaccagcgucacccuggcgggcaacuccagccugugcuccaucagcggcugggccaucuacacgaaggacaacuccauccggaucgggagcaagggcgacguguucgugauccgcgagccguucaucuccugcagccaccucgagugccggaccuucuuccugacccagggggcccugcucaacgacaagcacuccaacggcaccgucaaggaccgcagccccuaccgggcccugauguccugcccccugggggaggcccccagcccguacaacagcaaguucgaguccguggcguggagcgccuccgccugccacgacggcaugggcuggcucacgaucgggaucagcggccccgacaacggggccguggcgguccugaaguacaacggcaucaucaccgagaccaucaaguccuggaagaagcgcauccugcggacccaggagagcgagugcgugugcgugaacggcuccugcuucacgaucaugaccgacgggcccagcgacggcgccgccuccuacaagaucuucaagaucgagaaggggaaggucaccaagagcaucgagcucaacgcccccaacuuccacuacgaggagugcuccugcuacccggacaccggcacggugaugugcgugugccgcgacaacuggcacgggagcaaccggcccugggucuccuucaaccagaaccuggacuaccagaucggcuacaucugcagcggcguguucggggacaacccccgccccaaggacggcaagggguccugcaacccggugaccgucgacggcgccgacggggugaagggcuucagcuacaaguacggcaacgggguguggaucggccggaccaaguccaacaagcugcgcaagggguucgagaugaucugggaccccaacggcuggaccgacacggacaacgacuucagcgucaagcaggacgugguggcgaucaccgacugguccggguacagcggcagcuucguccagcaccccgagcucaccggccuggacugcauccggcccugcuucuggguggagcugguccgcgggcucccgcgggagaacgccaccaucuggacguccggcagcuccaucagcuucugcgggguggacuccgacaccgccaacuggagcuggcccgacggcgccgagcugcccuucaccaucgacaaguga

SEQ ID NO: 80143 - RNA, 1413 nt, Artificial Sequence
  derived and/or modified CDS sequence (opt1) from neuraminidase__InfluenzaA__ABV45940
augaaccccaaccagaagaucaucaccaucggcagcaucuccaucgccaucgggaucaucagccugaugcuccagaucggcaacaucaucuccaucugggccagccacuccauccagaccgggagccagaaccacacgggcaucugcaaccagcgcaucauccgguacgagaacuccaccugggugaaccacaccuacgucaacaucaacaacaccaacgugguggcggggaaggacaagacgagcgucacccuggccggcaacuccagccugugcuccaucagcggcugggccaucuacaccaaggacaacuccauccgcaucgggagcaagggcgacguguucgugauccgggagccguucaucuccugcagccaccucgagugccgcaccuucuuccugacgcagggggcccugcucaacgacaagcacuccaacggcaccgucaaggaccggagccccuaccgcgcccugauguccugcccccugggggaggcgcccagcccguacaacagcaaguucgaguccguggccuggagcgccuccgccugccacgacggcaugggcuggcucaccaucgggaucagcggccccgacaacggggcgguggccguccugaaguacaacggcaucaucaccgagacgaucaaguccuggaagaagcagauccugcggacccaggagagcgagugcgugugcgugaacggcuccugcuucaccaucaugaccgacgggcccagcaacggcgccgccuccuacaagaucuucaagaucgagaaggggaaggucaccaagagcaucgagcucaacgcccccaacuuccacuacgaggagugcuccugcuacccggacacgggcaccgugaugugcgugugccgcgacaacuggcacgggagcaaccggcccugggucuccuucaaccagagccuggacuaccaggugggcuacaucugcuccggcguguucggggacaacccccgccccaaggacggcaaggggagcugcaacccgaugaccgucgacggcgcggacggggugaagggcuucuccuacaaguacggcaacgggguguggaucggccggaccaagagcaacaagcugcgcaagggguucgagaugaucugggaccccaacggcuggacggacaccgacuccgacuucagcgucaagcaggacgugguggccaucaccgacuggagcggguacuccggcagcuucguccagcaccccgagcucacgggccuggacugcauccggcccugcuucuggguggagcugguccgcgggcucccgcgggagaacaccaccaucuggaccuccggcagcuccaucagcuucugcgggguggacuccgacacggccaacuggagcuggcccgacggcgccgagcugcccuucaccaucgacaaguga

SEQ ID NO: 80144 - RNA, 1413 nt, Artificial Sequence; identical to SEQ ID NO: 80080
  derived and/or modified CDS sequence (opt1) from neuraminidase__InfluenzaA__ABV45951

SEQ ID NO: 80145 - RNA, 1410 nt, Artificial Sequence
  derived and/or modified CDS sequence (opt1) from neuraminidase__InfluenzaA__ABV45973
augaaccccaaccagaagaucaucaccaucggcagcgugucccugaccaucagcacgaucugcuucuucaugcagaucgccauccucaucaccaccgucacccugcacuucaagcaguacgaguucaacuccccgcccaacaaccaggugaugcugugcgagcccacgaucaucgagcgcaacaucaccgagaucguguaccucaccaacaccacgaucgagaaggagaucugccccaagcuggccgaguaccggaacuggagcaagccgcagugcgacaucaccggguucgcgcccuucuccaaggacaacagcauccgccuguccgccggcggggacaucugggucacccgggagcccuacgugagcugcgaccccgacaagugcuaccaguucgcccucggccaggggaccacgcugaacaacgugcacuccaacgacaccguccgcgaccggaccccguaccgcacccugcucaugaacgagcugggcgugcccuuccaccugggcacgaagcaggucugcaucgccuggagcuccagcuccugccacgacgggaaggccuggcuccacgugugcaucaccggcgacgacaagaacgcgaccgccagcuucaucuacaacgggcggcugguggacuccaucgugagcugguccaaggagauccugcgcacccaggagagcgagugcgucugcaucaacggcacgugcaccguggugaugaccgacggguccgccagcggcgaggccgacaccaagauccucuucaucgaggagggcaagaucguccacacgagcacccuguccgggagcgcgcagcacguggaggagugcuccugcuacccccgguaccccggcgugcgcugcgucugccgggacaacuggaaggggagcaaccgcccgaucguggacaucaacaucaaggaccacuccaucgugagcuccuacgucugcagcggccuggugggcgacacgccccggaagaacgacuccagcuccagcucccacugccucgaccccaacaacgaggagggcgggcacggggugaagggcugggccuucgacgacgggaacgacgucuggaugggccgcaccaucagcgagaagucccggcugggcuacgagaccuucaaggugaucgagggguggagcaaccccaaguccaagcugcagaucaaccgccaggucaucguggaccggggcaaccgcagcggguacuccggcaucuucagcguggagggcaagagcugcaucaaccggugcuucuacgucgagcucauccgcgggcggaaggaggagaccgacgugcuguggaccuccaacagcaucguggucuucugcggcaccuccgggacguacggcaccgggagcuggccggacggcgccgacaucaaccugaugcccaucuga

SEQ ID NO: 80146 - RNA, 1410 nt, Artificial Sequence
  derived and/or modified CDS sequence (opt1) from neuraminidase__InfluenzaA__ABV45984
augaaccccaaccagaagaucaucaccaucggcagcgugucccugaccaucagcacgaucugcuucuucaugcagaucgccauccucgucaccaccgugacccugcacuucaagcaguacgaguucaacuccccgcccaacaaccaggugaugcugugcgagcccacgaucaucgagcgcaacaucaccgagaucgucuaccucaccaacaccacgaucgagaaggagaucugccccaagcuggccgaguaccggaacuggagcaagccgcagugcgacaucaccggguucgcgcccuucuccaaggacaacagcauccgccuguccgccggcggggacaucugggugacccgggagcccuacgugagcugcgaccccgacaagugcuaccaguucgcccucggccaggggaccacgcugaacaacguccacuccaacgacaccgugcgcgaccggaccccguaccgcacccugcucaugaacgagcugggcgugcccuuccaccugggcacgaagcaggucugcaucgccuggagcuccagcuccugccacgacgggaaggccuggcuccacgugugcaucaccggcgacgacaagaacgcgaccgccagcuucaucuacaacgggcggcugguggacuccaucgucagcugguccaaggagauccugcgcacccaggagagcgagugcgugugcaucaacggcacgugcaccguggucaugaccgacggguccgccagcggcaaggccgacaccaagauccucuucaucgaggagggcaagaucgugcacacgagcacccuguccgggagcgcgcagcacguggaggagugcuccugcuacccccgguaccccggcguccgcugcgugugccgggacaacuggaaggggagcaaccgcccgaucguggacaucaacaucaaggaccacuccaucgucagcuccuacgugugcagcggccuggugggcgacacgccccggaagaacgacuccagcuccagcucccacugccucgaccccaacaacgaggagggcgggcacggggucaagggcugggccuucgacgacgggaacgacguguggaugggccgcaccaucagcgagaagucccggcugggcuacgagaccuucaaggucaucgagggguggagcaaccccaaguccaagcugcagaucaaccgccaggugaucguggaccggggcaaccgcagcggguacuccggcaucuucagcgucgagggcaagagcugcaucaaccggugcuucuacguggagcucauccgcgggcggaaggaggagaccgaggugcuguggaccuccaacagcaucgucguguucugcggcaccuccgggacguacggcaccgggagcuggccggacggcgccgacaucaaccugaugcccaucuga

SEQ ID NO: 80147 - RNA, 1410 nt, Artificial Sequence; identical to SEQ ID NO: 79908
  derived and/or modified CDS sequence (opt1) from neuraminidase__InfluenzaA__ABV45995

SEQ ID NO: 80148 - RNA, 1413 nt, Artificial Sequence; identical to SEQ ID NO: 80067
  derived and/or modified CDS sequence (opt1) from neuraminidase__InfluenzaA__ABV82554

SEQ ID NO: 80149 - RNA, 1410 nt, Artificial Sequence; identical to SEQ ID NO: 80090
  derived and/or modified CDS sequence (opt1) from neuraminidase__InfluenzaA__ABV82565

SEQ ID NO: 80150 - RNA, 1410 nt, Artificial Sequence; identical to SEQ ID NO: 80090
  derived and/or modified CDS sequence (opt1) from neuraminidase__InfluenzaA__ABW36171

SEQ ID NO: 80151 - RNA, 1413 nt, Artificial Sequence; identical to SEQ ID NO: 80106
  derived and/or modified CDS sequence (opt1) from neuraminidase__InfluenzaA__ABW36193

SEQ ID NO: 80152 - RNA, 1413 nt, Artificial Sequence; identical to SEQ ID NO: 80054
  derived and/or modified CDS sequence (opt1) from neuraminidase__InfluenzaA__ABW36204

SEQ ID NO: 80153 - RNA, 1413 nt, Artificial Sequence
  derived and/or modified CDS sequence (opt1) from neuraminidase__InfluenzaA__ABW36215
augaaccccaaccagaagaucaucaccaucggcagcaucuccaucgccaucgggaucaucagccugaugcuccagaucggcaacaucaucuccaucugggccagccacuccauccagaccgggagccagaaccacacgggcaucugcaaccagcgcaucaucaccuacgagaacuccaccugggugaaccacaccuacgucaacaucaacaacacgaacgugguggcggggaaggacaagaccagcgucacccuggccggcaacuccagccugugcuccaucagcggcugggccaucuacaccaaggacaacuccauccggaucgggagcaagggcgacguguucgugauccgcgagccguucaucuccugcagccaccucgagugccggacguucuuccugacccagggggcccugcucaacgacaagcacuccaacggcaccgucaaggaccgcagccccuaccgggcccugauguccugcccccugggggaggcgcccagcccguacaacagcaaguucgaguccguggccuggagcgccuccgccugccacgacggcaagggcuggcucaccaucgggaucagcggccccgacaacggggcgguggccguccugaaguacaacggcaucaucacggagaccaucaaguccuggaacaagcagauccugcgcacccaggagagcgagugcgugugcgugaacggcuccugcuucaccaucaugacggacgggcccagcaacggcgccgccuccuacaagaucuucaagaucgagaaggggaaggucaccaagagcaucgagcucaacgcccccaacuuccacuacgaggagugcuccugcuacccggacaccggcaccgugaugugcgugugccgggacaacuggcacgggagcaaccgccccugggucuccuucaaccagaaccuggacuaccagaucggcuacaucugcagcggcguguucggggacaacccccggcccaaggacggccgcggguccugcaacccggugacggucgacggcgcggacggggugaagggcuucagcuacaaguacggcaacgggguguggaucggccggaccaaguccaaccgccugcggaagggguucgagaugaucugggaccccaacggcuggaccgacaccgacagccacuucuccgucaagcaggacgugguggccaucacggacuggagcggguacagcggcuccuucguccagcaccccgagcucaccggccuggacugcaucaagcccugcuucuggguggagcugguccgcgggcucccgcgggagaacaccaccaucuggacgagcggcuccagcaucuccuucugcgggguggacagcgacaccgccaacugguccuggcccgacggcgccgagcugcccuucaucaucgacaaguga

SEQ ID NO: 80154 - RNA, 1413 nt, Artificial Sequence; identical to SEQ ID NO: 80054
  derived and/or modified CDS sequence (opt1) from neuraminidase__InfluenzaA__ABW36226

SEQ ID NO: 80155 - RNA, 1413 nt, Artificial Sequence
  derived and/or modified CDS sequence (opt1) from neuraminidase__InfluenzaA__ABW36237
augaaccccaaccagaagaucaucaccaucggcagcaucuccaucaccaucgggaucaucagccugaugcuccagaucggcaacaucaucuccaucugggccagccacuccauccagacggggagccagaaccacaccggcaucugcaaccagcgcaucaucaccuacgagaacuccaccugggugaaccacacguacgucaacaucaacaacaccaacgugguggccgggaaggacaagaccagcgucacccuggcgggcaacuccagccugugcuccaucagcggcugggccaucuacacgaaggacaacuccauccggaucgggagcaagggcgacguguucgugauccgcgagccguucaucuccugcagccaccucgagugccggaccuucuuccugacccagggggcccugcucaacgacaagcacuccaacggcaccgucaaggaccgcagccccuaccgggcccugauguccugcccccugggggaggcccccagcccguacaacagcaaguucgaguccguggcguggagcgccuccgccugccacgacggcaugggcuggcucacgaucgggaucagcggccccgacaacggggccguggcgguccugaaguacaacggcaucaucaccgagaccaucaaguccuggaagaagcgcauccugcggacccaggagagcgagugcgugugcgugaacggcuccugcuucacgaucaugaccgacgggcccagcaacggcgccgccuccuacaagaucuucaagaucgagaaggggaaggucaccaagagcaucgagcucaacgcccccaacuuccacuacgaggagugcuccugcuacccggacaccggcacggugaugugcgugugccgcgacaacuggcacgggagcaaccggcccugggucuccuucaaccagaaccuggacuaccaggugggcuacaucugcagcggcguguucggggacaacccccgccccaaggacggcaagggguccugcaacccgaugaccgucgacggcgccgacggggugaagggcuucagcuacaaguacggcaacgggguguggaucggccggaccaaguccaacaagcugcgcaagggguucgagaugaucugggaccccaacggcuggaccgacacggacagcgacuucuccgucaagcaggacgugguggcgaucaccgacuggagcggguacagcggcuccuucguccagcaccccgagcucaccggccuggacugcauccggcccugcuucuggguggagcugguccgcgggcucccgcgggagaacaccacgaucuggaccagcggcuccagcaucuccuucugcgggguggacagcgacaccgccaacugguccuggcccgacggcgccgagcugcccuucaccaucgacaaguga

SEQ ID NO: 80156 - RNA, 1413 nt, Artificial Sequence; identical to SEQ ID NO: 80054
  derived and/or modified CDS sequence (opt1) from neuraminidase__InfluenzaA__ABW36248

SEQ ID NO: 80157 - RNA, 1413 nt, Artificial Sequence
  derived and/or modified CDS sequence (opt1) from neuraminidase__InfluenzaA__ABW36259
augaaccccaaccagaagaucaucaccaucggcagcaucuccaucgccaucgggaucaucagccugaugcuccagaucggcaacaucaucuccaucugggccagccacuccauccagaccgggagccagaacaacacgggcaucugcaaccagcgcaucaucaccuacgagaacuccaccugggugaaccacaccuacgucaacaucaacaacacgaacgugguggcggggaaggacaagaccagcgucacccuggccggcaacuccagccugugcuccaucagcggcugggccaucuacaccaaggacaacuccauccggaucgggagcaagggcgacguguucgugauccgcgagccguucaucuccugcagccaccucgagugccggacguucuuccugacccagggggcccugcucaacgacaagcacuccaacggcaccgucaaggaccgcagccccuaccgggcccugauguccugcccccugggggaggcgcccagcccguacaacagcaaguucgaguccguggccuggagcgccuccgccugccacgacggcaugggcuggcucaccaucgggaucagcggccccgacaacggggcgguggccguccugaaguacaacggcaucaucacgggcaccaucaaguccuggaagaagcagauccugcgcacccaggagagcgagugcgugugcaugaacggguccugcuucaccaucaugacggacggccccagcaaccgggccgccuccuacaagaucuucaagaucgagaaggggaaggugaccaagagcaucgagcucaacgcccccaacuuccacuacgaggagugcuccugcuacccggacaccggcaucgucaugugcgugugccgcgacaacuggcacgggagcaaccggcccuggguguccuucaaccagaaccuggacuaccagaucggcuacaucugcagcggcguccugggggacaacccccgccccgaggacggcgagggguccugcaacccggugaccguggacggcgcggacggggucaagggcuucagcuacaaguacgacaacggcguguggaucgggcggacgaaguccaaccgccuccggaagggcuucgagaugaucugggaccccaacggguggaccaacaccgacagcgacuucuccgugaagcaggacgucguggccaucaccgacuggagcggcuacagcggguccuucgugcagcaccccgagcugacgggccuggacugcauccgccccugcuucugggucgagcucgugcggggccugccgcgcgagaacaccaccaucuggaccagcggguccagcaucuccuucugcggcgucagcuccgacacggccaacuggagcuggcccgacggggccgagcugcccuucaccaucgacaaguga

SEQ ID NO: 80158 - RNA, 1413 nt, Artificial Sequence; identical to SEQ ID NO: 80054
  derived and/or modified CDS sequence (opt1) from neuraminidase__InfluenzaA__ABW36281

SEQ ID NO: 80159 - RNA, 1413 nt, Artificial Sequence; identical to SEQ ID NO: 80054
  derived and/or modified CDS sequence (opt1) from neuraminidase__InfluenzaA__ABW36292

SEQ ID NO: 80160 - RNA, 1413 nt, Artificial Sequence; identical to SEQ ID NO: 80067
  derived and/or modified CDS sequence (opt1) from neuraminidase__InfluenzaA__ABW36303

SEQ ID NO: 80161 - RNA, 1413 nt, Artificial Sequence
  derived and/or modified CDS sequence (opt1) from neuraminidase__InfluenzaA__ABW36314
augaaccccaaccagaagaucaucaccaucggcagcaucugcauggccaucgggaucaucucccugauccuccagaucggcaacaucaucagcaucugggugucccacagcauccagaccgggucccagaaccacacgggcaucugcaaccagcgcaucaucaccuacgagaacagcaccugggucaaccagaccuacgugaacaucuccaacacgaacguggucgccgggaaggacaccaccagcaugacccuggcgggcaacuccagccugugcccgauccggggcugggccaucuacuccaaggacaacagcauccgcaucggguccaagggcgacguguucgugauccgggagcccuucaucagcugcucccaccucgagugccgcacguucuuccugacccagggggcccugcucaacgacaagcacagcaacggcaccgucaaggaccggucccccuaccgcgcccugaugagcugccccaucggggaggccccgucccccuacaacagccgguucgagagcguggcgugguccgccagcgccugccacgacggcaugggcuggcugaccaucgggaucuccggccccgacgacggggccguggcgguccucaaguacaacggcaucaucacggagaccaucaagagcuggcgcaagcagauccugcggacccaggaguccgagugcgugugcgugaacggcagcugcuucaccaucaugacggacgggcccuccgacggccaggccagcuaccgcaucuucaagaucgagaaggggaagaucaccaaguccaucgagcuggacgccccgaacuuccacuacgaggagugcagcugcuaccccgacaccggcaccgucaugugcgugugccgggacaacuggcacggguccaaccgccccugggugagcuucaaccagaaccucgacuaccagaucggcuacaucugcuccggcgucuucggggacaacccccggccgaaggacggcaaggggagcugcgaccccgugaacguggacggcgccgacggggucaagggcuucuccuaccgcuacggcaacgggguguggaucggccggaccaagagcaacuccagccgcaagggguucgagaugaucugggaccccaacggcuggacggacaccgacuccaacuuccuggugaagcaggacgucguggccaugaccgacuggagcggguacagcggcuccuucgugcagcaccccgagcugacgggccucgacugcaugcggccgugcuucugggucgagcugauccgcgggcggccccgcgagaagaccaccaucuggaccagcggcuccagcaucuccuucugcggggugaacagcgacacggucaacugguccuggcccgacggcgcggagcugcccuucaccaucgacaaguga

SEQ ID NO: 80162 - RNA, 1410 nt, Artificial Sequence
  derived and/or modified CDS sequence (opt1) from neuraminidase__InfluenzaA__ABW38366
augaaccccaaccagaagaucaucaccaucggcagcgugucccugaccaucagcacgaucugcuucuucaugcagaucgccauccucaucaccaccgucacccugcacuucaagcaguacgaguucaacuccccgcccaacaaccaggugaugcugugcgagcccacgaucaucgagcgcaacaucaccgagaucguguaccucaccaacaccacgaucgagaaggagaucugccccaagcuggccgaguaccggaacuggagcaagccgcagugcaacaucaccggguucgcgcccuucuccaaggacaacagcauccgccuguccgccggcggggacaucugggucacccgggagcccuacgugagcugcgaccccgacaagugcuaccaguucgcccucggccaggggaccacgcugaacaacgugcacuccaacgacaccguccacgaccgcaccccguaccggacccugcucaugaacgagcugggcgugcccuuccaccugggcacgaagcaggucugcaucgccuggagcuccagcuccugccacgacgggaaggccuggcuccacgugugcgugaccggcgacgacaagaacgcgaccgccagcuucaucuacaacgggcgccugguggacuccaucgccagcugguccaaggagauccugcggacccaggagagcgagugcgucugcaucaacggcacgugcaccguggugaugaccgacggguccgccagcggcaaggcggacaccaagauccucuucaucgaggagggcaagaucguccacacgagcacccuguccgggagcgcccagcacguggaggagugcuccugcuacccccgcuaccccggcgugcggugcgucugccgcgacaacuggaaggggagcaaccggccgaucguggacaucaacaucaaggacuacuccaucgugagcuccuacgucugcagcggccuggugggcgacacgccccgcaagaacgacuccagcuccagcucccacugccucgaccccaacaacgaggagggcgggcacggggugaagggcugggccuucgacgacgggaacgacgucuggaugggccggaccaucagcgagaagcugcgcuccggcuacgagaccuucaaggugaucgagggguggagcaaccccaacuccaagcugcagaucaaccggcaggucaucguggaccgcggcaaccggagcggguacuccggcaucuucagcguggagggcaagagcugcaucaaccgcugcuucuacgucgagcucauccgggggcgcaaggaggagaccgaggugcuguggaccuccaacagcaucguggucuucugcggcaccuccgggacguacggcaccgggagcuggccggacggcgccgacaucaaccugaugcccaucuga

SEQ ID NO: 80163 - RNA, 1413 nt, Artificial Sequence; identical to SEQ ID NO: 80153
  derived and/or modified CDS sequence (opt1) from neuraminidase__InfluenzaA__ABW39780

SEQ ID NO: 80164 - RNA, 1413 nt, Artificial Sequence
  derived and/or modified CDS sequence (opt1) from neuraminidase__InfluenzaA__ABW39809
augaaccccaaccagaagaucaucaccaucggcagcaucuccaucgccaucgggaucaucagccugaugcuccagaucggcaacaucaucuccaucugggccagccacuccauccagaccgggagccagaaccacacgggcaucugcaaccagcgcaucaucaccuacgagaacuccaccugggugaaccacaccuacgucagcaucaacaacacgaacgugguggcggggaaggacaagacccuggucacccuggccggcaacuccagccucugcuccaucagcggcugggccaucuacaccaaggacaacuccauccggaucgggagcaagggcgacguguucgugauccgcgagccguucaucuccugcagccaccuggagugccggacguucuuccugacccagggggcccuccugaacgacaagcacuccaacggcaccgucaaggaccgcagccccuaccgggcccugauguccugcccccucggggaggcgcccagcccguacaacagcaaguucgaguccguggccuggagcgccuccgccugccacgacggcaugggcuggcugaccaucgggaucagcggccccgacaacggggcgguggccguccugaaguacaacggcaucaucacggagaccaucaaguccuggaagaagcgcauccuccggacccaggagagcgagugcgugugcgugaacggcuccugcuucaccaucaugacggacgggcccagcaacggcgccgccuccuacaagaucuucaagaucgagaaggggaaggucaccaagagcaucgagcugaacgcccccaacuuccacuacgaggagugcuccugcuacccggacaccggcaccgugaugugcgugugccgcgacaacuggcacgggagcaaccggcccugggucuccuucaaccagaaccuggacuaccagaucggcuacaucugcagcggcguguucggggacaacccccgccccaaggacggcaagggguccugcaacccggugacggucgacggcgcggacggggugaagggcuucagcuacaaguacggcaacgggguguggaucggccggaccaaguccaaccgccuccggaagggguucgagaugaucugggaccccaacggcuggaccgacaccgacagcgacuucuccgucaagcaggacgugguggccaucacggacuggagcggguacagcggcuccuucguccagcaccccgagcugaccggccuggacugcauccgccccugcuucuggguggagcucguccgggggcugccgcgcgagaacaccaccaucuggacgagcggcuccagcaucuccuucugcgggguggacagcgacaccgccaacugguccuggcccgacggcgccgagcugcccuucaccaucgacaaguga

SEQ ID NO: 80165 - RNA, 1413 nt, Artificial Sequence; identical to SEQ ID NO: 80067
  derived and/or modified CDS sequence (opt1) from neuraminidase__InfluenzaA__ABW39820

SEQ ID NO: 80166 - RNA, 1413 nt, Artificial Sequence
  derived and/or modified CDS sequence (opt1) from neuraminidase__InfluenzaA__ABW39831
augaaccccaaccagaagaucaucaccaucggcagcaucuccaucgccaucgggaucaucagccugaugcuccagaucggcaacaucaucuccaucugggccagccacuccauccagaccgggagccagaaccacacgggcaucugcaaccagcgcaucaucaccuacgagaacuccaccugggugaaccacaccuacgucaacaucaacaacacgaacgugguggcggggaaggacaagaccccggucacccuggugggcaacagcucccugugcagcaucuccggcugggccaucuacaccaaggacaacagcauccggaucggguccaagggcgacguguucgucauccgcgagcccuucaucagcugcucccaccucgagugcaagacguucuuccugacccagggggcccugcucaacgacaagcacagcaacggcaccgugaaggaccggucccccuaccgcgcccugaugagcugcccccugggggaggccccgucccccuacaacagcaaguucgagagcguggcgugguccgccagcgccugccacgacggcaucggcuggcucaccaucgggaucuccggccccgacaacggggccgucgcggugcugaaguacaacggcaucaucacgggcaccaucaagagcuggaagaagcagauccugcggacccaggaguccgagugcgugugcaugaacgggagcugcuucaccaucaugacggacggccccuccaacggggccgccagcuacaagaucuucaagaucgagaagggcaaggucaccaaguccauggagcucaacgccccgaacuuccacuacgaggagugcagcugcuaccccgacaccgggaccgugaugugcgugugccgcgacaacuggcacggcuccaaccggcccugggucagcuucaaccagaaccuggacuaccagaucggcuacaucugcuccgggguguucggcgacaacccccgcccgaaggacggggagggcagcugcaaccccgugacggucgacggggccaacggcgugaagggcuucuccuacaaguacgggaacggcguguggaucgggcggaccaagagcaaccgcauccggaagggcuucgagaugaucugggaccccaacggguggaccaacaccgacuccgacuucagcgucaagcaggacaucguggcgaucacggacugguccggcuacagcggcagcuucgugcagcaccccgagcugaccgggcucgacugcauccgcccgugcuucugggucgagcuggugcggggccugccccgcgagaacaccaccaucuggacguccgggagcuccaucagcuucugcggcgucaacggcgacaucgccaacugguccuggcccgacggggccgagcuccccuucaccaucgacaaguga

SEQ ID NO: 80167 - RNA, 1413 nt, Artificial Sequence; identical to SEQ ID NO: 80080
  derived and/or modified CDS sequence (opt1) from neuraminidase__InfluenzaA__ABW39842

SEQ ID NO: 80168 - RNA, 1413 nt, Artificial Sequence; identical to SEQ ID NO: 80054
  derived and/or modified CDS sequence (opt1) from neuraminidase__InfluenzaA__ABW39864

SEQ ID NO: 80169 - RNA, 1410 nt, Artificial Sequence; identical to SEQ ID NO: 80090
  derived and/or modified CDS sequence (opt1) from neuraminidase__InfluenzaA__ABW39875

SEQ ID NO: 80170 - RNA, 1413 nt, Artificial Sequence
  derived and/or modified CDS sequence (opt1) from neuraminidase__InfluenzaA__ABW39886
augaaccccaaccagaagaucaucaccaucggcagcaucuccaucgccaucgggaucaucagccugauccuccagaucggcaacaucaucuccaucugggccagccacuccauccagacccgcaaccagaaccacacggggaucugcaaccagcggaucaucaccuacgagaacagcaccugggugaaccacaccuacgucuccaucaacaacacgaacgugguggcgggcaaggacaagaccagcgucacccuggccgggaacuccagccugugcuccaucagcggcugggccaucuacaccaaggacaacuccauccgcaucggcagcaagggggacguguucgugauccgggagccguucaucuccugcagccaccucgagugccgcacguucuuccugacccagggcgcccugcucaacgacaagcacuccaacgggaccgucaaggaccggagccccuaccgcgcccugauguccugcccccugggcgaggcgcccagcccguacaacagcaaguucgaguccguggccuggagcgccuccgccugccacgacgggaugggcuggcucaccaucggcaucagcgggcccgacaacggcgcgguggccguccugaaguacaacgggaucaucacggagaccaucaaguccuggaagaagcggauccugcgcacccaggagagcgagugcgugugcgugaacggcuccugcuucaccaucaugacggacggccccagcaacggggccgccuccuacaagaucuucaagaucgagaagggcaaggucaccaagagcaucgagcucaacgcccccaacuuccacuacgaggagugcuccugcuacccggacaccgggaccgugaugugcgugugccgggacaacuggcacggcagcaaccgccccugggucuccuucaaccagaaccuggacuaccagaucggguacaucugcagcggcguguucggcgacaacccccggcccaaggacgggaagggcuccugcaacccggugacggucgacggggcggacggcgugaagggguucagcuacaaguacggcaacggcguguggaucgggcgcaccaaguccaaccggcugcgcaagggcuucgagaugaucugggaccccaacggguggaccgacaccgacagcgacuucuccgucaagcaggacgugguggccaucacggacuggagcggcuacagcggguccuucguccagcaccccgagcucaccggccuggacugcauccggcccugcuucuggguggagcugguccgcggccucccgcgggagaacaccaccaucuggacgagcggguccagcaucuccuucugcggcguggacagcgacaccgccaacugguccuggcccgacggggccgagcugcccuucaccaucgacaaguga

SEQ ID NO: 80171 - RNA, 1413 nt, Artificial Sequence; identical to SEQ ID NO: 80054
  derived and/or modified CDS sequence (opt1) from neuraminidase__InfluenzaA__ABW39897

SEQ ID NO: 80172 - RNA, 1413 nt, Artificial Sequence
  derived and/or modified CDS sequence (opt1) from neuraminidase__InfluenzaA__ABW39908
augaaccccaaccagaagaucaucaccaucggcagcaucuccaucgccaucgggaucaccagccugaugcuccagaucggcaacaucaucuccaucugggccagccacuccauccagacggggagccagaaccacaccggcaucugcaaccagcgcaucaucaccuacgagaacuccaccugggugaaccacacguacgucagcaucaacaacaccaacgugguggcggggaaggacaagaccuccgucacccuggccggcaacagcucccugugcagcaucuccggcugggccaucuacacgaaggacaacagcauccggaucggguccaagggcgacguguucgugauccgcgagccguucaucagcugcucccaccucgagugccggaccuucuuccugacccagggggcccugcucaacgacaagcacagcaacggcaccgucaaggaccgcucccccuaccgggcccugaugagcugcccccugggggaggcgcccagcccguacaacuccaaguucgagagcguggccugguccgccagcgccugccacgacggcaugggcuggcucacgaucgggaucuccggccccgacaacggggcgguggccguccugaaguacaacggcaucaucaccgagaccaucaagagcuggaagaagcgcauccugcggacccaggaguccgagugcgugugcgugaacggcagcugcuucacgaucaugaccgacgggcccuccaacggcgccgccagcuacaagaucuucaagaucgagaaggggaaggucaccaaguccaucgagcucaacgcccccaacuuccacuacgaggagugcagcugcuacccggacaccggcacggugaugugcgugugccgcgacaacuggcacggguccaaccggcccugggucagcuucaaccagaaccuggacuaccagaucggcuacaucugcuccggcguguucggggacaacccccgccccaaggacggcaaggggagcugcaacccggugaccgucgacggcgcggacggggugaagggcuucuccuacaaguacggcaacgggguguggaucggccggaccaagagcaaccgccugcggaagggguucgagaugaucugggaccccaacggcuggaccgacacggacuccgacuucagcgucaagcaggacgugguggccaucaccgacuggagcggguacuccggcagcuucguccagcaccccgagcucaccggccuggacugcauccgccccugcuucuggguggagcugguccgggggcucccgcgcgagaacaccacgaucuggaccuccggcagcuccaucagcuucugcgggguggacuccgacaccgccaacuggagcuggcccgacggcgccgagcugcccuucaccaucgacaaguga

SEQ ID NO: 80173 - RNA, 1413 nt, Artificial Sequence
  derived and/or modified CDS sequence (opt1) from neuraminidase__InfluenzaA__ABW39930
augaaccccaaccagaagaucaucaccaucggcagcaucuccaucgccaucgggaucaucagccugaugcuccagaucggcaacaucaucuccaucugggccagccacuccauccagaccgggagccagaaccacacgggcaucugcaaccagcgcaucaucaccuacgagaacuccaccugggugaaccacaccuacgucagcaucaacaacacgaacgugguggcggggaaggacaagaccuccgucacccuggccggcaacagcucccugugcagcaucuccggcugggccaucuacaccaaggacaacagcauccggaucggguccaagggcgacguguucgugauccgcgagccguucaucagcugcucccaccucgagugccggacguucuuccugacccagggggcccugcucaacgacaagcacagcaacggcaccgucaaggaccgcucccccuaccgggcccugaugagcugcccccugggggaggcgcccagcccguacaacuccaaguucgagagcguggccugguccgccagcgccugccacgacggcaugggcuggcucaccaucgggaucuccggccccgacaacggggcgguggccguccugaaguacaacggcaucaucacggagaccaucaagagcuggaagaagcgcauccugcggacccaggaguccgagugcgugugcgugaacggcagcugcuucaccaucaugacggacgggcccuccgacggcgccgccagcuacaagaucuucaagaucgagaaggggaaggucaccaaguccaucgagcucaacgcccccaacuuccacuacgaggagugcagcugcuacccggacaccggcaccgugaugugcgugugccgcgacaacuggcacggguccaaccggcccugggucagcuucaaccagaaccuggacuaccagaucggcuacaucugcuccggcguguucggggacaacccccgccccaaggacggcaaggggagcugcaacccggugacggucgacggcgcggacggggugaagggcuucuccuacaaguacggcaacgggguguggaucggccggaccaagagcaaccgccugcggaagggguucgagaugaucugggaccccaacggcuggaccgacaccgacuccgacuucagcgucaagcaggacgugguggccaucacggacuggagcggguacuccggcagcuucguccagcaccccgagcucaccggccuggacugcauccgccccugcuucuggguggagcugguccgggggcucccgcgcgagaacaccaccaucuggacguccggcagcuccaucagcuucugcgggguggacuccgacaccgccaacuggagcuggcccgacggcgccgagcugcccuucaccaucgacaaguga

SEQ ID NO: 80174 - RNA, 1413 nt, Artificial Sequence
  derived and/or modified CDS sequence (opt1) from neuraminidase__InfluenzaA__ABW39952
augaaccccaaccagaagaucaucaccaucggcagcaucuccaucaccaucgggaucaucagccugaugcuccagaucggcaacaucaucuccaucugggccagccacuccauccagacggggagccagaaccacaccggcaugugcaaccagcgcaucaucaccuacgagaacuccaccugggugaaccacacguacgucagcaucaacaacaccaacgugguggccgggaaggacaagaccuccgucacccuggcgggcaacagcucccugugcagcaucuccggcugggccaucuacacgaaggacaacagcauccggaucggguccaagggcgacguguucgugauccgcgagccguucaucagcugcucccaccucgagugccggaccuucuuccugacccagggggcccugcucaacgacaagcacagcaacggcaccgucaaggaccgcucccccuaccgggcccugaugagcugcccccugggggaggcccccagcccguacaacuccaaguucgagagcguggcgugguccgccagcgccugccacgacggcaugggcuggcucacgaucgggaucuccggccccgacaacggggccguggcgguccugaaguacaacggcaucaucaccgagaccaucaagagcuggaagaagcgcauccugcggacccaggaguccgagugcgugugcgugaacggcagcugcuucacgaucaugaccgacgggcccuccaacggcgccgccagcuacaagaucuucaagaucgagaaggggaaggucaccaaguccaucgagcucaacgcccccaacuuccacuacgaggagugcagcugcuacccggacaccggcacggugaugugcgugugccgcgacaacuggcacggguccaaccggcccugggucagcuucaaccagaaccuggacuaccagaucggcuacaucugcuccggcguguucggggacaacccccgccccaaggacggcaaggggagcugcaacccggugaccgucgacggcgccgacggggugaagggcuucuccuacaaguacggcaacgggguguggaucggccggaccaagagcaaccgccugcggaagggguucgagaugaucugggaccccaacggcuggaccgacacggacuccgacuucagcgucaagcaggacgugguggcgaucaccgacuggagcggguacuccggcagcuucguccagcaccccgagcucaccggccuggacugcauccgccccugcuucuggguggagcugguccgggggcucccgcgcgagaacaccacgaucuggaccuccggcagcuccaucagcuucugcgggguggacuccgacaccgccaacuggagcuggcccgacggcgccgagcugcccuucaccaucgacaaguga

SEQ ID NO: 80175 - RNA, 1413 nt, Artificial Sequence; identical to SEQ ID NO: 80054
  derived and/or modified CDS sequence (opt1) from neuraminidase__InfluenzaA__ABW39963

SEQ ID NO: 80176 - RNA, 1413 nt, Artificial Sequence; identical to SEQ ID NO: 80054
  derived and/or modified CDS sequence (opt1) from neuraminidase__InfluenzaA__ABW39985

SEQ ID NO: 80177 - RNA, 1413 nt, Artificial Sequence
  derived and/or modified CDS sequence (opt1) from neuraminidase__InfluenzaA__ABW39996
augaaccccaaccagaagaucaucaccaucggcagcaucuccaucgccaucgggaucaucagccugaugcuccagaucggcaacaucaucuccaucugggccagccacuccauccagaccgggagccagaaccacacgggcaucugcaaccagcgcaucaucaccuacgagaacuccaccugggugaaccacaccuacgucaacaucaacaacacgaacgugguggcggggaaggacaagaccagcgucacccuggccggcaacuccagccugugcuccaucagcggcugggccaucuacaccaaggacaacuccauccggaucgggagcaagggcgacguguucgugauccgcgagccguucaucuccugcagccaccucgagugccggacguucuuccugacccagggggcccugcucaacgacaagcacuccaacggcaccgucaaggaccgcagccccuaccgggcccugauguccugcccccugggggaggcgcccagcccguacaacagcaaguucgaguccguggccuggagcgccuccgccugccacgacggcaugggcuggcucaccaucgggaucagcggccccgacaacggggcgguggccguccugaaguacaacggcaucaucacggagaccaucaaguccuggaagaagcgcauccugcggacccaggagagcgagugcgugugcgugaacggcuccugcuucaccaucaugacggacgggcccagcaacggcaccgccuccuacaagaucuucaagaucgagaaggggaaggucaccaagagcaucgagcucaacgcccccaacuuccacuacgaggagugcuccugcuacccggacaccggcacggugaugugcgugugccgcgacaacuggcacgggagcaaccggcccugggucuccuucaaccagaaccuggacuaccaggugggcuacaucugcagcggcguguucggggacaacccccgccccaaggacggcaagggguccugcaacccgaugaccgucgacggcgccgacggggugaagggcuucagcuacaaguacggcaacgggguguggaucggccggaccaaguccaacaagcugcgcaagggguucgagaugaucugggaccccaacggcuggaccgacacggacagcgacuucuccgucaagcaggacgugguggcgaucaccgacuggagcggguacagcggcuccuucguccagcaccccgagcucaccggccuggacugcauccggcccugcuucuggguggagcugguccgcgggcucccgcgggagaacaccacgaucuggaccagcggcuccagcaucuccuucugcgggguggacagcgacaccgccaacugguccuggcccgacggcgccgagcugcccuucaccaucgacaaguga

SEQ ID NO: 80178 - RNA, 1413 nt, Artificial Sequence; identical to SEQ ID NO: 80054
  derived and/or modified CDS sequence (opt1) from neuraminidase__InfluenzaA__ABW40007

SEQ ID NO: 80179 - RNA, 1413 nt, Artificial Sequence
  derived and/or modified CDS sequence (opt1) from neuraminidase__InfluenzaA__ABW40018
augaaccccaaccagaagaucaucaccaucggcagcaucuccaucgccaucgggaucaucagccugaugcuccagaucggcaacaucaucuccaucugggccagccacuccauccagaccgggagccagaaccacacgggcaucugcaaccagcgcaucaucaccuacgagaacuccaccugggugaaccacaccuacgucaacaucaacaacacgaacgugguggcggggaaggacaagaccagcgucacccuggccggcaacuccagccugugcuccaucagcggcugggccaucuacaccaaggacaacuccauccggaucgggagcaagggcgacguguucgugauccgcgagccguucaucuccugcagccaccucgagugccggacguucuuccugacccagggggcccugcucaacgacaagcacuccaacggcaccgucaaggaccgcagccccuaccgggcccugauguccugcccccugggggaggcgcccagcccguacaacagcaaguucgaguccguggccuggagcgccuccgccugccacgacggcaugggcuggcucaccaucgggaucagcggccccgacaacggggcgguggccguccugaaguacaacggcaucaucacggagaccaucaaguccuggaagaagcgcauccugcggacccaggagagcgagugcgugugcgugaacggcuccugcuucaccaucaugacggacgggcccagcaacggcgccgccuccuacaagaucuucaagaucgagaaggggaaggucaccaagagcaucgagcucaacgcccccaacuuccacuacgaggagugcuccugcuacccggacaccggcaccgugaugugcgugugccgcgacaacuggcacgggagcaaccggcccugggucuccuucaaccagaaccuggacuaccagaucggcuacaucugcagcggcguguucggggacaacccccgccccaaggacggcaagggguccugcaacccggugacggucgacggcgcggacgggaucaagggcuucagcuacaaguacggcaacgggguguggaucggccggaccaaguccaaccgccugcggaagggguucgagaugaucugggaccccaacggcuggaccaacaccgacagcgacuucuccgugaagcaggacgucguggccaucacggacuggagcggguacagcggcuccuucgugcagcaccccgagcucaccggccuggacugcauccgccccugcuucugggucgagcuggugcgggggcucccgcgcgagaacaccaccaucuggacgagcggcuccagcaucuccuucugcggggucgacggcgacaccgccaacuggagcuggcccgacggcgccgagcugcccuucaccaucgacaaguga

SEQ ID NO: 80180 - RNA, 1410 nt, Artificial Sequence; identical to SEQ ID NO: 79908
  derived and/or modified CDS sequence (opt1) from neuraminidase__InfluenzaA__ABW40029

SEQ ID NO: 80181 - RNA, 1413 nt, Artificial Sequence
  derived and/or modified CDS sequence (opt1) from neuraminidase__InfluenzaA__ABW40040
augaaccccaaccagaagaucaucaccaucggcagcaucuccaucgccaucgggaucaucagccugaugcuccagaucggcaacaucaucuccaucugggccagccacuccauccagaccgggagccagaaccacacgggcaucugcaaccagcgcaucaucaccuacgagaacuccaccugggugaaccacaccuacgucagcaucaacaacacgaacgugguggcggggaaggacaagaccuccgucacccuggccggcaacagcucccugugcagcaucuccggcugggccaucuacaccaaggacaacagcauccggaucggguccaagggcgacguguucgugauccgcgagccguucaucagcugcucccaccucgagugccggacguucuuccugacccagggggcccugcucaacgacaagcacagcaacggcaccgucaaggaccgcucccccuaccgggcccugaugagcugcccccugggggaggcgcccagcccguacaacuccaaguucgagagcguggccugguccgccagcgccugccacgacggcaugggcuggcucaccaucgggaucuccggccccgacaacggggcgguggccguccugaaguacaacggcaucaucacggagaccaucaagagcuggaagaagcgcauccugcggacccaggaguccgagugcgugugcgugaacggcagcugcuucaccaucaugacggacgggcccuccaacggcgccgccagcuacaagaucuucaagaucgagaaggggaaggucaccaaguccaucgagcucaacgcccccaacuuccacuacgaggagugcagcugcuacccggacaccggcaccgugaugugcgugugccgcgacaacuggcacggguccaaccggcccugggucagcuucaaccagaaccuggacuaccagaucggcuacaucugcuccggcguguucggggacaacccccgccccaaggacggcaaggggagcugcaacccggugacggucgacggcgcggacggggugaagggcuucuccuacaaguacggcaacgggaucuggaucggccggaccaagagcaaccgccugcggaagggguucgagaugaucugggaccccaacggcuggaccgacaccgacuccgacuucagcgugaagcaggacgucguggccaucacggacuggagcggguacuccggcagcuucgugcagcaccccgagcucaccggccuggacugcauccgccccugcuucugggucgagcuggugcgggggcucccgcgcgagaacaccaccaucuggacguccggcagcuccaucagcuucugcggggucgacuccgacaccgccaacuggagcuggcccgacggcgccgagcugcccuucaccaucgacaaguga

SEQ ID NO: 80182 - RNA, 1413 nt, Artificial Sequence; identical to SEQ ID NO: 80054
  derived and/or modified CDS sequence (opt1) from neuraminidase__InfluenzaA__ABW40051

SEQ ID NO: 80183 - RNA, 1413 nt, Artificial Sequence; identical to SEQ ID NO: 80054
  derived and/or modified CDS sequence (opt1) from neuraminidase__InfluenzaA__ABW40062

SEQ ID NO: 80184 - RNA, 1410 nt, Artificial Sequence; identical to SEQ ID NO: 80090
  derived and/or modified CDS sequence (opt1) from neuraminidase__InfluenzaA__ABW40084

SEQ ID NO: 80185 - RNA, 1413 nt, Artificial Sequence
  derived and/or modified CDS sequence (opt1) from neuraminidase__InfluenzaA__ABW40095
augaaccccaaccagaagaucaucaccaucggcagcaucuccguggccaucgggaucaucagccugaugcuccagaucggcaacaucaucuccaucugggccagccacuccauccagaccgggagccagaaccacacgggcaucugcaaccagcgcaucaucaccuacgagaacuccaccugggucaaccacaccuacgugagcaucaacaacacgaacguggucgcggggaaggacaagaccuccgugacccuggccggcaacagcucccugugcagcaucuccggcugggccaucuacaccaaggacaacagcauccggaucggguccaagggcgacguguucgucauccgcgagccguucaucagcugcucccaccucgagugccggacguucuuccugacccagggggcccugcucaacgacaagcacagcaacggcaccgugaaggaccgcucccccuaccgggcccugaugagcugcccccugggggaggcgcccagcccguacaacuccaaguucgagagcguggccugguccgccagcgccugccacgacggcaugggcuggcucaccaucgggaucuccggccccgacaacggggcggucgccgugcugaaguacaacggcaucaucacggagaccaucaagagcuggaagaagcgcauccugcggacccaggaguccgagugcgugugcgucaacggcagcugcuucaccaucaugacggacgggcccuccaacggcgccgccagcuacaagaucuucaagaucgagaaggggaaggugaccaaguccaucgagcucaacgcccccaacuuccacuacgaggagugcagcugcuacccggacaccggcaccgugaugugcgucugccgcgacaacuggcacggguccaaccggcccugggugagcuucaaccagaaccuggacuaccagaucggcuacaucugcuccggcguguucggggacaacccccgccccaaggacggcaaggggagcugcaacccgaugacggucgacggcgcggacggggugaagggcuucuccuacaaguacggcaacgggguguggaucggccggaccaagagcaaccgccugcggaagggguucgagaugaucugggaccccaacggcuggaccgacaccgacuccgacuucagcgucaagcaggacgugguggccaucacggacuggagcggguacuccggcagcuucguccagcaccccgagcucaccggccuggacugcauccgccccugcuucuggguggagcugguccgggggcucccgcgcgagaacaccaccaucuggacguccggcagcuccaucagcuucugcgggguggacuccgacaccgccaacuggagcuggcccgacggcgccgagcugcccuucaccaucgacaaguga

SEQ ID NO: 80186 - RNA, 1413 nt, Artificial Sequence
  derived and/or modified CDS sequence (opt1) from neuraminidase__InfluenzaA__ABW40106
augaaccccaaccagaagaucaucaccaucggcagcaucuccaucgccaucgggaucaucagccugaugcuccagaucggcaacaucaucuccaucugggccagccacuccauccagaccgggagccagaaccacacgggcaucugcaaccagcgcaucaucaccuacgagaacuccaccugggugaaccacaccuacgucagcaucaacaacacgaacgugguggcggggaaggacaagaccuccgucacccuggccggcaacagcucccugugcagcaucuccggcugggccaucuacaccaaggacaacagcauccggaucggguccaagggcgacguguucgugauccgcgagccguucaucagcugcucccaccucgagugccggacguucuuccugacccagggggcccugcucaacgacaagcacagcaacggcaccgucaaggaccgcucccccuaccgggcccugaugagcugcccccugggggaggcgcccagcccguacaacuccaaguucgagagcguggccugguccgccagcgccugccacgacggcaugggcuggcucaccaucgggaucuccggccccgacaacggggcgguggccguccugaaguacaacggcaucaucacggagaccaucaagagcuggaagaagcgcauccugcggacccaggaguccgagugcgugugccucaacggcagcugcuucaccaucaugacggacgggcccuccaacggcgccgccagcuacaagaucuucaagaucgagaaggggaaggugaccaaguccaucgagcugaacgcccccaacuuccacuacgaggagugcagcugcuacccggacaccggcaccgucaugugcgugugccgcgacaacuggcacggguccaaccggcccugggugagcuucaaccagaaccuggacuaccagaucggcuacaucugcuccggcgucuucggggacaacccccgccccaaggacggcaaggggagcugcaacccggugacgguggacggcgcggacggggucaagggcuucuccuacaaguacggcaacgggguguggaucggccggaccaagagcaaccgccuccggaagggguucgagauggugugggaccccaacggcuggaccgacaccgacuccgacuucagcgucaagcaggacgugguggccaucacggacuggagcggguacuccggcagcuucguccagcaccccgagcugaccggccuggacugcauccgccccugcuucuggguggagcucguccgggggcugccgcgcgagaacaccaccaucuggacguccggcagcuccaucagcuucugcgggguggacuccgacaccgccaacuggagcuggcccgacggcgccgagcugcccuucaccaucgacaaguga

SEQ ID NO: 80187 - RNA, 1413 nt, Artificial Sequence; identical to SEQ ID NO: 80054
  derived and/or modified CDS sequence (opt1) from neuraminidase__InfluenzaA__ABW40117

SEQ ID NO: 80188 - RNA, 1413 nt, Artificial Sequence; identical to SEQ ID NO: 80054
  derived and/or modified CDS sequence (opt1) from neuraminidase__InfluenzaA__ABW40128

SEQ ID NO: 80189 - RNA, 1410 nt, Artificial Sequence; identical to SEQ ID NO: 79908
  derived and/or modified CDS sequence (opt1) from neuraminidase__InfluenzaA__ABW40139

SEQ ID NO: 80190 - RNA, 1413 nt, Artificial Sequence; identical to SEQ ID NO: 80054
  derived and/or modified CDS sequence (opt1) from neuraminidase__InfluenzaA__ABW40150

SEQ ID NO: 80191 - RNA, 1413 nt, Artificial Sequence; identical to SEQ ID NO: 80054
  derived and/or modified CDS sequence (opt1) from neuraminidase__InfluenzaA__ABW40161

SEQ ID NO: 80192 - RNA, 1410 nt, Artificial Sequence
  derived and/or modified CDS sequence (opt1) from neuraminidase__InfluenzaA__ABW40172
augaaccccaaccagaagaucaucaccaucggcagcgugucccugaccaucagcacgaucugcuucuucaugcagaucgccauccucaucaccaccgucacccugcacuucaagcaguacgaguucaacuccccgcccaacaaccaggugaugcugugcgagcccacgaucaucgagcgcaacaucaccgagaucguguaccucaccaacaccacgaucgagaaggagaucugccccaagcuggccgaguaccggaacuggagcaagccgcagugcgacaucaccggguucgcgcccuucuccaaggacaacagcauccgccuguccgccggcggggacaucugggucacccgggagcccuacgugagcugcgaccccgacaagugcuaccaguucgcccucggccaggggaccacgcugaacaacgugcacuccaacgacaccguccgcgaccggaccccguaccgcacccugcucaugaacgagcugggcgugcccuuccaccugggcacgaagcaggucugcaucgccuggagcuccagcuccugccacgacgggaaggccuggcuccacgugugcaucaccggcgacgacaagaacgcgaccgccagcuucaucuacaacgggcggcugguggacuccaucgugagcugguccaaggagauccugcgcacccaggagagcgagugcgucugcaucaacggcacgugcaccguggugaugaccgacggguccgccagcggcaaggccgacaccaagauccucuucaucgaggagggcaagaucguccacacgagcacccuguccgggagcgcgcagcacguggaggagugcuccugcuacccccgguaccccggcgugcgcugcgucugccgggacaacuggaaggggagcaaccgcccgaucguggacaucaacaucaaggaccacuccaucgugagcuccuacgucugcagcggccuggugggcgacacgccccggaagaacgacuccagcuccagcucccacugccucgaccccaacaacgaggagggcgggcacggggugaagggcugggccuucgacgacgggaacgacgucuggaugggccgcaccaucagcgagaagucccggcugggcuacgagaccuucaaggugaucgagggguggagcaaccccaaguccaagcugcagaucaaccgccaggucaucguggaccggggcaaccgcagcggguacuccggcaucuucagcguggagggcaagagcugcaucaaccggugcuucuacgucgagcucacccgcgggcggaaggaggagaccgaggugcuguggaccuccaacagcaucguggucuucugcggcacguccgggaccuacggcaccgggagcuggccggacggcgccgacaucaaccugaugcccaucuga

SEQ ID NO: 80193 - RNA, 1413 nt, Artificial Sequence; identical to SEQ ID NO: 80054
  derived and/or modified CDS sequence (opt1) from neuraminidase__InfluenzaA__ABW40183

SEQ ID NO: 80194 - RNA, 1410 nt, Artificial Sequence; identical to SEQ ID NO: 79908
  derived and/or modified CDS sequence (opt1) from neuraminidase__InfluenzaA__ABW40194

SEQ ID NO: 80195 - RNA, 1413 nt, Artificial Sequence; identical to SEQ ID NO: 80089
  derived and/or modified CDS sequence (opt1) from neuraminidase__InfluenzaA__ABW40205

SEQ ID NO: 80196 - RNA, 1413 nt, Artificial Sequence; identical to SEQ ID NO: 80093
  derived and/or modified CDS sequence (opt1) from neuraminidase__InfluenzaA__ABW40216

SEQ ID NO: 80197 - RNA, 1413 nt, Artificial Sequence; identical to SEQ ID NO: 80093
  derived and/or modified CDS sequence (opt1) from neuraminidase__InfluenzaA__ABW40227

SEQ ID NO: 80198 - RNA, 1413 nt, Artificial Sequence; identical to SEQ ID NO: 80054
  derived and/or modified CDS sequence (opt1) from neuraminidase__InfluenzaA__ABW40238

SEQ ID NO: 80199 - RNA, 1410 nt, Artificial Sequence
  derived and/or modified CDS sequence (opt1) from neuraminidase__InfluenzaA__ABW40249
augaaccccaaccagaagaucaucaccaucggcagcgugucccugaccaucagcacgaucugcuucuucaugcagaucgccauccucaucaccaccgucacccugcacuucaagcaguacgaguucaacuccccgcccaacaaccaggugaugcugugcgagcccacgaucaucgagcgcaacaucaccgagaucguguaccucaccaacaccacgaucgagaaggagaucugccccaagcuggccgaguaccggaacuggagcaagccgcagugcgacaucaccggguucgcgcccuucuccaaggacaacagcauccgccuguccgccggcggggacaucugggucacccgggagcccuacgugagcugcgaccccgacaagugcuaccaguucgcccucggccaggggaccacgcugaacaacgugcacuccaacgacaccguccgcgaccggaccccguaccgcacccugcucaugaacgagcugggcgugcccuuccaccugggcacgaagcaggucugcaucgccuggagcuccagcuccugccacgacgggaaggccuggcuccacgugugcaucaccggcgacgacaagaacgcgaccgccagcuucaucuacaacgggcggcugguggacuccaucgugagcugguccaaggagauccugcgcacccaggagagcgagugcgucugcaucaacggcacgugcaccguggugaugaccgacggguccgccagcggcaaggccgacaccaagauccucuucaucgaggagggcaagaucguccacacgagcacccuguccgggagcgcgcagcacguggaggagugcuccugcuacccccgguaccccggcgugcgcugcgucugccgggacaacuggaaggggagcaaccgcccgaucguggacaucaacaucaaggaccacuccaucgugagcuccuacgucugcagcggccuggugggcgacacgccccggaagaacgacuccagcuccagcucccacugccucgaccccaacaacgaggagggcgggcacggggugaagggcugggccuucgacgacgggaacgacgucuggaugggccgcaccaucagcgagaagucccggcugggcuacgagaccuucaaggugaucgagggguggagcaaccacaaguccaagcugcagaucaaccgccaggucaucguggaccggggcaaccgcagcggguacuccggcaucuucagcguggagggcaagagcugcaucaaccggugcuucuacgucgagcucauccgcgggcggaaggaggagaccgaggugcuguggaccuccaacagcaucguggucuucugcggcaccuccgggacguacggcaccgggagcuggcccgacggcgccgacaucaaccugaugccgaucuga

SEQ ID NO: 80200 - RNA, 1413 nt, Artificial Sequence; identical to SEQ ID NO: 80054
  derived and/or modified CDS sequence (opt1) from neuraminidase__InfluenzaA__ABW40260

SEQ ID NO: 80201 - RNA, 1410 nt, Artificial Sequence
  derived and/or modified CDS sequence (opt1) from neuraminidase__InfluenzaA__ABW40271
augaaccccaaccagaagaucaucaccaucggcagcgugucccugaccaucagcacgaucugcuucuucaugcagaucgccauccucaucaccaccgucacccugcacuucaagcaguacgaguucaacuccccgcccaacaaccaggugaugcugugcgagcccacgaucaucgagcgcaacaucaccgagaucguguaccucaccaacaccacgaucgagaaggagaucugccccaagcuggccgagcaccggaacuggagcaagccgcagugcgacaucaccggguucgcgcccuucuccaaggacaacagcauccgccuguccgccggcggggacaucugggucacccgggagcccuacgugagcugcgaccccgacaagugcuaccaguucgcccucggccaggggaccacgcugaacaacgugcacuccaacgacaccguccgcgaccggaccccguaccgcacccugcucaugaacgagcugggcgugcccuuccaccugggcacgaagcaggucugcaucgccuggagcuccagcuccugccacgacgggaaggccuggcuccacgugugcaucaccggcgacgacaagaacgcgaccgccagcuucaucuacaacgggcggcugguggacuccaucgugagcugguccaaggagauccugcgcacccaggagagcgagugcgucugcaucaacggcacgugcaccguggugaugaccgacggguccgccagcggcaaggccgacaccaagauccucuucaucgaggagggcaagaucguccacacgagcacccuguccgggagcgcgcagcacguggaggagugcuccugcuacccccgguaccccggcgugcgcugcgucugccgggacaacuggaaggggagcaaccgcccgaucguggacaucaacaucaaggaccacuccaucgugagcuccuacgucugcagcggccuggugggcgacacgccccggaagaacgacuccagcuccagcucccacugccucgaccccaacaacgaggagggcgggcacggggugaagggcugggccuucgacgacgggaacgacgucuggaugggccgcaccaucagcgagaagucccggcugggcuacgagaccuucaaggugaucgagggguggagcaaccccaaguccaagcugcagaucaaccgccaggucaucguggaccggggcaaccgcagcggguacuccggcaucuucagcguggagggcaagagcugcaucaaccggugcuucuacgucgagcucauccgcgggcggaaggaggagaccgaggugcuguggaccuccaacagcaucguggucuucugcggcaccuccgggacguacggcaccgggagcuggccggacggcgccgacaucaaccugaugcccaucuga

SEQ ID NO: 80202 - RNA, 1413 nt, Artificial Sequence; identical to SEQ ID NO: 80054
  derived and/or modified CDS sequence (opt1) from neuraminidase__InfluenzaA__ABW40282

SEQ ID NO: 80203 - RNA, 1413 nt, Artificial Sequence; identical to SEQ ID NO: 80089
  derived and/or modified CDS sequence (opt1) from neuraminidase__InfluenzaA__ABW40293

SEQ ID NO: 80204 - RNA, 1413 nt, Artificial Sequence; identical to SEQ ID NO: 80054
  derived and/or modified CDS sequence (opt1) from neuraminidase__InfluenzaA__ABW40304

SEQ ID NO: 80205 - RNA, 1413 nt, Artificial Sequence; identical to SEQ ID NO: 80054
  derived and/or modified CDS sequence (opt1) from neuraminidase__InfluenzaA__ABW40315

SEQ ID NO: 80206 - RNA, 1410 nt, Artificial Sequence; identical to SEQ ID NO: 79908
  derived and/or modified CDS sequence (opt1) from neuraminidase__InfluenzaA__ABW40326

SEQ ID NO: 80207 - RNA, 1413 nt, Artificial Sequence; identical to SEQ ID NO: 80095
  derived and/or modified CDS sequence (opt1) from neuraminidase__InfluenzaA__ABW40337

SEQ ID NO: 80208 - RNA, 1413 nt, Artificial Sequence; identical to SEQ ID NO: 80089
  derived and/or modified CDS sequence (opt1) from neuraminidase__InfluenzaA__ABW40359

SEQ ID NO: 80209 - RNA, 1413 nt, Artificial Sequence
  derived and/or modified CDS sequence (opt1) from neuraminidase__InfluenzaA__ABW40370
augaaccccaaccagaagaucaucaccaucggcagcaucuccaucgccaucgggaucaucagccugaugcuccagaucggcaacaucaucuccaucugggccagccacuccauccagaccgggagccagaaccacacgggcaucugcaaccagcgcaucaucaccuacgagaacuccaccugggugaaccacaccuacgucagcaucaacaacacgaacgugguggcggggaaggacaagaccuccgucacccuggccggcaacagcucccugugcagcaucuccggcugggccaucuacaccaaggacaacagcauccggaucggguccaagggcgacguguucgugauccgcgagccguucaucagcugcucccaccucgagugccggacguucuuccugacccagggggcccugcucaacgacaagcacagcaacggcaccgucaaggaccgcucccccuaccgggcccugaugagcugcccccugggggaggcgcccagcccguacaacuccaaguucgagagcguggccugguccgccagcgccugccacgacggcaugggcuggcucaccaucgggaucuccggccccgacaacggggcgguggccguccugaaguacaacggcaucaucacggagaccaucaagagcuggaagaagcgcauccugcggacccaggaguccgagugcgugugcgugaacggcagcugcuucaccaucaugacggacgggcccuccaacggcgccgccagcuacaagaucuucaagaucgagaaggggaaggucaccaaguccaucgagcucaacgcccccaacuuccacuacgaggagugcagcugcuacccggacuccggcaccgugaugugcgugugccgcgacaacuggcacgggagcaaccggcccugggucuccuucaaccagaaccuggacuaccagaucggcuacaucugcagcggcguguucggggacaacccccgccccaaggacggcaagggguccugcaacccggugaccgucgacggcgcggacggggugaagggcuucagcuacaaguacggcaacgggguguggaucggccggacgaaguccaaccgccugcggaagggguucgagaugaucugggaccccaacggcuggaccgacaccgacagcgacuucagcgucaagcaggacgugguggccaucaccgacugguccggguacagcggcuccuucguccagcaccccgagcucacgggccuggacugcauccgccccugcuucuggguggagcugguccgggggcucccgcgcgagaacaccaccaucuggaccagcggcuccagcaucuccuucugcgggguggacagcgacacggccaacugguccuggcccgacggcgccgagcugcccuucaccaucgacaaguga

SEQ ID NO: 80210 - RNA, 1413 nt, Artificial Sequence; identical to SEQ ID NO: 80054
  derived and/or modified CDS sequence (opt1) from neuraminidase__InfluenzaA__ABW40403

SEQ ID NO: 80211 - RNA, 1413 nt, Artificial Sequence
  derived and/or modified CDS sequence (opt1) from neuraminidase__InfluenzaA__ABW40414
augaaccccaaccagaagaucaucaccaucggcagcaucuccaucgccaucgggaucaucagccugaugcuccagaucggcaacaucaucuccaucugggccagccacuccauccagaccgggagccagaaccacacgggcaucugcaaccagcgcaucaucaccuacgagaacuccaccugggugaaccacaccuacgucagcaucaacaacacgaacgugguggcggggaaggacaagaccuccgucacccuggccggcaacagcucccugugcagcaucuccggcugggccaucuacaccaaggacaacagcauccggaucggguccaagggcgacguguucgugauccgcgagccguucaucagcugcucccaccucgagugccggacguucuuccugacccagggggcccugcucaacgacaagcacagcaacggcaccgucaaggaccgcucccccuaccgggcccugaugagcugcccccugggggaggcgcccagcccguacaacuccaaguucgagagcguggccugguccgccagcgccugccacgacggcaugggcuggcucaccaucgggaucuccggccccgacaacggggcgguggccguccugaaguacaacggcaucaucacggagaccaucaagagcuggaagaagcgcauccugcggacccaggaguccgagugcgugugcgugaacggcagcugcuucaccaucaugacggacgggcccuccaacggcgccgccagcuacaagaucuucaagaucgagaaggggaaggucaccaaguccaucgagcucaacgcccccaacuuccacuacgaggagugcagcugcuacccggacaccggcaccgugaugugcgugugccgcgacaacuggcacggguccaaccggcccugggucagcuucgaccagaaccuggacuaccagaucggcuacaucugcuccggcguguucggggacaacccccgccccaaggacggcaaggggagcugcaacccggugacggucgacggcgcggacggggugaagggcuucuccuacaaguacggcaacgggguguggaucggccggaccaagagcaaccgccugcggaagggguucgagaugaucugggaccccaacggcuggaccgacaccgacuccgacuucagcgucaagcaggacgugguggccaucacggacuggagcggguacuccggcagcuucguccagcaccccgagcucaccggccuggacugcauccgccccugcuucuggguggagcugguccgggggcucccgcgcgagaacaccaccaucuggacguccggcagcuccaucagcuucugcgggguggacuccgacaccgccaacuggagcuggcccgacggcgccgagcugcccuucaccaucgacaaguga

SEQ ID NO: 80212 - RNA, 1413 nt, Artificial Sequence; identical to SEQ ID NO: 80054
  derived and/or modified CDS sequence (opt1) from neuraminidase__InfluenzaA__ABW40425

SEQ ID NO: 80213 - RNA, 1413 nt, Artificial Sequence; identical to SEQ ID NO: 80095
  derived and/or modified CDS sequence (opt1) from neuraminidase__InfluenzaA__ABW40436

SEQ ID NO: 80214 - RNA, 1413 nt, Artificial Sequence
  derived and/or modified CDS sequence (opt1) from neuraminidase__InfluenzaA__ABW40447
augaaccccaaccagaagaucaucaccaucggcagcaucuccaucgccaucgggaucaucagccugaugcuccagaucggcaacaucaucuccaucugggccagccacuccauccagaccgggagccagaaccacacgggcaucugcaaccagcgcaucaucaccuacgagaacuccaccugggugaaccacaccuacgucaacaucaacaacacgaacgugguggcggggaaggacaagaccagcgucacccuggccggcaacuccagccugugcuccaucagcggcugggccaucuacaccaaggacaacuccauccggaucgggagcaagggcgacguguucgugauccgcgagccguucaucuccugcagccaccucgagugccggacguucuuccugacccagggggcccugcucaacgacaagcacuccaacggcaccgucaaggaccgcagccccuaccgggcccugauguccugcccccugggggaggcgcccagcccguacaacagcaaguucgaguccguggccuggagcgccuccgccugccacgacggcaugggcuggcucaccaucgggaucagcggccccgacaacggggcgguggccguccugaaguacaacggcaucaucacggagaccaucaaguccuggaagaagcgcauccugcggacccaggagagcgagugcgugugcgugaacggcuccugcuucaccaucaugacggacgggcccagcaacggcgccgccuccuacaagaucuucaagaucgagaaggggaaggucaccaagagcaucgagcucaacgcccccaacuuccacuacgaggagugcuccugcuacccggacaccggcaccgugaugugcgugugccgcgacaacuggcacgggagcaaccggcccugggucuccuucaaccagaaccuggacuaccaggugggcuacaucugcagcggcguguucggggacaacccccgccccaaggacggcaagggguccugcaacccgaugacggucgacggcgcggacggggugaagggcuucagcuacaaguacggcaacgggguguggaucggccggaccaaguccaacaagcugcgcaagggguucgagaugaucugggaccccaacggcuggaccgacaccgacagcgacuucuccgucaagcaggacgugguggccaucacggacuggagcggguacagcggcuccuucguccagcaccccgagcucaccggccugaacugcauccggcccugcuucuggguggagcugguccgcgggcucccgcgggagaacaccaccaucuggacgagcggcuccagcaucuccuucugcgggguggacagcgacaccgccaacugguccuggcccgacggcgccgagcugcccuucaccaucgacaaguga

SEQ ID NO: 80215 - RNA, 1413 nt, Artificial Sequence; identical to SEQ ID NO: 80080
  derived and/or modified CDS sequence (opt1) from neuraminidase__InfluenzaA__ABW40458

SEQ ID NO: 80216 - RNA, 1413 nt, Artificial Sequence; identical to SEQ ID NO: 80054
  derived and/or modified CDS sequence (opt1) from neuraminidase__InfluenzaA__ABW40469

SEQ ID NO: 80217 - RNA, 1413 nt, Artificial Sequence; identical to SEQ ID NO: 80054
  derived and/or modified CDS sequence (opt1) from neuraminidase__InfluenzaA__ABW40491

SEQ ID NO: 80218 - RNA, 1413 nt, Artificial Sequence; identical to SEQ ID NO: 80054
  derived and/or modified CDS sequence (opt1) from neuraminidase__InfluenzaA__ABW40502

SEQ ID NO: 80219 - RNA, 1413 nt, Artificial Sequence; identical to SEQ ID NO: 80095
  derived and/or modified CDS sequence (opt1) from neuraminidase__InfluenzaA__ABW40513

SEQ ID NO: 80220 - RNA, 1413 nt, Artificial Sequence; identical to SEQ ID NO: 80054
  derived and/or modified CDS sequence (opt1) from neuraminidase__InfluenzaA__ABW40524

SEQ ID NO: 80221 - RNA, 1413 nt, Artificial Sequence
  derived and/or modified CDS sequence (opt1) from neuraminidase__InfluenzaA__ABW40546
augaaccccaaccagaagaucaucaccaucggcagcaucuccaucgccaucgggaucaucagccugaugcuccagaucggcaacaucaucuccaucugggccagccacuccauccagaccgggagccagaaccacacgggcaucugcaaccagcgcaucaucaccuacgagaacuccaccugggugaaccacaccuacgucaacaucaacaacacgaacgugguggcggggaaggacaagaccagcgucacccuggccggcaacuccagccugugcuccaucagcggcugggccaucuacaccaaggacaacuccauccggaucgggagcaagggcgacguguucgugauccgcgagccguucaucuccugcagccaccucgagugccggacguucuuccugacccagggggcccugcucaacgacaagcacuccaacggcaccgucaaggaccgcagccccuaccgggcccugauguccugcccccugggggaggcgcccagcccguacaacagcaaguucgaguccguggccuggagcgccuccgccugccacgacggcaugggcuggcucaccaucgggaucagcggccccgacaacggggcgguggccguccugaaguacaacggcaucaucacggagaccaucaaguccuggaagaagcgcauccugcggacccaggagagcgagugcgugugcgugaacggcuccugcuucaccaucaugacggacgggcccagcaacggcgccgccuccuacaagaucuucaagaucgagaaggggaaggucaccaagagcauggagcucaacgcccccaacuuccacuacgaggagugcuccugcuacccggacaccggcaccgugaugugcgugugccgcgacaacuggcacgggagcaaccggcccugggucuccuucaaccagaaccuggacuaccagaucggcuacaucugcagcggcguguucggggacaacccccgccccaaggacggcaagggguccugcaacccggugacggucgacggcgcggacggggugaagggcuucagcuacaaguacggcaacgggguguggaucggccggaccaaguccaaccgccugcggaagggguucgagaugaucugggaccccaacggcuggaccgacaccgacagcgacuucuccgucaagcaggacgugguggccaucacggacuggagcggguacagcggcuccuucguccagcaccccgagcucaccggccuggacugcauccgccccugcuucuggguggagcugguccgggggcucccgcgcgagaacaccaccaucuggacgagcggcuccagcaucuccuucugcgggguggacagcgacaccgccaacugguccuggcccgacggcgccgagcugcccuucaccaucgacaaguga

SEQ ID NO: 80222 - RNA, 1413 nt, Artificial Sequence; identical to SEQ ID NO: 80054
  derived and/or modified CDS sequence (opt1) from neuraminidase__InfluenzaA__ABW40557

SEQ ID NO: 80223 - RNA, 1413 nt, Artificial Sequence
  derived and/or modified CDS sequence (opt1) from neuraminidase__InfluenzaA__ABW40568
augaaccccaaccagaagaucaucaccaucggcagcaucuccaucgccaucgggaucaucagccugaugcuccagaucggcaacaucaucuccaucugggccagccacuccauccagaccgggagccagaaccacacgggcaucugcaaccagcgcaucaucaccuacgagaacuccaccugggugaaccacaccuacgucagcaucaacaacacgaacgugguggcggggaaggacaagaccuccgucacccuggccggcaacagcucccugugcagcaucuccggcugggccaucuacaccaaggacaacagcauccggaucggguccaagggcgacguguucgugauccgcgagccguucaucagcugcucccaccucgagugccggacguucuuccugacccagggggcccugcucaacgacaagcacagcaacggcaccgucaaggaccgcucccccuaccgggcccugaugagcugcccccugggggaggcgcccagcccguacaacuccaaguucgagagcguggccugguccgccagcgccugccacgacggcaugggcuggcucaccaucgggaucuccggccccgacaacggggcgguggccguccugaaguacaacggcaucaucacggagaccaucaagagcuggaagaagcagauccugcgcacccaggaguccgagugcgugugcgugaacggcagcugcuucaccaucaugacggacgggcccuccaacggcgccgccagcuacaagaucuucaagaucgagaaggggaaggucaccaaguccaucgagcucaacgcccccaacuuccacuacgaggagugcagcugcuacccggacaccggcaccgugaugugcgugugccgggacaacuggcacggguccaaccgccccugggucagcuucaaccagaaccuggacuaccagaucggcuacaucugcuccggcguguucggggacaacccccggcccaaggacggcaaggggagcugcaacccggugacggucgacggcgcggacggggugaagggcuucuccuacaaguacggcaacgggguguggaucggccgcaccaagagcaaccggcugcgcaagggguucgagaugaucugggaccccaacggcuggaccgacaccgacuccgacuucagcgucaagcaggacgugguggccaucacggacuggagcggguacuccggcagcuucguccagcaccccgagcucaccggccuggacugcauccggcccugcuucuggguggagcugguccgcgggcucccgcgggagaacaccaccaucuggacguccggcagcuccaucagcuucugcgggguggacuccgacaccgccaacuggagcuggcccgacggcgccgagcugcccuucaccaucgacaaguga

SEQ ID NO: 80224 - RNA, 1413 nt, Artificial Sequence
  derived and/or modified CDS sequence (opt1) from neuraminidase__InfluenzaA__ABW40579
augaaccccaaccagaagaucaucaccaucggcagcaucuccaucgccaucgggaucaucagccugaugcuccagaucggcaacaucaucuccaucugggccagccacuccauccagaccgggagccagaaccacacgggcaucugcaaccagcgcaucaucaccuacgagaacuccaccugggugaaccacaccuacgucagcaucaacaacacgaacgugguggcggggaaggacaagaccuccgucacccuggccggcaacagcucccugugcagcaucuccggcugggccaucuacaccaaggacaacagcauccggaucggguccaagggcgacguguucgugauccgcgagccguucaucagcugcucccaccucgagugccggacguucuuccugacccagggggcccugcucaacgacaagcacagcaacggcaccgucaaggaccgcucccccuaccgggcccugaugagcugcccccugggggaggcgcccagcccguacaacuccaaguucgagagcguggccugguccgccagcgccugccacgacggcaugggcuggcucaccaucgggaucuccggccccgacaacggggcgguggccguccugaaguacaacggcaucaucacggagaccaucaagagcuggaagaagcgcauccugcggacccaggaguccgagugcgugugcgugaacggcagcugcuucaccaucaugacggacgggcccaacaacggcgccgccuccuacaagaucuucaagaucgagaaggggaaggucaccaagagcaucgagcucaacgcccccaacuuccacuacgaggagugcuccugcuacccggacaccggcaccgugaugugcgugugccgcgacaacuggcacgggagcaaccggcccugggucuccuucaaccagaaccuggacuaccagaucggcuacaucugcagcggcguguucggggacaacccccgccccaaggacggcaagggguccugcaacccggugacggucgacggcgcggacggggugaagggcuucagcuacaaguacggcaacgggguguggaucggccggaccaaguccaaccgccugcggaagggguucgagaugaucugggaccccaacggcuggaccgacaccgacagcgacuucuccgucaagcaggacgugguggccaucacggacuggagcggguacagcggcuccuucguccagcaccccgagcucaccggccuggacugcauccgccccugcuucuggguggagcugguccgggggcucccgcgcgagaacaccaccaucuggacgagcggcuccagcaucuccuucugcgggguggacagcgacaccgccaacugguccuggcccgacggcgccgagcugcccuucaccaucgacaaguga

SEQ ID NO: 80225 - RNA, 1413 nt, Artificial Sequence
  derived and/or modified CDS sequence (opt1) from neuraminidase__InfluenzaA__ABW40601
augaaccccaaccagaagaucaucaccaucggcagcaucuccaucgccaucggggugaucagccugaugcuccagaucggcaacaucaucuccaucugggccagccacuccauccagaccgggagccagaaccacacgggcaucugcaaccagcgcaucaucaccuacgagaacuccaccugggucaaccacaccuacgugaacaucaacaacacgaacguggucgcggggaaggacaagaccagcgugacccuggccggcaacuccagccugugcuccaucagcggcugggccaucuacaccaaggacaacuccauccggaucgggagcaagggcgacguguucgucauccgcgagccguucaucuccugcagccaccucgagugccggacguucuuccugacccagggggcccugcucaacgacaagcacuccaacggcaccgugaaggaccgcagccccuaccgggcccugauguccugcccccugggggaggcgcccagcccguacaacagcaaguucgaguccguggccuggagcgccuccgccugccacgacggcaugggcuggcucaccaucgggaucagcggccccgacaacggggcggucgccgugcugaaguacaacggcaucaucacggagaccaucaaguccuggaagaagcgcauccugcggacccaggagagcgagugcgugugcgucaacggcuccugcuucaccaucaugacggacgggcccagcaacggcgccgccuccuacaagaucuucaagaucgagaaggggaaggugaccaagagcaucgagcucaacgcccccaacuuccacuacgaggagugcuccugcuacccggacaccggcaccgugaugugcgucugccgcgacaacuggcacgggagcaaccggcccuggguguccuucaaccagaaccuggacuaccagaucggcuacaucugcagcggcguguucggggacaacccccgccccaaggacggcaagggguccugcaacccggucacgguggacggcgcggacgggaucaagggcuucagcuacaaguacggcaacgggguguggaucggccggaccaaguccaaccgccugcggaagggguucgagaugaucugggaccccaacggcuggaccaacaccgacagcgacuucuccgucaagcaggacgugguggccaucacggacuggagcggguacagcggcuccuucguccagcaccccgagcucaccggccuggacugcauccgccccugcuucuggguggagcugguccgggggcucccgcgcgagaacaccaccaucuggacgagcggcuccagcaucuccuucugcgggguggacggcgacaccgccaacuggagcuggcccgacggcgccgagcugcccuucaccaucgacaaguga

SEQ ID NO: 80226 - RNA, 1413 nt, Artificial Sequence; identical to SEQ ID NO: 80089
  derived and/or modified CDS sequence (opt1) from neuraminidase__InfluenzaA__ABW40612

SEQ ID NO: 80227 - RNA, 1413 nt, Artificial Sequence; identical to SEQ ID NO: 80054
  derived and/or modified CDS sequence (opt1) from neuraminidase__InfluenzaA__ABW40623

SEQ ID NO: 80228 - RNA, 1410 nt, Artificial Sequence; identical to SEQ ID NO: 79908
  derived and/or modified CDS sequence (opt1) from neuraminidase__InfluenzaA__ABW40634

SEQ ID NO: 80229 - RNA, 1413 nt, Artificial Sequence; identical to SEQ ID NO: 80054
  derived and/or modified CDS sequence (opt1) from neuraminidase__InfluenzaA__ABW40645

SEQ ID NO: 80230 - RNA, 1410 nt, Artificial Sequence
  derived and/or modified CDS sequence (opt1) from neuraminidase__InfluenzaA__ABW40656
augaaccccaaccagaagaucaucaccaucggcagcgugucccugaccaucagcacgaucugcuucuucaugcagaucgccauccucaucaccaccgucacccugcacuucaagcaguacgaguucaacuccccgcccaacaaccaggugaugcugugcgagcccacgaucaucgagcgcaacaucaccgagaucguguaccucaccaacaccacgaucgagaaggagaucugccccaagcuggccgaguaccggaacuggagcaagccgcagugcgacaucaccggguucgcgcccuucuccaaggacaacagcauccgccuguccgccggcgggggcaucugggucacccgggagcccuacgugagcugcgaccccgacaagugcuaccaguucgcccucgggcagggcaccacgcugaacaacgugcacuccaacgacaccguccgcgaccggaccccguaccgcacccugcucaugaacgagcugggcgugcccuuccaccuggggacgaagcaggucugcaucgccuggagcuccagcuccugccacgacggcaaggccuggcuccacgugugcaucaccggggacgacaagaacgcgaccgccagcuucaucuacaacggccggcugguggacuccaucgugagcugguccaaggagauccugcgcacccaggagagcgagugcgucugcaucaacgggacgugcaccguggugaugaccgacggcuccgccagcggcaaggccgacaccaagauccucuucaucgaggaggggaagaucguccacacgagcacccuguccggcagcgcgcagcacguggaggagugcuccugcuacccccgguaccccggggugcgcugcgucugccgggacaacuggaagggcagcaaccgcccgaucguggacaucaacaucaaggaccacuccaucgugagcuccuacgucugcagcggccuggugggggacacgccccggaagaacgacuccagcuccagcucccacugccucgaccccaacaacgaggagggcgggcacggcgugaaggggugggccuucgacgacggcaacgacgucuggaugggccgcaccaucagcgagaagucccggcugggguacgagaccuucaaggugaucgagggcuggagcaaccccaaguccaagcugcagaucaaccgccaggucaucguggaccgggggaaccgcagcggcuacuccgggaucuucagcguggagggcaagagcugcaucaaccggugcuucuacgucgagcucauccgcggccggaaggaggagaccgaggugcuguggaccuccaacagcaucguggucuucugcgggaccuccggcacguacgggaccggcagcuggccggacggggccgacaucaaccugaugcccaucuga

SEQ ID NO: 80231 - RNA, 1413 nt, Artificial Sequence; identical to SEQ ID NO: 80095
  derived and/or modified CDS sequence (opt1) from neuraminidase__InfluenzaA__ABW40667

SEQ ID NO: 80232 - RNA, 1413 nt, Artificial Sequence; identical to SEQ ID NO: 80080
  derived and/or modified CDS sequence (opt1) from neuraminidase__InfluenzaA__ABW40678

SEQ ID NO: 80233 - RNA, 1413 nt, Artificial Sequence; identical to SEQ ID NO: 80089
  derived and/or modified CDS sequence (opt1) from neuraminidase__InfluenzaA__ABW71297

SEQ ID NO: 80234 - RNA, 1413 nt, Artificial Sequence; identical to SEQ ID NO: 80095
  derived and/or modified CDS sequence (opt1) from neuraminidase__InfluenzaA__ABW71308

SEQ ID NO: 80235 - RNA, 1413 nt, Artificial Sequence; identical to SEQ ID NO: 80054
  derived and/or modified CDS sequence (opt1) from neuraminidase__InfluenzaA__ABW71319

SEQ ID NO: 80236 - RNA, 1413 nt, Artificial Sequence; identical to SEQ ID NO: 80054
  derived and/or modified CDS sequence (opt1) from neuraminidase__InfluenzaA__ABW71330

SEQ ID NO: 80237 - RNA, 1413 nt, Artificial Sequence
  derived and/or modified CDS sequence (opt1) from neuraminidase__InfluenzaA__ABW71341
augaaccccaaccagaagaucaucaccaucggcagcaucuccaucgccaucgggaucaucagccugaugcuccagaucggcaacaucaucuccaucugggccagccacuccauccagaccgggagccagaaccacacgggcaucugcaaccagcgcaucaucaccuacgagaacuccaccugggugaaccacaccuacgucagcaucaacaacacgaacgugguggcggggaaggacaagaccuccgucacccuggccggcaacagcucccugugcagcaucuccggcugggccaucuacaccaaggacaacagcauccggaucggguccaagggcgacguguucgugauccgcgagccguucaucagcugcucccaccucgagugccggacguucuuccugacccagggggcccugcucaacgacaagcacagcaacggcaccgucaaggaccgcucccccuaccgggcccugaugagcugcccccugggggaggcgcccagcccguacaacuccaaguucgagagcguggccugguccgccagcgccugccacgacggcaugggcuggcucaccaucgggaucuccggccccgacaacggggcgguggccguccugaaguacaacggcaucaucacggagaccaucaagagcuggaagaagcgcauccugcggacccaggaguccgagugcgugugcgugaacggcagcugcuucaccaucaugacggacgggcccuccaacggcgccgccagcuacaagaucuucaagaucgagaaggggaaggucaccaaguccaucgagcucaacgcccccaacuuccacuacgaggagugcagcugcuacccggacaccggcaccgugaugugcgugugccgcgacaacuggcacggguccaaccggcccugggucagcuucaaccagaaccuggacuaccagaucggcuacaucugcuccggcguguucggggacaacccccgccccaaggacggcaaggggagcugcaacccggugacggucgacggcgcggacggggugaagggcuucuccuacaaguacggcaacgggguguggcugggccggaccaagagcaaccgccuccggaagggguucgagaugaucugggaccccaacggcuggaccgacaccgacuccgacuucagcgucaagcaggacgugguggccaucacggacuggagcggguacuccggcagcuucguccagcaccccgagcugaccggccuggacugcauccgccccugcuucuggguggagcucguccgggggcugccgcgcgagaacaccaccaucuggacguccggcagcuccaucagcuucugcgggguggacuccgacaccgccaacuggagcuggcccgacggcgccgagcugcccuucaccaucgacaaguga

SEQ ID NO: 80238 - RNA, 1410 nt, Artificial Sequence; identical to SEQ ID NO: 80081
  derived and/or modified CDS sequence (opt1) from neuraminidase__InfluenzaA__ABW71352

SEQ ID NO: 80239 - RNA, 1413 nt, Artificial Sequence; identical to SEQ ID NO: 80095
  derived and/or modified CDS sequence (opt1) from neuraminidase__InfluenzaA__ABW71363

SEQ ID NO: 80240 - RNA, 1413 nt, Artificial Sequence; identical to SEQ ID NO: 80080
  derived and/or modified CDS sequence (opt1) from neuraminidase__InfluenzaA__ABW71374

SEQ ID NO: 80241 - RNA, 1413 nt, Artificial Sequence; identical to SEQ ID NO: 80054
  derived and/or modified CDS sequence (opt1) from neuraminidase__InfluenzaA__ABW71385

SEQ ID NO: 80242 - RNA, 1413 nt, Artificial Sequence
  derived and/or modified CDS sequence (opt1) from neuraminidase__InfluenzaA__ABW71396
augaaccccaaccagaagaucaucaccaucggcagcaucuccaucgccaucgggaucaucagccugaugcuccagaucggcaacaucaucuccaucugggccagccacuccgugcagaccgggagccagaaccacacgggcaucugcaaccagcgcaucaucaccuacgagaacuccaccugggucaaccacaccuacgugaacaucaacaacacgaacguggucgcggggaaggacaagaccagcgugacccuggccggcaacuccagccugugcuccaucagcggcugggccaucuacaccaaggacaacuccauccggaucgggagcaagggcgacguguucgucauccgcgagccguucaucuccugcagccaccucgagugccggacguucuuccugacccagggggcccugcucaacgacaagcacuccaacggcaccgugaaggaccgcagccccuaccgggcccugauguccugcccccugggggaggcgcccagcccguacaacagcaaguucgaguccguggccuggagcgccuccgccugccacgacggcaugggcuggcucaccaucgggaucagcggccccgacaacggggcggucgccgugcugaaguacaacggcaucaucacggagaccaucaaguccuggaagaagcgcauccugcggacccaggagagcgagugcgugugcgucaacggcuccugcuucaccaucaugacggacgggcccagcaacggcgccgccuccuacaagaucuucaagaucgagaaggggaaggugaccaagagcaucgagcucaacgcccccaacuuccacuacgaggagugcuccugcuacccggacaccggcaccgugaugugcgucugccgcgacaacuggcacgggagcaaccggcccuggguguccuucaaccagaaccuggacuaccaggugggcuacaucugcagcggcgucuucggggacaacccccgccccaaggacggcaagggguccugcaacccgaugacgguggacggcgcggacggggugaagggcuucagcuacaaguacggcaacggggucuggaucggccggaccaaguccaacaagcugcgcaagggguucgagaugaucugggaccccaacggcuggaccgacaccgacagcgacuucuccgugaagcaggacguggucgccaucacggacuggagcggguacagcggcuccuucgugcagcaccccgagcucaccggccuggacugcauccggcccugcuucugggucgagcuggugcgcgggcucccgcgggagaacgccaccaucuggaccagcggcuccagcaucuccuucugcgggguggacagcgacacggccaacugguccuggcccgacggcgccgagcugcccuucaccaucgacaaguga

SEQ ID NO: 80243 - RNA, 1413 nt, Artificial Sequence
  derived and/or modified CDS sequence (opt1) from neuraminidase__InfluenzaA__ABW71407
augaaccccaaccagaagaucaucaccaucggcagcaucuccaucgccaucgggaucaucagccugaugcuccagaucggcaacaucaucuccaucugggccagccacuccauccagaccgggagccagaaccacacgggcaucugcaaccagcgcaucaucaccuacgagaacuccaccugggugaaccacaccuacgucaacaucaacaacacgaacgugguggcggggaaggacaagaccagcgucacccuggccggcaacuccagccugugcuccaucagcggcugggccaucuacaccaaggacaacuccauccggaucgggagcaagggcgacguguucgugauccgcgagccguucaucuccugcagccaccucgagugccggacguucuuccugacccagggggcccugcucaacgacaagcacuccaacggcaccgucaaggaccgcagccccuaccgggcccugauguccugcccccugggggaggcgcccagcccguacaacagcaaguucgaguccguggccuggagcgccuccgccugccacgacggcaugggcuggcucaccaucgggaucagcggccccgacaacggggcgguggccguccugaaguacaacggcaucaucacggagaccaucaaguccuggaagaagcgcauccugcggacccaggagagcgagugcgugugcgugaacggcuccugcuucaccaucaugacggacgggcccagcaacggcgccgccuccuacaagaucuucaagaucgagaaggggaaggucaccaagagcaucgagcucaacgcccccaacuuccacuacgaggagugcuccugcuacccggacaccggcaccgugaugugcgugugccgcgacaacuggcacgggagcaaccggcccugggucuccuucaaccagaaccuggacuaccaggugggcuacaucugcagcggcguguucggggacaacccccgccccaaggacggcaagggguccugcaacccgaugacggucgacggcgcggacggggugaagggcuucagcuacaaguacggcaacgggguguggaucggccggaccaaguccaacaagauccgcaagggguucgagaugaucugggaccccaacggcuggaccgacaccgacagcgacuucuccgucaagcaggacgugguggccaucacggacuggagcggguacagcggcuccuucguccagcaccccgagcugaccggccucgacugcauccggcccugcuucuggguggagcugguccgcgggcugccgcgggagaacaccaccaucuggacgagcggcuccagcaucuccuucugcgggguggacagcgacaccgccaacugguccuggcccgacggcgccgagcuccccuucaccaucgacaaguga

SEQ ID NO: 80244 - RNA, 1413 nt, Artificial Sequence; identical to SEQ ID NO: 80080
  derived and/or modified CDS sequence (opt1) from neuraminidase__InfluenzaA__ABW71418

SEQ ID NO: 80245 - RNA, 1413 nt, Artificial Sequence; identical to SEQ ID NO: 80054
  derived and/or modified CDS sequence (opt1) from neuraminidase__InfluenzaA__ABW71440

SEQ ID NO: 80246 - RNA, 1413 nt, Artificial Sequence; identical to SEQ ID NO: 80054
  derived and/or modified CDS sequence (opt1) from neuraminidase__InfluenzaA__ABW71451

SEQ ID NO: 80247 - RNA, 1413 nt, Artificial Sequence; identical to SEQ ID NO: 80089
  derived and/or modified CDS sequence (opt1) from neuraminidase__InfluenzaA__ABW71462

SEQ ID NO: 80248 - RNA, 1410 nt, Artificial Sequence; identical to SEQ ID NO: 78351
  derived and/or modified CDS sequence (opt1) from neuraminidase__InfluenzaA__ABW80980

SEQ ID NO: 80249 - RNA, 1410 nt, Artificial Sequence; identical to SEQ ID NO: 78195
  derived and/or modified CDS sequence (opt1) from neuraminidase__InfluenzaA__ABW80981

SEQ ID NO: 80250 - RNA, 1413 nt, Artificial Sequence
  derived and/or modified CDS sequence (opt1) from neuraminidase__InfluenzaA__ABW81474
augaaccccaaccagaagaucaucaccaucggcagcaucuccguggccaucgggaucaucagccugauccuccagaucggcaacaucaucuccaucugggccagccacuccauccagaccgggagccagaacuacacgggcaucugcaaccagaagaucaucaccuacgagaaccgcaccugggucaaccagaccuacgugaacuucaacaacacgaacguggucgcggggaaggacaagccguccaugacccuggccggcaacagcucccugugccccauccggggcugggccaucuacaccaaggacaacagcauccgcaucggguccaagggcgacguguucgugauccgggagcccuucaucagcugcucccaccucgagugccgcaccuucuuccugacgcagggggcccugcucaacgacaagcacagcaacggcaccaucaaggaccggucccccuuccgcgcccugaugagcugcccgcugggggaggcgcccucccccuacaacagccgguucgaguccgucgccuggagcgccagcgccugccacgacggccucggcuggcugaccaucgggaucuccggccccgacaacggggcgguggccgugcugaaguacaacggcaucaucaccgagacgaucaagagcuggaagaagcagauccuccgcacccaggaguccgagugcgucugcgugaacggcagcugcuucaccaucaugaccgacgggccguccaaccgggccgccagcuaccgcaucuucaagaucgagaagggccgggugacgaaguccaucgagcuggacgcccccaacuaccacuacgaggagugcagcugcuaccccgacaccgggaccgucaugugcgugugccgcgacaacuggcacggcuccaaccggcccugggugagcuucaaccagaaccuggacuaccagaucggguacaucugcuccggcgucuucggcgacaacccgcgccccaaggacggggagggcagcugcaaccccgugaccguggacggggcggacggcgucaagggguucuccuaccgguacggcaacggcguguggaucgggcgcaccaagagcaaccggcuccgcaagggcuucgagaugaucugggaccccaacggguggacggacaccgacuccgacuucagcaugaagcaggacguggucgccaugaccgacugguccggcuacagcggguccuucgugcagcacccggagcugacgggccuggacugcaugcggcccugcuucuggguggagcucguccgcggccugccccgggagaacaccaccaucuggaccagcgggagcuccaucagcuucugcggcgugaacuccgagacggccaacuggagcuggcccgacggggccgagcugccguucaccaucgacaaguga

SEQ ID NO: 80251 - RNA, 1413 nt, Artificial Sequence
  derived and/or modified CDS sequence (opt1) from neuraminidase__InfluenzaA__ABW81475
augaaccccaaccagaagaucaucaccaucggcagcaucuccaucgccaucgggaucaucagccugaugcuccagaucggcaacaucaucuccaucugggccagccacuccauccagaccgggagccagaaccacacgggcaucugcaaccagcgcaucaucaccuacgagaacuccaccugggugaaccacaccuacgucaacaucaacaacacgaacgugguggcggggaaggacaagagcuccgucacccuggccggcaacagcucccugugcagcaucuccggcugggccaucuacaccaaggacaacagcauccggaucggguccaagggcgacguguucgugauccgcgagccguucaucagcugcucccaccucgagugccggaccuucuuccugacgcagggggcccugcucaacgacaagcacagcaacggcaccgucaaggaccgcucccccuaccgggcccugaugagcugcccccugggggaggcgcccagcccguacaacuccaaguucgagagcguggccugguccgccagcgccugccacgacggcaugggcuggcucaccaucgggaucuccggccccgacaacggggcgguggccguccugaaguacaacggcaucaucaccgagacgaucaagagcuggaagaagcgcauccugcggacccaggaguccgagugcgugugcgugaacggcagcugcuucaccaucaugaccgacgggcccuccaacggcgccgccagcuacaagaucuucaagaucgagaaggggaaggucacgaaguccaucgagcucaacgcccccaacuuccacuacgaggagugcagcugcuacccggacaccggcaccgugaugugcgugugccgcgacaacuggcacggguccaaccggcccugggucagcuucaaccagaaccuggacuaccagaucggcuacaucugcuccggcguguucggggacaacccccgccccaaggacggcgaggggagcugcaacccggugaccgucgacggcgcggacggggugaagggcuucuccuacaaguacggcaacgggguguggaucggccggaccaagagcaaccgccugcggaagggguucgagaugaucugggaccccaacggcuggacggacaccgacuccgacuucagccucaagcaggacgucguggccaucaccgacuggagcggguacuccggcagcuucgugcagcaccccgagcugacgggccuggacugcauccgccccugcuucugggucgagcucgugcgggggcugccgcgcgagaacaccaccaucuggaccuccggcagcuccaucagcuucugcggggucaacuccgacacggccaacuggagcuggcccgacggcgccgagcugcccuucaccaucgacaaguga

SEQ ID NO: 80252 - RNA, 1413 nt, Artificial Sequence
  derived and/or modified CDS sequence (opt1) from neuraminidase__InfluenzaA__ABW81477
augaaccccaaccagaagaucaucaccaucggcagcaucuccaucgccaucgggaucaucagccugaugcuccagaucggcaacaucaucuccaucugggccagccacuccauccagaccgggagccagaaccacacgggcgugugcaaccagcgcaucaucaccuacgagaacuccaccugggucaaccacaccuacgugaacaucaacaacacgaacgugaucgcggggaaggacaagaccagcgucacccuggccggcaacuccagccugugcuccaucagcggcugggccaucuacaccaaggacaacuccauccggaucgggagcaagggcgacguguucgugauccgcgagccguucaucuccugcagccaccucgagugccggacguucuuccugacccagggggcccugcucaacgacaagcacuccaacggcaccgucaaggaccgcagccccuaccgggcccugauguccugcccccugggggaggcgcccagcccguacaacagcaaguucgaguccguggccuggagcgccuccgccugccacgacggcaugggcuggcucaccaucgggaucagcggccccgacaacggggcgguggccguccugaaguacaacggcaucaucacggagaccaucaaguccuggaagaagcagauccugcgcacccaggagagcgagugcgugugcgugaacggcuccugcuucaccaucaugacggacgggcccagcaacggcgccgccuccuacaagaucuucaagaucgagaaggggaaggucaccaagagcaucgagcucuccgcccccaacuuccacuacgaggagugcagcugcuacccggacaccggcaccgugaugugcgugugccgggacaacuggcacggguccaaccgccccugggucagcuucaaccagaaccuggacuaccagaucggcuacaucugcuccggcguguucggggacaacccccggcccaaggacggcgaggggagcugcaacccggugacggucgacggcgcgaacggggugaagggcuucuccuacaaguacggcaacgggguguggaucggccgcaccaagagcaaccggcugcgcaagggguucgagaugaucugggaccccaacggcuggcccgacaccgacuccgacuucagcgucaagcaggacgugguggccaucaccgacuggagcggguacuccggcagcuucguccagcaccccgagcucacgggccuggacugcauccggccgugcuucuggguggagcugguccgcgggcuccccaaggagaacaccaccaucuggaccuccggcagcuccaucagcuucugcggggugaacuccgacacggccaacuggagcuggcccgacggcgccgagcugcccuucaccaucgacaaguga

SEQ ID NO: 80253 - RNA, 1413 nt, Artificial Sequence
  derived and/or modified CDS sequence (opt1) from neuraminidase__InfluenzaA__ABW81478
augaaccccaaccagaagaucaucaccaucggcagcaucuccaucgccaucgggaucaucagccugaugcuccagaucggcaacaucaucuccaucugggccagccacuccauccagaccgggagccagaaccacacgggcaucugcaaccagcgcaucaucaccuacgagaacuccaccugggugaaccacaccuacgucaacaucaacaacacgaacgugguggcggggaaggacaagaccagcgucacccuggccggcaacuccagccugugcuccaucagcggcugggccaucuacaccaaggacaacuccauccggaucgggagcaagggcgacguguucgugauccgcgagccguucaucuccugcagccaccucgagugccggacguucuuccugacccagggggcccugcucaacgacaagcacuccaacggcaccgucaaggaccgcagccccuaccgggcccugauguccugcccccugggggaggcgcccagcccguacaacagcaaguucgaguccguggccuggagcgccuccgccugccacgacggcaugggcuggcucaccaucgggaucagcggccccgacaacggggcgguggccguccugaaguacaacggcaucaucacggagaccaucaaguccuggaagaagcgcauccugcggacccaggagagcgagugcgugugcgugaacggcuccugcuucaccaucaugacggacgggcccagcaacggcgccgccuccuacaagaucuucaagaucgagaaggggaaggucaccaagagcaucgagcucaacgcccccaacuuccacuacgaggagugcuccugcuacccggacaccggcaccgugaugugcgugugccgcgacaacuggcacgggagcaaccggcccugggucuccuucaaccagaaccuggacuaccagaucggcuacaucugcagcggcguguucggggacaacccccgccccaaggacggcgagggguccugcaacccggugacggucgacggcgcggacggggugaagggcuucagcuacaaguacggcaacgggguguggaucggccggaccaagaacaaccgccugcggaagggguucgagaugaucugggaccccaacggcuggaccgacaccgacuccgacuucagcgucaagcaggacgugguggccaucacggacugguccggguacagcggcagcuucguccagcaccccgagcucaccggccuggacugcauccgccccugcuucuggguggagcugguccgggggcucccgcgcgagaacaccaccaucuggacguccggcagcuccaucagcuucugcggggugaacuccgacaccgccaacuggagcuggcccgacggcgccgagcugcccuucaccaucgacaaguga

SEQ ID NO: 80254 - RNA, 1413 nt, Artificial Sequence
  derived and/or modified CDS sequence (opt1) from neuraminidase__InfluenzaA__ABW81479
augaaccccaaccagaagaucaucaccaucggcagcaucuccguggccaucgggaucaucagccugauccuccagaucggcaacaucaucuccaucugggccagccacuccauccagaccgggagccagaacuacacgggcaucugcaaccagaagaucaucaccuacgagaaccgcaccugggucaaccagaccuacgugaacaucaacaacacgaacguggucgcggggaaggacaagccguccaugacccuggccggcaacagcucccugugccccauccggggcugggccaucuacaccaaggacaacagcauccgcaucggguccaagggcgacguguucgugauccgggagcccuucaucagcugcucccaccucgagugccgcaccuucuuccugacgcagggggcccugcucaacgacaagcacagcaacggcaccaucaaggaccggucccccuuccgcgcccugaugagcugcccgcugggggaggcgcccucccccuacaacagccgguucgaguccgucgccuggagcgccagcgccugccacgacggccucggcuggcugaccaucgggaucuccggccccgacaacggggcgguggccgugcugaaguacaacggcaucaucaccgagacgaucaagagcuggaagaagcagauccuccgcacccaggaguccgagugcgucugcgugaacggcagcugcuucaccaucaugaccgacgggccguccaaccgggccgccagcuaccgcaucuucaagaucgagaagggccgggugacgaaguccaucgagcuggacgcccccaacuaccacuacgaggagugcagcugcuaccccgacaccgggaccgucaugugcgugugccgcgacaacuggcacggcuccaaccggcccugggugagcuucaaccagaaccuggacuaccagaucggguacaucugcuccggcgucuucggcgacaacccgcgccccaaggacggggagggcagcugcaaccccgugaccguggacggggcggacggcaucaagggguucuccuaccgguacggcaacggcgucuggaucgggcgcaccaagagcaaccggcuccgcaagggcuucgagaugaucugggaccccaacggguggacggacaccgacuccgacuucagcaugaagcaggacgugguggccaugaccgacugguccggcuacagcggguccuucguccagcacccggagcugacgggccuggacugcaugcggcccugcuucuggguggagcucgugcgcggccugccccgggagaacaccaccaucuggaccagcgggagcuccaucagcuucugcggcgucaacuccgagacggccaacuggagcuggcccgacggggccgagcugccguucaccaucgacaaguga

SEQ ID NO: 80255 - RNA, 1413 nt, Artificial Sequence; identical to SEQ ID NO: 78420
  derived and/or modified CDS sequence (opt1) from neuraminidase__InfluenzaA__ABW81480

SEQ ID NO: 80256 - RNA, 1413 nt, Artificial Sequence
  derived and/or modified CDS sequence (opt1) from neuraminidase__InfluenzaA__ABW81481
augaaccccaaccagaagaucaucaccaucggcagcaucuccguggccaucgggaucaucagccugauccuccagaucggcaacaucaucuccaucugggccagccacuccauccagaccgggagccagaacuacacgggcaucugcaaccagaagaucaucaccuacgagaaccgcaccugggucaaccagaccuacgugaacaucaacaacacgaacguggucgcggggaaggacaagccguccaugacccuggccggcaacagcucccugugccccauccggggcugggccaucuacaccaaggacaacagcauccgcaucggguccaagggcgacguguucgugauccgggagcccuucaucagcugcucccaccucgagugccgcaccuucuuccugacgcagggggcccugcucaacgacaagcacagcaacggcaccaucaaggaccggucccccuuccgcgcccugaugagcugcccgcugggggaggcgcccucccccuacaacagccgguucgaguccgucgccuggagcgccagcgccugccacgacggccucggcuggcugaccaucgggaucuccggccccgacaacggggcgguggccgugcugaaguacaacggcaucaucaccgagacgaucaagagcuggaagaagcagauccuccgcacccaggaguccgagugcgucugcgugaacggcagcugcuucaccaucaugaccgacgggccguccaaccgggccgccagcuaccgcaucuucaagaucgagaagggccgggugacgaaguccaucgagcuggacgcccccaacuaccacuacgaggagugcagcugcuaccccgacaccgggaccgucaugugcgugugccgcgacaacuggcacggcuccaaccggcccugggugagcuucaaccagaaccuggacuaccagaucggguacaucugcuccggcgucuucggcgacaacccgcgccccaaggacggggagggcagcugcaaccccgugaccguggacggggcggacggcgucaagggguucuccuaccgguacggcaacggcguguggaucgggcgcaccaagagcaaccggcuccgcaagggcuucgagaugaucugggaccccaacggguggacggacaccgacuccgacuucagcaugaagcaggacguggucgccaugaccgacugguccggcuacagcggguccuucgugcagcacccggagcugacgggccuggacugcaugcggcccugcuucuggguggagcucguccgcggccugccccgggagaacaccaccaucuggaccagcgggagcuccaucagcuucugcggcgugaacuccgagacggccaacuggagcuggcccgacggggccgagcugccguucaccaucgacaaguga

SEQ ID NO: 80257 - RNA, 1413 nt, Artificial Sequence
  derived and/or modified CDS sequence (opt1) from neuraminidase__InfluenzaA__ABW81482
augaaccccaaccagaagaucaucaccaucggcagcaucuccguggccaucgggaucaucagccugauccuccagaucggcaacaucaucuccaucugggccagccacuccauccagaccgggagccagaacuacacgggcaucugcaaccagaagaucaucaccuacgagaaccgcaccugggucaaccagaccuacgugaacaucaacaacacgaacguggucgcggggaaggacaagccguccaugacccuggccggcaacagcucccugugccccauccggggcugggccaucuacaccaaggacaacagcauccgcaucggguccaagggcgacguguucgugauccgggagcccuucaucagcugcucccaccucgagugccgcaccuucuuccugacgcagggggcccugcucaacgacaagcacagcaacggcaccaucaaggaccggucccccuuccgcgcccugaugagcugcccgcugggggaggcgcccucccccuacaacagccgguucgaguccgucgccuggagcgccagcgccugccacgacggccucggcuggcugaccaucgggaucuccggccccgacaacggggcgguggccgugcugaaguacaacggcaucaucaccgagacgaucaagagcuggaagaagcagauccuccgcacccaggaguccgagugcgucugcgugaacggcagcugcuucaccaucaugaccgacgggccguccaaccgggccgccagcuaccgcaucuucaagaucgagaagggccgggugacgaaguccaucgagcuggacgcccccaacuaccacuacgaggagugcagcugcuaccccgacaccgggaccgucaugugcgugugccgcgacaacuggcacggcuccaaccggcccugggugagcuucaaccagaaccuggacuaccagaucggguacaucugcuccggcgucuucggcgacaacccgcgccccaaggacggggagggcagcugcaaccccgugaccguggacggggcggacggcgucaagggguucuccuaccgguacggcaacggcguguggaucgggcgcaccaagagcaaccggcuccgcaagggcuucgagaugaucugggaccccaacggguggacggacaccgacuccgacuucagcaugaagcaggacguggucgccaugaccgacugguccggcuacagcggguccuucgugcagcacccggagcugacgggccuggccugcaugcggcccugcuucuggguggagcucguccgcggccugccccgggagaacaccaccaucuggaccagcgggagcuccaucagcuucugcggcgugaacuccgagacggccaacuggagcuggcccgacggggccgagcugccguucaccaucgacaaguga

SEQ ID NO: 80258 - RNA, 1413 nt, Artificial Sequence; identical to SEQ ID NO: 78410
  derived and/or modified CDS sequence (opt1) from neuraminidase__InfluenzaA__ABW81483

SEQ ID NO: 80259 - RNA, 1413 nt, Artificial Sequence
  derived and/or modified CDS sequence (opt1) from neuraminidase__InfluenzaA__ABW81484
augaaccccaaccagaagaucaucaccaucggcagcaucuccaucgccaucgggaucaucagccugaugcuccagaucggcaacaucaucuccaucugggccagccacuccauccagaccgggaaccagaaccacacgggcaucugcaaccagcgcaucaucaccuacgagaacagcaccugggugaaccacaccuacgucaacaucaacaacacgaacgugguggcggggaagggcaagaccuccgucacccuggccggcaacagcucccugugcagcaucuccgggugggccaucuacaccaaggacaacagcauccggaucggcuccaagggggacguguucgugauccgcgagccguucaucagcugcucccaccucgagugccggacguucuuccugacccagggcgcccugcucaacgacaagcacagcaacgggaccgucaaggaccgcucccccuaccgggcccugaugagcugcccccugggcgaggcgcccuccccguacaacagcaaguucgagagcguggccugguccgccagcgccugccacgacggcaugggguggcucaccaucggcaucuccgggcccgacaacggcgcgguggccguccugaaguacaacggcaucaucacggagaccaucaagagcuggaagaagcgcauccugcggacccaggaguccgagugcgugugcgugaacgggagcugcuucaccaucaugacggacggccccuccaacggggccgccagcuacaagaucuucaagaucgagaagggcaaggucaccaaguccaucgagcucaacgcccccaacuuccacuacgaggagugcagcugcuacccggacaccgggaccgugaugugcgugugccgcgacaacuggcacggcuccaaccggcccugggucagcuucaaccagaaccuggacuaccagaucggcuacaucugcuccgggguguucggcgacaacccccgccccaaggacgggaagggcagcugcaacccggugacggucgacggggcggacggcgugaagggcuucuccuacaaguacgggaacggcguguggaucgggcggaccaagagcaaccgccugcggaagggcuucgagaugaucugggaccccaacggguggaccgacaccgacuccgacuucagcgucaagcaggacgugguggccaucacggacugguccggcuacagcggcagcuucguccagcaccccgagcucaccgggcuggacugcauccgccccugcuucuggguggagcugguccggggccucccgcgcgagaacaccaccaucuggacguccgggagcuccaucagcuucugcggcguggacuccgacaccgccaacuggagcuggcccgacggcgccgagcugcccuucaccaucgacaaguga

SEQ ID NO: 80260 - RNA, 1413 nt, Artificial Sequence
  derived and/or modified CDS sequence (opt1) from neuraminidase__InfluenzaA__ABW81487
augaaccccaaccagaagaucaucaccaucggcagcaucuccaucgccaucgggaucaucagccugaugcuccagaucggcaacaucaucuccaucugggccagccacuccauccagaccgggagccagaaccacacgggcaucugcaaccagcgcaucaucaccuacgagaacuccaccugggugaaccacaccuacgucaacaucaacaacacgaacgugguggcggggaaggacaagaccagcgucacccuggccggcaacuccagccugugcuccaucagcggcugggccaucuacaccaaggacaacuccauccggaucgggagcaagggcgacguguucgugauccgcgagccguucaucuccugcagccaccucgagugccggacguucuuccugacccagggggcccugcucaacgacaagcacuccaacggcaccgucaaggaccgcagccccuaccgggcccugauguccugcccccugggggaggcgcccagcccguacaacagcaaguucgaguccguggccuggagcgccuccgccugccacgacggcaugggcuggcucaccaucgggaucagcggccccgacaacggggcgguggccguccugaaguacaacggcaucaucacggagaccaucaaguccuggaagaagcgcauccugcggacccaggagagcgagugcgugugcgugaacggcuccugcuucaccaucaugacggacgggcccagcaacggcgccgccuccuacaagaucuucaagaucgagaaggggaaggucaccaagagcaucgagcucaacgcccccaacuuccacuacgaggagugcuccugcuacccggacaccggcaccgugaugugcgugugccgcgacaacuggcacgggagcaaccggcccugggucuccuucaaccagaaccuggacuaccagaucggcuacaucugcagcggcguguucggggacaacccccgccccaaggacggcaagggguccugcaacccggugacggucgacggcgcggacggggugaagggcuucagcuacaaguacggcaacgggguguggaucggccggaccaaguccaaccgccugcggaagggguucgagaugaucugggaccccaacggcuggaccgacaccgacagcgacuucuccgucaagcaggacgugguggccaucacggacuggagcggguacagcggcuccuucauccagcaccccgagcucaccggccuggacugcauccgccccugcuucugggucgagcuggugcgggggcucccgcgcgagaacaccaccaucuggacgagcggcuccagcaucuccuucugcggggucgacagcgacaccgccaacugguccuggcccgacggcgccgagcugcccuucaccaucgacaaguga

SEQ ID NO: 80261 - RNA, 1413 nt, Artificial Sequence; identical to SEQ ID NO: 78410
  derived and/or modified CDS sequence (opt1) from neuraminidase__InfluenzaA__ABW81488

SEQ ID NO: 80262 - RNA, 1413 nt, Artificial Sequence; identical to SEQ ID NO: 78410
  derived and/or modified CDS sequence (opt1) from neuraminidase__InfluenzaA__ABW81489

SEQ ID NO: 80263 - RNA, 1413 nt, Artificial Sequence
  derived and/or modified CDS sequence (opt1) from neuraminidase__InfluenzaA__ABW81490
augaaccccaaccagaagaucaucaccaucggcagcaucuccaucgccaucgggaucaucagccugaugcuccagaucggcaacaucaucuccaucugggccagccacuccauccagaccgggagccagaaccacacgggcaucugcaaccagcgcaucaucaccuacgagaacuccaccugggugaaccacaccuacgucaacaucaacaacacgaacgugguggcggggaaggacaagaccagcgucacccuggccggcaacuccagccugugcuccaucagcggcugggccaucuacaccaaggacaacuccauccggaucgggagcaagggcgacguguucgugauccgcgagccguucaucuccugcagccaccucgagugcaagacguucuuccugacccagggggcccugcucaacgacaagcacuccaacggcaccgucaaggaccggagccccuaccgcgcccugauguccugcccccugggggaggcgcccagcccguacaacagcaaguucgaguccguggccuggagcgccuccgccugccacgacggcaugggcuggcucaccaucgggaucagcggccccgacaacggggcgguggccguccugaaguacaacggcaucaucacggagaccaucaaguccuggaagaagcggauccugcgcacccaggagagcgagugcgugugcgugaacggcuccugcuucaccaucaugacggacgggcccagcaacggcgccgccuccuacaagaucuucaagaucgagaaggggaaggucaccaagagcaucgagcucaacgcccccaacuuccacuacgaggagugcuccugcuacccggacaccggcaccgugaugugcgugugccgggacaacuggcacgggagcaaccgccccugggucuccuucaaccagaaccuggacuaccagaucggcuacaucugcagcggcguguucggggacaacccccggcccaaggacggcaagggguccugcaacccggugacggucgacggcgcggacggggugaagggcuucagcuacaaguacggcaacgggguguggaucggccgcaccaaguccaaccggcugcgcaagggguucgagaugaucugggaccccaacggcuggaccgacaccgacagcgacuucuccgucaagcaggacgugguggccaucacggacuggagcggguacagcggcuccuucguccagcaccccgagcucaccggccuggacugcauccggcccugcuucuggguggagcugguccgcgggcucccgcgggagaacaccaccaucuggacgagcggcuccagcaucuccuucugcgggguggacagcgacaccgccaacugguccuggcccgacggcgccgagcugcccuucaccaucgacaaguga

SEQ ID NO: 80264 - RNA, 1413 nt, Artificial Sequence
  derived and/or modified CDS sequence (opt1) from neuraminidase__InfluenzaA__ABW81491
augaaccccaaccagaagaucaucaccaucggcagcaucuccaucgccaucgggaucaucagccugaugcuccagaucggcaacaucaucuccaucugggccagccacuccauccagaccgggagccagaaccacacgggcaucugcaaccagcgcaucaucaccuacgagaacuccaccugggugaaccacaccuacgucaacaucaacaacacgaacgugguggcggggaaggacaagaccagcgucacccuggccggcaacuccagccugugcuccaucagcggcugggccaucuacaccaaggacaacuccauccggaucgggagcaagggcgacguguucgugauccgcgagccguucaucuccugcagccaccucgagugccggacguucuuccugacccagggggcccugcucaacgacaagcacuccaacggcaccgucaaggaccgcagccccuaccgggcccugauguccugcccccugggggaggcgcccagcccguacaacagcaaguucgaguccguggccuggagcgccuccgccugccacgacggcaugggcuggcucaccaucgggaucagcggccccgacaacggggcgguggccguccugaaguacaacggcaucaucacggagaccaucaaguccugggagaagcgcauccugcggacccaggagagcgagugcgugugcgugaacggcuccugcuucaccaucaugacggacgggcccagcaacggcgccgccuccuacaagaucuucaagaucgagaaggggaaggucaccaagagcaucgagcucaacgcccccaacuuccacuacgaggagugcuccugcuacccggacaccggcaccgugaugugcgugugccgcgacaacuggcacgggagcaaccggcccugggucuccuucaaccagaaccuggacuaccagaucggcuacaucugcagcggcguguucggggacaacccccgccccaaggacggcaagggguccugcaacccggugacggucgacggcgcggacggggugaagggcuucagcuacaaguacggcaacgggguguggaucggccggaccaaguccaaccgccugcggaagggguucgagaugaucugggaccccaacggcuggaccgacaccgacagcgacuucuccgucaagcaggacgugguggccaucacggacuggagcggguacagcggcuccuucguccagcaccccgagcucaccggccuggacugcauccgccccugcuucuggguggagcugguccgggggcucccgcgcgagaacaccaccaucuggacgagcggcuccagcaucuccuucugcgggguggacagcgacaccgccaacugguccuggcccgacggcgccgagcugcccuucaccaucgacaaguga

SEQ ID NO: 80265 - RNA, 1413 nt, Artificial Sequence
  derived and/or modified CDS sequence (opt1) from neuraminidase__InfluenzaA__ABW81492
augaaccccaaccagaagaucaucaccaucggcagcaucuccaucgccaucgggaucaucagccugaugcuccagaucggcaacaucaucuccaucugggccagccacuccauccagaccgggagccagaaccacacgggcaucugcaaccagcgcaucaucaccuacgagaacuccaccugggugaaccacaccuacgucaacaucaacaacacgaacgugguggcggggaaggacaagaccagcgucacccuggccggcaacuccagccugugcuccaucagcggcugggccaucuacaccaaggacaacuccauccggaucgggagcaagggcgacguguucgugauccgcgagccguucaucuccugcagccaccucgagugccggacguucuuccugacccagggggcccugcucaacgacaagcacuccaacggcaccgucaaggaccgcagccccuaccgggcccugauguccugcccccugggggaggcgcccagcccguacaacagcaaguucgaguccguggccuggagcgccuccgccugccacgacggcaugggcuggcucaccaucgggaucagcggccccgacaacggggcgguggccguccugaaguacaacggcaucaucacggagaccaucaaguccuggaagaagcgcauccugcggacccaggagagcgagugcgugugcgugaacggcuccugcuucaccaucaugacggacgggcccagcaacggcgccgccuccuacaagaucuucaagaucgagaaggggaaggucaccaagagcaucgagcucaacgcccccaacuuccacuacgaggagugcuccugcuacccggacaccggcaccgugaugugcgugugccgcgacaacuggcacgggagcaaccggcccugggucuccuucaaccagaaccuggacuaccagaucggcuacaucugcagcggcguguucggggacaacccccgccccaaggacggcaagggguccugcaacccggugacggucgacggcgcggacggggugaagggcuucagcuacaaguacggcaacgggguguggaucggccggaccaaguccaaccgccugcggaagggguucgagaugaucugggaccccaacggcuggaccgacaccgacagcgacuucuccgucaagcaggacgugguggccaucacggacuggagcggguacagcggcuccuucguccagcaccccgagcucaccggccuggacugcauccgccccugcuucuggguggagcugguccgggggcucccgcgcgagaacaccaccaucugggccagcggcuccagcaucuccuucugcgggguggacagcgacacggccaacugguccuggcccgacggcgccgagcugcccuucaccaucgacaaguga

SEQ ID NO: 80266 - RNA, 1413 nt, Artificial Sequence; identical to SEQ ID NO: 78410
  derived and/or modified CDS sequence (opt1) from neuraminidase__InfluenzaA__ABW81493

SEQ ID NO: 80267 - RNA, 1413 nt, Artificial Sequence; identical to SEQ ID NO: 78410
  derived and/or modified CDS sequence (opt1) from neuraminidase__InfluenzaA__ABW81494

SEQ ID NO: 80268 - RNA, 1413 nt, Artificial Sequence; identical to SEQ ID NO: 78410
  derived and/or modified CDS sequence (opt1) from neuraminidase__InfluenzaA__ABW81495

SEQ ID NO: 80269 - RNA, 1413 nt, Artificial Sequence; identical to SEQ ID NO: 80264
  derived and/or modified CDS sequence (opt1) from neuraminidase__InfluenzaA__ABW81497

SEQ ID NO: 80270 - RNA, 1413 nt, Artificial Sequence
  derived and/or modified CDS sequence (opt1) from neuraminidase__InfluenzaA__ABW81498
augaaccccaaccagaagaucaucaccaucggcagcaucuccaucgccaucgggaucaucagccugaugcuccagaucggcaacaucaucuccaucugggccagccacuccauccagaccgggagccagaaccacacgggcaucugcaaccagcgcaucaucaccuacgagaacuccaccugggugaaccacaccuacgucaacaucaacaacacgaacgugguggcggggaaggacaagaccagcgucacccuggccggcaacuccagccugugcuccaucagcggcugggccaucuacaccaaggacaacuccauccggaucgggagcaagggcgacguguucgugauccgcgagccguucaucuccugcagccaccucgagugccggacguucuuccugacccagggggcccugcucaacgacaagcacuccaacggcaccgucaaggaccgcagccccuaccgggcccugauguccugcccccugggggaggcgcccagcccguacaacagcaaguucgaguccguggccuggagcgccuccgccugccacgacggcaugggcuggcucaccaucgggaucagcggccccgacaacggggcgguggccguccugaaguacaacggcaucaucacggagaccaucaaguccugggagaagcgcauccugcggacccaggagagcgagugcgugugcgugaacggcuccugcuucaccaucaugacggacgggcccagcaacggcgccgccuccuacaagaucuucaagaucgagaaggggaaggucaccaagagcaucgagcucaacgcccccaacuuccacuacgaggagugcuccugcuacccggacaccggcaccgugaugugcgugugccgcgacaacuggcacgggagcaaccggcccugggucuccuucaaccagaaccuggacuaccaggugggcuacaucugcagcggcguguucggggacaacccccgccccaaggacggcaagggguccugcaacccggucacgguggacggcgcggacggggugaagggcuucagcuacaaguacggcaacggggucuggaucggccggaccaaguccaaccgccugcggaagggguucgagaugaucugggaccccaacggcuggaccgacaccgacagcgacuucuccgugaagcaggacguggucgccaucacggacuggagcggguacagcggcuccuucgugcagcaccccgagcucaccggccuggacugcauccgccccugcuucugggucgagcuggugcgggggcucccgcgcgagaacaccaccaucuggacgagcggcuccagcaucuccuucugcgggguggacagcgacaccgccaacugguccuggcccgacggcgccgagcugcccuucaccaucgacaaguga

SEQ ID NO: 80271 - RNA, 1413 nt, Artificial Sequence
  derived and/or modified CDS sequence (opt1) from neuraminidase__InfluenzaA__ABW81499
augaaccccaaccagaagaucaucaccaucggcagcaucuccaucgccaucgggaucaucagccugaugcuccagaucggcaacaucaucuccaucugggccagccacuccauccagaccgggagccagaaccacacgggcaucugcaaccagcgcaucaucaccuacgagaacuccaccugggugaaccacaccuacgucaacaucaacaacacgaacgugguggcggggcgggacaagaccagcgucacccuggccggcaacuccagccugugcuccaucagcggcugggccaucuacaccaaggacaacuccauccgcaucgggagcaagggcgacguguucgugauccgggagccguucaucuccugcagccaccucgagugccgcacguucuuccugacccagggggcccugcucaacgacaagcacuccaacggcaccgucaaggaccggagccccuaccgcgcccugauguccugcccccugggggaggcgcccagcccguacaacagcaaguucgaguccguggccuggagcgccuccgccugccacgacggcaugggcuggcucaccaucgggaucagcggccccgacaacggggcgguggccguccugaaguacaacggcaucaucacggagaccaucaaguccuggaagaagcggauccugcgcacccaggagagcgagugcgugugcgugaacggcuccugcuucaccaucaugacggacgggcccagcaacggcgccgccuccuacaagaucuucaagaucgagaaggggaaggucaccaagagcaucgagcucaacgcccccaacuuccacuacgaggagugcuccugcuacccggacaccggcaccgugaugugcgugugccgggacaacuggcacgggagcaaccgccccugggucuccuucaaccagaaccuggacuaccagaucggcuacaucugcagcggcguguucggggacaacccccggcccaaggacggcaagggguccugcaacccggugacggucgacggcgcggacggggugaagggcuucagcuacaaguacggcaacgggguguggaucggccgcaccaaguccaaccggcugcgcaagggguucgagaugaucugggaccccaacggcuggaccgacaccgacagcgacuucuccgucaagcaggacgugguggccaucacggacuggagcggguacagcggcuccuucguccagcaccccgagcucaccggccuggacugcauccggcccugcuucuggguggagcugguccgcgggcucccgcgggagaacaccaccaucuggacgagcggcuccagcaucuccuucugcgggguggacagcgacaccgccaacugguccuggcccgacggcgccgagcugcccuucaccaucgacaaguga

SEQ ID NO: 80272 - RNA, 1413 nt, Artificial Sequence
  derived and/or modified CDS sequence (opt1) from neuraminidase__InfluenzaA__ABW81500
augaaccccaaccagaagaucaucaccaucggcagcaucuccaucgccaucgggaucaucagccugaugcuccagaucggcaacaucaucuccaucugggccagccacuccauccagaccgggagccagaaccacacgggcaucugcaaccagcgcaucaucaccuacgagaacuccaccugggugaaccacaccuacgucaacaucaacaacacgaacgugguggcggggaaggacaagaccagcgucacccuggccggcaacuccagccugugcuccaucagcggcugggccaucuacaccaaggacaacuccauccggaucgggagcaagggcgacguguucgugauccgcgagccguucaucuccugcagccaccucgagugccggacguucuuccugacccagggggcccugcucaacgacaagcacuccaacggcaccgucaaggaccgcagccccuaccgggcccugauguccugcccccugggggaggcgcccagcccguacaacagcaaguucgaguccguggccuggagcgccuccgccugccacgacggcaugggcuggcucaccaucgggaucagcggccccgacaacggggcgguggccguccugaaguacaacggcaucaucacggagaccaucaaguccuggaagaagcgcauccugcggacccaggagagcgagugcgugugcgugaacggcuccugcuucaccaucaugacggacgggcccagcaacggcgccgccuccuacaagaucuucaagaucgagaaggggaaggucaccaagagcaucgagcucaacgcccccaacuuccacuacgaggagugcuccugcuacccggacaccggcaccgugaugugcgugugccgcgacaacuggcacgggagcaaccggcccugggucuccuucaaccagaaccuggacuaccagaucggcuacaucugcagcggcguguucggggacaacccccgccccaaggacggcaagggguccugcaacccggugacggcggacggcgccgacggggucaagggcuucagcuacaaguacggcaacgggguguggaucggccggaccaaguccaaccgccugcggaagggguucgagaugaucugggaccccaacggcuggaccgacaccgacagcgacuucuccgugaagcaggacgucguggccaucacggacuggagcggguacagcggcuccuucgugcagcaccccgagcucaccggccuggacugcauccgccccugcuucugggucgagcuggugcgggggcucccgcgcgagaacaccaccaucuggacgagcggcuccagcaucuccuucugcggggucgacagcgacaccgccaacugguccuggcccgacggcgccgagcugcccuucaccaucgacaaguga

SEQ ID NO: 80273 - RNA, 1413 nt, Artificial Sequence
  derived and/or modified CDS sequence (opt1) from neuraminidase__InfluenzaA__ABW81501
augaaccccaaccagaagaucaucaccaucggcagcaucuccaucgccaucgggaucaucagccugaugcuccagaucggcaacaucaucuccaucugggccagccacuccauccagaccgggagccagaaccacacgggcaucugcaaccagaagaucaucaccuacgagaacuccaccugggugaaccacaccuacgucaacaucaacaacacgaacgugguggcggggaaggacaagaccagcgucacccuggccggcaacuccagccugugcuccgugagcggcugggccaucuacaccaaggacaacuccauccgcaucgggagcaagggcgacguguucgucauccgggagccguucaucuccugcagccaccucgagugccgcacguucuuccugacccagggggcccugcucaacgacaagcacuccaacggcaccgugaaggaccggagccccuaccgcgcccugauguccugcccccugggggaggcgcccagcccguacaacagcaaguucgaguccguggccuggagcgccuccgccugccacgacggcaugggcuggcucaccaucgggaucagcggccccgacaacggggcggucgccgugcugaaguacaacggcaucaucacggagaccaucaaguccuggaagaagcggauccugcgcacccaggagagcgagugcgugugcgucaacggcuccugcuucaccaucaugacggacgggcccagcaacggcgccgccuccuacaagaucuucaagaucgagaaggggaaggugaccaagagcaucgagcucaacgcccccaacuuccacuacgaggagugcuccugcuacccggacaccggcaccgugaugugcgucugccgggacaacuggcacgggagcaaccgccccuggguguccuucaaccagaaccuggacuaccagaucggcuacaucugcagcggcguguucggggacaacccccggcccaaggacggcaagggguccugcaacccggucacgguggacggcgcggacggggugaagggcuucagcuacaaguacggcaacggggucuggaucggccgcaccaaguccaaccggcugcgcaagggguucgagaugaucugggaccccaacggcuggaccgacaccgacagcgacuucuccgugaagcaggacguggucgccaucacggacuggagcggguacagcggcuccuucgugcagcaccccgagcucaccggccuggacugcauccggcccugcuucugggucgagcuggugcgcgggcucccgcgggagaacaccaccaucuggacgagcggcuccagcaucuccuucugcgggguggacagcgacaccgccaacugguccuggcccgacggcgccgagcugcccuucaccaucgacaaguga

SEQ ID NO: 80274 - RNA, 1413 nt, Artificial Sequence; identical to SEQ ID NO: 80095
  derived and/or modified CDS sequence (opt1) from neuraminidase__InfluenzaA__ABW86324

SEQ ID NO: 80275 - RNA, 1413 nt, Artificial Sequence; identical to SEQ ID NO: 80067
  derived and/or modified CDS sequence (opt1) from neuraminidase__InfluenzaA__ABW86335

SEQ ID NO: 80276 - RNA, 1413 nt, Artificial Sequence; identical to SEQ ID NO: 80054
  derived and/or modified CDS sequence (opt1) from neuraminidase__InfluenzaA__ABW86346

SEQ ID NO: 80277 - RNA, 1413 nt, Artificial Sequence; identical to SEQ ID NO: 80054
  derived and/or modified CDS sequence (opt1) from neuraminidase__InfluenzaA__ABW86357

SEQ ID NO: 80278 - RNA, 1413 nt, Artificial Sequence; identical to SEQ ID NO: 80054
  derived and/or modified CDS sequence (opt1) from neuraminidase__InfluenzaA__ABW86368

SEQ ID NO: 80279 - RNA, 1413 nt, Artificial Sequence; identical to SEQ ID NO: 80080
  derived and/or modified CDS sequence (opt1) from neuraminidase__InfluenzaA__ABW86379

SEQ ID NO: 80280 - RNA, 1413 nt, Artificial Sequence; identical to SEQ ID NO: 80054
  derived and/or modified CDS sequence (opt1) from neuraminidase__InfluenzaA__ABW86390

SEQ ID NO: 80281 - RNA, 1413 nt, Artificial Sequence; identical to SEQ ID NO: 80095
  derived and/or modified CDS sequence (opt1) from neuraminidase__InfluenzaA__ABW86401

SEQ ID NO: 80282 - RNA, 1413 nt, Artificial Sequence; identical to SEQ ID NO: 80054
  derived and/or modified CDS sequence (opt1) from neuraminidase__InfluenzaA__ABW86412

SEQ ID NO: 80283 - RNA, 1413 nt, Artificial Sequence
  derived and/or modified CDS sequence (opt1) from neuraminidase__InfluenzaA__ABW86423
augaaccccaaccagaagaucaucaccaucggcagcaucuccaucgccaucgggaucaucagccugaugcuccagaucggcaacaucaucuccaucugggccagccacuccauccagaccgggagccagaaccacacgggcaucugcaaccagcgcaucaucaccuacgagaacuccaccugggugaaccacaccuacgucaacaucaacaacacgaacgugguggcggggaaggacaagaccagcgucacccuggccggcaacuccagccugugcuccaucagcggcugggccaucuacaccaaggacaacuccauccggaucgggagcaagggcgacguguucgugauccgcgagccguucaucuccugcagccaccucgagugccggacguucuuccugacccagggggcccugcucaacgacaagcacuccaacggcaccgucaaggaccgcagccccuaccgggcccugauguccugcccccugggggaggcgcccagcccguacaacagcaaguucgaguccguggccuggagcgccuccgccugccacgacggcaugggcuggcucaccaucgggaucagcggccccgacaacggggcgguggccguccugaaguacaacggcaucaucacggagaccaucaaguccuggaagaagcgcauccugcggacccaggagagcgagugcgugugcgugaacggcuccugcuucgccaucaugaccgacgggcccagcaacggcgccgccuccuacaagaucuucaagaucgagaaggggaaggucaccaagagcaucgagcucaacgcgcccaacuuccacuacgaggagugcuccugcuacccggacacgggcaccgugaugugcgugugccgcgacaacuggcacgggagcaaccggcccugggucuccuucaaccagaaccuggacuaccaggugggcuacaucugcagcggcguguucggggacaacccccgccccaaggacggcaagggguccugcaacccgaugaccgucgacggcgccgacggggugaagggcuucagcuacaaguacggcaacgggguguggaucggccggacgaaguccaacaagcugcgcaagggguucgagaugaucugggaccccaacggcuggaccgacaccgacagcgacuucuccgucaagcaggacgugguggccaucaccgacuggagcggguacagcggcuccuucguccagcaccccgagcucacgggccuggacugcauccggcccugcuucuggguggagcugguccgcgggcucccgcgggagaacaccaccaucuggaccagcggcuccagcaucuccuucugcgggguggacagcgacacggccaacugguccuggcccgacggcgccgagcugcccuucaccaucgacaaguga

SEQ ID NO: 80284 - RNA, 1413 nt, Artificial Sequence; identical to SEQ ID NO: 80054
  derived and/or modified CDS sequence (opt1) from neuraminidase__InfluenzaA__ABW86434

SEQ ID NO: 80285 - RNA, 1413 nt, Artificial Sequence; identical to SEQ ID NO: 80054
  derived and/or modified CDS sequence (opt1) from neuraminidase__InfluenzaA__ABW86445

SEQ ID NO: 80286 - RNA, 1413 nt, Artificial Sequence; identical to SEQ ID NO: 80089
  derived and/or modified CDS sequence (opt1) from neuraminidase__InfluenzaA__ABW86456

SEQ ID NO: 80287 - RNA, 1413 nt, Artificial Sequence
  derived and/or modified CDS sequence (opt1) from neuraminidase__InfluenzaA__ABW86467
augaacaccaaccagaagaucaucaccaucggcagcaucuccaucgccaucgggaucaucagccugaugcuccagaucggcaacaucaucuccaucugggccagccacuccauccagacggggagccagaaccacaccggcaucugcaaccagcgcaucaucaccuacgagaacuccaccugggugaaccacacguacgucagcaucaacaacaccaacgugguggcggggaaggacaagaccuccgucacccuggccggcaacagcucccugugcagcaucuccggcugggccaucuacacgaaggacaacagcauccggaucggguccaagggcgacguguucgugauccgcgagcccuucaucagcugcucccaccucgagugccggaccuucuuccugacccagggggcccugcucaacgacaagcacagcaacggcaccgucaaggaccgcuccccguaccgggcccugaugagcugcccccugggggaggcgcccagccccuacaacuccaaguucgagagcguggccugguccgccagcgccugccacgacggcaugggcuggcucacgaucgggaucuccggcccggacaacggggcgguggccguccugaaguacaacggcaucaucaccgagaccaucaagagcuggaagaagcgcauccugcggacccaggaguccgagugcgugugcgugaacggcagcugcuucacgaucaugaccgacgggcccuccaacggcgccgccagcuacaagaucuucaagaucgagaaggggaaggucaccaaguccaucgagcucaacgcccccaacuuccacuacgaggagugcagcugcuaccccgacaccggcacggugaugugcgugugccgcgacaacuggcacggguccaaccggccgugggucagcuucaaccagaaccuggacuaccagaucggcuacaucugcuccggcguguucggggacaacccccgccccaaggacggcaaggggagcugcaaccccgugaccgucgacggcgcggacggggugaagggcuucuccuacaaguacggcaacgggguguggaucggccggaccaagagcaaccgccugcggaagggguucgagaugaucugggacccgaacggcuggaccgacacggacuccgacuucagcaucaagcaggacgucguggccaucaccgacuggagcggguacuccggcagcuucgugcagcaccccgagcucaccggccuggacugcauccgccccugcuucugggucgagcuggugcgggggcucccccgcgagaacaccacgaucuggaccuccggcagcuccaucagcuucugcggggucgacuccgacaccgccaacuggagcuggccggacggcgccgagcugcccuucaccaucgacaaguga

SEQ ID NO: 80288 - RNA, 1413 nt, Artificial Sequence; identical to SEQ ID NO: 80089
  derived and/or modified CDS sequence (opt1) from neuraminidase__InfluenzaA__ABW86478

SEQ ID NO: 80289 - RNA, 1413 nt, Artificial Sequence
  derived and/or modified CDS sequence (opt1) from neuraminidase__InfluenzaA__ABW86489
augaaccccaaccagaagaucaucaccaucggcagcaucuccaucgccaucgggaucaucagccugaugcuccagaucggcaacaucaucuccaucugggccagccacuccauccagaccgggagccagaaccacacgggcaucugcaaccagcgcaucaucaccuacgagaacuccaccugggugaaccacaccuacgucagcaucaacaacacgaacgugguggcggggaaggacaagaccuccgucacccuggccggcaacagcucccugugcagcaucuccggcugggccaucuacaccaaggacaacagcauccggaucggguccaagggcgacguguucgugauccgcgagccguucaucagcugcucccaccucgagugccggacguucuuccugacccagggggcccugcucaacgacaagcacagcaacggcaccgucaaggaccgcucccccuaccgggcccugaugagcugcccccugggggaggcgcccagcccguacaacuccaaguucgagagcguggccugguccgccagcgccugccacgacggcaugggcuggcucaccaucgggaucuccggccccgacaacggggcgguggccguccugaaguacaacggcaucaucacggagaccaucaagagcuggaagaagcgcauccugcggacccaggaguccgagugcgugugcgugaacggcagcugcuucaccaucaugacggacgggcccuccaacggcgccgccagcuacaagaucuucaagaucgagaaggggaaggucaccaaguccaucgagcucaacgcccccaacuuccacuacgaggagugcagcugcuacccggacaccggcaccgugaugugcgugugccgcgacaacuggcacggguccaaccggcccugggucagcuucaaccagaaccuggacuaccagaucggcuacaucugcuccggcguguucggggacaacccccgccccaaggacggcaaggggagcugcaacccggugacggucgacggcgcggacggggugaagggcuucuccuacaaguacggcaacgggguguggaucggccggaccaagagcaaccgccugcggaagggguucgagaugaucugggaccccaacggcuggaccgacaccgacuccgacuucagcgucaagcaggacgugguggggaucacggacuggagcggcuacuccggcagcuucguccagcaccccgagcucaccgggcuggacugcauccgccccugcuucuggguggagcugguccggggccucccgcgcgagaacaccaccaucuggacguccgggagcuccaucagcuucugcggcguggacuccgacaccgccaacuggagcuggcccgacggcgccgagcugcccuucaccaucgacaaguga

SEQ ID NO: 80290 - RNA, 1413 nt, Artificial Sequence
  derived and/or modified CDS sequence (opt1) from neuraminidase__InfluenzaA__ABW86500
augaaccccaaccagaagaucaugaccaucggcagcaucuccaucgccaucgggaucaucagccugaugcuccagaucggcaacaucaucuccaucugggccagccacuccauccagaccgggagccagaaccacacgggcaucugcaaccagcgcaucaucaccuacgagaacuccaccugggugaaccacaccuacgucaacaucaacaacacgaacgugguggcggggaaggacaagaccagcgucacccuggccggcaacuccagccugugcuccaucagcggcugggccaucuacaccaaggacaacuccauccggaucgggagcaagggcgacguguucgugauccgcgagccguucaucuccugcagccaccucgagugccggacguucuuccugacccagggggcccugcucaacgacaagcacuccaacggcaccgucaaggaccgcagccccuaccgggcccugauguccugcccccugggggaggcgcccagcccguacaacagcaaguucgaguccguggccuggagcgccuccgccugccacgacggcaugggcuggcucaccaucgggaucagcggccccgacaacggggcgguggccguccugaaguacaacggcaucaucacggagaccaucaaguccuggaagaagcgcauccugcggacccaggagagcgagugcgugugcgugaacggcuccugcuucaccaucaugacggacgggcccagcaacggcgccgccuccuacaagaucuucaagaucgagaaggggaaggucaccaagagcaucgagcucaacgcccccaacuuccacuacgaggagugcuccugcuacccggacaccggcaccgugaugugcgugugccgcgacaacuggcacgggagcaaccggcccugggucuccuucaaccagaaccuggacuaccagaucggcuacaucugcagcggcguguucggggacaacccccgccccaaggacggcaagggguccugcaacccggugacggucgacggcgcggacggggugaagggcuucagcuacaaguacggcaacgggguguggaucggccggaccaaguccaaccgccugcggaagggguucgagaugaucugggaccccaacggcuggaccaacaccgacagcgacuucuccaugaagcaggacgucguggccaucacggacuggagcggguacagcggcuccuucgugcagcaccccgagcucaccggccuggacugcauccgccccugcuucugggucgagcuggugcgggggcucccgcgcgagaacaccaccaucuggacgagcggcuccagcaucuccuucugcggggucgacagcgacaccgccaacugguccuggcccgacggcgccgagcugcccuucaccaucgacaaguga

SEQ ID NO: 80291 - RNA, 1413 nt, Artificial Sequence; identical to SEQ ID NO: 80054
  derived and/or modified CDS sequence (opt1) from neuraminidase__InfluenzaA__ABW86511

SEQ ID NO: 80292 - RNA, 1413 nt, Artificial Sequence
  derived and/or modified CDS sequence (opt1) from neuraminidase__InfluenzaA__ABW86522
augaaccccaaccagaagaucaucaccaucggcagcaucuccaucgccaucgggaucaucagccugaugcuccagaucggcaacaucaucuccaucugggccagccacuccauccagaccgggagccagaaccacacgggcaucugcaaccagcgcaucaucaccuacgagaacuccaccugggugaaccacaccuacgucaacaucaacaacacgaacgugguggcggggaaggacaagaccagcgucacccuggccggcaacuccagccugugcuccaucagcggcugggccaucuacaccaaggacaacuccauccggaucgggagcaagggcgacguguucgugauccgcgagccguucaucuccugcagccaccucgagugccggacguucuuccugacccagggggcccugcucaacgacaagcacuccaacggcaccgucaaggaccgcagccccuaccgggcccugauguccugcccccugggggaggcgcccagcccguacaacagcaaguucgaguccguggccuggagcgccuccgccugccacgacggcaugggcuggcucaccaucgggaucagcggccccgacaacggggcgguggccguccugaaguacaacggcaucaucacggagaccaucaaguccuggaagaagcgcauccugcggacccaggagagcgagugcgugugcgugaacggcuccugcuucaccaucaugacggacgggcccagcaacggcgccgccuccuacaagaucuucaagaucgagaaggggaaggucaccaagagcaucgagcucaacgcccccaacuuccacuacgaggagugcuccugcuacccggacaccggcaccgugaugugcgugugccgcgacaacuggcacgggagcaaccggcccugggucuccuucaaccagaaccuggacuaccaggugggcuacaucugcagcggcguguucggggacaacccccgccccaaggacggcaagggguccugcaacccgaugacggucgacggcgcggacggggugaagggcuucagcuacaaguacggcaacgggguguggaucggccggaccaaguccaacaagcugcgcaagggguucgagaugaucugggaccccaacggcuggaccgacaccgacagcgacuucuccgucaagcaggacgugguggccgucacggacuggagcggguacagcggcuccuucgugcagcaccccgagcucaccggccuggacugcauccggcccugcuucugggucgagcuggugcgcgggcucccgcgggagaacgccaccaucuggaccagcggcuccagcaucuccuucugcgggguggacagcgacacggccaacugguccuggcccgacggcgccgagcugcccuucaccaucgacaaguga

SEQ ID NO: 80293 - RNA, 1413 nt, Artificial Sequence; identical to SEQ ID NO: 80054
  derived and/or modified CDS sequence (opt1) from neuraminidase__InfluenzaA__ABW86533

SEQ ID NO: 80294 - RNA, 1413 nt, Artificial Sequence; identical to SEQ ID NO: 80089
  derived and/or modified CDS sequence (opt1) from neuraminidase__InfluenzaA__ABW86544

SEQ ID NO: 80295 - RNA, 1413 nt, Artificial Sequence; identical to SEQ ID NO: 80054
  derived and/or modified CDS sequence (opt1) from neuraminidase__InfluenzaA__ABW86555

SEQ ID NO: 80296 - RNA, 1410 nt, Artificial Sequence
  derived and/or modified CDS sequence (opt1) from neuraminidase__InfluenzaA__ABW86566
augaaccccaaccagaagaucaucaccaucggcagcgugucccugaccaucagcacgaucugcuucuucaugcagaccgccauccucaucaccaccgucacgcugcacuucaagcaguacgaguucaacuccccgcccaacaaccaggugaugcugugcgagcccaccgugaucgagcgcaacaucaccgagaucgucuaccucaccaacacgaccaucgagaaggagaucugccccaagcuggccgaguaccggaacuggagcaagccgcagugcgacaucaccggguucgcgcccuucuccaaggacaacagcauccgccuguccgccggcggggacaucugggugacccgggagcccuacgugagcugcgaccccgacaagugcuaccaguucgcccucggccaggggacgacccugaacaacguccacuccaacgacaccgugcgcgaccggaccccguaccgcacgcugcucaugaacgagcugggcgugcccuuccaccugggcaccaagcaggucugcaucgccuggagcuccagcuccugccacgacgggaaggccuggcuccacgugugcaucaccggcgacgacaagaacgcgaccgccagcuucaucuacaacgggcggcugguggacuccaucgucagcugguccaaggagauccugcgcacgcaggagagcgagugcgugugcaucaacgggaccugcaccguggucaugaccgacggguccgccagcggcaaggccgacacgaagauccucuucaucgaggagggcaagaucgugcacaccagcacccuguccgggagcgcgcagcacguggaggagugcuccugcuacccccgguaccccggcguccgcugcgugugccgggacaacuggaaggggagcaaccgcccgaucguggacaucaacaucaaggaccacuccaucgucagcuccuacgugugcagcggccuggugggcgacacgccccggaagaacgacuccagcuccagcucccacugccucgaccccaacaacgaggagggcggccacggggucaagggcugggccuucgacgacgggaacgacguguggaugggccgcaccaucagcgagaagucccggcugggcuacgagaccuucaaggucaucgagggguggagcaaccccaaguccaagcugcagaucaaccgccaggugaucguggaccggggcaaccgcagcggguacuccggcaucuucagcgucgagggcaagagcugcaucaaccggugcuucuacguggagcucauccgcgggcggaaggaggagaccgaggugcuguggaccuccaacagcaucgucguguucugcggcacguccgggaccuacggcaccgggagcuggccggacggcgccgacaucaaccugaugcccaucuga

SEQ ID NO: 80297 - RNA, 1413 nt, Artificial Sequence; identical to SEQ ID NO: 80080
  derived and/or modified CDS sequence (opt1) from neuraminidase__InfluenzaA__ABW86609

SEQ ID NO: 80298 - RNA, 1413 nt, Artificial Sequence; identical to SEQ ID NO: 79083
  derived and/or modified CDS sequence (opt1) from neuraminidase__InfluenzaA__ABW91188

SEQ ID NO: 80299 - RNA, 1410 nt, Artificial Sequence
  derived and/or modified CDS sequence (opt1) from neuraminidase__InfluenzaA__ABW91210
augaaccccaaccagaagaucaucaccaucggcagcgugucccugaccaucagcacgaucugcuucuucaugcagaucgccauccucaucaccaccgucacccugcacuucaagcaguacgaguucaacuccccgcccaacaaccaggugauccugugcgagcccacgaucaucgagcgcaacaucaccgagaucguguaccucaccaacaccacgaucgagaaggagaucugccccaagcuggccgaguaccggaacuggagcaagccgcagugcgacaucaccggguucgcgcccuucuccaaggacaacagcauccgccuguccgccggcggggacaucugggucacccgggagcccuacgugagcugcgaccccgacaagugcuaccaguucgcccucggccaggggaccacgcugaacaacgugcacuccaacgacaccguccgcgaccggaccccguaccgcacccugcucaugaacgagcugggcgugcccuuccaccugggcacgaagcaggucugcaucgccuggagcuccagcuccugccacgacgggaaggccuggcuccacgugugcaucaccggcgacgacaagaacgcgaccgccagcuucaucuacaacgggcggcugguggacuccaucgugagcugguccaaggagauccugcgcacccaggagagcgagugcgucugcaucaacggcacgugcaccguggugaugaccgacggguccgccagcggcaaggccgacaccaagauccucuucaucgaggagggcaagaucguccacacgagcacccuguccgggagcgcgcagcacguggaggagugcuccugcuacccccgguaccccggcgugcgcugcgucugccgggacaacuggaaggggagcaaccgcccgaucguggacaucaacaucaaggaccacuccaucgugagcuccuacgucugcagcggccuggugggcgacacgccccggaagaacgacuccagcuccagcucccacugccucgaccccaacaacgaggagggcgggcacggggugaagggcugggccuucgacgacgggaacgacgucuggaugggccgcaccaucagcgagaagucccggcugggcuacgagaccuucaaggugaucgagggguggagcaaccccaaguccaagcugcagaucaaccgccaggucaucguggaccggggcaaccgcagcggguacuccggcaucuucagcguggagggcaagagcugcaucaaccggugcuucuacgucgagcucauccgcgggcggaaggaggagaccgaggugcuguggaccuccaacagcaucguggucuucugcggcaccuccgggacguacggcaccgggagcuggccggacggcgccgacaucaaccugaugcccaucuga

SEQ ID NO: 80300 - RNA, 1413 nt, Artificial Sequence; identical to SEQ ID NO: 80054
  derived and/or modified CDS sequence (opt1) from neuraminidase__InfluenzaA__ABW91221

SEQ ID NO: 80301 - RNA, 1410 nt, Artificial Sequence
  derived and/or modified CDS sequence (opt1) from neuraminidase__InfluenzaA__ABW91232
augaaccccaaccagaagaucaucaccaucggcagcgugucccugaccaucagcacgaucugcuucuucaugcagaucgccauccucaucaccaccgucacccugcacuucaagcaguacgaguucaacuccccgcccaacaaccaggugaugcugugcgagagcacgaucaucgagcgcaacaucaccgagaucguguaccucaccaacaccacgaucgagaaggagaucugccccaagcuggccgaguaccggaacugguccaagccccagugcgacaucaccggguucgcgccguucagcaaggacaacuccauccgccugagcgccggcggggacaucugggucacccgggagcccuacguguccugcgaccccgacaagugcuaccaguucgcccucggccaggggaccacgcugaacaacgugcacagcaacgacaccguccgcgaccggacccccuaccgcacccugcucaugaacgagcugggcgugccguuccaccugggcacgaagcaggucugcaucgccugguccagcuccagcugccacgacgggaaggccuggcuccacgugugcaucaccggcgacgacaagaacgcgaccgccuccuucaucuacaacgggcggcugguggacagcaucguguccuggagcaaggagauccugcgcacccaggaguccgagugcgucugcaucaacggcacgugcaccguggugaugaccgacgggagcgccagcggcaaggccgacaccaagauccucuucaucgaggagggcaagaucguccacacguccacccugagcggguccgcgcagcacguggaggagugcagcugcuacccccgguaccccggcgugcgcugcgucugccgggacaacuggaagggguccaaccgccccaucguggacaucaacaucaaggaccacagcaucguguccagcuacgucugcuccggccuggugggcgacaccccgcggaagaacgacagcuccagcuccgggcacugccucgaccccaacaacgaggagggcgggcacggcgugaaggggugggccuucgacgacggcaacgacgucuggaugggccgcaccaucagcgagaagucccggcugggguacgagacguucaaggugaucgagggcuggagcaaccccaaguccaagcugcagaucaaccgccaggucaucguggaccgggggaaccgcagcggcuacuccgggaucuucagcguggagggcaagagcugcaucaaccggugcuucuacgucgagcucauccgcggccggaaggaggagaccgaggugcuguggaccuccaacagcaucguggucuucugcgggaccuccggcacguacgggaccggcagcuggcccgacggggccgacaucaaccugaugccgaucuga

SEQ ID NO: 80302 - RNA, 1410 nt, Artificial Sequence; identical to SEQ ID NO: 80090
  derived and/or modified CDS sequence (opt1) from neuraminidase__InfluenzaA__ABW91243

SEQ ID NO: 80303 - RNA, 1410 nt, Artificial Sequence; identical to SEQ ID NO: 79908
  derived and/or modified CDS sequence (opt1) from neuraminidase__InfluenzaA__ABW91254

SEQ ID NO: 80304 - RNA, 1410 nt, Artificial Sequence; identical to SEQ ID NO: 79908
  derived and/or modified CDS sequence (opt1) from neuraminidase__InfluenzaA__ABW91265

SEQ ID NO: 80305 - RNA, 1413 nt, Artificial Sequence; identical to SEQ ID NO: 80054
  derived and/or modified CDS sequence (opt1) from neuraminidase__InfluenzaA__ABW91276

SEQ ID NO: 80306 - RNA, 1413 nt, Artificial Sequence
  derived and/or modified CDS sequence (opt1) from neuraminidase__InfluenzaA__ABW91287
augaaccccaaccagaagaucaucaccaucggcagcaucuccaucgccaucgggaucaucagccugauccuccagaucggcaacaucaucuccaucugggccagccacuccauccagaccgggagccagaaccacacgggcaucugcaaccagcgcaucaucaccuacgagaacuccaccugggugaacaacaccuacgucaacaucaacaacacgaacgugguggcggagaaggacaagaccagcgucacccuggccgggaacuccagccugugcuccaucagcggcugggccaucuacaccaaggacaacuccauccggaucggcagcaagggggacaucuucgugauccgcgagccguucaucuccugcagccaccucgagugccggacguucuuccugacccagggcgcccugcucaacgacaagcacuccaacgggaccgugaaggaccgcagccccuaccgggcccugauguccugcccccugggcgaggcgcccagcccguacaacagccgcuucgaguccgucgccuggagcgccuccgccugccacgacgggaugggcuggcucaccaucggcaucagcgggcccgacaacggcgcgguggccgugcugaaguacaacgggaucaucacggagaccaucaaguccuggaagaagcggauccugcgcacccaggagagcgagugcgucugcaugaacggcuccugcuucaccaucaugacggacggccccagcaacggggccgccuccuacaagaucuucaagaucgagaagggcaaggugaccaagaccaucgagcucaacgcccccaacuuccacuacgaggagugcagcugcuacccggacaccgggacggugaugugcgucugccgggacaacuggcacggcuccaaccgccccugggugagcuucaaccagaaccuggacuaccagaucggguacaucugcuccggcguguucggcgacaacccccggcccaaggacggggagggcagcugcaacccggucaccguggacggggcggacggcgugaagggguucuccuacaaguacggcaacggcgucuggaucgggcgcaccaagagcaaccggcugcgcaagggcuucgagaugaucugggaccccaacggguggaccaacacggacuccgacuucagcgugaagcaggacaucguggccaucaccgacugguccggcuacagcgggagcuucguccagcaccccgagcucaccggccuggacugcauccggcccugcuucuggguggagcuggugcgcggccucccgcgggagaacaccacgaucuggaccuccgggagcuccaucagcuucugcggcgucaacuccgggaccgccaacuggagcuggcccgacggcgccgagcugcccuucaccaucgacaaguga

SEQ ID NO: 80307 - RNA, 1413 nt, Artificial Sequence; identical to SEQ ID NO: 80054
  derived and/or modified CDS sequence (opt1) from neuraminidase__InfluenzaA__ABW91298

SEQ ID NO: 80308 - RNA, 1413 nt, Artificial Sequence
  derived and/or modified CDS sequence (opt1) from neuraminidase__InfluenzaA__ABW91309
augaaccccaaccagaagaucaucaccaucggcagcaucuccaucgccaucgggaucaucagccugaugcuccagaucggcaacaucaucuccaucugggccagccacuccauccagaccgggagccagaaccacacgggcaucugcaaccagcgcaucaucaccuacgagaacuccaccugggugaaccacaccuacgucagcaucaacaacacgaacgugguggcggggaaggacaagaccuccgucacccuggccggcaacagcucccugugcagcaucuccggcugggccaucuacaccaaggacaacagcauccggaucggguccaagggcgacguguucgugauccgcgagccguucaucagcugcucccaccucgagugccggacguucuuccugacccagggggcccugcucaacgacaagcacagcaacggcaccgucaaggaccgcucccccuaccgggcccugaugagcugcccccugggggaggcgcccagcccguacaacuccaaguucgagagcguggccugguccgccagcgccugccacgacggcaugggcuggcucaccaucgggaucuccggccccgacaacggggcgguggccguccugaaguacaacggcaucaucacggagaccaucaagagcuggaagaagcgcauccugcggacccaggaguccgagugcgugugcgugaacggcagcugcuucaccaucaugacggacgggcccuccgacggcgccgccagcuacaagaucuucaagaucgagaaggggaaggucaccaaguccaucgagcucaacgcccccaacuuccacuacgaggagugcagcugcuacccggacaccggcaccgugaugugcgugugccgcgacaacuggcacggguccaaccggcccugggucagcuucaaccagaaccuggacuaccagaucggcuacaucugcuccggcguguucggggacaacccccgccccaaggacggcaaggggagcugcaacccggugacggcggacggcgccgacggggucaagggcuucuccuacaaguacggcaacgggguguggaucggccggaccaagagcaaccgccugcggaagggguucgagaugaucugggaccccaacggcuggaccgacaccgacuccgacuucagcgugaagcaggacgucguggccaucacggacuggagcggguacuccggcagcuucgugcagcaccccgagcucaccggccuggacugcauccgccccugcuucugggucgagcuggugcgggggcucccgcgcgagaacaccaccaucuggacguccggcagcuccaucagcuucugcggggucgacuccgacaccgccaacuggagcuggcccgacggcgccgagcugcccuucaccaucgacaaguga

SEQ ID NO: 80309 - RNA, 1413 nt, Artificial Sequence; identical to SEQ ID NO: 80054
  derived and/or modified CDS sequence (opt1) from neuraminidase__InfluenzaA__ABW91320

SEQ ID NO: 80310 - RNA, 1413 nt, Artificial Sequence; identical to SEQ ID NO: 80054
  derived and/or modified CDS sequence (opt1) from neuraminidase__InfluenzaA__ABW91331

SEQ ID NO: 80311 - RNA, 1413 nt, Artificial Sequence; identical to SEQ ID NO: 80054
  derived and/or modified CDS sequence (opt1) from neuraminidase__InfluenzaA__ABW91342

SEQ ID NO: 80312 - RNA, 1413 nt, Artificial Sequence; identical to SEQ ID NO: 80054
  derived and/or modified CDS sequence (opt1) from neuraminidase__InfluenzaA__ABW91353

SEQ ID NO: 80313 - RNA, 1413 nt, Artificial Sequence
  derived and/or modified CDS sequence (opt1) from neuraminidase__InfluenzaA__ABW91364
augaacaccaaccagaagaucaucaccaucggcagcaucuccaucgccaucgggaucaucagccugaugcuccagaucggcaacaucaucuccaucugggccagccacuccauccagacggggagccagaaccacaccggcaucugcaaccagcgcaucaucaccuacgagaacuccaccugggugaaccacacguacgucaacaucaacaacaccaacguggugaccgggaaggacaagaccagcgucacgcuggcgggcaacuccagccugugcuccaucagcggcugggccaucuacaccaaggacaacuccauccggaucgggagcaagggcgacguguucgugauccgcgagcccuucaucuccugcagccaccucgagugccggaccuucuuccugacccagggggcccugcucaacgacaagcacuccaacggcacggucaaggaccgcagcccguaccgggcccugauguccugcccccugggggaggcccccagccccuacaacagcaaguucgaguccguggcguggagcgccuccgccugccacgacggcaugggcuggcucaccaucgggaucagcggcccggacaacggggccguggcgguccugaaguacaacggcaucaucaccgagaccaucaaguccuggaagaagcgcauccugcggacgcaggagagcgagugcgugugcgugaacggcuccugcuucaccaucaugaccgacgggcccagcgacggcgccgccuccuacaagaucuucaagaucgagaaggggaaggucaccaagagcaucgagcucaacgcccccaacuuccacuacgaggagugcuccugcuaccccgacacgggcaccgugaugugcgugugccgcgacaacuggcacgggagcaaccggccgugggucuccuucaaccagaaccuggacuaccagaucggcuacaucugcagcggcguguucggggacaacccccgccccaaggacggcaagggguccugcaaccccgugaccgucgacggcgccgacggggugaagggcuucagcuacaaguacggcaacgggguguggaucggccggaccaaguccaacaagcugcgcaagggguucgagaugaucugggacccgaacggcuggacggacaccgacaacgacuucagcgucaagcaggacgugguggcgaucaccgacugguccggguacagcggcagcuucguccagcaccccgagcucaccggccuggacugcauccggcccugcuucuggguggagcugguccgcgggcucccccgggagaacacgaccaucuggaccuccggcagcuccaucagcuucugcgggguggacuccgacaccgccaacuggagcuggccggacggcgccgagcugcccuucacgaucgacaaguga

SEQ ID NO: 80314 - RNA, 1413 nt, Artificial Sequence; identical to SEQ ID NO: 80054
  derived and/or modified CDS sequence (opt1) from neuraminidase__InfluenzaA__ABW91375

SEQ ID NO: 80315 - RNA, 1413 nt, Artificial Sequence; identical to SEQ ID NO: 80080
  derived and/or modified CDS sequence (opt1) from neuraminidase__InfluenzaA__ABW91386

SEQ ID NO: 80316 - RNA, 1410 nt, Artificial Sequence
  derived and/or modified CDS sequence (opt1) from neuraminidase__InfluenzaA__ABW91397
augaaccccaaccagaagaucaucaccaucggcagcgugucccugaccaucagcacgaucugcuucuucaugcagaucgccauccucaucaccaccgucacccugcacuucaagcaguacgaguucaacuccccgcccaacaaccaggugaugcugugcgagcccacgaucaucgagcgcaacaucaccgagaucguguaccucaccaacaccacgaucgagaaggagaucugccccaagcuggccgaguaccggaacuggagcaagccgcagugcgacaucaccggguucgcgcccuucuccaaggacaacagcauccgccuguccgccggcggggacaucugggucacccgggagcccuacgugagcugcgaccccgacaagugcuaccaguucgcccucggccaggggaccacgcugaacaacgugcacuccaacgacaccguccgcgaccggaccccguaccgcacccugcucaugaacgagcugggcgugcccuuccaccugggcacgaagcaggucugcaucgccuggagcuccagcuccugccacgacgggaaggccuggcuccacgugugcaucaccggcgacgacaagaacgcgaccgccagcuucaucuacaacgggcggcugguggacuccaucgugagcugguccaaggagauccugcgcacccaggagagcgagugcaucugcaucaacggcacgugcaccgucgugaugaccgacggguccgccagcggcaaggccgacaccaagauccucuucaucgaggagggcaagaucgugcacacgagcacccuguccgggagcgcgcagcacgucgaggagugcuccugcuacccccgguaccccggcgugcgcugcgugugccgggacaacuggaaggggagcaaccgcccgaucgucgacaucaacaucaaggaccacuccaucgugagcuccuacgugugcagcggccuggucggcgacacgccccggaagaacgacuccagcuccagcucccacugccucgaccccaacaacgaggagggcgggcacggggugaagggcugggccuucgacgacgggaacgacguguggaugggccgcaccaucagcgagaagucccggcugggcuacgagaccuucaaggucaucgagggguggagcaaccccaaguccaagcugcagaucaaccgccaggugaucgucgaccggggcaaccgcagcggguacuccggcaucuucagcguggagggcaagagcugcaucaaccggugcuucuacguggagcucauccgcgggcggaaggaggagaccgagguccuguggaccuccaacagcaucgugguguucugcggcaccuccgggacguacggcaccgggagcuggccggacggcgccgacaucaaccugaugcccaucuga

SEQ ID NO: 80317 - RNA, 1413 nt, Artificial Sequence; identical to SEQ ID NO: 80225
  derived and/or modified CDS sequence (opt1) from neuraminidase__InfluenzaA__ABW91408

SEQ ID NO: 80318 - RNA, 1413 nt, Artificial Sequence
  derived and/or modified CDS sequence (opt1) from neuraminidase__InfluenzaA__ABW91419
augaaccccaaccagaagaucaucaccaucggcagcaucuccaucgccaucgggaucaucagccugaugcuccagaucggcaacaucaucuccaucugggccagccacuccauccagaccgggagccagaaccacacgggcaucugcaaccagcgcaucaucaccuacgagaacuccaccugggugaaccacaccuacgucaacaucaacaacacgaacgugguggcggagaaggacaagaccagcgucacccuggccgggaacuccagccugugcuccaucagcggcugggccaucuacaccaaggacaacuccauccggaucggcagcaagggggacguguucgugauccgcgagccguucaucuccugcagccaccucgagugccggacguucuuccugacccagggcgcccugcucaacgacaagcacuccaacgggaccgucaaggaccgcagccccuaccgggcccugauguccugcccccugggcgaggcgcccagcccguacaacagcaaguucgaguccguggccuggagcgccuccgccugccacgacgggaugggcuggcucaccaucggcaucagcgggcccgacaacggcgcgguggccguccugaaguacaacgggaucaucacggagaccaucaaguccuggaagaagcgcauccugcggacccaggagagcgagugcgugugcgugaacggcuccugcuucaccaucaugacggacggccccagcaacggggccgccuccuacaagaucuucaagaucgagaagggcaaggucaccaagagcaucgagcucaacgcccccaacuuccacuacgaggagugcuccugcuacccggacaccgggaccgugaugugcgugugccgcgacaacuggcacggcagcaaccggcccugggucuccuucaaccagaaccuggacuaccaggugggguacaucugcagcggcguguucggcgacaacccccgccccaaggacgggaagggcuccugcaacccgaugacggucgacggggcggacggcgugaagggguucagcuacaaguacggcaacggcguguggaucgggcggaccaaguccaacaagcugcgcaagggcuucgagaugaucugggaccccaacggguggaccgacaccgacagcgacuucuccgucaagcaggacgugguggccaucacggacuggagcggcuacagcggguccuucguccagcaccccgagcucaccggccuggacugcauccggcccugcuucuggguggagcugguccgcggccucccgcgggagaacaccaccaucuggacgagcggguccagcaucuccuucugcggcguggacagcgacaccgccaacugguccuggcccgacggggccgagcugcccuucaccaucgacaaguga

SEQ ID NO: 80319 - RNA, 1413 nt, Artificial Sequence
  derived and/or modified CDS sequence (opt1) from neuraminidase__InfluenzaA__ABW91430
augaaccccaaccagaagaucaucaccaucggcagcaucuccaucgccaucgggaucaucagccugaugcuccagaucggcaacaucaucuccaucugggccagccacuccauccagaccgggagccagaaccacacgggcaucugcaaccagcgcaucaucaccuacgagaacuccaccugggugaaccacaccuacgucaacaucaacaacacgaacgugguggcggggaaggacaagaccagcgucacccuggccggcaacuccagccugugcuccaucagcggcugggccaucuacaccaaggacaacuccauccggaucgggagcaagggcgacguguucgugauccgcgagccguucaucuccugcagccaccucgagugccggacguucuuccugacccagggggcccugcucaacgacaagcacuccaacggcaccgucaaggaccgcagccccuaccgggcccugauguccugcccccugggggaggcgcccagcccguacaacagcaaguucgaguccguggccuggagcgccuccgccugccacgacggcaugggcuggcucaccaucgggaucagcggccccgacaacggguccguggcgguccugaaguacaacggcaucaucacggagaccaucaagagcuggaagaagcgcauccugcggacccaggaguccgagugcgugugcgugaacggcagcugcuucaccaucaugacggacgggcccuccaacggcgccgccagcuacaagaucuucaagaucgagaaggggaaggucaccaaguccaucgagcucaacgcccccaacuuccacuacgaggagugcagcugcuacccggacaccggcaccgugaugugcgugugccgcgacaacuggcacggguccaaccggcccugggucagcuucaaccagaaccuggacuaccaggugggcuacaucugcuccggcguguucggggacaacccccgccccaaggacggcaaggggagcugcaacccgaugacggucgacggcgccgacggggugaagggcuucuccuacaaguacggcaacgggguguggaucggccggaccaagagcaacaagcugcgcaagggguucgagaugaucugggaccccaacggcuggaccgacaccgacuccgacuucagcgucaagcaggacgugguggcgaucacggacuggagcggguacuccggcagcuucguccagcaccccgagcucaccggccuggacugcauccggcccugcuucuggguggagcugguccgcgggcucccgcgggagaacaccaccaucuggacguccggcagcuccaucagcuucugcgggguggacuccgacaccgccaacuggagcuggcccgacggcgccgagcugcccuucaccaucgacaaguga

SEQ ID NO: 80320 - RNA, 1410 nt, Artificial Sequence; identical to SEQ ID NO: 79908
  derived and/or modified CDS sequence (opt1) from neuraminidase__InfluenzaA__ABW91441

SEQ ID NO: 80321 - RNA, 1413 nt, Artificial Sequence; identical to SEQ ID NO: 80095
  derived and/or modified CDS sequence (opt1) from neuraminidase__InfluenzaA__ABW91452

SEQ ID NO: 80322 - RNA, 1413 nt, Artificial Sequence; identical to SEQ ID NO: 80095
  derived and/or modified CDS sequence (opt1) from neuraminidase__InfluenzaA__ABW91463

SEQ ID NO: 80323 - RNA, 1413 nt, Artificial Sequence; identical to SEQ ID NO: 80054
  derived and/or modified CDS sequence (opt1) from neuraminidase__InfluenzaA__ABW91474

SEQ ID NO: 80324 - RNA, 1413 nt, Artificial Sequence; identical to SEQ ID NO: 80095
  derived and/or modified CDS sequence (opt1) from neuraminidase__InfluenzaA__ABW91485

SEQ ID NO: 80325 - RNA, 1413 nt, Artificial Sequence; identical to SEQ ID NO: 80054
  derived and/or modified CDS sequence (opt1) from neuraminidase__InfluenzaA__ABW91496

SEQ ID NO: 80326 - RNA, 1413 nt, Artificial Sequence; identical to SEQ ID NO: 80080
  derived and/or modified CDS sequence (opt1) from neuraminidase__InfluenzaA__ABW91507

SEQ ID NO: 80327 - RNA, 1413 nt, Artificial Sequence; identical to SEQ ID NO: 80095
  derived and/or modified CDS sequence (opt1) from neuraminidase__InfluenzaA__ABW91518

SEQ ID NO: 80328 - RNA, 1413 nt, Artificial Sequence
  derived and/or modified CDS sequence (opt1) from neuraminidase__InfluenzaA__ABW91529
augaaccccaaccagaagaucaucaccaucggcagcaucuccaucgccaucgggaccaucagccugaugcuccagaucggcaacaucaucuccaucugggccagccacuccauccagacggggagccagaaccacaccggcaucugcaaccagcgcaucaucaccuacgagaacuccaccugggugaaccacacguacgucagcaucaacaacaccaacgugguggcggggaaggacaagaccuccgucacccuggccggcaacagcucccugugcagcaucuccggcugggccaucuacacgaaggacaacagcauccggaucggguccaagggcgacguguucgugauccgcgagccguucaucagcugcucccaccucgagugccggaccuucuuccugacccagggggcccugcucaacgacaagcacagcaacggcaccaucaaggaccgcucccccuaccgggcccugaugagcugcccccugggggaggcgcccagcccguacaacuccaaguucgagagcgucgccugguccgccagcgccugccacgacggcaugggcuggcucacgaucgggaucuccggccccgacaacggggcgguggccgugcugaaguacaacggcaucaucaccgagaccaucaagagcuggaagaagcgcauccugcggacccaggaguccgagugcgucugcgugaacggcagcugcuucacgaucaugaccgacgggcccuccaacggcgccgccagcuacaagaucuucaagaucgagaaggggaaggugaccaaguccaucgagcucaacgcccccaacuuccacuacgaggagugcagcugcuacccggacaccggcacggucaugugcgugugccgcgacaacuggcacggguccaaccggcccugggugagcuucaaccagaaccuggacuaccagaucggcuacaucugcuccggcgucuucggggacaacccccgccccaaggacggcaaggggagcugcaacccggugaccguggacggcgcggacggggucaagggcuucuccuacaaguacggcaacgggguguggaucggccggaccaagagcaaccgccugcggaagggguucgagaugaucugggaccccaacggcuggaccgacacggacuccgacuucagcgugaagcaggacgucguggccaucaccgacuggagcggguacuccggcagcuucgugcagcaccccgagcucaccggccuggacugcauccgccccugcuucugggucgagcuggugcgggggcucccgcgcgagaacaccacgaucuggaccuccggcagcuccaucagcuucugcggggucgacuccgacaccgccaacuggagcuggcccgacggcgccgagcugcccuucaccaucgacaaguga

SEQ ID NO: 80329 - RNA, 1413 nt, Artificial Sequence
  derived and/or modified CDS sequence (opt1) from neuraminidase__InfluenzaA__ABW91540
augaaccccaaccagaagaucaucaccaucggcagcaucuccaucgccaucgggaucaucagccugaugcuccagaucggcaacaucaucuccaucugggccagccacuccauccagaccgggagccagaaccacacgggcaucugcaaccagcgcaucaucaccuacgagaacuccaccuggaugaaccacaccuacgugagcaucaacaacacgaacgucguggcggggaaggacaagaccuccgugacccuggccggcaacagcucccugugcagcaucuccggcugggccaucuacaccaaggacaacagcauccggaucggguccaagggcgacgucuucgugauccgcgagccguucaucagcugcucccaccucgagugccggacguucuuccugacccagggggcccugcucaacgacaagcacagcaacggcaccgugaaggaccgcucccccuaccgggcccugaugagcugcccccugggggaggcgcccagcccguacaacuccaaguucgagagcgucgccugguccgccagcgccugccacgacggcaugggcuggcucaccaucgggaucuccggccccgacaacggggcgguggccgugcugaaguacaacggcaucaucacggagaccaucaagagcuggaagaagcgcauccugcggacccaggaguccgagugcgucugcgugaacggcagcugcuucaccaucaugacggacgggcccuccaacggcgccgccagcuacaagaucuucaagaucgagaaggggaaggugaccaaguccgucgagcucaacgcccccaacuuccacuacgaggagugcagcugcuacccggacaccggcaccgugaugugcgugugccgcgacaacuggcacggguccaaccggcccugggucagcuucaaccagaaccuggacuaccagaucggcuacaucugcuccggcguguucggggacaacccccgccccaaggacggcaaggggagcugcaacccggugacggucgacggcgcggacggggugaagggcuucuccuacaaguacggcaacgggguguggaucggccggaccaagagcaaccgccugcggaagggguucgagaugaucugggaccccaacggcuggaccgacaccgacuccgacuucagcgucaagcaggacgugguggccaucacggacuggagcggguacuccggcagcuucguccagcaccccgagcucaccggccuggacugcauccgccccugcuucuggguggagcugguccgggggcucccgcgcgagaacaccaccaucuggacguccggcagcuccaucagcuucugcgggguggacuccgacaccgccaacuggagcuggcccgacggcgccgagcugcccuucaccaucgacaaguga

SEQ ID NO: 80330 - RNA, 1410 nt, Artificial Sequence
  derived and/or modified CDS sequence (opt1) from neuraminidase__InfluenzaA__ABW91551
augaaccccaaccagaagaucaucaccaucggcagcgugucccugaccaucagcacgaucugcuucuucaugcagaucgccauccucaucaccaccgucacccugcacuucaagcaguacgaguucaacuucccgcccaacaaccaggugaugcugugcgagcccacgaucaucgagcgcaacaucaccgagaucguguaccucaccaacaccacgaucgagaaggagaucugccccaagcuggccgaguaccggaacugguccaagccgcagugcgacaucaccggguucgcgcccuucagcaaggacaacuccauccgccugagcgccggcggggacaucugggucacccgggagcccuacguguccugcgaccccgacaagugcuaccaguucgcccucggccaggggaccacgcugaacaacgugcacagcaacgacaccguccgcgaccggaccccguaccgcacccugcucaugaacgagcugggcgugcccuuccaccugggcacgaagcaggucugcaucgccugguccagcuccagcugccacgacgggaaggccuggcuccacgugugcaucaccggcgacgacaagaacgcgaccgccuccuucaucuacaacgggcggcugguggacagcaucguguccuggagcaaggagauccugcgcacccaggaguccgagugcgucugcaucaacggcacgugcaccguggugaugaccgacgggagcgccuccggcaaggccgacaccaagauccucuucaucgaggagggcaagaucguccacacgagcacccugagcggguccgcgcagcacguggaggagugcagcugcuacccccgguaccccggcgugcgcugcgucugccgggacaacuggaagggguccaaccgcccgaucguggacaucaacaucaaggaccacagcaucguguccagcuacgucugcuccggccuggugggcgacacgccccggaagaacgacagcuccagcuccagccacugccucgaccccaacaacgaggagggcgggcacggggugaagggcugggccuucgacgacgggaacgacgucuggaugggccgcaccaucuccgagaagucccggcugggcuacgagaccuucaaggugaucgagggguggagcaaccccaagagcaagcugcagaucaaccgccaggucaucguggaccggggcaaccgcuccggguacagcggcaucuucuccguggagggcaagagcugcaucaaccggugcuucuacgucgagcucauccgcgggcggaaggaggagaccgaggugcuguggaccagcaacuccaucguggucuucugcggcaccagcgggacguacggcaccggguccuggccggacggcgccgacaucaaccugaugcccaucuga

SEQ ID NO: 80331 - RNA, 1413 nt, Artificial Sequence; identical to SEQ ID NO: 80054
  derived and/or modified CDS sequence (opt1) from neuraminidase__InfluenzaA__ABW91562

SEQ ID NO: 80332 - RNA, 1413 nt, Artificial Sequence; identical to SEQ ID NO: 80089
  derived and/or modified CDS sequence (opt1) from neuraminidase__InfluenzaA__ABW91584

SEQ ID NO: 80333 - RNA, 1413 nt, Artificial Sequence; identical to SEQ ID NO: 80054
  derived and/or modified CDS sequence (opt1) from neuraminidase__InfluenzaA__ABW91595

SEQ ID NO: 80334 - RNA, 1413 nt, Artificial Sequence; identical to SEQ ID NO: 80095
  derived and/or modified CDS sequence (opt1) from neuraminidase__InfluenzaA__ABW91606

SEQ ID NO: 80335 - RNA, 1413 nt, Artificial Sequence; identical to SEQ ID NO: 80089
  derived and/or modified CDS sequence (opt1) from neuraminidase__InfluenzaA__ABW91617

SEQ ID NO: 80336 - RNA, 1413 nt, Artificial Sequence; identical to SEQ ID NO: 80054
  derived and/or modified CDS sequence (opt1) from neuraminidase__InfluenzaA__ABW91628

SEQ ID NO: 80337 - RNA, 1413 nt, Artificial Sequence; identical to SEQ ID NO: 80054
  derived and/or modified CDS sequence (opt1) from neuraminidase__InfluenzaA__ABW91639

SEQ ID NO: 80338 - RNA, 1410 nt, Artificial Sequence; identical to SEQ ID NO: 79908
  derived and/or modified CDS sequence (opt1) from neuraminidase__InfluenzaA__ABW91650

SEQ ID NO: 80339 - RNA, 1350 nt, Artificial Sequence
  derived and/or modified CDS sequence (opt1) from neuraminidase__InfluenzaA__ABX10517
augaaccccaacaagaagaucaucaccaucggcagcaucugcauggugaccgggauggucucccugaugcuccagaucggcaaccugaucagcaucugggugucccacagcauccacacggggaaccagcacaaggccgagccgaucuccaacaccaacuuccugaccgagaaggccguggcgagcgucaagcucgccggcaacuccagccugugccccaucaacgggugggccgugcacuccaaggacaacagcauccgcaucggcuccaagggcgacguguucgucauccgggagcccuucaucagcugcucccaccuggagugccgcaccuucuuccucacgcagggggcccugcugaacgacaagcacagcaacggcaccgugaaggaccggagcccccaccgcacccucauguccugcccggugggggaggcccccucccccuacaacagccgguucgaguccgucgcguggagcgccagcgccugccacgacggcaccuccuggcugacgaucgggaucagcggccccgacaacggcgccguggcggugcugaaguacaacgggaucaucaccgacaccaucaaguccuggcgcaacaacauccuccggacccaggagagcgagugcgccugcgucaacggcuccugcuucacggugaugaccgacgggccgagcaacggccaggccucccacaagaucuucaagauggagaagggcaagguggucaagagcguggagcuggacgcccccaacuaccacuacgaggagugcuccugcuaccccgacgccggggagaucacgugcgugugccgcgacaacuggcacggcagcaaccggcccugggucuccuucaaccagaaccuggaguaccagaucggguacaucugcagcggcguguucggggacaacccgcgccccaacgacggcaccggcuccugcgggcccgugagcuccaacggcgcguacggggucaagggcuucagcuucaaguacgggaacggcguguggaucggccggaccaaguccaccaacagccgcuccggguucgagaugaucugggaccccaacggcuggaccgagaccgacagcagcuucuccgugaagcaggacaucgucgccaucacggacuggagcggguacuccggcagcuucgugcagcacccggagcucaccgggcuggacugcauccggcccugcuucugggucgagcugauccgcggccggcccaaggaguccaccaucugggccagcggcuccagcaucuccuucugcggggugaacagcgacaccgugggcugguccuggcccgacggggccgagcucccguucacgaucgacaaguga

SEQ ID NO: 80340 - RNA, 1410 nt, Artificial Sequence; identical to SEQ ID NO: 79953
  derived and/or modified CDS sequence (opt1) from neuraminidase__InfluenzaA__ABX10527

SEQ ID NO: 80341 - RNA, 1413 nt, Artificial Sequence
  derived and/or modified CDS sequence (opt1) from neuraminidase__InfluenzaA__ABX58242
augaaccccaaccagaagaucaucaccaucggcagcaucuccaucgccaucgggaucaucagccugaugcuccagaucggcaacaucaucuccaucuggaccagccacuccauccagacggggagccagaaccacaccggcaucugcaaccagcgcaucaucaccuacgagaacuccaccugggugaaccacacguacgucagcaucaacaacaccaacgugguggccgggaaggacaagaccuccgucacccuggcgggcaacagcucccugugcagcaucuccggcugggccaucuacacgaaggacaacagcauccggaucggguccaagggcgacguguucgugauccgcgagccguucaucagcugcucccaccucgagugccggaccuucuuccugacccagggggcccugcucaacgacaagcacagcaacggcaccgucaaggaccgcucccccuaccgggcccugaugagcugcccccugggggaggcccccagcccguacaacuccaaguucgagagcguggcgugguccgccagcgccugccacgacggcaugggcuggcucacgaucgggaucuccggccccgacaacggggccguggcgguccugaaguacaacggcaucaucaccgagaccaucaagagcuggaagaagcgcauccugcggacccaggaguccgagugcgugugcgugaacggcagcugcuucacgaucaugaccgacgggcccuccaacggcgccgccagcuacaagaucuucaagaucgagaaggggaaggucaccaaguccaucgagcucaacgcccccaacuuccacuacgaggagugcagcugcuacccggacaccggcacggugaugugcgugugccgcgacaacuggcacggguccaaccggcccugggucagcuucaaccagaaccuggacuaccagaucggcuacaucugcuccggcguguucggggacaacccccgccccaaggacggcaaggggagcugcaacccggugaccgucgacggcgccgacggggugaagggcuucuccuacaaguacggcaacgggguguggaucggccggaccaagagcaaccgccugcggaagggguucgagaugaucugggaccccaacggcuggaccgacacggacuccgacuucagcgucaagcaggacgugguggcgaucaccgacuggagcggguacuccggcagcuucguccagcaccccgagcucaccggccuggacugcauccgccccugcuucuggguggagcugguccgggggcucccgcgcgagaacaccacgaucuggaccuccggcagcuccaucagcuucugcgggguggacuccgacaccgccaacuggagcuggcccgacggcgccgagcugcccuucaccaucgacaaguga

SEQ ID NO: 80342 - RNA, 1413 nt, Artificial Sequence; identical to SEQ ID NO: 80153
  derived and/or modified CDS sequence (opt1) from neuraminidase__InfluenzaA__ABX58253

SEQ ID NO: 80343 - RNA, 1413 nt, Artificial Sequence; identical to SEQ ID NO: 80054
  derived and/or modified CDS sequence (opt1) from neuraminidase__InfluenzaA__ABX58264

SEQ ID NO: 80344 - RNA, 1413 nt, Artificial Sequence; identical to SEQ ID NO: 80054
  derived and/or modified CDS sequence (opt1) from neuraminidase__InfluenzaA__ABX58275

SEQ ID NO: 80345 - RNA, 1413 nt, Artificial Sequence; identical to SEQ ID NO: 80054
  derived and/or modified CDS sequence (opt1) from neuraminidase__InfluenzaA__ABX58286

SEQ ID NO: 80346 - RNA, 1413 nt, Artificial Sequence
  derived and/or modified CDS sequence (opt1) from neuraminidase__InfluenzaA__ABX58297
augaaccccaaccagaagaucaucaccaucggcagcaucuccaucgccaucgggaucaucagccugaugcuccagaucggcaacaucaucuccaucugggccagccacuccauccagaccgggagccagaaccacacgggcaucugcaaccagaagaucaucaccuacgagaacuccaccugggugaaccacaccuacgucagcaucaacaacacgaacgugguggcggggaaggacaagaccuccgucacccuggccggcaacagcucccugugcagcaucuccggcugggccaucuacaccaaggacaacagcauccgcaucggguccaagggcgacguguucgugauccgggagccguucaucagcugcucccaccucgagugccgcacguucuuccugacccagggggcccugcucaacgacaagcacagcaacggcaccgucaaggaccggucccccuaccgcgcccugaugagcugcccccugggggaggcgcccagcccguacaacuccaaguucgagagcguggccugguccgccagcgccugccacgacggcaugggcuggcucaccaucgggaucuccggccccgacaacggggcgguggccguccugaaguacaacggcaucaucacggagaccaucaagagcuggaagaagcggauccugcgcacccaggaguccgagugcgugugcgugaacggcagcugcuucaccaucaugacggacgggcccuccaacggcgccgccagcuacaagaucuucaagaucgagaaggggaaggucaccaaguccaucgagcucaacgcccccaacuuccacuacgaggagugcagcugcuacccggacaccggcaccgugaugugcgugugccgggacaacuggcacggguccaaccgccccugggucagcuucaaccagaaccuggacuaccagaucggcuacaucugcuccggcguguucggggacaacccccggcccaaggacggcaaggggagcugcaacccggugacggucgacggcgcggacggggugaagggcuucuccuacaaguacggcaacgggguguggaucggccgcaccaagagcaaccggcugcgcaagggguucgagaugaucugggaccccaacggcuggaccgacaccgacuccgacuucagcgucaagcaggacgugguggccaucacggacuggagcggguacuccggcagcuucguccagcaccccgagcucaccggccuggacugcauccggcccugcuucuggguggagcugguccgcgggcucccgcgggagaacaccaccaucuggacguccggcagcuccaucagcuucugcgggguggacuccgacaccgccaacuggagcuggcccgacggcgccgagcugcccuucaccaucgacaaguga

SEQ ID NO: 80347 - RNA, 1413 nt, Artificial Sequence; identical to SEQ ID NO: 80225
  derived and/or modified CDS sequence (opt1) from neuraminidase__InfluenzaA__ABX58308

SEQ ID NO: 80348 - RNA, 1413 nt, Artificial Sequence
  derived and/or modified CDS sequence (opt1) from neuraminidase__InfluenzaA__ABX58319
augaaccccaaccagaagaucaucaccaucggcagcaucuccaucgccaucgggaucaucagccugaugcuccagaucggcaacaucaucuccaucugggccagccacuccauccagaccgggagccagaaccacacgggcaucugcaaccagcgcaucaucaccuacgagaacuccaccugggugaaccacaccuacgucagcaucaacaacacgaacgugguggcggggaaggacaagaccuccgucacccuggccggcaacagcucccugugcagcaucuccggcugggccaucuacaccaaggacaacagcauccggaucggguccaagggcgacguguucgugauccgcgagccguucaucagcugcucccaccucgagugccggacguucuuccugacccagggggcccugcucaacgacaagcacagcaacggcaccaucaaggaccgcucccccuaccgggcccugaugagcugcccccugggggaggcgcccagcccguacaacuccaaguucgagagcgucgccugguccgccagcgccugccacgacggcaugggcuggcucaccaucgggaucuccggccccgacaacggggcgguggccgugcugaaguacaacggcaucaucacggagaccaucaagagcuggaagaagcgcauccugcggacccaggaguccgagugcgucugcgugaacggcagcugcuucaccaucaugacggacgggcccuccaacggcgccgccagcuacaagaucuucaagaucgagaaggggaaggugaccaaguccaucgagcucaacgcccccaacuuccacuacgaggagugcagcugcuacccggacaccggcaccgucaugugcgugugccgcgacaacuggcacggguccaaccggcccugggugagcuucaaccagaaccuggacuaccagaucggcuacaucugcuccggcgucuucggggacaacccccgccccaaggacggcaaggggagcugcaacccggugacgguggacggcgcggacggggucaagggcuucuccuacaaguacggcaacgggguguggaucggccggaccaagagcaaccgccugcggaagggguucgagaugaucugggaccccaacggcuggaccgacaccgacuccgacuucagcgugaagcaggacgucguggccaucacggacuggagcggguacuccggcagcuucgugcagcaccccgagcucaccggccuggacugcauccgccccugcuucugggucgagcuggugcgggggcucccgcgcgagaacaccaccaucuggacguccggcagcuccaucagcuucugcggggucgacuccgacaccgccaacuggagcuggcccgacggcgccgagcugcccuucaccaucgacaaguga

SEQ ID NO: 80349 - RNA, 1413 nt, Artificial Sequence; identical to SEQ ID NO: 80225
  derived and/or modified CDS sequence (opt1) from neuraminidase__InfluenzaA__ABX58352

SEQ ID NO: 80350 - RNA, 1413 nt, Artificial Sequence; identical to SEQ ID NO: 80054
  derived and/or modified CDS sequence (opt1) from neuraminidase__InfluenzaA__ABX58363

SEQ ID NO: 80351 - RNA, 1413 nt, Artificial Sequence; identical to SEQ ID NO: 80054
  derived and/or modified CDS sequence (opt1) from neuraminidase__InfluenzaA__ABX58385

SEQ ID NO: 80352 - RNA, 1413 nt, Artificial Sequence; identical to SEQ ID NO: 80054
  derived and/or modified CDS sequence (opt1) from neuraminidase__InfluenzaA__ABX58396

SEQ ID NO: 80353 - RNA, 1413 nt, Artificial Sequence
  derived and/or modified CDS sequence (opt1) from neuraminidase__InfluenzaA__ABX58407
augaaccccaaccagaagaucaucaccaucggcagcaucuccaucgccaucgggaucaucagccugaugcuccagaucggcaacaucaucuccaucugggccagccacuccauccagaccgggagccagaaccacacgggcaucugcaaccagcgcaucaucaccuacgagaacuccaccugggugaaccacaccuacgucagcaucaacaacacgaacgugguggcggggaaggacaagaccuccgucacccuggccggcaacagcucccugugcccgaucagcggcugggccaucuacaccaaggacaacuccauccggaucgggagcaagggcgacguguucgugauccgcgagcccuucaucuccugcagccaccucgagugccggacguucuuccugacccagggggcccugcucaacgacaagcacuccaacggcaccgucaaggaccgcagccccuaccgggcccugauguccugcccccugggggaggcgccgagccccuacaacagcaaguucgaguccguggccuggagcgccuccgccugccacgacggcaugggcuggcucaccaucgggaucagcggccccgacaacggggcgguggccguccugaaguacaacggcaucaucacggagaccaucaaguccuggaagaagcgcauccugcggacccaggagagcgagugcgugugcgugaacggcuccugcuucaccaucaugacggacgggcccagcaacggcgccgccuccuacaagaucuucaagaucgagaaggggaaggucaccaagagcaucgagcucaacgccccgaacuuccacuacgaggagugcuccugcuaccccgacaccggcaccgugaugugcgugugccgcgacaacuggcacgggagcaaccggcccugggucuccuucaaccagaaccuggacuaccagaucggcuacaucugcagcggcguguucggggacaacccccgcccgaaggacggcaagggguccugcaaccccgugacggucgacggcgcggacggggugaagggcuucagcuacaaguacggcaacgggguguggaucggccggaccaaguccaaccgccugcggaagggguucgagaugaucugggaccccaacggcuggaccgacaccgacagcgacuucuccgucaagcaggacgugguggccaucacggacuggagcggguacagcggcuccuucguccagcaccccgagcucaccggccuggacugcauccgcccgugcuucuggguggagcugguccgggggcucccccgcgagaacaccaccaucuggacgagcggcuccagcaucuccuucugcgggguggacagcgacaccgccaacugguccuggcccgacggcgccgagcugcccuucaccaucgacaaguga

SEQ ID NO: 80354 - RNA, 1413 nt, Artificial Sequence; identical to SEQ ID NO: 80095
  derived and/or modified CDS sequence (opt1) from neuraminidase__InfluenzaA__ABX58418

SEQ ID NO: 80355 - RNA, 1413 nt, Artificial Sequence; identical to SEQ ID NO: 80054
  derived and/or modified CDS sequence (opt1) from neuraminidase__InfluenzaA__ABX58429

SEQ ID NO: 80356 - RNA, 1413 nt, Artificial Sequence; identical to SEQ ID NO: 80054
  derived and/or modified CDS sequence (opt1) from neuraminidase__InfluenzaA__ABX58440

SEQ ID NO: 80357 - RNA, 1413 nt, Artificial Sequence
  derived and/or modified CDS sequence (opt1) from neuraminidase__InfluenzaA__ABX58451
augaaccccaaccagaagaucaucaccaucggcagcaucuccaucgccaucgggaccaucagccugaugcuccagaucggcaacaucaucuccaucugggccagccacuccauccagacggggagccagaaccacaccggcaucugcaaccagcgcaucaucaccuacgagaacuccaccugggugaaccacacguacgucagcaucaacaacaccaacgugguggcggggaaggacaagaccuccgucacccuggccggcaacagcucccugugcagcaucuccggcugggccaucuacacgaaggacaacagcauccggaucggguccaagggcgacguguucgugauccgcgagccguucaucagcugcucccaccucgagugccggaccuucuuccugacccagggggcccugcucaacgacaagcacagcaacggcaccgucaaggaccgcucccccuaccgggcccugaugagcugcccccugggggaggcgcccagcccguacaacuccaaguucgagagcguggccugguccgccagcgccugccacgacggcaugggcuggcucacgaucgggaucuccggccccgacaacggggcgguggccguccugaaguacaacggcaucaucaccgagaccaucaagagcuggaagaagcgcauccugcggacccaggaguccgagugcgugugcgugaacggcagcugcuucacgaucaugaccgacgggcccuccaacggcgccgccagcuacaagaucuucaagaucgagaaggggaaggucaccaaguccaucgagcucaacgcccccaacuuccacuacgaggagugcagcugcuacccggacaccggcacggugaugugcgugugccgcgacaacuggcacggguccaaccggcccugggucagcuucaaccagaaccuggacuaccagaucggcuacaucugcuccggcguguucggggacaacccccgccccaaggacggcaaggggagcugcaacccggugaccgucgacggcgcggacggggugaagggcuucuccuacaaguacggcaacgggguguggaucggccggaccaagagcaaccgccugcggaagggguucgagaugaucugggaccccaacggcuggaccgacacggacuccgacuucagcgucaagcaggacgugguggccaucaccgacuggagcggguacuccggcagcuucguccagcaccccgagcucaccggccuggacugcauccgccccugcuucuggguggagcugguccgggggcucccgcgcgagaacaccacgaucuggaccuccggcagcuccaucagcuucugcgggguggacuccgacaccgccaacuggagcuggcccgacggcgccgagcugcccuucaccaucgacaaguga

SEQ ID NO: 80358 - RNA, 1413 nt, Artificial Sequence; identical to SEQ ID NO: 80095
  derived and/or modified CDS sequence (opt1) from neuraminidase__InfluenzaA__ABX58462

SEQ ID NO: 80359 - RNA, 1413 nt, Artificial Sequence; identical to SEQ ID NO: 80054
  derived and/or modified CDS sequence (opt1) from neuraminidase__InfluenzaA__ABX58473

SEQ ID NO: 80360 - RNA, 1413 nt, Artificial Sequence; identical to SEQ ID NO: 80095
  derived and/or modified CDS sequence (opt1) from neuraminidase__InfluenzaA__ABX58484

SEQ ID NO: 80361 - RNA, 1413 nt, Artificial Sequence
  derived and/or modified CDS sequence (opt1) from neuraminidase__InfluenzaA__ABX58495
augaaccccaaccagaagaucaucaccaucggcagcaucuccaucgccaucgggaucaucagccugaugcuccagaucggcaacaucaucuccaucugggccagccacuccauccagaccgggagccagaaccacacgggcaucugcaaccagcgcaucaucaccuacgagaacuccaccugggugaaccacaccuacgucagcaucaacaacacgaacgugguggcggggaaggacaagaccuccgucacccuggccggcaacagcucccugugcagcaucuccggcugggccaucuacaccaaggacaacagcauccggaucggguccaagggcgacguguucgugauccgcgagccguucaucagcugcucccaccucgagugccggacguucuuccugacccagggggcccugcucaacgacaagcacagcaaccgcaccgucaaggaccggucccccuaccgcgcccugaugagcugcccccugggcgaggcgcccagcccguacaacuccaaguucgagagcguggccugguccgccagcgccugccacgacgggaugggcuggcucaccaucggcaucuccgggcccgacaacggcgcgguggccguccugaaguacaacgggaucaucacggagaccaucaagagcuggaagaagcggauccugcgcacccaggaguccgagugcgugugcgugaacggcagcugcuucaccaucaugacggacggccccuccaacggggccgccagcuacaagaucuucaagaucgagaagggcaaggucaccaaguccaucgagcucaacgcccccaacuuccacuacgaggagugcagcugcuacccggacaccgggaccgugaugugcgugugccgggacaacuggcacggcuccaaccgccccugggucagcuucaaccagaaccuggacuaccagaucggguacaucugcuccggcguguucggcgacaacccccggcccaaggacgggaagggcagcugcaacccggugacggucgacggggcggacggcgugaagggguucuccuacaaguacggcaacggcguguggaucgggcgcaccaagagcaaccggcugcgcaagggcuucgagaugaucugggaccccaacggguggaccgacaccgacuccgacuucagcgucaagcaggacgugguggccaucacggacuggagcggcuacuccgggagcuucguccagcaccccgagcucaccggccuggacugcauccggcccugcuucuggguggagcugguccgcggccucccgcgggagaacaccaccaucuggacguccgggagcuccaucagcuucugcggcguggacuccgacaccgccaacuggagcuggcccgacggggccgagcugcccuucaccaucgacaaguga

SEQ ID NO: 80362 - RNA, 1413 nt, Artificial Sequence; identical to SEQ ID NO: 80089
  derived and/or modified CDS sequence (opt1) from neuraminidase__InfluenzaA__ABX58506

SEQ ID NO: 80363 - RNA, 1413 nt, Artificial Sequence; identical to SEQ ID NO: 80095
  derived and/or modified CDS sequence (opt1) from neuraminidase__InfluenzaA__ABX58528

SEQ ID NO: 80364 - RNA, 1413 nt, Artificial Sequence; identical to SEQ ID NO: 80095
  derived and/or modified CDS sequence (opt1) from neuraminidase__InfluenzaA__ABX58539

SEQ ID NO: 80365 - RNA, 1413 nt, Artificial Sequence
  derived and/or modified CDS sequence (opt1) from neuraminidase__InfluenzaA__ABX58550
augaaccccaaccagaagaucaucaccaucggcagcaucuccaucgccaucgggaucaucagccugaugcuccagaucggcaacaucaucuccaucugggccagccacuccauccagaccgggagccagaaccacacgggcaucugcaaccagcgcaucaucaccuacgagaacuccaccugggugaaccacaccuacgucagcaucaacaacacgaacgugguggcggggaaggacaagaccuccgucacccuggccggcaacagcucccugugcagcaucuccggcugggccaucuacaccaaggacaacagcauccggaucggguccaagggcgacguguucgugauccgcgagccguucaucagcugcucccaccucgagugccggacguucuuccugacccagggggcccugcucaacgacaagcacagcaacggcaccgucaaggaccgcucccccuaccgggcccugaugagcugcccccugggggaggcgcccagcccguacaacuccaaguucgagagcguggccugguccgccagcgccugccacgacggcaugggcuggcucaccaucgggaucuccggccccgacaacggggcgguggccguccugaaguacaacggcaucaucacggagaccaucaagagcuggaagaagcgcauccugcggacccaggaguccgagugcgugugcgugaacggcagcugcuucaccaucaugacggacgggcccuccaacggcgccgccagcuacaagaucuucaagaucgagaaggggaaggucaccaaguccaucgagcucaacgcccccaacuuccacuacgaggagugcagcugcuacccggacaccggcaccgugaugugcgugugccgcgacaacuggcacggguccaaccggcccugggucagcuucaaccagaaccuggacuaccagaucggcuacaucugcuccggcguguucggggacaacccccgccccaaggacggcaaggggagcugcaacccggugacggucgacggcgcggacggggugaagggcuucuccuacaaguacggcaacgggguguggaucggccggaccaagagcaaccgccugcggaagggguucgagaugaucugggaccccaacggcuggaccgacaccgacuccgacuucagcgucaagcaggacgugguggccaucacggacuggagcggguacuccggcagcuucguccagcaccccgagcucaccggccuggacugcauccgccccugcuucuggguggagcugguccgggggcucccgcgcgagaacaccaccaucuggacguccggcagcuccaucagcuucugcgggguggacuccgacaccgccaacuggagcuggcccgacggcgccgagcugcccuucaccguggacaaguga

SEQ ID NO: 80366 - RNA, 1413 nt, Artificial Sequence; identical to SEQ ID NO: 80054
  derived and/or modified CDS sequence (opt1) from neuraminidase__InfluenzaA__ABX58561

SEQ ID NO: 80367 - RNA, 1413 nt, Artificial Sequence
  derived and/or modified CDS sequence (opt1) from neuraminidase__InfluenzaA__ABX58572
augaaccccaaccagaagaucaucaccaucggcagcaucuccaucgccaucgggaucaucagccugaugcuccagaucggcaacaucaucuccaucugggccagccacuccauccagaccgggagccagaaccacacgggcaucugcaaccagcgcaucaucaccuacgagaacuccaccugggugaaccacaccuacgucagcaucaacaacacgaacgugguggcggggaaggacaagaccuccgucacccuggccggcaacagcucccugugcagcaucuccggcugggccaucuacaccaaggacaacagcauccggaucggguccaagggcgacguguucgugauccgcgagccguucaucagcugcucccaccucgagugccggacguucuuccugacccagggggcccugcucaacgacaagcacagcaacggcaccgucaaggaccgcucccccuaccgggcccugaugagcugcccccugggggaggcgcccagcccguacaacuccaaguucgagagcguggccugguccgccagcgccugccacgacggcaugggcuggcucaccaucgggaucuccggccccgacaacggggcgguggccguccugaaguacaacggcaucaucacggagaccaucaagagcuggaagaagcgcauccugcggacccaggaguccgagugcgugugcgugaacggcagcugcuucaccaucaugacggacgggcccuccaacggcgccgccagcuacaagaucuucaagaucgagaaggggaaggucaccaaguccaucgagcucaacgcccccaacuuccacuacgaggagugcagcugcuacccggacaccggcaccgugaugugcgugugccgcgacaacuggcacggguccaaccggcccugggucagcuucaaccagaaccuggacuaccagaucggcuacaucugcuccggcguguucggggacaacccccgccccaaggacggcaaggggagcugcaacccgaugacgguggacggcgcggacggggucaagggcuucuccuacaaguacggcaacgggguguggaucggccggaccaagagcaaccgccugcggaagggguucgagaugaucugggaccccaacggcuggaccgacaccgacuccgacuucagcgugaagcaggacgucguggccaucacggacuggagcggguacuccggcagcuucgugcagcaccccgagcucaccggccuggacugcauccgccccugcuucugggucgagcuggugcgggggcucccgcgcgagaacaccaccaucuggacguccggcagcuccaucagcuucugcggggucgacuccgacaccgccaacuggagcuggcccgacggcgccgagcugcccuucaccaucgacaaguga

SEQ ID NO: 80368 - RNA, 1413 nt, Artificial Sequence; identical to SEQ ID NO: 80054
  derived and/or modified CDS sequence (opt1) from neuraminidase__InfluenzaA__ABX58583

SEQ ID NO: 80369 - RNA, 1413 nt, Artificial Sequence; identical to SEQ ID NO: 80054
  derived and/or modified CDS sequence (opt1) from neuraminidase__InfluenzaA__ABX58594

SEQ ID NO: 80370 - RNA, 1413 nt, Artificial Sequence; identical to SEQ ID NO: 80080
  derived and/or modified CDS sequence (opt1) from neuraminidase__InfluenzaA__ABX58605

SEQ ID NO: 80371 - RNA, 1413 nt, Artificial Sequence; identical to SEQ ID NO: 80080
  derived and/or modified CDS sequence (opt1) from neuraminidase__InfluenzaA__ABX58616

SEQ ID NO: 80372 - RNA, 1413 nt, Artificial Sequence; identical to SEQ ID NO: 80054
  derived and/or modified CDS sequence (opt1) from neuraminidase__InfluenzaA__ABX58627

SEQ ID NO: 80373 - RNA, 1413 nt, Artificial Sequence; identical to SEQ ID NO: 80054
  derived and/or modified CDS sequence (opt1) from neuraminidase__InfluenzaA__ABX58638

SEQ ID NO: 80374 - RNA, 1413 nt, Artificial Sequence
  derived and/or modified CDS sequence (opt1) from neuraminidase__InfluenzaA__ABX58682
augaaccccaaccagaagaucaucaccaucggcagcaucuccaucgccaucgggaucaucagccugaugcuccagaucggcaacaucaucuccaucugggccagccacuccauccagaccgggagccagaaccacacgggcaucugcaaccagcgcaucaucaccuacgagaacuccaccugggugaaccacaccuacgucagcaucaacaacacgaacgugguggcggggaaggacaagaccuccgucacccuggccggcaacagcucccugugcagcaucuccggcugggccaucuacaccaaggacaacagcauccggaucggguccaagggcgacguguucgugauccgcgagccguucaucagcugcucccaccucgagugccggacguucuuccugacccagggggcccugcucaacgacaagcacagcaacggcaccgucaaggaccgcucccccuaccgggcccugaugagcugcccccugggggaggcgcccagcccguacaacuccaaguucgagagcguggccugguccgccagcgccugccacgacggcaugggcuggcucaccaucgggaucuccggccccgacaacggggcgguggccguccugaaguacaacggcaucaucacggagaccaucaagagcuggaagaagcgcauccugcggacccaggaguccgagugcgugugcgugaacggcagcugcuucaccaucaugacggacgggcccuccaacggcgccgccagcuacaagaucuucaagaucgagaaggggaaggucaccaaguccaucgagcucaacgcccccaacuuccacuacgaggagugcagcugcuacccggacaccggcaccaugaugugcgugugccgcgacaacuggcacggguccaaccggcccugggugagcuucaaccagaaccuggacuaccagaucggcuacaucugcuccggcgucuucggggacaacccccgccccaaggacggcaaggggagcugcaacccggugacgguggacggcgcggacggggucaagggcuucuccuacaaguacggcaacgggguguggaucggccggaccaagagcaaccgccugcggaagggguucgagaugaucugggaccccaacggcuggaccgacaccgacuccgacuucagcgugaagcaggacgucguggccaucacggacuggagcggguacuccggcagcuucgugcagcaccccgagcucaccggccuggacugcauccgccccugcuucugggucgagcuggugcgggggcucccgcgcgagaacaccaccaucuggacguccggcagcuccaucagcuucugcggggucgacuccgacaccgccaacuggagcuggcccgacggcgccgagcugcccuucaccaucgacaaguga

SEQ ID NO: 80375 - RNA, 1413 nt, Artificial Sequence
  derived and/or modified CDS sequence (opt1) from neuraminidase__InfluenzaA__ABX58693
augaaccccaaccagaagaucaucaccaucggcagcaucuccaucgccaucgggaucaucagccugaugcuccagaucggcaacaucaucuccaucugggccagccacuccauccagaccgggagccagaacaacacgggcaucugcaaccagcgcaucaucaccuacgagaacuccaccugggugaaccacaccuacgucaacaucaacaacacgaacgugguggcggggaaggacaagaccagcgucacccuggccggcaacuccagccugugcuccaucagcggcugggccaucuacaccaaggacaacuccauccggaucgggagcaagggcgacguguucgugauccgcgagccguucaucuccugcagccaccucgagugccggacguucuuccugacccagggggcccugcucaacgacaagcacuccaacggcaccgucaaggaccgcagccccuaccgggcccugauguccugcccccugggggaggcgcccagcccguacaacagcaaguucgaguccguggccuggagcgccuccgccugccacgacggcaugggcuggcucaccaucgggaucagcggccccgacaacggggcgguggccguccugaaguacaacggcaucaucacgggcaccaucaaguccuggaagaagcagauccugcgcacccaggagagcgagugcgugugcaugaacggguccugcuucaccaucaugacggacggccccagcaaccgggccgccuccuacaagaucuucaagaucgagaaggggaaggugaccaagagcaucgagcucaacgcccccaacuuccacuacgaggagugcuccugcuacccggacaccggcaucgucaugugcgugugccgcgacaacuggcacgggagcaaccggcccuggguguccuucaaccagaaccuggacuaccagaucggcuacaucugcagcggcguccugggggacaacccccgccccgaggacggcgagggguccugcaacccggugaccguggacggcgcggacggggucaagggcuucagcuacaaguacgacaacggcguguggaucgggcggacgaaguccaaccgccuccggaagggcuucgagaugaucugggaccccaacggguggaccaacaccgacagcgacuucuccgugaagcaggacgucguggccaucaccgacuggagcggcuacagcggguccuucgugcagcaccccgagcugacgggccuggacugcauccgccccugcuucugggucgagcucgugcggggccugccgcgcgagaacaccaccaucuggaccagcggguccagcaucuccuucugcggcgucaacagcgacacggccaacugguccuggcccgacggggccgagcugcccuucaccaucgacaaguga

SEQ ID NO: 80376 - RNA, 1413 nt, Artificial Sequence; identical to SEQ ID NO: 80225
  derived and/or modified CDS sequence (opt1) from neuraminidase__InfluenzaA__ABX58704

SEQ ID NO: 80377 - RNA, 1413 nt, Artificial Sequence; identical to SEQ ID NO: 80153
  derived and/or modified CDS sequence (opt1) from neuraminidase__InfluenzaA__ABX58715

SEQ ID NO: 80378 - RNA, 1350 nt, Artificial Sequence
  derived and/or modified CDS sequence (opt1) from neuraminidase__InfluenzaA__ABY19420
augaaccccaaccagaaggugaucaccaucggcagcaucugcauggucaucgggaucgugucccugaugcuccagaucggcaacaugaucagcaucugggugucccacagcauccagaccgggaaccagaaccaggucgagccgaucaucaacacgaacuuccugaccggcaaggccguggccuccaucacccuggcggggaacagcucccucugccccauccgcggcugggccauccacagcaaggacaacuccauccggaucggcagcaagggggacguguucgucauccgcgagcccuucaucuccugcagccaccuggagugccggaccuucuuccugacgcagggcgcccuccugaacgacaagcacuccaacgggaccgugaaggaccgcagcccccaccggacccugauguccugcccggugggcgaggcccccagccccuacaacucccgcuucgagagcgucgccugguccgcgagcgccugccacgacgggaccagcuggcucacgaucggcaucuccggccccgacaacggggccguggccgugcugaaguacaacggcaucaucaccgacaccaucaagagcuggcggaacaacauccugcgcacccaggaguccgagugcgcgugcgucaacgggagcugcuucacggugaugaccgacggcccguccaacggccaggccagcuacaagaucuucaagauggagaaggggaaggugaucaaguccgucgagcucgacgcccccaacuaccacuacgaggagugcagcugcuaccccgacgccggcgagaucacgugcgugugccgggacaacuggcacggguccaaccgccccugggugagcuucaaccagaaccuggaguaccagaucggcuacaucugcuccggggucuucggcgacaacccgcggcccaacgacggcaccgggagcugcggccccgugucccacaacggggccuacggcgugaagggguucagcuucaaguacggcaacggcgucuggaucgggcgcaccaagucccccaacagccgguccggcuucgagaugaucugggacccgaacggguggagcgagaccgacuccagcuucagcgugaagcaggacaucguggcgaucaccgacugguccggcuacagcggguccuucguccagcaccccgagcugaccggccucgacugcauccgccccugcuucuggguggagcugauccggggccgccccaaggagagcacggucuggaccuccgggagcuccaucagcuucugcggcgugaacuccgacaccgugagcugguccuggccggacggggccgagcugcccuucagcaucgacaaguga

SEQ ID NO: 80379 - RNA, 1350 nt, Artificial Sequence
  derived and/or modified CDS sequence (opt1) from neuraminidase__InfluenzaA__ABY19421
augaaccccaaccagaagaucaucaccaucggcagcaucugcauggugaucgggaucgucucccugaugcuccagaucggcaacaugaucagcaucugggugucccacagcauccagaccgggaaccagaaccagguggagccgaucaucaacacgaacuuccugaccggcaaggccgucgccuccaucacccuggcggggaacagcucccucugccccauccgcggcugggccauccacagcaaggacaacuccauccggaucggcagcaagggggacguguucgugauccgcgagcccuucaucuccugcagccaccuggagugccggaccuucuuccugacgcagggcgcccuccugaacgacaagcacuccaacgggaccgucaaggaccgcagcccccaccggacccugauguccugcccggugggcgaggcccccagccccuacaacucccgcuucgagagcguggccugguccgcgagcgccugccacgacgggaccagcuggcucacgaucggcaucuccggccccgacaacggggccgucgccgugcugaaguacaacggcaucaucaccgacaccaucaagagcuggcggaacaacauccugcgcacccaggaguccgagugcgcgugcgugaacgggagcugcuucacggucaugaccgacggcccguccaacggccaggccagcuacaagaucuucaagauggagaaggggaaggugaucaaguccguggagcucgacgcccccaacuaccacuacgaggagugcagcugcuaccccgacgccggcgagaucacgugcgucugccgggacaacuggcacggguccaaccgccccugggugagcuucaaccagaaccuggaguaccagaucggcuacaucugcuccgggguguucggcgacaacccgcggcccaacgacggcaccgggagcugcggccccgucucccacaacggggccuacggcgugaagggguucagcuucaaguacggcaacggcguguggaucgggcgcaccaagucccccaacagccgguccggcuucgagaugaucugggacccgaacggguggagcgagaccgacuccagcuucagcgucaagcaggacaucguggcgaucaccgacugguccggcuacagcggguccuucgugcagcaccccgagcugaccggccucgacugcauccgccccugcuucugggucgagcugauccggggccgccccaaggagagcacgguguggaccuccgggagcuccaucagcuucugcggcgucaacuccgacaccgugagcugguccuggccggacggggccgagcugcccuucagcaucgacaaguga

SEQ ID NO: 80380 - RNA, 1413 nt, Artificial Sequence
  derived and/or modified CDS sequence (opt1) from neuraminidase__InfluenzaA__ABY51020
augaaccccaaccagaagaucaucaccaucggcagcaucuccaucgccaucgggaucaucagccugaugcuccagaucggcaacaucaucuccaucugggccagccacuccauccagaccgggagccagaaccacacgggcaucugcaaccagcgcaucaucaccuacgagaacuccaccugggugaaccacaccuacgucagcaucaacaacacgaacgugguggcggggaaggacaagaccuccgucacccuggccggcaacagcucccugugcagcaucuccggcugggccaucuacaccaaggacaacagcauccggaucggguccaagggcgacguguucgugauccgcgagccguucaucagcugcucccaccucgagugccggacguucuuccugacccagggggcccugcucaacgacaagcacagcaacggcaccgucaaggaccgcucccccuaccgggcccugaugagcugcccccugggggaggcgcccagcccguacaacuccaaguucgagagcguggccugguccgccagcgccugccacgacggcaugggcuggcucaccaucgggaucuccggccccgacaacggggcgguggccguccugaaguacaacggcaucaucacggagaccaucaagagcuggaagaagcgcauccugcggacccaggaguccgagugcgugugcgugaacggcagcugcuucaccaucaugacggacgggcccuccaacggcgccgccagcuacaagaucuucaagaucgagaaggggaaggucaccaaguccaucgagcucaacgcccccaacuuccacuacgaggagugcagcugcuacccggacaccggcaccgugaugugcgugugccgcgacaacuggcacggguccaaccggcccugggucagcuucaaccagaaccuggacuaccagaucggcuacaucugcuccggcguguucggggacaacccccgccccaaggacggcaaggggagcugcaacccgcugacgguggacggcgcggacggggucaagggcuucuccuacaaguacggcaacgggguguggaucggccggaccaagagcaaccgccuccggaagggguucgagaugaucugggaccccaacggcuggaccgacaccgacuccgacuucagcgugaagcaggacgucguggccaucacggacuggagcggguacuccggcagcuucgugcagcaccccgagcugaccggccuggacugcauccgccccugcuucugggucgagcucgugcgggggcugccgcgcgagaacaccaccaucuggacguccggcagcuccaucagcuucugcggggucgacuccgacaccgccaacuggagcuggcccgacggcgccgagcugcccuucaccaucgacaaguga

SEQ ID NO: 80381 - RNA, 1410 nt, Artificial Sequence; identical to SEQ ID NO: 80090
  derived and/or modified CDS sequence (opt1) from neuraminidase__InfluenzaA__ABY51031

SEQ ID NO: 80382 - RNA, 1413 nt, Artificial Sequence
  derived and/or modified CDS sequence (opt1) from neuraminidase__InfluenzaA__ABY51042
augaaccccaaccagaagaucaucaccaucggcagcaucuccaucgccaucgggaucaucagccugaugcuccagaucggcaacaucaucuccaucugggccagccacuccauccagaccgggagccagaaccacacgggcaucugcaaccagcgcaucaucaccuacgagaacuccaccugggugaaccacaccuacgucaacaucaacaacacgaacgugguggcggggaaggacaagaccagcgucacccuggccggcaacuccagccugugcuccaucagcggcugggccaucuacaccaaggacaacuccauccggaucgggagcaagggcgacguguucgugauccgcgagccguucaucuccugcagccaccucgagugccggacguucuuccugacccagggggcccugcucaacgacaagcacuccaacggcaccgucaaggaccgcagccccuaccgggcccugauguccugcccccugggggaggcgcccagcccguacaacagcaaguucgaguccguggccuggagcgccuccgccugccacgacggcaugggcuggcucaccaucgggaucagcggccccgacaacggggcgguggccguccugaaguacaacggcaucaucacgggcaccaucaaguccuggaagaagcagauccugcgcacccaggagagcgagugcgugugcaugaacggguccugcuucaccaucaugacggacggccccagcaaccgggccgccuccuacaagaucuucaagaucgagaaggggaaggugaccaagagcaucgagcucaacgcccccaacuuccacuacgaggagugcuccugcuacccggacaccggcaucgucaugugcgugugccgcgacaacuggcacgggagcaaccggcccuggguguccuucaaccagaaccuggacuaccagaucggcuacaucugcagcggcgucuucggggacaacccccgccccaaggacggcgagggguccugcaacccggugaccguggacggcgcggacggggucaagggcuucagcuacaaguacgacaacggcguguggaucgggcggacgaaguccaaccgccugcggaagggcuucgagaugaucugggaccccaacggguggaccaacaccgacagcgacuucuccgugaagcaggacgucguggccaucaccgacuggagcggcuacagcggguccuucgugcagcaccccgagcucacgggccuggacugcauccgccccugcuucugggucgagcuggugcggggccucccgcgcgagaacaccaccaucuggaccagcggguccagcaucuccuucugcggcgucaacagcgacacggccaacugguccuggcccgacggggccgagcugcccuucaccaucgacaaguga

SEQ ID NO: 80383 - RNA, 1413 nt, Artificial Sequence
  derived and/or modified CDS sequence (opt1) from neuraminidase__InfluenzaA__ABY51053
augaaccccaaccagaagaucaucaccaucggcagcaucuccaucgccaucgggaucaucagccugaugcuccagaucggcaacaucaucuccaucugggccagccacuccauccagaccgggagccagaacaacacgggcaucugcaaccagcgcaucaucaccuacgagaacuccaccugggugaaccacaccuacgucaacaucaacaacacgaacgugguggcggggaaggacaagaccagcgucacccuggccggcaacuccagccugugcuccaucagcggcugggccaucuacaccaaggacaacuccauccggaucgggagcaagggcgacguguucgugauccgcgagccguucaucuccugcagccaccucgagugccggacguucuuccugacccagggggcccugcucaacgacaagcacuccaacggcaccgucaaggaccgcagccccuaccgggcccugauguccugcccccugggggaggcgcccagcccguacaacagcaaguucgaguccguggccuggagcgccuccgccugccacgacggcaugggcuggcucaccaucgggaucagcggccccgacaacggggcgguggccguccugaaguacaacggcaucaucacgggcaccaucaaguccuggaagaagcagauccugcgcacccaggagagcgagugcgugugcaugaacggguccugcuucaccaucaugacggacggccccagcaaccgggccgccuccuacaagaucuucaagaucgagaaggggaaggugaccaagagcaucgagcucaacgcccccaacuuccacuacgaggagugcuccugcuacccggacaccggcaucgucaugugcgugugccgcgacaacuggcacgggagcaaccggcccuggguguccuucaaccagaaccuggacuaccagaucggcuacaucugcagcggcgucuucggggacaacccccgccccgaggacggcgagggguccugcaacccggugaccguggacggcacggacggggucaagggcuucagcuacaaguacgacaacggcguguggaucgggcggaccaaguccaaccgccugcggaagggcuucgagaugaucugggaccccaacggguggaccaacaccgacagcgacuucuccgugaagcaggacgucguggcgaucacggacuggagcggcuacagcggguccuucgugcagcaccccgagcucaccggccuggacugcauccgccccugcuucugggucgagcuggugcggggccucccgcgcgagaacaccaccaucuggacgagcggguccagcaucuccuucugcggcgucaacagcgacaccgccaacugguccuggcccgacggggccgagcugcccuucaccaucgacaaguga

SEQ ID NO: 80384 - RNA, 1413 nt, Artificial Sequence; identical to SEQ ID NO: 80153
  derived and/or modified CDS sequence (opt1) from neuraminidase__InfluenzaA__ABY51064

SEQ ID NO: 80385 - RNA, 1413 nt, Artificial Sequence; identical to SEQ ID NO: 80054
  derived and/or modified CDS sequence (opt1) from neuraminidase__InfluenzaA__ABY51075

SEQ ID NO: 80386 - RNA, 1413 nt, Artificial Sequence
  derived and/or modified CDS sequence (opt1) from neuraminidase__InfluenzaA__ABY51086
augaaccccaaccagaagaucaucaccaucggcagcaucuccaucgccaucgggaucaucagcaucaugcugcagaucggcaacaucaucuccaucugggccagccacuccauccagaccgggagccagaaccacacgggcaucugcaaccagcgcaucaucaccuacgagaacuccaccugggugaaccacaccuacgucaacaucaacaacacgaacgugguggcggagaaggacaagaccagcgucacccucgccgggaacuccagccugugcuccaucagcggcugggccaucuacaccaaggacaacuccauccggaucggcagcaagggggacguguucgugauccgcgagccguucaucuccugcagccaccuggagugccggacguucuuccucacccagggcgcccugcugaacgacaagcacuccaacgggaccgucaaggaccgcagccccuaccgggcccucauguccugcccccugggcgaggcgcccagcccguacaacagcaaguucgaguccguggccuggagcgccuccgccugccacgacgggaugggcuggcugaccaucggcaucagcgggcccgacaacggcgcgguggccguccucaaguacaacgggaucaucacggagaccaucaaguccuggaagaagcgcauccugcggacccaggagagcgagugcgugugcgugaacggcuccugcuucaccaucaugacggacggccccagcaacggggccgccuccuacaagaucuucaagaucgagaagggcaaggucaccaagagcaucgagcugaacgcccccaacuuccacuacgaggagugcuccugcuacccggacaccgggaccgugaugugcgugugccgcgacaacuggcacggcagcaaccggcccugggucuccuucaaccagaaccucgacuaccagaucggguacaucugcagcggcguguucggcgacaacccccgccccaaggacgggaagggcuccugcaacccggugacggucgacggggcggacggcaucaagggguucagcuacaaguacggcaacggcguguggaucgggcggaccaaguccaaccgccugcggaagggcuucgagaugaucugggaccccaacggguggaccaacaccgacagcgacuucuccgugaagcaggacgucguggccaucacggacuggagcggcuacagcggguccuucgugcagcaccccgagcugaccggccucgacugcauccgccccugcuucugggucgagcuggugcggggccugccgcgcgagaacaccaccaucuggacgagcggguccagcaucuccuucugcggcgucgacggggacaccgccaacuggagcuggcccgacggcgccgagcuccccuucaccaucgacaaguga

SEQ ID NO: 80387 - RNA, 1413 nt, Artificial Sequence
  derived and/or modified CDS sequence (opt1) from neuraminidase__InfluenzaA__ABY51097
augaaccccaaccagaagaucaucaccaucggcagcaucuccaucgccaucgggaucaucagccugaugcuccagaucggcaacaucaucuccaucugggccagccacuccauccagaccgggagccagaaccacacgggcaucugcaaccagcgcaucaucaccuacgagaacuccaccugggugaaccacaccuacgucagcaucaacaacacgaacgugguggcggggaaggacaagaccuccgucacccuggccggcaacagcucccugugcagcaucuccggcugggccaucuacaccaaggacaacagcauccggaucggguccaagggcgacguguucgugauccgcgagccguucaucagcugcucccaccucgagugccggacguucuuccugacccagggggcccugcucaacgacaagcacagcaacggcaccgucaaggaccgcucccccuaccgggcccugaugagcugcccccugggggaggcgcccagcccguacaacuccaaguucgagagcguggccugguccgccagcgccugccacgacggcaugggcuggcucaccaucgggaucuccggccccgacaacggggcgguggccguccugaaguacaacggcaucaucacggagaccaucaagagcuggaagaagcgcauccugcggacccaggaguccgagugcgugugcgugaacggcagcugcuucaccaucaugacggacgggcccuccaacggcgccgccagcuacaagaucuucaagaucgagaaggggaaggucaccaaguccguggagcucaacgcccccaacuuccacuacgaggagugcagcugcuacccggacaccggcaccgugaugugcgucugccgcgacaacuggcacggguccaaccggcccugggugagcuucaaccagaaccuggacuaccagaucggcuacaucugcuccggcguguucggggacaacccccgccccaaggacggcaaggggagcugcaacccggucacgguggacggcgcggacggggugaagggcuucuccuacaaguacggcaacggggucuggaucggccggaccaagagcaaccgccugcggaagggguucgagaugaucugggaccccaacggcuggaccgacaccgacuccgacuucagcgugaagcaggacguggucgccaucacggacuggagcggguacuccggcagcuucgugcagcaccccgagcucaccggccuggacugcauccgccccugcuucugggucgagcuggugcgggggcucccgcgcgagaacaccaccaucuggacguccggcagcuccaucagcuucugcgggguggacuccgacaccgccaacuggagcuggcccgacggcgccgagcugcccuucaccaucgacaaguga

SEQ ID NO: 80388 - RNA, 1413 nt, Artificial Sequence
  derived and/or modified CDS sequence (opt1) from neuraminidase__InfluenzaA__ABY51108
augaaccccaaccagaagaucaucaccaucggcagcaucuccaucgccaucgggaucaucagccugaugcuccagaucggcaacaucaucuccaucugggccagccacuccauccagaccgggagccagaaccacacgggcaucugcaaccagcgcaucaucaccuacgagaacuccaccugggugaaccacaccuacgucagcaucaacaacacgaacgugguggcggggaaggacaagaccuccgucacccuggccggcaacagcucccugugcagcaucuccggcugggccaucuacaccaaggacaacagcauccggaucggguccaagggcgacguguucgugauccgcgagccguucaucagcugcucccaccucgagugccggacguucuuccugacccagggggcccugcucaacgacaagcacagcaacggcaccgucaaggaccgcucccccuaccgggcccugaugagcugcccccugggggaggcgcccagcccguacaacuccaaguucgagagcguggccugguccgccagcgccugccacgacggcaugggcuggcucaccaucgggaucuccggccccgacaacggggcgguggccguccugaaguacaacggcaucaucacggagaccaucaagagcuggaagaagcgcauccugcggacccaggaguccgagugcgugugcgugaacggcagcugcuucaccaucaugacggacgggcccuccaacggcgccgccagcuacaagaucuucaagaucgagaaggggaaggucaccaaguccaucgagcucaacgcccccaacuuccacuacgaggagugcagcugcuacccggacaccggcaccgugaugugcgugugccgcgacaacuggcacggguccaaccggcccugggucagcuucaaccagaaccuggacuaccagaucggcuacaucugcuccggcguguucggggacaacccccgccccaaggacggcaaggggagcugcaacccggugacggucgacggcgcggacggggugaagggcuucuccuacaaguacggcaacgggguguggaucggccggaccaagagcaaccgccugcggaagggguucgagaugaucugggaccccaacggcuggaccgacaccgacuccgacuucagcgucaagcaggacaucguggccaucacggacuggagcggguacuccggcagcuucgugcagcaccccgagcucaccggccuggacugcauccgccccugcuucugggucgagcuggugcgggggcucccgcgcgagaacaccaccaucuggacguccggcagcuccaucagcuucugcggggucgacuccgacaccgccaacuggagcuggcccgacggcgccgagcugcccuucaccaucgacaaguga

SEQ ID NO: 80389 - RNA, 1413 nt, Artificial Sequence; identical to SEQ ID NO: 80054
  derived and/or modified CDS sequence (opt1) from neuraminidase__InfluenzaA__ABY51119

SEQ ID NO: 80390 - RNA, 1410 nt, Artificial Sequence; identical to SEQ ID NO: 79908
  derived and/or modified CDS sequence (opt1) from neuraminidase__InfluenzaA__ABY51130

SEQ ID NO: 80391 - RNA, 1413 nt, Artificial Sequence; identical to SEQ ID NO: 80095
  derived and/or modified CDS sequence (opt1) from neuraminidase__InfluenzaA__ABY51141

SEQ ID NO: 80392 - RNA, 1413 nt, Artificial Sequence
  derived and/or modified CDS sequence (opt1) from neuraminidase__InfluenzaA__ABY51152
augaaccccaaccagaagaucaucaccaucggcagcaucuccaucgccaucgggaucaucagccugaugcuccagaucggcaacaucaucuccaucugggccagccacuccauccagaccgggagccagaaccacacgggcaucugcaaccagcgcaucaucaccuacgagaacuccaccugggugaaccacaccuacgucagcaucaacaacacgaacgugguggcggggaaggacaagaccuccgucacccuggccggcaacagcucccugugcagcaucuccggcugggccaucuacaccaaggacaacagcauccggaucggguccaagggcgacguguucgugauccgcgagccguucaucagcugcucccaccucgagugccggacguucuuccugacccagggggcccugcucaacgacaagcacagcaacggcaccgucaaggaccgcucccccuaccgggcccugaugagcugcccccugggggaggcgcccagcccguacaacuccaaguucgagagcguggccugguccgccagcgccugccacgacggcaugggcuggcucaccaucgggaucuccggccccgacaacggggcgguggccguccugaaguacaacggcaucaucacggagaccaucaagagcuggaagaagcgcauccugcggacccaggaguccgagugcgugugcgugaacggcagcugcuucaccaucaugacggacgggcccuccaacggcgccgccagcuacaagaucuucaagaucgagaaggggaaggucaccaaguccaucgagcucaacgcccccaacuuccacuacgaggagugcagcugcuacccggacaccggcaccgugaugugcgugugccgcgacaacuggcacggguccaaccggcccugggucagcuucaaccagaaccuggacuaccagaucggcuacaucugcuccggcguguucggggacaacccccgccccaaggacggcaaggggagcugcaacccggugacggucgacggcgcggacggggugaagggcuucuccuacaaguacggcaacgggguguggaucggccggaccaagagcaaccgccugcggaagggguucgagaugaucugggaccccaacggcuggaccgacaccgacuccgacuucagcgucaagcaggacgugguggccaucacggacuggagcggguacuccggcagcuucguccagcaccccgagcucaccggccuggacugcauccgccccugcuucuggguggagcugguccgggggcucccgcgcgagaacaccaccaucuggacguccggcagcuccaucagcuucugcggggugaacuccgacaccgccaacuggagcuggcccgacggcgccgagcugcccuucaccaucgacaaguga

SEQ ID NO: 80393 - RNA, 1413 nt, Artificial Sequence
  derived and/or modified CDS sequence (opt1) from neuraminidase__InfluenzaA__ABY51163
augaaccccaaccagaagaucaucaccaucggcagcaucuccaucgccaucgggaucaucagccugaugcuccagaucggcaacaucaucuccaucugggccagccacuccauccagaccgggagccagaaccacacgggcaucugcaaccagcgcaucaucaccuacgagaacuccaccugggugaaccacaccuacgucaacaucaacaacacgaacgugguggcggggaaggacaagaccagcgucauccuggccggcaacuccagccugugcuccaucagcggcugggccaucuacaccaaggacaacuccauccggaucgggagcaagggcgacguguucgugauccgcgagccguucaucuccugcagccaccucgagugccggaccuucuuccugacgcagggggcccugcucaacgacaagcacuccaacggcaccgucaaggaccgcagccccuaccgggcccugauguccugcccccugggggaggcgcccagcccguacaacagcaaguucgaguccguggccuggagcgccuccgccugccacgacggcaugggcuggcucaccaucgggaucagcggccccgacaacggggcgguggccguccugaaguacaacggcaucaucaccgagacgaucaaguccuggaagaagcgcauccugcggacccaggagagcgagugcgugugcgugaacggcuccugcuucaccaucaugaccgacgggcccagcaacggcgccgccuccuacaagaucuucaagaucgagaaggggaaggucaccaagagcaucgagcucaacgcccccaacuuccacuacgaggagugcuccugcuacccggacacgggcaccgugaugugcgugugccgcgacaacuggcacgggagcaaccggcccugggucuccuucaaccagaaccuggacuaccagaucggcuacaucugcagcggcguguucggggacaacccccgccccaaggacggcaagggguccugcaacccggugaccgucgacggcgcggacggggugaagggcuucagcuacaaguacggcaacgggguguggaucggccggacgaaguccaaccgccugcggaagggguucgagaugaucugggaccccaacggcuggaccgacaccgacagcgacuucuccgucaagcaggacgugguggccaucaccgacuggagcggguacagcggcuccuucguccagcaccccgagcucacgggccuggacugcauccgccccugcuucuggguggagcugguccgggggcucccgcgcgagaacaccaccaucuggaccagcggcuccagcaucuccuucugcgggguggacagcgacacggccaacugguccuggcccgacggcgccgagcugcccuucaccaucgacaaguga

SEQ ID NO: 80394 - RNA, 1413 nt, Artificial Sequence
  derived and/or modified CDS sequence (opt1) from neuraminidase__InfluenzaA__ABY51174
augaaccccaaccagaagaugaucaccaucggcagcaucuccaucgccaucgggaucaucagccugaugcuccagaucggcaacaucaucuccaucugggccagccacuccauccagaccgggagccagaaccacacgggcaucugcaaccagcgcaucaucaccuacgagaacuccaccugggugaaccacaccuacgucaacaucaacaacacgaacgugguggcggggaaggacaagaccagcgucacccuggccggcaacuccagccugugcuccaucagcggcugggccaucuacaccaaggacaacuccauccggaucgggagcaagggcgacguguucgugauccgcgagccguucaucuccugcagccaccucgagugccggacguucuuccugacccagggggcccugcucaacgacaagcacuccaacggcaccgucaaggaccgcagccccuaccgggcccugauguccugcccccugggggaggcgcccagcccguacaacagcaaguucgaguccguggccuggagcgccuccgccugccacgacggcaugggcuggcucaccaucgggaucagcggccccgacaacggggcgguggccguccugaaguacaacggcaucaucacggagaccaucaaguccuggaagaagcgcauccugcggacccaggagagcgagugcgugugcgugaacggcuccugcuucaccaucaugacggacgggcccagcaacggcgccgccuccuacaagaucuucaagaucgagaaggggaaggucaccaagagcaucgagcucaacgcccccaacuuccacuacgaggagugcuccugcuacccggacaccggcaccgugaugugcgugugccgcgacaacuggcacgggagcaaccggcccugggucuccuucaaccagaaccuggacuaccaggugggcuacaucugcagcggcguguucggggacaacccccgccccaaggacggcaagggguccugcaacccgaugacggucgacggcgcggacggggugaagggcuucagcuacaaguacggcaacgggguguggaucggccggaccaaguccaacaagcugcgcaagggguucgagaugaucugggaccccaacggcuggaccgacaccgacagcgacuucuccgucaagcaggacgugguggccaucacggacuggagcggguacagcggcuccuucguccagcaccccgagcucaccggccuggacugcauccggcccugcuucuggguggagcugguccgcgggcucccgcgggagaacaccaccaucuggacgagcggcuccagcaucuccuucugcgggguggacagcgacaccgccaacugguccuggcccgacggcgccgagcugcccuucaccaucgacaaguga

SEQ ID NO: 80395 - RNA, 1413 nt, Artificial Sequence; identical to SEQ ID NO: 80054
  derived and/or modified CDS sequence (opt1) from neuraminidase__InfluenzaA__ABY51185

SEQ ID NO: 80396 - RNA, 1413 nt, Artificial Sequence; identical to SEQ ID NO: 80089
  derived and/or modified CDS sequence (opt1) from neuraminidase__InfluenzaA__ABY51196

SEQ ID NO: 80397 - RNA, 1410 nt, Artificial Sequence; identical to SEQ ID NO: 80090
  derived and/or modified CDS sequence (opt1) from neuraminidase__InfluenzaA__ABY51229

SEQ ID NO: 80398 - RNA, 1413 nt, Artificial Sequence
  derived and/or modified CDS sequence (opt1) from neuraminidase__InfluenzaA__ABY51240
augaaccccaaccagaagaucaucaccaucggcagcaucuccaucgccaucgggaucaucagccugaugcuccagaucggcaacaucaucuccgugugggccagccacuccauccagaccgggagccagaaccacacgggcaucugcaaccagcgcaucaucaccuacgagaacuccaccugggucaaccacaccuacgugagcaucaacaacacgaacguggucgcggggaaggacaagaccuccgugacccuggccggcaacagcucccugugcagcaucuccggcuggagcaucuacaccaaggacaacuccauccggaucgggagcaagggcgacguguucgucauccgcgagccguucaucuccugcagccaccucgagugccggacguucuuccugacccagggggcccugcucaacgacaagcacuccaacggcaccgugaaggaccgcagccccuaccgggcccugaugagcugcccccugggggaggcccccuccccguacaacagcaaguucgaguccguggcguggagcgccuccgccugccacgacggcaugggcuggcucaccaucgggaucagcggccccgacaacggggccgucgcggugcugaaguacaacggcaucaucacggagaccaucaaguccuggaagaagcgcauccugcggacccaggagagcgagugcgugugcgucaacggcuccugcuucaccaucaugacggacgggcccagcaacggcgccgccuccuacaagaucuucaagaucgagaaggggaaggugaccaagagcaucgagcucaacgcccccaacuuccacuacgaggagugcuccugcuacccggacaccggcaccgugaugugcgucugccgcgacaacuggcacgggagcaaccggcccuggguguccuucaaccagaaccuggacuaccagaucggcuacaucugcagcggcguguucggggacaacccccgccccaaggacggcaagggguccugcaacccggucacgguggacggcgccgacggggugaagggcuucagcuacaaguacggcaacggggucuggaucggccggaccaaguccaaccgccugcggaagggguucgagaugaucugggaccccaacggcuggaccgacaccgacagcgacuucagcgugaagcaggacguggucgcgaucacggacugguccggguacagcggcuccuucgugcagcaccccgagcucaccggccuggacugcauccgccccugcuucugggucgagcuggugcgggggcucccgcgcgagaacaccaccaucuggacgagcggcuccagcaucuccuucugcgggguggacagcgacaccgccaacugguccuggcccgacggcgccgagcugcccuucaccaucgacaaguga

SEQ ID NO: 80399 - RNA, 1413 nt, Artificial Sequence; identical to SEQ ID NO: 80080
  derived and/or modified CDS sequence (opt1) from neuraminidase__InfluenzaA__ABY51251

SEQ ID NO: 80400 - RNA, 1413 nt, Artificial Sequence
  derived and/or modified CDS sequence (opt1) from neuraminidase__InfluenzaA__ABY51262
augaaccccaaccagaagaucaucaccaucggcagcaucuccaucgccaucgggaucaucagccugaugcuccagaucggcaacaucaucuccaucugggccagccacuccauccagaccgggagccagaaccacacgggcaucugcaaccagcgcaucaucaccuacgagaacuccaccugggugaaccacaccuacgucagcaucaacaacacgaacgugguggcggggaaggacaagaccuccgucacccuggccggcaacagcucccugugcagcaucuccggcugggccaucuacaccaaggacaacagcauccggaucggguccaagggcgacguguucgugauccgcgagccguucaucagcugcucccaccucgagugccggacguucuuccugacccagggggcccugcucaacgacaagcacagcaacggcaccgucaaggaccgcucccccuaccgggcccugaugagcugcccccugggggaggcgcccagcccguacaacuccaaguucgagagcguggccugguccgccagcgccugccacgacggcaugggcuggcucaccaucgggaucuccggccccgacaacggggcgguggccguccugaaguacaacggcaucaucacggagaccaucaagagcuggaagaagcgcauccugcggacccaggaguccgagugcgugugcgugaacggcagcugcuucaccaucaugacggacgggcccuccaacggcgccgccagcuacaagaucuucaagaucgagaaggggaaggucaccaaguccaucgagcucaacgcccccaacuuccacuacgaggagugcagcugcuacccggacaccggcaccgugaugugcgugugccgcgacaacuggcacggguccaaccggcccugggucagcuucaaccagaaccuggacuaccagaucggcuacaucugcuccggcguguucggggacaacccccgccccaaggacggcaaggggagcugcaacccggugacggucgacggcgcggacggggugaagggcuucuccuacaaguacggcaacgggguguggaucggccggaccaagagcaaccgccugcggaagggguucgagaugaucugggaccccaacggcuggaccgacaccgacuccgacuucagcgucaagcaggacgugguggccaucacggacuggagcggguacuccggcagcuucguccagcaccccgagcucaccggccuggacugcauccgccccugcuucuggguggagcugguccgggggcucccgcgcgagaacgccaccaucuggaccuccggcagcuccaucagcuucugcgggguggacuccgacacggccaacuggagcuggcccgacggcgccgagcugcccuucaccaucgacaaguga

SEQ ID NO: 80401 - RNA, 1410 nt, Artificial Sequence; identical to SEQ ID NO: 79908
  derived and/or modified CDS sequence (opt1) from neuraminidase__InfluenzaA__ABY51273

SEQ ID NO: 80402 - RNA, 1350 nt, Artificial Sequence
  derived and/or modified CDS sequence (opt1) from neuraminidase__InfluenzaA__ABY76285
augaaccccaaccagaagaucaucaccaucggcagcaucugcauggugaucgggaucgucucccugaugcuccagaucggcaacaugaucagcaucugggugucccacagcauccagaccgggaaccagcgccaggccgagccgaucuccaacacgaaguuccugaccgagaaggccguggcgagcgucacccuggccggcaacuccagccucugccccaucuccgggugggccguguacagcaaggacaacuccauccggaucggcagcaagggcgacguguucgucauccgcgagcccuucaucuccugcagccaccuggagugccggaccuucuuccugacgcagggggcccuccugaacgacaagcacuccaacggcaccgugaaggaccgcagcccccaccggacccugauguccugcccggugggggaggcccccagccccuacaacucccgcuucgagagcgucgcguggagcgccuccgccugccacgacggcaccagcuggcucacgaucgggaucuccggccccgacaacggcgccguggcggugcugaaguacaacgggaucaucaccgacaccaucaagagcuggcggaacaacauccugcgcacccaggaguccgagugcgccugcgucaacggcagcugcuucacggugaugaccgacgggccguccaacggccaggccagcuacaagaucuucaagauggagaagggcaagguggucaaguccguggagcucgacgcccccaacuaccacuacgaggagugcagcugcuaccccgacgccggggagaucacgugcgugugccgggacaacuggcacggcuccaaccgccccugggucagcuucaaccagaaccuggaguaccagaucggguacaucugcuccggcguguucggggacaacccgcggcccaacgacggcaccggcagcugcgggcccgugucccccaacggcgcguacggggucaagggcuucagcuucaaguacgggaacggcguguggaucggccgcaccaaguccaccaacagccgguccggguucgagaugaucugggacccgaacggcuggaccgggaccgacagcagcuucuccgugaagcaggacaucgucgccaucacggacuggagcggcuacuccgggagcuucgugcagcaccccgagcugaccggccucgacugcauccgccccugcuucugggucgagcugauccggggccgccccaaggaguccaccaucuggaccagcggguccagcaucuccuucugcggcgugaacagcgacacgguguccuggagcuggccggacggggccgagcugcccuucaccaucgacaaguga

SEQ ID NO: 80403 - RNA, 1413 nt, Artificial Sequence
  derived and/or modified CDS sequence (opt1) from neuraminidase__InfluenzaA__ABY81352
augaaccccaaccagaagaucaucaccaucggcagcaucugcauggccaucgggaucaucucccugauccuccagaucggcagcaucaucuccaucugggugagccacuccauccagaccgggagccagaaccacacgggcaucugcaaccagcgcaucaucaccuacgagaacuccaccugggucaaccagaccuacgugaacaucagcaacacgaacguggucgccgggaaggacaccaccuccaugacccuggcgggcaacagcucccugugcccgauccggggcugggccaucuacagcaaggacaacuccauccgcaucgggagcaagggcgacguguucgugauccgggagcccuucaucuccugcagccaccucgagugccgcacguucuuccugacccagggggcccugcucaacgacaagcacuccaacggcaccgucaaggaccggagccccuaccgcgcccugauguccugccccaucggggaggccccgagccccuacaacagccgguucgaguccguggcguggagcgccuccgccugccacgacggcaugggcuggcugaccaucgggaucagcggccccgacgacggggccguggcgguccucaaguacaacggcaucaucacggagaccaucaaguccuggcgcaagcagauccugcggacccaggagagcgagugcgugugcgugaacggcuccugcuucaccaucaugacggacgggcccagcgacggccaggccuccuaccgcaucuucaagaucgagaaggggaagaucaccaagagcaucgagcuggacgccccgaacucccacuacgaggagugcagcugcuaccccgacaccggcaccgucaugugcgugugccgggacaacuggcacggguccaaccgccccugggugagcuucaaccagaaccucgacuaccagaucggcuacaucugcuccggcgucuucggggacaacccccggccgaaggacggcaaggggagcugcgaccccgugaacguggacggcgccgacggggucaagggcuucuccuaccgcuacggcaacgggguguggaucggccggaccaagagcaacuccagccgcaagggguucgagaugaucugggaccccaacggcuggacggacaccgacagcaacuuccuggugaagcaggacgucguggccaugaccgacugguccggguacagcggcuccuucgugcagcaccccgagcugacgggccucgacugcaugcggccgugcuucugggucgagcugauccgcgggcggccccgcgagaagaccaccaucuggaccagcggcuccagcaucuccuucugcggggugaacagcgacacggucaacugguccuggcccgacggcgcggagcugcccuucaccaucgacaaguga

SEQ ID NO: 80404 - RNA, 1413 nt, Artificial Sequence
  derived and/or modified CDS sequence (opt1) from neuraminidase__InfluenzaA__ABY81363
augaaccccaaccagaagaucaucaccaucggcagcaucuccaucgccaucgggaucaucagccugaugcuccagaucggcaacaucaucuccaucugggccagccacuccauccagaucgggagccagaaccacaccggcaucugcaaccagcgcaucaucacguacgagaacuccaccugggugaaccacaccuacgucagcaucaacaacaccaacgugguggcggggaaggacaagacguccgucacccuggccggcaacagcucccugugcagcaucuccggcugggccaucuacaccaaggacaacagcauccggaucggguccaagggcgacguguucgugauccgcgagccguucaucagcugcucccaccucgagugccggaccuucuuccugacgcagggggcccugcucaacgacaagcacagcaacggcaccgucaaggaccgcucccccuaccgggcccugaugagcugcccccugggggaggcgcccagcccguacaacuccaaguucgagagcguggccugguccgccagcgccugccacgacggcaugggcuggcucaccaucgggaucuccggccccgacaacggggcgguggccguccugaaguacaacggcaucaucaccgagacgaucaagagcuggaagaagcgcauccugcggacccaggaguccgagugcgugugcgugaacggcagcugcuucaccaucaugaccgacgggcccuccaacggcgccgccagcuacaagaucuucaagaucgagaaggggaaggucacgaaguccaucgagcucaacgcccccaacuuccacuacgaggagugcagcugcuacccggacaccggcaccgugaugugcgugugccgcgacaacuggcacggguccaaccggcccugggucagcuucaaccagaaccuggacuaccagaucggcuacaucugcuccggcguguucggggacaacccccgccccaaggacggcaaggggagcugcaacccggugaccgucgacggcgcggacggggugaagggcuucuccuacaaguacggcaacgggguguggaucggccggaccaagagcaaccgccugcggaagggguucgagaugaucugggaccccaacggcuggacggacaccgacuccgacuucagcgucaagcaggacgugguggccaucaccgacuggagcggguacuccggcagcuucguccagcaccccgagcucacgggccuggacugcauccgccccugcuucuggguggagcugguccgggggcucccgcgcgagaacaccaccaucuggaccuccggcagcuccaucagcuucugcgggguggacuccgacacggccaacuggagcuggcccgacggcgccgagcugcccuucaccaucgacaaguga

SEQ ID NO: 80405 - RNA, 1410 nt, Artificial Sequence; identical to SEQ ID NO: 80090
  derived and/or modified CDS sequence (opt1) from neuraminidase__InfluenzaA__ABY81374

SEQ ID NO: 80406 - RNA, 1413 nt, Artificial Sequence; identical to SEQ ID NO: 80054
  derived and/or modified CDS sequence (opt1) from neuraminidase__InfluenzaA__ABY81385

SEQ ID NO: 80407 - RNA, 1413 nt, Artificial Sequence
  derived and/or modified CDS sequence (opt1) from neuraminidase__InfluenzaA__ABY81407
augaaccccaaccagaagaucaucaccaucggcagcaucuccaucgccaucgggaccaucagccugaugcuccagaucggcaacaucaucuccaucugggccagccacuccauccagacggggagccagaaccacaccggcaucugcaaccagcgcaucaucaccuacgagaacuccaccugggugaaccacacguacgucagcaucaacaacaccaacgugguggcggggaaggacaagaccuccgucacccuggccggcaacagcucccugugcagcaucuccggcugggccaucuacacgaaggacaacagcauccggaucggguccaagggcgacguguucgugauccgcgagccguucaucagcugcucccaccucgagugccggaccuucuuccugacccagggggcccugcucaacgacaagcacagcaacggcaccgucaaggaccgcucccccuaccgggcccugaugagcugcccccugggggaggcgcccagcccguacaacuccaaguucgagagcguggccugguccgccagcgccugccacgacggcaugggcuggcucacgaucgggaucuccggccccgacaacggggcgguggccguccugaaguacaacggcaucaucaccgagaccaucaagagcuggaagaagcgcauccugcggacccaggaguccgagugcgugugcgugaacggcagcugcuucacgaucaugaccgacgggcccuccaacggcgccgccagcuacaagaucuucaagaucgagaaggggaaggucaccaaguccaucgagcucaacgcccccaacuuccacuacgaggagugcagcugcuacccggacaccggcacggugaugugcgugugccgcgacaacuggcacggguccaaccggcccugggucagcuucaaccagaaccuggacuaccagaucggcuacaucugcuccggcguguucggggacaacccccgccccaaggacggcaaggggagcugcaacccggugaccgucgacggcgcggacggggugaagggcuucuccuacaaguacggcaacgggguguggaucggccggaccaagagcaaccgccugcggaagggguucgagaugaucugggaccccaacggcuggaccgacacggacuccgacuuccucgucaagcaggacgugguggccaucaccgacuggagcggguacagcggcuccuucguccagcaccccgagcugaccggccuggacugcauccgccccugcuucuggguggagcucguccgggggcugccgcgcgagaacaccacgaucuggaccagcggcuccagcaucuccuucugcgggguggacagcgacaccgccaacugguccuggcccgacggcgccgagcugcccuucaccaucgacaaguga

SEQ ID NO: 80408 - RNA, 1410 nt, Artificial Sequence; identical to SEQ ID NO: 80090
  derived and/or modified CDS sequence (opt1) from neuraminidase__InfluenzaA__ACA24505

SEQ ID NO: 80409 - RNA, 1413 nt, Artificial Sequence; identical to SEQ ID NO: 80054
  derived and/or modified CDS sequence (opt1) from neuraminidase__InfluenzaA__ACA24516

SEQ ID NO: 80410 - RNA, 1413 nt, Artificial Sequence; identical to SEQ ID NO: 80054
  derived and/or modified CDS sequence (opt1) from neuraminidase__InfluenzaA__ACA24527

SEQ ID NO: 80411 - RNA, 1410 nt, Artificial Sequence
  derived and/or modified CDS sequence (opt1) from neuraminidase__InfluenzaA__ACA24692
augaaccccaaccagaagaucaucaccaucggcagcgugucccugaccaucagcacgaucugcuucuucaugcagaucgccauccucaucaccaccgucacccugcacuucaagcaguacgaguucuccccgccgcccaacaaccaggugaugcugugcgagcccacgaucaucgagcgcaacaucaccgagaucguguaccucaccaacaccacgaucgagaaggagaucugccccaagcuggccgaguaccggaacuggagcaagccccagugcgacaucaccggguucgcgcccuucuccaaggacaacagcauccgccuguccgccggcggggacaucugggucacccgggagcccuacgugagcugcgacccggacaagugcuaccaguucgcccucggccaggggaccacgcugaacaacgugcacuccaacgacaccguccacgaccgcacccccuaccggacccugcucaugaacgagcugggcgugcccuuccaccugggcacgaagcaggucugcaucgccuggagcuccagcuccugccacgacgggaaggccuggcuccacgugugcgugaccggcgacgacaagaacgcgaccgccagcuucaucuacaacgggcgccugguggacuccaucgucagcugguccaaggagauccugcggacccaggagagcgagugcgugugcaucaacggcacgugcaccguggucaugaccgacggguccgccagcggcaaggccgacaccaagauccucuucaucgaggagggcaagaucgugcacacgagcacccuguccgggagcgcgcagcacguggaggagugcuccugcuacccccgcuacccgggcguccggugcgugugccgcgacaacuggaaggggagcaaccggcccaucguggacaucaacaucaaggacuacuccaucgucagcaaguacgugugcuccggccuggugggcgacacgccccgcaagaacgacagcuccagcuccagccacugccucgaccccaacaacgaggagggcgggcacggggucaagggcugggccuucgacgacgggaacgacguguggaugggccggaccaucuccgagaagucccgcagcggcuacgagaccuucaaggucaucgagggguggagcaacccgaacuccaagcugcagaucaaccgccaggugaucguggaccggggcaaccggagcggguacuccggcaucuucagcgucgagggcaagagcugcaucaaccgcugcuucuacguggagcugauccgggggcgcaacgaggagaccgaggugcucuggaccuccaacagcaucgucguguucugcggcaccuccgggacguacggcaccgggagcuggcccgacggcgccgacaucaaccugaugcccaucuga

SEQ ID NO: 80412 - RNA, 1410 nt, Artificial Sequence
  derived and/or modified CDS sequence (opt1) from neuraminidase__InfluenzaA__ACA24703
augaaccccaaccagaagaucaucaccaucggcagcgugucccugaccaucagcacgaucugcuucuucaugcagaucgccauccucaucaccaccgucacccugcacuucaagcaguacgaguucuccagcccgcccaacaaccaggugaugcugugcgagcccacgaucaucgagcgcaacaucaccgagaucguguaccucaccaacaucaccaucgagaaggagacgugccccaagcuggccgaguaccggaacugguccaagccgcagugcgacaucaccggguucgcgcccuucagcaaggacaacuccauccgccugagcgccggcggggacaucugggucacccgggagcccuacguguccugcgaccccgacaagugcuaccaguucgcccucggccaggggaccacgcugaacaacgugcacagcaacgacaccguccacgaccgcaccccguaccggacccugcucaugaacgagcugggcgugcccuuccaccugggcacgaagcaggucugcaucgccugguccagcuccagcugccacgacgggaaggccuggcuccacgugugcgugaccggcgacgacaagaacgcgaccgccuccuucaucuacaacgggcgccugguggacagcaucgucuccuggagcaaggagauccugcggacccaggaguccgagugcgugugcaucaacggcacgugcaccguggucaugaccgacgggagcgccagcggcaacgccgacaccaagauccucuucaucgaggagggcaagaucgugcacacguccacccugagcggguccgcgcagcacguggaggagugcagcugcuacccccgcuaccccggcguccggugcgugugccgcgacaacuggaagggguccaaccggccgaucguggacaucaacaucaaggacuacagcaucgucucccgcuacgugugcagcggccuggugggcgacacgccccggaagaacgacuccagcuccagcucccacugccucgaccccaacaacgaggagggcgggcacggggucaagggcugggccuucgacgacgggaacgacguguggaugggccgcaccaucagcgagaagucccggagcggcuacgagaccuucaaggucaucgaggggugguccaaccccaacagcaagcugcagaucaaccgccaggugaucguggaccggggcaaccgcuccggguacagcggcaucuucagcgucgaggggaaguccugcaucaaccggugcuucuacguggagcugauccgcggccggaaggaggagaccgaggugcucuggaccagcaacuccaucgucguguucugcggcaccagcgggacguacggcaccggguccuggccggacggcgccgacaucaaccugaugcccaucuga

SEQ ID NO: 80413 - RNA, 1413 nt, Artificial Sequence
  derived and/or modified CDS sequence (opt1) from neuraminidase__InfluenzaA__ACA33539
augaaccccuaccagaagaucaucaccaucggcagcaucuccaucgccaucgggaucaucagccugaugcuccagaucggcaacaucaucuccaucugggccagccacuccauccagaccgggagccagaaccacacgggcaucugcaaccagcgcaucaucaccuacgagaacuccaccugggugaaccacaccuacgucagcaucaacaacacgaacgugguggcggggaaggacaagaccuccgucacccuggccggcaacagcucccugugcagcaucuccggcugggccaucuacaccaaggacaacagcauccggaucggguccaagggcgacguguucgugauccgcgagccguucaucagcugcucccaccucgagugccggacguucuuccugacccagggggcccugcucaacgacaagcacagcaacggcaccgucaaggaccgcucccccuaccgggcccugaugagcugcccccugggggaggcgcccagcccguacaacuccaaguucgagagcguggccugguccgccagcgccugccacgacggcaugggcuggcucaccaucgggaucuccggccccgacaacggggcgguggccguccugaaguacaacggcaucaucacggagaccaucaagagcuggaagaagcgcauccugcggacccaggaguccgagugcgugugcgugaacggcagcugcuucaccaucaugacggacgggcccuccaacggcgccgccagcuacaagaucuucaagaucgagaaggggaaggucaccaaguccaucgagcucaacgcccccaacuucuacuacgaggagugcagcugcuacccggacaccggcaccgugaugugcgugugccgcgacaacuggcacggguccaaccggcccugggucagcuucaaccagaaccuggacuaccagaucggcuacaucugcuccggcguguucggggacaacccccgccccaaggacggcaaggggagcugcaacccggugacggucgacggcgcggacggggugaagggcuucuccuacaaguacggcaacgggguguggaucggccggaccaagagcaaccgccugcggaagggguucgagaugaucugggaccccaacggcuggaccgacaccgacuccgacuucagcgucaagcaggacgugguggccaucacggacuggagcggguacuccggcagcuucguccagcaccccgagcucaccggccuggacugcauccgccccugcuucuggguggagcugguccgggggcucccgcgcgagaacaccaccaucuggacguccggcagcuccaucagcuucugcgggguggacuccgacaccgccaacuggagcuggcccgacggcgccgagcugcccuucaccaucgacaaguga

SEQ ID NO: 80414 - RNA, 1413 nt, Artificial Sequence
  derived and/or modified CDS sequence (opt1) from neuraminidase__InfluenzaA__ACA33540
augaaccccaaccagaagaucaucaccaucggcagcaucuccaucgccaucgggaucaucagccugaugcuccagaucggcaacaucaucuccaucugggccagccacuccauccagaccgggagccagaaccacacgggcaucugcaaccagcgcaucaucaccuacgagaacuccaccugggugaaccacaccuacgucagcaucaacaacacgaacgugguggcggggaaggacaagaccuccgucacccuggccggcaacagcucccugugcagcaucuccggcugggccaucuacaccaaggacaacagcauccggaucggguccaagggcgacguguucgugauccgcgagccguucaucagcugcucccaccucgagugccggacguucuuccugacccagggggcccugcucaacgacaagcacagcaacggcaccgucaaggaccgcucccccuaccgggcccugaugagcugcccccugggggaggcgcccagcccguacaacuccaaguucgagagcguggccugguccgccagcgccugccacgacggcaugggcuggcucaccaucgggaucuccggccccgacaacggggcgguggccguccugaaguacaacggcaucaucacggagaccaucaagagcuggaagaagcgcauccugcggacccaggaguccgagugcgugugcgugaacggcagcugcuucaccaucaugacggacgggcccuccaacggcgccgccagcuacaagaucuucaagaucgagaaggggaaggucaccaaguccaucgagcucaacgcccccaacuucuacuacgaggagugcagcugcuacccggacaccggcaccgugaugugcgugugccgcgacaacuggcacggguccaaccggcccugggucagcuucaaccagaaccuggacuaccagaucggcuacaucugcuccggcguguucggggacaacccccgccccaaggacggcaaggggagcugcaacccggugacggucgacggcgcggacggggugaagggcuucuccuacaaguacggcaacgggguguggaucggccggaccaagagcaaccgccugcggaagggguucgagaugaucugggaccccaacggcuggaccgacaccgacuccgacuucagcgucaagcaggacgugguggccaucacggacuggagcggguacuccggcagcuucguccagcaccccgagcucaccggccuggacugcauccgccccugcuucuggguggagcugguccgggggcucccgcgcgagaacaccaccaucuggacguccggcagcuccaucagcuucugcgggguggacuccgacaccgccaacuggagcuggcccgacggcgccgagcugcccuucaccaucgacaaguga

SEQ ID NO: 80415 - RNA, 1413 nt, Artificial Sequence
  derived and/or modified CDS sequence (opt1) from neuraminidase__InfluenzaA__ACA33582
augaaccccaaccagaagaucaucaccaucggcagcaucuccaucgccaucgggaucaucagccugaugcuccagaucggcaacaucaucuccaucugggccagccacuccauccagaccgggagccagaaccacacgggcaucugcaaccagcgcaucaucaccuacgagaacuccaccugggugaaccacaccuacgucagcaucaacaacacgaacgugguggcggggaaggacaagaccuccgucacccuggccggcaacagcucccugugcagcaucuccggcugggccaucuacaccaaggacaacagcauccggaucggguccaagggcgacguguucgugauccgcgagccguucaucagcugcucccaccucgagugccggacguucuuccugacccagggggcccugcucaacgacaagcacagcaacggcaccgucaaggaccgcucccccuaccgggcccugaugagcugcccccugggggaggcgcccagcccguacaacuccaaguucgagagcguggccugguccgccagcgccugccacgacggcaugggcuggcucaccaucgggaucuccggccccgacaacggggcgguggccguccugaaguacaacggcaucaucacggagaccaucaagagcuggaagaagcgcauccugcggacccaggaguccgagugcgugugcgugaacggcagcugcuucaccaucaugacggacgggcccuccaacggcgccgccagcuacaagaucuucaagaucgagaaggggaaggucaccaaguccaucgagcucaacgcccccaacuucuacuacgaggagugcagcugcuacccggacaccggcaccgugaugugcgugugccgcgacaacuggcacggguccaaccggcccugggucagcuucaaccagaaccuggacuaccagaucggcuacaucugcuccggcguguucggggacaacccccgccccaaggacggcaaggggagcugcaacccgaugacgguggacggcgcggacggggucaagggcuucuccuacaaguacggcaacgggguguggaucggccggaccaagagcaaccgccugcggaagggguucgagaugaucugggaccccaacggcuggaccgacaccgacuccgacuucagcgugaagcaggacgucguggccaucacggacuggagcggguacuccggcagcuucgugcagcaccccgagcucaccggccuggacugcauccgccccugcuucugggucgagcuggugcgggggcucccgcgcgagaacaccaccaucuggacguccggcagcuccaucagcuucugcggggucgacuccgacaccgccaacuggagcuggcccgacggcgccgagcugcccuucaccaucgacaaguga

SEQ ID NO: 80416 - RNA, 1413 nt, Artificial Sequence
  derived and/or modified CDS sequence (opt1) from neuraminidase__InfluenzaA__ACA33622
augaaccccaaccagaagaucaucaccaucggcagcaucuccaucgccaucgggaucaucagccugaugcuccagaucggcaacaucaucuccaucugggccagccacuccauccagaccgggagccagaaccacacgggcaucugcaaccagcgcaucaucaccuacgagaacuccaccugggugaaccacaccuacgucaacaucaacaacacgaacgugguggcggggaaggacaagaccagcgucacccuggccggcaacuccagccugugcuccaucagcggcugggccaucuacaccaaggacaacuccauccggaucgggagcaagggcgacguguucgugauccgcgagccguucaucuccugcagccaccucgagugccggacguucuuccugacccagggggcccugcucaacgacaagcacuccaacggcaccgucaaggaccgcagccccuaccgggcccugauguccugcccccugggggaggcgcccagcccguacaacagcaaguucgaguccguggccuggagcgccuccgccugccacgacggcaugggcuggcucaccaucgggaucagcggccccgacaacggggcgguggccguccugaaguacaacggcaucaucacggagaccaucaaguccuggaagaagcgcauccugcggacccaggagagcgagugcgugugcgugaacggcuccugcuucaccaucaugacggacgggcccagcaacggcgccgccuccuacaagaucuucaagaucgagaaggggaaggucaccaagagcaucgagcucaacgcccccaacuucuacuacgaggagugcuccugcuacccggacaccggcaccgugaugugcgugugccgcgacaacuggcacgggagcaaccggcccugggucuccuucaaccagaaccuggacuaccagaucggcuacaucugcagcggcguguucggggacaacccccgccccaaggacggcaagggguccugcaacccggugacggucgacggcgcggacggggugaagggcuucagcuacaaguacggcaacgggguguggaucggccggaccaaguccaaccgccugcggaagggguucgagaugaucugggaccccaacggcuggaccaacaccgacagcgacuucuccgucaagcaggacgugguggccaucacggacuggagcggguacagcggcuccuucguccagcaccccgagcucaccggccuggacugcauccgccccugcuucuggguggagcugguccgggggcucccgcgcgagaacaccaccaucuggacgagcggcuccagcaucuccuucugcgggguggacagcgacaccgccaacugguccuggcccgacggcgccgagcugcccuucaccaucgacaaguga

SEQ ID NO: 80417 - RNA, 1413 nt, Artificial Sequence; identical to SEQ ID NO: 80093
  derived and/or modified CDS sequence (opt1) from neuraminidase__InfluenzaA__ACA96522

SEQ ID NO: 80418 - RNA, 1362 nt, Artificial Sequence
  derived and/or modified CDS sequence (opt1) from neuraminidase__InfluenzaA__ACC55274
augaaccccaaccagaagaucaucaccaucggcagcgugucccugaccaucgccacggucugcuuccucaugcagaucgccauccuggcgaugaccgugacccugcacuuccgccagaacgagugcagcaucuccgccaacagccagguggucccgugcgagcccaccacggagaaggaggugugcuccaagguggucgacuaccggagcugguccaagccccagugccagaucaccggguucgcccccuucagcaaggacaacuccauccgccucagcgccggcggggacaucuggaucacccgggagccguacguguccugcgacaccagcaagugcuaccaguucgcccugggccaggggacgacccuggacaacgagcacuccaacggcaccauccacgaccgcaucccccaccggacccuccugaugaacgagcugggcgugcccuuccaccucgggacgcgccaggucugcaucgcguggagcuccagcuccugccacgacggcaaggccuggcugcacgugugcgugaccggggacgaccggaacgccaccgccagcuucaucuacaacggcaugcuggucgacuccaucgggagcuggagccagaacauccuccgcacccaggaguccgagugcgugugcaucaacggcagcugcacgguggucaugaccgacggcuccgcgagcgggaaggccgacacccggauccuguucgugaaggagggcaagaucgugcacaucagcccccuguccggguccgcccagcacaucgaggagugcagcugcuacccgcgcuaccccaacguccggugcgugugccgcgacaacuggaagggcuccaaccggcccgugaucgacaucaacaugaccgacuacagcaucgacuccagcuacgucugcuccggccucgugggggacacgccccgcaacgaggacagcuccagcuccagcaacugccgggacccgaacgaggagcgcggcaaccccggggugaagggcugggccuucgacuccggggacgacgucuggaugggccggaccaucagccgcgacagccgguccggcuacgagaccuuccgcgugaucgggggcuggaccacggccaacagcaagucccagaccaaccggcaggucaucguggacaacaacaacuggagcggguacuccggcaucuucagcguggagcacaaguccugcaucaaccgcugcuucuacgucgagcugauccgcgggcggcccaaggagacccgcgugugguggaccagcaacuccaucguggucuucugcggcacgagcggcaccuacgggaccggcuccuggcccgacggggcgaacaucaacuucaugccgaucuga

SEQ ID NO: 80419 - RNA, 1413 nt, Artificial Sequence; identical to SEQ ID NO: 80353
  derived and/or modified CDS sequence (opt1) from neuraminidase__InfluenzaA__ACC61967

SEQ ID NO: 80420 - RNA, 1413 nt, Artificial Sequence
  derived and/or modified CDS sequence (opt1) from neuraminidase__InfluenzaA__ACD11077
augaaccccaaccagaagaucaucaccaucggcagcaucugcauggccaucgggaucaucucccugauccuccagaucggcaacaucaucagcaucugggugucccacagcauccagaccgggucccagaaccacacgggcaucugcaaccagcgcaucaucaccuacgagaacagcaccugggucaaccagaccuacgugaacaucuccaacacgaacguggucgccgggaaggugaccaccagcaugacccuggcgggcaacuccagccugugcccgauccggggcugggccaucuacuccaaggacaacagcauccgcaucggguccaagggcgacguguucgucauccgggagcccuucaucagcugcucccaccucgagugccgcacguucuuccugacccagggggcccugcucaacgacaagcacagcaacggcaccgugaaggaccggucccccuaccgcgcccugaugagcugccccaucggggaggccccgucccccuacaacagccgguucgagagcguggcgugguccgccagcgccugccacgacggcaugggcuggcugaccaucgggaucuccggccccgacgacggggccgucgcggugcucaaguacaacggcaucaucacggagaccaucaagagcuggcgcaagcagauccugcggacccaggaguccgagugcgugugcgucaacggcagcugcuucaccaucaugacggacgggcccuccgacggcccggccagcuaccgcaucuucaagaucgagaaggggaagaucaccaaguccaucgagcuggacgcccccaacagccacuacgaggagugcuccugcuaccccgacaccggcaccgugaugugcgugugccgggacaacuggcacgggagcaaccgccccugggucuccuucaaccagaaccucgacuaccagaucggcuacaucugcagcggcguguucggggacaacccgcggcccaaggacggcaagggguccugcgaccccgugaacgucgacggcgccgacggggugaagggcuucagcuaccgcuacggcaacgggguguggaucggccggacgaaguccaacaacagccgcaagggguucgagaugaucugggaccccaacggcuggaccgacaccgacuccaacuuccuggucaagcaggacgugguggccaugaccgacuggagcggguacagcggcuccuucguccagcacccggagcugacgggccucgacugcaugcggcccugcuucuggguggagcugauccgcgggcggccccgcgagaagaccaccaucuggaccagcggcuccagcaucuccuucugcggggucaacagcgacacggugaacugguccuggcccgacggcgcggagcugccgcucaccaucgacaaguga

SEQ ID NO: 80421 - RNA, 1413 nt, Artificial Sequence
  derived and/or modified CDS sequence (opt1) from neuraminidase__InfluenzaA__ACD11078
augaaccccaaccagaagaucaucaccaucggcagcaucugcauggccaucgggaucaucucccugauccuccagaucggcaacaucaucagcaucugggugucccacagcauccagaccgggucccagaaccacacgggcaucugcaaccagcgcaucaucaccuacgagaacagcaccugggucaaccagaccuacgugaacaucuccaacacgaacguggucgccgggaaggacaccaccagcaugacccuggcgggcaacuccagccugugcccgauccggggcugggccaucuacuccaaggacaacagcauccgcaucggguccaagggcgacguguucgugauccgggagcccuucaucagcugcucccaccucgagugccgcacguucuuccugacccagggggcccugcucaacgacaagcacagcaacggcaccgucaaggaccggucccccuaccgcgcccugaugagcugccccaucggggaggccccgucccccuacaacagccgguucgagagcguggcgugguccgccagcgccugccacgacggcaugggcuggcugaccaucgggaucuccggccccgacgacggggccguggcgguccucaaguacaacggcaucaucacggagaccaucaagagcuggcgcaagcagauccugcggacccaggaguccgagugcgugugcgugaacggcagcugcuucaccaucaugacggacgggcccuccgacggcccggccagcuaccgcaucuucaagaucgagaaggggaagaucaccaaguccaucgagcuggacgcccccaacagccacuacgaggagugcuccugcuaccccgacaccggcaccgucaugugcgugugccgggacaacuggcacgggagcaaccgccccuggguguccuucaaccagaaccucgacuaccagaucggcuacaucugcagcggcgucuucggggacaacccgcggcccaaggacggcaagggguccugcgaccccgugaacguggacggcgccgacggggucaagggcuucagcuaccgcuacggcaacgggguguggaucggccggacgaaguccaacagcucccgcaagggguucgagaugaucugggaccccaacggcuggaccgacaccgacagcaacuuccuggugaagcaggacgucguggccaugaccgacuggagcggguacuccggcagcuucgugcagcacccggagcugacgggccucgacugcaugcggcccugcuucugggucgagcugauccgcgggcggccccgcgagaagaccaccaucuggaccuccggcagcuccaucagcuucugcggggugaacuccgacacggucaacuggagcuggcccgacggcgcggagcugccgcucaccaucgacaaguga

SEQ ID NO: 80422 - RNA, 1413 nt, Artificial Sequence
  derived and/or modified CDS sequence (opt1) from neuraminidase__InfluenzaA__ACD11079
augaaccccaaccagaagaucaucaccaucggcagcaucugcauggccaucgggaucaucucccugauccuccagaucggcaacaucaucagcaucugggugucccacagcauccagaccgggucccagaaccacacgggcaucugcaaccagcgcaucaucaccuacgagaacagcaccugggucaaccagaccuacgugaacaucuccaacacgaacguggucgccgggaaggacaccaccagcaugacccuggcgggcaacuccagccugugcccgauccggggcugggccaucuacuccaaggacaacagcauccgcaucggguccaagggcgacguguucgugauccgggagcccuucaucagcugcucccaccucgagugccgcacguucuuccugacccagggggcccugcucaacgacaagcacagcaacggcaccgucaaggaccggucccccuaccgcgcccugaugagcugccccaucggggaggccccgucccccuacaacagccgguucgagagcguggcgugguccgccagcgccugccacgacggcaugggcuggcugaccaucgggaucuccggccccgacgacggggccguggcggucaucaaguacaacggcaucaucacggagaccaucaagagcuggcgcaagcagauccuccggacccaggaguccgagugcgugugcgugaacggcagcugcuucaccaucaugacggacgggcccuccgacggcccggccagcuaccgcaucuucaagaucgagaaggggaagaucaccaaguccaucgagcuggacgcccccaacagccacuacgaggagugcuccugcuaccccgacaccggcaccgucaugugcgugugccgggacaacuggcacgggagcaaccgccccuggguguccuucaaccagaaccuggacuaccagaucggcuacaucugcagcggcgucuucggggacaacccgcggcccaaggacggcaagggguccugcgaccccgugaacguggacggcgccgacggggucaagggcuucagcuaccgcuacggcaacgggguguggaucggccggacgaaguccaacagcucccgcaagggguucgagaugaucugggaccccaacggcuggaccgacaccgacagcaacuuccucgugaagcaggacgucguggccaugaccgacuggagcggguacuccggcagcuucgugcagcacccggagcugacgggccuggacugcaugcggcccugcuucugggucgagcucauccgcgggcggccccgcgagaagaccaccaucuggaccuccggcagcuccaucagcuucugcggggugaacuccgacacggucaacuggagcuggcccgacggcgcggagcugccgcugaccaucgacaaguga

SEQ ID NO: 80423 - RNA, 1413 nt, Artificial Sequence; identical to SEQ ID NO: 80054
  derived and/or modified CDS sequence (opt1) from neuraminidase__InfluenzaA__ACD56116

SEQ ID NO: 80424 - RNA, 1413 nt, Artificial Sequence; identical to SEQ ID NO: 80054
  derived and/or modified CDS sequence (opt1) from neuraminidase__InfluenzaA__ACD56127

SEQ ID NO: 80425 - RNA, 1410 nt, Artificial Sequence; identical to SEQ ID NO: 79908
  derived and/or modified CDS sequence (opt1) from neuraminidase__InfluenzaA__ACD56261

SEQ ID NO: 80426 - RNA, 1410 nt, Artificial Sequence
  derived and/or modified CDS sequence (opt1) from neuraminidase__InfluenzaA__ACD56272
augaaccccaaccagaagaucaucaccaucggcagcgugucccugaccaucagcacgaucugcuucuucaugcagaucgccauccucaucaccaccgucacccugcacuucaagcaguacgaguucuccagcccgcccaacaaccaggugaugcugugcgagcccacgaucaucgagcgcaacaucaccgagaucguguaccucaccaacaccacgaucgagaaggagaucugccccaagcuggccgaguaccggaacugguccaagccgcagugcgacaucaccggguucgcgcccuucagcaaggacaacuccauccgccugagcgccggcggggacaucugggucacccgggagcccuacguguccugcgaccccgacaagugcuaccaguucgcccucggccaggggaccacgcugaacaacgugcacagcaacgacaccguccacgaccgcaccccguaccggacccugcucaugaacgagcugggcgugcccuuccaccugggcacgaagcaggucugcaucgccugguccagcuccagcugccacgacgggaaggccuggcuccacgugugcgugaccggcgacgacaagaacgcgaccgccuccuucaucuacaacgggcgccugguggacagcaucgucuccuggagcaaggagauccugcggacccaggaguccgagugcgugugcaucaacggcacgugcaccguggucaugaccgacgggagcgccagcggcaaggccgacaccaagauccucuucaucgaggagggcaagaucgugcacacguccacccugagcggguccgcgcagcacguggaggagugcagcugcuacccccgcuaccccggcguccggugcgugugccgcgacaacuggaagggguccaaccggccgaucguggacaucaacaucaaggacuacagcaucgucucccgcuacgugugcagcggccuggugggcgacacgccccggaagaacgacuccagcuccagcucccacugccucgaccccaacaacgaggagggcgggcacggggucaagggcugggccuucgacgacgggaacgacguguggaugggccgcaccaucagcgagaagucccggagcggcuacgagaccuucaaggucaucgaggggugguccaaccccaacagcaagcugcagaucaaccgccaggugaucguggaccggggcaaccgcuccggguacagcggcaucuucagcgucgaggggaaguccugcaucaaccggugcuucuacguggagcugauccgcggccggaaggaggagaccgaggugcucuggaccagcaacuccaucgucguguucugcggcaccagcgggacguacggcaccggguccuggccggacggcgccgacaucaaccugaugcccaucuga

SEQ ID NO: 80427 - RNA, 1413 nt, Artificial Sequence
  derived and/or modified CDS sequence (opt1) from neuraminidase__InfluenzaA__ACD56283
augaaccccaaccagaagaucaucaccaucggcagcaucuccauggccaucgggaucaucagccugaugcuccagaucggcaacaucaucuccaucugggccagccacuccauccagaccgggagccagaaccacacgggcaucugcaaccagcgcaucaucaccuacgagaacuccaccugggugaaccacaccuacgucagcaucaacaacacgaacgugguggcggggaaggacaagaccuccgucacccuggccggcaacagcucccugugcagcaucuccggcugggccaucuacaccaaggacaacagcauccggaucggguccaagggcgacguguucgugauccgcgagccguucaucagcugcucccaccucgagugccggacguucuuccugacccagggggcccugcucaacgacaagcacagcaacggcaccgucaaggaccgcucccccuaccgggcccugaugagcugcccccugggggaggcgcccagcccguacaacuccaaguucgagagcguggccugguccgccagcgccugccacgacggcaugggcuggcucaccaucgggaucuccggccccgacaacggggcgguggccguccugaaguacaacggcaucaucacggagaccaucaagagcuggaagaagcgcauccugcggacccaggaguccgagugcgugugcgugaacggcagcugcuucaccaucaugacggacgggcccuccaacggcgccgccagcuacaagaucuucaagaucgagaaggggaaggucaccaaguccaucgagcucaacgcccccaacuuccacuacgaggagugcagcugcuacccggacaccggcaccgugaugugcgugugccgcgacaacuggcacggguccaaccggcccugggucagcuucaaccagaaccuggacuaccagaucggcuacaucugcuccggcguguucggggacaacccccgccccaaggacggcaaggggagcugcaacccggugacggucgacggcgcggacggggugaagggcuucuccuacaaguacggcaacgggguguggaucggccggaccaagagcaaccgccugcggaagggguucgagaugaucugggaccccaacggcuggaccgacaccgacuccgacuucagcgucaagcaggacgugguggccaucacggacuggagcggguacuccggcagcuucguccagcaccccgagcucaccggccuggacugcauccgccccugcuucuggguggagcugguccgggggcucccgcgcgagaacaccaccaucuggacguccggcagcuccaucagcuucugcgggguggacuccgacaccgccaacuggagcuggcccgacggcgccgagcugcccuucaccaucgacaaguga

SEQ ID NO: 80428 - RNA, 1410 nt, Artificial Sequence
  derived and/or modified CDS sequence (opt1) from neuraminidase__InfluenzaA__ACD56305
augaaccccaaccagaagaucaucaccaucggcagcgugucccugaccaucgccacggucugcuuccucaugcagaucgccauccuggugaccaccgugacccugcacuucaagcagcacgagugcgacagcccggcguccaaccaggucaugcccugcgagcccaucaucaucgagcgcaacaucacggagaucguguaccucaacaacaccaccaucgagaaggagaucugccccgagguggucgaguaccggaacuggagcaagccgcagugccagaucaccggguucgcccccuucuccaaggacaacagcauccgccuguccgccggcggggacaucugggugacgcgggagcccuacgugagcugcgaccccggcaagugcuaccaguucgcccuggggcagggcaccacccucgacaacaagcacuccaacgacaccauccacgaccgcaucccgcaccggacgcugcugaugaacgagcucggcguccccuuccaccuggggacccgccaggugugcguggccuggagcuccagcuccugccacgacggcaaggcguggcugcacgucugcgugaccggggacgacaagaacgccaccgccagcuucaucuacgacggccggcucguggacuccaucgggagcuggucccagaacauccugcgcacgcaggagagcgagugcgucugcaucaacgggaccugcaccguggugaugaccgacggcuccgccagcgggcgggcggacacgcgcauccuguucaucgaggagggcaagaucguccacaucagcccccucuccgggagcgcccagcacguggaggagugcuccugcuacccccgguacccggacgugcgcugcaucugccgggacaacuggaagggcagcaaccgccccgucaucgacaucaacauggaggacuacuccaucgacagcuccuacgugugcagcggccuggugggggacacgccccggaacgacgaccgcuccagcaacuccaacugccgggaccccaacaacgagcgcggcaacccgggggucaagggcugggccuucgacaacggggacgacguguggaugggccggaccaucagcaaggaccugcgcuccggcuacgagaccuucaaggucaucgggggcuggagcacccccaacuccaagagccagaucaaccgccaggugaucguggacuccaacaacuggagcggguacuccggcaucuucagcgucgagggcaagagcugcaucaaccggugcuucuacguggagcucauccgcggccggcagcaggagacccgcgugugguggaccuccaacagcaucgucguguucugcggcaccuccgggacguacggcaccgggagcuggcccgacggcgccaacaucaacuucaugcccaucuga

SEQ ID NO: 80429 - RNA, 1410 nt, Artificial Sequence
  derived and/or modified CDS sequence (opt1) from neuraminidase__InfluenzaA__ACD56316
augaaccccaaccagaagaucaucaccaucggcagcgugucccugaccaucgccacggucugcuuccucaugcagaucgccauccuggugaccaccgugacccugcacuucaagcagcacgagugcgacagcccggcguccaaccaggucaugcccugcgagcccaucaucaucgagcgcaacaucacggagaucguguaccucaacaacaccaccaucgagaaggagaucugccccgagguggucgaguaccggaacuggagcaagccgcagugccagaucaccggguucgcccccuucuccaaggacaacagcauccgccuguccgccggcggggacaucugggugacgcgggagcccuacgugagcugcgaccccggcaagugcuaccaguucgcccuggggcagggcaccacccucgacaacaagcacuccaacgacaccauccacgaccgcaucccgcaccggacgcugcugaugaacgagcucggcguccccuuccaccuggggacccgccaggugugcguggccuggagcuccagcuccugccacgacggcaaggcguggcugcacgucugcgugaccggggacgacaagaacgccaccgccagcuucaucuacgacggccggcucauggacuccaucgggagcuggucccagaacauccugcgcacgcaggagagcgagugcgugugcaucaacgggaccugcaccgucgugaugaccgacggcuccgccagcggccgggcggacacgcgcauccuguucaucgaggagggcaagaucgugcacaucagcccccucuccgggagcgcccagcacgucgaggagugcuccugcuacccccgguacccggacgugcgcugcaucugccgggacaacuggaagggcagcaaccgccccgugaucgacaucaacauggaggacuacuccaucgacagcuccuacgucugcagcggccuggugggggacacgccccggaacgacgaccgcuccagcaacuccaacugccggaaccccaacaacgagcgcggcaacccgggggugaagggcugggccuucgacaacggggacgacgucuggaugggccggaccaucagcaaggaccugcgcuccggcuacgagaccuucaaggugaucgggggcuggagcacccccaacuccaagagccagaucaaccggcaggucaucguggacuccaacaacuggagcggguacuccggcaucuucagcguggaggggaagcgcugcaucaaccgcugcuucuacgucgagcucauccggggccgccagcaggagacccgggugugguggaccagcaacuccaucguggucuucugcggcaccagcgggacguacggcaccggguccuggcccgacggcgccaacaucaacuucaugcccaucuga

SEQ ID NO: 80430 - RNA, 1410 nt, Artificial Sequence
  derived and/or modified CDS sequence (opt1) from neuraminidase__InfluenzaA__ACD56327
augaaccccaaccagaagaucaucaccaucggcagcgugucccugaccaucgccacggucugcuuccucaugcagaucgccauccuggcgaccaccgugacccugcacuucaagcagcacgagugcgacagcccggccuccaaccaggugaugcccugcgagcccaucaucaucgagcgcaacaucacggagaucgucuaccucaacaacaccaccaucgagaaggagaucugccccgaggugguggaguaccggaacuggagcaagccgcagugccagaucaccggguucgcccccuucuccaaggacaacagcauccgccuguccgccggcggggacaucugggucacgcgggagcccuacgugagcugcgaccccuccaagugccaccaguucgcccugggccaggggaccacccucgagaacaagcacagcaacggcaccaagcacgaccgcaucccgcaccggacgcugcugaugaacgagcucggcgugcccuuccaccuggggaccaagcaggucugcguggcgugguccagcuccagcugccacgacggcaaggccuggcugcacgugugcgucaccggggacgaccgcaacgccaccgccuccuucaucuacggcgggcggcucguggacagcaucguguccuggagccagaacauccugcgcacgcaggaguccgagugcgucugcaucaacgggaccugcaccguggugaugaccgacggcagcgcgagcggccgggccgacacgcgcauccuguucaucaaggagggcaagaucguccacaucagcccccucuccggguccgcccagcacaucgaggagugcagcugcuacccccgguacccggacgugcgcugcaucugccgggacaacuggaagggcuccaaccgccccgugaucgacaucaacauggaggacuacagcaucgacuccagcuacgucugcuccggccuggugggggacacgccccggaacgacgacagcuccagcaacuccaacugccgcgaccccaacaacgagcggggcaacccgggggugaagggcugggccuucgacaacggggacgacgucuggaugggccgcaccaucagcaaggacucccggagcggcuacgagaccuucaaggugaucgggggcugguccacccccaacagcaagucccaggucaaccgccaggugaucguggacagcaacaacuggagcggguacuccggcaucuucagcgucgaggggaaguccugcaucaaccggugcuucuacguggagcugauccgcggccgcccccaggagacccgggugugguggaccagcaacuccaucgucguguucugcggcaccagcgggacguacggcaccggguccuggcccgacggcgccaacaucaacuucaugccgaucuga

SEQ ID NO: 80431 - RNA, 1410 nt, Artificial Sequence
  derived and/or modified CDS sequence (opt1) from neuraminidase__InfluenzaA__ACD85190
augaaccccaaccagaagaucaucaccaucggcagcgugucccugaccaucgccacggucugcuuccucaugcagaucgccauccuggugaccaccgugacccugcacuucaagcagcacgagugcgacagcccggcguccaaccaggucaugcccugcgagcccaucaucaucgagcgcaacaucacggagaucguguaccucaacaacaccaccaucgagaaggagaucugccccaagguggucgaguaccggaacuggagcaagccgcagugccagaucaccggguucgcccccuucuccaaggacaacagcauccgccuguccgccggcggggacaucugggugacgcgggagcccuacgugagcugcgaccccggcaagugcuaccaguucgcccuggggcagggcaccacccucgacaacaagcacuccaacgacaccauccacgaccgcaucccgcaccggacgcugcugaugaacgagcucggcguccccuuccaccuggggacccgccaggugugcaucgccuggagcuccagcuccugccacgacggcaaggcguggcugcacgugugcgucaccggggacgacaagaacgccaccgccagcuucaucuacgacggccggcucguggacuccaucgggagcuggucccagaacauccugcgcacgcaggagagcgagugcgugugcaucaacgggaccugcaccgucgugaugaccgacggcuccgccagcgggcgggcggacacgcgcauccuguucaucgaggagggcaagaucgugcacaucagcccccucuccgggagcgcccagcacgucgaggagugcuccugcuacccccgguacccggacgugcgcugcaucugccgggacaacuggaagggcagcaaccgccccaucaucgacaucaacauggaggacuacuccaucgacagcuccuacgugugcagcggccuggucggggacacgccccggaacgacgaccgcuccagcaacuccaacugccggaaccccaacaacgagcgcggcaacccgggggugaagggcugggccuucgacaacggggacgacguguggaugggccggaccaucagcaaggaccugcgcuccggcuacgagaccuucaaggucaucgggggcuggagcacccccaacuccaagagccagaucaaccgccaggugaucgucgacuccaacaacuggagcggguacuccggcaucuucagcguggagggcaagagcugcaucaaccggugcuucuacguggagcucauccgcggccggcagcaggagacccgcgucugguggaccuccaacagcaucgugguguucugcggcaccuccgggacguacggcaccgggagcuggcccgacggcgccaacaucaacuucaugcccaucuga

SEQ ID NO: 80432 - RNA, 1410 nt, Artificial Sequence
  derived and/or modified CDS sequence (opt1) from neuraminidase__InfluenzaA__ACD85201
augaaccccaaccagaagaucaucaccaucggcagcgugucccugaccaucgccacggucugcuuccucaugcagaucgccauccuggugaccaccgugacccugcacuucaagcagcacgagugcgacagcccggcguccaaccaggucaugcccugcgagcccaucaucaucgagcgcaacaucacggagaucguguaccucaacaacaccaccaucgagaaggagaucugccccaagguggucgaguaccggaacuggagcaagccgcagugccagaucaccggguucgcccccuucuccaaggacaacagcauccgccuguccgccggcggggacaucugggugacgcgggagcccuacgugagcugcgaccccggcaagugcuaccaguucgcccuggggcagggcaccacccucgacaacaagcacuccaacgacaccauccacgaccgcaucccgcaccggacgcugcugaugaacgagcucggcguccccuuccaccuggggacccgccaggugugcaucgccuggagcuccagcuccugccacgacggcaaggcguggcugcacgugugcgucaccggggacgacaagaacgccaccgccagcuucaucuacgacggccggcucguggacuccaucagcuccuggagccagaacauccugcgcacgcaggaguccgagugcgugugcaucaacgggaccugcaccgucgugaugaccgacggcagcgccagcggccgggcggacacgcgcauccuguucaucgaggaggggaagaucgugcacaucagcccccucuccggcuccgcccagcacgucgaggagugcagcugcuacccccgguacccggacgugcgcugcaucugccgggacaacuggaagggguccaaccgccccgugaucgacaucaacauggaggacuacagcaucgacuccagcuacgucugcuccggccuggugggcgacacgccccggaacgacgaccgcagcuccaacagcaacugccggaaccccaacaacgagcgcgggaacccgggcgugaaggggugggccuucgacaacggcgacgacgucuggauggggcggaccaucuccaaggaccugcgcagcggcuacgagaccuucaaggugaucggcgggugguccacccccaacagcaagucccagaucaaccggcaggucaucguggacagcaacaacugguccggcuacagcgggaucuucagcguggagggcaaguccugcaucaaccgcugcuucuacgucgagcucauccgcgggcggcagcaggagacccgcgugugguggaccagcaacuccaucguggucuucugcggcaccagcggcacguacgggaccggcuccuggcccgacggggccaacaucaacuucaugcccaucuga

SEQ ID NO: 80433 - RNA, 1410 nt, Artificial Sequence
  derived and/or modified CDS sequence (opt1) from neuraminidase__InfluenzaA__ACD85212
augaaccccaaccagaagaucaucaccaucggcagcgugucccugaccaucgccacggucugcuuccucaugcagaucgccauccuggcgaccaccgugacccugcacuucaagcagcacgagugcgacagcccggccuccaaccaggugaugcccugcgagcccaucaucaucgagcgcaacaucaaggagaucgucuaccucaacaacacgaccaucgagaaggagaucugccccgaggugguggaguaccggaacuggagcaagccgcagugccagaucaccggguucgcccccuucuccaaggacaacagcauccgccuguccgccggcggggacaucugggucacccgggagcccuacgugagcugcgaccccggcaagugcuaccaguucgcccuggggcagggcacgacccucgacaacaagcacuccaacggcaccauccacgaccgcaucccgcaccggacccugcugaugaacgagcucggggugcccuuccaccugggcacgaagcaggucugcguggcguggagcuccagcuccugccacgacgggaaggccuggcugcacgugugcgucaccggcgacgaccgcaacgccaccgccagcuucaucuacgacgggcggcucguggacuccaucggcagcuggucccagaacauccugcgcacccaggagagcgagugcgugugcaucaacggcacgugcaccgucgugaugaccgacggguccgcgagcggccgggccgacacccgcauccuguucaucaaggaggggaagaucgugcacaucagcccccucuccggcagcgcccagcacaucgaggagugcuccugcuacccccgguacccggacguccgcugcaucugccgggacaacuggaagggcagcaaccgccccgugaucgacaucaacauggaggacuacuccaucgacagcuccuacgugugcagcgggcuggucggcgacacgccccggaacgacgacuccagcuccaacagcaacugccgcgaccccaacaacgagcgggggaacccgggcgugaaggggugggccuucgacaacggcgacgacguguggaugggccgcaccaucaacaaggacucccggagcggguacgagaccuucaaggucaucggcgggugguccacccccaacagcaagucccaggugaaccgccaggucaucguggacaacaacaacuggagcggcuacuccgggaucuucagcguggagggcaagagcugcaucaaccggugcuucuacgucgagcugauccgcggccgcccccaggagacgcgggugugguggaccuccaacagcaucguggucuucugcgggaccuccggcaccuacgggacgggcagcuggcccgacggggccaacaucaacuucaugccgaucuga

SEQ ID NO: 80434 - RNA, 1410 nt, Artificial Sequence
  derived and/or modified CDS sequence (opt1) from neuraminidase__InfluenzaA__ACD85223
augaaccccaaccagaagaucaucaccaucggcagcgugucccugaccaucgccacggccugcuuccucaugcagaucgcgauccuggucaccaccgugacccugcacuucaagcagcacgagugcgacagcccggccuccaaccaggugaugcccugcgagcccaucaucaucgagcgcaacaucacggagaucgucuaccucaacaacaccaccaucgagaaggagaucugccccaaggugguggaguaccggaacuggagcaagccgcagugccagaucaccggguucgcccccuucuccaaggacaacagcauccgccuguccgccggcggggacaucugggucacgcgggagcccuacgugagcugcgaccccggcaagugcuaccaguucgcccuggggcagggcaccacccucgacaacaagcacuccaacgacaccauccacgaccgcaucccgcaccggacgcugcugaugaacgagcucggcgugcccuuccaccuggggacccgccaggucugcaucgcguggagcuccagcuccugccacgacggcaaggccuggcugcacgugugcgugaccggggacgacaagaacgccaccgccagcuucaucuacgacggccggcucgucgacuccaucgggagcuggucccagaacauccugcgcacgcaggagagcgagugcgugugcaucaacgggaccugcaccguggucaugaccgacggcuccgcgagcgggcgggccgacacgcgcauccuguucaucgaggagggcaagaucgugcacaucagcccccucuccgggagcgcccagcacguggaggagugcuccugcuacccccgguacccggacguccgcugcaucugccgggacaacuggaagggcagcaaccgccccaucaucgacaucaacauggaggacuacuccaucgacagcuccuacgugugcagcggccuggugggggacacgccccggaacgacgaccgcuccagcaacuccaacugccggaaccccaacaacgagcgcggcaacccgggggucaagggcugggccuucgacaacggggacgacguguggaugggccggaccaucagcaaggaccugcgcuccggcuacgagaccuucaaggugaucgggggcuggagcacccccaacuccaagagccagaucaaccggcaggucaucguggacuccaacaacuggagcggguacuccggcaucuucagcgucgagggcaagagcugcaucaaccgcugcuucuacguggagcucauccgcggccggcagcaggagacccgcgugugguggaccuccaacagcaucgucguguucugcggcaccuccgggacguacggcaccgggagcuggcccgacggcgccaacaucaacuucaugcccaucuga

SEQ ID NO: 80435 - RNA, 1410 nt, Artificial Sequence
  derived and/or modified CDS sequence (opt1) from neuraminidase__InfluenzaA__ACD85234
augaaccccaaccagaagaucaucaccaucggcagcgugucccugaccaucgccacggucugcuuccucaugcagaucgccauccuggcgaccaccgugacccugcacuucaagcagcacgagugcgacagcccggccuccaaccaggugaugcccugcgagcccaucaucaucgagcgcaacaucacggagaucgucuaccucaacaacaccaccaucgagaaggagaucugccccgaggugguggaguaccggaacuggagcaagccgcagugccagaucaccggguucgcccccuucuccaaggacaacagcauccgccuguccgccgacggcgacaucugggucacgcgggagcccuacgugagcugcgaccccgggaagugcuaccaguucgcccugggccaggggaccacccucgacaacaagcacuccaacggcaccauccacgaccgcaucccgcaccggacgcugcugaugaacgagcucggcgugcccuuccaccuggggaccaagcaggucugcguggcguggagcuccagcuccugccacgacggcaaggccuggcugcacgugugcgucaccggggacgaccgcaacgccaccgccagcuucaucuacgacggccggcucguggacuccaucgggagcuggucccagaacauccugcgcacgcaggagagcgagugcgugugcaucaacgggaccugcaccgucgugaugaccgacggcuccgcgagcgggcgggccgacacgcgcauccuguucaucaaggagggcaagaucgugcacaucagcccccucuccgggagcgcccagcacaucgaggagugcuccugcuacccccgguacccggacguccgcugcaucugccgggacaacuggaagggcagcaaccgccccgugaucgacaucaacauggaggacuacuccaucgacagcuccuacgugugcagcggccuggucggggacacgccccggaacgacgacuccagcuccaacagcaacugccgcgaccccaacaacgagcggggcaacccgggggugaagggcugggccuucgacaacggggacgacguguggaugggccgcaccaucuccaaggaccugcggagcggcuacgagaccuucaaggucaucgggggcugguccacccccaacagcaagucccaggugaaccgccaggucaucguggacaacaacaacuggagcggguacuccggcaucuucagcguggagggcaagagcugcaucaaccggugcuucuacgucgagcucauccgcggccgcccccaggagacccgggugugguggaccuccaacagcaucguggucuucugcggcaccuccgggacguacggcaccgggagcuggcccgacggcgccaacaucaacuucaugccgaucuga

SEQ ID NO: 80436 - RNA, 1410 nt, Artificial Sequence
  derived and/or modified CDS sequence (opt1) from neuraminidase__InfluenzaA__ACD85245
augaaccccaaccagaagaucaucaccaucggcagcgugucccugaucaucgccaccgucugcuuccucaugcagaucgccauccuggugacgaccgugacccugcacuucaagcagcacgagugcgacagcccggcguccaaccaggucaugcccugcgagcccaucaucaucgagcgcaacaucaccgagaucguguaccucaacaacacgaccaucgagaaggagaucugcccccggguggucgaguaccgcaacuggagcaagccgcagugccagaucaccggguucgcccccuucuccaaggacaacagcauccggcuguccgccggcggggacaucugggugacccgcgagcccuacgugagcugcgaccccggcaagugcuaccaguucgcccuggggcagggcacgacccucgacaacaagcacuccaacgacaccauccacgaccggaucccgcaccgcacccugcugaugaacgagcucggcguccccuuccaccuggggacgcgccaggugugcaucgccuggagcuccagcuccugccacgacggcaaggcguggcugcacgugugcaucaccggggacgacaagaacgccaccgccagcuucaucuacgacggccggcucgucgacuccaucgggagcuggucccagaacauccugcggacccaggagagcgagugcgugugcaucaacggcacgugcaccguggucaugaccgacggcuccgccagcgggcgcgcggacacccggauccuguucaucgaggagggcaagaucgugcacaucagcccccucuccgggagcgcccagcacguggaggagugcuccugcuacccccgcuacccgggcguccggugcaucugccgcgacaacuggaagggcagcaaccggcccgugguggacaucaacauggaggacuacuccaucgacagcuccuacgucugcagcgggcuggugggcgacacgccccgcaacgacgaccgguccagcaacuccaacugccgcaaccccaacaacgagcgggggaaccagggcgugaaggggugggccuucgacaacggcgacgacgucuggaugggccgcaccaucagcaaggaccugcgguccggguacgagaccuucaaggugaucggcggguggagcaccccgaacuccaagagccagaucaaccgccaggucaucguggacuccgacgaccgcagcggcuacuccgggaucuucagcguggagggcaagagcugcaucaaccggugcuucuacgucgagcucauccgcggccggaagcaggagacgcgcgugugguggaccuccaacagcaucguggucuucugcgggaccuccggcaccuacgggacgggcagcuggcccgacggggccaacaucaacuucaugcccaucuga

SEQ ID NO: 80437 - RNA, 1410 nt, Artificial Sequence
  derived and/or modified CDS sequence (opt1) from neuraminidase__InfluenzaA__ACD85454
augaaccccaaccagaagaucaucaccaucggcagcgugucccugaccaucagcacgaucggguucuucaugcagaccgccauccucaucaccaccgucacgcugcacuucaagcaguacgaguucaacuccccgcccaacaaccaggugaugcugugcgagcccaccaucaucgagcgcaacaucaccgagaucguguaccucaccaacacgaccaucgagaaggagaucugccccaagcuggccgaguaccggaacuggagcaagccgcagugcgacaucaccggcuucgcgcccuucuccaaggacaacagcauccgccuguccgccgggggcgacaucugggucacccgggagcccuacgugagcugcgaccccgacaagugcuaccaguucgcccucgggcagggcacgacccugaacaacgugcacuccaacgacaccguccgcaaccggaccccguaccgcacgcugcucaugaacgagcugggcgugcccuuccaccuggggaccaagcaggucugcaucgccuggagcuccagcuccugccacgacggcaaggccuggcuccacgugugcaucaccggggacgacaagaacgcgaccgccagcuucaucuacaacggccggcugguggacuccaucgugagcugguccaaggagauccugcgcacgcaggagagcgagugcgucugcaucaacgggaccugcaccguggugaugaccgacggcuccgccagcggcaaggccgacacgaagauccucuucaucgaggaggggaagaucguccacaccagcacccuguccggcagcgcgcagcacguggaggagugcuccugcuacccccgguaccccggggugcgcugcgucugccgggacaacuggaagggcagcaaccgcccgaucguggacaucaacaucaaggaccacuccaucgugagcuccuacgucugcagcggccuggugggggacacgccccggaagaacgacuccagcuccagcucccacugccucgaccccaacaacgaggagggcgggcacggcgugaaggggugggccuucgacgacggcaacgacgucuggaugggccgcaccaucagcgagaagucccggcugggguacgagaccuucaaggugaucgagggcuggagcaaccccaaguccaagcugcagaucaaccgccaggucaucguggaccgggggaaccgcagcggcuacuccgggaucuucagcguggagggcaagagcugcaucaaccggugcuucuacgucgagcucauccgcggccggaaggaggagaccgaggugcuguggaccuccaacagcaucguggucuucugcgggacguccggcaccuacgggaccggcagcuggccggacggggccgacaucaaccugaugcccaucuga

SEQ ID NO: 80438 - RNA, 1410 nt, Artificial Sequence
  derived and/or modified CDS sequence (opt1) from neuraminidase__InfluenzaA__ACD85465
augaaccccaaccagaagaucaucaccaucggcagcgugucccugaccaucagcacgaucggguucuucaugcagaccgccauccucaucaccaccgucacgcugcacuucaagcaguacgaguucaacuccccgcccaacaaccaggugaugcugugcgagcccaccaucaucgagcgcaacaucaccgagaucguguaccucaccaacacgaccaucgagaaggagaucugccccaagcuggccgaguaccggaacuggagcaagccgcagugcgacaucaccggcuucgcgcccuucuccaaggacaacagcauccgccuguccgccgggggcgacaucugggucacccgggagcccuacgugagcugcgaccccgacaagugcuaccaguucgcccucgggcagggcacgacccugaacaacgugcacuccaacgacaccguccgcgaccggaccccguaccgcacgcugcucaugaacgagcugggcgugcccuuccaccuggggaccaagcaggucugcaucgccuggagcuccagcuccugccacgacggcaaggccuggcuccacgugugcaucaccggggacgacaagaacgcgaccgccagcuucaucuacaacggccggcugguggacuccaucgugagcugguccaaggagauccugcgcacgcaggagagcgagugcgucugcaucaacgggaccugcaccguggugaugaccgacggcuccgccagcggcaaggccgacacgaagauccucuucaucgaggaggggaagaucguccacaccagcacccuguccggcagcgcgcagcacguggaggagugcuccugcuacccccgguaccccggggugcgcugcgucugccgggacaacuggaagggcagcaaccgcccgaucguggacaucaacaucaaggaccacuccaucgugagcuccuacgucugcagcggccuggugggggacacgccccggaagaacgacuccagcuccagcucccacugccucgaccccaacaacgaggagggcgggcacggcgugaaggggugggccuucgacgacggcaacgacgucuggaugggccgcaccaucagcgagaagucccggcugggguacgagaccuucaaggugaucgagggcuggagcaaccccaaguccaagcugcagaucaaccgccaggucaucguggaccgggggaaccgcagcggcuacuccgggaucuucagcguggagggcaagagcugcaucaaccggugcuucuacgucgagcucauccgcggccggaaggaggagaccgaggugcuguggaccuccaacagcaucguggucuucugcgggacguccggcaccuacgggaccggcagcuggccggacggggccgacaucaaccugaugcccaucuga

SEQ ID NO: 80439 - RNA, 1410 nt, Artificial Sequence
  derived and/or modified CDS sequence (opt1) from neuraminidase__InfluenzaA__ACD85487
augaaccccaaccagaagaucaucaccaucggcagcgugucccugaucaucagcaccaucugcuucuucaugcagacggccauccucaucaccaccgucacccugcacuucaagcaguacgaguucaacuccccgcccaacaaccaggugaugcugugcgagcccacgaucaucgagcgcaacaucaccgagaucguguaccucaccaacaccacgaucgagaaggagaucugccccaagcuggccgaguaccggaacuggagcaagccgcagugcgacaucaccggguucgcgcccuucuccaaggacaacagcauccgccuguccgccggcggggacaucugggucacccgggagcccuacgugagcugcgaccccgacaagugcuaccaguucgcccucggccaggggaccacgcugaacaacgugcacuccaacgacaccguccgcaaccggaccccguaccgcacccugcucaugaacgagcugggcgugcccuuccaccugggcacgaagcaggucugcaucgccuggagcuccagcuccugccacgacgggaaggccuggcuccacgugugcaucaccggcgacgacaagaacgcgaccgccagcuucaucuacaacgggcggcugguggacuccaucgugagcugguccaaggagauccugcgcacccaggagagcgagugcgucugcaucaacggcacgugcaccguggugaugaccgacggguccgccagcggcaaggccgacaccaagauccucuucaucgaggagggcaagaucguccacacgagcacccuguccgggagcgcgcagcacguggaggagugcuccugcuacccccgguaccccggcgugcgcugcgucugccgggacaacuggaaggggagcaaccgcccgaucguggacaucaacaucaaggaccacuccaucgugagcuccuacgucugcagcggccuggugggcgacacgccccggaagaacgacuccagcuccagcucccacugccucgaccccaacaacgaggagggcgggcacggggugaagggcugggccuucgacgacgggaacgacgucuggaugggccgcaccaucagcgagaagucccggcugggcuacgagaccuucaaggugaucgagggguggagcaaccccaacuccaagcugcagaucaaccgccaggucaucguggaccggggcaaccgcagcggguacuccggcaucuucagcguggagggcaagagcugcaucaaccggugcuucuacgucgagcucauccgcgggcggaaggaggagaccgaggugcuguggaccuccaacagcaucguggucuucugcggcaccuccgggacguacggcaccgggagcuggccggacggcgccgacaucaaccugaugcccaucuga

SEQ ID NO: 80440 - RNA, 1410 nt, Artificial Sequence
  derived and/or modified CDS sequence (opt1) from neuraminidase__InfluenzaA__ACD85498
augaaccccaaccagaagaucaucaccaucggcagcgugucccugaucaucagcaccaucugcuucuucaugcagacggccauccucaucaccaccgucacccugcacuucaagcaguacgaguucaacuccccgcccaacaaccaggugaugcugugcgagcccacgaucaucgagcgcaacaucaccgagaucguguaccucaccaacaccacgaucgagaaggagaucugccccaagcuggccgaguaccggaacuggagcaagccgcagugcgacaucaccggguucgcgcccuucuccaaggacaacagcauccgccuguccgccggcggggacaucugggucacccgggagcccuacgugagcugcgaccccgacaagugcuaccaguucgcccucggccaggggaccacgcugaacaacgugcacuccaacgacaccguccgcgaccggaccccguaccgcacccugcucaugaacgagcugggcgugcccuuccaccugggcacgaagcaggucugcaucgccuggagcuccagcuccugccacgacgggaaggccuggcuccacgugugcaucaccggcgacgacaagaacgcgaccgccagcuucaucuacaacgggcggcugguggacuccaucgugagcugguccaaggagauccugcgcacccaggagagcgagugcgucugcaucaacggcacgugcaccguggugaugaccgacggguccgccagcggcaaggccgacaccaagauccucuucaucgaggagggcaagaucguccacacgagcacccuguccgggagcgcgcagcacguggaggagugcuccugcuacccccgguaccccggcgugcgcugcgucugccgggacaacuggaaggggagcaaccgcccgaucguggacaucaacaucaaggaccacuccaucgugagcuccuacgucugcagcggccuggugggcgacacgccccggaagaacgacuccagcuccagcucccacugccucgaccccaacaacgaggagggcgggcacggggugaagggcugggccuucgacgacgggaacgacgucuggaugggccgcaccaucagcgagaagucccggcugggcuacgagaccuucaaggugaucgagggguggagcaaccccaaguccaagcugcagaucaaccgccaggucaucguggaccggggcaaccgcagcggguacuccggcaucuucagcguggagggcaagagcugcaucaaccggugcuucuacgucgagcucauccgcgggcggaaggaggagaccgaggugcuguggaccuccaacagcaucguggucuucugcggcaccuccgggacguacggcaccgggagcuggccggacggcgccgacaucaaccugaugcccaucuga

SEQ ID NO: 80441 - RNA, 1410 nt, Artificial Sequence
  derived and/or modified CDS sequence (opt1) from neuraminidase__InfluenzaA__ACD85509
augaaccccaaccagaagaucaucaccaucggcagcgugucccugaccaucagcacgaucugcuucuucaugcagaccgccauccucaucaccaccgucacgcugcacuucaagcaguacgaguucaacuccccgcccaacaaccaggugaugcugugcgagcccaccaucaucgagcgcaacaucaccgagaucguguaccucaccaacacgaccaucgagaaggagaucugccccaagcuggccgaguaccggaacuggagcaagccgcagugcgacaucaccggguucgcgcccuucuccaaggacaacagcauccgccuguccgccggcggggacaucugggucacccgggagcccuacgugagcugcgaccccgacaagugcuaccaguucgcccucggccaggggacgacccugaacaacgugcacuccaacgacaccguccgcaaccggaccccguaccgcacgcugcucaugaacgagcugggcgugcccuuccaccugggcaccaagcaggucugcaucgccuggagcuccagcuccugccacgacgggaaggccuggcuccacgugugcaucaccggcgacgacaagaacgcgaccgccagcuucaucuacaacgggcggcugguggacuccaucgugagcugguccaaggagauccugcgcacgcaggagagcgagugcgucugcaucaacgggaccugcaccguggugaugaccgacggcuccgccagcggcaaggccgacacgaagauccucuucaucgaggagggcaagaucguccacaccagcacccuguccgggagcgcgcagcacguggaggagugcuccugcuacccccgguaccccggcgugcgcugcgucugccgggacaacuggaaggggagcaaccgcccgaucguggacaucaacaucaaggaccacuccaucgugagcuccuacgucugcagcggccuggugggcgacacgccccggaagaacgacuccagcuccagcucccacugccucgaccccaacaacgaggaggggagccgcggcgugaaggggugggccuucgacgacggcaacgacgucuggauggggcggaccaucuccgagaagucccgccugggcuacgagaccuucaaggugaucgagggcuggagcaaccccaagagcaagcugcagaucaaccggcaggucaucguggaccgcgggaaccgguccggcuacagcgggaucuucagcguggagggcaaguccugcaucaaccgcugcuucuacgucgagcucauccgggggcgcaaggaggagaccgaggugcuguggaccagcaacuccaucguggucuucugcggcacgagcggcaccuacgggaccggcuccuggccggacggggccgacaucaaccugaugcccaucuga

SEQ ID NO: 80442 - RNA, 1410 nt, Artificial Sequence
  derived and/or modified CDS sequence (opt1) from neuraminidase__InfluenzaA__ACD85520
augaaccccaaccagaagaucaucaccaucggcagcgugucccugaucaucagcaccaucggguucuucaugcagacggccauccucaucaccaccgucacccugcacuucaagcaguacgaguucaacuccccgcccaacaaccaggugaugcugugcgagcccacgaucaucgagcgcaacaucaccgagaucguguaccucaccaacaccacgaucgagaaggagaucugccccaagcuggccgaguaccggaacuggagcaagccgcagugcgacaucaccggcuucgcgcccuucuccaaggacaacagcauccgccuguccgccgggggcgacaucugggucacccgggagcccuacgugagcugcgaccccgacaagugcuaccaguucgcccucgggcagggcaccacgcugaacaacgugcacuccaacgacaccguccgcgaccggaccccguaccgcacccugcucaugaacgagcugggcgugcccuuccaccuggggacgaagcaggucugcaucgccuggagcuccagcuccugccacgacggcaaggccuggcuccacgugugcaucaccggggacgacaagaacgcgaccgccagcuucaucuacaacggccggcugguggacuccaucgugagcugguccaaggagauccugcgcacccaggagagcgagugcgucugcaucaacgggacgugcaccguggugaugaccgacggcuccgccagcggcaaggccgacaccaagauccucuucaucgaggaggggaagaucguccacacgagcacccuguccggcagcgcgcagcacguggaggagugcuccugcuacccccgguaccccggggugcgcugcgucugccgggacaacuggaagggcagcaaccgcccgaucguggacaucaacaucaaggaccacuccaucgugagcuccuacgucugcagcggccuggugggggacacgccccggaagaacgacuccagcuccagcucccacugccucgaccccaacaacgaggagggcgggcacggcgugaaggggugggccuucgacgacggcaacgacgucuggaugggccgcaccaucagcgagaagucccggcugggguacgagaccuucaaggugaucgagggcuggagcaaccccaaguccaagcugcagaucaaccgccaggucaucguggaccgggggaaccgcagcggcuacuccgggaucuucagcguggagggcaagagcugcaucaaccggugcuucuacgucgagcucauccgcggccggaaggaggagaccgaggugcuguggaccuccaacagcaucguggucuucugcgggaccuccggcacguacgggaccggcagcuggccggacggggccgacaucaaccugaugcccaucuga

SEQ ID NO: 80443 - RNA, 1410 nt, Artificial Sequence; identical to SEQ ID NO: 80438
  derived and/or modified CDS sequence (opt1) from neuraminidase__InfluenzaA__ACD85553

SEQ ID NO: 80444 - RNA, 1410 nt, Artificial Sequence
  derived and/or modified CDS sequence (opt1) from neuraminidase__InfluenzaA__ACD85564
augaaccccaaccagaagaucaucaccaucggcagcgugucccugaucaucagcaccaucugcuucuucaugcagacggccauccucaucaccaccgucacccugcacuucaagcaguacgaguucaacuccccgcccaacaaccaggugaugcugugcgagcccacgaucaucgagcgcaacaucaccgagaccgcccaccucaccaacacgaccaucgagaaggagaucugccccaagcuggcggaguaccggaacuggagcaagccgcagugcgacaucaccggguucgcccccuucuccaaggacaacagcauccgccuguccgccggcggggacaucugggugacccgggagcccuacgucagcugcgaccccgacaagugcuaccaguucgcccucggccaggggacgacccugaacaacgugcacuccaacgacaccgugcgcgaccggaccccguaccgcacgcugcucaugaacgagcugggcguccccuuccaccugggcaccaagcaggucugcaucgccuggagcuccagcuccugccacgacgggaaggcguggcuccacgugugcaucaccggcgacgacaagaacgccaccgccagcuucaucuacaacgggcggcugguggacuccaucgugagcugguccaaggagauccugcgcacgcaggagagcgagugcgugugcaucaacgggaccugcaccgucgugaugaccgacggguccgccagcggcaaggcggacacgaagauccucuucaucgaggagggcaagaucgugcacaccagcacccuguccgggagcgcccagcacgucgaggagugcuccugcuacccccgguaccccggcgugcgcugcgugugccgggacaacuggaaggggagcaaccgcccgaucgucgacaucaacaucaaggaccacuccaucgugagcuccuacgugugcagcggccuggucggcgacacgccccggaagaacgacuccagcuccagcucccacugccucgaccccaacaacgaggagggcggccacggggugaagggcugggccuucgacgacgggaacgacguguggaugggccgcaccaucagcgagaagucccggcugggcuacgagaccuucaaggucaucgagggguggagcaaccccaaguccaagcugcagaucaaccgccaggugaucgucgaccggggcaaccgcagcggguacuccggcaucuucagcguggagggcaagagcugcaucaaccggugcuucuacguggagcucauccgcgggcggaaggaggagaccgagguccuguggaccuccaacagcaucgugguguucugcggcacguccgggaccuacggcaccgggagcuggccggacggcgccgacaucaaccugaugcccaucuga

SEQ ID NO: 80445 - RNA, 1410 nt, Artificial Sequence
  derived and/or modified CDS sequence (opt1) from neuraminidase__InfluenzaA__ACD85575
augaaccccaaccagaagaucaucaccaucggcagcgugucccugaucaucagcaccaucugcuucuucaugcagacggccauccucaucaccaccgucacccugcacuucaagcaguacgaguucaacuccccgcccaacaaccaggugaugcugugcgagcccacgaucaucgagcgcaacaucaccgagaucguguaccucaccaacaccacgaucgagaaggagaucugccccaagcuggccgaguaccggaacuggagcaagccgcagugcgacaucaccggguucgcgcccuucuccaaggacaacagcauccgccuguccgccggcggggacaucugggucacccgggagcccuacgugagcugcgaccccgacaagugcuaccaguucgcccucggccaggggaccacgcugaacaacgugcacuccaacgacaccguccgcgaccggaccccguaccgcacccugcucaugaacgagcugggcgugcccuuccaccugggcacgaagcaggucugcaucgccuggagcuccagcuccugccacgacgggaaggccuggcuccacgugugcaucaccggcgacgacaagaacgcgaccgccagcuucaucuacaacgggcggcugguggacuccaucgugagcugguccaaggagauccugcgcacccaggagagcgagugcgucugcaucaacggcacgugcaccguggugaugaccgacggguccgccagcggcaaggccgacaccaagauccucuucaucgaggagggcaagaucguccacacgagcacccuguccgggagcgcgcagcacguggaggagugcuccugcuacccccgguaccccggcgugcgcugcgucugccgggacaacuggaaggggagcaaccgcccgaucguggacaucaacaucaaggaccacuccaucgugagcuccuacgucugcagcggccuggugggcgacacgccccggaagaacgacuccagcuccagcucccacugccucgaccccaacaacgaggagggcgggcacggggugaagggcugggccuucgacgacgggaacgacgucuggaugggccgcaccaucagcgagaagucccggcugggcuacgagaccuucaaggugaucgagggguggagcaaccacaaguccaagcugcagaucaaccgccaggucaucguggaccggggcaaccgcagcggguacuccggcaucuucagcguggagggcaagagcugcaucaaccggugcuucuacgucgagcucauccgcgggcggaaggaggagaccgaggugcuguggaccuccaacagcaucguggucuucugcggcaccuccgggacguacggcaccgggagcuggcccgacggcgccgacaucaaccugaugccgaucuga

SEQ ID NO: 80446 - RNA, 1410 nt, Artificial Sequence
  derived and/or modified CDS sequence (opt1) from neuraminidase__InfluenzaA__ACD85586
augaaccccaaccagaagaucaucaccaucggcagcgugucccugaccaucagcacgaucugcuucuucaugcagaccgccauccucaucaccaccgucacgcugcacuucaagcaguacgaguucaacuccccgcccaacaaccaggugaugcugugcgagcccaccaucaucgagcgcaacaucaccgagaucguguaccucaccaacacgaccaucgagaaggagaucugccccaagcuggccgaguaccggaacuggagcaagccgcagugcgacaucaccggguucgcgcccuucuccaaggacaacagcauccgccuguccgccggcggggacaucugggucacccgggagcccuacgugagcugcgaccccgacaagugcuaccaguucgcccucggccaggggacgacccugaacaacgugcacuccaacgacaccguccgcgaccggaccccguaccgcacgcugcucaugaacgagcugggcgugcccuuccaccugggcaccaagcaggucugcaucgccuggagcuccagcuccugccacgacgggaaggccuggcuccacgugugcaucaccggcgacgacaagaacgcgaccgccagcuucaucuacaacgggcggcugguggacuccaucgugagcugguccaaggagauccugcgcacgcaggagagcgagugcgucugcaucaacgggaccugcaccguggugaugaccgacggguccgccagcggcaaggccgacacgaagauccucuucaucgaggagggcaagaucguccacaccagcacccuguccgggagcgcgcagcacguggaggagugcuccugcuacccccgguaccccggcgugcgcugcgucugccgggacaacuggaaggggagcaaccgcccgaucguggacaucaacaucaaggaccacuccaucgugagcuccuacgucugcagcggccuggugggcgacacgccccggaagaacgacuccagcuccagcucccacugccucgaccccaacaacgaggagggcggccgcggggugaagggcugggccuucgacgacgggaacgacgucuggaugggccggaccaucagcgagaagucccgccugggcuacgagaccuucaaggugaucgagggguggagcaaccccaaguccaagcugcagaccaaccggcaggucaucguggaccgcggcaaccggagcggguacuccggcaucuucagcguggagggcaagagcugcaucaaccgcugcuucuacgucgagcucauccgggggcgcaaggaggagaccgaggugcuguggacguccaacagcaucguggucuucugcggcaccuccgggaccuacggcaccgggagcuggccggacggcgccgacaucaaccugaugcccaucuga

SEQ ID NO: 80447 - RNA, 1410 nt, Artificial Sequence
  derived and/or modified CDS sequence (opt1) from neuraminidase__InfluenzaA__ACD93582
augaaccccaaccagaagaucaucaccaucggcagcgugucccugaccaucagcacgaucugcuucuucaugcagaucgccauccucgccaccaccgucacccugcacuucaagcaguacgaguucaacuccccgcccaacaaccaggugaugcugugcgagcccacgaucaucgagcgcaacaucaccgagaucguguaccucaccaacaccacgaucgagaaggagaucugccccaagcuggcggaguaccggaacuggagcaagccgcagugcgacaucaccggguucgcccccuucuccaaggacaacagcauccgccuguccgccggcggggacaucugggucacccgggagcccuacgugagcugcgaccccgacaagugcuaccaguucgcccucggccaggggaccacgcugaacaacgugcacuccaacgacaccguccgcggccggaccccguaccgcacccugcucaugaacgagcugggcgugcccuuccaccuggggacgaagcaggucugcaucgccuggagcuccagcuccugccacgacggcaaggcguggcuccacgugugcaucaccggggacgacaagaacgccaccgccagcuucaucuacaacggccggcugguggacuccaucgugagcugguccaaggagauccugcgcacccaggagagcgagugcgucugcaucaacgggacgugcaccguggugaugaccgacggcuccgccagcggcaaggcggacaccaagauccucuucaucgaggaggggaagaucguccacacgagcacccuguccggcagcgcccagcacguggaggagugcuccugcuacccccgguaccccggggugcgcugcgucugccgggacaacuggaagggcagcaaccgcccgaucguggacaucaacaucaaggaccacuccaucgugagcuccuacgucugcagcggccuggugggggacacgccccggaagaacgacuccagcuccagcucccacugccucgaccccaacaacgaggagggcgggcacggcgugaaggggugggccuucgacgacggcaacgacgucuggaugggccgcaccaucagcgagaagucccggcugggguacgagaccuucaaggugaucgagggcuggagcaaccccaaguccaagcugcagaucaaccgccaggucaucguggacaaggggaaccggagcggcuacuccgggaucuucagcguggagggcaagagcugcaucaaccgcugcuucuacgucgagcucauccggggccgcaaggaggagaccgaggugcuguggaccuccaacagcaucguggucuucugcgggaccuccggcacguacgggaccggcagcuggccggacggggccgacaucaaccugaugcccaucuga

SEQ ID NO: 80448 - RNA, 1410 nt, Artificial Sequence; identical to SEQ ID NO: 78736
  derived and/or modified CDS sequence (opt1) from neuraminidase__InfluenzaA__ACF09403

SEQ ID NO: 80449 - RNA, 1410 nt, Artificial Sequence; identical to SEQ ID NO: 79953
  derived and/or modified CDS sequence (opt1) from neuraminidase__InfluenzaA__ACF22151

SEQ ID NO: 80450 - RNA, 1410 nt, Artificial Sequence; identical to SEQ ID NO: 78119
  derived and/or modified CDS sequence (opt1) from neuraminidase__InfluenzaA__ACF22246

SEQ ID NO: 80451 - RNA, 1410 nt, Artificial Sequence; identical to SEQ ID NO: 78119
  derived and/or modified CDS sequence (opt1) from neuraminidase__InfluenzaA__ACF22257

SEQ ID NO: 80452 - RNA, 1410 nt, Artificial Sequence; identical to SEQ ID NO: 78119
  derived and/or modified CDS sequence (opt1) from neuraminidase__InfluenzaA__ACF22279

SEQ ID NO: 80453 - RNA, 1410 nt, Artificial Sequence; identical to SEQ ID NO: 78119
  derived and/or modified CDS sequence (opt1) from neuraminidase__InfluenzaA__ACF22290

SEQ ID NO: 80454 - RNA, 1410 nt, Artificial Sequence; identical to SEQ ID NO: 78119
  derived and/or modified CDS sequence (opt1) from neuraminidase__InfluenzaA__ACF22301

SEQ ID NO: 80455 - RNA, 1410 nt, Artificial Sequence; identical to SEQ ID NO: 78119
  derived and/or modified CDS sequence (opt1) from neuraminidase__InfluenzaA__ACF22312

SEQ ID NO: 80456 - RNA, 1410 nt, Artificial Sequence
  derived and/or modified CDS sequence (opt1) from neuraminidase__InfluenzaA__ACF22323
augaaccccaaccagaagaucaucaccaucggcagcgugucccugaccaucgccacggucugcuuccucaugcagaucgccauccuggugaccaccgugacccugcacuucaagcaguacgagugcgacagcccggcguccaaccaggucaugcccuacgagcccaucaucaucgagcgcaacaucacggagaucguguaccucaacaacaccaccaucgagaaggagaucugccccaagguggucgaguaccggaacuggagcaagccgcagugccagaucaccggguucgcccccuucuccaaggacaacagcauccgccuguccgccggcggggacaucugggugacgcgggagcccuacgugagcugcgaccacggcaagugcuaccaguucgcccuggggcagggcaccacccucgacaacaagcacuccaacgacaccauccacgaccgcaucccccaccggacgcugcugaugaacgagcucggcgucccguuccaccuggggacccgccaggugugcaucgccuggagcuccagcuccugccacgacggcaaggcguggcugcacgugugcaucaccggggacgacaagaacgccaccgccagcuucaucuacgacggccggcucgucgacuccaucgggagcuggucccagaacauccugcgcacgcaggagagcgagugcgugugcaucaacgggaccugcaccguggucaugaccgacggcuccgccagcggccgggcggacacgcgcauccuguucaucgaggagggcaagaucgugcacaucagcccccucuccgggagcgcccagcacguggaggagugcuccugcuacccccgguaccccggcguccgcugcaucugccgggacaacuggaagggcagcaaccgcccggugguggacaucaacauggaggacuacuccaucgacagcuccuacgucugcagcgggcuggugggcgacacgccccggaacgacgaccgcuccagcaacuccaacugccggaaccccaacaacgagcgcgggaaccagggcgugaaggggugggccuucgacaacggcgacgacgucuggaugggccggaccaucagcaaggaccugcgcuccggguacgagaccuucaaggugaucggcggguggagcacccccaacuccaagagccagaucaaccggcaggucaucguggacuccgacaaccgcagcggcuacuccgggaucuucagcguggagggcaagagcugcaucaaccgcugcuucuacgucgagcucauccggggccgcaagcaggagacccgggugugguggaccuccaacagcaucguggucuucugcgggaccuccggcacguacgggaccggcagcuggccggacggggccaacaucaacuucaugcccaucuga

SEQ ID NO: 80457 - RNA, 1410 nt, Artificial Sequence; identical to SEQ ID NO: 78119
  derived and/or modified CDS sequence (opt1) from neuraminidase__InfluenzaA__ACF22334

SEQ ID NO: 80458 - RNA, 1410 nt, Artificial Sequence; identical to SEQ ID NO: 78119
  derived and/or modified CDS sequence (opt1) from neuraminidase__InfluenzaA__ACF22367

SEQ ID NO: 80459 - RNA, 1410 nt, Artificial Sequence
  derived and/or modified CDS sequence (opt1) from neuraminidase__InfluenzaA__ACF22378
augaaccccaaccagaagaucaucaccaucggcagcgugucccugaccaucgccacggucugcuuccucaugcagaucgccauccuggugaccaccgugacccugcacuucaagcaguacgagugcgacagcccggcguccaaccaggucaugcccugcgagcccaucaucaucgagcgcaacaucacggagaucguguaccucaacaacaccaccaucgagaaggagaucugccccaagguggucgaguaccggaacuggagcaagccgcagugccagaucaccggguucgcccccuucuccaaggacaacagcauccgccuguccgccggcggggacaucugggugacgcgggagcccuacgugagcugcgaccacggcaagugcuaccaguucgcccuggggcagggcaccacccucgacaacaagcacuccaacgacaccauccacgaccgcaucccccaccggacgcugcugaugaacgagcucggcgucccguuccaccuggggacccgccaggugugcaucgccuggagcuccagcuccugccacgacggcaaggcguggcugcacgugugcaucaccggggacgacaagaacgccaccgccagcuucaucuacgacggccggcucgucgacuccaucgggagcuggucccagaacauccugcgcacgcaggagagcgagugcgugugcaucaacgggaccugcaccguggucaugaccgacggcuccgccagcggccgggcggacacgcgcauccuguucaucgaggagggcaagaucgugcacaucagcccccucuccgggagcgcccagcacguggaggagugcuccugcuacccccgguaccccggcguccgcugcaucugccgggacaacuggaagggcagcaaccgcccggugguggacaucaacauggaggacuacuccaucgacagcuccuacgucugcagcgggcuggugggcgacacgccccggaacgacgaccgcuccagcaacuccaacugcaagaaccccaacaacgagcgggggaaccagggcgugaaggggugggccuucgacaacggcgacgacgucuggaugggccgcaccaucagcaaggaccugcgguccggguacgagaccuucaaggugaucggcggguggagcacccccaacuccaagagccagaucaaccgccaggucaucguggacuccgacaaccggagcggcuacuccgggaucuucagcguggagggcaagagcugcaucaaccgcugcuucuacgucgagcucauccgcggccggaagcaggagacccgcgugugguggaccuccaacagcaucguggucuucugcgggaccuccggcacguacgggaccggcagcuggccggacggggccaacaucaacuucaugcccaucuga

SEQ ID NO: 80460 - RNA, 1410 nt, Artificial Sequence
  derived and/or modified CDS sequence (opt1) from neuraminidase__InfluenzaA__ACF22389
augaaccccaaccagaagaucaucaccaucggcagcgugucccugaccaucgccacggucugcuuccucaugcagaucgccauccuggugaccaccgugacccugcacuucaagcaguacgagugcgacagcccggcguccaaccaggucaugcccugcgagcccaucaucaucgagcgcaacaucacggagaucguguaccucaacaacaccaccaucgagaaggagaucugccccaagguggucgaguaccggaacuggagcaagccgcagugccagaucaccggguucgugcccuucuccaaggacaacagcauccgccuguccgccggcggggacaucugggugacgcgggagcccuacgucagcugcgaccacggcaagugcuaccaguucgcccuggggcagggcaccacccucgacaacaagcacuccaacgacaccauccacgaccgcaucccccaccggacgcugcugaugaacgagcucggcgugccguuccaccuggggacccgccaggugugcaucgccuggagcuccagcuccugccacgacggcaaggccuggcugcacgucugcaucaccggggacgacaagaacgcgaccgccagcuucaucuacgacggccggcucguggacuccaucgggagcuggucccagaacauccugcgcacgcaggagagcgagugcgugugcaucaacgggaccugcaccgucgugaugaccgacggcuccgccagcggccgggccgacacgcgcauccuguucaucgaggagggcaagaucgugcacaucagcccccucuccgggagcgcgcagcacgucgaggagugcuccugcuacccccgguaccccggcgugcgcugcaucugccgggacaacuggaagggcagcaaccgcccgguggucgacaucaacauggaggacuacuccaucgacagcuccuacgugugcagcgggcuggugggcgacacgccccggaacgacgaccgcuccagcaacuccaacugccggaaccccaacaacgagcgcgggaaccagggcgucaaggggugggccuucgacaacggcgacgacguguggaugggccggaccaucagcaaggaccugcgcuccggguacgagaccuucaaggucaucggcggguggagcacccccaacuccaagagccagaucaaccgccaggugaucguggacuccgacaaccggagcggcuacuccgggaucuucagcgucgagggcaagagcugcaucaaccgcugcuucuacguggagcucauccggggccgcaagcaggagacccgggugugguggaccuccaacagcaucgucguguucugcgggaccuccggcacguacgggaccggcagcuggccggacggggccaacaucaacuucaugcccaucuga

SEQ ID NO: 80461 - RNA, 1410 nt, Artificial Sequence
  derived and/or modified CDS sequence (opt1) from neuraminidase__InfluenzaA__ACF22400
augaaccccaaccagaagaucaucaccaucggcagcgugucccugaccaucgccacggucugcuuccucaugcagaucgccauccuggugaccaccgugacccugcacuucaagcaguacgagugcgacagcccggcguccaaccaggucaugcccugcgagcccaucaucaucgagcgcaacaucacggagaucguguaccucaacaacaccaccaucgagaaggagaucugccccaagguggucgaguaccggaacuggagcaagccgcagugccagaucaccggguucgcccccuucuccaaggacaacagcauccgccuguccgccggcggggacaucugggugacgcgggagcccuacgugagcugcgaccacggcaagugcuaccaguucgcccuggggcagggcaccacccucgacaacaagcacuccaacgacaccauccacgaccgcaucccccaccggacgcugcugaugaacgagcucggcgucccguuccaccuggggacccgccaggugugcaucgccuggagcuccagcuccugccacgacggcaaggcguggcugcacgugugcaucaccggggacgacaagaacgccaccgccagcuucaucuacgacggccggcucauggacuccaucgggagcuggucccagaacauccugcgcacgcaggagagcgagugcgucugcaucaacgggaccugcaccguggugaugaccgacggcuccgccagcggccgggcggacacgcgcauccuguucaucgaggagggcaagaucguccacaucagcccccucuccgggagcgcccagcacguggaggagugcuccugcuacccccgguaccccggcgugcgcugcaucugccgggacaacuggaagggcagcaaccgcccggucguggacaucaacauggaggacuacuccaucgacagcuccuacgugugcagcgggcuggucggcgacacgccccggaacgacgaccgcuccagcaacuccaacugccggaaccccaacaacgagcgcgggaaccagggcgugaaggggugggccuucgacaacggcgacgacguguggaugggccggaccaucagcaaggaccugcgcuccggguacgagaccuucaaggucaucggcggguggagcacccccaacuccaagagccagaucaaccgccaggugaucgucgacuccgacaaccggagcggcuacuccgggaucuucagcguggagggcaagagcugcaucaaccgcugcuucuacguggagcucauccggggccgcaagcaggagacccgggucugguggaccuccaacagcaucgugguguucugcgggaccuccggcacguacgggaccggcagcuggccggacggggccaacaucaacuucaugcccaucuga

SEQ ID NO: 80462 - RNA, 1410 nt, Artificial Sequence; identical to SEQ ID NO: 80090
  derived and/or modified CDS sequence (opt1) from neuraminidase__InfluenzaA__ACF22411

SEQ ID NO: 80463 - RNA, 1413 nt, Artificial Sequence
  derived and/or modified CDS sequence (opt1) from neuraminidase__InfluenzaA__ACF33772
augaaccccaaccagaagaucaucaccaucggcagcaucuccaucgccaucgggaucaucagccugaugcuccagaucggcaacaucaucuccaucugggccagccacuccauccagaccgggagccagaaccacacgggcaucugcaaccagcgcaucaucaccuacgagaacuccaccugggugaaccacaccuacgucaacaucaacaacacgaacgugguggcggggaaggacaagaccccggucacccuggccggcaacagcucccugugcagcaucuccggcugggccaucuacaccaaggacaacagcauccggaucggguccaagggcgacguguucgugauccgcgagcccuucaucagcugcucccaccucgagugcaagacguucuuccugacccagggggcccugcucaacgacaagcacagcaacggcaccgucaaggaccggucccccuaccgcgcccugaugagcugcccccugggggaggcgccgucccccuacaacagcaaguucgagagcguggccugguccgccagcgccugccacgacggcaucggcuggcucaccaucgggaucuccggccccgacaacggggcgguggccguccugaaguacaacggcaucaucacgggcaccaucaagagcuggaagaagcagauccugcggacccaggaguccgagugcgugugcaugaacgggagcugcuucaccaucaugacggacggccccuccaacggggccgccagcuacaagaucuucaagaucgagaagggcaaggugaccaaguccauggagcucaacgccccgaacuucuacuacgaggagugcagcugcuaccccgacaccgggaccgucaugugcgugugccgcgacaacuggcacggcuccaaccggcccugggugagcuucaaccagaaccuggacuaccagaucggcuacaucugcuccggggucuucggcgacaacccccgcccgaaggacggggagggcagcugcaaccccgugacgguggacggggcgaacggcgucaagggcuucuccuacaaguacgggaacggcguguggaucgggcggaccaagagcaaccgcauccggaagggcuucgagaugaucugggaccccaacggguggaccaacaccgacuccgacuucagcgugaagcaggacaucgucgccaucacggacugguccggcuacagcggcagcuucgugcagcaccccgagcugaccgggcucgacugcauccgcccgugcuucuggguggagcugguccggggccugccccgcgagaacaccaccaucuggacguccgggagcuccaucagcuucugcggcgugaacuccgacaucgccaacuggagcuggcccgacggcgccgagcuccccuucaccaucgacaaguga

SEQ ID NO: 80464 - RNA, 1410 nt, Artificial Sequence
  derived and/or modified CDS sequence (opt1) from neuraminidase__InfluenzaA__ACF33778
augaaccccaaccagaagaucaucaccaucggcagcgugucccugaccaucagcacgaucugcuucuucaugcagaucgccauccucaucaccaccgucacccugcacuucaagcaguacgaguucuccagcccgcccaacaaccaggugaugcugugcgagcccacgaucaucgagcgcaacaucaccgagaucguguaccucaccaacaccacgaucgagaaggagaucugccccaagcuggccgaguaccggaacugguccaagccgcagugcgacaucaccggguucgcgcccuucagcaaggacaacuccauccgccugagcgccggcggggacaucugggucacccgggagcccuacguguccugcgaccccgacaagugcuaccaguucgcccucggccaggggaccacgcugaacaacgugcacagcaacgacaccguccacgaccgcaccccguaccggacccugcucaugaacgagcugggcauccccuuccaccugggcacgaagcaggucugcaucgccugguccagcuccagcugccacgacgggaaggccuggcuccacgugugcgugaccggcgacgacaagaacgcgaccgccuccuucaucuacaacgggcgccugguggacagcaucguguccuggagcaaggagauccugcggacccaggaguccgagugcgucugcaucaacggcacgugcaccguggugaugaccgacgggagcgccagcggcaaggccgacaccaagauccucuucaucgaggagggcaagaucguccacacguccacccugagcggguccgcgcagaacguggaggagugcagcugcuacccccgcuaccccggcgugcggugcgucugccgcgacaacuggaagggguccaaccggccgaucguggacaucaacaucaaggacuacagcaucgugucccgcuacgucugcagcggccuggugggcgacacgccccggaagaacgacuccagcuccagcucccacugccucaaccccaacaacgaggagggcgggcacggggugaagggcugggccuucgacgacgggaacgacgucuggaugggccgcaccaucagcgagaagucccggagcggcuacgagaccuucaaggugaucgaggggugguccaaccccaacagcaagcugcagaucaaccgccaggucaucguggaccggggcaaccgcuccggguacagcggcaucuucagcguggaggggaaguccugcaucaaccggugcuucuacgucgagcugauccgcggccggaaggaggagaccgaggugcucuggaccagcaacuccaucguggucuucugcggcaccagcgggacguacggcaccggguccuggccggacggcgccgacaucaaccugaugcccaucuga

SEQ ID NO: 80465 - RNA, 1410 nt, Artificial Sequence
  derived and/or modified CDS sequence (opt1) from neuraminidase__InfluenzaA__ACF33785
augaaccccaaccagaagaucaucaccaucggcagcgugucccugaccaucagcacgaucugcuucuucaugcagaucgccauccucaucaccaccgucacccugcacuucaagcaguacgaguucaacuccccgcccaacaaccaggugaugcugugcgagcccacgaucaucgagcgcaacaucaccgagaucguguaccucaccaacaccacgaucgagaaggagaugugccccaagcuggccgaguaccggaacuggagcaagccgcagugcgacaucaccggguucgcgcccuucuccaaggacaacagcauccgccuguccgccggcggggacaucugggucacccgggagcccuacgugagcugcgaccccgacaagugcuaccaguucgcccucggccaggggaccacgcugaacaacgugcacuccaacgacaccguccacgugcgcaccccguaccggacccugcucaugaacgagcugggcgugcccuuccaccugggcacgaagcaggucugcaucgccuggagcuccagcuccugccacgacgggaaggccuggcuccacgugugcgugaccggcgacgacaagaacgcgaccgccagcuucaucuacaacgggcgccuggucgacuccaucgugagcugguccaaggacauccugcggacccaggagagcgagugcgugugcaucaacggcacgugcaccgucgugaugaccgacggguccgccagcggcaaggccgacaccaagauccucuucaucgaggagggcaagaucgugcacacgagcacccuguccgggagcgcgcagcacgucgaggagugcuccugcuacccccgcuaccccggcgugcggugcgugugccgcgacaacuggaaggggagcaaccggccgaucgucgacaucaacaucaaggacuacuccaucgugagcuccuacgugugcagcggccuggucggcgacacgccccgcaagaccgacuccagcuccagcucccacugccucgaccccaacaacgaggagggcgggcacggggugaagggcugggccuucgacgacgggaacgacgucuggaugggccggaccaucagcgagaagcugcgccugggcuacgagaccuucaaggugaucgaggggugguccaaccccaacagcaagcuccagaucaaccgccaggugaucgucgaccggggcaaccgguccggguacagcggcaucuucuccguggagggcaagagcugcaucaaccgcugcuucuacguggagcugauccgggggcgcaaggaggagaccgagguccuguggaccagcaacuccaucgugguguucugcggcacgagcgggaccuacggcaccggguccuggccggacggcgccgacaucaaccucaugcccaucuga

SEQ ID NO: 80466 - RNA, 1413 nt, Artificial Sequence
  derived and/or modified CDS sequence (opt1) from neuraminidase__InfluenzaA__ACF33787
augaaccccaaccagaagaucaucaccaucggcagcaucuccaucgccaucgggaucaucagccugaugcuccagaucggcaacaucaucuccaucugggccagccacuccauccagaccgggagccagaaccacacgggcaucugcaaccagcgcaucaucaccuacgagaacuccaccugggugaaccacaccuacgucaacaucaacaacacgaacgugguggcggggaaggacaagaccccggucacccuggccggcaacagcucccugugcagcaucuccggcugggccaucuacaccaaggacaacagcauccggaucggguccaagggcgacguguucgugauccgcgagcccuucaucagcugcucccaccucgagugcaagacguucuuccugacccagggggcccugcucaacgacaagcacagcaacggcaccgucaaggaccggucccccuaccgcgcccugaugagcugcccccugggggaggcgccgucccccuacaacagcaaguucgagagcguggccugguccgccagcgccugccacgacggcaucggcuggcucaccaucgggaucuccggccccgacaacggggcgguggccguccugaaguacaacggcaucaucacgggcaccaucaagagcuggaagaagcagauccugcggacccaggaguccgagugcgugugcaugaacgggagcugcuucaccaucaugacggacggccccgggaacggcgccgccuccuacaagaucuucaagaucgagaaggggaaggugaccaagagcauggagcucaacgccccgaacuuccacuacgaggagugcuccugcuaccccgacaccggcaccgucaugugcgugugccgcgacaacuggcacggcagcaaccggcccuggguguccuucaaccagaaccuggacuaccagaucggguacaucugcagcggcgucuucggggacaacccccgcccgaaggacggcgagggguccugcaaccccgugacgguggacggcgcgaacggcgucaagggguucagcuacaaguacggcaacgggguguggaucggccggaccaaguccaaccgcauccggaagggguucgagaugaucugggaccccaacggcuggaccaacaccgacagcgacuucuccgugaagcaggacaucgucgccaucacggacuggagcggcuacuccgggagcuucgugcagcaccccgagcugaccggccucgacugcauccgcccgugcuucuggguggagcugguccgggggcugcccaaggagaacaccaccaucuggacgagcggcuccagcaucuccuucugcggcgugaacagcgggaucgccaacugguccuggcccgacggcgccgagcuccccuucaccaucgacaaguga

SEQ ID NO: 80467 - RNA, 1410 nt, Artificial Sequence; identical to SEQ ID NO: 79908
  derived and/or modified CDS sequence (opt1) from neuraminidase__InfluenzaA__ACF33798

SEQ ID NO: 80468 - RNA, 1410 nt, Artificial Sequence; identical to SEQ ID NO: 80081
  derived and/or modified CDS sequence (opt1) from neuraminidase__InfluenzaA__ACF41672

SEQ ID NO: 80469 - RNA, 1413 nt, Artificial Sequence; identical to SEQ ID NO: 80054
  derived and/or modified CDS sequence (opt1) from neuraminidase__InfluenzaA__ACF41683

SEQ ID NO: 80470 - RNA, 1410 nt, Artificial Sequence
  derived and/or modified CDS sequence (opt1) from neuraminidase__InfluenzaA__ACF41749
augaaccccaaccagaagaucaucaccaucggcagcgugucccugaccaucgccacggucugcuuccucaugcagaucgccauccuggugaccaccgugacccugcacuucaagcaguacgagugcgacagcccggcguccaaccaggucaugcccugcgagcccaucaucaucgagcgcaacaucacggggaucguguaccucaacaacaccaccaucgagaaggagaucugccccaagguggucgaguaccggaacuggagcaagccgcagugccagaucaccggcuucgcccccuucuccaaggacaacagcauccgccuguccgccgggggcgacaucugggugacgcgggagcccuacgugagcugcgaccacgggaagugcuaccaguucgcccugggccagggcaccacccucgacaacaagcacuccaacgacaccauccacgaccgcaucccccaccggacgcugcugaugaacgagcucggggucccguuccaccugggcacccgccaggugugcaucgccuggagcuccagcuccugccacgacgggaaggcguggcugcacgugugcaucaccggcgacgacaagaacgccaccgccagcuucaucuacgacgggcggcucgucgacuccaucggcagcuggucccagaacauccugcgcacgcaggagagcgagugcgugugcaucaacgggaccugcaccguggucaugaccgacggcuccgccagcggccgggcggacacgcgcauccuguucaucgaggaggggaagaucgugcacaucagcccccucuccggcagcgcccagcacguggaggagugcuccugcuacccccgguaccccggcguccgcugcaucugccgggacaacuggaaggggagcaaccgcccggugguggacaucaacauggaggacuacuccaucgacagcuccuacgucugcagcggccuggugggggacacgccccggaacgacgaccgcuccagcaacuccaacugccggaaccccaacaacgagcgcggcaaccagggggugaagggcugggccuucgacaacggcgacgacgucuggauggggcggaccaucagcaaggaccugcgcuccggcuacgagaccuucaaggugaucgggggcuggagcacccccaacuccaagagccagaucaaccggcaggucaucguggacuccgacaaccgcagcggguacuccggcaucuucagcguggagggcaagagcugcaucaaccgcugcuucuacgucgagcucauccgggggcgcaagcaggagacccgggugugguggaccuccaacagcaucguggucuucugcggcaccuccgggacguacggcaccgggagcuggccggacggcgccaacaucaacuucaugcccaucuga

SEQ ID NO: 80471 - RNA, 1410 nt, Artificial Sequence
  derived and/or modified CDS sequence (opt1) from neuraminidase__InfluenzaA__ACF41760
augaaccccaaccagaagaucaucaccaucggcagcgugucccugaccaucgccacggucugcuuccucaugcagaucgccauccuggugaccaccgugacccugcacuucaagcaguacgagugcgacagcccggcguccaaccaggucaugcccugcgagcccaucaucaucgagcgcaacaucacggagaucguguaccucaacaacaccaccaucgagaaggagaucugccccaagguggucgaguaccggaacuggagcaagccgcagugccagaucaccggguucgcccccuucuccaaggacaacagcauccgccuguccgccggcggggacaucugggugacgcgggagcccuacgugagcugcgaccgcggcaagugcuaccaguucgcccuggggcagggcaccacccucgacaacaagcacuccaacgacaccauccacgaccggaucccccaccgcacgcugcugaugaacgagcucggcgucccguuccaccuggggacccgccaggugugcaucgccuggagcuccagcuccugccacgacggcaaggcguggcugcacgugugcaucaccggggacgacaagaacgccaccgccagcuucaucuacgacggccggcucgucgacuccaucgggagcuggucccagaacauccugcggacgcaggagagcgagugcgugugcaucaacgggaccugcaccguggucaugaccgacggcuccgccagcggccgcgcggacacgcggauccuguucaucgaggagggcaagaucgugcacaucagcccccucuccgggagcgcccagcacguggaggagugcuccugcuacccccgcuaccccggcguccggugcaucugccgcgacaacuggaagggcagcaaccggccggugguggacaucaacauggaggacuacuccaucgacagcuccuacgucugcagcgggcuggugggcgacacgccccgcaacgacgaccgguccagcaacuccaacugccgcaaccccaacaacgagcgggggaaccagggcgugaaggggugggccuucgacaacggcgacgacgucuggaugggccgcaccaucagcaaggaccugcgguccggguacgagaccuucaaggugaucggcggguggagcacccccaacuccaagagccagaucaaccgccaggucaucguggacuccgacaaccgcagcggcuacuccgggaucuucagcguggagggcaagagcugcaucaaccggugcuucuacgucgagcucauccgcggccggaagcaggagacccgcgugugguggaccuccaacagcaucguggucuucugcgggaccuccggcacguacgggaccggcagcuggccggacggggccaacaucaacuucaugcccaucuga

SEQ ID NO: 80472 - RNA, 1410 nt, Artificial Sequence
  derived and/or modified CDS sequence (opt1) from neuraminidase__InfluenzaA__ACF41771
augaaccccaaccagaagaucaucaccaucggcagcgugucccugaccaucgccacggucugcuuccucaugcagaucgccauccuggugaccaccgugacccugcacuucaagcaguacgagugcgacagcccggcguccaaccaggucaugcccugcgagcccaucaucaucgagcgcaacaucacggagaucguguaccucaacaacaccaccaucgagaaggagaucugccccaagguggucgaguaccggaacuggagcaagccgcagugccagaucaccggguucgcccccuucuccaaggacaacagcauccgccuguccgccggcggggacaucugggugacgcgggagcccuacgugagcugcgaccacggcaagugcuaccaguucgcccuggggcagggcaccacccucgacaacaagcacuccaacgacaccauccacgaccgcaucccccaccggacgcugcugaugaacgagcucggcgucccguuccaccuggggacccgccaggugugcaucgccuggagcuccagcuccugccacgacggcaaggcguggcugcacgugugcaucaccggggacgacaagaacgccaccgccagcuucaucuacgacggccggcucgucgacuccaucgggagcuggucccagaacauccugcgcacgcaggagagcgagugcgugugcaucaacgggaccugcaccguggucaucaccgacggcuccgccagcggccgggcggacacgcgcauccuguucaucgaggagggcaagaucgugcacaucagcccccucuccgggagcgcccagcacguggaggagugcuccugcuacccccgguaccccggcguccgcugcaucugccgggacaacuggaagggcagcaaccgcccggugguggacaucaacauggaggacuacuccaucgacagcuccuacgucugcagcgggcuggugggcgacacgccccggaacgacgaccgcuccagcaacuccaacugccggaaccccaacaacgagcgcgggaaccagggcgugaaggggugggccuucgacaacggcgacgacgucuggaugggccggaccaucagcaaggaccugcgcuccggguacgagaccuucaaggugaucggcggguggagcacccccaacuccaagagccagaucaaccggcaggucaucguggacuccgacaaccgcagcggcuacuccgggaucuucagcguggagggcaagagcugcaucaaccgcugcuucuacgucgagcucauccggggccgcaagcaggagacccgggugugguggaccuccaacagcaucguggucuucugcgggaccuccggcacguacgggaccggcagcuggccggacggggccaacaucaacuucaugcccaucuga

SEQ ID NO: 80473 - RNA, 1410 nt, Artificial Sequence; identical to SEQ ID NO: 78119
  derived and/or modified CDS sequence (opt1) from neuraminidase__InfluenzaA__ACF41793

SEQ ID NO: 80474 - RNA, 1410 nt, Artificial Sequence; identical to SEQ ID NO: 78119
  derived and/or modified CDS sequence (opt1) from neuraminidase__InfluenzaA__ACF41804

SEQ ID NO: 80475 - RNA, 1410 nt, Artificial Sequence; identical to SEQ ID NO: 78119
  derived and/or modified CDS sequence (opt1) from neuraminidase__InfluenzaA__ACF41826

SEQ ID NO: 80476 - RNA, 1365 nt, Artificial Sequence; identical to SEQ ID NO: 79743
  derived and/or modified CDS sequence (opt1) from neuraminidase__InfluenzaA__ACF41837

SEQ ID NO: 80477 - RNA, 1413 nt, Artificial Sequence
  derived and/or modified CDS sequence (opt1) from neuraminidase__InfluenzaA__ACF41881
augaaccccaaccagaagaucaucaccaucggcagcaucuccaucgccaucgggaucaucagccugaugcuccagaucggcaacaucaucuccaucugggccagccacuccauccagaccgggagccagaaccacacgggcgugugcaaccagcgcaucaucaccuacgagaacuccaccugggucaaccacaccuacgugaacaucaacaacacgaacguggucgcggggaaggacaagaccagcgugacccuggccggcaacuccagccugugcuccaucagcggcugggccaucuacaccaaggacaacuccauccggaucgggagcaagggcgacguguucgucauccgcgagccguucaucuccugcagccaccucgagugccggacguucuuccugacccagggggcccugcucaacgacaagcacuccaacggcaccgugaaggaccgcagccccuaccgggcccugauguccugcccccugggggaggcgcccagcccguacaacagcaaguucgaguccguggccuggagcgccuccgccugccacgacggcaugggcuggcucaccaucgggaucagcggccccgacaacggggcggucgccgugcugaaguacaacggcaucaucacggagaccaucaaguccuggaagaagcgcauccugcggacccaggagagcgagugcgugugcgucaacggcuccugcuucaccaucaugacggacgggcccagcaacggcgccgccuccuacaagaucuucaagaucgagaaggggaaggugaccaagagcaucgagcucaacgcccccaacuuccacuacgaggagugcuccugcuacccggacaccggcaccgugaugugcgucugccgcgacaacuggcacgggagcaaccggcccuggguguccuucaaccagaaccuggacuaccagaucggcuacaucugcagcggcguguucggggacaacccccgccccaaggacggcgagggguccugcaacccggucacgguggacggcgcggacggggugaagggcuucagcuacaaguacggcaacggggucuggaucggccggaccaaguccaaccgccugcggaagggguucgagaugaucugggaccccaacggcuggaccgacaccgacagcgacuucuccgugaagcaggacguggucgccaucacggacuggagcggguacagcggcuccuucgugcagcaccccgagcucaccggccuggacugcauccgccccugcuucugggucgagcuggugcgggggcucccgcgcgagaacaccaccaucuggacgagcggcuccagcaucuccuucugcggggugaacagcgacaccgccaacugguccuggcccgacggcgccgagcugcccuucaccaucgacaaguga

SEQ ID NO: 80478 - RNA, 1410 nt, Artificial Sequence; identical to SEQ ID NO: 79953
  derived and/or modified CDS sequence (opt1) from neuraminidase__InfluenzaA__ACF41892

SEQ ID NO: 80479 - RNA, 1410 nt, Artificial Sequence; identical to SEQ ID NO: 78351
  derived and/or modified CDS sequence (opt1) from neuraminidase__InfluenzaA__ACF41903

SEQ ID NO: 80480 - RNA, 1410 nt, Artificial Sequence
  derived and/or modified CDS sequence (opt1) from neuraminidase__InfluenzaA__ACF41914
augaaccccaaccagaagaucaucaccaucggcagcgugucccugaccaucagcacgaucugcuucuucaugcagaucgccauccucaucaccaccgucacccugcacuucaagcaguacgaguucaacuccccgcccaacaaccaggugaugcugugcgagcccacgaucaucgagcgcaacaucaccgagaucguguaccucaccaacaccacgaucgagaaggagaucugccccaagcuggccgaguaccggaacuggagcaagccgcagugcaacaucaccggguucgcgcccuucuccaaggacaacagcauccgccuguccgccggcggggacaucugggucacccgggagcccuacgugagcugcgaccccgacaagugcuaccaguucgcccucggccaggggaccacgcugaacaacgugcacuccaacgacaccguccacgaccgcaccccguaccggacccugcucaugaacgagcugggcgugcccuuccaccugggcacgaagcaggucugcaucgccuggagcuccagcuccugccacgacgggaaggccuggcuccacgugugcgugaccggcgacgacaagaacgcgaccgccagcuucaucuacaacgggcgccugguggacuccaucgucagcugguccaaggagauccugcggacccaggagagcgagugcgugugcaucaacggcacgugcaccguggucaugaccgacggguccgccagcggcaaggccgacaccaagauccucuucaucgaggagggcaagaucgugcacacgagcacccuguccgggagcgcgcagcacguggaggagugcuccugcuacccccgcuaccugggcguccggugcgugugccgcgacaacuggaaggggagcaaccggcccaucguggacaucaacaucaaggacuacuccaucgucagcuccuacgugugcagcggccucgugggcgacaccccgcgcaagaacgacuccagcuccagcucccacugccuggaccccaacaacgaggagggcgggcacggggucaagggcugggccuucgacgacgggaacgacguguggaugggccggaccaucagcgagaagcugcgcuccggcuacgagacguucaaggucaucgagggguggagcaaccccaacuccaagcuccagaucaaccgccaggugaucguggaccggggcaaccggagcggguacuccggcaucuucagcgucgagggcaagagcugcaucaaccgcugcuucuacguggagcugauccgggggcgcaaggaggagaccgaggugcuguggaccuccaacagcaucgucguguucugcggcaccuccgggacguacggcaccgggagcuggcccgacggcgccgacaucaaccucaugccgaucuga

SEQ ID NO: 80481 - RNA, 1413 nt, Artificial Sequence
  derived and/or modified CDS sequence (opt1) from neuraminidase__InfluenzaA__ACF41925
augaaccccaaccagaagaucaucaccaucggcagcaucuccauggccaucgggaucaucagccugauccuccagaucggcaacaucaucuccaucugggccagccacuccauccagaccgggagccagaaccacacgggcaucugcaaccagcgcaucaucaccuacgagaacuccaccugggugaaccagaccuacgucaacaucaacaacacgaacgugguggcggggaaggacaagaccagcgucacccuggccggcaacuccagccugugcccgauccggggcugggccaucuacaccaaggacaacuccauccgcaucgggagcaagggcgacguguucgugauccgggagcccuucaucuccugcagccaccucgagugccgcacguucuuccugacccagggggcccugcucaacgacaagcacuccaacggcaccgucaaggaccggagccccuaccgcgcccugauguccugcccccugggggaggcgccgagccccuacaacucccgguucgagagcguggccuggagcgccuccgccugccacgacggcaugggcuggcucaccaucgggaucagcggccccgacaacggggcgguggccguccugaaguacaacggcaucaucacggagaccaucaaguccuggaagaagcgcauccugcggacccaggagagcgagugcgugugcgugaacggcuccugcuucaccaucaugacggacgggcccagcaacggcgccgccuccuaccgcaucuucaagaucgagaaggggaaggucaccaagagcaucgagcucgacgccccgaacuaccacuacgaggagugcuccugcuaccccgacaccggcaccgugaugugcgugugccgggacaacuggcacgggagcaaccgccccugggucuccuucaaccagaaccuggacuaccagaucggcuacaucugcagcggcguguucggggacaacccccggccgaaggacggcgagggguccugcaaccccgugacggucgacggcgcggacggggugaagggcuucagcuaccgcuacggcaacgggguguggaucggccggaccaaguccaaccgccugcggaagggguucgagaugaucugggaccccaacggcuggaccgacaccgacagcgacuucuccgucaagcaggacgugguggccaugacggacuggagcggguacuccggcagcuucguccagcaccccgagcucaccggccuggacugcaugcgcccgugcuucuggguggagcugauccgggggcgcccccgggagaacaccaccaucuggacgagcggcuccagcaucuccuucugcggggucaacagcgacaccgccaacugguccuggcccgacggcgccgagcuccccuucaccaucgacaaguga

SEQ ID NO: 80482 - RNA, 1413 nt, Artificial Sequence; identical to SEQ ID NO: 80481
  derived and/or modified CDS sequence (opt1) from neuraminidase__InfluenzaA__ACF41936

SEQ ID NO: 80483 - RNA, 1410 nt, Artificial Sequence
  derived and/or modified CDS sequence (opt1) from neuraminidase__InfluenzaA__ACF54392
augaaccccaaccagaagaucaucaccaucggcagcgugucccugaccacggccaccgccugcuuccucacccagaucgcgauccuggucaccacggugacccugcacuucaagcagcacgagugcgacagcccggccuccaaccaggugaugcccugcgagcccaucaucaucgagcgcaacaucaccgagaucgucuaccucaacaacaccacgaucgagaaggagaucugccccaaggugguggaguaccggaacuggagcaagccgcagugccagaucaccggguucgcccccuucuccaaggacaacagcauccgccuguccgccggcggggacaucugggucacccgggagcccuacgugagcugcgacuccggcaagugcuaccaguucgcccuggggcagggcaccacgcucgacaacaagcacagcaacgacaccauccacgaccgcaucccccaccggacccugcugaugaacgagcucggcgugccguuccaccuggggacccgccaggucugcaucgcgugguccagcuccagcugccacgacggcaaggccuggcugcacgugugcaucacgggggacgacaagaacgccaccgccuccuucaucuacgacggccggcucguggacagcaucggguccuggagccagaacauccugcgcacccaggaguccgagugcgucugcaucaacgggaccugcacgguggugaugaccgacggcagcgcgagcggccgggccgacacccgcauccuguucaucgaggagggcaagaucguccacaucagcccccucuccggguccgcccagcacguggaggagugcagcugcuacccccgguaccccggcgugcgcugcaucugccgggacaacuggaagggcuccaaccgcccggucguggacaucaacauggaggacuacagcaucgacuccagcuacgugugcuccgggcuggucggcgacacgccccggaacgacgaccgcuucagcaacuccaacugccggaaccccaacaacgagcgcgggaaccagggcgugaaggggugggccuucgacaacggcgacgacguguggaugggccggaccaucagcaaggaccugcgcuccggguacgagaccuucaaggucaucggcggguggagcacccccaacuccaagagccagaucaaccgccaggugaucgucgacuccgacaaccggagcggcuacuccgggaucuucagcguggagggcaagagcugcaucaaccgcugcuucuacguggagcucauccggggccgcaagcaggagacccgggucugguggacguccaacagcaucgugguguucugcgggaccuccggcaccuacgggaccggcagcuggccggacggggccaacaucaacuucaugcccaucuga

SEQ ID NO: 80484 - RNA, 1410 nt, Artificial Sequence; identical to SEQ ID NO: 78119
  derived and/or modified CDS sequence (opt1) from neuraminidase__InfluenzaA__ACF54403

SEQ ID NO: 80485 - RNA, 1410 nt, Artificial Sequence; identical to SEQ ID NO: 78119
  derived and/or modified CDS sequence (opt1) from neuraminidase__InfluenzaA__ACF54414

SEQ ID NO: 80486 - RNA, 1410 nt, Artificial Sequence; identical to SEQ ID NO: 78119
  derived and/or modified CDS sequence (opt1) from neuraminidase__InfluenzaA__ACF54425

SEQ ID NO: 80487 - RNA, 1410 nt, Artificial Sequence; identical to SEQ ID NO: 78119
  derived and/or modified CDS sequence (opt1) from neuraminidase__InfluenzaA__ACF54436

SEQ ID NO: 80488 - RNA, 1410 nt, Artificial Sequence
  derived and/or modified CDS sequence (opt1) from neuraminidase__InfluenzaA__ACF54447
augaaccccaaccagaagaucaucaccaucggcagcgugucccugaccaucgccacggucugcuuccucaugcagaucgccauccuggugaccaccgugacccugcacuucaagcaguacgagugcgacagcccggcguccaaccaggucaugcccugcgagcccaucaucaucgagcgcaacaucacggagaucguguaccucaacaacaccaccaucgagaaggagaucugccccaagguggucgaguaccggaacuggagcaagccgcagugccagaucaccggguucgcccccuucuccaaggacaacagcauccgccuguccgccggcggggacaucugggugacgcgggagcccuacgugagcugcgaccacggcaagugcuaccaguucgcccuggggcagggcaccacccucgacaacaagcacuccaacgacaccauccacgaccgcaucccccaccggacgcugcugaugaacgagcucggcgucccguuccaccuggggaccaagcaggucugcaucgccuggagcuccagcuccugccacgacggcaaggcguggcugcacgugugcaucaccggggacgacaagaacgccaccgccagcuucaucuacgacggccgccucguggacuccaucgggagcuggucccagaacauccugcggacgcaggagagcgagugcgugugcaucaacgggaccugcaccguggucaugaccgacggcuccgccagcggccgcgcggacacgcggauccuguucaucgaggagggcaagaucgugcacaucagcccccucuccgggagcgcccagcacguggaggagugcuccugcuacccccgcuaccccggcguccggugcaucugccgcgacaacuggaagggcagcaaccggccggugguggacaucaacauggaggacuacuccaucgacagcuccuacgucugcagcgggcuggugggcgacacgccccgcaacgacgaccgguccagcaacuccaacugccgcaaccccaacaacgagcgggggaaccagggcgugaaggggugggccuucgacaacggcgacgacgucuggaugggccgcaccaucagcaaggaccugcgguccggguacgagaccuucaaggugaucggcggguggagcacccccaacuccaagagccagaucaaccgccaggucaucguggacuccgacaaccggagcggcuacuccgggaucuucagcguggagggcaagagcugcaucaaccgcugcuucuacgucgagcucauccgcggccggaagcaggagacccgcgugugguggaccuccaacagcaucguggucuucugcgggaccuccggcacguacgggaccggcagcuggccggacggggccaacaucaacuucaugcccaucuga

SEQ ID NO: 80489 - RNA, 1410 nt, Artificial Sequence
  derived and/or modified CDS sequence (opt1) from neuraminidase__InfluenzaA__ACF54469
augaaccccaaccagaagaucaucaccaucggcagcgugucccugaccaucgccacggucugcuuccucaugcagaucgccauccuggugaccaccgugacccugcacuucaagcaguacgagugcgacagcccggcguccaaccaggucaugcccugcgagcccaucaucaucgagcgcaacaucacggagaucguguaccucaacaacaccaccaucgagaaggagaucugccccaagguggucgaguaccggaacuggagcaagccgcagugccagaucaccggguucgcccccuucuccaaggacaacagcauccgccuguccgccggcggggacaucugggugacgcgggagcccuacgugagcugcgaccacggcaagugcuaccaguucgcccuggggcagggcaccacccucgacaacaagcacuccaacgacaccauccacgaccgcaucccccaccggacgcugcugaugaacgagcucggcgucccguuccaccuggggacccgccaggugugcauggccuggagcuccagcuccugccacgacggcaaggcguggcugcacgugugcaucaccggggacgacaagaacgccaccgccagcuucaucuacgacggccggcucgucgacuccaucgggagcuggucccagaacauccugcgcacgcaggagagcgagugcgugugcaucaacgggaccugcaccguggucaugaccgacggcuccgccagcggccgggcggacacgcgcauccuguucaucgaggagggcaagaucgugcacaucagcccccucuccgggagcgcccagcacguggaggagugcuccugcuacccccgguaccccggcguccgcugcaucugccgggacaacuggaagggcagcaaccgcccggugguggacaucaacauggaggacuacuccaucgacagcuccuacgucugcagcgggcuggugggcgacacgccccggaacgacgaccgcuccagcaacuccaacugccggaaccccaacaacgagcgcgggaaccagggcgugaaggggugggccuucgacaacggcgacgacgucuggaugggccggaccaucagcaaggaccugcgcuccggguacgagaccuucaaggugaucggcggguggagcacccccaacuccaagagccagaucaaccggcaggucaucguggacuccgacaaccgcagcggcuacuccgggaucuucagcguggagggcaagagcugcaucaaccgcugcuucuacgucgagcucauccggggccgcaagcaggagacccgggugugguggaccuccaacagcaucguggucuucugcgggaccuccggcacguacgggaccggcagcuggccggacggggccaacaucaacuucaugcccaucuga

SEQ ID NO: 80490 - RNA, 1410 nt, Artificial Sequence; identical to SEQ ID NO: 79784
  derived and/or modified CDS sequence (opt1) from neuraminidase__InfluenzaA__ACF54480

SEQ ID NO: 80491 - RNA, 1410 nt, Artificial Sequence
  derived and/or modified CDS sequence (opt1) from neuraminidase__InfluenzaA__ACF54502
augaaccccaaccagaagaucaucaccaucggcagcgugucccugaccaucgccacggucugcuuccucaugcagaucgccauccuggcgaccaccgugacccugcacuucaagcagcacgagugcgacagcccggccuccaaccaggugaugcccugcgagcccaucaucaucgagcgcaacaucacggagaucgucuaccucaacaacaccaccaucgagaaggagaucugccccgaggugguggaguaccggaacuggagcaagccgcagugccagaucaccggguucgcccccuucuccaaggacaacagcauccgccuguccgccggcggggacaucugggucacgcgggagcccuacgugagcugcgaccccggcaagugcuaccaguucgcccuggggcagggcaccacccucgacaacaagcacuccaacggcaccauccacgaccgcaucccgcaccggacgcugcugaugaacgagcucggggugagcuuccaccugggcaccaagcaggucugcguggcgugguccagcuccagcugccacgacgggaaggccuggcugcacgugugcgucaccggcgacgaccgcaacgccaccgccuccuucaucuacgacgggcggcucguggacagcaucggcuccuggagccagaacauccugcgcacgcaggaguccgagugcgugugcaucaacgggaccugcaccgucgugaugaccgacggcagcgcgagcggccgggccgacacgcgcauccuguucaucaaggaggggaagaucgugcacaucagcccccucuccggcuccgcccagcacaucgaggagugcagcugcuacccccgguaccccgacguccgcugcaucugccgggacaacuggaagggcuccaaccgcccggugaucgacaucaacauggaggacuacagcaucgacuccagcuacgugugcuccgggcuggucggcgacacgccccggaacgacgacagcuccagcaacuccaacugccgcgaccccaacaacgagcgggggaaccccggcgugaaggggugggccuucgacaacggcgacgacguguggaugggccgcaccaucaacaaggacagccgguccggguacgagaccuucaaggucaucggcggguggagcaccccgaacuccaagagccaggugaaccgccaggucaucguggacaacaacaacugguccggcuacagcgggaucuucagcguggagggcaaguccugcaucaaccggugcuucuacgucgagcugauccgcggccgcccccaggagacccgggugugguggaccagcaacuccaucguggucuucugcgggaccagcggcacguacgggaccggcuccuggcccgacggggccaacaucaacuucaugcccaucuga

SEQ ID NO: 80492 - RNA, 1410 nt, Artificial Sequence; identical to SEQ ID NO: 80491
  derived and/or modified CDS sequence (opt1) from neuraminidase__InfluenzaA__ACF54513

SEQ ID NO: 80493 - RNA, 1410 nt, Artificial Sequence
  derived and/or modified CDS sequence (opt1) from neuraminidase__InfluenzaA__ACF54524
augaaccccaaccagaagaucaucaccaucggcagcgugucccugaccaucgccacggucugcuucuucaugcagaucgccauccucgcgaccaccgugacccugcacuucaagcagcacgagugcgacagcccggccuccaaccaggugaugcccugcgagcccaucaucaucgagcgcaacaucacggagaucgucuaccugaacaacaccaccaucgagaaggagaucugccccgaggugguggaguaccggaacuggagcaagccgcagugccagaucaccggguucgcccccuucuccaaggacaacagcauccgccucuccgccggcggggacaucugggucacgcgggagcccuacgugagcugcgaccccggcaagugcuaccaguucgcccuggggcagggcaccacccuggacaacaagcacuccaacggcaccauccacgaccgcaucccgcaccggacgcuccugaugaacgagcugggggugagcuuccaccucggcaccaagcaggucugcguggcgugguccagcuccagcugccacgacgggaaggccuggcugcacgugugcgucaccggcgacgaccgcaacgccaccgccuccuucaucuacgacgggcggcugguggacagcaucggcuccuggagccagaacauccuccgcacgcaggaguccgagugcgugugcaucaacgggaccugcaccgucgugaugaccgacggcagcgcgagcggccgggccgacacgcgcauccuguucaucaaggaggggaagaucgugcacaucagcccccuguccggcuccgcccagcacaucgaggagugcagcugcuacccccgguaccccgacguccgcugcaucugccgggacaacuggaagggcuccaaccgcccggugaucgacaucaacauggaggacuacagcaucgacuccagcuacgugugcuccgggcucgucggcgacacgccccggaacgacgacagcuccagcaacuccaacugccgcgaccccaacaacgagcgggggaaccccggcgugaaggggugggccuucgacaacggcgacgacguguggaugggccgcaccaucaacaaggacagccgguccggguacgagaccuucaaggucaucggcggguggagcaccccgaacuccaagagccaggugaaccgccaggucaucguggacaacaacaacugguccggcuacagcgggaucuucagcguggagggcaaguccugcaucaaccggugcuucuacgucgagcugauccgcggccgcccccaggagacccgggugugguggaccagcaacuccaucguggucuucugcgggaccagcggcacguacgggaccggcuccuggcccgacggggccaacaucaacuucaugcccaucuga

SEQ ID NO: 80494 - RNA, 1410 nt, Artificial Sequence
  derived and/or modified CDS sequence (opt1) from neuraminidase__InfluenzaA__ACF54535
augaaccccaaccagaagaucaucaccaucggcagcgugucccugaucaucagcaccaucugcuucuucaugcagacggccauccucaucaccaccgucacccugcacuucaagcaguacgaguucaacuccccgcccaacaaccaggugaugcugugcgagcccacgaucaucgagcgcaacaucaccaagaucguguaccucaccaacaccacgaucgagaaggagaucugccccaagcuggccgaguaccggaacuggagcaagccgcagugcgacaucaccggguucgcgcccuucuccaaggacaacagcauccgccuguccgccggcggggacaucugggucacccgggagcccuacgugagcugcgaccccgacaagugcuaccaguucgcccucggccaggggaccacgcugaacaacgugcacuccaacgacaccguccgcgaccggaccccguaccgcacccugcucaugaacgagcugggcgugcccuuccaccugggcacgaagcaggucugcaucgccuggagcuccagcuccugccacgacgggaaggccuggcuccacgugugcaucaccggcgacgacaagaacgcgaccgccagcuucaucuacaacgggcggcugguggacuccaucgugagcugguccaaggagauccugcgcacccaggagagcgagugcgucugcaucaacggcacgugcaccguggugaugaccgacggguccgccagcggcaaggccgacaccaagauccucuucaucgaggagggcaagaucguccacacgagcacccuguccgggagcgcgcagcacguggaggagugcuccugcuacccccgguaccccggcgugcgcugcgucugccgggacaacuggaaggggagcaaccgcccgaucguggacaucaacaucaaggaccacuccaucgugagcuccuacgucugcagcggccuggugggcgacacgccccggaagaacgacuccagcuccagcucccacugccucgaccccaacaacgaggagggcgggcacggggugaagggcugggccuucgacgacgggaacgacgucuggaugggccgcaccaucagcgagaagucccggcugggcuacgagaccuucaaggugaucgagggguggagcaaccccaaguccaagcugcagaucaaccgccaggucaucguggaccggggcaaccgcagcggguacuccggcaucuucagcguggagggcaagagcugcaucaaccggugcuucuacgucgagcucauccgcgggcggaaggaggagaccgaggugcuguggaccuccaacagcaucguggucuucugcggcaccuccgggacguacggcaccgggagcuggccggacggcgccgacaucaaccugaugcccaucuga

SEQ ID NO: 80495 - RNA, 1410 nt, Artificial Sequence; identical to SEQ ID NO: 78308
  derived and/or modified CDS sequence (opt1) from neuraminidase__InfluenzaA__ACF54557

SEQ ID NO: 80496 - RNA, 1410 nt, Artificial Sequence; identical to SEQ ID NO: 79953
  derived and/or modified CDS sequence (opt1) from neuraminidase__InfluenzaA__ACF54568

SEQ ID NO: 80497 - RNA, 1410 nt, Artificial Sequence
  derived and/or modified CDS sequence (opt1) from neuraminidase__InfluenzaA__ACF54579
augaaccccaaccagaagaucaucaccaucggcagcgugucccugaccaucagcacgaucugcuucuucaugcagaucgccauccucaucaccaccgucacccugcacuucaagcaguacgaguucaacuccccgcccaacaaccaggugaugcugugcgagcccacgaucaucgagcgcaacaucaccgagaucguguaccucaccaacaccacgaucgagaaggagaucugccccaagcuggccgaguaccggaacuggagcaagccgcagugcaacaucaccggguucgcgcccuucuccaaggacaacagcauccgccuguccgccggcggggacaucugggucacccgggagcccuacgugagcugcgaccccgacaagugcuaccaguucgcccucggccaggggaccacgcugaacaacgugcacuccaacgacaccguccacgaccgcaccccguaccggacccugcucaugaacgagcugggcgugcccuuccaccugggcacgaagcaggucugcaucgccuggagcuccagcuccugccacgacgggaaggccuggcuccacgugugcgugaccggcgacgacaagaacgcgaccgccagcuucaucuacaacgggcgccugguggacuccaucgucagcugguccaaggagauccugcggacccaggagagcgagugcgugugcaucaacggcacgugcaccguggucaucaccgacggguccgccagcggcaaggccgacaccaagauccucuucaucgaggagggcaagaucgugcacacgagcacccuguccgggagcgcgcagcacguggaggagugcuccugcuacccccgcuaccccggcguccggugcgugugccgcgacaacuggaaggggagcaaccggccgaucguggacaucaacaucaaggacuacuccaucgucagcuccuacgugugcagcggccuggugggcgacacgccccgcaagaacgacuccagcuccagcucccacugccucgaccccaacaacgaggagggcgggcacggggucaagggcugggccuucgacgacgggaacgacguguggaugggccggaccaucagcgagaagcugcgcuccggcuacgagaccuucaaggucaucgagggguggagcaaccccaacuccaagcugcagaucaaccgccaggugaucguggaccggggcaaccggagcggguacuccggcaucuucagcgucgagggcaagagcugcaucaaccgcugcuucuacguggagcucauccgggggcgcaaggaggagaccgaggugcuguggaccuccaacagcaucgucguguucugcggcaccuccgggacguacggcaccgggagcuggccggacggcgccgacaucaaccugaugcccaucuga

SEQ ID NO: 80498 - RNA, 1362 nt, Artificial Sequence
  derived and/or modified CDS sequence (opt1) from neuraminidase__InfluenzaA__ACF54601
augaaccccaaccagaagaucaucaccaucggcagcaucugcaugguggucgggaucaucucccugauccuccagaucggcaacaucaucagcaucuggaucucccacagcauccagaccgggaaccagaaccacacgggcaucugcaaccagggguccaucaccuacaaggugguggccggccaggacagcaccuccgucauccugaccggcaacagcucccugugcccgauccgcgggugggccauccacagcaaggacaacggcauccggaucggguccaagggcgacguguucgugauccgcgagcccuucaucagcugcucccaccucgagugccggacguucuuccugacccagggggcgcugcucaacgacaagcacagccgcggcaccuucaaggaccggucccccuaccgcgcccugaugagcugccccgucggcgaggccccgucccccuacaacagccgguucgaguccguggccuggagcgccagcgcgugccacgacgggaugggcuggcugaccaucgggaucuccggccccgacgacggcgccguggccguccucaaguacaacgggaucaucacggagaccaucaagagcuggcgcaagaacauccugcggacccaggaguccgagugcacgugcgugaacggcagcugcuucaccaucaugaccgacgggcccuccgacggccuggccagcuacaagaucuucaagaucgagaaggggaaggugaccaaguccaucgagcucaacgcgccgaacagccacuacgaggagugcuccugcuaccccgacaccggcaaggucaugugcgugugccgcgacaacuggcacggcagcaaccggcccuggguguccuucgaccagaaccuggacuacaagaucggguacaucugcagcggcgucuucggggacaacccccgcccgaaggacggcacgggguccugcggccccgugagcgccgacggcgccaacggggugaagggcuucuccuacaaguacgggaacggcgucuggaucgggcggaccaagagcgacuccagccgccacggcuucgagaugaucugggaccccaacggcuggaccgagaccgacucccgguucagcaugcgccaggacgugguggccaugacggaccggagcggguacuccggcagcuucguccagcaccccgagcugaccgggcucgacugcaugcgcccgugcuucuggguggagcugauccggggccugcccgaggagaacgccaucuggaccuccggcagcaucaucuccuucugcggggugaacagcgacaccgucgacugguccuggcccgacggcgcggagcuccccuucacgaucgacaaguga

SEQ ID NO: 80499 - RNA, 1350 nt, Artificial Sequence
  derived and/or modified CDS sequence (opt1) from neuraminidase__InfluenzaA__ACG50700
augaaccccaaccagaagaucaucaccaucggcagcaucugcauggugaucgggaucgucucccugaugcuccagaucggcaacaugaucagcaucugggugucccacagcauccagaccgggaaccagcaccaggccgagccgaucuccaacacgaacuuccugaccgagaaggccguggcgagcgucacccuggccggcaacagcccccucugccccaucuccgggugggccgugcacuccaaggacaacagcauccgcaucggcuccaagggcgacguguucgucauccgggagcccuucaucagcugcucccaccuggagugccgcaccuucuuccugacgcagggggcccuccugaacgacaagcacagcaacggcaccgugaaggaccgguccccgcaccgcacccugaugagcugccccgugggggaggcccccucccccuacaacagccgguucgaguccgucgcguggagcgccagcgccugccacgacggcaccuccuggcucacgaucgggaucagcggcccggacaacggcgccguggcggugcugaaguacaacgggaucaucaccgacaccaucaaguccuggcgcaacaacauccugcggacccaggagagcgagugcgccugcgucaacggcuccugcuucacggugaugaccgacgggcccagcaacggccaggccuccuacaagaucuucaagauggagaagggcaagguggucaagagcguggagcucgacgcccccaacuaccacuacgaggagugcuccugcuaccccgacgccagcgaggugaccugcgucugccgcgacaacuggcacggguccaaccggccgugggugagcuucaaccagaaccuggaguaccagaucggcuacaucugcuccgggguguucggcgacaacccccgccccaacgacgggaccggcagcugcggccccgucuccacgaacggggcguacggcgugaagggguucagcuucaaguacggcaacgggguguggaucggccggaccaaguccaccaacagccgcuccggcuucgagaugaucugggacagcaacggguggaccggcacggacagcuccuucagcgucaagcaggacaucguggccaucaccgacugguccggguacagcggcuccuucguccagcacccggagcugaccgggcucgacugcauccggcccugcuucuggguggagcugauccgcggccggcccaaggagagcaccaucuggacguccggcagcuccaucagcuucugcggggugaacuccgacaccgucggcuggagcuggcccgacggggccgagcugccguucaccaucgacaaguga

SEQ ID NO: 80500 - RNA, 1410 nt, Artificial Sequence; identical to SEQ ID NO: 80081
  derived and/or modified CDS sequence (opt1) from neuraminidase__InfluenzaA__ACG70145

SEQ ID NO: 80501 - RNA, 1410 nt, Artificial Sequence; identical to SEQ ID NO: 79908
  derived and/or modified CDS sequence (opt1) from neuraminidase__InfluenzaA__ACG70156

SEQ ID NO: 80502 - RNA, 1410 nt, Artificial Sequence
  derived and/or modified CDS sequence (opt1) from neuraminidase__InfluenzaA__ACG80407
augaaccccaaccagaagaucaucaccaucggcagcgugucccugaccaucagcacgaucugcuucuucaugcagaucgccauccucaucaccaccgucacccugcacuucaagcaguacgaguucaacuccccgcccaacaaccagaugaugcugugcgagcccacgaucaucgagcgcaacaucaccgagaucguguaccucaccaacaccacgaucgagaaggagaucugccccaagcuggccaaguaccggaacuggagcaagccgcagugcgacaucaccggguucgcgcccuucuccaaggacaacagcauccgccuguccgccggcggggacaucugggugacccgggagcccuacgucagcugcgaccccgacaagugcuaccaguucgcccucggccaggggaccacgcugaacaacgugcacuccaacgacaccgcccgcggccggaccccguaccgcacccugcucaugaacgagcugggcgugcccuuccaccuggggacgaagcaggucugcaucgccuggagcuccagcuccugccacgacggcaaggcguggcuccacgugugcaucaccggggacgacaagaacgccaccgccagcuucaucuacaacggccggcugguggacuccgucgugagcugguccaaggagauccugcgcacccaggagagcgagugcgugugcaucaacgggacgugcaccgucgugaugaccgacggcuccgccagcggcgaggcggacaccaagauccucuucaucgaggaggggaagaucgugcacacgagcacccuguccggcagcgcccagcacgucgaggagugcuccugcuacccccgguaccccggggugcgcugcgugugccgggacaacuggaagggcagcaaccgcccgaucgucgacaucaacaucaaggaccacuccaucgugagcuccuacgugugcagcggccuggucggggacacgccccggaagaacgacuccagcuccagcucccacugccucgaccccaacaacgaggagggcgggcacggcgugaaggggugggccuucgacgacggcaacgacguguggaugggccgcaccaucagcgagaagucccggcugggguacgagaccuucaaggucaucgagggcuggagcaaccccaaguccaagcugcagaucaaccgccaggugaucgucgaccgggggaaccgcagcggcuacuccgggaucuucagcguggagggcaagagcugcaucaaccggugcuucuacguggagcucauccgcggccggaaggaggagaccgagguccuguggaccuccaacagcaucgugguguucugcgggaccuccggcacguacgggaccggcagcuggccggacggggccgacaucaaccugaugcccaucuga

SEQ ID NO: 80503 - RNA, 1410 nt, Artificial Sequence
  derived and/or modified CDS sequence (opt1) from neuraminidase__InfluenzaA__ACG80411
auggacagcaacuccaagaucaucaccaucggcagcgugucccugaccaucagcacgaucugcuucuucaugcagaucgccauccucaucaccaccgucacccugcacuucaagcaguacgaguucaacagcccgcccaacaaccagaugaugcugugcgagcccacgaucaucgagcgcaacaucaccgagaucguguaccucaccaacaccacgaucgagaaggagaucugccccaagcuggccgaguaccggaacuggagcaagccccagugcgacaucaccggguucgcgccguucuccaaggacaacagcauccgccuguccgccggcggggacaucugggugacccgggagcccuacgucagcugcgaccccgacaagugcuaccaguucgcccucggccaggggaccacgcugaacaacgugcacuccaacgacaccgccggcggccgcacccccuaccggacccugcucaugaacgagcugggggugccguuccaccugggcacgaagcaggucugcaucgccuggagcuccagcuccugccacgacgggaaggcguggcuccacgugugcaucaccggcgacgacaagaacgccaccgccagcuucaucuacgacgggcgccugguggacggcgucguguccuggagcaaggagauccugcggacccaggaguccgagugcgugugcaucaacggcacgugcaccgucgugaugaccgacgggagcgccagcggcgaggcggacaccaagauccucuucaucgaggaggggaagaucgugcacacguccacccugagcggcuccgcccagcacgucgaggagugcagcugcuacccccgcuaccccggcgugcggugcgugugccgcgacaacuggaagggguccaaccggcccaucgucgacaucaacaucaaggaccacagcaucguguccagcuacgugugcuccggccuggucggggacaccccgcgcaagaacgacagcuccagcuccagccacugccucgaccccaacaacgaggagggcgggcacggcgugaagggcugggccuucgacgacgggaacgacguguggaugggccggaccaucuccgagaagucccgccugggguacgagacguucaaggucaucgagggcugguccaaccccaagagcaagcugcagaucaaccgccaggugaucgucgaccgggggaaccgguccggcuacagcggcaucuucagcguggaggggaaguccugcaucaaccgcugcuucuacguggagcucauccggggccgcaaggaggagaccgagguccuguggaccagcaacuccaucgugguguucugcgggaccagcggcacguacgggaccggcuccuggcccgacggcgccgacaucaaccugaugccgaucuga

SEQ ID NO: 80504 - RNA, 1407 nt, Artificial Sequence
  derived and/or modified CDS sequence (opt1) from neuraminidase__InfluenzaA__ACG80421
augaaccccauccagaagaucaucaccaucggcagcgugucccugaccaucagcacgaucugcuucuucaugcagaucgccauccucaucaccaccgucacccugcacuucaagcaguacgaguucaacuccccgcccaacaaccagaugaugcugugcgagcccacgaucaucgagcgcaacaucaccgagaucguguaccucaccaacaccacgaucgagaaggagaucugccccaagcuggccgaguaccggaacuggagcaagccgcagugcgacaucaccggguucgcgcccuucuccaaggacaacagcauccgccuguccgccggcggggacaucugggugacccgggagcccuacgucagcugcgaccccgacaagugcuaccaguucgcccucggccaggggaccacgcugaacaacgugcacuccgacaccgcccgcgaccggaccccguaccgcacccugcucaugaacgagcugggcgugcccuuccaccugggcacgaagcaggucugcaucgccuggagcuccagcuccugccacgacgggaaggcguggcuccacgugugcaucaccggcgacgacaagaacgccaccgccagcuucaucuacaacgggcggcugguggacuccgucgugagcugguccaaggagauccugcgcacccaggagagcgagugcgugugcaucaacggcacgugcaccgucgugaugaccgacggguccgccagcggcgaggcggacaccaagauccucuucaucgaggagggcaagaucgugcacacgagcacccuguccgggagcgcccagcacgucgaggagugcuccugcuacccccgguaccccggcgugcgcugcgugugccgggacaacuggaaggggagcaaccgcccgaucgucgacaucaacaucaaggaccacuccaucgugagcuccuacgugugcagcggccuggucggcgacacgccccggaagaacgacuccagcuccagcucccacugccucgaccccaacaacgaggagggcgggcacggggugaagggcugggccuucgacgacgggaacgacguguggaugggccgcaccaucagcgagaagucccggcugggcuacgagaccuucaaggucaucgagggguggagcaaccccaaguccaagcugcagaucaaccgccaggugaucgucgaccggggcaaccgcagcggguacuccggcaucuucagcguggagggcaagagcugcaucaaccggugcuucuacguggagcucauccgcgggcggaaggaggagaccgagguccuguggaccuccaacagcaucgugguguucugcggcaccuccgggacguacggcaccgggagcuggccggacggcgccgacaucaaccugaugcccaucuga

SEQ ID NO: 80505 - RNA, 1407 nt, Artificial Sequence
  derived and/or modified CDS sequence (opt1) from neuraminidase__InfluenzaA__ACG80427
auggaccccaacagcaagaucaucaccaucggcuccgugagccugaccaucuccacgaucugcuucuucaugcagaucgccauccucaucaccaccgucacccugcacuucaagcaguacgaguucaacagcccgcccaacaaccagaugaugcugugcgagcccacgaucaucgagcgcaacaucaccgagaucguguaccucaccaacaccacgaucgagaaggagaucugccccaagcuggccgaguaccggaacugguccaagccgcagugcgacaucaccggguucgcgcccuucagcaaggacaacuccauccgccugagcgccggcggggacaucugggugacccgggagcccuacgucuccugcgaccccgacaagugcuaccaguucgcccucggccaggggaccacgcugaacaacgugcacagcgacaccgcccgcgaccggaccccguaccgcacccugcucaugaacgagcugggcgugcccuuccaccugggcacgaagcaggucugcaucgccugguccagcuccagcugccacgacgggaaggcguggcuccacgugugcaucaccggcgacgacaagaacgccaccgccuccuucaucuacaacgggcggcugguggacagcgucguguccuggagcaaggagauccugcgcacccaggaguccgagugcgugugcaucaacggcacgugcaccgucgugaugaccgacgggagcgccagcggcgaggcggacaccaagauccucuucaucgaggagggcaagaucgugcacacguccacccugagcggguccgcccagcacgucgaggagugcagcugcuacccccgguaccccggcgugcgcugcgugugccgggacaacuggaagggguccaaccgcccgaucgucgacaucaacaucaaggaccacagcaucguguccagcuacgugugcuccggccuggucggcgacacgccccggaagaacgacagcuccagcuccagccacugccucgaccccaacaacgaggagggcgggcacggggugaagggcugggccuucgacgacgggaacgacguguggaugggccgcaccaucuccgagaagucccggcugggcuacgagaccuucaaggucaucgagggguggagcaaccccaagagcaagcugcagaucaaccgccaggugaucgucgaccggggcaaccgcuccggguacagcggcaucuucagcguggaggggaaguccugcaucaaccggugcuucuacguggagcucauccgcggccggaaggaggagaccgagguccuguggaccagcaacuccaucgugguguucugcggcaccagcgggacguacggcaccggguccuggccggacggcgccgacaucaaccugaugcccaucuga

SEQ ID NO: 80506 - RNA, 1410 nt, Artificial Sequence
  derived and/or modified CDS sequence (opt1) from neuraminidase__InfluenzaA__ACG80437
augaaccccaaccagaagaucaucaccaucggcagcgugucccugaccaucagcacgaucugcuucuucaugcagaucgccauccucaucaccaccgucacccugcacuucaagcaguacgaguucaacuccagcccgaacaaccaggugaugcugugcgagcccacgaucaucgagcgcaacaucaccgagaucguguaccucaccaacaccacgaucgagaaggagaucugccccaagcuggccgaguaccggaacugguccaagccccagugcgacaucaccggguucgcgccguucagcaaggacaacuccauccgccugagcgccggcggggacaucugggucacccgggagcccuacguguccugcgaccccgacaagugcuaccaguucgcccucggccaggggaccacgcugaacaacgugcacagcaacaacaccguccgcgaccggacccccuaccgcacccugcucaugaacgagcugggcgugccguuccaccugggcacgaagcaggucugcaucgccugguccagcuccagcugccacgacgggaaggccuggcuccacgugugcaucaccggcgacgacaagaacgcgaccgccaacuucaucuacaacgggcggcugguggacuccaucgugagcugguccaaggagaucuuccgcacccaggagagcgagugcgucugcaucaacggcacgugcaccguggugaugaccgacggguccgccagcggcaaggccgacaccaagauccuguucaucgaggagggcaagaucguccacacgagcacccucuccgggagcgcgcagcacguggaggagugcuccugcuacccccgguaccccggcgugcgcugcgucugccgggacaacuggaaggggagcaaccgccccaucguggacaucaacaucaaggaccacuccaucgugagcuccuacgucugcagcggccuggugggcgacaccccgcggaagaacgacuccagcuccagcucccacugccuggaccccaacaacgaggagggcgggcacggggugaagggcugggccuucgacgacgggaacgacgucuggaugggccgcaccaucagcgagaagucccggagcggcuacgagacguucaaggugaucgaggggugguccaaccccaagagcaagcuccagaucaaccgccaggucaucguggaccggggcaaccgcuccggguacagcggcaucuucagcguggaggggaaguccugcaucaaccggugcuucuacgucgagcugauccgcggccggaaggaggagaccgaggugcuguggaccagcaacuccaucguggucuucugcggcaccagcgggacguacggcaccggguccuggcccgacggcgccgacaucaaccucaugccgaucuga

SEQ ID NO: 80507 - RNA, 1407 nt, Artificial Sequence
  derived and/or modified CDS sequence (opt1) from neuraminidase__InfluenzaA__ACG80446
augaaccccaaccagaagaucaucaccaucggcagcgugucccugaccaucagcacgaucugcuucuucaugcagaucgccauccucaucaccaccgucacccugcacuucaagcaguacgaguucaacuccccgcccaacaaccagaugaugcugugcgagcccacgaucaucgagcgcaacaucaccgagaucguguaccucaccaacaccacgaucgagaaggagaucugccccaagcuggccgaguaccggaacuggagcaagccgcagugcgacaucaccggguucgcgcccuucuccaaggacaacagcauccgccuguccgccggcggggacaucugggugacccgggagcccuacgucagcugcgaccccgacaagugcuaccaguucgcccucggccaggggaccacgcugaacaacgugcacuccgacaccgcccgcgaccggaccccguaccgcacccugcucaugaacgagcugggcgugcccuuccaccugggcacgaagcaggucugcaucgccuggagcuccagcuccugccacgacgggaaggcguggcuccacgugugcaucaccggcgacgacaagaacgccaccgccagcuucaucuacaacgggcggcugguggacuccgucgugagcugguccaaggagauccugcgcacccaggagagcgagugcgugugcaucaacggcacgugcaccgucgugaugaccgacggguccgccagcggcgaggcggacaccaagauccucuucaucgaggagggcaagaucgugcacacgagcacccuguccgggagcgcccagcacgucgaggagugcuccugcuacccccgguaccccggcgugcgcugcgugugccgggacaacuggaaggggagcaaccgcccgaucgucgacaucaacaucaaggaccacuccaucgugagcuccuacgugugcagcggccuggucggcgacacgccccggaagaacgacuccagcuccagcucccacugccucgaccccaacaacgaggagggcgggcacggggugaagggcugggccuucgacgacgggaacgacguguggaugggccgcaccaucagcgagaagucccggcugggcuacgagaccuucaaggucaucgagggguggagcaaccccaaguccaagcugcagaucaaccgccaggugaucgucgaccggggcaaccgcagcggguacuccggcaucuucagcguggagggcaagagcugcaucaaccggugcuucuacguggagcucauccgcgggcggaaggaggagaccgagguccuguggaccuccaacagcaucgugguguucugcggcaccuccgggacguacggcaccgggagcuggccggacggcgccgacaucaaccugaugcccaucuga

SEQ ID NO: 80508 - RNA, 1410 nt, Artificial Sequence
  derived and/or modified CDS sequence (opt1) from neuraminidase__InfluenzaA__ACG80455
augaaccccaaccagaagaucaucaccaucggcagcguguccuucaucaucagcuccaucugcuucuucaugcagaucgccauccugaucaccacggucacccuccacuucaagcaguacgaguucaacagcccgcccaacaaccagaugaugcugugcgagcccaccaucaucgagcgcaacaucaccgagaucguguaccugacgaacaccaccaucgagaaggagaucugccccaagcucgccgaguaccggaacugguccaagccgcagugcgacaucaccggguucgcgcccuucagcaaggacaacuccauccgccugagcgccggcggggacaucugggugacgcgggagcccuacgucuccugcgaccccgacaagugcuaccaguucgcccugggccaggggaccacccucaacaacgugcacagcaacgacaccgcccgcggccggacgccguaccgcacccugcugaugaacgagcucggcgugcccuuccaccuggggaccaagcaggucugcaucgccugguccagcuccagcugccacgacggcaaggcguggcugcacgugugcaucaccggggacgacaagaacgccacggccuccuucaucuacgacggccggcucguggacagcgucguguccuggagcaaggagauccugcgcacccaggaguccgagugcgugugcaucaacgggaccugcaccgucgugaugacggacggcagcgccagcggcgaggcggacaccaagauccuguucaucgaggaggggaagaucgugcacaccuccacccucagcggcuccgcccagcacgucgaggagugcagcugcuacccccgguaccccggggugcgcugcgugugccgggacaacuggaagggcuccaaccgcccgaucgucgacaucaacaucaaggaccacagcaucguguccagcuacgugugcuccggccuggucggggacacgccccggaagaacgacagcuccagcuccagccacugccuggaccccaacaacgaggagggcgggcacggcgugaaggggugggccuucgacgacggcaacgacguguggaugggccgcaccaucuccgagaagucccggcucggguacgagaccuucaaggucaucgagggcuggagcaaccccaagagcaagcugcagaucaaccgccaggugaucgucgaccgggggaaccgcuccggcuacagcgggaucuucagcguggagggcaaguccugcaucaaccggugcuucuacguggagcugauccgcggccggaaggaggagaccgagguccucuggacgagcaacuccaucgugguguucugcgggaccagcggcaccuacgggaccggcuccuggccggacggggccgacaucaaccugaugcccaucuga

SEQ ID NO: 80509 - RNA, 1407 nt, Artificial Sequence; identical to SEQ ID NO: 80507
  derived and/or modified CDS sequence (opt1) from neuraminidase__InfluenzaA__ACG80464

SEQ ID NO: 80510 - RNA, 1410 nt, Artificial Sequence
  derived and/or modified CDS sequence (opt1) from neuraminidase__InfluenzaA__ACG80473
auggaccccauccagaagaucaucaccaucggcagcgugucccugaccaucagcacgaucugcuucuucaugcagaucgccauccucaucaccaccgucacccugcacuucaagcaguacgaguucaacuccccgcccaacaaccagaugaugcugugcgagcccacgaucaucgagcgcaacaucaccgagaucguguaccucaccaacaccacgaucgagaaggagaucugccccaagcuggccgaguaccggaacuggagcaagccgcagugcgacaucaccggguucgcgcccuucuccaaggacaacagcauccgccuguccgccggcggggacaucugggugacccgggagcccuacgucagcugcgaccccgacaagugcuaccaguucgcccucggccaggggaccacgcugaacaacgugcacuccaacgacaccgcccgcggccggaccccguaccgcacccugcucaugaacgagcugggcgugcccuuccaccuggggacgaagcaggucugcaucgccuggagcuccagcuccugccacgacggcaaggcguggcuccacgugugcaucaccggggacgacaagaacgccaccgccagcuucaucuacgacggccggcugguggacuccgucgugagcugguccaaggagauccugcgcacccaggagagcgagugcgugugcaucaacgggacgugcaccgucgugaugaccgacggcuccgccagcggcgaggcggacaccaagauccucuucaucgaggaggggaagaucgugcacacgagcacccuguccggcagcgcccagcacgucgaggagugcuccugcuacccccgguaccccggggugcgcugcgugugccgggacaacuggaagggcagcaaccgcccgaucgucgacaucaacaucaaggaccacuccaucgugagcuccuacgugugcagcggccuggucggggacacgccccggaagaacgacuccagcuccagcucccacugccucgaccccaacaacgaggagggcgggcacggcgugaaggggugggccuucgacgacggcaacgacguguggaugggccgcaccaucagcgagaagucccggcugggguacgagaccuucaaggucaucgagggcuggagcaaccccaaguccaagcugcagaucaaccgccaggugaucgucgaccgggggaaccgcagcggcuacuccgggaucuucagcguggagggcaagagcugcaucaaccggugcuucuacguggagcucauccgcggccggaaggaggagaccgagguccuguggaccuccaacagcaucgugguguucugcgggaccuccggcacguacgggaccggcagcuggccggacggggccgacaucaaccugaugcccaucuga

SEQ ID NO: 80511 - RNA, 1410 nt, Artificial Sequence; identical to SEQ ID NO: 78736
  derived and/or modified CDS sequence (opt1) from neuraminidase__InfluenzaA__ACH69559

SEQ ID NO: 80512 - RNA, 1410 nt, Artificial Sequence
  derived and/or modified CDS sequence (opt1) from neuraminidase__InfluenzaA__ACH69570
augaaccccaaccagaagaucaucaccaucggcagcgugucccugaccaucagcacgaucugcuucuucaugcagaucgccauccucaucaccaccgucacccugcacuucaagcaguacgaguucaacuccccgcccaacaaccaggugaugcugugcgagcccacgaucaucgagcgcaacaucaccgagaucguguaccucaccaacaccacgaucgagaaggagaucugccccaagcuggccgaguaccggaacuggagcaagccgcagugcaacaucaccggguucgcgcccuucuccaaggacaacagcauccgccuguccgccggcggggacaucugggucacccgggagcccuacgugagcugcgaccccgacaagugcuaccaguucgcccucggccaggggaccacgcugaacaacgugcacuccaacgacaccguccacgaccgcaccccguaccggacccugcucaugaacgagcugggcgugcccuuccaccugggcacgaagcaggucugcaucgccuggagcuccagcuccugccacgacgggaaggccuggcuccacgugugcgugaccggcgacgacaagaacgcgaccgccagcuucaucuacaacgggcgccugguggacuccaucgucagcugguccaaggagauccugcggacccaggagagcgagugcgugugcaucaacggcacgugcaccguggucaugaccgacggguccgccagcggcaaggccgacaccaagauccucuucaucgaggagggcaagaucgugcacacgagcacccuguccgggagcgcgcagcacguggaggagugcuccugcuacccccgcuaccccggcguccggugcgugugccgcgacaacuggaaggggagcaaccggccgaucguggacaucaacaucaaggacuacuccaucgucagcuccuacgugugcagcggccuggugggcgacacgccccgcaacaacgacuccagcuccagcucccacugccucgaccccaacaacgaggagggcgggcacggggucaagggcugggccuucgacgacgggaacgacguguggaugggccggaccaucagcgagaagcugcgcuccggcuacgagaccuucaaggucaucgagggguggagcaaccccaacuccaagcugcagaucaaccgccaggugaucguggaccggggcaaccggagcggguacuccggcaucuucagcgucgagggcaagagcugcaucaaccgcugcuucuacguggagcucauccgggggcgcaaggaggagaccgaggugcuguggaccuccaacagcaucgucguguucugcggcaccuccgggacguacggcaccgggagcuggccggacggcgccgacaucaaccugaugcccaucuga

SEQ ID NO: 80513 - RNA, 1410 nt, Artificial Sequence; identical to SEQ ID NO: 78736
  derived and/or modified CDS sequence (opt1) from neuraminidase__InfluenzaA__ACH69581

SEQ ID NO: 80514 - RNA, 1410 nt, Artificial Sequence
  derived and/or modified CDS sequence (opt1) from neuraminidase__InfluenzaA__ACH69592
augaaccccaaccagaagaucaucaccaucggcagcgugucccugaccaucgccacgaucugcuuccucaugcagaucgccauccuggucaccaccgugacccugcacuucaagcaguacgagugcaacagcccgcccaacaaccaggugaugcucugcgagcccacgaucaucgagcgcaacaucaccgagaucgucuaccugaccaacaccacgaucgagaaggagaucugccccaagcuggcggaguaccggaacugguccaagccgcagugcaacaucaccggguucgcccccuucagcaaggacaacuccauccgccucagcgccggcggggacaucugggugacccgggagcccuacguguccugcgaccccgacaagugcuaccaguucgcccugggccaggggaccacgcugaacaacggccacagcaacgacaccguccacgaccgcaccccguaccggacccuccugaugaacgagcugggcgugcccuuccaccucgggacgaagcaggucugcaucgccugguccagcuccagcugccacgacggcaaggcguggcugcacgugugcgugaccggggacgacgagaacgccaccgccuccuucaucuacaacggccgccugguggacagcaucggguccuggagcaagaagauccuccggacccaggaguccgagugcgucugcaucaacggcacgugcaccguggugaugaccgacggcagcgccuccgggaaggcggacaccaagauccuguucaucgaggagggcaagaucguccacacgagcccccugagcggguccgcccagcacguggaggagugcagcugcuacccccgcuacccgggcgugcggugcgucugccgcgacaacuggaagggcuccaaccggcccaucguggacaucaacgugaaggacuacagcaucgucuccagcuacgugugcuccgggcucgugggcgacacgccccgcaagaacgacagcuccagcuccagccacugccuggaccccaacaacgaggagggcgggcacggggucaagggcugggccuucgacgacggcaacgacguguggauggggcggaccaucuccgagaagucccgcagcggcuacgagaccuucaaggucaucgagggguggagcaagccgaacuccaagcugcagaucaaccgccaggugaucguggaccggggcaaccggagcggguacuccggcaucuucagcgucgagggcaagagcugcaucaaccagugcuucuacguggagcucauccgcgggcggaagcaggagaccgaggugcuguggaccuccaacagcaucgucguguucugcggcaccuccgggaccuacggcacggggagcuggcccgacggcgccgaccugaaccucaugcccaucuga

SEQ ID NO: 80515 - RNA, 1410 nt, Artificial Sequence
  derived and/or modified CDS sequence (opt1) from neuraminidase__InfluenzaA__ACH69603
augaaccccaaccagaagaucaucaccaucggcagcgugucccugaccaucgccacgaucugcuuccucaugcagaucgucauccuggugaccaccgugacccugcacuucaagcaguacgagugcaacagcccgcccaacaaccaggucaugcucugcgagcccacgaucaucgagcgcaacaucaccgagaucguguaccugaccaacaccacgaucgagaaggagaucugccccaagcuggccgaguaccggaacugguccaagccgcagugcaacaucaccggguucgcgcccuucagcaaggacaacuccauccgccucagcgccggcggggacaucugggugacccgggagcccuacgucuccugcgaccccgacaagugcuaccaguucgcccugggccaggggaccacgcugaacaacggccacagcaacgacaccgugcacgaccgcaccccguaccggacccuccugaugaacgagcugggcgugcccuuccaccucgggacgaagcaggucugcaucgccugguccagcuccagcugccacgacggcaaggccuggcugcacgugugcgugaccggggacgacgagaacgcgaccgccuccuucaucuacaacggccgccuggucgacagcaucggguccuggagcaagaagauccuccggacccaggaguccgagugcgugugcaucaacggcacgugcaccguggucaugaccgacggcagcgccuccgggaaggccgacaccaagauccuguucaucgaggagggcaagaucgugcacacgagcccccugagcggguccgcgcagcacguggaggagugcagcugcuacccccgcuacccgggcguccggugcgugugccgcgacaacuggaagggcuccaaccggcccaucguggacaucaacgucaaggacuacagcaucguguccagcuacgugugcuccgggcucgucggcgacacgccccgcaagaacgacagcuccagcuccagccacugccuggaccccaacaacgaggagggcgggcacggggugaagggcugggccuucgacgacggcaacgacgucuggauggggcggaccaucuccgagaagucccgcagcggcuacgagaccuucaaggugaucgagggguggagcaagccgaacuccaagcugcagaucaaccgccaggugaucgucgaccggggcaaccggagcggguacuccggcaucuucagcguggagggcaagagcugcaucaaccgcugcuucuacguggagcucauccgggggcgcaagcaggagaccgagguccuguggaccuccaacagcaucgugguguucugcggcaccuccgggaccuacggcacggggagcuggcccgacggcgccgaccugaaccucaugcccaucuga

SEQ ID NO: 80516 - RNA, 1410 nt, Artificial Sequence
  derived and/or modified CDS sequence (opt1) from neuraminidase__InfluenzaA__ACH69614
augaaccccaaccagaagaucaucaccaucggcagcgugucccugaccaucgccacgaucugcuuccucaugcagaucgccauccuggucaccaccgugacccugcacuucaagcaguacgagugcaacagcccgcccaacaaccaggugaugcucugcgagcccacgaucaucgagcgcaacaucaccgagaucgucuaccugaccaacaccacgaucgagaaggagaucugccccaagcuggcggaguaccggaacugguccaagccgcagugcaacaucaccggguucgcccccuucagcaaggacaacuccauccgccucagcgccggcggggacaucugggugacccgggagcccuacguguccugcgaccccgacaagugcuaccaguucgcccugggccaggggaccacgcugaacaacggccacagcaacgacaccguccacgaccgcaccccguaccggacccuccugaugaacgagcugggcgugcccuuccaccucgggacgaagcaggucugcaucgccugguccagcuccagcugccacgacggcaaggcguggcugcacgugugcgugaccggggacgacgagaacgccaccgccuccuucaucuacaacggccgccugguggacagcaucggguccuggagcaagaagauccuccggacccaggaguccgagugcgucugcaucaacggcacgugcaccguggugaugaccgacggcagcgccuccgggaaggcggacaccaagauccuguucaucgaggagggcaagaucguccacacgagcccccugagcggguccgcccagcacguggaggagugcagcugcuacccccgcuacccgggcgugcggugcgucugccgcgacaacuggaagggcuccaaccggcccaucguggacaucaacgugaaggacuacagcaucgucuccagcuacgugugcuccgggcucgugggcgacacgccccgcaagaacgacagcuccagcuccagccacugccuggaccccaacaacgaggagggcgggcacggggucaagggcugggccuucgacgacggcaacgacguguggauggggcggaccaucuccgagaagucccgcagcggcuacgagaccuucaaggucaucgagggguggagcaagccgaacuccaagcugcagaucaaccgccaggugaucguggaccggggcaaccggagcggguacuccggcaucuucagcgucgagggcaagagcugcaucaaccgcugcuucuacguggagcucauccgggggcgcaagcaggagaccgaggugcuguggaccuccaacagcaucgucguguucugcggcaccuccgggaccuacggcacggggagcuggcccgacggcgccgaccugaaccucaugcccaucuga

SEQ ID NO: 80517 - RNA, 1413 nt, Artificial Sequence
  derived and/or modified CDS sequence (opt1) from neuraminidase__InfluenzaA__ACI22525
augaaccccaaccagaagaucaucaccaucggcagcaucuccaucgccaucgggaucaucagccugaugcuccagaucggcaacaucaucuccaucugggccagccacuccauccagaccgggagccagaaccacacgggcaucugcaaccagcgcaucaucaccuacgagaacuccaccugggugaacaacaccuacgucaacaucaacaacacgaacgugguggcggagaaggacaagaccagcgucacccuggccgggaacuccagccugugcuccaucagcggcugggccaucuacaccaaggacaacuccauccggaucggcagcaagggggacguguucgugauccgcgagccguucaucuccugcagccaccucgagugccggacguucuuccugacccagggcgcccugcucaacgacaagcacuccaacgggaccgucaaggaccgcagccccuaccgggcccugauguccugcccccugggcgaggcgcccagcccguacaacagcaaguucgaguccguggccuggagcgccuccgccugccacgacgggaugggcuggcucaccaucggcaucagcgggcccgacaacggcgcgguggccguccugaaguacaacgggaucaucacggagaccaucaaguccuggaagaagcgcauccugcggacccaggagagcgagugcgugugcaugaacggcuccugcuucaccaucaugacggacggccccagcaacggggccgccuccuacaagaucuucaagaucgagaagggcaaggugaccaagagcaucgagcucaacgcccccaacuuccacuacgaggagugcuccugcuacccggacaccgggaccgucaugugcgugugccgcgacaacuggcacggcagcaaccggcccuggguguccuucaaccagaaccuggacuaccagaucggguacaucugcagcggcgucuucggcgacaacccccgccccaaggacggggagggcuccugcaacccggugacgguggacggggcggacggcgucaagggguucagcuacaaguacggcaacggcguguggaucgggcggaccaaguccaaccgccugcggaagggcuucgagaugaucugggaccccaacggguggaccaacaccgacagcgacuucuccgugaagcaggacgucguggccaucacggacuggagcggcuacagcggguccuucgugcagcaccccgagcucaccggccuggacugcauccgccccugcuucugggucgagcuggugcggggccucccgcgcgagaacaccaccaucuggacgagcggguccagcaucuccuucugcggcgucaacagcgacaccgccaacugguccuggcccgacggggccgagcugcccuucaccaucgacaaguga

SEQ ID NO: 80518 - RNA, 1413 nt, Artificial Sequence; identical to SEQ ID NO: 80517
  derived and/or modified CDS sequence (opt1) from neuraminidase__InfluenzaA__ACI22526

SEQ ID NO: 80519 - RNA, 1413 nt, Artificial Sequence; identical to SEQ ID NO: 80517
  derived and/or modified CDS sequence (opt1) from neuraminidase__InfluenzaA__ACI22527

SEQ ID NO: 80520 - RNA, 1413 nt, Artificial Sequence; identical to SEQ ID NO: 80517
  derived and/or modified CDS sequence (opt1) from neuraminidase__InfluenzaA__ACI22528

SEQ ID NO: 80521 - RNA, 1413 nt, Artificial Sequence; identical to SEQ ID NO: 80517
  derived and/or modified CDS sequence (opt1) from neuraminidase__InfluenzaA__ACI22529

SEQ ID NO: 80522 - RNA, 1413 nt, Artificial Sequence; identical to SEQ ID NO: 80517
  derived and/or modified CDS sequence (opt1) from neuraminidase__InfluenzaA__ACI22530

SEQ ID NO: 80523 - RNA, 1413 nt, Artificial Sequence
  derived and/or modified CDS sequence (opt1) from neuraminidase__InfluenzaA__ACI22532
augaaccccaaccagaagaucaucaccaucggcagcaucuccaucgccaucgggaucaucagccugaugcuccagaucggcaacaucaucuccaucugggccagccacuccauccagaccgggagccagaaccacacgggcaucugcaaccagcgcaucaucaccuacgagaacuccaccugggugaacaacaccuacgucaacaucaacaacacgaacgugguggcggggaaggacaagaccagcgucacccuggccggcaacuccagccugugcuccaucagcggcugggccaucuacaccaaggacaacuccauccggaucgggagcaagggcgacguguucgugauccgcgagccguucaucuccugcagccaccucgagugccggacguucuuccugacccagggggcccugcucaacgacaagcacuccaacggcaccgucaaggaccgcagccccuaccgggcccugauguccugcccccugggggaggcgcccagcccguacaacagcaaguucgaguccguggccuggagcgccuccgccugccacgacggcaugggcuggcucaccaucgggaucagcggccccgacaacggggcgguggccguccugaaguacaacggcaucaucacggagaccaucaaguccuggaagaagcgcauccugcggacccaggagagcgagugcgugugcaugaacggcuccugcuucaccaucaugacggacgggcccagcaacggcgccgccuccuacaagaucuucaagaucgagaaggggaaggugaccaagagcaucgagcucaacgcccccaacuuccacuacgaggagugcuccugcuacccggacaccggcaccgucaugugcgugugccgcgacaacuggcacgggagcaaccggcccuggguguccuucaaccagaaccuggacuaccagaucggcuacaucugcagcggcgucuucggggacaacccccgccccaaggacggcgagggguccugcaacccggugacgguggacggcgcggacggggucaagggcuucagcuacaaguacggcaacgggguguggaucggccggaccaaguccaaccgccugcggaagggguucgagaugaucugggaccccaacggcuggaccaacaccgacagcgacuucuccgugaagcaggacgucguggccaucacggacuggagcggguacagcggcuccuucgugcagcaccccgagcucaccggccuggacugcauccgccccugcuucugggucgagcuggugcgggggcucccgcgcgagaacaccaccaucuggacgagcggcuccagcaucuccuucugcggggucaacagcgacaccgccaacugguccuggcccgacggcgccgagcugcccuucaccaucgacaaguga

SEQ ID NO: 80524 - RNA, 1413 nt, Artificial Sequence; identical to SEQ ID NO: 80523
  derived and/or modified CDS sequence (opt1) from neuraminidase__InfluenzaA__ACI22533

SEQ ID NO: 80525 - RNA, 1413 nt, Artificial Sequence; identical to SEQ ID NO: 80517
  derived and/or modified CDS sequence (opt1) from neuraminidase__InfluenzaA__ACI22534

SEQ ID NO: 80526 - RNA, 1410 nt, Artificial Sequence
  derived and/or modified CDS sequence (opt1) from neuraminidase__InfluenzaA__ACI25727
augaaccccaaccagaagaucaucaccaucggcagcgugucccugaccaucgccacggucugcuuccucaugcagaucgccauccuggugaccaccgugacccugcacuucaagcagcacgagugcaacagcccggcguccaaccaggucaugcccugcgagcccaucaucaucgagcgcaacaucacggagaucguguaccucaacaacaccaccaucgagaaggagaucugccccaagguggucgaguaccggaacuggagcaagccgcagugccagaucaccggguucgcccccuucuccaaggacaacagcauccgccuguccgccggcggggacaucugggugacgcgggagcccuacgugagcugcgaccccggcaagugcuaccaguucgcccuggggcagggcaccacccucgacaacaagcacuccaacgacaccauccacgaccgcaucccgcaccggacgcugcugaugaacgagcucggcguccccuuccaccuggggacccgccaggugugcaucgccuggagcuccagcuccugccacgacggcaaggcguggcugcacgugugcaucaccggggacgacaagaacgccaccgccagcuucaucuacgacggccggcucgucgacuccaucgggagcuggucccagaacauccugcgcacgcaggagagcgagugcgugugcaucaacgggaccugcaccguggucaugaccgacggcuccgccagcggccgggcggacacgcgcauccuguucaucaaggagggcaagaucgugcacaucagcccccucuccgggagcgcccagcacguggaggagugcuccugcuacccccgguacccgggcguccgcugcaucugccgggacaacuggaagggcagcaaccgccccgugguggacaucaacauggaggacuacuccaucgacagcuccuacgucugcagcgggcuggugggcgacacgccccggaacgacgaccgcuccagcaacuccaacugccggaaccccaacaacgagcgcgggaaccagggcgugaaggggugggccuucgacaacggcgacgacgucuggaugggccggaccaucagcaaggaccugcgcuccggguacgagaccuucaaggugaucggcggguggagcaccccgaacuccaagagccagaucaaccggcaggucaucguggacuccgacaaccgcagcggcuacuccgggaucuucagcguggagggcaagagcugcaucaaccgcugcuucuacgucgagcucauccggggccgcaagcaggagacccgggugugguggaccuccaacagcaucguggucuucugcgggaccuccggcacguacgggaccggcagcuggcccgacggggccaacaucaacuucaugcccaucuga

SEQ ID NO: 80527 - RNA, 1410 nt, Artificial Sequence
  derived and/or modified CDS sequence (opt1) from neuraminidase__InfluenzaA__ACI25749
augaaccccaaccagaagaucaucaccaucggcagcgugucccugaccaucgccacggucugcuuccucaugcagaucgccauccuggugaccaccgugacccugcacuucaagcaguacgagugcgacagcccggcguccaaccaggucaugcccugcgagcccaucaucaucgagcgcaacaucacggagaucguguaccucaacaacaccaccaucgagaaggagaucugccccaagguggucgaguaccggaacuggagcaagccgcagugccagaucaccggguucgcccccuucuccaaggacaacagcauccgccuguccgccggcggggacaucugggugacgcgggagcccuacgugagcugcgaccacggcaagugcuaccaguucgcccuggggcagggcaccacccucgacaacaagcacuccaacgacaccauccacgaccgcaucccccaccggacgcugcugaugaacgagcucggcgucccguuccaccuggggacccgccaggugugcaucgccuggagcuccagcuccugccacgacggcaaggcguggcugcacgugugcaucaccggggacgacaagaacgccaccgccagcuucaucuacgacggccggcucgucgacuccaucgggagcuggucccagaacauccugcgcacgcaggagagcgagugcgugugcaucaacgggaccugcaccguggucaugaccgacggcuccgccagcggccgggcggacacgcgcauccuguucaucgaggagggcaagaucgugcacaucagcccccucuccgggagcgcccagcacguggaggagugcuccugcuacccccgguaccccggcguccgcugcaucugccgggacaacuggaagggcagcaaccgcccggugguggacaucaacauggaggacuacuccaucgacagcuccuacgucugcagcgggcuggugggcgacacgccccggaacgacgaccgcuccagcaacuccaacugccggaaccccaacaacgagcgcgggaaccagggcgugaaggggugggccuucgacaacggcgacgacgucuggaugggccggaccaucagcaaggaccugcgcuccggguacgagaccuucaaggugaucggcggguggagcacccccaacuccaagagccagaucaaccggcaggucaucguggacuccgacaaccgcagcggcuacuccgggaucuucagcguggagggcaagagcugcaucaaccgcugcuucuacgucgagcucauccggggccgcaagcaggagacccgggugugguggaccuccaacagcaucguggucuucugcgggaccuccggcacguacgggaccggcagcuggccggacggggccaacaucaacuucaugcacaucuga

SEQ ID NO: 80528 - RNA, 1410 nt, Artificial Sequence; identical to SEQ ID NO: 80527
  derived and/or modified CDS sequence (opt1) from neuraminidase__InfluenzaA__ACI25760

SEQ ID NO: 80529 - RNA, 1410 nt, Artificial Sequence; identical to SEQ ID NO: 80527
  derived and/or modified CDS sequence (opt1) from neuraminidase__InfluenzaA__ACI25771

SEQ ID NO: 80530 - RNA, 1410 nt, Artificial Sequence; identical to SEQ ID NO: 78119
  derived and/or modified CDS sequence (opt1) from neuraminidase__InfluenzaA__ACI25782

SEQ ID NO: 80531 - RNA, 1410 nt, Artificial Sequence
  derived and/or modified CDS sequence (opt1) from neuraminidase__InfluenzaA__ACI25793
augaaccccaaccagaagaucaucaccaucggcagcgugucccugaccaucgccacggucugcuuccucaugcagaucgccauccuggugaccaccgugacccugcacuucaagcaguacgagugcgacagcccggcguccaaccaggucaugcccugcgagcccaucaucaucgagcgcaacaucacggagaucguguaccucaacaacaccaccaucgagaaggagaucugccccaagguggucgaguaccggaacuggagcaagccgcagugccagaucaccggguucgcccccuucuccaaggacaacagcauccgccuguccgugggcggggacaucugggugacgcgggagcccuacgucagcugcgaccacggcaagugcuaccaguucgcccuggggcagggcaccacccucgacaacaagcacuccaacgacaccauccacgaccgcaucccccaccggacgcugcugaugaacgagcucggcgugccguuccaccuggggacccgccaggugugcaucgccuggagcuccagcuccugccacgacggcaaggccuggcugcacgucugcaucaccggggacgacaagaacgcgaccgccagcuucaucuacgacggccggcucguggacuccaucgggagcuggucccagaacauccugcgcacgcaggagagcgagugcgugugcaucaacgggaccugcaccgucgugaugaccgacggcuccgccagcggccgggccgacacgcgcauccuguucaucgaggagggcaagaucgugcacaucagcccccucuccgggagcgcgcagcacgucgaggagugcuccugcuacccccgguaccccggcgugcgcugcaucugccgggacaacuggaagggcagcaaccgcccgguggucgacaucaacauggaggacuacuccaucgacagcuccuacgugugcagcgggcuggugggcgacacgccccggaacgacgaccgcuccagcaacuccaacugccggaaccccaacaacgagcgcgggaaccagggcgucaaggggugggccuucgacaacggcgacgacguguggaugggccggaccaucagcaaggaccugcgcuccggguacgagaccuucaaggucaucggcggguggagcacccccaacuccaagagccagaucaaccgccaggugaucguggacuccgacaaccggagcggcuacuccgggaucuucagcgucgagggcaagagcugcaucaaccgcugcuucuacguggagcucauccggggccgcaagcaggagacccgggugugguggaccuccaacagcaucgucguguucugcgggaccuccggcacguacgggaccggcagcuggccggacggggccaacaucaacuucaugcccaucuga

SEQ ID NO: 80532 - RNA, 1410 nt, Artificial Sequence
  derived and/or modified CDS sequence (opt1) from neuraminidase__InfluenzaA__ACI25804
augaaccccaaccagaagaucaucaccaucggcagcgugucccugaccaucgccacggucugcuuccucaugcagaucgccauccuggugaccaccgugacccugcacuucaagcaguacgagugcgacagcccggcguccaaccaggucaugcccugcgagcccaucaucaucgagcgcaacaucacggagaucguguaccucaacaacaccaccaucgagaaggagaucugccccaagguggucgaguaccggaacuggagcaagccgcagugccagaucaccggguucgcccccuucuccaaggacaacagcauccgccuguccgccggcggggacaucugggugacgcgggagcccuacgugagcugcgaccacggcaagugcuaccaguucgcccuggggcagggcaccacccucgacaacaagcacuccaacgacaccauccacgaccgcaucccccaccggacgcugcugaugaacgagcucggcgucccguuccaccuggggacccgccaggugugcaucgccuggagcuccagcuccugccacgacggcaaggcguggcugcacgugugcaucaccggggacgacaagaacgccaccgccagcuucaucuacgacggccggcucgucgacuccaucgggagcuggucccagaacauccugcgcacgcaggagagcgagugcgugugcaucaacgggaccugcaccguggucaugaccgacggcuccgccagcggccgggcggacacgcgcauccuguucaucgaggagggcaagaucgugcacaucagcccccucuccgggagcgcccagcacguggaggagugcuccugcuacccccgguaccccggcguccgcugcaucugccgggacaacuggaagggcagcaaccgcccggugguggacaucaacauggaggacuacuccaucgacagcuccuacgucugcagcgggcuggugggcgacacgccccggaacgacgaccgcuccagcaacuccaacugccggaaccccaacaacgagcgcgggaaccagggcgugaaggggugggccuucgacaacggcgacgacgucuggaugggccggaccaucagcaaggaccugcgcuccggguacgagaccuucaaggugaucggcggguggagcacccccaacuccaagagccagaucaaccggcaggucaucguggacuccgaccaccgcagcggcuacuccgggaucuucagcguggagggcaagagcugcaucaaccgcugcuucuacgucgagcucauccggggccgcaagcaggagacccgggugugguggaccuccaacagcaucguggucuucugcgggaccuccggcacguacgggaccggcagcuggccggacggggccaacaucaacuucaugcccaucuga

SEQ ID NO: 80533 - RNA, 1410 nt, Artificial Sequence; identical to SEQ ID NO: 80491
  derived and/or modified CDS sequence (opt1) from neuraminidase__InfluenzaA__ACI26277

SEQ ID NO: 80534 - RNA, 1410 nt, Artificial Sequence; identical to SEQ ID NO: 78351
  derived and/or modified CDS sequence (opt1) from neuraminidase__InfluenzaA__ACI26299

SEQ ID NO: 80535 - RNA, 1410 nt, Artificial Sequence
  derived and/or modified CDS sequence (opt1) from neuraminidase__InfluenzaA__ACI26321
augaaccccaaccagaagaucaucaccaucggcagcgugucccugaccaucagcacgaucugcuucuucaugcagaucgccauccucaucaccaccgucacccugcacuucaagcaguacgaguucaacuccccgcccaacaaccaggugaugcugugcgagcccacgaucaucgagcgcaacaucaccgagaucguguaccucaccaacaccacgaucgagaaggagaucugccccaagcuggccgaguaccggaacuggagcaagccgcagugcgacaucaccggguucgcgcccuucuccaaggacaacagcauccgccuguccgccggcggggacaucugggucacccgggagcccuacgugagcugcgaccccgacaagugcuaccaguucgcccucggccaggggaccacgcugaacaacgugcacuccaacgacaccguccgcgaccggaccccguaccgcacccugcucaugaacgagcugggcgugcccuuccaccugggcacgaagcaggucugcaucgccuggagcuccagcuccugccacgacgggaaggccuggcuccacgugugcaucaccggcgacgacaagaacgcgaccgccagcuucaucuacaacgggcggcugguggacuccaucgugagcugguccaaggagauccugcgcacccaggagagcgagugcgucugcaucaacggcacgugcaccguggugaugaccgacggguccgccagcggcaaggccgacaccaagauccucuucaucgaggagggcaagaucguccacacgagcacccuguccgggagcgcgcagcacguggaggagugcuccugcuacccccgguaccccggcgugcgcugcgucugccgggacaacuggaaggggagcaaccgcccgaucguggacaucaacaucaaggaccacuccaccgugagcuccuacgucugcagcggccuggugggcgacacgccccggaagaacgacuccagcuccagcucccacugccucgaccccaacaacgaggagggcgggcacggggugaagggcugggccuucgacgacgggaacgacgucuggaugggccgcaccaucagcgagaagucccggcugggcuacgagaccuucaaggugaucgagggguggagcaaccccaaguccaagcugcagaucaaccgccaggucaucguggaccggggcaaccgcagcggguacuccggcaucuucagcguggagggcaagagcugcaucaaccggugcuucuacgucgagcucauccgcgggcggaaggaggagaccgaggugcuguggaccuccaacagcaucguggucuucugcggcacguccgggaccuacggcaccgggagcuggccggacggcgccgacaucaaccugaugcccaucuga

SEQ ID NO: 80536 - RNA, 1410 nt, Artificial Sequence
  derived and/or modified CDS sequence (opt1) from neuraminidase__InfluenzaA__ACI26354
augaaccccaaccagaagaucaucaccaucggcagcgugucccugaccaucagcacgaucugcuucuucaugcagaucgccauccucaucaccaccgucacccugcacuucaagcaguacgaguucaacuccccgcccaacaaccaggugaugcugugcgagcccacgaucaucgagcgcaacaucaccgagaucguguaccucaccaacaccacgaucgagaaggagaucugccccaagcuggccgaguaccggaacuggagcaagccgcagugcgacaucaccggguucgcgcccuucuccaaggacaacagcauccgccuguccgccggcggggacaucugggucacccgggagcccuacgugagcugcgaccccgacaagugcuaccaguucgcccucggccaggggaccacgcugaacaacgugcacuccaacgacaccguccgcgaccggaccccguaccgcacccugcucaugaacgagcugggcgugcccuuccaccugggcacgaagcaggucugcaucgccuggagcuccagcuccugccacgacgggaaggccuggcuccacgugugcaucaccggcgacgacaagaacgcgaccgccagcuucaucuacaacgggcggcugguggacuccguggucagcugguccaaggagauccugcgcacccaggagagcgagugcgugugcaucaacggcacgugcaccguggucaugaccgacggguccgccagcggcaaggccgacaccaagauccucuucaucgaggagggcaagaucgugcacacgagcacccuguccgggagcgcgcagcacguggaggagugcuccugcuacccccgguaccccggcguccgcugcgugugccgggacaacuggaaggggagcaaccgcccgaucguggacaucaacaucaaggaccacuccaucgucagcuccuacgugugcagcggccuggugggcgacacgccccggaagaacgacuccagcuccagcucccacugccucgaccccaacaacgaggagggcgggcacggggucaagggcugggccuucgacgacgggaacgacguguggaugggccgcaccaucagcgagaagucccggcugggcuacgagaccuucaaggucaucgagggguggagcaaccccaaguccaagcugcagaucaaccgccaggugaucguggaccggggcaaccgcagcggguacuccggcaucuucagcgucgagggcaagagcugcaucaaccggugcuucuacguggagcucauccgcgggcggaaggaggagaccgaggugcuguggaccuccaacagcaucgucguguucugcggcaccuccgggacguacggcaccgggagcuggccggacggcgccgacaucaaccugaugcccaucuga

SEQ ID NO: 80537 - RNA, 1410 nt, Artificial Sequence
  derived and/or modified CDS sequence (opt1) from neuraminidase__InfluenzaA__ACI26365
augaaccccaaccagaagaucaucaccaucggcagcgugucccugaccaucagcacgaucugcuucuucaugcagaucgccauccucaucaccaccgucacccugcacuucaagcaguacgaguucaacuccccgcccaacaaccaggugaugcugugcgagcccacgaucaucgagcgcaacaucaccgagaucguguaccucaccaacaccacgaucgagaaggagaucugccccaagcuggccgaguaccggaacuggagcaagccgcagugcgacaucaccggguucgcgcccuucuccaaggacaacagcauccgccuguccgccggcggggacaucugggucacccgggagcccuacgugagcugcgaccccgacaagugcuaccaguucgcccucggccaggggaccacgcugaacaacgugcacuccaacgacaccguccgcgaccggaccccguaccgcacccugcucaugaacgagcugggcgugcccuuccaccugggcacgaagcaggucugcaucgccuggagcuccagcuccugccacgacgggaaggccuggcuccacgugugcaucaccggcgacgacaagaacgcgaccgccagcuucaucuacaacgggcggcugguggacuccguggucagcugguccaaggagauccugcgcacccaggagagcgagugcgugugcaucaacggcacgugcaccguggucaugaccgacggguccgccagcggcaaggccgacaccaagauccucuucaucgaggagggcaagaucgugcacacgagcacccugaccggguccgcgcagcacguggaggagugcagcugcuacccccgguaccccggcguccgcugcgugugccgggacaacuggaagggguccaaccgcccgaucguggacaucaacaucaaggaccacagcaucgucuccagcuacgugugcuccggccuggugggcgacacgccccggaagaacgacagcuccagcuccagccacugccucgaccccaacaacgaggaggggguccacggcgugaaggggugggccuucgacgacggcaacgacgucuggauggggcgcaccaucuccgagaagucccggcugggcuacgagaccuucaaggugaucgagggcuggagcaaccccaagagcaagcugcagaucaaccgccaggugaucgucgaccgggggaaccgcuccggcuacagcgggaucuucuccguggagggcaagagcugcaucaaccggugcuucuacguggagcucauccgcgggcggaaggaggagaccgagguccuguggaccagcaacuccaucgugguguucugcggcacgagcggcaccuacgggaccggcuccuggccggacggggccgacaucaaccugaugcccaucuga

SEQ ID NO: 80538 - RNA, 1410 nt, Artificial Sequence; identical to SEQ ID NO: 80536
  derived and/or modified CDS sequence (opt1) from neuraminidase__InfluenzaA__ACI26376

SEQ ID NO: 80539 - RNA, 1410 nt, Artificial Sequence; identical to SEQ ID NO: 80428
  derived and/or modified CDS sequence (opt1) from neuraminidase__InfluenzaA__ACI26387

SEQ ID NO: 80540 - RNA, 1410 nt, Artificial Sequence; identical to SEQ ID NO: 80440
  derived and/or modified CDS sequence (opt1) from neuraminidase__InfluenzaA__ACI26420

SEQ ID NO: 80541 - RNA, 1410 nt, Artificial Sequence; identical to SEQ ID NO: 78351
  derived and/or modified CDS sequence (opt1) from neuraminidase__InfluenzaA__ACI26431

SEQ ID NO: 80542 - RNA, 1413 nt, Artificial Sequence
  derived and/or modified CDS sequence (opt1) from neuraminidase__InfluenzaA__ACI26442
augaaccccaaccagaagaucaucaccaucggcagcaucuccaucgccaucgggaucaucagccugaugcuccagaucggcaacaucaucuccaucugggccagccacuccauccagaccgggagccagaaccacacgggcaucugcaaccagcgcaucaucaccuacgagaacuccaccugggugaaccacaccuacgucaacaucaacaacacgaacgugguggcggggaaggacaagaccagcgucacccuggccggcaacuccagccugugcuccaucagcggcugggccaucuacaccaaggacaacuccauccggaucgggagcaagggcgacguguucgugauccgcgagccguucaucuccugcagccaccucgagugcaagacguucuuccugacccagggggcccugcucaacgacaagcacuccaacggcaccgucaaggaccggagccccuaccgcgcccugauguccugcccccugggggaggcgcccagcccguacaacagcaaguucgaguccguggccuggagcgccuccgccugccacgacggcaugggcuggcucaccaucgggaucagcggccccgacaacggggcgguggccguccugaaguacaacggcaucaucacgggcaccaucaaguccuggaagaagcagauccugcggacccaggagagcgagugcgugugcaugaacggguccugcuucaccaucaugacggacggccccagcaacggggccgccuccuacaagaucuucaagaucgagaagggcaaggugaccaagagcaucgagcucaacgcccccaacuuccacuacgaggagugcuccugcuacccggacaccgggaccgucaugugcgugugccgcgacaacuggcacggcagcaaccggcccuggguguccuucaaccagaaccuggacuaccagaucggcuacaucugcagcggggucuucggcgacaacccccgccccaaggaccgggagggguccugcaacccggugacgaucgacggcgcggacggggugaagggcuucagcuacaaguacggcaacggggucuggaucggccgcaccaaguccaaccggcugcgcaagggguucgagaugaucugggaccccaacggcuggaccaacaccgacagcgacuucuccgugaagcaggacguggucgccaucacggacuggagcggguacagcggcuccuucgugcagcaccccgagcucaccggccuggacugcauccggcccugcuucuggguggagcugguccgcgggcucccgcgggagaacaccaccaucuggacgagcggcuccagcaucuccuucugcggggugaacagcgacaccgccaacugguccuggcccgacggcgccgagcugcccuucaccaucgacaaguga

SEQ ID NO: 80543 - RNA, 1413 nt, Artificial Sequence; identical to SEQ ID NO: 80542
  derived and/or modified CDS sequence (opt1) from neuraminidase__InfluenzaA__ACI26453

SEQ ID NO: 80544 - RNA, 1410 nt, Artificial Sequence
  derived and/or modified CDS sequence (opt1) from neuraminidase__InfluenzaA__ACI26464
augaaccccaaccagaagaucaucaccaucggcagcgugucccugaccaucagcacgaucugcuucuucaugcagaucgccauccucaucgccaccgucacccugcacuucaagcaguacgaguucaacuccccgcccaacaaccaggugaugcugugcgagcccaccaucaucgagcgcaacaucacggagaucguguaccucaccaacaccaccaucgagaaggagaucugccccaagcuggcggaguaccggaacuggagcaagccgcagugcgacaucacgggguucgcccccuucuccaaggacaacagcauccgccuguccgccggcggggacaucugggucacccgggagcccuacgugagcugcgaccccgacaagugcuaccaguucgcccucggccaggggaccacccugaacaacgugcacuccaacgacacgguccgcgaccggaccccguaccgcacccugcucaugaacgagcugggcgugcccuuccaccugggcaccaagcaggucugcaucgccuggagcuccagcuccugccacgacgggaaggcguggcuccacgugugcaucacgggcgacgacaagaacgccaccgccagcuucaucuacaacgggcggcugguggacuccaucgugagcugguccaaggagauccugcgcacccaggagagcgagugcgucugcaucaacgggaccugcacgguggugaugaccgacggguccgccagcggcaaggcggacaccaagauccucuucaucgaggagggcaagaucguccacaccagcacgcuguccgggagcgcccagcacguggaggagugcuccugcuacccccgguaccccggcgugcgcugcgucugccgggacaacuggaaggggagcaaccgcccgaucguggacaucaacaucaaggaccacuccaccgugagcuccuacgucugcagcggccuggugggcgacacgccccggaagaacgacuccagcuccagcucccacugccucgaccccaacaacgaggagggcggccacggggugaagggcugggccuucgacgacgggaacgacgucuggaugggccgcaccaucagcgagaagucccggcugggcuacgagaccuucaaggugaucgagggguggagcaaccccaaguccaagcugcagaucaaccgccaggucaucguggaccggggcaaccgcagcggguacuccggcaucuucagcguggagggcaagagcugcaucaaccggugcuucuacgucgagcucauccgcgggcggaaggaggagaccgaggugcuguggaccuccaacagcaucguggucuucugcggcaccuccgggacguacggcaccgggagcuggccggacggcgccgacaucaaccugaugcccaucuga

SEQ ID NO: 80545 - RNA, 1410 nt, Artificial Sequence; identical to SEQ ID NO: 80535
  derived and/or modified CDS sequence (opt1) from neuraminidase__InfluenzaA__ACI26475

SEQ ID NO: 80546 - RNA, 1410 nt, Artificial Sequence; identical to SEQ ID NO: 80536
  derived and/or modified CDS sequence (opt1) from neuraminidase__InfluenzaA__ACI26486

SEQ ID NO: 80547 - RNA, 1410 nt, Artificial Sequence; identical to SEQ ID NO: 80536
  derived and/or modified CDS sequence (opt1) from neuraminidase__InfluenzaA__ACI26497

SEQ ID NO: 80548 - RNA, 1410 nt, Artificial Sequence; identical to SEQ ID NO: 80536
  derived and/or modified CDS sequence (opt1) from neuraminidase__InfluenzaA__ACI26508

SEQ ID NO: 80549 - RNA, 1410 nt, Artificial Sequence
  derived and/or modified CDS sequence (opt1) from neuraminidase__InfluenzaA__ACI26519
augaaccccaaccagaagaucaucaccaucggcagcgugucccugaccaucagcacgaucugcuucuucaugcagaucgccauccucaucaccaccgucacccugcacuucaagcaguacgaguucaacuccccgcccaacaaccaggugaugcugugcgagcccacgaucaucgagcgcaacaucaccgagaucguguaccucaccaacaccacgaucgagaaggagaucugccccaagcuggccgaguaccggaacuggagcaagccgcagugcgacaucaccggguucgcgcccuucuccaaggacaacagcauccgccuguccgccggcggggacaucugggucacccgggagcccuacgugagcugcgaccccgacaagugcuaccaguucgcccucggccaggggaccacgcugaacaacgugcacuccaacgacaccguccgcgaccggaccccguaccgcacccugcucaugaacgagcugggcgugcccuuccaccugggcacgaagcaggucugcaucgccuggagcuccagcuccugccacgacgggaaggccuggcuccacgugugcaucaccggcgacgacaagaacgcgaccgccagcuucaucuacaacgggcggcugguggacuccguggucagcugguccaaggagauccugcgcacccaggagagcgagugcgugugcaucaacggcacgugcaccguggucaugaccgacggguccgccagcggcaaggccgacaccaagauccucuucaucgaggagggcaagaucgugcacacgagcacccuguccgggagcgcgcagcacguggaggagugcuccugcuacccccgguaccccggcguccgcugcgugugccgggacaacuggaaggggagcaaccgcccgaucguggacaucaacaucaaggaccacuccaucgucagcuccuacgugugcagcggccuggugggcgacacgccccggaagaacgacuccagcuccagcucccacugccucgaccccaacaacgaggagggcgggcacggggucaagggcugggccuucgacgacgggaacgacguguggaugggccgcaccaucagcgagaagucccggcugggcuacgagaccuucaaggucaucgagggguggagcaaccccaaguccaagcugcagaucaaccgccaggugaucguggaccggggcaaccgcagcggguacuccggcaucuucagcgucgagggcaagagcugcaucaaccggugcuucuacguggagcucauccgcgggcggaaggaggagaccgaggugcuguggaccuccaacagcaucgucguguucugcggcaccuccgggacguacggcaccgggagcuggccggacggcgccaacaucaaccugaugcccaucuga

SEQ ID NO: 80550 - RNA, 1410 nt, Artificial Sequence; identical to SEQ ID NO: 80536
  derived and/or modified CDS sequence (opt1) from neuraminidase__InfluenzaA__ACI26530

SEQ ID NO: 80551 - RNA, 1410 nt, Artificial Sequence; identical to SEQ ID NO: 80536
  derived and/or modified CDS sequence (opt1) from neuraminidase__InfluenzaA__ACI26541

SEQ ID NO: 80552 - RNA, 1410 nt, Artificial Sequence
  derived and/or modified CDS sequence (opt1) from neuraminidase__InfluenzaA__ACI26552
augaaccccaaccagaagaucaucaccaucggcagcgugucccugaccaucgccacgaugugcuuccucaugcagaucgccauccuggucaccaccgugacccugcacuucaagcaguacgagugcagcuccccgcccaacaaccaggugaugcccugcgagcccacgaucaucgagcgcaacaucaccgagaucgucuaccucaccaacaccacgaucgagaaggagaucugcccgaagcugguggaguaccggaacuggagcaagccccagugcaagaucaccggguucgcgcccuucuccaaggacaacagcauccgccuguccgccggcggggacaucugggugacccgggagcccuacgucagcugcgacccgggcaagugcuaccaguucgcccucgggcagggcaccacgcugaacaaccgccacuccaacgacaccgugcacgaccggacccccuaccgcacccugcucaugaacgagcugggcgugcccuuccaccuggggacgaagcaggucugcaucgccuggagcuccagcuccugccacgacggcaaggccuggcuccacgugugcgugaccgggcacgacaagaacgcgaccgccagcuucaucuacgacggccggcuggucgacuccaucgggagcugguccaagaacauccugcgcacccaggagagcgagugcgugugcaucaacggcacgugcaccguggucaugaccgacggcuccgccagcgagcgggccgacaccaagauccucuucaucgaggaggggaagaucgugcacaucagcccccuguccggcagcgcgcagcacguggaggagugcuccugcuacccgcgcuaccccgggguccggugcgugugccgcgacaacuggaagggcagcaaccggcccaucguggacaucaacgucaaggacuacuccaucgugagcuccuacgugugcagcggccuggucggggacacgccccgcaagaacgaccgguccagcuccagcuacugccgcaacccgaacaacgagaagggcucccacggggugaagggcugggccuucgacgacgggaacgacgucuggaugggccggaccaucagcgaggagcuccgcuccggcuacgagaccuucaaggugaucgggggcuggagcacccccaacuccaagcugcagaucaaccgccaggugaucgucgacagcgggaaccgguccggcuacagcgggaucuucagcguggagggcaaguccugcaucaaccggugcuucuacguggagcugauccgcggccgcgagcaggagacgcgggucugguggaccagcaacuccaucgugguguucugcgggaccagcggcaccuacgggacgggcuccuggcccgacggggccgacaucaaccucaugcccaucuga

SEQ ID NO: 80553 - RNA, 1410 nt, Artificial Sequence
  derived and/or modified CDS sequence (opt1) from neuraminidase__InfluenzaA__ACI26574
augaaccccaaccagaagaucaucaccaucggcagcgugucccugacccucgccacgaucugcuuccugaugcagaucgccauccuggucaccaccgugacccuccacuucaagcaguacgagugcagcuccccgcccaacaaccaggugaugcccugcgagcccacgaucaucgagcgcaacaucaccgagaucgucuaccugaccaacaucaccaucgagaaggagaucugcccgaagcugguggaguaccggaacuggagcaagccccagugcaagaucacgggguucgcgcccuucuccaaggacaacagcauccgccucuccgccggcggggacaucugggugacccgggagcccuacgucagcugcgacccguccaagugcuaccaguucgcccugggccaggggaccacccugaacaaccgccacagcaacgacacggugcacgaccggacccccuaccgcacccuccugaugaacgagcugggcgugcccuuccaccucggcacccggcaggucugcauggccugguccagcuccagcugccacgacgggaaggccuggcugcacgugugcgugacgggccacgacgagaacgcgaccgccuccuucaucuacgacgggcgccuggucgacagcaucggcuccuggagcaagaacauccuccggacccaggaguccgagugcgugugcaucaacgggaccugcacgguggucaugaccgacggcagcgccagcgagcgcgccgacaccaagauccuguucaucgaggagggcaagaucgugcacaucagcccccuguccggguccgcgcagcacguggaggagugcagcugcuacccgcgguaccccggcguccgcugcgugugccgggacaacuggaagggguccaaccgccccaucguggacaucaacgucaaggacuacagcaucguguccagcuacgugugcuccggccucgucggcgacacgccccggaagaacgaccgcagcuccagcuccuacugccggaacccgaacaacgagaaggggagccacggcgugaaggggugggccuucgacgacggcaacgacgucuggauggggcgcaccaucggcgaggagcugcgguccggcuacgagaccuucaaggugaucgggggcuggagcacccccaacuccaagcugcagaucaaccgccaggugaucgucgacagcgggaaccgguccggcuacagcgggaucuucagcguggagggcaaguccugcaucaaccgcugcuucuacguggagcucauccgcggccggaagcaggagacccgcgucugguggacgagcaacuccaucgugguguucugcgggaccagcggcaccuacgggaccggcuccuggcccgacggggccgacaucaaccugaugcccaucuga

SEQ ID NO: 80554 - RNA, 1410 nt, Artificial Sequence
  derived and/or modified CDS sequence (opt1) from neuraminidase__InfluenzaA__ACI26585
augaaccccaaccagaagaucaucaccaucggcagcgugucccugaccaucgccacgaucugcuuccucaugcagaucgccauccuggucaccaccgugacccugcacuucaagcagcacgagugcaacagcccgcccaacaaccaggugaugcccugcgagcccacgaucaucgagcgcaacaucaccgagaucgucuaccucaccaacaccacgaucgagaaggagaucugcccgaagcugguggaguaccggaacugguccaagccccagugcaagaucaccggguucgcgcccuucagcaaggacaacuccauccgccugagcgccggcggggacaucugggugacccgggagcccuacgucuccugcgacccgggcaagugcuaccaguucgcccucgggcagggcaccacgcugaacaaccgccacagcaacgacaccgugcacgaccggacccccuaccgcacccugcucaugaacgagcugggcgugcccuuccaccuggggacgaagcaggucugcaucgccugguccagcuccagcugccacgacggcaaggccuggcuccacgugugcgugaccgggcacgacgagaacgcgaccgccuccuucaucuacgacggccggcuggucgacagcaucguguccuggagcaagaacgugcugcgcacccaggaguccgagugcgucugcaucaacgggacgugcaccguggugaugaccgacggcagcgccuccgagcgggccgacaccaagauccucuucaucgaggagggcaagaucguccacaucagcccccugagcggguccgcgcagcacguggaggagugcagcugcuacccgcgcuaccccggcgugcggugcgucugccgcgacaacuggaagggguccaaccggcccaucguggacaucaacgugaaggacuacagcaucgucuccagcuacgugugcuccggccuggucggcgacacgccccgcaagaacgacagcuccagcuccagcuacugccggaacccgaacaacgagaaggggucccacggcgugaaggggugggccuucgacgacggcaacgacguguggauggggcgcaccaucggcgaggagcuccggagcggcuacgagaccuucaaggucaucgggggcugguccacccccaacagcaagcugcagacgaaccgccaggugaucguggaccgggggaaccgcuccggcuacagcgggaucuucuccgucgagggcaagagcugcaucaaccggugcuucuacguggagcugauccgcggccgcaagcaggagaccaaggugugguggaccagcaacuccaucgucguguucugcgggaccagcggcacguacgggaccggcuccuggcccgacggggccgacaucaaccucaugcccaucuga

SEQ ID NO: 80555 - RNA, 1413 nt, Artificial Sequence
  derived and/or modified CDS sequence (opt1) from neuraminidase__InfluenzaA__ACI32764
augaaccccaaccagaagaucaucaccaucggcagcaucuccauggccaucgggaucaucagccugaugcuccagaucggcaacaucaucuccaucugggccagccacuccauccagaccgggagccagaaccacacgggcaucugcaaccagcgcaucaucaccuacgagaacuccaccugggugaaccacaccuacgucaacaucaacaacacgaacgugguggcggggaaggacaagaccagcgucacccuggccggcaacuccagccugugcuccaucagcggcugggccaucuacaccaaggacaacuccauccggaucgggagcaagggcgacguguucgugauccgcgagccguucaucuccugcagccaccucgagugccggacguucuuccugacccagggggcccugcucaacgacaagcacuccaacggcaccgucaaggaccgcagccccuaccgggcccugauguccugcccccugggggaggcgcccagcccguacaacagcaaguucgaguccguggccuggagcgccuccgccugccacgacggcaugggcuggcucaccaucgggaucagcggccccgacaacggggcgguggccguccugaaguacaacggcaucaucacggagaccaucaaguccuggaagaagcgcauccugcggacccaggagagcgagugcgugugcgugaacggcuccugcuucaccaucaugacggacgggcccagcaacggcgccgccuccuacaagaucuucaagaucgagaaggggaaggucaccaagagcaucgagcucaacgcccccaacuuccacuacgaggagugcuccugcuacccggacaccggcaccgugaugugcgugugccgcgacaacuggcacgggagcaaccggcccugggucuccuucaaccagaaccuggacuaccagaucggcuacaucugcagcggcguguucggggacaacccccgccccaaggacggcaagggguccugcaacccggugacggucgacggcgcggacggggugaagggcuucagcuacaaguacggcaacgggguguggaucggccggaccaaguccaaccgccugcggaagggguucgagaugaucugggaccccaacggcuggaccgacaccgacagcgacuucuccgucaagcaggacgugguggccaucacggacuggagcggguacagcggcuccuucguccagcaccccgagcucaccggccuggacugcauccgccccugcuucuggguggagcugguccgggggcucccgcgcgagaacaccaccaucuggacgagcggcuccagcaucuccuucugcgggguggacagcgacaccgccaacugguccuggcccgacggcgccgagcugcccuucaccaucgacaaguga

SEQ ID NO: 80556 - RNA, 1413 nt, Artificial Sequence
  derived and/or modified CDS sequence (opt1) from neuraminidase__InfluenzaA__ACI32765
augaaccccaaccagaagaucaucaccaucggcagcaucuccaucgccaucgggaucaucagccugaugcuccagaucggcaacaucaucuccaucugggccagccacuccauccagaccgggagccagaaccacacgggcaucugcaaccagcgcaucaucaccuacgagaacaacaccugggugaaccacaccuacgucaacaucaacaacacgaacgugguggcgcggaaggacaagaccuccgucacccuggccgggaacagcucccugugcagcaucuccggcugggccaucuacaccaaggacaacagcauccgcaucggcuccaagggggacguguucgugauccgggagccguucaucagcugcucccaccucgagugccgcacguucuucaugacccagggcgcccugcugaacgacaagcacagcaacgggaccgucaaggaccggucccccuaccgcgcccucaugagcugcccccugggcgaggcgcccuccccguacaacagcaaguucgagagcguggccugguccgccagcgccugccacgacgggaugggcuggcugaccaucggcaucuccgggcccgacaacggcgcgguggccguccucaaguacaacgggaucaucacggagaccaucaagagcuggaagaagcggauccugcgcacccaggaguccgagugcgugugcgugaacggcagcugcuucaccaucaugacggacggccccuccaacggggccgccagcuacaagaucuucaagaucgagaagggcaaggucaccaaguccguggagcugaacgcccccaacuuccacuacgaggagugcagcugcuacccggacaccgggaccgugaugugcgucugccgggacaacuggcacggcuccaaccgccccugggugagcuucaaccagaaccucgacuaccagaucggguacaucugcuccggcguguucggcgacaacccccggcccaaggacgggaagggcagcugcaacccggucacgguggacggggcggacggcgugaagggguucuccuacaaguacggcaacggcgucuggaucgggcgcaccaagagcaaccggcugcgcaagggcuucgagaugaucugggaccccaacggguggaccgacaccgacuccgacuucagcgugaagcaggacguggucgccaucacggacugguccggcuacagcgggagcuucgugcagcaccccgagcugaccggccucgacugcauccggcccugcuucugggucgagcuggugcgcggccugccgcgggagaacaccaccaucuggacguccgggagcuccaucagcuucugcggcguggacuccgacaccgccaacuggagcuggcccgacggggccgagcuccccuucaccaucgacaaguga

SEQ ID NO: 80557 - RNA, 1413 nt, Artificial Sequence; identical to SEQ ID NO: 78410
  derived and/or modified CDS sequence (opt1) from neuraminidase__InfluenzaA__ACI32766

SEQ ID NO: 80558 - RNA, 1413 nt, Artificial Sequence
  derived and/or modified CDS sequence (opt1) from neuraminidase__InfluenzaA__ACI32767
augaaccccaaccagaagaucaucaccaucggcagcaucuccaucgccaucgggaucaucagccugaugcuccagaucggcaacaucaucuccaucugggccagccacuccacccagacggggagccagaaccacaccggcaucugcaaccagcgcaucaucaccuacgagaacuccaccugggugaaccacacguacgucaacaucaacaacaccaacgugguggcggggaaggacaagaccagcgucacccuggccggcaacuccagccugugcuccaucagcggcugggccaucuacacgaaggacaacuccgugcggaucgggagcaagggcgacguguucgucauccgcgagccguucaucuccugcagccaccucgagugccggaccuucuuccugacccagggggcccugcucaacgacaagcacuccaacggcaccgugaaggaccgcagccccuaccgggcccugauguccugcccccugggggaggcgcccagcccguacaacagcaaguucgaguccguggccuggagcgccuccgccugccacgacggcaugggcuggcucacgaucgggaucagcggccccgacaacggggcggucgccgugcugaaguacaacggcaucaucaccgagaccaucaaguccuggaagaagcgcauccugcggacccaggagagcgagugcgugugcgucaacggcuccugcuucacgaucaugaccgacgggcccagcaacggcgccgccuccuacaagaucuucaagaucgagaaggggaaggugaccaagagcaucgagcucaacgcccccaacuuccacuacgaggagugcuccugcuacccggacaccggcacggugaugugcgucugccgcgacaacuggcacgggagcaaccggcccuggguguccuucaaccagaaccuggacuaccagaucggcuacaucugcagcggcguguucggggacaacccccgccccaaggacggcaagggguccugcaacccggucaccguggacggcgcggacggggugaagggcuucagcuacaaguacggcaacggggucuggaucggccggaccaaguccaaccgccugcggaagggguucgagaugaucugggaccccaacggcuggaccgacacggacagcgacuucuccgugaagcaggacguggucgccaucaccgacuggagcggguacagcggcuccuucgugcagcaccccgagcucaccggccuggacugcauccgccccugcuucugggucgagcuggugcgggggcucccgcgcgagaacaccacgaucuggaccagcggcuccagcaucuccuucugcgggguggacagcgacaccgccaacugguccuggcccgacggcgccgagcugcccuucaccaucgacaaguga

SEQ ID NO: 80559 - RNA, 1413 nt, Artificial Sequence
  derived and/or modified CDS sequence (opt1) from neuraminidase__InfluenzaA__ACI32768
augaaccccaaccagaagaucaucaccaucggcagcaucuccaucgccaucgggaucaucagccugaugucccagaucggcaacaucaucagcaucugggccucccacagcauccagaccgggucccagaaccacacgggcaucugcaaccagcgcaucaucaccuacgagaacagcaccugggugaaccacaccuacgucaacaucaacaacacgaacgugguggcggggaaggacaagaccuccgucacccucgccggcaacagcucccugugcagcaucuccggcugggccaucuacaccaaggacaacagcauccggaucggguccaagggcgacguguucgugauccgcgagccguucaucagcugcucccaccuggagugccggacguucuuccucacccagggggcccugcugaacgacaagcacagcaacggcaccgucaaggaccgcucccccuaccgggcccucaugagcugcccccugggggaggcgcccagcccguacaacuccaaguucgagagcguggccugguccgccagcgccugccacgacggcaugggcuggcugaccaucgggaucuccggccccgacaacggggcgguggccguccucaaguacaacggcaucaucacggagaccaucaagagcuggaagaagcgcauccugcggacccaggaguccgagugcgugugcgugaacggcagcugcuucaccaucaugacggacgggcccuccaacggcgccgccagcuacaagaucuucaagaucgagaaggggaaggucaccaaguccaucgagcugaacgcccccaacuuccacuacgaggagugcagcugcuacccggacaccggcaccgugaugugcgugugccgcgacaacuggcacggguccaaccggcccugggucagcuucaaccagaaccucgacuaccagaucggcuacaucugcuccggcguguucggggacaacccccgccccaaggacggcaaggggagcugcaacccggugacggucgacggcgcggacggggugaagggcuucuccuacaaguacggcaacgggguguggaucggccggaccaagagcaaccgccugcggaagggguucgagaugaucugggaccccaacggcuggaccgacaccgacuccgacuucagcgucaagcaggacgugguggccaucacggacuggagcggguacuccggcagcuucguccagcaccccgagcugaccggccucgacugcauccgccccugcuucuggguggagcugguccgggggcugccgcgcgagaacaccaccaucuggacguccggcagcuccaucagcuucugcgggguggacuccgacaccgccaacuggagcuggcccgacggcgccgagcuccccuucaccaucgacaaguga

SEQ ID NO: 80560 - RNA, 1413 nt, Artificial Sequence
  derived and/or modified CDS sequence (opt1) from neuraminidase__InfluenzaA__ACI32769
augaaccccaaccagaagaucaucaccaucggcagcaucuccaucgccaucgggaucaucagccugaugcuccagaucggcaacaucaucuccaucugggccagccacuccauccagaccgggagccagaaccacacgggcaucugcaaccagcgcaucaucaccuacgagaacuccaccugggugaaccacaccuacgucaacaucaacaacacgaacgugguggcggggaaggacaagaucagcgucacccuggccggcaacuccagccugugcuccaucagcggcugggccaucuacaccaaggacaacuccauccggaucgggagcaagggcgacguguucgugauccgcgagccguucaucuccugcagccaccucgagugccggaccuucuuccugacgcagggggcccugcucaacgacaagcacuccaacggcaccgucaaggaccgcagccccuaccgggcccugauguccugcccccugggggaggcgcccagcccguacaacagcaaguucgaguccguggccuggagcgccuccgccugccacgacggcaugggcuggcucaccaucgggaucagcggccccgacaacggggcgguggccguccugaaguacaacggcaucaucaccgagacgaucaaguccuggaagaagcgcauccugcggacccaggagagcgagugcgugugcgugaacggcuccugcuucaccaucaugaccgacgggcccagcaacggcgccgccuccuacaagaucuucaagaucgagaaggggaaggucaccaagagcaucgagcucaacgcccccaacuuccacuacgaggagugcuccugcuacccggacacgggcaccgugaugugcgugugccgcgacaacuggcacgggagcaaccggcccugggucuccuucaaccagaaccuggacuaccagaucggcuacaucugcagcggcguguucggggacaacccccgccccaaggacggcaagggguccugcaacccggugaccgucgacggcgcggacggggugaagggcuucagcuacaaguacggcaacgggguguggaucggccggacgaaguccaaccgccugcggaagggguucgagaugaucugggaccccaacggcuggaccgacaccgacagcgacuucuccgucaagcaggacgugguggccaucaccgacuggagcggguacagcggcuccuucguccagcaccccgagcucacgggccuggacugcauccgccccugcuucuggguggagcugguccgggggcucccgcgcgagaacaccaccaucuggaccagcggcuccagcaucuccuucugcgggguggacagcgacacggccaacugguccuggcccgacggcgccgagcugcccuucaccaucgacaaguga

SEQ ID NO: 80561 - RNA, 1413 nt, Artificial Sequence; identical to SEQ ID NO: 78410
  derived and/or modified CDS sequence (opt1) from neuraminidase__InfluenzaA__ACI32770

SEQ ID NO: 80562 - RNA, 1413 nt, Artificial Sequence
  derived and/or modified CDS sequence (opt1) from neuraminidase__InfluenzaA__ACI32771
augaaccccaaccagaagaucaucaccaucggcagcaucuccaucgccaucgggaucaucagccugaugcuccagaucggcaacaucaucuccaucugggccagccacuccauccagaccgggagccagaaccacacgggcaucugcaaccagcgcaucaucaccuacaagaacuccaccugggugaaccacaccuacgucaacaucaacaacacgaacgugguggcggggaagggcaagaccagcgucacccuggccggcaacuccagccugugcuccaucagcgggugggccaucuacaccaaggacaacuccauccggaucggcagcaagggggacguguucgugauccgcgagccguucaucuccugcagccaccucgagugccggacguucuuccugacccagggcgcccugcucaacgacaagcacuccaacgggaccgucaaggaccgcagccccuaccgggcccugauguccugcccccugggcgaggcgcccagcccguacaacagcaaguucgaguccguggccuggagcgccuccgccugccacgacggcaugggguggcucaccaucggcaucagcgggcccgacaacggcgcgguggccguccugaaguacaacggcaucaucacggagaccaucaaguccuggaagaagcgcauccugcggacccaggagagcgagugcgugugcgugaacggguccugcuucaccaucaugacggacggccccagcaacggggccgccuccuacaagaucuucaagaucgagaagggcaaggucaccaagagcaucgagcucaacgcccccaacuuccacuacgaggagugcuccugcuacccggacaccgggaccgugaugugcgugugccgcgacaacuggcacggcagcaaccggcccugggucuccuucaaccagaaccuggacuaccagaucggcuacaucugcagcgggguguucggcgacaacccccgccccaaggacgggaagggcuccugcaacccggugacggucgacggggcggacggcgugaagggcuucagcuacaaguacgggaacggcguguggaucgggcggaccaaguccaaccgccugcggaagggcuucgagaugaucugggaccccaacggguggaccgacaccgacagcgacuucuccgucaagcaggacgugguggccaucacggacuggagcggcuacagcggcuccuucguccagcaccccgagcucaccgggcuggacugcauccgccccugcuucuggguggagcugguccggggccucccgcgcgagaacaccaccaucuggacgagcggguccagcaucuccuucugcggcguggacagcgacaccgccaacugguccuggcccgacggcgccgagcugcccuucaccaucgacaaguga

SEQ ID NO: 80563 - RNA, 1413 nt, Artificial Sequence; identical to SEQ ID NO: 78410
  derived and/or modified CDS sequence (opt1) from neuraminidase__InfluenzaA__ACI32772

SEQ ID NO: 80564 - RNA, 1413 nt, Artificial Sequence; identical to SEQ ID NO: 78410
  derived and/or modified CDS sequence (opt1) from neuraminidase__InfluenzaA__ACI32773

SEQ ID NO: 80565 - RNA, 1413 nt, Artificial Sequence; identical to SEQ ID NO: 78410
  derived and/or modified CDS sequence (opt1) from neuraminidase__InfluenzaA__ACI32774

SEQ ID NO: 80566 - RNA, 1413 nt, Artificial Sequence; identical to SEQ ID NO: 78410
  derived and/or modified CDS sequence (opt1) from neuraminidase__InfluenzaA__ACI32775

SEQ ID NO: 80567 - RNA, 1413 nt, Artificial Sequence
  derived and/or modified CDS sequence (opt1) from neuraminidase__InfluenzaA__ACI32776
augaaccccaaccagaagaucaucaccaucggcagcaucuccaucgccaucgggaucaucagccugaugcuccagaucggcaacaucaucuccaucugggccagccacuccauccagaccgggagccagaaccacacgggcaucugcaaccagcgcaucaucaccuacaagaacuccaccugggugaaccacaccuacgucaacaucaacaacacgaacgugguggcggggaaggacaagaccagcgucacccuggccggcaacuccagccugugcuccaucagcggcugggccaucuacaccaaggacaacuccauccggaucgggagcaagggcgacguguucgugauccgcgagccguucaucuccugcagccaccucgagugccggacguucuuccugacccagggggcccugcucaacgacaagcacuccaacggcaccgucaaggaccgcagccccuaccgggcccugauguccugcccccugggggaggcgcccagcccguacaacagcaaguucgaguccguggccuggagcgccuccgccugccacgacggcaugggcuggcucaccaucgggaucagcggccccgacaacggggcgguggccguccugaaguacaacggcaucaucacggagaccaucaaguccuggaagaagcgcauccugcggacccaggagagcgagugcgugugcgugaacggcuccugcuucaccaucaugacggacgggcccagcaacggcgccgccuccuacaagaucuucaagaucgagaaggggaaggucaccaagagcaucgagcucaacgcccccaacuuccacuacgaggagugcuccugcuacccggacaccggcaccgugaugugcgugugccgcgacaacuggcacgggagcaaccggcccugggucuccuucaaccagaaccuggacuaccagaucggcuacaucugcagcggcguguucggggacaacccccgccccaaggacggcaagggguccugcaacccggugacggucgacggcgcggacggggugaagggcuucagcuacaaguacggcaacgggguguggaucggccggaccaaguccaaccgccugcggaagggguucgagaugaucugggaccccaacggcuggaccgacaccgacagcgacuucuccgucaagcaggacgugguggccaucacggacuggagcggguacagcggcuccuucguccagcaccccgagcucaccggccuggacugcauccgccccugcuucuggguggagcugguccgggggcucccgcgcgagaacaccaccaucuggacgagcggcuccagcaucuccuucugcgggguggacagcgacaccgccaacugguccuggcccgacggcgccgagcugcccuucaccaucgacaaguga

SEQ ID NO: 80568 - RNA, 1413 nt, Artificial Sequence
  derived and/or modified CDS sequence (opt1) from neuraminidase__InfluenzaA__ACI32777
augaaccccaaccagaagaucaucaccaucggcagcaucuccaucgccaucgggaucaucagccugaugcuccagaucggcaacaucaucuccaucugggccagccacuccauccagaccgggagccagaaccacacgggcaucugcaaccagcgcaucaucaccuacaagaacuccaccugggugaaccacaccuacgucaacaucaacaacacgaacgugguggcggggaaggacaagaccagcgucacccuggccggcaacuccagccugugcuccaucagcggcugggccaucuacaccaaggacaacuccauccggaucgggagcaagggcgacguguucgugauccgcgagccguucaucuccugcagccaccucgagugccggacguucuuccugacccagggggcccugcucaacgacaagcacuccaacggcaccgucaaggaccgcagccccuaccgggcccugauguccugcccccugggggaggcgcccagcccguacaacagcaaguucgaguccguggccuggagcgccuccgccugccacgacggcaugggcuggcucaccaucgggaucagcggccccgacaacggggcgguggccguccugaaguacaacggcaucaucacggagaccaucaaguccuggaagaagcgcauccugcggacccaggagagcgagugcgugugcgugaacggcuccugcuucaccaucaugacggacgggcccagcaacggcgccgccuccuacaagaucuucaagaucgagaaggggaaggucaccaagagcaucgagcucaacgcccccaacuuccacuacgaggagugcuccugcuacccggacaccggcaccgugaugugcgugugccgcgacaacuggcacgggagcaaccggcccugggucuccuucaaccagaaccuggacuaccagaucggcuacaucugcagcggcguguucggggacaacccccgccccaaggacggcaagggguccugcaacccggugacggucgacggcgcggacggggugaagggcuucagcuacaaguacggcaacgggguguggaucggccggaccaaguccaaccgccugcggaagggguucgagaugaucugggaccccaacggcuggaccgacaccgacagcgacuucuccgucaagcaggacgugguggccaucacggacuggagcggguacagcggcuccuucguccagcaccccgagcucaccggccuggacugcauccgccccugcuucuggguggagcugguccgggggcucccgcgcgagaacaccaccaucuggacgagcggcuccagcaucuccuucugcgggguggacagcgacaccgccaacugguccuggcccgacggcgccgagcugcccuucgccaucgacaaguga

SEQ ID NO: 80569 - RNA, 1413 nt, Artificial Sequence; identical to SEQ ID NO: 78410
  derived and/or modified CDS sequence (opt1) from neuraminidase__InfluenzaA__ACI32778

SEQ ID NO: 80570 - RNA, 1413 nt, Artificial Sequence; identical to SEQ ID NO: 78410
  derived and/or modified CDS sequence (opt1) from neuraminidase__InfluenzaA__ACI32779

SEQ ID NO: 80571 - RNA, 1413 nt, Artificial Sequence; identical to SEQ ID NO: 78410
  derived and/or modified CDS sequence (opt1) from neuraminidase__InfluenzaA__ACI32780

SEQ ID NO: 80572 - RNA, 1413 nt, Artificial Sequence; identical to SEQ ID NO: 78410
  derived and/or modified CDS sequence (opt1) from neuraminidase__InfluenzaA__ACI32781

SEQ ID NO: 80573 - RNA, 1413 nt, Artificial Sequence
  derived and/or modified CDS sequence (opt1) from neuraminidase__InfluenzaA__ACI32782
augaaccccaaccagaagaucaucaccaucggcagcaucuccaucgccaucgggaucaucagccugaugcuccagaucggcaacaucaucuccaucugggccagccacuccauccagaccgggagccagaaccacacgggcaucugcaaccagcgcaucaucaccuacgagaacuccaccugggugaaccacaccuacgucaacaucaacaacacgaacgugguggcggggaaggacaagaccagcgucacccuggccggcaacuccagccugugcuccaucagcggcugggccaucuacaccaaggacaacuccauccggaucgggagcaagggcgacguguucgugauccgcgagccguucaucuccugcagccaccucgagugccggacguucuuccugacccagggggcccugcucaacgacaagcacuccaacggcaccgucaaggaccgcagccccuaccgggcccugauguccugcccccugggggaggcgcccagcccguacaacagcaaguucgaguccguggccuggagcgccuccgccugccacgacggcaugggcuggcucaccaucgggaucagcggccccgacaacggggcgguggccguccugaaguacaacggcaucaucacgggcaccaucaaguccuggaagaagcagauccugcgcacccaggagagcgagugcgugugcaugaacggguccugcuucaccaucaugacggacggccccagcaacggggccgccuccuacaagaucuucaagaucgagaagggcaaggccaccaagagcaucgagcucaacgcgcccaacuuccacuacgaggagugcuccugcuacccggacaccgggaccgugaugugcgucugccgggacaacuggcacggcagcaaccgccccuggguguccuucaaccagaaccuggacuaccagaucggcuacaucugcagcgggguguucggcgacaacccccggcccaaggaccgcaagggguccugcaacccggucacgguggacggcgccgacggggugaagggcuucagcuacaaguacggcaacggggucuggaucggccggaccaaguccaaccgccugcggaagggguucgagaugaucugggaccccaacggcuggaccaacaccgacagcgacuucuccgugaagcaggacguggucgccaucacggacuggagcggguacagcggcuccuucgugcagcaccccgagcucaccggccuggacugcauccgccccugcuucuggguggagcugguccgggggcucccgcgcgagaacaccaccaucuggacgagcggcuccagcaucuccuucugcggggugaacagcgacaccgccaacugguccuggcccgacggcgccgagcugcccuucaccaucgacaaguga

SEQ ID NO: 80574 - RNA, 1413 nt, Artificial Sequence
  derived and/or modified CDS sequence (opt1) from neuraminidase__InfluenzaA__ACI32783
augaaccccaaccagaagaucaucaccaucggcagcaucuccaucgccaucgggaucaucagccugaugcuccagaucggcaacaucaucuccaucugggccagccacuccauccagaccgggagccagaaccacacgggcaucugcaaccagcgcaucaucaccuacgagaacuccaccugggugaaccacaccuacgucaacaucaacaacacgaacgugguggcggggaaggacaagaccagcgucacccuggccggcaacuccagccugugcuccaucagcggcugggccaucuacaccaaggacaacuccauccggaucgggagcaagggcgacguguucgugauccgcgagccguucaucuccugcagccaccucgagugccggacguucuuccugacccagggggcccugcucaacgacaagcacuccaacggcaccgucaaggaccgcagccccuaccgggcccugauguccugcccccugggggaggcgcccagcccguacaacagcaaguucgaguccguggccuggagcgccuccgccugccacgacggcaugggcuggcucaccaucgggaucagcggccccgacaacggggcgguggccguccugaaguacaacggcaucaucacggagaccaucaaguccuggaagaagcagauccugcgcacccaggagagcgagugcgugugcgugaacggcuccugcuucaccaucaugacggacgggcccagcaacggcgccgccuccuacaagaucuucaagaucgagaaggggaaggucaccaagagcaucgagcucaacgcccccaacuuccacuacgaggagugcuccugcuacccggacaccggcaccgugaugugcgugugccgggacaacuggcacgggagcaaccgccccuggcuguccuucaaccagaaccuggacuaccagaucggcuacaucugcagcggcgucaucggggacaacccccggcccaaggacggcaagggguccugcaacccggugacgguggacggcgcggacggggucaagggcuucagcuacaaguacggcaacgggguguggaucggccgcaccaaguccaaccggcuccgcaagggguucgagaugaucugggaccccaacggcuggaccgacaccgacagcgacuucuccgugaagcaggacgucguggccaucacggacuggagcggguacagcggcuccuucgugcagcaccccgagcugaccggccuggacugcauccggcccugcuucugggucgagcucgugcgcgggcugccgcgggagaacaccaccaucuggacgagcggcuccagcaucuccuucugcggggucgacggcgacaccgccaacuggagcuggcccgacggcgccgagcugcccuucaccaucgacaaguga

SEQ ID NO: 80575 - RNA, 1413 nt, Artificial Sequence
  derived and/or modified CDS sequence (opt1) from neuraminidase__InfluenzaA__ACI32784
augaaccccaaccagaagaucaucaccaucggcagcaucuccaucgccaucgggaucaucagccugaugcuccagaucggcaacaucaucuccaucugggccagccacuccauccagaccgggagccagaaccacacgggcaucugcaaccagcgcaucaucaccuacgagaacuccaccugggugaaccacaccuacgucaacaucaacaacacgaacgugguggcggggaaggacaagaccagcgucacccuggccggcaacuccagccugugcuccaucagcggcugggccaucuacaccaaggacaacuccauccggaucgggagcaagggcgacguguucgugauccgcgagccguucaucuccugcagccaccucgagugccggacguucuuccugacccagggggcccugcucaacgacaagcacuccaacggcaccgucaaggaccgcagccccuaccgggcccugauguccugcccccugggggaggcgcccagcccguacaacagcaaguucgaguccguggccuggagcgccuccgccugccacgacggcaugggcuggcucaccaucgggaucagcggccccgacaacggggcgguggccguccugaaguacaacggcaucaucacgggcaccaucaaguccuggaagaagcagauccugcgcacccaggagagcgagugcgugugcaugaacggguccugcuucaccaucaugacggacggccccagcaacggggccgccuccuacaagaucuucaagaucgagaagggcaaggccaccaagagcaucgagcucaacgcgcccaacuuccacuacgaggagugcuccugcuacccggacaccgggaccgugaugugcgucugccgggacaacuggcacggcagcaaccgccccuggguguccuucaaccagaaccuggacuaccagaucggcuacaucugcagcgggguguucggcgacaacccccggcccaaggaccgcgagggguccugcaacccggucacgguggacggcgccgacggggugaagggcuucagcuacaaguacggcaacggggucuggaucggccggaccaaguccaaccgccugcggaagggguucgagaugaucugggaccccaacggcuggaccaacaccgacagcgacuucuccgugaagcaggacguggucgccaucacggacuggagcggguacagcggcuccuucgugcagcaccccgagcucaccggccuggacugcauccgccccugcuucuggguggagcugguccgggggcucccgcgcgagaacaccaccaucuggacgagcggcuccagcaucuccuucugcggggugaacagcgacaccgccaacugguccuggcccgacggcgccgagcugcccuucaccaucgacaaguga

SEQ ID NO: 80576 - RNA, 1413 nt, Artificial Sequence
  derived and/or modified CDS sequence (opt1) from neuraminidase__InfluenzaA__ACI32785
augaaccccaaccagaagaucaucaccaucggcagcaucuccaucgccaucgggaucaucagccugaugcuccagaucggcaacaucaucuccaucugggccagccacuccauccagaccgggagccagaaccacacgggcaugugcaaccagcgcaucaucaccuacgagaacuccaccugggugaaccacaccuacgucaacaucaacaacacgaacgugguggcggagaaggacaagaccagcgucacccuggccgggaacuccagccugugcuccaucagcggcugggccaucuacaccaaggacaacuccauccggaucggcagcaagggggacguguucgugauccgcgagccguucaucuccugcagccaccucgagugccggacguucuuccugacccagggcgcccugcucaacgacaagcacuccaacgggaccgucaaggaccgcagccccuaccgggcccugauguccugcccccugggcgaggcgcccagcccguacaacagcaaguucgaguccguggccuggagcgccuccgccugccacgacgggaugggcuggcucaccaucggcaucagcgggcccgacaacggcgcgguggccguccugaaguacaacgggaucaucacggagaccaucaaguccuggaagaagcgcauccugcggacccaggagagcgagugcgugugcgugaacggcuccugcuucaccaucaugacggacggccccagcaacggggccgccuccuacaagaucuucaagaucgagaagggcaaggucaccaagagcaucgagcucaacgcccccaacuuccacuacgaggagugcuccugcuacccggacaccgggaccgugaugugcgugugccgcgacaacuggcacggcagcaaccggcccugggucuccuucaaccagaaccuggacuaccagaucggguacaucugcagcggcguguucggcgacaacccccgccccaaggacgggaagggcuccugcaacccggugacggucgacggggcggacggcgugaagggguucagcuacaaguacggcaacggcguguggaucgggcggaccaaguccaaccgccugcggaagggcuucgagaugaucugggaccccaacgggugggccgacaccgacagcgacuucuccgucaagcaggacgugguggccaucaccgacuggagcggcuacagcggguccuucguccagcaccccgagcucacgggccugaacugcauccgccccugcuucuggguggagcugguccggggccucccgcgcgagaacaccaccaucuggaccagcggguccagcaucuccuucugcggcguggacagcgacacggccaacugguccuggcccgacggggccgagcugcccuucaccaucgacaaguga

SEQ ID NO: 80577 - RNA, 1413 nt, Artificial Sequence
  derived and/or modified CDS sequence (opt1) from neuraminidase__InfluenzaA__ACI32787
augaaccccaaccagaagaucaucaccaucggcagcaucuccaucgccaucgggaucaucagccugauccuccagaucggcaacaucaucuccaucugggccagccacuccauccagaccgggagccagaaccacacgggcaucugcaaccagcgcaucaucaccuacgagaacuccaccugggugaacaacaccuacgucaacaucaacaacacgaacgugguggcggagaaggacaagaccagcgucacccuggccgggaacuccagccugugcuccaucagcggcugggccaucuacaccaaggacaacuccauccggaucggcagcaagggggacguguucgugauccgcgagccguucaucuccugcagccaccucgagugccggacguucuuccugacccagggcgcccugcucaacgacaagcacuccaacgggaccgucaaggaccgcagccccuaccgggcccugauguccugcccccugggcgaggcgcccagcccguacaacagccgcuucgaguccguggccuggagcgccuccgccugccacgacgggaugggcuggcucaccaucggcaucagcgggcccgacaacggcgcgguggccguccugaaguacaacgggaucaucacggagaccaucaaguccuggaagaagcggauccugcgcacccaggagagcgagugcgugugcaugaacggcuccugcuucaccaucaugacggacggccccagcaacggggccgccuccuacaagaucuucaagaucgagaagggcaaggugaccaagaccaucgagcucaacgcccccaacuuccacuacgaggagugcagcugcuacccggacaccgggacggucaugugcgugugccgggacaacuggcacggcuccaaccgccccugggugagcuucaaccagaaccuggacuaccagaucggguacaucugcuccggcgucuucggcgacaacccccggcccaaggacggggagggcagcugcaacccggugaccguggacggggcggacggcgucaagggguucuccuacaaguacggcaacggcguguggaucgggcgcaccaagagcaaccggcugcgcaagggcuucgagaugaucugggaccccaacggguggaccaacacggacuccgacuucagcgugaagcaggacgucguggccaucaccgacugguccggcuacagcgggagcuucgugcagcaccccgagcucaccggccuggacugcauccggcccugcuucugggucgagcuggugcgcggccucccgcgggagaacaccacgaucuggaccuccgggagcuccaucagcuucugcggcgucaacgggggcaccgccgacugguccuggcccgacggcgccgagcugcccuucaccaucgacaaguga

SEQ ID NO: 80578 - RNA, 1413 nt, Artificial Sequence
  derived and/or modified CDS sequence (opt1) from neuraminidase__InfluenzaA__ACI32788
augaaccccaaccagaagaucaucaccaucggcagcaucuccaucgccaucgggaucaucagccugaugcuccagaucggcaacaucaucuccaucugggccagccacuccauccagaccgggagccagaaccacacggggaccugcaaccagcgcaucaucaccuacgagaacaacaccugggugaaccacacgugcgucaacaucaacaacaccaacgugguggcgggcaaggacaagaccuccgucacccuggugggcaacagcucccugugcagcaucuccggcugggccaucuacacgaaggacaacagcauccggaucggguccaagggcgacguguucgucauccgcgagccguucaucagcugcucccaccucgagugccggaccuucuuccugacccagggggcccugcucaacgacaagcacagcaacggcaccgugaaggaccgcucccccuaccgggcccugaugagcugcccccugggggaggcccccuccccguacaacagcaaguucgagagcguggcgugguccgccagcgccugccacgacggcaagggcuggcucacgaucgggaucuccggccccgacaacggggccgucgcggugcugaaguacaacggcaucaucaccgagaccaucaagagcuggaagaagcgcauccugcggacccaggaguccgagugcgugugcgucaacggcagcugcuucacgaucaugaccgacgggcccuccaacggcgccgccagcuacaagaucuucaagaucgagaaggggaaggugaccaaguccaucgagcucaacgcccccaacuuccacuacgaggagugcagcugcuacccggacaccggcacggugaugugcgucugccgcgacaacuggcacggguccaaccggcccugggugagcuucaaccagaaccuggacuaccagaucggcuacaucugcuccggcguguucggggacaacccccgccccaaggacggcaaggggagcugcaacccgaugaccgucgacggcgccgacggggugaagggcuucuccuacaaguacggcaacgggguguggaucggccggaccaagagcaaccgccugcggaagggguucgagaugaucugggaccccaacggcuggaccgacacggacuccgacuucagcgucaagcaggacgugguggcgaucaccgacugguccggguacagcggcagcuucguccagcaccccgagcucaccggccuggacugcauccgccccugcuucuggguggagcugguccgggggcucccgcgcgagaacaccacgaucuggaccuccggcagcuccaucagcuucugcgggguggacuccgacaccgccaacuggagcuggcccgacggcgccgagcugcccuucaccaucgacaaguga

SEQ ID NO: 80579 - RNA, 1410 nt, Artificial Sequence
  derived and/or modified CDS sequence (opt1) from neuraminidase__InfluenzaA__ACI32790
augaaccccaaccagaagaucaucaccaucggcagcgugucccugaccaucgccacgaucugcuuccucacccagaucgccauccuggucaccaccgugacgcugcacuucaagcaguacgagugcaacagcccgcccaacaaccaggugaugcucugcgagcccaccaucaucgagcgcaacaucaccgagaucgucuaccugaccaacacgaccaucgagaaggagaucugccccaagcuggcggaguaccggaacugguccaagccgcagugcaacaucaccggguucgcccccuucagcaaggacaacuccauccgccucagcgccggcggggacaucugggugacccgggagcccuacguguccugcgaccccgacaagugcuaccaguucgcccugggccaggggacgacccugaacaacggccacagcaacgacaccguccacgaccgcaccccguaccggacgcuccugaugaacgagcugggcgugcccuuccaccucgggaccaagcaggucugcaucgccugguccagcuccagcugccacgacggcaaggcguggcugcacgugugcgugaccggggacgacaagaacgccaccgccuccuucaucuacaacggccgccugguggacagcaucggguccuggagcaagaagauccuccggacgcaggaguccgagugcgucugcaucaacgggaccugcaccguggugaugaccgacggcagcgccuccgggaaggcggacacgaagauccuguucaucgaggagggcaagaucguccacaccagccugcucagcggguccgcccagcacguggaggagugcagcugcuacccccgcuaccccggcgugcggugcgucugccgcgacaacuggaagggcuccaaccggccgaucguggacaucaacgugaaggacuacagcaucgucuccagcuacgugugcuccgggcuggugggcgacacgccccgcaagaacgacagcuccagcuccagccacugccuggaccccaacaacgaggagggcggccacggggucaagggcugggccuucgacgacggcaacgacguguggauggggcggaccaucuccgagaagcuccgcagcggcuacgagaccuucaaggucaucgaggggugguccaagcccaacagcaagcugcagaucaaccgccaggugaucguggaccggggcaaccgguccggguacagcggcaucuucuccgucgagggcaagagcugcaucaaccgcugcuucuacguggagcugauccgggggcgcaaccaggagaccgaggugcucuggaccagcaacuccaucgucguguucugcggcaccagcgggacguacggcaccggguccuggccggacggcgccgacaucaaccugaugcccaucuga

SEQ ID NO: 80580 - RNA, 1410 nt, Artificial Sequence; identical to SEQ ID NO: 78406
  derived and/or modified CDS sequence (opt1) from neuraminidase__InfluenzaA__ACI32791

SEQ ID NO: 80581 - RNA, 1410 nt, Artificial Sequence; identical to SEQ ID NO: 78406
  derived and/or modified CDS sequence (opt1) from neuraminidase__InfluenzaA__ACI32793

SEQ ID NO: 80582 - RNA, 1410 nt, Artificial Sequence; identical to SEQ ID NO: 78406
  derived and/or modified CDS sequence (opt1) from neuraminidase__InfluenzaA__ACI32794

SEQ ID NO: 80583 - RNA, 1410 nt, Artificial Sequence; identical to SEQ ID NO: 78736
  derived and/or modified CDS sequence (opt1) from neuraminidase__InfluenzaA__ACI32795

SEQ ID NO: 80584 - RNA, 1410 nt, Artificial Sequence
  derived and/or modified CDS sequence (opt1) from neuraminidase__InfluenzaA__ACI32796
augaaccccaaccagaagaucaucaccaucggcagcgugucccugaccaucagcacgaucugcuucuucaugcagaucgccauccucaucaccaccgucacccugcacuucaagcaguacgaguucaacuccccgcccaacaaccaggugaugcugugcgagcccacgaucaucgagcgcaacaucaccgagaucguguaccucaccaacaccacgaucgagaaggagaucugccccaagcuggccgaguaccggaacuggagcaagccgcagugcuccaucaccggguucgcgcccuucagcaaggacaacuccauccgccugagcgccggcggggacaucugggucacccgggagcccuacguguccugcgaccccgacaagugcuaccaguucgcccucggccaggggaccacgcugaacaacgugcacagcaacgacaccguccacgaccgcaccccguaccggacccugcucaugaacgagcugggcgugcccuuccaccugggcacgaagcaggucugcaucgccugguccagcuccagcugccacgacgggaaggccuggcuccacgugugcgugaccggcgacgacaagaacgcgaccgccuccuucaucuacaacgggcgccugguggacagcaucgucuccuggagcaaggagauccugcggacccaggaguccgagugcgugugcaucaacggcacgugcaccguggucaugaccgacgggagcgccagcggcaaggccgacaccaagauccucuucaucgaggagggcaagaucgugcacacguccacccugagcggguccgcgcagcacguggaggagugcagcugcuacccccgcuaccccggcguccggugcgugugccgcgacaacuggaagggguccaaccggccgaucguggacaucaacaucaaggacuacagcaucgucuccagcuacgugugcuccggccuggugggcgacacgccccgcaagaacgacagcuccagcuccagccacugccucgaccccaacaacgaggagggcgggcacggggucaagggcugggccuucgacgacgggaacgacguguggaugggccggaccaucuccgagaagucccgcagcggcuacgagaccuucaaggucaucgagggguggagcaaccccaacuccaagcugcagaucaaccgccaggugaucguggaccggggcaaccggagcggguacagcggcaucuucuccgucgagggcaagagcugcaucaaccgcugcuucuacguggagcugauccgggggcgcaaggaggagaccgaggugcucuggaccuccaacagcaucgucguguucugcggcaccuccgggacguacggcaccgggagcuggccggacggcgccgacaucaaccugaugcccaucuga

SEQ ID NO: 80585 - RNA, 1410 nt, Artificial Sequence
  derived and/or modified CDS sequence (opt1) from neuraminidase__InfluenzaA__ACI32797
augaaccccaaccagaugaucaucaccaucggcagcgugucccugaccaucagcacgaucugcuucuucaugcagaucgccauccucaucaccaccgucacccugcacuucaagcaguacgaguucaacuccccgcccaacaaccaggugaugcugugcgagcccacgaucaucgagcgcaacaucaccgagaucguguaccucaccaacaccacgaucgagaaggagaucugccccaagcuggccgaguaccggaacuggagcaagccgcagugcuccaucaccggguucgcgcccuucagcaaggacaacuccauccgccugagcgccggcggggacaucugggucacccgggagcccuacguguccugcgaccccgacaagugcuaccaguucgcccucggccaggggaccacgcugaacaacgugcacagcaacgacaccguccacgaccgcaccccguaccggacccugcucaugaacgagcugggcgugcccuuccaccugggcacgaagcaggucugcaucgccugguccagcuccagcugccacgacgggaaggccuggcuccacgugugcgugaccggcgacgacaagaacgcgaccgccuccuucaucuacaacgggcgccugguggacagcaucgucuccuggagcaaggagauccugcggacccaggaguccgagugcgugugcaucaacggcacgugcaccguggucaugaccgacgggagcgccagcggcaaggccgacaccaagauccucuucaucgaggagggcaagaucgugcacacguccacccugagcggguccgcgcagcacguggaggagugcagcugcuacccccgcuaccccggcguccggugcgugugccgcgacaacuggaagggguccaaccggccgaucguggacaucaacaucaaggacuacagcaucgucuccagcuacgugugcuccggccuggugggcgacacgccccgcaagaacgacagcuccagcuccagccacugccucgaccccaacaacgaggagggcgggcacggggucaagggcugggccuucgacgacgggaacgacguguggaugggccggaccaucuccgagaagucccgcagcggcuacgagaccuucaaggucaucgagggguggagcaaccccaacuccaagcugcagaucaaccgccaggugaucguggaccggggcaaccggagcggguacagcggcaucuucuccgucgagggcaagagcugcaucaaccgcugcuucuacguggagcugauccgggggcgcaaggaggagaccgaggugcucuggaccuccaacagcaucgucguguucugcggcaccuccgggacguacggcaccgggagcuggccggacggcgccgacaucaaccugaugcccaucuga

SEQ ID NO: 80586 - RNA, 1410 nt, Artificial Sequence
  derived and/or modified CDS sequence (opt1) from neuraminidase__InfluenzaA__ACI32798
augaaccccaaccagaagaucaucaccaucggcagcgugucccugaccaucagcacgaucugcuucuucaugcagaucgccauccucaucaccaccgucacccugcacuucaagcaguacgaguucaacuccccgcccaacaaccaggugaugcugugcgagcccacgaucaucgagcgcaacaucaccgagaucguguaccucaccaacaccacgaucgagaaggagaucugccccaagcuggccgaguaccggaacuggagcaagccgcagugcaacaucaccggguucgcgcccuucuccaaggacaacagcauccgccuguccgccggcggggacaucugggucacccgggagcccuacgugagcugcgaccccgacaagugcuaccaguucgcccucggccaggggaccacgcugaacaacgugcacuccaacgacaccguccacgaccgcaccccguaccggacccugcucaugaacgagcugggcgugcccuuccaccugggcacgaagcaggucugcaucgccuggagcuccagcuccugccacgacgggaaggccuggcuccacgugugcgugaccggcgacgacaagaacgcgaccgccagcuucaucuacaacgggcgccugguggacuccaucgucagcugguccaacgagauccugcggacccaggagagcgagugcgugugcaucaacggcacgugcaccguggucaugaccgacggguccgccagcggcaaggccgacaccaagauccucuucaucgaggagggcaagaucgugcacacgagcacccuguccgggagcgcgcagcacguggaggagugcuccugcuacccccgcuaccccggcguccggugcgugugccgcgacaacuggaaggggagcaaccggccgaucguggacaucaacaucaaggacuacuccaucgucagcuccuacgugugcagcggccuggugggcgacacgccccgcaagaacgacuccagcuccagcucccacugccucgaccccaacaacgaggagggcgggcacggggucaagggcugggccuucgacgacgggaacgacguguggaugggccggaccaucagcgagaagcugcgcuccggcuacgagaccuucaaggucaucgagggguggagcaaccccaacuccaagcugcagaucaaccgccaggugaucguggaccggggcaaccggagcggguacuccggcaucuucagcgucgagggcaagagcugcaucaaccgcugcuucuacguggagcucauccgggggcgcaaggaggagaccgaggugcuguggaccuccaacagcaucgucguguucugcggcaccuccgggacguacggcaccgggagcuggccggacggcgccgacaucaaccugaugcccaucuga

SEQ ID NO: 80587 - RNA, 1410 nt, Artificial Sequence
  derived and/or modified CDS sequence (opt1) from neuraminidase__InfluenzaA__ACI32799
augaaccccaaccagcgcaucaucaccaucggcagcgugucccugaccaucagcacgaucugcuucuucaugcagaucgccauccucaucaccaccgucacccugcacuucaagcaguacgaguucaacuccccgcccaacaaccaggugaugcugugcgagcccacgaucaucgagcggaacaucaccgagaucguguaccucaccaacaccacgaucgagaaggagaucugccccaagcuggccgaguaccgcaacuggagcaagccgcagugcgacaucaccggguucgcgcccuucuccaaggacaacagcauccggcuguccgccggcggggacaucugggucacccgcgagcccuacgugagcugcgaccccgacaagugcuaccaguucgcccucggccaggggaccacgcugaacaacgugcacuccaacgacaccguccacgaccggaccccguaccgcacccugcucaugaacgagcugggcgugcccuuccaccugggcacgaagcaggucugcaucgccuggagcuccagcuccugccacgacgggaaggccuggcuccacgugugcgugaccggcgacgacaagaacgcgaccgccagcuucaucuacaacgggcggcugguggacuccgucgugagcugguccaaggacauccugcgcacccaggagagcgagugcgugugcaucaacggcacgugcaccgucgugaugaccgacggguccgccagcggcaaggccaacaccaagauccucuucaucgaggagggcaagaucgugcacacgagcacccuguccgggagcgcgcagcacgucgaggagugcuccugcuacccccgguaccccggcgugcgcugcgugugccgggacaacuggaaggggagcaaccgcccgaucgucgacaucaacaucaagaacuacuccaucgugagcuccuacgugugcagcggccuggucggcgacacgccccggaagaccgacuccagcuccagcucccacugccucgaccccaacaacgaggagggcgggcacggggugaagggcugggccuucgacgacgggaacgacgucuggaugggccgcaccaucagcgagaagcugcggcugggcuacgagaccuucaaggugaucgaggggugguccaaccccaacagcaagcuccagaucaaccgccaggugaucgucgaccggggcaaccgcuccggguacagcggcaucuucuccguggagggcaagagcugcaucaaccggugcuucuacguggagcugauccgcgggcggaaggaggagaccgagguccuguggaccagcaacuccaucgugguguucugcggcacgagcgggaccuacggcaccggguccuggccggacggcgccgacaucaaccucaugcccaucuga

SEQ ID NO: 80588 - RNA, 1410 nt, Artificial Sequence
  derived and/or modified CDS sequence (opt1) from neuraminidase__InfluenzaA__ACI32800
augaaccccaaccagaagaucaucaccaucggcagcgugucccugaccaucagcacgaucugcuucuucaugcagaucgccauccucaucaccaccgucacccugcacuucaagcaguacgaguucaacuccccgcccaacaaccaggugaugcugugcgagcccacgaucaucgagcgcaacaucaccgagaucguguaccucaccaacaccacgaucgagaaggagaucugccccaagcuggccgaguaccggaacuggagcaagccgcagugcaacaucaccggguucgcgcccuucuccaaggacaacagcauccgccuguccgccggcggggacaucugggucacccgggagcccuacgugagcugcgaccccgacaagugcuaccaguucgcccucggccaggggaccacgcugaacaacgugcacuccaacgacaccguccacgaccgcaccccguaccggacccugcucaugaacgagcugggcgugcccuuccaccugggcacgaagcaggucugcaucgccuggagcuccagcuccugccacgacgggaaggccuggcuccacgugugcgugaccggcgacgacaagaacgcgaccgccagcuucaucuacaacgggcgccugguggacuccaucgucagcugguccaaggagauccugcggacccaggagagcgagugcgugugcaucaacggcacgugcaccguggucaugaccgacggguccgccagcggcaaggccgacaccaagauccucuucaucgaggagggcaagaucgugcacacgagcacccuguccgggagcgcgcagcacguggaggagugcuccugcuacccccgcuaccccggcguccggugcgugugccgcgacaacuggaaggggagcaaccggccgaucguggacaucaacaucaaggacuacuccaucgucagcuccuacgugugcagcggccuggugggcgacacgccccgcaagaacgacuccagcuccagcucccacugccucgaccccaacaacgaggagggcgggcacggggucaagggcugggccuucgacgacgggaacgacguguggaugggccggaccaucagcgagaagcugcgcuccggcuacgagaccuucaaggucaucgagggguggagcaaccccaacuccaagcugcagaccaaccgccaggugaucguggaccggggcaaccggagcggguacuccggcaucuucagcgucgagggcaagagcugcaucaaccgcugcuucuacguggagcucauccgggggcgcaaggaggagaccgaggugcuguggaccuccaacagcaucgucguguucugcggcacguccgggaccuacggcaccgggagcuggccggacggcgccgacaucaaccugaugcccaucuga

SEQ ID NO: 80589 - RNA, 1410 nt, Artificial Sequence; identical to SEQ ID NO: 80588
  derived and/or modified CDS sequence (opt1) from neuraminidase__InfluenzaA__ACI32802

SEQ ID NO: 80590 - RNA, 1410 nt, Artificial Sequence; identical to SEQ ID NO: 80588
  derived and/or modified CDS sequence (opt1) from neuraminidase__InfluenzaA__ACI32803

SEQ ID NO: 80591 - RNA, 1410 nt, Artificial Sequence; identical to SEQ ID NO: 79731
  derived and/or modified CDS sequence (opt1) from neuraminidase__InfluenzaA__ACI32804

SEQ ID NO: 80592 - RNA, 1410 nt, Artificial Sequence
  derived and/or modified CDS sequence (opt1) from neuraminidase__InfluenzaA__ACI32805
augaaccccaaccagaagaucaucaccaucggcagcgugucccugaccaucagcacgaucugcuucuucaugcagaucgccauccucaucaccaccgucacccugcacuucaagcaguacgaguucaacuccccgcccaacaaccaggugaugcugugcgagcccacgaucaucgagcgcaacaucaccgagaucguguaccucaccaacaccacgaucgagaaggagaucugccccaagcuggccgaguaccggaacuggagcaagccgcagugcaacaucaccggguucgcgcccuucuccaaggacaacagcauccgccuguccgccggcggggacaucugggucacccgggagcccuacgugagcugcgaccccgacaagugcuaccaguucgcccucggccaggggaccacgcugaacaacgugcacuccaacgacaccguccacgaccgcaccccguaccggacccugcucaugaacgagcugggcgugcccuuccaccugggcacgaagcaggucugcaucgccuggagcuccagcuccugccacgacgggaaggccuggcuccacgugugcgugaccggcgacgacaagaacgcgaccgccagcuucaucuacaacgggcgccugguggacuccaucgucagcugguccaaggagauccugcggacccaggagagcgagugcgugugcaucaacggcacgugcaccguggucaugaccgacggguccgccagcggcaaggccgugaccaagauccucuucaucgaggagggcaagaucgugcacacgagcacccuguccgggagcgcgcagcacgucgaggagugcuccugcuacccccgcuaccccggcgugcggugcgugugccgcgacaacuggaaggggagcaaccggccgaucgucgacaucaacaucaaggacuacuccaucgugagcuccuacgugugcagcggccuggucggcgacacgccccgcaagaacgaccgguccagcuccagccacugccucgaccccaacaacgaggagggcgggcacggggugaagggcugggccuucgacgacgggaacgacgucuggaugggccgcaccaucuccgagaagucccggagcggcuacgagaccuucaaggugaucgagggguggagcaaccccaacuccaagcugcagaccaaccgccaggugaucgucgaccggggcaaccgcagcggguacuccggcaucuucagcguggagggcaagagcugcaucaaccggugcuucuacguggagcugauccgcgggcggaaggaggagaccgagguccucuggaccuccaacagcaucgugguguucugcggcacguccgggaccuacggcaccgggagcuggccggacggcgccgacaucaaccugaugcccaucuga

SEQ ID NO: 80593 - RNA, 1410 nt, Artificial Sequence; identical to SEQ ID NO: 78736
  derived and/or modified CDS sequence (opt1) from neuraminidase__InfluenzaA__ACI32806

SEQ ID NO: 80594 - RNA, 1410 nt, Artificial Sequence
  derived and/or modified CDS sequence (opt1) from neuraminidase__InfluenzaA__ACI32807
augaaccccaaccagaagaucaucaccaucggcagcgugucccugaccaucagcacgaucugcuucuucaugcagaucgccauccucaucaccaccgucacccugcacuucaagcaguacgaguucaacuccccgcccaacaaccaggugaugcugugcgagcccacgaucaucgagcgcaacaucaccgagaucguguaccucaccaacaccacgaucgagaaggaggucugccccaagcuggccgaguaccggaacuggagcaagccgcagugcgacaucaccggguucgcgcccuucuccaaggacaacagcauccgccuguccgccggcggggacaucugggugacccgggagcccuacgugagcugcgaccccgacaagugcuaccaguucgcccucggccaggggaccacgcugaacaacguccacuccaacgacaccgugcgcgaccggaccccguaccgcacccugcucaugaacgagcugggcgugcccuuccaccugggcacgaagcaggucugcaucgccuggagcuccagcuccugccacgacgggaaggccuggcuccacgugugcaucaccggcgacgacaagaacgcgaccgccagcuucaucuacaacgggcggcugguggacuccaucgucagcugguccaaggagauccugcgcacccaggagagcgagugcgugugcaucaacggcacgugcaccguggucaugaccgacggguccgccagcggcaaggccgacaccaagauccucuucaucgaggagggcaagaucgugcacacgagcacccuguccgggagcgcgcagcacguggaggagugcuccugcuacccccgguaccccggcguccgcugcgugugccgggacaacuggaaggggagcaaccgcccgaucguggacaucaacaucaaggaccacuccaucgucagcuccuacgugugcagcggccuggugggcgacacgccccggaagaacgacuccagcuccagcucccacugccucgaccccaacaacgaggagggcgggcacggggucaagggcugggccuucgacgacgggaacgacguguggaugggccgcaccaucagcgagaagucccggcugggcuacgagaccuucaaggucaucgagggguggagcaaccccaacuccaagcugcagaucaaccgccaggugaucguggaccggggcaaccgcagcggguacuccggcaucuucagcgucgagggcaagagcugcaucaaccggugcuucuacguggagcucauccgcgggcggaaggaggagaccgaggugcuguggaccuccaacagcaucgucguguucugcggcaccuccgggacguacggcaccgggagcuggccggacggcgccgacaucaaccugaugcccaucuga

SEQ ID NO: 80595 - RNA, 1410 nt, Artificial Sequence
  derived and/or modified CDS sequence (opt1) from neuraminidase__InfluenzaA__ACI32808
augaaccccaaccagaagaucaucaccaucggcagcgugucccugaccaucagcacgaucugcuucuucaugcagaucgccauccucaucaccaccgucacccugcacuucaagcaguacgaguucaacuccccgcccaacaaccaggugaugcugugcgagcccacgaucaucgagcgcaacaucaccgagaucguguaccucaccaacaccacgaucgagaaggagaucugccccaagcuggccgaguaccggaacuggagcaagccgcagugcgacaucaccggguucgcgcccuucuccaaggacaacagcauccgccuguccgccggcggggacaucugggucacccgggagcccuacgugagcugcgaccccgacaagugcuaccaguucgcccucggccaggggaccacgcugaacaacgugcacuccaacgacaccguccacgaccgcaccccguaccggacccugcucaugaacgagcugggcgugcccuuccaccugggcacgaagcaggucugcaucgccuggagcuccagcuccugccacgacgggaaggccuggcuccacgugugcgugaccggcgacgacaagaacgcgaccgccagcuucaucuacaacgggcgccugguggacuccgucgugagcugguccaaggacauccugcggacccaggagagcgagugcgugugcaucaacggcacgugcaccgucgugaugaccgacggguccgccagcggcaaggccgacaccaagauccucuucaucgaggagggcaagaucgugcacacgagcacccuguccgggagcgcgcagcacgucgaggagugcuccugcuacccccgcuaccccggcgugcggugcgugugccgcgacaacuggaaggggagcaaccggccgaucgucgacaucaacaucaagaacuacuccaucgugagcuccuacgugugcagcggccuggucggcgacacgccccgcaagaccgacuccagcuccagcucccacugccucgaccccaacaacgaggagggcgggcacggggugaagggcugggccuucgacgacgggaacgacgucuggaugggccggaccaucagcgagaagcugcgccugggcuacgagaccuucaaggugaucgaggggugguccaaccccaacagcaagcuccagaucaaccgccaggugaucgucgaccggggcaaccgguccggguacagcggcaucuucuccguggagggcaagagcugcaucaaccgcugcuucuacguggagcugauccgggggcgcaaggagaagaccgagguccuguggaccagcaacuccaucgugguguucugcggcacgagcgggaccuacggcaccggguccuggccggacggcgccgacaucaaccucaugcccaucuga

SEQ ID NO: 80596 - RNA, 1410 nt, Artificial Sequence; identical to SEQ ID NO: 79731
  derived and/or modified CDS sequence (opt1) from neuraminidase__InfluenzaA__ACI32809

SEQ ID NO: 80597 - RNA, 1410 nt, Artificial Sequence
  derived and/or modified CDS sequence (opt1) from neuraminidase__InfluenzaA__ACI32810
augaaccccaaccagaagaucaucaccaucggcagcgugucccugaccaucagcacgaucugcuucuucaugcagaucgccauccucaucaccaccgucacccugcacuucaagcaguacgaguucaacuccccgcccaacaaccaggugaugcugugcgagcccacgaucaucgagcgcaacaucaccgagaucguguaccucaccaacaccacgaucgagaaggagaucugccccaagcuggccgaguaccggaacuggagcaagccgcagugcgacaucaccggguucgcgcccuucuccaaggacaacagcauccgccuguccgccggcggggacaucugggucacccgggagcccuacgugagcugcgaccccgacaagugcuaccaguucgcccucggccaggggaccacgcugaacaacgugcacuccaacgacaccguccacgaccgcaccccgcaccggacccugcucaugaacgagcugggcgugcccuuccaccugggcacgaagcaggucugcaucgccuggagcuccagcuccugccacgacgggaaggccuggcuccacgugugcgugaccggcgacgacaagaacgcgaccgccagcuucaucuacaacgggcgccugguggacuccgucgugagcugguccaaggacauccugcggacccaggagagcgagugcgugugcaucaacggcacgugcaccgucgugaugaccgacggguccgccagcggcaaggccgacaccaagauccucuucaucgaggagggcaagaucgugcacacgagcacccuguccgggagcgcgcagcacgucgaggagugcuccugcuacccccgcuaccccggcgugcggugcgugugccgcgacaacuggaaggggagcaaccggccgaucgucgacaucaacaucaagaacuacuccaucgugagcuccuacgugugcagcggccuggucggcgacacgccccgcaagaccgacuccagcuccagcucccacugccucgaccccaacaacgaggagggcgggcacggggugaagggcugggccuucgacgacgggaacgacgucuggaugggccggaccaucagcgagaagcugcgccugggcuacgagaccuucaaggugaucgaggggugguccaaccccaacagcaagcuccagaucaaccgccaggugaucgucgaccggggcaaccgguccggguacagcggcaucuucuccguggagggcaagagcugcaucaaccgcugcuucuacguggagcugauccgggggcgcaaggaggagaccgagguccuguggaccagcaacuccaucgugguguucugcggcacgagcgggaccuacggcaccggguccuggccggacggcgccgacaucaaccucaugcccaucuga

SEQ ID NO: 80598 - RNA, 1410 nt, Artificial Sequence
  derived and/or modified CDS sequence (opt1) from neuraminidase__InfluenzaA__ACI32811
augaaccccaaccagaagaucaucaccaucggcagcgugucccugaccaucagcacgaucugcuucuucaugcagaucgccauccucaucaccaccgucacccugcacuucaagcaguacgaguucaacuccccgcccaacaaccaggugaugcugugcgagcccacgaucaucgagcgcaacaucaccgagaucguguaccucaccaacaccacgaucgagaaggagaucugccccaagcuggccgaguaccggaacuggagcaagccgcagugcaacaucaccggguucgcgcccuucuccaaggacaacagcauccgccuguccgccggcggggacaucugggucacccgggagcccuacgugagcugcgaccccgacaagugcuaccaguucgcccucggccaggggaccacgcugaacaacgugcacuccaacgacaccguccacgaccgcaccccguaccggacccugcucaugaacgagcugggcgugcccuuccaccugggcacgaagcaggucugcaucgccuggagcuccagcuccugccacgacgggaaggccuggcuccacgugugcgugaccggcgacgacaagaacgcgaccgccagcuucaucuacaacgggcgccugguggacuccaucgucagcugguccaaggagauccugcggacccaggagagcgagugcgugugcaucaacggcacgugcaccguggucaugaccgacggguccgccagcggcaaggccgacaccaagauccucuucaucgaggagggcaagaucgugcacacgagcacccuguccgggagcgcgcagcacguggaggagugcuccugcuacccccgcuaccccggcguccggugcgugugccgcgacaacuggaaggggagcaaccggccgaucguggacaucaacaucaaggacuacuccaucgucagcuccuacgugugcagcggccuggugggcgacacgccccgcaagaacgacuccagcuccagcucccacugccucgaccccaacaacgaggagggcgggcacggggucaagggcugggccuucgacgacgggaacgacguguggaugggccggaccaucagcgagaagcugcgcuccggcuacgagaccuucaaggucaucgagggguggagcaaccccaaguccaagcugcagaucaaccgccaggugaucguggaccggggcaaccggagcggguacuccggcaucuucagcgucgagggcaagagcugcaucaaccgcugcuucuacguggagcucauccgggggcgcaaggaggagaccgaggugcuguggaccuccaacagcaucgucguguucugcggcaccuccgggacguacggcaccgggagcuggccggacggcgccgacaucaaccugaugcccaucuga

SEQ ID NO: 80599 - RNA, 1410 nt, Artificial Sequence
  derived and/or modified CDS sequence (opt1) from neuraminidase__InfluenzaA__ACI32812
augaaccccaaccagaagaucaucaccaucggcagcgugucccugaccaucagcacgaucugcuucuucaugcagaucgccauccucaucaccaccgucacccugcacuucaagcaguacgaguucaacuccccgcccaacaaccaggugaugcugugcgagcccacgaucaucgagcgcaacaucaccgagaucguguaccucaccaacaccacgaucgagaaggagaucugccccaagcuggccgaguaccggaacuggagcaagccgcagugcgacaucaccggguucgcgcccuucuccaaggacaacagcauccgccuguccgccggcggggacaucugggucacccgggagcccuacgugagcugcgaccccgacaagugcuaccaguucgcccucggccaggggaccacgcugaacaacgugcacuccaacgacaccguccacgaccgcaccccguaccggacccugcucaugaacgagcugggcgugcccuuccaccugggcacgaagcaggucugcaucgccuggagcuccagcuccugccacgacgggaaggccuggcuccacgugugcgugaccggcgacgacaagaacgcgaccgccagcuucaucuacaacgggcgccugguggacuccgucgugagcugguccaaggacauccugcggacccaggagagcgagugcgugugcaucaacggcacgugcaccgucgugaugaccgacggguccgccagcggcaaggccaacaccaagauccucuucaucgaggagggcaagaucgugcacacgagcacccuguccgggagcgcgcagcacgucgaggagugcuccugcuacccccgcuaccccggcgugcggugcgugugccgcgacaacuggaaggggagcaaccggccgaucgucgacaucaacaucaagaacuacuccaucgugagcuccuacgugugcagcggccuggucggcgacacgccccgcaagaccgacuccagcuccagcucccacugccucgaccccaacaacgaggagggcgggcacggggugaagggcugggccuucgacgacgggaacgacgucuggaugggccggaccaucagcgagaagcugcgccugggcuacgagaccuucaaggugaucgaggggugguccaaccccaacagcaagcuccagaucaaccgccaggugaucgucgaccggggcaaccgguccggguacagcggcaucuucuccguggagggcaagagcugcaucaaccgcugcuucuacguggagcugauccgggggcgcaaggaggagaccgagguccuguggaccagcaacuccaucgugguguucugcggcacgagcgggaccuacggcaccggguccuggccggacggcgccgacaucaaccucaugcccaucuga

SEQ ID NO: 80600 - RNA, 1410 nt, Artificial Sequence; identical to SEQ ID NO: 78823
  derived and/or modified CDS sequence (opt1) from neuraminidase__InfluenzaA__ACI32814

SEQ ID NO: 80601 - RNA, 1350 nt, Artificial Sequence
  derived and/or modified CDS sequence (opt1) from neuraminidase__InfluenzaA__ACJ53848
augaaccccaaccagaagaucaucaccaucggcagcaucugcauggugaucgggaucgucucccugaugcuccagaucggcaacaugaucagcaucugggugucccacagcauccagaccgggaaccagugccaggccgagccgaucuccaacacgaaguuccugaccgagaaggccguggcgagcgucacccuggccggcaacuccagccucugccccaucuccgggugggccguguacagcaaggacaacuccauccgcaucggcagccggggcgacguguucgucauccgcgagcccuucaucuccugcagccaccuggagugccggaccuucuuccugacgcagggggcccuccugaacgacaagcacuccaacggcaccgugaaggaccgcagcccccaccggacccugauguccugcccggugggggaggcccccagccccuacaacucccgcuucgagagcgucgcguggagcgccuccgccugccacgacggcaccagcuggcucacgaucgggaucuccggccccgacaacggcgccguggcggugcugaaguacaacgggaucaucaccgacaccaucaagagcuggcggaacaacauccugcgcacccaggaguccgagugcgccugcgucaacggcagcugcuucacggugaugaccgacgggccguccagcggccaggccuccuacaagaucuucaagauggagaagggcaagguggucaagagcguggagcucgacgcccccaacuaccacuacgaggagugcuccugcuaccccgacgccggggagaucacgugcgugugccgggacaacuggcacggcagcaaccgccccugggucuccuucaaccagaaccuggaguaccagaucggguacaucugcagcggcguguucggggacaacccgcggcccaacgacggcaccggcuccugcgggcccgugagccccaacggcgcguacggggucaagggcuucuccuucaaguacgggaacggcguguggaucggccgcaccaagagcaccaacucccggagcggguucgagaugaucugggacccgaacggcuggaccgggaccgacagcuccuucagcgugaagcaggacaucgucgccaucacggacugguccggcuacagcggguccuucgugcagcaccccgagcugaccggccucgacugcauccgccccugcuucugggucgagcugauccggggccgccccaaggagagcaccaucuggaccuccgggagcuccaucagcuucugcggcgugaacuccgacacggugagcugguccuggccggacggggccgagcugcccuucaccaucgacaaguga

SEQ ID NO: 80602 - RNA, 1350 nt, Artificial Sequence
  derived and/or modified CDS sequence (opt1) from neuraminidase__InfluenzaA__ACJ53849
augaaccccaaccagaagaucaucaccaucggcagcaucugcauggugaucgggaucgucucccugaugcuccagaucggcaacaugaucagcaucugggugucccacagcauccagaccgggaaccagugccaggccgagccgaucuccaacacgaaguuccugaccgagaaggccguggcgagcgucacccuggccggcaacuccagccucugccccaucuccgggugggccguguacagcaaggacaacuccauccgcaucggcagccggggcgacguguucgucauccgcgagcccuucaucuccugcagccaccuggagugccggaccuucuuccugacgcagggggcccuccugaacgacaagcacuccaacggcaccgugaaggaccgcagcccccaccggacccugauguccugcccggugggggaggcccccagccccuacaacucccgcuucgagagcgucgcguggagcgccuccgccugccacgacggcaccagcuggcucacgaucgggaucuccggccccgacaacggcgccguggcggugcugaaguacaacgggaucaucaccgacaccaucaagagcuggcggaacaacauccugcgcacccaggaguccgagugcgccugcgucaacggcagcugcuucacggugaugaccgacgggccguccagcggccaggccuccuacaagaucuucaagauggagaagggcaagguggucaagagcguggagcucgacgcccccaacuaccacuacgaggagugcuccugcuaccccgacgccggggagaucacgugcgugugccgggacaacuggcacggcagcaaccgccccugggucuccuucaaccagaaccuggaguaccagaucggguacaucugcagcggcguguucggggacaacccgcggcccaacgacggcaccggcuccugcagccccgugucccccaacggggcguacggcgucaagggguucagcuucaaguacggcaacgggguguggaucggccgcaccaaguccaccaacagccggagcggcuucgagaugaucugggacccgaacggguggaccggcaccgacuccagcuucuccgugaagcaggacaucgucgccaucacggacuggagcggguacuccggcagcuucgugcagcaccccgagcugaccgggcucgacugcauccgccccugcuucugggucgagcugauccggggccgccccaaggaguccaccaucuggaccagcggcuccagcaucuccuucugcggggugaacagcgacacgguguccuggagcuggccggacggcgccgagcugcccuucaccaucgacaaguga

SEQ ID NO: 80603 - RNA, 1350 nt, Artificial Sequence
  derived and/or modified CDS sequence (opt1) from neuraminidase__InfluenzaA__ACJ53853
augaaccccaaccagaagaucaucaccaucggcagcaucugcauggugaucgggaucgucucccugaugcuccagaucggcaacaugaucagcaucugggugucccacagcauccagaccgggaaccagugccaggacgagccgaucuccaacacgaaguuccugaccgagaaggccguggccagcgucacccuggcgggcaacuccagccucugccccaucuccgggugggccguguacagcaaggacaacuccauccgcaucggcagccggggcgacguguucgucauccgcgagcccuucaucuccugcagccaccuggagugccggaccuucuuccugacgcagggggcccuccugaacgacaagcacuccaacggcaccgugaaggaccgcagcccccaccggacccugauguccugcccggugggggaggcccccagccccuacaacucccgcuucgagagcgucgccuggagcgcguccgccugccacgacggcaccagcuggcucacgaucgggaucuccggccccgacaacggcgccguggccgugcugaaguacaacgggaucaucaccgacaccaucaagagcuggcggaacaacauccugcgcacccaggaguccgagugcgcgugcgucaacggcagcugcuucacggugaugaccgacgggccguccagcggccaggccuccuacaagaucuucaagauggagaagggcaagguggucaagagcguggagcucgacgcccccaacuaccacuacgaggagugcuccugcuaccccgacgccggggagaucacgugcgugugccgggacaacuggcacggcagcaaccgccccugggucuccuucaaccagaaccuggaguaccagaucggguacaucugcagcggcguguucggggacaacccgcggcccaacgacggcaccggcuccugcgggcccguguuccccaacggcgccuacggggucaagggcuucagcuucaaguacgggaacggcguguggaucggccgcaccaaguccaccaacagccgguccggguucgagaugaucugggacccgaacggcuggaccgggaccgacagcagcuucuccgugaagcaggacaucgucgcgaucacggacuggagcggcuacuccgggagcuucgugcagcaccccgagcugaccggccucgacugcauccgccccugcuucugggucgagcugauccggggccgccccaaggaguccaccaucuggaccagcggguccagcaucuccuucugcggcgugaacagcgacacgguguccuggagcuggccggacggggccgagcugcccuucaccaucgacaaguga

SEQ ID NO: 80604 - RNA, 1350 nt, Artificial Sequence; identical to SEQ ID NO: 80603
  derived and/or modified CDS sequence (opt1) from neuraminidase__InfluenzaA__ACJ53866

SEQ ID NO: 80605 - RNA, 1350 nt, Artificial Sequence
  derived and/or modified CDS sequence (opt1) from neuraminidase__InfluenzaA__ACJ53867
augaaccccaaccagaagaucaucaccaucggcagcaucugcauggccaucgggaucgugucccugaugcuccagaucggcaacaugaucagccugugggucucccacagcauccagaccgggaaccagugccaggccgagccgaucuccaacacgaaguuccugaccgagaaggcgguggccagcgugacccucgccggcaacuccagccugugccccaucuccgggugggccgucuacagcaaggacaacuccauccgcaucggcagccggggcgacguguucgugauccgcgagcccuucaucuccugcagccaccuggagugccggaccuucuuccucacgcagggggcccugcugaacgacaagcacuccaacggcaccgucaaggaccgcagcccccaccggacccucauguccugcccggugggggaggcgcccagccccuacaacucccgcuucgagagcguggccuggagcgccuccgccugccacgacggcaccagcuggcugacgaucgggaucuccggccccgacaacggcgcggucgccgugcugaaguacaacgggaucaucaccgacaccaucaagagcuggcggaacaacauccuccgcacccaggaguccgagugcgccugcgugaacggcagcugcuucacggucaugaccgacgggccguccagcggccaggccuccuacaagaucuucaagauggagaagggcaagguggucaagagcguggagcuggacgcccccaacuaccacuacgaggagugcuccugcuaccccgacgcgggggagaucacgugcgugugccgggacaacuggcacggcagcaaccgccccuggguguccuucaaccagaaccuggaguaccagaucggguacaucugcagcggcgucuucggggacaacccgcggcccaacgacggcaccggcuccugcgggcccgugagccccaacggcgccuacggggugaagggcuucuccuucaaguacgggaacggcgucuggaucggccgcaccaagagcaccaacucccggagcggguucgagaugaucugggacccgaacggcuggaccgggaccgacagcuccuucagcgugaagcaggacaucguggccaucacggacugguccggcuacagcggguccuucguccagcaccccgagcucaccggccuggacugcauccgccccugcuucuggguggagcugauccggggccgccccaaggagagcaccaucuggaccuccgggagcuccaucagcuucugcggcgucaacuccgacacggugagcugguccuggccggacggggccgagcuccccuucaccaucgacaaguga

SEQ ID NO: 80606 - RNA, 1350 nt, Artificial Sequence
  derived and/or modified CDS sequence (opt1) from neuraminidase__InfluenzaA__ACJ53875
augaaccccaaccagaagaucaucaccaucggcagcaucugcauggugaucgggaucgucucccugaugcuccagaucggcaacaugaucagcaucugggugucccacagcauccagaccgggaaccagugccaggccgagccgaucuccaacacgaaguuccugaccgagaaggccguggcgagcgucacccuggccggcaacuccagccucugccccaucuccgggugggccguguacagcaaggacaacuccauccgcaucggcagccggggcgacguguucgucauccgcgagcccuucaucuccugcagccaccuggagugccggaccuucuuccugacgcagggggcccuccugaacgacaagcacuccaacggcaccgugaaggaccgcagcccccaccggacccugauguccugcccggugggggaggcccccagccccuacaacucccgcuucgagagcgucgcguggagcgccuccgccugccacgacggcaucagcuggcucaccaucgggaucuccggccccgacaacggcgccguggcggugcugaaguacaacgggaucaucacggacaccaucaagagcuggcggaacaacauccugcgcacccaggaguccgagugcgccugcgucaacggcagcugcuucaccgugaugacggacgggccguccagcggccaggccuccuacaagaucuucaagauggagaagggcaagguggucaagagcguggagcucgaggcccccaacuaccacuacgaggagugcuccugcuaccccgacgccggggagaucacgugcgugugccgggacaacuggcacggcagcaaccgccccugggucuccuucaaccagaaccuggaguaccagaucggguacaucugcagcggcguguucggggacaacccgcggcccaacgacggcaccggcuccugcgggcccgugagccccaacggcgcguacggggucaagggcuucuccuucaaguacgggaacggcguguggaucggccgcaccaagagcaccaacucccggagcggguucgagaugaucugggacccgaacggcuggaccgggaccgacagcuccuucagcgugaagcaggacaucgucgccaucaccgacugguccggcuacagcggguccuucgugcagcaccccgagcugacgggccucgacugcauccgccccugcuucugggucgagcugauccggggccgccccaaggagagcaccaucuggaccuccgggagcuccaucagcuucugcggcgugaacuccgacaccgugagcugguccuggccggacggggccgagcugcccuucacgaucgacaaguga

SEQ ID NO: 80607 - RNA, 1350 nt, Artificial Sequence
  derived and/or modified CDS sequence (opt1) from neuraminidase__InfluenzaA__ACJ53876
augaaccccaaccagaagaucaucaccaucggcagcaucugcauggugaucgggaucgucucccugaugcuccagaucggcaacaucaucagcaucugggugucccacagcauccagaccgggaaccagugccaggccgagccgaucuccaacacgaaguuccugaccgagaaggccguggcgagcgucacccuggccggcaacuccagccucugccccaucuccgggugggccguguacagcaaggacaacuccauccgcaucggcagccggggcgacguguucgucauccgcgagcccuucaucuccugcagccaccuggagugccggaccuucuuccugacgcagggggcccuccugaacgacaagcacuccaacggcaccgugaaggaccgcagcccccaccggacccugauguccugcccggugggggaggcccccagccccuacaacucccgcuucgagagcgucgcguggagcgccuccgccugccacgacggcaccagcuggcucacgaucgggaucuccggccccgacaacggcgccguggcggugcugaaguacaacgggaucaucaccgacaccaucaagagcuggcggaacaacauccugcgcacccaggaguccgagugcgccugcgucaacggcagcugcuucacggugaugaccgacgggccguccagcggccaggccuccuacaagaucuucaagauggagaagggcaagguggucaagagcguggagcucgacgcccccaacuaccacuacgaggagugcuccugcuaccccgacgccggggagaucacgugcgugugccgggacaacuggcacggcagcaaccgccccugggucuccuucaaccagaaccuggaguaccagaucggguacaucugcagcggcguguucggggacaacccgcggcccaacgacggcaccggcuccugcgggcccgugagccccaacggcgcguacggggucaagggcuucuccuucaaguacgggaacggcguguggaucggccgcaccaagagcaccaacucccggagcggguucgagaugaucugggacccgaacggcuggaccgggaccgacagcuccuucagcgugaagcaggacaucgucgccaucacggacugguccggcuacagcggguccuucgugcagcaccccgagcugaccggccucgacugcauccgccccugcuucugggucgagcugauccggggccgccccaaggagagcaccaucuggaccuccgggagcuccaucagcuucugcggcgugaacuccgacacggugggguggagcuggccggacggcgccgagcugcccuucaccaucgacaaguga

SEQ ID NO: 80608 - RNA, 1404 nt, Artificial Sequence
  derived and/or modified CDS sequence (opt1) from neuraminidase__InfluenzaA__ACJ67535
augaaccccaaccagaagaucaucgcccugggcagcguguccaucaccaucgccaccaucugccucaucaugcagaucgcgguccuggccacgaccaugacccugcacuucaacgagugcaccaacccgagcaacaaccaggccaugcccugcgagcccaucaucaucgagcgcaacaugacggagaucgugcaccucaacaacaccaccaucgagaaggaguccugccccaagguggccgaguacaagaacuggagcaagccgcagugccagaucaccggguucgcccccuucuccaaggacaacagcauccggcuguccgcgggcggggacaucugggucacgcgcgagcccuacgugagcugcggccuggggaacugcuaccaguucgcccucggccagggcaccacccugaacaacaagcacuccaacgacaccauccacgaccggagcccccaccgcacgcugcucaugaacgagcugggggugccguuccaccugggcaccaagcaggucugcaucgccugguccagcuccagcugccacgacgggaaggccuggcuccacgugugcgugaccggcgacgaccggaacgcgaccgccuccaucaucuacgacgggaugcugacggacagcaucggcuccuggagcaagaacauccugcgcacccaggaguccgagugcgucugcaucaacgggaccugcaccguggugaugacggacgggagcgccagcggccgggccgacaccaagauccucuucauccgcgaggggaagaucguccacaucagcccccuguccggcuccgcccagcacguggaggagugcagcugcuacccccgguaccccgaggugcgcugcgucugccgggacaacuggaagggcuccaaccgcccggugcuguacaucaacguggcggacuacagcgucgacuccagcuacgugugcuccgggcucgugggcgacacgccccggaacgacgacagcuccagcuccagcaacugccgcgaccccaacaacgagcggggcggccccggggucaagggcugggccuucgacaacggcaacgacguguggauggggcgcaccaucaagaaggacucccggagcggcuacgagaccuuccgcguggucgggggcuggaccaccgccaacuccaagagccagaucaaccgccaggugaucgucgacuccgacaacuggagcggguacagcggcaucuucuccguggagggcaagaccugcaucaaccggugcuucuacguggagcugauccgggggcgcccgcaggagacgcgcgucugguggaccagcaacuccaucaucguguucugcggcaccagcgggaccuacggcacgggguccuggcccgacggcgccaacaucaacuucaugagcaucuga

SEQ ID NO: 80609 - RNA, 1410 nt, Artificial Sequence
  derived and/or modified CDS sequence (opt1) from neuraminidase__InfluenzaA__ACK99424
augaaccccaaccagaagaucaucaccaucggcagcgugucccugaccaucgccacgaucugcuuccucaugcagaucgccauccuggucaccaccgugacccugcacuucaagcaguacgagugcagcuccccgcccaacaaccaggugauccccugccagcccacgaucaucgagcgcaacaucaccgagaucgucuaccucaccaacaccacgaucgagaaggagaucugcccgaagcugguggaguaccggaacuggagcaagccccagugcaagaucaccggguucgcgcccuucuccaaggacaacagcauccgccuguccgccggcggggacaucugggugacccgggagcccuacgucagcugcgacccguccaagugcuaccaguucgcccucggccaggggaccacgcugaacaaccgccacagcaacgacaccgugcacgaccggacccccuaccgcacccugcucaugaacgagcugggcgugcccuuccaccugggcacgaagcaggucugcaucgccugguccagcuccagcugccacgacgggaaggccuggcuccacgugugcgugaccggccacgacgagaacgcgaccgccuccuucaucuacgacgggcggcuggucgacagcaucggcuccuggagcaagaacauccugcgcacccaggaguccgagugcgugugcaucaacgggacgugcaccguggucaugaccgacggcagcgccagcgagcgggccgacaccaagauccucuucaucgaggagggcaagguggugcacaucagcccccuguccggguccgcgcagcacgucgaggagugcagcugcuacccgcgcuaccccggcgugcggugcgugugccgcgacaacuggaagggguccaaccggcccaucgucgacaucaacgugaaggacuacagcaucguguccagcuacgucugcuccggccuggugggcgacacgccccgcaagaacgacagcuccagcuccagcuacugccggaacccgaacaacgagaaggggucccacggcgucaaggggugggccuucgacgacggcaacgacguguggauggggcgcaccaucagcgaggagcuccgguccggcuacgagaccuucaaggugaucggcggguggagcacccccaacuccaagcugcagaucaaccgccaggucaucguggacagcggcaaccggagcggguacuccggcaucuucagcguggaggggaaguccugcaucaaccgcugcuucuacgucgagcugauccggggccgcaagcaggagacgaaggugugguggaccagcaacuccaucguggucuucugcggcaccagcgggaccuacggcacgggguccuggcccgacggcgccgacaucaaccucaugcccaucuga

SEQ ID NO: 80610 - RNA, 1410 nt, Artificial Sequence; identical to SEQ ID NO: 80429
  derived and/or modified CDS sequence (opt1) from neuraminidase__InfluenzaA__ACK99435

SEQ ID NO: 80611 - RNA, 1413 nt, Artificial Sequence
  derived and/or modified CDS sequence (opt1) from neuraminidase__InfluenzaA__ACK99446
augaaccccaaccagaagaucaucaccaucggcagcaucuccauggccaucgggaucaucagccugacccuccagaucggcaacaucaucuccaucugggugagccacuccauccagacggggagccagaaccacaccggcaucugcaaccagcgcaucaucaccuacgagaacuccaccugggucaaccagacguacgugaacaucaacaacaccaacguggucgccgggaaggacaagaccagcgugacccuggcgggcaacuccagccugugcccgauccggggcugggccaucuacacgaaggacaacuccauccgcaucgggagcaagggcgacguguucgucauccgggagcccuucaucuccugcagccaccucgagugccgcaccuucuuccugacccagggggcccugcucaacgacaagcacuccaacggcaccgugaaggaccggagcccccaccgcgcccugauguccugcccccugggggaggccccgagccccuacaacucccgguucgagagcguggcguggagcgccuccgccugccacgacggcaugggcuggcucacgaucgggaucagcggccccgacgacggggccgucgcggugcugaaguacaacggcaucaucaccgagaccaucaaguccuggaagaagcgcauccugcggacccaggagagcgagugcgugugcgucaacggcuccugcuucacgaucaugaccgacgggcccagcaacggcgccgccuccuaccgcaucuucaagaucgagaaggggaaggugaccaagagcaucgagcucgacgccccgaacucccacuacgaggagugcagcugcuaccccgacaccggcacggugaugugcgucugccgggacaacuggcacggguccaaccgccccugggugagcuucaaccagaaccuggacuaccagaucggcuacaucugcuccggcguguucggggacaacccccggccgaaggacggcaaggggagcugcaaccccgucaccguggacggcgccgacggggugaagggcuucuccuaccgcuacggcaacggggucuggaucggccggaccaagagcaaccgcuuccggaagggguucgagaugaucugggaccccaacggcuggaccgacacggacuccgacuucagcgugaagcaggacguggucgcgaugaccgacugguccggguacagcggcagcuucgugcagcaccccgagcugaccggccucgacugcaugcgcccgugcuucugggucgagcuggugcgggggcgcccccgggagaacaccacgaucuggaccuccggcagcuccaucagcuucugcggggugaacuccgacaccgccaacuggagcuggcccgacggcgccgagcugcccuucaccaucgacaaguga

SEQ ID NO: 80612 - RNA, 1410 nt, Artificial Sequence
  derived and/or modified CDS sequence (opt1) from neuraminidase__InfluenzaA__ACK99457
augaaccccaaccagaagaucaucaccaucggcagcgugucccugaccaucgccacgaucugcuuccucaugcagaucgccauccuggucaccaccgugacccugcacuucaagcagcacgagugcaacagcccgcccaacaaccaggugaugcccugcgagcccacgaucaucgagcgcaacaucaccgagaucgucuaccucaccaacaccacgaucgagaaggagaucugcccgaagcugguggaguaccggaacugguccaagccccagugcaagaucaccggguucgcgcccuucagcaaggacaacuccauccgccugagcgccggcggggacaucugggugacccgggagcccuacgucuccugcgacccgggcaagugcuaccaguucgcccucgggcagggcaccacgcugaacaaccgccacagcaacgacaccgugcacgaccggacccccuaccgcacccugcucaugaacgagcugggcgugcccuuccaccuggggacgaagcaggucugcaucgccugguccagcuccagcugccacgacggcaaggccuggcuccacgugugcgugaccgggcacgacgagaacgcgaccgccuccuucaucuacgacggccggcuggucgacagcaucguguccuggagcaagaacauccugcgcacccaggaguccgagugcgugugcaucaacgggacgugcaccgucgugaugaccgacggcagcgccuccgagcgggccgacaccaagauccucuucaucgaggagggcaagaucgugcacaucagcccccugagcggguccgcgcagcacgucgaggagugcagcugcuacccgcgcuaccccggcgugcggugcgugugccgcgacaacuggaagggguccaaccggcccaucgucgacaucaacgugaaggacuacagcaucguguccagcuacgucugcuccggccuggugggcgacacgccccgcaagaacgacagcuccagcuccagcuacugccggaacccgaacaacgagaaggggucccacggcgucaaggggugggccuucgacgacggcaacgacguguggauggggcgcaccaucggcgaggagcuccggagcggcuacgagaccuucaaggugaucgggggcugguccacccccaacagcaagcugcagacgaaccgccaggucaucguggaccgggggaaccgcuccggcuacagcgggaucuucuccguggagggcaagagcugcaucaaccggugcuucuacgucgagcugauccgcggccgcaagcaggagaccaaggugugguggaccagcaacuccaucguggucuucugcgggaccagcggcacguacgggaccggcuccuggcccgacggggccgacaucaaccucaugcccaucuga

SEQ ID NO: 80613 - RNA, 1413 nt, Artificial Sequence
  derived and/or modified CDS sequence (opt1) from neuraminidase__InfluenzaA__ACK99468
augaaccccaaccagaagaucaucaccaucggcagcaucuccaucgccaucgggaucaucagccugauccuccagaucggcaacaucaucuccaucugggccagccacuccauccagaccgggagccagaaccacacgggcaucugcaaccagcgcaucaucaccuacgagaacuccaccugggugaaccagaccuacgucaacaucaacaacacgaacgugguggcggggaaggacaagaccagcaugacccuggccggcaacuccagccugugcccgauccggggcugggccaucuacaccaaggacaacuccauccgcaucgggagcaagggcgacgucuucgugauccgggagcccuucaucuccugcagccaccucgagugccgcacguucuuccugacccagggggcccugcucaacgacaagcacuccaacggcaccgugaaggaccggagccccuaccgcgcccugauguccugcccccugggggaggcgccgagccccuacaacucccgguucgagagcgucgccuggagcgccuccgccugccacgacggccucggcuggcugaccaucgggaucagcggccccgacaacggggcgguggccgugcugaaguacaacggcaucaucacggagaccaucaaguccuggaagaagcgcauccuccggacccaggagagcgagugcgucugcaugaacuccagcugcuucaccaucaugacggacggccccuccaacggggccgccagcuaccgcaucuucaagaucgagaagggccgggugaccaaguccaucgagcuggacgccccgaacuaccacuacgaggagugcagcugcuaccccgacaccgggaccgugaugugcgucugccgcgacaacuggcacggcuccaaccggcccugggugagcuucaaccagaaccuggacuaccagaucggguacaucugcuccggcguguucggcgacaacccccgcccgaaggacggggagggcagcugcaaccccgucacgguggacggggcggacggcgugaagggguucuccuaccgguacggcaacggcgucuggaucgggcgcaccaagagcaaccggcuccgcaagggcuucgagaugaucugggaccccaacggguggaccgacaccgacuccgacuucagcaugaagcaggacaucguggccaugacggacugguccggcuacagcgggagcuucgugcagcaccccgagcugaccggccuggacugcaugcggccgugcuucugggucgagcucgugcgcggccugccccgggagaacaccaccaucuggacguccgggagcuccaucagcuucugcggcgugaacuccgacaccgccaacuggagcuggcccgacggggccgagcugcccuucaccaucgacaaguga

SEQ ID NO: 80614 - RNA, 1410 nt, Artificial Sequence
  derived and/or modified CDS sequence (opt1) from neuraminidase__InfluenzaA__ACK99479
augaaccccaaccagaagaucaucaccaucggcagcgugucccugaccaucgccacgaucugcuuccucaugcagaucgccauccuggucaccaccgugacccugcacuucaagcaguacgagugcaacagcccgcccaacaaccaggugaugcucugcgagcccacgaucaucgagcgcaacaucaccgagaucgucuaccugaccaacaccacgaucgagaaggagaucugccccaagcuggcggaguaccggaacugguccaagccgcagugcaagaucaccggguucgcccccuucagcaaggacaacuccauccgccucagcgccggcggggacaucugggugacccgggagcccuacguguccugcgaccccgacaagugcuaccaguucgcccugggccaggggaccacgcugaacaaccgccacagcaacgacaccguccacgaccggaccccguaccgcacccuccugaugaacgagcugggcgugcccuuccaccucggcacgaagcaggucugcaucgccugguccagcuccagcugccacgacgggaaggcguggcugcacgugugcgugaccggccacgacgagaacgccaccgccuccuucaucuacgacgggcggcugguggacagcaucggcuccuggagcaagaagauccuccgcacccaggaguccgagugcgucugcaucaacgggacgugcaccguggugaugaccgacggcagcgccuccggccgggcggacaccaagauccuguucaucgaggaggggaagaucguccacaucagcccccugcucggcagcgcccagcacguggaggagugcuccugcuacccccgcuacccgggggugcggugcgucugccgcgacaacuggaagggcagcaaccggcccaucguggacaucaacgugaaggacuacuccaucgucagcuccuacgugugcagcggccuggugggggacacgccccgcaagaacgacuccagcuccagcucccacugccugaaccccaacaacgaggagggcgggcacggcgucaaggggugggccuucgacgacggcaacgacguguggaugggccggaccaucagcgagaagcuccgcuccggguacgagaccuucaaggucaucgagggcuggagcaagccgaacuccaagcugcagaucaaccgccaggugaucguggaccgggggaaccggagcggcuacuccgggaucuucagcgucgagggcaaguccugcaucaaccgcugcuucuacguggagcugauccggggccgcaagcaggagaccgaggugugguggacgagcaacagcaucgucguguucugcgggaccuccggcaccuacgggaccggcagcuggcccgacggggccaacaucaaccucaugcccaucuga

SEQ ID NO: 80615 - RNA, 1413 nt, Artificial Sequence; identical to SEQ ID NO: 80308
  derived and/or modified CDS sequence (opt1) from neuraminidase__InfluenzaA__ACL12066

SEQ ID NO: 80616 - RNA, 1410 nt, Artificial Sequence; identical to SEQ ID NO: 79209
  derived and/or modified CDS sequence (opt1) from neuraminidase__InfluenzaA__ACL12132

SEQ ID NO: 80617 - RNA, 1413 nt, Artificial Sequence; identical to SEQ ID NO: 80542
  derived and/or modified CDS sequence (opt1) from neuraminidase__InfluenzaA__ACL12154

SEQ ID NO: 80618 - RNA, 1410 nt, Artificial Sequence; identical to SEQ ID NO: 80536
  derived and/or modified CDS sequence (opt1) from neuraminidase__InfluenzaA__ACL12165

SEQ ID NO: 80619 - RNA, 1410 nt, Artificial Sequence; identical to SEQ ID NO: 80536
  derived and/or modified CDS sequence (opt1) from neuraminidase__InfluenzaA__ACL12176

SEQ ID NO: 80620 - RNA, 1410 nt, Artificial Sequence
  derived and/or modified CDS sequence (opt1) from neuraminidase__InfluenzaA__ACL12198
augaaccccaaccagaagaucaucaccaucggcagcgugucccugaccaucagcacgaucugcuucuucaugcagaucgccauccucaucaccaccgucacccugcacuucaagcaguacgaguucaacuccacgccgaacaaccaggugaugcugugcgagcccaccaucaucgagcgcaacaucaccgagaucguguaccucaccaacacgaccaucgagaaggagaucugccccaagcuggccgaguaccggaacuggagcaagccccagugcgacaucaccggguucgcgccguucuccaaggacaacagcauccgccuguccgccggcggggacaucugggucacccgggagcccuacgugagcugcgaccccgacaagugcuaccaguucgcccucggccaggggacgacccugaacaacgugcacuccaacgacaccguccgcgaccggacccccuaccgcacgcugcucaugaacgagcugggcgugccguuccaccugggcaccaagcaggucugcaucgccuggagcuccagcuccugccacgacgggaaggccuggcuccacgugugcaucaccggcgacgacaagaacgcgaccgccagcuucaucuacaacgggcggcugguggacuccguggucagcugguccaaggagauccugcgcacgcaggagagcgagugcgugugcaucaacgggaccugcaccguggucaugaccgacggguccgccagcggcaaggccgacacgaagauccucuucaucgaggagggcaagaucgugcacaccagcacccuguccgggagcgcgcagcacguggaggagugcuccugcuacccccgguaccccggcguccgcugcgugugccgggacaacuggaaggggagcaaccgccccaucguggacaucaacaucaaggaccacuccaucgucagcuccuacgugugcagcggccuggugggcgacaccccgcggaagaacgacuccagcuccagcucccacugccucgaccccaacaacgaggagggcggccacggggucaagggcugggccuucgacgacgggaacgacguguggaugggccgcacgaucagcgagaagucccggcugggcuacgagaccuucaaggucaucgagggguggagcaaccccaaguccaagcugcagaucaaccgccaggugaucguggaccggggcaaccgcagcggguacuccggcaucuucagcgucgagggcaagagcugcaucaaccggugcuucuacguggagcucauccgcgggcggaaggaggagaccgaggugcuguggaccuccaacagcaucgucguguucugcggcacguccgggaccuacggcaccgggagcuggcccgacggcgccgacaucaaccugaugccgaucuga

SEQ ID NO: 80621 - RNA, 1410 nt, Artificial Sequence; identical to SEQ ID NO: 80114
  derived and/or modified CDS sequence (opt1) from neuraminidase__InfluenzaA__ACL12209

SEQ ID NO: 80622 - RNA, 1410 nt, Artificial Sequence; identical to SEQ ID NO: 80536
  derived and/or modified CDS sequence (opt1) from neuraminidase__InfluenzaA__ACL12220

SEQ ID NO: 80623 - RNA, 1410 nt, Artificial Sequence
  derived and/or modified CDS sequence (opt1) from neuraminidase__InfluenzaA__ACL12242
augaaccccaaccagaagaucaucaccaucggcagcgugucccugaccaucagcacgaucugcuucuucaugcagaucgccauccucaucaccaccgucacccugcacuucaagcaguacgaguucaacuccccgcccaacaaccaggugaugcugugcgagcccacgaucaucgagcgcaacaucaccgagaucguguaccucaccaacaccacgaucgagaaggagaucugccccaagcuggccgaguaccggaacuggagcaagccgcagugcgacaucaccggguucgcgcccuucuccaaggacaacagcauccgccuguccgccggcggggacaucugggucacccgggagcccuacgugagcugcgaccccgacaagugcuaccaguucgcccucggccaggggaccacgcugaacaacgugcacuccaacaacaccguccgcgaccggaccccguaccgcacccugcucaugaacgagcugggcgugcccuuccaccugggcacgaagcaggucugcaucgccuggagcuccagcuccugccacgacgggaaggccuggcuccacgugugcaucaccggcgacgacaagaacgcgaccgccagcuucaucuacaacgggcggcugguggacuccguggucagcugguccaaggagauccugcgcacccaggagagcgagugcgugugcaucaacggcacgugcaccguggucaugaccgacggguccgccagcggcaaggccgacaccaagauccucuucaucgaggagggcaagaucgugcacacgagcacccuguccgggagcgcgcagcacguggaggagugcuccugcuacccccgguaccccggcguccgcugcgugugccgggacaacuggaaggggagcaaccgcccgaucguggacaucaacaucaaggaccacuccaucgucagcuccuacgugugcagcggccuggugggcgacacgccccggaagaacgacuccagcuccagcucccacugccucgaccccaacaacgaggagggcgggcacggggucaagggcugggccuucgacgacgggaacgacguguggaugggccgcaccaucagcgagaagucccggcugggcuacgagaccuucaaggucaucgagggguggagcaaccccaaguccaagcugcagaucaaccgccaggugaucguggaccggggcaaccgcagcggguacuccggcaucuucagcgucgagggcaagagcugcaucaaccggugcuucuacguggagcucauccgcgggcggaaggaggagaccgaggugcuguggaccuccaacagcaucgucguguucugcggcaccuccgggacguacggcaccgggagcuggccggacggcgccgacaucaaccugaugcccaucuga

SEQ ID NO: 80624 - RNA, 1413 nt, Artificial Sequence
  derived and/or modified CDS sequence (opt1) from neuraminidase__InfluenzaA__ACL12264
augaaccccaaccagaagaucaucaccaucggcagcaucuccauggccaucgggaucaucagccugauccuccagaucgugaacaucaucuccaucugggucagccacuccauccagaccggcagccagaaccacacggggaucugcaaccagcgcaucaucaccuacgagaacuccaccugggugaaccagaccuacgugaacaucaacaacacgaacgucguggccggcaaggacaagaccagcgugacccuggcggggaacuccagccugugcccgauccggggcugggccaucuacaccaaggacaacuccauccgcaucggcagcaagggggacgucuucgugauccgggagcccuucaucuccugcagccaccucgagugccgcacguucuuccugacccagggcgcccugcucaacgacaagcacuccaacgggaccgugaaggaccggagccccuaccgcgcccugauguccugcccccugggcgaggccccgagccccuacaacucccgguucgagagcgucgcguggagcgccuccgccugccacgacgggaugggcuggcucaccaucggcaucagcgggcccgacgacggcgccguggcggugcugaaguacaacgggaucaucacggagaccaucaaguccuggaagaagcgcauccugcggacccaggagagcgagugcgucugcgugaacggcuccugcuucaccaucaugacggacggccccagcaacggggccgccuccuaccgcaucuucaagaucgagaagggcaaggugaccaagagcaucgagcucgacgccccgaacucccacuacgaggagugcagcugcuaccccgacaccgggaccgucaugugcgugugccgggacaacuggcacggcuccaaccgccccugggugagcuucaaccagaaccuggacuaccagaucggguacaucugcuccggcgucuucggcgacaacccccggccgaaggacgggaagggcagcugcgaccccgugacgguggacggggccgacggcgucaagggguucuccuaccgcuacggcaacggcguguggaucgggcggaccaagagcaaccgcuuccggaagggcuucgagaugaucugggaccccaacggguggaccgacaccgacuccgacuucagcgugaagcaggacgucguggcgaugacggacugguccggcuacagcgggagcuucguccagcaccccgagcugaccggccucgacugcaugcgcccgugcuucuggguggagcuggugcggggccgcccccgggagaacaccaccaucuggacguccgggagcuccaucagcuucugcggcgucaacuccgacaccgccaacuggagcuggcccgacggggccgagcugcccuucaccaucgacaaguga

SEQ ID NO: 80625 - RNA, 1410 nt, Artificial Sequence; identical to SEQ ID NO: 80429
  derived and/or modified CDS sequence (opt1) from neuraminidase__InfluenzaA__ACN32275

SEQ ID NO: 80626 - RNA, 1410 nt, Artificial Sequence
  derived and/or modified CDS sequence (opt1) from neuraminidase__InfluenzaA__ACN32286
augaaccccaacaagaagaucaucaccaucggcagcgugucccugaccaucagcacgaucugcuucuucaugcagaucgccauccucaucaccaccgucacccugcacuucaagcaguacgaguucaacuccccgcccaacaaccaggugaugcugugcgagcccacgaucaucgagcgcaacaucaccgagaucguguaccucaccaacaccacgaucgagaaggagaucugccccaagcuggccgaguaccggaacuggagcaagccgcagugcgacaucaccggguucgcgcccuucuccaaggacaacagcauccgccuguccgccggcggggacaucugggucacccgggagcccuacgugagcugcgaccccgacaagugcuaccaguucgcccucggccaggggaccacgcugaacaacgugcacuccaacgacaccguccgcgaccggaccccguaccgcacccugcucaugaacgagcugggcgugcccuuccaccugggcacgaagcaggucugcaucgccuggagcuccagcuccugccacgacgggaaggccuggcuccacgugugcaucaccggcgacgacaagaacgcgaccgccagcuucaucuacaacgggcggcugguggacuccaucgugagcugguccaaggagauccugcgcacccaggagagcgagugcgucugcaucaacggcacgugcaccguggugaugaccgacggguccgccagcggcaaggccgacaccaagauccucuucaucgaggagggcaagaucguccacacgagcacccugcugggguccgcgcagcacguggaggagugcagcugcuacccccgguaccccggcgugcgcugcgucugccgggacaacuggaagggguccaaccgcccgaucguggacaucaacaucaaggaccacagcaucguguccagcuacgucugcuccggccucgugggcgacacgccccggaagaacgacagcuccagcuccgggcacugccuggaccccaacaacgaggagggcgggcacggcgugaaggggugggccuucgacgacggcaacgacgucuggaugggccgcaccaucagcgagaagucccggcugggguacgagaccuucaaggugaucgagggcuggagcaaccccaaguccaagcuccagaucaaccgccaggucaucguggaccgggggaaccgcagcggcuacuccgggaucuucagcguggagggcaaguccugcaucaaccggugcuucuacgucgagcugauccgcggccggaaggaggagaccgaggugcuguggaccagcaacagcaucguggucuucugcgggaccuccggcacguacgggaccggcagcuggccggacggggccgacaucaaccucaugcccaucuga

SEQ ID NO: 80627 - RNA, 1410 nt, Artificial Sequence
  derived and/or modified CDS sequence (opt1) from neuraminidase__InfluenzaA__ACN32493
augaaccccaaccagaagaucaucaccaucggcagcgugucccugaccaucagcacgaucugcuucuucaugcagaucgccauccucaucaccaccgucacccugcacuucaagcaguacgaguucaacuccagcccgaacaaccaggugaugcugugcgagcccacgaucaucgagcgcaacaucaccgagaucguguaccucaccaacaccacgaucgagaaggagaucugccccaagcuggccgaguaccggaacugguccaagccccagugcgacaucaccggguucgcgccguucagcaaggacaacuccauccgccugagcgccggcggggacaucugggucacccgggagcccuacguguccugcgaccccgacaagugcuaccaguucgcccucggccaggggaccacgcugaacaacgugcacagcaacaacaccguccgcgaccggacccccuaccgcacccugcucaugaacgagcugggcgugccguuccaccugggcacgaagcaggucugcaucgccugguccagcuccagcugccacgacgggaaggccuggcuccacgugugcaucaccggcgacgacaagaacgcgaccgccuccuucaucuacaacgggcggcugguggacagcaucguguccuggagcaaggagauccugcgcacccaggaguccgagugcgucugcaucaacggcacgugcaccguggugaugaccgacgggagcgccagcggcaaggccgacaccaagauccucuucaucgaggagggcaagaucguccacacguccacccugagcggguccgcgcagcacguggaggagugcagcugcuacccccgguaccccggcgugcgcugcgucugccgggacaacuggaagggguccaaccgccccaucguggacaucaacaucaaggaccacagcaucguguccagcuacgucugcuccggccuggugggcgacaccccgcggaagaacgacagcuccagcuccagccacugccucgaccccaacaacgaggagggcgggcacggggugaagggcugggccuucgacgacgggaacgacgucuggaugggccgcaccaucuccgagaagucccggcugggcuacgagacguucaaggugaucgagggguggagcaaccccaagagcaagcugcagaucaaccgccaggucaucguggaccggggcaaccgcuccggguacagcggcaucuucagcguggaggggaaguccugcaucaaccggugcuucuacgucgagcucauccgcggccggaaggaggagaccgaggugcuguggaccagcaacuccaucguggucuucugcggcaccagcgggacguacggcaccggguccuggcccgacggcgccgacaucaaccugaugccgaucuga

SEQ ID NO: 80628 - RNA, 1410 nt, Artificial Sequence; identical to SEQ ID NO: 78178
  derived and/or modified CDS sequence (opt1) from neuraminidase__InfluenzaA__ACN32526

SEQ ID NO: 80629 - RNA, 1410 nt, Artificial Sequence
  derived and/or modified CDS sequence (opt1) from neuraminidase__InfluenzaA__ACN32537
augaaccccaaccagaagaucaucaccaucggcagcgugucccugaccaucgccacgaucugcuuccucaugcagaucgccauccuggucaccaccgugacccugcacuucaagcaguacgagugcaacagcccgcccaacaaccaggugaugcucugcgagcccacgaucaucgagcgcaacaucaccgagaucgucuaccugaccaacaccacgaucgagaaggagaucugccccaagcuggcggaguaccggaacugguccaagccgcagugcaacaucaccggguucgcccccuucagcaaggacaacuccauccgccucagcgccggcggggacaucugggugacccgggagcccuacguguccugcgaccccgacaagugcuaccaguucgcccugggccaggggaccacgcugaacaacggccacagcaacgacaccguccacgaccgcaccccguaccggacccuccugaugaacgagcugggcgugcccuuccaccucgggacgcgccaggugugcaucgccugguccagcuccagcugccacgacggcaaggcguggcugcacgucugcgugaccggggacgacgagaacgccaccgccuccuucaucuacaacggccggcugguggacagcaucggguccuggagcaagaagauccuccgcacccaggaguccgagugcgucugcaucaacggcacgugcaccguggugaugaccgacggcagcgccuccgggaaggcggacaccaagauccuguucaucgaggagggcaagaucguccacaucagcacgcugagcggguccgcccagcacguggaggagugcagcugcuacccccgguaccccgacgugcgcugcgucugccgggacaacuggaagggcuccaaccgcccgaucguggacaucaacgugaaggacuacagcaucgucuccagcuacgugugcuccggccucgugggggacacgccccggaagaacgacagcuucuccagcucccacugccuggaccccaacaacgaggagggcgggcacggcgucaaggggugggccuucgacgacggcaacgacguguggaugggccgcaccaucagcgagaagcugcgguccggguacgagaccuucaaggucaucgacggcuggagcaagcccaacuccaagcuccagaucaaccgccaggugaucguggagcgggggaaccgcagcggcuacuccgggaucuucagcgucgagggcaaguccugcaucaaccggugcuucuacguggagcugauccgcggccggaaggaggagaccgaggugugguggaccagcaacagcaucgucguguucugcgggaccuccggcaccuacgggacgggcagcuggccggacggggccgacaucaaccugaugcccaucuga

SEQ ID NO: 80630 - RNA, 1413 nt, Artificial Sequence; identical to SEQ ID NO: 80106
  derived and/or modified CDS sequence (opt1) from neuraminidase__InfluenzaA__ACN32807

SEQ ID NO: 80631 - RNA, 1413 nt, Artificial Sequence; identical to SEQ ID NO: 80054
  derived and/or modified CDS sequence (opt1) from neuraminidase__InfluenzaA__ACN32818

SEQ ID NO: 80632 - RNA, 1413 nt, Artificial Sequence; identical to SEQ ID NO: 80054
  derived and/or modified CDS sequence (opt1) from neuraminidase__InfluenzaA__ACN32829

SEQ ID NO: 80633 - RNA, 1413 nt, Artificial Sequence
  derived and/or modified CDS sequence (opt1) from neuraminidase__InfluenzaA__ACN32840
augaaccccaaccagaagaucaucaccaucggcagcaucuccaucgccaucgggaucaucagccugaugcuccagaucggcaacaucaucuccaucugggccagccacuccauccagaccgggagccagaaccacacgggcaucugcaaccagcgcaucaucaccuacgagaacuccaccugggugaaccacaccuacgucagcaucaacaacacgaacgugguggcggggaaggacaagaccuccgucacccuggccggcaacagcucccugugcagcaucuccggcugggccaucuacaccaaggacaacagcauccggaucggguccaagggcgacguguucgugauccgcgagccguucaucagcugcucccaccucgagugccggacguucuuccugacccagggggcccugcucaacgacaagcacagcaacggcaccgucaaggaccgcucccccuaccgggcccugaugagcugcccccugggggaggcgcccagcccguacaacuccaaguucgagagcguggccugguccgccagcgccugccacgacggcaugggcuggcucaccaucgggaucuccggccccgacaacggggcgguggccguccugaaguacaacggcaucaucacggagaccaucaagagcuggaagaagcgcauccugcggacccaggaguccgagugcgugugcgugaacggcagcugcuucaccaucaugacggacgggcccuccaacggcgccgccagcuacaagaucuucaagaucgagaaggggaaggucaccaaguccaucgagcucaacgcccccaacuuccacuacgaggagugcagcugcuacccggacaccggcaccgugaugugcgugugccgcgacaacuggcacggguccaaccggcccugggucagcuucaaccagaaccuggacuaccagaucggcuacaucugcuccggcguguucggggacaacccccgccccaaggacggcaaggggagcugcaacccggugacggucgacggcgcggacggggugaagggcuucuccuacaaguacggcaacgggguguggaucggccggaccaagagcaaccgccugcggaagggguucgagaugaucugggaccccaacggcuggaccgacaccgacuccgacuucagcgucaagcaggacgugguggccaucacggacuggagcggguacuccggcagcuucguccagcaccccgagcucaccggccuggacugcauccgccccugcuucuggguggagcugguccgggggcucccgcgcgagaacaccaccaucuggacguccggcagcuccaucagcuucugcgggguggacuccgacaccgugaacuggagcuggcccgacggcgccgagcugcccuucaccaucgacaaguga

SEQ ID NO: 80634 - RNA, 1410 nt, Artificial Sequence; identical to SEQ ID NO: 80536
  derived and/or modified CDS sequence (opt1) from neuraminidase__InfluenzaA__ACN32851

SEQ ID NO: 80635 - RNA, 1410 nt, Artificial Sequence; identical to SEQ ID NO: 80623
  derived and/or modified CDS sequence (opt1) from neuraminidase__InfluenzaA__ACN32862

SEQ ID NO: 80636 - RNA, 1410 nt, Artificial Sequence; identical to SEQ ID NO: 80627
  derived and/or modified CDS sequence (opt1) from neuraminidase__InfluenzaA__ACN32873

SEQ ID NO: 80637 - RNA, 1410 nt, Artificial Sequence; identical to SEQ ID NO: 80623
  derived and/or modified CDS sequence (opt1) from neuraminidase__InfluenzaA__ACN32884

SEQ ID NO: 80638 - RNA, 1410 nt, Artificial Sequence; identical to SEQ ID NO: 80627
  derived and/or modified CDS sequence (opt1) from neuraminidase__InfluenzaA__ACN32895

SEQ ID NO: 80639 - RNA, 1410 nt, Artificial Sequence; identical to SEQ ID NO: 80536
  derived and/or modified CDS sequence (opt1) from neuraminidase__InfluenzaA__ACN32906

SEQ ID NO: 80640 - RNA, 1410 nt, Artificial Sequence
  derived and/or modified CDS sequence (opt1) from neuraminidase__InfluenzaA__ACN32917
augaaccccaaccagaagaucaucaccaucggcagcgugucccugaccaucagcacgaucugcuucuucaugcagaucgccauccucaucaccaccgucacccugcacuucaagcaguacgaguucaacuccccgcccaacaaccaggugaugcugugcaagcccacgaucaucgagcgcaacaucaccgagaucguguaccucaccaacaccacgaucgagaaggagaucugccccaagcuggccgaguaccggaacuggagcaagccgcagugcgacaucaccggguucgcgcccuucuccaaggacaacagcauccgccuguccgccggcggggacaucugggucacccgggagcccuacgugagcugcgaccccgacaagugcuaccaguucgcccucggccaggggaccacgcugaacaacgugcacuccaacaacaccguccgcgaccggaccccguaccgcacccugcucaugaacgagcugggcgugcccuuccaccugggcacgaagcaggucugcaucgccuggagcuccagcuccugccacgacgggaaggccuggcuccacgugugcaucaccggcgacgacaagaacgcgaccgccagcuucaucuacaacgggcggcugguggacuccguggucagcugguccaaggagauccugcgcacccaggagagcgagugcgugugcaucaacggcacgugcaccguggucaugaccgacggguccgccagcggcaaggccgacaccaagauccucuucaucgaggagggcaagaucgugcacacgagcacccuguccgggagcgcgcagcacguggaggagugcuccugcuacccccgguaccccggcguccgcugcgugugccgggacaacuggaaggggagcaaccgcccgaucguggacaucaacaucaccgaccacuccaucgucagcuccuacgugugcagcggccuggugggcgacacgccccggaagaacgacuccagcuccagcucccacugccucgaccccaacaacgaggagggcgggcacggggucaagggcugggccuucgacgacgggaacgacguguggaugggccgcaccaucagcgagaagucccggcugggcuacgagaccuucaaggucaucgagggguggagcaaccccaaguccaagcugcagaucaaccgccaggugaucguggaccggggcaaccgcagcggguacuccggcaucuucagcgucgagggcaagagcugcaucaaccggugcuucuacguggagcucauccgcgggcggaaggaggagaccgaggugcuguggaccuccaacagcaucgucguguucugcggcacguccgggaccuacggcaccgggagcuggccggacggcgccgacaucaaccugaugcccaucuga

SEQ ID NO: 80641 - RNA, 1410 nt, Artificial Sequence
  derived and/or modified CDS sequence (opt1) from neuraminidase__InfluenzaA__ACN32928
augaaccccaaccagaagaucaucaccaucggcagcgugucccugaccaucagcacgaucugcuucuucaugcagaucgccauccucaucaccaccgucacccugcacuucaagcaguacgaguucaacuccccgcccaacaaccaggugaugcugugcgagcccacgaucaucgagcgcaacaucaccgagaucguguaccucaccaacaccacgaucgagaaggagaucugccccaagcuggccgaguaccggaacuggagcaagccgcagugcgacaucaccggguucgcgcccuucuccaaggacaacagcauccgccuguccgccggcggggacaucugggucacccgggagcccuacgugagcugcgaccccgacaagugcuaccaguucgcccucggccaggggaccacgcugaacaacgugcacuccaacaacaccguccgcgaccggaccccguaccgcacccugcucaugaacgagcugggcgugcccuuccaccugggcacgaagcaggucugcaucgccuggagcuccagcuccugccacgacgggaaggccuggcuccacgugugcaucaccggcgacgacaagaacgcgaccgccagcuucaucuacaacgggcggcugguggacuccguggucagcugguccaaggagauccugcgcacccaggagagcgagugcgugugcaucaacggcacgugcaccguggucaugaccgacggguccgccagcggcaaggccgacaccaagauccucuucaucgaggagggcaagaucgugcacacgagcacccuguccgggagcgcgcagcacguggaggagugcuccugcuacccccgguaccccggcguccgcugcgugugccgggacaacuggaaggggagcaaccgcccgaucguggacaucaacaucaccgaccacuccaucgucagcuccuacgugugcagcggccuggugggcgacacgccccggaagaacgacuccagcuccagcucccacugccucgaccccaacaacgaggagggcgggcacggggucaagggcugggccuucgacgacgggaacgacguguggaugggccgcaccaucagcgagaagucccggcugggcuacgagaccuucaaggucaucgagggguggagcaaccccaaguccaagcugcagaucaaccgccaggugaucguggaccggggcaaccgcagcggguacuccggcaucuucagcgucgagggcaagagcugcaucaaccggugcuucuacguggagcucauccgcgggcggaaggaggagaccgaggugcuguggaccuccaacagcaucgucguguucugcggcacguccgggaccuacggcaccgggagcuggccggacggcgccgacaucaaccugaugcccaucuga

SEQ ID NO: 80642 - RNA, 1410 nt, Artificial Sequence; identical to SEQ ID NO: 80627
  derived and/or modified CDS sequence (opt1) from neuraminidase__InfluenzaA__ACN32939

SEQ ID NO: 80643 - RNA, 1410 nt, Artificial Sequence; identical to SEQ ID NO: 80536
  derived and/or modified CDS sequence (opt1) from neuraminidase__InfluenzaA__ACN32950

SEQ ID NO: 80644 - RNA, 1410 nt, Artificial Sequence
  derived and/or modified CDS sequence (opt1) from neuraminidase__InfluenzaA__ACN32961
augaaccccaaccagaagaucaucaccaucggcagcgugucccugaccaucagcacgaucugcuucuucaugcagaucgccauccucaucaccaccgucacccugcacuucaagcaguacgaguucaacuccccgcccaacaaccaggugaugcugugcgagcccacgaucaucgagcgcaacaucaccgagaucguguaccucaccaacaccacgaucgagaaggagaucugccccaagcuggccgaguaccggaacuggagcaagccgcagugcgacaucaccggguucgcgcccuucuccaaggacaacagcauccgccuguccgccggcggggacaucugggucacccgggagcccuacgugagcugcgaccccgacaagugcuaccaguucgcccucggccaggggaccacgcugaacaacgugcacuccaacaacaccguccgcgaccggaccccguaccgcacccugcucaugaacgagcugggcgugcccuuccaccugggcacgaagcaggucugcaucgccuggagcuccagcuccugccacgacgggaaggccuggcuccacgugugcaucaccggcgacgacaagaacgcgaccgccagcuucaucuacaacgggcggcugguggacuccguggucagcugguccaaggagauccugcgcacccaggagagcgagugcgugugcaucaacggcacgugcaccguggucaugaccgacggguccgccagcggcaaggccgacaccaagauccucuucaucgaggagggcaagaucgugcacacgagcacccuguccgggagcgcgcagcacguggaggagugcuccugcuacccccgguaccccggcguccgcugcgugugccgggacaacuggaaggggagcaaccgcccgaucguggacaucaacaucaccgaccacuccaucgucagcuccuacgugugcagcggccuggugggcgacacgccccggaagaacgacuccagcuccagcucccacugccucgaccccaacaacgaggagggcgggcacggggucaagggcugggccuucgacgacgggaacgacguguggaugggccgcaccaucagcgagaagucccggcugggcuacgagaccuucaaggucaucgagggguggagcaaccccaaguccaagcugcagaucaaccgccaggugaucguggaccggggcaaccgcagcggguacuccggcaucuucagcgucgagggcaagagcugcaucaaccggugcuucuacguggagcucauccgcgggcggaaggaggagaccgaggugcuguggaccuccaacagcaucgucguguucugcggcacguccgggaccuacggcaccgggagcuggccggacggcgccgacaucaacaucaugcccaucuga

SEQ ID NO: 80645 - RNA, 1410 nt, Artificial Sequence; identical to SEQ ID NO: 80623
  derived and/or modified CDS sequence (opt1) from neuraminidase__InfluenzaA__ACN32972

SEQ ID NO: 80646 - RNA, 1410 nt, Artificial Sequence; identical to SEQ ID NO: 80623
  derived and/or modified CDS sequence (opt1) from neuraminidase__InfluenzaA__ACN32994

SEQ ID NO: 80647 - RNA, 1410 nt, Artificial Sequence
  derived and/or modified CDS sequence (opt1) from neuraminidase__InfluenzaA__ACN33005
augaaccccaaccagaagaucaucaccaucggcagcgugucccugaccaucagcacgaucugcuucuucaugcagaucgccauccucaucaccaccgucacccugcacuucaagcaguacgaguucaacuccccgcccaacaaccaggugaugcugugcgagcccacgaucaucgagcgcaacaucaccgagaucguguaccucaccaacaccacgaucgagaaggagaucugccccaagcuggccgaguaccggaacuggagcaagccgcagugcgacaucaccggguucgcgcccuucuccaaggacaacagcauccgccuguccgccggcggggacaucugggucacccgggagcccuacgugagcugcgaccccgacaagugcuaccaguucgcccucggccaggggaccacgcugaacaacgugcacuccaacgacaccguccgcgaccggaccccguaccgcacccugcucaugaacgagcugggcgugcccuuccaccugggcacgaagcaggucugcaucgccuggagcuccagcuccugccacgacgggaaggccuggcuccacgugugcaucaccggcgacgacaagaacgcgaccgccagcuucaucuacaacgggcggcugguggacuccguggucagcugguccaaggagauccugcgcacccaggagagcgagugcgugugcaucaacggcacgugcaccguggucaugaccgacggguccgccagcggcaaggccgacaccaagauccucuucaucgaggagggcaagaucgugcacacgagcacccuguccgggagcgcgcagcacguggaggagugcuccugcuacccccgguaccccggcguccgcugcgugugccgggacaacuggaaggggagcaaccgcccgaucguggacaucaacaucaaggaccacuccaucgucagcuccuacgugugcagcggccuggugggcgacacgccccggaagaacgacuccagcuccagcucccacugccucgaccccaacaacgaggagggcgggcacggggucaagggcugggccuucgacgacgggaacgacguguggaugggccgcaccaucagcgagaagucccggcugggcuacgagaccuucaaggucaucgagggguggagcaaccccaaguccaagcugcagaucaaccgccaggugaucguggaccggggcaaccgcagcggguacuccggcaucuucagcgucgagggggagagcugcaucaaccggugcuucuacguggagcucauccgcggccggaaggaggagaccgaggugcuguggaccuccaacagcaucgucguguucugcggcaccuccgggacguacggcaccgggagcuggccggacggcgccgacaucaaccugaugcccaucuga

SEQ ID NO: 80648 - RNA, 1410 nt, Artificial Sequence; identical to SEQ ID NO: 80623
  derived and/or modified CDS sequence (opt1) from neuraminidase__InfluenzaA__ACN33016

SEQ ID NO: 80649 - RNA, 1410 nt, Artificial Sequence; identical to SEQ ID NO: 80623
  derived and/or modified CDS sequence (opt1) from neuraminidase__InfluenzaA__ACN33049

SEQ ID NO: 80650 - RNA, 1410 nt, Artificial Sequence; identical to SEQ ID NO: 80623
  derived and/or modified CDS sequence (opt1) from neuraminidase__InfluenzaA__ACN33060

SEQ ID NO: 80651 - RNA, 1410 nt, Artificial Sequence; identical to SEQ ID NO: 80627
  derived and/or modified CDS sequence (opt1) from neuraminidase__InfluenzaA__ACN33082

SEQ ID NO: 80652 - RNA, 1413 nt, Artificial Sequence; identical to SEQ ID NO: 80093
  derived and/or modified CDS sequence (opt1) from neuraminidase__InfluenzaA__ACN33093

SEQ ID NO: 80653 - RNA, 1413 nt, Artificial Sequence; identical to SEQ ID NO: 80054
  derived and/or modified CDS sequence (opt1) from neuraminidase__InfluenzaA__ACN33104

SEQ ID NO: 80654 - RNA, 1410 nt, Artificial Sequence; identical to SEQ ID NO: 80627
  derived and/or modified CDS sequence (opt1) from neuraminidase__InfluenzaA__ACN33115

SEQ ID NO: 80655 - RNA, 1413 nt, Artificial Sequence
  derived and/or modified CDS sequence (opt1) from neuraminidase__InfluenzaA__ACN33126
augaaccccaaccagaagaucaucaccaucggcagcaucuccaucgccaucgggaucaucagccugaugcuccagaucggcaacaucaucuccaucugggccagccacuccauccagaccgggagccagaacaacacgggcaucugcaaccagcgcaucaucaccuacgagaacuccaccugggugaaccacaccuacgucaacaucaacaacacgaacgugguggcgggggaggacaagaccagcgucacccuggccggcuccagcucccugugcagcaucuccggcugggccaucuacaccaaggacaacagcauccggaucggguccaagggcgacguguucgugauccgcgagccguucaucagcugcucccaccucgagugccggacguucuuccugacccagggggcccugcucaacgacaagcacagcaacggcaccgucaaggaccgcucccccuaccgggcccugaugagcugcccccugggggaggcgcccagcccguacaacuccaaguucgagagcguggccugguccgccagcgccugccacgacggcaugggcuggcucaccaucgggaucuccggccccgacaacggggcgguggccguccugaaguacaacggcaucaucacgggcaccaucaagagcuggaagaagcagauccugcgcacccaggaguccgagugcgugugcaugaacgggagcugcuucaccaucaugacggacggccccuccaacaaggccgccagcuacaagaucuucaagaucgagaaggggaaggugaccaaguccaucgagcucaacgcccccaacuuccacuacgaggagugcagcugcuacccggacaccggcaucgucaugugcgugugccgggacaacuggcacggguccaaccgccccugggugagcuucaaccagaaccuggacuaccagaucggcuacaucugcuccggcgucuucggggacaacccccggcccgaggacggcgaggggagcugcaacccggugaccguggacggcgcgaacggggucaagggcuucuccuacaaguacgacaacggcguguggaucgggcgcaccaagagcaaccggcugcgcaagggcuucgagaugaucugggaccccaacggguggacgaacaccgacuccgacuucagcgugaagcaggacgucguggccaucaccgacuggagcggcuacuccgggagcuucgugcagcaccccgagcucacgggccuggacugcauccggcccugcuucugggucgagcuggugcgcggccucccgcgggagaacaccaccaucuggaccuccgggagcuccaucagcuucugcggcgucaacuccgacacggccaacuggagcuggcccgacggggccgagcugcccuucaccaucgacaaguga

SEQ ID NO: 80656 - RNA, 1413 nt, Artificial Sequence
  derived and/or modified CDS sequence (opt1) from neuraminidase__InfluenzaA__ACN33148
augaaccccaaccagaagaucaucaccaucggcagcaucuccaucgccaucgggaucaucagccugaugcuccagaucggcaacaucaucuccaucugggccagccacuccauccagaccgggagccagaacaacacgggcaucugcaaccagcgcaucaucaccuacgagaacuccaccugggugaaccacaccuacgucaacaucaacaacacgaacgugguggcgggggaggacaagaccagcgucacccuggccggcaacuccagccugugcuccaucagcggcugggccaucuacaccaaggacaacuccauccggaucgggagcaagggcgacguguucgugauccgcgagccguucaucuccugcagccaccucgagugccggacguucuuccugacccagggggcccugcucaacgacaagcacuccaacggcaccgucaaggaccgcagccccuaccgggcccugauguccugcccccugggggaggcgcccagcccguacaacagcaaguucgaguccguggccuggagcgccuccgccugccacgacggcaugggcuggcucaccaucgggaucagcggccccgacaacggggcgguggccguccugaaguacaacggcaucaucacgggcaccaucaaguccuggaagaagcagauccugcgcacccaggagagcgagugcgugugcaugaacggguccugcuucaccaucaugacggacggccccagcaacaaggccgccuccuacaagaucuucaagaucgagaaggggaaggugaccaagagcaucgagcucaacgcccccaacuuccacuacgaggagugcuccugcuacccggacaccggcaucgucaugugcgugugccgggacaacuggcacgggagcaaccgccccuggguguccuucaaccagaaccuggacuaccagaucggcuacaucugcagcggcgucuucggggacaacccccggcccgaggacggcgagggguccugcaacccggugaccguggacggcgcgaacggggucaagggcuucagcuacaaguacgacaacggcguguggaucgggcgcacgaaguccaaccggcugcgcaagggcuucgagaugaucugggaccccaacggguggaccaacaccgacagcgacuucuccgugaagcaggacgucguggccaucaccgacuggagcggcuacagcggguccuucgugcagcaccccgagcucacgggccuggacugcauccggcccugcuucugggucgagcuggugcgcggccucccgcgggagaacaccaccaucuggaccagcggguccagcaucuccuucugcggcgucaacagcgacacggccaacugguccuggcccgacggggccgagcugcccuucaccaucgacaaguga

SEQ ID NO: 80657 - RNA, 1410 nt, Artificial Sequence
  derived and/or modified CDS sequence (opt1) from neuraminidase__InfluenzaA__ACN33159
augaaccccaaccagaagaucaucaccaucggcagcgugucccugaccaucagcacgaucugcuucuucaugcagaucgccauccucaucaccaccgucacccugcacuucaagcaguacgaguucaacuccccgcccaacaaccaggugaugcugugcgagcccacgaucaucgagcgcaacaucaccgagaucguguaccucaccaacaccacgaucgagaaggagaagugccccaagcuggccgaguaccggaacuggagcaagccgcagugcgacaucaccggguucgcgcccuucuccaaggacaacagcauccgccuguccgccggcggggacaucugggucacccgggagcccuacgugagcugcgaccccgacaagugcuaccaguucgcccucggccaggggaccacgcugaacaacgugcacuccaacaacaccguccgcgaccggaccccguaccgcacccugcucaugaacgagcugggcgugcccuuccaccugggcacgaagcaggucugcaucgccuggagcuccagcuccugccacgacgggaaggccuggcuccacgugugcaucaccggcgacgacaagaacgcgaccgccagcuucaucuacaacgggcggcugguggacuccguggucagcugguccaaggagauccugcgcacccaggagagcgagugcgugugcaucaacggcacgugcaccguggucaugaccgacggguccgccagcggcaaggccgacaccaagauccucuucaucgaggagggcaagaucgugcacacgagcacccuguccgggagcgcgcagcacguggaggagugcuccugcuacccccgguaccccggcguccgcugcgugugccgggacaacuggaaggggagcaaccgcccgaucguggacaucaacaucaaggaccacuccaucgucagcuccuacgugugcagcggccuggugggcgacacgccccggaagaacgacuccagcuccagcucccacugccucgaccccaacaacgaggagggcgggcacggggucaagggcugggccuucgacgacgggaacgacguguggaugggccgcaccaucagcgagaagucccggcugggcuacgagaccuucaaggucaucgagggguggagcaaccccaaguccaagcugcagaucaaccgccaggugaucguggaccggggcaaccgcagcggguacuccggcaucuucagcgucgagggcaagagcugcaucaaccggugcuucuacguggagcucauccgcgggcggaaggaggagaccgaggugcuguggaccuccaacagcaucgucguguucugcggcaccuccgggacguacggcaccgggagcuggccggacggcgccgacaucaaccugaugcccaucuga

SEQ ID NO: 80658 - RNA, 1410 nt, Artificial Sequence; identical to SEQ ID NO: 80536
  derived and/or modified CDS sequence (opt1) from neuraminidase__InfluenzaA__ACN33170

SEQ ID NO: 80659 - RNA, 1410 nt, Artificial Sequence; identical to SEQ ID NO: 80627
  derived and/or modified CDS sequence (opt1) from neuraminidase__InfluenzaA__ACN33181

SEQ ID NO: 80660 - RNA, 1410 nt, Artificial Sequence; identical to SEQ ID NO: 80627
  derived and/or modified CDS sequence (opt1) from neuraminidase__InfluenzaA__ACN33203

SEQ ID NO: 80661 - RNA, 1410 nt, Artificial Sequence
  derived and/or modified CDS sequence (opt1) from neuraminidase__InfluenzaA__ACN33214
augaaccccaaccagaagaucaucaccaucggcagcgugucccugaccaucagcacgaucugcuucuucaugcagaucgccauccucaucaccaccgucacccugcacuucaagcaguacgaguucaacuccccgcccaacaaccaggugaugcugugcgagcccacgaucaucgagcgcaacaucaccgagaccguguaccucaccaacacgaccaucgagaaggagaucugccccaagcuggccgaguaccggaacuggagcaagccgcagugcgacaucaccggguucgcgcccuucuccaaggacaacagcauccgccuguccgccggcggggacaucugggucacccgggagcccuacgugagcugcgaccccgacaagugcuaccaguucgcccucggccaggggacgacccugaacaacgugcacuccaacaacaccguccgcgaccggaccccguaccgcacgcugcucaugaacgagcugggcgugcccuuccaccugggcaccaagcaggucugcaucgccuggagcuccagcuccugccacgacgggaaggccuggcuccacgugugcaucaccggcgacgacaagaacgcgaccgccagcuucaucuacaacgggcggcugguggacuccguggucagcugguccaaggagauccugcgcacgcaggagagcgagugcgugugcaucaacgggaccugcaccguggucaugaccgacggguccgccagcggcaaggccgacacgaagauccucuucaucgaggagggcaagaucgugcacaccagcacccuguccgggagcgcgcagcacguggaggagugcuccugcuacccccgguaccccggcguccgcugcgugugccgggacaacuggaaggggagcaaccgcccgaucguggacaucaacaucaaggaccacuccaucgucagcuccuacgugugcagcggccuggugggcgacacgccccggaagaacgacuccagcuccagcucccacugccucgaccccaacaacgaggagggcggccacggggucaagggcugggccuucgacgacgggaacgacguguggaugggccgcaccaucagcgagaagucccggcugggcuacgagaccuucaaggucaucgagggguggagcaaccccaaguccaagcugcagaucaaccgccaggugaucguggaccggggcaaccgcagcggguacuccggcaucuucagcgucgagggcaagagcugcaucaaccggugcuucuacguggagcucauccgcgggcggaaggaggagaccgaggugcuguggaccuccaacagcaucgucguguucugcggcacguccgggaccuacggcaccgggagcuggccggacggcgccgacaucaaccugaugcccaucuga

SEQ ID NO: 80662 - RNA, 1413 nt, Artificial Sequence; identical to SEQ ID NO: 80095
  derived and/or modified CDS sequence (opt1) from neuraminidase__InfluenzaA__ACN42984

SEQ ID NO: 80663 - RNA, 1413 nt, Artificial Sequence; identical to SEQ ID NO: 80095
  derived and/or modified CDS sequence (opt1) from neuraminidase__InfluenzaA__ACN42995

SEQ ID NO: 80664 - RNA, 1410 nt, Artificial Sequence
  derived and/or modified CDS sequence (opt1) from neuraminidase__InfluenzaA__ACN43006
augaaccccaaccagaagaucaucaccaucggcagcgugucccugaccaucagcacgaucugcuucuucaugcagaucgccauccucaucaccaccgucacccugcacuucaagcaguacgaguucaacuccccgcccaacaaccgcgugaugcugugcgagcccacgaucaucgagcggaacaucaccgagaucguguaccucaccaacaccacgaucgagaaggagaucugccccaagcuggccgaguaccgcaacuggagcaagccgcagugcgacaucaccggguucgcgcccuucuccaaggacaacagcauccggcuguccgccggcggggacaucugggucacccgcgagcccuacgugagcugcgaccccgacaagugcuaccaguucgcccucggccaggggaccacgcugaacaacgugcacuccaacaacaccguccgggaccgcaccccguaccggacccugcucaugaacgagcugggcgugcccuuccaccugggcacgaagcaggucugcaucgccuggagcuccagcuccugccacgacgggaaggccuggcuccacgugugcaucaccggcgacgacaagaacgcgaccgccagcuucaucuacaacgggcgccugguggacuccguggucagcugguccaaggagauccugcggacccaggagagcgagugcgugugcaucaacggcacgugcaccguggucaugaccgacggguccgccagcggcaaggccgacaccaagauccucuucaucgaggagggcaagaucgugcacacgagcacccuguccgggagcgcgcagcacguggaggagugcuccugcuacccccgcuaccccggcguccggugcgugugccgcgacaacuggaaggggagcaaccggccgaucguggacaucaacaucaaggaccacuccaucgucagcuccuacgugugcagcggccuggugggcgacacgccccgcaagaacgacuccagcuccagcucccacugccucgaccccaacaacgaggagggcgggcacggggucaagggcugggccuucgacgacgggaacgacguguggaugggccggaccaucagcgagaagucccgccugggcuacgagaccuucaaggucaucgagggguggagcaaccccaaguccaagcugcagaucaaccgccaggugaucguggaccggggcaaccggagcggguacuccggcaucuucagcgucgagggcaagagcugcaucaaccgcugcuucuacguggagcucauccgggggcgcaaggaggagaccgaggugcuguggaccuccaacagcaucgucguguucugcggcaccuccgggacguacggcaccgggagcuggccggacggcgccgacaucaaccugaugcccaucuga

SEQ ID NO: 80665 - RNA, 1410 nt, Artificial Sequence; identical to SEQ ID NO: 80627
  derived and/or modified CDS sequence (opt1) from neuraminidase__InfluenzaA__ACN43017

SEQ ID NO: 80666 - RNA, 1410 nt, Artificial Sequence; identical to SEQ ID NO: 80623
  derived and/or modified CDS sequence (opt1) from neuraminidase__InfluenzaA__ACN43028

SEQ ID NO: 80667 - RNA, 1410 nt, Artificial Sequence
  derived and/or modified CDS sequence (opt1) from neuraminidase__InfluenzaA__ACN43039
augaaccccaaccagaagaucaucaccaucggcagcgugucccugaccaucagcacgaucugcuucuucaugcagaucgccauccucaucaccaccgucacccugcacuucaagcaguacgaguucaacuccccgcccaacaaccaggugaugcugugcgagcccacgaucaucgagcgcaacaucaccgagaucguguaccucaccaacaccacgaucgagaaggagaucugccccaagcuggccgaguaccggaacuggagcaagccgcagugcgacaucaccggguucgcgcccuucuccaaggacaacagcauccgccuguccgccggcggggacaucugggucacccgggagcccuacgugagcugcgaccccgacaagugcuaccaguucgcccucggccaggggaccacgcugaacaacgugcacuccaacgacaccguccgcgaccggaccccguaccgcacccugcucaugaacgagcugggcgugcccuuccaccuggagacgaagcaggucugcaucgccuggagcuccagcuccugccacgacggcaaggccuggcuccacgugugcaucaccggggacgacaagaacgcgaccgccagcuucaucuacaacggccggcugguggacuccguggucagcugguccaaggagauccugcgcacccaggagagcgagugcgugugcaucaacgggacgugcaccguggucaugaccgacggcuccgccagcgggaaggccgacaccaagauccucuucaucgaggagggcaagaucgugcacacgagcacccuguccggcagcgcgcagcacguggaggagugcuccugcuacccccgguaccccgggguccgcugcgugugccgggacaacuggaagggcagcaaccgcccgaucguggacaucaacaucaaggaccacuccaucgucagcuccuacgugugcagcgggcuggugggcgacacgccccggaagaacgacuccagcuccagcucccacugccucgaccccaacaacgaggagggcgggcacggcgucaaggggugggccuucgacgacggcaacgacguguggauggggcgcaccaucagcgagaagucccggcugggcuacgagaccuucaaggucaucgagggcuggagcaaccccaaguccaagcugcagaucaaccgccaggugaucguggaccgggggaaccgcagcggcuacuccgggaucuucagcgucgagggcaagagcugcaucaaccggugcuucuacguggagcucauccgcgggcggaaggaggagaccgaggugcuguggaccuccaacagcaucgucguguucugcggcaccuccggcacguacgggaccggcagcuggccggacggggccgacaucaaccugaugcccaucuga

SEQ ID NO: 80668 - RNA, 1410 nt, Artificial Sequence; identical to SEQ ID NO: 80536
  derived and/or modified CDS sequence (opt1) from neuraminidase__InfluenzaA__ACN43050

SEQ ID NO: 80669 - RNA, 1410 nt, Artificial Sequence; identical to SEQ ID NO: 80623
  derived and/or modified CDS sequence (opt1) from neuraminidase__InfluenzaA__ACN43061

SEQ ID NO: 80670 - RNA, 1410 nt, Artificial Sequence
  derived and/or modified CDS sequence (opt1) from neuraminidase__InfluenzaA__ACN43072
augaaccccaaccagaagaucaucaccaucggcagcgugucccugaccaucagcacgaucugcuucuucaugcagaucgccauccucaucaccaccgucacccugcacuucaagcaguacgaguucaacuccccgcccaacaaccaggugaugcugugcgagcccacgaucaucgagcgcaacaucaccgagaucguguaccucaccaacaccacgaucgagaaggagaucugccccaagcuggccgaguaccggaacuggagcaagccgcagugcgacaucaccggguucgcgcccuucuccaaggacaacagcauccgccuguccgccggcggggacaucugggucacccgggagcccuacgugagcugcgaccccgacaagugcuaccaguucgcccucggccaggggaccacgcugaacaacgugcacuccaacaacaccguccgcgaccggaccccguaccgcacccugcucaugaacgagcugggcgugcccuuccaccugggcacgaagcaggucugcaucgccuggagcuccagcuccugccacgacgggaaggccuggcuccacgugugcaucaccggcgacgacaagaacgcgaccgccagcuucaucuacaacgggcggcugguggacuccguggucagcugguccaaggagauccugcgcacccaggagagcgagugcgugugcaucaacggcacgugcaccguggucaugaccgacggguccgccagcggcaaggccgacaccaagauccucuucaucgaggagggcaagaucgugcacacgagcacccuguccgggagcgcgcagcacguggaggagugcuccugcuacccccgguaccccggcguccgcugcgugugccgggacaacuggaaggggagcaaccgcccgaucguggacaucaacaucaaggaccacuccaucgucagcuccuacgugugcagcggccuggugggcgacacgccccggaagaacgacuccagcuccagcucccacugccucgaccccaacaacgaggagggcgggcacggggucaagggcugggccuucgacgacgggaacgacguguggaugggccgcaccaucagcgagaagucccggcugggcuacgagaccuucaaggucaucgagggguggagcaaccccaaguccaagcugcagaucaaccgccaggugaucguggaccggggcaaccgcagcggguacuccggcaucuucagcgucgagggcaagagcugcaucaaccggugcuucuacguggagcucauccgcgggcggaaggaggagaccgaggugcuguggaccuccaacagcgucgugguguucugcggcaccuccgggacguacggcaccgggagcuggccggacggcgccgacaucaaccugaugcccaucuga

SEQ ID NO: 80671 - RNA, 1410 nt, Artificial Sequence
  derived and/or modified CDS sequence (opt1) from neuraminidase__InfluenzaA__ACN43083
augaaccccaaccagaagaucaucaccaucggcagcgugucccugaccaucagcacgaucugcuucuucaugcagaucgccauccucaucaccaccgucacccugcacuucaagcaguacgaguucaacuccagcccgaacaaccaggugaugcugugcgagcccacgaucaucgagcgcaacaucaccgagaucguguaccucaccaacaccacgaucgagaaggagaucugccccaagcuggccgaguaccggaacugguccaagccccagugcgacaucaccggguucgcgccguucagcaaggacaacuccauccgccugagcgccggcggggacaucugggucacccgggagcccuacguguccugcgaccccgacaagugcuaccaguucgcccucggccaggggaccacgcugaacaacgugcacagcaacaacaccguccgcgaccggacccccuaccgcacccugcucaugaacgagcugggcgugccguuccaccugggcacgaagcaggucugcaucgccugguccagcuccagcugccacgacgggaaggccuggcuccacgugugcaucaccggcgacgacaagaacgcgaccgccuccuucaucuacaacgggcggcugguggacagcaucguguccuggagcaacgagauccugcgcacccaggaguccgagugcgucugcaucaacggcacgugcaccguggugaugaccgacgggagcgccagcggcaaggccgacaccaagauccucuucaucgaggagggcaagaucguccacacguccacccugagcggguccgcgcagcacguggaggagugcagcugcuacccccgguaccccggcgugcgcugcgucugccgggacaacuggaagggguccaaccgccccaucguggacaucaacaucaaggaccacagcaucguguccagcuacgucugcuccggccuggugggcgacaccccgcggaagaacgacagcuccagcuccagccacugccucgaccccaacaacgaggagggcgggcacggggugaagggcugggccuucgacgacgggaacgacgucuggaugggccgcaccaucuccgagaagucccggcugggcuacgagacguucaaggugaucgagggguggagcaaccccaagagcaagcugcagaucaaccgccaggucaucguggaccggggcaaccgcuccggguacagcggcaucuucagcguggaggggaaguccugcaucaaccggugcuucuacgucgagcucauccgcggccggaaggaggagaccgaggugcuguggaccagcaacuccaucguggucuucugcggcaccagcgggacguacggcaccggguccuggcccgacggcgccgacaucaaccugaugccgaucuga

SEQ ID NO: 80672 - RNA, 1410 nt, Artificial Sequence; identical to SEQ ID NO: 78351
  derived and/or modified CDS sequence (opt1) from neuraminidase__InfluenzaA__ACN50231

SEQ ID NO: 80673 - RNA, 1410 nt, Artificial Sequence
  derived and/or modified CDS sequence (opt1) from neuraminidase__InfluenzaA__ACN50233
augaaccccaaccagaagaucaucaccaucggcagcgugucccugaccaucagcacgaucugcuucuucaugcagaucgccauccucaucaccaccgucacccugcacuucaagcaguacgaguucaacuccccgcccaacaaccaggugaugcugugcgagcccacgaucaucgagcgcaacaucaccgagaucguguaccucaccaacaccacgaucgagaaggagaucugccccaagcuggccgaguaccggaacuggagcaagccgcagugcgacaucaccggguucgcgcccuucuccaaggacaacagcauccgccuguccgccggcggggacaucugggucacccgggagcccuacgugagcugcgaccccgacaagugcuaccaguucgcccucggccaggggaccacgcugaacaacgugcacuccaacgacaccguccacgaccgcaccccguaccggacccugcucaugaacgagcugggcgugcccuuccaccugggcacgaagcaggucugcaucgccuggagcuccagcuccugccacgacgggaaggccuggcuccacgugugcgugaccggcgacgacaagaacgcgaccgccagcuucaucuacaacgggcgccugguggacuccaucgucagcugguccaaggagauccugcggacccaggagagcgagugcgugugcaucaacggcacgugcaccgugguccucaccgacggguccgccagcggcaaggccgacaccaagauccuguucaucgaggagggcaagaucgugcacacgagcaagcuguccgggagcgcgcagcacguggaggagugcuccugcuacccccgcuaccccggcguccggugcgugugccgcgacaacuggaaggggagcaaccggccgaucguggacaucaacaucaaggacuacuccaucgucagcuccuacgugugcagcggccucgugggcgacacgccccgcaagaacgacuccagcuccagcgggcacugccuggaccccaacaacgaggagggcgggcacggcgucaaggggugggccuucgacgacggcaacgacguguggaugggccggaccaucuccgagaagcugcgcagcggguacgagaccuucaaggucaucgagggcugguccaaccccaacagcaagcuccagaucaaccgccaggugaucguggaccgggggaaccgguccggcuacagcgggaucuucuccgucgagggcaagagcugcaucaaccgcugcuucuacguggagcugauccggggccgcaaggaggagaccgaggugcuguggaccagcaacuccaucgucguguucugcgggaccagcggcaccuacgggacgggcuccuggccggacggggccgacaucaaccucaugcccaucuga

SEQ ID NO: 80674 - RNA, 1410 nt, Artificial Sequence
  derived and/or modified CDS sequence (opt1) from neuraminidase__InfluenzaA__ACN50245
augaaccccaaccagaagaucaucaccaucggcagcgugucccugaccaucagcacgaucugcuucuucaugcagaucgccauccucaucaccaccgucacccugcacuucaagcaguacgaguucaacuccccgcccaacaaccagguggugcugugcgagcccacgaucaucgagcgcaacaucaccgagaucgucuaccucaccaacaccacgaucgagaaggagaucugccccaagcuggccgaguaccggaacuggagcaagccgcagugcgacaucaccggguucgcgcccuucuccaaggacaacagcauccgccuguccgccggcggggacaucugggugacccgggagcccuacgugagcugcgaccccgacaagugcuaccaguucgcccucggccaggggaccacgcugaacaacguccacuccaacgacaccgugcgcgaccggaccccguaccgcacccugcucaugaacgagcugggcgugcccuuccaccugggcacgaagcaggucugcaucgccuggagcuccagcuccugccacgacgggaaggccuggcuccacgugugcaucaccggcgacgacaagaacgcgaccgccagcuucaucuacaacgggcggcugguggacuccaucgucagcugguccaaggagauccugcgcacccaggagagcgagugcgugugcaucaacggcacgugcaccguggucaugaccgacggguccgccagcggcaaggccgacaccaagauccucuucaucgaggagggcaagaucgugcacacgagcacccuguccgggagcgcgcagcacguggaggagugcuccugcuacccccgguaccccggcguccgcugcgugugccgggacaacuggaaggggagcaaccgcccgaucguggacaucaacaucaaggaccacuccaucgucagcuccuacgugugcagcggccuggugggcgacacgccccggaagaacgacuccagcuccagcucccacugccucgaccccaacaacgaggagggcgggcacggggucaagggcugggccuucgacgacgggaacgacguguggaugggccgcaccaucagcgagaagucccggcugggcuacgagaccuucaaggucaucgagggguggagcaaccccaaguccaagcugcagaucaaccgccaggugaucguggaccggggcgaccgcagcggguacuccggcaucuucagcgucgagggcaagagcugcaucaaccggugcuucuacguggagcucauccgcgggcggaaggaggagaccgaggugcuguggaccuccaacagcaucgucguguucugcggcaccuccgggacguacggcaccgggagcuggccggacggcgccgacaucaaccugaugcccaucuga

SEQ ID NO: 80675 - RNA, 1413 nt, Artificial Sequence
  derived and/or modified CDS sequence (opt1) from neuraminidase__InfluenzaA__ACN72609
augaaccccaaccagaagaucaucaccaucggcagcaucuccaucgccaucgggaucaucagccugaugcuccagaucggcaacaucaucuccaucugggccagccacuccauccagaccgggagccagaacaacacgggcaucugcaaccagcgcaucaucaccuacgagaacuccaccugggugaaccacaccuacgucaacaucaacaacacgaacgugguggcgggggaggacaagaccagcgucacccuggccggcaacuccagccugugcuccaucagcggcugggccaucuacaccaaggacaacuccauccggaucgggagcaagggcgacguguucgugauccgcgagccguucaucuccugcagccaccucgagugccggacguucuuccugacccagggggcccugcucaacgacaagcacuccaacggcaccgucaaggaccgcagccccuaccgggcccugauguccugcccccugggggaggcgcccagcccguacaacagcaaguucgaguccguggccuggagcgccuccgccugccacgacggcaugggcuggcucaccaucgggaucagcggccccgacaacggggcgguggccguccugaaguacaacggcaucaucacgggcaccaucaaguccuggaagaagcagauccugcgcacccaggagagcgagugcgugugcaugaacggguccugcuucaccaucaugacggacggccccagcaacaaggccgccuccuacaagaucuucaagaucgagaaggggaaggugaccaagagcaucgagcucaacgcccccaacuuccacuacgaggagugcuccugcuacccggacaccggcaucgucaugugcgugugccgggacaacuggcacgggagcaaccgccccuggguguccuucaaccagaaccuggacuacaagaucggcuacaucugcagcggcgucuucggggacaacccccggcccgaggacggcgagggguccugcaacccggugaccguggacggcgcgaacggggucaagggcuucagcuacaaguacgacaacggcguguggaucgggcgcacgaaguccaaccggcugcgcaagggcuucgagaugaucugggaccccaacggguggaccaacaccgacagcgacuucuccgugaagcaggacgucguggccaucaccgacuggagcggcuacagcggguccuucgugcagcaccccgagcucacgggccuggacugcauccggcccugcuucugggucgagcuggugcgcggccucccgcgggagaacaccaccaucuggaccagcggguccagcaucuccuucugcggcgucaacagcgacacggccaacugguccuggcccgacggggccgagcugcccuucaccaucgacaaguga

SEQ ID NO: 80676 - RNA, 1410 nt, Artificial Sequence
  derived and/or modified CDS sequence (opt1) from neuraminidase__InfluenzaA__ACN72621
augaaccccaaccagaagaucaucaucaucagcuccaucugcaugaccaacggcaucgccagccugauccuccagaucgggaacaucaucuccaucuggaucagccacuccauccagaccggcaaccagaaccagacggagaccugcaaccagagcgugaucaucuacgagaacaacaccugggucaaccagaccuacgugaacaucuccaacaacaacuucguggccgagcagacggucgugccggugaagcuggucgggagcagcccccugugccccgugagcggcugggcgaucuacuccaaggacaacagcgugcgcaucggguccaagggcgacgucuucgugauccgggagcccuucaucagcugcucccaccucgagugccgcaccuucuuccugacccagggcgcccugcucaacgacaagcacagcaacgggaccgugaaggaccgguccccguaccgcacgcugaugagcugccccaucggcgagguccccucccccuacaacagccgguucgagagcguggccugguccgccagcgccugccacgacggguccagcuggcugaccaucggcaucuccgggccggacaacggcgcgguggccguccucaaguacaacgacaucaucaccgacaccaucaagagcuggaagaacaacauccugcgcacgcaggaguccgagugcgccugccugaacggcagcugcuucaccgugaugaccgacgggcccuccaacggccaggccagcuacaagaucuucaagaucgagaaggggaagguggucaaguccguggagcucaacgcgcccaacuaccacuacgaggagugcagcugcuaccccgacuccggcgagaucaucugcgugugccgggacaacuggcacggcagcaaccgcccgugggucuccuucaaccagaaccuggaguaccagaucggguacaucugcagcggcgugcugggggacaacccccggcccaacgaccgcaccggcaacugcgggcccguguccagccacggcgccaacggcgucaagggguucuccuucaaguacggcgacgggaucuggaucggccggacgaaguccaccagcucccgcagcggguucgagaugaucugggacccgaacggcuggaccggcaccgacaacaacuucuccgugaagcaggacaucgucgggaucacggacuggaccggcuacagcggguccuucgugcagcaccccgagcucaccggccuggacugcauccggcccugcuucuggguggagcugauccgcgggcggcccaaggagaacaccaucuggacgagcggcuccagcaucuccuucugcggcgucaacagcgacaccguggggugguccuggccggacggcgccgagcuccccuucaccaucgacaaguga

SEQ ID NO: 80677 - RNA, 1410 nt, Artificial Sequence; identical to SEQ ID NO: 80536
  derived and/or modified CDS sequence (opt1) from neuraminidase__InfluenzaA__ACN76503

SEQ ID NO: 80678 - RNA, 1410 nt, Artificial Sequence
  derived and/or modified CDS sequence (opt1) from neuraminidase__InfluenzaA__ACO36345
augaaccccaaccagaagaucaucaccaucggcagcgugucccugaccaucagcacgaucugcuucuucaugcagaucgccauccucaucaccaccgucacccugcacuucaagcaguacgaguucaacuccagcccgaacaaccaggugaugcagugcgagcccacgaucaucgagcgcaacaucaccgagaucguguaccugaccaacaccacgaucgagaaggagaucugccccaagcucgccgaguaccggaacugguccaagccccagugcgacaucaccggguucgcgccguucagcaaggacaacuccauccgccugagcgccggcggggacaucugggucacccgggagcccuacguguccugcgaccccgacaagugcuaccaguucgcccugggccaggggaccacgcucaacaacgugcacagcaacaacaccguccgcgaccggacccccuaccgcacccugcugaugaacgagcucggcgugccguuccaccugggcacgaagcaggucugcaucgccugguccagcuccagcugccacgacgggaaggccuggcugcacgugugcaucaccggcgacgacaagaacgcgaccgccuccuucaucuacaacgggcggcucguggacagcaucguguccuggagcaaggagauccugcgcacccaggaguccgagugcgucugcaucaacggcacgugcaccguggugaugaccgacgggagcgccagcggcaaggccgacaccaagauccuguucaucgaggagggcaagaucguccacacguccacccucagcggguccgcgcagcacguggaggagugcagcugcuacccccgguaccccggcgugcgcugcgucugccgggacaacuggaagggguccaaccgccccaucguggacaucaacaucaaggaccacagcaucguguccagcuacgucugcuccggccuggugggcgacaccccgcggaagaacgacagcuccagcuccagccacugccuggaccccaacaacgaggagggcgggcacggggugaagggcugggccuucgacgacgggaacgacgucuggaugggccgcaccaucuccgagaagucccggcucggcuacgagacguucaaggugaucgagggguggagcaaccccaagagcaagcugcagaucaaccgccaggucaucguggaccggggcaaccgcuccggguacagcggcaucuucagcguggaggggaaguccugcaucaaccggugcuucuacgucgagcugauccgcggccggaaggaggagaccgaggugcucuggaccagcaacuccaucguggucuucugcggcaccagcgggacguacggcaccggguccuggcccgacggcgccgacaucaaccugaugccgaucuga

SEQ ID NO: 80679 - RNA, 1410 nt, Artificial Sequence; identical to SEQ ID NO: 79004
  derived and/or modified CDS sequence (opt1) from neuraminidase__InfluenzaA__ACO36356

SEQ ID NO: 80680 - RNA, 1410 nt, Artificial Sequence
  derived and/or modified CDS sequence (opt1) from neuraminidase__InfluenzaA__ACO36367
augaaccccaaccagaagaucaucaccaucggcagcgugucccugaucaucagcaccaucugcuucuucaugcagacggccauccucaucaccaccgucacccugcacuucaagcaguacgaguucaacuccccgcccaacaaccaggugaugcugugcgagcccacgaucaucgagcgcaacaucaccgagaucguguaccucaccaacaccacgaucgagaaggagaucugccccaagcuggccgaguaccggaacuggagcaagccgcagugcgacaucaccggguucgcgcccuucuccaaggacaacagcauccgccuguccgccggcggggacaucugggucacccgggagcccuacgugagcugcgaccccgacaagugcuaccaguucgcccucggccaggggaccacgcugaacaacgugcacuccaacgacaccguccgcaaccggaccccguaccgcacccugcucaugaacgagcugggcgugcccuuccaccugggcacgaagcaggucugcaucgccuggagcuccagcuccugccacgacgggaaggccuggcuccacgugugcaucaccggcgacgacaagaacgcgaccgccagcuucaucuacaacgggcggcugguggacuccaucgugagcugguccaaggagauccugcgcacccaggagagcgagugcgucugcaucaacggcacgugcaccguggugaugaccgacggguccgccagcggcaaggccgacaccaagauccucuucaucgaggagggcaagaucguccacacgagcacccuguccgggagcgcgcagcacguggaggagugcuccugcuacccccgguaccccggcgugcgcugcgucugccgggacaacuggaaggggagcaaccgcccgaucguggacaucaacaucaaggaccacuccaucgugagcuccuacgucugcagcggccuggugggcgacacgccccggaagaacgacuccagcuccagcucccacugccucgaccccaacaacgaggagggcgggcacggggugaagggcugggccuucgacgacgggaacgacgucuggaugggccgcaccaucagcgagaagucccggcugggcuacgagaccuucaaggugaucgagggguggagcaaccccaaguccaagcugcagaucaaccgccaggucaucguggaccggggcaaccgcagcggguacuccggcaucuucagcguggagggcaagagcugcaucaaccggugcuucuacgucgagcucauccgcgggcggaaggaggagaccgaggugcuguggaccuccaacagcaucguggucuucugcggcaccuccgggacguucggcaccgggagcuggccggacggcgccgacaucaaccugaugcccaucuga

SEQ ID NO: 80681 - RNA, 1413 nt, Artificial Sequence; identical to SEQ ID NO: 80656
  derived and/or modified CDS sequence (opt1) from neuraminidase__InfluenzaA__ACO36400

SEQ ID NO: 80682 - RNA, 1410 nt, Artificial Sequence
  derived and/or modified CDS sequence (opt1) from neuraminidase__InfluenzaA__ACO36411
augaaccccaaccagaagaucaucaccaucggcagcgugucccugaccaucagcacgaucggguucuucaugcagaccgccauccucaucaccaccgucacgcugcacuucaagcaguacgaguucaacuccccgcccaacaaccaggugaugcugugcgagcccaccaucaucgagcgcaacaucaccgagaucguguaccucaccaacacgaccaucgagaaggagaucugccccaagcuggccgaguaccggaacuggagcaagccgcagugcgacaucaccggcuucgcgcccuucuccaaggacaacagcauccgccuguccgccgggggcgacaucugggucacccgggagcccuacgugagcugcgaccccgacaagugcuaccaguucgcccucgggcagggcacgacccugaacaacgugcacuccaacgacaccguccgcggccggaccccguaccgcacgcugcucaugaacgagcugggggugcccuuccaccugggcaccaagcaggucugcaucgccuggagcuccagcuccugccacgacgggaaggccuggcuccacgugugcaucaccggcgacgacaagaacgcgaccgccagcuucaucuacaacgggcggcugguggacuccaucgugagcugguccaaggagauccugcgcacgcaggagagcgagugcgucugcaucaacgggaccugcaccguggugaugaccgacggcuccgccagcgggaaggccgacacgaagauccucuucaucgaggagggcaagaucguccacaccagcacccuguccgggagcgcgcagcacguggaggagugcuccugcuacccccgguaccccggcgugcgcugcgucugccgggacaacuggaagggcagcaaccgcccgaucguggacaucaacaucaaggaccacuccaucgugagcuccuacgucugcagcgggcuggugggcgacacgccccggaagaacgacuccagcuccagcucccacugccucgaccccaacaacgaggagggcggccacggggugaagggcugggccuucgacgacggcaacgacgucuggauggggcgcaccaucagcgagaagucccggcugggcuacgagaccuucaaggugaucgagggguggagcaaccccaaguccaagcugcagaucaaccgccaggucaucguggaccggggcaaccgcagcggguacuccggcaucuucagcguggagggcaagagcugcaucaaccggugcuucuacgucgagcucauccgcgggcggaaggaggagaccgaggugcuguggaccuccaacagcaucguggucuucugcggcacguccgggaccuacggcaccgggagcuggccggacggcgccgacaucaaccugaugcccaucuga

SEQ ID NO: 80683 - RNA, 1410 nt, Artificial Sequence
  derived and/or modified CDS sequence (opt1) from neuraminidase__InfluenzaA__ACO36422
augaaccccaaccagaagaucaucaccaucggcagcgugucccugaucaucagcaccaucugcuucuucaugcagacggccauccucaucaccaccgucacccugcacuucaagcaguacgaguucaacuccccgcccaacaaccaggugaugcugugcgagcccacgaucaucgagcgcaacaucaccgagaucguguaccucaccaacaccacgaucgagaaggagaucugccccaagcuggccgaguaccggaacuggagcaagccgcagugcgacaucaccggguucgcgcccuucuccaaggacaacagcauccgccuguccgccggcggggacaucugggucacccgggagcccuacgugagcugcgaccccgacaagugcuaccaguucgcccucggccaggggaccacgcugaacaacgugcacuccaacgacaccguccgcggccggaccccguaccgcacccugcucaugaacgagcugggcgugcccuuccaccuggggacgaagcaggucugcaucgccuggagcuccagcuccugccacgacggcaaggccuggcuccacgugugcaucaccggggacgacaagaacgcgaccgccagcuucaucuacaacggccggcugguggacuccaucgugagcugguccaaggagauccugcgcacccaggagagcgagugcgucugcaucaacgggacgugcaccguggugaugaccgacggcuccgccagcggcaaggccgacaccaagauccucuucaucgaggaggggaagaucguccacacgagcacccuguccggcagcgcgcagcacguggaggagugcuccugcuacccccgguaccccggggugcgcugcgucugccgggacaacuggaagggcagcaaccgcccgaucguggacaucaacaucaaggaccacuccaucgugagcuccuacgucugcagcggccuggugggggacacgccccggaagaacgacuccagcuccagcucccacugccucgaccccaacaacgaggagggcgggcacggcgugaaggggugggccuucgacgacggcaacgacgucuggaugggccgcaccaucagcgagaagucccggcugggguacgagaccuucaaggugaucgagggcuggagcaaccccaaguccaagcugcagaucaaccgccaggucaucguggaccgggggaaccgcagcggcuacuccgggaucuucagcguggagggcaagagcugcaucaaccggugcuucuacgucgagcucauccgcggccggaaggaggagaccgaggugcuguggaccuccaacagcaucguggucuucugcgggaccuccggcacguacgggaccggcagcuggccggacggggccgacaucaaccugaugcccaucuga

SEQ ID NO: 80684 - RNA, 1410 nt, Artificial Sequence; identical to SEQ ID NO: 80440
  derived and/or modified CDS sequence (opt1) from neuraminidase__InfluenzaA__ACO36433

SEQ ID NO: 80685 - RNA, 1410 nt, Artificial Sequence
  derived and/or modified CDS sequence (opt1) from neuraminidase__InfluenzaA__ACO36444
augaaccccaaccagaagaucaucaccaucggcagcgugucccugaccaucgccacgaucugcuuccucaugcagaucgccauccuggucaccaccgugacccugcacuucaagcagcacgagugcaacagcccgcccaacaaccaggugaugcucugcgagcccacgaucaucgagcgcaacaucaccgagaucgucuaccugaccaacaccacgaucgagaaggagaagugccccaagcuggcggaguaccggaacugguccaagccgcagugcaacaucaccggguucgcccccuucagcaaggacaacuccauccgccucagcgccggcggggacaucugggugacccgggagcccuacguguccugcgaccccgacaagugcuaccaguucgcccugggccaggggaccacgcugaacaacggccacagcaacaacaccguccacgaccgcaccccguaccggacccuccugaugaacgagcugggcgugcccuuccaccucgggacgcgccaggugugcaucgccugguccagcuccagcugccacgacggcaaggcguggcugcacgucugcgugaccggggacgacaagaacgccaccgccuccuucaucuacaacggccggcugguggacagcaucggguccuggagcaagaagauccuccgcacccaggaguccgagugcgucugcaucaacggcacgugcaccguggugaugaccgacggcagcgccuccgagaaggcggacaccaagauccuguucaucgaggaggggaagaucguccacaucagcacgcugagcggcuccgcccagcacguggaggagugcagcugcuacccccgguaccccggggugcgcugcgucugccgggacaacuggaagggcuccaaccgcccgaucguggacaucaacgugaaggacuacagcaucgucuccagcuacgugugcuccggccucgugggggacacgccccggaagaacgacagcuucuccagcucccacugccuggaccccaacaacgaggagggcgggcacggcgucaaggggugggccuucgacgacggcaacgacguguggaugggccgcaccaucagcgagaagcugcgguccggguacgagaccuucaaggucaucgagggcuggagcaagcccaacuccaagcuccagaucaaccgccaggugaucguggagcgggggaaccgcagcggcuacuccgggaucuucagcgucgagggcaaguccugcaucaaccggugcuucuacguggagcugauccgcggccggaaggaggagaccgaggugugguggaccagcaacagcaucgucguguucugcgggaccuccggcaccuacgggacgggcagcuggccggacggggccgacaucaaccugaugcccaucuga

SEQ ID NO: 80686 - RNA, 1410 nt, Artificial Sequence
  derived and/or modified CDS sequence (opt1) from neuraminidase__InfluenzaA__ACO36466
augaaccccaaccagaagaucaucaccaucggcagcgugucccugaccaucagcacgaucugcuucuucaugcagaucgccauccucaucaccaccgucacccugcacuucaagcaguacgaguucaacuccccgcccaacaaccaggugaugcugugcgagcccacgaucaucgagcgcaacaucaccgagaucgccuaccucaccaacaccacgaucgagaaggagaucugccccaagcuggcggaguaccggaacuggagcaagccgcagugcaacaucaccggguucgcccccuucuccaaggacaacagcauccgccuguccgccggcggggacaucugggugacccgggagcccuacgucagcugcgaccccgacaagugcuaccaguucgcccucggccaggggaccacgcugaacaacgugcacuccaacgacaccgugcacgaccgcaccccguaccggacccugcucaugaacgagcugggcguccccuuccaccugggcacgaagcaggucugcaucgccuggagcuccagcuccugccacgacgggaaggcguggcuccacgugugcgugaccggcgacgacgagaacgccaccgccagcuucaucuacaacgggcgccugguggacuccguggucagcugguccaagaagauccugcggacccaggagagcgagugcgugugcaucaacggcacgugcaccguggucaugaccgacggguccgccagcggcaaggcggacaccaagauccucuucaucgaggagggcaagaucgugcacacgagcacccuguccgggagcgcccagcacguggaggagugcuccugcuacccccgcuaccccggcguccggugcgugugccgcgacaacuggaaggggagcaaccggccgaucguggacaucaacaucaaggacuacuccaucgucagcuccuacgugugcagcggccuggugggcgacacgccccgcaagaacgacuccagcuccagcucccacugccucgaccccaacaacgaggagggcgggcacggggucaagggcugggccuucgacgacgggaacgacguguggaugggccggaccaucagcgagaagcugcgcuccggcuacgagaccuucaaggucaucgagggguggagcaaccccaacuccaagcugcagaucaaccgccaggugaucguggaccggggcaaccggagcggguacuccggcaucuucagcgucgagggcaagagcugcaucaaccgcugcuucuacguggagcucauccgggggcgcaaccaggagaccgaggugcuguggaccuccaacagcaucgucguguucugcggcaccuccgggacguacggcaccgggagcuggccggacggcgccgacaucaaccugaugcccaucuga

SEQ ID NO: 80687 - RNA, 1410 nt, Artificial Sequence
  derived and/or modified CDS sequence (opt1) from neuraminidase__InfluenzaA__ACO36477
augaaccccaaccagaagaucaucaccaucggcagcgugucccugaccaucgccacgaucugcuuccucaugcagaucgccauccuggucaccaccgugacccugcacuucaagcagcacgagugcaacagcccgcccaacaaccaggugaugcucugcgagcccacgaucaucgagcgcaacaucaccgagaucgucuaccugaccaacaccacgaucgagaaggagaucugccccaagcuggcggaguaccggaacugguccaagccgcagugcaacaucaccggguucgcccccuucagcaaggacaacuccauccgccucagcgccggcggggacaucugggugacccgggagcccuacguguccugcgaccccgacaagugcuaccaguucgcccugggccaggggaccacgcugaacaacggccacagcaacgacaccguccacgaccgcaccccguaccggacccuccugaugaacgagcugggcgugcccuuccaccucgggacgcgccaggugugcaucgccugguccagcuccagcugccacgacggcaaggcguggcugcacgucugcgugaccggggacgacaagaacgccaccgccuccuucaucuacaacggccggcugguggacagcaucggguccuggagcaagaacauccuccgcacccaggaguccgagugcgucugcaucaacggcacgugcaccguggugaugaccgacggcagcgccuccgggaaggcggacaccaagauccuguucaucgaggagggcaagaucguccacaucagcacgcugagcggguccgcccagcacguggaggagugcagcugcuacccccgguaccccggcgugcgcugcgucugccgggacaacuggaagggcuccaaccgcccgaucguggacaucaacgugaaggacuacagcaucgucuccagcuacgugugcuccgggcucgugggcgacacgccccggaagaacgacagcuucuccagcucccacugccuggaccccaacaacgaggagggcgggcacggggucaagggcugggccuucgacgacggcaacgacguguggauggggcgcaccaucagcgagaagcugcgguccggcuacgagaccuucaaggucaucgagggguggagcaagcccaacuccaagcuccagaucaaccgccaggugaucguggagcggggcaaccgcagcggguacuccggcaucuucagcgucgagggcaaguccugcaucaaccggugcuucuacguggagcugauccgcgggcggaaggaggagaccgaggugugguggaccagcaacagcaucgucguguucugcggcaccuccgggaccuacggcacggggagcuggccggacggcgccgacaucaaccugaugcccaucuga

SEQ ID NO: 80688 - RNA, 1410 nt, Artificial Sequence
  derived and/or modified CDS sequence (opt1) from neuraminidase__InfluenzaA__ACO36499
augaaccccaaccagaagaucaucaccaucggcagcgugucccugaccaucagcacgaucugcuucuucaugcagaucgccauccucaucaccaccgucacccugcacuucaagcaguacgaguucaacuccccgcccaacaaccaggugaugcugugcgagcccacgaucaucgagcgcaacaucaccgagaucguguaccucaccaacaccacgaucgagaaggagaucugccccaagcuggccgaguaccggaacuggagcaagccgcagugcaacaucaccggguucgcgcccuucuccaaggacaacagcauccgccuguccgccggcggggacaucugggucacccgggagcccuacgugagcugcgaccccgacaagugcuaccaguucgcccucggccaggggaccacgcugaacaacgugcacuccaacgacaccguccacgaccgcaccccguaccggacccugcucaugaacgagcugggcgugcccuuccaccugggcacgaagcaggucugcaucgccuggagcuccagcuccugccacgacgggaaggccuggcuccacgugugcgugaccggcgacgacaagaacgcgaccgccagcuucaucuacaacgggcgccugguggacuccgucgugagcugguccaagaagauccugcggacccaggagagcgagugcgugugcaucaacggcacgugcaccgucgugaugaccgacggguccgccagcggcaaggccgacaccaagauccucuucaucgaggagggcaagaucgugcacacgagcacccuguccgggagcgcgcagcacgucgaggagugcuccugcuacccccgcuaccccggcgugcggugcgugugccgcgacaacuggaaggggagcaaccggccgaucgucgacaucaacaucaaggacuacuccaucgugagcuccuacgugugcagcggccuggucggcgacacgccccgcaagaacgacuccagcuccagcucccacugccucgaccccaacaacgaggagggcgggcacggggugaagggcugggccuucgacgacgggaacgacgucuggaugggccggaccaucagcgagaagcugcgcuccggcuacgagaccuucaaggugaucgagggguggagcaaccccaacuccaagcugcagaucaaccgccaggugaucgucgaccggggcaaccggagcggguacuccggcaucuucagcguggagggcaagagcugcaucaaccgcugcuucuacguggagcucauccgggggcgcaaccaggagaccgagguccuguggaccuccaacagcaucgugguguucugcggcaccuccgggacguacggcaccgggagcuggccggacggcgccgacaucaaccugaugcccaucuga

SEQ ID NO: 80689 - RNA, 1410 nt, Artificial Sequence; identical to SEQ ID NO: 78351
  derived and/or modified CDS sequence (opt1) from neuraminidase__InfluenzaA__ACO36510

SEQ ID NO: 80690 - RNA, 1410 nt, Artificial Sequence; identical to SEQ ID NO: 78351
  derived and/or modified CDS sequence (opt1) from neuraminidase__InfluenzaA__ACO36543

SEQ ID NO: 80691 - RNA, 1410 nt, Artificial Sequence; identical to SEQ ID NO: 78351
  derived and/or modified CDS sequence (opt1) from neuraminidase__InfluenzaA__ACO36554

SEQ ID NO: 80692 - RNA, 1410 nt, Artificial Sequence; identical to SEQ ID NO: 78351
  derived and/or modified CDS sequence (opt1) from neuraminidase__InfluenzaA__ACO36565

SEQ ID NO: 80693 - RNA, 1410 nt, Artificial Sequence
  derived and/or modified CDS sequence (opt1) from neuraminidase__InfluenzaA__ACO36576
augaaccccaaccagaagaucaucaccaucggcagcgugucccugaccaucagcacgaucugcuucuucaugcagaucgccauccucaucaccaccgucacccugcacuucaagcaguacgaguucaacuccccgcccaacaaccaggugaugcugugcgagcccacgaucaucgagcgcaacaucaccgagaucguguaccucaccaacaccacgaucgagaaggagaucugccccaagcuggccgaguaccggaacuggagcaagccgcagugcgacaucaccggguucgcgcccuucuccaaggacaacagcauccgccuguccgccggcggggacaucugggucacccgggagcccuacgugagcugcgaccccgacaagugcuaccaguucgcccucggccaggggaccacgcugaacaacgugcacuccaacgacaccguccacgaccgcaccccguaccggacccugcucaugaacgagcugggcgugcccuuccaccugggcacgaagcaggucugcaucgccuggagcuccagcuccugccacgacgggaaggccuggcuccacgugugcgugaccggcgacgacaagaacgcgaccgccagcuucaucuacaacgggcgccugguggacuccaucgucagcugguccaaggagauccugcggacccaggagagcgagugcgugugcaucaacggcacgugcaccguggucaugaccgacggguccgccagcggcaaggccgacaccaagauccucuucaucgaggagggcaagaucgugcacacgagcacccuguccgggagcgcgcagcacguggaggagugcuccugcuacccccgcuaccccggcguccggugcgugugccgcgacaacuggaaggggagcaaccggccgaucguggacaucaacaucaaggacuacuccaucgucagcuccuacgugugcagcggccuggugggcgacacgccccgcaagaacgacuccagcuccagcucccacugccucgaccccaacaacgaggagggcgggcacggggucaagggcugggccuucgacgacgggaacgacguguggaugggccggaccaucagcgagaagcugcgcuccggcuacgagaccuucaaggucaucgagggguggagcaaccccaacuccaagcugcagaucaaccgccaggugaucgugggccgggggaaccggagcggcuacuccgggaucuucagcgucgagggcaagagcugcaucaaccgcugcuucuacguggagcucauccggggccgcaaggaggagaccgaggugcuguggaccuccaacagcaucgucguguucugcgggaccuccggcacguacgggaccggcagcuggccggacggggccgacaucaaccugaugcccaucuga

SEQ ID NO: 80694 - RNA, 1410 nt, Artificial Sequence; identical to SEQ ID NO: 78351
  derived and/or modified CDS sequence (opt1) from neuraminidase__InfluenzaA__ACO36587

SEQ ID NO: 80695 - RNA, 1410 nt, Artificial Sequence; identical to SEQ ID NO: 78736
  derived and/or modified CDS sequence (opt1) from neuraminidase__InfluenzaA__ACO36609

SEQ ID NO: 80696 - RNA, 1410 nt, Artificial Sequence
  derived and/or modified CDS sequence (opt1) from neuraminidase__InfluenzaA__ACO36620
augaaccccaaccagaagaucaucaccaucggcagcgugucccugaccaucagcacgaucugcuucuucaugcagaucgccauccucaucaccaccgucacccugcacuucaagcaguacgaguucaacuccccgcccaacaaccaggugaugcugugcgagcccacgaucaucgagcgcaacaucaccgagaucguguaccucaccaacaccacgaucgagaaggagaucugccccaagcuggccgaguaccggaacuggagcaagccgcagugcaacaucaccggguucgcgcccuucuccaaggacaacagcauccgccuguccgccggcggggacaucugggucacccgggagcccuacgugagcugcgaccccgacaagugcuaccaguucgcccucggccaggggaccacgcugaacaacgugcacuccaacgacaccguccacgaccgcaccccguaccggacccugcucaugaacgagcugggcgugcccuuccaccugggcacgaagcaggucugcaucgccuggagcuccagcuccugccacgacgggaaggccuggcuccacgugugcgugaccggcgacgacaagaacgcgaccgccagcuucaucuacaacgggcgccugguggacuccaucgucagcugguccaaggagauccugcggacccaggagagcgagugcgugugcaucaacggcacgugcaccguggucaugaccgacggguccgccagcggcaaggccgacaccaagauccucuucaucgaggagggcaagaucgugcacacgagcacccuguccgggagcgcgcagcacguggaggagugcuccugcuacccccgcuaccccggcguccggugcgugugccgcgacaacuggaaggggagcaaccggccgaucguggacaucaacaucaaggacuacuccaucgucagcuccuacgugugcagcggccuggugggcgacacgccccgcaagaacgacuccagcuccagcucccacugccucgaccccaacaacgaggagggcgggcacggggucaagggcugggccuucgacgacgggaacgacguguggaugggccggaccaucagcgagaagcugcgcuccggcuacgagaccuucaaggucaucgagggguggagcaaccccaacuccaagcuccaggugaaccgccaggugaucgucgaccggggcaaccggagcggguacuccggcaucuucagcguggagggcaagagcugcaucaaccgcugcuucuacguggagcugauccgggggcgcaaggaggagaccgagguccuguggaccuccaacagcaucgugguguucugcggcaccuccgggacguacggcaccgggagcuggccggacggcgccgacaucaaccugaugcccaucuga

SEQ ID NO: 80697 - RNA, 1410 nt, Artificial Sequence; identical to SEQ ID NO: 78736
  derived and/or modified CDS sequence (opt1) from neuraminidase__InfluenzaA__ACO36631

SEQ ID NO: 80698 - RNA, 1410 nt, Artificial Sequence; identical to SEQ ID NO: 78736
  derived and/or modified CDS sequence (opt1) from neuraminidase__InfluenzaA__ACO36653

SEQ ID NO: 80699 - RNA, 1410 nt, Artificial Sequence
  derived and/or modified CDS sequence (opt1) from neuraminidase__InfluenzaA__ACO36675
augaaccccaaccagaagaucaucaccaucggcagcgugucccugaccaucagcacgaucugccucuucaugcagaucgccauccugaucaccaccgucacccugcacuucaagcaguacgaguucaacuccccgcccaacaaccaggugaugcucugcgagcccacgaucaucgagcgcaacaucaccgagaucguguaccugaccaacaccacgaucgagaaggagaucugccccaagcuggccgaguaccggaacuggagcaagccgcagugcaacaucaccggguucgcgcccuucuccaaggacaacagcauccgccucuccgccggcggggacaucugggucacccgggagcccuacgugagcugcgaccccgacaagugcuaccaguucgcccugggccaggggaccacgcugaacaacgugcacuccaacgacaccguccacgaccgcaccccguaccggacccuccugaugaacgagcugggcgugcccuuccaccucggcacgaagcaggucugcaucgccuggagcuccagcuccugccacgacgggaaggccuggcugcacgugugcgugaccggcgacgacaagaacgcgaccgccagcuucaucuacaacgggcgccugguggacuccaucgucagcugguccaaggagauccuccggacccaggagagcgagugcgugugcaucaacggcacgugcaccguggucaugaccgacggguccgccagcggcaaggccgacaccaagauccuguucaucgaggagggcaagaucgugcacacgagcacccuguccgggagcgcgcagcacguggaggagugcuccugcuacccccgcuaccccggcguccggugcgugugccgcgacaacuggaaggggagcaaccggccgaucguggacaucaacaucaaggacuacuccaucgucagcuccuacgugugcagcggccucgugggcgacacgccccgcaagaacgacuccagcuccagcucccacugccuggaccccaacaacgaggagggcgggcacggggucaagggcugggccuucgacgacgggaacgacguguggaugggccggaccaucagcgagaagcugcgcuccggcuacgagaccuucaaggucaucgagggguggagcaaccccaacuccaagcuccagaucaaccgccaggugaucguggaccggggcaaccggagcggguacuccggcaucuucagcgucgagggcaagagcugcaucaaccgcugcuucuacguggagcugauccgggggcgcaaggaggagaccgaggugcuguggaccuccaacagcaucgucguguucugcggcaccuccgggacguacggcaccgggagcuggccggacggcgccgacaucaaccucaugcccaucuga

SEQ ID NO: 80700 - RNA, 1410 nt, Artificial Sequence
  derived and/or modified CDS sequence (opt1) from neuraminidase__InfluenzaA__ACO36686
augaaccccaaccagaagaucaucaccaucggcagcgugucccugaccaucagcacgaucugcuucuucaugcagaucgccauccucaucaccaccgucacccugcacuucaagcaguacgaguucaacuccccgcccaacaaccaggugaugcugugcgagcccacgaucaucgagcgcaacaucaccgagaucguguaccucaccaacaccacgaucgagaaggagaucugccccaagcuggccgaguaccggaacuggagcaagccgcagugcaacaucaccggguucgcgcccuucuccaaggacaacagcauccgccuguccgccggcggggacaucugggucacccgggagcccuacgugagcugcgaccacgacaagugcuaccaguucgcccucggccaggggaccacgcugaacaacgugcacuccaacgacaccguccacgaccgcacccccuaccggacccugcucaugaacgagcugggcgugccguuccaccugggcacgaagcaggucugcaucgccuggagcuccagcuccugccacgacgggaaggccuggcuccacgugugcgugaccggcgacgacaagaacgcgaccgccagcuucaucuacaacgggcgccugguggacuccaucgucagcugguccaaggagauccugcggacccaggagagcgagugcgugugcaucaacggcacgugcaccguggucaugaccgacggguccgccagcggcaaggccgacaccaagauccucuucaucgaggagggcaagaucgugcacacgagcacccuguccgggagcgcgcagcacguggaggagugcuccugcuacccccgcuaccccggcguccggugcgugugccgcgacaacuggaaggggagcaaccggcccaucguggacaucaacaucaaggacuacuccaucgucagcuccuacgugugcagcggccuggugggcgacaccccgcgcaagaacgacuccagcuccagcucccacugccucgaccccaacaacgaggagggcgggcacggggucaagggcugggccuucgacgacgggaacgacguguggaugggccggaccaucagcgagaagcugcgcuccggcuacgagacguucaaggucaucgagggguggagcaaccccaacuccaagcugcagaucaaccgccaggugaucguggaccggggcaaccggagcggguacuccggcaucuucagcgucgagggcaagagcugcaucaaccgcugcuucuacguggagcucauccgggggcgcaaggaggagaccgaggugcuguggaccuccaacagcaucgucguguucugcggcaccuccgggacguacggcaccgggagcuggcccgacggcgccgacaucaaccugaugccgaucuga

SEQ ID NO: 80701 - RNA, 1410 nt, Artificial Sequence
  derived and/or modified CDS sequence (opt1) from neuraminidase__InfluenzaA__ACO37125
augaaccccaaccagaagaucaucaccaucggcagcgugucccugaccaucagcacgaucugcuucuucaugcagaucgccauccucaucaccaccgucacccugcacuucaagcaguacgaguucaacuccccgcccaacaaccaggugaugcugugcgagcccacgaucaucgagcgcaacaucaccgagaucguguaccucaccaacaccacgaucgagaaggagaucugccccaagcuggccgaguaccggaacuggagcaagccgcagugcgacaucaccggguucgcgcccuucuccaaggacaacagcauccgccuguccgccggcggggacaucugggucacccgggagcccuacgugagcugcgaccccgacaagugcuaccaguucgcccucggccaggggaccacgcugaacaacgugcacuccaacgacaccguccacgaccgcaccccguaccggacccugcucaugaacgagcugggcgugcccuuccaccugggcacgaagcaggucugcaucgccuggagcuccagcuccugccacgacgggaaggccuggcuccacgugugcgugaccggcgacgacaagaacgcgaccgccagcuucaucuacaacgggaugcugguggacuccaucgucagcugguccaaggagauccugcgcacccaggagagcgagugcgugugcaucaacggcacgugcaccguggucaugaccgacggguccgccagcggcaaggccgacaccaagauccucuucaucgaggagggcaagaucgugcacacgagcacccuguccgggagcgcgcagcacguggaggagugcuccugcuacccccgguaccccggcguccgcugcgugugccgggacaacuggaaggggagcaaccgcccgaucguggacaucaacaucaaggacuacuccaucgucagcuccuacgugugcagcggccuggugggcgacacgccccggaagaacgacuccagcuccagcucccacugccucgaccccaacaacgaggagggcgggcacggggucaagggcugggccuucgacgacgggaacgacguguggaugggccgcaccaucagcgagaagcugcgguccggcuacgagaccuucaaggucaucgagggguggagcaaccccaacuccaagcugcagaucaaccgccaggugaucguggaccggggcaaccgcagcggguacuccggcaucuucagcgucgagggcaagagcugcaucaaccggugcuucuacguggagcucauccgcgggcggaaggaggagaccgaggugcuguggaccuccaacagcaucgucguguucugcggcaccuccgggacguacggcaccgggagcuggccggacggcgccgacaucaaccugaugcccaucuga

SEQ ID NO: 80702 - RNA, 1410 nt, Artificial Sequence
  derived and/or modified CDS sequence (opt1) from neuraminidase__InfluenzaA__ACO94511
augaaccccaaccagaagaucaucaccaucggcagcgugucccugaccaucagcacgaucugcuucuucaugcagaucgccauccucaucaccaccgucacccugcacuucaagcaguacgaguucaacuccccgcccaacaaccaggugaugcugugcgagcccacgaucaucgagcgcaacaucaccgagaucguguaccucaccaacaccacgaucgagaaggagaucugccccaagcuggccgaguaccggaacuggagcaagccgcagugcgacaucaccggguucgcgcccuucuccaaggacaacagcauccgccuguccgccggcggggacaucugggucacccgggagcccuacgugagcugcgaccccgacaagugcuaccaguucgcccucggccaggggaccacgcugaacaacgugcacuccaacgacaccguccgcgaccggaccccguaccgcacccugcucaugaacgagcugggcgugcccuuccaccugggcacgaagcaggucugcaucgccuggagcuccagcuccugccacgacgggaaggccuggcuccacgugugcaucaccggcgacgacaagaacgcgaccgccagcuucaucuacaacgggcggcugguggacuccguggucagcugguccaaggagauccugcgcacccaggagagcgagugcgugugcaucaacggcacgugcaccguggucaugaccgacggguccgccagcggcaaggccgacaccaagauccucuucaucgaggagggcaagaucgugcacacgagcacccuguccgggagcgcgcagcacguggaggagugcuccugcuacccccgguaccccggcguccgcugcgugugccgggacaacuggaaggggagcaaccgcccgaucguggacaucaacaucaaggaccacuccaucgucagcuccuacgugugcagcggccuggugggcgacacgccccggaagaacgacuccagcuccagcuccaacugccucgaccccaacaacgaggagggcgggcacggggucaagggcugggccuucgacgacgggaacgacguguggaugggccgcaccaucagcgagaagucccggcugggcuacgagaccuucaaggucaucgagggguggagcaaccccaaguccaagcugcagaucaaccgccaggugaucguggaccggggcaaccgcagcggguacuccggcaucuucagcgucgagggcaagagcugcaucaaccggugcuucuacguggagcucauccgcgggcggaaggaggagaccgaggugcuguggaccuccaacagcaucgucguguucugcggcaccuccgggacguacggcaccgggagcuggccggacggcgccgacaucaaccugaugcccaucuga

SEQ ID NO: 80703 - RNA, 1410 nt, Artificial Sequence; identical to SEQ ID NO: 80536
  derived and/or modified CDS sequence (opt1) from neuraminidase__InfluenzaA__ACO94512

SEQ ID NO: 80704 - RNA, 1410 nt, Artificial Sequence; identical to SEQ ID NO: 80623
  derived and/or modified CDS sequence (opt1) from neuraminidase__InfluenzaA__ACO94513

SEQ ID NO: 80705 - RNA, 1410 nt, Artificial Sequence
  derived and/or modified CDS sequence (opt1) from neuraminidase__InfluenzaA__ACO94675
augaaccccaaccagaagaucaucaccaucggcagcgugucccugaccaucagcacgaucugcuucuucaugcagaucgccauccucaucaccaccgucacccugcacuucaagcaguacgaguucaacuccccgcccaacaaccaggugaugcugugcgagcccacgaucaucgagcgcaacaucaccgagaucguguaccucaccaacaccacgaucgagaaggagaucugccccaagcuggccgaguaccggaacuggagcaagccgcagugcgacaucaccggguucgcgcccuucuccaaggacaacagcauccgccuguccgccggcggggacaucugggucacccgggagcccuacgugagcugcgaccccgacaagugcuaccaguucgcccucggccaggggaccacgcugaacaacgugcacuccaacgacaccguccgcgaccggaccccguaccgcacccugcucaugaacgagcugggcgugcccuuccaccugggcacgaagcaggucugcaucgccuggagcuccagcuccugccacgacgggaaggccuggcuccacgugugcaucaccggcgacgacaagaacgcgaccgccagcuucaucuacaacgggcggcugguggacuccguggucagcugguccaaggagauccugcgcacccaggagagcgagugcgugugcaucaacggcacgugcaccguggucaugaccgacggguccgccagcggcaaggccgacaccaagauccucuucaucgaggagggcaagaucgugcacacgagcacccuguccgggagcgcgcagcacguggaggagugcuccugcuacccccgguaccccggcguccgcugcgugugccgggacaacuggaaggggagcaaccgcccgaucguggacaucaacaucaagaaccacuccaucgucagcuccuacgugugcagcggccuggugggcgacacgccccggaagaacgacuccagcuccagcucccacugccucgaccccaacaacgaggagggcgggcacggggucaagggcugggccuucgacgacgggaacgacguguggaugggccgcaccaucagcgagaagucccggcugggcuacgagaccuucaaggucaucgagggguggagcaaccccaaguccaagcugcagaucaaccgccaggugaucguggaccggggcaaccgcagcggguacuccggcaucuucagcgucgagggcaagagcugcaucaaccggugcuucuacguggagcucauccgcgggcggaaggaggagaccgaggugcuguggaccuccaacagcaucgucguguucugcggcaccuccgggacguacggcaccgggagcuggccggacggcgccgacaucaaccugaugcccaucuga

SEQ ID NO: 80706 - RNA, 1410 nt, Artificial Sequence
  derived and/or modified CDS sequence (opt1) from neuraminidase__InfluenzaA__ACO94686
augaaccccaaccagaagaucaucaccaucggcagcgugucccugaccaucagcacgaucugcuucuucaugcagaucgccauccucaucaccaccgucacccugcacuucaagcaguacgaguucaacuccccgcccaacaaccaggugaugcugugcgagcccacgaccaucgagcgcaacaucaccgagaucguguaccucaccaacacgaccaucgagaaggagaucugccccaagcuggccgaguaccggaacuggagcaagccgcagugcgacaucaccggguucgcgcccuucuccaaggacaacagcauccgccuguccgccggcggggacaucugggucacccgggagcccuacgugagcugcgaccccgacaagugcuaccaguucgcccucggccaggggacgacccugaacaacgugcacuccaacgacaccguccgcgaccggaccccguaccgcacgcugcucaugaacgagcugggcgugcccuuccaccugggcaccaagcaggucugcaucgccuggagcuccagcuccugccacgacgggaaggccuggcuccacgugugcaucaccggcgacgacaagaacgcgaccgccagcuucaucuacaacgggcggcugguggacuccaucgugagcugguccaaggacauccugcgcacgcaggagagcgagugcgucugcaucaacgggaccugcaccguggugaugaccgacggcuccgccagcggcaaggccgacacgaagauccucuucaucgaggagggcaagaucguccacaccagcacccuguccgggagcgcgcagcacguggaggagugcuccugcuacccccgguaccccggcgugcgcugcgucugccgggacaacuggaaggggagcaaccgcccgaucguggacaucaacaucaaggaccacuccaucgugagcuccuacgucugcagcggccuggugggcgacacgccccggaagaacgacuccagcuccagcgggcacugccucgaccccaacaacgaggagggcgggcacggcgugaaggggugggccuucgacgacggcaacgacgucuggaugggccgcaccaucuccgagaagucccggcugggguacgagaccuucaaggugaucgagggcuggagcaaccccaagagcaagcugcagaucaaccgccaggucaucguggaccgggggaaccgcuccggcuacagcgggaucuucuccguggagggcaagagcugcaucaaccggugcuucuacgucgagcucauccgcggccggaaggaggagaccgaggugcuguggaccagcaacuccaucguggucuucugcgggacgagcggcaccuacgggaccggcuccuggccggacggggccgagaucaaccugaugcccaucuga

SEQ ID NO: 80707 - RNA, 1410 nt, Artificial Sequence; identical to SEQ ID NO: 80623
  derived and/or modified CDS sequence (opt1) from neuraminidase__InfluenzaA__ACO94697

SEQ ID NO: 80708 - RNA, 1413 nt, Artificial Sequence; identical to SEQ ID NO: 80656
  derived and/or modified CDS sequence (opt1) from neuraminidase__InfluenzaA__ACO94708

SEQ ID NO: 80709 - RNA, 1410 nt, Artificial Sequence
  derived and/or modified CDS sequence (opt1) from neuraminidase__InfluenzaA__ACO94719
augaaccccaaccagaagaucaucaccaucggcagcgugucccugaccaucagcacgaucugcuucuucaugcagaucgccauccucaucaccaccgucacccugcacuucaagcaguacgaguucaacuccccgcccaacaaccaggugaugcugugcgagcccacgaucaucgagcgcaacaucaccgagaucguguaccucaccaacaccacgaucgagaaggagaucugccccaagcuggccgaguaccggaacuggagcaagccgcagugcgacaucaccggguucgcgcccuucuccaaggacaacagcauccgccuguccgccggcggggacaucugggucacccgggagcccuacgugagcugcgaccccgacaagugcuaccaguucgcccucggccaggggaccacgcugaacaacgugcacuccaacgacaccguccgcgaccggaccccguaccgcacccugcucaugaacgagcugggcgugcccuuccaccugggcacgaagcaggucugcaucgccuggagcuccagcuccugccacgacgggaaggccuggcuccacgugugcaucaccggcgacgacaagaacgcgaccgccagcuucaucuacaacgggcggcugguggacuccaucgugagcugguccaaggacauccugcgcacccaggagagcgagugcgucugcaucaacggcacgugcaccguggugaugaccgacggguccgccagcggcaaggccgacaccaagauccucuucaucgaggagggcaagaucguccacacgagcacccuguccgggagcgcgcagcacguggaggagugcuccugcuacccccgguaccccggcgugcgcugcgucugccgggacaacuggaaggggagcaaccgcccgaucguggacaucaacaucaaggaccacuccaucgugagcuccuacgucugcagcggccuggugggcgacacgccccggaagaacgacuccagcuccagcgggcacugccucgaccccaacaacgaggagggcgggcacggcgugaaggggugggccuucgacgacggcaacgacgucuggaugggccgcaccaucuccgagaagucccggcugggguacgagaccuucaaggugaucgagggcuggagcaaccccaagagcaagcugcagaucaaccgccaggucaucguggaccgggggaaccgcuccggcuacagcgggaucuucuccguggagggcaagagcugcaucaaccggugcuucuacgucgagcucauccgcggccggaaggaggagaccgaggugcuguggaccagcaacuccaucguggucuucugcgggaccagcggcacguacgggaccggcuccuggccggacggggccgagaucaaccugaugcccaucuga

SEQ ID NO: 80710 - RNA, 1410 nt, Artificial Sequence
  derived and/or modified CDS sequence (opt1) from neuraminidase__InfluenzaA__ACO94741
augaaccccaaccagaagaucaucaccaucggcagcgugucccugaccaucagcacgaucugcuucuucaugcagaucgccauccucaucaccaccgucacccugcacuucaagcaguacgaguucaacuccagcccgaacaaccaggugaugcugugcgagcccacgaucaucgagcgcaacaucaccgagaucguguaccucaccaacaccacgaucgagaaggagaucugccccaagcuggccgaguaccggaacugguccaagccccagugcgacaucaccggguucgcgccguucagcaaggacaacuccauccgccugagcgccggcggggacaucugggucacccgggagcccuacguguccugcgaccccgacaagugcuaccaguucgcccucggccaggggaccacgcugaacaacgugcacagcaacaacaccguccgcgaccggacccccuaccgcacccugcucaugaacgagcugggcgugccguuccaccugggcacgaagcaggucugcaucgccugguccagcuccagcugccacgacgggaaggccuggcuccacgugugcaucaccggcgacgacaagaacgcgaccgccuccuucaucuacaacgggcggcugguggacagcaucguguccuggagcaaggagauccugcgcacccaggaguccgagugcgucugcaucaacggcacgugcaccguggugaugaccgacgggagcgccagcggcaaggccgacaccaagauccucuucaucgaggagggcaagaucguccacacguccacccugagcggguccgcgcagcacguggaggagugcagcugcuacccccgguaccccggcgugcgcugcgucugccgggacaacuggaagggguccaaccgccccaucguggacaucaacaucaaggaccacagcaucguguccagcuacgucugcuccggccuggugggcgacaccccgcggaagaacgacagcuccagcuccagccacugccucgaccccaacaacgaggagggcgggcacggggugaagggcugggccuucgacgacgggaacgacgucuggaugggccgcaccaucuccgagaagucccggcugggcuacgagacguucaaggugaucgagggguggagcaaccccaagagcaagcugcagaucaaccgccaggucaucguggaccggggcaaccgcuccggguacagcggcaucuucagcguggaguccaagagcugcaucaaccggugcuucuacgucgagcucauccgcgggcggaaggaggagaccgaggugcuguggaccuccaacagcaucguggucuucugcggcaccuccggcacguacgggaccggcagcuggcccgacggggccgacaucaaccugaugccgaucuga

SEQ ID NO: 80711 - RNA, 1410 nt, Artificial Sequence; identical to SEQ ID NO: 80627
  derived and/or modified CDS sequence (opt1) from neuraminidase__InfluenzaA__ACO94763

SEQ ID NO: 80712 - RNA, 1410 nt, Artificial Sequence
  derived and/or modified CDS sequence (opt1) from neuraminidase__InfluenzaA__ACO94774
augaaccccaaccagaagaucaucaccaucggcagcgugucccugaccaucagcacgaucugcuucuucaugcagaucgccauccucaucaccaccgucacccugcacuucaagcaguacgaguucaacuccccgcccaacaaccaggugaugcugugcgagcccacgaucaucgagcgcaacaucaccgagaucguguaccucaccaacaccacgaucgagaaggagaucugccccaagcuggccgaguaccggaacuggagcaagccgcagugcgacaucaccggguucgcgcccuucuccaaggacaacagcauccgccuguccgccggcggggacaucugggucacccgggagcccuacgugagcugcgaccccgacaagugcuaccaguucgcccucggccaggggaccacgcugaacaacgugcacuccaacaacaccguccgcgaccggaccccguaccgcacccugcucaugaacgagcugggcgugcccuuccaccugggcacgaagcaggucugcauggccuggagcuccagcuccugccacgacgggcgggccuggcuccacgugugcaucaccggcgacgacaagaacgcgaccgccagcuucaucuacaacgggcgccugguggacuccguggucagcugguccaaggagauccugcggacccaggagagcgagugcgugugcaucaacggcacgugcaccguggucaugaccgacggguccgccagcggcaaggccgacaccaagauccucuucaucgaggagggcaagaucgugcacacgagcacccuguccgggagcgcgcagcacguggaggagugcuccugcuacccccgcuaccccggcguccggugcgugugccgcgacaacuggaaggggagcaaccggccgaucguggacaucaacaucaaggaccacuccaucgucagcuccuacgugugcagcggccuggugggcgacacgccccgcaagaacgacuccagcuccagcucccacugccucgaccccaacaacgaggagggcgggcacggggucaagggcugggccuucgacgacgggaacgacguguggaugggccggaccaucagcgagaagucccgccugggcuacgagaccuucaaggucaucgagggguggagcaaccccaaguccaagcugcagaucaaccgccaggugaucguggaccggggcaaccggagcggguacuccggcaucuucagcgucgagggcaagagcugcaucaaccgcugcuucuacguggagcucauccgggggcgcaaggaggagaccgaggugcuguggaccuccaacagcaucgucguguucugcggcaccuccgggacguacggcaccgggagcuggccggacggcgccgacaucaaccugaugcccaucuga

SEQ ID NO: 80713 - RNA, 1410 nt, Artificial Sequence
  derived and/or modified CDS sequence (opt1) from neuraminidase__InfluenzaA__ACO94785
augaaccccaaccagaagaucaucaccaucggcagcgugucccugaccaucagcacgaucugcuucuucaugcagaucgccauccucaucaccaccgucacccugcacuucaagcaguacgaguucaacuccccgcccaacaaccaggugaugcugugcaagcccacgaucaucgagcgcaacaucaccgagaucguguaccucaccaacaccacgaucgagaaggagaucugccccaagcuggccgaguaccggaacuggagcaagccgcagugcgacaucaccggguucgcgcccuucuccaaggacaacagcauccgccuguccgccggcggggacaucugggucacccgggagcccuacgugagcugcgaccccgacaagugcuaccaguucgcccucggccaggggaccacgcugaacaacgugcacuccaacaacaccguccgcgaccggaccccguaccgcacccugcucaugaacgagcugggcgugcccuuccaccugggcacgaagcaggucugcaucgccuggagcuccagcuccugccacgacgggaaggccuggcuccacgugugcaucaccggcgacgacaagaacgcgaccgccagcuucaucuacaacgggcggcugguggacuccguggucagcugguccaaggagauccugcgcacccaggagagcgagugcgugugcaucaacggcacgugcaccguggucaugaccgacggguccgccagcggcaaggccgacaccaagauccucuucaucgaggagggcaagaucgugcacacgagcacccuguccgggagcgcgcagcacguggaggagugcuccugcuacccccgguaccccggcguccgcugcgugugccgggacaacuggaaggggagcaaccgcccgaucguggacaucaacaucaaggaccacuccaucgucagcuccuacgugugcagcggccuggugggcgacacgccccggaagaacgacuccagcuccagcucccacugccucgaccccaacaacgaggagggcgggcacggggucaagggcugggccuucgacgacgggaacgacguguggaugggccgcaccaucagcgagaagucccggcugggcuacgagaccuucaaggucaucgagggguggagcaaccccaaguccaagcugcagaucaaccgccaggugaucguggaccggggcaaccgcagcggguacuccggcaucuucagcgucgagggcaagagcugcaucaaccggugcuucuacguggagcucauccgcgggcggaaggaggagaccgaggugcuguggaccuccaacagcaucgucguguucugcggcaccuccgggacguacggcaccgggagcuggccggacggcgccgacaucaaccugaugcccaucuga

SEQ ID NO: 80714 - RNA, 1410 nt, Artificial Sequence; identical to SEQ ID NO: 80623
  derived and/or modified CDS sequence (opt1) from neuraminidase__InfluenzaA__ACO94796

SEQ ID NO: 80715 - RNA, 1413 nt, Artificial Sequence
  derived and/or modified CDS sequence (opt1) from neuraminidase__InfluenzaA__ACO94807
augaaccccaaccagaagaucaucaccaucggcagcaucuccaucgccaucgggaucaucagccugauccuccagaucggcaacaucaucuccaucugggccagccacuccauccagaccgggagccagaaccacacgggcaucugcaaccagcgcaucaucaccuacgagaacuccaccugggugaacaacaccuacgucaacaucaacaacacgaacgugguggcggagaaggacaagaccagcgucacccuggccgggaacuccagccugugcuccaucagcggcugggccaucuacaccaaggacaacuccauccggaucggcagcaagggggacguguucgugauccgcgagccguucaucuccugcagccaccucgagugccggacguucuuccugacccagggcgcccugcucaacgacaagcacuccaacgggaccgucaaggaccgcagccccuaccgggcccugauguccugcccccugggcgaggcgcccagcccguacaacagccgcuucgaguccguggccuggagcgccuccgccugccacgacgggaugggcuggcucaccaucggcaucagcgggcccgacaacggcgcgguggccguccugaaguacaacgggaucaucacggagaccaucaaguccuggaagaagcggauccugcgcacccaggagagcgagugcgugugcaugaacggcuccugcuucaccaucaugacggacggccccagcaacgggaccgccuccuacaagaucuucaagaucgagaagggcaaggugaccaagaccaucgagcucaacgcccccaacuuccacuacgaggagugcagcugcuacccggacacggggaccgucaugugcgugugccgggacaacuggcacggcuccaaccgccccugggugagcuucaaccagaaccuggacuaccagaucggguacaucugcuccggcgucuucggcgacaacccccggcccaaggacggggagggcagcugcaacccggugaccguggacggggccgacggcgucaagggguucuccuacaaguacggcaacggcguguggaucgggcgcaccaagagcaaccggcugcgcaagggcuucgagaugaucugggaccccaacggguggacgaacaccgacuccgacuucagcgugaagcaggacgucguggcgaucaccgacugguccggcuacagcgggagcuucgugcagcaccccgagcucaccggccuggacugcauccggcccugcuucugggucgagcuggugcgcggccucccgcgggagaacacgaccaucuggaccuccgggagcuccaucagcuucugcggcgucaacuccgggaccgccaacuggagcuggcccgacggcgccgagcugcccuucacgaucgacaaguga

SEQ ID NO: 80716 - RNA, 1410 nt, Artificial Sequence; identical to SEQ ID NO: 80438
  derived and/or modified CDS sequence (opt1) from neuraminidase__InfluenzaA__ACO94818

SEQ ID NO: 80717 - RNA, 1365 nt, Artificial Sequence; identical to SEQ ID NO: 79743
  derived and/or modified CDS sequence (opt1) from neuraminidase__InfluenzaA__ACO94829

SEQ ID NO: 80718 - RNA, 1365 nt, Artificial Sequence; identical to SEQ ID NO: 79743
  derived and/or modified CDS sequence (opt1) from neuraminidase__InfluenzaA__ACO94840

SEQ ID NO: 80719 - RNA, 1410 nt, Artificial Sequence
  derived and/or modified CDS sequence (opt1) from neuraminidase__InfluenzaA__ACO94851
augaaccccaaccagaagaucaucaccaucggcagcgugucccugaccaucagcacgaucugcuucuucaugcagaccgccauccucaucaccaccgucacgcugcacuucaagcaguacgaguucaacuccccgcccaacaaccaggugaugcugugcgagcccaccaucaucgagcgcaacaucaccgagaucguguaccucaccaacacgaccaucgagaaggagaucugccccaagcuggccgaguaccggaacuggagcaagccgcagugcgacaucaccggguucgcgcccuucuccaaggacaacagcauccgccuguccgccggcggggacaucugggucacccgggagcccuacgugagcugcgaccccgacaagugcuaccaguucgcccucggccaggggacgacccugaacaacgugcacuccaacgacaucguccgcgaccggaccccguaccgcacccugcucaugaacgagcugggcgugcccuuccaccugggcacgaagcaggucugcaucgccuggagcuccagcuccugccacgacgggaaggccuggcuccacgugugcaucaccggcgacgacaagaacgcgaccgccagcuucaucuacaacgggcggcugguggacuccaucgugagcugguccaaggagauccugcgcacccaggagagcgagugcgucugcaucaacggcacgugcaccguggugaugaccgacggguccgccagcggcaaggccgacaccaagauccucuucaucgaggagggcaagaucguccacacgagcacccuguccgggagcgcgcagcacguggaggagugcuccugcuacccccgguaccccggcgugcgcugcgucugccgggacaacuggaaggggagcaaccgcccgaucguggacaucaacaucaaggaccacuccaucgugagcuccuacgucugcagcggccuggugggcgacacgccccggaagaacgacuccagcuccagcucccacugccucgaccccaacaacgaggagggcgggcacggggugaagggcugggccuucgacgacgggaacgacgucuggaugggccgcaccaucagcgagaagucccggcugggcuacgagaccuucaaggugaucgagggguggagcaaccccaaguccaagcugcagaucaaccgccaggucaucguggaccggggcaaccgcagcggguacuccggcaucuucagcguggagggcaagagcugcaucaaccggugcuucuacgucgagcucauccgcgggcggaaggaggagaccgaggugcuguggaccuccaacagcaucguggucuucugcggcaccuccgggacguacggcaccgggagcuggccggacggcgccgacaucaaccugaugcccaucuga

SEQ ID NO: 80720 - RNA, 1413 nt, Artificial Sequence; identical to SEQ ID NO: 80656
  derived and/or modified CDS sequence (opt1) from neuraminidase__InfluenzaA__ACO94873

SEQ ID NO: 80721 - RNA, 1410 nt, Artificial Sequence
  derived and/or modified CDS sequence (opt1) from neuraminidase__InfluenzaA__ACO94884
augaaccccaaccagaagaucaucaccaucggcagcgugucccugaccaucgccacgaucugcuuccucaugcagaucgccauccuggucaccaccgugacccugcacuucaagcagcacgagugcaacagcccgcccaacaaccaggugaugcucugcgagcccacgaucaucgagcgcaacaucaccgagaucgucuaccugaccaacaccacgaucgagaaggagaugugccccaagcuggcggaguaccggaacugguccaagccgcagugcaacaucaccggguucgcccccuucagcaaggacaacuccauccgccucagcgccggcggggacaucugggugacccgggagcccuacguguccugcgaccccgacaagugcuaccaguucgcccugggccaggggaccacgcugaacaacggccacagcaacgacaccguccacgaccgcaccccguaccggacccuccugaugaacgagcugggcgugcccuuccaccucgggacgcgccaggugugcaucgccugguccagcuccagcugccacgacggcaaggcguggcugcacgucugcgugaccggggacgacaagaacgccaccgccuccuucaucuacaacggccggcugguggacagcaucggguccuggagcaagaagauccuccgcacccaggaguccgagugcgucugcaucaacggcacgugcaccguggugaugaccgacggcagcgccuccgggaaggcggacaccaagauccuguucaucgaggagggcaagaucguccacaucagcacgcugagcggguccgcccagcacguggaggagugcagcugcuacccccgguaccccggcgugcgcugcgucugccgggacaacuggaagggcuccaaccgcccgaucguggacaucaacgugaaggacuacagcaucgucuccagcuacgugugcuccgggcucgugggcgacacgccccggaagaacgacagcuucuccagcucccacugccuggaccccaacaacgaggagggcgggcacggggucaagggcugggccuucgacgacggcaacgacguguggauggggcgcaccaucagcgagaagcugcgguccggcuacgagaccuucaaggucaucgagggguggagcaagcccaacuccaagcuccagaucaaccgccaggugaucguggagcggggcaaccgcagcggguacuccggcaucuucagcgucgagggcaaguccugcaucaaccggugcuucuacguggagcugauccgcgggcggaaggaggagaccgaggugugguggaccagcaacagcaucgucguguucugcggcaccuccgggaccuacggcacggggagcuggccggacggcgccgacaucaaccugaugcccaucuga

SEQ ID NO: 80722 - RNA, 1410 nt, Artificial Sequence; identical to SEQ ID NO: 78738
  derived and/or modified CDS sequence (opt1) from neuraminidase__InfluenzaA__ACO94906

SEQ ID NO: 80723 - RNA, 1410 nt, Artificial Sequence; identical to SEQ ID NO: 78169
  derived and/or modified CDS sequence (opt1) from neuraminidase__InfluenzaA__ACO94917

SEQ ID NO: 80724 - RNA, 1410 nt, Artificial Sequence; identical to SEQ ID NO: 78738
  derived and/or modified CDS sequence (opt1) from neuraminidase__InfluenzaA__ACO94928

SEQ ID NO: 80725 - RNA, 1410 nt, Artificial Sequence; identical to SEQ ID NO: 78169
  derived and/or modified CDS sequence (opt1) from neuraminidase__InfluenzaA__ACO94939

SEQ ID NO: 80726 - RNA, 1410 nt, Artificial Sequence
  derived and/or modified CDS sequence (opt1) from neuraminidase__InfluenzaA__ACO94950
augaaccccaaccagaagaucaucaccaucggcagcgugucccugaccaucagcacgaucugcuuccucaugcagaucgccauccugaucaccaccgucacccugcacuucaagcaguacgaguucaacuccccgcccaacaaccaggugaugcucugcgagcccacgaucaucgagcgcaacaucaccgagaucguguaccugaccaacaccacgaucgagaaggagaucugccccaagcuggccgaguaccggaacuggagcaagccgcagugcgacaucaccggguucgcgcccuucuccaaggacaacagcauccgccucuccgccggcggggacaucugggucacccgggagcccuacgugagcugcgaccccgacaagugcuaccaguucgcccugggccaggggaccacgcugaacaacgugcacuccaacgacaccguccacgaccgcaccccguaccggacccuccugaugaacgagcugggcgugcccuuccaccucggcacgaagcaggucugcaucgccuggagcuccagcuccugccacgacgggaaggccuggcugcacgugugcgugaccggcgacgacaagaacgcgaccgccagcuucaucuacaacgggcgccugguggacuccaucgucagcugguccaagaagauccuccggacccaggagagcgagugcgugugcaucaacggcacgugcaccguggucaugaccgacggguccgccagcggcaaggccgacaccaagauccuguucaucgaggagggcaagaucgugcacacgagcacccuguccgggagcgcgcagcacguggaggagugcuccugcuacccccgcuaccccggcguccggugcgugugccgcgacaacuggaaggggagcaaccggccgaucguggacaucaacaucaaggacuacuccaucgucagcuccuacgugugcagcggccucgugggcgacacgccccgcaagaacgacuccagcuccagcucccacugccuggaccccaacaacgaggagggcgggcacggggucaagggcugggccuucgacgacgggaacgacguguggaugggccggaccaucagcgagaagcugcgcuccggcuacgagaccuucaaggucaucgagggguggagcaaccccaacuccaagcuccagaucaaccgccaggugaucguggaccggggcaaccggagcggguacuccggcaucuucagcgucgagggcaagagcugcaucaaccgcugcuucuacguggagcugauccgggggcgcaaggaggagaccgaggugcuguggaccuccaacagcaucgucguguucugcggcaccuccgggacguacggcaccgggagcuggccggacggcgccgacaucaaccucaugcccaucuga

SEQ ID NO: 80727 - RNA, 1410 nt, Artificial Sequence
  derived and/or modified CDS sequence (opt1) from neuraminidase__InfluenzaA__ACO94961
augaaccccaaccagaagaucaucaccaucggcagcgugucccugaccaucagcacgaucugcuucuucaugcagaucgccauccucaucaccaccgucacccugcacuucaagcaguacgaguucaacuccccgcccaacaaccaggugaugcugugcgagcccacgaucaucgagcgcaacaucaccgagaucguguaccucaccaacaccacgaucgagaaggagcugugccccaagcuggccgaguaccggaacuggagcaagccgcagugcgacaucaccggguucgcgcccuucuccaaggacaacagcauccgccucuccgccggcggggacaucugggucacccgggagcccuacgugagcugcgaccccgacaagugcuaccaguucgcccugggccaggggaccacgcugaacaacgugcacuccaacgacaccguccacgaccgcaccccguaccggacccuccugaugaacgagcugggcgugcccuuccaccucggcacgaagcaggucugcaucgccuggagcuccagcuccugccacgacgggaaggccuggcugcacgugugcgugaccggcgacgacaagaacgcgaccgccagcuucaucuacaacgggcgccugguggacuccaucgucagcugguccaagaagauccuccggacccaggagagcgagugcgugugcaucaacggcacgugcaccguggucaugaccgacggguccgccagcggcaaggccgacaccaagauccuguucaucgaggagggcaagaucgugcacacgagcacccuguccgggagcgcgcagcacguggaggagugcuccugcuacccccgcuaccccggcguccggugcgugugccgcgacaacuggaaggggagcaaccggccgaucguggacaucaacaucaaggacuacuccaucgucagcuccuacgugugcagcggccucgugggcgacacgccccgcaagaacgacuccagcuccagcucccacugccuggaccccaacaacgaggagggcgggcacggggucaagggcugggccuucgacgacgggaacgacguguggaugggccggaccaucagcgagaagcugcgcuccggcuacgagaccuucaaggucaucgagggguggagcaaccccaacuccaagcuccagaucaaccgccaggugaucguggaccggggcaaccggagcggguacuccggcaucuucagcgucgagggcaagagcugcaucaaccgcugcuucuacguggagcugauccgggggcgcaaggaggagaccgaggugcuguggaccuccaacagcaucgucguguucugcggcaccuccgggacguacggcaccgggagcuggccggacggcgccgacaucaaccucaugcccaucuga

SEQ ID NO: 80728 - RNA, 1410 nt, Artificial Sequence
  derived and/or modified CDS sequence (opt1) from neuraminidase__InfluenzaA__ACO94972
augaaccccaaccagaagaucaucaccaucggcagcgugucccugaccaucagcacgaucugcuucuucaugcagaucgccauccucaucaccaccgucacccugcacuucaagcaguacgaguucaacuccccgcccaacaaccaggugaugcugugcgagcccacgaucaucgagcgcaacaucaccgagaucguguaccucaccaacaccacgaucgagaaggagaucugccccaagcuggccgaguaccggaacuggagcaagccgcagugcaacaucaccggguucgcgcccuucuccaaggacaacagcauccgccuguccgccggcggggacaucugggucacccgggagcccuacgugagcugcgaccccgacaagugcuaccaguucgcccucggccaggggaccacgcugaacaacgugcacuccaacgacaccguccacgaccgcaccccguaccggacccugcucaugaacgagcugggcgugcccuuccaccugggcacgaagcaggucugcaucgccuggagcuccagcuccugccacgacgggaaggccuggcuccacgugugcgugaccggcgacgacgagaacgcgaccgccagcuucaucuacaacgggcgccugguggacuccgucgugagcugguccaagaagauccugcggacccaggagagcgagugcgugugcaucaacggcacgugcaccgucgugaugaccgacggguccgccagcggcaaggccgacaccaagauccucuucaucgaggagggcaagaucgugcacacgagcacccuguccgggagcgcgcagcacgucgaggagugcuccugcuacccccgcuaccccggcgugcggugcgugugccgcgacaacuggaaggggagcaaccggccgaucgucgacaucaacaucaaggacuacuccaucgugagcuccuacgugugcagcggccuggucggcgacacgccccgcaagaacgacuccagcuccagcucccacugccucgaccccaacaacgaggagggcgggcacggggugaagggcugggccuucgacgacgggaacgacgucuggaugggccggaccaucagcgagaagcugcgcuccggcuacgagaccuucaaggugaucgagggguggagcaaccccaacuccaagcugcagaucaaccgccaggugaucgucgaccggggcaaccggagcggguacuccggcaucuucagcguggagggcaagagcugcaucaaccgcugcuucuacguggagcucauccgggggcgcaaccaggagaccgagguccuguggaccuccaacagcaucgugguguucugcggcaccuccgggacguacggcaccgggagcuggccggacggcgccgacaucaaccugaugcccaucuga

SEQ ID NO: 80729 - RNA, 1410 nt, Artificial Sequence
  derived and/or modified CDS sequence (opt1) from neuraminidase__InfluenzaA__ACO95156
augaaccccaaccagaagaucaucaccaucggcagcgugucccugaccaucagcacgaucugcuucuucaugcagaucgccauccucaucaccaccgucacccugcacuucaagcaguacgaguucaacuccccgcccaacaaccaggugaugcugugcgagcccacgaucaucgagcgcaacaucaccgagaucguguaccucaccaacaccacgaucgagaaggagaccugccccaagcuggccgaguaccggaacuggagcaagccgcagugcaacaucaccggguucgcgcccuucuccaaggacaacagcauccgccuguccgccggcggggacaucugggucacccgggagcccuacgugagcugcgaccccgacaagugcuaccaguucgcccucggccaggggacgacccugaacaacgugcacuccaacgacaccguccacgaccgcaccccguaccggacgcugcucaugaacgagcugggcgugcccuuccaccugggcaccaagcaggucugcaucgccuggagcuccagcuccugccacgacgggaaggccuggcuccacgugugcaucaccggcgacgacaagaacgcgaccgccagcuucaucuacaacgggcgccugguggacuccguggucagcugguccaagaagauccugcggacgcaggagagcgagugcgugugcaucaacgggaccugcaccguggucaugaccgacggguccgccagcggcaaggccgacacgaagauccucuucaucgaggagggcaagaucgugcacaccagcacccuguccgggagcgcgcagcacguggaggagugcuccugcuacccccgcuaccccggcguccggugcgugugccgcgacaacuggaaggggagcaaccggccgaucguggacaucaacaucaaggacuacuccaucgucagcuccuacgugugcagcggccuggugggcgacacgccccgcaagaacgacuccagcuccagcucccacugccucgaccccaacaacgaggagggcggccacggggucaagggcugggccuucgacgacgggaacgacguguggaugggccggaccaucagcgagaagcugcgcuccggcuacgagaccuucaaggucaucgagggguggagcaaccccaacuccaagcugcagaucaaccgccaggugaucguggaccggggcaaccggagcggguacuccggcaucuucagcgucgagggcaagagcugcaucaaccgcugcuucuacguggagcucauccgggggcgcaaccaggagaccgaggugcuguggaccuccaacagcaucgucguguucugcggcacguccgggaccuacggcaccgggagcuggccggacggcgccgacaucaaccugaugcccaucuga

SEQ ID NO: 80730 - RNA, 1410 nt, Artificial Sequence; identical to SEQ ID NO: 78351
  derived and/or modified CDS sequence (opt1) from neuraminidase__InfluenzaA__ACO95174

SEQ ID NO: 80731 - RNA, 1410 nt, Artificial Sequence; identical to SEQ ID NO: 78351
  derived and/or modified CDS sequence (opt1) from neuraminidase__InfluenzaA__ACO95185

SEQ ID NO: 80732 - RNA, 1410 nt, Artificial Sequence
  derived and/or modified CDS sequence (opt1) from neuraminidase__InfluenzaA__ACO95196
augaaccccaaccagaagaucaucaccaucggcagcgugucccugaccaucagcacgaucugcuucuucaugcagaucgccauccucaucaccaccgucacccugcacuucaagcaguacgaguucaacuccccgcccaacaaccaggugaugcugugcgagcccacgaucaucgagcgcaacaucaccgagaucguguaccucaccaacaccacgaucgagaaggagaucugccccaagcuggccgaguaccggaacuggagcaagccgcagugcaacaucaccggguucgcgcccuucuccaaggacaacagcauccgccuguccgccggcggggacaucugggucacccgggagcccuacgugagcugcgaccccgacaagugcuaccaguucgcccucggccaggggaccacgcugaacaacgugcacuccaacgacaccauccacgaccgcaccccguaccggacccugcucaugaacgagcugggcguccccuuccaccugggcacgaagcaggucugcaucgccuggagcuccagcuccugccacgacgggaaggccuggcuccacgugugcgugaccggcgacgacaagaacgcgaccgccagcuucaucuacaacgggcgccugguggacuccguggucagcugguccaagaagauccugcggacccaggagagcgagugcgugugcaucaacggcacgugcaccguggucaugaccgacggguccgccagcggcaaggccgacaccaagauccucuucaucgaggagggcaagaucgugcacacgagcacccuguccgggagcgcgcagcacguggaggagugcuccugcuacccccgcuaccccggcguccggugcgugugccgcgacaacuggaaggggagcaaccggccgaucguggacaucaacaucaaggacuacuccaucgucagcuccuacgugugcagcggccuggugggcgacacgccccgcaagaacgacuccagcuccagcucccacugccucgaccccaacaacgaggagggcgggcacggggucaagggcugggccuucgacgacgggaacgacguguggaugggccggaccaucagcgagaagcugcgcuccggcuacgagaccuucaaggucaucgagggguggagcaaccccaacuccaagcugcagaucaaccgccaggugaucguggaccggggcaaccggagcggguacuccggcaucuucagcgucgagggcaagagcugcaucaaccgcugcuucuacguggagcucauccgggggcgcaaccaggagaccgaggugcuguggaccuccaacagcaucgucguguucugcggcaccuccgggacguacggcaccgggagcuggccggacggcgccgacaucaaccugaugcccaucuga

SEQ ID NO: 80733 - RNA, 1410 nt, Artificial Sequence; identical to SEQ ID NO: 78351
  derived and/or modified CDS sequence (opt1) from neuraminidase__InfluenzaA__ACO95207

SEQ ID NO: 80734 - RNA, 1410 nt, Artificial Sequence; identical to SEQ ID NO: 78351
  derived and/or modified CDS sequence (opt1) from neuraminidase__InfluenzaA__ACO95218

SEQ ID NO: 80735 - RNA, 1410 nt, Artificial Sequence; identical to SEQ ID NO: 78354
  derived and/or modified CDS sequence (opt1) from neuraminidase__InfluenzaA__ACO95229

SEQ ID NO: 80736 - RNA, 1410 nt, Artificial Sequence; identical to SEQ ID NO: 78736
  derived and/or modified CDS sequence (opt1) from neuraminidase__InfluenzaA__ACO95240

SEQ ID NO: 80737 - RNA, 1410 nt, Artificial Sequence; identical to SEQ ID NO: 78597
  derived and/or modified CDS sequence (opt1) from neuraminidase__InfluenzaA__ACO95262

SEQ ID NO: 80738 - RNA, 1410 nt, Artificial Sequence; identical to SEQ ID NO: 80535
  derived and/or modified CDS sequence (opt1) from neuraminidase__InfluenzaA__ACO95273

SEQ ID NO: 80739 - RNA, 1410 nt, Artificial Sequence; identical to SEQ ID NO: 80627
  derived and/or modified CDS sequence (opt1) from neuraminidase__InfluenzaA__ACO95306

SEQ ID NO: 80740 - RNA, 1413 nt, Artificial Sequence
  derived and/or modified CDS sequence (opt1) from neuraminidase__InfluenzaA__ACO95385
augaaccccaaccagaagaucaucaccaucggcagcaucuccaucgccaucgggaucaucagccugaugcuccagaucggcaacaucaucuccaucugggccagccacuccauccagaccgggagccagaacaacacgggcaucugcaaccagcgcaucaucaccuacgagaacuccaccugggugaaccacaccuacgucaacaucaacaacacgaacgugguggcgggggaggacaagaccagcgucacccuggccggcaacuccagccugugcuccaucagcggcugggccaucuacaccaaggacaacuccauccggaucgggagcaagggcgacguguucgugauccgcgagccguucaucuccugcagccaccucgagugccggacguucuuccugacccagggggcccugcucaacgacaagcacuccaacggcaccgucaaggaccgcagccccuaccgggcccugauguccugcccccugggggaggcgcccagcccguacaacagcaaguucgaguccguggccuggagcgccuccgccugccacgacggcaugggcuggcucaccaucgggaucagcggccccgacaacggggcgguggccguccugaaguacaacggcaucaucacgggcaccaucaaguccuggaagaagcagauccugcgcacccaggagagcgagugcgugugcaugaacggguccugcuucaccaucaugacggacggccccagcgacaaggccgccuccuacaagaucuucaagaucgagaaggggaaggugaccaagagcaucgagcucaacgcccccaacuuccacuacgaggagugcuccugcuacccggacaccggcaucgucaugugcgugugccgggacaacuggcacgggagcaaccgccccuggguguccuucaaccagaaccuggacuaccagaucggcuacaucugcagcggcgucuucggggacaacccccggcccgaggacggcgagggguccugcaacccggugaccguggacggcgcgaacggggucaagggcuucagcuacaaguacgacaacggcguguggaucgggcgcacgaaguccaaccggcugcgcaagggcuucgagaugaucugggaccccaacggguggaccaacaccgacagcgacuucuccgugaagcaggacgucguggccaucaccgacuggagcggcuacagcggguccuucgugcagcaccccgagcucacgggccuggacugcauccggcccugcuucugggucgagcuggugcgcggccucccgcgggagaacaccaccaucuggaccagcggguccagcaucuccuucugcggcgucaacagcgacacggccaacugguccuggcccgacggggccgagcugcccuucaccaucgacaaguga

SEQ ID NO: 80741 - RNA, 1413 nt, Artificial Sequence; identical to SEQ ID NO: 80656
  derived and/or modified CDS sequence (opt1) from neuraminidase__InfluenzaA__ACO95407

SEQ ID NO: 80742 - RNA, 1413 nt, Artificial Sequence; identical to SEQ ID NO: 80656
  derived and/or modified CDS sequence (opt1) from neuraminidase__InfluenzaA__ACO95418

SEQ ID NO: 80743 - RNA, 1410 nt, Artificial Sequence; identical to SEQ ID NO: 78169
  derived and/or modified CDS sequence (opt1) from neuraminidase__InfluenzaA__ACO95429

SEQ ID NO: 80744 - RNA, 1410 nt, Artificial Sequence; identical to SEQ ID NO: 78738
  derived and/or modified CDS sequence (opt1) from neuraminidase__InfluenzaA__ACO95440

SEQ ID NO: 80745 - RNA, 1410 nt, Artificial Sequence
  derived and/or modified CDS sequence (opt1) from neuraminidase__InfluenzaA__ACO95462
augaaccccaaccagaagaucaucaccaucggcagcgugucccugaccaucagcacgaucugcuucuucaugcagaucgccauccucaucaccaccgucacccugcacuucaagcaguacgaguucaacuccccgcccaacaaccaggugaugcugugcgagcccacgaucaucgagcgcaacaucaccgagaucguguaccucaccaacaccacgaucgagaaggagaucugccccaagcuggccgaguaccggaacuggagcaagccgcagugcaacaucaccggguucgcgcccuucuccaaggacaacagcauccgccuguccgccggcggggacaucugggucacccgggagcccuacgugagcugcgaccccgacaagugcuaccaguucgcccucggccaggggaccacgcugaacaacgugcacuccaacgacaccguccacgaccgcaccccguaccggacccugcucaugaacgagcugggcgugcccuuccaccugggcacgaagcaggucugcaucgccuggagcuccagcuccugccacgacgggaaggccuggcuccacgugugcgugaccggcgacgacaagaacgcgaccgccagcuucaucuacaacgggcgccugguggacuccaucgucagcugguccaaggagauccugcggacccaggagagcgagugcgugugcaucaacggcacgugcaccguggucaugaccgacggguccgccagcggcaaggccgacaccaagauccucuucaucgaggagggcaagaucgugcacacgagcacccuguccgggagcgcgcagcacguggaggagugcuccugcuacccccgcuaccccggcguccggugcgugugccgcgacaacuggaaggggagcaaccggccgaucguggacaucaacaucaaggacuacuccaucgucagcuccuacgugugcagcggccuggugggcgacacgccccgcaagaacgacuccagcuccagcucccacugccucgaccccaacaacgaggagggcgggcacggggucaagggcugggccuucgacgacgggaacgacguguggaugggccggaccaucagcgagaagcugcgcuccggcuacgagaccuucaaggucaucgagggguggagcaaccccaacuccaagcugcagaucaaccgccaggugaucguggaccggggcaaccggagcggguacuccggcaucuucagcgucgagggcaagagcugcaucaaccgcugcuucuacguggagcucauccgggggcgcaaggaggagaccgaggugcuguggaccuccaacagcaucgucguguucugcggcaccuccgggacguacggcaccgggagcuggccggacggcgccgacaucaaccugaugcucaucuga

SEQ ID NO: 80746 - RNA, 1410 nt, Artificial Sequence; identical to SEQ ID NO: 78736
  derived and/or modified CDS sequence (opt1) from neuraminidase__InfluenzaA__ACO95484

SEQ ID NO: 80747 - RNA, 1410 nt, Artificial Sequence; identical to SEQ ID NO: 78736
  derived and/or modified CDS sequence (opt1) from neuraminidase__InfluenzaA__ACO95495

SEQ ID NO: 80748 - RNA, 1410 nt, Artificial Sequence; identical to SEQ ID NO: 78736
  derived and/or modified CDS sequence (opt1) from neuraminidase__InfluenzaA__ACO95506

SEQ ID NO: 80749 - RNA, 1410 nt, Artificial Sequence
  derived and/or modified CDS sequence (opt1) from neuraminidase__InfluenzaA__ACO95517
augaaccccaaccagaagaucaucaccaucggcagcgugucccugaccaucagcacgaucugcuucuucaugcagaucgccauccucaucaccaccgucacccugcacuucaagcaguacgaguucaacuccccgcccaacaaccaggugaugcugugcgagcccacgaucaucgagcgcaacaucaccgagaucguguaccucaccaacaccacgaucgagaaggagaucugccccaagcuggccgaguaccggaacuggagcaagccgcagugcaacaucaccggguucgcgcccuucuccaaggacaacagcauccgccuguccgccggcggggacaucugggucacccgggagcccuacgugagcugcgaccccgacaagugcuaccaguucgcccucggccaggggaccacgcugaacaacgugcacuccaacgacaccguccacgaccgcaccccguaccggacccugcucaugaacgagcugggcgugcccuuccaccugggcacgaagcaggucugcaucgccuggagcuccagcuccugccacgacgggaaggccuggcuccacgugugcgugaccggcgacgacaagaacgcgaccgccagcuucaucuacaacgggcgccugguggacuccaucgucagcugguccaaggagauccugcggacccaggagagcgagugcgugugcaucaacggcacgugcaccguggucaugaccgacggguccgccagcggcaaggccgacaccaagauccucuucaucgaggagggcaagaucgugcacacgagcacccuguccgggagcgcgcagcacguggaggagugcuccugcuacccccgcuaccccggcguccggugcgugugccgcgacaacuggaaggggagcaaccggccgaucguggacaucaacaucaaggacuacuccaucgucagcuccuacgugugcagcggccuggugggcgacacgccccgcaagaacgacuccagcuccagcucccacugccucgaccccaacaacgaggagggcgggcacggggucaagggcugggccuucgacgacgggaacgacguguggaugggccggaccaucagcgagaagcugcgccugggcuacgagaccuucaaggucaucgaggggugguccaaccccaacagcaagcuccagaucaaccgccaggugaucguggaccggggcaaccgguccggguacagcggcaucuucuccgucgagggcaagagcugcaucaaccgcugcuucuacguggagcugauccgggggcgcaaggaggagaccgaggugcuguggaccagcaacuccaucgucguguucugcggcaccagcgggacguacggcaccggguccuggccggacggcgccgacaucaaccucaugcccaucuga

SEQ ID NO: 80750 - RNA, 1410 nt, Artificial Sequence
  derived and/or modified CDS sequence (opt1) from neuraminidase__InfluenzaA__ACO95539
augaaccccaaccagaagaucaucaccaucggcagcgugucccugaccaucagcacgaucugcuucuucaugcagaucgccauccucaucaccaccgucacccugcacuucaagcaguacgaguucaacuccccgcccaacaaccaggugaugcugugcgagcccacgaucaucgagcgcaacaucaccgagaucguguaccucaccaacaccacgaucgagaaggagaucugccccaagcuggccgaguaccggaacuggagcaagccgcagugcaacaucaccggguucgcgcccuucuccaaggacaacagcauccgccuguccgccggcggggacaucugggucacccgggagcccuacgugagcugcgaccccgacaagugcuaccaguucgcccucggccaggggaccacgcugaacaacgugcacuccaacgacaccguccacgaccgcaccccguaccggacccugcucaugaacgagcugggcgugcccuuccaccugggcacgaagcaggucugcaucgccuggagcuccagcuccugccacgacgggaaggccuggcuccacgugugcgugaccggcgacgacaagaacgcgaccgccagcuucaucuacaacgggcgccugguggacuccaucgucagcugguccaaggagauccugcggacccaggagagcgagugcgugugcaucaacggcacgugcaccguggucaugaccgacggguccgccagcggcaaggccaacaccaagauccucuucaucgaggagggcaagaucgugcacacgagcacccuguccgggagcgcgcagcacguggaggagugcuccugcuacccccgcuaccccggcguccggugcgugugccgcgacaacuggaaggggagcaaccggccgaucguggacaucaacaucaaggacuacuccaucgucagcuccuacgugugcagcggccuggugggcgacacgccccgcaagaacgacuccagcuccagcucccacugccucgaccccaacaacgaggagggcgggcacggggucaagggcugggccuucgacgacgggaacgacguguggaugggccggaccaucagcgagaagcugcgcuccggcuacgagaccuucaaggucaucgagggguggagcaaccccaacuccaagcugcagaucaaccgccaggugaucguggaccggggcaaccggagcggguacuccggcaucuucagcgucgagggcaagagcugcaucaaccgcugcuucuacguggagcucauccgggggcgcaaggaggagaccgaggugcuguggaccuccaacagcaucgucguguucugcggcaccuccgggacguacggcaccgggagcuggccggacggcgccgacaucaaccugaugcccaucuga

SEQ ID NO: 80751 - RNA, 1413 nt, Artificial Sequence
  derived and/or modified CDS sequence (opt1) from neuraminidase__InfluenzaA__ACP20223
augaaccccaaccagaagaucaucaccaucggcagcaucuccaucgccaucgggaucaucagccugaugcuccagaucggcaacaucaucuccaucugggccagccacuccauccagaccgggagccagaacaacacgggcaucugcaaccagcgcaucaucaccuacgagaacuccaccugggugaaccacaccuacgucaacaucaacaacacgaacgugguggcgggggaggacaagaccagcgucacccuggccggcaacuccagccugugcuccaucagcggcugggccaucuacaccaaggacaacuccauccggaucgggagcaagggcgacguguucgugauccgcgagccguucaucuccugcagccaccucgagugccggacguucuuccugacccagggggcccugcucaacgacaagcacuccaacggcaccgucaaggaccgcagccccuaccgggcccugauguccugcccccugggggaggcgcccagcccguacaacagcaaguucgaguccguggccuggagcgccuccgccugccacgacggcaugggcuggcucaccaucgggaucagcggccccgacaacggggcgguggccguccugaaguacaacggcaucaucacgggcaccaucaaguccuggaagaagcagauccugcgcacccaggagagcgagugcgugugcaugaacggguccugcuucaccaucaugacggacggccccagcaacaaggccgccuccuacaagaucuucaagaucgagaaggggaaggugaccaagagcaucgagcucaacgcccccaacuuccacuacgaggagugcuccugcuacccggacaccggcaucgucaugugcgugugccgggacaacuggcacgggagcaaccgccccuggguguccuucaaccagaaccuggacuaccagaucggcuacaucugcagcggcgucuucggggacaacccccggcccgaggacggcgagggguccugcaacccggugaccguggacggcgcgaacggggucaagggcuucagcuacaaguacgacaacggcguguggaucgggcgcacgaaguccaaccggcugcgcaagggcuucgagaugaucugggaccccaacggguggaccaacaccgacagcgacuucuccgugaagcaggacgucguggccgugaccgacuggagcggcuacagcggguccuucguccagcaccccgagcucacgggccuggacugcauccggcccugcuucuggguggagcugguccgcggccucccgcgggagaacaccaccaucuggaccagcggguccagcaucuccuucugcggcgugaacagcgacacggccaacugguccuggcccgacggggccgagcugcccuucaccaucgacaaguga

SEQ ID NO: 80752 - RNA, 1410 nt, Artificial Sequence
  derived and/or modified CDS sequence (opt1) from neuraminidase__InfluenzaA__ACP41952
augaaccccaaccagaagaucaucaccaucggcagcgugugcaugaccaucgggauggccaaccugauccuccagaucggcaacaucaucuccaucuggaucagccacuccauccagcuggggaaccagaaccagaucgagacgugcaaccagagcgucaucaccuacgagaacaacaccugggugaaccagaccuacgugaacaucuccaacacgaacuucgccgcgggccagagcgucguguccgugaagcuggccgggaacagcucccucugcccggucagcggcugggccaucuacuccaaggacaacagcgugcgcaucggcuccaagggggacguguucgucauccgggagcccuucaucagcugcagcccccuggagugccgcaccuucuuccugacccagggcgcccuccugaacgacaagcacuccaacgggaccaucaaggaccggucccccuaccgcacgcugaugagcugcccgaucggcgaggugcccucccccuacaacagccgguucgagagcguggccugguccgcgagcgccugccacgacgggaucaacuggcucaccaucggcaucuccggccccgacaacggggccgucgccgugcugaaguacaacggcaucaucaccgacaccaucaagagcuggcgcaacaacauccugcggacgcaggaguccgagugcgcgugcgugaacgggagcugcuucaccgucaugaccgacggcccguccaacggccaggccagcuacaagaucuuccgcaucgagaaggggaagaucgugaaguccguggagaugaacgcccccaacuaccacuacgaggagugcagcugcuaccccgacuccagcgagaucacgugcgucugccgggacaacuggcacggcuccaaccgccccugggugagcuucaaccagaaccucgaguaccagaucggguacaucugcuccggcaucuucggggacaacccgcggcccaacgacaagaccggcagcugcggccccguguccagcaacggggccaacggcgucaagggguucuccuucaaguacggcaacgggguguggaucggccgcaccaagagcaucagcucccggaacggcuucgagaugaucugggaccccaacggguggaccggcaccgacaacaacuucagcaucaagcaggacaucguggggaucaacgagugguccggcuacagcggguccuucguccagcacccggagcugacgggccuggacugcauccgccccugcuucuggguggagcucauccggggccgccccaaggagaacaccaucuggaccagcggguccagcaucuccuucugcggcgucaacagcgacaccguggggugguccuggcccgacggcgccgagcugccguucacgaucgacaaguga

SEQ ID NO: 80753 - RNA, 1410 nt, Artificial Sequence; identical to SEQ ID NO: 80752
  derived and/or modified CDS sequence (opt1) from neuraminidase__InfluenzaA__ACP44158

SEQ ID NO: 80754 - RNA, 1413 nt, Artificial Sequence
  derived and/or modified CDS sequence (opt1) from neuraminidase__InfluenzaA__ACP44195
augaaccccaaccagaagaucaucaccaucggcagcaucuccaucgccaucgggaucaucagccugaugcuccagaucggcaacaucaucuccaucugggccagccacuccauccagaccgggagccagaacaacacgggcaucugcaaccagcgcaucaucaccuacgagaacuccaccugggugaaccacaccuacgucaacaucaacaacacgaacgugguggcgggggaggacaagaccagcgucacccuggccggcaacuccagccugugcuccaucagcggcugggccaucuacaccaaggacaacuccauccggaucgggagcaagggcgacguguucgugauccgcgagccguucaucuccugcagccaccucgagugccggacguucuuccugacccagggggcccugcucaacgacaagcacuccaacggcaccgucaaggaccgcagccccuaccgggcccugauguccugcccccugggggaggcgcccagcccguacaacagcaaguucgaguccguggccuggagcgccuccgccugccacgacggcaugggcuggcucaccaucgggaucagcggccccgacaacggggcgguggccguccugaaguacaacggcaucaucacgggcaccaucaaguccuggaagaagcagauccugcgcacccaggagagcgagugcgugugcaugaacggguccugcuucaccaucaugacggacggccccagcgacaaggccgccuccuacaagaucuucaagaucgagaaggggaaggugaccaagagcaucgagcucaacgcccccaacuuccacuacgaggagugcuccugcuacccggacaccggcaucgucaugugcgugugccgggacaacuggcacgggagcaaccgccccuggguguccuucaaccagaaccuggacuaccagaucggcuacaucugcagcggcgucuucggggacaacccccggcccgaggacggcgagggguccugcaacccggugaccguggacggcgcgaacggggucaagggcuucagcuacaaguacgacaacggcguguggaucgggcgcacgaaguccaaccggcugcgcaagggcuucgagaugaucugggaccccaacggguggaccaacaccgacagcgacuucuccgugaagcaggacgucguggccaucaccgacuggagcggcuacagcggguccuucgugcagcaccccgagcucacgggccugaacugcauccggcccugcuucugggucgagcuggugcgcggccucccgcgggagaacaccaccaucuggaccagcggguccagcaucuccuucugcggcgucaacagcgacacggccaacugguccuggcccgacggggccgagcugcccuucaccaucgacaaguga

SEQ ID NO: 80755 - RNA, 1413 nt, Artificial Sequence; identical to SEQ ID NO: 80656
  derived and/or modified CDS sequence (opt1) from neuraminidase__InfluenzaA__ACP44217

SEQ ID NO: 80756 - RNA, 1413 nt, Artificial Sequence; identical to SEQ ID NO: 80656
  derived and/or modified CDS sequence (opt1) from neuraminidase__InfluenzaA__ACP44228

SEQ ID NO: 80757 - RNA, 1410 nt, Artificial Sequence; identical to SEQ ID NO: 78738
  derived and/or modified CDS sequence (opt1) from neuraminidase__InfluenzaA__ACP44239

SEQ ID NO: 80758 - RNA, 1410 nt, Artificial Sequence
  derived and/or modified CDS sequence (opt1) from neuraminidase__InfluenzaA__ACP44250
augaaccccaaccagaagaucaucaccaucggcagcgugucccugaccaucagcacgaucugcuucuucaugcagaucgccauccucaugaccaccgucacccugcacuucaagcaguacgaguucaacuccccgcccaacaaccaggugaugcugugcgagcccacgaucaucgagcgcaacaucaccgagaucguguaccucaccaacaccacgaucgagaaggagaucugccccaagcuggccgaguaccggaacuggagcaagccgcagugcgacaucaccggguucgcgcccuucuccaaggacaacagcauccgccuguccgccggcggggacaucugggucacccgggagcccuacgugagcugcgaccccgacaagugcuaccaguucgcccucggccaggggaccacgcugaacaacgugcacuccaacgacaccguccacgaccgcaccccguaccggacccugcucaugaacgagcugggcgugcccuuccaccugggcacgaagcaggucugcaucgccuggagcuccagcuccugccacgacgggaaggccuggcuccacgugugcgugaccggcgacgacaagaacgcgaccgccagcuucaucuacaacgggcgccugguggacuccaucgucagcugguccaaggagauccugcggacccaggagagcgagugcgugugcaucaacggcacgugcaccguggucaugaccgacggguccgccagcggcaaggccgacaccaagauccucuucaucgaggagggcaagaucgugcacacgagcacccuguccgggagcgcgcagcacguggaggagugcuccugcuacccccgcuaccccggcguccggugcgugugccgcgacaacuggaaggggagcaaccggccgaucguggacaucaacaucaaggacuacuccaucgucagcuccuacgugugcagcggccuggugggcgacacgccccgcaagaacgacuccagcuccagcucccacugccucgaccccaacaacgaggagggcgggcacggggucaagggcugggccuucgacgacgggaacgacguguggaugggccggaccaucagcgagaagcugcgcuccggcuacgagaccuucaaggucaucgagggguggagcaaccccaacuccaagcugcagaucaaccgccaggugaucguggaccggggcaaccggagcggguacuccggcaucuucagcgucgagggcaagagcugcaucaaccgcugcuucuacguggagcucauccgggggcgcaaggaggagaccgaggugcuguggaccuccaacagcaucgucguguucugcggcaccuccgggacguacggcaccgggagcuggccggacggcgccgacaucaaccugaugcccaucuga

SEQ ID NO: 80759 - RNA, 1410 nt, Artificial Sequence
  derived and/or modified CDS sequence (opt1) from neuraminidase__InfluenzaA__ACP44261
augaaccccaaccagaagaucaucaccaucggcagcgugucccugaccaucagcacgaucugcuucuucaugcagaucgccauccucaucaccaccgucacccugcacuucaagcaguacgaguucaacuccccgcccaacaaccaggugaugcugugcgagcccacgaucaucgagcgcaacaucaccgagaucguguaccucaccaacaccacgaucgagaaggagaucugccccaagcuggccgaguaccggaacuggagcaagccgcagugcaacaucaccggguucgcgcccuucuccaaggacaacagcauccgccuguccgccggcggggacaucugggucacccgggagcccuacgugagcugcgaccccgacaagugcuaccaguucgcccucggccaggggaccacgcugaacaacaugcacuccaacgacaccgugcacgaccgcaccccguaccggacccugcucaugaacgagcugggcguccccuuccaccugggcacgaagcaggucugcaucgccuggagcuccagcuccugccacgacgggaaggccuggcuccacgugugcgugaccggcgacgacaagaacgcgaccgccagcuucaucuacaacgggcgccugguggacuccaucgugagcugguccaaggagauccugcggacccaggagagcgagugcgucugcaucaacggcacgugcaccguggugaugaccgacggguccgccagcggcaaggccgacaccaagauccucuucaucgaggagggcaagaucguccacacgagcacccuguccgggagcgcgcagcacguggaggagugcuccugcuacccccgcuaccccggcgugcggugcgucugccgcgacaacuggaaggggagcaaccggccgaucguggacaucaacaucaaggacuacuccaucgugagcuccuacgucugcagcggccuggugggcgacacgccccgcaagaacgacuccagcuccagcucccacugccucgaccccaacaacgaggagggcgggcacggggugaagggcugggccuucgacgacgggaacgacgucuggaugggccggaccaucagcgagaagcugcgcuccggcuacgagaccuucaaggugaucgagggguggagcaaccccaacuccaagcugcagaucaaccggcaggucaucguggaccgcggcaaccggagcggguacuccggcaucuucagcguggagggcaagagcugcaucaaccgcugcuucuacgucgagcucauccgggggcgcaaggaggagaccgaggugcuguggaccuccaacagcaucguggucuucugcggcaccuccgggacguacggcaccgggagcuggccggacggcgccgacaucaaccugaugcccaucuga

SEQ ID NO: 80760 - RNA, 1410 nt, Artificial Sequence
  derived and/or modified CDS sequence (opt1) from neuraminidase__InfluenzaA__ACP44272
augaaccccaaccagaagaucaucaccaucggcagcgugucccugaccaucagcacgaucugcuucuucaugcagaucgccauccucaucaccaccgucacccugcacuucaagcaguacgaguucaacuccccgcccaacaaccaggugaugcugugcgagcccacgaucaucgagcgcaacaucaccgagaucguguaccucaccaacaccacgaucgagaaggagaucugccccaagcuggccgaguaccggaacuggagcaagccgcagugcaacaucaccggguucgcgcccuucuccaaggacaacagcauccgccuguccgccggcggggacaucugggucacccgggagcccuacgugagcugcgaccccgacaagugcuaccaguucgcccucggccaggggaccacgcugaacaacgugcacuccaacgacaccguccacgaccgcaccccguaccggacccugcucaugaacgagcugggcgugcccuuccaccugggcacgaagcaggucugcaucgccuggagcuccagcuccugccacgacgggaaggccuggcuccacgugugcgugaccggcgacgacaagaacgcgaccgccagcuucaucuacaacgggcgccugguggacuccaucgucagcugguccaaggagauccugcggacccaggagagcgagugcgugugcaucaacggcacgugcaccgugaucaugaccgacggguccgccagcggcaaggccgacaccaagauccucuucaucgaggagggcaagaucguccacacgagcacccuguccgggagcgcgcagcacguggaggagugcuccugcuacccccgcuaccccggcgugcggugcgucugccgcgacaacuggaaggggagcaaccggccgaucguggacaucaacaucaaggacuacuccaucgugagcuccuacgucugcagcggccuggugggcgacacgccccgcaagaacgacuccagcuccagcucccacugccucgaccccaacaacgaggagggcgggcacggggugaagggcugggccuucgacgacgggaacgacgucuggaugggccggaccaucagcgagaagcugcgcuccggcuacgagaccuucaaggugaucgagggguggagcaaccccaacuccaagcugcagaucaaccggcaggucaucguggaccgcggcaaccggagcggguacuccggcaucuucagcguggagggcaagagcugcaucaaccgcugcuucuacgucgagcucauccgggggcgcaaggaggagaccgaggugcuguggaccuccaacagcaucguggucuucugcggcaccuccgggacguacggcaccgggagcuggccggacggcgccgacaucaaccugaugcccaucuga

SEQ ID NO: 80761 - RNA, 1410 nt, Artificial Sequence; identical to SEQ ID NO: 80752
  derived and/or modified CDS sequence (opt1) from neuraminidase__InfluenzaA__ACQ55360

SEQ ID NO: 80762 - RNA, 1410 nt, Artificial Sequence
  derived and/or modified CDS sequence (opt1) from neuraminidase__InfluenzaA__ACQ63236
augaaccccaaccagaagaucaucaccaucggcagcgugugcaugaccaucgggauggccaaccugauccuccagaucggcaacaucaucuccaucuggaucagccacuccauccagcuggggaaccagaaccagaucgagacgugcaaccagagcgucaucaccuacgagaacaacaccugggugaaccagaccuacgugaacaucuccaacacgaacuucgccgcgggccagagcgucguguccgugaagcuggccgggaacagcucccucugcccggucagcggcugggccaucuacuccaaggacaacagcauccgcaucggcuccaagggggacguguucgugauccgggagcccuucaucagcugcagcccccuggagugccgcaccuucuuccugacccagggcgcccuccugaacgacaagcacuccaacgggaccaucaaggaccggucccccuaccgcacgcugaugagcugcccgaucggcgagguccccucccccuacaacagccgguucgagagcguggccugguccgcgagcgccugccacgacgggaucaacuggcucaccaucggcaucuccggccccgacaacggggccguggccguccugaaguacaacggcaucaucaccgacaccaucaagagcuggcgcaacaacauccugcggacgcaggaguccgagugcgcgugcgugaacgggagcugcuucaccgugaugaccgacggcccguccgacggccaggccagcuacaagaucuuccgcaucgagaaggggaagaucgucaaguccguggagaugaacgcccccaacuaccacuacgaggagugcagcugcuaccccgacuccagcgagaucacgugcgugugccgggacaacuggcacggcuccaaccgccccugggucagcuucaaccagaaccucgaguaccagaucggguacaucugcuccggcaucuucggggacaacccgcggcccaacgacaagaccggcagcugcggccccguguccagcaacggggccaacggcgugaagggguucuccuucaaguacggcaacggggucuggaucggccgcaccaagagcaucagcucccggaacggcuucgagaugaucugggaccccaacggguggaccggcaccgacaacaacuucagcaucaagcaggacaucguggggaucaacgagugguccggcuacagcggguccuucgugcagcacccggagcugacgggccuggacugcauccgccccugcuucugggucgagcucauccggggccgccccaaggagaacaccaucuggaccagcggguccagcaucuccuucugcggcgugaacagcgacaccgucgggugguccuggcccgacggcgccgagcugccguucacgaucgacaaguga

SEQ ID NO: 80763 - RNA, 1410 nt, Artificial Sequence; identical to SEQ ID NO: 80762
  derived and/or modified CDS sequence (opt1) from neuraminidase__InfluenzaA__ACQ63242

SEQ ID NO: 80764 - RNA, 1410 nt, Artificial Sequence; identical to SEQ ID NO: 80762
  derived and/or modified CDS sequence (opt1) from neuraminidase__InfluenzaA__ACQ63253

SEQ ID NO: 80765 - RNA, 1410 nt, Artificial Sequence; identical to SEQ ID NO: 80762
  derived and/or modified CDS sequence (opt1) from neuraminidase__InfluenzaA__ACQ63262

SEQ ID NO: 80766 - RNA, 1410 nt, Artificial Sequence
  derived and/or modified CDS sequence (opt1) from neuraminidase__InfluenzaA__ACQ65694
augaaccccaaccagaagaucaucaccaucggcagcgugucccugaccaucagcacgaucugcuucuucaugcagaucgccauccucaucaccaccgucacccugcacuucaagcaguacgaguucaacuccccgcccaacaaccaggugaugcugugcgagcccacgaucaucgagcgcaacaucaccgagaucguguaccucaccaacaccacgaucgagaaggagaucugccccaagcuggccgaguaccggaaguggagcaagccgcagugcaacaucaccggguucgcgcccuucuccaaggacaacagcauccgccuguccgccggcggggacaucugggucacccgggagcccuacgugagcugcgaccccgacaagugcuaccaguucgcccucggccaggggaccacgcugaacaacgugcacuccaacgacaccguccgcgaccggaccccguaccgcacccugcucaugaacgagcugggcgugcccuuccaccugggcacgaagcaggucugcaucgccuggagcuccagcuccugccacgacgggaaggccuggcuccacgugugcgugaccggcgacgacaagaacgcgaccgccagcuucaucuacaacgggcggcugguggacuccaucgucagcugguccaaggacauccugcgcacccaggagagcgagugcgugugcaucaacggcacgugcaccguggucaugaccgacggguccgccagcggcaaggccgacaccaagauccucuucaucgaggagggcaagaucgugcacacgagcacccuguccgggagcgcgcagcacguggaggagugcuccugcuacccccgguaccccggcguccgcugcgugugccgggacaacuggcgcgggagcaaccggccgaucguggacaucaacaugaaggacuacuccaucgucagcuccuacgugugcagcggccuggugggcgacacgccccgcaagaacgacuccagcuccagcgggcacugccucgaccccaacaacgaggagggcgggcacggcgucaaggggugggccuucgacgacggcaacgacguguggaugggccggaccaucuccgagaagcugcgcagcggguacgagaccuucaaggucaucgagggcugguccaaccccaacagcaagcugcagaucaaccgccaggugaucguggaccgggggaaccgguccggcuacagcgggaucuucuccgucgagggcaagagcugcaucaaccgcugcuucuacguggagcucauccggggccgcaaggaggagaccgaggugcuguggaccagcaacuccaucgucguguucugcgggaccagcggcacguacgggaccggcuccuggccggacggggccgacaucaaccugaugcccaucuga

SEQ ID NO: 80767 - RNA, 1410 nt, Artificial Sequence
  derived and/or modified CDS sequence (opt1) from neuraminidase__InfluenzaA__ACQ65705
augaaccccaaccagaagaucaucaccaucggcagcgugucccugaccaucagcacgaucugcuucuucaugcagaucgccauccucaucaccaccgucacccugcacuucaagcaguacgaguucaacuccccgcccaacaaccaggugaugcugugcgagcccacgaucaucgagcgcaacaucaccgagaucguguaccucaccaacaccacgaucgagaaggagaucugccccaagcuggccgaguaccggaaguggagcaagccgcagugcaacaucaccggguucgcgcccuucuccaaggacaacagcauccgccuguccgccggcggggacaucugggucacccgggagcccuacgugagcugcgaccccgacaagugcuaccaguucgcccucggccaggggaccacgcugaacaacgugcacuccaacgacaccguccgcgaccggaccccguaccgcacccugcucaugaacgagcugggcgugcccuuccaccugggcacgaagcaggucugcaucgccuggagcuccagcuccugccacgacgggaaggccuggcuccacgugugcgugaccggcgacgacaagaacgcgaccgccagcuucaucuacaacgggcggcugguggacuccaucgucagcugguccaaggagauccugcgcacccaggagagcgagugcgugugcaucaacggcacgugcaccguggucaugaccgacggguccgccagcggcaaggccgacaccaagauccucuucaucgaggagggcaagaucgugcacacgagcacccuguccgggagcgcgcagcacguggaggagugcuccugcuacccccgguaccccggcguccgcugcgugugccgggacaacuggcgcgggagcaaccggccgaucguggacaucaacaugaaggacuacuccaucgucagcuccuacgugugcagcggccuggugggcgacacgccccgcaagaacgacuccagcuccagcgggcacugccucgaccccaacaacgaggagggcgggcacggcgucaaggggugggccuucgacgacggcaacgacguguggaugggccggaccaucuccgagaagcugcgcagcggguacgagaccuucaaggucaucgagggcugguccaaccccaacagcaagcugcagaucaaccgccaggugaucguggaccgggggaaccgguccggcuacagcgggaucuucuccgucgagggcaagagcugcaucaaccgcugcuucuacguggagcucauccggggccgcaaggaggagaccgaggugcuguggaccagcaacuccaucgucguguucugcgggaccagcggcacguacgggaccggcuccuggccggacggggccgacaucaaccugaugcccaucuga

SEQ ID NO: 80768 - RNA, 1410 nt, Artificial Sequence; identical to SEQ ID NO: 80536
  derived and/or modified CDS sequence (opt1) from neuraminidase__InfluenzaA__ACQ65716

SEQ ID NO: 80769 - RNA, 1410 nt, Artificial Sequence; identical to SEQ ID NO: 80536
  derived and/or modified CDS sequence (opt1) from neuraminidase__InfluenzaA__ACQ65727

SEQ ID NO: 80770 - RNA, 1410 nt, Artificial Sequence; identical to SEQ ID NO: 80623
  derived and/or modified CDS sequence (opt1) from neuraminidase__InfluenzaA__ACQ65739

SEQ ID NO: 80771 - RNA, 1410 nt, Artificial Sequence
  derived and/or modified CDS sequence (opt1) from neuraminidase__InfluenzaA__ACQ65750
augaaccccaaccagaagaucaucaccaucggcagcgugucccugaccaucagcacgaucugcuucuucaugcagaccgccauccucaucaccaccgucacgcugcacuucaagcaguacgaguucaacuccccgcccaacaaccaggugaugcugugcgagcccaccaucaucgagcgcaacaucaccgagaucguguaccucaccaacacgaccaucgagaaggagaucugccccaagcuggccgaguaccggaacuggagcaagccgcagugcgacaucaccggguucgcgcccuucuccaaggacaacagcauccgccuguccgccggcggggacaucugggucacccgggagcccuacgugagcugcgaccccgacaagugcuaccaguucgcccucggccaggggacgacccugaacaacgugcacuccaacgacaccguccgcaaccggaccccguaccgcacgcugcucaugaacgagcugggcgugcccuuccaccugggcaccaagcaggucugcaucgccuggagcuccagcuccugccacgacgggaaggccuggcuccacgugugcaucaccggcgacgacaagaacgcgaccgccagcuucaucuacaacgggcggcugguggacuccaucgugagcugguccaaggagauccugcgcacgcaggagagcgagugcgucugcaucaacgggaccugcaccguggugaugaccgacggguccgccagcggcaaggccgacacgaagauccucuucaucgaggagggcaagaucguccacaccagcacccuguccgggagcgcgcagcacguggaggagugcuccugcuacccccgguaccccggcgugcgcugcgucugccgggacaacuggaaggggagcaaccgcccgaucguggacaucaacaucaaggaccacuccaucgugagcuccuacgucugcagcggccuggugggcgacacgccccggaagaacgacuccagcuccagcucccacugccucgaccccaacaacgaggagggcggccacggggugaagggcugggccuucgacgacgggaacgacgucuggaugggccgcaccaucagcgagaagucccggcugggcuacgagaccuucaaggugaucgagggguggagcaaccccaaguccaagcugcagaucaaccgccaggucaucguggaccggggcaaccgcagcggguacuccggcaucuucagcguggagggcaagagcugcaucaaccggugcuucuacgucgagcucauccgcgggcggaaggaggagaccgaggugcuguggaccuccaacagcaucguggucuucugcggcacguccgggaccuacggcaccgggagcuggccggacggcgccgacaucaaccugaugcccaucuga

SEQ ID NO: 80772 - RNA, 1413 nt, Artificial Sequence; identical to SEQ ID NO: 80656
  derived and/or modified CDS sequence (opt1) from neuraminidase__InfluenzaA__ACQ65761

SEQ ID NO: 80773 - RNA, 1410 nt, Artificial Sequence; identical to SEQ ID NO: 80752
  derived and/or modified CDS sequence (opt1) from neuraminidase__InfluenzaA__ACQ73394

SEQ ID NO: 80774 - RNA, 1410 nt, Artificial Sequence; identical to SEQ ID NO: 80752
  derived and/or modified CDS sequence (opt1) from neuraminidase__InfluenzaA__ACQ73395

SEQ ID NO: 80775 - RNA, 1410 nt, Artificial Sequence; identical to SEQ ID NO: 80762
  derived and/or modified CDS sequence (opt1) from neuraminidase__InfluenzaA__ACQ73396

SEQ ID NO: 80776 - RNA, 1410 nt, Artificial Sequence; identical to SEQ ID NO: 80762
  derived and/or modified CDS sequence (opt1) from neuraminidase__InfluenzaA__ACQ76291

SEQ ID NO: 80777 - RNA, 1410 nt, Artificial Sequence
  derived and/or modified CDS sequence (opt1) from neuraminidase__InfluenzaA__ACQ76298
augaaccccaaccagaagaucaucaccaucggcagcgugugcaugaccaucgggauggccaaccugauccuccagaucggcaacaucaucuccaucuggaucagccacuccauccagcuggggaaccagaaccagaucgagacgugcaaccagagcgucaucaccuacgagaacaacaccugggugaaccagaccuacgugaacaucuccaacacgaacuucgccgcgggccagagcgucguguccgugaagcuggccgggaacagcucccucugcccggucagcggcugggccaucuacuccaaggacaacagcgugcgcaucggcuccaagggggacguguucgucauccgggagcccuucaucagcugcagcccccuggagugccgcaccuucuuccugacccagggcgcccuccugaacgacaagcacuccaacgggaccaucaaggaccggucccccuaccgcacgcugaugagcugcccgaucggcgaggugcccucccccuacaacagccgguucgagagcguggccugguccgcgagcgccugccacgacgggaucaacuggcucaccaucggcaucuccggccccgacaacggggccgucgccgugcugaaguacaacggcaucaucaccgacaccaucaagagcuggcgcaacaacauccugcggacgcaggaguccgagugcgcgugcgugaacgggagcugcuucaccaucaugaccgacggcccguccaacggccaggccagcuacaagaucuuccgcaucgagaaggggaagaucgucaaguccguggagaugaacgcccccaacuaccacuacgaggagugcagcugcuaccccgacuccagcgagaucacgugcgugugccgggacaacuggcacggcuccaaccgccccugggucagcuucaaccagaaccucgaguaccagaucggguacaucugcuccggcaucuucggggacaacccgcggcccaacgacaagaccggcagcugcggccccguguccagcaacggggccaacggcgugaagggguucuccuucaaguacggcaacggggucuggaucggccgcaccaagagcaucagcucccggaacggcuucgagaugaucugggaccccaacggguggaccggcaccgacaacaacuucagcaucaagcaggacaucguggggaucaacgagugguccggcuacagcggguccuucgugcagcacccggagcugacgggccuggacugcauccgccccugcuucugggucgagcucauccggggccgccccaaggagaacaccaucuggaccagcggguccagcaucuccuucugcggcgugaacagcgacaccgucgggugguccuggcccgacggcgccgagcugccguucacgaucgacaaguga

SEQ ID NO: 80778 - RNA, 1410 nt, Artificial Sequence; identical to SEQ ID NO: 80762
  derived and/or modified CDS sequence (opt1) from neuraminidase__InfluenzaA__ACQ76308

SEQ ID NO: 80779 - RNA, 1410 nt, Artificial Sequence; identical to SEQ ID NO: 80762
  derived and/or modified CDS sequence (opt1) from neuraminidase__InfluenzaA__ACQ76316

SEQ ID NO: 80780 - RNA, 1410 nt, Artificial Sequence; identical to SEQ ID NO: 80752
  derived and/or modified CDS sequence (opt1) from neuraminidase__InfluenzaA__ACQ76322

SEQ ID NO: 80781 - RNA, 1410 nt, Artificial Sequence; identical to SEQ ID NO: 80752
  derived and/or modified CDS sequence (opt1) from neuraminidase__InfluenzaA__ACQ76328

SEQ ID NO: 80782 - RNA, 1410 nt, Artificial Sequence; identical to SEQ ID NO: 80752
  derived and/or modified CDS sequence (opt1) from neuraminidase__InfluenzaA__ACQ76335

SEQ ID NO: 80783 - RNA, 1410 nt, Artificial Sequence; identical to SEQ ID NO: 80752
  derived and/or modified CDS sequence (opt1) from neuraminidase__InfluenzaA__ACQ76342

SEQ ID NO: 80784 - RNA, 1410 nt, Artificial Sequence; identical to SEQ ID NO: 80752
  derived and/or modified CDS sequence (opt1) from neuraminidase__InfluenzaA__ACQ76351

SEQ ID NO: 80785 - RNA, 1410 nt, Artificial Sequence; identical to SEQ ID NO: 80752
  derived and/or modified CDS sequence (opt1) from neuraminidase__InfluenzaA__ACQ76359

SEQ ID NO: 80786 - RNA, 1410 nt, Artificial Sequence; identical to SEQ ID NO: 80762
  derived and/or modified CDS sequence (opt1) from neuraminidase__InfluenzaA__ACQ76364

SEQ ID NO: 80787 - RNA, 1410 nt, Artificial Sequence; identical to SEQ ID NO: 80762
  derived and/or modified CDS sequence (opt1) from neuraminidase__InfluenzaA__ACQ76367

SEQ ID NO: 80788 - RNA, 1410 nt, Artificial Sequence
  derived and/or modified CDS sequence (opt1) from neuraminidase__InfluenzaA__ACQ76379
augaaccccaaccagaagaucaucaccaucggcagcgugugcaugaccaucgggauggccaaccugauccuccagaucggcaacaucaucuccaucuggaucagccacuccauccagcuggggaaccagaaccagaucgagacgugcaaccagagcgucaucaccuacaagaacaacaccugggugaaccagaccuacgugaacaucuccaacacgaacuucgccgcgggccagagcgucguguccgugaagcuggccgggaacagcucccucugcccggucagcggcugggccaucuacuccaaggacaacagcgugcgcaucggcuccaagggggacguguucgucauccgggagcccuucaucagcugcagcccccuggagugccgcaccuucuuccugacccagggcgcccuccugaacgacaagcacuccaacgggaccaucaaggaccggucccccuaccgcacgcugaugagcugcccgaucggcgaggugcccucccccuacaacagccgguucgagagcguggccugguccgcgagcgccugccacgacgggaucaacuggcucaccaucggcaucuccggccccgacaacggggccgucgccgugcugaaguacaacggcaucaucaccgacaccaucaagagcuggcgcaacaacauccugcggacgcaggaguccgagugcgcgugcgugaacgggagcugcuucaccgucaugaccgacggcccguccaacggccaggccagcuacaagaucuuccgcaucgagaaggggaagaucgugaaguccguggagaugaacgcccccaacuaccacuacgaggagugcagcugcuaccccgacuccagcgagaucacgugcgucugccgggacaacuggcacggcuccaaccgccccugggugagcuucaaccagaaccucgaguaccagaucggguacaucugcuccggcaucuucggggacaacccgcggcccaacgacaagaccggcagcugcggccccguguccagcaacggggccaacggcgucaagggguucuccuucaaguacggcaacgggguguggaucggccgcaccaagagcaucagcucccggaacggcuucgagaugaucugggaccccaacggguggaccggcaccgacaacaacuucagcaucaagcaggacaucguggggaucaacgagugguccggcuacagcggguccuucguccagcacccggagcugacgggccuggacugcauccgccccugcuucuggguggagcucauccggggccgccccaaggagaacaccaucuggaccagcggguccagcaucuccuucugcggcgucaacagcgacaccguggggugguccuggcccgacggcgccgagcugccguucacgaucgacaaguga

SEQ ID NO: 80789 - RNA, 1410 nt, Artificial Sequence; identical to SEQ ID NO: 80762
  derived and/or modified CDS sequence (opt1) from neuraminidase__InfluenzaA__ACQ76385

SEQ ID NO: 80790 - RNA, 1410 nt, Artificial Sequence; identical to SEQ ID NO: 80762
  derived and/or modified CDS sequence (opt1) from neuraminidase__InfluenzaA__ACQ76388

SEQ ID NO: 80791 - RNA, 1410 nt, Artificial Sequence; identical to SEQ ID NO: 80762
  derived and/or modified CDS sequence (opt1) from neuraminidase__InfluenzaA__ACQ76403

SEQ ID NO: 80792 - RNA, 1410 nt, Artificial Sequence
  derived and/or modified CDS sequence (opt1) from neuraminidase__InfluenzaA__ACQ76407
augaaccccaaccagaagaucaucaccaucggcagcgugugcaugaccaucgggauggccaaccugauccuccagaucggcaacaucaucuccaucuggaucagccacuccauccagcuggggaaccagaaccagaucgagacgugcaaccagagcgucaucaccuacgagaacaacaccugggugaaccagaccuacgugaacaucuccaacacgaacuucgccgcgggccagagcgucguguccgugaagcuggccgggaacagcucccucugcccggucggcggcugggccaucuacagcaaggacaacuccgugcgcaucgggagcaagggcgacguguucgucauccgggagcccuucaucuccugcagcccccuggagugccgcaccuucuuccugacccagggggcccuccugaacgacaagcacuccaacggcaccaucaaggaccggagccccuaccgcacgcugauguccugcccgaucggggaggugcccagccccuacaacucccgguucgagagcguggccuggagcgcguccgccugccacgacggcaucaacuggcucaccaucggcaucagcgggcccgacaacggcgccgucgccgugcugaaguacaacgggaucaucaccgacaccaucaaguccuggcgcaacaacauccugcggacgcaggagagcgagugcgcgugcgugaacggcuccugcuucaccgucaugaccgacggcccgagcaacgggcaggccuccuacaagaucuuccgcaucgagaagggcaagaucgucaagagcguggagaugaacgcccccaacuaccacuacgaggagugcuccugcuaccccgacagcuccgagaucacgugcgugugccgggacaacuggcacgggagcaaccgccccuggguguccuucaaccagaaccucgaguaccagaucggcuacaucugcagcgggaucuucggcgacaacccgcggcccaacgacaagaccggcuccugcgggcccgugagcuccaacggcgccaacggggucaagggcuucagcuucaaguacgggaacggcguguggaucggccgcaccaaguccaucagcagccggaacggguucgagaugaucugggaccccaacggcuggaccgggaccgacaacaacuucuccaucaagcaggacaucgugggcaucaacgaguggagcggguacuccggcagcuucguccagcacccggagcugacgggccuggacugcauccgccccugcuucuggguggagcucauccgggggcgccccaaggagaacaccaucuggaccuccggcagcuccaucagcuucugcggggucaacuccgacaccgugggcuggagcuggcccgacggcgccgagcugccguucacgaucgacaaguga

SEQ ID NO: 80793 - RNA, 1410 nt, Artificial Sequence
  derived and/or modified CDS sequence (opt1) from neuraminidase__InfluenzaA__ACQ77603
augaaccccaaccagaagaucaucaccaucggcagcgugucccugaccaucgccacgaucugcuuccucaugcagaucgccauccuggucaccaccgugacccugcacuucaagcaguacgagugcaacagcccgcccaacaaccaggugaugcucugcgagcccacgaucaucgagcgcaacaucaccgagaucgucuaccugaccaacaccacgaucgagaaggagaucugccccaagcuggcggaguaccggaacugguccaagccgcagugcaacaucaccggguucgcccccuucagcaaggacaacuccauccgccucagcgccggcggggacaucugggugacccgggagcccuacguguccugcgaccccgacaagugcuaccaguucgcccugggccaggggaccacgcugaacaacggccacagcaacgacaccguccacgaccgcaccccguaccggacccuccugaugaacgagcugggcgugcccuuccaccucgggacgaagcaggucugcaucgccugguccagcuccagcugccacgacggcaaggcguggcugcacgugugcgugaccggggacgacgagaacgccaccgccuccuucaucuacaacggccgccugguggacagcaucggguccuggagcaagaagauccuccggacccaggaguccgagugcgucugcaucaacggcacgugcaccguggugaugaccgacggcagcgccuccgggaaggcggacaccaagauccuguucaucgaggagggcaagaucguccacacgagcccccugagcggguccgcccagcacguggaggagugcagcugcuacccccgcuacccgggcgugcggugcgucugccgcgacaacuggaagggcuccaaccggcccaucguggacaucaacgugaaggacuacagcaucgucuccagcuacgugugcuccgggcucgugggcgacacgccccgcaagaacgacagcuccagcuccagccacugccuggaccccaacaacgaggagggcgggcacggggucaagggcugggccuucgacgacggcaacgacguguggauggggcggaccaucuccgagaagucccgcagcggcuacgagaccuucaaggucaucgagggguggagcaagccgaacuccaagcugcagaucaaccgccaggugaucguggaccggggcaaccggagcggguacuccggcaucuucagcgucgagggcaagagcugcaucaaccgcugcuucuacguggagcucauccgggggcgcaagcaggagaccgaggugcuguggaccuccaacagcaucgucguguucugcggcaccuccgggaccuacggcacggggagcuggcccgacggcgccgacaucaaccugaugcccaucuga

SEQ ID NO: 80794 - RNA, 1410 nt, Artificial Sequence; identical to SEQ ID NO: 80752
  derived and/or modified CDS sequence (opt1) from neuraminidase__InfluenzaA__ACQ83309

SEQ ID NO: 80795 - RNA, 1410 nt, Artificial Sequence; identical to SEQ ID NO: 80752
  derived and/or modified CDS sequence (opt1) from neuraminidase__InfluenzaA__ACQ84460

SEQ ID NO: 80796 - RNA, 1410 nt, Artificial Sequence; identical to SEQ ID NO: 80752
  derived and/or modified CDS sequence (opt1) from neuraminidase__InfluenzaA__ACQ84470

SEQ ID NO: 80797 - RNA, 1410 nt, Artificial Sequence
  derived and/or modified CDS sequence (opt1) from neuraminidase__InfluenzaA__ACQ84480
augaacaccaaccagcgcaucaucaccaucggcacggugugccugaucgucgggaucgugagccuccugcugcagaucggcaacaucgugucccucuggaucagccacuccaucaagaccggggagaagaaccacagcgagaucugcaaccagaacaucaucaccuacgagaacaagaccugggucaaccagacguacgugaacaucuccaacaccaacaucgccgacggccagggggugaccagcaucauccuggccggcaacuccagccugugccccaucuccggcugggcgaucuacagcaaggacaacuccauccggaucgggagcaagggcgacaucuucgucauccgcgagccguucaucuccugcagccaccucgagugccggaccuucuuccugacgcagggggcccugcucaacgaccgccacuccaacggcaccgugaaggaccggagccccuaccgcacccugauguccugccccaccggggaggcccccagcccguacaacucccgguucgagagcguggccuggagcgccuccgcgugccacgacggcaugggcuggcugacgaucgggaucagcggccccgacaacggggccgucgccgugcucaaguacaacggcaucaucaccgacaccaucaaguccuggcgcaacaagauccugcggacccaggagagcgagugcgugugcaucaacggcuccugcuucacgaucaugaccgacgggcccagcaacggccaggccuccuacaagaucuucaagauggagaaggggaagaucaucaagagcgucgagcuggacgcgcccaacuaccacuacgaggagugcuccugcuacccggacaccggcaagguggugugcgucugccgcgacaacuggcacgccagcaaccggcccuggguguccuucgaccagaaccucgacuaccagaucggguacaucugcagcggcguguucggcgacaacccccgcuccaacgacgggaagggcaacugcgggcccguccugagcaacggcgccaacggggugaagggcuucuccuuccgguacggcaacgggguguggaucggccgcaccaagagcaucuccagccgguccggguucgagaugaucugggacccgaacggcuggacggagaccgacagcagcuucuccaucaagcaggacaucaucgcccugaccgacuggagcggguacuccggcagcuucguccagcaccccgagcucaccggcaugaacugcauccgccccugcuucuggguggagcugauccgggggcagcccaaggaguccacgaucuggaccagcggcuccagcaucuccuucugcgggguggacagcgagaccgccuccuggagcuggccggacggcgcggaccugcccuucaccaucgacaaguga

SEQ ID NO: 80798 - RNA, 1410 nt, Artificial Sequence
  derived and/or modified CDS sequence (opt1) from neuraminidase__InfluenzaA__ACQ89891
augaaccccaaccagaagaucaucaccaucggcagcgugugcaugaccaucgggauggccaaccugauccuccagaucggcaacaucaucuccaucuggaucagccacuccauccagcuggggaaccagaaccagaucgagacgugcaaccagagcgucaucaccuacgagaacaacaccugggugaaccagaccuacgugaacaucuccaacacgaacuucgccgcgggccagagcgucguguccgugaagcuggccgggaacagcucccucugcccggucagcggcugggccaucuacuccaaggacaacagcauccgcaucggcuccaagggggacguguucgugauccgggagcccuucaucagcugcagcccccuggagugccgcaccuucuuccugacccagggcgcccuccugaacgacaagcacuccaacgggaccaucaaggaccggucccccuaccgcacgcugaugagcugcccgaucggcgagguccccucccccuacaacagccgguucgagagcguggccugguccgcgagcgccugccacgacgggaucaacuggcucaccaucggcaucuccggccccgacaacggggccguggccguccugaaguacaacggcaucaucaccgacaccaucaagagcuggcgcaacaacauccugcggacgcaggaguccgagugcgcgugcgugaacgggagcugcuucaccgugaugaccgacggcccguccaacggccaggccagcuacaagaucuuccgcaucgagaaggggaagaucgucaaguccguggagaugaacgcccccaacuaccacuacgaggagugcagcugcuaccccgacuccagcgagaucacgugcgugugccgggacaacuggcacggcuccaaccgccccugggucagcuucaaccagaaccucgaguaccagaucggguacaucugccggggcaucuucggggacaacccgcgccccaacgacaagaccggcuccugcggccccgugagcuccaacggggccaacggcgugaagggguucagcuucaaguacggcaacggggucuggaucggccggaccaaguccaucagcagccgcaacggcuucgagaugaucugggaccccaacggguggaccggcaccgacaacaacuucuccaucaagcaggacaucguggggaucaacgaguggagcggcuacuccgggagcuucgugcagcacccggagcugacgggccuggacugcauccggcccugcuucugggucgagcucauccgcggccggcccaaggagaacaccaucuggaccuccgggagcuccaucagcuucugcggcgugaacuccgacaccgucggguggagcuggcccgacggcgccgagcugccguucacgaucgacaaguga

SEQ ID NO: 80799 - RNA, 1410 nt, Artificial Sequence; identical to SEQ ID NO: 80752
  derived and/or modified CDS sequence (opt1) from neuraminidase__InfluenzaA__ACQ89918

SEQ ID NO: 80800 - RNA, 1410 nt, Artificial Sequence
  derived and/or modified CDS sequence (opt1) from neuraminidase__InfluenzaA__ACQ89919
augaaccccaaccagaagaucaucaccaucggcagcgugugcaugaccaucgggauggccaaccugauccuccagaucggcaacaucaucuccaucuggaucagccgcuccauccagcuggggaaccagaaccagaucgagacgugcaaccagagcgucaucaccuacgagaacaacaccugggugaaccagaccuacgugaacaucuccaacacgaacuucgccgcgggccagagcgucguguccgugaagcuggccgggaacagcucccucugcccggucagcggcugggccaucuacuccaaggacaacagcgugcggaucggcuccaagggggacguguucgucauccgcgagcccuucaucagcugcagcccccuggagugccggaccuucuuccugacccagggcgcccuccugaacgacaagcacuccaacgggaccaucaaggaccgcucccccuaccggacgcugaugagcugcccgaucggcgaggugcccucccccuacaacagccgcuucgagagcguggccugguccgcgagcgccugccacgacgggaucaacuggcucaccaucggcaucuccggccccgacaacggggccgucgccgugcugaaguacaacggcaucaucaccgacaccaucaagagcuggcggaacaacauccugcgcacgcaggaguccgagugcgcgugcgugaacgggagcugcuucaccgucaugaccgacggcccguccaacggccaggccagcuacaagaucuuccggaucgagaaggggaagaucgugaaguccguggagaugaacgcccccaacuaccacuacgaggagugcagcugcuaccccgacuccagcgagaucacgugcgucugccgcgacaacuggcacggcuccaaccggcccugggugagcuucaaccagaaccucgaguaccagaucggguacaucugcuccggcaucuucggggacaacccgcgccccaacgacaagaccggcagcugcggccccguguccagcaacggggccaacggcgucaagggguucuccuucaaguacggcaacgggguguggaucggccggaccaagagcaucagcucccgcaacggcuucgagaugaucugggaccccaacggguggaccggcaccgacaacaacuucagcaucaagcaggacaucguggggaucaacgagugguccggcuacagcggguccuucguccagcacccggagcugacgggccuggacugcauccggcccugcuucuggguggagcucauccgcggccggcccaaggagaacaccaucuggaccagcggguccagcaucuccuucugcggcgucaacagcgacaccguggggugguccuggcccgacggcgccgagcugccguucacgaucgacaaguga

SEQ ID NO: 80801 - RNA, 1410 nt, Artificial Sequence; identical to SEQ ID NO: 80762
  derived and/or modified CDS sequence (opt1) from neuraminidase__InfluenzaA__ACQ89920

SEQ ID NO: 80802 - RNA, 1410 nt, Artificial Sequence; identical to SEQ ID NO: 80762
  derived and/or modified CDS sequence (opt1) from neuraminidase__InfluenzaA__ACQ89921

SEQ ID NO: 80803 - RNA, 1410 nt, Artificial Sequence; identical to SEQ ID NO: 80752
  derived and/or modified CDS sequence (opt1) from neuraminidase__InfluenzaA__ACQ89922

SEQ ID NO: 80804 - RNA, 1410 nt, Artificial Sequence; identical to SEQ ID NO: 80762
  derived and/or modified CDS sequence (opt1) from neuraminidase__InfluenzaA__ACQ89923

SEQ ID NO: 80805 - RNA, 1410 nt, Artificial Sequence; identical to SEQ ID NO: 80752
  derived and/or modified CDS sequence (opt1) from neuraminidase__InfluenzaA__ACQ99623

SEQ ID NO: 80806 - RNA, 1410 nt, Artificial Sequence; identical to SEQ ID NO: 80762
  derived and/or modified CDS sequence (opt1) from neuraminidase__InfluenzaA__ACQ99624

SEQ ID NO: 80807 - RNA, 1410 nt, Artificial Sequence; identical to SEQ ID NO: 80752
  derived and/or modified CDS sequence (opt1) from neuraminidase__InfluenzaA__ACQ99626

SEQ ID NO: 80808 - RNA, 1410 nt, Artificial Sequence; identical to SEQ ID NO: 80752
  derived and/or modified CDS sequence (opt1) from neuraminidase__InfluenzaA__ACQ99627

SEQ ID NO: 80809 - RNA, 1410 nt, Artificial Sequence; identical to SEQ ID NO: 80752
  derived and/or modified CDS sequence (opt1) from neuraminidase__InfluenzaA__ACQ99628

SEQ ID NO: 80810 - RNA, 1410 nt, Artificial Sequence; identical to SEQ ID NO: 80752
  derived and/or modified CDS sequence (opt1) from neuraminidase__InfluenzaA__ACQ99629

SEQ ID NO: 80811 - RNA, 1410 nt, Artificial Sequence; identical to SEQ ID NO: 80752
  derived and/or modified CDS sequence (opt1) from neuraminidase__InfluenzaA__ACQ99630

SEQ ID NO: 80812 - RNA, 1410 nt, Artificial Sequence; identical to SEQ ID NO: 80762
  derived and/or modified CDS sequence (opt1) from neuraminidase__InfluenzaA__ACQ99632

SEQ ID NO: 80813 - RNA, 1410 nt, Artificial Sequence; identical to SEQ ID NO: 80762
  derived and/or modified CDS sequence (opt1) from neuraminidase__InfluenzaA__ACQ99633

SEQ ID NO: 80814 - RNA, 1410 nt, Artificial Sequence; identical to SEQ ID NO: 80752
  derived and/or modified CDS sequence (opt1) from neuraminidase__InfluenzaA__ACQ99635

SEQ ID NO: 80815 - RNA, 1410 nt, Artificial Sequence; identical to SEQ ID NO: 80752
  derived and/or modified CDS sequence (opt1) from neuraminidase__InfluenzaA__ACQ99636

SEQ ID NO: 80816 - RNA, 1410 nt, Artificial Sequence
  derived and/or modified CDS sequence (opt1) from neuraminidase__InfluenzaA__ACQ99684
augaaccccaaccagaagaucaucaccaucggcagcgugugcaugaccaucgggauggccaaccugauccuccagaucggcaacaucaucuccaucuggaucagccacuccauccagcuggggaaccagaaccagaucgagacgugcaaccagagcgucaucaccuacgagaacaacaccugggugaaccagaccuacgugaacaucuccaacacgaacuucgccgcgggccagagcgucguguccgugaagcuggccgggaacagcucccucugcccggucagcggcugggccaucuacuccaaggacaacagcauccgcaucggcuccaagggggacguguucgugauccgggagcccuucaucagcugcagcccccuggagugccgcaccuucuuccugacccagggcgcccuccugaacgacaagcacuccaacgggaccaucaaggaccggucccccuaccgcacgcugaugagcugcccgaucggcgagguccccucccccuacaacagccgguucgagagcguggccugguccgcgagcgccugccacgacgggaucaacuggcucaccaucggcaucuccggccccgacaacggggccguggccguccugaaguacaacggcaucaucaccgacaccaucaagagcuggcgcaacaacauccugcggacgcaggaguccgagugcgcgugcgugaacgggagcugcuucaccgugaugaccgacggcccguccgacgagcaggccagcuacaagaucuuccgcaucgagaagggcaagaucgucaaguccguggagaugaacgcccccaacuaccacuacgaggagugcagcugcuaccccgacuccagcgagaucacgugcgugugccgggacaacuggcacggguccaaccgccccugggucagcuucaaccagaaccucgaguaccagaucggcuacaucugcuccgggaucuucggcgacaacccgcggcccaacgacaagaccgggagcugcggccccguguccagcaacggcgccaacggggugaagggcuucuccuucaaguacgggaacggcgucuggaucgggcgcaccaagagcaucagcucccggaacggcuucgagaugaucugggaccccaacggcuggaccgggaccgacaacaacuucagcaucaagcaggacaucgugggcaucaacgagugguccggguacagcggcuccuucgugcagcacccggagcugacggggcuggacugcauccgccccugcuucugggucgagcucauccggggccgccccaaggagaacaccaucuggaccagcggcuccagcaucuccuucugcggggugaacagcgacaccgucggcugguccuggcccgacggggccgagcugccguucacgaucgacaaguga

SEQ ID NO: 80817 - RNA, 1410 nt, Artificial Sequence
  derived and/or modified CDS sequence (opt1) from neuraminidase__InfluenzaA__ACQ99824
augaacaccaaccagcgcaucaucaccaucggcacgaucugccugaucguggggaucaucagccuccugcugcagaucggcaacaucauccuccuguggaugucccacagcauccagaccggggagaagucccaccccaaggucugcaaccagagcgugaucaccuacgagaacaacaccugggugaaccagacguacgucaacaucuccaacaccaacaucgccgccggccagggggugaccccgaucauccuggcgggcaacagcucccucugccccaucagcggcugggccaucuacuccaaggacaacagcauccggaucggguccaagggcgacaucuucgugaugcgcgagcccuucaucagcugcucccaccuggagugccggaccuucuuccugacgcagggggcccuccugaacgaccgccacagcaacggcaccgucaaggaccggucccccuaccgcacccugaugagcugcccgaucggggaggcccccucccccuacaacagccgguucgaguccguggccuggagcgcgagcgccugccacgacggcaugggcuggcucaccaucgggaucuccggccccgacaacggggccguggccguccugaaguacaacggcaucaucacggacaccaucaagagcuggcgcaacaagauccugcggacccaggaguccgagugcgugugcaucaacggcagcugcuucaccaucaugacggacgggccguccaacggccaggcgagcuacaagcuguucaagauggagaaggggaagaucaucaaguccaucgagcucgacgcccccaacuaccacuacgaggagugcagcugcuaccccgacaccggcaagguggucugcgugugccgcgacaacuggcacgccuccaaccggcccugggugagcuucgaccagaaccuggacuaccagaucggguacaucugcuccggcgucuucggcgacaacccgcgcagcaacgacgggaagggcaacugcgggcccgugcucuccaacggcgccaacggggugaagggcuucagcuuccgguacggcaacggggucuggaucggccgcaccaaguccaucagcucccggagcggguucgagaugaucugggaccccaacggcuggaccgagacggacuccagcuucagcaugaagcaggacaucaucgcccugaccgacugguccggguacagcggcuccuucgugcagcaccccgagcugaccggcaugaacugcauccgcccgugcuucuggguggagcucauccgggggcagcccaaggagagcaccaucuggacguccggcagcuccaucagcuucugcggggucaacuccggcaccgcgagcugguccuggcccgacggcgccgaccugcccuucaccaucgacaaguga

SEQ ID NO: 80818 - RNA, 1410 nt, Artificial Sequence; identical to SEQ ID NO: 80762
  derived and/or modified CDS sequence (opt1) from neuraminidase__InfluenzaA__ACR01015

SEQ ID NO: 80819 - RNA, 1410 nt, Artificial Sequence; identical to SEQ ID NO: 80762
  derived and/or modified CDS sequence (opt1) from neuraminidase__InfluenzaA__ACR08422

SEQ ID NO: 80820 - RNA, 1410 nt, Artificial Sequence; identical to SEQ ID NO: 80762
  derived and/or modified CDS sequence (opt1) from neuraminidase__InfluenzaA__ACR08432

SEQ ID NO: 80821 - RNA, 1410 nt, Artificial Sequence; identical to SEQ ID NO: 80762
  derived and/or modified CDS sequence (opt1) from neuraminidase__InfluenzaA__ACR08442

SEQ ID NO: 80822 - RNA, 1410 nt, Artificial Sequence; identical to SEQ ID NO: 80762
  derived and/or modified CDS sequence (opt1) from neuraminidase__InfluenzaA__ACR08452

SEQ ID NO: 80823 - RNA, 1410 nt, Artificial Sequence
  derived and/or modified CDS sequence (opt1) from neuraminidase__InfluenzaA__ACR08462
augagccccaaccagaagaucaucaccaucggcuccgugugcaugaccaucgggauggccaaccugauccuccagaucggcaacaucaucagcaucuggaucucccacagcauccagcuggggaaccagaaccagaucgagacgugcaaccaguccgucaucaccuacgagaacaacaccugggugaaccagaccuacgugaacaucagcaacacgaacuucgccgcgggccaguccgucgugagcgugaagcuggccgggaacuccagccucugcccggucuccggcugggccaucuacagcaaggacaacuccgugcgcaucggcagcaagggggacguguucgucauccgggagcccuucaucuccugcagcccccuggagugccgcaccuucuuccugacccagggcgcccuccugaacgacaagcacuccaacgggaccaucaaggaccggagccccuaccgcacgcugauguccugcccgaucggcgaggugcccagccccuacaacagccgguucgaguccguggccuggagcgcguccgccugccacgacgggaucaacuggcucaccaucggcaucagcggccccgacaacggggccgucgccgugcugaaguacaacggcaucaucaccgacaccaucaaguccuggcgcaacaacauccugcggacgcaggagagcgagugcgcgugcgugaacggguccugcuucaccgucaugaccgacggcccgagcaacggccaggccuccuacaagaucuuccgcaucgagaaggggaagaucgucaagagcguggagaugaacgcccccaacuaccacuacgaggagugcuccugcuaccccgacagcuccgagaucacgugcgugugccgggacaacuggcacggcagcaaccgccccuggguguccuucaaccagaaccucgaguaccagaucggguacaucugcagcggcaucuucggggacaacccgcggcccaacgacaagaccggcuccugcggccccgugagcuccaacggggccaacggcgucaagggguucagcuucaaguacggcaacgggguguggaucggccgcaccaagagcaucuccagccggaacggcuucgagaugaucugggaccccaacggguggaccggcaccgacaacaacuucuccaucaagcaggacaucguggggaucaacgaguggagcggcuacuccgggagcuucguccagcacccggagcugacgggccuggacugcauccgccccugcuucuggguggagcucauccggggccgccccaaggagaacaccaucuggaccuccgggagcuccaucagcuucugcggcgucaacuccgacaccgugggguggagcuggcccgacggcgccgagcugccguucacgaucgacaaguga

SEQ ID NO: 80824 - RNA, 1410 nt, Artificial Sequence
  derived and/or modified CDS sequence (opt1) from neuraminidase__InfluenzaA__ACR08565
augaaccccaaccagaagaucaucaccaucggcagcgugugcaugaccaucgggauggccaaccugauccuccagaucggcaacaucaucuccaucuggaucagccacuccauccagcuggggaaccagaaccagaucgagacgugcaaccagagcgucaucaccuacgagaacaacaccugggugaaccagaccuacgugaacaucuccaacacgaacuucgccgcgggccagagcgucgugccggugaagcuggccgggaacuccagccucugccccgucuccggcugggccaucuacagcaaggacaacuccgugcgcaucggcagcaagggggacguguucgucauccgggagcccuucaucuccugcagcccccuggagugccgcaccuucuuccugacccagggcgcccuccugaacgacaagcacuccaacgggaccaucaaggaccggagcccguaccgcacgcugauguccugccccaucggcgaggugcccagccccuacaacucccgguucgagagcguggccuggagcgcguccgccugccacgacgggaucaacuggcucaccaucggcaucagcggcccggacaacggggccgucgccgugcugaaguacaacggcaucaucaccgacaccaucaaguccuggcgcaacaacauccugcggacgcaggagagcgagugcgcgugcgugaacggguccugcuucaccgucaugaccgacggccccagcaacggccaggccuccuacaagaucuuccgcaucgagaaggggaagaucgucaagagcguggagaugaacgcccccaacuaccacuacgaggagugcuccugcuaccccgacagcuccgagaucacgugcgugugccgggacaacuggcacggcagcaaccgcccguggguguccuucaaccagaaccucgaguaccagaucggguacaucugcagcggcaucuucggggacaacccccggcccaacgacaagaccggcuccugcggccccgugagcuccaacggggccaacggcgucaagggguucagcuucaaguacggcaacgggguguggaucggccgcaccaaguccaucagcagccggaacggcuucgagaugaucugggacccgaacggguggaccggcaccgacaacaacuucuccaucaagcaggacaucguggggaucaacgaguggagcggcuacuccgggagcuucguccagcaccccgagcugacgggccuggacugcauccgccccugcuucuggguggagcucauccggggccgccccaaggagaacaccaucuggaccuccgggagcuccaucagcuucugcggcgucaacuccgacaccgugggguggagcuggccggacggcgccgagcugcccuucacgaucgacaaguga

SEQ ID NO: 80825 - RNA, 1410 nt, Artificial Sequence; identical to SEQ ID NO: 80752
  derived and/or modified CDS sequence (opt1) from neuraminidase__InfluenzaA__ACR08566

SEQ ID NO: 80826 - RNA, 1410 nt, Artificial Sequence; identical to SEQ ID NO: 80762
  derived and/or modified CDS sequence (opt1) from neuraminidase__InfluenzaA__ACR08567

SEQ ID NO: 80827 - RNA, 1410 nt, Artificial Sequence; identical to SEQ ID NO: 80752
  derived and/or modified CDS sequence (opt1) from neuraminidase__InfluenzaA__ACR08568

SEQ ID NO: 80828 - RNA, 1410 nt, Artificial Sequence; identical to SEQ ID NO: 80752
  derived and/or modified CDS sequence (opt1) from neuraminidase__InfluenzaA__ACR08569

SEQ ID NO: 80829 - RNA, 1410 nt, Artificial Sequence; identical to SEQ ID NO: 80762
  derived and/or modified CDS sequence (opt1) from neuraminidase__InfluenzaA__ACR08570

SEQ ID NO: 80830 - RNA, 1410 nt, Artificial Sequence; identical to SEQ ID NO: 80752
  derived and/or modified CDS sequence (opt1) from neuraminidase__InfluenzaA__ACR08571

SEQ ID NO: 80831 - RNA, 1410 nt, Artificial Sequence; identical to SEQ ID NO: 80752
  derived and/or modified CDS sequence (opt1) from neuraminidase__InfluenzaA__ACR08572

SEQ ID NO: 80832 - RNA, 1410 nt, Artificial Sequence; identical to SEQ ID NO: 80752
  derived and/or modified CDS sequence (opt1) from neuraminidase__InfluenzaA__ACR08573

SEQ ID NO: 80833 - RNA, 1410 nt, Artificial Sequence; identical to SEQ ID NO: 80752
  derived and/or modified CDS sequence (opt1) from neuraminidase__InfluenzaA__ACR08574

SEQ ID NO: 80834 - RNA, 1410 nt, Artificial Sequence; identical to SEQ ID NO: 80762
  derived and/or modified CDS sequence (opt1) from neuraminidase__InfluenzaA__ACR08576

SEQ ID NO: 80835 - RNA, 1410 nt, Artificial Sequence; identical to SEQ ID NO: 80752
  derived and/or modified CDS sequence (opt1) from neuraminidase__InfluenzaA__ACR08577

SEQ ID NO: 80836 - RNA, 1410 nt, Artificial Sequence; identical to SEQ ID NO: 80752
  derived and/or modified CDS sequence (opt1) from neuraminidase__InfluenzaA__ACR09378

SEQ ID NO: 80837 - RNA, 1410 nt, Artificial Sequence; identical to SEQ ID NO: 80752
  derived and/or modified CDS sequence (opt1) from neuraminidase__InfluenzaA__ACR09379

SEQ ID NO: 80838 - RNA, 1410 nt, Artificial Sequence; identical to SEQ ID NO: 80762
  derived and/or modified CDS sequence (opt1) from neuraminidase__InfluenzaA__ACR09380

SEQ ID NO: 80839 - RNA, 1410 nt, Artificial Sequence; identical to SEQ ID NO: 80752
  derived and/or modified CDS sequence (opt1) from neuraminidase__InfluenzaA__ACR09381

SEQ ID NO: 80840 - RNA, 1410 nt, Artificial Sequence; identical to SEQ ID NO: 80752
  derived and/or modified CDS sequence (opt1) from neuraminidase__InfluenzaA__ACR09382

SEQ ID NO: 80841 - RNA, 1410 nt, Artificial Sequence; identical to SEQ ID NO: 80762
  derived and/or modified CDS sequence (opt1) from neuraminidase__InfluenzaA__ACR09383

SEQ ID NO: 80842 - RNA, 1410 nt, Artificial Sequence; identical to SEQ ID NO: 80752
  derived and/or modified CDS sequence (opt1) from neuraminidase__InfluenzaA__ACR09384

SEQ ID NO: 80843 - RNA, 1410 nt, Artificial Sequence; identical to SEQ ID NO: 80762
  derived and/or modified CDS sequence (opt1) from neuraminidase__InfluenzaA__ACR09385

SEQ ID NO: 80844 - RNA, 1410 nt, Artificial Sequence; identical to SEQ ID NO: 80752
  derived and/or modified CDS sequence (opt1) from neuraminidase__InfluenzaA__ACR09386

SEQ ID NO: 80845 - RNA, 1410 nt, Artificial Sequence; identical to SEQ ID NO: 80762
  derived and/or modified CDS sequence (opt1) from neuraminidase__InfluenzaA__ACR10189

SEQ ID NO: 80846 - RNA, 1410 nt, Artificial Sequence; identical to SEQ ID NO: 80762
  derived and/or modified CDS sequence (opt1) from neuraminidase__InfluenzaA__ACR10226

SEQ ID NO: 80847 - RNA, 1410 nt, Artificial Sequence; identical to SEQ ID NO: 80752
  derived and/or modified CDS sequence (opt1) from neuraminidase__InfluenzaA__ACR10236

SEQ ID NO: 80848 - RNA, 1410 nt, Artificial Sequence; identical to SEQ ID NO: 80752
  derived and/or modified CDS sequence (opt1) from neuraminidase__InfluenzaA__ACR10237

SEQ ID NO: 80849 - RNA, 1410 nt, Artificial Sequence
  derived and/or modified CDS sequence (opt1) from neuraminidase__InfluenzaA__ACR15186
augaaccccaaccagaagaucaucaccaucggcagcgugucccugaccaucagcacgaucugcuucuucaugcagaucgccauccucaucaccaccgucacccugcacuucaagcaguacgaguucaacuccccgcccaacaaccaggugaugcugugcgagcccacgaucaucgagcgcaacaucaccgagaucguguaccucaccaacaccacgaucgagaaggagaucugccccaagcuggccgaguaccggaaguggagcaagccgcagugcaacaucaccggguucgcgcccuucuccaaggacaacagcauccgccuguccgccggcggggacaucugggucacccgggagcccuacgugagcugcgaccccgacaagugcuaccaguucgcccucggccaggggaccacgcugaacaacgugcacuccaacgacaccguccgcgaccggaccccguaccgcacccugcucaugaacgagcugggcgugcccuuccaccugggcacgaagcaggucugcaucgccuggagcuccagcuccugccacgacgggaaggccuggcuccacgugugcgugaccggcgacgacaagaacgcgaccgccagcuucaucuacaacgggcggcugguggacuccaucgucagcugguccaaggagauccugcgcacccaggagagcgagugcgugugcaucaacggcacgugcaccguggucaugaccgacggguccgccagcggcaaggccgacaccaagauccucuucaucgaggagggcaagaucgugcacacgagcacccuguccgggagcgcgcagcacguggaggagugcuccugcuacccccggcaccccggcguccgcugcgugugccgggacaacuggcgcgggagcaaccggccgaucguggacaucaacaugaaggacuacuccaucgucagcuccuacgugugcagcggccuggugggcgacacgccccgcaagaacgacuccagcuccagcgggcacugccucgaccccaacaacgaggagggcgggcacggcgucaaggggugggccuucgacgacggcaacgacguguggaugggccggaccaucuccgagaagcugcgcagcggguacgagaccuucaaggucaucgagggcugguccaaccccaacagcaagcugcagaucaaccgccaggugaucguggaccgggggaaccgguccggcuacagcgggaucuucuccgucgagggcaagagcugcaucaaccgcugcuucuacguggagcucauccggggccgcaaggaggagaccgaggugcuguggaccagcaacuccaucgucguguucugcgggaccagcggcacguacgggaccggcuccuggccggacggggccgacaucaaccugaugcccaucuga

SEQ ID NO: 80850 - RNA, 1413 nt, Artificial Sequence; identical to SEQ ID NO: 80656
  derived and/or modified CDS sequence (opt1) from neuraminidase__InfluenzaA__ACR15197

SEQ ID NO: 80851 - RNA, 1410 nt, Artificial Sequence
  derived and/or modified CDS sequence (opt1) from neuraminidase__InfluenzaA__ACR15208
augaaccccaaccagaagaucaucaccaucggcagcgugucccugaccaucagcacgaucugcuucuucaugcagaucgccauccucaucaccaccgucacccugcacuucaagcaguacgaguucaacuccccgcccaacaaccaggugaugcugugcgagcccacgaucaucgagcgcaacaucaccgagaucguguaccucaccaacaccacgaucgagaaggagaucugccccaagcuggccgaguaccggaacuggagcaagccgcagugcgacaucaccggguucgcgcccuucuccaaggacaacagcauccgccuguccgccggcggggacaucugggucacccgggagcccuacgugagcugcgaccccgacaagugcuaccaguucgcccucggccaggggaccacgcugaacaacgugcacuccaacgacaccguccgcgaccggaccccguaccgcacccugcucaugaacgagcugggcgugcccuuccaccugggcacgaagcaggucugcaucgccuggagcuccagcuccugccacgacgggaaggccuggcuccacgugugcaucaccggcgacgacaagaacgcgaccgccagcuucaucuacaacgggcggcugguggacuccaucgugagcugguccaaggagauccugcgcacccaggagagcgagugcgucugcaucaacggcacgugcaccguggugaugaccgacggguccgccagcggcaaggccgacaccaagauccucuucaucgaggagggcaagaucguccacacgagcacccuguccgggagcgcgcagcacguggaggagugcuccugcuacccccgguaccccggcgugcgcugcgucugccgggacaacuggaaggggagcaaccgcccgaucguggacaucaacaucaaggaccacuccaucgugagcuccuacgucugcagcggccuggugggcgacacgccccggaagaacgacuccagcuccagcucccacugccucgaccccaacaacgaggagggcgggcacggggugaagggcugggccuucgacgacgggaacgacgucuggaugggccgcaccaucagcgagaagucccggcugggcuacgagaccuucaaggugaucgagggguggagcaaccccaaguccaagcugcagaucaaccgccaggucaucguggacaagggcaaccggagcggguacuccggcaucuucagcguggagggcaagagcugcaucaaccgcugcuucuacgucgagcucauccgggggcgcaaggaggagaccgaggugcuguggaccuccaacagcaucguggucuucugcggcaccuccgggacguacggcaccgggagcuggccggacggcgccgacaucaaccugaugcccaucuga

SEQ ID NO: 80852 - RNA, 1410 nt, Artificial Sequence
  derived and/or modified CDS sequence (opt1) from neuraminidase__InfluenzaA__ACR15230
auggaccccaaccagaagaucaucaccaucggcagcgugucccugaccaucagcgccaucugcuucuucaugcagaucgccauccucaucacgaccgucacccugcacuucaagcaguacgaguucaacuccccgcccaacaaccaggugaugcugugcgagcccaccaucaucgagcgcaacaucacggagaucguguaccucaccaacaccaccaucgagaaggagaucugccccaagcuggcggaguaccggaacuggagcaagccgcagugcaacaucacgggguucgcccccuucuccaaggacaacagcauccgccuguccgccggcggggacaucugggucacccgggagcccuacgugagcugcgaccccgacaagugcuaccaguucgcccucggccaggggaccacccugaacaacgugcacuccaacgacacgguccacgaccgcaccccguaccggacccugcucaugaacgagcugggcgugcccuuccaccugggcaccaagcaggucugcaucgccuggagcuccagcuccugccacgacgggaaggcguggcuccacgugugcgugacgggcgacgacgagaacgccaccgccagcuucaucuacaacgggcgccugguggacuccgucgugagcugguccaagaagauccugcggacccaggagagcgagugcgugugcaucaacgggaccugcacggucgugaugaccgacggguccgccagcggcaaggcggacaccaagauccucuucaucgaggagggcaagaucgugcacaccagcacgcuguccgggagcgcccagcacgucgaggagugcuccugcuacccccgcuaccccggcgugcggugcgugugccgcgacaacuggaaggggagcaaccggccgaucgucgacaucaacaucaaggacuacuccaucgugagcuccuacgugugcagcggccuggucggcgacacgccccgcaagaacgacuccagcuccaacagccacugccucgaccccaacaacgaggagggcggccacggggugaagggcugggccuucgacgacgggaacgacgucuggaugggccggaccaucuccgagaagcugcgcagcggcuacgagaccuucaaggugaucgaggggugguccaaccccaacagcaagcugcagaucaaccgccaggugaucgucgaccggggcaaccgguccggguacagcggcaucuucuccguggagggcaagagcugcaucaaccgcugcuucuacguggagcucauccgggggcgcaaccaggagaccgagguccuguggaccagcaacuccaucgugguguucugcggcaccagcgggaccuacggcacgggguccuggccggacggcgccgacaucaaccugaugcccaucuga

SEQ ID NO: 80853 - RNA, 1413 nt, Artificial Sequence; identical to SEQ ID NO: 80656
  derived and/or modified CDS sequence (opt1) from neuraminidase__InfluenzaA__ACR15241

SEQ ID NO: 80854 - RNA, 1410 nt, Artificial Sequence; identical to SEQ ID NO: 79908
  derived and/or modified CDS sequence (opt1) from neuraminidase__InfluenzaA__ACR15252

SEQ ID NO: 80855 - RNA, 1413 nt, Artificial Sequence
  derived and/or modified CDS sequence (opt1) from neuraminidase__InfluenzaA__ACR15263
augaaccccaaccagaagaucaucaccaucggcagcaucuccaucgccaucgggaucaucagccugaugcuccagaucggcaacaucaucuccaucugggccagccacuccauccagaccgggagccagaacaacacgggcaucugcaaccagcgcaucaucaccuacgagaacuccaccugggugaaccacaccuacgucaacaucaacaacacgaacgugguggcgggggaggacaagaccagcgucacccuggccggcaacuccagccugugcuccaucagcggcugggccaucuacaccaaggacaacuccauccggaucgggagcaagggcgacguguucgugauccgcgagccguucaucuccugcagccaccucgagugccggacguucuuccugacccagggggcccugcucaacgacaagcacuccaacggcaccgucaaggaccgcagccccuaccgggcccugauguccugcccccugggggaggcgcccagcccguacaacagcaaguucgaguccguggccuggagcgccuccgccugccacgacggcaugggcuggcucaccaucgggaucagcggccccgacaacggggcgguggccguccugaaguacaacggcaucaucacgggcaccaucaaguccuggaagaagcagauccugcgcacccaggagagcgagugcgugugcaugaacggguccugcuucaccaucaugacggacggccccagcaacaaggccgccuccuacaagaucuucaagaucgagaaggggaaggugaccaagagcaucgagcucaacgcccccaacuuccacuacgaggagugcuccugcuacccggacaccggcaucgucaugugcgugugccgggacaacuggcacgggagcaaccgccccuggguguccuucaaccagaaccuggacuaccagaucggcuacaucugcagcggcgucuucggggacaacccccggcccgaggacggcgagggguccugcaacccggugaccguggacggcgcgaacggggucaagggcuucagcuacaaguacgacaacggcguguggaucgggcgcacgaaguccaaccggcugcgcaagggcuucgagaugaucugggaccccaacggguggaccaacaccgacagcgacuucuccgugaagcaggacgucguggccaucaccgacuggagcggcuacagcggguccuucgugcagcaccccgagcucacgggccuggacugcauccggcccugcuucugggucgagcuggugcgcggccucccgcgggagaacaccaccaucuggagcuccgggagcuccaucagcuucugcggcgucaacuccgacaccgccaacuggagcuggcccgacggggccgagcugcccuucacgaucgacaaguga

SEQ ID NO: 80856 - RNA, 1413 nt, Artificial Sequence; identical to SEQ ID NO: 80656
  derived and/or modified CDS sequence (opt1) from neuraminidase__InfluenzaA__ACR15274

SEQ ID NO: 80857 - RNA, 1413 nt, Artificial Sequence
  derived and/or modified CDS sequence (opt1) from neuraminidase__InfluenzaA__ACR15307
augaaccccaaccagaagaucaucaccaucggcagcaucuccaucaccaucgggaucaucagccugaugcuccagaucggcaacaucaucuccaucugggccagccacuccauccagacggggagccagaaccacaccggcaucugcaaccagcgcaucaucaccuacgagaacaacaccugggugaaccacacguacgucaacaucaacaacaccaacgugguggccgggaaggacaagaccuccgucacccuggcgggcaacagcucccugugcagcaucuccggcugggccaucuacacgaaggacaacagcauccggaucggguccaagggcgacguguucgugauccgcgagccguucaucagcugcucccaccucgagugccggaccuucuuccugacccagggggcccugcucaacgacaagcacagcaacggcaccgucaaggaccgcucccccuaccgggcccugaugagcugcccccugggggaggcccccuccccguacaacagcaaguucgagagcguggcgugguccgccagcgccugccacgacggcaugggcuggcucacgaucgggaucuccggccccgacaacggggccguggcgguccugaaguacaacggcaucaucaccgagaccaucaagagcuggaagaagcgcauccugcggacccaggaguccgagugcgugugcgugaacggcagcugcuucacgaucaugaccgacgggcccuccaacggcgccgccagcuacaagaucuucaagaucgagaaggggaaggucaccaaguccaucgagcucaacgcccccaacuuccacuacgaggagugcagcugcuacccggacaccggcacggugaugugcgugugccgcgacaacuggcacggguccaaccggcccugggucagcuucaaccagaaccuggacuaccagaucggcuacaucugcuccggcguguucggggacaacccccgccccaaggacggcgaggggagcugcaacccggugaccgucgacggcgccgacggggugaagggcuucuccuacaaguacggcaacgggguguggaucggccggaccaagagcaaccgccugcggaagggguucgagaugaucugggaccccaacggcuggaccgacacggacuccgacuucagcgucaagcaggacgugguggcgaucaccgacugguccggguacagcggcagcuucguccagcaccccgagcucaccggccuggacugcauccgccccugcuucuggguggagcugguccgggggcucccgcgcgagaacaccacgaucuggaccuccggcagcuccaucagcuucugcggggugaacuccgacaccgccaacuggagcuggcccgacggcgccgagcugcccuucaccaucgacaaguga

SEQ ID NO: 80858 - RNA, 1413 nt, Artificial Sequence
  derived and/or modified CDS sequence (opt1) from neuraminidase__InfluenzaA__ACR15318
augaaccccaaccagaagaucaucaccaucggcagcaucuccaucgccaucgggaucaucagccugaugcuccagaucggcaacaucaucuccaucugggccagccacuccauccagaccgggagccagaaccacacgggcgugugcaaccagcgcaucaucaccuacgagaacuccaccugggucaaccacaccuacgugaacaucaacaacacgaacgugaucgcggggaaggacaagaccagcgucacccuggccggcaacuccagccugugcuccaucagcggcugggccaucuacaccaaggacaacuccauccggaucgggagcaagggcgacguguucgugauccgcgagccguucaucuccugcagccaccucgagugccggacguucuuccugacccagggggcccugcucaacgacaagcacuccaacggcaccgucaaggaccgcagccccuaccgggcccugauguccugcccccugggggaggcgcccagcccguacaacagcaaguucgaguccguggccuggagcgccuccgccugccacgacggcaugggcuggcucaccaucgggaucagcggccccgacaacggggcgguggccguccugaaguacaacggcaucaucacggagaccaucaaguccuggaagcgccagauccugcggacccaggagagcgagugcgugugcgugaacggcuccugcuucaccaucaugacggacgggcccagcaacggcgccgccuccuacaagaucuucaagaucgagaaggggaaggucaccaagagcaucgagcucaacgcccccaacuuccacuacgaggagugcuccugcuacccggacaccggcaccgugaugugcgugugccgcgacaacuggcacgggagcaaccggcccugggucuccuucaaccagaaccuggacuaccagaucggcuacaucugcagcggcguguucggggacaacccccgccccaaggacggcgagggguccugcaacccggugacggucgacggcgcgaacggggugaagggcuucagcuacaaguacggcaacgggguguggaucggccggaccaaguccaaccgccugcggaagggguucgagaugaucugggaccccaacggcuggaccgacaccgacagcgacuucuccgucaagcaggacgugguggccaucacggacuggagcggguacagcggcuccuucguccagcaccccgagcucaccggccuggacugcauccgccccugcuucuggguggagcugguccgggggcucccgaaggagaacaccaccaucuggacgagcggcuccagcaucuccuucugcggggugaacagcgacaccgccaacugguccuggcccgacggcgccgagcugcccuucaccaucgacaaguga

SEQ ID NO: 80859 - RNA, 1413 nt, Artificial Sequence
  derived and/or modified CDS sequence (opt1) from neuraminidase__InfluenzaA__ACR15329
augaaccccaaccagaagaucaucaccaucggcagcaucuccaucgccaucgggaucaucagccugaugcuccagaucggcaacaucaucuccaucugggccagccacuccauccagacccgcagccagaaccacacgggggugugcaaccagcggaucaucaccuacgagaacuccaccugggucaaccacaccuacgugaacaucaacaacacgaacgugaucgcgggcaaggacaagaccagcgucacccuggccgggaacuccagccugugcuccaucagcggcugggccaucuacaccaaggacaacuccauccgcaucggcagcaagggggacguguucgugauccgggagccguucaucuccugcagccaccucgagugccgcacguucuuccugacccagggcgcccugcucaacgacaagcacuccaacgggaccgucaaggaccggagccccuaccgcgcccugauguccugcccccugggcgaggcgcccagcccguacaacagcaaguucgaguccguggccuggagcgccuccgccugccacgacgggaugggcuggcucaccaucggcaucagcgggcccgacaacggcgcgguggccguccugaaguacaacgggaucaucacggagaccaucaaguccuggaagaagcagauccugcggacccaggagagcgagugcgugugcgugaacggcuccugcuucaccaucaugacggacggccccagcaacggggccgccuccuacaagaucuucaagaucgagaagggcaaggucaccaagagcaucgagcucaacgcccccaacuuccacuacgaggagugcuccugcuacccggacaccgggaccgugaugugcgugugccgcgacaacuggcacggcagcaaccggcccugggucuccuucaaccagaaccuggacuaccagaucggguacaucugcagcggcguguucggcgacaacccccgccccaaggacggggagggcuccugcaacccggugacggucgacggggcgaacggcgugaagggguucagcuacaaguacggcaacggcguguggaucgggcggaccaaguccaaccgccugcggaagggcuucgagaugaucugggaccccaacggguggaccgacaccgacagcgacuucuccgucaagcaggacgugguggccaucacggacuggagcggcuacagcggguccuucguccagcaccccgagcucaccggccuggacugcauccgccccugcuucuggguggagcugguccggggccucccgaaggagaacaccaccaucuggacgagcggguccagcaucuccuucugcggcgugaacagcgacaccgccaacugguccuggcccgacggggccgagcugcccuucaccaucgacaaguga

SEQ ID NO: 80860 - RNA, 1413 nt, Artificial Sequence; identical to SEQ ID NO: 80656
  derived and/or modified CDS sequence (opt1) from neuraminidase__InfluenzaA__ACR15340

SEQ ID NO: 80861 - RNA, 1413 nt, Artificial Sequence; identical to SEQ ID NO: 80656
  derived and/or modified CDS sequence (opt1) from neuraminidase__InfluenzaA__ACR15362

SEQ ID NO: 80862 - RNA, 1413 nt, Artificial Sequence; identical to SEQ ID NO: 80656
  derived and/or modified CDS sequence (opt1) from neuraminidase__InfluenzaA__ACR15373

SEQ ID NO: 80863 - RNA, 1413 nt, Artificial Sequence
  derived and/or modified CDS sequence (opt1) from neuraminidase__InfluenzaA__ACR15428
augaaccccaaccagaagaucaucaccaucggcagcaucuccaucgccaucgggaucaucagccugaugcuccagaucggcaacaucaucuccaucugggccagccacuccauccagaccgggagccagaacaacacgggcaucugcaaccagcgcaucaucaccuacgagaacuccaccugggugaaccacaccuacgucaacaucaacaacacgaacgugguggcgggggaggacaagaccagcgucacccuggccggcaacuccagccugugcuccgugagcggcugggccaucuacaccaaggacaacuccauccggaucgggagcaagggcgacguguucgucauccgcgagccguucaucuccugcagccaccucgagugccggacguucuuccugaccaagggggcccugcucaacgacaagcacuccaacggcaccgugaaggaccgcagccccuaccgggcccugauguccugcccccugggggaggcgcccagcccguacaacagcaaguucgaguccguggccuggagcgccuccgccugccacgacggcaugggcuggcucaccaucgggaucagcggccccgacaacggggcggucgccgugcugaaguacaacggcaucaucacgggcaccaucaaguccuggaagaagcagauccugcgcacccaggagagcgagugcgugugcaugaacggguccugcuucaccaucaugacggacggccccagcaacaaggccgccuccuacaagaucuucaagaucgagaaggggaaggucaccaagagcaucgagcucaacgcccccaacuuccacuacgaggagugcuccugcuacccggacaccggcaucgugaugugcgugugccgggacaacuggcacgggagcaaccgccccugggucuccuucaaccagaaccuggacuaccagaucggcuacaucugcagcggcguguucggggacaacccccggcccgaggacggcgagggguccugcaacccggugaccgucgacggcgcgaacggggugaagggcuucagcuacaaguacgacaacggcguguggaucgggcgcacgaaguccaaccggcugcgcaagggcuucgagaugaucugggaccccaacggguggaccaacaccgacagcgacuucuccgucaagcaggacgugguggccaucaccgacuggagcggcuacagcggguccuucguccagcaccccgagcucacgggccuggacugcauccggcccugcuucuggguggagcugguccgcggccucccgcgggagaacaccaccaucuggaccagcggguccagcaucuccuucugcggcgugaacagcgacacggccaacugguccuggcccgacggggccgagcugcccuucaccaucgacaaguga

SEQ ID NO: 80864 - RNA, 1413 nt, Artificial Sequence
  derived and/or modified CDS sequence (opt1) from neuraminidase__InfluenzaA__ACR15472
augaaccccaaccagaagaucaucaccaucggcagcaucuccaucgccaucgggaucaucagccugaugcuccagaucggcaacaucaucuccaucugggccagccacuccauccagaccgggagccagaacaacacgggcaucugcaaccagcgcaucaucaccuacgagaacuccaccugggugaaccacaccuacgucaacaucaacaacacgaacgugguggcgggggaggacaagaccccggucacccuggccggcaacagcucccugugcagcaucuccggcugggccaucuacaccaaggacaacagcauccggaucggguccaagggcgacguguucgugauccgcgagcccuucaucgccugcagccaccucgagugccggacguucuuccugacccagggggcccugcucaacgacaagcacuccaacggcaccgucaaggaccgcagccccuaccgggcgcugauguccugcccccugggggaggccccgagccccuacaacuccaaguucgagagcguggccuggagcgccuccgcgugccacgacggcaugggcuggcucaccaucgggaucagcggccccgacaacggggccguggccguccugaaguacaacggcaucaucacgggcaccaucaaguccuggaagaagcagauccugcgcacccaggagagcgagugcgugugcaugaacggguccugcuucaccaucaugacggacggccccagcaacaaggccgccuccuacaagaucuucaagaucgagaaggggaaggugaccaagagcaucgagcucaacgcgccgaacuuccacuacgaggagugcuccugcuaccccgacaccggcaucgucaugugcgugugccgggacaacuggcacgggagcaaccgccccuggguguccuucaaccagaaccuggacuaccagaucggcuacaucugcagcggcgucuucggggacaacccccggccggaggacggcgagggguccugcaaccccgugaccguggacggcgccaacggggucaagggcuucagcuacaaguacgacaacggcguguggaucgggcgcacgaaguccaaccggcugcgcaagggcuucgaggugaucugggaccccaacggguggaccaacaccgacagcgacuucuccgucaagcaggacgugguggccaucaccgacuggagcggcuacuccgggagcuucguccagcaccccgagcucacgggccuggacugcauccggccgugcuucuggguggagcugguccgcggccucccccgggagaacaccaccaucuggaccagcggguccagcaucuccuucugcggcgugaacagcgacacggccaacugguccuggcccgacggggccgagcugcccuucaccaucgacaaguga

SEQ ID NO: 80865 - RNA, 1413 nt, Artificial Sequence; identical to SEQ ID NO: 80656
  derived and/or modified CDS sequence (opt1) from neuraminidase__InfluenzaA__ACR15483

SEQ ID NO: 80866 - RNA, 1413 nt, Artificial Sequence; identical to SEQ ID NO: 80656
  derived and/or modified CDS sequence (opt1) from neuraminidase__InfluenzaA__ACR15505

SEQ ID NO: 80867 - RNA, 1413 nt, Artificial Sequence; identical to SEQ ID NO: 80740
  derived and/or modified CDS sequence (opt1) from neuraminidase__InfluenzaA__ACR15516

SEQ ID NO: 80868 - RNA, 1410 nt, Artificial Sequence; identical to SEQ ID NO: 78738
  derived and/or modified CDS sequence (opt1) from neuraminidase__InfluenzaA__ACR15527

SEQ ID NO: 80869 - RNA, 1410 nt, Artificial Sequence
  derived and/or modified CDS sequence (opt1) from neuraminidase__InfluenzaA__ACR15538
augauccccauccagaagaucaucaccaucggcagcgugucccugaccaucagcacgaucugcuucuucaugcagaucgccauccucaucaccaccgucacccugcacuucaagcaguacgaguucaacuccccgcccaacaaccaggugaugcugugcgagcccacgaucaucgagcgcaacaucaccgagaucguguaccucaccaacaccacgaucgagaaggagaucugccccaagcuggccgaguaccggaacuggagcaagccgcagugcgacaucaccggguucgcgcccuucuccaaggacaacagcauccgccuguccgccggcggggacaucugggucacccgggagcccuacgugagcugcgaccccgacaagugcuaccaguucgcccucggccaggggaccacgcugaacaacgugcacuccaacgacaccguccacgaccgcaccccguaccggacccugcucaugaacgagcugggcgugcccuuccaccugggcacgaagcaggucugcaucgccuggagcuccagcuccugccacgacgggaaggccuggcuccacgugugcgugaccggcgacgacaagaacgcgaccgccagcuucaucuacaacgggcgccugguggacuccaucgucagcugguccaaggagauccugcggacccaggagagcgagugcgugugcaucaacggcacgugcaccguggucaugaccgacggguccgccagcggcaaggccgacaccaagauccucuucaucgaggagggcaagaucgugcacacgagcacccuguccgggagcgcgcagcacguggaggagugcuccugcuacccccgcuaccccggcguccggugcgugugccgcgacaacuggaaggggagcaaccggccgaucguggacaucaacaucaaggacuacuccaucgucagcuccuacgugugcagcggccuggugggcgacacgccccgcaagaacgacuccagcuccagcucccacugccucgaccccaacaacgaggagggcgggcacggggucaagggcugggccuucgacgacgggaacgacguguggaugggccggaccaucagcgagaagcugcgcuccggcuacgagaccuucaaggucaucgagggguggagcaaccccaacuccaagcugcagaucaaccgccaggugaucguggaccggggcaaccggagcggguacuccggcaucuucagcgucgagggcaagagcugcaucaaccgcugcuucuacguggagcucauccgggggcgcaaggaggagaccgaggugcuguggaccuccaacagcaucgucguguucugcggcaccuccgggacguacggcaccgggagcuggccggacggcgccgacaucaaccugaugcccaucuga

SEQ ID NO: 80870 - RNA, 1410 nt, Artificial Sequence; identical to SEQ ID NO: 78351
  derived and/or modified CDS sequence (opt1) from neuraminidase__InfluenzaA__ACR15549

SEQ ID NO: 80871 - RNA, 1410 nt, Artificial Sequence; identical to SEQ ID NO: 78736
  derived and/or modified CDS sequence (opt1) from neuraminidase__InfluenzaA__ACR15560

SEQ ID NO: 80872 - RNA, 1410 nt, Artificial Sequence; identical to SEQ ID NO: 78736
  derived and/or modified CDS sequence (opt1) from neuraminidase__InfluenzaA__ACR15582

SEQ ID NO: 80873 - RNA, 1410 nt, Artificial Sequence
  derived and/or modified CDS sequence (opt1) from neuraminidase__InfluenzaA__ACR15593
augaaccccaaccagaagaucaucaccaucggcagcgugucccugaccaucagcacgaucugcuucuucaugcagaucgccauccucaucaccaccgucacccugcacuucaagcaguacgaguucaacuccccgcccaacaaccaggugaugcugugcgagcccacgaucaucgagcgcaacaucaccgagaucguguaccucaccaacaccacgaucgagaaggagaucugccccaagcaggccgaguaccggaacuggagcaagccgcagugcaacaucaccggguucgcgcccuucuccaaggacaacagcauccgccuguccgccggcggggacaucugggucacccgggagcccuacgugagcugcgaccccgacaagugcuaccaguucgcccugggccaggggaccacgcucaacaacgugcacuccaacgacaccguccacgaccgcaccccguaccggacccugcugaugaacgagcucggcgugcccuuccaccugggcacgaagcaggucugcaucgccuggagcuccagcuccugccacgacgggaaggccuggcugcacgugugcgugaccggcgacgacaagaacgcgaccgccagcuucaucuacaacgggcgccucguggacuccaucgucagcugguccaaggagauccugcggacccaggagagcgagugcgugugcaucaacggcacgugcaccguggucaugaccgacggguccgccagcggcaaggccgacaccaagauccuguucaucgaggagggcaagaucgugcacacgagcacccucuccgggagcgcgcagcacguggaggagugcuccugcuacccccgcuaccccggcguccggugcgugugccgcgacaacuggaaggggagcaaccggccgaucguggacaucaacaucaaggacuacuccaucgucagcuccuacgugugcagcggccuggugggcgacacgccccgcaagaacgacuccagcuccagcucccacugccuggaccccaacaacgaggagggcgggcacggggucaagggcugggccuucgacgacgggaacgacguguggaugggccggaccaucagcgagaagcuccgcuccggcuacgagaccuucaaggucaucgagggguggagcaaccccaacuccaagcugcagaucaaccgccaggugaucguggaccggggcaaccggagcggguacuccggcaucuucagcgucgagggcaagagcugcaucaaccgcugcuucuacguggagcugauccgggggcgcaaggaggagaccgaggugcucuggaccuccaacagcaucgucguguucugcggcaccuccgggacguacggcaccgggagcuggccggacggcgccgacaucaaccugaugcccaucuga

SEQ ID NO: 80874 - RNA, 1410 nt, Artificial Sequence
  derived and/or modified CDS sequence (opt1) from neuraminidase__InfluenzaA__ACR15604
augaaccccaaccagaagaucaucaccaucggcagcgugucccugaccaucagcacgaucugcuucuucaugcagaucgccauccucaucaccaccgucacccugcacuucaagcaguacgaguucaacuccccgcccaacaaccaggugaugcugugcgagcccacgaucaucgagcgcaacaucaccgagaucguguaccucaccaacaccacgaucgagaaggagaucugccccaagcuggccgaguaccggaacuggagcaagccgcagugcaacaucaccggguucgcgcccuucuccaaggacaacagcauccgccuguccgccggcggggacaucugggucacccgggagcccuacgugagcugcgaccccgacaagugcuaccaguucgcccucggccaggggaccacgcugaacaacgugcacuccaacgacaccguccacgaccgcaccccguaccggacccugcucaugaacgagcugggcgugcccuuccaccugggcacgaagcaggucugcaucgccuggagcuccagcuccugccacgacgggaaggccuggcuccacgugugcgugaccggcgacgacaagaacgcgaccgccagcuucaucuacaacgggcgccugguggacuccaucgucagcugguccaaggagauccugcggacccaggagagcgagugcgugugcaucaacggcacgugcaccguggucaugaccgacggguccgccagcggcaaggccgacaccaagauccucuucaucgaggagggcaagaucgugcacacgagcacccuguccgggagcgcgcagcacguggaggagugcuccugcuacccccgcuaccccggcguccggugcgugugccgcgacaacuggaaggggagcaaccggccgaucguggacaucaacaucaaggacuacuccaucgucagcuccuacgugugcagcggccuggugggcgacacgccccgcaagaacgacuccagcuccagcucccacugccucgaccccaacaacgaggagggcgggcacggggucaagggcugggccuucgacgacgggaacgacguguggaugggccggaccaucagcgagaagcugcgcuccggcuacgagaccuucaaggucaucgagggguggagcaaccccaacuccaagcugcagaucaaccgccaggugaucguggaccggggcgaccggagcggguacuccggcaucuucagcgucgagggcaagagcugcaucaaccgcugcuucuacguggagcucauccgggggcgcaaggaggagaccgaggugcuguggaccuccaacagcaucgucguguucugcggcaccuccgggacguacggcaccgggagcuggccggacggcgccgacaucaaccugaugcccaucuga

SEQ ID NO: 80875 - RNA, 1410 nt, Artificial Sequence; identical to SEQ ID NO: 80752
  derived and/or modified CDS sequence (opt1) from neuraminidase__InfluenzaA__ACR15618

SEQ ID NO: 80876 - RNA, 1410 nt, Artificial Sequence; identical to SEQ ID NO: 80752
  derived and/or modified CDS sequence (opt1) from neuraminidase__InfluenzaA__ACR18924

SEQ ID NO: 80877 - RNA, 1410 nt, Artificial Sequence; identical to SEQ ID NO: 80752
  derived and/or modified CDS sequence (opt1) from neuraminidase__InfluenzaA__ACR18925

SEQ ID NO: 80878 - RNA, 1410 nt, Artificial Sequence; identical to SEQ ID NO: 80762
  derived and/or modified CDS sequence (opt1) from neuraminidase__InfluenzaA__ACR18926

SEQ ID NO: 80879 - RNA, 1410 nt, Artificial Sequence; identical to SEQ ID NO: 80762
  derived and/or modified CDS sequence (opt1) from neuraminidase__InfluenzaA__ACR18927

SEQ ID NO: 80880 - RNA, 1410 nt, Artificial Sequence; identical to SEQ ID NO: 80762
  derived and/or modified CDS sequence (opt1) from neuraminidase__InfluenzaA__ACR18928

SEQ ID NO: 80881 - RNA, 1410 nt, Artificial Sequence; identical to SEQ ID NO: 80762
  derived and/or modified CDS sequence (opt1) from neuraminidase__InfluenzaA__ACR18929

SEQ ID NO: 80882 - RNA, 1410 nt, Artificial Sequence; identical to SEQ ID NO: 80762
  derived and/or modified CDS sequence (opt1) from neuraminidase__InfluenzaA__ACR18930

SEQ ID NO: 80883 - RNA, 1410 nt, Artificial Sequence; identical to SEQ ID NO: 80762
  derived and/or modified CDS sequence (opt1) from neuraminidase__InfluenzaA__ACR18931

SEQ ID NO: 80884 - RNA, 1410 nt, Artificial Sequence; identical to SEQ ID NO: 80762
  derived and/or modified CDS sequence (opt1) from neuraminidase__InfluenzaA__ACR18933

SEQ ID NO: 80885 - RNA, 1410 nt, Artificial Sequence; identical to SEQ ID NO: 80752
  derived and/or modified CDS sequence (opt1) from neuraminidase__InfluenzaA__ACR18934

SEQ ID NO: 80886 - RNA, 1410 nt, Artificial Sequence; identical to SEQ ID NO: 80762
  derived and/or modified CDS sequence (opt1) from neuraminidase__InfluenzaA__ACR18935

SEQ ID NO: 80887 - RNA, 1410 nt, Artificial Sequence; identical to SEQ ID NO: 80762
  derived and/or modified CDS sequence (opt1) from neuraminidase__InfluenzaA__ACR23301

SEQ ID NO: 80888 - RNA, 1410 nt, Artificial Sequence; identical to SEQ ID NO: 80762
  derived and/or modified CDS sequence (opt1) from neuraminidase__InfluenzaA__ACR32997

SEQ ID NO: 80889 - RNA, 1410 nt, Artificial Sequence
  derived and/or modified CDS sequence (opt1) from neuraminidase__InfluenzaA__ACR33740
augaaccccaaccagaagaucaucaccaucggcagcgugugcaugaccaucgggauggccaaccugauccuccagaucggcaacaucaucuccaucuggaucagccacuccauccagcuggggaaccagaaccagaucgagacgugcaaccagagcgucaucaccuacgagaacaacaccugggugaaccagaccuacgugaacaucuccaacacgaacuucgccgcgggccagagcgucguguccgugaagcuggccgggaacagcucccucugcccggucagcggcugggccaucuacuccaaggacaacagcauccgcaucggcuccaagggggacguguucgugauccgggagcccuucaucagcugcagcccccuggagugccgcaccuucuuccugacccagggcgcccuccugaacgacaagcacuccaacgggaccaucaaggaccggucccccuaccgcacgcugaugagcugcccgaucggcgagguccccucccccuacaacagccgguucgagagcguggccugguccgcgagcgccugccacgacgggaucaacuggcucaccaucggcaucuccggccccgacaacggggccguggccguccugaaguacaacggcaucaucaccgacaccaucaagagcuggcgcaacaacauccugcggacgcaggaguccgagugcgcgugcgugaacgggagcugcuucaccgugaugaccgacggcccguccgacggccaggccagcuacaagaucuuccgcaucgagaaggggaagaucgucaaguccguggagaugaacgcccccaacuaccacuacgaggagugcagcugcuaccccgacuccagcgagaucacgugcgugugccgggacaacuggcacggcuccaaccgccccugggucagcuucaaccagaaccucgaguaccagaucggguacaucugcuccggcaucuucggggacaacccgcggcccaacgacaagaccggcagcugcggccccguguccagcaacggggccaacggcgugaagggguucuccuucaaguacggcaacggggucuggaucggccgcaccaagagcaucagcucccggaacggcuucgagaugaucugggaccccaacggguggaccggcaccgacaacaacuucagcaucaagcaggacaucguggggaucaacgagugguccggcuacagcggguccuucgugcagcacccggagcugacgggccuggacugcauccgccccugcuucugggucgagcucauccggggccgccccaaggagaacaccaucuggaccagcggguccagcaucuccuucugcggcgugaacagcgggaccgucggcugguccuggcccgacggcgccgagcugccguucacgaucgacaaguga

SEQ ID NO: 80890 - RNA, 1410 nt, Artificial Sequence; identical to SEQ ID NO: 80752
  derived and/or modified CDS sequence (opt1) from neuraminidase__InfluenzaA__ACR38792

SEQ ID NO: 80891 - RNA, 1410 nt, Artificial Sequence; identical to SEQ ID NO: 80762
  derived and/or modified CDS sequence (opt1) from neuraminidase__InfluenzaA__ACR38793

SEQ ID NO: 80892 - RNA, 1410 nt, Artificial Sequence; identical to SEQ ID NO: 80762
  derived and/or modified CDS sequence (opt1) from neuraminidase__InfluenzaA__ACR38794

SEQ ID NO: 80893 - RNA, 1410 nt, Artificial Sequence; identical to SEQ ID NO: 80762
  derived and/or modified CDS sequence (opt1) from neuraminidase__InfluenzaA__ACR38878

SEQ ID NO: 80894 - RNA, 1410 nt, Artificial Sequence; identical to SEQ ID NO: 80762
  derived and/or modified CDS sequence (opt1) from neuraminidase__InfluenzaA__ACR39357

SEQ ID NO: 80895 - RNA, 1410 nt, Artificial Sequence; identical to SEQ ID NO: 80762
  derived and/or modified CDS sequence (opt1) from neuraminidase__InfluenzaA__ACR39396

SEQ ID NO: 80896 - RNA, 1410 nt, Artificial Sequence; identical to SEQ ID NO: 80762
  derived and/or modified CDS sequence (opt1) from neuraminidase__InfluenzaA__ACR39406

SEQ ID NO: 80897 - RNA, 1410 nt, Artificial Sequence; identical to SEQ ID NO: 80762
  derived and/or modified CDS sequence (opt1) from neuraminidase__InfluenzaA__ACR39416

SEQ ID NO: 80898 - RNA, 1410 nt, Artificial Sequence; identical to SEQ ID NO: 80762
  derived and/or modified CDS sequence (opt1) from neuraminidase__InfluenzaA__ACR39426

SEQ ID NO: 80899 - RNA, 1410 nt, Artificial Sequence; identical to SEQ ID NO: 80762
  derived and/or modified CDS sequence (opt1) from neuraminidase__InfluenzaA__ACR39436

SEQ ID NO: 80900 - RNA, 1410 nt, Artificial Sequence; identical to SEQ ID NO: 80762
  derived and/or modified CDS sequence (opt1) from neuraminidase__InfluenzaA__ACR39446

SEQ ID NO: 80901 - RNA, 1410 nt, Artificial Sequence; identical to SEQ ID NO: 80762
  derived and/or modified CDS sequence (opt1) from neuraminidase__InfluenzaA__ACR39456

SEQ ID NO: 80902 - RNA, 1410 nt, Artificial Sequence; identical to SEQ ID NO: 80762
  derived and/or modified CDS sequence (opt1) from neuraminidase__InfluenzaA__ACR39466

SEQ ID NO: 80903 - RNA, 1410 nt, Artificial Sequence; identical to SEQ ID NO: 80762
  derived and/or modified CDS sequence (opt1) from neuraminidase__InfluenzaA__ACR39476

SEQ ID NO: 80904 - RNA, 1410 nt, Artificial Sequence; identical to SEQ ID NO: 80762
  derived and/or modified CDS sequence (opt1) from neuraminidase__InfluenzaA__ACR39486

SEQ ID NO: 80905 - RNA, 1410 nt, Artificial Sequence; identical to SEQ ID NO: 80762
  derived and/or modified CDS sequence (opt1) from neuraminidase__InfluenzaA__ACR39496

SEQ ID NO: 80906 - RNA, 1410 nt, Artificial Sequence; identical to SEQ ID NO: 80762
  derived and/or modified CDS sequence (opt1) from neuraminidase__InfluenzaA__ACR40291

SEQ ID NO: 80907 - RNA, 1410 nt, Artificial Sequence; identical to SEQ ID NO: 80762
  derived and/or modified CDS sequence (opt1) from neuraminidase__InfluenzaA__ACR40301

SEQ ID NO: 80908 - RNA, 1410 nt, Artificial Sequence
  derived and/or modified CDS sequence (opt1) from neuraminidase__InfluenzaA__ACR40311
augaaccccaaccagaagaucaucaccaucggcagcgugugcaugaccaucgggauggccaaccugauccuccagaucggcaacaucaucuccaucuggaucagccacuccauccagcuggggaaccagaaccagacggagaccugcaaccagagcgucaucaccuacgagaacaacaccugggugaaccagacguacgugaacaucuccaacaccaacuucgccgcgggccagagcgucguguccgugaagcuggccgggaacagcucccucugcccggucagcggcugggccaucuacuccaaggacaacagcgugcgcaucggcuccaagggggacguguucgucauccgggagcccuucaucagcugcagcccccuggagugccgcaccuucuuccugacccagggcgcccuccugaacgacaagcacuccaacgggacgaucaaggaccggucccccuaccgcacccugaugagcugcccgaucggcgaggugcccucccccuacaacagccgguucgagagcguggccugguccgcgagcgccugccacgacgggaucaacuggcucaccaucggcaucuccggccccgacaacggggccgucgccgugcugaaguacaacggcaucaucaccgacacgaucaagagcuggcgcaacaacauccugcggacccaggaguccgagugcgcgugcgugaacgggagcugcuucaccgucaugaccgacggcccguccaacggccaggccagcuacaagaucuuccgcaucgagaaggggaagaucgugaaguccguggagaugaacgcccccaacuaccacuacgaggagugcagcugcuaccccgacuccagcgagaucacgugcgucugccgggacaacuggcacggcuccaaccgccccugggugagcuucaaccagaaccucgaguaccagaucggguacaucugcuccggcaucuucggggacaacccgcggcccaacgacaagaccggcagcugcggccccguguccagcaacggggccaacggcgucaagggguucuccuucaaguacggcaacgggguguggaucggccgcaccaagagcaucagcucccggaacggcuucgagaugaucugggaccccaacggguggaccggcacggacaacaacuucagcaucaagcaggacaucguggggaucaacgagugguccggcuacagcggguccuucguccagcacccggagcugaccggccuggacugcauccgccccugcuucuggguggagcucauccggggccgccccaaggagaacaccaucuggaccagcggguccagcaucuccuucugcggcgucaacagcgacacgguggggugguccuggcccgacggcgccgagcugccguucaccaucgacaaguga

SEQ ID NO: 80909 - RNA, 1410 nt, Artificial Sequence
  derived and/or modified CDS sequence (opt1) from neuraminidase__InfluenzaA__ACR40321
augaaccccaaccagaagaucaucaccaucggcagcgugugcaugaccaucgggauggccaaccugauccuccagaucggcaacaucaucuccaucuggaucagccacuccauccagcuggggaaccagaaccagaucgagacgugcaaccagagcgucaucaccuacgagaacaacaccugggugaaccagaccuacgugaacaucuccaacacgaacuucgccgcgggccagagcgucguguccgugaagcuggccgggaacagcucccucugcccggucagcggcugggccaucuacuccaaggacaacagcauccgcaucggcuccaagggggacguguucgugauccgggagcccuucaucagcugcagcccccuggagugccgcaccuucuuccugacccagggcgcccuccugaacgacaagcacuccaacgggaccaucaaggaccggucccccuaccgcacgcugaugagcugcccgaucggcgagguccccucccccuacaacagccgguucgagagcguggccugguccgcgagcgccugccacgacgggaucaacuggcucaccaucggcaucuccggccccgacaacggggccguggccguccugaaguacaacggcaucaucaccgacaccaucaagagcuggcgcaacaacauccugcggacgcaggaguccgagugcgcgugcgugaacgggagcugcuucaccgugaugaccgacggcccguccgacggccaggccagcuacaagaucuuccgcaucgagaaggggaagaucgucaaguccguggagaugaacgcccccaacuaccacuacgaggagugcagcugcuaccccgacuccagcgagaucacgugcgugugccgggacaacuggcacggcuccaaccgccccugggucagcuucaaccagaaccucgaguaccagaucggguacaucugcuccggcaucuucggggacaacccgcggcccaacgacaagaccggcagcugcggccccguguccagcaacggggccaacggcgugaagggguucuccuucaaguacggcaacggggucuggaucggccgcaccaagagcaucagcucccggaacggcuucgagaugaucugggaccccaacggguggaacggcaccgacaacaacuucagcaucaagcaggacaucguggggaucaacgagugguccggcuacagcggguccuucgugcagcacccggagcugaccggccuggacugcauccgccccugcuucugggucgagcucauccggggccgccccaaggagaacacgaucuggaccagcggguccagcaucuccuucugcggcgugaacagcgacaccgucgggugguccuggcccgacggcgccgagcugccguucaccaucgacaaguga

SEQ ID NO: 80910 - RNA, 1410 nt, Artificial Sequence; identical to SEQ ID NO: 80762
  derived and/or modified CDS sequence (opt1) from neuraminidase__InfluenzaA__ACR40341

SEQ ID NO: 80911 - RNA, 1410 nt, Artificial Sequence; identical to SEQ ID NO: 80762
  derived and/or modified CDS sequence (opt1) from neuraminidase__InfluenzaA__ACR40351

SEQ ID NO: 80912 - RNA, 1410 nt, Artificial Sequence; identical to SEQ ID NO: 80762
  derived and/or modified CDS sequence (opt1) from neuraminidase__InfluenzaA__ACR40361

SEQ ID NO: 80913 - RNA, 1410 nt, Artificial Sequence; identical to SEQ ID NO: 80762
  derived and/or modified CDS sequence (opt1) from neuraminidase__InfluenzaA__ACR40371

SEQ ID NO: 80914 - RNA, 1410 nt, Artificial Sequence; identical to SEQ ID NO: 80762
  derived and/or modified CDS sequence (opt1) from neuraminidase__InfluenzaA__ACR40391

SEQ ID NO: 80915 - RNA, 1410 nt, Artificial Sequence; identical to SEQ ID NO: 80752
  derived and/or modified CDS sequence (opt1) from neuraminidase__InfluenzaA__ACR46663

SEQ ID NO: 80916 - RNA, 1410 nt, Artificial Sequence; identical to SEQ ID NO: 80752
  derived and/or modified CDS sequence (opt1) from neuraminidase__InfluenzaA__ACR46673

SEQ ID NO: 80917 - RNA, 1410 nt, Artificial Sequence
  derived and/or modified CDS sequence (opt1) from neuraminidase__InfluenzaA__ACR46996
augaaccccaaccagaagaucaucaccaucggcagcgugugcaugaccaucgggauggccaaccugauccuccagaucggcaacaucaucuccaucuggaucagccacuccauccagcuggggaaccagaaccagaucgagacgugcaaccagagcgucaucaccuacgagaacaacaccugggugaaccagaccuacgugaacaucuccaacacgaacuucgccgcgggccagagcgucguguccgugaagcuggccgggaacagcucccucugcccggucagcggcugggccaucuacuccaaggacaacagcauccgcaucggcuccaagggggacguguucgugauccgggagcccuucaucagcugcagcccccuggagugccgcaccuucuuccugacccagggcgcccuccugaacgacaagcacuccaacgggaccaucaaggaccggucccccuaccgcacgcugaugagcugcccgaucggcgagguccccucccccuacaacagccgguucgagagcguggccugguccgcgagcgccugccacgacgggaucaacuggcucaccaucggcaucuccggccccgacaacggggccguggccguccugaaguacaacggcaucaucaccgacaccaucaagagcuggcgcaacaacauccugcggacgcaggaguccgagugcgcgugcgugaacgggagcugcuucaccgugaugaccgacggcccguccaacggccaggccagcuacaagaucuuccgcaucgagaaggggaagaucgucaaguccguggagaugaacgcccccaacuaccacuacgaggagugcagcugcuaccccgacuccagcgagaucacgugcgugugccgggacaacuggcacggcuccaaccgccccugggucagcuucaaccagaaccucgaguaccagaucggguacaucugcuccggcaucuucggggacaacccgcggcccaacgacaagaccggcagcugcggccccguguccagcaacggggccaacggcgugaagggguucuccuucaaguacggcaacggggucuggaucggccgcaccaagagcaucagcucccggaacggcuucgagaugaucugggaccccaacggguggaccggcaccgacaacaacuucagcaucaagcaggacaucguggggaucaacgagugguccggcuacagcggguccuucgugcagcacccggagcugacgggccuggacugcauccgccccugcuucugggucgagcucauccggggccgccccaaggagaacaccaucuggaccagcggguccagcaucuccuucugcggcgugaacagcgacaccgucgggugguccuggcccgacggcgccgagcugccguucacgaucgacaaguga

SEQ ID NO: 80918 - RNA, 1410 nt, Artificial Sequence; identical to SEQ ID NO: 80917
  derived and/or modified CDS sequence (opt1) from neuraminidase__InfluenzaA__ACR46997

SEQ ID NO: 80919 - RNA, 1410 nt, Artificial Sequence; identical to SEQ ID NO: 80917
  derived and/or modified CDS sequence (opt1) from neuraminidase__InfluenzaA__ACR46998

SEQ ID NO: 80920 - RNA, 1410 nt, Artificial Sequence; identical to SEQ ID NO: 80917
  derived and/or modified CDS sequence (opt1) from neuraminidase__InfluenzaA__ACR46999

SEQ ID NO: 80921 - RNA, 1410 nt, Artificial Sequence; identical to SEQ ID NO: 80917
  derived and/or modified CDS sequence (opt1) from neuraminidase__InfluenzaA__ACR47000

SEQ ID NO: 80922 - RNA, 1410 nt, Artificial Sequence; identical to SEQ ID NO: 80917
  derived and/or modified CDS sequence (opt1) from neuraminidase__InfluenzaA__ACR47001

SEQ ID NO: 80923 - RNA, 1410 nt, Artificial Sequence; identical to SEQ ID NO: 80917
  derived and/or modified CDS sequence (opt1) from neuraminidase__InfluenzaA__ACR47002

SEQ ID NO: 80924 - RNA, 1410 nt, Artificial Sequence; identical to SEQ ID NO: 80917
  derived and/or modified CDS sequence (opt1) from neuraminidase__InfluenzaA__ACR47003

SEQ ID NO: 80925 - RNA, 1410 nt, Artificial Sequence
  derived and/or modified CDS sequence (opt1) from neuraminidase__InfluenzaA__ACR47008
augaaccccaaccagaagaucaucaccaucggcagcgugugcaugaccaucgggauggccaaccugauccuccagaucggcaacaucaucuccaucuggccgguccacagcauccagcuggggaaccagaaccagaucgagacgugcaaccaguccgugaucaccuacgagaacaacaccugggugaaccagaccuacgucaacaucagcaacacgaacuucgccgcgggccaguccguggugagcaugaagcuggccgggaacuccagccucugccccgucggcggcugggccaucuacuccaaggacaacagcgugcgcaucggguccaagggcgacguguucgucauccgggagcccuucaucagcugcagcccccuggagugccgcaccuucuuccugacccagggggcccuccugaacgacaagcacuccaacggcaccaucaaggaccgguccccguaccgcacgcugaugagcugccccaucggggaggugcccucccccuacaacagccgguucgaguccguggccuggagcgcgagcgccugccacgacggcaucaacuggcucaccaucggcaucuccgggccggacaacggcgccgucgccgugcugaaguacaacgggaucaucaccgacaccaucaagagcuggcgcaacaacauccugcggacgcaggaguccgagugcgcgugcgugaacggcagcugcuucaccgucaugaccgacggccccuccaacgggcaggccagcuacaagaucuuccgcaucgagaagggcaagaucgugaaguccguggagaugaacgcccccaacuaccacuacgaggagugcagcugcuaccccgacuccagcgagaucacgugcgucugccgggacaacuggcacggguccaaccgcccgugggugagcuucaaccagaaccucgaguaccagaucggcuacaucugcuccgggaucuucggcgacaacccccggcccaacgacaagaccggcagcugcgggcccguguccagcaacggcgccaacggggucaagggcuucuccuucaaguacgggaacggcguguggaucggccgcaccaagagcaucuccagccggaacggguucgagaugaucugggacccgaacggcuggaccgggaccgacaacaacuucagcaucaagcaggacaucgugggcaucaacgagugguccggguacagcggcuccuucguccagcaccccgagcugacgggccuggacugcauccgccccugcuucuggguggagcucauccgggggcgccccaaggagaacaccaucuggaccagcggcuccagcaucuccuucugcggggucaacagcgacaccgugggcugguccuggccggacggcgccgagcugcccuucacgaucgacaaguga

SEQ ID NO: 80926 - RNA, 1410 nt, Artificial Sequence; identical to SEQ ID NO: 80762
  derived and/or modified CDS sequence (opt1) from neuraminidase__InfluenzaA__ACR49267

SEQ ID NO: 80927 - RNA, 1410 nt, Artificial Sequence; identical to SEQ ID NO: 80752
  derived and/or modified CDS sequence (opt1) from neuraminidase__InfluenzaA__ACR49268

SEQ ID NO: 80928 - RNA, 1410 nt, Artificial Sequence; identical to SEQ ID NO: 80752
  derived and/or modified CDS sequence (opt1) from neuraminidase__InfluenzaA__ACR49269

SEQ ID NO: 80929 - RNA, 1410 nt, Artificial Sequence; identical to SEQ ID NO: 80752
  derived and/or modified CDS sequence (opt1) from neuraminidase__InfluenzaA__ACR49270

SEQ ID NO: 80930 - RNA, 1410 nt, Artificial Sequence; identical to SEQ ID NO: 80792
  derived and/or modified CDS sequence (opt1) from neuraminidase__InfluenzaA__ACR49271

SEQ ID NO: 80931 - RNA, 1410 nt, Artificial Sequence; identical to SEQ ID NO: 80762
  derived and/or modified CDS sequence (opt1) from neuraminidase__InfluenzaA__ACR49272

SEQ ID NO: 80932 - RNA, 1410 nt, Artificial Sequence; identical to SEQ ID NO: 80752
  derived and/or modified CDS sequence (opt1) from neuraminidase__InfluenzaA__ACR49273

SEQ ID NO: 80933 - RNA, 1410 nt, Artificial Sequence; identical to SEQ ID NO: 80752
  derived and/or modified CDS sequence (opt1) from neuraminidase__InfluenzaA__ACR49274

SEQ ID NO: 80934 - RNA, 1410 nt, Artificial Sequence; identical to SEQ ID NO: 80792
  derived and/or modified CDS sequence (opt1) from neuraminidase__InfluenzaA__ACR49275

SEQ ID NO: 80935 - RNA, 1410 nt, Artificial Sequence; identical to SEQ ID NO: 80792
  derived and/or modified CDS sequence (opt1) from neuraminidase__InfluenzaA__ACR49277

SEQ ID NO: 80936 - RNA, 1410 nt, Artificial Sequence; identical to SEQ ID NO: 80792
  derived and/or modified CDS sequence (opt1) from neuraminidase__InfluenzaA__ACR49278

SEQ ID NO: 80937 - RNA, 1410 nt, Artificial Sequence; identical to SEQ ID NO: 80752
  derived and/or modified CDS sequence (opt1) from neuraminidase__InfluenzaA__ACR49279

SEQ ID NO: 80938 - RNA, 1410 nt, Artificial Sequence; identical to SEQ ID NO: 80752
  derived and/or modified CDS sequence (opt1) from neuraminidase__InfluenzaA__ACR50994

SEQ ID NO: 80939 - RNA, 1410 nt, Artificial Sequence; identical to SEQ ID NO: 80762
  derived and/or modified CDS sequence (opt1) from neuraminidase__InfluenzaA__ACR50998

SEQ ID NO: 80940 - RNA, 1410 nt, Artificial Sequence; identical to SEQ ID NO: 80762
  derived and/or modified CDS sequence (opt1) from neuraminidase__InfluenzaA__ACR51008

SEQ ID NO: 80941 - RNA, 1410 nt, Artificial Sequence; identical to SEQ ID NO: 80762
  derived and/or modified CDS sequence (opt1) from neuraminidase__InfluenzaA__ACR51018

SEQ ID NO: 80942 - RNA, 1410 nt, Artificial Sequence; identical to SEQ ID NO: 80762
  derived and/or modified CDS sequence (opt1) from neuraminidase__InfluenzaA__ACR51028

SEQ ID NO: 80943 - RNA, 1410 nt, Artificial Sequence
  derived and/or modified CDS sequence (opt1) from neuraminidase__InfluenzaA__ACR51038
augaaccccaaccagaagaucaucaccaucggcagcgugugcauguccaucgggauggccaaccugauccuccagaucggcaacaucaucagcaucuggaucucccacagcauccagcuggggaaccagaaccagaucgagaccugcaaccaguccgucaucacguacgagaacaacaccugggugaaccagaccuacgugaacaucagcaacaccaacuucgccgcgggccaguccgucgugagcgugaagcuggccgggaacuccagccucugcccggucuccggcugggccaucuacagcaaggacaacuccauccgcaucggcagcaagggggacguguucgugauccgggagcccuucaucuccugcagcccccuggagugccgcacguucuuccugacccagggcgcccuccugaacgacaagcacuccaacgggaccaucaaggaccggagccccuaccgcacccugauguccugcccgaucggcgagguccccagccccuacaacagccgguucgaguccguggccuggagcgcguccgccugccacgacgggaucaacuggcucacgaucggcaucagcggccccgacaacggggccguggccguccugaaguacaacggcaucaucaccgacaccaucaaguccuggcgcaacaacauccugcggacccaggagagcgagugcgcgugcgugaacggguccugcuucacggugaugaccgacggcccgagcgacggccaggccuccuacaagaucuuccgcaucgagaaggggaagaucgucaagagcguggagaugaacgcccccaacuaccacuacgaggagugcuccugcuaccccgacagcuccgagaucacgugcgugugccgggacaacuggcacggcagcaaccgccccugggucuccuucaaccagaaccucgaguaccagaucggguacaucugcagcggcaucuucggggacaacccgcggcccaacgacaagaccggcuccugcggccccgugagcuccaacggggccaacggcgugaagggguucagcuucaaguacggcaacggggucuggaucggccgcaccaagagcaucuccagccggaacggcuucgagaugaucugggaccccaacggguggaccggcaccgacaacaacuucuccaucaagcaggacaucguggggaucaacgaguggagcggcuacuccgggagcuucgugcagcacccggagcugaccggccuggacugcauccgccccugcuucugggucgagcucauccggggccgccccaaggagaacacgaucuggaccuccgggagcuccaucagcuucugcggcgugaacuccgacaccgucggguggagcuggcccgacggcgccgagcugccguucaccaucgacaaguga

SEQ ID NO: 80944 - RNA, 1410 nt, Artificial Sequence; identical to SEQ ID NO: 80762
  derived and/or modified CDS sequence (opt1) from neuraminidase__InfluenzaA__ACR51048

SEQ ID NO: 80945 - RNA, 1410 nt, Artificial Sequence; identical to SEQ ID NO: 80762
  derived and/or modified CDS sequence (opt1) from neuraminidase__InfluenzaA__ACR51058

SEQ ID NO: 80946 - RNA, 1410 nt, Artificial Sequence; identical to SEQ ID NO: 80752
  derived and/or modified CDS sequence (opt1) from neuraminidase__InfluenzaA__ACR51068

SEQ ID NO: 80947 - RNA, 1410 nt, Artificial Sequence; identical to SEQ ID NO: 80762
  derived and/or modified CDS sequence (opt1) from neuraminidase__InfluenzaA__ACR52371

SEQ ID NO: 80948 - RNA, 1410 nt, Artificial Sequence; identical to SEQ ID NO: 80762
  derived and/or modified CDS sequence (opt1) from neuraminidase__InfluenzaA__ACR52381

SEQ ID NO: 80949 - RNA, 1410 nt, Artificial Sequence; identical to SEQ ID NO: 80762
  derived and/or modified CDS sequence (opt1) from neuraminidase__InfluenzaA__ACR52391

SEQ ID NO: 80950 - RNA, 1410 nt, Artificial Sequence; identical to SEQ ID NO: 80762
  derived and/or modified CDS sequence (opt1) from neuraminidase__InfluenzaA__ACR52401

SEQ ID NO: 80951 - RNA, 1410 nt, Artificial Sequence; identical to SEQ ID NO: 80762
  derived and/or modified CDS sequence (opt1) from neuraminidase__InfluenzaA__ACR52411

SEQ ID NO: 80952 - RNA, 1410 nt, Artificial Sequence; identical to SEQ ID NO: 80762
  derived and/or modified CDS sequence (opt1) from neuraminidase__InfluenzaA__ACR52421

SEQ ID NO: 80953 - RNA, 1410 nt, Artificial Sequence; identical to SEQ ID NO: 80762
  derived and/or modified CDS sequence (opt1) from neuraminidase__InfluenzaA__ACR52431

SEQ ID NO: 80954 - RNA, 1410 nt, Artificial Sequence; identical to SEQ ID NO: 80762
  derived and/or modified CDS sequence (opt1) from neuraminidase__InfluenzaA__ACR52441

SEQ ID NO: 80955 - RNA, 1410 nt, Artificial Sequence; identical to SEQ ID NO: 80762
  derived and/or modified CDS sequence (opt1) from neuraminidase__InfluenzaA__ACR52451

SEQ ID NO: 80956 - RNA, 1410 nt, Artificial Sequence; identical to SEQ ID NO: 80762
  derived and/or modified CDS sequence (opt1) from neuraminidase__InfluenzaA__ACR52471

SEQ ID NO: 80957 - RNA, 1410 nt, Artificial Sequence; identical to SEQ ID NO: 80762
  derived and/or modified CDS sequence (opt1) from neuraminidase__InfluenzaA__ACR52481

SEQ ID NO: 80958 - RNA, 1410 nt, Artificial Sequence; identical to SEQ ID NO: 80762
  derived and/or modified CDS sequence (opt1) from neuraminidase__InfluenzaA__ACR52491

SEQ ID NO: 80959 - RNA, 1410 nt, Artificial Sequence; identical to SEQ ID NO: 80762
  derived and/or modified CDS sequence (opt1) from neuraminidase__InfluenzaA__ACR54046

SEQ ID NO: 80960 - RNA, 1410 nt, Artificial Sequence; identical to SEQ ID NO: 80752
  derived and/or modified CDS sequence (opt1) from neuraminidase__InfluenzaA__ACR54052

SEQ ID NO: 80961 - RNA, 1410 nt, Artificial Sequence; identical to SEQ ID NO: 80762
  derived and/or modified CDS sequence (opt1) from neuraminidase__InfluenzaA__ACR54966

SEQ ID NO: 80962 - RNA, 1410 nt, Artificial Sequence; identical to SEQ ID NO: 80762
  derived and/or modified CDS sequence (opt1) from neuraminidase__InfluenzaA__ACR54976

SEQ ID NO: 80963 - RNA, 1410 nt, Artificial Sequence; identical to SEQ ID NO: 80762
  derived and/or modified CDS sequence (opt1) from neuraminidase__InfluenzaA__ACR54986

SEQ ID NO: 80964 - RNA, 1410 nt, Artificial Sequence; identical to SEQ ID NO: 80752
  derived and/or modified CDS sequence (opt1) from neuraminidase__InfluenzaA__ACR54996

SEQ ID NO: 80965 - RNA, 1410 nt, Artificial Sequence; identical to SEQ ID NO: 80762
  derived and/or modified CDS sequence (opt1) from neuraminidase__InfluenzaA__ACR55006

SEQ ID NO: 80966 - RNA, 1410 nt, Artificial Sequence; identical to SEQ ID NO: 80752
  derived and/or modified CDS sequence (opt1) from neuraminidase__InfluenzaA__ACR56383

SEQ ID NO: 80967 - RNA, 1410 nt, Artificial Sequence; identical to SEQ ID NO: 80752
  derived and/or modified CDS sequence (opt1) from neuraminidase__InfluenzaA__ACR56393

SEQ ID NO: 80968 - RNA, 1410 nt, Artificial Sequence; identical to SEQ ID NO: 80762
  derived and/or modified CDS sequence (opt1) from neuraminidase__InfluenzaA__ACR56403

SEQ ID NO: 80969 - RNA, 1410 nt, Artificial Sequence; identical to SEQ ID NO: 80762
  derived and/or modified CDS sequence (opt1) from neuraminidase__InfluenzaA__ACR56413

SEQ ID NO: 80970 - RNA, 1410 nt, Artificial Sequence; identical to SEQ ID NO: 80762
  derived and/or modified CDS sequence (opt1) from neuraminidase__InfluenzaA__ACR56423

SEQ ID NO: 80971 - RNA, 1410 nt, Artificial Sequence; identical to SEQ ID NO: 80762
  derived and/or modified CDS sequence (opt1) from neuraminidase__InfluenzaA__ACR56433

SEQ ID NO: 80972 - RNA, 1410 nt, Artificial Sequence; identical to SEQ ID NO: 80762
  derived and/or modified CDS sequence (opt1) from neuraminidase__InfluenzaA__ACR56443

SEQ ID NO: 80973 - RNA, 1410 nt, Artificial Sequence; identical to SEQ ID NO: 80762
  derived and/or modified CDS sequence (opt1) from neuraminidase__InfluenzaA__ACR56453

SEQ ID NO: 80974 - RNA, 1413 nt, Artificial Sequence; identical to SEQ ID NO: 80740
  derived and/or modified CDS sequence (opt1) from neuraminidase__InfluenzaA__ACR58555

SEQ ID NO: 80975 - RNA, 1413 nt, Artificial Sequence
  derived and/or modified CDS sequence (opt1) from neuraminidase__InfluenzaA__ACR61658
augaaccccaaccagaagaucaucaccaucggcagcaucuccaucgccaucgggaucaucagccugaugcuccagaucggcaacaucaucuccaucugggccagccacuccauccagaccgggagccagaaccacacgggcaucugcaaccagcgcaucaucaccuacgagaacuccaccugggugaaccacaccuacgucagcaucaacaacacgaacguggugaccgggaaggacaagaccuccgucacccuggcgggcaacagcucccugugcagcaucuccggcugggccaucuacacgaaggacaacagcauccggaucggguccaagggcgacguguucgugauccgcgagccguucaucagcugcucccaccucgagugccggaccuucuuccugacccagggggcccugcucaacgacaagcacagcaacggcaccgucaaggaccgcucccccuaccgggcccugaugagcugcccccugggggaggcccccagcccguacaacuccaaguucgagagcguggcgugguccgccagcgccugccacgacggcaugggcuggcucacgaucgggaucuccggccccgacaacggggccguggcgguccugaaguacaacggcaucaucaccgagaccaucaagagcuggaagaagcgcauccugcggacccaggaguccgagugcgugugcgugaacggcagcugcuucacgaucaugaccgacgggcccuccaacggcgccgccagcuacaagaucuucaagaucgagaaggggaaggucaccaaguccaucgagcucaacgcccccaacuuccacuacgaggagugcagcugcuacccggacaccggcacggugaugugcgugugccgcgacaacuggcacggguccaaccggcccugggucagcuucaaccagaaccuggacuaccagaucggcuacaucugcuccggcguguucggggacaacccccgccccaaggacggcaaggggagcugcaacccggugaccgucgacggcgccgacggggugaagggcuucuccuacaaguacggcaacgggguguggaucggccggaccaagagcaaccgccugcggaagggguucgagaugaucugggaccccaacggcuggaccgacacggacuccgacuucagcgucaagcaggacgugguggcgaucaccgacuggagcggguacuccggcagcuucguccagcaccccgagcucaccggccuggacugcauccgccccugcuucuggguggagcugguccgggggcucccgcgcgagaacaccacgaucuggaccuccggcagcuccaucagcuucugcgggguggacuccgacaccgccaacuggagcuggcccgacggcgccgagcugcccuucaccaucgacaaguga

SEQ ID NO: 80976 - RNA, 1410 nt, Artificial Sequence
  derived and/or modified CDS sequence (opt1) from neuraminidase__InfluenzaA__ACR61680
augaaccccaaccagaagaucaucaccaucggcagcgugucccugaccaucagcacgaucugcuucuucaugcagaucgccauccucaucaccaccgucacccugcacuucaagcaguacgaguucaacuccccgcccaacaaccaggugaugcugugcgagcccacgaucaucgagcgcaacaucaccgagaucguguaccucaccaacaccacgaucgagaaggagaucugccccaagcuggccgaguaccggaacuggagcaagccgcagugcgacaucaccggguucgcgcccuucuccaaggacaacagcauccgccuguccgccggcggggacaucugggucacccgggagcccuacgugagcugcgaccccgacaagugcuaccaguucgcccucggccaggggaccacgcugaacaacgugcacuccaacgacaccguccgcgaccggaccccguaccgcacccugcucaugaacgagcugggcgugcccuuccaccugggcacgaagcaggucugcaucgccuggagcuccagcuccugccacgacgggaaggccuggcuccacgugugcaucaccggcgacgacaagaacgcgaccgccagcuucaucuacaacgggcggcugguggacuccguggucagcugguccaaggagauccugcgcacccaggagagcgagugcgugugcaucaacggcacgugcaucguggucaugaccgacggguccgccagcggcaaggccgacaccaagauccucuucaucgaggagggcaagaucgugcacaccagcacgcuguccgggagcgcgcagcacguggaggagugcuccugcuacccccgguaccccggcguccgcugcgugugccgggacaacuggaaggggagcaaccgcccgaucguggacaucaacaucaaggaccacuccaucgucagcuccuacgugugcagcggccuggugggcgacacgccccggaagaacgacuccagcuccagcucccacugccucgaccccaacaacgaggagggcgggcacggggucaagggcugggccuucgacgacgggaacgacguguggaugggccgcaccaucagcgagaagucccggcugggcuacgagaccuucaaggucaucgagggguggagcaaccccaaguccaagcugcagaucaaccgccaggugaucguggaccggggcaaccgcagcggguacuccggcaucuucagcgucgagggcaagagcugcaucaaccggugcuucuacguggagcucauccgcgggcggaaggaggagaccgaggugcuguggaccuccaacagcaucgucguguucugcggcaccuccgggaccuacggcacggggagcuggccggacggcgccgacaucaaccugaugcccaucuga

SEQ ID NO: 80977 - RNA, 1410 nt, Artificial Sequence
  derived and/or modified CDS sequence (opt1) from neuraminidase__InfluenzaA__ACR61691
augaaccccaaccagaagaucaucaccaucggcagcgugucccugaccaucagcacgaucugcuucuucaugcagaucgccauccucaucaccaccgucacccugcacuucaagcaguacgaguucaacuccccgcccaacaaccaggugaugcugugcgagcccacgaucaucgagcgcaacaucaccgagaucguguaccucaccaacaccacgaucgagaaggagaucugccacaagcuggccgaguaccggaacuggagcaagccccagugcgacaucaccggguucgcgccguucuccaaggacaacagcauccgccuguccgccggcggggacaucugggucacccgggagcccuacgugagcugcgaccccgacaagugcuaccaguucgcccucggccaggggaccacgcugaacaacgugcacuccaacaacaccguccgcgaccggacccccuaccgcacccugcucaugaacgagcugggcgugccguuccaccugggcacgaagcaggucugcaucgccuggagcuccagcuccugccacgacgggaaggccuggcuccacgugugcaucaccggcgacgacaagaacgcgaccgccagcuucaucuacaacgggcggcugguggacuccguggucagcugguccaaggagauccugcgcacccaggagagcgagugcgugugcaucaacggcacgugcaccguggucaugaccgacggguccgccagcggcaaggccgacaccaagauccucuucaucgaggagggcaagaucgugcacacgagcacccuguccgggagcgcgcagcacguggaggagugcuccugcuacccccgguaccccggcguccgcugcgugugccgggacaacuggaaggggagcaaccgccccaucguggacaucaacaucaaggaccacuccaucgucagcuccuacgugugcagcggccuggugggcgacaccccgcggaagaacgacuccagcuccagcucccacugccucgaccccaacaacgaggagggcgggcacggggucaagggcugggccuucgacgacgggaacgacguguggaugggccgcaccaucagcgagaagucccggcugggcuacgagacguucaaggucaucgagggguggagcaaccccaaguccaagcugcagaucaaccgccaggugaucguggaccggggcaaccgcagcggguacuccggcaucuucagcgucgagggcaagagcugcaucaaccggugcuucuacguggagcucauccgcgggcggaaggaggagaccgaggugcuguggaccuccaacagcaucgucguguucugcggcaccuccgggacguacggcaccgggagcuggcccgacggcgccgacaucaaccugaugccgaucuga

SEQ ID NO: 80978 - RNA, 1410 nt, Artificial Sequence
  derived and/or modified CDS sequence (opt1) from neuraminidase__InfluenzaA__ACR61702
augaaccccaaccagaagaucaucaccaucggcagcgugucccugaccaucagcacgaucugcuucuucaugcagaucgccauccucaucaccaccgucacccugcacuucaagcaguacgaguucaacuccccgcccaacaaccaggugaugcugugcgagcccacgaucaucgagcgcaacaucaccgagaucguguaccucaccaacaccacgaucgagaaggagaucugccccaagcuggccgaguaccggaacuggagcaagccgcagugcgacaucaccggguucgcgcccuucuccaaggacaacagcauccgccuguccgccggcggggacaucugggucacccgggagcccuacgugagcugcgaccccgacaagugcuaccaguucgcccucggccaggggaccacgcugaacaacgugcacuccaacaacaccguccgcgaccggaccccguaccgcacccugcucaugaacgagcugggcgugcccuuccaccugggcacgaagcaggucugcaucgccuggagcuccagcuccugccacgacgggaaggccuggcuccacgugugcaucaccggcgacgacaagaacgcgaccgccagcuucaucuacaacgggcggcugguggacuccguggucagcugguccaaggagauccugcgcacccaggagagcgagugcgugugcaucaacggcacgugcaccguggucaugaccgacggguccgccagcggcaaggccgacaccaagauccucuucaucgaggagggcaagaucgugcacacgagcacccuguccgggagcgcgcagcacguggaggagugcuccugcuacccccgguaccccggcguccgcugcgugugccgggacaacuggaaggggagcaaccgcccgaucguggacaucaacaucaaggaccacuccaucgucagcuccuacgugugcagcggccuggugggcgacacgccccggaagaacgacuccagcuccagcuccaacugccucgaccccaacaacgaggagggcgggcacggggucaagggcugggccuucgacgacgggaacgacguguggaugggccgcaccaucagcgagaagucccggcugggcuacgagaccuucaaggucaucgagggguggagcaaccccaaguccaagcugcagaucaaccgccaggugaucguggaccggggcaaccgcagcggguacuccggcaucuucagcgucgagggcaagagcugcaucaaccggugcuucuacguggagcucauccgcgggcggaaggaggagaccgaggugcuguggaccuccaacagcaucgucguguucugcggcaccuccgggacguacggcaccgggagcuggccggacggcgccgacaucaaccugaugcccaucuga

SEQ ID NO: 80979 - RNA, 1410 nt, Artificial Sequence; identical to SEQ ID NO: 80752
  derived and/or modified CDS sequence (opt1) from neuraminidase__InfluenzaA__ACR67201

SEQ ID NO: 80980 - RNA, 1410 nt, Artificial Sequence; identical to SEQ ID NO: 80762
  derived and/or modified CDS sequence (opt1) from neuraminidase__InfluenzaA__ACR67202

SEQ ID NO: 80981 - RNA, 1410 nt, Artificial Sequence; identical to SEQ ID NO: 80752
  derived and/or modified CDS sequence (opt1) from neuraminidase__InfluenzaA__ACR67203

SEQ ID NO: 80982 - RNA, 1410 nt, Artificial Sequence; identical to SEQ ID NO: 80762
  derived and/or modified CDS sequence (opt1) from neuraminidase__InfluenzaA__ACR67204

SEQ ID NO: 80983 - RNA, 1410 nt, Artificial Sequence; identical to SEQ ID NO: 80762
  derived and/or modified CDS sequence (opt1) from neuraminidase__InfluenzaA__ACR67246

SEQ ID NO: 80984 - RNA, 1410 nt, Artificial Sequence; identical to SEQ ID NO: 80752
  derived and/or modified CDS sequence (opt1) from neuraminidase__InfluenzaA__ACR67256

SEQ ID NO: 80985 - RNA, 1410 nt, Artificial Sequence; identical to SEQ ID NO: 80762
  derived and/or modified CDS sequence (opt1) from neuraminidase__InfluenzaA__ACR77451

SEQ ID NO: 80986 - RNA, 1410 nt, Artificial Sequence; identical to SEQ ID NO: 80762
  derived and/or modified CDS sequence (opt1) from neuraminidase__InfluenzaA__ACR77461

SEQ ID NO: 80987 - RNA, 1410 nt, Artificial Sequence; identical to SEQ ID NO: 80762
  derived and/or modified CDS sequence (opt1) from neuraminidase__InfluenzaA__ACR77471

SEQ ID NO: 80988 - RNA, 1410 nt, Artificial Sequence; identical to SEQ ID NO: 80762
  derived and/or modified CDS sequence (opt1) from neuraminidase__InfluenzaA__ACR77481

SEQ ID NO: 80989 - RNA, 1410 nt, Artificial Sequence; identical to SEQ ID NO: 80762
  derived and/or modified CDS sequence (opt1) from neuraminidase__InfluenzaA__ACR77491

SEQ ID NO: 80990 - RNA, 1410 nt, Artificial Sequence; identical to SEQ ID NO: 80762
  derived and/or modified CDS sequence (opt1) from neuraminidase__InfluenzaA__ACR77501

SEQ ID NO: 80991 - RNA, 1410 nt, Artificial Sequence; identical to SEQ ID NO: 80762
  derived and/or modified CDS sequence (opt1) from neuraminidase__InfluenzaA__ACR83527

SEQ ID NO: 80992 - RNA, 1410 nt, Artificial Sequence; identical to SEQ ID NO: 80762
  derived and/or modified CDS sequence (opt1) from neuraminidase__InfluenzaA__ACR83539

SEQ ID NO: 80993 - RNA, 1410 nt, Artificial Sequence; identical to SEQ ID NO: 80762
  derived and/or modified CDS sequence (opt1) from neuraminidase__InfluenzaA__ACS14669

SEQ ID NO: 80994 - RNA, 1410 nt, Artificial Sequence; identical to SEQ ID NO: 80762
  derived and/or modified CDS sequence (opt1) from neuraminidase__InfluenzaA__ACS14679

SEQ ID NO: 80995 - RNA, 1410 nt, Artificial Sequence; identical to SEQ ID NO: 80762
  derived and/or modified CDS sequence (opt1) from neuraminidase__InfluenzaA__ACS14689

SEQ ID NO: 80996 - RNA, 1410 nt, Artificial Sequence; identical to SEQ ID NO: 80762
  derived and/or modified CDS sequence (opt1) from neuraminidase__InfluenzaA__ACS14699

SEQ ID NO: 80997 - RNA, 1410 nt, Artificial Sequence; identical to SEQ ID NO: 80762
  derived and/or modified CDS sequence (opt1) from neuraminidase__InfluenzaA__ACS14709

SEQ ID NO: 80998 - RNA, 1410 nt, Artificial Sequence; identical to SEQ ID NO: 80762
  derived and/or modified CDS sequence (opt1) from neuraminidase__InfluenzaA__ACS14719

SEQ ID NO: 80999 - RNA, 1410 nt, Artificial Sequence; identical to SEQ ID NO: 80762
  derived and/or modified CDS sequence (opt1) from neuraminidase__InfluenzaA__ACS14729

SEQ ID NO: 81000 - RNA, 1410 nt, Artificial Sequence; identical to SEQ ID NO: 80762
  derived and/or modified CDS sequence (opt1) from neuraminidase__InfluenzaA__ACS14739

SEQ ID NO: 81001 - RNA, 1410 nt, Artificial Sequence; identical to SEQ ID NO: 80752
  derived and/or modified CDS sequence (opt1) from neuraminidase__InfluenzaA__ACS27192

SEQ ID NO: 81002 - RNA, 1410 nt, Artificial Sequence; identical to SEQ ID NO: 80762
  derived and/or modified CDS sequence (opt1) from neuraminidase__InfluenzaA__ACS27202

SEQ ID NO: 81003 - RNA, 1410 nt, Artificial Sequence; identical to SEQ ID NO: 80762
  derived and/or modified CDS sequence (opt1) from neuraminidase__InfluenzaA__ACS27212

SEQ ID NO: 81004 - RNA, 1410 nt, Artificial Sequence; identical to SEQ ID NO: 80752
  derived and/or modified CDS sequence (opt1) from neuraminidase__InfluenzaA__ACS27222

SEQ ID NO: 81005 - RNA, 1410 nt, Artificial Sequence; identical to SEQ ID NO: 80762
  derived and/or modified CDS sequence (opt1) from neuraminidase__InfluenzaA__ACS27232

SEQ ID NO: 81006 - RNA, 1410 nt, Artificial Sequence; identical to SEQ ID NO: 80752
  derived and/or modified CDS sequence (opt1) from neuraminidase__InfluenzaA__ACS27242

SEQ ID NO: 81007 - RNA, 1410 nt, Artificial Sequence; identical to SEQ ID NO: 80762
  derived and/or modified CDS sequence (opt1) from neuraminidase__InfluenzaA__ACS27252

SEQ ID NO: 81008 - RNA, 1410 nt, Artificial Sequence; identical to SEQ ID NO: 80752
  derived and/or modified CDS sequence (opt1) from neuraminidase__InfluenzaA__ACS27771

SEQ ID NO: 81009 - RNA, 1410 nt, Artificial Sequence; identical to SEQ ID NO: 80917
  derived and/or modified CDS sequence (opt1) from neuraminidase__InfluenzaA__ACS34969

SEQ ID NO: 81010 - RNA, 1410 nt, Artificial Sequence; identical to SEQ ID NO: 80917
  derived and/or modified CDS sequence (opt1) from neuraminidase__InfluenzaA__ACS34970

SEQ ID NO: 81011 - RNA, 1410 nt, Artificial Sequence; identical to SEQ ID NO: 80917
  derived and/or modified CDS sequence (opt1) from neuraminidase__InfluenzaA__ACS34971

SEQ ID NO: 81012 - RNA, 1410 nt, Artificial Sequence; identical to SEQ ID NO: 80762
  derived and/or modified CDS sequence (opt1) from neuraminidase__InfluenzaA__ACS34972

SEQ ID NO: 81013 - RNA, 1410 nt, Artificial Sequence; identical to SEQ ID NO: 80762
  derived and/or modified CDS sequence (opt1) from neuraminidase__InfluenzaA__ACS50081

SEQ ID NO: 81014 - RNA, 1410 nt, Artificial Sequence; identical to SEQ ID NO: 80762
  derived and/or modified CDS sequence (opt1) from neuraminidase__InfluenzaA__ACS50087

SEQ ID NO: 81015 - RNA, 1410 nt, Artificial Sequence; identical to SEQ ID NO: 80762
  derived and/or modified CDS sequence (opt1) from neuraminidase__InfluenzaA__ACS50094

SEQ ID NO: 81016 - RNA, 1410 nt, Artificial Sequence; identical to SEQ ID NO: 80752
  derived and/or modified CDS sequence (opt1) from neuraminidase__InfluenzaA__ACS54264

SEQ ID NO: 81017 - RNA, 1410 nt, Artificial Sequence; identical to SEQ ID NO: 80917
  derived and/or modified CDS sequence (opt1) from neuraminidase__InfluenzaA__ACS54265

SEQ ID NO: 81018 - RNA, 1410 nt, Artificial Sequence; identical to SEQ ID NO: 80762
  derived and/or modified CDS sequence (opt1) from neuraminidase__InfluenzaA__ACS54266

SEQ ID NO: 81019 - RNA, 1410 nt, Artificial Sequence; identical to SEQ ID NO: 80762
  derived and/or modified CDS sequence (opt1) from neuraminidase__InfluenzaA__ACS54267

SEQ ID NO: 81020 - RNA, 1410 nt, Artificial Sequence; identical to SEQ ID NO: 80762
  derived and/or modified CDS sequence (opt1) from neuraminidase__InfluenzaA__ACS54268

SEQ ID NO: 81021 - RNA, 1410 nt, Artificial Sequence; identical to SEQ ID NO: 80762
  derived and/or modified CDS sequence (opt1) from neuraminidase__InfluenzaA__ACS54303

SEQ ID NO: 81022 - RNA, 1410 nt, Artificial Sequence; identical to SEQ ID NO: 80762
  derived and/or modified CDS sequence (opt1) from neuraminidase__InfluenzaA__ACS68823

SEQ ID NO: 81023 - RNA, 1410 nt, Artificial Sequence; identical to SEQ ID NO: 80762
  derived and/or modified CDS sequence (opt1) from neuraminidase__InfluenzaA__ACS75824

SEQ ID NO: 81024 - RNA, 1410 nt, Artificial Sequence; identical to SEQ ID NO: 80762
  derived and/or modified CDS sequence (opt1) from neuraminidase__InfluenzaA__ACS77929

SEQ ID NO: 81025 - RNA, 1410 nt, Artificial Sequence; identical to SEQ ID NO: 80762
  derived and/or modified CDS sequence (opt1) from neuraminidase__InfluenzaA__ACS77939

SEQ ID NO: 81026 - RNA, 1410 nt, Artificial Sequence; identical to SEQ ID NO: 80752
  derived and/or modified CDS sequence (opt1) from neuraminidase__InfluenzaA__ACS77949

SEQ ID NO: 81027 - RNA, 1410 nt, Artificial Sequence; identical to SEQ ID NO: 80762
  derived and/or modified CDS sequence (opt1) from neuraminidase__InfluenzaA__ACS77959

SEQ ID NO: 81028 - RNA, 1410 nt, Artificial Sequence; identical to SEQ ID NO: 80762
  derived and/or modified CDS sequence (opt1) from neuraminidase__InfluenzaA__ACS77969

SEQ ID NO: 81029 - RNA, 1410 nt, Artificial Sequence; identical to SEQ ID NO: 80762
  derived and/or modified CDS sequence (opt1) from neuraminidase__InfluenzaA__ACS77979

SEQ ID NO: 81030 - RNA, 1410 nt, Artificial Sequence; identical to SEQ ID NO: 80762
  derived and/or modified CDS sequence (opt1) from neuraminidase__InfluenzaA__ACS77989

SEQ ID NO: 81031 - RNA, 1410 nt, Artificial Sequence; identical to SEQ ID NO: 80762
  derived and/or modified CDS sequence (opt1) from neuraminidase__InfluenzaA__ACS77999

SEQ ID NO: 81032 - RNA, 1410 nt, Artificial Sequence; identical to SEQ ID NO: 80762
  derived and/or modified CDS sequence (opt1) from neuraminidase__InfluenzaA__ACS78009

SEQ ID NO: 81033 - RNA, 1410 nt, Artificial Sequence; identical to SEQ ID NO: 80762
  derived and/or modified CDS sequence (opt1) from neuraminidase__InfluenzaA__ACS78019

SEQ ID NO: 81034 - RNA, 1410 nt, Artificial Sequence; identical to SEQ ID NO: 80762
  derived and/or modified CDS sequence (opt1) from neuraminidase__InfluenzaA__ACS78039

SEQ ID NO: 81035 - RNA, 1410 nt, Artificial Sequence; identical to SEQ ID NO: 80762
  derived and/or modified CDS sequence (opt1) from neuraminidase__InfluenzaA__ACS78049

SEQ ID NO: 81036 - RNA, 1410 nt, Artificial Sequence; identical to SEQ ID NO: 80762
  derived and/or modified CDS sequence (opt1) from neuraminidase__InfluenzaA__ACS88274

SEQ ID NO: 81037 - RNA, 1410 nt, Artificial Sequence; identical to SEQ ID NO: 80762
  derived and/or modified CDS sequence (opt1) from neuraminidase__InfluenzaA__ACS88275

SEQ ID NO: 81038 - RNA, 1410 nt, Artificial Sequence; identical to SEQ ID NO: 80752
  derived and/or modified CDS sequence (opt1) from neuraminidase__InfluenzaA__ACS92572

SEQ ID NO: 81039 - RNA, 1410 nt, Artificial Sequence; identical to SEQ ID NO: 80752
  derived and/or modified CDS sequence (opt1) from neuraminidase__InfluenzaA__ACS92582

SEQ ID NO: 81040 - RNA, 1410 nt, Artificial Sequence; identical to SEQ ID NO: 80762
  derived and/or modified CDS sequence (opt1) from neuraminidase__InfluenzaA__ACS92592

SEQ ID NO: 81041 - RNA, 1410 nt, Artificial Sequence; identical to SEQ ID NO: 80762
  derived and/or modified CDS sequence (opt1) from neuraminidase__InfluenzaA__ACS92603

SEQ ID NO: 81042 - RNA, 1410 nt, Artificial Sequence; identical to SEQ ID NO: 80752
  derived and/or modified CDS sequence (opt1) from neuraminidase__InfluenzaA__ACS92614

SEQ ID NO: 81043 - RNA, 1410 nt, Artificial Sequence; identical to SEQ ID NO: 80762
  derived and/or modified CDS sequence (opt1) from neuraminidase__InfluenzaA__ACT09115

SEQ ID NO: 81044 - RNA, 1410 nt, Artificial Sequence; identical to SEQ ID NO: 80762
  derived and/or modified CDS sequence (opt1) from neuraminidase__InfluenzaA__ACT10309

SEQ ID NO: 81045 - RNA, 1410 nt, Artificial Sequence; identical to SEQ ID NO: 80762
  derived and/or modified CDS sequence (opt1) from neuraminidase__InfluenzaA__ACT10315

SEQ ID NO: 81046 - RNA, 1410 nt, Artificial Sequence; identical to SEQ ID NO: 80752
  derived and/or modified CDS sequence (opt1) from neuraminidase__InfluenzaA__ACT11059

SEQ ID NO: 81047 - RNA, 1350 nt, Artificial Sequence
  derived and/or modified CDS sequence (opt1) from neuraminidase__InfluenzaA__ACT15313
augaaccccaaccagaagaucaucaccaucggcagcaucugcauggugaucgggaucgucucccugaugcuccagaucggcaacaugaucagcaucugggugucccacagcauccagaccgggaaccagugccaggacgagccgaucuccaacacgaaguuccugaccgagaaggccguggccagcgucacccuggcgggcaacuccagccucugccccaucuccgggugggccguguacagcaaggacaacuccauccgcaucggcagccggggcgacguguucgucauccgcgagcccuucaucuccugcagccaccuggagugccggaccuucuuccugacgcagggggcccuccugaacgacaagcacuccaacggcaccgugaaggaccgcagcccccaccggacccugauguccugcccggugggggaggcccccagccccuacaacucccgcuucgagagcgucgccuggagcgcguccgccugccacgacggcaccagcuggcucacgaucgggaucuccggccccgacaacggcgccguggccgugcugaaguacaacgggaucaucaccgacaccaucaagagcuggcggaacaacaucaugcgcacccaggaguccgagugcgcgugcgucaacggcagcugcuucacggugaugaccgacgggccguccagcggccaggccuccuacaagaucuucaagauggagaagggcaagguggucaagagcguggagcuggacgcccccaacuaccacuacgaggagugcuccugcuaccccgacgccggggagaucacgugcgugugccgggacaacuggcacggcagcaaccgccccugggucuccuucaaccagaaccucgaguaccagaucggguacaucugcagcggcguguucggggacaacccgcggcccaacgacggcaccggcuccugcgggcccguguuccccaacggcgccuacggggucaagggcuucagcuucaaguacgggaacggcguguggaucggccgcaccaaguccaccaacagccgguccggguucgagaugaucugggacccgaacggcuggaccgggaccgacagcagcuucuccgugaagcaggacaucgucgcgaucacggacuggagcggcuacuccgggagcuucgugcagcaccccgagcugaccggccuggacugcauccgccccugcuucugggucgagcucauccggggccgccccaaggaguccaccaucuggaccagcggguccagcaucuccuucugcggcgugaacggggacacggugagcugguccuggccggacggcgccgagcugcccuucaccaucgacaaguga

SEQ ID NO: 81048 - RNA, 1350 nt, Artificial Sequence
  derived and/or modified CDS sequence (opt1) from neuraminidase__InfluenzaA__ACT15315
augaaccccaaccagaagaucaucaccaucggcagcaucugcauggugaucgggaucgucucccugaugcuccagaucggcaacaugaucagcaucugggugucccacagcauccagaccgggaaccagugccaggacgagccgaucuccaacacgaaguuccugaccgagaaggccguggccagcgucacccuggcgggcaacuccagccucugccccaucuccgggugggccguguacagcaaggacaacuccauccgcaucggcagccggggcgacguguucgucaugcgcgagcccuucaucuccugcagccaccuggagugccggaccuucuuccugacgcagggggcccuccugaacgacaagcacuccaacggcaccgugaaggaccgcagcccccaccggacccugauguccugcccggugggggaggcccccagccccuacaacucccgcuucgagagcgucgccuggagcgcguccgccugccacgacggcaccagcuggcucacgaucgggaucuccggccccgacaacggcgccguggccgugcugaaguacaacgggaucaucaccgacaccaucaagagcuggcggaacaacaucaugcgcacccaggaguccgagugcgcgugcgucaacggcagcugcuucacggugaugaccgacgggccguccagcggccaggccuccuacaagaucuucaagauggagaagggcaagguggucaagagcguggagcuggacgcccccaacuaccacuacgaggagugcuccugcuaccccgacgccggggagaucacgugcgugugccgggacaacuggcacggcagcaaccgccccugggucuccuucaaccagaaccucgaguaccagaucggguacaucugcagcggcguguucggggacaacccgcggcccaacgacggcaccggcuccugcgggcccguguuccccaacggcgccuacggggucaagggcuucagcuucaaguacgggaacggcguguggaucggccgcaccaaguccaccaacagccgguccggguucgagaugaucugggacccgaacggcuggaccgggaccgacagcagcuucuccgugaagcaggacaucgucgcgaucacggacuggagcggcuacuccgggagcuucgugcagcaccccgagcugaccggccuggacugcauccgccccugcuucugggucgagcucauccggggccgccccaaggaguccaccaucuggaccagcggguccagcaucuccuucugcggcgugaacggggacacggugagcugguccuggccggacggcgccgagcugcccuucaccaucgacaaguga

SEQ ID NO: 81049 - RNA, 1350 nt, Artificial Sequence; identical to SEQ ID NO: 81047
  derived and/or modified CDS sequence (opt1) from neuraminidase__InfluenzaA__ACT15319

SEQ ID NO: 81050 - RNA, 1350 nt, Artificial Sequence
  derived and/or modified CDS sequence (opt1) from neuraminidase__InfluenzaA__ACT15321
augaaccccaaccagaagaucaucaccaucggcagcaucugcauggugaucgggaucgucucccugaugcuccagaucggcaacaugaucagcaucugggugucccacagcauccagaccgggaaccagugccaggacgagccgaucuccaacacgaaguuccugaccgagcgcgccguggccagcgucacccuggcgggcaacuccagccucugccccaucuccgggugggccguguacagcaaggacaacuccauccggaucggcagccgcggcgacguguucgucauccgggagcccuucaucuccugcagccaccuggagugccgcaccuucuuccugacgcagggggcccuccugaacgacaagcacuccaacggcaccgugaaggaccggagcccccaccgcacccugauguccugcccggugggggaggcccccagccccuacaacucccgguucgagagcgucgccuggagcgcguccgccugccacgacggcaccagcuggcucacgaucgggaucuccggccccgacaacggcgccguggccgugcugaaguacaacgggaucaucaccgacaccaucaagagcuggcgcaacaacaucaugcggacccaggaguccgagugcgcgugcgucaacggcagcugcuucacggugaugaccgacgggccguccagcggccaggccuccuacaagaucuucaagauggagaagggcaagguggucaagagcguggagcuggacgcccccaacuaccacuacgaggagugcuccugcuaccccgacgccggggagaucacgugcgugugccgcgacaacuggcacggcagcaaccggcccugggucuccuucaaccagaaccucgaguaccagaucggguacaucugcagcggcguguucggggacaacccgcgccccaacgacggcaccggcuccugcgggcccguguuccccaacggcgccuacggggucaagggcuucagcuucaaguacgggaacggcguguggaucggccggaccaaguccaccaacagccgcuccggguucgagaugaucugggacccgaacggcuggaccgggaccgacagcagcuucuccgugaagcaggacaucgucgcgaucacggacuggagcggcuacuccgggagcuucgugcagcaccccgagcugaccggccuggacugcauccggcccugcuucugggucgagcucauccgcggccggcccaaggaguccaccaucuggaccagcggguccagcaucuccuucugcggcgugaacggggacacggugagcugguccuggccggacggcgccgagcugcccuucaccaucgacaaguga

SEQ ID NO: 81051 - RNA, 1350 nt, Artificial Sequence; identical to SEQ ID NO: 81047
  derived and/or modified CDS sequence (opt1) from neuraminidase__InfluenzaA__ACT15323

SEQ ID NO: 81052 - RNA, 1350 nt, Artificial Sequence; identical to SEQ ID NO: 81047
  derived and/or modified CDS sequence (opt1) from neuraminidase__InfluenzaA__ACT15325

SEQ ID NO: 81053 - RNA, 1350 nt, Artificial Sequence
  derived and/or modified CDS sequence (opt1) from neuraminidase__InfluenzaA__ACT15327
augaaccccaaccagaagaucaucaccaucggcagcaucugcauggugaucgggaucgucucccugaugcuccagaucggcaacaugaucagcaucugggugucccacagcauccagaccgggaaccgcugccaggacgagccgaucuccaacacgaaguuccugaccgagaaggccguggccagcgucacccuggcgggcaacuccagccucugccccaucuccgggugggccguguacagcaaggacaacuccauccggaucggcagccgcggcgacguguucgucauccgggagcccuucaucuccugcagccaccuggagugccgcaccuucuuccugacgcagggggcccuccugaacgacaagcacuccaacggcaccgugaaggaccggagcccccaccgcacccugauguccugcccggugggggaggcccccagccccuacaacucccgguucgagagcgucgccuggagcgcguccgccugccacgacggcaccagcuggcucacgaucgggaucuccggccccgacaacggcgccguggccgugcugaaguacaacgggaucaucaccgacaccaucaagagcuggcgcaacaacaucaugcggacccaggaguccgagugcgcgugcgucaacggcagcugcuucacggugaugaccgacgggccguccagcggccaggccuccuacaagaucuucaagauggagaagggcaagguggucaagagcguggagcuggacgcccccaacuaccacuacgaggagugcuccugcuaccccgacgccggggagaucacgugcgugugccgcgacaacuggcacggcagcaaccggcccugggucuccuucaaccagaaccucgaguacaagaucggguacaucugcagcggcaucuucggggacaacccgcgccccaacgacggcaccggcuccugcgggcccguguuccccaacggcgccuacggggugaagggcuucagcuucaaguacgggaacggcgucuggaucggccggaccaaguccaccaacagccgcuccggguucgagaugaucugggacccgaacggcuggaccgggaccgacagcagcuucuccgugaagcaggacaucguggcgaucacggacuggagcggcuacuccgggagcuucguccagcaccccgagcugaccggccuggacugcauccggcccugcuucuggguggagcucauccgcggccggcccaaggaguccaccaucuggaccagcggguccagcaucuccuucugcggcgucaacggggacacggugagcugguccuggccggacggcgccgagcugcccuucaccaucgacaaguga

SEQ ID NO: 81054 - RNA, 1350 nt, Artificial Sequence
  derived and/or modified CDS sequence (opt1) from neuraminidase__InfluenzaA__ACT15331
augaaccccaaccagaagaucaucaccaucggcagcaucugcauggugaucgggaucgucucccugaugcuccagaucggcaacaugaucagcaucugggugucccacagcauccagaccgggaaccagugccaggacgagccgaucuccaacacgaaguuccugaccgagaaggccguggccagcgucacccuggcgggcaacuccagccucugccccaucuccgggugggccguguacagcaaggacaacuccauccgcaucggcagccggggcgacguguucgucauccgcgagcccuucaucuccugcagccaccuggagugccggaccuucuuccugacgcagggggcccuccugaacgacaagcacuccaacggcaccgugaaggaccgcagcccccaccggacccugauguccugcccggugggggaggcccccagccccuacaacucccgcuucgagagcgucgccuggagcgcguccgccugccacgacggcaccagcuggcucacgaucgggaucuccggccccgacaacggcgccguggccgugcugaaguacaacgggaucaucaccgacaccaucaagagcuggcggaacaacaucaugcgcacccaggaguccgagugcgcgugcgucaacggcagcugcuucacggugaugaccgacgggccguccagcggccaggccuccuacaagaucuucaagauggagaagggcaagguggucaagagcguggagcuggacgcccccaacuaccacuacgaggagugcuccugcuaccccgacgccggggagaucacgugcgugugccgggacaacuggcacggcagcaaccgccccugggucuccuucaaccagaaccucgaguaccagaucggguacaucugcagcggcguguucggggacaacccgcggcccaacgacggcaccggcuccugcgggcccguguuccccaacggcgccuacggggucaagggcuucagcuucaaguacgggaacggcguguggaucggccgcaccaaguccaccaacagccgguccggguucgagaugaucugggacccgaacggcuggaccgggaccgacagcagcuucuccgugaagcaggacaucgucgcgaucacggacuggagcggcuacuccgggagcuucgugcagcaccccgagcugaccggccuggacugcauccgccccugcuucugggucgagcucauccggggccgccccaaggaguccaccaucuggaccagcggguccagcaucuccuucugcggcgugaacagcgacacgguguccuggagcuggccggacggggccgagcugcccuucaccaucgacaaguga

SEQ ID NO: 81055 - RNA, 1350 nt, Artificial Sequence
  derived and/or modified CDS sequence (opt1) from neuraminidase__InfluenzaA__ACT15333
augaaccccaaccagaagaucaucaccaucggcagcaucugcauggugaucgggaucgucucccugaugcuccagaucggcaacaugaucagcaucugggugucccacagcauccagaccgggaaccagugccagggcgagccgaucuccaacacgaaguuccugaccgagaaggccguggccagcgucacccuggcggggaacuccagccucugccccaucuccggcugggccguguacagcaaggacaacuccauccgcaucggcagccgcggggacguguucgucauccgggagcccuucaucuccugcagccaccuggagugccggaccuucuuccugacgcagggcgcccuccugaacgacaagcacuccaacgggaccgugaaggaccgcagcccccaccggacccugauguccugcccggugggcgaggcccccagccccuacaacucccgcuucgagagcgucgccuggagcgcguccgccugccacgacgggaccagcuggcucacgaucggcaucuccggccccgacaacggggccguggccgugcugaaguacaacggcaucaucaccgacaccaucaagagcuggcggaacaacauccugcgcacccaggaguccgagugcgcgugcgucaacgggagcugcuucacggugaugaccgacggcccguccagcggccaggccuccuacaagaucuucaagauggagaaggggaagguggucaagagcguggagcucgacgcccccaacuaccacuacgaggagugcuccugcuaccccgacgccggcgagaucacgugcgugugccgggacaacuggcacgggagcaaccgccccugggucuccuucaaccagaaccuggaguaccagaucggcuacaucugcagcgggguguucggcgacaacccgcggcccaacgacggcaccggguccugcggccccguggucagcaacggggccuacggcgugaagggguucuccuucaaguacggcaacggcguguggaucgggcgcaccaagagcaccaacucccggagcggcuucgagaugaucugggaccccaacggguggaccggcaccgacagcuccuucagcgggaagcaggacaucgucgcgaucacggacugguccggcuacagcggcuccuucgugcagcacccggagcugaccgggcucgacugcauccgccccugcuucugggucgagcugauccggggccgccccaaggagagcaccaucuggaccuccgggagcuccaucagcuucugcggcgugaacuccgacacggugagcugguccuggcccgacggcgccgagcugccguucaccaucgacaaguga

SEQ ID NO: 81056 - RNA, 1350 nt, Artificial Sequence
  derived and/or modified CDS sequence (opt1) from neuraminidase__InfluenzaA__ACT15335
augaaccccaaccagaagaucaucaccaucggcagcaucugcauggugaucgggaucgucucccugaugcuccagaucggcaacaugaucagcaucugggugucccacagcauccagaccgggaaccgcugccaggacgagccgaucuccaacacgaaguuccugaccgagaaggccguggccagcgucacccuggcgggcaacuccagccucugccccaucuccgggugggccguguacagcaaggacaacuccauccggaucggcagccgcggcgacguguucgucauccgggagcccuucaucuccugcagccaccuggagugccgcaccuucuuccugacgcagggggcccuccugaacgacaagcacuccaacggcaccgugaaggaccggagcccccaccgcacccugauguccugcccggugggggaggcccccagccccuacaacucccgguucgagagcgucgccuggagcgcguccgccugccacgacggcaccagcuggcucacgaucgggaucuccggccccgacaacggcgccguggccgugcugaaguacaacgggaucaucaccgacaccaucaagagcuggcgcaacaacaucaugcggacccaggaguccgagugcgcgugcgucaacggcagcugcuucacggugaugaccgacgggccguccagcggccaggccuccuacaagaucuucaagauggagaagggcaagguggucaagagcguggagcuggacgcccccaacuaccacuacgaggagugcuccugcuaccccgacgccggggagaucacgugcgugugccgcgacaacuggcacggcagcaaccggcccugggucuccuucaaccagaaccucgaguacaagaucggguacaucugcagcggcaucuucggggacaacccgcgccccaacgacggcaccggcuccugcgggcccgugcugcccaacggcgccuacggggugaagggcuucagcuucaaguacgggaacggcgucuggaucggccggaccaaguccaccaacagccgcuccggguucgagaugaucugggacccgaacggcuggaccgggaccgacagcagcuucuccgugaagcaggacaucguggcgaucacggacuggagcggcuacuccgggagcuucguccagcaccccgagcugaccggccucgacugcauccggcccugcuucuggguggagcugauccgcggccggcccaaggaguccaccaucuggaccagcggguccagcaucuccuucugcggcgucaacggggacacggugagcugguccuggccggacggcgccgagcugcccuucaccaucgacaaguga

SEQ ID NO: 81057 - RNA, 1350 nt, Artificial Sequence
  derived and/or modified CDS sequence (opt1) from neuraminidase__InfluenzaA__ACT15337
augaaccccaaccagaagaucaucaccaucggcagcaucugcauggugaucgggaucgucucccugaugcuccagaucggcaacaugaucagcaucugggugucccacagcauccagaccgggaaccagugccaggacgagccgaucuccaacacgaaguuccugaccgagaaggccguggccagcgucacccuggcgggcaacuccagccucugccccaucuccgggugggccguguacagcaaggacaacuccauccgcaucggcagccggggcgacguguucgucauccgcgagcccuucaucuccugcagccaccuggagugccggaccuucuuccugacgcagggggcccuccugaacgacaagcacuccaacggcaccgugaaggaccgcagcccccaccggacccugauguccugcccggugggggaggcccccagccccuacaacucccgcuucgagagcgucgccuggagcgcguccgccugccacgacggcaccagcuggcucacgaucgggaucuccggccccgacaacggcgccguggccgugcugaaguacaacgggaucaucaccgacaccaucaagagcuggcggaacaacaucaugcgcacccaggaguccgagugcgcgugcgucaacggcagcugcuucacggugaugaccgacgggccguccagcggccaggccuccuacaagaucuucaagauggagaagggcaagguggucaagagcguggagcuggacgcccccaacuaccacuacgaggagugcuccugcuaccccgacgccggggagaucacgugcgugugccgggacaacuggcacggcagcaaccgccccugggucuccuucaaccagaaccucgaguaccagaucggguacaucugcagcggcguguucggggacaacccgcggcccaacgacggcaccggcuccugcgggcccguguuccccaacggcgccuacggggucaagggcuucagcuucaaguacgggaacggcguguggaucggccgcaccaaguccaccaacagccgguccggguucgagaugaucugggacccgaacggcuggaccgggaccgacagcagcuucuccgugaagcaggacaucgucgcggugacggacuggagcggcuacuccgggagcuucguccagcaccccgagcugaccggccuggacugcauccgccccugcuucuggguggagcucauccggggccgccccaaggaguccaccaucuggaccagcggguccagcaucuccuucugcggcgugaacggggacacggucagcugguccuggccggacggcgccgagcugcccuucaccaucgacaaguga

SEQ ID NO: 81058 - RNA, 1350 nt, Artificial Sequence; identical to SEQ ID NO: 81047
  derived and/or modified CDS sequence (opt1) from neuraminidase__InfluenzaA__ACT15341

SEQ ID NO: 81059 - RNA, 1350 nt, Artificial Sequence
  derived and/or modified CDS sequence (opt1) from neuraminidase__InfluenzaA__ACT15344
augaaccccaaccagaagaucaucaccaucggcagcaucugcauggugaucgggaucgucucccugaugcuccagaucggcaacaugaucagcaucugggugucccacagcauccagaccgggaaccagugccaggacgagccgaucuccaacacgaaguuccugaccgagaaggccguggccagcgucacccuggcgggcaacuccagccucugccccaucuccgggugggccguguacagcaaggacaacuccauccgcaucggcagccggggcgacguguucgucauccgcgagcccuucaucuccugcagccaccuggagugccggaccuucuuccugacgcagggggcccuccugaacgacaagcacuccaacggcaccgugaaggaccgcagcccccaccggacccugauguccugcccggugggggaggcccccagccccuacaacucccgcuucgagagcgucgccuggagcgcguccgccugccacgacggcaccagcuggcucacgaucgggaucuccggccccgacaacggcgccguggccgugcugaaguacaacgggaucaucaccgacaccaucaagagcuggcgguccaacaucaugcgcacccaggagagcgagugcgcgugcgucaacggcuccugcuucacggugaugaccgacgggccgagcuccggccaggccagcuacaagaucuucaagauggagaagggcaagguggucaaguccguggagcuggacgcccccaacuaccacuacgaggagugcagcugcuaccccgacgccggggagaucacgugcgugugccgggacaacuggcacggcuccaaccgccccugggucagcuucaaccagaaccucgaguaccagaucggguacaucugcuccggcguguucggggacaacccgcggcccaacgacggcaccggcagcugcgggcccguguuccccaacggcgccuacggggucaagggcuucuccuucaaguacgggaacggcguguggaucggccgcaccaagagcaccaacucccggagcggguucgagaugaucugggacccgaacggcuggaccgggaccgacagcuccuucagcgugaagcaggacaucgucgcgaucacggacugguccggcuacagcggguccuucgugcagcaccccgagcugaccggccuggacugcauccgccccugcuucugggucgagcucauccggggccgccccaaggagagcaccaucuggaccuccgggagcuccaucagcuucugcggcgugaacggggacacgguguccuggagcuggccggacggcgccgagcugcccuucaccaucgacaaguga

SEQ ID NO: 81060 - RNA, 1350 nt, Artificial Sequence
  derived and/or modified CDS sequence (opt1) from neuraminidase__InfluenzaA__ACT15346
augaaccccaaccagaagaucaucaccaucggcagcaucugcauggugaucgggaucgucucccugaugcuccagaucggcaacaugaucagcaucugggugucccacagcauccagaccgggaaccagugccaggacgagccgaucuccaacacgaaguuccugaccgagaaggccguggccagcgucacccuggcgggcaacuccagccucugccccaucuccgggugggccguguacagcaaggacaacaacauccgcaucggcucccggggcgacguguucgucauccgcgagcccuucaucagcugcucccaccuggagugccggaccuucuuccugacgcagggggcccuccugaacgacaagcacagcaacggcaccgugaaggaccgcagcccccaccggacccugauguccugcccggugggggaggcccccucccccuacaacagccgcuucgaguccgucgccuggagcgcgagcgccugccacgacggcaccuccuggcucacgaucgggaucagcggccccgacaacggcgccguggccgugcugaaguacaacgggaucaucaccgacaccaucaaguccuggcggaacaacaucaugcgcacccaggagagcgagugcgcgugcgucaacggcuccugcuucacggugaugaccgacgggccgagcuccggccaggccagcuacaagaucuucaagauggagaagggcaagguggucaaguccguggagcuggacgcccccaacuaccacuacgaggagugcagcugcuaccccgacgccggggagaucacgugcgugugccgggacaacuggcacggcuccaaccgccccugggucagcuucaaccagaaccucgaguaccagaucggguacaucugcuccggcguguucggggacaacccgcggcccaacgacggcaccggcagcugcgggcccguguuccccaacggcgccuacggggucaagggcuucuccuucaaguacgggaacggcguguggaucggccgcaccaagagcaccaacucccggagcggguucgagaugaucugggacccgaacggcuggaccgggaccgacuccagcuucagcgugaagcaggacaucgucgcgaucacggacugguccggcuacagcggguccuucgugcagcaccccgagcugaccggccuggacugcauccgccccugcuucugggucgagcucauccggggccgccccaaggagagcaccaucuggaccuccgggagcuccaucagcuucugcggcgugaacggggacacgguguccuggagcuggccggacggcgccgagcugcccuucaccaucgacaaguga

SEQ ID NO: 81061 - RNA, 1350 nt, Artificial Sequence
  derived and/or modified CDS sequence (opt1) from neuraminidase__InfluenzaA__ACT15348
augaaccccaaccagaagaucaucaccaucggcagcaucugcauggugaucgggaccgucucccugaugcuccagaucggcaacaugaucagcaucugggugucccacagcauccagacggggaaccagugccagggcgagccgaucuccaacaccaaguuccugaccgagaaggccguggccagcgucacccuggcggggaacuccagccucugccccaucuccggcugggccguguacagcaaggacaacuccauccgcaucggcagccgcggggacguguucgucauccgggagcccuucaucuccugcagccaccuggagugccggacguucuuccugacccagggcgcccuccugaacgacaagcacuccaacgggaccgugaaggaccgcagcccccaccggacccugauguccugcccggugggcgaggcccccagccccuacaacucccgcuucgagagcgucgccuggagcgcguccgccugccacgacgggacgagcuggcucaccaucggcaucuccggccccgacaacggggccguggccgugcugaaguacaacggcaucaucaccgacaccaucaagagcuggcggaacaacauccugcgcacgcaggaguccgagugcgcgugcgucaacgggagcugcuucaccgugaugaccgacggcccguccagcggccaggccuccuacaagaucuucaagauggagaaggggaagguggucaagagcguggagcucgacgcccccaacuaccacuacgaggagugcuccugcuaccccgacgccggcgagaucacgugcgugugccgggacaacuggcacgggagcaaccgccccugggucuccuucaaccagaaccuggaguaccagaucggcuacaucugcagcgggguguucggcgacaacccgcggcccaacgacggcaccggguccugcggccccguggucagcaacggggccuacggcgugaagggguucuccuucaaguacggcaacggcguguggaucgggcgcaccaagagcaccaacucccggagcggcuucgagaugaucugggaccccaacggguggaccggcacggacagcuccuucagcgggaagcaggacaucgucgcgaucaccgacugguccggcuacagcggcuccuucgugcagcacccggagcugaccgggcucgacugcauccgccccugcuucugggucgagcugauccggggccgccccaaggagagcaccaucuggacguccgggagcuccaucagcuucugcggcgugaacuccgacaccgugagcugguccuggcccgacggcgccgagcugccguucaccaucgacaaguga

SEQ ID NO: 81062 - RNA, 1350 nt, Artificial Sequence
  derived and/or modified CDS sequence (opt1) from neuraminidase__InfluenzaA__ACT15350
augaaccccaaccagaagaucaucaccaucggcagcaucugcauggugaucgggaucgucucccugaugcuccagaucggcaacaugaucagcaucugggugucccacagcauccagaccgggaaccgcugccaggacgagccgaucuccaacacgaaguuccugaccgagaaggccguggccagcgucacccuggcgggcaacuccagccucugccccaucuccgggugggccguguacagcaaggacaacuccauccggaucggcagccgcggcgacguguucgucauccgggagcccuucaucuccugcagccaccuggagugccgcaccuucuuccugacgcagggggcccuccugaacgacaagcacuccaacggcaccgugaaggaccggagcccccaccgcacccugauguccugcccggugggggaggcccccagccccuacaacucccgguucgagagcgucgccuggagcgcguccgccugccacgacggcaccagcuggcucacgaucgggaucuccggccccgacaacggcgccguggccgugcugaaguacaacgggaucaucaccgacaccaucaagagcuggcgcaacaacaucaugcggacccaggaguccgagugcgcgugcgucaacggcagcugcuucacggugaugaccgacgggccguccagcggccaggccuccuacaagaucuucaagauggagaagggcaagguggucaagagcguggagcuggacgcccccaacuaccacuacgaggagugcuccugcuaccccgacgccggggagaucacgugcgugugccgcgacaacuggcacggcagcaaccggcccugggucuccuucaaccagaaccucgaguacaagaucggguacaucugcagcggcaucuucggggacaacccgcgccccaacgacggcaccggcuccugcgggcccguguuccccaacggcgccuacggggugaagggcuucagcuucaaguacgggaacggcgucuggaucggccggaccaaguccaccaacagccgcuccggguucgagaugaucugggacccgaacggcuggaccgggaccgacagcagcuucuccgugaagcaggacaucguggcgaucacggacuggagcggcuacuccgggagcuucguccagcaccccgagcugaccggccuggacugcauccggcccugcuucuggguggagcucauccgcggccggcccaaggagcgcaccaucuggaccuccgggagcuccaucagcuucugcggcgucaacggggacacgguguccuggagcuggccggacggcgccgagcugcccuucaccaucgacaaguga

SEQ ID NO: 81063 - RNA, 1350 nt, Artificial Sequence
  derived and/or modified CDS sequence (opt1) from neuraminidase__InfluenzaA__ACT15352
augaaccccaaccagaagaucaucaccaucggcagcaucugcauggugaucgggaucgucucccugaugcuccagaucggcaacaugaucagcaucugggugucccacagcauccagaccgggaaccagugccaggacgagccgaucuccaacacgaaguuccugaccgagaaggccguggccagcgucacccuggcgggcaacuccagccucugccccaucuccgggugggccguguacagcaaggacaacuccauccgcaucggcagccggggcgacguguucgucauccgcgagcccuucaucuccugcagccaccuggagugccggaccuucuuccugacgcagggggcccuccugaacgacaagcacuccaacggcaccgugaaggaccgcagcccccaccggacccugauguccugcccggugggggaggcccccagccccuacaacucccgcuucgagagcgucgccuggagcgcguccgccugccacgacggcaccagcuggcucacgaucgggaucuccggccccgacaacggcgccguggccgugcugaaguacaacgggaucaucaccgacaccaucaagagcuggcggaacaacauccugcgcacccaggaguccgagugcgcgugcgucaacggcagcugcuucacggugaugaccgacgggccguccagcggccaggccuccuacaagaucuucaagauggagaagggcaagguggucaagagcguggagcucgacgcccccaacuaccacuacgaggagugcuccugcuaccccgacgccggggagaucacgugcgugugccgggacaacuggcacggcagcaaccgccccugggucuccuucaaccagaaccuggaguaccagaucggguacaucugcagcggcguguucggggacaacccgcggcccaacgacggcaccggcuccugcgggcccguggucagcaacggcgccuacggggugaagggcuucuccuucaaguacgggaacggcguguggaucggccgcaccaagagcaccaacucccggagcggguucgagaugaucugggaccccaacggcuggaccgggaccgacagcuccuucagcggcaagcaggacaucgucgcgaucacggacugguccggguacagcggcuccuucgugcagcacccggagcugaccggccucgacugcauccgccccugcuucugggucgagcugauccgggggcgccccaaggagagcaccaucuggaccuccggcagcuccaucagcuucugcggggugaacuccgacacggugagcugguccuggcccgacggcgccgagcugccguucaccaucgacaaguga

SEQ ID NO: 81064 - RNA, 1350 nt, Artificial Sequence
  derived and/or modified CDS sequence (opt1) from neuraminidase__InfluenzaA__ACT15354
augaaccccagccagaagaucaucaccaucggcuccaucugcauggugaucgggaucgucagccugaugcuccagaucggcaacaugaucuccaucuggaucagccacuccauccagaccgggaaccagugccaggacgagccgaucagcaacacgaaguuccugaccgagaaggccguggccuccgugacccuggcgggcaacagcucccucugccccaucagcgggugggccgucuacuccaaggacaacagcauccgcaucggcucccggggcgacguguucgugauccgcgagcccuucaucagcugcucccaccuggagugccggaccuucuuccugacgcagggggcccuccugaacgacaagcacagcaacggcaccgucaaggaccgcagcccccaccggacccugauguccugcccggugggggaggcccccucccccuacaacagccgcuucgagagcguggccugguccgcgagcgccugccacgacggcaccuccuggcucacgaucgggaucagcggccccgacaacggcgccgucgccgugcugaaguacaacgggaucaucaccgacaccaucaaguccuggcggaacaacaucaugcgcacccaggagagcgagugcgcgugcgugaacggcuccugcuucacggucaugaccgacgggccgagcuccggccaggccagcuacaagaucuucaagauggagaagggcaagguggugaaguccgucgagcuggacgcccccaacuaccacuacgaggagugcagcugcuaccccgacgccggggagaucacgugcgugugccgggacaacuggcacggcuccaaccgccccugggugagcuucaaccagaaccucgaguaccagaucggguacaucugcuccggcgucuucggggacaacccgcggcccaacgacggcaccggcagcugcgggcccguguuccccaacggcgccuacggggugaagggcuucuccuucaaguacgggaacggcgucuggaucggccgcaccaagagcaccaacucccggagcggguucgagaugaucugggacccgaacggcuggaccgggaccgacagcuccuucagcgugaagcaggacaucguggcgaucacggacugguccggcuacagcggguccuucguccagcaccccgagcugaccggccuggacugcauccgccccugcuucuggguggagcucauccggggccgccccaaggagagcaccaucuggaccuccgggagcuccaucagcuucugcggcgucaacggggacacgguguccuggagcuggccggacggcgccgagcugcccuucaccaucgacaaguga

SEQ ID NO: 81065 - RNA, 1350 nt, Artificial Sequence
  derived and/or modified CDS sequence (opt1) from neuraminidase__InfluenzaA__ACT15356
augaaccccaaccagaagaucaucaccaucggcagcaucugcauggugaucgggaucgucucccugaugcuccagaucggcaacaugaucagcaucugggugucccacagcauccagaccgggaaccagugccaggacgagccgaucuccaacacgaaguuccugaccgagaaggccguggccagcgucacccuggcgggcaacuccagccucugccccaucuccgggugggccguguacagcaaggacaacuccauccgcaucggcagccggggcgacguguucgucauccgcgagcccuucaucuccugcagccaccuggagugccggaccuucuuccugacgcagggggcccuccugaacgacaagcacuccaacggcaccgugaaggaccgcagcccccaccggacccugauguccugcccggugggggaggcccccagccccuacaacucccgcuucgagagcgucgccuggagcgcguccgccugccacgacggcaccagcuggcucacgaucgggaucuccggccccgacaacggcgccguggccgugcugaaguacaacgggaucaucaccgacaccaucaagagcuggcggaacaacauccugcgcacccaggaguccgagugcgcgugcgucaacggcagcugcuucacggugaugaccgacgggccguccagcggccaggccuccuacaagaucuucaagauggagaagggcaagguggucaagagcguggagcucgacgcccccaacuaccacuacgaggagugcuccugcuaccccgacgccggggagaucacgugcgugugccgggacaacuggcacggcagcaaccgccccugggucuccuucaaccagaaccuggaguaccagaucggguacaucugcagcggcguguucggggacaacccgcggcccaacgacggcaccggcuccugcgggcccguguucagcaacggcgccuacggggucaagggcuucuccuucaaguacgggaacggcguguggaucggccgcaccaagagcaccaacucccggagcggguucgagaugaucugggaccccaacggcuggaccgggaccgacagcuccuucagcggcaagcaggacaucguggcgaucacggacugguccggguacagcggcuccuucguccagcacccggagcugaccggccucgacugcauccgccccugcuucuggguggagcugauccgggggcgccccaaggagagcaccaucuggaccuccggcagcuccaucagcuucugcggggucaacuccgacacggugagcugguccuggcccgacggcgccgagcugccguucaccaucgacaaguga

SEQ ID NO: 81066 - RNA, 1350 nt, Artificial Sequence
  derived and/or modified CDS sequence (opt1) from neuraminidase__InfluenzaA__ACT15358
augaaccccaaccagaagaucaucaccaucggcagcaucugcauggugaucgggaucgucucccugaugcuccagaucggcaacaugaucagcaucugggugucccacagcauccagaccgggaaccgcugccaggacgagccgaucuccaacacgaaguuccugaccgagaaggccguggccagcgucacccuggcgggcaacuccagccucugccccaucuccgggugggccguguacagcaaggacaacuccauccggaucggcagccgcggcgacguguucgucauccgggagcccuucaucuccugcagccaccuggagugccgcaccuucuuccugacgcacggggcccuccugaacgacaagcacuccaacggcaccgugaaggaccggagcccccaccgcacccugauguccugcccggugggggaggcccccagccccuacaacucccgguucgagagcgucgccuggagcgcguccgccugccacgacggcaccagcuggcucacgaucgggaucuccggccccgacaacggcgccguggccgugcugaaguacaacgggaucaucaccgacaccaucaagagcuggcgcaacaacaucaugcggacccaggaguccgagugcgcgugcgucaacggcagcugcuucacggugaugaccgacgggccguccagcggccaggccuccuacaagaucuucaagauggagaagggcaagguggucaagagcguggagcuggacgcccccaacuaccacuacgaggagugcuccugcuaccccgacgccggggagaucacgugcgugugccgcgacaacuggcacggcagcaaccggcccuggaucuccuucaaccagaaccucgaguacaagaucggguacaucugcagcggcaucuucggggacaacccgcgccccaacgacggcaccggcuccugcgggcccguccugcccaacggcgccuacggggugaagggcuucagcuucaaguacgggaacggcguguggaucggccggaccaaguccaccaacagccgcuccggguucgagaugaucugggacccgaacggcuggaccgggaccgacagcagcuucuccgucaagcaggacaucguggcgaucacggacuggagcggcuacuccgggagcuucgugcagcaccccgagcugaccggccucgacugcauccggcccugcuucugggucgagcugauccgcggccggcccaaggaguccaccaucuggaccagcggguccagcaucuccuucugcggcgugaacggggacacggucagcugguccuggccggacggcgccgagcugcccuucaccaucgacaaguga

SEQ ID NO: 81067 - RNA, 1410 nt, Artificial Sequence; identical to SEQ ID NO: 78351
  derived and/or modified CDS sequence (opt1) from neuraminidase__InfluenzaA__ACT21515

SEQ ID NO: 81068 - RNA, 1410 nt, Artificial Sequence
  derived and/or modified CDS sequence (opt1) from neuraminidase__InfluenzaA__ACT21516
augaaccccaaccagaagaucaucaccaucggcagcgugucccugaccaucagcacgaucugcuucuucaugcagaucgccauccucaucaccaccgucacccugcacuucaagcaguacgaguucaacuccccgcccaacaaccaggugaugcugugcgagcccacgaucaucgagcgcaacaucaccgagaucgccuaccucaccaacaccacgaucgagaaggagaucugccccaagcuggcggaguaccggaacuggagcaagccgcagugcgacaucaccggguucgcccccuucuccaaggacaacagcauccgccuguccgccggcggggacaucugggugacccgggagcccuacgucagcugcgaccccgacaagugcuaccaguucgcccucggccaggggaccacgcugaacaacgugcacuccaacgacaccgugcacgaccgcaccccguaccggacccugcucaugaacgagcugggcguccccuuccaccugggcacgaagcaggucugcguggccuggagcuccagcuccugccacgacgggaaggcguggcuccacgugugcgugaccggcgacgagaagaacgccaccgccagcuucaucuacaacgggcgccugguggacuccaucgucagcugguccaaggagauccugcggacccaggagagcgagugcgugugcaucaacggcacgugcaccguggucaugaccgacggguccgccagcggcaaggcggacaccaagauccucuucaucgaggagggcaagaucgugcacacgagcacccuguccgggagcgcccagcacguggaggagugcuccugcuacccccgcuaccccggcguccggugcgugugccgcgacaacuggaaggggagcaaccggccgaucguggacaucaacaucaaggacuacuccaucgucagcuccuacgugugcagcggccuggugggcgacacgccccgcaagaacgacuccagcuccagcucccacugccucgaccccaacaacgaggagggcgggcacggggucaagggcugggccuucgacgacgggaacgacguguggaugggccggaccaucagcgagaagcugcgcuccggcuacgagaccuucaaggucaucgagggguggagcaaccccaacuccaagcugcagaucaaccgccaggugaucguggaccggggcaaccggagcggguacuccggcaucuucagcgucgagggcaagagcugcaucaaccgcugcuucuacguggagcucauccgggggcgcaaggaggagaacgaggugcuguggaccuccaacagcaucgucguguucugcggcaccuccgggaccuacggcacggggagcuggccggacggcgccgacaucaaccugaugcccaucuga

SEQ ID NO: 81069 - RNA, 1410 nt, Artificial Sequence
  derived and/or modified CDS sequence (opt1) from neuraminidase__InfluenzaA__ACT21517
augaaccccaaccagaagaucaucaccaucggcagcgugucccugaccaucagcacgaucugcuucuucaugcagaucgccauccucaucaccaccgucacccugcacuucaagcaguacgaguucaacuccccgcccaacaaccaggugaugcugugcgagcccacgaucaucgagcgcaacaucaccgagaucguguaccucaccaacaccacgaucgagaaggagaucugccccaagcuggccgaguaccggaacuggagcgagccgcagugcgacaucaccggguucgcgcccuucuccaaggacaacagcauccgccuguccgccggcggggacaucugggucacccgggagcccuacgugagcugcgaccccgacaagugcuaccaguucgcccucggccaggggaccacgcugaacaacgugcacuccaacgacaccguccacgaccgcaccccguaccggacccuggugaugaacgagcucggcgugcccuuccaccugggcacgaagcaggucugcaucgccuggagcuccagcuccugccacgacgggaaggccuggcugcacgugugcgugaccggcgacgacaagaacgcgaccgccagcuucaucuacaacgggcgccucgucgacuccaucgugagcugguccaaggagauccugcggacccaggagagcgagugcgugugcaucaacggcacgugcaccgucgugaugaccgacggguccgccagcggcaaggccgacaccaagauccuguucaucgaggagggcaagaucgugcacacgagcacccucuccgggagcgcgcagcacgucgaggagugcuccugcuacccccgcuaccccggcgugcggugcgugugccgcgacaacuggaaggggagcaaccggccgaucgucgacaucaacaucaaggacuacuccaucgugagcuccuacgugugcagcggccuggccggcgacacgccccgcaagaacgacuccagcuccagcucccacugccuggaccccaacaacgaggagggcgggcacggggucaagggcugggccuucgacgacgggaacgacguguggaugggccggaccaucagcgagaagcuccgcuccggcuacgagaccuucaaggucaucgagggguggagcaaccccaacuccaagcugcagaucaaccgccaggugaucguggaccggggcaaccggagcggguacuccggcaucuucagcgucgagggcaagagcugcaucaaccgcugcuucuacguggagcugauccgggggcgcaaggaggagaccgaggugcucuggaccuccaacagcaucgucguguucugcggcaccuccgggacguacggcaccgggagcuggccggacggcgccgacaucaaccugaugcccaucuga

SEQ ID NO: 81070 - RNA, 1410 nt, Artificial Sequence; identical to SEQ ID NO: 80762
  derived and/or modified CDS sequence (opt1) from neuraminidase__InfluenzaA__ACT21574

SEQ ID NO: 81071 - RNA, 1410 nt, Artificial Sequence; identical to SEQ ID NO: 80762
  derived and/or modified CDS sequence (opt1) from neuraminidase__InfluenzaA__ACT21585

SEQ ID NO: 81072 - RNA, 1410 nt, Artificial Sequence; identical to SEQ ID NO: 80762
  derived and/or modified CDS sequence (opt1) from neuraminidase__InfluenzaA__ACT22011

SEQ ID NO: 81073 - RNA, 1410 nt, Artificial Sequence; identical to SEQ ID NO: 80762
  derived and/or modified CDS sequence (opt1) from neuraminidase__InfluenzaA__ACT22012

SEQ ID NO: 81074 - RNA, 1410 nt, Artificial Sequence; identical to SEQ ID NO: 80762
  derived and/or modified CDS sequence (opt1) from neuraminidase__InfluenzaA__ACT22013

SEQ ID NO: 81075 - RNA, 1410 nt, Artificial Sequence; identical to SEQ ID NO: 80762
  derived and/or modified CDS sequence (opt1) from neuraminidase__InfluenzaA__ACT22014

SEQ ID NO: 81076 - RNA, 1410 nt, Artificial Sequence; identical to SEQ ID NO: 80752
  derived and/or modified CDS sequence (opt1) from neuraminidase__InfluenzaA__ACT22015

SEQ ID NO: 81077 - RNA, 1410 nt, Artificial Sequence
  derived and/or modified CDS sequence (opt1) from neuraminidase__InfluenzaA__ACT22016
augaaccccaaccagaagaucaucaccaucggcagcgugugcaugaccaucgggauggccaaccugauccuccagaucggcaacaucaucuccaucuggaucagccacuccauccagcuggggaaccagaaccagaucgagacgugcaaccagagcgucaucaccuacgagaacaacaccugggugaaccagaccuacgugaacaucuccaacacgaacuucgccgcgggccagagcgucguguccgugaagcuggccgggaacagcucccucugcccggucagcggcugggccaucuacuccaaggacaacagcauccgcaucggcuccaagggggacguguucgugauccgggagcccuucaucagcugcagcccccuggagugccgcaccuucuuccugacccagggcgcccuccugaacgacaagcacuccaacgggaccaucaaggaccggucccccuaccgcacgcugaugagcugcccgaucggcgagguccccucccccuacaacagccgguucgagagcguggccugguccgcgagcgccugccacgacgggaucaacuggcucaccaucggcaucuccggccccgacaacggggccguggccguccugaaguacaacggcaucaucaccgacaccaucaagagcuggcgcaacaacauccugcggacgcaggaguccgagugcgcgugcgugaacgggagcugcuucaccgugaugaccgacggcccguccaacggccaggccagcuacaagaucuuccgcaucgagaaggggaagaucgucaaguccguggagaugaacgcccccaacuacuacuacgaggagugcagcugcuaccccgacuccagcgagaucacgugcgugugccgggacaacuggcacggcuccaaccgccccugggucagcuucaaccagaaccucgaguaccagaucggguacaucugcuccggcaucuucggggacaacccgcggcccaacgacaagaccggcagcugcggccccguguccagcaacggggccaacggcgugaagggguucuccuucaaguacggcaacggggucuggaucggccgcaccaagagcaucagcucccggaacggcuucgagaugaucugggaccccaacggguggaccggcaccgacaacaacuucagcaucaagcaggacaucguggggaucaacgagugguccggcuacagcggguccuucgugcagcacccggagcugacgggccuggacugcauccgccccugcuucugggucgagcucauccggggccgccccaaggagaacaccaucuggaccagcggguccagcaucuccuucugcggcgugaacagcgacaccgucgggugguccuggcccgacggcgccgagcugccguucacgaucgacaaguga

SEQ ID NO: 81078 - RNA, 1410 nt, Artificial Sequence; identical to SEQ ID NO: 80762
  derived and/or modified CDS sequence (opt1) from neuraminidase__InfluenzaA__ACT22017

SEQ ID NO: 81079 - RNA, 1410 nt, Artificial Sequence; identical to SEQ ID NO: 80762
  derived and/or modified CDS sequence (opt1) from neuraminidase__InfluenzaA__ACT22018

SEQ ID NO: 81080 - RNA, 1410 nt, Artificial Sequence; identical to SEQ ID NO: 80752
  derived and/or modified CDS sequence (opt1) from neuraminidase__InfluenzaA__ACT22506

SEQ ID NO: 81081 - RNA, 1410 nt, Artificial Sequence; identical to SEQ ID NO: 80762
  derived and/or modified CDS sequence (opt1) from neuraminidase__InfluenzaA__ACT22511

SEQ ID NO: 81082 - RNA, 1410 nt, Artificial Sequence; identical to SEQ ID NO: 80762
  derived and/or modified CDS sequence (opt1) from neuraminidase__InfluenzaA__ACT33121

SEQ ID NO: 81083 - RNA, 1410 nt, Artificial Sequence; identical to SEQ ID NO: 80762
  derived and/or modified CDS sequence (opt1) from neuraminidase__InfluenzaA__ACT33124

SEQ ID NO: 81084 - RNA, 1410 nt, Artificial Sequence; identical to SEQ ID NO: 80762
  derived and/or modified CDS sequence (opt1) from neuraminidase__InfluenzaA__ACT33126

SEQ ID NO: 81085 - RNA, 1410 nt, Artificial Sequence; identical to SEQ ID NO: 80752
  derived and/or modified CDS sequence (opt1) from neuraminidase__InfluenzaA__ACT35526

SEQ ID NO: 81086 - RNA, 1410 nt, Artificial Sequence; identical to SEQ ID NO: 80762
  derived and/or modified CDS sequence (opt1) from neuraminidase__InfluenzaA__ACT36507

SEQ ID NO: 81087 - RNA, 1410 nt, Artificial Sequence; identical to SEQ ID NO: 80762
  derived and/or modified CDS sequence (opt1) from neuraminidase__InfluenzaA__ACT36672

SEQ ID NO: 81088 - RNA, 1410 nt, Artificial Sequence; identical to SEQ ID NO: 80762
  derived and/or modified CDS sequence (opt1) from neuraminidase__InfluenzaA__ACT36673

SEQ ID NO: 81089 - RNA, 1410 nt, Artificial Sequence; identical to SEQ ID NO: 80762
  derived and/or modified CDS sequence (opt1) from neuraminidase__InfluenzaA__ACT36674

SEQ ID NO: 81090 - RNA, 1410 nt, Artificial Sequence; identical to SEQ ID NO: 80762
  derived and/or modified CDS sequence (opt1) from neuraminidase__InfluenzaA__ACT36675

SEQ ID NO: 81091 - RNA, 1410 nt, Artificial Sequence; identical to SEQ ID NO: 80762
  derived and/or modified CDS sequence (opt1) from neuraminidase__InfluenzaA__ACT36677

SEQ ID NO: 81092 - RNA, 1410 nt, Artificial Sequence
  derived and/or modified CDS sequence (opt1) from neuraminidase__InfluenzaA__ACT36678
augaaccccaaccagaagaucaucaccaucggcagcgugugcaugaccaucgggauggccaaccugauccuccagaucggcaacaucaucuccaucuggaucagccacuccauccagcuggggaaccagaaccagaucgagacgugcaaccagagcgucaucaccuacgagaacaacaccugggugaaccagaccuacgugaacaucuccaacacgaacuucgccgcgcgccagagcgucguguccgugaagcuggccggcaacagcucccucugcccggucagcgggugggccaucuacuccaaggacaacagcgugcggaucggcuccaagggcgacguguucgucauccgcgagcccuucaucagcugcagcccccuggagugccggaccuucuuccugacccagggggcccuccugaacgacaagcacuccaacggcaccaucaaggaccgcucccccuaccggacgcugaugagcugcccgaucggggaggugcccucccccuacaacagccgcuucgagagcguggccugguccgcgagcgccugccacgacggcaucaacuggcucaccaucgggaucuccggccccgacaacggcgccgucgccgugcugaaguacaacgggaucaucaccgacaccaucaagagcuggcggaacaacauccugcgcacgcaggaguccgagugcgcgugcgugaacggcagcugcuucaccgucaugaccgacgggccguccaacggccaggccagcuacaagaucuuccggaucgagaagggcaagaucgugaaguccguggagaugaacgcccccaacuaccacuacgaggagugcagcugcuaccccgacuccagcgagaucacgugcgucugccgcgacaacuggcacggguccaaccggcccugggugagcuucaaccagaaccucgaguaccagaucggcuacaucugcuccgggaucuucggcgacaacccgcgccccaacgacaagaccgggagcugcggccccguguccagcaacggcgccaacggggucaagggcuucuccuucaaguacgggaacggcguguggaucgggcggaccaagagcaucagcucccgcaacggcuucgagaugaucugggaccccaacggcuggaccgggaccgacaacaacuucagcaucaagcaggacaucgugggcaucaacgagugguccggguacagcggcuccuucguccagcacccggagcugacggggcuggacugcauccggcccugcuucuggguggagcucauccgcggccggcccaaggagaacaccaucuggaccagcggcuccagcaucuccuucugcggggucaacagcgacaccgugggcugguccuggcccgacggggccgagcugccguucacgaucgacaaguga

SEQ ID NO: 81093 - RNA, 1410 nt, Artificial Sequence; identical to SEQ ID NO: 80752
  derived and/or modified CDS sequence (opt1) from neuraminidase__InfluenzaA__ACT36679

SEQ ID NO: 81094 - RNA, 1410 nt, Artificial Sequence; identical to SEQ ID NO: 80762
  derived and/or modified CDS sequence (opt1) from neuraminidase__InfluenzaA__ACT36680

SEQ ID NO: 81095 - RNA, 1410 nt, Artificial Sequence; identical to SEQ ID NO: 80752
  derived and/or modified CDS sequence (opt1) from neuraminidase__InfluenzaA__ACT36682

SEQ ID NO: 81096 - RNA, 1410 nt, Artificial Sequence; identical to SEQ ID NO: 80752
  derived and/or modified CDS sequence (opt1) from neuraminidase__InfluenzaA__ACT36683

SEQ ID NO: 81097 - RNA, 1410 nt, Artificial Sequence; identical to SEQ ID NO: 80762
  derived and/or modified CDS sequence (opt1) from neuraminidase__InfluenzaA__ACT36684

SEQ ID NO: 81098 - RNA, 1410 nt, Artificial Sequence; identical to SEQ ID NO: 80752
  derived and/or modified CDS sequence (opt1) from neuraminidase__InfluenzaA__ACT36685

SEQ ID NO: 81099 - RNA, 1410 nt, Artificial Sequence; identical to SEQ ID NO: 80752
  derived and/or modified CDS sequence (opt1) from neuraminidase__InfluenzaA__ACT36686

SEQ ID NO: 81100 - RNA, 1410 nt, Artificial Sequence; identical to SEQ ID NO: 80752
  derived and/or modified CDS sequence (opt1) from neuraminidase__InfluenzaA__ACT36687

SEQ ID NO: 81101 - RNA, 1410 nt, Artificial Sequence
  derived and/or modified CDS sequence (opt1) from neuraminidase__InfluenzaA__ACT36688
augaaccccaaccagaagaucaucaccaucggcagcgugugcaugaccaucgggauggccaaccugauccuccagaucggcaacaucaucuccaucuggaucagccacuccauccagcuggggaaccagaaccagaucgagacgugcaaccagagcgucaucaccuacgagaacaacaccugggugaaccagaccuacgugaacaucuccaacacgaacuucgccgcgggccagagcgucguguccgugaagcuggccgggaacagcucccucugcccggucagcggcugggccaucuacuccaaggacaacagcgugcgcaucggcuccaagggggacguguucgucauccgggagcccuucaucagcugcagcccccuggagugccgcaccuucuuccugacccagggcgcccuccugaacgacaagcacuccaacgggaccaucaaggaccggucccccuaccgcacgcugaugagcugcccgaucggcgaggugcccucccccuacaacagccgguucgagagcguggccugguccgcgagcgccugccacgacgggaucaacuggcucaccaucggcaucuccggccccgacaacggggccgucgccgugcugaaguacaacggcaucaucaccgacaccaucaagagcuggcgcaacaacauccugcggacgcaggaguccgagugcgcgugcgugaacgggagcugcuucaccgucaugaccgacggcccguccaacggccaggccagcuacaagaucuuccgcaucgagaaggggaagaucgugaaguccguggagaugaacgcccccaacuaccacuacgaggagugcagcugcuaccccgacuccagcgagaucacgugcgucugccgggacaacuggcacggcuccaaccgccccugggugagcuucaaccagaaccucgaguaccagaucggguacaucugcuccggcaucuucggggacaacccgcggcccaacgacaagaccggcagcugcggccccguguccagcaacggggccaacggcgucaagggguucuccuacaaguacggcaacgggguguggaucggccgcaccaagagcaucagcucccggaacggcuucgagaugaucugggaccccaacggguggaccggcaccgacaacaacuucagcaucaagcaggacaucguggggaucaacgagugguccggcuacagcggguccuucguccagcacccggagcugacgggccuggacugcauccgccccugcuucuggguggagcucauccggggccgccccaaggagaacaccaucuggaccagcggguccagcaucuccuucugcggcgucaacagcgacaccguggggugguccuggcccgacggcgccgagcugccguucacgaucgacaaguga

SEQ ID NO: 81102 - RNA, 1410 nt, Artificial Sequence; identical to SEQ ID NO: 80752
  derived and/or modified CDS sequence (opt1) from neuraminidase__InfluenzaA__ACT36689

SEQ ID NO: 81103 - RNA, 1410 nt, Artificial Sequence; identical to SEQ ID NO: 80792
  derived and/or modified CDS sequence (opt1) from neuraminidase__InfluenzaA__ACT36690

SEQ ID NO: 81104 - RNA, 1410 nt, Artificial Sequence; identical to SEQ ID NO: 80752
  derived and/or modified CDS sequence (opt1) from neuraminidase__InfluenzaA__ACT36691

SEQ ID NO: 81105 - RNA, 1410 nt, Artificial Sequence; identical to SEQ ID NO: 80792
  derived and/or modified CDS sequence (opt1) from neuraminidase__InfluenzaA__ACT36693

SEQ ID NO: 81106 - RNA, 1410 nt, Artificial Sequence; identical to SEQ ID NO: 80762
  derived and/or modified CDS sequence (opt1) from neuraminidase__InfluenzaA__ACT36694

SEQ ID NO: 81107 - RNA, 1410 nt, Artificial Sequence; identical to SEQ ID NO: 80762
  derived and/or modified CDS sequence (opt1) from neuraminidase__InfluenzaA__ACT36695

SEQ ID NO: 81108 - RNA, 1410 nt, Artificial Sequence; identical to SEQ ID NO: 80762
  derived and/or modified CDS sequence (opt1) from neuraminidase__InfluenzaA__ACT52684

SEQ ID NO: 81109 - RNA, 1410 nt, Artificial Sequence; identical to SEQ ID NO: 80752
  derived and/or modified CDS sequence (opt1) from neuraminidase__InfluenzaA__ACT54608

SEQ ID NO: 81110 - RNA, 1410 nt, Artificial Sequence
  derived and/or modified CDS sequence (opt1) from neuraminidase__InfluenzaA__ACT66157
augaaccccaaccagaagaucaucaccaucggcagcgugugcaugaccaucgggauggccaaccugauccuccagaucggcaacaucaucuccaucuggaucagccacuccauccagcuggggaaccagaaccagaucgagacgugcaaccagagcgucaucaccuacgagaacaacaccugggugaaccagaccuacgugaacaucuccaacacgaacuucgccgcgggccagagcgucguguccgugaagcuggccgggaacagcucccucugcccggucagcggcugggccaucuacuccaaggacaacagcauccgcaucggcuccaagggggacguguucgugauccgggagcccuucaucagcugcagcccccuggagugccgcaccuucuuccugacccagggcgcccuccugaacgacaagcacuccaacgggaccaucaaggaccggucccccuaccgcacgcugaugagcugcccgaucggcgagguccccucccccuacaacagccgguucgagagcguggccugguccgcgagcgccugccacgacgggaucaacuggcucaccaucggcaucuccggccccgacaacggggccguggccguccugaaguacaacggcaucaucaccgacaccaucaagagcuggcgcaacaacauccugcggacgcaggaguccgagugcgcgugcgugaacgggagcugcuucaccgugaugaccgacggcccguccaacggccaggccagcuacaagauccuccgcaucgagaaggggaagaucgucaaguccguggagaugaacgcccccaacuaccacuacgaggagugcagcugcuaccccgacuccagcgagaucacgugcgugugccgggacaacuggcacggcuccaaccgccccugggucagcuucaaccagaaccuggaguaccagaucggguacaucugcuccggcaucuucggggacaacccgcggcccaacgacaagaccggcagcugcggccccguguccagcaacggggccaacggcgugaagggguucuccuucaaguacggcaacggggucuggaucggccgcaccaagagcaucagcucccggaacggcuucgagaugaucugggaccccaacggguggaccggcaccgacaacaacuucagcaucaagcaggacaucguggggaucaacgagugguccggcuacagcggguccuucgugcagcacccggagcugacgggccucgacugcauccgccccugcuucugggucgagcugauccggggccgccccaaggagaacaccaucuggaccagcggguccagcaucuccuucugcggcgugaacagcgacaccgucgggugguccuggcccgacggcgccgagcugccguucacgaucgacaaguga

SEQ ID NO: 81111 - RNA, 1410 nt, Artificial Sequence; identical to SEQ ID NO: 80762
  derived and/or modified CDS sequence (opt1) from neuraminidase__InfluenzaA__ACT67117

SEQ ID NO: 81112 - RNA, 1410 nt, Artificial Sequence; identical to SEQ ID NO: 80752
  derived and/or modified CDS sequence (opt1) from neuraminidase__InfluenzaA__ACT67121

SEQ ID NO: 81113 - RNA, 1410 nt, Artificial Sequence; identical to SEQ ID NO: 80762
  derived and/or modified CDS sequence (opt1) from neuraminidase__InfluenzaA__ACT67240

SEQ ID NO: 81114 - RNA, 1410 nt, Artificial Sequence; identical to SEQ ID NO: 80762
  derived and/or modified CDS sequence (opt1) from neuraminidase__InfluenzaA__ACT67241

SEQ ID NO: 81115 - RNA, 1410 nt, Artificial Sequence; identical to SEQ ID NO: 80762
  derived and/or modified CDS sequence (opt1) from neuraminidase__InfluenzaA__ACT67243

SEQ ID NO: 81116 - RNA, 1410 nt, Artificial Sequence
  derived and/or modified CDS sequence (opt1) from neuraminidase__InfluenzaA__ACT67256
augaaccccaaccagaagaucaucaccaucggcagcgugugcaugaccaucgggauggccaaccugauccuccagaucggcaacaucaucuccaucuggaucagccacuccauccagcuggggaaccagaaccagaucgagacgugcaaccagagcgucaucaccuacgagaacaacaccugggugaaccagaccuacgugaacaucuccaacacgaacuucgccgcgggccagagcgucguguccgugaagcuggccgggaacagcucccucugcccggucagcggcugggccaucuacuccaaggacaacagcauccgcaucggcuccaagggggacguguucgugauccgggagcccuucaucagcugcagcccccuggagugccgcaccuucuuccugacccagggcgcccuccugaacgacaagcacuccaacgggaccaucaaggaccggucccccuaccgcacgcugaugagcugcccgaucggcgagguccccucccccuacaacagccgguucgagagcguggccugguccgcgagcgccugccacgacgggaucaacuggcucaccaucggcaucuccggccccgacaacggggccguggccguccugaaguacaacggcaucaucaccgacaccaucaagagcuggcgcaacaacauccugcggacgcaggaguccgagugcgcgugcgugaacgggagcugcuucaccgugaugaccgacggcccguccgacggccaggccagcuacaagaucuuccgcaucgagaaggggaagaucgucaaguccguggagaugaacgcccccaacuacuacuacgaggagugcagcugcuaccccgacuccagcgagaucacgugcgugugccgggacaacuggcacggcuccaaccgccccugggucagcuucaaccagaaccucgaguaccagaucggguacaucugcuccggcaucuucggggacaacccgcggcccaacgacaagaccggcagcugcggccccguguccagcaacggggccaacggcgugaagggguucuccuucaaguacggcaacggggucuggaucggccgcaccaagagcaucagcucccggaacggcuucgagaugaucugggaccccaacggguggaccggcaccgacaacaacuucagcaucaagcaggacaucguggggaucaacgagugguccggcuacagcggguccuucgugcagcacccggagcugacgggccuggacugcauccgccccugcuucugggucgagcucauccggggccgccccaaggagaacaccaucuggaccagcggguccagcaucuccuucugcggcgugaacagcgacaccgucgggugguccuggcccgacggcgccgagcugccguucacgaucgacaaguga

SEQ ID NO: 81117 - RNA, 1410 nt, Artificial Sequence
  derived and/or modified CDS sequence (opt1) from neuraminidase__InfluenzaA__ACT68161
augaaccccaaccagaagaucaucaccaucggcagcgugugcaugaccaucgggauggccaaccugauccuccagaucggcaacaucaucuccaucuggaucagccacuccauccagcuggggaaccagaaccagaucgagacgugcaaccagagcgucaucaccuacgagaacaacaccugggugaaccagaccuacgugaacaucuccaacacgaacuucgccgcgggccagagcgucguguccgugaagcuggccgggaacagcucccucugcccggucagcggcugggccaucuacuccaaggacaacagcauccgcaucggcuccaagggggacguguucgugauccgggagcccuucaucagcugcagcccccuggagugccgcaccuucuuccugacccagggcgcccuccugaacgacaagcacuccaacgggaccaucaaggaccggucccccuaccgcacgcugaugagcugcccgaucggcgagguccccucccccuacaacagccgguucgagagcguggccugguccgcgagcgccugccacgacgggaucaacuggcucaccaucggcaucuccggccccgacaacggggccguggccguccugaaguacaacggcaucaucaccgacaccaucaagagcuggcgcaacaacauccugcggacgcaggaguccgagugcgcgugcgugaacgggagcugcuucaccgugaugaccgacggcccguccgacggccaggccagcuacaagaucuuccgcaucgagaaggggaagaucgucaaguccguggagaugaacgcccccaacuaccacuacgaggagugcagcugcuaccccgacuccagcgagaucacgugcgugugccgggacaacuggcacggcuccaaccgccccugggucagcuucaaccagaaccucgaguaccagaucggguacaucugcuccggcaucuucggggacaacccgcggcccaacgacaaggccggcagcugcggccccguguccagcaacggggccaacggcgugaagggguucuccuucaaguacggcaacggggucuggaucggccgcaccaagagcaucagcucccggaacggcuucgagaugaucugggaccccaacggguggaccggcaccgacaacaacuucagcaucaagcaggacaucguggggaucaacgagugguccggcuacagcggguccuucgugcagcacccggagcugaccggccuggacugcauccgccccugcuucugggucgagcucauccggggccgccccaaggagaacacgaucuggaccagcggguccagcaucuccuucugcggcgugaacagcgacaccgucgggugguccuggcccgacggcgcggagcugccguucaccaucgacaaguga

SEQ ID NO: 81118 - RNA, 1410 nt, Artificial Sequence; identical to SEQ ID NO: 80752
  derived and/or modified CDS sequence (opt1) from neuraminidase__InfluenzaA__ACT68162

SEQ ID NO: 81119 - RNA, 1410 nt, Artificial Sequence; identical to SEQ ID NO: 80752
  derived and/or modified CDS sequence (opt1) from neuraminidase__InfluenzaA__ACT68163

SEQ ID NO: 81120 - RNA, 1410 nt, Artificial Sequence; identical to SEQ ID NO: 80752
  derived and/or modified CDS sequence (opt1) from neuraminidase__InfluenzaA__ACT68164

SEQ ID NO: 81121 - RNA, 1410 nt, Artificial Sequence; identical to SEQ ID NO: 80762
  derived and/or modified CDS sequence (opt1) from neuraminidase__InfluenzaA__ACT68166

SEQ ID NO: 81122 - RNA, 1410 nt, Artificial Sequence; identical to SEQ ID NO: 80762
  derived and/or modified CDS sequence (opt1) from neuraminidase__InfluenzaA__ACT68167

SEQ ID NO: 81123 - RNA, 1410 nt, Artificial Sequence; identical to SEQ ID NO: 80792
  derived and/or modified CDS sequence (opt1) from neuraminidase__InfluenzaA__ACT68168

SEQ ID NO: 81124 - RNA, 1410 nt, Artificial Sequence
  derived and/or modified CDS sequence (opt1) from neuraminidase__InfluenzaA__ACT68169
augaaccccaaccagaagaucaucaccaucggcagcgugugcaugaccaucgggauggccaaccugauccuccagaucggcaacaucaucuccaucuggaucagccacuccauccagcugggggaccagaaccagaucgagacgugcaaccagagcgucaucaccuacgagaacaacaccugggugaaccagaccuacgugaacaucuccaacacgaacuucgccgcgggccagagcgucguguccgugaagcuggccgggaacagcucccucugcccggucagcggcugggccaucuacuccaaggacaacagcauccgcaucggcuccaagggggacguguucgugauccgggagcccuucaucagcugcagcccccuggagugccgcaccuucuuccugacccagggcgcccuccugaacgacaagcacuccaacgagaccaucaaggaccggucccccuaccgcacgcugaugagcugcccgaucggggagguccccucccccuacaacagccgguucgagagcguggccugguccgcgagcgccugccacgacggcaucaacuggcucaccaucgggaucuccggccccgacaacggcgccguggccguccugaaguacaacgggaucaucaccgacaccaucaagagcuggcgcaacaacauccugcggacgcaggaguccgagugcgcgugcgugaacggcagcugcuucaccgugaugaccgacgggccguccgacggccaggccagcuacaagaucuuccgcaucgagaagggcaagaucgucaaguccguggagaugaacgcccccaacuaccacuacgaggagugcagcugcuaccccgacuccagcgagaucacgugcgugugccgggacaacuggcacggguccaaccgccccugggucagcuucaaccagaaccucgaguaccagaucggcuacaucugcuccgggaucuucggcgacaacccgcggcccaacgacaagaccgggagcugcggccccguguccagcaacggcgccaacggggugaagggcuucuccuucaaguacgggaacggcgucuggaucgggcgcaccaagagcaucagcucccggaacggcuucgagaugaucugggaccccaacggcuggaccgggaccgacaacaacuucagcaucaagcaggacaucgugggcaucuccgaguggagcggguacuccggcagcuucgugcagcacccggagcugacggggcuggacugcauccgccccugcuucugggucgagcucauccggggccgccccaaggagaacaccaucuggaccuccggcagcuccaucagcuucugcggggugaacuccgacaccgucggcuggagcuggcccgacggggccgagcugccguucacgaucgacaaguga

SEQ ID NO: 81125 - RNA, 1410 nt, Artificial Sequence; identical to SEQ ID NO: 80752
  derived and/or modified CDS sequence (opt1) from neuraminidase__InfluenzaA__ACT68171

SEQ ID NO: 81126 - RNA, 1410 nt, Artificial Sequence; identical to SEQ ID NO: 80752
  derived and/or modified CDS sequence (opt1) from neuraminidase__InfluenzaA__ACT68172

SEQ ID NO: 81127 - RNA, 1410 nt, Artificial Sequence; identical to SEQ ID NO: 80762
  derived and/or modified CDS sequence (opt1) from neuraminidase__InfluenzaA__ACT68173

SEQ ID NO: 81128 - RNA, 1410 nt, Artificial Sequence; identical to SEQ ID NO: 80762
  derived and/or modified CDS sequence (opt1) from neuraminidase__InfluenzaA__ACT68174

SEQ ID NO: 81129 - RNA, 1410 nt, Artificial Sequence
  derived and/or modified CDS sequence (opt1) from neuraminidase__InfluenzaA__ACT68175
augaaccccaaccagaagaucaucaccaucggcagcgugugcaugaccaucgggauggccaaccugauccuccagaucggcaacaucaucuccaucuggaucagccacuccauccagcuggggaaccagaaccagaucgagacgugcaaccagagcgucaucaccuacgagaacaacaccugggugaaccagaccuacgugaacaucuccaacacgaacuucgccgcgggccagagcgucguguccgugaagcuggccgggaacagcucccucugcccggucagcggcugggccaucuacuccaaggacaacagcgugcgcaucggcuccaagggggacguguucgucauccgggagcccuucaucagcugcagcccccuggagugccgcaccuucuuccugacccagggcgcccuccugaacgacaagcacuccaacgggaccaucaaggaccggucccccuaccgcacgcugaugagcugcccgaucggcgaggugcccucccccuacaacagccgguucgagagcguggccugguccgcgagcgccugccacgacgggaucaacuggcucaccaucggcaucuccggccccgacaacggggccgucgccgugcugaaguacaacggcaucaucaccgacaccaucaagagcuggcgcaacaacauccugcggacgcaggaguccgagugcgcgugcgugaacgggagcugcuucaccgucaugaccgacggcccguccaacggccaggccagcuacaagaucuuccgcaucgagaaggggaagaucgugaaguccguggagaugaacgcccccaacuaccacuacgaggagugcagcugcuaccccgacuccggcgagaucacgugcgucugccgggacaacuggcacgggagcaaccgccccuggguguccuucaaccagaaccucgaguaccagaucggcuacaucugcagcgggaucuucggcgacaacccgcggcccaacgacaagaccggcuccugcgggcccgugagcuccaacggcgccaacggggucaagggcuucagcuucaaguacgggaacggcguguggaucggccgcaccaaguccaucagcagccggaacggguucgagaugaucugggaccccaacggcuggaccgggaccgacaacaacuucuccaucaagcaggacaucgugggcaucaacgaguggagcggguacuccggcagcuucguccagcacccggagcugacgggccuggacugcauccgccccugcuucuggguggagcucauccgggggcgccccaaggagaacaccaucuggaccuccggcagcuccaucagcuucugcggggucaacuccgacaccgugggcuggagcuggcccgacggcgccgagcugccguucacgaucgacaaguga

SEQ ID NO: 81130 - RNA, 1410 nt, Artificial Sequence; identical to SEQ ID NO: 80762
  derived and/or modified CDS sequence (opt1) from neuraminidase__InfluenzaA__ACT68176

SEQ ID NO: 81131 - RNA, 1410 nt, Artificial Sequence; identical to SEQ ID NO: 80762
  derived and/or modified CDS sequence (opt1) from neuraminidase__InfluenzaA__ACT68177

SEQ ID NO: 81132 - RNA, 1410 nt, Artificial Sequence; identical to SEQ ID NO: 80762
  derived and/or modified CDS sequence (opt1) from neuraminidase__InfluenzaA__ACT68178

SEQ ID NO: 81133 - RNA, 1410 nt, Artificial Sequence; identical to SEQ ID NO: 81129
  derived and/or modified CDS sequence (opt1) from neuraminidase__InfluenzaA__ACT68179

SEQ ID NO: 81134 - RNA, 1410 nt, Artificial Sequence; identical to SEQ ID NO: 80762
  derived and/or modified CDS sequence (opt1) from neuraminidase__InfluenzaA__ACT68180

SEQ ID NO: 81135 - RNA, 1410 nt, Artificial Sequence; identical to SEQ ID NO: 80792
  derived and/or modified CDS sequence (opt1) from neuraminidase__InfluenzaA__ACT79145

SEQ ID NO: 81136 - RNA, 1410 nt, Artificial Sequence
  derived and/or modified CDS sequence (opt1) from neuraminidase__InfluenzaA__ACT79155
augaaccccaaccagaagaucaucaccaucggcagcgugugcaugaccaucgggauggccaaccugauccuccagaucggcaacaucaucuccaucuggaucagccacuccauccagcuggggaaccagaaccagaucgagacgugcaaccagagcgucaucaccuacgagaacaacaccugggugaaccagaccuacgugaacaucuccaacacgaacuucgccgcgggccagagcgucguguccgugaagcuggccgggaacagcucccucugcccggucggcggcugggccaucuacagcaaggacaacuccgugcgcaucgggagcaagggcgacguguucgucauccgggagcccuucaucuccugcagccugcuggagugccgcaccuucuuccucacccagggggcccugcugaacgacaagcacuccaacggcaccaucaaggaccggagccccuaccgcacgcucauguccugccccaucggggaggugccgagccccuacaacucccgguucgagagcguggccuggagcgcguccgccugccacgacggcaucaacuggcugaccaucggcaucagcgggcccgacaacggcgccgucgccgugcugaaguacaacgggaucaucaccgacaccaucaaguccuggcgcaacaacauccuccggacgcaggagagcgagugcgcgugcgugaacggcuccugcuucaccgucaugaccgacggccccagcaacgggcaggccuccuacaagaucuuccgcaucgagaagggcaagaucgucaagagcguggagaugaacgccccgaacuaccacuacgaggagugcuccugcuaccccgacagcuccgagaucacgugcgugugccgggacaacuggcacgggagcaaccgccccuggguguccuucaaccagaaccuggaguaccagaucggcuacaucugcagcgggaucuucggcgacaacccccggccgaacgacaagaccggcuccugcgggcccgugagcuccaacggcgccaacggggucaagggcuucagcuucaaguacgggaacggcguguggaucggccgcaccaaguccaucagcagccggaacggguucgagaugaucugggaccccaacggcuggaccgggaccgacaacaacuucuccaucaagcaggacaucgugggcaucaacgaguggagcggguacuccggcagcuucguccagcaccccgagcugacgggccucgacugcauccgcccgugcuucuggguggagcugauccgggggcgccccaaggagaacaccaucuggaccuccggcagcuccaucagcuucugcggggucaacuccgacaccgugggcuggagcuggcccgacggcgccgagcugcccuucacgaucgacaaguga

SEQ ID NO: 81137 - RNA, 1410 nt, Artificial Sequence; identical to SEQ ID NO: 80752
  derived and/or modified CDS sequence (opt1) from neuraminidase__InfluenzaA__ACT79165

SEQ ID NO: 81138 - RNA, 1410 nt, Artificial Sequence; identical to SEQ ID NO: 80752
  derived and/or modified CDS sequence (opt1) from neuraminidase__InfluenzaA__ACT79175

SEQ ID NO: 81139 - RNA, 1410 nt, Artificial Sequence; identical to SEQ ID NO: 80762
  derived and/or modified CDS sequence (opt1) from neuraminidase__InfluenzaA__ACT79185

SEQ ID NO: 81140 - RNA, 1410 nt, Artificial Sequence; identical to SEQ ID NO: 80762
  derived and/or modified CDS sequence (opt1) from neuraminidase__InfluenzaA__ACT79622

SEQ ID NO: 81141 - RNA, 1410 nt, Artificial Sequence; identical to SEQ ID NO: 81129
  derived and/or modified CDS sequence (opt1) from neuraminidase__InfluenzaA__ACT79630

SEQ ID NO: 81142 - RNA, 1410 nt, Artificial Sequence; identical to SEQ ID NO: 80762
  derived and/or modified CDS sequence (opt1) from neuraminidase__InfluenzaA__ACT83798

SEQ ID NO: 81143 - RNA, 1410 nt, Artificial Sequence; identical to SEQ ID NO: 80762
  derived and/or modified CDS sequence (opt1) from neuraminidase__InfluenzaA__ACT83808

SEQ ID NO: 81144 - RNA, 1410 nt, Artificial Sequence; identical to SEQ ID NO: 80762
  derived and/or modified CDS sequence (opt1) from neuraminidase__InfluenzaA__ACT83818

SEQ ID NO: 81145 - RNA, 1410 nt, Artificial Sequence; identical to SEQ ID NO: 80762
  derived and/or modified CDS sequence (opt1) from neuraminidase__InfluenzaA__ACT83828

SEQ ID NO: 81146 - RNA, 1410 nt, Artificial Sequence; identical to SEQ ID NO: 80762
  derived and/or modified CDS sequence (opt1) from neuraminidase__InfluenzaA__ACT83838

SEQ ID NO: 81147 - RNA, 1410 nt, Artificial Sequence; identical to SEQ ID NO: 80752
  derived and/or modified CDS sequence (opt1) from neuraminidase__InfluenzaA__ACT83848

SEQ ID NO: 81148 - RNA, 1410 nt, Artificial Sequence; identical to SEQ ID NO: 80752
  derived and/or modified CDS sequence (opt1) from neuraminidase__InfluenzaA__ACT83858

SEQ ID NO: 81149 - RNA, 1410 nt, Artificial Sequence; identical to SEQ ID NO: 80762
  derived and/or modified CDS sequence (opt1) from neuraminidase__InfluenzaA__ACT83868

SEQ ID NO: 81150 - RNA, 1410 nt, Artificial Sequence; identical to SEQ ID NO: 80762
  derived and/or modified CDS sequence (opt1) from neuraminidase__InfluenzaA__ACT83878

SEQ ID NO: 81151 - RNA, 1410 nt, Artificial Sequence; identical to SEQ ID NO: 80762
  derived and/or modified CDS sequence (opt1) from neuraminidase__InfluenzaA__ACT86002

SEQ ID NO: 81152 - RNA, 1410 nt, Artificial Sequence; identical to SEQ ID NO: 80762
  derived and/or modified CDS sequence (opt1) from neuraminidase__InfluenzaA__ACT86012

SEQ ID NO: 81153 - RNA, 1410 nt, Artificial Sequence; identical to SEQ ID NO: 80762
  derived and/or modified CDS sequence (opt1) from neuraminidase__InfluenzaA__ACT86022

SEQ ID NO: 81154 - RNA, 1410 nt, Artificial Sequence; identical to SEQ ID NO: 80752
  derived and/or modified CDS sequence (opt1) from neuraminidase__InfluenzaA__ACT86032

SEQ ID NO: 81155 - RNA, 1410 nt, Artificial Sequence; identical to SEQ ID NO: 80762
  derived and/or modified CDS sequence (opt1) from neuraminidase__InfluenzaA__ACT86042

SEQ ID NO: 81156 - RNA, 1410 nt, Artificial Sequence; identical to SEQ ID NO: 80762
  derived and/or modified CDS sequence (opt1) from neuraminidase__InfluenzaA__ACT86052

SEQ ID NO: 81157 - RNA, 1410 nt, Artificial Sequence; identical to SEQ ID NO: 80762
  derived and/or modified CDS sequence (opt1) from neuraminidase__InfluenzaA__ACT86062

SEQ ID NO: 81158 - RNA, 1410 nt, Artificial Sequence; identical to SEQ ID NO: 80762
  derived and/or modified CDS sequence (opt1) from neuraminidase__InfluenzaA__ACT86072

SEQ ID NO: 81159 - RNA, 1410 nt, Artificial Sequence; identical to SEQ ID NO: 80762
  derived and/or modified CDS sequence (opt1) from neuraminidase__InfluenzaA__ACT86082

SEQ ID NO: 81160 - RNA, 1410 nt, Artificial Sequence; identical to SEQ ID NO: 80762
  derived and/or modified CDS sequence (opt1) from neuraminidase__InfluenzaA__ACT86092

SEQ ID NO: 81161 - RNA, 1410 nt, Artificial Sequence; identical to SEQ ID NO: 80762
  derived and/or modified CDS sequence (opt1) from neuraminidase__InfluenzaA__ACT86102

SEQ ID NO: 81162 - RNA, 1410 nt, Artificial Sequence; identical to SEQ ID NO: 80762
  derived and/or modified CDS sequence (opt1) from neuraminidase__InfluenzaA__ACT86112

SEQ ID NO: 81163 - RNA, 1410 nt, Artificial Sequence; identical to SEQ ID NO: 80762
  derived and/or modified CDS sequence (opt1) from neuraminidase__InfluenzaA__ACT86122

SEQ ID NO: 81164 - RNA, 1410 nt, Artificial Sequence; identical to SEQ ID NO: 80762
  derived and/or modified CDS sequence (opt1) from neuraminidase__InfluenzaA__ACT86132

SEQ ID NO: 81165 - RNA, 1410 nt, Artificial Sequence; identical to SEQ ID NO: 80762
  derived and/or modified CDS sequence (opt1) from neuraminidase__InfluenzaA__ACT86142

SEQ ID NO: 81166 - RNA, 1410 nt, Artificial Sequence; identical to SEQ ID NO: 80752
  derived and/or modified CDS sequence (opt1) from neuraminidase__InfluenzaA__ACT97323

SEQ ID NO: 81167 - RNA, 1410 nt, Artificial Sequence; identical to SEQ ID NO: 80762
  derived and/or modified CDS sequence (opt1) from neuraminidase__InfluenzaA__ACU00934

SEQ ID NO: 81168 - RNA, 1410 nt, Artificial Sequence; identical to SEQ ID NO: 80762
  derived and/or modified CDS sequence (opt1) from neuraminidase__InfluenzaA__ACU00944

SEQ ID NO: 81169 - RNA, 1410 nt, Artificial Sequence; identical to SEQ ID NO: 81116
  derived and/or modified CDS sequence (opt1) from neuraminidase__InfluenzaA__ACU00954

SEQ ID NO: 81170 - RNA, 1410 nt, Artificial Sequence
  derived and/or modified CDS sequence (opt1) from neuraminidase__InfluenzaA__ACU12497
augaaccccaaccagaagaucaucaccaucggcagcgugucccugaccaucgccacgaucugcuuccucaugcagaucgccauccuggucaccaccgugacccugcacuucaagcaguacgagugcaacagcccgcccaacaaccaggugaugcccugcgagcccacgaucaucgagcgcaacaucaccgagaucgucuaccucaccaacaccacgaucgagcgggagaucugcccgaagcugguggaguaccgcaacugguccaagccccagugccgggugaccggguucgcgcccuucagcaaggacaacuccauccgccugagcgccggcggggacaucugggucacccgggagcccuacguguccugcgacccgggcaagugcuaccaguucgcccucgggcagggcaccacgcugaacaaccgccacagcaacgacaccgugcacgaccggacccccuaccgcacccugcucaugaacgagcugggcguccccuuccaccuggggacgaagcaggucugcaucgccugguccagcuccagcugccacgacggcaaggccuggcuccacgugugcgugaccgggcacgacgagaacgcgaccgccuccuucaucuacgacggccggcugguggacagcaucguguccuggagcaagaacauccugcgcacccaggaguccgagugcgucugcaucaacgggacgugcaccguggugaugaccgacggcagcgccuccgagcgggccgacaccaagauccucuucaucgaggagggcaagaucguccacaucagcccccugagcggguccgcgcagcacguggaggagugcagcugcuacccgcgcuaccccggcgugcggugcgucugccgcgacaacuggaagggguccaaccggcccaucguggacaucaacgugaaggacuacagcaucgucuccagcuacgugugcuccggccuggucggcgacacgccccgcaagaacgacagcuccagcuccagcuacugccggaacccgaacaacgagaaggggucccacggcgugaaggggugggccuucgacgacggcaacgacguguggauggggcgcaccaucggcgaggagcuccggagcggcuacgagaccuucaaggucaucgggggcugguccacccccaacagcaagcugcagacgaaccgccaggugaucguggaccgggggaaccgcuccggcuacagcgggaucuucuccgucgagggcaagagcugcaucaaccgcugcuucuacguggagcugauccggggccgcaagcaggagaccaaggugugguggaccagcaacuccaucgucguguucugcgggaccagcggcacguacgggaccggcuccuggcccgacggggccgacaucaaccucaugcccaucuga

SEQ ID NO: 81171 - RNA, 1413 nt, Artificial Sequence; identical to SEQ ID NO: 80656
  derived and/or modified CDS sequence (opt1) from neuraminidase__InfluenzaA__ACU12508

SEQ ID NO: 81172 - RNA, 1410 nt, Artificial Sequence
  derived and/or modified CDS sequence (opt1) from neuraminidase__InfluenzaA__ACU12519
augaaccccaaccagaagaucaucaccaucggcagcgugucccugaccaucagcacgaucugcuucuucaugcagaucgccauccucaucaccaccgucacccugcacuucaagcaguacgaguucaacuccccgcccaacaaccaggugaugcugugcgagcccacgaucaucgagcgcaacaucaccgagaucguguaccucaccaacaccacgaucgagaaggagaucugccccaagcuggccgaguaccggaacuggagcaagccgcagugcaacaucaccggguucgcgcccuucuccaaggacaacagcauccgccuguccgccggcggggacaucugggucacccgggagcccuacgugagcugcgaccccgacaagugcuaccaguucgcccucggccaggggaccacgcugaacaacgugcacuccaacgacaccguccacgaccgcaccccguaccggacccugcucaugaacgagcugggcgugcccuuccaccugggcacgaagcaggucugcaucgccuggagcuccagcuccugccacgacgggaaggccuggcuccacgugugcaucaccggcgacgacgagaacgcgaccgccagcuucaucuacaacgggcgccugguggacuccguggucagcugguccaagaagauccugcggacccaggagagcgagugcgugugcaucaacggcacgugcaccguggucaugaccgacggguccgccagcggcaaggccgacaccaagauccucuucaucgaggagggcaagaucgugcacacgagcacccuguccgggagcgcgcagcacguggaggagugcuccugcuacccccgcuaccccggcguccggugcgugugccgcgacaacuggaaggggagcaaccggccgaucguggacaucaacaucaaggacuacuccaucgucagcuccuacgugugcagcggccuggugggcgacacgccccgcaagaacgacuccagcuccagcgggcacugccucgaccccaacaacgaggagggcgggcacggcgucaaggggugggccuucgacgacggcaacgacguguggaugggccggaccaucuccgagaagcugcgcagcggguacgagaccuucaaggucaucgagggcugguccaaccccaacagcaagcugcagaucaaccgccaggugaucguggaccgggggaaccgguccggcuacagcgggaucuucuccgucgagggcaagagcugcaucaaccgcugcuucuacguggagcucauccggggccgcaaccaggagaccgaggugcuguggaccagcaacuccaucgucguguucugcgggaccagcggcacguacgggaccggcuccuggccggacggggccgacaucaaccugaugcccaucuga

SEQ ID NO: 81173 - RNA, 1410 nt, Artificial Sequence
  derived and/or modified CDS sequence (opt1) from neuraminidase__InfluenzaA__ACU12530
augaaccccaaccagaagaucaucaccaucggcagcgugucccugaccaucagcacgaucugcuucuucaugcagaucgccauccucaucaccaccgucacccugcacuucaagcaguacgaguucaacuccccgcccaacaaccaggugaugcugugcgagcccacgaucaucgagcgcaacaucaccgagaucguguaccucaccaacaccacgaucgagaaggagaucugccccaagcuggccgaguaccggaacuggagcaagccgcagugcaacaucaccggguucgcgcccuucuccaaggacaacagcauccgccuguccgccggcggggacaucugggucacccgggagcccuacgugagcugcgaccccgacaagugcuaccaguucgcccucggccaggggaccacgcugaacaacgugcacuccaacgacaccguccacgaccgcaccccguaccggacccugcucaugaacgagcugggcgugcccuuccaccugggcacgaagcaggucugcaucgccuggagcuccagcuccugccacgacgggaaggccuggcuccacgugugcgugaccggcaacgacaagaacgcgaccgccagcuucaucuacaacgggcgccugguggacuccaucgucagcugguccaaggagauccugcggacccaggagagcgagugcgugugcaucaacggcacgugcaccguggucaugaccgacggguccgccagcggcaaggccgacaccaagauccucuucaucgaggagggcaagaucgugcacacgagcacccuguccgggagcgcgcagcacguggaggagugcuccugcuacccccgcuaccccggcguccggugcgugugccgcgacaacuggaaggggagcaaccggccgaucguggacaucaacaucaaggacuacuccaucgucagcuccuacgugugcagcggccuggugggcgacacgccccgcaagaacgacuccagcuccagcucccacugccucgaccccaacaacgaggagggcgggcacggggucaagggcugggccuucgacgacgggaacgacguguggaugggccggaccaucagcgagaagcugcgcuccggcuacgagaccuucaaggucaucgagggguggagcaaccccaacuccaagcugcagaucaaccgccaggugaucguggaccggggcaaccggagcggguacuccggcaucuucagcgucgagggcaagagcugcaucaaccgcugcuucuacguggagcucauccgggggcgcaaggaggagaccgaggugcuguggaccuccaacagcaucgucguguucugcggcaccuccgggacguacggcaccgggagcuggccggacggcgccgacaucaaccugaugcccaucuga

SEQ ID NO: 81174 - RNA, 1410 nt, Artificial Sequence
  derived and/or modified CDS sequence (opt1) from neuraminidase__InfluenzaA__ACU12541
augaaccccaaccagaagaucaucaccaucggcagcgugucccugaccaucagcacgaucugcuucuucaugcagaucgccauccucaucaccaccgucacccugcacuucaagcaguacgaguucaacuccccgcccaacaaccaggugaugcugugcgagcccacgaucaucgagcgcaacaucaccgagaucguguaccucaccaacaccacgaucgagaaggagaucugccccaagcuggccgaguaccggaacuggagcaagccgcagugcaacaucaccggguucgcgcccuucuccaaggacaacagcauccgccuguccgccggcggggacaucugggucacccgggagcccuacgugagcugcgaccccgacaagugcuaccaguucgcccucggccaggggaccacgcugaacaacgugcacuccaacgacaccguccacgaccgcaccccguaccggacccugcucaugaacgagcugggcgugcccuuccaccugggcacgaagcaggucugcaucgccuggagcuccagcuccugccacgacgggaaggccuggcuccacgugugcgugaccggcgacgacaagaacgcgaccgccagcuucaucuacaacgggcgccugguggacuccaucgucagcugguccaaggagauccugcggacccaggagagcgagugcgugugcaucaacggcacgugcaccguggucaugaccgacggguccgccagcggcaaggccgacaccaagauccucuucaucgaggagggcaagaucgugcacacgagcacccuguccgggagcgcgcagcacguggaggagugcuccugcuacccccgcuaccccggcguccggugcgugugccgcgacaacuggaaggggagcaaccggccgaucguggacaucaacaucaaggacuacuccaucgucagcuccuacgugugcagcggccuggugggcgacacgccccgcaagaacgacuccagcuccagcucccacugccucgaccccaacaacgaggagggcgggcacggggucaagggcugggccuucgacgacgggaacgacguguggaugggccggaccaucagcgagaagcugcgcuccggcuacgagaccuucaaggucaucgagggguggagcaaccccaacuccaaguggcagaucaaccgccaggugaucguggaccggggcaaccggagcggguacuccggcaucuucagcgucgagggcaagagcugcaucaaccgcugcuucuacguggagcugauccgggggcgcaaggaggagaccgaggugcucuggaccuccaacagcaucgucguguucugcggcaccuccgggacguacggcaccgggagcuggccggacggcgccgacaucaaccugaugcccaucuga

SEQ ID NO: 81175 - RNA, 1410 nt, Artificial Sequence
  derived and/or modified CDS sequence (opt1) from neuraminidase__InfluenzaA__ACU12552
augaaccccaaccagaagaucaucaccaucggcagcgugucccugaccaucagcacgaucugcuucuucaugcagaucgccauccucaucaccaccgucacccugcacuucaagcaguacgaguucaacuccccgcccaacaaccaggugaugcugugcgagcccacgaucaucgagcgcaacaucaccgagaucguguaccucaccaacaccacgaucgagaaggagaucugccccaagcuggccgaguaccggaacuggagcaagccgcagugcaacaucaccggguucgcgcccuucuccaaggacaacagcauccgccuguccgccggcggggacaucugggucacccgggagcccuacgugagcugcgaccccgacaagugcuaccaguucgcccucggccaggggaccacgcugaacaacgugcacuccaacgacaccguccacgaccgcaccccguaccggacccugcucaugaacgagcugggcgugcccuuccaccugggcacgaagcaggucugcaucgccuggagcuccagcuccugccacgacgggaaggccuggcuccacgugugcgugaccggcgacgacaagaacgcgaccgccagcuucaucuacaacgggcgccugguggacuccaucgucagcugguccaaggagauccugcggacccaggagagcgagugcgugugcaucaacggcacgugcaccguggucaugaccgacggguccgccagcggcaaggccgacaccaagauccucuucaucgaggagggcaagaucgugcacacgagcacccuguccgggagcgcgcagcacguggaggagugcuccugcuacccccgcuaccccggcguccggugcgugugccgcgacaacuggaaggggagcaaccggccgaucguggacaucaacaucaaggacuacuccaucgucagcggcuacgugugcuccggccuggugggggacacgccccgcaagaacgacagcuccagcuccagccacugcuccgaccccaacaacgaggagggcgggcacggcgucaaggggugggccuucgacgacggcaacgacguguggaugggccggaccaucagcgagaagcuccgcuccggguacgagaccuucaaggucaucgagggcuggagcaaccccaacuccaagcugcagaucaaccgccaggugaucguggaccgggggaaccggagcggcuacuccgggaucuucagcgucgagggcaagagcugcaucaaccgcugcuucuacguggagcugauccggggccgcaaggaggagaccgaggugcucuggaccuccaacagcaucgucguguucugcgggaccuccggcacguacgggaccggcagcuggccggacggggccgacaucaaccugaugcccaucuga

SEQ ID NO: 81176 - RNA, 1413 nt, Artificial Sequence
  derived and/or modified CDS sequence (opt1) from neuraminidase__InfluenzaA__ACU12574
augaaccccaaccagaagaucaucaccaucggcagcaucuccaucgccaucgggaucaucaaccugaugcuccagaucggcaacaucaucagcaucugggccucccacagcauccagaccgggucccagaacaacacgggcaucugcaaccagcgcaucaucaccuacgagaacagcaccugggugaaccacaccuacgucaacaucaacaacacgaacgugguggcgggggaggacaagaccuccgucacccuggccggcaacagcucccugugcagcaucuccggcugggccaucuacaccaaggacaacagcauccggaucggguccaagggcgacguguucgugauccgcgagccguucaucagcugcucccaccucgagugccggacguucuuccugacccagggggcccugcucaacgacaagcacagcaacggcaccgucaaggaccgcucccccuaccgggcccugaugagcugcccccugggggaggcgcccuccccguacaacagcaaguucgagagcguggccugguccgccagcgccugccacgacggcaugggcuggcucaccaucgggaucuccggccccgacaacggggcgguggccguccugaaguacaacggcaucaucacgggcaccaucaagagcuggaagaagcagauccugcgcacccaggaguccgagugcgugugcaugaacgggagcugcuucaccaucaugacggacggccccuccaacaaggccgccagcuacaagaucuucaagaucgagaaggggaaggugaccaaguccaucgagcucaacgcccccaacuucuacuacgaggagugcagcugcuacccggacaccggcaucgucaugugcgugugccgggacaacuggcacggguccaaccgccccugggugagcuucaaccagaaccuggacuaccagaucggcuacaucugcuccggcgucuucggggacaacccccggcccgaggacggcgaggggagcugcaacccggugaccguggacggcgcgaacggggucaagggcuucuccuacaaguacgacaacggcguguggaucgggcgcaccaagagcaaccggcugcgcaagggcuucgagaugaucugggaccccaacggguggacgaacaccgacuccgacuucagcgugaagcaggacgucguggccaucaccgacugguccggcuacagcgggagcuucgugcagcaccccgagcucacgggccuggacugcauccggcccugcuucugggucgagcuggugcgcggccucccgcgggagaacaccaccaucuggaccuccgggagcuccaucagcuucugcggcgucaacuccgacacggccaacuggagcuggcccgacggggccgagcugcccuucaccaucgacaaguga

SEQ ID NO: 81177 - RNA, 1413 nt, Artificial Sequence; identical to SEQ ID NO: 80656
  derived and/or modified CDS sequence (opt1) from neuraminidase__InfluenzaA__ACU12585

SEQ ID NO: 81178 - RNA, 1413 nt, Artificial Sequence
  derived and/or modified CDS sequence (opt1) from neuraminidase__InfluenzaA__ACU12596
augaaccccaaccagaagaucaucaccaucggcagcaucuccaucgccaucgggaucaucagccugaugcuccagaucggcuccaucaucagcaucugggccucccacagcauccgcaccgggucccagaacaacacgggcaucugcaaccagcggaucaucaccuacgagaacagcaccugggugaaccacaccuacgucaacaucaacaacacgaacgugguggcgggggaggacaagaaguccgucacccuggccggcaacagcucccugugcagcaucuccggcugggccaucuacaccaaggacaacagcauccgcaucggguccaagggcgacguguucgugauccgggagccguucaucagcugcucccaccucgagugccgcaccuucuuccugacgcagggggcccugcucaacgacaagcacagcaacggcaccgucaaggaccggucccccuaccgcgcccugaugagcugcccccugggggaggcgcccagcccguacaacuccaaguucgagagcguggccugguccgccagcgccugccacgacggcaugggcuggcucaccaucgggaucuccggccccgacaacggggcgguggccguccugaaguacaacggcaucaucaccggcacgaucaagagcuggaagaagcagauccugcggacccaggaguccgagugcgugugcaugaacgggagcugcuucaccaucaugaccgacggccccuccaacaaggccgccagcuacaagaucuucaagaucgagaaggggaaggugacgaaguccaucgagcucaacgcccccaacuucuacuacgaggagugcagcugcuacccggacaccggcaucgucaugugcgugugccgcgacaacuggcacggguccaaccggcccugggugagcuucaaccagaaccuggacuaccagaucggcuacaucugcuccggcgucuucggggacaacccccgccccgaggacggcgaggggagcugcaacccggugaccguggacggcgcgaacggggucaagggcuucuccuacaaguacggcaacgggguguggaucggccggaccaagagcaaccgccugcggaagggguucgagaugaucugggaccccaacggcuggacgaacaccgacuccgacuucagcgugaagcaggacgucguggccaucaccgacuggagcggguacuccggcagcuucgugcagcaccccgagcucaccggccuggacugcauccgccccugcuucugggucgagcuggugcgggggcucccgcgcgagaacacgaccaucuggaccuccggcagcuccaucagcuucugcggggucaacuccgacaccgccaacuggagcuggcccgacggcgccgagcugcccuucacgaucgacaaguga

SEQ ID NO: 81179 - RNA, 1410 nt, Artificial Sequence; identical to SEQ ID NO: 80762
  derived and/or modified CDS sequence (opt1) from neuraminidase__InfluenzaA__ACU13077

SEQ ID NO: 81180 - RNA, 1410 nt, Artificial Sequence; identical to SEQ ID NO: 80762
  derived and/or modified CDS sequence (opt1) from neuraminidase__InfluenzaA__ACU13078

SEQ ID NO: 81181 - RNA, 1410 nt, Artificial Sequence; identical to SEQ ID NO: 80762
  derived and/or modified CDS sequence (opt1) from neuraminidase__InfluenzaA__ACU13079

SEQ ID NO: 81182 - RNA, 1410 nt, Artificial Sequence; identical to SEQ ID NO: 80762
  derived and/or modified CDS sequence (opt1) from neuraminidase__InfluenzaA__ACU13080

SEQ ID NO: 81183 - RNA, 1410 nt, Artificial Sequence; identical to SEQ ID NO: 80752
  derived and/or modified CDS sequence (opt1) from neuraminidase__InfluenzaA__ACU13081

SEQ ID NO: 81184 - RNA, 1410 nt, Artificial Sequence; identical to SEQ ID NO: 80762
  derived and/or modified CDS sequence (opt1) from neuraminidase__InfluenzaA__ACU13082

SEQ ID NO: 81185 - RNA, 1410 nt, Artificial Sequence; identical to SEQ ID NO: 80762
  derived and/or modified CDS sequence (opt1) from neuraminidase__InfluenzaA__ACU13083

SEQ ID NO: 81186 - RNA, 1410 nt, Artificial Sequence
  derived and/or modified CDS sequence (opt1) from neuraminidase__InfluenzaA__ACU13084
augaaccccaaccagaagaucaucaccaucggcagcgugugcaugaccaucgggauggccaaccugauccuccagaucggcaacaucaucuccaucuggaucagccacuccauccagcuggggaaccagaaccagaucgagacgugcaaccagagcgucaucaccuacgagaacaacaccugggugaaccagaccuacgugaacaucuccaacacgaacuucgccgcgggccagagcgucguguccaugaagcuggccgggaacagcucccucugcccggugggcggcugggccaucuacagcaaggacaacuccguccgcaucgggagcaagggcgacguguucgugauccgggagcccuucaucuccugcagcccccuggagugccgcaccuucuuccugacccagggggcccuccugaacgacaagcacuccaacggcaccaucaaggaccggagccccuaccgcacgcugauguccugcccgaucggggagguccccagccccuacaacucccgguucgagagcguggccuggagcgcguccgccugccacgacggcaucaacuggcucaccaucggcaucagcgggcccgacaacggcgccguggccguccugaaguacaacgggaucaucaccgacaccaucaaguccuggcgcaacaacauccugcggacgcaggagagcgagugcgcgugcgugaacggcuccugcuucaccgugaugaccgacggcccgagcaacgggcaggccuccuacaagaucuuccgcaucgagaagggcaagaucgucaagagcguggagaugaacgcccccaacuaccacuacgaggagugcuccugcuaccccgacagcuccgagaucacgugcgugugccgggacaacuggcacgggagcaaccgccccugggucuccuucaaccagaaccucgaguaccagaucggcuacaucugcagcgggaucuucggcgacaacccgcggcccaacgacaagaccggcuccugcgggcccgugagcuccaacggcgccaacggggugaagggcuucagcuucaaguacgggaacggcgucuggaucggccgcaccaaguccaucagcagccggaacggguucgagaugaucugggaccccaacggcuggaccgggaccgacaacaacuucuccaucaagcaggacaucgugggcaucaacgaguggagcggguacuccggcagcuucgugcagcacccggagcugacgggccuggacugcauccgccccugcuucugggucgagcucauccgggggcgccccaaggagaacaccaucuggaccuccggcagcuccaucagcuucugcggggugaacuccgacaccgucggcuggagcuggcccgacggcgccgagcugccguucacgaucgacaaguga

SEQ ID NO: 81187 - RNA, 1410 nt, Artificial Sequence; identical to SEQ ID NO: 80762
  derived and/or modified CDS sequence (opt1) from neuraminidase__InfluenzaA__ACU16799

SEQ ID NO: 81188 - RNA, 1410 nt, Artificial Sequence; identical to SEQ ID NO: 80762
  derived and/or modified CDS sequence (opt1) from neuraminidase__InfluenzaA__ACU16861

SEQ ID NO: 81189 - RNA, 1410 nt, Artificial Sequence; identical to SEQ ID NO: 80762
  derived and/or modified CDS sequence (opt1) from neuraminidase__InfluenzaA__ACU16934

SEQ ID NO: 81190 - RNA, 1410 nt, Artificial Sequence; identical to SEQ ID NO: 80762
  derived and/or modified CDS sequence (opt1) from neuraminidase__InfluenzaA__ACU16997

SEQ ID NO: 81191 - RNA, 1410 nt, Artificial Sequence; identical to SEQ ID NO: 80762
  derived and/or modified CDS sequence (opt1) from neuraminidase__InfluenzaA__ACU17130

SEQ ID NO: 81192 - RNA, 1410 nt, Artificial Sequence; identical to SEQ ID NO: 80762
  derived and/or modified CDS sequence (opt1) from neuraminidase__InfluenzaA__ACU17191

SEQ ID NO: 81193 - RNA, 1410 nt, Artificial Sequence
  derived and/or modified CDS sequence (opt1) from neuraminidase__InfluenzaA__ACU17262
augaaccccaaccagaagaucaucaccaucggcagcgugugcaugaccaucgggauggccaaccugauccuccagaucggcaacaucaucuccaucuggaucagccacuccauccagcuggggaaccagagccagaucgagacgugcaaccaguccgucaucaccuacgagaacaacaccugggugaaccagaccuacgugaacaucagcaacacgaacuucgccgcgggccaguccgucgugagcgugaagcuggccgggaacuccagccucugcccggucuccggcugggccaucuacagcaaggacaacuccauccgcaucggcagcaagggggacguguucgugauccgggagcccuucaucuccugcagcccccuggagugccgcaccuucuuccugacccagggcgcccuccugaacgacaagcacuccaacgggaccaucaaggaccggagccccuaccgcacgcugauguccugcccgaucggcgagguccccagccccuacaacagccgguucgaguccguggccuggagcgcguccgccugccacgacgggaucaacuggcucaccaucggcaucagcggccccgacaacggggccguggccguccugaaguacaacggcaucaucaccgacaccaucaaguccuggcgcaacaacauccugcggacgcaggagagcgagugcgcgugcgugaacggguccugcuucaccgugaugaccgacggcccgagcgacggccaggccuccuacaagaucuuccgcaucgagaaggggaagaucgucaagagcguggagaugaacgcccccaacuaccacuacgaggagugcuccugcuaccccgacagcuccgagaucacgugcgugugccgggacaacuggcacggcagcaaccgccccugggucuccuucaaccagaaccucgaguaccagaucggguacaucugcagcggcaucuucggggacaacccgcggcccaacgacaagaccggcuccugcggccccgugagcuccaacggggccaacggcgugaagggguucagcuucaaguacggcaacggggucuggaucggccgcaccaagagcaucuccagccggaacggcuucgagaugaucugggaccccaacggguggaccggcaccgacaacaacuucuccaucaagcaggacaucguggggaucaacgaguggagcggcuacuccgggagcuucgugcagcacccggagcugacgggccuggacugcauccgccccugcuucugggucgagcucauccggggccgccccaaggagaacaccaucuggaccuccgggagcuccaucagcuucugcggcgugaacuccgacaccgucggguggagcuggcccgacggcgccgagcugccguucacgaucgacaaguga

SEQ ID NO: 81194 - RNA, 1410 nt, Artificial Sequence; identical to SEQ ID NO: 80762
  derived and/or modified CDS sequence (opt1) from neuraminidase__InfluenzaA__ACU17325

SEQ ID NO: 81195 - RNA, 1410 nt, Artificial Sequence; identical to SEQ ID NO: 80762
  derived and/or modified CDS sequence (opt1) from neuraminidase__InfluenzaA__ACU17393

SEQ ID NO: 81196 - RNA, 1410 nt, Artificial Sequence; identical to SEQ ID NO: 80762
  derived and/or modified CDS sequence (opt1) from neuraminidase__InfluenzaA__ACU17454

SEQ ID NO: 81197 - RNA, 1410 nt, Artificial Sequence; identical to SEQ ID NO: 80762
  derived and/or modified CDS sequence (opt1) from neuraminidase__InfluenzaA__ACU17524

SEQ ID NO: 81198 - RNA, 1410 nt, Artificial Sequence; identical to SEQ ID NO: 81116
  derived and/or modified CDS sequence (opt1) from neuraminidase__InfluenzaA__ACU27043

SEQ ID NO: 81199 - RNA, 1413 nt, Artificial Sequence
  derived and/or modified CDS sequence (opt1) from neuraminidase__InfluenzaA__ACU27415
augaaccccaaccagaagaucaucaccaucggcagcaucuccaucgccaucgggaucaucagccugaugcuccagaucggcaacaucaucuccaucugggccagccacuccauccagaccgggagccagaacaacacgggcaucugcaaccagcgcaucaucaccuacgagaacuccaccugggugaaccacaccuacgucaacaucaacaacacgaacgugguggcgggggaggacaagaccagcgucaccuucgccggcaacuccagccugugcuccaucagcggcugggccaucuacaccaaggacaacuccauccggaucgggagcaagggcgacguguucgugauccgcgagccguucaucuccugcagccaccuggagugccggacguucuuccucacccagggggcccugcugaacgacaagcacuccaacggcaccgucaaggaccgcagccccuaccgggcccucauguccugcccccugggggaggcgcccagcccguacaacagcaaguucgaguccguggccuggagcgccuccgccugccacgacggcaugggcuggcugaccaucgggaucagcggccccgacaacggggcgguggccguccucaaguacaacggcaucaucacgggcaccaucaaguccuggaagaagcagauccugcgcacccaggagagcgagugcgugugcaugaacggguccugcuucaccaucaugacggacggccccagcaacaaggccgccuccuacaagaucuucaagaucgagaaggggaaggugaccaagagcaucgagcugaacgcccccaacuucuacuacgaggagugcuccugcuacccggacaccggcaucgucaugugcgugugccgggacaacuggcacgggagcaaccgccccuggguguccuucaaccagaaccucgacuaccagaucggcuacaucugcagcggcgucuucggggacaacccccggcccgaggacggcgagggguccugcaacccggugaccguggacggcgcgaacggggucaagggcuucagcuacaaguacggcaacgggguguggaucggccgcacgaaguccaaccggcugcgcaagggguucgagaugaucugggaccccaacggcuggaccaacaccgacagcgacuucuccgugaagcaggacgucguggccaucaccgacuggagcggguacagcggcuccuucgugcagcaccccgagcugacgggccucgacugcauccggcccugcuucugggucgagcuggugcgcgggcugccgcgggagaacaccaccaucuggaccagcggcuccagcaucuccuucugcggggucaacagcgacacggccaacugguccuggcccgacggcgccgagcuccccuucaccaucgacaaguga

SEQ ID NO: 81200 - RNA, 1413 nt, Artificial Sequence; identical to SEQ ID NO: 81199
  derived and/or modified CDS sequence (opt1) from neuraminidase__InfluenzaA__ACU27416

SEQ ID NO: 81201 - RNA, 1410 nt, Artificial Sequence; identical to SEQ ID NO: 80752
  derived and/or modified CDS sequence (opt1) from neuraminidase__InfluenzaA__ACU29961

SEQ ID NO: 81202 - RNA, 1410 nt, Artificial Sequence
  derived and/or modified CDS sequence (opt1) from neuraminidase__InfluenzaA__ACU29971
augaaccccaaccagaagaucaucaccaucggcagcgugugcaugaccaucgggauggccaaccugauccuccagaucggcaacaucaucuccaucuggaucagccacuccauccagcuggggaaccagaaccagaucgagacgugcaaccagagcgucaucaccuacgagaacaacaccugggugaaccagaccuacgugaacaucuccaacacgaacuucgccgcgggccagagcgucguguccgugaagcuggccgggaacagcucccucugcccggucagcggcugggccaucuacuccaaggacaacagcgugcgcaucggcuccaagggggacguguucgucauccgggagcccuucaucagcugcagcccccuggagugccgcaccuucuuccugacccagggcgcccuccugaacgacaagcacuccaacgggaccaucaaggaccggucccccuaccgcacgcugaugagcugcccgaucggcgaggugcccucccccuacaacagccgguucgagagcguggccugguccgcgagcgccugccacgacgggaucaacuggcucaccaucggcaucuccggccccgacaacggggccgucgccgugcugaaguacaacggcaucaucaccgacaccaucaagagcuggcgcaacaacauccugcggacgcaggaguccgagugcgcgugcgugaacgggagcugcuucaccgucaugaccgacggcccguccaacggccaggccagcuacaagaucuuccgcaucgagaaggggaagaucgugaaguccguggagaugaacgcccccaacuaccacuacgaggagugcagcugcuaccccgacuccagcgagaucacgugcgucugccgggacaacuggcacggcuccaaccgccccugggugagcuucaaccagaaccucgaguaccagaucggguacaucugcuccggcaucuucggggacaacccgcggcccaacgacaagaccggcagcugcggccccguguccagcaacggggccaacggcgucaagggguucuccuucaaguacggcaacgggguguggaucggccgcaccaagagcaucagcucccggaacggcuucgagaugaucugggaccccaacggguggaccggcaccgacaacaacuucagcaucaagcaggacaucguggggaucaacgagugguccggcuacagcggguccuucguccagcacccggagcugacgggccuggacugcauccgccccugcuucuggguggagcucauccggggccgccccaaggagaacaccaucuggaccagcggguccagcaucuccuucugcggcgucaacagcgacaccguggggugguccuggagcgacggcgccgagcugcccuucacgaucgacaaguga

SEQ ID NO: 81203 - RNA, 1410 nt, Artificial Sequence; identical to SEQ ID NO: 80762
  derived and/or modified CDS sequence (opt1) from neuraminidase__InfluenzaA__ACU29981

SEQ ID NO: 81204 - RNA, 1410 nt, Artificial Sequence; identical to SEQ ID NO: 80762
  derived and/or modified CDS sequence (opt1) from neuraminidase__InfluenzaA__ACU29991

SEQ ID NO: 81205 - RNA, 1410 nt, Artificial Sequence; identical to SEQ ID NO: 80762
  derived and/or modified CDS sequence (opt1) from neuraminidase__InfluenzaA__ACU30001

SEQ ID NO: 81206 - RNA, 1410 nt, Artificial Sequence; identical to SEQ ID NO: 80762
  derived and/or modified CDS sequence (opt1) from neuraminidase__InfluenzaA__ACU30021

SEQ ID NO: 81207 - RNA, 1410 nt, Artificial Sequence
  derived and/or modified CDS sequence (opt1) from neuraminidase__InfluenzaA__ACU30085
augaaccccaaccagaagaucaucaccaucggcagcgugugcaugaccaucgggauggccaaccugauccuccagaucggcaacaucaucuccaucuggaucagccacuccauccagcuggggaaccagaaccagaucgagacgugcaaccagagcgucaucaccuacgagaacaacaccugggugaaccagaccuacgugaacaucuccaacacgaacuucgccgcgggccagagcgucguguccgugaagcugauggggaacagcucccucugcccggucagcggcugggccaucuacuccaaggacaacagcgugcgcaucggcuccaagggggacguguucgucauccgggagcccuucaucagcugcagcccccuggagugccgcaccuucuuccugacccagggcgcccuccugaacgacaagcacuccaacgggaccaucaaggaccggucccccuaccgcacgcugaugagcugcccgaucggcgaggugcccucccccuacaacagccgguucgagagcguggccugguccgccagcgcgugccacgacgggaucaacuggcucaccaucggcaucuccggccccgacaacggggccgucgccgugcugaaguacaacggcaucaucaccgacaccaucaagagcuggcgcaacaacauccugcggacgcaggaguccgagugcgccugcgugaacgggagcugcuucaccgucaugaccgacggcccguccaacggccaggcgagcuacaagaucuuccgcaucgagaaggggaagaucgugaaguccguggagaugaacgcccccaacuaccacuacgaggagugcagcugcuaccccgacuccagcgagaucacgugcgucugccgggacaacuggcacggcuccaaccgccccugggugagcuucaaccagaaccucgaguaccagaucggguacaucugcuccggcaucuucggggacaacccgcggcccaacgacaagaccggcagcugcggccccguguccagcaacggggccaacggcgucaagggguucuccuucaaguacggcaacgggguguggaucggccgcaccaagagcaucagcucccggaacggcuucgagaugaucugggaccccaacggguggaccggcaccgacaacaacuucagcaucaagcaggacaucguggggaucaacgagugguccggcuacagcggguccuucguccagcacccggagcugacgggccuggacugcauccgccccugcuucuggguggagcucauccggggccgccccaaggagaacaccaucuggaccagcggguccagcaucuccuucugcggcgucaacagcgacaccguggggugguccuggcccgacggcgccgagcugccguucacgaucgacaaguga

SEQ ID NO: 81208 - RNA, 1410 nt, Artificial Sequence; identical to SEQ ID NO: 81186
  derived and/or modified CDS sequence (opt1) from neuraminidase__InfluenzaA__ACU30095

SEQ ID NO: 81209 - RNA, 1410 nt, Artificial Sequence; identical to SEQ ID NO: 80762
  derived and/or modified CDS sequence (opt1) from neuraminidase__InfluenzaA__ACU30105

SEQ ID NO: 81210 - RNA, 1410 nt, Artificial Sequence; identical to SEQ ID NO: 80762
  derived and/or modified CDS sequence (opt1) from neuraminidase__InfluenzaA__ACU30114

SEQ ID NO: 81211 - RNA, 1410 nt, Artificial Sequence; identical to SEQ ID NO: 80762
  derived and/or modified CDS sequence (opt1) from neuraminidase__InfluenzaA__ACU30123

SEQ ID NO: 81212 - RNA, 1410 nt, Artificial Sequence
  derived and/or modified CDS sequence (opt1) from neuraminidase__InfluenzaA__ACU31177
augaaccccaaccagaagaucaucaccaucggcagcgugugcaugaccaucgggauggccaaccugauccuccagaucggcaacaucaucuccaucuggaucagccaccugauccagcuggggaaccagaaccagaucgagacgugcaaccaguccgucaucaccuacgagaacaacaccugggugaaccagaccuacgugaacaucagcaacacgaacuucgccgcgggccaguccgucgugagcgugaagcucgccgggaacuccagccugugcccggucuccggcugggccaucuacagcaaggacaacuccauccgcaucggcagcaagggggacguguucgugauccgggagcccuucaucuccugcagcccccuggagugccgcaccuucuuccucacccagggcgcccugcugaacgacaagcacuccaacgggaccaucaaggaccggagccccuaccgcacgcucauguccugcccgaucggcgagguccccagccccuacaacucccgguucgagagcguggccuggagcgcguccgccugccacgacgggaucagcuggcugaccaucggcaucuccggccccgacaacggggccguggccguccugaaguacaacggcaucaucaccgacaccaucaagagcuggcgcaacaacauccuccggacgcaggaguccgagugcgcgugcgugaacgggagcugcuucaccgugaugaccgacggcccguccgacggccaggccagcuacaagaucuuccgcaucgagaaggggaagaucgucaaguccguggagaugaacgcccccaacuaccacuacgaggagugcagcugcuaccccgacuccagcgagaucacgugcgugugccgggacaacuggcacggcuccaaccgccccugggucagcuucaaccagaaccuggaguaccagaucggguacaucugcuccggcaucuucggggacaacccgcggcccaacgacaagaccggcagcugcggccccguguccagcaacggggccaacggcgugaagggguucuccuucaaguacggcaacggggucuggaucggccgcaccaagagcaucagcucccggaacggcuucgagaugaucugggaccccaacggguggaccggcaccgacaacaacuucagcaucaagcaggacaucguggggaucaacgagugguccggcuacagcggguccuucgugcagcacccggagcugacgggccucgacugcauccgccccugcuucugggucgagcugauccggggccgccccaaggagaacaccaucuggaccagcggguccagcaucuccuucugcggcgugaacagcgacaccgucgggugguccuggcccgacggcgccgagcugccguucacgaucgacaaguga

SEQ ID NO: 81213 - RNA, 1410 nt, Artificial Sequence; identical to SEQ ID NO: 80762
  derived and/or modified CDS sequence (opt1) from neuraminidase__InfluenzaA__ACU31178

SEQ ID NO: 81214 - RNA, 1410 nt, Artificial Sequence; identical to SEQ ID NO: 80752
  derived and/or modified CDS sequence (opt1) from neuraminidase__InfluenzaA__ACU31179

SEQ ID NO: 81215 - RNA, 1410 nt, Artificial Sequence; identical to SEQ ID NO: 80752
  derived and/or modified CDS sequence (opt1) from neuraminidase__InfluenzaA__ACU31180

SEQ ID NO: 81216 - RNA, 1410 nt, Artificial Sequence; identical to SEQ ID NO: 80752
  derived and/or modified CDS sequence (opt1) from neuraminidase__InfluenzaA__ACU31181

SEQ ID NO: 81217 - RNA, 1410 nt, Artificial Sequence; identical to SEQ ID NO: 80762
  derived and/or modified CDS sequence (opt1) from neuraminidase__InfluenzaA__ACU31182

SEQ ID NO: 81218 - RNA, 1410 nt, Artificial Sequence; identical to SEQ ID NO: 80792
  derived and/or modified CDS sequence (opt1) from neuraminidase__InfluenzaA__ACU31183

SEQ ID NO: 81219 - RNA, 1410 nt, Artificial Sequence; identical to SEQ ID NO: 80762
  derived and/or modified CDS sequence (opt1) from neuraminidase__InfluenzaA__ACU31184

SEQ ID NO: 81220 - RNA, 1410 nt, Artificial Sequence; identical to SEQ ID NO: 80752
  derived and/or modified CDS sequence (opt1) from neuraminidase__InfluenzaA__ACU31185

SEQ ID NO: 81221 - RNA, 1410 nt, Artificial Sequence; identical to SEQ ID NO: 80752
  derived and/or modified CDS sequence (opt1) from neuraminidase__InfluenzaA__ACU31186

SEQ ID NO: 81222 - RNA, 1410 nt, Artificial Sequence; identical to SEQ ID NO: 80752
  derived and/or modified CDS sequence (opt1) from neuraminidase__InfluenzaA__ACU31187

SEQ ID NO: 81223 - RNA, 1410 nt, Artificial Sequence; identical to SEQ ID NO: 80752
  derived and/or modified CDS sequence (opt1) from neuraminidase__InfluenzaA__ACU31188

SEQ ID NO: 81224 - RNA, 1350 nt, Artificial Sequence
  derived and/or modified CDS sequence (opt1) from neuraminidase__InfluenzaA__ACU46645
augaaccccaacaagaagaucaucaccaucggcagcaucugcauggugaccgggauggucucccugaugcuccagaucggcaaccugaucagcaucugggugucccacagcauccacacggggaaccagcacaaggccgagccgaucuccaacaccaaccugcucaccgagaagaccguggccagcgucaagcuggcgggcaacuccagccugugccccaucaacgggugggccguguacuccaaggacaacagcauccgcaucggcuccaagggcgacguguucgucauccgggagcccuucaucagcugcucccaccucgagugccgcacguucuuccugacccagggggcccugcucaacgacaagcacagcaacggcaccgugaaggaccggagcccccaccgcacccugauguccgggccggugggcgaggcccccucccccuacaacagccgguucgaguacgucgccugguccgcgagcgccugccacgaccgcacgagccggcugaccaucgggaucuccggccccgacaacggcgccguggccgugcucaaguacaacgggaucaucaccgacaccaucaagagcuggcgcaacaacauccugcggacgcaggaguccgagugcgcgugcgucaacggcagcugcuucaccgugaugaccgacgggccguccaacggccaggccagccacaagaucuucaagauggagaagggcaagguggucaaguccguggagcuggacgcccccaacuaccacuacgaggagugcagcugcuaccccgacgccggggagaucacgugcgugugccgcgacaacuggcacggcuccaaccggcccugggucagcuucaaccagaaccucgaguaccagaucggguacaucugcuccggcguguucggggacaacccgcgccccaacgacggcgccggcagcugcgggcccguguccagcaacggcgcguacggggucaagggcuucuccuucaaguacgggaacggcguguggaucggccggaccaagagcaccaacucccgcagcggguucgagaugaucugggaccccaacggcuggaccgagaccgacuccagcuucagcgugaagcaggacaucgucgccaucacggacugguccggguacagcggcuccuucgugcagcacccggagcugaccgggcuggacugcauccggcccugcuucugggucgagcucauccgcggccggcccaaggagagcaccaucuggaccuccggcagcuccaucagcuucugcggggugaacuccgacacggugggcuggagcuggcccgacggggccgagcugccguucaccaucgacaaguga

SEQ ID NO: 81225 - RNA, 1410 nt, Artificial Sequence
  derived and/or modified CDS sequence (opt1) from neuraminidase__InfluenzaA__ACU56927
augaaccccaaccagaagaucaucaccaucggcagcgugugcaugaccaucgggauggccaaccugauccuccagaucggcaacaucaucuccaucuggaucagccacuccauccagcuggggaaccagaaccagaucgagacgugcaaccagagcgucaucaccuacgagaacaacaccugggugaaccagaccuacgugaacaucuccaacacgaacuucgccgcgggccagagcgucguguccgugaagcuggccgggaacagcucccucugcccggucagcggcugggccaucuacuccaaggacaacagcauccgcaucggcuccaagggggacguguucgugauccgggagcccuucaucagcugcagcccccuggagugccgcaccuucuuccugacccagggcgcccuccugaacgacaagcacuccaacgggaccaucaaggaccggucccccuaccgcacgcugaugagcugcccgaucggcgagguccccucccccuacaacagccgguucgagagcguggccugguccgcgagcgccugccacgacgggaucaacuggcucaccaucggcaucuccggccccgacaacggggccguggccguccugaaguacaacggcaucaucaccgacaccaucaagagcuggcgcaacaacauccugcggacgcaggaguccgagugcgcgugcgugaacgggagcugcuucaccgugaugaccgacggcccguccaacggccaggccagcuacaagaucuuccgcaucgacaaggggaagaucgucaaguccguggagaugaacgcccccaacuaccacuacgaggagugcagcugcuaccccgacuccagcgagaucacgugcgugugccgggacaacuggcacggcuccaaccgccccugggucagcuucaaccagaaccucgaguaccagaucggguacaucugcuccggcaucuucggggacaacccgcggcccaacgacaagaccggcagcugcggccccguguccagcaacggggccaacggcgugaagggguucuccuucaaguacggcaacggggucuggaucggccgcaccaagagcaucagcucccggaacggcuucgagaugaucugggaccccaacggguggaccggcaccgacaacaacuucagcaucaagcaggacaucguggggaucaacgagugguccggcuacagcggguccuucgugcagcacccggagcugacgggccuggacugcauccgccccugcuucugggucgagcucauccggggccgccccaaggagaacaccaucuggaccagcggguccagcaucuccuucugcggcgugaacagcgacaccgucgggugguccuggcccgacggcgccgagcugccguucacgaucgacaaguga

SEQ ID NO: 81226 - RNA, 1410 nt, Artificial Sequence; identical to SEQ ID NO: 80917
  derived and/or modified CDS sequence (opt1) from neuraminidase__InfluenzaA__ACU56934

SEQ ID NO: 81227 - RNA, 1410 nt, Artificial Sequence; identical to SEQ ID NO: 80762
  derived and/or modified CDS sequence (opt1) from neuraminidase__InfluenzaA__ACU64791

SEQ ID NO: 81228 - RNA, 1410 nt, Artificial Sequence
  derived and/or modified CDS sequence (opt1) from neuraminidase__InfluenzaA__ACU64811
augaaccccaaccagaagaucaucaccaucggcagcgugugcaugaccaucgggauggccaaccugauccuccagaucggcaacaucaucuccaucuggaucagccacuccauccagcuggggaaccagaaccagaucgagacgugcaaccagagcgucaucaccuacgagaacaacaccugggugaaccagaccuacgugaacaucuccaacacgaacuucgccgcgggccagagcauggucuccgugaagcuggccgggaacagcucccucugcccggugagcggcugggccaucuacuccaaggacaacagcguccgcaucggcuccaagggggacguguucaucauccgggagcccuucaucagcugcagcccccuggagugccgcaccuucuuccugacccagggcgcccuccugaacgacaagcacuccaacgggaccaucaaggaccggucccccuaccgcacgcugaugagcugcccgaucggcgaggugcccucccccuacaacagccgguucgagagcgucgccugguccgcgagcgccugccacgacgggaucaacuggcucaccaucggcaucuccggccccgacaacggggccguggccgugcugaaguacaacggcaucaucaccgacaccaucaagagcuggcgcaacaacauccugcggacgcaggaguccgagugcgcgugcgucaacgggagcugcuucaccgugaugaccgacggcccguccaacggccaggccagcuacaagaucuuccgcaucgagaaggggaagaucgugaaguccgucgagaugaacgcccccaacuaccacuacgaggagugcagcugcuaccccgacuccagcgagaucacgugcgugugccgggacaacuggcacggcuccaaccgccccugggugagcuucaaccagaaccucgaguaccagaucggguacaucugcuccggcaucuucggggacaacccgcggcccaacgacaagaccggcagcugcggccccgucuccagcaacggggccaacggcgugaagggguucuccuucaaguacggcaacgggguguggaucggccgcaccaagagcaucagcucccggaacggcuucgagaugaucugggaccccaacggguggaccggcaccgacaacaacuucagcaucaagcaggacaucgucgggaucaacgagugguccggcuacagcggguccuucgugcagcacccggagcugacgggccuggacugcauccgccccugcuucuggguggagcucauccggggccgccccaaggagaacaccaucuggaccagcggguccagcaucuccuucugcggcgucaacagcgacaccguggggugguccuggcccgacggcgccgagcugccguucacgaucgacaaguga

SEQ ID NO: 81229 - RNA, 1410 nt, Artificial Sequence; identical to SEQ ID NO: 80527
  derived and/or modified CDS sequence (opt1) from neuraminidase__InfluenzaA__ACU79885

SEQ ID NO: 81230 - RNA, 1410 nt, Artificial Sequence; identical to SEQ ID NO: 78119
  derived and/or modified CDS sequence (opt1) from neuraminidase__InfluenzaA__ACU79896

SEQ ID NO: 81231 - RNA, 1410 nt, Artificial Sequence; identical to SEQ ID NO: 78119
  derived and/or modified CDS sequence (opt1) from neuraminidase__InfluenzaA__ACU79918

SEQ ID NO: 81232 - RNA, 1410 nt, Artificial Sequence; identical to SEQ ID NO: 78119
  derived and/or modified CDS sequence (opt1) from neuraminidase__InfluenzaA__ACU79929

SEQ ID NO: 81233 - RNA, 1413 nt, Artificial Sequence
  derived and/or modified CDS sequence (opt1) from neuraminidase__InfluenzaA__ACU79940
augaaccccaaccagaagaucaucaccaucggcagcaucuccaucgugaucgggaucaucagccugaugcuccagaucggcaacaucaucuccaucugggccagccacuccauccagaccgggagccagaaccacacgggcaucugcaaccagcgcaucaucaccuacgagaacuccaccugggucaaccacaccuacgugaacaucaacaacacgaacguggucgccgggaaggacaagaccagcgugacccuggcgggcaacuccagccugugcuccaucagcggcugggccaucuacaccaaggacaacuccauccggaucgggagcaagggcgacguguucgucauccgcgagccguucaucuccugcagccaccucgagugccggacguucuuccugacccagggggcccugcucaacgacaagcacuccaacggcaccgugaaggaccgcagccccuaccgggcccugauguccugcccccugggggaggcccccagcccguacaacagcaaguucgaguccguggcguggagcgccuccgccugccacgacggcaugggcuggcucaccaucgggaucagcggccccgacaacggggccgucgcggugcugaaguacaacggcaucaucacggagaccaucaaguccuggaagaagcgcauccugcggacccaggagagcgagugcgugugcgucaacggcuccugcuucaccaucaugacggacgggcccagcaacggcgccgccuccuacaagaucuucaagaucgagaaggggaaggugaccaagagcaucgagcucaacgcccccaacucccacuacgaggagugcagcugcuacccggacaccggcaccgugaugugcgucugccgcgacaacuggcacggguccaaccggcccugggugagcuucaaccagaaccuggacuaccagaucggcuacaucugcuccggcguguucggggacaacccccgccccaaggacggcgaggggagcugcaacccggucacgguggacggcgccgacggggugaagggcuucuccuaccgguacggcaacggggucuggaucggccgcaccaagagcaaccggcugcgcaagggguucgagaugaucugggaccccaacggcuggaccgacaccgacuccgacuucagcgugaagcaggacguggucgcgaugacggacuggagcggguacuccggcagcuucgugcagcaccccgagcucaccggccuggacugcauccggcccugcuucugggucgagcuggugcgcgggcggccgcgcgagaacaccaccaucuggacguccggcagcuccaucagcuucugcggggugaacuccgacaccgccaacuggagcuggcccgacggcgccgagcuccccuucaccaucgacaaguga

SEQ ID NO: 81234 - RNA, 1410 nt, Artificial Sequence
  derived and/or modified CDS sequence (opt1) from neuraminidase__InfluenzaA__ACU79951
augaaccccaaccagaagaucaucaccaucggcagcgugucccugaccaucgagacggucugcuuccucaugcagaucgccauccuggccaccaccgugacccugcacuucaagcagcacgagugcgacagcccggcguccaaccaggugaugcccugcgagcccaucaucaucgagcgcaacaucacggagaucgucuaccucaacaacaccaccaucgagaaggagaucugccccgaggugguggaguaccggaacuggagcaagccgcagugccagaucaccggguucgcccccuucuccaaggacaacagcauccgccuguccgccggcggggacaucugggucacgcgggagcccuacgugagcugcgaccccggcaagugcuaccaguucgcccuggggcagggcaccacccucgacaacaagcacuccaacggcaccauccacgaccgcaucccgcaccggacgcugcugaugaacgagcucggggugcccuuccaccugggcaccaagcaggucugcguggccuggagcuccagcuccugccacgacgggaaggcguggcugcacgugugcgucaccggcgacgaccgcaacgccaccgccagcuucaucuacgacgggcggcucguggacuccaucggcagcuggucccagaacauccugcgcacgcaggagagcgagugcgugugcaucaacgggaccugcaccgucgugaugaccgacggcuccgccagcggccgggcggacacgcgcauccuguucaucaaggaggggaagaucgugcacaucagcccccucuccggcagcgcccagcacaucgaggagugcuccugcuacccccgguacccggacguccgcugcaucugccgggacaacuggaagggcagcaaccgccccgugaucgacaucaacauggaggacuacuccaucgacagcuccuacgugugcagcgggcuggucggcgacacgccccggaacgacgacuccagcuccaacagcaacugccgcgaccccaacaacgagcgggggaacccgggcgugaaggggugggccuucgacaacggcgacgacguguggaugggccgcaccaucuccaaggacagccgguccggguacgagaccuucaaggucaucggcggguggagcacccccaacuccaagagccaggugaaccgccaggucaucgugggcaacaacaacugguccggguacagcggcaucuucagcguggagggcaaguccugcaucaaccggugcuucuacgucgagcugauccgcgggcgcccccaggagacccgggugugguggaccagcaacuccaucguggucuucugcggcaccagcgggacguacggcaccggguccuggcccgacggcgccaacaucaacuucaugccgaucuga

SEQ ID NO: 81235 - RNA, 1410 nt, Artificial Sequence; identical to SEQ ID NO: 80627
  derived and/or modified CDS sequence (opt1) from neuraminidase__InfluenzaA__ACU79973

SEQ ID NO: 81236 - RNA, 1413 nt, Artificial Sequence; identical to SEQ ID NO: 80656
  derived and/or modified CDS sequence (opt1) from neuraminidase__InfluenzaA__ACU79984

SEQ ID NO: 81237 - RNA, 1410 nt, Artificial Sequence; identical to SEQ ID NO: 80623
  derived and/or modified CDS sequence (opt1) from neuraminidase__InfluenzaA__ACU80006

SEQ ID NO: 81238 - RNA, 1410 nt, Artificial Sequence
  derived and/or modified CDS sequence (opt1) from neuraminidase__InfluenzaA__ACU80017
augaacaccaaccagcgcaucaucaccaucggcacgaucugccugaucguggggaucaucagccuccugcugcagaucggcaacaucauccuccuguggaugucccacagcauccagaccggggagaagucccaccccaaggucugcaaccagagcgugaucaccuacgagaacaacaccugggugaaccagacguacgucaacaucuccaacaccaacaucgccgccggccagggggugaccccgaucauccuggcgggcaacagcucccucugccccaucagcggcugggccaucuacuccaaggacaacagcauccggaucggguccaagggcgacaucuucgugaugcgcgagcccuucaucagcugcucccaccuggagugccggaccuucuuccugacgcagggggcccuccugaacgaccgccacagcaacggcaccgucaaggaccggucccccuaccgcacccugaugagcugcccgaucggggaggcccccucccccuacaacagccgguucgaguccguggccuggagcgcgagcgccugccacgacggcaugggcuggcucaccaucgggaucuccggccccgacaacggggccguggccguccugaaguacaacggcaucaucacggacaccaucaagagcuggcgcaacaagauccugcggacccaggaguccgagugcgugugcaucaacggcagcugcuucaccaucaugacggacgggccguccaacggccaggcgagcuacaagcuguucaagauggagaaggggaagaucauccgcuccaucgagcucgacgcccccaacuaccacuacgaggagugcagcugcuaccccgacaccggcaagguggucugcgugugccgggacaacuggcacgccuccaaccgccccugggugagcuucgaccagaaccuggacuaccagaucggguacaucugcuccggcgucuucggcgacaacccgcggagcaacgacgggaagggcaacugcgggcccgugcucuccaacggcgccaacggggugaagggcuucagcuuccgcuacggcaacggggucuggaucggccggaccaaguccaucagcucccgcagcggguucgagaugaucugggaccccaacggcuggaccgagacggacuccagcuucagcaugaagcaggacaucaucgcccugaccgacugguccggguacagcggcuccuucgugcagcaccccgagcugaccggcaugaacugcauccggccgugcuucuggguggagcucauccgcgggcagcccaaggagagcaccaucuggacguccggcagcuccaucagcuucugcggggucaacuccggcaccgcgagcugguccuggcccgacggcgccgaccugcccuucaccaucgacaaguga

SEQ ID NO: 81239 - RNA, 1413 nt, Artificial Sequence; identical to SEQ ID NO: 80656
  derived and/or modified CDS sequence (opt1) from neuraminidase__InfluenzaA__ACU80028

SEQ ID NO: 81240 - RNA, 1410 nt, Artificial Sequence; identical to SEQ ID NO: 80623
  derived and/or modified CDS sequence (opt1) from neuraminidase__InfluenzaA__ACU80039

SEQ ID NO: 81241 - RNA, 1413 nt, Artificial Sequence; identical to SEQ ID NO: 80740
  derived and/or modified CDS sequence (opt1) from neuraminidase__InfluenzaA__ACU80050

SEQ ID NO: 81242 - RNA, 1410 nt, Artificial Sequence; identical to SEQ ID NO: 81173
  derived and/or modified CDS sequence (opt1) from neuraminidase__InfluenzaA__ACU80061

SEQ ID NO: 81243 - RNA, 1413 nt, Artificial Sequence; identical to SEQ ID NO: 80656
  derived and/or modified CDS sequence (opt1) from neuraminidase__InfluenzaA__ACU80072

SEQ ID NO: 81244 - RNA, 1413 nt, Artificial Sequence; identical to SEQ ID NO: 80656
  derived and/or modified CDS sequence (opt1) from neuraminidase__InfluenzaA__ACU80094

SEQ ID NO: 81245 - RNA, 1410 nt, Artificial Sequence; identical to SEQ ID NO: 80627
  derived and/or modified CDS sequence (opt1) from neuraminidase__InfluenzaA__ACU80105

SEQ ID NO: 81246 - RNA, 1410 nt, Artificial Sequence; identical to SEQ ID NO: 80627
  derived and/or modified CDS sequence (opt1) from neuraminidase__InfluenzaA__ACU80127

SEQ ID NO: 81247 - RNA, 1410 nt, Artificial Sequence; identical to SEQ ID NO: 80627
  derived and/or modified CDS sequence (opt1) from neuraminidase__InfluenzaA__ACU80138

SEQ ID NO: 81248 - RNA, 1410 nt, Artificial Sequence; identical to SEQ ID NO: 80623
  derived and/or modified CDS sequence (opt1) from neuraminidase__InfluenzaA__ACU80160

SEQ ID NO: 81249 - RNA, 1413 nt, Artificial Sequence; identical to SEQ ID NO: 80656
  derived and/or modified CDS sequence (opt1) from neuraminidase__InfluenzaA__ACU80171

SEQ ID NO: 81250 - RNA, 1410 nt, Artificial Sequence; identical to SEQ ID NO: 80536
  derived and/or modified CDS sequence (opt1) from neuraminidase__InfluenzaA__ACU80182

SEQ ID NO: 81251 - RNA, 1410 nt, Artificial Sequence
  derived and/or modified CDS sequence (opt1) from neuraminidase__InfluenzaA__ACU80193
augaaccccaaccagaagaucaucaccaucggcagcgugucccugaccaucagcacgaucugcuucuucaugcagaccgccauccucaucaccaccgucacgcugcacuucaagcaguacgaguucaacuccccgcccaacaaccaggugaugcugugcgagcccaccaucaucgagcgcaacaucaccgagaucguguaccucaccaacacgaccaucgagaaggagaucugccccaagcuggccgaguaccggaacuggagcaagccgcagugcgacaucaccggguucgcgcccuucuccaaggacaacagcauccgccuguccgccggcggggacaucugggucacccgggagcccuacgugagcugcgaccccgacaagugcuaccaguucgcccucggccaggggacgacccugaacaacgugcacuccaacgacaccguccgcgaccggaccccguaccgcacgcugcucaugaacgagcugggcgugcccuuccaccugggcaccaagcaggucugcaucgccuggagcuccagcuccugccacgacgggaaggccuggcuccacgugugcaucaccggcgacgacaagaacgcgaccgccagcuucaucuacaacgggcggcugguggacuccaucgugagcugguccaaggagauccugcgcacgcaggagagcgagugcgucugcaucaacgggaccugcaccguggugaugaccgacggguccgccagcggcaaggccgacacgaagauccucuucaucgaggagggcaagaucguccacaccagcacccuguccgggagcgcgcagcacguggaggagugcuccugcuacccccgguaccccggcgugcgcugcgucugccgggacaacuggaaggggagcaaccgcccgaucguggacaucaacaucaaggaccacuccaucgugagcuccuacgucugcagcggccuggugggcgacacgccccggaagaacgacuccagcuccagcucccacugccucgaccccaacaacgaggagggcggccacggggugaagggcugggccuucgacgacgggaacgacgucuggaugggccgcaccaucagcgagaagucccggcugggcuacgagaccuucaaggugaucgagggguggagcaaccccaaguccaagcugcagaucaaccgccaggucaucguggaccggggcgaccgcagcggguacuccggcaucuucagcguggagggcaagagcugcaucaaccggugcuucuacgucgagcucauccgcgggcggaaggaggagaccgaggugcuguggaccuccaacagcaucguggucuucugcggcacguccgggaccuacggcaccgggagcuggccggacggcgccgacaucaaccugaugcccaucuga

SEQ ID NO: 81252 - RNA, 1410 nt, Artificial Sequence; identical to SEQ ID NO: 80536
  derived and/or modified CDS sequence (opt1) from neuraminidase__InfluenzaA__ACU80204

SEQ ID NO: 81253 - RNA, 1413 nt, Artificial Sequence
  derived and/or modified CDS sequence (opt1) from neuraminidase__InfluenzaA__ACU80237
augaaccccaaccagaagaucaucaccaucggcagcaucuccaucgccaucgggaucaucagccugaugcuccagaucggcaacaucaucuccaucugggccagccacuccauccagaccgggaaccagaacaacacgggcaucugcaaccagcgcaucaucaccuacgagaacagcaccugggugaaccacaccuacgucaacaucaacaacacgaacgugguggcgggggaggacaagaccuccgucacccuggccggcaacagcucccugugcagcaucuccggcugggccaucuacaccaaggacaacagcauccggaucggguccaagggcgacguguucgugauccgcgagccguucaucagcugcucccaccucgagugccggacguucuuccugacccagggggcccugcucaacgacaagcacagcaacggcaccgucaaggaccgcucccccuaccgggcccugaugagcugcccccugggggaggcgcccuccccguacaacagcaaguucgagagcguggccugguccgccagcgccugccacgacggcaugggcuggcucaccaucgggaucuccggccccgacaacggggcgguggccguccugaaguacaacggcaucaucacgggcaccaucaagagcuggaagaagcagauccugcgcacccaggaguccgagugcgugugcaugaacgggagcugcuucaccaucaugacggacggccccuccaacaaggccgccagcuacaagaucuucaagaucgagaaggggaaggugaccaaguccaucgagcucaacgcccccaacuuccacuacgaggagugcagcugcuacccggacaccggcaucgucaugugcgugugccgggacaacuggcacggguccaaccgccccugggugagcuucaaccagaaccuggacuaccagaucggcuacaucugcuccggcgucuucggggacaacccccggcccgaggacggcgaggggagcugcaacccggugaccguggacggcgcgaacggggucaagggcuucuccuacaaguacgacaacggcguguggaucgggcgcaccaagagcaaccggcugcgcaagggcuucgagaugaucugggaccccaacggguggacgaacaccgacuccgacuucagcgugaagcaggacgucguggccaucaccgacugguccggcuacagcgggagcuucgugcagcaccccgagcucacgggccuggacugcauccggcccugcuucugggucgagcuggugcgcggccucccgcgggagaacaccaccaucuggaccuccgggagcuccaucagcuucugcggcgucaacuccgacacggccaacuggagcuggcccgacggggccgagcugcccuucaccaucgacaaguga

SEQ ID NO: 81254 - RNA, 1410 nt, Artificial Sequence; identical to SEQ ID NO: 80627
  derived and/or modified CDS sequence (opt1) from neuraminidase__InfluenzaA__ACU80248

SEQ ID NO: 81255 - RNA, 1410 nt, Artificial Sequence; identical to SEQ ID NO: 80627
  derived and/or modified CDS sequence (opt1) from neuraminidase__InfluenzaA__ACU80259

SEQ ID NO: 81256 - RNA, 1413 nt, Artificial Sequence
  derived and/or modified CDS sequence (opt1) from neuraminidase__InfluenzaA__ACU80270
augaaccccaaccagaagaucaucaccaucggcagcaucuccaucgccaucgggaucaucagccugaugcuccagaucggcaacaucaucuccaucugggccagccacuccauccagaccgggagccagaacaacacgggcaucugcaaccagcgcaucaucaccuacgagaacuccaccugggugaaccacaccuacgucaacaucaacaacacgaacgugguggcgggggaggacaagaccagcgucacccuggccggcaacuccagccugugcuccaucagcggcugggccaucuacaccaaggacaacuccauccggaucgggagcaagggcgacguguucgugauccgcgagccguucaucuccugcagccaccucgagugccggacguucuuccugacccagggggcccugcucaacgacaagcacuccaacggcaccgucaaggaccgcagccccuaccgggcccugauguccugcccccugggggaggcgcccagcccguacaacagcaaguucgaguccguggccuggagcgccuccgccugccacgacggcaugggcuggcucaccaucgggaucagcggccccgacaacggggcgguggccguccugaaguacaacggcaucaucacgggcaccaucaaguccuggaagaagcagauccugcgcacccaggagagcgagugcgugugcaugaacggguccugcuucaccaucaugacggacggccccagcaacaaggccgccuccuacaagaucuucaagaucgagaaggggaaggugaccaagagcaucgagcucaacgcccccaacuuccacuacgaggagugcuccugcuacccggacaccagcaucgucaugugcgugugccgggacaacuggcacggcuccaaccgccccugggugagcuucaaccagaaccuggacuaccagaucggguacaucugcuccggcgucuucggcgacaacccccggcccgaggacggggagggcagcugcaacccggugaccguggacggggcgaacggcgucaagggguucuccuacaaguacgacaacggcguguggaucggccgcaccaagagcaaccggcugcgcaagggguucgagaugaucugggaccccaacggcuggacgaacaccgacuccgacuucagcgugaagcaggacgucguggccaucaccgacuggagcggguacuccggcagcuucgugcagcaccccgagcucacggggcuggacugcauccggcccugcuucugggucgagcuggugcgcggccucccgcgggagaacaccaccaucuggaccuccggcagcuccaucagcuucugcggggucaacuccgacacggccaacuggagcuggcccgacggcgccgagcugcccuucaccaucgacaaguga

SEQ ID NO: 81257 - RNA, 1413 nt, Artificial Sequence
  derived and/or modified CDS sequence (opt1) from neuraminidase__InfluenzaA__ACU80281
augaaccagaaccagaagaucaucaccaucggcagcaucuccaucgccaucgggaucaucagccugaugcuccagaucggcaacaucaucuccaucugggccagccacuccauccagaccgggagccagaacaacacgggcaucugcaaccagcgcaucaucaccuacgagaacuccaccugggugaaccacaccuacgucaacaucaacaacacgaacgugguggcgggggaggacaagaccagcgucacccuggccggcaacuccagccugugcuccaucagcggcugggccaucuacaccaaggacaacuccauccggaucgggagcaagggcgacguguucgugauccgcgagcccuucaucuccugcagccaccucgagugccggacguucuuccugacccagggggcccugcucaacgacaagcacuccaacggcaccgucaaggaccgcagcccguaccgggcccugauguccugcccccugggggaggcgcccagccccuacaacagcaaguucgaguccguggccuggagcgccuccgccugccacgacggcaugggcuggcucaccaucgggaucagcggcccggacaacggggcgguggccguccugaaguacaacggcaucaucacgggcaccaucaaguccuggaagaagcagauccugcgcacccaggagagcgagugcgugugcaugaacggguccugcuucaccaucaugacggacggccccagcaacaaggccgccuccuacaagaucuucaagaucgagaaggggaaggugaccaagagcaucgagcucaacgcccccaacuuccacuacgaggagugcuccugcuaccccgacaccggcaucgucaugugcgugugccgggacaacuggcacgggagcaaccgcccguggguguccuucaaccagaaccuggacuaccagaucggcuacaucugcagcggcgucuucggggacaacccccggcccgaggacggcgagggguccugcaaccccgugaccguggacggcgcgaacggggucaagggcuucagcuacaaguacgacaacggcguguggaucgggcgcacgaaguccaaccggcugcgcaagggcuucgagaugaucugggacccgaacggguggaccaacaccgacagcgacuucuccgugaagcaggacgucguggccaucaccgacuggagcggcuacagcggguccuucgugcagcaccccgagcucacgggccuggacugcauccggcccugcuucugggucgagcuggugcgcggccucccccgggagaacaccaccaucuggaccagcggguccagcaucuccuucugcggcgucaacagcgacacggccaacugguccuggccggacggggccgagcugcccuucaccaucgacaaguga

SEQ ID NO: 81258 - RNA, 1410 nt, Artificial Sequence
  derived and/or modified CDS sequence (opt1) from neuraminidase__InfluenzaA__ACU80303
augaaccccaaccagaagaucaucaccaucggcagcgugucccugaccaucagcacgaucugcuucuucaugcagaucgccauccucaucaccaccgucacccugcacuucaagcaguacgaguucaacuccagcccgaacaaccaggugaugcugugcgagcccacgaucaucgagcgcaacaucaccgagaucguguaccucaccaacaccacgaucgagaaggagaucugccccaagcuggccgaguaccggaacugguccaagccccagugcgacaucaccggguucgcgccguucagcaaggacaacuccauccgccugagcgccggcggggacaucugggucacccgggagcccuacguguccugcgaccccgacaagugcuaccaguucgcccucggccaggggaccacgcugaacaacgugcacagcaacaacaccguccgcgaccggacccccuaccgcacccugcucaugaacgagcugggcgugccguuccaccugggcacgaagcaggucugcaucgccugguccagcuccagcugccacgacgggaaggccuggcuccacgugugcaucaccggcgacgacaagaacgcgaccgccuccuucaucuacaacgggcggcugguggacagcaucguguccuggagcaaggagauccugcgcacccaggaguccgagugcgucugcaucaacggcacgugcaccguggugaugaccgacgggagcgccagcggcaaggccgacaccaagauccucuucaucgaggagggcaagaucguccacacguccacccugagcggguccgcgcagcacguggaggagugcagcugcuacccccgguaccccggcgugcgcugcgucugccgggacaacuggaagggguccaaccgccccaucguggacaucaacaucaaggaccacagcaucguguccagcuacgucugcuccggccuggugggcgacaccccgcggaagaacgacagcuccagcuccagccacugccucgaccccaacaacgaggagggcgggaacggggugaagggcugggccuucgacgacgggaacgacgucuggaugggccgcaccaucuccgagaagucccggcugggcuacgagacguucaaggugaucgagggguggagcaaccccaagagcaagcugcagaucaaccgccaggucaucguggaccggggcaaccgcuccggguacagcggcaucuucagcguggaggggaaguccugcaucaaccggugcuucuacgucgagcucauccgcggccggaaggaggagaccgaggugcuguggaccagcaacuccaucguggucuucugcggcaccagcgggacguacggcaccggguccuggcccgacggcgccgacaucaaccugaugccgaucuga

SEQ ID NO: 81259 - RNA, 1410 nt, Artificial Sequence; identical to SEQ ID NO: 80627
  derived and/or modified CDS sequence (opt1) from neuraminidase__InfluenzaA__ACU80314

SEQ ID NO: 81260 - RNA, 1410 nt, Artificial Sequence; identical to SEQ ID NO: 80627
  derived and/or modified CDS sequence (opt1) from neuraminidase__InfluenzaA__ACU80325

SEQ ID NO: 81261 - RNA, 1410 nt, Artificial Sequence; identical to SEQ ID NO: 80623
  derived and/or modified CDS sequence (opt1) from neuraminidase__InfluenzaA__ACU80336

SEQ ID NO: 81262 - RNA, 1410 nt, Artificial Sequence; identical to SEQ ID NO: 80627
  derived and/or modified CDS sequence (opt1) from neuraminidase__InfluenzaA__ACU80347

SEQ ID NO: 81263 - RNA, 1410 nt, Artificial Sequence; identical to SEQ ID NO: 80627
  derived and/or modified CDS sequence (opt1) from neuraminidase__InfluenzaA__ACU80358

SEQ ID NO: 81264 - RNA, 1410 nt, Artificial Sequence; identical to SEQ ID NO: 80627
  derived and/or modified CDS sequence (opt1) from neuraminidase__InfluenzaA__ACU80369

SEQ ID NO: 81265 - RNA, 1410 nt, Artificial Sequence; identical to SEQ ID NO: 80627
  derived and/or modified CDS sequence (opt1) from neuraminidase__InfluenzaA__ACU80380

SEQ ID NO: 81266 - RNA, 1410 nt, Artificial Sequence
  derived and/or modified CDS sequence (opt1) from neuraminidase__InfluenzaA__ACU80391
augaaccccaaccagaagaucaucaccaucggcagcgugucccugaccaucagcacgaucugcuucuucaugcagaucgccauccucaucaccaccgucacccugcacuucaagcaguacgaguucaacuccagcccgaacaaccaggugaugcugugcgagcccacgaucaucgagcgcaacaucaccgagaucguguaccucaccaacaccaucaucgagaaggagaucugccccaagcuggccgaguaccggaacugguccaagccccagugcgacaucacgggguucgcgccguucagcaaggacaacuccauccgccugagcgccggcggggacaucugggucacccgggagcccuacguguccugcgaccccgacaagugcuaccaguucgcccucggccaggggaccacccugaacaacgugcacagcaacaacacgguccgcgaccggacccccuaccgcacccugcucaugaacgagcugggcgugccguuccaccugggcaccaagcaggucugcaucgccugguccagcuccagcugccacgacgggaaggccuggcuccacgugugcaucacgggcgacgacaagaacgcgaccgccuccuucaucuacaacgggcggcugguggacagcaucguguccuggagcaaggagauccugcgcacccaggaguccgagugcgucugcaucaacgggaccugcacgguggugaugaccgacgggagcgccagcggcaaggccgacaccaagauccucuucaucgaggagggcaagaucguccacaccuccacgcugagcggguccgcgcagcacguggaggagugcagcugcuacccccgguaccccggcgugcgcugcgucugccgggacaacuggaagggguccaaccgccccaucguggacaucaacaucaaggaccacagcaucguguccagcuacgucugcuccggccuggugggcgacaccccgcggaagaacgacagcuccagcuccagccacugccucgaccccaacaacgaggagggcggccacggggugaagggcugggccuucgacgacgggaacgacgucuggaugggccgcaccaucuccgagaagucccggcugggcuacgagaccuucaaggugaucgagggguggagcaaccccaagagcaagcugcagaucaaccgccaggucaucguggaccggggcaaccgcuccggguacagcggcaucuucagcguggaggggaaguccugcaucaaccggugcuucuacgucgagcucauccgcggccggaaggaggagacggaggugcuguggaccagcaacuccaucguggucuucugcggcaccagcgggaccuacggcacgggguccuggcccgacggcgccgacaucaaccugaugccgaucuga

SEQ ID NO: 81267 - RNA, 1410 nt, Artificial Sequence; identical to SEQ ID NO: 80623
  derived and/or modified CDS sequence (opt1) from neuraminidase__InfluenzaA__ACU80402

SEQ ID NO: 81268 - RNA, 1413 nt, Artificial Sequence; identical to SEQ ID NO: 80656
  derived and/or modified CDS sequence (opt1) from neuraminidase__InfluenzaA__ACU80413

SEQ ID NO: 81269 - RNA, 1410 nt, Artificial Sequence; identical to SEQ ID NO: 80627
  derived and/or modified CDS sequence (opt1) from neuraminidase__InfluenzaA__ACU80427

SEQ ID NO: 81270 - RNA, 1410 nt, Artificial Sequence; identical to SEQ ID NO: 80627
  derived and/or modified CDS sequence (opt1) from neuraminidase__InfluenzaA__ACU80438

SEQ ID NO: 81271 - RNA, 1410 nt, Artificial Sequence; identical to SEQ ID NO: 80623
  derived and/or modified CDS sequence (opt1) from neuraminidase__InfluenzaA__ACU80461

SEQ ID NO: 81272 - RNA, 1410 nt, Artificial Sequence; identical to SEQ ID NO: 80627
  derived and/or modified CDS sequence (opt1) from neuraminidase__InfluenzaA__ACU80603

SEQ ID NO: 81273 - RNA, 1410 nt, Artificial Sequence; identical to SEQ ID NO: 80627
  derived and/or modified CDS sequence (opt1) from neuraminidase__InfluenzaA__ACU80614

SEQ ID NO: 81274 - RNA, 1410 nt, Artificial Sequence; identical to SEQ ID NO: 80627
  derived and/or modified CDS sequence (opt1) from neuraminidase__InfluenzaA__ACU80625

SEQ ID NO: 81275 - RNA, 1410 nt, Artificial Sequence; identical to SEQ ID NO: 80623
  derived and/or modified CDS sequence (opt1) from neuraminidase__InfluenzaA__ACU80636

SEQ ID NO: 81276 - RNA, 1410 nt, Artificial Sequence
  derived and/or modified CDS sequence (opt1) from neuraminidase__InfluenzaA__ACU80647
augaaccccaaccagaagaucaucaccaucggcagcgugucccugaccaucagcacgaucugcuucuucaugcagaccgccauccucaucaccaccgucacgcugcacuucaagcaguacgaguucaacuccccgcccaacaaccaggugaugcugugcgagcccaccaucaucgagcgcaacaucaccgagaucguguaccucaccaacacgaccaucgagaaggagaucugccccaagcuggccgaguaccggaacuggagcaagccgcagugcgacaucaccggguucgcgcccuucuccaaggacaacagcauccgccuguccgccggcggggacaucugggucacccgggagcccuacgugagcugcgaccccgacaagugcuaccaguucgcccucggccaggggacgacccugaacaacgugcacuccaacgacaccguccgcgaccggaccccguaccgcacgcugcucaugaacgagcugggcgugcccuuccaccugggcaccaagcaggucugcaucgccuggagcuccagcuccugccacgacgggaaggccuggcuccacgugugcaucaccggcgacgacaagaacgcgaccgccagcuucaucuacaacgggcggcugguggacuccguggucagcugguccaaggagauccugcgcacgcaggagagcgagugcgugugcaucaacgggaccugcaccguggucaugaccgacggguccgccagcggcaaggccgacacgaagauccucuucaucgaggagggcaagaucgugcacaccagcacccuguccgggagcgcgcagcacguggaggagugcuccugcuacccccgguaccccggcguccgcugcgugugccgggacaacuggaaggggagcaaccgcccgaucguggacaucaacaucaaggaccacuccaucgucagcuccuacgugugcagcggccuggugggcgacacgccccggaagaacgacuccagcuccagcucccacugccucgaccccaacaacgaggagggcggccacggggucaagggcugggccuucgacgacgggaacgacguguggaugggccgcaccaucagcgagaagucccggcugggcuacgagaccuucaaggucaucgagggguggagcaaccccaaguccaagcugcagaucaaccgccaggugaucguggaccggggcgaccgcagcggguacuccggcaucuucagcgucgagggcaagagcugcaucaaccggugcuucuacguggagcucauccgcgggcggaaggaggagaccgaggugcuguggaccuccaacagcaucgucguguucugcggcacguccgggaccuacggcaccgggagcuggccggacggcgccgacaucaaccugaugcccaucuga

SEQ ID NO: 81277 - RNA, 1410 nt, Artificial Sequence
  derived and/or modified CDS sequence (opt1) from neuraminidase__InfluenzaA__ACU80658
augaaccccaaccagaagaucaucaccaucggcagcgugucccugaccaucagcacgaucugcuucuucaugcagaucgccauccucaucaccaccgucacccugcacuucaagcaguacgaguucaacuccccgcccaacaaccaggugaugcugugcgagcccaagaucaucgagcgcaacaucacggagaucguguaccucaccaacaccaccaucgagaaggagaucugccccaagcuggccgaguaccggaacuggagcaagccgcagugcgacaucacgggguucgcgcccuucuccaaggacaacagcauccgccuguccgccggcggggacaucugggucacccgggagcccuacgugagcugcgaccccgacaagugcuaccaguucgcccucggccaggggaccacccugaacaacgugcacuccaacgacacgguccgcgaccggaccccguaccgcacccugcucaugaacgagcugggcgugcccuuccaccugggcaccaagcaggucugcaucgccuggagcuccagcuccugccacgacgggaaggccuggcuccacgugugcaucacgggcgacgacaagaacgcgaccgccagcuucaucuacaacgggcggcugguggacuccguggucagcugguccaaggagauccugcgcacccaggagagcgagugcgugugcaucaacgggaccugcacgguggucaugaccgacggguccgccagcggcaaggccgacaccaagauccucuucaucgaggagggcaagaucgugcacaccagcacgcuguccgggagcgcgcagcacguggaggagugcuccugcuacccccgguaccccggcguccgcugcgugugccgggacaacuggaaggggagcaaccgcccgaucguggacaucaacaucaaggaccacuccaucgucagcuccuacgugugcagcggccuggugggcgacacgccccggaagaacgacuccagcuccagcucccacugccucgaccccaacaacgaggagggcggccacggggucaagggcugggccuucgacgacgggaacgacguguggaugggccgcaccaucagcgagaagucccggcugggcuacgagaccuucaaggucaucgagggguggagcaaccccaaguccaagcugcagaucaaccgccaggugaucguggaccggggcaaccgcagcggguacuccggcaucuucagcgucgagggcaagagcugcaucaaccggugcuucuacguggagcucauccgcgggcggaaggaggagaccgaggugcuguggaccuccaacagcaucgucguguucugcggcaccuccgggaccuacggcacggggagcuggccggacggcgccgacaucaaccugaugcccaucuga

SEQ ID NO: 81278 - RNA, 1410 nt, Artificial Sequence; identical to SEQ ID NO: 80536
  derived and/or modified CDS sequence (opt1) from neuraminidase__InfluenzaA__ACU80669

SEQ ID NO: 81279 - RNA, 1410 nt, Artificial Sequence; identical to SEQ ID NO: 80623
  derived and/or modified CDS sequence (opt1) from neuraminidase__InfluenzaA__ACU80691

SEQ ID NO: 81280 - RNA, 1410 nt, Artificial Sequence; identical to SEQ ID NO: 80627
  derived and/or modified CDS sequence (opt1) from neuraminidase__InfluenzaA__ACU80702

SEQ ID NO: 81281 - RNA, 1410 nt, Artificial Sequence; identical to SEQ ID NO: 80627
  derived and/or modified CDS sequence (opt1) from neuraminidase__InfluenzaA__ACU80713

SEQ ID NO: 81282 - RNA, 1410 nt, Artificial Sequence; identical to SEQ ID NO: 80623
  derived and/or modified CDS sequence (opt1) from neuraminidase__InfluenzaA__ACU80724

SEQ ID NO: 81283 - RNA, 1410 nt, Artificial Sequence; identical to SEQ ID NO: 80536
  derived and/or modified CDS sequence (opt1) from neuraminidase__InfluenzaA__ACU80735

SEQ ID NO: 81284 - RNA, 1410 nt, Artificial Sequence; identical to SEQ ID NO: 80623
  derived and/or modified CDS sequence (opt1) from neuraminidase__InfluenzaA__ACU80746

SEQ ID NO: 81285 - RNA, 1410 nt, Artificial Sequence
  derived and/or modified CDS sequence (opt1) from neuraminidase__InfluenzaA__ACU80757
augaaccccaaccagaagaucaucaccaucggcagcgugucccugaccaucagcacgaucugcuucuucaugcagaucgccauccucaucaccaccgucacccugcacuucaagcaguacgaguucaacuccccgcccaacaaccaggugaugcugugcgagcccacgaucaucgagcgcaacaucaccgagguggucuaccucaccaacaccacgaucgagaaggagaucugccccaagcuggccgaguaccggaacuggagcaagccgcagugcgacaucaccggguucgcgcccuucuccaaggacaacagcauccgccuguccgccggcggggacaucugggugacccgggagcccuacgugagcugcgaccccgacaagugcuaccaguucgcccucggccaggggaccacgcugaacaacguccacuccaacgacaccgugcgcgaccggaccccguaccgcacccugcucaugaacgagcugggcgugcccuuccaccugggcacgaagcaggucugcaucgccuggagcuccagcuccugccacgacgggaaggccuggcuccacgugugcaucaccggcgacgacaagaacgcgaccgccagcuucaucuacaacgggcggcugguggacuccgucgugagcugguccaaggagauccugcgcacccaggagagcgagugcgugugcaucaacggcacgugcaccgucgugaugaccgacggguccgccagcggcaaggccgacaccaagauccucuucaucgaggagggcaagaucgugcacacgagcacccuguccgggagcgcgcagcacgucgaggagugcuccugcuacccccgguaccccggcgugcgcugcgugugccgggacaacuggaaggggagcaaccgcccgaucgucgacaucaacaucaaggaccacuccaucgugagcuccuacgugugcagcggccuggucggcgacacgccccggaagaacgacuccagcuccagcucccacugccucgaccccaacaacgaggagggcgggcacggggugaagggcugggccuucgacgacgggaacgacgucuggaugggccgcaccaucagcgagaagucccggcugggcuacgagaccuucaaggugaucgagggguggagcaaccccaaguccaagcugcagaucaaccgccaggugaucgucgaccggggcaaccgcagcggguacuccggcaucuucagcguggagggcaagagcugcaucaaccggugcuucuacguggagcucauccgcgggcggaaggaggagaccgagguccuguggaccuccaacagcaucgugguguucugcggcaccuccgggacguacggcaccgggagcuggccggacggcgccgacaucaaccugaugcccaucuga

SEQ ID NO: 81286 - RNA, 1410 nt, Artificial Sequence; identical to SEQ ID NO: 81251
  derived and/or modified CDS sequence (opt1) from neuraminidase__InfluenzaA__ACU80768

SEQ ID NO: 81287 - RNA, 1410 nt, Artificial Sequence; identical to SEQ ID NO: 80623
  derived and/or modified CDS sequence (opt1) from neuraminidase__InfluenzaA__ACU80779

SEQ ID NO: 81288 - RNA, 1410 nt, Artificial Sequence; identical to SEQ ID NO: 80536
  derived and/or modified CDS sequence (opt1) from neuraminidase__InfluenzaA__ACU80790

SEQ ID NO: 81289 - RNA, 1410 nt, Artificial Sequence; identical to SEQ ID NO: 80623
  derived and/or modified CDS sequence (opt1) from neuraminidase__InfluenzaA__ACU80801

SEQ ID NO: 81290 - RNA, 1410 nt, Artificial Sequence
  derived and/or modified CDS sequence (opt1) from neuraminidase__InfluenzaA__ACU81106
augaaccccaaccagaagaucaucaccaucggcagcgugucccugaccaucagcacgaucugcuucuucaugcagaucgccauccucaucaccaccgucacccugcacuucaagcaguacgaguucaacuccccgcccaacaaccaggugaugcugugcgagcccacgaucaucgagcgcaacaucaccgagaucguguaccucaccaacaccacgaucgagaaggagaucugccccaagcuggccgaguaccggaacuggagcaagccgcagugcgacaucaccggguucgcgcccuucuccaaggacaacagcauccgccuguccgccggcggggacaucugggucacccgggagcccuacgugagcugcgaccccgacaagugcuaccaguucgcccucggccaggggaccacgcugaacaacgugcacuccaacaacaccguccgcgaccggaccccguaccgcacccugcucaugaacgagcugggcgugcccuuccaccugggcacgaagcaggucugcaucgccuggagcuccagcuccugccacgacgggaaggccuggcuccacgugugcaucaccggcgacgacaagaacgcgaccgccagcuucaucuacaacgggcggcugguggacuccguggucagcugguccaaggagauccugcgcacccaggagagcgagugcgugugcaucaacggcacgugcaccguggucaugaccgacggguccgccagcggcaaggccgacaccaagauccucuucaucgaggagggcaagaucgugcacacgagcacccuguccgggagcgcgcagcacguggaggagugcuccugcuacccccgguaccccggcguccgcugcgugugccgggacaacuggaaggggagcaaccgcccgaucguggacaucaacaucaaggaccacuccaucgucagcuccuacgugugcagcggccuggugggcgacacgccccggaagaacgacuccagcuccagcucccacugccucgaccccaacaacgaggagggcgggcacggggucaagggcugggccuucgacgacgggaacgacguguggaugggccgcaccaucagcgagaagucccggcugggcuacgagaccuucaaggucaucgagggguggagcaaccccaaguccaagcugcagaucaaccgccaggugaucguggaccggggcaacagcuccggguacagcggcaucuucagcgucgaggggaaguccugcaucaaccgcugcuucuacguggagcucauccggggccgcaaggaggagaccgaggugcuguggaccagcaacuccaucgucguguucugcggcaccagcgggacguacggcaccggguccuggccggacggcgccgacaucaaccugaugcccaucuga

SEQ ID NO: 81291 - RNA, 1410 nt, Artificial Sequence; identical to SEQ ID NO: 80917
  derived and/or modified CDS sequence (opt1) from neuraminidase__InfluenzaA__ACU87265

SEQ ID NO: 81292 - RNA, 1410 nt, Artificial Sequence; identical to SEQ ID NO: 80762
  derived and/or modified CDS sequence (opt1) from neuraminidase__InfluenzaA__ACU87273

SEQ ID NO: 81293 - RNA, 1410 nt, Artificial Sequence; identical to SEQ ID NO: 80762
  derived and/or modified CDS sequence (opt1) from neuraminidase__InfluenzaA__ACV04231

SEQ ID NO: 81294 - RNA, 1410 nt, Artificial Sequence; identical to SEQ ID NO: 80762
  derived and/or modified CDS sequence (opt1) from neuraminidase__InfluenzaA__ACV04241

SEQ ID NO: 81295 - RNA, 1410 nt, Artificial Sequence; identical to SEQ ID NO: 80762
  derived and/or modified CDS sequence (opt1) from neuraminidase__InfluenzaA__ACV04251

SEQ ID NO: 81296 - RNA, 1410 nt, Artificial Sequence; identical to SEQ ID NO: 80762
  derived and/or modified CDS sequence (opt1) from neuraminidase__InfluenzaA__ACV04261

SEQ ID NO: 81297 - RNA, 1410 nt, Artificial Sequence; identical to SEQ ID NO: 80762
  derived and/or modified CDS sequence (opt1) from neuraminidase__InfluenzaA__ACV04271

SEQ ID NO: 81298 - RNA, 1410 nt, Artificial Sequence
  derived and/or modified CDS sequence (opt1) from neuraminidase__InfluenzaA__ACV04281
augaaccccaaccagaagaucaucaccaucggcagcgugugcaugaccaucgggauggccaaccugauccuccagaucggcaacaucaucuccaucuggaucagccacuccauccagcuggggaaccagaaccagaucgagacgugcaaccagagcgucaucaccuacgagaacaacaccugggugaaccagaccuacgugaacaucggcaacacgaacuucgccgcggggcaguccgucgugagcgugaagcuggccggcaacuccagccucugcccggucuccggcugggccaucuacagcaaggacaacuccauccgcaucgggagcaagggcgacguguucgugauccgggagcccuucaucuccugcagcccccuggagugccgcaccuucuuccugacccagggggcccuccugaacgacaagcacuccaacggcaccaucaaggaccggagccccuaccgcacgcugauguccugcccgaucggggagguccccagccccuacaacucccgguucgagagcguggccuggagcgcguccgccugccacgacggcaucaacuggcucaccaucggcaucagcgggcccgacaacggcgccguggccguccugaaguacaacgggaucaucaccgacaccaucaaguccuggcgcaacaacauccugcggacgcaggagagcgagugcgcgugcgugaacggcuccugcuucaccgugaugaccgacggcccgagcgacgggcaggccuccuacaagaucuuccgcaucgagaagggcaagaucgucaagagcguggagaugaacgcccccaacuaccacuacgaggagugcuccugcuaccccgacagcuccgagaucacgugcgugugccgggacaacuggcacgggagcaaccgccccugggucuccuucaaccagaaccucgaguaccagaucggcuacaucugcagcgggaucuucggcgacaacccgcggcccaacgacaagaccggcuccugcgggcccgugagcuccaacggcgccaacggggugaagggcuucagcuucaaguacgggaacggcgucuggaucggccgcaccaaguccaucagcagccggaacggguucgagaugaucugggaccccaacggcuggaccgggaccgacaacaacuucuccaucaagcaggacaucgugggcaucaacgaguggagcggguacuccggcagcuucgugcagcacccggagcugacgggccuggacugcauccgccccugcuucugggucgagcucauccgggggcgccccaaggagaacaccaucuggaccuccggcagcuccaucagcuucugcggggugaacuccgacaccgucggcuggagcuggcccgacggcgccgagcugccguucacgaucgacaaguga

SEQ ID NO: 81299 - RNA, 1410 nt, Artificial Sequence; identical to SEQ ID NO: 80762
  derived and/or modified CDS sequence (opt1) from neuraminidase__InfluenzaA__ACV04291

SEQ ID NO: 81300 - RNA, 1410 nt, Artificial Sequence; identical to SEQ ID NO: 80762
  derived and/or modified CDS sequence (opt1) from neuraminidase__InfluenzaA__ACV04301

SEQ ID NO: 81301 - RNA, 1410 nt, Artificial Sequence; identical to SEQ ID NO: 80762
  derived and/or modified CDS sequence (opt1) from neuraminidase__InfluenzaA__ACV04321

SEQ ID NO: 81302 - RNA, 1410 nt, Artificial Sequence; identical to SEQ ID NO: 80762
  derived and/or modified CDS sequence (opt1) from neuraminidase__InfluenzaA__ACV04331

SEQ ID NO: 81303 - RNA, 1410 nt, Artificial Sequence; identical to SEQ ID NO: 80762
  derived and/or modified CDS sequence (opt1) from neuraminidase__InfluenzaA__ACV04341

SEQ ID NO: 81304 - RNA, 1410 nt, Artificial Sequence; identical to SEQ ID NO: 80762
  derived and/or modified CDS sequence (opt1) from neuraminidase__InfluenzaA__ACV04351

SEQ ID NO: 81305 - RNA, 1410 nt, Artificial Sequence; identical to SEQ ID NO: 80762
  derived and/or modified CDS sequence (opt1) from neuraminidase__InfluenzaA__ACV04361

SEQ ID NO: 81306 - RNA, 1410 nt, Artificial Sequence; identical to SEQ ID NO: 80762
  derived and/or modified CDS sequence (opt1) from neuraminidase__InfluenzaA__ACV04371

SEQ ID NO: 81307 - RNA, 1410 nt, Artificial Sequence; identical to SEQ ID NO: 80762
  derived and/or modified CDS sequence (opt1) from neuraminidase__InfluenzaA__ACV04381

SEQ ID NO: 81308 - RNA, 1410 nt, Artificial Sequence; identical to SEQ ID NO: 80762
  derived and/or modified CDS sequence (opt1) from neuraminidase__InfluenzaA__ACV04391

SEQ ID NO: 81309 - RNA, 1410 nt, Artificial Sequence; identical to SEQ ID NO: 80762
  derived and/or modified CDS sequence (opt1) from neuraminidase__InfluenzaA__ACV04401

SEQ ID NO: 81310 - RNA, 1410 nt, Artificial Sequence; identical to SEQ ID NO: 80752
  derived and/or modified CDS sequence (opt1) from neuraminidase__InfluenzaA__ACV04411

SEQ ID NO: 81311 - RNA, 1410 nt, Artificial Sequence; identical to SEQ ID NO: 80762
  derived and/or modified CDS sequence (opt1) from neuraminidase__InfluenzaA__ACV04492

SEQ ID NO: 81312 - RNA, 1410 nt, Artificial Sequence; identical to SEQ ID NO: 80762
  derived and/or modified CDS sequence (opt1) from neuraminidase__InfluenzaA__ACV04502

SEQ ID NO: 81313 - RNA, 1410 nt, Artificial Sequence; identical to SEQ ID NO: 80752
  derived and/or modified CDS sequence (opt1) from neuraminidase__InfluenzaA__ACV04512

SEQ ID NO: 81314 - RNA, 1410 nt, Artificial Sequence
  derived and/or modified CDS sequence (opt1) from neuraminidase__InfluenzaA__ACV04522
augaaccccaaccagaagaucaucaccaucggcagcgugugcaugaccaucgggauggccaaccugauccuccagaucggcaacaucaucuccaucuggaucagccacuccauccagcuggggaaccagaaccagaucgagacgugcaaccagagcgucaucaccuacgagaacaacaccugggugaaccagaccuacgugaacaucuccaacacgaacuucgccgcgggcaagagcgucguguccgugaagcuggccgggaacagcucccucugcccggucagcggcugggccaucuacuccaaggacaacagcauccgcaucggcuccaagggggacguguucgugauccgggagcccuucaucagcugcagcccccuggagugccgcaccuucuuccugacccagggcgcccuccugaacgacaagcacuccaacgggaccaucaaggaccggucccccuaccgcacgcugaugagcugcccgaucggcgagguccccucccccuacaacagccgguucgagagcguggccugguccgcgagcgccugccacgacgggaucaacuggcucaccaucggcaucuccggccccgacaacggggccguggccguccugaaguacaacggcaucaucaccgacaccaucaagagcuggcgcaacaacauccugcggacgcaggaguccgagugcgcgugcgugaacgggagcugcuucaccgugaugaccgacggcccguccgacggccaggccagcuacaagaucuuccgcaucgagaaggggaagaucgucaaguccguggagaugaacgcccccaacuaccacuacgaggagugcagcugcuaccccgacuccagcgagaucacgugcgugugccgggacaacuggcacggcuccaaccgccccugggucagcuucaaccagaaccucgaguaccagaucggguacaucugcuccggcaucuucggggacaacccgcggcccaacgacaagaccggcagcugcggccccguguccagcaacggggccaacggcgugaagggguucuccuucaaguacggcaacggggucuggaucggccgcaccaagagcaucagcucccggaacggcuucgagaugaucugggaccccaacggguggaccggcaccgacaacaacuucagcaucaagcaggacaucguggggaucaacgagugguccggcuacagcggguccuucgugcagcacccggagcugacgggccuggacugcauccgccccugcuucugggucgagcucauccggggccgccccaaggagaacaccaucuggaccagcggguccagcaucuccuucugcggcgugaacagcgacaccgucgggugguccuggcccgacggcgccgagcugccguucacgaucgacaaguga

SEQ ID NO: 81315 - RNA, 1410 nt, Artificial Sequence; identical to SEQ ID NO: 80762
  derived and/or modified CDS sequence (opt1) from neuraminidase__InfluenzaA__ACV04532

SEQ ID NO: 81316 - RNA, 1410 nt, Artificial Sequence; identical to SEQ ID NO: 80762
  derived and/or modified CDS sequence (opt1) from neuraminidase__InfluenzaA__ACV04542

SEQ ID NO: 81317 - RNA, 1410 nt, Artificial Sequence; identical to SEQ ID NO: 80762
  derived and/or modified CDS sequence (opt1) from neuraminidase__InfluenzaA__ACV04552

SEQ ID NO: 81318 - RNA, 1410 nt, Artificial Sequence; identical to SEQ ID NO: 80762
  derived and/or modified CDS sequence (opt1) from neuraminidase__InfluenzaA__ACV04562

SEQ ID NO: 81319 - RNA, 1410 nt, Artificial Sequence; identical to SEQ ID NO: 80752
  derived and/or modified CDS sequence (opt1) from neuraminidase__InfluenzaA__ACV04572

SEQ ID NO: 81320 - RNA, 1410 nt, Artificial Sequence; identical to SEQ ID NO: 80762
  derived and/or modified CDS sequence (opt1) from neuraminidase__InfluenzaA__ACV04582

SEQ ID NO: 81321 - RNA, 1410 nt, Artificial Sequence
  derived and/or modified CDS sequence (opt1) from neuraminidase__InfluenzaA__ACV04758
augaaccccaaccagaagaucaucaccaucggcagcgugugcaugaccaucgggauggccaaccugauccuccagaucggcaacaucaucuccaucuggaucagccacuccauccagcuggggaaccagaaccagaucgagacgugcaaccagagcgucaucaccuacgagaacaacaccugggugaaccagaccuacgugaacaucuccaacacgaacuucgccgcgggccagagcgucguguccgugaagcuggccgggaacagcucccucugcccggucagcggcugggccaucuacuccaaggacaacagcauccgcaucggcuccaagggggacguguucgugauccgggagcccuucaucagcugcucccccagcgagugccgcaccuucuuccugacccagggcgcccugcucaacgacaagcacuccaacgggaccaucaaggaccggagccccuaccgcacgcugauguccugcccgaucggcgagguccccagccccuacaacagccgguucgaguccguggccuggagcgcguccgccugccacgacgggaucaacuggcugaccaucggcaucagcggccccgacaacggggccguggccguccucaaguacaacggcaucaucaccgacaccaucaaguccuggcgcaacaacauccugcggacgcaggagagcgagugcgcgugcgugaacggguccugcuucaccgugaugaccgacggcccgagcaacggccaggccuccuacaagaucuuccgcaucgagaaggggaagaucgucaagagcguggagaugaacgcccccaacuaccacuacgaggagugcuccugcuaccccgacagcuccgagaucacgugcgugugccgggacaacuggcacggcagcaaccgccccugggucuccuucaaccagaaccuggaguaccagaucggguacaucugcagcggcaucuucggggacaacccgcggcccaacgacaagaccggcuccugcggccccgugagcuccaacggggccaacggcgugaagggguucagcuucaaguacggcaacggggucuggaucggccgcaccaagagcaucuccagccggaacggcuucgagaugaucugggaccccaacggguggaccggcaccgacaacaacuucuccaucaagcaggacaucguggggaucaacgaguggagcggcuacuccgggagcuucgugcagcacccggagcucacgggccuggacugcauccgccccugcuucugggucgagcugauccggggccgccccaaggagaacaccaucuggaccuccgggagcuccaucagcuucugcggcgugaacuccgacaccgucggguggagcuggcccgacggcgccgagcucccguucacgaucgacaaguga

SEQ ID NO: 81322 - RNA, 1410 nt, Artificial Sequence; identical to SEQ ID NO: 80752
  derived and/or modified CDS sequence (opt1) from neuraminidase__InfluenzaA__ACV33087

SEQ ID NO: 81323 - RNA, 1410 nt, Artificial Sequence; identical to SEQ ID NO: 80762
  derived and/or modified CDS sequence (opt1) from neuraminidase__InfluenzaA__ACV33107

SEQ ID NO: 81324 - RNA, 1410 nt, Artificial Sequence; identical to SEQ ID NO: 80762
  derived and/or modified CDS sequence (opt1) from neuraminidase__InfluenzaA__ACV33117

SEQ ID NO: 81325 - RNA, 1410 nt, Artificial Sequence; identical to SEQ ID NO: 80762
  derived and/or modified CDS sequence (opt1) from neuraminidase__InfluenzaA__ACV33127

SEQ ID NO: 81326 - RNA, 1410 nt, Artificial Sequence; identical to SEQ ID NO: 80762
  derived and/or modified CDS sequence (opt1) from neuraminidase__InfluenzaA__ACV33137

SEQ ID NO: 81327 - RNA, 1410 nt, Artificial Sequence; identical to SEQ ID NO: 80762
  derived and/or modified CDS sequence (opt1) from neuraminidase__InfluenzaA__ACV33147

SEQ ID NO: 81328 - RNA, 1410 nt, Artificial Sequence
  derived and/or modified CDS sequence (opt1) from neuraminidase__InfluenzaA__ACV33157
augaaccccaaccagaagaucaucaccaucggcagcgugugcaugaccaucgggauggccaaccugauccuccagaucggcaacaucaucuccaucuggaucagccacuccauccagcuggggaaccagaaccagaucgagacgugcaaccagagcgucaucaccuacgagaacaacaccugggugaaccagaccuacgugaacaucuccaacacgaacuucgccgcgggccagagcgucguguccgugaagcuggccgggaacagcucccucugcccggucagcggcugggccaucuacuccaaggacaacagcauccgcaucggcuccaagggggacguguucgugauccgggagcccuucaucagcugcagcccccuggagugccgcaccuucuuccugacccagggcgcccuccugaacgacaagcacuccaacgggaccaucaaggaccggucccccuaccgcacgcugaugagcugcccggucggcgaggugcccucccccuacaacagccgguucgagagcguggccugguccgcgagcgccugccacgacgggaucaacuggcucaccaucggcaucuccggccccgacaacggggccgucgccgugcugaaguacaacggcaucaucaccgacaccaucaagagcuggcgcaacaacauccugcggacgcaggaguccgagugcgcgugcgugaacgggagcugcuucaccgucaugaccgacggcccguccgacggccaggccagcuacaagaucuuccgcaucgagaaggggaagaucgugaaguccguggagaugaacgcccccaacuaccacuacgaggagugcagcugcuaccccgacuccagcgagaucacgugcgucugccgggacaacuggcacggcuccaaccgccccugggugagcuucaaccagaaccucgaguaccagaucggguacaucugcuccggcaucuucggggacaacccgcggcccaacgacaagaccggcagcugcggccccguguccagcaacggggccaacggcgucaagggguucuccuucaaguacggcaacgggguguggaucggccgcaccaagagcaucagcucccggaacggcuucgagaugaucugggaccccaacggguggaccggcaccgacaacaacuucagcaucaagcaggacaucguggggaucaacgagugguccggcuacagcggguccuucguccagcacccggagcugacgggccuggacugcauccgccccugcuucuggguggagcucauccggggccgccccaaggagaacaccaucuggaccagcggguccagcaucuccuucugcggcgucaacagcgacaccguggggugguccuggcccgacggcgccgagcugccguucacgaucgacaaguga

SEQ ID NO: 81329 - RNA, 1410 nt, Artificial Sequence
  derived and/or modified CDS sequence (opt1) from neuraminidase__InfluenzaA__ACV33167
augaaccccaaccagaagaucaucaccaucggcagcgugugcaugaccaucgggauggccaaccugauccuccagaucggcaacaucaucuccaucuggaucagccacuccauccagcuggggaaccagaaccagaucgagacgugcaaccagagcgucaucaccuacgagaacaacaccugggugaaccagaccuacgugaacaucuccaacacgaacuucgccgcgggccagagcgucguguccgugaagcuggccgggaacagcucccucugcccggucagcggcugggccaucuacuccaaggacaacagcauccgcaucggcuccaagggggacguguucgugauccgggagcccuucaucagcugcagcccccuggagugccgcaccuucuuccugacccagggcgcccuccugaacgacaagcacuccaacgggaccaucaaggaccggucccccuaccgcacgcugaugagcugcccgaucggcgagguccccucccccuacaacagccgguucgagagcguggccugguccgcgagcgccugccacgacgggaucaacuggcucaccaucggcaucuccggccccgacaacggggccguggccguccugaaguacaacggcaucaucaccgacaccaucaagagcuggcgcaacaacauccugcggacgcaggaguccgagugcgcgugcgugaacgggagcugcuucaccgugaugaccgacggcccguccgacggccaggccagcuacaagaucuuccgcaucgagaaggggaagaucgucaaguccguggagaugaacgcccccaacuaccacuacgaggagugcagcugcuaccccgacuccagcgagaucacgugcgugugccgggacaacuggcacggcuccaaccgccccugggucagcuucaaccagaaccucgaguaccagaucggguacaucugcuccggcaucuucggggacaacccgcggcccaacgacaagaccggcagcugcggccccguguccagcaacggggccaacggcgugaagggguucuccuucaaguacggcaacggggucuggaucggccgcaccaagagcaucagcucccggaacggcuucgagaugaucugggaccccaacggguggaccggcaccgacaacaacuucagcaucaagcaggacaucguggggaucaacgagugguccggcuacagcggguccuucgugcagcacccggagcugacgggccuggacugcauccgccccugcuucugggucgagcucauccggggccgccccaaggagaacaccaucuggaccagcggguccagcaucuccuucugcggcgugaacagcgacaccgucgacugguccuggcccgacggggccgagcugccguucacgaucgacaaguga

SEQ ID NO: 81330 - RNA, 1410 nt, Artificial Sequence; identical to SEQ ID NO: 80762
  derived and/or modified CDS sequence (opt1) from neuraminidase__InfluenzaA__ACV33177

SEQ ID NO: 81331 - RNA, 1410 nt, Artificial Sequence
  derived and/or modified CDS sequence (opt1) from neuraminidase__InfluenzaA__ACV41993
augaaccccaaccagaagaucaucaccaucggcagcgugugcaugaccaucgggauggccaaccugauccuccagaucggcaacaucaucuccaucuggaucagccacuccauccagcuggggaaccagaaccagaucgagaucugcaaccagagcgucaucacguacgagaacaacaccugggugaaccagaccuacgugaacaucuccaacaccaacuucgccgcgggccagagcgucguguccgugaagcuggccgggaacagcucccucugcccggucggcggcugggccaucuacagcaaggacaacuccgugcgcaucgggagcaagggcgacguguucgucauccgggagcccuucaucuccugcagcccccuggagugccgcacguucuuccugacccagggggcccuccugaacgacaagcacuccaacggcaccaucaaggaccggagccccuaccgcacccugauguccugcccgaucggggaggugcccagccccuacaacucccgguucgagagcguggccuggagcgcguccgccugccacgacggcaucaacuggcucacgaucggcaucagcgggcccgacaacggcgccgucgccgugcugaaguacaacgggaucaucaccgacaccaucaaguccuggcgcaacaacauccugcggacccaggagagcgagugcgcgugcgugaacggcuccugcuucacggucaugaccgacggcccgagcaacgggcaggccuccuacaagaucuuccgcaucgagaagggcaagaucgucaagagcguggagaugaacgcccccaacuaccacuacgaggagugcuccugcuaccccgacagcuccgagaucacgugcgugugccgggacaacuggcacgggagcaaccgccccuggguguccuucaaccagaaccucgaguaccagaucggcuacaucugcagcgggaucuucggcgacaacccgcggcccaacgacaagaccggcuccugcgggcccgugagcuccaacggcgccaacggggucaagggcuucagcuucaaguacgggaacggcguguggaucggccgcaccaaguccaucagcagccggaacggguucgagaugaucugggaccccaacggcuggaccgggaccgacaacaacuucuccaucaagcaggacaucgugggcaucaacgaguggagcggguacuccggcagcuucguccagcacccggagcugaccggccuggacugcauccgccccugcuucuggguggagcucauccgggggcgccccaaggagaacacgaucuggaccuccggcagcuccaucagcuucugcggggucaacuccgacaccgugggcuggagcuggcccgacggcgccgagcugccguucaccaucgacaaguga

SEQ ID NO: 81332 - RNA, 1410 nt, Artificial Sequence; identical to SEQ ID NO: 80762
  derived and/or modified CDS sequence (opt1) from neuraminidase__InfluenzaA__ACV42010

SEQ ID NO: 81333 - RNA, 1410 nt, Artificial Sequence; identical to SEQ ID NO: 80762
  derived and/or modified CDS sequence (opt1) from neuraminidase__InfluenzaA__ACV42020

SEQ ID NO: 81334 - RNA, 1410 nt, Artificial Sequence; identical to SEQ ID NO: 80527
  derived and/or modified CDS sequence (opt1) from neuraminidase__InfluenzaA__ACV49504

SEQ ID NO: 81335 - RNA, 1362 nt, Artificial Sequence
  derived and/or modified CDS sequence (opt1) from neuraminidase__InfluenzaA__ACV49537
augaaccccaaccagaagaucaucaccaucggcagcaucugcaugguggucgggaucaucucccugauccuccagaucggcaacaucaucagcaucuggaucucccacagcauccagaccgggaaccagaaccacacgggcaucugcaaccaggggaucaucaccuacaacgugguggccggccaggacuccaccagcgucauccugaccggcaacuccagccugugcccgauccgcgggugggccauccacuccaaggacaacggcauccggaucgggagcaagggcgacguguucgugauccgcgagcccuucaucuccugcagccaccucgagugccggacguucuuccugacccagggggcgcugcucaacgacaagcacuccaacggcgccgucaaggaccgcagccccuaccgggcccugauguccugccccgugggcgaggccccgagccccuacaacucccgcuucgagagcguggccugguccgcgagcgccugccacgacgggaugggcuggcugaccaucgggaucagcggccccgacaacggcgccgucgccgugcucaaguacaacgggaucaucaccgagacgaucaaguccuggcggaagaagauccugcgcacccaggagagcgagugcacgugcgugaacggcuccugcuucaccaucaugaccgacgggcccagcgacggccuggcguccuacaagaucuucaagaucgagaaggggaaggucaccaagagcaucgagcucaacgccccgaacucccacuacgaggagugcagcugcuaccccgacaccggcaaggugaugugcgugugccgggacaacuggcacggcuccaaccgccccugggucagcuucgaccagaaccuggacuaccagaucggguacaucugcuccggcguguucggggacaacccccggccgaaggacggcaccgggagcugcggccccguguccgccgacggcgccaacggggucaagggcuucagcuaccgcuacgggaacggcguguggaucgggcggacgaaguccgacagcucccgccacggcuucgagaugaucugggaccccaacggcuggaccgagaccgacagccgguucuccgugcgccaggacgucguggccaugaccgaccggagcggguacagcggcuccuucgugcagcaccccgagcugacggggcucgacugcaugcgcccgugcuucugggucgagcugauccggggccgccccgaggagaagaccaucuggaccagcggcuccaucaucagcuucugcggggugaacuccgacaccgucgacuggagcuggcccgacggcgcggagcugcccuucacgaucgacaaguga

SEQ ID NO: 81336 - RNA, 1362 nt, Artificial Sequence
  derived and/or modified CDS sequence (opt1) from neuraminidase__InfluenzaA__ACV49559
augaaccccaaccagaagaucaucaccaucggcagcaucugcaugguggucgggaucaucucccugauccuccagaucggcaacaucaucagcaucuggaucucccacagcauccaggccggguccagcaccugggugaaccagacguacgugaacaucuccaacaccaacgucguggccggccaggacgcgaccagcgugauccugaccgggaacuccagccugugcccgauccgcggcugggccaucuacuccaaggacaacggcauccggaucgggagcaagggcgacaucuucgucauccgcgagcccuucaucuccugcagccaccucgagugccgggccuucuuccugacgcagggggcccugcucaacgacaagcacuccaacggcaccgugaaggaccgcagccccuaccgggcccugauguccugccccgugggggaggcgccgagccccuacaacucccgcuucgagagcgucgccuggagcgccuccgccugccacgacggcaugggcuggcugaccaucgggaucagcggccccgacaacggggcgguggccgugcucaaguacaacggcaucaucaccgagacgaucaaguccuggcggaagaagauccugcgcacccaggagagcgagugcgccugcgucaacggcuccugcuucaccaucaugaccgacgggcccagcgacggcccggccuccuacaagaucuucaagaucgagaaggggaaggugaccaagagcaucgagcuggacgcccccaacucccacuacgaggagugcagcugcuaccccgacacgggcaaggugaugugcgucugccgggacaacuggcacggguccaaccgccccugggugagcuucgaccagaaccucgacuaccagaucggcuacaucugcuccggcguguucggggacaccccgcggcccaaggacggcaccgggagcugcggccccgucuccguggacggggcgaacggcgugaagggcuucagcuaccgcuacggggacggcgucuggaucgggcggacgaagucccagagcucccgccacggcuucgagaugaucugggaccccaacggguggaccgagaccgacagccgguucagcgugcgccaggacguggucgccaucaccgacugguccggcuacagcggcuccuucgugcagcacccggagcugacggggcuggacugcaugcggcccugcuucugggucgagcucauccgcggccagcccaaggagaagaccaucuggaccagcggguccagcaucuccuucugcggcgugaacagcgacaccguggacugguccuggcccgacggcgccgagcugccguucacgaucgacaaguga

SEQ ID NO: 81337 - RNA, 1395 nt, Artificial Sequence
  derived and/or modified CDS sequence (opt1) from neuraminidase__InfluenzaA__ACV49570
augaaccccaaccagaagaucaucaccaucggcagcaucugcaugguggucgggaucaucucccugauccuccagaucggcaacaucgugagcaucuggaucucccacagcauccagaccgggaaccagaaccacacggggaccugcgaccaguccaucaucaccuacaagaacagcaccugggugaaccagacguacgucaacgugguggccggcaaggacaccaccuccgucauccuggccggcaacagcucccugugcccgauccgcggcugggcgaucuacagcaaggacaacggggugcggaucggcuccaagggggacguguucgucauccgcgagcccuucaucagcugcucccaccucgagugccggaccuucuuccugacgcagggcgcccugcucaacgacaagcacagcaacgggaccgugaaggaccgcucccccuaccgggcccugaugagcugccccgugggcgaggccccgucccccuacaacagccgcuucgaguccgucgccuggagcgcgagcgccugccacgacggcaugggguggcugaccaucggcaucuccgggcccgacgacggcgccguggccgugcucaaguacaacggcaucaucaccgagacgaucaagagcuggcggaaggagauccugcgcacccaggaguccgagugcgucugcgugaacgggagcugcuucaccaucaugaccgacggccccuccgggggcccggcgagcuacaagaucuucaagaucgagaaggggaaggugacgaaguccaucgagcuggacgcccccaacagccacuacgaggagugcuccugcuaccccgacaccagcaaggucaugugcgugugccgggacaacuggcacggcuccaaccgccccugggugagcuucgaccagaaccucgacuaccagaugggcuacaucugcuccggggucuucggcgacaacccgcggcccaaggacgggaagggcagcugcgggcccguguacguggacggcgccaacggcgucaagggguucuccuacaaguacggcaacgggguguggaucggccgcaccaagagcaacuccagccggcagggguucgagaugaucugggaccccaacggcuggaccgagacggacuccaacuucuucaccaagcaggacgucguggccgugaccgacuggagcggcuacagcggguccuucguccagcacccggagcugaccggccuggacugcaugcgccccugcuucuggguggagcucauccgggggcgccccaaggagaacacgaucuggaccagcggcuccagcaucuccuucugcggcgugaacagcgacaccgucgacugguccuggcccgacggggccgagcugccguucaccaucgacaaguga

SEQ ID NO: 81338 - RNA, 1410 nt, Artificial Sequence; identical to SEQ ID NO: 80428
  derived and/or modified CDS sequence (opt1) from neuraminidase__InfluenzaA__ACV49581

SEQ ID NO: 81339 - RNA, 1410 nt, Artificial Sequence; identical to SEQ ID NO: 80428
  derived and/or modified CDS sequence (opt1) from neuraminidase__InfluenzaA__ACV49592

SEQ ID NO: 81340 - RNA, 1410 nt, Artificial Sequence
  derived and/or modified CDS sequence (opt1) from neuraminidase__InfluenzaA__ACV49603
augaaccccaaccagaagaucaucaccaucggcagcgugucccugaccaucgagacggucugcuuccucaugcagaucgccauccuggccaccaccgugacccugcacuucaagcagcacgagugcgacagcccggcguccaaccaggugaugcccugcgagcccaucaucaucgagcgcaacaucacggagaucgucuaccucaacaacaccaccaucgagaaggagaucugccccgaggugguggaguaccggaacuggagcaagccgcagugccagaucaccggguucgcccccuucuccaaggacaacagcauccgccuguccgccggcggggacaucugggucacgcgggagcccuacgugagcugcgaccccggcaagugcuaccaguucgcccuggggcagggcaccacccucgacaacaagcacuccaacggcaccauccacgaccgcaucccgcaccggacgcugcugaugaacgagcucggggugcccuuccaccugggcaccaagcaggucugcguggccuggagcuccagcuccugccacgacgggaaggcguggcugcacgugugcgucaccggcgacgaccgcaacgccaccgccagcuucaucuacgacgggcggcucguggacuccaucggcagcuggucccagaacauccugcgcacgcaggagagcgagugcgugugcaucaacgggaccugcaccgucgugaugaccgacggcuccgccagcggccgggcggacacgcgcauccuguucaucaaggaggggaagaucgugcacaucagcccccucuccggcagcgcccagcacaucgaggagugcuccugcuacccccgguacccggacguccgcugcaucugccgggacaacuggaagggcagcaaccgccccgugaucgacaucaacauggaggacuacuccaucgacagcuccuacgugugcagcgggcuggucggcgacacgccccggaacgacgacuccagcuccaacagcaacugccgcgaccccaacaacgagcgggggaacccgggcgugaaggggugggccuucgacaacggcgacgacguguggaugggccgcaccaucuccaaggacagccgguccggguacgagaccuucaaggucaucggcggguggagcacccccaacuccaagagccaggugaaccgccaggucaucguggacaacaacaacugguccggcuacagcgggaucuucagcguggagggcaaguccugcaucaaccggugcuucuacgucgagcugauccgcggccgcccccaggagacccgggugugguggaccagcaacuccaucguggucuucugcgggaccagcggcacguacgggaccggcuccuggcccgacggggccaacaucaacuucaugccgaucuga

SEQ ID NO: 81341 - RNA, 1410 nt, Artificial Sequence
  derived and/or modified CDS sequence (opt1) from neuraminidase__InfluenzaA__ACV49625
augaaccccaaccagaagaccaucaccaucggcagcgugucccugacgaucgagaccgucugcuuccucaugcagaucgccauccuggccaccaccgugacgcugcacuucaagcagcacgagugcgacagcccggcguccaaccaggugaugcccugcgagcccaucaucaucgagcgcaacaucaccgagaucgucuaccucaacaacaccaccaucgagaaggagaucugccccgaggugguggaguaccggaacuggagcaagccgcagugccagaucacgggguucgcccccuucuccaaggacaacagcauccgccuguccgccggcggggacaucugggucacccggggccccuacgugagcugcgaccccgggaagugcuaccaguucgcccugggccagggcaccacccucgacaacaagcacuccaacgggacgauccacgaccgcaucccgcaccggacccugcugaugaacgagcucggcgugcccuuccaccuggggaccaagcaggucugcguggccuggagcuccagcuccugccacgacggcaaggcguggcugcacgugugcgucaccggggacgaccgcaacgccacggccagcuucaucuacgacggccggcucguggacuccaucggcagcuggucccagaacauccugcgcacccaggagagcgagugcgugugcaucaacgggaccugcaccgucgugaugacggacggcuccgccagcgggcgggcggacacccgcauccuguucaucaaggagggcaagaucgugcacaucagcccccucuccggcagcgcccagcacaucgaggagugcuccugcuacccccgguacccggacguccgcugcaucugccgggacaacuggaaggggagcaaccgccccgugaucgacaucaacauggaggacuacuccaucgacagcuccuacgugugcagcggccuggucggggacacgccccggaacgacgacuccagcuccaacagcaacugccgcgaccccaacaacgagcggggcaacccgggggugaagggcugggccuucgacaacggcgacgacguguggauggggcgcaccaucuccaaggacagccgguccggcuacgagaccuucaaggucaucgggggcuggagcacccccaacuccaagagccaggugaaccgccaggucaucguggacaacaacaacugguccggguacagcggcaucuucagcguggagggcaaguccugcaucaaccggugcuucuacgucgagcugauccgcgggcgcccccaggagacccgggugugguggaccagcaacuccaucguggucuucugcggcacgagcgggaccuacggcaccggguccuggcccgacggcgccaacaucaacuucaugccgaucuga

SEQ ID NO: 81342 - RNA, 1410 nt, Artificial Sequence; identical to SEQ ID NO: 80480
  derived and/or modified CDS sequence (opt1) from neuraminidase__InfluenzaA__ACV49647

SEQ ID NO: 81343 - RNA, 1413 nt, Artificial Sequence
  derived and/or modified CDS sequence (opt1) from neuraminidase__InfluenzaA__ACV49669
augaaccccaaccagaagaucaucaccaucggcagcaucugcauggccaucgggaucaucucccugauccuccagaucggcaacaucgugagcaucuggaucucccacagcauccagaccgggucccagaacuacacgggcaucugcaaccagcgcaucaucaccuacgagaacagcaccugggucaaccagaccuacgugaacaucaacaacacgaacguggucgccgggcaggacaccaccuccgugacccuggcgggcaacagcucccugugcccgaucagcggcugggccaucuacuccaaggacaacagcauccggaucggguccaagggcgacguguucgucauccgcgagcccuucaucagcugcucccaccucgagugccggacguucuuccugacccagggggcccugcucaacgacaagcacagcaacggcaccgugaaggaccgcucccccuaccgggcccugaugagcugccccaucggggaggccccgucccccuacaacagccgcuucgagagcguggcgugguccgccagcgccugccacgacggcaugggcuggcugaccaucgggaucuccggccccgacgacggggccgucgcggugcucaaguacaacggcaucaucacggagaccaucaagagcuggcggaagcgcauccugcggacccaggaguccgagugcgugugcgucaacggcagcugcuucaccaucaugacggacgggcccaacaacggcccggccuccuacaagaucuucaagaucgagaaggggaagaucaccaagagcaucgagcuggacgcccccaacucccacuacgaggagugcagcugcuaccccgacgccggcaccgugaugugcgugugccgcgacaacuggcacggguccaaccggcccugggucagcuucaaccagaaccucgacuaccagaucggcuacaucugcuccggcguguucggggacaacccgcgccccaaggacggcaaggggagcugcggccccgugaccgucgacggggccgacggcgugaagggcuucuccuaccgguacgggaacggcguguggaucgggcgcaccaagagcaacuccagccggcgcggcuucgagaugaucugggaccccaacggguggacggacaccgacuccaaguuccuggucaagcaggacgugguggcgaugaccgacuggagcggcuacagcggcuccuucguccagcacccggagcugacggggcucgacugcaugcggcccugcuucuggguggagcugauccgcggccggccccgcgagaacaccaccaucuggaccagcggguccagcaucuccuucugcggcgucaacggcgacacggccaacuggagcuggcccgacggggccgagcugccguucaccaucgacaaguga

SEQ ID NO: 81344 - RNA, 1413 nt, Artificial Sequence
  derived and/or modified CDS sequence (opt1) from neuraminidase__InfluenzaA__ACV49679
augaaccccaaccagaagaucaucaccaucggcagcaucuccaucgccaucgggaucaucagccugaugcuccagaucggcuccaucaucagcaucugggccucccacagcauccgcaccgggucccagaacaacacgggcaucugcaaccagcggaucaucaccuacgagaacagcaccugggugaaccacaccuacgucaacaucaacaacacgaacgugguggcgggggaggacaagaccuccgucacccuggccggcaacagcucccugugcagcaucuccggcugggccaucuacaccaaggacaacagcauccgcaucggguccaagggcgacguguucgugauccgggagccguucaucagcugcucccaccucgagugccgcacguucuuccugacccagggggcccugcucaacgacaagcacagcaacggcaccgucaaggaccggucccccuaccgcgcccugaugagcugcccccugggggaggcgcccagcccguacaacuccaaguucgagagcguggccugguccgccagcgccugccacgacggcaugggcuggcucaccaucgggaucuccggccccgacaacggggcgguggccguccugaaguacaacggcaucaucacgggcaccaucaagagcuggaagaagcagauccugcggacccaggaguccgagugcgugugcaugaacgggagcugcuucaccaucaugacggacggccccuccaacaaggccgccagcuacaagaucuucaagaucgagaaggggaaggugaccaaguccaucgagcucaacgcccccaacuucuacuacgaggagugcagcugcuacccggacaccggcaucgucaugugcgugugccgcgacaacuggcacggguccaaccggcccugggugagcuucaaccagaaccuggacuaccagaucggcuacaucugcuccggcgucuucggggacaacccccgccccgaggacggcgaggggagcugcaacccggugaccguggacggcgcgaacggggucaagggcuucuccuacaaguacggcaacgggguguggaucggccggaccaagagcaaccgccugcggaagggguucgagaugaucugggaccccaacggcuggacgaacaccgacuccgacuucagcgugaagcaggacgucguggccaucaccgacuggagcggguacuccggcagcuucgugcagcaccccgagcucacgggccuggacugcauccgccccugcuucugggucgagcuggugcgggggcucccgcgcgagaacaccaccaucuggaccuccggcagcuccaucagcuucugcggggucaacuccgacacggccaacuggagcuggcccgacggcgccgagcugcccuucaccaucgacaaguga

SEQ ID NO: 81345 - RNA, 1410 nt, Artificial Sequence
  derived and/or modified CDS sequence (opt1) from neuraminidase__InfluenzaA__ACV53442
augaaccccaaccagaagaucaucaccaucggcagcgugugcaugaccaucgggauggccaaccugauccuccagaucggcaacaucaucuccaucuggaucagccacuccauccagcuggggaaccagaaccagaucgagacgugcaaccagagcgucaucaccuacgagaacaacaccugggugaaccagaccuacgugaacaucuccaacacgaacuucgccgcgggccagagcgucguguccgugaagcuggccgggaacagcucccucugcccggucagcggcugggccaucuacuccaaggacaacagcgugcgcaucggcuccaagggggacguguucgucauccgggagcccuucaucagcugcagcccccuggagugccgcaccuucuuccugacccagggcgcccuccugaacgacaagcacuccaacgggaccaucaaggaccggucccccuaccgcacgcugaugagcugcccgaucggcgaggugcccucccccuacaacagccgguucgagagcguggccugguccgcgagcgccugccacgacgggaucaacuggcucaccaucggcaucuccggccccgacaacggggccgucgccgugcugaaguacaacggcaucaucaccgacaccaucaagagcuggcgcaacaacauccugcggacgcaggaguccgagugcgcgugcgugaacgggagcugcuucaccgucaugaccgacggcccguccgacggccaggccagcuacaagaucuuccgcaucgagaaggggaagaucgugaaguccguggagaugaacgcccccaacuaccacuacgaggagugcagcugcuaccccgacuccagcgagaucacgugcgucugccgggacaacuggcacggcuccaaccgccccugggugagcuucaaccagaaccucgaguaccagaucggguacaucugcuccggcaucuucggggacaacccgcggcccaacgacaagaccggcagcugcggccccguguccagcaacggggccaacggcgucaagggguucuccuucaaguacggcaacgggguguggaucggccgcaccaagagcaucagcucccggaacggcuucgagaugaucugggaccccaacggguggaccggcaccgacaacaacuucagcaucaagcaggacaucguggggaucaacgagugguccggcuacagcggguccuucguccagcacccggagcugacgggccuggacugcauccgccccugcuucuggguggagcucauccggggccgccccaaggagaacaccaucuggaccagcggguccagcaucuccuucugcggcgucaacagcgacaccguggggugguccuggcccgacggcgccgagcugccguucacgaucgacaaguga

SEQ ID NO: 81346 - RNA, 1410 nt, Artificial Sequence; identical to SEQ ID NO: 81129
  derived and/or modified CDS sequence (opt1) from neuraminidase__InfluenzaA__ACV53452

SEQ ID NO: 81347 - RNA, 1410 nt, Artificial Sequence; identical to SEQ ID NO: 80752
  derived and/or modified CDS sequence (opt1) from neuraminidase__InfluenzaA__ACV53462

SEQ ID NO: 81348 - RNA, 1410 nt, Artificial Sequence; identical to SEQ ID NO: 80762
  derived and/or modified CDS sequence (opt1) from neuraminidase__InfluenzaA__ACV53472

SEQ ID NO: 81349 - RNA, 1410 nt, Artificial Sequence
  derived and/or modified CDS sequence (opt1) from neuraminidase__InfluenzaA__ACV53482
augaaccccaaccagaagaucaucaccaucggcagcgugugcaugaccaucgggauggccaaccugauccuccagaucggcaacaucaucuccaucuggaucagccacuccauccagcuggggaaccagaaccagaucgagacgugcaaccagagcgucaucaccuacgagaacaacaccugggugaaccagaccuacgugaacaucuccaacacgaacuucgccgcgggccagagcgucguguccgugaagcuggccgggaacagcucccucugcccggucagcggcugggccaucuacuccaaggacaacagcgugcgcaucggcuccaagggggacguguucgucauccgggagcccuucaucagcugcagcccccuggagugccgcaccuucuuccugacccagggcgcccuccugaacgacaagcacuccaacgggaccaucaaggaccggucccccuaccgcacgcugaugagcugcccgaucggcgaggugcccucccccuacaacagccgguucgagagcguggccugguccgcgagcgccugccacgacgggaucaacuggcucaccaucggcaucuccggccccgacaacggggccgucgccgugcugaaguacaacggcaucaucaccgacaccaucaagagcuggcgcaacaacauccugcggacgcaggaguccgagugcgcgugcgugaacgggagcugcuucaccgucaugaccgacggcccguccaacggccaggccagcuacaagaucuuccgcaucgagaaggggaagaucgugaaguccguggagaugaacgcccccaacuaccacuacgaggagugcagcugcuaccccgacuccggcgagaucacgugcgucugccgggacaacuggcacgggagcaaccgccccuggguguccuucaaccagaaccucgaguaccagaucggcuacaucugcagcgggaucuucggcgacaacccgcggcccaacgacaagaccggcuccugcgggcccgugagcuccaacggcgccaacggggucaagggcuucagcuucaaguacgggaacggcguguggaucggccgcaccaaguccaucagcagccggaacggguucgagaugaucugggaccccaacggcuggaccgccaccgacaacaacuucuccaucaagcaggacaucguggggaucaacgaguggagcggcuacuccgggagcuucguccagcacccggagcugacgggccuggacugcauccgccccugcuucuggguggagcucauccggggccgccccaaggagaacaccaucuggaccuccgggagcuccaucagcuucugcggcgucaacuccgacaccgugggguggagcuggcccgacggcgcggagcugccguucacgaucgacaaguga

SEQ ID NO: 81350 - RNA, 1410 nt, Artificial Sequence
  derived and/or modified CDS sequence (opt1) from neuraminidase__InfluenzaA__ACV53492
augaaccccaaccagaagaucaucaccaucggcagcgugugcaugaccaucgggauggccaaccugauccuccagaucggcaacaucaucuccaucuggaucagccacuccauccagcuggggaaccagaaccagaucgagacgugcaaccagagcgucaucaccuacgagaacaacaccugggugaaccagaccuacgugaacaucuccaacacgaacuucgccgcgggccagagcgucguguccgugaagcuggccgggaacagcucccucugcccggucagcggcugggccaucuacuccaaggacaacagcauccgcaucggcuccaagggggacguguucgugauccgggagcccuucaucagcugcagcccccuggagugccgcaccuucuuccugacccagggcgcccuccugaacgacaagcacuccaacgggaccaucaaggaccggucccccuaccgcacgcugaugagcugcccgaucggcgagguccccucccccuacaacagccgguucgagagcguggccugguccgcgagcgccugccacgacgggaucaacuggcucaccaucggcaucuccggccccgacaacggggccguggccguccugaaguacaacggcaucaucaccgacaccaucaagagcuggcgcaacaacauccugcggacgcaggaguccgagugcgcgugcgugaacgggagcugcuucaccgugaugaccgacggcccguccgacggccaggccagcuacaagaucuuccgcaucgagaaggggaagaucgucaaguccguggagaugaacgcccccaacuaccacuacgaggagugcagcugcuaccccgacuccagcgagaucacgugcgugugccgggacaacuggcacggcuccaaccgccccugggucagcuucaaccagaaccucgaguaccagaucggguacaucugcuccggcaucuucggggacaacccgcggcccaacgacaaggccggcagcugcggccccguguccagcaacggggccaacggcgugaagggguucuccuucaaguacggcaacggggucuggaucggccgcaccaagagcaucagcucccggaacggcuucgagaugaucugggaccccaacggguggaccgagaccgacaacaacuuccugaucaagcaggacaucgugggcaucaacgaguggagcggguacuccggcagcuucgugcagcacccggagcugaccgggcucgacugcauccgccccugcuucugggucgagcugauccggggccgccccaaggagaacacgaucuggaccuccggcagcuccaucagcuucugcggggugaacuccgacaccgucggcuggagcuggcccgacggggcggagcugccguucaccaucgacaaguga

SEQ ID NO: 81351 - RNA, 1410 nt, Artificial Sequence
  derived and/or modified CDS sequence (opt1) from neuraminidase__InfluenzaA__ACV53502
augaaccccaaccagaagaucaucaccaucggcagcgugugcaugaccaucgggauggccaaccugauccuccagaucggcaacaucaucuccaucuggaucagccacuccauccagcuggggaaccagaaccagaucgagacgugcaaccagagcgucaucaccuacgagaacaacaccugggugaaccagaccuacgugaacaucuccaacacgaacuucgccgcgggccagagcgucguguccgugaagcuggccgggaacagcucccucugcccggucagcggcugggccaucuacuccaaggacaacagcauccgcaucggcuccaagggggacguguucgugauccgggagcccuucaucagcugcagcccccuggagugccgcaccuucuuccugacccagggcgcccuccugaacgacaagcacuccaacgggaccaucaaggaccggucccccuaccgcacgcugaugagcugcccgaucggcgagguccccucccccuacaacagccgguucgagagcguggccugguccgcgagcgccugccacgacgggaucaacuggcucaccaucggcaucuccggccccgacaacggggccguggccguccugaaguacaacggcaucaucaccgacaccaucaagagcuggcgcaacaacauccugcggacgcaggaguccgagugcgcgugcgugaacgggagcugcuucaccgugaugaccgacggcccguccgacggccaggccagcuacaagaucuuccgcaucgagaaggggaagaucgucaaguccguggagaugaacgcccccaacuaccacuacgaggagugcagcugcuaccccgacuccagcgagaucacgugcgugugccgggacaacuggcacggcuccaaccgccccugggucagcuucaaccagaaccucgaguaccagaucggguacaucugcuccggcaucuucggggacaacccgcggcccaacgacaaggccggcagcugcggccccguguccagcaacggggccaacggcgugaagggguucuccuucaaguacggcaacggggucuggaucggccgcaccaagagcaucagcucccggaacggcuucgagaugaucugggaccccaacggguggaccggcaccgacaacaacuuccugaucaagcaggacaucguggggaucaacgaguggagcggcuacuccgggagcuucgugcagcacccggagcugaccggccucgacugcauccgccccugcuucugggucgagcugauccggggccgccccaaggagaacacgaucuggaccuccgggagcuccaucagcuucugcggcgugaacuccgacaccgucggguggagcuggcccgacggcgcggagcugccguucaccaucgacaaguga

SEQ ID NO: 81352 - RNA, 1410 nt, Artificial Sequence
  derived and/or modified CDS sequence (opt1) from neuraminidase__InfluenzaA__ACV53891
augaaccccaaccagaagaucaucaccaucggcagcgugugcaugaccaucgggauggccaaccugauccuccagaucggcaacaucaucuccaucuggaucagccacuccauccagcuggggaaccagaaccagaucgagacgugcaaccagagcgucaucaccuacgagaacaacaccugggugaaccagaccuacgugaacaucuccaacacgaacuucgccgcgggccagagcgucguguccgugaagcuggccgggaacagcucccucugcccggucagcggcugggccaucuacuccaaggacaacagcauccgcaucggcuccaagggggacguguucgugauccgggagcccuucaucagcugcagcccccuggagugccgcaccuucuuccugacccagggcgcccuccugaacgacaagcacuccaacgggaccaucaaggaccggucccccuaccgcacgcugaugagcugcccgaucggcgagguccccucccccuacaacagccgguucgagagcguggccugguccgcgagcgccugccacgacgggaucaacuggcucaccaucggcaucuccggccccgacaacggggccguggccguccugaaguacaacggcaucaucaccgacaccaucaagagcuggcgcaacaagauccugcggacgcaggaguccgagugcgcgugcgugaacgggagcugcuucaccgugaugaccgacggcccguccgacggccaggccagcuacaagaucuuccgcaucgagaaggggaagaucgucaaguccguggagaugaacgcccccaacuaccacuacgaggagugcagcugcuaccccgacuccagcgagaucacgugcgugugccgggacaacuggcacggcuccaaccgccccugggucagcuucaaccagaaccucgaguaccagaucggguacaucugcuccggcaucuucggggacaacccgcggcccaacgacaagaccggcagcugcggccccguguccagcaacggggccaacggcgugaagggguucuccuucaaguacggcaacggggucuggaucggccgcaccaagagcaucagcucccggaacggcuucgagaugaucugcgaccccaacggguggaccggcaccgacaacaacuucagcaucaagcaggacaucguggggaucaacgagugguccggcuacagcggguccuucgugcagcacccggagcugacgggccuggacugcauccgccccugcuucugggucgagcucauccggggccgccccaaggagaacaccaucuggaccagcggguccagcaucuccuucugcggcgugaacagcgacaccgucgggugguccuggcccgacggcgccgagcugccguucacgaucgacaaguga

SEQ ID NO: 81353 - RNA, 1410 nt, Artificial Sequence
  derived and/or modified CDS sequence (opt1) from neuraminidase__InfluenzaA__ACV53901
augaaccccaaccagaagaucaucaccaucggcagcgugugcaugaccaucgggauggccaaccugauccuccagaucggcaacaucaucuccaucuggaucagccacuccauccagcuggggaaccagaaccagaucgagacgugcaaccagagcgucaucaccuacgagaacaacaccugggugaaccagaccuacgugaacaucuccaacacgaacuucgccgcgggccagagcgucguguccgugaagcuggccgggaacagcucccucugcccggucagcggcugggccaucuacuccaaggacaacagcauccgcaucggcuccaagggggacguguucgugauccgggagcccuucaucagcugcagcccccuggagugccgcaccuucuuccugacccagggcgcccuccugaacgacaagcacuccaacgggaccaucaaggaccggucccccuaccgcacgcugaugagcugcccgaucggcgagguccccucccccuacaacagccgguucgagagcguggccugguccgcgagcgccugccacgacgggaucaacuggcucaccaucggcaucuccggccccgacaacggggccguggccguccugaaguacaacggcaucaucaccgacaccaucaagagcuggcgcaacaacauccugcggacgcaggaguccgagugcgcgugcgugaacgggagcugcuucaccgugaugaccgacggcccguccgacggccaggccagcuacaagaucuuccgcaucgagaaggggaagaucgucaaguccguggagaugaacgcccccaacuaccacuacgaggagugcagcugcuaccccgacuccagcgagaucacgugcgugugccgggacaacuggcacggcuccaaccgccccugggucagcuucaaccagaaccucgaguaccagaucggguacaucugcuccggcaucuucggggacaacccgcggcccaacgacaagaccggcagcugcggccccguguccagcaacggggccaacggcgugaagggguucuccuucaaguacggcaacggggucuggaucggccgcaccaagagcaucagcucccggaacggcuucgagaugaucugggaccccaacggguggaccggcaccgacaacaacuucagcaucaagcaggacaucguggggaucaacgagugguccggcuacagccgcuccuucgugcagcacccggagcugacggggcuggacugcauccggcccugcuucugggucgagcucauccgcggccggcccaaggagaacaccaucuggaccagcggcuccagcaucuccuucugcggggugaacagcgacaccgucggcugguccuggcccgacggggccgagcugccguucacgaucgacaaguga

SEQ ID NO: 81354 - RNA, 1410 nt, Artificial Sequence; identical to SEQ ID NO: 80762
  derived and/or modified CDS sequence (opt1) from neuraminidase__InfluenzaA__ACV53911

SEQ ID NO: 81355 - RNA, 1410 nt, Artificial Sequence; identical to SEQ ID NO: 80752
  derived and/or modified CDS sequence (opt1) from neuraminidase__InfluenzaA__ACV67088

SEQ ID NO: 81356 - RNA, 1410 nt, Artificial Sequence; identical to SEQ ID NO: 80762
  derived and/or modified CDS sequence (opt1) from neuraminidase__InfluenzaA__ACV67168

SEQ ID NO: 81357 - RNA, 1410 nt, Artificial Sequence; identical to SEQ ID NO: 80752
  derived and/or modified CDS sequence (opt1) from neuraminidase__InfluenzaA__ACV67169

SEQ ID NO: 81358 - RNA, 1410 nt, Artificial Sequence; identical to SEQ ID NO: 80762
  derived and/or modified CDS sequence (opt1) from neuraminidase__InfluenzaA__ACV67171

SEQ ID NO: 81359 - RNA, 1410 nt, Artificial Sequence; identical to SEQ ID NO: 80762
  derived and/or modified CDS sequence (opt1) from neuraminidase__InfluenzaA__ACV67172

SEQ ID NO: 81360 - RNA, 1410 nt, Artificial Sequence; identical to SEQ ID NO: 80792
  derived and/or modified CDS sequence (opt1) from neuraminidase__InfluenzaA__ACV67173

SEQ ID NO: 81361 - RNA, 1410 nt, Artificial Sequence; identical to SEQ ID NO: 80752
  derived and/or modified CDS sequence (opt1) from neuraminidase__InfluenzaA__ACV67174

SEQ ID NO: 81362 - RNA, 1410 nt, Artificial Sequence
  derived and/or modified CDS sequence (opt1) from neuraminidase__InfluenzaA__ACV67175
augaaccccaaccagaagaucaucaccaucggcagcgugugcaugaccaucgggauggccaaccugauccuccagaucggcaacaucaucuccaucuggaucagccacuccauccagcuggggaaccagaaccagaucgagacgugcaaccagagcgucaucaccuacgagaacaacaccugggugaaccagaccuacgugaacaucuccaacacgaacuucgccgcgggccagagcgucguguccgugaagcuggccgggaacagcucccucugcccggucagcggcugggccaucuacuccaaggacaacagcauccgcaucggcuccaagggggacguguucgugauccgggagcccuucaucagcugcagcccccuggagugccgcaccuucuuccugacccagggcgcccuccugaacgacaagcacuccaacgggaccaucaaggaccggucccccuaccgcacgcugaugagcugcccgaucggcgagguccccucccccuacaacagccgguucgagagcguggccugguccgcgagcgccugccacgacgggaucaacuggcucaccaucggcaucuccggccccgacaacggggccguggccguccugaaguacaacggcaucaucaccgacaccaucaagagcuggcgcaacaacauccugcggacgcaggaguccgagugcgcgugcgugaacgggagcugcuucaccgugaugaccgacggcccguccgacggccaggccagcuacaagaucuuccgcaucgagaaggggaagaucgucaaguccguggagaugaacgcccccaacuaccacuacgaggagugcagcugcuaccccgacuccagcgagaucacgugcgugugccgggacaacuggcacggcuccaaccgccccugggucagcuucaaccagaaccucgaguaccagaucggguacaucugcuccggcaucuucggggacaacccgcggcccaacgacaagaccggcagcugcggccccguguccagcaacggguccaacggcgugaagggguucagcuucaaguacggcaacggggucuggaucggccgcaccaagagcaucuccagccggaacggcuucgagaugaucugggaccccaacggguggaccggcaccgacaacaacuucuccaucaagcaggacaucguggggaucaacgaguggagcggcuacuccgggagcuucgugcagcacccggagcugacgggccuggacugcauccgccccugcuucugggucgagcucauccggggccgccccaaggagaacaccaucuggaccuccgggagcuccaucagcuucugcggcgugaacuccgacaccgucggguggagcuggcccgacggcgccgagcugccguucacgaucgacaaguga

SEQ ID NO: 81363 - RNA, 1410 nt, Artificial Sequence; identical to SEQ ID NO: 80762
  derived and/or modified CDS sequence (opt1) from neuraminidase__InfluenzaA__ACV67176

SEQ ID NO: 81364 - RNA, 1410 nt, Artificial Sequence; identical to SEQ ID NO: 80752
  derived and/or modified CDS sequence (opt1) from neuraminidase__InfluenzaA__ACV67177

SEQ ID NO: 81365 - RNA, 1410 nt, Artificial Sequence; identical to SEQ ID NO: 80762
  derived and/or modified CDS sequence (opt1) from neuraminidase__InfluenzaA__ACV67178

SEQ ID NO: 81366 - RNA, 1410 nt, Artificial Sequence; identical to SEQ ID NO: 80762
  derived and/or modified CDS sequence (opt1) from neuraminidase__InfluenzaA__ACV67179

SEQ ID NO: 81367 - RNA, 1410 nt, Artificial Sequence
  derived and/or modified CDS sequence (opt1) from neuraminidase__InfluenzaA__ACV67180
augaaccccaaccagaagaucaucaccaucggcagcgugugcaugaccaucgggauggccaaccugauccuccagaucggcaacaucaucuccaucuggaucagccacuccauccagcuggggaaccagaaccagaucgagacgugcaaccagagcgucaucaccuacgagaacaacaccugggugaaccagaccuacgugaacaucuccaacacgaacuucgccgcgggccagccggucgugagcgugaagcuggccgggaacuccagccucugccccgucuccggcugggccaucuacagcaaggacaacuccauccgcaucggcagcaagggggacguguucgugauccgggagcccuucaucuccugcagcccccuggagugccgcaccuucuuccugacccagggcgcccuccugaacgacaagcacuccaacgggaccaucaaggaccggagcccguaccgcacgcugauguccugccccaucggcgagguccccagccccuacaacucccgguucgagagcguggccuggagcgcguccgccugccacgacgggaucaacuggcucaccaucggcaucagcggcccggacaacggggccguggccguccugaaguacaacggcaucaucaccgacaccaucaaguccuggcgcaacaacauccugcggacgcaggagagcgagugcgcgugcgugaacggguccugcuucaccgugaugaccgacggccccagcgacggccaggccuccuacaagaucuuccgcaucgagaaggggaagaucgucaagagcguggagaugaacgcccccaacuaccacuacgaggagugcuccugcuaccccgacagcuccgagaucacgugcgugugccgggacaacuggcacggcagcaaccgcccgugggucuccuucaaccagaaccucgaguaccagaucggguacaucugcagcggcaucuucggggacaacccccggcccaacgacaagaccggcuccugcggccccgugagcuccaacggggccaacggcgugaagggguucagcuucaaguacggcaacggggucuggaucggccgcaccaaguccaucagcagccggaacggcuucgagaugaucugggacccgaacggguggaccggcaccgacaacaacuucuccaucaagcaggacaucguggggaucaacgaguggagcggcuacuccgggagcuucgugcagcaccccgagcugacgggccuggacugcauccgccccugcuucugggucgagcucauccggggccgccccaaggagaacaccaucuggaccuccgggagcuccaucagcuucugcggcgugaacuccgacaccgucggguggagcuggccggacggcgccgagcugcccuucacgaucgacaaguga

SEQ ID NO: 81368 - RNA, 1410 nt, Artificial Sequence
  derived and/or modified CDS sequence (opt1) from neuraminidase__InfluenzaA__ACV67181
augaaccccaaccagaagaucaucaccaucggcagcgugugcaugaccaucgggauggccaaccugauccuccagaucggcaacaucaucuccaucuggaucagccacuccauccagcuggggaaccagaaccagaucgagacgugcaaccagagcgucaucaccuacgagaacaacaccugggugaaccagaccuacgugaacaucuccaacacgaacuucgccgcgggccagagcgucguguccgugaagcuggccgggaacagcucccucugcccggucagcggcugggccaucuacuccaaggacaacagcauccgcaucggcuccaagggggacguguucaucauccgggagcccuucaucagcugcagcccccuggagugccgcaccuucuuccugacccagggcgcccuccugaacgacaagcacuccaacgggaccaucaaggaccggucccccuaccgcacgcugaugagcugcccgaucggcgaggugcccucccccuacaacagccgguucgagagcgucgccugguccgcgagcgccugccacgacgggaucaacuggcucaccaucggcaucuccggccccgacaacggggccguggccgugcugaaguacaacggcaucaucaccgacaccaucaagagcuggcgcaacaacauccugcggacgcaggaguccgagugcgcgugcgucaacgggagcugcuucaccgugaugaccgacggcccguccgacggccaggccagcuacaagaucuuccgcaucgagaaggggaagaucaucaaguccguggagaugaacgcccccaacuaccacuacgaggagugcagcugcuaccccgacuccagcgagaucacgugcgucugccgggacaacuggcacggcuccaaccgccccugggugagcuucaaccagaaccucgaguaccagaucggguacaucugcuccggcaucuucggggacaacccgcggcccaacgacaagaccggcagcugcggccccguguccagcaacggggccaacggcgucaagggguucuccuucaaguacggcaacgggguguggaucggccgcaccaagagcaucagcucccggaacggcuucgagaugaucugggaccccaacggguggaccggcaccgacaacaacuucagcaucaagcaggacaucguggggaucaacgagugguccggcuacagcggguccuucguccagcacccggagcugacgggccuggacugcauccgccccugcuucuggguggagcucauccggggccgccccaaggagaacaccaucuggaccagcggguccagcaucuccuucugcggcgugaacagcgacaccgucgggugguccuggcccgacggcgccgagcugccguucacgaucgacaaguga

SEQ ID NO: 81369 - RNA, 1410 nt, Artificial Sequence; identical to SEQ ID NO: 81186
  derived and/or modified CDS sequence (opt1) from neuraminidase__InfluenzaA__ACV67182

SEQ ID NO: 81370 - RNA, 1410 nt, Artificial Sequence
  derived and/or modified CDS sequence (opt1) from neuraminidase__InfluenzaA__ACV67183
augaaccccaaccagaagaucaucaccaucggcagcgugugcaugaccaucgggauggccaaccugauccuccagaucggcaacaucaucuccaucuggaucagccacuccauccagcuggggaaccagaaccagaucgagacgugcaaccagagcgucaucaccuacgagaacaacaccugggugaaccagaccuacgugaacaucuccaacacgaacuucgccgcgggccagagcgucguguccgugaagcuggccgggaacagcucccucugcccggucagcggcugggccaucuacuccaaggacaacagcgugcgcaucggcuccaagggggacguguucgucauccgggagcccuucaucagcugcagcccccuggagugccgcaccuucuuccugacccagggcgcccuccugaacgacaagcacuccaacgggaccaucaaggaccggucccccuaccgcacgcugaugagcugcccgaucggcgaggugcccucccccuacaacagccgguucgagagcguggccugguccgcgagcgccugccacgacgggaucaacuggcucaccaucggcaucuccggccccgacaacggggccgucgccgugcugaaguacaacggcaucaucaccgacaccaucaagagcuggcgcaacaacauccugcggacgcaggaguccgagugcgcgugcgugaacgggagcugcuucaccgucaugaccgacggcccguccaacggccaggccagcuacaagaucuuccgcaucgagaaggggaagaucgugaaguccguggagaugaacgcccccaacuaccacuacgaggagugcagcugcuaccccgacuccaacgagaucacgugcgucugccgggacaacuggcacggcagcaaccgccccuggguguccuucaaccagaaccucgaguaccagaucggguacaucugcagcggcaucuucggggacaacccgcggcccaacgacaagaccggcuccugcggccccgugagcuccaacggggccaacggcgucaagggguucagcuucaaguacggcaacgggguguggaucggccgcaccaaguccaucaacagccggaacggcuucgagaugaucugggaccccaacggguggaccggcaccgacaacaacuucagcaucaagcaggacaucguggggaucaacgagugguccggcuacagcggguccuucguccagcacccggagcugacgggccuggacugcauccgccccugcuucuggguggagcucauccggggccgccccaaggagaacaccaucuggaccagcggguccagcaucuccuucugcggcgucaacagcgacaccguggggugguccuggcccgacggcgccgagcugccguucacgaucgacaaguga

SEQ ID NO: 81371 - RNA, 1410 nt, Artificial Sequence; identical to SEQ ID NO: 80762
  derived and/or modified CDS sequence (opt1) from neuraminidase__InfluenzaA__ACV67184

SEQ ID NO: 81372 - RNA, 1410 nt, Artificial Sequence; identical to SEQ ID NO: 80752
  derived and/or modified CDS sequence (opt1) from neuraminidase__InfluenzaA__ACV67186

SEQ ID NO: 81373 - RNA, 1410 nt, Artificial Sequence; identical to SEQ ID NO: 80762
  derived and/or modified CDS sequence (opt1) from neuraminidase__InfluenzaA__ACV67187

SEQ ID NO: 81374 - RNA, 1410 nt, Artificial Sequence; identical to SEQ ID NO: 80762
  derived and/or modified CDS sequence (opt1) from neuraminidase__InfluenzaA__ACV67188

SEQ ID NO: 81375 - RNA, 1410 nt, Artificial Sequence; identical to SEQ ID NO: 80792
  derived and/or modified CDS sequence (opt1) from neuraminidase__InfluenzaA__ACV67189

SEQ ID NO: 81376 - RNA, 1410 nt, Artificial Sequence; identical to SEQ ID NO: 80792
  derived and/or modified CDS sequence (opt1) from neuraminidase__InfluenzaA__ACV67190

SEQ ID NO: 81377 - RNA, 1410 nt, Artificial Sequence; identical to SEQ ID NO: 80752
  derived and/or modified CDS sequence (opt1) from neuraminidase__InfluenzaA__ACV67191

SEQ ID NO: 81378 - RNA, 1410 nt, Artificial Sequence; identical to SEQ ID NO: 80792
  derived and/or modified CDS sequence (opt1) from neuraminidase__InfluenzaA__ACV67192

SEQ ID NO: 81379 - RNA, 1410 nt, Artificial Sequence; identical to SEQ ID NO: 80792
  derived and/or modified CDS sequence (opt1) from neuraminidase__InfluenzaA__ACV67193

SEQ ID NO: 81380 - RNA, 1410 nt, Artificial Sequence; identical to SEQ ID NO: 80762
  derived and/or modified CDS sequence (opt1) from neuraminidase__InfluenzaA__ACV67194

SEQ ID NO: 81381 - RNA, 1410 nt, Artificial Sequence; identical to SEQ ID NO: 80762
  derived and/or modified CDS sequence (opt1) from neuraminidase__InfluenzaA__ACV67195

SEQ ID NO: 81382 - RNA, 1410 nt, Artificial Sequence; identical to SEQ ID NO: 80762
  derived and/or modified CDS sequence (opt1) from neuraminidase__InfluenzaA__ACV67196

SEQ ID NO: 81383 - RNA, 1410 nt, Artificial Sequence; identical to SEQ ID NO: 80752
  derived and/or modified CDS sequence (opt1) from neuraminidase__InfluenzaA__ACV67197

SEQ ID NO: 81384 - RNA, 1410 nt, Artificial Sequence; identical to SEQ ID NO: 80752
  derived and/or modified CDS sequence (opt1) from neuraminidase__InfluenzaA__ACV67199

SEQ ID NO: 81385 - RNA, 1410 nt, Artificial Sequence; identical to SEQ ID NO: 80752
  derived and/or modified CDS sequence (opt1) from neuraminidase__InfluenzaA__ACV67200

SEQ ID NO: 81386 - RNA, 1410 nt, Artificial Sequence; identical to SEQ ID NO: 80752
  derived and/or modified CDS sequence (opt1) from neuraminidase__InfluenzaA__ACV67201

SEQ ID NO: 81387 - RNA, 1410 nt, Artificial Sequence; identical to SEQ ID NO: 80752
  derived and/or modified CDS sequence (opt1) from neuraminidase__InfluenzaA__ACV67202

SEQ ID NO: 81388 - RNA, 1410 nt, Artificial Sequence; identical to SEQ ID NO: 80762
  derived and/or modified CDS sequence (opt1) from neuraminidase__InfluenzaA__ACV67203

SEQ ID NO: 81389 - RNA, 1410 nt, Artificial Sequence; identical to SEQ ID NO: 80762
  derived and/or modified CDS sequence (opt1) from neuraminidase__InfluenzaA__ACV67204

SEQ ID NO: 81390 - RNA, 1410 nt, Artificial Sequence; identical to SEQ ID NO: 80762
  derived and/or modified CDS sequence (opt1) from neuraminidase__InfluenzaA__ACV67205

SEQ ID NO: 81391 - RNA, 1410 nt, Artificial Sequence
  derived and/or modified CDS sequence (opt1) from neuraminidase__InfluenzaA__ACV67206
augaaccccaaccagaagaucaucaccaucggcagcgugugcaugaccaucgggauggccaaccugauccuccagaucggcaacaucaucuccaucuggaucagccacuccauccagcuggggaaccagaaccagaucgagacgugcaaccagagcgucaucaccuacgagaacaacaccugggugaaccagaccuacgugaacaucuccaacacgaacuucgccgcgggccagagcauggucuccgugaagcuggccgggaacagcucccucugcccggugagcggcugggccaucuacuccaaggacaacagcguccgcaucggcuccaagggggacguguucgugauccgggagcccuucaucagcugcagcccccuggagugccgcaccuucuuccugacccagggcgcccuccugaacgacaagcacuccaacgggaccaucaaggaccggucccccuaccgcacgcugaugagcugcccgaucggcgagguccccucccccuacaacagccgguucgagagcguggccugguccgcgagcgccugccacgacgggaucaacuggcucaccaucggcaucuccggccccgacaacggggccguggccguccugaaguacaacggcaucaucaccgacaccaucaagagcuggcgcaacaacauccugcggacgcaggaguccgagugcgcgugcgugaacgggagcugcuucaccgugaugaccgacggcccguccaacggccaggccagcuacaagaucuuccgcaucgagaaggggaagaucgucaaguccguggagaugaacgcccccaacuacuacuacgaggagugcagcugcuaccccgacuccagcgagaucacgugcgugugccgggacaacuggcacggcuccaaccgccccugggucagcuucaaccagaaccucgaguaccagaucggguacaucugcuccggcaucuucggggacaacccgcggcccaacgacaagaccggcagcugcggccccguguccagcaacggggccaacggcgugaagggguucuccuucaaguacggcaacggggucuggaucggccgcaccaagagcaucagcucccggaacggcuucgagaugaucugggaccccaacggguggaccggcaccgacaacaacuucagcaucaagcaggacaucguggggaucaacgagugguccggcuacagcggguccuucgugcagcacccggagcugacgggccuggacugcauccgccccugcuucugggucgagcucauccggggccgccccaaggagaacaccaucuggaccagcggguccagcaucuccuucugcggcgugaacagcgacaccgucgggugguccuggcccgacggcgccgagcugccguucacgaucgacaaguga

SEQ ID NO: 81392 - RNA, 1410 nt, Artificial Sequence; identical to SEQ ID NO: 80752
  derived and/or modified CDS sequence (opt1) from neuraminidase__InfluenzaA__ACV67207

SEQ ID NO: 81393 - RNA, 1410 nt, Artificial Sequence; identical to SEQ ID NO: 80762
  derived and/or modified CDS sequence (opt1) from neuraminidase__InfluenzaA__ACV67208

SEQ ID NO: 81394 - RNA, 1410 nt, Artificial Sequence; identical to SEQ ID NO: 80752
  derived and/or modified CDS sequence (opt1) from neuraminidase__InfluenzaA__ACV67210

SEQ ID NO: 81395 - RNA, 1410 nt, Artificial Sequence; identical to SEQ ID NO: 80762
  derived and/or modified CDS sequence (opt1) from neuraminidase__InfluenzaA__ACV67211

SEQ ID NO: 81396 - RNA, 1410 nt, Artificial Sequence; identical to SEQ ID NO: 80762
  derived and/or modified CDS sequence (opt1) from neuraminidase__InfluenzaA__ACV70076

SEQ ID NO: 81397 - RNA, 1410 nt, Artificial Sequence
  derived and/or modified CDS sequence (opt1) from neuraminidase__InfluenzaA__ACV70086
augaaccccaaccagaagaucaucaccaucggcagcgugugcaugaccaucgggauggccaaccugauccuccagaucggcaacaucaucuccaucuggaucagccacuccauccagcuggggaaccagaaccagaucgagacgugcaaccagagcaucaucaccuacgagaacaacaccugggucaaccagaccuacgugaacaucuccaacacgaacuucgccgcgggccagagcguggucuccgugaagcuggccgggaacagcucccucugcccggugagcggcugggccaucuacuccaaggacaacagcguccgcaucggcuccaagggggacguguucgugauccgggagcccuucaucagcugcagcccccuggagugccgcaccuucuuccugacccagggcgcccuccugaacgacaagcacuccaacgggaccaucaaggaccggucccccuaccgcacgcugaugagcugcccgaucggcgagguccccucccccuacaacagccgguucgagagcguggccugguccgcgagcgccugccacgacgggaucaacuggcucaccaucggcaucuccggccccgacaacggggccguggccguccugaaguacaacggcaucaucaccgacaccaucaagagcuggcgcaacaacauccugcggacgcaggaguccgagugcgcgugcgugaacgggagcugcuucaccgugaugaccgacggcccguccaacggccaggccagcuacaagaucuuccgcaucgagaaggggaagaucgucaaguccguggagaugaacgcccccaacuaccacuacgaggagugcagcugcuaccccgacuccagcgagaucacgugcgugugccgggacaacuggcacggcuccaaccgccccugggucagcuucaaccagaaccucgaguaccagaucggguacaucugcuccggcaucuucggggacaacccgcggcccaacgacaagaccggcagcugcggccccguguccagcaacggggccaacggcgugaagggguucuccuucaaguacggcaacggggucuggaucggccgcaccaagagcaucagcucccggaacggcuucgagaugaucugggaccccaacggguggaccggcaccgacaacaacuucagcaucaagcaggacaucguggggaucaacgagugguccggcuacagcggguccuucgugcagcacccggagcugacgggccuggacugcauccgccccugcuucugggucgagcucauccggggccgccccaaggagaacaccaucuggaccagcggguccagcaucuccuucugcggcgugaacagcgacaccgucgggugguccuggcccgacggcgccgagcugccguucacgaucgacaaguga

SEQ ID NO: 81398 - RNA, 1410 nt, Artificial Sequence
  derived and/or modified CDS sequence (opt1) from neuraminidase__InfluenzaA__ACV70096
augaaccccaaccagaagaucaucaccaucggcagcgugugcaugaccaucgggauggccaaccugauccuccagaucggcaacaucaucuccaucuggaucagccacuccauccagcuggggaaccagaaccagaucgagacgugcaaccagagcgucaucaccuacgagaacaacaccugggugaaccagaccuacgugaacaucuccaacacgaacuucaccgccggccagagcgucguguccgugaagcuggcggggaacagcucccucugcccggucagcggcugggccaucuacuccaaggacaacagcauccgcaucggcuccaagggggacguguucgugauccgggagcccuucaucagcugcagcccccuggagugccgcaccuucuuccugacccagggcgcccuccugaacgacaagcacuccaacgggacgaucaaggaccggucccccuaccgcacccugaugagcugcccgaucggcgagguccccucccccuacaacagccgguucgagagcguggccugguccgccagcgcgugccacgacgggaucaacuggcucaccaucggcaucuccggccccgacaacggggccguggccguccugaaguacaacggcaucaucaccgacacgaucaagagcuggcgcaacaacauccugcggacccaggaguccgagugcgccugcgugaacgggagcugcuucaccgugaugaccgacggcccguccgacggccaggcgagcuacaagaucuuccgcaucgagaaggggaagaucgucaaguccguggagaugaacgcccccaacuaccacuacgaggagugcagcugcuaccccgacuccagcgagaucacgugcgugugccgggacaacuggcacggcuccaaccgccccugggucagcuucaaccagaaccucgaguaccagaucggguacaucugcuccggcaucuucggggacaacccgcggcccaacgacaagaccggcagcugcggccccguguccagcaacggggccaacggcgugaagggguucuccuucaaguacggcaacggggucuggaucggccgcaccaagagcaucagcucccggaacggcuucgagaugaucugggaccccaacggguggaccggcacggacaacaacuucagcaucaagcaggacaucguggggaucaacgagugguccggcuacagcggguccuucgugcagcacccggagcugaccggccuggacugcauccgccccugcuucugggucgagcucauccggggccgccccaaggagaacaccaucuggaccagcggguccagcaucuccuucugcggcgugaacagcgacacggucgggugguccuggcccgacggcgccgagcugccguucaccaucgacaaguga

SEQ ID NO: 81399 - RNA, 1410 nt, Artificial Sequence; identical to SEQ ID NO: 80762
  derived and/or modified CDS sequence (opt1) from neuraminidase__InfluenzaA__ACV70106

SEQ ID NO: 81400 - RNA, 1410 nt, Artificial Sequence; identical to SEQ ID NO: 80762
  derived and/or modified CDS sequence (opt1) from neuraminidase__InfluenzaA__ACV70116

SEQ ID NO: 81401 - RNA, 1410 nt, Artificial Sequence; identical to SEQ ID NO: 80762
  derived and/or modified CDS sequence (opt1) from neuraminidase__InfluenzaA__ACV70126

SEQ ID NO: 81402 - RNA, 1410 nt, Artificial Sequence; identical to SEQ ID NO: 80762
  derived and/or modified CDS sequence (opt1) from neuraminidase__InfluenzaA__ACV70157

SEQ ID NO: 81403 - RNA, 1410 nt, Artificial Sequence; identical to SEQ ID NO: 80752
  derived and/or modified CDS sequence (opt1) from neuraminidase__InfluenzaA__ACV70167

SEQ ID NO: 81404 - RNA, 1410 nt, Artificial Sequence; identical to SEQ ID NO: 80762
  derived and/or modified CDS sequence (opt1) from neuraminidase__InfluenzaA__ACV70177

SEQ ID NO: 81405 - RNA, 1410 nt, Artificial Sequence; identical to SEQ ID NO: 80762
  derived and/or modified CDS sequence (opt1) from neuraminidase__InfluenzaA__ACV70187

SEQ ID NO: 81406 - RNA, 1410 nt, Artificial Sequence; identical to SEQ ID NO: 80762
  derived and/or modified CDS sequence (opt1) from neuraminidase__InfluenzaA__ACV70197

SEQ ID NO: 81407 - RNA, 1410 nt, Artificial Sequence; identical to SEQ ID NO: 80762
  derived and/or modified CDS sequence (opt1) from neuraminidase__InfluenzaA__ACV70207

SEQ ID NO: 81408 - RNA, 1410 nt, Artificial Sequence
  derived and/or modified CDS sequence (opt1) from neuraminidase__InfluenzaA__ACV70217
augaaccccaaccagaagaucaucaccaucggcagcgugugcaugaccaucgggauggccaaccugauccuccagaucggcaacaucaucuccaucuggaucagccacuccauccagcuggggaaccagaaccagaucgagacgugcaaccagagcgucaucaccuacgagaacaacaccugggugaaccagaccuacgugaacaucuccaacacgaacuucgccgcgggccagagcgucguguccgugaagcuggccgggaacagcucccucugcccggucagcggcugggccaucuacuccaaggacaacagcgugcgcaucggcuccaagggggacguguucgucauccgggagcccuucaucagcugcucccaccuggagugccgcaccuucuuccugacccagggcgcccuccugaacgacaagcacagcaacgggaccaucaaggaccggucccccuaccgcacgcugaugagcugccccaucggcgaggugccgucccccuacaacagccgguucgagagcguggccugguccgcgagcgccugccacgacgggaucaacuggcucaccaucggcaucuccggccccgacaacggggccgucgccgugcugaaguacaacggcaucaucaccgacaccaucaagagcuggcgcaacaacauccugcggacgcaggaguccgagugcgcgugcgugaacgggagcugcuucaccgucaugaccgacggccccuccaacggccaggccagcuacaagaucuuccgcaucgagaaggggaagaucgugaaguccguggagaugaacgccccgaacuaccacuacgaggagugcagcugcuaccccgacuccagcgagaucacgugcgucugccgggacaacuggcacggcuccaaccgccccugggugagcuucaaccagaaccucgaguaccagaucggguacaucugcuccggcaucuucggggacaacccccggccgaacgacaagaccggcagcugcggccccguguccagcaacggggccaacggcgucaagggguucuccuucaaguacggcaacgggguguggaucggccgcaccaagagcaucagcucccggaacggcuucgagaugaucugggaccccaacggguggaccggcaccgacaacaacuucagcaucaagcaggacaucguggggaucaacgagugguccggcuacagcggguccuucguccagcaccccgagcugacgggccuggacugcauccgcccgugcuucuggguggagcucauccggggccgccccaaggagaacaccaucuggaccagcggguccagcaucuccuucugcggcgucaacagcgacaccguggggugguccuggcccgacggcgccgagcugcccuucacgaucgacaaguga

SEQ ID NO: 81409 - RNA, 1410 nt, Artificial Sequence; identical to SEQ ID NO: 80762
  derived and/or modified CDS sequence (opt1) from neuraminidase__InfluenzaA__ACV70227

SEQ ID NO: 81410 - RNA, 1410 nt, Artificial Sequence; identical to SEQ ID NO: 80762
  derived and/or modified CDS sequence (opt1) from neuraminidase__InfluenzaA__ACV70237

SEQ ID NO: 81411 - RNA, 1410 nt, Artificial Sequence; identical to SEQ ID NO: 80762
  derived and/or modified CDS sequence (opt1) from neuraminidase__InfluenzaA__ACV70247

SEQ ID NO: 81412 - RNA, 1410 nt, Artificial Sequence; identical to SEQ ID NO: 80762
  derived and/or modified CDS sequence (opt1) from neuraminidase__InfluenzaA__ACV70257

SEQ ID NO: 81413 - RNA, 1410 nt, Artificial Sequence; identical to SEQ ID NO: 80762
  derived and/or modified CDS sequence (opt1) from neuraminidase__InfluenzaA__ACV70267

SEQ ID NO: 81414 - RNA, 1410 nt, Artificial Sequence; identical to SEQ ID NO: 80762
  derived and/or modified CDS sequence (opt1) from neuraminidase__InfluenzaA__ACV70277

SEQ ID NO: 81415 - RNA, 1410 nt, Artificial Sequence; identical to SEQ ID NO: 80762
  derived and/or modified CDS sequence (opt1) from neuraminidase__InfluenzaA__ACV70287

SEQ ID NO: 81416 - RNA, 1410 nt, Artificial Sequence; identical to SEQ ID NO: 80762
  derived and/or modified CDS sequence (opt1) from neuraminidase__InfluenzaA__ACV70297

SEQ ID NO: 81417 - RNA, 1410 nt, Artificial Sequence; identical to SEQ ID NO: 80762
  derived and/or modified CDS sequence (opt1) from neuraminidase__InfluenzaA__ACV70307

SEQ ID NO: 81418 - RNA, 1410 nt, Artificial Sequence; identical to SEQ ID NO: 80752
  derived and/or modified CDS sequence (opt1) from neuraminidase__InfluenzaA__ACV70317

SEQ ID NO: 81419 - RNA, 1410 nt, Artificial Sequence; identical to SEQ ID NO: 80762
  derived and/or modified CDS sequence (opt1) from neuraminidase__InfluenzaA__ACV70327

SEQ ID NO: 81420 - RNA, 1410 nt, Artificial Sequence; identical to SEQ ID NO: 80762
  derived and/or modified CDS sequence (opt1) from neuraminidase__InfluenzaA__ACV70337

SEQ ID NO: 81421 - RNA, 1410 nt, Artificial Sequence; identical to SEQ ID NO: 80762
  derived and/or modified CDS sequence (opt1) from neuraminidase__InfluenzaA__ACV70347

SEQ ID NO: 81422 - RNA, 1410 nt, Artificial Sequence; identical to SEQ ID NO: 80762
  derived and/or modified CDS sequence (opt1) from neuraminidase__InfluenzaA__ACV70357

SEQ ID NO: 81423 - RNA, 1410 nt, Artificial Sequence; identical to SEQ ID NO: 80762
  derived and/or modified CDS sequence (opt1) from neuraminidase__InfluenzaA__ACV70367

SEQ ID NO: 81424 - RNA, 1410 nt, Artificial Sequence; identical to SEQ ID NO: 80762
  derived and/or modified CDS sequence (opt1) from neuraminidase__InfluenzaA__ACV70377

SEQ ID NO: 81425 - RNA, 1410 nt, Artificial Sequence; identical to SEQ ID NO: 80762
  derived and/or modified CDS sequence (opt1) from neuraminidase__InfluenzaA__ACV70387

SEQ ID NO: 81426 - RNA, 1410 nt, Artificial Sequence; identical to SEQ ID NO: 80762
  derived and/or modified CDS sequence (opt1) from neuraminidase__InfluenzaA__ACV70397

SEQ ID NO: 81427 - RNA, 1410 nt, Artificial Sequence; identical to SEQ ID NO: 80762
  derived and/or modified CDS sequence (opt1) from neuraminidase__InfluenzaA__ACV70407

SEQ ID NO: 81428 - RNA, 1410 nt, Artificial Sequence; identical to SEQ ID NO: 80752
  derived and/or modified CDS sequence (opt1) from neuraminidase__InfluenzaA__ACV70417

SEQ ID NO: 81429 - RNA, 1410 nt, Artificial Sequence; identical to SEQ ID NO: 80762
  derived and/or modified CDS sequence (opt1) from neuraminidase__InfluenzaA__ACV70427

SEQ ID NO: 81430 - RNA, 1410 nt, Artificial Sequence; identical to SEQ ID NO: 80762
  derived and/or modified CDS sequence (opt1) from neuraminidase__InfluenzaA__ACV70437

SEQ ID NO: 81431 - RNA, 1410 nt, Artificial Sequence; identical to SEQ ID NO: 80762
  derived and/or modified CDS sequence (opt1) from neuraminidase__InfluenzaA__ACV70447

SEQ ID NO: 81432 - RNA, 1410 nt, Artificial Sequence; identical to SEQ ID NO: 80762
  derived and/or modified CDS sequence (opt1) from neuraminidase__InfluenzaA__ACV70457

SEQ ID NO: 81433 - RNA, 1410 nt, Artificial Sequence; identical to SEQ ID NO: 80762
  derived and/or modified CDS sequence (opt1) from neuraminidase__InfluenzaA__ACV70467

SEQ ID NO: 81434 - RNA, 1410 nt, Artificial Sequence; identical to SEQ ID NO: 80762
  derived and/or modified CDS sequence (opt1) from neuraminidase__InfluenzaA__ACV70477

SEQ ID NO: 81435 - RNA, 1410 nt, Artificial Sequence; identical to SEQ ID NO: 80762
  derived and/or modified CDS sequence (opt1) from neuraminidase__InfluenzaA__ACV70487

SEQ ID NO: 81436 - RNA, 1410 nt, Artificial Sequence; identical to SEQ ID NO: 80762
  derived and/or modified CDS sequence (opt1) from neuraminidase__InfluenzaA__ACV70497

SEQ ID NO: 81437 - RNA, 1410 nt, Artificial Sequence; identical to SEQ ID NO: 80762
  derived and/or modified CDS sequence (opt1) from neuraminidase__InfluenzaA__ACV70507

SEQ ID NO: 81438 - RNA, 1410 nt, Artificial Sequence; identical to SEQ ID NO: 80762
  derived and/or modified CDS sequence (opt1) from neuraminidase__InfluenzaA__ACV70517

SEQ ID NO: 81439 - RNA, 1410 nt, Artificial Sequence; identical to SEQ ID NO: 80762
  derived and/or modified CDS sequence (opt1) from neuraminidase__InfluenzaA__ACV70527

SEQ ID NO: 81440 - RNA, 1410 nt, Artificial Sequence; identical to SEQ ID NO: 80762
  derived and/or modified CDS sequence (opt1) from neuraminidase__InfluenzaA__ACV70547

SEQ ID NO: 81441 - RNA, 1410 nt, Artificial Sequence; identical to SEQ ID NO: 80762
  derived and/or modified CDS sequence (opt1) from neuraminidase__InfluenzaA__ACV70557

SEQ ID NO: 81442 - RNA, 1410 nt, Artificial Sequence; identical to SEQ ID NO: 80762
  derived and/or modified CDS sequence (opt1) from neuraminidase__InfluenzaA__ACV70567

SEQ ID NO: 81443 - RNA, 1410 nt, Artificial Sequence; identical to SEQ ID NO: 80762
  derived and/or modified CDS sequence (opt1) from neuraminidase__InfluenzaA__ACV70577

SEQ ID NO: 81444 - RNA, 1410 nt, Artificial Sequence; identical to SEQ ID NO: 80762
  derived and/or modified CDS sequence (opt1) from neuraminidase__InfluenzaA__ACV70587

SEQ ID NO: 81445 - RNA, 1410 nt, Artificial Sequence; identical to SEQ ID NO: 80752
  derived and/or modified CDS sequence (opt1) from neuraminidase__InfluenzaA__ACV70597

SEQ ID NO: 81446 - RNA, 1410 nt, Artificial Sequence; identical to SEQ ID NO: 80762
  derived and/or modified CDS sequence (opt1) from neuraminidase__InfluenzaA__ACV70607

SEQ ID NO: 81447 - RNA, 1410 nt, Artificial Sequence; identical to SEQ ID NO: 81345
  derived and/or modified CDS sequence (opt1) from neuraminidase__InfluenzaA__ACV70617

SEQ ID NO: 81448 - RNA, 1410 nt, Artificial Sequence; identical to SEQ ID NO: 80762
  derived and/or modified CDS sequence (opt1) from neuraminidase__InfluenzaA__ACV70647

SEQ ID NO: 81449 - RNA, 1410 nt, Artificial Sequence; identical to SEQ ID NO: 80762
  derived and/or modified CDS sequence (opt1) from neuraminidase__InfluenzaA__ACV70657

SEQ ID NO: 81450 - RNA, 1410 nt, Artificial Sequence; identical to SEQ ID NO: 80762
  derived and/or modified CDS sequence (opt1) from neuraminidase__InfluenzaA__ACV70667

SEQ ID NO: 81451 - RNA, 1410 nt, Artificial Sequence; identical to SEQ ID NO: 80762
  derived and/or modified CDS sequence (opt1) from neuraminidase__InfluenzaA__ACV70677

SEQ ID NO: 81452 - RNA, 1410 nt, Artificial Sequence; identical to SEQ ID NO: 80762
  derived and/or modified CDS sequence (opt1) from neuraminidase__InfluenzaA__ACV70687

SEQ ID NO: 81453 - RNA, 1410 nt, Artificial Sequence; identical to SEQ ID NO: 80762
  derived and/or modified CDS sequence (opt1) from neuraminidase__InfluenzaA__ACV70697

SEQ ID NO: 81454 - RNA, 1410 nt, Artificial Sequence; identical to SEQ ID NO: 80762
  derived and/or modified CDS sequence (opt1) from neuraminidase__InfluenzaA__ACV70707

SEQ ID NO: 81455 - RNA, 1410 nt, Artificial Sequence; identical to SEQ ID NO: 80762
  derived and/or modified CDS sequence (opt1) from neuraminidase__InfluenzaA__ACV70717

SEQ ID NO: 81456 - RNA, 1410 nt, Artificial Sequence; identical to SEQ ID NO: 80762
  derived and/or modified CDS sequence (opt1) from neuraminidase__InfluenzaA__ACV70727

SEQ ID NO: 81457 - RNA, 1410 nt, Artificial Sequence; identical to SEQ ID NO: 80762
  derived and/or modified CDS sequence (opt1) from neuraminidase__InfluenzaA__ACV70737

SEQ ID NO: 81458 - RNA, 1410 nt, Artificial Sequence; identical to SEQ ID NO: 80762
  derived and/or modified CDS sequence (opt1) from neuraminidase__InfluenzaA__ACV70757

SEQ ID NO: 81459 - RNA, 1410 nt, Artificial Sequence; identical to SEQ ID NO: 80762
  derived and/or modified CDS sequence (opt1) from neuraminidase__InfluenzaA__ACV70767

SEQ ID NO: 81460 - RNA, 1410 nt, Artificial Sequence; identical to SEQ ID NO: 80762
  derived and/or modified CDS sequence (opt1) from neuraminidase__InfluenzaA__ACV70777

SEQ ID NO: 81461 - RNA, 1410 nt, Artificial Sequence; identical to SEQ ID NO: 80762
  derived and/or modified CDS sequence (opt1) from neuraminidase__InfluenzaA__ACV70787

SEQ ID NO: 81462 - RNA, 1410 nt, Artificial Sequence; identical to SEQ ID NO: 80762
  derived and/or modified CDS sequence (opt1) from neuraminidase__InfluenzaA__ACV70797

SEQ ID NO: 81463 - RNA, 1410 nt, Artificial Sequence; identical to SEQ ID NO: 80762
  derived and/or modified CDS sequence (opt1) from neuraminidase__InfluenzaA__ACV70807

SEQ ID NO: 81464 - RNA, 1410 nt, Artificial Sequence; identical to SEQ ID NO: 80762
  derived and/or modified CDS sequence (opt1) from neuraminidase__InfluenzaA__ACV70817

SEQ ID NO: 81465 - RNA, 1410 nt, Artificial Sequence; identical to SEQ ID NO: 80752
  derived and/or modified CDS sequence (opt1) from neuraminidase__InfluenzaA__ACV70827

SEQ ID NO: 81466 - RNA, 1410 nt, Artificial Sequence; identical to SEQ ID NO: 80762
  derived and/or modified CDS sequence (opt1) from neuraminidase__InfluenzaA__ACV70837

SEQ ID NO: 81467 - RNA, 1410 nt, Artificial Sequence
  derived and/or modified CDS sequence (opt1) from neuraminidase__InfluenzaA__ACV70847
augaaccccaaccagaagaucaucaccaucggcagcgugugcaugaccaucgggauggccaaccugauccuccagaucggcaacaucaucuccaucuggaucagccacuccauccagcuggggaaccagaaccagaucgagacgugcaaccagagcgucaucaccuacgagaacaacaccugggugaaccagaccuacgugaacaucuccaacacgaacuucgccgcgggccagagcgucguguccgugaagcuggccgggaacagcucccucugcccggucagcggcugggccaucuacuccaaggacaacagcauccgcaucggcuccaagggggacguguucgugauccgggagcccuucaugagcugcagcccccuggagugccgcaccuucuuccugacccagggcgcccuccugaacgacaagcacuccaacgggaccaucaaggaccggucccccuaccgcacgcugaugagcugcccgaucggcgagguccccucccccuacaacagccgguucgagagcguggccugguccgcgagcgccugccacgacgggaucaacuggcucaccaucggcaucuccggccccgacaacggggccguggccguccugaaguacaacggcaucaucaccgacaccaucaagagcuggcgcaacaacauccugcggacgcaggaguccgagugcgcgugcgugaacgggagcugcuucaccgugaugaccgacggcccguccgacggccaggccagcuacaagaucuuccgcaucgagaaggggaagaucgucaaguccguggagaugaacgcccccaacuaccacuacgaggagugcagcugcuaccccgacuccagcgagaucacgugcgugugccgggacaacuggcacggcuccaaccgccccugggucagcuucaaccagaaccucgaguaccagaucggguacaucugcuccggcaucuucggggacaacccgcggcccaacgacaagaccggcagcugcggccccguguccagcaacggggccaacggcgugaagggguucuccuucaaguacggcaacggggucuggaucggccgcaccaagagcaucagcucccggaacggcuucgagaugaucugggaccccaacggguggaccggcaccgacaacaacuucagcaucaagcaggacaucguggggaucaacgagugguccggcuacagcggguccuucgugcagcacccggagcugacgggccuggacugcauccgccccugcuucugggucgagcucauccggggccgccccaaggagaacaccaucuggaccagcggguccagcaucuccuucugcggcgugaacagcgacaccgucgggugguccuggcccgacggcgccgagcugccguucacgaucgacaaguga

SEQ ID NO: 81468 - RNA, 1410 nt, Artificial Sequence; identical to SEQ ID NO: 80762
  derived and/or modified CDS sequence (opt1) from neuraminidase__InfluenzaA__ACV70867

SEQ ID NO: 81469 - RNA, 1410 nt, Artificial Sequence; identical to SEQ ID NO: 80762
  derived and/or modified CDS sequence (opt1) from neuraminidase__InfluenzaA__ACV70877

SEQ ID NO: 81470 - RNA, 1410 nt, Artificial Sequence
  derived and/or modified CDS sequence (opt1) from neuraminidase__InfluenzaA__ACV70887
augaaccccaaccagaagaucaucaccaucggcagcgugugcaugaccaucgggauggccaaccugauccuccagaucggcaacaucaucuccaucuggaucagccacuccauccagcuggggaaccagaaccagaucgagacgugcaaccagagcgucaucaccuacgagaacaacaccugggugaaccagaccuacgugaacaucuccaacacgaacuucgccgcgggccagagcauggucuccgugaagcuggccgggaacagcucccucugcccggugagcggcugggccaucuacuccaaggacaacagcguccgcaucggcuccaagggggacguguucgugauccgggagcccuucaucagcugcagcccccuggagugccgcaccuucuuccugacccagggcgcccuccugaacgacaagcacuccaacgggaccaucaaggaccggucccccuaccgcacgcugaugagcugcccgaucggcgagguccccucccccuacaacagccgguucgagagcguggccugguccgcgagcgccugccacgacgggaucaacuggcucaccaucggcaucuccggccccgacaacggggccguggccguccugaaguacaacggcaucaucaccgacaccaucaagagcuggcgcaacaacauccugcggacgcaggaguccgagugcgcgugcgugaacgggagcugcuucaccgugaugaccgacggcccguccaacggccaggccagcuacaagaucuuccgcaucgagaaggggaagaucgucaaguccguggagaugaacgcccccaacuaccacuacgaggagugcagcugcuaccccgacuccagcgagaucacgugcgugugccgggacaacuggcacggcuccaaccgccccugggucagcuucaaccagaaccucgaguaccagaucggguacaucugcuccggcaucuucggggacaacccgcggcccaacgacaagaccggcagcugcggccccguguccagcaacggggccaacggcgugaagggguucuccuucaaguacggcaacggggucuggaucggccgcaccaagagcaucagcucccggaacggcuucgagaugaucugggaccccaacggguggaccggcaccgacaacaacuucagcaucaagcaggacaucguggggaucaacgagugguccggcuacagcggguccuucgugcagcacccggagcugacgggccuggacugcauccgccccugcuucugggucgagcucauccggggccgccccaaggagaacaccaucuggaccagcggguccagcaucuccuucugcggcgugaacagcgacaccgucgggugguccuggcccgacggcgccgagcugccguucacgaucgacaaguga

SEQ ID NO: 81471 - RNA, 1410 nt, Artificial Sequence; identical to SEQ ID NO: 80762
  derived and/or modified CDS sequence (opt1) from neuraminidase__InfluenzaA__ACV70897

SEQ ID NO: 81472 - RNA, 1410 nt, Artificial Sequence; identical to SEQ ID NO: 80762
  derived and/or modified CDS sequence (opt1) from neuraminidase__InfluenzaA__ACV70907

SEQ ID NO: 81473 - RNA, 1410 nt, Artificial Sequence; identical to SEQ ID NO: 80762
  derived and/or modified CDS sequence (opt1) from neuraminidase__InfluenzaA__ACV70917

SEQ ID NO: 81474 - RNA, 1410 nt, Artificial Sequence; identical to SEQ ID NO: 80752
  derived and/or modified CDS sequence (opt1) from neuraminidase__InfluenzaA__ACV70927

SEQ ID NO: 81475 - RNA, 1410 nt, Artificial Sequence; identical to SEQ ID NO: 80762
  derived and/or modified CDS sequence (opt1) from neuraminidase__InfluenzaA__ACV70937

SEQ ID NO: 81476 - RNA, 1410 nt, Artificial Sequence; identical to SEQ ID NO: 80762
  derived and/or modified CDS sequence (opt1) from neuraminidase__InfluenzaA__ACV70947

SEQ ID NO: 81477 - RNA, 1410 nt, Artificial Sequence; identical to SEQ ID NO: 80762
  derived and/or modified CDS sequence (opt1) from neuraminidase__InfluenzaA__ACV70957

SEQ ID NO: 81478 - RNA, 1410 nt, Artificial Sequence; identical to SEQ ID NO: 80762
  derived and/or modified CDS sequence (opt1) from neuraminidase__InfluenzaA__ACV70967

SEQ ID NO: 81479 - RNA, 1410 nt, Artificial Sequence; identical to SEQ ID NO: 80762
  derived and/or modified CDS sequence (opt1) from neuraminidase__InfluenzaA__ACV70977

SEQ ID NO: 81480 - RNA, 1410 nt, Artificial Sequence; identical to SEQ ID NO: 80762
  derived and/or modified CDS sequence (opt1) from neuraminidase__InfluenzaA__ACV70987

SEQ ID NO: 81481 - RNA, 1410 nt, Artificial Sequence; identical to SEQ ID NO: 80762
  derived and/or modified CDS sequence (opt1) from neuraminidase__InfluenzaA__ACV71007

SEQ ID NO: 81482 - RNA, 1410 nt, Artificial Sequence; identical to SEQ ID NO: 80623
  derived and/or modified CDS sequence (opt1) from neuraminidase__InfluenzaA__ACV82218

SEQ ID NO: 81483 - RNA, 1410 nt, Artificial Sequence; identical to SEQ ID NO: 80623
  derived and/or modified CDS sequence (opt1) from neuraminidase__InfluenzaA__ACV82219

SEQ ID NO: 81484 - RNA, 1410 nt, Artificial Sequence
  derived and/or modified CDS sequence (opt1) from neuraminidase__InfluenzaA__ACV82220
augaaccccaaccagaagaucaucaccaucggcagcgugucccugaccaucagcacgaucugcuucuucaugcagcucgccauccugaucaccaccgucacccugcacuucaagcaguacgaguucaacuccccgcccaacaaccaggugaugcucugcgagcccacgaucaucgagcgcaacaucaccgagaucguguaccugaccaacaccacgaucgagaaggagaucugccccaagcuggccgaguaccggaacuggagcaagccgcagugcgacaucaccggguucgcgcccuucuccaaggacaacagcauccgccucuccgccggcggggacaucugggucacccgggagcccuacgugagcugcgaccccgacaagugcuaccaguucgcccugggccaggggaccacgcugaacaacgugcacuccaacaacaccguccgcgaccggaccccguaccgcacccuccugaugaacgagcugggcgugcccuuccaccucggcacgaagcaggucugcaucgccuggagcuccuacagcugccacgacgggaaggccuggcugcacgugugcaucaccggcgacgacaagaacgcgaccgccuccuucaucuacaacgggcggcugguggacagcguggucuccuggagcaaggagauccuccgcacccaggaguccgagugcgugugcaucaacggcacgugcaccguggucaugaccgacgggagcgccuccggcaaggccgacaccaagauccuguucaucgaggagggcaagaucgugcacacgagcacccugagcggguccgcgcagcacguggaggagugcagcugcuacccccgguaccccggcguccgcugcgugugccgggacaacuggaagggguccaaccgcccgaucguggacaucaacaucaaggaccacagcaucgucuccagcuacgugugcuccggccucgugggcgacacgccccggaagaacgacagcuccagcuccagccacugccuggaccccaacaacgaggagggcgggcacggggucaagggcugggccuucgacgacgggaacgacguguggaugggccgcaccaucuccgagaagucccggcugggcuacgagaccuucaaggucaucgagggguggagcaaccccaagagcaagcuccagaucaaccgccaggugaucguggaccggggcaaccgcuccggguacagcggcaucuucuccgucgagggcaagagcugcaucaaccggugcuucuacguggagcugauccgcgggcggaaggagaagaccgaggugcuguggaccagcaacuccaucgucguguucugcggcaccagcgggacguacggcaccggguccuggccggacggcgccgacaucaaccucaugcccaucuga

SEQ ID NO: 81485 - RNA, 1413 nt, Artificial Sequence
  derived and/or modified CDS sequence (opt1) from neuraminidase__InfluenzaA__ACV82221
augaaccccaaccagaagaucaucaccaucggcagcaucuccaucgccaucgggaucaucagccugaugcuccagaucggcaacaucaucuccaucugggccagccacuccauccagaccgggagccagaacaacacgggcaucugcaaccagcgcaucaucaccuacgagaacuccaccugggugaaccacaccuacgucaacaucaacaacacgaacgugguggcgggggaggacaagaccagcgucacccuggccggcaacuccagccugugcuccaucagcggcugggccaucuacaccaaggacaacuccauccggaucgggagcaagggcgacguguucgugauccgcgagccguucaucuccugcagccaccucgagugccggacguucuuccugacccagggggcccugcucaacgacaagcacuccaacggcaccgucaaggaccgcagccccuaccgggcccugauguccugcccccugggggaggcgcccagcccguacaacagcaaguucgaguccguggccuggagcgccuccgccugccacgacggcaugggcuggcucaccaucgggaucagcggccccgacaacggggcgguggccguccugaaguacaacggcaucaucacgggcaccaucaaguccuggaagaagcagauccugcgcacccaggagagcgagugcgugugcaugaacggguccugcuucaccaucaugacggacggccccagcaacaaggccgccuccuacaagaucuucaagaucgagaaggggaaggugaccaagagcaucgagcucaacgcccccaacuucuacuacgaggagugcuccugcuacccggacaccggcaucgucaugugcgugugccgggacaacuggcacgggagcaaccgccccuggguguccuucaaccagaaccuggacuaccagaucggcuacaucugcagcggcgucuucggggacaacccccggcccgaggacggcgagggguccugcaacccggugaccguggacggcgcgaacggggucaagggcuucagcuacaaguacggcaacgggguguggaucggccgcacgaaguccaaccggcugcgcaagggguucgagaugaucugggaccccaacggcuggaccaacaccgacagcgacuucuccgugaagcaggacgucguggccaucaccgacuggagcggguacagcggcuccuucgugcagcaccccgagcucacgggccuggacugcauccggcccugcuucugggucgagcuggugcgcgggcucccgcgggagaacaccaccaucuggaccagcggcuccagcaucuccuucugcggggucaacagcgacacggccaacugguccuggcccgacggcgccgagcugcccuucaccaucgacaaguga

SEQ ID NO: 81486 - RNA, 1410 nt, Artificial Sequence; identical to SEQ ID NO: 80762
  derived and/or modified CDS sequence (opt1) from neuraminidase__InfluenzaA__ACV88402

SEQ ID NO: 81487 - RNA, 1410 nt, Artificial Sequence; identical to SEQ ID NO: 80762
  derived and/or modified CDS sequence (opt1) from neuraminidase__InfluenzaA__ACV88412

SEQ ID NO: 81488 - RNA, 1410 nt, Artificial Sequence; identical to SEQ ID NO: 80752
  derived and/or modified CDS sequence (opt1) from neuraminidase__InfluenzaA__ACV88422

SEQ ID NO: 81489 - RNA, 1365 nt, Artificial Sequence
  derived and/or modified CDS sequence (opt1) from neuraminidase__InfluenzaA__ACV89505
augaaccccaaccagaagaucaucaccaucggcagcaucugccugguggucgggcucaucucccugauccugcagaucggcaacaucaucagcaucuggaucucccacagcauccagaccgggucccagaaccacacgggcaucugcaaccagaacaucaucaccuacaagaacagcaccugggugaaggacaccacguccgugauccucaccgggaacagcucccugugcccgauccgcggcugggccaucuacagcaaggacaacuccauccggaucggcagcaagggggacgucuucgugauccgcgagcccuucaucuccugcagccaccuggagugccggaccuucuuccucacccagggcgcccugcugaacgacaagcacuccagcgggacggugaaggaccgcucccccuaccgggcgcucaugagcugccccgucggcgaggccccgucccccuacaacagccgcuucgagagcguggccugguccgccagcgccugccacgacgggaugggcuggcugaccaucggcaucuccgggcccgacaacggcgcgguggccguccugaaguacaacgggaucaucaccgagaccaucaagagcuggcggaagaagauccuccgcacgcaggaguccgagugcgccugcgugaacggcagcugcuucaccaucaugaccgacggccccuccgacgggcuggccagcuacaagaucuucaagaucgagaagggcaaggugaccaaguccaucgagcugaacgcgccgaacagccacuacgaggagugcuccugcuaccccgacacggggaaggucaugugcgugugccgggacaacuggcacggcagcaaccgccccuggguguccuucgaccagaaccucgacuaccagaucggguacaucugcagcggcgucuucggcgacaacccccggccggaggacgggaccggcuccugcgggcccguguacguggacggcgccaacggggucaagggcuucagcuaccgcuacggcaacgggguguggaucggccggaccaagucccacagcucccgccacggguucgagaugaucugggaccccaacggcuggaccgagacggacagcaaguucagcgugcggcaggacgucguggccaugaccgacugguccggguacagcggcuccuucgugcagcaccccgagcugaccggccuggacugcaugcgcccgugcuucugggucgagcucauccgggggcgccccaaggagggcaccaucuggacgagcgccuccagcaucuccuucugcggggugaacagcgacaccgucgacugguccuggcccgacggcgccgagcugcccuucagcaucgacaaguga

SEQ ID NO: 81490 - RNA, 1410 nt, Artificial Sequence; identical to SEQ ID NO: 80762
  derived and/or modified CDS sequence (opt1) from neuraminidase__InfluenzaA__ACV91673

SEQ ID NO: 81491 - RNA, 1410 nt, Artificial Sequence; identical to SEQ ID NO: 80762
  derived and/or modified CDS sequence (opt1) from neuraminidase__InfluenzaA__ACV91681

SEQ ID NO: 81492 - RNA, 1410 nt, Artificial Sequence
  derived and/or modified CDS sequence (opt1) from neuraminidase__InfluenzaA__ACX31593
augaaccccaaccagaagaucaucaccaucggcagcgugucccugaccaucagcacgaucugcuucuucaugcagaucgccauccucaucaccaccgucacccugcacuucaagcaguacgaguucaacuccccgcccaacaaccaggugcugcucugcgagcccgccaucaucgagcgcaacaucacggagaucguguaccugaccaacaccaccaucgagaaggagaucugccccaagcuggcggaguaccggaacuggagcaagccgcagugcgacaucacgggguucgcccccuucuccaaggacaacagcauccgccucuccgccggcggggacaucugggucacccgggagcccuacgugagcugcgaccccgacaagugcuaccaguucgcccugggccaggggaccacccugaacaacgugcacuccaacaacacgguccgcgaccggaccccguaccgcacccuccugaugaacgagcugggcgugcccuuccaccucggcaccaagcaggucugcaucgccuggagcuccagcuccugccacgacgggaaggcguggcugcacgugugcaucacgggcgacgacaagaacgccaccgccagcuucaucuacaacgggcggcugguggacuccguggucagcugguccaaggagauccuccgcacccaggagagcgagugcgugugcaucaacgggaccugcacgguggucaugaccgacggguccgccagcggcaaggcggacaccaagauccuguucaucgaggagggcaagaucgugcacaccagcacgcuguccgggagcgcccagcacguggaggagugcuccugcuacccccgguaccccggcguccgcugcgugugccgggacaacuggaaggggagcaaccgcccgaucguggacaucaacaucaaggaccacuccaucgucagcuccuacgugugcagcggccucgugggcgacacgccccggaagaacgacuccagcuccagcucccacugccuggaccccaacaacgaggagggcggccacggggucaagggcugggccuucgacgacgggaacgacguguggaugggccgcaccaucagcgagaagucccggcugggcuacgagaccuucaaggucaucgagggguggagcaaccccaaguccaagcuccagaucaaccgccaggugaucguggaccggggcaaccgcagcggguacuccggcaucuucagcgucgagggcaagagcugcaucaaccggugcuucuacguggagcugauccgcgggcggaaggaggagaccgaggugcuguggaccuccaacagcaucgucguguucugcggcaccuccgggaccuacggcacggggagcuggccggacggcgccgacaucaaccucaugcccaucuga

SEQ ID NO: 81493 - RNA, 1410 nt, Artificial Sequence; identical to SEQ ID NO: 80762
  derived and/or modified CDS sequence (opt1) from neuraminidase__InfluenzaA__ACX31901

SEQ ID NO: 81494 - RNA, 1410 nt, Artificial Sequence; identical to SEQ ID NO: 80762
  derived and/or modified CDS sequence (opt1) from neuraminidase__InfluenzaA__ACX31902

SEQ ID NO: 81495 - RNA, 1410 nt, Artificial Sequence; identical to SEQ ID NO: 80762
  derived and/or modified CDS sequence (opt1) from neuraminidase__InfluenzaA__ACX31905

SEQ ID NO: 81496 - RNA, 1410 nt, Artificial Sequence; identical to SEQ ID NO: 80762
  derived and/or modified CDS sequence (opt1) from neuraminidase__InfluenzaA__ACX31906

SEQ ID NO: 81497 - RNA, 1410 nt, Artificial Sequence; identical to SEQ ID NO: 80762
  derived and/or modified CDS sequence (opt1) from neuraminidase__InfluenzaA__ACX31907

SEQ ID NO: 81498 - RNA, 1410 nt, Artificial Sequence; identical to SEQ ID NO: 80762
  derived and/or modified CDS sequence (opt1) from neuraminidase__InfluenzaA__ACX31908

SEQ ID NO: 81499 - RNA, 1410 nt, Artificial Sequence; identical to SEQ ID NO: 80917
  derived and/or modified CDS sequence (opt1) from neuraminidase__InfluenzaA__ACX31909

SEQ ID NO: 81500 - RNA, 1410 nt, Artificial Sequence; identical to SEQ ID NO: 80762
  derived and/or modified CDS sequence (opt1) from neuraminidase__InfluenzaA__ACX31911

SEQ ID NO: 81501 - RNA, 1410 nt, Artificial Sequence; identical to SEQ ID NO: 80762
  derived and/or modified CDS sequence (opt1) from neuraminidase__InfluenzaA__ACX31912

SEQ ID NO: 81502 - RNA, 1410 nt, Artificial Sequence; identical to SEQ ID NO: 80762
  derived and/or modified CDS sequence (opt1) from neuraminidase__InfluenzaA__ACX31913

SEQ ID NO: 81503 - RNA, 1410 nt, Artificial Sequence; identical to SEQ ID NO: 80762
  derived and/or modified CDS sequence (opt1) from neuraminidase__InfluenzaA__ACX31914

SEQ ID NO: 81504 - RNA, 1410 nt, Artificial Sequence; identical to SEQ ID NO: 80762
  derived and/or modified CDS sequence (opt1) from neuraminidase__InfluenzaA__ACX31915

SEQ ID NO: 81505 - RNA, 1410 nt, Artificial Sequence; identical to SEQ ID NO: 80762
  derived and/or modified CDS sequence (opt1) from neuraminidase__InfluenzaA__ACX31916

SEQ ID NO: 81506 - RNA, 1410 nt, Artificial Sequence
  derived and/or modified CDS sequence (opt1) from neuraminidase__InfluenzaA__ACX31917
augaaccccaaccagaagaucaucaccaucggcagcgugugcaugaccaucgggauggccaaccugauccuccagaucggcaacaucaucuccaucuggaucagccacuccauccagcuggggaaccagaaccagaucgagacgugcaaccagagcgucaucaccuacgagaacaacaccugggugaaccagaccuacgugaacaucuccaacacgaacuucgccgcgggccagagcgucguguccgugaagcuggccgggaacagcucccucugcccggucagcggcugggccaucuacuccaaggacaacagcauccgcaucggcuccaagggggacguguucgugauccgggagcccuucaucagcugcagcccccuggagugccgcaccuucuuccugacccagggcgcccuccugaacgacaagcacuccaacgggaccaucacggaccggucccccuaccgcacccugaugagcugcccgaucggcgagguccccucccccuacaacagccgguucgagagcguggccugguccgcgagcgccugccacgacgggaucaacuggcucaccaucggcaucuccggccccgacaacggggccguggccguccugaaguacaacggcaucaucaccgacacgaucaagagcuggcgcaacaacauccugcggacccaggaguccgagugcgcgugcgugaacgggagcugcuucaccgugaugaccgacggcccguccgacggccaggccagcuacaagaucuuccgcaucgagaaggggaagaucgucaaguccguggagaugaacgcccccaacuaccacuacgaggagugcagcugcuaccccgacuccagcgagaucacgugcgugugccgggacaacuggcacggcuccaaccgccccugggucagcuucaaccagaaccucgaguaccagaucggguacaucugcuccggcaucuucggggacaacccgcggcccaacgacaagaccggcagcugcggccccguguccagcaacggggccaacggcgugaagggguucuccuucaaguacggcaacggggucuggaucggccgcaccaagagcaucagcucccggaacggcuucgagaugaucugggaccccaacggguggaccggcacggacaacaacuucagcaucaagcaggacaucguggggaucaacgagugguccggcuacagcggguccuucgugcagcacccggagcugaccggccuggacugcauccgccccugcuucugggucgagcucauccggggccgccccaaggagaacaccaucuggaccagcggguccagcaucuccuucugcggcgugaacagcgacacggucgggugguccuggcccgacggcgccgagcugccguucaccaucgacaaguga

SEQ ID NO: 81507 - RNA, 1410 nt, Artificial Sequence; identical to SEQ ID NO: 80762
  derived and/or modified CDS sequence (opt1) from neuraminidase__InfluenzaA__ACX31918

SEQ ID NO: 81508 - RNA, 1410 nt, Artificial Sequence; identical to SEQ ID NO: 80762
  derived and/or modified CDS sequence (opt1) from neuraminidase__InfluenzaA__ACX31919

SEQ ID NO: 81509 - RNA, 1410 nt, Artificial Sequence; identical to SEQ ID NO: 80762
  derived and/or modified CDS sequence (opt1) from neuraminidase__InfluenzaA__ACX31920

SEQ ID NO: 81510 - RNA, 1410 nt, Artificial Sequence; identical to SEQ ID NO: 81116
  derived and/or modified CDS sequence (opt1) from neuraminidase__InfluenzaA__ACX31922

SEQ ID NO: 81511 - RNA, 1410 nt, Artificial Sequence; identical to SEQ ID NO: 80762
  derived and/or modified CDS sequence (opt1) from neuraminidase__InfluenzaA__ACX31923

SEQ ID NO: 81512 - RNA, 1410 nt, Artificial Sequence; identical to SEQ ID NO: 80752
  derived and/or modified CDS sequence (opt1) from neuraminidase__InfluenzaA__ACX31924

SEQ ID NO: 81513 - RNA, 1410 nt, Artificial Sequence
  derived and/or modified CDS sequence (opt1) from neuraminidase__InfluenzaA__ACX31925
augaaccccaaccagaagaucaucaccaucggcagcgugugcaugaccaucgggauggccaaccugauccuccagaucggcaacaucaucuccaucuggaucagccacuccauccagcuggggaaccagaaccagaucgagacgugcaaccagagcgucaucaccuacgagaacaacaccugggugaaccagaccuacgugaacaucuccaacacgaacuucgccgcgggccagagcgucguguccgugaagcuggccgggaacagcucccucugcccggucagcggcugggccaucuacuccaaggacaacagcauccgcaucggcuccaagggggacguguucgugauccgggagcccuucaucagcugcagcccccuggagugccgcaccuucuuccugacccagggcgcccuccugaacgacaagcacuccaacgggaccaucaaggaccggucccccuaccgcacgcugaugagcugcccgaucggcgagguccccucccccuacaacagccgguucgagagcguggccugguccgcgagcgccugccacgacgggaucaacuggcucaccaucggcaucuccggccccgacaacggggccguggccguccugaaguacaacggcaucaucaccgacaccaucaagagcuggcgcaacaacauccugcggacgcaggaguccgagugcgcgugcgugaacgggagcugcuucacccucaugaccgacggcccguccgacggccaggccagcuacaagaucuuccgcaucgagaaggggaagaucgugaaguccgucgagaugaacgcccccaacuaccacuacgaggagugcagcugcuaccccgacuccagcgagaucacgugcgugugccgggacaacuggcacggcuccaaccgccccugggugagcuucaaccagaaccuggaguaccagaucggguacaucugcuccggcaucuucggggacaacccgcggcccaacgacaagaccggcagcugcggccccgucuccagcaacggggccaacggcgugaagggguucuccuucaaguacggcaacgggguguggaucggccgcaccaagagcaucagcucccggaacggcuucgagaugaucugggaccccaacggguggaccggcaccgacaacaacuucagcaucaagcaggacaucgucgggaucaacgagugguccggcuacagcggguccuucgugcagcacccggagcugacgggccucgacugcauccgccccugcuucuggguggagcugauccggggccgccccaaggagaacaccaucuggaccagcggguccagcaucuccuucugcggcgucaacagcgacaccguggggugguccuggcccgacggcgccgagcugccguucaucaucgacaaguga

SEQ ID NO: 81514 - RNA, 1410 nt, Artificial Sequence; identical to SEQ ID NO: 80762
  derived and/or modified CDS sequence (opt1) from neuraminidase__InfluenzaA__ACX31926

SEQ ID NO: 81515 - RNA, 1410 nt, Artificial Sequence; identical to SEQ ID NO: 80762
  derived and/or modified CDS sequence (opt1) from neuraminidase__InfluenzaA__ACX31927

SEQ ID NO: 81516 - RNA, 1410 nt, Artificial Sequence
  derived and/or modified CDS sequence (opt1) from neuraminidase__InfluenzaA__ACX31928
augaaccccaaccagaagaucaucaccaucggcagcgugugcaugaccaucgggauggccaaccugauccuccagaucggcaacaucaucuccaucuggaucagccacuccauccagcuggggaaccagaaccagaucgagacgugcaaccagagcgucaucaccuacgagaacaacaccugggugaaccagaccuacgugaacaucuccaacacgaacuucgccgcgggccagagcgucguguccgugaagcuggccgggaacagcucccucugcccggucagcggcugggccaucuacuccaaggacaacagcauccgcaucggcuccaagggggacguguucgugauccgggagcccuucaucagcugcagcccccuggagugccgcaccuucuuccugacccagggcgcccuccugaacgacaagcacuccaacgggaccaucaaggaccggucccccuaccgcacgcugaugagcugcccgaucggcgagguccccucccccuacaacagccgguucgagagcguggccugguccgcgagcgccugccacgacgggaucaacuggcucaccaucggcaucuccggccccgacaacggggccguggccguccugaaguacaacggcaucaucaccgacaccaucaagagcuggcgcaacaacauccugcggacgcaggaguccgagugcgcgugcgugaacgggagcugcuucaccgugaugaccgacggcccguccgacggccaggccagcuacaagaucuuccgcaucgagaaggggaagaucgucaaguccguggagaugaacgcccccaacuaccacuacgaggagugcagcugcuaccccgacuccagcgagaucacgugcgugugccgggacaacuggcacggcuccaaccgccccugggucagcuucaaccagaaccucgaguaccagaucggguacaucugcuccggcaucuucggggacaacccgcggcccaacgacaagaccggcagcugcggccccguguccagcaacggggagaacggcgugaagggguucuccuucaaguacggcaacggggucuggaucggccgcaccaagagcaucagcucccggaacggcuucgagaugaucugggaccccaacggguggaccggcaccgacaacaacuucagcaucaagcaggacaucguggggaucaacgagugguccggcuacagcggguccuucgugcagcacccggagcugacgggccuggacugcauccgccccugcuucugggucgagcucauccggggccgccccaaggagaacaccaucuggaccagcggguccagcaucuccuucugcggcgugaacggggacaccgucggcuggagcuggcccgacggcgccgagcugccguucacgaucgacaaguga

SEQ ID NO: 81517 - RNA, 1410 nt, Artificial Sequence; identical to SEQ ID NO: 80792
  derived and/or modified CDS sequence (opt1) from neuraminidase__InfluenzaA__ACX31929

SEQ ID NO: 81518 - RNA, 1410 nt, Artificial Sequence; identical to SEQ ID NO: 81116
  derived and/or modified CDS sequence (opt1) from neuraminidase__InfluenzaA__ACX31930

SEQ ID NO: 81519 - RNA, 1410 nt, Artificial Sequence; identical to SEQ ID NO: 80762
  derived and/or modified CDS sequence (opt1) from neuraminidase__InfluenzaA__ACX31931

SEQ ID NO: 81520 - RNA, 1410 nt, Artificial Sequence; identical to SEQ ID NO: 80762
  derived and/or modified CDS sequence (opt1) from neuraminidase__InfluenzaA__ACX31932

SEQ ID NO: 81521 - RNA, 1410 nt, Artificial Sequence; identical to SEQ ID NO: 80762
  derived and/or modified CDS sequence (opt1) from neuraminidase__InfluenzaA__ACX35250

SEQ ID NO: 81522 - RNA, 1410 nt, Artificial Sequence; identical to SEQ ID NO: 80762
  derived and/or modified CDS sequence (opt1) from neuraminidase__InfluenzaA__ACX35260

SEQ ID NO: 81523 - RNA, 1410 nt, Artificial Sequence; identical to SEQ ID NO: 80762
  derived and/or modified CDS sequence (opt1) from neuraminidase__InfluenzaA__ACX35270

SEQ ID NO: 81524 - RNA, 1410 nt, Artificial Sequence
  derived and/or modified CDS sequence (opt1) from neuraminidase__InfluenzaA__ACX35280
augaaccccaaccagaagaucaucaccaucggcagcgugugcaugaccaucgggauggccaaccugauccuccagaucggcaacaucaucuccaucuggaucagccacuccauccagcuggggaaccagaaccagaucgagacgugcaaccagagcgucaucaccuacgagaacaacaccugggugaaccagaccuacgugaacaucuccaacacgaacuucgccgcgggccagagcgucguguccgugaagcuggccgggaacagcucccucugcccggucagcggcugggccaucuacuccaaggacaacagcauccgcaucggcuccaagggggacguguucgugauccgggagcccuucaucagcugcagcccccuggagugccgcaccuucuuccugacccagggcgcccuccugaacgacaagcacuccaacgggaccaucaaggaccggucccccuaccgcacgcugaugagcugcccgaucggcgagguccccucccccuacaacagccgguucgagagcguggccugguccgcgagcgccugccacgacgggaucaacuggcucaccaucggcaucuccggccccgacaacggggccguggccguccugaaguacaacggcaucaucaccgacaccaucaagagcuggcgcaacaacauccugcggacgcaggaguccgagugcgcgugcgugaacgggagcugcuucaccgugaugaccgacggcccguccgacggccaggccagcuacaagaucuuccgcaucgagaaggggaagaucgucaaguccguggacaugaacgcccccaacuaccacuacgaggagugcagcugcuaccccgacuccagcgagaucacgugcgugugccgggacaacuggcacggcuccaaccgccccugggucagcuucaaccagaaccucgaguaccagaucggguacaucugcuccggcaucuucggggacaacccgcggcccaacgacaagaccggcagcugcggccccguguccagcaacggggccaacggcgugaagggguucuccuucaaguacggcaacggggucuggaucggccgcaccaagagcaucagcucccggaacggcuucgagaugaucugggaccccaacggguggaccggcaccgacaacaacuucagcaucaagcaggacaucguggggaucaacgagugguccggcuacagcggguccuucgugcagcacccggagcugacgggccuggacugcauccgccccugcuucugggucgagcucauccggggccgccccaaggagaacaccaucuggaccagcggguccagcaucuccuucugcggcgugaacagcgacaccgucgggugguccuggcccgacggcgccgagcugccguucacgaucgacaaguga

SEQ ID NO: 81525 - RNA, 1410 nt, Artificial Sequence; identical to SEQ ID NO: 80762
  derived and/or modified CDS sequence (opt1) from neuraminidase__InfluenzaA__ACX35290

SEQ ID NO: 81526 - RNA, 1410 nt, Artificial Sequence; identical to SEQ ID NO: 80762
  derived and/or modified CDS sequence (opt1) from neuraminidase__InfluenzaA__ACX35300

SEQ ID NO: 81527 - RNA, 1410 nt, Artificial Sequence
  derived and/or modified CDS sequence (opt1) from neuraminidase__InfluenzaA__ACX35310
augaaccccaaccagaagaucaucaccaucggcagcgugugcaugaccaucgggauggccaaccugauccuccagaucggcaacaucaucuccaucuggaucagccacuccauccagcuggggaaccagaaccagaucggcacgugcaaccagagcgucaucaccuacgagaacaacaccugggugaaccagaccuacgugaacaucuccaacacgaacuucgccgcggggcagagcgucguguccgugaagcuggccggcaacagcucccucugcccggucagcggcugggccaucuacuccaaggacaacagcauccgcaucggguccaagggcgacguguucgugauccgggagcccuucaucagcugcagcccccuggagugccgcaccuucuuccugacccagggggcccuccugaacgacaagcacuccaacggcaccaucaaggaccggucccccuaccgcacgcugaugagcugcccgaucggggagguccccucccccuacaacagccgguucgagagcguggccugguccgcgagcgccugccacgacggcaucaacuggcucaccaucggcaucuccgggcccgacaacggcgccguggccguccugaaguacaacgggaucaucaccgacaccaucaagagcuggcgcaacaacauccugcggacgcaggaguccgagugcgcgugcgugaacggcagcugcuucaccgugaugaccgacggcccguccgacgggcaggccagcuacaagaucuuccgcaucgagaagggcaagaucgucaaguccguggagaugaacgcccccaacuaccacuacgaggagugcagcugcuaccccgacuccagcgagaucacgugcgugugccgggacaacuggcacggguccaaccgccccugggucagcuucaaccagaaccucgaguaccagaucggcuacaucugcuccgggaucuucggcgacaacccgcggcccaacgacaagaccggcagcugcgggcccguguccagcaacggcgccaacggggugaagggcuucuccuucaaguacgggaacggcgucuggaucggccgcaccaagagcaucagcucccggaacggguucgagaugaucugggaccccaacggcuggaccgggaccgacaacaacuucagcaucaagcaggacaucgugggcaucaacgagugguccggguacagcggcuccuucgugcagcacccggagcugacgggccuggacugcauccgccccugcuucugggucgagcucauccgggggcgccccaaggagaacaccaucuggaccagcggcuccagcaucuccuucugcggggugaacagcgacaccgucggcugguccuggcccgacggcgccgagcugccguucacgaucgacaaguga

SEQ ID NO: 81528 - RNA, 1410 nt, Artificial Sequence; identical to SEQ ID NO: 80762
  derived and/or modified CDS sequence (opt1) from neuraminidase__InfluenzaA__ACX35320

SEQ ID NO: 81529 - RNA, 1410 nt, Artificial Sequence
  derived and/or modified CDS sequence (opt1) from neuraminidase__InfluenzaA__ACX35330
augaaccccaaccagaagaucaucaccaucggcagcgugugcaucaccaucgggauggccaaccugauccuccagaucggcaacaucaucuccaucuggaucagccacuccauccagcuggggaaccagaaccagaucgagacgugcaaccagagcgucaucaccuacgagaacaacaccugggugaaccagaccuacgugaacaucuccaacacgaacuucgccgcgggccagagcgucguguccgugaagcuggccgggaacagcucccucugcccggucagcggcugggccaucuacuccaaggacaacagcauccgcaucggcuccaagggggacguguucgugauccgggagcccuucaucagcugcagcccccuggagugccgcaccuucuuccugacccagggcgcccuccugaacgacaagcacuccaacgggaccaucaaggaccggucccccuaccgcacgcugaugagcugcccgaucggcgagguccccucccccuacaacagccgguucgagagcguggccugguccgcgagcgccugccacgacgggaucaacuggcucaccaucggcaucuccggccccgacaacggggccguggccguccugaaguacaacggcaucaucaccgacaccaucaagagcuggcgcaacaacauccugcggacgcaggaguccgagugcgcgugcgugaacgggagcugcuucaccgugaugaccgacggcccguccgacggccaggccagcuacaagaucuuccgcaucgagaaggggaagaucgucaaguccguggagaugaacgcccccaacuaccacuacgaggagugcagcugcuaccccgacuccagcgagaucacgugcgugugccgggacaacuggcacggcuccaaccgccccugggucagcuucaaccagaaccucgaguaccagaucggguacaucugcuccggcaucuucggggacaacccgcggcccaacgacaagaccggcagcugcggccccguguccagcaacggggccaacggcgugaagggguucuccuucaaguacggcaacggggucuggaucggccgcaccaagagcaucagcucccggaacggcuucgagaugaucugggaccccaacggguggaccggcaccgacaacaacuucagcaucaagcaggacaucguggggaucaacgagugguccggcuacagcggguccuucgugcagcacccggagcugacgggccuggacugcauccgccccugcuucugggucgagcucauccggggccgccccaaggagaacaccaucuggaccagcggguccagcaucuccuucugcggcgugaacagcgacaccgucgggugguccuggcccgacggcgccgagcugccguucacgaucgacaaguga

SEQ ID NO: 81530 - RNA, 1410 nt, Artificial Sequence; identical to SEQ ID NO: 80762
  derived and/or modified CDS sequence (opt1) from neuraminidase__InfluenzaA__ACX48479

SEQ ID NO: 81531 - RNA, 1410 nt, Artificial Sequence; identical to SEQ ID NO: 80762
  derived and/or modified CDS sequence (opt1) from neuraminidase__InfluenzaA__ACX48481

SEQ ID NO: 81532 - RNA, 1410 nt, Artificial Sequence; identical to SEQ ID NO: 80762
  derived and/or modified CDS sequence (opt1) from neuraminidase__InfluenzaA__ACX55836

SEQ ID NO: 81533 - RNA, 1410 nt, Artificial Sequence
  derived and/or modified CDS sequence (opt1) from neuraminidase__InfluenzaA__ACX56269
augaaccccaagcagaagaucaucaccaucggcagcgugugcaugaccaucgggauggccaaccugauccuccagaucggcaacaucaucuccaucuggaucagccacuccauccagcuggggaaccagaaccagaucgagacgugcaaccagagcgucaucaccuacgagaacaacaccugggugaaccagaccuacgugaacaucuccaacacgaacuucgccgcgggccagagcgucguguccgugaagcuggccgggaacagcucccucugcccggucagcggcugggccaucuacuccaaggacaacagcauccgcaucggcuccaagggggacguguucgugauccgggagcccuucaucagcugcagcccccuggagugccgcaccuucuuccugacccagggcgcccuccugaacgacaagcacuccaacgggaccaucaaggaccggucccccuaccgcacgcugaugagcugcccgaucggcgagguccccucccccuacaacagccgguucgagagcguggccugguccgcgagcgccugccacgacgggaucaacuggcucaccaucggcaucuccggccccgacaacggggccguggccguccugaaguacaacggcaucaucaccgacaccaucaagagcuggcgcaacaacauccugcggacgcaggaguccgagugcgcgugcgugaacgggagcugcuucaccgugaugaccgacggcccguccgacggccaggccagcuacaagaucuuccgcaucgagaaggggaagaucgucaaguccguggagaugaacgcccccaacuaccacuacgaggagugcagcugcuaccccgacuccagcgagaucacgugcgugugccgggacaacuggcacggcuccaaccgccccugggucagcuucaaccagaaccucgaguaccagaucggguacaucugcuccggcaucuucggggacaacccgcggcccaacgacaagaccggcagcugcggccccguguccagcaacggggccaacggcgugaagggguucuccuucaaguacggcaacggggucuggaucggccgcaccaagagcaucagcucccggaacggcuucgagaugaucugggaccccaacggguggaccggcaccgacaacaacuucagcaucaagcaggacaucguggggaucaacgagugguccggcuacagcggguccuucgugcagcacccggagcugacgggccuggacugcauccgccccugcuucugggucgagcucauccggggccgccccaaggagaacaccaucuggaccagcggguccagcaucuccuucugcggcgugaacagcgacaccgucgggugguccuggcccgacggcgccgagcugccguucacgaucgacaaguga

SEQ ID NO: 81534 - RNA, 1410 nt, Artificial Sequence
  derived and/or modified CDS sequence (opt1) from neuraminidase__InfluenzaA__ACX56270
augaaccccaagcagaagaucaucaccaucggcagcgugugcaugaccaucgggauggccaaccugauccuccagaucggcaacaucaucuccaucuggaucagccacuccauccagcuggggaaccagaaccagaucgagacgugcaaccagagcgucaucaccuacgagaacaacaccugggugaaccagaccuacgugaacaucuccaacacgaacuucgccgcgggccagagcgucguguccgugaagcuggccgggaacagcucccucugcccggucagcggcugggccaucuacuccaaggacaacagcauccgcaucggcuccaagggggacguguucgugauccgggagcccuucaucagcugcagcccccuggagugccgcaccuucuuccugacccagggcgcccuccugaacgacaagcacuccaacgggaccaucaaggaccggucccccuaccgcacgcugaugagcugcccgaucggcgagguccccucccccuacaacagccgguucgagagcguggccugguccgcgagcgccugccacgacgggaucaacuggcucaccaucggcaucuccggccccgacaacggggccguggccguccugaaguacaacggcaucaucaccgacaccaucaagagcuggcgcaacaacauccugcggacgcaggaguccgagugcgcgugcgugaacgggagcugcuucaccgugaugaccgacggcccguccgacggccaggccagcuacaagaucuuccgcaucgagaaggggaagaucgucaaguccguggagaugaacgcccccaacuaccacuacgaggagugcagcugcuaccccgacuccagcgagaucacgugcgugugccgggacaacuggcacggcuccaaccgccccugggucagcuucaaccagaaccucgaguaccagaucggguacaucugcuccggcaucuucggggacaacccgcggcccaacgacaagaccggcagcugcggccccguguccagcaacggggccaacggcgugaagggguucuccuucaaguacggcaacggggucuggaucggccgcaccaagagcaucagcucccggaacggcuucgagaugaucugggaccccaacggguggaccggcaccgacaacaacuucagcaucaagcaggacaucguggggaucaacgagugguccggcuacagcggguccuucgugcagcacccggagcugacgggccuggacugcauccgccccugcuucugggucgagcucauccggggccgccccaaggagaacaccaucuggaccagcggguccagcaucuccuucugcggcgugaacagcgacuccgucagcugguccuggcccgacggggccgagcugccguucaccaucgacaaguga

SEQ ID NO: 81535 - RNA, 1410 nt, Artificial Sequence
  derived and/or modified CDS sequence (opt1) from neuraminidase__InfluenzaA__ACX56271
augaaccccaagcagaagaucaucaccaucggcagcgugugcaugaccaucgggauggccaaccugauccuccagaucggcaacaucaucuccaucuggaucagccacuccauccagcuggggaaccagaaccagaucgagacgugcaaccagagcgucaucaccuacgagaacaacaccugggugaaccagaccuacgugaacaucuccaacacgaaccuggccgcgggccagagcgucggguccgugaagcucgccggcaacagcucccugugcccggugagcggcugggccaucuacuccaaggacaacagcauccgcaucggguccaagggcgacgucuucgugauccgggagcccuucaucagcugcagcccccuggagugccgcaccuucuuccucacccagggggcccugcugaacgacaagcacuccaacggcaccaucaaggaccggucccccuaccgcacgcucaugagcugcccgaucggggaggugcccucccccuacaacagccgguucgagagcgucgccugguccgcgagcgccugccacgacggcaucaacuggcugaccaucggcaucuccgggcccgacaacggcgccguggccgugcugaaguacaacgggaucaucaccgacaccaucaagagcuggcgcaacaacauccuccggacgcaggaguccgagugcgcgugcgucaacggcagcugcuucaccgugaugaccgacggcccguccgacgggcaggccagcuacaagaucuuccgcaucgagaagggcaagaucgugaaguccgucgagaugaacgcccccaacuaccacuacgaggagugcagcugcuaccccgacuccagcgagaucacgugcgugugccgggacaacuggcacggguccaaccgccccugggugagcuucaaccagaaccuggaguaccagaucggcuacaucugcuccgggaucuucggcgacaacccgcggcccaacgacaagaccggcagcugcgggcccgucuccagcaacggcgccaacggggugaagggcuucuccuucaaguacgggaacggcguguggaucggccgcaccaagagcaucagcucccggaacggguucgagaugaucugggaccccaacggcuggaccgggaccgacaacaacuucagcaucaagcaggacaucgucggcaucaacgagugguccggguacagcggcuccuucgugcagcacccggagcugacgggccucgacugcauccgccccugcuucuggguggagcugauccgggggcgccccaaggagaacaccaucuggaccagcggcuccagcaucuccuucugcggggucaacagcgacaccgugggcugguccuggcccgacggcgccgagcugccguucacgaucgacaaguga

SEQ ID NO: 81536 - RNA, 1410 nt, Artificial Sequence; identical to SEQ ID NO: 80762
  derived and/or modified CDS sequence (opt1) from neuraminidase__InfluenzaA__ACX83579

SEQ ID NO: 81537 - RNA, 1410 nt, Artificial Sequence; identical to SEQ ID NO: 80762
  derived and/or modified CDS sequence (opt1) from neuraminidase__InfluenzaA__ACX85425

SEQ ID NO: 81538 - RNA, 1410 nt, Artificial Sequence; identical to SEQ ID NO: 80762
  derived and/or modified CDS sequence (opt1) from neuraminidase__InfluenzaA__ACX85426

SEQ ID NO: 81539 - RNA, 1410 nt, Artificial Sequence
  derived and/or modified CDS sequence (opt1) from neuraminidase__InfluenzaA__ACY02998
augaaccccaaccagaagaucaucaccaucggcagcgugugcaugaccaucgggauggccaaccugauccuccagaucggcaacaucaucuccaucuggaucagccacuccauccagcuggggaaccagaaccagaucgagacgugcaaccagagcgucaucaccuacgagaacaacaccugggugaaccagaccuacgugaacaucuccaacacgaacuucgccgcgggccagagcgucguguccgugaagcuggccgggaacagcucccucugcccggucagcggcugggccaucuacuccaaggacaacagcauccgcaucggcuccaagggggacguguucgugauccgggagcccuucaucagcugcagcccccuggagugccgcaccuucuuccugacccagggcgcccuccugaacgacaagcacuccaacgggaccaucaaggaccggucccccuaccgcacgcugaugagcugcccgaucggcgagguccccucccccuacaacagccgguucgagagcguggccugguccgcgagcgccugccacgacgggaucaacuggcucaccaucggcaucuccggccccgacaacggggccguggccguccugaaguacaacggcaucaucaccgacaccaucaagagcuggcgcaacaacauccugcggacgcaggaguccgagugcgcgugcgugaacgggagcugcuucaccgugaugaccgacggcccguccaacggccaggccagcuacaagaucuuccgcaucgagaaggggaagaucgucaaguccguggagaugaacgcccccaacuaccacuacgaggagugcagcugcuaccccgacuccggcgagaucacgugcgugugccgggacaacuggcacgggagcaaccgccccugggucuccuucaaccagaaccucgaguaccagaucggcuacaucugcagcgggaucuucggcgacaacccgcggcccaacgacaagaccggcuccugcgggcccgugagcuccaacggcgccaacggggugaagggcuucagcuucaaguacgggaacggcgucuggaucggccgcaccaaguccaucagcagccggaacggguucgagaugaucugggaccccaacggcuggaccgggaccgacaacaacuucuccaucaagcaggacaucgugggcaucaacgaguggagcggguacuccggcagcuucgugcagcacccggagcugacgggccuggacugcauccgccccugcuucugggucgagcucauccgggggcgccccaaggagaacaccaucuggaccuccggcagcuccaucagcuucugcggggugaacuccgacaccgucggcuggagcuggcccgacggcgccgagcugccguucacgaucgacaaguga

SEQ ID NO: 81540 - RNA, 1410 nt, Artificial Sequence; identical to SEQ ID NO: 80762
  derived and/or modified CDS sequence (opt1) from neuraminidase__InfluenzaA__ACY03005

SEQ ID NO: 81541 - RNA, 1410 nt, Artificial Sequence; identical to SEQ ID NO: 80762
  derived and/or modified CDS sequence (opt1) from neuraminidase__InfluenzaA__ACY03008

SEQ ID NO: 81542 - RNA, 1410 nt, Artificial Sequence; identical to SEQ ID NO: 80762
  derived and/or modified CDS sequence (opt1) from neuraminidase__InfluenzaA__ACY03011

SEQ ID NO: 81543 - RNA, 1410 nt, Artificial Sequence; identical to SEQ ID NO: 80762
  derived and/or modified CDS sequence (opt1) from neuraminidase__InfluenzaA__ACY03012

SEQ ID NO: 81544 - RNA, 1410 nt, Artificial Sequence; identical to SEQ ID NO: 80762
  derived and/or modified CDS sequence (opt1) from neuraminidase__InfluenzaA__ACY03016

SEQ ID NO: 81545 - RNA, 1410 nt, Artificial Sequence; identical to SEQ ID NO: 80762
  derived and/or modified CDS sequence (opt1) from neuraminidase__InfluenzaA__ACY26194

SEQ ID NO: 81546 - RNA, 1410 nt, Artificial Sequence; identical to SEQ ID NO: 80762
  derived and/or modified CDS sequence (opt1) from neuraminidase__InfluenzaA__ACY26204

SEQ ID NO: 81547 - RNA, 1410 nt, Artificial Sequence; identical to SEQ ID NO: 80762
  derived and/or modified CDS sequence (opt1) from neuraminidase__InfluenzaA__ACY30123

SEQ ID NO: 81548 - RNA, 1410 nt, Artificial Sequence; identical to SEQ ID NO: 80762
  derived and/or modified CDS sequence (opt1) from neuraminidase__InfluenzaA__ACY30124

SEQ ID NO: 81549 - RNA, 1410 nt, Artificial Sequence; identical to SEQ ID NO: 80762
  derived and/or modified CDS sequence (opt1) from neuraminidase__InfluenzaA__ACY30125

SEQ ID NO: 81550 - RNA, 1410 nt, Artificial Sequence; identical to SEQ ID NO: 80762
  derived and/or modified CDS sequence (opt1) from neuraminidase__InfluenzaA__ACY30127

SEQ ID NO: 81551 - RNA, 1410 nt, Artificial Sequence; identical to SEQ ID NO: 80762
  derived and/or modified CDS sequence (opt1) from neuraminidase__InfluenzaA__ACY30128

SEQ ID NO: 81552 - RNA, 1410 nt, Artificial Sequence; identical to SEQ ID NO: 80762
  derived and/or modified CDS sequence (opt1) from neuraminidase__InfluenzaA__ACY46105

SEQ ID NO: 81553 - RNA, 1410 nt, Artificial Sequence; identical to SEQ ID NO: 80762
  derived and/or modified CDS sequence (opt1) from neuraminidase__InfluenzaA__ACY46165

SEQ ID NO: 81554 - RNA, 1410 nt, Artificial Sequence; identical to SEQ ID NO: 80762
  derived and/or modified CDS sequence (opt1) from neuraminidase__InfluenzaA__ACY46175

SEQ ID NO: 81555 - RNA, 1410 nt, Artificial Sequence; identical to SEQ ID NO: 80762
  derived and/or modified CDS sequence (opt1) from neuraminidase__InfluenzaA__ACY46345

SEQ ID NO: 81556 - RNA, 1410 nt, Artificial Sequence; identical to SEQ ID NO: 80762
  derived and/or modified CDS sequence (opt1) from neuraminidase__InfluenzaA__ACY46385

SEQ ID NO: 81557 - RNA, 1410 nt, Artificial Sequence; identical to SEQ ID NO: 80762
  derived and/or modified CDS sequence (opt1) from neuraminidase__InfluenzaA__ACY46485

SEQ ID NO: 81558 - RNA, 1410 nt, Artificial Sequence; identical to SEQ ID NO: 80792
  derived and/or modified CDS sequence (opt1) from neuraminidase__InfluenzaA__ACY77536

SEQ ID NO: 81559 - RNA, 1410 nt, Artificial Sequence; identical to SEQ ID NO: 80752
  derived and/or modified CDS sequence (opt1) from neuraminidase__InfluenzaA__ACY77546

SEQ ID NO: 81560 - RNA, 1410 nt, Artificial Sequence; identical to SEQ ID NO: 80792
  derived and/or modified CDS sequence (opt1) from neuraminidase__InfluenzaA__ACY77565

SEQ ID NO: 81561 - RNA, 1410 nt, Artificial Sequence
  derived and/or modified CDS sequence (opt1) from neuraminidase__InfluenzaA__ACY77575
augaaccccaaccagaagaucaucaccaucggcagcgugugcaugaccaucgggauggccaaccugauccuccagaucggcaacaucaucuccaucuggaucagccacuccauccagcuggggaaccagaaccagaucgagacgugcaaccagagcgucaucaccuacgagaacaacaccugggugaaccagaccuacgugaacaucuccaacacgaacuucgccgcgggccagagcgucguguccgugaagcuggccgggaacagcucccucugcccggucagcggcugggccaucuacuccaaggacaacagcauccgcaucggcuccaagggggacguguucgugauccgggagcccuucaucagcugcagcccccuggagugccgcaccuucuuccugacccagggcgcccuccugaacgacaagcacuccaacgggaccaucaaggaccggucccccuaccgcacgcugaugagcugcccgaucggcgagguccccucccccuacaacagccgguucgagagcguggccugguccgcgagcgccugccacgacgggaucaacuggcucaccaucggcaucuccggccccgacaacggggccguggccguccugaaguacaacggcaucaucaccgacaccaucaagagcuggcgcaacaacauccugcggacgcaggaguccgagugcgcgugcgugaacgggagcugcuucaccgugaugaccgacggcccguccgacggccaggccagcuacaagaucuuccgcaucgagaaggggaagaucgucaaguccguggagaugaacgcccccaacuaccacuacgaggagugcagcugcuaccccgacuccagcgagaucacgugcgugugccgggacaacuggcacggcuccaaccgccccugggucagcuucaaccagaaccucgaguaccagaucggguacaucugcuccggcaucuucggggacaacccgcggcccagcgacaagaccggcuccugcggccccgugagcuccaacggggccaacggcgugaagggguucagcuucaaguacggcaacggggucuggaucggccgcaccaagagcaucuccagccggaacggcuucgagaugaucugggaccccaacggguggaccggcaccgacaacaacuucuccaucaagcaggacaucguggggaucaacgaguggagcggcuacuccgggagcuucgugcagcacccggagcugacgggccuggacugcauccgccccugcuucugggucgagcucauccggggccgccccaaggagaacaccaucuggaccuccgggagcuccaucagcuucugcggcgugaacuccgacaccgucggguggagcuggcccgacggcgccgagcugccguucacgaucgacaaguga

SEQ ID NO: 81562 - RNA, 1410 nt, Artificial Sequence; identical to SEQ ID NO: 80762
  derived and/or modified CDS sequence (opt1) from neuraminidase__InfluenzaA__ACY77585

SEQ ID NO: 81563 - RNA, 1410 nt, Artificial Sequence; identical to SEQ ID NO: 80792
  derived and/or modified CDS sequence (opt1) from neuraminidase__InfluenzaA__ACY77595

SEQ ID NO: 81564 - RNA, 1410 nt, Artificial Sequence; identical to SEQ ID NO: 80792
  derived and/or modified CDS sequence (opt1) from neuraminidase__InfluenzaA__ACY77605

SEQ ID NO: 81565 - RNA, 1410 nt, Artificial Sequence; identical to SEQ ID NO: 80762
  derived and/or modified CDS sequence (opt1) from neuraminidase__InfluenzaA__ACY77625

SEQ ID NO: 81566 - RNA, 1410 nt, Artificial Sequence
  derived and/or modified CDS sequence (opt1) from neuraminidase__InfluenzaA__ACY77655
augaaccccaaccagaagaucaucaccaucggcagcgugugcaugaccaucgggauggccaaccugauccuccagaucggcaacaucaucuccaucuggaucagccacuccauccagcuggggaaccagaaccagaucgagacgugcaaccagagcgucaucaccuacgagaacaacaccugggugaaccagaccuacgugaacaucuccaacacgaacuucgccgcgggccagagcgucguguccgugaagcuggccgggaacagcucccucugcccggucagcggcugggccaucuacuccaaggacaacagcgugcgcaucggcuccaagggggacguguucgucauccgggagcccuucaucagcugcagcccccuggagugccgcaccuucuuccugacccagggcgcccuccugaacgacaagcacuccaacgggaccaucaaggaccggucccccuaccgcacgcugaugagcugcccgaucggcgaggugcccucccccuacaacagccgguucgagagcguggccugguccgcgagcgccugccacgacgggaucaacuggcucaccaucggcaucuccggccccgacaacggggccgucgccgugcugaaguacaacggcaucaucaccgacaccaucaagagcuggcgcaacaacauccugcggacgcaggaguccgagugcgcgugcgugaacgggagcugcuucaccgucaugaccgacggcccguccaacggccaggccagcuacaagaucuuccgcaucgagaaggggaagaucgugaaguccguggagaugaacgcccccaacuaccacuacgaggagugcagcugcuaccccgacuccagcgagaucacgugcgucugccgggacaacuggcacggcuccaaccgccccugggugagcuucaaccagaaccucgaguaccagaucggguacaucugcuccggcaucuucggggacaacccgcggcccaacgacaagaccggcagcugcggccccguguccuucaacggggccaacggcgucaagggguucagcuucaaguacggcaacgggguguggaucggccgcaccaaguccaucagcagccggaacggcuucgagaugaucugggaccccaacggguggaccggcaccgacaacaacuucuccaucaagcaggacaucguggggaucaacgaguggagcggcuacuccgggagcuucguccagcacccggagcugacgggccuggacugcauccgccccugcuucuggguggagcucauccggggccgccccaaggagaacaccaucuggaccuccgggagcuccaucagcuucugcggcgucaacuccgacaccgugggguggagcuggcccgacggcgccgagcugccguucacgaucgacaaguga

SEQ ID NO: 81567 - RNA, 1410 nt, Artificial Sequence; identical to SEQ ID NO: 80762
  derived and/or modified CDS sequence (opt1) from neuraminidase__InfluenzaA__ACY77665

SEQ ID NO: 81568 - RNA, 1410 nt, Artificial Sequence; identical to SEQ ID NO: 80762
  derived and/or modified CDS sequence (opt1) from neuraminidase__InfluenzaA__ACY77675

SEQ ID NO: 81569 - RNA, 1410 nt, Artificial Sequence; identical to SEQ ID NO: 80752
  derived and/or modified CDS sequence (opt1) from neuraminidase__InfluenzaA__ACY77685

SEQ ID NO: 81570 - RNA, 1410 nt, Artificial Sequence; identical to SEQ ID NO: 80752
  derived and/or modified CDS sequence (opt1) from neuraminidase__InfluenzaA__ACY77695

SEQ ID NO: 81571 - RNA, 1410 nt, Artificial Sequence; identical to SEQ ID NO: 80752
  derived and/or modified CDS sequence (opt1) from neuraminidase__InfluenzaA__ACY77705

SEQ ID NO: 81572 - RNA, 1410 nt, Artificial Sequence; identical to SEQ ID NO: 80752
  derived and/or modified CDS sequence (opt1) from neuraminidase__InfluenzaA__ACY77725

SEQ ID NO: 81573 - RNA, 1410 nt, Artificial Sequence; identical to SEQ ID NO: 80752
  derived and/or modified CDS sequence (opt1) from neuraminidase__InfluenzaA__ACY77735

SEQ ID NO: 81574 - RNA, 1410 nt, Artificial Sequence; identical to SEQ ID NO: 80762
  derived and/or modified CDS sequence (opt1) from neuraminidase__InfluenzaA__ACY77745

SEQ ID NO: 81575 - RNA, 1410 nt, Artificial Sequence; identical to SEQ ID NO: 80762
  derived and/or modified CDS sequence (opt1) from neuraminidase__InfluenzaA__ACY77755

SEQ ID NO: 81576 - RNA, 1410 nt, Artificial Sequence; identical to SEQ ID NO: 80762
  derived and/or modified CDS sequence (opt1) from neuraminidase__InfluenzaA__ACY77775

SEQ ID NO: 81577 - RNA, 1410 nt, Artificial Sequence; identical to SEQ ID NO: 80762
  derived and/or modified CDS sequence (opt1) from neuraminidase__InfluenzaA__ACY77785

SEQ ID NO: 81578 - RNA, 1410 nt, Artificial Sequence; identical to SEQ ID NO: 80762
  derived and/or modified CDS sequence (opt1) from neuraminidase__InfluenzaA__ACY77795

SEQ ID NO: 81579 - RNA, 1410 nt, Artificial Sequence
  derived and/or modified CDS sequence (opt1) from neuraminidase__InfluenzaA__ACY77825
augaaccccaaccagaagaucaucaccaucggcagcgugugcaugaccaucgggauggccaaccugauccuccagaucggcaacaucaucuccaucuggaucagccacuccauccagcuggggaaccagaaccagaucgagacgugcaaccagagcgucaucaccuacgagaacaacaccugggugaaccagaccuacgugaacaucuccaacacgaacuucgccgcgggccagagcgucguguccgccaagcuggccgggaacagcucccucugcccggugagcggcugggccaucuacuccaaggacaacagcauccgcaucggcuccaagggggacgucuucgugauccgggagcccuucaucagcugcagcccccuggagugccgcaccuucuuccugacccagggcgcccuccugaacgacaagcacuccaacgggaccaucaaggaccggucccccuaccgcacgcugaugagcugcccgaucggcgaggugcccucccccuacaacagccgguucgagagcgucgcgugguccgccagcgccugccacgacgggaucaacuggcucaccaucggcaucuccggccccgacaacggggccguggcggugcugaaguacaacggcaucaucaccgacaccaucaagagcuggcgcaacaacauccugcggacgcaggaguccgagugcgccugcgucaacgggagcugcuucaccgugaugaccgacggcccguccgacggccaggccagcuacaagaucuuccgcaucgagaaggggaagaucgugaaguccgucgagaugaacgcccccaacuaccacuacgaggagugcagcugcuaccccgacuccagcgagaucacgugcgugugccgggacaacuggcacggcuccaaccgccccugggugagcuucaaccagaaccucgaguaccagaucggguacaucugcuccggcaucuucggggacaacccgcggcccaacgacaagaccggcagcugcggccccgucuccagcaacggggccaacggcgugaagggguucuccuucaaguacggcaacgggguguggaucggccgcaccaagagcaucaacagccggaacggcuucgagaugaucugggaccccaacggguggaccggcaccgacaacaacuucuccaucaagcaggacaucgucgggaucaacgaguggagcggcuacuccgggagcuucgugcagcacccggagcugacgggccuggacugcauccgccccugcuucuggguggagcucauccggggccgccccaaggagaacaccaucuggaccuccgggagcuccaucagcuucugcggcgucaacuccgacaccgugggguggagcuggcccgacggcgcggagcugccguucacgaucgacaaguga

SEQ ID NO: 81580 - RNA, 1410 nt, Artificial Sequence; identical to SEQ ID NO: 81579
  derived and/or modified CDS sequence (opt1) from neuraminidase__InfluenzaA__ACY77835

SEQ ID NO: 81581 - RNA, 1410 nt, Artificial Sequence; identical to SEQ ID NO: 80792
  derived and/or modified CDS sequence (opt1) from neuraminidase__InfluenzaA__ACY77845

SEQ ID NO: 81582 - RNA, 1410 nt, Artificial Sequence; identical to SEQ ID NO: 80762
  derived and/or modified CDS sequence (opt1) from neuraminidase__InfluenzaA__ACY77865

SEQ ID NO: 81583 - RNA, 1410 nt, Artificial Sequence
  derived and/or modified CDS sequence (opt1) from neuraminidase__InfluenzaA__ACY77870
augaaccccaaccagaagaucaucaccaucggcagcgugugcaugaccaucgggauggccaaccugauccuccagaucggcaacaucaucuccaucuggaucagccacuccauccagcuggggaaccagaaccagaucgagacgugcaaccagagcgucaucaccuacgagaacaacaccugggugaaccagaccuacgugaacaucuccaacacgaaccuggccgcgggccagagcgucguguccgugaagcucgccgggaacagcucccugugcccggucagcggcugggccaucuacuccaaggacaacagcauccgcaucggcuccaagggggacguguucgugauccgggagcccuucaucagcugcagcccccuggagugccgcaccuucuuccucacccagggcgcccugcugaacgacaagcacuccaacgggaccaucaaggaccggucccccuaccgcacgcucaugagcugcccgaucggcgagguccccucccccuacaacagccgguucgagagcguggccugguccgcgagcgccugccacgacgggaucaacuggcugaccaucggcaucuccggccccgacaacggggccguggccguccugaaguacaacggcaucaucaccgacaccaucaagagcuggcgcaacaacauccuccggacgcaggaguccgagugcgcgugcgugaacgggagcugcuucaccgugaugaccgacggcccguccgacggccaggccagcuacaagaucuuccgcaucgagaaggggaagaucgucaaguccguggagaugaacgcccccaacuaccacuacgaggagugcagcugcuaccccgacuccagcgagaucacgugcgugugccgggacaacuggcacggcuccaaccgccccugggucagcuucaaccagaaccuggaguaccagaucggguacaucugcuccggcaucuucggggacaacccgcggcccaacgacaagaccggcagcugcggccccguguccagcaacggggccaacggcgugaagggguucuccuucaaguacggcaacggggucuggaucggccgcaccaagagcaucagcucccggaacggcuucgagaugaucugggaccccaacggguggaccggcaccgacaacaacuucagcaucaagcaggacaucguggggaucaacgagugguccggcuacagcggguccuucgugcagcacccggagcugacgggccucgacugcauccgccccugcuucugggucgagcugauccggggccgccccaaggagaacaccaucuggaccagcggguccagcaucuccuucugcggcgugaacagcgacaccgucgggugguccuggcccgacggcgccgagcugccguucacgaucgacaaguga

SEQ ID NO: 81584 - RNA, 1410 nt, Artificial Sequence; identical to SEQ ID NO: 80762
  derived and/or modified CDS sequence (opt1) from neuraminidase__InfluenzaA__ACY77877

SEQ ID NO: 81585 - RNA, 1410 nt, Artificial Sequence; identical to SEQ ID NO: 80762
  derived and/or modified CDS sequence (opt1) from neuraminidase__InfluenzaA__ACY77887

SEQ ID NO: 81586 - RNA, 1410 nt, Artificial Sequence; identical to SEQ ID NO: 80762
  derived and/or modified CDS sequence (opt1) from neuraminidase__InfluenzaA__ACY77907

SEQ ID NO: 81587 - RNA, 1410 nt, Artificial Sequence; identical to SEQ ID NO: 80792
  derived and/or modified CDS sequence (opt1) from neuraminidase__InfluenzaA__ACY77917

SEQ ID NO: 81588 - RNA, 1410 nt, Artificial Sequence
  derived and/or modified CDS sequence (opt1) from neuraminidase__InfluenzaA__ACY77927
augaaccccaaccagaagaucaucaccaucggcagcgugugcaugaccaucgggauggccaaccugauccuccagaucggcaacaucaucuccaucuggaucagccacuccauccagcuggggaaccagaaccagaucgagacgugcaaccagagcgucaucaccuacgagaacaacaccugggugaaccagaccuacgugaacaucuccaacacgaacuucgccgcgggccagagcgucguguccgugaagcuggccgggaacagcucccucugcccggucagcggcugggccaucuacuccaaggacaacagcauccgcaucggcuccaagggggacguguucgugauccgggagcccuucaucagcugcagcccccuggagugccgcaccuucuuccugacccagggcgcccuccugaacgacaagcacuccaacgggaccaucaaggaccggucccccuaccgcacgcugaugagcugcccgaucggcgagguccccucccccuacaacagccgguucgagagcguggccugguccgcgagcgccugccacgacgggaucaacuggcucaccaucggcaucuccggccccaacaacggggccguggccguccugaaguacaacggcaucaucaccgacaccaucaagagcuggcgcaacaacauccugcggacgcaggaguccgagugcgcgugcgugaacgggagcugcuucaccgugaugaccgacggcccguccgacggccaggccagcuacaagaucuuccgcaucgagaaggggaagaucgucaaguccguggagaugaacgcccccaacuaccacuacgaggagugcagcugcuaccccgacuccagcgagaucacgugcgugugccgggacaacuggcacggcuccaaccgccccugggucagcuucaaccagaaccucgaguaccagaucggguacaucugcuccggcaucuucggggacaacccgcggcccaacgacaagaccggcagcugcggccccguguccagcaacggggccaacggcgugaagggguucuccuucaaguacggcaacggggucuggaucggccgcaccaagagcaucagcucccggaacggcuucgagaugaucugggaccccaacggguggaccggcaccgacaacaacuucagcaucaagcaggacaucguggggaucaacgagugguccggcuacagcggguccuucgugcagcacccggagcugacgggccuggacugcauccgccccugcuucugggucgagcucauccggggccgccccaaggagaacaccaucuggaccagcggguccagcaucuccuucugcggcgugaacagcgacaccgucgggugguccuggcccgacggcgccgagcugccguucacgaucgacaaguga

SEQ ID NO: 81589 - RNA, 1410 nt, Artificial Sequence; identical to SEQ ID NO: 80762
  derived and/or modified CDS sequence (opt1) from neuraminidase__InfluenzaA__ACY77937

SEQ ID NO: 81590 - RNA, 1410 nt, Artificial Sequence; identical to SEQ ID NO: 80762
  derived and/or modified CDS sequence (opt1) from neuraminidase__InfluenzaA__ACY77947

SEQ ID NO: 81591 - RNA, 1410 nt, Artificial Sequence; identical to SEQ ID NO: 80762
  derived and/or modified CDS sequence (opt1) from neuraminidase__InfluenzaA__ACY77967

SEQ ID NO: 81592 - RNA, 1410 nt, Artificial Sequence; identical to SEQ ID NO: 80752
  derived and/or modified CDS sequence (opt1) from neuraminidase__InfluenzaA__ACY77977

SEQ ID NO: 81593 - RNA, 1410 nt, Artificial Sequence; identical to SEQ ID NO: 80762
  derived and/or modified CDS sequence (opt1) from neuraminidase__InfluenzaA__ACY77987

SEQ ID NO: 81594 - RNA, 1410 nt, Artificial Sequence
  derived and/or modified CDS sequence (opt1) from neuraminidase__InfluenzaA__ACY77997
augaaccccaaccagaagaucaucaccaucggcagcgugugcaugaccaucgggauggccaaccugauccuccagaucggcaacaucaucuccaucuggaucagccacuccauccagcuggggaaccagaaccagaucgagacgugcaaccagagcgucaucaccuacgagaacaacaccugggugaaccagaccuacgugaacaucuccaacacgaacuucgccgcgggccagagcgucguguccgugacccuggccgggaacagcucccucugcccggucagcggcugggccaucuacuccaaggacaacagcauccgcaucggcuccaagggggacguguucgugauccgggagcccuucaucagcugcagcccccuggagugccgcaccuucuuccugacccagggcgcccuccugaacgacaagcacuccaacgggacgaucaaggaccggucccccuaccgcacccugaugagcugcccgaucggcgagguccccucccccuacaacagccgguucgagagcguggccugguccgcgagcgccugccacgacgggaucaacuggcucaccaucggcaucuccggccccgacaacggggccguggccguccugaaguacaacggcaucaucaccgacacgaucaagagcuggcgcaacaacauccugcggacccaggaguccgagugcgcgugcgugaacgggagcugcuucaccgugaugaccgacggcccguccgacggccaggccagcuacaagaucuuccgcaucgagaaggggaagaucgucaaguccguggagaugaacgcccccaacuaccacuacgaggagugcagcugcuaccccgacuccagcgagaucacgugcgugugccgggacaacuggcacggcuccaaccgccccugggucagcuucaaccagaaccucgaguaccagaucggguacaucugcuccggcaucuucggggacaacccgcggcccaacgacaagaccggcagcugcggccccguguccagcaacggggccaacggcgugaagggguucuccuucaaguacggcaacggggucuggaucggccgcaccaagagcaucagcucccggaacggcuucgagaugaucugggaccccaacggguggaccggcacggacaacaacuucagcaucaagcaggacaucguggggaucaacgagugguccggcuacagcggguccuucgugcagcacccggagcugaccggccuggacugcauccgccccugcuucugggucgagcucauccggggccgccccaaggagaacaccaucuggaccagcggguccagcaucuccuucugcggcgugaacagcgacacggucgggugguccuggcccgacggcgccgagcugccguucaccaucgacaaguga

SEQ ID NO: 81595 - RNA, 1410 nt, Artificial Sequence; identical to SEQ ID NO: 80762
  derived and/or modified CDS sequence (opt1) from neuraminidase__InfluenzaA__ACY78017

SEQ ID NO: 81596 - RNA, 1410 nt, Artificial Sequence
  derived and/or modified CDS sequence (opt1) from neuraminidase__InfluenzaA__ACZ01955
augaaccccaaccagaagaucaucaccaucggcagcgugugcaugaccaucgggauggccaaccugauccuccagaucggcaacaucaucuccaucuggaucagccacuccauccagcuggggaaccagaaccagaucgagacgugcaaccagagcgucaucaccuacgagaacaacaccugggugaaccagaccuacgugaacaucuccaacacgaacuucgccgcgggccagagcgucguguccgugaagcuggccgggaacagcucccucugcccggucagcggcugggccaucuacuccaaggacaacagcauccgcaucggcuccaagggggacguguucgugauccgggagcccuucaucagcugcagcccccuggagugccgcaccuucuuccugacccagggcgcccuccugaacgacaagcacuccaacgggaccaucaaggaccggucccccuaccgcacgcugaugagcugcccgaucggcgagguccccucccccuacaacagccgguucgagagcguggccugguccgcgagcgccugccacgacgggaucaacuggcucaccaucggcaucuccggccccgggaacggcgccguggccguccugaaguacaacgggaucaucaccgacaccaucaagagcuggcgcaacaacauccugcggacgcaggaguccgagugcgcgugcgugaacggcagcugcuucaccgugaugaccgacggcccguccgacgggcaggccagcuacaagaucuuccgcaucgagaagggcaagaucgucaaguccguggagaugaacgcccccaacuaccacuacgaggagugcagcugcuaccccgacuccagcgagaucacgugcgugugccgggacaacuggcacggguccaaccgccccugggucagcuucaaccagaaccucgaguaccagaucggcuacaucugcuccgggaucuucggcgacaacccgcggcccaacgacaagaccggcagcugcgggcccguguccagcaacggcgccaacggggugaagggcuucuccuucaaguacgggaacggcgucuggaucggccgcaccaagagcaucagcucccggaacggguucgagaugaucugggaccccaacggcuggaccgggaccgacaacaacuucagcaucaagcaggacaucgugggcaucaacgagugguccggguacagcggcuccuucgugcagcacccggagcugacgggccuggacugcauccgccccugcuucugggucgagcucauccgggggcgccccaaggagaacaccaucuggaccagcggcuccagcaucuccuucugcggggugaacagcgacaccgucggcugguccuggcccgacggcgccgagcugccguucacgaucgacaaguga

SEQ ID NO: 81597 - RNA, 1410 nt, Artificial Sequence; identical to SEQ ID NO: 80762
  derived and/or modified CDS sequence (opt1) from neuraminidase__InfluenzaA__ACZ05053

SEQ ID NO: 81598 - RNA, 1410 nt, Artificial Sequence; identical to SEQ ID NO: 80752
  derived and/or modified CDS sequence (opt1) from neuraminidase__InfluenzaA__ACZ05064

SEQ ID NO: 81599 - RNA, 1410 nt, Artificial Sequence; identical to SEQ ID NO: 80762
  derived and/or modified CDS sequence (opt1) from neuraminidase__InfluenzaA__ACZ05074

SEQ ID NO: 81600 - RNA, 1410 nt, Artificial Sequence; identical to SEQ ID NO: 80762
  derived and/or modified CDS sequence (opt1) from neuraminidase__InfluenzaA__ACZ05084

SEQ ID NO: 81601 - RNA, 1410 nt, Artificial Sequence; identical to SEQ ID NO: 80762
  derived and/or modified CDS sequence (opt1) from neuraminidase__InfluenzaA__ACZ05094

SEQ ID NO: 81602 - RNA, 1410 nt, Artificial Sequence; identical to SEQ ID NO: 80762
  derived and/or modified CDS sequence (opt1) from neuraminidase__InfluenzaA__ACZ05104

SEQ ID NO: 81603 - RNA, 1410 nt, Artificial Sequence; identical to SEQ ID NO: 80762
  derived and/or modified CDS sequence (opt1) from neuraminidase__InfluenzaA__ACZ05114

SEQ ID NO: 81604 - RNA, 1410 nt, Artificial Sequence; identical to SEQ ID NO: 80762
  derived and/or modified CDS sequence (opt1) from neuraminidase__InfluenzaA__ACZ05124

SEQ ID NO: 81605 - RNA, 1410 nt, Artificial Sequence; identical to SEQ ID NO: 80762
  derived and/or modified CDS sequence (opt1) from neuraminidase__InfluenzaA__ACZ05144

SEQ ID NO: 81606 - RNA, 1410 nt, Artificial Sequence; identical to SEQ ID NO: 80762
  derived and/or modified CDS sequence (opt1) from neuraminidase__InfluenzaA__ACZ05154

SEQ ID NO: 81607 - RNA, 1410 nt, Artificial Sequence; identical to SEQ ID NO: 80623
  derived and/or modified CDS sequence (opt1) from neuraminidase__InfluenzaA__ACZ05164

SEQ ID NO: 81608 - RNA, 1410 nt, Artificial Sequence; identical to SEQ ID NO: 80623
  derived and/or modified CDS sequence (opt1) from neuraminidase__InfluenzaA__ACZ05175

SEQ ID NO: 81609 - RNA, 1413 nt, Artificial Sequence
  derived and/or modified CDS sequence (opt1) from neuraminidase__InfluenzaA__ACZ05197
augaaccccaaccagaagaucaugaccaucggcagcaucuccaucgccaucgggaucaucagccugaugcuccagaucggcaacaucaucuccaucugggccagccacuccauccagaccgggagccagaacaacacgggcaucugcaaccagcgcaucaucaccuacgagaacuccaccugggugaaccacaccuacgucaacaucaacaacacgaacgugguggcgggggaggacaagaccagcgucacccuggccggcaacuccagccugugcuccaucagcggcugggccaucuacaccaaggacaacuccauccggaucgggagcaagggcgacguguucgugauccgcgagccguucaucuccugcagccaccucgagugccggacguucuuccugacccagggggcccugcucaacgacaagcacuccaacggcaccgucaaggaccgcagccccuaccgggcccugauguccugcccccugggggaggcgcccagcccguacaacagcaaguucgaguccguggccuggagcgccuccgccugccacgacggcaugggcuggcucaccaucgggaucagcggccccgacaacggggcgguggccguccugaaguacaacggcaucaucacgggcaccaucaaguccuggaagaagcagauccugcgcacccaggagagcgagugcgugugcaugaacggguccugcuucaccaucaugacggacggccccagcaacaaggccgccuccuacaagaucuucaagaucgagaaggggaaggugaccaagagcaucgagcucaacgcccccaacuucuacuacgaggagugcuccugcuacccggacaccggcaucgucaugugcgugugccgggacaacuggcacgggagcaaccgccccuggguguccuucaaccagaaccuggacuaccagaucggcuacaucugcagcggcgucuucggggacaacccccggcccgaggacggcgagggguccugcaacccggugaccguggacggcgcgaacggggucaagggcuucagcuacaaguacggcaacgggguguggaucggccgcacgaaguccaaccggcugcgcaagggguucgagaugaucugggaccccaacggcuggaccaacaccgacagcgacuucuccgugaagcaggacgucguggccaucaccgacuggagcggguacagcggcuccuucgugcagcaccccgagcucacgggccuggacugcauccggcccugcuucugggucgagcuggugcgcgggcucccgcgggagaacaccaccaucuggaccagcggcuccagcaucuccuucugcggggucaacagcgacacggccaacugguccuggcccgacggcgccgagcugcccuucaccaucgacaaguga

SEQ ID NO: 81610 - RNA, 1410 nt, Artificial Sequence
  derived and/or modified CDS sequence (opt1) from neuraminidase__InfluenzaA__ACZ05208
augaaccccaaccagaagaucaucaccaucggcagcgugucccugaccaucagcacgaucugcuucuucaugcagaucgccauccucaucaccaccgucacccugcacuucaagcaguacgaguucaacuccccgcccaacaaccaggugaugcugugcgagcccacgaucaucgagcgcaacaucaccgagaucguguaccucaccaacaccacgaucgagaaggagaucugccccaagcuggccgaguaccggaacuggagcaagccgcagugcgacaucaccggguucgcgcccuucuccaaggacaacagcauccgccuguccgccggcggggacaucugggucacccgggagcccuacgugagcugcgaccccgacaagugcuaccaguucgcccucggccaggggaccacgcugaacaacgugcacuccaacaacaccguccgcgaccggaccccguaccgcacccugcucaugaacgagcugggcgugcccuuccaccugggcacgaagcaggucugcaucgccuggagcuccagcuccugccacgacgggaaggccuggcuccacgugugcaucaccggcgacgacaagaacgcgaccgccagcuucaucuacaacgggcggcugguggacuccguggucagcugguccaaggagauccugcgcacccaggagagcgagugcgugugcaucaacggcacgugcaccguggucaugaccgacggguccgccagcggcaaggccgacaccaagauccucuucaucgaggagggcaagaucgugcacacgagcacccuguccgggagcgcgcagcacguggaggagugcuccugcuacccccgguaccccggcguccgcugcgugugccgggacaacuggaaggggagcaaccgcccgaucguggacaucaacaucaaggaccacuccaucgucagcuccuacgugugcagcggccuggugggcgacacgccccggaagaacgacuccagcuccagcucccacugcagcgaccccaacaacgaggagggcgggcacggggucaagggcugggccuucgacuccgggaacgacguguggaugggccgcaccaucagcgagaagucccggcucggcuacgagaccuucaaggucaucgagggguggagcaaccccaaguccaagcugcagaucaaccgccaggugaucguggaccggggcaaccgcagcggguacagcggcaucuucuccgucgagggcaagagcugcaucaaccggugcuucuacguggagcugauccgcgggcggaaggaggagaccgaggugcucuggaccuccaacagcaucgucguguucugcggcaccuccgggacguacggcaccgggagcuggccggacggcgccgacaucaaccugaugcccaucuga

SEQ ID NO: 81611 - RNA, 1410 nt, Artificial Sequence
  derived and/or modified CDS sequence (opt1) from neuraminidase__InfluenzaA__ACZ05219
augaaccccaaccagaagaucaucaccaucggcagcgugucccugaccaucagcacgaucugcuucuucaugcagaucgccauccucaucaccaccgucacccugcacuucaagcaguacgaguucaacuccccgcccaacaaccaggugaugcugugcgagcccacgaucaucgagcgcaacaucaccgagaucguguaccucaccaacaccacgaucgagaaggagaucugccccaagcuggccgaguaccggaacuggagcaagccgcagugcgggaucaccggcuucgcgcccuucuccaaggacaacagcauccgccuguccgccgggggcgacaucugggucacccgggagcccuacgugagcugcgaccccgacaagugcuaccaguucgcccucgggcagggcaccacgcugaacaacgugcacuccaacaacaccguccgcgaccggaccccguaccgcacccugcucaugaacgagcugggcgugcccuuccaccuggggacgaagcaggucugcaucgccuggagcuccagcuccugccacgacggcaaggccuggcuccacgugugcaucaccggggacgacaagaacgcgaccgccagcuucaucuacaacggccggcugguggacuccguggucagcugguccaaggagauccugcgcacccaggagagcgagugcgugugcaucaacgggacgugcaccguggucaugaccgacggcuccgccagcggcaaggccgacaccaagauccucuucaucgaggaggggaagaucgugcacacgagcacccuguccggcagcgcgcagcacguggaggagugcuccugcuacccccgguaccccgggguccgcugcgugugccgggacaacuggaagggcagcaaccgcccgaucguggacaucaacaucaaggaccacuccaucgucagcuccuacgugugcagcggccuggugggggacacgccccggaagaacgacuccagcuccagcucccacugccucgaccccaacaacgaggagggcgggcacggcgucaaggggugggccuucgacgacggcaacgacguguggaugggccgcaccaucagcgagaagucccggcugggguacgagaccuucaaggucaucgagggcuggagcaaccccaaguccaagcugcagaucaaccgccaggugaucguggaccgggggaaccgcagcggcuacuccgggaucuucagcgucgagggcaagagcugcaucaaccggugcuucuacguggagcucauccgcggccggaaggaggagaccgaggugcuguggaccuccaacagcaucgucguguucugcgggaccuccggcacguacgggaccggcagcuggccggacggggccgacaucaaccugaugcccaucuga

SEQ ID NO: 81612 - RNA, 1410 nt, Artificial Sequence; identical to SEQ ID NO: 80623
  derived and/or modified CDS sequence (opt1) from neuraminidase__InfluenzaA__ACZ05230

SEQ ID NO: 81613 - RNA, 1410 nt, Artificial Sequence
  derived and/or modified CDS sequence (opt1) from neuraminidase__InfluenzaA__ACZ05241
augaaccccaaccagaagaucaucaccaucggcagcgugucccugaccaucagcacgaucugcuucuucaugcagaucgccauccucaucaccaccgucacccugcacuucaagcaguacgaguucaacuccccgcccaacaaccaggugaugcugugcgagcccacgaucaucgagcgcaacaucaccgagaucguguaccucaccaacaccacgaucgagaaggagaucugccccaagcuggccgaguaccggaacuggagcaagccgcagugcgacaucaccggguucgcgcccuucuccaaggacaacagcauccgccuguccgccggcggggacaucugggucacccgggagcccuacgugagcugcgaccccgacaagugcuaccaguucgcccucggccaggggaccacgcugaacaacgugcacuccaacaacaccguccgcgaccggaccccguaccgcacccugcucaugaacgagcugggcgugcccuuccaccugggcacgaagcaggucugcaucgccuggagcuccagcuccugccacgacgggaaggccuggcuccacgugugcaucaccggcgacgacaagaacgcgaccgccagcuucaucuacaacgggcggcugguggacuccguggucagcugguccaaggagauccugcgcacccaggagagcgagugcgugugcaucaacggcacgugcaccguggucaugaccgacggguccgccagcggcaaggccgacaccaagauccucuucaucgaggagggcaagaucgugcacacgagcaagcuguccgggagcgcgcagcacguggaggagugcuccugcuacccccgguaccccggcguccgcugcgugugccgggacaacuggaaggggagcaaccgcccgaucguggacaucaacaucaaggaccacuccaucgucagcuccuacgugugcagcggccuggugggcgacacgccccggaagaacgacuccagcuccagcucccacugccucgaccccaacaacgaggagggcgggcacggggucaagggcugggccuucgacgacgggaacgacguguggaugggccgcaccaucagcgagaagucccggcugggcuacgagaccuucaaggucaucgagggguggagcaaccccaaguccaagcugcagaucaaccgccaggugaucguggaccggggcaaccgcagcggguacuccggcaucuucagcgucgagggcaagagcugcaucaaccggugcuucuacguggagcucauccgcgggcggaaggaggagaccgaggugcuguggaccuccaacagcaucgucguguucugcggcaccuccgggaccuacggcacggggagcuggccggacggcgccgacaucaaccugaugcccaucuga

SEQ ID NO: 81614 - RNA, 1413 nt, Artificial Sequence
  derived and/or modified CDS sequence (opt1) from neuraminidase__InfluenzaA__ACZ05296
augaaccccaaccagaagaucaucaccaucggcagcaucuccaucgccaucgggaucaucagccugaugcuccagaucggcaacaucaucuccaucugggccagccacuccauccagaccgggagccagaacaacacgggcaucugcaaccagcgcaucaucaccuacgagaacuccaccugggugaaccacaccuacgucaacaucaacaacacgaacgugguggcgggggaggacaagaccagcgucacccuggccggcaacuccagccugugcuccaucagcggcugggccaucuacaccaaggacaacuccauccggaucgggagcaagggcgacguguucgugauccgcgagccguucaucuccugcagccaccucgagugccggacguucuuccugacccagggggcccugcucaacgacaagcacuccaacggcaccgucaaggaccgcagccccuaccgggcccugauguccugcccccugggggaggcgcccagcccguacaacagcaaguucgaguccguggccuggagcgccuccgccugccacgacggcaugggcuggcucaccaucgggaucagcggccccgacaacggggcgguggccguccugaaguacaacggcaucaucacgggcaccaucaaguccuggaagaagcagauccugcgcacccaggagagcgagugcgugugcaugaacggguccugcuucaccaucaugacggacggccccagcaacaaggccgccuccuacaagaucuucaagaucgagaaggggaaggugaccaagagcaucgagcucaacgcccccaacuucuacuacgaggagugcuccugcuacccggacaccggcaucgucaugugcgugugccgggacaacuggcacgggagcaaccgccccuggguguccuucaaccagaaccuggacuaccagaucggcuacaucugcagcggcgucuucggggacaacccccggcccgaggacggcgagggguccugcaacccgguggcgguggacggcgccaacggggucaagggcuucagcuacaaguacggcaacgggguguggaucggccgcaccaaguccaaccggcugcgcaagggguucgagaugaucugggaccccaacggcuggacgaacaccgacagcgacuucuccgugaagcaggacgucguggccaucaccgacuggagcggguacagcggcuccuucgugcagcaccccgagcucaccggccuggacugcauccggcccugcuucugggucgagcuggugcgcgggcucccgcgggagaacacgaccaucuggaccagcggcuccagcaucuccuucugcggggucaacagcgacaccgccaacugguccuggcccgacggcgccgagcugcccuucacgaucgacaaguga

SEQ ID NO: 81615 - RNA, 1410 nt, Artificial Sequence; identical to SEQ ID NO: 80623
  derived and/or modified CDS sequence (opt1) from neuraminidase__InfluenzaA__ACZ05307

SEQ ID NO: 81616 - RNA, 1410 nt, Artificial Sequence
  derived and/or modified CDS sequence (opt1) from neuraminidase__InfluenzaA__ACZ05318
augaaccccaaccagaagaucaucaccaucggcagcgugucccugaccaucagcacgaucugcuucuucaugcagaccgccauccucaucaccaccgucacgcugcacuucaagcagugcgaguucaacuccccgcccaacaaccaggugaugcugugcgagcccaccaucaucgagcgcaacaucaccgagaucguguaccucaccaacacgaccaucgagaaggagaucugccccaagcuggccgaguaccggaacuggagcaagccgcagugcgacaucaccggguucgcgcccuucuccaaggacaacagcauccgccuguccgccggcggggacaucugggucacccgggagcccuacgugagcugcgaccccgacaagugcuaccaguucgcccucggccaggggacgacccugaacaacgugcacuccaacaacaccguccgcgaccggaccccguaccgcacgcugcucaugaacgagcugggcgugcccuuccaccugggcaccaagcaggucugcaucgccuggagcuccagcuccugccacgacgggaaggccuggcuccacgugugcaucaccggcgacgacaagaacgcgaccgccagcuucaucuacaacgggcggcugguggacuccguggucagcugguccaaggagauccugcgcacgcaggagagcgagugcgugugcaucaacgggaccugcaccguggucaugaccgacggguccgccagcggcaaggccgacacgaagauccucuucaucgaggagggcaagaucgugcacaccagcacccuguccgggagcgcgcagcacguggaggagugcuccugcuacccccgguaccccggcguccgcugcgugugccgggacaacuggaaggggagcaaccgcccgaucguggacaucaacaucaaggaccacuccaucgucagcuccuacgugugcagcggccuggugggcgacacgccccggaagaacgacuccagcuccagcucccacugccucgaccccaacaacgaggagggcggccacggggucaagggcugggccuucgacgacgggaacgacguguggaugggccgcaccaucagcgagaagucccggcugggcuacgagaccuucaaggucaucgagggguggagcaaccccaaguccaagcugcagaucaaccgccaggugaucguggaccggggcaaccgcagcggguacuccggcaucuucagcgucgagggcaagagcugcaucaaccggugcuucuacguggagcucauccgcgggcggaaggaggagaccgaggugcuguggaccuccaacagcaucgucguguucugcggcacguccgggaccuacggcaccgggagcuggccggacggcgccgacaucaaccugaugcccaucuga

SEQ ID NO: 81617 - RNA, 1410 nt, Artificial Sequence; identical to SEQ ID NO: 80623
  derived and/or modified CDS sequence (opt1) from neuraminidase__InfluenzaA__ACZ05329

SEQ ID NO: 81618 - RNA, 1410 nt, Artificial Sequence; identical to SEQ ID NO: 80536
  derived and/or modified CDS sequence (opt1) from neuraminidase__InfluenzaA__ACZ05340

SEQ ID NO: 81619 - RNA, 1410 nt, Artificial Sequence; identical to SEQ ID NO: 81613
  derived and/or modified CDS sequence (opt1) from neuraminidase__InfluenzaA__ACZ05362

SEQ ID NO: 81620 - RNA, 1410 nt, Artificial Sequence; identical to SEQ ID NO: 80623
  derived and/or modified CDS sequence (opt1) from neuraminidase__InfluenzaA__ACZ05373

SEQ ID NO: 81621 - RNA, 1410 nt, Artificial Sequence; identical to SEQ ID NO: 80623
  derived and/or modified CDS sequence (opt1) from neuraminidase__InfluenzaA__ACZ05395

SEQ ID NO: 81622 - RNA, 1410 nt, Artificial Sequence; identical to SEQ ID NO: 80623
  derived and/or modified CDS sequence (opt1) from neuraminidase__InfluenzaA__ACZ05406

SEQ ID NO: 81623 - RNA, 1413 nt, Artificial Sequence
  derived and/or modified CDS sequence (opt1) from neuraminidase__InfluenzaA__ACZ05450
augaaccccaaccagaagaucaucaccaucggcagcaucuccaucgccaucgggaucaucagccugaugcuccagaucggcuccaucaucagcaucugggccucccacagcauccagaccgggucccagaacaacacgggcaucugcaaccagcgcaucaucaccuacgagaacagcaccugggugaaccacaccuacgucaacaucaacaacacgaacgugguggcgggggaggacaagaccuccgucacccuggccggcaacagcucccugugcagcaucuccggcugggccaucuacaccaaggacaacagcgugcggaucggguccaagggcgacguguucgucauccgcgagccguucaucagcugcucccaccucgagugccggacguucuuccugacccagggggcccugcucaacgacaagcacagcaacggcaccgugaaggaccgcucccccuaccgggcccugaugagcugcccccugggggaggcgcccagcccguacaacuccaaguucgagagcguggccugguccgccagcgccugccacgacggcaugggcuggcucaccaucgggaucuccggccccgacaacggggcggucgccgugcugaaguacaacggcaucaucacgggcaccaucaagagcuggaagaagcagauccugcgcacccaggaguccgagugcgugugcaugaacgggagcugcuucaccaucaugacggacggccccuccaacaaggccgccagcuacaagaucuucaagaucgagaaggggaaggucaccaaguccaucgagcucaacgcccccaacuucuacuacgaggagugcagcugcuacccggacaccggcaucgugaugugcgugugccgggacaacuggcacggguccaaccgccccugggucagcuucaaccagaaccuggacuaccagaucggcuacaucugcuccggcguguucggggacaacccccggcccgaggacggcgaggggagcugcaacccggugaccgucgacggcgcgaacggggugaagggcuucuccuacaaguacggcaacgggguguggaucggccgcaccaagagcaaccggcugcgcaagggguucgagaugaucugggaccccaacggcuggacgaacaccgacuccgacuucagcgucaagcaggacgugguggccaucaccgacuggagcggguacuccggcagcuucguccagcaccccgagcucacgggccuggacugcauccggcccugcuucuggguggagcugguccgcgggcucccgcgggagaacaccaccaucuggaccuccggcagcuccaucagcuucugcggggugaacuccgacacggccaacuggagcuggcccgacggcgccgagcugcccuucaccaucgacaaguga

SEQ ID NO: 81624 - RNA, 1410 nt, Artificial Sequence; identical to SEQ ID NO: 80623
  derived and/or modified CDS sequence (opt1) from neuraminidase__InfluenzaA__ACZ05461

SEQ ID NO: 81625 - RNA, 1410 nt, Artificial Sequence; identical to SEQ ID NO: 80623
  derived and/or modified CDS sequence (opt1) from neuraminidase__InfluenzaA__ACZ05472

SEQ ID NO: 81626 - RNA, 1410 nt, Artificial Sequence
  derived and/or modified CDS sequence (opt1) from neuraminidase__InfluenzaA__ACZ05483
augaaccccaaccagaagaucaucaccaucggcagcgugucccugaccaucagcacgaucugcuucuucaugcagaucgccauccucaucaccaccgucacccugcacuucaagcaguacgaguucaacuccccgcccaacaaccaggugaugcugugcgagcccacgaucaucgagcgcaacaucaccgagaucguguaccucaccaacaccacggucgagaaggagaucugccccaagcuggccgaguaccggaacuggagcaagccgcagugcgacaucaccggguucgcgcccuucuccaaggacaacagcauccgccuguccgccggcggggacaucugggugacccgggagcccuacgugagcugcgaccccgacaagugcuaccaguucgcccucggccaggggaccacgcugaacaacguccacuccaacaacaccgugcgcgaccggaccccguaccgcacccugcucaugaacgagcugggcgugcccuuccaccugggcacgaagcaggucugcaucgccuggagcuccagcuccugccacgacgggaaggccuggcuccacgugugcaucaccggcgacgacaagaacgcgaccgccagcuucaucuacaacgggcggcugguggacuccgucgugagcugguccaaggagauccugcgcacccaggagagcgagugcgugugcaucaacggcacgugcaccgucgugaugaccgacggguccgccagcggcaaggccgacaccaagauccucuucaucgaggagggcaagaucgugcacacgagcacccuguccgggagcgcgcagcacgucgaggagugcuccugcuacccccgguaccccggcgugcgcugcgugugccgggacaacuggaaggggagcaaccgcccgaucgucgacaucaacaucaaggaccacuccaucgugagcuccuacgugugcagcggccuggucggcgacacgccccggaagaacgacuccagcuccagcucccacugccucgaccccaacaacgaggagggcgggcacggggugaagggcugggccuucgacgacgggaacgacgucuggaugggccgcaccaucagcgagaagucccggcugggcuacgagaccuucaaggugaucgagggguggagcaaccccaaguccaagcugcagaucaaccgccaggugaucgucgaccggggcaaccgcagcggguacuccggcaucuucagcguggagggcaagagcugcaucaaccggugcuucuacguggagcucauccgcgggcggaaggaggagaccgagguccuguggaccuccaacagcaucgugguguucugcggcaccuccgggacguacggcaccgggagcuggccggacggcgccgacaucaaccugaugcccaucuga

SEQ ID NO: 81627 - RNA, 1410 nt, Artificial Sequence; identical to SEQ ID NO: 80623
  derived and/or modified CDS sequence (opt1) from neuraminidase__InfluenzaA__ACZ05494

SEQ ID NO: 81628 - RNA, 1410 nt, Artificial Sequence; identical to SEQ ID NO: 81616
  derived and/or modified CDS sequence (opt1) from neuraminidase__InfluenzaA__ACZ05516

SEQ ID NO: 81629 - RNA, 1410 nt, Artificial Sequence
  derived and/or modified CDS sequence (opt1) from neuraminidase__InfluenzaA__ACZ05527
augaaccccaaccagaagaucaucaccaucggcagcgugucccugaccaucagcacgaucugcuucuucaugcagaucgccauccucaucaccaccgucacccugcacuucaagcaguacgaguucaacuccccgcccaacaaccaggugaugcugugcgagcccacgaucaucgagcgcaacaucaccgagaucguguaccucaccaacaccacgaucgagaaggagaucugccccaagcuggccgaguaccggaacuggagcaagccgcagugcgacaucaccggguucgcgcccuucuccaaggacaacagcauccgccuguccgccggcggggacaucugggucacccgggagcccuacgugagcugcgaccccgacaagugcuaccaguucgcccucggccaggggaccacgcugaacaacgugcacuccaacaacaccguccgcgaccggaccccguaccgcacccugcucaugaacgagcugggcgugcccuuccaccugggcacgaagcaggucugcaucgccuggagcuccagcuccugccacgacgggaaggccuggcuccacgugugcaucaccggcgacgacaagaacgcgaccgccagcuucaucuacaacgggcggcugguggacuccguggucagcugguccaaggagauccugcgcacccaggagagcgagugcgugugcaucaacggcacgugcaccguggucaugaccgacggguccgccagcggcaaggccgacaccaagauccucuucaucgaggagggcaagaucgugcacacgagcacccuguccgggagcgcgcagcacguggaggagugcuccugcuacccccgguaccccggcguccgcugcgugugccgggacaacuggaaggggagcaaccgcccgaucguggacaucaacaucaaggaccacuccaucgucagcuccuacgugugcagcggccuggugggcgacacgccccggaagaacgacuccagcuccagcucccacugcagcgaccccaacaacgaggagggcgggcacggggucaagggcugggccuucgacgacgggaacgacguguggaugggccgcaccaucuccgagaagucccggcucggcuacgagaccuucaaggucaucgagggguggagcaaccccaagagcaagcugcagaucaaccgccaggugaucguggaccggggcaaccgcuccggguacagcggcaucuucagcgucgaggggaaguccugcaucaaccggugcuucuacguggagcugauccgcggccggaaggaggagaccgaggugcucuggaccagcaacuccaucgucguguucugcggcaccagcgggacguacggcaccggguccuggccggacggcgccgacaucaaccugaugcccaucuga

SEQ ID NO: 81630 - RNA, 1410 nt, Artificial Sequence; identical to SEQ ID NO: 81613
  derived and/or modified CDS sequence (opt1) from neuraminidase__InfluenzaA__ACZ05538

SEQ ID NO: 81631 - RNA, 1413 nt, Artificial Sequence; identical to SEQ ID NO: 81485
  derived and/or modified CDS sequence (opt1) from neuraminidase__InfluenzaA__ACZ05593

SEQ ID NO: 81632 - RNA, 1413 nt, Artificial Sequence
  derived and/or modified CDS sequence (opt1) from neuraminidase__InfluenzaA__ACZ05604
augaaccccaaccagaagaucaucaccaucggcagcaucuccaucgccaucgggaucaucagccugaugcuccagaucggcaacaucaucuccaucugggccagccacuccauccagaccgggagccagaacaacacgggcaucugcaaccagcgcaucaucaccuacgagaacuccaccugggugaaccacaccuacgucaacaucaacaacacgaacgugguggcgggggaggacaagaccagcgucacccuggccggcaacuccagccugugcuccauccggggcugggccaucuacaccaaggacaacagcauccgcaucggguccaagggcgacguguucgugauccgggagccguucaucagcugcucccaccucgagugccgcacguucuuccugacccagggggcccugcucaacgacaagcacagcaacggcaccgucaaggaccggucccccuaccgcgcccugaugagcugcccccugggggaggcgcccuccccguacaacagcaaguucgagagcguggccugguccgccagcgccugccacgacggcaugggcuggcucaccaucgggaucuccggccccgacaacggggcgguggccguccugaaguacaacggcaucaucacgggcaccaucaagagcuggaagaagcagauccugcggacccaggaguccgagugcgugugcaugaacgggagcugcuucaccaucaugacggacggccccuccaacaaggccgccagcuacaagaucuucaagaucgagaaggggaaggugaccaaguccaucgagcucaacgcccccaacuucuacuacgaggagugcagcugcuacccggacaccggcaucgucaugugcgugugccgcgacaacuggcacggguccaaccggcccugggugagcuucaaccagaaccuggacuaccagaucggcuacaucugcuccggcgucuucggggacaacccccgccccgaggacggcgaggggagcugcaacccggugaccguggacggcgcgaacggggucaagggcuucuccuacaaguacggcaacgggguguggaucggccggaccaagagcaaccgccugcggaagggguucgagaugaucugggaccccaacggcuggacgaacaccgacuccgacuucagcgugaagcaggacgucguggccaucaccgacugguccggguacagcggcagcuucgugcagcaccccgagcucacgggccuggacugcauccgccccugcuucugggucgagcuggugcgggggcucccgcgcgagaacaccaccaucuggaccuccggcagcuccaucagcuucugcggggucaacuccgacacggccaacuggagcuggcccgacggcgccgagcugcccuucaccaucgacaaguga

SEQ ID NO: 81633 - RNA, 1410 nt, Artificial Sequence; identical to SEQ ID NO: 80623
  derived and/or modified CDS sequence (opt1) from neuraminidase__InfluenzaA__ACZ05953

SEQ ID NO: 81634 - RNA, 1410 nt, Artificial Sequence; identical to SEQ ID NO: 81629
  derived and/or modified CDS sequence (opt1) from neuraminidase__InfluenzaA__ACZ05964

SEQ ID NO: 81635 - RNA, 1410 nt, Artificial Sequence; identical to SEQ ID NO: 80623
  derived and/or modified CDS sequence (opt1) from neuraminidase__InfluenzaA__ACZ05997

SEQ ID NO: 81636 - RNA, 1410 nt, Artificial Sequence; identical to SEQ ID NO: 81629
  derived and/or modified CDS sequence (opt1) from neuraminidase__InfluenzaA__ACZ06008

SEQ ID NO: 81637 - RNA, 1410 nt, Artificial Sequence; identical to SEQ ID NO: 81629
  derived and/or modified CDS sequence (opt1) from neuraminidase__InfluenzaA__ACZ06019

SEQ ID NO: 81638 - RNA, 1413 nt, Artificial Sequence
  derived and/or modified CDS sequence (opt1) from neuraminidase__InfluenzaA__ACZ16015
augaaccccaaccagaagaucaucaccaucggcagcaucuccaucgccaucgggaucaucagccugaugcuccagaucggcaacaucaucuccaucugggccagccacuccauccagaccgggagccagaacaacacgggcaucugcaaccagcgcaucaucaccuacgagaacuccaccugggugaaccacaccuacgucaacaucaacaacacgaacgugguggcgggggaggacaagaccagcgucacccuggccggcaacuccagccugugcuccaucagcggcugggccaucuacaccaaggacaacuccauccggaucgggagcaagggcgacguguucgugauccgcgagccguucaucuccugcagccaccucgagugccggacguucuuccugacccagggggcccugcucaacgacaagcacuccaacggcaccgucaaggaccgcagccccuaccgggcccugauguccugcccccugggggaggcgcccagcccguacaacagcaaguucgaguccguggccuggagcgccuccgccugccacgacggcaugggcuggcucaccaucgggaucagcggccccgacaacggggcgguggccguccugaaguacaacggcaucaucacgggcaccaucaaguccuggaagaagcagauccugcgcacccaggagagcgagugcgugugcaugaacggguccugcuucaccaucaugacggacggccccagcaacaaggccgccuccuacaagaucuucaagaucgagaaggggaaggugagcaaguccaucgagcucaacgcccccaacuucuacuacgaggagugcagcugcuacccggacaccggcaucgucaugugcgugugccgggacaacuggcacggguccaaccgccccugggugagcuucaaccagaaccuggacuaccagaucggcuacaucugcuccggcgucuucggggacaacccccggcccgaggacggcgaggggagcugcaacccggugaccguggacggcgcgaacggggucaagggcuucuccuacaaguacggcaacgggguguggaucggccgcaccaagagcaaccggcugcgcaagggguucgagaugaucugggaccccaacggcuggacgaacaccgacuccgacuucagcgugaagcaggacgucguggccaucaccgacuggagcggguacuccggcagcuucgugcagcaccccgagcucaccggccuggacugcauccggcccugcuucugggucgagcuggugcgcgggcucccgcgggagaacacgaccaucuggaccuccggcagcuccaucagcuucugcggggucaacuccgacaccgccaacuggagcuggcccgacggcgccgagcugcccuucacgaucgacaaguga

SEQ ID NO: 81639 - RNA, 1413 nt, Artificial Sequence
  derived and/or modified CDS sequence (opt1) from neuraminidase__InfluenzaA__ACZ16025
augaaccccaaccagaagaucaucaccaucggcagcaucuccaucgccaucgggaucaucagccugaugcuccagaucggcaacaucaucuccaucugggccagccacuccauccagaccgggagccagaacaacacgggcaucugcaaccagcgcaucaucaccuacgagaacuccaccugggugaaccacaccuacgucaacaucaacaacacgaacgugguggcgggggaggacaagaccagcgucacccuggccggcaacuccagccugugcuccaucagcggcugggccaucuacaccaaggacaacuccauccggaucgggagcaagggcgacguguucgugauccgcgagccguucaucuccugcagccaccucgagugccggacguucuuccugacccagggggcccugcucaacgacaagcacuccaacggcaccaucaaggaccgcagccccuaccgggcccugauguccugcccccugggggaggcgcccagcccguacaacagcaaguucgaguccgucgccuggagcgccuccgccugccacgacggcaugggcuggcucaccaucgggaucagcggccccgacaacggggcgguggccgugcugaaguacaacggcaucaucacgggcaccaucaaguccuggaagaagcagauccugcgcacccaggagagcgagugcgucugcaugaacggguccugcuucaccaucaugacggacggccccagcaacaaggccgccuccuacaagaucuucaagaucgagaaggggaaggugaccaagagcaucgagcucaacgcccccaacuucuacuacgaggagugcuccugcuacccggacaccggcaucgugaugugcgucugccgggacaacuggcacgggagcaaccgccccuggguguccuucaaccagaaccuggacuaccagaucggcuacaucugcagcggcguguucggggacaacccccggcccgaggacggcgagggguccugcaacccggucaccguggacggcgcgaacggggugaagggcuucagcuacaaguacggcaacggggucuggaucggccgcacgaaguccaaccggcugcgcaagggguucgagaugaucugggaccccaacggcuggaccaacaccgacagcgacuucuccgugaagcaggacguggucgccaucaccgacuggagcggguacagcggcuccuucgugcagcaccccgagcucacgggccuggacugcauccggcccugcuucuggguggagcugguccgcgggcucccgcgggagaacaccaccaucuggaccagcggcuccagcaucuccuucugcggggugaacagcgacacggccaacugguccuggcccgacggcgccgagcugcccuucaccaucgacaaguga

SEQ ID NO: 81640 - RNA, 1413 nt, Artificial Sequence; identical to SEQ ID NO: 81485
  derived and/or modified CDS sequence (opt1) from neuraminidase__InfluenzaA__ACZ16035

SEQ ID NO: 81641 - RNA, 1410 nt, Artificial Sequence
  derived and/or modified CDS sequence (opt1) from neuraminidase__InfluenzaA__ACZ16043
augaaccccaaccagaagaucaucaccaucggcagcgugugcaugaccaucgggauggccaaccugauccuccagaucggcaacaucaucuccaucuggaucagccacuccauccagcuggggaaccagaaccagaucgagacgugcaaccagagcgucaucaccuacgagaacaacaccugggugaaccagaccuacgugaacaucuccaacacgaacuucgccgcgggccagagcgucguguccgugaagcuggccgggaacagcucccucugcccggucagcggcugggccaucuacuccaaggacaacaacauccgcaucggcagcaagggggacguguucgugauccgggagcccuucaucuccugcagcccccuggagugccgcaccuucuuccugacccagggcgcccuccugaacgacaagcacuccaacgggaccaucaaggaccggagccccuaccgcacgcugauguccugcccgaucggcgagguccccagccccuacaacucccgguucgagagcguggccuggagcgcguccgccugccacgacgggaucaacuggcucaccaucggcaucagcggccccgacaacggggccguggccguccugaaguacaacggcaucaucaccgacaccaucaaguccuggcgcaacaacauccugcggacgcaggagagcgagugcgcgugcgugaacggguccugcuucaccgugaugaccgacggcccgagcgacggccaggccuccuacaagaucuuccgcaucgagaaggggaagaucgucaagagcguggagaugaacgcccccaacuaccacuacgaggagugcuccugcuaccccgacagcuccgagaucacgugcgugugccgggacaacuggcacggcagcaaccgccccugggucuccuucaaccagaaccucgaguaccagaucggguacaucugcagcggcaucuucggggacaacccgcggcccaacgacaagaccggcuccugcggccccgugagcuccaacggggccaacggcgugaagggguucagcuucaaguacggcaacggggucuggaucggccgcaccaaguccaucagcagccggaacggcuucgagaugaucugggaccccaacggguggaccggcaccgacaacaacuucuccaucaagcaggacaucguggggaucaacgaguggagcggcuacuccgggagcuucgugcagcacccggagcugacgggccuggacugcauccgccccugcuucugggucgagcucauccggggccgccccaaggagaacaccaucuggaccuccgggagcuccaucagcuucugcggcgugaacuccgacaccgucggguggagcuggcccgacggcgccgagcugccguucacgaucgacaaguga

SEQ ID NO: 81642 - RNA, 1410 nt, Artificial Sequence
  derived and/or modified CDS sequence (opt1) from neuraminidase__InfluenzaA__ACZ16053
augaaccccaaccagaagaucaucaccaucggcagcgugugcaugaccaucgggauggccaaccugauccuccagaucggcaacaucaucuccaucuggaucagccacuccauccagcuggggaaccagaaccagaucgagacgugcaaccagagcgucaucaccuacgagaacaacaccugggugaaccagaccuacgugaacaucuccaacacgaacuucgccgcgggccagagcgucguguccgugaagcuggccgggaacagcucccucugcccggucagcggcugggccaucuacuccaaggacaacagcgugcgcaucggcuccaagggggacguguucgucauccgggagcccuucaucagcugcagcccccuggagugccgcaccuucuuccugacccagggcgcccuccugaacgacaagcacuccaacgggaccaucaaggaccggucccccuaccgcacgcugaugagcugcccgaucggcgaggugcccucccccuacaacagccgguucgagagcguggccugguccgcgagcgccugccacgacgggaucaacuggcucaccaucggcaucuccggccccgacaacggggccgucgccgugcugaaguacaacggcaucaucaccgacaccaucaagagcuggcgcaacaacauccugcggacgcaggaguccgagugcgcgugcgugaacgggagcugcuucaccgucaugaccgacggcccguccaacggccaggccagcuacaagaucuuccgcaucgagaaggggaagaucgugaaguccguggagaugaacgcccccaacuaccacuacgaggagugcagcugcuaccccgacuccagcgagaucacgugcgucugccgggacaacuggcacggcuccaaccgccccugggugagcuucaaccagaaccucgaguaccagaucggguacaucugcuccggcaucuucggggacaacccgcggcccaacgacaagaccggcagcugcggccccguguccagcaacggggccaacggcgucaagggguucuccuucaaguacggcaacgggguguggaucggccgcaccaagagcaucagcucccggaacggcuucgagaugaucugggaccccaacggguggaccggcaccgacaacaacuucagcacgaagcaggacaucguggggaucaacgagugguccggcuacagcggguccuucguccagcacccggagcugaccggccuggacugcauccgccccugcuucuggguggagcucauccggggccgccccaaggagaacaccaucuggaccagcggguccagcaucuccuucugcggcgucaacagcgacacgguggggugguccuggcccgacggcgccgagcugccguucaccaucgacaaguga

SEQ ID NO: 81643 - RNA, 1410 nt, Artificial Sequence; identical to SEQ ID NO: 80752
  derived and/or modified CDS sequence (opt1) from neuraminidase__InfluenzaA__ACZ16073

SEQ ID NO: 81644 - RNA, 1410 nt, Artificial Sequence
  derived and/or modified CDS sequence (opt1) from neuraminidase__InfluenzaA__ACZ16083
augaaccccaaccagaagaucaucaccaucggcagcgugugcaugaccaucgggauggccaaccugauccuccagaucggcaacaucaucuccaucuggaucagccacuccauccagcuggggaaccagaaccagaucgagacgugcaaccagagcgucaucaccuacgagaacaacaccugggugaaccagaccuacgugaacaucuccaacacgaacuucgccgcgcgccagagcgucguguccgugaagcuggccggcaacagcucccucugcccggucagcgggugggccaucuacuccaaggacaacagcgugcggaucggcuccaagggcgacguguucgucauccgcgagcccuucaucagcugcagcccccuggggugccggaccuucuuccugacccagggcgcccuccugaacgacaagcacuccaacgggaccaucaaggaccgcucccccuaccggacgcugaugagcugcccgaucggcgaggugcccucccccuacaacagccgcuucgagagcguggccugguccgcgagcgccugccacgacgggaucaacuggcucaccaucggcaucuccggccccgacaacggggccgucgccgugcugaaguacaacggcaucaucaccgacaccaucaagagcuggcggaacaacauccugcgcacgcaggaguccgagugcgcgugcgugaacgggagcugcuucaccgucaugaccgacggcccguccaacggccaggccagcuacaagaucuuccggaucgagaaggggaagaucgugaaguccguggagaugaacgcccccaacuaccacuacgaggagugcagcugcuaccccgacuccagcgagaucacgugcgucugccgcgacaacuggcacggcuccaaccggcccugggugagcuucaaccagaaccucgaguaccagaucggguacaucugcuccggcaucuucggggacaacccgcgccccaacgacaagaccggcagcugcggccccguguccagcaacggggccaacggcgucaagggguucuccuucaaguacggcaacgggguguggaucggccggaccaagagcaucagcucccgcaacggcuucgagaugaucugggaccccaacggguggaccggcaccgacaacaacuucagcaucaagcaggacaucguggggaucaacgagugguccggcuacagcggguccuucguccagcacccggagcugacgggccuggacugcauccggcccugcuucuggaucgagcucauccgcggccggcccaaggagaacaccaucuggaccagcggguccagcaucuccuucugcggcgugaacagcgacaccgucgggugguccuggcccgacggcgccgagcugccguucacgaucgacaaguga

SEQ ID NO: 81645 - RNA, 1410 nt, Artificial Sequence; identical to SEQ ID NO: 80752
  derived and/or modified CDS sequence (opt1) from neuraminidase__InfluenzaA__ACZ16093

SEQ ID NO: 81646 - RNA, 1410 nt, Artificial Sequence; identical to SEQ ID NO: 80762
  derived and/or modified CDS sequence (opt1) from neuraminidase__InfluenzaA__ACZ16103

SEQ ID NO: 81647 - RNA, 1410 nt, Artificial Sequence; identical to SEQ ID NO: 80762
  derived and/or modified CDS sequence (opt1) from neuraminidase__InfluenzaA__ACZ16113

SEQ ID NO: 81648 - RNA, 1410 nt, Artificial Sequence; identical to SEQ ID NO: 80762
  derived and/or modified CDS sequence (opt1) from neuraminidase__InfluenzaA__ACZ16123

SEQ ID NO: 81649 - RNA, 1410 nt, Artificial Sequence
  derived and/or modified CDS sequence (opt1) from neuraminidase__InfluenzaA__ACZ16133
augaaccccaaccagaagaucaucaccaucggcagcgugugcaugaccaucgggauggccaaccugauccuccagaucggcaacaucaucuccaucuggaucagccacuccauccagcuggggaaccagaaccagaucgagacgugcaaccagagcgucaucaccuacgagaacaacaccugggugaaccagaccuacgugaacaucuccaacacgaacuucgccgcgggccagagcgucguguccgugaagcuggccgggaacagcucccucugcccggucagcggcugggccaucuacuccaaggacaacagcauccgcaucggcuccaagggggacguguucgugauccgggagcccuucaucagcugcagcccccuggagugccgcaccuucuuccugacccagggcgcccuccugaacgacaagcacuccaacgggaccaucaaggaccggucccccuaccgcacgcugaugagcugcccgaucggcgagguccccucccccuacaacagccgguucgagagcguggccugguccgcgagcgccugccacgacgggaucaacuggcucaccaucggcaucuccggccccgacaacggggccguggccguccugaaguacaacggcaucaucaccgacaccaucaagagcuggcgcaacaacauccugcggacgcaggaguccgagugcgcgugcgugaacgggagcugcuucaccaucaugaccgacggcccguccgacggccaggccagcuacaagaucuuccgcaucgagaaggggaagaucgugaaguccgucgagaugaacgcccccaacuaccacuacgaggagugcagcugcuaccccgacuccagcgagaucacgugcgugugccgggacaacuggcacggcuccaaccgccccugggugagcuucaaccagaaccucgaguaccagaucggguacaucugcuccggcaucuucggggacaacccgcggcccaacgacaagaccggcagcugcggccccgucuccagcaacggggccaacggcgugaagggguucuccuucaaguacggcaacgggguguggaucggccgcaccaagagcaucagcucccggaacggcuucgagaugaucugggaccccaacggguggaccggcaccgacaacaacuucagcaucaagcaggacaucgucgggaucaacgagugguccggcuacagcggguccuucgugcagcacccggagcugacgggccuggacugcauccgccccugcuucuggguggagcucauccggggccgccccaaggagaacaccaucuggaccagcggguccagcaucuccuucugcggcgucaacagcgacaccguggggugguccuggcccgacggcgccgagcugccguucacgaucgacaaguga

SEQ ID NO: 81650 - RNA, 1410 nt, Artificial Sequence
  derived and/or modified CDS sequence (opt1) from neuraminidase__InfluenzaA__ACZ16143
augaaccccaaccagaagaucaucaccaucggcagcgugugcaugaccaucgggauggccaaccugauccuccagaucggcaacaucaucuccaucuggaucagccacuccauccagcuggggaaccagaaccagaucgagacgugcaaccagagcgucaucaccuacgagaacaacaccugggugaaccagaccuacgugaacaucuccaacacgaacuucgccgcgggccagagcgucguguccgugaagcuggccgggaacagcucccucugcccggucagcggcugggccaucuacuccaaggacaacagcauccgcaucggcuccaagggggacguguucgugauccgggagcccuucaucagcugcagcccccuggagugccgcaccuucuuccugacccagggcgcccuccugaacgacaagcacuccaacgggaccaucaaggaccggucccccuaccgcacgcugaugagcugcccgaucggcgagguccccucccccuacaacagccgguucgagagcguggccugguccgcgagcgccugccacgacgggaucaacuggcucaccaucggcaucuccggccccgacaacggggccguggccguccugaaguacaacggcaucaucaccgacaccaucaagagcuggcgcaacaacauccugcggacgcaggaguccgagugcgcgugcgugaacgggagcugcuucaccgugaugaccgacggcccguccgacggccaggccagcuacaagaucuuccgcaucgagaaggggaagaucgucaaguccguggagaugaacgcccccaacuaccacuacgaggagugcagcugcuaccccgacuccagcgagaucacgugcgugugccgggacaacuggcacggcuccaaccgccccugggucagcuucaaccagaaccucgaguaccagaucggguacaucugcuccggcaucuucggggacaacccgcggcccaacgacaagaccggcagcugcggcccccuguccagcaacggggccaacggcgugaagggguucuccuucaaguacggcaacgggguguggaucggccgcaccaagagcaucagcucccggaacggcuucgagaugaucugggaccccaacggguggaccggcaccgacaacaacuucagcaucaagcaggacaucgucgggaucaacgagugguccggcuacagcggguccuucgugcagcacccggagcugacgggccucgacugcauccgccccugcuucuggguggagcugauccggggccgccccaaggagaacaccaucuggaccagcggguccagcaucuccuucugcggcgucaacagcgacaccguggggugguccuggcccgacggcgccgagcugccguucacgaucgacaaguga

SEQ ID NO: 81651 - RNA, 1410 nt, Artificial Sequence; identical to SEQ ID NO: 80762
  derived and/or modified CDS sequence (opt1) from neuraminidase__InfluenzaA__ACZ16153

SEQ ID NO: 81652 - RNA, 1410 nt, Artificial Sequence; identical to SEQ ID NO: 80762
  derived and/or modified CDS sequence (opt1) from neuraminidase__InfluenzaA__ACZ16163

SEQ ID NO: 81653 - RNA, 1410 nt, Artificial Sequence; identical to SEQ ID NO: 80752
  derived and/or modified CDS sequence (opt1) from neuraminidase__InfluenzaA__ACZ16173

SEQ ID NO: 81654 - RNA, 1410 nt, Artificial Sequence; identical to SEQ ID NO: 80762
  derived and/or modified CDS sequence (opt1) from neuraminidase__InfluenzaA__ACZ16193

SEQ ID NO: 81655 - RNA, 1410 nt, Artificial Sequence; identical to SEQ ID NO: 80762
  derived and/or modified CDS sequence (opt1) from neuraminidase__InfluenzaA__ACZ16203

SEQ ID NO: 81656 - RNA, 1410 nt, Artificial Sequence; identical to SEQ ID NO: 80762
  derived and/or modified CDS sequence (opt1) from neuraminidase__InfluenzaA__ACZ16213

SEQ ID NO: 81657 - RNA, 1410 nt, Artificial Sequence
  derived and/or modified CDS sequence (opt1) from neuraminidase__InfluenzaA__ACZ16223
augaaccccaaccagaagaucaucaccaucggcagcgugugcaugaccaucgggauggccaaccugauccuccagaucggcaacaucaucuccaucuggaucagccacuccauccagcuggggaaccagaaccagaucgagacgugcaaccagagcgucaucaccuacgagaacaacaccugggugaaccagaccuacgugaacaucuccaacacgaacuucgccgcgggccagagcgucguguccgugaagcuggccgggaacagcucccucugcccggucagcggcugggccaucuacuccaaggacaacagcauccgcaucggcuccaagggggacguguucgugauccgggagcccuucaucagcugcagcccccuggagugccgcaccuucuuccugacccagggcgcccuccugaacgacaagcacuccaacgagaccaucaaggaccggucccccuaccgcacgcugaugagcugcccgaucggggagguccccucccccuacaacagccgguucgagagcguggccugguccgcgagcgccugccacgacggcaucaacuggcucaccaucgggaucuccggccccgacaacggcgccguggccguccugaaguacaacgggaucaucaccgacaccaucaagagcuggcgcaacaacauccugcggacgcaggaguccgagugcgcgugcgugaacggcagcugcuucaccgugaugaccgacgggccguccgacggccaggccagcuacaagaucuuccgcaucgagaagggcaagaucgucaaguccguggagaugaacgcccccaacuaccacuacgaggagugcagcugcuaccccgacuccagcgagaucacgugcgugugccgggacaacuggcacggguccaaccgccccugggucagcuucaaccagaaccucgaguaccagaucggcuacaucugcuccgggaucuucggcgacaacccgcggcccaacgacaagaccgggagcugcggccccguguccagcaacggcgccaacggggugaagggcuucuccuucaaguacgggaacggcgucuggaucgggcgcaccaagagcaucagcucccggaacggcuucgagaugaucugggaccccaacggcuggaccgggaccgacaacaacuucagcaucaagcaggacaucaucggcaucaacgagugguccggguacagcggcuccuucgugcagcacccggagcugacggggcuggacugcauccgccccugcuucuggguggagcucauccggggccgccccaaggagaacaccaucuggaccagcggcuccagcaucuccuucugcggggucaacagcgacaccgugggcugguccuggcccgacggggccgagcugccguucacgaucgacaaguga

SEQ ID NO: 81658 - RNA, 1410 nt, Artificial Sequence; identical to SEQ ID NO: 80762
  derived and/or modified CDS sequence (opt1) from neuraminidase__InfluenzaA__ACZ16233

SEQ ID NO: 81659 - RNA, 1410 nt, Artificial Sequence; identical to SEQ ID NO: 81470
  derived and/or modified CDS sequence (opt1) from neuraminidase__InfluenzaA__ACZ16243

SEQ ID NO: 81660 - RNA, 1410 nt, Artificial Sequence
  derived and/or modified CDS sequence (opt1) from neuraminidase__InfluenzaA__ACZ16253
augaaccccaaccagaagaucaucaccaucggcagcgugugcaugaccaucgggauggccaaccugauccuccagaucggcaacaucaucuccaucuggaucagccacuccauccagcuggggaaccagaaccagaucgagacgugcaaccagagcgucaucaccuacgagaacaacaccugggugaaccagaccuacgugaacaucuccaacacgaacuucgccgcgggccagagcgucguguccgugaagcuggccgggaacagcucccucugcccggucagcggcugggccaucuacuccaaggacaacagcauccgcaucggcuccaagggggacguguucgugauccgggagcccuucaucagcugcagcccccuggagugccgcaccuucuuccugacccagggcgcccuccugaacgacaagcacuccaacgggaccaucaaggaccggucccccuaccgcacgcugaugagcugcccgaucggcgagguccccucccccuacaacagccgguucgagagcguggccugguccgcgagcgccugccacgacgggaucaacuggcucaccaucggcaucuccggccccgacaacggggccguggccguccugaaguacaacggcaucaucaccgacaccaucaagagcuggcgcaacaacauccugcggacgcaggaguccgagugcgcgugcgugaacgggagcugcuucaccgugaugaccgacggcccguccgacggccaggccagcuacaagaucuuccgcaucgagaaggggaagaucgucaaguccguggagaugaacgcccccaacuaccacuacgaggagugcagcugcuaccccgacuccagcgagaucacgugcgugugccgggacaacuggcacggcuccaaccgccccugggucagcuucaaccagaaccucgaguaccagaucggguacaucugcuccggcaucuucggggacaacccgcggcccaacgacaagaccggcagcugcggccccguguccagcaacggggccaacggcgugaagggguucuccuucaaguacggcaacggggucuggaucggccgcaccaagagcaucagcucccggaacggcuucgagaugaucugggaccccaacggguggaccggcaccgacaacaacuucagcaucaagcaggacaucguggggaucaacgagugguccggcuacagcggguccuucgugcagcacccggagcugacgggccuggacugcauccgccccugcuucugggucgagcucauccggggccgccccaaggagaacaccaucuggaccagcggguccagcaucuccuucugcggcgugaacagcgacaccgucgggugguccuggcccgacggcgccgagcugccguucaacaucgacaaguga

SEQ ID NO: 81661 - RNA, 1410 nt, Artificial Sequence; identical to SEQ ID NO: 80762
  derived and/or modified CDS sequence (opt1) from neuraminidase__InfluenzaA__ACZ16263

SEQ ID NO: 81662 - RNA, 1410 nt, Artificial Sequence; identical to SEQ ID NO: 80752
  derived and/or modified CDS sequence (opt1) from neuraminidase__InfluenzaA__ACZ16283

SEQ ID NO: 81663 - RNA, 1410 nt, Artificial Sequence; identical to SEQ ID NO: 80762
  derived and/or modified CDS sequence (opt1) from neuraminidase__InfluenzaA__ACZ16293

SEQ ID NO: 81664 - RNA, 1410 nt, Artificial Sequence; identical to SEQ ID NO: 80762
  derived and/or modified CDS sequence (opt1) from neuraminidase__InfluenzaA__ACZ16303

SEQ ID NO: 81665 - RNA, 1410 nt, Artificial Sequence; identical to SEQ ID NO: 80762
  derived and/or modified CDS sequence (opt1) from neuraminidase__InfluenzaA__ACZ16313

SEQ ID NO: 81666 - RNA, 1410 nt, Artificial Sequence; identical to SEQ ID NO: 80762
  derived and/or modified CDS sequence (opt1) from neuraminidase__InfluenzaA__ACZ16323

SEQ ID NO: 81667 - RNA, 1410 nt, Artificial Sequence; identical to SEQ ID NO: 80762
  derived and/or modified CDS sequence (opt1) from neuraminidase__InfluenzaA__ACZ16333

SEQ ID NO: 81668 - RNA, 1410 nt, Artificial Sequence; identical to SEQ ID NO: 81470
  derived and/or modified CDS sequence (opt1) from neuraminidase__InfluenzaA__ACZ16343

SEQ ID NO: 81669 - RNA, 1410 nt, Artificial Sequence; identical to SEQ ID NO: 80762
  derived and/or modified CDS sequence (opt1) from neuraminidase__InfluenzaA__ACZ16353

SEQ ID NO: 81670 - RNA, 1410 nt, Artificial Sequence; identical to SEQ ID NO: 80762
  derived and/or modified CDS sequence (opt1) from neuraminidase__InfluenzaA__ACZ16363

SEQ ID NO: 81671 - RNA, 1410 nt, Artificial Sequence; identical to SEQ ID NO: 80752
  derived and/or modified CDS sequence (opt1) from neuraminidase__InfluenzaA__ACZ16373

SEQ ID NO: 81672 - RNA, 1410 nt, Artificial Sequence; identical to SEQ ID NO: 80762
  derived and/or modified CDS sequence (opt1) from neuraminidase__InfluenzaA__ACZ16383

SEQ ID NO: 81673 - RNA, 1410 nt, Artificial Sequence; identical to SEQ ID NO: 80762
  derived and/or modified CDS sequence (opt1) from neuraminidase__InfluenzaA__ACZ16393

SEQ ID NO: 81674 - RNA, 1410 nt, Artificial Sequence; identical to SEQ ID NO: 80762
  derived and/or modified CDS sequence (opt1) from neuraminidase__InfluenzaA__ACZ16403

SEQ ID NO: 81675 - RNA, 1410 nt, Artificial Sequence; identical to SEQ ID NO: 80762
  derived and/or modified CDS sequence (opt1) from neuraminidase__InfluenzaA__ACZ16423

SEQ ID NO: 81676 - RNA, 1410 nt, Artificial Sequence; identical to SEQ ID NO: 80762
  derived and/or modified CDS sequence (opt1) from neuraminidase__InfluenzaA__ACZ16433

SEQ ID NO: 81677 - RNA, 1410 nt, Artificial Sequence; identical to SEQ ID NO: 80762
  derived and/or modified CDS sequence (opt1) from neuraminidase__InfluenzaA__ACZ16443

SEQ ID NO: 81678 - RNA, 1410 nt, Artificial Sequence; identical to SEQ ID NO: 80762
  derived and/or modified CDS sequence (opt1) from neuraminidase__InfluenzaA__ACZ16453

SEQ ID NO: 81679 - RNA, 1410 nt, Artificial Sequence; identical to SEQ ID NO: 81470
  derived and/or modified CDS sequence (opt1) from neuraminidase__InfluenzaA__ACZ16463

SEQ ID NO: 81680 - RNA, 1410 nt, Artificial Sequence; identical to SEQ ID NO: 80762
  derived and/or modified CDS sequence (opt1) from neuraminidase__InfluenzaA__ACZ16483

SEQ ID NO: 81681 - RNA, 1410 nt, Artificial Sequence; identical to SEQ ID NO: 80762
  derived and/or modified CDS sequence (opt1) from neuraminidase__InfluenzaA__ACZ16493

SEQ ID NO: 81682 - RNA, 1410 nt, Artificial Sequence
  derived and/or modified CDS sequence (opt1) from neuraminidase__InfluenzaA__ACZ16503
augaaccccaaccagaagaucaucaccaucggcagcgugugcaugaccaucgggauggccaaccugauccuccagaucggcaacaucaucuccaucuggaucagccacuccauccagcuggggaaccagaaccagaucgagacgugcaaccagagcgucaucaccuacgagaacaacaccugggugaaccagaccuacgugaacaucuccaacacgaacuucgccgcgggccagagcgucguguccgugaagcuggccgggaacagcucccucugcccggucagcggcugggccaucuacuccaaggacaacagcauccgcaucggcuccaagggggacguguucgugauccgggagcccuucaucagcugcagcccccuggagugccgcaccuucuuccugacccagggcgcccuccugaacgacaagcacuccaacgggaccaucaaggaccggucccccuaccgcacgcugaugagcugcccgaucggcgagguccccucccccuacaacagccgguucgagagcguggccugguccgcgagcgccugccacgacgggaucaacuggcucaccaucggcaucuccggccccgacaacggggccguggccguccugaaguacaacggcaucaucaccgacaccaucaagagcuggcgcaacaacauccugcggacgcaggaguccgagugcgcgugcgugaacgggagcugcuucaccgugaugaccgacggcccguccgacggccaggccagcuacaagaucuuccgcaucgagaaggggaagaucgucaaguccguggagauggacgcccccaacuaccacuacgaggagugcagcugcuaccccgacuccagcgagaucacgugcgugugccgggacaacuggcacggcuccaaccgccccugggucagcuucaaccagaaccucgaguaccagaucggguacaucugcuccggcaucuucggggacaacccgcggcccaacgacaagaccggcagcugcggccccguguccagcaacggggccaacggcgugaagggguucuccuucaaguacggcaacggggucuggaucggccgcaccaagagcaucagcucccggaacggcuucgagaugaucugggaccccaacggguggaccggcaccgacaacaacuucagcaucaagcaggacaucguggggaucaacgagugguccggcuacagcggguccuucgugcagcacccggagcugacgggccuggacugcauccgccccugcuucugggucgagcucauccggggccgccccaaggagaacaccaucuggaccagcggguccagcaucuccuucugcggcgugaacagcgacaccgucgggugguccuggcccgacggcgccgagcugccguucacgaucgacaaguga

SEQ ID NO: 81683 - RNA, 1410 nt, Artificial Sequence; identical to SEQ ID NO: 81470
  derived and/or modified CDS sequence (opt1) from neuraminidase__InfluenzaA__ACZ16513

SEQ ID NO: 81684 - RNA, 1410 nt, Artificial Sequence; identical to SEQ ID NO: 80762
  derived and/or modified CDS sequence (opt1) from neuraminidase__InfluenzaA__ACZ16523

SEQ ID NO: 81685 - RNA, 1410 nt, Artificial Sequence; identical to SEQ ID NO: 80762
  derived and/or modified CDS sequence (opt1) from neuraminidase__InfluenzaA__ACZ16533

SEQ ID NO: 81686 - RNA, 1410 nt, Artificial Sequence; identical to SEQ ID NO: 80752
  derived and/or modified CDS sequence (opt1) from neuraminidase__InfluenzaA__ACZ16543

SEQ ID NO: 81687 - RNA, 1410 nt, Artificial Sequence; identical to SEQ ID NO: 80762
  derived and/or modified CDS sequence (opt1) from neuraminidase__InfluenzaA__ACZ16553

SEQ ID NO: 81688 - RNA, 1410 nt, Artificial Sequence; identical to SEQ ID NO: 80762
  derived and/or modified CDS sequence (opt1) from neuraminidase__InfluenzaA__ACZ16586

SEQ ID NO: 81689 - RNA, 1410 nt, Artificial Sequence; identical to SEQ ID NO: 80762
  derived and/or modified CDS sequence (opt1) from neuraminidase__InfluenzaA__ACZ16596

SEQ ID NO: 81690 - RNA, 1410 nt, Artificial Sequence; identical to SEQ ID NO: 80762
  derived and/or modified CDS sequence (opt1) from neuraminidase__InfluenzaA__ACZ16606

SEQ ID NO: 81691 - RNA, 1410 nt, Artificial Sequence; identical to SEQ ID NO: 80762
  derived and/or modified CDS sequence (opt1) from neuraminidase__InfluenzaA__ACZ16633

SEQ ID NO: 81692 - RNA, 1410 nt, Artificial Sequence
  derived and/or modified CDS sequence (opt1) from neuraminidase__InfluenzaA__ACZ16643
augaaccccaaccagaagaucaucaccaucggcagcgugugcaugaccaucgggauggccaaccugauccuccagaucggcaacaucaucuccaucuggaucagccacuccauccagcuggggaaccagaaccagaucgagacgugcaaccagagcgucaucaccuacgagaacaacaccugggugaaccagaccuacgugaacaucuccaacacgaacuucgccgcgggccagagcgucguguccgugaagcuggccgggaacagcucccucugcccggucagcggcugggccaucuacuccaaggacaacagcauccgcaucggcuccaagggggacguguucgugauccgggagcccuucaucagcugcagcccccuggagugccgcaccuucuuccugacccagggcgcccuccugaacgacaagcacuccaacgggaccaucaaggaccggucccccuaccgcacgcugaugagcugcccgaucggcgagguccccucccccuacaacagccgguucgagagcguggccugguccgcgagcgccugccacgacgggaucaacuggcucaccaucggcaucuccggccccgacaacggggccguggccguccugcgcuacaacggcaucaucaccgacaccaucaagagcuggcggaacaacauccugcgcacgcaggaguccgagugcgcgugcgugaacgggagcugcuucaccgugaugaccgacggcccguccgacggccaggccagcuacaagaucuuccggaucgagaaggggaagaucgucaaguccguggagaugaacgcccccaacuaccacuacgaggagugcagcugcuaccccgacuccagcgagaucacgugcgugugccgcgacaacuggcacggcuccaaccggcccugggucagcuucaaccagaaccucgaguaccagaucggguacaucugcuccggcaucuucggggacaacccgcgccccaacgacaagaccggcagcugcggccccguguccagcaacggggccaacggcgugaagggguucuccuucaaguacggcaacggggucuggaucggccggaccaagagcaucagcucccgcaacggcuucgagaugaucugggaccccaacggguggaccggcaccgacaacaacuucagcaucaagcaggacaucguggggaucaacgagugguccggcuacagcggguccuucgugcagcacccggagcugacgggccuggacugcauccggcccugcuucugggucgagcucauccgcggccggcccaaggagaacaccaucuggaccagcggguccagcaucuccuucugcggcgugaacagcgacaccgucgggugguccuggcccgacggcgccgagcugccguucacgaucgacaaguga

SEQ ID NO: 81693 - RNA, 1410 nt, Artificial Sequence; identical to SEQ ID NO: 80762
  derived and/or modified CDS sequence (opt1) from neuraminidase__InfluenzaA__ACZ16653

SEQ ID NO: 81694 - RNA, 1410 nt, Artificial Sequence; identical to SEQ ID NO: 80762
  derived and/or modified CDS sequence (opt1) from neuraminidase__InfluenzaA__ACZ16663

SEQ ID NO: 81695 - RNA, 1410 nt, Artificial Sequence; identical to SEQ ID NO: 80762
  derived and/or modified CDS sequence (opt1) from neuraminidase__InfluenzaA__ACZ16673

SEQ ID NO: 81696 - RNA, 1410 nt, Artificial Sequence; identical to SEQ ID NO: 80762
  derived and/or modified CDS sequence (opt1) from neuraminidase__InfluenzaA__ACZ16683

SEQ ID NO: 81697 - RNA, 1410 nt, Artificial Sequence; identical to SEQ ID NO: 80762
  derived and/or modified CDS sequence (opt1) from neuraminidase__InfluenzaA__ACZ16693

SEQ ID NO: 81698 - RNA, 1410 nt, Artificial Sequence; identical to SEQ ID NO: 80762
  derived and/or modified CDS sequence (opt1) from neuraminidase__InfluenzaA__ACZ16703

SEQ ID NO: 81699 - RNA, 1410 nt, Artificial Sequence; identical to SEQ ID NO: 80762
  derived and/or modified CDS sequence (opt1) from neuraminidase__InfluenzaA__ACZ16713

SEQ ID NO: 81700 - RNA, 1410 nt, Artificial Sequence; identical to SEQ ID NO: 80762
  derived and/or modified CDS sequence (opt1) from neuraminidase__InfluenzaA__ACZ16723

SEQ ID NO: 81701 - RNA, 1410 nt, Artificial Sequence; identical to SEQ ID NO: 80762
  derived and/or modified CDS sequence (opt1) from neuraminidase__InfluenzaA__ACZ16733

SEQ ID NO: 81702 - RNA, 1410 nt, Artificial Sequence; identical to SEQ ID NO: 80762
  derived and/or modified CDS sequence (opt1) from neuraminidase__InfluenzaA__ACZ16743

SEQ ID NO: 81703 - RNA, 1410 nt, Artificial Sequence; identical to SEQ ID NO: 80762
  derived and/or modified CDS sequence (opt1) from neuraminidase__InfluenzaA__ACZ16753

SEQ ID NO: 81704 - RNA, 1410 nt, Artificial Sequence; identical to SEQ ID NO: 80762
  derived and/or modified CDS sequence (opt1) from neuraminidase__InfluenzaA__ACZ16763

SEQ ID NO: 81705 - RNA, 1410 nt, Artificial Sequence; identical to SEQ ID NO: 80752
  derived and/or modified CDS sequence (opt1) from neuraminidase__InfluenzaA__ACZ16773

SEQ ID NO: 81706 - RNA, 1410 nt, Artificial Sequence; identical to SEQ ID NO: 80762
  derived and/or modified CDS sequence (opt1) from neuraminidase__InfluenzaA__ACZ16783

SEQ ID NO: 81707 - RNA, 1410 nt, Artificial Sequence; identical to SEQ ID NO: 80762
  derived and/or modified CDS sequence (opt1) from neuraminidase__InfluenzaA__ACZ16793

SEQ ID NO: 81708 - RNA, 1410 nt, Artificial Sequence; identical to SEQ ID NO: 80762
  derived and/or modified CDS sequence (opt1) from neuraminidase__InfluenzaA__ACZ16803

SEQ ID NO: 81709 - RNA, 1410 nt, Artificial Sequence; identical to SEQ ID NO: 80762
  derived and/or modified CDS sequence (opt1) from neuraminidase__InfluenzaA__ACZ16813

SEQ ID NO: 81710 - RNA, 1410 nt, Artificial Sequence; identical to SEQ ID NO: 80752
  derived and/or modified CDS sequence (opt1) from neuraminidase__InfluenzaA__ACZ16823

SEQ ID NO: 81711 - RNA, 1410 nt, Artificial Sequence; identical to SEQ ID NO: 80762
  derived and/or modified CDS sequence (opt1) from neuraminidase__InfluenzaA__ACZ16833

SEQ ID NO: 81712 - RNA, 1410 nt, Artificial Sequence; identical to SEQ ID NO: 80762
  derived and/or modified CDS sequence (opt1) from neuraminidase__InfluenzaA__ACZ16843

SEQ ID NO: 81713 - RNA, 1410 nt, Artificial Sequence; identical to SEQ ID NO: 81682
  derived and/or modified CDS sequence (opt1) from neuraminidase__InfluenzaA__ACZ16853

SEQ ID NO: 81714 - RNA, 1410 nt, Artificial Sequence; identical to SEQ ID NO: 80762
  derived and/or modified CDS sequence (opt1) from neuraminidase__InfluenzaA__ACZ16863

SEQ ID NO: 81715 - RNA, 1410 nt, Artificial Sequence; identical to SEQ ID NO: 80762
  derived and/or modified CDS sequence (opt1) from neuraminidase__InfluenzaA__ACZ16873

SEQ ID NO: 81716 - RNA, 1410 nt, Artificial Sequence; identical to SEQ ID NO: 80762
  derived and/or modified CDS sequence (opt1) from neuraminidase__InfluenzaA__ACZ16883

SEQ ID NO: 81717 - RNA, 1410 nt, Artificial Sequence; identical to SEQ ID NO: 80762
  derived and/or modified CDS sequence (opt1) from neuraminidase__InfluenzaA__ACZ16893

SEQ ID NO: 81718 - RNA, 1410 nt, Artificial Sequence; identical to SEQ ID NO: 80762
  derived and/or modified CDS sequence (opt1) from neuraminidase__InfluenzaA__ACZ16903

SEQ ID NO: 81719 - RNA, 1410 nt, Artificial Sequence; identical to SEQ ID NO: 80762
  derived and/or modified CDS sequence (opt1) from neuraminidase__InfluenzaA__ACZ16913

SEQ ID NO: 81720 - RNA, 1410 nt, Artificial Sequence; identical to SEQ ID NO: 80762
  derived and/or modified CDS sequence (opt1) from neuraminidase__InfluenzaA__ACZ16923

SEQ ID NO: 81721 - RNA, 1410 nt, Artificial Sequence; identical to SEQ ID NO: 80762
  derived and/or modified CDS sequence (opt1) from neuraminidase__InfluenzaA__ACZ16933

SEQ ID NO: 81722 - RNA, 1410 nt, Artificial Sequence; identical to SEQ ID NO: 80762
  derived and/or modified CDS sequence (opt1) from neuraminidase__InfluenzaA__ACZ16943

SEQ ID NO: 81723 - RNA, 1410 nt, Artificial Sequence; identical to SEQ ID NO: 80752
  derived and/or modified CDS sequence (opt1) from neuraminidase__InfluenzaA__ACZ16953

SEQ ID NO: 81724 - RNA, 1410 nt, Artificial Sequence; identical to SEQ ID NO: 80762
  derived and/or modified CDS sequence (opt1) from neuraminidase__InfluenzaA__ACZ16963

SEQ ID NO: 81725 - RNA, 1410 nt, Artificial Sequence; identical to SEQ ID NO: 80762
  derived and/or modified CDS sequence (opt1) from neuraminidase__InfluenzaA__ACZ16973

SEQ ID NO: 81726 - RNA, 1410 nt, Artificial Sequence; identical to SEQ ID NO: 80762
  derived and/or modified CDS sequence (opt1) from neuraminidase__InfluenzaA__ACZ16983

SEQ ID NO: 81727 - RNA, 1410 nt, Artificial Sequence; identical to SEQ ID NO: 80762
  derived and/or modified CDS sequence (opt1) from neuraminidase__InfluenzaA__ACZ16993

SEQ ID NO: 81728 - RNA, 1410 nt, Artificial Sequence; identical to SEQ ID NO: 80762
  derived and/or modified CDS sequence (opt1) from neuraminidase__InfluenzaA__ACZ17003

SEQ ID NO: 81729 - RNA, 1410 nt, Artificial Sequence; identical to SEQ ID NO: 80762
  derived and/or modified CDS sequence (opt1) from neuraminidase__InfluenzaA__ACZ17023

SEQ ID NO: 81730 - RNA, 1410 nt, Artificial Sequence; identical to SEQ ID NO: 80762
  derived and/or modified CDS sequence (opt1) from neuraminidase__InfluenzaA__ACZ17043

SEQ ID NO: 81731 - RNA, 1410 nt, Artificial Sequence; identical to SEQ ID NO: 80762
  derived and/or modified CDS sequence (opt1) from neuraminidase__InfluenzaA__ACZ17053

SEQ ID NO: 81732 - RNA, 1410 nt, Artificial Sequence
  derived and/or modified CDS sequence (opt1) from neuraminidase__InfluenzaA__ACZ17063
augaaccccaaccagaagaucaucaccaucggcagcgugugcaugaccaucgggauggccaaccugauccuccagaucggcaacaucaucuccaucuggaucagccacuccauccagcugggggaccagaaccagaucgagacgugcaaccagagcgucaucaccuacgagaacaacaccugggugaaccagaccuacgugaacaucuccaacacgaacuucgccgcgggccagagcgucguguccgugaagcuggccgggaacagcucccucugcccggucagcggcugggccaucuacuccaaggacaacagcauccgcaucggcuccaagggggacguguucgugauccgggagcccuucaucagcugcagcccccuggagugccgcaccuucuuccugacccagggcgcccuccugaacgacaagcacuccaacgggaccaucaaggaccggucccccuaccgcacgcugaugagcugcccgaucggcgagguccccucccccuacaacagccgguucgagagcguggccugguccgcgagcgccugccacgacgggaucaacuggcucaccaucggcaucuccggccccgacaacggggccguggccguccugaaguacaacggcaucaucaccgacaccaucaagagcuggcgcaacaacauccugcggacgcaggaguccgagugcgcgugcgugaacgggagcugcuucaccgugaugaccgacggcccguccgacggccaggccagcuacaagaucuuccgcaucgagaaggggaagaucgucaaguccguggagaugaacgcccccaacuaccacuacgaggagugcagcugcuaccccgacuccagcgagaucacgugcgugugccgggacaacuggcacggcuccaaccgccccugggucagcuucaaccagaaccucgaguaccagaucggguacaucugcuccggcaucuucggggacaacccgcggcccaacgacaagaccggcagcugcggccccguguccagcaacggggccaacggcgugaagggguucuccuucaaguacggcaacggggucuggaucggccgcaccaagagcaucagcucccggaacggcuucgagaugaucugggaccccaacggguggaccggcaccgacaacaacuucagcaucaagcaggacaucguggggaucaacgagugguccggcuacagcggguccuucgugcagcacccggagcugacgggccuggacugcauccgccccugcuucugggucgagcucauccggggccgccccaaggagaacaccaucuggaccagcggguccagcaucuccuucugcggcgugaacagcgacaccgucgggugguccuggcccgacggcgccgagcugccguucacgaucgacaaguga

SEQ ID NO: 81733 - RNA, 1410 nt, Artificial Sequence; identical to SEQ ID NO: 80762
  derived and/or modified CDS sequence (opt1) from neuraminidase__InfluenzaA__ACZ17073

SEQ ID NO: 81734 - RNA, 1410 nt, Artificial Sequence; identical to SEQ ID NO: 81470
  derived and/or modified CDS sequence (opt1) from neuraminidase__InfluenzaA__ACZ17083

SEQ ID NO: 81735 - RNA, 1410 nt, Artificial Sequence
  derived and/or modified CDS sequence (opt1) from neuraminidase__InfluenzaA__ACZ17093
augaaccccaaccagaagaucaucaccaucggcagcgugugcaugaccaucgggauggccaaccugauccuccagaucggcaacaucaucuccaucuggaucagccacuccauccagcuggggaaccagaaccagaucgagacgugcaaccagagcgucaucaccuacgagaacaacaccugggugaaccagaccuacgugaacaucuccaacacgaacuucgccgcgggccagagcgucguguccgugaagcuggccgggaacagcucccucugcccggucagcggcugggccaucuacuccaaggacaacagcauccgcaucggcuccaagggggacguguucgugauccgggagcccuucaucagcugcucccccuucgagugccgcaccuucuuccugacccagggcgcccugcucaacgacaagcacagcaacgggaccaucaaggaccggucccccuaccgcacgcugaugagcugcccgaucggcgagguccccucccccuacaacagccgguucgagagcguggccugguccgcgagcgccugccacgacgggaucaacuggcugaccaucggcaucuccggccccgacaacggggccguggccguccucaaguacaacggcaucaucaccgacaccaucaagagcuggcgcaacaacauccugcggacgcaggaguccgagugcgcgugcgugaacgggagcugcuucaccgugaugaccgacggcccguccgacggccaggccagcuacaagaucuuccgcaucgagaaggggaagaucgucaaguccguggagaugaacgcccccaacuaccacuacgaggagugcagcugcuaccccgacuccagcgagaucacgugcgugugccgggacaacuggcacggcuccaaccgccccugggucagcuucaaccagaaccuggaguaccagaucggguacaucugcuccggcaucuucggggacaacccgcggcccaacgacaagaccggcagcugcggccccguguccagcaacggggccaacggcgugaagggguucuccuucaaguacggcaacggggucuggaucggccgcaccaagagcaucagcucccggaacggcuucgagaugaucugggaccccaacggguggaccggcaccgacaacaacuucagcaucaagcaggacaucguggggaucaacgagugguccggcuacagcggguccuucgugcagcacccggagcucacgggccuggacugcauccgccccugcuucugggucgagcugauccggggccgccccaaggagaacaccaucuggaccagcggguccagcaucuccuucugcggcgugaacagcgacaccgucgggugguccuggcccgacggcgccgagcucccguucacgaucgacaaguga

SEQ ID NO: 81736 - RNA, 1410 nt, Artificial Sequence
  derived and/or modified CDS sequence (opt1) from neuraminidase__InfluenzaA__ACZ17113
augaaccccaaccagaagaucaucaccaucggcagcgugugcaugaccaucgggauggccaaccugauccuccagaucggcaacaucaucuccaucuggaucagccacuccauccagcuggggaaccagaaccagaucgagacgugcaaccagagcgucaucaccuacgagaacaacaccugggugaaccagaccuacgugaacaucuccaacacgaacuucgccgcgggccagagcgucguguccgugaagcuggccgggaacagcucccucugcccggucaacggcugggccaucuacagcaaggacaacuccauccgcaucggcagcaagggggacguguucgugauccgggagcccuucaucuccugcagcccccuggagugccgcaccuucuuccugacccagggcgcccuccugaacgacaagcacuccaacgggaccaucaaggaccggagccccuaccgcacgcugauguccugcccgaucggcgagguccccagccccuacaacucccgguucgagagcguggccuggagcgcguccgccugccacgacgggaucaacuggcucaccaucggcaucagcggccccgacaacggggccguggccguccugaaguacaacggcaucaucaccgacaccaucaaguccuggcgcaacaacauccugcggacgcaggagagcgagugcgcgugcgugaacggguccugcuucaccgugaugaccgacggcccgagcgacggccaggccuccuacaagaucuuccgcaucgagaaggggaagaucgucaagagcguggagaugaacgcccccaacuaccacuacgaggagugcuccugcuaccccgacagcuccgagaucacgugcgugugccgggacaacuggcacggcagcaaccgccccugggucuccuucaaccagaaccucgaguaccagaucggguacaucugcagcggcaucuucggggacaacccgcggcccaacgacaagaccggcuccugcggccccgugagcuccaacggggccaacggcgugaagggguucagcuucaaguacggcaacggggucuggaucggccgcaccaaguccaucagcagccggaacggcuucgagaugaucugggaccccaacggguggaccggcaccgacaacaacuucuccaucaagcaggacaucguggggaucaacgaguggagcggcuacuccgggagcuucgugcagcacccggagcugacgggccuggacugcauccgccccugcuucugggucgagcucauccggggccgccccaaggagaacaccaucuggaccuccgggagcuccaucagcuucugcggcgugaacuccgacaccgucggguggagcuggcccgacggcgccgagcugccguucacgaucgacaaguga

SEQ ID NO: 81737 - RNA, 1410 nt, Artificial Sequence; identical to SEQ ID NO: 80762
  derived and/or modified CDS sequence (opt1) from neuraminidase__InfluenzaA__ACZ17123

SEQ ID NO: 81738 - RNA, 1410 nt, Artificial Sequence; identical to SEQ ID NO: 80762
  derived and/or modified CDS sequence (opt1) from neuraminidase__InfluenzaA__ACZ17133

SEQ ID NO: 81739 - RNA, 1410 nt, Artificial Sequence
  derived and/or modified CDS sequence (opt1) from neuraminidase__InfluenzaA__ACZ17163
augaaccccaaccagaagaucaucaccaucggcagcgugugcaugaccaucgggauggccaaccugauccuccagaucggcaacaucaucuccaucuggaucagccacuccauccagcuggggaaccagaaccagaucgagacgugcaaccagagcgucaucaccuacgagaacaacaccugggugaaccagaccuacgugaacaucuccaacacgaacuucgccgcgggccagagcgucguguccgugaagcuggccgggaacagcucccucugcccggucagcggcugggccaucuacuccaaggacaacagcauccgcaucggcuccaagggggacguguucgugauccgggagcccuucaucagcugcagcccccuggagugccgcaccuucuuccugacccagggcgcccuccugaacgacaagcacuccaacgggaccaucaaggaccggucccccuaccgcacgcugaugagcugcccgaucggcgagguccccucccccuacaacagccgguucgagagcguggccugguccgcgagcgccugccacgacgggaucaacuggcucaccaucggcaucuccggccccgacaacggggccguggccguccugaaguacaacggcaucaucaccgacaccaucaagagcuggcgcaacaacauccugcggacgcaggaguccgagugcgcgugcgugaacgggagcugcuucaccgugaugaccgacggcccguccgacggccaggccagcuacaagaucuuccgcaucgagaaggggaagaucgucaaguccguggagaugaacgcccccaacuaccacuacgaggagugcagcugcuaccccgacuccagcgagaucacgugcgugugccgggacaacuggcacggcuccaaccgccccugggucagcuucaaccggaaccucgaguaccagaucggguacaucugcuccggcaucuucggggacaacccgcgccccaacgacaagaccggcagcugcggccccguguccagcaacggggccaacggcgugaagggguucuccuucaaguacggcaacggggucuggaucggccggaccaagagcaucagcucccgcaacggcuucgagaugaucugggaccccaacggguggaccggcaccgacaacaacuucagcaucaagcaggacaucguggggaucaacgagugguccggcuacagcggguccuucgugcagcacccggagcugacgggccuggacugcauccggcccugcuucugggucgagcucauccgcggccggcccaaggagaacaccaucuggaccagcggguccagcaucuccuucugcggcgugaacagcgacaccgucgggugguccuggcccgacggcgccgagcugccguucacgaucgacaaguga

SEQ ID NO: 81740 - RNA, 1410 nt, Artificial Sequence; identical to SEQ ID NO: 81739
  derived and/or modified CDS sequence (opt1) from neuraminidase__InfluenzaA__ACZ17173

SEQ ID NO: 81741 - RNA, 1410 nt, Artificial Sequence; identical to SEQ ID NO: 81739
  derived and/or modified CDS sequence (opt1) from neuraminidase__InfluenzaA__ACZ17183

SEQ ID NO: 81742 - RNA, 1410 nt, Artificial Sequence; identical to SEQ ID NO: 81739
  derived and/or modified CDS sequence (opt1) from neuraminidase__InfluenzaA__ACZ17193

SEQ ID NO: 81743 - RNA, 1410 nt, Artificial Sequence; identical to SEQ ID NO: 81739
  derived and/or modified CDS sequence (opt1) from neuraminidase__InfluenzaA__ACZ17203

SEQ ID NO: 81744 - RNA, 1410 nt, Artificial Sequence; identical to SEQ ID NO: 80762
  derived and/or modified CDS sequence (opt1) from neuraminidase__InfluenzaA__ACZ17213

SEQ ID NO: 81745 - RNA, 1410 nt, Artificial Sequence; identical to SEQ ID NO: 80762
  derived and/or modified CDS sequence (opt1) from neuraminidase__InfluenzaA__ACZ17223

SEQ ID NO: 81746 - RNA, 1410 nt, Artificial Sequence; identical to SEQ ID NO: 80762
  derived and/or modified CDS sequence (opt1) from neuraminidase__InfluenzaA__ACZ17233

SEQ ID NO: 81747 - RNA, 1410 nt, Artificial Sequence; identical to SEQ ID NO: 80762
  derived and/or modified CDS sequence (opt1) from neuraminidase__InfluenzaA__ACZ17243

SEQ ID NO: 81748 - RNA, 1410 nt, Artificial Sequence; identical to SEQ ID NO: 80762
  derived and/or modified CDS sequence (opt1) from neuraminidase__InfluenzaA__ACZ17263

SEQ ID NO: 81749 - RNA, 1410 nt, Artificial Sequence
  derived and/or modified CDS sequence (opt1) from neuraminidase__InfluenzaA__ACZ17273
augaaccccaaccagaagaucaucaccaucggcagcgugugcaugaccaucgggauggccaaccugauccuccagaucggcaacaucaucuccaucuggaucagccacuccauccagcuggggaaccagaaccagaucgagacgugcaaccagagcgucaucaccuacgagaacaacaccugggugaaccagaccuacgugaacaucuccaacacgaacuucgccgcgggccagagcgucguguccgugaagcuggccgggaacagcucccucugcccggucagcggcugggccaucuacuccaaggacaacagcauccgcaucggcuccaagggggacguguucgugauccgggagcccuucaucagcugcagcccccuggagugccgcaccuucuuccugacccagggcgcccuccugaacgacaagcacuccaacgggaccaucaaggaccggucccccuaccgcacgcugaugagcugcccgaucggcgagguccccucccccuacaacagccgguucgagagcguggccugguccgcgagcgccugccacgacggguucaacuggcucaccaucggcaucuccggccccgacaacggggccguggccguccugaaguacaacggcaucaucaccgacaccaucaagagcuggcgcaacaacauccugcggacgcaggaguccgagugcgcgugcgugaacgggagcugcuucaccgugaugaccgacggcccguccgacggccaggccagcuacaagaucuuccgcaucgagaaggggaagaucgucaaguccguggagaugaacgcccccaacuaccacuacgaggagugcagcugcuaccccgacuccagcgagaucacgugcgugugccgggacaacuggcacggcuccaaccgccccugggucagcuucaaccagaaccucgaguaccagaucggguacaucugcuccggcaucuucggggacaacccgcggcccaacgacaagaccggcagcugcggccccgugcuguccaacggggccaacggcgugaagggguucagcuucaaguacggcaacggggucuggaucggccgcaccaaguccaucagcagccggaacggcuucgagaugaucugggaccccaacggguggaccggcaccgacaacaacuucuccaucaagcaggacaucguggggaucaacgaguggagcggcuacuccgggagcuucgugcagcacccggagcugacgggccucgacugcauccgccccugcuucugggucgagcugauccggggccgccccaaggagaacaccaucuggaccuccgggagcuccaucagcuucugcggcgugaacuccgacaccgucggguggagcuggcccgacggcgccgagcugccguucacgaucgacaaguga

SEQ ID NO: 81750 - RNA, 1410 nt, Artificial Sequence; identical to SEQ ID NO: 80762
  derived and/or modified CDS sequence (opt1) from neuraminidase__InfluenzaA__ACZ17283

SEQ ID NO: 81751 - RNA, 1410 nt, Artificial Sequence; identical to SEQ ID NO: 80792
  derived and/or modified CDS sequence (opt1) from neuraminidase__InfluenzaA__ACZ17293

SEQ ID NO: 81752 - RNA, 1410 nt, Artificial Sequence; identical to SEQ ID NO: 80792
  derived and/or modified CDS sequence (opt1) from neuraminidase__InfluenzaA__ACZ17303

SEQ ID NO: 81753 - RNA, 1410 nt, Artificial Sequence; identical to SEQ ID NO: 80792
  derived and/or modified CDS sequence (opt1) from neuraminidase__InfluenzaA__ACZ17313

SEQ ID NO: 81754 - RNA, 1410 nt, Artificial Sequence; identical to SEQ ID NO: 80762
  derived and/or modified CDS sequence (opt1) from neuraminidase__InfluenzaA__ACZ17401

SEQ ID NO: 81755 - RNA, 1410 nt, Artificial Sequence; identical to SEQ ID NO: 80762
  derived and/or modified CDS sequence (opt1) from neuraminidase__InfluenzaA__ACZ17411

SEQ ID NO: 81756 - RNA, 1410 nt, Artificial Sequence; identical to SEQ ID NO: 80762
  derived and/or modified CDS sequence (opt1) from neuraminidase__InfluenzaA__ACZ17421

SEQ ID NO: 81757 - RNA, 1410 nt, Artificial Sequence
  derived and/or modified CDS sequence (opt1) from neuraminidase__InfluenzaA__ACZ17431
augaaccccaaccagaagaucaucaccaucggcagcgugugcaugaccaucgggauggccaaccugauccuccagaucggcaacaucaucuccaucuggaucagccacuccauccagcuggggaaccagaaccagaucgagacgugcaaccagagcgucaucaccuacgagaacaacaccugggugaaccagaccuacgugaacaucuccaacacgaacuucgccgcgggccagagcgucguguccgugaagcuggccgggaacagcucccucugcccggucagcggcugggccaucuacuccaaggacaacagcgugcgcaucggcuccaagggggacguguucgucauccgggagcccuucaucagcugcagcccccuggagugccgcaccuucuuccugacccagggcgcccuccugaacgacaagcacuccaacgggaccaucaaggaccggucccccuaccgcacgcugaugagcugcccgaucggcgaggugcccucccccuacaacagccgguucgagagcguggccugguccgcgagcgccugccacgacgggaucaacuggcucaccaucggcaucuccggccccgacaacggggccgucgccgugcugaaguacaacggcaucaucaccgacaccaucaagagcuggcgcaacaacauccugcggacgcaggaguccgagugcgcgugcgugaacgggagcugcuucaccgucaugaccgacggcccguccaacggccaggccagcuacaagaucuuccgcaucgagaaggggaagaucgugaaguccguggagaugaacgcccccaacuaccacuacgaggagugcagcugcuaccccgacuccagcgagaucacgugcgucugccgggacaacuggcacggcuccaaccgccccugggugagcuucaaccagaaccucgaguaccagaucggguacaucugcuccggcaucuucggggacaacccgcggcccaacgacaagaccggcagcugcggccccguguccagcaacggggccaacggcgucaagggguucuccuucaaguacggcaacgggguguggaucggccgcaccaagagcaucaacagccggaacggcuucgagaugaucugggaccccaacggguggaccggcaccgacaacaacuucuccaucaagcaggacaucguggggaucaacgaguggagcggcuacuccgggagcuucguccagcacccggagcugacgggccuggacugcauccgccccugcuucuggguggagcucauccggggccgccccaaggagaacaccaucuggaccuccgggagcuccaucagcuucugcggcgucaacuccgacaccgugggguggagcuggcccgacggcgccgagcugccguucacgaucgacaaguga

SEQ ID NO: 81758 - RNA, 1410 nt, Artificial Sequence; identical to SEQ ID NO: 81757
  derived and/or modified CDS sequence (opt1) from neuraminidase__InfluenzaA__ACZ17441

SEQ ID NO: 81759 - RNA, 1410 nt, Artificial Sequence; identical to SEQ ID NO: 80752
  derived and/or modified CDS sequence (opt1) from neuraminidase__InfluenzaA__ACZ17451

SEQ ID NO: 81760 - RNA, 1410 nt, Artificial Sequence; identical to SEQ ID NO: 80762
  derived and/or modified CDS sequence (opt1) from neuraminidase__InfluenzaA__ACZ17461

SEQ ID NO: 81761 - RNA, 1410 nt, Artificial Sequence; identical to SEQ ID NO: 80762
  derived and/or modified CDS sequence (opt1) from neuraminidase__InfluenzaA__ACZ17471

SEQ ID NO: 81762 - RNA, 1410 nt, Artificial Sequence; identical to SEQ ID NO: 80792
  derived and/or modified CDS sequence (opt1) from neuraminidase__InfluenzaA__ACZ17481

SEQ ID NO: 81763 - RNA, 1410 nt, Artificial Sequence; identical to SEQ ID NO: 80762
  derived and/or modified CDS sequence (opt1) from neuraminidase__InfluenzaA__ACZ17491

SEQ ID NO: 81764 - RNA, 1410 nt, Artificial Sequence; identical to SEQ ID NO: 81228
  derived and/or modified CDS sequence (opt1) from neuraminidase__InfluenzaA__ACZ27803

SEQ ID NO: 81765 - RNA, 1410 nt, Artificial Sequence; identical to SEQ ID NO: 80752
  derived and/or modified CDS sequence (opt1) from neuraminidase__InfluenzaA__ACZ27813

SEQ ID NO: 81766 - RNA, 1410 nt, Artificial Sequence; identical to SEQ ID NO: 80762
  derived and/or modified CDS sequence (opt1) from neuraminidase__InfluenzaA__ACZ27823

SEQ ID NO: 81767 - RNA, 1410 nt, Artificial Sequence; identical to SEQ ID NO: 80752
  derived and/or modified CDS sequence (opt1) from neuraminidase__InfluenzaA__ACZ27833

SEQ ID NO: 81768 - RNA, 1410 nt, Artificial Sequence; identical to SEQ ID NO: 80762
  derived and/or modified CDS sequence (opt1) from neuraminidase__InfluenzaA__ACZ45022

SEQ ID NO: 81769 - RNA, 1410 nt, Artificial Sequence
  derived and/or modified CDS sequence (opt1) from neuraminidase__InfluenzaA__ACZ53958
augaaccccaaccagaagaucaucaccaucggcagcgugucccugaccaucgccacgaucugcuuccucaugcagaucgccauccuggucaccaccgugacccugcacuucaagcaguacgagugcaacagcccgcccaacaaccaggugaugcucugcgagcccacgaucaucgagcgcaacaucaccgagaucgucuaccugaccaacaccacgaucgagaaggagaucugccccaagcuggcggaguaccggaacugguccaagccgcagugcaacaucaccggguucgcccccuucagcaaggacaacuccauccgccucagcgccggcggggacaucugggugacccgggagcccuacguguccugcgaccccgacaagugcuaccaguucgcccugggccaggggaccacgcugaacaacggccacagcaacgacaccguccacgaccgcaccccguaccggacccuccugaugaacgagcugggcgugcccuuccaccucgggacgaagcaggucugcaucgccugguccagcuccagcugccacgacggcaaggcguggcugcacgugugcgugaccggggacgacgagaacgccaccgccuccuucaucuacaacggccgccugguggacagcaucggguccuggagcaagaagauccuccggacccaggaguccgagugcgucugcaucaacggcacgugcaccguggugaugaccgacggcagcgccuccgggaaggcggacaccaagauccuguucaucgaggagggcaagaucguccacacgagcagccuguccgggagcgcccagcacguggaggagugcuccugcuacccccgcuaccccggcgugcggugcgucugccgcgacaacuggaagggcagcaaccggccgaucguggacaucaacgugaaggacuacuccaucgucagcuccuacgugugcagcgggcucgugggcgacacgccccgcaagaacgacuccagcuccagcucccacugccuggaccccaacaacgaggagggcgggcacggggucaagggcugggccuucgacgacggcaacgacguguggauggggcggaccaucagcgagaagcugcgcuccggcuacgagaccuucaaggucaucgagggguggagcaagcccaacuccaagcuccagaucaaccgccaggugaucguggaccggggcaaccggagcggguacuccggcaucuucagcgucgagggcaagagcugcaucaaccgcugcuucuacguggagcugauccgggggcgcaagcaggagaccgaggugcuguggaccuccaacagcaucgucguguucugcggcaccuccgggaccuacggcacggggagcugcccggacggcuccgugcucaaccugaugcccaucuga

SEQ ID NO: 81770 - RNA, 1410 nt, Artificial Sequence
  derived and/or modified CDS sequence (opt1) from neuraminidase__InfluenzaA__ACZ53969
augaaccccaaccagaagaucaucaccaucggcagcgugucccugaccaucgccacgaucugcuuccucaugcagaucgccauccuggucaccaccgugacccugcacuucaagcaguacgagugcaacagcccgcccaacaaccaggugaugcucugcgagcccacgaucaucgagcgcaacaucaccgagaucgucuaccugaccaacaccacgaucgagaaggagaucugccccaagcuggcggaguaccggaacugguccaagccgcagugcaacaucaccggguucgcccccuucagcaaggacaacuccauccgccucagcgccggcggggacaucugggugacccgggagcccuacguguccugcgaccccgacaagugcuaccaguucgcccugggccaggggaccacgcugaacaacggccacagcaacgacaccguccacgaccgcaccccguaccggacccuccugaugaacgagcugggcgugcccuuccaccucgggacgaagcaggucugcaucgccugguccagcuccagcugccacgacggcaaggcguggcugcacgugugcgugaccggggacgacgagaacgccaccgccuccuucaucuacaacggccgccugguggacagcaucggguccuggagcaagaagauccuccggacccaggaguccgagugcgucugcaucaacggcacgugcaccguggugaugaccgacggcagcgccuccgggaaggcggacaccaagauccuguucaucgaggagggcgagaucguccacacgagcccccugagcggguccgcccagcacguggaggagugcagcugcuacccccgcuacccgggcgugcggugcgucugccgcgacaacuggaagggcuccaaccggcccaucguggacaucaacgugaaggacuacagcaucgucuccagcuacgugugcuccgggcucgugggcgacacgccccgcaagaacgacagcuccagcuccagccacugccuggaccccaacaacgaggagggcgggcacggggucaagggcugggccuucgacgacggcaacgacguguggauggggcggaccaucuccgagaagucccgcagcggcuacgagaccuucaaggucaucgagggguggagcaagccgaacuccaagcugcagaucaaccgccaggugaucguggaccggggcaaccggagcggguacuccggcaucuucagcgucgagggcaagagcugcaucaaccgcugcuucuacguggagcucauccgggggcgcaagcaggagaccgaggugcuguggaccuccaacagcaucgucguguucugcggcaccuccgggaccuacggcacggggagcuggcccgacggcuccgugcugaaccucaugcccaucuga

SEQ ID NO: 81771 - RNA, 1410 nt, Artificial Sequence
  derived and/or modified CDS sequence (opt1) from neuraminidase__InfluenzaA__ACZ53980
augaaccccaaccagaacaagcugccgaucggcagcgugucccucaccaucgccaccaucugcuuccugaugcagaucgccauccugaagacgaccgucacccuccacuucaagcaguacgagugcaacagcccgcccaacaaccaggugaugcugugcgagcccaccaucaucgagcgcaaccugacgaagaucguguaccucaccaacaccaccaucaagaaggagaucugccccaagcagcccaaguaccggaacugguccaagcccaagugcaagaucacggagcuggcgcccuucagcaaggacaacuccauccgccugagcgccgggggcgacaucugggucacccgggagccguacguguccugcgaccccgacaagugcuaccaguucgcccucgggcagggcaccacccugaacaacgggcacagcaacgacacggugcacgaccgcacccccuaccggacccugcucaugaacgagcugggcguccccuuccaccugggcaccaagcaggucugcaucgccugguccagcuccagcugccacgacgggaaggccuggcuccacgugugcaucacgggcgacgacaagaacgcgaccgccuccuucaucuacaacgggcgccugguggacagcaucguguccuggagcaaggagauccugcggacccaggaguccgagugcgugugcaucaacgggaccugcacggucgugaugaccgacgggagcgccuccggcaaggccgacaccaagauccucuucaucgaggagggcaagaucgugcacaucagcccgcugagcggguccgcgcagcacgucgaggagugcagcugcuacccccgcuaccccggcgugcggugcaucugccgcgacaacuggaagggguccaaccggcccguggucgacaucaacauggaggacuacagcaucgacuccagcuacgugugcuccggccuggugggcgacaccccgcgcaagaacgacagcuccagcuccagccacugccucgaccccaacaacgaggagggcggccacggggucaagggcugggccuucgacgacgggaacgacguguggaugggccggacgaucuccgagaagcugcgcagcggcuacgagaccuucaaggugaucgggggcugguccaagcccaacagcaagcugcagaucaaccggcaggucaucguggaccgcgggaaccgguccggcuacagcgggaucuucuccgucgagggcaagagcugcaucaaccgcugcuucuacguggagcucauccggggccgcaagcaggagaccgaggugcuguggaccagcaacuccaucgucguguucugcgggacgagcggcaccuacgggaccggcuccuggcccgacgggagcgugcugaaccucaugccgaucuga

SEQ ID NO: 81772 - RNA, 1410 nt, Artificial Sequence; identical to SEQ ID NO: 80762
  derived and/or modified CDS sequence (opt1) from neuraminidase__InfluenzaA__ACZ56082

SEQ ID NO: 81773 - RNA, 1410 nt, Artificial Sequence; identical to SEQ ID NO: 81345
  derived and/or modified CDS sequence (opt1) from neuraminidase__InfluenzaA__ACZ57183

SEQ ID NO: 81774 - RNA, 1413 nt, Artificial Sequence
  derived and/or modified CDS sequence (opt1) from neuraminidase__InfluenzaA__ACZ81542
augaaccccaaccagaaggugaucaccaucggcagcaucuccaucgccaucgggaucaucagccugaugcuccagaucggcaacaucaucuccaucugggccagccacuccauccagaccgggagccagaacaacacgggcaucugcaaccagcgcaucaucaccuacgagaacuccaccugggucaaccacaccuacgugaacaucaacaacacgaacguggucgcgggggaggacaagaccagcgugacccuggccggcaacuccagccugugcuccaucagcggcugggccaucuacaccaaggacaacuccauccggaucgggagcaagggcgacguguucgucauccgcgagccguucaucuccugcagccaccucgagugccggacguucuuccugacccagggggcccugcucaacgacaagcacuccaacggcaccgugaaggaccgcagccccuaccgggcccugauguccugcccccugggggaggcgcccagcccguacaacagcaaguucgaguccguggccuggagcgccuccgccugccacgacggcaugggcuggcucaccaucgggaucagcggccccgacaacggggcggucgccgugcugaaguacaacggcaucaucacgggcaccaucaaguccuggaagaagcagauccugcgcacccaggagagcgagugcgugugcaugaacggguccugcuucaccaucaugacggacggccccagcaacaaggccgccuccuacaagaucuucaagaucgagaaggggaaggucaccaagagcaucgagcucaacgcccccaacuucuacuacgaggagugcuccugcuacccggacaccggcaucgugaugugcgugugccgggacaacuggcacgggagcaaccgccccugggucuccuucaaccagaaccuggacuaccagaucggcuacaucugcagcggcguguucggggacaacccccggcccgaggacggcgagggguccugcaacccggugaccgucgacggcgcgaacggggugaagggcuucagcuacaaguacggcaacgggguguggaucggccgcacgaaguccaaccggcugcgcaagggguucgagaugaucugggaccccaacggcuggaccaacaccgacagcgacuucuccgucaagcaggacgugguggccaucaccgacuggagcggguacagcggcuccuucguccagcaccccgagcucacgggccuggacugcauccggcccugcuucuggguggagcugguccgcgggcucccgcgggagaacaccaccaucuggaccagcggcuccagcaucuccuucugcggggugaacagcgacacggccaacugguccuggcccgacggcgccgagcugcccuucaccaucgacaaguga

SEQ ID NO: 81775 - RNA, 1413 nt, Artificial Sequence
  derived and/or modified CDS sequence (opt1) from neuraminidase__InfluenzaA__ACZ81543
augaaccccaaccagaagaucaucaccaucggcagcaucuccaucgccaucgggaucaucagccugaugcuccagaucggcaacaucaucuccaucugggccagccacuccauccagaccgggagccagaacaacacgggcaucugcaaccagcgcaucaucaccuacgagaacaacaccugggugaaccacaccuacgucaacaucaacaacacgaacgugguggcgggggaggacaagaccuccgucacccuggccggcaacagcucccugugcagcaucuccggcugggccaucuacaccaaggacaacagcauccggaucggguccaagggcgacguguucgugauccgcgagccguucaucagcugcucccaccucgagugccggacguucuuccugacccagggggcccugcucaacgacaagcacagcaacggcaccgucaaggaccgcucccccuaccgggcccugaugagcugcccccugggggaggcgcccuccccguacaacagcaaguucgagagcguggccugguccgccagcgccugccacgacggcaugggcuggcucaccaucgggaucuccggccccgacaacggggcgguggccguccugaaguacaacggcaucaucacgggcaccaucaagagcuggaaggagcagauccugcgcacccaggaguccgagugcgugugcaugaacgggagcugcuucaccaucaugacggacggccccuccaacaaggccgccagcuacaagaucuucaagaucgagaaggggaaggugaccaaguccaucgagcucaacgcccccaacuucuacuacgaggagugcagcugcuacccggacaccggcaucgucaugugcgugugccgggacaacuggcacggguccaaccgccccugggugagcuucaaccagaaccuggacuaccagaccggcuacaucugcuccggcgucuucggggacaacccccggcccgaggacggcgaggggagcugcaacccggugacgguggacggcgcgaacggggucaagggcuucuccuacaaguacggcaacgggguguggaucggccgcaccaagagcaaccggcugcgcaagggguucgagaugaucugggaccccaacggcuggaccaacaccgacuccgacuucagcgugaagcaggacgucguggccaucacggacugguccggguacagcggcagcuucgugcagcaccccgagcucaccggccuggacugcauccggcccugcuucugggucgagcuggugcgcgggcucccgcgggagaacaccaccaucuggacguccggcagcuccaucagcuucugcggggucaacuccgacaccgccaacuggagcuggcccgacggcgccgagcugcccuucaccaucgacaaguga

SEQ ID NO: 81776 - RNA, 1410 nt, Artificial Sequence
  derived and/or modified CDS sequence (opt1) from neuraminidase__InfluenzaA__ACZ81546
augaaccccaaccagaagaucaucaccaucggcagcgugucccugaccaucagcacgaucugcuucuucaugcagaucgccauccucaucaccaccgucacccugcacuucaagcaguacgaguucaacuccccgcccaacaaccaggugaugcugugcgagcccacgaucaucgagcgcaacaucaccgagaucguguaccucaccaacaccacgaucgagaaggagaucugccccaagcuggccgaguaccggaacuggagcaagccgcagugcgacaucaccggguccgcgcccuucagcaaggacaacuccauccgccugagcgccggcggggacaucugggucacccgggagcccuacguguccugcgaccccgacaagugcuaccaguucgcccucggccaggggaccacgcugaacaacgugcacagcaacaacaccguccacgaccgcaccccguaccggacccugcucaugaacgagcugggcgugcccuuccaccugggcacgaagcaggucugcaucgccugguccagcuccagcugccacgacgggaaggccuggcuccacgugugcaucaccggcgacgacaagaacgcgaccgccuccuucaucuacaacgggcgccugguggacagcguggucuccuggagcaaggagauccugcggacccaggaguccgagugcgugugcaucaacggcacgugcaccguggucaugaccgacgggagcgccagcggcaaggccgacaccaagauccucuucaucgaggagggcaagaucgugcacacguccacccugagcggguccgcgcagcacguggaggagugcagcugcuacccccgcuaccccggcguccggugcgugugccgcgacaacuggaagggguccaaccggccgaucguggacaucaacaucaaggaccacagcaucgucuccagcuacgugugcuccggccuggugggcgacacgccccgcaagaacgacagcuccagcuccagccacugccucgaccccaacaacgaggagggcgggcacggggucaagggcugggccuucgacgacgggaacgacguguggaugggccggaccaucuccgagaagucccgccugggcuacgagaccuucaaggucaucgagggguggagcaaccccaagagcaagcugcagaucaaccgccaggugaucguggaccggggcaaccgguccggguacagcggcaucuucagcgucgaggggaaguccugcaucaaccgcugcuucuacguggagcucauccggggccgcaaggaggagaccgaggugcuguggaccagcaacuccaucgucguguucugcggcaccagcgggacguacggcaccggguccuggccggacggcgccgacaucaaccugaugcccaucuga

SEQ ID NO: 81777 - RNA, 1410 nt, Artificial Sequence
  derived and/or modified CDS sequence (opt1) from neuraminidase__InfluenzaA__ACZ81547
augaaccccaaccagaagaucaucaccaucggcagcgugucccugaccaucagcacgaucugcuucuucaugcagaucgccauccucaucaccaccgucacccugcacuucaagcaguacgaguucaacuccccgcccaacaaccaggugaugcugugcgagcccacgaucaucgagcgcaacaucaccgagaucguguaccucaccaacaccacgaucgagaaggagaucugccccaagcuggccgaguaccggaacuggagcaagccgcagugcgacaucaccggguucgcgcccuucuccaaggacaacagcauccgccuguccgccggcggggacaucugggucacccgggagcccuacgugagcugcgaccccgacaagugcuaccaguucgcccucggccaggggaccacgcugaacaacgugcacuccaacaacaccguccgcgaccggaccccguaccgcacccugcucaugaacgagcugggcgugcccuuccaccugggcacgaagcaggucugcaucgccuggagcuccagcuccugccacgacgggaaggccuggcuccacgugugcaucaccggcgacgacaagaacgcgaccgccagcuucaucuacaacgggcggcugguggacuccguggucagcugguccaaggagauccugcgcacccaggagagcgagugcgugugcaucaacggcacgugcaccguggucaugaccgacggguccgccagcggcaaggccgacaccaagauccucuucaucgaggagggcaagaucgugcacacgagcacccuguccgggagcgcgcagcacguggaggagugcuccugcuacccccgguaccccggcguccgcugcgugugccgggacaacuggaaggggagcaaccgcccgaucguggacaucaacaccaaggaccacuccaucgucagcuccuacgugugcagcggccuggugggcgacacgccccggaagaacgacuccagcuccagcucccacugccucgaccccaacaacgaggagggcgggcacggggucaagggcugggccuucgacgacgggaacgacguguggaugggccgcaccaucagcgagaagucccggcugggcuacgagaccuucaaggucaucgagggguggagcaaccccaaguccaagcugcagaucaaccgccaggugaucguggacaagggcaaccggagcggguacuccggcaucuucagcgucgagggcaagagcugcaucaaccgcugcuucuacguggagcucauccgggggcgcaaggaggagaccgaggugcuguggaccuccaacagcaucgucguguucugcggcacguccgggaccuacggcaccgggagcuggccggacggcgccgacaucaaccugaugcccaucuga

SEQ ID NO: 81778 - RNA, 1410 nt, Artificial Sequence; identical to SEQ ID NO: 80762
  derived and/or modified CDS sequence (opt1) from neuraminidase__InfluenzaA__ACZ81634

SEQ ID NO: 81779 - RNA, 1410 nt, Artificial Sequence
  derived and/or modified CDS sequence (opt1) from neuraminidase__InfluenzaA__ACZ81644
augaaccccaaccagaagaucaucaccaucggcagcgugugcaugaccaucgggauggccaaccugauccuccagaucggcaacaucaucuccaucuggaucagccacuccauccagcuggggaaccagaaccagaucgagacgugcaaccagagcgucaucaccuacgagaacaacaccugggugaaccagaccuacgugaacaucuccaacacgaacuucgccgcgggccagagcgucguguccgugaagcuggccgggaacagcucccucugcccggucagcggcugggccaucuacuccaaggacaacagcauccgcaucggcuccaagggggacguguucgugauccgggagcccuucaucagcugcagcccccuggagugccgcaccuucuuccugacccagggcgcccuccugaacgacaagcacuccaacgggaccaucaaggaccggucccccuaccgcacgcugaugagcugcccgaucggcgagguccccucccccuacaacagccgguucgagagcguggccugguccgcgagcgccugccacgacgggaucaacuggcucaccaucggcaucuccggccccgacaacggggccguggccguccugaaguacaacggcaucaucaccgacaccaucaagagcuggcgcaacaacauccugcggacgcaggaguccgagugcgcgugcgugaacgggagcugcuucaccgugaugaccgacggcccguccgacggccaggccagcuacaagaucuuccgcaucgagaaggggaagaucgucaaguccguggagaugaacgcccccaacuaccacuacgaggagugcagcugcuaccccgacuccagcgagaucacgugcgugugccgggacaacuggcacggcuccaaccgccccugggucagcuucaaccagaaccucgaguaccagaucggguacaucugcuccggcaucuucggggacaacccgcggcccaacgacaagaccggcagcugcggccccguguccagcaacggggccaacggcgugaagggguucuccuucaaguacggcaacggggucuggaucggccgcaccaagagcaucagcucccggaacggcuucgagaugaucugggaccccaacggguggaccggcaccgacaacaacuucagcaucaagcaggacaucaucgggaucaacgagugguccggcuacagcggguccuucgugcagcacccggagcugacgggccuggacugcauccgccccugcuucuggguggagcucauccggggccgccccaaggagaacaccaucuggaccagcggguccagcaucuccuucugcggcgucaacagcgacaccguggggugguccuggcccgacggcgccgagcugccguucacgaucgacaaguga

SEQ ID NO: 81780 - RNA, 1410 nt, Artificial Sequence
  derived and/or modified CDS sequence (opt1) from neuraminidase__InfluenzaA__ACZ81653
augaaccccaaccagaagaucaucaccaucggcagcgugugcaugaccaucgggauggccaaccugauccuccagaucggcaacaucaucuccaucuggaucagccacuccauccagcuggggaaccagaaccagaucgagacgugcaaccagagcgucaucaccuacgagaacaacaccugggugaaccagaccuacgugaacaucuccaacacgaacuucgccgcgggccagagcgucguguccgugaagcuggccgggaacagcucccucugcccggucagcggcugggccaucuacuccaaggacaacagcauccgcaucggcuccaagggggacguguucgugauccgggagcccuucaucagcugcagcccccuggagugccgcaccuucuuccugacccagggcgcccuccugaacgacaagcacuccaacgggaccaucaaggaccggucccccuaccgcacgcugaugagcugcccgaucggcgagguccccucccccuacaacagccgguucgagagcguggccugguccgcgagcgccugccacgacgggaucaacuggcucaccaucggcaucuccggccccgacaacggggccguggccguccugaaguacaacggcaucaucaccgacaccaucaagagcuggcgcaacaacauccugcggacgcaggaguccgagugcgcgugcgugaacgggagcugcuucaccgugaugaccgacggcccguccgacggccaggccagcuacaagaucuuccgcaucgagaaggggaagaucgucaaguccguggagaugaacgcccccaacuaccacuacgaggagugcagcugcuaccccgacuccagcgagaucacgugcgugugccgggacaacuggcacggcuccaaccgccccugggucagcuucaaccagaaccucgaguaccagaucggguacaucugcuccggcaucuucggggacaacccgcggcccaacgacaagaccggcagcugcggccccguguccagcaacggggccaacggcgugaagggguucuccuucaaguacggcaacggggucuggaucggccgcaccaagagcaucagcucccggaacggcuucgagaugaucugggaccccaacggguggaccggcaccgacaacaacuucagcaucaagcaggacaucguggggaucaacgagugguccggcuacagcggguccuucgugcagcacccggagcugacgggccugaacugcauccgccccugcuucugggucgagcucauccggggccgccccaaggagaacaccaucuggaccagcggguccagcaucuccuucugcggcgugaacagcgacaccgucgggugguccuggcccgacggcgccgagcugccguucacgaucgacaaguga

SEQ ID NO: 81781 - RNA, 1410 nt, Artificial Sequence; identical to SEQ ID NO: 80762
  derived and/or modified CDS sequence (opt1) from neuraminidase__InfluenzaA__ACZ95840

SEQ ID NO: 81782 - RNA, 1410 nt, Artificial Sequence; identical to SEQ ID NO: 80762
  derived and/or modified CDS sequence (opt1) from neuraminidase__InfluenzaA__ACZ95850

SEQ ID NO: 81783 - RNA, 1410 nt, Artificial Sequence; identical to SEQ ID NO: 80762
  derived and/or modified CDS sequence (opt1) from neuraminidase__InfluenzaA__ACZ95860

SEQ ID NO: 81784 - RNA, 1410 nt, Artificial Sequence; identical to SEQ ID NO: 80762
  derived and/or modified CDS sequence (opt1) from neuraminidase__InfluenzaA__ACZ95870

SEQ ID NO: 81785 - RNA, 1410 nt, Artificial Sequence; identical to SEQ ID NO: 80762
  derived and/or modified CDS sequence (opt1) from neuraminidase__InfluenzaA__ACZ95880

SEQ ID NO: 81786 - RNA, 1410 nt, Artificial Sequence; identical to SEQ ID NO: 80762
  derived and/or modified CDS sequence (opt1) from neuraminidase__InfluenzaA__ACZ95890

SEQ ID NO: 81787 - RNA, 1410 nt, Artificial Sequence; identical to SEQ ID NO: 80762
  derived and/or modified CDS sequence (opt1) from neuraminidase__InfluenzaA__ACZ95900

SEQ ID NO: 81788 - RNA, 1410 nt, Artificial Sequence; identical to SEQ ID NO: 80762
  derived and/or modified CDS sequence (opt1) from neuraminidase__InfluenzaA__ACZ95910

SEQ ID NO: 81789 - RNA, 1410 nt, Artificial Sequence; identical to SEQ ID NO: 80762
  derived and/or modified CDS sequence (opt1) from neuraminidase__InfluenzaA__ACZ95920

SEQ ID NO: 81790 - RNA, 1410 nt, Artificial Sequence; identical to SEQ ID NO: 81649
  derived and/or modified CDS sequence (opt1) from neuraminidase__InfluenzaA__ACZ95930

SEQ ID NO: 81791 - RNA, 1410 nt, Artificial Sequence; identical to SEQ ID NO: 80762
  derived and/or modified CDS sequence (opt1) from neuraminidase__InfluenzaA__ACZ95940

SEQ ID NO: 81792 - RNA, 1410 nt, Artificial Sequence; identical to SEQ ID NO: 81779
  derived and/or modified CDS sequence (opt1) from neuraminidase__InfluenzaA__ACZ95950

SEQ ID NO: 81793 - RNA, 1410 nt, Artificial Sequence; identical to SEQ ID NO: 80762
  derived and/or modified CDS sequence (opt1) from neuraminidase__InfluenzaA__ACZ95960

SEQ ID NO: 81794 - RNA, 1410 nt, Artificial Sequence; identical to SEQ ID NO: 81779
  derived and/or modified CDS sequence (opt1) from neuraminidase__InfluenzaA__ACZ95970

SEQ ID NO: 81795 - RNA, 1410 nt, Artificial Sequence; identical to SEQ ID NO: 80762
  derived and/or modified CDS sequence (opt1) from neuraminidase__InfluenzaA__ACZ95980

SEQ ID NO: 81796 - RNA, 1410 nt, Artificial Sequence; identical to SEQ ID NO: 80762
  derived and/or modified CDS sequence (opt1) from neuraminidase__InfluenzaA__ACZ95990

SEQ ID NO: 81797 - RNA, 1410 nt, Artificial Sequence; identical to SEQ ID NO: 80762
  derived and/or modified CDS sequence (opt1) from neuraminidase__InfluenzaA__ACZ96000

SEQ ID NO: 81798 - RNA, 1410 nt, Artificial Sequence; identical to SEQ ID NO: 80762
  derived and/or modified CDS sequence (opt1) from neuraminidase__InfluenzaA__ACZ96010

SEQ ID NO: 81799 - RNA, 1410 nt, Artificial Sequence
  derived and/or modified CDS sequence (opt1) from neuraminidase__InfluenzaA__ACZ96020
augaaccccaaccagaagaucaucaccaucggcagcgugugcaugaccaucgggauggccaaccugauccuccagaucggcaacaucauccugaucuggaucucccacagcauccagcuggggaaccagaaccagacggagaccugcaaccaguccgucaucaccuacgagaacaacaccugggugaaccagacguacgugaacaucagcaacaccaacuucgccgcgggccaguccgucgugagcgugaagcucgccgggaacuccagccugugcccggucuccggcugggccaucuacagcaaggacaacuccgugcgcaucggcagcaagggggacguguucgucauccgggagcccuucaucuccugcagcccccuggagugccgcaccuucuuccucacccagggcgcccugcugaacgacaagcacuccaacgggacgaucaaggaccggagccccuaccgcacccucauguccugcccgaucggcgaggugcccagccccuacaacucccgguucgagagcguggccuggagcgcguccgccugccacgacgggaucaacuggcugaccaucggcaucagcggccccgacaacggggccgucgccgugcugaaguacaacggcaucaucaccgacacgaucaaguccuggcgcaacaacauccuccggacccaggagagcgagugcgcgugcgugaacggguccugcuucaccgucaugaccgacggcccgagcaacggccaggccuccuacaagaucuuccgcaucgagaaggggaagaucgucaagagcguggagaugaacgcccccaacuaccacuacgaggagugcuccugcuaccccgacagcuccgagaucacgugcgugugccgggacaacuggcacggcagcaaccgccccuggguguccuucaaccagaaccuggaguaccagaucggguacaucugcagcggcaucuucggggacaacccgcggcccaucgacaagaccggcuccugcggccccgugagcuccaacggggccaacggcgucaagggguucagcuucaaguacggcaacgggguguggaucggccgcaccaaguccaucagcagccggaacggcuucgagaugaucugggaccccaacggguggaccggcacggacaacaacuucuccaucaagcaggacaucguggggaucaacgaguggagcggcuacuccgggagcuucguccagcacccggagcugaccggccucgacugcauccgccccugcuucuggguggagcugauccggggccgccccaaggagaacaccaucuggaccuccgggagcuccaucagcuucugcggcgucaacuccgacacggugggguggagcuggcccgacggcgccgagcugccguucaccaucgacaaguga

SEQ ID NO: 81800 - RNA, 1410 nt, Artificial Sequence; identical to SEQ ID NO: 80762
  derived and/or modified CDS sequence (opt1) from neuraminidase__InfluenzaA__ACZ96050

SEQ ID NO: 81801 - RNA, 1410 nt, Artificial Sequence; identical to SEQ ID NO: 80762
  derived and/or modified CDS sequence (opt1) from neuraminidase__InfluenzaA__ACZ96060

SEQ ID NO: 81802 - RNA, 1410 nt, Artificial Sequence; identical to SEQ ID NO: 80762
  derived and/or modified CDS sequence (opt1) from neuraminidase__InfluenzaA__ACZ96072

SEQ ID NO: 81803 - RNA, 1410 nt, Artificial Sequence; identical to SEQ ID NO: 80762
  derived and/or modified CDS sequence (opt1) from neuraminidase__InfluenzaA__ACZ96082

SEQ ID NO: 81804 - RNA, 1410 nt, Artificial Sequence; identical to SEQ ID NO: 80762
  derived and/or modified CDS sequence (opt1) from neuraminidase__InfluenzaA__ACZ96092

SEQ ID NO: 81805 - RNA, 1410 nt, Artificial Sequence; identical to SEQ ID NO: 80762
  derived and/or modified CDS sequence (opt1) from neuraminidase__InfluenzaA__ACZ96102

SEQ ID NO: 81806 - RNA, 1410 nt, Artificial Sequence; identical to SEQ ID NO: 80762
  derived and/or modified CDS sequence (opt1) from neuraminidase__InfluenzaA__ACZ96112

SEQ ID NO: 81807 - RNA, 1410 nt, Artificial Sequence
  derived and/or modified CDS sequence (opt1) from neuraminidase__InfluenzaA__ACZ96122
augaaccccaaccagaagaucaucaccaucggcagcgugugcaugaccaucgggauggccaaccugauccuccagaucggcaacaucaucuccaucuggaucagccacuccauccagcuggggaaccagaaccagaucgaggccugcaaccagagcgucaucacguacgagaacaacaccugggugaaccagaccuacgugaacaucuccaacaccaacuucgcggccggccagagcgucguguccgugaagcuggccgggaacagcucccucugcccggucagcggcugggccaucuacuccaaggacaacagcauccgcaucggcuccaagggggacguguucgugauccgggagcccuucaucagcugcagcccccuggagugccgcacguucuuccugacccagggcgcccuccugaacgacaagcacuccaacgggaccaucaaggaccggucccccuaccgcacccugaugagcugcccgaucggcgagguccccucccccuacaacagccgguucgagagcguggcgugguccgccagcgccugccacgacgggaucaacuggcucacgaucggcaucuccggccccgacaacggggccguggcgguccugaaguacaacggcaucaucaccgacaccaucaagagcuggcgcaacaacauccugcggacccaggaguccgagugcgccugcgugaacgggagcugcuucacggugaugaccgacggcccguccgacggccaggccagcuacaagaucuuccgcaucgagaaggggaagaucgucaaguccguggagaugaacgcccccaacuaccacuacgaggagugcagcugcuaccccgacuccagcgagaucacgugcgugugccgggacaacuggcacggcuccaaccgccccugggucagcuucaaccagaaccucgaguaccagaucggguacaucugcuccggcaucuucggggacaacccgcggcccaacgacaagaccggcagcugcggccccguguccagcaacggggccaacggcgugaagggguucuccuucaaguacggcaacggggucuggaucggccgcaccaagagcaucagcucccggaacggcuucgagaugaucugggaccccaacggguggaccggcaaggacaacaacuucagcaucaagcaggacaucguggggaucaacgagugguccggcuacagcggguccuucgugcagcacccggagcugaccggccuggacugcauccgccccugcuucugggucgagcucauccggggccgccccaaggagaacaccaucuggacgagcggguccagcaucuccuucugcggcaucaacagcgacaccguggggugguccuggcccgacggcgcggagcugccguucaccaucgacaaguga

SEQ ID NO: 81808 - RNA, 1410 nt, Artificial Sequence; identical to SEQ ID NO: 80762
  derived and/or modified CDS sequence (opt1) from neuraminidase__InfluenzaA__ACZ96132

SEQ ID NO: 81809 - RNA, 1410 nt, Artificial Sequence; identical to SEQ ID NO: 80762
  derived and/or modified CDS sequence (opt1) from neuraminidase__InfluenzaA__ACZ96142

SEQ ID NO: 81810 - RNA, 1410 nt, Artificial Sequence; identical to SEQ ID NO: 80762
  derived and/or modified CDS sequence (opt1) from neuraminidase__InfluenzaA__ACZ96152

SEQ ID NO: 81811 - RNA, 1410 nt, Artificial Sequence; identical to SEQ ID NO: 80762
  derived and/or modified CDS sequence (opt1) from neuraminidase__InfluenzaA__ACZ96162

SEQ ID NO: 81812 - RNA, 1410 nt, Artificial Sequence; identical to SEQ ID NO: 80762
  derived and/or modified CDS sequence (opt1) from neuraminidase__InfluenzaA__ACZ96172

SEQ ID NO: 81813 - RNA, 1410 nt, Artificial Sequence
  derived and/or modified CDS sequence (opt1) from neuraminidase__InfluenzaA__ACZ96182
augaaccccaaccagaagaucaucaccaucggcagcgugugcaugaccaucgggauggccaaccugauccuccagaucggcaacaucaucuccaucuggaucagccacuccauccagcuggggaaccagaaccagaucgagacgugcaaccagagcgucaucaccuacgagaacaacaccugggugaaccagaccuacgugaacaucuccaacacgaacuucgccgcgggccagagcgucguguccgugaagcuggccgggaacagcucccucugcccggucagcggcugggccaucuacuccaaggacaacagcauccgcaucggcuccaagggggacguguucgugauccgggagcccuucaucagcugcagcccccuggagugccgcaccuucuuccugacccagggcgcccuccugaacgaccggcacuccaacgggaccaucaaggaccgcucccccuaccggacgcugaugagcugcccgaucggcgagguccccucccccuacaacagccgcuucgagagcguggccugguccgcgagcgccugccacgacgggaucaacuggcucaccaucggcaucuccggccccgacaacggggccguggccguccugaaguacaacggcaucaucaccgacaccaucaagagcuggcggaacaacauccugcgcacgcaggaguccgagugcgcgugcgugaacgggagcugcuucaccgugaugaccgacggcccguccgacggccaggccagcuacaagaucuuccggaucgagaaggggaagaucgucaaguccguggagaugaacgcccccaacuaccacuacgaggagugcagcugcuaccccgacuccagcgagaucacgugcgugugccgcgacaacuggcacggcuccaaccggcccugggucagcuucaaccagaaccucgaguaccagaucggguacaucugcuccggcaucuucggggacaacccgcgccccaacgacaagaccggcagcugcggccccguguccagcaacggggccaacggcgugaagggguucuccuucaaguacggcaacggggucuggaucggccggaccaagagcaucagcucccgcaacggcuucgagaugaucugggaccccaacggguggaccggcaccgacaacaacuucagcaucaagcaggacaucguggggaucaacgagugguccggcuacagcggguccuucgugcagcacccggagcugacgggccuggacugcauccggcccugcuucugggucgagcucauccgcggccggcccaaggagaacaccaucuggaccagcggguccagcaucuccuucugcggcgugaacagcgacaccgucgggugguccuggcccgacggcgccgagcugccguucacgaucgacaaguga

SEQ ID NO: 81814 - RNA, 1410 nt, Artificial Sequence
  derived and/or modified CDS sequence (opt1) from neuraminidase__InfluenzaA__ACZ96192
augaaccccaaccagaagaucaucaccaucggcagcgugugcaugaccaucgggauggccaaccugauccuccagaucggcaacaucaucuccaucuggaucagccacuccauccagcuggggaaccagaaccagaucgagacgugcaaccagagcgucaucaccuacgagaacaacaccugggugaaccagaccuacgugaacaucuccaacacgaacuucgccgcgggccagagcgucguguccgugaagcuggccgggaacagcucccucugcccggucagcggcugggccaucuacuccaaggacaacagcauccgcaucggcuccaagggggacguguucgugauccgggagcccuucaucagcugcagcccccuggagugccgcaccuucuuccugacccagggcgcccuccugaacgacaagcacuccaacgggaccaucaaggaccggucccccuaccgcacgcugaugagcugcccgaucggcgagguccccucccccuacaacagccgguucgagagcguggccugguccgcgagcgccugccacgacgggaucaacuggcucaccaucggcaucuccggccccgacaacggggccguggccguccugaaguacaacggcaucaucaccgacaccaucaagagcuggcgcaacaacauccugcggacgcaggaguccgagugcgcgugcgugaacgggagcugcuucaccgugaugaccgacggcccguccgacggccaggccagcuacaagaucuuccgcaucgagaaggggaagaucgucaaguccguggagaugaacgcccccaacuaccacuacgaggagugcagcugcuaccccgacuccagcgagaucacgugcgugugccgggacaacuggcacggcuccaaccgccccugggucagcuucaaccagaaccucgaguaccagaucggguacaucugcuccggcaucuucggggacaacccgcggagcaacgacaagaccggcuccugcggccccgugagcuccaacggggccaacggcgugaagggguucagcuucaaguacggcaacggggucuggaucggccgcaccaagagcaucuccagccggaacggcuucgagaugaucugggaccccaacggguggaccggcaccgacaacaacuucuccaucaagcaggacaucguggggaucaacgaguggagcggcuacuccgggagcuucgugcagcaccccgagcugacgggccuggacugcauccgcccgugcuucugggucgagcucauccggggccgccccaaggagaacaccaucuggaccuccgggagcuccaucagcuucugcggcgugaacuccgacaccgucggguggagcuggcccgacggcgccgagcugcccuucacgaucgacaaguga

SEQ ID NO: 81815 - RNA, 1410 nt, Artificial Sequence
  derived and/or modified CDS sequence (opt1) from neuraminidase__InfluenzaA__ACZ96232
augaaccccaaccagaagaucaucaccaucggcagcgugugcaugaccgucgggauggccaaccugauccuccagaucggcaacaucaucuccaucuggaucagccacuccauccagcuggggaaccagaaccagaucgagacgugcaaccagagcgugaucaccuacgagaacaacaccugggugaaccagaccuacgucaacaucuccaacacgaacuucgccgcgggccagagcgugguguccgucaagcuggccgggaacagcucccucugcccggugagcggcugggccaucuacuccaaggacaacagcauccgcaucggcuccaagggggacguguucgucauccgggagcccuucaucagcugcagcccccuggagugccgcaccuucuuccugacccagggcgcccuccugaacgacaagcacuccaacgggaccaucaaggaccggucccccuaccgcacgcugaugagcugcccgaucggcgaggugcccucccccuacaacagccgguucgagagcguggccugguccgcgagcgccugccacgacgggaucaacuggcucaccaucggcaucuccggccccgacaacggggccgucgccgugcugaaguacaacggcaucaucaccgacaccaucaagagcuggcgcaacaacauccugcggacgcaggaguccgagugcgcgugcgugaacgggagcugcuucaccgucaugaccgacggcccguccgacggccaggccagcuacaagaucuuccgcaucgagaaggggaagaucgugaaguccguggagaugaacgcccccaacuaccacuacgaggagugcagcugcuaccccgacuccagcgagaucacgugcgucugccgggacaacuggcacggcuccaaccgccccugggugagcuucaaccagaaccucgaguaccagaucggguacaucugcuccggcaucuucggggacaacccgcggcccaacgacaagaccggcagcugcggccccguguccagcaacggggccaacggcgucaagggguucuccuucaaguacggcaacgggguguggaucggccgcaccaagagcaucagcucccggaacggcuucgagaugaucugggaccccaacggguggaccggcaccgacaacgacuucagcaucaagcaggacaucguggggaucaacgagugguccggcuacagcggguccuucguccagcacccggagcugacgggccuggacugcauccgccccugcuucuggguggagcucauccggggccgccccaaggagaacaccaucuggaccagcggguccagcaucuccuucugcggcgucaacagcgacaccguggggugguccuggcccgacggcgccgagcugccguucacgaucgacaaguga

SEQ ID NO: 81816 - RNA, 1410 nt, Artificial Sequence
  derived and/or modified CDS sequence (opt1) from neuraminidase__InfluenzaA__ACZ96242
augaaccccaaccagaagaucaucaccaucggcagcgugugcaugaccaucgggauggccaaccugauccuccagaucggcaacaucaucuccaucuggaucagccacuccauccagcuggggaaccagaaccagaucgagacgugcaaccagagcgucaucaccuacgagaacaacaccugggugaaccagaccuacgugaacaucuccaacacgaacuucgccgcgggccagagcgucguguccgugaagcuggccgggaacagcucccucugcccggucagcggcugggccaucuacuccaaggacaacagcauccgcaucggcuccaagggggacguguucgugauccgggagcccuucaucagcugcagcccccuggagugccgcaccuucuuccugacccagggcgcccuccugaacgacaagcacuccaacgggaccaucaaggaccggucccccuaccgcacgcugaugagcugcccgaucggcgagguccccucccccuacaacagccgguucgagagcguggccugguccgcgagcgccugccacgacgggaucaacuggcucaccaucggcaucuccggccccgacaacggggccguggccguccugaaguacaacggcaucaucaccgacaccaucaagagcuggcgcaacaacauccugcggacgcaggaguccgagugcgcgugcgugaacgggagcugcuucaccgugaugaccgacggcccguccgacggccaggccagcuacaagaucuuccgcaucgagaaggggaagaucgucaaguccguggagaugaacgcccccaacuaccacuacgaggagugcagcugcuaccccgacuccagcgagaucacgugcgugugccgggacaacuggcacggcuccaaccgccccugggucagcuucaaccagaaccucgaguaccagaucggguacaucugcuccggcaucuucggggacaacccgcggcccaacgacaagaccggcagcugcggccccguguccagcaacggggccaacggcgugaagggguucuccuucaaguacggcaacggggucuggaucggccgcaccaagagcaucagcucccggaacggcuucgagaugaucugggaccccaacggguggaccggcaccgacaacaacuucagcaucaagcaggacaucguggggaucaacgagugguccggcuacagcggguccuucgugcagcacccggagcugacgggccuggacugcauccgccccugcuucugggucgagcucauccggggccgccccaaggagagcaccaucuggaccuccgggagcuccaucagcuucugcggcgugaacuccgacaccgucggguggagcuggcccgacggcgccgagcugccguucacgaucgacaaguga

SEQ ID NO: 81817 - RNA, 1410 nt, Artificial Sequence; identical to SEQ ID NO: 80762
  derived and/or modified CDS sequence (opt1) from neuraminidase__InfluenzaA__ACZ96252

SEQ ID NO: 81818 - RNA, 1410 nt, Artificial Sequence; identical to SEQ ID NO: 80762
  derived and/or modified CDS sequence (opt1) from neuraminidase__InfluenzaA__ACZ96292

SEQ ID NO: 81819 - RNA, 1410 nt, Artificial Sequence; identical to SEQ ID NO: 80762
  derived and/or modified CDS sequence (opt1) from neuraminidase__InfluenzaA__ACZ96302

SEQ ID NO: 81820 - RNA, 1410 nt, Artificial Sequence; identical to SEQ ID NO: 80762
  derived and/or modified CDS sequence (opt1) from neuraminidase__InfluenzaA__ACZ96312

SEQ ID NO: 81821 - RNA, 1410 nt, Artificial Sequence
  derived and/or modified CDS sequence (opt1) from neuraminidase__InfluenzaA__ACZ96322
augaaccccaaccagaagaucaucaccaucggcagcgugugcaugaccaucgggauggccaaccugauccuccagaucggcaacaucaucuccaucuggaucagccacuccauccagcuggggaaccagaaccagaucgagacgugcaaccagagcgucaucaccuacgagaacaacaccugggugaaccagaccuacgugaacaucuccaacacgaacuucgccgcgggccagagcgucguguccgugaagcugaccgggaacagcucccucugcccggucagcggcugggccaucuacuccaaggacaacagcauccgcaucggcuccaagggggacguguucgugauccgggagcccuucaucagcugcagcccccuggagugccgcaccuucuuccugacccagggcgcccuccugaacgacaagcacuccaacgggacgaucaaggaccggucccccuaccgcacccugaugagcugcccgaucggcgagguccccucccccuacaacagccgguucgagagcguggccugguccgccagcgcgugccacgacgggaucaacuggcucaccaucggcaucuccggccccgacaacggggccguggccguccugaaguacaacggcaucaucaccgacacgaucaagagcuggcgcaacaacauccugcggacccaggaguccgagugcgccugcgugaacgggagcugcuucaccgugaugaccgacggcccguccgacggccaggcgagcuacaagaucuuccgcaucgagaaggggaagaucgucaaguccguggagaugaacgcccccaacuaccacuacgaggagugcagcugcuaccccgacuccagcgagaucacgugcgugugccgggacaacuggcacggcuccaaccgccccugggucagcuucaaccagaaccucgaguaccagaucggguacaucugcuccggcaucuucggggacaacccgcggcccaacgacaagaccggcagcugcggccccguguccagcaacggggccaacggcgugaagggguucuccuucaaguacggcaacggggucuggaucggccgcaccaagagcaucagcucccggaacggcuucgagaugaucugggaccccaacggguggaccggcacggacaacaacuucagcaucaagcaggacaucguggggaucaacgagugguccggcuacagcggguccuucgugcagcacccggagcugaccggccuggacugcauccgccccugcuucugggucgagcucauccggggccgccccaaggagaacaccaucuggaccagcggguccagcaucuccuucugcggcgugaacagcgacacggucgggugguccuggcccgacggcgccgagcugccguucaccaucgacaaguga

SEQ ID NO: 81822 - RNA, 1410 nt, Artificial Sequence; identical to SEQ ID NO: 81821
  derived and/or modified CDS sequence (opt1) from neuraminidase__InfluenzaA__ACZ96332

SEQ ID NO: 81823 - RNA, 1410 nt, Artificial Sequence; identical to SEQ ID NO: 80762
  derived and/or modified CDS sequence (opt1) from neuraminidase__InfluenzaA__ACZ96352

SEQ ID NO: 81824 - RNA, 1410 nt, Artificial Sequence; identical to SEQ ID NO: 81821
  derived and/or modified CDS sequence (opt1) from neuraminidase__InfluenzaA__ACZ96362

SEQ ID NO: 81825 - RNA, 1410 nt, Artificial Sequence; identical to SEQ ID NO: 80762
  derived and/or modified CDS sequence (opt1) from neuraminidase__InfluenzaA__ACZ96375

SEQ ID NO: 81826 - RNA, 1410 nt, Artificial Sequence; identical to SEQ ID NO: 81821
  derived and/or modified CDS sequence (opt1) from neuraminidase__InfluenzaA__ACZ96385

SEQ ID NO: 81827 - RNA, 1410 nt, Artificial Sequence
  derived and/or modified CDS sequence (opt1) from neuraminidase__InfluenzaA__ACZ96395
augaaccccaaccagaagaucaucaccaucggcagcgugugcaugaccaucgggauggccaaccugauccuccagaucggcaacaucaucuccaucuggaucagccacuccauccagcuggggaaccagaaccagacggagaccugcaaccagagcgucaucaccuacgagaacaacaccugggugaaccagacguacgugaacaucuccaacaccaacuucgccgcgggccagagcgucguguccgugaagcuggccgggaacagcucccucugcccggucagcggcugggccaucuacuccaaggacaacagcgugcgcaucggcuccaagggggacguguucgucauccgggagcccuucaucagcugcagcccccuggagugccgcaccuucuuccugacccagggcgcccuccugaacgacaagcacuccaacgggacgaucaaggaccggucccccuaccgcacccugaugagcugcccgaucggcgaggugcccucccccuacaacagccgguucgagagcguggccugguccgcgagcgccugccacgacgggaucaacuggcucaccaucggcaucuccggccccgacaacggggccgucgccgugcugaaguacaacggcaucaucaccgacacgaucaagagcuggcgcaacaacauccugcggacccaggaguccgagugcgcgugcgugaacgggagcugcuucaccgucaugaccgacggcccguccaacggccaggccagcuacaagaucuuccgcaucgagaaggggaagaucgugaaguccguggagaugaacgcccccaacuaccacuacgaggagugcagcugcuaccccgacuccagcgagaucacgugcgucugccgggacaacuggcacggcuccaaccgccccugggugagcuucaaccagaaccucgaguaccagaucggguacaucugcuccggcaucuucggggacaacccgcggcccaucgacaagaccggcagcugcggccccguguccagcaacggggccaacggcgucaagggguucuccuucaaguacggcaacgggguguggaucggccgcaccaagagcaucagcucccggaacggcuucgagaugaucugggaccccaacggguggaccggcacggacaacaacuucagcaucaagcaggacaucguggggaucaacgagugguccggcuacagcggguccuucguccagcacccggagcugaccggccuggacugcauccgccccugcuucuggguggagcucauccggggccgccccaaggagaacaccaucuggaccagcggguccagcaucuccuucugcggcgucaacagcgacacgguggggugguccuggcccgacggcgccgagcugccguucaccaucgacaaguga

SEQ ID NO: 81828 - RNA, 1410 nt, Artificial Sequence; identical to SEQ ID NO: 80762
  derived and/or modified CDS sequence (opt1) from neuraminidase__InfluenzaA__ACZ96408

SEQ ID NO: 81829 - RNA, 1410 nt, Artificial Sequence; identical to SEQ ID NO: 80762
  derived and/or modified CDS sequence (opt1) from neuraminidase__InfluenzaA__ACZ96428

SEQ ID NO: 81830 - RNA, 1410 nt, Artificial Sequence; identical to SEQ ID NO: 80762
  derived and/or modified CDS sequence (opt1) from neuraminidase__InfluenzaA__ACZ96438

SEQ ID NO: 81831 - RNA, 1410 nt, Artificial Sequence; identical to SEQ ID NO: 80762
  derived and/or modified CDS sequence (opt1) from neuraminidase__InfluenzaA__ACZ96448

SEQ ID NO: 81832 - RNA, 1410 nt, Artificial Sequence; identical to SEQ ID NO: 80762
  derived and/or modified CDS sequence (opt1) from neuraminidase__InfluenzaA__ACZ96479

SEQ ID NO: 81833 - RNA, 1410 nt, Artificial Sequence; identical to SEQ ID NO: 81779
  derived and/or modified CDS sequence (opt1) from neuraminidase__InfluenzaA__ACZ96489

SEQ ID NO: 81834 - RNA, 1410 nt, Artificial Sequence; identical to SEQ ID NO: 80762
  derived and/or modified CDS sequence (opt1) from neuraminidase__InfluenzaA__ACZ96499

SEQ ID NO: 81835 - RNA, 1410 nt, Artificial Sequence
  derived and/or modified CDS sequence (opt1) from neuraminidase__InfluenzaA__ACZ96509
augaaccccaaccagaagaucaucaccaucggcagcgugugcaugaccaucgggauggccaaccugauccuccagaucggcaacaucaucuccaucuggaucagccacuccauccagcuggggaaccagaaccagaucgagacgugcaaccagagcgucaucaccuacgagaacaacaccuggaucaaccagaccuacgugaacaucuccaacacgaacuucgccgcgggccagagcguggucuccgugaagcuggccgggaacagcucccucugcccggugagcggcugggccaucuacuccaaggacaacagcauccgcaucggcuccaagggggacgucuucgugauccgggagcccuucaucagcugcagcccccuggagugccgcaccuucuuccugacccagggcgcccuccugaacgacaagcacuccaacgggaccaucaaggaccggucccccuaccgcacgcugaugagcugcccgaucggcgaggugcccucccccuacaacagccgguucgagagcgucgccugguccgcgagcgccugccacgacgggaucaacuggcucaccaucggcaucuccggccccgacaacggggccguggccgugcugaaguacaacggcaucaucaccgacaccaucaagagcuggcgcaacaacauccugcggacgcaggaguccgagugcgcgugcgucaacgggagcugcuucaccgugaugaccgacggcccguccgacggccaggccagcuacaagaucuuccgcaucgagaaggggaagaucgugaaguccgucgagaugaacgcccccaacuaccacuacgaggagugcagcugcuaccccgacuccagcgagaucacgugcgugugccgggacaacuggcacggcuccaaccgccccugggugagcuucaaccagaaccucgaguaccagaucggguacaucugcuccggcaucuucggggacaacccgcggcccaacgacaagaccggcagcugcggccccgucuccagcaacggggccaacggcgugaagggguucuccuucaaguacggcaacgggguguggaucggccgcaccaagagcaucagcucccggaacggcuucgagaugaucugggaccccaacggguggaccggcaccgacaacaacuucagcaucaagcaggacaucgucgggaucaacgagugguccggcuacagcggguccuucgugcagcacccggagcugacgggccuggacugcauccgccccugcuucuggguggagcucauccggggccgccccaaggagaacaccaucuggaccagcggguccagcaucuccuucugcggcgucaacagcgacaccguggggugguccuggcccgacggcgccgagcugccguucacgaucgacaaguga

SEQ ID NO: 81836 - RNA, 1410 nt, Artificial Sequence; identical to SEQ ID NO: 80762
  derived and/or modified CDS sequence (opt1) from neuraminidase__InfluenzaA__ACZ96519

SEQ ID NO: 81837 - RNA, 1410 nt, Artificial Sequence; identical to SEQ ID NO: 80762
  derived and/or modified CDS sequence (opt1) from neuraminidase__InfluenzaA__ACZ96529

SEQ ID NO: 81838 - RNA, 1410 nt, Artificial Sequence
  derived and/or modified CDS sequence (opt1) from neuraminidase__InfluenzaA__ACZ96552
augaaccccaaccagaagaucaucaccaucggcagcgugugcaugaccaucgggauggccaaccugauccuccagaucggcaacaucaucuccaucuggaucagccacuccagccagcuggggaaccagaaccagaucgagacgugcaaccaguccgucaucaccuacgagaacaacaccugggugaaccagaccuacgugaacaucagcaacacgaacuucgccgcgggccaguccgucgugagcgugaagcuggccgggaacuccagccucugcccggucuccggcugggccaucuacagcaaggacaacuccauccgcaucggcagcaagggggacguguucgugauccgggagcccuucaucuccugcagcccccuggagugccgcaccuucuuccugacccagggcgcccuccugaacgacaagcacuccaacgggaccaucaaggaccggagccccuaccgcacgcugauguccugcccgaucggcgagguccccagccccuacaacagccgguucgaguccguggccuggagcgcguccgccugccacgacgggaucaacuggcucaccaucggcaucagcggccccgacaacggggccguggccguccugaaguacaacggcaucaucaccgacaccaucaaguccuggcgcaacaacauccugcggacgcaggagagcgagugcgcgugcgugaacggguccugcuucaccgugaugaccgacggcccgagcgacggccaggccuccuacaagaucuuccgcaucgagaaggggaagaucgucaagagcguggagaugaacgcccccaacuaccacuacgaggagugcuccugcuaccccgacagcuccgagaucacgugcgugugccgggacaacuggcacggcagcaaccgccccugggucuccuucaaccagaaccucgaguaccagaucggguacaucugcagcggcaucuucggggacaacccgcggcccaacgacaagaccggcuccugcggccccgugagcuccaacggggccaacggcgugaagggguucagcuucaaguacggcaacggggucuggaucggccgcaccaagagcaucuccagccggaacggcuucgagaugaucugggaccccaacggguggaccggcaccgacaacaacuucuccaucaagcaggacaucguggggaucaacgaguggagcggcuacuccgggagcuucgugcagcacccggagcugacgggccuggacugcauccgccccugcuucugggucgagcucauccggggccgccccaaggagaacaccaucuggaccuccgggagcuccaucagcuucugcggcgugaacuccgacaccgucggguggagcuggcccgacggcgccgagcugccguucacgaucgacaaguga

SEQ ID NO: 81839 - RNA, 1410 nt, Artificial Sequence; identical to SEQ ID NO: 80762
  derived and/or modified CDS sequence (opt1) from neuraminidase__InfluenzaA__ACZ96562

SEQ ID NO: 81840 - RNA, 1410 nt, Artificial Sequence; identical to SEQ ID NO: 80762
  derived and/or modified CDS sequence (opt1) from neuraminidase__InfluenzaA__ACZ96572

SEQ ID NO: 81841 - RNA, 1410 nt, Artificial Sequence; identical to SEQ ID NO: 80762
  derived and/or modified CDS sequence (opt1) from neuraminidase__InfluenzaA__ACZ96582

SEQ ID NO: 81842 - RNA, 1410 nt, Artificial Sequence
  derived and/or modified CDS sequence (opt1) from neuraminidase__InfluenzaA__ACZ96592
augaaccccaaccagaagaucaucaccaucggcagcgugugcaugaccaucgggauggccaaccugauccuccagaucggcaacaucaucuccaucuggaucagccacuccauccagcuggggaaccagaaccagaucgagacgugcaaccagagcgucaucaccuacgagaacaacaccugggugaaccagaccuacgugaacaucuccaacacgaacuucgccgcgggccagagcgucguguccgugaagcuggccgggaacagcucccucugcccggucagcggcugggccaucuacuccaaggacaacagcauccgcaucggcuccaagggggacguguucgugauccgggagcccuucaucagcugcagcccccuggagugccgcaccuucuuccugacccagggcgcccuccugaacgacaagcacuccaacgggaccaucaaggaccggucccccuaccgcacgcugaugagcugcccgaucggcgagguccccucccccuacaacagccgguucgagagcguggccugguccgcgagcgccugccacgacgggaucaacuggcucaccaucggcaucuccggccccgacaacggggccguggccguccugaaguacaacggcaucaucaccgacaccaucaagagcuggcgcaacaacauccugcggacgcaggaguccgagugcgcgugcgugaacgggagcugcuucaccgugaugaccgacggcccguccgacggccagagcuccuacaagaucuucaagaucgagaaggggaagaucgucaagagcguggagaugaacgcccccaacuaccacuacgaggagugcuccugcuaccccgacagcuccgagaucacgugcgugugccgcgacaacuggcacggcagcaaccggcccugggucuccuucaaccagaaccucgaguaccagaucggguacaucugcagcggcaucuucggggacaacccgcgccccaacgacaagaccggcuccugcggccccgugagcuccaacggggccaacggcgugaagggguucagcuucaaguacggcaacggggucuggaucggccggaccaagagcaucuccagccgcaacggcuucgagaugaucugggaccccaacggguggaccggcaccgacaacaacuucuccaucaagcaggacaucguggggaucaacgaguggagcggcuacuccgggagcuucgugcagcacccggagcugacgggccuggacugcauccggcccugcuucugggucgagcucauccgcggccggcccaaggagaacaccaucuggaccuccgggagcuccaucagcuucugcggcgugaacuccgacaccgucggguggagcuggcccgacggcgccgagcugccguucacgaucgacaaguga

SEQ ID NO: 81843 - RNA, 1410 nt, Artificial Sequence; identical to SEQ ID NO: 80762
  derived and/or modified CDS sequence (opt1) from neuraminidase__InfluenzaA__ACZ96602

SEQ ID NO: 81844 - RNA, 1410 nt, Artificial Sequence
  derived and/or modified CDS sequence (opt1) from neuraminidase__InfluenzaA__ACZ96612
augaaccccaaccagaagaucaucaccaucggcagcgugugcaugaccaucgggauggccaaccugauccuccagaucggcaacaucaucuccaucuggaucagccacuccauccagcuggggaaccagaaccagaucgagacgugcaaccagagcgucgugaccuacgagaacaacaccugggugaaccagaccuacgucaacaucuccaacacgaacuucgccgcgggccagagcgugguguccgucaagcuggccgggaacagcucccucugcccggugagcggcugggccaucuacuccaaggacaacagcgugcgcaucggcuccaagggggacgucuucgugauccgggagcccuucaucagcugcagcccccuggagugccgcaccuucuuccugacccagggcgcccuccugaacgacaagcacuccaacgggaccaucaaggaccggucccccuaccgcacgcugaugagcugcccgaucggcgaggugcccucccccuacaacagccgguucgagagcgucgccugguccgcgagcgccugccacgacgggaucaacuggcucaccaucggcaucuccggccccgacaacggggccguggccgugcugaaguacaacggcaucaucaccgacaccaucaagagcuggcgcaacaacauccugcggacgcaggaguccgagugcgcgugcgucaacgggagcugcuucaccgugaugaccgacggcccguccaacggccaggccagcuacaagaucuuccgcaucgagaaggggaagaucgugaaguccgucgagaugaacgcccccaacuaccacuacgaggagugcagcugcuaccccgacuccagcgagaucacgugcgugugccgggacaacuggcacggcuccaaccgccccugggugagcuucaaccagaaccucgaguaccagaucggguacaucugcuccggcaucuucggggacaacccgcggcccaacgacaagaccggcagcugcggccccgucuccagcaacggggccaacggcgugaagggguucuccuucaaguacggcaacgggguguggaucggccgcaccaagagcaucagcucccggaacggcuucgagaugaucugggaccccaacggguggaccggcaccgacaacaacuucagcaucaagcaggacaucgucgggaucaacgagugguccggcuacagcggguccuucgugcagcacccggagcugacgggccuggacugcauccgccccugcuucugggucgagcucauccggggccgccccaaggagaacaccaucuggaccagcggguccagcaucuccuucugcggcgugaacagcgacaccguggggugguccuggcccgacggcgccgagcugccguucacgaucgacaaguga

SEQ ID NO: 81845 - RNA, 1410 nt, Artificial Sequence; identical to SEQ ID NO: 80792
  derived and/or modified CDS sequence (opt1) from neuraminidase__InfluenzaA__ACZ96622

SEQ ID NO: 81846 - RNA, 1410 nt, Artificial Sequence; identical to SEQ ID NO: 80792
  derived and/or modified CDS sequence (opt1) from neuraminidase__InfluenzaA__ACZ96632

SEQ ID NO: 81847 - RNA, 1410 nt, Artificial Sequence; identical to SEQ ID NO: 80792
  derived and/or modified CDS sequence (opt1) from neuraminidase__InfluenzaA__ACZ96642

SEQ ID NO: 81848 - RNA, 1410 nt, Artificial Sequence; identical to SEQ ID NO: 80792
  derived and/or modified CDS sequence (opt1) from neuraminidase__InfluenzaA__ACZ96652

SEQ ID NO: 81849 - RNA, 1410 nt, Artificial Sequence; identical to SEQ ID NO: 80792
  derived and/or modified CDS sequence (opt1) from neuraminidase__InfluenzaA__ACZ96662

SEQ ID NO: 81850 - RNA, 1410 nt, Artificial Sequence; identical to SEQ ID NO: 80792
  derived and/or modified CDS sequence (opt1) from neuraminidase__InfluenzaA__ACZ96672

SEQ ID NO: 81851 - RNA, 1410 nt, Artificial Sequence; identical to SEQ ID NO: 80792
  derived and/or modified CDS sequence (opt1) from neuraminidase__InfluenzaA__ACZ96682

SEQ ID NO: 81852 - RNA, 1410 nt, Artificial Sequence; identical to SEQ ID NO: 80792
  derived and/or modified CDS sequence (opt1) from neuraminidase__InfluenzaA__ACZ96692

SEQ ID NO: 81853 - RNA, 1410 nt, Artificial Sequence; identical to SEQ ID NO: 80792
  derived and/or modified CDS sequence (opt1) from neuraminidase__InfluenzaA__ACZ96702

SEQ ID NO: 81854 - RNA, 1410 nt, Artificial Sequence; identical to SEQ ID NO: 80792
  derived and/or modified CDS sequence (opt1) from neuraminidase__InfluenzaA__ACZ96712

SEQ ID NO: 81855 - RNA, 1410 nt, Artificial Sequence; identical to SEQ ID NO: 80792
  derived and/or modified CDS sequence (opt1) from neuraminidase__InfluenzaA__ACZ96722

SEQ ID NO: 81856 - RNA, 1410 nt, Artificial Sequence; identical to SEQ ID NO: 80792
  derived and/or modified CDS sequence (opt1) from neuraminidase__InfluenzaA__ACZ96732

SEQ ID NO: 81857 - RNA, 1410 nt, Artificial Sequence; identical to SEQ ID NO: 80792
  derived and/or modified CDS sequence (opt1) from neuraminidase__InfluenzaA__ACZ96742

SEQ ID NO: 81858 - RNA, 1410 nt, Artificial Sequence; identical to SEQ ID NO: 80752
  derived and/or modified CDS sequence (opt1) from neuraminidase__InfluenzaA__ACZ96752

SEQ ID NO: 81859 - RNA, 1410 nt, Artificial Sequence; identical to SEQ ID NO: 80752
  derived and/or modified CDS sequence (opt1) from neuraminidase__InfluenzaA__ACZ96762

SEQ ID NO: 81860 - RNA, 1410 nt, Artificial Sequence; identical to SEQ ID NO: 80752
  derived and/or modified CDS sequence (opt1) from neuraminidase__InfluenzaA__ACZ96772

SEQ ID NO: 81861 - RNA, 1410 nt, Artificial Sequence; identical to SEQ ID NO: 80752
  derived and/or modified CDS sequence (opt1) from neuraminidase__InfluenzaA__ACZ96782

SEQ ID NO: 81862 - RNA, 1410 nt, Artificial Sequence; identical to SEQ ID NO: 80752
  derived and/or modified CDS sequence (opt1) from neuraminidase__InfluenzaA__ACZ96792

SEQ ID NO: 81863 - RNA, 1410 nt, Artificial Sequence; identical to SEQ ID NO: 80762
  derived and/or modified CDS sequence (opt1) from neuraminidase__InfluenzaA__ACZ96802

SEQ ID NO: 81864 - RNA, 1410 nt, Artificial Sequence; identical to SEQ ID NO: 80762
  derived and/or modified CDS sequence (opt1) from neuraminidase__InfluenzaA__ACZ96812

SEQ ID NO: 81865 - RNA, 1410 nt, Artificial Sequence; identical to SEQ ID NO: 81345
  derived and/or modified CDS sequence (opt1) from neuraminidase__InfluenzaA__ACZ96822

SEQ ID NO: 81866 - RNA, 1410 nt, Artificial Sequence
  derived and/or modified CDS sequence (opt1) from neuraminidase__InfluenzaA__ACZ96842
augaaccccaaccagaagaucaucaccaucggcagcgugugcaugaccaucgggauggccaaccugauccuccagaucggcaacaucaucuccaucuggaucagccacuccauccagcuggggaaccagaaccagaucgagacgugcaaccagagcgucaucaccuacgagaacaacaccugggugaaccagaccuacgugaacaucuccaacacgaacuucgccgcgggccagagcgucguguccgugaagcuggccgggaacagcucccucugcccggucagcggcugggccaucuacuccaaggacaacagcgugcgcaucggcuccaagggggacguguucgucauccgggagcccuucaucagcugcagcccccuggagugccgcaccuucuuccugacccagggcgcccuccugaacgacaagcacuccaacgggaccaucaaggaccggucccccuaccgcacgcugaugagcugcccgaucggcgaggugcccucccccuacaacagccgguucgagagcguggccugguccgcgagcgccugccacgacgggaucaacuggcucaccaucggcaucuccggccccgacaacggggccgucgccgugcugaaguacaacggcaucaucaccgacaccaucaagagcuggcgcaacaacauccugcggacgcaggaguccgagugcgcgugcgugaacgggagcugcuucaccgucaugaccgacggcccguccaacggccaggccagcuacaagaucuuccgcaucgagaaggggaagaucgugaaguccguggagaugaucgcccccaacuaccacuacgaggagugcagcugcuaccccgacuccagcgagaucacgugcgucugccgggacaacuggcacggcuccaaccgccccugggugagcuucaaccagaaccucgaguaccagaucggguacaucugcuccggcaucuucggggacaacccgcggcccaacgacaagaccggcagcugcggccccguguccagcaacggggccaacggcgucaagggguucuccuucaaguacggcaacgggguguggaucggccgcaccaagagcaucagcucccggaacggcuucgagaugaucugggaccccaacggguggaccggcaccgacaacaacuucagcaucaagcaggacaucguggggaucaacgagugguccggcuacagcggguccuucguccagcacccggagcugacgggccuggacugcauccgccccugcuucuggguggagcucauccggggccgccccaaggagaacaccaucuggaccagcggguccagcaucuccuucugcggcgucaacagcgacaccguggggugguccuggcccgacggcgccgagcugccguucacgaucgacaaguga

SEQ ID NO: 81867 - RNA, 1410 nt, Artificial Sequence; identical to SEQ ID NO: 80762
  derived and/or modified CDS sequence (opt1) from neuraminidase__InfluenzaA__ACZ96852

SEQ ID NO: 81868 - RNA, 1410 nt, Artificial Sequence; identical to SEQ ID NO: 80762
  derived and/or modified CDS sequence (opt1) from neuraminidase__InfluenzaA__ACZ96862

SEQ ID NO: 81869 - RNA, 1410 nt, Artificial Sequence
  derived and/or modified CDS sequence (opt1) from neuraminidase__InfluenzaA__ACZ96872
augaaccccaaccagaagaucaucaccaucggcagcgugugcaugaccaucgggauggccaaccugauccuccagaucggcaacaucaucuccaucuggaucagccacuccauccagcuggggaaccagaaccagaucgagacgugcaaccagagcgucaucaccuacgagaacaacaccugggugaaccagaccuacgugaacaucuccaacacgaacuucgccgcgggccagagcgucguguccaugaagcuggccgggaacagcucccucugcccggugagcggcugggccaucuacuccaaggacaacagcauccgcaucggcuccaagggggacgucuucgugauccgggagcccuucaucagcugcagcccccuggagugccgcaccuucuuccugacccagggcgcccuccugaacgacaagcacuccaacgggaccaucaaggaccggucccccuaccgcacgcugaugagcugcccgaucggcgaggugcccucccccuacaacagccgguucgagagcgucgccugguccgcgagcgccugccacgacgggaucaacuggcucaccaucggcaucuccggccccgacaacggggccguggccgugcugaaguacaacggcaucaucaccgacaccaucaagagcuggcgcaacaacauccugcggacgcaggaguccgagugcgcgugcgucaacgggagcugcuucaccgugaugaccgacggcccguccgacggccaggccagcuacaagaucuuccgcaucgagaaggggaagaucgugaaguccgucgagaugaacgcccccaacuaccacuacgaggagugcagcugcuaccccgacuccagcgagaucacgugcgugugccgggacaacuggcacggcuccaaccgccccugggugagcuucaaccagaaccucgaguaccagaucggguacaucugcuccggcaucuucggggacaacccgcggcccaacgacaagaccggcagcugcggccccgucuccagcaacggggccaacggcgugaagggguucuccuucaaguacggcaacgggguguggaucggccgcaccaagagcaucagcucccggaacggcuucgagaugaucugggaccccaacggguggaccggcaccgacaacaacuucagcaucaagcaggacaucgucgggaucaacgagugguccggcuacagcggguccuucgugcagcacccggagcugacgggccuggacugcauccgccccugcuucuggguggagcucauccggggccgccccaaggagaacaccaucuggaccagcggguccagcaucuccuucugcggcgucaacagcgacaccguggggugguccuggcccgacggcgccgagcugccguucacgaucgacaaguga

SEQ ID NO: 81870 - RNA, 1410 nt, Artificial Sequence; identical to SEQ ID NO: 80752
  derived and/or modified CDS sequence (opt1) from neuraminidase__InfluenzaA__ACZ96882

SEQ ID NO: 81871 - RNA, 1410 nt, Artificial Sequence; identical to SEQ ID NO: 81869
  derived and/or modified CDS sequence (opt1) from neuraminidase__InfluenzaA__ACZ96892

SEQ ID NO: 81872 - RNA, 1410 nt, Artificial Sequence; identical to SEQ ID NO: 81869
  derived and/or modified CDS sequence (opt1) from neuraminidase__InfluenzaA__ACZ96902

SEQ ID NO: 81873 - RNA, 1410 nt, Artificial Sequence; identical to SEQ ID NO: 80752
  derived and/or modified CDS sequence (opt1) from neuraminidase__InfluenzaA__ACZ96912

SEQ ID NO: 81874 - RNA, 1410 nt, Artificial Sequence; identical to SEQ ID NO: 80752
  derived and/or modified CDS sequence (opt1) from neuraminidase__InfluenzaA__ACZ96922

SEQ ID NO: 81875 - RNA, 1410 nt, Artificial Sequence; identical to SEQ ID NO: 81869
  derived and/or modified CDS sequence (opt1) from neuraminidase__InfluenzaA__ACZ96932

SEQ ID NO: 81876 - RNA, 1410 nt, Artificial Sequence; identical to SEQ ID NO: 81869
  derived and/or modified CDS sequence (opt1) from neuraminidase__InfluenzaA__ACZ96942

SEQ ID NO: 81877 - RNA, 1410 nt, Artificial Sequence; identical to SEQ ID NO: 80752
  derived and/or modified CDS sequence (opt1) from neuraminidase__InfluenzaA__ACZ96952

SEQ ID NO: 81878 - RNA, 1410 nt, Artificial Sequence; identical to SEQ ID NO: 80752
  derived and/or modified CDS sequence (opt1) from neuraminidase__InfluenzaA__ACZ97024

SEQ ID NO: 81879 - RNA, 1410 nt, Artificial Sequence; identical to SEQ ID NO: 81869
  derived and/or modified CDS sequence (opt1) from neuraminidase__InfluenzaA__ACZ97336

SEQ ID NO: 81880 - RNA, 1410 nt, Artificial Sequence; identical to SEQ ID NO: 81869
  derived and/or modified CDS sequence (opt1) from neuraminidase__InfluenzaA__ACZ97346

SEQ ID NO: 81881 - RNA, 1410 nt, Artificial Sequence; identical to SEQ ID NO: 80762
  derived and/or modified CDS sequence (opt1) from neuraminidase__InfluenzaA__ACZ97366

SEQ ID NO: 81882 - RNA, 1410 nt, Artificial Sequence; identical to SEQ ID NO: 80762
  derived and/or modified CDS sequence (opt1) from neuraminidase__InfluenzaA__ACZ97376

SEQ ID NO: 81883 - RNA, 1410 nt, Artificial Sequence; identical to SEQ ID NO: 80762
  derived and/or modified CDS sequence (opt1) from neuraminidase__InfluenzaA__ACZ97386

SEQ ID NO: 81884 - RNA, 1410 nt, Artificial Sequence; identical to SEQ ID NO: 81869
  derived and/or modified CDS sequence (opt1) from neuraminidase__InfluenzaA__ACZ97396

SEQ ID NO: 81885 - RNA, 1410 nt, Artificial Sequence; identical to SEQ ID NO: 80762
  derived and/or modified CDS sequence (opt1) from neuraminidase__InfluenzaA__ACZ98171

SEQ ID NO: 81886 - RNA, 1410 nt, Artificial Sequence; identical to SEQ ID NO: 80762
  derived and/or modified CDS sequence (opt1) from neuraminidase__InfluenzaA__ACZ98181

SEQ ID NO: 81887 - RNA, 1410 nt, Artificial Sequence
  derived and/or modified CDS sequence (opt1) from neuraminidase__InfluenzaA__ACZ98191
augaaccccaaccagaagaucaucaccaucggcagcgugugcaugaccaucgggauggccaaccugauccuccagaucggcaacaucaucuccaucuggaucagccacuccauccagcuggggaaccagaaccagaucgagacgugcaaccagagcgucaucuccuacgagaacaacaccugggugaaccagaccuacgugaacaucagcaacaccaacuucgccgcgggccaguccgucgugagcgugaagcuggccgggaacuccagccucugcccggucuccggcugggccaucuacagcaaggacaacuccauccgcaucggcagcaagggggacguguucgugauccgggagcccuucaucuccugcagcccccuggagugccgcacguucuuccugacccagggcgcccuccugaacgacaagcacuccaacgggaccaucaaggaccggagccccuaccgcacccugauguccugcccgaucggcgagguccccagccccuacaacagccgguucgaguccguggccuggagcgcguccgccugccacgacgggaucaacuggcucacgaucggcaucagcggccccgacaacggggccguggccguccugaaguacaacggcaucaucaccgacaccaucaaguccuggcgcaacaacauccugcggacccaggagagcgagugcgcgugcgugaacggguccugcuucacggugaugaccgacggcccgagcgacggccaggccuccuacaagaucuuccgcaucgagaaggggaagaucgucaagagcguggagaugaacgcccccaacuaccacuacgaggagugcuccugcuaccccgacagcuccgagaucacgugcgugugccgggacaacuggcacggcagcaaccgccccugggucuccuucaaccagaaccucgaguaccagaucggguacaucugcagcggcaucuucggggacaacccgcggcccaacgacaagaccggcuccugcggccccgugagcuccaacggggccaacggcgugaagggguucagcuucaaguacggcaacggggucuggaucggccgcaccaagagcaucuccagccggaacggcuucgagaugaucugggaccccaacggguggaccggcaccgacaacaacuucuccaucaagcaggacaucguggggaucaacgaguggagcggcuacuccgggagcuucgugcagcacccggagcugaccggccuggacugcauccgccccugcuucugggucgagcucauccggggccgccccaaggagaacacgaucuggaccuccgggagcuccaucagcuucugcggcgugaacuccgacaccgucggguggagcuggcccgacggcgccgagcugccguucaccaucgacaaguga

SEQ ID NO: 81888 - RNA, 1410 nt, Artificial Sequence; identical to SEQ ID NO: 80752
  derived and/or modified CDS sequence (opt1) from neuraminidase__InfluenzaA__ACZ98201

SEQ ID NO: 81889 - RNA, 1410 nt, Artificial Sequence; identical to SEQ ID NO: 80762
  derived and/or modified CDS sequence (opt1) from neuraminidase__InfluenzaA__ACZ98211

SEQ ID NO: 81890 - RNA, 1410 nt, Artificial Sequence; identical to SEQ ID NO: 80762
  derived and/or modified CDS sequence (opt1) from neuraminidase__InfluenzaA__ACZ98221

SEQ ID NO: 81891 - RNA, 1410 nt, Artificial Sequence; identical to SEQ ID NO: 80762
  derived and/or modified CDS sequence (opt1) from neuraminidase__InfluenzaA__ACZ98231

SEQ ID NO: 81892 - RNA, 1410 nt, Artificial Sequence; identical to SEQ ID NO: 80762
  derived and/or modified CDS sequence (opt1) from neuraminidase__InfluenzaA__ACZ98241

SEQ ID NO: 81893 - RNA, 1410 nt, Artificial Sequence; identical to SEQ ID NO: 81739
  derived and/or modified CDS sequence (opt1) from neuraminidase__InfluenzaA__ACZ98251

SEQ ID NO: 81894 - RNA, 1410 nt, Artificial Sequence; identical to SEQ ID NO: 80762
  derived and/or modified CDS sequence (opt1) from neuraminidase__InfluenzaA__ACZ98261

SEQ ID NO: 81895 - RNA, 1410 nt, Artificial Sequence; identical to SEQ ID NO: 80762
  derived and/or modified CDS sequence (opt1) from neuraminidase__InfluenzaA__ACZ98271

SEQ ID NO: 81896 - RNA, 1410 nt, Artificial Sequence; identical to SEQ ID NO: 80762
  derived and/or modified CDS sequence (opt1) from neuraminidase__InfluenzaA__ACZ98281

SEQ ID NO: 81897 - RNA, 1410 nt, Artificial Sequence; identical to SEQ ID NO: 80762
  derived and/or modified CDS sequence (opt1) from neuraminidase__InfluenzaA__ACZ98291

SEQ ID NO: 81898 - RNA, 1410 nt, Artificial Sequence; identical to SEQ ID NO: 80752
  derived and/or modified CDS sequence (opt1) from neuraminidase__InfluenzaA__ACZ98301

SEQ ID NO: 81899 - RNA, 1410 nt, Artificial Sequence
  derived and/or modified CDS sequence (opt1) from neuraminidase__InfluenzaA__ACZ98321
augaaccccaaccagaagaucaucaccaucggcagcgugugcaugaccaucgggauggccaaccugauccuccagaucggcaacaucaucuccaucuggaucagccacuccauccagcuggggaaccagaaccagaucgagacgugcaaccagagcgucaucaccuacgagaacaacaccugggugaaccagaccuacgugaacaucuccaacacgaacuucgccgcgggccagagcgucguguccgugaagcuggccgggaacagcucccucugcccggucagcggcugggccaucuacuccaaggacaacagcauccgcaucggcuccaagggggacguguucgugauccgggagcccuucaucagcugcagcccccuggagugccgcaccuucuuccugacccagggcgcccuccugaacgacaagcacuccaacgggaccaucaaggaccggucccccuaccgcacgcugaugagcugcccgaucggcgagguccccucccccuacaacagccgguucgagagcguggccugguccgcgagcgccugccacgacgggaucaacuggcucaccaucggcaucuccggccccgacaacggggccguggccguccugaaguacaacggcaucaucaccgacaccaucaagagcuggcgcaacaacauccugcggacgcaggaguccgagugcgcgugcgugaacgggagcugcuucaccgugaugaccgacggcccguccgacggccaggccagcuacaagaucuuccgcaucgagaaggggaagaucgucaaguccguggagaugaacgcccccaacuaccacuacgaggagugcagcugcuaccccgacuccagcgagaucacgugcgugugccgggacaacuggcacggcuccaaccgccccugggucagcuucaaccagaaccucgaguaccagaucggguacaucugcuccggcaucuucggggacaacccgcggcccaacgacaagaccggcagcugcggccccguguccagcaacggggccaacggcgugaagggguucuccuucaaguacggcaacggggucuggaucggccgcaccaagagcaucaacagccggaacggcuucgagaugaucugggaccccaacggguggaccggcaccgacaacaacuucuccaucaagcaggacaucguggggaucaacgaguggagcggcuacuccgggagcuucgugcagcacccggagcugacgggccuggacugcauccgccccugcuucugggucgagcucauccggggccgccccaaggagaacaccaucuggaccuccgggagcuccaucagcuucugcggcgugaacuccgacaccgucggguggagcuggcccgacggcgccgagcugccguucacgaucgacaaguga

SEQ ID NO: 81900 - RNA, 1410 nt, Artificial Sequence; identical to SEQ ID NO: 80762
  derived and/or modified CDS sequence (opt1) from neuraminidase__InfluenzaA__ACZ98331

SEQ ID NO: 81901 - RNA, 1410 nt, Artificial Sequence
  derived and/or modified CDS sequence (opt1) from neuraminidase__InfluenzaA__ACZ98341
augaaccccaaccagaagaucaucaccaucggcagcgugugcaucaccaucgggauggccaaccugauccuccagaucggcaacaucaucuccaucuggaucagccacccgauccagcuggggaaccagaaccagaucgagacgugcaaccaguccgucaucaccuacgagaacaacaccugggugaaccagaccuacgugaacaucagcaacacgaaccuggccgcgggccaguccgucgugagcgugaagcucgccgggaacuccagccugugccccgucuccggcugggccaucuacagcaaggacaacuccauccgcaucggcagcaagggggacguguucgugauccgggagcccuucaucuccugcagcccccuggagugccgcaccuucuuccucacccagggcgcccugcugaacgacaagcacuccaacgggaccaucaaggaccggagcccguaccgcacgcucauguccugccccaucggcgagguccccagccccuacaacucccgguucgagagcguggccuggagcgcguccgccugccacgacgggaucaacuggcugaccaucggcaucagcggcccggacaacggggccguggccguccugaaguacaacggcaucaucaccgacaccaucaaguccuggcgcaacaacauccuccggacgcaggagagcgagugcgcgugcgugaacggguccugcuucaccgugaugaccgacggccccagcgacggccaggccuccuacaagaucuuccgcaucgagaaggggaagaucgucaagagcguggagaugaacgcccccaacuaccacuacgaggagugcuccugcuaccccgacagcuccgagaucacgugcgugugccgggacaacuggcacggcagcaaccgcccgugggucuccuucaaccagaaccuggaguaccagaucggguacaucugcagcggcaucuucggggacaacccccggcccaacgacaagaccggcuccugcggccccgugagcuccaacggggccaacggcgugaagggguucagcuucaaguacggcaacggggucuggaucggccgcaccaaguccaucagcagccggaacggcuucgagaugaucugggacccgaacggguggaccggcaccgacaacaacuucuccaucaagcaggacaucguggggaucaacgaguggagcggcuacuccgggagcuucgugcagcaccccgagcugacgggccucgacugcauccgccccugcuucugggucgagcugauccggggccgccccaaggagaacaccaucuggaccuccgggagcuccaucagcuucugcggcgugaacuccgacaccgucggguggagcuggccggacggcgccgagcugcccuucacgaucgacaaguga

SEQ ID NO: 81902 - RNA, 1410 nt, Artificial Sequence; identical to SEQ ID NO: 80762
  derived and/or modified CDS sequence (opt1) from neuraminidase__InfluenzaA__ACZ98351

SEQ ID NO: 81903 - RNA, 1410 nt, Artificial Sequence; identical to SEQ ID NO: 80762
  derived and/or modified CDS sequence (opt1) from neuraminidase__InfluenzaA__ACZ98361

SEQ ID NO: 81904 - RNA, 1410 nt, Artificial Sequence; identical to SEQ ID NO: 80762
  derived and/or modified CDS sequence (opt1) from neuraminidase__InfluenzaA__ACZ98371

SEQ ID NO: 81905 - RNA, 1410 nt, Artificial Sequence; identical to SEQ ID NO: 80762
  derived and/or modified CDS sequence (opt1) from neuraminidase__InfluenzaA__ACZ98381

SEQ ID NO: 81906 - RNA, 1410 nt, Artificial Sequence; identical to SEQ ID NO: 80762
  derived and/or modified CDS sequence (opt1) from neuraminidase__InfluenzaA__ACZ98391

SEQ ID NO: 81907 - RNA, 1410 nt, Artificial Sequence; identical to SEQ ID NO: 80762
  derived and/or modified CDS sequence (opt1) from neuraminidase__InfluenzaA__ACZ98401

SEQ ID NO: 81908 - RNA, 1410 nt, Artificial Sequence; identical to SEQ ID NO: 80762
  derived and/or modified CDS sequence (opt1) from neuraminidase__InfluenzaA__ACZ98411

SEQ ID NO: 81909 - RNA, 1410 nt, Artificial Sequence; identical to SEQ ID NO: 80792
  derived and/or modified CDS sequence (opt1) from neuraminidase__InfluenzaA__ACZ98421

SEQ ID NO: 81910 - RNA, 1410 nt, Artificial Sequence; identical to SEQ ID NO: 80762
  derived and/or modified CDS sequence (opt1) from neuraminidase__InfluenzaA__ACZ98431

SEQ ID NO: 81911 - RNA, 1410 nt, Artificial Sequence; identical to SEQ ID NO: 80762
  derived and/or modified CDS sequence (opt1) from neuraminidase__InfluenzaA__ACZ98441

SEQ ID NO: 81912 - RNA, 1410 nt, Artificial Sequence; identical to SEQ ID NO: 80762
  derived and/or modified CDS sequence (opt1) from neuraminidase__InfluenzaA__ACZ98451

SEQ ID NO: 81913 - RNA, 1410 nt, Artificial Sequence; identical to SEQ ID NO: 80762
  derived and/or modified CDS sequence (opt1) from neuraminidase__InfluenzaA__ACZ98461

SEQ ID NO: 81914 - RNA, 1410 nt, Artificial Sequence; identical to SEQ ID NO: 81345
  derived and/or modified CDS sequence (opt1) from neuraminidase__InfluenzaA__ACZ98674

SEQ ID NO: 81915 - RNA, 1410 nt, Artificial Sequence; identical to SEQ ID NO: 81869
  derived and/or modified CDS sequence (opt1) from neuraminidase__InfluenzaA__ACZ98684

SEQ ID NO: 81916 - RNA, 1410 nt, Artificial Sequence; identical to SEQ ID NO: 81815
  derived and/or modified CDS sequence (opt1) from neuraminidase__InfluenzaA__ACZ98694

SEQ ID NO: 81917 - RNA, 1410 nt, Artificial Sequence; identical to SEQ ID NO: 80762
  derived and/or modified CDS sequence (opt1) from neuraminidase__InfluenzaA__ADA60801

SEQ ID NO: 81918 - RNA, 1410 nt, Artificial Sequence; identical to SEQ ID NO: 80762
  derived and/or modified CDS sequence (opt1) from neuraminidase__InfluenzaA__ADA69294

SEQ ID NO: 81919 - RNA, 1410 nt, Artificial Sequence; identical to SEQ ID NO: 80762
  derived and/or modified CDS sequence (opt1) from neuraminidase__InfluenzaA__ADA69304

SEQ ID NO: 81920 - RNA, 1410 nt, Artificial Sequence; identical to SEQ ID NO: 80762
  derived and/or modified CDS sequence (opt1) from neuraminidase__InfluenzaA__ADA69314

SEQ ID NO: 81921 - RNA, 1410 nt, Artificial Sequence; identical to SEQ ID NO: 80762
  derived and/or modified CDS sequence (opt1) from neuraminidase__InfluenzaA__ADA69324

SEQ ID NO: 81922 - RNA, 1410 nt, Artificial Sequence; identical to SEQ ID NO: 80762
  derived and/or modified CDS sequence (opt1) from neuraminidase__InfluenzaA__ADA69334

SEQ ID NO: 81923 - RNA, 1410 nt, Artificial Sequence; identical to SEQ ID NO: 80762
  derived and/or modified CDS sequence (opt1) from neuraminidase__InfluenzaA__ADA69451

SEQ ID NO: 81924 - RNA, 1410 nt, Artificial Sequence; identical to SEQ ID NO: 80762
  derived and/or modified CDS sequence (opt1) from neuraminidase__InfluenzaA__ADA69453

SEQ ID NO: 81925 - RNA, 1410 nt, Artificial Sequence
  derived and/or modified CDS sequence (opt1) from neuraminidase__InfluenzaA__ADA71153
augaaccccaaccagaagaucaucaccaucggcagcgugucccugaccaucagcacgaucugcuucuucaugcagaucgccauccucgucaccaccgugacccugcacuucaagcaguacgaguucaacuccccgcccaacaaccaggugaugcugugcgagcccacgaucaucgagcgcaacaucaccgagaucgucuaccucaccaacaccacgaucgagaaggagaucugccccaagcuggccgaguaccggaacuggagcaagccgcagugcgacaucaccggguucgcgcccuucuccaaggacaacagcauccgccuguccgccggcggggacaucugggugacccgggagcccuacgugagcugcgaccccgacaagugcuaccaguucgcccucggccaggggaccacgcugaacaacguccacuccaacaacaccgugcgcgaccggaccccguaccgcacccugcucaugaacgagcugggcgugcccuuccaccugggcacgaagcaggucugcaucgccuggagcuccagcuccugccacgacgggaaggccuggcuccacgugugcaucaccggcgacgacaagaacgcgaccgccagcuucaucuacaacgggcggcugguggacuccgucgugagcugguccaaggacauccugcgcacccaggagagcgagugcgugugcaucaacggcacgugcaccgucgugaugaccgacggguccgccagcggcaaggccgacaccaagauccucuucaucgaggagggcaagaucgugcacacgagcacccuguccgggagcgcgcagcacgucgaggagugcuccugcuacccccgguaccccggcgugcgcugcgugugccgggacaacuggaaggggagcaaccgcccgaucgucgacaucaacaucaaggaccacuccaucgugagccgguacgugugcuccggccuggucggcgacccgccccgcaagaacgacagcuccagcuccagccacugccucgaccccaacaacgaggagggcgggcacggggugaagggcugggccuucgacgacgggaacgacgucuggaugggccggaccaucuccgagaagucccgccugggcuacgagaccuucaaggugaucgagggguggagcaaccccaagagcaagcugcagaucaaccgccaggugaucgucgaccggggcaaccgguccggguacagcggcaucuucuccguggagggcaagagcugcaucaaccgcugcuucuacguggagcucauccgggggcgcaaggaggagacggagguccuguggaccagcaacuccaucgugguguucugcggcaccagcgggaccuacggcacgggguccuggcccgacggcgccaacaucaaccugaugcccaucuga

SEQ ID NO: 81926 - RNA, 1413 nt, Artificial Sequence
  derived and/or modified CDS sequence (opt1) from neuraminidase__InfluenzaA__ADA71155
augaaccccaaccagaagaucaucaccaucggcagcaucuccaucgccaucgggaucaucagccugaugcuccagaucggcaacaucaucuccaucugggccagccacuccauccagaucgggagccagaacaacaccggcaucugcaaccagcgcaucaucacguacgagaacuccaccugggugaaccacaccuacgucaacaucaacaacaccaaggugguggcgggggaggacaagacgagcgucacccuggccggcaacuccagccugugcuccaucagcggcugggccaucuacaccaaggacaacuccauccggaucgggagcaagggcgacguguucgugauccgcgagccguucaucuccugcagccaccucgagugccggaccuucuuccugacgcagggggcccugcucaacgacaagcacuccaacggcaccgucaaggaccgcagccccuaccgggcccugauguccugcccccugggggaggcgcccagcccguacaacagcaaguucgaguccguggccuggagcgccuccgccugccacgacggcaugggcuggcucaccaucgggaucagcggccccgacaacggggcgguggccguccugaaguacaacggcaucaucaccggcacgaucaaguccuggaagaagcagauccugcgcacccaggagagcgagugcgugugcaugaacggguccugcuucaccaucaugaccgacggccccagcaacaaggccgccuccuacaagaucuucaagaucgagaaggggaaggugaccaagagcaucgagcucaacgcccccaacuucuacuacgaggagugcuccugcuacccggacacgggcaucgucaugugcgugugccgggacaacuggcacgggagcaaccgccccuggguguccuucaaccagaaccuggacuaccagaucggcuacaucugcagcggcgucuucggggacaacccccggcccgaggacggcgagggguccugcaacccggugaccguggacggcgcgaacggggucaagggcuucagcuacaaguacggcaacgggguguggaucggccgcaccaaguccaaccggcugcgcaagggguucgagaugaucugggaccccaacggcuggacgaacaccgacagcgacuucuccgugaagcaggacgucguggccaucaccgacuggagcggguacagcggcuccuucgugcagcaccccgagcucaccggccuggacugcauccggcccugcuucugggucgagcuggugcgcgggcucccgcgggagaacacgaccaucuggaccagcggcuccagcaucuccuucugcggggucaacagcgacaccgccaacugguccuggcccgacggcgccgagcugcccuucacgaucgacaaguga

SEQ ID NO: 81927 - RNA, 1413 nt, Artificial Sequence; identical to SEQ ID NO: 81485
  derived and/or modified CDS sequence (opt1) from neuraminidase__InfluenzaA__ADA71157

SEQ ID NO: 81928 - RNA, 1413 nt, Artificial Sequence
  derived and/or modified CDS sequence (opt1) from neuraminidase__InfluenzaA__ADA71159
augaaccccaaccagaagaucaucaccaucggcagcaucuccaucgccaucgggaucaucagccugaugcuccagaucggcaacaucaucuccaucugggccagccacuccauccagaucgggagccagaacaacaccggcaucugcaaccagcgcaucaucacguacgagaacuccaccugggugaaccacaccuacgucaacaucaacaacaccaaggugguggcgggggagggcaagacgagcgucacccuggccggcaacuccagccugugcuccaucagcgggugggccaucaacaccaaggacaacuccauccggaucggcagcaagggggacguguucgugauccgcgagccguucaucuccugcagccaccucgagugccggaccuucuuccugacgcagggcgcccugcucaacgacaagcacuccaaccgcaccgucaaggaccggagccccuaccgcgcccugauguccugcccccugggggaggcgcccagcccguacaacagcaaguucgaguccguggccuggagcgccuccgccugccacgacggcaugggcuggcucaccaucgggaucagcggccccgacaacggggcgguggccguccugaaguacaacggcaucaucaccggcacgaucaaguccuggaagaagcagauccugcggacccaggagagcgagugcgugugcaugaacggguccugcuucaccaucaugaccgacggccccagcaacaaggccgccuccuacaagaucuucaagaucgagaaggggaaggugaccaagagcaucgagcucaacgcccccaacuucuacuacgaggagugcuccugcuacccggacacgggcaucgucaugugcgugugccgcgacaacuggcacgggagcaaccggcccuggguguccuucaaccagaaccuggacuaccagaucggcuacaucugcagcggcgucuucggggacaacccccgccccgaggacggcgagggguccugcaacccggugaccguggacggcgcgaacggggucaagggcuucagcuacaaguacggcaacgggguguggaucggccggaccaaguccaaccgccugcggaagggguucgagaugaucugggaccccaacggcuggacgaacaccgacagcgacuucuccgugaagcaggacgucguggccaucaccgacuggagcggguacagcggcuccuucgugcagcaccccgagcucaccggccuggacugcauccgccccugcuucugggucgagcuggugcgggggcucccgcgcgagaacacgaccaucuggaccagcggcuccagcaucuccuucugcggggucaacagcgacaccgccaacugguccuggcccgacggcgccgagcugcccuucacgaucgacaaguga

SEQ ID NO: 81929 - RNA, 1410 nt, Artificial Sequence
  derived and/or modified CDS sequence (opt1) from neuraminidase__InfluenzaA__ADA71161
augaaccccaaccagaagaucaucaccaucggcagcgugucccugaccaucagcacgaucugcuucuucaugcagaucgccauccucaucaccaccgucacccugcacuucaagcaguacgaguucaacuccccgcccaacaaccaggugaugcugugcgagcccacgaucaucgagcgcaacaucaccgagaucguguaccucaccaacaccacgaucgagaaggagaucugccccaagcuggccgaguaccggaacuggagcaagccgcagugcgacaucaccggguucgcgcccuucuccaaggacaacagcauccgccuguccgccggcggggacaucugggucacccgggagcccuacgugagcugcgaccccgacaagugcuaccaguucgcccucggccaggggaccacgcugaacaacgugcacuccaacaacaccguccgcgaccggaccccguaccgcacccugcucaugaacgagcugggcgugcccuuccaccugggcacgaagcaggucugcaucgccuggagcuccagcuccugccacgacgggaaggccuggcuccacgugugcaucaccggcgacgacaagaacgcgaccgccagcuucaucuacaacgggcggcugguggacuccguggucagcugguccaaggagauccugcgcacccaggagagcgagugcgugugcaucaacggcacgugcaccguggucaugaccgacggguccgccagcggcaaggccgacaccaagauccucuucaucgaggagggcaagaucgugcacacgagcacccuguccgggagcgcgcagcacguggaggagugcuccugcuacccccgguaccccggcguccgcugcgugugccgggacaacuggaaggggagcaaccgcccgaucguggacaucaacaucaaggaccacuccaucgucagcuccuacgugugcagcggccuggugggcgacacgccccggaagaacgacuccagcuccagcucccacugccucgaccccaacaacgaggagggcgggcacggggucaagggcugggccuucgacgacgggaacgacguguggaugggccgcaccaucagcgagaagucccggcugggcuacgagaccuucaaggucaucgagggguggagcaaccacaaguccaagcugcagaucaaccgccaggugaucguggaccggggcaaccgcagcggguacuccggcaucuucagcgucgagggcaagagcugcaucaaccggugcuucuacguggagcucauccgcgggcggaaggaggagaccgaggugcuguggaccuccaacagcaucgucguguucugcggcaccuccgggacguacggcaccgggagcuggcccgacggcgccgaccugaaccucaugccgaucuga

SEQ ID NO: 81930 - RNA, 1413 nt, Artificial Sequence
  derived and/or modified CDS sequence (opt1) from neuraminidase__InfluenzaA__ADA71165
augaaccccaaccagaagaucaucaccaucggcagcaucuccaucgccaucgggaucaucagccugaugcuccagaucggcaacaucaucuccaucugggccagccacuccauccagaccgggagccagaacaacacgggcaucugcaaccagcgcaucaucaccuacgagaacuccaccugggugaaccacaccuacgucaacaucaacaacacgaacgugguggcgggggaggacaagaccagcgucacccuggccggcaacuccagccugugcuccaucagcggcugggccaucuacaccaaggacaacuccauccggaucgggagcaagggcgacguguucgugauccgcgagccguucaucuccugcagccaccucgagugccggacguucuuccugacccagggggcccugcucaacgacaagcacuccaacggcaccgucaaggaccgcagccccuaccgggcccugauguccugcccccugggggaggcgcccagcccguacaacagcaaguucgaguccguggccuggagcgccuccgccugccacgacggcaugggcuggcucaccaucgggaucagcggccccgacaacggggcgguggccguccugaaguacaacggcaucaucacgggcaccaucaaguccuggaagaagcagauccugcgcacccaggagagcgagugcgugugcaugaacggguccugcuucaccaucaugacggacggccccagcaacaaggccgccuccuacaagaucagcaagaucgagaaggggaaggugaccaaguccaucgagcucaacgcccccaacuucuacuacgaggagugcagcugcuacccggacaccggcaucgucaugugcgugugccgggacaacuggcacggguccaaccgccccugggugagcuucaaccagaaccuggacuaccagaucggcuacaucugcuccggcgucuucggggacaacccccggcccgaggacggcgaggggagcugcaacccggugaccguggacggcgcgaacggggucaagggcuucuccuacaaguacggcaacgggguguggaucggccgcaccaagagcaaccggcugcgcaagggguucgagaugaucugggaccccaacggcuggacgaacaccgacuccgacuucagcgugaagcaggacgucguggccaucaccgacuggagcggguacuccggcagcuucgugcagcaccccgagcucacgggccuggacugcauccggcccugcuucugggucgagcuggugcgcgggcucccgcgggagaacaccaccaucuggaccuccggcagcuccaucagcuucugcggggucaacuccgacacggccaacuggagcuggcccgacggcgccgagcugcccuucaccaucgacaaguga

SEQ ID NO: 81931 - RNA, 1410 nt, Artificial Sequence
  derived and/or modified CDS sequence (opt1) from neuraminidase__InfluenzaA__ADA71167
augaaccccaaccagaagaucaucaccaucggcagcgugucccugaccaucagcacgaucugcuucuucaugcagaucgccauccucaucaccaccgucacccugcacuucaagcaguacgaguucaacuccccgcccaacaaccaggugaugcugugcgagcccacgaucaucgagcgcaacaucaccgagaucguguaccucaccaacaccacgaucgagaaggagaucugccccaagcuggccgaguaccggaacuggagcaagccgcagugcgacaucaccggguucgcgcccuucuccaaggacaacagcauccgccuguccgccggcggggacaucugggucacccgggagcccuacgugagcugcgaccccgacaagugcuaccaguucgcccucggccaggggaccacgcugaacaacgugcacuccaacaacaccguccgcggccggaccccguaccgcacccugcucaugaacgagcugggcgugcccuuccaccuggggacgaagcaggucugcaucgccuggagcuccagcuccugccacgacggcaaggccuggcuccacgugugcaucaccggggacgacaagaacgcgaccgccagcuucaucuacaacggccggcugguggacuccguggucagcugguccaaggacauccugcgcacccaggagagcgagugcgugugcaucaacgggacgugcaccguggucaugaccgacggcuccgccagcggcaaggccgacaccaagauccucuucaucgaggaggggaagaucgugcacacgagcacccuguccggcagcgcgcagcacguggaggagugcuccugcuacccccgguaccccgggguccgcugcgugugccgggacaacuggaagggcagcaaccgcccgaucguggacaucaacaucaaggaccacuccaucgucagcuccuacgugugcagcggccuggugggggacacgccccggaagaacgacuccagcuccagcucccacugccucaaccccaacaacgaggagggcgggcacggcgucaaggggugggccuucgacgacggcaacgacguguggaugggccgcaccaucagcgagaagucccggcugggguacgagaccuucaaggucaucgagggcuggagcaaccccaaguccaagcugcagaucaaccgccaggugaucguggaccgggggaaccgcagcggcuacuccgggaucuucagcgucgagggcaagagcugcaucaaccggugcuucuacguggagcucauccgcggccggaaggaggagaccgaggugcuguggaccuccaacagcaucgucguguucugcgggaccuccggcacguacgggaccggcagcuggccggacggggccaacaucaaccugaugcccaucuga

SEQ ID NO: 81932 - RNA, 1413 nt, Artificial Sequence
  derived and/or modified CDS sequence (opt1) from neuraminidase__InfluenzaA__ADA71169
augaaccccaaccagaagaucaucaccaucggcagcaucuccaucgccaucgggaucaucagccugaugcuccagaucggcaacaucaucuccaucugggccagccacuccauccagaccgggagccagaaccacacgggcaucugcaaccagcgcaucaucaccuacgagaacuccaccugggugaaccacaccuacgucaacaucaacaacacgaacgugguggcggggaaggacaagaccccggucacccuggugggcaacagcucccugugcagcaucuccggcugggccaucuacaccaaggacaacagcauccggaucggguccaagggcgacguguucgucauccgcgagcccuucaucagcugcucccaccucgagugcaagacguucuuccugacccagggggcccugcucaacgacaagcacagcaacggcaccgugaaggaccggucccccuaccgcgcccugaugagcugcccccugggggaggccccgucccccuacaacagcaaguucgagagcguggcgugguccgccagcgccugccacgacggcaucggcuggcucaccaucgggaucuccggccccgacaacggggccgucgcggugcugaaguacaagggcaucaucacgggcaccaucaagagcuggaagaagcagauccugcggacccaggaguccgagugcgugugcaucaacgggagcugcuucaccaucaugacggacggccccuccgacggggccgccagcuacaagaucuucaagaucgagaagggcaaggucaccaaguccauggagcucaacgccccgaacuuccacuacgaggagugcagcugcuaccccgacaccgggaccgugaugugcgugugccgcgacaacuggcacggcuccaaccggcccugggucagcuucaaccagaaccuggacuaccagaucggcuacaucugcuccgggguguucggcgacaacccccgcccgaaggacggggagggcagcugcaaccccgugacggucgacggggccaacggcgugaagggcuucuccuacaaguacgggaacggcguguggaucgggcggaccaagagcaaccgcauccggaagggcuucgagaugaucugggaccccaacggguggaccaacaccgacuccgacuucagcgucaagcaggacaucguggcgaucacggacugguccggcuacagcggcagcuucgugcagcaccccgagcugaccgggcucgacugcauccgcccgugcuucugggucgagcuggugcggggccugccccgcgagaacaccaccaucuggacguccgggagcuccaucagcuucugcggcgucaacggcgacaucgccaacugguccuggcccgacggggccgagcuccccuucaccaucgacaaguga

SEQ ID NO: 81933 - RNA, 1413 nt, Artificial Sequence; identical to SEQ ID NO: 81485
  derived and/or modified CDS sequence (opt1) from neuraminidase__InfluenzaA__ADA71171

SEQ ID NO: 81934 - RNA, 1410 nt, Artificial Sequence
  derived and/or modified CDS sequence (opt1) from neuraminidase__InfluenzaA__ADA71173
augaaccccaaccagaagaucaucaccaucggcagcgugucccugaccaucagcacgaucugcuucuucaugcagaucgccauccucaucaccaccgucacccugcacuucaagcaguacgaguucaacuccccgcccaacaaccaggugaugcugugcgagcccacgaucaucgagcgcaacaucaccgagaucguguaccucaccaacaccacgaucgagaaggagaucugccccaagcuggccgaguaccggaacuggagcaagccgcagugcgacaucaccggguucgcgcccuucuccaaggacaacagcauccgccuguccgccggcggggacaucugggucacccgggagcccuacgugagcugcgaccccgacaagugcuaccaguucgcccucggccaggggaccacgcugaacaacgugcacuccaacaacaccguccgcgcccggaccccguaccgcacccugcucaugaacgagcugggcgugcccuuccaccugggcacgaagcaggucugcaucgccuggagcuccagcuccugccacgacgggaaggcguggcuccacgugugcaucaccggcgacgacaagaacgccaccgccagcuucaucuacaacgggcggcugguggacuccguggucagcugguccaaggacauccugcgcacccaggagagcgagugcgugugcaucaacggcacgugcaccguggucaugaccgacggguccgccagcggcaaggcggacaccaagauccucuucaucgaggagggcaagaucgugcacacgagcacccuguccgggagcgcccagcacguggaggagugcuccugcuacccccgguaccccggcguccgcugcgugugccgggacaacuggaaggggagcaaccgcccgaucguggacaucaacaucaaggaccacuccaucgucagcuccuacgugugcagcggccuggugggcgacacgccccggaagaacgacuccagcuccagcucccacugccucaaccccaacaacgaggagggcgggcacggggucaagggcugggccuucgacgacgggaacgacguguggaugggccgcaccaucagcgagaagucccggcugggcuacgagaccuucaaggucaucgagggguggagcaaccccaaguccaagcugcagaucaaccgccaggugaucguggaccggggcaaccgcagcggguacuccggcaucuucagcgucgagggcaagagcugcaucaaccggugcuucuacguggagcucauccgcgggcggaaggaggagaccgaggugcuguggaccuccaacagcaucgucguguucugcggcaccuccgggacguacggcaccgggagcuggccggacggcgccaacaucaaccugaugcccaucuga

SEQ ID NO: 81935 - RNA, 1413 nt, Artificial Sequence
  derived and/or modified CDS sequence (opt1) from neuraminidase__InfluenzaA__ADA71175
augaaccccaaccagaagaucaucaccaucggcagcaucuccaucgccaucgggaucaucagccugaugcuccagaucggcaacaucaucuccaucugggccagccacuccauccagaucgggagccagaacaacaccggcaucugcaaccagcgcaucaucacguacgagaacuccaccugggugaaccacaccuacgucaacaucaacaacaccaaggugguggcgggggaggacaagacgagcgucacccuggccggcaacuccagccugugcuccaucagcggcugggccaucaacaccaaggacaacuccauccggaucgggagcaagggcgacguguucgugauccgcgagccguucaucuccugcagccaccucgagugccggaccuucuuccugacgcagggggcccugcucaacgacaagcacuccaacggcaccgucaaggaccgcagccccuaccgggcccugauguccugcccccugggggaggcgcccagcccguacaacagcaaguucgaguccguggccuggagcgccuccgccugccacgacggcaugggcuggcucaccaucgggaucagcggccccgacaacggggcgguggccguccugaaguacaacggcaucaucaccggcacgaucaaguccuggaagaagcagauccugcgcacccaggagagcgagugcgugugcaugaacggguccugcuucaccaucaugaccgacggccccagcaacaaggccgccuccuacaagaucuucaagaucgagaaggggaaggugaccaagagcaucgagcucaacgcccccaacuucuacuacgaggagugcuccugcuacccggacacgggcaucgucaugugcgugugccgggacaacuggcacgggagcaaccgccccuggguguccuucaaccagaaccuggacuaccagaucggcuacaucugcagcggcgucuucggggacaacccccggcccgaggacggcgagggguccugcaacccggugaccguggacggcgcgaacggggucaagggcuucagcuacaaguacggcaacgggguguggaucggccgcaccaaguccaaccggcugcgcaagggguucgagaugaucugggaccccaacggcuggacgaacaccgacagcgacuucuccgugaagcaggacgucguggccaucaccgacuggagcggguacagcggcuccuucgugcagcaccccgagcucaccggccuggacugcauccggcccugcuucugggucgagcuggugcgcgggcucccgcgggagaacacgaccaucuggaccagcggcuccagcaucuccuucugcggggucaacagcgacaccgccaacugguccuggcccgacggcgccgagcugcccuucacgaucgacaaguga

SEQ ID NO: 81936 - RNA, 1413 nt, Artificial Sequence; identical to SEQ ID NO: 81485
  derived and/or modified CDS sequence (opt1) from neuraminidase__InfluenzaA__ADA71177

SEQ ID NO: 81937 - RNA, 1410 nt, Artificial Sequence
  derived and/or modified CDS sequence (opt1) from neuraminidase__InfluenzaA__ADA71193
augaaccccaaccagaagaucaucaccaucggcagcgugugcaugaccaucgggauggccaaccugauccuccagaucggcaacaucaucuccaucuggaucagccacuccauccagcuggggaaccagaaccagaucgagacgugcaaccagagcgucaucaccuacgagaacaacaccugggugaaccagaccuacgugaacaucuccaacacgaacuucgccgcgggccagagcgucguguccgugaagcuggccgggaacagcucccucugcccggucagcggcugggccaucuacuccaaggacaacagcauccgcaucggcuccaagggggacguguucgugauccgggagcccuucaucagcugcagcccccuggagugccgcaccuucuuccugacccagggcgcccuccugaacgacaagcacuccaacgggaccaucaaggaccggucccccuaccgcacgcugaugagcugcccgaucggcgagguccccucccccuacaacagccgguucgagagcguggccugguccgcgagcgccugccacgacgggaucaacuggcucaccaucggcaucuccggccccgacaacggggccguggccguccugaaguacaacggcaucaucaccgacaccaucaagagcuggcgcaacaacauccugcggacgcaggaguccgagugcgcgugcgugaacgggagcugcuucaccgugaugaccgacggcccguccgacggccaggccagcuacaagaucuuccgcaucgagaaggggaaggucgugaaguccguggagaugaacgcccccaacuaccacuacgaggagugcagcugcuaccccgacuccagcgagaucacgugcgucugccgggacaacuggcacggcuccaaccgccccugggugagcuucaaccagaaccucgaguaccagaucggguacaucugcuccggcaucuucggggacaacccgcggcccaacgacaagaccggcagcugcggccccguguccagcaacggggccaacggcgucaagggguucuccuucaaguacggcaacgggguguggaucggccgcaccaagagcaucagcucccggaacggcuucgagaugaucugggaccccaacggguggaccggcaccgacaacaacuucagcaucaagcaggacaucguggggaucaacgagugguccggcuacagcggguccuucguccagcacccggagcugacgggccuggacugcauccgccccugcuucuggguggagcucauccggggccgccccaaggagaacaccaucuggaccagcggguccagcaucuccuucugcggcgucaacagcgacaccguggggugguccuggcccgacggcgccgagcugccguucacgaucgacaaguga

SEQ ID NO: 81938 - RNA, 1410 nt, Artificial Sequence
  derived and/or modified CDS sequence (opt1) from neuraminidase__InfluenzaA__ADA79589
augaaccccaaccagaagaucaucaccaucggcagcgugugcaugaccaucgggauggccaaccugauccuccagaucggcaacaucaucuccaucuggaucagccacuccauccagcuggggaaccagaaccagaucgagacgugcaaccagagcgucaucaccuacgagaacaacaccugggugaaccagaccuacgugaacaucuccaacacgaacuucgccgcgggccagagcgucguguccgugaagcuggccgggagcuccagccucugcccggucuccggcugggccaucuacagcaaggacaacuccauccgcaucggcagcaagggggacguguucgugauccgggagcccuucaucuccugcagcccccuggagugccgcaccuucuuccugacccagggcgcccuccugaacgacaagcacuccaacgggaccaucaaggaccggagccccuaccgcacgcugauguccugcccgaucggcgagguccccagccccuacaagagccgguucgaguccguggccuggagcgcguccgccugccacgacgggaucaacuggcucaccaucggcaucagcggccccgacaacggggccguggccguccugaaguacaacggcaucaucaccgacaccaucaaguccuggcgcaacaacauccugcggacgcaggagagcgagugcgcgugcgugaacggguccugcuucaccgugaugaccgacggcccgagcgacggccaggccuccuacaagaucuuccgcaucgagaaggggaagaucgucaagagcguggagaugaacgcccccaacuaccacuacgaggagugcuccugcuaccccgacagcuccgagaucacgugcgugugccgggacaacuggcacggcagcaaccgccccugggucuccuucaaccagaaccucgaguaccagaucggguacaucugcagcggcaucuucggggacaacccgcggcccaacgacaagaccggcuccugcggccccgugagcuccaacggggccaacggcgugaagggguucagcuucaaguacggcaacggggucuggaucggccgcaccaagagcaucuccagccggaacggcuucgagaugaucugggaccccaacggguggaccggcaccgacaacaacuucuccaucaagcaggacaucguggggaucaacgaguggagcggcuacuccgggagcuucgugcagcacccggagcugacgggccuggacugcauccgccccugcuucugggucgagcucauccggggccgccccaaggagaacaccaucuggaccuccgggagcuccaucagcuucugcggcgugaacuccgacaccgucggguggagcuggcccgacggcgccgagcugccguucacgaucgacaaguga

SEQ ID NO: 81939 - RNA, 1410 nt, Artificial Sequence
  derived and/or modified CDS sequence (opt1) from neuraminidase__InfluenzaA__ADA79599
augaaccccaaccagaagaucaucaccaucggcagcgugugcaugaccaucgggauggccaaccugauccuccagaucggcaacaucaucuccaucuggaucagccacuccauccagcuggggaaccagaaccagaucgagacgugcaaccagagcgucaucaccuacgagaacaacaccugggugaaccagaccuacgugaacaucuccaacacgaacuucgccgcgggccagagcgucguguccgugaagcuggccgggaacagcucccucugcccggucagcggcugggccaucuacuccaaggacaacagcauccgcaucggcuccaagggggacguguucgugauccgggagcccuucaucagcugcagcccccuggagugccgcaccuucuuccugacccagggcgcccuccugaacgacaagcacuccaacgggaccaucaaggaccggucccccuaccgcacgcugaugagcugcccgaucggcgagguccccucccccuacaacagccgguucgagagcguggccugguccgcgagcgccugccacgacgggaucaacuggcucaccaucggcaucuccggccccgacaacggggccguggccguccugaaguacaacggcaucaucaccgacaccaucaagagcuggcgcaacaacauccugcggacgcaggaguccgagugcgcgugcgugaacgggagcugcuucaccgugaugaccgacggcccguccgacggccaggccagcuacaagaucuuccgcaucgagaaggggaagaucgucaaguccguggagaugaacgcccccaacuaccacuacgaggagugcagcugcuaccccgacuccagcgagaucacgugcgugugccgggacaacuggcacggcuccaaccgccccugggucagcuucaaccagaaccucgaguaccagaucggguacaucugcuccggcaucuucggggacaacccgcggcccaacgacaagaccggcagcugcggccccguguccagcaacggggccaacggcgugaagggguucuccuucaaguacggcaacggggucuggaucggccgcaccaagagcaucagcucccggaacggcuucgagaugaucugggaccccaacggguggaccggcaccgacaacaaguucagcaucaagcaggacaucguggggaucaacgagugguccggcuacagcggguccuucgugcagcacccggagcugacgggccuggacugcauccgccccugcuucugggucgagcucauccggggccgccccaaggagaacaccaucuggaccagcggguccagcaucuccuucugcggcgugaacagcgacaccgucgggugguccuggcccgacggcgccgagcugccguucacgaucgacaaguga

SEQ ID NO: 81940 - RNA, 1410 nt, Artificial Sequence; identical to SEQ ID NO: 81939
  derived and/or modified CDS sequence (opt1) from neuraminidase__InfluenzaA__ADA79609

SEQ ID NO: 81941 - RNA, 1410 nt, Artificial Sequence
  derived and/or modified CDS sequence (opt1) from neuraminidase__InfluenzaA__ADA79619
augaaccccaaccagaagaucaucaccaucggcagcaucugcaugaccaucgggauggccaaccugauccuccagaucggcaacaucaucuccaucuggaucagccacuccauccagcuggggaaccagaaccagaucgagacgugcaaccagagcgugaucaccuacgagaacaacaccugggucaaccagaccuacgugaacaucuccaacacgaacuucgccgcgggccagagcguggccuccgucaagcuggccgggaacagcucccucugcccggugagcggcugggccaucuacuccaaggacaacagcauccgcaucggcuccaagggggacguguucgucauccgggagcccuucaucagcugcagcccccuggagugccgcaccuucuuccugacccagggcgcccuccugaacgacaagcacuccaacgggaccaucaaggaccggucccccuaccgcacgcugaugagcugcccgaucggcgaggugcccucccccuacaacagccgguucgagagcguggcgugguccgccagcgccugccacgacgggaucaacuggcucaccaucggcaucuccggccccgacaacggggccgucgcggugcugaaguacaacggcaucaucaccgacaccaucaagagcuggcgcaacaacauccugcggacgcaggaguccgagugcgccugcgugaacgggagcugcuucaccgucaugaccgacggcccguccgacggccaggccagcuacaagaucuuccgcaucgagaaggggaagaucgugaaguccguggagaugaacgcccccaacuaccacuacgaggagugcagcugcuaccccgacuccagcgagaucacgugcgucugccgggacaacuggcacggcuccaaccgccccugggugagcuucaaccagaaccucgaguaccagaucggguacaucugcuccggcaucuucggggacaacccgcggcccaacgacaagaccggcagcugcggccccguguccagcaacggggccaacggcgucaagggguucuccuucaaguacggcaacgggguguggaucggccgcaccaagagcaucagcucccggaacggcuucgagaugaucugggaccccaacggguggaccggcaccgacaacaacuucagcaucaagcaggacaucguggggaucaacgagugguccggcuacagcggguccuucguccagcacccggagcugacgggccuggacugcauccgccccugcuucuggguggagcucauccggggccgccccaaggagaacaccaucuggaccagcggguccagcaucuccuucugcggcgugaacagcgacaccgucgggugguccuggcccgacggcgcggagcugccguucacgaucgacaaguga

SEQ ID NO: 81942 - RNA, 1410 nt, Artificial Sequence; identical to SEQ ID NO: 80762
  derived and/or modified CDS sequence (opt1) from neuraminidase__InfluenzaA__ADA81211

SEQ ID NO: 81943 - RNA, 1410 nt, Artificial Sequence
  derived and/or modified CDS sequence (opt1) from neuraminidase__InfluenzaA__ADA83035
augaaccccaaccagaagaucaucaccaucggcagcgugugcaugaccaucgggauggccaaccugauccuccagaucggcaacaucaucuccaucuggaucagccacuccauccagcuggggaaccagaaccagaucgagacgugcaaccagagcgucaucaccuacgagaacaacaccugggugaaccagaccuacgugaacaucuccaacacgaacuucgccgcgggccagagcgucguguccgugaagcuggccgggaacagcucccucugcccggucagcggcugggccaucuacuccaaggacaacagcauccgcaucggcuccaagggggacguguucgugauccgggagcccuucaucagcugcagcccccuggagugcuccaccuucuuccugacccagggcgcccuccugaacgacaagcacuccaacgggaccaucaaggaccgcagccccuaccggacgcugauguccugcccgaucggcgagguccccagccccuacaacagccgcuucgaguccguggccuggagcgcguccgccugccacgacgggaucaacuggcucaccaucggcaucagcggccccgacaacggggccguggccguccugaaguacaacggcaucaucaccgacaccaucaaguccuggcggaacaacauccugcgcacgcaggagagcgagugcgcgugcgugaacggguccugcuucaccgugaugaccgacggcccgagcgacggccaggccuccuacaagaucuuccggaucgagaaggggaagaucgucaagagcguggagaugaacgcccccaacuaccacuacgaggagugcuccugcuaccccgacagcuccgagaucacgugcgugugccgcgacaacuggcacggcagcaaccggcccugggucuccuucaaccagaaccucgaguaccagaucggguacaucugcagcggcaucuucggggacaacccgcgccccaacgacaagaccggcuccugcggccccgugagcuccaacggggccaacggcgugaagggguucagcuucaaguacggcaacggggucuggaucggccggaccaagagcaucuccagccgcaacggcuucgagaugaucugggaccccaacggguggaccggcaccgacaacaacuucuccaucaagcaggacaucguggggaucaacgaguggagcggcuacuccgggagcuucgugcagcacccggagcugacgggccuggacugcauccggcccugcuucugggucgagcucauccgcggccggcccaaggagaacaccaucuggaccuccgggagcuccaucagcuucugcggcgugaacuccgacaccgucggguggagcuggcccgacggcgccgagcugccguucacgaucgacaaguga

SEQ ID NO: 81944 - RNA, 1410 nt, Artificial Sequence
  derived and/or modified CDS sequence (opt1) from neuraminidase__InfluenzaA__ADA83037
augaaccccaaccagaagaucaucaccaucggcagcgugugcaugaccaucgggauggccaaccugauccuccagaucggcaacaucaucuccaucuggaucagccacuccauccagcuggggaaccaggaccagaucgagacgugcaaccagagcgucaucaccuacgagaacaacaccugggugaaccagaccuacgugaacaucuccaacacgaacuucgccgcgggccagagcgucguguccgugaagcuggccgggaacagcucccucugcccggucagcggcugggccaucuacuccaaggacaacagcauccgcaucggcuccaagggggacguguucgugauccgggagcccuucaucagcugcagcccccuggagugccgcaccuucuuccugacccagggcgcccuccugaacgacaagcacuccaacgggaccaucaaggaccggucccccuaccgcacgcugaugagcugcccgaucggcgagguccccucccccuacaacagccgguucgagagcguggccugguccgcgagcgccugccacgacgggaucaacuggcucaccaucggcaucuccggccccgacaacggggccguggccguccugaaguacaacggcaucaucaccgacaccaucaagagcuggcgcaacaacauccugcggacgcaggaguccgagugcgcgugcgugaacgggagcugcuucaccgugaugaccgacggcccguccgacggccaggccagcuacaagaucuuccgcaucgagaaggggaagaucgucaaguccguggagaugaacgcccccaacuaccacuacgaggagugcagcugcuaccccgacuccagcgagaucacgugcgugugccgggacaacuggcacggcuccaaccgccccugggucagcuucaaccagaaccucgaguaccagaucggguacaucugcuccggcaucuucggggacaacccgcggcccaacgacaagaccggcagcugcggccccguguccagcaacggggccaacggcgugaagggguucuccuucaaguacggcaacggggucuggaucggccgcaccaagagcaucagcucccggaacggcuucgagaugaucugggaccccaacggguggaccggcaccgacaacaaguucagcaucaagcaggacaucguggggaucaacgagugguccggcuacagcggguccuucgugcagcacccggagcugacgggccuggacugcauccgccccugcuucugggucgagcucauccggggccgccccaaggagaacaccaucuggaccagcggguccagcaucuccuucugcggcgugaacagcgacaccgucgggugguccuggcccgacggcgccgagcugccguucacgaucgacaaguga

SEQ ID NO: 81945 - RNA, 1410 nt, Artificial Sequence; identical to SEQ ID NO: 80762
  derived and/or modified CDS sequence (opt1) from neuraminidase__InfluenzaA__ADA83588

SEQ ID NO: 81946 - RNA, 1410 nt, Artificial Sequence; identical to SEQ ID NO: 80762
  derived and/or modified CDS sequence (opt1) from neuraminidase__InfluenzaA__ADA83592

SEQ ID NO: 81947 - RNA, 1410 nt, Artificial Sequence; identical to SEQ ID NO: 80762
  derived and/or modified CDS sequence (opt1) from neuraminidase__InfluenzaA__ADA83596

SEQ ID NO: 81948 - RNA, 1410 nt, Artificial Sequence; identical to SEQ ID NO: 80762
  derived and/or modified CDS sequence (opt1) from neuraminidase__InfluenzaA__ADA83600

SEQ ID NO: 81949 - RNA, 1410 nt, Artificial Sequence; identical to SEQ ID NO: 80762
  derived and/or modified CDS sequence (opt1) from neuraminidase__InfluenzaA__ADA83604

SEQ ID NO: 81950 - RNA, 1410 nt, Artificial Sequence; identical to SEQ ID NO: 80762
  derived and/or modified CDS sequence (opt1) from neuraminidase__InfluenzaA__ADA83608

SEQ ID NO: 81951 - RNA, 1410 nt, Artificial Sequence; identical to SEQ ID NO: 80762
  derived and/or modified CDS sequence (opt1) from neuraminidase__InfluenzaA__ADA83612

SEQ ID NO: 81952 - RNA, 1410 nt, Artificial Sequence; identical to SEQ ID NO: 81116
  derived and/or modified CDS sequence (opt1) from neuraminidase__InfluenzaA__ADA83616

SEQ ID NO: 81953 - RNA, 1410 nt, Artificial Sequence; identical to SEQ ID NO: 80762
  derived and/or modified CDS sequence (opt1) from neuraminidase__InfluenzaA__ADA83624

SEQ ID NO: 81954 - RNA, 1410 nt, Artificial Sequence; identical to SEQ ID NO: 80762
  derived and/or modified CDS sequence (opt1) from neuraminidase__InfluenzaA__ADA83630

SEQ ID NO: 81955 - RNA, 1410 nt, Artificial Sequence; identical to SEQ ID NO: 80762
  derived and/or modified CDS sequence (opt1) from neuraminidase__InfluenzaA__ADA83634

SEQ ID NO: 81956 - RNA, 1410 nt, Artificial Sequence; identical to SEQ ID NO: 80762
  derived and/or modified CDS sequence (opt1) from neuraminidase__InfluenzaA__ADA83638

SEQ ID NO: 81957 - RNA, 1410 nt, Artificial Sequence; identical to SEQ ID NO: 80762
  derived and/or modified CDS sequence (opt1) from neuraminidase__InfluenzaA__ADA83642

SEQ ID NO: 81958 - RNA, 1410 nt, Artificial Sequence; identical to SEQ ID NO: 80762
  derived and/or modified CDS sequence (opt1) from neuraminidase__InfluenzaA__ADA83649

SEQ ID NO: 81959 - RNA, 1410 nt, Artificial Sequence; identical to SEQ ID NO: 80762
  derived and/or modified CDS sequence (opt1) from neuraminidase__InfluenzaA__ADA83653

SEQ ID NO: 81960 - RNA, 1410 nt, Artificial Sequence; identical to SEQ ID NO: 80762
  derived and/or modified CDS sequence (opt1) from neuraminidase__InfluenzaA__ADA83657

SEQ ID NO: 81961 - RNA, 1410 nt, Artificial Sequence; identical to SEQ ID NO: 80762
  derived and/or modified CDS sequence (opt1) from neuraminidase__InfluenzaA__ADA83661

SEQ ID NO: 81962 - RNA, 1410 nt, Artificial Sequence; identical to SEQ ID NO: 80762
  derived and/or modified CDS sequence (opt1) from neuraminidase__InfluenzaA__ADA83669

SEQ ID NO: 81963 - RNA, 1410 nt, Artificial Sequence; identical to SEQ ID NO: 80762
  derived and/or modified CDS sequence (opt1) from neuraminidase__InfluenzaA__ADA83673

SEQ ID NO: 81964 - RNA, 1410 nt, Artificial Sequence; identical to SEQ ID NO: 80762
  derived and/or modified CDS sequence (opt1) from neuraminidase__InfluenzaA__ADA83677

SEQ ID NO: 81965 - RNA, 1410 nt, Artificial Sequence; identical to SEQ ID NO: 80762
  derived and/or modified CDS sequence (opt1) from neuraminidase__InfluenzaA__ADA83681

SEQ ID NO: 81966 - RNA, 1410 nt, Artificial Sequence; identical to SEQ ID NO: 80762
  derived and/or modified CDS sequence (opt1) from neuraminidase__InfluenzaA__ADA83685

SEQ ID NO: 81967 - RNA, 1410 nt, Artificial Sequence; identical to SEQ ID NO: 80762
  derived and/or modified CDS sequence (opt1) from neuraminidase__InfluenzaA__ADA86069

SEQ ID NO: 81968 - RNA, 1410 nt, Artificial Sequence; identical to SEQ ID NO: 80762
  derived and/or modified CDS sequence (opt1) from neuraminidase__InfluenzaA__ADB27973

SEQ ID NO: 81969 - RNA, 1410 nt, Artificial Sequence; identical to SEQ ID NO: 80762
  derived and/or modified CDS sequence (opt1) from neuraminidase__InfluenzaA__ADB27983

SEQ ID NO: 81970 - RNA, 1410 nt, Artificial Sequence
  derived and/or modified CDS sequence (opt1) from neuraminidase__InfluenzaA__ADB66693
augaaccccaaccagaagaucaucaccaucggcagcgugugcaugaccaucgggauggccaaccugauccuccagaucggcaacaucaucuccaucuggaucauccacagcauccagcuggggaaccagaaccagaucgagacgugcaaccaguccgucaucaccuacgagaacaacaccugggugaaccagaccuacgugaacaucagcaacacgaacuucgccgcgggccaguccgucgugagcgugaagcuggccgggaacuccagccucugcccggucuccggcugggccaucuacagcaaggacaacuccauccgcaucggcagcaagggggacguguucgugauccgggagcccuucaucuccugcagcccccuggagugccgcaccuucuuccugacccagggcgcccuccugaacgacaagcacuccaacgggaccaucaaggaccggagccccuaccgcacgcugauguccugcccgaucggcgagguccccagccccuacaacucccgguucgagagcguggccuggagcgcguccgccugccacgacgggaucaacuggcucaccaucggcaucagcggccccgacaacggggccguggccguccugaaguacaacggcaucaucaccgacaccaucaaguccuggcgcaacaacauccugcggacgcaggagagcgagugcgcgugcgugaacggguccugcuucaccgugaugaccgacggcccgagcgacggccaggccuccuacaagaucuuccgcaucgagaaggggaagaucgucaagagcguggagaugaacgcccccaacuaccacuacgaggagugcuccugcuaccccgacagcuccgagaucacgugcgugugccgggacaacuggcacggcagcaaccgccccugggucuccuucaaccagaaccucgaguaccagaucggguacaucugcagcggcaucuucggggacaacccgcggcccaacgacaagaccggcuccugcggccccgugagcuccaacggggccaacggcgugaagggguucagcuucaaguacggcaacggggucuggaucggccgcaccaaguccaucagcagccggaacggcuucgagaugaucugggaccccaacggguggaccggcaccgacaacaacuucuccaucaagcaggacaucguggggaucaacgaguggagcggcuacuccgggagcuucgugcagcacccggagcugacgggccuggacugcauccgccccugcuucugggucgagcucauccggggccgccccaaggagaacaccaucuggaccuccgggagcuccaucagcuucugcggcgugaacuccgacaccgucggguggagcuggcccgacggcgccgagcugccguucacgaucgacaaguga

SEQ ID NO: 81971 - RNA, 1410 nt, Artificial Sequence; identical to SEQ ID NO: 80762
  derived and/or modified CDS sequence (opt1) from neuraminidase__InfluenzaA__ADB66695

SEQ ID NO: 81972 - RNA, 1410 nt, Artificial Sequence; identical to SEQ ID NO: 80762
  derived and/or modified CDS sequence (opt1) from neuraminidase__InfluenzaA__ADB66696

SEQ ID NO: 81973 - RNA, 1410 nt, Artificial Sequence
  derived and/or modified CDS sequence (opt1) from neuraminidase__InfluenzaA__ADB66697
augaaccccaaccagaagaucaucaccaucggcagcgugugcaucaccaucgggauggccaaccugauccuccagaucggcaacaucaucuccaucuggaucagccacuccauccagcuggggaaccagaaccagaucgagacgugcaaccagagcgucaucaccuacgagaacaacaccugggugaaccagaccuacgugaacaucuccaacacgaacuucgccgcgggccagagcgucguguccgugaagcuggccgggaacagcucccucugcccggucagcggcugggccaucuacuccaaggacaacagcauccgcaucggcuccaagggggacguguucgugauccgggagcccuucaucagcugcagcccccuggagugccgcaccuucuuccugacccagggcgcccuccugaacgacaagcacuccaacgggaccaucaaggaccggucccccuaccgcacgcugaugagcugcccgaucggcgagguccccucccccuacaacagccgguucgagagcguggccugguccgcgagcgccugccacgacgggaucaacuggcucaccaucggcaucuccggccccgacaacggggccguggccguccugaaguacaacggcaucaucaccgacaccaucaagagcuggcgcaacaacauccugcggacgcaggaguccgagugcgcgugcgugaacgggagcugcuucaccgugaugaccgacggcccguccgacgagcaggccagcuacaagaucuuccgcaucgagaagggcaagaucgucaaguccguggagaugaacgcccccaacuaccacuacgaggagugcagcugcuaccccgacuccagcgagaucacgugcgugugccgggacaacuggcacggguccaaccgccccugggucagcuucaaccagaaccucgaguaccggaucggcuacaucugcuccgggaucuucggcgacaacccgcgccccaacgacaagaccgggagcugcggccccguguccagcaacggcgccaacggggugaagggcuucuccuucaaguacgggaacggcgucuggaucgggcggaccaagagcaucagcucccgcaacggcuucgagaugaucugggaccccaacggcuggaccgggaccgacaacaacuucagcaucaagcaggacaucgugggcauccacgagugguccggguacagcggcuccuucgugcagcacccggagcugacggggcuggacugcauccggcccugcuucugggucgagcucauccgcggccggcccaaggagaacaccaucuggaccagcggcuccagcaucuccuucugcggggugaacagcgacaccgucggcugguccuggcccgacggggccgagcugccguucacgaucgacaaguga

SEQ ID NO: 81974 - RNA, 1410 nt, Artificial Sequence; identical to SEQ ID NO: 81937
  derived and/or modified CDS sequence (opt1) from neuraminidase__InfluenzaA__ADB81401

SEQ ID NO: 81975 - RNA, 1410 nt, Artificial Sequence; identical to SEQ ID NO: 81780
  derived and/or modified CDS sequence (opt1) from neuraminidase__InfluenzaA__ADB81421

SEQ ID NO: 81976 - RNA, 1410 nt, Artificial Sequence; identical to SEQ ID NO: 81116
  derived and/or modified CDS sequence (opt1) from neuraminidase__InfluenzaA__ADB81431

SEQ ID NO: 81977 - RNA, 1410 nt, Artificial Sequence; identical to SEQ ID NO: 80762
  derived and/or modified CDS sequence (opt1) from neuraminidase__InfluenzaA__ADB81441

SEQ ID NO: 81978 - RNA, 1410 nt, Artificial Sequence
  derived and/or modified CDS sequence (opt1) from neuraminidase__InfluenzaA__ADB81451
augaaccccaaccagaagaucaucaccaucggcagcgugugcaugaccaucgggauggccaaccugauccuccagaucggcaacaucaucuccaucuggaucagccacuccauccagcuggggaaccagaaccagaucgagacgugcaaccagagcgucaucaccuacgagaacaacaccugggugaaccagaccuacgugaacaucuccaacacgaacuucgccgcgggccagagcgucguguccgugaagcuggccgggaacagcucccucugcccggucagcggcugggccaucuacuccaaggacaacagcauccgcaucggcuccaagggggacguguucgugauccgggagcccuucaucagcugcagcccccuggagugccgcaccuucuuccugacccagggcgcccuccugaacgacaagcacuccaacgggaccaucaaggaccggucccccuaccgcacgcugaugagcugcccgaucggcgagguccccucccccuacaacagccgguucgagagcguggccugguccgcgagcgccugccacgacgggaucaacuggcucaccaucggcaucuccggccccgacaacggggccguggccguccugaaguacaacggcaucaucaccgacaccaucaagagcuggcgcaacaacauccugcggacgcaggaguccgagugcgugugcgugaacgggagcugcuucaccgucaugaccgacggcccguccgacggccaggcgagcuacaagaucuuccgcaucgagaaggggaagaucgugaaguccguggagaugaacgcccccaacuaccacuacgaggagugcagcugcuaccccgacuccagcgagaucacgugcgucugccgggacaacuggcacggcuccaaccgccccugggugagcuucaaccagaaccucgaguaccagaucggguacaucugcuccggcaucuucggggacaacccgcggcccaacgacaagaccggcagcugcggccccguguccagcaacggggccaacggcgucaagggguucuccuucaaguacggcaacgggguguggaucggccgcaccaagagcaucagcucccggaacggcuucgagaugaucugggaccccaacggguggaccggcaccgacaacaaguucagcaucaagcaggacaucguggggaucaacgagugguccggcuacagcggguccuucguccagcacccggagcugacgggccuggacugcauccgccccugcuucuggguggagcucauccggggccgccccaaggagaacaccaucuggaccagcggguccagcaucuccuucugcggcgucaacagcgacaccguggggugguccuggcccgacggcgccgagcugccguucacgaucgacaaguga

SEQ ID NO: 81979 - RNA, 1410 nt, Artificial Sequence; identical to SEQ ID NO: 81939
  derived and/or modified CDS sequence (opt1) from neuraminidase__InfluenzaA__ADB81461

SEQ ID NO: 81980 - RNA, 1410 nt, Artificial Sequence; identical to SEQ ID NO: 81939
  derived and/or modified CDS sequence (opt1) from neuraminidase__InfluenzaA__ADB82942

SEQ ID NO: 81981 - RNA, 1410 nt, Artificial Sequence; identical to SEQ ID NO: 80917
  derived and/or modified CDS sequence (opt1) from neuraminidase__InfluenzaA__ADB82945

SEQ ID NO: 81982 - RNA, 1410 nt, Artificial Sequence; identical to SEQ ID NO: 80762
  derived and/or modified CDS sequence (opt1) from neuraminidase__InfluenzaA__ADB89132

SEQ ID NO: 81983 - RNA, 1410 nt, Artificial Sequence; identical to SEQ ID NO: 81345
  derived and/or modified CDS sequence (opt1) from neuraminidase__InfluenzaA__ADB89142

SEQ ID NO: 81984 - RNA, 1410 nt, Artificial Sequence; identical to SEQ ID NO: 80762
  derived and/or modified CDS sequence (opt1) from neuraminidase__InfluenzaA__ADB89224

SEQ ID NO: 81985 - RNA, 1410 nt, Artificial Sequence
  derived and/or modified CDS sequence (opt1) from neuraminidase__InfluenzaA__ADB89234
augaaccccaaccagaagaucaucaccaucggcagcgugugcaugaccaucgggauggccaaccugauccuccagaucggcaacaucaucuccaucuggaucagccacuccauccagcuggggaaccagaaccagaucgagacgugcaaccagagcgucaucaccuacgagaacaacaccugggugaaccagaccuacgugaacaucuccaacacgaacuucgccgcgggccagagcgucguguccgugaagcuggucgggaacagcucccucugcccggugagcggcugggccaucuacuccaaggacaacagcgugcgcaucggcuccaagggggacgucuucgugauccgggagcccuucaucagcugcagcccccuggagugccgcaccuucuuccugacccagggcgcccuccugaacgacaagcacuccaacgggaccaucaaggaccggucccccuaccgcacgcugaugagcugcccgaucggcgaggugcccucccccuacaacagccgguucgagagcgucgccugguccgccagcgcgugccacgacgggaucaacuggcucaccaucggcaucuccggccccgacaacggggccguggccgugcugaaguacaacggcaucaucaccgacaccaucaagagcuggcgcaacaacauccugcggacgcaggaguccgagugcgccugcgucaacgggagcugcuucaccgugaugaccgacggcccguccaacggccaggcgagcuacaagaucuuccgcaucgagaaggggaagaucgugaaguccgucgagaugaacgcccccaacuaccacuacgaggagugcagcugcuaccccgacuccagcgagaucacgugcgugugccgggacaacuggcacggcuccaaccgccccugggugagcuucaaccagaaccucgaguaccagaucggguacaucugcuccggcaucuucggggacaacccgcggcccaacgacaagaccggcagcugcggccccgucuccagcaacggggccaacggcgugaagggguucuccuucaaguacggcaacgggguguggaucggccgcaccaagagcaucagcucccggaacggcuucgagaugaucugggaccccaacggguggaccggcaccgacaacaacuucagcaucaagcaggacaucgucgggaucaacgagugguccggcuacagcggguccuucgugcagcacccggagcugacgggccuggacugcauccgccccugcuucugggucgagcucauccggggccgccccaaggagaacaccaucuggaccagcggguccagcaucuccuucugcggcgugaacagcgacaccguggggugguccuggcccgacggcgccgagcugccguucacgaucgacaaguga

SEQ ID NO: 81986 - RNA, 1410 nt, Artificial Sequence; identical to SEQ ID NO: 80752
  derived and/or modified CDS sequence (opt1) from neuraminidase__InfluenzaA__ADB89244

SEQ ID NO: 81987 - RNA, 1410 nt, Artificial Sequence; identical to SEQ ID NO: 80762
  derived and/or modified CDS sequence (opt1) from neuraminidase__InfluenzaA__ADB89264

SEQ ID NO: 81988 - RNA, 1410 nt, Artificial Sequence; identical to SEQ ID NO: 81732
  derived and/or modified CDS sequence (opt1) from neuraminidase__InfluenzaA__ADB89274

SEQ ID NO: 81989 - RNA, 1410 nt, Artificial Sequence; identical to SEQ ID NO: 80917
  derived and/or modified CDS sequence (opt1) from neuraminidase__InfluenzaA__ADB89284

SEQ ID NO: 81990 - RNA, 1410 nt, Artificial Sequence; identical to SEQ ID NO: 80762
  derived and/or modified CDS sequence (opt1) from neuraminidase__InfluenzaA__ADB89294

SEQ ID NO: 81991 - RNA, 1410 nt, Artificial Sequence; identical to SEQ ID NO: 80762
  derived and/or modified CDS sequence (opt1) from neuraminidase__InfluenzaA__ADB89304

SEQ ID NO: 81992 - RNA, 1410 nt, Artificial Sequence; identical to SEQ ID NO: 80762
  derived and/or modified CDS sequence (opt1) from neuraminidase__InfluenzaA__ADB89314

SEQ ID NO: 81993 - RNA, 1410 nt, Artificial Sequence; identical to SEQ ID NO: 80762
  derived and/or modified CDS sequence (opt1) from neuraminidase__InfluenzaA__ADB89324

SEQ ID NO: 81994 - RNA, 1410 nt, Artificial Sequence; identical to SEQ ID NO: 80762
  derived and/or modified CDS sequence (opt1) from neuraminidase__InfluenzaA__ADB89334

SEQ ID NO: 81995 - RNA, 1410 nt, Artificial Sequence; identical to SEQ ID NO: 80762
  derived and/or modified CDS sequence (opt1) from neuraminidase__InfluenzaA__ADB89344

SEQ ID NO: 81996 - RNA, 1410 nt, Artificial Sequence; identical to SEQ ID NO: 80762
  derived and/or modified CDS sequence (opt1) from neuraminidase__InfluenzaA__ADB89364

SEQ ID NO: 81997 - RNA, 1410 nt, Artificial Sequence; identical to SEQ ID NO: 80762
  derived and/or modified CDS sequence (opt1) from neuraminidase__InfluenzaA__ADB89374

SEQ ID NO: 81998 - RNA, 1410 nt, Artificial Sequence; identical to SEQ ID NO: 80762
  derived and/or modified CDS sequence (opt1) from neuraminidase__InfluenzaA__ADB89384

SEQ ID NO: 81999 - RNA, 1410 nt, Artificial Sequence; identical to SEQ ID NO: 80762
  derived and/or modified CDS sequence (opt1) from neuraminidase__InfluenzaA__ADB89394

SEQ ID NO: 82000 - RNA, 1410 nt, Artificial Sequence
  derived and/or modified CDS sequence (opt1) from neuraminidase__InfluenzaA__ADB89404
augaaccccaaccagaagaucaucaccaucggcagcgugugcaugaccaucgggauggccaaccugauccuccagaucggcaacaucaucuccaucuggaucagccacuccauccagcuggggaaccagaaccagaucgagacgugcaaccagagcgucaucaccuacgagaacaacaccugggugaaccagaccuacgugaacaucuccaacacgaacuucgccgcgggccagagcgucguguccgugaagcuggccgggaacagcucccucugcccggucagcggcugggccaucuacuccaaggacaacagcgugcgcaucggcuccaagggggacguguucgucauccgggagcccuucaucagcugcagcccccuggagugccgcaccuucuuccugacccagggcgcccuccugaacgacaagcacagcaacgggaccaucaaggaccggucccccuaccgcacgcugaugagcugcccgaucggcgaggugcccucccccuacaacagccgguucgagagcguggccugguccgcgagcgccugccacgacgggaucaacuggcucaccaucggcaucuccggccccgacaacggggccgucgccgugcugaaguacaacggcaucaucaccgacaccaucaagagcuggcgcaacuccauccugcggacgcaggagagcgagugcgcgugcgugaacggguccugcuucaccgucaugaccgacggcccgagcaacggccaggccuccuacaagaucuuccgcaucgagaaggggaagaucgugaaguccguggagaugaacgcccccaacuaccacuacgaggagugcuccugcuaccccgacagcuccgagaucacgugcgucugccgggacaacuggcacggcagcaaccgccccuggguguccuucaaccagaaccucgaguaccagaucggguacaucugcagcggcaucuucggggacaacccgcggcccaacgacaagaccggcuccugcggccccgugagcuccaacggggccaacggcgucaagggguucagcuucaaguacggcaacgggguguggaucggccgcaccaagagcaucuccagccggaacggcuucgagaugaucugggaccccaacggguggaccggcaccgacaacaacuucuccaucaagcaggacaucguggggaucaacgaguggagcggcuacuccgggagcuucguccagcacccggagcugacgggccuggacugcauccgccccugcuucuggguggagcucauccggggccgccccaaggagaacaccaucuggaccuccgggagcuccaucagcuucugcggcgucaacuccgacaccgugggguggagcuggcccgacggcgccgagcugccguucacgaucgacaaguga

SEQ ID NO: 82001 - RNA, 1410 nt, Artificial Sequence; identical to SEQ ID NO: 80762
  derived and/or modified CDS sequence (opt1) from neuraminidase__InfluenzaA__ADB89414

SEQ ID NO: 82002 - RNA, 1410 nt, Artificial Sequence; identical to SEQ ID NO: 80762
  derived and/or modified CDS sequence (opt1) from neuraminidase__InfluenzaA__ADB89424

SEQ ID NO: 82003 - RNA, 1410 nt, Artificial Sequence; identical to SEQ ID NO: 80762
  derived and/or modified CDS sequence (opt1) from neuraminidase__InfluenzaA__ADB89434

SEQ ID NO: 82004 - RNA, 1410 nt, Artificial Sequence; identical to SEQ ID NO: 80762
  derived and/or modified CDS sequence (opt1) from neuraminidase__InfluenzaA__ADB89444

SEQ ID NO: 82005 - RNA, 1410 nt, Artificial Sequence
  derived and/or modified CDS sequence (opt1) from neuraminidase__InfluenzaA__ADB89454
augaaccccaaccagaagaucaucaccaucggcagcgugugcaugaccaucgggauggccaaccugauccuccagaucggcaacaucaucuccaucuggaucagccacuccauccagcuggggaaccagaaccagaucgagacgugcaaccagagcgucaucaccuacgagaacaacaccugggugaaccagaccuacgugaacaucuccaacacgaacuucgccgcgggccagagcgucguguccgugaagcuggccgggaacagcucccucugcccggucagcggcugggccaucuacuccaaggacaacagcauccgcaucggcuccaagggggacguguucgugauccgggagcccuucaucagcugcagcccccuggagugccgcaccuucuuccugacccagggcgcccuccugaacgacaagcacuccaacgggaccaucaaggaccggucccccuaccgcacgcugaugagcugcccgaucggcgagguccccucccccuacaacagccgguucgagagcguggccugguccgcgagcgccugccacgacgggaucaacuggcucaccaucggcaucuccggccccgacaacggggccguggccguccugaaguacaacggcaucaucaccgacaccaucaagagcuggcgcaacaacauccugcggacgcaggaguccgagugcgcgugcgugaacgggagcugcuucaccgugaugaccgacggcccgaacgacggccaggccuccuacaagaucuuccgcaucgagaaggggaagaucgucaagagcguggagaugaacgcccccaacuaccacuacgaggagugcuccugcuaccccgacagcuccgagaucacgugcgugugccgggacaacuggcacggcagcaaccgccccugggucuccuucaaccagaaccucgaguaccagaucggguacaucugcagcggcaucuucggggacaacccgcggcccaacgacaagaccggcuccugcggccccgugagcuccaacggggccaacggcgugaagggguucagcuucaaguacggcaacggggucuggaucggccgcaccaaguccaucagcagccggaacggcuucgagaugaucugggaccccaacggguggaccggcaccgacaacaacuucuccaucaagcaggacaucguggggaucaacgaguggagcggcuacuccgggagcuucgugcagcacccggagcugacgggccuggacugcauccgccccugcuucugggucgagcucauccggggccgccccaaggagaacaccaucuggaccuccgggagcuccaucagcuucugcggcgugaacuccgacaccgucggguggagcuggcccgacggcgccgagcugccguucacgaucgacaaguga

SEQ ID NO: 82006 - RNA, 1410 nt, Artificial Sequence; identical to SEQ ID NO: 80762
  derived and/or modified CDS sequence (opt1) from neuraminidase__InfluenzaA__ADB89464

SEQ ID NO: 82007 - RNA, 1410 nt, Artificial Sequence; identical to SEQ ID NO: 80762
  derived and/or modified CDS sequence (opt1) from neuraminidase__InfluenzaA__ADB89484

SEQ ID NO: 82008 - RNA, 1410 nt, Artificial Sequence; identical to SEQ ID NO: 80762
  derived and/or modified CDS sequence (opt1) from neuraminidase__InfluenzaA__ADB89494

SEQ ID NO: 82009 - RNA, 1410 nt, Artificial Sequence; identical to SEQ ID NO: 80752
  derived and/or modified CDS sequence (opt1) from neuraminidase__InfluenzaA__ADB89504

SEQ ID NO: 82010 - RNA, 1410 nt, Artificial Sequence; identical to SEQ ID NO: 80762
  derived and/or modified CDS sequence (opt1) from neuraminidase__InfluenzaA__ADB89514

SEQ ID NO: 82011 - RNA, 1410 nt, Artificial Sequence; identical to SEQ ID NO: 80762
  derived and/or modified CDS sequence (opt1) from neuraminidase__InfluenzaA__ADB89524

SEQ ID NO: 82012 - RNA, 1410 nt, Artificial Sequence
  derived and/or modified CDS sequence (opt1) from neuraminidase__InfluenzaA__ADB89544
augaaccccaaccagaagaucaucaccaucggcagcgugugcaugaccaucgggauggccaaccugauccuccagaucggcaacaucaucuccaucuggaucagccacuccauccagcuggggaaccagaaccagaucgagacgugcaaccagagcgucaucaccuacgagaacaacaccugggugaaccagaccuacgugaacaucuccaacacgaacuucgccgcgggccagagcgucguguccgugaagcuggccgggaacagcucccucugcccggucagcggcugggccaucuacuccaaggacaacagcauccgcaucggcuccaagggggacguguucgugauccgggagcccuucaucagcugcucccugcuggagugccgcaccuucuuccucacccagggcgcccugcugaacgacaagcacagcaacgggaccaucaaggaccggucccccuaccgcacgcucaugagcugccccaucggcgaggucccgucccccuacaacagccgguucgagagcguggccugguccgcgagcgccugccacgacgggaucaacuggcugaccaucggcaucuccggccccgacaacggggccguggccguccugaaguacaacggcaucaucaccgacaccaucaagagcuggcgcaacaacauccuccggacgcaggaguccgagugcgcgugcgugaacgggagcugcuucaccgugaugaccgacggccccuccgacggccaggccagcuacaagaucuuccgcaucgagaaggggaagaucgucaaguccguggagaugaacgccccgaacuaccacuacgaggagugcagcugcuaccccgacuccagcgagaucacgugcgugugccgggacaacuggcacggcuccaaccgccccugggucagcuucaaccagaaccuggaguaccagaucggguacaucugcuccggcaucuucggggacaacccccggccgaacgacaagaccggcagcugcggccccguguccagcaacggggccaacggcgugaagggguucuccuucaaguacggcaacggggucuggaucggccgcaccaagagcaucagcucccggaacggcuucgagaugaucugggaccccaacggguggaccggcaccgacaacaacuucagcaucaagcaggacaucguggggaucaacgagugguccggcuacagcggguccuucgugcagcaccccgagcugacgggccucgacugcauccgcccgugcuucugggucgagcugauccggggccgccccaaggagaacaccaucuggaccagcggguccagcaucuccuucugcggcgugaacagcgacaccgucgggugguccuggcccgacggcgccgagcugcccuucacgaucgacaaguga

SEQ ID NO: 82013 - RNA, 1410 nt, Artificial Sequence; identical to SEQ ID NO: 80762
  derived and/or modified CDS sequence (opt1) from neuraminidase__InfluenzaA__ADB89564

SEQ ID NO: 82014 - RNA, 1410 nt, Artificial Sequence; identical to SEQ ID NO: 80762
  derived and/or modified CDS sequence (opt1) from neuraminidase__InfluenzaA__ADB89574

SEQ ID NO: 82015 - RNA, 1410 nt, Artificial Sequence; identical to SEQ ID NO: 80762
  derived and/or modified CDS sequence (opt1) from neuraminidase__InfluenzaA__ADB89594

SEQ ID NO: 82016 - RNA, 1410 nt, Artificial Sequence; identical to SEQ ID NO: 80762
  derived and/or modified CDS sequence (opt1) from neuraminidase__InfluenzaA__ADB89604

SEQ ID NO: 82017 - RNA, 1410 nt, Artificial Sequence
  derived and/or modified CDS sequence (opt1) from neuraminidase__InfluenzaA__ADB89614
augaaccccaaccagaagaucaucaccaucggcagcgugugcaugaccaucgggauggccaaccugauccuccagaucggcaacaucaucuccaucuggaucagccacuccauccagcuggggaaccagaaccagaucgagacgugcaaccagagcgucaucaccuacgagaacaacaccugggugaaccagaccuacgugaacaucuccaacacgaacuucgccgcgggccagagcgucguguccgugaagcuggccgggaacagcucccucugcccggucagcggcugggccaucuacuccaaggacaacagcauccgcaucggcuccaagggggacguguucgugauccgggagcccuucaucagcugcagcccccuggagugccgcaccuucuuccugacccagggcgcccuccugaacgacaagcacuccaacgggaccaucaaggaccggucccccuaccgcacgcugaugagcugcccgaucggcgagguccccucccccuacaacagccgguucgagagcguggccugguccgcgagcgccugccacgacgggaucaacuggcucaccaucggcaucuccggccccgacaacggggccguggccguccugaaguacaacggcaucaucaccgacaccaucaagagcuggcgcaacaacauccugcggacgcaggaguccgagugcgcgugcgugaacgggagcugcuucaccgugaugaccgacggcccguccgacggccaggccagcuacaagaucuuccgcaucgagaaggggaagaucgucaaguccguggagaugaacgcccccaacuaccacuacgaggagugcagcugcuaccccgacuccagcgagaucacgugcgugugccgggacaacuggcacggcuccaaccgccccugggucagcuucaaccagaaccucgaguaccagaucggguacaucugcuccggcaucuucggggacaacccgcggcccaacgacaagaccggcagcugcggccccguguccagcaacggggccaacggcgugaagggguucuccuucaaguacggcaacgggaucuggaucggccgcaccaagagcaucagcucccggaacggcuucgagaugaucugggaccccaacggguggaccggcaccgacaacaacuucagcaucaagcaggacaucgucgggaucaacgagugguccggcuacagcggguccuucgugcagcacccggagcugacgggccuggacugcauccgccccugcuucuggguggagcucauccggggccgccccaaggagaacaccaucuggaccagcggguccagcaucuccuucugcggcgucaacagcgacaccguggggugguccuggcccgacggcgccgagcugccguucacgaucgacaaguga

SEQ ID NO: 82018 - RNA, 1410 nt, Artificial Sequence; identical to SEQ ID NO: 80762
  derived and/or modified CDS sequence (opt1) from neuraminidase__InfluenzaA__ADB89624

SEQ ID NO: 82019 - RNA, 1410 nt, Artificial Sequence; identical to SEQ ID NO: 80762
  derived and/or modified CDS sequence (opt1) from neuraminidase__InfluenzaA__ADB89634

SEQ ID NO: 82020 - RNA, 1410 nt, Artificial Sequence; identical to SEQ ID NO: 80762
  derived and/or modified CDS sequence (opt1) from neuraminidase__InfluenzaA__ADB89644

SEQ ID NO: 82021 - RNA, 1410 nt, Artificial Sequence; identical to SEQ ID NO: 81780
  derived and/or modified CDS sequence (opt1) from neuraminidase__InfluenzaA__ADB89664

SEQ ID NO: 82022 - RNA, 1410 nt, Artificial Sequence; identical to SEQ ID NO: 80762
  derived and/or modified CDS sequence (opt1) from neuraminidase__InfluenzaA__ADB89674

SEQ ID NO: 82023 - RNA, 1410 nt, Artificial Sequence; identical to SEQ ID NO: 80762
  derived and/or modified CDS sequence (opt1) from neuraminidase__InfluenzaA__ADB89684

SEQ ID NO: 82024 - RNA, 1410 nt, Artificial Sequence
  derived and/or modified CDS sequence (opt1) from neuraminidase__InfluenzaA__ADB89694
augaaccccaaccagaagaucaucaccaucggcagcgugugcaugaccaucgggauggccaaccugauccuccagaucggcaacaucaucuccaucuggaucagccacuccauccagcuggggaaccagaaccagaucgagacgugcaaccagagcgucaucaccuacgagaacaacaccugggugaaccagaccuacgugaacaucuccaacacgaacuucgccgcgggccagagcgucguguccgugaagcuggccgggaacagcucccucugcccggucagcggcugggccaucuacuccaaggacaacagcauccgcaucggcuccaagggggacguguucgugauccgggagcccuucaucagcugcagcccccuggagugccgcaccuucuuccugacccagggcgcccuccugaacgacaagcacuccaacgggaccaucaaggaccggucccccuaccgcacgcugaugagcugcccgaucggcgagguccccucccccuacaacagccgguucgagagcguggccugguccgcgagcgccugccacgacgggaucaacuggcucaccaucggcaucuccggccccgacaacggggccguggccguccugaaguacaacggcaucaucaccgacaccaucaagagcuggcgcaacaacauccugcggacgcaggaguccgagugcgcgugcgugaacgggagcugcuucaccgugaugaccgacggcccguccgacggccaggccagcuacaagaucuuccgcaucgagaaggggaagaucgucaaguccguggagaugaacgcccccaacuaccacuacgaggagugcagcugcuaccccgacuccagcgagaucacgugcgugugccgggacaacuggcacggcuccaaccgccccugggucagcuucaaccagaaccucgaguaccagaucggguacaucugcuccggcaucuucggggacaacccgcggcccaacgacaagaccggcagcugcggccccguguccagcaacggggccaacggcgugaagggguucuccuucaaguacggcaacggggucuggaucggccgcaccaagagcaucagcucccggaacggcuucgagaugaucugggaccccaacggguggaccggcaccgacaacaacuucacgaucaagcaggacaucguggggaucaacgaguggagcggcuacuccgggagcuucgugcagcacccggagcugaccggccuggacugcauccgccccugcuucugggucgagcucauccggggccgccccaaggagaacaccaucuggaccuccgggagcuccaucagcuucugcggcgugaacuccgacacggucggguggagcuggcccgacggcgccgagcugccguucaccaucgacaaguga

SEQ ID NO: 82025 - RNA, 1410 nt, Artificial Sequence; identical to SEQ ID NO: 80762
  derived and/or modified CDS sequence (opt1) from neuraminidase__InfluenzaA__ADB89704

SEQ ID NO: 82026 - RNA, 1410 nt, Artificial Sequence; identical to SEQ ID NO: 80762
  derived and/or modified CDS sequence (opt1) from neuraminidase__InfluenzaA__ADB89714

SEQ ID NO: 82027 - RNA, 1410 nt, Artificial Sequence; identical to SEQ ID NO: 80623
  derived and/or modified CDS sequence (opt1) from neuraminidase__InfluenzaA__ADB89724

SEQ ID NO: 82028 - RNA, 1410 nt, Artificial Sequence; identical to SEQ ID NO: 80623
  derived and/or modified CDS sequence (opt1) from neuraminidase__InfluenzaA__ADB89735

SEQ ID NO: 82029 - RNA, 1410 nt, Artificial Sequence; identical to SEQ ID NO: 80762
  derived and/or modified CDS sequence (opt1) from neuraminidase__InfluenzaA__ADB90357

SEQ ID NO: 82030 - RNA, 1410 nt, Artificial Sequence; identical to SEQ ID NO: 80762
  derived and/or modified CDS sequence (opt1) from neuraminidase__InfluenzaA__ADB90358

SEQ ID NO: 82031 - RNA, 1410 nt, Artificial Sequence
  derived and/or modified CDS sequence (opt1) from neuraminidase__InfluenzaA__ADB90359
augaaccccaaccagaagaucaucaccaucggcagcgugugcaugaccaucgggauggccaaccugauccuccagaucggcaacaucaucuccaucuggaucagccacuccauccagcuggggaaccagaaccagaucgagacgugcaaccagagcaucaucaccuacgagaacaacaccugggucaaccagaccuacgugaacaucuccaacacgaacuucgccgcgggccagagcguggucuccgugaagcuggccgggaacagcucccucugcccggugagcggcugggccaucuacuccaaggacaacagcauccgcaucggcuccaagggggacgucuucgugauccgggagcccuucaucagcugcagcccccuggagugccgcaccuucuuccugacccagggcgcccuccugaacgacaagcacuccaacgggaccaucaaggaccggucccccuaccgcacgcugaugagcugcccgaucggcgaggugcccucccccuacaacagccgguucgagagcgucgccugguccgcgagcgccugccacgacgggaucaacuggcucaccaucggcaucuccggccccgacaacggggccguggccgugcugaaguacaacggcaucaucaccgacaccaucaagagcuggcgcaacaacauccugcggacgcaggaguccgagugcgcgugcgucaacgggagcugcuucaccgugaugaccgacggcccguccgacggccaggccagcuacaagaucuuccgcaucgagaaggggaagaucgugaaguccgucgagaugaacgcccccaacuaccacuacgaggagugcagcugcuaccccgacuccagcgagaucacgugcgugugccgggacaacuggcacggcuccaaccgccccugggugagcuucaaccagaaccucgaguaccggaucggguacaucugcuccggcaucuucggggacaacccgcgccccaacgacaagaccggcagcugcggccccgucuccagcaacggggccaacggcgugaagggguucuccuucaaguacggcaacgggguguggaucggccggaccaagagcaucagcucccgcaacggcuucgagaugaucugggaccccaacggguggaccggcaccgacaacaacuucagcaucaagcaggacaucgucgggacgaacgagugguccggcuacagcggguccuucgugcagcacccggagcugaccggccuggacugcauccggcccugcuucuggguggagcucauccgcggccggcccaaggagaacaccaucuggaccagcggguccagcaucuccuucugcggcgucaacagcgacacgguggggugguccuggcccgacggcgccgagcugccguucaccaucgacaaguga

SEQ ID NO: 82032 - RNA, 1410 nt, Artificial Sequence; identical to SEQ ID NO: 80762
  derived and/or modified CDS sequence (opt1) from neuraminidase__InfluenzaA__ADB90363

SEQ ID NO: 82033 - RNA, 1410 nt, Artificial Sequence; identical to SEQ ID NO: 81939
  derived and/or modified CDS sequence (opt1) from neuraminidase__InfluenzaA__ADB90373

SEQ ID NO: 82034 - RNA, 1410 nt, Artificial Sequence; identical to SEQ ID NO: 80762
  derived and/or modified CDS sequence (opt1) from neuraminidase__InfluenzaA__ADB98137

SEQ ID NO: 82035 - RNA, 1410 nt, Artificial Sequence; identical to SEQ ID NO: 81116
  derived and/or modified CDS sequence (opt1) from neuraminidase__InfluenzaA__ADB98138

SEQ ID NO: 82036 - RNA, 1410 nt, Artificial Sequence; identical to SEQ ID NO: 80762
  derived and/or modified CDS sequence (opt1) from neuraminidase__InfluenzaA__ADB98139

SEQ ID NO: 82037 - RNA, 1410 nt, Artificial Sequence; identical to SEQ ID NO: 81116
  derived and/or modified CDS sequence (opt1) from neuraminidase__InfluenzaA__ADB98140

SEQ ID NO: 82038 - RNA, 1410 nt, Artificial Sequence; identical to SEQ ID NO: 81116
  derived and/or modified CDS sequence (opt1) from neuraminidase__InfluenzaA__ADB98141

SEQ ID NO: 82039 - RNA, 1410 nt, Artificial Sequence; identical to SEQ ID NO: 80762
  derived and/or modified CDS sequence (opt1) from neuraminidase__InfluenzaA__ADC32391

SEQ ID NO: 82040 - RNA, 1410 nt, Artificial Sequence; identical to SEQ ID NO: 80762
  derived and/or modified CDS sequence (opt1) from neuraminidase__InfluenzaA__ADC32392

SEQ ID NO: 82041 - RNA, 1410 nt, Artificial Sequence; identical to SEQ ID NO: 80762
  derived and/or modified CDS sequence (opt1) from neuraminidase__InfluenzaA__ADC32393

SEQ ID NO: 82042 - RNA, 1410 nt, Artificial Sequence; identical to SEQ ID NO: 80762
  derived and/or modified CDS sequence (opt1) from neuraminidase__InfluenzaA__ADC32394

SEQ ID NO: 82043 - RNA, 1410 nt, Artificial Sequence; identical to SEQ ID NO: 80762
  derived and/or modified CDS sequence (opt1) from neuraminidase__InfluenzaA__ADC32395

SEQ ID NO: 82044 - RNA, 1410 nt, Artificial Sequence; identical to SEQ ID NO: 80762
  derived and/or modified CDS sequence (opt1) from neuraminidase__InfluenzaA__ADC32396

SEQ ID NO: 82045 - RNA, 1410 nt, Artificial Sequence; identical to SEQ ID NO: 80762
  derived and/or modified CDS sequence (opt1) from neuraminidase__InfluenzaA__ADC32397

SEQ ID NO: 82046 - RNA, 1410 nt, Artificial Sequence; identical to SEQ ID NO: 80762
  derived and/or modified CDS sequence (opt1) from neuraminidase__InfluenzaA__ADC32398

SEQ ID NO: 82047 - RNA, 1410 nt, Artificial Sequence; identical to SEQ ID NO: 80762
  derived and/or modified CDS sequence (opt1) from neuraminidase__InfluenzaA__ADC32399

SEQ ID NO: 82048 - RNA, 1410 nt, Artificial Sequence; identical to SEQ ID NO: 80762
  derived and/or modified CDS sequence (opt1) from neuraminidase__InfluenzaA__ADC32400

SEQ ID NO: 82049 - RNA, 1410 nt, Artificial Sequence; identical to SEQ ID NO: 80762
  derived and/or modified CDS sequence (opt1) from neuraminidase__InfluenzaA__ADC32401

SEQ ID NO: 82050 - RNA, 1410 nt, Artificial Sequence
  derived and/or modified CDS sequence (opt1) from neuraminidase__InfluenzaA__ADC32404
augaaccccaaccagaagaucaucaccaucggcagcgugugcaugaccaucgggauggccaaccugauccuccagaucggcaacaucaucuccaucuggaucagccacuccauccagcuggggaaccagaaccagaucgagacgugcaaccagagcgucaucaccuacgagaacaacaccugggugaaccagaccuacgugaacaucuccaacacgaacuucgccgcgggccagagcgucguguccgugaagcuggccgggaacagcucccucugcccggucagcggcugggccaucuacuccaaggacaacagcauccgcaucggcuccaagggggacguguucgugauccgggagcccuucaucagcugcagcccccuggagugccgcaccuucuuccugacccagggcgcccuccugaacgacaagcacuccaacgggaccaucaaggaccggucccccuaccgcacgcugaugagcugcccgaucggcgagguccccucccccuacaacagccgguucgagagcguggccugguccgcgagcgccugccacgacgggaucaacuggcucaccaucggcaucuccggccccgacaacggggccguggccguccugaaguacaacggcaucaucaccgacaccaucaagagcuggcgcaacaacauccugcggacgcaggaguccgagugcgcgugcgugaacgggagcugcuucaccgugaugaccgacggcccguccgacggccaggccagcuacaagaucuuccgcaucgagaaggggaagaucgucaaguccguggagaugaacgcccccaacuaccacuacgaggagugcagcugcuaccccgacuccagcgagaucacgugcgugugccgggacaacuggcacggcuccaaccgccccugggucagcuucaaccagaaccucgaguaccagaucggguacaucugcuccggcaucuucggggacaacccgcggcccaacgacaagaagggcagcugcggccccguguccagcaacggggccaacggcgugaagggguucuccuucaaguacggcaacggggucuggaucggccgcaccaagagcaucagcucccggaacggcuucgagaugaucugggaccccaacggguggaccggcaccgacaacaacuucagcaucaagcaggacaucguggggaucaacgagugguccggcuacagcggguccuucgugcagcacccggagcugaccggccuggacugcauccgccccugcuucugggucgagcucauccggggccgccccaaggagaacacgaucuggaccagcggguccagcaucuccuucugcggcgugaacagcgacaccgucgggugguccuggcccgacggcgccgagcugccguucaccaucgacaaguga

SEQ ID NO: 82051 - RNA, 1410 nt, Artificial Sequence
  derived and/or modified CDS sequence (opt1) from neuraminidase__InfluenzaA__ADC32407
augaaccccaagcagaagaucaucaccaucggcagcgugugcaugaccaucgggauggccaaccugauccuccagaucggcaacaucaucuccaucuggaucagccacuccauccagcuggggaaccagaaccagaucgagacgugcaaccagagcgucaucaccuacgagaacaacaccugggugaaccagaccuacgugaacaucuccaacacgaacuucgccgcgggccagagcgucguguccgugaagcuggccgggaacagcucccucugcccggucagcggcugggccaucuacuccaaggacaacagcauccgcaucggcuccaagggggacguguucgugauccgggagcccuucaucagcugcagcccccuggagugccgcaccuucuuccugacccagggcgcccuccugaacgacaagcacuccaacgggaccaucaaggaccggucccccuaccgcacgcugaugagcugcccgaucggcgagguccccucccccuacaacagccgguucgagagcguggccugguccgcgagcgccugccacgacgggaucaacuggcucaccaucggcaucuccggccccgacaacggggccguggccguccugaaguacaacggcaucaucaccgacaccaucaagagcuggcgcaacaacauccugcggacgcaggaguccgagugcgcgugcgugaacgggagcugcuucaccgugaugaccgacggcccguccgacggccaggccagcuacaagaucuuccgcaucgagaaggggaagaucgucaaguccguggagaugaacgcccccaacuaccacuacgaggagugcagcugcuaccccgacuccagcgagaucacgugcgugugccgggacaacuggcacggcuccaaccgccccugggucagcuucaaccagaaccucgaguaccagaucggguacaucugcuccggcaucuucggggacaacccgcggcccaacgacaagaagggcagcugcggccccguguccagcaacggggccaacggcgugaagggguucuccuucaaguacggcaacggggucuggaucggccgcaccaagagcaucagcucccggaacggcuucgagaugaucugggaccccaacggguggaccggcaccgacaacaacuucagcaucaagcaggacaucguggggaucaacgagugguccggcuacagcggguccuucgugcagcacccggagcugaccggccuggacugcauccgccccugcuucugggucgagcucauccggggccgccccaaggagaacacgaucuggaccagcggguccagcaucuccuucugcggcgugaacagcgacaccgucgggugguccuggcccgacggcgccgagcugccguucaccaucgacaaguga

SEQ ID NO: 82052 - RNA, 1410 nt, Artificial Sequence
  derived and/or modified CDS sequence (opt1) from neuraminidase__InfluenzaA__ADC34942
augaaccccaaccagaagaucaucaccaucggcagcgugucccugaccaucagcacgaucugcuucuucaugcagaucgccauccucaucaccaccgucacccugcacuucaagcaguacgaguucaacccgccgcccaacaaccaggugaugcugugcgagcccacgaucaucgagcgcaacaucaccgagaucguguaccucaccaacaccacgaucgagaaggagaucugccccaagcuggccgaguaccgggagugguccaagccccagugcaacaucaccggguucgcgcccuucagcaaggacaacuccauccgccugagcgccggcggggacaucugggucacccgggagcccuacguguccugcgacccggacaagugcuaccaguucgcccucggccaggggaccacgcugaacaacgugcacagcaacgacaucguccgcgaccggacccccuaccgcacccugcucaugaacgagcugggcgugcccuuccaccugggcaccaagcaggucugcaucgccugguccagcuccagcugccacgacgggaaggccuggcuccacgugugcgugacgggcgacgacaagaacgcgaccgccuccuucaucuacaacgggcggcugguggacagcaucgucuccuggagcaaggagauccugcgcacccaggaguccgagugcgugugcaucaacgggaccugcacgguggucaugaccgacggcagcgccuccggcaaggccgacaccaagauccucuucaucgaggagggcaagaucgugcacaccagcacgcugagcggguccgcgcagcacguggaggagugcagcugcuacccccgguacccgggcguccgcugcgugugccgggacaacuggcgcggguccaaccggcccaucguggacaucaacaugaaggacuacagcaucgucuccagcuacgugugcuccggccuggugggcgacacgccccgcaagaacgacagcuccagcuccgggcacugccucaaccccaacaacgaggagggcgggcacggcgucaaggggugggccuucgacgacggcaacgacguguggaugggccggaccaucagcgagaagcugcgcuccggguacgagaccuucaaggucaucgagggcuggagcaacccgaacuccaagcugcagaucaaccgccaggugaucguggaccgggggaaccggagcggcuacuccgggaucuucagcgucgagggcaaguccugcaucaaccgcugcuucuacguggagcucauccggggccgcaaggaggagaccgaggugcuguggaccagcaacagcaucgucguguucugcgggaccuccggcaccuacgggacgggcagcuggcccgacggggccgacaucaaccugaugcccaucuga

SEQ ID NO: 82053 - RNA, 1410 nt, Artificial Sequence
  derived and/or modified CDS sequence (opt1) from neuraminidase__InfluenzaA__ADC39000
augaaccccaaccagaagaucaucaccaucggcagcgugugcaugaccaucgggauggccaaccugauccuccagaucggcaacaucaucuccaucuggaucagccacuccauccagcuggggaaccagaaccagaucgagacgugcaaccagagcgucaucaccuacgagaacaacaccugggugaaccagaccuacgugaacaucuccaacacgaacuucgccgcgggccagagcgucguguccgugaagcuggccgggaacagcucccucugcccggucagcggcugggccaucuacuccaaggacaacagcauccgcaucggcuccaagggggacguguucgugauccgggagcccuucaucagcugcagcccccuggagugccgcaccuucuuccugacccagggcgcccuccugaacgacaagcacuccaacgggaccaucaaggaccggucccccuaccgcacgcugaugagcugcccgaucggcgagguccccucccccuacaacagccgguucgagagcguggccugguccgcgagcgccugccacgacgggaucaacuggcucaccaucggcaucuccggccccgacaacggggccguggccguccugaaguacaacggcaucaucaccgacaccaucaagagcuggcgcaacaacauccugcggacgcaggaguccgagugcgcgugcgugaacgggagcugcuucaccgugaugaccgacggcccguccgacggccaggccagcuacaagaucuuccgcaucgagaaggggaagaucgucaaguccguggagaugaacgcccccaacuaccacuacgaggagugcagcugcuaccccgacuccagcgagaucacgugcgugugccgggacaacuggcacggcuccaaccgccccugggucagcuucaaccagaaccucgaguaccagaucggguacaucugcuccggcaucuucggggacaacccgcggcccaacgacaagaccggcagcugcggccccguguccagcaacggggccaacggcgugaagggguucuccuucaaguacggcaacggggucuggaucggccgcaccaagagcaucagcucccggaacggcuucgagaugaucugggaccccaacggguggaccggcaccgacaacaacuucagcaucaagcaggacaucguggggaucaacgagugguccggcuacagcggguccuucgugcagcacccggagcugacgggccuggacugcauccgccccugcuucugggucgagcucauccggggccgccccaaggagaacaccaucuggaccagcggguccagcaucuccuucugcggcgugaacagcgacaacgucgggugguccuggcccgacggcgccgagcugccguucaccaucgacaaguga

SEQ ID NO: 82054 - RNA, 1410 nt, Artificial Sequence; identical to SEQ ID NO: 80762
  derived and/or modified CDS sequence (opt1) from neuraminidase__InfluenzaA__ADC39010

SEQ ID NO: 82055 - RNA, 1413 nt, Artificial Sequence; identical to SEQ ID NO: 80656
  derived and/or modified CDS sequence (opt1) from neuraminidase__InfluenzaA__ADC45606

SEQ ID NO: 82056 - RNA, 1413 nt, Artificial Sequence
  derived and/or modified CDS sequence (opt1) from neuraminidase__InfluenzaA__ADC45628
augaaccccaaccagaagaucaucaccaucggcagcaucuccaucgccaucgggaucaucagccugaugcuccagaugggcaacaucaucuccaucugggccagccacuccauccagaccgggagccagaaccacacgggcaucugcaaccagcgcaucaucaccuacgagaacuccaccugggugaaccacaccuacgucaacaucaacaacacgaacgugguggcggggaaggacaagaccccggucacccuggugggcaacagcucccugugcagcaucuccggcugggccaucuacaccaaggacaacagcauccggaucggguccaagggcgacguguucgucauccgcgagcccuucaucagcugcucccaccucgagugcaagacguucuuccugacccagggggcccugcucaacgacaagcacagcaacggcaccgugaaggaccggucccccuaccgcgcccugaugagcugcccccugggggaggccccgucccccuacaacagcaaguucgagagcguggcgugguccgccagcgccugccacgacggcaucggcuggcucaccaucgggaucuccggccccgacaacggggccgucgcggugcugaaguacaagggcaucaucacgggcaccaucaagagcuggaagaagcagauccugcggacccaggaguccgagugcgugugcaugaacgggagcugcuucaccaucaugacggacggccccuccaacggggccgccagcuacaagaucuucaagaucgagaagggcaaggucaccaaguccauggagcucaacgccccgaacuuccacuacgaggagugcagcugcuaccccgacaccgggaccgugaugugcgugugccgcgacaacuggcacggcuccaaccggcccugggucagcuucaaccagaaccuggacuaccagaucggcuacaucugcuccgggguguucggcgacaacccccgcccgaaggaccgggaggggagcugcaaccccgugacggucgacggcgccaacggggugaagggcuucuccuacaaguacggcaacgggguguggaucggccgcaccaagagcaaccggauccgcaagggguucgagaugaucugggaccccaacggcuggaccaacaccgacuccgacuucagcgucaagcaggacaucguggcgaucacggacugguccggguacagcggcagcuucgugcagcaccccgagcugaccggccucgacugcauccggccgugcuucugggucgagcuggugcgcgggcugccccgggagaacaccaccaucuggacguccggcagcuccaucagcuucugcggggucaacggcgacaucgccaacugguccuggcccgacggcgccgagcuccccuucaccaucgacaaguga

SEQ ID NO: 82057 - RNA, 1413 nt, Artificial Sequence
  derived and/or modified CDS sequence (opt1) from neuraminidase__InfluenzaA__ADC45639
augaaccccaaccagaagaucaucaccaucggcagcaucuccaucgccaucgggaucaucagccugaugcuccagaucggcaacaucaucuccaucugggccagccacuccauccagaccgggagccagaaccacacgggcaucugcaaccagcgcaucaucaccuacgagaacuccaccugggugaaccacaccuacgucaacaucaacaacacgaacgugguggcggggaaggacaagaccccggucacccuggugggcaacagcucccugugcagcaucuccggcugggccaucuacaccaaggacaacagcauccggaucggguccaagggcgacguguucgucauccgcgagcccuucaucagcugcucccaccucgagugcaagacguucuuccugacccagggggcccugcucaacgacaagcacagcaacggcaccgugaaggaccggucccccuaccgcgcccugaugagcugcccccugggggaggccccgucccccuacaacagcaaguucgagagcguggcgugguccgccagcgccugccacgacggcaucggcuggcucaccaucggggucuccggccccgacaacggggccguggcggugcugaaguacaagggcaucaucacgggcaccaucaagagcuggaagaagcagauccugcggacccaggaguccgagugcgucugcaugaacgggagcugcuucaccaucaugacggacggccccuccaacggggccgccagcuacaagaucuucaagaucgagaagggcaaggugaccaaguccauggagcucaacgccccgaacuuccacuacgaggagugcagcugcuaccccgacaccgggaccgugaugugcgucugccgcgacaacuggcacggcuccaaccggcccugggugagcuucaaccagaaccuggacuaccagaucggcuacaucugcuccgggguguucggcgacaacccccgcccgaaggaccgggaggggagcugcaaccccgucacgguggacggcgccaacggggugaagggcuucuccuacaaguacggcaacggggucuggaucggccgcaccaagagcaaccggauccgcaagggguucgagaugaucugggaccccaacggcuggaccaacaccgacuccgacuucagcgugaagcaggacaucguggcgaucacggacugguccggguacagcggcagcuucguccagcaccccgagcugaccggccucgacugcauccggccgugcuucuggguggagcugguccgcgggcugccccgggagaacaccaccaucuggacguccggcagcuccaucagcuucugcggggugaacggcgacaucgccaacugguccuggcccgacggcgccgagcuccccuucaccaucgacaaguga

SEQ ID NO: 82058 - RNA, 1413 nt, Artificial Sequence; identical to SEQ ID NO: 80656
  derived and/or modified CDS sequence (opt1) from neuraminidase__InfluenzaA__ADC45650

SEQ ID NO: 82059 - RNA, 1413 nt, Artificial Sequence; identical to SEQ ID NO: 80656
  derived and/or modified CDS sequence (opt1) from neuraminidase__InfluenzaA__ADC45661

SEQ ID NO: 82060 - RNA, 1413 nt, Artificial Sequence
  derived and/or modified CDS sequence (opt1) from neuraminidase__InfluenzaA__ADC45683
augaaccccaaccagaagaucaucaccaucggcagcaucuccaucgccaucgggaucaucagccugaugcuccagaucggcaacaucaucuccaucugggccagccacuccauccagaccgggagccagaaccacacgggcaucugcaaccagcgcaucaucaccuacgagaacuccaccugggugaaccacaccuacgucaacaucaacaacacgaacgugguggcgggggaggacaagaccccggucacccuggugggcaacagcucccugugcagcaucuccggcugggccaucuacaccaaggacaacagcauccggaucggguccaagggcgacguguucgucauccgcgagcccuucaucagcugcucccaccucgagugcaagacguucuuccugacccagggggcccugcucaacgacaagcacagcaacggcaccgugaaggaccggucccccuaccgcgcccugaugagcugcccccugggggaggccccgucccccuacaacagcaaguucgagagcguggcgugguccgccagcgccugccacgacggcaucggcuggcucaccaucgggaucuccggccccgacaacggggccgucgcggugcugaaguacaagggcaucaucacgggcaccaucaagagcuggaagaagcagauccugcggacccaggaguccgagugcgugugcaugaacgggagcugcuucaccaucaugacggacggccccuccaacggggccgccagcuacaagaucuucaagaucgagaagggcaaggucaccaaguccauggagcucaacgccccgaacuuccacuacgaggagugcagcugcuaccccgacaccgggaccgugaugugcgugugccgcgacaacuggcacggcuccaaccggcccugggucagcuucaaccagaaccuggacuaccagaucggcuacaucugcuccgggguguucggcgacaacccccgcccgaaggaccgggaggggagcugcaaccccgugacggucgacggcgccaacggggugaagggcuucuccuacaaguacggcaacgggguguggaucggccgcaccaagagcaaccggauccgcaagggguucgagaugaucugggaccccaacggcuggaccaacaccgacuccgacuucagcgucaagcaggacaucguggcgaucacggacugguccggguacagcggcagcuucgugcagcaccccgagcugaccggccucgacugcauccggccgugcuucugggucgagcuggugcgcgggcugccccgggagaacaccaccaucuggacguccggcagcuccaucagcuucugcggggucaacggcgacaucgccaacugguccuggcccgacggcgccgagcuccccuucaccaucgacaaguga

SEQ ID NO: 82061 - RNA, 1413 nt, Artificial Sequence
  derived and/or modified CDS sequence (opt1) from neuraminidase__InfluenzaA__ADC45705
augaaccccaaccagaagaucaucaccaucggcagcaucuccaucgccaucgggaucaucagccugaugcuccagaucggcaacaucaucuccaucugggccagccacuccauccagaccgggagccagaacaacacgggcaucugcaaccagcgcaucaucaccuacgagaacuccaccugggugaaccacaccuacgucaacaucaacaacacgaacgugguggcgggggaggacaagaccagcgucacccuggccggcaacuccagccugugcuccaucagcggcugggccaucuacaccaaggacaacuccauccggaucgggagcaagggcgacguguucgugauccgcgagccguucaucuccugcagccaccucgagugccggacguucuuccugacccagggggcccugcucaacgacaagcacuccaacggcaccgucaagaaccgcagccccuaccgggcccugauguccugcccccugggggaggcgcccagcccguacaacagcaaguucgaguccguggccuggagcgccuccgccugccacgacggcaugggcuggcucaccaucgggaucagcggccccgacaacggggcgguggccguccugaaguacaacggcaucaucacgggcaccaucaaguccuggaagaagcagauccugcgcacccaggagagcgagugcgugugcaugaacggguccugcuucaccaucaugacggacggccccagcaacaaggccgccuccuacaagaucuucaagaucgagaaggggaaggugaccaagagcaucgagcucaacgcccccaacuuccacuacgaggagugcuccugcuacccggacaccggcaucgucaugugcgugugccgggacaacuggcacgggagcaaccgccccuggguguccuucaaccagaaccuggacuaccagaucggcuacaucugcagcggcgucuucggggacaacccccggcccgaggacggcgagggguccugcaacccggugaccguggacggcgcgaacggggucaagggcuucagcuacaaguacgacaacggcguguggaucgggcgcacgaaguccaaccggcugcgcaagggcuucgagaugaucugggaccccaacggguggaccaacaccgacagcgacuucuccgugaagcaggacgucguggccaucaccgacuggagcggcuacagcggguccuucgugcagcaccccgagcucacgggccuggacugcauccggcccugcuucugggucgagcuggugcgcggccucccgcgggagaacaccaccaucuggaccagcggguccagcaucuccuucugcggcgucaacagcgacacggccaacugguccuggcccgacggggccgagcugcccuucaccaucgacaaguga

SEQ ID NO: 82062 - RNA, 1413 nt, Artificial Sequence
  derived and/or modified CDS sequence (opt1) from neuraminidase__InfluenzaA__ADC45716
augaaccccaaccagaagaucaucaccaucggcagcaucuccaucgccaucgggaucaucagccugaugcuccagaucggcaacaucaucuccaucugggccagccacuccauccagaccgggagccagaaccacacgggcaucugcaaccagcgcaucaucaccuacgagaacuccaccugggugaaccacaccuacgucaacaucaacaacacgaacgugguggcggggaaggacaagaccccggucacccuggugggcaacagcucccugugcagcaucuccggcugggccaucuacaccaaggacaacagcauccggaucggguccaagggcgacguguucgucauccgcgagcccuucaucagcugcucccaccucgagugcaagacguucuuccugacccagggggcccugcucaacgacaagcacagcaacggcaccgugaaggaccggucccccuaccgcgcccugaugagcugcccccugggggaggccccgucccccuacaacagcaaguucgagagcguggcgugguccgccagcgccugccacgacggcaucggcuggcucaccaucgggaucuccggccccgacaacggggccgucgcggugcugaaguacaagggcaucaucacgggcaccaucaagagcuggaagaagcagauccugcggacccaggaguccgagugcgugugcaugaacgggagcugcuucaccaucaugacggacggccccuccaacggggccgccagcuacaagaucuucaagaucgagaagggcaaggucaccaaguccauggagcucaacgccccgaacuuccacuacgaggagugcagcugcuaccccgacaccgggaccgugaugugcgugugccgcgacaacuggcacggcuccaaccggcccugggucagcuucaaccagaaccuggacuaccagaucggcuacaucugcuccgggguguucggcgacaacccccgcccgaaggaccgggaggggagcugcaaccccgugacggucgacggcgccaacgggguggagggcuucuccuacaaguacggcaacgggguguggaucggccgcaccaagagcaaccggauccgcaagggguucgagaugaucugggaccccaacggcuggaccaacaccgacuccgacuucagcgucaagcaggacaucguggcgaucacgaacugguccggguacagcggcagcuucgugcagcaccccgagcugaccggccucgacugcauccggccgugcuucugggucgagcuggugcgcgggcugccccgggagaacaccaccaucuggacguccggcagcuccaucagcuucugcggggucaacggcgacaucgccaacugguccuggcccgacggcgccgagcuccccuucaccaucgacaaguga

SEQ ID NO: 82063 - RNA, 1413 nt, Artificial Sequence
  derived and/or modified CDS sequence (opt1) from neuraminidase__InfluenzaA__ADC45738
augaaccccaaccagaagaucaucaccaucggcagcaucuccaucgccaucgggaucaucagccugaugcuccagaucggcaacaucaucuccaucugggccagccacuccauccagaccgggagccagaacaacacgggcaucugcaaccagcgcaucaucaccuacgagaacuccaccugggugaaccacaccuacgucaacaucaacaacacgaacgugguggcgggggaggacaagaccagcgucacccuggccggcaacuccagccugugcuccaucagcggcugggccaucuacaccaaggacaacuccauccggaucgggagcaagggcgacguguucgugauccgcgagccguucaucuccugcagccaccucgagugccggacguucuuccugacccagggggcccugcucaacgacaagcacuccaacggcaccgucaaggaccgcagccccuaccgggcccugauguccugcccccugggggaggcgcccagcccguacaacagcaaguucgaguccguggccuggagcgccuccgccugccacgacggcaugggcuggcucaccaucgggaucagcggccccgacaacggggcgguggccguccugaaguacaacggcaucaucacgggcaccaucaaguccuggaagaagcagauccugcgcacccaggagagcgagugcgugugcaugaacggguccugcuucaccaucaugacggacggccccagcaacaaggccgccuccuacaagaucuucaagaucgagaaggggaaggugaccaagagcaucgagcucaacgcccccaacuucuacuacgaggagugcuccugcuacccggacaccggcaucgucaugugcgugugccgggacaacuggcacgggagcaaccgccccuggguguccuucaaccagaaccuggacuaccagaucggcuacaucugcagcggcgucuucggggacaacccccggcccgaggacggcgagggguccugcaacccggugaccguggacggcgcgaacggggucaagggcuucagcuacaaguacgacaacggcguguggaucgggcgcacgaaguccaaccggcugcgcaagggcuucgagaugaucugggaccccaacggguggaccaacaccgacagcgacuucuccgugaagcaggacgucguggccaucaccgacuggagcggcuacagcggguccuucgugcagcaccccgagcucacgggccuggacugcauccggcccugcuucugggucgagcuggugcgcggccucccgcgggagaacaccaccaucuggaccagcggguccagcaucuccuucugcggcgucaacagcgacacggccaacugguccuggcccgacggggccgagcugcccuucaccaucgacaaguga

SEQ ID NO: 82064 - RNA, 1413 nt, Artificial Sequence
  derived and/or modified CDS sequence (opt1) from neuraminidase__InfluenzaA__ADC45760
augaaccccaaccagaagaucaucaccaucggcagcaucuccaucgccaucgggaucaucagccugaugcuccagaucggcaacaucaucuccaucugggccagccacuccauccagaccgggagccagaacaacacgggcaucugcaaccagcgcaucaucaccuacgagaacuccaccugggugaaccacaccuacgucaacaucaacaacacgaacgugguggcgggggaggacaagaccagcgucacccuggccggcaacuccagccugugcuccaucagcggcugggccaucuacaccaaggacaacuccauccggaucgggagcaagggcgacguguucgugauccgcgagccguucaucuccugcagccaccucgagugccggacguucuuccugacccagggggcccugcucaacgacaagcacuccaacggcaccgccaaggaccgcagccccuaccgggcgcugauguccugcccccugggggaggcccccagcccguacaacagcaaguucgaguccgucgccuggagcgccuccgcgugccacgacggcaugggcuggcucaccaucgggaucagcggccccgacaacggggccguggccgugcugaaguacaacggcaucaucacgggcaccaucaaguccuggaagaagcagauccugcgcacccaggagagcgagugcgucugcaugaacggguccugcuucaccaucaugacggacggccccagcaacaaggccgccuccuacaagaucuucaagaucgagaaggggaaggugaccaagagcaucgagcucaacgcgcccaacuucuacuacgaggagugcuccugcuacccggacaccggcaucgugaugugcgucugccgggacaacuggcacgggagcaaccgccccuggguguccuucaaccagaaccuggacuaccagaucggcuacaucugcagcggcguguucggggacaacccccggcccgaggacggcgagggguccugcaacccggucaccguggacggcgccaacggggugaagggcuucagcuacaaguacggcaacggggucuggaucggccgcacgaaguccaaccggcugcgcaagggguucgagaugaucugggaccccaacggcuggaccaacaccgacagcgacuucuccgugaagcaggacguggucgccaucaccgacuggagcggguacagcggcuccuucgugcagcaccccgagcucacgggccuggggugcauccggcccugcuucuggguggagcugguccgcggccucccgcgggagaacaccaccaucuggaccagcggguccagcaucuccuucugcggcgugaacagcgacacggccaacugguccuggcccgacggcgccgagcugcccuucaccaucgacaaguga

SEQ ID NO: 82065 - RNA, 1413 nt, Artificial Sequence
  derived and/or modified CDS sequence (opt1) from neuraminidase__InfluenzaA__ADC45771
augaaccccaaccagaagaucaucaccaucggcagcaucuccaucgccaucgggaucaucagccugaugcuccagaucggcaacaucaucuccaucugggccagccacuccauccagaccgggagccagaacaacacgggcaucugcaaccagcgcaucaucaccuacgagaacuccaccugggugaaccacaccuacgucaacaucaacaacacgaacgugguggcgggggaggacaagaccagcgucacccuggccggcaacuccagccugugcuccaucagcggcugggccaucuacaccaaggacaacuccauccggaucgggagcaagggcgacguguucgugauccgcgagccguucaucuccugcagccaccucgagugccggacguucuuccugacccagggggcccugcucaacgacaagcacuccaacggcaccgucaaggaccgcagccccuaccgggcccugauguccugcccccugggggaggcgcccagcccguacaacagcaaguucgaguccguggccuggagcgccuccgccugccacgacggcaugggcuggcucaccaucgggaucagcggccccgacaacggggcgguggccguccugaaguacaacggcaucaucacgggcaccaucaaguccuggaagaagcagauccugcgcacccaggagagcgagugcgugugcaugaacggguccugcuucaccaucaugacggacggccccagcaacaaggccgccuccuacaagaucuucaagaucgagaaggggaaggugaccaagagcaucgagcucaacgcccccaacuucuacuacgaggagugcuccugcuacccggacaccggcaucgucaugugcgugugccgggacaacuggcacgggagcaaccgccccuggguguccuucaaccagaaccuggacuaccagaucggcuacaucugcagcggcgucuucggggacaacccccggcccgaggacggcgagggguccugcaacccggugaccguggacggcgcgaacggggucaagggcuucagcuacaaguacggcaacgggguguggaucggccgcacgaaguccaaccggcugcgcaagggguucgagaugaucugggaccccaacggcuggaccaacaccgacagcgacuucuccaugaagcaggacguggucgccaucaccgacuggagcggguacagcggcuccuucgugcagcaccccgagcucacgggccuggacugcauccggcccugcuucuggguggagcugguccgcgggcucccgcgggagaacaccaccaucuggaccagcggcuccagcaucuccuucugcggggugaacagcgacacggccaacugguccuggcccgacggcgccgagcugcccuucaccaucgacaaguga

SEQ ID NO: 82066 - RNA, 1413 nt, Artificial Sequence
  derived and/or modified CDS sequence (opt1) from neuraminidase__InfluenzaA__ADC45782
augaaccccaaccagaagaucaucaccaucggcagcaucuccaucgccaucgggaucaucagccugaugcuccagaucggcaacaucaucuccaucugggccagccacuccauccagaccgggagccagaacaacacgggcaucugcaaccagcgcaucaucaccuacgagaacuccaccugggugaaccacaccuacgucaacaucaacaacacgaacgugguggcgggggaggacaagaccagcgucacccuggccggcaacuccagccugugcuccaucagcggcugggccaucuacaccaaggacaacuccauccggaucgggagcaagggcgacguguucgugauccgcgagccguucaucuccugcagccaccucgagugccggacguucuuccugacccagggggcccugcucaacgacaagcacuccaaccgcaccgucaaggaccggagccccuaccgcgcccugauguccugcccccugggcgaggcgcccagcccguacaacagcaaguucgaguccguggccuggagcgccuccgccugccacgacgggaugggcuggcucaccaucggcaucagcgggcccgacaacggcgcgguggccguccugaaguacaacgggaucaucacgggcaccaucaaguccuggaagaagcagauccugcggacccaggagagcgagugcgugugcgugaacggcuccugcuucaccaucaugacggacgggcccagcaacaaggccgccuccuacaagaucuucaagaucgagaagggcaaggucaccaagagcaucgagcucaacgcccccaacuucuacuacgaggagugcuccugcuacccggacaccgggaucgugaugugcgugugccgcgacaacuggcacggcagcaaccggcccugggucuccuucaaccagaaccuggacuaccagaucggguacaucugcagcggcguguucggcgacaacccccgccccgaggacggggagggcuccugcaacccggugaccgucgacggggcgaacggcgugaagggguucagcuacaaguacggcaacggcguguggaucgggcggacgaaguccaaccgccugcggaagggcuucgagaugaucugggaccccaacggguggaccaacaccgacagcgacuucuccgucaagcaggacgugguggccaucaccgacuggagcggcuacagcggguccuucguccagcaccccgagcucacgggccuggacugcauccgccccugcuucuggguggagcugguccggggccucccgcgcgagaacaccaccaucuggaccagcggguccagcaucuccuucugcggcgugaacagcgacacggccaacugguccuggcccgacggggccgagcugcccuucaccaucgacaaguga

SEQ ID NO: 82067 - RNA, 1413 nt, Artificial Sequence
  derived and/or modified CDS sequence (opt1) from neuraminidase__InfluenzaA__ADC45804
augaaccccaaccagaagaucaucaccaucggcagcaucuccaucgccaucgggaucaucagccugaugcuccagaucggcaacaucaucuccaucugggccagccacuccauccagaccgggagccagaacaacacgggcaucugcaaccagcgcaucaucaccuacgagaacuccaccugggugaaccacaccuacgucaacaucaacaacacgaacgugguggcgggggaggacaagaccagcgucacccuggccggcaacuccagccugugcuccaucagcggcugggccaucuacaccaaggacaacuccauccggaucgggagcaagggcgacguguucgugauccgcgagccguucaucuccugcagccaccucgagugccggacguucuuccugacccagggggcccugcucaacgacaagcacuccaacggcaccgucaaggaccgcagccccuaccgggcccugauguccugcccccugggggaggcgcccagcccguacaacagcaaguucgaguccguggccuggagcgccuccgccugccacgacggcaugggcuggcucaccaucgggaucagcggccccgacaacggggcgguggccguccugaaguacaacggcaucaucacgggcaccaucaaguccuggaagaagcagauccugcgcacccaggagagcgagugcgugugcaugaacggguccugcuucaccaucaugacggacggccccagcaacaaggccgccuccuacaagaucuucaagaucgagaaggggaagaucaccaagagcaucgagcucaacgcccccaacuucuacuacgaggagugcuccugcuacccggacaccggcaucgugaugugcgucugccgggacaacuggcacgggagcaaccgccccuggguguccuucaaccagaaccuggacuaccagaucggcuacaucugcagcggcguguucggggacaacccccggcccgaggacggcgagggguccugcaacccggucaccguggacggcgcgaacggggugaagggcuucagcuacaaguacggcaacggggucuggaucggccgcacgaaguccaaccggcugcgcaagggguucgagaugaucugggaccccaacggcuggaccaacaccgacagcgacuucuccgugaagcaggacguggucgccaucaccgacuggagcggguacagcggcuccuucgugcagcaccccgagcucacgggccuggacugcauccggcccugcuucuggguggagcugguccgcgggcucccgcgggagaacaccaccaucuggaccagcggcuccagcaucuccuucugcggggugaacagcgacacggccaacugguccuggcccgacggcgccgagcugcccuucaccaucgacaaguga

SEQ ID NO: 82068 - RNA, 1413 nt, Artificial Sequence
  derived and/or modified CDS sequence (opt1) from neuraminidase__InfluenzaA__ADC45815
augaaccccaaccagaagaucaucaccaucggcagcaucuccaucgccaucgggaucaucagccugaugcuccagaucggcaacaucaucuccaucugggccagccacuccauccagaccgggagccagaacaacacgggcaucugcaaccagcgcaucaucaccuacgagaacuccaccugggugaaccacaccuacgucaacaucaacaacacgaacgugguggcgggggaggacaagaccagcgucacccuggccggcaacuccagccugugcuccaucagcggcugggccaucuacaccaaggacaacuccauccggaucgggagcaagggcgacguguucgugauccgcgagccguucaucuccugcagccaccucgagugccggacguucuuccugacccagggggcccugcucaacgacaagcacuccaacggcaccgucaaggaccgcagccccuaccgggcccugauguccugcccccugggggaggcgcccagcccguacaacagcaaguucgaguccguggccuggagcgccuccgccugccacgacggcaugggcuggcucaccaucgggaucagcggccccgacaacggggcgguggccguccugaaguacaacggcaucaucacgggcaccgugaaguccuggaagaagcagauccugcgcacccaggagagcgagugcgugugcaugaacggguccugcuucaccaucaugacggacggccccagcaacaaggccgccuccuacaagaucuucaagaucgagaaggggaaggucaccaagagcaucgagcucaacgcccccaacuucuacuacgaggagugcuccugcuacccggacaccggcauggugaugugcgugugccgggacaacuggcacgggagcaaccgccccugggucuccuucaaccagaaccuggacuaccagaucggcuacaucugcagcggcguguucggggacaacccccggcccgaggacggcgagggguccugcaacccggugaccgucgacggcgcgaacggggugaagggcuucagcuacaaguacggcaacgggguguggaucggccgcacgaaguccaaccggcugcgcaagggguucgagaugaucugggaccccaacggcuggaccaacaccgacagcgacuucuccgucaagcaggacgugguggccaucaccgacuggagcggguacagcggcuccuucguccagcaccccgagcucacgggccuggacugcauccggcccugcuucuggguggagcugguccgcgggcucccgcgggagaacaccaccaucuggaccagcggcuccagcaucuccuucugcggggugaacagcgacacggccaacugguccuggcccgacggcgccgagcugcccuucaccaucgacaaguga

SEQ ID NO: 82069 - RNA, 1413 nt, Artificial Sequence; identical to SEQ ID NO: 81485
  derived and/or modified CDS sequence (opt1) from neuraminidase__InfluenzaA__ADC45837

SEQ ID NO: 82070 - RNA, 1413 nt, Artificial Sequence; identical to SEQ ID NO: 81485
  derived and/or modified CDS sequence (opt1) from neuraminidase__InfluenzaA__ADC45848

SEQ ID NO: 82071 - RNA, 1410 nt, Artificial Sequence; identical to SEQ ID NO: 80762
  derived and/or modified CDS sequence (opt1) from neuraminidase__InfluenzaA__ADC53559

SEQ ID NO: 82072 - RNA, 1410 nt, Artificial Sequence; identical to SEQ ID NO: 80762
  derived and/or modified CDS sequence (opt1) from neuraminidase__InfluenzaA__ADD14088

SEQ ID NO: 82073 - RNA, 1410 nt, Artificial Sequence; identical to SEQ ID NO: 80762
  derived and/or modified CDS sequence (opt1) from neuraminidase__InfluenzaA__ADD14090

SEQ ID NO: 82074 - RNA, 1410 nt, Artificial Sequence; identical to SEQ ID NO: 80762
  derived and/or modified CDS sequence (opt1) from neuraminidase__InfluenzaA__ADD14094

SEQ ID NO: 82075 - RNA, 1410 nt, Artificial Sequence; identical to SEQ ID NO: 80762
  derived and/or modified CDS sequence (opt1) from neuraminidase__InfluenzaA__ADD14096

SEQ ID NO: 82076 - RNA, 1410 nt, Artificial Sequence; identical to SEQ ID NO: 80762
  derived and/or modified CDS sequence (opt1) from neuraminidase__InfluenzaA__ADD14098

SEQ ID NO: 82077 - RNA, 1410 nt, Artificial Sequence; identical to SEQ ID NO: 80762
  derived and/or modified CDS sequence (opt1) from neuraminidase__InfluenzaA__ADD14100

SEQ ID NO: 82078 - RNA, 1410 nt, Artificial Sequence; identical to SEQ ID NO: 80762
  derived and/or modified CDS sequence (opt1) from neuraminidase__InfluenzaA__ADD14102

SEQ ID NO: 82079 - RNA, 1410 nt, Artificial Sequence; identical to SEQ ID NO: 80762
  derived and/or modified CDS sequence (opt1) from neuraminidase__InfluenzaA__ADD14104

SEQ ID NO: 82080 - RNA, 1410 nt, Artificial Sequence; identical to SEQ ID NO: 80762
  derived and/or modified CDS sequence (opt1) from neuraminidase__InfluenzaA__ADD14106

SEQ ID NO: 82081 - RNA, 1410 nt, Artificial Sequence; identical to SEQ ID NO: 80762
  derived and/or modified CDS sequence (opt1) from neuraminidase__InfluenzaA__ADD14110

SEQ ID NO: 82082 - RNA, 1410 nt, Artificial Sequence; identical to SEQ ID NO: 80762
  derived and/or modified CDS sequence (opt1) from neuraminidase__InfluenzaA__ADD14112

SEQ ID NO: 82083 - RNA, 1410 nt, Artificial Sequence; identical to SEQ ID NO: 81732
  derived and/or modified CDS sequence (opt1) from neuraminidase__InfluenzaA__ADD14114

SEQ ID NO: 82084 - RNA, 1410 nt, Artificial Sequence; identical to SEQ ID NO: 80762
  derived and/or modified CDS sequence (opt1) from neuraminidase__InfluenzaA__ADD14116

SEQ ID NO: 82085 - RNA, 1410 nt, Artificial Sequence; identical to SEQ ID NO: 80762
  derived and/or modified CDS sequence (opt1) from neuraminidase__InfluenzaA__ADD14118

SEQ ID NO: 82086 - RNA, 1410 nt, Artificial Sequence; identical to SEQ ID NO: 80762
  derived and/or modified CDS sequence (opt1) from neuraminidase__InfluenzaA__ADD14120

SEQ ID NO: 82087 - RNA, 1410 nt, Artificial Sequence; identical to SEQ ID NO: 80762
  derived and/or modified CDS sequence (opt1) from neuraminidase__InfluenzaA__ADD14122

SEQ ID NO: 82088 - RNA, 1410 nt, Artificial Sequence; identical to SEQ ID NO: 80762
  derived and/or modified CDS sequence (opt1) from neuraminidase__InfluenzaA__ADD14124

SEQ ID NO: 82089 - RNA, 1410 nt, Artificial Sequence; identical to SEQ ID NO: 81821
  derived and/or modified CDS sequence (opt1) from neuraminidase__InfluenzaA__ADD14126

SEQ ID NO: 82090 - RNA, 1410 nt, Artificial Sequence; identical to SEQ ID NO: 80762
  derived and/or modified CDS sequence (opt1) from neuraminidase__InfluenzaA__ADD14128

SEQ ID NO: 82091 - RNA, 1410 nt, Artificial Sequence; identical to SEQ ID NO: 80762
  derived and/or modified CDS sequence (opt1) from neuraminidase__InfluenzaA__ADD14130

SEQ ID NO: 82092 - RNA, 1410 nt, Artificial Sequence; identical to SEQ ID NO: 80762
  derived and/or modified CDS sequence (opt1) from neuraminidase__InfluenzaA__ADD14132

SEQ ID NO: 82093 - RNA, 1410 nt, Artificial Sequence; identical to SEQ ID NO: 80762
  derived and/or modified CDS sequence (opt1) from neuraminidase__InfluenzaA__ADD14134

SEQ ID NO: 82094 - RNA, 1410 nt, Artificial Sequence; identical to SEQ ID NO: 80762
  derived and/or modified CDS sequence (opt1) from neuraminidase__InfluenzaA__ADD14136

SEQ ID NO: 82095 - RNA, 1410 nt, Artificial Sequence; identical to SEQ ID NO: 80762
  derived and/or modified CDS sequence (opt1) from neuraminidase__InfluenzaA__ADD14138

SEQ ID NO: 82096 - RNA, 1410 nt, Artificial Sequence; identical to SEQ ID NO: 80762
  derived and/or modified CDS sequence (opt1) from neuraminidase__InfluenzaA__ADD14142

SEQ ID NO: 82097 - RNA, 1410 nt, Artificial Sequence; identical to SEQ ID NO: 80762
  derived and/or modified CDS sequence (opt1) from neuraminidase__InfluenzaA__ADD14144

SEQ ID NO: 82098 - RNA, 1410 nt, Artificial Sequence; identical to SEQ ID NO: 80762
  derived and/or modified CDS sequence (opt1) from neuraminidase__InfluenzaA__ADD14146

SEQ ID NO: 82099 - RNA, 1410 nt, Artificial Sequence; identical to SEQ ID NO: 80762
  derived and/or modified CDS sequence (opt1) from neuraminidase__InfluenzaA__ADD14148

SEQ ID NO: 82100 - RNA, 1410 nt, Artificial Sequence
  derived and/or modified CDS sequence (opt1) from neuraminidase__InfluenzaA__ADD14150
augaaccccaaccagaagaucaucaccaucggcagcgugugcaugaccaucgggauggccaaccugauccuccagaucggcaacaucaucuccaucuggaucagccacuccauccagcuggggaaccagaaccagaucgagacgugcaaccagagcgucaucaccuacgagaacaacaccugggugaaccagaccuacgugaacaucuccaacacgaacuucgccgcgggccagagcgucguguccgugaagcuggccgggaacagcucccucugcccggucagcggcugggccaucuacuccaaggacaacagcauccgcaucggcuccaagggggacguguucgugauccgggagcccuucaucagcugcagcccccuggagugccgcaccuucuuccugacccagggcgcccuccugaacgacaagcacuccaacgggaccaucaaggaccggucccccuaccgcacgcugaugagcugcccgaucggcgagguccccucccccuacaacagccgguucgagagcguggccugguccgcgagcgccugccacgacgggaucaacuggcucaccaucggcaucuccggccccgacaacggggccguggccguccugaaguacaacggcaucaucaccgacaccaucaagagcuggcgcaacaacauccugcggacgcaggaguccgagugcgcgugcgugaacgggagcugcuucaccgugaugaccgacggcccguccgacggccaggccagcuacaagaucuuccgcaucgagaaggggaagaucgucaaguccguggagaugaacgcccccaacuaccacuacgaggagugcagcugcuaccccgacuccagcgagaucacgugcgugugccgggacaacuggcacggcuccaaccgccccugggucagcuucaaccagaaccucgaguaccagaucggguacaucugcuccggcaucuucggggacaacccgcggcccaacgacaagaccggcagcugcggccccguguccagcaacggggccaacggcgugaagggguucuccuucaaguacggcaacggggucuggaucggccgcaccaagagcaucagcucccggaacggcuucgagaugaucugggaccccaacggguggaccggcaccgacgacaacuucagcaucaagcaggacaucguggggaucaacgagugguccggcuacagcggguccuucgugcagcacccggagcugacgggccuggacugcauccgccccugcuucugggucgagcucauccggggccgccccaaggagaacaccaucuggaccagcggguccagcaucuccuucugcggcgugaacagcgacaccgucgggugguccuggcccgacggcgccgagcugccguucacgaucgacaaguga

SEQ ID NO: 82101 - RNA, 1410 nt, Artificial Sequence; identical to SEQ ID NO: 80762
  derived and/or modified CDS sequence (opt1) from neuraminidase__InfluenzaA__ADD14152

SEQ ID NO: 82102 - RNA, 1410 nt, Artificial Sequence
  derived and/or modified CDS sequence (opt1) from neuraminidase__InfluenzaA__ADD14154
augaaccccaaccagaagaucaucaccaucggcagcgugugcaugaccaucgggauggccaaccugauccuccagaucggcaacaucaucuccaucuggaucagccacuccauccagcuggggaaccagaaccagaucgagacgugcaaccagagcgucaucaccuacgagaacaacaccugggugaaccagaccuacgugaacaucuccaucacgaacuucgccgcgggccagagcgucguguccgugaagcuggccgggaacagcucccucugcccggucagcggcugggccaucuacuccaaggacaacagcauccgcaucggcuccaagggggacguguucgugauccgggagcccuucaucagcugcagcccccuggagugccgcaccuucuuccugacccagggcgcccuccugaacgacaagcacuccaacgggaccaucaaggaccggucccccuaccgcacgcugaugagcugcccgaucggcgagguccccucccccuacaacagccgguucgagagcguggccugguccgcgagcgccugccacgacgggaucaacuggcucaccaucggcaucuccggccccgacaacggggccguggccguccugaaguacaacggcaucaucaccgacaccaucaagagcuggcgcaacaacauccugcggacgcaggaguccgagugcgcgugcgugaacgggagcugcuucaccgugaugaccgacggcccguccgacggccaggccagcuacaagaucuuccgcaucgagaaggggaagaucgucaaguccguggagaugaacgcccccaacuaccacuacgaggagugcagcugcuaccccgacuccagcgagaucacgugcgugugccgggacaacuggcacggcuccaaccgccccugggucagcuucaaccagaaccucgaguaccagaucggguacaucugcuccggcaucuucggggacaacccgcggcccaacgacaagaccggcagcugcggccccguguccagcaacggggccaacggcgugaagggguucuccuucaaguacggcaacggggucuggaucggccgcaccaagagcaucagcucccggaacggcuucgagaugaucugggaccccaacggguggaccggcaccgacaacaacuucagcaucaagcaggacaucguggggaucaacgagugguccggcuacagcggguccuucgugcagcacccggagcugacgggccuggacugcauccgccccugcuucugggucgagcucauccggggccgccccaaggagaacaccaucuggaccagcggguccagcaucuccuucugcggcgugaacagcgacaccgucgggugguccuggcccgacggcgccgagcugccguucacgaucgacaaguga

SEQ ID NO: 82103 - RNA, 1410 nt, Artificial Sequence; identical to SEQ ID NO: 80762
  derived and/or modified CDS sequence (opt1) from neuraminidase__InfluenzaA__ADD14156

SEQ ID NO: 82104 - RNA, 1410 nt, Artificial Sequence; identical to SEQ ID NO: 80762
  derived and/or modified CDS sequence (opt1) from neuraminidase__InfluenzaA__ADD14158

SEQ ID NO: 82105 - RNA, 1410 nt, Artificial Sequence; identical to SEQ ID NO: 80762
  derived and/or modified CDS sequence (opt1) from neuraminidase__InfluenzaA__ADD14164

SEQ ID NO: 82106 - RNA, 1410 nt, Artificial Sequence; identical to SEQ ID NO: 80762
  derived and/or modified CDS sequence (opt1) from neuraminidase__InfluenzaA__ADD14174

SEQ ID NO: 82107 - RNA, 1410 nt, Artificial Sequence; identical to SEQ ID NO: 80762
  derived and/or modified CDS sequence (opt1) from neuraminidase__InfluenzaA__ADD14184

SEQ ID NO: 82108 - RNA, 1410 nt, Artificial Sequence; identical to SEQ ID NO: 80762
  derived and/or modified CDS sequence (opt1) from neuraminidase__InfluenzaA__ADD14194

SEQ ID NO: 82109 - RNA, 1410 nt, Artificial Sequence; identical to SEQ ID NO: 81116
  derived and/or modified CDS sequence (opt1) from neuraminidase__InfluenzaA__ADD14204

SEQ ID NO: 82110 - RNA, 1410 nt, Artificial Sequence
  derived and/or modified CDS sequence (opt1) from neuraminidase__InfluenzaA__ADD21449
augaaccccaaccagcgcaucaucaccaucggcaccgccugccugaucaucgggaucgugagccuccugcugcagaucggcaacaucgucucccucuggaucagccacuccauccagacgggggagaagaaccacagcgagaccugcaaccggaacaccaucaccuacgagaacuccacgugggugaaccagaccuacgugaacaucagcaacaucaacaucgccggcgggcagggcgucgcguccaucauccuggccggcaacagcucccugugcccggugaacgggugggccaucuacagcaaggacaacuccauccgcaucggcagcaagggggacaucuucgugauccgggagcccuucaucuccugcagccaccucgagugccgcaccuucuuccugacccagggcgcccugcucaacgaccggcacuccaacgggacggucaaggaccgcagccccuaccggacccugauguccugccccaucggcgaggccccgagccccuacaacuccaaguucgagagcguggcguggagcgccuccgccugccacgacggcaugggguggcugaccaucggcaucagcgggcccgacaacggcgccguggcgguccucaaguacaacggcaucaucaccgacacgaucaaguccuggcgcaaccggauccugcgcacccaggagagcgagugcgugugcaucaacggguccugcuucaccaucaugaccgacggccccagcaacgggcaggccuccuacaagaucuucaagauggagcggggcaagaucaucaagagcguggagcuggacgccccgaacuaccacuacgaggagugcuccugcuaccccgacacggggaaggucgugugcgugugccgcgacaacuggcacgccagcaaccggcccugggucuccuucgaccagaaccucgacuaccagaucggcuacaucagcuccggcguguucggggacaacccccgcagcaacgacggcaaggggaacugcggcccggugcuguccaacggggccaacggcgucaagggccugagcuuccgguacgggaacggcguguggaucgggcgcaccaaguccaccaacagccgguccggcuucgagaugaucugggaccccaacggguggaccgagacggacagcaacuucagcaugaagcaggacaucaucgcgcucaccgacugguccggcuacagcggcuccuucgugcagcaccccgagcugaccgggaugaacugcauccgccccugcuucugggucgagcugauccggggccagccgaagcagagcaccaucuggacguccgggagcuccaucagcuucugcggcguggacuccgagaccgccagcugguccuggcccgacggcgccgaccuccccuucaccaucgacaaguga

SEQ ID NO: 82111 - RNA, 1413 nt, Artificial Sequence
  derived and/or modified CDS sequence (opt1) from neuraminidase__InfluenzaA__ADD21469
augaaccccaaccagaagaucaucaccaucggcagcaucuccaucgccaucgggaucaucagccugaugcuccagaucggcaacaucaucuccgugugggccagccacuccauccagaccgggagccagaaccacacgggcaucugcaaccagcgcaucaucaccuacgagaacuccaccugggucaaccacaccuacgugaacaucaacaacacgaacguggucgcggggaaggacaagaccagcgugacccuggccggcaacuccagccugugcuccaucagcggcugggccaucuacaccaaggacaacuccauccggaucgggagcaagggcgacguguucgucauccgcgagccguucaucuccugcagccaccucgagugccggacguucuuccugacccagggggcccugcucaacgacaagcacuccaacggcaccgugaaggaccgcagccccuaccgggcccugauguccugcccccugggggaggcgcccagcccguacaacagcaaguucgaguccguggccuggagcgccuccgccugccacgacggcaugggcuggcucaccaucgggaucagcggccccgacaacggggcggucgccgugcugaaguacaacggcaucaucacggagaccaucaaguccuggaagaagcgcaugcugcggacccaggagagcgagugcaucugcgugaacggcuccugcuucaccaucaugacggacgggcccagcaacggcgccgccuccuacaagaucuucaagaucgagaaggggaaggucaccaagagcaucgagcucaacgcccccaacuuccacuacgaggagugcuccugcuacccggacaccggcaccgugaugugcgugugccgcgacaacuggcacgggagcaaccggcccugggucuccuucaaccagaaccuggacuaccagaucggcuacaucugcagcggcguguucggggacaacccccgccccaaggacggcgagggguccugcaacccggugacggucgacggcgcggacggggugaagggcuucagcuacaaguacggcaacgggguguggaucggccggaccaaguccaaccgccugcggaagggguucgagaugaucugggaccccaacggcuggaccgacaccgacagcaacuucuccgucaagcaggacgugguggccaucacggacuggagcggguacagcggcuccuucguccagcaccccgagcucaccggccuggacugcauccgccccugcuucuggguggagcugguccgggggcucccgcgcgagaacaccaccaucuggacgagcggcuccagcaucuccuucugcggggugaacagcgacaccgccaacugguccuggcccgacggcgccgagcugcccuucaccaucgacaaguga

SEQ ID NO: 82112 - RNA, 1410 nt, Artificial Sequence; identical to SEQ ID NO: 80762
  derived and/or modified CDS sequence (opt1) from neuraminidase__InfluenzaA__ADD21747

SEQ ID NO: 82113 - RNA, 1410 nt, Artificial Sequence
  derived and/or modified CDS sequence (opt1) from neuraminidase__InfluenzaA__ADD21767
augaaccccaaccagaagaucaucaucaucggcagcgugugcaugaccaucgggauggccaaccugauccuccagaucggcaacaucaucuccaucuggaucagccacuccauccagcuggggaaccagaaccagaucgagaccugcaaccagagcgucaucacguacgagaacaacaccugggugaaccagaccuacgugaacaucuccaacaccaacuucgccgcgggccagagcgucguguccgugaagcuggccgggaacagcucccucugcccggucagcggcugggccaucuacuccaaggacaacagcauccgcaucggcuccaagggggacguguucgugauccgggagcccuucaucagcugcagcccccuggagugccgcacguucuuccugacccagggcgcccuccugaacgacaagcacuccaacgggaccaucaaggaccggucccccuaccgcacccugaugagcugcccgaucggcgagguccccucccccuacaacagccgguucgagagcguggccugguccgcgagcgccugccacgacgggaucaacuggcucacgaucggcaucuccggccccgacaacggggccguggccguccugaaguacaacggcaucaucaccgacaccaucaagagcuggcgcaacaacauccugcggacccaggaguccgagugcgcgugcgugaacgggagcugcuucacggugaugaccgacggcccguccgacggccaggccagcuacaagaucuuccgcaucgagaaggggaagaucgucaaguccguggagaugaacgcccccaacuaccacuacgaggagugcagcugcuaccccgacuccagcgagaucacgugcgugugccgggacaacuggcacggcuccaaccgccccugggucagcuucaaccagaaccucgaguaccagaucggguacaucugcuccggcaucuucggggacaacccgcggcccaacgacaagaccggcagcugcggccccguguccagcaacggggccaacggcgugaagggguucuccuucaaguacggcaacggggucuggaucggccgcaccaagagcaucagcucccggaacggcuucgagaugaucugggaccccaacggguggaccggcaccgacaacaacuucagcaucaagcaggacaucguggggaucaacgagugguccggcuacagcggguccuucgugcagcacccggagcugaccggccuggacugcauccgccccugcuucugggucgagcucauccggggccgccccaaggagaacacgaucuggaccagcggguccagcaucuccuucugcggcgugaacagcgacaccgucgggugguccuggcccgacggcgccgagcugccguucaccaucgacaaguga

SEQ ID NO: 82114 - RNA, 1410 nt, Artificial Sequence
  derived and/or modified CDS sequence (opt1) from neuraminidase__InfluenzaA__ADD21777
augaaccccaaccagaagaucaucaccaucggcagcgugugcaugaccaucgggauggccaaccugauccuccagaucggcaacaucaucuccaucuggaucagccacuccauccagcuggggaaccagaaccagaucgagacgugcaaccagagcgucaucaccuacgagaacaacaccugggugaaccagaccuacgugaacaucuccaacacgaacuucgccgcgggccagagcgucguguccgugaagcuggccgggaacagcucccucugcccggucagcggcugggccaucuacuccaaggacaacagcauccgcaucggcuccaagggggacguguucgugauccgggagcccuucaucagcugcagcccccuggagugccgcaccuucuuccugacccagggcgcccuccugaacgacaagcacuccaacgggaccaucaaggaccggucccccuaccgcacgcugaugagcugcccgaucggcgagguccccucccccuacaacagccgguucgagagcguggccugguccgcgagcgccugccacgacgggaucaacuggcucaccaucggcaucuccggccccgacaacggggccguggccgucaucaaguacaacggcaucaucaccgacaccaucaagagcuggcgcaacaacauccugcggacgcaggaguccgagugcgcgugcgugaacgggagcugcuucaccgugaugaccgacggcccguccgacggccaggccagcuacaagaucuuccgcaucgagaaggggaagaucgucaaguccguggagaugaacgcccccaacuaccacuacgaggagugcagcugcuaccccgacuccagcgagaucacgugcgugugccgggacaacuggcacggcuccaaccgccccugggucagcuucaaccagaaccuggaguaccagaucggguacaucugcuccggcaucuucggggacaacccgcggcccaacgacaagaccggcagcugcggccccguguccagcaacggggccaacggcgugaagggguucuccuucaaguacggcaacggggucuggaucggccgcaccaagagcaucagcucccggaacggcuucgagaugaucugggaccccaacggguggaccggcaccgacaacaacuucagcaucaagcaggacaucguggggaucaacgagugguccggcuacagcggguccuucgugcagcacccggagcucacgggccuggacugcauccgccccugcuucugggucgagcugauccggggccgccccaaggagaacaccaucuggaccagcggguccagcaucuccuucugcggcgugaacagcgacaccgucgggugguccuggcccgacggcgccgagcucccguucacgaucgacaaguga

SEQ ID NO: 82115 - RNA, 1410 nt, Artificial Sequence; identical to SEQ ID NO: 80762
  derived and/or modified CDS sequence (opt1) from neuraminidase__InfluenzaA__ADD21787

SEQ ID NO: 82116 - RNA, 1410 nt, Artificial Sequence; identical to SEQ ID NO: 80762
  derived and/or modified CDS sequence (opt1) from neuraminidase__InfluenzaA__ADD21797

SEQ ID NO: 82117 - RNA, 1410 nt, Artificial Sequence; identical to SEQ ID NO: 80762
  derived and/or modified CDS sequence (opt1) from neuraminidase__InfluenzaA__ADD21817

SEQ ID NO: 82118 - RNA, 1410 nt, Artificial Sequence; identical to SEQ ID NO: 80762
  derived and/or modified CDS sequence (opt1) from neuraminidase__InfluenzaA__ADD21827

SEQ ID NO: 82119 - RNA, 1410 nt, Artificial Sequence; identical to SEQ ID NO: 80762
  derived and/or modified CDS sequence (opt1) from neuraminidase__InfluenzaA__ADD21837

SEQ ID NO: 82120 - RNA, 1410 nt, Artificial Sequence; identical to SEQ ID NO: 80762
  derived and/or modified CDS sequence (opt1) from neuraminidase__InfluenzaA__ADD21847

SEQ ID NO: 82121 - RNA, 1410 nt, Artificial Sequence; identical to SEQ ID NO: 80762
  derived and/or modified CDS sequence (opt1) from neuraminidase__InfluenzaA__ADD21857

SEQ ID NO: 82122 - RNA, 1410 nt, Artificial Sequence; identical to SEQ ID NO: 80762
  derived and/or modified CDS sequence (opt1) from neuraminidase__InfluenzaA__ADD21867

SEQ ID NO: 82123 - RNA, 1410 nt, Artificial Sequence; identical to SEQ ID NO: 80762
  derived and/or modified CDS sequence (opt1) from neuraminidase__InfluenzaA__ADD21877

SEQ ID NO: 82124 - RNA, 1410 nt, Artificial Sequence; identical to SEQ ID NO: 80762
  derived and/or modified CDS sequence (opt1) from neuraminidase__InfluenzaA__ADD21897

SEQ ID NO: 82125 - RNA, 1410 nt, Artificial Sequence; identical to SEQ ID NO: 80762
  derived and/or modified CDS sequence (opt1) from neuraminidase__InfluenzaA__ADD22494

SEQ ID NO: 82126 - RNA, 1410 nt, Artificial Sequence; identical to SEQ ID NO: 80762
  derived and/or modified CDS sequence (opt1) from neuraminidase__InfluenzaA__ADD22504

SEQ ID NO: 82127 - RNA, 1410 nt, Artificial Sequence; identical to SEQ ID NO: 80762
  derived and/or modified CDS sequence (opt1) from neuraminidase__InfluenzaA__ADD22514

SEQ ID NO: 82128 - RNA, 1410 nt, Artificial Sequence; identical to SEQ ID NO: 80762
  derived and/or modified CDS sequence (opt1) from neuraminidase__InfluenzaA__ADD22524

SEQ ID NO: 82129 - RNA, 1410 nt, Artificial Sequence
  derived and/or modified CDS sequence (opt1) from neuraminidase__InfluenzaA__ADD22534
augaaccccaaccagaagaucaucaccaucggcagcgugugcaugaccaucgggauggccaaccugauccuccagaucggcaacaucaucuccaucuggaucagccacuccauccagcuggggaaccagaaccagaucgagacgugcaaccagagcgucaucaccuacgagaacaacaccugggugaaccagaccuacgugaacaucuccaacacgaacuucgccgcgggccagagcgucguguccgugaagcuggccgggaacagcucccucugcccggucagcggcugggccaucuacuccaaggacaacagcauccgcaucggcuccaagggggacguguucgugauccgggagcccuucaucagcugcagcccccuggagugccgcaccuucuuccugacccagggcgcccuccugaacgacaagcacuccaacgggaccaucaaggaccggucccccuaccgcacgcugaugagcugcccgaucggcgagguccccucccccuacaacagccgguucgagagcguggccugguccgcgagcgccugccacgacgggaucaacuggcucaccaucggcaucuccggccccgacaacggggccguggccguccugaaguacaacggcaucaucaccgacaccaucaagagcuggcgcaacaacauccugcggacgcaggaguccgagugcgcgugcgugaacgggagcugcuucaccgugaugaccgacggcccguccgacggccaggccagcuacaagaucuuccgcaucgagaaggggaagaucgucaaguccguggagaugaacgcccccaacuaccacuacgaggagugcagcugcuaccccgacuccagcgagaucacgugcgugugccgggacaacuggcacggcuccaaccgccccugggucagcuucaaccagaaccucgaguaccagaucggguacaucugcuccggcaucuucggggacagcccgcggcccaacgacaagaccggcuccugcggccccgugagcuccaacggggccaacggcgugaagggguucagcuucaaguacggcaacggggucuggaucggccgcaccaagagcaucuccagccggaacggcuucgagaugaucugggaccccaacggguggaccggcaccgacaacaacuucuccaucaagcaggacaucguggggaucaacgaguggagcggcuacuccgggagcuucgugcagcacccggagcugacgggccuggacugcauccgccccugcuucugggucgagcucauccggggccgccccaaggagaacaccaucuggaccuccgggagcuccaucagcuucugcggcgugaacuccgacaccgucggguggagcuggcccgacggcgccgagcugccguucacgaucgacaaguga

SEQ ID NO: 82130 - RNA, 1410 nt, Artificial Sequence; identical to SEQ ID NO: 80762
  derived and/or modified CDS sequence (opt1) from neuraminidase__InfluenzaA__ADD22544

SEQ ID NO: 82131 - RNA, 1410 nt, Artificial Sequence; identical to SEQ ID NO: 80762
  derived and/or modified CDS sequence (opt1) from neuraminidase__InfluenzaA__ADD22557

SEQ ID NO: 82132 - RNA, 1410 nt, Artificial Sequence; identical to SEQ ID NO: 80762
  derived and/or modified CDS sequence (opt1) from neuraminidase__InfluenzaA__ADD22567

SEQ ID NO: 82133 - RNA, 1410 nt, Artificial Sequence; identical to SEQ ID NO: 80762
  derived and/or modified CDS sequence (opt1) from neuraminidase__InfluenzaA__ADD22577

SEQ ID NO: 82134 - RNA, 1410 nt, Artificial Sequence; identical to SEQ ID NO: 80762
  derived and/or modified CDS sequence (opt1) from neuraminidase__InfluenzaA__ADD22587

SEQ ID NO: 82135 - RNA, 1410 nt, Artificial Sequence; identical to SEQ ID NO: 80762
  derived and/or modified CDS sequence (opt1) from neuraminidase__InfluenzaA__ADD22597

SEQ ID NO: 82136 - RNA, 1410 nt, Artificial Sequence; identical to SEQ ID NO: 80762
  derived and/or modified CDS sequence (opt1) from neuraminidase__InfluenzaA__ADD22617

SEQ ID NO: 82137 - RNA, 1410 nt, Artificial Sequence; identical to SEQ ID NO: 80762
  derived and/or modified CDS sequence (opt1) from neuraminidase__InfluenzaA__ADD22627

SEQ ID NO: 82138 - RNA, 1410 nt, Artificial Sequence; identical to SEQ ID NO: 80762
  derived and/or modified CDS sequence (opt1) from neuraminidase__InfluenzaA__ADD22637

SEQ ID NO: 82139 - RNA, 1410 nt, Artificial Sequence; identical to SEQ ID NO: 80762
  derived and/or modified CDS sequence (opt1) from neuraminidase__InfluenzaA__ADD22648

SEQ ID NO: 82140 - RNA, 1410 nt, Artificial Sequence; identical to SEQ ID NO: 80762
  derived and/or modified CDS sequence (opt1) from neuraminidase__InfluenzaA__ADD22658

SEQ ID NO: 82141 - RNA, 1410 nt, Artificial Sequence; identical to SEQ ID NO: 80762
  derived and/or modified CDS sequence (opt1) from neuraminidase__InfluenzaA__ADD22668

SEQ ID NO: 82142 - RNA, 1410 nt, Artificial Sequence
  derived and/or modified CDS sequence (opt1) from neuraminidase__InfluenzaA__ADD22688
augaaccccaaccagaagaucaucaccaucggcagcgugugcaugaccaucgggauggccaaccugauccuccagaucggcaacaucaucuccaucuggaucagccacuccauccagcuggggaaccagaaccagaucgagacgugcaaccagagcgucaucaccuacgagaacaacaccugggugaaccagaccuacgugaacaucuccaacacgaacuucgccgcgggccagagcgucguguccgugaagcuggccgggaacagcucccucugcccggucagcggcugggccaucuacuccaaggacaacagcauccgcaucggcuccaagggggacguguucgugauccgggagcccuucaucagcugcagcccccuggagugccgcaccuucuuccugacccagggcgcccuccugaacgacaagcacuccaacgggaccaucaaggaccggucccccuaccgcacgcugaugagcugcccgaucggcgagguccccucccccuacaacagccgguucgagagcguggccugguccgcgagcgccugccacgacgggaucaacuggcucaccaucggcaucuccggccccgacaacggggccguggccguccugaaguacaacggcaucaucaccgacaccaucaagagcuggcgcaacaacauccugcggacgcaggaguccgagugcgcgugcgugaacgggagcugcuucaccgugaugaccgacggcccguccgacggccaggccagcuacaagaucuuccgcaucgagaaggggaagaucgucaaguccguggagaugaacgcccccaacuaccacuacgaggagugcagcugcuaccccgacuccagcgagaucacgugcgugugccgggacaacuggcacggcuccaaccgccccugggucagcuucaaccagaaccucgaguaccagaucggguacaucugcuccggcaucuucggggacaacccgcggcccaacgacaagaccggcagcugcggccccguguccagcaacggggccaacggcgugaagggguucuccuucaaguacggcaacggggucuggaucggccgcaccaagagcaucagcucccggaacggcuucgagaugaucugggaccccaacggguggaccggcaccgacaacaacuucagcaucaagcaggacaucguggggaucaacgagugguccggcuacagcggguccuucgugcagcacccggagcugacgggccuggacugcauccgccccugcuucuggaucgagcucauccggggccgccccaaggagaacaccaucuggaccagcggguccagcaucuccuucugcggcgucaacagcgacaccguggggugguccuggcccgacggcgccgagcugccguucacgaucgacaaguga

SEQ ID NO: 82143 - RNA, 1410 nt, Artificial Sequence; identical to SEQ ID NO: 80762
  derived and/or modified CDS sequence (opt1) from neuraminidase__InfluenzaA__ADD22698

SEQ ID NO: 82144 - RNA, 1410 nt, Artificial Sequence; identical to SEQ ID NO: 80762
  derived and/or modified CDS sequence (opt1) from neuraminidase__InfluenzaA__ADD22725

SEQ ID NO: 82145 - RNA, 1410 nt, Artificial Sequence; identical to SEQ ID NO: 80762
  derived and/or modified CDS sequence (opt1) from neuraminidase__InfluenzaA__ADD22735

SEQ ID NO: 82146 - RNA, 1410 nt, Artificial Sequence; identical to SEQ ID NO: 80762
  derived and/or modified CDS sequence (opt1) from neuraminidase__InfluenzaA__ADD22745

SEQ ID NO: 82147 - RNA, 1410 nt, Artificial Sequence
  derived and/or modified CDS sequence (opt1) from neuraminidase__InfluenzaA__ADD22755
augaaccccaaccagaagaucaucaccaucggcagcgugugcaugaccaucgggauggccaaccugauccuccagaucggcaacaucaucuccaucuggaucagccacuccauccagcuggggaaccagaaccagaucgagacgugcaaccagagcgucaucaccuacgagaacaacaccugggugaaccagaccuacgugaacaucuccaacacgaacuucgccgcgggccagagcgucguguccgugaagcuggccgggaacagcucccucugcaccgucagcggcugggccaucuacuccaaggacaacagcauccgcaucggcuccaagggggacguguucgugauccgggagccguucaucagcugcagcccccuggagugccgcaccuucuuccugacccagggcgcccuccugaacgacaagcacuccaacgggacgaucaaggaccggucccccuaccgcacccugaugagcugccccaucggcgaggucccgucccccuacaacagccgguucgagagcguggccugguccgcgagcgccugccacgacgggaucaacuggcucaccaucggcaucuccggccccgacaacggggccguggccguccugaaguacaacggcaucaucaccgacacgaucaagagcuggcgcaacaacauccugcggacccaggaguccgagugcgcgugcgugaacgggagcugcuucaccgugaugaccgacggccccuccgacggccaggccagcuacaagaucuuccgcaucgagaaggggaagaucgucaaguccguggagaugaacgccccgaacuaccacuacgaggagugcagcugcuaccccgacuccagcgagaucacgugcgugugccgggacaacuggcacggcuccaaccgccccugggucagcuucaaccagaaccucgaguaccagaucggguacaucugcuccggcaucuucggggacagcccccggccgaacgacaagaccggcuccugcggccccgugagcuccaacggggccaacggcgugaagggguucagcuucaaguacggcaacggggucuggaucggccgcaccaagagcaucuccagccggaacggcuucgagaugaucugggaccccaacggguggaccggcacggacaacaacuucuccaucaagcaggacaucguggggaucaacgaguggagcggcuacuccgggagcuucgugcagcaccccgagcugaccggccuggacugcauccgcccgugcuucugggucgagcucauccggggccgccccaaggagaacaccaucuggaccuccgggagcuccaucagcuucugcggcgugaacuccgacacggucggguggagcuggcccgacggcgccgagcugcccuucaccaucgacaaguga

SEQ ID NO: 82148 - RNA, 1410 nt, Artificial Sequence
  derived and/or modified CDS sequence (opt1) from neuraminidase__InfluenzaA__ADD22765
augaaccccaaccagaagaucaucaccaucggcagcgugugcaugaccaucgggauggccaaccugauccuccagaucggcaacaucaucuccaucuggaucagccacuccauccagcuggggaaccagaaccagaucgagacgugcaaccagagcgucaucaccuacgagaacaacaccugggugaaccagaccuacgugaacaucuccaacacgaacuucgccgcgggccagagcgucguguccgugaagcuggccgggaacagcucccucugcccggucagcggcugggccaucuacuccaaggacaacagcauccgcaucggcuccaagggggacguguucgugauccgggagcccuucaucagcugcagcccccuggagugccgcaccuucuuccugacccagggcgcccuccugaacgacaagcacuccaacgggaccaucaaggaccggucccccuaccgcacgcugaugagcugcccgaucggcgagguccccucccccuacaacagccgguucgagagcguggccugguccgcgagcgccugccacgacgggaucaacuggcucaccaucggcaucuccggccccgacaacggggccguggccguccugaaguacaacggcaucaucaccgacaccaucaagagcuggcgcaacaacauccugcggacgcaggaguccgagugcgcgugcgugaacgggagcugcuucaccgugaugaccgacggcccguccgacggccaggccagcuacaagaucuuccgcaucgagaaggggaagaucgucaaguccguggagaugaacgcccccaacuaccacuacgaggagugcagcugcuaccccgacuccagcgagaucacgugcgugugccgggacaacuggcacggcuccaaccgccccugggucagcuucaaccagaaccucgaguaccagaucggguacaucugcuccggcaucuucggggacaacccgcggcccaacgacaagaccggcagcugcggccccguguccagcaacggggccaacggcgugaagggguucuccuucaaguacggcaacggggucuggaucggccgcaccaagagcaucagcucccggaacggcuucgagaugaucugggaccccaacggguggaccggcaccgacaacaacuucagcaucaagcaggacaucguggggaucaacgacugguccggcuacagcggguccuucgugcagcacccggagcugacgggccuggacugcauccgccccugcuucugggucgagcucauccggggccgccccaaggagaacaccaucuggaccagcggguccagcaucuccuucugcggcgugaacagcgacaccgucgggugguccuggcccgacggcgccgagcugccguucacgaucgacaaguga

SEQ ID NO: 82149 - RNA, 1410 nt, Artificial Sequence; identical to SEQ ID NO: 80762
  derived and/or modified CDS sequence (opt1) from neuraminidase__InfluenzaA__ADD22775

SEQ ID NO: 82150 - RNA, 1410 nt, Artificial Sequence; identical to SEQ ID NO: 80762
  derived and/or modified CDS sequence (opt1) from neuraminidase__InfluenzaA__ADD22785

SEQ ID NO: 82151 - RNA, 1410 nt, Artificial Sequence; identical to SEQ ID NO: 80762
  derived and/or modified CDS sequence (opt1) from neuraminidase__InfluenzaA__ADD22795

SEQ ID NO: 82152 - RNA, 1410 nt, Artificial Sequence; identical to SEQ ID NO: 80762
  derived and/or modified CDS sequence (opt1) from neuraminidase__InfluenzaA__ADD22805

SEQ ID NO: 82153 - RNA, 1410 nt, Artificial Sequence; identical to SEQ ID NO: 80762
  derived and/or modified CDS sequence (opt1) from neuraminidase__InfluenzaA__ADD22815

SEQ ID NO: 82154 - RNA, 1410 nt, Artificial Sequence; identical to SEQ ID NO: 80762
  derived and/or modified CDS sequence (opt1) from neuraminidase__InfluenzaA__ADD22825

SEQ ID NO: 82155 - RNA, 1410 nt, Artificial Sequence; identical to SEQ ID NO: 80762
  derived and/or modified CDS sequence (opt1) from neuraminidase__InfluenzaA__ADD22835

SEQ ID NO: 82156 - RNA, 1410 nt, Artificial Sequence; identical to SEQ ID NO: 80762
  derived and/or modified CDS sequence (opt1) from neuraminidase__InfluenzaA__ADD22845

SEQ ID NO: 82157 - RNA, 1410 nt, Artificial Sequence; identical to SEQ ID NO: 80762
  derived and/or modified CDS sequence (opt1) from neuraminidase__InfluenzaA__ADD22855

SEQ ID NO: 82158 - RNA, 1410 nt, Artificial Sequence; identical to SEQ ID NO: 80762
  derived and/or modified CDS sequence (opt1) from neuraminidase__InfluenzaA__ADD22924

SEQ ID NO: 82159 - RNA, 1410 nt, Artificial Sequence; identical to SEQ ID NO: 80762
  derived and/or modified CDS sequence (opt1) from neuraminidase__InfluenzaA__ADD22934

SEQ ID NO: 82160 - RNA, 1410 nt, Artificial Sequence; identical to SEQ ID NO: 80762
  derived and/or modified CDS sequence (opt1) from neuraminidase__InfluenzaA__ADD22944

SEQ ID NO: 82161 - RNA, 1410 nt, Artificial Sequence; identical to SEQ ID NO: 80762
  derived and/or modified CDS sequence (opt1) from neuraminidase__InfluenzaA__ADD22954

SEQ ID NO: 82162 - RNA, 1410 nt, Artificial Sequence; identical to SEQ ID NO: 80762
  derived and/or modified CDS sequence (opt1) from neuraminidase__InfluenzaA__ADD22974

SEQ ID NO: 82163 - RNA, 1410 nt, Artificial Sequence; identical to SEQ ID NO: 80762
  derived and/or modified CDS sequence (opt1) from neuraminidase__InfluenzaA__ADD23075

SEQ ID NO: 82164 - RNA, 1410 nt, Artificial Sequence
  derived and/or modified CDS sequence (opt1) from neuraminidase__InfluenzaA__ADD23085
augaaccccaaccagaagaucaucaccaucggcagcgugugcaugaccaucgggauggccaaccugauccuccagaucggcaacaucaucuccaucuggaucagccacuccauccagcuggggaaccagaaccagaucgagacgugcaaccagagcgucaucaccuacgagaacaacaccugggugaaccagaccuacgugaacaucuccaacacgaacuucgccgcgggccagagcgucguguccgugaagcuggccgggaacagcucccucugcccggucagcggcugggccaucuacuccaaggacaacagcauccgcaucggcuccaagggggacguguucgugauccgggagcuguucaucagcugcagcccccuggagugccgcaccuucuuccucacccagggcgcccugcugaacgacaagcacuccaacgggaccaucaaggaccggucccccuaccgcacgcucaugagcugccccaucggcgaggucccgucccccuacaacagccgguucgagagcguggccugguccgcgagcgccugccacgacgggaucaacuggcugaccaucggcaucuccggccccgacaacggggccguggccguccugaaguacaacggcaucaucaccgacaccaucaagagcuggcgcaacaacauccuccggacgcaggaguccgagugcgcgugcgugaacgggagcugcuucaccgugaugaccgacggccccuccgacggccaggccagcuacaagaucuuccgcaucgagaaggggaagaucgucaaguccguggagaugaacgccccgaacuaccacuacgaggagugcagcugcuaccccgacuccagcgagaucacgugcgugugccgggacaacuggcacggcuccaaccgccccugggucagcuucaaccagaaccuggaguaccagaucggguacaucugcuccggcaucuucggggacaacccccggccgaacgacaagaccggcagcugcggccccguguccagcaacggggccaacggcgugaagggguucuccuucaaguacggcaacggggucuggaucggccgcaccaagagcaucagcucccggaacggcuucgagaugaucugggaccccaacggguggaccggcaccgacaacaacuucagcaucaagcaggacaucguggggaucaacgagugguccggcuacagcggguccuucgugcagcaccccgagcugacgggccucgacugcauccgcccgugcuucugggucgagcugauccggggccgccccaaggagaacaccaucuggaccagcggguccagcaucuccuucugcggcgugaacagcgacaccgucgggugguccuggcccgacggcgccgagcugcccuucacgaucgacaaguga

SEQ ID NO: 82165 - RNA, 1410 nt, Artificial Sequence; identical to SEQ ID NO: 80762
  derived and/or modified CDS sequence (opt1) from neuraminidase__InfluenzaA__ADD23095

SEQ ID NO: 82166 - RNA, 1410 nt, Artificial Sequence; identical to SEQ ID NO: 80762
  derived and/or modified CDS sequence (opt1) from neuraminidase__InfluenzaA__ADD23105

SEQ ID NO: 82167 - RNA, 1410 nt, Artificial Sequence; identical to SEQ ID NO: 80762
  derived and/or modified CDS sequence (opt1) from neuraminidase__InfluenzaA__ADD23115

SEQ ID NO: 82168 - RNA, 1410 nt, Artificial Sequence; identical to SEQ ID NO: 80762
  derived and/or modified CDS sequence (opt1) from neuraminidase__InfluenzaA__ADD23125

SEQ ID NO: 82169 - RNA, 1410 nt, Artificial Sequence; identical to SEQ ID NO: 80762
  derived and/or modified CDS sequence (opt1) from neuraminidase__InfluenzaA__ADD23135

SEQ ID NO: 82170 - RNA, 1410 nt, Artificial Sequence; identical to SEQ ID NO: 80762
  derived and/or modified CDS sequence (opt1) from neuraminidase__InfluenzaA__ADD23145

SEQ ID NO: 82171 - RNA, 1410 nt, Artificial Sequence; identical to SEQ ID NO: 80762
  derived and/or modified CDS sequence (opt1) from neuraminidase__InfluenzaA__ADD23155

SEQ ID NO: 82172 - RNA, 1410 nt, Artificial Sequence; identical to SEQ ID NO: 80762
  derived and/or modified CDS sequence (opt1) from neuraminidase__InfluenzaA__ADD23165

SEQ ID NO: 82173 - RNA, 1410 nt, Artificial Sequence; identical to SEQ ID NO: 80762
  derived and/or modified CDS sequence (opt1) from neuraminidase__InfluenzaA__ADD23175

SEQ ID NO: 82174 - RNA, 1410 nt, Artificial Sequence; identical to SEQ ID NO: 80762
  derived and/or modified CDS sequence (opt1) from neuraminidase__InfluenzaA__ADD23185

SEQ ID NO: 82175 - RNA, 1410 nt, Artificial Sequence; identical to SEQ ID NO: 80762
  derived and/or modified CDS sequence (opt1) from neuraminidase__InfluenzaA__ADD23195

SEQ ID NO: 82176 - RNA, 1410 nt, Artificial Sequence; identical to SEQ ID NO: 80762
  derived and/or modified CDS sequence (opt1) from neuraminidase__InfluenzaA__ADD23223

SEQ ID NO: 82177 - RNA, 1410 nt, Artificial Sequence
  derived and/or modified CDS sequence (opt1) from neuraminidase__InfluenzaA__ADD23233
augaaccccaaccagaagaucaucaccaucggcagcgugugcaugaccaucgggauggccaaccugauccuccagaucggcaacaucaucuccaucuggaucgggcacagcauccagcugggcaaccagaaccagaucgagacgugcaaccaguccgucaucaccuacgagaacaacaccugggugaaccagaccuacgugaacaucagcaacacgaacuucgccgcggggcaguccgucgugagcgugaagcuggccggcaacuccagccucugcccggucuccggcugggccaucuacagcaaggacaacuccauccgcaucgggagcaagggcgacguguucgugauccgggagcccuucaucuccugcagcccccuggagugccgcaccuucuuccugacccagggggcccuccugaacgacaagcacuccaacggcaccaucaaggaccggagccccuaccgcacgcugauguccugcccgaucggggagguccccagccccuacaacucccgguucgagagcguggccuggagcgcguccgccugccacgacggcaucaacuggcucaccaucggcaucagcgggcccgacaacggcgccguggccguccugaaguacaacgggaucaucaccgacaccaucaaguccuggcgcaacaacauccugcggacgcaggagagcgagugcgcgugcgugaacggcuccugcuucaccgugaugaccgacggcccgagcgacgggcaggccuccuacaagaucuuccgcaucgagaagggcaagaucgucaagagcguggagaugaacgcccccaacuaccacuacgaggagugcuccugcuaccccgacagcuccgagaucacgugcgugugccgggacaacuggcacgggagcaaccgccccugggucuccuucaaccagaaccucgaguaccagaucggcuacaucugcagcgggaucuucggcgacaacccgcggcccaacgacaagaccggcuccugcgggcccgugagcuccaacggcgccaacggggugaagggcuucagcuucaaguacgggaacggcgucuggaucggccgcaccaaguccaucagcagccggaacggguucgagaugaucugggaccccaacggcuggaccgggaccgacaacaacuucuccaucaagcaggacaucgugggcaucaacgaguggagcggguacuccggcagcuucgugcagcacccggagcugacgggccuggacugcauccgccccugcuucugggucgagcucauccgggggcgccccaaggagaacaccaucuggaccuccggcagcuccaucagcuucugcggggugaacuccgacaccgucggcuggagcuggcccgacggcgccgagcugccguucacgaucgacaaguga

SEQ ID NO: 82178 - RNA, 1410 nt, Artificial Sequence; identical to SEQ ID NO: 80762
  derived and/or modified CDS sequence (opt1) from neuraminidase__InfluenzaA__ADD23243

SEQ ID NO: 82179 - RNA, 1410 nt, Artificial Sequence; identical to SEQ ID NO: 82050
  derived and/or modified CDS sequence (opt1) from neuraminidase__InfluenzaA__ADD23253

SEQ ID NO: 82180 - RNA, 1410 nt, Artificial Sequence
  derived and/or modified CDS sequence (opt1) from neuraminidase__InfluenzaA__ADD23273
augaaccccaaccagaagaucaucaccaucggcagcgugugcaugaccaucgggauggccaaccugauccuccagaucggcaacaucaucuccaucuggaucagccacuccauccagcuggggaaccagaaccagaucgagacgugcaaccagagcgucaucaccuacgagaacaacaccugggugaaccagaccuacgugaacaucuccaacacgaacuucgccgcgggccagagcgucguguccgugaagcuggccgggaacagcucccucugcccggucagcggcugggccaucuacuccaaggacaacagcauccgcaucggcuccgagggggacguguucgugauccgggagcccuucaucagcugcagcccccuggagugccgcaccuucuuccugacccagggcgcccuccugaacgacaagcacuccaacgggaccaucaaggaccggucccccuaccgcacgcugaugagcugcccgaucggcgagguccccucccccuacaacagccgguucgagagcguggccugguccgcgagcgccugccacgacgggaucaacuggcucaccaucggcaucuccggccccgacaacggggccguggccguccugaaguacaacggcaucaucaccgacaccaucaagagcuggcgcaacaacauccugcggacgcaggaguccgagugcgcgugcgugaacgggagcugcuucaccgugaugaccgacggcccguccgacggccaggccagcuacaagaucuuccgcaucgagaaggggaagaucgucaaguccguggagaugaacgcccccaacuaccacuacgaggagugcagcugcuaccccgacuccagcgagaucacgugcgugugccgggacaacuggcacggcuccaaccgccccugggucagcuucaaccagaaccucgaguaccagaucggguacaucugcuccggcaucuucggggacaacccgcggcccaacgacaagaccggcagcugcggccccguguccagcaacggggccaacggcgugaagggguucuccuucaaguacggcaacggggucuggaucggccgcaccaagagcaucagcucccggaacggcuucgagaugaucugggaccccaacggguggaccggcaccgacaacaacuucagcaucaagcaggacaucguggggaucaacgagugguccggcuacagcggguccuucgugcagcacccggagcugacgggccuggacugcauccgccccugcuucugggucgagcucauccggggccgccccaaggagaacaccaucuggaccagcggguccagcaucuccuucugcggcgugaacagcgacaccgucgggugguccuggcccgacggcgccgagcugccguucacgaucgacaaguga

SEQ ID NO: 82181 - RNA, 1410 nt, Artificial Sequence; identical to SEQ ID NO: 80762
  derived and/or modified CDS sequence (opt1) from neuraminidase__InfluenzaA__ADD23283

SEQ ID NO: 82182 - RNA, 1410 nt, Artificial Sequence; identical to SEQ ID NO: 80762
  derived and/or modified CDS sequence (opt1) from neuraminidase__InfluenzaA__ADD23293

SEQ ID NO: 82183 - RNA, 1410 nt, Artificial Sequence; identical to SEQ ID NO: 80762
  derived and/or modified CDS sequence (opt1) from neuraminidase__InfluenzaA__ADD23303

SEQ ID NO: 82184 - RNA, 1410 nt, Artificial Sequence; identical to SEQ ID NO: 80762
  derived and/or modified CDS sequence (opt1) from neuraminidase__InfluenzaA__ADD23313

SEQ ID NO: 82185 - RNA, 1410 nt, Artificial Sequence
  derived and/or modified CDS sequence (opt1) from neuraminidase__InfluenzaA__ADD23323
augaaccccaaccagaagaucaucaccaucggcagcgugugcaugaccaucgggauggccaaccugauccuccagaucggcaacaucaucuccaucuggaucagccacuccauccagcuggggaaccagaaccagaucgagacgugcaaccagagcgucaucaccuacgagaacaacaccugggugaaccagaccuacgugaacaucuccaacacgaacuucgccgcgggccagagcgucguguccgugaagcuggccgggaacagcucccucugcccggucagcggcugggccaucuacuccaaggacaacagcauccgcaucggcuccaagggggacguguucgugauccgggagcccuucaucagcugcagcccccuggagugccgcaccuucuuccugacccagggcgcccuccugaacgacaagcacuccaacgggaccaucaaggaccggucccccuaccgcacgcugaugagcugcccgaucggcgagguccccucccccuacaacagccgguucgagagcguggccugguccgcgagcgccugccacgacgggaucaacuggcucaccaucggcaucuccggccccgacaacggggccguggccguccugaaguacaacggcaucaucaccgacaccaucaagagcuggcgcaacaacauccugcggacgcaggaguccgagugcgcgugcgugaacgggagcugcuucaccgugcucaccgacggcccguccgacggccaggccagcuacaagaucuuccgcaucgagaaggggaagaucgucaaguccguggagaugaacgcccccaacuaccacuacgaggagugcagcugcuaccccgacuccagcgagaucacgugcgugugccgggacaacuggcacggcuccaaccgccccugggucagcuucaaccagaaccuggaguaccagaucggguacaucugcuccggcaucuucggggacaacccgcggcccaacgacaagaccggcagcugcggccccguguccagcaacggggccaacggcgugaagggguucuccuucaaguacggcaacggggucuggaucggccgcaccaagagcaucagcucccggaacggcuucgagaugaucugggaccccaacggguggaccggcaccgacaacaacuucagcaucaagcaggacaucguggggaucaacgagugguccggcuacagcggguccuucgugcagcacccggagcugacgggccucgacugcauccgccccugcuucugggucgagcugauccggggccgccccaaggagaacaccaucuggaccagcggguccagcaucuccuucugcggcgugaacagcgacaccgucgggugguccuggcccgacggcgccgagcugccguucacgaucgacaaguga

SEQ ID NO: 82186 - RNA, 1410 nt, Artificial Sequence; identical to SEQ ID NO: 80762
  derived and/or modified CDS sequence (opt1) from neuraminidase__InfluenzaA__ADD23333

SEQ ID NO: 82187 - RNA, 1410 nt, Artificial Sequence; identical to SEQ ID NO: 80762
  derived and/or modified CDS sequence (opt1) from neuraminidase__InfluenzaA__ADD23358

SEQ ID NO: 82188 - RNA, 1410 nt, Artificial Sequence; identical to SEQ ID NO: 82113
  derived and/or modified CDS sequence (opt1) from neuraminidase__InfluenzaA__ADD23368

SEQ ID NO: 82189 - RNA, 1410 nt, Artificial Sequence; identical to SEQ ID NO: 80762
  derived and/or modified CDS sequence (opt1) from neuraminidase__InfluenzaA__ADD23378

SEQ ID NO: 82190 - RNA, 1410 nt, Artificial Sequence; identical to SEQ ID NO: 80762
  derived and/or modified CDS sequence (opt1) from neuraminidase__InfluenzaA__ADD23388

SEQ ID NO: 82191 - RNA, 1410 nt, Artificial Sequence; identical to SEQ ID NO: 81345
  derived and/or modified CDS sequence (opt1) from neuraminidase__InfluenzaA__ADD23398

SEQ ID NO: 82192 - RNA, 1410 nt, Artificial Sequence
  derived and/or modified CDS sequence (opt1) from neuraminidase__InfluenzaA__ADD23408
augaaccccaaccagaagaucaucaccaucggcagcgugugcaugaccaucgggauggccaaccugauccuccagaucggcaacaucaucuccaucuggaucagccacuccauccagcuggggaaccagaaccagaucgagacgugcaaccagagcgucaucaccuacgagaacaacaccugggugaaccagaccuacgugaacaucuccaacacgaacuucgccgcgggccagagcgucguguccgugaagcuggccgggaacagcucccucugcccggucagcggcugggccaucuacuccaaggacaacagcauccgcaucggcuccaagggggacguguucgugauccgggagcccuucaucagcugcagcccccuggagugccgcaccuucuuccugacccagggcgcccuccugaacgacaagcacuccaacgggaccaucaaggaccggucccccuaccgcacgcugaugagcugcccgaucggcgagguccccucccccuacaacagccgguucgagagcguggccugguccgcgagcgccugccacgacgggaucaacuggcucaccaucggcaucuccggccccgacaacggggccguggccguccugaaguacaacggcaucaucaccgacaccaucaagagcuggcgcaacaacauccugcggacgcaggaguccgagugcgcgugcgugaacgggagcugcuucaccgugaugaccgacggcccguccgacggccaggccagcuacaagaucuuccgcaucgagaaggggaagaucgucaaguccguggagaugaacgcccccaacuaccacuacgaggagugcagcugcuaccccgacuccagcgagaucacgugcgugugccgggacaacuggcacggcuccaaccgccccugggucagcuucaaccaggaccucgaguaccagaucggguacaucugcuccggcaucuucggggacaacccgcggcccaacgacaagaccggcagcugcggccccguguccagcaacggggccaacggcgugaagggguucuccuucaaguacggcaacggggucuggaucggccgcaccaagagcaucagcucccggaacggcuucgagaugaucugggaccccaacggguggaccggcaccgacaacaacuucagcaucaagcaggacaucguggggaucaacgagugguccggcuacagcggguccuucgugcagcacccggagcugacgggccuggacugcauccgccccugcuucugggucgagcucauccggggccgccccaaggagaacaccaucuggaccagcggguccagcaucuccuucugcggcgugaacagcgacaccgucgggugguccuggcccgacggcgccgagcugccguucacgaucgacaaguga

SEQ ID NO: 82193 - RNA, 1410 nt, Artificial Sequence
  derived and/or modified CDS sequence (opt1) from neuraminidase__InfluenzaA__ADD23438
augaaccccaaccagaagaucaucaccaucggcagcgugugcaugaccaucgggauggccaaccugauccuccagaucggcaacaucaucuccaucuggaucagccacuccauccagcuggggaaccagaaccagaucgagacgugcaaccagagcgucaucaccuacgagaacaacaccugggugaaccagaccuacgugaacaucuccaacacgaacuucgccgcgggccagagcgucguguccgugaagcuggccgggaacagcucccucugcccggucagcggcugggccaucuacuccaaggacaacagcauccgcaucggcuccaagggggacguguucgugauccgggagcccuucaucagcugcagcccccuggagugccgcaccuucuuccugacccagggcgcccuccugaacgacaagcacuccaacgggaccaucaaggaccggucccccuaccgcacgcugaugagcugcccgaucggcgagguccccucccccuacaacagccgguucgagagcguggccugguccgcgagcgccugccacgacgggaucaacuggcucaccaucggcaucuccggccccgacaacggggccguggccguccugaaguacaacggcaucaucaccgacaccaucaagagcuggcgcaacaacauccugcggacgcaggaguccgagugcgcgugcgugaacgggagcugcuucaccgugaugaccgacggcccguccgacggccaggccagcuacaagaucuuccgcaucgagaaggggaagaucgucaaguccguggagaugaacgcccccaacuaccacuacgaggagugcagcugcuaccccgacuccagcgagaucacgugcgugugccgggacaacuggcacggcuccaaccgccccugggucagcuucaaccagaaccucgaguaccagaucggguacaucugcuccggcaucuucggggacaacccgcggcccaacgacaagaccggcagcugcggccccguguccagcaacggggccaacggcgugaagggguucuccuucaaguacggcaacggggucuggaucggccgcaccaagagcaucagcucccggaacggcuucgagaugaucugggaccccaacggguggaccggcaccgacaacagcuucuccaucaagcaggacaucguggggaucaacgaguggagcggcuacuccgggagcuucgugcagcacccggagcugacgggccuggacugcauccgccccugcuucugggucgagcucauccggggccgccccaaggagaacaccaucuggaccuccgggagcuccaucagcuucugcggcgugaacuccgacaccgucggguggagcuggcccgacggcgccgagcugccguucacgaucgacaaguga

SEQ ID NO: 82194 - RNA, 1410 nt, Artificial Sequence; identical to SEQ ID NO: 80762
  derived and/or modified CDS sequence (opt1) from neuraminidase__InfluenzaA__ADD23448

SEQ ID NO: 82195 - RNA, 1410 nt, Artificial Sequence; identical to SEQ ID NO: 80762
  derived and/or modified CDS sequence (opt1) from neuraminidase__InfluenzaA__ADD23458

SEQ ID NO: 82196 - RNA, 1410 nt, Artificial Sequence
  derived and/or modified CDS sequence (opt1) from neuraminidase__InfluenzaA__ADD23468
augaaccccaaccagaagaucaucaccaucggcagcgugugcaugaccaucgggauggccaaccugauccuccagaucggcaacaucaucuccaucuggaucagccacuccauccagcuggggaaccagaaccagaucgagacgugcaaccagagcgucaucaccuacgagaacaacaccugggugaaccagaccuacgugaacaucuccaacacgaacuucgccgcgggccagagcgucguguccgugaagcuggccgggaacagcucccucugcccggucagcggcugggccaucuacuccaaggacaacagcauccgcaucggcuccaagggggacguguucgugauccgggagcccuucaucagcugcagcccccuggagugccgcaccuucuuccugacccagggcgcccuccugaacgacaagcacuccaacgggaccaucaaggaccggucccccuaccgcacgcugaugagcugcccgaucggcgagguccccucccccuacaacagccgguucgagagcguggccugguccgcgagcgccugccacgacgggaucaacuggcucaccaucggcaucuccggccccgacaacggggccguggccguccugaaguacaacggcaucaucaccgacaccaucaagagcuggcgcaacaacauccugcggacgcaggaguccgagugcgcgugcgugaacgggagcugcuucaccgugaugaccgacggcccguccgacggccaggccagcuacaagaucuuccgcaucgagaaggggaagaucgucaaguccguggagaugaacgcccccaacuaccacuacgaggagugcagcugcuaccccgacuccagcgagaucacgugcgugugccgggacaacuggcacggcuccaaccgccccugggucagcuucaaccagaaccucgaguaccagaucggguacaucugcuccggcaucuucggggacaacccgcggcccaacgacaagaccggcagcugcggccccguguccagcaacggggccaacggcgugaagggguucuccuucaaguacggcaacggggucuggaucggccgcaccaagagcaucagcucccggaacggcuucgagaugaucugggaccccaacggguggaccggcaccgacaacaacuucagcaucaagcaggacaucgugggggugaacgagugguccggcuacagcggguccuucguccagcacccggagcugacgggccuggacugcauccgccccugcuucuggguggagcucauccggggccgccccaaggagaacaccaucuggaccagcggguccagcaucuccuucugcggcgucaacagcgacaccguggggugguccuggcccgacggcgccgagcugccguucacgaucgacaaguga

SEQ ID NO: 82197 - RNA, 1410 nt, Artificial Sequence; identical to SEQ ID NO: 80762
  derived and/or modified CDS sequence (opt1) from neuraminidase__InfluenzaA__ADD23478

SEQ ID NO: 82198 - RNA, 1410 nt, Artificial Sequence; identical to SEQ ID NO: 80762
  derived and/or modified CDS sequence (opt1) from neuraminidase__InfluenzaA__ADD23488

SEQ ID NO: 82199 - RNA, 1410 nt, Artificial Sequence
  derived and/or modified CDS sequence (opt1) from neuraminidase__InfluenzaA__ADD23498
augaaccccaaccagaagaucaucaccaucggcagcgugugcaugaccaucgggauggccaaccugauccuccagaucggcaacaucaucuccaucuggaucagccacuccauccagcuggggaaccagaaccacaucgagacgugcaaccagagcgucaucaccuacgagaacaacaccugggugaaccagaccuacgugaacaucuccaacacgaacuucgccgcgggccagagcgucguguccgugaagcuggccgggaacagcucccucugcccggucagcggcugggccaucuacuccaaggacaacagcauccgcaucggcuccaagggggacguguucgugauccgggagcccuucaucagcugcagcccccuggagugccgcaccuucuuccugacccagggcgcccuccugaacgacaagcacuccaacgggaccaucaaggaccggucccccuaccgcacgcugaugagcugcccgaucggcgagguccccucccccuacaacagccgguucgagagcguggccugguccgcgagcgccugccacgacgggaucaacuggcucaccaucggcaucuccggccccgacaacggggccguggccguccugaaguacaacggcaucaucaccgacaccaucaagagcuggcgcaacaacauccugcggacgcaggaguccgagugcgcgugcgugaacgggagcugcuucaccgugaugaccgacggcccguccgacggccaggccagcuacaagaucuuccgcaucgagaaggggaagaucgucaaguccguggagaugaacgcccccaacuaccacuacgaggagugcagcugcuaccccgacuccagcgagaucacgugcgugugccgggacaacuggcacggcuccaaccgccccugggucagcuucaaccagaaccucgaguaccagaucggguacaucugcuccggcaucuucggggacaacccgcggcccaacgacaagaccggcagcugcggccccguguccagcaacggggccaacggcgugaagggguucuccuucaaguacggcaacggggucuggaucggccgcaccaagagcaucagcucccggaacggcuucgagaugaucugggaccccaacggguggaccggcaccgacaacaacuucagcaucaagcaggacaucguggggaucaacgagugguccggcuacagcggguccuucgugcagcacccggagcugacgggccuggacugcauccgccccugcuucugggucgagcucauccggggccgccccaaggagaacaccaucuggaccagcggguccagcaucuccuucugcggcgugaacagcgacaccgucgggugguccuggcccgacggcgccgagcugccguucacgaucgacaaguga

SEQ ID NO: 82200 - RNA, 1410 nt, Artificial Sequence; identical to SEQ ID NO: 80762
  derived and/or modified CDS sequence (opt1) from neuraminidase__InfluenzaA__ADD23508

SEQ ID NO: 82201 - RNA, 1410 nt, Artificial Sequence; identical to SEQ ID NO: 80762
  derived and/or modified CDS sequence (opt1) from neuraminidase__InfluenzaA__ADD23518

SEQ ID NO: 82202 - RNA, 1410 nt, Artificial Sequence; identical to SEQ ID NO: 80762
  derived and/or modified CDS sequence (opt1) from neuraminidase__InfluenzaA__ADD23997

SEQ ID NO: 82203 - RNA, 1410 nt, Artificial Sequence; identical to SEQ ID NO: 80762
  derived and/or modified CDS sequence (opt1) from neuraminidase__InfluenzaA__ADD24007

SEQ ID NO: 82204 - RNA, 1410 nt, Artificial Sequence; identical to SEQ ID NO: 80762
  derived and/or modified CDS sequence (opt1) from neuraminidase__InfluenzaA__ADD24017

SEQ ID NO: 82205 - RNA, 1410 nt, Artificial Sequence; identical to SEQ ID NO: 80762
  derived and/or modified CDS sequence (opt1) from neuraminidase__InfluenzaA__ADD24024

SEQ ID NO: 82206 - RNA, 1410 nt, Artificial Sequence; identical to SEQ ID NO: 80762
  derived and/or modified CDS sequence (opt1) from neuraminidase__InfluenzaA__ADD24025

SEQ ID NO: 82207 - RNA, 1410 nt, Artificial Sequence; identical to SEQ ID NO: 80762
  derived and/or modified CDS sequence (opt1) from neuraminidase__InfluenzaA__ADD24026

SEQ ID NO: 82208 - RNA, 1410 nt, Artificial Sequence; identical to SEQ ID NO: 80762
  derived and/or modified CDS sequence (opt1) from neuraminidase__InfluenzaA__ADD24027

SEQ ID NO: 82209 - RNA, 1410 nt, Artificial Sequence; identical to SEQ ID NO: 80762
  derived and/or modified CDS sequence (opt1) from neuraminidase__InfluenzaA__ADD24028

SEQ ID NO: 82210 - RNA, 1410 nt, Artificial Sequence; identical to SEQ ID NO: 80762
  derived and/or modified CDS sequence (opt1) from neuraminidase__InfluenzaA__ADD24029

SEQ ID NO: 82211 - RNA, 1410 nt, Artificial Sequence; identical to SEQ ID NO: 80762
  derived and/or modified CDS sequence (opt1) from neuraminidase__InfluenzaA__ADD24030

SEQ ID NO: 82212 - RNA, 1410 nt, Artificial Sequence; identical to SEQ ID NO: 80762
  derived and/or modified CDS sequence (opt1) from neuraminidase__InfluenzaA__ADD24031

SEQ ID NO: 82213 - RNA, 1410 nt, Artificial Sequence; identical to SEQ ID NO: 80762
  derived and/or modified CDS sequence (opt1) from neuraminidase__InfluenzaA__ADD24032

SEQ ID NO: 82214 - RNA, 1410 nt, Artificial Sequence; identical to SEQ ID NO: 80762
  derived and/or modified CDS sequence (opt1) from neuraminidase__InfluenzaA__ADD25231

SEQ ID NO: 82215 - RNA, 1410 nt, Artificial Sequence; identical to SEQ ID NO: 80762
  derived and/or modified CDS sequence (opt1) from neuraminidase__InfluenzaA__ADD25233

SEQ ID NO: 82216 - RNA, 1410 nt, Artificial Sequence; identical to SEQ ID NO: 80762
  derived and/or modified CDS sequence (opt1) from neuraminidase__InfluenzaA__ADD25235

SEQ ID NO: 82217 - RNA, 1410 nt, Artificial Sequence; identical to SEQ ID NO: 80762
  derived and/or modified CDS sequence (opt1) from neuraminidase__InfluenzaA__ADD25244

SEQ ID NO: 82218 - RNA, 1410 nt, Artificial Sequence
  derived and/or modified CDS sequence (opt1) from neuraminidase__InfluenzaA__ADD25246
augaaccccaaccagaagaucaucaccaucggcagcgugugcaugaccaucgggauggccaaccugauccuccagaucggcaacaucaucuccaucuggaucagccacuccauccagcuggggaaccagaaccagaucgagacgugcaaccagagcgucaucaccuacgagaacaacaccugggugaaccagaccuacgugaacaucuccaacacgaacuucgccgcgggccagagcgucguguccgugaagcuggccgggaacagcucccucugcccggucagcggcugggccaucuacuccaaggacaacagcauccgcaucggcuccaagggggacguguucgugauccgggagcccuucaucagcugcagcccccuggagugccgcaccuucuuccugacccagggcgcccuccugaacgacaagcacuccaacgggaccaucaaggaccggucccccuaccgcacgcugaugagcugcccgaucggcgagguccccucccccuacaacagccgguucgagagcguggccugguccgcgagcgccugccacgacgggaccaacuggcucaccaucggcaucuccggccccgacaacggggccguggccguccugaaguacaacggcaucaucaccgacacgaucaagagcuggcgcaacaacauccugcggacccaggaguccgagugcgcgugcgugaacgggagcugcuucaccgugaugaccgacggcccguccgacggccaggccagcuacaagaucuuccgcaucgagaaggggaagaucgucaaguccguggagaugaacgcccccaacuaccacuacgaggagugcagcugcuaccccgacuccagcgagaucacgugcgugugccgggacaacuggcacggcuccaaccgccccugggucagcuucaaccagaaccucgaguaccagaucggguacaucugcuccggcaucuucggggacaacccgcggcccaacgacaagaccggcagcugcggccccguguccagcaacggggccaacggcgugaagggguucuccuucaaguacggcaacggggucuggaucggccgcaccaagagcaucagcucccggaacggcuucgagaugaucugggaccccaacggguggaccggcacggacaacaacuucagcaucaagcaggacaucguggggaucaacgagugguccggcuacagcggguccuucgugcagcacccggagcugaccggccuggacugcauccgccccugcuucugggucgagcucauccggggccgccccaaggagaacaccaucuggaccagcggguccagcaucuccuucugcggcgugaacagcgacacggucgggugguccuggcccgacggcgccgagcugccguucaccaucgacaaguga

SEQ ID NO: 82219 - RNA, 1410 nt, Artificial Sequence; identical to SEQ ID NO: 80762
  derived and/or modified CDS sequence (opt1) from neuraminidase__InfluenzaA__ADD25248

SEQ ID NO: 82220 - RNA, 1410 nt, Artificial Sequence
  derived and/or modified CDS sequence (opt1) from neuraminidase__InfluenzaA__ADD25250
augaaccccaaccagaagaucaucaccaucggcagcgugugcaugaccaucgggauggccaaccugauccuccagaucggcaacaucaucuccaucuggaucagccgcuccauccagcuggggaaccagaaccagaucgagacgugcaaccagagcaucaucaccuacgagaacaacaccugggucaaccagaccuacgugaacaucuccaacacgaacuucgccgcgggccagagcguggucuccgugaagcuggccgggaacagcucccucugcccggugagcggcugggccaucuacuccaaggacaacagcauccggaucggcuccaagggggacgucuucgugauccgcgagcccuucaucagcugcagcccccuggagugccggaccuucuuccugacccagggcgcccuccugaacgacaagcacuccaacgggaccaucaaggaccgcucccccuaccggacgcugaugagcugcccgaucggcgaggugcccucccccuacaacagccgcuucgagagcgucgccugguccgcgagcgccugccacgacgggaucaacuggcucaccaucggcaucuccggccccgacaacggggccguggccgugcugaaguacaacggcaucaucaccgacaccaucaagagcuggcggaacaacauccugcgcacgcaggaguccgagugcgcgugcgucaacgggagcugcuucaccgugaugaccgacggcccguccgacggccaggccagcuacaagaucuuccggaucgagaaggggaagaucgugaaguccgucgagaugaacgcccccaacuaccacuacgaggagugcagcugcuaccccgacuccggcgagaucacgugcgugugccgcgacaacuggcacgggagcaaccggcccuggguguccuucaaccagaaccucgaguaccagaucggcuacaucugcagcgggaucuucggcgacaacccgcgccccaacgacaagaccggcuccugcgggcccgucagcuccaacggcgccaacggggugaagggcuucagcuucaaguacgggaacggcguguggaucggccggaccaaguccaucagcagccgcaacggguucgagaugaucugggaccccaacggcuggaccgggaccgacaacaacuucuccaucaagcaggacaucgucggcaucaacgaguggagcggguacuccggcagcuucgugcagcacccggagcugacgggccuggacugcauccggcccugcuucuggguggagcucauccgcgggcggcccaaggagaacaccaucuggaccuccggcagcuccaucagcuucugcggggucaacuccgacaccaugggcuggagcuggcccgacggcgccgagcugccguucacgaucgacaaguga

SEQ ID NO: 82221 - RNA, 1410 nt, Artificial Sequence; identical to SEQ ID NO: 80762
  derived and/or modified CDS sequence (opt1) from neuraminidase__InfluenzaA__ADD25255

SEQ ID NO: 82222 - RNA, 1410 nt, Artificial Sequence; identical to SEQ ID NO: 80762
  derived and/or modified CDS sequence (opt1) from neuraminidase__InfluenzaA__ADD25259

SEQ ID NO: 82223 - RNA, 1410 nt, Artificial Sequence
  derived and/or modified CDS sequence (opt1) from neuraminidase__InfluenzaA__ADD25262
augaaccccaaccagaagaucaucaccaucggcagcgugugcaugaccaucgggauggccaaccugauccuccagaucggcaacaucaucuccaucuggaucagccacuccauccagcuggggaaccagaaccagaucgagacgugcaaccagagcgucaucaccuacgagaacaacaccugggugaaccagaccuacgugaacaucuccaacacgaacuucgccgcgggccagagcgucguguccgugaagcuggccgggaacagcucccucugcccggucagcggcugggccaucuacuccaaggacaacagcauccgcaucggcuccaagggggacguguucgugauccgggagcccuucaucagcugcagcccccuggagugccgcaccuucuuccugacccagggcgcccuccugaacgacaagcacuccaacgggaccaucaaggaccggucccccuaccgcacgcugaugagcugcccgaucggcgagguccccucccccuacaacagccgguucgagagcguggccugguccgcgagcgccugccacgacgggaucaacuggcucaccaucggcaucuccggccccgacaacggggccguggccguccugaaguacaacggcaucaucaccgacaccaucaagagcuggcgcaacaacauccugcggacgcaggaguccgagugcgcgugcgugaacgggagcugcuucaccgugaugaccgacggcccguccgacggccaggccagcuacaagaucuuccgcaucgagaaggggaagaucgucaaguccguggagaugaacgcccccaacuaccacuacgaggagugcagcugcuaccccgacuccagcgagaucacgugcgugugccgggacaacuggcacggcuccaaccgccccugggucagcuucaaccagaaccucgaguaccagaucggguacaucugcuccggcaucuucggggacaacccgcggcccaacgacaagaagggcagcugcggccccguguccagcaacggggccgacggcgugaagggguucuccuucaaguacggcaacggggucuggaucggccgcaccaagagcaucagcucccggaacggcuucgagaugaucugggaccccaacggguggaccggcaccgacaacaacuucagcaucaagcaggacaucguggggaucaacgagugguccggcuacagcggguccuucgugcagcacccggagcugaccggccuggacugcauccgccccugcuucugggucgagcucauccggggccgccccaaggagaacacgaucuggaccagcggguccagcaucuccuucugcggcgugaacagcgacaccgucgggugguccuggcccgacggcgccgagcugccguucaccaucgacaaguga

SEQ ID NO: 82224 - RNA, 1410 nt, Artificial Sequence
  derived and/or modified CDS sequence (opt1) from neuraminidase__InfluenzaA__ADD25266
augaaccccaaccagaagaucaucaccaucggcagcgugugcaugaccaucgggauggccaaccugauccuccagaucggcaacaucaucuccaucuggaucagccacuccauccagcuggggaaccagaaccagaucgagacgugcaaccagagcgucaucaccuacgagaacaacaccugggugaaccagaccuacgugaacaucuccaacacgaacuucgccgcgggccagagcgucgugccggugaagcuggccgggaacuccagccucugccccgucuccggcugggccaucuacagcaaggacaacuccauccgcaucggcagcaagggggacguguucgugauccgggagcccuucaucuccugcagcccccuggagugccgcaccuucuuccugacccagggcgcccuccugaacgacaagcacuccaacgggaccaucaaggaccggagcccguaccgcacgcugauguccugccccaucggcgagguccccagccccuacaacucccgguucgagagcguggccuggagcgcguccgccugccacgacgggaucaacuggcucaccaucggcaucagcggcccggacaacggggccguggccguccugaaguacaacggcaucaucaccgacaccaucaaguccuggcgcaacaacauccugcggacgcaggagagcgagugcgcgugcgugaacggguccugcuucaccgugaugaccgacggccccagcgacggccaggccuccuacaagaucuuccgcaucgagaaggggaagaucgucaagagcguggagaugaacgcccccaacuaccacuacgaggagugcuccugcuaccccgacagcuccgagaucacgugcgugugccgggacaacuggcacggcagcaaccgcccgugggucuccuucaaccagaaccucgaguaccagaucggguacaucugcagcggcaucuucggggacaacccccggcccaacgacaagaccggcuccugcggccccgugagcuccaacggggccaacggcgugaagggguucagcuucaaguacggcaacggggucuggaucggccgcaccaaguccaucagcagccggaacggcuucgagaugaucugggacccgaacggguggaccggcaccgacaacaacuucuccaucaagcaggacaucguggggaucaacgaguggagcggcuacuccgggagcuucgugcagcaccccgagcugacgggccuggacugcauccgccccugcuucugggucgagcucauccggggccgccccaaggagaacaccaucuggaccuccgggagcuccaucagcuucugcggcgugaacuccgacaccgucggguggagcuggccggacggcgccgagcugcccuucacgaucgacaaguga

SEQ ID NO: 82225 - RNA, 1410 nt, Artificial Sequence; identical to SEQ ID NO: 80762
  derived and/or modified CDS sequence (opt1) from neuraminidase__InfluenzaA__ADD25268

SEQ ID NO: 82226 - RNA, 1410 nt, Artificial Sequence; identical to SEQ ID NO: 80762
  derived and/or modified CDS sequence (opt1) from neuraminidase__InfluenzaA__ADD25271

SEQ ID NO: 82227 - RNA, 1410 nt, Artificial Sequence; identical to SEQ ID NO: 80762
  derived and/or modified CDS sequence (opt1) from neuraminidase__InfluenzaA__ADD25274

SEQ ID NO: 82228 - RNA, 1410 nt, Artificial Sequence; identical to SEQ ID NO: 80762
  derived and/or modified CDS sequence (opt1) from neuraminidase__InfluenzaA__ADD25276

SEQ ID NO: 82229 - RNA, 1410 nt, Artificial Sequence
  derived and/or modified CDS sequence (opt1) from neuraminidase__InfluenzaA__ADD25278
augaaccccaaccagaagaucaucaccaucggcagcgugugcaugaccaucgggauggccaaccugauccuccagaucggcaacaucaucuccaucuggaucagccgcuccauccagcuggggaaccagaaccagaucgagacgugcaaccagagcaucaucaccuacgagaacaacaccugggucaaccagaccuacgugaacaucuccaacacgaacuucgccgcgggccagagcguggucuccgugaagcuggccgggaacagcucccucugcccggugagcggcugggccaucuacuccaaggacaacagcauccggaucggcuccaagggggacgucuucgugauccgcgagcccuucaucagcugcagcccccuggagugccggaccuucuuccugacccagggcgcccuccugaacgacaagcacuccaacgggaccaucaaggaccgcucccccuaccggacgcugaugagcugcccgaucggcgaggugcccucccccuacaacagccgcuucgagagcgucgccugguccgcgagcgccugccacgacgggaucaacuggcucaccaucggcaucuccggccccgacaacggggccguggccgugcugaaguacaacggcaucaucaccgacaccaucaagagcuggcggaacaacauccugcgcacgcaggaguccgagugcgcgugcgucaacgggagcugcuucaccgugaugaccgacggcccguccgacggccaggccagcuacaagaucuuccggaucgagaaggggaagaucgugaaguccgucgagaugaacgcccccaacuaccacuacgaggagugcagcugcuaccccgacuccggcgagaucacgugcgugugccgcgacaacuggcacgggagcaaccggcccuggguguccuucaaccagaaccucgaguaccagaucggcuacaucugcagcgggaucuucggcgacaacccgcgccccaacgacaagaccggcuccugcgggcccgucagcuccaacggcgccaacggggugaagggcuucagcuucaaguacgggaacggcguguggaucggccggaccaaguccaucagcagccgcaacggguucgagaugaucugggaccccaacggcuggaccgggaccgacaacaacuucuccaucaagcaggacaucgucggcaucaacgaguggagcggguacuccggcagcuucgugcagcacccggagcugacgggccuggacugcauccggcccugcuucuggguggagcucauccgcgggcggcccaaggagaacaccaucuggaccuccggcagcuccaucagcuucugcggggucaacuccgacaccgugggcuggagcuggcccgacggcgccgagcugccguucacgaucgacaaguga

SEQ ID NO: 82230 - RNA, 1410 nt, Artificial Sequence; identical to SEQ ID NO: 80762
  derived and/or modified CDS sequence (opt1) from neuraminidase__InfluenzaA__ADD25280

SEQ ID NO: 82231 - RNA, 1410 nt, Artificial Sequence; identical to SEQ ID NO: 80762
  derived and/or modified CDS sequence (opt1) from neuraminidase__InfluenzaA__ADD25282

SEQ ID NO: 82232 - RNA, 1410 nt, Artificial Sequence; identical to SEQ ID NO: 82050
  derived and/or modified CDS sequence (opt1) from neuraminidase__InfluenzaA__ADD25284

SEQ ID NO: 82233 - RNA, 1410 nt, Artificial Sequence; identical to SEQ ID NO: 80762
  derived and/or modified CDS sequence (opt1) from neuraminidase__InfluenzaA__ADD25287

SEQ ID NO: 82234 - RNA, 1410 nt, Artificial Sequence; identical to SEQ ID NO: 80762
  derived and/or modified CDS sequence (opt1) from neuraminidase__InfluenzaA__ADD25291

SEQ ID NO: 82235 - RNA, 1410 nt, Artificial Sequence; identical to SEQ ID NO: 82050
  derived and/or modified CDS sequence (opt1) from neuraminidase__InfluenzaA__ADD25293

SEQ ID NO: 82236 - RNA, 1410 nt, Artificial Sequence; identical to SEQ ID NO: 80762
  derived and/or modified CDS sequence (opt1) from neuraminidase__InfluenzaA__ADD25300

SEQ ID NO: 82237 - RNA, 1410 nt, Artificial Sequence
  derived and/or modified CDS sequence (opt1) from neuraminidase__InfluenzaA__ADD25304
augaaccccaaccagaagaucaucaccaucggcagcgugugcaugaccaucgggauggccaaccugauccuccagaucggcaacaucgucuccaucuggaucagccacuccauccagcuggggaaccagaaccagaucgagacgugcaaccagagcgugaucaccuacgagaacaacaccugggugaaccagaccuacgucaacaucuccaacacgaacuucgccgcgggccagagcgugguguccgucaagcuggccgggaacagcucccucugcccggugagcggcugggccaucuacuccaaggacaacagcauccgcaucggcuccaagggggacguguucgucauccgggagcccuucaucagcugcagcccccuggagugccgcaccuucuuccugacccagggcgcccuccugaacgacaagcacuccaacgggaccaucaaggaccggucccccuaccgcacgcugaugagcugcccgaucggcgaggugcccucccccuacaacagccgguucgagagcguggccugguccgcgagcgccugccacgacgggaucaacuggcucaccaucggcaucuccggccccgacaacggggccgucgccgugcugaaguacaacggcaucaucaccgacaccaucaagagcuggcgcaacaacauccugcggacgcaggaguccgagugcgcgugcgugaacgggagcugcuucaccgucaugaccgacggcccguccgacggccaggccagcuacaagaucuuccgcaucgagaaggggaagaucgugaaguccguggagaugaacgcccccaacuaccacuacgaggagugcagcugcuaccccgacuccagcgagaucacgugcgucugccgggacaacuggcacggcuccaaccgccccugggugagcuucaaccagaaccucgaguaccagaucggguacaucugcuccggcaucuucggggacaacccgcggcccaacgacaagaccggcagcugcggccccguguccagcaacggggccaacggcgucaagggguucuccuucaaguacggcaacgggguguggaucggccgcaccaagagcaucagcucccggaacggcuucgagaugaucugggaccccaacggguggaccggcaccgacaacaacuucagcaucaagcaggacaucguggggaucaacgagugguccggcuacagcggguccuucguccagcacccggagcugacgggccuggacugcauccgccccugcuucuggguggagcucauccggggccgccccaaggagaacaccaucuggaccagcggguccagcaucuccuucugcggcgucaacagcgacaccguggggugguccuggcccgacggcgccgagcugccguucacgaucgacaaguga

SEQ ID NO: 82238 - RNA, 1410 nt, Artificial Sequence
  derived and/or modified CDS sequence (opt1) from neuraminidase__InfluenzaA__ADD25306
augaaccccaaccagaagaucaucaccaucggcagcgugugcaugaccaucgggauggccaaccugauccuccagaucggcaacaucaucuccaucuggaucagccgcuccauccagcuggggaaccagaaccagaucgagacgugcaaccagagcaucaucaccuacgagaacaacaccugggucaaccagaccuacgugaacaucuccaacacgaacuucgccgcgggccagagcguggucuccgugaagcuggccgggaacagcucccucugcccggugagcggcugggccaucuacuccaaggacaacagcauccggaucggcuccaagggggacgucuucgugauccgcgagcccuucaucagcugcagcccccuggagugccggaccuucuuccugacccagggcgcccuccugaacgacaagcacuccaacgggaccaucaaggaccgcucccccuaccggacgcugaugagcugcccgaucggcgaggugcccucccccuacaacagccgcuucgagagcgucgccugguccgcgagcgccugccacgacgggaucaacuggcucaccaucggcaucuccggccccgacaacggggccguggccgugcugaaguacaacggcaucaucaccgacaccaucaagagcuggcggaacaacauccugcgcacgcaggaguccgagugcgcgugcgucaacgggagcugcuucaccgugaugaccgacgagccguccgacggccaggccagcuacaagaucuuccggaucgagaagggcaagaucgugaaguccgucgagaugaacgcccccaacuaccacuacgaggagugcagcugcuaccccgacuccggggagaucacgugcgugugccgcgacaacuggcacggcagcaaccggcccuggguguccuucaaccagaaccucgaguaccagaucggguacaucugcagcggcaucuucggggacaacccgcgccccaacgacaagaccggcuccugcggccccgucagcuccaacggggccaacggcgugaagggguucagcuucaaguacggcaacgggguguggaucggccggaccaaguccaucagcagccgcaacggcuucgagaugaucugggaccccaacggguggaccggcaccgacaacaacuucuccaucaagcaggacaucgucgggaucaacgaguggagcggcuacuccgggagcuucgugcagcacccggagcugacgggccuggacugcauccggcccugcuucuggguggagcucauccgcggccggcccaaggagaacaccaucuggaccuccgggagcuccaucagcuucugcggcgucaacuccgacaccgugggguggagcuggcccgacggcgccgagcugccguucacgaucgacaaguga

SEQ ID NO: 82239 - RNA, 1410 nt, Artificial Sequence; identical to SEQ ID NO: 80762
  derived and/or modified CDS sequence (opt1) from neuraminidase__InfluenzaA__ADD25308

SEQ ID NO: 82240 - RNA, 1410 nt, Artificial Sequence; identical to SEQ ID NO: 80762
  derived and/or modified CDS sequence (opt1) from neuraminidase__InfluenzaA__ADD25310

SEQ ID NO: 82241 - RNA, 1410 nt, Artificial Sequence; identical to SEQ ID NO: 80762
  derived and/or modified CDS sequence (opt1) from neuraminidase__InfluenzaA__ADD25312

SEQ ID NO: 82242 - RNA, 1410 nt, Artificial Sequence; identical to SEQ ID NO: 80762
  derived and/or modified CDS sequence (opt1) from neuraminidase__InfluenzaA__ADD25314

SEQ ID NO: 82243 - RNA, 1410 nt, Artificial Sequence; identical to SEQ ID NO: 80762
  derived and/or modified CDS sequence (opt1) from neuraminidase__InfluenzaA__ADD25316

SEQ ID NO: 82244 - RNA, 1410 nt, Artificial Sequence; identical to SEQ ID NO: 80762
  derived and/or modified CDS sequence (opt1) from neuraminidase__InfluenzaA__ADD29799

SEQ ID NO: 82245 - RNA, 1410 nt, Artificial Sequence; identical to SEQ ID NO: 80762
  derived and/or modified CDS sequence (opt1) from neuraminidase__InfluenzaA__ADD29800

SEQ ID NO: 82246 - RNA, 1410 nt, Artificial Sequence; identical to SEQ ID NO: 80762
  derived and/or modified CDS sequence (opt1) from neuraminidase__InfluenzaA__ADD29801

SEQ ID NO: 82247 - RNA, 1410 nt, Artificial Sequence; identical to SEQ ID NO: 80762
  derived and/or modified CDS sequence (opt1) from neuraminidase__InfluenzaA__ADD29802

SEQ ID NO: 82248 - RNA, 1410 nt, Artificial Sequence; identical to SEQ ID NO: 80762
  derived and/or modified CDS sequence (opt1) from neuraminidase__InfluenzaA__ADD29803

SEQ ID NO: 82249 - RNA, 1410 nt, Artificial Sequence; identical to SEQ ID NO: 80762
  derived and/or modified CDS sequence (opt1) from neuraminidase__InfluenzaA__ADD29804

SEQ ID NO: 82250 - RNA, 1410 nt, Artificial Sequence; identical to SEQ ID NO: 80762
  derived and/or modified CDS sequence (opt1) from neuraminidase__InfluenzaA__ADD29805

SEQ ID NO: 82251 - RNA, 1410 nt, Artificial Sequence; identical to SEQ ID NO: 80762
  derived and/or modified CDS sequence (opt1) from neuraminidase__InfluenzaA__ADD29806

SEQ ID NO: 82252 - RNA, 1410 nt, Artificial Sequence; identical to SEQ ID NO: 80762
  derived and/or modified CDS sequence (opt1) from neuraminidase__InfluenzaA__ADD29807

SEQ ID NO: 82253 - RNA, 1410 nt, Artificial Sequence; identical to SEQ ID NO: 80762
  derived and/or modified CDS sequence (opt1) from neuraminidase__InfluenzaA__ADD29808

SEQ ID NO: 82254 - RNA, 1410 nt, Artificial Sequence; identical to SEQ ID NO: 80762
  derived and/or modified CDS sequence (opt1) from neuraminidase__InfluenzaA__ADD52538

SEQ ID NO: 82255 - RNA, 1410 nt, Artificial Sequence; identical to SEQ ID NO: 81985
  derived and/or modified CDS sequence (opt1) from neuraminidase__InfluenzaA__ADD74353

SEQ ID NO: 82256 - RNA, 1410 nt, Artificial Sequence; identical to SEQ ID NO: 80762
  derived and/or modified CDS sequence (opt1) from neuraminidase__InfluenzaA__ADD74373

SEQ ID NO: 82257 - RNA, 1410 nt, Artificial Sequence; identical to SEQ ID NO: 80762
  derived and/or modified CDS sequence (opt1) from neuraminidase__InfluenzaA__ADD74383

SEQ ID NO: 82258 - RNA, 1410 nt, Artificial Sequence; identical to SEQ ID NO: 80762
  derived and/or modified CDS sequence (opt1) from neuraminidase__InfluenzaA__ADD74401

SEQ ID NO: 82259 - RNA, 1410 nt, Artificial Sequence
  derived and/or modified CDS sequence (opt1) from neuraminidase__InfluenzaA__ADD74411
augaaccccaaccagaagaucaucaccaucggcagcgugugcaugaccaucgggauggccaaccugauccuccagaucggcaacaucaucuccaucuggaucagccacuccauccagcuggggaaccagaaccagaucgagacgugcaaccagagcgucaucaccuacgagaacaacaccugggugaaccagaccuacgugaacaucuccaacacgaacgucgccgcgggccagagcgugguguccgucaagcuggccgggaacagcucccucugcccggugagcggcugggccaucuacuccaaggacaacagcauccgcaucggcuccaagggggacguguucgucauccgggagcccuucaucagcugcagcccccuggagugccgcaccuucuuccugacccagggcgcccuccugaacgacaagcacuccaacgggaccaucaaggaccggucccccuaccgcacgcugaugagcugcccgaucggcgaggugcccucccccuacaacagccgguucgagagcguggccugguccgcgagcgccugccacgacgggaucaacuggcucaccaucggcaucuccggccccgacaacggggccgucgccgugcugaaguacaacggcaucaucaccgacaccaucaagagcuggcgcaacaacauccugcggacgcaggaguccgagugcgcgugcgugaacgggagcugcuucaccgucaugaccgacggcccguccgacggccaggccagcuacaagaucuuccgcaucgagaaggggaagaucgugaaguccguggagaugaacgcccccaacuaccacuacgaggagugcagcugcuaccccgacuccagcgagaucacgugcgucugccgggacaacuggcacggcuccaaccgccccugggugagcuucaaccagaaccucgaguaccagaucggguacaucugcuccggcaucuucggggacaacccgcggcccaacgacaagaccggcagcugcggccccguguccagcaacggggccaacggcgucaagggguucuccuucaaguacggcagcgggguguggaucggccgcaccaagagcaucuccagccgguccggcuucgagaugaucugggaccccaacggguggaccggcaccgacaacaacuucagcaucaagcaggacaucguggggaucaacgagugguccggcuacagcggguccuucguccagcacccggagcugacgggccuggacugcauccgccccugcuucuggguggagcucauccggggccgccccaaggagaacaccaucuggaccagcggguccagcaucuccuucugcggcgucaacagcgacaccguggggugguccuggcccgacggcgccgagcugccguucacgaucgacaaguga

SEQ ID NO: 82260 - RNA, 1410 nt, Artificial Sequence; identical to SEQ ID NO: 80762
  derived and/or modified CDS sequence (opt1) from neuraminidase__InfluenzaA__ADD74421

SEQ ID NO: 82261 - RNA, 1410 nt, Artificial Sequence; identical to SEQ ID NO: 80762
  derived and/or modified CDS sequence (opt1) from neuraminidase__InfluenzaA__ADD74431

SEQ ID NO: 82262 - RNA, 1410 nt, Artificial Sequence
  derived and/or modified CDS sequence (opt1) from neuraminidase__InfluenzaA__ADD74441
augaaccccaaccagaagaucaucaccaucggcagcgugugcaugaccaucgggauggccaaccugauccuccagaucggcaacaucaucuccaucuggaucagccacuccauccagcuggggaaccagaaccagaucgagacgugcaaccagagcgucaucaccuacgagaacaacaccugggugaaccagaccuacgugaacaucuccaacacgaacuucgccgcgggccagagcgucguguccgugaagcuggccgggaacagcucccucugcccggucagcggcugggccaucuacuccaaggacaacagcauccgcaucggcuccaagggggacguguucgugauccgggagcccuucaucagcugcagcccccuggagugccgcaccuucuuccugacccagggcgcccuccugaacgacaagcacuccaacgggaccaucaaggaccggucccccuaccgcacgcugaugagcugcccgaucggcgagguccccucccccuacaacagccgguucgagagcguggccugguccgcgagcgccugccacgacgggaucaacuggcucaccaucggcaucuccggccccgacaacggggccguggccguccugaaguacaacggcaucaucaccgacaccaucaagagcuggcgcaacaacauccugcggacgcaggaguccgagugcgcgugcgugaacgggagcugcuucaccgugaugaccgacggcccguccgacggccaggccagcuacaagaucuuccgcaucgagaaggggaagaucgucaaguccguggagaugaacgcccccaacuaccacuacgaggagugcagcugcuaccccgacuccagcgagaucacgugcgugugccgggacaacuggcacggcuccaaccgccccugggucagcuucaaccagaaccucgaguaccagaucggguacaucugcuccggcaucuucggggacaacccgcggcccaacgacaagaccggcagcugcggccccguguccagcaacggggccaacggcgugaagggguucuccuucaaguacggcaacggggucuggaucggccgcaccaagagcaucagcucccggaacggcuucgagaugaucugggaccccaacggguggaccggcaccgacaacaucuucagcaucaagcaggacaucguggggaucaacgagugguccggcuacagcggguccuucgugcagcacccggagcugacgggccuggacugcauccgccccugcuucugggucgagcucauccggggccgccccaaggagaacaccaucuggaccagcggguccagcaucuccuucugcggcgugaacagcgacaccgucgggugguccuggcccgacggcgccgagcugccguucacgaucgacaaguga

SEQ ID NO: 82263 - RNA, 1410 nt, Artificial Sequence; identical to SEQ ID NO: 80762
  derived and/or modified CDS sequence (opt1) from neuraminidase__InfluenzaA__ADD74451

SEQ ID NO: 82264 - RNA, 1410 nt, Artificial Sequence; identical to SEQ ID NO: 80762
  derived and/or modified CDS sequence (opt1) from neuraminidase__InfluenzaA__ADD74461

SEQ ID NO: 82265 - RNA, 1410 nt, Artificial Sequence; identical to SEQ ID NO: 80762
  derived and/or modified CDS sequence (opt1) from neuraminidase__InfluenzaA__ADD74471

SEQ ID NO: 82266 - RNA, 1410 nt, Artificial Sequence; identical to SEQ ID NO: 80762
  derived and/or modified CDS sequence (opt1) from neuraminidase__InfluenzaA__ADD74481

SEQ ID NO: 82267 - RNA, 1410 nt, Artificial Sequence; identical to SEQ ID NO: 81779
  derived and/or modified CDS sequence (opt1) from neuraminidase__InfluenzaA__ADD74491

SEQ ID NO: 82268 - RNA, 1410 nt, Artificial Sequence; identical to SEQ ID NO: 80762
  derived and/or modified CDS sequence (opt1) from neuraminidase__InfluenzaA__ADD74501

SEQ ID NO: 82269 - RNA, 1410 nt, Artificial Sequence; identical to SEQ ID NO: 80762
  derived and/or modified CDS sequence (opt1) from neuraminidase__InfluenzaA__ADD74511

SEQ ID NO: 82270 - RNA, 1410 nt, Artificial Sequence; identical to SEQ ID NO: 81780
  derived and/or modified CDS sequence (opt1) from neuraminidase__InfluenzaA__ADD74521

SEQ ID NO: 82271 - RNA, 1410 nt, Artificial Sequence; identical to SEQ ID NO: 80762
  derived and/or modified CDS sequence (opt1) from neuraminidase__InfluenzaA__ADD74531

SEQ ID NO: 82272 - RNA, 1410 nt, Artificial Sequence
  derived and/or modified CDS sequence (opt1) from neuraminidase__InfluenzaA__ADD74551
augaaccccaaccagaagaucaucaccaucggcagcgugugcaugaccaucgggauggccaaccugauccuccagaucggcaacaucaucuccaucuggaucagccacuccauccagcuggggaaccagaaccagaucgagacgugcaaccagagcgucaucaccuacgagaacaacaccugggugaaccagaccuacgugaacaucuccaacacgaacuucgccgcgggccagagcgucguguccgugaagcuggccgggaacagcucccucugcccggucagcggcugggccaucuacuccaaggacaacagcgugcgcaucggcuccaagggggacguguucgucauccgggagcccuucaucagcugcagcccccuggagugccgcaccuucuuccugacccagggcgcccuccugaacgacaagcacuccaacgggaccaucaaggaccggucccccuaccgcacgcugaugagcugcccgaucggcgaggugcccucccccuacaacagccgguucgagagcguggccugguccgcgagcgccugccacgacgggaucaacuggcucaccaucggcaucuccggccccgacuacggggccgucgccgugcugaaguacaacggcaucaucaccgacaccaucaagagcuggcgcaacaacauccugcggacgcaggaguccgagugcgcgugcgugaacgggagcugcuucaccgucaugaccgacggcccguccgacggccaggccagcuacaagaucuuccgcaucgagaaggggaagaucgugaaguccguggagaugaacgcccccaacuaccacuacgaggagugcagcugcuaccccgacuccagcgagaucacgugcgucugccgggacaacuggcacggcuccaaccgccccugggugagcuucaaccagaaccucgaguaccagaucggguacaucugcuccggcaucuucggggacaacccgcggcccaacgacaagaccggcagcugcggccccguguccagcaacggggccaacggcgucaagggguucuccuucaaguacggcaacgggguguggaucggccgcaccaagagcaucagcucccggaacggcuucgagaugaucugggaccccaacggguggaccggcaccgacaacaacuucagcaucaagcaggacaucguggggaucaacgagugguccggcuacagcggguccuucguccagcacccggagcugacgggccuggacugcauccgccccugcuucuggguggagcucauccggggccgccccaaggagaacaccaucuggaccagcggguccagcaucuccuucugcggcgucaacagcgacaccguggggugguccuggcccgacggcgccgagcugccguucacgaucgacaaguga

SEQ ID NO: 82273 - RNA, 1410 nt, Artificial Sequence; identical to SEQ ID NO: 80762
  derived and/or modified CDS sequence (opt1) from neuraminidase__InfluenzaA__ADD74561

SEQ ID NO: 82274 - RNA, 1410 nt, Artificial Sequence; identical to SEQ ID NO: 80762
  derived and/or modified CDS sequence (opt1) from neuraminidase__InfluenzaA__ADD74571

SEQ ID NO: 82275 - RNA, 1410 nt, Artificial Sequence
  derived and/or modified CDS sequence (opt1) from neuraminidase__InfluenzaA__ADD74581
augaaccccaaccagaagaucaucaccaucggcagcgugugcaugaccaucgggauggccaaccugauccuccagaucggcaacaucaucuccaucuggaucagccacuccauccagcuggggaaccagaaccagaucgagacgugcaaccagagcgucaucaccuacgagaacaacaccugggugaaccagaccuacgugaacaucuccaacacgaacuucgccgcgggccagagcgucguguccgugaagcuggccgggaacagcucccucugcccggucagcggcugggccaucuacuccaaggacaacagcauccgcaucggcuccaagggggacguguucgugauccgggagcccuucaucagcugcagcccccuggagugccgcaccuucuuccugacccagggcgcccuccugaacgacaagcacuccaacgggaccaucaaggaccggucccccuaccgcacgcugaugagcugcccgaucggcgagguccccucccccuacaacagccgguucgagagcguggccugguccgcgagcgccugccacgacgggaucaacuggcucaccaucggcaucuccggccccgacaacggggccguggccguccugaaguacaacggcaucaucaccgacaccaucaagagcuggcgcaacaacauccugcggacgcaggaguccgagugcgcgugcgugaacgggagcugcuucaccgugaugaccgacggcccguccgacggccaggccagcuacaagaucuuccgcaucgagaaggggaagaucgucaaguccguggagaugaacgcccccaacuaccacuacgaggagugcagcugcuaccccgacuccagcgagaucacgugcgugugccgggacaacuggcacggcuccaaccgccccugggucagcuucaaccagaaccucgaguaccagaucggguacaucugcuccggcaucuucggggacaacccgcggcccaacgacaagaccggcagcugcggccccguguccagcaacggggccaacggcgugaagggguucuccuucaaguacggcaacggggucuggaucggccgcaccaagagcaucagcucccggaacggcuucgagaugaucugggaccccaacggguggaccggcaccgacaacaacuucagcaucaagcaggacaucguggggaucaacgagugguccggcuacagcggguccuucgugcagcacccggagcugacgggccuggacugcauccgccccugcuucugggucgagcucauccggggccgccccaaggagaacaccaucuggaccagcggguccagcaucuccuucugcggcgugaacagcgacgccgucgggugguccuggcccgacggcgcggagcugccguucaccaucgacaaguga

SEQ ID NO: 82276 - RNA, 1410 nt, Artificial Sequence; identical to SEQ ID NO: 80762
  derived and/or modified CDS sequence (opt1) from neuraminidase__InfluenzaA__ADD74591

SEQ ID NO: 82277 - RNA, 1410 nt, Artificial Sequence; identical to SEQ ID NO: 80762
  derived and/or modified CDS sequence (opt1) from neuraminidase__InfluenzaA__ADD74601

SEQ ID NO: 82278 - RNA, 1410 nt, Artificial Sequence
  derived and/or modified CDS sequence (opt1) from neuraminidase__InfluenzaA__ADD74611
augaaccccaaccagaagaucaucaccaucggcagcgugugcaugaccaucgggauggccaaccugauccuccagaucggcaacaucaucuccaucuggaucagccacuccauccagcuggggaaccagaaccagaucgagacgugcaaccagagcgucaucaccuacgagaacaacaccugggugaaccagaccuacgugaacaucuccaacacgaacuucgccgcgggccagagcgucguguccgugaagcuggccgggaacagcucccucugcccggucagcggcugggccaucuacuccaaggacaacagcauccgcaucggcuccaagggggacguguucgugauccgggagcccuucaucagcugcagcccccuggagugccgcaccuucuuccugacccagggcgcccuccugaacgacaagcacuccaacgggaccaucaaggaccggucccccuaccgcacgcugaugagcugcccgaucggcgagguccccucccccuacaacagccgguucgagagcguggccugguccgcgagcgccugccacgacgggaucaacuggcucaccaucggcaucuccggccccgacaacggggccguggccguccugaaguacaacggcaucaucaccgacaccaucaagagcuggcgcaacaacauccugcggacgcaggaguccgagugcgcgugcgugaacgggagcugcuucaccgugaugaccgacggcccguccgacggccaggccagcuacaagaucuuccgcaucgagaaggggaagaucgucaaguccguggagaugaacgcccccaacuaccacuacgaggagugcagcugcuaccccgacuccagcgagaucacgugcgugugccgggacaacuggcacggcuccaaccgccccugggucagcuucaaccagaaccucgaguaccagaucggguacaucugcuccggcaucuucggggacaacccgcggcccaacgacaagaccggcagcugcggccccguguccagcaacggggccaacggcaucaagggguucuccuucaaguacggcaacgggguguggaucggccgcaccaagagcaucagcucccggaacggcuucgagaugaucugggaccccaacggguggaccggcaccgacaacaacuucagcaucaagcaggacaucgucgggaucaacgagugguccggcuacagcggguccuucgugcagcacccggagcugacgggccuggacugcauccgccccugcuucuggguggagcucauccggggccgccccaaggagaacaccaucuggaccagcggguccagcaucuccuucugcggcgucaacagcgacaccguggggugguccuggcccgacggcgccgagcugccguucacgaucgacaaguga

SEQ ID NO: 82279 - RNA, 1410 nt, Artificial Sequence; identical to SEQ ID NO: 80762
  derived and/or modified CDS sequence (opt1) from neuraminidase__InfluenzaA__ADD74621

SEQ ID NO: 82280 - RNA, 1410 nt, Artificial Sequence; identical to SEQ ID NO: 80762
  derived and/or modified CDS sequence (opt1) from neuraminidase__InfluenzaA__ADD74631

SEQ ID NO: 82281 - RNA, 1410 nt, Artificial Sequence; identical to SEQ ID NO: 80762
  derived and/or modified CDS sequence (opt1) from neuraminidase__InfluenzaA__ADD74641

SEQ ID NO: 82282 - RNA, 1410 nt, Artificial Sequence; identical to SEQ ID NO: 80762
  derived and/or modified CDS sequence (opt1) from neuraminidase__InfluenzaA__ADD74651

SEQ ID NO: 82283 - RNA, 1410 nt, Artificial Sequence; identical to SEQ ID NO: 82113
  derived and/or modified CDS sequence (opt1) from neuraminidase__InfluenzaA__ADD74661

SEQ ID NO: 82284 - RNA, 1410 nt, Artificial Sequence; identical to SEQ ID NO: 80762
  derived and/or modified CDS sequence (opt1) from neuraminidase__InfluenzaA__ADD74671

SEQ ID NO: 82285 - RNA, 1410 nt, Artificial Sequence; identical to SEQ ID NO: 80762
  derived and/or modified CDS sequence (opt1) from neuraminidase__InfluenzaA__ADD74681

SEQ ID NO: 82286 - RNA, 1410 nt, Artificial Sequence
  derived and/or modified CDS sequence (opt1) from neuraminidase__InfluenzaA__ADD74691
augaaccccaaccagaagaucaucaccaucggcagcgugugcaugaccaucgggauggccaaccugauccuccagaucggcaacaucaucuccaucuggaucugccacagcauccagcuggggaaccagaaccagaucgagacgugcaaccaguccgucaucaccuacgagaacaacaccugggugaaccagaccuacgugaacaucagcaacacgaacuucgccgcgggccaguccgucgugagcgugaagcuggccgggaacuccagccucugcccggucuccggcugggccaucuacagcaaggacaacuccauccgcaucggcagcaagggggacguguucgugauccgggagcccuucaucuccugcagcccccuggagugccgcaccuucuuccugacccagggcgcccuccugaacgacaagcacuccaacgggaccaucaaggaccggagccccuaccgcacgcugauguccugcccgaucggcgagguccccagccccuacaacucccgguucgagagcguggccuggagcgcguccgccugccacgacgggaucaacuggcucaccaucggcaucagcggccccgacaacggggccguggccguccugaaguacaacggcaucaucaccgacaccaucaaguccuggcgcaacaacauccugcggacgcaggagagcgagugcgcgugcgugaacggguccugcuucaccgugaugaccgacggcccgagcgacggccaggccuccuacaagaucuuccgcaucgagaaggggaagaucgucaagagcguggagaugaacgcccccaacuaccacuacgaggagugcuccugcuaccccgacagcuccgagaucacgugcgugugccgggacaacuggcacggcagcaaccgccccugggucuccuucaaccagaaccucgaguaccagaucggguacaucugcagcggcaucuucggggacaacccgcggcccaacgacaagaccggcuccugcggccccgugagcuccaacggggccaacggcgugaagggguucagcuucaaguacggcaacggggucuggaucggccgcaccaaguccaucagcagccggaacggcuucgagaugaucugggaccccaacggguggaccggcaccgacaacaacuucuccaucaagcaggacaucguggggaucaacgaguggagcggcuacuccgggagcuucgugcagcacccggagcugacgggccuggacugcauccgccccugcuucugggucgagcucauccggggccgccccaaggagaacaccaucuggaccuccgggagcuccaucagcuucugcggcgugaacuccgacaccgucggguggagcuggcccgacggcgccgagcugccguucacgaucgacaaguga

SEQ ID NO: 82287 - RNA, 1410 nt, Artificial Sequence; identical to SEQ ID NO: 80762
  derived and/or modified CDS sequence (opt1) from neuraminidase__InfluenzaA__ADD74701

SEQ ID NO: 82288 - RNA, 1410 nt, Artificial Sequence; identical to SEQ ID NO: 80762
  derived and/or modified CDS sequence (opt1) from neuraminidase__InfluenzaA__ADD74711

SEQ ID NO: 82289 - RNA, 1410 nt, Artificial Sequence; identical to SEQ ID NO: 80762
  derived and/or modified CDS sequence (opt1) from neuraminidase__InfluenzaA__ADD74721

SEQ ID NO: 82290 - RNA, 1410 nt, Artificial Sequence; identical to SEQ ID NO: 80762
  derived and/or modified CDS sequence (opt1) from neuraminidase__InfluenzaA__ADD74731

SEQ ID NO: 82291 - RNA, 1410 nt, Artificial Sequence
  derived and/or modified CDS sequence (opt1) from neuraminidase__InfluenzaA__ADD74741
augaaccccaaccagaagaucaucaccaucggcagcgugugcaucaccaucgggauggccaaccugauccuccagaucggcaacaucaucuccaucuggaucagccacuccauccagcuggggaaccagaaccagaucgagacgugcaaccagagcgucaucaccuacgagaacaacaccugggugaaccagaccuacgugaacaucuccaacacgaacuucgccgcgggccagagcgucguguccgugaagcuggccgggagcuccagccucugcccggucuccggcugggccaucuacagcaaggacaacuccauccgcaucggcagcaagggggacguguucgugauccgggagcccuucaucuccugcagcccccuggagugccgcaccuucuuccugacccagggcgcccuccugaacgacaagcacuccaacgggaccaucaaggaccggagccccuaccgcacgcugauguccugcccgaucggcgagguccccagccccuacaacagccgguucgaguccguggccuggagcgcguccgccugccacgacgggaucaacuggcucaccaucggcaucagcggccccgacaacggggccguggccguccugaaguacaacggcaucaucaccgacaccaucaaguccuggcgcaacaacauccugcggacgcaggagagcgagugcgcgugcgugaacggguccugcuucaccgugaugaccgacggcccgagcgacggccaggccuccuacaagaucuuccgcaucgagaaggggaagaucgucaagagcguggagaugaacgcccccaacuaccacuacgaggagugcuccugcuaccccgacagcuccgagaucacgugcgugugccgggacaacuggcacggcagcaaccgccccugggucuccuucaaccagaaccucgaguaccagaucggguacaucugcagcggcaucuucggggacaacccgcggcccaacgacaagaagggcuccugcggccccgugagcuccaacggggccaacggcgugaagggguucagcuucaaguacggcaacggggucuggaucggccgcaccaagagcaucuccagccggaacggcuucgagaugaucugggaccccaacggguggaccggcaccgacaacaacuucuccaucaagcaggacaucguggggaucaacgaguggagcggcuacuccgggagcuucgugcagcacccggagcugaccggccuggacugcauccgccccugcuucugggucgagcucauccggggccgccccaaggagaacacgaucuggaccuccgggagcuccaucagcuucugcggcgugaacuccgacaccgucggguggagcuggcccgacggcgccgagcugccguucaccaucgacaaguga

SEQ ID NO: 82292 - RNA, 1410 nt, Artificial Sequence
  derived and/or modified CDS sequence (opt1) from neuraminidase__InfluenzaA__ADD74751
augaaccccaaccagaagaucaucaccaucggcagcgugugcaugaccaucgggauggccaaccugauccuccagaucggcaacaucaucuccaucuggaucagccacuccauccagcuggggaacaagaaccagaucgagacgugcaaccagagcgucaucaccuacgagaacaacaccugggugaaccagaccuacgugaacaucuccaacacgaacuucgccgcgggccagagcgucguguccgugaagcuggccgggaacagcucccucugcccggucagcggcugggccaucuacuccaaggacaacagcauccgcaucggcuccaagggggacguguucgugauccgggagcccuucaucagcugcagcccccuggagugccgcaccuucuuccugacccagggcgcccuccugaacgacaagcacuccaacgggaccaucaaggaccggucccccuaccgcacgcugaugagcugcccgaucggcgagguccccucccccuacaacagccgguucgagagcguggccugguccgcgagcgccugccacgacgggaucaacuggcucaccaucggcaucuccggccccgacaacggggccguggccguccugaaguacaacggcaucaucaccgacaccaucaagagcuggcgcaacaacauccugcggacgcaggaguccgagugcgcgugcgugaacgggagcugcuucaccgugaugaccgacggcccguccgacggccaggccagcuacaagaucuuccgcaucgagaaggggaagaucgucaaguccguggagaugaacgcccccaacuaccacuacgaggagugcagcugcuaccccgacuccagcgagaucacgugcgugugccgggacaacuggcacggcuccaaccgccccugggucagcuucaaccagaaccucaaguaccagaucggguacaucugcuccggcaucuucggggacaacccgcggcccaacgacaagaagggcagcugcggccccguguccagcaacggggccaacggcgugaagggguucuccuucaaguacggcaacggggucuggaucggccgcaccaagagcaucagcucccggaacggcuucgagaugaucugggaccccaacggguggaccggcaccgacaacaacuucagcaucaagcaggacaucguggggaugaacgagugguccggcuacagcggguccuucgugcagcacccggagcugaccggccuggacugcauccgccccugcuucugggucgagcucauccggggccgccccaaggagaacacgaucuggaccagcggguccagcaucuccuucugcggcgugaacagcgacaccgucgggugguccuggcccgacggcgccgagcugccguucaccaucgacaaguga

SEQ ID NO: 82293 - RNA, 1410 nt, Artificial Sequence
  derived and/or modified CDS sequence (opt1) from neuraminidase__InfluenzaA__ADD74761
augaaccccaaccagaagaucaucaccaucggcagcgugugcaugaccaucgggauggccaaccugauccuccagaucggcaacaucaucuccaucuggaucagccacuccauccagcuggggaaccagaaccagaucgagacgugcaaccagagcgucaucaccuacgagaacaacaccugggugaaccagaccuacgugaacaucuccaacacgaacuucgccgcgggccagagcgucguguccgugaagcuggccgggaacagcucccucugcccggucagcggcugggccaucuacuccaaggacaacagcauccgcaucggcuccaagggggacguguucgugauccgggagcccuucaucagcugcagcccccuggagugccgcaccuucuuccugacccagggcgcccuccugaacgacaagcacuccaacgggaccaucaaggaccggucccccuaccgcacgcugaugagcugcccgaucggcgagguccccucccccuacaacagccgguucgagagcguggccugguccgcgagcgccugccacgacgggaucaacuggcucaccaucggcaucuccggccccgacaacggggccguggccguccugaaguacaacggcaucaucaccgacaccaucaagagcuggcgcaacaacauccugcggacgcaggaguccgagugcgcgugcgugaacgggagcugcuucaccgugaugaccgacggcccguccgacggccaggccagcuacaagaucuuccgcaucgagaaggggaagaucgucaaguccguggagaugaacgcccccaacuaccacuacgaggagugcagcugcuaccccgacuccagcgagaucacgugcgugugccgggacaacuggcacggcuccaaccgccccugggucagcuucaaccagaaccucgaguaccagaucggguacaucugcuccggcaucuucggggacaacccgcggcccaacgacaagaccggcagcugcggccccguguccagcaacggggccaacggcgugaagggguucuccuucaaguacggcaacggggucuggaucggccgcaccaagagcaucagcucccggaacggcuucgagaugaucugggaccccaacggguggaccggcaccgacaacaacuucagcaucaagcaggacaucguggggaucaacgagugguccggcuacagcggguccuucgugcagcacccggagcugacgggccuggacugcauccgccccugcuucugggucgagcucauccggggccgccccaaggagaacaccaucuggaccagcggguccagcaucuccuucugcggcaucaacagcgacaccguggggugguccuggcccgacggcgccgagcugccguucacgaucgacaaguga

SEQ ID NO: 82294 - RNA, 1410 nt, Artificial Sequence; identical to SEQ ID NO: 80762
  derived and/or modified CDS sequence (opt1) from neuraminidase__InfluenzaA__ADD74791

SEQ ID NO: 82295 - RNA, 1410 nt, Artificial Sequence; identical to SEQ ID NO: 81345
  derived and/or modified CDS sequence (opt1) from neuraminidase__InfluenzaA__ADD74811

SEQ ID NO: 82296 - RNA, 1410 nt, Artificial Sequence; identical to SEQ ID NO: 80762
  derived and/or modified CDS sequence (opt1) from neuraminidase__InfluenzaA__ADD74821

SEQ ID NO: 82297 - RNA, 1410 nt, Artificial Sequence
  derived and/or modified CDS sequence (opt1) from neuraminidase__InfluenzaA__ADD74831
augaaccccaaccagaagaucaucaccaucggcagcaucugcaugaccaucgggauggccaaccugauccuccagaucggcaacaucaucuccaucuggaucagccacuccauccagcuggggaaccagaaccagaucgagacgugcaaccagagcgugaucaccuacgagaacaacaccugggucaaccagaccuacgugaacaucuccaacacgaacuucgccgcgggccagagcguggucuccgugaagcuggccgggaacagcucccucugcccggugagcggcugggccaucuacuccaaggacaacagcauccgcaucggcuccaagggggacgucuucgugauccgggagcccuucaucagcugcagcccccuggagugccgcaccuucuuccugacccagggcgcccuccugaacgacaagcacuccaacgggaccaucaaggaccggucccccuaccgcacgcugaugagcugcccgaucggcgaggugcccucccccuacaacagccgguucgagagcgucgccugguccgcgagcgccugccacgacgggaucaacuggcucaccaucggcaucuccggccccgacaacggggccguggccgugcugaaguacaacggcaucaucaccgacaccaucaagagcuggcgcaacaacauccugcggacgcaggaguccgagugcgcgugccucaacgggagcugcuucaccgucaugaccgacggcccguccgacggccaggccagcuacaagaucuuccgcaucgagaaggggaagaucgugaaguccguggagaugaacgcccccaacuaccacuacgaggagugcagcugcuaccccgacuccagcgagaucacgugcgucugccgggacaacuggcacggcuccaaccgccccugggugagcuucaaccagaaccuggaguaccagaucggguacaucugcuccggcaucuucggggacaacccgcggcccaacgacaagaccggcagcugcggccccguguccagcaacggggccaacggcgucaagggguucuccuucaaguacggcaacgggguguggaucggccgcaccaagagcaucagcucccggaacggcuucgagaugaucugggaccccaacggguggaccggcaccgacaacaacuucagcaucaagcaggacaucguggggaucaacgagugguccggcuacagcggguccuucguccagcacccggagcugacgggccucgacugcauccgccccugcuucuggguggagcugauccggggccgccccaaggagaacaccaucuggaccagcggguccagcaucuccuucugcggcgugaacagcgacaccgucgggugguccuggcccgacggcgccgagcugccguucacgaucgacaaguga

SEQ ID NO: 82298 - RNA, 1410 nt, Artificial Sequence; identical to SEQ ID NO: 80762
  derived and/or modified CDS sequence (opt1) from neuraminidase__InfluenzaA__ADD74841

SEQ ID NO: 82299 - RNA, 1410 nt, Artificial Sequence; identical to SEQ ID NO: 80762
  derived and/or modified CDS sequence (opt1) from neuraminidase__InfluenzaA__ADD74851

SEQ ID NO: 82300 - RNA, 1410 nt, Artificial Sequence; identical to SEQ ID NO: 81869
  derived and/or modified CDS sequence (opt1) from neuraminidase__InfluenzaA__ADD74861

SEQ ID NO: 82301 - RNA, 1410 nt, Artificial Sequence; identical to SEQ ID NO: 80762
  derived and/or modified CDS sequence (opt1) from neuraminidase__InfluenzaA__ADD74871

SEQ ID NO: 82302 - RNA, 1410 nt, Artificial Sequence; identical to SEQ ID NO: 80762
  derived and/or modified CDS sequence (opt1) from neuraminidase__InfluenzaA__ADD74881

SEQ ID NO: 82303 - RNA, 1410 nt, Artificial Sequence; identical to SEQ ID NO: 80762
  derived and/or modified CDS sequence (opt1) from neuraminidase__InfluenzaA__ADD74891

SEQ ID NO: 82304 - RNA, 1410 nt, Artificial Sequence; identical to SEQ ID NO: 80762
  derived and/or modified CDS sequence (opt1) from neuraminidase__InfluenzaA__ADD74901

SEQ ID NO: 82305 - RNA, 1410 nt, Artificial Sequence; identical to SEQ ID NO: 80762
  derived and/or modified CDS sequence (opt1) from neuraminidase__InfluenzaA__ADD74911

SEQ ID NO: 82306 - RNA, 1410 nt, Artificial Sequence; identical to SEQ ID NO: 80762
  derived and/or modified CDS sequence (opt1) from neuraminidase__InfluenzaA__ADD74921

SEQ ID NO: 82307 - RNA, 1410 nt, Artificial Sequence; identical to SEQ ID NO: 80762
  derived and/or modified CDS sequence (opt1) from neuraminidase__InfluenzaA__ADD74941

SEQ ID NO: 82308 - RNA, 1410 nt, Artificial Sequence
  derived and/or modified CDS sequence (opt1) from neuraminidase__InfluenzaA__ADD74961
augaaccccaaccagaagaucaucaccaucggcagcgugugcaugaccaucgggauggccaaccugauccuccagaucggcaacaucaucuccaucuggaucagccacuccauccagcuggggaaccagaaccagaucggcacgugcaaccagagcgucaucaccuacgagaacaacaccugggugaaccacaccuacgugaacaucuccaacacgaacuucgccgcggggcagagcgucguguccgugaagcuggccggcaacagcucccucugcccggucagcggcugggccaucuacuccaaggacaacagcgugcgcaucggguccaagggcgacguguucgucauccgggagcccuucaucagcugcagcccccuggagugccgcaccuucuuccugacccagggggcccuccugaacgacaagcacuccaacggcaccaucaaggaccggucccccuaccgcacgcugaugagcugcccgaucggggaggugcccucccccuacaacagccgguucgagagcguggccugguccgcgagcgccugccacgacggcaucaacuggcucaccaucggcaucuccgggcccgacaacggcgccgucgccgugcugaaguacaacgggaucaucaccgacaccaucaagagcuggcgcaacaacauccugcggacgcaggaguccgagugcgcgugcgugaacggcagcugcuucaccgucaugaccgacggcccguccgacgggcaggccagcuacaagaucuuccgcaucgagaagggcaagaucgugaaguccguggagaugaacgcccccaacuaccacuacgaggagugcagcugcuaccccgacuccagcgagaucacgugcgucugccgggacaacuggcacggguccaaccgccccugggugagcuucaaccagaaccucgaguaccagaucggcuacaucugcuccgggaucuucggcgacaacccgcggcccaacgacaagaccggcagcugcgggcccguguccagcaacggcgccaacggggucaagggcuucuccuucaaguacgggaacggcguguggaucggccgcaccaagagcaucagcucccggaacggguucgagaugaucugggaccccaacggcuggaccgggaccgacaacaacuucagcaucaagcaggacaucgugggcaucaacgagugguccggguacagcggcuccuucguccagcacccggagcugacgggccuggacugcauccgccccugcuucuggguggagcucauccgggggcgccccaaggagaacaccaucuggaccagcggcuccagcaucuccuucugcggggucaacagcgacaccgugggcugguccuggcccgacggcgccgagcugccguucacgaucgacaaguga

SEQ ID NO: 82309 - RNA, 1410 nt, Artificial Sequence; identical to SEQ ID NO: 80762
  derived and/or modified CDS sequence (opt1) from neuraminidase__InfluenzaA__ADD74971

SEQ ID NO: 82310 - RNA, 1410 nt, Artificial Sequence
  derived and/or modified CDS sequence (opt1) from neuraminidase__InfluenzaA__ADD74981
augaaccccaaccagaagaucaucaccaucggcagcgugugcaugaccaucgggauggccaaccugauccuccagaucggcaacaucaucuccaucuggaucagccacuccauccagcuggggaaccagaaccagaucgagacgugcaaccagagcaucaucaccuacgagaacaacaccugggucaaccagaccuacgugaacaucuccaacacgaacuucgccgcgggccagagcguggucuccgugaagcuggccgggaacagcucccucugcccggugagcggcugggccaucuacuccaaggacaacagcauccgcaucggcuccaagggggacgucuucgugauccgggagcccuucaucagcugcagcccccuggagugccgcaccuucuuccugacccagggcgcccuccugaacgacaagcacuccaacgggaccaucaaggaccggucccccuaccgcacgcugaugagcugcccgaucggcgaggugcccucccccuacaacagccgguucgagagcgucgccugguccgcgagcgccugccacgacgggaucaacuggcucaccaucggcaucuccggccccgacaacggggccguggccgugcugaaguacaacggcaucaucaccgacaccaucaagagcuggcgcaacaacauccugcggacgcaggaguccgagugcgcgugcgucaacgggagcugcuucaccgugaugaccgacggcccguccgacggccaggccagcuacaagaucuuccgcaucgagaaggggaagaucgugaaguccgucgagaugaacgcccccaacuaccacuacgaggagugcagcugcuaccccgacuccagcgagaucacgugcgugugccgggacaacuggcacggcuccaaccgccccugggugagcuucaaccagaaccucgaguaccagaucggguacaucugcuccggcaucuucggggacaacccgcggcccaacgacaagaccggcagcugcggccccgucuccagcaacggggccaacggcgugaagggguucuccuucaaguacggcaacgggguguggaucggccgcaccaagagcaucagcucccggagcggcuucgagaugaucugggaccccaacggguggaccggcaccgacaacaacuucuccaucaagcaggacaucgucgggaucaacgaguggagcggcuacuccgggagcuucgugcagcacccggagcugacgggccuggacugcauccgccccugcuucuggguggagcucauccggggccgccccgaggagaacaccaucuggaccuccgggagcuccaucagcuucugcggcgucaacuccgacaccgugggguggagcuggcccgacggcgccgagcugccguucacgaucgacaaguga

SEQ ID NO: 82311 - RNA, 1410 nt, Artificial Sequence; identical to SEQ ID NO: 80762
  derived and/or modified CDS sequence (opt1) from neuraminidase__InfluenzaA__ADD74991

SEQ ID NO: 82312 - RNA, 1410 nt, Artificial Sequence; identical to SEQ ID NO: 80762
  derived and/or modified CDS sequence (opt1) from neuraminidase__InfluenzaA__ADD75001

SEQ ID NO: 82313 - RNA, 1410 nt, Artificial Sequence
  derived and/or modified CDS sequence (opt1) from neuraminidase__InfluenzaA__ADD75011
augaaccccaaccagaagaucaucaccaucggcagcgugugcaugaccaucgggauggccaaccugauccuccagaucggcaacaucaucuccaucuggaucagccacuccauccagcuggggaaccagaaccagaucgagacgugcaaccagagcgucaucaccuacgagaacaacaccugggugaaccagaccuacgugaacaucuccaacacgaacuucgccgcgggccagagcgucguguccgugaagcuggccgggaacagcucccucugcccggucagcggcugggccaucuacuccaaggacaacagcauccgcaucggcuccaagggggacguguucgugauccgggagcccuucaucagcugcagcccccuggagugccgcaccuucuuccugacccagggcgcccuccugaacgacaagcacuccaacgggaccaucaaggaccggucccccuaccgcacgcugaugagcugcccgaucggcgagguccccucccccuacaacagccgguucgagagcguggccugguccgcgagcgccugccacgacgggaucaacuggcucaccaucggcaucuccggccccgacaacggggccguggccguccugaaguacaacggcaucaucaccgacaccaucaagagcuggcgcaacaacauccugcggacgcaggaguccgagugcgcgugcgugaacgggagcugcuucaccgugaugaccgacggcccguccgacggccaggccagcuacaagaucuuccgcaucgagaaggggaagaucgucaaguccguggagaugaacgcccccaacuaccacuacgaggagugcagcugcuaccccgacuccagcgagaucacgugcgugugccgggacaacuggcacggcuccaaccgccccugggucagcuucaaccagaaccucgaguaccagaucggguacaucugcuccggcaucuucggggacaacccgcggcccaacgacaagaccggcagcugcgaccccguguccagcaacggcgccaacggggugaagggcuucuccuucaaguacgggaacggcgucuggaucgggcgcaccaagagcaucagcucccggaacggcuucgagaugaucugggaccccaacggcuggaccgggaccgacaacaacuucagcaucaagcaggacaucgugggcaucaacgagugguccggguacagcggcuccuucgugcagcacccggagcugacggggcuggacugcauccgccccugcuucugggucgagcucauccggggccgccccaaggagaacaccaucuggaccagcggcuccagcaucuccuucugcggggugaacagcgacaccgucggcugguccuggcccgacggggccgagcugccguucacgaucgacaaguga

SEQ ID NO: 82314 - RNA, 1410 nt, Artificial Sequence; identical to SEQ ID NO: 82050
  derived and/or modified CDS sequence (opt1) from neuraminidase__InfluenzaA__ADD75031

SEQ ID NO: 82315 - RNA, 1410 nt, Artificial Sequence
  derived and/or modified CDS sequence (opt1) from neuraminidase__InfluenzaA__ADD75041
augaaccccaaccagaagaucaucaccaucggcagcgugugcaugaccaucgggauggccaaccugauccuccagaucggcaacaucaucuccaucuggaucagccacuccauccagcuggggaaccagaaccagaucgagacgugcaaccagagcgucaucaccuacgagaacaagaccugggugaaccagaccuacgugaacaucuccaacacgaacuucgccgcgggccagagcgucguguccgugaagcuggccgggaacagcucccucugcccggucagcggcugggccaucuacuccaaggacaacagcauccgcaucggcuccaagggggacguguucgugauccgggagcccuucaucagcugcagcccccuggagugccgcaccuucuuccugacccagggcgcccuccugaacgacaagcacuccaacgggaccaucaaggaccggucccccuaccgcacgcugaugagcugcccgaucggcgagguccccucccccuacaacagccgguucgagagcguggccugguccgcgagcgccugccacgacgggaucaacuggcucaccaucggcaucuccggccccgacaacggggccguggccguccugaaguacaacggcaucaucaccgacaccaucaagagcuggcgcaacaacauccugcggacgcaggaguccgagugcgcgugcgugaacgggagcugcuucaccgugaugaccgacggcccguccgacggccaggccagcuacaagaucuuccgcaucgagaaggggaagaucgucaaguccguggagaugaacgcccccaacuaccacuacgaggagugcagcugcuaccccgacuccagcgagaucacgugcgugugccgggacaacuggcacggcuccaaccgccccugggucagcuucaaccagaaccucgaguaccagaucggguacaucugcuccggcaucuucggggacaacccgcggcccaacgacaagaccggcagcugcggccccguguccagcaacggggccaacggcgugaagggguucuccuucaaguacggcaacggggucuggaucggccgcaccaagagcaucagcucccggaacggcuucgagaugaucugggaccccaacggguggaccggcaccgacaacaacuucagcaucaagcaggacaucguggggaucaacgagugguccggcuacagcggguccuucgugcagcacccggagcugacgggccuggacugcauccgccccugcuucugggucgagcucauccggggccgccccaaggagaacaccaucuggaccagcggguccagcaucuccuucugcggcgugaacagcgacaccgucgggugguccuggcccgacggcgccgagcugccguucacgaucgacaaguga

SEQ ID NO: 82316 - RNA, 1410 nt, Artificial Sequence; identical to SEQ ID NO: 80762
  derived and/or modified CDS sequence (opt1) from neuraminidase__InfluenzaA__ADD75051

SEQ ID NO: 82317 - RNA, 1410 nt, Artificial Sequence; identical to SEQ ID NO: 80762
  derived and/or modified CDS sequence (opt1) from neuraminidase__InfluenzaA__ADD75061

SEQ ID NO: 82318 - RNA, 1410 nt, Artificial Sequence; identical to SEQ ID NO: 80762
  derived and/or modified CDS sequence (opt1) from neuraminidase__InfluenzaA__ADD75071

SEQ ID NO: 82319 - RNA, 1410 nt, Artificial Sequence; identical to SEQ ID NO: 80762
  derived and/or modified CDS sequence (opt1) from neuraminidase__InfluenzaA__ADD75081

SEQ ID NO: 82320 - RNA, 1410 nt, Artificial Sequence
  derived and/or modified CDS sequence (opt1) from neuraminidase__InfluenzaA__ADD75091
augaaccccaaccagaagaucaucaccaucggcagcgugugcaugaccaucgggauggccaaccugauccuccagaucggcaacaucaucuccaucuggaucagccacuccauccagcuggggaaccagaaccagaucgagacgugcaaccagagcgucaucaccuacgagaacaacaccugggugaaccagaccuacgugaacaucuccaacacgaacuucgccgcgggccagagcgucguguccgugaagcuggccgggaacagcucccucugcccggucagcggcugggccaucuacuccaaggacaacagcauccgcaucggcuccaagggggacguguucgugauccgggagcccuucaucagcugcagcccccuggagugccgcaccuucuuccugacccagggcgcccuccugaacgacaagcacuccaacgggaccaucaaggaccggucccccuaccgcacgcugaugagcugcccgaucggcgagguccccucccccuacaacagccgguucgagagcguggccugguccgcgagcgccugccacgacgggaucaacuggcucaccaucggcaucuccggccccgacaacggggccguggccguccugaaguacaacggcaucaucaccgacaccaucaagagcuggcgcaacaacauccugcggacgcaggaguccgagugcgcgugcgugaacgggagcugcuucaccgugaugaccgacggcccguccgacggccaggccagcuacaagaucuuccgcaucgagaaggggaagaucgucaaguccguggagaugaacgcccccaacuaccacuacgaggagugcagcugcuaccccgacuccagcgagaucacgugcgugugccgggacaacuggcacggcuccaaccgccccugggucagcuucaaccagaaccucgaguaccagaucggguacaucugcuccggcaucuucggggacaacccgcggcccaacgacaagaccggcagcugcggccccguguccagcaacggggccaacggcgugaagggguucuccuucaaguacggcaacggggucuggaucggccgcaccaagagcaucagcucccggagcggcuucgagaugaucugggaccccaacggguggaccggcaccgacaacaacuucuccaucaagcaggacaucguggggaucaacgaguggagcggcuacuccgggagcuucgugcagcacccggagcugacgggccuggacugcauccgccccugcuucugggucgagcucauccggggccgccccaaggagaacaccaucuggaccuccgggagcuccaucagcuucugcggcgugaacuccgacaccgucggguggagcuggcccgacggcgccgagcugccguucacgaucgacaaguga

SEQ ID NO: 82321 - RNA, 1410 nt, Artificial Sequence; identical to SEQ ID NO: 80762
  derived and/or modified CDS sequence (opt1) from neuraminidase__InfluenzaA__ADD75101

SEQ ID NO: 82322 - RNA, 1410 nt, Artificial Sequence; identical to SEQ ID NO: 80762
  derived and/or modified CDS sequence (opt1) from neuraminidase__InfluenzaA__ADD75111

SEQ ID NO: 82323 - RNA, 1410 nt, Artificial Sequence; identical to SEQ ID NO: 80762
  derived and/or modified CDS sequence (opt1) from neuraminidase__InfluenzaA__ADD75121

SEQ ID NO: 82324 - RNA, 1410 nt, Artificial Sequence; identical to SEQ ID NO: 80762
  derived and/or modified CDS sequence (opt1) from neuraminidase__InfluenzaA__ADD75131

SEQ ID NO: 82325 - RNA, 1410 nt, Artificial Sequence; identical to SEQ ID NO: 80762
  derived and/or modified CDS sequence (opt1) from neuraminidase__InfluenzaA__ADD75141

SEQ ID NO: 82326 - RNA, 1410 nt, Artificial Sequence
  derived and/or modified CDS sequence (opt1) from neuraminidase__InfluenzaA__ADD75161
augaaccccaaccagaagaucaucaccaucggcagcgugugcaugaccaucgggauggccaaccugauccuccagaucggcaacaucaucuccaucuggaucagccacuccauccagcuggggaaccagaaccagaucgagacgugcaaccagagcgucaucaccuacgagaacaacaccugggugaaccagaccuacgugaacaucuccaacacgaacuucgccgcgggccagagcgucguguccgugaagcuggccgggaacagcucccucugcccggucagcggcugggccaucuacuccaaggacaacagcauccgcaucggcuccaagggggacguguucgugauccgggagcccuucaucagcugcagcccccuggagugccgcaccuucuuccugacccagggcgcccuccugaacgacaagcacuccaacgggaccaucaaggaccgguccagcuaccgcacgcugauguccugccccaucggcgaggucccgagccccuacaacagccgguucgaguccguggccuggagcgcguccgccugccacgacgggaucaacuggcucaccaucggcaucagcggccccgacaacggggccguggccguccugaaguacaacggcaucaucaccgacaccaucaaguccuggcgcaacaacauccugcggacgcaggagagcgagugcgcgugcgugaacggguccugcuucaccgugaugaccgacggccccagcgacggccaggccuccuacaagaucuuccgcaucgagaaggggaagaucgucaagagcguggagaugaacgccccgaacuaccacuacgaggagugcuccugcuaccccgacagcuccgagaucacgugcgugugccgggacaacuggcacggcagcaaccgccccugggucuccuucaaccagaaccucgaguacaagaucggguacaucugcagcggcaucuucggggacaacccccggccgaacgacaagaccggcuccugcggccccgugagcuccaacggggccaacggcgugaagggguucagcuucaaguacggcaacggggucuggaucggccgcaccaagagcaucuccagccggaacggcuucgagaugaucugggaccccaacggguggaccggcaccgacaacaacuucuccaucaagcaggacaucguggggaucaacgaguggagcggcuacuccgggagcuucgugcagcaccccgagcugacgggccuggacugcauccgcccgugcuucugggucgagcucauccggggccgccccaaggagaacaccaucuggaccuccgggagcuccaucagcuucugcggcgugaacuccgacaccgucggguggagcuggcccgacggcgccgagcugcccuucacgaucgaccgguga

SEQ ID NO: 82327 - RNA, 1410 nt, Artificial Sequence
  derived and/or modified CDS sequence (opt1) from neuraminidase__InfluenzaA__ADD84500
augaaccccaaccagaacaucaucaccaucggcagcgugugcaugaccaucgggauggccaaccugauccuccagaucggcaacaucaucuccaucuggaucagccacuccauccagcuggggaaccagaaccagaucgagacgugcaaccagagcgucaucaccuacgagaacaacaccugggugaaccagaccuacgugaacaucuccaacacgaacuucgccgcgggccagagcgucguguccgugaagcuggccgggaacagcucccucugcccggucagcggcugggccaucuacuccaaggacaacagcauccgcaucggcuccaagggggacguguucgugauccgggagcccuucaucagcugcagcccccuggagugccgcaccuucuuccugacccagggcgcccuccugaacgacaagcacuccaacgggaccaucaaggaccggucccccuaccgcacgcugaugagcugcccgaucggcgagguccccucccccuacaacagccgguucgagagcguggccugguccgcgagcgccugccacgacgggaucaacuggcucaccaucggcaucuccggccccgacaacggggccguggccguccugaaguacaacggcaucaucaccgacaccaucaagagcuggcgcaacaacauccugcggacgcaggaguccgagugcgcgugcgugaacgggagcugcuucaucgugaugaccgacggcccguccgacggccaggccagcuacaagaucuuccgcaucgagaaggggaagaucgucaaguccguggagaugaacgcccccaacuaccacuacgaggagugcagcugcuaccccgacuccagcgagaucacgugcgugugccgggacaacuggcacggcuccaaccgccccugggucagcuucaaccagaaccucgaguaccagaucggguacaucugcuccggcaucuucggggacaacccgcggcccaacgacaagaccggcagcugcggccccguguccagcaacggggccaacggcgugaagggguucuccuucaaguacggcaacggggucuggaucggccgcaccaagagcaucagcucccggaacggcuucgagaugaucugggaccccaacggguggaccggcaccgacaacaacuucagcaucaagcaggacaucguggggaucaacgagugguccggcuacagcggguccuucgugcagcacccggagcugaccggccuggacugcauccgccccugcuucugggucgagcucauccggggccgccccaaggagaacacgaucuggaccagcggguccagcaucuccuucugcggcgugaacagcgacaccgucgggugguccuggcccgacggcgccgagcugccguucaccaucgacaaguga

SEQ ID NO: 82328 - RNA, 1410 nt, Artificial Sequence
  derived and/or modified CDS sequence (opt1) from neuraminidase__InfluenzaA__ADD84502
augaaccccaaccagaacaucaucaccaucggcagcgugugcaugaccaucgggauggccaaccugauccuccagaucggcaacaucaucuccaucuggaucagccacuccauccagcuggggaaccagaaccagaucgagacgugcaaccagagcgucaucaccuacgagaacaacaccugggugaaccagaccuacgugaacaucuccaacacgaacuucgccgcgggccagagcgucguguccgugaagcuggccgggaacagcucccucugcccggucagcggcugggccaucuacuccaaggacaacagcauccgcaucggcuccaagggggacguguucgugauccgggagcccuucaucagcugcagcccccuggagugccgcaccuucuuccugacccagggcgcccuccugaacgacaagcacuccaacgggaccaucaaggaccggucccccuaccgcacgcugaugagcugcccgaucggcgagguccccucccccuacaacagccgguucgagagcguggccugguccgcgagcgccugccacgacgggaucaacuggcucaccaucggcaucuccggccccgacaacggggccguggccguccugaaguacaacggcaucaucaccgacaccaucaagagcuggcgcaacaacauccugcggacgcaggaguccgagugcgcgugcgugaacgggagcugcuucaccgugaugaccgacggcccguccgacggccaggccagcuacaagaucuuccgcaucgagaaggggaagaucgucaaguccguggagaugaacgcccccaacuaccacuacgaggagugcagcugcuaccccgacuccagcgagaucacgugcgugugccgggacaacuggcacggcuccaaccgccccugggucagcuucaaccagaaccucgaguaccagaucggguacaucugcuccggcaucuucggggacaacccgcggcccaacgacaagaccggcagcugcggccccguguccagcaacggggccaacggcgugaagggguucuccuucaaguacggcaacggggucuggaucggccgcaccaagagcaucagcucccggaacggcuucgagaugaucugggaccccaacggguggaccggcaccgacaacaacuucagcaucaagcaggacaucguggggaucaacgagugguccggcuacagcggguccuucgugcagcacccggagcugacgggccuggacugcauccgccccugcuucugggucgagcucauccggggccgccccaaggagaacaccaucuggaccagcggguccagcaucuccuucugcggcgugaacagcgacaccgucgggugguccuggcccgacggcgccgagcugccguucacgaucgacaaguga

SEQ ID NO: 82329 - RNA, 1410 nt, Artificial Sequence; identical to SEQ ID NO: 82328
  derived and/or modified CDS sequence (opt1) from neuraminidase__InfluenzaA__ADD84503

SEQ ID NO: 82330 - RNA, 1410 nt, Artificial Sequence
  derived and/or modified CDS sequence (opt1) from neuraminidase__InfluenzaA__ADD84504
augaaccccaaccagaacaucaucaccaucggcagcgugugcaugaccaucgggauggccaaccugauccuccagaucggcaacaucaucuccaucuggaucagccacuccauccagcuggggaaccagaaccagaucgagacgugcaaccagagcgucaucaccuacgagaacaacaccugggugaaccagaccuacgugaacaucuccaacacgaacuucgccgcgggccagagcgucguguccgugaagcuggccgggaacuucagccucugcccggucuccggcugggccaucuacagcaaggacaacuccauccgcaucggcagcaagggggacguguucgugauccgggagcccuucaucuccugcagcccccuggagugccgcaccuucuuccugacccagggcgcccuccugaacgacaagcacuccaacgggaccaucaaggaccggagccccuaccgcacgcugauguccugcccgaucggcgagguccccagccccuacaacucccgguucgagagcguggccuggagcgcguccgccugccacgacgggaucaacuggcucaccaucggcaucagcggccccgacaacggggccguggccguccugaaguacaacggcaucaucaccgacaccaucaaguccuggcgcaacaacauccugcggacgcaggagagcgagugcgcgugcgugaacggguccugcuucaccgugaugaccgacggcccgagcgacggccaggccuccuacaagaucuuccgcaucgagaaggggaagaucgucaagagcguggagaugaacgcccccaacuaccacuacgaggagugcuccugcuaccccgacagcuccgagaucacgugcgugugccgggacaacuggcacggcagcaaccgccccugggucuccuucaaccagaaccucgaguaccagaucggguacaucugcagcggcaucuucggggacaacccgcggcccaacgacaagaccggcuccugcggccccgugagcuccaacggggccaacggcgugaagggguucagcuucaaguacggcaacggggucuggaucggccgcaccaaguccaucagcagccggaacggcuucgagaugaucugggaccccaacggguggaccggcaccgacaacaacuucuccaucaagcaggacaucguggggaucaacgaguggagcggcuacuccgggagcuucgugcagcacccggagcugacgggccuggacugcauccgccccugcuucugggucgagcucauccggggccgccccaaggagaacaccaucuggaccuccgggagcuccaucagcuucugcggcgugaacuccgacaccgucggguggagcuggcccgacggcgccgagcugccguucacgaucgacaaguga

SEQ ID NO: 82331 - RNA, 1410 nt, Artificial Sequence; identical to SEQ ID NO: 82328
  derived and/or modified CDS sequence (opt1) from neuraminidase__InfluenzaA__ADD84505

SEQ ID NO: 82332 - RNA, 1410 nt, Artificial Sequence; identical to SEQ ID NO: 82328
  derived and/or modified CDS sequence (opt1) from neuraminidase__InfluenzaA__ADD84506

SEQ ID NO: 82333 - RNA, 1410 nt, Artificial Sequence
  derived and/or modified CDS sequence (opt1) from neuraminidase__InfluenzaA__ADD92528
augaaccccaaccagaagaucaucaccaucggcagcgugugcaugaccaucgggauggccaaccugauccuccagaucggcaacaucaucuccaucuggaucagccacuccauccagcuggggaaccagaaccagaucgagacgugcaaccagagcgucaucaccuacgagaacaacaccugggugaaccagaccuacgugaacaucuccaacacgaacuucgccgcgggccagagcgucguguccgugaagcuggccgggaacagcucccucugcccggucagcggcugggccaucuacuccaaggacaacagcauccgcaucggcuccaagggggacguguucgugauccgggagcccuucaucagcugcagcccccuggagugccgcaccuucuuccugacccagggcgcccuccugaacgacaagcacuccaacgggaccaucaaggaccggucccccuaccgcacgcugaugagcugcccgaucggcgagguccccucccccuacaacagccgguucgagagcguggccugguccgcgagcgccugccacgacgggaucaacuggcucaccaucggcaucuccggccccgacaacggggccguggccguccugaaguacaacggcaucaucaccgacaccaucaagagcuggcgcaacaacauccugcggacgcaggaguccgagugcgcgugcgugaacgggagcugcuucaccgugaugaccgacggcccguccgacggccaggccagcuacaagaucuuccgcaucgagaaggggaagaucgucaaguccguggagaugaacgcccccaacuaccacuacgaggagugcagcugcuaccccgacuccagcgagaucacgugcgugugccgggacaacuggcacggcuccaaccgccccugggucagcuucaaccagaaccucgaguaccagaucggguacaucugcuccggcaucuucggggacaacccgcggcccaacgacaagaccggcagcugcggccccguguccagcaacggggccaacggcgugaagggguucuccuucaaguacggcaacggggucuggaucggccgcaccaagagcaucagcucccggaacggcuucgagaugaucugggaccccaacggguggaccggcaccgacaacaacuucagcaucaagcaggacaucguggggaucaacgagugguccggccacagcggguccagcgugcagcacccggagcugacgggccuggacugcauccgccccugcuucugggucgagcucauccggggccgccccaaggagaacaccaucuggaccuccgggagcuccaucagcuucugcggcgugaacuccgacaccgucggguggagcuggcccgacggcgccgagcugccguucacgaucgacaaguga

SEQ ID NO: 82334 - RNA, 1410 nt, Artificial Sequence; identical to SEQ ID NO: 81985
  derived and/or modified CDS sequence (opt1) from neuraminidase__InfluenzaA__ADD96769

SEQ ID NO: 82335 - RNA, 1410 nt, Artificial Sequence; identical to SEQ ID NO: 81985
  derived and/or modified CDS sequence (opt1) from neuraminidase__InfluenzaA__ADD96779

SEQ ID NO: 82336 - RNA, 1410 nt, Artificial Sequence; identical to SEQ ID NO: 81985
  derived and/or modified CDS sequence (opt1) from neuraminidase__InfluenzaA__ADD96789

SEQ ID NO: 82337 - RNA, 1410 nt, Artificial Sequence; identical to SEQ ID NO: 82113
  derived and/or modified CDS sequence (opt1) from neuraminidase__InfluenzaA__ADD96799

SEQ ID NO: 82338 - RNA, 1410 nt, Artificial Sequence; identical to SEQ ID NO: 80762
  derived and/or modified CDS sequence (opt1) from neuraminidase__InfluenzaA__ADD96809

SEQ ID NO: 82339 - RNA, 1410 nt, Artificial Sequence
  derived and/or modified CDS sequence (opt1) from neuraminidase__InfluenzaA__ADD96819
augaaccccaaccagaagaucaucaccaucggcagcgugugcaugaccaucgggauggccaaccugauccuccagaucggcaacaucaucuccaucuggaucagccacuccauccagcuggggaaccagaaccagaucgagacgugcaaccagagcgucaucaccuacgagaacaacaccugggugaaccagaccuacgugaacaucuccaacacgaacuucgccgcgggccagagcgucguguccgugaagcuggccgggagcuccagccucugcccggucuccggcugggccaucuacagcaaggacaacuccauccgcaucggcagcaagggggacguguucgugauccgggagcccuucaucuccugcagcccccuggagugccgcaccuucuuccugacccagggcgcccuccugaacgacaagcacuccaacgggaccaucaaggaccggagccccuaccgcacgcugauguccugcccgaucggcgagguccccagccccuacaacagccgguucgaguccguggccuggagcgcguccgccugccacgacgggaucaacuggcucaccaucggcaucagcggccccgacaacggggccguggccguccugaaguacaacggcaucaucaccgacaccaucaaguccuggcgcaacaacauccugcggacgcaggagagcgagugcgcgugcgugaacggguccugcuucaccgugaugaccgacggcccgagcgacggccaggccuccuacaagaucuuccgcaucgagaaggggaagaucgucaagagcguggagaugaacgcccccaacuaccacuacgaggagugcuccugcuaccccgacagcuccgagaucacgugcgugugccgggacaacuggcacggcagcaaccgccccugggucuccuucaaccagaaccucgaguaccagaucggguacaucugcagcggcaucuucggggacaacccgcggcccaacgacaagaagggcuccugcggccccgugagcuccaacggggccaacggcgugaagggguucagcuucaaguacggcaacggggucuggaucggccgcaccaagagcaucuccagccggaacggcuucgagaugaucugggaccccaacggguggaccggcaccgacaacaacuucuccaucaagcaggacaucguggggaucaacgaguggagcggcuacuccgggagcuucgugcagcacccggagcugaccggccuggacugcauccgccccugcuucugggucgagcucauccggggccgccccaaggagaacacgaucuggaccuccgggagcuccaucagcuucugcggcgugaacuccgacaccgucggguggagcuggcccgacggcgccgagcugccguucaccaucgacaaguga

SEQ ID NO: 82340 - RNA, 1410 nt, Artificial Sequence; identical to SEQ ID NO: 80762
  derived and/or modified CDS sequence (opt1) from neuraminidase__InfluenzaA__ADD96829

SEQ ID NO: 82341 - RNA, 1410 nt, Artificial Sequence; identical to SEQ ID NO: 80762
  derived and/or modified CDS sequence (opt1) from neuraminidase__InfluenzaA__ADD96839

SEQ ID NO: 82342 - RNA, 1410 nt, Artificial Sequence; identical to SEQ ID NO: 80762
  derived and/or modified CDS sequence (opt1) from neuraminidase__InfluenzaA__ADD96849

SEQ ID NO: 82343 - RNA, 1410 nt, Artificial Sequence; identical to SEQ ID NO: 80762
  derived and/or modified CDS sequence (opt1) from neuraminidase__InfluenzaA__ADD96859

SEQ ID NO: 82344 - RNA, 1410 nt, Artificial Sequence
  derived and/or modified CDS sequence (opt1) from neuraminidase__InfluenzaA__ADD96869
augaaccccaaccagaagaucaucaccaucggcagcgugugcaugaccaucgggauggccaaccugauccuccagaucggcaacaucaucuccaucuggaucagccacccgauccagcuggggaaccagaaccagaucgagacgugcaaccaguccgucaucaccuacgagaacaacaccugggugaaccagaccuacgugaacaucagcaacacgaacuucgccgcgggccaguccgucgugagcgugaagcuggccgggaacuccagccucugccccgucuccggcugggccaucuacagcaaggacaacuccauccgcaucggcagcaagggggacguguucgugauccgggagcccuucaucuccugcagcccccuggagugccgcaccuucuuccugacccagggcgcccuccugaacgacaagcacuccaacgggaccaucaaggaccggagcccguaccgcacgcugauguccugccccaucggcgagguccccagccccuacaacucccgguucgagagcguggccuggagcgcguccgccugccacgacgggaucaacuggcucaccaucggcaucagcggcccggacaacggggccguggccguccugaaguacaacggcaucaucaccgacaccaucaaguccuggaagaacaacauccugcgcacgcaggagagcgagugcgcgugcgugaacggguccugcuucaccgugaugaccgacggccccagcgacggccaggccuccuacaagaucuuccggaucgagaaggggaagaucgucaagagcguggagaugaacgcccccaacuaccacuacgaggagugcuccugcuaccccgacagcuccgagaucacgugcgugugccgcgacaacuggcacggcagcaaccggccgugggucuccuucaaccagaaccucgaguaccagaucggguacaucugcagcggcaucuucggggacaacccccgccccaacgacaagaccggcuccugcggccccgugagcuccaacggggccaacggcgugaagggguucagcuucaaguacggcaacggggucuggaucggccggaccaaguccaucagcagccgcaacggcuucgagaugaucugggacccgaacggguggaccggcaccgacaacaacuucuccaucaagcaggacaucguggggaucaacgaguggagcggcuacuccgggagcuucgugcagcaccccgagcugacgggccuggacugcauccggcccugcuucugggucgagcucauccgcggccggcccaaggagaacaccaucuggaccuccgggagcuccaucagcuucugcggcgugaacuccgacaccgucggguggagcuggccggacggcgccgagcugcccuucacgaucgacaaguga

SEQ ID NO: 82345 - RNA, 1410 nt, Artificial Sequence
  derived and/or modified CDS sequence (opt1) from neuraminidase__InfluenzaA__ADD96879
augaaccccaaccagaagaucaucaccaucggcagcgugugcaugaccaucgggauggccaaccugauccuccagaucggcaacaucaucuccaucuggaucagccacuccauccagcuggggaaccagaaccagaucgagacgugcaaccagagcgucaucaccuacgagaacaacaccugggugaaccagaccuacgugaacaucuccaacacgaacuucgccgcgggccagagcgucguguccgugaagcuggccgggaacagcucccucugcccggucagcggcugggccaucuacuccaaggacaacagcauccgcaucggcuccaagggggacguguucgugauccgggagcccuucaucagcugcagcccccugggcugccgcaccuucuuccugacccagggggcccuccugaacgacaagcacuccaacggcaccaucaaggaccggucccccuaccgcacgcugaugagcugcccgaucggggagguccccucccccuacaacagccgguucgagagcguggccugguccgcgagcgccugccacgacggcaucaacuggcucaccaucggcaucuccgggcccgacaacggcgccguggccguccugaaguacaacgggaucaucaccgacaccaucaagagcuggcgcaacaacauccugcggacgcaggaguccgagugcgcgugcgugaacggcagcugcuucaccgugaugaccgacggcccguccgacgggcaggccagcuacaagaucuuccgcaucgagaagggcaagaucgucaaguccguggagaugaacgcccccaacuaccacuacgaggagugcagcugcuaccccgacuccagcgagaucacgugcgugugccgggacaacuggcacggguccaaccgccccugggucagcuucaaccagaaccucgaguaccagaucggcuacaucugcuccgggaucuucggcgacaacccgcggcccaacgacaagaccggcagcugcgggcccguguccagcaacggcgccaacggggugaagggcuucuccuucaaguacgggaacggcgucuggaucggccgcaccaagagcaucagcucccggaacggguucgagaugaucugggaccccaacggcuggaccgggaccgacaacaacuucagcaucaagcaggacaucgugggcaucaacgagugguccggguacagcggcuccuucgugcagcacccggagcugacgggccuggacugcauccgccccugcuucugggucgagcucauccgggggcgccccaaggagaacaccaucuggaccagcggcuccagcaucuccuucugcggggugaacagcgacaccgucggcugguccuggcccgacggcgccgagcugccguucacgaucgacaaguga

SEQ ID NO: 82346 - RNA, 1410 nt, Artificial Sequence; identical to SEQ ID NO: 80762
  derived and/or modified CDS sequence (opt1) from neuraminidase__InfluenzaA__ADD96889

SEQ ID NO: 82347 - RNA, 1410 nt, Artificial Sequence; identical to SEQ ID NO: 81345
  derived and/or modified CDS sequence (opt1) from neuraminidase__InfluenzaA__ADD96899

SEQ ID NO: 82348 - RNA, 1410 nt, Artificial Sequence; identical to SEQ ID NO: 80762
  derived and/or modified CDS sequence (opt1) from neuraminidase__InfluenzaA__ADD96909

SEQ ID NO: 82349 - RNA, 1410 nt, Artificial Sequence; identical to SEQ ID NO: 80762
  derived and/or modified CDS sequence (opt1) from neuraminidase__InfluenzaA__ADD96919

SEQ ID NO: 82350 - RNA, 1410 nt, Artificial Sequence; identical to SEQ ID NO: 80762
  derived and/or modified CDS sequence (opt1) from neuraminidase__InfluenzaA__ADD96929

SEQ ID NO: 82351 - RNA, 1410 nt, Artificial Sequence; identical to SEQ ID NO: 80762
  derived and/or modified CDS sequence (opt1) from neuraminidase__InfluenzaA__ADD96939

SEQ ID NO: 82352 - RNA, 1410 nt, Artificial Sequence; identical to SEQ ID NO: 80762
  derived and/or modified CDS sequence (opt1) from neuraminidase__InfluenzaA__ADD96959

SEQ ID NO: 82353 - RNA, 1410 nt, Artificial Sequence; identical to SEQ ID NO: 80762
  derived and/or modified CDS sequence (opt1) from neuraminidase__InfluenzaA__ADD96969

SEQ ID NO: 82354 - RNA, 1410 nt, Artificial Sequence
  derived and/or modified CDS sequence (opt1) from neuraminidase__InfluenzaA__ADD96989
augaaccccaaccagaagaucaucaccaucggcagcgugugcaugaccaucgggauggccaaccugauccuccagaucggcaacaucaucuccaucuggaucagccacuccauccagcuggggaaccagaaccagaucgagacgugcaaccagagcgucaucaccuacgagaacaacaccugggugaaccagaccuacgugaacaucuccaacacgaacuucgccgcgggccagagcgucguguccgugaagcuggccgggaacagcucccucugcccggucagcggcugggccaucuacuccaaggacaacagcauccgcaucggcuccaagggggacguguucgugauccgggagcccuucaucagcugcagcccccuggagugccgcaccuucuuccugacccagggcgcccuccugaacgacaagcacuccaacgggaccaucaaggaccgguccagcuaccgcacgcugauguccugccccaucggcgaggucccgagccccuacaacagccgguucgaguccguggccuggagcgcguccgccugccacgacgggaucaacuggcucaccaucggcaucagcggccccgacaacggggccguggccguccugaaguacaacggcaucaucaccgacaccaucaaguccuggcgcaacaacauccugcggacgcaggagagcgagugcgcgugcgugaacggguccugcuucaccgugaugaccgacggccccagcgacggccaggccuccuacaagaucuuccgcaucgagaaggggaagaucgucaagagcguggagaugaacgccccgaacuaccacuacgaggagugcuccugcuaccccgacagcuccgagaucacgugcgugugccgggacaacuggcacggcagcaaccgccccugggucuccuucaaccagaaccucgaguaccagaucggguacaucugcagcggcaucuucggggacaacccccggccgaacgacaagaccggcuccugcggccccgugagcuccaacggggccaacggcgugaagggguucagcuucaaguacggcaacggggucuggaucggccgcaccaagagcaucuccagccggaacggcuucgagaugaucugggaccccaacggguggaccggcaccgacaacaacuucuccaucaagcaggacaucguggggaucaacgaguggagcggcuacuccgggagcuucgugcagcaccccgagcugacgggccuggacugcauccgcccgugcuucugggucgagcucauccggggccgccccaaggagaacaccaucuggaccuccgggagcuccaucagcuucugcggcgugaacuccgacaccgucggguggagcuggcccgacggcgccgagcugcccuucacgaucgacaaguga

SEQ ID NO: 82355 - RNA, 1410 nt, Artificial Sequence
  derived and/or modified CDS sequence (opt1) from neuraminidase__InfluenzaA__ADD97038
augaaccccaaccagaagaucaucaccaucggcagcgugugcaugaccaucgggauggccaaccugauccuccagaucggcaacaucaucuccaucuggaucagccacuccauccagcuggggaaccagaaccagaucgagacgugcaaccagagcgucaucaccuacgagaacaacaccugggugaaccagaccuacgugaacaucuccaacacgaacuucgccgcgggccagagcgucguguccgugaagcuggccgggaacagcucccucugcccggucagcggcugggccaucuacuccaaggacaacagcauccgcaucggcuccaagggggacguguucgugauccgggagcccuucaucagcugcagcccccuggagugccgcaccuucuuccugacccagggcgcccuccugaacgacaagcacuccaacgggaccaucaaggaccggucccccuaccgcacgcugaugagcugcccgaucggcgagguccccucccccuacaacagccgguucgagagcguggccugguccgcgagcgccugccacgacgggaucaacuggcucaccaucggcaucuccggccccgacaacggggccguggccguccugaaguacaacggcaucaucaccgacaccaucaagagcuggcgcaacaacauccugcggacgcaggaguccgagugcgcgugcgugaacgggagcugcuucaccgugaugaccgacggcccguccgacggccaggccagcuacaagaucuuccgcaucgagaaggggaagaucgucaaguccguggagaugaacgcccccaacuaccacuacgaggagugcagcugcuaccccgacuccagcgagaucacgugcgugugccgggacaacuggcacggcuccaaccgccccugggucagcuucaaccagaaccucgaguaccagaucggguacaucugcuccggcaucuucggggacaacccgcggcccaacgacaagaccggcagcugcggccccguguccagcaacggggccaacggcgugaagggguucuccuucaaguacggcaacggggucuggaucggccgcaccaagagcaucagcucccggaacggcuucgagaugaucugggaccccaacggguggaucggcaccgacaacaacuucagcaucaagcaggacaucguggggaucaacgagugguccggcuacagcggguccuucgugcagcacccggagcugaccggccuggacugcauccgccccugcuucugggucgagcucauccggggccgccccaaggagaacacgaucuggaccagcggguccagcaucuccuucugcggcgugaacagcgacaccgggggcugguccuggcccgacggcgccgagcugccguucaccaucgacaaguga

SEQ ID NO: 82356 - RNA, 1410 nt, Artificial Sequence; identical to SEQ ID NO: 80762
  derived and/or modified CDS sequence (opt1) from neuraminidase__InfluenzaA__ADD97048

SEQ ID NO: 82357 - RNA, 1410 nt, Artificial Sequence; identical to SEQ ID NO: 80762
  derived and/or modified CDS sequence (opt1) from neuraminidase__InfluenzaA__ADD97058

SEQ ID NO: 82358 - RNA, 1410 nt, Artificial Sequence; identical to SEQ ID NO: 80762
  derived and/or modified CDS sequence (opt1) from neuraminidase__InfluenzaA__ADD97069

SEQ ID NO: 82359 - RNA, 1410 nt, Artificial Sequence; identical to SEQ ID NO: 80762
  derived and/or modified CDS sequence (opt1) from neuraminidase__InfluenzaA__ADD97126

SEQ ID NO: 82360 - RNA, 1410 nt, Artificial Sequence; identical to SEQ ID NO: 80762
  derived and/or modified CDS sequence (opt1) from neuraminidase__InfluenzaA__ADD97164

SEQ ID NO: 82361 - RNA, 1410 nt, Artificial Sequence; identical to SEQ ID NO: 80762
  derived and/or modified CDS sequence (opt1) from neuraminidase__InfluenzaA__ADD97174

SEQ ID NO: 82362 - RNA, 1410 nt, Artificial Sequence; identical to SEQ ID NO: 80762
  derived and/or modified CDS sequence (opt1) from neuraminidase__InfluenzaA__ADD97184

SEQ ID NO: 82363 - RNA, 1410 nt, Artificial Sequence
  derived and/or modified CDS sequence (opt1) from neuraminidase__InfluenzaA__ADD97194
augaaccccaaccagaagaucaucaccaucggcagcgugugcaugaccaucgggauggccaaccugauccuccagaucggcaacaucaucuccaucuggaucagccacuccauccagcuggggaaccagaaccagaucgagacgugcaaccagagcgucaucaccuacgagaacaacaccugggugaaccagaccuacgugaacaucuccaacgccaacuucgcggccggccagagcgucguguccgugaagcuggccgggaacagcucccucugcccggucagcggcugggccaucuacuccaaggacaacagcauccgcaucggcuccaagggggacguguucgugauccgggagcccuucaucagcugcagcccccuggagugccgcacguucuuccugacccagggcgcccuccugaacgacaagcacuccaacgggaccaucaaggaccggucccccuaccgcacccugaugagcugcccgaucggcgagguccccucccccuacaacagccgguucgagagcguggcgugguccgccagcgccugccacgacgggaucaacuggcucacgaucggcaucuccggccccgacaacggggccguggcgguccugaaguacaacggcaucaucaccgacaccaucaagagcuggcgcaacaacauccugcggacccaggaguccgagugcgccugcgugaacgggagcugcuucacggugaugaccgacggcccguccgacggccaggccagcuacaagaucuuccgcaucgagaaggggaagaucgucaaguccguggagaugaacgcccccaacuaccacuacgaggagugcagcugcuaccccgacuccagcgagaucacgugcgugugccgggacaacuggcacggcuccaaccgccccugggucagcuucaaccagaaccucgaguaccagaucggguacaucugcuccggcaucuucggggacaacccgcggcccaacgacaagaccggcagcugcggccccguguccagcaacggggccaacggcgugaagggguucuccuucaaguacggcaacggggucuggaucggccgcaccaagagcaucagcucccggaacggcuucgagaugaucugggaccccaacggguggaccggcaccgacaacaacuucagcaucaagcaggacaucguggggaucaacgagugguccggcuacagcggguccuucgugcagcacccggagcugaccggccuggacugcauccgccccugcuucugggucgagcucauccggggccgccccaaggagaacacgaucuggaccagcggguccagcaucuccuucugcggcgugaacagcgacaccgucgggugguccuggcccgacggcgcggagcugccguucaccaucgacaaguga

SEQ ID NO: 82364 - RNA, 1410 nt, Artificial Sequence; identical to SEQ ID NO: 82354
  derived and/or modified CDS sequence (opt1) from neuraminidase__InfluenzaA__ADD97204

SEQ ID NO: 82365 - RNA, 1410 nt, Artificial Sequence; identical to SEQ ID NO: 80762
  derived and/or modified CDS sequence (opt1) from neuraminidase__InfluenzaA__ADD97214

SEQ ID NO: 82366 - RNA, 1410 nt, Artificial Sequence; identical to SEQ ID NO: 80762
  derived and/or modified CDS sequence (opt1) from neuraminidase__InfluenzaA__ADD97224

SEQ ID NO: 82367 - RNA, 1410 nt, Artificial Sequence; identical to SEQ ID NO: 80762
  derived and/or modified CDS sequence (opt1) from neuraminidase__InfluenzaA__ADD97234

SEQ ID NO: 82368 - RNA, 1410 nt, Artificial Sequence; identical to SEQ ID NO: 80762
  derived and/or modified CDS sequence (opt1) from neuraminidase__InfluenzaA__ADD97244

SEQ ID NO: 82369 - RNA, 1410 nt, Artificial Sequence; identical to SEQ ID NO: 80762
  derived and/or modified CDS sequence (opt1) from neuraminidase__InfluenzaA__ADD97254

SEQ ID NO: 82370 - RNA, 1410 nt, Artificial Sequence; identical to SEQ ID NO: 80762
  derived and/or modified CDS sequence (opt1) from neuraminidase__InfluenzaA__ADD97264

SEQ ID NO: 82371 - RNA, 1410 nt, Artificial Sequence; identical to SEQ ID NO: 80762
  derived and/or modified CDS sequence (opt1) from neuraminidase__InfluenzaA__ADD97274

SEQ ID NO: 82372 - RNA, 1410 nt, Artificial Sequence
  derived and/or modified CDS sequence (opt1) from neuraminidase__InfluenzaA__ADD97284
augaaccccaaccagaagaucaucaccaucggcagcgugugcaugaccaucgggauggccaaccugauccuccagaucggcaacaucaucuccaucuggaucagccacuccauccagcuggggaaccagaaccagaucgagacgugcaaccagagcgucaucaccuacgagaacaacaccugggugaaccagaccuacgugaacaucugcaacacgaacuucgccgcgggccaguccgucgugagcgugaagcuggccgggaacuccagccucugcccggucuccggcugggccaucuacagcaaggacaacuccauccgcaucggcagcaagggggacguguucgugauccgggagcccuucaucuccugcagcccccuggagugccgcaccuucuuccugacccagggcgcccuccugaacgacaagcacuccaacgggaccaucaaggaccggagccccuaccgcacgcugauguccugcccgaucggcgagguccccagccccuacaacucccgguucgagagcguggccuggagcgcguccgccugccacgacgggaucaacuggcucaccaucggcaucagcggccccgacaacggggccguggccguccugaaguacaacggcaucaucaccgacaccaucaaguccuggcgcaacaacauccugcggacgcaggagagcgagugcgcgugcgugaacggguccugcuucaccgugaugaccgacggcccgagcgacggccaggccuccuacaagaucuuccgcaucgagaaggggaagaucgucaagagcguggagaugaacgcccccaacuaccacuacgaggagugcuccugcuaccccgacagcuccgagaucacgugcgugugccgggacaacuggcacggcagcaaccgccccugggucuccuucaaccagaaccucgaguaccagaucggguacaucugcagcggcaucuucggggacaacccgcggcccaacgacaagaccggcuccugcggccccgugagcuccaacggggccaacggcgugaagggguucagcuucaaguacggcaacggggucuggaucggccgcaccaaguccaucagcagccggaacggcuucgagaugaucugggaccccaacggguggaccggcaccgacaacaacuucuccaucaagcaggacaucguggggaucaacgaguggagcggcuacuccgggagcuucgugcagcacccggagcugacgggccuggacugcauccgccccugcuucugggucgagcucauccggggccgccccaaggagaacaccaucuggaccuccgggagcuccaucagcuucugcggcgugaacuccgacaccgucggguggagcuggcccgacggcgccgagcugccguucacgaucgacaaguga

SEQ ID NO: 82373 - RNA, 1410 nt, Artificial Sequence; identical to SEQ ID NO: 80762
  derived and/or modified CDS sequence (opt1) from neuraminidase__InfluenzaA__ADD97294

SEQ ID NO: 82374 - RNA, 1410 nt, Artificial Sequence
  derived and/or modified CDS sequence (opt1) from neuraminidase__InfluenzaA__ADD97314
augaaccccaaccagaagaucaucaccaucggcagcgugugcaugaccaucgggauggccaaccugauccuccagaucggcaacaucaucuccaucuggaucagccacuccauccagcuggggaaccagaaccagaucgagacgugcaaccagagcgucaucaccuacgagaacaacaccugggugaaccagaccuacgugaacaucuccaacacgaacuucgccgcgggccagagcgucguguccgugaagcuggccgggaacagcucccucugcccggucagcggcugggccaucuacuccaaggacaacagcauccgcaucggcuccaagggggacguguucgugauccgggagcccuucaucagcugcagcccccuggagugccgcaccuucuuccugacccagggcgcccuccugaacgacaagcacuccaacgggaccaucaaggaccggucccccuaccgcacgcugaugagcugcccgaucggcgagguccccucccccuacaacagccgguucgagagcguggccugguccgcgagcgccugccacgacgggaucaacuggcucaccaucggcaucuccggccccgacaacggggccguggccguccugaaguacaacggcaucaucaccgacaccaucaagagcuggcgcaacaacauccugcggacgcaggaguccgagugcgcgugcgugaacgggagcugcuucaccgugaugaccgacggcccguccgacggccaggccagcuacaagaucuuccgcaucgagaaggggaagaucgucaaguccguggagaugaacgcccccaacuaccacuacgaggagugcagcugcuaccccgacuccagcgagaucacgugcgugugccgggacaacuggcacggcuccaaccgccccugggucagcuucaaccagaaccucgaguaccagaucggguacaucugcuccggcaucuucggggacaacccgcggcccaacgacaagaccggcagcugcggccccguguccagcaacggggccaacggcgugaagggguucuccuucaaguacggcaacggggucuggaucggccgcaccaagagcaucagcucccggaacggcuucgagaugaucugggaccccaacggguggaccggcaccgacaacaacuucagcaucaagcaggacaucguggggacgaacgagugguccggcuacagcggguccuucgugcagcacccggagcugaccggccuggacugcauccgccccugcuucugggucgagcucauccggggccgccccaaggagaacaccaucuggaccagcggguccagcaucuccuucugcggcgugaacagcgacacggucgggugguccuggcccgacggcgccgagcugccguucaccaucgacaaguga

SEQ ID NO: 82375 - RNA, 1410 nt, Artificial Sequence; identical to SEQ ID NO: 80762
  derived and/or modified CDS sequence (opt1) from neuraminidase__InfluenzaA__ADD97334

SEQ ID NO: 82376 - RNA, 1410 nt, Artificial Sequence; identical to SEQ ID NO: 80762
  derived and/or modified CDS sequence (opt1) from neuraminidase__InfluenzaA__ADD97344

SEQ ID NO: 82377 - RNA, 1410 nt, Artificial Sequence; identical to SEQ ID NO: 80762
  derived and/or modified CDS sequence (opt1) from neuraminidase__InfluenzaA__ADD97354

SEQ ID NO: 82378 - RNA, 1410 nt, Artificial Sequence
  derived and/or modified CDS sequence (opt1) from neuraminidase__InfluenzaA__ADD97384
augaaccccaaccagaagaucaucaccaucggcagcgugugcaugaccaucgggauggccaaccugauccuccagaucggcaacaucaucuccaucuggaucagccacacgauccagcuggggaaccagaaccagaucgagaccugcaaccaguccgucaucaccuacgagaacaacaccugggugaaccagacguacgugaacaucagcaacaccaacuucgccgcgggccaguccgucgugagcgugaagcuggccgggaacuccagccucugcccggucuccggcugggccaucuacagcaaggacaacuccauccgcaucggcagcaagggggacguguucgugauccgggagcccuucaucuccugcagcccccuggagugccgcaccuucuuccugacccagggcgcccuccugaacgacaagcacuccaacgggacgaucaaggaccggagccccuaccgcacccugauguccugcccgaucggcgagguccccagccccuacaacucccgguucgagagcguggccuggagcgcguccgccugccacgacgggaucaacuggcucaccaucggcaucagcggccccgacaacggggccguggccguccugaaguacaacggcaucaucaccgacacgaucaaguccuggcgcaacaacauccugcggacccaggagagcgagugcgcgugcgugaacggguccugcuucaccgugaugaccgacggcccgagcgacggccaggccuccuacaagaucuuccgcaucgagaaggggaagaucgucaagagcguggagaugaacgcccccaacuaccacuacgaggagugcuccugcuaccccgacagcuccgagaucacgugcgugugccgggacaacuggcacggcagcaaccgccccugggucuccuucaaccagaaccucgaguaccagaucggguacaucugcagcggcaucuucggggacaacccgcggcccaacgacaagaccggcuccugcggccccgugagcuccaacggggccaacggcgugaagggguucagcuucaaguacggcaacggggucuggaucggccgcaccaaguccaucagcagccggaacggcuucgagaugaucugggaccccaacggguggaccggcacggacaacaacuucuccaucaagcaggacaucguggggaucaacgaguggagcggcuacuccgggagcuucgugcagcacccggagcugaccggccuggacugcauccgccccugcuucugggucgagcucauccggggccgccccaaggagaacaccaucuggaccuccgggagcuccaucagcuucugcggcgugaacuccgacacggucggguggagcuggcccgacggcgccgagcugccguucaccaucgacaaguga

SEQ ID NO: 82379 - RNA, 1410 nt, Artificial Sequence
  derived and/or modified CDS sequence (opt1) from neuraminidase__InfluenzaA__ADD97394
augaaccccaaccagaagaucaucaccaucggcagcgugugcaugaccaucgggauggccaaccugauccuccagaucggcaacaucaucuccaucuggaucagccacuccauccagcuggggaaccagaaccagaucgagacgugcaaccagagcgucaucaccuacgagaacaacaccugggugaaccagaccuacgugaacaucuccaacacgaacuucgccgcgggccagccggucgugagcgugaagcuggccgggaacuccagccucugccccgucaacggcugggccaucuacuccaaggacaacagcauccgcaucggcuccaagggggacguguucgugauccgggagcccuucaucagcugcagcccccuggagugccgcaccuucuuccugacccagggcgcccuccugaacgacaagcacuccaacgggaccaucaaggaccgguccccguaccgcacgcugaugagcugccccaucggcgagguccccucccccuacaacagccgguucgaguccguggccuggagcgcgagcgccugccacgacgggaucaacuggcucaccaucggcaucuccggcccggacaacggggccguggccguccugaaguacaacggcaucaucaccgacaccaucaagagcuggcgcaacaacauccugcggacgcaggaguccgagugcgcgugcgugaacgggagcugcuucaccgugaugaccgacggccccuccgacggccaggccagcuacaagaucuuccgcaucgagaaggggaagaucgucaaguccguggagaugaacgcccccaacuaccacuacgaggagugcagcugcuaccccgacuccagcgagaucacgugcgugugccgggacaacuggcacggcuccaaccgcccgugggucagcuucaaccagaaccucgaguaccagaucggguacaucugcuccggcaucuucggggacaacccccggcccaacgacaagaccggcagcugcggccccguguccagcaacggggccaacggcgugaagggguucuccuucaaguacggcaacggggucuggaucggccgcaccaagagcaucuccagccggaacggcuucgagaugaucugggacccgaacggguggaccggcaccgacaacaacuucagcaucaagcaggacaucguggggaucaacgagugguccggcuacagcggguccuucgugcagcaccccgagcugacgggccuggacugcauccgccccugcuucugggucgagcucauccggggccgccccaaggagaacaccaucuggaccagcggguccagcaucuccuucugcggcgugaacagcgacaccgucgggugguccuggccggacggcgccgagcugcccuucacgaucgacaaguga

SEQ ID NO: 82380 - RNA, 1410 nt, Artificial Sequence; identical to SEQ ID NO: 80762
  derived and/or modified CDS sequence (opt1) from neuraminidase__InfluenzaA__ADD97404

SEQ ID NO: 82381 - RNA, 1410 nt, Artificial Sequence; identical to SEQ ID NO: 80762
  derived and/or modified CDS sequence (opt1) from neuraminidase__InfluenzaA__ADD97424

SEQ ID NO: 82382 - RNA, 1410 nt, Artificial Sequence; identical to SEQ ID NO: 80762
  derived and/or modified CDS sequence (opt1) from neuraminidase__InfluenzaA__ADD97434

SEQ ID NO: 82383 - RNA, 1410 nt, Artificial Sequence; identical to SEQ ID NO: 80762
  derived and/or modified CDS sequence (opt1) from neuraminidase__InfluenzaA__ADD97444

SEQ ID NO: 82384 - RNA, 1410 nt, Artificial Sequence
  derived and/or modified CDS sequence (opt1) from neuraminidase__InfluenzaA__ADD97454
augaaccccaaccagaagaucaucaccaucggcagcgugugcaugaccaucgggauggccaaccugauccuccagaucggcaacaucaucuccaucuggaucagccacuccauccagcuggggaaccagaaccagaucgagacgugcaaccagagcgucaucaccuacgagaacaacaccugggugaaccagaccuacgugaacaucuccaacacgaacuucgccgcgggccagagcgucguguccgugaagcuggccgggaacagcucccucugcccgaucagcggcugggccaucuacuccaaggacaacagcauccgcaucggcuccaagggggacgucuucgugauccgggagcccuucaucagcugcagcccccuggagugccgcaccuucuuccugacccagggcgcccuccugagcgacaagcacuccaacgggaccaucaaggaccggagccccuaccgcacgcugauguccugcccgaucggcgaggugcccagccccuacaacagccgguucgaguccgucgccuggagcgcguccgccugccacgacgggaucaacuggcucaccaucggcaucagcggccccgacaacggggccguggccgugcugaaguacaacggcaucaucaccgacaccaucaaguccuggcgcaacaacauccugcggacgcaggagagcgagugcgcgugcgucaacggguccugcuucaccgugaugaccgacggcccgagcgacggccaggccuccuacaagaucuuccgcaucgagaaggggaagaucgugaaguccgucgagaugaacgcccccaacuaccacuacgaggagugcuccugcuaccccgacagcuccgagaucacgugcgugugccgggacaacuggcacggcagcaaccgccccuggguguccuucaaccagaaccucgaguaccagaucggguacaucugcagcggcaucuucggggacaacccgcggcccaacgacaagaccggcuccugcggccccgucagcuccaacggggccaacggcgugaagggguucagcuucaaguacggcaacgggguguggaucggccgcaccaagagcaucuccagccggaacggcuucgagaugaucugggaccccaacggguggaccggcaccgacaacaacuucuccaucaagcaggacaucgucgggaucaacgaguggagcggcuacuccgggagcuucgugcagcacccggagcugacgggccuggacugcauccgccccugcuucuggguggagcucauccggggccgccccaaggagaacaccaucuggaccuccgggagcuccaucagcuucugcggcgucaacuccgacaccgugggguggagcuggcccgacggcgccgagcugccguucacgaucgacaaguga

SEQ ID NO: 82385 - RNA, 1410 nt, Artificial Sequence
  derived and/or modified CDS sequence (opt1) from neuraminidase__InfluenzaA__ADD97464
augaaccccaaccagaagaucaucaccaucggcagcgugugcaugaccaucgggauggccaaccugauccuccagaucggcaacaucaucuccaucuggaucagccacuccauccagcuggggaaccagaaccagaucgagacgugcaaccagagcgucaucaccuacgagaacaacaccugggugaaccagaccuacgugaacaucuccaacacgaacuucgccgcgggccagagcgucguguccgugaagcuggccgggaacagcucccucugcccggucagcggcugggccaucuacuccaaggacaacagcauccgcaucggcuccaagggggacguguucgugauccgggagcccuucaucagcugcagcccccuggagugccgcaccuucuuccugacccagggcgcccuccugaacgacaagcacuccaacgggaccaucaaggaccggucccccuaccgcacgcugaugagcugcccgaucggcgagguccccucccccuacaacagccgguucgagagcguggccugguccgcgagcgccugccacgacgggaucaacuggcucaccaucggcaucuccggccccgacaacggggccguggccguccugaaguacaacggcaucaucaccgacaccaucaagagcuggcgcaacaacauccugcggacgcaggaguccgagugcgcgugcgugaacgggagcugcuucaccgugaugaccgacggcccguccgacggccaggccagcuacaagaucuuccgcaucgagaaggggaagaucgucaaguccguggagaugaacgcccccaacuaccacuacgaggagugcagcugcuaccccgacuccagcgagaucacgugcgugugccgggacaacuggcacggcuccaaccgccccugggucagcuucaaccagaaccucgaguaccagaucggguacaucugcuccggcaucuucggggacaacccgcggcccaacgacaagaccggcagcugcggccccguguccagcaacggggccaacggcgugaagggguucuccuucaaguacggcaacggggucuggaucggccgcaccaagagcaucagcucccggaacggcuucgagaugaucugggaccccaacggguggaccggcaccgacaacaacuucagcacgaagcaggacaucguggggaucaacgagugguccggcuacagcggguccuucgugcagcacccggagcugaccggccuggacugcauccgccccugcuucugggucgagcucauccggggccgccccaaggagaacaccaucuggaccagcggguccagcaucuccuucugcggcgugaacagcgacacggucgggugguccuggcccgacggcgccgagcugccguucaccaucgacaaguga

SEQ ID NO: 82386 - RNA, 1410 nt, Artificial Sequence; identical to SEQ ID NO: 80762
  derived and/or modified CDS sequence (opt1) from neuraminidase__InfluenzaA__ADD97474

SEQ ID NO: 82387 - RNA, 1410 nt, Artificial Sequence; identical to SEQ ID NO: 80762
  derived and/or modified CDS sequence (opt1) from neuraminidase__InfluenzaA__ADD97484

SEQ ID NO: 82388 - RNA, 1410 nt, Artificial Sequence
  derived and/or modified CDS sequence (opt1) from neuraminidase__InfluenzaA__ADD97494
augaaccccaaccagaagaucaucaccaucggcagcgugugcaugaccaucgggauggccaaccugauccuccagaucggcaacaucaucuccaucuggaucagccacuccauccagcuggggaaccagaaccagaucgagacgugcaaccagagcgucaucaccuacgagaacaacaccugggugaaccagaccuacgugaacaucuccaacacgaacuucgccgcgggccagagcgucguguccgugaagcuggccgggaacagcucccucugcccggucagcggcugggccaucuacuccaaggacaacagcauccgcaucggcuccaagggggacguguucgugauccgggagcccuucaucagcugcucccccagcgagugccgcaccuucuuccugacccagggcgcccugcucaacgacaagcacuccaacgggaccaucaaggaccggagccccuaccgcacgcugauguccugcccgaucggcgagguccccagccccuacaacagccgguucgaguccguggccuggagcgcguccgccugccacgacgggaucaacuggcugaccaucggcaucagcggccccgacaacggggccguggccguccucaaguacaacggcaucaucaccgacaccaucaaguccuggcgcaacaacauccugcggacgcaggagagcgagugcgcgugcgugaacggguccugcuucaccgugaugaccgacggcccgagcgacggccaggccuccuacaagaucuuccgcaucgagaaggggaagaucgucaagagcguggagaugaacgcccccaacuaccacuacgaggagugcuccugcuaccccgacagcuccgagaucacgugcgugugccgggacaacuggcacggcagcaaccgccccugggucuccuucaaccagaaccuggaguaccagaucggguacaucugcagcggcaucuucggggacaacccgcggcccaacgacaagaccggcuccugcggccccgugagcuccaacggggccaacggcgugaagggguucagcuucaaguacggcaacggggucuggaucggccgcaccaagagcaucuccagccggaacggcuucgagaugaucugggaccccaacggguggaccggcaccgacaacaacuucuccaucaagcaggacaucguggggaucaacgaguggagcggcuacuccgggagcuucgugcagcacccggagcucacgggccuggacugcauccgccccugcuucugggucgagcugauccggggccgccccaaggagaacaccaucuggaccuccgggagcuccaucagcuucugcggcgugaacuccgacaccgucggguggagcuggcccgacggcgccgagcucccguucacgaucgacaaguga

SEQ ID NO: 82389 - RNA, 1410 nt, Artificial Sequence; identical to SEQ ID NO: 80762
  derived and/or modified CDS sequence (opt1) from neuraminidase__InfluenzaA__ADD97504

SEQ ID NO: 82390 - RNA, 1410 nt, Artificial Sequence; identical to SEQ ID NO: 80762
  derived and/or modified CDS sequence (opt1) from neuraminidase__InfluenzaA__ADD97514

SEQ ID NO: 82391 - RNA, 1410 nt, Artificial Sequence; identical to SEQ ID NO: 82374
  derived and/or modified CDS sequence (opt1) from neuraminidase__InfluenzaA__ADD97534

SEQ ID NO: 82392 - RNA, 1410 nt, Artificial Sequence; identical to SEQ ID NO: 80762
  derived and/or modified CDS sequence (opt1) from neuraminidase__InfluenzaA__ADD97544

SEQ ID NO: 82393 - RNA, 1410 nt, Artificial Sequence; identical to SEQ ID NO: 80762
  derived and/or modified CDS sequence (opt1) from neuraminidase__InfluenzaA__ADD97554

SEQ ID NO: 82394 - RNA, 1410 nt, Artificial Sequence; identical to SEQ ID NO: 82378
  derived and/or modified CDS sequence (opt1) from neuraminidase__InfluenzaA__ADD97564

SEQ ID NO: 82395 - RNA, 1410 nt, Artificial Sequence; identical to SEQ ID NO: 80762
  derived and/or modified CDS sequence (opt1) from neuraminidase__InfluenzaA__ADD97574

SEQ ID NO: 82396 - RNA, 1410 nt, Artificial Sequence; identical to SEQ ID NO: 80762
  derived and/or modified CDS sequence (opt1) from neuraminidase__InfluenzaA__ADD97584

SEQ ID NO: 82397 - RNA, 1410 nt, Artificial Sequence
  derived and/or modified CDS sequence (opt1) from neuraminidase__InfluenzaA__ADD97681
augaaccccaaccagaagaucaucaccaucggcagcgugugcaugaccaucgggauggccaaccugauccuccagaucggcaacaucaucuccaucuggaucagccacuccauccagcuggggaaccagaaccagaucgagacgugcaaccagagcgucaucaccuacgagaacaacaccugggugaaccagaccuacgugaacaucuccaacacgaacuucgccgcgggccagagcgucguguccgugaagcuggccgggaacagcucccucugcccggucagcggcugggccaucuacuccaaggacaacagcauccgcaucggcuccaagggggacguguucgugauccgggagcccuucaucagcugcagcccccuggagugccgcaccuucuuccugacccagggcgcccuccugaacgacaagcacuccaacgggaccaucaaggaccggucccccuaccgcacgcugaugagcugcccgaucggcgagguccccucccccuacaacagccgguucgagagcguggccugguccgcgagcgccugccacgacgggaucaacuggcucaccaucggcaucuccggccccgacaacggggccguggccguccugaaguacaacggcaucaucaccgacaccaucaagagcuggcgcaacaacauccugcggacgcaggaguccgagugcgcgugcgugaacgggagcugcuucaccgugaugaccgacggcccguccgacggccaggccagcuacaagaucuuccgcaucgagaaggggaagaucgucaaguccguggagaucaacgcccccaacuaccacuacgaggagugcagcugcuaccccgacuccagcgagaucacgugcgugugccgggacaacuggcacggcuccaaccgccccugggucagcuucaaccagaaccucgaguaccagaucggguacaucugcuccggcaucuucggggacaacccgcggcccaacgacaagaccggcagcugcggccccguguccagcaacggggccaacggcgugaagggguucuccuucaaguacggcaacggggucuggaucggccgcaccaagagcaucagcucccggaacggcuucgagaugaucugggaccccaacggguggaccggcaccgacaacaacuucagcaucaagcaggacaucguggggaucaacgagugguccggcuacagcggguccuucgugcagcacccggagcugacgggccuggacugcauccgccccugcuucugggucgagcucauccggggccgccccaaggagaacaccaucuggaccagcggguccagcaucuccuucugcggcaucaacagcgacaccguggggugguccuggcccgacggcgccgagcugccguucacgaucgacaaguga

SEQ ID NO: 82398 - RNA, 1410 nt, Artificial Sequence; identical to SEQ ID NO: 82354
  derived and/or modified CDS sequence (opt1) from neuraminidase__InfluenzaA__ADD97691

SEQ ID NO: 82399 - RNA, 1410 nt, Artificial Sequence; identical to SEQ ID NO: 81899
  derived and/or modified CDS sequence (opt1) from neuraminidase__InfluenzaA__ADD97701

SEQ ID NO: 82400 - RNA, 1410 nt, Artificial Sequence; identical to SEQ ID NO: 80762
  derived and/or modified CDS sequence (opt1) from neuraminidase__InfluenzaA__ADD97891

SEQ ID NO: 82401 - RNA, 1410 nt, Artificial Sequence; identical to SEQ ID NO: 80762
  derived and/or modified CDS sequence (opt1) from neuraminidase__InfluenzaA__ADD97901

SEQ ID NO: 82402 - RNA, 1410 nt, Artificial Sequence; identical to SEQ ID NO: 80762
  derived and/or modified CDS sequence (opt1) from neuraminidase__InfluenzaA__ADD97911

SEQ ID NO: 82403 - RNA, 1410 nt, Artificial Sequence; identical to SEQ ID NO: 80762
  derived and/or modified CDS sequence (opt1) from neuraminidase__InfluenzaA__ADD97921

SEQ ID NO: 82404 - RNA, 1410 nt, Artificial Sequence; identical to SEQ ID NO: 80762
  derived and/or modified CDS sequence (opt1) from neuraminidase__InfluenzaA__ADD97931

SEQ ID NO: 82405 - RNA, 1410 nt, Artificial Sequence; identical to SEQ ID NO: 81529
  derived and/or modified CDS sequence (opt1) from neuraminidase__InfluenzaA__ADD97941

SEQ ID NO: 82406 - RNA, 1410 nt, Artificial Sequence
  derived and/or modified CDS sequence (opt1) from neuraminidase__InfluenzaA__ADD97951
augaaccccaaccagaagaucaucaccaucagcuccgugugcaugaccaucggcauggccaaccugauccuccagaucgggaacaucaucagcaucuggaucucccacagcauccagcugggcaaccagaaccagaucgagacgugcaaccaguccgucaucaccuacgagaacaacaccugggugaaccagaccuacgugaacaucagcaacacgaacuucgccgcggggcaguccgucgugagcgugaagcuggccggcaacuccagccucugcccggucuccgggugggccaucuacagcaaggacaacuccauccgcaucggcagcaagggcgacguguucgugauccgggagcccuucaucuccugcagcccccuggagugccgcaccuucuuccugacccagggggcccuccugaacgacaagcacuccaacggcaccaucaaggaccggagccccuaccgcacgcugauguccugcccgaucggggagguccccagccccuacaacagccgguucgaguccguggccuggagcgcguccgccugccacgacggcaucaacuggcucaccaucgggaucagcggccccgacaacggcgccguggccguccugaaguacaacgggaucaucaccgacaccaucaaguccuggcgcaacaacauccugcggacgcaggagagcgagugcgcgugcgugaacggcuccugcuucaccgugaugaccgacgggccgagcgacggccaggccuccuacaagaucuuccgcaucgagaagggcaagaucgucaagagcguggagaugaacgcccccaacuaccacuacgaggagugcuccugcuaccccgacagcuccgagaucacgugcgugugccgggacaacuggcacgggagcaaccgccccugggucuccuucaaccagaaccucgaguaccagaucggcuacaucugcagcgggaucuucggcgacaacccgcggcccaacgacaagaccggguccugcggccccgugagcuccaacggcgccaacggggugaagggcuucagcuucaaguacgggaacggcgucuggaucgggcgcaccaagagcaucuccagccggaacggcuucgagaugaucugggaccccaacggcuggaccgggaccgacaacaacuucuccaucaagcaggacaucgugggcaucaacgaguggagcggguacuccggcagcuucgugcagcacccggagcugacggggcuggacugcauccgccccugcuucugggucgagcucauccggggccgccccaaggagaacaccaucuggaccuccggcagcuccaucagcuucugcggggugaacuccgacaccgucggcuggagcuggcccgacggggccgagcugccguucacgaucgacaaguga

SEQ ID NO: 82407 - RNA, 1410 nt, Artificial Sequence
  derived and/or modified CDS sequence (opt1) from neuraminidase__InfluenzaA__ADD97961
augaaccccaaccagaagaucaucaccaucggcagcgugugcaugaccaucgggauggucaaccugauccuccagaucggcaacaucaucuccaucuggaucagccacuccauccagcuggggaaccagaaccagaucgagacgugcaaccagagcgugaucaccuacgagaacaacaccugggugaaccagaccuacgucaacaucuccaacacgaacuucgccgccggccagagcgugguguccgucaagcuggcggggaacgccagccucugcccgguguccggcugggccaucuacagcaaggacaacuccauccgcaucggcagcaagggggacguguucgucauccgggagcccuucaucuccugcagcccccuggagugccgcaccuucuuccugacccagggcgcccuccugaacgacaagcacuccaacgggaccaucaaggaccggagccccuaccgcacgcugauguccugcccgaucggcgaggugcccagccccuacaacucccgguucgagagcguggccuggagcgcguccgccugccacgacgggaucaacuggcucaccaucggcaucagcggccccgacaacggggccgucgccgugcugaaguacaacggcaucaucaccgacaccaucaaguccuggcgcaacaacauccugcggacgcaggagagcgagugcgcgugcgugaacggguccugcuucaccgucaugaccgacggcccgagcgacggccaggccuccuacaagaucuuccgcaucgagaaggggaagaucgucaagagcguggagaugaacgcccccaacuaccacuacgaggagugcuccugcuaccccgacagcuccgagaucacgugcgugugccgggacaacuggcacggcagcaaccgccccuggguguccuucaaccagaaccucgaguaccagaucggguacaucugcagcggcaucuucggggacaacccgcggcccaacgacaagaccggcuccugcggccccgugagcuccaacggggccaacggcgucaagggguucagcuucaaguacggcaacgggguguggaucggccgcaccaaguccaucagcagccggaacggcuucgagaugaucugggaccccaacggguggaccggcaccgacaacaacuucuccaucaagcaggacaucguggggaucaacgaguggagcggcuacuccgggagcuucguccagcacccggagcugacgggccuggacugcauccgccccugcuucuggguggagcucauccggggccgccccaaggagaacaccaucuggaccuccgggagcuccaucagcuucugcggcgucaacuccgacaccgugggguggagcuggcccgacggcgccgagcugccguucacgaucgacaaguga

SEQ ID NO: 82408 - RNA, 1410 nt, Artificial Sequence; identical to SEQ ID NO: 82354
  derived and/or modified CDS sequence (opt1) from neuraminidase__InfluenzaA__ADD97971

SEQ ID NO: 82409 - RNA, 1410 nt, Artificial Sequence; identical to SEQ ID NO: 80762
  derived and/or modified CDS sequence (opt1) from neuraminidase__InfluenzaA__ADD97981

SEQ ID NO: 82410 - RNA, 1410 nt, Artificial Sequence
  derived and/or modified CDS sequence (opt1) from neuraminidase__InfluenzaA__ADD97991
augaaccccaaccagaagaucaucaccaucggcagcgugugcaugaccaucgggauggccaaccugauccuccagaucggcaacaucaucuccaucuggaucagccacuccauccagcuggggaaccagaaccagaucgagacgugcaaccagagcgucaucaccuacgagaacaacaccugggugaaccagaccuacgugaacaucuccaacacgaacuucgccgcgggccagagcgucguguccgugaagcuggccgggaacagcucccucugcccggucagcggcugggccaucuacuccaaggacaacagcauccgcaucggcuccaagggggacguguucgugauccgggagcccuucaucagcugcagcccccuggagugccgcaccuucuuccugacccagggcgcccuccugaacgacaagcacuccaacgggaccaucaaggaccggucccccuaccgcacgcugaugagcugcccgaucggcgagguccccucccccuacaacagccgguucgagagcguggccugguccgcgagcgccugccacgacgggaucaacuggcucaccaucggcaucuccggccccgacaacggggccguggccguccugaaguacaacggcaucaucaccgacaccaucaagagcuggcgcaacaacauccugcggacgcaggaguccgagugcgcgugcgugaacgggagcugcuucaccgugaugaccgacggcccguccgacggccaggccagcuacaagaucuuccgcaucgagaaggggaagaucgucaaguccguggagaugaacgcccccaacuaccacuacgaggagugcagcugcuaccccgacuccagcgagaucacgugcgugugccgggacaacuggcacggcuccaaccgccccugggucagcuucaaccagaaccucgaguaccagaucggguacaucugcuccggcaucuucggggacaacccgcggcccaacgacaagaccggcagcugcggccccguguccagcaacggggccaacggcgugaagggguucuccuucaaguacggcaacggggucuggaucggccgcaccaagagcaucagcucccggaacggcuucgagaugaucugggaccccaacggguggaucggcaccgacaacaacuucagcaucaagcaggacaucguggggaucaacgagugguccggcuacagcggguccuucgugcagcacccggagcugaccggccuggacugcauccgccccugcuucugggucgagcucauccggggccgccccaaggagaacacgaucuggaccagcggguccagcaucuccuucugcggcgugaacagcgacaccgucgggugguccuggcccgacggcgccgagcugccguucaccaucgacaaguga

SEQ ID NO: 82411 - RNA, 1410 nt, Artificial Sequence
  derived and/or modified CDS sequence (opt1) from neuraminidase__InfluenzaA__ADD98001
augaaccccaaccagaagaucaucaccaucggcagcgugugcaugaccaucgggauggccaaccugauccuccagaucggcaacaucaucuccaucuggaucagccacuccauccagcuggggaaccagaaccagaucgagacgugcaaccagagcgucaucaccuacgagaacaacaccugggugaaccagaccuacgugaacaucuccaacacgaacuucgccgcgggccagagcgucguguccgugaagcuggccgggaacagcucccucugcccggucagcggcugggccaucuacuccaaggacaacagcauccgcaucggcuccaagggggacguguucgugauccgggagcccuucaucagcugcagcccccuggagugccgcaccuucuuccugacccagggcgcccuccugaacgacaagcacagcaacgggaccaucaaggaccggucccccuaccgcacgcugaugagcugcccgaucggcgagguccccucccccuacaacagccgguucgagagcguggccugguccgcgagcgccugccacgacgggaucaacuggcucaccaucggcaucuccggccccgacaacggggccguggccguccugaaguacaacggcaucaucaccgacaccgugaaguccuggcgcaacaacauccugcggacgcaggaguccgagugcgcgugcgugaacgggagcugcuucaccgucaugaccgacggcccguccgacggccaggccagcuacaagaucuuccgcaucgagaaggggaagaucgugaaguccguggagaugaacgcccccaacuaccacuacgaggagugcagcugcuaccccgacuccagcgagaucacgugcgucugccgggacaacuggcacggcuccaaccgccccugggugagcuucaaccagaaccucgaguaccagaucggguacaucugcuccggcaucuucggggacaacccgcggcccaacgacaagaccggcagcugcggccccguguccagcaacggggccaacggcgucaagggguucuccuucaaguacggcaacgggguguggaucggccgcaccaagagcaucagcucccggaacggcuucgagaugaucugggaccccaacggguggaccggcaccgacaacaacuucagcaucaagcaggacaucguggggaucaacgagugguccggcuacagcggguccuucguccagcacccggagcugacgggccuggacugcauccgccccugcuucuggguggagcucauccggggccgccccaaggagaacaccaucuggaccagcggguccagcaucuccuucugcggcgucaacagcgacaccguggggugguccuggcccgacggcgccgagcugccguucacgaucgacaaguga

SEQ ID NO: 82412 - RNA, 1410 nt, Artificial Sequence; identical to SEQ ID NO: 80762
  derived and/or modified CDS sequence (opt1) from neuraminidase__InfluenzaA__ADD98011

SEQ ID NO: 82413 - RNA, 1410 nt, Artificial Sequence; identical to SEQ ID NO: 80762
  derived and/or modified CDS sequence (opt1) from neuraminidase__InfluenzaA__ADD98031

SEQ ID NO: 82414 - RNA, 1410 nt, Artificial Sequence; identical to SEQ ID NO: 82411
  derived and/or modified CDS sequence (opt1) from neuraminidase__InfluenzaA__ADD98041

SEQ ID NO: 82415 - RNA, 1410 nt, Artificial Sequence; identical to SEQ ID NO: 80762
  derived and/or modified CDS sequence (opt1) from neuraminidase__InfluenzaA__ADD98051

SEQ ID NO: 82416 - RNA, 1410 nt, Artificial Sequence; identical to SEQ ID NO: 80762
  derived and/or modified CDS sequence (opt1) from neuraminidase__InfluenzaA__ADD98061

SEQ ID NO: 82417 - RNA, 1410 nt, Artificial Sequence; identical to SEQ ID NO: 80762
  derived and/or modified CDS sequence (opt1) from neuraminidase__InfluenzaA__ADD98071

SEQ ID NO: 82418 - RNA, 1410 nt, Artificial Sequence; identical to SEQ ID NO: 80762
  derived and/or modified CDS sequence (opt1) from neuraminidase__InfluenzaA__ADD98081

SEQ ID NO: 82419 - RNA, 1410 nt, Artificial Sequence; identical to SEQ ID NO: 80762
  derived and/or modified CDS sequence (opt1) from neuraminidase__InfluenzaA__ADD98091

SEQ ID NO: 82420 - RNA, 1410 nt, Artificial Sequence; identical to SEQ ID NO: 81588
  derived and/or modified CDS sequence (opt1) from neuraminidase__InfluenzaA__ADD98101

SEQ ID NO: 82421 - RNA, 1410 nt, Artificial Sequence
  derived and/or modified CDS sequence (opt1) from neuraminidase__InfluenzaA__ADD98111
augaaccccaaccagaagaucaucaccaucggcagcgugugcaugaccaucgggauggccaaccugauccuccagaucggcaacaucaucuccaucuggaucagccacuccauccagcuggggaaccagaaccagaucgagacgugcaaccagagcgucaucaccuacgagaacaacaccugggugaaccagaccuacgugaacaucuccaacacgaacuucgccgcgggccagagcgucguguccgugaagcuggccgggaacagcucccucugcccggucagcggcugggccaucuacuccaaggacaacagcauccgcaucggcuccaagggggacguguucgugauccgggagcccuucaucagcugcagcccccuggagugccgcaccuucuuccugacccagggcgcccuccugaacgacaagcacuccaacgggaccaucaaggaccggucccccuaccgcacgcugaugagcugcccgaucggcgagguccccucccccuacaacagccgguucgagagcguggccugguccgcgagcgccugccacgacgggaucaacuggcucaccaucggcaucuccggccccgacaacggggccguggccguccugaaguacaacggcaucaucaccgacaccaucaagagcuggcgcaacaacauccugcggacgcaggaguccgagugcgcgugcgugaacgggagcugcuucaccgugaugaccgacggcccguccgacggccaggccagcuacaagaucuuccgcaucgagaaggggaagaucgucaaguccguggagaugaacgcccccaacuaccacuacgaggagugcagcugcuaccccgacuccagcgagaucacgugcgugugccgggacaacuggcacggcuccaaccgccccugggucagcuucaaccagaaccucgaguaccagaucggguacaucugcuccggcauccugggggacaacccgcggcccaacgacaagaccggcagcugcggccccguguccagcaacggggccaacggcgugaagggguucuccuucaaguacggcaacggggucuggaucggccgcaccaagagcaucagcucccggaacggcuucgagaugaucugggaccccaacggguggaccggcaccgacaacaacuucagcaucaagcaggacaucguggggaucaacgagugguccggcuacagcggguccuucgugcagcacccggagcugacgggccucgacugcauccgccccugcuucugggucgagcugauccggggccgccccaaggagaacaccaucuggaccagcggguccagcaucuccuucugcggcgugaacagcgacaccgucgggugguccuggcccgacggcgccgagcugccguucacgaucgacaaguga

SEQ ID NO: 82422 - RNA, 1410 nt, Artificial Sequence; identical to SEQ ID NO: 80762
  derived and/or modified CDS sequence (opt1) from neuraminidase__InfluenzaA__ADD98121

SEQ ID NO: 82423 - RNA, 1410 nt, Artificial Sequence; identical to SEQ ID NO: 80762
  derived and/or modified CDS sequence (opt1) from neuraminidase__InfluenzaA__ADD98131

SEQ ID NO: 82424 - RNA, 1410 nt, Artificial Sequence; identical to SEQ ID NO: 80762
  derived and/or modified CDS sequence (opt1) from neuraminidase__InfluenzaA__ADD98141

SEQ ID NO: 82425 - RNA, 1410 nt, Artificial Sequence; identical to SEQ ID NO: 80762
  derived and/or modified CDS sequence (opt1) from neuraminidase__InfluenzaA__ADD98151

SEQ ID NO: 82426 - RNA, 1410 nt, Artificial Sequence
  derived and/or modified CDS sequence (opt1) from neuraminidase__InfluenzaA__ADD98161
augaaccccaaccagaagaucaucaccaucggcagcgugugcaugaccaucgggauggccaaccugauccuccagaucggcaacaucaucuccaucuggaucagccacacgauccagcuggggaaccagaaccagaucgagaccugcaaccaguccgucaucaccuacgagaacaacaccugggugaaccagacguacgugaacaucagcaacaccaacuucgccgcgggccaguccgucgugagcgugaagcuggccgggaacuccagccucugcccggucuccggcugggccaucuacagcaaggacaacuccauccgcaucggcagcaagggggacguguucgugauccgggagcccuucaucuccugcagcccccuggagugccgcaccuucuuccugacccagggcgcccuccugaacgacaagcacuccaacgggacgaucaaggaccggagccccuaccgcacccugauguccugcccgaucggcgagguccccagccccuacaacucccgguucgagagcguggccuggagcgcguccgccugccacgacgggaucaacuggcucaccaucggcaucagcggccccgacaacggggccguggccguccugaaguacaacggcaucaucaccgacacgaucaaguccuggcgcaacaacauccugcggacccaggagagcgagugcgcgugcgugaacggguccugcuucaccgugaugaccgacggcccgagcgacggccaggccuccuacaagaucuuccgcaucgagaaggggaagaucgucaagagcguggagaugaacgcccccaacuaccacuacgaggagugcuccugcuaccccgacagcuccgagaucacgugcgugugccgggacaacuggcacggcagcaaccgccccugggucuccuucaaccagaaccucgaguaccagaucggguacaucugcagcggcaucuucggggacaacccgcggcccaacgacaagaccggcuccugcggccccgugagcuccaacggggccaacggcgugaagggguucagcuucaaguacggcaacggggucuggaucggccgcaccaaguccaucagcagccggaacggcuucgagaugaucugggaccccaacggguggacccgcacggacaacaacuucuccaucaagcaggacaucgugggcaucaacgaguggagcggguacuccggcagcuucgugcagcacccggagcugaccgggcuggacugcauccggcccugcuucugggucgagcucauccgcggccggcccaaggagaacaccaucuggaccuccggcagcuccaucagcuucugcggggugaacuccgacacggucggcuggagcuggcccgacggggccgagcugccguucaccaucgacaaguga

SEQ ID NO: 82427 - RNA, 1410 nt, Artificial Sequence
  derived and/or modified CDS sequence (opt1) from neuraminidase__InfluenzaA__ADD98171
augaaccccaaccagaagaucaucaucaucggcagcgugugcaugaccaucgggauggccaaccugauccuccagaucggcaacaucaucuccaucuggaucagccacuccauccagcuggggaaccagaaccagaucgagaccugcaaccagagcgucaucacguacgagaacaacaccugggugaaccagaccuacgugaacaucuccaacaccaacuucgccgcgggccagacggucgugagcgugaagcuggccgggaacuccagccucugcccggucuccggcugggccaucuacagcaaggacaacuccauccgcaucggcagcaagggggacguguucgugauccgggagcccuucaucuccugcagcccccuggagugccgcaccuucuuccugacccagggcgcccuccugaacgacaagcacuccaacgggaccaucaaggaccggagccccuaccgcacgcugauguccugcccgaucggcgagguccccagccccuacaacucccgguucgagagcguggccuggagcgcguccgccugccacgacgggaucaacuggcucaccaucggcaucagcggccccgacaacggggccguggccguccugaaguacaacggcaucaucaccgacaccaucaaguccuggcgcaacaacauccugcggacgcaggagagcgagugcgcgugcgugaacggguccugcuucaccgugaugaccgacggcccgagcgacggccaggccuccuacaagaucuuccgcaucgagaaggggaagaucgucaagagcguggagaugaacgcccccaacuaccacuacgaggagugcuccugcuaccccgacagcuccgagaucacgugcgugugccgggacaacuggcacggcagcaaccgccccugggucuccuucaaccagaaccucgaguaccagaucggguacaucugcagcggcaucuucggggacaacccgcgguccaacgacaagaccggcagcugcggccccguguccagcaacggggccaacggcgugaagggguucuccuucaaguacggcaacggggucuggaucggccgcaccaagagcaucagcucccggaacggcuucgagaugaucugggaccccaacggguggaccggcaccgacaacaacuucagcaucaagcaggacaucguggggaucaacgagugguccggcuacagcggguccuucgugcagcaccccgagcugacgggccuggacugcauccgcccgugcuucugggucgagcucauccggggccgccccaaggagaacaccaucuggaccagcggguccagcaucuccuucugcggcgugaacagcgacaccgucgggugguccuggcccgacggcgccgagcugcccuucacgaucgacaaguga

SEQ ID NO: 82428 - RNA, 1410 nt, Artificial Sequence
  derived and/or modified CDS sequence (opt1) from neuraminidase__InfluenzaA__ADD98181
augaaccccaaccagaagaucaucaccaucggcagcgugugcaugaccaucgggauggccaaccugauccuccagaucggcaacaugaucuccaucuggaucagccacuccauccagcuggagaaccagaaccagaucgagacgugcaaccagagcgucaucaccuacgagaacaacaccugggugaaccagaccuacgugaacaucuccaacacgaacuucgccgcggggcagagcgucguguccgugaagcuggccggcaacagcucccucugcccggucagcgggugggccaucuacuccaaggacaacagcauccgcaucggcuccaagggcgacguguucgugauccgggagcccuucaucagcugcagcccccuggagugccgcaccuucuuccugacccagggggcccuccugaacgacaagcacuccaacggcaccaucaaggaccggucccccuaccgcacgcugaugagcugcccgaucggggagguccccucccccuacaacagccgguucgagagcguggccugguccgcgagcgccugccacgacggcaucaacuggcucaccaucgggaucuccggccccgacaacggcgccguggccguccugaaguacaacgggaucaucaccgacaccaucaagagcuggcgcaacaacauccugcggacgcaggaguccgagugcgcgugcgugaacggcagcugcuucaccgugaugaccgacgggccguccgacggccaggccagcuacaagaucuuccgcaucgagaagggcaagaucgucaaguccguggagaugaacgcccccaacuaccacuacgaggagugcagcugcuaccccgacuccagcgagaucacgugcgugugccgggacaacuggcacggguccaaccgccccugggucagcuucaaccagaaccucgaguaccagaucggcuacaucugcuccgggaucuucggcgacaacccgcggcccaacgacaagaccgggagcugcggccccguguccagcaacggcgccaacggggugaagggcuucuccuucaaguacgggaacggcgucuggaucgggcgcaccaagagcaucagcucccggaacggcuucgagaugaucugggaccccaacggcuggaccgggaccgacaacaacuucagcaucaagcaggacaucgugggcaucaacgagugguccggguacagcggcuccuucgugcagcacccggagcugacggggcuggacugcauccgccccugcuucugggucgagcucauccggggccgccccaaggagaacaccaucuggaccagcggcuccagcaucuccuucugcggggugaacagcgacaccgucggcugguccuggcccgacggggccgagcugccguucacgaucgacaaguga

SEQ ID NO: 82429 - RNA, 1410 nt, Artificial Sequence; identical to SEQ ID NO: 80762
  derived and/or modified CDS sequence (opt1) from neuraminidase__InfluenzaA__ADD98201

SEQ ID NO: 82430 - RNA, 1410 nt, Artificial Sequence; identical to SEQ ID NO: 80762
  derived and/or modified CDS sequence (opt1) from neuraminidase__InfluenzaA__ADD98211

SEQ ID NO: 82431 - RNA, 1410 nt, Artificial Sequence; identical to SEQ ID NO: 81985
  derived and/or modified CDS sequence (opt1) from neuraminidase__InfluenzaA__ADE20324

SEQ ID NO: 82432 - RNA, 1410 nt, Artificial Sequence; identical to SEQ ID NO: 81985
  derived and/or modified CDS sequence (opt1) from neuraminidase__InfluenzaA__ADE20334

SEQ ID NO: 82433 - RNA, 1410 nt, Artificial Sequence; identical to SEQ ID NO: 81985
  derived and/or modified CDS sequence (opt1) from neuraminidase__InfluenzaA__ADE20344

SEQ ID NO: 82434 - RNA, 1410 nt, Artificial Sequence; identical to SEQ ID NO: 81985
  derived and/or modified CDS sequence (opt1) from neuraminidase__InfluenzaA__ADE20354

SEQ ID NO: 82435 - RNA, 1410 nt, Artificial Sequence; identical to SEQ ID NO: 81985
  derived and/or modified CDS sequence (opt1) from neuraminidase__InfluenzaA__ADE20378

SEQ ID NO: 82436 - RNA, 1410 nt, Artificial Sequence; identical to SEQ ID NO: 81985
  derived and/or modified CDS sequence (opt1) from neuraminidase__InfluenzaA__ADE20391

SEQ ID NO: 82437 - RNA, 1410 nt, Artificial Sequence; identical to SEQ ID NO: 81985
  derived and/or modified CDS sequence (opt1) from neuraminidase__InfluenzaA__ADE20631

SEQ ID NO: 82438 - RNA, 1410 nt, Artificial Sequence; identical to SEQ ID NO: 81985
  derived and/or modified CDS sequence (opt1) from neuraminidase__InfluenzaA__ADE20641

SEQ ID NO: 82439 - RNA, 1410 nt, Artificial Sequence
  derived and/or modified CDS sequence (opt1) from neuraminidase__InfluenzaA__ADE20651
augaaccccaaccagaagaucaucaccaucggcagcgugugcaugaccaucgggauggccaaccugauccuccagaucggcaacaucaucuccaucuggaucagccacuccauccagcuggggaaccagaaccagaucgagacgugcaaccagagcgucaucaccuacgagaacaacaccugggugaaccagaccuacgugaacaucuccaacacgaacuucgccgcgggccagagcgucguguccgugaagcuggucgggaacagcucccucugcccggugagcggcugggccaucuacuccaaggacaacagcgugcgcaucggcuccaagggggacgucuucgugauccgggagcccuucaucagcugcagcccccuggagugccgcaccuucuuccugacccagggcgcccuccugaacgacaagcacuccaacgggaccaucaaggaccggucccccuaccgcacgcugaugagcugcccgaucggcgaggugcccucccccuacaacagccgguucgagagcgucgccugguccgccagcgcgugccacgacgggaucaacuggcucaccaucggcaucuccggccccgacaacggggccguggccgugcugaaguacaacggcaucaucaccgacaccaucaagagcuggcgcaacaacauccugcggacgcaggaguccgagugcgccugcgucaacgggagcugcuucaccgugaugaccgacggcccguccgacggccaggcgagcuacaagaucuuccgcaucgagaaggggaagaucgugaaguccgucgagaugaacgcccccaacuaccacuacgaggagugcagcugcuaccccgacuccagcgagaucacgugcgugugccgggacaacuggcacggcuccaaccgccccugggugagcuucaaccagaaccucgaguaccagaucggguacaucugcuccggcaucuucggggacaacccgcggcccaacgacaagaccggcagcugcggccccgucuccagcaacggggccaacggcgugaagggguucuccuucaaguacggcaacgggguguggaucggccgcaccaagagcaucagcucccggaacggcuucgagaugaucugggaccccaacggguggaccggcaccgacaacaacuucagcaucaagcaggacaucgucgggaucaacgagugguccggcuacagcggguccuucgugcagcacccggagcugacgggccuggacugcauccgccccugcuucugggucgagcucauccggggccgccccaaggagaacaccaucuggaccagcggguccagcaucuccuucugcggcgugaacagcgacaccguggggugguccuggcccgacggcgccgagcugccguucacgaucgacaaguga

SEQ ID NO: 82440 - RNA, 1410 nt, Artificial Sequence; identical to SEQ ID NO: 81985
  derived and/or modified CDS sequence (opt1) from neuraminidase__InfluenzaA__ADE20661

SEQ ID NO: 82441 - RNA, 1410 nt, Artificial Sequence; identical to SEQ ID NO: 81985
  derived and/or modified CDS sequence (opt1) from neuraminidase__InfluenzaA__ADE20671

SEQ ID NO: 82442 - RNA, 1410 nt, Artificial Sequence; identical to SEQ ID NO: 81985
  derived and/or modified CDS sequence (opt1) from neuraminidase__InfluenzaA__ADE20681

SEQ ID NO: 82443 - RNA, 1410 nt, Artificial Sequence
  derived and/or modified CDS sequence (opt1) from neuraminidase__InfluenzaA__ADE20701
augaaccccaaccagaagaucaucaccaucggcagcgugugcaugaccaucgggauggccaaccugauccuccagaucggcaacaucaucuccaucuggaucagccacuccauccagcuggggaaccagaaccagaucgagacgugcaaccagagcgucaucaccuacgagaacaacaccugggugaaccagaccuacgugaacaucuccaacacgaacuucgccgcgggccagagcgucguguccgugaagcuggccgggaacagcucccucugcccggucagcggcugggccaucuacuccaaggacaacagcgugcgcaucggcuccaagggggacguguucgucauccgggagcccuucaucagcugcagcccccuggagugccgcaccuucuuccugacccagggcgcccuccugaacgacaagcacuccaacgggaccaucaaggaccggucccccuaccgcacgcugaugagcugcccgaucggcgaggugcccucccccuacaacagccgguucgagagcguggccugguccgcgagcgccugccacgacgggaucaacuggcucaccaucggcaucuccggccccgacaacggggccgucgccgugcugaaguacaacggcgugaucaccgacaccaucaagagcuggcgcaacaacauccugcggacgcaggaguccgagugcgcgugcgucaacgggagcugcuucaccgugaugaccgacggcccguccaacggccaggccagcuacaagaucuuccgcaucgagaaggggaagaucgugaaguccgucgagaugaacgcccccaacuaccacuacgaggagugcagcugcuaccccgacuccagcgagaucacgugcgugugccgggacaacuggcacggcuccaaccgccccugggugagcuucaaccagaaccucgaguaccagaucggguacaucugcuccggcaucuucggggacaacccgcggcccaacgacaagaccggcagcugcggccccgucuccagcaacggggccaacggcgugaagggguucuccuucaaguacggcaacgggguguggaucggccgcaccaagagcaucagcucccggaacggcuucgagaugaucugggaccccaacggguggaccggcaccgacaacaacuucagcaucaagcaggacaucgucgggaucaacgagugguccggcuacagcggguccuucgugcagcacccggagcugacgggccuggacugcauccgccccugcuucugggucgagcucauccggggccgccccaaggagaacaccaucuggaccagcggguccagcaucuccuucugcggcgugaacagcgacaccguggggugguccuggcccgacggcgccgagcugccguucacgaucgacaaguga

SEQ ID NO: 82444 - RNA, 1410 nt, Artificial Sequence; identical to SEQ ID NO: 81985
  derived and/or modified CDS sequence (opt1) from neuraminidase__InfluenzaA__ADE20711

SEQ ID NO: 82445 - RNA, 1410 nt, Artificial Sequence
  derived and/or modified CDS sequence (opt1) from neuraminidase__InfluenzaA__ADE20721
augaaccccaaccagaagaucaucaccaucggcagcgugugcaugaccaucgggauggccaaccugauccuccagaucggcaacaucaucuccaucuggaucagccacuccauccagcuggggaaccagaaccagaucgagacgugcaaccagagcgucaucaccuacgagaacaacaccugggugaaccagaccuacgugaacaucuccaacacgaacuucgccgcgggccagagcgucguguccgugaagcuggucgggaacagcucccucugcccggugagcggcugggccaucuacuccaaggacaacagcgugcgcaucggcuccaagggggacgucuucgugauccgggagcccuucaucagcugcagcccccuggagugccgcaccuucuuccugacccagggcgcccuccugaacgacaagcacuccaacgggaccaucaaggaccggucccccuaccgcacgcugaugagcugcccgaucggcgaggugcccucccccuacaacagccgguucgagagcgucgccugguccgccagcgcgugccacgacgggaucaacuggcucaccaucggcaucuccggccccgacaacggggccguggccgugcugaaguacaacggcaucaucaccgacaccaucaagagcuggcgcaacaacauccugcggacgcaggaguccgagugcgccugcgucaacgggagcugcuucaccgugaugaccgacggcccguccaacggccaggcgagcuacaagaucuuccgcaucgagaaggggaagaucgugaaguccgucgagaugaacgcccccaacuaccacuacgaggagugcagcugcuaccccgacuccagcgagaucacgugcgugugccgggacaacuggcacggcuccaaccgccccugggugagcuucaaccagaaccucgaguaccagaucggguacaucugcuccggcaucuucggggacaacccgcggcccaacgacaagaccggcagcugcggccccgucuccagcaacggggccaacggcgugaagggguucuccuucaaguacggcaacgggguguggaucggccgcaccaagagcaucagcucccggaacggcuucgagaugaucugggaccccaacggguggaccggcaccgacaacaacuucagcaucaagcaggacaucgucgggaucaacgagugguccggcuacagcggguccuucgugcagcacccggagcugacgggccuggacugcauccgccccugcuucugggucgagcucauccggggccgccccaaggagaacaccaucuggaccagcggguccagcaucuccuucugcggcgugaacagcgacaccguggggugguccuggcccgacggcgccgagcugccguucacgaucgaccgguga

SEQ ID NO: 82446 - RNA, 1410 nt, Artificial Sequence; identical to SEQ ID NO: 82443
  derived and/or modified CDS sequence (opt1) from neuraminidase__InfluenzaA__ADE20731

SEQ ID NO: 82447 - RNA, 1410 nt, Artificial Sequence; identical to SEQ ID NO: 81985
  derived and/or modified CDS sequence (opt1) from neuraminidase__InfluenzaA__ADE20741

SEQ ID NO: 82448 - RNA, 1410 nt, Artificial Sequence; identical to SEQ ID NO: 81985
  derived and/or modified CDS sequence (opt1) from neuraminidase__InfluenzaA__ADE20751

SEQ ID NO: 82449 - RNA, 1410 nt, Artificial Sequence; identical to SEQ ID NO: 82443
  derived and/or modified CDS sequence (opt1) from neuraminidase__InfluenzaA__ADE20761

SEQ ID NO: 82450 - RNA, 1410 nt, Artificial Sequence; identical to SEQ ID NO: 82443
  derived and/or modified CDS sequence (opt1) from neuraminidase__InfluenzaA__ADE20781

SEQ ID NO: 82451 - RNA, 1410 nt, Artificial Sequence; identical to SEQ ID NO: 80762
  derived and/or modified CDS sequence (opt1) from neuraminidase__InfluenzaA__ADE20791

SEQ ID NO: 82452 - RNA, 1410 nt, Artificial Sequence; identical to SEQ ID NO: 80762
  derived and/or modified CDS sequence (opt1) from neuraminidase__InfluenzaA__ADE20801

SEQ ID NO: 82453 - RNA, 1410 nt, Artificial Sequence; identical to SEQ ID NO: 80762
  derived and/or modified CDS sequence (opt1) from neuraminidase__InfluenzaA__ADE20811

SEQ ID NO: 82454 - RNA, 1410 nt, Artificial Sequence; identical to SEQ ID NO: 80762
  derived and/or modified CDS sequence (opt1) from neuraminidase__InfluenzaA__ADE20821

SEQ ID NO: 82455 - RNA, 1410 nt, Artificial Sequence; identical to SEQ ID NO: 80762
  derived and/or modified CDS sequence (opt1) from neuraminidase__InfluenzaA__ADE20831

SEQ ID NO: 82456 - RNA, 1410 nt, Artificial Sequence; identical to SEQ ID NO: 80762
  derived and/or modified CDS sequence (opt1) from neuraminidase__InfluenzaA__ADE20841

SEQ ID NO: 82457 - RNA, 1410 nt, Artificial Sequence; identical to SEQ ID NO: 80762
  derived and/or modified CDS sequence (opt1) from neuraminidase__InfluenzaA__ADE20851

SEQ ID NO: 82458 - RNA, 1410 nt, Artificial Sequence; identical to SEQ ID NO: 82378
  derived and/or modified CDS sequence (opt1) from neuraminidase__InfluenzaA__ADE20861

SEQ ID NO: 82459 - RNA, 1410 nt, Artificial Sequence; identical to SEQ ID NO: 80762
  derived and/or modified CDS sequence (opt1) from neuraminidase__InfluenzaA__ADE20871

SEQ ID NO: 82460 - RNA, 1410 nt, Artificial Sequence; identical to SEQ ID NO: 82374
  derived and/or modified CDS sequence (opt1) from neuraminidase__InfluenzaA__ADE20881

SEQ ID NO: 82461 - RNA, 1410 nt, Artificial Sequence; identical to SEQ ID NO: 80762
  derived and/or modified CDS sequence (opt1) from neuraminidase__InfluenzaA__ADE20891

SEQ ID NO: 82462 - RNA, 1410 nt, Artificial Sequence; identical to SEQ ID NO: 80762
  derived and/or modified CDS sequence (opt1) from neuraminidase__InfluenzaA__ADE20901

SEQ ID NO: 82463 - RNA, 1410 nt, Artificial Sequence; identical to SEQ ID NO: 80762
  derived and/or modified CDS sequence (opt1) from neuraminidase__InfluenzaA__ADE20911

SEQ ID NO: 82464 - RNA, 1410 nt, Artificial Sequence; identical to SEQ ID NO: 80762
  derived and/or modified CDS sequence (opt1) from neuraminidase__InfluenzaA__ADE20921

SEQ ID NO: 82465 - RNA, 1410 nt, Artificial Sequence
  derived and/or modified CDS sequence (opt1) from neuraminidase__InfluenzaA__ADE20931
augaaccccaaccagaagaucaucaccaucggcagcgugugcaugaccaucgggauggccaaccugauccuccagaucggcaacaucaucuccaucuggaucagccacuccauccagcuggggaaccagaaccagaucgagacgugcaaccagagcgucaucaccuacgagaacaacaccugggugaaccagaccuacgugaacaucuccaacacgaacuucgccgcgggccagagcgucguguccgugaagcuggccgggaacagcucccucugcccggucagcggcugggccaucuacuccaaggacaacagcauccgcaucggcuccaagggggacguguucgugauccgggagcccuucaucagcugcagcccccuggagugccgcaccuucuuccugacccagggcgcccuccugaacgacaagcacuccaacgggaccaucaaggaccggucccccuaccgcacgcugaugagcugcccgaucggcgagguccccucccccuacaacagccgguucgagagcguggccugguccgcgagcgccugccacgacgggaucaacuggcucaccaucggcaucuccggccccgacaacggggccguggccguccugaaguacaacggcaucaucaccgacaccaucaagagcuggcgcaacaacauccugcggacgcaggaguccgagugcgcgugcgugaacgggagcugcuucaccgugaugaccgacggcccguccgacggccaggccagcuacaagaucuuccgcaucgagaaggggaagaucgucaaguccguggagaugaacgcccccaacuaccacuacgaggagugcagcugcuaccccgacuccagcgagaucacgugcgugugccgggacaacuggcacggcuccaaccgccccugggucagcuucaaccagaaccucgaguaccagaucggguacaucugcuccggcaucuucggggacaacccgcggcccaacgacaagaccggcagcugcggccccgugcuguccaacggggccaacggcgugaagggguucagcuucaaguacggcaacggggucuggaucggccgcaccaaguccaucggcagccggaacggguucgagaugaucugggaccccaacggcuggaccgggaccgacaacaacuucagcaucaagcaggacaucgugggcaucaacgagugguccggguacagcggcuccuucgugcagcacccggagcugacgggccucgacugcauccgccccugcuucugggucgagcugauccgggggcgccccaaggagaacaccaucuggaccagcggcuccagcaucuccuucugcggggugaacagcgacaccgucggcugguccuggcccgacggcgccgagcugccguucacgaucgacaaguga

SEQ ID NO: 82466 - RNA, 1410 nt, Artificial Sequence; identical to SEQ ID NO: 80762
  derived and/or modified CDS sequence (opt1) from neuraminidase__InfluenzaA__ADE20941

SEQ ID NO: 82467 - RNA, 1410 nt, Artificial Sequence
  derived and/or modified CDS sequence (opt1) from neuraminidase__InfluenzaA__ADE20951
augaaccccaaccagaagaucaucaccaucggcagcgugugcaugaccaucgggauggccaaccugauccuccagaucggcaacaucaucuccaucuggaucagccacuccauccagcuggggaaccagaaccagaucgagacgugcaaccagagcgucaucaccuacgagaacaacaccugggugaaccagaccuacgugaacaucuccaacacgaacuucgccgcgggccagagcgucguguccgugaagcuggccgggaacagcucccucugcccggucagcggcugggccaucuacuccaaggacaacagcauccgcaucggcuccaagggggacguguucgugauccgggagcccuucaucagcugcagcccccuggagugccgcaccuucuuccugacccagggcgcccuccugaacgacaagcacuccaacgggaccaucaaggaccggucccccuaccgcacgcugaugagcugcccgaucggcgagguccccucccccuacaacagccgguucgagagcguggccugguccgcgagcgccugccacgacgggaucaacuggcucaccaucggcaucuccggccccgacaacggggccguggccguccugaaguacaacggcaucaucaccgacaccaucaagagcuggcgcaacaacauccugcggacgcaggaguccgagugcgcgugcgugaacgggagcugcuucaccgugaugaccgacggcccguccgacggccaggccagcuacaagaucuuccgcaucgagaaggggaagaucgucaaguccguggagaugaacgcccccaacuaccacuacgaggagugcagcugcuaccccgacuccagcgagaucacgugcgugugccgggacaacuggcacggcuccaaccgccccugggucagcuucaaccagaaccucgaguaccagaucggguacaucugcuccggcaucuucggggacaacccgcggcccaacgacaagaccggcagcugcggccccguguccagcaacggggccaacggcgugaagggguucuccuucaaguacggcaacggggucuggaucggccgcaccaagagcaucagcucccggaacggcuucgagaugaucugggaccccaacggguggaccggcaccgacaacaacuucagcaucaagcaggacgugguggggaucaacgagugguccggcuacagcggguccuucguccagcacccggagcugacgggccuggacugcauccgccccugcuucuggguggagcucauccggggccgccccaaggagaacaccaucuggaccagcggguccagcaucuccuucugcggcgucaacagcgacaccguggggugguccuggcccgacggcgccgagcugccguucacgaucgacaaguga

SEQ ID NO: 82468 - RNA, 1410 nt, Artificial Sequence
  derived and/or modified CDS sequence (opt1) from neuraminidase__InfluenzaA__ADE20961
augaaccccaaccagaagaucaucaccaucggcagcgugugcaugaccaucgggauggccaaccugauccuccagaucggcaacaucaucuccaucuggaucagccacuccauccagcuggggaaccagaaccagaucgagacgugcaaccagagcgucaucaccuacgagaacaacaccugggugaaccagaccuacgugaacaucuccaacacgaacuucgccgcgggccagagcgucguguccgugaagcuggccgggaacagcucccucugcccggucagcggcugggccaucuacuccaaggacaacagcauccgcaucggcuccaagggggacguguucgugauccgggagcccuucaucagcugcagcccccuggagugccgcaccuucuuccugacccagggcgcccuccugaacgacaagcacuccaacgggaccaucaaggaccggucccccuaccgcacgcugaugagcugcccgaucggcgagguccccucccccuacaacagccgguucgagagcguggccugguccgcgagcgccugccacgacgggaucaacuggcucaccaucggcaucuccggccccgacaacggggccguggccguccugaaguacaacgacaucaucaccgacaccaucaagagcuggcgcaacaacauccugcggacgcaggaguccgagugcgcgugcgugaacggcagcugcuucaccgugaugaccgacgggccguccgacggccaggccagcuacaagaucuuccgcaucgagaagggcaagaucgucaaguccguggagaugaacgcccccaacuaccacuacgaggagugcagcugcuaccccgacuccagcgagaucacgugcgugugccgggacaacuggcacggguccaaccgccccugggucagcuucaaccagaaccucgaguaccagaucggcuacaucugcuccgggaucuucggcgacaacccgcggcccaacgacaagaccgggagcugcggccccguguccagcaacggcgccaacggggugaagggcuucuccuucaaguacgggaacggcgucuggaucgggcgcaccaagagcaucagcucccggaacggcuucgagaugaucugggaccccaacggcuggaccgggaccgacaacaacuucagcaucaagcaggacaucgugggcaucaacgagugguccggguacagcggcuccuucgugcagcacccggagcugacggggcuggacugcauccgccccugcuucugggucgagcucauccggggccgccccaaggagaacaccaucuggaccagcggcuccagcaucuccuucugcggggugaacagcgacaccgucggcugguccuggcccgacggggccgagcugccguucacgaucgacaaguga

SEQ ID NO: 82469 - RNA, 1410 nt, Artificial Sequence; identical to SEQ ID NO: 80762
  derived and/or modified CDS sequence (opt1) from neuraminidase__InfluenzaA__ADE20971

SEQ ID NO: 82470 - RNA, 1410 nt, Artificial Sequence; identical to SEQ ID NO: 82378
  derived and/or modified CDS sequence (opt1) from neuraminidase__InfluenzaA__ADE20981

SEQ ID NO: 82471 - RNA, 1410 nt, Artificial Sequence; identical to SEQ ID NO: 80762
  derived and/or modified CDS sequence (opt1) from neuraminidase__InfluenzaA__ADE20991

SEQ ID NO: 82472 - RNA, 1410 nt, Artificial Sequence
  derived and/or modified CDS sequence (opt1) from neuraminidase__InfluenzaA__ADE21001
augaaccccaaccagaagaucaucaccaucggcagcgugugcaugaccaucgggauggccaaccugauccuccagaucggcaacaucaucuccaucuggaucagccacacgauccagcuggggaaccagaaccagaucgagaccugcaaccaguccgucaucaccuacgagaacaacaccugggugaaccagacguacgugaacaucagcaacaccaacuucgccgcgggccaguccgucgugagcgugaagcuggccgggaacuccagccucugcccggucuccggcugggccaucuacagcaaggacaacuccauccgcaucggcagcaagggggacguguucaucauccgggagcccuucaucuccugcagcccccuggagugccgcaccuucuuccugacccagggcgcccuccugaacgacaagcacuccaacgggacgaucaaggaccggagccccuaccgcacccugauguccugcccgaucggcgaggugcccagccccuacaacucccgguucgagagcgucgccuggagcgcguccgccugccacgacgggaucaacuggcucaccaucggcaucagcggccccgacaacggggccguggccgugcugaaguacaacggcaucaucaccgacacgaucaaguccuggcgcaacaacauccugcggacccaggagagcgagugcgcgugcgucaacggguccugcuucaccgugaugaccgacggcccgagcgacggccaggccuccuacaagaucuuccgcaucgagaaggggaagaucgucaagagcguggagaugaacgcccccaacuaccacuacgaggagugcuccugcuaccccgacagcuccgagaucacgugcgugugccgggacaacuggcacggcagcaaccgccccuggguguccuucaaccagaaccucgaguaccagaucggguacaucugcagcggcaucuucggggacaacccgcggcccaacgacaagaccggcuccugcggccccgucagcuccaacggggccaacggcgugaagggguucagcuucaaguacggcaacgggguguggaucggccgcaccaaguccaucagcagccggaacggcuucgagaugaucugggaccccaacggguggaccggcacggacaacaacuucuccaucaagcaggacaucgucgggaucaacgaguggagcggcuacuccgggagcuucgugcagcacccggagcugaccggccuggacugcauccgccccugcuucuggguggagcucauccggggccgccccaaggagaacaccaucuggaccuccgggagcuccaucagcuucugcggcgucaacuccgacacggugggguggagcuggcccgacggcgccgagcugccguucaccaucgacaaguga

SEQ ID NO: 82473 - RNA, 1410 nt, Artificial Sequence; identical to SEQ ID NO: 80762
  derived and/or modified CDS sequence (opt1) from neuraminidase__InfluenzaA__ADE21011

SEQ ID NO: 82474 - RNA, 1410 nt, Artificial Sequence; identical to SEQ ID NO: 80762
  derived and/or modified CDS sequence (opt1) from neuraminidase__InfluenzaA__ADE21021

SEQ ID NO: 82475 - RNA, 1410 nt, Artificial Sequence; identical to SEQ ID NO: 82411
  derived and/or modified CDS sequence (opt1) from neuraminidase__InfluenzaA__ADE21031

SEQ ID NO: 82476 - RNA, 1410 nt, Artificial Sequence
  derived and/or modified CDS sequence (opt1) from neuraminidase__InfluenzaA__ADE21041
augaaccccaaccagaagaucaucaccaucggcagcgugugcaugaccaucgggauggccaaccugauccuccagaucggcaacaucaucuccaucuggaucagccacuccauccagcuggggaaccagaaccagaucgagacgugcaaccagagcgucaucaccuacgagaacaacaccugggugaaccagaccuacgugaacaucuccaacacgaacuucgccgcgggccagagcgucguguccgugaagcuggccgggaacagcucccucugcccggucagcggcugggccaucuacuccaaggacaacagcauccgcaucggcuccaagggggacguguucgugauccgggagcccuucaucagcugcagcccccuggagugccgcaccuucuuccugacccagggcgcccuccugaacgacaagcacuccaacgggaccaucaaggaccggucccccuaccgcacgcugaugagcugcccgaucggcgagguccccucccccuacaacagccgguucgagagcguggccugguccgcgagcgccugccacgacgggaucaacuggcucaccaucggcaucuccggccccgacaacggggccguggccguccugaaguacaacggcaucaucaccgacaccaucaagagcuggcgcaacaacauccugcggacgcaggaguccgagugcgcgugcgugaacgggagcugcuucaccgugaugaccgacggcccguccgacggccaggccagcuacaagaucuuccgcaucgagaaggggaagaucgucaaguccaucgagaugaacgcccccaacuaccacuacgaggagugcagcugcuaccccgacuccagcgagaucacgugcgugugccgggacaacuggcacggcuccaaccgccccugggugagcuucaaccagaaccucgaguaccagaucggguacaucugcuccggcaucuucggggacaacccgcggcccaacgacaagaccggcagcugcggccccgucuccagcaacggggccaacggcgugaagggguucuccuucaaguacggcaacgggguguggaucggccgcaccaagagcaucagcucccggaacggcuucgagaugaucugggaccccaacggguggaccggcaccgacaacaacuucagcaucaagcaggacaucgucgggaucaacgagugguccggcuacagcggguccuucgugcagcacccggagcugacgggccuggacugcauccgccccugcuucuggguggagcucauccggggccgccccaaggagaacaccaucuggaccagcggguccagcaucuccuucugcggcgucaacagcgacaccguggggugguccuggcccgacggcgccgagcugccguucacgaucgacaaguga

SEQ ID NO: 82477 - RNA, 1410 nt, Artificial Sequence; identical to SEQ ID NO: 80762
  derived and/or modified CDS sequence (opt1) from neuraminidase__InfluenzaA__ADE21051

SEQ ID NO: 82478 - RNA, 1410 nt, Artificial Sequence
  derived and/or modified CDS sequence (opt1) from neuraminidase__InfluenzaA__ADE21071
augaaccccaaccagaagaucaucaccaucggcagcgugugcaugaccaucgggauggccaaccugauccuccagaucggcaacaucaucuccaucuggaucagccacuccauccagcuggggaaccagaaccagaucgagacgugcaaccagagcgucaucaccuacgagaacaacaccugggugaaccagaccuacgugaacaucuccaacacgaacuucgccgcgggccagagcgucguguccgugaagcuggccgggaacagcucccucugcccggucaacggcugggccaucuacagcaaggacaacuccauccgcaucggcagcaagggggacguguucgugauccgggagcccuucaucuccugcagcccccuggagugccgcaccuucuuccugacccagggcgcccuccugaacgacaagcacuccaacgggaccaucaaggaccggagccccuaccgcacgcugauguccugcccgaucggcgagguccccagccccuacaacucccgguucgagagcguggccuggagcgcguccgccugccacgacgggaucaacuggcucaccaucggcaucagcggccccgacaacggggccguggccguccugaaguacaacggcaucaucaccgacaccaucaaguccuggcgcaacaacauccugcggacgcaggagagcgagugcgcgugcgugaacggguccugcuucaccgugaugaccgacggcccgagcgacggccaggccuccuacaagaucuuccgcaucgagaaggggaagaucgucaagagcguggagaugaacgcccccaacuaccacuacgaggagugcuccugcuaccccgacagcuccgagaucacgugcgugugccgggacaacuggcacggcagcaaccgccccugggucuccuucaaccagaaccucgaguaccagaucggguacaucugcagcggcaucuucggggacaacccgcggcccaacgacaagaccggcuccugcggccccgugagcuccaacggggccaacggcgugaagggguucagcuucaaguacggcaacggggucuggaucggccgcaccaaguccaucagcagccggaacggcuucgagaugaucugggaccccaacggguggaccggcaccgacaacaaguucuccaucaagcaggacaucguggggaucaacgaguggagcggcuacuccgggagcuucgugcagcacccggagcugacgggccuggacugcauccgccccugcuucugggucgagcucauccggggccgccccaaggagaacaccaucuggaccuccgggagcuccaucagcuucugcggcgugaacuccgacaccgucggguggagcuggcccgacggcgccgagcugccguucacgaucgacaaguga

SEQ ID NO: 82479 - RNA, 1413 nt, Artificial Sequence; identical to SEQ ID NO: 80656
  derived and/or modified CDS sequence (opt1) from neuraminidase__InfluenzaA__ADE28752

SEQ ID NO: 82480 - RNA, 1413 nt, Artificial Sequence; identical to SEQ ID NO: 81485
  derived and/or modified CDS sequence (opt1) from neuraminidase__InfluenzaA__ADE28763

SEQ ID NO: 82481 - RNA, 1410 nt, Artificial Sequence; identical to SEQ ID NO: 81985
  derived and/or modified CDS sequence (opt1) from neuraminidase__InfluenzaA__ADE28773

SEQ ID NO: 82482 - RNA, 1410 nt, Artificial Sequence; identical to SEQ ID NO: 81985
  derived and/or modified CDS sequence (opt1) from neuraminidase__InfluenzaA__ADE28783

SEQ ID NO: 82483 - RNA, 1410 nt, Artificial Sequence; identical to SEQ ID NO: 82443
  derived and/or modified CDS sequence (opt1) from neuraminidase__InfluenzaA__ADE28803

SEQ ID NO: 82484 - RNA, 1410 nt, Artificial Sequence; identical to SEQ ID NO: 80762
  derived and/or modified CDS sequence (opt1) from neuraminidase__InfluenzaA__ADE28813

SEQ ID NO: 82485 - RNA, 1410 nt, Artificial Sequence; identical to SEQ ID NO: 80762
  derived and/or modified CDS sequence (opt1) from neuraminidase__InfluenzaA__ADE28823

SEQ ID NO: 82486 - RNA, 1410 nt, Artificial Sequence
  derived and/or modified CDS sequence (opt1) from neuraminidase__InfluenzaA__ADE28843
augaaccccaaccagaagaucaucaccaucggcagcgugugcaugaccaucgggauggccaaccugauccuccagaucggcaacaucaucuccaucuggaucagccacuccauccagcuggggaaccagaaccagaucgagacgugcaaccagagcgucaucaccuacgagaacaacaccugggugaaccagaccuacgugaacaucuccaacacgaacuucgccgcgggccagagcgucguguccgugaagcuggccgggaacagcucccucugcccggucagcggcugggccaucuacuccaaggacaacagcgugcgcaucggcuccaagggggacguguucgucauccgggagcccuucaucagcugcagcccccuggagugccgcaccuucuuccugacccagggcgcccuccugaacgacaagcacuccaacgggaccaucaaggaccggucccccuaccgcacgcugaugagcugcccggugggcgaggugcccucccccuacaacagccgguucgagagcgucgccugguccgcgagcgccugccacgacgggaucaacuggcucaccaucggcaucuccggccccgacaacggggccguggccgugcugaaguacaacggcaucaucaccgacaccaucaagagcuggcgcaacaacauccugcggacgcaggaguccgagugcgcgugcgucaacgggagcugcuucaccgugaugaccgacggcccguccaacggccaggccagcuacaagaucuuccgcaucgagaaggggaagaucgugaaguccgucgagaugaacgcccccaacuaccacuacgaggagugcagcugcuaccccgacuccagcgagaucacgugcgugugccgggacaacuggcacggcuccaaccgccccugggugagcuucaaccagaaccucgaguaccagaucggguacaucugcuccggcaucuucggggacaacccgcggcccaacgacaagaccggcagcugcggccccgucuccagcaacggggccaacggcgugaagggguucuccuucaaguacggcaacgggguguggaucggccgcaccaagagcaucagcucccggaacggcuucgagaugaucugggaccccaacggguggaccggcaccgacaacaacuucagcaucaagcaggacaucgucgggaucaacgagugguccggcuacagcggguccuucgugcagcacccggagcugacgggccuggacugcauccgccccugcuucugggucgagcucauccggggccgccccaaggagaacaccaucuggaccagcggguccagcaucuccuucugcggcgugaacagcgacaccguggggugguccuggcccgacggcgccgagcugccguucacgaucgacaaguga

SEQ ID NO: 82487 - RNA, 1410 nt, Artificial Sequence
  derived and/or modified CDS sequence (opt1) from neuraminidase__InfluenzaA__ADE28853
augaaccccaaccagaagaucaucaccaucgugagcgucugcaugaccaucggcauggccaaccugauccuccagaucgggaacaucaucuccaucuggaucagccacuccauccagcugggcaaccagaaccagaucgagacgugcaaccagagcgugaucaccuacgagaacaacaccugggugaaccagaccuacgucaacaucuccaacacgaacuucgccgcggggcagagcgugguguccgucaagcuggccggcaacagcucccucugcccggugagcgggugggccaucuacuccaaggacaacagcgugcgcaucggcuccaagggcgacgucuucgugauccgggagcccuucaucagcugcagcccccuggagugccgcaccuucuuccugacccagggggcccuccugaacgacaagcacuccaacggcaccaucaaggaccggucccccuaccgcacgcugaugagcugcccgaucggggaggugcccucccccuacaacagccgguucgagagcgucgccugguccgcgagcgccugccacgacggcaucaacuggcucaccaucgggaucuccggccccgacaacggcgccguggccgugcugaaguacaacgggaucaucaccgacaccaucaagagcuggcgcaacaacauccugcggacgcaggaguccgagugcgcgugcgucaacggcagcugcuucaccgugaugaccgacgggccguccaacggccaggccagcuacaagaucuuccgcaucgagaagggcaagaucgugaaguccgucgagaugaacgcccccaacuaccacuacgaggagugcagcugcuaccccgacuccagcgagaucacgugcgugugccgggacaacuggcacggguccaaccgccccugggugagcuucaaccagaaccucgaguaccagaucggcuacaucugcuccgggaucuucggcgacaacccgcggcccaacgacaagaccgggagcugcggccccgucuccagcaacggcgccaacggggugaagggcuucuccuucaaguacgggaacggcguguggaucgggcgcaccaagagcaucagcucccggaacggcuucgagaugaucugggaccccaacggcuggaccgggaccgacaacaacuucagcaucaagcaggacaucgucggcaucaacgagugguccggguacagcggcuccuucgugcagcacccggagcugacggggcuggacugcauccgccccugcuucugggucgagcucauccggggccgccccaaggagaacaccaucuggaccagcggcuccagcaucuccuucugcggggugaacagcgacaccgugggcugguccuggcccgacggggccgagcugccguucacgaucgacaaguga

SEQ ID NO: 82488 - RNA, 1410 nt, Artificial Sequence; identical to SEQ ID NO: 82486
  derived and/or modified CDS sequence (opt1) from neuraminidase__InfluenzaA__ADE28884

SEQ ID NO: 82489 - RNA, 1410 nt, Artificial Sequence
  derived and/or modified CDS sequence (opt1) from neuraminidase__InfluenzaA__ADE28894
augaaccccaaccagaagaucaucaccaucggcagcgugugcaugaccaucgggauggccaaccugauccuccagaucggcaacaucaucuccaucuggaucagccacuccguccagcuggggaaccagaaccagaucgagacgugcaaccagagcgugaucaccuacgagaacaacaccugggugaaccagaccuacgucaacaucuccaacacgaacuucgccgcgggccagagcgugguguccgucaagcuggccgggaacagcucccucugcccggugagcggcugggccaucuacuccaaggacaacagcgugcgcaucggcuccaagggggacgucuucgugauccgggagcccuucaucagcugcagcccccuggagugccgcaccuucuuccugacccagggcgcccuccugaacgacaagcacuccaacgggaccaucaaggaccggucccccuaccgcacgcugaugagcugcccgaucggcgaggugcccucccccuacaacagccgguucgagagcgucgccugguccgcgagcgccugccacgacgggaucaacuggcucaccaucggcaucuccggccccgacaacggggccguggccgugcugaaguacaacggcaucaucaccgacaccaucaagagcuggcgcaacaacauccugcggacgcaggaguccgagugcgcgugcgucaacgggagcugcuucaccgugaugaccgacggcccguccaacggccaggccagcuacaagaucuuccgcaucgagaaggggaagaucgugaaguccgucgagaugaacgcccccaacuaccacuacgaggagugcagcugcuaccccgacuccagcgagaucacgugcgugugccgggacaacuggcacggcuccaaccgccccugggugagcuucaaccagaaccucgaguaccagaucggguacaucugcuccggcaucuucggggacaacccgcggcccaacgacaagaccggcagcugcggccccgucuccagcaacggggccaacggcgugaagggguucuccuucaaguacggcaacgggguguggaucggccgcaccaagagcaucagcucccggaacggcuucgagaugaucugggaccccaacggguggaccggcaccgacaacaacuucagcaucaagcaggacaucgucgggaucaacgagugguccggcuacagcggguccuucgugcagcacccggagcugacgggccuggacugcauccgccccugcuucugggucgagcucauccggggccgccccaaggagaacaccaucuggaccagcggguccagcaucuccuucugcggcgugaacagcgacaccguggggugguccuggcccgacggcgccgagcugccguucacgaucgacaaguga

SEQ ID NO: 82490 - RNA, 1410 nt, Artificial Sequence; identical to SEQ ID NO: 82410
  derived and/or modified CDS sequence (opt1) from neuraminidase__InfluenzaA__ADE28904

SEQ ID NO: 82491 - RNA, 1410 nt, Artificial Sequence; identical to SEQ ID NO: 80762
  derived and/or modified CDS sequence (opt1) from neuraminidase__InfluenzaA__ADE28914

SEQ ID NO: 82492 - RNA, 1410 nt, Artificial Sequence; identical to SEQ ID NO: 80762
  derived and/or modified CDS sequence (opt1) from neuraminidase__InfluenzaA__ADE28924

SEQ ID NO: 82493 - RNA, 1410 nt, Artificial Sequence
  derived and/or modified CDS sequence (opt1) from neuraminidase__InfluenzaA__ADE28934
augaaccccaaccagaagaucaucaccaucggcagcgugugcaugaccaucgggauggccaaccugauccuccagaucggcaacaucaucuccaucuggaucagccacuccauccagcuggggaaccagaaccagaucgagacgugcaaccagagcgucaucaccuacgagaacaacaccugggugaaccagaccuacgugaacaucuccaacacgaacuucgccgcgggccagagcgucguguccgugaagcuggccgggaacagcucccucugcccggucagcggcugggccaucuacuccaaggacaacagcauccgcaucggcuccaagggggacguguucgugauccgggagcccuucaucagcugcagcccccuggagugccgcaccuucuuccugacccagggcgcccuccugaacgacaagcacuccaacgggaccaucaaggaccggucccccuaccgcacgcugaugagcugcccgaucggcgagguccccucccccuacaacagccgguucgagagcguggccugguccgcgagcgccugccacgacgggaucaacuggcucaccaucggcaucuccggccccgacaacggggccguggccguccugaaguacaacggcaucaucaccgacaccaucaagagcuggcgcaacaacauccugcggacgcaggaguccgagugcgcgugcaucaacgggagcugcuucaccgugaugaccgacggcccguccgacggccaggccagcuacaagaucuuccgcaucgagaaggggaagaucgugaaguccgucgagaugaacgcccccaacuaccacuacgaggagugcagcugcuaccccgacuccagcgagaucacgugcgugugccgggacaacuggcacggcuccaaccgccccugggugagcuucaaccagaaccucgaguaccagaucggguacaucugcuccggcaucuucggggacaacccgcggcccaacgacaagaccggcagcugcggccccgucuccagcaacggggccaacggcgugaagggguucuccuucaaguacggcaacgggguguggaucggccgcaccaagagcaucagcucccggaacggcuucgagaugaucugggaccccaacggguggaccggcaccgacaacaacuucagcaucaagcaggacaucgucgggaucaacgagugguccggcuacagcggguccuucgugcagcacccggagcugacgggccuggacugcauccgccccugcuucuggguggagcucauccggggccgccccaaggagaacaccaucuggaccagcggguccagcaucuccuucugcggcgucaacagcgacaccguggggugguccuggcccgacggcgccgagcugccguucacgaucgacaaguga

SEQ ID NO: 82494 - RNA, 1410 nt, Artificial Sequence; identical to SEQ ID NO: 80762
  derived and/or modified CDS sequence (opt1) from neuraminidase__InfluenzaA__ADE28954

SEQ ID NO: 82495 - RNA, 1410 nt, Artificial Sequence
  derived and/or modified CDS sequence (opt1) from neuraminidase__InfluenzaA__ADE28964
augaaccccaaccagaagaucaucaccaucggcagcgugugcaugaccaucgggauggccaaccugauccuccagaucggcaacaucaucuccaucuggaucagccacuccauccagcuggggaaccagaaccagaucgagacgugcaaccagagcgucaucaccuacgagaacaacaccugggugaaccagaccuacgugaacaucuccaacaucaacuucgccgcgggccagagcgucguguccgugaagcuggccgggaacagcucccucugcccggucagcggcugggccaucuacuccaaggacaacagcauccgcaucggcuccaagggggacguguucgugauccgggagcccuucaucagcugcagcccccuggagugccgcacguucuuccugacccagggcgcccuccugaacgacaagcacuccaacgggaccaucaaggaccggucccccuaccgcacccugaugagcugcccgaucggcgagguccccucccccuacaacagccgguucgagagcguggccugguccgcgagcgccugccacgacgggaucaacuggcucacgaucggcaucuccggccccgacaacggggccguggccguccugaaguacaacggcaucaucaccgacaccaucaagagcuggcgcaacaacauccugcggacccaggaguccgagugcgcgugcgugaacgggagcugcuucacggugaugaccgacggcccguccgacggccaggccagcuacaagaucuuccgcaucgagaaggggaagaucgucaaguccguggagaugaacgcccccaacuaccacuacgaggagugcagcugcuaccccgacuccagcgagaucacgugcgugugccgggacaacuggcacggcuccaaccgccccugggucagcuucaaccagaaccucgaguaccagaucggguacaucugcuccggcaucuucggggacaacccgcggcccaacgacaagaccggcagcugcggccccguguccagcaacggggccaacggcgugaagggguucuccuucaaguacggcaacggggucuggaucggccgcaccaagagcaucagcucccggaacggcuucgagaugaucugggaccccaacggguggaccggcaccgacaacaacuucagcaucaagcaggacaucguggggaucaacgagugguccggcuacagcggguccuucgugcagcacccggagcugaccggccuggacugcauccgccccugcuucugggucgagcucauccggggccgccccaaggagaacacgaucuggaccagcggguccagcaucuccuucugcggcgugaacagcgacaccgucgggugguccuggcccgacggcgccgagcugccguucaccaucgacaaguga

SEQ ID NO: 82496 - RNA, 1410 nt, Artificial Sequence; identical to SEQ ID NO: 80762
  derived and/or modified CDS sequence (opt1) from neuraminidase__InfluenzaA__ADE28974

SEQ ID NO: 82497 - RNA, 1410 nt, Artificial Sequence
  derived and/or modified CDS sequence (opt1) from neuraminidase__InfluenzaA__ADE29004
augaaccccaaccagaagaucaucaccaucggcagcgugugcaugaccaucgggcuggccaaccucauccugcagaucggcaacaucaucuccaucuggaucagccacuccauccagcuggggaaccagaaccagaucgagacgugcaaccagagcgucaucaccuacgagaacaacaccugggugaaccagaccuacgugaacaucuccaacacgaacuucgccgcgggccagagcgucguguccgugaagcucgccgggaacagcucccugugcccggucagcggcugggccaucuacuccaaggacaacagcgugcgcaucggcuccaagggggacguguucgucauccgggagcccuucaucagcugcagcccccuggagugccgcaccuucuuccucacccagggcgcccugcugaacgacaagcacuccaacgggaccaucaaggaccggucccccuaccgcacgcucaugagcugcccgaucggcgaggugcccucccccuacaacagccgguucgagagcguggccugguccgcgagcgccugccacgacgggaucaacuggcugaccaucggcaucuccggccccgacaacggggccgucgccgugcugaaguacaacggcaucaucaccgacaccaucaagagcuggcgcaacaacauccuccggacgcaggaguccgagugcgcgugcgugaacgggagcugcuucaccgucaugaccgacggcccguccgacggccaggccagcuacaagaucuuccgcaucgagaaggggaagaucgugaaguccguggagaugaacgcccccaacuaccacuacgaggagugcagcugcuaccccgacuccagcgagaucacgugcgucugccgggacaacuggcacggcuccaaccgccccugggugagcuucaaccagaaccuggaguaccggaucggguacaucugcuccggcaucuucggggacaacccgcgccccaacgacaagaccggcagcugcggccccguguccagcaacggggccaacggcgucaagggguucuccuucaaguacggcaacgggguguggaucggccggaccaagagcaucagcucccgcaacggcuucgagaugaucugggaccccaacggguggaccggcaccgacaagaacuucagcaucaagcaggacaucguggggaucaacgagugguccggcuacagcggguccuucguccagcacccggagcugacgggccucgacugcauccggcccugcuucuggguggagcugauccgcggccggcccaaggagaacaccaucuggaccagcggguccagcaucuccuucugcggcgucaacagcgacaccguggggugguccuggcccgacggcgccgagcugccguucacgaucgacaaguga

SEQ ID NO: 82498 - RNA, 1410 nt, Artificial Sequence; identical to SEQ ID NO: 80762
  derived and/or modified CDS sequence (opt1) from neuraminidase__InfluenzaA__ADE29014

SEQ ID NO: 82499 - RNA, 1410 nt, Artificial Sequence
  derived and/or modified CDS sequence (opt1) from neuraminidase__InfluenzaA__ADE29024
augaaccccaaccagaagaucaucaccaucggcagcgugugcaugaccaucgggauggccaaccugauccuccagaucggcaacaucaucuccaucuggaucagccacuccauccagcuggggaaccagaaccagaucgagacgugcaaccagagcgucaucaccuacgagaacaacaccugggugaaccagaccuacgugaacaucuccaacacgaacuucgccgcgggccagagcgucguguccgugaagcuggccgggaacagcucccucugcccggucagcggcugggccaucuacuccaaggacaacagcauccgcaucggcuccaagggggacguguucgugauccgggagcccuucaucagcugcagcccccuggagugccgcaccuucuuccugacccagggcgcccuccugaacgacaagcacuccaacgggaccaucaaggaccggucccccuaccgcacgcugaugagcugcccgaucggcgagguccccucccccuacaacagccgguucgagagcguggccugguccgcgagcgccugccacgacgggaucaacuggcucaccaucggcaucuccggccccgacaacggggccguggccguccugaaguacaacggcaucaucaccgacaccaucaagagcuggaagaacaacauccugcgcacgcaggaguccgagugcgcgugcgugaacgggagcugcuucaccgugaugaccgacggcccguccgacggccaggccagcuacaagaucuuccggaucgagaaggggaagaucgucaaguccguggagaugaacgcccccaacuaccacuacgaggagugcagcugcuaccccgacuccagcgagaucacgugcgugugccgcgacaacuggcacggcuccaaccggcccugggucagcuucaaccagaaccucgaguaccagaucggguacaucugcuccggcaucuucggggacaacccgcgccccaacgacaagaccggcagcugcggccccguguccagcaacggggccaacggcgugaagggguucuccuucaaguacggcaacggggucuggaucggccggaccaagagcaucagcucccgcaacggcuucgagaugaucugggaccccaacggguggaacggcaccgacaacaacuucagcaucaagcaggacaucguggggaucaacgagugguccggcuacagcggguccuucgugcagcacccggagcugaccggccuggacugcauccggcccugcuucugggucgagcucauccgcggccggcccaaggagaacacgaucuggaccagcggguccagcaucuccuucugcggcgugaacagcgacaccgucgggugguccuggcccgacggcgccgagcugccguucaccaucgacaaguga

SEQ ID NO: 82500 - RNA, 1410 nt, Artificial Sequence; identical to SEQ ID NO: 80762
  derived and/or modified CDS sequence (opt1) from neuraminidase__InfluenzaA__ADE29034

SEQ ID NO: 82501 - RNA, 1410 nt, Artificial Sequence; identical to SEQ ID NO: 80762
  derived and/or modified CDS sequence (opt1) from neuraminidase__InfluenzaA__ADE29044

SEQ ID NO: 82502 - RNA, 1410 nt, Artificial Sequence; identical to SEQ ID NO: 80762
  derived and/or modified CDS sequence (opt1) from neuraminidase__InfluenzaA__ADE29054

SEQ ID NO: 82503 - RNA, 1410 nt, Artificial Sequence; identical to SEQ ID NO: 82050
  derived and/or modified CDS sequence (opt1) from neuraminidase__InfluenzaA__ADE29064

SEQ ID NO: 82504 - RNA, 1410 nt, Artificial Sequence
  derived and/or modified CDS sequence (opt1) from neuraminidase__InfluenzaA__ADE29087
augaaccccaaccagaagaucaucaccaucggcagcgugugcaugaccaucgggauggccaaccugauccuccagaucggcaacaucaucuccaucuggaucagccacuccauccagcuggggaaccagaaccagaucgagacgugcaaccagagcgucaucaccuacgagaacaacaccugggugaaccagaccuacgugaacaucuccaacacgaacuucgccgcgggccagagcgucguguccgugaagcuggccgggaacagcucccucugcccggucagcggcugggccaucuacuccaaggacaacagcgugcgcaucggcuccaagggggacguguucgucauccgggagcccuucaucagcugcagcccccuggagugcaagaccuucuuccugacccagggcgcccuccugaacgacaagcacuccaacgggaccaucaaggaccgcucccccuaccggacgcugaugagcugcccgaucggcgaggugcccucccccuacaacagccgcuucgagagcguggccugguccgcgagcgccugccacgacgggaucaacuggcucaccaucggcaucuccggccccgacaacggggccgucgccgugcugaaguacaacggcaucaucaccgacaccaucaagagcuggcggaacaacauccugcgcacgcaggaguccgagugcgcgugcgugaacgggagcugcuucaccgucaugaccgacggcccguccaacggccaggccagcuacaagaucuuccggaucgagaaggggaagaucgugaaguccguggagaugaacgcccccaacuaccacuacgaggagugcagcugcuaccccgacuccagcgagaucacgugcgucugccgcgacaacuggcacggcuccaaccggcccugggugagcuucaaccagaaccucgaguaccagaucggguacaucugcuccggcaucuucggggacaacccgcgccccaacgacaagaccggcagcugcggccccguguccagcaacggggccaacggcgucaagggguucuccuucaaguacggcaacgggguguggaucggccggaccaagagcaucagcucccgcaacggcuucgagaugaucugggaccccaacggguggaccggcaccgacaacaacuucagcaucaagcaggacaucguggggaucaacgagugguccggcuacagcggguccuucguccagcacccggagcugacgggccuggacugcauccggcccugcuucuggguggagcucauccgcggccggcccaaggagaacaccaucuggaccagcggguccagcaucuccuucugcggcgucaacagcgacaccguggggugguccuggcccgacggcgccgagcugccguucacgaucgacaaguga

SEQ ID NO: 82505 - RNA, 1410 nt, Artificial Sequence; identical to SEQ ID NO: 80752
  derived and/or modified CDS sequence (opt1) from neuraminidase__InfluenzaA__ADE29097

SEQ ID NO: 82506 - RNA, 1410 nt, Artificial Sequence; identical to SEQ ID NO: 81629
  derived and/or modified CDS sequence (opt1) from neuraminidase__InfluenzaA__ADE34194

SEQ ID NO: 82507 - RNA, 1410 nt, Artificial Sequence; identical to SEQ ID NO: 80623
  derived and/or modified CDS sequence (opt1) from neuraminidase__InfluenzaA__ADE34205

SEQ ID NO: 82508 - RNA, 1410 nt, Artificial Sequence
  derived and/or modified CDS sequence (opt1) from neuraminidase__InfluenzaA__ADE34216
augaaccccaaccagaagaucaucaccaucggcagcgugucccugaccaucagcacgaucugcuucuucaugcagaucgccauccucgucaccaccgugacccugcacuucaagcaguacgaguucaacuccccgcccaacaaccaggugaugcugugcgagcccacgaucaucgagcgcaacaucaccgagaucgucuaccucaccaacaccacgaucgagaaggagaucugccccaagcuggccgaguaccggaacuggagcaagccgcagugcgacaucaccggguucgcgcccuucuccaaggacaacagcauccgccuguccgccggcggggacaucugggugacccgggagcccuacgugagcugcgaccccgacaagugcuaccaguucgcccucggccaggggaccacgcugaacaacguccacuccaacaacaccgugcgcgaccggaccccguaccgcacccugcucaugaacgagcugggcgugcccuuccaccugggcacgaagcaggucugcaucgccuggagcuccagcuccugccacgacgggaaggccuggcuccacgugugcaucaccggcgacgacaagaacgcgaccgccagcuucaucuacaacgggcggcugguggacuccgucgugagcugguccaaggacauccugcgcacccaggagagcgagugcgugugcaucaacggcacgugcaccgucgugaugaccgacggguccgccagcggcaaggccgacaccaagauccucuucaucgaggagggcaagaucgugcacacgagcacccuguccgggagcgcgcagcacgucgaggagugcuccugcuacccccgguaccccggcgugcgcugcgugugccgggacaacuggaaggggagcaaccgcccgaucgucgacaucaacaucaaggaccacuccaucgugagcuccuacgugugcagcggccuggucggcgacacgccccggaagaacgacuccagcuccagcucccacugccucgaccccaacaacgaggagggcgggcacggggugaagggcugggccuucgacgacgggaacgacgucuggaugggccgcaccaucagcgagaagucccggcugggcuacgagaccuucaaggugaucgagggguggagcaaccccaaguccaagcugcagaucaaccgccaggugaucgucgaccggggcaaccgcagcggguacuccggcaucuucagcguggagggcaagagcugcaucaaccggugcuucuacguggagcucauccgcgggcggaaggaggagaccgagguccuguggaccuccaacagcaucgugguguucugcggcaccuccgggacguacggcaccgggagcuggccggacggcgccaacaucaaccugaugcccaucuga

SEQ ID NO: 82509 - RNA, 1410 nt, Artificial Sequence; identical to SEQ ID NO: 81629
  derived and/or modified CDS sequence (opt1) from neuraminidase__InfluenzaA__ADE34227

SEQ ID NO: 82510 - RNA, 1410 nt, Artificial Sequence; identical to SEQ ID NO: 81629
  derived and/or modified CDS sequence (opt1) from neuraminidase__InfluenzaA__ADE34238

SEQ ID NO: 82511 - RNA, 1410 nt, Artificial Sequence
  derived and/or modified CDS sequence (opt1) from neuraminidase__InfluenzaA__ADE34260
augaaccccaaccagaagaucaucaccaucggcagcgugucccugaccaucagcacgaucugcuucuucaugcagaucgccauccucaucaccaccgucacccugcacuucaagcaguacgaguucaacuccccgcccaacaaccaggugaugcugugcgagcccacgaucaucgagcgcaacaucaccgagaucguguaccucaccaacaccacgaucgagaaggagaucugccccaagcuggccgaguaccggaacuggagcaagccgcagugcgacaucaccggguucgcgcccuucuccaaggacaacagcauccgccuguccgccggcggggacaucugggucacccgggagcccuacgugagcugcgaccccgacaagugcuaccaguucgcccucggccaggggaccacgcugaacaacgugcacuccaacaacaccguccgcgaccggaccccguaccgcacccugcucaugaacgagcugggcgugcccuuccaccugggcacgaagcaggucugcaucgccuggagcuccagcuccugccacgacgggaaggccuggcuccacgugugcaucaccggcgacgacaagaacgcgaccgccagcuucaucuacaacgggcggcugguggacuccguggucagcugguccaaggagauccugcgcacccaggagagcgagugcgugugcaucaacggcacgugcaccguggucaugaccgacggguccgccagcggcaaggccgacaccaagauccucuucaucgaggagggcaagaucgugcacacgagcacccuguccgggagcgcgcagcacguggaggagugcuccugcuacccccgguaccccggcguccgcugcgugugccgggacaacuggaaggggagcaaccgcccgaucguggacaucaacaucaaggaccacuccaucgucagcuccuacgugugcagcggccuggugggcgacacgccccggaagaacgacuccagcuccagcucccacugccucgaccccaacaacgaggagggcgggcacggggucaagggcugggccuucgacgacgggaacgacguguggaugggccgcaccaucagcgagaagucccggcugggcuacgagaccuucaaggucaucgagggguggagcaaccccaaguccaagcugcagaucaaccgccaggugaucguggaccggggcaaccgcagcggguacuccggcaucuucagcgucgagggcaagagcugcaucaaccggugcuucuacguggagcucauccgcgggcggaaggaggagaccgaggugcuguggaccuccaacagcaucgucguguucugcggcaccuccgggacguacggcaccgggagcuggccggacggcgccgacaucaaccugauguccaucuga

SEQ ID NO: 82512 - RNA, 1410 nt, Artificial Sequence; identical to SEQ ID NO: 81629
  derived and/or modified CDS sequence (opt1) from neuraminidase__InfluenzaA__ADE34271

SEQ ID NO: 82513 - RNA, 1410 nt, Artificial Sequence; identical to SEQ ID NO: 80762
  derived and/or modified CDS sequence (opt1) from neuraminidase__InfluenzaA__ADE45502

SEQ ID NO: 82514 - RNA, 1410 nt, Artificial Sequence; identical to SEQ ID NO: 80762
  derived and/or modified CDS sequence (opt1) from neuraminidase__InfluenzaA__ADE45504

SEQ ID NO: 82515 - RNA, 1410 nt, Artificial Sequence; identical to SEQ ID NO: 80762
  derived and/or modified CDS sequence (opt1) from neuraminidase__InfluenzaA__ADE45506

SEQ ID NO: 82516 - RNA, 1410 nt, Artificial Sequence; identical to SEQ ID NO: 80762
  derived and/or modified CDS sequence (opt1) from neuraminidase__InfluenzaA__ADE45508

SEQ ID NO: 82517 - RNA, 1410 nt, Artificial Sequence; identical to SEQ ID NO: 80762
  derived and/or modified CDS sequence (opt1) from neuraminidase__InfluenzaA__ADE45510

SEQ ID NO: 82518 - RNA, 1410 nt, Artificial Sequence; identical to SEQ ID NO: 80762
  derived and/or modified CDS sequence (opt1) from neuraminidase__InfluenzaA__ADE45512

SEQ ID NO: 82519 - RNA, 1410 nt, Artificial Sequence
  derived and/or modified CDS sequence (opt1) from neuraminidase__InfluenzaA__ADE45514
augaaccccaaccagaagaucaucaccaucggcagcgugugcaugaccaucgggauggccaaccugauccuccagaucggcaacaucaucuccaucuggaucagccacuccauccagcuggggaaccagaaccagaucgagacgugcaaccagagcaucaucaccuacgagaacaacaccugggucaaccagaccuacgugaacaucuccaacacgaacuucgccgcgggccagagcguggucuccgugaagcuggccgggaacagcucccucugcccggugagcggcugggccaucuacuccaaggacaacagcauccgcaucggcuccaagggggacgucuucgugauccgggagcccuucaucagcugcagcccccuggagugccgcaccuucuuccugacccagggcgcccuccugaacgacaagcacuccaacgggaccaucaaggaccggucccccuaccgcacgcugaugagcugcccgaucggcgaggugcccucccccuacaacagccgguucgagagcgucgccugguccgcgagcgccugccacgacgggaucaacuggcucaccaucggcaucuccggccccgacaacggggccguggccgugcugaaguacaacggcaucaucaccgacaccaucaagagcuggcgcaacaacauccugcggacgcaggaguccgagugcgcgugcgucaacgggagcugcuucaccgugaugaccgacggcccguccgacggccaggccagcuacaagaucuuccgcaucgagaaggggaagaucgugaaguccgucgagaugaacgcccccaacuaccacuacgaggagugcagcugcuaccccgacuccagcgagaucacgugcgugugccgggacaacuggcacggcuccaaccgccccugggugagcuucaaccagaaccucgaguaccagaucggguacaucugcuccggcaucuucggggacaacccgcggcccaacgacaagaccggcagcugcggccccgucuccagcaacggggccaacggcgugaagggguucuccuuccaguacggcaacgggguguggaucggccgcaccaagagcaucagcucccggaacggcuucgagaugaucugggaccccaacggguggaccggcaccgacaacaacuucagcaucaagcaggacaucgucgggaucaacgagugguccggcuacagcggguccuucgugcagcacccggagcugacgggccuggacugcauccgccccugcuucuggguggagcucauccggggccgccccaaggagaacaccaucuggaccagcggguccagcaucuccuucugcggcgucaacagcgacaccguggggugguccuggcccgacggcgccgagcugccguucacgaucgacaaguga

SEQ ID NO: 82520 - RNA, 1410 nt, Artificial Sequence
  derived and/or modified CDS sequence (opt1) from neuraminidase__InfluenzaA__ADE45516
augaaccccaaccagaagaucaucaccaucggcagcgugugcaugaccaucgggauggccaaccugauccuccagaucggcaacaucaucuccaucuggaucagccacuccauccagcuggggaaccagaaccagaucgagacgugcaaccagagcgucaucaccuacgagaacaacaccugggugaaccagaccuacgugaacaucuccaacacgaacuucgccgcgggccagagcgucguguccgugaagcuggccgggaacagcucccucugcccggucagcggcugggccaucuacuccaaggacaacagcauccgcaucggcuccaagggggacguguucgugauccgggagcccuucaucagcugcagcccccuggagugccgcaccuucuuccugacccagggcgcccuccugaacgacaagcacuccaacgggaccaucaaggaccggucccccuaccgcacgcugaugagcugcccgaucggcgagguccccucccccuacaacagccgguucgagagcguggccugguccgcgagcgccugccacgacgggaucaacuggcucaccaucggcaucuccggccccgacaacggggccguggccguccugaaguacaacggcaucaucaccgacaccaucaagagcuggcgcaacaacauccugcggacgcaggaguccgagugcgcgugcgugaacgggagcugcuucaccgugaugaccgacggcccguccgacggccaggccagcuacaagaucuuccgcaucgagaaggggaagaucgucaaguccguggagaugaacgcccccaacuaccacuacgaggagugcagcugcuaccccgacuccagcgagaucacgugcgugugccgggacaacuggcacggcuccaaccgccccugggucagcuucaaccagaaccucgaguaccagaucggguacaucugcuccggcaucuucggggacaacccgcggcccaacgacaagaccggcagcugcggccccguguccagcaacggggccaacggcgugaagggguucuccuucaaguacggcaacggggucuggaucggccgcaccaagagcaucagccugcggaacggcuucgagaugaucugggaccccaacggguggaccggcaccgacaacaacuucuccaucaagcaggacaucguggggaucaacgaguggagcggcuacuccgggagcuucgugcagcacccggagcugacgggccucgacugcauccgccccugcuucugggucgagcugauccggggccgccccaaggagaacaccaucuggaccuccgggagcuccaucagcuucugcggcgugaacuccgacaccgucggguggagcuggcccgacggcgccgagcugccguucacgaucgacaaguga

SEQ ID NO: 82521 - RNA, 1410 nt, Artificial Sequence
  derived and/or modified CDS sequence (opt1) from neuraminidase__InfluenzaA__ADF10069
augaaccccaaccagaagaucaucaccaucggcagcgugugcaugaccaucgggauggccaaccugauccuccagaucggcaacaucaucuccaucuggaucagccacuccauccagcuggggaaccagaaccagaucgagacgugcaaccagagcgucaucaccuacgagaacaacaccugggugaaccagaccuacgugaacaucuccaacacgaacuucgccgcgggccagagcgucguguccgugaagcuggccgggaacagcucccucugcccggucagcggcugggccaucuacuccaaggacaacagcauccgcaucggcuccaagggggacguguucgugauccgggagcccuucaucagcugcagcccccuggagugccgcaccuucuuccugacccagggcacccuccugaacgacaagcacuccaacgggacgaucaaggaccggucccccuaccgcacccugaugagcugcccgaucggcgagguccccucccccuacaacagccgguucgagagcguggccugguccgccagcgcgugccacgacgggaucaacuggcucaccaucggcaucuccggccccgacaacggggccguggccguccugaaguacaacggcaucaucaccgacacgaucaagagcuggcgcaacaacauccugcggacccaggaguccgagugcgccugcgugaacgggagcugcuucaccgugaugaccgacggcccguccgacggccaggcgagcuacaagaucuuccgcaucgagaaggggaagaucgucaaguccguggagaugaacgcccccaacuaccacuacgaggagugcagcugcuaccccgacuccagcgagaucacgugcgugugccgggacaacuggcacggcuccaaccgccccugggucagcuucaaccagaaccucgaguaccagaucggguacaucugcuccggcaucuucggggacaacccgcggcccaacgacaagaccggcagcugcggccccguguccagcaacggggccaacggcgugaagggguucuccuucaaguacggcaacggggucuggaucggccgcaccaagagcaucagcucccggaacggcuucgagaugaucugggaccccaacggguggaccggcacggacaacaacuucagcaucaagcaggacaucguggggaucaacgagugguccggcuacagcggguccuucgugcagcacccggagcugaccggccuggacugcauccgccccugcuucugggucgagcucauccggggccgccccaaggagaacaccaucuggaccagcggguccagcaucuccuucugcggcgugaacagcgacacggucgggugguccuggcccgacggcgccgagcugccguucaccaucgacaaguga

SEQ ID NO: 82522 - RNA, 1410 nt, Artificial Sequence; identical to SEQ ID NO: 80762
  derived and/or modified CDS sequence (opt1) from neuraminidase__InfluenzaA__ADF10079

SEQ ID NO: 82523 - RNA, 1410 nt, Artificial Sequence; identical to SEQ ID NO: 80762
  derived and/or modified CDS sequence (opt1) from neuraminidase__InfluenzaA__ADF10089

SEQ ID NO: 82524 - RNA, 1410 nt, Artificial Sequence; identical to SEQ ID NO: 80762
  derived and/or modified CDS sequence (opt1) from neuraminidase__InfluenzaA__ADF10099

SEQ ID NO: 82525 - RNA, 1410 nt, Artificial Sequence
  derived and/or modified CDS sequence (opt1) from neuraminidase__InfluenzaA__ADF10109
augaaccccaaccagaagaucaucaccaucggcagcgugugcaugaccaucgggauggccaaccugauccuccagaucggcaacaucaucuccaucuggaucagccacuccauccagcuggggaaccagaaccagaucgagacgugcaaccagagcgucaucaccuacgagaacaacaccugggugaaccagaccuacgugaacaucuccaacacgaacuucgccgcgggccagagcgucguguccgugaagcuggccgggaacagcucccucugcccggucagcggcugggccaucuacuccaaggacaacagcauccgcaucggcuccaagggggacguguucgugauccgggagcccuucaucagcugcagcccccuggagugccgcaccuucuuccugacccagggcgcccuccugaacgacaagcacuccaacgggaccaucaaggaccggucccccuaccgcacgcugaugagcugcccgaucggcgagguccccucccccuacaacagccgguucgagagcguggccugguccgcgagcgccugccacgacgggaucaacuggcucaccaucggcaucuccggccccgacaacggggccguggccguccugaaguacaacggcaucaucaccgacaccaucaagagcuggcgcaacaacauccugcggacgcaggaguccgagugcgcgugcgugaacgggagcugcuucaccgugaugaccgacggcccguccgacggccaggccagcuacaagaucuuccgcaucgagaaggggaagaucgucaaguccguggagaugaacgcccccaacuacuacuacgaggagugcagcugcuaccccgacuccagcgagaucacgugcgugugccgggacaacuggcacggcuccaaccgccccugggucagcuucaaccagaaccucgaguaccagaucggguacaucugcuccggcaucuucggggacaacccgcggcccaacgacaagaccggcaacugcggccccgugagcuccaacggggccaacggcgugaagggguucagcuucaaguacggcaacggggucuggaucggccgcaccaaguccaucagcagccggaacggcuucgagaugaucugggaccccaacggguggaccggcaccgacaacaacuucuccaucaagcaggacaucguggggaucaacgaguggagcggcuacuccgggagcuucgugcagcacccggagcugacgggccuggacugcauccgccccugcuucugggucgagcucauccggggccgccccaaggagaacaccaucuggaccuccgggagcuccaucagcuucugcggcgugaacuccgacaccgucggguggagcuggcccgacggcgccgagcugccguucacgaucgacaaguga

SEQ ID NO: 82526 - RNA, 1410 nt, Artificial Sequence; identical to SEQ ID NO: 80762
  derived and/or modified CDS sequence (opt1) from neuraminidase__InfluenzaA__ADF10129

SEQ ID NO: 82527 - RNA, 1410 nt, Artificial Sequence; identical to SEQ ID NO: 82192
  derived and/or modified CDS sequence (opt1) from neuraminidase__InfluenzaA__ADF10146

SEQ ID NO: 82528 - RNA, 1410 nt, Artificial Sequence
  derived and/or modified CDS sequence (opt1) from neuraminidase__InfluenzaA__ADF10166
augaaccccaaccagaagaucaucaccaucggcagcgugugcaugaucaucgggauggccaaccugauccuccagaucggcaacaucaucuccaucuggaucagccacuccauccagcuggggaaccagaaccagaucgagaccugcaaccagagcgucaucacguacgagaacaacaccugggugaaccagaccuacgugaacaucuccaacaccaacuucgccgcgggccagagcgucguguccgugaagcuggccgggaacagcucccucugcccggucagcggcugggccaucuacuccaaggacaacagcauccgcaucggcuccaagggggacguguucgugauccgggagcccuucaucagcugcagcccccuggagugccgcacguucuuccugacccagggcgcccuccugaacgacaagcacuccaacgggaccaucaaggaccggucccccuaccgcacccugaugagcugcccgaucggcgagguccccucccccuacaacagccgguucgagagcguggccugguccgcgagcgccugccacgacgggaucaacuggcucacgaucggcaucuccggccccgacaacggggccguggccguccugaaguacaacggcaucaucaccgacaccaucaagagcuggcgcaacaacauccugcggacccaggaguccgagugcgcgugcgugaacgggagcugcuucacggugaugaccgacggcccguccgacggccaggccagcuacaagaucuuccgcaucgagaaggggaagaucgucaaguccguggagaugaacgcccccaacuaccacuacgaggagugcagcugcuaccccgacuccagcgagaucacgugcgugugccgggacaacuggcacggcuccaaccgccccugggucagcuucaaccagaaccucgaguaccagaucggguacaucugcuccggcaucuucggggacaacccgcggcccaacgacaagaccggcagcugcggccccguguccagcaacggggccaacggcgugaagggguucuccuucaaguacggcaacggggucuggaucggccgcaccaagagcaucagcucccggaagggcuucgagaugaucugggaccccaacggguggaccggcaccgacaacaacuucagcaucaagcaggacaucguggggaucaacgagugguccggcuacagcggguccuucgugcagcacccggagcugaccggccuggacugcauccgccccugcuucugggucgagcucauccggggccgccccaaggagaacacgaucuggaccagcggguccagcaucuccuucugcggcgugaacagcgacaccgucgggugguccuggcccgacggcgccgagcugccguucaccaucgacaaguga

SEQ ID NO: 82529 - RNA, 1410 nt, Artificial Sequence; identical to SEQ ID NO: 82528
  derived and/or modified CDS sequence (opt1) from neuraminidase__InfluenzaA__ADF10176

SEQ ID NO: 82530 - RNA, 1410 nt, Artificial Sequence; identical to SEQ ID NO: 82528
  derived and/or modified CDS sequence (opt1) from neuraminidase__InfluenzaA__ADF10192

SEQ ID NO: 82531 - RNA, 1410 nt, Artificial Sequence; identical to SEQ ID NO: 80762
  derived and/or modified CDS sequence (opt1) from neuraminidase__InfluenzaA__ADF10247

SEQ ID NO: 82532 - RNA, 1410 nt, Artificial Sequence; identical to SEQ ID NO: 82528
  derived and/or modified CDS sequence (opt1) from neuraminidase__InfluenzaA__ADF10290

SEQ ID NO: 82533 - RNA, 1410 nt, Artificial Sequence
  derived and/or modified CDS sequence (opt1) from neuraminidase__InfluenzaA__ADF10304
augaaccccaaccagaagaucaucaccaucggcagcgugugcaugaccaucgggauggccaaccugauccuccagaucggcaacaucaucuccaucuggaucagccacuccauccagcuggggaaccagaaccagaucgagacgugcaaccagagcgucaucaccuacgagaacaacaccugggugaaccagaccuacgugaacaucuccaacacgaacuucgccgcgggccagagcgucguguccgugaagcuggccgggaacagcucccucugcccggucagcggcugggccaucuacuccaaggacaacagcauccgcaucggcuccaagggggacguguucgugauccgggagcccuucaucagcugcagcccccuggagugccgcaccuucuuccugacccagggcgcccuccugaacgacaagcacuccaacgggaccaucaaggaccggucccccuaccgcacgcugaugagcugcccgaucggcgagguccccucccccuacaacagccgguucgagagcguggccugguccgcgagcgccugccacgacgggaucaacuggcucaccaucggcaucuccggccccgacaacggggccguggccguccugaaguacaacggcaucaucaccgacaccaucaagagcuggcgcaacaacauccugcggacgcaggaguccgagugcgcgugcgugaacgggagcugcuucaccgugaugaccgacggcccguccgacggccaggccagcuacaagaucuuccgcaucgagaaggggaagaucgucaaguccguggagaugaacgcccccaacuaccacuacgaggagugcagcugcuaccccgacuccagcgagaucacgugcgugugccgggacaacuggcacggcuccaaccgccccugggucagcuucaaccagaaccucgaguaccagaucggguacaucugcuccggcaucuucggggacaacccgcggcccaacgacaagaccggcagcugcggccccguguccagcaacggggccaacggcgugaagggguucuccuucaaguacggcaacggggucuggaucggccgcaccaagagcaucagcucccggaacggcuucgagaugaucugggaccccaacggguggaccggcaccgacaacaacuucagcaucaagcaggacaucguggggaucaacgagugguccggcuacagcggguccuucgugcagcacccggagcugacgggccuggacugcauccgccccugcuucugggucgagcucauccggggccgccccaaggagaacaccaucuggaccagcggguccagcaucuccuucugcggcgugaacagcgacaccgucgggugguccuggcccgacggcgccggccugccguucacgaucgacaaguga

SEQ ID NO: 82534 - RNA, 1410 nt, Artificial Sequence; identical to SEQ ID NO: 80762
  derived and/or modified CDS sequence (opt1) from neuraminidase__InfluenzaA__ADF10340

SEQ ID NO: 82535 - RNA, 1410 nt, Artificial Sequence; identical to SEQ ID NO: 80762
  derived and/or modified CDS sequence (opt1) from neuraminidase__InfluenzaA__ADF10361

SEQ ID NO: 82536 - RNA, 1410 nt, Artificial Sequence; identical to SEQ ID NO: 82528
  derived and/or modified CDS sequence (opt1) from neuraminidase__InfluenzaA__ADF10371

SEQ ID NO: 82537 - RNA, 1410 nt, Artificial Sequence; identical to SEQ ID NO: 82528
  derived and/or modified CDS sequence (opt1) from neuraminidase__InfluenzaA__ADF10407

SEQ ID NO: 82538 - RNA, 1410 nt, Artificial Sequence; identical to SEQ ID NO: 80762
  derived and/or modified CDS sequence (opt1) from neuraminidase__InfluenzaA__ADF10472

SEQ ID NO: 82539 - RNA, 1410 nt, Artificial Sequence; identical to SEQ ID NO: 82528
  derived and/or modified CDS sequence (opt1) from neuraminidase__InfluenzaA__ADF10616

SEQ ID NO: 82540 - RNA, 1410 nt, Artificial Sequence; identical to SEQ ID NO: 82528
  derived and/or modified CDS sequence (opt1) from neuraminidase__InfluenzaA__ADF10688

SEQ ID NO: 82541 - RNA, 1410 nt, Artificial Sequence; identical to SEQ ID NO: 82528
  derived and/or modified CDS sequence (opt1) from neuraminidase__InfluenzaA__ADF10726

SEQ ID NO: 82542 - RNA, 1410 nt, Artificial Sequence; identical to SEQ ID NO: 80762
  derived and/or modified CDS sequence (opt1) from neuraminidase__InfluenzaA__ADF10773

SEQ ID NO: 82543 - RNA, 1410 nt, Artificial Sequence
  derived and/or modified CDS sequence (opt1) from neuraminidase__InfluenzaA__ADF10837
augaaccccaaccagaagaucaucaccaucggcagcgugugcaugaccaucgggauggccaaccugauccuccagaucggcaacaucaucuccaucuggaucagccacuccauccagcuggggaaccagaaccagaucgagacgugcaaccagagcgucaucaccuacgagaacaacaccugggugaaccagaccuacgugaacaucuccaacacgaacuucgccgcgggccagagcgucguguccgugaagcuggccgggaacagcucccucugcccggucagcggcugggccaucuacuccaaggacaacagcauccgcaucggcuccaagggggacguguucgugauccgggagcccuucaucagcugcagcccccuggagugccgcaccuucuuccugacccagggcgcccuccugaacgacaagcacuccaacgggaccaucaaggaccggucccccuaccgcacgcugaugagcugcccgaucggcgagguccccucccccuacaacagccgguucgagagcguggccugguccgcgagcgccugccacgacgggaucaacuggcucaccaucggcaucuccggccccgacaacggggccguggccguccugaaguacaacggcaucaucaccgacaccaucaagagcuggaagaacaacauccugcgcacgcaggaguccgagugcgcgugcgugaacgggagcugcuucaccgugaugaccgacggcccguccgacggccaggccagcuacaagaucuuccggaucgagaaggggaagaucgucaaguccguggagaugaacgcccccaacuaccacuacgaggagugcagcugcuaccccgacuccagcgagaucacgugcgugugccgcgacaacuggcacggcuccaaccggcccugggucagcuucaaccagaaccucgaguaccagaucggguacaucugcuccggcaucuucggggacaacccgcgccccaacgacaagaccggcagcugcggccccguguccagcaacggggccaacggcgugaagggguucuccuucaaguacggcaacggggucuggaucggccggaccaagagcaucagcucccgcaacggcuucgagaugaucugggaccccaacggguggaccggcaccgacaacaacuucagcaucaagcaggacaucguggggaucaacgagugguccggcuacagcggguccuucgugcagcacccggagcugacgggccuggacugcauccggcccugcuucugggucgagcucauccgcggccggcccaaggagaacaccaucuggaccagcggguccagcaucuccuucugcggcgugaacagcgacaccgucgggugguccuggcccgacggcgccgagcugccguucacgaucgacaaguga

SEQ ID NO: 82544 - RNA, 1410 nt, Artificial Sequence; identical to SEQ ID NO: 80762
  derived and/or modified CDS sequence (opt1) from neuraminidase__InfluenzaA__ADF10889

SEQ ID NO: 82545 - RNA, 1410 nt, Artificial Sequence; identical to SEQ ID NO: 80762
  derived and/or modified CDS sequence (opt1) from neuraminidase__InfluenzaA__ADF10947

SEQ ID NO: 82546 - RNA, 1410 nt, Artificial Sequence; identical to SEQ ID NO: 80762
  derived and/or modified CDS sequence (opt1) from neuraminidase__InfluenzaA__ADF11010

SEQ ID NO: 82547 - RNA, 1410 nt, Artificial Sequence
  derived and/or modified CDS sequence (opt1) from neuraminidase__InfluenzaA__ADF27355
augaaccccaaccagaagaucaucaccaucggcagcgugugcaugaccaucgggauggccaaccugauccuccagaucggcaacaucaucuccaucuggaucagccacuccauccagcuggggaaccagaaccagaucgagacgugcaaccagagcgucaucaccuacgagaacaacaccugggugaaccagaccuacgugaacaucuccaacacgaacuucgccgcgggccagagcgucguguccgugaagcuggccgggaacagcucccucugcccggucagcggcugggccaucuacuccaaggacaacagcauccgcaucggcuccaagggggacguguucgugauccgggagcccuucaucagcugcagcccccuggagugccgcaccuucuuccugacccagggcgcccuccugaacgacaagcacuccaacgggaccaucaaggaccggucccccuaccgcacgcugaugagcugcccgaucggcgagguccccucccccuacaacagccgguucgagagcguggccugguccgcgagcgccugccacgacgggaucaacuggcucaccaucggcaucuccggccccgacaacggggccguggccguccugaaguacaacggcaucaucaccgacaccaucaagagcuggcgcaacaacauccugcggacgcaggaguccgagugcgcgugcgugaacgggagcugcuucaccgugaugaccgacggcccguccgacggccaggccagcuacaagaucuuccgcaucgagaaggggaagaucgucaaguccguggagaugaacgcccccaacuaccacuacgaggagugcagcugcuaccccgacuccagcgagaucacgugcgugugccgggacaacuggcacggcuccaaccgccccugggucagcuucaaccagaaccucgaguaccagaucggguacaucugcuccggcaucuucggggacaacccgcggcccaacgacaagaccggcagcugcggccccguguccagcaacggggccaacggcgugaagggguucuccuucaaguacggcaacggggucuggaugggccgcaccaagagcaucagcucccggaacggcuucgagaugaucugggaccccaacggguggaccggcaccgacaacaacuucagcaucaagcaggacaucguggggaucaacgagugguccggcuacagcggguccuucgugcagcacccggagcugacgggccuggacugcauccgccccugcuucugggucgagcucauccggggccgccccaaggagaacaccaucuggaccagcggguccagcaucuccuucugcggcgugaacagcgacaccgucgggugguccuggcccgacggcgccgagcugccguucacgaucgacaaguga

SEQ ID NO: 82548 - RNA, 1410 nt, Artificial Sequence
  derived and/or modified CDS sequence (opt1) from neuraminidase__InfluenzaA__ADF27356
augaaccccaaccagaagaucaucaccaucggcagcgugugcaugaccaucgggauggccaaccugauccuccagaucggcaacaucaucuccaucuggaucagccacuccauccagcuggggaaccagaaccagaucgagacgugcaaccagaacgucaucaccuacgagaacaacaccugggugaaccagaccuacgugaacaucagcaacacgaacuucgccgcgggccaguccgucgugagcgugaagcuggccgggaacuccagccucugcccggucuccggcugggccaucuacagcaaggacaacuccauccgcaucggcagcaagggggacguguucgugauccgggagcccuucaucuccugcagcccccuggagugccgcaccuucuuccugacccagggcgcccuccugaacgacaagcacuccaacgggaccaucaaggaccggagccccuaccgcacgcugauguccugcccgaucggcgagguccccagccccuacaacucccgguucgagagcguggccuggagcgcguccgccugccacgacgggaucaacuggcucaccaucggcaucagcggccccgacaacggggccguggccguccugaaguacaacggcaucaucaccgacaccaucaaguccuggcgcaacaacauccugcggacgcaggagagcgagugcgcgugcgugaacggguccugcuucaccgugaugaccgacggcccgagcgacggccaggccuccuacaagaucuuccgcaucgagaaggggaagaucgucaagagcguggagaugaacgcccccaacuacuacuacgaggagugcuccugcuaccccgacagcuccgagaucacgugcgugugccgggacaacuggcacggcagcaaccgccccugggucuccuucaaccagaaccucgaguaccagaucggguacaucugcagcggcaucuucggggacaacccgcggcccaacgacaagaccggcuccugcggccccgugagcuccaacggggccaacggcgugaagggguucagcuucaaguacggcaacggggucuggaucggccgcaccaaguccaucagcagccggaacggcuucgagaugaucugggaccccaacggguggaccggcaccgacaacaacuucuccaucaagcaggacaucguggggaucaacgaguggagcggcuacuccgggagcuucgugcagcacccggagcugacgggccuggacugcauccgccccugcuucugggucgagcucauccggggccgccccaaggagaacaccaucuggaccuccgggagcuccaucagcuucugcggcgugaacuccgacaccgucggguggagcuggcccgacggcgccgagcugccguucacgaucgacaaguga

SEQ ID NO: 82549 - RNA, 1410 nt, Artificial Sequence; identical to SEQ ID NO: 81116
  derived and/or modified CDS sequence (opt1) from neuraminidase__InfluenzaA__ADF27357

SEQ ID NO: 82550 - RNA, 1410 nt, Artificial Sequence; identical to SEQ ID NO: 81116
  derived and/or modified CDS sequence (opt1) from neuraminidase__InfluenzaA__ADF27358

SEQ ID NO: 82551 - RNA, 1410 nt, Artificial Sequence; identical to SEQ ID NO: 81116
  derived and/or modified CDS sequence (opt1) from neuraminidase__InfluenzaA__ADF27360

SEQ ID NO: 82552 - RNA, 1410 nt, Artificial Sequence; identical to SEQ ID NO: 80762
  derived and/or modified CDS sequence (opt1) from neuraminidase__InfluenzaA__ADF27361

SEQ ID NO: 82553 - RNA, 1410 nt, Artificial Sequence; identical to SEQ ID NO: 80762
  derived and/or modified CDS sequence (opt1) from neuraminidase__InfluenzaA__ADF27362

SEQ ID NO: 82554 - RNA, 1410 nt, Artificial Sequence; identical to SEQ ID NO: 80762
  derived and/or modified CDS sequence (opt1) from neuraminidase__InfluenzaA__ADF27363

SEQ ID NO: 82555 - RNA, 1410 nt, Artificial Sequence; identical to SEQ ID NO: 81116
  derived and/or modified CDS sequence (opt1) from neuraminidase__InfluenzaA__ADF27364

SEQ ID NO: 82556 - RNA, 1410 nt, Artificial Sequence; identical to SEQ ID NO: 80762
  derived and/or modified CDS sequence (opt1) from neuraminidase__InfluenzaA__ADF27365

SEQ ID NO: 82557 - RNA, 1410 nt, Artificial Sequence; identical to SEQ ID NO: 81116
  derived and/or modified CDS sequence (opt1) from neuraminidase__InfluenzaA__ADF27366

SEQ ID NO: 82558 - RNA, 1410 nt, Artificial Sequence; identical to SEQ ID NO: 80762
  derived and/or modified CDS sequence (opt1) from neuraminidase__InfluenzaA__ADF27382

SEQ ID NO: 82559 - RNA, 1410 nt, Artificial Sequence; identical to SEQ ID NO: 80762
  derived and/or modified CDS sequence (opt1) from neuraminidase__InfluenzaA__ADF27392

SEQ ID NO: 82560 - RNA, 1410 nt, Artificial Sequence; identical to SEQ ID NO: 80762
  derived and/or modified CDS sequence (opt1) from neuraminidase__InfluenzaA__ADF27402

SEQ ID NO: 82561 - RNA, 1410 nt, Artificial Sequence; identical to SEQ ID NO: 82543
  derived and/or modified CDS sequence (opt1) from neuraminidase__InfluenzaA__ADF27422

SEQ ID NO: 82562 - RNA, 1410 nt, Artificial Sequence
  derived and/or modified CDS sequence (opt1) from neuraminidase__InfluenzaA__ADF27432
augaaccccaaccagaagaucaucaccaucggcagcgugugcgucaccaucgggauggccaaccugauccuccagaucggcaacaucaucuccaucuggaucagccacuccauccagcuggggaaccagaaccagaucgagacgugcaaccagagcgugaucaccuacgagaacaacaccugggugaaccagaccuacgucaacaucuccaacacgaacuucgccgcgggccagagcgugguguccgucaagcuggccgggaacagcucccucugcccggugagcggcugggccaucuacuccaaggacaacagcauccgcaucggcuccaagggggacguguucgucauccgggagcccuucaucagcugcagcccccuggagugccgcaccuucuuccugacccagggcgcccuccugaacgacaagcacuccaacgggaccaucaaggaccggucccccuaccgcacgcugaugagcugcccgaucggcgaggugcccucccccuacaacagccgguucgagagcguggccugguccgcgagcgccugccacgacgggaucaacuggcucaccaucggcaucuccggccccgacaacggggccgucgccgugcugaaguacaacggcaucaucaccgacaccaucaagagcuggcgcaacaacauccugcggacgcaggaguccgagugcgcgugcgugaacgggagcugcuucaccgucaugaccgacggcccguccgacggccaggccagcuacaagaucuuccgcaucgagaaggggaagaucgugaaguccguggagaugaacgcccccaacuaccacuacgaggagugcagcugcuaccccgacuccagcgagaucacgugcgucugccgggacaacuggcacggcuccaaccgccccugggugagcuucaaccagaaccucgaguaccagaucggguacaucugcuccggcaucuucggggacaacccgcggcccaacgacaagaccggcagcugcggccccguguccagcaacggggccaacggcgucaagggguucuccuucaaguacggcaacgggguguggaucggccgcaccaagagcaucagcucccggaacggcuucgagaugaucugggaccccaacggguggaccggcaccgacaacaacuucagcaucaagcaggacaucguggggaucaacgagugguccggcuacagcggguccuucguccagcacccggagcugacgggccuggacugcauccgccccugcuucuggguggagcucauccggggccgccccaaggagaacaccaucuggaccagcggguccagcaucuccuucugcggcgucaacagcgacaccguggggugguccuggcccgacggcgccgagcugccguucacgaucgacaaguga

SEQ ID NO: 82563 - RNA, 1410 nt, Artificial Sequence
  derived and/or modified CDS sequence (opt1) from neuraminidase__InfluenzaA__ADF27442
augaaccccaaccagaagaucaucaccaucggcagcgugugcaugaccaucgggauggccaaccugauccuccagaucggcaacaucaucuccaucuggaucagccacuccauccagcuggagaaccagaaccagaucgagacgugcaaccagagcgucaucaccuacgagaacaacaccugggugaaccagaccuacgugaacaucuccaacacgaacuucgccgcggggcagagcgucguguccgugaagcuggccggcaacagcucccucugcccggucagcgggugggccaucuacuccaaggacaacagcauccgcaucggcuccaagggcgacguguucgugauccgggagcccuucaucagcugcagcccccuggagugccgcaccuucuuccugacccagggggcccuccugaacgacaagcacuccaacggcaccaucaaggaccggucccccuaccgcacgcugaugagcugcccgaucggggagguccccucccccuacaacagccgguucgagagcguggccugguccgcgagcgccugccacgacggcaucaacuggcucaccaucgggaucuccggccccgacaacggcgccguggccguccugaaguacaacgggaucaucaccgacaccaucaagagcuggcgcaacaacauccugcggacgcaggaguccgagugcgcgugcgugaacggcagcugcuucaccgugaugaccgacgggccguccgacggccaggccagcuacaagaucuuccgcaucgagaagggcaagaucgucaaguccguggagaugaacgcccccaacuaccacuacgaggagugcagcugcuaccccgacuccagcgagaucacgugcgugugccgggacaacuggcacggguccaaccgccccugggucagcuucaaccagaaccucgaguaccagaucggcuacaucugcuccgggaucuucggcgacaacccgcggcccaacgacaagaccgggagcugcggccccguguccagcaacggcgccaacggggugaagggcuucuccuucaaguacgggaacggcgucuggaucgggcgcaccaagagcaucagcucccggaacggcuucgagaugaucugggaccccaacggcuggaccgggaccgacaacaacuucagcaucaagcaggacaucgugggcaucaacgagugguccggguacagcggcuccuucgugcagcacccggagcugacggggcuggacugcauccgccccugcuucugggucgagcucauccggggccgccccaaggagaacaccaucuggaccagcggcuccagcaucuccuucugcggggugaacagcgacaccgucggcugguccuggcccgacggggccgagcugccguucacgaucgacaaguga

SEQ ID NO: 82564 - RNA, 1410 nt, Artificial Sequence
  derived and/or modified CDS sequence (opt1) from neuraminidase__InfluenzaA__ADF27462
augaaccccaaccagaagaucaucaccaucggcagcgugugcaugaccaucgggauggccaaccugauccuccagaucggcaacaucaucuccaucuggaucagccacuccauccagcuggggaaccagaaccagaucgaggccugcaaccagagcgucaucacguacgagaacaacaccugggugaaccagaccuacgugaacaucuccaacaccaacuucgcggccggccagagcgucguguccgugaagcuggccgggaacagcucccucugcccggucagcggcugggccguguacuccaaggacaacagcauccgcaucggcuccaagggggacguguucgucauccgggagcccuucaucagcugcagcccccuggagugccgcacguucuuccugacccagggcgcccuccugaacgacaagcacuccaacgggaccaucaaggaccggucccccuaccgcacccugaugagcugcccgaucggcgaggugcccucccccuacaacagccgguucgagagcguggcgugguccgccagcgccugccacgacgggaucaacuggcucacgaucggcaucuccggccccgacaacggggccgucgcggugcugaaguacaacggcaucaucaccgacaccaucaagagcuggcgcaacaacauccugcggacccaggaguccgagugcgccugcgugaacgggagcugcuucacggucaugaccgacggcccguccgacggccaggccagcuacaagaucuuccgcaucgagaaggggaagaucgugaaguccguggagaugaacgcccccaacuaccacuacgaggagugcagcugcuaccccgacuccagcgagaucacgugcgucugccgggacaacuggcacggcuccaaccgccccugggugagcuucaaccagaaccucgaguaccagaucggguacaucugcuccggcaucuucggggacaacccgcggcccaacgacaagaccggcagcugcggccccguguccagcaacggggccaacggcgucaagggguucuccuucaaguacggcaacgggguguggaucggccgcaccaagagcaucagcucccggaacggcuucgagaugaucugggaccccaacggguggaccggcaccgacaacaacuucagcaucaagcaggacaucguggggaucaacgagugguccggcuacagcggguccuucguccagcacccggagcugaccggccuggacugcauccgccccugcuucuggguggagcucauccggggccgccccaaggagaacacgaucuggaccagcggguccagcaucuccuucugcggcgucaacagcgacaccguggggugguccuggcccgacggcgcggagcugccguucaccaucgacaaguga

SEQ ID NO: 82565 - RNA, 1410 nt, Artificial Sequence; identical to SEQ ID NO: 80762
  derived and/or modified CDS sequence (opt1) from neuraminidase__InfluenzaA__ADF27472

SEQ ID NO: 82566 - RNA, 1410 nt, Artificial Sequence
  derived and/or modified CDS sequence (opt1) from neuraminidase__InfluenzaA__ADF27482
augaaccccaaccagaagaucaucaccaucggcagcgugugcaugaccaucgggauggccaaccugauccuccagaucggcaacaucaucuccaucuggaucagccacuccauccagcuggggaaccagaaccaggucgagacgugcaaccagagcaucaucaccuacgagaacaacaccugggugaaccagaccuacgugaacaucuccaacacgaacuucgccgcgggccagagcgucguguccgugaagcuggccgggaacagcucccucugcccggucagcggcugggccaucuacuccaaggacaacagcauccgcaucggcuccaagggggacguguucgugauccgggagcccuucaucagcugcagcccccuggagugccgcaccuucuuccugacccagggcgcccuccugaacgacaagcacuccaacgggaccaucaaggaccggucccccuaccgcacgcugaugagcugcccgaucggcgagguccccucccccuacaacagccgguucgagagcguggccugguccgcgagcgccugccacgacgggaucaacuggcucaccaucggcaucuccggccccgacaacggggccguggccguccugaaguacaacggcaucaucaccgacaccaucaagagcuggcgcaacaacauccugcggacgcaggaguccgagugcgcgugcgugaacgggagcugcuucaccgugaugaccgacggcccguccgacggccaggccagcuacaagaucuuccgcaucgagaaggggaagaucgucaaguccguggagaugaacgcccccaacuaccacuacgaggagugcagcugcuaccccgacuccagcgagaucacgugcgugugccgggacaacuggcacggcuccaaccgccccugggucagcuucaaccagaaccucgaguaccagaucggguacaucugcuccggcaucuucggggacaacccgcggcccaacgacaagaccggcagcugcggccccguguccagcaacggggccaacggcgugaagggguucuccuucaaguacggcaacggggucuggaucggccgcaccaagagcaucagcucccggaacggcuucgagaugaucugggaccccaacggguggaccggcaccgacaacaacuucagcaucaagcaggacaucguggggaucaacgagugguccggcuacagcggguccuucgugcagcacccggagcugacgggccuggacugcauccgccccugcuucugggucgagcucauccggggccgccccaaggagaacaccaucuggaccagcggguccagcaucuccuucugcggcgugaacagcgacaccgucgggugguccuggcccgacggcgccgagcugccguucacgaucgacaaguga

SEQ ID NO: 82567 - RNA, 1410 nt, Artificial Sequence
  derived and/or modified CDS sequence (opt1) from neuraminidase__InfluenzaA__ADF27492
augaaccccaaccagaagaucaucaccaucggcagcgugugcaugaccaucgggauggccaaccugauccuccagaucggcaacaucaucuccaucuggaucagccacuccauccagcuggggaaccagaaccagaucgagccgugcaaccagagcgucaucacguacgagaacaacaccugggugaaccagaccuacgugaacaucuccaacaccaacuucgccgcgggccagagcgucguguccgugaagcuggccgggaacagcucccucugccccgucagcggcugggccaucuacuccaaggacaacagcauccgcaucggcuccaagggggacguguucgugauccgggagcccuucaucagcugcagcccccuggagugccgcacguucuuccugacccagggcgcccuccugaacgacaagcacuccaacgggaccaucaaggaccgguccccguaccgcacccugaugagcugccccaucggcgagguccccucccccuacaacagccgguucgagagcguggccugguccgcgagcgccugccacgacgggaucaacuggcucacgaucggcaucuccggcccggacaacggggccguggccguccugaaguacaacggcaucaucaccgacaccaucaagagcuggcgcaacaacauccugcggacccaggaguccgagugcgcgugcgugaacgggagcugcuucacggugaugaccgacggccccuccgacggccaggccagcuacaagaucuuccgcaucgagaaggggaagaucgucaaguccaucgagaugaacgcccccaacuaccacuacgaggagugcagcugcuaccccgacuccagcgagaucacgugcgugugccgggacaacuggcacggcuccaaccgcccgugggugagcuucaaccagaaccucgaguaccagaucggguacaucugcuccggcaucuucggggacaacccccggcccaacgacaagaccggcagcugcggccccgucuccagcaacggggccaacggcgugaagggguucuccuucaaguacggcaacgggguguggaucggccgcaccaagagcaucagcucccggaacggcuucgagaugaucugggacccgaacggguggaccggcaccgacaacaacuucagcaucaagcaggacaucgucgggaucaacgagugguccggcuacagcggguccuucgugcagcaccccgagcugaccggccuggacugcauccgccccugcuucuggguggagcucauccggggccgccccaaggagaacacggucuggaccagcggguccagcaucuccuucugcggcgugaacagcgacaccgucgggugguccuggccggacggcgccgagcugcccuucaccaucgacaaguga

SEQ ID NO: 82568 - RNA, 1410 nt, Artificial Sequence; identical to SEQ ID NO: 80762
  derived and/or modified CDS sequence (opt1) from neuraminidase__InfluenzaA__ADF27502

SEQ ID NO: 82569 - RNA, 1410 nt, Artificial Sequence; identical to SEQ ID NO: 80762
  derived and/or modified CDS sequence (opt1) from neuraminidase__InfluenzaA__ADF27512

SEQ ID NO: 82570 - RNA, 1410 nt, Artificial Sequence
  derived and/or modified CDS sequence (opt1) from neuraminidase__InfluenzaA__ADF27522
augaaccccaaccagaagaucaucaccaucggcagcgugugcaugaccaucgggauggccaaccugauccuccagaucggcaacaucaucuccaucuggaucagccacuccauccagcuggggaaccagaaccagaucgagacgugcaaccagagcgucaucaccuacgagaacaacaccugggugaaccagaccuacgugaacaucuccaacacgaacuucgccgcgggccagagcgucguguccgugaagcuggccgggaacagcucccucugcccggucagcggcugggccaucuacuccaaggacaacagcauccgcaucggcuccaagggggacguguucgugauccgggagcccuucaucagcugcagcccccuggagugccgcaccuucuuccugacccagggcgcccuccugaacgacaagcacuccaacgggaccaucaaggaccggucccccuaccgcacgcugaugagcugcccgaucggcgagguccccucccccuacaacagccgguucgagagcguggccugguccgcgagcgccugccacgacgggaucaacuggcucaccaucggcaucuccggccccgacaacggggccguggccguccugaaguacaacggcaucaucaccgacaccaucaagagcuggcgcaacaacauccugcggacgcaggaguccgagugcgcgugcgugaacgggagcugcuucaccgugaugaccgacggcccguccgacggccaggccagcuacaagaucuuccgcaucgagaaggggaagaucgucaaguccguggagaugaacgcccccaacuaccacuacgaggagugcagcugcuaccccgacuccagcgagaucacgugcgugugccgggacaacuggcacggcuccaaccgccccugggucagcuucaaccagaaccucgaguaccagaucggguacaucugcuccggcaucuucggggacaacccgcggcccaacgacaagaccggcagcugcggccccguguccagcaacggggccaacggcgugaagggguucuccuucaaguacggcaacggggucuggaucggccgcaucaagagcaucagcucccggaacggcuucgagaugaucugggaccccaacggguggaccggcaccgacaacaacuucagcaucaagcaggacaucguggggaucaacgagugguccggcuacagcggguccuucgugcagcacccggagcugaccggccuggacugcauccgccccugcuucugggucgagcucauccggggccgccccaaggagaacacgaucuggaccagcggguccagcaucuccuucugcggcgugaacagcgacaccgucgggugguccuggcccgacggcgccgagcugccguucaccaucgacaaguga

SEQ ID NO: 82571 - RNA, 1410 nt, Artificial Sequence; identical to SEQ ID NO: 80762
  derived and/or modified CDS sequence (opt1) from neuraminidase__InfluenzaA__ADF27532

SEQ ID NO: 82572 - RNA, 1410 nt, Artificial Sequence
  derived and/or modified CDS sequence (opt1) from neuraminidase__InfluenzaA__ADF27542
augaaccccaaccagaagaucaucaccaucggcagcgugugcaugaccaucgggauggccaaccugauccuccagaucggcaacaucaucuccaucuggaucagccacuccauccagcuggggaaccagaaccagaucgagacgugcaaccagagcgucaucaccuacgagaacaacaccugggugaaccagaccuacgugaacaucuccaacacgaacuucgccgcgggccagagcgucguguccgugaagcuggccgggaacagcucccucugcccggucagcggcugggccaucuacuccaaggacaacagcgugcgcaucggcuccaagggggacguguucgucauccgggagcccuucaucagcugcagcccccuggagugccgcaccuucuuccugacccagggcgcccuccugaacgacaagcacuccaacgggaccaucaaggaccggucccccuaccgcacgcugaugagcugcccgaucggcgaggugcccucccccuacaacagccgguucgagagcguggccugguccgcgagcgccugccacgacgggaucaacuggcucaccaucggcaucuccggccccgacaacggggccgucgccgugcugaaguacaacggcaucaucaccgacaccaucaagagcuggcgcaacaacauccugcggacgcaggaguccgagugcgcgugcgugaacgggagcugcuucaccgucaugaccgacggcccguccgacggccaggccagcuacaagaucuuccgcaucgagaaggggaagaucgugaaguccguggagaugaacgcccccaacuaccacuacgaggagugcagcugcuaccccgacuccagcgagaucacgugcgucugccgggacaacuggcacggcuccaaccgccccugggugagcuucaaccagaaccucgaguaccggaucggguacaucugcuccggcaucuucggggacaacccgcgccccaacgacaagaccggcagcugcggccccguguccagcaacggggccaacggcgucaagggguucuccuucaaguacggcaacgggguguggaucggccggaccaagagcaucagcucccgcaacggcuucgagaugaucugggaccccaacggguggaccggcaccgacaacaacuucagcaucaagcaggacaucguggggaucaacgagugguccggcuacagcggguccuucguccagcacccggagcugacgggccuggacugcauccggcccugcuucuggguggagcucauccgcggccggcccaaggagaacaccaucuggaccagcggguccagcaucuccuucugcggcgucaacagcgacaccguggggugguccuggcccgacggcgccgagcugccguucacgaucgacaaguga

SEQ ID NO: 82573 - RNA, 1410 nt, Artificial Sequence
  derived and/or modified CDS sequence (opt1) from neuraminidase__InfluenzaA__ADF27552
augaaccccaaccagaagaucaucaccaucggcagcgugugcaugaccaucgggcuggccaaccucauccugcagaucggcaacaucaucuccaucugggucagccacuccauccagcuggggaaccagaaccagaucgagacgugcaaccagagcgugaucaccuacgagaacaacaccugggugaaccagaccuacgucaacaucuccaacacgaacuucgccgcgggccagagcgugguguccgucaagcucgccgggaacagcucccugugcccggugagcggcugggccaucuacuccaaggacaacagcgugcgcaucggcuccaagggggacgucuucgugauccgggagcccuucaucagcugcagcccccuggagugccgcaccuucuuccucacccagggcgcccugcugaacgacaagcacuccaacgggaccaucaaggaccggucccccuaccgcacgcucaugagcugcccgaucggcgaggugcccucccccuacaacagccgguucgagagcgucgccugguccgcgagcgccugccacgacgggaucaacuggcugaccaucggcaucuccggccccgacaacggggccguggccgugcugaaguacaacggcaucaucaccgacaccaucaagagcuggcgcaacaacauccuccggacgcaggaguccgagugcgcgugcgucaacgggagcugcuucaccgugaugaccgacggcccguccgacggccaggccagcuacaagaucuuccgcaucgagaaggggaagaucgugaaguccgucgagaugaacgcccccaacuaccacuacgaggagugcagcugcuaccccgacuccagcgagaucacgugcgugugccgggacaacuggcacggcuccaaccgccccugggugagcuucaaccagaaccuggaguaccggaucggguacaucugcuccggcaucuucggggacaacccgcgccccaacgacaagaccggcagcugcggccccgucuccagcaacggggccaacggcgugaagggguucuccuucaaguacggcaacgggguguggaucggccggaccaagagcaucagcucccgcaacggcuucgagaugaucugggaccccaacggguggaccggcaccgacaagaacuucagcaucaagcaggacaucgucgggaucaacgagugguccggcuacagcggguccuucgugcagcacccggagcugacgggccucgacugcauccggcccugcuucugggucgagcugauccgcggccggcccaaggagaacaccaucuggaccagcggguccagcaucuccuucugcggcgugaacagcgacaccguggggugguccuggcccgacggcgccgagcugccguucacgaucgacaaguga

SEQ ID NO: 82574 - RNA, 1410 nt, Artificial Sequence; identical to SEQ ID NO: 81588
  derived and/or modified CDS sequence (opt1) from neuraminidase__InfluenzaA__ADF27562

SEQ ID NO: 82575 - RNA, 1410 nt, Artificial Sequence; identical to SEQ ID NO: 80762
  derived and/or modified CDS sequence (opt1) from neuraminidase__InfluenzaA__ADF27572

SEQ ID NO: 82576 - RNA, 1410 nt, Artificial Sequence
  derived and/or modified CDS sequence (opt1) from neuraminidase__InfluenzaA__ADF27582
augaaccccaaccagaagaucaucaccaucggcagcgugugcaugaccaucgggauggccaaccugauccuccagaucggcaacaucaucuccaucuggaucagccacuccauccagcuggggaaccagaaccagaucgagacgugcaaccagagcgucaucaccuacgagaacaacaccugggugaaccagaccuacgugaacaucuccaacacgaacuucgccgcgggccagagcgucguguccgugaagcuggccgggaacagcucccucugcccggucagcggcugggccaucuacuccaaggacaacagcauccgcaucggcuccaagggggacguguucgugauccgggagcccuucaucagcugcagcccccuggagugccgcaccuucuuccugacccagggcgcccuccugaacgacaagcacuccaacgggaccaucaaggaccggucccccuaccgcacgcugaugagcugcccgaucggcgagguccccucccccuacaacagccgguucgagagcguggccugguccgcgagcgccugccacgacgggaucaacuggcucaccaucggcaucuccggccccgacaacggggccguggccguccugaaguacaacggcaucaucaccgacaccaucaagagcuggcgcaacaacauccugcggacgcaggaguccgagugcgcgugcgugaacgggagcugcuucaccgugaugaccgacggcccguccgacggccaggccagcuacaagaucuuccgcaucgagaaggggaagaucgucaaguccguggagaugaacgcccccaacuaccacuacgaggagugcagcugcuaccccgacuccagcgagaucacgugcgugugccgggacaacuggcacggcuccaaccgccccugggucagcuucaaccagaaccucgaguaccggaucggguacaucugcuccggcaucuucggggacaacccgcgccccaacgacaagaccggcagcugcggccccguguccagcaacggggccaacggcgugaagggguucuccuucaaguacggcaacggggucuggaucggccggaccaagagcaucagcucccgcaacggcuucgagaugaucugggaccccaacggguggaccggcaccgacaacaacuucagcaucaagcaggacaucguggggaucaacgagugguccggcuacagcggguccuucgugcagcacccggagcugacgggccuggacugcauccggcccugcuucugggucgagcucauccgcggccggcccaaggagaacaccaucuggaccagcggguccagcaucuccuucugcggcgugaacagcgacaccgucgggugguccuggcccgacggcgccgagcugccguucacgaucgacaaguga

SEQ ID NO: 82577 - RNA, 1410 nt, Artificial Sequence; identical to SEQ ID NO: 80762
  derived and/or modified CDS sequence (opt1) from neuraminidase__InfluenzaA__ADF27592

SEQ ID NO: 82578 - RNA, 1410 nt, Artificial Sequence
  derived and/or modified CDS sequence (opt1) from neuraminidase__InfluenzaA__ADF27602
augaaccccaaccagaagaucaucaccaucggcagcgugugcaugaccaucgggauggccaaccugauccuccagaucggcaacaucaucuccaucuggaucagccacuccauccagcuggggaaccagaaccagaucgagacgugcaaccagagcgucaucaccuacgagaacaacaccugggugaaccagaccuacgugaacaucuccaacacgaacuucgccgcgggccagagcgucguguccgugaagcuggccgggaacagcucccucugcccggucagcggcugggccaucuacuccaaggacaacagcauccgcaucggcuccaagggggacguguucgugauccgggagcccuucaucagcugcagcccccuggagugccgcaccuucuuccugacccagggcgcccuccugaacgacaagcacuccaacgggaccaucaaggaccggucccccuaccgcacgcugaugagcugcccgaucggcgagguccccucccccuacaacagccgguucgagagcguggccugguccgcgagcgccugccacgacgggaucaacuggcucaccaucggcaucuccggccccgacaacggggccguggccguccugaaguacaacggcaucaucaccgacaccaucaagagcuggcgcaacaacauccugcggacgcaggaguccgagugcgcgugcgugaacgggagcugcuucaccgugaugaccgacggcccguccgacggccaggccagcuacaagaucuuccgcaucgagcgggggaagaucgucaaguccguggagaugaacgcccccaacuaccacuacgaggagugcagcugcuaccccgacuccagcgagaucacgugcgugugccgcgacaacuggcacggcuccaaccggcccugggucagcuucaaccagaaccucgaguaccagaucggguacaucugcuccggcaucuucggggacaacccgcgccccaacgacaagaccggcagcugcggccccguguccagcaacggggccaacggcgugaagggguucuccuucaaguacggcaacggggucuggaucggccggaccaagagcaucagcucccgcaacggcuucgagaugaucugggaccccaacggguggaccggcaccgacaacagcuucuccaucaagcaggacaucguggggaucaacgaguggagcggcuacuccgggagcuucgugcagcacccggagcugacgggccuggacugcauccggcccugcuucugggucgagcucauccgcggccggcccaaggagaacaccaucuggaccuccgggagcuccaucagcuucugcggcgugaacuccgacaccgucggguggagcuggcccgacggcgccgagcugccguucacgaucgacaaguga

SEQ ID NO: 82579 - RNA, 1410 nt, Artificial Sequence; identical to SEQ ID NO: 80762
  derived and/or modified CDS sequence (opt1) from neuraminidase__InfluenzaA__ADF27612

SEQ ID NO: 82580 - RNA, 1410 nt, Artificial Sequence; identical to SEQ ID NO: 82050
  derived and/or modified CDS sequence (opt1) from neuraminidase__InfluenzaA__ADF27622

SEQ ID NO: 82581 - RNA, 1410 nt, Artificial Sequence; identical to SEQ ID NO: 82497
  derived and/or modified CDS sequence (opt1) from neuraminidase__InfluenzaA__ADF27632

SEQ ID NO: 82582 - RNA, 1410 nt, Artificial Sequence; identical to SEQ ID NO: 80762
  derived and/or modified CDS sequence (opt1) from neuraminidase__InfluenzaA__ADF27642

SEQ ID NO: 82583 - RNA, 1410 nt, Artificial Sequence; identical to SEQ ID NO: 80762
  derived and/or modified CDS sequence (opt1) from neuraminidase__InfluenzaA__ADF27652

SEQ ID NO: 82584 - RNA, 1410 nt, Artificial Sequence
  derived and/or modified CDS sequence (opt1) from neuraminidase__InfluenzaA__ADF27662
augaaccccaaccagaagaucaucaccaucggcagcgugugcaugaccaucgggauggccaaccugauccuccagaucggcaacaucaucuccaucuggaucagccacuccauccagcuggggaaccagaaccagaucgagacgugcaaccagagcgucaucaccuacgagaacaacaccugggugaaccagaccuacgugaacaucuccaacacgaacuucgccgcgggccagagcgucguguccgugaagcuggccgggaacagcucccucugcccggucagcggcugggccaucuacuccaaggacaacagcgugcgcaucggcuccaagggggacguguucgucauccgggagcccuucaucagcugcagcccccuggagugccgcaccuucuuccugacccagggcgcccuccugaacgacaagcacuccaacgggaccaucaaggaccggucccccuaccgcacgcugaugagcugcccgaucggcgaggugcccucccccuacaacagccgguucgagagcguggccugguccgcgagcgccugcaacgacgggaucaacuggcucaccaucggcaucuccggccccgacaacggggccgucgccgugcugaaguacaacggcaucaucaccgacaccaucaagagcuggcgcaacaacauccugcggacgcaggaguccgagugcgcgugcgugaacgggagcugcuucaccgucaugaccgacggcccguccgacggccaggccagcuacaagaucuuccgcaucgagaaggggaagaucgugaaguccguggagaugaacgcccccaacuaccacuacgaggagugcagcugcuaccccgacuccagcgagaucacgugcgucugccgggacaacuggcacggcuccaaccgccccugggugagcuucaaccagaaccucgaguaccggaucggguacaucugcuccggcaucuucggggacaacccgcgccccaacgacaagaccggcagcugcggccccguguccagcaacggggccaacggcgucaagggguucuccuucaaguacggcaacgggguguggaucggccggaccaagagcaucagcucccgcaacggcuucgagaugaucugggaccccaacggguggaccggcaccgacaacaacuucagcaucaagcaggacaucguggggaucaacgagugguccggcuacagcggguccuucguccagcacccggagcugacgggccuggacugcauccggcccugcuucuggguggagcucauccgcggccggcccaaggagaacaccaucuggaccagcggguccagcaucuccuucugcggcgucaacagcgacaccguggggugguccuggcccgacggcgccgagcugccguucacgaucgacaaguga

SEQ ID NO: 82585 - RNA, 1410 nt, Artificial Sequence; identical to SEQ ID NO: 80762
  derived and/or modified CDS sequence (opt1) from neuraminidase__InfluenzaA__ADF27672

SEQ ID NO: 82586 - RNA, 1410 nt, Artificial Sequence; identical to SEQ ID NO: 80762
  derived and/or modified CDS sequence (opt1) from neuraminidase__InfluenzaA__ADF27682

SEQ ID NO: 82587 - RNA, 1410 nt, Artificial Sequence; identical to SEQ ID NO: 80762
  derived and/or modified CDS sequence (opt1) from neuraminidase__InfluenzaA__ADF27692

SEQ ID NO: 82588 - RNA, 1410 nt, Artificial Sequence; identical to SEQ ID NO: 80762
  derived and/or modified CDS sequence (opt1) from neuraminidase__InfluenzaA__ADF27702

SEQ ID NO: 82589 - RNA, 1410 nt, Artificial Sequence; identical to SEQ ID NO: 80762
  derived and/or modified CDS sequence (opt1) from neuraminidase__InfluenzaA__ADF27712

SEQ ID NO: 82590 - RNA, 1410 nt, Artificial Sequence; identical to SEQ ID NO: 82050
  derived and/or modified CDS sequence (opt1) from neuraminidase__InfluenzaA__ADF27788

SEQ ID NO: 82591 - RNA, 1410 nt, Artificial Sequence; identical to SEQ ID NO: 82005
  derived and/or modified CDS sequence (opt1) from neuraminidase__InfluenzaA__ADF27798

SEQ ID NO: 82592 - RNA, 1410 nt, Artificial Sequence; identical to SEQ ID NO: 82497
  derived and/or modified CDS sequence (opt1) from neuraminidase__InfluenzaA__ADF27808

SEQ ID NO: 82593 - RNA, 1410 nt, Artificial Sequence
  derived and/or modified CDS sequence (opt1) from neuraminidase__InfluenzaA__ADF27818
augaaccccaaccagaagaucaucaccaucggcagcgugugcaugaccaucgggauggccaaccugauccuccagaucggcaacaucaucuccaucuggaucagccacuccauccagcuggggaaccagaaccagaucgagacgugcaaccagagcgucaucaccuacgagaacaacaccugggugaaccagaccuacgugaacaucuccaacacgaacuucgccgcgggccagagcgucguguccgugaagcuggccgggaacagcucccucugcccggucagcggcugggccaucuacuccaaggacaacagcauccgcaucggcuccaagggggacguguucgugauccgggagcccuucaucagcugcagcccccuggagugccgcaccuucuuccugacccagggcgcccuccugaacgacaagcacuccaacgggaccaucaaggaccggucccccuaccgcacgcugaugagcugcccgaucggcgagguccccucccccuacaacagccgguucgagagcguggccugguccgcgagcgccugccacgacgggaucaacuggcucaccaucggcaucuccggccccgacaacggggccguggccguccugaaguacaacggcaucaucaccgacaccaucaagagcuggcgcaacaacauccugcggacgcaggaguccgagugcgcgugcgugaacgggagcugcuucaccaucaugaccgacggcccguccgacggccaggccagcuacaagaucuuccgcaucgagaaggggaagaucgugaaguccgucgagaugaacgcccccaacuaccacuacgaggagugcagcugcuaccccgacuccagcgagaucacgugcgugugccgggacaacuggcacggcuccaaccgccccugggugagcuucaaccagaaccucgaguaccagaucggguacaucugcuccggcaucuucggggacaacccgcggcccaacgacaagaccggcagcugcggccccgucuccagcaacggggccaacggcgugaagggguucuccuucaaguacggcaacgggguguggaucggccgcaccaagagcaucaacagccggaacggcuucgagaugaucugggaccccaacggguggaccggcaccgacaacaacuucuccaucaagcaggacaucgucgggaucaacgaguggagcggcuacuccgggagcuucgugcagcacccggagcugacgggccuggacugcauccgccccugcuucuggguggagcucauccggggccgccccaaggagaacaccaucuggaccuccgggagcuccaucagcuucugcggcgucaacuccgacaccgugggguggagcuggcccgacggcgccgagcugccguucacgaucgacaaguga

SEQ ID NO: 82594 - RNA, 1410 nt, Artificial Sequence; identical to SEQ ID NO: 80762
  derived and/or modified CDS sequence (opt1) from neuraminidase__InfluenzaA__ADF27838

SEQ ID NO: 82595 - RNA, 1410 nt, Artificial Sequence; identical to SEQ ID NO: 80762
  derived and/or modified CDS sequence (opt1) from neuraminidase__InfluenzaA__ADF27848

SEQ ID NO: 82596 - RNA, 1410 nt, Artificial Sequence
  derived and/or modified CDS sequence (opt1) from neuraminidase__InfluenzaA__ADF27858
augaaccccaaccagaagaucaucaccaucggcagcgugugcaugaccaucgggauggccaaccugauccuccagaucggcaacaucaucuccaucuggaucagccacuccauccagcuggggaaccagaaccagaucgagacgugcaaccagagcgucaucaccuacgagaacaacaccugggugaaccagaccuacgugaacaucuccaacacgaacuucgccgcgggccagagcgucguguccgugaagcuggccgggaacagcucccucugcccggucagcggcugggccaucuacuccaaggacaacagcauccgcaucggcuccaagggggacguguucgugauccgggagcccuucaucagcugcagcccccuggagugccgcaccuucuuccugacccagggcgcccuccugaacgacaagcacuccaacgggaccaucaaggaccggucccccuaccgcacgcugaugagcugcccgaucggcgagguccccucccccuacaacagccgguucgagagcguggccugguccagcuccgcgugccacgacgggaucaacuggcucaccaucggcaucagcggccccgacaacggggccguggccguccugaaguacaacggcaucaucaccgacaccaucaaguccuggcgcaacaacauccugcggacgcaggagagcgagugcgccugcgugaacggguccugcuucaccgugaugaccgacggcccgagcgacggccaggcguccuacaagaucuuccgcaucgagaaggggaagaucgucaagagcguggagaugaacgcccccaacuaccacuacgaggagugcuccugcuaccccgacagcuccgagaucacgugcgugugccgggacaacuggcacggcagcaaccgccccugggucuccuucaaccagaaccucgaguaccagaucggguacaucugcagcggcaucuucggggacaacccgcggcccaacgacaagaagggcuccugcggccccgugagcuccaacggggccaacggcgugaagggguucagcuucaaguacggcaacggggucuggaucggccgcaccaagagcaucuccagccggaacggcuucgagaugaucugggaccccaacggguggaccggcaccgacaacaacuucuccaucaagcaggacaucguggggaucaacgaguggagcggcuacuccgggagcuucgugcagcacccggagcugaccggccuggacugcauccgccccugcuucugggucgagcucauccggggccgccccaaggagaacacgaucuggaccuccgggagcuccaucagcuucugcggcgugaacggggacaccgucggcugguccuggcccgacggcgccgagcugccguucaccaucgacaaguga

SEQ ID NO: 82597 - RNA, 1410 nt, Artificial Sequence
  derived and/or modified CDS sequence (opt1) from neuraminidase__InfluenzaA__ADF27878
augaaccccaaccagaagaucaucaccaucggcagcgugugcaugaccaucgggauggccaaccugauccuccagaucggcaacaucaucuccaucuggaucagccacuccauccagcuggggaaccagaaccagaucgagacgugcaaccagagcgucaucaccuacgagaacaacaccugggugaaccagaccuacgugaacaucuccaacacgaacuucgccgcgggccagagcgucguguccgugaagcuggccgggaacagcucccucugcccggucagcggcugggccaucuacuccaaggacaacagcauccgcaucggcuccaagggggacguguucgugauccgggagcccuucaucagcugcagcccccuggagugccgcaccuucuuccugacccagggcgcccuccugaacgacaagcacuccaacgggaccaucaaggaccggucccccuaccgcacgcugaugagcugcccgaucggcgagguccccucccccuacaacagccgguucgagagcguggccugguccgcgagcgccugccacgacgggaucaacuggcucaccaucggcaucuccggccccgacaacggggccguggccguccugaaguacaacggcaucaucaccgacaccaucaagagcuggcgcaacaacauccugcggacgcaggaguccgagugcgcgugcgugaacgggagcugcuucaccgugaugaccgacggcccguccgacggccaggccagcuacaagaucuuccgcaucgagaaggggaagaucgucaaguccguggagaugaacgcccccaacuaccacuacgaggagugcagcugcuaccccgacuccagcgagaucacgugcgugugccgggacaacuggcacggcuccaaccgccccugggucagcuucaaccagaaccucgaguaccagaucggguacaucugcuccggcaucuucggggacaacccgcggcccaacgacaagaagggcagcugcggccccguguccagcaacggggccaacggcgugaagggguucuccuucaaguacggcaacggggucuggaucggccgcaccaagagcaucagcucccggaacggcuucgagaugaucugggaccccaacggguggaccggcaccgacaacaacuucagcaucaagcaggacaucguggggaucaacgagugguccggcuacagcggguccuucgugcagcacccggagcugaccggccuggacugcauccgccccugcuucugggucgagcucauccggggccgccccaaggagaacacgaucuggaccagcggguccagcaucuccuucugcggcgugaacggggacaccgucggcuggagcuggcccgacggcgccgagcugccguucaccaucgacaaguga

SEQ ID NO: 82598 - RNA, 1410 nt, Artificial Sequence; identical to SEQ ID NO: 82050
  derived and/or modified CDS sequence (opt1) from neuraminidase__InfluenzaA__ADF27888

SEQ ID NO: 82599 - RNA, 1410 nt, Artificial Sequence; identical to SEQ ID NO: 80762
  derived and/or modified CDS sequence (opt1) from neuraminidase__InfluenzaA__ADF27898

SEQ ID NO: 82600 - RNA, 1410 nt, Artificial Sequence; identical to SEQ ID NO: 82050
  derived and/or modified CDS sequence (opt1) from neuraminidase__InfluenzaA__ADF27908

SEQ ID NO: 82601 - RNA, 1410 nt, Artificial Sequence; identical to SEQ ID NO: 82050
  derived and/or modified CDS sequence (opt1) from neuraminidase__InfluenzaA__ADF27918

SEQ ID NO: 82602 - RNA, 1410 nt, Artificial Sequence
  derived and/or modified CDS sequence (opt1) from neuraminidase__InfluenzaA__ADF27938
augaaccccaaccagcgcaucaucaccaucggcagcgugugcaugaccaucgggauggccaaccugauccuccagaucggcaacaucaucuccaucuggaucagccacuccauccagcuggggaaccagaaccagaucgagacgugcaaccagagcgucaucaccuacgagaacaacaccugggugaaccagaccuacgugaacaucuccaacacgaacuucgccgcgggccagagcgucguguccgugaagcuggccgggaacagcucccucugcccggucagcggcugggccaucuacuccaaggacaacagcauccggaucggcuccaagggggacguguucgugauccgcgagcccuucaucagcugcagcccccuggagugccggaccuucuuccugacccagggcgcccuccugaacgacaagcacuccaacgggaccaucaaggaccgcucccccuaccggacgcugaugagcugcccgaucggcgagguccccucccccuacaacagccgcuucgagagcguggccugguccgcgagcgccugccacgacgggaucaacuggcucaccaucggcaucuccggccccgacaacggggccguggccguccugaaguacaacggcaucaucaccgacaccaucaagagcuggcggaacaacauccugcgcacgcaggaguccgagugcgcgugcgugaacgggagcugcuucaccgugaugaccgacggcccguccgacggccaggccagcuacaagaucuuccggaucgagaaggggaagaucgucaaguccguggagaugaacgcccccaacuaccacuacgaggagugcagcugcuaccccgacuccagcgagaucacgugcgugugccgcgacaacuggcacggcuccaaccggcccugggucagcuucaaccagaaccucgaguaccagaucggguacaucugcuccggcaucuucggggacaacccgcgccccaacgacaagaccggcagcugcggccccguguccagcaacggggccaacggcgugaagggguucuccuucaaguacggcaacggggucuggaucggccggaccaagagcaucagcucccgcaacggcuucgagaugaucugggaccccaacggguggaccggcaccgacaacaacuucagcaucaagcaggacaucguggggaucaacgagugguccggcuacagcggguccuucgugcagcacccggagcugacgggccuggacugcauccggcccugcuucugggucgagcucauccgcggccggcccaaggagaacaccaucuggaccagcggguccagcauguccuucugcggcgugaacagcgacaccgucgggugguccuggcccgacggcgccgagcugccguucacgaucgacaaguga

SEQ ID NO: 82603 - RNA, 1410 nt, Artificial Sequence; identical to SEQ ID NO: 80762
  derived and/or modified CDS sequence (opt1) from neuraminidase__InfluenzaA__ADF27948

SEQ ID NO: 82604 - RNA, 1410 nt, Artificial Sequence; identical to SEQ ID NO: 82050
  derived and/or modified CDS sequence (opt1) from neuraminidase__InfluenzaA__ADF27958

SEQ ID NO: 82605 - RNA, 1410 nt, Artificial Sequence; identical to SEQ ID NO: 80762
  derived and/or modified CDS sequence (opt1) from neuraminidase__InfluenzaA__ADF27968

SEQ ID NO: 82606 - RNA, 1410 nt, Artificial Sequence; identical to SEQ ID NO: 82050
  derived and/or modified CDS sequence (opt1) from neuraminidase__InfluenzaA__ADF27978

SEQ ID NO: 82607 - RNA, 1410 nt, Artificial Sequence
  derived and/or modified CDS sequence (opt1) from neuraminidase__InfluenzaA__ADF27988
augaaccccaaccagaagaucaucaccaucggcagcgugugcaugaccaucgggcuggccaaccucauccugcagaucggcaacaucaucuccaucuggaucagccacuccauccagcuggggaaccagaaccagaucgagacgugcaaccagagcgucaucuccuacgagaacaacaccugggugaaccagaccuacgugaacaucagcaacaccaacuucgccgcgggccaguccgucgugagcgugaagcucgccgggaacuccagccugugcccggucuccggcugggccaucuacagcaaggacaacuccgugcgcaucggcagcaagggggacguguucgucauccgggagcccuucaucuccugcagcccccuggagugccgcacguucuuccucacccagggcgcccugcugaacgacaagcacuccaacgggaccaucaaggaccggagccccuaccgcacccucauguccugcccgaucggcgaggugcccagccccuacaacagccgguucgaguccguggccuggagcgcguccgccugccacgacgggaucaacuggcugacgaucggcaucagcggccccgacaacggggccgucgccgugcugaaguacaacggcaucaucaccgacaccaucaaguccuggcgcaacaacauccuccggacccaggagagcgagugcgcgugcgugaacggguccugcuucacggucaugaccgacggcccgagcgacggccaggccuccuacaagaucuuccgcaucgagaaggggaagaucgucaagagcguggagaugaacgcccccaacuaccacuacgaggagugcuccugcuaccccgacagcuccgagaucacgugcgugugccgggacaacuggcacggcagcaaccgccccuggguguccuucaaccagaaccuggaguaccggaucggguacaucugcagcggcaucuucggggacaacccgcgccccaacgacaagaccggcuccugcggccccgugagcuccaacggggccaacggcgucaagggguucagcuucaaguacggcaacgggguguggaucggccggaccaagagcaucuccagccgcaacggcuucgagaugaucugggaccccaacggguggaccggcaccgacaagaacuucuccaucaagcaggacaucguggggaucaacgaguggagcggcuacuccgggagcuucguccagcacccggagcugaccggccucgacugcauccggcccugcuucuggguggagcugauccgcggccggcccaaggagaacacgaucuggaccuccgggagcuccaucagcuucugcggcgucaacuccgacaccgugggguggagcuggcccgacggcgccgagcugccguucaccaucgacaaguga

SEQ ID NO: 82608 - RNA, 1410 nt, Artificial Sequence; identical to SEQ ID NO: 80762
  derived and/or modified CDS sequence (opt1) from neuraminidase__InfluenzaA__ADF27998

SEQ ID NO: 82609 - RNA, 1410 nt, Artificial Sequence; identical to SEQ ID NO: 80762
  derived and/or modified CDS sequence (opt1) from neuraminidase__InfluenzaA__ADF28008

SEQ ID NO: 82610 - RNA, 1410 nt, Artificial Sequence; identical to SEQ ID NO: 81649
  derived and/or modified CDS sequence (opt1) from neuraminidase__InfluenzaA__ADF28018

SEQ ID NO: 82611 - RNA, 1410 nt, Artificial Sequence; identical to SEQ ID NO: 80762
  derived and/or modified CDS sequence (opt1) from neuraminidase__InfluenzaA__ADF28028

SEQ ID NO: 82612 - RNA, 1410 nt, Artificial Sequence
  derived and/or modified CDS sequence (opt1) from neuraminidase__InfluenzaA__ADF28038
augaaccccaaccagaagaucaucaccaucggcagcgugugcaugaccaucgggauggccaaccugauccuccagaucggcaacaucaucuccaucuggaucagccacuccauccagcuggggaaccagaaccagaucgagacgugcaaccagagcgucaucaccuacgagaacaacaccugggugaaccagaccuacgugaacaucuccaacacgaacuucgccaccggccagcuggucgugagcgugaagcucgcggggaacuccagccugugcccggucuccggcugggccaucuacagcaaggacaacuccauccgcaucggcagcaagggggacguguucgugauccgggagcccuucaucuccugcagcccccuggagugccgcaccuucuuccucacccagggcgcccugcugaacgaccggcacuccaacgggacgaucaaggaccgcagccccuaccggacccucauguccugcccgaucggcgagguccccagccccuacaacucccgcuucgagagcguggccuggagcgccuccgcgugccacgacgggaucaacuggcugaccaucggcaucagcggccccgacaacggggccguggccguccugaaguacaacggcaucaucaccgacacgaucaaguccuggcggaacaacauccuccgcacccaggagagcgagugcgccugcgugaacggguccugcuucaccgugaugaccgacggcccgagcgacggccaggcguccuacaagaucuuccggaucgagaaggggaagaucgucaagagcguggagaugaacgcccccaacuaccacuacgaggagugcuccugcuaccccgacagcuccgagaucacgugcgugugccgcgacaacuggcacggcagcaaccggcccugggucuccuucaaccagaaccuggaguaccagaucggguacaucugcagcggcaucuucggggacaacccgcgccccaacgacaagaccggcuccugcggccccgugagcuccaacggggccaacggcgugaagggguucagcuucaaguacggcaacggggucuggaucggccggaccaaguccaucagcagccgcaacggcuucgagaugaucugggaccccaacggguggaccggcacggacaacaacuucuccaucaagcaggacaucguggggaucaacgaguggagcggcuacuccgggagcuucgugcagcacccggagcugaccggccucgacugcauccggcccugcuucugggucgagcugauccgcggccggcccaaggagaacaccaucuggaccuccgggagcuccaucagcuucugcggcgugaacuccgacacggucggguggagcuggcccgacggcgccgagcugccguucaccaucgacaaguga

SEQ ID NO: 82613 - RNA, 1410 nt, Artificial Sequence; identical to SEQ ID NO: 80762
  derived and/or modified CDS sequence (opt1) from neuraminidase__InfluenzaA__ADF28048

SEQ ID NO: 82614 - RNA, 1410 nt, Artificial Sequence; identical to SEQ ID NO: 80762
  derived and/or modified CDS sequence (opt1) from neuraminidase__InfluenzaA__ADF28058

SEQ ID NO: 82615 - RNA, 1410 nt, Artificial Sequence
  derived and/or modified CDS sequence (opt1) from neuraminidase__InfluenzaA__ADF28068
augaaccccaaccagaagaucaucaccaucggcagcgugugcaugaccaucgggauggccaaccugauccuccagaucggcaacaucaucuccaucuggaucagccacuccauccagcuggggaaccagaaccagaucgagacgugcaaccagagcgucaucaccuacgagaacaacaccugggugaaccagaccuacgugaacaucuccaacacgaacuucgccgcgggccagagcgucguguccgugaagcuggccgggagcuccagccucugcccggucuccggcugggccaucuacagcaaggacaacuccauccgcaucggcagcaagggggacguguucgugauccgggagcccuucaucuccugcagccaccuggagugccgcaccuucuuccugacccagggcgcccuccugaacgacaagcacuccaacgggaccaucaaggaccggagccccuaccgcacgcugauguccugccccaucggcgaggucccgagccccuacaacagccgguucgaguccguggccuggagcgcguccgccugccacgacgggaucaacuggcucaccaucggcaucagcggccccgacaacggggccguggccguccugaaguacaacggcaucaucaccgacaccaucaaguccuggcgcaacaacauccugcggacgcaggagagcgagugcgcgugcgugaacggguccugcuucaccgugaugaccgacggccccagcgacggccaggccuccuacaagaucuuccgcaucgagaaggggaagaucgucaagagcguggagaugaacgccccgaacuaccacuacgaggagugcuccugcuaccccgacagcuccgagaucacgugcgugugccgggacaacuggcacggcagcaaccgccccugggucuccuucaaccagaaccucgaguaccagaucggguacaucugcagcggcaucuucggggacaacccccggccgaacgacaagaagggcuccugcggccccgugagcuccaacggggccaacggcgugaagggguucagcuucaaguacggcaacggggucuggaucggccgcaccaagagcaucuccagccggaacggcuucgagaugaucugggaccccaacggguggaccggcaccgacaacaacuucuccaucaagcaggacaucguggggaucaacgaguggagcggcuacuccgggagcuucgugcagcaccccgagcugaccggccuggacugcauccgcccgugcuucugggucgagcucauccggggccgccccaaggagaacacgaucuggaccuccgggagcuccaucagcuucugcggcgugaacuccgacaccgucggguggagcuggcccgacggcgccgagcugcccuucaccaucgacaaguga

SEQ ID NO: 82616 - RNA, 1410 nt, Artificial Sequence; identical to SEQ ID NO: 80762
  derived and/or modified CDS sequence (opt1) from neuraminidase__InfluenzaA__ADF28078

SEQ ID NO: 82617 - RNA, 1410 nt, Artificial Sequence; identical to SEQ ID NO: 80762
  derived and/or modified CDS sequence (opt1) from neuraminidase__InfluenzaA__ADF28088

SEQ ID NO: 82618 - RNA, 1410 nt, Artificial Sequence; identical to SEQ ID NO: 82224
  derived and/or modified CDS sequence (opt1) from neuraminidase__InfluenzaA__ADF28110

SEQ ID NO: 82619 - RNA, 1410 nt, Artificial Sequence; identical to SEQ ID NO: 80762
  derived and/or modified CDS sequence (opt1) from neuraminidase__InfluenzaA__ADF28120

SEQ ID NO: 82620 - RNA, 1410 nt, Artificial Sequence; identical to SEQ ID NO: 80762
  derived and/or modified CDS sequence (opt1) from neuraminidase__InfluenzaA__ADF29919

SEQ ID NO: 82621 - RNA, 1410 nt, Artificial Sequence; identical to SEQ ID NO: 81899
  derived and/or modified CDS sequence (opt1) from neuraminidase__InfluenzaA__ADF42692

SEQ ID NO: 82622 - RNA, 1410 nt, Artificial Sequence; identical to SEQ ID NO: 80762
  derived and/or modified CDS sequence (opt1) from neuraminidase__InfluenzaA__ADF42702

SEQ ID NO: 82623 - RNA, 1410 nt, Artificial Sequence; identical to SEQ ID NO: 82597
  derived and/or modified CDS sequence (opt1) from neuraminidase__InfluenzaA__ADF42712

SEQ ID NO: 82624 - RNA, 1410 nt, Artificial Sequence; identical to SEQ ID NO: 80762
  derived and/or modified CDS sequence (opt1) from neuraminidase__InfluenzaA__ADF42722

SEQ ID NO: 82625 - RNA, 1410 nt, Artificial Sequence; identical to SEQ ID NO: 82050
  derived and/or modified CDS sequence (opt1) from neuraminidase__InfluenzaA__ADF42732

SEQ ID NO: 82626 - RNA, 1410 nt, Artificial Sequence; identical to SEQ ID NO: 80762
  derived and/or modified CDS sequence (opt1) from neuraminidase__InfluenzaA__ADF42742

SEQ ID NO: 82627 - RNA, 1410 nt, Artificial Sequence; identical to SEQ ID NO: 80752
  derived and/or modified CDS sequence (opt1) from neuraminidase__InfluenzaA__ADF58339

SEQ ID NO: 82628 - RNA, 1410 nt, Artificial Sequence; identical to SEQ ID NO: 80762
  derived and/or modified CDS sequence (opt1) from neuraminidase__InfluenzaA__ADF58348

SEQ ID NO: 82629 - RNA, 1410 nt, Artificial Sequence; identical to SEQ ID NO: 80762
  derived and/or modified CDS sequence (opt1) from neuraminidase__InfluenzaA__ADF58350

SEQ ID NO: 82630 - RNA, 1410 nt, Artificial Sequence; identical to SEQ ID NO: 80762
  derived and/or modified CDS sequence (opt1) from neuraminidase__InfluenzaA__ADF58352

SEQ ID NO: 82631 - RNA, 1410 nt, Artificial Sequence
  derived and/or modified CDS sequence (opt1) from neuraminidase__InfluenzaA__ADF80459
augaaccccaaccagaagaucaucaccaucggcagcgugugcaugaccaucgggauggccaaccugauccuccagaucggcaacaucaucuccaucuggaucagccacuccauccagcuggggaaccagaaccagaucgagacgugcaaccagagcgucaucaccuacgagaacaacaccugggugaaccagaccuacgugaacaucuccaacacgaacuucgccgcgggccagagcgucguguccgugaagcuggccgggaacagcucccucugcccggucagcggcugggccaucuacuccaaggacaacagcauccgcaucggcuccaagggggacguguucgugauccgggagcccuucaucagcugcagcccccuggagugccgcaccuucuuccugacccagggcgcccuccugaacgacaagcacuccaacgggaccaucaaggaccggucccccuaccgcacgcugaugagcugcccgaucggcgagguccccucccccuacaacagccgguucgagagcguggccugguccgcgagcgccugccacgacgggaucaacuggcucaccaucggcaucuccggccccgacaacggggccguggccguccugaaguacaacggcaucaucaccgacaccaucaagagcuggcgcaacaacauccugcggacgcaggaguccgagugcgcgugcgugaacgggagcugcuucaccgugaugaccgacggcccguccgacggccaggccagcuacaagaucuuccgcaucgagaaggggaagaucgucaaguccguggagaugaacgcccccaacuacuacuacgaggagugcagcugcuaccccgacuccagcgagaucacgugcgugugccgggacaacuggcacggcuccaaccgccccugggucaccuucaaccagaaccucgaguaccagaucggguacaucugcagcggcaucuucggggacaacccgcggcccaacgacaagaccggcuccugcggccccgugagcuccaacggggccaacggcgugaagggguucagcuucaaguacggcaacggggucuggaucggccgcaccaaguccaucagcagccggaacggcuucgagaugaucugggaccccaacggguggaccggcacggacaacaacuucuccaucaagcaggacaucguggggaucaacgaguggagcggcuacuccgggagcuucgugcagcacccggagcugaccggccuggacugcauccgccccugcuucugggucgagcucauccggggccgccccaaggagaacaccguguggaccuccgggagcuccaucagcuucugcggcgucaacuccgacacggugggguggagcuggcccgacggcgccgagcugccguucaccaucgacaaguga

SEQ ID NO: 82632 - RNA, 1410 nt, Artificial Sequence
  derived and/or modified CDS sequence (opt1) from neuraminidase__InfluenzaA__ADF80503
augaaccccaaccagaagaucaucaccaucggcagcgugugcaugaccaucgggauggccaaccugauccuccagaucggcaacaucacguccaucuggaucagccacuccauccagcuggggaaccagaaccagaucgagaccugcaaccagagcgucaucaccuacgagaacaacaccugggugaaccagacguacgugaacaucuccaacaccaacuucgccgcgggccagagcgucguguccgugaagcuggccgggaacagcucccucugcccggucagcggcugggccaucuacuccaaggacaacagcauccgcaucggcuccaagggggacguguucgugauccgggagcccuucaucagcugcagcccccuggagugccgcaccuucuuccugacccagggcgcccuccugaacgacaagcacuccaacgggacgaucaaggaccggucccccuaccgcacccugaugagcugcccgaucggcgagguccccucccccuacaacagccgguucgagagcguggccugguccgcgagcgccugccacgacgggaucaacuggcucaccaucggcaucuccggccccgacaacggggccguggccguccugaaguacaacggcaucaucaccgacacgaucaagagcuggcgcaacaacauccugcggacccaggaguccgagugcgcgugcgugaacgggagcugcuucaccgugaugaccgacggcccguccgacggccaggccagcuacaagaucuuccgcaucgagaaggggaagaucgucaaguccguggagaugaacgcccccaacuacuacuacgaggagugcagcugcuaccccgacuccagcgagaucacgugcgugugccgggacaacuggcacggcuccaaccgccccugggucagcuucaaccagaaccucgaguaccagaucggguacaucugcuccggcaucuucggggacaacccgcggcccaacgacaagaccggcagcugcggccccguguccagcaacggggccaacggcgugaagggguucuccuucaaguacggcaacggggucuggaucggccgcaccaagagcaucagcucccggaacggcuucgagaugaucugggaccccaacggguggaccggcacggacaacaacuucagcaucaagcaggacaucguggggaucaacgagugguccggcuacagcggguccuucgugcagcacccggagcugaccggccuggacugcauccgccccugcuucugggucgagcucauccggggccgccccaaggagaacaccaucuggaccagcggguccagcaucuccuucugcggcgugaacagcgacacggucgggugguccuggcccgacggcgccgagcugccguucaccaucgacaaguga

SEQ ID NO: 82633 - RNA, 1410 nt, Artificial Sequence
  derived and/or modified CDS sequence (opt1) from neuraminidase__InfluenzaA__ADF83744
augaaccccaaccagaagaucaucaccaucggcagcgugucccugaccaucagcacgaucugcuucuucaugcagaucgccauccucaucaccaccgucacccugcacuucaagcaguacgaguucaacuccccgcccaacaaccaggugaugcugugcgagcccacgaucaucgagaagaacaucaccgagaucguguaccucaccaacaccacgaucgagaaggagaucugccccaagcuggccgaguaccgcaacuggagcaagccgcagugcgacaucaccggguucgcgcccuucuccaaggacaacagcauccggcuguccgccggcggggacaucugggucacccgcgagcccuacgugagcugcgaccccgacaagugcuaccaguucgcccucggccaggggaccacgcugaacaacgugcacuccaacaacaccguccgggaccgcaccccguaccggacccugcucaugaacgagcugggcgugcccuuccaccugggcacgaagcaggucugcaucgccuggagcuccagcuccugccacgacgggaaggccuggcuccacgugugcaucaccggcgacgacaagaacgcgaccgccagcuucaucuacaacgggcgccugguggacuccguggucagcugguccaaggagauccugcggacccaggagagcgagugcgugugcaucaacggcacgugcaccguggucaugaccgacggguccgccagcggcaaggccgacaccaagauccucuucaucgaggagggcaagaucgugcacacgagcacccuguccgggagcgcgcagcacguggaggagugcuccugcuacccccgcuaccccggcguccggugcgugugccgcgacaacuggaaggggagcaaccggccgaucguggacaucaacaucaaggaccacuccaucgucagcuccuacgugugcagcggccuggugggcgacacgccccgcaagaacgacuccagcuccagcucccacugccucgaccccaacaacgaggagggcgggcacggggucaagggcugggccuucgacgacgggaacgacguguggaugggccggaccaucagcgagaagucccgccugggcuacgagaccuucaaggucaucgagggguggagcaaccccaaguccaagcugcagaucaaccgccaggugaucguggaccggggcaaccggagcggguacuccggcaucuucagcgucgagggcaagagcugcaucaaccgcugcuucuacguggagcucauccgggggcgcaaggaggagaccgaggugcuguggaccuccaacagcaucgucguguucugcggcaccuccgggacguacggcaccgggagcuggccggacggcgccgacaucaaccugaugcccaucuga

SEQ ID NO: 82634 - RNA, 1410 nt, Artificial Sequence; identical to SEQ ID NO: 81616
  derived and/or modified CDS sequence (opt1) from neuraminidase__InfluenzaA__ADF83755

SEQ ID NO: 82635 - RNA, 1410 nt, Artificial Sequence
  derived and/or modified CDS sequence (opt1) from neuraminidase__InfluenzaA__ADF83766
augaaccccaaccagaagaucaucaccaucggcagcgugugcaugaccaucgggauggccaaccugauccuccagaucggcaacaucaucuccaucuggaucagccacuccauccagcuggggaaccagaaccagacggagaccugcaaccagagcgucaucaccuacgagaacaacaccugggugaaccagacguacgugaacaucuccaacaccaacuucgccgcgggccagagcgucguguccgugaagcuggccgggaacagcucccucugcccggucagcggcugggccaucuacuccaaggacaacagcauccgcaucggcuccaagggggacguguucgugauccgggagcccuucaucagcugcagcccccuggagugccgcaccuucuuccugacccagggcgcccuccugaacgacaagcacuccaacgggacgaucaaggaccggucccccuaccgcacccugaugagcugcccgaucggcgagguccccucccccuacaacagccgguucgagagcguggccugguccgcgagcgccugccacgacgggaucaacuggcucaccaucggcaucuccggccccgacaacggggccguggccguccugaaguacaacggcaucaucaccgacacgaucaagagcuggcgcaacaacauccugcggacccaggaguccgagugcgcgugcgugaacgggagcugcuucaccgugaugaccgacggcccguccgacggccaggccagcuacaagaucuuccgcaucgagaaggggaagaucgucaaguccguggagaugaacgcccccaacuaccacuacgaggagugcagcugcuaccccgacuccagcgagaucacgugcgugugccgggacaacuggcacggcuccaaccgccccugggucagcuucaaccagaaccucgaguaccagaucggguacaucugcuccggcaucuucggggacaacccgcggcccaacgacaagaccggcagcugcggccccguguccagcaacggggccaacggcgugaagggguucuccuucaaguacgacaacggcgucuggaucgggcgcaccaagagcaucagcucccggaacggcuucgagaugaucugggaccccaacggcuggaccgggacggacaacaacuucagcaucaagcaggacaucgugggcaucaacgagugguccggguacagcggcuccuucgugcagcacccggagcugaccgggcuggacugcauccgccccugcuucugggucgagcucauccggggccgccccaaggagaacaccaucuggaccagcggcuccagcaucuccuucugcggggugaacagcgacacggucggcugguccuggcccgacggggccgagcugccguucaccaucgacaaguga

SEQ ID NO: 82636 - RNA, 1410 nt, Artificial Sequence; identical to SEQ ID NO: 80762
  derived and/or modified CDS sequence (opt1) from neuraminidase__InfluenzaA__ADF83776

SEQ ID NO: 82637 - RNA, 1410 nt, Artificial Sequence
  derived and/or modified CDS sequence (opt1) from neuraminidase__InfluenzaA__ADF83786
augaaccccaaccagaagaucaucaccaucggcagcgugugcaugaccaucgggauggccaaccugauccuccagaucggcaacaucaucuccaucuggaucagccacuccauccagcuggggaaccagaaccagaucgagacgugcaaccagagcgucaucaccuacgagaacaacaccugggugaaccagaccuacgugaacaucuccaacacgaacuucgccgcgggccagagcgucguguccgugaagcuggccgggaacagcucccucugcccggucagcggcugggccaucuacuccaaggacaacagcauccgcaucggcuccaagggggacguguucgugauccgggagcccuucaucagcugcagcccccuggagugccgcaccuucuuccugacccagggcgcccuccugaacgacaagcacuccaacgggaccaucaaggaccggucccccuaccgcacgcugaugagcugcccgaucggcgagguccccucccccuacaacagccgguucgagagcguggccugguccgcgagcgccugccacgacgggaucaacuggcucaccaucggcaucuccggccccgacaacggggccguggccguccugaaguacaacggcaucaucaccgacaccaucaagagcuggcgcaacaacauccugcggacgcaggaguccgagugcgcgugcgugaacgggagcugcuucaccgugaugaccgacggcccguccgacggccaggccagcuacaagaucuuccgcaucgagaaggggaagaucgucaaguccguggagaugaacgcccccaacuaccacuacgaggagugcagcugcuaccccgacuccagcgagaucacgugcgugugccgggacaacuggcacggcuccaaccgccccugggucagcuucaaccagaaccucgaguaccagaucggguacaucugcuccggcaucuucggggacaacccgcggcccaacgacaagaccggcagcugcggccccguguccagcaacggggccaacggcgugaagggguucuccuucaaguacggcaacggggucuggaucggccgcaccaagagcaucagcucccggaacggcuucgagaugaucugggaccccaacggguggaccggcaccgacaacaacuucagcaucaagcaggacaucguggggaucaacgagugguccggcuacagcggguccuucgugcagcacccggagcugacgggccuggacugcauccgccccugcuucugggucgagcucauccggggccgccccaaggagaacaccaucuggaccagcggguccagcaucuccuucugcggcgugaacggggacaccgucggcuggagcuggcccgacggcgccgagcugccguucacgaucgacaaguga

SEQ ID NO: 82638 - RNA, 1410 nt, Artificial Sequence
  derived and/or modified CDS sequence (opt1) from neuraminidase__InfluenzaA__ADF83796
augaaccccaaccagaagaucaucaccaucggcagcgugugcaugaccaucgggauggccaaccugauccuccagaucggcaacaucaucuccaucuggaucagccacuccauccagcuggggaaccagaaccagaucgagacgugcaaccagagcgucaucaccuacgagaacaacaccugggugaaccagaccuacgugaacaucuccaacacgaacuucgccgcgggccagagcgucguguccgugaagcuggccgggaacagcucccucugcccggucagcggcugggccaucuacuccaaggacaacagcauccgcaucggcuccaagggggacguguucgugauccgggagcccuucaucagcugcagcccccuggagugccgcaccuucuuccugacccagggcgcccuccugaacgacaagcacuccaacgggaccaucaaggaccggucccccuaccgcacgcugaugagcugcccgaucggcgagguccccucccccuacaacagccgguucgagagcguggccugguccgcgagcgccugccacgacgggaucaacuggcucaccaucggcaucuccggccccgacaacggggccguggccguccugaaguacaacggcaucaucaccgacaccaucaagagcuggcgcaacaacauccugcggacgcaggaguccgagugcgcgugcgugaacgggagcugcuucaccgugaugaccgacggcccguccgacggccaggccagcuacaagaucuuccgcaucgagaaggggaagaucgucaaguccguggagaugaacgcccccaacuaccacuacgaggagugcagcugcuaccccgacuccagcgagaucacgugcgugugccgggacaacuggcacggcuccaaccgccccugggucagcuucaaccagaaccucgaguaccagaucggguacaucugcuccggcaucuucggggacaacccgcggcccaacgacaagaccggcagcugcggccccguguccagcaacggggccaacggcgugaagggguucuccuucaaguacggcaacggggucuggaucggccgcaccaagagcaucagcucccggaacggcuucgagaugaucugggaccccaacggguggaccggcaccgacaacaacuucagcaucaagcaggacaucgugcgcaucaacgagugguccggguacagcggcuccuucgugcagcacccggagcugacggggcuggacugcauccggcccugcuucugggucgagcucauccgcggccggcccaaggagaacaccaucuggaccagcggcuccagcaucuccuucugcggggugaacagcgacaccgucggcugguccuggcccgacggggccgagcugccguucacgaucgacaaguga

SEQ ID NO: 82639 - RNA, 1410 nt, Artificial Sequence; identical to SEQ ID NO: 80762
  derived and/or modified CDS sequence (opt1) from neuraminidase__InfluenzaA__ADF83806

SEQ ID NO: 82640 - RNA, 1410 nt, Artificial Sequence; identical to SEQ ID NO: 82275
  derived and/or modified CDS sequence (opt1) from neuraminidase__InfluenzaA__ADF83816

SEQ ID NO: 82641 - RNA, 1410 nt, Artificial Sequence; identical to SEQ ID NO: 80762
  derived and/or modified CDS sequence (opt1) from neuraminidase__InfluenzaA__ADF83826

SEQ ID NO: 82642 - RNA, 1410 nt, Artificial Sequence; identical to SEQ ID NO: 80762
  derived and/or modified CDS sequence (opt1) from neuraminidase__InfluenzaA__ADF83836

SEQ ID NO: 82643 - RNA, 1410 nt, Artificial Sequence; identical to SEQ ID NO: 80762
  derived and/or modified CDS sequence (opt1) from neuraminidase__InfluenzaA__ADF83846

SEQ ID NO: 82644 - RNA, 1410 nt, Artificial Sequence; identical to SEQ ID NO: 80762
  derived and/or modified CDS sequence (opt1) from neuraminidase__InfluenzaA__ADF83856

SEQ ID NO: 82645 - RNA, 1410 nt, Artificial Sequence; identical to SEQ ID NO: 82113
  derived and/or modified CDS sequence (opt1) from neuraminidase__InfluenzaA__ADF83866

SEQ ID NO: 82646 - RNA, 1410 nt, Artificial Sequence; identical to SEQ ID NO: 82543
  derived and/or modified CDS sequence (opt1) from neuraminidase__InfluenzaA__ADF83876

SEQ ID NO: 82647 - RNA, 1410 nt, Artificial Sequence; identical to SEQ ID NO: 82193
  derived and/or modified CDS sequence (opt1) from neuraminidase__InfluenzaA__ADF83888

SEQ ID NO: 82648 - RNA, 1410 nt, Artificial Sequence
  derived and/or modified CDS sequence (opt1) from neuraminidase__InfluenzaA__ADF83898
augaaccccaaccagaagaucaucaccaucggcagcgugugcaugaccaucgggauggccaaccugauccuccagaucggcaacaucaucuccaucuggaucagccacccgauccagcuggggaaccagaaccagaucgagacgugcaaccaguccgucaucaccuacgagaacaacaccugggugaaccagaccuacgugaacaucagcaacacgaacuucgccgcgggccaguccgucgugagcgugaagcuggccgggaacuccagccucugccccgucuccggcugggccaucuacagcaaggacaacuccauccgcaucggcagcaagggggacguguucgugauccgggagcccuucaucuccugcagcccccuggagugccgcaccuucuuccugacccagggcgcccuccugaacgacaagcacuccaacgggaccaucaaggaccggagcccguaccgcacgcugauguccugccccaucggcgagguccccagccccuacaacucccgguucgagagcguggccuggagcgcguccgccugccacgacgggaucaacuggcucaccaucggcaucagcggcccggacaacggggccguggccguccugaaguacaacggcaucaucaccgacaccaucaaguccuggcgcaacaacauccugcggacgcaggagagcgagugcgcgugcgugaacggguccugcuucaccgugaugaccgacggccccagcgacggccaggccuccuacaagaucuuccgcaucgagaaggggaagaucgucaagagcguggagaugaacgcccccaacuaccacuacgaggagugcuccugcuaccccgacagcuccgagaucacgugcgugugccgggacaacuggcacggcagcaaccgcccgugggucuccuucaaccagaaccucgaguaccagaucggguacaucugcagcggcaucuucggggacaacccccggcccaacgacaagaccggcuccugcggccccgugagcuccaacggggccaacggcgugaagggguucagcuucaaguacggcaacggggucuggaucggccgcaccaaguccaucagcagccggaacggcuucgagaugaucugggacccgaacggguggaccggcaccgacaacaacuucuccaucaagcaggacaucguggggaucaacgaguggagcggcuacuccgggagcuucgugcagcaccccgagcugacgggccuggacugcauccgccccugcuucugggucgagcucauccggggccgccccaaggagaacaccaucuggaccuccgggagcuccaucagcuucugcggcgugaacuccgacaccgucggguggagcuggccggacggcgccgagcugcccuucacgaucgacaaguga

SEQ ID NO: 82649 - RNA, 1410 nt, Artificial Sequence; identical to SEQ ID NO: 80762
  derived and/or modified CDS sequence (opt1) from neuraminidase__InfluenzaA__ADF83908

SEQ ID NO: 82650 - RNA, 1410 nt, Artificial Sequence; identical to SEQ ID NO: 80762
  derived and/or modified CDS sequence (opt1) from neuraminidase__InfluenzaA__ADF83918

SEQ ID NO: 82651 - RNA, 1410 nt, Artificial Sequence; identical to SEQ ID NO: 80762
  derived and/or modified CDS sequence (opt1) from neuraminidase__InfluenzaA__ADF84444

SEQ ID NO: 82652 - RNA, 1410 nt, Artificial Sequence; identical to SEQ ID NO: 80762
  derived and/or modified CDS sequence (opt1) from neuraminidase__InfluenzaA__ADF84462

SEQ ID NO: 82653 - RNA, 1410 nt, Artificial Sequence
  derived and/or modified CDS sequence (opt1) from neuraminidase__InfluenzaA__ADF84472
augaaccccaaccagaagaucaucaccaucggcagcgugugcaugaccaucgggauggccaaccugauccuccagaucggcaacaucaucuccaucuggaucagccacuccauccagcuggggaaccagaaccagaucgagacgugcaaccagagcgucaucaccuacgagaacaacaccugggugaaccagaccuacgugaacaucuccaacacgaacuucgccgcggagcagagcgucguguccgugaagcuggccggcaacagcucccucugcccggucagcgggugggccaucuacuccaaggacaacagcauccgcaucggcuccaagggcgacguguucgugauccgggagcccuucaucagcugcagcccccuggagugccgcaccuucuuccugacccagggggcccuccugaacgacaagcacuccaacggcaccaucaaggaccggucccccuaccgcacgcugaugagcugcccgaucggggagguccccucccccuacaacagccgguucgagagcguggccugguccgcgagcgccugccacgacggcaucaacuggcucaccaucgggaucuccggccccgacaacggcgccguggccguccugaaguacaacgggaucaucaccgacaccaucaagagcuggcgcaacaacauccugcggacgcaggaguccgagugcgcgugcgugaacggcagcugcuucaccgugaugaccgacgggccguccgacggccaggccagcuacaagaucuuccgcaucgagaagggcaagaucgucaaguccguggagaugaacgcccccaacuaccacuacgaggagugcagcugcuaccccgacuccagcgagaucacgugcgugugccgggacaacuggcacggguccaaccgccccugggucagcuucaaccagaaccucgaguaccagaucggcuacaucugcuccgggaucuucggcgacaacccgcggcccaacgacaagaccgggagcugcggccccguguccagcaacggcgccaacggggugaagggcuucuccuucaaguacgggaacggcgucuggaucgggcgcaccaagagcaucagcucccggaacggcuucgagaugaucugggaccccaacggcuggaccgggaccgacaacaacuucagcaucaagcaggacaucgugggcaucaacgagugguccggguacagcggcuccuucgugcagcacccggagcugacggggcuggacugcauccgccccugcuucugggucgagcucauccggggccgccccaaggagaacaccaucuggaccagcggcuccagcaucuccuucugcggggugaacagcgacaccgucggcugguccuggcccgacggggccgagcugccguucacgaucgacaaguga

SEQ ID NO: 82654 - RNA, 1410 nt, Artificial Sequence
  derived and/or modified CDS sequence (opt1) from neuraminidase__InfluenzaA__ADF84482
augaaccccaaccagaagaucaucaucaucggcagcgugugcaugaccaucgggauggccaaccugauccuccagaucggcaacaucaucuccaucuggaucagccacuccauccagcuggggaaccagaaccagaucgagaccugcaaccagagcgucaucacguacgagaacaacaccugggugaaccagaccuacgugaacaucuccaacaccaacuucgccgcgggccagagcgucguguccgugaagcuggccgggaacagcucccucugcccggucagcggcugggccaucuacuccaaggacaacagcauccgcaucggcuccaagggggacguguucgugauccgggagcccuucaucagcugcagcccccuggagugccgcacguucuuccugacccagggcgcccuccugaacgacaagcacuccaacgggaccaucaaggaccggucccccuaccgcacccugaugagcugcccgaucggcgagguccccucccccuacaacagccgguucgagagcguggccugguccgcgagcgccugccacgacgggaucaacuggcucacgaucggcaucuccggccccgacaacggggccguggccguccugaaguacaacggcaucaucaccgacaccaucaagagcuggcgcaacaacauccugcggacccaggaguccgagugcgcgugcgugaacgggagcugcuucacggugaugaccgacggcccguccgacggccaggccagcuacaagaucuuccgcaucgagaaggggaagaucgucaaguccguggagaugaacgcccccaacuaccacuacgaggagugcagcugcuaccccgacuccagcgagaucacgugcgugugccgggacaacuggcacggcuccaaccgccccugggucagcuucaaccagaaccucgaguaccagaucggguacaucugcuccggcaucuucggggacaacccgcggcccaacgacaagaccggcagcugcggccccguguccagcaacggggccaacggcgugaagggguucuccuucaaguacggcaacggggucuggaucggccgcaccaagagcaucagcucccggaacggcuucgagaugaucugggaccccaacggguggaccggcaccgacaacaacuucgccaucaagcaggacaucguggggaucaacgaguggagcggcuacuccgggagcuucgugcagcacccggagcugaccggccuggacugcauccgccccugcuucugggucgagcucauccggggccgccccaaggagaacacgaucuggaccuccgggagcuccaucagcuucugcggcgugaacuccgacaccgucagcugguccuggcccgacggggcggagcugccguucaccaucgacaaguga

SEQ ID NO: 82655 - RNA, 1410 nt, Artificial Sequence
  derived and/or modified CDS sequence (opt1) from neuraminidase__InfluenzaA__ADF84492
augaaccccaaccagaagaucaucaccaucggcagcgugugcaugaccaucgggauggccaaccugauccuccagaucggcaacaucaucuccaucuggaucagccacuccauccagcuggggaaccaggaccagaucgagacgugcaaccagagcgucaucaccuacgagaacaacaccugggugaaccagaccuacgugaacaucuccaacacgaacuucgccgcgggccagagcgucguguccgugaagcuggccgggaacagcucccucugcccggucagcggcugggccaucuacuccaaggacaacagcauccgcaucggcuccaagggggacguguucgugauccgggagcccuucaucagcugcagcccccuggagugccgcaccuucuuccugacccagggcgcccuccugaacgacaagcacuccaacgggaccaucaaggaccggucccccuaccgcacgcugaugagcugcccgaucggcgagguccccucccccuacaacagccgguucgagagcguggccugguccgcgagcgccugccacgacgggaucaacuggcucaccaucggcaucuccggccccgacaacggggccguggccguccugaaguacaacggcaucaucaccgacaccaucaagagcuggcgcaacaacauccugcggacgcaggaguccgagugcgcgugcgugaacgggagcugcuucaccgugaugaccgacggcccguccgacggccaggccagcuacaagaucuuccgcaucgagaaggggaagaucgucaaguccguggagaugaacgcccccaacuaccacuacgaggagugcagcugcuaccccgacuccagcgagaucacgugcgugugccgggacaacuggcacggcuccaaccgccccugggucagcuucaaccagaaccucgaguaccagaucggguacaucugcuccggcaucuucggggacaacccgcggcccaacgacaagaccggcagcugcggccccguguccagcaacggggccaacggcgugaagggguucuccuucaaguacggcaacggggucuggaucggccgcaccaagagcaucagcucccggaacggcuucgagaugaucugggaccccaacggguggaccggcaccgacaacaacuucagcaucaagcaggacaucguggggaucaacgagugguccggcuacagcggguccuucgugcagcacccggagcugacgggccuggacugcauccgccccugcuucugggucgagcucauccggggccgccccaaggagaacaccaucuggaccagcggguccagcaucuccuucugcggcgugaacagcgacaccgucgggugguccuggcccgacggcgccgagcugccguucacgaucgacaaguga

SEQ ID NO: 82656 - RNA, 1410 nt, Artificial Sequence; identical to SEQ ID NO: 81869
  derived and/or modified CDS sequence (opt1) from neuraminidase__InfluenzaA__ADF85020

SEQ ID NO: 82657 - RNA, 1410 nt, Artificial Sequence; identical to SEQ ID NO: 80762
  derived and/or modified CDS sequence (opt1) from neuraminidase__InfluenzaA__ADF87155

SEQ ID NO: 82658 - RNA, 1410 nt, Artificial Sequence
  derived and/or modified CDS sequence (opt1) from neuraminidase__InfluenzaA__ADF87165
augaaccccaaccagaagaucaucaucaucggcagcgugugcaugaccaucgggauggccaaccugauccuccagaucggcaacaucaucuccaucuggaucagccacuccauccagcuggggaaccagaaccagaucgagaccugcaaccagagcgucaucacguacgagaacaacaccugggugaaccagaccuacgugaacaucuccaacaccaacuucgccgcgggccagagcgucguguccgugaagcuggccgggaacagcucccucugcccggucagcggcugggccaucuacuccaaggacaacagcauccgcaucggcuccaagggggacguguucgugauccgggagcccuucaucagcugcagcccccuggagugccgcacguucuuccugacccagggcgcccuccugaacgacaagcacuccaacgggaccaucaaggaccggucccccuaccgcacccugaugagcugcccgaucggcgagguccccucccccuacaacagccgguucgagagcguggccugguccgcgagcgccugccacgacgggaucaacuggcucacgaucggcaucuccggccccgacaacggggccguggccguccugaaguacaacggcaucaucaccgacaccaucaagagcuggcgcaacaacauccugcggacccaggaguccgagugcgcgugcgugaacgggagcugcuucacggugaugaccgacggcccguccgacggccaggccagcuacaagaucuuccgcaucgacaaggggaagaucgucaaguccguggagaugaacgcccccaacuaccacuacgaggagugcagcugcuaccccgacuccagcgagaucacgugcgugugccgggacaacuggcacggcuccaaccgccccugggucagcuucaaccagaaccucgaguaccagaucggguacaucugcuccggcaucuucggggacaacccgcggcccaacgacaagaccggcagcugcggccccguguccagcaacggggccaacggcgugaagggguucuccuucaaguacggcaacggggucuggaucggccgcaccaagagcaucagcucccggaacggcuucgagaugaucugggaccccaacggguggaccggcaccgacaacaacuucgccaucaagcaggacaucguggggaucaacgaguggagcggcuacuccgggagcuucgugcagcacccggagcugaccggccuggacugcauccgccccugcuucugggucgagcucauccggggccgccccaaggagaacacgaucuggaccuccgggagcuccaucagcuucugcggcgugaacuccgacaccgucggguggagcuggcccgacggcgcggagcugccguucaccaucgacaaguga

SEQ ID NO: 82659 - RNA, 1410 nt, Artificial Sequence; identical to SEQ ID NO: 82653
  derived and/or modified CDS sequence (opt1) from neuraminidase__InfluenzaA__ADF87175

SEQ ID NO: 82660 - RNA, 1410 nt, Artificial Sequence; identical to SEQ ID NO: 80762
  derived and/or modified CDS sequence (opt1) from neuraminidase__InfluenzaA__ADF87185

SEQ ID NO: 82661 - RNA, 1410 nt, Artificial Sequence; identical to SEQ ID NO: 82653
  derived and/or modified CDS sequence (opt1) from neuraminidase__InfluenzaA__ADF87195

SEQ ID NO: 82662 - RNA, 1410 nt, Artificial Sequence; identical to SEQ ID NO: 80762
  derived and/or modified CDS sequence (opt1) from neuraminidase__InfluenzaA__ADF87205

SEQ ID NO: 82663 - RNA, 1410 nt, Artificial Sequence; identical to SEQ ID NO: 80762
  derived and/or modified CDS sequence (opt1) from neuraminidase__InfluenzaA__ADF87215

SEQ ID NO: 82664 - RNA, 1410 nt, Artificial Sequence
  derived and/or modified CDS sequence (opt1) from neuraminidase__InfluenzaA__ADF87235
augaaccccaaccagaagaucaucaccaucggcagcgugugcaugaccaucgggauggccaaccugauccuccagaucggcaacaucaucuccaucuggaucagccacuccauccagcuggggaaccagaaccagaucgagacgugcaaccagagcgucaucaccuacgagaacaacaccugggugaaccagaccuacgugaacaucuccaacacgaacuucgccgcgggccagagcgucguguccgugaagcuggccgggaacagcucccucugcccggucagcggcugggccaucuacuccaaggacaacagcauccgcaucggcuccaagggggacguguucgugauccgggagcccuucaucagcugcagcccccuggagugccgcaccuucuuccugacccagggcgcccuccugaacgacaagcacuccaacgggaccaucaaggaccggucccccuaccgcacgcugaugagcugcccgaucggcgagguccccucccccuacaacagccgguucgagagcguggccugguccgcgagcgccugccacgacgggaucaacuggcucaccaucggcaucuccggccccgacaacggggccguggccguccugaaguacaacggcaucaucaccgacaccaucaagagcuggcgcaacaacauccugcggacgcaggaguccgagugcgcgugcgugaacgggagcugcuucaccgugaugaccgacggcccguccgacggccaggccagcuacaagaucuucaagaucgagaaggggaagaucgucaaguccguggagaugaacgcccccaacuaccacuacgaggagugcagcugcuaccccgacuccagcgagaucacgugcgugugccgcgacaacuggcacggcuccaaccggcccugggucagcuucaaccagaaccucgaguaccagaucggguacaucugcuccggcaucuucggggacaacccgcgccccaacgacaagaccggcagcugcggccccguguccagcaacggggccaacggcgugaagggguucuccuucaaguacggcaacggggucuggaucggccggaccaagagcaucagcucccgcaacggcuucgagaugaucugggaccccaacggguggaccggcaccgacaacaacuucagcaucaagcaggacaucguggggaucaacgagugguccggcuacagcggguccuucgugcagcacccggagcugacgggccuggacugcauccggcccugcuucugggucgagcucauccgcggccggcccaaggagaacaccaucuggaccagcggguccagcaucuccuucugcggcgugaacagcgacaccgucgggugguccuggcccgacggcgccgagcugccguucacgaucgacaaguga

SEQ ID NO: 82665 - RNA, 1410 nt, Artificial Sequence; identical to SEQ ID NO: 82653
  derived and/or modified CDS sequence (opt1) from neuraminidase__InfluenzaA__ADF87245

SEQ ID NO: 82666 - RNA, 1410 nt, Artificial Sequence; identical to SEQ ID NO: 82653
  derived and/or modified CDS sequence (opt1) from neuraminidase__InfluenzaA__ADF87265

SEQ ID NO: 82667 - RNA, 1410 nt, Artificial Sequence
  derived and/or modified CDS sequence (opt1) from neuraminidase__InfluenzaA__ADF87285
augaaccccaaccagaagaucaucaccaucggcagcgugugcauguccaucgggauggccaaccugauccuccagaucggcaacaucaucagcaucuggaucucccacagcauccagcuggggaacaagaaccagaucgagaccugcaaccaguccgucaucacguacgagaacaacaccugggugaaccagaccuacgugaacaucagcaacaccaacuucgccgcgggccaguccgucgugagcgugaagcuggccgggaacuccagccucugcccggucuccggcugggccaucuacagcaaggacaacuccauccgcaucggcagcaagggggacguguucgugauccgggagcccuucaucuccugcagcccccuggagugccgcacguucuuccugacccagggcgcccuccugaacgacaagcacuccaacgggaccaucaaggaccggagccccuaccgcacccugauguccugcccgaucggcgagguccccagccccuacaacagccgguucgaguccguggccuggagcgcguccgccugccacgacgggaucaacuggcucacgaucggcaucagcggccccgacaacggggccguggccguccugaaguacaacggcaucaucaccgacaccaucaaguccuggcgcaacaacauccugcggacccaggagagcgagugcgcgugcgugaacggguccugcuucacggugaugaccgacggcccgagcgacggccaggccuccuacaagaucuuccgcaucgagaaggggaagaucgucaagagcguggagaugaacgcccccaacuaccacuacgaggagugcuccugcuaccccgacagcuccgagaucacgugcgugugccgggacaacuggcacggcagcaaccgccccugggucuccuucaaccagaaccucgaguaccagaucggguacaucugcagcggcaucuucggggacaacccgcggcccaacgacaagaagggcuccugcggccccgugagcuccaacggggccaacggcgugaagggguucagcuucaaguacggcaacggggucuggaucggccgcaccaagagcaucuccagccggaacggcuucgagaugaucugggaccccaacggguggaccggcaccgacaacaacuucuccaucaagcaggacaucguggggaugaacgaguggagcggcuacuccgggagcuucgugcagcacccggagcugaccggccuggacugcauccgccccugcuucugggucgagcucauccggggccgccccaaggagaacaccaucuggacguccgggagcuccaucagcuucugcggcgugaacuccgacaccgucggguggagcuggcccgacggcgccgagcugccguucaccaucgacaaguga

SEQ ID NO: 82668 - RNA, 1410 nt, Artificial Sequence; identical to SEQ ID NO: 80762
  derived and/or modified CDS sequence (opt1) from neuraminidase__InfluenzaA__ADF87295

SEQ ID NO: 82669 - RNA, 1410 nt, Artificial Sequence; identical to SEQ ID NO: 80762
  derived and/or modified CDS sequence (opt1) from neuraminidase__InfluenzaA__ADF87305

SEQ ID NO: 82670 - RNA, 1410 nt, Artificial Sequence; identical to SEQ ID NO: 80762
  derived and/or modified CDS sequence (opt1) from neuraminidase__InfluenzaA__ADF87334

SEQ ID NO: 82671 - RNA, 1410 nt, Artificial Sequence; identical to SEQ ID NO: 80762
  derived and/or modified CDS sequence (opt1) from neuraminidase__InfluenzaA__ADF87344

SEQ ID NO: 82672 - RNA, 1410 nt, Artificial Sequence
  derived and/or modified CDS sequence (opt1) from neuraminidase__InfluenzaA__ADF87354
augaaccccaaccagaagaucaucaccaucggcagcgugugcaugaccaucgggauggccaaccugauccuccagaucggcaacaucaucuccaucuggaucagccacuccauccagcuggggaaccagaaccagaucgagacgugcaaccagagcgucaucaccuacgagaacaacaccugggugaaccagaccuacgugaacaucuccaacacgaacuucgccgcgggccagagcgucguguccgugaagcuggccgggaacagcucccucugcccggucagcggcugggccaucuacuccaaggacaacagcauccgcaucggcuccaagggggacguguucgugauccgggagcccuucaucagcugcagcccccuggagugccgcaccuucuuccugacccagggcgcccuccugaacgacaagcacuccaacgggaccaucaaggaccggucccccuaccgcacgcugaugagcugcccgaucggcgagguccccucccccuacaacagccgguucgagagcguggccugguccgcgagcgccugccacgacgggaucaacuggcucaccaucggcaucuccggccccgacaacggggccguggccguccugaaguacaacggcaucaucaccgacaccaucaagagcuggcgcaacaacauccugcggacgcaggaguccgagugcgcgugcgugaacgggagcugcuucaccgugaugaccgacggcccguccgacggccaggccagcuacaagaucuuccgcaucgagaaggggaagaucgucaaguccguggagaugaacgcccccaacuaccacuacgaggagugcagcugcuaccccgacuccagcgagaucacgugcgugugccgggacaacuggcacggcuccaaccgccccugggucagcuucaaccagaaccucgaguaccagaucggguacaucugcuccggcaucuucggggacaacccgcggcccaacgacaagaccggcagcugcggccccguguccagcaacggggccaacggcgugaagggguucuccuucaaguacggcaacggggucuggaucggccgcaccaagagcaucagcucccggaacggcuucgagaugaucugggaccccaacggguggaccggcaccgacaacuacuucagcaucaagcaggacaucguggggaucaacgagugguccggcuacagcggguccuucgugcagcacccggagcugacgggccuggacugcauccgccccugcuucugggucgagcucauccggggccgccccaaggagaacaccaucuggaccagcggguccagcaucuccuucugcggcgugaacagcgacaccgucgggugguccuggcccgacggcgccgagcugccguucacgaucgacaaguga

SEQ ID NO: 82673 - RNA, 1410 nt, Artificial Sequence; identical to SEQ ID NO: 81345
  derived and/or modified CDS sequence (opt1) from neuraminidase__InfluenzaA__ADF87364

SEQ ID NO: 82674 - RNA, 1410 nt, Artificial Sequence; identical to SEQ ID NO: 80762
  derived and/or modified CDS sequence (opt1) from neuraminidase__InfluenzaA__ADF87374

SEQ ID NO: 82675 - RNA, 1410 nt, Artificial Sequence
  derived and/or modified CDS sequence (opt1) from neuraminidase__InfluenzaA__ADF87384
augaaccccaaccagaagaucaucaccaucggcagcgugugcaugaccaucgggauggccaaccugauccuccagaucggcaacaucaucuccaucuggaucagccacuccauccagcuggggaaccagaaccagaucgagacgugcaaccagagcaucaucaccuacgagaacaacaccugggucaaccagaccuacgugaacaucuccaacacgaacuucgccgcgggccagagcguggucuccgugaagcuggccgggaacagcucccucugcccggugagcggcugggccaucuacuccaaggacaacagcauccgcaucggcuccaagggggacgucuucgugauccgggagcccuucaucagcugcagcccccuggagugccgcaccuucuuccugacccagggcgcccuccugaacgacaagcacuccaacgggaccaucaaggaccggucccccuaccgcacgcugaugagcugcccgaucggcgaggugcccucccccuacaacagccgguucgagagcgucgccugguccgcgagcgccugccacgacgggaucaacuggcucaccaucggcaucuccggccccgacaacggggccguggccgugcugaaguacaacggcaucaucaccgacaccaucaagagcuggcgcaacaacauccugcggacgcaggaguccgagugcgcgugcgucaacgggagcugcuucaccgugaugaccgacggcccguccgacggccaggccagcuacaagaucuuccgcaucgagaaggggaagaucgugaaguccgucgagaugaacgcccccaacuaccacuacgaggagugcagcugcuaccccgacuccagcgagaucacgugcgugugccgggacaacuggcacggcuccaaccgccccugggugagcuucaaccagaaccucgaguaccagaucggguacaucugcuccggcaucuucggggacaacccgcggcccaacgacaagaccggcagcugcggccccgucuccagcaacggggccaacggcgugaagggguucuccuucaaguacggcaacgggguguggaucggccgcaccaagagcaucagcucccggaacggcuucgagaugaucugggaccccaacggguggaccggcaccgacaacaacuucagcaucaagcaggacaucgucgggaucaacgagugguccggcuacagcggguccuucgugcagcacccggagcugacgggccuggacugcauccgccccugcuucuggguggagcucauccggggccgccccaaggagaacaccaucuggaccagcggguccagcaucuccuucugcggcgucaacagcgacaccguggggugguccuggcccgacggcgccgagcugccguucacgaucgacaaguga

SEQ ID NO: 82676 - RNA, 1410 nt, Artificial Sequence; identical to SEQ ID NO: 80762
  derived and/or modified CDS sequence (opt1) from neuraminidase__InfluenzaA__ADF97251

SEQ ID NO: 82677 - RNA, 1410 nt, Artificial Sequence; identical to SEQ ID NO: 82005
  derived and/or modified CDS sequence (opt1) from neuraminidase__InfluenzaA__ADF97252

SEQ ID NO: 82678 - RNA, 1410 nt, Artificial Sequence; identical to SEQ ID NO: 80762
  derived and/or modified CDS sequence (opt1) from neuraminidase__InfluenzaA__ADF97253

SEQ ID NO: 82679 - RNA, 1410 nt, Artificial Sequence; identical to SEQ ID NO: 80762
  derived and/or modified CDS sequence (opt1) from neuraminidase__InfluenzaA__ADF97254

SEQ ID NO: 82680 - RNA, 1410 nt, Artificial Sequence
  derived and/or modified CDS sequence (opt1) from neuraminidase__InfluenzaA__ADF97255
augaaccccaaccagaagaucaucaccaucggcagcgugugcaugaccaucgggauggccaaccugauccuccagaucggcaacaucaucuccaucuggaucagccacuccauccagcuggggaaccagaaccagaucgagacgugcaaccagagcgucaucaccuacgagaacaacaccugggugaaccagaccuacgugaacaucuccaacacgaacuucgccgcgggccagagcgucguguccgugaagcuggccgggaacagcucccucugcccggucagcggcugggccaucuacuccaaggacaacagcauccgcaucggcuccaagggggacguguucgugauccgggagcccuucaucagcugcagcccccuggagugccgcaccuucuuccugacccagggcgcccuccugaacgacaagcacuccaacgggaccaucaaggaccggucccccuaccgcacgcugaugagcugcccgaucggcgagguccccucccccuacaacagccgguucgagagcguggccugguccgcgagcgccugccacgacgggaucaacuggcucaccaucggcaucuccggccccgacaacggggccguggccguccugaaguacaacggcaucaucaccgacaccaucaagagcuggcgcaacaacauccugcggacgcaggaguccgagugcgcgugcgugaacgggagcugcuucaccgugaugaccgacggcccguccgacggccaggccagcuacaagaucuuccgcaucgagaaggggaagaucgucaaguccguggagaugaacgcccccaacuaccacuacgaggagugcagcugcuaccccgacuccagcgagaucacgugcgugugccgggacaacuggcacggcuccaaccgccccugggucagcuucaaccagaaccucgaguaccagaucggguacaucugcuccggcaucuucggggacaacccgcggcccaacgacaagaccggcagcugcggccccguguccagcaacggggccaacggcgugaagggguucuccuucaaguacggcaacggggucuggaucggccgcaccaagagcaucagcucccggaacggcuucgagaugaucugggaccccaacggguggaccggcaccgacaaccacuucagcaucaagcaggacaucguggggaucaacgagugguccggcuacagcggguccuucgugcagcacccggagcugacgggccuggacugcauccgccccugcuucugggucgagcucauccggggccgccccaaggagaacaccaucuggaccagcggguccagcaucuccuucugcggcgugaacagcgacaccgucgggugguccuggcccgacggcgccgagcugccguucacgaucgacaaguga

SEQ ID NO: 82681 - RNA, 1410 nt, Artificial Sequence; identical to SEQ ID NO: 80762
  derived and/or modified CDS sequence (opt1) from neuraminidase__InfluenzaA__ADF97256

SEQ ID NO: 82682 - RNA, 1410 nt, Artificial Sequence; identical to SEQ ID NO: 80762
  derived and/or modified CDS sequence (opt1) from neuraminidase__InfluenzaA__ADF97257

SEQ ID NO: 82683 - RNA, 1410 nt, Artificial Sequence; identical to SEQ ID NO: 81116
  derived and/or modified CDS sequence (opt1) from neuraminidase__InfluenzaA__ADF97837

SEQ ID NO: 82684 - RNA, 1410 nt, Artificial Sequence; identical to SEQ ID NO: 80762
  derived and/or modified CDS sequence (opt1) from neuraminidase__InfluenzaA__ADG08120

SEQ ID NO: 82685 - RNA, 1350 nt, Artificial Sequence
  derived and/or modified CDS sequence (opt1) from neuraminidase__InfluenzaA__ADG21408
augaaccccaaccagaagaucaucaccaucggcagcaucugcauggugaucgggaucgucucccugaugcuccagaucggcaacaugaucagcaucugggugucccacagcauccagaccgggaaccagugccaggacgagccgaucuccaacacgaaguuccugaccgagaaggccguggccagcgucacccuggcgggcaaccucucccugugccccgugagcgggugggccguguacuccaaggacaacagcauccgcaucggcucccggggcgacgucuucgugauccgcgagcccuucaucagcugcucccaccuggagugccggaccuucuuccucacgcagggggcccugcugaacgacaagcacagcaacggcaccgugaaggaccgcagcccccaccggacccucauguccugcccggucggggaggcccccucccccuacaacagccgcuucgaguccguggccuggagcgcgagcgccugccacgacggcaccuccuggcugacgaucgggaucagcggccccgacaacggcgccguggccguccugaaguacaacgggaucaucaccgacaccaucaaguccuggcggaacaacaucaugcgcacccaggagagcgagugcgcgugcgugaacggcuccugcuucacggugaugaccgacgggccgagcuccggccaggccagcuacaagaucuucaagauggagaagggcaaggucgugaaguccguggagcucgacgcccccaacuaccacuacgaggagugcagcugcuaccccgacgccggggagaucacgugcgucugccgggacaacuggcacggcuccaaccgccccugggugagcuucaaccagaaccuggaguaccagaucggguacaucugcuccggcguguucggggacaacccgcggcccaacgacggcaccggcagcugcgggcccgucuuccccaacggcgccuacggggugaagggcuucuccuucaaguacgggaacggcguguggaucggccgcaccaagagcaccaacucccggagcggguucgagaugaucugggacccgaacggcuggaccgggaccgacuccagcuucagcgucaagcaggacaucguggcgaucacggacugguccggcuacagcggguccuucguccagcaccccgagcugaccggccucgacugcauccgccccugcuucuggguggagcugauccggggccgccccaaggagagcaccaucuggaccuccgggagcuccaucagcuucugcggcgugaacggggacacggucuccuggagcuggccggacggcgccgagcugcccuucaccaucgacaaguga

SEQ ID NO: 82686 - RNA, 1350 nt, Artificial Sequence; identical to SEQ ID NO: 81047
  derived and/or modified CDS sequence (opt1) from neuraminidase__InfluenzaA__ADG21409

SEQ ID NO: 82687 - RNA, 1350 nt, Artificial Sequence; identical to SEQ ID NO: 81047
  derived and/or modified CDS sequence (opt1) from neuraminidase__InfluenzaA__ADG21415

SEQ ID NO: 82688 - RNA, 1350 nt, Artificial Sequence; identical to SEQ ID NO: 81047
  derived and/or modified CDS sequence (opt1) from neuraminidase__InfluenzaA__ADG21417

SEQ ID NO: 82689 - RNA, 1350 nt, Artificial Sequence
  derived and/or modified CDS sequence (opt1) from neuraminidase__InfluenzaA__ADG21419
augaaccccaaccagaagaucaucaccaucggcagcaucugcauggugaucgggaucgucucccugaugcuccagaucggcaacaugaucagcaucugggugucccacagcauccagaccgggaaccagugccaggacgaguccaucagcaacacgaaguuccugaccgagaaggccguggccuccgucacccuggcgggcaacagcucccucugcccgaucagcgggugggccguguacuccaaggacaacagcauccgcaucggcucccggggcgacguguucgucauccgcgagcccuucaucagcugcucccaccuggagugccggaccuucuuccugacgcagggggcccuccugaacgacaagcacagcaacggcaccgugaaggaccgcagcccccaccggacccugauguccugccccgugggggaggccccgucccccuacaacagccgcuucgagagcgucgccugguccgcgagcgccugccacgacggcaccuccuggcucacgaucgggaucagcggccccgacaacggcgccguggccgugcugaaguacaacgggaucaucaccgacaccaucaaguccuggcggaacaacaucaugcgcacccaggagagcgagugcgcgugcgucaacggcuccugcuucacggugaugaccgacgggcccagcuccggccaggccagcuacaagaucuucaagauggagaagggcaagguggucaaguccguggagcuggacgccccgaacuaccacuacgaggagugcagcugcuaccccgacgccggggagaucacgugcgugugccgggacaacuggcacggcuccaaccgccccugggucagcuucaaccagaaccucgaguaccagaucggguacaucugcuccggcguguucggggacaacccccggccgaacgacggcaccggcagcugcgggcccguguuccccaacggcgccuacggggucaagggcuucuccuucaaguacgggaacggcguguggaucggccgcaccaagagcaccaacucccggagcggguucgagaugaucugggaccccaacggcuggaccgggaccgacagcuccuucagcgugaagcaggacaucgucgcgaucacggacugguccggcuacagcggguccuucgugcagcacccggagcugaccggccuggacugcauccgccccugcuucugggucgagcucauccggggccgccccaaggagagcaccaucuggaccuccgggagcuccaucagcuucugcggcgugaacggggacacgguguccuggagcuggcccgacggcgccgagcugccguucaccaucgacaaguga

SEQ ID NO: 82690 - RNA, 1350 nt, Artificial Sequence
  derived and/or modified CDS sequence (opt1) from neuraminidase__InfluenzaA__ADG21423
augaaccccaaccagaagaucaucaccaucggcagcaucugcauggugaucgggaucgucucccugaugcuccagaucggcaacaugaucagcaucugggugucccacagcauccagaccgggaaccagugccaggacgagccgaucuccaacacgaaguuccugaccgagaaggccguggccagcgucacccuggcgggcaacuccagccucugccccaucuccgggugggccguguacagcaaggacaacuccauccgcaucggcagccggggcgacguguucgucauccgcgagcccuucaucuccugcagccaccuggagugccggaccuucuuccugacgcagggggcccuccugaacgacaagcacuccaacggcaccgugaaggaccgcagcccccaccggacccugauguccugcccggugggggaggcccccagccccuacaacucccgcuucgagagcgucgccuggagcgcguccgccugccacgacggcaccagcuggcucacgaucgggaucuccggccccgacaacggcgccguggccgugcugaaguacaacgggaucaucaccgacaccaucaagagcuggcggaacaacaucaugcgcacccaggaguccgagugcgcgugcgucaacggcagcugcuucacggugaugaccgacgggccguccagcggccaggccuccuacaagaucuucaagauggagaagggcaagguggucaagagcguggagcuggacgcccccaacuaccacuacgaggagugcuccugcuaccccgacgccggggagaucacgugcgugugccgggacagcuggcacggcuccaaccgccccugggucagcuucaaccagaaccucgaguaccagaucggguacaucugcuccggcguguucggggacaacccgcggcccaacgacggcaccggcagcugcgggcccguguuccccaacggcgccuacggggucaagggcuucuccuucaaguacgggaacggcguguggaucggccgcaccaagagcaccaacucccggagcggguucgagaugaucugggacccgaacggcuggaccgggaccgacagcuccuucagcgugaagcaggacaucgucgcgaucacggacugguccggcuacagcggguccuucgugcagcaccccgagcugaccggccuggacugcauccgccccugcuucugggucgagcucauccggggccgccccaaggagagcaccaucuggaccuccgggagcuccaucagcuucugcggcgugaacggggacacgguguccuggagcuggccggacggcgccgagcugcccuucaccaucgacaaguga

SEQ ID NO: 82691 - RNA, 1350 nt, Artificial Sequence
  derived and/or modified CDS sequence (opt1) from neuraminidase__InfluenzaA__ADG21424
augaaccccaaccagaagaucaucaccaucggcagcaucugcauggugaucgggaucgccucccugaugcuccagaucggcaacaugaucagcaucugggucucccacagcauccagaccgggaaccagugccaggacgaguccaucagcaacacgaaguuccugaccgagaaggccguggcguccgugacccuggccggcaacagcucccucugcccgaucagcgggugggccgucuacuccaaggacaacagcauccgcaucggcuccaagggcgacguguucgugauccgggagcccuucaucagcugcucccaccuggagugccgcaccuucuuccugacgcagggggcccuccugaacgacaagcacagcaacggcaccgucaaggaccggagcccccaccgcacccugauguccugccccgugggggaggccccgucccccuacaacagccgguucgagagcguggcgugguccgccagcgccugccacgacggcaccuccuggcucacgaucgggaucagcggccccgacaacggcgccgucgcggugcugaaguacaacgggaucaucaccgacaccaucaaguccuggcgcaacaacaucaugcggacccaggagagcgagugcgccugcgugaacggcuccugcuucacggucaugaccgacgggcccagcuccggccaggccagcuacaagaucuucaagauggagaagggcaagguggugaaguccgucgagcuggacgccccgaacuaccacuacgaggagugcagcugcuaccccgacgccggggagaucacgugcgugugccgcgacaacuggcacggcuccaaccggcccugggugagcuucaaccagaaccucgaguaccagaucggguacaucugcuccggcgucuucggggacaacccccgcccgaacgacggcaccggcagcugcgggcccguguuccccaacggcgcguacggggugaagggcuucuccuucaaguacgggaacggcgucuggaucggccggaccaagagcaccaacucccgcagcggguucgagaugaucugggaccccaacggcuggaccgggaccgacagcuccuucagcgugaagcaggacaucguggccaucacggacugguccggcuacagcggguccuucguccagcacccggagcugaccggccuggacugcauccggcccugcuucuggguggagcucauccgcggccggcccaaggagagcaccaucuggaccuccgggagcuccaucagcuucugcggcgucaacggggacacgguguccuggagcuggcccgacggcgccgagcugccguucaccaucgacaaguga

SEQ ID NO: 82692 - RNA, 1350 nt, Artificial Sequence
  derived and/or modified CDS sequence (opt1) from neuraminidase__InfluenzaA__ADG21426
augaaccccaaccagaagaucaucaccaucggcagcaucugcauggugaucgggaucgucucccugaugcuccagaucggcaacaugaucagcaucugggugucccacagcauccagaccgagaaccagugccaggacgagccgaucuccaacacgaaguuccugaccgagaaggccguggccagcgucacccuggcggggaacuccagccucugccccaucuccggcugggccguguacagcaaggacaacuccauccgcaucgggagccggggcgacguguucgucauccgcgagcccuucaucuccugcagccaccuggagugccggaccuucuuccugacgcagggcgcccuccugaacgacaagcacuccaacgggaccgugaaggaccgcagcccccaccggacccugauguccugcccggugggcgaggcccccagccccuacaacucccgcuucgagagcgucgccuggagcgcguccgccugccacgacgggaccagcuggcucacgaucggcaucuccgggcccgacaacggcgccguggccgugcugaaguacaacggcaucaucaccgacaccaucaagagcuggcggaacaacaucaugcgcacccaggaguccgagugcgcgugcgucaacgggagcugcuucacggugaugaccgacggcccguccagcgggcaggccuccuacaagaucuucaagauggagaagggcaagguggucaagagcguggagcuggacgcccccaacuaccacuacgaggagugcuccugcuaccccgacgccggcgagaucacgugcgugugccgggacaacuggcacgggagcaaccgccccugggucuccuucaaccagaaccucgaguaccagaucggcuacaucugcagcgggguguucggcgacaacccgcggcccaacgacgggaccggcuccugcggccccguguuccccaacggggccuacggcgucaagggguucagcuucaaguacggcaacgggguguggaucggccgcaccaaguccaccaacagccgguccggcuucgagaugaucugggacccgaacggguggaccggcaccgacagcagcuucuccgugcgccaggacaucgucgcgaucacggacuggagcggguacuccggcagcuucgugcagcaccccgagcugaccgggcuggacugcauccggcccugcuucugggucgagcucauccgcggccggcccaaggaguccaccaucuggaccagcggcuccagcaucuccuucugcggggugaacggcgacacggugagcugguccuggccggacggggccgagcugcccuucaccaucgacaaguga

SEQ ID NO: 82693 - RNA, 1350 nt, Artificial Sequence
  derived and/or modified CDS sequence (opt1) from neuraminidase__InfluenzaA__ADG21428
augaaccccaaccagaagaucaucaccaucggcagcaucugcauggugaucgggaucgucucccugaugcuccagaucggcaacaugaucagcaucugggugucccacccgauccagaccgggaaccagugccaggacaagcccaucagcaacacgaaguuccugaccgagaaggccguggccuccgucacccuggcgggcaacagcucccucugccccaucagcgggugggccguguacuccaaggacaacagcauccgcaucggcucccggggcgacguguucgucauccgcgagcccuucaucagcugcucccaccuggagugccggaccuucuuccugacgcagggggcccuccugaacgacaagcacagcaacggcaccgugaaggaccgcuccccgcaccggacccugaugagcugccccgugggggaggcccccucccccuacaacagccgcuucgaguccgucgccuggagcgcgagcgccugccacgacggcaccuccuggcucacgaucgggaucagcggcccggacaacggcgccguggccgugcugaaguacaacgggaucaucaccgacaccaucaaguccuggcggaacagcaucaugcgcacccaggaguccgagugcgcgugcgucaacggcagcugcuucacggugaugaccgacgggcccuccagcggccaggccuccuacaagaucuucaagauggagaagggcaagguggucaagagcguggagcuggacgcccccaacuaccacuacgaggagugcuccugcuaccccgacgccggggagaucacgugcgugugccgggacaacuggcacggcagcaaccgcccgugggucuccuucaaccagaaccucgaguaccagaucggguacaucugcagcggcguguucggggacaacccccggcccaacgacggcaccggcuccugcgggcccguguucccgaacggcgccuacggggucaagggcuucagcuucaaguacgggaacggcguguggaucggccgcaccaaguccaccaacagccgguccggguucgagaugaucugggaccccaacggcuggaccgggaccgacagcagcuucuccgugaagcaggacaucgucgcgaucacggacuggagcggcuacuccgggagcuucgugcagcaccccgagcugaccggccuggacugcauccgccccugcuucugggucgagcucauccggggccgcccgaaggaguccaccaucuggaccagcggguccagcaucuccuucugcggcgugaacggggacacggugagcugguccuggcccgacggcgccgagcugcccuucaccaucgacaaguga

SEQ ID NO: 82694 - RNA, 1350 nt, Artificial Sequence; identical to SEQ ID NO: 81047
  derived and/or modified CDS sequence (opt1) from neuraminidase__InfluenzaA__ADG21430

SEQ ID NO: 82695 - RNA, 1350 nt, Artificial Sequence
  derived and/or modified CDS sequence (opt1) from neuraminidase__InfluenzaA__ADG21432
augaaccccaaccagaagaucaucaccaucggcagcaucugcauggugaucgggaucgucucccugaugcuccagaucggcaacaugaucagcaucugggugucccacagcauccagaccgggaaccagugccaggacgagccgaucuccaacacgaaguuccugaccgagaaggccguggccagcgucacccuggcgggcaacuccagccucugccccaucuccgggugggccguguacagcaaggacaacuccauccgcaucggcagccggggcgacguguucgucauccgcgagcccuucaucuccugcagccaccuggagugccggaccuucuuccugacgcagggggcccuccugaacgacaagcacuccaacggcaccgugaaggaccgcagcccccaccggacccugauguccugcccggugggggaggcccccagccccuacaacucccgcuucgagagcgucgccuggagcgcguccgccugccacgacggcaccagcuggcucacgaucgggaucuccggccccgacaacggcgccguggccgugcugaaguacaacgggaucaucaccgacaccaucaagagcuggcggaacaacaucaugcgcacccaggaguccgagugcgcgugcgucaacggcagcugcuucacggugaugaccgacgggccguccagcggccaggccuccuacaagaucuucaagauggagaagggcaagguggucaagagcguggagcuggacgcccccaacuaccacuacgaggagugcuccugcuaccccgacgccggggagaucacgugcgugugccgggacaacuggcacggcagcaaccgccccugggucuccuucaaccagaaccucgaguaccagaucggguacaucugcagcggcguguucggggacaacccgcggcccaacgacggcaccggcuccugcgggcccguguuccccaacggcgccuacggggucaagggcuucagcuuccgcuacgggaacggcguguggaucggccggaccaaguccaccaacagccgcuccggguucgagaugaucugggacccgaacggcuggaccgggaccgacagcagcuucuccgugaagcaggacaucgucgcgaucacggacuggagcggcuacuccgggagcuucgugcagcaccccgagcugaccggccuggacugcauccggcccugcuucugggucgagcucauccgcggccggcccaaggaguccaccaucuggaccagcggguccagcaucuccuucugcggcgugaacggggacacggugagcugguccuggccggacggcgccgagcugcccuucaccaucgacaaguga

SEQ ID NO: 82696 - RNA, 1350 nt, Artificial Sequence
  derived and/or modified CDS sequence (opt1) from neuraminidase__InfluenzaA__ADG21438
augaaccccaaccagaagaucaucaccaucggcagcaucugcauggugaucgggaucgucucccugaugcuccagaucggcaacaugaucagcaucuggaucucccacagcauccagaccgggaaccagugccaggacgagccgaucuccaacacgaaguuccugaccgagaaggccguggccagcgugacccuggcgggcaacuccagccucugccccaucuccgggugggccgucuacagcaaggacaacuccauccgcaucggcagccggggcgacguguucgugauccgcgagcccuucaucuccugcagccaccuggagugccggaccuucuuccugacgcagggggcccuccugaacgacaagcacuccaacggcaccgucaaggaccgcagcccccaccggacccugauguccugcccggugggggaggcccccagccccuacaacucccgcuucgagagcguggccuggagcgcguccgccugccacgacggcaccagcuggcucacgaucgggaucuccggccccgacaacggcgccgucgccgugcugaaguacaacgggaucaucaccgacaccaucaagagcuggcggaacaacaucaugcgcacccaggaguccgagugcgcgugcgugaacggcagcugcuucacggucaugaccgacgggccguccagcggccaggccuccuacaagaucuucaagauggagaagggcaagguggucaagagcguggagcuggacgcccccaacuaccacuacgaggagugcuccugcuaccccgacgccggggagaucacgugcgugugccgggacaacuggcacggcagcaaccgccccuggguguccuucaaccagaaccucgaguaccagaucggguacaucugcagcggcgucuucggggacaacccgcggcccaacgacggcaccggcuccugcgggcccguguuccccaacggcgccuacggggugaagggcuucagcuucaaguacggguccggcgucuggaucggccgcaccaagagcaccaacucccggagcggguucgagaugaucugggacccgaacggcuggaccgggaccgacagcuccuucagcgugaagcaggacaucguggcgaucacggacugguccggcuacagcggguccuucguccagcaccccgagcugaccggccuggacugcauccgccccugcuucuggguggagcucauccggggccgccccaaggagagcaccaucuggaccuccgggagcuccaucagcuucugcggcgucaacggggacacgguguccuggagcuggccggacggcgccgagcugcccuucaccaucgacaaguga

SEQ ID NO: 82697 - RNA, 1350 nt, Artificial Sequence
  derived and/or modified CDS sequence (opt1) from neuraminidase__InfluenzaA__ADG21440
augaaccccaaccagaagaucaucaccaucggcagcaucugcauggugaucgggaucgccucccugaugcuccagaucggcaacaugaucagcaucugggucucccacagcauccagaccgggaaccagugccaggacgaguccaucagcaacacgaaguuccugaccgagaaggccguggcguccgugacccuggccggcaacagcucccucugcccgaucagcgggugggccgucuacuccaaggacaacagcauccgcaucggcucccggggcgacguguucgugauccgcgagcccuucaucagcugcucccaccuggagugccggaccuucuuccugacgcagggggcccuccugaacgacaagcacagcaacggcaccgucaaggaccgcagcccccaccggacccugauguccugccccgugggggaggccccgucccccuacaacagccgcuucgagagcguggcgugguccgccagcgccugccacgacggcaccuccuggcucacgaucgggaucagcggccccgacaacggcgccgucgcggugcugaaguacaacgggaucaucaccgacaccaucaaguccuggcggaacaacaucaugcgcacccaggagagcgagugcgccugcgugaacggcuccugcuucacggucaugaccgacgggcccagcuccggccaggccagcuacaagaucuucaagauggagaagggcaagguggugaaguccgucgagcuggacgccccgaacuaccacuacgaggagugcagcugcuaccccgacgccggggagaucacgugcgugugccgggacaacuggcacggcuccaaccgccccugggugagcuucaaccagaaccucgaguaccagaucggguacaucugcuccggcgucuucggggacaacccccggccgaacgacggcaccggcagcugcgggcccguguuccccaacggcgcguacggggugaagggcuucuccuucaaguacgggaacggcgucuggaucggccgcaccaagagcaccaacucccggagcggguucgagaugaucugggaccccaacggcuggaccgggaccgacagcuccuucagcgugaagcaggacaucguggccaucacggacugguccggcuacagcggguccuucguccagcacccggagcugaccggccuggacugcauccgccccugcuucuggguggagcucauccggggccgccccaaggagagcaccaucuggaccuccgggagcuccaucagcuucugcggcgucaacggggacacgguguccuggagcuggcccgacggcgccgagcugccguucaccaucgacaaguga

SEQ ID NO: 82698 - RNA, 1350 nt, Artificial Sequence; identical to SEQ ID NO: 81047
  derived and/or modified CDS sequence (opt1) from neuraminidase__InfluenzaA__ADG21442

SEQ ID NO: 82699 - RNA, 1350 nt, Artificial Sequence
  derived and/or modified CDS sequence (opt1) from neuraminidase__InfluenzaA__ADG21444
augaaccccaaccagaagaucaucaccaucggcagcaucugcauggugaucgggaucgucucccugaugcuccagaucggcaacaugaucagcaucugggugucccacagcauccagaccgggaaccagugccaggacgaguccaucagcaacacgaaguuccugaccgagaaggccgugaccuccgucacccuggccggcaacagcucccucugcccgaucagcgggugggcgguguacuccaaggacaacagcauccgcaucggcucccggggcgacguguucgucauccgcgagcccuucaucagcugcucccaccuggagugccggacguucuuccugacccagggggcccuccugaacgacaagcacagcaacggcaccgugaaggaccgcagcccccaccggacccugauguccugccccgugggggaggccccgucccccuacaacagccgcuucgagagcgucgccugguccgccagcgcgugccacgacggcacguccuggcucaccaucgggaucagcggccccgacaacggcgccguggccgugcugaaguacaacgggaucaucaccgacaccaucaaguccuggcggaacaacaucaugcgcacgcaggagagcgagugcgccugcgucaacggcuccugcuucaccgugaugaccgacgggcccagcuccggccaggcgagcuacaagaucuucaagauggagaagggcaagguggucaaguccguggagcuggacgccccgaacuaccacuacgaggagugcagcugcuaccccgacgccggggagaucacgugcgugugccgggacaacuggcacggcuccaaccgccccuggaucagcuucaaccagaaccucgaguaccagaucggguacaucugcuccggcgucuucggggacaacccccggccgaacgacggcaccggcagcugcgggcccguguuccccaacggcgccuacggggugaagggcuucuccuucaaguacgggaacggcgucuggaucggccgcaccaagagcaccaacucccggagcggguucgagaugaucugggaccccaacggcuggaccgggacggacagcuccuucagcgugaagcaggacaucguggccaucaccgacugguccggcuacagcggguccuucguccagcacccggagcugaccggccuggacugcauccgccccugcuucuggguggagcucauccggggccgccccaaggagagcaccaucuggacguccgggagcuccaucagcuucugcggcgucaacggggacaccguguccuggagcuggcccgacggcgcggagcugccguucaccaucgacaaguga

SEQ ID NO: 82700 - RNA, 1350 nt, Artificial Sequence; identical to SEQ ID NO: 81047
  derived and/or modified CDS sequence (opt1) from neuraminidase__InfluenzaA__ADG21446

SEQ ID NO: 82701 - RNA, 1350 nt, Artificial Sequence
  derived and/or modified CDS sequence (opt1) from neuraminidase__InfluenzaA__ADG21448
augaaccccaaccagaagaucaucaccaucggcagcaucugcauggugaucgggaucgucucccugaugcuccagaucggcaacaugaucagcaucugggugucccacagcauccagaccgggaaccagugccaggacgagccgaucuccaacacgaaguuccugaccgagaaggccguggccagcgucacccuggcgggcaacuccagccucugccccaucuccgggugggccguguacagcaaggacaacuccauccgcaucggcagccggggcgacguguucgucauccgcgagcccuucaucuccugcagccaccuggagugccggaccuucuuccugacgcagggggcccuccugaacgacaagcacuccaacggcaccgugaaggaccgcagcccccaccggacccugauguccugcccggugggggaggcccccagccccuacaacucccgcuucgagagcgucgccuggagcgcguccgccugccacgacggcaccagcuggcucacgaucgggaucuccggccccgacaacggcgccguggccgugcugaaguacaacgggaucaucaccgacaccaucaagagcuggcggaacaacaucaugcgcacccaggaguccgagugcgcgugcgucaacggcagcugcuucacggugaugaccgacgggccguccagcggccaggccuccuacaagaucuucaagauggagaagggcaagguggucaagagcguggagcuggacgcccccaacuaccacuacgaggagugcuccugcuaccccgacgccggggagaucacgugcgugugccgggacaacuggcacggcagcaaccgccccuggaucuccuucaaccagaaccucgaguaccagaucggguacaucugcagcggcgucuucggggacaacccgcggcccaacgacggcaccggcuccugcgggcccguguuccccaacggcgccuacggggugaagggcuucagcuucaaguacgggaacggcgucuggaucggccgcaccaaguccaccaacagccgguccggguucgagaugaucugggacccgaacggcuggaccgggaccgacagcagcuucuccgugaagcaggacaucguggcgaucacggacuggagcggcuacuccgggagcuucguccagcaccccgagcugaccggccuggacugcauccgccccugcuucuggguggagcucauccggggccgccccaaggaguccaccaucuggaccagcggguccagcaucuccuucugcggcgucaacggggacacggugagcugguccuggccggacggcgccgagcugcccuucaccaucgacaaguga

SEQ ID NO: 82702 - RNA, 1350 nt, Artificial Sequence; identical to SEQ ID NO: 82701
  derived and/or modified CDS sequence (opt1) from neuraminidase__InfluenzaA__ADG21450

SEQ ID NO: 82703 - RNA, 1410 nt, Artificial Sequence; identical to SEQ ID NO: 80762
  derived and/or modified CDS sequence (opt1) from neuraminidase__InfluenzaA__ADG27797

SEQ ID NO: 82704 - RNA, 1410 nt, Artificial Sequence
  derived and/or modified CDS sequence (opt1) from neuraminidase__InfluenzaA__ADG27983
augaaccccaaccagaagaucaucaccaucggcagcgugugcaugaccaucgggauggccaaccugauccuccagaucggcaacaucaucuccaucuggaucagccacuccauccagcuggggaaccagaaccagaucgagacgugcaaccagagcgucaucaccuacgagaacaacaccugggugaaccagaccuacgugaacaucuccaacacgaacuucgccgcgggccagagcgucguguccgugaagcuggccgggaacagcucccucugcccggucagcggcugggccaucuacuccaaggacaacagcauccgcaucggcuccaagggggacguguucgugauccgggagcccuucaucagcugcagcccccuggagugccgcaccuucuuccugacccagggcgcccuccugaacgacaagcacuccaacgggaccaucaaggaccggucccccuaccgcacgcugaugagcugcccgaucggcgagguccccucccccuacaacagccgguucgagagcguggccugguccgcgagcgccugccacgacgggaucaacuggcucaccaucggcaucuccggccccgacaacggggccguggccguccugaaguacaacggcaucaucaccgacaccaucaagagcuggcgcaacaacauccugcggacgcaggaguccgagugcgcgugcgugaacgggagcugcuucaccgugaugaccgacggcccguccgacggccaggccagcuacaagaucuuccgcaucgagaaggggaagaucgucaaguccguggagaugaacgcccccaaccaccacuacgaggagugcagcugcuaccccgacuccagcgagaucacgugcgugugccgggacaacuggcacggcuccaaccgccccugggucagcuucaaccagaaccucgaguaccagaucggguacaucugcuccggcaucuucggggacaacccgcggcccaacgacaagaccggcagcugcggccccguguccagcaacggggccaacggcgugaagggguucuccuucaaguacggcaacggggucuggaucggccgcaccaagagcaucagcucccggaacggcuucgagaugaucugggaccccaacggguggaccggcaccgacaacaacuucagcaucaagcaggacaucguggggaucaacgagugguccggcuacagcggguccuucgugcagcacccggagcugacgggccuggacugcauccgccccugcuucugggucgagcucauccggggccgccccaaggagaacaccaucuggaccagcggguccagcaucuccuucugcggcgugaacagcgacaccauggggugguccuggcccgacggcgccgagcugccguucacgaucgacaaguga

SEQ ID NO: 82705 - RNA, 1410 nt, Artificial Sequence; identical to SEQ ID NO: 80762
  derived and/or modified CDS sequence (opt1) from neuraminidase__InfluenzaA__ADG27989

SEQ ID NO: 82706 - RNA, 1410 nt, Artificial Sequence; identical to SEQ ID NO: 82704
  derived and/or modified CDS sequence (opt1) from neuraminidase__InfluenzaA__ADG27998

SEQ ID NO: 82707 - RNA, 1410 nt, Artificial Sequence; identical to SEQ ID NO: 81116
  derived and/or modified CDS sequence (opt1) from neuraminidase__InfluenzaA__ADG28013

SEQ ID NO: 82708 - RNA, 1410 nt, Artificial Sequence; identical to SEQ ID NO: 80762
  derived and/or modified CDS sequence (opt1) from neuraminidase__InfluenzaA__ADG42086

SEQ ID NO: 82709 - RNA, 1410 nt, Artificial Sequence; identical to SEQ ID NO: 80762
  derived and/or modified CDS sequence (opt1) from neuraminidase__InfluenzaA__ADG42096

SEQ ID NO: 82710 - RNA, 1410 nt, Artificial Sequence; identical to SEQ ID NO: 82339
  derived and/or modified CDS sequence (opt1) from neuraminidase__InfluenzaA__ADG42106

SEQ ID NO: 82711 - RNA, 1410 nt, Artificial Sequence; identical to SEQ ID NO: 80762
  derived and/or modified CDS sequence (opt1) from neuraminidase__InfluenzaA__ADG42116

SEQ ID NO: 82712 - RNA, 1410 nt, Artificial Sequence; identical to SEQ ID NO: 80762
  derived and/or modified CDS sequence (opt1) from neuraminidase__InfluenzaA__ADG42126

SEQ ID NO: 82713 - RNA, 1410 nt, Artificial Sequence; identical to SEQ ID NO: 80762
  derived and/or modified CDS sequence (opt1) from neuraminidase__InfluenzaA__ADG42136

SEQ ID NO: 82714 - RNA, 1410 nt, Artificial Sequence; identical to SEQ ID NO: 81345
  derived and/or modified CDS sequence (opt1) from neuraminidase__InfluenzaA__ADG42146

SEQ ID NO: 82715 - RNA, 1410 nt, Artificial Sequence; identical to SEQ ID NO: 80762
  derived and/or modified CDS sequence (opt1) from neuraminidase__InfluenzaA__ADG42156

SEQ ID NO: 82716 - RNA, 1410 nt, Artificial Sequence; identical to SEQ ID NO: 80762
  derived and/or modified CDS sequence (opt1) from neuraminidase__InfluenzaA__ADG42166

SEQ ID NO: 82717 - RNA, 1410 nt, Artificial Sequence; identical to SEQ ID NO: 80762
  derived and/or modified CDS sequence (opt1) from neuraminidase__InfluenzaA__ADG42186

SEQ ID NO: 82718 - RNA, 1410 nt, Artificial Sequence; identical to SEQ ID NO: 82653
  derived and/or modified CDS sequence (opt1) from neuraminidase__InfluenzaA__ADG42196

SEQ ID NO: 82719 - RNA, 1410 nt, Artificial Sequence
  derived and/or modified CDS sequence (opt1) from neuraminidase__InfluenzaA__ADG42206
augaaccccaaccagaagaucaucaccaucggcagcgugugcaugaccaucgggauggccaaccugauccuccagaucggcaacaucaucuccaucuggaucagccacuccauccagcuggggaaccagaaccagaucgagacgugcaaccagagcgucaucaccuacgagaacaacaccugggugaaccagaccuacgugaacaucuccaacacgaacuucgccgcgggccagagcgucguguccgugaagcuggccgggaacagcucccucugcccggucagcggcugggccaucuacuccaaggacaacagcauccgcaucggcuccaagggggacguguucgugauccgggagcccuucaucagcugcagcccccuggagugccgcaccuucuuccugacccagggcgcccuccugaacgacaagcacuccaacgggaccaucaaggaccggucccccuaccgcacgcugaugagcugcccgaucggcgagguccccucccccuacaacagccgguucgagagcguggccugguccgcgagcgccugccacgacgggaucaacuggcucaccaucggcaucuccggccccgacaacggggccguggccguccugaaguacaacggcaucaucaccgacaccaucaagagcuggcgcaacaacauccugcggacgcaggaguccgagugcgcgugcgugaacgggagcugcuucaccgugaugaccgacggcccguccgacggccaggccagcuacaagaucuuccgcaucgagaaggggaagaucgucaaguccguggagaugaacgcccccaacuaccacuacgaggagugcagcugcuaccccgacuccagcaagaucacgugcgugugccgggacaacuggcacggcuccaaccgccccugggucagcuucaaccagaaccucgaguaccagaucggguacaucugcuccggcaucuucggggacaacccgcggcccaacgacaagaccggcagcugcggccccguguccagcaacggggccaacggcgugaagggguucuccuucaaguacggcaacggggucuggaucggccgcaccaagagcaucagcucccggaacggcuucgagaugaucugggaccccaacggguggaccggcaccgacaacaacuucagcaucaagcaggacaucguggggaucaacgagugguccggcuacagcggguccuucgugcagcacccggagcugacgggccuggacugcauccgccccugcuucugggucgagcucauccggggccgccccaaggagaacaccaucuggaccagcggguccagcaucuccuucugcggcgugaacagcgacaccgucgggugguccuggcccgacggcgccgagcugccguucacgaucgacaaguga

SEQ ID NO: 82720 - RNA, 1410 nt, Artificial Sequence; identical to SEQ ID NO: 80762
  derived and/or modified CDS sequence (opt1) from neuraminidase__InfluenzaA__ADG42216

SEQ ID NO: 82721 - RNA, 1410 nt, Artificial Sequence; identical to SEQ ID NO: 82113
  derived and/or modified CDS sequence (opt1) from neuraminidase__InfluenzaA__ADG42226

SEQ ID NO: 82722 - RNA, 1410 nt, Artificial Sequence; identical to SEQ ID NO: 80762
  derived and/or modified CDS sequence (opt1) from neuraminidase__InfluenzaA__ADG42236

SEQ ID NO: 82723 - RNA, 1410 nt, Artificial Sequence; identical to SEQ ID NO: 80762
  derived and/or modified CDS sequence (opt1) from neuraminidase__InfluenzaA__ADG42246

SEQ ID NO: 82724 - RNA, 1410 nt, Artificial Sequence; identical to SEQ ID NO: 80762
  derived and/or modified CDS sequence (opt1) from neuraminidase__InfluenzaA__ADG42256

SEQ ID NO: 82725 - RNA, 1410 nt, Artificial Sequence; identical to SEQ ID NO: 80762
  derived and/or modified CDS sequence (opt1) from neuraminidase__InfluenzaA__ADG42276

SEQ ID NO: 82726 - RNA, 1410 nt, Artificial Sequence
  derived and/or modified CDS sequence (opt1) from neuraminidase__InfluenzaA__ADG42296
augaaccccaaccagaagaucaucaccaucggcagcgugugcaugaccaucgggauggccaaccugauccuccagaucggcaacaucaucuccaucuggaucagccacuccauccagcuggggaaccagaaccagaucgagacgugcaaccagagcgucaucaccuacgagaacaacaccugggugaaccagaccuacgugaacaucuccaacacgaacuucgccgcgggccagagcgucguguccgugaagcuggccgggaacagcucccucugcccggucagcggcugggccaucuacuccaaggacaacagcauccgcaucggcuccaagggggacguguucgugauccgggagcccuucaucagcugcagcccccuggagugccgcaccuucuuccugacccagggcgcccuccugaacgacaagcacuccaacgggaccaucaaggaccggucccccuaccgcacgcugaugagcugcccgaucggcgagguccccucccccuacaacagccgguucgagagcguggccugguccgcgagcgccugccacgacgggaucaacuggcucaccaucggcaucuccggccccgacaacggggccguggccguccugaaguacaacggcaucaucaccgacaccaucaagagcuggcgcaacaacauccugcgggcgcaggaguccgagugcgccugcgugaacgggagcugcuucacggugaugaccgacggcccguccgacggccaggccagcuacaagaucuuccgcaucgagaaggggaagaucgucaaguccguggagaugaacgcccccaacuaccacuacgaggagugcagcugcuaccccgacuccagcgagaucacgugcgugugccgggacaacuggcacggcuccaaccgccccugggucagcuucaaccagaaccucgaguaccagaucggguacaucugcuccggcaucuucggggacaacccgcggcccaacgacaagaccggcagcugcggccccguguccagcaacggggccaacggcgugaagggguucuccuucaaguacggcaacggggucuggaucggccgcaccaagagcaucagcucccggaacggcuucgagaugaucugggaccccaacggguggaccggcaccgacaacaacuucagcaucaagcaggacaucguggggaucaacgagugguccggcuacagcggguccuucgugcagcacccggagcugaccggccuggacugcauccgccccugcuucugggucgagcucauccggggccgccccaaggagaacacgaucuggaccagcggguccagcaucuccuucugcggcgugaacagcgacaccgucgggugguccuggcccgacggcgcggagcugccguucaccaucgacaaguga

SEQ ID NO: 82727 - RNA, 1410 nt, Artificial Sequence; identical to SEQ ID NO: 80762
  derived and/or modified CDS sequence (opt1) from neuraminidase__InfluenzaA__ADG42306

SEQ ID NO: 82728 - RNA, 1410 nt, Artificial Sequence; identical to SEQ ID NO: 80762
  derived and/or modified CDS sequence (opt1) from neuraminidase__InfluenzaA__ADG42316

SEQ ID NO: 82729 - RNA, 1410 nt, Artificial Sequence; identical to SEQ ID NO: 80762
  derived and/or modified CDS sequence (opt1) from neuraminidase__InfluenzaA__ADG42326

SEQ ID NO: 82730 - RNA, 1410 nt, Artificial Sequence
  derived and/or modified CDS sequence (opt1) from neuraminidase__InfluenzaA__ADG42336
augaaccccaaccagaagaucaucaccaucggcagcgugugcaugaccaucgggauggccaaccugauccuccagaucggcaacaucaucuccaucuggaucagccacuccauccagcuggggaaccagaaccagaucgagacgugcaaccagagcgucaucaccuacgagaacaacaccugggugaaccagaccuacgugaacaucuccaacacgaacuucgccgcgggccagagcgucguguccaugaagcuggccgggaacagcucccucugcccggugagcggcugggccaucuacuccaaggacaacagcauccgcaucggcuccaagggggacgucuucgugauccgggagcccuucaucagcugcagcccccuggagugccgcaccuucuuccugacccagggcgcccuccugaacgacaagcacuccaacgggaccaucaaggaccggucccccuaccgcacgcugaugagcugcccgaucggcgaggugcccucccccuacaacagccgguucgagagcgucgccugguccgcgagcgccugccacgacgggaucaacuggcucaccaucggcaucuccggccccgacaacggggccguggccgugcugaaguacaacggcaucaucaccgacaccaucaagagcuggcgcaacaacauccugcggacgcaggaguccgagugcgcgugcgucaacgggagcugcuucaccgugaugaccgacggcccguccgacggccaggccagcuacaagaucuuccgcaucgagaaggggaagaucgugaaguccgucgagaugaacgcccccaacuaccacuacgaggagugcagcugcuaccccgacuccagcgagaucacgugcgugugccgggacaacuggcacggcuccaaccgccccugggugagcuucaaccagaaccucgaguaccagaucggguacaucugcuccggcaucuucggggacaacccgcggcccaacgacaagaccggcagcugcggccccgucuccagcaacggggccaacggcgugaagggguucuccuucaaguacggcaacgggguguggaucggccgcaccaagagcaucagcucccggaacggcuucgagaugaucugggaccccaacggguggaccggcaccgacaacaaguucagcaucaagcaggacaucgucgggaucaacgagugguccggcuacagcggguccuucgugcagcacccggagcugacgggccuggacugcauccgccccugcuucuggguggagcucauccggggccgccccaaggagaacaccaucuggaccagcggguccagcaucuccuucugcggcgucaacagcgacaccguggggugguccuggcccgacggcgccgagcugccguucacgaucgacaaguga

SEQ ID NO: 82731 - RNA, 1410 nt, Artificial Sequence; identical to SEQ ID NO: 82224
  derived and/or modified CDS sequence (opt1) from neuraminidase__InfluenzaA__ADG42346

SEQ ID NO: 82732 - RNA, 1410 nt, Artificial Sequence; identical to SEQ ID NO: 81939
  derived and/or modified CDS sequence (opt1) from neuraminidase__InfluenzaA__ADG42356

SEQ ID NO: 82733 - RNA, 1410 nt, Artificial Sequence
  derived and/or modified CDS sequence (opt1) from neuraminidase__InfluenzaA__ADG42366
augaaccccaaccagaagaucaucaccaucggcagcgugugcaugaccaucgggauggccaaccugauccuccagaucggcaacaucaucuccaucuggaucagccacuccauccagcuggggaaccagaaccagaucgagacgugcaaccagagcgucaucaccuacgagaacaacaccugggugaaccagaccuacgugaacaucuccaacacgaacuucgccgcgggccagagcgucguguccgugaagcuggccgggaacagcucccucugcccggucagcggcugggccaucuacuccaaggacaacagcauccgcaucggcuccaagggggacguguucgugauccgggagcccuucaucagcugcagcccccuggagugccgcaccuucuuccugacccagggcgcccuccugaacgacaagcacuccaacgggaccaucaaggaccggucccccuaccgcacgcugaugagcugcccgaucggcgagguccccucccccuacaacagccgguucgagagcguggccugguccgcgagcgccugccacgacgggaucaacuggcucaccaucggcaucuccggccccgacaacggggccguggccguccugaaguacaacggcaucaucaccgacaccaucaagagcuggcgcaacaacauccugcggacgcaggaguccgagugcgcgugcgugaacgggagcugcuucaccgugaugaccgacggcccguccgacggccaggccagcuacaagaucuuccgcaucgagaaggggaagaucgucaaguccguggagaugaacgcccccaacuaccacuacgaggagugcagcugcuaccccgacuccagcgagaucacgugcgugugccgggacaacuggcacggcuccaaccgccccuggaucagcuucaaccagaaccucgaguaccagaucggguacaucugcuccggcaucuucggggacaacccgcggcccaacgacaagaccggcagcugcggccccgucuccagcaacggggccaacggcgugaagggguucuccuucaaguacggcaacgggguguggaucggccgcaccaagagcaucagcucccggaacggcuucgagaugaucugggaccccaacggguggaccggcaccgacaacaaguucagcaucaagcaggacaucgucgggaucaacgagugguccggcuacagcggguccuucgugcagcacccggagcugacgggccuggacugcauccgccccugcuucuggguggagcucauccggggccgccccaaggagaacaccaucuggaccagcggguccagcaucuccuucugcggcgucaacagcgacaccguggggugguccuggcccgacggcgccgagcugccguucacgaucgacaaguga

SEQ ID NO: 82734 - RNA, 1410 nt, Artificial Sequence; identical to SEQ ID NO: 80762
  derived and/or modified CDS sequence (opt1) from neuraminidase__InfluenzaA__ADG42376

SEQ ID NO: 82735 - RNA, 1410 nt, Artificial Sequence
  derived and/or modified CDS sequence (opt1) from neuraminidase__InfluenzaA__ADG42386
augaaccccaaccagaagaucaucaccaucggcagcgugugcaugaccaucgggauggccaaccugauccuccagaucggcaacaucaucuccaucuggaucagccacuccauccagcuggggaaccagaaccagaucgagacgugcaaccagagcgucaucaccuacgagaacaacaccugggugaaccagaccuacgugaacaucuccaacacgaacuucgccgcgggccagagcgucguguccgugaaguucgccgggaacagcucccugugcccggucagcggcugggccaucuacuccaaggacaacagcauccgcaucggcuccaagggggacguguucgugauccgggagcccuucaucagcugcagcccccucgagugccgcaccuucuuccugacccagggcgcccugcucaacgacaagcacuccaacgggaccaucaaggaccggucccccuaccgcacgcugaugagcugcccgaucggcgagguccccucccccuacaacagccgguucgagagcguggccugguccgcgagcgccugccacgacgggaucaacuggcugaccaucggcaucuccggccccgacaacggggccguggccguccucaaguacaacggcaucaucaccgacaccaucaagagcuggcgcaacaacauccugcggacgcaggaguccgagugcgcgugcgugaacgggagcugcuucaccgugaugaccgacggcccgaacgacggccaggccuccuacaagaucuuccgcaucgagaaggggaagaucgucaagagcguggagaugaacgcccccaacuaccacuacgaggagugcuccugcuaccccgacagcuccgagaucacgugcgugugccgggacaacuggcacggcagcaaccgccccugggucuccuucaaccagaaccuggaguaccagaucggguacaucugcagcggcaucuucggggacaacccgcggcccaacgacaagaccggcuccugcggccccgugagcuccaacggggccaacggcgugaagggguucagcuucaaguacggcaacggggucuggaucggccgcaccaaguccaucagcagccgguccggcuucgagaugaucugggaccccaacggguggaccggcaccgacaacaaguucagcaucaagcaggacaucguggggaucaacgagugguccggcuacagcggguccuucgugcagcacccggagcucacgggccuggacugcauccgccccugcuucugggucgagcugauccggggccgccccaaggagaacaccaucuggaccagcggguccagcaucuccuucugcggcgugaacagcgacaccgucgggugguccuggcccgacggcgccgagcucccguucacgaucgacaaguga

SEQ ID NO: 82736 - RNA, 1410 nt, Artificial Sequence; identical to SEQ ID NO: 82719
  derived and/or modified CDS sequence (opt1) from neuraminidase__InfluenzaA__ADG42396

SEQ ID NO: 82737 - RNA, 1410 nt, Artificial Sequence
  derived and/or modified CDS sequence (opt1) from neuraminidase__InfluenzaA__ADG42406
augaaccccaaccagaagaucaucaccaucggcagcgugugcaugaccaucgggauggccaaccugauccuccagaucggcaacauccuguccacguggaucagccacuccauccagcuggggaaccagaaccagaucgagaccugcaaccagagcgucaucaccuacgagaacaacaccugggugaaccagacguacgugaacaucuccaacaccaacuucgccgcgggccagagcgucguguccgugaagcucgccgggaacagcucccugugcccggucagcggcugggccaucuacuccaaggacaacagcauccgcaucggcuccaagggggacguguucgugauccgggagcccuucaucagcugcagcccccuggagugccgcaccuucuuccucacccagggcgcccugcugaacgacaagcacuccaacgggacgaucaaggaccggucccccuaccgcacccucaugagcugcccgaucggcgagguccccucccccuacaacagccgguucgagagcguggccugguccgcgagcgccugccacgacgggaucaacuggcugaccaucggcaucuccggccccgacaacggggccguggccguccugaaguacaacggcaucaucaccgacacgaucaagagcuggcgcaacaacauccuccggacccaggaguccgagugcgcgugcgugaacgggagcugcuucaccgugaugaccgacggcccguccgacggccaggccagcuacaagaucuuccgcaucgagaaggggaagaucgucaaguccguggagaugaacgcccccaacuaccacuacgaggagugcagcugcuaccccgacuccagcgagaucacgugcgugugccgggacaacuggcacggcuccaaccgccccugggucagcuucaaccagaaccuggaguaccagaucggguacaucugcuccggcaucuucggggacaacccgcggcccaacgacaagaagggcagcugcggccccguguccagcaacggggccaacggcgugaagggguucuccuucaaguacggcaacggggucuggaucggccgcaccaagagcaucagcucccggaacggcuucgagaugaucugggaccccaacggguggaccggcaccgacaacaacuucagcaucaagcaggacaucguggggaucaacgagugguccggcuacagcggguccuucgugcagcacccggagcugacgggccucgacugcauccgccccugcuucugggucgagcugauccggggccgccccaaggagaacaccaucuggaccagcggguccagcaucuccuucugcggcgugaacagcgacaccgucgggugguccuggcccgacggcgccgagcugccguucacgaucgacaaguga

SEQ ID NO: 82738 - RNA, 1410 nt, Artificial Sequence; identical to SEQ ID NO: 81939
  derived and/or modified CDS sequence (opt1) from neuraminidase__InfluenzaA__ADG42426

SEQ ID NO: 82739 - RNA, 1410 nt, Artificial Sequence; identical to SEQ ID NO: 80762
  derived and/or modified CDS sequence (opt1) from neuraminidase__InfluenzaA__ADG42436

SEQ ID NO: 82740 - RNA, 1410 nt, Artificial Sequence
  derived and/or modified CDS sequence (opt1) from neuraminidase__InfluenzaA__ADG42446
augaaccccaaccagaagaucaucaccaucggcagcgugugcaugaccaucgggauggccaaccugauccuccagaucggcaacaucaucuccaucuggaucagccacuccauccagcuggggaaccagaaccagaucgagacgugcaaccagagcgucaucaccuacgagaacaacaccugggugaaccagaccuacgugaacaucuccaacacgaacuucgccgcgggccagagcgucguguccgccaagcuggccgggaacagcucccucugcccggugagcggcugggccaucuacuccaaggacaacagcauccgcaucggcuccaagggggacgucuucgugauccgggagcccuucaucagcugcagcccccuggagugccgcaccuucuuccugacccagggcgcccuccugaacgacaagcacuccaacgggaccaucaaggaccggucccccuaccgcacgcugaugagcugcccgaucggcgaggugcccucccccuacaacagccgguucgagagcgucgcgugguccgccagcgccugccacgacgggaucaacuggcucaccaucggcaucuccggccccgacaacggggccguggcggugcugaaguacaacggcaucaucaccgacaccaucaagagcuggcgcaacaacauccugcggacgcaggaguccgagugcgccugcgucaacgggagcugcuucaccgugaugaccgacggcccguccgacggccaggccagcuacaagaucuuccgcaucgagaaggggaagaucgugaaguccgucgagaugaacgcccccaacuaccacuacgaggagugcagcugcuaccccgacuccagcgagaucacgugcgugugccgggacaacuggcacggcuccaaccgccccugggugagcuucaaccagaaccucgaguaccagaucggguacaucugcuccggcaucuucggggacaacccgcggcccaacgacaagaccggcagcugcggccccgucuccagcaacggggccaacggcgugaagggguucuccuucaaguacggcaacgggguguggaucggccgcaccaagagcaucagcucccggaacggcuucgagaugaucugggaccccaacggguggaccggcaccgacaacaacuucagcaucaagcaggacaucgucgggaucaacgagugguccggcuacagcggguccuucgugcagcacccggagcugacgggccuggacugcauccgccccugcuucuggguggagcucauccggggccgccccaaggagaacaccaucuggaccagcggguccagcaucuccuucugcggcgucaacagcgacaccguggggugguccuggcccgacggcgcggagcugccguucacgaucgacaaguga

SEQ ID NO: 82741 - RNA, 1410 nt, Artificial Sequence
  derived and/or modified CDS sequence (opt1) from neuraminidase__InfluenzaA__ADG42456
augaaccccaaccagaagaucaucaccaucggcagcgugugcaugaccaucgggauggccaaccugauccuccagaucggcaacaucaucuccaucuggaucagccacuccauccagcuggggaaccagaaccagaucgagacgugcaaccagagcgucaucaccuacgagaacaacaccugggugaaccagaccuacgugaacaucuccaacacgaacuucgccgcgggccagagcgucguguccgugaagcuggccgggaacagcucccucugcccggucagcggcugggccaucuacuccaaggacaacagcauccgcaucggcuccaagggggacguguucgugauccgggagcccuucaucagcugcagcccccuggagugccgcaccuucuuccugacccagggcgcccuccugaacgacaagcacuccaacgggaccaucaaggaccggagcccccaccgcacgcugauguccugcccgaucggcgagguccccucccccuacaacagccgguucgagagcguggccugguccgcgagcgccugccacgacgggaucaacuggcucaccaucggcaucuccggccccgacaacggggccguggccguccugaaguacaacggcaucaucaccgacaccaucaagagcuggcgcaacaacauccugcggacgcaggaguccgagugcgcgugcgugaacgggagcugcuucaccgugaugaccgacggcccguccgacggccaggccagcuacaagaucuuccgcaucgagaaggggaagaucgucaaguccguggagaugaacgcccccaacuaccacuacgaggagugcagcugcuaccccgacuccagcgagaucacgugcgugugccgggacaacuggcacggcuccaaccgccccugggucagcuucaaccagaaccucgaguaccagaucggguacaucugcuccggcaucuucggggacaacccgcggcccaacgacaagaccggcagcugcggccccguguccagcaacggggccaacggcgugaagggguucuccuucaaguacggcaacggggucuggaucggccgcaccaagagcaucagcucccggaacggcuucgagaugaucugggaccccaacggguggaccggcaccgacaacaacuucagcaucaagcaggacaucguggggaucaacgagugguccggcuacagcggguccuucgugcagcacccggagcugacgggccuggacugcauccgccccugcuucugggucgagcucauccggggccgccccaaggagaacaccaucuggaccagcggguccagcaucuccuucugcggcgugaacagcgacaccgucgggugguccuggcccgacggcgccgagcugccguucacgaucgacaaguga

SEQ ID NO: 82742 - RNA, 1410 nt, Artificial Sequence; identical to SEQ ID NO: 80762
  derived and/or modified CDS sequence (opt1) from neuraminidase__InfluenzaA__ADG42466

SEQ ID NO: 82743 - RNA, 1410 nt, Artificial Sequence
  derived and/or modified CDS sequence (opt1) from neuraminidase__InfluenzaA__ADG42476
augaaccccaaccagaagaucaucaccaucggcagcgugugcaugaccaucgggauggccaaccugauccuccagaucggcaacaucaucuccaucuggaucagccacuccauccagcuggggaaccagaaccagacggagaccugcaaccagagcgucaucaccuacgagaacaacaccugggugaaccagacguacgugaacaucuccaacaccaacuucgccgcgggccagagcgucguguccgugaagcuggccgggaacagcucccucugcccggucagcggcugggccaucuacuccaaggacaacagcauccgcaucggcuccaagggggacguguucgugauccgggagcccuucaucagcugcagcccccuggagugccgcaccuucuuccugacccagggcgcccuccugaacgacaagcacuccaacgggacgaucaaggaccggucccccuaccgcacccugaugagcugcccgaucggcgagguccccucccccuacaacagccgguucgagagcguggccugguccgcgagcgccugccacgacgggaucaacuggcucaccaucggcaucuccggccccgacaacggggccguggccguccugaaguacaacggcaucaucaccgacacgaucaagagcuggcgcaacaacauccugcggacccaggaguccgagugcgcgugcgugaacgggagcugcuucaccgugaugaccgacggcccguccgacggccaggccagcuacaagaucuuccgcaucgagaaggggaagaucgucaaguccguggagaugaacgcccccaacuaccacuacgaggagugcagcugcuaccccgacuccagcgagaucacgugcgugugccgggacaacuggcacggcuccaaccgccccugggucagcuucaaccagaaccucgaguaccagaucggguacaucugcuccggcaucuucggggacaacccgcggcccaacgacaagaccggcagcugcggccccguguccagcaacggggccaacggcgugaagggguucuccuucaaguacggcaacggggucuggaucggccgcaccaagagcaucagcucccggaacggcuucgagaugaucugggaccccaacggguggaccggcacggacaacaacuucagcaucaagcaggacaucguggggaucaacgagugguccggcuacagcggguccuucgugcagcacccggagcugaccggccuggacugcauccgccccugcuucugggucgagcucauccggggccgccccaaggagaacaccaucuggaccagcggguccagcaucuccuucugcggcgugaacagcgacacggucgggugguccuggcccgacggcgccgagcugccguucaccaucgacaaguga

SEQ ID NO: 82744 - RNA, 1410 nt, Artificial Sequence; identical to SEQ ID NO: 82664
  derived and/or modified CDS sequence (opt1) from neuraminidase__InfluenzaA__ADG42486

SEQ ID NO: 82745 - RNA, 1410 nt, Artificial Sequence; identical to SEQ ID NO: 80762
  derived and/or modified CDS sequence (opt1) from neuraminidase__InfluenzaA__ADG42496

SEQ ID NO: 82746 - RNA, 1410 nt, Artificial Sequence
  derived and/or modified CDS sequence (opt1) from neuraminidase__InfluenzaA__ADG42506
augaaccccaaccagaagaucaucaucaucggcagcgugugcaugaccaucgggauggccaaccugauccuccagaucggcaacaucaucuccaucuggaucagccacuccauccagcuggggaaccagaaccagaucgagaccugcaaccagagcaucaucacguacgagaacaacaccugggucaaccagaccuacgugaacaucuccaacaccaacuucgccgcgggccagagcguggucuccgugaagcuggccgggaacagcucccucugcccggugagcggcugggccaucuacuccaaggacaacagcauccgcaucggcuccaagggggacgucuucgugauccgggagcccuucaucagcugcagcccccuggagugccgcacguucuuccugacccagggcgcccuccugaacgacaagcacuccaacgggaccaucaaggaccggucccccuaccgcacccugaugagcugcccgaucggcgaggugcccucccccuacaacagccgguucgagagcgucgccugguccgcgagcgccugccacgacgggaucaacuggcucacgaucggcaucuccggccccgacaacggggccguggccgugcugaaguacaacggcaucaucaccgacaccaucaagagcuggcgcaacaacauccugcggacccaggaguccgagugcgcgugcgucaacgggagcugcuucacggugaugaccgacggcccguccgacggccaggccagcuacaagaucuuccgcaucgagaaggggaagguggucaaguccguggagaugaacgcccccaacuaccacuacgaggagugcagcugcuaccccgacuccagcgagaucacgugcgugugccgggacaacuggcacggcuccaaccgccccugggucagcuucaaccagaaccucgaguaccagaucggguacaucugcuccggcaucuucggggacaacccgcggcccaacgacaagaccggcagcugcggccccguguccagcaacggggccaacggcgugaagggguucuccuucaaguacggcaacggggucuggaucggccgcaccaagagcaucagcucccggaacggcuucgagaugaucugggaccccaacggguggaccggcaccgacaacaacuucagcaucaagcaggacaucguggggaucaacgagugguccggcuacagcggguccuucgugcagcacccggagcugaccggccuggacugcauccgccccugcuucugggucgagcucauccggggccgccccaaggagaacacgaucuggaccagcggguccagcaucuccuucugcggcgugaacagcgacaccgucgggugguccuggcccgacggcgccgagcugccguucaccaucgacaaguga

SEQ ID NO: 82747 - RNA, 1410 nt, Artificial Sequence; identical to SEQ ID NO: 81937
  derived and/or modified CDS sequence (opt1) from neuraminidase__InfluenzaA__ADG42516

SEQ ID NO: 82748 - RNA, 1410 nt, Artificial Sequence
  derived and/or modified CDS sequence (opt1) from neuraminidase__InfluenzaA__ADG42526
augaaccccaaccagaagaucaucaccaucggcagcgugugcaugaccaucgggauggccaaccugauccuccagaucggcaacaucaucuccaucuggaucagccacuccauccagcuggggaaccagaaccagaucgagacgugcaaccagagcgucaucaccuacgagaacaacaccugggugaaccagaccuacgugaacaucuccaacacgaacuucgccgcgggccagagcgucguguccgugaagcuggccgggaacagcucccucugcccggucagcggcugggccaucuacuccaaggacaacagcauccgcaucggcuccaagggggacguguucgugauccgggagcccuucaucagcugcagcccccuggagugccgcaccuucuuccugacccagggcgcccuccugaacgacaagcacuccaacgggaccaucaaggaccggucccccuaccgcacgcugaugagcugcccgaucggcgagguccccucccccuacaacagccgguucgagagcguggccugguccgcgagcgccugccacgacgggaucaacuggcucaccaucggcaucuccggccccgacaacggggccguggccguccugaaguacaacggcaucaucaccgacaccaucaagagcuggcgcaacaacauccugcggacgcaggaguccgagugcgcgugccucaacgggagcugcuucaccgugaugaccgacggcccguccgacggccaggccagcuacaagaucuuccgcaucgagaaggggaagaucgugaaguccgucgagaugaacgcccccaacuaccacuacgaggagugcagcugcuaccccgacuccagcgagaucacgugcgugugccgggacaacuggcacggcuccaaccgccccugggugagcuucaaccagaaccuggaguaccagaucggguacaucugcuccggcaucuucggggacaacccgcggcccaacgacaagaccggcagcugcggccccgucuccagcaacggggccaacggcgugaagggguucuccuucaaguacggcaacgggguguggaucggccgcaccaagagcaucagcucccggaacggcuucgagaugaucugggaccccaacggguggaccggcaccgacaacaacuucagcaucaagcaggacaucgucgggaucaacgagugguccggcuacagcggguccuucgugcagcacccggagcugacgggccucgacugcauccgccccugcuucuggguggagcugauccggggccgccccaaggagaacaccaucuggaccagcggguccagcaucuccuucugcggcgucaacagcgacaccguggggugguccuggcccgacggcgccgagcugccguucacgaucgacaaguga

SEQ ID NO: 82749 - RNA, 1410 nt, Artificial Sequence
  derived and/or modified CDS sequence (opt1) from neuraminidase__InfluenzaA__ADG42536
augaaccccaaccagaagaucaucaccaucggcagcgugugcaugaccaucgggauggccaaccugauccuccagaucggcaacaucaucuccaucuggaucagccacuccauccagcuggggaaccagaaccagaucgagacgugcaaccagagcgucaucaccuacgagaacaacaccugggugaaccagaccuacgugaacaucuccaacacgaacuucgccgcgggccagagcgucguguccgugaagcuggccgggaacagcucccucugcccggucagcggcugggccaucuacuccaaggacaacagcauccgcaucggcuccaagggggacguguucgugauccgggagcccuucaucagcugcagcccccuggagugccgcaccuucuuccugacccagggcgcccuccugaacgacaagcacuccaacgggaccaucaaggaccggucccccuaccgcacgcugaugagcugcccgaucggcgagguccccucccccuacaacagccgguucgagagcguggccugguccgcgagcgccugccacgacgggaucaacuggcucaccaucggcaucuccggccccgacaacggggccguggccguccugaaguacaacggcaucaucaccgacaccaucaagagcuggcgcaacaacauccugcggacgcaggaguccgagugcgcgugcgugaacgggagcugcuucaccgugaugaccgacggcccguccgacggccaggccagcuacaagaucuuccgcaucgagaaggggaagaucgucaaguccguggagaugaacgcccccaacuaccacuacgaggagugcagcugcuaccccgacuccagcgagaucacgugcgugugccgggacaacuggcacggcuccaaccgccccugggucagcuucaaccagaaccucgaguaccagaucggguacaucugcuccggcaucuucggggacaacccgcggcccaacgacaagaccggcagcugcggccccguguccagcaacggggccaacggcgugaagggguucuccuucaaguacggcaacggggucuggaucggccgcaccaagagcaucagcucccggaacggcuucgagaugaucugggaccccaacggguggaccggcaccgacaacaacuucagcaucaagcaggacaucguggggaucaacgagugguccggcuacagcggguccuucgugcagcacccggagcugacgggccuggacugcauccgccccugcuucugggucgagcucauccggggccgccccaaggagaacaccaucuggaccagcggguccagcaucuccuucugcggcgugaccagcgacacggucgggugguccuggcccgacggcgccgagcugccguucaccaucgacaaguga

SEQ ID NO: 82750 - RNA, 1410 nt, Artificial Sequence; identical to SEQ ID NO: 80762
  derived and/or modified CDS sequence (opt1) from neuraminidase__InfluenzaA__ADG42546

SEQ ID NO: 82751 - RNA, 1410 nt, Artificial Sequence; identical to SEQ ID NO: 80762
  derived and/or modified CDS sequence (opt1) from neuraminidase__InfluenzaA__ADG42556

SEQ ID NO: 82752 - RNA, 1410 nt, Artificial Sequence
  derived and/or modified CDS sequence (opt1) from neuraminidase__InfluenzaA__ADG42566
augaaccccaaccagaagaucaucaccaucggcagcgugugcaugaccaucgggauggccaaccugauccuccagaucggcaacaucaucuccaucuggaucagccacuccauccagcuggggaaccagaaccagaucgagacgugcaaccagagcgucaucaccuacgagaacaacaccugggugaaccagaccuacgugaacaucuccaacacgaacuucgccgcgggccacagcgucguguccgugaagcuggccgggaacagcucccucugcccggucagcggcugggccaucuacuccaaggacaacagcauccgcaucggcuccaagggggacguguucgugauccgggagcccuucaucagcugcagcccccuggagugccgcaccuucuuccugacccagggcgcccuccugaacgacaagcacuccaacgggaccaucaaggaccggucccccuaccgcacgcugaugagcugcccgaucggcgagguccccucccccuacaacagccgguucgagagcguggccugguccgcgagcgccugccacgacgggaucaacuggcucaccaucggcaucuccggccccgacaacggggccguggccguccugaaguacaacggcaucaucaccgacaccaucaagagcuggcgcaacaacauccugcggacgcaggaguccgagugcgcgugcgugaacgggagcugcuucaccgugaugaccgacggcccguccgacggccaggccagcuacaagaucuuccgcaucgagaaggggaagaucgucaaguccguggagaugaacgcccccaacuaccacuacgaggagugcagcugcuaccccgacuccagcgagaucacgugcgugugccgggacaacuggcacggcuccaaccgccccugggucagcuucaaccagaaccucgaguaccagaucggguacaucugcuccggcaucuucggggacaacccgcggcccaacgacaagaccggcagcugcggccccguguccagcaacggggccaacggcgugaagggguucuccuucaaguacggcaacggggucuggaucggccgcaccaagagcaucagcucccggaacggcuucgagaugaucugggaccccaacggguggaccggcaccgacaacaacuucagcaucaagcaggacaucguggggaucaacgagugguccggcuacagcggguccuucgugcagcacccggagcugacgggccuggacugcauccgccccugcuucugggucgagcucauccggggccgccccaaggagaacaccaucuggaccagcggguccagcaucuccuucugcggcgugaacagcgacaccgucgggugguccuggcccgacggcgccgagcugccguucacgaucgacaaguga

SEQ ID NO: 82753 - RNA, 1410 nt, Artificial Sequence
  derived and/or modified CDS sequence (opt1) from neuraminidase__InfluenzaA__ADG42576
augaaccccaaccagaagaucaucaccaucggcagcgugugcaugaccaucgggauggccaaccugauccuccagaucggcaacaucaucuccaucuggaucagccacuccauccagcuggggaaccagaaccagaucgagacgugcaaccagagcgucaucaccuacgagaacaacaccugggugaaccagaccuacgugaacaucuccaacacgaacuucgccgcgggccagagcgucguguccgugaagcuggccgggaacagcucccucugcccggucagcggcugggccaucuacuccaaggacaacagcauccgcaucggcuccaagggggacguguucgugauccgggagcccuucaucagcugcagcccccuggagugccgcaccuucuuccugacccagggcgcccuccugaacgacaagcacuccaacgggaccaucaaggaccggucccccuaccgcacgcugaugagcugcccgaucggcgagguccccucccccuacaacagccgguucgagagcguggccugguccgcgagcgccugccacgacgggaucaacuggcucaccaucggcaucuccggccccuacaacggggccguggccguccugaaguacaacggcaucaucaccgacaccaucaagagcuggcgcaacaacauccugcggacgcaggaguccgagugcgcgugcgugaacgggagcugcuucaccgugaugaccgacggcccguccgacggccaggccagcuacaagaucuucaagaucgagaaggggaagaucgucaaguccguggagaugaacgcccccaacuaccacuacgaggagugcagcugcuaccccgacuccagcgagaucacgugcgugugccgcgacaacuggcacggcuccaaccggcccugggucagcuucaaccagaaccucgaguaccagaucggguacaucugcuccggcaucuucggggacaacccgcgccccaacgacaagaccggcagcugcggccccguguccagcaacggggccaacggcgugaagggguucuccuucaaguacggcaacggggucuggaucggccggaccaagagcaucagcucccgcaacggcuucgagaugaucugggaccccaacggguggaccggcaccgacaacaacuucagcaucaagcaggacaucguggggaucaacgagugguccggcuacagcggguccuucgugcagcacccggagcugacgggccuggacugcauccggcccugcuucugggucgagcucauccgcggccggcccaaggagaacaccaucuggaccagcggguccagcaucuccuucugcggcgugaacagcgacaccgucgggugguccuggcccgacggcgccgagcugccguucacgaucgacaaguga

SEQ ID NO: 82754 - RNA, 1410 nt, Artificial Sequence; identical to SEQ ID NO: 80762
  derived and/or modified CDS sequence (opt1) from neuraminidase__InfluenzaA__ADG42586

SEQ ID NO: 82755 - RNA, 1410 nt, Artificial Sequence
  derived and/or modified CDS sequence (opt1) from neuraminidase__InfluenzaA__ADG42606
augaaccccaaccagaagaucaucaccaucggcagcgugugcaugaccaucgggauggccaaccugauccuccagaucggcaacaucaucuccaucuggaucagccacuccauccagcuggggaaccagaaccagaucgagacgugcaaccagagcgucaucaccuacgagaacaacaccugggugaaccagaccuacgugaacaucuccaacacgaacuucgccgcgggccagagcgucguguccgugaagcuggccgggaacagcucccucugcccggucagcggcugggccaucuacuccaaggacaacagcauccgcaucggcuccaagggggacguguucgugauccgggagcccuucaucagcugcagcccccuggagugccgcaccuucuuccugacccagggcgcccuccugaacgacaagcacuccaacgggaccaucaaggaccggucccccuaccgcacgcugaugagcugcccgaucggcgagguccccucccccuacaacagccgguucgagagcguggccugguccgcgagcgccugccacgacgggaucaacuggcucaccaucggcaucuccggccccgacaacggggccguggccguccugaaguacaacggcaucaucaccgacaccaucaagagcuggcgcaacaacauccugcggacgcaggaguccgagugcgcgugcgugaacgggagcugcuucaccgugaugaccgacggcccguccgacggccaggccagcuacaagaucuuccgcaucgagaaggggaagaucgucaaguccguggagaugaacgcccccaacuaccacuacgaggagugcagcugcuaccccgacuccagcgagaucacgugcgugugccgggacaacuggcacggcuccaaccgccccugggucagcuucaaccagaaccucgaguaccagaucggguacaucugcuccggcaucuucggggacaacccgcggcccaacgacaagaccggcagcugcggccccguguccagcaacggggccaacggcgugaagggguucuccuucaaguacggcaacggggucuggaucggccgcaccaagagcaucagcucccggaacggcuucgagaugaucugggaccccaacggguggaccggcaccgacaacaacuucagcaucaagcaggacaucguggggaucaacgagugguccggcuacagcggguccuucgugcagcacccggagcugacgggccuggacugcauccgccccugcuucugggucgagcucauccggggccgccccaaggagaacaccaucuggaccagcggguccagcaucuccuucugcggcgugaacagcgacaccgucgggugguccuggcccgacggcgccgagcugccguuccccaucgacaaguga

SEQ ID NO: 82756 - RNA, 1410 nt, Artificial Sequence
  derived and/or modified CDS sequence (opt1) from neuraminidase__InfluenzaA__ADG42616
augaacagcaaccagaagaucaucaccaucggcuccgugugcaugaccaucgggauggccaaccugauccuccagaucggcaacaucaucagcaucuggaucucccacagcauccagcuggggaaccagaaccagaucgagacgugcaaccaguccgucaucaccuacgagaacaacaccugggugaaccagaccuacgugaacaucagcaacacgaacuucgccgcgggccaguccgucgugagcgugaagcuggccgggaacuccagccucugccccgucuccggcugggccaucuacagcaaggacaacuccauccgcaucggcagcaagggggacguguucgugauccgggagccguucaucuccugcagcccccuggagugccgcaccuucuuccugacccagggcgcccuccugaacgacaagcacuccaacgggaccaucaaggaccggagccccuaccgcacgcugauguccugccccaucggcgaggucccgagccccuacaacagccgguucgaguccguggccuggagcgcguccgccugccacgacgggaucaacuggcucaccaucggcaucagcggccccgacaacggggccguggccguccugaaguacaacggcaucaucaccgacaccaucaaguccuggcgcaacaacauccugcggacgcaggagagcgagugcgcgugcgugaacggguccugcuucaccgugaugaccgacggccccagcgacggccaggccuccuacaagaucuuccgcaucgagaaggggaagaucgucaagagcguggagaugaacgccccgaacuaccacuacgaggagugcuccugcuaccccgacagcuccgagaucacgugcgugugccgggacaacuggcacggcagcaaccgccccugggucuccuucaaccagaaccucgaguaccagaucggguacaucugcagcggcaucuucggggacaacccccggccgaacgacaagaccggcuccugcggccccgugagcuccaacggggccaacggcgugaagggguucagcuucaaguacggcaacggggucuggaucggccgcaccaagagcaucuccagccggaacggcuucgagaugaucugggaccccaacggguggaccggcaccgacaacaacuucuccaucaagcaggacaucguggggaucaacgaguggagcggcuacuccgggagcuucgugcagcaccccgagcugacgggccuggacugcauccgcccgugcuucugggucgagcucauccggggccgccccaaggagaacaccaucuggaccuccgggagcuccaucagcuucugcggcgugaacuccgacaccgucggguggagcuggcccgacggcgccgagcugcccuucacgaucgacaaguga

SEQ ID NO: 82757 - RNA, 1410 nt, Artificial Sequence; identical to SEQ ID NO: 81345
  derived and/or modified CDS sequence (opt1) from neuraminidase__InfluenzaA__ADG42626

SEQ ID NO: 82758 - RNA, 1410 nt, Artificial Sequence; identical to SEQ ID NO: 82743
  derived and/or modified CDS sequence (opt1) from neuraminidase__InfluenzaA__ADG42636

SEQ ID NO: 82759 - RNA, 1410 nt, Artificial Sequence
  derived and/or modified CDS sequence (opt1) from neuraminidase__InfluenzaA__ADG42646
augaaccccaaccagcgcaucaucaccaucggcagcgugugcaugaccaucgggauggccaaccugauccuccagaucggcaacaucaucuccaucuggaucagccacuccauccagcuggggaaccagaaccagaucgagacgugcaaccagagcgucaucaccuacgagaacaacaccugggugaaccagaccuacgugaacaucuccaacacgaacuucgccgcgggccagagcgucguguccgugaagcuggccgggaacagcucccucugcccggucagcggcugggccaucuacuccaaggacaacagcauccggaucggcuccaagggggacguguucgugauccgcgagcccuucaucagcugcagcccccuggagugccggaccuucuuccugacccagggcgcccuccugaacgacaagcacuccaacgggaccaucaaggaccgcucccccuaccggacgcugaugagcugcccgaucggcgagguccccucccccuacaacagccgcuucgagagcguggccugguccgcgagcgccugccacgacgggaucaacuggcucaccaucggcaucuccggccccgacaacggggccguggccguccugaaguacaacggcaucaucaccgacaccaucaagagcuggcggaacaacauccugcgcacgcaggaguccgagugcgcgugcgugaacgggagcugcuucaccgugaugaccgacggcccguccgacggccaggccagcuacaagaucuuccggaucgagaaggggaagaucgucaaguccguggagaugaacgcccccaacuaccacuacgaggagugcagcugcuaccccgacuccagcgagaucacgugcgugugccgcgacaacuggcacggcuccaaccggcccugggucagcuucaaccagaaccucgaguaccagaucggguacaucugcuccggcaucuucggggacaacccgcgccccaacgacaagaccggcagcugcggccccguguccagcaacggggccaacggcgugaagggguucuccuucaaguacggcaacggggucuggaucggccggaccaagagcaucagcucccgcaacggcuucgagaugaucugggaccccaacggguggaccggcaccgacaacaacuucagcaucaagcaggacaucguggggaucaacgagugguccggcuacagcggguccuucgugcagcacccggagcugacgggccuggacugcauccggcccugcuucugggucgagcucauccgcggccggcccaaggagaacaccaucuggaccagcggguccagcaucuccuucugcggcgugaacagcgacaccgucgggugguccuggcccgacggcgccgagcugccguucacgaucgacaaguga

SEQ ID NO: 82760 - RNA, 1410 nt, Artificial Sequence; identical to SEQ ID NO: 80762
  derived and/or modified CDS sequence (opt1) from neuraminidase__InfluenzaA__ADG42656

SEQ ID NO: 82761 - RNA, 1410 nt, Artificial Sequence; identical to SEQ ID NO: 82675
  derived and/or modified CDS sequence (opt1) from neuraminidase__InfluenzaA__ADG42666

SEQ ID NO: 82762 - RNA, 1410 nt, Artificial Sequence
  derived and/or modified CDS sequence (opt1) from neuraminidase__InfluenzaA__ADG42676
augaaccccaaccagaagaucaucaccaucggcagcgugugcaugaccaucgggauggccaaccugauccuccagaucggcaacaucaucuccaucuggaucagccacuccauccagcuggggaaccagaaccagaucgagaucugcaaccagagcgucaucacguacgagaacaacaccugggugaaccagaccuacgugaacaucuccaacaccaacuucgccgcgggccagagcgucguguccgugaagcuggccgggaacagcucccucugcccggucagcggcugggccaucuacuccaaggacaacagcauccgcaucggcuccaagggggacguguucgugauccgggagcccuucaucagcugcagcccccuggagugccgcacguucuuccugacccagggcgcccuccugaacgacaagcacuccaacgggaccaucaaggaccggucccccuaccgcacccugaugagcugcccgaucggcgagguccccucccccuacaacagccgguucgagagcguggccugguccgcgagcgccugccacgacgggaucaacuggcucacgaucggcaucuccggccccgacaacggggccguggccguccugaaguacaacggcaucaucaccgacaccaucaagagcuggcgcaacaacauccugcggacccaggaguccgagugcgcgugcgugaacgggagcugcuucacggugaugaccgacggcccguccgacggccaggccagcuacaagaucuuccgcaucgagaaggggaagaucgucaaguccguggagaugaacgcccccaacuaccacuacgaggagugcagcugcuaccccgacuccagcgagaucacgugcgugugccgggacaacuggcacggcuccaaccgccccugggucagcuucaaccagaaccucgaguaccagaucggguacaucugcuccggcaucuucggggacaacccgcggcccaacgacaagaccggcagcugcggccccguguccagcaacggggccaacggcgugaagggguucuccuucaaguacggcaacggggucuggaucggccgcaccaagagcaucagcucccggaacggcuucgagaugaucugggaccccaacggguggaccggcaccgacaacaacuucagcaucaagcaggacaucguggggaucaacgagugguccggcuacagcggguccuucgugcagcacccggagcugaccggccuggacugcauccgccccugcuucugggucgagcucauccggggccgccccaaggagaacacgaucuggaccagcggguccagcaucuccuucugcggcgugaacagcgacaccgucgggugguccuggcccgacggcgccgagcugccguucaccaucgacaaguga

SEQ ID NO: 82763 - RNA, 1410 nt, Artificial Sequence; identical to SEQ ID NO: 80762
  derived and/or modified CDS sequence (opt1) from neuraminidase__InfluenzaA__ADG42686

SEQ ID NO: 82764 - RNA, 1410 nt, Artificial Sequence; identical to SEQ ID NO: 82339
  derived and/or modified CDS sequence (opt1) from neuraminidase__InfluenzaA__ADG42696

SEQ ID NO: 82765 - RNA, 1410 nt, Artificial Sequence; identical to SEQ ID NO: 82543
  derived and/or modified CDS sequence (opt1) from neuraminidase__InfluenzaA__ADG42706

SEQ ID NO: 82766 - RNA, 1410 nt, Artificial Sequence; identical to SEQ ID NO: 80762
  derived and/or modified CDS sequence (opt1) from neuraminidase__InfluenzaA__ADG42716

SEQ ID NO: 82767 - RNA, 1410 nt, Artificial Sequence; identical to SEQ ID NO: 82050
  derived and/or modified CDS sequence (opt1) from neuraminidase__InfluenzaA__ADG42726

SEQ ID NO: 82768 - RNA, 1410 nt, Artificial Sequence; identical to SEQ ID NO: 81345
  derived and/or modified CDS sequence (opt1) from neuraminidase__InfluenzaA__ADG42746

SEQ ID NO: 82769 - RNA, 1410 nt, Artificial Sequence; identical to SEQ ID NO: 82275
  derived and/or modified CDS sequence (opt1) from neuraminidase__InfluenzaA__ADG42756

SEQ ID NO: 82770 - RNA, 1410 nt, Artificial Sequence; identical to SEQ ID NO: 82050
  derived and/or modified CDS sequence (opt1) from neuraminidase__InfluenzaA__ADG42766

SEQ ID NO: 82771 - RNA, 1410 nt, Artificial Sequence; identical to SEQ ID NO: 82050
  derived and/or modified CDS sequence (opt1) from neuraminidase__InfluenzaA__ADG42776

SEQ ID NO: 82772 - RNA, 1410 nt, Artificial Sequence; identical to SEQ ID NO: 82050
  derived and/or modified CDS sequence (opt1) from neuraminidase__InfluenzaA__ADG42796

SEQ ID NO: 82773 - RNA, 1410 nt, Artificial Sequence
  derived and/or modified CDS sequence (opt1) from neuraminidase__InfluenzaA__ADG42806
augaaccccaaccagaagaucaucaccaucggcagcgugugcaugaccaucgggauggccaaccugauccuccagaucggcaacaucaucuccaucuggaucagccacuccauccagcuggggaaccagaaccagaucgagacgugcaaccagagcgucaucaccuacgagaacaacaccugggugaaccagaccuacgugaacaucuccaacacgaacuucgccgcgggccagagcgucguguccgugaagcuggccgggaacagcucccucugcccggucagcggcugggccaucuacuccaaggacaacagcauccgcaucggcuccaagggggacguguucgugauccgggagcccuucaucagcugcagcccccuggagugccgcaccuucuuccugacccagggcgcccuccugaacgacaagcacuccaacgggaccaucaaggaccggucccccuaccgcacgcugaugagcugcccgaucggcgagguccccucccccuacaacagccgguucgagagcguggccugguccgcgagcgccugccacgacgggaucaacuggcucaccaucggcaucuccggccccgacaacggggccguggccguccugaaguacaacggcaucaucaccgacaccaucaagagcuggcgcaacaacauccugcggacgcaggaguccgagugcgcgugcgugaacgggagcugcuucaccgugaugaccgacggcccguccgacggccaggccagcuacaagaucuuccgcaucgagaaggggaagaucgucaaguccguggagaugaacgcccccaacuaccacuacgaggagugcagcugcuaccccgacuccagcgagaucacgugcgugugccgggacaacuggcacggcuccaaccgccccugggucagcuucaaccagaaccucgaguaccagaucggguacaucugcuccggcaucuucggggacaacccgcggcccaacgacaagaccggcagcugcggccccguguccagcaacggggccaacggcgugaagggguucuccuucaaguacggcaacggggucuggaucggccgcaccaagagcaucagcucccggaacggcuucgagaugaucugggaccccaacggguggaccggcaccgacaacaacuucagcaucaagcaggacaucguggggaucaacgagugguccggcuacagcggguccuucgugcagcacccggagcugacgggccuggacugcauccgccccugcuucugggucgagcucauccggggccgccccaaggagaacaccaucuggaccagcggguccagcaucuccuucugcggcgugaacagcgacaccgucuccuggagcuggcccgacggggccgagcugccguucacgaucgacaaguga

SEQ ID NO: 82774 - RNA, 1410 nt, Artificial Sequence; identical to SEQ ID NO: 80762
  derived and/or modified CDS sequence (opt1) from neuraminidase__InfluenzaA__ADG42816

SEQ ID NO: 82775 - RNA, 1410 nt, Artificial Sequence; identical to SEQ ID NO: 80762
  derived and/or modified CDS sequence (opt1) from neuraminidase__InfluenzaA__ADG42826

SEQ ID NO: 82776 - RNA, 1410 nt, Artificial Sequence; identical to SEQ ID NO: 80762
  derived and/or modified CDS sequence (opt1) from neuraminidase__InfluenzaA__ADG42836

SEQ ID NO: 82777 - RNA, 1410 nt, Artificial Sequence; identical to SEQ ID NO: 82378
  derived and/or modified CDS sequence (opt1) from neuraminidase__InfluenzaA__ADG42846

SEQ ID NO: 82778 - RNA, 1410 nt, Artificial Sequence; identical to SEQ ID NO: 80762
  derived and/or modified CDS sequence (opt1) from neuraminidase__InfluenzaA__ADG42856

SEQ ID NO: 82779 - RNA, 1410 nt, Artificial Sequence; identical to SEQ ID NO: 82374
  derived and/or modified CDS sequence (opt1) from neuraminidase__InfluenzaA__ADG42866

SEQ ID NO: 82780 - RNA, 1410 nt, Artificial Sequence; identical to SEQ ID NO: 80762
  derived and/or modified CDS sequence (opt1) from neuraminidase__InfluenzaA__ADG42876

SEQ ID NO: 82781 - RNA, 1410 nt, Artificial Sequence; identical to SEQ ID NO: 82411
  derived and/or modified CDS sequence (opt1) from neuraminidase__InfluenzaA__ADG42886

SEQ ID NO: 82782 - RNA, 1410 nt, Artificial Sequence; identical to SEQ ID NO: 82354
  derived and/or modified CDS sequence (opt1) from neuraminidase__InfluenzaA__ADG42896

SEQ ID NO: 82783 - RNA, 1410 nt, Artificial Sequence; identical to SEQ ID NO: 82354
  derived and/or modified CDS sequence (opt1) from neuraminidase__InfluenzaA__ADG42906

SEQ ID NO: 82784 - RNA, 1410 nt, Artificial Sequence; identical to SEQ ID NO: 80762
  derived and/or modified CDS sequence (opt1) from neuraminidase__InfluenzaA__ADG42916

SEQ ID NO: 82785 - RNA, 1410 nt, Artificial Sequence; identical to SEQ ID NO: 80762
  derived and/or modified CDS sequence (opt1) from neuraminidase__InfluenzaA__ADG42926

SEQ ID NO: 82786 - RNA, 1410 nt, Artificial Sequence; identical to SEQ ID NO: 80762
  derived and/or modified CDS sequence (opt1) from neuraminidase__InfluenzaA__ADG58909

SEQ ID NO: 82787 - RNA, 1410 nt, Artificial Sequence; identical to SEQ ID NO: 80762
  derived and/or modified CDS sequence (opt1) from neuraminidase__InfluenzaA__ADG58910

SEQ ID NO: 82788 - RNA, 1410 nt, Artificial Sequence
  derived and/or modified CDS sequence (opt1) from neuraminidase__InfluenzaA__ADG58913
augaaccccaaccagaagaucaucaccaucggcagcgugugcaugaccaucgggauggccaaccugauccuccagaucggcaacaucaucuccaucuggaucagccacuccauccagcuggggaaccagaaccagaucgagacgugcaaccagagcgucaucaccuacgagaacaacaccugggugaaccagaccuacgugaacaucuccaacacgaacuucgccgcgggccagagcgucguguccgugaagcuggccgggaacagcucccucugcccggucagcggcugggccaucuacuccaaggacaacagcauccgcaucggcuccaagggggacguguucgugauccgggagcccuucaucagcugcagcccccuggagugccgcaccuucuuccugacccagggcgcccuccugaacgacaagcacuccaacgggaccaucaaggaccggucccccuaccgcacgcugaugagcugcccgaucggcgagguccccucccccuacaacagccgguucgagagcguggccugguccgcgagcgccugccacgacgggaucaacuggcucaccaucggcaucuccggccccgacaacggggccguggccguccugaaguacaacggcaucaucaccgacaccaucaagagcuggcgcaacaacauccugcggacgcaggaguccgagugcgcgugcgugaacgggagcugcuucaccgugaugaccgacggcccguccgacggccaggccagcuacaagaucuuccgcaucgagaaggggaagaucgucaaguccguggagaugaacgcccccaacuaccacuacgaggagugcagcugcuaccccgacuccagcgagaucacgugcgugugccgggacaacuggcacggcuccaaccgccccugggucaccuucaaccagaaccucgaguaccagaucggguacaucugcagcggcaucuucggggacaacccgcggcccaacgacaagaccggcuccugcggccccgugagcuccaacggggccaacggcgugaagggguucagcuucaaguacggcaacggggucuggaucggccgcaccaaguccaucagcagccggaacggcuucgagaugaucugggaccccaacggguggaccggcacggacaacaacuucuccaucaagcaggacaucguggggaucaacgaguggagcggcuacuccgggagcuucgugcagcacccggagcugaccggccuggacugcauccgccccugcuucuggaucgagcucauccggggccgccccaaggagaacaccaucuggaccuccgggagcuccaucagcuucugcggcgucaacuccgacacggugggguggagcuggcccgacggcgccgagcugccguucaccaucgacaaguga

SEQ ID NO: 82789 - RNA, 1410 nt, Artificial Sequence; identical to SEQ ID NO: 80762
  derived and/or modified CDS sequence (opt1) from neuraminidase__InfluenzaA__ADG58914

SEQ ID NO: 82790 - RNA, 1410 nt, Artificial Sequence; identical to SEQ ID NO: 80762
  derived and/or modified CDS sequence (opt1) from neuraminidase__InfluenzaA__ADG58916

SEQ ID NO: 82791 - RNA, 1410 nt, Artificial Sequence; identical to SEQ ID NO: 80762
  derived and/or modified CDS sequence (opt1) from neuraminidase__InfluenzaA__ADG58917

SEQ ID NO: 82792 - RNA, 1410 nt, Artificial Sequence
  derived and/or modified CDS sequence (opt1) from neuraminidase__InfluenzaA__ADG58918
augaaccccaaccagaagaucaucaccaucggcagcgugugcaugaccaucgggauggccaaccugauccuccagaucggcaacaucaucuccaucuggaucagccacuccauccagcuggggaaccagaaccagaucgagacgugcaaccagagcgucaucaccuacgagaacaacaccugggugaaccagaccuacgugaacaucuccaacacgaacuucgccgcgggccagagcgucguguccgugaagcuggccgggaacagcucccucugcccggucagcggcugggccaucuacuccaaggacaacagcauccgcaucggcuccaagggggacguguucgugauccgggagcccuucaucagcugcagcccccuggagugccgcaccuucuuccugacccagggcgcccuccugaacgacaagcacuccaacgggaccaucaaggaccggucccccuaccgcacgcugaugagcugcccgaucggcgagguccccucccccuacaacagccgguucgagagcguggccugguccgcgagcgccugccacgacgggaucaacuggcucaccaucggcaucuccggccccgacaacggggccguggccguccugaaguacaacggcaucaucaccgacaccaucaagagcuggcgcaacaacauccugcggacgcaggaguccgagugcgcgugcgugaacgggagcugcuucaccgugaugaccgacggcccguccgacggccaggccagcuacaagaucuuccgcaucgagaaggggaagaucgucaaguccguggagaugaacgcccccaacuaccacuacgaggagugcagcugcuaccccgacuccagcgagaucacgugcgugugccgggacaacuggcacggcuccaaccgccccugggucaccuucaaccagaaccucgaguaccagaucggguacaucugcagcggcaucuucggggacaacccgcggcccaacgacaagaccggcuccugcggccccgugagcuccaacggggccaacggcgugaagggguucagcuucaaguacggcaacggggucuggaucggccgcaccaaguccaucagcagccggaacggcuucgagaugaucugggaccccaacggguggaccggcacggacaacaacuucuccaucaagcaggacaucguggggaucaacgaguggagcggcuacuccgggagcuucgugcagcacccggagcugaccggccuggacugcauccgccccugcuucugggucgagcucauccggggccgccccaaggagaacaccaucuggaccuccgggagcuccaucagcuucugcggcgugaacuccgacacggucggguggagcuggcccgacggcgccgagcugccguucaccaucgacaaguga

SEQ ID NO: 82793 - RNA, 1410 nt, Artificial Sequence; identical to SEQ ID NO: 82788
  derived and/or modified CDS sequence (opt1) from neuraminidase__InfluenzaA__ADG58919

SEQ ID NO: 82794 - RNA, 1410 nt, Artificial Sequence; identical to SEQ ID NO: 80917
  derived and/or modified CDS sequence (opt1) from neuraminidase__InfluenzaA__ADG58920

SEQ ID NO: 82795 - RNA, 1410 nt, Artificial Sequence; identical to SEQ ID NO: 80917
  derived and/or modified CDS sequence (opt1) from neuraminidase__InfluenzaA__ADG58921

SEQ ID NO: 82796 - RNA, 1410 nt, Artificial Sequence; identical to SEQ ID NO: 80917
  derived and/or modified CDS sequence (opt1) from neuraminidase__InfluenzaA__ADG58922

SEQ ID NO: 82797 - RNA, 1410 nt, Artificial Sequence; identical to SEQ ID NO: 80917
  derived and/or modified CDS sequence (opt1) from neuraminidase__InfluenzaA__ADG58923

SEQ ID NO: 82798 - RNA, 1410 nt, Artificial Sequence; identical to SEQ ID NO: 80917
  derived and/or modified CDS sequence (opt1) from neuraminidase__InfluenzaA__ADG58924

SEQ ID NO: 82799 - RNA, 1410 nt, Artificial Sequence; identical to SEQ ID NO: 80917
  derived and/or modified CDS sequence (opt1) from neuraminidase__InfluenzaA__ADG58925

SEQ ID NO: 82800 - RNA, 1410 nt, Artificial Sequence; identical to SEQ ID NO: 80917
  derived and/or modified CDS sequence (opt1) from neuraminidase__InfluenzaA__ADG58926

SEQ ID NO: 82801 - RNA, 1410 nt, Artificial Sequence; identical to SEQ ID NO: 80917
  derived and/or modified CDS sequence (opt1) from neuraminidase__InfluenzaA__ADG58927

SEQ ID NO: 82802 - RNA, 1410 nt, Artificial Sequence; identical to SEQ ID NO: 81780
  derived and/or modified CDS sequence (opt1) from neuraminidase__InfluenzaA__ADG58928

SEQ ID NO: 82803 - RNA, 1410 nt, Artificial Sequence; identical to SEQ ID NO: 81780
  derived and/or modified CDS sequence (opt1) from neuraminidase__InfluenzaA__ADG58929

SEQ ID NO: 82804 - RNA, 1410 nt, Artificial Sequence
  derived and/or modified CDS sequence (opt1) from neuraminidase__InfluenzaA__ADG58931
augaaccccaaccagaagaucaucaccaucggcagcgugugcaugaccaucgggauggccaaccugauccuccagaucggcaacacgaucuccaucuggaucaaccacagcauccagcuggggaaccagaaccagaucgagaccugcaaccaguccgucaucaccuacgagaacaacaccugggugaaccagacguacgugaacaucagcaacaccaacuucgccgcgggccaguccgucgugagcgugaagcuggccgggaacuccagccucugcccggucuccggcugggccaucuacagcaaggacaacuccauccgcaucggcagcaagggggacguguucgugauccgggagcccuucaucuccugcagcccccuggagugccgcaccuucuuccugacccagggcgcccuccugaacgacaagcacuccaacgggacgaucaaggaccggagccccuaccgcacccugauguccugcccgaucggcgagguccccagccccuacaacucccgguucgagagcguggccuggagcgcguccgccugccacgacgggaucaacuggcucaccaucggcaucagcggccccgacaacggggccguggccguccugaaguacaacggcaucaucaccgacacgaucaaguccuggcgcaacaacauccugcggacccaggagagcgagugcgcgugcgugaacggguccugcuucaccgugaugaccgacggcccgagcgacggccaggccuccuacaagaucuuccgcaucgagaaggggaagaucgucaagagcguggagaugaacgcccccaacuaccacuacgaggagugcuccugcuaccccgacagcuccgagaucacgugcgugugccgggacaacuggcacggcagcaaccgccccugggucuccuucaaccagaaccucgaguaccagaucggguacaucugcagcggcaucuucggggacaacccgcggcccaacgacaagaccggcuccugcggccccgugagcuccaacggggccaacggcgugaagggguucagcuucaaguacggcaacggggucuggaucggccgcaccaaguccaucagcagccggaacggcuucgagaugaucugggaccccaacggguggaccggcacggacaacaacuucuccaucaagcaggacaucguggggaucaacgaguggagcggcuacuccgggagcuucgugcagcacccggagcugaccggccuggacugcauccgccccugcuucugggucgagcucauccggggccgccccaaggagaacaccaucuggaccuccgggagcuccaucagcuucugcggcgugaacuccgacacggucggguggagcuggcccgacggcgccgagcugccguucaccaucgacaaguga

SEQ ID NO: 82805 - RNA, 1410 nt, Artificial Sequence; identical to SEQ ID NO: 82804
  derived and/or modified CDS sequence (opt1) from neuraminidase__InfluenzaA__ADG58932

SEQ ID NO: 82806 - RNA, 1410 nt, Artificial Sequence; identical to SEQ ID NO: 82804
  derived and/or modified CDS sequence (opt1) from neuraminidase__InfluenzaA__ADG58933

SEQ ID NO: 82807 - RNA, 1410 nt, Artificial Sequence; identical to SEQ ID NO: 82804
  derived and/or modified CDS sequence (opt1) from neuraminidase__InfluenzaA__ADG58934

SEQ ID NO: 82808 - RNA, 1410 nt, Artificial Sequence; identical to SEQ ID NO: 82804
  derived and/or modified CDS sequence (opt1) from neuraminidase__InfluenzaA__ADG58935

SEQ ID NO: 82809 - RNA, 1410 nt, Artificial Sequence; identical to SEQ ID NO: 82804
  derived and/or modified CDS sequence (opt1) from neuraminidase__InfluenzaA__ADG58936

SEQ ID NO: 82810 - RNA, 1410 nt, Artificial Sequence; identical to SEQ ID NO: 82804
  derived and/or modified CDS sequence (opt1) from neuraminidase__InfluenzaA__ADG58937

SEQ ID NO: 82811 - RNA, 1410 nt, Artificial Sequence; identical to SEQ ID NO: 82804
  derived and/or modified CDS sequence (opt1) from neuraminidase__InfluenzaA__ADG58938

SEQ ID NO: 82812 - RNA, 1410 nt, Artificial Sequence
  derived and/or modified CDS sequence (opt1) from neuraminidase__InfluenzaA__ADG59589
augaaccccaaccagaagaucaucaccaucggcagcgugugcaugaccaucgggauggccaaccugauccuccagaucggcaacaucaucuccaucuggaucagccacuccauccagcuggggaaccagaaccagaucgagacgugcaaccagagcgucaucaccuacgagaacaacaccugggugaaccagaccuacgugaacaucuccaacacgaacuucgccgcgggccagagcgucguguccgugaagcuggccgggaacagcucccucugcccggucagcggcugggccaucuacuccaaggacaacagcauccgcaucggcuccaagggggacguguucgugauccgggagcccuucaucagcugcagcccccuggagugccgcaccuucuuccugacccagggcgcccuccugaacgacaagcacuccaacgggaccaucaaggaccggucccccuaccgcacgcugaugagcugcccgaucggcgagguccccucccccuacaacagccgguucgagagcguggccugguccgcgagcgccugccacgacgggaucaacuggcucaccaucggcaucuccggccccgacaacggggccauggccgugcugaaguacaacggcaucaucaccgacaccaucaagagcuggcgcaacaacauccugcggacgcaggaguccgagugcgcgugcgucaacgggagcugcuucaccgugaugaccgacggcccguccgacggccaggccagcuacaagaucuuccgcaucgagaaggggaagguggucaaguccguggagaugaacgcccccaacuaccacuacgaggagugcagcugcuaccccgacuccagcgagaucacgugcgugugccgggacaacuggcacggcuccaaccgccccugggucagcuucaaccagaaccucgaguaccagaucggguacaucugcuccggcaucuucggggacaacccgcggcccaacgacaagaccggcagcugcggccccguguccagcaacggggccaacggcgugaagggguucuccuucaaguacggcaacggggucuggaucggccgcaccaagagcaucagcucccggaacggcuucgagaugaucugggaccccaacggguggaccggcaccgacaacaacuucagcaucaagcaggacaucguggggaucaacgagugguccggcuacagcggguccuucgugcagcacccggagcugacgggccuggacugcauccgccccugcuucugggucgagcucauccggggccgccccaaggagaacaccaucuggaccagcggguccagcaucuccuucugcggcgugaacagcgacaccgucgggugguccuggcccgacggcgccgagcugccguucacgaucgacaaguga

SEQ ID NO: 82813 - RNA, 1410 nt, Artificial Sequence; identical to SEQ ID NO: 80762
  derived and/or modified CDS sequence (opt1) from neuraminidase__InfluenzaA__ADG59590

SEQ ID NO: 82814 - RNA, 1410 nt, Artificial Sequence; identical to SEQ ID NO: 80762
  derived and/or modified CDS sequence (opt1) from neuraminidase__InfluenzaA__ADG59591

SEQ ID NO: 82815 - RNA, 1410 nt, Artificial Sequence; identical to SEQ ID NO: 80762
  derived and/or modified CDS sequence (opt1) from neuraminidase__InfluenzaA__ADG59592

SEQ ID NO: 82816 - RNA, 1410 nt, Artificial Sequence; identical to SEQ ID NO: 82664
  derived and/or modified CDS sequence (opt1) from neuraminidase__InfluenzaA__ADG59593

SEQ ID NO: 82817 - RNA, 1410 nt, Artificial Sequence; identical to SEQ ID NO: 81939
  derived and/or modified CDS sequence (opt1) from neuraminidase__InfluenzaA__ADG59594

SEQ ID NO: 82818 - RNA, 1410 nt, Artificial Sequence; identical to SEQ ID NO: 81939
  derived and/or modified CDS sequence (opt1) from neuraminidase__InfluenzaA__ADG59595

SEQ ID NO: 82819 - RNA, 1410 nt, Artificial Sequence
  derived and/or modified CDS sequence (opt1) from neuraminidase__InfluenzaA__ADG59596
augaaccccaaccagaagaucaucaccaucggcagcgugugcaugaccaucgggauggccaaccugauccuccagaucggcaacaucaucuccaucuggaucagccacuccauccagcuggggaaccagaaccagaucgagacgugcaaccagagcgucaucaccuacgagaacaacaccugggugaaccagaccuacgugaacaucuccaacacgaacuucgccgcgggccagagcgucguguccgugaagcuggccgggaacagcucccucugcccggucagcggcugggccaucuacuccaaggacaacagcauccgcaucggcuccaagggggacguguucgugauccgggagcccuucaucagcugcagcccccuggagugccgcaccuucuuccugacccagggcgcccuccugaacgacaagcacuccaacgggaccaucaaggaccggucccccuaccgcacgcugaugagcugcccgaucggcgagguccccucccccuacaacagccgguucgagagcguggccugguccgcgagcgccugccacgacgggaucaacuggcucaccaucggcaucuccggccccgacaacggggccguggccguccugaaguacaacggcaucaucaccgacaccaucaagagcuggcgcaacaacauccugcggacgcaggaguccgagugcgcgugcgugaacgggagcugcuucaccgugaugaccgacggcccguccgacggccaggccagcuacaagaucuuccgcaucgagaaggggaagaucgucaaguccguggagaugaacgcccccaacuaccacuacgaggagugcagcugcuaccccgacuccagcgagaucacgugcgugugccgggacaacuggcacggcuccaaccgccccugggucagcuucaaccagaaccucgaguaccagaucggguacaucugcuccggcaucuucggggacaacccgcggcccaacgaccgcaccggcagcugcggccccguguccagcaacggggccaacggcgugaagggguucuccuucaaguacggcaacggggucuggaucggccggaccaagagcaucagcucccgcaacggcuucgagaugaucugggaccccaacggguggaccggcaccgacaacaacuucagcaucaagcaggacaucguggggaucaacgagugguccggcuacagcggguccuucgugcagcacccggagcugacgggccuggacugcauccggcccugcuucugggucgagcucauccgcggccggcccaaggagaacaccaucuggaccagcggguccagcaucuccuucugcggcgugaacagcgacaccgucgggugguccuggcccgacggcgccgagcugccguucacgaucgacaaguga

SEQ ID NO: 82820 - RNA, 1410 nt, Artificial Sequence; identical to SEQ ID NO: 80762
  derived and/or modified CDS sequence (opt1) from neuraminidase__InfluenzaA__ADG59597

SEQ ID NO: 82821 - RNA, 1410 nt, Artificial Sequence; identical to SEQ ID NO: 80762
  derived and/or modified CDS sequence (opt1) from neuraminidase__InfluenzaA__ADG59598

SEQ ID NO: 82822 - RNA, 1410 nt, Artificial Sequence; identical to SEQ ID NO: 81937
  derived and/or modified CDS sequence (opt1) from neuraminidase__InfluenzaA__ADG59599

SEQ ID NO: 82823 - RNA, 1410 nt, Artificial Sequence; identical to SEQ ID NO: 80762
  derived and/or modified CDS sequence (opt1) from neuraminidase__InfluenzaA__ADG59601

SEQ ID NO: 82824 - RNA, 1410 nt, Artificial Sequence; identical to SEQ ID NO: 82664
  derived and/or modified CDS sequence (opt1) from neuraminidase__InfluenzaA__ADG59602

SEQ ID NO: 82825 - RNA, 1410 nt, Artificial Sequence; identical to SEQ ID NO: 82664
  derived and/or modified CDS sequence (opt1) from neuraminidase__InfluenzaA__ADG59603

SEQ ID NO: 82826 - RNA, 1410 nt, Artificial Sequence; identical to SEQ ID NO: 80762
  derived and/or modified CDS sequence (opt1) from neuraminidase__InfluenzaA__ADG59604

SEQ ID NO: 82827 - RNA, 1410 nt, Artificial Sequence; identical to SEQ ID NO: 80762
  derived and/or modified CDS sequence (opt1) from neuraminidase__InfluenzaA__ADG59605

SEQ ID NO: 82828 - RNA, 1410 nt, Artificial Sequence; identical to SEQ ID NO: 81780
  derived and/or modified CDS sequence (opt1) from neuraminidase__InfluenzaA__ADG59606

SEQ ID NO: 82829 - RNA, 1410 nt, Artificial Sequence; identical to SEQ ID NO: 80762
  derived and/or modified CDS sequence (opt1) from neuraminidase__InfluenzaA__ADG59607

SEQ ID NO: 82830 - RNA, 1410 nt, Artificial Sequence; identical to SEQ ID NO: 80762
  derived and/or modified CDS sequence (opt1) from neuraminidase__InfluenzaA__ADG59608

SEQ ID NO: 82831 - RNA, 1410 nt, Artificial Sequence; identical to SEQ ID NO: 81583
  derived and/or modified CDS sequence (opt1) from neuraminidase__InfluenzaA__ADG59609

SEQ ID NO: 82832 - RNA, 1410 nt, Artificial Sequence; identical to SEQ ID NO: 82664
  derived and/or modified CDS sequence (opt1) from neuraminidase__InfluenzaA__ADG59610

SEQ ID NO: 82833 - RNA, 1410 nt, Artificial Sequence; identical to SEQ ID NO: 81780
  derived and/or modified CDS sequence (opt1) from neuraminidase__InfluenzaA__ADG59611

SEQ ID NO: 82834 - RNA, 1410 nt, Artificial Sequence; identical to SEQ ID NO: 82664
  derived and/or modified CDS sequence (opt1) from neuraminidase__InfluenzaA__ADG59612

SEQ ID NO: 82835 - RNA, 1410 nt, Artificial Sequence
  derived and/or modified CDS sequence (opt1) from neuraminidase__InfluenzaA__ADG59613
augaaccccaaccagaagaucaucaccaucggcagcgugugcaugaccaucgggaugacgaaccugauccuccagcugggcaacaucaucuccaucuggaucagccacuccauccagcuggggaaccagaaccagaucgagaccugcaaccagagcgucaucaccuacgagaacaacaccugggugaaccagacguacgugaacaucuccaacaccaacuucgccgccggccagagcgucguguccgugaagcucgcggggaacagcucccugugcccggucagcggcugggccaucuacuccaaggacaacagcauccgcaucggcuccaagggggacguguucgugauccgggagcccuucaucagcugcagcccccuggagugccgcaccuucuuccucacccagggcgcccugcugaacgacaagcacuccaacgggacgaucaaggaccggucccccuaccgcacccucaugagcugcccgaucggcgagguccccucccccuacaacagccgguucgagagcguggccugguccgccagcgcgugccacgacgggaucaacuggcugaccaucggcaucuccggccccgacaacggggccguggccguccugaaguacaacggcaucaucaccgacacgaucaagagcuggcgcaacaacauccuccggacccaggaguccgagugcgccugcgugaacgggagcugcuucaccgugaugaccgacggcccguccgacggccaggcgagcuacaagaucuuccgcaucgagaaggggaagaucgucaaguccguggagaugaacgcccccaacuaccacuacgaggagugcagcugcuaccccgacuccagcgagaucacgugcgugugccgggacaacuggcacggcuccaaccgccccugggucagcuucaaccagaaccuggaguaccagaucggguacaucugcuccggcaucuucggggacaacccgcggcccaacgacaagaccggcagcugcggccccguguccagcaacggggccaacggcgugaagggguucuccuucaaguacggcaacggggucuggaucggccgcaccaagagcaucagcucccggaacggcuucgagaugaucugggaccccaacggguggaccggcacggacaacagcuucuccaucaagcaggacaucguggggaucaacgaguggagcggcuacuccgggagcuucgugcagcacccggagcugaccggccucgacugcauccgccccugcuucugggucgagcugauccggggccgccccaaggagaacaccguguggaccuccgggagcuccaucagcuucugcggcgucaacuccgacacggugggguggagcuggcccgacggcgccgagcugccguucaccaucgacaaguga

SEQ ID NO: 82836 - RNA, 1410 nt, Artificial Sequence; identical to SEQ ID NO: 81937
  derived and/or modified CDS sequence (opt1) from neuraminidase__InfluenzaA__ADG59614

SEQ ID NO: 82837 - RNA, 1410 nt, Artificial Sequence; identical to SEQ ID NO: 80762
  derived and/or modified CDS sequence (opt1) from neuraminidase__InfluenzaA__ADH01811

SEQ ID NO: 82838 - RNA, 1410 nt, Artificial Sequence; identical to SEQ ID NO: 80762
  derived and/or modified CDS sequence (opt1) from neuraminidase__InfluenzaA__ADH01821

SEQ ID NO: 82839 - RNA, 1410 nt, Artificial Sequence; identical to SEQ ID NO: 80762
  derived and/or modified CDS sequence (opt1) from neuraminidase__InfluenzaA__ADH01831

SEQ ID NO: 82840 - RNA, 1410 nt, Artificial Sequence; identical to SEQ ID NO: 80762
  derived and/or modified CDS sequence (opt1) from neuraminidase__InfluenzaA__ADH01841

SEQ ID NO: 82841 - RNA, 1410 nt, Artificial Sequence; identical to SEQ ID NO: 80762
  derived and/or modified CDS sequence (opt1) from neuraminidase__InfluenzaA__ADH01851

SEQ ID NO: 82842 - RNA, 1410 nt, Artificial Sequence; identical to SEQ ID NO: 80762
  derived and/or modified CDS sequence (opt1) from neuraminidase__InfluenzaA__ADH01861

SEQ ID NO: 82843 - RNA, 1410 nt, Artificial Sequence; identical to SEQ ID NO: 80762
  derived and/or modified CDS sequence (opt1) from neuraminidase__InfluenzaA__ADH01871

SEQ ID NO: 82844 - RNA, 1410 nt, Artificial Sequence; identical to SEQ ID NO: 80762
  derived and/or modified CDS sequence (opt1) from neuraminidase__InfluenzaA__ADH01881

SEQ ID NO: 82845 - RNA, 1410 nt, Artificial Sequence; identical to SEQ ID NO: 80762
  derived and/or modified CDS sequence (opt1) from neuraminidase__InfluenzaA__ADH01891

SEQ ID NO: 82846 - RNA, 1410 nt, Artificial Sequence; identical to SEQ ID NO: 80762
  derived and/or modified CDS sequence (opt1) from neuraminidase__InfluenzaA__ADH01901

SEQ ID NO: 82847 - RNA, 1410 nt, Artificial Sequence; identical to SEQ ID NO: 80762
  derived and/or modified CDS sequence (opt1) from neuraminidase__InfluenzaA__ADH01911

SEQ ID NO: 82848 - RNA, 1410 nt, Artificial Sequence; identical to SEQ ID NO: 80762
  derived and/or modified CDS sequence (opt1) from neuraminidase__InfluenzaA__ADH01921

SEQ ID NO: 82849 - RNA, 1410 nt, Artificial Sequence; identical to SEQ ID NO: 80762
  derived and/or modified CDS sequence (opt1) from neuraminidase__InfluenzaA__ADH01931

SEQ ID NO: 82850 - RNA, 1410 nt, Artificial Sequence; identical to SEQ ID NO: 82653
  derived and/or modified CDS sequence (opt1) from neuraminidase__InfluenzaA__ADH01941

SEQ ID NO: 82851 - RNA, 1410 nt, Artificial Sequence; identical to SEQ ID NO: 80762
  derived and/or modified CDS sequence (opt1) from neuraminidase__InfluenzaA__ADH01951

SEQ ID NO: 82852 - RNA, 1410 nt, Artificial Sequence; identical to SEQ ID NO: 80762
  derived and/or modified CDS sequence (opt1) from neuraminidase__InfluenzaA__ADH01961

SEQ ID NO: 82853 - RNA, 1410 nt, Artificial Sequence
  derived and/or modified CDS sequence (opt1) from neuraminidase__InfluenzaA__ADH01981
augaaccccaaccagaagaucaucaccaucggcagcgccugcaugaccaucgggauggccaaccugauccuccagaucggcaacaucaucuccaucuggaucagccacuccauccagcuggggaaccagaaccagacggagaccugcaaccagagcgugaucaccuacgagaacaacaccugggucaaccagacguacgugaacaucuccaacaccaacuucgcggccggccagagcguggucuccgugaagcuggccgggaacagcucccucugcccggugagcggcugggccaucuacuccaaggacaacagcauccgcaucggcuccaagggggacgucuucgugauccgggagcccuucaucagcugcagcccccuggagugccgcaccuucuuccugacccagggcgcccuccugaacgacaagcacuccaacgggacgaucaaggaccggucccccuaccgcacccugaugagcugcccgaucggcgaggugcccucccccuacaacagccgguucgagagcgucgcgugguccgccagcgccugccacgacgggaucaacuggcucaccaucggcaucuccggccccgacaacggggccguggcggugcugaaguacaacggcaucaucaccgacacgaucaagagcuggcgcaacaacauccugcggacccaggaguccgagugcgccugcgucaacgggagcugcuucaccgugaugaccgacggcccguccgacggccaggccagcuacaagaucuuccgcaucgagaaggggaagaucgugaaguccgucgagaugaacgcccccaacuaccacuacgaggagugcagcugcuaccccgacuccagcgagaucacgugcgugugccgggacaacuggcacggcuccaaccgccccugggugagcuucaaccagaaccucgaguaccagaucggguacaucugcuccggcaucuucggggacaacccgcggcccaacgacaagaccggcagcugcggccccgucuccagcaacggggccaacggcgugaagggguucuccuucaaguacggcaacgggguguggaucggccgcaccaagagcaucagcucccggaacggcuucgagaugaucugggaccccaacggguggaccggcacggacaacaacuucagcaucaagcaggacaucgucgggaucaacgagugguccggcuacagcggguccuucgugcagcacccggagcugaccggccuggacugcauccgccccugcuucuggguggagcucauccggggccgccccaaggagaacaccaucuggaccagcggguccagcaucuccuucugcggcgucaacagcgacacgguggggugguccuggcccgacggcgcggagcugccguucaccaucgacaaguga

SEQ ID NO: 82854 - RNA, 1410 nt, Artificial Sequence; identical to SEQ ID NO: 82050
  derived and/or modified CDS sequence (opt1) from neuraminidase__InfluenzaA__ADH01991

SEQ ID NO: 82855 - RNA, 1410 nt, Artificial Sequence; identical to SEQ ID NO: 82719
  derived and/or modified CDS sequence (opt1) from neuraminidase__InfluenzaA__ADH02011

SEQ ID NO: 82856 - RNA, 1410 nt, Artificial Sequence; identical to SEQ ID NO: 81939
  derived and/or modified CDS sequence (opt1) from neuraminidase__InfluenzaA__ADH02021

SEQ ID NO: 82857 - RNA, 1410 nt, Artificial Sequence; identical to SEQ ID NO: 80762
  derived and/or modified CDS sequence (opt1) from neuraminidase__InfluenzaA__ADI24510

SEQ ID NO: 82858 - RNA, 1410 nt, Artificial Sequence; identical to SEQ ID NO: 80762
  derived and/or modified CDS sequence (opt1) from neuraminidase__InfluenzaA__ADI24516

SEQ ID NO: 82859 - RNA, 1410 nt, Artificial Sequence; identical to SEQ ID NO: 80762
  derived and/or modified CDS sequence (opt1) from neuraminidase__InfluenzaA__ADI24518

SEQ ID NO: 82860 - RNA, 1410 nt, Artificial Sequence; identical to SEQ ID NO: 80762
  derived and/or modified CDS sequence (opt1) from neuraminidase__InfluenzaA__ADI24522

SEQ ID NO: 82861 - RNA, 1410 nt, Artificial Sequence; identical to SEQ ID NO: 80762
  derived and/or modified CDS sequence (opt1) from neuraminidase__InfluenzaA__ADI24524

SEQ ID NO: 82862 - RNA, 1410 nt, Artificial Sequence; identical to SEQ ID NO: 80762
  derived and/or modified CDS sequence (opt1) from neuraminidase__InfluenzaA__ADI24526

SEQ ID NO: 82863 - RNA, 1410 nt, Artificial Sequence; identical to SEQ ID NO: 80762
  derived and/or modified CDS sequence (opt1) from neuraminidase__InfluenzaA__ADI24528

SEQ ID NO: 82864 - RNA, 1410 nt, Artificial Sequence; identical to SEQ ID NO: 80762
  derived and/or modified CDS sequence (opt1) from neuraminidase__InfluenzaA__ADI24530

SEQ ID NO: 82865 - RNA, 1410 nt, Artificial Sequence
  derived and/or modified CDS sequence (opt1) from neuraminidase__InfluenzaA__ADI24532
augaaccccaaccagaagaucaucaccaucggcagcgugugcaugaccaucgggauggccaaccugauccuccagaucggcaacaucaucuccaucuggaucagccacuccauccagcuggggaaccagaaccagaucgagacgugcaaccagagcgucaucaccuacgagaacaacaccugggugaaccagaccuacgugaacaucuccaacacgaacuucgccgcgggccagagcgucguguccgugaagcuggccgggaacagcucccucugcccggucagcggcugggccaucuacuccaaggacaacagcauccgcaucggcuccaagggggacguguucgugauccgggagcccuucaucagcugcagcccccuggagugccgcaccuucuuccugacccagggcgcccuccugaacgacaagcacuccaacgggaccaucaaggaccggucccccuaccgcacgcugaugagcugcccgaucggcgagguccccucccccuacaacagccgguucgagagcguggccugguccgcgagcgccugccacgacgggaucaacuggcucaccaucggcaucuccggccccgacaacggggccguggccguccugaaguacaacggcaucaucaccgacaccaucaagagcuggcgcaacaacauccugcggacgcaggaguccgagugcgcgugcgugaacgggagcugcuucaccgugaugaccgacggcccguccgacggccaggccagcuacaagaucuuccgcaucgagaaggggaagaucgucaaguccguggagaugaacgcccccaacuaccacuacgaggagugcagcugcuaccccgacuccagcgagaucacgugcgugugccgggacaacuggcacggcuccaaccgccccugggucagcuucaaccagaaccucgaguaccagaucggguacaucugcuccggcaucuucggggacaacccgcggcccaacgacaagaccggcagcugcggccccguguccagcuccggggccaacggcgugaagggguucagcuucaaguacggcaacggggucuggaucggccgcaccaagagcaucuccagccggaacggcuucgagaugaucugggaccccaacggguggaccggcaccgacaacaacuucuccaucaagcaggacaucguggggaucaacgaguggagcggcuacuccgggagcuucgugcagcacccggagcugacgggccuggacugcauccgccccugcuucugggucgagcucauccggggccgccccaaggagaacaccaucuggaccuccgggagcuccaucagcuucugcggcgugaacuccgacaccgucggguggagcuggcccgacggcgccgagcugccguucacgaucgacaaguga

SEQ ID NO: 82866 - RNA, 1410 nt, Artificial Sequence; identical to SEQ ID NO: 80762
  derived and/or modified CDS sequence (opt1) from neuraminidase__InfluenzaA__ADI24538

SEQ ID NO: 82867 - RNA, 1410 nt, Artificial Sequence; identical to SEQ ID NO: 80762
  derived and/or modified CDS sequence (opt1) from neuraminidase__InfluenzaA__ADI24548

SEQ ID NO: 82868 - RNA, 1410 nt, Artificial Sequence; identical to SEQ ID NO: 80762
  derived and/or modified CDS sequence (opt1) from neuraminidase__InfluenzaA__ADI24556

SEQ ID NO: 82869 - RNA, 1410 nt, Artificial Sequence; identical to SEQ ID NO: 80762
  derived and/or modified CDS sequence (opt1) from neuraminidase__InfluenzaA__ADI24558

SEQ ID NO: 82870 - RNA, 1410 nt, Artificial Sequence; identical to SEQ ID NO: 80762
  derived and/or modified CDS sequence (opt1) from neuraminidase__InfluenzaA__ADI24560

SEQ ID NO: 82871 - RNA, 1410 nt, Artificial Sequence; identical to SEQ ID NO: 80762
  derived and/or modified CDS sequence (opt1) from neuraminidase__InfluenzaA__ADI24562

SEQ ID NO: 82872 - RNA, 1410 nt, Artificial Sequence; identical to SEQ ID NO: 80762
  derived and/or modified CDS sequence (opt1) from neuraminidase__InfluenzaA__ADI24564

SEQ ID NO: 82873 - RNA, 1410 nt, Artificial Sequence; identical to SEQ ID NO: 80762
  derived and/or modified CDS sequence (opt1) from neuraminidase__InfluenzaA__ADI24566

SEQ ID NO: 82874 - RNA, 1410 nt, Artificial Sequence; identical to SEQ ID NO: 80762
  derived and/or modified CDS sequence (opt1) from neuraminidase__InfluenzaA__ADI24568

SEQ ID NO: 82875 - RNA, 1410 nt, Artificial Sequence; identical to SEQ ID NO: 80762
  derived and/or modified CDS sequence (opt1) from neuraminidase__InfluenzaA__ADI24570

SEQ ID NO: 82876 - RNA, 1410 nt, Artificial Sequence; identical to SEQ ID NO: 80762
  derived and/or modified CDS sequence (opt1) from neuraminidase__InfluenzaA__ADI24572

SEQ ID NO: 82877 - RNA, 1410 nt, Artificial Sequence; identical to SEQ ID NO: 80762
  derived and/or modified CDS sequence (opt1) from neuraminidase__InfluenzaA__ADI24574

SEQ ID NO: 82878 - RNA, 1410 nt, Artificial Sequence; identical to SEQ ID NO: 80762
  derived and/or modified CDS sequence (opt1) from neuraminidase__InfluenzaA__ADI24576

SEQ ID NO: 82879 - RNA, 1410 nt, Artificial Sequence; identical to SEQ ID NO: 80762
  derived and/or modified CDS sequence (opt1) from neuraminidase__InfluenzaA__ADI24580

SEQ ID NO: 82880 - RNA, 1410 nt, Artificial Sequence; identical to SEQ ID NO: 81937
  derived and/or modified CDS sequence (opt1) from neuraminidase__InfluenzaA__ADI24582

SEQ ID NO: 82881 - RNA, 1410 nt, Artificial Sequence
  derived and/or modified CDS sequence (opt1) from neuraminidase__InfluenzaA__ADI24584
augaaccccaaccagaagaucaucaccaucggcagcgugugcaugaccaucgggauggccaaccugauccuccagaucggcaacaucaucuccaucuggaucagccacuccauccagcuggggaaccagaaccagaucgagacgugcaaccagagcgucaucaccuacgagaacaacaccugggugaaccagaccuacgugaacaucuccaacacgaacuucgccgcgggccagagcgucgugccggugaagcuggccgggaacuccagccucugccccgucaacggcugggccaucuacuccaaggacaacagcauccgcaucggcuccaagggggacguguucgugauccgggagcccuucaucagcugcagcccccuggagugccgcaccuucuuccugacccagggcgcccuccugaacgacaagcacuccaacgggaccaucaaggaccgguccccguaccgcacgcugaugagcugccccaucggcgagguccccucccccuacaacagccgguucgaguccguggccuggagcgcgagcgccugccacgacgggaucaacuggcucaccaucggcaucuccggcccggacaacggggccguggccguccugaaguacaacggcaucaucaccgacaccaucaagagcuggcgcaacaacauccugcggacgcaggaguccgagugcgcgugcgugaacgggagcugcuucaccgugaugaccgacggccccuccgacggccaggccagcuacaagaucuuccgcaucgagaaggggaagaucgucaaguccguggagaugaacgcccccaacuaccacuacgaggagugcagcugcuaccccgacuccagcgagaucacgugcgugugccgggacaacuggcacggcuccaaccgcccgugggucagcuucaaccagaaccucgaguaccagaucggguacaucugcuccggcaucuucggggacaacccccggcccaacgacaagaccggcagcugcggccccguguccagcaacggggccaacggcgugaagggguucuccuucaaguacggcaacggggucuggaucggccgcaccaagagcaucuccagccggaacggcuucgagaugaucugggacccgaacggguggaccggcaccgacaacaacuucagcaucaagcaggacaucguggggaucaacgagugguccggcuacagcggguccuucgugcagcaccccgagcugacgggccuggacugcauccgccccugcuucugggucgagcucauccggggccgccccaaggagaacaccaucuggaccagcggguccagcaucuccuucugcggcgugaacagcgacaccgucgggugguccuggccggacggcgccgagcugcccuucacgaucgacaaguga

SEQ ID NO: 82882 - RNA, 1410 nt, Artificial Sequence; identical to SEQ ID NO: 81116
  derived and/or modified CDS sequence (opt1) from neuraminidase__InfluenzaA__ADI24592

SEQ ID NO: 82883 - RNA, 1410 nt, Artificial Sequence; identical to SEQ ID NO: 80762
  derived and/or modified CDS sequence (opt1) from neuraminidase__InfluenzaA__ADI24598

SEQ ID NO: 82884 - RNA, 1410 nt, Artificial Sequence; identical to SEQ ID NO: 80762
  derived and/or modified CDS sequence (opt1) from neuraminidase__InfluenzaA__ADI24604

SEQ ID NO: 82885 - RNA, 1410 nt, Artificial Sequence; identical to SEQ ID NO: 80762
  derived and/or modified CDS sequence (opt1) from neuraminidase__InfluenzaA__ADI24620

SEQ ID NO: 82886 - RNA, 1410 nt, Artificial Sequence; identical to SEQ ID NO: 80762
  derived and/or modified CDS sequence (opt1) from neuraminidase__InfluenzaA__ADI24622

SEQ ID NO: 82887 - RNA, 1410 nt, Artificial Sequence; identical to SEQ ID NO: 81116
  derived and/or modified CDS sequence (opt1) from neuraminidase__InfluenzaA__ADI46780

SEQ ID NO: 82888 - RNA, 1410 nt, Artificial Sequence
  derived and/or modified CDS sequence (opt1) from neuraminidase__InfluenzaA__ADI46789
augaaccccaaccagaagaucaucaccaucggcagcgugugcaugaccaucgggauggccaaccugaugcuccagaucggcaacaucaucuccaucuggaucagccacuccauccagcuggggaaccagaaccagaucgagacgugcaaccagagcgucaucaccuacgagaacaacaccugggugaaccagaccuacgugaacaucuccaacacgaacuucgccgcgggccagagcgucguguccgugaagcuggccgggaacagcucccucugcccggucagcggcugggccaucuacuccaaggacaacagcgugcgcaucggcuccaagggggacguguucgucauccgggagcccuucaucagcugcagcccccuggagugccgcaccuucuuccugacccagggcgcccuccugaacgacaagcacuccaacgggaccaucaaggaccggucccccuaccgcacgcugaugagcugcccgaucggcgaggugcccucccccuacaacagccgguucgagagcguggccugguccgcgagcgccugccacgacgggaucaacuggcucaccaucggcaucuccggccccgacaacggggccgucgccgugcugaaguacaacggcaucaucaccgacaccaucaagagcuggcgcaacaacauccugcggacgcaggaguccgagugcgcgugcgugaacgggagcugcuucaccgucaugaccgacggcccguccaacgagcaggccagcuacaagaucuuccgcaucgagaagggcaagaucgugaaguccguggagaugaacgcccccaacuaccacuacgaggagugcagcugcuaccccgacuccagcgagaucacgugcgucugccgggacaacuggcacggguccaaccgccccugggugagcuucaaccagaaccucgaguaccagaucggcuacaucugcuccgggaucuucggcgacaacccgcggcccaacgacaagaccgggagcugcggccccguguccagcaacggcgccaacggggucaagggcuucuccuucaaguacgggaacggcguguggaucgggcgcaccaagagcaucagcucccggaacggcuucgagaugaucugggaccccaacggcuggaccgggaccgacaacaacuucagcaucaagcaggacaucgugggcaucaacgagugguccggguacagcggcuccuucguccagcacccggagcugacggggcuggacugcauccgccccugcuucuggguggagcucauccggggccgccccaaggagaacaccaucuggaccagcggcuccagcaucuccuucugcggggucaacagcgacaccgugggcugguccuggcccgacggggccgagcugccguucacgaucgacaaguga

SEQ ID NO: 82889 - RNA, 1410 nt, Artificial Sequence; identical to SEQ ID NO: 80762
  derived and/or modified CDS sequence (opt1) from neuraminidase__InfluenzaA__ADI48185

SEQ ID NO: 82890 - RNA, 1410 nt, Artificial Sequence; identical to SEQ ID NO: 80762
  derived and/or modified CDS sequence (opt1) from neuraminidase__InfluenzaA__ADI48187

SEQ ID NO: 82891 - RNA, 1410 nt, Artificial Sequence; identical to SEQ ID NO: 80762
  derived and/or modified CDS sequence (opt1) from neuraminidase__InfluenzaA__ADI48189

SEQ ID NO: 82892 - RNA, 1410 nt, Artificial Sequence; identical to SEQ ID NO: 80762
  derived and/or modified CDS sequence (opt1) from neuraminidase__InfluenzaA__ADI48191

SEQ ID NO: 82893 - RNA, 1410 nt, Artificial Sequence; identical to SEQ ID NO: 80762
  derived and/or modified CDS sequence (opt1) from neuraminidase__InfluenzaA__ADI48193

SEQ ID NO: 82894 - RNA, 1410 nt, Artificial Sequence; identical to SEQ ID NO: 80762
  derived and/or modified CDS sequence (opt1) from neuraminidase__InfluenzaA__ADI48195

SEQ ID NO: 82895 - RNA, 1410 nt, Artificial Sequence
  derived and/or modified CDS sequence (opt1) from neuraminidase__InfluenzaA__ADI48197
augaaccccaaccagaagaucaucaccaucggcagcgugugcaugaccaucgggauggccaaccugauccuccagaucggcaacaucaucuccaucuggaucagccacuccauccaguucgggaaccagaaccagaucgagacgugcaaccagagcgucaucaccuacgagaacaacaccugggugaaccagaccuacgugaacaucuccaacacgaacuucgccgcgggccagagcgucguguccgugaagcuggccgggaacagcucccugugcccggucagcggcugggccaucuacuccaaggacaacagcauccgcaucggcuccaagggggacguguucgugauccgggagcccuucaucagcugcagcccccucgagugccgcaccuucuuccugacccagggcgcccugcucaacgacaagcacuccaacgggaccaucaaggaccggucccccuaccgcacgcugaugagcugcccgaucggcgagguccccucccccuacaacagccgguucgagagcguggccugguccgcgagcgccugccacgacgggaucaacuggcugaccaucggcaucuccggccccgacaacggggccguggccguccucaaguacaacggcaucaucaccgacaccaucaagagcuggcgcaacaacauccugcggacgcaggaguccgagugcgcgugcgugaacgggagcugcuucaccgugaugaccgacggcccguccgacggccaggccagcuacaagaucuuccgcaucgagaaggggaagaucgucaaguccguggagaugaacgcccccaacuaccacuacgaggagugcagcugcuaccccgacuccagcgagaucacgugcgugugccgggacaacuggcacggcuccaaccgccccugggucagcuucaaccagaaccuggaguaccagaucggguacaucugcuccggcaucuucggggacaacccgcggcccaacgacaagaccggcagcugcggccccguguccagcaacggggccaacggcgugaagggguucuccuucaaguacggcaacggggucuggaucggccgcaccaagagcaucagcucccggaacggcuucgagaugaucugggaccccaacggguggaccggcaccgacaacaacuucagcaucaagcaggacaucguggggaucaacgagugguccggcuacagcggguccuucgugcagcacccggagcucacgggccuggacugcauccgccccugcuucugggucgagcugauccggggccgccccaaggagaacaccaucuggaccagcggguccagcaucuccuucugcggcgugaacagcgacaccgucgggugguccuggcccgacggcgccgagcucccguucacgaucgacaaguga

SEQ ID NO: 82896 - RNA, 1410 nt, Artificial Sequence; identical to SEQ ID NO: 80762
  derived and/or modified CDS sequence (opt1) from neuraminidase__InfluenzaA__ADI48199

SEQ ID NO: 82897 - RNA, 1410 nt, Artificial Sequence; identical to SEQ ID NO: 80762
  derived and/or modified CDS sequence (opt1) from neuraminidase__InfluenzaA__ADI48201

SEQ ID NO: 82898 - RNA, 1410 nt, Artificial Sequence; identical to SEQ ID NO: 80762
  derived and/or modified CDS sequence (opt1) from neuraminidase__InfluenzaA__ADI48203

SEQ ID NO: 82899 - RNA, 1410 nt, Artificial Sequence
  derived and/or modified CDS sequence (opt1) from neuraminidase__InfluenzaA__ADI48205
augaaccccaaccagaagaucaucaccaucggcagcgugugcaugaccaucgggauggccaaccugauccuccagaucggcaacaucaucuccaucuggaucagccacuccauccagcuggggaaccagaaccagaucgagacgugcaaccagagcgucaucaccuacgagaacaacaccugggugaaccagaccuacgugaacaucuccaacacgaacuucgccgcgggccagagcgucguguccgugaagcuggccgggaacagcucccucugcccggucagcggcugggccaucuacuccaaggacaacagcauccgcaucggcuccaagggggacguguucgugauccgggagcccuucaucagcugcucccaccuggagugccgcaccuucuuccugacccagggcgcccuccugaacgacaagcacagcaacgggaccaucaaggaccggucccccuaccgcacgcugaugagcugccccaucggcgaggucccgucccccuacaacagccgguucgagagcguggccugguccgcgagcgccugccacgacgggaucaacuggcucaccaucggcaucuccggccccgacaacggggccguggccguccugaaguacaacggcaucaucaccgacaccaucaagagcuggcgcaacaacauccugcggacgcaggaguccgagugcgcgugcgugaacgggagcugcuucaccgugaugaccgacggccccuccgacggccaggccagcuacaagaucuuccgcaucgagaaggggaagaucgucaaguccguggagaugaacgccccgaacuaccacuacgaggagugcagcugcuaccccgacuccagcgagaucacgugcgugugccgggacaacuggcacggcuccaaccgccccugggucagcuucaaccagaaccucgaguaccagaucggguacaucugcuccggcaucuucggggacaacccccggccgaacgacaagaccggcagcugcggccccguguccagcaacggggccaacggcgugaagggguucuccuucaaguacggcaacggggucuggaucggccgcaccaagagcaucagcucccggaacggcuucgagaugaucugggaccccaacggguggaccggcaccgacaacaacuucagcaucaagcaggacaucguggggaucaacgagugguccggcuacagcggguccuucgugcagcaccccgagcugacgggccuggacugcauccgcccgugcuucugggucgagcucauccggggccgccccaaggagaacaccaucuggaccagcggguccagcaucuccuucugcggcgugaacagcgacaccgucgggugguccuggcccgacggcgccgagcugcccuucacgaucgacaaguga

SEQ ID NO: 82900 - RNA, 1410 nt, Artificial Sequence; identical to SEQ ID NO: 80762
  derived and/or modified CDS sequence (opt1) from neuraminidase__InfluenzaA__ADI48207

SEQ ID NO: 82901 - RNA, 1410 nt, Artificial Sequence; identical to SEQ ID NO: 80762
  derived and/or modified CDS sequence (opt1) from neuraminidase__InfluenzaA__ADI48209

SEQ ID NO: 82902 - RNA, 1410 nt, Artificial Sequence; identical to SEQ ID NO: 80762
  derived and/or modified CDS sequence (opt1) from neuraminidase__InfluenzaA__ADI48211

SEQ ID NO: 82903 - RNA, 1410 nt, Artificial Sequence; identical to SEQ ID NO: 80762
  derived and/or modified CDS sequence (opt1) from neuraminidase__InfluenzaA__ADI48213

SEQ ID NO: 82904 - RNA, 1410 nt, Artificial Sequence; identical to SEQ ID NO: 80762
  derived and/or modified CDS sequence (opt1) from neuraminidase__InfluenzaA__ADI48215

SEQ ID NO: 82905 - RNA, 1410 nt, Artificial Sequence; identical to SEQ ID NO: 80762
  derived and/or modified CDS sequence (opt1) from neuraminidase__InfluenzaA__ADI48217

SEQ ID NO: 82906 - RNA, 1410 nt, Artificial Sequence; identical to SEQ ID NO: 80762
  derived and/or modified CDS sequence (opt1) from neuraminidase__InfluenzaA__ADI48219

SEQ ID NO: 82907 - RNA, 1410 nt, Artificial Sequence; identical to SEQ ID NO: 80762
  derived and/or modified CDS sequence (opt1) from neuraminidase__InfluenzaA__ADI48221

SEQ ID NO: 82908 - RNA, 1410 nt, Artificial Sequence; identical to SEQ ID NO: 80762
  derived and/or modified CDS sequence (opt1) from neuraminidase__InfluenzaA__ADI48625

SEQ ID NO: 82909 - RNA, 1410 nt, Artificial Sequence; identical to SEQ ID NO: 80762
  derived and/or modified CDS sequence (opt1) from neuraminidase__InfluenzaA__ADI48635

SEQ ID NO: 82910 - RNA, 1410 nt, Artificial Sequence; identical to SEQ ID NO: 80762
  derived and/or modified CDS sequence (opt1) from neuraminidase__InfluenzaA__ADI48655

SEQ ID NO: 82911 - RNA, 1410 nt, Artificial Sequence; identical to SEQ ID NO: 80762
  derived and/or modified CDS sequence (opt1) from neuraminidase__InfluenzaA__ADI48665

SEQ ID NO: 82912 - RNA, 1410 nt, Artificial Sequence
  derived and/or modified CDS sequence (opt1) from neuraminidase__InfluenzaA__ADI48675
augaaccccaaccagaagaucaucaccaucggcagcgugugcaugaccaucgggauggccaaccugauccuccagaucggcaacaucaucuccaucuggaucagccacuccauccagcuggggaaccagaaccagaucgagacgugcaaccagagcgucaucaccuacgagaacaacaccugggugaaccagaccuacgugaacaucuccaacacgaacuucgccgcgggccagagcgucguguccgugaagcuggccgggaacagcucccucugcccggucagcggcugggccaucuacuccaaggacaacagcauccgcaucggcuccaagggggacguguucgugauccgggagcccuucaucagcugcagcccccuggagugccgcaccuucuuccugacccagggcgcccuccugaacgacaagcacuccaacgggaccaucaaggaccggucccccuaccgcacgcugaugagcugcccgaucggcgagguccccucccccuacaacagccgguucgagagcguggccugguccgcgagcgccugccacgacgggaucaacuggcucaccaucggcaucuccggccccgacaacggggccguggccguccugaaguacaacggcaucaucaccgacaccaucaagagcuggcgcaacaacauccugcggacgcaggaguccgagugcgcgugcgugaacgggagcugcuucaccgugaugaccgacggcccguccgacggccaggccagcuacaagaucuuccgcaucgagaaggggaagaucgucaaguccguggagaugaacgcccccaacuaccacuacgaggagugcagcugcuaccccgacuccagcgagaucacgugcgugugccgggacaacuggcacggcuccaaccgccccugggucagcuucaaccagaaccucgaguaccagaucggguacaucugcuccggcaucuucggggacaacccgcggcccaacgacaagaccggcagcugcggccccguguccagcaacggggccaacggcgugaagggguucuccuucaaguacggcaacggggucuggaucggccgcaccaagagcaucagcucccggaacggcuucgagaugaucugggaccccaacggguggaccggcaccgacaacaacuucagcaucaagcaggacaucguggggaucaacgagugguccggcuacagcggguccuucgugcagcacccggagcugacgggccuggacugcauccgccccugcuucugggucgagcucauccggggccgccugaaggagaacaccaucuggaccagcggguccagcaucuccuucugcggcgugaacagcgacaccgucgggugguccuggcccgacggcgccgagcugcccuucacgaucgacaaguga

SEQ ID NO: 82913 - RNA, 1410 nt, Artificial Sequence
  derived and/or modified CDS sequence (opt1) from neuraminidase__InfluenzaA__ADI48685
augaaccccaaccagaagaucaucaccaucggcagcgugugcaugaccaucgggauggccaaccugauccuccagaucggcaacaucaucuccaucuggaucagccacuccauccagcuggggaaccagaaccagaucgagacgugcaaccagagcgucaucaccuacgagaacaacaccugggugaaccagaccuacgugaacaucuccaacacgaacuucgccgcgggccagagcgucguguccgugaagcuggccgggaacagcucccucugcccggucagcggcugggccaucuacuccaaggacaacagcauccgcaucggcuccaagggggacguguucgugauccgggagcccuucaucagcugcagcccccuggagugccgcaccuucuuccugacccagggcgcccuccugaacgacaagcacuccaacgggaccaucaaggaccggucccccuaccgcacgcugaugagcugcccgaucggcgagguccccucccccuacaacagccgguucgagagcguggccugguccgcgagcgccugccacgacgggaucaacuggcucaccaucggcaucuccggccccgacaacggggccguggccguccugaaguacaacggcaucaucaccgacaccaucaagagcuggcgcaacaacauccugcggacgcaggaguccgagugcgcgugcgugaacggggccugcuucaccgugaugaccgacggcccgagcgacggccaggccuccuacaagaucuuccgcaucgagaaggggaagaucgucaagagcguggagaugaacgcccccaacuaccacuacgaggagugcuccugcuaccccgacagcuccgagaucacgugcgugugccgggacaacuggcacggcagcaaccgccccugggucuccuucaaccagaaccucgaguaccagaucggguacaucugcagcggcaucuucggggacaacccgcggcccaacgacaagaccggcuccugcggccccgugagcuccaacggggccaacggcgugaagggguucagcuucaaguacggcaacggggucuggaucggccgcaccaaguccaucagcagccggaacggcuucgagaugaucugggaccccaacggguggaccggcaccgacaacaacuucuccaucaagcaggacaucguggggaucaacgaguggagcggcuacuccgggagcuucgugcagcacccggagcugacgggccuggacugcauccgccccugcuucugggucgagcucauccggggccgccccaaggagaacaccaucuggaccuccgggagcuccaucagcuucugcggcgugaacuccgacaccgucggguggagcuggcccgacggcgcggagcugccguucacgaucgacaaguga

SEQ ID NO: 82914 - RNA, 1410 nt, Artificial Sequence; identical to SEQ ID NO: 80762
  derived and/or modified CDS sequence (opt1) from neuraminidase__InfluenzaA__ADI48695

SEQ ID NO: 82915 - RNA, 1410 nt, Artificial Sequence; identical to SEQ ID NO: 80752
  derived and/or modified CDS sequence (opt1) from neuraminidase__InfluenzaA__ADI48705

SEQ ID NO: 82916 - RNA, 1410 nt, Artificial Sequence; identical to SEQ ID NO: 80762
  derived and/or modified CDS sequence (opt1) from neuraminidase__InfluenzaA__ADI48715

SEQ ID NO: 82917 - RNA, 1410 nt, Artificial Sequence; identical to SEQ ID NO: 80762
  derived and/or modified CDS sequence (opt1) from neuraminidase__InfluenzaA__ADI48725

SEQ ID NO: 82918 - RNA, 1410 nt, Artificial Sequence; identical to SEQ ID NO: 80762
  derived and/or modified CDS sequence (opt1) from neuraminidase__InfluenzaA__ADI48735

SEQ ID NO: 82919 - RNA, 1410 nt, Artificial Sequence; identical to SEQ ID NO: 80762
  derived and/or modified CDS sequence (opt1) from neuraminidase__InfluenzaA__ADI48745

SEQ ID NO: 82920 - RNA, 1410 nt, Artificial Sequence
  derived and/or modified CDS sequence (opt1) from neuraminidase__InfluenzaA__ADI48755
augaaccccaaccagaagaucaucaccaucggcagcgugugcaugaccaucgggauggccaaccugauccuccagaucggcaacaucaucuccaucuggaucagccacuccauccagcuggggaaccagaaccagaucgagacgugcaaccagagcgucaucaccuacgagaacaacaccugggugaaccagaccuacgugaacaucuccaacacgaacuucgccgcgggccagagcgucguguccgugaagcuggccgggaacagcucccucugcccggucagcggcugggccaucuacuccaaggacaacagcauccgcaucggcuccaagggggacguguucgugauccgggagcccuucaucagcugcagcccccuggagugccgcaccuucuuccugacccagggcgcccuccugaacgacaagcacuccaacgggaccaucaaggaccggucccccuaccgcacgcugaugagcugcccgaucggcgagguccccucccccuacaacagccgguucgagagcguggccugguccgcgagcgccugccacgacgggaucaacuggcucaccaucggcaucuccggccccgacaacggggccguggccguccugaaguacaacggcaucaucagcgacaccaucaaguccuggcgcaacaacauccugcggacccaggagagcgagugcgcgugcgugaacggguccugcuucacggugaugaccgacggcccgagcgacggccaggccuccuacaagaucuuccgcaucgagaaggggaagaucgucaagagcguggagaugaacgcccccaacuaccacuacgaggagugcuccugcuaccccgacagcuccgagaucacgugcgugugccgggacaacuggcacggcagcaaccgccccugggucuccuucaaccagaaccucgaguaccagaucggguacaucugcagcggcaucuucggggacaacccgcggcccaacgacaagaccggcuccugcggccccgugagcuccaacggggccaacggcgugaagggguucagcuucaaguacggcaacggggucuggaucggccgcaccaagagcaucuccagccggaacggcuucgagaugaucugggaccccaacggguggaccggcaccgacaacaacuucuccaucaagcaggacaucguggggaucaacgaguggagcggcuacuccgggagcuucgugcagcacccggagcugaccggccuggacugcauccgccccugcuucugggucgagcucauccggggccgccccaaggagaacacgaucuggaccuccgggagcuccaucagcuucugcggcgugaacuccgacaccgucggguggagcuggcccgacggcgccgagcugccguucaccaucgacaaguga

SEQ ID NO: 82921 - RNA, 1410 nt, Artificial Sequence; identical to SEQ ID NO: 80762
  derived and/or modified CDS sequence (opt1) from neuraminidase__InfluenzaA__ADI48765

SEQ ID NO: 82922 - RNA, 1410 nt, Artificial Sequence; identical to SEQ ID NO: 80762
  derived and/or modified CDS sequence (opt1) from neuraminidase__InfluenzaA__ADI48775

SEQ ID NO: 82923 - RNA, 1410 nt, Artificial Sequence; identical to SEQ ID NO: 80762
  derived and/or modified CDS sequence (opt1) from neuraminidase__InfluenzaA__ADI48785

SEQ ID NO: 82924 - RNA, 1410 nt, Artificial Sequence; identical to SEQ ID NO: 80762
  derived and/or modified CDS sequence (opt1) from neuraminidase__InfluenzaA__ADI48795

SEQ ID NO: 82925 - RNA, 1410 nt, Artificial Sequence; identical to SEQ ID NO: 80762
  derived and/or modified CDS sequence (opt1) from neuraminidase__InfluenzaA__ADI49032

SEQ ID NO: 82926 - RNA, 1410 nt, Artificial Sequence; identical to SEQ ID NO: 80762
  derived and/or modified CDS sequence (opt1) from neuraminidase__InfluenzaA__ADI49243

SEQ ID NO: 82927 - RNA, 1410 nt, Artificial Sequence; identical to SEQ ID NO: 80762
  derived and/or modified CDS sequence (opt1) from neuraminidase__InfluenzaA__ADI49263

SEQ ID NO: 82928 - RNA, 1410 nt, Artificial Sequence; identical to SEQ ID NO: 80762
  derived and/or modified CDS sequence (opt1) from neuraminidase__InfluenzaA__ADI49273

SEQ ID NO: 82929 - RNA, 1410 nt, Artificial Sequence; identical to SEQ ID NO: 80762
  derived and/or modified CDS sequence (opt1) from neuraminidase__InfluenzaA__ADI49283

SEQ ID NO: 82930 - RNA, 1410 nt, Artificial Sequence; identical to SEQ ID NO: 80762
  derived and/or modified CDS sequence (opt1) from neuraminidase__InfluenzaA__ADI49315

SEQ ID NO: 82931 - RNA, 1410 nt, Artificial Sequence; identical to SEQ ID NO: 80762
  derived and/or modified CDS sequence (opt1) from neuraminidase__InfluenzaA__ADI49325

SEQ ID NO: 82932 - RNA, 1410 nt, Artificial Sequence; identical to SEQ ID NO: 80762
  derived and/or modified CDS sequence (opt1) from neuraminidase__InfluenzaA__ADI49335

SEQ ID NO: 82933 - RNA, 1410 nt, Artificial Sequence
  derived and/or modified CDS sequence (opt1) from neuraminidase__InfluenzaA__ADI49345
augaaccccaaccagaagaucaucaccaucggcagcgugugcaugaccaucgggauggccaaccugauccuccagaucggcaacaucaucuccaucuggaucagccacuccauccagcuggggaaccagaaccagaucgagacgugcaaccagagcgucaucaccuacgagaacaacaccugggugaaccagaccuacgugaacaucuccaacacgaaccuggccgcgggccagagcgucguguccgugaagcucgccgggaacagcucccugugcccggucagcggcugggccaucuacuccaaggacaacagcauccgcaucggcuccaagggggacguguucgugauccgggagcccuucaucagcugcagcccccuggagugccgcaccuucuuccucacccagggcgcccugcugaacgacaagcacuccaacgggaccaucaaggaccggucccccuaccgcacgcucaugagcugcccgaucggcgacguccccucccccuacaacagccgguucgagagcguggccugguccgcgagcgccugccacgacgggaucaacuggcugaccaucggcaucuccggccccgacaacggggccguggccguccugaaguacaacggcaucaucaccgacaccaucaagagcuggcgcaacaacauccuccggacgcaggaguccgagugcgcgugcgugaacgggagcugcuucaccgugaugaccgacggcccguccgacggccaggccagcuacaagaucuuccgcaucgagaaggggaagaucgucaaguccguggagaugaacgcccccaacuaccacuacgaggagugcagcugcuaccccgacuccagcgagaucacgugcgugugccgggacaacuggcacggcuccaaccgccccugggucagcuucaaccagaaccuggaguaccagaucggguacaucugcuccggcaucuucggggacaacccgcggcccaacgacaagaccggcagcugcggccccguguccagcaacggggccaacggcgugaagggguucuccuucaaguacggcaacggggucuggaucggccgcaccaagagcaucagcucccggaacggcuucgagaugaucugggaccccaacggguggaccggcaccgacaacaacuucagcaucaagcaggacaucguggggaucaacgagugguccggcuacagcggguccuucgugcagcacccggagcugacgggccucgacugcauccgccccugcuucugggucgagcugauccggggccgccccaaggagaacaccaucuggaccagcggguccagcaucuccuucugcggcgugaacagcgacaccgucgggugguccuggcccgacggcgccgagcugccguucacgaucgacaaguga

SEQ ID NO: 82934 - RNA, 1410 nt, Artificial Sequence; identical to SEQ ID NO: 80762
  derived and/or modified CDS sequence (opt1) from neuraminidase__InfluenzaA__ADI49355

SEQ ID NO: 82935 - RNA, 1410 nt, Artificial Sequence; identical to SEQ ID NO: 80762
  derived and/or modified CDS sequence (opt1) from neuraminidase__InfluenzaA__ADI49365

SEQ ID NO: 82936 - RNA, 1410 nt, Artificial Sequence; identical to SEQ ID NO: 80762
  derived and/or modified CDS sequence (opt1) from neuraminidase__InfluenzaA__ADI49375

SEQ ID NO: 82937 - RNA, 1410 nt, Artificial Sequence; identical to SEQ ID NO: 80762
  derived and/or modified CDS sequence (opt1) from neuraminidase__InfluenzaA__ADI49385

SEQ ID NO: 82938 - RNA, 1410 nt, Artificial Sequence
  derived and/or modified CDS sequence (opt1) from neuraminidase__InfluenzaA__ADI49395
augaaccccaaccagaagaucaucaccaucggcagcgugugcaugaccaucgggauggccaaccugauccuccagaucggcaacaugaucuccaucuggaucagccacuccauccagcuggggaaccagaaccagaucgagacgugcaaccagagcgucaucaccuacgagaacaacaccugggugaaccagaccuacgugaacaucuccaacacgaacuucgccgcgggccagagcgucguguccgugaagcuggccgggaacagcucccucugcccggucagcggcugggccaucuacuccaaggacaacagcauccgcaucggcuccaagggggacguguucgugauccgggagcccuucaucagcugcagcccccuggagugccgcaccuucuuccugacccagggcgcccuccugaacgacaagcacuccaacgggaccaucaaggaccggucccccuaccgcacgcugaugagcugcccgaucggcgagguccccucccccuacaacagccgguucgagagcguggccugguccgcgagcgccugccacgacgggaucaacuggcucaccaucggcaucuccggccccgacaacggggccguggccguccugaaguacaacggcaucaucaccgacaccaucaagagcuggcgcaacaacauccugcggacgcaggaguccgagugcgcgugcgugaacgggagcugcuucaccgugaugaccgacggcccguccgacggccaggccagcuacaagaucuuccgcaucgagaaggggaagaucgucaaguccguggagcucaacgcccccaacuaccacuacgaggagugcagcugcuaccccgacuccagcgagaucacgugcgugugccgggacaacuggcacggcuccaaccgccccugggucagcuucaaccagaaccuggaguaccagaucggguacaucugcuccggcaucuucggggacaacccgcggcccaacgacaagaccggcagcugcggccccguguccagcaacggggccaacggcgugaagggguucuccuucaaguacggcaacggggucuggaucggccgcaccaagagcaucagcucccggaacggcuucgagaugaucugggaccccaacggguggaccggcaccgacaacaacuucagcaucaagcaggacaucguggggaucaacgagugguccggcuacagcggguccuucgugcagcacccggagcugacgggccucgacugcauccgccccugcuucugggucgagcugauccggggccgccccaaggagaacaccaucuggaccagcggguccagcaucuccuucugcggcgugaacagcgacaccgucgggugguccuggcccgacggcgccgagcugccguucacgaucgacaaguga

SEQ ID NO: 82939 - RNA, 1410 nt, Artificial Sequence; identical to SEQ ID NO: 80762
  derived and/or modified CDS sequence (opt1) from neuraminidase__InfluenzaA__ADI49720

SEQ ID NO: 82940 - RNA, 1410 nt, Artificial Sequence; identical to SEQ ID NO: 80762
  derived and/or modified CDS sequence (opt1) from neuraminidase__InfluenzaA__ADI49730

SEQ ID NO: 82941 - RNA, 1410 nt, Artificial Sequence; identical to SEQ ID NO: 80762
  derived and/or modified CDS sequence (opt1) from neuraminidase__InfluenzaA__ADI49740

SEQ ID NO: 82942 - RNA, 1410 nt, Artificial Sequence; identical to SEQ ID NO: 80762
  derived and/or modified CDS sequence (opt1) from neuraminidase__InfluenzaA__ADI49750

SEQ ID NO: 82943 - RNA, 1410 nt, Artificial Sequence; identical to SEQ ID NO: 80762
  derived and/or modified CDS sequence (opt1) from neuraminidase__InfluenzaA__ADI49760

SEQ ID NO: 82944 - RNA, 1410 nt, Artificial Sequence; identical to SEQ ID NO: 80792
  derived and/or modified CDS sequence (opt1) from neuraminidase__InfluenzaA__ADI49780

SEQ ID NO: 82945 - RNA, 1410 nt, Artificial Sequence; identical to SEQ ID NO: 80752
  derived and/or modified CDS sequence (opt1) from neuraminidase__InfluenzaA__ADI49790

SEQ ID NO: 82946 - RNA, 1410 nt, Artificial Sequence; identical to SEQ ID NO: 80762
  derived and/or modified CDS sequence (opt1) from neuraminidase__InfluenzaA__ADI49821

SEQ ID NO: 82947 - RNA, 1410 nt, Artificial Sequence; identical to SEQ ID NO: 80752
  derived and/or modified CDS sequence (opt1) from neuraminidase__InfluenzaA__ADI50029

SEQ ID NO: 82948 - RNA, 1410 nt, Artificial Sequence
  derived and/or modified CDS sequence (opt1) from neuraminidase__InfluenzaA__ADI52830
augaaccccaaccagaagaucaucaccaucggcagcgugugcaugaccaucgggauggccaaccugauccuccagaucggcaacaucaucuccaucuggaucagccacuccauccagcuggggaaccagaaccagaucgagacgugcaaccagagcgucaucaccuacgagaacaacaccugggugaaccagaccuacgugaacaucuccaacacgaacuucgccgcgggccagagcgucguguccgugaagcuggccgggaacagcucccucugcccggucagcggcugggccaucuacuccaaggacaacagcgugcgcaucggcuccaagggggacguguucgucauccgggagcccuucaucagcugcagcccccuggagugccgcaccuucuuccugacccagggcgcccuccugaacgacaagcacuccaacgggaccaucaaggaccggucccccuaccgcacgcugaugagcugcccgaucggcgaggugcccucccccuacaacagccgguucgagagcguggccugguccgcgagcgccugccacgacgggaucaacuggcucaccaucggcaucuccggccccgacaacggggccgucgccgugcugaaguacaacggcaucaucaccgacaccaucaagagcuggcgcaacaacauccugcggacgcaggaguccgagugcgcgugcgugaacgggagcugcuucaccgucaugaccgacggcccguccgacggccaggccagcuacaagaucuuccgcaucgagaaggggaagaucgugaaguccguggagaugaacgcccccaacuaccacuacgaggagugcagcugcuaccccgacuccagcgagaucacgugcgucugccgggacaacuggcacggcuccaaccgccccugggugagcuucaaccagaaccucgaguaccagaucggguacaucugcuccggcaucuucggggacaacccgcggcccaacgacaagaccggcagcugcggccccguguccagcaacggggccaacggcgucaagggguucuccuucaaguacggcaacgggguguggaucggccgcaccaagagcaucagcucccggaacggcuucgagaugaucugggaccccaacggguggaccggcaccgacaacaacuucagcaucaagcaggacaucguggggaucaacgagugguccggcuacagcggguccuucguccagcacccggagcugacgggccuggacugcauccgccccugcuucuggguggagcucauccggggccgccccaaggagaacaccaucuggaccagcggguccagcaucuccuucugcggcgucaacagcgacaccguggggugguccuggcccgacggcgacgagcugccguucacgaucgacaaguga

SEQ ID NO: 82949 - RNA, 1410 nt, Artificial Sequence
  derived and/or modified CDS sequence (opt1) from neuraminidase__InfluenzaA__ADI52831
augaaccccaaccagaagaucaucaccaucggcagcgugugcaugaccaucgggauggccaaccugauccuccagaucggcaacaucaucuccaucuggaucagccacuccauccagcuggggaaccagaaccagaucgagacgugcaaccagagcgucaucaccuacgagaacaacaccugggugaaccagaccuacgugaacaucuccaacacgaacuucgccgcgggccagagcgucguguccgugaagcuggccgggaacagcucccucugcccggucagcggcugggccaucuacuccaaggacaacagcauccgcaucggcuccaagggggacguguucgugauccgggagcccuucaucagcugcagcccccuggagugccgcaccuucuuccugacccagggcgcccuccugaacgacaagcacuccaacgggaccaucaaggaccggucccccuaccgcacgcugaugagcugcccgaucggcgagguccccucccccuacaacagccgguucgagagcguggccugguccgcgagcgccugccacgacgggaucaacuggcucaccaucggcaucuccggccccgacaacggggccguggccguccugaaguacaacggcaucaucaccgacaccaucaagagcuggcgcaacaacauccugcggacgcaggaguccgagugcgcgugcgugaacgggagcugcuucaccgugaugaccgacggcccguccgacggccaggccagcuacaagaucuuccgcaucgagaaggggaagaucgucaaguccguggagaugaacgcccccaacuaccacuacgaggagugcagcugcuaccccgacuccagcgagaucacgugcgugugccgggacaacuggcacggcuccaaccgccccugggucagcuucaaccagaaccucgaguaccagaucggguacaucugcuccggcaucuucggggacaacccgcggcccaacgacaagaccggcagcugcggccccguguccagcaacggggccaacggcgugaagggguucuccuucaaguacggcaacggggucuggaucggccgcaccaagagcgugagcucccggaacggcuucgagaugaucugggaccccaacggguggaccggcaccgacaacaacuucagcaucaagcaggacaucguggggaucaacgagugguccggcuacagcggguccuucguccagcacccggagcugacgggccuggacugcauccgccccugcuucuggguggagcucauccggggccgccccaaggagaacaccaucuggaccagcggguccagcaucuccuucugcggcgucaacagcgacaccguggggugguccuggcccgacggcgccgagcugccguucacgaucgacaaguga

SEQ ID NO: 82950 - RNA, 1410 nt, Artificial Sequence; identical to SEQ ID NO: 80762
  derived and/or modified CDS sequence (opt1) from neuraminidase__InfluenzaA__ADI52832

SEQ ID NO: 82951 - RNA, 1410 nt, Artificial Sequence
  derived and/or modified CDS sequence (opt1) from neuraminidase__InfluenzaA__ADI52833
augaaccccaaccagaagaucaucaccaucggcagcgugugcaugaccaucgggauggccaaccugauccuccagaucggcaacaucaucuccaucuggaucagccacuccauccagcuggggaaccagaaccagaucgagacgugcaaccagagcgucaucaccuacgagaacaacaccugggugaaccagaccuacgugaacaucuccaacacgaacuucgccgcgggccagagcgucguguccgugaagcuggccgggaacagcucccucugcccggucagcggcugggccaucuacuccaaggacaacagcauccgcaucggcuccaagggggacguguucgugauccgggagcccuucaucagcugcagcccccuggagugccgcaccuucuuccugacccagggcgcccuccugaacgacaagcacuccaacgggaccaucaaggaccggucccccuaccgcacgcugaugagcugcccgaucggcgaggcccccucccccuacaacagccgguucgagagcgucgcgugguccgccagcgccugccacgacgggaucaacuggcucaccaucggcaucuccggccccgacaacggggccguggcggugcugaaguacaacggcaucaucaccgacaccaucaagagcuggcgcaacaacauccugcggacgcaggaguccgagugcgccugcgucaacgggagcugcuucaccgugaugaccgacggcccguccgacggccaggccagcuacaagaucuuccgcaucgagaaggggaagaucgugaaguccgucgagaugaacgcccccaacuaccacuacgaggagugcagcugcuaccccgacuccagcgagaucacgugcgugugccgggacaacuggcacggcuccaaccgccccugggugagcuucaaccagaaccucgaguaccagaucggguacaucugcuccggcaucuucggggacaacccgcggcccaacgacaagaccggcagcugcggccccgucuccagcaacggggccaacggcgugaagggguucuccuucaaguacggcaacgggguguggaucggccgcaccaagagcaucagcucccggaacggcuucgagaugaucugggaccccaacggguggaccggcaccgacaacaacuucagcaucaagcaggacaucgucgggaucaacgagugguccggcuacagcggguccuucgugcagcacccggagcugacgggccuggacugcauccgccccugcuucuggguggagcucauccggggccgccccaaggagaacaccaucuggaccagcggguccagcaucuccuucugcggcgucaacagcgacaccguggggugguccuggcccgacggcgcggagcugccguucacgaucgacaaguga

SEQ ID NO: 82952 - RNA, 1413 nt, Artificial Sequence; identical to SEQ ID NO: 81485
  derived and/or modified CDS sequence (opt1) from neuraminidase__InfluenzaA__ADI75821

SEQ ID NO: 82953 - RNA, 1410 nt, Artificial Sequence; identical to SEQ ID NO: 81929
  derived and/or modified CDS sequence (opt1) from neuraminidase__InfluenzaA__ADI75832

SEQ ID NO: 82954 - RNA, 1413 nt, Artificial Sequence
  derived and/or modified CDS sequence (opt1) from neuraminidase__InfluenzaA__ADI75854
augaaccccaaccagaagaucaucaccaucggcagcaucuccaucgccaucgggaucaucagccugaugcuccagaucggcuccaucaucagcaucugggccucccacagcauccagaccgggucccagaacaacacgggcaucugcaaccagcgcaucaucaccuacgagaacagcaccugggugaaccacaccuacgucaacaucaacaacacgaacgugguggcgggggaggacaagaccuccgucacccuggccggcaacagcucccugugcagcaucuccggcugggccaucuacaccaaggacaacagcauccggaucggguccaagggcgacguguucgugauccgcgagccguucaucagcugcucccaccucgagugccggacguucuuccugacccagggggcccugcucaacgacaagcacagcaacggcaccgucaaggaccgcucccccuaccgggcccugaugagcugcccccugggggaggcgcccagcccguacaacuccaaguucgagagcguggccugguccgccagcgccugccacgacggcaugggcuggcucaccaucgggaucuccggccccgacaacggggcgguggccguccugaaguacaacggcaucaucacgggcaccaucaagagcuggaagaagcagauccugcgcacccaggaguccgagugcgugugcaugaacgggagcugcuucaccaucaugacggacggccccuccaacaaggccgccagcuacaagaucuucaagaucgagaaggggaaggugaccaaguccaucgagcucaacgcccccaacuucuacuacgaggagugcagcugcuacccggacaccggcaucgucaugugcgugugccgggacaacuggcacggguccaaccgccccugggugagcuucaaccagaaccuggacuaccagaucggcuacaucugcuccggcgucuucggggacaacccccggcccgaggacggcgaggggagcugcaacccggugaccguggacggcgcgaacggggucaagggcuucuccuacaaguacggcaacgggguguggaucggccgcaccaagagcaaccggcugcgcaagggguucgagaugaucugggaccccaacggcuggacgaacaccgacuccgacuucagcgugaagcaggacgucguggccaucaccgacuggagcggguacuccggcagcuucgugcagcaccccgagcucacgggccuggacugcauccggcccugcuucugggucgagcuggugcgcgggcucccgcgggagaacaccaccaucuggaccuccggcagcuccaucagcuucugcggggucaacuccgacacggccaacuggagcuggcccgacggcgccgagcugcccuucaccaucgacaaguga

SEQ ID NO: 82955 - RNA, 1410 nt, Artificial Sequence
  derived and/or modified CDS sequence (opt1) from neuraminidase__InfluenzaA__ADI75876
augaaccccaaccagaagaucaucaccaucggcagcgugucccugaccaucagcacgaucugcuucuucaugcagaucgccauccucaucaccaccgucacccugcacuucaagcaguacgaguucaacuccccgcccaacaaccaggugaugcugugcgagcccacgaucaucgagcgcaacaucaccgagaucguguaccucaccaacaccacgaucgagaaggaggucugccccaagcuggccgaguaccggaacuggagcaagccgcagugcgacaucaccggguucgcgcccuucuccaaggacaacagcauccgccuguccgccggcggggacaucugggugacccgggagcccuacgugagcugcgaccccgacaagugcuaccaguucgcccucggccaggggaccacgcugaacaacguccacuccaacaacaccgugcgcgaccggaccccguaccgcacccugcucaugaacgagcugggcgugcccuuccaccugggcacgaagcaggucugcaucgccuggagcuccagcuccugccacgacgggaaggccuggcuccacgugugcaucaccggcgacgacaagaacgcgaccgccagcuucaucuacaacgggcggcugguggacuccgucgugagcugguccaaggagauccugcgcacccaggagagcgagugcgugugcaucaacggcacgugcaccgucgugaugaccgacggguccgccagcggcaaggccgacaccaagauccucuucaucgaggagggcaagaucgugcacacgagcacccuguccgggagcgcgcagcacgucgaggagugcuccugcuacccccgguaccccggcgugcgcugcgugugccgggacaacuggaaggggagcaaccgcccgaucgucgacaucaacaucaaggaccacuccguggugagcuccuacgucugcagcggccuggugggcgacacgccccggaagaacgacuccagcuccagcucccacugccucgaccccaacaacgaggagggcgggcacggggucaagggcugggccuucgacgacgggaacgacguguggaugggccgcaccaucagcgagaagucccggcugggcuacgagaccuucaaggugaucgagggguggagcaaccacaaguccaagcugcagaucaaccgccaggucaucguggaccggggcaaccgcagcggguacuccggcaucuucagcguggagggcaagagcugcaucaaccggugcuucuacgucgagcucauccgcgggcggaaggaggagaccgaggugcuguggaccuccaacagcaucguggucuucugcggcaccuccgggacguacggcaccgggagcuggcccgacggcgccgaccugaaccucaugccgaucuga

SEQ ID NO: 82956 - RNA, 1410 nt, Artificial Sequence; identical to SEQ ID NO: 81929
  derived and/or modified CDS sequence (opt1) from neuraminidase__InfluenzaA__ADI75887

SEQ ID NO: 82957 - RNA, 1413 nt, Artificial Sequence; identical to SEQ ID NO: 81485
  derived and/or modified CDS sequence (opt1) from neuraminidase__InfluenzaA__ADI75909

SEQ ID NO: 82958 - RNA, 1410 nt, Artificial Sequence; identical to SEQ ID NO: 82508
  derived and/or modified CDS sequence (opt1) from neuraminidase__InfluenzaA__ADI75920

SEQ ID NO: 82959 - RNA, 1413 nt, Artificial Sequence; identical to SEQ ID NO: 81485
  derived and/or modified CDS sequence (opt1) from neuraminidase__InfluenzaA__ADI77352

SEQ ID NO: 82960 - RNA, 1410 nt, Artificial Sequence; identical to SEQ ID NO: 80762
  derived and/or modified CDS sequence (opt1) from neuraminidase__InfluenzaA__ADI77363

SEQ ID NO: 82961 - RNA, 1410 nt, Artificial Sequence; identical to SEQ ID NO: 81939
  derived and/or modified CDS sequence (opt1) from neuraminidase__InfluenzaA__ADI99500

SEQ ID NO: 82962 - RNA, 1410 nt, Artificial Sequence
  derived and/or modified CDS sequence (opt1) from neuraminidase__InfluenzaA__ADI99553
augaaccccaaccagaagaucaucaccaucggcagcgugugcaugaccaucgggauggccaaccugauccuccagaucggcaacaucaucuccaucuggaucagccacuccauccagcuggggaaccagaaccagaucgagacgugcaaccagagcgucaucaccuacgagaacaacaccugggugaaccagaccuacgugaacaucuccaacacgaacuucgccgcgggccagagcgucgacuccgugaagcuggccgggaacagcucccucugcccggugagcggcugggccaucuacuccaaggacaacagcauccgcaucggcuccaagggggacgucuucgugauccgggagcccuucaucagcugcagcccccuggagugccgcaccuucuuccugacccagggcgcccuccugaacgacaagcacuccaacgggaccaucaaggaccggucccccuaccgcacgcugaugagcugcccgaucggcgaggugcccucccccuacaacagccgguucgagagcgucgccugguccgcgagcgccugccacgacgggaucaacuggcucaccaucggcaucuccggccccgacaacggggccguggccgugcugaaguacaacggcaucaucaccgacaccaucaagagcuggcgcaacaacauccugcggacgcaggaguccgagugcgcgugcgucaacgggagcugcuucaccgugaugaccgacggcccguccgacggccaggccagcuacaagaucuuccgcaucgagaaggggaagaucgugaaguccgucgagaugaacgcccccaacuaccacuacgaggagugcagcugcuaccccgacuccagcgagaucacgugcgugugccgggacaacuggcacggcuccaaccgccccugggugagcuucaaccagaaccucgaguaccagaucggguacaucugcuccggcaucuucggggacaacccgcggcccaacgacaagaccggcagcugcggccccgucuccagcaacggggccaacggcgugaagggguucuccuucaaguacggcaacgggguguggaucggccgcaccaagagcaucagcucccggaacggcuucgagaugaucugggaccccaacggguggaccggcaccgacaacaacuucagcaucaagcaggacaucgucgggaucaacgagugguccggcuacagcggguccuucgugcagcacccggagcugacgggccuggacugcauccgccccugcuucuggguggagcucauccggggccgccccaaggagaacaccaucuggaccagcggguccagcaucuccuucugcggcgucaacagcgacaccguggggugguccuggcccgacggcgccgagcugccguucacgaucgacaaguga

SEQ ID NO: 82963 - RNA, 1410 nt, Artificial Sequence
  derived and/or modified CDS sequence (opt1) from neuraminidase__InfluenzaA__ADI99563
augaaccccaaccagaagaucaucaccaucggcagcgugugcaugaccaucgggauggccaaccugauccuccagaucggcaacaucaucuccaucuggaucagccacuccauccagcuggggaaccagaaccagaucgagacgugcaaccagagcgucaucaccuacgagaacaacaccugggugaaccagaccuacgugaacaucuccaacacgaacuucgccgcgggccagagcgucguguccgugaagcuggccgggaacagcucccucugcccggucagcggcugggccaucuacuccaaggacaacagcauccgcaucggcuccaagggggacguguucgugauccgggagcccuucaucagcugcagcccccuggagugccgcaccuucuuccugacccagggcgcccuccugaacgacaagcacuccaacgggaccaucaaggaccggucccccuaccgcacgcugaugagcugcccgaucggcgagguccccucccccuacaacagccgguucgagagcguggccugguccgcgagcgccugccacgacgggaucaacuggcucaccaucggcaucuccggccccgacaacggggccguggccguccugaaguacaacggcaucaucaccgacaccaucaagagcuggcgcaacaacauccugcggacgcaggaguccgagugcgcgugcgugaacgggagcugcuucaccgugaugaccgacggcccguccgacggccaggccagcuacaagaucuuccgcaucgagaaggggaagaucgucaaguccguggaggugaacgcccccaacuaccacuacgaggagugcagcugcuaccccgacuccagcgagaucacgugcgucugccgggacaacuggcacggcuccaaccgccccugggugagcuucaaccagaaccucgaguaccagaucggguacaucugcuccggcaucuucggggacaacccgcggcccaacgacaagaccggcagcugcggccccguguccagcaacggggccaacggcgucaagggguucuccuucaaguacggcaacgggguguggaucggccgcaccaagagcaucagcucccggaacggcuucgagaugaucugggaccccaacggguggaccggcaccgacaacaacuucagcaucaagcaggacaucguggggaucaacgagugguccggcuacagcggguccuucguccagcacccggagcugacgggccuggacugcauccgccccugcuucuggguggagcucauccggggccgccccaaggagaacaccaucuggaccagcggguccagcaucuccuucugcggcgucaacagcgacaccguggggugguccuggcccgacggcgccgagcugccguucacgaucgacaaguga

SEQ ID NO: 82964 - RNA, 1410 nt, Artificial Sequence; identical to SEQ ID NO: 82963
  derived and/or modified CDS sequence (opt1) from neuraminidase__InfluenzaA__ADI99573

SEQ ID NO: 82965 - RNA, 1410 nt, Artificial Sequence; identical to SEQ ID NO: 82963
  derived and/or modified CDS sequence (opt1) from neuraminidase__InfluenzaA__ADI99583

SEQ ID NO: 82966 - RNA, 1410 nt, Artificial Sequence; identical to SEQ ID NO: 82113
  derived and/or modified CDS sequence (opt1) from neuraminidase__InfluenzaA__ADI99593

SEQ ID NO: 82967 - RNA, 1410 nt, Artificial Sequence
  derived and/or modified CDS sequence (opt1) from neuraminidase__InfluenzaA__ADI99613
augaaccccaaccagaagaucaucaccaucggcagcgugugcaugaccaucgggauggccaaccugauccuccagaucggcaacaucaucuccaucuggaucagccacuccauccagcuggggaaccagaaccagaucgagacgugcaaccagagcgucaucaccuacgagaacaacaccugggugaaccagaccuacgugaacaucuccaacacgaacuucgccgcgggccagagcgucguguccgugaagcuggccgggaacagcucccucugcccggucagcggcugggccaucuacuccaaggacaacagcauccgcaucggcuccaagggggacguguucgugauccgggagcccuucaucagcugcagcccccuggagugccgcaccuucuuccugacccagggcgcccuccugaacgacaagcacuccaacgggaccaucaaggaccggucccccuaccgcacgcugaugagcugcccgaucggcgagguccccucccccuacaacagccgguucgagagcguggccugguccgcgagcgccugccacgacgggaucaacuggcucaccaucggcaucuccggccccgacaacggggccguggccguccugaaguacaacggcaucaucaccgacaccaucaagagcuggcgcaacaacauccugcggacgcaggaguccgagugcgcgugcgugaacgggagcugcuucaccgugaugaccgacggcccguccgacggccaggccagcuacaagaucuuccgcaucgagaaggggaagaucgucaaguccguggagaugaacgcccccaacuaccacuacgaggagugcagcugcuaccccgacuccagcgagaucacgugcgugugccgggacaacuggcacggcuccaaccgccccugggucagcuucaaccagaaccucgaguaccagaucggguacaucugcuccggcaucuucggggacaacccgcggcccaacgacaagaccggcagcugcggccccguguccagcaacggggccaacggcgugaagggguucuccuucaaguacggcaacggggucuggaucggccgcaccaagagcaucagcucccggaacggcuucgagaugaucugggaccccaacggguggaccggcaccgacaacaacuucagcaucaagcaggacaucguggggaucaacgagugguccggcuacagcggguccuucgugcagcacccggagcugacgggccuggacugcauccgccccugcuucugggucgagcucauccggggccgccccaaggagaacaccaucuggaccagcggguccaucaucagcuucugcggcgugaacuccgacaccgucggguggagcuggcccgacggcgccgagcugccguucacgaucgacaaguga

SEQ ID NO: 82968 - RNA, 1410 nt, Artificial Sequence
  derived and/or modified CDS sequence (opt1) from neuraminidase__InfluenzaA__ADI99623
augaaccccaaccagaagaucaucaccaucggcagcgugugcaugaccaucgggauggccaaccugauccuccagaucggcaacaucaucuccaucuggaucagccacuccauccagcuggggaaccagaaccagaucgagacgugcaaccagagcgucaucaccuacgagaacaacaccugggugaaccagaccuacgugaacaucuccaacacgaacuucgccgcgggccagagcgucguguccaugaagcuggccgggaacagcucccucugcccggugagcggcugggccaucuacuccaaggacaacagcauccgcaucggcuccaagggggacgucuucgugauccgggagcccuucaucagcugcagcccccuggagugccgcaccuucuuccugacccagggcgcccuccugaacgacaagcacuccaacgggaccaucaaggaccggucccccuaccgcacgcugaugagcugcccgaucggcgaggugcccucccccuacaacagccgguucgagagcgucgccugguccgcgagcgccugccacgacgggaucaacuggcucaccaucggcaucuccggccccgacaacggggccguggccgugcugaaguacaacggcaucaucaccgacaccaucaagagcuggcgcaacaacauccugcggacgcaggaguccgagugcgcgugcgucaacgggagcugcuucaccgugaugaccgacggcccguccgacggccaggccagcuacaagaucuuccgcaucgagaaggggaagaucgugaaguccgucgagaugaacgcccccaacuaccacuacgaggagugcagcugcuaccccgacuccaacgagaucacgugcgugugccgggacaacuggcacggcagcaaccgccccuggguguccuucaaccagaaccucgaguaccagaucggguacaucugcagcggcaucuucggggacaacccgcggcccaacgacaagaccggcuccugcggccccgucagcuccaacggggccaacggcgugaagggguucagcuucaaguacggcaacgggguguggaucggccgcaccaaguccaucagcagccggaacggcuucgagaugaucugggaccccaacggguggaccggcaccgacaacaacuucuccaucaagcaggacaucgucgggaucaacgaguggagcggcuacuccgggagcuucgugcagcacccggagcugacgggccuggacugcauccgccccugcuucuggguggagcucauccggggccgccccaaggagaacaccaucuggaccuccgggagcuccaucagcuucugcggcgucaacuccgacaccgugggguggagcuggcccgacggcgccgagcugccguucacgaucgacaaguga

SEQ ID NO: 82969 - RNA, 1410 nt, Artificial Sequence; identical to SEQ ID NO: 82050
  derived and/or modified CDS sequence (opt1) from neuraminidase__InfluenzaA__ADI99633

SEQ ID NO: 82970 - RNA, 1410 nt, Artificial Sequence; identical to SEQ ID NO: 82113
  derived and/or modified CDS sequence (opt1) from neuraminidase__InfluenzaA__ADI99643

SEQ ID NO: 82971 - RNA, 1410 nt, Artificial Sequence; identical to SEQ ID NO: 80762
  derived and/or modified CDS sequence (opt1) from neuraminidase__InfluenzaA__ADI99653

SEQ ID NO: 82972 - RNA, 1410 nt, Artificial Sequence; identical to SEQ ID NO: 80762
  derived and/or modified CDS sequence (opt1) from neuraminidase__InfluenzaA__ADI99663

SEQ ID NO: 82973 - RNA, 1410 nt, Artificial Sequence; identical to SEQ ID NO: 80762
  derived and/or modified CDS sequence (opt1) from neuraminidase__InfluenzaA__ADI99673

SEQ ID NO: 82974 - RNA, 1410 nt, Artificial Sequence; identical to SEQ ID NO: 80762
  derived and/or modified CDS sequence (opt1) from neuraminidase__InfluenzaA__ADI99683

SEQ ID NO: 82975 - RNA, 1410 nt, Artificial Sequence; identical to SEQ ID NO: 82224
  derived and/or modified CDS sequence (opt1) from neuraminidase__InfluenzaA__ADI99703

SEQ ID NO: 82976 - RNA, 1410 nt, Artificial Sequence; identical to SEQ ID NO: 80762
  derived and/or modified CDS sequence (opt1) from neuraminidase__InfluenzaA__ADI99713

SEQ ID NO: 82977 - RNA, 1410 nt, Artificial Sequence; identical to SEQ ID NO: 80762
  derived and/or modified CDS sequence (opt1) from neuraminidase__InfluenzaA__ADI99723

SEQ ID NO: 82978 - RNA, 1410 nt, Artificial Sequence; identical to SEQ ID NO: 80762
  derived and/or modified CDS sequence (opt1) from neuraminidase__InfluenzaA__ADI99733

SEQ ID NO: 82979 - RNA, 1410 nt, Artificial Sequence; identical to SEQ ID NO: 80917
  derived and/or modified CDS sequence (opt1) from neuraminidase__InfluenzaA__ADJ00487

SEQ ID NO: 82980 - RNA, 1410 nt, Artificial Sequence; identical to SEQ ID NO: 80917
  derived and/or modified CDS sequence (opt1) from neuraminidase__InfluenzaA__ADJ00488

SEQ ID NO: 82981 - RNA, 1410 nt, Artificial Sequence; identical to SEQ ID NO: 80917
  derived and/or modified CDS sequence (opt1) from neuraminidase__InfluenzaA__ADJ00489

SEQ ID NO: 82982 - RNA, 1410 nt, Artificial Sequence; identical to SEQ ID NO: 80917
  derived and/or modified CDS sequence (opt1) from neuraminidase__InfluenzaA__ADJ00490

SEQ ID NO: 82983 - RNA, 1410 nt, Artificial Sequence; identical to SEQ ID NO: 80917
  derived and/or modified CDS sequence (opt1) from neuraminidase__InfluenzaA__ADJ00491

SEQ ID NO: 82984 - RNA, 1410 nt, Artificial Sequence; identical to SEQ ID NO: 80762
  derived and/or modified CDS sequence (opt1) from neuraminidase__InfluenzaA__ADJ18160

SEQ ID NO: 82985 - RNA, 1410 nt, Artificial Sequence; identical to SEQ ID NO: 80762
  derived and/or modified CDS sequence (opt1) from neuraminidase__InfluenzaA__ADJ18161

SEQ ID NO: 82986 - RNA, 1410 nt, Artificial Sequence
  derived and/or modified CDS sequence (opt1) from neuraminidase__InfluenzaA__ADJ18162
augauccccaaccagaagaucaucaccaucggcagcgugugcaugaccaucgggauggccaaccugauccuccagaucggcaacaucaucuccaucuggaucagccacuccauccagcuggggaaccagaaccagaucgagacgugcaaccagagcgucaucaccuacgagaacaacaccugggugaaccagaccuacgugaacaucuccaacacgaacuucgccgcgggccagagcgucguguccgugaagcuggccgggaacagcucccucugcccggucagcggcugggccaucuacuccaaggacaacagcauccgcaucggcuccaagggggacguguucgugauccggaagcccuucaucagcugcagcccccuggagugccgcaccuucuuccugacccagggcgcccuccugaacgacaagcacuccaacgggaccaucaaggaccggucccccuaccgcacgcugaugagcugcccgaucggcgagguccccucccccuacaacagccgguucgagagcguggccugguccgcgagcgccugccacgacgggaucaacuggcucaccaucggcaucuccggccccgacaacggggccguggccguccugaaguacaacggcaucaucaccgacaccaucaagagcuggcgcaacaacauccugcggacgcaggaguccgagugcgcgugcgugaacgggagcugcuucaccgugaugaccgacggcccguccgacggccaggccagcuacaagaucuuccgcaucgagaaggggaagaucgucaaguccguggagaugaacgcccccaacuaccacuacgaggagugcagcugcuaccccgacuccagcgagaucacgugcgugugccgggacaacuggcacggcuccaaccgccccugggucagcuucaaccagaaccucgaguaccagaucggguacaucugcuccggcaucuucggggacaacccgcggcccaacgacaagaccggcagcugcggccccguguccagcaacggggccaacggcgugaagggguucuccuucaaguacggcaacggggucuggaucggccgcaccaagagcaucagcucccggaacggcuucgagaugaucugggaccccaacggguggaccggcaccgacaacaacuucagcaucaagcaggacaucguggggaucaacgagugguccggcuacagcggguccuucgugcagcacccggagcugacgggccuggacugcauccgccccugcuucugggucgagcucauccggggccgccccaaggagaacaccaucuggaccagcggguccagcaucuccuucugcggcgugaacagcgacaccgucgggugguccuggcccgacggcgccgagcugccguucacgaucgacaaguga

SEQ ID NO: 82987 - RNA, 1410 nt, Artificial Sequence
  derived and/or modified CDS sequence (opt1) from neuraminidase__InfluenzaA__ADJ18164
augaaccccaagcagaagaucaucaccaucggcagcgugugcaugaccaucgggauggccaaccugauccuccagaucggcaacaucaucuccaucuggaucagccacuccauccagcuggggaaccagaaccagaucgagacgugcaaccagagcgucaucaccuacgagaacaacaccugggugaaccagaccuacgugaacaucuccaacacgaacuucgccgcgggccagagcgucguguccgugaagcuggccgggaacagcucccucugcagcgucuccggcugggccaucuacagcaaggacaacuccauccgcaucggcagcaagggggacguguucgugauccgggagccguucaucuccugcagcccccuggagugccgcaccuucuuccugacccagggcgcccuccugaacgacaagcacuccaacgggaccaucaaggaccggagccccuaccgcacgcugauguccugccccaucggcgaggucccgagccccuacaacagccgguucgaguccguggccuggagcgcguccgccugccacgacgggaucaacuggcucaccaucggcaucagcggccccgacaacggggccguggccguccugaaguacaacggcaucaucaccgacaccaucaaguccuggcgcaacaacauccugcggacgcaggagagcgagugcgcgugcgugaacggguccugcuucaccgugaugaccgacggccccagcgacggccaggccuccuacaagaucuuccgcaucgagaaggggaagaucgucaagagcguggagaugaacgccccgaacuaccacuacgaggagugcuccugcuaccccgacagcuccgagaucacgugcgugugccgggacaacuggcacggcagcaaccgccccugggucuccuucaaccagaaccucgaguaccagaucggguacaucugcagcggcaucuucggggacaacccccggccgaacgacaagaccggcuccugcggccccgugagcuccaacggggccaacggcgugaagggguucagcuucaaguacggcaacggggucuggaucggccgcaccaagagcaucuccagccggaacggcuucgagaugaucugggaccccaacggguggaccggcaccgacaacaacuucuccaucaagcaggacaucguggggaucaacgaguggagcggcuacuccgggagcuucgugcagcaccccgagcugacgggccuggacugcauccgcccgugcuucugggucgagcucauccggggccgccccaaggagaacaccaucuggaccuccgggagcuccaucagcuucugcggcgugaacuccgacaccgucggguggagcuggcccgacggcgccgagcugcccuucacgaucgacaaguga

SEQ ID NO: 82988 - RNA, 1410 nt, Artificial Sequence; identical to SEQ ID NO: 80762
  derived and/or modified CDS sequence (opt1) from neuraminidase__InfluenzaA__ADJ18166

SEQ ID NO: 82989 - RNA, 1410 nt, Artificial Sequence; identical to SEQ ID NO: 80762
  derived and/or modified CDS sequence (opt1) from neuraminidase__InfluenzaA__ADJ18168

SEQ ID NO: 82990 - RNA, 1410 nt, Artificial Sequence; identical to SEQ ID NO: 80762
  derived and/or modified CDS sequence (opt1) from neuraminidase__InfluenzaA__ADJ18170

SEQ ID NO: 82991 - RNA, 1410 nt, Artificial Sequence
  derived and/or modified CDS sequence (opt1) from neuraminidase__InfluenzaA__ADJ18172
augaaccccaaccagaagaucaucaccaucggcagcgugugcaugaccaucgggauggccaaccugauccuccgcaucggcaacaucaucuccaucuggaucagccacuccauccagcuggggaaccagaaccagaucgagacgugcaaccagagcgucaucaccuacgagaacaacaccugggugaaccagaccuacgugaacaucuccaacacgaacuucgccgcgggccagagcgucguguccgugaagcuggccgggaacagcucccucugcccggucagcggcugggccaucuaccggaaggacaacuccauccgcaucggcagcaagggggacguguucgugauccgggagcccuucaucuccugcagcccccuggagugccgcaccuucuuccugacccagggcgcccuccugaacgacaagcacuccaacgggaccaucaaggaccggagccccuaccgcacgcugauguccugcccgaucggcgagguccccagccccuacaacucccgguucgagagcguggccuggagcgcguccgccugccacgacgggaucaacuggcucaccaucggcaucagcggccccgacaacggggccguggccguccugaaguacaacggcaucaucaccgacaccaucaaguccuggcgcaacaacauccugcggacgcaggagagcgagugcgcgugcgugaacggguccugcuucaccgugaugaccgacggcccgagcgacggccaggccuccuacaagaucuuccgcaucgagaaggggaagaucgucaagagcguggagaugaacgcccccaacuaccacuacgaggagugcuccugcuaccccgacagcuccgagaucacgugcgugugccgggacaacuggcacggcagcaaccgccccugggucuccuucaaccagaaccucgaguaccagaucggguacaucugcagcggcaucuucggggacaacccgcggcccaacgacaagaccggcuccugcggccccgugagcuccaacggggccaacggcgugaagggguucagcuucaaguacggcaacggggucuggaucggccgcaccaaguccaucagcagccggaacggcuucgagaugaucugggaccccaacggguggaccggcaccgacaacaacuucuccaucaagcaggacaucguggggaucaacgaguggagcggcuacuccgggagcuucgugcagcacccggagcugacgggccuggacugcauccgccccugcuucugggucgagcucauccggggccgccccaaggagaacaccaucuggaccuccgggagcuccaucagcuucugcggcgugaacuccgacaccgucggguggagcuggcccgacggcgccgagcugccguucacgaucgacaaguga

SEQ ID NO: 82992 - RNA, 1410 nt, Artificial Sequence; identical to SEQ ID NO: 80762
  derived and/or modified CDS sequence (opt1) from neuraminidase__InfluenzaA__ADJ18174

SEQ ID NO: 82993 - RNA, 1410 nt, Artificial Sequence
  derived and/or modified CDS sequence (opt1) from neuraminidase__InfluenzaA__ADJ18176
augaaccccaaccagaagaucaucaccaucggcagcgugugcaugaccaucgggauggccaaccugauccuccagaucggcaacaucaucuccaucuggaucagccuguccauccagcuggggaaccagaaccagaucgagacgugcaaccagagcgucaucaccuacgagaacaacaccugggugaaccagaccuacgugaacaucuccaacacgaacuucgccgcgggccagagcgucguguccgugaagcucgccgggaacagcucccugugcccggucagcggcugggccaucuacuccaaggacaacagcauccgcaucggcuccaagggggacguguucgugauccgggagcccuucaucagcugcagcccccuggagugccgcaccuucuuccucacccagggcgcccugcugaacgacaagcacuccaacgggaccaucaaggaccggucccccuaccgcacgcucaugagcugcccgaucggcgagguccccucccccuacaacagccgguucgagagcguggccugguccgcgagcgccugccacgacgggaucaacuggcugaccaucggcaucuccggccccgacaacggggccguggccguccugaaguacaacggcaucaucaccgacaccaucaagagcuggcgcaacaacauccuccggacgcaggaguccgagugcgcgugcgugaacgggagcugcuucaccgugaugaccgacggcccguccgacggccaggccagcuacaagaucuuccgcaucgagaaggggaagaucgucaaguccguggagaugaacgcccccaacuaccacuacgaggagugcagcugcuaccccgacuccagcgagaucacgugcgugugccgggacaacuggcacggcuccaaccgccccugggucagcuucaaccagaaccuggaguaccagaucggguacaucugcuccggcaucuucggggacaacccgcggcccaacgacaagaccggcagcugcggccccguguccagcaacggggccaacggcgugaagggguucuccuucaaguacggcaacggggucuggaucggccgcaccaagagcaucagcucccggaacggcuucgagaugaucugggaccccaacggguggaccggcaccgacaacaacuucagcaucaagcaggacaucguggggaucaacgagugguccggcuacagcggguccuucgugcagcacccggagcugacgggccucgacugcauccgccccugcuucugggucgagcugauccggggccgccccaaggagaacaccaucuggaccagcggguccagcaucuccuucugcggcgugaacagcgacaccgucgggugguccuggcccgacggcgccgagcugccguucacgaucgacaaguga

SEQ ID NO: 82994 - RNA, 1410 nt, Artificial Sequence; identical to SEQ ID NO: 80535
  derived and/or modified CDS sequence (opt1) from neuraminidase__InfluenzaA__ADJ37250

SEQ ID NO: 82995 - RNA, 1410 nt, Artificial Sequence
  derived and/or modified CDS sequence (opt1) from neuraminidase__InfluenzaA__ADJ37252
augaaccccaaccagaagaucaucaccaucggcagcgugucccugaccaucagcacgaucugcuucuucaugcagaucgccauccucgucaccaccgugacccugcacuucaagcaguacgaguucaacuccccgcccaacaaccaggugaugcugugcgagcccacgaucaucgagcgcaacaucaccgagaucgucuaccucaccaacaccacgaucgagaaggagaucugccccaagcuggccgaguaccggaacuggagcaagccgcagugcgacaucaccggguucgcgcccuucuccaaggacaacagcauccgccuguccgccggcggggacaucugggugacccgggagcccuacgugagcugcgaccccgacaagugcuaccaguucgcccucggccaggggaccacgcugaacaacguccacuccaacaacaucgugcgcgaccggaccccguaccgcacccugcucaugaacgagcugggcgugcccuuccaccugggcaccaagcaggucugcaucgccuggagcuccagcuccugccacgacgggaaggccuggcuccacgugugcaucacgggcgacgacaagaacgcgaccgccagcuucaucuacaacgggcggcugguggacuccgucgugagcugguccaaggacauccugcgcacccaggagagcgagugcgugugcaucaacgggaccugcacggucgugaugaccgacggguccgccagcggcaaggccgacaccaagauccucuucaucgaggagggcaagaucgugcacaccagcacgcuguccgggagcgcgcagcacgucgaggagugcuccugcuacccccgguaccccggcgugcgcugcgugugccgggacaacuggaaggggagcaaccgcccgaucgucgacaucaacaucaaggaccacuccaucgugagcuccuacgugugcagcggccuggucggcgacacgccccggaagaacgacuccagcuccagcucccacugccucgaccccaacaacgaggagggcggccacggggugaagggcugggccuucgacgacgggaacgacgucuggaugggccgcaccaucagcgagaagucccggcugggcuacgagaccuucaaggugaucgagggguggagcaaccccaaguccaagcugcagaucaaccgccaggugaucgucgaccggggcaaccgcagcggguacuccggcaucuucagcguggagggcaagagcugcaucaaccggugcuucuacguggagcucauccgcgggcggaaggaggagaccgagguccuguggaccuccaacagcaucgugguguucugcggcaccuccgggaccuacggcacggggagcuggccggacggcgccaacaucaaccugaugcccaucuga

SEQ ID NO: 82996 - RNA, 1410 nt, Artificial Sequence; identical to SEQ ID NO: 80762
  derived and/or modified CDS sequence (opt1) from neuraminidase__InfluenzaA__ADJ37263

SEQ ID NO: 82997 - RNA, 1410 nt, Artificial Sequence; identical to SEQ ID NO: 80752
  derived and/or modified CDS sequence (opt1) from neuraminidase__InfluenzaA__ADJ37273

SEQ ID NO: 82998 - RNA, 1410 nt, Artificial Sequence; identical to SEQ ID NO: 80762
  derived and/or modified CDS sequence (opt1) from neuraminidase__InfluenzaA__ADJ40447

SEQ ID NO: 82999 - RNA, 1410 nt, Artificial Sequence; identical to SEQ ID NO: 80762
  derived and/or modified CDS sequence (opt1) from neuraminidase__InfluenzaA__ADJ40457

SEQ ID NO: 83000 - RNA, 1410 nt, Artificial Sequence; identical to SEQ ID NO: 82113
  derived and/or modified CDS sequence (opt1) from neuraminidase__InfluenzaA__ADJ40467

SEQ ID NO: 83001 - RNA, 1410 nt, Artificial Sequence
  derived and/or modified CDS sequence (opt1) from neuraminidase__InfluenzaA__ADJ40477
augaaccccaaccagaagaucaucaccaucggcagcgugugcaugaccaucgggauggccaaccugauccuccagaucggcaacaucaucuccaucuggaucagccacuccauccagcuggggaaccagaaccagaucgagacgugcaaccagagcgucaucaccuacgagaacaacaccugggugaaccagaccuacgugaacaucuccaacacgaacuucgccgcgggccagagcgucguguccgugaagcuggccgggaacagcucccucugcccggucagcggcugggccaucuacuccaaggacaacagcauccgcaucggcuccaagggggacguguucgugauccgggagcccuucaucagcugcagcccccuggagugccgcaccuucuuccugacccagggcgcccuccugaacgacaagcacuccaacgggaccaucaaggaccggucccccuaccgcacgcugaugagcugcccgaucggcgagguccccucccccuacaacagccgguucgagagcguggccugguccgcgagcgccugccacgacgggaucaacuggcucaccaucggcaucuccggccccgacaacggggccguggccguccugaaguacaacggcaucaucaccgacaccaucaagagcuggcgcaacaacauccugcggacgcaggaguccgagugcgcgugcgugaacgggagcugcuucaccgugaugaccgacggcccguccgacggccaggccagcuacaagaucuuccgcaucgagaaggggaagaucgucaaguccguggagaugaacgcccccaacuacuacuacgaggagugcagcugcuaccccgacuccagcgagaucacgugcgugugccgggacaacuggcacggcuccaaccgccccugggucagcuucaaccagaaccucgaguaccagaucggguacaucugcuccggcaucuucggggacaacccgcggcccaacgacaagaccggcagcugcggccccguguccagcaacggggccaacggcgugaagggguucuccuucaaguacggcaacggggucuggaucggccgcaccaagagcaucagcucccggaacggcuucgagaugaucugggaccccaacggguggaccggcaccgacaacaacuucagcaucaagcaggacaucguggggaucaacgagugguccggcuacagcggguccuucgugcagcacccggagcugacgggccuggacugcauccgccccugcuucugggucgagcucauccggggccgccccaaggagaacaccaucuggaccagcggguccagcaucuccuucugcggcgugaacagcgacaccauggggugguccuggcccgacggcgccgagcugccguucacgaucgacaaguga

SEQ ID NO: 83002 - RNA, 1410 nt, Artificial Sequence; identical to SEQ ID NO: 80762
  derived and/or modified CDS sequence (opt1) from neuraminidase__InfluenzaA__ADJ40487

SEQ ID NO: 83003 - RNA, 1410 nt, Artificial Sequence; identical to SEQ ID NO: 80762
  derived and/or modified CDS sequence (opt1) from neuraminidase__InfluenzaA__ADJ40507

SEQ ID NO: 83004 - RNA, 1410 nt, Artificial Sequence; identical to SEQ ID NO: 80762
  derived and/or modified CDS sequence (opt1) from neuraminidase__InfluenzaA__ADJ40517

SEQ ID NO: 83005 - RNA, 1410 nt, Artificial Sequence; identical to SEQ ID NO: 80762
  derived and/or modified CDS sequence (opt1) from neuraminidase__InfluenzaA__ADJ40527

SEQ ID NO: 83006 - RNA, 1410 nt, Artificial Sequence
  derived and/or modified CDS sequence (opt1) from neuraminidase__InfluenzaA__ADJ40537
augaaccccaaccagaagaucaucaccaucggcagcgugugcaugaccaucgggauggccaaccugauccuccagaucggcaacaucaucuccaucuggaucagccacuccauccagcuggggaaccagaaccagaucgagacgugcaaccagagcgucaucaccuacgagaacaacaccugggugaaccagaccuacgugaacaucuccaacacgaacuucgccgcgggccagagcggggucuccgugaagcuggccggcaacagcucccucugcccggugagcggcugggccaucuacuccaaggacaacagcauccgcaucggguccaagggcgacgucuucgugauccgggagcccuucaucagcugcagcccccuggagugccgcaccuucuuccugacccagggggcccuccugaacgacaagcacuccaacggcaccaucaaggaccggucccccuaccgcacgcugaugagcugcccgaucggggaggugcccucccccuacaacagccgguucgagagcgucgccugguccgcgagcgccugccacgacggcaucaacuggcucaccaucggcaucuccgggcccgacaacggcgccguggccgugcugaaguacaacgggaucaucaccgacaccaucaagagcuggcgcaacaacauccugcggacgcaggaguccgagugcgcgugcgucaacggcagcugcuucaccgugaugaccgacggcccguccgacgggcaggccagcuacaagaucuuccgcaucgagaagggcaagaucgugaaguccgucgagaugaacgcccccaacuaccacuacgaggagugcagcugcuaccccgacuccagcgagaucacgugcgugugccgggacaacuggcacggguccaaccgccccugggugagcuucaaccagaaccucgaguaccagaucggcuacaucugcuccgggaucuucggcgacaacccgcggcccaacgacaagaccggcagcugcgggcccgucuccagcaacggcgccaacggggugaagggcuucuccuucaaguacgggaacggcguguggaucggccgcaccaagagcaucagcucccggaacggguucgagaugaucugggaccccaacggcuggaccgggaccgacaacaacuucagcaucaagcaggacaucgucggcaucaacgagugguccggguacagcggcuccuucgugcagcacccggagcugacgggccuggacugcauccgccccugcuucuggguggagcucauccgggggcgccccaaggagaacaccaucuggaccagcggcuccagcaucuccuucugcggggucaacagcgacaccgugggcugguccuggcccgacggcgccgagcugccguucacgaucgacaaguga

SEQ ID NO: 83007 - RNA, 1410 nt, Artificial Sequence
  derived and/or modified CDS sequence (opt1) from neuraminidase__InfluenzaA__ADJ40547
augaaccccaaccagaagaucaucaccaucggcagcgugugcaugaccaucgggauggccaaccugauccuccagaucggcaacaucaucuccaucuggaucagccacuccauccagcuggggaaccagaaccagaucgagacgugcaaccagagcgucaucaccuacgagaacaacaccugggugaaccagaccuacgugaacaucuccaacacgaacuucgccgcgggccagagcgucguguccgugaagcuggccgggaacagcucccucugcccggucagcggcugggccaucuacuccaaggacaacagcauccgcaucggcuccaagggggacguguucgugauccgggagcccuucaucagcugcagcccccuggagugccgcaccuucuuccugacccagggcgcccuccugaacgacaagcacuccaacgggaccaucaaggaccggucccccuaccgcacgcugaugagcugcccgaucggcgagguccccucccccuacaacagccgguucgagagcguggccugguccgcgagcgccugccacgacgggaucaacuggcucaccaucggcaucuccggccccgacaacggggccguggccguccugaaguacaacggcaucaucaccgacaccaucaagagcuggcgcaacaacauccugcggacgcaggaguccgagugcgcgugcgugaacgggagcugcuucaccgugaugaccgacggcccguccgacggccaggccagcuacaagaucuuccgcaucgagaaggggaagaucaucaaguccgucgagaugaacgcccccaacuaccacuacgaggagugcagcugcuaccccgacuccagcgagaucacgugcgugugccgggacaacuggcacggcuccaaccgccccugggugagcuucaaccagaaccucgaguaccagaucggguacaucugcuccggcaucuucggggacaacccgcggcccaacgacaagaccggcagcugcggccccgucuccagcaacggggccaacggcgugaagggguucuccuucaaguacggcaacgggguguggaucggccgcaccaagagcaucagcucccggaacggcuucgagaugaucugggaccccaacggguggaccggcaccgacaacaacuucagcaucaagcaggacaucaucgggaucaacgagugguccggcuacagcggguccuucguccagcacccggagcugacgggccuggacugcauccgccccugcuucuggguggagcucauccggggccgccccaaggagaacaccaucuggaccagcggguccagcaucuccuucugcggcgugaacagcgacaccgucgggugguccuggcccgacggcgccgagcugccguucacgaucgacaaguga

SEQ ID NO: 83008 - RNA, 1410 nt, Artificial Sequence; identical to SEQ ID NO: 80762
  derived and/or modified CDS sequence (opt1) from neuraminidase__InfluenzaA__ADJ40557

SEQ ID NO: 83009 - RNA, 1410 nt, Artificial Sequence; identical to SEQ ID NO: 80762
  derived and/or modified CDS sequence (opt1) from neuraminidase__InfluenzaA__ADJ40577

SEQ ID NO: 83010 - RNA, 1410 nt, Artificial Sequence; identical to SEQ ID NO: 80762
  derived and/or modified CDS sequence (opt1) from neuraminidase__InfluenzaA__ADJ40587

SEQ ID NO: 83011 - RNA, 1410 nt, Artificial Sequence
  derived and/or modified CDS sequence (opt1) from neuraminidase__InfluenzaA__ADJ40597
augaaccccaaccagaagaucaucaccaucggcagcgugugcaugaccaucgggauggccaaccugauccuccagaucggcaacaucaucuccaucuggaucagccacuccauccagcuggggaaccagaaccagaucgagacgugcaaccagagcgucaucaccuacgagaacaacaccugggugaaccagaccuacgugaacaucuccaacacgaacuucgccgcgggccagagcgucguguccgugaagcuggccgggaacagcucccucugcccggucagcggcugggccaucuacuccaaggacaacagcauccgcaucggcuccaagggggacguguucgugauccgggagcccuucaucagcugcagcccccuggagugccgcaccuucuuccugacccagggcgcccuccugaacgacaagcacuccaacgggaccaucaaggaccggucccccuaccgcacgcugaugagcugcccgaucggcgagguccccucccccuacaacagccgguucgagagcguggccugguccgcgagcgccugccacgacgggaucaacuggcucaccaucggcaucuccggccccgacaacggggccguggccguccugaaguacaacggcaucaucaccgacaccaucaagagcuggcgcaacaacauccugcggacgcaggaguccgagugcgcgugcgugaacgggagcugcuucaccgugaugaccgacggcccguccgacggccaggccagcuacaagaucuuccgcaucgagaaggggaagaucgucaaguccguggagaugaacgcccccaacuaccacuacgaggagugcagcugcuaccccgacuccagcgagaucacgugcgugugccgggacaacuggcacggcuccaaccgccccugggucagcuucaaccagaaccucgaguaccagaucggguacaucugcuccggcaucuucggggacaacccgcggcccaacgacaagaccggcagcugcggccccguguccagcaacggggccaacggcgugaagggguucuccuucaaguacggcaacggggucuggaucggccgcaccaagagcaucagcucccggaacggcuucgagaugaucugggaccccaacggguggaccggcaccgacaacaacuuccugaucaagcaggacaucguggggaucaacgaguggagcggcuacuccgggagcuucgugcagcacccggagcugacgggccucgacugcauccgccccugcuucugggucgagcugauccggggccgccccaaggagaacaccaucuggaccuccgggagcuccaucagcuucugcggcgugaacuccgacaccgucggguggagcuggcccgacggcgccgagcugccguucacgaucgacaaguga

SEQ ID NO: 83012 - RNA, 1410 nt, Artificial Sequence; identical to SEQ ID NO: 80762
  derived and/or modified CDS sequence (opt1) from neuraminidase__InfluenzaA__ADJ40607

SEQ ID NO: 83013 - RNA, 1410 nt, Artificial Sequence; identical to SEQ ID NO: 80762
  derived and/or modified CDS sequence (opt1) from neuraminidase__InfluenzaA__ADJ40617

SEQ ID NO: 83014 - RNA, 1410 nt, Artificial Sequence; identical to SEQ ID NO: 81116
  derived and/or modified CDS sequence (opt1) from neuraminidase__InfluenzaA__ADJ40627

SEQ ID NO: 83015 - RNA, 1410 nt, Artificial Sequence; identical to SEQ ID NO: 80762
  derived and/or modified CDS sequence (opt1) from neuraminidase__InfluenzaA__ADJ40637

SEQ ID NO: 83016 - RNA, 1410 nt, Artificial Sequence; identical to SEQ ID NO: 80762
  derived and/or modified CDS sequence (opt1) from neuraminidase__InfluenzaA__ADJ40657

SEQ ID NO: 83017 - RNA, 1410 nt, Artificial Sequence; identical to SEQ ID NO: 80762
  derived and/or modified CDS sequence (opt1) from neuraminidase__InfluenzaA__ADJ40667

SEQ ID NO: 83018 - RNA, 1410 nt, Artificial Sequence; identical to SEQ ID NO: 80762
  derived and/or modified CDS sequence (opt1) from neuraminidase__InfluenzaA__ADJ40677

SEQ ID NO: 83019 - RNA, 1410 nt, Artificial Sequence
  derived and/or modified CDS sequence (opt1) from neuraminidase__InfluenzaA__ADJ41819
augaaccccaaccagaagaucaucaccaucggcagcgugucccugaccaucgccacgaucugcuuccucaugcagaucgccauccuggucaccaccgugacccugcacuucaagcaguacgagugcagcuccccgcccaacaaccaggugguccccugcgagcccaucaucaucgagcgcaacaucacggagaucguguaccucaccaacaccaccaucgagaaggagaucugcccgaagcugguggaguaccggaacuggagcaagccccagugcaagaucacgggguucgcgcccuucuccaaggacaacagcauccgccuguccgccggcggggacaucugggucacccgggagcccuacgugagcugcgacccgggcaagugcuaccaguucgcccucgggcagggcaccacccuggacaacaagcacuccaacgacacgauccacgaccgcacccccuaccggacccugcucaugaacgagcugggcgugcccuuccaccuggggacccgccaggucugcaucgccuggagcuccagcuccugccacgacggcaaggccuggcuccacgugugcaucacgggguacgacaagaacgcgaccgccagcuucaucuacgacggccggcugguggacuccaucgggagcugguccaagaacauccugcgcacccaggagagcgagugcgucugcaucaacgggaccugcacgguggugaugaccgacggcuccgccagcgagcgggccgacaccaagauccucuucaucgaggagggcaagaucguccacaucagcccccuguccggcagcgcgcagcacguggaggagugcuccugcuacccgcgcuaccccggggugcggugcgucugccgcgacaacuggaagggcagcaaccggcccgugguggacaucaacgucaaggacuacuccaucgugagcuccuacgugugcagcggccuggucggggacacgccccgcaagaacgaccgguccagcuccagcuacugccgcaacccgaacaacgagaagggcaaccacggggugaagggcugggccuucgacgacgggaacgacgucuggaugggccggaccaucuccgaggagagccgcuccggcuacgagaccuucaaggugaucgggggcuggagcacccccaacuccaagcuccagaucaaccgccaggugaucgucgacagcgggaaccgguccggcuacagcgggaucuucagcguggagggcaaguccugcaucaaccggugcuucuacguggagcugauccgcggccgcgagcaggagacccgggucugguggacgagcaacuccaucgugguguucugcgggaccagcggcaccuacgggaccggcuccuggcccgacggggccgacaucaaccugaugcccaucuga

SEQ ID NO: 83020 - RNA, 1410 nt, Artificial Sequence; identical to SEQ ID NO: 80762
  derived and/or modified CDS sequence (opt1) from neuraminidase__InfluenzaA__ADJ56642

SEQ ID NO: 83021 - RNA, 1410 nt, Artificial Sequence; identical to SEQ ID NO: 80762
  derived and/or modified CDS sequence (opt1) from neuraminidase__InfluenzaA__ADJ56652

SEQ ID NO: 83022 - RNA, 1410 nt, Artificial Sequence; identical to SEQ ID NO: 80762
  derived and/or modified CDS sequence (opt1) from neuraminidase__InfluenzaA__ADJ80637

SEQ ID NO: 83023 - RNA, 1410 nt, Artificial Sequence; identical to SEQ ID NO: 81780
  derived and/or modified CDS sequence (opt1) from neuraminidase__InfluenzaA__ADJ80647

SEQ ID NO: 83024 - RNA, 1410 nt, Artificial Sequence; identical to SEQ ID NO: 81780
  derived and/or modified CDS sequence (opt1) from neuraminidase__InfluenzaA__ADJ80657

SEQ ID NO: 83025 - RNA, 1410 nt, Artificial Sequence; identical to SEQ ID NO: 80762
  derived and/or modified CDS sequence (opt1) from neuraminidase__InfluenzaA__ADJ80667

SEQ ID NO: 83026 - RNA, 1410 nt, Artificial Sequence; identical to SEQ ID NO: 82675
  derived and/or modified CDS sequence (opt1) from neuraminidase__InfluenzaA__ADJ80677

SEQ ID NO: 83027 - RNA, 1410 nt, Artificial Sequence; identical to SEQ ID NO: 82050
  derived and/or modified CDS sequence (opt1) from neuraminidase__InfluenzaA__ADJ80687

SEQ ID NO: 83028 - RNA, 1410 nt, Artificial Sequence
  derived and/or modified CDS sequence (opt1) from neuraminidase__InfluenzaA__ADJ80697
augaaccccaaccagaagaucaucaccaucggcagcgugugcaugaccaucgggauggccaaccugauccuccagaucggcaacaucaucuccaucuggaucagccacuccauccagcuggggaaccagaaccagaucgagacgugcaaccagagcgucaucaccuacgagaacaacaccugggugaaccagaccuacgugaacaucuccaacacgaacuucgccgcgggccagagcgucaucuccgugaagcuggccgggaacagcucccucugcccggugagcggcugggccaucuacuccaaggacaacagcguccgcaucggcuccaagggggacguguucgugauccgggagcccuucaucagcugcagcccccuggagugccgcaccuucuuccugacccagggcgcccuccugaacgacaagcacuccaacgggaccaucaaggaccggucccccuaccgcacgcugaugagcugcccgaucggcgagguccccucccccuacaacagccgguucgagagcguggccugguccgcgagcgccugccacgacgggaucaacuggcucaccaucggcaucuccggccccgacaacggggccguggccguccugaaguacaacggcaucaucaccgacaccaucaagagcuggcgcaacaacauccugcggacgcaggaguccgagugcgcgugcgugaacgggagcugcuucaccgugaugaccgacggcccguccgacggccaggccagcuacaagaucuuccgcaucgagaaggggaagaucgucaaguccguggagaugaacgcccccaacuaccacuacgaggagugcagcugcuaccccgacuccagcgagaucacgugcgugugccgggacaacuggcacggcuccaaccgccccugggucagcuucaaccagaaccucgaguaccagaucggguacaucugcuccggcaucuucggggacaacccgcggcccaacgacaagaccggcagcugcggccccguguccagcaacggggccaacggcgugaagggguucuccuucaaguacggcaacggggucuggaucggccgcaccaagagcaucagcucccggaacggcuucgagaugaucugggaccccaacggguggaccggcaccgacaacaacuucagcaucaagcaggacaucguggggaucaacgagugguccggcuacagcggguccuucgugcagcacccggagcugacgggccuggacugcauccgccccugcuucugggucgagcucauccggggccgccccaaggagaacaccaucuggaccagcggguccagcaucuccuucugcggcgugaacagcgacaccgucgggugguccuggcccgacggcgccgagcugccguucacgaucgacaaguga

SEQ ID NO: 83029 - RNA, 1410 nt, Artificial Sequence
  derived and/or modified CDS sequence (opt1) from neuraminidase__InfluenzaA__ADJ80717
augaaccccaaccagaagaucaucaccaucggcagcgugugcaugaccaucgggauggccaaccugauccuccagaucggcaacaucaucuccaucuggaucagccacuccauccagcuggggaaccagaaccagaucgagacgugcaaccagagcgucaucaccuacgagaacaacaccugggugaaccagaccuacgugaacaucuccaacacgaacuucgccgcgggccagagcgucguguccgugaagcuggccgggaacagcucccucugcccggucagcggcugggccguguacuccaaggacaacagcauccgcaucggcuccaagggggacguguucgucauccgggagcccuucaucagcugcagcccccuggagugccgcaccuucuuccugacccagggcgcccuccugaacgacaagcacuccaacgggaccaucaaggaccggucccccuaccgcacgcugaugagcugcccgaucggcgaggugcccucccccuacaacagccgguucgagagcguggccugguccgcgagcgccugccacgacgggaucaacuggcucaccaucggcaucuccggccccgacaacggggccgucgccgugcugaaguacaacggcaucaucaccgacaccaucaagagcuggcgcaacaacauccugcggacgcaggaguccgagugcgcgugcgugaacgggagcugcuucaccgucaugaccgacggcccguccgacggccaggccagcuacaagaucuuccgcaucgagaaggggaagaucgugaaguccguggagaugaacgcccccaacuaccacuacgaggagugcagcugcuaccccgacuccagcgagaucacgugcgucugccgggacaacuggcacggcuccaaccgccccugggugagcuucaaccagaaccucgaguaccagaucggguacaucugcuccggcaucuucggggacaacccgcggcccaacgacaagaccggcagcugcggccccguguccagcaacggggccaacggcgucaagggguucuccuucaaguacggcaacgggguguggaucggccgcaccaagagcaucagcucccggaacggcuucgagaugaucugggaccccaacggguggaccggcaccgacaacaacuucagcaucaagcaggacaucguggggaucaacgagugguccggcuacagcggguccuucguccagcacccggagcugacgggccuggacugcauccgccccugcuucuggguggagcucauccggggccgccccaaggagaacaccaucuggaccagcggguccagcaucuccuucugcggcgucaacagcgacaccguggggugguccuggcccgacggcgccgagcugccguucacgaucgacaaguga

SEQ ID NO: 83030 - RNA, 1410 nt, Artificial Sequence
  derived and/or modified CDS sequence (opt1) from neuraminidase__InfluenzaA__ADJ80727
augaaccccaaccagaagaucaucaccaucggcagcgugugcaugaccaucgggauggccaaccugauccuccagaucggcaacaucaucuccaucuggaucagccacuccauccagcuggggaaccagaaccagaucgagacgugcaaccagagcgucaucaccuacgagaacaacaccugggugaaccagaccuacgugaacaucuccaacacgaacuucgccgcgggccagagcgucguguccgugaagcuggccgggaacagcucccucugcccggucagcggcugggugaucuacuccaaggacaacagcauccgcaucggcuccaagggggacguguucgucauccgggagcccuucaucagcugcagcccccuggagugccgcaccuucuuccugacccagggcgcccuccugaacgacaagcacuccaacgggaccaucaaggaccggucccccuaccgcacgcugaugagcugcccgaucggcgaggugcccucccccuacaacagccgguucgagagcguggccugguccgccagcgcgugccacgacgggaucaacuggcucaccaucggcaucuccggccccgacaacggggccgucgccgugcugaaguacaacggcaucaucaccgacaccaucaagagcuggcgcaacaacauccugcggacgcaggaguccgagugcgccugcgugaacgggagcugcuucaccgucaugaccgacggcccguccgacggccaggcgagcuacaagaucuuccgcaucgagaaggggaagaucgugaaguccguggagaugaacgcccccaacuaccacuacgaggagugcagcugcuaccccgacuccagcgagaucacgugcgucugccgggacaacuggcacggcuccaaccgccccugggugagcuucaaccagaaccucgaguaccagaucggguacaucugcuccggcaucuucggggacaacccgcggcccaacgacaagaccggcagcugcggccccguguccagcaacggggccaacggcgucaagggguucuccuucaaguacggcaacgggguguggaucggccgcaccaagagcaucagcucccggaacggcuucgagaugaucugggaccccaacggguggaccggcaccgacaacaacuucagcaucaagcaggacaucguggggaucaacgagugguccggcuacagcggguccuucguccagcacccggagcugacgggccuggacugcauccgccccugcuucuggguggagcucauccggggccgccccaaggagaacaccaucuggaccagcggguccagcaucuccuucugcggcgucaacagcgacaccguggggugguccuggcccgacggcgccgagcugccguucacgaucgacaaguga

SEQ ID NO: 83031 - RNA, 1410 nt, Artificial Sequence; identical to SEQ ID NO: 81529
  derived and/or modified CDS sequence (opt1) from neuraminidase__InfluenzaA__ADJ80737

SEQ ID NO: 83032 - RNA, 1410 nt, Artificial Sequence
  derived and/or modified CDS sequence (opt1) from neuraminidase__InfluenzaA__ADJ80747
augaaccccaaccagaagaucaucaccaucggcagcgugugcaugaccaucgggauggccaaccugauccuccagaucggcaacaucaucuccaucuggaucagccacuccauccagcuggggaaccagaaccagaucgagacgugcaaccagagcgucaucaccuacgagaacaacaccugggugaaccagaccuacgugaacaucuccaacacgaacuucgccgcgggccagagcgucguguccgugaagcuggccgggagcuccagccucugcccggucuccggcugggccaucuacagcaaggacaacuccauccgcaucggcagcaagggggacguguucgugauccgggagcccuucaucuccugcagcccccuggagugccgcaccuucuuccugacccagggcgcccuccugaacgacaagcacuccaacgggaccaucaaggaccggagccccuaccgcacgcugauguccugcccgaucggcgagguccccagccccuacaacagccgguucgaguccguggccuggagcgcguccgccugccacgacgggaucaacuggcucaccaucggcaucagcggccccgacaacggggccguggccguccugaaguacaacggcaucaucaccgacaccaucaaguccuggcgcaacaacauccugcggacgcaggagagcgagugcgcgugcgugaacggguccugcuucaccgugaugaccgacggcccgagcgacggccaggccuccuacaagaucuuccgcaucgagcgggggaagaucgucaagagcguggagaugaacgcccccaacuaccacuacgaggagugcuccugcuaccccgacagcuccgagaucacgugcgugugccgcgacaacuggcacggcagcaaccggcccugggucuccuucaaccagaaccucgaguaccagaucggguacaucugcagcggcaucuucggggacaacccgcgccccaacgacaagaagggcuccugcggccccgugagcuccaacggggccaacggcgugaagggguucagcuucaaguacggcaacggggucuggaucggccggaccaagagcaucuccagccgcaacggcuucgagaugaucugggaccccaacggguggaccggcaccgacaacaacuucuccaucaagcaggacaucguggagaucaacgaguggagcggguacuccggcagcuucgugcagcacccggagcugaccgggcuggacugcauccggcccugcuucugggucgagcucauccgcggccggcccaaggagaacacgaucuggaccuccggcagcuccaucagcuucugcggggugaacuccgacaccgucggcuggagcuggcccgacggggccgagcugccguucaccaucgacaaguga

SEQ ID NO: 83033 - RNA, 1410 nt, Artificial Sequence; identical to SEQ ID NO: 80762
  derived and/or modified CDS sequence (opt1) from neuraminidase__InfluenzaA__ADJ80757

SEQ ID NO: 83034 - RNA, 1410 nt, Artificial Sequence; identical to SEQ ID NO: 80762
  derived and/or modified CDS sequence (opt1) from neuraminidase__InfluenzaA__ADJ80767

SEQ ID NO: 83035 - RNA, 1410 nt, Artificial Sequence; identical to SEQ ID NO: 81345
  derived and/or modified CDS sequence (opt1) from neuraminidase__InfluenzaA__ADJ80777

SEQ ID NO: 83036 - RNA, 1410 nt, Artificial Sequence; identical to SEQ ID NO: 80762
  derived and/or modified CDS sequence (opt1) from neuraminidase__InfluenzaA__ADJ80787

SEQ ID NO: 83037 - RNA, 1410 nt, Artificial Sequence
  derived and/or modified CDS sequence (opt1) from neuraminidase__InfluenzaA__ADJ80797
augaaccccaaccagaagaucaucaccaucggcagcgugugcaugaccaucgggauggccaaccugauccuccagaucggcaacaucaucuccaucuggaucagccacuccauccagcuggggaacaagaaccagaucgagacgugcaaccagagcgucaucaccuacgagaacaacaccugggugaaccagaccuacgugaacaucuccaacacgaacuucgccgcgggccagagcgucguguccgugaagcuggccgggaacagcucccucugcccggucagcggcugggccaucuacuccaaggacaacagcauccgcaucggcuccaagggggacguguucgugauccgggagcccuucaucagcugcagcccccuggagugccgcaccuucuuccugacccagggcgcccuccugaacgacaagcacuccaacgggaccaucaaggaccggucccccuaccgcacgcugaugagcugcccgaucggcgagguccccucccccuacaacagccgguucgagagcguggccugguccgcgagcgccugccacgacgggaucaacuggcucaccaucggcaucuccggccccgacaacggggccguggccguccugaaguacaacggcaucaucaccgacaccaucaagagcuggcgcaacaacauccugcggacgcaggaguccgagugcgcgugcgugaacgggagcugcuucaccgugaugaccgacggcccguccgacggccaggccagcuacaagaucuuccgcaucgagaaggggaagaucgucaaguccguggagaugaacgcccccaacuaccacuacgaggagugcagcugcuaccccgacuccagcgagaucacgugcgugugccgggacaacuggcacggcuccaaccgccccugggucagcuucaaccagaaccucgaguaccagaucggguacaucugcuccggcaucuucggggacaacccgcggcccaacgacaagaagggcagcugcggccccguguccagcaacggggccaacggcgugaagggguucuccuucaaguacggcaacggggucuggaucggccgcaccaagagcaucagcucccggaacggcuucgagaugaucugggaccccaacggguggaccggcaccgacaacaacuucagcaucaagcaggacaucguggggaucaacgagugguccggcuacagcggguccuucgugcagcacccggagcugaccggccuggacugcauccgccccugcuucugggucgagcucauccggggccgccccaaggagaacacgaucuggaccagcggguccagcaucuccuucugcggcgugaacagcgacaccgucgggugguccuggcccgacggcgccgagcugccguucaccaucgacaaguga

SEQ ID NO: 83038 - RNA, 1410 nt, Artificial Sequence; identical to SEQ ID NO: 81780
  derived and/or modified CDS sequence (opt1) from neuraminidase__InfluenzaA__ADJ80807

SEQ ID NO: 83039 - RNA, 1410 nt, Artificial Sequence; identical to SEQ ID NO: 80762
  derived and/or modified CDS sequence (opt1) from neuraminidase__InfluenzaA__ADJ80817

SEQ ID NO: 83040 - RNA, 1410 nt, Artificial Sequence; identical to SEQ ID NO: 80762
  derived and/or modified CDS sequence (opt1) from neuraminidase__InfluenzaA__ADJ80827

SEQ ID NO: 83041 - RNA, 1410 nt, Artificial Sequence; identical to SEQ ID NO: 82275
  derived and/or modified CDS sequence (opt1) from neuraminidase__InfluenzaA__ADJ80837

SEQ ID NO: 83042 - RNA, 1410 nt, Artificial Sequence; identical to SEQ ID NO: 82773
  derived and/or modified CDS sequence (opt1) from neuraminidase__InfluenzaA__ADJ80851

SEQ ID NO: 83043 - RNA, 1410 nt, Artificial Sequence
  derived and/or modified CDS sequence (opt1) from neuraminidase__InfluenzaA__ADJ80861
augaaccccaaccagaagaucaucaccaucggcagcgugugcaugaccaucgggauggccaaccugauccuccagaucggcaacaucaucuccaucuggaucagccacuccauccagcuggggaaccagaaccagaucgagacgugcaaccagagcgucaucaccuacgagaacaacaccugggugaaccagaccuacgugaacaucuccaacacgaacuucgccgcgggccagagcgucguguccgugaagcuggccgggaacagcucccucugcccggucagcggcugggccaucuacuccaaggacaacagcauccgcaucggcuccaagggggacguguucgugauccgggagcccuucaucagcugcagcccccuggagugccgcaccuucuuccugacccagggcgcccuccugaacgacaagcacuccaacgggaccaucaaggaccggucccccuaccgcacgcugaugagcugcccgaucggcgagguccccucccccuacaacagccgguucgagagcguggccugguccgcgagcgccugccacgacgggaucaacuggcucaccaucggcaucuccggccccgacaacggggccguggccguccugaaguacaacggcaucaucaccgacaccaucaagagcuggcgcaacaacauccugcggacgcaggaguccgagugcgcgugcgugaacgggagcugcuucaccgugaugaccgacggcccguccgacggccaggccagcuacaagaucuuccgcaucgagaaggggaagaucgucaaguccguggagaugaacgcccccaacuaccacuacgaggagugcagcugcuaccccgacuccagcgagaucacgugcgugugccgggacaacuggcacggcuccaaccgccccugggucagcuucaaccagaaccucgaguaccagaucggguacaucugcuccggcaucuucggggacaacccgcggcccaacgacaagaccggcagcugcggccccgugucccccaacggggccaacggcgugaagggguucagcuucaaguacggcaacggggucuggaucggccgcaccaaguccaucagcagccggaacggcuucgagaugaucugggacccgaacggguggaccggcaccgacaacaacuucuccaucaagcaggacaucguggggaucaacgaguggagcggcuacuccgggagcuucgugcagcaccccgagcugacgggccuggacugcauccgccccugcuucugggucgagcucauccggggccgccccaaggagaacaccaucuggaccuccgggagcuccaucagcuucugcggcgugaacuccgacaccgucggguggagcuggccggacggcgccgagcugcccuucacgaucgacaaguga

SEQ ID NO: 83044 - RNA, 1410 nt, Artificial Sequence; identical to SEQ ID NO: 83037
  derived and/or modified CDS sequence (opt1) from neuraminidase__InfluenzaA__ADJ80871

SEQ ID NO: 83045 - RNA, 1410 nt, Artificial Sequence; identical to SEQ ID NO: 80762
  derived and/or modified CDS sequence (opt1) from neuraminidase__InfluenzaA__ADJ80886

SEQ ID NO: 83046 - RNA, 1410 nt, Artificial Sequence
  derived and/or modified CDS sequence (opt1) from neuraminidase__InfluenzaA__ADJ80896
augaaccccaaccagaagaucaucaccaucggcagcgugugcaugaccaucgggauggccaaccugauccuccagaucggcaacaucaucuccaucuggaucagccacuccauccagcuggggaaccagaaccagaucgagacgugcaaccagagcaucaucaccuacgagaacaacaccugggucaaccagaccuacgugaacaucuccaacacgaacuucgccgcgggccagagcguggucuccgugaagcugaccgggaacagcucccucugcccggugagcggcugggccaucuacuccaaggacaacagcauccgcaucggcuccaagggggacgucuucgugauccgggagcccuucaucagcugcagcccccuggagugccgcaccuucuuccugacccagggcgcccuccugaacgacaagcacuccaacgggacgaucaaggaccggucccccuaccgcacccugaugagcugcccgaucggcgaggugcccucccccuacaacagccgguucgagagcgucgccugguccgccagcgcgugccacgacgggaucaacuggcucaccaucggcaucuccggccccgacaacggggccguggccgugcugaaguacaacggcaucaucaccgacacgaucaagagcuggcgcaacaacauccugcggacccaggaguccgagugcgccugcgucaacgggagcugcuucaccgugaugaccgacggcccguccgacggccaggcgagcuacaagaucuuccgcaucgagaaggggaagaucgugaaguccgucgagaugaacgcccccaacuaccacuacgaggagugcagcugcuaccccgacuccagcgagaucacgugcgugugccgggacaacuggcacggcuccaaccgccccugggugagcuucaaccagaaccucgaguaccagaucggguacaucugcuccggcaucuucggggacaacccgcggcccaacgacaagaccggcagcugcggccccgucuccagcaacggggccaacggcgugaagggguucuccuucaaguacggcaacgggguguggaucggccgcaccaagagcaucagcucccggaacggcuucgagaugaucugggaccccaacggguggaccggcacggacaacaacuucagcaucaagcaggacaucgucgggaucaacgagugguccggcuacagcggguccuucgugcagcacccggagcugaccggccuggacugcauccgccccugcuucuggguggagcucauccggggccgccccaaggagaacaccaucuggaccagcggguccagcaucuccuucugcggcgucaacagcgacacgguggggugguccuggcccgacggcgccgagcugccguucaccaucgacaaguga

SEQ ID NO: 83047 - RNA, 1410 nt, Artificial Sequence
  derived and/or modified CDS sequence (opt1) from neuraminidase__InfluenzaA__ADJ80913
augaaccccaaccagaagaucaucaccaucggcagcgugugcaugaccaucgggauggccaaccugauccuccagaucggcaacaucaucuccaucuggaucagccacuccauccagcuggggaaccagaaccagaucgagacgugcaaccagagcgucaucaccuacgagaacaacaccugggugaaccagaccuacgugaacaucuccaacacgaacuucgccgcgggccagagcgucguguccgugaagcuggccgggagcuccagccucugcccggucuccggcugggccaucuacagcaaggacaacuccauccgcaucggcagcaagggggacguguucgugauccgggagcccuucaucuccugcagcccccuggagugccgcaccuucuuccugacccagggcgcccuccugaacgacaagcacuccaacgggaccaucaaggaccggagccccuaccgcacgcugauguccugcccgaucggcgagguccccagccccuacaacagccgguucgaguccguggccuggagcgcguccgccugccacgacgggaucaacuggcucaccaucggcaucagcggccccgacaacggggccguggccguccugaaguacaacggcaucaucaccgacaccaucaaguccuggcgcaacaacauccugcggacgcaggagagcgagugcgcgugcgugaacggguccugcuucaccgugaugaccgacggcccgagcgacggccaggccuccuacaagaucuuccgcaucgagaaggggaagaucgucaagagcguggagaugaacgcccccaacuaccacuacgaggagugcuccugcuaccccgacagcuccgagaucacgugcgugugccgggacaacuggcacggcagcaaccgccccugggucuccuucaaccagaaccucgaguaccagaucggguacaucugcagcggcaucuucggggacaacccgcggcccaacgacaagaagggcuccugcggccccgugagcuccaacggggccaacggcgugaagggguucagcuucaaguacggcaacggggucuggaucggccgcaccaagagcaucuccagccgguccggcuucgagaugaucugggaccccaacggguggaccggcaccgacaacaacuucagcaucaagcaggacaucguggggaucaacgagugguccggcuacagcggguccuucgugcagcacccggagcugaccggccuggacugcauccgccccugcuucugggucgagcucauccggggccgccccaaggagaacacgaucuggaccagcggguccagcaucuccuucugcggcgugaacagcgacaccgucgggugguccuggcccgacggcgccgagcugccguucaccaucgacaaguga

SEQ ID NO: 83048 - RNA, 1410 nt, Artificial Sequence; identical to SEQ ID NO: 80762
  derived and/or modified CDS sequence (opt1) from neuraminidase__InfluenzaA__ADJ80930

SEQ ID NO: 83049 - RNA, 1410 nt, Artificial Sequence; identical to SEQ ID NO: 80762
  derived and/or modified CDS sequence (opt1) from neuraminidase__InfluenzaA__ADJ80950

SEQ ID NO: 83050 - RNA, 1410 nt, Artificial Sequence; identical to SEQ ID NO: 82050
  derived and/or modified CDS sequence (opt1) from neuraminidase__InfluenzaA__ADJ80960

SEQ ID NO: 83051 - RNA, 1410 nt, Artificial Sequence; identical to SEQ ID NO: 83037
  derived and/or modified CDS sequence (opt1) from neuraminidase__InfluenzaA__ADJ80970

SEQ ID NO: 83052 - RNA, 1410 nt, Artificial Sequence; identical to SEQ ID NO: 80762
  derived and/or modified CDS sequence (opt1) from neuraminidase__InfluenzaA__ADJ80980

SEQ ID NO: 83053 - RNA, 1410 nt, Artificial Sequence; identical to SEQ ID NO: 83037
  derived and/or modified CDS sequence (opt1) from neuraminidase__InfluenzaA__ADJ80996

SEQ ID NO: 83054 - RNA, 1410 nt, Artificial Sequence
  derived and/or modified CDS sequence (opt1) from neuraminidase__InfluenzaA__ADJ81006
augaaccccaaccagaagaucaucaccaucggcagcgugugcaugaccaucgggauggccaaccugauccuccaggucggcaacaucaucuccaucuggaucagccacuccauccagcuggggaaccagaaccagaucgagacgugcaaccagagcaucaucaccuacgagaacaacaccugggugaaccagaccuacgugaacaucuccaacacgaacuucgccgcgggccagagcgucguguccgugaagcuggccgggaacagcucccucugcccggucagcggcugggccaucuacuccaaggacaacagcauccgcaucggcuccaagggggacguguucgugauccgggagcccuucaucagcugcagcccccuggagugccgcaccuucuuccugacccagggcgcccuccugaacgacaagcacuccaacgggaccaucaaggaccggucccccuaccgcacgcugaugagcugcccgaucggcgagguccccucccccuacaacagccgguucgagagcguggccugguccgcgagcgccugccacgacgggaucaacuggcucaccaucggcaucuccggccccgacaacggggccguggccguccugaaguacaacggcaucaucaccgacaccaucaagagcuggcgcaacaacauccugcggacgcaggaguccgagugcgcgugcgugaacgggagcugcuucaccgugaugaccgacggcccguccgacggccaggccagcuacaagaucuuccgcaucgagaaggggaagaucgucaaguccguggagaugaacgcccccaacuaccacuacgaggagugcagcugcuaccccgacuccagcgagaucacgugcgugugccgggacaacuggcacggcuccaaccgccccugggucagcuucaaccagaaccucgaguaccagaucggguacaucugcuccggcaucuucggggacaacccgcggcccaacgacaagaccggcagcugcggccccguguccagcaacggggccaacggcgugaagggguucuccuucaaguacggcaacggggucuggaucggccgcaccaagagcaccagcucccggaacggcuucgagaugaucugggaccccaacggguggaccggcacggacaacaacuucagcaucaagcaggacaucguggggaucaacgagugguccggcuacagcggguccuucgugcagcacccggagcugaccggccuggacugcauccgccccugcuucugggucgagcucauccggggccgccccaaggagaacaccaucuggaccagcggguccagcaucuccuucugcggcgugaacagcgacacggucgggugguccuggcccgacggcgccgagcugccguucaccaucgacaaguga

SEQ ID NO: 83055 - RNA, 1410 nt, Artificial Sequence; identical to SEQ ID NO: 82773
  derived and/or modified CDS sequence (opt1) from neuraminidase__InfluenzaA__ADJ81016

SEQ ID NO: 83056 - RNA, 1410 nt, Artificial Sequence; identical to SEQ ID NO: 82962
  derived and/or modified CDS sequence (opt1) from neuraminidase__InfluenzaA__ADJ81026

SEQ ID NO: 83057 - RNA, 1410 nt, Artificial Sequence; identical to SEQ ID NO: 80762
  derived and/or modified CDS sequence (opt1) from neuraminidase__InfluenzaA__ADJ81036

SEQ ID NO: 83058 - RNA, 1410 nt, Artificial Sequence
  derived and/or modified CDS sequence (opt1) from neuraminidase__InfluenzaA__ADJ81046
augaaccccaaccagaagaucaucaccaucggcagcgugugcaugaccgucgggauggccaaccugauccuccagaucggcaacaucaucuccaucuggaucagccacuccauccagcuggggaaccagaaccagaucgagacgugcaaccagagcgugaucaccuacgagaacaacaccugggugaaccagaccuacgucaacaucuccaacacgaacuucgccgcgggccagagcgugguguccgucaagcuggccgggaacagcucccucugcccggugagcggcugggccaucuacuccaaggacaacagcauccgcaucggcuccaagggggacguguucgucauccgggagcccuucaucagcugcagcccccuggagugccgcaccuucuuccugacccagggcgcccuccugaacgacaagcacuccaacgggaccaucaaggaccggucccccuaccgcacgcugaugagcugcccgaucggcgaggugcccucccccuacaacagccgguucgagagcguggccugguccgcgagcgccugccacgacgggaucaacuggcucaccaucggcaucuccggccccgacaacggggccgucgccgugcugaaguacaacggcaucaucaccgacaccaucaagagcuggcgcaacaacauccugcggacgcaggaguccgagugcgcgugcgugaacgggagcugcuucaccgucaugaccgacggcccguccgacggccaggccagcuacaagaucuuccgcaucgagaaggggaagaucgugaaguccguggagaugaacgcccccaacuaccacuacgaggagugcagcugcuaccccgacuccagcgagaucacgugcgucugccgggacaacuggcacggcuccaaccgccccugggugagcuucaaccagaaccucgaguaccagaucggguacaucugcuccggcaucuucggggacaacccgcggcccaacgacaagaccggcagcugcggccccguguccagcaacggggccaacggcgucaagggguucuccuucaaguacggcaacgggguguggaucggccgcaccaagagcaucaacagccggaacggcuucgagaugaucugggaccccaacggguggaccggcaccgacaacaacuucuccaucaagcaggacaucguggggacgaacgaguggagcggcuacuccgggagcuucguccagcacccggagcugaccggccuggacugcauccgccccugcuucuggguggagcucauccggggccgccccaaggagaacaccaucuggaccuccgggagcuccaucagcuucugcggcgucaacuccgacacggugggguggagcuggcccgacggcgccgagcugccguucaccaucgacaaguga

SEQ ID NO: 83059 - RNA, 1410 nt, Artificial Sequence
  derived and/or modified CDS sequence (opt1) from neuraminidase__InfluenzaA__ADJ81056
augaaccccaaccagaagaucaucaccaucggcagcgugugcaugaccaucgggauggccaaccugauccuccagaucggcaacaucaucuccaucuggaucagccacuccauccagcuggggaaccagaaccagaucgagacgugcaaccagagcgucaucaccuacgagaacaacaccugggugaaccagaccuacgugaacaucuccaacacgaacuucgccgcgggccagagcgucgugccggugaagcuggccggguccagcucccucugccccgucagcggcugggccaucuacuccaaggacaacagcauccgcaucggcuccaagggggacguguucgugauccgggagcccuucaucagcugcagcccccuggagugccgcaccuucuuccugacccagggcgcccuccugaacgacaagcacuccaacgggaccaucaaggaccgguccccguaccgcacgcugaugagcugccccaucggcgagguccccucccccuacaacagccgguucgagagcguggccugguccgcgagcgccugccacgacgggaucaacuggcucaccaucggcaucuccggcccggacaacggggccguggccguccugaaguacaacggcaucaucaccgacaccaucaagagcuggcgcaacaacauccugcggacgcaggaguccgagugcgcgugcgugaacgggagcugcuucaccgugaugaccgacggccccuccgacggccaggccagcuacaagaucuuccgcaucgagaaggggaagaucgucaaguccguggagaugaacgcccccaacuaccacuacgaggagugcagcugcuaccccgacuccagcgagaucacgugcgugugccgggacaacuggcacggcuccaaccgcccgugggucagcuucaaccagaaccucgaguaccagaucggguacaucugcuccggcaucuucggggacaacccccggcccaacgacaagaagggcagcugcggccccguguccagcaacggggccaacggcgugaagggguucuccuucaaguacggcaacggggucuggaucggccgcaccaagagcaucaacagccggaacggcuucgagaugaucugggacccgaacggguggaccggcaccgacaacaacuucuccaucaagcaggacaucguggggaucaacgaguggagcggcuacuccgggagcuucgugcagcaccccgagcugaccggccuggacugcauccgccccugcuucugggucgagcucauccggggccgccccaaggagaacacgaucuggaccuccgggagcuccaucagcuucugcggcgugaacuccgacaccgucggguggagcuggccggacggcgccgagcugcccuucaccaucgacaaguga

SEQ ID NO: 83060 - RNA, 1410 nt, Artificial Sequence; identical to SEQ ID NO: 82050
  derived and/or modified CDS sequence (opt1) from neuraminidase__InfluenzaA__ADJ81066

SEQ ID NO: 83061 - RNA, 1410 nt, Artificial Sequence; identical to SEQ ID NO: 80623
  derived and/or modified CDS sequence (opt1) from neuraminidase__InfluenzaA__ADJ84775

SEQ ID NO: 83062 - RNA, 1410 nt, Artificial Sequence
  derived and/or modified CDS sequence (opt1) from neuraminidase__InfluenzaA__ADJ88785
augaaccccaaccagaagaucaucaccaucggcagcgugucccugaccaucagcacgaucugcuucuucaugcagaucgccauccucaucaccaccgucacccugcacuucaagcaguacgaguucaacuccccgcccaacaaccaggugaugcugugcgagcccacgaucaucgagcgcaacaucaccgagaucguguaccucaccaacaccacgaucgagaaggagaucugccccaagcuggccgaguaccggaacuggagcaagccgcagugcgacaucaccggguucgcgcccuucuccaaggacaacagcauccgccuguccgccggcggggacaucugggucacccgggagcccuacgugagcugcgaccccgacaagugcuaccaguucgcccucggccaggggaccacgcugaacaacgugcacuccaacaacaccguccgcgaccggaccccguaccgcacccugcucaugaacgagcugggcgugcccuuccaccugggcacgaagcaggucugcaucgccuggagcuccagcuccugccacgacgggaaggccuggcuccacgugugcaucaccggcgacgacaagaacgcgaccgccagcuucaucuacaacgggcggcugguggacuccguggucagcugguccaaggagauccugcgcacccaggagagcgagugcgugugcaucaacggcacgugcaccguggucaugaccgacggguccgccagcggcaaggccgacaccaagauccucuucaucgaggagggcaagaucgugcacacgagcacccuguccgggagcgcgcagcacguggaggagugcuccugcuacccccgguaccccggcguccgcugcgugugccgggacaacuggaaggggagcaaccgcccgaucguggacaucaacaucaaggaccacuccgucgugagcuccuacgugugcagcggccuggucggcgacacgccccggaagaacgacuccagcuccagcucccacugccucgaccccaacaacgaggagggcgggcacggggugaagggcugggccuucgacgacgggaacgacgucuggaugggccgcaccaucagcgagaagucccggcugggcuacgagaccuucaaggugaucgagggguggagcaaccacaaguccaagcugcagaucaaccgccaggugaucgucgaccggggcaaccgcagcggguacuccggcaucuucagcguggagggcaagagcugcaucaaccggugcuucuacguggagcucauccgcgggcggaaggaggagaccgagguccuguggaccuccaacagcaucgugguguucugcggcaccuccgggacguacggcaccgggagcuggcccgacggcgccgaccugaaccucaugccgaucuga

SEQ ID NO: 83063 - RNA, 1410 nt, Artificial Sequence; identical to SEQ ID NO: 80762
  derived and/or modified CDS sequence (opt1) from neuraminidase__InfluenzaA__ADK21716

SEQ ID NO: 83064 - RNA, 1410 nt, Artificial Sequence; identical to SEQ ID NO: 80762
  derived and/or modified CDS sequence (opt1) from neuraminidase__InfluenzaA__ADK21726

SEQ ID NO: 83065 - RNA, 1410 nt, Artificial Sequence; identical to SEQ ID NO: 80762
  derived and/or modified CDS sequence (opt1) from neuraminidase__InfluenzaA__ADK21736

SEQ ID NO: 83066 - RNA, 1410 nt, Artificial Sequence
  derived and/or modified CDS sequence (opt1) from neuraminidase__InfluenzaA__ADK21746
augaaccccaaccagaagaucaucaccaucggcagcgugugcaugaccaucgggauggccaaccugauccuccagaucggcaacaucaucuccaucuggaucagccacuccauccagcuggggaaccagaaccagaucgagacgugcaaccagagcaucaucaccuacgagcacaacaccugggucaaccagaccuacgugaacaucuccaacacgaacuucgccgcgggccagagcguggucuccgugaagcuggccgggaacagcucccucugcccggugagcggcugggccaucuacuccaaggacaacagcauccgcaucggcuccaagggggacgucuucgugauccgggagcccuucaucagcugcagcccccuggagugccgcaccuucuuccugacccagggcgcccuccugaacgacaagcacuccaacgggaccaucaaggaccggucccccuaccgcacgcugaugagcugcccgaucggcgaggugcccucccccuacaacagccgguucgagagcgucgccugguccgcgagcgccugccacgacgggaucaacuggcucaccaucggcaucuccggccccgacaacggggccguggccgugcugaaguacaacggcaucaucaccgacaccaucaagagcuggcgcaacaacauccugcggacgcaggaguccgagugcgcgugcgucaacgggagcugcuucaccgugaugaccgacggcccguccgacggccaggccagcuacaagaucuuccgcaucgagaaggggaagaucgugaaguccgucgagaugaacgcccccaacuaccacuacgaggagugcagcugcuaccccgacuccagcgagaucacgugcgugugccgggacaacuggcacggcuccaaccgccccugggugagcuucaaccagaaccucgaguaccagaucggguacaucugcuccggcaucuucggggacaacccgcggcccaacgacaagaccggcagcugcggccccgucuccagcaacggggccaacggcgugaagggguucuccuucaaguacggcaacgggguguggaucggccgcaccaagagcaucagcucccggagcggcuucgagaugaucugggaccccaacggguggaccggcaccgacaacaacuucuccaucaagcaggacaucgucgggaucaacgaguggagcggcuacuccgggagcuucgugcagcacccggagcugacgggccuggacugcauccgccccugcuucuggguggagcucauccggggccgccccgaggagaacaccaucuggaccuccgggagcuccaucagcuucugcggcgucaacuccgacaccgugggguggagcuggcccgacggcgccgagcugccguucacgaucgacaaguga

SEQ ID NO: 83067 - RNA, 1410 nt, Artificial Sequence; identical to SEQ ID NO: 80762
  derived and/or modified CDS sequence (opt1) from neuraminidase__InfluenzaA__ADK21756

SEQ ID NO: 83068 - RNA, 1410 nt, Artificial Sequence; identical to SEQ ID NO: 80762
  derived and/or modified CDS sequence (opt1) from neuraminidase__InfluenzaA__ADK21766

SEQ ID NO: 83069 - RNA, 1410 nt, Artificial Sequence; identical to SEQ ID NO: 82193
  derived and/or modified CDS sequence (opt1) from neuraminidase__InfluenzaA__ADK21776

SEQ ID NO: 83070 - RNA, 1410 nt, Artificial Sequence; identical to SEQ ID NO: 80762
  derived and/or modified CDS sequence (opt1) from neuraminidase__InfluenzaA__ADK21786

SEQ ID NO: 83071 - RNA, 1410 nt, Artificial Sequence; identical to SEQ ID NO: 80762
  derived and/or modified CDS sequence (opt1) from neuraminidase__InfluenzaA__ADK21796

SEQ ID NO: 83072 - RNA, 1410 nt, Artificial Sequence; identical to SEQ ID NO: 80762
  derived and/or modified CDS sequence (opt1) from neuraminidase__InfluenzaA__ADK21806

SEQ ID NO: 83073 - RNA, 1410 nt, Artificial Sequence; identical to SEQ ID NO: 80762
  derived and/or modified CDS sequence (opt1) from neuraminidase__InfluenzaA__ADK21816

SEQ ID NO: 83074 - RNA, 1410 nt, Artificial Sequence; identical to SEQ ID NO: 82740
  derived and/or modified CDS sequence (opt1) from neuraminidase__InfluenzaA__ADK21826

SEQ ID NO: 83075 - RNA, 1410 nt, Artificial Sequence; identical to SEQ ID NO: 82653
  derived and/or modified CDS sequence (opt1) from neuraminidase__InfluenzaA__ADK21836

SEQ ID NO: 83076 - RNA, 1410 nt, Artificial Sequence
  derived and/or modified CDS sequence (opt1) from neuraminidase__InfluenzaA__ADK21846
augaaccccaaccagaagaucaucaccaucggcagcgugugcaugaccaucgggauggccaaccugauccuccagaucggcaacaucaucuccaucuggaucagccacuccauccagcuggggaaccagaaccagaucgagacgugcaaccagagcgucaucaccuacgagaacaacaccugggugaaccagaccuacgugaacaucuccaacacgaacuucgccgcgggccagagcgucguguccgugaagcuggccgggaacagcucccucugcccggucagcggcugggccaucuacuccaaggacaacagcauccgcaucggcuccaagggggacguguucgugauccgggagcccuucaucagcugcagcccccuggagugccgcaccuucuuccugacccagggcgcccuccugaacgacaagcacuccaacgggaccaucaaggaccggucccccuaccgcacgcugaugagcugcccgaucggcgagguccccucccccuacaacagccgguucgagagcguggccugguccgcgagcgccugccacgacgggaucaacuggcucaccaucggcaucuccggccccgacaacggggccguggccguccugaaguacaacggcaucaucaccgacaccaucaagagcuggcgcaacaacauccugcggacgcaggaguccgagugcgcgugcgugaacgggagcugcuucaccgugaugaccgacggcccguccgacggccaggccagcuacaagaucuuccgcaucgagaaggggaagaucgucaaguccguggagaugaacgcccccaacuaccacuacgaggagugcagcugcuaccccgacuccagcgagaucacgugcgugugccgggacaacuggcacggcuccaaccgccccugggucagcuucaaccagaaccucgaguaccagaucggguacaucugcuccggcaucuucggggacaacccgcggcccaacgacaagaccggcagcugcggccccguguccagcaacggggccaacggcgugaagggguucuccuucaaguacggcaacggggucuggaucggccgcaccaagagcaucagcucccggaacggcuucgagaugaucugggaccccaacggguggaccggcaccgacaacaacuucagcaugaagcaggacaucguggggaucaacgagugguccggcuacagcggguccuucgugcagcacccggagcugacgggccuggacugcauccgccccugcuucugggucgagcucauccggggccgccccaaggagaacaccaucugggccagcggguccagcaucuccuucugcggcgugaacagcgacaccgucgggugguccuggcccgacggcgcggagcugccguucaccaucgacaaguga

SEQ ID NO: 83077 - RNA, 1410 nt, Artificial Sequence; identical to SEQ ID NO: 80762
  derived and/or modified CDS sequence (opt1) from neuraminidase__InfluenzaA__ADK21856

SEQ ID NO: 83078 - RNA, 1410 nt, Artificial Sequence; identical to SEQ ID NO: 80762
  derived and/or modified CDS sequence (opt1) from neuraminidase__InfluenzaA__ADK21866

SEQ ID NO: 83079 - RNA, 1410 nt, Artificial Sequence; identical to SEQ ID NO: 80762
  derived and/or modified CDS sequence (opt1) from neuraminidase__InfluenzaA__ADK21876

SEQ ID NO: 83080 - RNA, 1410 nt, Artificial Sequence; identical to SEQ ID NO: 80762
  derived and/or modified CDS sequence (opt1) from neuraminidase__InfluenzaA__ADK21886

SEQ ID NO: 83081 - RNA, 1410 nt, Artificial Sequence
  derived and/or modified CDS sequence (opt1) from neuraminidase__InfluenzaA__ADK21896
augaaccccaaccagaagaucaucaccaucggcagcgugugcaugaccaucgggauggccaaccugauccuccagaucggcaacaucaucuccaucuggaucagccacuccauccagcuggggaaccagaaccagaucgagacgugcaaccagagcgucaucaccuacgagaacaacaccugggugaaccagaccuacgugaacaucuccaacacgaacuucgccgcgggccagagcgucguguccgugaagcuggccgggaacagcucccucugcccggucagcggcugggccaucuacuccaaggacaacagcauccgcaucggcuccaagggggacguguucgugauccgggagcccuucaucagcugcagcccccuggagugccgcaccuucuuccugacccagggcgcccuccugaacgacaagcacuccaacgggaccaucaaggaccggucccccuaccgcacgcugaugagcugcccgaucggcgagguccccucccccuacaacagccgguucgagagcguggccugguccgcgagcgccugccacgacgggaucaacuggcucaccaucggcaucuccggccccgacaacggggccguggccguccugaaguacaacggcaucaucaccgacaccaucaagagcuggcgcaacaacauccugcggacgcaggaguccgagugcgcgugcgugaacgggagcugcuucaccgugaugaccgacggcccguccgacggccaggccagcuacaagaucuuccgcaucgagaaggggaagaucgucaaguccguggagaugaacgcccccaacuaccacuacgaggagugcagcugcuaccccgacuccagcgagaucacgugcgugugccgggacaacuggcacggcuccaaccgccccugggucagcuucaaccagaaccucgaguaccagaucggguacaucugcuccggcaucuucggggacaacccgcggcccaacgacaagaccggcagcugcggccccguguccagcaacggggccaacggcgugaagggguucuccuucaaguacggcaacggggucuggaucggccgcaccaagagcaucagcucccggaacggcuucgagaugaucugggaccccaacggguggaccggcaccgacaacaacuucagcaucaagcaggacaucguggggacgaacgagugguccggcuacagcggguccuucgugcagcacccggagcugaccggccuggacugcauccgccccugcuucugggucgagcucauccggggccgccccaaggagaacaccaucuggaccagcggguccagcaucuccuucugcggcgugagcuccgacacggucggguggagcuggcccgacggcgccgagcugccguucaccaucgacaaguga

SEQ ID NO: 83082 - RNA, 1410 nt, Artificial Sequence
  derived and/or modified CDS sequence (opt1) from neuraminidase__InfluenzaA__ADK21906
augaaccccaaccagaagaucaucaccaucggcagcgugugcaugaccaucgggauggccaaccugauccuccagaucggcaacaucaucuccaucuggaucagccacuccauccagcuggggaaccagaaccagaucgagacgugcaaccagagcgucaucaccuacgagaacaacaccugggugaaccagaccuacgugaacaucuccaacacgaacuucgccgcgggccagagcgucguguccgugaagcuggccgggaacagcucccucugcccggucagcggcugggccaucuacuccaaggacaacagcauccgcaucggcuccaagggggacguguucgugauccgggagcccuucaucagcugcagcccccuggagugccgcaccuucuuccugacccagggcgcccuccugaacgacaagcacuccaacgggaccaucaaggaccggucccccuaccgcacgcugaugagcugcccgaucggcgagguccccucccccuacaacagccgguucgagagcguggccugguccgcgagcgccugccacgacgggaucaacuggcucaccaucggcaucuccggccccgacaacggggccguggccguccugaaguacaacggcaucaucaccgacaccaucaagagcuggcgcaacaacauccugcggacgcaggaguccgagugcgcgugcgugaacgggagcugcuucaccgugaugaccgacggcccguccgacggccaggccagcuacaagaucuuccgcaucgagaaggggaagaucgucaaguccguggagaugaacgcccccaacuaccacuacgaggagugcagcugcuaccccgacuccagcgagaucacgugcgugugccgggacaacuggcacggcuccaaccgccccuggaucagcuucaaccagaaccucgaguaccagaucggguacaucugcuccggcaucuucggggacaacccgcggcccaacgacaagaccggcagcugcggccccgucuccagcaacggggccaacggcgugaagggguucuccuucaaguacggcaacgggguguggaucggccgcaccaagagcaucggcagccggaacggguucgagaugaucugggaccccaacggcuggaccgggaccgacaacaacuucuccaucaagcaggacaucgucggcaucaacgaguggagcggguacuccggcagcuucgugcagcacccggagcugacgggccuggacugcauccgccccugcuucuggguggagcucauccgggggcgccccaaggagaacaccaucuggaccuccggcagcuccaucagcuucugcggggucaacuccgacaccgugggcuggagcuggcccgacggcgccgagcugccguucacgaucgacaaguga

SEQ ID NO: 83083 - RNA, 1410 nt, Artificial Sequence; identical to SEQ ID NO: 80762
  derived and/or modified CDS sequence (opt1) from neuraminidase__InfluenzaA__ADK21916

SEQ ID NO: 83084 - RNA, 1410 nt, Artificial Sequence; identical to SEQ ID NO: 80762
  derived and/or modified CDS sequence (opt1) from neuraminidase__InfluenzaA__ADK21926

SEQ ID NO: 83085 - RNA, 1410 nt, Artificial Sequence; identical to SEQ ID NO: 80762
  derived and/or modified CDS sequence (opt1) from neuraminidase__InfluenzaA__ADK21936

SEQ ID NO: 83086 - RNA, 1410 nt, Artificial Sequence
  derived and/or modified CDS sequence (opt1) from neuraminidase__InfluenzaA__ADK21946
augaaccccaaccagaagaucaucaccaucggcagcgugugcaugaccaucgggauggccaaccugauccuccagaucggcaacaucaucuccaucuggaucagccacuccauccagcuggggaaccagaaccagaucgagacgugcaaccagagcgucaucaccuacgagaacaacaccugggugaaccagaccuacgugaacaucuccaacacgaacuucgccgcgggccagagcgucguguccgugaagcuggccgggaacagcucccucugcccggucagcggcugggccaucuacuccaaggacaacagcauccgcaucggcuccaagggggacguguucgugauccgggagcccuucaucagcugcagcccccuggagugccgcaccuucuuccugacccagggcgcccuccugaacgacaagcacuccaacgggaccaucaaggaccggucccccuaccgcacgcugaugagcugcccgaucggcgagguccccucccccuacaacagccgguucgagagcguggccugguccgcgagcgccugccacgacgggaucaacuggcucaccaucggcaucuccggccccgacaacggggccguggccguccugaaguacaacggcaucaucaccgacaccaucaagagcuggcgcaacaacauccugcggacgcaggaguccgagugcgcgugcgugaacgggagcugcuucaccgugaugaccgacggcccguccgacggccaggccagcuacaagaucuuccgcaucgagaaggggaagaucgucaaguccguggagaugaacgcccccaacuaccacuacgaggagugcagcugcuaccccgacuccagcgagaucacgugcgugugccgggacaacuggcacggcuccaaccgccccugggucagcuucaaccagaaccucgaguaccagaucggguacaucugcuccggcaucuucggggacaacccgcggcccaacgacaagaccggcagcugcggccccguguccagcaacggggccaacggcgugaagggguucuccuucaaguacggcaacggggucuggaucggccgcaccaagagcaucagcucccggaacggcuucgagaugaucugggaccccaacggguggaccggcaccgacaacaacuucagcaucaagcaggacaucguggggaucaacgagugguccggcuacagcggguccuucgugcagcacccggagcugacgggcauggacugcauccgccccugcuucugggucgagcugauccggggccgccccaaggagaacaccaucuggaccagcggguccagcaucuccuucugcggcgugaacagcgacaccgucgggugguccuggcccgacggcgccgagcucccguucacgaucgacaaguga

SEQ ID NO: 83087 - RNA, 1410 nt, Artificial Sequence
  derived and/or modified CDS sequence (opt1) from neuraminidase__InfluenzaA__ADK21956
augaaccccaaccagaagaucaucaccaucggcagcgugugcaugaccaucgggauggccaaccugauccuccagaucggcaacaucaucuccaucuggaucagccacuccauccagcuggggaaccagaaccagaucgagacgugcaaccagagcgucaucaccuacgagaacaacaccugggugaaccagaccuacgugaacaucuccaacacgaacuucgccgcgggccagagcgucguguccgugaagcuggccgggaacagcucccucugcccggucagcggcugggccaucuacuccaaggacaacagcauccgcaucggcuccaagggggacguguucgugauccgggagcccuucaucagcugcagcccccuggagugccgcaccuucuuccugacccagggcgcccuccugaacgacaagcacuccaacgggaccaucaaggaccggucccccuaccgcacgcugaugagcugcccgaucggcgagguccccucccccuacaacagccgguucgagagcguggccugguccgcgagcgccugccacgacgggaucaacuggcucaccaucggcaucuccggccccgacaacggggccguggccguccugaaguacaacggcaucaucaccgacaccaucaagagcuggcgcaacaacauccugcggacgcaggaguccgagugcgcgugcgugaacgggagcugcuucaccgugaugaccgacggcccguccgacggccaggccagcuacaagaucuucaagaucgagaaggggaagaucgucaaguccguggagaugaacgcccccaacuaccacuacgaggagugcagcugcuaccccgacuccagcgagaucacgugcgugugccgcgacaacuggcacggcuccaaccggcccugggucagcuucaaccagaaccucgaguaccagaucggguacaucugcuccggcaucuucggggacaacccgcgccccaacgacaagaccggcagcugcggccccguguccagcaacggggccaacggcgugaagggguucuccuucaaguacggcaacggggucuggaucggccggaccaagagcaucagcucccgcaacggcuucgagaugaucugggaccccaacggguggaccggcaccgacaacaacuucagcaucaagcaggacaucguggggaucaacgagugguccggcuacagcggguccuucgugcagcacccggagcugacgggccuggacugcauccggcccugcuucugggucgagcucauccgcggccggcccaaggagaacaccaucuggaccagcggguccagcaucuccuucugcggcgugaacagcaacaccgucgggugguccuggcccgacggcgccgagcugccguucacgaucgacaaguga

SEQ ID NO: 83088 - RNA, 1410 nt, Artificial Sequence; identical to SEQ ID NO: 80762
  derived and/or modified CDS sequence (opt1) from neuraminidase__InfluenzaA__ADK32393

SEQ ID NO: 83089 - RNA, 1410 nt, Artificial Sequence; identical to SEQ ID NO: 80762
  derived and/or modified CDS sequence (opt1) from neuraminidase__InfluenzaA__ADK32403

SEQ ID NO: 83090 - RNA, 1410 nt, Artificial Sequence; identical to SEQ ID NO: 80762
  derived and/or modified CDS sequence (opt1) from neuraminidase__InfluenzaA__ADK32413

SEQ ID NO: 83091 - RNA, 1410 nt, Artificial Sequence
  derived and/or modified CDS sequence (opt1) from neuraminidase__InfluenzaA__ADK32423
augaaccccaaccagaagaucaucaccaucggcagcgugugcaugaccaucgggaugacgaaccugauccuccagaucggcaacaucaucuccaucuggaucagccacuccauccagcuggggaaccagaaccagaucgagaccugcaaccagagcgucaucaccuacgagaacaacaccugggugaaccagacguacgugaacaucuccaacaccaacuucgccgccggccagagcgucguguccgugaagcuggcggggaacagcucccucugcccggucagcggcugggccaucuacuccaaggacaacagcauccgcaucggcuccaagggggacguguucgugauccgggagcccuucaucagcugcagcccccuggagugccgcaccuucuuccugacccagggcgcccuccugaacgacaagcacuccaacgggacgaucaaggaccggucccccuaccgcacccugaugagcugcccgaucggcgagguccccucccccuacaacagccgguucgagagcguggccugguccgccagcgcgugccacgacgggaucaacuggcucaccaucggcaucuccggccccgacaacggggccguggccguccugaaguacaacggcaucaucaccgacacgaucaagagcuggcgcaacaacauccugcggacccaggaguccgagugcgccugcgugaacgggagcugcuucaccgugaugaccgacggcccguccgacggccaggcgagcuacaagaucuuccgcaucgagaaggggaagaucgucaaguccguggagaugaacgcccccaacuaccacuacgaggagugcagcugcuaccccgacuccagcgagaucacgugcgugugccgggacaacuggcacggcuccaaccgccccugggucagcuucaaccagaaccucgaguaccagaucggguacaucugcuccggcaucuucggggacaacccgcggcccaacgacaagaccggcagcugcggccccguguccagcaacggggccaacggcgugaagggguucuccuucaaguacggcaacggggucuggaucggccgcaccaagagcaucagcucccggaacggcuucgagaugaucugggaccccaacggguggaccggcacggacaacaacuucagcaucaagcaggacaucguggggaucaacgagugguccggcuacagcggguccuucgugcagcacccggagcugaccggccuggacugcauccgccccugcuucugggucgagcucauccggggccgccccaaggagaacaccaucuggaccagcggguccagcaucuccuucugcggcgugaacagcgacacggucgggugguccuggcccgacggcgccgagcugccguucaccaucgacaaguga

SEQ ID NO: 83092 - RNA, 1410 nt, Artificial Sequence; identical to SEQ ID NO: 80762
  derived and/or modified CDS sequence (opt1) from neuraminidase__InfluenzaA__ADK32433

SEQ ID NO: 83093 - RNA, 1410 nt, Artificial Sequence; identical to SEQ ID NO: 80762
  derived and/or modified CDS sequence (opt1) from neuraminidase__InfluenzaA__ADK32443

SEQ ID NO: 83094 - RNA, 1410 nt, Artificial Sequence
  derived and/or modified CDS sequence (opt1) from neuraminidase__InfluenzaA__ADK32453
augaaccccaaccagaagaucaucaccaucggcagcgugugcaugaccaucgggauggccaaccugauccuccagaucggcaacaucaucuccaucuggaucagccacuccauccagcuggggaaccagaaccagaucgagacgugcaaccagagcgucaucaccuacgagaacaacaccugggugaaccagaccuacgugaacaucuccaacacgaacuucgccgcgggccagagcgucguguccgugaagcugagcgggaacuccagccucugcccggucuccggcugggccaucuacagcaaggacaacuccgugcgcaucggcagcaagggggacguguucgucauccgggagcccuucaucuccugcagcccccuggagugccgcaccuucuuccugacccagggcgcccuccugaacgacaagcacuccaacgggaccaucaaggaccggagccccuaccgcacgcugauguccugcccgaucggcgaggugcccagccccuacaacagccgguucgaguccguggccuggagcgccuccgcgugccacgacgggaucaacuggcucaccaucggcaucagcggccccgacaacggggccgucgccgugcugaaguacaacggcaucaucaccgacaccaucaaguccuggcgcaacaacauccugcggacgcaggagagcgagugcgccugcgugaacggguccugcuucaccgucaugaccgacggcccgagcgacggccaggcguccuacaagaucuuccgcaucgagaaggggaagaucgucaagagcguggagaugaacgcccccaacuaccacuacgaggagugcuccugcuaccccgacagcuccgagaucacgugcgugugccgggacaacuggcacggcagcaaccgccccuggguguccuucaaccagaaccucgaguaccagaucggguacaucugcagcggcaucuucggggacaacccgcggcccaacgacaagaccggcuccugcggccccgugagcuccaacggggccaacggcgucaagggguucagcuucaaguacggcaacgggguguggaucggccgcaccaagagcaucuccagccggaacggcuucgagaugaucugggaccccaacggguggaccggcaccgacaacaacuucuccaucaagcaggacaucguggggaucaacgaguggagcggcuacuccgggagcuucguccagcacccggagcugacgggccuggacugcauccgccccugcuucuggguggagcucauccggggccgccccaaggagaacaccaucuggaccuccgggagcuccaucagcuucugcggcgucaacuccgacaccgugggguggagcuggcccgacggcgccgagcugccguucacgaucgacaaguga

SEQ ID NO: 83095 - RNA, 1410 nt, Artificial Sequence
  derived and/or modified CDS sequence (opt1) from neuraminidase__InfluenzaA__ADK32463
augaaccccaaccagaagaucaucaccaucggcagcgugugcaugaccaucgggauggccaaccugauccuccagaucggcaacaucaucuccaucuggaucagccacuccauccagcuggggaaccagaaccagaucgagacgugcaaccagagcgucaucaccuacgagaacaacaccugggugaaccagaccuacgugaacaucuccaacacgaacuucgccgcgggccagagcgucguguccgugaagcuggccgggaacagcucccucugcccggucagcggcugggccaucuacuccaaggacaacagcauccgcaucggcuccaagggggacguguucgugauccgggagcccuucaucagcugcagcccccuggagugccgcaccuucuuccugacccagggcgcccucaucaacgacaagcacuccaacgggaccaucaaggaccggucccccuaccgcacgcugaugagcugcccgaucggcgagguccccucccccuacaacagccgguucgagagcguggccugguccgcgagcgccugccacgacgggaucaacuggcugaccaucggcaucuccggccccgacaacggggccguggccguccucaaguacaacggcaucaucaccgacaccaucaagagcuggcgcaacaacauccugcggacgcaggaguccgagugcgcgugcgugaacgggagcugcuucaccgugaugaccgacggcccguccgacggccaggccagcuacaagaucuuccgcaucgagaaggggaagaucgucaaguccguggagaugaacgcccccaacuaccacuacgaggagugcagcugcuaccccgacuccagcgagaucacgugcgugugccgggacaacuggcacggcuccaaccgccccugggucagcuucaaccagaaccuggaguaccagaucggguacaucugcuccggcaucuucggggacaacccgcggcccaacgacaagaccggcagcugcggccccguguccagcaacggggccaacggcgugaagggguucuccuucaaguacggcaacggggucuggaucggccgcaccaagagcaucagcucccggaacggcuucgagaugaucugggaccccaacggguggaccggcaccgacaacaacuucagcaucaagcaggacaucguggggaucaacgagugguccggcuacagcggguccuucgugcagcacccggagcucacgggccuggacugcauccgccccugcuucugggucgagcugauccggggccgccccaaggagaacaccaucuggaccagcggguccagcaucuccuucugcggcgugaacagcgacaccgucgggugguccuggcccgacggcgccgagcucccguucacgaucgacaaguga

SEQ ID NO: 83096 - RNA, 1410 nt, Artificial Sequence; identical to SEQ ID NO: 80762
  derived and/or modified CDS sequence (opt1) from neuraminidase__InfluenzaA__ADK32473

SEQ ID NO: 83097 - RNA, 1410 nt, Artificial Sequence; identical to SEQ ID NO: 80762
  derived and/or modified CDS sequence (opt1) from neuraminidase__InfluenzaA__ADK32483

SEQ ID NO: 83098 - RNA, 1410 nt, Artificial Sequence; identical to SEQ ID NO: 80762
  derived and/or modified CDS sequence (opt1) from neuraminidase__InfluenzaA__ADK32493

SEQ ID NO: 83099 - RNA, 1410 nt, Artificial Sequence; identical to SEQ ID NO: 82675
  derived and/or modified CDS sequence (opt1) from neuraminidase__InfluenzaA__ADK32505

SEQ ID NO: 83100 - RNA, 1410 nt, Artificial Sequence
  derived and/or modified CDS sequence (opt1) from neuraminidase__InfluenzaA__ADK32640
augaaccccaaccagaagaucaucaccaucggcagcgugugcaugaccaucgggauggccaaccugauccuccagaucggcaacaucaucuccaucuggaucagccacuccauccagcuggggaaccagaaccagaucgagacgugcaaccagagcgucaucaccuacgagaacaacaccugggugaaccagaccuacgugaacaucuccaacacgaacuucgccgcgggccagagcgucgccuccgugaagcuggccgggaacagcucccucugcccggugagcggcugggccaucuacuccaaggacaacagcauccgcaucggcuccaagggggacgucuucgugauccgggagcccuucaucagcugcagcccccuggagugccgcaccuucuuccugacccagggcgcccuccugaacgacaagcacuccaacgggaccaucaaggaccggucccccuaccgcacgcugaugagcugcccgaucggcgaggugcccucccccuacaacagccgguucgagagcgucgcgugguccgccagcgccugccacgacgggaucaacuggcucaccaucggcaucuccggccccgacaacggggccguggcggugcugaaguacaacggcaucaucaccgacaccaucaagagcuggcgcaacaacauccugcggacgcaggaguccgagugcgccugcgucaacgggagcugcuucaccgugaugaccgacggcccguccgacggccaggccagcuacaagaucuuccgcaucgagaaggggaagaucgugaaguccgucgagaugaacgcccccaacuaccacuacgaggagugcagcugcuaccccgacuccagcgagaucacgugcgugugccgggacaacuggcacggcuccaaccgccccugggugagcuucaaccagaaccucgaguaccagaucggguacaucugcuccggcaucuucggggacaacccgcggcccaacgacaagaccggcagcugcggccccgucuccagcaacggggccaacggcgugaagggguucuccuucaaguacggcaacgggguguggaucggccgcaccaagagcaucagcucccggaacggcuucgagaugaucugggaccccaacggguggaccggcaccgacaacaacuucagcaucaagcaggacaucgucgggaucaacgagugguccggcuacagcggguccuucgugcagcacccggagcugacgggccuggacugcauccgccccugcuucuggguggagcucauccggggccgccccaaggagaacaccaucuggaccagcggguccagcaucuccuucugcggcgucaacagcgacaccguggggugguccuggcccgacggcgcggagcugccguucacgaucgacaaguga

SEQ ID NO: 83101 - RNA, 1410 nt, Artificial Sequence; identical to SEQ ID NO: 80762
  derived and/or modified CDS sequence (opt1) from neuraminidase__InfluenzaA__ADK32650

SEQ ID NO: 83102 - RNA, 1410 nt, Artificial Sequence; identical to SEQ ID NO: 80762
  derived and/or modified CDS sequence (opt1) from neuraminidase__InfluenzaA__ADK32660

SEQ ID NO: 83103 - RNA, 1410 nt, Artificial Sequence; identical to SEQ ID NO: 80762
  derived and/or modified CDS sequence (opt1) from neuraminidase__InfluenzaA__ADK32670

SEQ ID NO: 83104 - RNA, 1410 nt, Artificial Sequence
  derived and/or modified CDS sequence (opt1) from neuraminidase__InfluenzaA__ADK32680
augaaccccaaccagaagaucaucaccaucggcagcgugugcaugaccaucgggauggccaaccugauccuccagaucggcaacaucaucuccaucuggaucagccacuccauccagcuggggaaccagaaccagaucgagacgugcaaccagagcgucaucaccuacaagaacaacaccugggugaaccagaccuacgugaacaucuccaacacgaacuucgccgcgggccagagcgucguguccgugaagcuggccgggaacagcucccucugcccggucagcggcugggccaucuacuccaaggacaacagcauccgcaucggcuccaagggggacguguucgugauccgggagcccuucaucagcugcagcccccuggagugccgcaccuucuuccugacccagggcgcccuccugaacgacaagcacuccaacgggaccaucaaggaccggucccccuaccgcacgcugaugagcugcccgaucggcgagguccccucccccuacaacagccgguucgagagcguggccugguccgcgagcgccugccacgacgggaucaacuggcucaccaucggcaucuccggccccgacaacggggccguggccguccugaaguacaacggcaucaucaccgacaccaucaagagcuggcgcaacaacauccugcggacgcaggaguccgagugcgcgugcgugaacgggagcugcuucaccgugaugaccgacggcccguccgacggccaggccagcuacaagaucuuccgcaucgagaaggggaagaucgucaaguccguggagaugaacgcccccaacuaccacuacgaggagugcagcugcuaccccgacuccagcgagaucacgugcgugugccgggacaacuggcacggcuccaaccgccccugggucagcuucaaccagaaccucgaguaccagaucggguacaucugcuccggcaucuucggggacaacccgcggcccaacgacaagaccggcagcugcggccccguguccagcaacggggccaacggcgugaagggguucuccuucaaguacggcaacggggucuggaucggccgcaccaagagcaucagcucccggaacggcuucgagaugaucugggaccccaacggguggaccggcaccgacaacaacuucagcaucaagcaggacaucguggggaucaacgagugguccggcuacagcggguccuucgugcagcacccggagcugacgggccuggacugcauccgccccugcuucugggucgagcucauccggggccgccccaaggagaacaccaucuggaccagcggguccagcaucuccuucugcggcgugaacagcgacaccgucgggugguccuggcccgacggcgccgagcugccguucacgaucgacaaguga

SEQ ID NO: 83105 - RNA, 1410 nt, Artificial Sequence; identical to SEQ ID NO: 80762
  derived and/or modified CDS sequence (opt1) from neuraminidase__InfluenzaA__ADK32690

SEQ ID NO: 83106 - RNA, 1410 nt, Artificial Sequence; identical to SEQ ID NO: 80762
  derived and/or modified CDS sequence (opt1) from neuraminidase__InfluenzaA__ADK32700

SEQ ID NO: 83107 - RNA, 1410 nt, Artificial Sequence; identical to SEQ ID NO: 80762
  derived and/or modified CDS sequence (opt1) from neuraminidase__InfluenzaA__ADK32779

SEQ ID NO: 83108 - RNA, 1410 nt, Artificial Sequence; identical to SEQ ID NO: 80762
  derived and/or modified CDS sequence (opt1) from neuraminidase__InfluenzaA__ADK33614

SEQ ID NO: 83109 - RNA, 1410 nt, Artificial Sequence; identical to SEQ ID NO: 80762
  derived and/or modified CDS sequence (opt1) from neuraminidase__InfluenzaA__ADK33624

SEQ ID NO: 83110 - RNA, 1410 nt, Artificial Sequence; identical to SEQ ID NO: 80762
  derived and/or modified CDS sequence (opt1) from neuraminidase__InfluenzaA__ADK33634

SEQ ID NO: 83111 - RNA, 1410 nt, Artificial Sequence
  derived and/or modified CDS sequence (opt1) from neuraminidase__InfluenzaA__ADK33644
augaaccccaaccagaagaucaucaccaucggcagcgugugcaugaccaucgggauggccaaccugauccuccagaucggcaacaucaucuccaucuggaucagccacuccauccagcuggggaaccagaaccagaucgagacgugcaaccagagcgucaucaccuacgagaacaacaccugggugaaccagaccuacgugaacaucuccaacacgaacuucgccgcgggccagagcgucguguccgugaagcuggccgggaacagcucccucugcccggucagcggcugggccaucuacuccaaggacaacagcauccgcaucggcuccaagggggacguguucgugauccgggagcccuucaucagcugcagcccccuggagugccgcaccuucuuccugacccagggcgcccuccugaacgacaagcacuccaacgggaccaucaaggaccggucccccuaccgcacgcugaugagcugcccgaucggcgagguccccucccccuacaacagccgguucgagagcguggccugguccgcgagcgccugccacgacgggaucaacuggcucaccaucggcaucuccggcagcgacaacggggccguggccguccugaaguacaacggcaucaucaccgacaccaucaaguccuggcgcaacaacauccugcggacgcaggagagcgagugcgcgugcgugaacggguccugcuucaccgugaugaccgacggccccagcgacggccaggccuccuacaagaucuuccgcaucgagaaggggaagaucgucaagagcguggagaugaacgccccgaacuaccacuacgaggagugcuccugcuaccccgacagcuccgagaucacgugcgugugccgggacaacuggcacggcagcaaccgccccugggucuccuucaaccagaaccucgaguaccagaucggguacaucugcagcggcaucuucggggacaacccccggccgaacgacaagaccggcuccugcggccccgugagcuccaacggggccaacggcgugaagggguucagcuucaaguacggcaacggggucuggaucggccgcaccaagagcaucuccagccggaacggcuucgagaugaucugggaccccaacggguggaccggcaccgacaacaacuucuccaucaagcaggacaucguggggaucaacgaguggagcggcuacuccgggagcuucgugcagcaccccgagcugacgggccuggacugcauccgcccgugcuucugggucgagcucauccggggccgccccaaggagaacaccaucuggaccuccgggagcuccaucagcuucugcggcgugaacuccgacaccgucggguggagcuggcccgacggcgccgagcugcccuucacgaucgacaaguga

SEQ ID NO: 83112 - RNA, 1410 nt, Artificial Sequence; identical to SEQ ID NO: 82493
  derived and/or modified CDS sequence (opt1) from neuraminidase__InfluenzaA__ADK33654

SEQ ID NO: 83113 - RNA, 1410 nt, Artificial Sequence; identical to SEQ ID NO: 82493
  derived and/or modified CDS sequence (opt1) from neuraminidase__InfluenzaA__ADK33664

SEQ ID NO: 83114 - RNA, 1410 nt, Artificial Sequence; identical to SEQ ID NO: 80762
  derived and/or modified CDS sequence (opt1) from neuraminidase__InfluenzaA__ADK33674

SEQ ID NO: 83115 - RNA, 1410 nt, Artificial Sequence; identical to SEQ ID NO: 80762
  derived and/or modified CDS sequence (opt1) from neuraminidase__InfluenzaA__ADK33684

SEQ ID NO: 83116 - RNA, 1410 nt, Artificial Sequence; identical to SEQ ID NO: 82113
  derived and/or modified CDS sequence (opt1) from neuraminidase__InfluenzaA__ADK33694

SEQ ID NO: 83117 - RNA, 1410 nt, Artificial Sequence; identical to SEQ ID NO: 80762
  derived and/or modified CDS sequence (opt1) from neuraminidase__InfluenzaA__ADK33704

SEQ ID NO: 83118 - RNA, 1410 nt, Artificial Sequence; identical to SEQ ID NO: 80762
  derived and/or modified CDS sequence (opt1) from neuraminidase__InfluenzaA__ADK33714

SEQ ID NO: 83119 - RNA, 1410 nt, Artificial Sequence; identical to SEQ ID NO: 80762
  derived and/or modified CDS sequence (opt1) from neuraminidase__InfluenzaA__ADK33744

SEQ ID NO: 83120 - RNA, 1410 nt, Artificial Sequence
  derived and/or modified CDS sequence (opt1) from neuraminidase__InfluenzaA__ADK33754
augaaccccaaccagaagaucaucaccaucggcagcgugugcaugaccaucgggauggccaacuucauccugcagaucggcaacaucaucuccaucuggaucagccacuccauccagcucgggaaccagaaccagaucgagacgugcaaccagagcgucaucaccuacgagaacaacaccugggugaaccagaccuacgugaacaucuccaacacgaacuucgccgcgggccagagcgucguguccgugaagcuggccgggaacagcucccugugcccggucagcggcugggccaucuacuccaaggacaacagcauccgcaucggcuccaagggggacguguucgugauccgggagcccuucaucagcugcagcccccucgagugccgcaccuucuuccugacccagggcgcccugcucaacgacaagcacuccaacgggaccaucaaggaccggucccccuaccgcacgcugaugagcugcccgaucggcgagguccccucccccuacaacagccgguucgagagcguggccugguccgcgagcgccugccacgacgggaucaacuggcugaccaucggcaucuccggccccgacaacggggccguggccguccucaaguacaacggcaucaucaccgacaccaucaagagcuggcgcaacaacauccugcggacgcaggaguccgagugcgcgugcgugaacgggagcugcuucaccgugaugaccgacggcccguccgacggccaggccagcuacaagaucuuccgcaucgagaaggggaagaucgucaaguccguggagaugaacgcccccaacuaccacuacgaggagugcagcugcuaccccgacuccagcgagaucacgugcgugugccgggacaacuggcacggcuccaaccgccccugggucagcuucaaccagaaccuggaguaccagaucggguacaucugcuccggcaucuucggggacaacccgcggcccaacgacaagaccggcagcugcggccccguguccagcaacggggccaacggcgugaagggguucuccuucaaguacggcaacggggucuggaucggccgcaccaagagcaucagcucccggaacggcuucgagaugaucugggaccccaacggguggaccggcaccgacaacaacuucagcaucaagcaggacaucguggggaucaacgagugguccggcuacagcggguccuucgugcagcacccggagcucacgggccuggacugcauccgccccugcuucugggucgagcugauccggggccgccccaaggagaacaccaucuggaccagcggguccagcaucuccuucugcggcgugaacagcgacaccgucgggugguccuggcccgacggcgccgagcucccguucacgaucgacaaguga

SEQ ID NO: 83121 - RNA, 1410 nt, Artificial Sequence
  derived and/or modified CDS sequence (opt1) from neuraminidase__InfluenzaA__ADK33764
augaaccccaaccagaagaucaucaccaucggcagcgugugcaugaccaucgggauggccaacuucauccugcagaucggcaacaucaucuccaucuggaucagccacuccauccagcucgggaaccagaaccagaucgagacgugcaaccagagcgucaucaccuacgagaacaacaccugggugaaccagaccuacgugaacaucuccaacacgaacuucgccgcgggccagagcgucguguccgugaagcuggccgggaacagcucccugugcccggucagcggcugggccaucuacuccaaggacaacagcauccgcaucggcuccaagggggacguguucgugauccgggagcccuucaucagcugcagcccccucgagugccgcaccuucuuccugacccagggcgcccugcucaacgacaagcacuccaacgggaccaucaaggaccggucccccuaccgcacgcugaugagcugcccgaucggcgagguccccucccccuacaacagccgguucgagagcguggccugguccgcgagcgccugccacgacgggaucaacuggcugaccaucggcaucuccggccccgacaacggggccguggccguccucaaguacaacggcaucaucaccgacaccaucaagagcuggcgcaacaacauccugcggacgcaggaguccgagugcgcgugcgugaacgggagcugcuucaccgugaugaccgacggcccguccgacggccaggccagcuacaagaucuuccgcaucgagaaggggaagaucgucaaguccguggagaugaacgcccccaacuaccacuacgaggagugcagcugcuaccccgacuccagcgagaucacgugcgugugccgggacaacuggcacggcuccaaccgccccugggucagcuucaaccagaaccuggaguaccagaugggguacaucugcuccggcaucuucggggacaacccgcggcccaacgacaagaccggcagcugcggccccguguccagcaacggggccaacggcgugaagggguucuccuucaaguacggcaacggggucuggaucggccgcaccaagagcaucagcucccggaacggcuucgagaugaucugggaccccaacggguggaccggcaccgacaacaacuucagcaucaagcaggacaucguggggaucaacgagugguccggcuacagcggguccuucgugcagcacccggagcucacgggccuggacugcauccgccccugcuucugggucgagcugauccggggccgccccaaggagaacaccaucuggaccagcggguccagcaucuccuucugcggcgugaacagcgacaccgucgggugguccuggcccgacggcgccgagcucccguucacgaucgacaaguga

SEQ ID NO: 83122 - RNA, 1410 nt, Artificial Sequence
  derived and/or modified CDS sequence (opt1) from neuraminidase__InfluenzaA__ADK33774
augaaccccaaccagaagaucaucaccaucggcagcgugugcaugaccaucgggauggccaaccugauccuccagaucggcaacaucaucuccaucuggaucagccacuccauccagcuggggaaccagaaccagaucgagacgugcaaccagagcgucaucaccuacgagaacaacaccugggugaaccagaccuacgugaacaucuccaacacgaacuucgccgcgggccagagcgucguguccgugaagcuggucgggaacagcucccucugcccggugagcggcugggccaucuacuccaaggacaacagcauccgcaucggcuccaagggggacguguucgucauccgggagcccuucaucagcugcagcccccuggagugccgcaccuucuuccugacccagggcgcccuccugaacgacaagcacuccaacgggaccaucaaggaccggucccccuaccgcacgcugaugagcugcccgaucggcgaggugcccucccccuacaacagccgguucgagagcguggccugguccgccagcgcgugccacgacgggaucaacuggcucaccaucggcaucuccggccccgacaacggggccgucgccgugcugaaguacaacggcaucaucaccgacaccaucaagagcuggcgcaacaacauccugcggacgcaggaguccgagugcgccugcgugaacgggagcugcuucaccgucaugaccgacggcccguccgacggccaggcgagcuacaagaucuuccgcaucgagaaggggaagaucgugaaguccguggagaugaacgcccccaacuaccacuacgaggagugcagcugcuaccccgacuccagcgagaucacgugcgucugccgggacaacuggcacggcuccaaccgccccugggugagcuucaaccagaaccucgaguaccagaugggguacaucugcuccggcaucuucggggacaacccgcggcccaacgacaagaccggcagcugcggccccguguccagcaacggggccaacggcgucaagggguucuccuucaaguacggcaacgggguguggaucggccgcaccaagagcaucagcucccggaacggcuucgagaugaucugggaccccaacggguggaccggcaccgacaacaacuucagcaucaagcaggacaucguggggaucaacgagugguccggcuacagcggguccuucguccagcacccggagcugacgggccuggacugcauccgccccugcuucuggguggagcucauccggggccgccccaaggagaacaccaucuggaccagcggguccagcaucuccuucugcggcgucaacagcgacaccguggggugguccuggcccgacggcgccgagcugccguucacgaucgacaaguga

SEQ ID NO: 83123 - RNA, 1410 nt, Artificial Sequence; identical to SEQ ID NO: 81736
  derived and/or modified CDS sequence (opt1) from neuraminidase__InfluenzaA__ADK33784

SEQ ID NO: 83124 - RNA, 1410 nt, Artificial Sequence; identical to SEQ ID NO: 80762
  derived and/or modified CDS sequence (opt1) from neuraminidase__InfluenzaA__ADK33794

SEQ ID NO: 83125 - RNA, 1410 nt, Artificial Sequence; identical to SEQ ID NO: 80762
  derived and/or modified CDS sequence (opt1) from neuraminidase__InfluenzaA__ADK33804

SEQ ID NO: 83126 - RNA, 1410 nt, Artificial Sequence
  derived and/or modified CDS sequence (opt1) from neuraminidase__InfluenzaA__ADK33814
augaaccccaaccagaagaucaucaccaucggcagcgugugcaugaccaucgggauggccaaccugauccuccagaucggcaacaucaucuccaucuggaucagccacuccauccagcuggggaaccagaaccagaucgagacgugcaaccagagcgucaucaccuacgagaacaacaccugggugaacaagaccuacgugaacaucuccaacacgaacuucgccgcgggccagagcgucguguccgugaagcuggccgggaacagcucccucugcccggucagcggcugggccaucuacuccaaggacaacagcauccgcaucggcuccaagggggacguguucgugauccgggagcccuucaucagcugcagcccccuggagugccgcaccuucuuccugacccagggcgcccuccugaacgacaagcacuccaacgggaccaucaaggaccggucccccuaccgcacgcugaugagcugcccgaucggcgagguccccucccccuacaacagccgguucgagagcguggccugguccgcgagcgccugccacgacgggaucaacuggcucaccaucggcaucuccggccccgacaacggggccguggccguccugaaguacaacggcaucaucaccgacaccaucaagagcuggcgcaacaacauccugcggacgcaggaguccgagugcgcgugcgugaacgggagcugcuucaccgugaugaccgacggcccguccgacggccaggccagcuacaagaucuuccgcaucgagaaggggaagaucgucaaguccguggagaugaacgcccccaacuaccacuacgaggagugcagcugcuaccccgacuccagcgagaucacgugcgugugccgggacaacuggcacggcuccaaccgccccugggucagcuucaaccagaaccucgaguaccagaugggguacaucugcuccggcaucuucggggacaacccgcggcccaacgacaagaccggcagcugcggccccguguccagcaacggggccaacggcgugaagggguucuccuucaaguacggcaacggggucuggaucggccgcaccaagagcaucagcucccggaacggcuucgagaugaucugggaccccaacggguggaccggcaccgacaacaacuucagcaucaagcaggacaucguggggaucaacgagugguccggcuacagcggguccuucgugcagcacccggagcugacgggccuggacugcauccgccccugcuucugggucgagcucauccggggccgccccaaggagaacaccaucuggaccagcggguccagcaucuccuucugcggcgugaacagcgacaccgucgggugguccuggcccgacggcgccgagcugccguucacgaucgacaaguga

SEQ ID NO: 83127 - RNA, 1410 nt, Artificial Sequence
  derived and/or modified CDS sequence (opt1) from neuraminidase__InfluenzaA__ADK33824
augaaccccaaccagaagaucaucaccaucggcagcgugugcaugaccaucgggauggccaaccugauccuccagaucggcaacaucaucuccaucuggaucagccacuccauccagcuggggaaccagaaccagaucgagacgugcaaccagagcgucaucaccuacgagaacaacaccugggugaaccagaccuacaucaacaucuccaacacgaacuucgccgcgggccagagcguggucuccgugaagcuggccgggaacagcucccucugcccggugagcggcugggccaucuacuccaaggacaacagcauccgcaucggcuccaagggggacgucuucgugauccgggagcccuucaucagcugcagcccccuggagugccgcaccuucuuccugacccagggcgcccuccugaacgacaagcacuccaacgggaccaucaaggaccggucccccuaccgcacgcugaugagcugcccgaucggcgaggugcccucccccuacaacagccgguucgagagcgucgccugguccgcgagcgccugccacgacgggaucaacuggcucaccaucggcaucuccggccccgacaacggggccguggccgugcugaaguacaacggcaucaucaccgacaccaucaagagcuggcgcaacaacauccugcggacgcaggaguccgagugcgcgugcgucaacgggagcugcuucaccgugaugaccgacggcccguccgacggccaggccagcuacaagaucuuccgcaucgagaaggggaagaucgugaaguccgucgagaugaacgcccccaacuaccacuacgaggagugcagcugcuaccccgacuccagcgagaucacgugcgugugccgggacaacuggcacggcuccaaccgccccugggugagcuucaaccagaaccucgaguaccagaucggguacaucugcuccggcaucuucggggacaacccgcggcccaacgacaagaccggcagcugcggccccgucuccagcaacggggccaacggcgugaagggguucuccuucaaguacggcaacgggguguggaucggccgcaccaagagcaucagcucccggaacggcuucgagaugaucugggaccccaacggguggaccggcaccgacaacaacuucagcaucaagcaggacaucgucgggaucaacgagugguccggcuacagcggguccuucgugcagcacccggagcugacgggccuggacugcauccgccccugcuucuggguggagcucauccggggccgccccaaggagaacaccaucuggaccagcggguccagcaucuccuucugcggcgucaacagcgacaccguggggugguccuggcccgacggcgccgagcugccguucacgaucgacaaguga

SEQ ID NO: 83128 - RNA, 1410 nt, Artificial Sequence; identical to SEQ ID NO: 81939
  derived and/or modified CDS sequence (opt1) from neuraminidase__InfluenzaA__ADK33834

SEQ ID NO: 83129 - RNA, 1410 nt, Artificial Sequence
  derived and/or modified CDS sequence (opt1) from neuraminidase__InfluenzaA__ADK33844
augaaccccaaccagaagaucaucaccaucggcagcgugugcaugaccaucgggauggccaaccugauccuccagaucggcaacaucaucuccaucuggaucagccacuccauccagcuggggaaccagaaccagaucgagacgugcaaccagagcgucaucaccuacgagaacaacaccugggugaaccagaccuacgugaacaucuccaacacgaacuucgccgcgggccagagcgucguguccgccaagcuggccgggaacagcccgcucugccccguguccggcugggccaucuacagcaaggacaacuccauccgcaucggcagcaagggggacgucuucgugauccgggagcccuucaucuccugcagcccccuggagugccgcaccuucuuccugacccagggcgcccuccugaacgacaagcacuccaacgggaccaucaaggaccggagcccguaccgcacgcugauguccugccccaucggcgaggugcccagccccuacaacucccgguucgagagcgucgcguggagcgccuccgccugccacgacgggaucaacuggcucaccaucggcaucagcggcccggacaacggggccguggcggugcugaaguacaacggcaucaucaccgacaccaucaaguccuggcgcaacaacauccugcggacgcaggagagcgagugcgccugcgucaacggguccugcuucaccgugaugaccgacggccccagcgacggccaggccuccuacaagaucuuccgcaucgagaaggggaagaucgucaagagcguggagaugaacgcccccaacuaccacuacgaggagugcuccugcuaccccgacagcuccgagaucacgugcgugugccgggacaacuggcacggcagcaaccgcccguggguguccuucaaccagaaccucgaguaccagaucggguacaucugcagcggcaucuucggggacaacccccggcccaacgacaagaccggcuccugcggccccgucagcuccaacggggccaacggcgugaagggguucagcuucaaguacggcaacgggguguggaucggccgcaccaaguccaucagcagccggaacggcuucgagaugaucugggacccgaacggguggaccggcaccgacaacaacuucuccaucaagcaggacaucgucgggaucaacgaguggagcggcuacuccgggagcuucgugcagcaccccgagcugacgggccuggacugcauccgccccugcuucuggguggagcucauccggggccgccccaaggagaacaccaucuggaccuccgggagcuccaucagcuucugcggcgucaacuccgacaccgugggguggagcuggccggacggcgcggagcugcccuucacgaucgacaaguga

SEQ ID NO: 83130 - RNA, 1410 nt, Artificial Sequence; identical to SEQ ID NO: 81939
  derived and/or modified CDS sequence (opt1) from neuraminidase__InfluenzaA__ADK33854

SEQ ID NO: 83131 - RNA, 1410 nt, Artificial Sequence; identical to SEQ ID NO: 82653
  derived and/or modified CDS sequence (opt1) from neuraminidase__InfluenzaA__ADK33864

SEQ ID NO: 83132 - RNA, 1410 nt, Artificial Sequence
  derived and/or modified CDS sequence (opt1) from neuraminidase__InfluenzaA__ADK33874
augaaccccaaccagaagaucaucaccaucggcagcgugugcaugaccaucgggauggccaaccugauccuccagaucggcaacaucaucuccaucuggaucagccacuccauccagcuggggaaccagaaccagaucgagacgugcaaccagagcgucaucaccuacgagaacaacaccugggugaaccagaccuacgugaacaucuccaacacgaacuucgccgcgggccagagcgucguguccgugaagcuggccgggaacagcucccucugcccggucagcggcugggccaucuacuccaaggacaacagcauccgcaucggcuccaagggggacguguucgugauccgggagcccuucaucagcugcagcccccuggagugccgcaccuucuuccugacccagggcgcccuccugaacgacaagcacuccaacgggaccaucaaggaccggucccccuaccgcacgcugaugagcugcccgaucggcgagguccccucccccuacaacagccgguucgagagcguggccugguccgcgagcgccugccacgacgggaucaacuggcucaccaucggcaucuccggccccgacaacggggccguggccguccugaaguacaacggcaucaucaccgacaccaucaagagcuggcgcaacaacauccugcggacgcaggaguccgagugcgcgugcgugaacgggagcugcuucaccgugaugaccgacggcccguccgacggccaggccagcuacaagaucuuccgcaucgagaaggggaagaucgucaaguccguggagaugaacgcccccaacuaccacuacgaggagugcagcugcuaccccgacuccagcgagaucacgugcgugugccgggacaacuggcacggcuccaaccgccccugggucagcuucaaccagaaccucgaguaccagaucggguaccugugcuccggcaucuucggggacaacccgcggcccaacgacaagaccggcagcugcggccccguguccagcaacggggccaacggcgugaagggguucuccuucaaguacggcaacggggucuggaucggccgcaccaagagcaucagcucccggaacggcuucgagaugaucugggaccccaacggguggaccggcaccgacaacaacuucagcaucaagcaggacaucguggggaucaacgagugguccggcuacagcggguccuucgugcagcacccggagcugacgggccucgacugcauccgccccugcuucugggucgagcugauccggggccgccccaaggagaacaccaucuggaccagcggguccagcaucuccuucugcggcgugaacagcgacaccgucgggugguccuggcccgacggcgccgagcugccguucacgaucgacaaguga

SEQ ID NO: 83133 - RNA, 1410 nt, Artificial Sequence; identical to SEQ ID NO: 80762
  derived and/or modified CDS sequence (opt1) from neuraminidase__InfluenzaA__ADK33884

SEQ ID NO: 83134 - RNA, 1410 nt, Artificial Sequence; identical to SEQ ID NO: 81939
  derived and/or modified CDS sequence (opt1) from neuraminidase__InfluenzaA__ADK33894

SEQ ID NO: 83135 - RNA, 1410 nt, Artificial Sequence; identical to SEQ ID NO: 81939
  derived and/or modified CDS sequence (opt1) from neuraminidase__InfluenzaA__ADK33904

SEQ ID NO: 83136 - RNA, 1410 nt, Artificial Sequence; identical to SEQ ID NO: 82719
  derived and/or modified CDS sequence (opt1) from neuraminidase__InfluenzaA__ADK33914

SEQ ID NO: 83137 - RNA, 1410 nt, Artificial Sequence
  derived and/or modified CDS sequence (opt1) from neuraminidase__InfluenzaA__ADK33924
augaaccccaaccagaagaucaucaccaucggcagcgugugcaugaccaucgggauggccaaccugauccuccagaucggcaacaucaucuccaucuggaucagccacuccauccagcuggggaaccagaaccagaucgagacgugcaaccagagcgucaucaccuacgagaacaacaccugggugaaccagaccuacgugaacaucuccaacacgaacuucgccgcgggccagagcgucguguccgugaagcuggccgggaacagcucccucugcccggucagcggcugggccaucuacuccaaggacaacagcauccgcaucggcuccaagggggacguguucgugauccgggagcccuucaucagcugcagcccccuggagugccgcaccuucuuccugacccagggcgcccuccugaacgacaagcacuccaacgggaccaucaaggaccggucccccuaccgcacgcugaugagcugcccgaucggcgagguccccucccccuacaacagccgguucgagagcguggccugguccgcgagcgccugccacgacgggaucaacuggcucaccaucggcaucuccggccccgacaacggggccguggccguccugaaguacaacggcaucaucaccgacaccaucaagagcuggcgcaacaacauccugcggacgcaggaguccgagugcgcgugcgugaacgggagcugcuucaccgugaugaccgacggcccguccgacggccaggccagcuacaagaucuuccgcaucgagaaggggaagaucgucaaguccguggagaugaacgcccccaacuaccacuacgaggagugcagcugcuaccccgacuccagcgagaucacgugcgugugccgggacaacuggcacggcuccaaccgccccugggucagcuucaaccagaaccucgaguaccagaucggguacaucugcuccggcaucuucggggacaacccgcggcccaacgacaagaccggcagcugcggccccguguccagcaacggggccaacggcgugaagggguucuccuucaaguacggcaacggggucuggaucggccgcaccaagagcaucagcucccggaacggcuucgagaugaucugggaccccaacggguggaccggcaccgacaacaacuucagcaucaagcaggacaucguggggaucaacgagugguccggcuacagcggguccuucgugcagcacccggagcugacgggccuggacugcauccgccccugcuucugggucgagcucauccggggccgccccaaggagaacaccaucuggaccagcggguccagcaucuccuucugcggcgugaacagcaacaccgucgggugguccuggcccgacggcgccgagcugccguucacgaucgacaaguga

SEQ ID NO: 83138 - RNA, 1410 nt, Artificial Sequence; identical to SEQ ID NO: 80762
  derived and/or modified CDS sequence (opt1) from neuraminidase__InfluenzaA__ADK33934

SEQ ID NO: 83139 - RNA, 1410 nt, Artificial Sequence; identical to SEQ ID NO: 80762
  derived and/or modified CDS sequence (opt1) from neuraminidase__InfluenzaA__ADK33944

SEQ ID NO: 83140 - RNA, 1410 nt, Artificial Sequence; identical to SEQ ID NO: 82719
  derived and/or modified CDS sequence (opt1) from neuraminidase__InfluenzaA__ADK33954

SEQ ID NO: 83141 - RNA, 1410 nt, Artificial Sequence; identical to SEQ ID NO: 80762
  derived and/or modified CDS sequence (opt1) from neuraminidase__InfluenzaA__ADK33964

SEQ ID NO: 83142 - RNA, 1410 nt, Artificial Sequence; identical to SEQ ID NO: 81869
  derived and/or modified CDS sequence (opt1) from neuraminidase__InfluenzaA__ADK33974

SEQ ID NO: 83143 - RNA, 1410 nt, Artificial Sequence; identical to SEQ ID NO: 80762
  derived and/or modified CDS sequence (opt1) from neuraminidase__InfluenzaA__ADK33984

SEQ ID NO: 83144 - RNA, 1410 nt, Artificial Sequence
  derived and/or modified CDS sequence (opt1) from neuraminidase__InfluenzaA__ADK39016
augaaccccaaccagaagaucaucaccaucggcagcgugugcaucaccaucgggauggccaaccugauccuccagaucggcaacaucaucuccaucuggaucagccacuccauccagcuggggaaccagaaccagaucgagacgugcaaccagagcgucaucaccuacgagaacaacaccugggugaaccagaccuacgugaacaucuccaacacgaacuucgccgcgggccagagcgucguguccgugaagcuggccgggaacagcucccucugcccggucagcggcugggccaucuacuccaaggacaacagcauccgcaucggcuccaagggggacguguucgugauccgggagcccuucaucagcugcagcccccuggagugccgcaccuucuuccugacccagggcgcccuccugaacgacaagcacuccaacgggaccaucaaggaccggucccccuaccgcacgcugaugagcugcccgaucggcgagguccccucccccuacaacagccgguucgagagcguggccugguccgcgagcgccugccacgacgggaucuccuggcucaccaucggcaucagcggccccgacaacggggccguggccguccugaaguacaacggcaucaucaccgacaccaucaaguccuggcgcaacaacauccugcggacgcaggagagcgagugcgcgugcgugaacggguccugcuucaccgugaugaccgacggcccgagcgacggccaggccuccuacaagaucuuccgcaucgagaaggggaagaucgucaagagcguggagaugaacgcccccaacuaccacuacgaggagugcuccugcuaccccgacagcuccgagaucacgugcgugugccgggacaacuggcacggcagcaaccgccccugggucuccuucaaccagaaccucgaguaccagaucggguacaucugcagcggcaucuucggggacaacccgcggcccaacgacaagaccggcuccugcggccccgugagcuccaacggggccaacggcgugaagggguucagcuucaaguacggcaacggggucuggaucggccgcaccaagagcaucuccagccggaacggcuucgagaugaucugggaccccgacggguggaccggcaccgacaacaacuucuccaucaagcaggacaucguggggaucaacgaguggagcggcuacuccgggagcuucgugcagcacccggagcugacgggccuggacugcauccgccccugcuucugggucgagcucauccggggccgccccaaggagaacaccaucuggaccuccgggagcuccaucagcuucugcggcgugaacuccgacaccgucggguggagcuggcccgacggcgccgagcugccguucacgaucgacaaguga

SEQ ID NO: 83145 - RNA, 1410 nt, Artificial Sequence; identical to SEQ ID NO: 80623
  derived and/or modified CDS sequence (opt1) from neuraminidase__InfluenzaA__ADK45315

SEQ ID NO: 83146 - RNA, 1410 nt, Artificial Sequence
  derived and/or modified CDS sequence (opt1) from neuraminidase__InfluenzaA__ADK45413
augaaccccaaccagaagaucaucaccaucggcagcgugucccugaccaucagcacgaucugcuucuucaugcagaucgccauccucaucaccaccgucacccugcacuucaagcaguacgaguucaacuccccgcccaacaaccaggugaugcuguacgagcccacgaucaucgagcgcaacaucaccgagaucguguaccucaccaacaccacgaucgagaaggagaucugccccaagcuggccgaguaccggaacuggagcaagccgcagugcgacaucaccggguucgcgcccuucuccaaggacaacagcauccgccuguccgccggcggggacaucugggucacccgggagcccuacgugagcugcgaccccgacaagugcuaccaguucgcccucggccaggggaccacgcugaacaacgugcacuccaacaacaccguccgcgaccggaccccguaccgcacccugcucaugaacgagcugggcgugcccuuccaccugggcacgaagcaggucugcaucgccuggagcuccagcuccugccacgacgggaaggccuggcuccacgugugcaucaccggcgacgacaagaacgcgaccgccagcuucaucuacaacgggcggcugguggacuccguggucagcugguccaaggacauccugcgcacccaggagagcgagugcgugugcaucaacggcacgugcaccguggucaugaccgacggguccgccagcggcaaggccgacaccaagauccucuucaucgaggagggcaagaucgugcacacgagcacccuguccgggagcgcgcagcacguggaggagugcuccugcuacccccgguaccccggcguccgcugcgugugccgggacaacuggaaggggagcaaccgcccgaucguggacaucaacaucaaggaccacuccaucgccagcuccuacgucugcagcggccuggugggcgacacgccccggaagaacgacuccagcuccagcucccacugccucgaccccaacaacgaggagggcgggcacggggugaagggcugggccuucgacgacgggaacgacgucuggaugggccgcaccaucagcgagaagucccggcugggcuacgagaccuucaaggugaucgagggguggagcaaccccaaguccaagcugcagaucaaccgccaggucaucguggaccggggcaaccgcagcggguacuccggcaucuucagcguggagggcaagagcugcaucaaccggugcuucuacgucgagcucauccgcgggcggaaggaggagaccgaggugcuguggaccuccaacagcaucguggucuucugcggcaccuccgggacguacggcaccgggagcuggccggacggcgccaacaucaaccugaugcccaucuga

SEQ ID NO: 83147 - RNA, 1410 nt, Artificial Sequence
  derived and/or modified CDS sequence (opt1) from neuraminidase__InfluenzaA__ADK45424
augaaccccaaccagaagaucaucaccaucggcagcgugucccugaccaucagcacgaucugcuucuucaugcagaucgccauccucaucaccaccgucacccugcacuucaagcaguacgaguucaacuccccgcccaacaaccaggugaugcugugcgagcccacgaucaucgagcgcaacaucaccgagaucguguaccucaccaacaccacgaucgagaaggagaucugccccaagcuggccgaguaccggaacuggagcaagccgcagugcgacaucaccggguucgcgcccuucuccaaggacaacagcauccgccuguccgccggcggggacaucugggucacccgggagcccuacgugagcugcgaccccgacaagugcuaccaguucgcccucggccaggggaccacgcugaacaacgugcacuccaacaacaccguccgcgaccggaccccguaccgcacccugcucaugaacgagcugggcgugcccuuccaccugggcacgaagcaggucugcaucgccuggagcuccagcuccugccacgacgggaaggccuggcuccacgugugcaucaccggcgacgacaagaacgcgaccgccagcuucaucuacaacgggcggcugguggacuccguggucagcugguccaaggagauccugcgcacccaggagagcgagugcgugugcaucaacggcacgugcaccguggucaugaccgacggguccgccagcggcaaggccgacaccaagauccucuucaucgaggagggcaagaucgugcacacgagcacccuguccgggagcgcgcagcacguggaggagugcuccugcuacccccgguaccccggcguccgcugcgugugccgggacaacuggaaggggagcaaccgcccgaucguggacaucaacaucaaggaccacuccaucgucagcuccuaccugugcagcggccucgugggcgacacgccccggaagaacgacuccagcuccagcucccacugccuggaccccaacaacgaggagggcgggcacggggugaagggcugggccuucgacgacgggaacgacgucuggaugggccgcaccaucagcgagaagucccggcugggcuacgagaccuucaaggugaucgagggguggagcaaccccaaguccaagcuccagaucaaccgccaggucaucguggaccggggcaaccgcagcggguacuccggcaucuucagcguggagggcaagagcugcaucaaccggugcuucuacgucgagcugauccgcgggcggaaggaggagaccgaggugcuguggaccuccaacagcaucguggucuucugcggcaccuccgggacguacggcaccgggagcuggccggacggcgccgacaucaaccucaugcccaucuga

SEQ ID NO: 83148 - RNA, 1410 nt, Artificial Sequence; identical to SEQ ID NO: 81929
  derived and/or modified CDS sequence (opt1) from neuraminidase__InfluenzaA__ADK45446

SEQ ID NO: 83149 - RNA, 1410 nt, Artificial Sequence
  derived and/or modified CDS sequence (opt1) from neuraminidase__InfluenzaA__ADK45457
augaaccccaaccagaagaucaucaccaucggcagcgugucccugaccaucagcacgaucugcuucuucaugcagaucgccauccucaucaccaccgucacccugcacuucaagcaguacgaguucaacuccccgcccaacaaccaggugaugcugugcgagcccacgaucaucgagcgcaacaucaccgagaucguguaccucaccaacaccacgaucgagaaggagaucugccccaagcuggccgaguaccggaacuggagcaagccgcagugcgacaucaccggguucgcgcccuucuccaaggacaacagcauccgccuguccgccggcggggacaucugggucacccgggagcccuacgugagcugcgaccccgacaagugcuaccaguucgcccucggccaggggaccacgcugaacaacgugcacuccaacaacaccguccgcgaccggaccccguaccgcacccugcucaugaacgagcugggcgugcccuuccaccugggcacgaagcaggucugcaucgccuggagcuccagcuccugccacgacgggaaggccuggcuccacgugugcaucaccggcgacgacaagaacgcgaccgccagcuucaucuacaacgggcggcugguggacuccguggucagcugguccaaggagauccugcgcacccaggagagcgagugcgugugcaucaacggcacgugcaccguggucaugaccgacggguccgccagcggcaaggccgacaccaagauccucuucaucgaggagggcaagaucgugcacacgagcacccuguccgggagcgcgcagcacguggaggagugcuccugcuacccccgguaccccggcguccgcugcgugugccgggacaacuggaaggggagcaaccgcccgaucguggacaucaacaucaaggaccacuccaucgucagcuccuacgugugcagcggccuggugggcgacacgccccggaagaacgacuccagcggguccagccacugccucgaccccaacaacgaggagggcgggcacggcgucaaggggugggccuucgacgacggcaacgacguguggaugggccgcaccaucuccgagaagucccggcugggguacgagaccuucaaggucaucgagggcuggagcaaccccaagagcaagcugcagaucaaccgccaggugaucguggaccgggggaaccgcuccggcuacagcgggaucuucuccgucgagggcaagagcugcaucaaccggugcuucuacguggagcucauccgcggccggaaggaggagaccgaggugcuguggaccagcaacuccaucgucguguucugcgggaccagcggcacguacgggaccggcuccuggccggacggggccgacaucaaccugaugcccaucuga

SEQ ID NO: 83150 - RNA, 1410 nt, Artificial Sequence
  derived and/or modified CDS sequence (opt1) from neuraminidase__InfluenzaA__ADK45479
augaaccccaaccagaagaucaucaccaucggcagcgugucccugaccaucagcacgaucugcuucuucaugcagaucgccauccucaucaccaccgucacccugcacuucaagcaguacgaguucaacuccccgcccaacaaccaggugaugcugugcgagcccacgaucaucgagcgcaacaucaccgagaucguguaccucaccaacaccacgaucgagaaggagaucugccccaagcuggccgaguaccggaacuggagcaagccgcagugcgacaucaccggguucgcgcccuucuccaaggacaacagcauccgccuguccgccggcggggacaucugggucacccgggagcccuacgugagcugcgaccccgacaagugcuaccaguucgcccucggccaggggaccacgcugaacaacgugcacuccaacaacaccguccgcgaccggaccccguaccgcacccugcucaugaacgagcugggcgugcccuuccaccugggcacgaagcaggucugcaucgccuggagcuccagcuccugccacgacgggaaggccuggcuccacgugugcaucaccggcgacgacaagaacgcgaccgccagcuucaucuacaacgggcggcugguggacuccguggucagcugguccaaggacauccugcgcacccaggagagcgagugcgugugcaucaacggcacgugcaccguggucaugaccgacggguccgccagcggcaaggccgacaccaagauccucuucaucgaggagggcaagguggugcacacgagcacccuguccgggagcgcgcagcacgucgaggagugcuccugcuacccccgguaccccggcgugcgcugcgugugccgggacaacuggaaggggagcaaccgcccgaucgucgacaucaacaucaaggaccacuccaucgugagcuccuacgugugcagcggccuggucggcgacacgccccggaagaacgacuccagcuccagcucccacugccucgaccccaacaacgaggagggcgggcacggggugaagggcugggccuucgacgacgggaacgacgucuggaugggccgcaccaucagcgagaagucccggcugggcuacgagaccuucaaggugaucgagggguggagcaaccacaaguccaagcugcagaucaaccgccaggugaucgucgaccggggcaaccgcagcggguacuccggcaucuucagcguggagggcaagagcugcaucaaccggugcuucuacguggagcucauccgcgggcggaaggaggaggccgagguccuguggaccuccaacagcaucgugguguucugcggcaccuccgggaccuacggcacggggagcuggcccgacggcgccgaccugaaccucaugccgaucuga

SEQ ID NO: 83151 - RNA, 1410 nt, Artificial Sequence; identical to SEQ ID NO: 80762
  derived and/or modified CDS sequence (opt1) from neuraminidase__InfluenzaA__ADK48799

SEQ ID NO: 83152 - RNA, 1410 nt, Artificial Sequence; identical to SEQ ID NO: 82675
  derived and/or modified CDS sequence (opt1) from neuraminidase__InfluenzaA__ADK62686

SEQ ID NO: 83153 - RNA, 1410 nt, Artificial Sequence; identical to SEQ ID NO: 82113
  derived and/or modified CDS sequence (opt1) from neuraminidase__InfluenzaA__ADK62696

SEQ ID NO: 83154 - RNA, 1410 nt, Artificial Sequence; identical to SEQ ID NO: 81345
  derived and/or modified CDS sequence (opt1) from neuraminidase__InfluenzaA__ADK64994

SEQ ID NO: 83155 - RNA, 1410 nt, Artificial Sequence
  derived and/or modified CDS sequence (opt1) from neuraminidase__InfluenzaA__ADK65002
augaaccccaaccagaagaucaucaccaucggcagcgugugcaugaccaucgggauggccaaccugauccuccagaucggcaacaucaucuccaucuggaucagccacuccauccagcuggggaaccagaaccagaucgagacgugcaaccagagcgucaucaccuacgagaacaacaccugggugaaccagaccuacgugaacaucuccaacacgaacuucgccgcgggccagagcgucguguccgugaagcuggccgggaacagcucccucugcccggucagcggcugggccaucuacuccaaggacaacagcauccgcaccggcuccaagggggacguguucgugauccgggagcccuucaucagcugcagcccccuggagugccgcaccuucuuccugacccagggcgcccuccugaacgacaagcacuccaacgggacgaucaaggaccggucccccuaccgcacccugaugagcugcccgaucggcgagguccccucccccuacaacagccgguucgagagcguggccugguccgcgagcgccugccacgacgggaucaacuggcucaccaucggcaucuccggccccgacaacggggccguggccggccugaaguacaacgggaucaucaccgacacgaucaagagcuggcgcaacaacauccugcggacccaggaguccgagugcgcgugcgucaacggcagcugcuucaccgugaugaccgacggcccguccgacgggcaggccagcuacaagaucuuccgcaucgagaagggcaagaucgugaaguccgucgagaugaacgcccccaacuaccacuacgaggagugcagcugcuaccccgacuccagcgagaucacgugcgugugccgggacaacuggcacggguccaaccgccccugggugagcuucaaccagaaccucgaguaccagaucggcuacaucugcuccgggaucuucggcgacaacccgcggcccaacgacaagaccggcagcugcgggcccgucuccagcaacggcgccaacggggugaagggcuucuccuucaaguacgggaacggcguguggaucggccgcaccaagagcaucagcucccggaacggguucgagaugaucugggaccccaacggcuggaccgggacggacaacaacuucagcaucaagcaggacaucgucggcaucaacgagugguccggguacagcggcuccuucgugcagcacccggagcugaccggccuggacugcauccgccccugcuucuggguggagcucauccgggggcgccccaaggagaacaccaucuggaccagcggcuccagcaucuccuucugcggggucaacagcgacacggugggcugguccuggcccgacggcgccgagcugccguucaccaucgacaaguga

SEQ ID NO: 83156 - RNA, 1410 nt, Artificial Sequence; identical to SEQ ID NO: 80762
  derived and/or modified CDS sequence (opt1) from neuraminidase__InfluenzaA__ADK65010

SEQ ID NO: 83157 - RNA, 1410 nt, Artificial Sequence
  derived and/or modified CDS sequence (opt1) from neuraminidase__InfluenzaA__ADK65018
augaaccccaaccagaagaucaucaccaucggcagcgugugcaugaccaucgggauggccaaccugauccuccagaucggcaacaucaucuccaucuggaucagccacuccauccagcuggggaaccagaaccagaucgagacgugcaaccagagcgucaucaccuacgagaacaacaccugggugaaccagaccuacgugaacaucuccaacacgaacuucgccgcgggccagagcgucguguccgugaagcuggccgggaacagcucccucugcccggucagcggcugggccaucuacuccaaggacaacagcauccgcaucggcuccaagggggacguguucgugauccgggagcccuucaucagcugcagcccccuggagugccgcaccuucuuccugacccagggcgcccuccugaacgacaagcacagcaacgggaccaucaaggaccggucccccuaccgcacgcugaugagcugcccgaucggcgagguccccucccccuacaacagccgguucgagagcguggccuggcccgcguccgccugccacgacgggaucaacuggcucaccaucggcaucagcggcccggacaacggggccguggccguccugaaguacaacggcaucaucaccgacaccaucaaguccuggcgcaacaacauccugcggacgcaggagagcgagugcgcgugcgugaacggguccugcuucaccaucaugaccgacggccccagcgacggccaggccuccuacaagaucuuccgcaucgagaaggggaagaucgugaaguccaucgagaugaacgcccccaacuaccacuacgaggagugcuccugcuaccccgacagcuccgagaucacgugcgucugccgggacaacuggcacggcagcaaccgcccguggguguccuucaaccagaaccucgaguaccagaucggguacaucugcagcggcaucuucggggacaacccccggcccaacgacaagaccggcuccugcggccccgugagcuccaacggggccaacggcgucaagggguucagcuucaaguacggcaacgggguguggaucggccgcaccaaguccaucagcagccggaacggcuucgagaugaucugggacccgaacggguggaccggcaccgacaacaacuucuccaucaagcaggacaucguggggaucaacgaguggagcggcuacuccgggagcuucguccagcaccccgagcugacgggccuggacugcauccgccccugcuucuggguggagcucauccggggccgccccaaggagaacaccaucuggaccuccgggagcuccaucagcuucugcggcgugaacuccgacaccgucggguggagcuggccggacggcgccgagcugcccuucacgaucgacaaguga

SEQ ID NO: 83158 - RNA, 1410 nt, Artificial Sequence
  derived and/or modified CDS sequence (opt1) from neuraminidase__InfluenzaA__ADK87290
augaaccccaaccagaagaucaucaccaucggcagcgugucccugaccaucagcacgaucugcuucuucaugcagaucgccauccucaucaccaccgucacccugcacuucaagcaguacgaguucaacuccccgcccaacaaccaggugaugcugugcgagcccacgaucaucgagcgcaacaucaccgagaucguguaccucaccaacaccacgaucgagaaggagaucugccccaagcuggccgaguaccggaacuggagcaagccgcagugcgacaucaccggguucgcgcccuucuccaaggacaacagcauccgccuguccgccggcggggacaucugggucacccgggagcccuacgugagcugcgaccccgacaagugcuaccaguucgcccucggccaggggaccacgcugaacaacgugcacuccaacaacaccguccgcgaccggaccccguaccgcacccugcucaugaacgagcugggcgugcccuuccaccugggcacgaagcaggucugcaucgccuggagcuccagcuccugccacgacgggaaggccuggcuccacgugugcaucaccggcgacgacaagaacgcgaccgccagcuucaucuacaacgggcggcugguggacuccguggucagcugguccaaggagauccugcgcacccaggagagcgagugcgugugcaucaacggcacgugcaccguggucaugaccgacggguccgccagcggcaaggccuacaccaagauccucuucaucgaggagggcaagaucgugcacacgagcacccuguccgggagcgcgcagcacguggaggagugcuccugcuacccccgguaccccggcguccgcugcgugugccgggacaacuggaaggggagcaaccgcccgaucguggacaucaacaucaaggaccacuccaucgucagcuccuacgugugcagcggccuggugggcgacacgccccggaagaacgacuccagcuccagcucccacugccucgaccccaacaacgaggagggcgggcacggggucaagggcugggccuucgacgacgggaacgacguguggaugggccgcaccaucagcgagaagucccggcugggcuacgagaccuucaaggucaucgagggguggagcaaccccaaguccaagcugcagaucaaccgccaggugaucguggaccggggcaaccgcagcggguacuccggcaucuucagcgucgagggcaagagcugcaucaaccggugcuucuacguggagcucauccgcgggcggaaggaggagaccgaggugcuguggaccuccaacagcaucgucguguucugcggcaccuccgggacguacggcaccgggagcuggccggacggcgccgacaucaaccugaugcccguguga

SEQ ID NO: 83159 - RNA, 1410 nt, Artificial Sequence
  derived and/or modified CDS sequence (opt1) from neuraminidase__InfluenzaA__ADK87292
augaaccccaaccagaagaucaucaccaucggcagcgugucccugaccaucagcacgaucugcuucuucaugcagaucgccauccucaucaccaccgucacccugcacuucaagcaguacgaguucaacuccccgcccaacaaccaggugaugcugugcgagcccacgaucaucgagcgcaacaucaccgagaucguguaccucaccaacaccacgaucgagaaggagaucugccccaagcuggccgaguaccggaacuggagcaagccgcagugcgacaucaccggguucgcgcccuucuccaaggacaacagcauccgccuguccgccggcggggacaucugggucacccgggagcccuacgugagcugcgaccccgacaagugcuaccaguucgcccucggccaggggaccacgcugaacaacgugcacuccaacaacaccguccgcgaccggaccccguaccgcacccugcucaugaacgagcugggcgugcccuuccaccugggcacgaagcaggucugcaucgccuggagcuccagcuccugccacgacgggaaggccuggcuccacgugugcaucaccggcgacgacaagaacgcgaccgccagcuucaucuacaacgggcggcugguggacuccguggucagcugguccaaggagauccugcgcacccaggagagcgagugcgugugcaucaacggcacgugcaccguggucaugaccgacggguccgccagcggcaaggccgacaccaagauccucuucaucgaggagggcaagaucgugcacacgagcacccuguccgggagcgcgcagcacguggaggagugcuccugcuacccccgguaccccggcguccgcugcgugugccgggacaacuggaaggggagcaaccgcccgaucguggacaucaacaucaaggaccacuccaucgucagcuccuacgccugcagcggccuggugggcgacacgccccggaagaacgacuccagcuccagcucccacugccucgaccccaacaacgaggagggcgggcacggggugaagggcugggccuucgacgacgggaacgacgucuggaugggccgcaccaucagcgagaagucccggcugggcuacgagaccuucaaggugaucgagggguggagcaaccccaaguccaagcugcagaucaaccgccaggucaucguggaccggggcaaccgcagcggguacuccggcaucuucagcguggagggcaagagcugcaucaaccggugcuucuacgucgagcucauccgcgggcggaaggaggagaccgaggugcuguggaccuccaacagcaucguggucuucugcggcaccuccgggacguacggcaccgggagcuggccggacggcgccgacaucaaccugaugcccguguga

SEQ ID NO: 83160 - RNA, 1410 nt, Artificial Sequence
  derived and/or modified CDS sequence (opt1) from neuraminidase__InfluenzaA__ADK87294
augaaccccaaccagaagaucaucgccaucggcagcgugucccugaccaucagcaccaucugcuucuuccuccagaucgccauccugaucacgaccgucacccugcacuucaagcaguacgaguucaacuccccgcccaacaaccaggugaugcucugcgagcccaccaucaucgagcgcaacaucacggagaucguguaccugaccaacaccaccaucgagaaggagaucugccccaagcuggcggaguaccggaacuggagcaagccgcagugcgacaucacgggguucgcccccuucuccaaggacaacagcauccgccucuccgccggcggggacaucugggucacccgggagcccuacgugagcugcgaccccgacaagugcuaccaguucgcccugggccaggggaccacccugaacaacgugcacuccaacaacacgguccgcgaccggaccccguaccgcacccuccugaugaacgagcugggcgugcccuuccaccucggcaccaagcaggucugcaucgccuggagcuccagcuccugccgggacgggaaggcguggcugcacgugugcaucacgggcgacgacaagaacgccaccgccagcuucaucuacaacgggcgccugguggacuccguggucagcugguccaaggagauccuccggacccaggagagcgagugcgugugcaucaacgggaccugcacgguggucaugaccgacggcuccgccagcggcaaggcggacaccaagauccuguucaucgaggagggcaagaucgugcacaccagcacgcuguccgggagcgcccagcacguggaggagugcuccugcuacccccgcuaccccggcguccggugcgugugccgcgacaccgggaagggcagcaaccggccgaucguggacaucaacaucaaggaccacuccaucgucagcuccuacgugugcagcggccucgugggggacacgccccgcaagaacgacuccagcuccagcucccacugccuggaccccaacaacgaggagggcgggcacggcgucaaggggugggccuucgacgacggcaacgacguguggaugggccggaccaucagcgagaagucccgccugggguacgagaccuucaaggucaucgagggcuggagcaaccccaaguccaagcuccagaucaaccgccaggugaucguggaccgggggaaccggagcggcuacuccgggaucuucagcgucgagggcaagagcugcaucaaccgcugcuucuacguggagcugauccggggccgcaaggaggagaccgaggugcuguggaccuccaacaacaucgucguguucugcgggaccagcggcacguacgggaccggcuccuggccggacggggccgacaucaaccucaugcccguguga

SEQ ID NO: 83161 - RNA, 1410 nt, Artificial Sequence
  derived and/or modified CDS sequence (opt1) from neuraminidase__InfluenzaA__ADK87297
augaaccccaaccagaagaucaucaccaucggcagcgugugcaugaccaucgggauggccaaccugauccuccagaucggcaacaucaucuccaucuggaucagccacuccauccagcuggggaaccagaaccagaucgagacgugcaaccagagcgucaucaccuacgagaacaacaccugggugaaccagaccuacgugaacaucuccaacacgaacuucgccgcgggccagagcgucguguccgugaagcuggccgggaacagcucccucugcccggucagcggcugggccaucuacuccaaggacaacagcauccgcaucggcuccaagggggacguguucgugauccgggagcccuucaucagcugcagcccccuggagugccgcaccuucuuccugacccagggcgcccuccugaacgacaagcacuccaacgggaccaucaagaaccggucccccuaccgcacgcugaugagcugcccgaucggcgagguccccucccccuacaacagccgguucgagagcguggccugguccgcgagcgccugccacgacgggaucaacuggcucaccaucggcaucuccggccccgacaacggggccguggccguccugaaguacaacggcaucaucaccgacaccaucaagagcuggcgcaacaacauccugcggacgcaggaguccgagugcgcgugcgugaacgggagcugcuucaccgugaugaccgacggcccguccgacggccaggccagcuacaagaucuuccgcaucgagaaggggaagaucgucaaguccguggagaugaacgcccccaacuaccacuacgaggagugcagcugcuaccccgacuccagcgagaucacgugcgugugccgggacaacuggcacggcuccaaccgccccugggucagcuucaaccagaaccucgaguaccagaucggguacaucugcuccggcaucuucggggacaacccgcggcccaacgacaagaccggcagcugcggccccguguccagcaacggggccaacggcgugaagggguucuccuucaaguacggcaacggggucuggaucggccgcaccaagagcaucagcucccggaacggcuucgagaugaucugggaccccaacggguggaccggcaccgacaacaacuucagcaucaagcaggacaucguggggaucaacgagugguccggcuacagcggguccuucgugcagcacccggagcugacgggccuggacugcauccgccccugcuucugggucgagcucauccggggccgccccaaggagaacaccaucuggaccagcggguccagcaucuccuucugcggcgugaacagcgacaccgucgggugguccuggcccgacggcgccgagcugccguucacgaucgacaaguga

SEQ ID NO: 83162 - RNA, 1410 nt, Artificial Sequence
  derived and/or modified CDS sequence (opt1) from neuraminidase__InfluenzaA__ADK87299
augaaccccaaccagaagaucaucaccaucggcagcgugugcaugaccaucgggauggccaaccugauccuccagaucggcaacaucaucuccaucuggaucagccacuccauccagcuggggaaccagaaccagaucgagacgugcaaccagagcgucaucaccuacgagaacaacaccugggugaaccagaccuacgugaacaucuccaacacgaacuucgccgcgggccagagcgucguguccgugaagcuggccgggaacagcucccucugcccggucagcggcugggccaucuacuccaaggacaacagcauccgcaucggcuccaagggggacguguucgugauccgggagcccuucaucagcugcagcccccuggagugccgcaccuucuuccugacccagggcgcccuccugaacgacaagcacuccaacgggaccaucaaggaccggucccccuaccgcacgcugaugagcugcccgaucggcgagguccccucccccuacaacagccgguucgagagcguggccugguccgcgagcgccugccacgacgggaucaacuggcucaccaucggcaucuccggccccgacaacggggccguggccguccugaaguacaacggcaucaucaccgacaccaucaagagcuggcgcaacaacauccugcggacgcaggaguccgagugcgcgugcgugaacgggagcugcuucaccgugaugaccgacggcccguccgacggccaggccagcuucaagaucuuccgcaucgagaaggggaagaucgucaaguccguggagaugaacgcccccaacuaccacuacgaggagugcagcugcuaccccgacuccagcgagaucacgugcgugugccgggacaacuggcacggcuccaaccgccccugggucagcuucaaccagaaccucgaguaccagaucggguacaucugcuccggcaucuucggggacaacccgcggcccaacgacaagaccggcagcugcggccccguguccagcaacggggccaacggcgugaagggguucuccuucaaguacggcaacggggucuggaucggccgcaccaagagcaucagcucccggaacggcuucgagaugaucugggaccccaacggguggaccggcaccgacaacaacuucagcaucaagcaggacaucguggggaucaacgagugguccggcuacagcggguccuucgugcagcacccggagcugacgggccuggacugcauccgccccugcuucugggucgagcucauccggggccgccccaaggagaacaccaucuggaccagcggguccagcaucuccuucugcggcgugaacagcgacaccgucgggugguccuggcccgacggcgccgagcugccguucacgaucgacaaguga

SEQ ID NO: 83163 - RNA, 1410 nt, Artificial Sequence
  derived and/or modified CDS sequence (opt1) from neuraminidase__InfluenzaA__ADK87301
augaaccccaaccagaagaucaucaccaucggcagcgugucccugaccaucagcacgaucugcuucuucaugcagaucgccauccucaucaccaccgucacccugcacuucaagcaguacgaguucaacuccccgcccaacaaccaggugaugcugugcgagcccacgaucaucgagcgcaacaucaccgagaucguguaccucaccaacaccacgaucgagaaggagaucugccccaagcuggccgaguaccggaacuggagcaagccgcagugcgacaucaccggguucgcgcccuucuccaaggacaacagcauccgccuguccgccggcggggacaucugggucacccgggagcccuacgugagcugcgaccccgacaagugcuaccaguucgcccucggccaggggaccacgcugaacaacgugcacuccaacaacaccguccgcgaccggaccccguaccgcacccugcucaugaacgagcugggcgugcccuuccaccugggcacgaagcaggucugcaucgccuggagcuccagcuccugccacgacgggaaggccuggcuccacgugugcaucaccggcgacgacaagaacgcgaccgccagcuucaucuacaacgggcggcugguggacuccguggucagcugguccaaggagauccugcgcacccaggagagcgagugcgugugcaucaacggcacgugcaccguggccaugaccgacggguccgccagcggcaaggcggacaccaagauccucuucaucgaggagggcaagaucguccacacgagcacccuguccgggagcgcccagcacguggaggagugcuccugcuacccccgguaccccggcgugcgcugcgucugccgggacaacuggaaggggagcaaccgcccgaucguggacaucaacaucaaggaccacuccaucgugagcuccuacgucugcagcggccuggugggcgacacgccccggaagaacgacuccagcuccagcucccacugccucgaccccaacaacgaggagggcgggcacggggugaagggcugggccuucgacgacgggaacgacgucuggaugggccgcaccaucagcgagaagucccggcugggcuacgagaccuucaaggugaucgagggguggagcaaccccaaguccaagcugcagaucaaccgccaggucaucguggaccggggcaaccgcagcggguacuccggcaucuucagcguggagggcaagagcugcaucaaccggugcuucuacgucgagcucauccgcgggcggaaggaggagaccgaggugcuguggaccuccaacagcaucguggucuucugcggcaccuccgggacguacggcaccgggagcuggccggacggcgccgacaucaaccugaugcccaucuga

SEQ ID NO: 83164 - RNA, 1410 nt, Artificial Sequence; identical to SEQ ID NO: 80623
  derived and/or modified CDS sequence (opt1) from neuraminidase__InfluenzaA__ADK87303

SEQ ID NO: 83165 - RNA, 1410 nt, Artificial Sequence
  derived and/or modified CDS sequence (opt1) from neuraminidase__InfluenzaA__ADK87305
augaaccccaaccagaagaucaucaccaucggcagcgugucccugaccaucagcacgaucugcuucuucaugcagaucgccauccucaucaccaccgucacccugcacuucaagcaguacgaguucaacuccccgcccaacaaccaggugaugcugugcgagcccacgaucaucgagcgcaacaucaccgagaucguguaccucaccaacaccacgaucgagaaggagaucugccccaagcuggccgaguaccggaacuggagcaagccgcagugcgacaucaccggguucgcgcccuucuccaaggacaacagcauccgccuguccgccggcggggacaucugggucacccgggagcccuacgugagcugcgaccccgacaagugcuaccaguucgcccucggccaggggaccacgcugaacaacgugcacuccaacaacaccguccgcgaccggaccccguaccgcacccugcucaugaacgagcugggcgugcccuuccaccugggcacgaagcaggucugcaucgccuggagcuccagcuccugccacgacgggaaggccuggcuccacgugugcaucaccggcgacgacaagaacgcgaccgccagcuucaucuacaacgggcggcugguggacuccguggucagcugguccaaggagauccugcgcacccaggagagcgagugcgugugcaucaacggcacgugcaccguggucaugaccgacggguccgccagcggcaaggccgacaccaagauccucuucaucgaggagggcaagaucgugcacacgagcacccuguccgggagcgcgcagcacguggaggagugcuccugcuacccccgguaccccggcguccgcugcgugugccgggacaacuggaaggggagcaaccgcccgaucguggacaucaacaucaaggaccacuccaucgucagcuccuacgugugcagcggccuggugggcgacacgccccggaagaacgacuccagcuccagcucccacugccucgaccccaacaacgaggagggcgggcacggggucaagggcugggccuucgacgacgggaacgacguguggaugggccgcaccaucagcgagaagucccggcugggcuacgagaccuucaaggucaucgagggguggagcaaccccaaguccaagcugcagaucaaccgccaggugaucgugggccgggggaaccgcagcggcuacuccgggaucuucagcgucgagggcaagagcugcaucaaccggugcuucuacguggagcucauccgcggccggaaggaggagaccgaggugcuguggaccuccaacagcaucgucguguucugcgggaccuccggcacguacgggaccggcagcuggccggacggggccgacaucaaccugaugcccguguga

SEQ ID NO: 83166 - RNA, 1410 nt, Artificial Sequence
  derived and/or modified CDS sequence (opt1) from neuraminidase__InfluenzaA__ADK87307
augaaccccaaccagaaggugaucaccaucggcagcgucucccugaccaucagcacgaucugcuucuucaugcagaucgccauccucaucaccaccgugacccugcacuucaagcaguacgaguucaacuccccgcccaacaaccaggugaugcugugcgagcccacgaucaucgagcgcaacaucaccgagaucgucuaccucaccaacaccacgaucgagaaggagaucugccccaagcuggccgaguaccggaacuggagcaagccgcagugcgacaucaccggguucgcgcccuucuccaaggacaacagcauccgccuguccgccggcggggacaucugggugacccgggagcccuacgugagcugcgaccccgacaagugcuaccaguucgcccucggccaggggaccacgcugaacaacguccacuccaacaacaccgugcgcgaccggaccccguaccgcacccugcucaugaacgagcugggcgugcccuuccaccugggcacgaagcaggucugcaucgccuggagcuccagcuccugccacgacgggaaggccuggcuccacgugugcaucaccggcgacgacaagaacgcgaccgccagcuucaucuacaacgggcggcugguggacuccgucgugagcugguccaaggagauccugcgcacccaggagagcgagugcgugugcaucaacggcacgugcaccgucgugaugaccgacggguccgccagcggcaaggccgacaccaagauccucuucaucgaggagggcaagaucgugcacacgagcacccuguccgggagcgcgcagcacgucgaggagugcuccugcuacccccgguaccccggcgugcgcugcgugugccgggacaacuggaaggggagcaaccgcccgaucgucgacaucaacaucaaggaccacuccaucgugagcuccuacgugugcagcggccuggucggcgacacgccccggaagaacgacuccagcuccagcucccacugccucgaccccaacaacgaggagggcgggcacggggugaagggcugggccuucgacgacgggaacgacgucuggaugggccgcaccaucagcgagaagucccggcugggcuacgagaccuucaaggugaucgagggguggagcaaccccaaguccaagcugcagaucaaccgccaggugaucgucggccgggggaaccgcagcggcuacuccgggaucuucagcguggagggcaagagcugcaucaaccggugcuucuacguggagcucaucggcgggcgcaaggaggagaccgagguccuguggaccuccaacagcaucgugguguucugcggcaccuccgggacguacggcaccgggagcuggccggacggcgccgacaucaaccugaugcccgucuga

SEQ ID NO: 83167 - RNA, 1410 nt, Artificial Sequence
  derived and/or modified CDS sequence (opt1) from neuraminidase__InfluenzaA__ADK87312
augaaccccaaccagaccaucaucaccaucggcagcgugugcaugacgaucgggauggccaaccugauccuccagaucggcaacaucaucuccaucuggaucagccacuccauccagcuggggaaccagaaccagaucgagaccugcaaccagagcgucaucaccuacgagaacaacaccugggugaaccagacguacgugaacaucuccaacaccaacuucgccgcgggccagagcgucaucuccgugaagcuggccgggaacagcucccucugcccggugagcggcugggccaucuacuccaaggacaacaacauccgcaucggcagcaagggggacgucuucgugauccgggagcccuucaucuccugcagcccccuggagugccgcaccuucuuccugacccagggcgcccuccugaacgacaagcacuccaacgggacgaucaaggaccggagccccuaccgcacccugauguccugcccgaucggcgaggugcccagccccuacaacucccgguucgagagcgucgccuggagcgcguccgccugccacgacgggaucaacuggcucaccaucggcaucagcggccccgacaacggggccguggccgugcugaaguacaacggcaucaucaccgacacgaucaaguccuggcgcaacaacauccugcggacccaggagagcgagugcgcgugcgucaacggguccugcuucaccgugaugaccgacggcccgagcgacggccaggccuccuacaagaucuuccgcaucgagaaggggaagaucgucaagagcguggagaugaacgcccccaacuaccacuacgaggagugcuccugcuaccccgacagcuccgagaucacgugcgugugccgggacaacuggcacggcagcaaccgccccuggguguccuucaaccagaaccucgaguaccagaucggguacaucugcagcggcaucuucggggacaacccgcggcccaacgacaagaccggcuccugcggccccgucagcuccaacggggccaacggcgugaagggguucagcuucaaguacggcaacgggguguggaucggccgcaccaaguccaucagcagccggaacggcuucgagaugaucugggaccccaacggguggaccggcacggacaacaacuucuccaucaagcaggacaucgucgggaucaacgaguggagcggcuacuccgggagcuucgugcagcacccggagcugaccggccuggacugcauccgccccugcuucuggguggagcucauccggggccgccccaaggagaacaccaucuggaccuccgggagcuccaucagcuucugcggcgucaacuccgacacggugggguggagcuggcccgacggcgccgagcugccguucaccaucgacaaguga

SEQ ID NO: 83168 - RNA, 1410 nt, Artificial Sequence
  derived and/or modified CDS sequence (opt1) from neuraminidase__InfluenzaA__ADK87314
augaaccccaaccagaagaucaucaccaucggcagcgugucccugaccaucagcacgaucugcuucuucaugcagaucgccauccucaucaccaccgucacccugcacuucaagcaguacgaguucaacuccccgcccaacaaccaggugaugcugugcgagcccacgaucaucgaggggaacaucaccgagaucguguaccucaccaacaccacgaucgagaaggagaugugccccaagcuggccgaguaccgcaacuggagcaagccgcagugcgacaucaccggcuucgcgcccuucuccaaggacaacagcauccggcuguccgccgggggcgacaucugggucacccgcgagcccuacgugagcugcgaccccgacaagugcuaccaguucgcccucgggcagggcaccacgcugaacaacgugcacuccaacaacaccguccgggaccgcaccccguaccggacccugcucaugaacgagcugggcgugcccuuccaccuggggacgaagcaggucugcaucgccuggagcuccagcuccugccacgacggcaaggccuggcuccacgugugcaucaccggggacgacaagaacgcgaccgccagcuucaucuacaacggccgccugguggacuccguggucagcugguccaaggagauccugcggacccaggagagcgagugcgugugcaucaacgggacgugcaccguggucaugaccgacggcuccgccagcggcaaggccgacaccaagauccucuucaucgaggaggggaagaucgugcacacgagcaccuccagcggcuccgcgcagcacguggaggagugcagcugcuacccccgcuaccccgggguccggugcgugugccgcgacaacuggaagggcuccaaccggccgaucguggacaucaacaucaaggaccacagcaucgucuccagcuacgugugcuccggccuggugggggacacgccccgcaagaacgacagcuccagcuccagccacugccuggaccccaacaacgaggagggcgggcacggcgucaaggggugggccuucgacgacggcaacgacguguggaugggccggaccaucuccgagaagucccgccucggguacgagaccuucaaggucaucgagggcuggagcaaccccaagagcaagcugcagaucaaccgccaggugaucguggaccgggggaaccgguccggcuacagcgggaucuucagcgucgagggcaaguccugcaucaaccgcugcuucuacguggagcugauccggggccgcaaggaggagaccgaggugcucuggaccagcaacuccaucgucguguucugcgggaccagcggcacguacgggaccggcuccuggccggacggggccgacaucaaccugaugcccguguga

SEQ ID NO: 83169 - RNA, 1410 nt, Artificial Sequence
  derived and/or modified CDS sequence (opt1) from neuraminidase__InfluenzaA__ADK87316
augaaccccaaccagaagaucaucaccaucggcagcgugugcaugaccaucgggauggccaaccugauccuccagaucggcaacaucaucuccaucuggaucagccacuccauccagcuggggaaccagaaccagaucgagacgugcaaccagagcgucaucaccuacgagaacaacaccugggugaaccagaccuacgugaacaucuccaacacgaacuucgccgcgggccagagcgucguguccgugaagcuggccgggaacagcucccucugcccggucagcggcugggccaucuacuccaaggacaacagcauccgcaucggcuccaagggggacguguucgugauccgggagcccuucaucagcugcagcccccuggagugccgcaccuucuuccugacccagggcgcccuccugaacgacaagcacuccaacgggaccaucaaggaccggucccccuaccgcacgcugaugagcugcccgaucggcgagguccccucccccuacaacagccgguucgagagcguggccugguccgcgagcgccugccacgacgggaucaacuggcucaccaucggcaucuccggccccgacaacggggccguggccguccugaaguacaacggcaucaucaccgacaccaucaagagcuggcgcaacaacauccugcggacgcaggaguccgagugcgcgugcgugaacgggagcugcuucaccgugaugaccgacggcccguccgacggccaggccagcuacaagaucuuccgcaucgagaaggggaagaucgucaaguccguggagaugaacgcccccaacuaccacuacgaggagugcagcugcuaccccgacuccagcgagaucacgugcgugugccgggacaacuggcacggcuccaaccgccccugggucagcuucaaccagaaccucgaguaccagaucggguacaucugcuccggcaucuucggggacaacccgcggcccaacgacaagaccggcagcugcggccccguguccagcaacggggccaacggcgugaagggguucuccuucaaguacggcaacggggucuggaucggccgcaccaagagcaucagcucccggaacggcuucgagaugaucugggaccccaacggguggaccggcaccgacaacaacuucagcaucaagcaggacaucguggggaucaacgagugguccggcuacagcggguccuucgugcagcacccggagaucacgggccuggacugcauccgccccugcuucugggucgagcugauccggggccgccccaaggagaacaccaucuggaccagcggguccagcaucuccuucugcggcgugaacagcgacaccgucgggugguccuggcccgacggcgccgagcucccguucacgaucgacaaguga

SEQ ID NO: 83170 - RNA, 1410 nt, Artificial Sequence
  derived and/or modified CDS sequence (opt1) from neuraminidase__InfluenzaA__ADK87318
augaaccccaaccagaagaucaucaccaucggcagcgugugcaugaccaucgggauggccaaccugauccuccagaucggcaacaucaucuccaucuggaucagccacuccauccagcuggggaaccagaaccagaucgagacgugcaaccagagcgucaucaccuacgagaacaacaccugggugaaccagaccuacgugaacaucuccaacacgaacuucgccgcgggccagagcgucguguccgugaagcuggccgggaacagcucccucugcccggucagcggcugggccaucuacuccaaggacaacagcauccgcaucggcuccaagggggacguguucgugauccgggagcccuucaucagcugcagcccccuggagugccgcaccuucuuccugacccagggcgcccuccugaacgacaagcacuccaacgggaccaucaaggaccggucccccuaccgcacgcugaugagcugcccgaucggcgagguccccucccccuacaacagccgguucgagagcguggccugguccgcgagcgccugccacgacgggaucaacuggcucaccaucggcaucuccggccccgacaacggggccguggccguccugaaguacaacggcaucaucaccgacaccaucaagagcuggcgcaacaacauccugcggacgcaggaguccgagugcgcgugcgugaacgggagcugcuucaccgugaugaccgacggcccguccgacggccaggccagcuacaagaucuuccgcaucgagaaggggaagaucgucaaguccguggagaugaacgcccccaacuaccacuacgaggagugcagcugcuaccccgacuccagcgagaucacgugcgugugccgggacaacuggcacggcuccaaccgccccugggucagcuucaaccagaaccucgaguaccagaucggguacaucugcuccggcaucuucggggacaacccgcggcccaacgacaagaccggcagcugcggccccguguccagcaacggggccaacggcgugaagggguucuccuucaaguacggcaacggggucuggaucggccgcaccaagagcaucagcucccggaacggcuucgagaugaucugggaccccaacggguggaccggcaccgacaacaacuucagcaucaagcaggacaucguggggaucaacgagugguccggcuacagcggguccuucgugcagcacccggagcugacgggccuggacugcauccgccccugcagcugggucgagcucauccggggccgccccaaggagaacaccaucuggaccuccgggagcuccaccagcuucugcggcgugaacuccgacacggucggguggagcuggcccgacggcgccgagcugccguucaccaucgacaaguga

SEQ ID NO: 83171 - RNA, 1410 nt, Artificial Sequence
  derived and/or modified CDS sequence (opt1) from neuraminidase__InfluenzaA__ADK87320
augaaccccaaccagaagaucaucaccaucggcagcgugugcaugaccaucgggauggccaaccugauccuccagaucggcaacaucaucuccaucuggaucagccacuccauccagcuggggaaccagaaccagaucgagacgugcaaccagagcgucaucaccuacgagaacaacaccugggugcaccagaccuacgugaacaucuccaacacgaacuucgccgcgggccagagcgucguguccgugaagcuggccgggaacagcucccucugcccggucagcggcugggccaucuacuccaaggacaacagcauccgcaucggcuccaagggggacguguucgugauccgggagcccuucaucagcugcagcccccuggagugccgcaccuucuuccugacccagggcgcccuccugaacgacaagcacuccaacgggaccaucaaggaccggucccccuaccgcacgcugaugagcugcccgaucggcgagguccccucccccuacaacagccgguucgagagcguggccugguccgcgagcgccugccacgacgggaucaacuggcucaccaucggcaucuccggccccgacaacggggccguggccguccugaaguacaacggcaucaucaccgacaccaucaagagcuggcgcaacaacauccugcggacgcaggaguccgagugcgcgugcgugaacgggagcugcuucaccgugaugaccgacggcccguccgacggccaggccagcuacaagaucuuccgcaucgagaaggggaagaucgucaaguccguggagaugaacgcccccaacuaccacuacgaggagugcagcugcuaccccgacuccagcgagaucacgugcgugugccgggacaacuggcacggcuccaaccgccccugggucagcuucaaccagaaccucgaguaccagaucggguacaucugcuccggcaucuucggggacaacccgcggcccaacgacaagaccggcagcugcggccccguguccagcaacggggccaacggcgugaagggguucuccuucaaguacggcaacggggucuggaucggccgcaccaagagcaucagcucccggaacggcuucgagaugaucugggaccccaacggguggaccggcaccgacaacaacuucagcaucaagcaggacaucguggggaucaacgagugguccggcuacagcggguccuucgugcagcacccggagcugacgggccugaacugcauccgccccugcuucugggucgagcucauccggggccgccccaaggagaacaccaucuggaccagcggguccagcaucuccuucugcggcgugaacagcgacaccgucgggugguccuggcccgacggcgccgagcugccguucacgaucgacaaguga

SEQ ID NO: 83172 - RNA, 1410 nt, Artificial Sequence
  derived and/or modified CDS sequence (opt1) from neuraminidase__InfluenzaA__ADK87324
augaaccccaaccagaagaucaucaccaucggcagcgugucccugaccaucagcacgaucugcuuccucaugcagaucgccauccugaucaccaccgucacccugcacuucaagcaguacgaguucaacuccccgcccaacaaccaggugaugcucugcgagcccacgaucaucgagcgcaacaucaccgagaucguguaccugaccaacaccacgaucgagaaggagaucugccccaagcuggccgaguaccggaacuggagcaagccgcagugcgacaucaccggguucgcgcccuucuccaaggacaacagcauccgccucuccgccggcggggacaucugggucacccgggagcccuacgugagcugcgaccccggcaagugcuaccaguucgcccuggggcagggcaccacgcugaacaacgugcacuccaacaacaccguccgcgaccggaccccguaccgcacccuccugaugaacgagcugggcgugcccuuccaccucgggacgaagcaggucugcaucgccuggagcuccagcuccugccacgacggcaaggccuggcugcacgugugcaucaccggggacgacgagaacgcgaccgccagcuucaucuacaacggccggcugguggacuccguggucagcugguccaaggagauccuccgcacccaggagagcgagugcgugugcaucaacgggacgugcaccguggucaugaccgacggcuccgccagcggcaaggccgacaccaagauccuguucaucgaggaggggaagaucgugcacacgagcacccuguccggcagcgcgcagcacguggaggagugcuccugcuacccccgguaccccgggguccgcugcgugugccgggacaacuggaagggcagcaaccgcccgaucguggacaucaacaucaaggaccacuccaucgucagcuccuacgugugcagcggccucgugggggacacgccccggaagaacgacuccagcuccagcucccacugccuggaccccaacaacgaggagggcgggcacggcgucaaggggugggccuucgacgacggcaacgacguguggaugggccgcaccaucagcgagaagucccggcugggguacgagaccuucaaggucaucgagggcuggagcaaccccaaguccaagcuccagaucaaccgccaggugaucguggaccgggggaaccgcagcggcuacuccgggaucuucagcgucgagggcaagagcugcaucaaccggugcuucuacguggagcugauccgcggccggaaggaggagaccgaggugcuguggaccuccaacagcaucgucguguucugcgggaccuccggcacguacgggaccggcagcuggccggacggggccgacaucaaccucaugcccguguga

SEQ ID NO: 83173 - RNA, 1410 nt, Artificial Sequence
  derived and/or modified CDS sequence (opt1) from neuraminidase__InfluenzaA__ADK87327
augaaccccaaccagaagaucaugaccaucggcagcgugucccugaccaucagcacgaucugcuucuucaugcagaucgccauccucaucaccaccgucacccugcacuucaagcaguacgaguucaacuccccgcccaacaaccaggugaugcugugcgagcccacgaucaucgagcgcaacaucaccgagaucguguaccucaccaacaccacgaucgagaaggagaucugccccaagcuggccgaguaccggaacuggagcaagccgcagugcgacaucaccggguucgcgcccuucuccaaggacaacagcauccgccuguccgccggcggggacaucugggucacccgggagcccuacgugagcugcgaccccgacaagugcuaccaguucgcccucggccaggggaccacgcugaacaacgugcacuccaacaacaccguccgcgaccggaccccguaccgcacccugcucaugaacgagcugggcgugcccuuccaccugggcacgaagcaggucugcaucgccuggagcuccagcuccugccacgacgggaaggccuggcuccacgugugcaucaccggcgacgacaagaacgcgaccgccagcuucaucuacaacgggcggcugguggacuccguggucagcugguccaaggagauccugcgcacccaggagagcgagugcgugugcaucaacggcacgugcaccguggucaugaccgacggguccgccagcggcaaggccgacaccaagauccucuucaucgaggagggcaagaucgugcacacgagcacccuguccgggagcgcgcagcacguggaggagugcuccugcuacccccgguaccccggcguccgcugcgugugccgggacaacuggaaggggagcaaccgcccgaucguggacaucaacaucaaggaccacuccaucgucagcuccuacgugugcagcggccuggugggcgacacgccccggaagaacgacuccagcuccagcucccacugccucgaccccaacaacgaggagggcgggcacggggucaagggcugggccuucgacgacgggaacgacguguggaugggccgcaccaucagcgagcggucccgccugggcuacgagaccuucaaggucaucgagggguggagcaaccccaaguccaagcugcagaucaaccgccaggugaucguggaccggggcaaccggagcggguacuccggcaucuucagcgucgagggcaagagcugcaucaaccgcugcuucuacguggagcucauccgggggcgcaaggaggagaccgaggugcuguggaccuccaacagcaucgucguguucugcggcaccuccgggacguacggcaccgggagcuggccggacggcgccgacaucaaccugaugcccguguga

SEQ ID NO: 83174 - RNA, 1410 nt, Artificial Sequence; identical to SEQ ID NO: 80762
  derived and/or modified CDS sequence (opt1) from neuraminidase__InfluenzaA__ADK87329

SEQ ID NO: 83175 - RNA, 1410 nt, Artificial Sequence
  derived and/or modified CDS sequence (opt1) from neuraminidase__InfluenzaA__ADK87330
augaaccccaaccagaagaucaucaccaucggcagcgugugcaugaccaucgggauggccaaccugauccuccagaucggcaacaucaucuccaucuggaucagccacuccauccagcuggggaaccagaaccagaucgagacgugcaaccagagcgucaucaccuacgagaacaacaccugggugaaccagaccuacgugaacaucuccaacacgaacuucgccgcgggccagagcgucguguccgugaagcuggccgggaacagcucccucugcccggucagcggcugggccaucuacuccaaggacaacagcauccgcaucggcuccaagggggacguguucgugauccgggagcccuucaucagcugcagcccccuggagugccgcaccuucuuccugacccagggcgcccuccugaacgacaagcacuccaacgggaccaucaaggaccggucccccuaccgcacgcugaugagcugcccgaucggcgagguccccucccccuacaacagccgguucgagagcguggccugguccgcgagcgccugccacgacgggaucaacuggcucaccaucggcaucuccggccccgacaacggggccguggccguccugaaguacaacggcaucaucaccgacaccaucaagagcuggcgcaacaacauccugcggacgcaggaguccgagugcgcgugcgugaacgggagcugcuucaccgugaugaccgacggcccguccgacggccaggccagcuacaagaucuuccgcaucgagaaggggaagaucgucaaguccguggagaugaacgcccccaacuaccacuacgaggagugcagcugcuaccccgacuccagcgagaucacgugcgugugccgggacaacuggcacggcuccaaccgccccugggucagcuucaaccagaaccucgaguaccagaucggguacaucugcuccggcaucuucggggacaacccgcggcccaacgacaagaccggcagcugcggccccguguccagcaacggggccaacggcgugaagggguucuccuucaaguacggcaacggggucuggaucggccgcaccaagagcaucagcucccggaacggcuucgagaugaucugggaccccaacggguggaccggcaccgacaacaacuucagcaucaagcaggacaucguggggaucaacgagugguccggcuacagcggguccuucgugcagcacccggagcugacgggccuggacugcauccgccccugcuucugggucgagcucauccggggccgccccaaggagaacaccaucugggccagcggguccagcaucuccuucugcggcgugaacagcgacaccgucgggugguccuggcccgacggcgcggagcugccguucaccaucgacaaguga

SEQ ID NO: 83176 - RNA, 1410 nt, Artificial Sequence; identical to SEQ ID NO: 80762
  derived and/or modified CDS sequence (opt1) from neuraminidase__InfluenzaA__ADK87331

SEQ ID NO: 83177 - RNA, 1410 nt, Artificial Sequence
  derived and/or modified CDS sequence (opt1) from neuraminidase__InfluenzaA__ADK87332
augaaccccaaccagaagaucaucaccaucggcagcgugugcaugaccaucgggauggccaaccugauccuccagaucggcaacaucaucuccaucuggaucagccacuccauccagcuggggaaccagaaccagaucgagacgugcaaccagagcgucaucaccuacgagaacaacaccugggugaaccagaccuacgugaacaucuccaacacgaacuucgccgcgggccagagcgucguguccgugaagcuggccgggaacagcucccucugcccggucagcggcugggccaucuacuccaaggacaacagcauccgcaucggcuccaagggggacguguucgugauccgggagcccuucaucagcugcagcccccuggagugccgcaccuucuuccugacccagggcgcccuccugaacgacaagcacuccaacgggaccaucaaggaccggucccccuaccgcacgcugaugagcugcccgaucggcgagguccccucccccuacaacagccgguucgagagcguggccugguccgcgagcgccugccacgacgggaucaacuggcucaccaucggcaucuccggccccgacaacggggccguggccguccugaagcacaacggcaucaucaccgacaccaucaagagcuggcgcaacaacauccugcggacgcaggaguccgagugcgcgugcgugaacgggagcugcuucaccgugaugaccgacggcccguccgacggccaggccagcuacaagaucuuccgcaucgagaaggggaagaucgucaaguccguggagaugaacgcccccaacuaccacuacgaggagugcagcugcuaccccgacuccagcgagaucacgugcgugugccgggacaacuggcacggcuccaaccgccccugggucagcuucaaccagaaccucgaguaccagaucggguacaucugcuccggcaucuucggggacaacccgcggcccaacgacaagaccggcagcugcggccccguguccagcaacggggccaacggcgugaagggguucuccuucaaguacggcaacggggucuggaucggccgcaccaagagcaucagcucccggaacggcuucgagaugaucugggaccccaacggguggaccggcaccgacaacaacuucagcaucaagcaggacaucguggggaucaacgagugguccggcuacagcggguccuucgugcagcacccggagcugacgggccuggacugcauccgccccugcuucugggucgagcucauccggggccgccccaaggagaacaccaucuggaccagcggguccagcaucuccuucugcggcgugaacagcgacaccgucgggugguccuggcccgacggcgccgagcugccguucacgaucgacaaguga

SEQ ID NO: 83178 - RNA, 1410 nt, Artificial Sequence
  derived and/or modified CDS sequence (opt1) from neuraminidase__InfluenzaA__ADK87333
augaaccccaaccagaagaucaucaccaucggcagcgugugcaugaccaucgggauggccaaccugauccuccagaucggcaacaucaucuccaucuggaucagccacuccauccagcuggggaaccagaaccagaucgagacgugcaaccagagcgucaucaccuacgagaacaacaccugggugaaccagaccuacgugaacaucuccaacacgaacuucgccgcgggccagagcgucguguccgugaagcuggccgggaacagcucccucugcccggucagcggcugggccaucuacuccaaggacaacagcauccgcaucggcuccaagggggacguguucgugauccgggagcccuucaucagcugcagcccccuggagugccgcaccuucuuccugacccagggcgcccuccugaacgacaagcacuccaacgggaccaucaaggaccggucccccuaccgcacgcugaugagcugcccgaucggcgagguccccucccccuacaacagccgguucgagagcguggccugguccgcgagcgccugccacgacgggaucaacuggcucaccaucggcaucuccggccccgacaacggggccguggccguccugaaguacaacggcaucaucaccgacaccaucaagagcuggcgcaacaacauccugcggacgcaggaguccgagugcgcgugcgugaacgggagcugcuucaccgugaugaccgacggcccguccgacggccaggccagcuacaagaucuuccgcaucgagaaggggaagaucgucaaguccguggagaugaacgcccccaacuaccacuacgaggagugcagcugcuaccccuacuccagcgagaucacgugcgugugccgggacaacuggcacggcuccaaccgccccugggucagcuucaaccagaaccucgaguaccagaucggguacaucugcuccggcaucuucggggacaacccgcggcccaacgacaagaccggcagcugcggccccguguccagcaacggggccaacggcgugaagggguucuccuucaaguacggcaacggggucuggaucggccgcaccaagagcaucagcucccggaacggcuucgagaugaucugggaccccaacggguggaccggcaccgacaacaacuucagcaucaagcaggacaucguggggaucaacgagugguccggcuacagcggguccuucgugcagcacccggagcugacgggccuggacugcauccgccccugcuucugggucgagcucauccggggccgccccaaggagaacaccaucuggaccagcggguccagcaucuccuucugcggcgugaacagcgacaccgucgggugguccuggcccgacggcgccgagcugccguucacgaucgacaaguga

SEQ ID NO: 83179 - RNA, 1410 nt, Artificial Sequence
  derived and/or modified CDS sequence (opt1) from neuraminidase__InfluenzaA__ADK87335
augaaccccaaccagaagaucaucaccaucggcagcgugucccugaccaucagcacgaucugcuucuucaugcagaucgccauccucaucaccaccgucacccugcacuucaagcaguacgaguucaacuccccgcccaacaaccaggugaugcugugcgagcccacgaucaucgagcgcaacaucaccgagaucguguaccucaccaacaccacgaucgagaaggagaucugccccaagcuggccgaguaccggaacuggagcaagccgcagugcgacaucaccggguucgcgcccuucuccaaggacaacagcauccgccuguccgccggcggggacaucugggucacccgggagcccuacgugagcugcgaccccgaccgccgguaccaguucgcccucggccaggggaccacgcugaacaacgugcacuccgacaacaccguccgcgaccggaccccguaccgcacccugcucaugaacgagcugggcgugcccuuccaccugggcacgaagcaggucugcaucgccuggagcuccagcuccugccacgacgggaaggccuggcuccacgugugcaucaccggcgacgacaagaacgcgaccgccagcuucaucuacaacgggcggcugguggacuccguggucagcugguccaaggagauccugcgcacccaggagagcgagugcgugugcaucaacggcacgugcaccguggucaugaccgacggguccgccagcggcaaggccgacaccaagauccucuucaucgaggagggcaagaucgugcacacgagcacccuguccgggaacgcgcagcacguggaggagugcagcugcuacccccgguaccccggcguccgcugcgugugccgggacaacuggaagggguccaaccgcccgaucguggacaucaacaucaaggaccacagcaucgucuccagcuacgugugcuccggccuggugggcgacacgccccggaagaacgacagcuccagcuccagccacugccucgaccccaacaacgaggagggcgggcacggggucaagggcugggccuucgacgacgggaacgacguguggaugggccgcaccaucuccgagaagucccggcugggcuacgagaccuucaaggucaucgagggguggagcaaccccaagagcaagcugcagaucaaccgccaggugaucguggaccggggcaaccgcuccggguacagcggcaucuucuccgucgagggcaagagcugcaucaaccggugcuucuacguggagcucauccgcgggcgcaaggaggagaccgaggugcuguggaccagcaacuccaucgucguguucugcggcaccagcgggacguacggcaccggguccuggccggacggcgccgacaucaaccugaugcccaucuga

SEQ ID NO: 83180 - RNA, 1410 nt, Artificial Sequence
  derived and/or modified CDS sequence (opt1) from neuraminidase__InfluenzaA__ADK87337
augaaccccaaccagaagaucaucaccaucggcagcgugucccugaccaucagcacgaucugcuucuucaugcagaucgccauccucaucaccaccgucacccugcacuucaagcaguacgaguucaacuccccgcccaacaaccaggugaugcugugcgagcccacgaucaucgagcgcaacaucaccgagaucguguaccucaccaacaccacgaucgagaaggagaucugccccaagcuggccgaguaccggaacuggagcaagccgcagugcgacaucaccggguucgcgcccuucuccaaggacaacagcauccgccuguccgccggcggggacaucugggucacccgggagcccuacgugagcugcgaccccgacaagugcuaccaguucgcccucggccaggggaccacgcugaacaacgugcacuccaacaacgccguccgcgaccggaccccguaccgcacccugcucaugaacgagcugggcgugcccuuccaccugggcaccaagcaggucugcaucgccuggagcuccagcuccugccacgacgggaaggcguggcuccacgugugcaucacgggcgacgacaagaacgccaccgccagcuucaucuacaacgggcggcugguggacuccguggucagcugguccaaggagauccugcgcacccaggagagcgagugcgugugcaucaacgggaccugcacgguggucaugaccgacggguccgccagcggcaaggcggacaccaagauccucuucaucgaggagggcaagaucgugcacaccagcacgcuguccgggaacgcccagcacguggaggagugcagcugcuacccccgguaccccggcguccgcugcgugugccgggacaacuggaagggguccaaccgcccgaucguggacaucaacaucaaggaccacagcaucgucuccagcuacgugugcuccggccuggugggcgacacgccccggaagaacgacagcuccagcuccagccacugccucgaccccaacaacgaggagggcggccacggggucaagggcugggccuucgacgacgggaacgacguguggaugggccgcaccaucuccgagaagucccggcugggcuacgagaccuucaaggucaucgagggguggagcaaccccaagagcaagcugcagaucaaccgccaggugaucguggaccggggcaaccgcuccggguacagcggcaucuucuccgucgagggcaagagcugcaucaaccggugcuucuacguggagcucauccgcgggcggaaggaggagaccgaggugcuguggaccagcaacuccaucgucguguucugcggcaccagcgggaccuacggcacgggguccuggccggacggcgccgacaucaaccugaugcccaucuga

SEQ ID NO: 83181 - RNA, 1410 nt, Artificial Sequence
  derived and/or modified CDS sequence (opt1) from neuraminidase__InfluenzaA__ADK87339
augaaccccaaccagaagaucaucaccaucggcagcaucugcaugaccaucgggauggccaaccugauccuccagaucggcaacaucaucuccaucuggaucagccacuccauccagcuggggaaccagaaccagaucgagacgugcaaccagagcgugaucaccuacgagaacaacaccugggucaaccagaccuacgugaacaucuccaacacgaacuucgccgcgggccagagcguggucuccgugaagcuggccgggaacagcucccucugcccggugagcggcugggccaucuacuccaaggacaacagcauccgcaucggcuccaagggggacgucuucgugauccgggagcccuucaucagcugcagcccccuggagugccgcaccuucuuccugacccagggcgcccuccugaacgacaagcacuccaacgggaccaucaaggaccggucccccuaccgcacgcugaugagcugcccgaucggcgaggugcccucccccuacaacagccgguucgagagcgucgccugguccgcgagcgccugccacgacgggaucaacuggcucaccaucggcaucuccggccccgacaacggggccguggccgugcugaaguacaacggcaucaucaccgacaccaucaagagcuggcgcaacaacauccugcggacgcaggaguccgagugcgcgugcgucaacgggagcugcuucaccgugaugaccgacggcccguccgacggccaggccagcuacaagaucuuccgcaucgagaaggggaagaucgugaaguccgucgagaugaacgcccccaacuaccacuacgaggagugcagcugcuaccccgacuccagcgagaucacgugcgugugccgggacaacuggcacggcuccaaccgccccugggugagcuucaaccagaaccucgaguaccagaucggguacaucugcuccggcaucuucggggacaacccgcggcccaacgacaagaccggcagcugcggccccgucuccagcaacggggccaacggcgugaagggguucuccuucaaguacggcaacgggguguggaucggccgcaccaagagcaucagcucccggaacggcuucgagaugaucugggaccccaacggguggaccggcaccgacaacaacuucagcaucaagcaggacaucgucgggaucaacgagugguccggcuacagcggguccuucgugcagcacccggagcugacgggccuggacugcauccgccccugcuucuggguggagcucauccggggccgccccaaggagaacaccaucuggaccagcggguccagcaucuccuucugcggcgucaacagcgacaccguggggugguccuggcccgacggcgccgagcugccguucacgaucgacaaguga

SEQ ID NO: 83182 - RNA, 1410 nt, Artificial Sequence; identical to SEQ ID NO: 80762
  derived and/or modified CDS sequence (opt1) from neuraminidase__InfluenzaA__ADK90209

SEQ ID NO: 83183 - RNA, 1410 nt, Artificial Sequence; identical to SEQ ID NO: 80762
  derived and/or modified CDS sequence (opt1) from neuraminidase__InfluenzaA__ADK90213

SEQ ID NO: 83184 - RNA, 1410 nt, Artificial Sequence; identical to SEQ ID NO: 80762
  derived and/or modified CDS sequence (opt1) from neuraminidase__InfluenzaA__ADK90217

SEQ ID NO: 83185 - RNA, 1410 nt, Artificial Sequence; identical to SEQ ID NO: 82741
  derived and/or modified CDS sequence (opt1) from neuraminidase__InfluenzaA__ADK90221

SEQ ID NO: 83186 - RNA, 1410 nt, Artificial Sequence; identical to SEQ ID NO: 82741
  derived and/or modified CDS sequence (opt1) from neuraminidase__InfluenzaA__ADK90225

SEQ ID NO: 83187 - RNA, 1410 nt, Artificial Sequence; identical to SEQ ID NO: 80762
  derived and/or modified CDS sequence (opt1) from neuraminidase__InfluenzaA__ADK90229

SEQ ID NO: 83188 - RNA, 1410 nt, Artificial Sequence; identical to SEQ ID NO: 80762
  derived and/or modified CDS sequence (opt1) from neuraminidase__InfluenzaA__ADK90233

SEQ ID NO: 83189 - RNA, 1410 nt, Artificial Sequence
  derived and/or modified CDS sequence (opt1) from neuraminidase__InfluenzaA__ADK90241
augaaccccaaccagaagaucaucaccaucggcagcgugugcaugaccaucgggauggccaaccugauccuccagaucggcaacaucaucuccaucuggaucagccacuccauccagcuggggaaccagaaccagaucgagacgugcaaccagagcgucaucaccuacgagaacaacaccugggugaaccagaccuacgugaacaucuccaacgccaacuucgcggccggccagagcgucguguccgugaagcuggccgggaacagcucccucugcccggucagcggcugggccaucuacuccaaggacaacagcauccgcaucggcuccaagggggacguguucgugauccgggagcccuucaucagcugcagcccccuggagugccgcacguucuuccugacccagggcgcccuccugaacgacaagcacuccaacgggaccaucaaggaccggagcccccaccgcacccugauguccugcccgaucggcgagguccccucccccuacaacagccgguucgagagcguggcgugguccgccagcgccugccacgacgggaucaacuggcucacgaucggcaucuccggccccgacaacggggccguggcgguccugaaguacaacggcaucaucaccgacaccaucaagagcuggcgcaacaacauccugcggacccaggaguccgagugcgccugcgugaacgggagcugcuucacggugaugaccgacggcccguccgacggccaggccagcuacaagaucuuccgcaucgagaaggggaagaucgucaaguccguggagaugaacgcccccaacuaccacuacgaggagugcagcugcuaccccgacuccagcgagaucacgugcgugugccgggacaacuggcacggcuccaaccgccccugggucagcuucaaccagaaccucgaguaccagaucggguacaucugcuccggcaucuucggggacaacccgcggcccaacgacaagaccggcagcugcggccccguguccagcaacggggccaacggcgugaagggguucuccuucaaguacggcaacggggucuggaucggccgcaccaagagcaucagcucccggaacggcuucgagaugaucugggaccccaacggguggaccggcaccgacaacaacuucagcaucaagcaggacaucguggggaucaacgagugguccggcuacagcggguccuucgugcagcacccggagcugaccggccuggacugcauccgccccugcuucugggucgagcucauccggggccgccccaaggagaacacgaucuggaccagcggguccagcaucuccuucugcggcgugaacagcgacaccgucgggugguccuggcccgacggcgcggagcugccguucaccaucgacaaguga

SEQ ID NO: 83190 - RNA, 1410 nt, Artificial Sequence; identical to SEQ ID NO: 82741
  derived and/or modified CDS sequence (opt1) from neuraminidase__InfluenzaA__ADK90245

SEQ ID NO: 83191 - RNA, 1410 nt, Artificial Sequence
  derived and/or modified CDS sequence (opt1) from neuraminidase__InfluenzaA__ADK90249
augaaccccaaccagaagaucaucaccaucggcagcgugugcaugaccaucgggauggccaaccugauccuccagaucggcaacaucaucuccaucuggaucagccacuccauccagcuggggaaccagaaccagaucgagacgugcaaccagagcgucaucaccuacgagaacaacaccugggugaaccagaccuacgugaacaucuccaacacgaacuucgccgcgggccagagcgucguguccgugaagcuggccgggaacagcucccucugcccggucagcggcugggccaucuacuccaaggacaacagcauccgcaucggcuccaagggggacguguucgugauccgggagcccuucaucagcugcagcccccuggagugccgcaccuucuuccugacccagggcgcccuccugaacgacaagcacuccaacgggaccaucaaggaccggucccccuaccgcacgcugaugagcugcccgaucggcgagguccccucccccuacaacagccgguucgagagcguggccugguccgcgagcgccugccacgacgggaucaacuggcucaccaucggcaucuccggccccgacaacggggccguggccguccugaaguacaacggcaucaucaccgacaccaucaagagcuggcgcaacaacauccugcggacgcaggaguccgagugcgcgugcgugaacgggagcugcuucaccgugaugaccgacggcccguccgacggccaggccagcuacaagaucuuccgcaucgagaaggggaagaucgucaaguccguggagaugaacgcccccaacuaccacuacgaggagugcagcugcuaccccgacuccagcgagaucacgugcgugugccgggacaacuggcacggcuccaaccgccccugggucagcuucaaccagaaccucgaguaccagaucggguacaucugcuccggcaucuucggggacaacccgcggcccaacgacaagaccggcagcugcggccccguguccagcaacggggccaacggcgugaagggguucuccuucaaguacggcaacggggucuggaucggccgcaccaagagcaucagcucccggaacggcuucgagaugaucugggaccccaacggguggaccggcaccgacaacaacuucagcaugaagcaggacaucguggggaucaacgagugguccggcuacagcggguccuucgugcagcacccggagcugacgggccuggacugcauccgccccugcuucugggucgagcucauccggggccgccccaaggagaacaccaucuggaccagcggguccagcaucuccuucugcggcgugaacagcgacaccgucgggugguccuggcccgacggcgccgagcugccguucacgaucgacaaguga

SEQ ID NO: 83192 - RNA, 1410 nt, Artificial Sequence; identical to SEQ ID NO: 83191
  derived and/or modified CDS sequence (opt1) from neuraminidase__InfluenzaA__ADK90253

SEQ ID NO: 83193 - RNA, 1410 nt, Artificial Sequence
  derived and/or modified CDS sequence (opt1) from neuraminidase__InfluenzaA__ADK90257
augaaccccaaccagaagaucaucaucaucggcagcgugugcaugaccaucgggauggccaaccugauccuccagaucggcaacaucaucuccaucuggaucagccacuccauccagcuggggaaccagaaccagaucgagaccugcaaccagagcgucaucacguacgagaacaacaccugggugaaccagaccuacgugaacaucuccaacaccaacuucgccgcgggccagagcgucguguccgugaagcuggccgggaacagcucccucugcccggucagcggcugggccaucuacuccaaggacaacagcauccgcaucggcuccaagggggacguguucgugauccgggagcccuucaucagcugcagcccccuggagugccgcacguucuuccugacccagggcgcccuccugaacgacaagcacuccaacgggaccaucaaggaccggagcccccaccgcacccugauguccugcccgaucggcgagguccccucccccuacaacagccgguucgagagcguggccugguccgcgagcgccugccacgacgggaucaacuggcucacgaucggcaucuccggccccgacaacggggccguggccguccugaaguacaacggcaucaucaccgacaccaucaagagcuggcgcaacaacauccugcggacccaggaguccgagugcgcgugcgugaacgggagcugcuucacggugaugaccgacggcccguccgacggccaggccagcuacaagaucuuccgcaucgagaaggggaagaucgucaaguccguggagaugaacgcccccaacuaccacuacgaggagugcagcugcuaccccgacuccagcgagaucacgugcgugugccgggacaacuggcacggcuccaaccgccccugggucagcuucaaccagaaccucgaguaccagaucggguacaucugcuccggcaucuucggggacaacccgcggcccaacgacaagaccggcagcugcggccccguguccagcaacggggccaacggcgugaagggguucuccuucaaguacggcaacggggucuggaucggccgcaccaagagcaucagcucccggaacggcuucgagaugaucugggaccccaacggguggaccggcaccgacaacaacuucagcaucaagcaggacaucguggggaucaacgagugguccggcuacagcggguccuucgugcagcacccggagcugaccggccuggacugcauccgccccugcuucugggucgagcucauccggggccgccccaaggagaacacgaucuggaccagcggguccagcaucuccuucugcggcgugaacagcgacaccgucgggugguccuggcccgacggcgccgagcugccguucaccaucgacaaguga

SEQ ID NO: 83194 - RNA, 1410 nt, Artificial Sequence; identical to SEQ ID NO: 81116
  derived and/or modified CDS sequence (opt1) from neuraminidase__InfluenzaA__ADK90261

SEQ ID NO: 83195 - RNA, 1410 nt, Artificial Sequence
  derived and/or modified CDS sequence (opt1) from neuraminidase__InfluenzaA__ADK90265
augaaccccaaccagaagaucaucaccaucggcagcgugugcaugaccaucgggauggccaaccugauccuccagaucggcaacaucaucuccaucuggaucagccacuccauccagcuggggaaccagaaccagaucgagacgugcaaccagagcgucaucaccuacgagaacaacaccugggugaaccagaccuacgugaacaucuccaacacgaacuucgccgcgggccagagcgucguguccgugaagcuggccgggaacagcucccucugcccggucagcggcugggccaucuacuccaaggacaacagcauccgcaucggcuccaagggggacguguucgugauccgggagcccuucaucagcugcagcccccuggagugccgcaccuucuuccugacccagggcgcccuccugaacgacaagcacuccaacgggaccaucaaggaccggucccccuaccgcacgcugaugagcugcccgaucggcgagguccccucccccuacaacagccgguucgagagcguggccugguccgcgagcgccugccacgacgggaucaacuggcucaccaucggcaucuccggccccgacaacggggccguggccguccugaaguacaacggcaucaucaccgacaccaucaagagcuggcgcaacaacauccugcggacgcaggaguccgagugcgcgugcgugaacgggagcugcuucaccgugaugaccgacggcccguccgacggccaggccagcuacaagaucuuccgcaucgagaaggggaagaucgucaaguccguggagaugaacgcccccaacuaccacuacgaggagugcagcugcuaccccgacuccagcgagaucacgugcgugugccgggacaacuggcacggcuccaaccgccccugggucagcuucaaccagaaccucgaguaccagaugggguacaucugcuccggcaucuucggggacaacccgcggcccaacgacaagaccggcagcugcggccccguguccagcaacggggccaacggcgugaagggguucuccuucaaguacggcaacggggucuggaucggccgcaccaagagcaucagcucccggaacggcuucgagaugaucugggaccccaacggguggaccggcaccgacaacaacuucagcaucaagcaggacaucguggggaucaacgagugguccggcuacagcggguccuucgugcagcacccggagcugacgggccuggacugcauccgccccugcuucugggucgagcucauccggggccgccccaaggagaacaccaucuggaccagcggguccagcaucuccuucugcggcgugaacagcgacaccgucgggugguccuggcccgacggcgccgagcugccguucacgaucgacaaguga

SEQ ID NO: 83196 - RNA, 1410 nt, Artificial Sequence
  derived and/or modified CDS sequence (opt1) from neuraminidase__InfluenzaA__ADK90269
augaaccccaaccagaagaucaucaccaucggcagcgugugcaugaccaucgggauggccaaccugauccuccagaucggcaacaucaucuccaucuggaucagccacuccauccagcuggggaaccagaaccagaucgagaagugcaaccagagcgucaucacguacgagaacaacaccugggugaaccagaccuacgugaacaucuccaacaccaacuucgccgcgggccagagcgucguguccgugaagcuggccgggaacagcucccucugcccggucagcggcugggccaucuacuccaaggacaacagcauccgcaucggcuccaagggggacguguucgugauccgggagcccuucaucagcugcagcccccuggagugccgcacguucuuccugacccagggcgcccuccugaacgacaagcacuccaacgggaccaucaaggaccggucccccuaccgcacccugaugagcugcccgaucggcgagguccccucccccuacaacagccgguucgagagcguggccugguccgcgagcgccugccacgacgggaucaacuggcucacgaucggcaucuccggccccgacaacggggccguggccguccugaaguacaacggcaucaucaccgacaccaucaagagcuggcgcaacaacauccugcggacccaggaguccgagugcgcgugcgugaacgggagcugcuucacggugaugaccgacggcccguccgacggccaggccagcuacaagaucuuccgcaucgagaaggggaagaucgucaaguccaucgagaugaacgcccccaacuaccacuacgaggagugcagcugcuaccccgacuccagcgagaucacgugcgugugccgggacaacuggcacggcuccaaccgccccugggugagcuucaaccagaaccucgaguaccagaucggguacaucugcuccggcaucuucggggacaacccgcggcccaacgacaagaccggcagcugcggccccgucuccagcaacggggccaacggcgugaagggguucuccuucaaguacggcaacgggguguggaucggccgcaccaagagcaucagcucccggaacggcuucgagaugaucugggaccccaacggguggaccggcaccgacaacaacuucagcaucaagcaggacaucgucgggaucaacgagugguccggcuacagcggguccuucgugcagcacccggagcugaccggccuggacugcauccgccccugcuucuggguggagcucauccggggccgccccaaggagaacacgaucuggaccagcggguccaucaucagcuucugcggcgucaacuccgacaccgugggguggagcuggcccgacggcgccgagcugccguucaccaucgacaaguga

SEQ ID NO: 83197 - RNA, 1410 nt, Artificial Sequence; identical to SEQ ID NO: 80762
  derived and/or modified CDS sequence (opt1) from neuraminidase__InfluenzaA__ADK90273

SEQ ID NO: 83198 - RNA, 1410 nt, Artificial Sequence; identical to SEQ ID NO: 80762
  derived and/or modified CDS sequence (opt1) from neuraminidase__InfluenzaA__ADK90277

SEQ ID NO: 83199 - RNA, 1410 nt, Artificial Sequence; identical to SEQ ID NO: 80762
  derived and/or modified CDS sequence (opt1) from neuraminidase__InfluenzaA__ADK90281

SEQ ID NO: 83200 - RNA, 1410 nt, Artificial Sequence
  derived and/or modified CDS sequence (opt1) from neuraminidase__InfluenzaA__ADK90289
augaaccccaaccagaagaucaucaccaucggcagcgugugcaugaccaucgggauggccaaccugauccuccagaucggcaacaucaucuccaucuggaucagccacuccauccagcuggggaaccagaaccugaucgagacgugcaaccagagcgucaucaccuacgagaacaacaccugggugaaccagaccuacgugaacaucuccaacacgaacuucgccgcgggccagagcgucguguccgugaagcucgccgggaacagcucccugugcccggucagcggcugggccaucuacuccaaggacaacagcauccgcaucggcuccaagggggacguguucgugauccgggagcccuucaucagcugcagcccccuggagugccgcaccuucuuccucacccagggcgcccugcugaacgacaagcacuccaacgggaccaucaaggaccggucccccuaccgcacgcucaugagcugcccgaucggcgagguccccucccccuacaacagccgguucgagagcguggccugguccgcgagcgccugccacgacgggaucaacuggcugaccaucggcaucuccggccccgacaacggggccguggccguccugaaguacaacggcaucaucaccgacaccaucaagagcuggcgcaacaacauccuccggacgcaggaguccgagugcgcgugcgugaacgggagcugcuucaccgugaugaccgacggcccguccgacggccaggccagcuacaagaucuuccgcaucgagaaggggaagaucgucaaguccguggagaugaacgcccccaacuaccacuacgaggagugcagcugcuaccccgacuccagcgagaucacgugcgugugccgggacaacuggcacggcuccaaccgccccugggucagcuucaaccagaaccuggaguaccagaucggguacaucugcuccggcaucuucggggacaacccgcggcccaacgacaagaccggcagcugcggccccguguccagcaacggggccaacggcgugaagggguucuccuucaaguacggcaacggggucuggaucggccgcaccaagagcaucagcucccggaacggcuucgagaugaucugggaccccaacggguggaccggcaccgacaacaacuucagcaucaagcaggacaucguggggaucaacgagugguccggcuacagcggguccuucgugcagcacccggagcugacgggccucgacugcauccgccccugcuucugggucgagcugauccggggccgccccaaggagaacaccaucuggaccagcggguccagcaucuccuucugcggcgugaacagcgacaccgucgggugguccuggcccgacggcgccgagcugccguucacgaucgacaaguga

SEQ ID NO: 83201 - RNA, 1410 nt, Artificial Sequence; identical to SEQ ID NO: 82741
  derived and/or modified CDS sequence (opt1) from neuraminidase__InfluenzaA__ADK90293

SEQ ID NO: 83202 - RNA, 1410 nt, Artificial Sequence; identical to SEQ ID NO: 82653
  derived and/or modified CDS sequence (opt1) from neuraminidase__InfluenzaA__ADK90297

SEQ ID NO: 83203 - RNA, 1410 nt, Artificial Sequence; identical to SEQ ID NO: 80762
  derived and/or modified CDS sequence (opt1) from neuraminidase__InfluenzaA__ADK90301

SEQ ID NO: 83204 - RNA, 1410 nt, Artificial Sequence; identical to SEQ ID NO: 82653
  derived and/or modified CDS sequence (opt1) from neuraminidase__InfluenzaA__ADK90305

SEQ ID NO: 83205 - RNA, 1410 nt, Artificial Sequence; identical to SEQ ID NO: 80762
  derived and/or modified CDS sequence (opt1) from neuraminidase__InfluenzaA__ADK90309

SEQ ID NO: 83206 - RNA, 1410 nt, Artificial Sequence
  derived and/or modified CDS sequence (opt1) from neuraminidase__InfluenzaA__ADK90313
augaaccccaaccacaagaucaucaccaucggcagcgugugcaugaccaucgggauggccaaccugauccuccagaucggcaacaucaucuccaucuggaucagccacuccauccagcuggggaaccagaaccagaucgagacgugcaaccagagcgucaucaccuacgagaacaacaccugggugaaccagaccuacgugaacaucuccaacacgaacuucgccgcgggccagagcgucguguccgugaagcuggccgggaacagcucccucugcccggucagcggcugggccaucuacuccaaggacaacagcauccgcaucggcuccaagggggacguguucgugauccgggagcccuucaucagcugcagcccccuggagugccgcaccuucuuccugacccagggcgcccuccugaacgacaagcacuccaacgggaccaucaaggaccggagcccccaccgcacgcugauguccugcccgaucggcgagguccccucccccuacaacagccgguucgagagcguggccugguccgcgagcgccugccacgacgggaucaacuggcucaccaucggcaucuccggccccgacaacggggccguggccguccugaaguacaacggcaucaucaccgacaccaucaagagcuggcgcaacaacauccugcggacgcaggaguccgagugcgcgugcgugaacgggagcugcuucaccgugaugaccgacggcccguccgacggccaggccagcuacaagaucuuccgcaucgagaaggggaagaucgucaaguccguggagaugaacgcccccaacuaccacuacgaggagugcagcugcuaccccgacuccagcgagaucacgugcgugugccgggacaacuggcacggcuccaaccgccccugggucagcuucaaccagaaccucgaguaccagaucggguacaucugcuccggcaucuucggggacaacccgcggcccaacgacaagaccggcagcugcggccccguguccagcaacggggccaacggcgugaagggguucuccuucaaguacggcaacggggucuggaucggccgcaccaagagcaucagcucccggaacggcuucgagaugaucugggaccccaacggguggaccggcaccgacaacaacuucagcaucaagcaggacaucguggggaucaacgagugguccggcuacagcggguccuucgugcagcacccggagcugacgggccuggacugcauccgccccugcuucugggucgagcucauccggggccgccccaaggagaacaccaucuggaccagcggguccagcaucuccuucugcggcgugaacagcgacaccgucgggugguccuggcccgacggcgccgagcugccguucacgaucgacaaguga

SEQ ID NO: 83207 - RNA, 1410 nt, Artificial Sequence; identical to SEQ ID NO: 80762
  derived and/or modified CDS sequence (opt1) from neuraminidase__InfluenzaA__ADK90317

SEQ ID NO: 83208 - RNA, 1410 nt, Artificial Sequence; identical to SEQ ID NO: 82741
  derived and/or modified CDS sequence (opt1) from neuraminidase__InfluenzaA__ADK90321

SEQ ID NO: 83209 - RNA, 1410 nt, Artificial Sequence; identical to SEQ ID NO: 80762
  derived and/or modified CDS sequence (opt1) from neuraminidase__InfluenzaA__ADK90325

SEQ ID NO: 83210 - RNA, 1410 nt, Artificial Sequence
  derived and/or modified CDS sequence (opt1) from neuraminidase__InfluenzaA__ADK90329
augaaccccaaccagaagaucaucaccaucggcagcgugugcaugaccaucgggauggccaaccugauccuccagaucggcaacaucaucuccaucuggaucagccacuccauccagcuggggaaccagaaccagaucgagacgugcaaccgcagcgucaucaccuacgagaacaacaccugggugaaccagaccuacgugaacaucuccaacacgaacuucgccgcgggccagagcgucguguccgugaagcuggccgggaacagcucccucugcccggucagcggcugggccaucuacuccaaggacaacagcauccggaucggcuccaagggggacguguucgugauccgcgagcccuucaucagcugcagcccccuggagugccggaccuucuuccugacccagggcgcccuccugaacgacaagcacuccaacgggaccaucaaggaccgcucccccuaccggacgcugaugagcugcccgaucggcgagguccccucccccuacaacagccgcuucgagagcguggccugguccgcgagcgccugccacgacgggaucaacuggcucaccaucggcaucuccggccccgacaacgaggccguggccguccugaaguacaacgggaucaucaccgacaccaucaagagcuggcggaacaacauccugcgcacgcaggaguccgagugcgcgugcgugaacggcagcugcuucaccgugaugaccgacgggccguccgacggccaggccagcuacaagaucuuccggaucgagaagggcaagaucgucaaguccguggagaugaacgcccccaacuaccacuacgaggagugcagcugcuaccccgacuccagcgagaucacgugcgugugccgcgacaacuggcacggguccaaccggcccugggucagcuucaaccagaaccucgaguaccagaucggcuacaucugcuccgggaucuucggcgacaacccgcgccccaacgacaagaccgggagcugcggccccguguccagcaacggcgccaacggggugaagggcuucuccuucaaguacgggaacggcgucuggaucgggcggaccaagagcaucagcucccgcaacggcuucgagaugaucugggaccccaacggcuggaccgggaccgacaacaacuucagcaucaagcaggacaucgugggcaucaacgagugguccggguacagcggcuccuucgugcagcacccggagcugacggggcuggacugcauccggcccugcuucugggucgagcucauccgcggccggcccaaggagaacaccaucuggaccagcggcuccagcaucuccuucugcggggugaacagcgacaccgucggcugguccuggcccgacggggccgagcugccguucacgaucgacaaguga

SEQ ID NO: 83211 - RNA, 1410 nt, Artificial Sequence
  derived and/or modified CDS sequence (opt1) from neuraminidase__InfluenzaA__ADK90333
augaaccccaaccagaagaucaucaccaucggcagcgugugcaugaccaucgggauggccaaccugauccuccagaucggcaacaucaucuccaucuggaucagccacuccauccagcuggggaacaagaaccagaucgagacgugcaaccagagcgucaucaccuacgagaacaacaccugggugaaccagaccuacgugaacaucuccaacacgaacuucgccgcgggccagagcgucguguccgugaagcuggccgggaacagcucccucugcccggucagcggcugggccaucuacuccaaggacaacagcauccgcaucggcuccaagggggacguguucgugauccgggagcccuucaucagcugcagcccccuggagugccgcaccuucuuccugacccagggcgcccuccugaacgacaagcacuccaacgggaccaucaaggaccggucccccuaccgcacgcugaugagcugcccgaucggcgagguccccucccccuacaacagccgguucgagagcguggccugguccgcgagcgccugccacgacgggaucaacuggcucaccaucggcaucuccggccccgacaacggggccguggccguccugaaguacaacggcaucaucaccgacaccaucaagagcuggcgcaacaacauccugcggacgcaggaguccgagugcgcgugcgugaacgggagcugcuucaccgugaugaccgacggcccguccgacggccaggccagcuacaagaucuuccgcaucgagaaggggaagaucgucaaguccguggagaugaacgcccccaacuaccacuacgaggagugcagcugcuaccccgacuccagcgagaucacgugcgugugccgggacaacuggcacggcuccaaccgccccugggucagcuucaaccagaaccucgaguaccagaucggguacaucugcuccggcaucuucggggacaacccgcggcccaacgacaagaccggcagcugcggccccguguccagcaacggggccaacggcgugaagggguucuccuucaaguacggcaacggggucuggaucggccgcaccaagagcaucagcucccggaacggcuucgagaugaucugggaccccaacggguggaccggcaccgacaacaacuucagcaucaagcaggacaucguggggaucaacgagugguccggcuacagcggguccuucgugcagcacccggagcugacgggccuggacugcauccgccccugcuucugggucgagcucauccggggccgccccaaggagaacaccaucuggaccagcggguccagcaucuccuucugcggcgugaacagcgacaccgucgggugguccuggcccgacggcgccgagcugccguucacgaucgacaaguga

SEQ ID NO: 83212 - RNA, 1410 nt, Artificial Sequence; identical to SEQ ID NO: 82741
  derived and/or modified CDS sequence (opt1) from neuraminidase__InfluenzaA__ADK90337

SEQ ID NO: 83213 - RNA, 1410 nt, Artificial Sequence; identical to SEQ ID NO: 81821
  derived and/or modified CDS sequence (opt1) from neuraminidase__InfluenzaA__ADK90341

SEQ ID NO: 83214 - RNA, 1410 nt, Artificial Sequence; identical to SEQ ID NO: 81821
  derived and/or modified CDS sequence (opt1) from neuraminidase__InfluenzaA__ADK90345

SEQ ID NO: 83215 - RNA, 1410 nt, Artificial Sequence; identical to SEQ ID NO: 81821
  derived and/or modified CDS sequence (opt1) from neuraminidase__InfluenzaA__ADK90349

SEQ ID NO: 83216 - RNA, 1410 nt, Artificial Sequence; identical to SEQ ID NO: 82741
  derived and/or modified CDS sequence (opt1) from neuraminidase__InfluenzaA__ADK90353

SEQ ID NO: 83217 - RNA, 1410 nt, Artificial Sequence; identical to SEQ ID NO: 80762
  derived and/or modified CDS sequence (opt1) from neuraminidase__InfluenzaA__ADK90357

SEQ ID NO: 83218 - RNA, 1410 nt, Artificial Sequence; identical to SEQ ID NO: 82741
  derived and/or modified CDS sequence (opt1) from neuraminidase__InfluenzaA__ADK90361

SEQ ID NO: 83219 - RNA, 1410 nt, Artificial Sequence; identical to SEQ ID NO: 81736
  derived and/or modified CDS sequence (opt1) from neuraminidase__InfluenzaA__ADK90365

SEQ ID NO: 83220 - RNA, 1410 nt, Artificial Sequence; identical to SEQ ID NO: 80762
  derived and/or modified CDS sequence (opt1) from neuraminidase__InfluenzaA__ADK90369

SEQ ID NO: 83221 - RNA, 1410 nt, Artificial Sequence; identical to SEQ ID NO: 80762
  derived and/or modified CDS sequence (opt1) from neuraminidase__InfluenzaA__ADK90373

SEQ ID NO: 83222 - RNA, 1410 nt, Artificial Sequence
  derived and/or modified CDS sequence (opt1) from neuraminidase__InfluenzaA__ADK90377
augaaccccaaccagaagaucaucaccaucggcagcgugugcaugaccaucgggaugacgaaccugauccuccagaucggcaacaucaucuccaucuggaucagccacuccauccagcuggggaaccagaaccagaucgagaccugcaaccagagcgucaucaccuacgagaacaacaccugggugaaccagacguacgugaacaucuccaacaccaacuucgccgccggccagagcgucguguccgugaagcuggcggggaacagcucccucugcccggucagcggcugggccaucuacuccaaggacaacagcauccgcaucggcuccaagggggacguguucgugauccgggagcccuucaucagcugcagcccccuggagugccgcaccuucuuccugacccagggcgcccuccugaacgacaagcacuccaacgggacgaucaaggaccggagcccccaccgcacccugauguccugcccgaucggcgagguccccucccccuacaacagccgguucgagagcguggccugguccgccagcgcgugccacgacgggaucaacuggcucaccaucggcaucuccggccccgacaacggggccguggccguccugaaguacaacggcaucaucaccgacacgaucaagagcuggcgcaacaacauccugcggacccaggaguccgagugcgccugcgugaacgggagcugcuucaccgugaugaccgacggcccguccgacggccaggcgagcuacaagaucuuccgcaucgagaaggggaagaucgucaaguccguggagauggacgcccccaacuaccacuacgaggagugcagcugcuaccccgacuccagcgagaucaucugcgugugccgggacaacuggcacggcuccaaccgccccugggucagcuucaaccagaaccucgaguaccagaucggguacaucugcuccggcaucuucggggacaacccgcggcccaacgacaagacgggcagcugcggccccguguccagcaacggggccaacggcgugaagggguucuccuucaaguacggcaacggggucuggaucggccgcaccaagagcaucagcucccggaacggcuucgagaugaucugggaccccaacggguggaccggcaccgacaacaacuucagcaucaagcaggacaucguggggaucaacgagugguccggcuacagcggguccuucgugcagcacccggagcugacgggccuggacugcauccgccccugcuucugggucgagcucauccggggccgccccaaggagaacaccaucuggaccagcggguccagcaucuccuucugcggcgugaacagcgacaccgucgggugguccuggcccgacggcgccgagcugccguucacgaucgacaaguga

SEQ ID NO: 83223 - RNA, 1410 nt, Artificial Sequence; identical to SEQ ID NO: 82741
  derived and/or modified CDS sequence (opt1) from neuraminidase__InfluenzaA__ADK90381

SEQ ID NO: 83224 - RNA, 1410 nt, Artificial Sequence
  derived and/or modified CDS sequence (opt1) from neuraminidase__InfluenzaA__ADK90385
augaaccccaaccagaagaucaucaccaucggcagcgugugcaugaccaucgggauggccaaccugauccuccagaucggcaacaucaucuccaucuggaucagccacuccauccagcuggggaaccagaaccagaucgagacgugcaaccagagcgucaucaccuacgagaacaacaccugggugaaccagaccuacgugaacaucuccaacacgaacuucgccgcgggccagagcgucguguccgugaagcugagcgggaacuccagccucugcccggucuccggcugggccaucuacagcaaggacaacuccauccgcaucggcagcaagggggacguguucgugauccgggagcccuucaucuccugcagcccccuggagugccgcaccuucuuccugacccagggcgcccuccugaacgacaagcacuccaacgggaccaucaaggaccggagcccccaccgcacgcugauguccugcccgaucggcgagguccccagccccuacaacagccgguucgaguccguggccuggagcgccuccgcgugccacgacgggaucaacuggcucaccaucggcaucagcggccccgacaacggggccguggccguccugaaguacaacggcaucaucaccgacaccaucaaguccuggcgcaacaacauccugcggacgcaggagagcgagugcacgugcgugaacggguccugcuucaccgugaugaccgacggcccgagcgacggccaggccuccuacaagaucuuccgcaucgagaaggggaagaucgucaagagcguggagaugaacgcgcccaacuaccacuacgaggagugcuccugcuaccccgacagcuccgagaucacgugcgugugccgggacaacuggcacggcagcaaccgccccugggucuccuucaaccagaaccucgaguaccagaucggguacaucugcagcggcaucuucggggacaacccgcggcccaacgacaagaccggcuccugcggccccgugagcuccaacggggccaacggcgugaagggguucagcuucaaguacggcaacggggucuggaucggccgcaccaagagcaucuccagccggaacggcuucgagaugaucugggaccccaacggguggaccggcaccgacaacaacuucuccaucaagcaggacaucguggggaucaacgaguggagcggcuacuccgggagcuucgugcagcacccggagcugaccggccuggacugcauccgccccugcuucugggucgagcucauccggggccgccccaaggagaacaccaucuggaccuccgggagcuccaucagcuucugcggcgugaacuccgacacggucggguggagcuggcccgacggcgccgagcugccguucaccaucgacaaguga

SEQ ID NO: 83225 - RNA, 1410 nt, Artificial Sequence; identical to SEQ ID NO: 80762
  derived and/or modified CDS sequence (opt1) from neuraminidase__InfluenzaA__ADK90389

SEQ ID NO: 83226 - RNA, 1410 nt, Artificial Sequence; identical to SEQ ID NO: 82741
  derived and/or modified CDS sequence (opt1) from neuraminidase__InfluenzaA__ADK90393

SEQ ID NO: 83227 - RNA, 1410 nt, Artificial Sequence; identical to SEQ ID NO: 82653
  derived and/or modified CDS sequence (opt1) from neuraminidase__InfluenzaA__ADK90397

SEQ ID NO: 83228 - RNA, 1410 nt, Artificial Sequence; identical to SEQ ID NO: 80762
  derived and/or modified CDS sequence (opt1) from neuraminidase__InfluenzaA__ADK90401

SEQ ID NO: 83229 - RNA, 1410 nt, Artificial Sequence
  derived and/or modified CDS sequence (opt1) from neuraminidase__InfluenzaA__ADK90405
augaaccccaaccagaagaucaucaccaucggcagcgugugcaugaccaucgggauggccaaccugauccuccagaucggcaacaucaucuccaucuggaucagccacuccauccagcuggggaaccagaaccagaucgagacgugcaaccagagcgucaucaccuacgagaacaacaccugggugaaccagaccuacgugaacaucuccaacacgaacuucgccgcgggccagagcgucguguccgugaagcuggccgggaacagcucccucugcccggucagcggcugggccaucuacuccaaggacaacagcauccgcaucggcuccaagggggacguguucgugauccgggagcccuucaucagcugcagcccccuggagugccgcaccuucuuccugacccagggcgcccuccugaacgacaagcacuccaacgggaccaucaaggaccggagcccccaccgcacgcugauguccugcccgaucggcgagguccccucccccuacaacagccgguucgagagcguggccugguccgcgagcgccugccacgacgggaucaacuggcucaccaucggcaucuccggccccgacaacggggccguggccguccugaaguacaacggcaucaucaccgacaccaucaagagcuggcgcaacaacauccugcggacgcaggaguccgagugcacgugcgugaacgggagcugcuucaccgugaugaccgacggcccguccgacggccaggcgagcuacaagaucuuccgcaucgagaaggggaagaucgucaaguccguggagaugaacgcccccaacuaccacuacgaggagugcagcugcuaccccgacuccagcgagaucacgugcgugugccgggacaacuggcacggcuccaaccgccccugggucagcuucaaccagaaccucgaguaccagaucggguacaucugcuccggcaucuucggggacaacccgcggcccaacgacaagaccggcagcugcggccccguguccagcaacggggccaacggcgugaagggguucuccuucaaguacggcaacggggucuggaucggccgcaccaagagcaucagcucccggaacggcuucgagaugaucugggaccccaacggguggaccggcaccgacaacaacuucagcaucaagcaggacaucguggggaucaacgagugguccggcuacagcggguccuucgugcagcacccggagcugaccggccuggacugcauccgccccugcuucugggucgagcucauccggggccgccccaaggagaacaccaucuggaccagcggguccagcaucuccuucugcggcgugaacagcgacacggucgggugguccuggcccgacggcgccgagcugccguucaccaucgacaaguga

SEQ ID NO: 83230 - RNA, 1410 nt, Artificial Sequence; identical to SEQ ID NO: 80762
  derived and/or modified CDS sequence (opt1) from neuraminidase__InfluenzaA__ADK90409

SEQ ID NO: 83231 - RNA, 1410 nt, Artificial Sequence
  derived and/or modified CDS sequence (opt1) from neuraminidase__InfluenzaA__ADK90413
augaaccccaaccagaagaucaucaccaucggcagcgugugcaugaccaucgggauggccaaccugauccuccagaucggcaacaucaucuccaucuggaucagccacuccauccagcuggggaaccagaaccagaucgagacgugcaaccagagcgucaucaccuacgagaacaacaccugggugaaccagaccuacgugaacaucuccaacacgaacuucgccgcgggccagagcgucguguccgugaagcuggccgggaacagcucccucugcccggucagcggcugggccaucuacuccaaggacaacagcauccgcaucggcuccaagggggacguguucgugauccgggagcccuucaucagcugcagcccccuggagugccgcaccuucuuccugacccagggcgcccuccugaacgacaagcacuccaacgggaccaucaaggaccggagcccccaccgcacgcugauguccugcccgaucggcgagguccccucccccuacaacagccgguucgagagcguggccugguccgcgagcgccugccacgacgggaucaacuggcucaccaucggcaucuccggccccgacaacggggccauggccgugcugaaguacaacggcaucaucaccgacaccaucaagagcuggcgcaacaacauccugcggacgcaggaguccgagugcgcgugcgucaacgggagcugcuucaccgugaugaccgacggcccguccgacggccaggccagcuacaagaucuuccgcaucgagaaggggaagaucgugaaguccgucgagaugaacgcccccaacuaccacuacgaggagugcagcugcuaccccgacuccagcgagaucacgugcgugugccgggacaacuggcacggcuccaaccgccccugggugagcuucaaccagaaccucgaguaccagaucggguacaucugcuccggcaucuucggggacaacccgcggcccaacgacaagaccggcagcugcggccccgucuccagcaacggggccaacggcgugaagggguucuccuucaaguacggcaacgggguguggaucggccgcaccaagagcaucagcucccggaacggcuucgagaugaucugggaccccaacggguggaccggcaccgacaacaacuucagcaucaagcaggacaucgucgggaucaacgagugguccggcuacagcggguccuucgugcagcacccggagcugacgggccuggacugcauccgccccugcuucuggguggagcucauccggggccgccccaaggagaacaccaucuggaccagcggguccagcaucuccuucugcggcgucaacagcgacaccguggggugguccuggcccgacggcgccgagcugccguucacgaucgacaaguga

SEQ ID NO: 83232 - RNA, 1410 nt, Artificial Sequence; identical to SEQ ID NO: 80762
  derived and/or modified CDS sequence (opt1) from neuraminidase__InfluenzaA__ADK90417

SEQ ID NO: 83233 - RNA, 1410 nt, Artificial Sequence; identical to SEQ ID NO: 80762
  derived and/or modified CDS sequence (opt1) from neuraminidase__InfluenzaA__ADK90421

SEQ ID NO: 83234 - RNA, 1410 nt, Artificial Sequence; identical to SEQ ID NO: 80762
  derived and/or modified CDS sequence (opt1) from neuraminidase__InfluenzaA__ADK90425

SEQ ID NO: 83235 - RNA, 1410 nt, Artificial Sequence; identical to SEQ ID NO: 80762
  derived and/or modified CDS sequence (opt1) from neuraminidase__InfluenzaA__ADK90429

SEQ ID NO: 83236 - RNA, 1410 nt, Artificial Sequence; identical to SEQ ID NO: 80623
  derived and/or modified CDS sequence (opt1) from neuraminidase__InfluenzaA__ADK94194

SEQ ID NO: 83237 - RNA, 1410 nt, Artificial Sequence; identical to SEQ ID NO: 80623
  derived and/or modified CDS sequence (opt1) from neuraminidase__InfluenzaA__ADK94205

SEQ ID NO: 83238 - RNA, 1410 nt, Artificial Sequence; identical to SEQ ID NO: 81929
  derived and/or modified CDS sequence (opt1) from neuraminidase__InfluenzaA__ADK94216

SEQ ID NO: 83239 - RNA, 1410 nt, Artificial Sequence; identical to SEQ ID NO: 80623
  derived and/or modified CDS sequence (opt1) from neuraminidase__InfluenzaA__ADK94227

SEQ ID NO: 83240 - RNA, 1410 nt, Artificial Sequence; identical to SEQ ID NO: 80623
  derived and/or modified CDS sequence (opt1) from neuraminidase__InfluenzaA__ADK94238

SEQ ID NO: 83241 - RNA, 1410 nt, Artificial Sequence; identical to SEQ ID NO: 83147
  derived and/or modified CDS sequence (opt1) from neuraminidase__InfluenzaA__ADK94260

SEQ ID NO: 83242 - RNA, 1410 nt, Artificial Sequence; identical to SEQ ID NO: 83147
  derived and/or modified CDS sequence (opt1) from neuraminidase__InfluenzaA__ADK94271

SEQ ID NO: 83243 - RNA, 1410 nt, Artificial Sequence; identical to SEQ ID NO: 80623
  derived and/or modified CDS sequence (opt1) from neuraminidase__InfluenzaA__ADK94293

SEQ ID NO: 83244 - RNA, 1410 nt, Artificial Sequence; identical to SEQ ID NO: 80623
  derived and/or modified CDS sequence (opt1) from neuraminidase__InfluenzaA__ADK94304

SEQ ID NO: 83245 - RNA, 1410 nt, Artificial Sequence
  derived and/or modified CDS sequence (opt1) from neuraminidase__InfluenzaA__ADK94326
augaaccccaaccagaagaucaucaccaucggcagcgugucccugaccaucagcacgaucugcuucuucaugcagaucgccauccucaucaccaccgucacccugcacuucaagcaguacgaguucaacuccccgcccaacaaccaggugaugcugugcgagcccacgaucaucgagcgcaacaucaccgagaucguguaccucaccaacaccacgaucgagaaggagaucugccccaagcuggccgaguaccggaacuggagcaagccgcagugcgacaucaccggguucgcgcccuucuccaaggacaacagcauccgccuguccgccggcggggacaucugggucacccgggagcccuacgugagcugcgaccccgacaagugcuaccaguucgcccucggccaggggaccacgcugaacaacauccacuccaacaacaccgugcgcgaccggaccccguaccgcacccugcucaugaacgagcugggcguccccuuccaccugggcacgaagcaggucugcaucgccuggagcuccagcuccugccacgacgggaaggccuggcuccacgugugcaucaccggcgacgacaagaacgcgaccgccagcuucaucuacaacgggcggcugguggacuccguggugagcugguccaaggagauccugcgcacccaggagagcgagugcgucugcaucaacggcacgugcaccguggugaugaccgacggguccgccagcggcaaggccgacaccaagauccucuucaucgaggagggcaagaucguccacacgagcacccuguccgggagcgcgcagcacguggaggagugcuccugcuacccccgguaccccggcgugcgcugcgucugccgggacaacuggaaggggagcaaccgcccgaucguggacaucaacaucaaggaccacuccaucgugagcuccuacgucugcagcggccuggugggcgacacgccccggaagaacgacuccagcuccagcucccacugccucgaccccaacaacgaggagggcgggcacggggugaagggcugggccuucgacgacgggaacgacgucuggaugggccgcaccaucagcgagaagucccggcugggcuacgagaccuucaaggugaucgagggguggagcaaccccaaguccaagcugcagaucaaccgccaggucaucguggaccggggcaaccgcagcggguacuccggcaucuucagcguggagggcaagagcugcaucaaccggugcuucuacgucgagcucauccgcgggcggaaggaggagaccgaggugcuguggaccuccaacagcaucguggucuucugcggcaccuccgggacguacggcaccgggagcuggccggacggcgccgacaucaaccugaugcccaucuga

SEQ ID NO: 83246 - RNA, 1410 nt, Artificial Sequence; identical to SEQ ID NO: 81929
  derived and/or modified CDS sequence (opt1) from neuraminidase__InfluenzaA__ADK94337

SEQ ID NO: 83247 - RNA, 1410 nt, Artificial Sequence; identical to SEQ ID NO: 80623
  derived and/or modified CDS sequence (opt1) from neuraminidase__InfluenzaA__ADK94444

SEQ ID NO: 83248 - RNA, 1410 nt, Artificial Sequence
  derived and/or modified CDS sequence (opt1) from neuraminidase__InfluenzaA__ADK94479
augaaccccaaccagaagaucaucaccaucggcagcgugucccugaccaucagcacgaucugcuuccucaugcagaucgccauccugaccaccaccgucacgcugcacuucaagcaguacgaguucaacuccccgcccaacaaccaggugaugcucugcgagcccaccaccaucgagcgcaacaucaccgagaucguguaccugacgaacaccaccaucgagaaggagaucugccccaagcuggccgaguaccggaacuggagcaagccgcagugcgacaucaccggguucgcgcccuucuccaaggacaacagcauccgccucuccgccggcggggacaucugggucacgcgggagcccuacgugagcugcgaccccgacaagugcuaccaguucgcccugggccaggggaccacccugaacaacgugcacuccaacaacaccguccgcgaccggacgccguaccgcacccuccugaugaacgagcugggcgugcccuuccaccucggcaccaagcaggucugcaucgccuggagcuccagcuccugccacgacgggaaggccuggcugcacgugugcaucaccggcgacgacaagaacgcgacggccagcuucaucuacaacgggaagcugguggacuccguggucagcugguccaaggagauccuccggacccaggagagcgagugcgugugcaucaacgggaccugcaccguggucaugacggacggguccgccagcggcaaggccgacaccaagauccuguucaucgaggagggcaagaucgugcacaccagcacccuguccgggagcgcgcagcacguggaggagugcuccugcuacccccgcuaccccggcguccggugcgugugccgcgacaacuggaaggggagcaaccggccgaucguggacaucaacaucaaggaccacuccaucgucagcuccuaccucugcagcggccuggugggcgacacgccccgcaagaacgacuccagcuccagcucccacugccuggaccccaacaacgaggagggcggccacggggugaagggcugggccuucgacgacgggaacgacgucuggaugggccggaccaucagcgagaagucccgccucggcuacgagaccuucaaggugaucgagggguggagcaaccccaaguccaagcugcagaucaaccggcaggucaucguggaccgcggcaaccggagcggguacuccggcaucuucagcguggagggcaagagcugcaucaaccgcugcuucuacgucgagcugauccgggggcgcaaggaggagaccggcgugcucuggacguccaacagcaucguggucuucugcgggaccuccggcaccuacgggaccggcagcuggccggacggggccgacaucaaccugaugcccaucuga

SEQ ID NO: 83249 - RNA, 1410 nt, Artificial Sequence; identical to SEQ ID NO: 80623
  derived and/or modified CDS sequence (opt1) from neuraminidase__InfluenzaA__ADK94490

SEQ ID NO: 83250 - RNA, 1410 nt, Artificial Sequence; identical to SEQ ID NO: 80623
  derived and/or modified CDS sequence (opt1) from neuraminidase__InfluenzaA__ADK94501

SEQ ID NO: 83251 - RNA, 1410 nt, Artificial Sequence
  derived and/or modified CDS sequence (opt1) from neuraminidase__InfluenzaA__ADK94512
augaaccccaaccagaagaucaucaccaucggcagcgugucccugaccaucagcacgaucugcuucuucaugcagaucgccauccucaucaccaccgucacccugcacuucaagcaguacgaguucaacuccccgcccaacaaccaggugaugcugugcgagcccacgaucaucgagcgcaacaucaccgagaucguguaccucaccaacaccacgaucgagaaggagaucugccccaagcuggccgaguaccggaacuggagcaagccgcagugcgacaucaccggguucgcgcccuucuccaaggacaacagcauccgccuguccgccggcggggacaucugggucacccgggagcccuacgugagcugcgaccccgacaagugcuaccaguucgcccucggccaggggaccacgcugaacaacgugcacuccaacaacaccguccgcgaccggaccccguaccgcacccugcucaugaacgagcugggcgugcccuuccaccugggcacgaagcaggucugcaucgccuggagcuccagcuccugccacgacgggaaggccuggcuccacgugugcaucaccggcgacgacaagaacgcgaccgccagcuucaucuacaacgggcggcugguggacuccguggucagcugguccaaggagauccugcgcacccaggagagcgagugcgugugcaucaacggcacgugcaccguggucaugaccgacggguccgccagcggcaaggccgacaccaagauccucuucaucgaggagggccggaucgugcacacgagcacccuguccgggagcgcgcagcacguggaggagugcuccugcuacccccgcuaccccggcguccggugcgugugccgcgacaacuggaaggggagcaaccggccgaucguggacaucaacaucaaggaccacuccaucgucagcuccuacgugugcagcggccuggugggcgacacgccccgcaagaacgacuccagcuccagcucccacugccucgaccccaacaacgaggagggcgggcacggggucaagggcugggccuucgacgacgggaacgacguguggaugggccggaccaucagcgagaagucccgccugggcuacgagaccuucaaggucaucgagggguggagcaaccccaaguccaagcugcagaucaaccgccaggugaucguggaccggggcaaccggagcggguacuccggcaucuucagcgucgagggcaagagcugcaucaaccgcugcuucuacguggagcucauccgggggcgcaaggaggagaccgaggugcuguggaccuccaacagcaucgucguguucugcggcaccuccgggacguacggcaccgggagcuggccggacggcgccgacaucaaccugaugcccaucuga

SEQ ID NO: 83252 - RNA, 1410 nt, Artificial Sequence; identical to SEQ ID NO: 80623
  derived and/or modified CDS sequence (opt1) from neuraminidase__InfluenzaA__ADK94534

SEQ ID NO: 83253 - RNA, 1410 nt, Artificial Sequence; identical to SEQ ID NO: 83147
  derived and/or modified CDS sequence (opt1) from neuraminidase__InfluenzaA__ADK94556

SEQ ID NO: 83254 - RNA, 1410 nt, Artificial Sequence; identical to SEQ ID NO: 80623
  derived and/or modified CDS sequence (opt1) from neuraminidase__InfluenzaA__ADK94567

SEQ ID NO: 83255 - RNA, 1410 nt, Artificial Sequence; identical to SEQ ID NO: 80623
  derived and/or modified CDS sequence (opt1) from neuraminidase__InfluenzaA__ADK94578

SEQ ID NO: 83256 - RNA, 1410 nt, Artificial Sequence; identical to SEQ ID NO: 80623
  derived and/or modified CDS sequence (opt1) from neuraminidase__InfluenzaA__ADK94589

SEQ ID NO: 83257 - RNA, 1410 nt, Artificial Sequence; identical to SEQ ID NO: 82313
  derived and/or modified CDS sequence (opt1) from neuraminidase__InfluenzaA__ADK98504

SEQ ID NO: 83258 - RNA, 1410 nt, Artificial Sequence
  derived and/or modified CDS sequence (opt1) from neuraminidase__InfluenzaA__ADK98506
augaaccccaaccagaagaucaucaccaucggcagcgugugcaugaccaucgggauggccaaccugauccuccagaucggcaacaucaucuccaucuggaucagccacuccauccagcuggggaaccagaaccagaucgagacgugcaaccagaacgucaucaccuacgagaacaacaccugggugaaccagaccuacgugaacaucagcaacacgaacuucgccgcgggccaguccgucgugagcgugaagcuggccgggaacuccagccucugcccggucuccggcugggccaucuacagcaaggacaacuccauccgcaucggcagcaagggggacguguucgugauccgggagcccuucaucuccugcagcccccuggagugccgcaccuucuuccugacccagggcgcccuccugaacgacaagcacuccaacgggaccaucaaggaccggagccccuaccgcacgcugauguccugcccgaucggcgagguccccagccccuacaacucccgguucgagagcguggccuggagcgcguccgccugccacgacgggaucaacuggcucaccaucggcaucagcggccccgacaacggggccguggccguccugaaguacaacggcaucaucaccgacaccaucaaguccuggcgcaacaacauccugcggacgcaggagagcgagugcgcgugcgugaacggguccugcuucaccgugaugaccgacggcccgagcgacggccaggccuccuacaagaucuuccgcaucgagaaggggaagaucgucaagagcguggagaugaacgcccccaacuaccacuacgaggagugcuccugcuaccccgacagcuccgagaucacgugcgugugccgggacaacuggcacggcagcaaccgccccugggucuccuucaaccagaaccucgaguaccagaucggguacaucugcagcggcaucuucggggacaacccgcggcccaacgacaagaccggcuccugcggccccgugagcuccaacggggccaacggcgugaagggguucagcuucaaguacggcaacggggucuggaucggccgcaccaaguccaucagcagccggaacggcuucgagaugaucugggaccccaacggguggaccggcaccgacaacaacuucuccaucaagcaggacaucguggggaucaacgaguggagcggcuacuccgggagcuucgugcagcacccggagcugacgggccuggacugcauccgccccugcuucugggucgagcucauccggggccgccccaaggagaacaccaucuggaccuccgggagcuccaucagcuucugcggcgugaacuccgacaccgucggguggagcuggcccgacggcgccgagcugccguucacgaucgacaaguga

SEQ ID NO: 83259 - RNA, 1410 nt, Artificial Sequence
  derived and/or modified CDS sequence (opt1) from neuraminidase__InfluenzaA__ADK98626
augaaccccaaccagaagaucaucaccaucggcagcgugucccugaccaucagcacgaucugcuucuucaugcagaucgccauccucaucaccaccgucacccugcacuucaagcaguacgaguucaacuccccgcccaacaaccaggugaugcugugcgagcccacgaugaucgagcgcaacaucaccgagaucguguaccucaccaacaccacgaucgagaaggagaucugccccaagcuggccgaguaccggaacuggagcaagccgcagugcgacaucaccggguucgcgcccuucuccaaggacaacagcauccgccuguccgccggcggggacaucugggucacccgggagcccuacgugagcugcgaccccgacaagugcuaccaguucgcccucggccaggggaccacgcugaacaacgugcacuccaacaacaccguccgcgaccggaccccguaccgcacccugcucaugaacgagcugggcgugcccuuccaccugggcacgaagcaggucugcaucgccuggagcuccagcuccugccacgacgggaaggccuggcuccacgugugcaucaccggcgacgacaagaacgcgaccgccagcuucaucuacaacgggcggcugguggacuccguggucagcugguccaaggagauccugcgcacccaggagagcgagugcgugugcaucaacggcacgugcaccguggucaugaccgacggguccgccagcggcaaggccgacaccaagauccucuucaucgaggagggcaagaucgugcacacgagcacccuguccgggagcgcgcagcacguggaggagugcuccugcuacccccgguaccccggcguccgcugcgugugccgggacaacuggaaggggagcaaccgcccgaucguggacaucaacaucaaggaccacuccaucgucagcuccuaccugugcagcggccucgugggcgacacgccccggaagaacgacuccagcuccagcucccacugccuggaccccaacaacgaggagggcgggcacggggugaagggcugggccuucgacgacgggaacgacgucuggaugggccgcaccaucagcgagaagucccggcugggcuacgagaccuucaaggugaucgagggguggagcaaccccaaguccaagcuccagaucaaccgccaggucaucguggaccggggcaaccgcagcggguacuccggcaucuucagcguggagggcaagagcugcaucaaccggugcuucuacgucgagcugauccgcgggcggaaggaggagaccgaggugcuguggaccuccaacagcaucguggucuucugcggcaccuccgggacguacggcaccgggagcuggccggacggcgccgacaucaaccucaugcccaucuga

SEQ ID NO: 83260 - RNA, 1410 nt, Artificial Sequence; identical to SEQ ID NO: 81929
  derived and/or modified CDS sequence (opt1) from neuraminidase__InfluenzaA__ADK98637

SEQ ID NO: 83261 - RNA, 1410 nt, Artificial Sequence
  derived and/or modified CDS sequence (opt1) from neuraminidase__InfluenzaA__ADK98648
augaaccccaaccagaagaucaucaccaucggcagcgugucccugaccaucagcacgaucugcuucuucaugcagaucgccauccucgucaccaccgugacccugcacuucaagcaguacgaguucaacuccccgcccaacaaccaggugaugcugugcgagcccacgaucaucgagcgcaacaucaccgagaucgucuaccucaccaacaccacgaucgagaaggagaucugccccaagcuggccgaguaccggaacuggagcaagccgcagugcgacaucaccggguucgcgcccuucuccaaggacaacagcauccgccuguccgccggcggggacaucugggugacccgggagcccuacgugagcugcgaccccgacaagugcuaccaguucgcccucggccaggggaccacgcugaacaacguccacuccaacaacaccgugcgcgaccggaccccguaccgcacccugcucaugaacgagcugggcgugcccuuccaccugggcacgaagcaggucugcaucgccuggagcuccagcuccugccacgacgggaaggccuggcuccacgugugcaucaccggcgacgacaagaacgcgaccgccagcuucaucuacaacgggcggcugguggacuccgucgugagcugguccaaggacauccugcgcacccaggagagcgagugcgugugcaucaacggcacgugcaccgucgugaugaccgacggguccgccagcggcaaggccgacaccaagauccucuucaucgaggagggcaagaucgugcacacgagcacccuguccgggagcgcgcagcacgucgaggagugcuccugcuacccccgguaccccggcgugcgcugcgugugccgggacaacuggaaggggagcaaccgcccgaucgucgacaucaacaucaaggaccacuccaucgugagcuccuacgugugcagcggccuggucggcgacacgccccggaagaacgacuccagcuccagcucccacugccucgaccccaacaacgaggagggcgggcgcggggugaagggcugggccuucgacgacgggaacgacgucuggaugggccggaccaucagcgagaagucccgccugggcuacgagaccuucaaggugaucgagggguggagcaaccccaaguccaagcugcagaucaaccgccaggugaucgucgaccggggcaaccggagcggguacuccggcaucuucagcguggagggcaagagcugcaucaaccgcugcuucuacguggagcucauccgggggcgcaaggaggagaccgagguccuguggaccuccaacagcaucgugguguucugcggcaccuccgggacguacggcaccgggagcuggccggacggcgccaacaucaaccugaugcccaucuga

SEQ ID NO: 83262 - RNA, 1410 nt, Artificial Sequence
  derived and/or modified CDS sequence (opt1) from neuraminidase__InfluenzaA__ADK98659
augaaccccaaccagaagaucaucaccaucggcagcgugucccugaccaucagcacgaucugcuucuucaugcagaucgccauccucaucaccaccgucacccugcacuucaagcaguacgaguucaacuccccgcccaacaaccaggugaugcugugcgagcccacgaucaucgagcgcaacaucaccgagaucguguaccucaccaacaccacgaucgagaaggagaucugccccaagcuggccgaguaccggaacuggagcaagccgcagugcgacaucaccggguucgcgcccuucuccaaggacaacagcauccgccuguccgccggcggggacaucugggucacccgggagcccuacgugagcugcgaccccgacaagugcuaccaguucgcccucggccaggggaccacgcugaacaacgugcacuccaacaacaccguccgcgaccggaccccguaccgcacccugcucaugaacgagcugggcgugcccuuccaccugggcacgaagcaggucugcaucgccuggagcuccagcuccugccacgacgggaaggccuggcuccacgugugcaucaccggcgacgacaagaacgcgaccgccagcuucaucuacaacgggcggcugguggacuccguggucagcugguccaaggagauccugcgcacccaggagagcgagugcgugugcaucaacggcacgugcaccguggucaugaccgacggguccgccagcggcaaggccgacaccaagauccucuucaucgaggagggcaagaucgugcacacgagcacccuguccgggagcgcgcagcacguggaggagugcuccugcuacccccgguaccccggcguccgcugcgugugccgggacaacuggaaggggagcaaccgcccgaucguggacaucaacaucaaggaccacuccaucgucagcuccuacgugugcagcggccuggugggcgacacgccccggaagaacgacuccagcuccagcgggcacugccucgaccccaacaacgaggagggcgggcacggcgucaaggggugggccuucgacgacggcaacgacguguggaugggccgcaccaucuccgagaagucccggcugggguacgagaccuucaaggucaucgagggcuggagcaaccacaagagcaagcugcagaucaaccgccaggugaucguggaccgggggaaccgcuccggcuacagcgggaucuucuccgucgagggcaagagcugcaucaaccggugcuucuacguggagcucauccgcggccggaaggaggagaccgaggugcuguggaccagcaacuccaucgucguguucugcgggaccagcggcacguacgggaccggcuccuggcccgacggggccgaccugaaccucaugccgaucuga

SEQ ID NO: 83263 - RNA, 1410 nt, Artificial Sequence; identical to SEQ ID NO: 83147
  derived and/or modified CDS sequence (opt1) from neuraminidase__InfluenzaA__ADK98670

SEQ ID NO: 83264 - RNA, 1410 nt, Artificial Sequence
  derived and/or modified CDS sequence (opt1) from neuraminidase__InfluenzaA__ADK98681
augaaccccaaccagaagaucaucaccaucggcagcgugucccugaccaucagcacgaucugcuucuucaugcagaucgccauccucaucaccaccgucacccugcacuucaagcaguacgaguucaacuccccgcccaacaaccaggugaugcugugcgagcccacgaucaucgagcgcaacaucaccgagaucguguaccucaccaacaccacgaucgagaaggagaucugccccaagcuggccgaguaccggaacuggagcaagccgcagugcgacaucaccggguucgcgcccuucuccaaggacaacagcauccgccuguccgccggcggggacaucugggucacccgggagcccuacgugagcugcgaccccgacaagugcuaccaguucgcccucggccaggggaccacgcugaacaacgugcacuccaacaacaccguccgcgaccggaccccguaccgcacccugcucaugaacgagcugggcgugcccuuccaccugggcacgaagcaggucugcaucgccuggagcuccagcuccugccacgacgggaaggccuggcuccacgugugcaucaccggcgacgacaagaacgcgaccgccagcuucaucuacaacgggcggcugguggacuccguggucagcugguccaaggagauccugcgcacccaggagagcgagugcgugugcaucaacggcacgugcaccguggucaugaccgacggguccgccagcggcgaggccgacaccaagauccucuucaucgaggagggcaagaucgugcacacgagcacccuguccgggagcgcgcagcacguggaggagugcuccugcuacccccgguaccccggcguccgcugcgugugccgggacaacuggaaggggagcaaccgcccgaucguggacaucaacaucaaggaccacuccaucgucagcuccuacgugugcagcggccuggugggcgacacgccccggaagaacgacuccagcuccagcucccacugccucgaccccaacaacgaggagggcgggcacggggucaagggcugggccuucgacgacgggaacgacguguggaugggccgcaccaucagcgagaagucccggcugggcuacgagaccuucaaggucaucgagggguggagcaaccccaaguccaagcugcagaccaaccgccaggugaucguggaccggggcaaccgcagcggguacuccggcaucuucagcgucgaggggaagaacugcaucaaccggugcuucuacguggagcucauccgcggccggaaggaggagaccgaggugcuguggaccagcaacuccaucgucguguucugcggcacgagcgggaccuacggcaccggguccuggccggacggcgccgacaucaaccugaugcccaucuga

SEQ ID NO: 83265 - RNA, 1410 nt, Artificial Sequence
  derived and/or modified CDS sequence (opt1) from neuraminidase__InfluenzaA__ADK98703
augaaccccaaccagaagaucaucaccaucggcagcgugucccugaccaucagcacgaucugcuucuucaugcagaccgccauccucaucaccaccgucacgcugcacuucaagcaguacgaguucaacuccccgcccaacaaccaggugaugcugugcgagcccaccaucaucgagcgcaacaucaccgagaucguguaccucaccaacacgaccaucgagaaggagaucugccccaagcuggccgaguaccggaacuggagcaagccgcagugcgacaucaccggguucgcgcccuucuccaaggacaacagcauccgccuguccgccggcggggacaucugggucacccgggagcccuacgugagcugcgaccccgacaagugcuaccaguucgcccucggccaggggacgacccugaacaacgugcacuccaacaacaccguccgcgaccggaccccguaccgcacgcugcucaugaacgagcugggcgugcccuuccaccugggcaccaagcaggucugcaucgccuggagcuccagcuccugccacgacgggaaggccuggcuccacgugugcaucaccggcgacgacaagaacgcgaccgccagcuucaucuacaacgggcggcugguggacuccguggucagcugguccaaggagauccugcgcacgcaggagagcgagugcgugugcaucaacgggaccugcaccguggucaugaccgacggguccgccagcggcgaggccgacacgaagauccucuucaucgaggagggcaagaucgugcacaccagcacccuguccgggagcgcgcagcacguggaggagugcuccugcuacccccgguaccccggcguccgcugcgugugccgggacaacuggaaggggagcaaccgcccgaucguggacaucaacaucaaggaccacuccaucgucagcuccuacgugugcagcggccuggugggcgacacgccccggaagaacgacuccagcuccagcucccacugccucgaccccaacaacgaggagggcggccacggggucaagggcugggccuucgacgacgggaacgacguguggaugggccgcaccaucagcgagaagucccggcugggcuacgagaccuucaaggucaucgagggguggagcaaccccaaguccaagcugcagaccaaccgccaggugaucguggaccggggcaaccgcagcggguacuccggcaucuucagcgucgaggggaagaacugcaucaaccggugcuucuacguggagcucauccgcggccggaaggaggagaccgaggugcuguggacgagcaacuccaucgucguguucugcggcaccagcgggaccuacggcaccggguccuggccggacggcgccgacaucaaccugaugcccaucuga

SEQ ID NO: 83266 - RNA, 1410 nt, Artificial Sequence; identical to SEQ ID NO: 82508
  derived and/or modified CDS sequence (opt1) from neuraminidase__InfluenzaA__ADK98725

SEQ ID NO: 83267 - RNA, 1410 nt, Artificial Sequence; identical to SEQ ID NO: 83147
  derived and/or modified CDS sequence (opt1) from neuraminidase__InfluenzaA__ADK98736

SEQ ID NO: 83268 - RNA, 1410 nt, Artificial Sequence
  derived and/or modified CDS sequence (opt1) from neuraminidase__InfluenzaA__ADK98747
augaaccccaaccagaagaucaucaccaucggcagcgugucccugaccaucagcacgaucugcuucuucaugcagaucgccauccucgucaccaccgugacccugcacuucaagcaguacgaguucaacuccccgcccaacaaccaggugaugcugugcgagcccacgaucaucgagcgcaacaucaccgagaucgucuaccucaccaacaccacgaucgagaaggagaucugccccaagcuggccgaguaccggaacuggagcaagccgcagugcgacaucaccggguucgcgcccuucuccaaggacaacagcauccgccuguccgccggcggggacaucugggugacccgggagcccuacgugagcugcgaccccgacaagugcuaccaguucgcccucggccaggggaccacgcugaacaacguccacuccaacaacaccgugcgcgaccggaccccguaccgcacccugcucaugaacgagcugggcgugcccuuccaccugggcacgaagcaggucugcaucgccuggagcuccagcuccugccacgacgggaaggccuggcuccacgugugcaucaccggcgacgacaagaacgcgaccgccagcuucaucuacaacgggcggcugguggacuccgucgugagcugguccaaggacauccugcgcacccaggagagcgagugcgugugcaucaacggcacgugcaccgucgugaugaccgacggguccgccagcggcaaggccgacaccaagauccucuucaucgaggagggcaagaucgugcacacgagcacccuguccgggagcgcgcagcacgucgaggagugcuccugcuacccccgguaccccggcgugcgcugcgugugccgggacaacuggaaggggagcaaccgcccgaucgucgacaucaacaugaaggaccacuccaucgugagcuccuacgugugcagcggccuggucggcgacacgccccggaagaacgacuccagcuccagcucccacugccucgaccccaacaacgaggagggcgggcacggggugaagggcugggccuucgacgacgggaacgacgucuggaugggccgcaccaucagcgagaagucccggcugggcuacgagaccuucaaggugaucgagggguggagcaaccccaaguccaagcugcagaucaaccgccaggugaucgucgaccggggcaaccgcagcggguacuccggcaucuucagcguggagggcaagagcugcaucaaccggugcuucuacguggagcucauccgcgggcggaaggaggagaccgagguccuguggaccuccaacagcaucgugguguucugcggcaccuccgggacguacggcaccgggagcuggccggacggcgccaacaucaaccugaugcccaucuga

SEQ ID NO: 83269 - RNA, 1410 nt, Artificial Sequence
  derived and/or modified CDS sequence (opt1) from neuraminidase__InfluenzaA__ADK98758
augaaccccaaccagaagaucaucaccaucggcagcgugucccugaccaucagcacgaucugcuucuucaugcagaucgccauccucgucaccaccgugacccugcacuucaagcaguacgaguucaacuccccgcccaacaaccaggugaugcugugcgagcccacgaucaucgagcgcaacaucaccgagaucgucuaccucaccaacaccacgaucgagaaggagaucugccccaagcuggccgaguaccggaacuggagcaagccgcagugcgacaucaccggguucgcgcccuucuccaaggacaacagcauccgccuguccgccggcggggacaucugggugacccgggagcccuacgugagcugcgaccccgacaagugcuaccaguucgcccucggccaggggaccacgcugaacaacguccacuccaacaacaccgugcgcgaccggaccccguaccgcacccugcucaugaacgagcugggcgugcccuuccaccugggcacgaagcaggucugcaucgccuggagcuccagcuccugccacgacgggaaggccuggcuccacgugugcaucaccggcgacgacaagaacgcgaccgccagcuucaucuacaacgggcggcugguggacuccgucgugagcugguccaaggacauccugcgcacccaggagagcgagugcgugugcaucaacggcacgugcaccgucgugaugaccgacggguccgccagcggcaaggccaacaccaagauccucuucaucgaggagggcaagaucgugcacacgagcacccuguccgggagcgcgcagcacgucgaggagugcuccugcuacccccgguaccccggcgugcgcugcgugugccgggacaacuggaaggggagcaaccgcccgaucgucgacaucaacaucaaggaccacuccaucgugagcuccuacgugugcagcggccuggucggcgacacgccccggaagaacgacuccagcuccagcucccacugccucgaccccaacaacgaggagggcgggcacggggugaagggcugggccuucgacgacgggaacgacgucuggaugggccgcaccaucagcgagaagucccggcugggcuacgagaccuucaaggugaucgagggguggagcaaccccaaguccaagcugcagaucaaccgccaggugaucgucgaccggggcaaccgcagcggguacuccggcaucuucagcguggagggcaagagcugcaucaaccggugcuucuacguggagcucauccgcgggcggaaggaggagaccgagguccuguggaccuccaacagcaucgugguguucugcggcaccuccgggacguacggcaccgggagcuggccggacggcgccaacaucaaccugaugcccaucuga

SEQ ID NO: 83270 - RNA, 1410 nt, Artificial Sequence; identical to SEQ ID NO: 82508
  derived and/or modified CDS sequence (opt1) from neuraminidase__InfluenzaA__ADK98769

SEQ ID NO: 83271 - RNA, 1410 nt, Artificial Sequence; identical to SEQ ID NO: 83062
  derived and/or modified CDS sequence (opt1) from neuraminidase__InfluenzaA__ADK98780

SEQ ID NO: 83272 - RNA, 1410 nt, Artificial Sequence; identical to SEQ ID NO: 82508
  derived and/or modified CDS sequence (opt1) from neuraminidase__InfluenzaA__ADK98791

SEQ ID NO: 83273 - RNA, 1410 nt, Artificial Sequence; identical to SEQ ID NO: 80623
  derived and/or modified CDS sequence (opt1) from neuraminidase__InfluenzaA__ADK98802

SEQ ID NO: 83274 - RNA, 1410 nt, Artificial Sequence
  derived and/or modified CDS sequence (opt1) from neuraminidase__InfluenzaA__ADK98813
augaaccccaaccagaagaucaucaccaucggcagcgugucccugaccaucagcacgaucugcuucuucaugcagaucgccauccucaucaccaccgucacccugcacuucaagcaguacgaguucaacuccccgcccaacaaccaggugaugcugugcgagcccgccaucaucgagcgcaacaucacggagaucguguaccucaccaacaccaccaucgagaaggagaucugccccaagcuggcggaguaccggaacuggagcaagccgcagugcgacaucacgggguucgcccccuucuccaaggacaacagcauccgccuguccgccggcggggacaucugggucacccgggagcccuacgugagcugcgaccccgacaagugcuaccaguucgcccucggccaggggaccacccugaacaacgugcacuccaacaacacgguccgcgaccggaccccguaccgcacccugcucaugaacgagcugggcgugcccuuccaccugggcaccaagcaggucugcaucgccuggagcuccagcuccugccacgacgggaaggcguggcuccacgugugcaucacgggcgacgacaagaacgccaccgccagcuucaucuacaacgggcggcugguggacuccguggucagcugguccaaggagauccugcgcacccaggagagcgagugcgugugcaucaacgggaccugcacgguggucaugaccgacggguccgccagcggcaaggcggacaccaagauccucuucaucgaggagggcaagaucgugcacaccagcacgcuguccgggagcgcccagcacguggaggagugcuccugcuacccccgguaccccggcguccgcugcgugugccgggacaacuggaaggggagcaaccgcccgaucguggacaucaacaucaaggaccacuccaucgucagcuccuacgugugcagcggccuggugggcgacacgccccggaagaacgacuccagcuccagcucccacugccucgaccccaacaacgaggagggcggccacggggucaagggcugggccuucgacgacgggaacgacguguggaugggccgcaccaucagcgagaagucccggcugggcuacgagaccuucaaggucaucgagggguggagcaaccacaaguccaagcugcagaucaaccgccaggugaucguggaccggggcaaccgcagcggguacuccggcaucuucagcgucgagggcaagagcugcaucaaccggugcuucuacguggagcucauccgcgggcggaaggaggagaccgaggugcuguggaccuccaacagcaucgucguguucugcggcaccuccgggaccuacggcacggggagcuggcccgacggcgccgaccugaaccucaugccgaucuga

SEQ ID NO: 83275 - RNA, 1410 nt, Artificial Sequence; identical to SEQ ID NO: 80623
  derived and/or modified CDS sequence (opt1) from neuraminidase__InfluenzaA__ADK98824

SEQ ID NO: 83276 - RNA, 1410 nt, Artificial Sequence; identical to SEQ ID NO: 82508
  derived and/or modified CDS sequence (opt1) from neuraminidase__InfluenzaA__ADK98835

SEQ ID NO: 83277 - RNA, 1410 nt, Artificial Sequence; identical to SEQ ID NO: 83147
  derived and/or modified CDS sequence (opt1) from neuraminidase__InfluenzaA__ADK98846

SEQ ID NO: 83278 - RNA, 1410 nt, Artificial Sequence
  derived and/or modified CDS sequence (opt1) from neuraminidase__InfluenzaA__ADK98857
augaaccccaaccagaagaucaucaccaucggcagcgugucccugaccaucagcacgaucugcuucuucaugcagaucgccauccucgucaccaccgugacccugcacuucaagcaguacgaguucaacuccccgcccaacaaccaggugaugcugugcgagcccacgaucaucgagcgcaacaucaccgagaucgucuaccucaccaacaccacgaucgagaaggagaucugccccaagcuggccgaguaccggaacuggagcaagccgcagugcgacaucaccggguucgcgcccuucuccaaggacaacagcauccgccuguccgccggcggggacaucugggugacccgggagcccuacgugagcugcgaccccgacaagugcuaccaguucgcccucggccaggggaccacgcugaacaacguccacuccaacaacaccgugcgcgaccggaccccguaccgcacccugcucaugaacgagcugggcgugcccuuccaccugggcacgaagcaggucugcaucgccuggagcuccagcuccugccacgacgggaaggccuggcuccacgugugcaucaccggcgacgacaagaacgcgaccgccagcuucaucuacaacgggcggcugguggacuccgucgugagcugguccaaggacauccugcgcacccaggagagcgagugcgugugcaucaacggcacgugcaccgucgugaugaccgacggguccgccagcggcaaggccgacaccaagauccucuucaucgaggagggcaagaucgugcacacgagcacccuguccgggagcgcgcagcacgucgaggagugcuccugcuacccccgguaccccggcgugcgcugcgugugccgggacaacuggaaggggagcaaccgcccgaucgucgacaucaacaucaaggaccacuccaucgugagcuccuacgugugcagcggccuggucggcgacacgccccggaagaacgacuccagcuccagcucccacugccucgaccccaacaacgaggagggcgggcacggggugaagggcugggccuucgacgacgggaacgacgucuggaugggccgcaccaucagcgagaagucccggcugggcuacgagaccuucaaggugaucgagggguggagcaaccacaaguccaagcugcagaucaaccgccaggugaucgucgaccggggcaaccgcagcggguacuccggcaucuucagcguggagggcaagagcugcaucaaccggugcuucuacguggagcucauccgcgggcggaaggaggagaccgagguccuguggaccuccaacagcaucgugguguucugcggcaccuccgggacguacggcaccgggagcuggcccgacggcgccaacaucaaccugaugccgaucuga

SEQ ID NO: 83279 - RNA, 1410 nt, Artificial Sequence
  derived and/or modified CDS sequence (opt1) from neuraminidase__InfluenzaA__ADK98868
augaaccccaaccagaagaucaucaccaucggcagcgugucccugaccaucagcacgaucugcuucuucaugcagaucgccauccucaucaccaccgucacccugcacuucaagcaguacgaguucaacuccccgcccaacaaccaggugaugcugugcgagcccacgaucaucgagcgcaacaucaccgagaucguguaccucaccaacaccacgaucgagaaggagaucugccccaagcuggccgaguaccggaacuggagcaagccgcagugcgacaucaccggguucgcgcccuucuccaaggacaacagcauccgccuguccgccggcggggacaucugggucacccgggagcccuacgugagcugcgaccccgacaagugcuaccaguucgcccucggccaggggaccacgcugaacaacgugcacuccaacaacaccguccgcgaccggaccccguaccgcacccugcucaugaacgagcugggcgugcccuuccaccugggcacgaagcaggucugcaucgccuggagcuccagcuccugccacgacgggaaggccuggcuccacgugugcaucaccggcgacgacaagaacgcgaccgccagcuucaucuacaacgggcggcugguggacuccguggucagcugguccaaggagauccugcgcacccaggagagcgagugcgugugcaucaacggcacgugcaccguggucaugaccgacggguccgccagcggcaaggccgacaccaagauccucuucaucgaggagggcaagaucgugcacacgagcacccuguccgggagcgcgcagcacguggaggagugcuccugcuacccccgguaccccggcguccgcugcgugugccgggacaacuggaaggggagcaaccgcccgaucguggacaucaacaucaaggaccacuccaucgucagcuccuacgugugcagcggccuggugggcgacacgccccggaagaacgacuccagcuccagcucccacugccucgaccccaacaacgaggagggcgggcacggggucaagggcugggccuucgacgacgggaacgacguguggaugggccgcaccaucagcgagaagucccggcugggcuacgagaccuucaaggucaucgagggguggagcaaccccaaguccaagcugcagaucaaccgccaggugaucguggaccggggcaaccgcagcggguacuccggcaucuucagcgucgagggcaagagcugcaucaaccggugcuucuacguggagcucauccgcgggcggaaggaggagaacgaggugcuguggaccuccaacagcaucgucguguucugcggcaccuccgggaccuacggcacggggagcuggccggacggcgccgacaucaaccugaugcccaucuga

SEQ ID NO: 83280 - RNA, 1410 nt, Artificial Sequence
  derived and/or modified CDS sequence (opt1) from neuraminidase__InfluenzaA__ADK98879
augaaccccaaccagaagaucaucaccaucggcagcgugucccugaccaucagcacgaucugcuucuucaugcagaucgccauccucaucaccaccgucacccugcacuucaagcaguacgaguucaacuccccgcccaacaaccaggccaugcugugcgagcccacgaucaucgagcgcaacaucaccgagaucguguaccucaccaacaccacgaucgagaaggagaucugccccaagcuggcggaguaccggaacuggagcaagccgcagugcgacaucaccggguucgcccccuucuccaaggacaacagcauccgccuguccgccggcggggacaucugggugacccgggagcccuacgucagcugcgaccccgacaagugcuaccaguucgcccucggccaggggaccacgcugaacaacgugcacuccaacaacaccgugcgcgaccggaccccguaccgcacccugcucaugaacgagcugggcguccccuuccaccugggcacgaagcaggucugcaucgccuggagcuccagcuccugccacgacgggaaggcguggcuccacgugugcaucaccggcgacgacaagaacgccaccgccagcuucaucuacaacgggcggcugguggacuccguggugagcugguccaaggagauccugcgcacccaggagagcgagugcgucugcaucaacggcacgugcaccguggugaugaccgacggguccgccagcggcaaggcggacaccaagauccucuucaucgaggagggcaagaucguccacacgagcacccuguccgggagcgcccagcacguggaggagugcuccugcuacccccgguaccccggcgugcgcugcgucugccgggacaacuggaaggggagcaaccgcccgaucguggacaucaacaucaaggaccacuccaucgugagcuccuacgucugcagcggccuggugggcgacacgccccggaagaacgacuccagcuccagcucccacugccucgaccccaacaacgaggagggcgggcacggggugaagggcugggccuucgacgacgggaacgacgucuggaugggccgcaccaucagcgagaagucccggcugggcuacgagaccuucaaggugaucgagggguggagcaaccccaaguccaagcugcagaucaaccgccaggucaucguggaccggggcaaccgcagcggguacuccggcaucuucagcguggagggcaagagcugcaucaaccggugcuucuacgucgagcucauccgcgggcggaaggaggagaccgaggugcuguggaccuccaacagcaucguggucuucugcggcaccuccgggacguacggcaccgggagcuggccggacggcgccgacaucaaccugaugcccaucuga

SEQ ID NO: 83281 - RNA, 1410 nt, Artificial Sequence; identical to SEQ ID NO: 83147
  derived and/or modified CDS sequence (opt1) from neuraminidase__InfluenzaA__ADK98890

SEQ ID NO: 83282 - RNA, 1410 nt, Artificial Sequence; identical to SEQ ID NO: 82508
  derived and/or modified CDS sequence (opt1) from neuraminidase__InfluenzaA__ADK98901

SEQ ID NO: 83283 - RNA, 1410 nt, Artificial Sequence; identical to SEQ ID NO: 83062
  derived and/or modified CDS sequence (opt1) from neuraminidase__InfluenzaA__ADK98912

SEQ ID NO: 83284 - RNA, 1410 nt, Artificial Sequence; identical to SEQ ID NO: 83147
  derived and/or modified CDS sequence (opt1) from neuraminidase__InfluenzaA__ADK98923

SEQ ID NO: 83285 - RNA, 1410 nt, Artificial Sequence; identical to SEQ ID NO: 81929
  derived and/or modified CDS sequence (opt1) from neuraminidase__InfluenzaA__ADK98945

SEQ ID NO: 83286 - RNA, 1410 nt, Artificial Sequence
  derived and/or modified CDS sequence (opt1) from neuraminidase__InfluenzaA__ADK98956
augaaccccaaccagaagaucaucaccaucggcagcgugucccugaccaucagcacgaucugcuucuucaugcagaucgccauccucaucaccaccgucacccugcacuucaagcaguacgaguucaacuccccgcccaacaaccaggugaugcugugcgagcccacgaucaucgagcgcaacaucaccgagaucguguaccucaccaacaccacgaucgagaaggagaucugccccaagcuggccgaguaccggaacuggagcaagccgcagugcgacaucaccggguucgcgcccuucuccaaggacaacagcauccgccuguccgccggcggggacaucugggucacccgggagcccuacgugagcugcgaccccgacaagugcuaccaguucgcccucggccaggggaccacgcugaacaacgugcacuccaacaacaccguccgcgaccggaccccguaccgcacccugcucaugaacgagcugggcgugcccuuccaccugggcacgaagcaggucugcaucgccuggagcuccagcuccugccacgacgggaaggccuggcuccacgugugcaucaccggcgacgacaagaacgcgaccgccagcuucaucuacaacgggcggcugguggacuccguggucagcugguccaaggagauccugcgcacccaggagagcgagugcgugugcaucaacggcacgugcaccguggucaugaccgacggguccgccagcggcaaggccgacaccaagauccucuucaucgaggagggcaagaucgugcacacgagcacccuguccgggagcgcgcagcacguggaggagugcuccugcuacccccgguaccccggcguccgcugcgugugccgggacaacuggaaggggagcaaccgcccgaucguggacaucaacaucaaggaccacuccgucgugagcuccuacgugugcagcggccuggucggcgacacgccccggaaguccgacagcuccagcuccagccacugccucgaccccaacaacgaggagggcgggcacggggugaagggcugggccuucgacgacgggaacgacgucuggaugggccgcaccaucuccgagaagucccggcugggcuacgagaccuucaaggugaucgagggguggagcaaccacaagagcaagcugcagaucaaccgccaggugaucgucgaccggggcaaccgcuccggguacagcggcaucuucagcguggaggggaaguccugcaucaaccggugcuucuacguggagcucauccgcggccggaaggaggagaccgagguccuguggaccagcaacuccaucgugguguucugcggcaccagcgggacguacggcaccggguccuggcccgacggcgccgaccugaaccucaugccgaucuga

SEQ ID NO: 83287 - RNA, 1410 nt, Artificial Sequence; identical to SEQ ID NO: 82508
  derived and/or modified CDS sequence (opt1) from neuraminidase__InfluenzaA__ADK98967

SEQ ID NO: 83288 - RNA, 1410 nt, Artificial Sequence; identical to SEQ ID NO: 83147
  derived and/or modified CDS sequence (opt1) from neuraminidase__InfluenzaA__ADK98978

SEQ ID NO: 83289 - RNA, 1410 nt, Artificial Sequence; identical to SEQ ID NO: 83286
  derived and/or modified CDS sequence (opt1) from neuraminidase__InfluenzaA__ADK98989

SEQ ID NO: 83290 - RNA, 1410 nt, Artificial Sequence; identical to SEQ ID NO: 80623
  derived and/or modified CDS sequence (opt1) from neuraminidase__InfluenzaA__ADK99000

SEQ ID NO: 83291 - RNA, 1410 nt, Artificial Sequence; identical to SEQ ID NO: 83286
  derived and/or modified CDS sequence (opt1) from neuraminidase__InfluenzaA__ADK99011

SEQ ID NO: 83292 - RNA, 1410 nt, Artificial Sequence
  derived and/or modified CDS sequence (opt1) from neuraminidase__InfluenzaA__ADK99022
augaaccccaaccagaagaucaucaccaucggcagcgugucccugaccaucagcacgaucugcuucuucaugcagaucgccauccucgucaccaccgugacccugcacuucaagcaguacgaguucaacuccccgcccaacaaccaggugaugcugugcgaccccacgaucaucgagcgcaacaucaccgagaucgucuaccucaccaacaccacgaucgagaaggagaucugccccaagcuggccgaguaccggaacuggagcaagccgcagugcgacaucaccggguucgcgcccuucuccaaggacaacagcauccgccuguccgccggcggggacaucugggugacccgggagcccuacgugagcugcgaccccgacaagugcuaccaguucgcccucggccaggggaccacgcugaacaacguccacuccaacaacaccgugcgcgaccggaccccguaccgcacccugcucaugaacgagcugggcgugcccuuccaccugggcacgaagcaggucugcaucgccuggagcuccagcuccugccacgacgggaaggccuggcuccacgugugcaucaccggcgacgacaagaacgcgaccgccagcuucaucuacaacgggcggcugguggacuccgucgugagcugguccaaggacauccugcgcacccaggagagcgagugcgugugcaucaacggcacgugcaccgucgugaugaccgacggguccgccagcggcaaggccgacaccaagauccucuucaucgaggagggcaagaucgugcacacgagcacccuguccgggagcgcgcagcacgucgaggagugcuccugcuacccccgguaccccggcgugcgcugcgugugccgggacaacuggaaggggagcaaccgcccgaucgucgacaucaacaucaaggaccacuccaucgugagcuccuacgugugcagcggccuggucggcgacacgccccggaagaacgacuccagcuccagcucccacugccucgaccccaacaacgaggagggcgggcacggggugaagggcugggccuucgacgacgggaacgacgucuggaugggccgcaccaucagcgagaagucccggcugggcuacgagaccuucaaggugaucgagggguggagcaaccccaaguccaagcugcagaucaaccgccaggugaucgucgaccggggcaaccgcagcggguacuccggcaucuucagcguggagggcaagagcugcaucaaccggugcuucuacguggagcucauccgcgggcggaaggaggagaccgagguccuguggaccuccaacagcaucgugguguucugcggcaccuccgggacguacggcaccgggagcuggccggacggcgccaacaucaaccugaugcccaucuga

SEQ ID NO: 83293 - RNA, 1410 nt, Artificial Sequence; identical to SEQ ID NO: 80623
  derived and/or modified CDS sequence (opt1) from neuraminidase__InfluenzaA__ADK99033

SEQ ID NO: 83294 - RNA, 1410 nt, Artificial Sequence
  derived and/or modified CDS sequence (opt1) from neuraminidase__InfluenzaA__ADK99044
augaaccccaaccagaagaucaucaccaucggcagcgugucccugaccaucagcacgaucugcuucuucaugcagaucgccauccucaucaccaccgucacccugcacuucaagcaguacgaguucaacuccccgcccaacaaccaggugaugcugugcgagcccacgaucaucgagcgcaacaagaccgagaucguguaccucaccaacaccacgaucgagaaggagaucugccccaagcuggccgaguaccggaacuggagcaagccgcagugcgacaucaccggguucgcgcccuucuccaaggacaacagcauccgccuguccgccggcggggacaucugggucacccgggagcccuacgugagcugcgaccccgacaagugcuaccaguucgcccucggccaggggaccacgcugaacaacggccacuccaacaacaccgugcgcgaccggaccccguaccgcacccugcucaugaacgagcugggcguccccuuccaccuggggacgaagcaggucugcaucgccuggagcuccagcuccugccacgacggcaaggccuggcuccacgugugcaucaccggggacgacaagaacgcgaccgccagcuucaucuacaacggcaagcugguggacuccguggugagcugguccaaggagauccugcggacccaggagagcgagugcgucugcaucaacgggacgugcaccguggugaugaccgacggcuccgccagcggcaaggccgacaccaagauccucuucaucgaggaggggaagaucguccacacgagcacccuguccggcagcgcgcagcacguggaggagugcuccugcuacccccgcuaccccggggugcggugcgucugccgcgacaacuggaagggcagcaaccggccgaucguggacaucaacaucaaggaccacuccaucgugagcuccuacgucugcagcggccuggugggggacacgccccgcaagaacgacuccagcuccagcucccacugccucgaccccaacaacgaggagggcgggcacggcgugaaggggugggccuucgacgacggcaacgacgucuggaugggccggaccaucagcgagaagucccgccugggguacgagaccuucaaggugaucgagggcuggagcaaccacaaguccaagcugcagaucaaccggcaggucaucguggaccgcgggaaccggagcggcuacuccgggaucuucagcguggagggcaagagcugcaucaaccgcugcuucuacgucgagcucauccggggccgcaaggaggagaccgaggugcuguggaccuccaacagcaucguggucuucugcgggaccuccggcacguacgggaccggcagcuggcccgacggggccgaccugaaccucaugccgaucuga

SEQ ID NO: 83295 - RNA, 1410 nt, Artificial Sequence
  derived and/or modified CDS sequence (opt1) from neuraminidase__InfluenzaA__ADK99055
augaaccccaaccagaagaucaucaccaucggcagcgugucccugaccaucagcacgaucugcuucuucaugcagaucgccauccucaucaccaccgucacccugcacuucaagcaguacgaguucaacuccccgcccaacaaccaggugaugcugugcgagcccacgaucaucgagcgcaacaucaccgagaucguguaccucaccaacaccacgaucgagaaggagaucugccccaagcuggccgaguaccggaacuggagcaagccgcagugcgacaucaccggguucgcgcccuucuccaaggacaacagcauccgccuguccgccggcggggacaucugggucacccgggagcccuacgugagcugcgaccccgacaagugcuaccaguucgcccucggccaggggaccacgcugaacaacgugcacuccaacaacaccguccgcgaccggaccccguaccgcacccugcucaugaacgagcugggcgugcccuuccaccugggcacgaagcaggucugcaucgccuggagcuccagcuccugccacgacgggaaggccuggcuccacgugugcaucaccggcgacgacaagaacgcgaccgccagcuucaucuacaacgggcggcugguggacuccguggucagcugguccaaggagauccugcgcacccaggagagcgagugcgugugcaucaacggcacgugcaccguggucaugaccgacggguccgccagcggcaaggccgacaccaagauccucuucaucgaggagggcaagaucgugcacacgagcacccuguccgggagcgcgcagcacguggaggagugcuccugcuacccccgguaccccggcguccgcugcgugugccgggacaacuggaaggggagcaaccgcccgaucguggacaucaacaugaaggaccacuccaucgucagcuccuacgugugcagcggccuggugggcgacacgccccggaagaacgacuccagcuccagcucccacugccucgaccccaacaacgaggagggcgggcacggggucaagggcugggccuucgacgacgggaacgacguguggaugggccgcaccaucagcgagaagucccggcugggcuacgagaccuucaaggucaucgagggguggagcaaccccaaguccaagcugcagaucaaccgccaggugaucguggaccggggcaaccgcagcggguacuccggcaucuucagcgucgagggcaagagcugcaucaaccggugcuucuacguggagcucauccgcgggcggaaggaggagaccgaggugcuguggaccuccaacagcaucgucguguucugcggcaccuccgggacguacggcaccgggagcuggccggacggcgccgacaucaaccugaugcccaucuga

SEQ ID NO: 83296 - RNA, 1410 nt, Artificial Sequence
  derived and/or modified CDS sequence (opt1) from neuraminidase__InfluenzaA__ADK99066
augaaccccaaccagaagaucaucaccaucggcagcgugucccugaccaucagcacgaucugcuucuucaugcagaucgccauccucaucaccaccgucacccugcacuucaagcagugcgaguucaacuccccgcccaacaaccaggugaugcugugcgagcccacgaucaucgagcgcaacaucaccgagaucguguaccucaccaacaccacgaucgagaagaagaucugccccaagcuggccgaguaccggaacuggagcaagccgcagugcgacaucaccggguucgcgcccuucuccaaggacaacagcauccgccuguccgccggcggggacaucugggucacccgggagcccuacgugagcugcgaccccgacaagugcuaccaguucgcccucggccaggggaccacgcugaacaacgugcacuccaacaacaccguccgcgaccggaccccguaccgcacccugcucaugaacgagcugggcgugcccuuccaccugggcacgaagcaggucugcaucgccuggagcuccagcuccugccacgacgggaaggccuggcuccacgugugcaucaccggcgacgacaagaacgcgaccgccagcuucaucuacaacgggcggcugguggacuccguggucagcugguccaaggagauccugcgcacccaggagagcgagugcgugugcaucaacggcacgugcaccguggucaugaccgacggguccgccagcggcaaggccgacaccaagauccucuucaucgaggagggcaagaucgugcacacgagcacccuguccgggagcgcgcagcacguggaggagugcuccugcuacccccgguaccccggcguccgcugcgugugccgggacaacuggaaggggagcaaccgcccgaucguggacaucaacaucaaggaccacuccaucgucagcuccuaccugugcagcggccucgugggcgacacgccccggaagaacgacuccagcuccagcucccacugccuggaccccaacaacgaggagggcgggcacggggugaagggcugggccuucgacgacgggaacgacgucuggaugggccgcaccaucagcgagaagucccggcugggcuacgagaccuucaaggugaucgagggguggagcaaccccaaguccaagcuccagaucaaccgccaggucaucguggaccggggcaaccgcagcggguacuccggcaucuucagcguggagggcaagagcugcaucaaccggugcuucuacgucgagcugauccgcgggcggaaggaggagaccgaggugcuguggaccuccaacagcaucguggucuucugcggcaccuccgggacguacggcaccgggagcuggccggacggcgccaacaucaaccucaugcccaucuga

SEQ ID NO: 83297 - RNA, 1410 nt, Artificial Sequence
  derived and/or modified CDS sequence (opt1) from neuraminidase__InfluenzaA__ADK99077
augaaccccaaccagaagaucaucaccaucggcagcgugucccugaccaucagcacgaucugcuucuucaugcagaucgccauccucaucaccaccgucacccugcacuucaagcaguacgaguucaacuccccgcccaacaaccaggugaugcugugcgagcccacgaucaucgagcgcaacaucaccgagaucguguaccucaccaacaccacgaucgagaaggagaucugccccaagcuggccgaguaccggaacuggagcaagccgcagugcgacaucaccggguucgcgcccuucuccaaggacaacagcauccgccuguccgccggcggggacaucugggucacccgggagcccuacgugagcugcgaccccgacaagugcuaccaguucgcccucggccaggggaccacgcugaacaacgugcacuccaacaacaccguccgcgaccggaccccguaccgcacccugcucaugaacgagcugggcgugcccuuccaccugggcacgaagcaggucugcaucgccuggagcuccagcuccugccacgacgggaaggccuggcuccacgugugcaucaccggcgacgacaagaacgcgaccgccagcuucaucuacaacgggcggcugguggacuccguggucagcugguccaaggacauccugcgcacccaggagagcgagugcgugugcaucaacggcacgugcaccguggucaugaccgacggguccgccagcggcaaggccgacaccaagauccucuucaucgaggagggcaagguggugcacacgagcacccuguccgggagcgcgcagcacgucgaggagugcuccugcuacccccgguaccccggcgugcgcugcgugugccgggacaacuggaaggggagcaaccgcccgaucgucgacaucaacaucaaggaccacuccaucgugagcuccuacgugugcagcggccuggucggcgacacgccccggaagaacgacuccagcuccagcucccacugccucgaccccaacaacgaggagggcgggcacggggugaagggcugggccuucgacgacgggaacgacgucuggaugggccgcaccaucagcgagaagucccggcugggcuacgagaccuucaaggugaucgagggguggagcaaccacaaguccaagcugcagaucaaccgccaggugaucgucgaccggggcaaccgcagcggguacuccggcaucuucagcguggagggcaagagcugcaucaaccggugcuucuacguggagcucauccgcgggcggaaggaggagaccgagguccuguggaccuccaacagcaucgugguguucugcggcaccuccgggacguacggcaccgggagcuggcccgacggcgccgaccugaaccucaugccgaucuga

SEQ ID NO: 83298 - RNA, 1410 nt, Artificial Sequence; identical to SEQ ID NO: 83062
  derived and/or modified CDS sequence (opt1) from neuraminidase__InfluenzaA__ADK99088

SEQ ID NO: 83299 - RNA, 1410 nt, Artificial Sequence; identical to SEQ ID NO: 82508
  derived and/or modified CDS sequence (opt1) from neuraminidase__InfluenzaA__ADK99099

SEQ ID NO: 83300 - RNA, 1410 nt, Artificial Sequence
  derived and/or modified CDS sequence (opt1) from neuraminidase__InfluenzaA__ADK99110
augaaccccaaccagaagaucaucaccaucggcagcgugucccugaccaucagcacgaucugcuucuucaugcagaucgccauccucgucaccaccgugacccugcacuucaagcaguacgaguucaacccgccgcccaacaaccaggugaugcugugcgagcccacgaucaucgagcgcaacaucaccgagaucgucuaccucaccaacaccacgaucgagaaggagaucugcccgaagcuggccgaguaccggaacugguccaagccccagugcgacaucaccggguucgcgcccuucagcaaggacaacuccauccgccugagcgccggcggggacaucugggugacccgggagcccuacguguccugcgacccggacaagugcuaccaguucgcccucggccaggggaccacgcugaacaacguccacagcaacaacaccgugcgcgaccggacccccuaccgcacccugcucaugaacgagcugggcgugcccuuccaccugggcacgaagcaggucugcaucgccugguccagcuccagcugccacgacgggaaggccuggcuccacgugugcaucaccggcgacgacaagaacgcgaccgccuccuucaucuacaacgggcggcugguggacagcgucguguccuggagcaaggacauccugcgcacccaggaguccgagugcgugugcaucaacggcacgugcaccgucgugaugaccgacgggagcgccuccggcaaggccgacaccaagauccucuucaucgaggagggcaagaucgugcacacgagcacccugagcggguccgcgcagcacgucgaggagugcagcugcuacccccgguacccgggcgugcgcugcgugugccgggacaacuggaagggguccaaccgccccaucgucgacaucaacaucaaggaccacagcaucguguccagcuacgugugcuccggccuggucggcgacacgccccggaagaacgacagcuccagcuccagccacugccucgaccccaacaacgaggagggcgggcacggggugaagggcugggccuucgacgacgggaacgacgucuggaugggccgcaccaucuccgagaagucccggcugggcuacgagaccuucaaggugaucgagggguggagcaaccccaagagcaagcugcagaucaaccgccaggugaucgucgaccggggcaaccgcuccggguacagcggcaucuucuccguggagggcaagagcugcaucaaccggugcuucuacguggagcucauccgcgggcggaaggaggagaccgagguccuguggaccagcaacuccaucgugguguucugcggcaccagcgggacguacggcaccggguccuggcccgacggcgccaacaucaaccugaugcccaucuga

SEQ ID NO: 83301 - RNA, 1410 nt, Artificial Sequence; identical to SEQ ID NO: 83147
  derived and/or modified CDS sequence (opt1) from neuraminidase__InfluenzaA__ADK99121

SEQ ID NO: 83302 - RNA, 1410 nt, Artificial Sequence
  derived and/or modified CDS sequence (opt1) from neuraminidase__InfluenzaA__ADK99132
augaaccccaaccagaagaucaucaccaucggcagcgugucccugaccaucagcacgaucugcuucuucaugcagaucgccauccucaucaccaccgucacccugcacuucaagcaguacgaguucaacuccccgcccaacaaccaggugaugcugugcgagcccacgaucaucgagcgcaacaucaccgagaucguguaccucaccaacaccacggucgagaaggagaucugccccaagcuggccgaguaccggaacuggagcaagccgcagugcgacaucaccggguucgcgcccuucuccaaggacaacagcauccgccuguccgccggcggggacaucugggugacccgggagcccuacgugagcugcgaccccgacaagugcuaccaguucgcccucggccaggggaccacgcugaacaacguccacuccaacaacaccgugcgcgaccggaccccguaccgcacccugcucaugaacgagcugggcgugcccuuccaccugggcacgaagcaggucugcaucgccuggagcuccagcuccugccacgacgggaaggccuggcuccacgugugcaucaccggcgacgacaagaacgcgaccgccagcuucaucuacaacgggcggcugguggacuccgucgugagcugguccaaggagauccugcgcacccaggagagcgagugcgugugcaucaacggcacgugcaccgucgugaugaccgacggguccgccagcggcaaggccgacaccaagauccucuucaucgaggagggcaagaucgugcacacgagcacccuguccgggagcgcgcagcacgucgaggagugcuccugcuacccccgguaccccggcgugcgcugcgugugccgggacaacuggaaggggagcaaccgcccgaucgucgacaucaacaucaaggaccacuccaucgugagcuccuaccugugcagcggccucgugggcgacacgccccggaagaacgacuccagcuccagcucccacugccuggaccccaacaacgaggagggcgggcacggggucaagggcugggccuucgacgacgggaacgacguguggaugggccgcaccaucagcgagaagucccggcugggcuacgagaccuucaaggucaucgagggguggagcaaccccaaguccaagcuccagaucaaccgccaggugaucguggaccggggcaaccgcagcggguacuccggcaucuucagcgucgagggcaagagcugcaucaaccggugcuucuacguggagcugauccgcgggcggaaggaggagaccgaggugcuguggaccuccaacagcaucgucguguucugcggcaccuccgggacguacggcaccgggagcuggccggacggcgccgacaucaaccucaugcccaucuga

SEQ ID NO: 83303 - RNA, 1410 nt, Artificial Sequence; identical to SEQ ID NO: 83147
  derived and/or modified CDS sequence (opt1) from neuraminidase__InfluenzaA__ADK99143

SEQ ID NO: 83304 - RNA, 1410 nt, Artificial Sequence; identical to SEQ ID NO: 80623
  derived and/or modified CDS sequence (opt1) from neuraminidase__InfluenzaA__ADK99154

SEQ ID NO: 83305 - RNA, 1410 nt, Artificial Sequence
  derived and/or modified CDS sequence (opt1) from neuraminidase__InfluenzaA__ADK99176
augaaccccaaccagaagaucaucaccaucggcagcgugucccugaccaucagcacgaucugcuucuucaugcagaucgccauccucgucaccaccgugacccugcacuucaagcaguacgaguucaacuccccgcccaacaaccaggugaugcugugcgagcccacgaucaucgagcgcaacaucaccgagaucgucuaccucaccaacaccacgaucgagaaggagaucugccugaagcuggccgaguaccggaacuggagcaagccccagugcgacaucaccggguucgcgccguucuccaaggacaacagcauccgccucuccgccggcggggacaucugggugacccgggagcccuacgugagcugcgaccccgacaagugcuaccaguucgcccugggccaggggaccacgcugaacaacguccacuccaacaacaccgugcgcgaccggacccccuaccgcacccuccugaugaacgagcugggcgugccguuccaccucggcacgaagcaggucugcaucgccuggagcuccagcuccugccacgacgggaaggccuggcugcacgugugcaucaccggcgacgacaagaacgcgaccgccagcuucaucuacaacgggcggcugguggacuccgucgugagcugguccaaggacauccuccgcacccaggagagcgagugcgugugcaucaacggcacgugcaccgucgugaugaccgacggguccgccagcggcaaggccgacaccaagauccuguucaucgaggagggcaagaucgugcacacgagcacccuguccgggagcgcgcagcacgucgaggagugcuccugcuacccccgguaccccggcgugcgcugcgugugccgggacaacuggaaggggagcaaccgccccaucgucgacaucaacaucaaggaccacuccaucgugagcuccuacgugugcagcggccucgucggcgacaccccgcggaagaacgacuccagcuccagcucccacugccuggaccccaacaacgaggagggcgggcacggggugaagggcugggccuucgacgacgggaacgacgucuggaugggccgcaccaucagcgagaagucccggcugggcuacgagacguucaaggugaucgagggguggagcaaccccaaguccaagcuccagaucaaccgccaggugaucgucgaccggggcaaccgcagcggguacuccggcaucuucagcguggagggcaagagcugcaucaaccggugcuucuacguggagcugauccgcgggcggaaggaggagaccgagguccuguggaccuccaacagcaucgugguguucugcggcaccuccgggacguacggcaccgggagcuggcccgacggcgccaacaucaaccucaugccgaucuga

SEQ ID NO: 83306 - RNA, 1410 nt, Artificial Sequence; identical to SEQ ID NO: 83297
  derived and/or modified CDS sequence (opt1) from neuraminidase__InfluenzaA__ADK99187

SEQ ID NO: 83307 - RNA, 1410 nt, Artificial Sequence; identical to SEQ ID NO: 82508
  derived and/or modified CDS sequence (opt1) from neuraminidase__InfluenzaA__ADK99198

SEQ ID NO: 83308 - RNA, 1410 nt, Artificial Sequence; identical to SEQ ID NO: 83147
  derived and/or modified CDS sequence (opt1) from neuraminidase__InfluenzaA__ADK99220

SEQ ID NO: 83309 - RNA, 1410 nt, Artificial Sequence
  derived and/or modified CDS sequence (opt1) from neuraminidase__InfluenzaA__ADK99231
augaaccccaaccagaagaucaucaccaucggcagcgugucccugaccaucagcacgaucugcuucuucaugcagaucgccauccucaucaccaccgucacccugcacuucaagcaguacgaguucaacuccccgcccaacaaccaggugaugcugugcgagcccacgaucaucgagcgcaacaucaccgagaucguguaccucaccaacaccacgaucgagaaggagaucugccccaagcuggccgaguaccggaacuggagcaagccgcagugcgacaucaccggguucgcgcccuucuccaaggacaacagcauccgccuguccgccggcggggacaucugggucacccgggagcccuacgugagcugcgaccccgacaacugcuaccaguucgcccucggccaggggaccacgcugaacaacgugcacuccaacaacaccguccgcgaccggaccccguaccgcacccugcucaugaacgagcugggcgugcccuuccaccugggcacgaagcaggucugcaucgccuggagcuccagcuccugccacgacgggaaggccuggcuccacgugugcaucaccggcgacgacaagaacgcgaccgccagcuucaucuacaacgggcggcugguggacuccguggucagcugguccaaggagauccugcgcacccaggagagcgagugcgugugcaucaacggcacgugcaccguggucaugaccgacggguccgccagcggcaaggccgacaccaagauccucuucaucgaggagggcaagaucgugcacacgagcacccuguccgggagcgcgcagcacguggaggagugcuccugcuacccccgguaccccggcguccgcugcgugugccgggacaacuggaaggggagcaaccgcccgaucguggacaucaacaucaaggaccacuccaucgucagcuccuaccugugcagcggccucgugggcgacacgccccggaagaacgacuccagcuccagcucccacugccuggaccccaacaacgaggagggcgggcacggggugaagggcugggccuucgacgacgggaacgacgucuggaugggccgcaccaucagcgagaagucccggcugggcuacgagaccuucaaggugaucgagggguggagcaaccccaaguccaagcuccagaucaaccgccaggucaucguggaccggggcaaccgcagcggguacuccggcaucuucagcguggagggcaagagcugcaucaaccggugcuucuacgucgagcugauccgcgggcggaaggaggagaccgaggugcuguggaccuccaacagcaucguggucuucugcggcaccuccgggacguacggcaccgggagcuggccggacggcgccgacaucaaccucaugcccaucuga

SEQ ID NO: 83310 - RNA, 1410 nt, Artificial Sequence
  derived and/or modified CDS sequence (opt1) from neuraminidase__InfluenzaA__ADK99242
augaaccccaaccagaagaucaucaccaucggcagcgugucccugaccaucagcacgaucugcuucuucaugcagaucgccauccucaucaccaccgucacccugcacuucaagcaguacgaguucaacuccccgcccaacaaccaggugaugcugugcgagcccacgaucaucgagcgcaacaucaccgagaucguguaccucaccaacaccacgaucgagaaggagaucugccccaagcuggccgaguaccggaacuggagcaagccgcagugcgacaucaccggguucgcgcccuucuccaaggacaacagcauccgccuguccgccggcggggacaucugggucacccgggagcccuacgugagcugcgaccccgacaagugcuaccaguucgcccucggccaggggaccacgcugaacaacgugcacuccaacaacaccguccgcgaccggaccccguaccgcacccugcucaugaacgagcugggcgugcccuuccaccugggcacgaagcaggucugcaucgccuggagcuccagcuccugccacgacgggaaggccuggcuccacgugugcaucaccggcgacgacaagaacgcgaccgccagcuucaucuacaacgggcggcugguggacuccguggucagcugguccaaggacauccugcgcacccaggagagcgagugcgugugcaucaacggcacgugcaccguggucaugaccgacggguccgccagcggcaaggccgacaccaagauccucuucaucgaggagggcaagaucgugcacacgagcacccuguccgggagcgcgcagcacguggaggagugcuccugcuacccccgguaccccggcguccgcugcgugugccgggacaacuggaaggggagcaaccgcccgaucguggacaucaacaucaaggaccacuccaucgucagcuccuacgugugcagcggccuggugggcgacacgccccggaagaacgacuccagcuccagcucccacugccucgaccccaacaacgaggagggcgggcacggggucaagggcugggccuucgacgacgggaacgacguguggaugggccgcaccaucagcgagaagucccggcugggcuacgagaccuucaaggucaucgagggguggagcaaccccaaguccaagcugcagaucaaccgccaggugaucguggaccggggcaaccgcagcggguacuccggcaucuucagcgucgagggcaagagcugcaucaaccggugcuucuacguggagcucauccgcgggcggaaggaggagaccgaggugcuguggaccuccaacagcaucaucgucuucugcggcaccuccgggacguacggcaccgggagcuggccggacggcgccgacaucaaccugaugcccaucuga

SEQ ID NO: 83311 - RNA, 1410 nt, Artificial Sequence
  derived and/or modified CDS sequence (opt1) from neuraminidase__InfluenzaA__ADK99253
augaaccccaaccagaagaucaucaccaucggcagcgugucccugaccaucagcacgaucugcuucuucaugcagaucgccauccucaucaccaccgucacccugcacuucaagcaguacgaguucaacuccccgcccaacaaccaggugaugcugugcgagcccacgaucaucgagcgcaacaucaccgagaucguguaccucaccaacaccacgaucgagaaggagaucugccccaagcuggccgaguaccggaacuggagcaagccgcagugcgacaucaccggguucgcgcccuucuccaaggacaacagcauccgccuguccgccggcggggacaucugggucacccgggagcccuacgugagcugcgaccccgacaagugcuaccaguucgcccucggccaggggaccacgcugaacaacgugcacuccaacaacaccguccgcgaccggaccccguaccgcacccugcucaugaacgagcugggcgugcccuuccaccugggcacgaagcaggucugcaucgccuggagcuccagcuccugccacgacgggaaggccuggcuccacgugugcaucaccggcgacgacaagaacgcgaccgccagcuucaucuacaacgggcggcugguggacuccguggucagcugguccaaggagauccugcgcacccaggagagcgagugcgugugcaucaacggcacgugcaccguggucaugaccgacggguccgccagcggcaaggccgacaccaagauccucuucaucgaggagggcaagaucgugcacacgagcacccuguccgggagcgcgcagcacguggaggagugcuccugcuacccccgguaccccggcguccgcugcgugugccgggacaacuggaaggggagcaaccgcccgaucguggacaucaacaucaaggaccacuccaucgucagcuccuacgugugcagcggccuggugggcgacacgccccggaagaacgacuccagcuccagcucccacugccucgaccccaacaacgaggagggcgggcacggggucaagggcugggccuucgacgacgggaacgacguguggaugggccgcaccaucagcgagaagucccggcugggcuacgagaccuucaaggucaucgagggguggagcaaccacaaguccaagcugcagaucaaccgccaggugaucguggaccggggccaccgcagcggguacuccggcaucuucagcgucgagggcaagagcugcaucaaccggugcuucuacguggagcucauccgcgggcggaaggaggagaccgaggugcuguggaccuccaacagcaucgucguguucugcggcaccuccgggacguacggcaccgggagcuggcccgacggcgccgaccugacccucaugccgaucuga

SEQ ID NO: 83312 - RNA, 1410 nt, Artificial Sequence
  derived and/or modified CDS sequence (opt1) from neuraminidase__InfluenzaA__ADK99264
augaaccccaaccagaagaucaucaccaucggcagcgugucccugaccaucagcacgaucugcuucuucaugcagaucgccauccucaucaccaccgucacccugcacuucaagcaguacgaguucaacuccccgcccaacaaccaggugaugcugugcgagcccacgaucaucgagcgcaacaucaccgagaucguguaccucaccaacaccacgaucgagaaggagaucugccccaagcuggccgaguaccggaacuggagcaagccgcagugcgacaucaccggguucgcgcccuucuccaaggacaacagcauccgccuguccgccggcggggacaucugggucacccgggagcccuacgugagcugcgaccccgacaagugcuaccaguucgcccucggccaggggaccacgcugaacaacgugcacuccaacaacaccguccgcgaccggaccccguaccgcacccugcucaugaacgagcugggcgugcccuuccaccugggcacgaagcaggucugcaucgccuggagcuccagcuccugccacgacgggaaggccuggcuccacgugugcaucaccggcgacgacaagaacgcgaccgccagcuucaucuacaacgggcggcugguggacuccguggucagcugguccaaggagauccugcgcacccaggagagcgagugcgugugcaucaacggcacgugcaccguggucaugaccgacggguccgccagcggcaaggccgacaccaagauccucuucaucgaggagggcaagaucgugcacacgagcacccuguccgggagcgcgcagcacguggaggagugcuccugcuacccccgguaccccggcguccgcugcgugugccgggacaacuggaaggggagcaaccgcccgaucguggacaucaacaucaaggaccacuccaucgucagcuccuaccugugcagcggccucgugggcgacacgccccggaagaacgacuccagcuccagcucccacugccuggaccccaacaacgaggagggcgggcacggggugaagggcugggccuucgacgacgggaacgacgucuggaugggccgcaccaucagcgagaagucccggcugggcuacgagaccuucaaggugaucgagggguggagcaaccccaaguccaagcuccacaucaaccgccaggucaucguggaccggggcaaccgcagcggguacuccggcaucuucagcguggagggcaagagcugcaucaaccggugcuucuacgucgagcugauccgcgggcggaaggaggagaccgaggugcuguggaccuccaacagcaucguggucuucugcggcaccuccgggacguacggcaccgggagcuggccggacggcgccgacaucaaccucaugcccaucuga

SEQ ID NO: 83313 - RNA, 1410 nt, Artificial Sequence
  derived and/or modified CDS sequence (opt1) from neuraminidase__InfluenzaA__ADK99275
augaaccccaaccagaagaucaucaccaucggcagcgugucccugaccaucagcacgaucugcuucuucaugcagaucgccguccucaucaccaccgugacccugcacuucaagcaguacgaguucaacuccccgcccaacaaccaggugaugcugugcgagcccacgaucaucgagcgcaacaucaccgagaucgucuaccucaccaacaccacgaucgagaaggagaucugccccaagcuggccggguaccggaacuggagcaagccgcagugcgacaucaccggcuucgcgcccuucuccaaggacaacagcauccgccuguccgccgggggcgacaucugggugacccgggagcccuacgugagcugcgaccccgacaagugcuaccaguucgcccucgggcagggcaccacgcugaacaacguccacuccaacgacaccgugcgcgaccggaccccguaccgcacccugcucaugaacgagcugggcgugcccuuccaccuggggacgaagcaggucugcaucgccuggagcuccagcuccugccacgacggcaaggccuggcuccacgugugcaucaccggggacgacaagaacgcgaccgccagcuucaucuacaacggccggcugguggacuccgucgugagcugguccaaggagauccugcgcacccaggagagcgagugcgugugcaucaacgggacgugcaccgucgugaugaccgacggcuccgccagcggcaaggccgacaccaagauccucuucaucgaggaggggaagaucgugcacacgagcacccuguccggcagcgcgcagcacgucgaggagugcuccugcuacccccgguaccccggggugcgcugcgugugccgggacaacuggaagggcagcaaccgcccgaucgucgacaucaacaucaaggaccacuccaucgugagcuccuacgugugcagcggccuggucggggacacgccccggaagaacgacuccagcuccagcucccacugccucgaccccaacaacgaggagggcgggcacggcgugaaggggugggccuucgacgacggcaacgacgucuggaugggccgcaccaucaacgagaccagccggcugggguacgagaccuucaaggugaucgagggcugguccaaccccaagagcaagcugcagaucaaccgccaggugaucgucgaccgggggaaccgcuccggcuacagcgggaucuucuccguggagggcaagagcugcaucaaccggugcuucuacguggagcucauccgcggccggaaggaggagaccgagguccuguggaccagcaacuccaucgugguguucugcgggacgagcggcaccuacgggaccggcuccuggccggacggggccgaccugaaccucaugcccaucuga

SEQ ID NO: 83314 - RNA, 1410 nt, Artificial Sequence
  derived and/or modified CDS sequence (opt1) from neuraminidase__InfluenzaA__ADK99286
augaaccccaaccagaagaucaucaccaucggcagcgugucccugaccaucagcacgaucugcuucuucaugcagaucgccauccucaucaccaccgucacccugcacuucaagcaguacgaguucaacccgccgcccaacaaccaggugacgccccgcgagcccaccaucaucgagcggaacaucaccgagaucguguaccugaccaacacgaccaucgagaaggagaucugccccaagcucgccgaguaccgcaacugguccaagccccagugcgacaucaccggguucgcgcccuucagcaaggacaacuccauccggcugagcgccggcggggacaucugggucacccgcgagccguacguguccugcgaccccgacaagugcuaccaguucgcccugggccaggggacgacccucaacaacauccacagcaacaacaccgugcgggaccgcacccccuaccggacgcugcugaugaacgagcucggcguccccuuccaccugggcaccaagcaggucugcaucgccugguccagcuccagcugccacgacgggaaggccuggcugcacgugugcaucaccggcgacgacaagaacgcgaccgccuccuucaucuacaacgggcgccucguggacagcgugguguccuggagcaaggagauccugcggacgcaggaguccgagugcgucugcaucaacgggaccugcaccguggugaugaccgacgggagcgccuccggcaaggccgacacgaagauccuguucaucgaggagggcaagaucguccacaccagcacccucagcggguccgcgcagcacguggaggagugcagcugcuacccgcgcuaccccggcgugcggugcgucugccgcgacaacuggaagggguccaaccggcccaucguggacaucaacaucaaggaccacagcaucguguccagcuacgucugcuccggccuggugggcgacacgccccgcaagaacgacagcuccagcuccagccacugccuggacccgaacaacgaggagggcggccacggggugaagggcugggccuucgacgacgggaacgacgucuggaugggccggaccaucuccgagaagucccgccucggcuacgagaccuucaaggugaucgagggguggagcaaccccaagagcaagcugcagaucaaccggcaggucaucguggaccgcggcaaccgguccggguacagcggcaucuucuccguggagggcaagagcugcaucaaccgcugcuucuacgucgagcugauccgggggcgcaaggaggagaccgaggugcucuggaccagcaacuccaucguggucuucugcggcacgagcgggaccuacggcaccggguccuggcccgacggcgccgacaucaaccugaugcccaucuga

SEQ ID NO: 83315 - RNA, 1410 nt, Artificial Sequence; identical to SEQ ID NO: 81616
  derived and/or modified CDS sequence (opt1) from neuraminidase__InfluenzaA__ADK99297

SEQ ID NO: 83316 - RNA, 1410 nt, Artificial Sequence
  derived and/or modified CDS sequence (opt1) from neuraminidase__InfluenzaA__ADK99308
augaaccccaaccagaagaucaucaccaucggcagcgugucccugaccaucagcacgaucugcuucuucaugcagaucgccauccucgucaccaccgugacccugcacuucaagcaguacgaguucaacuccccgcccaacaaccaggugaugcugugcgagcccacgaucaucgagcgcaacaucaccgagaucgucuaccucaccaacaccacgaucgagaaggagaucugccccaagcuggccgaguaccggaacuggagcaagccgcagugcgacaucaccggguucgcgcccuucuccaaggacaacagcauccgccuguccgccggcggggacaucugggugacccgggagcccuacgugagcugcgaccccgacaagugcuaccaguucgcccucggccaggggaccacgcugaacaacguccacuccaacaacaccgugcgcgaccggaccccguaccgcacccugcucaugaacgagcugggcauccccuuccaccugggcacgaagcaggucugcaucgccuggagcuccagcuccugccacgacgggaaggccuggcuccacgugugcaucaccggcgacgacaagaacgcgaccgccagcuucaucuacaacgggcggcugguggacuccguggucagcugguccaaggacauccugcgcacccaggagagcgagugcgugugcaucaacggcacgugcaccguggucaugaccgacggguccgccagcggcaaggccgacaccaagauccucuucaucgaggagggcaagaucgugcacacgagcacccuguccgggagcgcgcagcacguggaggagugcuccugcuacccccgguaccccggcguccgcugcgugugccgggacaacuggaaggggagcaaccgcccgaucguggacaucaacaucaaggaccacuccaucgucagcuccuacgugugcagcggccuggugggcgacacgccccggaagaacgacuccagcuccagcucccacugccucgaccccaacaacgaggagggcgggcacggggucaagggcugggccuucgacgacgggaacgacguguggaugggccgcaccaucagcgagaagucccggcugggcuacgagaccuucaaggucaucgagggguggagcaaccccaaguccaagcugcagaucaaccgccaggugaucguggaccggggcaaccgcagcggguacuccggcaucuucagcgucgagggcaagagcugcaucaaccggugcuucuacguggagcucauccgcgggcggaaggaggagaccgaggugcuguggaccuccaacagcaucgucguguucugcggcaccuccgggacguacggcaccgggagcuggccggacggcgccaacaucaaccugaugcccaucuga

SEQ ID NO: 83317 - RNA, 1413 nt, Artificial Sequence; identical to SEQ ID NO: 81485
  derived and/or modified CDS sequence (opt1) from neuraminidase__InfluenzaA__ADL14590

SEQ ID NO: 83318 - RNA, 1410 nt, Artificial Sequence; identical to SEQ ID NO: 82508
  derived and/or modified CDS sequence (opt1) from neuraminidase__InfluenzaA__ADL27992

SEQ ID NO: 83319 - RNA, 1410 nt, Artificial Sequence; identical to SEQ ID NO: 83147
  derived and/or modified CDS sequence (opt1) from neuraminidase__InfluenzaA__ADL28003

SEQ ID NO: 83320 - RNA, 1410 nt, Artificial Sequence; identical to SEQ ID NO: 83292
  derived and/or modified CDS sequence (opt1) from neuraminidase__InfluenzaA__ADL28014

SEQ ID NO: 83321 - RNA, 1410 nt, Artificial Sequence
  derived and/or modified CDS sequence (opt1) from neuraminidase__InfluenzaA__ADL28025
augaaccccaaccagaagaucaucaccaucggcagcgugucccugaccaucagcacgaucugcuucuucaugcagaucgccauccucaucaccaccgucacccugcacuucaagcaguacgaguucaacuccccgcccaacaaccaggugaugcugugcgagcccacgaucaucgagcgcaacaucaccgagaucguguaccucaccaacaccacgaucgagaagaagaucugccccaagcuggccgaguaccggaacuggagcaagccgcagugcgacaucaccggguucgcgcccuucuccaaggacaacagcauccgccuguccgccggcggggacaucugggucacccgggagcccuacgugagcugcgaccccgacaagugcuaccaguucgcccucggccaggggaccacgcugaacaacgugcacuccaacaacaccguccgcgaccggaccccguaccgcacccugcucaugaacgagcugggcgugcccuuccaccugggcacgaagcaggucugcaucgccuggagcuccagcuccugccacgacgggaaggccuggcuccacgugugcaucaccggcgacgacaagaacgcgaccgccagcuucaucuacaacgggcggcugguggacuccguggucagcugguccaaggagauccugcgcacccaggagagcgagugcgugugcaucaacggcacgugcaccguggucaugaccgacggguccgccagcggcaaggccgacaccaagauccucuucaucgaggagggcaagaucgugcacacgagcacccuguccgggagcgcgcagcacguggaggagugcuccugcuacccccgguaccccggcguccgcugcgugugccgggacaacuggaaggggagcaaccgcccgaucguggacaucaacaucaaggaccacuccaucgucagcuccuaccugugcagcggccucgugggcgacacgccccggaagaacgacuccagcuccagcucccacugccuggaccccaacaacgaggagggcgggcacggggugaagggcugggccuucgacgacgggaacgacgucuggaugggccgcaccaucagcgagaagucccggcugggcuacgagaccuucaaggugaucgagggguggagcaaccccaaguccaagcuccagaucaaccgccaggucaucguggaccggggcaaccgcagcggguacuccggcaucuucagcguggagggcaagagcugcaucaaccggugcuucuacgucgagcugauccgcgggcggaaggaggagaccgaggugcuguggaccuccaacagcaucguggucuucugcggcaccuccgggacguacggcaccgggagcuggccggacggcgccgacaucaaccucaugcccaucuga

SEQ ID NO: 83322 - RNA, 1410 nt, Artificial Sequence; identical to SEQ ID NO: 82508
  derived and/or modified CDS sequence (opt1) from neuraminidase__InfluenzaA__ADL28036

SEQ ID NO: 83323 - RNA, 1410 nt, Artificial Sequence; identical to SEQ ID NO: 80623
  derived and/or modified CDS sequence (opt1) from neuraminidase__InfluenzaA__ADL28047

SEQ ID NO: 83324 - RNA, 1410 nt, Artificial Sequence; identical to SEQ ID NO: 81929
  derived and/or modified CDS sequence (opt1) from neuraminidase__InfluenzaA__ADL28058

SEQ ID NO: 83325 - RNA, 1410 nt, Artificial Sequence; identical to SEQ ID NO: 83300
  derived and/or modified CDS sequence (opt1) from neuraminidase__InfluenzaA__ADL28069

SEQ ID NO: 83326 - RNA, 1410 nt, Artificial Sequence; identical to SEQ ID NO: 83147
  derived and/or modified CDS sequence (opt1) from neuraminidase__InfluenzaA__ADL28080

SEQ ID NO: 83327 - RNA, 1410 nt, Artificial Sequence; identical to SEQ ID NO: 82508
  derived and/or modified CDS sequence (opt1) from neuraminidase__InfluenzaA__ADL28091

SEQ ID NO: 83328 - RNA, 1410 nt, Artificial Sequence
  derived and/or modified CDS sequence (opt1) from neuraminidase__InfluenzaA__ADL28102
augaaccccaaccagaagaucaucaccaucggcagcgugucccugaccaucagcacgaucugcuucuucaugcagaucgccauccucaucaccaccgucacccugcacuucaagcaguacgaguucaacuccccgcccaacaaccaggugaugcugugcgagcccacgaucaucgagcgcaacaucaccgagaucguguaccucaccaacaccacgaucgagaaggagaucugccccaagcuggccgaguaccggaacuggagcaagccgcagugcgacaucaccggguucgcgcccuucuccaaggacaacagcauccgccuguccgccggcggggacaucugggucacccgggagcccuacgugagcugcgaccccgacaagugcuaccaguucgcccucggccaggggaccacgcugaacaacgugcacuccaacaacaccguccgcgaccggaccccguaccgcacccugcucaugaacgagcugggcgugcccuuccaccugggcacgaagcaggucugcaucgccuggagcuccagcuccugccacgacgggaaggccuggcuccacgugugcaucaccggcgacgacaagaacgcgaccgccagcuucaucuacaacgggcggcugguggacuccguggucagcugguccaaggacauccugcgcacccaggagagcgagugcgugugcaucaacggcacgugcaccguggucaugaccgacggguccgccagcggcaaggccgacaccaagauccucuucaucgaggagggcaagaucgugcacacgagcacccuguccgggagcgcgcagcacguggaggagugcuccugcuacccccgguaccccggcguccgcugcgugugccgggacaacuggaaggggagcaaccgcccgaucguggacaucaacaucaaggaccacuccaucgucagcuccuacgugugcagcggccuggugggcgacacgccccggaagaacgacuccagcuccagcucccacugccucgaccccaacaacgaggagggcgggcacggggucaagggcugggccuucgacgacgggaacgacguguggaugggccgcaccaucagcgagaagucccggcugggcuacgagaccuucaaggucaucgagggguggagcaaccccaaguccaagcugcagaucaaccgccaggugaucguggaccggggcaaccgcagcggguacuccggcaucuucagcgucgagggcaagagcugcaucaaccggugcuucuacguggagcucauccgcgggcggaaggaggagaccgaggugcuguggaccuccaacagcaucgucguguucugcggcaccuccgggacguacggcaccgggagcuggccggacggcgccgacaucaaccugaugcccaucuga

SEQ ID NO: 83329 - RNA, 1410 nt, Artificial Sequence; identical to SEQ ID NO: 80623
  derived and/or modified CDS sequence (opt1) from neuraminidase__InfluenzaA__ADL28113

SEQ ID NO: 83330 - RNA, 1410 nt, Artificial Sequence
  derived and/or modified CDS sequence (opt1) from neuraminidase__InfluenzaA__ADL28129
augaaccccaaccagaagaucaucaccaucggcagcgugucccugaccaucagcacgaucugcuucuucaugcagaucgccauccucgucaccaccgugacccugcacuucaagcaguacgaguucaacuccccgcccaacaaccaggugaugcugugcgagcccacgaucaucgagcgcaacaucaccgagaucgucuaccucaccaacaccacgaucgagaaggagaucugccccaagcuggccgaguaccggaacuggagcaagccgcagugcgacaucaccggguucgcgcccuucuccaaggacaacagcauccgccuguccgccggcggggacaucugggugacccgggagcccuacgugagcugcgaccccgacaagugcuaccaguucgcccucggccaggggaccacgcugaacaacguccacuccaacaacaccgugcgcgaccggaccccguaccgcacccugcucaugaacgagcugggcgugcccuuccaccugggcacgaagcaggucugcaucgccuggagcuccagcuccugccacgacgggaaggccuggcuccacgugugcaucaccggcgacgacaagaacgcgaccgccagcuucaucuacaacgggcggcugguggacuccgucgugagcugguccaaggacauccugcgcacccaggagagcgagugcgugugcaucaacggcacgugcaccgucgugaugaccgacggguccgccagcggcaaggccgacaccaagauccucuucaucgaggagggcaagaucgugcacacgagcacccuguccgggagcgcgcagcacgucgaggagugcuccugcuacccccgguaccccggcgugcgcugcgugugccgggacaacuggaaggggagcaaccgcccgaucgucgacaucaacaucaaggaccacuccaucgugagcuccuacgugugcagcggccuggucggcgacacgccccggaagaacgacuccagcuccagcucccacugccucgaccccaacaacgaggagggcgggcacggggugaagggcugggccuucgacgacgggaacgacgucuggaugggccgcaccaucagcgagaagucccggcugggcuacgagaccuucaaggugaucgagggguggagcaaccccaaguccaagcugcagaucaaccgccaggugaucgucgaccggggcaaccgcagcggguacuccggcaucuucagcguggagggcaagagcugcaucaaccggugcuucuacguggagcucauccgcgggcggaaggaggagaccgagauccuguggaccuccaacagcaucgucguguucugcggcaccuccgggacguacggcaccgggagcuggccggacggcgccaacaucaaccugaugcccaucuga

SEQ ID NO: 83331 - RNA, 1410 nt, Artificial Sequence
  derived and/or modified CDS sequence (opt1) from neuraminidase__InfluenzaA__ADL28140
augaaccccaaccagaagaucaucaccaucggcagcgugucccugaccaucagcacgaucugcuucuucaugcagaucgccauccucaucaccaccgucacccugcacuucaagcaguacgaguucaacuccccgcccaacaaccaggugaugcugugcgagcccacgaucaucgagcgcaacaucaccgagaucguguaccucaccaacaccacgaucgagaaggagaucugccccaagcuggccgaguaccggaacuggagcaagccgcagugcgacaucaccggguucgcgcccuucuccaaggacaacagcauccgccuguccgccggcggggacaucugggucacccgggagcccuacgugagcugcgaccccgacaagugcuaccaguucgcccucggccaggggaccacgcugaacaacgugcacuccaacaacaccguccgcgaccggaccccguaccgcacccugcucaugaacgagcugggcgugcccuuccaccugggcacgaagcaggucugcaucgccuggagcuccagcuccugccacgacgggaaggccuggcuccacgugugcaucaccggcgacgacaagaacgcgaccgccagcuucaucuacaacgggaagcugguggacuccguggucagcugguccaaggagauccugcggacccaggagagcgagugcgugugcaucaacggcacgugcaccguggucaugaccgacggguccgccagcggcaaggccgacaccaagauccucuucaucgaggagggcaagaucgugcacacgagcacccuguccgggagcgcgcagcacguggaggagugcuccugcuacccccgcuaccccggcguccggugcgugugccgcgacaacuggaaggggagcaaccggccgaucguggacaucaacaucaaggaccacuccaucgucagcuccuacgugugcagcggccuggugggcgacacgccccgcaagaacgacuccagcuccagcucccacugccucgaccccaacaacgaggagggcgggcacggggucaagggcugggccuucgacgacgggaacgacguguggaugggccggaccaucagcgagaagucccgccugggcuacgagaccuucaaggucaucgagggguggagcaaccccaaguccaagcugcagaucaaccgccaggugaucguggaccggggcaaccggagcggguacuccggcaucuucagcgucgagggcaagagcugcaucaaccgcugcuucuacguggagcucauccgggggcgcaaggaggagaccgaggugcuguggaccuccaacagcaucgucguguucugcggcaccuccgggacguacggcaccgggagcuggccggacggcgccaacaucaaccugaugcccaucuga

SEQ ID NO: 83332 - RNA, 1410 nt, Artificial Sequence; identical to SEQ ID NO: 82508
  derived and/or modified CDS sequence (opt1) from neuraminidase__InfluenzaA__ADL28151

SEQ ID NO: 83333 - RNA, 1410 nt, Artificial Sequence; identical to SEQ ID NO: 81929
  derived and/or modified CDS sequence (opt1) from neuraminidase__InfluenzaA__ADL28162

SEQ ID NO: 83334 - RNA, 1410 nt, Artificial Sequence; identical to SEQ ID NO: 83147
  derived and/or modified CDS sequence (opt1) from neuraminidase__InfluenzaA__ADL28173

SEQ ID NO: 83335 - RNA, 1410 nt, Artificial Sequence; identical to SEQ ID NO: 82508
  derived and/or modified CDS sequence (opt1) from neuraminidase__InfluenzaA__ADL28184

SEQ ID NO: 83336 - RNA, 1410 nt, Artificial Sequence
  derived and/or modified CDS sequence (opt1) from neuraminidase__InfluenzaA__ADL28195
augaaccccaaccagaagaucaucaccaucggcagcgugucccugaccaucagcacgaucugcuucuucaugcagaucgccauccucaucaccaccgucacccugcacuucaagcaguacgaguucaacuccccgcccaacaaccaggugaugcugugcgagcccacgaucaucgagcgcaacaucaccgagaucguguaccucaccaacaccacgaucgagaaggagaucugccccaagcuggccgaguaccggaacuggagcaagccgcagugcgacaucaccggguucgcgcccuucuccaaggacaacagcauccgccuguccgccggcggggacaucugggucacccgggagcccuacgugagcugcgaccccgacaagugcuaccaguucgcccucggccaggggaccacgcugaacaacgugcacuccaacaacaccguccgcgaccggaccccguaccgcacccugcucaugaacgagcugggcgugcccuuccaccugggcacgaagcaggucugcaucgccuggagcuccagcuccugccacgacgggaaggccuggcuccacgugugcaucaccggcgacgacaagaacgcgaccgccagcuucaucuacaacgggcggcugguggacuccguggucagcugguccaaggagauccugcgcacccaggagagcgagugcgugugcgugaacggcacgugcaccgucgugaugaccgacggguccgccagcggcaaggccgacaccaagauccucuucaucgaggagggcaagaucgugcacacgagcacccuguccgggagcgcgcagcacgucgaggagugcuccugcuacccccgguaccccggcgugcgcugcgugugccgggacaacuggaaggggagcaaccgcccgaucgucgacaucaacaucaaggaccacuccaucgugagcuccuacgugugcagcggccuggucggcgacacgccccggaagaacgacuccagcuccagcucccacugccucgaccccaacaacgaggagggcgggcacggggugaagggcugggccuucgacgacgggaacgacgucuggaugggccgcaccaucagcgagaagucccggcugggcuacgagaccuucaaggugaucgagggguggagcaaccccaaguccaagcugcagaucaaccgccaggugaucgucgaccggggcaaccgcagcggguacuccggcaucuucagcguggagggcaagagcugcaucaaccggugcuucuacguggagcucauccgcgggcggaaggaggagaccgagguccuguggaccuccaacagcaucgugguguucugcggcaccuccgggacguacggcaccgggagcuggccggacggcgccgacaucaaccugaugcccaucuga

SEQ ID NO: 83337 - RNA, 1410 nt, Artificial Sequence; identical to SEQ ID NO: 83297
  derived and/or modified CDS sequence (opt1) from neuraminidase__InfluenzaA__ADL28206

SEQ ID NO: 83338 - RNA, 1410 nt, Artificial Sequence; identical to SEQ ID NO: 81616
  derived and/or modified CDS sequence (opt1) from neuraminidase__InfluenzaA__ADL28217

SEQ ID NO: 83339 - RNA, 1410 nt, Artificial Sequence; identical to SEQ ID NO: 82508
  derived and/or modified CDS sequence (opt1) from neuraminidase__InfluenzaA__ADL28228

SEQ ID NO: 83340 - RNA, 1410 nt, Artificial Sequence; identical to SEQ ID NO: 83147
  derived and/or modified CDS sequence (opt1) from neuraminidase__InfluenzaA__ADL28239

SEQ ID NO: 83341 - RNA, 1410 nt, Artificial Sequence; identical to SEQ ID NO: 81929
  derived and/or modified CDS sequence (opt1) from neuraminidase__InfluenzaA__ADL28250

SEQ ID NO: 83342 - RNA, 1410 nt, Artificial Sequence; identical to SEQ ID NO: 83147
  derived and/or modified CDS sequence (opt1) from neuraminidase__InfluenzaA__ADL28261

SEQ ID NO: 83343 - RNA, 1410 nt, Artificial Sequence; identical to SEQ ID NO: 82508
  derived and/or modified CDS sequence (opt1) from neuraminidase__InfluenzaA__ADL28373

SEQ ID NO: 83344 - RNA, 1410 nt, Artificial Sequence; identical to SEQ ID NO: 80627
  derived and/or modified CDS sequence (opt1) from neuraminidase__InfluenzaA__ADL28387

SEQ ID NO: 83345 - RNA, 1410 nt, Artificial Sequence
  derived and/or modified CDS sequence (opt1) from neuraminidase__InfluenzaA__ADL28391
augaaccccaaccagaagaucaucaccaucggcagcgugucccugaccaucagcacgaucugcuucuucaugcagaucgccauccucaucaccaccgucacccugcacuucaagcaguacgaguucaacuccagcccgaacaaccaggugaugcugugcgagcccacgaucaucgagcgcaacaucaccgagaucguguaccucaccaacaccacgaucgagaaggagaucugccccaagcuggccgaguaccggaacugguccaagccccagugcgacaucaccggguucgcgccguucagcaaggacaacuccauccgccugagcgccggcggggacaucugggucacccgggugcccuacguguccugcgaccccgacaagugcuaccaguucgcccucggccaggggaccacgcugaacaacguccacagcaacaacaccgugcgcgaccggacccccuaccgcacccugcucaugaacgagcugggcgugccguuccaccugggcacgaagcaggucugcaucgccugguccagcuccagcugccacgacgggaaggccuggcuccacgugugcaucaccggcgacgacaagaacgcgaccgccuccuucaucuacaacgggcggcugguggacagcaucgucuccuggagcaaggagauccugcgcacccaggaguccgagugcgugugcaucaacggcacgugcaccguggucaugaccgacgggagcgccagcggcaaggccgacaccaagauccucuucaucgaggagggcaagaucgugcacacguccacccugagcggguccgcgcagcacguggaggagugcagcugcuacccccgguaccccggcguccgcugcgugugccgggacaacuggaagggguccaaccgccccaucguggacaucaacaucaaggaccacagcaucgucuccagcuacgugugcuccggccuggugggcgacaccccgcggaagaacgacagcuccagcuccagccacugccucgaccccaacaacgaggagggcgggcacggggucaagggcugggccuucgacgacgggaacgacguguggaugggccgcaccaucuccgagaagucccggcugggcuacgagacguucaaggucaucgagggguggagcaaccccaagagcaagcugcagaucaaccgccaggugaucguggaccggggcaaccgcuccggguacagcggcaucuucagcgucgaggggaaguccugcaucaaccggugcuucuacguggagcucauccgcggccggaaggaggagaccgaggugcuguggaccagcaacuccaucgucguguucugcggcaccagcgggacguacggcaccggguccuggcccgacggcgccgacaucaaccugaugccgaucuga

SEQ ID NO: 83346 - RNA, 1410 nt, Artificial Sequence
  derived and/or modified CDS sequence (opt1) from neuraminidase__InfluenzaA__ADL28395
augaaccccaaccagaagaucaucaccaucggcagcgugucccugaccaucgccacgaucugcuuccucaugcagaucgccauccuggucaccaccgugacccugcacuucaagcaguacgagugcaacagcccgcccaacaaccaggugaugcucugcgagcccgcgaucaucgagcgcaacaucacggagaucgucuaccugaccaacaccaccaucgagaaggagaucugccccaagcuggccgaguaccggaacugguccaagccgcagugcaacaucacgggguucgcccccuucagcaaggacaacuccauccgccucagcgccggcggggacaucugggugacccgggugcccuacgucuccugcgaccccgacaagugcuaccaguucgcccugggccaggggaccacccugaacaacggccacagcaacgacacggugcacgaccgcaccccguaccggacccuccugaugaacgagcugggcgugcccuuccaccucgggacccgccaggucugcaucgcgugguccagcuccagcugccacgacggcaaggccuggcugcacgugugcgugacgggggacgacgagaacgccaccgccuccuucaucuacaacggccggcuggucgacagcaucggguccuggagcaagaagauccuccgcacccaggaguccgagugcgugugcaucaacgggaccugcacgguggucaugaccgacggcagcgcguccgggaaggccgacaccaagauccuguucaucgaggagggcaagaucgugaacaucagcacccugagcggguccgcccagcacguggaggagugcagcugcuacccccgguaccccggcguccgcugcgugugccgggacaacuggaagggcuccaaccgcccgaucguggacaucaacgucaaggacuacagcaucguguccagcuacgugugcuccgggcucgucggcgacacgccccggaagaacgacagcuucuccagcucccacugccuggaccccaacaacgaggagggcggccacggggugaagggcugggccuucgacgacggcaacgacgucuggauggggcgcaccaucagcgagaaguuccgguccggcuacgagaccuucaaggugaucgagggguggagcaagcccaacuccaagcugcagaucaaccgccaggugaucgucgagcggggcaaccgcagcggguacuccggcaucuucagcguggagggcaaguccugcaucaaccggugcuucuacguggagcucauccgcgggcggaaggaggagaccgaggucugguggacgagcaacagcaucgugguguucugcggcaccuccgggaccuacggcaccgggagcuggccggacggcgccgacaucaaccugaugcccaucuga

SEQ ID NO: 83347 - RNA, 1410 nt, Artificial Sequence; identical to SEQ ID NO: 80762
  derived and/or modified CDS sequence (opt1) from neuraminidase__InfluenzaA__ADL29675

SEQ ID NO: 83348 - RNA, 1410 nt, Artificial Sequence; identical to SEQ ID NO: 80762
  derived and/or modified CDS sequence (opt1) from neuraminidase__InfluenzaA__ADL29685

SEQ ID NO: 83349 - RNA, 1410 nt, Artificial Sequence
  derived and/or modified CDS sequence (opt1) from neuraminidase__InfluenzaA__ADL29695
augaaccccaaccagaagaucaucaccaucggcagcgugugcaugaccaucgggauggccaaccugauccuccagaucggcaacaucaucuccaucuggaucagccacuccauccagcuggggaaccagaaccagaucgagacgugcaaccagagcgucaucaccuacgagaacaacaccugggugaaccagaccuacgugaacaucuccaacacgaacuucgccgcgggccagagcgucguguccgugaagcuggccgggaacagcucccucugcccggucagcggcugggccaucuacuccaaggacaacagcauccgcaucggcuccaagggggacguguucgugauccgggagcccuucaucagcugcagcccccuggagugccgcaccuucuuccugacccagggcgcccuccugaacgacaagcacuccaacgggaccaucaaggaccggucccccuaccgcacgcugaugagcugcccgaucggcgagguccccucccccuacaacagccgguucgagagcguggccugguccgcgagcgccugccacgacgggaucaacuggcucaccaucggcaucuccggccccgacaacggggccguggccguccugaaguacaacggcaucaucaccgacaccaucaagagcuggcgcaacaacauccugcggacgcaggaguccgagugcgcgugcgugaacgggagcugcuucaccgugaugaccgacggcccguccgacggccaggccagcuacaagaucuuccgcaucgagaaggggaagaucgucaaguccguggagaugaacgcccccaacuaccacuacgaggagugcagcugcuaccccgacuccagcgagaucacgugcgugugccgggacaacuggcacggcuccaaccgccccugggucagcuucaaccagaaccucgaguaccagaucggguacaucugcuccggcaucuucggggacaacccgcggcccaacgacaagaccggcagcugcggccccguguccagcaacggggccaacggcgugaagggguucuccuucaaguacggcaacggggucuggaucggccgcaccaagagcaucagcucccggaacggcuucgagaugaucugggaccccaacggguggaccggcaccgacaacaacuucagcaucaagcaggacaucguggggaucaacgagugguccggcuacagcggguccuucgugcagcacccggagcugacgggccuggacugcauccgccccugcuucugggucgagcucauccggggccgccccaaggagaacaccaucuggaccagcggguccagcaucuccuucugcggcgugaacagcgacaucgucgggugguccuggcccgacggcgccgagcugccguucaccaucgacaaguga

SEQ ID NO: 83350 - RNA, 1410 nt, Artificial Sequence; identical to SEQ ID NO: 80762
  derived and/or modified CDS sequence (opt1) from neuraminidase__InfluenzaA__ADL29705

SEQ ID NO: 83351 - RNA, 1410 nt, Artificial Sequence; identical to SEQ ID NO: 83349
  derived and/or modified CDS sequence (opt1) from neuraminidase__InfluenzaA__ADL29733

SEQ ID NO: 83352 - RNA, 1410 nt, Artificial Sequence; identical to SEQ ID NO: 80762
  derived and/or modified CDS sequence (opt1) from neuraminidase__InfluenzaA__ADL29743

SEQ ID NO: 83353 - RNA, 1410 nt, Artificial Sequence
  derived and/or modified CDS sequence (opt1) from neuraminidase__InfluenzaA__ADL29753
augaaccccaaccagaagaucaucaccaucggcagcgugugcauggccaucgggauggccaaccugauccuccagaucggcaacaucaucuccaucuggaucagccacuccauccagcuggggaaccagaaccagaucgagaccugcaaccagagcgucaucacguacgagaacaacaccugggugaaccagaccuacgugaacaucuccaacaccaacuucgcggccggccagagcgucguguccgugaagcuggccgggaacagcucccucugcccggucagcggcugggccaucuacuccaaggacaacagcauccgcaucggcuccaagggggacguguucgugauccgggagcccuucaucagcugcagcccccuggagugccgcacguucuuccugacccagggcgcccuccugaacgacaagcacuccaacgggaccaucaaggaccggucccccuaccgcacccugaugagcugcccgaucggcgagguccccucccccuacaacagccgguucgagagcguggcgugguccgccagcgccugccacgacgggaucaacuggcucacgaucggcaucuccggccccgacaacggggccguggcgguccugaaguacaacggcaucaucaccgacaccaucaagagcuggcgcaacaacauccugcggacccaggaguccgagugcgccugcgugaacgggagcugcuucacggugaugaccgacggcccguccgacggccaggccagcuacaagaucuuccgcaucgagaaggggaagaucgucaaguccguggagaugaacgcccccaacuaccacuacgaggagugcagcugcuaccccgacuccagcgagaucacgugcgugugccgggacaacuggcacggcuccaaccgccccugggucagcuucaaccagaaccucgaguaccagaucggguacaucugcuccggcaucuucggggacaacccgcggcccaacgacaagaccggcagcugcggccccguguccagcaacggggccaacggcgugaagggguucuccuucaaguacggcaacggggucuggaucggccgcaccaagagcaucagcucccggaacggcuucgagaugaucugggaccccaacggguggaccggcaccgacaacaacuucagcaucaagcaggacaucguggggaucaacgagugguccggcuacagcggguccuucgugcagcacccggagcugaccggccuggacugcauccgccccugcuucugggucgagcucauccggggccgccccaaggagaacacgaucuggaccagcggguccagcaucuccuucugcggcgugaacagcgacaucgucgggugguccuggcccgacggcgcggagcugccguucaccaucgacaaguga

SEQ ID NO: 83354 - RNA, 1410 nt, Artificial Sequence; identical to SEQ ID NO: 80762
  derived and/or modified CDS sequence (opt1) from neuraminidase__InfluenzaA__ADL29763

SEQ ID NO: 83355 - RNA, 1410 nt, Artificial Sequence; identical to SEQ ID NO: 83349
  derived and/or modified CDS sequence (opt1) from neuraminidase__InfluenzaA__ADL29773

SEQ ID NO: 83356 - RNA, 1410 nt, Artificial Sequence; identical to SEQ ID NO: 80762
  derived and/or modified CDS sequence (opt1) from neuraminidase__InfluenzaA__ADL29783

SEQ ID NO: 83357 - RNA, 1410 nt, Artificial Sequence; identical to SEQ ID NO: 83349
  derived and/or modified CDS sequence (opt1) from neuraminidase__InfluenzaA__ADL29882

SEQ ID NO: 83358 - RNA, 1410 nt, Artificial Sequence
  derived and/or modified CDS sequence (opt1) from neuraminidase__InfluenzaA__ADL32020
augaaccccaaccagaagaucaucaccaucggcagcgugugcaugaccaucgggauggccaaccugauccuccagaucggcaacaucaucuccacguggaucagccacuccauccagcuggggaaccagaaccagaucgagaccugcaaccagagcgucaucaccuacgagaacaacaccugggugaaccagacguacgugaacaucuccaacaccaacuucgccgcgggccagagcgucguguccgugaagcuggccgggaacagcucccucugcccggucagcggcugggccaucuacuccaaggacaacagcauccgcaucggcuccaagggggacguguucgugauccgggagcccuucaucagcugcagcccccuggagugccgcaccuucuuccugacccagggcgcccuccugaacgacaagcacuccaacgggacgaucaaggaccggucccccuaccgcacccugaugagcugcccgaucggcgagguccccucccccuacaacagccgguucgagagcguggccugguccgcgagcgccugccacgacgggaucaacuggcucaccaucggcaucuccggccccgacaacggggccguggccguccugaaguacaacggcaucaucaccgacacgaucaagagcuggcgcaacaacauccugcggacccaggaguccgagugcgcgugcgugaacgggagcugcuucaccgugaugaccgacggcccguccgacggccaggccagcuacaagaucuuccgcaucgagaaggggaagaucgucaaguccguggagaugaacgcccccaacuaccacuacgaggagugcagcugcuaccccgacuccagcgagaucacgugcgugugccgggacaacuggcacggcuccaaccgccccugggucagcuucaaccagaaccucgaguaccagaucggguacaucugcuccggcaucuucggggacaacccgcggcccaacgacaagaccggcagcugcggccccguguccagcaacggggccaacggcgugaagggguucuccuucaaguacggcaacggggucuggaucggccgcaccaagagcaucagcucccggaacggcuucgagaugaucugggaccccaacggguggaccggcacggacaacaacuucagcaucaagcaggacaucguggggaucaacgagugguccggcuacagcggguccuucgugcagcacccggagcugaccggccuggacugcauccgccccugcuucugggucgagcucauccggggccgccccaaggagaacaccaucuggaccagcggguccagcaucuccuucugcggcgugaacagcgacacggucgggugguccuggcccgacggcgccgagcugccguucaccaucgacaaguga

SEQ ID NO: 83359 - RNA, 1410 nt, Artificial Sequence; identical to SEQ ID NO: 83349
  derived and/or modified CDS sequence (opt1) from neuraminidase__InfluenzaA__ADL32030

SEQ ID NO: 83360 - RNA, 1410 nt, Artificial Sequence; identical to SEQ ID NO: 80762
  derived and/or modified CDS sequence (opt1) from neuraminidase__InfluenzaA__ADL32040

SEQ ID NO: 83361 - RNA, 1410 nt, Artificial Sequence; identical to SEQ ID NO: 80762
  derived and/or modified CDS sequence (opt1) from neuraminidase__InfluenzaA__ADL32050

SEQ ID NO: 83362 - RNA, 1410 nt, Artificial Sequence; identical to SEQ ID NO: 80762
  derived and/or modified CDS sequence (opt1) from neuraminidase__InfluenzaA__ADL32060

SEQ ID NO: 83363 - RNA, 1410 nt, Artificial Sequence; identical to SEQ ID NO: 80762
  derived and/or modified CDS sequence (opt1) from neuraminidase__InfluenzaA__ADL32093

SEQ ID NO: 83364 - RNA, 1410 nt, Artificial Sequence; identical to SEQ ID NO: 80762
  derived and/or modified CDS sequence (opt1) from neuraminidase__InfluenzaA__ADL32117

SEQ ID NO: 83365 - RNA, 1410 nt, Artificial Sequence; identical to SEQ ID NO: 80762
  derived and/or modified CDS sequence (opt1) from neuraminidase__InfluenzaA__ADL32347

SEQ ID NO: 83366 - RNA, 1410 nt, Artificial Sequence
  derived and/or modified CDS sequence (opt1) from neuraminidase__InfluenzaA__ADL32357
augaaccccaaccagaagaucaucaccaucggcagcgugugcaugaccaucgggauggccaaccugauccuccagaucggcaacaucaucuccaucuggaucagccacuccauccagcuggggaaccagaaccagaucgagacgugcaaccagagcgucaucaccuacgagaacaacaccugggugaaccagaccuacgugaacaucuccaacacgaacuucgccgcgggccagagcgucguguccgugaagcuggccgggaacagcucccucugcccggucagcggcugggccaucuacuccaaggacaacagcauccgcaucggcuccaagggggacguguucgugauccgggagcccuucaucagcugcagcccccuggagugccgcaccuucuuccugacccagggcgcccuccugaacgacaagcacuccaacgggaccaucaaggaccggucccccuaccgcacgcugaugagcugcccgaucggcgagguccccucccccuacaacagccgguucgagagcguggccugguccgcgagcgccugccacgacgggaucaacuggcucaccaucggcaucuccggccccgacaacggggccguggccguccugaaguacaacggcaucaucaccgacaccaucaagagcuggcgcaacaacauccugcggacgcaggaguccgagugcgcgugcgugaacgggagcugcuucaccgugaugaccgacggcccguccgacggccaggccagcuacaagaucuuccgcaucgagaaggggaagaucgucaaguccguggagaugaacgcccccaacuaccacuacgaggagugcagcugcuaccccgacuccagcgagaucacgugcgugugccgggacaacuggcacggcuccaaccgccccugggucagcuucaaccagaaccucgaguaccagaucggguacaucugcuccggcaucuucggggacaacccgcggcccaacgacaagaccggcagcugcggccccguguccagcaacggggccaacggcgugaagggguucuccuucaaguacggcaacggggucuggaucggccgcaccaagagcaucagcucccggaacggcuucgagaugaucugggaccccaacggguggaccggcaccgacaacaacuucagcaucaagcaggacaucguggggaucaacgagugguccggcuacagcggguccuucgugcagcacccggagcugacgggccuggacugcauccgccccugcuucugggucgagcucauccggggccgccccaaggagaacaccaucuggaccagcggguccagcaucuccuucugcggcgugaacagcgacaccgucgggugguccuggcccgacggcgccgagcugccguucacgguggacaaguga

SEQ ID NO: 83367 - RNA, 1410 nt, Artificial Sequence; identical to SEQ ID NO: 80762
  derived and/or modified CDS sequence (opt1) from neuraminidase__InfluenzaA__ADL32367

SEQ ID NO: 83368 - RNA, 1410 nt, Artificial Sequence; identical to SEQ ID NO: 80762
  derived and/or modified CDS sequence (opt1) from neuraminidase__InfluenzaA__ADL32377

SEQ ID NO: 83369 - RNA, 1410 nt, Artificial Sequence; identical to SEQ ID NO: 80762
  derived and/or modified CDS sequence (opt1) from neuraminidase__InfluenzaA__ADL32387

SEQ ID NO: 83370 - RNA, 1410 nt, Artificial Sequence; identical to SEQ ID NO: 80762
  derived and/or modified CDS sequence (opt1) from neuraminidase__InfluenzaA__ADL32397

SEQ ID NO: 83371 - RNA, 1410 nt, Artificial Sequence; identical to SEQ ID NO: 80762
  derived and/or modified CDS sequence (opt1) from neuraminidase__InfluenzaA__ADL32407

SEQ ID NO: 83372 - RNA, 1410 nt, Artificial Sequence; identical to SEQ ID NO: 80762
  derived and/or modified CDS sequence (opt1) from neuraminidase__InfluenzaA__ADL32417

SEQ ID NO: 83373 - RNA, 1410 nt, Artificial Sequence
  derived and/or modified CDS sequence (opt1) from neuraminidase__InfluenzaA__ADL32427
augaaccccaaccagaagaucaucaccaucggcagcgugugcaugaccaucgggauggccaaccugauccuccagaucggcaacaucaucuccaucuggaucagccacuccauccagcuggggaaccagaaccagaucgagacgugcaaccagagcgucaucaccuacgagaacaacaccugggugaaccagaccuacgugaacaucuccaacacgaacuucgccgcgggccagagcgucguguccgugaagcuggccgggaacagcucccucugcccggucagcggcugggccaucuacuccaaggacaacagcauccgcaucggcuccaagggggacguguucgugauccgggagcccuucaucagcugcagcccccuggagugccgcaccuucuuccugacccagggcgcccuccugaacgacaagcacuccaacgggaccaucaaggaccggucccccuaccgcacgcugaugagcugcccgaucggcgagguccccucccccuacaacagccgguucgagagcguggccugguccgcgagcgccugccacgacgggaucaacuggcucaccaucggcaucuccggccccgacaacggggccguggccguccugaaguacaacggcaucaucaccgacaccaucaagagcuggcgcaacaacauccugcggacgcaggaguccgagugcgcgugcgugaacgggagcugcuucaccgugaugaccgacggcccguccgacggccaggccagcuacaagaucuuccgcaucgagaaggggaagaucgucaaguccguggagaugaacgcccccaacuaccacuacgaggagugcagcugcuaccccgacuccagcgagaucacgugcgugugccgggacaacuggcacggcuccaaccgccccugggucagcuucaaccagaaccucgaguaccagaucggguacaucugcuccggcaucuucggggacaacccgcggcccaacgacaagaccggcagcugcggccccguguccagcaacggggccaacggcgugaagggguucuccuucaaguacggcaacggggucuggaucggccgcaccaagagcaucagcucccggaacggcuucgagaugaucugggaccccaacggguggaccggcaccgacaacaacuucagcaucaagcaggacaucguggggaucaacgagugguccggcuacagcggguccuucgugcagcacccggagcugacgggccuggacugcauccgccccugcuucugggucgagcucauccggggccgccccaaggagaagaccaucuggaccagcggguccaucaucagcuucugcggcgugaacuccgacaccgucggguggagcuggcccgacggcgccgagcugccguucacgaucgacaaguga

SEQ ID NO: 83374 - RNA, 1410 nt, Artificial Sequence; identical to SEQ ID NO: 80762
  derived and/or modified CDS sequence (opt1) from neuraminidase__InfluenzaA__ADL32447

SEQ ID NO: 83375 - RNA, 1410 nt, Artificial Sequence
  derived and/or modified CDS sequence (opt1) from neuraminidase__InfluenzaA__ADL32457
augaaccccaaccagaagaucaucaccaucggcagcgugugcaugaccaucgggauggccaaccugauccuccagaucggcaacaucaucuccaucuggaucagccacuccauccagcuggggaaccagaaccagaucgagacgugcaaccagagcgucaucaccuacgagaacaacaccugggugaaccagaccuacgugaacaucuccaacacgaacuucgccgcgggccagagcgucguguccgugaagcuggccgggaacagcucccucugcccggucagcggcugggccaucuacuccaaggacaagagcauccgcaucggcuccaagggggacguguucgugauccgggagcccuucaucagcugcagcccccuggagugccgcaccuucuuccugacccagggcgcccuccugaacgacaagcacuccaacgggaccaucaaggaccggucccccuaccgcacgcugaugagcugcccgaucggcgagguccccucccccuacaacagccgguucgagagcguggccugguccgcgagcgccugccacgacgggaucuccuggcucaccaucggcaucagcggccccgacaacggggccguggccguccugaaguacaacggcaucaucaccgacaccaucaaguccuggcgcaacaacauccugcggacgcaggagagcgagugcgcgugcgugaacggguccugcuucaccgugaugaccgacggcccgagcgacggccaggccuccuacaagaucuuccgcaucgagaaggggaagaucgucaagagcguggagaugaacgcccccaacuaccacuacgaggagugcuccugcuaccccgacagcuccgagaucacgugcgugugccgggacaacuggcacggcagcaaccgccccugggucuccuucaaccagaaccucgaguaccagaucggguacaucugcagcggcaucuucggggacaacccgcggcccaacgacaagaccggcuccugcggccccgugagcuccaacggggccaacggcgugaagggguucagcuucaaguacggcaacggggucuggaucggccgcaccaagagcaucuccagccggaacggcuucgagaugaucugggaccccaacggguggaccggcaccgacaacaacuucuccaucaagcaggacaucguggggaucaacgaguggagcggcuacuccgggagcuucgugcagcacccggagcugacgggccuggacugcauccgccccugcuucugggucgagcucauccggggccgccccaaggagaacaccaucuggaccuccgggagcuccaucagcuucugcggcguguccagcgacaccgucgggugguccuggcccgacggcgccgagcugccguucacgaucgacaaguga

SEQ ID NO: 83376 - RNA, 1410 nt, Artificial Sequence; identical to SEQ ID NO: 81939
  derived and/or modified CDS sequence (opt1) from neuraminidase__InfluenzaA__ADL32487

SEQ ID NO: 83377 - RNA, 1410 nt, Artificial Sequence; identical to SEQ ID NO: 80762
  derived and/or modified CDS sequence (opt1) from neuraminidase__InfluenzaA__ADL32497

SEQ ID NO: 83378 - RNA, 1410 nt, Artificial Sequence; identical to SEQ ID NO: 80762
  derived and/or modified CDS sequence (opt1) from neuraminidase__InfluenzaA__ADL32507

SEQ ID NO: 83379 - RNA, 1410 nt, Artificial Sequence; identical to SEQ ID NO: 82224
  derived and/or modified CDS sequence (opt1) from neuraminidase__InfluenzaA__ADL32517

SEQ ID NO: 83380 - RNA, 1410 nt, Artificial Sequence; identical to SEQ ID NO: 81939
  derived and/or modified CDS sequence (opt1) from neuraminidase__InfluenzaA__ADL32527

SEQ ID NO: 83381 - RNA, 1410 nt, Artificial Sequence; identical to SEQ ID NO: 80762
  derived and/or modified CDS sequence (opt1) from neuraminidase__InfluenzaA__ADL32537

SEQ ID NO: 83382 - RNA, 1410 nt, Artificial Sequence; identical to SEQ ID NO: 81649
  derived and/or modified CDS sequence (opt1) from neuraminidase__InfluenzaA__ADL32547

SEQ ID NO: 83383 - RNA, 1410 nt, Artificial Sequence; identical to SEQ ID NO: 82113
  derived and/or modified CDS sequence (opt1) from neuraminidase__InfluenzaA__ADL32673

SEQ ID NO: 83384 - RNA, 1410 nt, Artificial Sequence; identical to SEQ ID NO: 80762
  derived and/or modified CDS sequence (opt1) from neuraminidase__InfluenzaA__ADL32683

SEQ ID NO: 83385 - RNA, 1410 nt, Artificial Sequence; identical to SEQ ID NO: 80752
  derived and/or modified CDS sequence (opt1) from neuraminidase__InfluenzaA__ADL32693

SEQ ID NO: 83386 - RNA, 1410 nt, Artificial Sequence; identical to SEQ ID NO: 81985
  derived and/or modified CDS sequence (opt1) from neuraminidase__InfluenzaA__ADL32703

SEQ ID NO: 83387 - RNA, 1410 nt, Artificial Sequence; identical to SEQ ID NO: 80752
  derived and/or modified CDS sequence (opt1) from neuraminidase__InfluenzaA__ADL32713

SEQ ID NO: 83388 - RNA, 1410 nt, Artificial Sequence; identical to SEQ ID NO: 80762
  derived and/or modified CDS sequence (opt1) from neuraminidase__InfluenzaA__ADL32723

SEQ ID NO: 83389 - RNA, 1410 nt, Artificial Sequence; identical to SEQ ID NO: 82443
  derived and/or modified CDS sequence (opt1) from neuraminidase__InfluenzaA__ADL32733

SEQ ID NO: 83390 - RNA, 1410 nt, Artificial Sequence; identical to SEQ ID NO: 82443
  derived and/or modified CDS sequence (opt1) from neuraminidase__InfluenzaA__ADL32743

SEQ ID NO: 83391 - RNA, 1410 nt, Artificial Sequence
  derived and/or modified CDS sequence (opt1) from neuraminidase__InfluenzaA__ADL39139
augaaccccaaccagaagaucaucaccaucggcagcgugucccugaccaucagcacgaucugcuucuucaugcagaucgccauccucaucaccaccgucacccugcacuucaagcaguacgaguucaacuccccgcccaacaaccaggugaugcugagcgagcccacgaucaucgagcgcaacaucaccgagaucguguaccucaccaacaccacgaucgagaaggagaucugccccaagcuggccgaguaccggaacugguccaagccgcagugcgacaucaccggguucgcgcccuucagcaaggacaacuccauccgccugagcgccggcggggacaucugggucacccgggagcccuacguguccugcgaccccgacaagugcuaccaguucgcccucggccaggggaccacgcugaacaacgugcacagcaacaacaccguccgcgagcggaccccguaccgcacccugcucaugaacgagcugggcgugcccuuccaccugggcacgaagcaggucugcaucgccugguccagcuccagcugccacgacgggaaggccuggcuccacgugugcaucaccggcgacgacaagaacgcgaccgccuccuucaucuacaacgggcggcugguggacagcguggucuccuggagcaaggagauccugcgcacccaggaguccgagugcgugugcaucaacggcacgugcaccguggucaugaccgacgggagcgccagcggcaaggccgacaccaagauccucuucaucgaggagggcaagaucgugcacacguccacccugagcggguccgcgcagcacguggaggagugcagcugcuacccccgguaccccggcguccgcugcgugugccgggacaacuggaagggguccaaccgcccgaucguggacaucaacaucaaggaccacagcaucgucuccagcuacgugugcuccggccuggugggcgacacgccccggaagaacgacagcuccagcuccagccacugccucgaccccaacaacgaggagggcgggcacggggucaagggcugggccuucgacgacgggaacgacguguggaugggccgcaccaucuccgagaagucccggcugggcuacgagaccuucaaggucaucgagggguggagcaaccccaagagcaagcugcagaucaaccgccaggugaucguggaccggggcaaccgcuccggguacagcggcaucuucagcgucgaggggaaguccugcaucaaccggugcuucuacguggagcucauccgcggccggaaggaggagaccgaggugcuguggaccagcaacuccaucgucguguucugcggcaccagcgggacguacggcaccggguccuggccggacggcgccgacaucaaccugaugcccaucuga

SEQ ID NO: 83392 - RNA, 1413 nt, Artificial Sequence
  derived and/or modified CDS sequence (opt1) from neuraminidase__InfluenzaA__ADL39150
augaaccccaaccagaagaucaucaccaucggcagcaucuccaucgccaucgggaucaucagccugaugcuccagaucggcaacaucaucuccaucugggccagccacuccauccagaccgggagccagaacaacacgggcaucugcaaccagcgcaucaucaccuacgagaacuccaccugggugaaccacaccuacgucaacaucaacaacacgaacgugguggcgggggaggacaagaccagcgucacccuggccggcaacuccagccugugcuccaucagcggcugggccaucuacaccaaggacaacuccauccggaucgggagcaagggcgacguguucgugauccgcgagccguucaucuccugcagccaccucgagugccggacguucuuccugacccagggggcccugcucaacgacaagcacuccaacggcaccgucaaggaccgcagccccuaccgggcccugauguccugcccccugggggaggcgcccagcccguacaacagcaaguucgaguccguggccuggagcgccuccgccugccacgacggcaugggcuggcucaccaucgggaucagcggccccgacaacggggcgguggccguccugaaguacaacggcaucaucacggagaccaucaaguccuggaagaagcagauccugcgcacccaggagagcgagugcgugugcaugaacggcuccugcuucaccaucaugacggacgggcccagcaacaaggccgccuccuacaagaucuucaagaucgagaagggcaaggugaccaagagcaucgagcucaacgcccccaacuucuacuacgaggagugcuccugcuacccggacaccgggaucgucaugugcgugugccgggacaacuggcacggcagcaaccgccccuggguguccuucaaccagaaccuggacuaccagaucggguacaucugcagcggcgucuucggcgacaacccccggcccgaggacggggagggcuccugcaacccggugaccguggacggggcgaacggcgucaagggguucagcuacaaguacggcaacggcguguggaucgggcgcacgaaguccaaccggcugcgcaagggcuucgagaugaucugggaccccaacggguggaccaacaccgacagcgacuucuccgugaagcaggacgucguggccaucaccgacuggagcggcuacagcggguccuucgugcagcaccccgagcucacgggccuggacugcauccggcccugcuucugggucgagcuggugcgcggccucccgcgggagaacaccaccaucuggaccagcggguccagcaucuccuucugcggcgucaacagcgacacggccaacugguccuggcccgacggggccgagcugcccuucaccaucgacaaguga

SEQ ID NO: 83393 - RNA, 1410 nt, Artificial Sequence
  derived and/or modified CDS sequence (opt1) from neuraminidase__InfluenzaA__ADL39172
augaaccccaaccagaagaucaucaccaucggcagcgugucccugaccaucagcacgaucugcuucuucaugcagaucgccauccucaucaccaccgucacccugcacuucaagcaguacgaguucaacuccccgcccaacaaccaggugaugcugugcgagcccacgaucaucgagcgcaacaucaccgagaucguguaccucaccaacaccacgaucgagaaggagaucugccccaagcuggccgaguaccggaacuggagcaagccgcagugcgacaucaccggguucgcgcccuucuccaaggacaacagcauccgccuguccgccggcggggacaucugggucacccgggagcccuacgugagcugcgaccccgacaagugcuaccaguucgcccucggccaggggaccacgcugaacaacgugcacuccaacaacaccguccgcgaccggaccccguaccgcacccugcucaugaacgagcugggcgugcccuuccaccugggcacgaagcaggucugcaucgccuggagcuccagcuccugccacgacgggaaggccuggcuccacgugugcaucaccggcgacgacaagaacgcgaccgccagcuucaucuacaacgggcggcugguggacuccguggucagcugguccaaggagauccugcgcacccaggagagcgagugcgugugcaucaacggcacgugcaccguggucaugaccgacggguccgccagcggcgaggccgacaccaagauccucuucaucgaggagggcaagaucgugcacacgagcacccuguccgggagcgcgcagcacguggaggagugcuccugcuacccccgguaccccggcguccgcugcgugugccgggacaacuggaaggggagcaaccgcccgaucguggacaucaacaucaaggaccacuccaucgucagcuccuacgugugcagcggccuggugggcgacacgccccggaagaacgacuccagcuccagcucccacugccucgaccccaacaacgaggagggcgggcacggggucaagggcugggccuucgacgacgggaacgacguguggaugggccgcaccaucagcgagaagucccggcugggcuacgagaccuucaaggucaucgagggguggagcaaccccaaguccaagcugcagaucaaccgccaggugaucguggaccggggcaaccgcagcggguacuccggcaucuucagcgucgagggcaagagcugcaucaaccggugcuucuacguggagcucauccgcgggcggaaggaggagaccgaggugcuguggaccuccaacagcaucgucguguucugcggcaccuccgggacguacggcaccgggagcuggccggacggcgccgacaucaaccugaugcccaucuga

SEQ ID NO: 83394 - RNA, 1410 nt, Artificial Sequence; identical to SEQ ID NO: 80623
  derived and/or modified CDS sequence (opt1) from neuraminidase__InfluenzaA__ADL39183

SEQ ID NO: 83395 - RNA, 1413 nt, Artificial Sequence; identical to SEQ ID NO: 82954
  derived and/or modified CDS sequence (opt1) from neuraminidase__InfluenzaA__ADL39194

SEQ ID NO: 83396 - RNA, 1410 nt, Artificial Sequence; identical to SEQ ID NO: 80623
  derived and/or modified CDS sequence (opt1) from neuraminidase__InfluenzaA__ADL39205

SEQ ID NO: 83397 - RNA, 1413 nt, Artificial Sequence; identical to SEQ ID NO: 81485
  derived and/or modified CDS sequence (opt1) from neuraminidase__InfluenzaA__ADL39227

SEQ ID NO: 83398 - RNA, 1413 nt, Artificial Sequence; identical to SEQ ID NO: 82954
  derived and/or modified CDS sequence (opt1) from neuraminidase__InfluenzaA__ADL39238

SEQ ID NO: 83399 - RNA, 1413 nt, Artificial Sequence; identical to SEQ ID NO: 82954
  derived and/or modified CDS sequence (opt1) from neuraminidase__InfluenzaA__ADL39249

SEQ ID NO: 83400 - RNA, 1413 nt, Artificial Sequence; identical to SEQ ID NO: 81485
  derived and/or modified CDS sequence (opt1) from neuraminidase__InfluenzaA__ADL39260

SEQ ID NO: 83401 - RNA, 1410 nt, Artificial Sequence
  derived and/or modified CDS sequence (opt1) from neuraminidase__InfluenzaA__ADL39282
augaaccccaaccagaagaucaucaccaucggcagcgugucccugaccaucagcacgaucugcuucuucaugcagaucgccauccucaucaccaccgucacccugcacuucaagcaguacgaguucaacuccccgcccaacaaccaggugaugcugugcgagcccacgaucaucgagaagaacaucaccgagaucguguaccucaccaacaccacgaucgagaaggagaucugcccccgccuggccgaguaccggaacuggagcaagccgcagugcgacaucaccggguucgcgcccuucuccaaggacaacagcauccgccuguccgccggcggggacaucugggucacccgggagcccuacgugagcugcgaccccgacaagugcuaccaguucgcccucggccaggggaccacgcugaacaacgugcacuccaacaacaagguccgcgaccggaccccguaccgcacccugcucaugaacgagcugggcgugcccuuccaccugggcaccaagcaggucugcaucgccuggagcuccagcuccugccacgacgggaaggccuggcuccacgugugcaucacgggcgacgacaagaacgcgaccgccagcuucaucuacaacgggcggcugguggacuccguggucagcugguccaaggagauccugcgcacccaggagagcgagugcgugugcaucaacgggaccugcacgguggucaugaccgacggguccgccagcggcaaggccgacaccaagauccucuucaucgaggagggcaagaucgugcacaccagcacgcuguccgggagcgcgcagcacguggaggagugcuccugcuacccccgguaccccggcguccgcugcgugugccgggacaacuggaaggggagcaaccgcccgaucguggacaucaacaucaaggaccacuccaucgucagcuccuacgugugcagcggccuggugggcgacacgccccggaagaacgacuccagcuccagcucccacugccucgaccccaacaacgaggagggcggccacggggucaagggcugggccuucgacgacgggaacgacguguggaugggccgcaccaucagcgagaagucccggcugggcuacgagaccuucaaggucaucgagggguggagcaaccccaaguccaagcugcagaucaaccgccaggugaucguggaccggggcaaccgcagcggguacuccggcaucuucagcgucgagggcaagagcugcaucaaccggugcuucuacguggagcucauccgcgggcggaaggaggagaccgaggugcuguggaccuccaacagcaucgucguguucugcggcaccuccgggaccuacggcacggggagcuggccggacggcgccgacaucaaccugaugcccaucuga

SEQ ID NO: 83402 - RNA, 1413 nt, Artificial Sequence; identical to SEQ ID NO: 81485
  derived and/or modified CDS sequence (opt1) from neuraminidase__InfluenzaA__ADL39293

SEQ ID NO: 83403 - RNA, 1410 nt, Artificial Sequence
  derived and/or modified CDS sequence (opt1) from neuraminidase__InfluenzaA__ADL39304
augaaccccaaccagaagaucaucaccaucggcagcgugucccugaccaucagcacgaucugcuucuucaugcagaucgccauccucaucaccaccgucacccugcacuucaagcaguacgaguucaacuucccgcccaacaaccaggugaugcugugcgagcccacgaucaucgagcgcaacaucaccgagaucguguaccucaccaacaccacgaucgagaaggagaucugccccaagcuggccgaguaccggaacugguccaagccgcagugcgacaucaccggguucgcgcccuucagcaaggacaacuccauccgccugagcgccggcggggacaucugggucacccgggagcccuacguguccugcgaccccgacaagugcuaccaguucgcccucggccaggggaccacgcugaacaacgugcacagcaacaacaccguccgcgaccggaccccguaccgcacccugcucaugaacgagcugggcgugcccuuccaccugggcacgaagcaggucugcaucgccugguccagcuccagcugccacgacgggaaggccuggcuccacgugugcaucaccggcgacgacaagaacgcgaccgccuccuucaucuacaacgggcggcugguggacagcguggucuccuggagcaaggagauccugcgcacccaggaguccgagugcgugugcaucaacggcacgugcaccguggucaugaccgacgggagcgccuccggcaaggccgacaccaagauccucuucaucgaggagggcaagaucgugcacacgagcacccugagcggguccgcgcagcacguggaggagugcagcugcuacccccgguaccccggcguccgcugcgugugccgggacaacuggaagggguccaaccgcccgaucguggacaucaacaucaaggaccacagcaucgucuccagcuacgugugcuccggccuggugggcgacacgccccggaagaacgacagcuccagcuccagccacugccucgaccccaacaacgaggagggcgggcacggggucaagggcugggccuucgacgacgggaacgacguguggaugggccgcaccaucuccgagaagucccggcugggcuacgagaccuucaaggucaucgagggguggagcaaccccaagagcaagcugcagaucaaccgccaggugaucguggaccggggcaaccgcuccggguacagcggcaucuucuccgucgagggcaagagcugcaucaaccggugcuucuacguggagcucauccgcgggcggaaggaggagaccgaggugcuguggaccagcaacuccaucgucguguucugcggcaccagcgggacguacggcaccggguccuggccggacggcgccgacaucaaccugaugcccaucuga
